United States Patent Application Publication US 2015/0376612 A1 - sequence listing, part 30

SEQ ID NO: 73141 - DNA, 1440 bp, Homo sapiens
ctgatttgctaccctgtaccagagaaggacggcactgttctgagatcctactaggaccacgtggagggagggaagcagggaaggcagctcttcaaaggaaaggatgcttggagacagaacactggacttctttcttgcgagccttccccaacctccccaggagtcaagcgcttcctcctgggtgcttccggaagtcgtcattaatacctctcttccagcatgagttatggcaccactgtggtttttctgatgatgtgccttctcatccatccaattcaagttcccagcaggcagtgattttgtctgtctgccctccatatccaccctccaccctttccccactgctctcccatgtggatggcaccctggtgtcctgtgccctctggcttctgggggcatttggccaatgcggctcaccatcagcaggagatgagagctgagctcttggtctctctggcagcttccctacagggttcctgtgagctggtggcctcctgactaaaggcgacagcctctctgtcaggaagtcccccacatagcttcaggttctggaagcagctcccttccctcagccttgcccaccttgttctgctgttcgtggccctggagtctgcactatctccttagggttccctatactctgcccacactgaatcaatatgtcctttattaaactcttctcctacgacccaatcggggtgtgccctccaccaccctggttcctgcctggactgtggcacacagtgtcctgttcatcttcattgccccaggatccagctcagtgccttccacaccacaggtactgaataagctcatggattatggaatgattaaacatcagctcgatatggcagtattgagacctatatagaaaatggatcagagtagccgccttcaaaatttttttgaccaggtctcatagtaagaaatatttcataatgcaatgcagtaaacacatcataatcatatataactgaacaagaaatttcatgaaggaagactgagttttctatgtgcaatgccctgtggtcttttctatttcattctgctctatttcaattttcaaatgaaattcttattatggtccgctgcattgttttcacagcatgtgaaatgatagcaacccacaggttaggaagcacgagcctagtgatgtttagctttccctctaggttggagaatctgtgattgctgaagtagaattcgcaggcacaatgaatgaggatgcagtaatgtcgcagtgacgatgcatttagtgggagttgactttattgccttgaaaaagcaaaggagggcaggcgagggggctcatgcctgtagtctcagcactttgagaggctgaggcaggcagatcacttgaggtcaggagttcaagaccagtctggccaacatggcaaaaccccatcactgccaaaaatacaaaaaaattagccaagtgtg

SEQ ID NO: 73142 - DNA, 1079 bp, Homo sapiens
taaggactactgggctcattgggcccctccacactccagagctctcacttcctccttctcacgtggaggaagcagaggtggcagcaggaggacccaggtgactcctgcagggaacacaggctcatctcgctaaaactgtagccttctggaattcgctaactgtacatgtttgaaattcctgatgctcttcttcggccttacaaacctttcctttcagaggctgatcacatctcagttgtaaataatatttagcgtacctttgtgccttcactacacaaatctccagtgattgttttcatcagacagagcaaaccatgtgtagctccctcctggaccgttgggcccctctgccccaccatcaacaggcagattccaatcattcttcccactgtggctgagggacgcccttcgggtgaggatgaggggagggactgatgtcctgggctctgtggaggccccattcgggtgatgctggaggcagaagggggctttgatgagggaggagttggtcaggaatgcttgtcacgggcacagcaatgagtagcccatgcaggctgagagccctgcagaaatgggccggcccagtgtgtgcagagctgatcggtagggctttatgcctgtgctagtcagggttctccagagaaacagaaccaatgggatacatatacatatactgtacatatacatatacatatgcacgtatacacatatacacatatatacatatactatacaaatacatatacaaatacatatacatatactatatacaaatacttacacatatacatatactatactatacatatacaaatacatatacatatgcatatgtaagaggggaatataagaggggatctattatgggagttggctcatgtgattatagaggctgagaagtcccacgatctgctgtctgcaagctggaggaccacagaagctggtggggtaattcagcacgagtctgaaggcctgaaaacccagcgctctgacatccaaagtcaggagaagatggataaatcatctcaagcagagagagcgaactcttccttcctctgtctttgttctactctttgttc

SEQ ID NO: 73143 - DNA, 2272 bp, Homo sapiens
ggtttctgtgatgtcagcttaatcacgaaaagaggggggcggggtggagggaagaaaatgcggcaacatgttcggtaggaactggctgcagccggtgctgaaggaggcggctccgggcgagcgcggggcggggcctgggggcggggacgcggtgggcgcgctgtggcttggacgtccccgctgctggtctcagtcggggacccagcgcccggctctggcccagtctcaggaagccttacttgggcgtttctggccaacgtctgcagagaagcacagacttttacaaagcttgatcatttatacgttaaactcaagtattgtacagtcatgtttgtattcagatttccccaagtgtcattgaaccaactttaaaggtggaatatgtaaatagttagggagatccatgtaaaataatgtcttggaaactcaaaagagtccagaaaataccaaataatgagttaaaccttttctgtcttctttccaggatctagtgaaaagccatttgatgtatgcggtcagagaagaagtggaggtcctcaaagagcaaatcaaagaactaatagagaaaaattcccagctggagcaggagaacaatctgctgaagacactggccagtcctgagcagcttgcccagtttcaggcccagctgcagactggctccccccctgccaccacccagccacagggcaccacacagccccccgcccagccagcatcgcagggctcaggaccaaccgcatagctgcctatgcccccgcagaactggctgctgcgtgtgaactgaacagacggagaagatgtgctagggagaatctgcctccacagtcacccatttcattgctcgctgcgaaagagacgtgagactgacatatgccattatctcttttccagtattaaacactcatatgcttatggcttggagaaatttcttagttgggtgaattaaaggttaatccgagaattagcatggatataccgggacctcatgcagcttggcagatatctgagaaatggtttaattcatgctcaggagctgtgtgcctttccatcccttccggctccctacccctcacttccaagggttctctctcctgcttgcgcttagtgtcctacatggggttgtgaagcgatggagctcctcactggactcgcctctctcctctcctccccccaggaggaacttgaaaggagggtaaaaagactaaaatgagggggaacagagttcactgtacaaatttgacaactgtcaccaaaattcataaaaaacaatagtactgtgcctctttcttctcaaacaatggatgacacaaaactatgagagtgacaaaatggtgacaggtagctgggacctaggctatcttaccatgaaggttgttttgcttattgtatatttgtgtatgtagtgtaactattttgtacaatagaggactgtaactactatttaggttgtacagattgaaatttagttgtttcattggctgtctgaggaggtgtggacttttatatatagatctacataaaaactgctacatgacaaaaaccacacctaaagaaattttaagaatttggcacagttactcactttgtgtaatctgaaatctagctgctgaatacgctgaagtaaatccttgttcactgaagtctttcaattgagctggttgaatactttgaaaaatgctcagttctaactaatgaaatggatttcccagtaggggtttctgcatatcacctgtatagtagttatatgcatatgtttctgtgcatgttctctacacaattgtaaggtgtcactgtatttaactgttgcacttgtcaactttcaataaagcatataaatgttgataaacaagtgtttttcatatgaccctgttaacataatggcagtcatttccacaactgtttccaggtaaagttaacaatttgactagtaaaatcctgaagggcagtggaatgattggaaaagtaggggcgtgatttgactgcatgaagtaaaaggaaattgacacattgagttgttcagcaggtaagagaagagacagtggaggagtccagctcaattctaactactgtgtgacttggacaggttgcttcactcctggacggatgtaggggtttgaaagagatgatctcttacattcccctttggctttaaaattctaggagtccttgaaaatcttaattttttactgaactgagaggaagaaggagccttattctgtgtataattggaataagcagatctaggatcaaaagacggaagttggagaagctg

SEQ ID NO: 73144 - DNA, 1116 bp, Homo sapiens
cgaagcaatggcccagtgttttgaggccgccgtggaaacctccgaacccagcaccccactccctctgagcacggcccgcgccaggccagcccaccccacgagcgggatctggagaatgggggcggaggtgggggtggggggaggcggggaagcagggaagcgggaggacctggaagggagtagggggcggtcccagtggcgtgccggccaatcggcgcagctctttcctgcatatattttgcactaagactgggagtcctggtctagagctgagtggagcccggctgcggatctgggaagcgcctcttcacggcactgggatccgcatctgcctgggatcatcaagccctagaagctgggtttctttaaattagggctgccgttttctgtttctccctgggctgcggaaagccagaagattttatctagcttatacaaggctgctggtgttccctctttttttccacgagggtgtttttggctgcaattgcatgaaatcccaatggtgtagaccagtggcgatggatctaggagtttaccaactgagacatttttcaatttctttcttgtcatccttgctggggactgaaaacgcttctgtgagacttgataataggtaaatgtcggctaagatagtttctttaaatttattcgtgggatacttataataatacaggtgaaagatagccaggcgaattcctttgtccattgctgagagattatggtgacatggatgttgtttttcgaaatgttaaaaaaccttatttttgcaagtctggccagagaacaggctttccccacattatgtaatttagtcctttgtggcttactaaaatagggagatgcctggatattcgttagtaagagaggggctggcattttctggagggtgatacattacatagtgttaaataacattcaaaatatgatgctagcaatatcacaaaattgggagatcctttttatcttggaagcttaagataaattccatttatcgatgacctttttccctcctctttttcagctcctctggtgcaagtgtggtagctattgacaacaaaatcgagcaagctatggtatgtactgatgaaaaatcatttatactaaatgtgggca

SEQ ID NO: 73145 - DNA, 1098 bp, Homo sapiens
gggggtaaaaggaaggaaataatgagggccaaaaccaaggagcaaaggggagacagagagaaaagtgggatggattcaaagacattgcaacatagaactgaccgaactggcttgtgtgaggtaagggaggcaggatgactcacaggtttctggattatgtgaacaggtggaaggtgatgccattagccagaataaggctgtaggctaaggggagtaaactggttctggggtataacattgataggccttactaggcagtgggaaatacggttttggaactcaggtggggttgggcataagaaaatactggcataagaaaagttgttaggttagcagtaagtctccttgggagtggatgagattacctcagaaatccatataggcaagagatggtggagctgggcggccacacacactggggcagccgtttggcatagcaaagacacctgagttttctgtggatctagtggacactacagaaggtggctaggcttgaggcacttgcaagaaccttgaatgggagagtagcctctacccaacaaggagaccaagacagagaaagtgatttaactgtggagggagcggggaaatgaagagatcaggtcagctctccaatgccaggcaccctaaggtgccagcaaagagccagcaactgcgtcctttgagaaagctcatgtggatggcagcctcacgaaatgagccaatggacagtccgttagacagaaacagacagacggcagctgcaaccgtgacagaagcgggacactgcaacagtcagcacagagactctgcccctcggttcttccttcccacctccatgctagcgcactgctactgccaagagggagggacgcgtgtgagagccaaaaacagcctccactccaaggcgccagtaacagactgggttctttttttccttttcagggaaagagtgggcagagaagagagagctttgattctgacatgagagtcaaatttcaaaatgcaaagaacgaagtgtttaaaaaatggtaagtgactgtttaaatgaccaaaattaactggaaagcgatggaaatgggtcgacatgctagtaaggaagcctgctaccagagtgaa

SEQ ID NO: 73146 - DNA, 1170 bp, Homo sapiens
tcagcgagaccaacaacccacgggaaggaaccaattccagatacaattgctcagttattcagttgagtaagattgggtctgtcttatacagacttatgttgtctgcaccttgtactttttgagtattgagttctttactgcatatcaatggtctttggactttctttacggcttgctcaggtttcaacttgatgaattaccgtcttttttccagctttgaaaaactattgaaattgacgtctcttttatatttactctatccttatgcatttaaaactgggttctcatctctttagtggtgtgaggtagaaataaagataaatgagtgtgttcggtgcaccatgcttagtcagaagtagctttaaaaggctctgtaatagattccctatgcgattaattctcatggcttcttgaaactatccaaagcaagactcaaaaaagagctatcattgcatatctagtgcttaaattttgtagacagatgattctacaggaggacctgacttatttgtacttccagacagggaaagtttttattggaaagtgaaaagcatcccaaaataattcttgaagaaactagtttagaatataaagtggcatgtaatacctattgctattaagtgcagaacagtgtttcttaaatgcaccgtgtaccataatgatggtctcagtaagcatgtttctttaaaaaagagtctttcagaaaaccaagatagcaaaagtgagagagatctcttgtatcatacattggttactgcgcagtcctatgatgcatcatgctgtcttgactttgttgggtctcttgaatacagcatttccccttgctgttctccctgctggaagagttcttccatgactaatcccatcatctctcttaggtctttactcaaaactcattttctcagggagtccttctttgaaagctagctaaaatttcatcctctctgatctttcatatccctgcttctgttctttaatttgtctcctgggtacttgtccttatctcacatactgtatatgtacttatttgtcttgtttactttttcagccccagttgaatgtaagtttcaggaagacagagacttttgtccattttgttcatactgaatcccctgtgcctagaacagttcctgacacaaaatgggtgctcaatatatatttgttgaattt

SEQ ID NO: 73147 - DNA, 1049 bp, Homo sapiens
ggagtggggagagaccagagagcaggatcgggcccttccaagcctgtgggggaagtggggcttcctgggtccccgagagcacagggatgcccaggtctggaggtacggctgggcagctgcagctgtgcctgggagtgcaggcttctgtcctgctaacttggtagggggtggggctcccgcctgttcctggcccttgctgtctctctggagcctgcaatgcccgccgcgcctccccagctgcagccagcgtctttgcagtggctgctctagatgggctgctgttgccatcattatgaaatatgtattatcacttccattttactatgaataagtgatttttggaaatttgaattaggctctaactccagtgctcaaaatctgactctttaaaaagctgcactaaagtcagtactgatgaagatgttttataattgcatttatggacttaaatggctaaaacaacatcatagatgctttcaaaggttgtttggaaatgatgctttagttggaattaaaaaggaaaaggatcatactattaagagaacattaagaatttttgctgatagaatcacagtgagaaattaggaggatcagatttgatagaatatagtgactggaaaggcttcaaagatttcacctatctgtttcaaaagtgaaagtagatcctagaacttgttctacttttatatgagcagactttgaaatccttggaaacttagttttctaattctgtccaagaatatgaaacagtgtcagttgacagatctgatgtatgtgtaatagataactatttcatcagaattgaaagtttgacccaatatatagccaccttcttcagttagcttctgtatcactgctggaaattctttttgcagttttcttaggtgagctctctgcttcaccctacaaccgaaggctttggaaatcatagagatttttgaaactactaaaccagccactgctagcacaaaaggagcaaattctgcaggatttagcgatttcctttttatataaatagtgctttctctttgattctgagaaaaagtatt

SEQ ID NO: 73148 - DNA, 1010 bp, Homo sapiens
taatggagaacttttataagagctccagagaagccacaggaaataactgataaattagctccacctgaaatggatattagggcatcgtcaattgactcttctcagttctgcttggtagtagaacttttttttaaacttcatagtagacgagtaagtggaactttcatgacttaaatagatagataaatttcactagcttgtacttctaggattgggtacattttcctcttggcatggtactatgtgttttcaagtaaaaataatacaattcaagtctgacaaactggctcagtgaattatacaagattcgtgctttaaaacacagtctacaccctccctgttgctttggggcagagtttttgagtaattggacatctaaaactaactctgaacttcaagattaccagaaagatcagatgcaagagcttaatttgtgttaagaacatcctcctacatattctgccaaaagtttaagagctattagtaaaagcagctcatttgaagtagtatgagatttgaacatttaactccaagatagctagaattttattaaaacggatttaaagaattagcccacaatttaaatacttttctcattttaaatgtggcttaagatgtatttgtctttatgaaggaattttggattaaaaactgtactgtagttgaatttaggaaagggaagccggagatgggtaggcggtgggtacttatagatcttgaatgcctggttataaagattgggggcttaccctgtaggtaccctgtaatcattaacagacttgtaattgcatgggtgacaggcaggaaatgttttaagaaaattagcctgaaagcgcagggtgcatttgcttggatccagctggagagagattggagccagatggaccagttgagatgatatggcaatcaataatctggaagttttatgatataaatctgaattagtgtgatgtcagtaggaatacagaaagaatttaaaagcctttaagatattattagggcagaattga

SEQ ID NO: 73149 - DNA, 1047 bp, Homo sapiens
cctccctttcttcatctcctctccctccttcttccctccattcttatttttaacccttccttcatcctttctcttcctcttctccttccttccattcttgcatccttattgttttttcacctctgacataagtgtgtcaaaagtggggaaaaccctcactagattttcctgattttgggatcaagacgaaatgatctgtagaggtcttatgttattaacttgttgcactctaagaaaacctaaagaaaatcacccatgccttttaaaatgcttgaaacataacaaatcactatattcatagtatttttgttctctttgaagtaatgagtcatcataaataaattggaccactgcccctttaagtagaaactgccttaggggacagatggaattttgggactacttcctgaagcacttgtttgtccaccaggagtgtcagttgggcctgggtgggaagagaggcccaagaaagccaccatagtctgtagcgtgaagcttttcctatagtctagtgataatcctgctgtgagtacctcactgtaattcaaataattgtggaaggaattgtctctcagttgtcctaagtcctgcctagtaccttgaaaagcagttggtttctaaatactcagcttggagggtgaaataaggttcagttcagccattttagttctttgctttgtttttcccagctggaaaaattttaaagctattttaaaaatcacttggaggattatttggagatcatgatagaaattttttactggttaactgagatgaattgtatagtccttttttagcttaagatctttaaacatttagttgcataacagctttttaatttgttggactcctcagttgaagccattacaaattggcttaaaattgtaaaagattgagtattatattgagcctttctatcagaaaacattagcttaattagtctataattaaagatgatgttagctgtactttagtttgtcttaggaatagaggtcctcaaattatatgtaaaccatcagttgcatggttcttttgaaatgtggattt

SEQ ID NO: 73150 - DNA, 1038 bp, Homo sapiens
aattactaactatagaaaacagccatcataaaatttccctttgactcataattgtctatgatttttaaattaaaggttgacttcaagtataagatttatttttcataattcaagtgtcagatcatgcagtttatgggcactcttgataactttctttttttaaaatagagcacatcatccctgtttttgtatattgatattttttattagataataatcaacaaaaagaaaaaaatcacttcattattctgtttatttcaagttacaaataatttatataattgttgactgatacagtattaatgattctgttttataataaacataatgtatttttatatttaaattcctggacacaacacaagtttccctacagtttgtatatagcttatataactattaaagtagaaagttggatagactgggagtaatacttaatttatgtatatgtcaataatcacatctcagctaatatttgaaaactccatatcccttaagatgtaaacagttttcattagaatattagtttttattaattataatccatgtagcccccacctaatgtgggataccagtgcctcttccaaatattttttggagtccccagagtatattatatggttcatgcagagctctgggtgtcaaccacatggcattaattttaatttttttcttctggccatgtactaaggttttgtcattttcactggagactgccacttttgttgggctttgttgttgatctttcctttggccattgcagggactggctgagctgggtcacttagtgctttgtaggactttttggtggagctatctagtctgggagttttatttgaggaaatatttttcactattatattgatttaattttatatgatggcaatataggactattcagactttatatctctttgtttcagtaagttatattttttctatttgaccatttaatctatatctcttaaattatggttacatatttttttcgttcctgatactgcttatttctgccttctctttttttcttgattaaat

SEQ ID NO: 73151 - DNA, 1064 bp, Homo sapiens
gattaaaatttgctgttgatgttgatatgtgaaactttaatgcattgtagattgtggtaatccgatgtttcaactttaagtatttgacatcatttggggtgttagttttatgattttcaagaaatgaaaaacattatcattggggcagacatttcattcaaattacttctatcagtttgcttgaaaattttttttttttttttttttttgagacagtctccctctgtcacccaggctggagtgcagtggtacgatcactgctcactgcaacctccacctcccaggctcaggtgatcctcccacctcagcctctcaaatagctgggaacacaggcgcaagccaccacgtccacctaatttttctatttcttgtagagacagggtttcatcatgtttcccaggctgttcttgaactcctgtgattctcttgccttggcctctcaaagtgctgggattacaggcatgagctactgggcccacccagtgacttttaagagagtcacttgagacttttaagagagacttaagaatgctctaaaactagactacaggtgaaatgtagagtgatatttggtttccggggaggggcgggtggggaaggaagaaatattcattaaatacaggcttgctttttctggcttcaagtcaagtcaagtagttttttttttttttttcatttgtacattttacaggggctttgatgggtctgacaaagaagcacttgcaatgttttggggtttctgttatgaaattaacacatagctcaaattcccattaagtaatcatgacttaaaatagagtccagctatatagtcttgcatatttcagagttaagaatgtaatctttatcttttattgttaatattctctaaggtttatttactgtattattttgtcatgagtttatttaaaatattttttaatattaaagtattttaagtatttctagttgtaataaaaatgtagatatattcaagaaattataaaattaggttttgtaattgatcggtattcaagtaaaaggaggaaagctatcaagtagtcatgatgaaatattcatcaaat

SEQ ID NO: 73152 - DNA, 1090 bp, Homo sapiens
gaggacagagccaaagattcgggagaatgaatgcaaacatggggagttggggaagcaaaactgaagggattgaggcaagagtgaaaattctttgaagtcttgggaatcttctacttcatttcttaatgcggttttgttttcatatgaaatactttacctaatgaataaaattgacattacagcaagctgtaaattttgtttatattgcagcttcatctattttcagtatcttcttcagtctgaggggttgcaattctatagtattttgtgtactttaaatccatctcctgtgttagctatagggggctagcatcaatacatacatattagtctttgcacattaaaaaaaaaaagtaaagtaagatatttgctttgcaaaactttgaaaacatctccttagtttgaaaacatcttccttagtccttcagtataatgtattactctgacgccttctcagacctccctaatcttggcctttcgctcctttttgagccttcctcattttgaaccttgcgctactgtagcaacgttattcttacctctgctgcttttatctcctttcttggctgttaacccttcctcccataaggtacctgtaggtataaaaggttatctccttagttctgttcctttctgtctacttactcctgaagcatttgctgtagttcttaaagtctaaactctgcaattgactccaaatctttatcttcaacctgggcctctttcccattgccctgtgctgagatagctgccttatatttatatgtgctccctctcctcagtttatagcttctattgatgattgtcccaattttccagtactccaggctaaaagcctaggacctttgactccattttctcatgcctctgacatgcttgttcctgagtccccagatacacagcaggcactgtgtacacattcatcccattgtgaaatctcagattctgtagtgtcttgcctttttgttcttctcctctctatccccattatcaccactgtagtccaggctgtatgacctctttaaattatctgtggagacaccttactggtcacccagtgtccaagcccacttccatcttttccatactc

SEQ ID NO: 73153 - DNA, 1007 bp, Homo sapiens
gatgttgatggtgggagctgtcatcttaagtgataattaaagctgtgagaataaatgcgattgccctgaaaatgtgtgtagaatgagaatgagaaaagcagaaggttgaaggtacaacttttgggagcattggcatttaaaggggatggaagatcctaattctgccctttgcttgggtagctcctgtttatctaaattgctctccaagctcttcacttaaccaaatataatcaggccctccttcagtgtctgaattaaaacttaccttcatgaatccatttctactacttcctctaaagattgttttaaaaagcattcattggtggcagcatttaaaaaaaatcataaattctacttcagagattcccaggttttttggcttggttgtctgattcctgattgtttaacaacaacaaaaaagtgtgtgtgtgtgtgtgtgtgtgtgtgtgtgtatttctttttattcagaaagctgtcatttagatggataggtgtttttggattgtcatattgaacaattactatatgtcaattagttatatgccagatgttagcgataaataaaacttggctcctgatcttagagtaccaacaacttaattgagatgatagacagctgggtggatgttttatgacgttcatagctttcttttcccaaatataagttagaagtaaacttcttcctttcccactattactgtgacatgagctcagctatagaaaagcagaagaattacaggcaaaggtttttgtttatgttgtttgaaaattttttttggtttttttttgaaacaggttctcactctgttgcccagtctgaagtgtagtggtgtgatcatggtcactgcagctgcaacctcccgggctcaagcaatcctccagcctctcagcctcctgagtagctgggattacaggtgcgcaccaccatgcccggctaatattttgtatttttttgtagagatagggttttgccgtgttgcccaggatggtctccctgggcttaagtg

SEQ ID NO: 73154 - DNA, 1010 bp, Homo sapiens
aattggcactaaatccactgtttcaggcctttcaaaactgaaaaattacattgtgtttctaacattgaaaataaagtttcaagatagttttaattaatttggatataagtatagaaggtttgaccactttcagaactctcaggtgattttgacttgtgatcatctctgggaagggatatttagtgatagcctgaattttaaaaacctcaacttgaacactgggagttgatgggagaccatctgattaagggatggactaagtaagtgtaccagtgtcagtttgcctattaaatacaatcaaagcgcaatgtctttccttttaagataaaaaaccagtaatttggataatattttaattcagcaccaagtagattgtttctcacacctgtgttggaagttactggtttagagtatggtttaaaatttttttctctcataggcctttaaaattaaaataatttgcatgttaattaaattccagccttaatagggttttccatcaccttaattcccacatttgtttttcatttccaacatctttgaacttttattgaataaaataattgtacaatcttagataaatattaaaccaaaatttgatgaaagtaatactgcattcatgatactttgctagctagatactataattagaactgaatgaaataaacaacctgtttttaatttttcccttttttgagggatgacacagtttgcctaattagaaataccttttgtgactgtcgtttgtttacctctattttgcagcagcatagcacttctgagatgtttaacttcttttttcatcaaaattattttgaacatgctgacatatctttgagatttaattcctagtcatttaaagaaaataaggggctaggggtggtggctcacttctgtaatcccaacacttggaggccaacgctggaggatcacttgagtccaggagtttgagaccagcctggacaacatagagacctgtctctacaaaaaaaaaaaaagttagctgggcg

SEQ ID NO: 73155 - DNA, 1029 bp, Homo sapiens
caggattttgactgggattgcactgaatctaaagatcaagttgggaagaattgacatcttagcattattgagtattcctatctataaacatggaatatctctccattttttcagatctttgatttttgattagcattttttagctttttccttatatagaccttatatgagatcctattttgttagatttataccaaagtgtttaatttcttggtgttaatgtaaatggtgttttaatttccaattccaattgttcattgctggtgtatgggaaagcaattgacttgtgtactaaccttatattcttcaaccttgctataggtgttagttgcaggaatcttttccttgattccttgcggttttcaacatacacaatcatatcatctgcaaacaagttttatttgttccttttcaatctgcatacctttcattctgtttgcttattgcactagctaggacttcccagtataatgttgaattggggtggtgagaggagacatccttgtcttgttcccaatattaggggaaagcatccttcttcaccaacaagaaagacatttctcaacagtaagtgagatgttcactgtaggtttttttttgttgatactctttatcaggttgagggagtttccctctcttcctagtttgcccagagtttttatgaatggatgttggatttttgtcatgtgctttttctgcatttattgataggatcacatgatttttctttagcctattgatgtagtagattttatagattgacttttgaatgtcaaaccagcctcgtatatatggaaaaatctcacttggtcatggtgtagaattttttttatacattgttggatttgatttgtattttgtcaaggatttttgcatcaatattaatgagagattagtctgtaatttgcctttctagtattatctttttctagttctgttacaaaggcctcacagaatgagctaggaattgtttactgtttctgctttctaaagagattatagagaattggtatcatatcatgagatacc

SEQ ID NO: 73156 - DNA, 1099 bp, Homo sapiens
ctttgctaagaagttgattcagaatttgcttccatgcctttttttttttttttaattttatttgatacagagtcttactcttacctaagctggagtgcagtggcaagatctcagctcactgcaacatctgcctcctgggttcaagtggttctcgcctcagcctcgtgagtagctgggattacaggcacggaccaccatgcccagctaattttttgtacttctagtagagatgaggtttcaccatgttggccaggctggtctcgaactcctgacctcaagtgatccatccacctcagcctcccaaagtattgggattacaggcagcggccatcatgcctggctaatcatgccctcaagtgaaccaccatgcctggcccccgctcccatgccatttttacttgaaaattactttagaattctctagtttagcacccttattttacatgcaagataattggtatccaaaaataccacatacgtttctaataccacactcttttaaacaaattgtctgtagtactcaagtctcttcactaccagatgtaccactttactacttactgctgcttgttgatcctagtttgagacgacagagcaagtctgatccctttcaaatgtgacagccttcaagatagctattaatttcccatcaattccaagcccaagtcttctacatattaagtatccccatattcttacctcttattcatgtagcatgcttttgagatccttaaagattttgtagatcgactgggtgtggtggctcacgcctgtaatcccagcacttcgggaggctgaggcaggcggatcacaggtcaggagatcgagaccatcctggctaacacggtgaaaccccgtctgtactaaaaatattaaaaaaatagccgggcatggtggcgtgcgcctatagtcccagctactcgggaggctgaggcaggagaatggcgaggacctgggaggcggagcttgcagtgagccgaggtggtgccactgcactccagcctgggcgacagagcaagactccgtctcaaaaaaaaagattttgtagatcttctgtgagcgcactgcagcttctgttagtgtgtgacaccaaaccagc

SEQ ID NO: 73157 - DNA, 5597 bp, Homo sapiens
tatatttagaataagatctgaaatttaatagggatgtattactctgtaccacaaagcataattgatctgttttccaaaggcaacactgttaaaatttatcctgcagtccctgtaactttaaatatgtatctgcctatcttattctcctttcagcttttccttgatcagatgctatgtgctttgaacttccttctcttatttattcctataataaagctaactattttctagtatctttgccatcatctataatttgggtatatcttactgctttaatttctatgttatagccattaatgattattcctggttcttcttgacccaaaagaaaatgattatgcattttaaaaaggattttgagtctgtattgcctatatccactattctgccttcccagttttaaagctgagtgcttgaagaataaatcttttcagtgacagtagtcataagctttcataaaatataggcttagctttgtattgctataatatgggcctatagtgtgattaattctttaagttaatgaagacttgaactcagagaagaaattcagcttcttagactttcccaaagtttagtagtattcctgttaatatacttggttttttctgtttctacttttcagtccatcttcttttctttgacagaagaattaactgggactcctcctttgatatatctgaggttgtgtgccttttccctgtcccttaaagacaactatgatcttgtttccagtcataatttatcatttttgatttggtcttccactcagagttgagtggtttatcacagagtgtgttatggcttagaccaatacaggtcccttcttaatagttactgaggaattaatcatttgtggtgacagacttctaaaattcaaattaagaaggcactaaagaaagtatgcccaaaggtagctcctttttatcctgaggattaagccattacaaactcaaatgaccagagaatgtaatttcttaataagaatttttccttaaatctatattcagctctctatttcagtgcttctctcctaccagaggtgcaaggagtgatcctagaaccacagatacagccaagaccacggagagcttttgacgtcaggggtccactttctccactgaacccttggagacagaatatccagcttctggagagagtgggaaaggataataaacaagtgggtgctttccattatttacttgggttaatttatagattggagtgtccttccattgcccatttaattctgtggtaaactccttgggttcatttaagaaccaggtgggactgcaatctgttttgtttttctgagaatgctaactagtactcattcaaaaatgagacctaaaatttaattttctctccagataattaaagcagtggatgatttggggcacatgatttgacgaatgcctatgtagtccacaggaattttaaaacgggaatatctacccattttggcctttgtggtattagtggacttctaagtgctcttttatattcaagtaatttaaaaggttctgtatttcatctttgggcaaactggacatttgaagtctaatttatacagtcacatgtccaagtgttatcctacactgttagtgagaaccttttggtcttcttcctacctcaaatgttaggacttcatattagatcttttaaaagatgcaatgatagtactattatggttttactgtcaattctaggctccattctttaataaaacataagtatgaatgaatgtaagtttcaggatacagtatccctgaaagctatgtttaatatactcaaaagtcattttctagtccctaggaataaatatttatggtaaaagaaccctttcctagatttcccccatggcattaagatggttttctcttagtttctttgatgccaagggtaggatttgattccaggaagttcttatcacctacaatgggtagaatgtgaacttgttacctttggcaagttttcatttttccttggtggattccttctgtgactccaggtatcttgataatgggagactggtttatttgttctttaattgcccagatttctttcaactggtaaaacatcatacttcttcagcaaaaggaattcttctagcagagccttcatggatgatatctgtcacacatgccagcacctgcagtttggaaggcagtggtgaatggatccatgcaatatgtctagaagacacaaggatgagccagccacctgatcttgtcatttataaacttttaagaattactctggtttacttttggtctgaaaatggaaaggcccaaataatgaaataatcttttcagattggaattttacatggccatgaaaatatttctttctattcagaagactgaaatagaggaagcttgagagactcctttcttttaaaagcggctctctgtatctgtttcatttaaaacatttgtgggattgaaaatcaccttaatgaagtaggcaaacatttttttaagtagtagaggaagtccagaaaacttaatgaaatggttttttttgttgcctgacactgaaagtaactagtaaataaagggtgaacttcttaattattcgaaaactgcttttaatattaggatatactcttttagctcatcttcgctggtcttgaggcttattataattgtcaaatcaacaaagtttctaatagagaagtagaagaaatatcttttgagatgtaagtagcttggtctgtcttctaaagtaatacatacctgttaaacttgaggtatttttttcatactgaaggcattctaaagtttggtactgtcacaaaacagtagtttacagagcagaagcacttagtattagaataagcctgtaggtgtgaaggaataagtgttgcaaaatagttatttatccaagctgtcaattaattgattgaagtagttatcaaaatgtttctgtttctttctttggtatctattaactggtcagtcaaaagctattaaagaatgtttttaaagtcacctaatgctgccagtttgttaaatttggtatacattttaagaatagacattctagagttattaatatggaagcagctaaaatgttttaggaaatctcaaaagttttagaagccacatttgctaaagcataacctgcacttagtctttcttggctatctgtatttttttctcattaattataaataaatttttgttaagtatagtatttaaaagtaagtttaaaggttcaatttgaactgaaatttccccagagagctttgaattcccataagtgattacagcttttactcccgacttgtttttagtaaatgttaataagacaattggtttacaaacacatataaattaaaaaaaacaactgtccatcgttttaggaagaactgaaggaactaaaaatgatatttgcttggaaattaagttagttgaactctttgaaccacagtagaaaccgctttgtgtggcctgtgagattataagctttttgtttcagctttgaagatgaaaagtgatttaatctcttaatctcatgctttgattgaattttagctctgttccttaaaatatgcaaaaggaaatgtaagtgcatttctagtcacctcatgccactacaagctatttatttaaaagtgaaactttttgtatattattgtgaactgatttgtttatttaaacttttattttggtgaatttacctttgagtttttttatattttatgtcacaaaatgaagtcctatatttttcagtgtttatgaatattaatataaactatttttttctagaatgactaattgtgtaatatctgtattatgtgataatttgaaatctaataaatattttctccatgaaaaaaatgcacttactgataatggcttatttctgtttcaggagtagaaagtgaaaactgcaacagtatttttaaatgtattttaattttctgtgtctttctctaaatatttctgaatatgtattctttctgtgtgttagttttttttgtttttttttttttttttttttttttttttttttcagaaaaatacttttttgaactgttaaggtgattcttcgtgggggtcaccagtgaatgtatgaaataggtgatctgttttgtatgtttttgcattttcctgattagcatcatctttcctgattagtttccagaattggacttttttagatgcaatttttgtacctcaattttgcaaaccattaaaactctcttgagttaatactgtaaatatcaagagtaatttgaccaagtcttttaatgctagattgatcaaaatataactcttacagaatagcatccaaaaacagttcctttacccagaagaacatttgaaaataatggctgattagagaactatgcaattcataagaactgttgaaatgaaaaatgttttgtattttagtgttctacttgcgcaaataattgtagtgggagaaatcttggcctcatagtctcttgtttttaaatcttatcaagacagcatggagaagggtaatatttagttttattgattcttgtttttatagctacataattttacttaattgaagccacaggaacaatttaccttttctatgcaggatttgcttagaagcaagaggatttcctttcagatttgaagaaaagttattgaagaaatggacccccaaaattaaaaataacattaagatggggtcctaggcaagaagtaaaaattgaattaatgacaattggtggattaaaatgtaataatttggctccccaaagaaattaatactctgaaagaaatcaaatttctaaaaggcagttatgatttagaatagctgttgtattgggggtgggggaaaggaagctaacattcttggctttattaacctggtaagtttggaaaaaaagtaaagattctgtgcacaaaattttgtttttagaattaaagctattaaaaggtttacagacacagtatatttcaatgaaaggctgtattttatttgaatataaaaaaaatctataagcttttcctatatgtgtatgaaagggtaggttgggcatggaagttaaaatacaccctgcattggaaacctgaaaaatattgcaaagataatggtgacatgagtttttaaaaagtaatttttaaaacatagactctcctctacatcatcagtaaccttcaaaataaaaatactacagaatgttgaatttggcttaccattgtatttttgaggtataggaacataggcttatggtttcaccatcactgacgaggttaactatagtataaaaatctgttttgattgttctttagtaaggaaacaaatggttttttttgtttgtttgtttgtttgttttttgtagcttctgtttaaaaaaacatgacaagcagtgtgactgcaaagtcctgactttataggttattgtaaatatgtacacagatcttattttctttgccatattgaaatactctgacaaatgtcagtgcttagatgtcctaagcaatttttttactttatttttatccaggtatttttgtttccctttaaaaatatttcatagtaatttagtcctaaaatgtgaaagacttgtttcaaaattcagcacttaggtactctggagtgttttt

SEQ ID NO: 73158 - DNA, 2181 bp, Homo sapiens
tctagagataaaagacacactgcttctgttaagcatgttctttccttttcttcttactgccagctaggactgttttggatacttagaggaatttgtgaagaatttgttttctttgtagaagtgccttagaaccagtatgaatgggtgataataggtaaagaataaaaagatacttccaatgtatgtagaatgtccaggttaatgaataatcggtaaatttataaaccattaagttcaactttagatcagtcagttgtagcacatttgagtagaaatcagtctttgtagaaacatagtgccttctatttcatagcttaaataggtgtagccttcccttatgcttagatattagaaatgcttaaaactaataagctgtgtatgctcatttcataatttaatattgagaacaaatattgcaaacagcctaatttgatgtacttctcataaaattttctcagtggtatttatatataaaatactgcttctgatttgaatatacatggattttcagtaagaatctttaaaaatttcattatttacagaaaatgttaaaatgatttcattgatgtactggtaggttaatagatctataacagccatttgaggtagcagcttagcattgctgattttgttagctttggtttgaaattttttctctagtggttgaaatgtaagtcttgcagtgtaataaatatttctccctcttaaaatatcacatagaagaatgttgtccactaaaatagaattaggtaagggcttcctgtatcatttttaggagcttccatcaataatattctcacaaaggctgcactttctttttcaaataatgaccccattttgaaagcatctttacattttttatataaatgatacattatcaaattcagagtcttcataaattattaactcttaaagcaagctctctttaccagctctcctcagtgatttcaaaataatttctacttagagaaatctgcttattcatttctgagtatgagtgttgaattattatgttttggtacttcaggcaaaataaagaagttatattctgaaagcgttctgacttaggggaagtttgtaaagattcattttctccagtgagctctcatatttaacttgttgtgtaacttaaccttcggacatttggttttttaaatctaagtttgttgtactttttatctatattatactgtggtgtgtgataaataaagatttggatgcatttaacgtaaagttcctgttgtaggagaaattctaaatttagaccaatattaatctgagcaagatctggttttttgtgagttgtttttcattttcaaagtgaagtaggcctgtaaacttaaaaatgaaaattacgaggtgtatttcctatatcaaaatgtacctctttctttttgcctgtattttcactcacctatatattattatggattagtattcaagaactgaaggaaaactattggaaagttaactattgaaaacgactggaaaggaaactaaaggaaatttggaaaatcgtatcttaattataatttctgaataggttttaaactattttaaagtagttaagttttacttagatttcattaatttagaaatcttagataattttcatggttgatattgagctattactatatgaaaaagaataatttgtcaaggaaattgattagaaaaggctagaggatgattgtttaataaataatttttaaagcacttttatagcacctatttgcaccatataggtactgtgaaaatgtatgtagatagctccaacgtactgattttaagcctttttcctctgttaaagagccactccttaacaactccagctgtggaatgctttgttaatctactagggtgttttagactcttgaaactacttaattagattgcatttgttaagattcagcattcagatcctttttctaatctgtgctcctttcttcttatcatccatcatatacctcctcattgtgattatactgtaaaatactttttaaagcctactgatctaaagatacagtcttttaaatactaaaaggcttttggacttaaaatctgttggaagcttaaattgaaaaaatagctgccactttaggtgcataaagtactttcataattatttgatacctcttgttagatggcagtttcaccttcttctttccagtttcttttttc

SEQ ID NO: 73159 - DNA, 1026 bp, Homo sapiens
ggcatctcatcttatttctgctacctcttcattgtatgacctttgtaaatgagttaacttttttaagcctgatttccatagctgttatgtgcaggtaatagctacccgtgctgttgttgtgaggataaaaggagaaaggcatataatgcacctggctcagttcttgatagttctgtaaatcgatggctgtttttattactgtgctaagtaagagtgattcctttcttaagcactgtaagttaaaatggaaagcttgtttacttgttcagaggcgttatacataattttctaaagcagcggttctgtacctttgtgacatttttggtgcagtctttctcacctggggtccataagacaatccctacaggaaaagagtgcctactctcttagttctaagaatggcatatatctagcaccatcattctaaatgcataagaaaatagcgaattcattacatacagtggagcgatcagggattaattctttcgctgactctcatgctgccaggacagtattatatgtgattattgagcagttctttgaaattcctaaattcacaaaaacataagttgttgtaaaagcaacctttccctttttttaaatgggggtggggaatacttggaagaaatacagcgtcatgtagcagtttgttaatactctaaaatagaaccattaccccaattaagtgattctcaactttttcattctgaaagattgttttagatgggcattatgccctgaagaccatctcttccatgctcagtcccatatgggcccgaaaactatctccttagaatgaatgggattaagctgtttgttttaagtaagattataagtcaatatctggttttttaagtttcaaacattcattgaactggattttgaaatctataaagtttcaaaactagtttttttctaatactgattctaaaagtgaaaaaaaaaaatagtattagagcccagaaatttgggggaatgctttttgtctgtatattttggaagttgacattacattttagtttattg

SEQ ID NO: 73160 - DNA, 1020 bp, Homo sapiens
acgacacccagcttatttttgtatttttagtagagacagagttcactgttggccagtctggtctcaaattcctgaggtcaggtgatccatcctccttggcctcccaaagtgctgagattacaggcatgacgcaccacgcccgacctacgtatttcttattagtcttttgttgttgttgtttgcttacgttttctggaaaaaaaaaaattcacaagggcctaagaataacattctggcatttttgcaagacacttgtgattattgaatcttcttaagagataatattttaaaactggattaccttttataaaatggacaggctaagatcaactttggattttttttttttttttaatttagaggtctagttatctttccagttgtattcagactcttagcccttagggatctacaagtggcttattaggaaattgatccaatatgtagaaacaaaagcttctaacaagtggacacattggcctaacaaaaaccaagttatactatatttgagttcatgaatgtctgacttaaatgccattagtaccattcattcagtaatctgaattaggcttaacacatgagaaggggagaggagacaagagaaatagggagttgaagaccattagaaggagtggaagagaaggaggggatttggtgataataatttggtaaacatttggtgcagtttgcggtcagggtcactgtgtcctcattgcctgcatcagcgaatttatctatataaaaattattttagaaaaattacctaaggtagtttaagcaattgtcttttagcctagaaggtttttaacagtacctcttttttttttttttttttttttttgttcctggtattgggatgatttatttacttcaaaaatactcattcaatatttattgaatgcttgttacatacctagcactgaacaaagatactaagggtatgaagaaaaaaaaagacatggttttggtctgcaacagtttcgtctagtacactcaagcatcataagatcttgatttatc

SEQ ID NO: 73161 - DNA, 1048 bp, Homo sapiens
agtcagaatcatattcttaaaatggaaatctgttcaggtaacttacttggccagaaccccttttaagcctttccatttattttaaggtaatttctttctgtctttgcttactgatggcttcatcatgcttctttctcccaactttcttcattccagttgtacttgacctttcagaaagtttttcagttttcatccattcttcttctaggcctttgcacatgctgttattttagcctgaatatcccctatgccatctcactttcattccactttaaagctaaactcactttttgagaggctgcctctgacgtaccaatctaaacttaggttgtttgttaataactgtttaatagcaccttgttcttttcttttataatgcttattacagttcgtaattagattttgttttcatgattatctgatgattttaagcttcttgaataggaatggggatgtttgatgtgctgcatatattcaaagcctatttcaatgcctattagataaaatctgcttaatcaagaaaatatactgttaatattgtcataagaaatctgcttaatcaagaaaatatactattaatattgtcataagaaaaaccaaggagaacttctatttttaaaaacagaaagataaagttctttatgatcatgtgataacactattttctcctttaagagagaattaactgatttactttttgctgtgtttgtgagccaaaaaaaccaatgcttaggtataatcaaatatggttcttgtccccaaggagtgtataatattataagaagatatgtatgcatgtggcagttatttggcaatataagggctaagtaatagttttaagcaacatgaaatattaaataaaataatcagaaacttaagagttggaaatcttgatctcattcaacctatgaaggaacaagttttggttaagtgaattcgccgagacagttttacaaattgtttcttagactgtacctggaacttgggttttcaaaatgacataagcaaagttcacagatggtgtagatttgacctttggtaggtcaga

SEQ ID NO: 73162 - DNA, 1273 bp, Homo sapiens
tcattaaaaaaatgatgacaatagtagttacctcattgggttgatataagaattaaatgaatttggaaattccctagaactttgtctaactcacatgccctatgtaggtatttgttaaataaaatacacctttcatttctttttgtctgtattaacttcctggatagaaaatgaagatttaattttgttgttaccatatacctacctggtctccttttttcccagtacccttcctcccagtagttatcaatattgattattcagtattcttgtcaaatattacttttcctatcctgtacagtgttttgtggctgcttccctgctccatccccacctgtctattatagaaatgggttttcctccactcccaggttttcatctgtcagcgctgtctgttttctccaagttgcccctcctttccccaccctcttcccatttttgtatgttttgggctctacctttcctgtagaacctttccttagatgtctggtaagtcttgattgtctgcttgcaaataagtgttaaaggattaaagagctgattagagatttgcagtgtggggctggccatggtggctcacgcctataattccagcactttgggaggccaaggtgagaggattgcttgaggccaggagtttgagattaatttgggcaatatagcaagatcctgtctctactatatatatataattatttttaaaaattctttttccgtgtggcttgttgactgttaactttaccgcagagtaatctggctggagttcattgtctttttttacctctttgcctagttttctctatatttatcactaaatccacttttcatcagatgcctcttaggatgttccaatatcagatattgttaacaattttatctttctcaggaagtgttatatcccactgacctccattcttgactggttgccttcttggcttggtacacaactattattctgggattcctttcactttgtcttgtgttggatctttattttccagagactagtgtctttattcttagtttgcttgttttaaaatggctttagtttactctgacactttcttaggtaaagaataccaggtggggaagttatgttctcttatattttgtgccattgccttctaacatccatattgcttttgagaaatctgaagccattctgatatcttatatattgtatgtgacctgtgtattttgtttttccttcccttccttttccttcttccttttcttcctctcatttttaaaacctctaaaacctttataagat

SEQ ID NO: 73163 - DNA, 2826 bp, Homo sapiens
acttggttccaccacaaaatatagcacaaacccctgctacccaaaatggtaatttggttcaaagtgttagtcaacctcccttgatagcaactaatacaaatttgcctttggcacaacagataccactaagttctacccagttctccgcacaatcattagctcaggcaattggaagccaaattgaagatgccaggcgtgcagcggagccctccttagttggcttacctcagactatcagtggtgacagtgggggaatgtcagcagtttcagatgggagtagcagcagcctagcagcctctgcttctcttttcccgttgaaggtgctaccgctgacgacacccctggtggatggcgaggatgagaggtaagatcatgtcatatttctggagacattcaacagatttgaagttaatctatttagtagctatatgtatgcacaaaatgactctaaaacattgtatattgtgttttgtatgtgaaaaatgcatttttatgggaagttttatagagcaagagttatggaatggtttcagagggagtaggaaataatagtaatatgtaaacaatattttcagaatagttgttgagcatgtgttcacattaaaaacaggtttgggggcgccaagtggttttattatctctaaaatgctttttagaaatattatggaaagcttaatttttgctaacccacataatagttaatctattttgagctgctaaaataatctcttggggggttgtggttcccacgtttgttctcctttactagacatccctttttcatttctactgtgtttgatcttagtctgtgaaagatattgttgcctacttttcctagtcagatatggtaggaaagatgacttaatctgggttatataggttgccctcatactccaactgaccaacttttgcgtacttatttaatggtcattttatctgaacagtaaaggaatgggaatcttattttgtgggaaaggaggacataaactatcaaaataaccagacttatcttgatagtatgctgaacattttttcttttgcatggtagatcaaggtggtagccattttaaagaacagagaaagtaagtcttggaggattgaatttatagaggcgtgaaaataagaccttggtctctggctaatctactccacctgttcctttctttccttaccaaaaagatacagaaagcctaaagtacattattaaaccaagcgttttttcacgtagattggaaataatatgccagtaacgcttattgaatcaaattgtgtctttgaagctgactggctaaaaaagttgtgaaatctttcatgttgatttttaaagtaatgttcttttcacaaattttccagtctgttactaaccttgattaaaatgctattataggagttatgaaaagacatcattttcacggtggaatttggagtaagcgtgcaagatatttaattattttagtattagttggagggttttgtgattgaactttcatcaagcgaatttaagcatttatattctatatgtatgtttgtgggttttgctttggaaaaattgagcatattgcaaaatagttgtaattttagaaaaagaaaacaggtcaaatgtttcagtgaggtttgtgttatttagttgtttaaaaggtaagataaagacatggttaaattgataaaatcttatctttcaagatttttattatttttctaatagtcaggtaattaaaaccttgttacctaaccaaatgtattctgtattatttgtacaaaactgtactctaaaagataaacttttaggaggtagtttccttaattgttccattattattgttaaacctttaattttatcatgctaatactcaactaattttaaaagaattaccacaaatattaatgttttttaagtcaaaaggttatgatttgagtgaagcctctataaaaacagctatattatgtggatgctaagtttagagaaacaaaagacgggtaaaatacacaaacaaaaacactcattttgaattcaaacttgccatgattttgtaattgccatttgtggtctcctggcttgactttcacctctttttcctcctattggtaggacatgataggattttccacagcttgcccttccaggcaattaaagtcagatgatgctactttcaactagagttttaactataggaatagggtcccagtttaagatattaatataaaattaatttttccagataataattgagaaaaggaataataaggtggaaattatggaattctagaaagggacaaaaagacatactgagaaataaggaaatatagctctaatacaagttgtcttcagacactgtacacattcaattataattatgtttagcagtctctcccacaagaccaggagttcctcaagagcagggactgttttgaatttactacctatttgggccttggttagttaacatcaaagtttcgtgattaaaaaccagaaaatttttgttttagcggtatcttaaattctgtgaaatcggaatgtagccctaaaacaccttgtaagatcagaaaagatatatattatattctttattgtgttttactgaagattatttatcactacagtttggaaaaaagttaattttcatttaaatttgcccttggaagataatttaagaataactacaagagaaaacagtgatatgattaaaaaacaaacttttaaaacctttcttcccatggtagcttctgttgtcacttgcatcttctgggcttggtcaccattagtctcaggagagagggaatacatatataatttcaatattatgaatcaggaaatgtgttaacaat

SEQ ID NO: 73164 - DNA, 2507 bp, Homo sapiens
cctcgttcatcctcctttccgaagctcgctctcgaaggcaggagcgaccggcgcctttggctgaggaggaggagaaggaggaatcgcgccaggcggagcgtcaggtcccgttttcctctccggcgtctccaatacaaagattacggtgcagaaggaaattgcactcgtctcctccgcgcccccggtacccaacacaatgcaccagccgcctgagtccaccgccgcggccgccgccgctgcagacattagcgctaggaagatggcgcacccggcaatgttccctcgaaggggcagcggtagtggcagcgcctctgctctcaatgcagcaggtaccggcgtcggtagtaatgccacatcttccgaggattttccgcctccgtcgctgcttcagccgccgccccctgcagcatcttctacgtcgggaccacagcctccgcctccacaaagcctgaacctcctttcgcaggctcagctgcaggcacagcctcttgcgccaggcggaactcaaatgaaaaagaaaagtggcttccagataactagcgttactcctgctcagatctccgctagtatcagctctaacaacagtatagcagaggacactgagagctatgatgatctggatgaatctcacacggaagatctctcttcttcggagatccttgatgtgtcactttccagggctactgacttaggggagcccgaacgcagctcctcagaagagaccctaaataacttccaggaagccgagacacctggggcagtctctcccaaccagccccaccttcctcagcctcatttgcctcaccttccacaacagaatgttgtgatcaatgggaatgctcatccacaccacctccatcaccaccatcagattcatcatgggcaccacctccaacatggtcaccaccatccatctcatgttgctgtggccagtgcatccattactggtgggccaccctcaagcccagtatctagaaaactctctacaactggaagctctgacagtatcacaccagttgcaccaacttctgctgtatcatccagtggttcacctgcatctgtaatgactaatatgcgtgctccaagtactacaggtggaataggtataaattctgttactggcactagtacagtaaataatgttaacattactgctgtgggtagttttaatcctaatgtgacaagcagcatgcttggtaatgttaatataagtacaagcaatattcctagtgctgctggtgtgagtgttgggcctggagttaccagtggtgttaatgtgaatatcttgagtggcatgggcaatggtactatttcttcctctgctgctgttagcagtgttcctaatgcagctgcagggatgactgggggatcggtttcaagtcagcagcaacaaccaacagttaacacttcgaggttcagagttgtgaagttagattctagttctgagccctttaaaaaaggtagatggacttgcactgagttctatgaaaaagaaaatgctgtacctgctacagaaggtgtgctgataaataaagtggtggagactgtaaagcaaaatccgatagaagtgacttctgaaagggagagcactagtgggagttcagtgagcagtagtgtcagcacactgagtcactatacagagagtgtgggaagtggagagatgggagcccctactgtggtggtgcagcagcagcagcagcaacaacaacaacaacagcaacaaccagctctccaaggtgtgaccctccaacagatggattttggtagcactggtccacagagtattccagcagttagtataccacagagtatttctcagtcacagatctcacaagtacaattacagtctcaagaactgagctatcagcaaaagcaaggtcttcagccagtacctctgcaagccactatgagtgctgcaactggtatccagccatcgcctgtaaatgtggttggtgtaacttcagctttaggtcagcagccttccatttccagtttggctcaaccccagctaccatattctcaggcggctcctccagtgcaaactccccttccaggggcaccaccaccccaacagttacagtatggacaacagcaaccaatggtttctacacagatggccccaggccatgtcaaatcagtgactcaaaatcctgcttcagagtatgtacaacagcagccaattcttcaaacagcaatgtcctccggacagcccagttctgcaggagtaggagcaggaacaacagtgattcctgtggctcagccacagggtatccagctgccagtgcagcccacagcagtcccagcacaacctgcaggggcatctgtccagcctgttggccaggctccggcagcagtgtctgctgtacctactggcagtcagattgcaaatattggtcagcaagcaaacatacctactgcagtgcagcagccctctacccaggttccaccttcagttattcagcagggtgctcctccatcttcgcaagtggttccacctgctcaaactg

SEQ ID NO: 73165 - DNA, 1025 bp, Homo sapiens
ggaataagtgaaaatccagcctccactctgaactaatgcagtatccgagtcatgagtagggttcataaatagcttgagctttcttgaggggtccttatgccattcaatgaatctgcccatcagcatgtgttttatatattttccttgataatggaaacccaatgattatcattaaataattagagaatcctatataacccaacacatgacccctggaaaaaagccacacgagctggtgtcctcccaaccctgctgtgtttttctctctgagcatagcataagtgggcataaaacaagagcaaaaacacaagcaacggctatgtttggctttcgattaggcattaaacctcagacagttgctaaacttcttgaactccatggcttcagtccaggttggaaagcaggtcaaacaagtcaagctgagtagaggatgcaatcttttgttctcagcaggctttgaagtttgttttaggattaatatttaactttagatcttaactattttatgcctcaatttctccacatacagacaatacataaatcttgcaatgaaagaagatcacactttcttgtaaatgtaaatagtataaactctttcctttggagggtaaaaaatggtagagttggggctgtagaacggtgtggtccaataggggtataatgtgaggcccaagcacaggagtgttaactttcctaatagccacatttaaaaagtcaaaacaagtaggtgaaattaattgtaatagcatacatattttatttattaattttaacagcccatttttatttttgtatgttaacatggaatcaatattttaaaaattattagtgagatattttacattcttttctttatacaagtaatcaaaatatatacttaccacacatctcaattcagactaggcacatttcaagagcttcatagctgtatgtggctagtggctactgtattgggcaggtggttctagagccaaaatgaattgactgagaaactgcctgatcttaagcaagttacttaagcatcc

SEQ ID NO: 73166 - DNA, 1128 bp, Homo sapiens
tattgttgtcagagattttatttctatagatgttataaattgcacatacacttaatatttttgctttagttttaaaattttgccaatgaggaaaaaaagtcttttatatttattcacatatttactttttccagcacttatccttcctttgtatagatccaagtttccatctggcattatttctttcatagagatcactttctgtagctcttcatggtagtcttctcaatttttggtagttacagcttccaatttgaaaaatactagaatacattataaatgccttgcaaaaatctttcatagttttaagttattaagtgaacaatattatggctaggaggattattatggatttgttggttgcttttgaaaggtctacctgttttgttttgttttgtttatttttgtgtttgtttttcatcacacttagaaactcccatcaagactgaagcagacgttttggcagaaaaccaggttcttgatagcagtgctcctaagagtccaagtcaagatgttaaagcaactgttagaaatttttcagaagccaagagtgagaaccgaaagaaaagctttgaaaaaacaaaccctaagaggaaaaaagattatcacaactatcaaacgttattcgaaccaagaacacaccatccatatctcttggaaatggtaaattatttttctttaggttctaatctttgtgttctcacatcataaagatagagccactggggtgtgtgtgtgtgtgtgtgtgtgtgtttgttttaaggttaccagagacacattgaccttggagactttgtatcttaattctgtagctacatttggcatatagctggtatattcagtgaatgtggaataatgtaatttttacaaccacttaaaataaatttaggtttcactagttggtaaggaagtatctactgaggtttattgactttcttttaagtttccagtgaaagcacagctaaaagtacaatggcaagctgaagggaaaaaaagatttttagtacaaatgtctattgagaaccatacagtaacaaaaaggaaaggcctaaggttttctgacaattctcatttgttatcttctgggattgtcttccttccctccctcctccacctattttttttttt

SEQ ID NO: 73167 - DNA, 1034 bp, Homo sapiens
acccaagaggcagaggttgcagtgaggtgagattgtgccactgtactccagcccgggtgacagtgagactctggctcaaaaaaaaaaaaaaaaaaaaaggaaatgtagtttgatggagatggcagcacttttaatgttgactaggctagagataatcaatgtttatgtatttggaagatgttgaataaggagccgttaggctttaatatgaaaaatggtgtttacatgtatctgtaacatgggaagttttttcttttttaagtgggccatggcttactatggtagcttcttaatagctacttgaattttgaaatataagctactttggctttatcacagtattccttaacagatggttgcctattttaattttaagaaaaatagcatttttttgtgctcttgtttctcatacattggtgtgaagatggagttattctttaaacacatattacatttcctgcttatcagttgtattcataacaggtgatagcaaagaaaactattaccagaattacagaatcccataaaaacaggctggactaatgcttgcttctctgtttcttaagatggaacagtatttttatactcatgtcttcattttgagactgccatcattttaaattggaagaaaggaaactggaagggatctttgagatcacctctttattttatagaaccttaagcatagaaaggataagcttggtcgggcacggtggctcatgtctgcaatcccagcactgtgggaggccgaggcaggtggatcaccggaggtcaggagttcaagaccagtctggtcaacatgatgaaaccccatctctactaaaaatacaaaaattagcctggtgtggtggtgtgcgcctgtaatcccagctacacaggaggctgagacaggagaattgcttgaacccagaaggtggaggttgcagtgagccaagatcgcaccactgcactccagcctgggtgacagagtaaaactccatctcaaaaaaaaaaaaaaaaaaaaaaggaataagcttggcaagctggtatgtagc

SEQ ID NO: 73168 - DNA, 1916 bp, Homo sapiens
atactaacactgtggtggatttctgcttaatctactagtaattcacataaacttcatactttcctttccctttattaatcaaggagtaaaggtaacttagcttaaaattgacaaggagtacttttataggtgtgatggtgtgtagtgaggagagaggatttagctccatccagcagaaggtggcagttgaacattcacatagaaagatattcccatttcctactggcatgctttggtttcccctagactgacttggtgaacattaaatgcttagtcttgaaacattttatattggttttaggttgagttggttaattaaatagacaaattacttattgtcttcagtgaggccttatttttattggttgtctagaatagagttactagattgttagagctgccaaaaagaaatgtaataggtggtgtcctggggctacaactaggcttgctgggcctggatcaaacactttatatttggcaggcactttagtattatgcttggtaaattctcatggttgccttgtttatttaagttcttagaagttttaaataataaaaactttgagtgggctggtcacagtggctcacacctgtaatcccagcactttgggaggccaaggcaagctgatcaacttgaggccaggagtttgagaccagcctggccaacatggtgaatccgcatctctactaaaaatacaaaaaattagctgggcatagtggcacacgcctgtgatcccagctactcaggaggctcaggtaagataattgcttgggcctggcaggcagaggttgtggtgagccgagattatgccactgcacttcagcctgtgtgacagagcaagactctgtctctaaaaaaactttgggtggattaattccagcattactgtttgactaagcctatagaatgctttgaatattatttggatccccaaaaacagtcttaaaaacagttaaaagcataggtattttaatacttcatttatttctaaacctaattttcagaggcagtgatcccaatccagtgaagttaaataaagtttgggtcttcctactacctgtaaatgaacagcaaagactatgtaattaagttaatttagagtatgctcagattgtataacctgtgaagcatgctaagtaactgagctctatatagcttccttttccctcactgtctcctctggggcaaatggtttcttggcccatgaagatgtctaaaccaaggggaagtgtttctggccccctagaattagtcttttggaaagattaaggaaatgatcagaaattacttaattttcactaacaaatgagggaatgggggatggacagcttttttatggtggtagatgttttgaatctgacttcttttcccttcagagtctgataaggaggagaaaccacaacattctgtgatacccaaggaagtgacaccagccctatgctcactaatgagtagctatggcagtctttcagggtcagagagtgagccagaaggtaagtcatggtgtgtgttgttacagggttttgttttgttgctttttgccttttgtgcatgctgcgcattaataacatccaggatgtgcatcctttatttggttttcaaattccttttccatttgaatcagaagtaaagttaacatgggttaaaggaactctggagtaataaagaaatgtgttgctactctgggaataaaaaggcaaaaaaatacaatataggccgggcgcggtggctcacgcctgtaatcccagcactttgggaggccgaggcgggcggatcacgaggtcaggagatcgagaccatcccggctaaaacggtgaaaccccgtctctactaaaaatacaaaaaattagccgggcgtagtggcgggcgcctgtagtcccagctacttgggaggctgaggcaggagaatggcgtg

SEQ ID NO: 73169 - DNA, 1056 bp, Homo sapiens
tgactgattctggggttgggacagggaaaatataagctgaacctagagcatctcatagcgccagaaagtaagaaaatgctaaaaaaatgtgaagatgtgggtatgtcagaaggatactagaaagagttcccaagggccaaagttggaacaattggtgccacaaaataaataataataaattataaccctcagaatagaataaatacccatgagtctatactgatatgagtgcctaaataaataaataaatgtgggggaggagggacaggtctttcttacaaaataattctaattattaaatgtagaagaaatgagagaaatagcaagtcagcattagagcaccacagtaataattgttttgggcaagatccactgatgaatggtaaaattagtggtgaaacgttaaaatgaaacaatatttgttatagcctcaaaatatctccccccaaaatatttattaattataataattattaattaccatggttttaacatatgtcgaaaattctttgatattccttacttgagttgaagcttaattcttcttccctggagtgtgagctaaacttagtaactcatttcaagaaatagaataatgaaagagaaaaatagtaactttgtagtagagaaagcaggcagaccataaagtggtcaaggtcaacattgccagtaataagtcctactgatattatggacctgggttgtgatgagaagggcacatctctgtggtattccttctcaaaatccatagcctcagtctaatcttcaaaaatgtcagacagacccaaactgagggacattctaaaaatacctgacaataatcttcaaagtatcaagttcaggaaaaacaaggaaagactgagaaactgtcacagatttaaagaagattaaggagtcatgacaaccgaatgcaatgtagtatagcagattgtatcctggaacagaaaaaaggacgttagtggaaaagctggtgaaattacattacagtctatagtttaaatactagtgtggtaccagtgttaacttcttagctatcataaagtactttggttatgt

SEQ ID NO: 73170 - DNA, 1026 bp, Homo sapiens
tagaagaatgaaataatgctgccagttaaattggcctttaatgataatacgacacagcccaatttcagagggataacaatatgggtagaaatttgcagcgtagaatcaagaaggtgtggtatattgtggggtgctgtccttctaaagttctatcataggcttccctgtctttgaaagtcactggaatttcttttattttcgtctctttaatgtactaggctacaagtgatcagttttacagctaggtttcttttgtatctagtagtctttttcaaaattttcttggaaggtcagtgccttttatattaaaaattgcaattttcttactccagcaagatgaaggggatgtccagacattcacaaatggcaaagatcagaagtcctggcaagaatcacaaatggaaaaacgacaattctagacagagagcagtcactggatcaggcagtcacttgtgtgatttgaagctagaaggtccaccggaggcaaatgcagatcctcttggtgttttgataaacagtgattctggtaagctaaacaggaaaataacgtatttataagtgtatagacaatgatgctgaagttgattattcacagccttgcttgtggaaagtttaatatcaaatgtataacaatgcagaatgatgcttttgtttttgtttttaataggagcatcttgtttaaaacgtcatttcagaacatcttttctgagtcttgggtgggcacatggggcagggaggctataggagaaggactgtatttgctggataattttcattagtatgaggtaatcttagaaatttcttaagattgttttgaatgtattaatgctgtgcattcaaatttgcccaaatatgtggattttccctttacctataaagcagcaattctaacggaagtcagtatactttatgctactgagcatgagcatgatctctgggcaaaaaatactaattcattatgtttgatcagtactgttcttcagagcatagattatatttatatatgtttgtccttgaatttcctct

SEQ ID NO: 73171 - DNA, 1380 bp, Homo sapiens
cactttttttttttctgtgagacagagtctttctgtgtcgcccaggctgaagtgcagtggcgtgatctcagctcactgcaacctccacctcctgggttcaagcaattctcttgtctcagcctcctgagtagctgggattacaggcatccgccaccatgcccagctaattttttttatttttaataggatggggtttcactgtgttggccaggctggtctcgaactcctgacctcccaaagtgctgggattacagacgtgagccaccacacccggcctctttcactttctgaagtcttggtttgtttgcattgtttggcctacttaacatactctgatttctgttaccatttaagaccaatttctttcatttcttttctttatggatttttccaattagatatagtctttccattccacccctaccccccagtctttataccctcttgggtacttttgtcttatgttatcactatttgtgtgcttttcttatcttcctggtagacagtatattttttattttattttatttatttatttatttatttatgttttgagggggagtcttgctctgtcacctaggctggagtgcagcggcacgatctcaggtcactgcaacctccacctcctggtttcaagagattctcctgcctcagcctcccgagtagctgggattacaggcgcccgccaccacacttggctaatttttgtattttagtagagatggtatttcactacgtaggtcaagctggtctcgaactcctgacctcaaatgatccgcccacctcaacctcccaaaatgctgggattacaggcatgagccaccgtgtatattttttgagaactgtctcctcctcgtcttggtaacttcgatatacctagcatgtatttgcataagaaattggatagacttggccgggcgtgatggttcacgcctgtaatcccagcatttggggaggctgaggcaggtgggtcacctgaggtcaggagttcaagaccagtttggccaacatggtgaaaccccatctctacaaaaaatacaaaaattagctgggcgtgatggcaggtgtctgtaatcccagctacttgggaggctgaggcaggagaattgcttgaacccaggaggctgaggttgcagtgagctgagatcgcaccattgcactccagcctgggtgacagaacgagactccgactcaaaaataaataaataaataagaaggaaataaaaggtaatgactagaataaattgaatagacttaaaaattttttttacagtatttatgggtacatgccatatagatgaattaaatcagtttgagcacattgtatgatatatttgatttaaattccagtgtacacttgtctagttgcagactgctagc

SEQ ID NO: 73172 - DNA, 1053 bp, Homo sapiens
ctgtgtaggaggatagttttaaatcaagataagcctatttgagcatggaaagtattcagataaaaggagatggtagggtgcagtggtgcttgcattagctagtcatgctctaggaaatggaatggcaaccttactaccatggcttagtgcaaagaggtgtcattttcccaaggttaaaaaaaaaataaatccagggctgctgttgctgcatgacagtaccatggacgtaggctgtctcttgttgcaccggagtaggcggctctcctcttgcctgtcaccagaatgttcttgcatatgcaaatattaagccacagaataggcagaaagaagagaaaaagacaaaaggtacacgtagcctagtttccccccttttcactgggaaaacagtagctttgtttttatttccaaccaggagataatttatatagatctcattggctagaagtgggctgcttgaccaccttcagtggcagtggagttgatgggatgcctgaaacaaaattgttaaggaatgggggagaatagtcagtgtttgctttagttcttggtggcacagtggaatttcaaaactataagtgaattttggaagcggctctgtccttctgaataaaggattggtttgagcaagcatttaataggcttgctggtggctctttttatgtaggacaggtgggggctgaggggatagagtctagctctggtttccagaggtatgctatgacagcaggcagaagtgccttggaagaggaatgggcaaaatctgttgagggaataagtgaggttataggtttgtgaaatttagaggtgtttaaagagaatgaggaaatggggtgaagatggcaattttggatgaagtttatttatacctgtgatgttgctttgtttagtaagtgctctgaaaattctttgggcactgggtgagttcatctgaggttcttccatagtttgtttctcaggttcttgctctttaatatattctgaagagttcatatatattttttctgtatgtatattttattagaggatatgggaaatactgcttttcttttggta

SEQ ID NO: 73173 - DNA, 1030 bp, Homo sapiens
tacagattgtcacgtctactcatatctttagtggcctctctaggttttgattggtaagtcattcatttgggtgtttaatgtcatttgagagaatgggtggcatatctactttgtaatcaaaattatgttaccccttttccctctattaatagcactaattaaatacatgatagattcttcttcctttaaaggaaaagttataacacaaatagatacaacctgcttacttggttttaaaattgtgtccaacataagtttacttgtagaaacaaagtctccaagttagtcaaaagcatatgatattgcctcctgatgttcagcaggctttttccccctagatgcatgctcctggcatgaagaagatcaagttagacactccagaggaaattgcacggtggagggaagaaagaaggaagtgagtagagttcagaactggtgaaataactgttttactgtgacaaggcttattaatgtagttaaattcattgaattcccttagaatgttggaactagggaagaggaccataaggcatattatgtaagactattattgaacgtagttttaggaagacctaataagaactcttcatttaagtagcaaatgtgtcataatgggactgtatgttgctctttgaggggggctactgcatgtcacctgtcagatgttcagtggttgaggcaataatgggtgggtactcttaccaaaaagtgtattatacagaagtgtattatcacagaacagtacatctggcacatgactacccatgtcagtggatttaaactgaaaccttaaactaaggtgagctaagtacaaatgtaacctgctgctcaaaggagtttgaagtatctttcttgatctttaaggatagttcttcttgttttcatcccaggcttaccgctaaataagatgcacaggtgctaaggataagagatacaggtgcttgttcttaacaatgagaagatcaggaattcattcctatgattaaagaaatttgagcatcaccatgtaacctgtggttttacacttact

SEQ ID NO: 73174 - DNA, 1156 bp, Homo sapiens
ttaaaattatgcctgggtttcactaatatatttgttaaaaacaaaatgaaagaaagaaatagaataatctcttcattggaaatatactcacaagcttctcccacacgaaagggttattggaaacatcaaagtgtgtattactagaatgatagttatgtttttattattgattacagatttttcaccaaaagcctaattcctctctgtttttgtttgcagaaaagaaaggaaccagtttttcactttttttgtgatacctgtgatcgtggttttaaaaatcaagaaaagtatgacaaacacatgtctgaacatacaaaagtaggttttcttagttgtcctgaaactgatgtagcaattgtgcttcttctatctgtatatttggtagaaatgccaagcttgttttcctttaaagtttatagtttctgtagagatatagtttgacaacttgacagataggggcagtgaccctggggtttgaaagtggggatcccgctgcttcagggacgaggtaagatggtagcaaagaagggagctctgacagctttttgtatgtgtgtacctctactgcttgggaagaggctgtcctctcctctagttaccttgtgcatcttaatgagttctttcccctttaagtctgcccttgaccattaaaccatactgtgtaatgtggctgtgcctatcaccctcaaaggctggtccacaccttgtcaggtactagctagaaaactttaaccaaaatgtttaaaaggtttaaaaggaagcctttggttttgaaaggttctttttctgtttttgggaatgcccctcaactttaggaattaagagcatttcacaggtttattgatgtatgcctttgctcaaatggagaagtaaataagatatattattgtgccacatactctgagagtgtcattcctttgcctaaaggcagccctgttttggagtcatttttgtatgcagagataatactatacagatgggataactatgtaatacagccagaatatgtctgtgtatgtatagtggggtaaatttaacatggaaaacatttgttaaatagttttttttttcttttaaaaactcatagtgccctgaattagattgctcttttactgcacacgagaagattgtccagttccattggagaaatgtaagt

SEQ ID NO: 73175 - DNA, 1071 bp, Homo sapiens
gccctaacgtgggagtcagctcgggagacgcatgccacccgataggagtctcgaaatcactagtcggctcagccataccactggcgggtccggagtctagcacgcgactgtggagcaagcattaggcgtcacttcctttaccgtgaactacaaggctcagccaaccacaggctttacgtcatttctcggcgccgggaaacctgccattcttcgctgctgatcgcgggattctttttggatagggttgacgttcgtggatagactcatatctgtgaccagtgtccgccaccgcggatggcaagagacctgatcggaccggccctgccgcccggcttcaaggcccgcggaacagcggaggacgaagagcgggacccgagccctggtaagcggcggcgtctccgctgcccaccaggcccatctacccactccctggccgggccctgctcgctgaagaaagtcggaggcctaggagggcggaggagtggggagtgggcgcggcctgacccgagagaacttttctcttcccaaacagtagcaggggggaggaggctgggggaccctcctagaaacgagctttggcgtggtttggcttcgtgatgataatacattctcatttagccttaatatgagctgcacgctgccctaactgactgatacccactcagtcatttaagccgtataagaaaaaaactattttcccatgttgcaaatgggtacgcccaagcccatgccagtgtctagatcatactgctagcaagtgatggagcgcgacttagaaggaagcggttctcttaacctctgtgccatattgccttctgattacaagaaccttgcagatcctgttctctccagcccccgacctgccttcctagcctctcattctgttattgcatctgacaaacacagcccaatactcaatccagtctgagttgctgcgcaattccttaacgctctaggcttctgggcttcctctggttgcattcctaaacataactgacaaacttctccccatccttcaaggcccaacttaaatgtcacaccaataaaacctttccagattccccgaagcat

SEQ ID NO: 73176 - DNA, 1006 bp, Homo sapiens
tgggaacccagactttctgactgtcagtactgttatttcccctgccaggatgcctgtctgtggggttctgatagaacatggtgcaacctggaaattttagcttaggacttcagtgccatctgggttggtaacactggcacagtgacaactatggaaaaaacatttgtacaaaagcaaggatgaagaatcttaaaagtgtgaaagagagcatttttttattttttatttttatctttttaattttttccttcataaagtaaggctgtctccttttaagacccagtgttaaggcaagtctctcttttgaagtgatgacagttgcctcattatttggcagtagggcagctggaaagaaaatgcactttgacatcaagtagaccagggtttaaactctagctcagccacttactaattgtgttaatcttggacatgattttgctcatcttaaaagtggagtgacttacactgaccaggattgttttaaggaaacagatgcactgcttgaaatatggttagcacggtacccttttccctttctgtgggtcttaatgaactagctgcattcttctacagttccacatcattactgaggacaatgtatagatttttaatactgccatgttatatagaccacagattgctggcattgtctgcacatgctatatatgtccttagaagaactcaatttctactttggtagttctgaccataattataatgcccctaaggtatctttcacgggataatgaatctcaaaactgaaggaaagccaaggcacaaaataaaaaaagaccatcacagattttagtacatcaatttttttaaaacattgccatttttatttaatatagttctttttaggaagtgtgcatatgccagtgtcacaaagattgagaattattggcttagtctctaattattgactaacaagtagaaaagtcaaatgtgaaaattaggtttttaaaagacgtctagcagaaagatactaggtaatactagtaaaaat

SEQ ID NO: 73177 - DNA, 1112 bp, Homo sapiens
atcaattgtttttgctcagactttgtcttactagatacatctgaaaatgtgaacacctaccctagctaagaagaaaaaaaattgagggaattaagggaaaaagagaacgacagaaaactgaaaggaacaaaaattatcttagcttatggaacatgccaacatatgctgcacaggccttgaattttgccacatccgtgttcttactacttttcttttacctttgtttttgcttcagcctgacagtgcctttccttcctatccgtccatttagccttcaaagaccagcacgtctatgaagtgacaatatgattgctctttctttcacaccccgttcttggtttgtactctgatgtttagtatttaaataaccataatgcttttcattacatattttctttataaatgctgtcttggatttggaaaaaaaaaaactactggggtttgtaaatagccctccttaatgtgcaccattactatctattccgtttcatggtcatattctgtcaataatctatatacaaactatagtttttatttctgctctcctgctctctccaggaatcaaaaagatcagaatctcttatggacatacatcataaaaagttaaagagtaaggctgctgaagacaaaaataagcctcaagagagaataccatttgaccgtgataaagatctcaaggttaatcggtttgatgaagctcagaaaaaagccctaataaaaaaatctagagaactaaacaccagattttcacacggcaaaggcaatatgtttttataagtaagtatatttcagtgaggtatattttaatactgatcaatgtgaacttttctaaatactctattgtctttaataattgtgctgaaatctatttccttttataatagattaaaaattttatatttttataagtaaacagtgatttttgaaaagtcagccttgtgggatgaaaaatatgtcttactggaaaaatccctcataataacctaatagggcattgctattaaaaatgctaaaataaaaattcagcttatgagaaatggcaaaggaaggtgtggtttgatacttgagtaaatatgcatgctttattaaagatgaagaaaggcttgctggtt

SEQ ID NO: 73178 - DNA, 1045 bp, Homo sapiens
aaaactaaccaggtgcagtggagcacacctatagtcccagctactcagcaggctgaggtgggaggatcccttgagcccaggaattcaaggcagcagtgagctgtgattgtgccattgcactccagtctgggcaacaaagtgagacctcgtctctttagaaaaaaaaaaagaggccagtggctcacacctgtaatcccagcactttgggagggtgaggcgggtggatcacctgaggtcaggagttcgagaccagcctgaacaacatggtgaaaccccatctctattaaaaatatatatatataaaaattagccaggtgtggtggcacgtgcctgtaatctcagctacttgggagcctgaggcaggagaattgcttgaacccgggaggtggaggttacagtgagccgagatcgtgccactgcactctagcctaggtgacaagatcgagagactctgtctcaaaaaagaaagaaaaagagaagaaaagaaattacataaaagctgaggttgcttcttaatatctttatgatttttaattgtattaaacctatatcaatattcaaatgtgatttttgaggaaaatatgttaaatttagaaatattttccaacttactgagttttcttattcttacctcagggggatttccctgtgcaatgaagaaaagttgaagaatactctttgtccatctttatttctttgtttttggcttcttaagattagagattactttaatcttaaaaaacatacaaatttaccttgttctgtatgtccttttaaggtcatgtggaaacataaaacgaatgttttttatgtagaacagaatattctatgtgcctttagcttctgtggaagtatggggaattatgggcttttcttcaaataattattttaagaggcttccattccccctgatttttgtggtgtctcacaagtaccctctaaggtctggtcaggactgaccaccaaatctctaccacagcctggacctccttgtgaaatatacctaacctgccctagagtcagtgtgtcaagtccttactgtaaa

SEQ ID NO: 73179 - DNA, 1042 bp, Homo sapiens
ggttgttttgccccacagagagactaatcccaatacaagaatattgacaacaaaaggacaaagtagttattgcacaggacggaaaggtgtctttatttcatcccctccccacttccaaagatgcaaaaggcctaattgaatcaagtctcctttccatctggcaggagacattttaataaggactttttaatttcctacatttcttggccaagtgtcataggaatgtggcctcttttgaaatttaaaaatgaagaagaaaaaaagagcaacactaagttaatataatggagcagatacttttaatgttcttaccattgaatatgccatttaagtttgttatacttgaaattatatgatttttgtccagctctctaaattgtcatctccaatagatttagatgcttcaaatagtaaccacattactggtaagtaaacggtggggttattgggtttagcaagtggggaagtaaggggtgaacaaaacacgagagatggtggctacacccctactaagactgccttaccagataaatgaaatcctttttgtattaggcacaacatggtaaattaagtcttgctctaaaaaaaaagaaaaagaaaaaagagaaaagccctgatctaagagtttttagatgctagcaaccttgtttagatgtagatcttgtttagatgtagcaaccacttgacatttaatttatcatcttaaccttgaatgattctttgttttgttttttgttattgagatggagtctcactcttgctgcccaggctggagtgcagtggcgtgatctcggctcactgcaacctccacctcccgagttcaagcgattcttctgcctcagcctcccaagtagctgggactacaggcgcccaccaccgtgcccagctaatttttgtatttttagtagagacggggtttcaccatgttagtcaggctggtctcgaactcctgacctcaggtgatccgcccacctcagcctcccaaagtgctgggattacaggcgtgagccaccgcgcctggcctgaatgattctttgtatta

SEQ ID NO: 73180 - DNA, 1652 bp, Homo sapiens
atcccagtgcccatttgtgctaatgacgttggccagggacgccaatttactaccctgaccctgtccttcaaatattgtctctctctccttggctagggttggacatgttctgacacctttcgtctctttgaaccccatttttccgttctgataatctttttcttcagttatgctgaccatgtctttaaatacattgctaacgttttagctcatcccaccctacgttttaatccctcagatgcagacatcgcggacagccacgcccactcaagaaatttccgaaacagaaagtttgtctgcaacagcgcgccgtactgacgtagcagtgcgcaggcgcagtcccggctcctggcggcgtgttcctcttttcctcggttcccagtgttctggcaggtaaggaacgccggctcttcgcctctcagcgcggcttgtcctttgttccggacgcccgctcctcagccctgcggctcctggggtcgctgctgcatcccgcacgcctccaccggctgcagacccatggccgagcgcggggaactcgacttgaccggcgccaaacagaacacaggagtgtggctagtcaaggtaatgttcgcgagtctcccacttgcgctcctcctaacacaagtatagtttaagtaacttgagcctatcccgctccgtgcgcctcttaaagttcttttacggctatctcgttagagcttcacacattttgagaggcaggagtcattgttgtatctgtttgcagacgaggaattagtttagggacgcaaagtgtctttcagccagttactactctgaatctgcctggactagatctctttctcacggctttcctggaatcttgtcttggtgtccccagatttggacggtgcattttatcccagactgaagaattccttgtatcttcccttggtgaaactggttttagccatgagcctgcgtgaggtagttgaatgtctactttctgtacagttttctcggccagaaagtaggactggtccctgcctactcttaaaagtgttctcttaggttgatggtccttaatgaagctctcaaaagaggcgagagagccccaaactcacagaaggagaggtcattggactggagtattcttttagagcacatttgggtctcgtgaaactggccgtcaataaacgttttatgtgaagacagcaattttggttagctcacagtaagcactatttgtgctttattgtttcatattggggagtgttttctcctaggggagtttcataatacttaagcatattcaaaatgtgatcctgaaagtcgttgaaacttaaaatgtaaggacttttggtttcttaatgctttaactgttttatcacatggctgagttctcgtcaattaaatctaagaggtctttcttgtcggccttcctaaaacagcccccttgtgatcatttgctaacacgacagatgtgtattacattcttcaaagcacttttcacagtgtagagtgattttgtgttcatatgttcaaagttggttacctctgtctttccaacacacagaatcacattccatgagaacaggatctttgcctgtcatacccagaatagtgtttggcgcatggtaattactcaacaaatagatgatgaataaatgcatgacctctcattcttcagccct

SEQ ID NO: 73181 - DNA, 1574 bp, Homo sapiens
ctgttactatagtgagtgctgttctcttctgagaagccttttctgatagcctttctcttctgtgacctttaattggacttatttgggaagataagttggtgctttattattgttaggttatttgacctatgttagttttgtgttgccacctcgattaagttctttgagagctaaaatcattttttacgtgtcttagtattttatatagtgtaaaacatacagtagtaacttgataatgatcccttattagaggcagaaaataaaaatagaagcaatatatcattttatgtttgaaaagatgttagcatctaaaatagacttattagtgttttactttgttttaggttcctaaatatttgtcacagcaatgggctaaagcctctggaagaggtgaagttgggaaactgcggattgccaagtaagttatttacatattcttgacattttaaaaagctatttttgaaatttttataagtgcttttaaaagtgattataatttctgatcagagtttacttggaaaatgacaagtaatgagcatgtcaaggcttgtcaggagatggttaggtgccctgtaaggagacatccttgcacatacacacatatccccacacccacactcctagtgactggtggtataaatataatatcaagtttattggtttaccttaatggcggtgaagcagcagattatgtagttctttcacccctccatcctgtctgcctccttgagcaggtttgcttaggctgggtataactggatgcaccaaggaaagtacttgcagcaggactttgccactgtaccactgggcctacttataggggctttggaagtgggtggggagtatctagaaaacagtgtaacaatatagttttctggttgaggaaatggccttgttagaaaggaaagcctctaaagctcagctagtgtcagctggaggccttgtgttccattctttctatccattcattcttaaccaactccattcagattcgtatgtccatgattccattgaaacagctcttgtctgttactggtatcttcctctttatcaattagcttttgcttcataacaaaccatcccaaaacttagtggcttagaacaaaagccattttatttgctgataattctatggatcaattctggttggggctggcctgggcggccttcctggcaaggatgtcctcacttgtatgtggtggttgagttgacattagcaggggcaacagctatttatttcatctctagcaagctcattcacatgatggtgaaagagttctagtaggaaaagaggaagccccagtgcacaagcactttgaaagcctgtgcttgtgtcacatttgctaaagtccttttgaccaaagcagctcacatggccaagcccagattcagttatgggaaaacagactccaccttttgatggaagctgctgcaaaaaaaacttgtgttccttatttatttatttatttatttcaaaatatggaatacttcctaattcgcatgtcatccttgtgcaggggccatgctcatcttctctgtattgttccaattttagtatatgctgctgaggcgag

SEQ ID NO: 73182 - DNA, 1054 bp, Homo sapiens
taggggaagtatgaataggaattaaaacaaggcctggtgcggtggcttatatctgtaatctcagcactttgcgaggccaaggcaggaggatcacttgagtctaggagttcgaaaccagctggggcaacatagtgagaccctgtctctacaaaaataaaaataaatgttagctagataaggtaatgagcgcctgtggtcccagccactccagaggctgaggtgggaggatcacttcagcccaggaagtcaaggctgcagtaagccatcatcatgccactgcactctagcctgggtgacaggtcaagaccctgtcacaaaaagaaaacaaaacaaaaccaacaagagccaacagttgaataatgatattgttttattaacctggaaaaggtgttgcttattgcctgttagtgaaaagccaggccccattggtaccaaatccaagaagtattttaaaagtgtaagaaaaaggaaagacatgattaatacaaattaagaaaggcaacaggaatgagaccggaatctaaaaaagtagctgtggggtattgagaaatagactcagagtagtaaaggagaaaatgcacagcattctgagaaatttagtgaaaggatggccagatgtttacttcattaatttctgaagatagcactgtattgtacaataattagcatttaaaattttgcacacaggtcatcatacaaagggtatattatagttgtaatgtagaataacaaaaggttatgtgtacttcatacattcacacaccaagacaagggaatatgtcattcttttaaaataagttttaagtcttcaaggattagctttttttcctagagagtattaactcatctagagctcatcaatctatcattccaattaagatgctgttataattatatatgtgtgaaaatgaaattgtcctctcctcctgtgttccctgattgcatctagttaccaagactgaaaatgtcaacatgatctttaattcatcttttttcctatgctgcccacttccagtcatttcctcttctcttagttttaacaatttaatgacct

SEQ ID NO: 73183 - DNA, 2024 bp, Homo sapiens
tgctgcaaaggatgtgattctgttatttttttattagccccattattctgacaaatgggaatagattatctttctctcttttgttttttttaagagacagggtcttgctttgttgccaaggttggagtgcaatggctgttcatagtgagctacagcctggaactcctggcccaaggaatcctcttgcctcagcctcccaagtagcggggattataggtgtgcaccaatgtgtccagtttatattctctttttatgaccaagtattaaggagtttttaataaagtgtttaatgaaatgactggaaaacacatttaaaaacaatttgatttataacaaaaatttatatatatatagtttgaatacagaagtctgttataatctctggttaatgtgtctattaggtgtcatttactttgaatgaggatcttgcaaatattcatgatattggtggaaaaccagcttcagtcagtgctcctagagaacatccatttgtcttgcaaagtgttggaggacagacattaacagtatttactgagagctcatcaggtaagtgggaatggaattatttaatgtgattcctgtacattttgtatagattttctgtctcaacatacactcctatttgctttttttttttttttttttttgcgatggagtttcgctcttgttgcccaggctgaagtccaatggcacgatcttggctcactgcaacctccatctcctgggttcaagtgattctcctgcctcagccccccgagtagctgggattacaggcatgcgccaccatgcctggctaattgtgtgtttttagtagagacgaggtttctccatgttggtcaggctggtctctaactccctacctcaggtgatctgcccaccttggcctcccaaagtgctgggattacaggcgtgagccaccgcacccagcctcctgtttgcttttttaaggtcattaccaatactgttccatctctcattttgtctacctctgttattcatactatgctacttctctgctctgtgtactttcttgtgattaatgaaattttggccattacttgagaagggtttaatttccatttgggatatgaagatgtagaacaaagcagatggaagaatgtggttcatcaagctgccttctaagatgttgaagaaatagtattctgaattttgccaagataaggtcatccttgcttgttttagtaaattgatattcagcaagtatgagttgtacttaaaaaatacagtttgatattagggaatattttagtctgaatttttcaacttgtatgctttgtataccaagagggcctttttattgcatagagataacttttaattgacactggcttccaagaagtttctgcgtagagttttaagattgtatgtgtttgcaatgagatattttaacagttcaatagatcagaagcaaatgtttccatttgtgaattaaatacagagagaactttcttgtggcacacactcagcttgagtatattttccttgttttgggatttttatctgtcactgagtttagaatactattaaagcaacaggccaccttagcttaatggagctaattttctcctatctagttcaaaaagcttattgacaaaagaaaacatttgtgattttgttgtatttcatcaagcatttcaaagaaagctataagaaattatagtatgttaagaacaccattgtttaaaaaaaggaacatcctcgtaaatttttttttttttttttgagacgtagtcttgctctgtcgcccagctggagtgcagtggagagatctcggctcactgcaagctccgcctaccgggttcacgccattctcctgcctcagcctcctgaatagctgggactacaggtgcccgccaccatgcccggctaatttttttttttttttgtatttttagtagagacggggtttcaccgtgttagccaggatggtctcgatctcctgacctcgtgatccgcccgcctcggcctcccggagtgctgggattacaggcatgagccaccgg

SEQ ID NO: 73184 - DNA, 2687 bp, Homo sapiens
ttaaaatgttagatgtatgttgtatatgtgcgttcttttctataggatggtaccagagctttcattggaatctcagaggaatctgtggcccagaaaagctacagaaccactaccctagttttaaccttggttggtcatgaacctgccaaagtataagtgactaagccattttacagggagtaagctgttgattttacattgaaatataaatgaagtaggcattatctgggatatttctacattttctatcaagtatagaactgtacctgcttttctaggctctttgtttctttttattagtgcacaggtctataaaatgtagagtttgtaaggaaacttgaaaccacattttagttcagtgtgttaggagttttagttttaataactttactcctgttaatgtgattttgctggtttttgagaggtctcctttgagcccattttcctaatgattgaatttggcacactgggtatcttttagggagagcgaattagaggagactaatgattaagttatacagtgttttctcattaattaaaataatctgcatgtcatcaacattttatgaactcagttaatttctttctaattcagtgttcctgtctgagagaatatattttatttttatgggctattttgggttaccctttcttccacttctgctttcctctatgaaattcaaaatgatctattaatatttttctgttattttcatggagctcgcttatccattacccttatctctgtggaaatacctcatgtgtttggccttacatttccctgccttgggtcttcagtttagtatttgtatttactatttattggtaaccatagatcatttctatttttcctgcctttggcatcctctttggcattcctacttttattcaaagttagattttcttcttttttttttagaggcagtgtctcactgtgttgcccaggctgaacttctgggcccaagtgatcctcccacctcagcctcctgagtagctgggactacaggcgtgcaccaccatgtctggctcttagatattattatttataactgccaactctagacaaaaatgttcattcatctgttcaatagatatttttggtgctaagccctgtgctagaataagattagcctcctgtgcactgaggcaactggtaagtgaataaatgctacaaatgctctaatggagatatgtacaaagaggaaaaaagcatgtgtactttgcctgagggaactggcttcagaagtggagataatatttgagctggaccttgaagtatatgaataggatgaaagatagtgaggataaattcatttttctagccttcaaggatccaattcttcacttggcattcttttacctgtcatcctctgtcatagctatctaaaagttcattaaataaaaattcattaaagcaaaaaacttagctgtggatgtcacagactaggttagagatgaaaaaagttttaattggtgcaatgggagtggaaaagatagaacatgggataatagaggtaatttttttttaatcttttttgccatcaggtaagtcgaccagaattagaggttattttgacagcttttggtgatgaatcggctgtgaggaaattggaagattgagaagcctagagtggtttccgtgctttttttggcctgagcatctggagggatagtgaaaccattactgaattagaaaatattcaaagaaatgggcaggcttagagctgataacgcagtgacttttttgctttcatttttcattatctttgacgcctttgtagcagttcattaattcaataaattaacatttgtgcctggttttttcaggcccccttttaggcttgggatgctttaacaagcaaaggcttagcccttgtggtgcttacattttactaagaggagacaacagtaaacataagtaaattatattgctggctagaagttgataaattttctgggaataaagtgggaagtaggctcgggagtatcaggttgggggtgggacctcattgagaaggtgaaatttgaacagtcttgaaggaggcaaaaggggtagccatgtggagtgagttagccagctaggagtttttaaggcagacagagaacagtaatgactaatgctccaagttgggaacaagactggcatgttcacggagtggccaagaggtcagtgtggataaagtagatgagcaagggggaagagtagtgggctaattaggttagggaagaagggtggatgttggcagtggcagatcatgaaaagatttctaaactataaaaagtattttggattttacttttagtgaagtgggaagtcactggagagatttaagcagaatagtgatataatttgatttacatgttaaagacctactctgactggtaggttgagaagagaccatggagtcggggcagggctggaaccgggaggctcttatagtaatccaggggagacatgacagaagcttggattagagtggtagcagtgacagagatctactcactcacctgatatccagctttatatctttagttgtgttaacagacagtccacttggattctttttttggtggggagagatgggtctcatcctgggctcaggcagtcctcccacctcagcctctcgagtagctggaactacagtcgcatgccaccatgcctggctagttttttatttttttgtttt

SEQ ID NO: 73185 - DNA, 1037 bp, Homo sapiens
tcgattttccaaaaaaatagtgggaagagtgccattttgcaggcatcattaatgtctgacagcttaagacaagctggattttcatctctacttctgtattcaatctgtaaagatctgctgttttggttgaagtatctgaagaaaatctacctcttataaatacatagttggaaaagggaggagtaattagtagcattttcagatagttgtggacattcttttgctactacactaaaactctgcaagtggtagtttcttaaaggtcacttgcagtatagaatctgaaactattagcaaaccttttctactctcttacattaaattcacaggtctgtcttgtatttggaatgaatctcttacccagacatgattttgtagcatcatacatccatcatctggagactattggtttcctgaattatgtagttcttttgaatgttgacacgtttcattatagaatatcaaaaatttacattcattagcatcactactgattttatcagaaaagtttttaaatataggggagctgttaagtttatggtgataggtacaagttcttcagactttaattttcacttaaaaagttgaattttattaatgacaacaaatcctgtcagctgttttttttttttttaaaggatgggcttttttcattgatttttgaaaaaatatctttcagatacccaaatctgaataattatgctttgtctgtcagtcattctttcaagtaacaatgatcttccacaacaaaagtagctagctcagcactcaactcaaacagttgcaactatgcttttctttgaggcaatcatcttatgttagtgtccagcagaagcatttcatgtgcatttgccatttggtgtcacagaatgttaaaggatgcatactcaagggttgaaatttaataaaaacagtttttactgttcatcaaggacattgtgaagtgaaacagactttttaaaaaattgcaagtgctaggtggtgaagaatacacctagcactttagtgtagtagcaaaacagtgatacagttttggt

SEQ ID NO: 73186 - DNA, 1021 bp, Homo sapiens
aatattaaggtttggaatcacaaacttattaaaacttatgatttactctccagtttttaattgtgaaatatttcaaacctacagaaaagtatagtgaatagtttaacctatgcctaacagctgtatttcataagtgttgacatttgccatatttctttaaagctagaaaacattttagatttctccccaccccccaccccctaacccttacctcacttgctagaggtaactgttgtcctggagttggcgtgtattattgtgactcattatgactagtctgcaattctcaaaacaaaatctttatagtttaactggtggaaactaaccaagttccttggagatgtgttaggcaatgtgctccaaatttctaacaattgtggaagtccagtgtttagcttgagtagagatttttttgtgtcatacctggagaaaatgacaggctatacaaacatatttctcttcttccttttgattttctgtagcttccagtttataaagtcggttctttgttttgattcattgtatacttaagatcttaggaagaacttggtttctttgtaaaaccaaacctaacttagtaaaatcaattaaaatgtaaattacttcagcgtgggcaacatggtgattccccatctctactaaaaataaaaaaaattagccaggcatggtggcgcacgcttgtagcaccagctgttctggaggctgaggcaggagaattgcttgaacccaggaggcggaggttgcagtgagccgagatagcgccactgcactccagcctgggcgacagagtgagactctgtctcaaaaaaaaagaaaaaaagtaaattacttagtcgcggtattaaaactaagtaattgaaacaattgtaattttaaaatactttaattttaaaaatttcatttcctttggctttttcaaataacattgccactatttttaaaaacctcattcaaggttatagtagcatgattttttctctagttctttgagcataagggtaccattatcaaaatttaaagt

SEQ ID NO: 73187 - DNA, 1032 bp, Homo sapiens
tacataaccataaggtcattatgatacctaaaaaaattaacaattccaaaatatcatggtagatctagtcactgggaactatgtgatgcttaaatttcagtgttttctgatattttttcccttttaaatacattctgttttctggtttatggtccaactctatcagaagtcaccatggattgcagttatataggttatagcatcccctggtgaagatgcacttcgtcaagtcattcatgttactatgaagacatgatgcagtctttctgcagaactgtttgagggatttggctgataaggaaatgacagaatagaaaattatttctggaatagtactgaggtactgatgtcaaactggagccagtgttagggaaagtacgaaagctgtgttcactgagcttcatatggattgttttcagattgcatcaagttaaagttaacaagcagatgagtttagaaagaaaatcttgtcaatccactatgaccagactttagggaatagggggctttaaaataaaagtcaaagtaaaatagaagtaggtggtatgagaattcgtatgatgaatggaataaaaaatgttatttaatgtaatagagtgaatatgaatagggactatattggtatatcccagtagggacattatatacaacttgtatacaagcctcaatttagagtatgaatttcttccctggaatattgataaataattgagaaaccaattttgtcttgagtttaaaatctcttgaaagttaggtccatttatatatctttaatacaaaactgactaattaaacatgtttaagttctgaaagaaaaccttattcttatatgttcctaccagccgttagacagctgtggcctgcccagaagcgaaactctggtagtggccagcacactttgaaagactgctctgtttaaaaagaaatgcagttgaagtcttttttttttttttttaaagaacttcgtgtatgtgtatcagcccacaaattcttgcttatacagactgtatcattagctatttcaaaataata

SEQ ID NO: 73188 - DNA, 1049 bp, Homo sapiens
gaactcctgggctcaagtgatcctccatccttggcctttgaaagtgcctggattataggtgcgacaccccgcttagcccattattttctacatacctgtcacctagtgaattttatagtatacctaaaaatgttgtattctgtaacagcaagaaatatatttgaagctcctttttcttctgtcttattaaggacaatctgcctgatatccagataatccaaattttccttaagacacaaagaaagagcagagggaaatataactgggaaccaaaatgtattttaatatagcctgcttccacttttcaaggtagctgaattttatgttctaaatctcaatgtgttagattttggctgtgttgtaacaccaacttataatatgttgtaaacttatacatattgtaagcacatgtagacttacacatgttgtaaatgcctgcggttgtgtttggttttagttttcgttttgttgttttataaatctatcacccacaacctttagctattgtacaacatggtgaatatacccagtaacaatgtattatatacttttaagtgttcttaccacaaaactaagtatataaggtaatatatatgttaattagtttgattagccactccataatatatgcatattccagaacatgttgtataccataaatgtatacaaattttatcaattaaagattgttttttaagaaagaaaatgcactaaatcatttatgacttttagattcttctgtttggtgtctctctccagttatctcacctttattagtaattatttccatacacagctatgcacagtctttcttttttctttctagatggatttctcttaaaatatctttgcgtagatagaaaaaaatatgtaaaaatcaaaatagttttgttaggatataggattatggtatcttcattcatatttttaacatggtttttttttttcttgaggcagaatctcattctgtagcccaggctggagtgcagtggcacgatctcggctcactgcaacctctgcctcctgggttcaaacgattcttgtgcctc

SEQ ID NO: 73189 - DNA, 1613 bp, Homo sapiens
ggagaccaaggcaggaggattgcttgagcccaggagtttgagaccagcctgggcaacaaagtgagactccatctctatgaaagtatatatttttttaaatttatattttaaaaatttaaaaggggtatgttttaattgtctcatttttaaatatccaattcagtatcttttctaaaataactggtggttgaaataaaactagaatttgtgtattttattatacaatgcttaatgtacatttctgcattgttagaaaagttttattaaatataggtcatttataacaacttatatgtgttcatgatttttgtttgctagaaaatattgaaccattatgtattttttaagagaagaagtagaaatacagtccacctcttcataaatttttttagccatattttagattcatcttaaatatttctctctgtccagcctattttcctttaccgccactcccttggtgtttgttgacagaaacaaattaattgtaatattatcttaagcaaaatatgattaggacgataagtcggctacagaagaagccattgtatattttaaagctaaatacaaatgatttctaagttgcatgctgttttggatagtcctccatattacatctttgttttgttagcaaggataattatgattcagatgctgtaattttaaccttgactaacatgcattgctgtttaaaatattcataatttattagattggcatgtctttaaaatagcattatcacatatgtaactccttactgattttatttatttgtttgagatgggagtctcactctgttgcccaggctggagtgcagtagcacaatctcagcttgctataaccacctcctgggttctagcgattctcatgccgcagcctcccaagtagctcagattacaggcacgcaccaccatgcccagctaatgtttatgtttctagtagagacagggtttcaccatgttggtcgtgctggtcttgaactcctgacctcaagtgatccacccgccttggcctcccaaagtgctgggattacaggtgtgagccactgtgcctggcccctgctgattttatattgctgacaaaacagctgctattattattttgttattgtagattttgacatgaagctagaaaataaaagtcccaagaaacctattatatctattttaaatgaatagaatgaaaaccatgcttgcctatagcaatttaaagtacagtcttgtgttttgtagtatctcatcacagaattaaacatgtgcttgttaaaagttctccattctattcatgtgtaagtagaaagcctaattaatgtaaatgtgcattttggggagacctgttcatggttatgccatgaaaatactttttactggacaagataataattagtgctttatcaaaagttcatgaaggtgaagtactttacatacaattcagaatttaatttaaaccttgcaaaagccctgtcaaatagttactattatccttattttactgtgaggatgttgaaattttaaaaagttaaggatcttgcttataatcatgtaagcaagttagtggaagttaatggaattagaacccaagtctaactcgagagcccatgtgtgtttcactgt

SEQ ID NO: 73190 - DNA, 1039 bp, Homo sapiens
agagcttctgcacagcaaaagaaactgtcatcagagtgaacaggcaacctacagaatgggagaaaatttttgcaatctatccatctgacaaatggctgatacccagaatctccaaagaacttaaacaaatctacaagaaaaaaacaaccccataaaaaagtgggcaaaggatatgaacagacacttctcaaaagaagacatttatgcagccaacagacatgtgattcacctgttttttaaatgacatgacattaaaaatattacttttctaaaattcagtttttcactcaatgttttaggaatacttgcattataaggttgtatcaagtgaggcaaacctatattttggtattctgtattcaacacctaccttgtgaatgcctgttttctgccacgttctaggtgttagggatataagtggcttgcaaaatcagacgtggtttctgttggctctggtacaggtatacctgggcttcaaatcctggttccacctctttataactatgtaatcttgggcaggttacttaaccccctaagtctctgtttcttcatcagtaaaaaggaaagaataattaatacctttcttagaattgtttgaggtttaattgagagaatgtatgttcctagcatggtatccggcatatagtaaaatgcttaataaatgttagctttttttatcaccctaaaagtaagtaacatttgaagtataagttttgtgggggtttttttgtttttgtttttgttttttttgagacagaatctcgctctgtcacctaggctggagtgcagtggtgcgatctcggctcaccacaacttccacctctcagttaaagcgatcctctcgcctcagcctcccaagtagctgggattacaagtgtatgccaccacgtgtggcaaattgaaatacaagtaattttctttaaaaaaaaaaaaaaaactgaataagctgattcagtaacatcatcttcagtctggcatggtagtcatcttccttgaattatttgaaaagtctcgtgtttcatttgttctgtataccacc

SEQ ID NO: 73191 - DNA, 1038 bp, Homo sapiens
agcttcactctgacttataagtgacattttgtgtgatttcttgagtttcttgaatggaaagtatttctgaatatatttagaaaatactaacattaaaatatagatattttctgtatacttagagcacaatatttaggcatttgaatatataaatccaagtacaagtaatttggaatttaaaaaggtacatttataaaaagttacaagggtggtcagtctagtcagatttccttctagattactaaattgttttagaacattgtgatttattagaagtgtgaggaggaattaaatgtgtccagatacaagttctaaaagatgctacataaaaatgaatctgatatttttaatggtttctatcaataataactttgttaagatagttaaattctcctctttggatttgataaaaaaccttacttgtaatgcttctaaggagatctgttcagctatatctcctgtaaaaagatatgtcagggttatttttattatccgtaatgaaatcttgtaagagaaaatcttgctctgacagtaaatcactacctttttttcattaccaaagtccaaatgccaaggaaaagtcaactcctaagttggagaggcatataaacagttcaattatagtggctattcaaataaattttacaattcttttcctgtttttatagttttgttcagtcttgattaagctgttttaaagtatgtaaaagataatgttttagtagaaatctgtttttcttagtatatataaaaatattatgtagctaatgtggaatttggtttttaaatgtgatttttgaaggaatttttttgtagaacagattttaaaaggtttcttttagcatatacagccaacttttacattacattagatgttataactagaagtcagttatagttctggaaatgaacattagctttacttattctaagtttttatgagtcatcaaacttttggcatatatgctaatttatgtaacctcagtcaagattttcagacatcttcttgagattattaaaattaagatttagttacca

SEQ ID NO: 73192 - DNA, 1848 bp, Homo sapiens
attaatacaatcaaagaaggtagcagtgcttttatttactttttattgtcatcaagcagttttctaggaattttcagcaaaataccaattcagctataagtctaatatgaaacacaggaactgtgaatataagcttttggtgcttgctatggaaaaatcaaatcaatagctttaatgtcttcttacaatctcattttgtttcactatagctctgttttagttagatctgcacatctgttttgctccaggtagttaattttgccagttcagtttctctgtagatttttgccatagtagaaaaggattttaaatattaatagccccttaaaatattttattaccatttacttaaatgaacgatagataatgtacatgctttcttttttgtgcaaatacccaagacaatctgaattgaaagacagcttaaggacaaataaatagcaaaagctttcagtctttatttacagtatatagaaggttactgttttcattttaggtggaagagtctgatcagtaggaacaccccagaggaaggacatctttagcgatagaatttacataccgttagctcacagtaattgattagtagcagggctctgtagtacagagctagctgggcatgttatttgggatgtctttgatgctgtggttttccgaagcttgctggctgcatgcttgttgcctttgttcgtgacacaggtaattacttgataaaatgaagtgcatcgctgtgaacaattgaccctttggaacaatccaggctggtcagcagtctaaagccacactttaaagccatcatgatagcctcaaacttaagagtttccaaggtacagacaaaggtgttgtcttcctttagtacaagtcgagtgccattttcagactttatgaagtatttaaattggatgatatttgacgatattgaaaactcctctggaaatccatccagcctgcttttggacaccagaacaatgcgagactttatttttgatatgaaatcaggagcattacagaagattcttaatccttgtgaacgatcgtggttatctgttatttccaagaaagtagtctctctgggtgttagctgttctttctcccacctggatttcacttcctctgccagtcccttgagctgaaagaattctgcttcttgtgcaagaagttgattttctcgaaacccttcgggcaatagaagttctccatttcgtaggaagtttaggacatgcctgaagaggagaccatccctgtctatgaaataatgaccatcagcatcaaacgggcagaggatttttccatttactataccttcaaggaaagtgtctgggtacttggtcagtgtttgtttttgagtaatgtataaatatccaccaacgttgagggtcatcagtgtggatttgcagttctttccttgatcagtatcttccaggctgttgtgtttcccttcatactccttttctttttctcttctgtttattttacgctccattttttgaagatgctatttcagcttgttcttcttggctttgagattttttaaaaagagacactaccacacaagcacgcctttattcagccccagcctggtgatggaatggaaacgctggcagcatcgcctgcgctgtcagctcggttttgcagtaggtggcgtatcagcctatgtatgcaggagctttctggagtaagacggaaaagagaatttgcatttaactgtatcagggaagggatttgttgtgaaaggattttcatgtctatcctttgaagtaataagagttactcagaataaattgaatttcctcttgtcagttaagcagatccaaatgtttaattcttcatccaaatgtgaatgtttaa

SEQ ID NO: 73193 - DNA, 1066 bp, Homo sapiens
ttgttgtagttttagtttttaatttatttttgtagagacaagtttttgccatgttgcccagacgggtctcaaactcctggattcaggtgatctgcccacctcagcctcccagagtgctgggattacaggcatgagctactgcgctgggccacactgttaaaagttagactttagtttatatttctcttgcattaaaagtattttaaaattatttaactgtatgttgacataggaatattggaagagattcttctaaaatgcatacttcttattttctttaaacaatattagattttcaggtataaaaaattatattcttatagtgatcttgaagttaacatttatgtattattgagatcaaaagttcgttgaaatcgaactagaaaactaaggcataatgtttttagagctgtgtttttgcttagagactgtgaaattcaacttcctcatttcaccaaagataacattgcattccagagaatttttagtattttatctaggacttcacagcaaagccaacattttgactaaaacgtcctttactcctgcagcacttaataagacttactcttatattctgacaatctcatgtttgtcttgattttgcttttttagattaagtcttttctgtcaatacaactttttaagaaatactgaatagattttgagggagaagggatacaactctggaagtacattcatggaattcttgtgttaccattacaaatagtcactgcacatgagtagcatcatataatagcaaaatcaaaaaggcataacaatttcatttataggtatagtcctctttttttgaactttataggataccagaattagtacaacataactgtagtatagtgatggagactgtgctagcatgttcttgtttaaataaagtgatgtggatagatactatgtactctgggtctgcttccttacaccctgtttggcctgtctatagatgtcttcatgggaagccccaatgctgttgctgttggaggataggcttccatgaggtgatgagaaggcaggagtgagtcaggacagctggaagtgggactgctga

SEQ ID NO: 73194 - DNA, 2102 bp, Homo sapiens
tcctaccatctgcataaggcagaactcattccagcaggaattcccatctttttaccaactccttatgggaaatgaggtctttgtcatcccgtgattgatgcaggacatcattgtaatatatacacttgctccatttatatgccagagatactcccatgccatggaaggaagtgaaaccttaccaggaggttatccctcccgactggaagatacaaaaagtatgataattctcctagacttaacagatcattcctctataaaattcagacactcttcaaggaaaaggaatggttttagaagctgcgtttgataagaacagggagcttctgtctccacattctcccctgctatcaaatcttggttgttgtcagctgcatgcttctctgcttgtcttttaaaaggatttcattcccattaccttagaaagaaagtaaaagctagagaagctgctgtcaactttttacttaaatctgacagtatatctctgccttggacttgcccacattttttttttgtttttttgtttattgatctgtgttttgaccttcctctgcctttcacaagctgagtttctttttttttaacatgtacttgcttcattgcctcttgtcaatagcactgaatgtaagaaacattcattttgatattgaggtatgaatattttgtgttggcttcttttgtgtgttaaaaataaaaattacactgtctaattattgacatgttttaagaatcaaggattttcccatgttaatgtaattctttttgagtgtccaaattttagttctattttgaaatataaaatttatctgctctaaatgttgtctgctactggtattacactaacaaaagtactatggcagccactttatgtaactgattgaccacagcatctcacaaactgtgccaagtacttgaaccttcctaggactaataggacgtaacctctggccacaaggtcgtgtgaacatgtcattgcagtccaaagaatacagctgtaaatattttgcagtgttgaactgcgtcttcaaggaagcccaggaaaattgcctacattggtaaatgttttagcttcatttgaggagtatagaaaaacataaggcactatgtgtcaaaaggagcacaaataaagacaacagactagctcagaagttcaggtgaaattccattccacatttctttgattttcactacagaggcaatcttgacaatttataagtcatattaattcatgttttacatgtactttggaaaatgagtatttcagggaaacctgtgttttataattttgtaagcagaagtcataccttaagttttttaaaaatgaagtttttttttgaaatataacctgtgcgttattatttactggaaaattctattgtaaccagatgagcatagcacttatgtaagccatcaaatgaacattaaaattataatattgtacagaactcatttttatagtgctatttggcaaaatgcaattttactttctctttgggaagaagatattttaagctaataaccattatctacaatctcaaaatgaagggcataactttgaaaactcttgtaaaggtagtacagttaggaagtaaatgactaaagagggtctctgttaccgtatactagcgcctgccactgttccttctgattttctcatcacttaacatctgcttgtgtcttcagtgatgaggtggtgtggagaagagagaagaggatctgaacaggagaacaggatgtgatggctcaagggagcaaatgtggtttcttacagagtagggaggagttataaactagggatggagaactctatcatatcacacatttttttcatatttaccatttctataactgaggtacatcttaatatcgttagcttgtcaaagtttagcagcagtattttgtcttggtggcacgtaaaataatggttgctattacaaatgatagcatcttatagttgatgaaatatttgagcagctctgtgagctattccctccgtatcacaagaaagtaaaattaacagacagggaggagggaaagaattttgcagggagatgagagagagagggagagacaaaacaatgtggctgcttgatgttaaaatt

SEQ ID NO: 73195 - DNA, 1046 bp, Homo sapiens
tctgcatcttcttgagatttgttgcatatgttgcattaagggaccctggatacattgattatatacggtgtgcttgtaattagttcgtacagagtctcctagattttggagacatccaaagatcactaaaaaaagattttttagtataaatatgtaggcatggttctatacactttctgcattttgatcaatttatctgtctcccccagtgaactgtatgcttcttgaaaacagtactgtgtcttaatcatcttgattccacaatgcctagatggggccttttgcatagcagacattttgctaatgttagtggaatgaagtaattctctctgaaaagatgaatcataaatgcactactcatgagccagggaatttcctgagtcttttcttaaaacccaggtgaattcttgtggaaatatgactgtttctaaccacagtcatacatttccagggtataaagctggtaccattatgagacatttatatgtgtattatacaataaggtaaggtctgtcaagtgaccacaccacaatgcttggtggccagtaggcacacaatagatgctagcctttgtttcctttttctgattctcctaggttttatgtcagagtcactataagaattactaaggataggggaaattgcctttctgtttggacaaatattcatagcagttaaagattctgttttgacatgcccagatttagaattctgcaggaaaacagaagtcagagcagctggcaggctgaactggtacacaatataacccagacagtagacctgcccagtgtcacagtattttctgggctggctgttttagtcacaaggtacttgagaattttattcacatacacaaacacacacacacacacacacacacacacacacacacacggtctttgatttagtggtttagactagctgtgttttcagaagttacttctttgtcaaagacgatagcctttatactctttaatttgattttatgcccttttaagctaccttatttagaaggagcagagtgtataaaagctgttcctggcaaa

SEQ ID NO: 73196 - DNA, 1013 bp, Homo sapiens
tttcagtatctgggctgtttatttgaggtattttaagctactttgttaatacatcctggaatcaaagtttttaaactacattttctagttgtctttataaattttgattctttaaagacatgtataagatctttgtaatattttattttccagggctgtaatttttccataataaatatgtatccgaaatactgtaactgggccaggcatggtggcacatgcctgtaatcccagcactttgggaggctgaggtaggtggaccattcaagcccaggagtttgagaccaacctgggcaacatggtgatatcctatctctacaaaaagatagaaaaattagctgggcgtggctgaggtgtgaggattgcttgggcctgggaagtgaaggctgcagtgagctgagagcatgccactgcactccagcctaggtgacccagtgagaccttgtctcaaaaaaaaaaaaaaaattgtactgtataaagcaagtgtagttgccagaatatcgtcctattctcttgatctatagagaaatttttataaacatatatactgtgttagagagtttgtttcaggatcttcccctgccccctaaatttttatgtggttaacattttgtaattagtatttaaaaatgctgattgtaaattcttgataccccaaattttatgacgttcaaagagtcagcaattttttaagccctgaggaaatatattatacctgtttcatagtttatttttaatgtgttttagccccatgtgatttagaattatactttttttgttcattcattcagtacttactgtctgccaggtgctttcttagaagtgagagaaatagctgtaaacaaagcaggcaaaaatctctgcgttcgtggaccttccattgtcgcagattgtaggtacactgaatcggtagtggagaagacactgctgaagtagtggtagtggcctgttggatatcagcattctcatctacataagaggccagttgagctggatcatctcaaaattttgca

SEQ ID NO: 73197 - DNA, 1009 bp, Homo sapiens
ttagtgtagatctagtcataccacttccctgcttattgcagttaaaataaaatgtacaaatcctgcatcatctggccttcagaactttgatctgatcctgaagcttttttaacctcttcttccactacacatctcattcattagacagcagccatagttgccaccttttatctgtcaaaaagaacaagtatagtcccatctcagggcccttctttctgtctaaacacatatctttcatcagatcttcagttggtagcccccttccaaccatgcagttctctcagtttatatggaacctcctcagatgggcctttctcgaccactgctgggtgaaatagtatagacttctccccaccgccgccactaccaccacctaattatgtgctatgacattactcaggtttattgtattcttaacacttaccattgtgtgactaccttaattaattaattatgacatactgactatatctccaccacctagcatagtgtctcatacataatagtgctcagtaagtattcattgcacgaatgaatgtttatcataacctttttagcctctttcattttaggagatttatctgaagttaacaatgtttttctgttaacaaaaggaatacatacaatacaaacaaaatcctttgggattttgtttatttgggaatttaacaagggcccttcccttgttaagttttttatttgttgagtccttataaaattgaattgacttttatttaatgtattccaagttaattttagaatctcaatgaaagaagcccccttctctttaaaatggcatgtctttagtataacatatcatgatacataaatgtactttagcttggataaggaattaaagatgtcatttcctgttagaactaaggttaatactataggatgagcacattttttttcccctcagaatcaatattgtaattccaagggttttacagcccaagcttcagaaatgcatgtaaacccattcagtaaaccttgaacatctattata

SEQ ID NO: 73198 - DNA, 1071 bp, Homo sapiens
ctatcagttattttcatcttgaataattttatggagacttcatctctataaaaaccttaaaaaagcagctgagggtggtgtgtgcctatagtcccagctacgcctgtagtctcagctactcctgtagtctcagctactcctgaggctgaggtgggccaatcacttgagtccaggaggtgcaggaggttgcagtgagctgagatgatgccactgccctccagcctaggtaacagagggagaccttgtctcaataaaaaaaaaaaaaaaaaaaaaaaagttgatttttataatccaaaatgatgcagttgtataggagaaacaaaacacgtgcgcatgcgtgcaccccttatgaggctaatacgaacaagaaatacataaaattaatttataaatctgttgtttaccaatcctgtcgggtacgcacaccaattttggagggagtgggggtggtgatggccaaatgctattgttcacagaattttcaattcttattacataattatattgaatgccatatggtgttttattgtagttcattaaattactagcagtttatacttctatttgtgttatcattaacgcatttcagtagcacattttttaaatacaaaactttagatattcctttttcataaaaaactattcaagatgaaaataactgatagaatactgcactatgacttttctagaagtaatcccccatgtcagctctaaatggtgaataaatgacagtactgtgctatacagtccttcaaatatataaaataagaattgttgctaagcatgttaacaaagaactaaaaatcttaaaggatgtcttgtcttgacaattatctctgttggtttggtacattaataccattttcccttcttgaaattctagaggagtaagttatttctagtagttgggttttcaaaatagttactaaactcctttaaaagtttgtaacttaaaatttttagttcactttaatgaatgaatatctttctaagctatattatatattaaactgtatccatacttcatgaagagtttgttgagaacataatctaactttctctgtaacttag

SEQ ID NO: 73199 - DNA, 1031 bp, Homo sapiens
attatttcatttttcaattttttctttctctttaaggtatataattatattgcctgcaaaagtatgttgacattttaaaagtatttattagcatatgaaatttagaagagcatattgagttgtatatagatatatattttcatattcaattaaaaatgtaagatacagtttccaggttattgatcagagatagatagtaacttatatattctgcttcagtttatccacagggagagcaaaattcagcattgaagaacctaggttataaggctggacagtttttctaagaatagcaaatgatttcacagacatatacatatgtgaaaacatcaaattgtaccctttatctacagcttatatgtcacttatatctcaaaacttttttaaaaaacaaatatcgcaaaacttttgcttgagttaggctttctctgtgatagtcttgcctttatttgctttcattgaagaattctttaaaagtttttactaatgtattttaaaaggaatatagatcagtagttaacatagtccctgataggtgacagacattctgaatgtattaaatggaatgtaattaaatgacatattgggttatttttccttctttaacaccatgctggtgctcactttttaggaggctgtgggaatcctgagtcctctgcagtagagagatgagtaaagtgcatggggaaatggcacaaatgcccagggaataagggaaaaattttctggggaggtgatggcccaagggatgagtttgccatacaaagaagggggactgaaggctagaaaacaaggtgacaaatcctaggaattaccagtgaagaatcctttgacgttccagaagctctttcatttggttgctagtctgtcttgcccacccctcctgtaggttgtagctttttccttttcatttcttgagcagtacctgacattgggccagacttacattaggcctccagaaacctcttgagatcagtggcatttgtccgcttaccatgctcacacaccgttcttccctttaaccgacgggc

SEQ ID NO: 73200 - DNA, 1045 bp, Homo sapiens
aaatatgtggtgctttacgaaccacatatttccaaattatattattttgtacaaacctagataaaccttaccttgactttgaaagcatatcaaggtcagtaatgtttaatttagtacattgttcagtgatgaaatggagttgccagttgttcttgtcacttcatgagatagtgttaaatgaattatttagtgttaaggaccctgctaaattattttaaacgattcaaagcgagttaaagtattttaagatttagttctttgttatattttcagttcatacattaacctttttagttttgaatcataagttgtcctcttttaattaaaacccttgtggttgccttttaaatgtatgatagaacagttaaatttttaaaatgagtttatttttaaaaaaaaaatcagtgttttcctttatgtaaaaggttaaatgctttgaggataaaaactgcatgacactgtatgagtgatgaaattggcttttagaattgtagaattaaaattgaaaggaaagtatgctgcataaacctgagtctggatgcagtggctacaaataaattcaagtgtaagagtgtgaccagaataagctaccgtttataaagaagcacttcactaaacaaactgaaaccctgaggaattttcaaattgtgaagtaatgggaacaatcatttaatatggaaggaaggagctagtgcatgcctccttccttggatgtctcataagatcaaatcgtggagatgactgaaacagggaagataatttagcggcaacataacagattaccatttagagaggccaaacccctgagagctgattgcattagaggaggatggggggccaagattaggacacaggtgtgttcagaaacaggctgacacttacttgtgtttcccacccactcccatcccccaccaagttaacacatttagctgtcccgacactttgtaaacattcctatatctgtcttcaatcttttttctctctctaaaggtttatctcttagaagctttgacataactttccttggaggaatcatttccaccta

SEQ ID NO: 73201 - DNA, 1033 bp, Homo sapiens
ttttatatattagttttcattgaataagaattatagaaataataactcttcatatttcactctgctaaacaagagtgttaataatgccttatattttttttcagattgcaaatagaagagtcttccaaaccagtgaggctatcacaacagctggacaaagttgtaacaaccaattacaaacctgttgctaatcatcaatacaatgtaagtcttctgcttgtctcttttcattcttttatatcttcattcttttctgtatcatagagtcttaggtttccaaagaacctgagaatttacacaccttgccatcaggtgcttgaattacagtacctgatctggacttagtaaggaatatgacaatttgctaaaagtacagaaaagatgttcactctacattgcaagttatatcatggcaaaaagaaggcaaccactgtttaaagtacccttgataaatttttacaaagaagtaaaacacttcaattctcaatgttgcaatgttgctgatgttttaaattacaatgtactaactaaatattagttttactatttttaaaaattattctatacctttgtgatgaaccataagaaagtttttaatgtgttaaaaaattttaaaggtcatggaacagcagtaatttttctcattgattattaagatcactttgcctgatttcagctttcacaggcattttaatggtctcatactaccatgcaaagtgaggaccatctgtacagtagtactcccttgtccacaattttaaaactttatgcagtttcagtgacccacagtcaactacagtcaaaaatattgaatggaaaattccagatgtaaacaattcataagttgtaagttgtgcaaccttctgagtagtatgatgaaacctagcaccatcttgctccatcccatccatgatgtgagtcattcctttgtccagtatatccacattgtatatgctacccacccattagtcacttagtagccctcttggttaacagatctattgacacatgataaaaagaaagaagaggctgg

SEQ ID NO: 73202 - DNA, 1068 bp, Homo sapiens
tcttgccaccccacccttaccaccaaggctagagttgaagacttgttgcaaaataactggcaaagtggcccttgacctttgtgagtgttgtaccttgttatattagcttagctattgctgatacaaagctatcacggtgttcaatgtatttaaaaactaagcatacagaacatgaatgcaaatcactgtattttgagagcaaaacgaaaacgtattttgtagttttgacaaaacttactcttaaaattatactctttcatccctttaaaattttttatcttgtgtatgcttatatctatttataaatacagtagtacgtttgtccagtttataaagatatatgcatagctcatgcttttaattttttgctcacaaaggtgtataatcaaagttatagagtcagctgatgcgtaaggttctttgcaactccctccaactttgaatccaagtaagggcgactctgtgtgttctggttgactttgtgaacatcgtatctagcctatgtaaatttcatagcattcttttatgtatttcatggcctcttataaactttctcataaggaattccttttcttctcataaggaatcatgtcctctgttgtctagacatttgttttcggtgttgctgtatactagaatcacctgggaagcttttaaagaagaaaaataggccgggtgcggtggctcacacctgtaatcccagcactttgggaggccaaggcaggtggattacctgaggtcagaagttcgagaccagcctgaccaacctggtaaaaccccgtctctactaaaagtacaaaattagctgggtattgtggcacatgcctgtaatcccagctacttgggaggctgaggcaggagaattgcttgaacccgggaggcggaggttgcagtgagccaaggtcatgccactgcactccagtctgggcaacaagagcgaaactccatctcaaaaaaaacaaaacaaaacagaaaaataccctcagaaactgatttggttaatctaatggggaggccagccatcttaagtttttaagcttcttgggtaattctagtatgcagccactg

SEQ ID NO: 73203 - DNA, 1047 bp, Homo sapiens
tatatgctctgttcccttcagtgtggcagccgactgtgttagtctgcagaactaagatttggggtttgagtggttgatcttttaaagttctatgcataaatttgaattttcctaaataaaaaggatgtttgtaggactatatcatgagggcttttcagtaatatttgcctgttataatacatagtataagtatactacatgctttgtccatttgaatttgcacacaaaggactgaccaattctaaagaaataatttcctcccaagagataatgacacactaggcagaaatagaagcattagttgaggggagggggaataatatctcataaggatttaacatgcagaaccatgatattcaaagctgtcatgctcacttcaaaagttaaaaggctttacaaagactgccttgacaaaacacagtatttctgcaaacaataatctagaagtttatagatgtctgtattataaattttaattggtagtgggtggcatttataattttagtcagtgattacagcttcagtaatgatggttgaacatatatataccaaatccacaaaggattgtcaacatttggttgcattttagtcaagaataggctgggcgtggtggttcacacctgtaatcccagcactttcggaggctgaggcgggtggatcacttgagtttgagaccagccttgagtttgagaccagcctgggcagtatagccagacctacctcttcaaaaaaattttaaaaattggctgggtatggtggcatgcccctgtagttcctggagttcgagaccagcctggccaacgtggtgaaaccctgtctctaataaaaatacaaaaattagccaggcatggttgcacacgcctgtaatctcagctattcaagaggctgaggcaggagaatcacttgaacacgggagacggaggctgcagtgaggtgagattgcgccactgcactccagcctaagcaacagagtgagaccccatctcaaaaaagaaaaggtttgggggccgggtgcagtggctcaagccagtaatcccagcactttgg

SEQ ID NO: 73204 - DNA, 3157 bp, Homo sapiens
tcaagcacatccttgctaatttcaaaaactaccaggtaaataccttaagtatctggatcaaaggattgtacaattttaactgcaagagcaaaaattaagttgattaatcttcaattctatactagtattccaggtgtagaaagtggctttcccagctcgcaggtgtttccaaatcttgtcttctgattgaaaatttgcttcccagatgacatttctcagtttttctttttgtgaattgcttaaccacctaagtgttctttcagttttttgcttacaattttaatgtgtctcattgctactggtcctccttctaatgtatctgagcttgttaattctacttttggaaaatgtcagtggctttccctttcctctaattttccagcttcatgcatcccctggccataagatacttccagactgtatgatatattctatcactgtcagccttatgttccctgtggttgactatataagcacgctttagggtttgggattgtatttaggattgagagtaaaggtttcctgaaagcctagtgttcctggattgctctgtacgttatttttctatttaggtcactattaaggtgccttaatccagtgaacagatgtctatgataagtgagcatcagagcttttgggtactgaagttttgatttttgtggtggtctaaaccttcccttgtactgtagtttgttttgaatggcatgtatttgtatgtaatagtctaattctaggtattttgtttgcttcccaagttctttattggtgaaaacatgaatccagatggcatggttgctctattggactaccgtgaggatggtgtgaccccatatatgattttctttaaggatggtttagaaatggaaaaatgtgtaagtacaaggaagtgggttaaaataaataatgtaaaaaagacattttagatgtgatttgcaattgttttgtgacactgagaatgagttttacagcgttctgaaacatggttttagttttctctttggggatcaagagaattgtgtttcatatgtaaaaaattcttagggtataaaaaggcttagaatcttatttgtggaaaacgttgagtgcagatggggcataataaagtacagtttaggctgggtgtggtggctcacacctgtaatttcagcacttgggacgccgaggtgggtgcatcacctgaggttgggagttcgagaccagcctggccaacatggcgaaaccctatctctgctaaaaatacaaaaattagccaggcatggcagcgggcacctgtaatcccagctaatcgagagcctgaggcaggaaaatcacttaaacctgggaggggggttgcagtgagcagagatcccaccactgcactctatcctgggtgacagagtgaggtgctgtctcaaaaaaatacagtagagtttaaatgctgaaggagatcagagaacaccattgatcttcctctagatatggcctcactttcacttcataatcatattttgctgtatacgtatggatcagtatcagtggttttcactttggtttactgataatgggcagctgatcattgaaaagcctagtgcagtactagcttagtaaatagagctgactgctgaactggtatgcaaattgttttactaataataaataacttggtgtcttctatggaaggaactgctggaagctgtacagaaacaaaggcattcattatcctagttttcataggcttctgtataaggaagaagaaaaacataaagctatactgaacaagattagagtcaacagtagacagaaattacttagaacagtataagatgacttaccaaaggggttattcagacagtatctgaggtttttgttggtagagcagggtgtgggtggtacatgccacagccttctgaaaaatgagctaccgctgatttggtaagggtgttctgcatccactgatagaccttgaacaatttactgttgttcttttggtttgcactaggatgcaaaagaaagaaatccctgcgctttctgtctgtctttgtggcggcccagattgaattggggaatacatctttagcctggaaatgtaggctgcatgttaatggtaatgtaacttttgcagtgtaatgtttgaaaaatattaatgtagtttttgcttttacagtaacaaatgtggcaattattttggatctatcacctgtcatcataactggcttctgcttgtcatccacacaacaccaggacttaagacaaatgggactgatgtcatcttgagctcttcatttattttgactgtgatttatttggagtggaggcattgtttttaagaaaaacatgtcatgtaggttgtctaaaaataaaatgcatttaaactcatttgagagaatgccttttagtttaatgcatatttaaactaaattgatcctgtagtgttcctggagaagctagagcctgattgtaggctactactcatcaattaacttctacagtggagactacttctgggactggaatataaaaaagaatcaaaggttctgattttgagttgcaataaagggaaagaccatgctcatagcagtgccaacatctgaagtgtggagccttacccatttcatcacctacaacggaagtagttaactggaagagattaccaagagaataaaaagagactcattcagtggaagcaactttgtctcagcttatttcacataaagagagcgaagtcttttgggatgaatgttaattaaactccctggtaactagaacagggactggcaaactagcctatctgaccacctgttttgtacactttaaggtggttggttgcctttttaaatggttgaggggaaaagaataccttgtgggatatggaatttaagttcgagtccagttttattggaacgtggctatgcttattcatttatggattgactgtggctgttgtcagtgcatgagcagagttgtgtctaacagactagagcctgcaagtttgccagcccctgatttaaaagatgaaggtacacagaatgtgggctggctggtgggcaaaggggtaaaaatgttctctatattgtatctgaaaagatggggtgtctgaataagaaaatgcatctatttgacagacctggagcagttgctatctgctgctatggtttccaccacagatgcaagaagaaca

SEQ ID NO: 73205 - DNA, 1912 bp, Homo sapiens
cgcagggccaaagtttaattcctctaagctccacccagctcccagcacctctccaggcggccccgtggggtagggcggagccgggtccaacgtactccgcttcccccgctccacccacccagggctagggagcgccccgagagttggcctcctcccacgctgcgcgcgcacctccccgcccccacccctacccgctggcgtgcccagtggaacggagccttgtgtctccgcctcaagtccccggatgctcacctccccgactcgcccccgctgtggccccgcccccgcgcggctcttcgtgccacgtcaccgcctgcgtcgcttccggaggcgcagcgggcgatgacgtagagggacgtgccctctatatgaggttggggagcggctgagtcggccttttccgcccgctcccccctccccccgagcgccgctccggctgcaccgcgctcgctccgagtttcaggctcgtgctaagctagcgccgtcgtcgtctcccttcagtcgccatcatgattatctaccgggacctcatcagccgtgagtcctcactgcactatccttactgccgcacacgggggtctggggtgcgggtgggggcggggaaggcgcagccgtcgcgggcctaggggacgccggcggtcttagccgagcgcggaggggtcggtgcccggggctcgcgcccagctctggtgtgctacggaggggcagatcccgcgtgcggccgccggcgcgggaaatgcgggaaatggcggcgccaggcgcacggtgatgggcggctctgtgtatccggcagacgatgagatgttctccgacatctacaagatccgggagatcgcggacgggttgtgcctggaggtggaggggaaggtgagtcggtcgggcctgcgcgtgggggagtccgggccgagcgggctcgggtttcctccgctcccccgcctgaggttgtgcaatcctccccgccgcctcctggcggaggagacgctctttccgggcttgggtttttctagaaaactggaggcggagctgatcctggaaataggcccgccgcctcggcgcccatcctcctcccggggttgtccgggacatgatgcttccggcttaggagcctggagtcctttcgtgtttgtcctgtccccacttaccaaccggaggcatcacatgcccgcaactggaaacaactttttaatgaccccattttttgttccggccaacagacaactcttttaagttaggtcgttttgagaaatccacgggtcacaactttattcccaaaatggtgctttttttattttcagcaagaactaagaatacttcttatccgtgaactattggcgtggaaggtgctttggatgcgtttgtgtcttttgcaattatactgctttttcttaatgcagatggtcagtaggacagaaggtaacattgatgactcgctcattggtggaaatgcctccgctgaaggccccgagggcgaaggtaccgaaagcacagtaatcactggtgtcgatattgtcatgaaccatcacctgcaggaaacaagtttcacaaaagaagcctacaagaagtacatcaaagattacatgaaatcgtaagtgatactggcagtacctagctgatgtctagaatcttacaggatttaaagattggctaacttttgaggttctttcgcagtgggtatacttttgtgaaagtccttgcttttttattaatgagttcacggaaaagagtggttgcttttctataatatgagcatactgaagcctgcagtctgtttccgtttagaattagaatagtattttgaaaatagtcaacaagaaatgtaaacattcttgaaagataccttctgtgaactagtaatttcttaacagctggttgcctttttcagtgttttctttttttaagcttggatattttt

SEQ ID NO: 73206 - DNA, 1479 bp, Homo sapiens
aagctgaccttggaagatagtttgatgtggttaagggtggaaccccttttatttaatcgtgtccatagcgtgggtctgcctgtacctatttgttattaagtgtgccatttgtaagtctgttgttatgcactggagttgtgaagatggcattttctgtgtcatccttaacccataaccacagttctttgtgacatacgagcagttgaagaaattggatttgtgacaagccaaggctgcatgagacatctttctgaaaatggtaacttctgaaacagcaaagcttcctgtgtttcactctgcttctcactgcttggctcatcacagattctgggatgtgagcaacagatgaagactgggttagttgagattgctgtgtgttggcattggatgctcttcatcaaacgtttaatggcataaactaacatccaaacactagtctttaccactgaagtgcccttcaacatcaaagataatatgtgaaatgcatgtttcttgctaaagaaaacttgcaagaaaatcaggagcgatgtattgttttattcagggagagtagctcctgatgcatctcagctcatgactgagaatcagactgctctagaaaagctcactggaaccatggaatggagcctccgagaaggtgttatggtttctgaatttctgggagattttgctccttgtcaactgaagaaatttcatgtatggagacctggactgttcaaccccaggtataaacggtgcaggaaatggatcctaggaatatcacactgctttatcatttcctattttggcaggatcttccacttataataagtgattttaagctttgaagacttgacatttgtgagaaattgttacaaagtaataatctctaaattcgtggtggtgttatgtgttggctttgaaggttgcaaggtctgtattggtggggggtgttttcaagcagcttaggttctgtcttaggtcatgttagtaattagctttatgatttttagcaaagcatatgtatttctcaatgagtaaaatggggataataacgtctattgatgtagagggtcaaatgaagaacaaatagtagctgctgctacttgactggaaaggtaaatgtgtttacatcatgctgtggaacagctctaaacagtctatgtagaagaggggcatgttctcatgggcttctcatggtaattgtgaatgaagccctttgttaaggtcttgttgaagaaagaacactgtataagttcaggctttagtacattttccttagcaaaatgttggtagtgaatcaaagagttgatttttccaggtttccagtttttactttagtttatgttgtgcctgtcttggactttctgtttagtttggatggaaaatacctgcttgaaattttaaaaatgatttctttagtgcatctatttagctagtttctgataggtggtatgtaatattttccctttttctttccttctgtagacacaataagtc

SEQ ID NO: 73207 - DNA, 1141 bp, Homo sapiens
agctgtcgctgggatttatcagctagtataatcggtgctaatatgtaagcagtttatcaagctctctagatatggctcttcttgacatgtttcatgttgatacatgttagttcaacatagttttggggctgggcatggtggctcatgcctgtaatcccagcactttgggaggccgaggtgggcagatcacttgaggtcaagagtctgagatcagcctggccaacatggcgaaaccccgtctctaataaaaatacaaaaaaaattagctggatgtggtagagtacacctgaaatcccagctacttgggaggctgaggcaggagaatcgcttgaacttgggaggcagaggttgcagtgagccaaggtcacaccattgcactccagcctgggcaacagagcaagacttcgtctcaaaaacaaaacaaaacaaaacaaaacacgaaaaccacaaacaagaaaaccccatagtttgggcagaagctgttttctgcctttgatggtggttgtagctcagtgatggttaacttttttttttttttccaatggtgtctttatagctcaagcttcacctgtggtctggcaggggccctggcctcaaaccctgttgatgttgtgaggacacgtatgatgaatcagagagtgcttcgagatggcagatgttctggctacacaggaaccctggattgcttgttacaggtaagagcagatgtctgtctctgcagggttgtgaattatatatttttttgatctaagaagtaactaaattatgaaagctactaaaactaagatgaatgatgctttaaagcccagagatgtacatgtgtgagaccatttttgccacactgtgcttagcttttataaatacaatgttgttttctttatacctccatctgctgtgaaaggtgaggaaatatttcctgtgattataaaagaactgggtctccttccaaaatgtactttcttcctgttgggtcaaactagtatgaatatccctcattcagacatctctgttaaaggaacacatcaatcttactttaattctcagtttaaataattgggcctcctgttttatgagtgggtgaaaggtttcacctgtctctgccactagattgccagtagtaggattaggagtcacttttttt

SEQ ID NO: 73208 - DNA, 1048 bp, Homo sapiens
tcattgagaataaatatgaggggctaggctttcacttagtgagctaataatttgcacatctggacccacctgtgtttttgttggattttgaattttacgaaatcgttttagaggccgggtgcagtggctcatgcctgtaatcccagcactttgggaggccgaggcctgaggtcaggagttcaagaccagcctgaccaacatggcgaaaccccgtctctactaaaaatacaaaaattagccaggtgtggtggcgggtgcccgtattcccagctactcgggaggctgaggcagaagaatcgcttgaacccgggaggcagaggttgcagtgagctgagatcaagccattgcactccagcctgggtgacagagcgaaactccgtctcaaaaaaaaaaaattgttttagagaatgtagtttgattatggatggcactctgcatgtgggttgcctagccgatgttaagtgatttttagattgcttttgtccctttgtacattggtttaacaggattgcccccgcgatgttacgccaggcatcctatggcaccatcaagataggcacttaccagagcttgaagcgactattcattgaacgcccagaaggtgagtggggaatctgttttccactgtggacaggaggttggttgtctgtctttttattcaagtggttttggagcaggttttcttcagcttatttgtgactttcctactgctacaagaactctgggtgtaaagtcttagttaattgtgctgaaagcaagttggttatcaactcaattgaggggagaaataatgaaaaggaaccatctctgcaaacattttaattagttgtccccatctccaaaatgcctagaccaggggatgtgttgttactattccatccaacttaaaatttgctaaaatcatatgaattgtcatctatttttcaggaaaacagtgaatacatttcttaatattaacaacactgaatgctaatactctggctttttggttctgtggctttgttttgatccatagaactgtccatcttcatctcttttcacaatggga

SEQ ID NO: 73209 - DNA, 1011 bp, Homo sapiens
cacatagtatatgtgtgtgcagttcgacccagcctggatcattcactcatggcatctgctttcttggtacctgtcagcatttgagtttgctatatctatggcagacagaagccactgaaagtgtttaagtaggaggatggacctgatcagctttacattgtaaacatcacctgcctgccatggagagaaagaattaagagacagggagcactagaagcagggctgtcatgtaggaagactagatgaggatctgaattggttttggggatgaggaaaaagaagacaggctagaaaactatttagggtgtaggactgatagcactacgtgacctaatatgaggtttccatacatgaagcgggtagaagggaaggaggagccaagactaatgtctcaattggtggtttttgccagtgtgtagctggagcttccatgtcctggtttaggaaacacaagaggagagatgactgtttggagaaggaagagaagtagttcagtgtgggaccctatctgaaggtatacacaggacatctaaatggagaatcttggaagattggaaatgtgtctttggatccatgttggaagcatggatttggagtcatcagtcttttattttatttttcatttatttattttgagacagggtcttgctttgtcacccaggctggagtgcagtggcacaaaatggcttacagcagcctctacctcccaggctcaagtgatcctctcattgcagccccctacatagctggaactataggcacaacaagccactgcacctagctgcacacacacaaacacacacacacaatttttttttttagatggcgtttcactcggttgcccaggctcactgcaacctctgcctcccaggttcaagcaattctcctgcctcagcctcccgagtagctgggattacaggcaccagctatgacaaccggccagttttttgtatttttagtagagacggggttttaccatgttgtctaggctggtcttaaactcctgacctc

SEQ ID NO: 73210 - DNA, 1054 bp, Homo sapiens
cagggtctggttctgttgctgaggctggagtgcagtcgtctgatctcggctcactccagcctccgcctcccgtgctcaagcggtcctcccacccgggtctcccaagtaggtgagactacagatgtgcaccaccatgcccggctaattcttgtatttttattagagatggagttttgccatgttgcccaggctggtctcgactcccaagctcaagagatccacttgcctcggcctcccagagtgctgggattataggtgagactacagatgtgcacgaccacgcccggctaattcttatatttttattagagatggagttttgccatgttgcccaggctggtctcgactcccaagctcaagagatccacctcccttggcctcccaaagtactgggattattaccatgctcagcctcaaacacaagttttatgaatcatttttggattgtgtctgtccgttttccttgtcctttcccccagctttgccactgttaacctgtttggctgtaaagaggtttgagaagctcaagggtgttccctgagccagatgagatggactgtagttatctagtcactttctgatgatgcacattatccagttcccatttgtgacttcctcatcggttgggttccacatcagatcctgtttgtttattctctggagtcattcattcagcaaacactgattgagcagctgttgaatgccctgtgctgggttggggacacatcattgcttccagggctcagtcactgctgtccaaggatagaatactgcccctgtgggactggggagaattgaggccaaggtgggtaagctggatgagccgtggtaaccacccactcaccagcttaggctctctgtgctggtgggctttcccattgacacagtgaatcaaggttactgtctgaggatgggttttatatatttgggtggactatttgttaggtacagtatttaacatatttatctgcattatcagatttattttattttattttggagacagagtctcactctgtcaccctgtctggagtatggtgacgtgatctcggct

SEQ ID NO: 73211 - DNA, 1025 bp, Homo sapiens
ataaaatggggacttaactcatgatgagtacttatctcatagggaattgtgagaattatgtgaaatcacgtatgcaaggtgcacgtggcaagttacttgctattattcttgtgctttctttcaaattattaacatcttaaaagaatagattagaatcctgtgatgctgagctggtataggtgtcattcagaccaaaggtaagaaaaggagaggttaagtgccttgaggaaggttctgagactccacctatacctcttcagtaatttgctccaagcagagaacaaaacatcaggtttcatttagggaattaattgatcagattgattataaaagtggttttctccaacccagaactctgcaagaagtaaagcttgggagagaaaggtatgttacttgttatttcagggacctgctcagctggtcaggcaaagcttgagaatttattgtacttactatttaatgttagtgtctccatttgcataaactatacagtagctctgcagcactggcccattagcaatctagaactgtgttctctctctagtggtgtctgtctgctccatctggaagccaggacagtgctggtaagcagcaggcattcagtcacctcctcctgagaagtgaatgagaggtcagaacaggaaagtgtgtgataccaccacacccctttttgacttgtcattctataccaggtgttttgagaaaggaaggcagctgcctagtctacttaatgggggcattttctcgtatgttattaaaaagcaacttgttttgctactttaaaaaatgatttgtttgaagtaattgcattatggcttctctcttgcttggtttgagagaagatggttttgtattagaacaaggaaacagggagcctccttttgcctctagtttttaaagttcttatgattgaaaagtagtatttgtacttgaagtaatcaaatagaatactcttataaatttagaatatatttactcacatctaggttacagaacatatctggaatatctatagtagtttctca

SEQ ID NO: 73212 - DNA, 1054 bp, Homo sapiens
agtgctgatagaattatgtgattgaatttgtgatgatctgttcatatagaactaaattttattgctaataaaatataattttgtaaagacggctttacaagaagttgattagatttataaacttactctgttgctgctattagatgggaataataataatataatatcagtactcaaatttattgcttacaatatgtcaggtctgtgctaagtgctttacatgcagcattgcttcaggtgggttatcttgagtcttgggtggctccccaaggagacagctcatgttgctcattagaagggttctgcagagcaggtgtagatgcggcttatctcagcacagcttcctctgtcctccagaacccctagtggcagcatacggttgctgatgacactttagactcaggataaattcttactggatttgagaaacttaattcttgctgggccacagtccttttatactcagggattgtgttaccattcagaaagagtttacatgaacaagtgatgcccttaataagaactgtttacctacacctaggaccctcctgactcttgagccaggctcatttgtggggagaaggcagatcaaggaccttcctaaatactttgtctgcagctttccagcattctaaaaagccagttttcccacatctttgttttcttttttactcttttttttttttttttttttttttgagatggagtctcgctctgtcgcccaggctggagtgcagtggctcgatctcggctcactgcaagcttcacttcccgggttcatgccattctcctgcctcagcctcccaactagctgggactacaggcgcctgccaccatgcccggctaatttttttttgtgtgtttttagttgagacggggtttcaccatgttagccaggatggtctcgatttcctgacctcgtgatccgcccacctcagcctcccaaagtgctgggattacaggcgtgagccaccgtgcctggccttcttttttactccttatagtaacgttatgatacagacagtgtatccgtatcagctaagagaagataatt

SEQ ID NO: 73213 - DNA, 1022 bp, Homo sapiens
ctcgctgtgatcttggctcactgcaacctctgcctcccgggttcaagcaattctcctgcctcagtcccccgattagctgggattacaggcatgtgccactacgcctggctaatttttgtatttttagtagagacggggttttaccatgttggccaggctggtctcgaactcccgacctcaggtgatccgcccacctcggcctcccaaagtgctgggattacaggtgtgagccaccacacccggtgaaatggccgatgttttaatatcctttgcttttcctagcatatgggtattgtggatataattaaactattttctcctggcctaaaactgattatgtctgagccctaagcaataaaacttggataacgtctgtccttttgacttgctgcttagcatgtagccacttttaattttgtcagttttagttttgttcacaatataatactctgtttttccagtttttctcatggtttgcaaagctgcaaactcagatggatcaagatgaaggaactaaatataggtatgtgtgtctcttgcatttgttgaatatcttaatttttagatcacagtcatctgaagcatttcataatcagtgtctttaaataaaactgaggtattaagaaaactgtaacagccatatattctttaagaatagccagtgagaagatttgggtctttaaaactgttatttagaagttgtgtgattaaaaacaaaaagaattacattataattaataggttaggagggatagatgttagtttttagatagctccagaaagaactaggttcaggtaggagttgtagaggaattctaggaggtgtttgttgctttttagaaggagaaacatccctgaaagactttcaggatggccacttaggttggttgtaactatacttctgtcagtggatgctgacagcatgggggaaatgttgacggctgatttgggggctgtgggttgagtgtccacattcagggtattgatttgttgatggctattattgctaggcagtgtggtag

SEQ ID NO: 73214 - DNA, 1292 bp, Homo sapiens
tattcttattttacaaatgagcaacctgaggcctggaaataataagttacttgcttaatctcatgcagactgggcagagctggggcttggacccaggtcttctaattctaaatctagaattcttgccatgacatcacaccatctttcaaagagggaagtgatctgaaggattggccttacttggtgccttgggatggctttggtgtcccagtctttagaagttgagccagtgattcattgccttatatgtgaaaagccagattatggcttcaaggctaattccttttgttacttataggattagtgatttgccttcttaagtattgaaacggtttatgacataacttttggtacatttcttaacataatcaacttatgtgcataggcagttttcctcctgaaattcgaacattttgggaaaaatgagcctttgttgtttttttactgtgcttattgggggaaaagattattgccaatccccttttggttctgttttctagacagatgagggattacttgtctgggtttcaggagcagtgtgatgctatattgaatgatgtaaacagtgctcttcagcatctggagtctttgcagaaacagtatctttttgtgtccaataagacaggaaccctacatgaagcctgtgaacagctcctaaaagaacaggtaatttggagtaagagagaggatcagtcattatatttaatattttaaaatagatgaatacagttttattttaattttcttaatttctccaagatgttcaactctgctgtgtttgaggccctgtgctcagcatgcagattgttacactgacagcctactttttaagtgcatgtgaatagcaaaggcaagccttcttatgttttgagctgttaggtctcagtacaatttccaaatgtagtggctatgttggtttgctctgatcactctttattactgacacttttattttttatttttattttttttgctctgttgcccaggctggagtgcaatgacgtgatctcagctcattgcaacctcggcctcctgggctcaagcgattctcctgcctcagcctcccaagtagctgggattacaggcgtgtgccaccacacctggctaatttttgtatttttagtagagacagagtttcaccatgttggctaggctggtctcaaactccttacctcaagtcatctgcccgccttggcctcccaaagtactgggattacaggtgtgagccactgcacccagctactgacacttttcaaagaagcatagtgattgtaccaatggtgagattttga

SEQ ID NO: 73215 - DNA, 1877 bp, Homo sapiens
gcgatcatttactattttatgaagagatcatataaaatttactgtaatattatcgccccttttagttcatgattgtagaaatacttgagctgaattctcatatctgatataaacctctgtgtctaatgtaaatctgtttagtgtaactttgagactggcatgttgattcttatattcttataataattgatttttctcttttaaaaaatgcaagtcggaacttgttgatctggctgaaaacattcaacaaaagctttcctattttaacgaattggaaactattaacacagtaagcattgttctttacttcttataaagttagtgatttttgttttatttttgcctttcttcgtgtcatcttttaatctataaattggcttgagtgatattttaatttagcttgcttgctgatagatattcctatttgtagacagtggagataccattaccagttcagatttttaaatatttgagttaagatgtgtttcttaaattgtattcttggtattaaaatctctttattggctacctcttatagtttcttatttgtaagctttgaagaagattgtaagaagaaatattcagttttagattttgctgtggttatgctaccatgatagtagtcaaaacatttttaaaacttattctcatgtttagtttgaagaaaagtatagtcctcaaaatgtatagttgcatcccaataaagtataatagttccaataaagacaagtgtgtaaattatatttctgtgtttctgactcataaattaatcataactatgtataagtcatgttattaaaatcgtttaatcataggtatttagtttattaaagacatagaactaaaacttgtggctagttaacaatggaatgcaatggaaagtagttcattgccaagctatttgtatatcaggataagaaatgattgactggttgcattttactttcatagtatgactgctaaatatagtatgactgctagttaatcctttaatcttcagaaaaatcaccactgcaagtagaaaaattatgtatattgtataccagaaagtgagaaatctaggtatttcatatattatttgaatatgacattgtatagtggggtaatatataccatgtcctaattcatgaagagtccaattaaagcttattaggaataaactgaattaaatcagtatgctttttctgtttgtcccttctttattgtacatgtgggctacattcgaggatattttggtgacttttaaaatttattataaagacatgttatgtcctaaaggcaaatatgctgactctaatccatagtttccaacttttatctgtatcattttttatgaattaagattgttttctttttctcttaaagaaattgaattcccctacattgtcggtgaatagtgacggatttatacctatgctggccaagttagatgattgtataacatatatctcatctcatgtaagtcagagtatttttgcatgttttaaagaaatccttagattcctattcctgttcctatctttttgtgtttttcaacttttctgtgtttagcagatgttcctattatatcacttcttgtgctgtaaagtgattatttctgtccaagggaaaaatatgtatttgtaacatattaaagaaaagttgtagtgaattcttagtcgttattagcagtggtgtaaaaagtacttttagctcctgcaatagcccctggaatggaacacatcctggctgactcagctttatcccatctaacaggatgagccgtttttaaattgttggtgtcttgacatgcccggtatttctttggaaacagaaagtgttacttggggggaaataaagggacaagccctttgatttaatcaccctctatttctgtt

SEQ ID NO: 73216 - DNA, 1050 bp, Homo sapiens
ttctttaggcagtgagtccatgctaatttttaaaaaatatctgtttcaaaaatagcatactgtagctattatcacataaagcaaaaacctgttatttggattggccagttacttgaacaaaaacatttctaatattcagaatgtatccagtcttaaatctgaatagtttccaaatgtcaagttgaaaatatatatatatgtactttgtataaagaacatgttcatgttgccaaacactgctgaaaacggtaacattccttctgatttctttatacagcagattgcacagagtttgaaagatgaacagaagaaggtaccttcagaagcttcattttcagatgttcacttagaagaaggagagtctaacagtctgacaaaatctggtatgttatgatgtcttaactgccagcatttattcatttgggttaacaaacctttactgaggacttgtcctgtcccagacatgaaaaacaacttgtgcctttgaggagcccacactttatggggggagattgccaagccacagacagaattcagtggtgagtgagatgctaatggtttgcacagggtacccttggaccatggatgaggggcatggaaattgcgaagggagatgagctctgagtgtgggaaggtgggctcagtgtggggtgtggtgtctgagagctataatgtgtttatgaagagtatgagagagccaggtgaagtaagtttgtttaagatagatagaatagaatgtagaaaggcatgcaggaatggaaaaccatggctattttgcataattcaagtggtttggtatgtttgggcccaggttgtatgtggggaaggagcaggtaaaataggccagatagggatagatgtcatgtgatagtctcatggcctttggacttctagctggcatagtgtatcatggtgactggaccatcagatttgcattttgtaagcatactgagtgtctgggactggagtaaaatactattgacacagttgtatgggatggcttggactagggtacatgttatacaaggagcaaaattgtcccaagaatca

SEQ ID NO: 73217 - DNA, 1015 bp, Homo sapiens
gtaagtgaataattgagattaatagtcattttgcaatttgaacttctagaaaataactctgtgagtactgtagccatcactggtgctcatctcactctcagcctttcatggaggtgagttgctgaaggtgaattggctttttgccttgtggtggtagagaactggtgtatgttactcatggctttgctgttgaaactttacatgttcactggatgagtaattttgtttcacagatgcagcatttaaaatcctgaaccctatgactgtcccaagattttttaggctgaatagcaacaatgccttgatagagttcttgttggaggtgagaaggagtctgtttcattggtggtgggagataaacgacattctttacatgtctggtgatttctaggcacataaaaacaggaggaaattgttatcttctttttaagggtactcctgagataagagaacattatcttgactctaaaaaagacgtagaccgtcatctgaaatcggcctgtgagcagtttattcagcagcagaccaagctgtttgtagaacagctggaggagttcatgacaaaggtatagaccttggtgcctatgtggtaaagtcattttgcattcttccttagatttccttttgaattactctcttgtgtaaactctggcagaaggagatattaagcccaagtcttaatgattctgtctaggaaatcactgtgtttcctattatggaagctttctggtttatggacttttagatatgcttgcacagtttttgtttttaagaggaagagtcgaaatattgcaaagctagttatagctgacccctggttagctgtgttctgtttatccgccttgtaggttatctgcatgtgggctgggactctcactttctcctggacctgcatggcagcaaccacagtcctgggaatcagggtttcctattcttaaaatgggtgatttgttttcctctttgttttacatgccgtttttctcttccattttgcatggataattgagaactgaag

SEQ ID NO: 73218 - DNA, 2378 bp, Homo sapiens
gacagggcctcccaatgccagtgcccagtggctgcctcagaaatagaccaacattgtgggccagtttctactttatagccatgtttactggtctcataaaaatcttggtctttttctctcattctgtttttggggctctaaacaactttttttttttccattctaattgctttattttatttttcaacttttattttagattcaaggggtacatacatgcaggtttgttacctggctgtattgcatgatgctgaggtttttcaacccttgtggttcccctccctccttgacttttcttgaggacggtattccataggagaactaacatagctcttaattttgcttttcagctgagccttctgctgttggtttctaaataagcaggccagccgggctgtgcacctaaatgtctgtctgggaggagcaggctgagaagtcttgcagtctgcaggacaccgaggaatcgtatgtgggaacgtccccgagaaccacacgagcgtgctgctcagtgctgactgcagaatgaaatagaagcaaagtgttacaggatcagtgttttcttttctaaaacatcaaaatgccaaagattaatctgtgattggtgataactgcctcgtttaaatggtcacaagaaatgtgaagagagagctagggcagacatgcagtgaaatggttctttgttaaaaatgtgcaataaaaatagattacaataagtagtgcaaagaactttacagaaatcaagcgaattagaaggcctgtaagagtaaggtttgctaaaacgtgaaacactgtaacacttttaaccactgagcattccacagtgaaatgttatttctatgctcttatttaatgtaatgtttctcctgtcatttttgaagttgagtttggagtagattggttgcttctgagaacacattctgccttcctgggaagtcggggtgtcatcctttcctctgtttgatgtgaggtagtttaaagatacaaggactttgtgtgaagctccagcatctgtgccccttgaattgcttaggtgcagacagttctaaagcaaggagctgcagcattctcatcatagatacgtgcagtatctttaatgagtatcttcatggtatgatagtgtgtgtttgtgagtgcgaagtaccaattaaggtgtcttaaatttggcgcatagaggagagaaggaaacctgaggagtagtgttcctcctgaatgaaggttcaggtcaccagccttctgtacactgcctttggttttagcagttctttgaaaagcaaacactttcatgtcctgtctattcattcagctggctgtgctgtgctgtggaccagctgtgtggatctctagcccagctacagcagaatacattttaccagcaaacctaaggatgacaaacactatccacatctgaaaactaccacaccatatcagggatcataaattatgcatatctatgaattttccaacaaattcctacttcctgattggattggttttgccgctgatgttaaggcagccagcttcttagttcaaaaagaattctgagtttttcaaacactagtctagaggtggacattgtcaggggttctggaatgggaccaggggaccttttggtgcagtgggtgcctgtaactcattagacgtactgaggcagcacttctgcagggtgcataccctgattgttgtcatttgtaacaggtcacttccttttcactcagtttaaattggtgatggacgttgcttgattgagcttattactctctattttgagaaggtagaaggtaagagggcccatattcattctttgccatgaaatgaatgaattaggaagattgtatttacttaactgttttttaaatacatgtttaatgaaataaactgtaaaatatccagttttgtgtattatatgtacatttgatttttaatagcctttccaaagaaatgagggcatgattattgtacagtaagtacgtgactgatttaatttgatttacagagcggagtgtgttcttataaaaatatttaatgacattggttcttgtcttttgatcttttatttctgaaacactcaaacaccttacaaagtgctgagtaggtaatagtgacccaacttgtttgctaaatgattatttgtttaaatctgtacagttttaagtgttcacttatacaaagagtgtatatactttcaaataatttaaaatgctttatattatttggctagaaattgctgtttttaataaatgtgaattttttaaaaataaagatttttgcttcctaccttgtcctcacgtgtctgatacgtgtgtgcattccttgaggaaaatttctttaattaaaattttaattgagataacttgtgtcagactcacatgcagttttaa

SEQ ID NO: 73219 - DNA, 1014 bp, Homo sapiens
tcatatccctggaataactccttttcagcagttattaccatgctcattaatatattgtttgtgtgatgagttgcttagagtctgattcatttgccaagccgtaagctccataagggtaggaaatgcgcctctcttattcaccatagtatctacggagcccagcaccgtgcctgctaccagagctcttggtactgttgaaagaataaattcaaaagctacactaaatcctctgaagacaaggtggggcagagtttatgtgactctggccagcataagccaatcagcccaaacagagggttgacgtctgagccagactggcaaaggcagactacggtttagctaaaaacacagaactaccaaactgagtagagtgtctccattttacaagtgaaataatttgaggtatcagtaagccacggtaactttttaagtcctgatggcctacagaaccctagagggtttccagcacccctaaccttgaggccactctctttcccacacaggccctgtcttcttctgggttcctcttcttttatttcctccagttacaaggaaatcatggccaagcaggtcagactcttagtgagtgatggggaaccaccactcgtcagtgtggagtcgtgttagtctggactcttcagggaaaatgatggaaactgaacttcccaaagcttaaaggggaactcatcataaaagtactggagtacaggaccctggacgggataaaactagggcagctgagccagaagcaggtcaccagctgccttctcctgctttctctcccactcctgtcttcccgtctctgtctctctccttctctcaccctctctctctgtctctccctctctctgtctctccctttttctgcagactggcctccttccgacttcagcctggtgtgggtaatacccagccaccagcaaccaagcatgagagcctcagtttcagccatgagaaagaggcagacaactctcttggattcaaatttcagaatcccactgaggggctcctttg

SEQ ID NO: 73220 - DNA, 1116 bp, Homo sapiens
ataaataaattcatccaaaatgcaatgtaattaaaccagaggaagatcgtgttggatgggggagttgcatgtgtgtgtttaaagttagggaacttctgtttactttgcagtggcctatcgtggcattcagggagagactataacccagacctccgttgattatggcttgcactggcattccgtggatactggtaactagctgatccctagcatgtgccccagggtctctttaccatcttcctttcctggtgaaatatcagacagaccaaatatttacaaaaacatagagggactctgttgcttgggtgagggtacatgcaagcaaggaaactttatggttcacttggtgaaaaggaagagtggattttcctgctctttgagaaactgagtctgggcttccttccattccttaagcccaggttaggcagagatgcctgttttcagagtgactgataactacgagccatggataccgttcttctgtctccctgacacccactccaaaaactgtgtggaaatttctttctttcctctttatctctctgtgtgggaagaaaaaattcctttgtttatgatatacaggatgagtaggaggcattttcttgatcttgaatgtgttttgtatgcataaattgaaagttacttcagttatgaaaatgtttttttcctgctgttggtgcataatattgagtaagcctttttggtattttaactgtgagaacagcttaagtactacgaattgaaatgaacctgctgagtataagtagtaactgactttaatgactttaacaacaggttcataaaacacattaagatataagtttaaataatgaactctctgaaatctaagtacatacaaatttacatggtagatgagctgctttaagacttattcagttggacacagttttaaacattgaaaattgtgaactaaaaacatctatattgaatcaaaaagacttcaacctaatcttatccataagtaggctgaaataatattttatttgaatgaaaatcccaaatgcccagggtttttttcataacactgaaatgtaattcattactttatttcgtagctcagatattattgtcctatacatgatgcagttgtttgtc

SEQ ID NO: 73221 - DNA, 1502 bp, Homo sapiens
cagatatgatcaacctggtttctggctgtggcattgccactgtcaagttatatacatttaaggcaatcaacctctgtgagtgtcactttcccaatttataaattaaggcgattgggttgtaccttaagtttccatgactttctttgtcactcctctgcttaacagtctggatgtttcatattttccatggaacaaagtccaaacacaccactcttcacaatctcaccccaaaatggaccttctaaccacatcttcctcccaggatgacttatctgcttcctacacccaatagaccttcacggctccgtgtgcttgtcttctgtgagactttgagtatcttaggtattgcatcttatgcaccttcctgtccagtgtagggcacgctgcccggcataccagtagtttctttaaaaatgtttctttaaaaatgttggctgtttcttcctcccccttgaatactgactgacccctgctgaccatccctccaatacctccttcacctattaagtttgtgtttatccttccgatacattcttcgcactttttcaatgaaacctttctcttcccattccaaattaactgttctctccacactttgtttttgtctgttataacatgcctctacagtacattggactattacagtctctacgatatcacatctcctaaattaggactctagttggttgtataggtgtcagcctattttccatattattggtaaaagataagcattggcatattaaaatttagagtttatttaagcaaacggtgattcctgaatcaggcagttccaaaccataagtggttggggcaccacctgaggtggttgcattgaaagcttctagagggccagtgcagacactgaacaaagacgtgttttgattggttaagtttgagcaattaccttattggaactatcccagtgggaagctcaagacaatgtaactaaatgccagttagctgcctgtgattggctgaacctatatttcatttccttttaaattctgagttagaggctgggcgtggtggcttatgcctgcaatctcagcactttgggaggccaaggtgggtggatcacctgaggtcaagagttcgagaccagcctggccaacatggctaaaccccgtctctactaaaaatacataaaattagccgggcgtggtggcaggtgcctgtaatcccagctactcgagagactgaggcaggagaattgcttgaacccaggaaggggaggttgtagtgagccaagattgtaccattgcactccagcctgggcaacagaacaaaaactctctcaccaaaaaaaaaaaaaaaaaaaaaaatattctgagttaggtttcagtttgctcacttagcaacccagggcactggagccgccttagtctaacagcctcccatgtagttatttgaacaggataatccacatgaattcaggagccatttctaattgatctttttagtccccactcctacgctgctccagtgaacagctttttcac

SEQ ID NO: 73222 - DNA, 1036 bp, Homo sapiens
tcaagtttaaaaaaaaaaaaaaaaggtgggggggggatcttactatgttgcccagatgatctcaaactcccagcttcaggcagtccttccatctcagtctcccaaagtgttcggattacagccgatagccaccacctggttatactgtgatagaagtacaattggagtagcttaggtaaagatgggaagtaaatagacatgaataaaatgtaaattgcagtgattgcaattaaagaaaaaaccaaatgactgagatgagaaataagtgtagcgattgggagttgggtactacttcagattatcaagaaggtcttacgtatgagatgagtcctaaaaaatgaaaagaagctagcaaagagcaaaaggggaaggagtatttcaggcagagggatggggatatgcaaaggcctaggaaaagagctttggtgaattccaagacgaaaatactactatggctcaccactgggtggaggggatgggggttgctagagagaaggtctagaacagtgctgttcaacagaatattctacaatgatggaagtgttctgtaaatgctgccccccaaaaaatggccaatacaagcttcatgtggcttgtattaaacacttgaaatatagccagtgtgactgagaaactgagttttaaaattttgtcattacttttaaatagctgtatgtggctaatggctaccatttggggtggtgtaggtatatatcttggcaaagccttgtggaatatggaagtgtttcccacagtagagtataaaacaagttctgtatgttctagttactttgcatggcaagtggtactgattgttttagtttactgtggcaatataacatttctttttggaataaatgttaataactaaacaaattaagtagtcagtgtggaaataggacagaaattactggtgctcagataattgaagtttagaatatgtaggctatgtatgaagttggaatttcatttgaaagcaaaagtaataagtaataataaaaggataaaaggcattcaatcacgtcaaaacaggcaa

SEQ ID NO: 73223 - DNA, 1123 bp, Homo sapiens
caggtttgtgttataattgtaagcccatattacttgtgttagtagttttgtctctataggtaacataatgacagtggtgtaaagtttctgttcaagaaacatatgttgtaaagttactttatacaagatacctgccaaaggaaatggtcttactttcaaatgactttgaaagcatgtataattgcaaacagagcaggagaagactttaatcagaatttccttgtgtccttttcctttactaagtgttttgaataaagaaaaaaaaaatgtatgacctcagagaatgaatacccttcaggaagccacttcctgattttagtggataatattgttctctgtagcacaaagatttaaagtcctagaatttctaatcctagttctcagaattgtagaatatgacaaaaataatggtttccccatttgtccactgacttcagggatatttcacaagttatttatttatagaatgaaaactatgtagttaaatctgtcattcagttaaacctgttgtctttcagtttgaaatctttttgttatgtatgttgcaaaagaaaatttagaactattcctttgttcactcagtcacagcattcagagctttatgtttccagtggaaatgtactgttcagtctcaatttcttttaattcaaccattctcagtattagtaacatatacctataaaatttttctaaagcaaaatttttgattgaatttctcataaaagctcttggaccataattaaagtctcagttaaactggtattcccgaaaaacaatcttccagtctataaattgtttgctagtacaattaaaaggtcatctatctcataactgacggctcaggtctgtccagttgccataattgcacaactggattccagctgctggtaataaggaattgtgtagatagataaagggcaagagtatgtctgcaatccaaaataaatgagagttaacacataattagccttttgattattttggcagctatcctcaccatttagtaaagggtatactaacaatacccaactttatttaacaaagttttgtaagcatacctaagtagtaacttgatatgctgaaaaatctgacctgtcacttcgcttcactctgaccagtaatt

SEQ ID NO: 73224 - DNA, 1447 bp, Homo sapiens
ccatcacatggaagaaatagtgccattcaacaacagaacgtgcagtgtgttttttgtttgttttgtcattggaaatgataaagtaaaaaccggttgattacctgtcagaaattgttgagaggattcctactttaagcaagaggttaaactaggtgccctctaaaagtttcttttcaaagattcattgagcccaaacacattttctaattttgctttgaaatccaataaagctaatttaatatccaaaatgaaatactcttataactttgatattttgggtagaggttaacctgcccatctttcctactaataatgtacatcttttttaaagtttgtttttgttttcttcaaatagggcaccataaaacaagcttacacgagtgctccaatggtagacaatgaattacttcgattgagtcttcggttatttaagcggaagactacttgccatgctccaggacatgaaaagactgaagataataaactttcacagtccagtatccaacaggaactgtgtgtgtcttaagaccgaagttcaatatggtatttttggtactgtcttccttcagcagtgcatattcttttgcaaagttctttggtttgacaagcattagtgacaaaggcagaaaagatttatcagccatgctaaaagagtgaagaattttgatctttagagacactagttttggccaacttaagattttacgttaatttttacatagtatttgacactcatgcaaaataatgtgaaaacatctagatttagtagtttattctgcgccttttgttaaaactgaagattttggaaaatggttgtcactgctcttccagcctatgaatatttttgtgaaatggaaccatggatttatgtctggatcatccatacagaaccaacaattttattcaaaaacaatgtgttcatcaaagtaattgctcacattgtgcagtactatgttgtacagaccacgtgaaagggaatgctggtctagctggcgtggtatgtttataggcgaatttcagcagaaggaagccaaaatagttttttccttttgaaagttttttaaaaattatttcatgggtcttttttttaattaatatgtgtgcattgttacaatgtatgttggatgtcttttgaccctaaatgctttttttgttatcagagattgtgtactatttttatttttaataaatgtatcttccctttccttgttttagatttactttgctcttcgttaatcttattcctgatgatctagaacattagtcatcaacattacatgtttcatgcttcagatattttactgcttgtgtccttattgttggacagctttaaacagagttgatgtacttcaaatatagctcattgatacttaaggcatcttcttggaatgtggcttttgaagaaaaaaattactcaaagcaaatcaagagttaacaaacctaacgt

SEQ ID NO: 73225 - DNA, 1853 bp, Homo sapiens
cttacactttgcagcccagaaaattgaaatcggctatgtattgcagcttcattttgttctcagtaaaatgtgtcttttatttttacccaggcgtttactgcttttctttgtgggttgtaaaagtaacctgcttgagcgtgttgtatgaatagaggcagtacctgctgtctttcgtactcttgaccgactcttatttatttggattactgactggtcctgttctgttattttgacttcctttgtgtctatttttaacctaacctctttatattttattctatctttccttaattcttctggggtttttttgtatgttcagtgttttctcccctaccttgcatgttgtgacttaaaactaagtgatttaaatttaatacattgtcccaggtttttatggtgaccaaatctaggacaaagtttgcaggttatctaacaatcactttcttaactaatttttttagaggtcacagacttgaatattgttataacatttgaatcttgctataataaagtcttgaaatctaaaactctaaatagtagttgatggtaagcagtatactgaattagagttcaatgattcttaacttgaacgtttctttaaaacatcctttaaaaacgttctttaaataaattccctggggctgggggcggtgactcatggctgtaatcccagcactttgggaggccgaggcaggcagatcacttgaggtcaggagttcaagactagcctggccaacatggtgaaaccccatctctactaaaaataccaaaaaaaaattagccaggtgtggtggtgtacgcctgtaatcccagctactcgggaagctgaggcaggagaatcgcttgaatccaggaggtggaggtttcagtgagccgaggtcgtgccattgcactccagcctgggcaacagagagatactttatctcaaaaaataaataaataaataaattgtttaaaattaaaaaaaaaattccctgggctctaccttgagatccacatacagtctgcttttcttatattttaagtaaatttaaagtggctatcagaatatttattcttgtttgagactaccaacataactacgtgttgaaggtgcttcacagagaatatattgcctttaatgtgaaataattttcaccaatgttgctaactttaataaagtataaaatttgtagaatattcagttaagtagttggtaacccttttctattttagtaaaacttaatgcatgtttacttttttttgaaagatgcagacaatctctttgaacatgaattgggggctctcaatatggctgcattactacgaaaagaagaaagagcaagtcttcttagtaatcttggcccatgttgtaaggcgttgtgcttcagacgggattctgcaattcgaaagcagcttgttaaaaatgagaaggtactgttatttccttggaaaaaatacaaagtgaatagtgtgaatggcctatttttcatttggttgttttaaattgagattgcaatcttatgtttttatgagtttggtttcctaatcttttatacatgtaaaaagaagaatgccattaaaatgtataatatgctttattttacttcaacagtattaatgaattttgttttaataaagtttaaaatattccatttctgttaaacgttttttgtgaaaagctttcaacaagcaaacgtattacaaaaatttatttaaattgaaactcaaggaaaaaaatttcttagagtgatgaggatatttatgagagtagtatttatgagaatatacaaagttggaagaaagggaaataaagcgactctatataagcatttgagaggaataaagagattgagaagtaagaggaatagaaa

SEQ ID NO: 73226 - DNA, 2162 bp, Homo sapiens
tccttcgcagtggatggattatttgctctcagtgttaataattgtcactctctgactcttaaagggatttcataatgaaatagttgtttttaaaaattaaaatgtatgtgtgcacacactgcaaacacatgtactcctagatttaacccttaaaaggattctggtaccaagtttcaaaagatcagacccaatctgagtgaaatcaatagagttctttcattggggatctcccatggagttaaaatgagttatttgtatgggtgggttgggttacctgttttcttttggtgggaaggttttttatttgtcagagtccttagattctgagtattatatgggaaggcttttattttaagaataggacatttttggtttaaagtacttttcattttttctgttttctccttgatttatgtaaatgtctatgtagataacaagactgctatttcttggtgtaaaacaaatcttactttttaactttttacagatcccttagatgtgatagatgtggattggtctggtcttatgccaaagcatccaaaagaaccacgagagcctggggctgcactcttaaaattcacacctggagctgttatgctaagagttgggatttctaaaaagttggcaggttctgaactctttgccaaagtcaaagaaacatgtcagagacttttagaaaaacccaaaggtagtttcattttactttaactatataatgtctgttaaccatttaagatgccatctgaaggggattctgatctgttcttatgtagcacttaacactgtgtagaaactattttttgagaaatcattttataatcattatttaaccctcatggtcaaagtttctctttaaaatttattttgagaagaagagttatcccacagaaaagttgggaaaagagtacaatgacctttttgtatgaaaattacttattaacaggccaggcgtggtgttgcatgtctgtagtcacagctactcagggaggttgaggcagcaggattgctggagcccaggaaattgaggctgcagtgagccatgattgagccaccacactccaacctaggtgacagagcaagaccctgtctcaaaaaaaaaaaaacaaattaaccaataagttctaatatcaaagtgctcagtggtttgcccttggctaaatgaagcagagccaggaaaaacagactacatatttttcatgtctaaagaaattgggtattttggcagccctttcccctagacatctacccaaatgcaggtgtgtaggttgagtctttaacaaagtgattaagagcttggtctgtaaggccggatgatctggatttcagtaggcacaccacttactggctattacttaatctgtgtgttagtgtcatcatctgtaagtcaggaataatcataccaccaacttcctatggtaattaggagcaaatgagttattacaggcaaaacacttagaacagttcctggcatatagtaatacccaataaatattaactgctactttgaaaatatcctatcacgctgatttttgacctcactgcagcaattttcagttattccagattatctagcttatggattctggtggtaggggttgtttggttttggttttcactgtctctgtctcatctagtacctaccttagtttattttgcaacttactaatactttattaatggggagggacgagtagatggtaaaaagaaggaaaaggaggtaaaaggtgaaaggaacaacattaattaacaattttacgtcatgtccctggacataaaagtttagttagtattaaatttttcactaatacaaaataaaaaaatattgttttatgagttttatgaattcatgcccttcctttactctattagcataagcagtaaatttttttattttaatatagcccaataaacctagagtatacatgtacaaaatacatataattgttaacgtgtattaaccgaaaaatgacccaagacttagttcttgccctactgtatctgccttgtttggttggttctgtgaccttaagcaaataactcctgtgagcctcaattttatttgtaaagtgatggaataaaacccctaaaatcttacccacctctaaagatatttgtttctgtgaccttttgctagtagcatttcaagttaaaatctggtttga

SEQ ID NO: 73227 - DNA, 2005 bp, Homo sapiens
ctattcttcatgcagtcaaggctgcctcttttgaccacagaaaataagataggggagtaggaggagatcaaataatggagtgattagttctattaatgcctaatcattttatgtacttcttggaagatattttatggttatagtggaaatagacaaggaaacttttttttttatttattagaactttgagagaggaatttttcttaaaatgatttatatatttggatatttatagagagaaatgtatatgtagaatatagaaatatatagaacatatagagacaatatggaacatagaaagttacatagaatatggaaaaaggtaaattatgttttaaaggaccttgaaatgaagcattttgtttctattttatcatgtgctaataactctttatatatggtatatttattttagatcgccaggattcaagaagccatagttcaagaagaagttctccagagtcagatcgacaggtccattcaagatctgggtcatttgatagcagagacaggcttcaagaacgagatcgatatgaacacgacagagagcgcgagagagagaggagagatacgaggcagagagaatgggaccgagatgctgataaagattggccacgcaacagggatcgagatagattgcgagaacgagaacgagagagagaacgagacaaaaggagagacttggatagggaaagagagagactaatttctgattctgttgaaagggacagggacagagacagagacagaacttttgagagttctcaaatagagtctgtgaaacgctgtgaagcaaaactggaaggtgaacatgaaagggatctagaaagcacttcccgagactctctagccttggataaagagagaatggataaagatctgggatctgtgcagggatttgaagaaacaaataaatccgagagaactgagagtctggaaggtgagtgctacctctgttgtctgtgatactgctttatttcttttcagatttcgtgggaaacaactattttcttttgaaagggcacccactaatgggcaaattgactccattctccattcttctatagaggaagtagatttcagaaggaaaaggcctgtaagatagagatatatatatttttttaatgtggtccccttagcagtaccattaaggcagatttggttcacataaacctaaatgaaataaaagattgtttagatgcagtgtgtatagatgttgaagaataaccatcacatccttttcttagatgttaaaaaaataagattacaaaaattgaaatgacttcttagttcagagagggattcaaataattattagtgaatccctattttctagggcagttgagaacaaatatatgaaacaataacactacctaaaactgtatttaatgtaggattgactagaatcccactggtactccctagtcctagaataggaatgctaagtccgcatcaactcagagccagcctcagctatgtgaaacctcactctccatgcttctgttctttacccttcagcccccatttactagacaagctgactcatgcctttccattctctgcccttctttgtacccactcataccatttcctgatagacctttttcttttatctcatctttcttactcaaaattcaagtcccaatttatacattattttctcgatgaagccttctctgctcgaggcacttactgtttcaaattcatctcttcacattacattttcatctcaattttgagtataaatagcatcaaatcataaagcatggttctgatggaggtacaaccctgggatataattgaatataattgaattaatcattataatagctctcttgtgattggagtcagtatccctcatctctaaaatatataatttgctggttatgatcacagataatatagaatagaaatgtataggtgaatcacttgctatgtgatgtaaagtttttactcaaagtaggaaaatgagttggatcaacttgaaaagttgaaaatcctatta

SEQ ID NO: 73228 - DNA, 1549 bp, Homo sapiens
atttatagtaaagccatatttttatttttactaaaattattgtcattttaaaagtttttaaatgatcttgatctcttgatctcatgatccacctgcctcggcctcccaaagtcctgggattacaggtgtgaggagaaattattataatctatatgtaccatgcagtggttactaacctggtgagagtgtgattgcttttatcttttatatagatgaaaaacacagactcttgagccaagttgtacgacctcaagaatctcgttctcttagtccctcgcacctcacagaagacagacagggtagatggaaagaggaggatcgtaaaccagaaaggaaagagagttcaaggcgctacgaagaacaggaactcaaggagaaagtttcttctgtagataaacagagagaacagacagaaatcctggaaagctcaagaatgcgtgcacaggacattataggacaccaccagtctgaagatcgagagacatctgatcgagctcatgatgaaaacaagaagaaagcaaaaattcaaaagaaaccaattaagaaaaagaaagaggatgatgttggaatagagaggggtaacatagagacaacatctgaagatggtcaagtattttcaccaaaaaaaggacagaaaaagaaaagcattgaaaaaaaacgtaaaaaatccaaaggtgattctgatatttctgatgaagaagcagcccagcaaagtaagaagaaaagaggcccacggactccccctataacaactaaagaggaattggttgaaatgtgcaatggtaagaatggtattctagaggactcccagaaaaaagaagatacagcattcagtgactggtctgatgaggatgtccctgaccgtacagaggtgacagaagcagagcatactgccaccgccacgactcctggtagtaccccttctcctctatcttctcttcttcctcctccaccgcctgtggctactgccactgctacaactgtgcctgcaactcttgctgccactactgctgctgccgccacctctttcagcacatctgccatcactatttccacctctgccacccccaccaataccaccaataatacttttgccaatgaagactcacacagaaaatgccacagaacacgagtagaaaaagtagagacgcctcacgtgactatagaagatgcacagcatcgcaagcctatggatcaaaagaggagcagcagcctcgggagcaatcggagtaaccgtagtcatacgtctggtcgtcttcgctccccatccaatgattcagcccatcgaagtggagatgaccaaagtggtcgaaagagagtactgcacagtggctcaagagatagagaaaaaacaaaaagcctggaaatcacaggagagagaaaatctaggattgatcagttaaagcgtggagaacccagtcgaagtacttcttcaggtaataaaattgaattgtgatctagtcactgtttcctaggttagtatattttatacacattttaattctaaagtaatgctaaattggttactttacatgctgccttaaatttt

SEQ ID NO: 73229 - DNA, 1436 bp, Homo sapiens
ttggcctgaaattagaggtgtgacttacgagggaaattttttttttccttcagctcctatgttctacacctcctgctgcccctatcctttgccaccagtgttctcaggtcctgctggggggacagagaagatcagaggtgaagggtagagatggcagaaagtggggttggagcagtgggctggaggtagggtagggagcatgcagagaaagatcaaagattgatcagtgggaggggggaagggggttgacggggagcaggaaacatggtcgttagagggcaaataaaaattatctttaaaaaatttaaggtctaggggcgattgttacttggatattaagttaaaattaaatatgctacttggtttgtaatttgttgccagtgtgaccctatcacagataaaatttaagatttaccatgctgtcttaccaataggttatctgtcaaattaatcactgacaaaacttgattttcattgtagatcaaagaccaagctcaccaattcgacatcagggaaggaatgacgagcttgagcgtgatgaaagaagagaggaacgaagagtagacagagtggatgataggagagatgaaagggctagagagagagatcgggaacgagaacgagacagggagcgggagagagagagggaacgtgaacgggatcgggaaagagaaaaagagagagaactagaaagagagcgtgctagggaacgggagagagaaagagaaaaagagagagatcgtgaaagggatagagaccgagaccacgatcgagagcgggaaagagagagggaacgagacagggaaaaagaacgggaacgagaaagagaagagagagagagggagagagagcgagaacgggagagagagcgagagcgagaacgggaacgagaaagagcgagagaaagggataaagaacgagaacgccaaagggattgggaagacaaagacaaaggacgagatgaccgcagagaaaagcgagaagagatccgagaagataggaatccaagagatggacatgatgaaagaaaatcaaagtaagaataattatcagttattaataacattttacatttcaggaaagaattcaaagtttcatttaatgcttttcaatatactcttaatttcctgttaattttttttctctgtatattttcctgtttttcaaatttagtatatgtatcggtgtttaaagtttttttacccagcactttgggaggccgaggcaggcagattccttcaggccaggagtttgagaccagcctgggcaacatggcaaaactccatctctacagaaaatacaaaaattagccggacgtggtggcacgtgcctgtatcccagctacttgggaggctgagatgggaggattgtttgaacctgagaggcagaggttgcagtgagccaagattatgtcattgcactccagcctgggtcga

SEQ ID NO: 73230 - DNA, 1030 bp, Homo sapiens
taagtagaagcacatctttgaataacacattttgggggaaagataggggaagataatttagacattttaaagtgatgttcttatattctttccattttcctttgaagaaagtagcattgatattttggttgggaaaatacatctcccataaaagcatgtctgaatagtctatttgctgatattgctgtaattagaaatttaaagtatgatttgctataagttaatggtattgaatttgtttcaggttatcttgtaatgattatgatgttggtatgactcctccaaaccaggaattcagacaatacaaaagatgggtagatagcattctaggaatccaaagtatggtacagaagaaccactttaagttggtttcagcaaaagtgaaagggtttaagaaaactgacttctaatgcatctaccatctctgtgacattgggaagacaactctggaccataatttctgtttttaaatagaaagggggagaagcaactgtgtaggatttcattttgattcagctttaaaatgctatgatcatttgtatctgggtctataacctctaaaatagtaaagataagataattcttgtcttttcaatcagtgattaggaagggaaatccagaatactgtattgaacccttcctagaaacatcctaaaattgttctgcttaatgagttgatgttagatgttccacttaccaacctgttggcctgattataatatgatctttatcaaaaaccagtagatatatagtatgtaaatggaaacatcacagtatcctagatcagaccgcagtagttgctttcaaaaatggctgtctctttgaaaaagttcatgccatcctcttaaacgtttttttatcccagactaattttctgctcaactgggtatttgggcagcatgcattcatttactctgtgtttatgtgatttgtgtgtacatggaaaaaatttatataaaatgtgatgaggttatcagttaacattttaagaaaacagctcttcatctgagtaatcatttatgtaattaaa

SEQ ID NO: 73231 - DNA, 1081 bp, Homo sapiens
gttcaaccacatgtattgatcttctactaggtgccaagaactttgatagttgctttacatatattctgacttagtctttacaatatccttgtaagtgtaggtatgataaaataattcatgttttcacagttttggggattagatctaagagtagtaagattacaatattatagagaagtaggttccagagctggaattcaaactcaggtcttctgaccagaagttcagttctctattttaattttactgtaactacttcaataattatgagatgtatgattgaaataaaaatatattttggaggctaatgaatattttacaaatatttgttgagtacccatgtcaggcactttgctaggcacttgaggtacaataatttcttgtccttgtagaatttaatggggagagggaagaactccccacccaaaaaaacaaagtgtgataaaatgctactactgtatataaaagttctgtgagaagacaaaggagcaaacacaattctgagcaattccaagaaagctgcctaaagaagtgacatctgaattagggcctgaagaataaaaggaaactatagaaggagcactttacagggagagggtgcagcatgtacagacaccagaactgaaagaaacatgtgctttggagtagtaaggaattatgagattggagtcagagtatgctataattggcaaggtagaaaagaaaccagggaaaaggactgatgaaagactataggccaggtagtaaatgacctaagtttagcctagtcaggctaaaaaatttgattttaattgcctttcactgcctacaagataactacttttaaacagttggaagaaataattttcatcaaaaacatattaagggtgttgggaaagattgaaaacaaggataccaattagttagactgttgatgacataggcatctaagaagacctgatcaaggtctgagttaataactatagctatggggacaggaaaaggaacaaagaaatattttagaagtgaagttgattgtacttggatatgatgaggcttagacaacccagagattgtcagctttaatgaattggtatgtcat

SEQ ID NO: 73232 - DNA, 1093 bp, Homo sapiens
gtgcttaagtacatttgaggaggtcacagatggtctagtttagcctaacttaatagttgatagaaaagattaaagtaactgaagtgtctttgtatctaaaagtggtttctgaaaagtaagccgtcaatgataggagatgaacttatttgtttcagttgtttaggatctggtaagttggggtgagttggggcagtataggtaagttggggcagaggaaattcatgttcggagtttatctaatgaagaacattcttatcaggtgttaattatctttggaattttagcttctttattttttgcaaagaacacgaattgtcattataataaaatttttaaagttctgtattaaatatgttttctagtttcctgaaactttgtaaaagcaattacagtcaatttccaaaattgcattacagatactaggggcaaacgagacagagaaaaggactcaagagaagaacgagaatatgaacaggatcagagctcttctagagaccacagagatgacagagaacctcgagatggtcgggatcggagagatgccagagatactagggaccgaagggaactaagagactccagagacatgcgggactcaagggagatgagagattatagcagagataccaaagagagccgtgatcccagagattctcggtccactcgtgatgcccatgactacagggaccgtgaaggtcgagatactcatcgaaaggaggatacatatccagaagaatcccggagttatggccgaaaccatttgagagaagaaagttctcgtacggaaataaggaatgagtccagaaatgagtctcgaagtgaaattagaaatgaccgaatgggccgaagtagggggagggttcctgagttacctgaaaagggtaaggtttttgacttgtctatgaactatatcttatatagaaagtataaaatctcctaagatttctaatatgttgtttcttacatttgttatcattttgtcacagtaatttttaattaattgaacttgtagtcttccttataaattcctaattggaattactagttaaaatagcaaaagataaatggagcttgagctagaccccccctaagt

SEQ ID NO: 73233 - DNA, 1049 bp, Homo sapiens
ttcaagatgttaaaaatagttctctttgagtagtagaattataggtgatttttactttctttgtctacttttctgtcttaaaaaaaaacagtttaaacagtcattgtattaacatcttttctgaaagtgtcttcctatttcacctctatcttttctcagaaacctgcccctttaaagttatataataataagcagtgttaacaaaataagtatcaagtaaattaattcttcagccatttctgttagtttttttttcttcttgatattggttagtagtatacaaaataataaagggcaagtaatgtaaaggaacgctgctgtttttaagaaggctttaaaaaatatccttttggcatatttgaacctctaatgatagctttttgttaccttcagaaattcaaaaaccaaccaaagtaaaaagaaaggaccacgtactcctagtccaccccctcctataccagaagatatcgctctggggaaaaaatacaaagaaaaatataaagtaaaagacaggatagaagaaaaaacaagagatggaaaggacagaggacgagattttgaacgacaaagagaaaagagagacaagccaaggtaagtaggattgtatgtttttaacaatattaacttttgtagaatatagaatatttacttttcagaagccgttgggcattagcatattgggttttttagttttgtttacaatagtgtgtatatttattttaataattcccataataattattattatgagtcatggataattcagtaagccttaatttttacaatttatttttcaattttttattgtggtaaaaaaacaaaatgtaccatcttcatcattttaaagtttatagtttggtagtgttaagtattttcacacttgtgaaacaattctgcagaactttttcattttgcaaatctgaaactctgtatctgtcaaaaaataactccccctttccaccttttcccagctcctgttaactatcatcctgttttgtttctgtgaatttgactgcttcagataccttatataagtggaatcatacagt

SEQ ID NO: 73234 - DNA, 1229 bp, Homo sapiens
atcattcacactggtttaattactgtatttcttatattctactatgttgttgactttacgatgcaccgttaatttaataataaaagcaaaaggacctggaaaaacagtatattaaaaatacaaagaaaacatttaattgagtatagcatttcttttctttttttttttttggagtataacatttatgcagtttacatttcctagagtgtgtcaagtaatcatcttttaattttattgctggatcatactatcaactcagaacatactaagcacatgtaaggattagaatttcagttaaaactcagtggagtattttaaccagtgtcagccaactgaggtgtgataatcaggtaaacaaatttcttggtggtcttactaggttatcatattgaatggaaagatataattactgacaaattaaaacttacacttttccctgaaagctggcatttttctttgtttgacatttattttgagatatagtctgatagtaagatttgtcctgatatatgagatatggtataatctaaaatcataaatatattacctattctgtccatctgcacttttaatcttagtttttattaggtgaatttttctttatagctctttgtacagagaatattaagtatgtcaaaagctaatctaaaacaatagttttgaagagagagagaaaagattaaaaactgataaaagtaaacaggtgggctctttgccacaagtctgaagtaggctctgtgccactgaaacaacaattagttgactttttaaatgttgaagatcttggtgatttcagaatacacaaaaccagttttggcctcttcagttggaaagcactgtaacgtaattgtgttttctaaccacatataattttgatggtaatgtgaagaaatgctgtactttagtaagtatattagaatagtccagattgtgattatagccaagtcccaaaatgtcggtggtttaacacaacagaaggttatttctcacgtaaagtcaaaatgagtgtttctgattgacagatggctgtcctatatatggagattgagtaacccaggctccttctgaccatgattccactttcttgggttttcaaggaaaccaaagaacgggatgtacaaagaaaaacggaaattgagtattgcagttatttagctctatagtttacaattgcctggcatatgagagccctttgaaatttgggcctggaggtggtatacatcatttcc

SEQ ID NO: 73235 - DNA, 1036 bp, Homo sapiens
aaaaaatttttgtctttcagtatatattatcaagagattgaattctttataacttagaattactgtagaagccagttgaagaagtaaaaatagaaatgattatattcagggactaagaataaggagaagatacattttcatttaaggtcactctgaactatttatattttattttaattaaagtccataccctaattttatcttaaaaaaaatgaactaaaaatatcttctacctaagatttaatcagttaacaagccctgtctatttgaacctgtaatgaaactcatatttatctccctccttctagttcctagaaactaaccctatttcagactctacttaactttttgcctagattattatatcactaactatattgactttatgtagtttctacccaccacccacacaggtgaacattttcattcagctacctcaacccatttattttgtagatgctgtcagagaaatcttaaaaggacaattccaattaatttattataccattgaaaaactcagtggtttttcattctgtagaatgaaattcagattccttagaatgacatttacactttggtcttttctttcttgtcagtagtttttgtccagcttcctcctatctacccccttctatctcaattcttcaatctctagctcaaattttaagttttcccatttctctttatggaacataagttctgttccctttaggtacctatcagattttgcttatacctccatgttgataataattgcctgttgcattatatttcagctgtgacttatgttttataacctttattaaatttaagctccttgaagattgggatcttggttattcatagttctgtcttctcatagtgcctacttgacatagaactttgcattgtaataaggcacttagtaaagttgagttgatcctctccctcatattgcctacttggcatagaactttgcattttaataaggcgctcagtaaagttgagttgatcctatcctttgttcatgcaattgagtaaatattgcaaaggtata

SEQ ID NO: 73236 - DNA, 1015 bp, Homo sapiens
agttttagatattaatcatttgtctcacaaattttaaaactgaaaagcctatggaagcaatgttgcacacgtaatataacctcactttgtatgatgtattttagtagcgtatctttaggaaaatcaaggagataatgagtcgcatcgtatacagcatgaaatattgaaggctttggtatctttaaggcttagaaattcagctgagtgcattttgtcttttaaaattccatctcctaacaaaaaacccaacttccaaacaacccaaaattgtttccagaaaacccagaaacttccaaaatatttggcttttcatgaagaaatcaaccatggtgattttaatcctttatagaaatggtatctatttcttttatcttttagaagtatgtgatcctgatgaaagactctgctatttagatttgtgtaagaaattagttgaaaaaagtctgtatgatttttggcatagataattatgctagtttctaacagtaatgcaattttattttaaagattctgacaatggagatattaattatgattatgttcatgaattgtcattggaaatgaagcgtcagaagatacagagggaattaatgaagctggaacaagaaaacatggagaagagagaagaaattatcattaaaaaggaggtatgctatttattgcaataaatatgttagtacttaatagcagcatttgtattgatcagataactcagcttcttgctacatcttaaattatattagtatactgatatattgatcaacccactgtatatgtactactccatatatattcatttaattttcacattattctattagataagtagcaaatatttatgttattgaataggtgagcaaagctaagagtttgttgcctagagtcaccagctaatgtaacatggggtttgaatctgcctatgtctgtttcaggcccatgctatttctagaatgccttgtttcttttctaaaaagtgaagatacagttaatttaaatataatttatgatttttctg

SEQ ID NO: 73237 - DNA, 1063 bp, Homo sapiens
tacataaaatattataaatgagatttttaaatcttaaggacttgggaaagttatttccaagaaatgtttgacttttatctttcagaagaaatcaaaatcagattaagatagagacctggatttattaataaaaaattagcaaaaaaattttttttcttgagacatgctctcactgtgtcacccaggctggaggacagtggtacaatcatggctcactgcagcttagcctcttgaagtcaagcagtcctcctgcctgttatctcagcactttgggaggctaaggctggagtaccactttagcccaggagtttgagaccagtgtgggcaacaaagtaagaccccatctctacaaaaaaacaaagaaattagcctgacatggtggtgcatgcctgtgatcccagctacttgggaagctgaggtgggagcaaaatcatttttgagtcatcaataagcatttattttccaccccttgaatgttttctccacctctttgatgttctgaaagatgggcactgtaatgtcatattaccaaacacagagaaagagaacttgtatttgttaaatgcattgagtgggggtggacaatttaatgtaatttatataattgtcttattatttcaatagctttgttactctacttacagatgacaaaactaaagatcttaaaaatttaagcaactttttcagtgagaagctgaaaacttagaccagggattagaaaactagagtgtgtgggccagtcactggtttttgcaaaaaaagttttattggaacacagccatgtccatccatttggttacatattgtctgtggctgcttttgagctacagtggccaagtcgagtctttatgacagagaactgagaagctacaagactacaatattaactactatatttcagaattatctctgaagacttaatagactaacagttgtaaagtattgtaaatacatctttccagtaattgttacatcagtacttaaaggaaacctgttccatctttggacagtgctgttaaaaaattgcttctaagaacaaataggaaacttgtttatggttact

SEQ ID NO: 73238 - DNA, 1031 bp, Homo sapiens
gcatgagccaccagcaaggtattaattatttttagtgttatatttgacaggtaacagatactgatcatttttatggtgcattcttgctgcaacacatgactgttgatcttcatgtaatgaatttctctaggaagatcaggcctatgttaggtaagggcaactgtggaatagattacataggcatagctaagatagaatgggtgtgattttcagcaaattagctgtaattcctcctcttctctgtcactgatgtcaactccagtgtgtttgaattatgaggttggtaacccttgatcttgtggttatcaaattcataaatggataacttgtaattctgtagcatgtgatagtgtgtcagaaagatacgagcaaaatgcacaatggagagagtaagtaattacctggagaaccagggacctcttcagggaaaatgacacttggactggtgttgaaggatcgacgcggtgtcagaggggagggaagaagagaaaaccaacacaagaactgtaaggagttttaaaggactaatgtgtttgaggagcttgtgaagctgtgtgcctaggttataaaaatgataacgtggacgtgagatgaaggctgaagtagattaggaccagattatcagtggtcttgtgtgccaaactcacagtttagcaatagagaaaagagacatgctgagatctgtcttgctcaccagtttacctccagaccctggaactagtaagttcacttactgaattaatggaaagtggttctgatatgcagccatgattgagaaaccctgctgatgtaaggtctgtgctgtcaaatgtgggtagtctgaattgaagtgtgctgtaaatataaaatacatagtgaatttcagagacttagtatgaaaagaaagtaaaatatctcaaattttaaaatgtagattatatgttgagaggacaatgattttggatatgctgggttaaataatgttatcagtattttaattttacctttatctttttttctttttaatgttacaacaaggaattgtaaaatta

SEQ ID NO: 73239 - DNA, 1049 bp, Homo sapiens
tgtgatttgtttatatcttttttatatatagtactttttggtagtcaaagaggaacagagcattccttaacttcttttgccctgttttaaaggtgttgtagaaatagtctttaaaggcagtctgttttccatctctcctttgttttttcccactgatagtgaaaataattgcatagccatatactgtcaaatttctagtataaataataaagccttaccactgttgagtataaatatgtatttttcctttagttaaaaaatttacagcagaatatgaaaatcactgttgtaaaattgccttgaatcctttatctttattctgaaataatttaaaatttaagataaattttaaagctcctatatttgctttgattcttacttaaggtacataaaatattttctcagttattgatgttgcatccaaccacaggcatgtgtatacaagaaacttatttcttgtaatatcttcttatatctttcagtataaatgataatgctgctacctctagattaattttgcaactttgtagtttaaaactttgtgttactactacattttgctcccacatataactaatatatttatgtgattaataggaaaacaagtcaagctattagttcctttttctcagttcacatataatttcttattcacatcaccagtacctgccacttcgtggaatttaacatatacattttgattgttattgggagaaaaactgtaagtgttgctcgtgttttgcatattaatatttaaggtgaaatttttcagaaattcaggagtcaaggtcagttagaaaaagtgtattgagatttgtgaggttatttctgtaaatacattcttataaaatgttattaatatataaatacagatttttgttgttttgtttcgttttttgttttgtttctgtgttttggttcaaaggtcaccagaaagacctacaggggatcttagagaaagaatgaagaacaagcgccaagacgtggacactgagccccagaaacgaaatacagaggagtcatcctcacctgttagggtaggattgaat

SEQ ID NO: 73240 - DNA, 1049 bp, Homo sapiens
aataccaagactatatctgatagcacatcccgaagacccagtgtatttgagaggcttggacccagcactggcagtacagcagaggtgagttgtcactagtatagtcacaggggttctcttagaattctattattgaaatgcttatttgtatcataaaggtgaacaggttgttttattgtaggaatgtttgttcagtaaattttttaaagtgtgttttataaaaagaagtgaaaagggtgataaggtttatgggtttttccatatttttttcctgaagtttttattatttggggagtaatatatcacaggttagctggaattttggtagcatttgttttaattttgtcccgctagcattttttttttccagaaataaatatgaaatttacatagtaatatctgtctcttagacacagtgccgtaactggctgaagactggcaactgcctctatggaaacacatgtagattcgtacatggcccttcacctcgtggtaaaggttatagcagcaattatagaaggtaaactgagaactttgtattgttcatgtactattagaagatggcttttgtaatttatctagtataaaaatctgaaatacaaccatatatttggtcagattttctatattggtggtagtcttaccagtaattgaagatcgacaggatctttttgttattttcaagattaataaaatgtttgctttcaaattaacttatttgttcattatttatttgttttgacagtagatctttttgtagtatgtgtatggcttactttttcccccctaattatgtattaaattgctgcttaagacagcagaattccatggtgtctgaatttctttttagtgaggctatttttaactcttaaaatagtaaaattcaaatagggtataattttagctgtttaagatgttctgaattcaaattttgtacaaattctataggttaaaatgcatttgccaaatcccttagcacagtatgttaatgaaaatatgtatttatatgtggatgaatatgctccatatttcgaacatcgttttgcctt

SEQ ID NO: 73241 - DNA, 4160 bp, Homo sapiens
actgttgtggtgttcattttcctttacgggcccaaagttttaaataggattgaaaattctaattgtcacattagttggtaacatttagttttaatatatgaaaaaggaaatgtttttctgctgtattgtagatagtgtgtatatttttagataaatgggatttttaaagttatatattgtgttctttacaagcatgaagcattttgtttattcaaattcatgaatgtctcattagtaatatttaagtaacattttattgttgactacttgtggaagtttttacatggatgatcagaagaattttttcagttagaaatcttcagtttctgcttttttcttttttcaccagacgttttacacacacacatatatatatcacattaaagaacattttattaagaatatgtgtgtgtgtattattgttgtcattattcttgttttaaatgttcagtccaggaccttgctgtaacccagaccgcatactcagatgctgtattactttaggacaaagtatggtactcttggagtctgagaaaaagtagagtacatcttttttttttttttttttgagacggagtctccctctgttgccaggttggagtgcagtggcgcgatctcggctcactgcaacctccacctcccgggttcaagcgattctcctgcctcagcttcccgagtagctgggattacaggcgtgcaccgccacacccagctaatttttgtatttttagtagagacggggtttcaccatgttggccaggatggtctcgatctgttggccaggatggtctcaatctcttgacctcgtgatccgcctgccttggcctcccaaagtgctgggattacaggcgtgagtcactgcgcttggccacatttttacttaatttcatttcttcgctaaattgggagactcagtacagtagtagctgcaagtgaaattcctgggataattactatgtaggtgaatcttgaatagttcttgatgtcactggtaaaagcaattttgtctctgtggaaagaatatgggcgtagggtgagggaggtgaggaggtggatcattagtcttcacttgattgtctttcatagcaagtccaacccttgaaatcttcaaagtttttttttttttttttttttttttgaggcggagtctcactctgtcacccaggctggagtgcagtggcgcaatctcggctcactgcaagctccgcctcccgggttcacgccattctcccgcctcagcctcccgagtagctgggactacaggcgcctgccaccacgcccggctaattttgtttttgtatttttagtagagacagggtttcaccatgttagccagcatggtctcgatctcctgacttcgtgatccgcccgcctcggcctcccaaagtgctgggattacaggcgtgagccaccgcgcccggcgaaatcttcaaagtttgccttagggagtctaggattggagagaagctctcagaccagcaaagcaataggtcaagggaggagagtagtgcgaatcaggcaacagaggacagaccagaaaaagaaactgtagagttaatacctggaaccctcaaaaagtaaaaagaaaggagatgatagatgaccaatgttttaagtataataagtacgataataaatagcctgtcgtcctaactggaaaccattaccattgaattttttgaaggagactgagctgggagtggaggcatgttgggggtagtagagatgttgggggcagaactaactcatttccagtgacagtggagggaaaaataaaaaattagtgttagtccacttgaggcagtgtggtgggatggttgtgcctgttttctaagttctacataactagcaaataaggaaattttggaacctattcaattttgtttattaagaaatgttttaaaaattgaattattggttgaggattactctatatttgtatattaatgtagcaatatataatgaaactttatgtttttctcaaacttcttatacattgtgatacatttacttattattgaatcatgcttggatatatattgttaaaaaagtttttctcaaagctctacattttctagatctttctcagctccacttctcttagctttcagttttttcgtgctcagtaaatcaaatagacataggaaattttaccagcttctcctccgtatgttcacatttcagctgagaatgagtctaagaaaaattaaatcaaagattatcttataatgctaacaccagtatgtagaattggtgtgtagttccttacttggagaacaattaatatttaattgattttgtgttgcagcaaattattgtttatgtgatgctctccactggttcttaaatttataattactgtgaagtaattctgtttttaaaatcactaaaaattaattgctattatatcaaaagaattattacattttatattgataaaaatatagattttccaatttaaaatcaccatatattatttcatattttccttccttgatgcaccatcttttatttatcaaatgttgttcttagtctttggattcttttaaaagtgtgacctgaagtacctcattgaaccaaacactgtttataattttttattgctgtttcaattaggtactaccacgatttaatttcctttaaagtgatatgtctttactttgaaaccacattaaagatttgtgatctttatagagactaaatgaaacttttttagctgctgtggttcattctagtaacttttgatgattgataagatttcaactaatatttagtttgtataaagcgggatatagtatggtgttttttttccttccccttatgaggcagtttctaccctcttcccacagtagtgtatgctctggattgtatcttggtctagaatttaatattgttttctaatgtcataatatactgtcattatctgatacttgcaaatctagttgaattacccaattatgtcattggattagatttttactatagtttcagtttttgaatgttttatttacatacatatatatatatagagagagtttttttgttttttttgagatggagtctcgctttgtcgcccaggctggagtgcggtggtgtgatctcggctcactgcaagctctgcctcctgggttcatgctattctcctgcctcagcctccagagtagctgggactacaggcgcccgccaccatgcccagctaattttttttttttttttgtatttttagtagagacggagttttgccatgttagccaggatggtctcgatctcctgacctcatgatccgcccgcctcggcctcccaaagtgctgggattacaggcacgagccactgtgcctggcccttaaaaaatatttttatgtttacatcaaatctaacagagcttaaacgtaaaataaaataaaaatatttttacaatttgccttttttgttattactaataatggtaaaatagtctgataattacttttaacacctttgaattttatgtcagtgtagtatagattatagaaacacctcgactttttctagttctacagtctgtcctgttttgaaagttgtttctatcaacattgagttttgttttgttttgtttttgtgttactggaaaataaatatgcttgatcagattgttttgacttctgtcaggcaaagaaaatactaaaatatcattcatttttctcaacctgatttttggaacataactgctgttgtcccttaaacttatgaaacataatttctgctatgaaaattttcacccaattttatttttccattttctttagcataactctttttcagttaaccagttgatggttaacaactttgagttactaaattttgaagcaatttttgtaagtaacttttataaagtaaacattttgtactgtatcttctgaggttgattgtactatgaaaacttcactgtgtgagtaggatcatattcgttcactctgcagaagaggtacaattctagccaacagatctcacagctgttataaattcaccagtaaggcatgttttagaagatattatctctgtttacctgtgacctctcctatgctttttttttttaatctcccaaggaaaatctcctgtaattttacactgttacctatagttttatctacttgtaagctgtgggctcagttatttaaaac

SEQ ID NO: 73242 - DNA, 1100 bp, Homo sapiens
ccatgaggaactggtaagtgctacttaattatttttctcattagcattttggaaataaaataatacttagttgaagaatcaaaaactgggaaaaattttgtcctctagaaggcaaatgatagatgttttaaatcatggtgtgatcctgttgagagtcaccctgggtcagtgttctctaagggaatataaagaacgtgccttaccctaacaacacacactttattcagcacgtgggcttcctaagaaaatgtcagacaaattccttgaaggttaggaaggaactactactacacttgacctgatctgcatgtgaagcggtataagcaaggatgagtatggaatcatgcgacagctttgtggtcactagcttcctacaacagcacaccacagattaagtctcaacacagcactcattgttttggtattagcagcaggaattgttcctgccctgacttccctaaccctcagggttttggtcctattaaagtacctccaattttagcattgaggagagagtctgttttttggaacataacagacaatacaggaaattcaaagaggactcacacaatttgatactcccttagcactttttagtccaagatactgtatgtttgggttcatggcaaaagatgcaaggattcttgaaggattgtagctaggcttcgacaaatcctcatcccagatgctctccagacagtggaagtgttacatcaacagccccattcttgggaagggactaatttttaggtagtagcttgtttcttagtgactcatttttttttctggctctcttaacagaataaaatatagtcacattacaggagctagcaattgctgatgacaaatataagattatttgcattctctgaaaatagcccatttagaacataaatgtacttgatacttgagcttttttcttctcaagggaaaactgttaaggaaagcacctttcaaaaatattatctttgaagaaataaaaggaaatttatcatgatttgggaagtagaattagtctaattatgcttttttttttttgcatcactgccagcacacatatatgttgagagccattacgtgtaaaataccttgtcaatgga

SEQ ID NO: 73243 - DNA, 1032 bp, Homo sapiens
actataaaagctttctgccacccctaaactccaggggggacaatatgtgccaatcaatagcacccctactcacatacacacacacctagccagctgtcaagggcagaatgaatctatgctggataagaaatggtggaactgcgttatgaagagctaatttactggacaaagaattccaaagcaaaaccagaacagtatgaatttgagcaggtctcataggttgagcaatttccccctaaaccaactgaaggctaaaaagcaacaggccattgtgaaccaatgcaagacgccctctatcatggtgaaaagctccatcaatgaggtatcttctttagtggtggtatgtaatggaacttagccatttttcaaagcaattgaaatgcattgctctggatctgttccttggcagtggactcagaaagccaacatgtggctcctcccagcccataaccagtatttttgctgcttctgaatacaaattggttggttttgacttcagattgaacttactgtagcctcagatgatttcccccctccgcctccaggaagaaagaatgttactgccttaataaaaaatgaaaagagaatgatgctcaaaatctttccaaataaaatgttccctatattaggtgtctctggatgtttcattttgaaagtttgctgacagtgtgctataaatcgttcattcattcattcctccaacacgttcgagtgcctagtatgtgcaaggcacagtgcaaggttttaggaatgtgcctatgaactaaacaggcactgtgctcagctgatgcctgtcttaggaaagacggaagttaaacaattaaaataacagatgtgacgagtgataaaaagaagggcagggtgagacatgagtttatgacaggaaacagtctgaggagaaatagtttagctaaaaactgaagaataaatttccgttaggcaaagcagggaataaaattaaagctgagagccaaactcagaaatacactgaacttgtaggagtgaagaggtgtgatacctttcctcacctat

SEQ ID NO: 73244 - DNA, 1079 bp, Homo sapiens
cagcagttagaaagatctttttaaaaatgtgtatcagatcttgtaactctgttgatgagaccaccctccctgcaatagcttcttgcctcctctgctgtaaaaggcaacgccctgtgtgatcaggcctctctgaccttatctgctactactctacccctcttttgcctcttcgcattggccttgaaaatgaaacacacactcttccctcggggcctttgcgcttattccttctgccgggaattctcttacccctgatatcttcagggcttgctccacttgcactccctcactgtctgcccttacctccctcatgtttttgttcaaatgtcactttctcagaaaggcctttcctggtaacgtcattaagaattttaattccacactaccctcaaccctgattgcatacacacacatagacttacattccccttctgcgctttaatttttttctccctaagacttattactatctaatatgtacttagttatcttaaatatcgtctgtctctctcaactggaatgtcaattccataaggttaggaactaatgtcttatttatgcatttgtatctccagtgcctctaaaagtacctgagataaagtaagtactcaagtatttgttgaacaaatgaatgaatggatgaatgaatctgcactggaaccccaatacaaattttggtgaagcaggcattgaaccaatggaatcatccaggccttgcgacaacttttagcagcaattcaccatgatacgttactcaaaattcctagacttcttctaaattaacattagccatccaatatttaccacaccaaagatttcttcctagttcctagctaatgatgatgattgcatagatcaagcccatttcaacattttgcatgatttattatcagtctctcagtgttattgttactgctcaaccaattcactccatatgcaccagtaatactcatttcatcaccatttttatgtgtttaaaagatctctgttttaaacacataattataattgtatgccccttctttatgttctttcagcattcttaagtcttttgcactctttgtaaatgctgaagttat

SEQ ID NO: 73245 - DNA, 1052 bp, Homo sapiens
ccagctactctggaggctgaggcaggaaaatttcttgaacccgggaggtggaggttgcagcgagccgatatcacaacactgcactccagcctggggcaacagagcaagactctgtctcaaaaaccaaacaaaacaaagtatagtttgtgttttctttttctggacaattgtctacactggtgaaattcactgcacattattttatttttctttatattagctacagtctttgatggatgattttttttccactagtaatattttactttcttcttacaataaattataaatactttttccacatatcaaagttcatcaaagaactcccaaaattaatcttcttcatccttcaggaattatttattcacacagcagaccaccatttcatattttaaatcctagggctctcatgcattccttgtgggcctcaattagatgtccacagtgttcttctcctttctcgatgatacacgcatcgcgtgccttcttggtctccgggcaagtgcagcagggcttcagcggcctcttctcctgagactcaggcagggcagggtttgagtcaaccagacccggcatctttcgcgccaaaagcagctatgagcggagacagccaaatctatgccagcctcggcaaacgccaattcgtccgatttctttaaattaaagttgattgcacctactgtgctatacatatcagcaagaccatctcatccttctccctctcttggtttcaaaattaagaagtcattttaattctgtcactccagataagctcttctgtaatgctctatatatcccatttccaaaggtcaggggctcaaggctcagactcttgtcaatgtggaaaaggaagctctgcctgtttgcttctgagaggcagctgttctctgaaaacatctaccccaaagggaagcgtgggggtgggggagaactgattgcctttgattacttttatacccctgtaactggctttaactctctgacttttcatctctttcaataccagttcatgatacaaatatcccttgacggattggggaactaatagtgcc

SEQ ID NO: 73246 - DNA, 1745 bp, Homo sapiens
ccgccgggcttgtagtgaatcccagtcggctgccgcttcggaagcgatcggccctcttccttccgtgccttttgctcaccgcccacacagtttgggtcctaccaccgaggctacctggttctcagttacccaaccgttgcgggggccccaggaaaggacggcgtggcatattaaaggcaaagtaattaacgtgagcctgttttcctgtgtgagcccggcaagttgtaactcgcgccaataagcagcataactttttcaagttacgtcatgtgttacatacttctaaaacgtctgctttctctttggtagttggagttccaggagcgggatctataaacaggaaggagggtggtggaataggattggggccttagggtctatacagaactgacttggtttccggccatccggttccgctccctgggggagggtttgtgtcatagcaagcgcccaacatttcccagggcagtgggtgctccgttttggagccgctgcccagacctcttggctgtcatcgcctcatggcccagggtcagaccccctgggtcttggatgggttgactctcatcacaggagcacccagtttaatcttgtagtgggcaagggagcaggcagtgggtttttggaggctaggtttccagtgtcttttcccccttttaattcaataaacatttatctagagccttaatgaatatttagatacagttctgagttcactggaggcaaagatggctctccagggtcattaaactttgtaatttggatttagggatagtcaggaatcggcaaaaaagagggaatttccaaagttgagctgtcaacagctggggagtgtctttcaataagacctcttagttacatcttctcaagtggaacttattccaagaattgcctgaatcactgacttaaaaaactacattaaattttacttcccttctgctatagagtgtaccgtgagctagctatgctatggttggctatatctgcagaaaatagagctggcatgactaataataataggtttgtgtagttcagtaagggggcttcatagttgttctacttcagttatgctaaggattatttacaaagttaggtgaacttgatgtgtctgctgtgttggcatttctttgagaagaccagtgcttttagggatcacatcttttagctaagacctcgccatgtgaagtggatgctgaaagtgttcttgttggcttgtttatggcaagcttaagttgtgagttttgcaggtttttatttatgagctcacttgcacatgttttatgctcaggaaaatctaactggttaaaattcagaggctttatgttaattcctcatccaaaaatacagtattatttgggggaagaggagtggagggatattcatgtttgtagaaacttaagtcaaccccatcagaaaagtattcattgcagctagttattttacatgaaattagaatacccaaatgtattaaatatttgcttctgcaaaacgtctttgcctcaggtcaaaagctaggtgtaaaccacatgtactctttgttctaaagataaatttaattgagcacagtttcttatttgagagaccagaaagcaaaataaagagttaaagttacctccggtgtacacagtgttgacacagcgtacatgtaagagttctagtacagttgaaagtttgagtagtaacatttataataaagatagtggtttctccttgactcatatttactttaagaatgtctcttaaaa

SEQ ID NO: 73247 - DNA, 1051 bp, Homo sapiens
tgggaataacaccctagctctgtgtgatctggctctctcaaatgtctgtacagattcaaaggatcttctctgagatttgtgggtggttttatctcttgaaggctgacttccacaccctattcccatcctaaagcaatggagtccttgggatgttagcactctttagtcgttggaattcacagaagacttgataacaaaatctagtcattttcaacaacttaactttatttcataatttttgccatcaatatgtttcactataaatataataaaatttttgaaatcacatgtgtttccttaaaatgtatgttcttttatagttatatccagttttgaattatcgttctgctattgaattaaatttggtagtttttaacatacctgttgctttttgtggtggttactatcagataaatgcctttgtttattacatgtattctaaatattcttccattcataaactatgattcatatccttttctttcctattactattgttttttcttccctgttaaggtatagataaattccaacatcaaacaaaagcttttggaacaactcagacaatatctgtagtggttctgaatcacgtctagatgggcccttccacatgtctgtggtatatggcaaaaacagtctccacaaacctacatgctattctcattgcttgcattacaggctgctttcttgaaaaggcaaggacatactaatcatgcttctagaataatagcatacaattataggccagggaacctctgggaatttttggtctgtgccagtttataaaggaacagcccaaggtttgaccttcatcactgagatgactctactggagagtttgtcagtcactgcaacatctgatttgatttttggtaggtgtttgatactaggccacaaattagcacaccctgtcatttaaaaattcttgtttaaattattgactgagacttttttttgtgtgcgtgtgttactgtaatgaactgaaatttcccatggcatggcataataactctttgtaataaacatttaaagggtagataccttttgaaat

SEQ ID NO: 73248 - DNA, 1060 bp, Homo sapiens
tggatgactccggctcatctggacccctcctccatctctcatagacttagaatcttttcggtggttggtgggtccctagagtcacactttatttttagctaaggtggggtcacttctcaccaacatttgcaagtgttcgataagcaatgttacatctaaaatcaaatgagttatagtgaattctgagggagatgggcaggtgttttataatatcaaatattgtttgaaattagcaaatgaaaaactaatcaatatcttttgagcacttattgtgtaaggagcatagccaaaaatataaaggcatagttccacctagtttgaattggatgaggattaaagaaattatgtatttgaaagtcccttacacatacagtactccaattaacaagtattatttcaccaaagcctttcagcccttagccaaatggaatttcttccttttttttttaagtatagcttagtgattaaaaatagggtttcctgagcttcaaagacctgtgttcaaatcttggccttgttgcttataaactatgtcactttggccagatgacttaaaccctatgcatcggtttcctcacctgtcaaatggagataataatagtatgtacctagtagagttgtcatgaggacattggttataataacaacagctaacattagcaagcagttattctatgtcaggtattgctccaagtgctttatatgcaaatatatgtattaaatgtatgtaatagatgtttcacctcatttaatgcttgctacatggtctgtattaactagagtgggggctcaataactccaagcaatgcctttctattgcaacctgaagagggagattagaaatgtagaaaccatccattcatatctctccctcatttaatagctgaggacactaaggcccagagagtataatcatttggccaagggtacacagcatggcagtaggtgccagagccagggcagagtctcccaggctcacatcaaagggtcgtttctgtggagccaggaggtgacattgggatgaagggaaggctttccctcatccatagggttctcaggt

SEQ ID NO: 73249 - DNA, 1173 bp, Homo sapiens
taaaaaacagattttttttgagtgcatgcaaatcaaatccaacttaaaggaatctgtgcaattgacggcaaatagatctctctttgtgcagttcccttggaggtgaaaatgataatctctgcatgcaatttaaggcaattttgtgtgtgtgtgtgtgtgtgtgtgtgtgtgtgtgttttcctggtgttttagaaagcctggataaatccaagttaattttagttgtagcagtcattccatcggttataggcttgtaatcaactcttagctgtggtttgttcagatatttacaatgaatgctttcttgtatctatacagtactgtaaaaggtactgtgctataactttataagtacaaatgtgcctaaatctgatatattttataaaattcagttggcagctgtgaaggcttgcttttgtctcttcctcccctgcacaggctaagtccttggaatcagtatgttaatgaagacttggtatctcaatatgaaatttgcaccatgggagttctgagataatgcgtcctgatagagcccctaatgcctgcctcttaggagggcgagtgacaaagacagtataactcagctaagtcctttcataatcaggcagccttggtctttctcaagtggttccatagtttctgtgtgtgtgctttcttgtgtttctgtgtctcagacctcttctctccttgggcagtctgtctgtaatcttttaatactgcatggtagattggattggatgagccccatcacctttggataagaaaaggcttttggacacaagtccatgcaacactcttttctttagagaacacaatagatcactgggaacatcataagaggtgctctcagagggtgcttataagtggcaccatcctaaatccaggtttaccggggacagtctgggtttataactcatcctggcctaatgaataatagcaccctcttttagcacagcatgatttagataagttatatggtcaccccatgcacatgggatgtggtagataacaccttttaagaataaagtgaaatggattcaagtgaagtgacttacctacccatgtctagttgtgtcagattgaatccagaattggtccaggttatcctggtcatttcaccagctacccatattgctgtcctttgaaggaattacaatgcttggctggttctct

SEQ ID NO: 73250 - DNA, 1030 bp, Homo sapiens
ttagtgatagaaaaaactgtggctgaaccaagttttctgggatcactggaatgatgttagctaatggagtccaatgttgaaagcatttgttgcgcacctactggatgtcagacactttgcagacacgatcttatttctcctctgagcctaataataggtatcatttcccttaaatttcctcatgtgtagaattgaggcctatagatgttaagaacttgcccaagatccccatgcaaaagtaattaggagaattaggagtcagggtttgagccccagggatctaagtacattgttaatgtagagaactgccctttgctgggagaagttaagcacttggctggctcccctggttgtatcgtgtagcaccaggaccatgtggcgtatcacttccaaatttcctaaatcactgtgatcctgcatactccttgcccagacccctcctgtggctctctcctgcttgcccaccgaggctcagctgcctagcagcagatccacagggcctctggtatctggcgccaacccgcttatcctgctgggttttcctctagctcccctcaagggcctgtgtggctccagctgccttttccattagtgttcccatatgttccaggttaaggcctccgctttgccttcgattgtaccttttctgtcttcattgcacttgccaaataaaataaacaaaacaaaacaatgacagaccccagctctccagtccctgtcaagcagtcatctcaaaattttaattcctgcctcttctaggatgccccaaatgccagcctccctctctgcaactctactcatcttttcatctaaaacagagtttataatgattgagttggtccttaattgttctttaattccatgtcttttttctctaataagaataagaatgataatagcttcatttattgagtcagatattgtgttctccactttatgtggcttccctcagctaactcccagagcaatcttgggaggtaagtacacattttcttcccatctgacagactggaaaattgaggctcagaga

SEQ ID NO: 73251 - DNA, 1065 bp, Homo sapiens
gaggtgcaatcttagctcactgcagcttccacttccccaggctcaagggatcctcccacctcagcctcccgaatagctgggactataggcacacgccaccaacacccaactgattgttgtatttttagtagagatggggtttcgccatgttgcccaggctggtctcaaactcctgagctcaaagcaatccgctggcctcagcctctcaaagtgctgggattacaggcgtgagccaccatgcccagcttcagttaatgtttattgagttccctccctgggttaaggaatgatacttcagctttaacagtgaggggtaggcgccaggatcaggtcctgggatgtgtggctgtatttttctggcatgagcagctttctcaggcattggttctttccaagcaggaaagtttattagaattttgcacagatgcggttcatttcacccaggattttgtcttagttttagcagcagagacagtgaatctcactgggtcttaatcaggaaaaggagttggccgttaaatgacctcaggagtggcttctggcttagaccctggagatgccgtgtggtttgctaaggatcaactagctcatgacaaatactagaagagacttaataaatctggacctttctttaccaatccaagttgcttgagttgtaaatgatgtaaaaatagcaccctacagacactagttgttcagggtgaaatctcttatttccattagccctgattctagagaagagtggagagttggccttaggtgccctctttgtctttgactgtatatgtggcacactttcttcagccaatggaatggcatacgttgtatgccatctgcaagagcctgataagttgcattacaaatagagtgtgcaaacaatagtactgattaagtgacaaatgttgaggcctgggaactgatttttggcactgacaaattaaggcagattagaccgcctttcaggacacttttgataatgctacgtgtatgtgaaagaagaaggtatcagaaaaaacttaatagagtttcttagcaagagtactggaacataattgtggatgccta

SEQ ID NO: 73252 - DNA, 1007 bp, Homo sapiens
tcagaagagatgagttccagctatgactcagtgtgagttcctatgtcataattctacatttctggagtgcttacacctgacaggaataaactcaaggaaacaaaaagaacaggaaaggccttaggcacatactggttgttctagatgtggagttctgctggcaactgccacagagtgaaattggccacatggaatccaaagcacggcctcacattgtttttttttttttgaatattttatgtaagacagggatgttaaaggtagaggaagtaattaagaatggcagctatgtctttaaaattaaacacatcggtcataactttaatgaaggtgtaaaagtgtttttagttttaaacaggcaaaaaggcttttaaatacaagtaaccagttttgagactttaaaaagcagaagtttttcatgccagtgcttcctattttagtttcaaaggaaaggaggaggagctgaggtttggatggttatcatagatgagggagttgacatgatcaaaaatgtttttttccctgggaacacatcttgagtgcttatctcttctaatagataaagggctggtgaattttgaatgtttcctgcagctctgaagaaacactgtgatcctaatgaacaccgaggaaagcttgtattgcagccctaaatattacctgcttcaaggaggcagcatgttttggtacagtctgatcatgactataaatcaaagcatctttacttctccagggagataaaaaaaatcatgtgttactttataaggatcttgtagttgcagtatgtctgtcagatgtttccatttttatgatttaagacacttggtgctgctatgaatagcaaattggaaaaattgggcattttttaaattttgaattttatcttagcatatatctggaaatgaaatagcgatcttggaacagagacatctttgttagaatatgaaagaatgtcagtgaattctaacttgaagctacattgagatgacatgttaaaggcatgaata

SEQ ID NO: 73253 - DNA, 1076 bp, Homo sapiens
cttcttgcctcagttctcatactgtaaacgagtgtcctggatgcagacaattcagtgccatgtcttctgcatttttgggctttttcttggtgatttcactgtttaaaatggctccccaaatatagggctaaagaactgtccagtaggactttttttttttttagatggagtcttactcttgtcgcccaggctggagtgcagtggcttgatcttggctcactgcaacttccgcctcccgggttcaagcaattctcctgcctcagcctctcaagtagctggggttacaggcatcagccaccacgcccggctaatttttatatttttagtagagacagggtttcaccatgtcgaacaggctggacttgaactcctgacctcaggtgatccaccagccttggcctcccaaagtgctgggattacaggcgtgaaccaccgcgcctggccctgtccagtgtttttaagtgcaagaaggctgtgatgtgccttatagggaaaaatacatgtgttagctaagctttcttcaggcatgggctttagtgctgttggctgtgagtttagtgtcaatgaaccaacaacttagatcaaataagccattttttttttaaaaaacagaaacacacataaaatgacgttataagttggttgatgaaaattttgtgaccagaggcttgcaggaacctaaccctgtgtttcccccagaagctaaggattagtatttcctatggcggtgttcaaggcaacttcatagacagaactaccatcatgaataacaaggatcactgtgtgggctgagtgcggtggctcatgcctgtaatcccagcactttgggaggccgaggcaggcagatcacctgaggtaaggagttcaagactagcctggccaacatgatgaaaccctgtctctactaaaaatacaaaaattagccggtcaaggtggcgggcacccaataaaatgacaatagagtttaaactccatggtttctgaggcattttctgagtaaattggcatacagcgtatgtactctttcctctagaagttccagaaacaacactatttctttatgtgcaaaatggcct

SEQ ID NO: 73254 - DNA, 1122 bp, Homo sapiens
tctgtaatccctacactttgggaggccgagttgggtggaacacttgagcccaggactttgagactagattgggcaacatggtaaaactccatctctataaaaaatacacaaattagctgactgcggtggtgcctgtagccccagctactgaagaggctgaggtgggaggatggattgagccccggaggtcagtgctgcagtgaaccatgattgtgccactgtgctccagcctgggcaacagagcaagacccggtcaacaaatacatacatgcatacatacatgcatgcatacatacatacatacatacatacatgtaaataattaaataactcatttcttgtcagataaatggctgtatctttataataagatatctgtatcctgtgacttcatcctgtaaataattttgtgcctcttgtgctttctatgatctagggaggagaaagctaattcttcttcattttatgcacggagcagagacacggagagcctctaatttatttcttcttggtgtggccctgttttctgagcatgggtgtgtctgatccctggggagagcagagccacactgtggatctgaggtgctgggaagccatccagtttcctcctcctgaccctgactcaagtcttccctgaaatctctgtcagccccattctctttctgtcagccccattctctttctgtcagccgccctccttacataacccaaatgggttgtttgcaaagctagtgtcgctgaggtgttctgtgtacaacagaaaagaatctagggaggattcctatgtgtcactaaagccagtaattaagtggacaacagggggagctaacactgaatgcaccaataaatttcaagactcctgctaccctaggtaaccgagtcaatagtattagaaaccattttaagcattggtagttttaaacatgctgtttaaaaacaattttaaatttaccttcacttttctaattggatactttactattcagagtactatgagatgagggtctcgctttggagtgcaggggactgatcttggcttactgcagcctcaatctcctgggctcaagcgatcctcccacctcagcctcctgagtagctgagactataggctcgtgccaccat

SEQ ID NO: 73255 - DNA, 1049 bp, Homo sapiens
atgtggtttcttaaaacacgagtgtgattattttctgcatcctttccatagcaaacatttccctcaaactacatgctccaaaagtaggttctcactgcacttgccatgccgtctcattgcttattgagagtgactgtctctttacaacaaatcaactggttacaattttgaggctttttaggtggcttccaaacttgtcttggggtttgtccctcatatgttcagcagccaaacatgctcaatgcattgtatatttcccagcaagccatgaagcactattgacttattatgaaacttaatttgatgataatgaggcaggtctataaaatagcactttgggtagtttttacccataaaatagcaatttgtggaagaccgttagtatgtagcatggactctgaagctagagaacttgagtttgagtctcagcttttctactttttttttctagtaattttatttattttatgttttactgttaaattcttaacctacctggaatttagtttggtatagggagtcatgtttggatctagctgttgattctttttaaatataatttttagtgatttttttattgtgataaaatatacataagatttatcattttaaccattttaatttagatgtacaattcagtggcactaaacacaatcacaagttttccactttttagctgtgttagaggtcaaattattttacctttctgcgtctccgtttcctcttctgcaagtgggaataatactcccattaagttgttatgagattaagacttaattcaggccgggcgtggtggctcacacttgtaattccagcactttgggaggccaaagcaggtggatcacttgaggtcaggagttcgagaccagcctggccaacatggtggaaccccatctctactaaaaatacaaaaagttaactccgtatagtggtgcatgcctgtagtcccagctactcaggaggctgaggcagcagaattgtttgaacctgggaggtagagtttgcagtgagctaagattgtgccactgcactccagcctgggtgaccaa

SEQ ID NO: 73256 - DNA, 1049 bp, Homo sapiens
ctctgggagtcacactgagaagtcatcttggattgggacaagtgtcttgcatgctagggttgccttagaaaacacagactttatactttttttgttgtgaactaaaaattaaatttaactacatttcttcttacttgtagaagaaatgtcttctctccttgcactgacaattctaaagaaagtctcaattgtaggctagtgtttcttctctcttaaaaaaatgaaagaattgatgatgtcttcctaaactggaaaggaggaggagttttgttcaattcgataaaaatgtgtatcccacattctttcatgaagatcttaccccattcaaagagaaaatgagaacactttagtgtgtatattaatgtatatattttcgagctggtctttggtagccaggttttgttttgtgaaatgacagatcagcagaaagacaccaaaaacacagtgaactgaactggagtttgaaagtgaactgacttaaaatttgaaaatatttttcacaggatagcagagttggaagaggccattggagtcatccagtgcatacgcacggccaaccatgtggagtttacgctttgccttttctagtgctcactgggcatctattttcaaggtggaacccgtagccaatggtccctaaaattattaatgtgtttataaattattgtgcctgtaaaattatgtccattgccattggtagctgacaggctttataaagtgtgaatgagtgaatgattggctatttcttatcagattgaattccttttaggatagttcatatttggcataacttccaaggaggattttcccattattacatatcacctgatcatagctgttgttttggatcagtgtgtattgaaaaaaagaacagagagacacaaaagggatattatgactttgataactacagtagtgtcagaatgtgttggttttgttttcagttctgtttctgatcttaatagagttgttaagatctttgtgcagcaggttagtgctctggaactgaggtaaatacccactcctaattcaattgtattttttttttg

SEQ ID NO: 73257 - DNA, 1029 bp, Homo sapiens
tagtcttgttagacataaagtcttaggatttacacacattttgtattttctctgagcttagaacaggttcttggacagagcaggaactcagcaggtgtagaaaataatcgacttcttttcagtatttgacatgatagcgccttcctttgttgtctttggtcacatgctttcctggtcacttttctacttcctttttcttctctattaccgtatctggatattctttctcttcctgcaacttagtgctagagttccctaaagctttggtcttcaatcttctctccaagaccttatgcctcttgtgtctcaaatatgttctttatccctttgactcagttgagcactagcccttatttccccggttccctaatattcagttcctcttagatgtcctagtgaccctcaaattccagtatgttctagactaagcccattttcttcttttccaaattagtatatcttcgatccttgtttctgttcatgctcctactgtttttctccagcaccccaggtcagaatctcagaaattatctttgacccctttcctccattcatttttacataaatcaatcattaactactagttcagtatctcattgcctcgtgcttggaattctgtgccctccttccactgttttcctggtttacctgtacgttttattccagaggaaatgagaaaaggctgcactgtgtagaggggagatcacagaatttgatctaaagcctgacccacccggtttcaaacctgaacacagaggcactcactagccaggcaacttataatgaattatttaaattctctgaatgtcagtttttgtgtctgaaaagtgggaggtcttagtacttatgttacaagatggttgtgaatataaataaaataatcgtcttagtgccaacacagtcccttatatatattagccaagaaatatttgttgacttgttgaattaagttttgtggcatgctgtgtcatcatgcaaattgaaatatgggttaagaagcaaagtgtcaaaagagctagtatttgagta

SEQ ID NO: 73258 - DNA, 1041 bp, Homo sapiens
tatggatattgttcactgctgtgtgcatataaagacaacagtcaggtgtcatatgcaaaacagcaaaaagttactctaactttgatgagaagcaaacagggtattcataaaagagcataaaaacaaaattaggtgaggtatcctgtgaaaaggaaacttactaggctaaagtaaaataattgctgtttactgtaggtcgagtgccaagcacagacagtaatattcaaatcaacaatgactggatccttgctagctcctttcccttgctgagactcagtattggataagcccagagtatccacgctgtgaaacctgcccagctttctctgtcactctttagattcaggcctgtgtcatttccttaatagttttgtgatggttaatgactttacatcattatttccattactatttgaaaacaagtagtaaacagagattgtaacccctggatattcatgcttttccagtgaaatggcaggatcctggaattaggaaggatgagagagaaaatgtcatttataggattatatgttgtagtcttggttatccagattggaattaggtacatggtttgtttgggcctgaaattttatagcccagcctgattcaccctggcatgtctgagctatctctttatttttaattggtatatgttttcagtgagggaaacattaaaccatattttaaaggtggctaaaattttagcaattaggatgtacaataagtaaaattaataaatagagtcatacaccacataatgacattttggtcaacaatggaccacatatgtgacagtggtataagattataatggagttgaaaaatgtctatggcgtagtgacataggcgttgtagccacatcttaacatctgagcataacacattaccctttctatgtttagatgtgtttagatacaaaaatacttatcattgtgtcacagttgcctacagtattcagtacagtaacgtgttgtacaggtttgtagcctaggagcaatgggctatatcatatagcctagccatggagtaggctagacactt

SEQ ID NO: 73259 - DNA, 1087 bp, Homo sapiens
atgagcccggtggttttgtgagttgcagcaaaattatcttccccatccctactgcaatggatgaaatgatgcctgtgtggtgctggttgctttggtccagctgagtttcctgcacacattgtcaggagagggcagttggcaccagcttcccgttgctattggttgtgcaggatgtgctctccatctgcctcctggctggccgagggctcagcttctaagtggcggtggcggggtggcggggtggcggggggactttgatggcattccttgtgttgaataaagttgtctctttgagaactgcccatacccttattttttattttttatttttttttaaaaaaagaaaaacatattttgttttcttacatacttgtcatttgagttgtcacacagaaaatatattggacttcttgtatttgtaaaatgtcttctcagatcactcctttttcctttcttgttaaaaacaggttcacagacagtatgaagtggcctttctgtttacatgtgttcttgttgtattgtctttgcagtcgaaatcagctgtccgccctgcctgcctgcctgtgtggtctgcctctcaaagtcttaatcgcaagtaacaacaaacttggatcattaccagaagagataggtcagctcaaacagttaatggagctggtatgttaccgatttttaagatgctcttttttgttggttgactgatcatagcctctcaaggtattcagaaaacctttttgctacggttggacaaggtagagcctctgttgtttgagggcaggtatatgataaagacattaagtggggagaggaacagctttgaaacttcactgtgacagacacagttcctggaatttaaaggcttcctgtaatttacagctcctgaagtttgcaggatttgccgtttttgaagtttatgggctatcatgttgtagttagtattttcagattgcatataaatttgtaaaaaattatggctaaactgccaaaataatctccaaataagttagtaggccacacttcatgaaggtataaaattaagtcagaagacagaaagaatggggtgctctgattctgtcgagattttaga

SEQ ID NO: 73260 - DNA, 1027 bp, Homo sapiens
tatttttaaattgttcacattagactcagagtattccaaatggaattttttttttttttttttttttttttgagacagagtcttgctctgtcacccaggctggagtgcagcggctgtcgccgaggctagagtgcagcggcacaatctctgctcactgcaggctccgcctcccaggttcaagcaattctcctgcctcagcctcccaactagctgggactacaggcacgtaccactgcacccagctaacattttgtatttttagtagagatggggtttcactgtgttggccaggctgctgtcgaactcctgacctcaagtgatccacccaccttggcctcccaaagtgctgggattacaggcatgagccaccatgcttggtcagaattgtgaactctctttttttctaagtgtgagtgaacattccagagtcagcaatcccttaaaaaaataaataaataaaataaaaaaactttagccatctacaacaaagcagttgtcctttctaatttgtgaaaggaattggagttggaaaatggtatcttatctttctaaatacattagaattatataagatctttttttaatgcattcccattcagtcactgccttgtcctgccatttgagactgtgcagggaatgtcgaaaagcagttgttccccctcccatgaggaagccacaaagagacactactgagatgtccttttcttgactcaacaagagcagccaggttgtatttccacattgttgcaggtgcaggaaaacttatggaatcttagctccatggagctggcccctccagggtcatttcagatgggaatgatctgaaactttctgaccttcctggctgctctgaatgacttctatgtgctctgttgcctcactgctgtagcagtatggatatgttgctttgtacgtctatctgcctgtgctttctataaggggaagagataaagcattcacatttactgagcacctgctatataccaggcactctgctaggtatacatgtattatttcatatagtctt

SEQ ID NO: 73261 - DNA, 1065 bp, Homo sapiens
ttggccaggctgctctctaattcctgacccccagggatctgcccgccttggcctcccaaaatactggtattacaggcgtgagccactgctcccaaccatatattccttatttgaatgttagctggaaaatggaatttaaacaccttaaaacatggttattgattatttagagacaagtctccagctcaaatgttaaactgcatgagagaaaaatgaagtgctatgctttcagatgcttaaccatgtaaatattttgaagtttattttctttttaaataatttaacagcttcttaaatctacaattatttttaggctctgaattgctttctatcagctcgaaaataattgtgcttttctcatcttttgtaactggaatttcaccaggctggtcatctgagtttatattttttatactatatatacttgaatacatttttgttagagttttatagtttaatgcaagaaaaaatgggaaattgcttaagcatgattttctattcaaagtagaatttggagggaatgattcccaaaattcttacatgttttggaaaggacggatttagtgtacattggtagggtgttacttaaaatgaaactgggaaaattgaaatatacagagtaaggatttgatacttacattttgttttgtcattgaaaaatgaatatgattgctattaatttctttgtagatttgcacaaagggcaaagttcacatatttaagtatctgagcatacaagcatgccagattaagacagctgactccctttatctccacaccatggagaggccacatttacaccagcacgtggaagatgggtgagtcatgccctcattcaaagccccagtttaaaatttgcctaggccaaggccctccaggtagctgacttcaaaatctgtttgttttaagtcaccatggtatctgcagaaaacaaagcaaaacagaacaatttggtttaatcacctaatttgtatttaaaacaagaagttgagaaactattgggatatgaaagaaaaaactgctgctattgagaatattttggtatatctcaaatatcatctgtct

SEQ ID NO: 73262 - DNA, 1022 bp, Homo sapiens
aaagaagaaagcagagtgtcaccttgttccacctcatctgggaacatacacatcctgggactcaaattttttaccactctgtagatgtctgcagatgacctccagagcaccacgaatactggttttgggactaaaaatacatgttggtgaataggcaaattcacaaatgcagaatccacagataatgaggatcaactgtaaaaccatttagcttagcaaaagcaacccagtacgcctgttttgcctaatgaaaaaaagagacattttatactattggctacttttagttgtgaaacaaaaaaataaaaagaaataccctttgcttctatcattgaaacccaacaaaacgaagtaagaacacgttgtcttggtcatttctggtagtatatttttacccatgaatttttctgtcatttggagtgtggagagtggcacagtcttttatacgttgactgtattgtacatgaaaagtataatcactacagaaaaagtccaagtgtgttcccagccagagtccagcattgggcagctagccatgtccttgggaaaagtcttgtcctaacaacacatctggaggactggctggtccccagttagctaatgatatgccagaaccttgacaccaaaaatggtccttttggctggtgttctctcctagctagggaaatgtggccctattcaggctggctttcattctagccatgagctgggttaaagcagcgtttctctgtgtcagagatgaacgtgcaaggaggcctgtggaaggctcatggtggtacatgactttccaaatagccagtgtcactacattgccgctttgggaaaaagtggggtgacagtgcagggagaacatttgagtgattctggatgttgtacacgtgaaaactattagatgcaatcagaagcacttttctgttgttaagaatgttacactttctcttttccccactacacacatatgcgtgcacactcacacttaaacacacatccctgctctcacaaacactaggatgcatcttcac

SEQ ID NO: 73263 - DNA, 1048 bp, Homo sapiens
attatgttttctcttttcataatacattgacatttctatgctttaaatttcactttgtatctttttttttctttccttgttctcacagtggtcaaatacagctggagacatctccggtgtgtgaggtaaggctgctggtagattcaccagaactctgtgcaatattttgccatggaatactggccaccacattctgtaaagatttgtcagggagtgaaacatctttattaatgaggccaatattcagatttgttcaggacacatttttcaacttgtttatacgtttgcctctttagttctgcttttctgctatacctcaccctctgttgaagatgagagttggctatttctattagattctgtagatttttttacctcagatcatcttgctgagtcaagcgatggcaactaaaatacatagggaatctgcctgtgtgtcagaacctggaggaggaccattcaatgtagattttagagccaagaaaaggtctgggaattggccagatggaaattagctagaaaacacctgaaagacaagaacaaattatttgggaatgtcgaggaggattgagagaatatcatgaagagaaactggtggtgatatttgaagacagggtaaggatgggttcagtagagttacatggagtgaaatttggatggctgtaaagaaagcagttttgacataacactagagatgaccttagaatgtcctaaagccagaatgttaccccaggattagagagagaagttcgagctggtgatttgggaatgaaacataggctacaacccatttcctgaatggatttaggatggctaatttaggcaccaagattgtgtacaaacaccttatgccccactgaggtgtttgcacatgtactatagtaaagcggtttcacgctcttaactttgtctctatgttaaagaaataaggaaaagggaagtattaatgtaaaagggaaagccatgttgctagagagtgtggtttcattgttaagcgcagcgacttggaattatattaggtatcagtcccatctcaaagactggctaa

SEQ ID NO: 73264 - DNA, 1011 bp, Homo sapiens
ggaagtcacaaggaaaagaaaagagagtagtgaattcacagggccagtgataaggattatggagagctaaaatatgatccttacttatgatttggttatttttatattctttcttctgtctcattcaagcagaaagtaacatctttcagcatagccctatattaattcaccagtatttgttgagtgcctgtgctagattcagccttgtttttgtgtaaaggactggaagatgaaggctatgaagttgccctcactttagtgaatttttttttaattgtgggggtaagatttagatgttgaaaaatttgcagaagaaataagatggtctgcagtcctgagcttgttttaggtgctcagggacactggggaaggggtagagtttaaggagaggaaagtaaacttagactttgggcatttttgggtttggccctgtagccaggaggctatgttgagcaagacaccgtggctgtgggggatcagctctgtgtgagccacacggaaaggggaggccaggattatgaagcggtttgtaattggtggcacatcacgtgatctgactttaaacatactttaggtgactgtccacatcaagtgtggatggcactggcatccatgcaggaagaattgcaaattgcatggctcatacataaatatcgaacggggaagggtctgcgagacgataggacaaactagaggaaagaattgcttatagaaagaatcaaacctgaagttacttgttagcagctctaacaaagccatttgattgaatagggatatttgtgacattttattctaaaaatatggtttcctcttggatttgtgtcaaaggtgggaagatttttaaatagcactcctcaacaatgaataggaacaggcatcttaaatgtacaataatttggtggcatatatgaaggtgtttttatatgagctaacgcccaattttttattagggaggatcagggggttcttgactaccttataaagaaggcagatctgggtaagaaactagag

SEQ ID NO: 73265 - DNA, 1191 bp, Homo sapiens
gggaagaaatattctattgatttttttttacctaaggaagataaaatagctttggccccagtggttcctgctgctcggctgagttaaggggcagcctgcctctggaaaagtgactcctttctgagacatcctcatttgatttctgagtctggtaggttctgtgtgtttactcacataacagagtggtcatttcaaggcttgcatgagtggtcaggagttacttttttaaaaagtcttttgagaaagcattctgcttatattaccaattttaatttgttattagtttattcacaaaagtaaattatagcaatgtacaaaataatggttgcttttgaaaagaaagtactctgtatagaaaaatttgattcttctgatttctccatttatttgaagttctgttgctaatcttccttcttttaggtctttctttgttttaatatttttgactctttggtatttagtctacacttactactgatgcttttaagcaagtgctaataaagaattcagacgcttttaaataagaactggtagagaactcagatgttcttgagttctccagtaaagcattttgacaacagtagaggttatacatgtgtatattttgcaaaaaggcacccataggaaaaacaaagatgattctttaataaaggaaatgtttttcattcttggggcaggttgattgatgggtaacaagtggccaggtgtaatggtttcctggcagtttgaatgggccatagaagaaaagccatttgagaaagtgcttgagtgtgacaagggttagtgagtgttttatggagagccaaattttacatgaaataaaactcaaatggctggtcttctcatgtttggagctaagcaaatgtgatcagttccgggctgaggcccttggctgggttttcctttccacggtctcaggtgtgtcctgggaggaatggaggtgagtccaggcacacctcatctgtgccttcagtgacaacccaccaggagacttattttacacgctgaggacctcatgttgagctgcagactgtctcctaatcctcacagtcagttttacacagtttaaaagcatggcataattgagcaaatcaaaagttgaatggatcttcagagaataatattcttttgaatgtataacttgcaattgtagaattattttggtgacttttttattctttttatagagtc

SEQ ID NO: 73266 - DNA, 1007 bp, Homo sapiens
tttggaggttgtcattttttcctatttgcaatttgtctctactatgccctgggcaacagaaaaatttctgtaccgaaatagtctttacaaatatttgtttaggttcccagatctgacttttatgtttatcttcattctctttgttcttaactttgacctgtgattggaatacattttctaatgtaatgctatctttgtaaataacctttataaataaacattatcttattaccagctcaacctaacataatgtaacttgacttttatttatacatttagttattatttttggtaaggttgtcctttttttaccttgctcactgtcttgctttatataaaattatcctttttttaaaattctttcaaatatcttattcccattctatctcattttaaattccccatttctctaaaacttattcttcaaacagattttttaaaattggcaacctgggtagaaggtccttgggagtttgagttctcaaagtccccaaagttctgccccataaggtggatgaaggaggatgtggacgtttgtctgtaggtttctctgggcccacccctggagctggatgggacagctttaacctccgtttttaacctgatagtttaacttctgcttttccccctgctcttgtgtcctcttactgaatctttcctcttcccttcactttgaagttaaaaaccatttctatcttctttggggtcatttttgctctttcatttgcagtgaatttgtaggtgctaatttatacttattgaaaattaatctttaagttatcaccagagaatggatgaatggaccagtttacattagtctctgaaataaccatgtatcttgtaccagtttacagatattttccttaattttttacagtaatcttgcactataggtattatttttcccattagagaaatgaagaaactgaggatataagaggctttttagtggctcttaactctggttttatattagaatcacctgggcgttttgtaaaactatagtc

SEQ ID NO: 73267 - DNA, 1088 bp, Homo sapiens
ggaaccactgtgtggtttctctaatatccaggaaacatgtctgtgcaggttgtggcagtatactacctaaattcactgaataaatagtaaaggttagtgggtgagactatccctccacgacatttaaaaaaatttgttatgattttttaagacagggtctcactgtgttactcaagctggtctcgaactcctaggctcaagacaccctcctgcctttgcctccgaaaatgttgggattacggacatgagccactgtgcccaacccttggtggtattttaagcccactttttacagtagtgtagaagacagtagttctgttgtggctgattcataaatgcagcattttcacattggctacattcagaattataagcagcattaggtaccatcccacatccctttgtgctgttgatgcttagtggtcagactttgtagctgtcttcgacctctagtgcaagcatcaacttggtcttgaagacaggccttagtgggcttccaaattctttgggatatattttctgcgtcacctaagaatctgactccaattaggccttgaccccatgaggcttttaatggacacattggggcttcctttgacttttctgagtgctcttggagattcctgacctctaacctctatgtagcagattggctacatgttcctggtaggtacagttcatggttgactattggaggttttcaaatggatccaaatttagggatattttagggctcttattagtattctctcaggttgagagaaatctaatttatgaagcatcaaaaaattaggaaatagatatttatttggttcaccagggaaatttttctacttaattttaaataggtaactttgatctcaaacttctgtaaggcatgagatccttagtttaacagacttgccttctttagatgaggggagttagaatagaaatgtactctgttgtctaaatgttcagtccttcatcttccttactgtttccagagaaaagatagagaagaagattaaaggcagcaactcagctgacagtggtagcctcctttcagcttagggctccttcctgcctatctgggcagctcagagtgc

SEQ ID NO: 73268 - DNA, 1474 bp, Homo sapiens
tccagttacattgaaacaattttcagtctaagggaggattttctacctttcagagctgacctccgactttaagacttgacaggtatttatcttgaaaccagagagggagctggaggaaaaaaaaactgagcagcacatcaatgccttttccaccctccttcatcctttccacactcaccgactgccattaccaaaacgccaagcacaaccgttttgcagcaagacgcattcgttttattaaaaccaaactcgttatgtatttagtggggggaggggggcacaatcaggtttttcaccaccaaatttttcgagaggtttcttgagaccattgccttttaaaaaactattttcgacatacaaaatatttatataaatattatttattagtgagttgttattcatcctttggatgcaaattgtaaattaggaaactattttattactgcttttttgtggttaaacactttattttaatataaatgttgagttattttctatcctctttggtgtgcggtagtttaggtctcagtaatgtttctggtatatatgattccaaaaaaaagcgaaaaacaggtgcttttaggacacaacttttctggggaggcaatattgacactttggtttgtggaacgttggtcttatttatatttctgcattccatccagtttcctacattccagcagccctctgtcccccaatataatgaactgactaaaatcaagagagcaccccaaagttatttgtaaatagctgtgatggaaaaaaaaaagacatattaaacttgaagctaaaatgtgaacaattattttttggattcatacttcttttgctatgcacaaaacattcacgttttaacacaaagaaataataagtgttagcatcgtgtgtcttgaagtatacttttgcactgtaacttgggttacgttaaagagagcttagcaccaaaggtagataatgaagaaatggcataggaaagtggagatgataaaaagttgattgttgaaccaaaaagggtttgaagggaagcttcgactgagtatcagaaattacttaaggcacataggacctgaatcaggaaaccagcacttcttacaactgccagttttaaaagaggaaatgattctgagatgtgctcattttattttaatttggtggttggtggttttccaagtagtctgtaaaatcctgcaagattcacagtctctggtgtgaaacctcagaagtgagtcgttgtgagcctgtgggcagcaccaccaaggcaggctaaggggagggtgcagtaagtggagtttgtgaggctgagtggctgaggagggagcaagtgcaacaaaatagggctagagaagaaccagccaaggagtggaacccatgctgctctcagagattcacggaacacggcagccttctgcaggcagttccatgcatgtgcactcacgctgcaatcacagatgtcccagtaattaacctttctaag

SEQ ID NO: 73269 - DNA, 1115 bp, Homo sapiens
ttactgatgtgctgcatttgtgaattgaaatgtcttgcccatgtttctaagatctctaaatcctgattcttttcatcttggttgatatgacagtgtcatatcaactgacactgtcaattgatagtgtcattttcaatgacagtgtctactctgcatatttaatgcactctacagtgttgatatgacatgtctactctgcatatttaattaatgtgttacttccactctttacatattaatggcagcatttagaagttaggctatgtttagaagctaggcagaatgtttagttttccttcacatttttgctgctcttttaatgtacagtgaaaatgttaaagtacaaggatgacaaccttgattttattataaaccttcctcatacttccttaatgttatgactatttgtaagcaaattaaacgaccttagagatatatttaatgttcctaatactgatgttcctgaatggtagataaatgtcttatcatctctttatcttctagggttatgatcatagctactacttcattgcaacctttattactgaccacatcagacatcatgctaaatacctgaatgcatgaaaaaactccaaataagagaatctcttcaggattataaaagttgtaaaatgcaactgtattgctgagcaaaaaaaaaaaaaattcaaaacattggattttatagtgctaaaagggctttattctatagttgaatcacctctgaataaagatataaaacctacttctgattttaaaagttattttacaagtgttcacataggaaatctttaatgctctatagctttttcagtgtcgtttggaaattcttgtattaatcccaggtcatagaatatgaatgtaatcctatttgaagtatagagtagcaactctggaacagaagacttaaaagtaatttagcccagactcctcacctttccagactttaagcctctgaagacattggactgtctttgtcatgttcattgttgtatctctagtgtctagcaagtgtctagaaagcaaatatccacttgatttctagtggatatttaataactgttagctacagaataaagaggtaggctcagaaaggttaaatgaattccccatcg

SEQ ID NO: 73270 - DNA, 1067 bp, Homo sapiens
cattgattatatttgtgcataatgttttctccctaaggacttttccttagaatatattccaaaaagtgaaattactaggtcaaaacttaaaagcattttaaaggttctttctgcatcaccttcctaaagtgttttctaagaagtctgtaccatatattttccagggatatattaataatcatggtctgcctgaggatttagttttgttttgttttcattgttactagttcaaaccattgtaagactatgatttggcagtattgattgtgtaattattttctgtaactttgaaatgtctgaacttattttctttgatatcttttgtcacactattaaattttttctagcttccccaactcataaatgccaattttccagtggatccccaaaggatgtctatttttggccactccatgggaggtcatggagctctgatctgtgctttgaaaaatcctggaaaatacaaagtaagattatctaaacttctagtgataaatatttctcttgaataacataatattaggaaccttcaaagagtaaaattacaatattgttagtattggaactaaacttttctagtgttgagaactttggggtgtttgaagggtgggtatttaatttgaccatagagtgtatgctgcagaatcagacgcataggaattcagcaagagtgctttcttattggcctactggaagtattataaaatgtagcttctcctttaattgtttttattccaactatagttttgaacacactttttttctgtaaaggttattattactgattaatgttatagtggcaggatctatcatttatattcttaccagggatgtctttgtaaagttgactttgattttctgaggtaaaagatatgatttgtagaagcttaagaattgtgttcttaatgcctctaatgaaaattgaaatgcagcttgattaaaaaacatcactctcagcctttcccagagtcaaatttgaataactaccatatgtagtatgtcatactgtgcagaacagcatgttacaagagttgaataaggaagtgttaaagcaactagcatcttaa

SEQ ID NO: 73271 - DNA, 1042 bp, Homo sapiens
cttgagttctcttcctattaaaaaaaagttctcaggaaagaatcagaaaaagccattcatatgaccttaaaaaacaggttgatttttttaatctttatttttattgtagtttaacaaattatagttgtatatatttatggagtacaatgtgatgctatgatttatgaatacagtgagaaataattaaatcaacctaattaacatagtcatgacctcaagtacttgtcatgttttgtggtgagaacacttgaaacttactctcagtgatttagaaatgtgcaatggattattatttactatatttgaaaattttagtggtgaaagttacctaatcagttgtcactactgtatctagaaaccaatcttgaaaatgtgtgatggcttttttggcgccatctactcatggagccaccgctgcaaccctgagtcactgcctgcacagctctggccgcctggctccccatactagctgccaatatttggagttcttacaacatggcagacattgacaacaaagaacagtctgaacttgatcaagatttggatgacgctgaaaaagtagaagaaggaactggtgaagaaacaaaaatcaaagcacatcagctaactgttcagatgatgcaaaatcctcagattcttgcagcccttcaagaaagacttgatggtctaatagaaacaccaacaggatacattgaaagcctgcctagggtagttaaaaaacaagtgaatgctctcaaacacctgtaagttaaatgtgcacagatagaagccaaattcaatgaggaagttcacaattttgaaaggaagtatgctgttctctgtcagcctctatttgataagcaatttgagattattaatgcaattatgaacctacagaagaagaatggaaaccagatgaagaagatgagatctcagaggagttgaaagaaaaggccatgattgaagatgagaaaaaagatgaagaaaaagaagattccaaaggaattcctgaatttcggttaactgtttttaagaatgttgacttgctcagtgatatgcttca

SEQ ID NO: 73272 - DNA, 1496 bp, Homo sapiens
caacaaagacactcactgtttctgtctttaagataaaatttagaataatatatatatatatacacacacacacacacacacacatacatacacacacattttatacacacatatataatcttatgtaatacatatgtgtaatcctagcaggtggtataacatcttaatcagaaagtatttaattgaagtttggactatgaggagtgtcagacttgattatcctttgagaatgtcatttgcttataagaacgtaatgtgatttatagcaatgtcagaatagtccagatgttttaaatggaaaaaattgagtgtacattaattttgcactgacctgtagttctgaatttacctttttgtgaaaattcttcgttcttttcttttaggttgtaaagctctctgaaatagtgaccttagcgaagcaagcacatgtggatgtgaaatttcagttgccaatatgatctgaaaacccagtggatggctgaaggtgttaaatgtgctataatcattaagaatactgtgttctgtgttattgttctttttctttttagtgtgtggagattgtaattgccatctaggcacacaaacatttaaaaggatttggactgcatttaattgtaccattcagaatggactgtttgtacgaagcatgtataatgcagttatcttctttcttttgtcgcagccagtcttttttgcttctcctacaaaacgtaacttgcaatttgccagtttattattgttggatacaaagttcttcattgataagagtcctataaataagataaatacgaagataaagctttattctttagtgttaaaatacagtatatctaataactagcctcattagtagagcagtatattaaaacaatgttttatgtaaaaagtgtttatcttcagcaccaaatacatgataaatgtatcaatcactatttataaacagagctttcaaacactcctcagaatattcttctaagtattttgatgaagtaactttgtaattatttgaacattgttttaatcattaggaaacactgattaactgcaagtcttcatgattctgtcatattaagaaacacctgtaggtttgcttcaaataaaggcatatataccaaggacttacagacaaaattaagaatgtcaatttaagttaataaaaatctcccaatatgatttgggttcatggcttttgtttgcttgttttgaggtaaacacagtagaagttgatttgttcgttattgcagtatagaggtctaagcaccaattcttagatcatatacttgccatgacagtgatttgtttttttttttgagtcagggtctcactctgtcacccaagctggagtgcagtggtatgatcatgctcactgcaacctctgcctcctgggctcaagcagtcctcccacctgagcctcctaagtagcagggactacaggcacacaccacaaaaaaacatatgtgtttttttttgtttttgatttttgttttttttttggt

SEQ ID NO: 73273 - DNA, 1050 bp, Homo sapiens
cttaataacatatcctggggaactctttatgtatatggggtctttatatattagggatgtcaatcttttttctgacatttggtgtgaatctttttctgagattgtcctttattgtttaatgttatttgatttttggggaaatatttttgtttttgcatgtactcaaatctcattacttttttttttttttttttgagactgagtcttgctttgctttgtcgcccacactggagtgcaatggcgtgatctgggttcactgccatctccacctcttgggttcaagtaattcttctgcctcagcctcccaagtagcttggactacaggcatgcaccaccgcgcctggataattttttttgtgtttttagtagagatgaggtttcaccatgttggccacgctggtcttgacctcctgaccttaggtaatctgcctgcccctgcctcccaaagtgctgggattacaggcgtgagtcactgcgcccagccgagttccattacttttatgctgagagatttttttattctccatcttaagatcagtaaatattcatcctcaatgtgttctgtttttttcttttgggtcagtttagttagagatgttctattttttaaattgtttcatttttacttttaagtctttaatcaattaatattttactttagctttacttttagttttttagagtatcttattctacttttagtaatgctaaagtaaaggttctgcagtgagaactttattttctttttttaagctttctagtaaaactaaaattagattaaattgccttcactagatgttccttatgcccctcttcccccaactttttaaaaatttaatgggctacccaacatttagaaaaacacttttttaatccaaatactgatttaaaaaaccttaatactgagtcacaaattaaaaagtttcagcagatatccaagaatttataacacagataatgatctgtaaacacaaagcaataacattggaaattaatataaaatattatatttttaaattttttgagacacggtcttgctttgttgcccag

SEQ ID NO: 73274 - DNA, 1050 bp, Homo sapiens
gcctcaagtgatctggcccctcagtctttcaaattgcaggcattacaggtgtgagccactgtgcccggctcacattttatatatagttttaataaaatataaacctcttctttcagcttaggttggcagtaaagcttaggcagtatggacactatggaactggaatctaggccaatgaatggcaagttacttgatctctctgaatctctttcttatctataaaatgggcataatatctatcttttgaagattttgaataaaaagttttgtttaaccatttagtaatggtagctgctatttcagtaatgtttgactataaatgactcatgtttatcatttaagtgataaactacaaggctttttatttatagtaatgttgattagacatatgcaaactacctataataaaaagacatattgatttcagcttgcacagaagatgggatttccacctaatattgtggaatcagcagcagaaaacatggtcaagctttacagcctttttctgaaatacgatgcaaccatgatagaaataaatccaatggtggaagattcagatggagctggtaaagtatcttcttttgtctaacatgattatgcatttatttctctaatatgcttccctaaggaagttaaatcatagaagttaaagtagttaaacttctacctatgtagaagctttttaaaaaaaaatcagatagaatgaatatgaacaaatattaaacccattaaaacaaaacactattagacccattaaacaaacaaacaaaaaataaaacaaacaccttatagagacgtgcacagaggggtcggaactgtactgtccaatacagtgactatcagccacacgtagttattaaaattaattaaagttacataagatttaaaaattcatttactcagttgcactagtcatggttcaaatactcaatagccaaatgtggttaccatattaaaagagcacacacacagaacattcccatcattgcagaaggttttattgggcagtgctgggttagtgtatgcagtgtggtggtgattgagctgtaa

SEQ ID NO: 73275 - DNA, 1072 bp, Homo sapiens
ttcccacttacgagtgagaacatgtgatgtttggttttctgttcctgtgttagtttgttgagaatgatagtttccagcttcatccatgtccctgcaaaggacatgaacacattctttttttatggctgcatagtattccatggtatatgtgccgcattttctttatccagtgtatcattgatgggcatttgggttggttccaagttgttgctattgtggtataagtttttgtgtatattttaaatctattttccttgcaggcaagccattattttcttctttttttacttttttatccattgctttaattgaatatttataagagggcactgtgctggagatgtgaggataaattctcaagaaaattttaaaatgtgggtagagagtaatagatgcttacatctgatattatgcacgggtaggttttaaagtttcattgatgagtctaaaataaatctagagttttggttgtttacttcccttgccagggtcctgtattaataggaagttcacatggtggtgtcaacattgaagatgttgctgctgagtctcctgaagcaataattaaagaacctattgatattgaagaaggcatcaaaaaggaacaagctctccaggtatgttgtattcctgaaaaatttctagcttatgattagagaattatgatacttaaagataaccgtacaactgaagtaattgtcaaaacttatttaaacattttgagtgtcaggaaagttaataacttgtttgaaatagctcattttggaattatttacaattttttcatatctctataaatatttcaatgtggattcttttaaaagagtcactggccgggcacggtgtctcacgcctgtaatcccagcactttgggaggccaaagtgggcggatcatgaggtcaggagttcgagaccagcctggccaatatggtgaaacccccgtctctactaaaaatacaaaaaaaattagccgggcatggtggtgcgtgcctgtagtcccagctactcgggaggctgaggcagaagaatcgcttgaacccaggaggcggaggttgcagtgagccgagattgt

SEQ ID NO: 73276 - DNA, 1036 bp, Homo sapiens
ggaggccgaggtgggcagatcatgaggtcaggagatcgagaccatcctggctaacatggtgaaaccctgtctctactaaaaatacaaaaaaattagccaggcatggtggcgggcgcctgtagtcccagctactcgggaggctgaggcaggagaatggcgtgaacctgggaggcggagcttacagtgagccgagatcgcgccactgcactccagcctgggcgacagagcgagactctgtttcaaaaaaaaaaaaaaagaaatggtttaatgtaagtgacgaattttgaaaattgtgggccttttagacagtgattattttagtgttctaatctagaaaatctacataaagagaatgccttatttttggacattgtgaataaattagacttgatttaataacacctgtcaatatgtatgttaaataacaaaatactatgtctggcatgctgctccatgcttcatatttaatagaagtgtttttcttctaggttcaaaagatgtcgtgataaaggcacaggttttagctggtggtagaggaaaaggaacatttgaaagtggcctcaaaggaggagtgaagatagttttctcgtaagtcacattttttaaggaaaaatcatccttgttaaagactgattaaagattacttattgaattgatgaaaatactgaaatttaaatattagatgagataaaattttggctattatgtggatttgctttttctcaactggaggaaagaaaaatttgagttctttttcttattttagtccagaagaagcaaaagctgtttcttcacaaatgattgggaaaaaattgtttaccaagcaaacgggagaaaagggcagaatatgcaatcaagtattggtctgtgagcgaaaatatcccaggagagaatactactttgcaataacaatggaaaggtcatttcaagtgagtaattgtagacatgatacatacgggataaatttatgacattcaatttcaaaagtccattattgtttctatttatgtgggaaagattttaaaagtacaaatta

SEQ ID NO: 73277 - DNA, 1073 bp, Homo sapiens
cagatgtccttgctccacagtatccatggcagtcaaatgacatgtcgatgaatatgttaccaccaaatcatagtagtgactttttgttggaacctcctgggcataataaagaaaatgaagatgatgtagagattatgtcaacggactcctcaagcagtagtagtgagtctgattgaaaaaccttaaaagacaatatacagaattgaatactgtagaattctgtttctttaacagtagcagggaaatgtaaactacaggtgacaaaaaatacccaggtaaacactggctttggtagaattgtgcagtcattaaaagtcaaaattttttgactttctttttaaagccaaagaccatagttttagttttaagccactaggtagatatttaggggaatagtcaaaatttactgttgaaaaagcagttgctatgtgctttcttaccctgttctgttccagttttgctggatttgtacatagccattctagaaatagagttgagggaaattatccatatacatatcactaataggcttcttggaattatttagaaaagcatttttaaactggcagtggatgactgaataggcatcatatttctttttgtgtgtcatttaaaagtaacaaaaactgccatttgacagtaaaggctcttggcttctgttggaggcatgggaaattgtctcaatttgtacagtttgtaattgtaatttttgtaaataaatttgtttgtacattgtatgctttttttttagtttaaatatactgtcagtgtaggtaggaaattatttctgtaaatccagttgcattttataatacttgagtgactaactgaattgaaacctattacaattaatagggttctcaaaggcctattcctattagaagaaataattttttttaataattgaaaaaatttaccacagccttgtctgattttaagaatagattgtgtgaagatttagaatggaaagcaaccatttcttcccttcaccttcctcttcttacagttccccaggagtcatttttaaccacttttaatttctgttggtaacctctgtgtttaggtaatatgct

SEQ ID NO: 73278 - DNA, 1371 bp, Homo sapiens
gacctcgtgatctgcccacctcggcctcccaaagtgctgggattacaggcatgagccactgcgcccagccaaatagctaatattcttttgagagttaggttaggcttctgtagcaagaaacaaatctctaggagagatggctgaggctggctgttgacttctagaccgttgtttgattctgtttttaatcttcaaaaactgtacacacatacactttgttacattgaaacagtatctaaagtttgtaaaatgaagtgtgtggttctcacttctcagaggtaactattaatgtttggtatatgtcctagattttttttttctagatctgtgagtatgtatgtaataaaaatacaaatacacatatgtacatacattttgaacagtcgggtcataccgtacatattatttagcagtttagtttttttttttacctaatgaatacattgtagacatctttctatttaggtctacttaagagccttagggcatattgatcgaacagagtggtgtgaactgtctgctctgatttcatagcttggatgtctttgagaaatgaaacactgttttctctattttatttgtgctcactatgctttcagaagaggaatggtatttaacggtagttaataattgagattattgagtgctatggtgctaatctccgaaatttgtttatgtcagctaatttttctggattagtgtcctgtttttggagatttaagtttatactaaacatgtaggtattgttaaggaaggcaggtgactgagattattttattttcagataatttaaaattaaatacgatgtgtaactgatagatacatttctaaacttgtatgtttgttagactacaggttatactgtcctcttaaaactctttcaggtgctatctcctctgaagaaataattaagtatgcacataggatcagtgcaagtaatgctgtatgtgctccactgacctgggttccaggtaaacatactcgtcttattatactagatatatgtggttttgaagattcttaggtgactatgtacagacatagatttaatttaaaatgtatttatccttagaaacctctgccacatattttcacatctttaatggtttataagtaatgatataggccatgggttttataaatttggttttctgtgaagccattgttgctagggactgtgtttctttcgtcttttgaaataataaattgataattttttaaagtacgagataataatgtgatgcttctaaagctttggatttatataccattttatcagggctggccagaagcaaactctttagagccattaggatttccacaaaggttccagcctgagaaagacaattccagttctcttagatgctaaag

SEQ ID NO: 73279 - DNA, 1049 bp, Homo sapiens
tctgcccgcatcagcctcccaaagttctgggattacaggcatgagtcactgtgcccagccataaggataaactttaaaatcgtgtcttccctaggaaatcactaaacttgctcatgttgccatattgctagttctgaaaggctagttttattttgttttgtatgaaagaatatctgaaaaagtagaaaagtttgatattaatgtttcccaaaataatcataggtaggctctttttattcttaacaagaattaggaataaaattttgaaggtgttgaaatttatagcctagccaattcagttacggattctttgtttcattggaatgcagcctttcagtagtctattgtctgatttaattgactgttatctgacaggtcctggagttgttaattcaccgagatggggaatttcaagaactaatgaaattggcacttaatcagggaaaaattcatcatgaaatgcaagttttagaaaaagaagtagagaagagagacagtgatattcagcagctacaaaaacagctaaaggaagcagaacaaatactggtaagttgacagaggttggttcttaaggttaaaaaggatgttgtttaatctgtttctgaaaaatctgttatcaatattttgaagagcagaaaactagactttccaagtctaaaggtgatatcttgtcactcaccattgccagtggttaaatgaaaggctattgtcattctcttttttacttactgttttcaaatagtctgcattacttgtgagccacattttcgatgcttaaagattttacagtattgaattatagaaatggaaagttttacttttatcctggtctgatataaattttaattatcagtagtctaaatctctctttttttttttttggtctctgatccttagcataaaaatcagggaaatttttcattttttatatattttgaaatcaataaaaatatatacacattttataaattgattaaaattgacattaatttagtcattcatcctcatctaggtaggatttggacatagatcaaggatcctagttttcc

SEQ ID NO: 73280 - DNA, 1077 bp, Homo sapiens
gaatgactaaattaatgtcaattttaatcaatttataaaatgtgtatatatttttattgatttcaaaatatataaaaaatgaaaaatttccctgatttttatgctaaggatcagagaccaaaaaaaaaaaaagagagatttagactactgataattaaaatttatatcagaccaggataaaagtaaaactttccatttctataattcaatactgtaaaatctttaagcatcgaaaatgtggctcacaagtaatgcagactatttgaaaacagtaagtaaaaaagagaatgacaatagcctttcatttaaccactggcaatggtgagtgacaagatatcacctttagacttggaaagtctagttttctgctcttcaaaatattgataacagatttttcagaaacagattaaacaacatcctttttaaccttaagaaccaacctctgtcaacttaccagtatttgttctgcttcctttagctgtttttgtagctgctgaatatcactgtctctcttctctacttctttttctaaaacttgcatttcatgatgaatttttccctgattaagtgccaatttcattagttcttgaaattccccatctcggtgaattaacaactccaggacctgtcagataacagtcaattaaatcagacaatagactactgaaaggctgcattccaatgaaacaaagaatccgtaactgaattggctaggctataaatttcaacaccttcaaaattttattcctaattcttgttaagaataaaaagagcctacctatgattattttgggaaacattaatatcaaacttttctactttttcagatattctttcatacaaaacaaaataaaactagcctttcagaactagcaatatggcaacatgagcaagtttagtgatttcctagggaagacacgattttaaagtttatccttatggctgggcacagtgactcatgcctgtaatcccagaactttgggaggctgatgcgggcagatcacttgaggtcacgagttctagactggcctggccaacatggtgaaaccccatctctactaaaaatacaaaaattag

SEQ ID NO: 73281 - DNA, 1021 bp, Homo sapiens
gggaggaatgaggattagaagtctgttaaataaatagaatatactttactttttacagaaaaagctttctgttgttatttaaaatactcttaatatttggcagtttgtagctcagtcttttgtctattgtattagaagaattcctataaaatgagaagaacttcatgtcaaaaggatcttgaagaggcatacctgtactttttagtcttcaacaaatctttttaaatagttttaaaattgattctgaattttgatagatattttctttctgaagtagtattctctacttagcacagtaaaggatatttagactagacttgcatcttaattctgtactggggtagtgatcgtaataactagcctttgctgaactcttcctgtatgtacttaaagtgcaatatatcatgaatcctcacaatagcttcatgtaatggctactattaatattatattccttttcctattaagaacacaggctcagagaggctggtaactttccctgtgtcacacagctagcagatggaggactagagatatgaaccaccagactttctattttatgtgttttagccttcatggtttttgccgtatctgcataccacttgtttgtttactgttttatgaaatcactgtatttttttttttttcctgagacgaagtcttgctctgtcacccaggctggagtgcagtggcgtgatctgggttcacagcaacctccgcctcctgggttcaagcaattcttctgcctcagcctcctgagtagctgggattacaggcatgtgccaccacccccggctaatttttatatttttagtagagacgaagtttcaccatgttggttaggctggtctcaaactcctgaccttgtgatccgcctacctcggcctcccaaagtgctgggattacaggcatgagccactgcgcctggccgaaatcaccgtatttttaagatcatcttcattgtaaacaatactgtgcataaactcagagtttcagtgtctcagttttttctaatatatat

SEQ ID NO: 73282 - DNA, 1208 bp, Homo sapiens
atattatgttatttttcaaggttctgtgatagttatggtatttgttagctttttaaaattagtaatttattgtgatttcattttattgtttacattagttatttggttttgtacctactttagatttgataatttgtattctttttgtttgtttgtttccaaggaacttacttaatcagaacttcagagggccctagaaagctgcatttttaaagaggacctcccctctggatgcccttccccacttcccctcattttaatgaggattctaggtgaattaaaagtatgttttgggaagtaattttaaccctcattgtgtgtcaggttatatatacagtaatattaagttgtaaatcatgtaatagaagaaaaatttttttatacaaagtgttaatagaggcctaaatataatatggtttttaaaataaaataaaatgaattcatgtgtatattgttataatcataaagataagaatgttaaattgaaagctacacaatgagaaacattaatggcaaatccaagtacaaacgaaaatgttctctgaattcccaggtttcactgggcatcaaaacccaccaatatttcagtccttttcttatatattattctgtaaccacattctccacatttgactggatccctggacttcatgtcattttctgtgtgacattctctacagttatatgccattggctgctgctttggggtttgaatgtccttctgggtgtccattgttagtccctacacagcatgatgaaatttctcactcttgtattatttttcttaatgaaggctcacaaaattataattgttcaggtatacaacctggatcagtatttgtaattacccaaatgcctcagaaaaatttcaaccgggggaatttatcttagagttgttcttgtacagttatgaaatggcatgtgtacaaggttagtcactgcaaaactgtaacagaaaaaggctgaactcagtggggatctggttaaacagatcatggtacatcctgcataatggaatactgtacagctctgaaaaatgaggacacagtctatattctgatatggaaagggctacaagatatattgcccaatgaagaaaaacaaagcttagaacaatgtgtacagtatgctacctttcattttaaaactaaagaaggaagaatagaaacattaacttttgtttatttttacataaataagttctggaa

SEQ ID NO: 73283 - DNA, 1068 bp, Homo sapiens
atgtttgtgctccactgagtcggttacctaataagtgagaaaatgaagatgtggatgcacaaaaattccatggcctttaggctcgcggtggggacagggtacagggaagcggcggtctggtgctgccaaaggttagtcccttgtacccggcgaactcaggaaagttcactcgatttcgctacaaacctgcagcactcggcctggaggtaacctggttgggagcgaattcagaactggaaattccaggcggcccagagggacacccatccctctccgaggcgcgccgggatccggcgcccagctgcggggcgagggcagggtcccgcgcagcaccccacccccggccgctggccccgcccccgcccccgccccgcctcccaggggatgtgcgagcagtctccgccctcgcgcgggagctgggaggctgcgagatccctaccgcagtagccgcctctgccgccgcggagcttcccgaacctcttcagccgcccggagccgctcccggagcccggccgtagaggctgcaatcgcagccgggagcccgcagcccgcgccccgagcccgccgccgcccttcgagggcgccccaggccgcgccatggtgaaggtgacgttcaactccgctctggcccagaaggaggccaagaaggacgagcccaagagcggcgaggaggcgctcatcatcccccccgacgccgtcgcggtggactgcaaggtccgagcccggggaggtcgaggaagcgggtgctgggcccggccggggagggctgcgcggactgcagcggcagtgcgccccgaggtggcgggcgcggggctcgcgccgcggggacaagtccccgagagagcccggcgctcccgtttcctgtgggtccgcagctcctttgtaaggaagtgcgtgtgctggaagcggtgcctgacgcggggtcgggggcttgggaggcctggagagggaacgattggctaattgtgccgaattcccggtcgtttgtgcagtccggggagcgtgcgtgcagccaggacttggcttgttcgatctggggaccggcagcgacaggcacaacaacaacaa

SEQ ID NO: 73284 - DNA, 1041 bp, Homo sapiens
ctccctttaatcctaggaaaattcatgaagtggggctgttactgtgttgacttttagtaggttacgatcatatttacttaaatatgagtgtaattgtctcataagttaaaaaagcccacagcctcttacccagaccctttttaggctgcaaaaattagaaattaactgtaaagttatgttgcttatcttattttttgttgttgttagcatttttcaagacctattatcagtagggtaaatttagttttaacttaaaaaaattggtgtgccacgtatgaataatgggagtttttatatggacgaatgaaaattattgctgaaaaacaggccactaatatactgtaaaaaattcacaatataatggtaatctagacatcatattataatttattatattctgaatataatctatcttcagaatataatggtaatcttactttctggaaatgttctgataaaaacagacacgtcagaggttgatttctaaatgacttgccttgccttgaaataggaacagtgaactgattccctaaaaggattaaaggttttggttttcgtattggtattgttttcctgaagccattgcaaacaatcttggtctttaaagaaaatgtttggaatgcacagatgaaaattgcagtagcaaattattatgttagctctttgtttatctaacattcgttgtacctaaaatagattgagagtcaagtatccagtcacaacagtctcaaatatatgtagtcttaatgctatcacatatatatatatacacacatacatttaaaaatcctattaacaaatataactgctcccatttagaaaggagagagtgagcgagcattggatgatgtcacttcagacagcttttctctgttccgctgtagtggagatttgaaactctggacaaacatcagaattacatttgctgagcaccattaaatctgacttctgacaatttttgtcatttctgaaatagtgactctgccagattctcaaaattgctcacgagttcaccatatttaaattttgtggtcattgcag

SEQ ID NO: 73285 - DNA, 1028 bp, Homo sapiens
ctaaccagactattccctttcttccttttggtgtttaacatgttacattcttccctcatatcaagtagcagtgggtcaaagagaaaggagatgggtagaggtattatgtaataaagcacattgtcacttctgtttacctcacagtgaacagtgaagttgtcagcacctctttgttgcaatgcctgcttatgaaaccccttttccagtatcaggccacagaatagcttaagcttgcttcatatgtatccctgcaagttgttttgctgacaaatagtgttgctttctctctaccccactttgtagatattctttaaaaggagagagaaaagtaaagtgctgatataggagagaaaatagtggcagggtgagtgcaagagagaaagtgaaggccgactcacccagtaaaagttttgagttacccatgacaaatggctgtttagaccctggttctttaccctttctggttttccctattcacacaatcaagactgaaggttttgataattaagcttttcgtttgtggtggtggttttgtttgtgtgttttttggggagtgaggagaagggacataaaatgcatggctggccatttactataatgttgatataatgctctcaagggattgagagcttggttctctttaaccaaagtgcatcttattacctagttatgtaattccgtgtttgcagatattggccagtgaaacttttacattacattttggttctccatgaggatattaatatctgaattgagggtttagtgctgggaaataaatgaattgcgtctgtgcatcccaaatgccttggcaggacctcctgtgtacacatccctgacaggacactgctgtagcatattgggtgtgcaaggttgcatattgcacaggattgtagtcttcccaactagacagaaatgagtataatatacttggcataataagcctgagtgacctcatggaattcaactctgacatataaaaggtttatgtgactggaagtattttttaagcagaaatatctcaaatacgt

SEQ ID NO: 73286 - DNA, 1077 bp, Homo sapiens
taaagactaaaggaaaagaaattaaggactttagaccgttactgaaacctgttaaaggatttgacaattctgaatttctgaatgaggtgatttttgcctaaatgatatacaaaatattaacactggagctgtgcttcacaatgaaagtcttttccaaagtagacagctgaaagttgaaaattggaaattataacactaaggacatcatttttgaaaaatttccacttaattgtgattatcccttttaattagtacttacaacacatatttttaatagctttaaggagatctacaatacaacctcattttataagtgttatcaacaattgaatgaacaagattattttaaattattgtgcattctttaagctcttttattagaggaaaaaactttttgcagtatttctataattgtacttggggaaaaatcaggtaagaatgaacgtagactttttattcttaaacagaaaagtttgaatcttgagttgtagcgatgaggaaattacccttgtttttatggtagagatatattctgatttttcacttaatgttttatctttcagtactgataagttaccagcaataattttatgatgttgaactaacataagtacgacaaaagagaaataaaattttcacagcttatatataataccacttctgagttaaatatcctggacgtttatttgggaaagtgatactaagtatggtggtggatattttgtactttgaaattttgaaatatttgcataaaccgtttttggcatagttgaatttcatactttaaaaaacaagtttggtggatttttgtgtttatttgaatgattaactttaaggctcaaattattatttttttttagtgaaagcaagtttattaagaaagtaaaggagtaaaagaatggtactgcataggcagagcagtcaagatgcaaattatttttaaaagttgtttgttttcagaatgagttaaggataaagcttaagtcttaactattttctctgcttatatatgattataatgttttaaattattttatataaaaattttaaaagatgcattgttaattaaatcacttg

SEQ ID NO: 73287 - DNA, 1087 bp, Homo sapiens
cctcagcttcccaagtagctgggattacaggcacctgccactatgcctggctaattttttgtatttttaatagagacggggtttcaccatgttggcccggttggtctcgaactcctgacctcttgatcaactactattattaaagtcccagttttctctcctcatcattcttgttttggaatattacttcttatattactgttactgcttatccctgcctcacatgtcagtaacaatattgttggtacttttttcacagcaaggcattctggtaaagattgattcctgcaacataaaaacccttaggattcagtagctgtaccgatttcatttaaaaatgttatttattcattacataataggtgttaatagaatttgagttttaccaaagtaatactaaattttaatatgcaaatatatagtcctgccctatgtcagaggaacatactttaaaaaaattgtagcatcattgtatacagtaaaatgcatagatcatgagtgtacagttagataattttaagtctgtatacctgggctctaactcccaatcaagctgaacattgttatcaactcagaaagttatcttgtgtccttttacaatttgttctccttagaggtaaccactattctaatttttctccccatagattaattcaaagcaatcatattcacttattagcttcttatggtcttttattaccatggtgaccactagaccctcttctgcctttgtgcaatttagaaaaagatcccctctctggtggtttggagaatagagcatcagttggtttctagacctactgattcccttggcctggcatccttgtactggaaacaacctgcccaaccatacatggcgatcttaactccatgtttctcactttttgccccagtagggcgtggtgcggcgggcagcagagtcttgctctgtcacccaggctcgagtgcagtggcatgatctcggctcactgcaacttccgcctcccaggttcaagtgattctcctgcctcagtctcccgagtagctgggattacaggtgcccaccaccactcccagctaatttttgtatttttagtaaagacggggt

SEQ ID NO: 73288 - DNA, 1051 bp, Homo sapiens
gtgatatggtgcttagcttctggaaaattgcactgtacaatttttattgtatataaacatagcgagagaatgaaagtgaaaatgacagttttattatttaaactaacacagtcttagttttattatgaaaaaagtttgaccttgtggaccccctgaacgggtgtgttcctggaccacatttgcagaacatctattctaaatatttgcttatactgctgtttcatggtttgttttcatttgttttattttttgcagttttagataatacctattgataatagctacatggaaggtgaatatttagctttttctgaatatttacacactgcacacatgatctcttctcctgttctagcaatttctggttaaattgatatttagtgttttttattataattaacataaacattagttacatttgagtattgtagtatacttttattttacttccattcttgtataacaactttttattttccctgaatttgatcatgcttcttggggcaggagagagggttccttaattttctacatacttactgctcattcattcctcagactctgacagcagtataattgtctttctgtgtcttcaaactcaccaggtaacttaccaagtttctttctttctttctttcttttttttttgatgatttcttgcccatcattcattagttttctattccagactggttgcactcatacaaatgtcctgagagtcataatcatcttggaagaattgcctttgtctttatcacatgctagatctacagtttcataaatctgaagaaaaagataaatttttaaaaaatcttacgtgtctcagaatcgttattccatcctcatatttgataatttatctgggtgtaaaattctaggttagcattcatttttctctcagcattttgatggcattgctccattatcttctaatgtgatgccattctgattccttgtttgtacatgactttttttccccctttggttgtctacaggctggtgattttctccttatatcttttttttcttttttcttttatgctttcagctt

SEQ ID NO: 73289 - DNA, 1050 bp, Homo sapiens
ctgccaaatggggtgggtgtgtgcgcacatttggctgtcccagcagctgataccaaatgttggaaataactatttccatctgtcattttcatcccccccactctccttccactctaaaattaattatgttaggaatgatttcttacctccttagatatttatgtcagacaagggctcaagcaaaagatgtatacttcgtcattaaagtttcataataccttatgactccatggaattcttgtagctttcttttcacagctgggatatcttacatggcttgctaaattcttcagacttattctcattacatacttttcttccttgcaatacgctcattgtctttcacacatagtatattgacaagtgctacagaaaccatgacattctcatagcaatgcactgattcttagaatacacattgtttgttgttcagtgttaaattctatgtttgaaatctcaacctaggaacacactgtatcgtatcacattgttcttggttgcttcaacatctgggattagacctttttcagttgtatcatgttaaagttcctcattttagaattaaaaacatataatcttaggtttcattcgtaactgaattcttgcttcaaccaaatctatgttctaataccggggtccccaaccgccaggccacagaccagtaccggaactggtcttggctaggaacttggctgcacagtgagcattgctgcctgagctccgcctcctctcagatcagcgggggcattagattctcttaggagcgcaaaccctattgtgaactgtgcatgttagggatctaggttgtgcgctccttatgagaatctaatgcctggtgatcttctgaggtggaacggtttcaccccgaaaccatatcccaacacccctcagtctgtctgtggaaaaattgtcttccacaaaactggtccctggtgccaaaaaaggttgtgtagtgctgttccaatgaccgatcctgtttttgtgcatcattcatagtttttctttctaattttatatcctattatataggtttaggtgaagtctgctttc

SEQ ID NO: 73290 - DNA, 1038 bp, Homo sapiens
ttaatatattctttcagaaaaacttgactagttttggaatgtattcttctataaaaactgcttacaggtagagtaggtctgttgtttctttatatttatttgttactggatagctaattatttttatgttctattttcacctaccaggaaaagtaaagggaaaaccagctgcctttcttctgaagctgttcttttacagtgcttcaaaacctgatcttaaagaatatgttaactctgtaattaaactgtctgacttgtcatctaaaagcaagagtttgcaagcaaaatgctatttagatagaggtggcagcttaagtaatgcttatttaaaaacctgtctcatgctgaattgctgaaatgagtctttaaactctctatagccagatgacgtgtactactgtggaataaagtacatcaaagatgatgtcatcttaaatgagccctctgcagatgccccagctgctctctaccagacaattgaagaaaatattaaaatctttgaagaagaagaagttgaatttatcagtgtgcctgtcccagagtttgcagatagtgatcctgccaacattgttcatgactttaacaaggtgagccaagtgtccagaattgtagaaagaatgcaggttctgtagtttatgctttttgtagttttaatttcaatatttgctaatttattatatttagagtttagtttaataaactgtcagcatttggtgggctctgctatgtctgaagcagaccctgctgatgcagccttctcatatcttatctctccttccccttgccttacctactcttaaagcccacctcatgactgttcctcctttgctggcaaactaatattttttatatgttcccacattttcttagataagaggtaatttatgttcctgtttcttggtagcattttcaaaatcaataattttgttaatctgtttttaagttctcattctatatttttccccagcttttgagcatttttatgtaatgcagaaaagttgaatacccaaaatcctccactttgttccaaatattgcc

SEQ ID NO: 73291 - DNA, 1768 bp, Homo sapiens
agttattcttaaaaaccgttctatgagacagtctttctcaaccagcgtttctcatttgaaccacagaacacaaaatcatttaaatgactgtttttctaatgttctaaggatggtagtattcaagatacatatgagaaaatttaatctttacaaacaatggacagataaccttagagggcatttgagcttataagtggggaagttaaattgcttaattatataataagtatttgcagttaatttgaataggtattattacttattatagaaatataccctcgatgagcattttatttactggtagcaatattttttcctctcccattcccacttccaactttatccagccaaattctgaatttgttgaaatgcaagtgatttatacattctaaagccaattcattttaatgatacaaattattcttaaaaatccagttgctgcctgtttttgcaagtattactgtaactacactgtatctttttcttcccagaaacttacagcctatttagatcttaacctggataagtgctatgtgatccctctgaacacttccattgttatgccacccagaaacctactggagttacttattaacatcaaggtataagaatgttgactgtttttgatgaatgatgccttcatagtgttctggaattccctgttgagaaattagccctataggagcccattttatcagactgtagttaagaattttacaaagaggaactaatactcatggtttttgtttttaatgttttatatcttgaaattgaaataaatttctcaaataatgttttaagttttcctaaagagccagggagtaaatattagccaactacttaattctggtgccatagacaatacgtaaaacagatgaacatgactatattccaaaaaaaattctacttataaaaacaagccgggggcggtggctcatgcctgtaatcccaggactttgggagacctaggtgggaggattgcttgaggccaggaatttgagaccagcctggacaacatagtgagaacataaacaaacagatggtgggtagtagtttggcaacctgttccataccataatgtgtaagaattttgtcttgtttctctagtctactcagtgtatgttctgagatagtcatgtcatgtattcttttctgaatgtaggctggaacctatttgcctcagtcctatctgattcatgagcacatggttattactgatcgcattgaaaacattgatcacctgggtttctttatttatcgactgtgtcatgacaaggaaacttacaaactgcaacgcagagaaactattaaaggtaatactttttaaatattaaagtgttgggcagaaaagttcattgcattaaactagatttaggtgaagcctagtcattgttaccaatatacctgccatgagtgaggtaatattgtgtcgttatataatatttccaggtttctatagaattatcttaattccatttagtaagtccactcttttcaggtggagagaaaaggtcaatgtgaaatgtcattgccttgagatgatggtacctcattttccatctagttagtcaccctgtccaacttcccatcctaccactttggttgagccatactgaaagggtttttattatccagagggtgtcttgggaccagctcttcagctgtgttttcagggatctggattctaagcaggctgtttgccttttggatcatattgggaataatcactgtcagggtagttggaaaggaatttgggtgaagaactaag

SEQ ID NO: 73292 - DNA, 1663 bp, Homo sapiens
ccagctgtatccatactgctgcaaaggacatgatttcttttttattgctgtgttgatttcttacattttaaaattctcttggttcataattttttttaaagtcagccttacacgtgccatgaaatttaccctttttagtgtgcaactctgagtttccacaaagatacacaaggtcttgcaagcaccaccatagtcaagatacagaacattttcaataccttcaagttcatgaatttgtaagcagtctggatagcattattaatgttgctgtgatctgtcaagatattaatacttggttcagaaaagggagaaaaattacttttcttcagtgtaaacattcaaactgtagaagtttttgtggaatatagagtgaaatacttctatatgtctaaataataactataaaaatgatgtgaatatttattattaaagaatcaaaattttaaaaaacttttttccctctccaacaggtattcagaaacgtgaagccagcaattgtttcgcaattcggcattttgaaaacaaatttgccgtggaaactttaatttgttcttgaacagtcaagaaaaacattattgaggaaaattaatatcacagcataaccccaccctttacattttgtgcagtgattattttttaaagtcttctttcatgtaagtagcaaacagggctttactatcttttcatctcattaattcaattaaaaccattaccttaaaatttttttctttcgaagtgtggtgtcttttatatttgaattagtaactgtatgaagtcatagataatagtacatgtcaccttaggtagtaggaagaattacaatttctttaaatcatttatctggatttttatgttttattagcattttcaagaagacggattatctagagaataatcatatatatgcatacgtaaaaatggaccacagtgacttatttgtagttgttagttgccctgctacctagtttgttagtgcatttgagcacacattttaattttcctctaattaaaatgtgcagtattttcagtgtcaaatatatttaactatttagagaatgatttccacctttatgttttaatatcctaggcatctgctgtaataatattttagaaaatgtttggaatttaagaaataacttgtgttactaatttgtataacccatatctgtgcaatggaatataaatatcacaaagttgtttaactagactgcgtgttgtttttcccgtataataaaaccaaagaatagtttggttcttcaaatcttaagagaatccacataaaagaagaaactattttttaaaaattcacttctatatatacaatgagtaaaatcacagattttttctttaaataaaaataagtcattttaataactaaaccagattctttgtggatactattaaagtaacatttaagcctcaaccttgaatgatgttgtttaatataaaatgcttttatttttgatggaaaggcaatcaaagcctaaagtttccaaggaacgtaaaataactgtgcttctctgagaatgcccgcctcacaagtggaacattttgagttaataatgatgatttttatgtttctaaggttgcttcctctctgaaataattcagaatccacccccatttaataaaatacctatgattcatttcacctcaagttcct

SEQ ID NO: 73293 - DNA, 1046 bp, Homo sapiens
tagcacacatgtatgggttgtagattccacacttttaatcttccagccacctattgcagattggttctgagaagcaggatgagtgggagtgggcttaggggtcaaaattgagacctaagtggtataaaacaagataatcctagcttcctcccacttaaaataatttgatgggacttctgtatctgatttttaagcttgcatttgtgtttatattttcattgtaaaaatatcaaataatacagtttttgaaggtaaaaagtaaatgttcccgcccttctaccatcctccttcctcagtcccattccccaacagtttaacgtgcgatacaataatgtgtgacacaaaatgacctagttcttgccctagtgactaagcagatgcaaacgccttcttctttccaaacagtgtggtcttatccccgtcgcaaatggaggatatttaagaaacccaagccagaaaccccacagtcttcacagtcactgtgtcctccacctcctagcagcttcctgctgttctgctctagtggttctctctgcttccccacacccacccgtaagccacaacaatctttccaaaacacgaacttgatggtttcattgtcacaccccagcttaaaacactttcctggcttcccctggttcttaggataaagaccaaaatacttaatgctgcacagtccagtcccaacccactctccagcttcatcttaatcacacccctctttgctcctagtgtcctaccacattgcctgacttactgtttcttggtaaatgctattcttacttcctgaagattatttccatctcctcacccgacacccttcagttagcttccactcaaccttcagaatttagttcaggtgacccttcctcaagagaagattttcctgaaccattaggaaaggcttctcttgtttctcagtctcatagcatcatctgtctcttttttgtgacttgaatataattaatattttatattttgtccttgttgcttgtttggttaatagatttccaccactagactgctcaatacgttagtagggcacc

SEQ ID NO: 73294 - DNA, 1035 bp, Homo sapiens
attaaaaaccacgtctggggcatgttctgggaaaagacatggctttagtttctgattaaattctgatgtatccaattcttgcaaatttcccttgggaaaatgcagtaatggctactctaaagaattccatgttatgcacacagctttggaagcatactctaatgtagggtaaccaggaatattgacgttgtggccactgcttggaaaaaagaggactgtttctttcattttttaactcattttatatattttaagtaatggaactataaaaaattctcttataagtcaaaaccatacaagatacagtctgttcttgattatccatacccacaaagggtttcattaacatagacagttgaactctataaattaaccagcaagggtagaaccgctgccgtgcagtctgatactgagcatcttgcctggagatggaatcaaggctcagtccaactgcacctccagtgacagattccattcctgatttgagagtttagatcttatttctgttgccttatctctggcctaagtaatgtagctggaagggaaactgtcactaggaacagcataccacattcattgttgaaataatcaaaggttaatcatgtttcgagctgggtgtgatggcgcgtacctgtagtccatgctactcaggaggctgaggcaggaggatcacatgagcttgggagttggaggccagcctgggcaacaaagcaagaccccagtctttaaaaaaacaaaaaagctgaccaggcatgttggctcacgcctgtaatgccagcactttgggaggccaagatgggaagattgcttgaggccaggagtttgagaggagcctgggcaacaaaacaagaccctgtctctaaaacaaattttaaaaaattagccagtggctgtggcacacctgtaggctcatctactcaggaggctgaggtgggaggatcccttgagcccaggagtttgagactgcagtgagccatgatttcaccactgcaccccagcctggatgacagagtgaaaccctatttcaaaacaaga

SEQ ID NO: 73295 - DNA, 2125 bp, Homo sapiens
aaggacaagacttagggcttgactcttgactgctgggagctgggggtggagaaagttaaaagaaataccttgtagctattttctatatctaattatttatatcccaacttgtattagaaagatttctgaaatcttaaaaaaacaatgcggcgggggaaatggctgatgggaaggcgggagaggagaagccggaaaagtcgcaatgagctggagctgctggagtaatggagaggaaagttccagccgcagcgctgagaagcgatcagctgaagaagaagctgcagacctccaacaaagcctgcaaagatctccaactttggatttgccataggtagtcagacgacaaagaaagcatcacccatatccatcaaacttggatcaagtaagcctaaagaaactgttccaactcttgctccaaaaactctttcagtagcagcagcttttaatgaagatgaagatagtgaatcagaggaaaggcctccagaagcaaagatgaggatgaagaatattgcaagggatacaccaacatcagctggaccaaactccttcaataaaggaaagcatgggttttctgataaccagaagctatgggagtggaatataaaatctcatcttcgaaatgtctatgaccaagacaattaaatgatgttttgaaattggggtgtgggtgggtataaagttaaaaagaacagtttcctttttttaagaatggtataagactacctttggagccactttttttttctttttcatctttttaaaagattgagtggtacaccaataaatgagagtttgaaattagaggtaatttatgttttgtatacagatttcaagacatttgctaatttggtagttttgtgtgattagtttccaaagtttacagataataaagaaatcagaaatggtacctttttaagaattgcctatttttttagacacaactattagcacattaagagggaagcaaaaagttaattgtctatttaaaactgcaagcagttactctcttaactcccttattacctaaacttgtctggctcccaggaatagccttatagagagagggagtattgtattgggaggaaaatgttactgaactattgactgaaagtacatttagataaaattaaaatacagcttttttcttcatgggcatttgttttctttcaagtcatcataaactaggtgttgcattgctatcagtggatacagacgcttagctcttaaaataacttttttatatgtaaactgttgaatatttgaaatagcccacttcaccttaatgggtcttgtctatcttcattaatcttcaaagaaaaaccatttgctaccaaagtaaatcagtattttgaatgtgcttctcttgttttttgtttattagctagttcctgtaagcatttccaccagaacttgaagcgaatcataagaaaactgtttcttttaaaatacaaaccaccaccaaaaatttaaatgtacatattgcttaagtatttggctgcttttattttttaaaaggtataaacaccaaaaaaaaaaaatttaacattgtatgaagatggaaaacaagaagatgcactttctgtaactttgtccaaggatttaaattactaacttgtgaaatccaatttgaattgaacttaactactggctttcttactagtaaaattatatggtttattttaaatgtatacatattgaccaatggcctctcaaaaagcacattttagatactgaaatagaaggaaagaaaatgcatcttcaaacattttttggaatctcaccacacatactttgtgaatttgtgtattgtagggtgttttctttttgtatttttgtattgtatacgaactttttttttaatgtgacagttaaacacatctttaaaagcacagtcacagacaaaaaaaaatacagtataaaaatttccttgaaaactcctactacaatattgtatttggaggcagcttcagaccgttttattggtggtaactgctcgctgagctcttttagtcggtaataactcagagaagcaacctgtgtatattcctaactctttgttaactagtatttaagtttagaataagccccaggtaaaacaatggaaatgtatatagaactcttagtt

SEQ ID NO: 73296 - DNA, 1049 bp, Homo sapiens
tacaaagacagttaaggaactgaaacatgaaatacaaggttaaaaataattgaataaataaattgataaaaggaatgaatgaatagagcaaggaaagaataagcgaataagaacgtgggcttgtttttttcaaacaaattatatgttatggactctagatctcttaacttagcttcagtgacattggattattgaaaaatgaaactattttgaggaattgactgacccctaaagtttccacaataacttatttaattttttatctttctaatacttttttgccttataatataaaatttgaatgtttgttattagtgtgaaatgaaatcctttcaaatatatgccatcagaaggatgtgttacaaatatacagtattacaaacatttattttgtatgctgaataagaaaaaatcagttataatacagttttaacatagtatccagtgtgtgaattatttaatgaaatatttgatctttattttttgttcccagggaggttatattcaaaagaaaaaggaactgtggggaatctgtatctttattgcagcagttgacctagatgagatgtcgttcacttttactgagctacagaaaaacatagaaatcaggtaaagtttcttgtataaatataagcctctgccataaaaggaaacgaattctggattttcctctcaatagacttttgtgaattagtgagaaatgctaaaataaagtaaaacaaaaagaacttggaccaaatagtgaactgccattctctcatggagccgttatgaaagtgtatttatgctgtatttctttaagaggtagcagtttgtgtcctggaaaaattttcattgtgtctctcactattcatgtgtaagctttcttaattgtggctgttaataaagtgaacagaaaagcaaggatttgtaaataggcttgttttatattaaaacctttatataagtagtttgagtttatcttaaaggtatttaggtaagatttattaaagcctaagattgttttaactagaggatattataactaaatgctttttttcagattatat

SEQ ID NO: 73297 - DNA, 1027 bp, Homo sapiens
tacgagttgtatgtcaggatatggggtcaaagaccaaacatctatttcacaatatcacacaacacaatgtgtctggggaactattagcagctctgtattgattgactataaaatgagagtaggaagtcacaggagaggagagtgggtactagatatgaagggccttatatgccatactcacaaatttggagtgtagcatgtgcatgatatagcctgtgctataaatggatgttaagcaggggtaaggataaaatcagacataatttttgcaagttcacatggtaatagtcagtggggggatagactgaggagaataagaaaaagtgagaaatagacctgtcagtctgtctcagtggttcttaaccatgtgtgcaaattagaataacctgaggaattttgttttgttttttctttttaaaaattttgtgtcccattccactgaggaatatgcctaggccttactaccacagacatagtgtataaaaatctctgggcttgtctgttgtagcagtttacttgagagtttttaaagatctgaaccaacgatagtggtgggaatgaaggaacaataacagatttgataaatatttgatgaattcatacttagaatgttgttcttgaggcatttctgaagaagatatctagtaagcagtaggatagccttctatagatttgggaatcatcaggggagttaaacccataaaaaaaaatgagattgcttgaagggagggtgcataatggcaagagtgggtggctaagggctgaagcctaaaggatgctagcattaaggactagacagaaattgttaggttctagagcaggggtccccaattcccgggccagagactggtctgtgtcccattacgaactgggtgatacagcaggaggtgagtggtagacaggcaagtgagcattactgcctgagatctacctcctgtcagatcagcagtggaattagattctcataggtgcatgaaccttattgtgaactgcgcatgtgagggatctagattgtatgctccttatg

SEQ ID NO: 73298 - DNA, 1063 bp, Homo sapiens
gcaaaaattacctatatgacatataaatcaaatggtataattttttagtgctaagtcttaagtagtattcatttttatttaaataaattgcttctgttcgtaaagtactatatataaaacctttttaccttttttatatataaaacctatgattcataggttttatgtcctattaaaatatgagctaacaataattggtaaaattagttggaaaattatcagttttaaaagaaaattaaattgaaggttatgttgttagtaatttaaagatctcctgtgttttgatgtaaaaacactattttttagcagcagtcaaagggcttaagtagtatgactttttgtgtaacttggattgtgcaattgcttttaaaaatgaaactatttctcatttataatgagataatggaactcagtgtatcggaagagcagactgaacacacacttctacctcctttctccccgcaaaccctacagaagtgacaaaaaagacacatatcacaggggagtgaaacccagcagtactcagactgtgaagcagaaaaactgtggagggaagtggaggagttgattcatttttttagtataaaaaataaatgatgagtgtattgtggatacaataaagtagagaaaaccacagcacacaacacccccaggaaaggggactggtggaagtgggagtcttagagagcccccaagctcaaagtagcagatacagagagtggggcaataatcaggaaggttttctaaagtgctgtttggcaatggtcctcaaacttgagcatgcatcaaaattaccaggagggcttgttaaaacacatattacagattgctgggcccagtcacaaagtttccagtgtagggtccaagaatttgtatttctgatatgtttccaggtgatactgatgctgctggtctgggtactacactttgtgagcaacattttaagaacatgaaacacctggaccagtcccccatctaaggccatgccagcctatgagaataaaaaaaatgcacctctgtagtcccagctacttgggaggctgaggagggaggattgcttgag

SEQ ID NO: 73299 - DNA, 1803 bp, Homo sapiens
tttgagaattagagattttaggagttatgtacatgctgatctctggaaaatattgctaaataagtaatgctgttgatcattaagtactctggtcggtttagatattaatgtgtgttctacattcttaagtttgttcattagtcctttttaatttgtaatttatttcttagaagccatgttataaatgggtaattcagttttcaggaaagccccaaaaagctttttaaaaagtttgtttttggagtctttaagatttcatccctgcctaagcactgtttataaaattgtttctacacaaaaatttattcacaactaagaacatttgtgacatccagagttggactggcatttaggcacgaaaaaagtttaggtgctggaaggtagtgatgcttcttcttggaaatagtaatttaatatattgacaaaggacaaaatacttggttcatcaggtgtccaaaattgtaggaccaaaaagcaattgcttcagattcttgataactatgtaccattcatgaaccaaatgtttctcggatgggaatatgaagtttgctccattttctattttatatttctcaatttagtgactaatttctttaaataccaatatctataattaagatttctatttccaatttacttttcagcattttgaatgtagaatattaaggttcattgatagctccttaagtagtgtcttcagtttaattttctgtgaatataatatatataatacatatatttttatgctttttaaaataaactaggtacttgatattttctcagtaaagatgatttctaagttcagaaattattaggatgctggaaagccatttttccacacctgaaaaattttctcagcttactgtgttcctttgaagggagttaatgtgggaaggaagattagtcaaatcatctaccgttttatgaaaatgttaataacagtgggcacagtttttataggggggcttagtgctatcattttcaggtaatcaaaagtaaaatcatcagagttctaatattaatataggtttttctgaataaagggggaagggaagagaaaaccctcagaatatatgacttaccacaaagtacaacactagcaaaggaaaataaattttgttctggtacactttttttccatagttctagatgagaaaaccatgtttgttatctgttatgtattgctttatgaagaatcttacaaaacttttgattcatttatcttcctgttgacaagagacaccaaaaagtttctttatgaacatagtaataacaactatttaatgactgttttatttgcattttaaagttatattcatgttttatgatcttgccttaagttgagatctttaagctgaggagagttctgagaaatctcaaagttatacaattctccacccctttcccccagatcagtagattggtagttgcttctcaactcagtatgtttaagaaagagtgtatttttatttactgaagtgtaatatcaaataaaggaatttcaggtcaatggaagaaaacacatttatattatgtatatatttctcttgggatataaaggaccatggttagtatcttcactagttttttgggttttttttcttttctcttttttttttttttttgagataggatcttgctctgttgtccatgctggagtacagtggtgtgatcatatctcactctaacttggaactcctgggctgaaggcattaaagatgtattttgctttaggtttatctaaaggaaaccatggatccctaaagaaaaccccccactgttattttattgaaaatgggttta

SEQ ID NO: 73300 - DNA, 1034 bp, Homo sapiens
ttttttgagatggagtctcgctctgtcgcccggctggagtgcagtggcgagatcttggctcactgcaacctctgactcctgggttcaagcgattctcctgcctctgcctcccgagtagctgggactacaggcatgtgccaccacacccagctaatttttgtatttttagtagagacggggtttcaccatgttggccaggagggtcttgatctcttgaccttatgatccacccgcctcagccacccaaagtgctaggattacaggtgtgaaccaccgtgcccggcctgaatttttttaaaaaaggaatatgttggataataaaaaagttttagtgtacttggtactttttttctaaagtatacctcagagccagacctattttatgtttagtgaaatgaaaatatagttttgtttagttatttggccttgtagttttgttactttataatgtaaggaactgtgtccttaattaatcattttgacgtacaataacatcttgcctacttgaaataatgttttgaacttcccaatatttggcttaaaatggccagaagagtgaaggaaaagaaaatatttacagtcatgcatcacgtaatagcattttggtcaatgaccgcataaacgatggtggtctcataagattatcatactatatttttactgtaccttttctgtgttgagatgtatttagatacacaagtaccattattttacagttgcctacagtattctttgcagtagcatgctgtataggtttgtagcctagaagcagtagggtgtaccatataagcctaggtgtgtaatagtgtataccttctagagttgtgtaagtacacactgtgatgtttgcacgacataattacctaagcaagcatcataagcaacacgtgacagtatattactttctaaatgccaagtactatatttcactatctctgatgtttctccgacctaacatacttaaaacataagttcttgactgtgatgtaagtgcacctttaaaatgtacctctggtagtattttatttttttgc

SEQ ID NO: 73301 - DNA, 1024 bp, Homo sapiens
aaatgtaggtgttatttcctcaaagattgaggatatcacaacctctatggcacatgtttttcttgttttaaatatcattttcttcagaaaaggctagatctagttatgccttactgttattatttttttaatttggtctagtttaagctgaaactcttcctcttgggtattaagtaatttaagaacaatttatttttttctcataaattacttagctagcttaaaaataacttattacagtaaaatgttttgtgttgttttgcaccattctttcacactcagcaatttttgtcatttgttgatgaactataatctatttctactgtctggactagaaaattcatctattatcaaatgacaaaaaaagatgagtattacttataaccaatacttaaaattttgaagggttgaatatcttttatatcacatttggtatagaaaagatgtatgtgtgtgttcttattagaaggctggtagaagctgagtgagcattaatgaaaaaaggagtggttaataagcttgtattctcattggaaaaaattttctgttagtagttatgtcttactgttattttttttttatttggttcagtatgttttaaaaaaacaaaatcttagtaatcttctttcaaattgatagtctcctctttagtcatctttaattaatgaaatatatgcagttgtatatgctgatctcatcctacttttactttcattttgaatatggcggcattttctcattcaaataattaaaatttattaattctacttggaatatttttctacatattgtcattactcacttgacttgttattcacttaagtcattcatctatagttttttcttttcttttctttttctttttctttctttcttttttttttctcactctgccgcccaggctggagtgcagtggtgcgatcttgtcttactgcaacctctgcctcccaggttccagcaattttcccacctcagcctcccgagtagctgggattatgggcacccgccaccacacccagctaat

SEQ ID NO: 73302 - DNA, 1032 bp, Homo sapiens
cttatacatgtttgtataatgaaagaatacaacttagtgagtgcatgcataaaggataatagaaagcactgtgacctagagatccagaatccttgatttctaaattttgaccttaccttgggcaaactctgccctgaactttaagatggatatgacatgcccttttgaccttatgaagagttttcagaataaaatgaaatgaaaacatattctgaatgtaaacctctaaaaagatactattatagatgacatcacctataatatcttaactttatagaaataaaggttatgttgtgggaaatcatggaacaataagatttgttttgttttcttgaccagataggatgcctgtgctctgtcagataaagaagtgatcatgtgatgcatttggtatgccttttttagcactgctaatgtacagccaatttaaatcaaatagacataggctttgcttataaaaaccacatatatttctaagttagtttgcttggtggttaacacattgcatattgcattagtcttaatatcctctaatgttggagctagcactggatcctagaaattcagaataaaagtccaccttacccctgttacaactagccattcatcttctttggtatatagtttagctctccttccagtcactcaagtacaacttaggaaactaaaaccatagctgattattgctggagcaggaactcgaatcctagtttcttgacttctagtcaaatgttctcgtagtaacaggtagctttcaccctttttttcttactgatgttgtgctagttcgttcttgcattgctgtaaagaaatacctgagactgggtaatttgtaaagaaaagagtagggtttagttggctcacggttcttcaggctgtacaggaagcatggcatcagcttctcctcagcttctggtgagtcctgaggaagtttatattaatggcagaagtcggaggggaaacaggcatgtcacgtggtgacaataggagcaagaggaaggaggaggtcccatgccctttttaaacaagcag

SEQ ID NO: 73303 - DNA, 1111 bp, Homo sapiens
agatttggaatgggatactgctctttctttttatgtgctcttagataagaactctttctactgtgtcttataaactctgtcataccataagtttctcaaagtgattttaaccactgtacattttaaacaatatgagaaataaattaatttctgatatgaacatacatgtaagctactaaacctcagtattatgaaatatctaaaacgtgacttattagaaatagattcttttagacgttaatttttttttcaaaaagatacatatgtacttttctatttatgagtatacctgggtaaatatagaacataggaaaatgtactttgatgttttaaaacatttaaaattatttaaatataccactaactctaaattttaaaattatctttgattagaagcattaaaattcttatttaagatgtatactatttgaagaagagaattgggattctgttgccttgctttgtaacttaaaagagctttttcagggactccctcagagtacctgctggagatgaatctgtaaaaaatttttgttcagagaatttctgccactaaataagtcttaaataagtatgccacataggatagactgtatttaaatgaaaccattttttataacttacaccaaatattatgacaaaagcataattgtttcttgataaaactgttccactgttttatttgttttactgttaacaaaaatgcatttttttttttttacctttagtaggtatgcattgtattacaaaacaatgatatcttttggaaaactttcagttaaactagacaaataaggactttggcttattcagatttattccattcatcatctttgaattagtttcttcttgagaagaagcatatcttacaacttttgtctttattacctcaatatgttttatttatatgtatatacatatatactttttttcagatagggtcttgctatgttgcccaggctggtcttgaactcctggactcaagttattctcctgccttagcctcccaaagtgctgggattataggcatgagccactgtgcctggcctcaatatttatttaaaggttacaagaatatatgttcttaaaatgttgagaattaaaataaata

SEQ ID NO: 73304 - DNA, 1011 bp, Homo sapiens
tggtagaaaaatcttaaacatcaccactaaagaacttattcatgtaaccaaacaccacctgttcccccaaacacctattttttaaaaaaactcatgcctacataatgaagcctccataaaaactcaaaaggacctggttctgggagcttctggatatttgcccaactggaggttcctggagaatagcatgcctggggagggcaaggaaaatccatgccccttctcacatgccttgccctctgcatttcttcatctgtatcccttgtaatatgcctcataataaaccagtaaacatgtttctctgggggaaagaaaagagtggtagaaaagaggtttctgttaaaatgctacttaacagcattataattagagcgatttcatgatttgaaaaaaatctacttgtaattcaaaatgaacagtaaaaatgactaatttttcttattcccacagtgtatcggctagcctatctccggctaaatacactttgtgaacgccttctgtctgagcacccagaattagaacatatcatctggacccttttccagcacaccctgcagaatgagtatgaactcatgagagacaggcatttggaccaagtaagaaaatcaagcacttcaccttctctcctccctacttacttgttaactgattctttctttctttctttctttctttctttctttctttctttctttctttctttctttctttctttttctttctttctttctctctttctttcttttttttgagatagagtctcactctgttacccaggctagagtgcagtggcgcaatctcggctcactgcaacctccgcctcccaggttcaagtgattctcctgcctcagcctcccaggtagctaggattacaggcgtgtaccaccacaccttgttaatttttgtattttagtagagacaggttttcaccatgttggccaggctggtctcaaactcctgacctcaggtgatccgtctacctaaggcctcccaaagtgttgggattacagg

SEQ ID NO: 73305 - DNA, 1725 bp, Homo sapiens
gtccaacaatgatagactggattaagaaaatgtggcacatatacaccatggaatactatgcagccataaaaaatgatgagttcatgtcctttgtagggacatggatgaaattggaaaccatcattctcagtaaactatcgcaagaacaaaaaaccaaacaccgcatattctcactcataggtgggaattgaacaatgagatcacatggacacaggaaggggaatatcacactctggggactgtggtggggtcgggggaggggggagggatagcattgggagatatacctaatgctagatgacacgttagtgggtgcagcacaccagcatggcacatgtatacatatgtaactaacctgcacaatgtgcacatgtaccctaaaacttagagtataataaaaaatataaataaaaaaaaaaaaaagaaaatctatttacttggatgggtttacagatttagttatcagctttcctgactgttaggtatcttcttttgagaacaatttgagaaccagtttggttatatgtttcaaaacacttttatattttttaaatagccaatctgctaaacaaagcaggttactttaggttgagtacttttagtttgcagtttattggatgtcctgtaagttttgcttcctgtggatttttttccttttgcttgttatattaaatgtagattactgtcaattaagtctttagaggtccatccctaatcctgctggcggcctctttaccacctcaccttgggcaggtctctatctgtacttcacaagggtgctgtggatcagggaaatgatgagtatgaagctgttttaaattctcagatgaaaggttgtatgcaactacaaatcattatattatcttccacatccaaccacaagtgctctctagctttgaagtgcttcagttgactaattatatgttatcatgggctatttgaaactgactttatttgtgtgaagtaggaggcagattagctagtatagttaatgtagtctcatctcagaaattatcagcccatatggttgtacctaatgggcaagaaaagggggcatatgttggcctttcagaaaatatttgcatggtatatttaattatttaagtagtacgtactcattataaaaatttcaaactctacagaaaaatatgaagtaagaaataattggcaatatgatacaaatgctctcatgtgtctctgtatcatcctttatttatttggtgttcttgtagttggatatctgtgtactgatatctactacttgttctaagctgctaagatgccacgtcatgtctatttaagaaaatttacattgttccatgccactatatgaaaatgtatacttaggtagttttttttaatagtgataattagtccatattatggtgataatgatggctacttgctgatccttagtgaaataaattctgtgttggtattcttcagcaaaaacgtcacattctgaacatcctaactaataaatcattgaccaggcattaggagagcatcttaacactctacccagtacatttaggtactctggttaatcaaatattatatgtagagtgatggccacttatcaaggaattggagggcaaaaaaatctctatattcactagttccatgttcatgttttcaaatctttgtcgagtcatgtcaggctaatgatgttcttcagctttattataaagaacataaattatatggttcaaataaagacagact

SEQ ID NO: 73306 - DNA, 1075 bp, Homo sapiens
cagtcatattggattagggcccaccctagtgaccttcttataacttgattacctctttaaaggctctctttcctagtaaggtcacattttgaggtattggccattaggacttcaacacaggaatttttagaggacatcattcaacccgtaatggagtgaggaaacagaattacttagattttataaaaataaacccactgatttctctaaatgctgacagtggttgtggtgtgagagagatgccagggagcccagctctgtccccattagcacggccattggggctgcttcccaggccacccctggcagcaggtttgtatatacagccttgctgaatagatgattgtttgaaaaccctggccagcaaagaaagtgaggagccacagcagggacgtgccagcgtgcaccttcgagagaagaacgtggtcctcacagaggccatctgtcctggctgggaagctaggacctgacatactgcttttttccttcagatgtgagcattttcgttcgtcattggaagataacgaggatgatattgtagaaatgagtgaattttcatatcctgtttaccgggccttcctggaatacctatacacagacagcatcagcctttctcctgaggaggcagtaggtaattgccaaagacttccaaaaacttggcaaaatgttgaggaactgacaaggtggtttctatagaacctaaaagaaagtcactgtgagggtaattacagaagtatttctttttgtgtgtgttgaatccaaacacgtttcccttgttactactttattacaaaggttgactggacagataagagagagaagaatcaaatcatcaccaccgtggagcattgcaggcagcagcatggaggaagggacagagactgagggccatgcagcagatccccgtgtctccaccagcagggcccaggaattccacttatttcagactgtgggcctgagtcagtcaagtctgtgcccagtggcttaggaggctgggaaaatgggcatttccagagggccgtagcttggctaaaaattctgtggtttcagtagaaaggaagaatggatgtgtgtg

SEQ ID NO: 73307 - DNA, 1131 bp, Homo sapiens
acacttttgccgtgtgtggctgaaaagactgaagttgtcaagctcagtaatcttttcaattaaataccgctttgctttgtactgaagatctgactcatcactcttgttgaaatttggaaaactttttaaaaaaacaaataattaaaatagcaacagggtttctgtattctacacaacagttttctgtttttcatgaacatatgacaataccatttcctttgaggttgtgtgctagttttagttatgcttttagtgttttagttttgtccgtcctgtttataattgttccattttaattagccatgtaggtattttactgttacttgtcattgattttagacatctcatttaagtggagctaatattacagctaacactatccctttttgcaagtgaaaactgggatcatgttttattgtatacgtatttatattatttataacttgaagatgacccttaaaaagctattaaagatactatctaatgactcacctaaggatatatttgggaaccatcattatcctattgaaatttatgtggtctgcagctcattaacacaccgatgctgtaaactgcatgctggtaccctaaaagatatcgatattatttaatttcctgtttcttttgattataaaagcatcatcaaatgtgttacccacccagatgggataattttaagcatagagttctatattgagagaattctaaaaatatcagtgtgtttctcaagcatagctttagagttgatctcattaagttgaattttaaaatatgtaatactgggacttctctgcaggaattgctattttttttcaccccttcttctgtaatcacttctaaagaagaattattagcatttagaagcccctgattaactgcaaaatgtcagcatttaaaacctaccattgggttggggtaatgtggacagaagtccctaagagagctggatattgttttgctctacgttattctgtttgctctcatgtatttgctttcaattcagtgcctactgcaggcactgaattaatatttgttgaatgaattaggcaaatgaacctatgtcccataatcagcttaactcattttttaggtcagaggtattaccgagtaatataacacattgtgtagcag

SEQ ID NO: 73308 - DNA, 1127 bp, Homo sapiens
accctgatgaatacaaatattatagtatcctagtaccagagcagtgagctccttgcaaactagagtcagaaggatgtgttgtcactggcagacatctccaggggtatcaagaatacccctgttagagaccagagatctagcaactgaagcagcacggccaagccatgtagggtgcgcctgagcgcaaacaggtggaggtcttccttccttttccaggaggctgaggaattcctctacagattcttgccacagaaaatcacatacctgaatcagctcttgcgagagggctccctcagtgtggctgacctgacttccctccgggccccactggacatccccaacccagaccctccacccaaggatgatgagatggaaacagataagtaggagaagaaagaagtccctaagtgtggatttctccctgggaataagaaagtcctgtccctgcttgccctggttaagccagaattctggactctcaaagagaaattcattctggtgattacatggatccagcacctaatccccaagattgaagatggaaatgattttggggtagcaatccaggagaaggtgctggagagggtgaatgctgtcaagaccaaagtggaagctttccagacaaccatttccaagtaattctcagaacgtggggatgctgcggccaaggcctccgaggagactcatgtaatggattaccgggccttggtgcatgagcgagatgaggcagcctatggggagctcagggccatggtgctggacctgagggccttctatgctgagctttatcatatcatcaacagcaacctggagaaaattgtcaacccaaagggtgaaaagaagccatctatgtactgaacccaggactagaaggaaaataaatgatctatatgttgtgtcagaaaaaaaaaaaaaagaatacccctgttagtgacaaggaattgttgattgggcagctacagaatgtagcaccctctggaagcctaggcccagatggaaagagcaggaggacaagcacactaaggaacaagacatattgagtttacaaatgagaacacatgaggcattgagccctgacagggaggcacttgtaaggtaaaaactgccacatgcattcaggtgggcgc

SEQ ID NO: 73309 - DNA, 1033 bp, Homo sapiens
gccatatgttaggcagaaacgaattgagttttgtggttctgatcttatgtttggataaatatttagtttttgcgtatttactaactcttgtcatcttgtgtcacccacaaatgttcaagtgagttgaatcccctgtcttttggatattttcttggttgaattaatttttcttaagtaatgagatgaagtactcactgagacagatggtggcccaacagaaaacagtgatgaaggatttttaccacatcttttatgaaatataacctgaaatgttgcttttagctttgtagcctactaatcttgctttctaatcacaccagttagtgggaagaagggatgatgacaggagaaacatcttgttaaaattttaatattaaatcttatatttaaattttttagcactactacattaaattttactatattgtcttgtttcatttcatagatcatctgttagttttctatgtgtaggttaactggaaaattttttatcccaggctggctaccgttagccacctgtatgcttctgaattaactccctctttttcccttttgtctgaatcctccaaatcattgaatgctccggaaaaataaaatcctggttaacactgtcaagcatagttataagggtaattaatttatcccaaattaataataagcattaaaaaaaacattctaggattatcttcttttggtgacgtctgtgtcttcacttcctctatctgtgtgagtaattgagacctgatttattttaacacacatgtaatgattactctttactagtcacatttctacaatataatagtaagcatattttattactaatttaaaaatttctccctcttccctgaccagccagacatagctaagggctgagacatccttaaccccccgaaaaaaagagggaatgcatgattcatattctcattgtcttttgtagttttaggcaaagagcatttaatttatactttatcaatttttagtaatatttgcgctgttttaaaacatttgcattttttaagatgttcatgac

SEQ ID NO: 73310 - DNA, 1056 bp, Homo sapiens
tagttgggggtactagactaatagtatcattagcaaaaattataatatggtattattaagttgtgtgacaccaactggaatttaaagggaagtgaagccagtgagagctagaacaatcctggaaggcatttggagggagtcagaggaaacttagaaatgatttagataacaaaaggaaaggcattccaaaagagattcacaggcagagttggaagtagtagtagaataagtagtccaagagcatccaaggacagaaattgggacgaagaaagaaagaaagttaggtcgagatgttagcttaagcaccagggcatcagaagaggaaaataggcagagctggacaagacagtttgtatcattaggaacctatcactgaaagaactatacctcagctttgacatattaatagcttaagctttatgtataatggatagcttatatgtgtttgtttgtatggcttaggtcaggggtcggccaactttttgtgtagagtgctagataattaaatattttaggttttgcaggccatttacagtctcggttgaatgttcttgtttgtttgttagttttttataatcttttaaaaacgtaaaaatttttacattgttgtctcaagagccaaacaaaaacaagccatctgtggactggatttggccaggggacctagtttgctgactgctaggtaataattggcaaagtaattgtccatatagcacatactgtgaaatttcttgcatcatcttgtctatatggtggtttgggcgttttatgactatcatgtatatatttttccttatgttatcctaaaaaaaaagtatgtagaaataagtgcttctgtaattgttattttgtggccagacttctaacaagagcctagaataggtctcagaattaggaagtgaaagacgaaaagcctttgagtcaggccttactacagtgaaaatagctacacagtggcttgatttagaatttgtataaggttaggtgtatcaactgcctgtgctggttttacatttttaaaaacagctggcaggttaaaaaccttgtctaggatgc

SEQ ID NO: 73311 - DNA, 1235 bp, Homo sapiens
atcatttcttacctctttacaactttgtgatatagtgtagagaacatatttctcattaggcagccacaggattgttagttgacttctcatactggctgtatagaaacatgagtgtgctactttacctgtatgagccttggttcgttcattttacagtgtagtaataatagtagctatctcctaatatagactgtacaagaattaaaagatcctatttaacatgacaagtaaaatgcttgccataggatatttatatctagaactttgacagacatacctaatcattgtcactcaggcatcctgcatatcattcatttattcatttgcctatcatttgttgaacatttaaaatgtcctagatacttagaatatgaatgttgaatgtcacaaaaatgaatgtcacactccctcccctttagaaatttacagaatgggatgagagataatgatatgtaaataaatacatatttttaaataattaaaatatcttgtgtcttttcacttgtgtgagtccttcctgtcttttaatatttaaatgcaaaatgtttccataatacccacagaatatctgggttgtatatatcatactgtaatgtatatatattttttacttgtctaaatcagctattcaactatgaactccttgagtttgaccagtactactggagtcagcaacttttttaatataagagaaggtagtaaatattttaggcattgtggaccatatgggctcagttgcaactacttaaactgtgctacaggagcacaaaaacagccatagataaattataaacaatgggcatgactgtgttcctattaaacttcatttacgaaactaggcagcagaccagatttggcccacaggctttagtttgccaacctctgcaatggtgcatgcatatacttttatttgtgcttgacaaataaaaggcacttagtaaataatatgattaataggcattaaacactttctgtattctgggtgctattgcaaaaaactttatatgtatcagtttacttaagccttaaaacatctctctgcggtagatactattatcaccaaatgtcatagagtaataatagaagcactttcattaatagataggaacacaacattggttcaaaagtcttaggcaatacattaagaacaagaaaaataattaacctgtaaataaaggggggaaatgtatcactattatttagagttgatatgactgcttacaaatacaaataaa

SEQ ID NO: 73312 - DNA, 1345 bp, Homo sapiens
tgaagaaaactgcaaaaagatgtgaatggatggaggagtattcatgaatgtgtcaacttaatgccataaaaatgacagcttttactaaattattctataaagtcaatgcagttctaatcagaaattcaacaggagttttaaaatggaatttgacaaactgatggttcaagttttgagaagggagcatgcacaagaatggccaagtaaatttcaaaaagaagtataataaatgggacccatcaaaggtcgaaacattataaaattacaattattaaaataagaatttggagtaggaataggcatattgatcaaaggaatagaataataaattcaggagaagatccatagataaacatggataaagaagaattgtatgataaatgaatgagtaatggaagaactggtctataaagggtgtgggacaatcaactgtttaattgaagtaaagatagttaggtacccacttcgtgacactctcaaaactaagttccaggtggactaaatggttttttatttttatttatttatttatttttgagatggagtctcgctctgtcaccaggctggagtgcagtggcgtgatctcggctcactgcaacctccgcctcccaggttcaagcgattctcctgcctcagcctcccaagtagctgggattacaggtgcccaccaccacgcccagctaatttttgtatttttagtagagacggggtttcaccatgttgtccagatggtctcgatctcttgagcttgtgatctgctcgcctcagcctcccagagtgctgtgattacaggcgtgagccactgtgcccagccccgagtggactaaatgttgataaataaaaaataaaatgacaaaacttttaaaagttaatttaaaaactcgttggagtagagaaggccttttaagtgagacatcaaacttagatgccatttaaaaaggaaggcaagcaatagactgggataaaatattcgacatgtaatagacaaaattaatattcaaggtatataaggtgtacctacaaatcaatatgaaaaagataacctgatagaaaatgggaaagaatgtaagcaggaaatttatagaggtagaaatataggtagcctgttaagttttgaaggaatactattgaaccgaatataaatagcttcatctttttaggagaaaagtttggcagtatctatccatttcaaatgtacgttctcctgagccagaagttttatttctatatgtctgtaatatagaaatgctatcattcattaatagagagtattgcatgattattccatgcagaggagaaaatgtatgatgggaaactggaagtaataagatcatcattagaacag

SEQ ID NO: 73313 - DNA, 1090 bp, Homo sapiens
atatataaacattatgtttaaagaatatgcattttcatgagataattaaataatataaaatggctcattttacattattgtggtattaactatgaaatcttcaagtagataccaatactgaataatttttaaaacatcatagtagttgttatatagctacatgaaaaattattttcaatctaaatcaacttgtgagattcagcagtcaagattttaaataaataacatgaatttaatctcttataaaagttaaccctcttgacactactgaattgcagaatgctgtaaacattccaaaatgtttattttatttttcaatatagattcagtgtatttatgattatactcaatttgcttatcttgaaatgtaatttgctgatgttttattggttaacattgtatatgatagactaatattgcttacatcatcttttacttttctttttgtatgtgatattgtgtgtacagttaaagatttgtaaatatatgtttttttgttgaaattattgatttattgtaaataggtatcacttagaaaagagtaatacaatcaaaataagtaagtaatataagagcttgaaacttcaaacttgaaggttcttaccctaatcctgagcaaatttttttaccattgtgttttgtctgaggaatcagtgaaaaatcataatttttcttgtgtagttcctagagacagatagggtgatgagggggattgagtcttcataattaccttgtctgcccatagaaaaaaattagtgacagttgcctcactcaatcactgtatcttagtgcctatcccagtgtttagattaagtagtggtggttaaattaaataaaatattatatagagatgaaaggggtggagagacagacatagaatttaaatagagcctgctgatattcgctttaatatatcatataaacttactgactactttgacaaacaaagtaatttgaattgtaagaaatgtatttccttaaatggcttattgattggaaaaaaaagcagtcaacagagtattctagaatttcctttgacaagaatatctctttaggttaaagaatgaaacatcttgaatgtacaatgttt

SEQ ID NO: 73314 - DNA, 1609 bp, Homo sapiens
ataaatagagatagttataataagcagtggatcagaaaacgtggagatagttatgaaggatgcatatgaagtgtaaagagtgaaccaatagctatgatagaatgtaagggactatatacaaagcagataataattagaggtgggagcgcaataaacttgacagcagacatttctttgtcttaacacaagaacttattgatacgccaagttatagcttacctatggagatatgacacaacttggttgatgcctgtttaaccacagactaaaaaactgttcctgacagatggaagtgtgcacaagcatgatgttaaaaattcaagacgacatattttgtcccttgtcttgacttttcttcagaatattatgctatatgaaatgatttctcttctactcttgggatcaaattaattttcttatagttggctattaagattatctgtctcctcattaatattttctggtttagtacagtaaacatttcctactgtatcatattacacgcagtgggtctttggcttgtgaatcataatagagggaattgctcctgatatcactgctagtgttgcctttagggaggctgtaatagtcatttattattcattttgacaagcagcttatgaacctttttttgtggttatggaatctgcctccctttttcattattaaaatagattttatttttagagcagttttaggcttataagaaaaattgagcagacagtacaaagttctcacataccacctcttctccacagtttcttcatttattagtgtgatatatttgttacaattaatgaaccagtattgatgcgttattattaagtaaggtccatagggttcactcttagtgttgtacaacagttcttcaggtcttaacagatgggtaatgtcatatatcattacagtatcatacagaataatttcaccgccctaaaaatcccgtgcttcaccttttcattcttcctttactccccccaaatccttggcaaccactgatctttttactatctctctactatagttttgtatttttaagaatgcaatacagtatgtagccctttcagactggcttctcccacttagcagtatggtgtaggtaatttctttccacggcttaatagctcatttctttttcattattgaataatacttcattgtatagatggaccagtttgtttattcattcatctgttgaaggacatcttggtcacttccagctttaggctgttataaataaagctgctttaaacattcatgtgcagatttttgagtgtacataagttttaattcacgtggataaatacctaggaacatgattgctagattgtgcggtagggctgtgtttagttttgtgagaaactaccaaactgtcttctaaggtggctgtaccattgtacattctttgtcacatgattgacttgagatatcttttcctgatagcagaaggaaagcctgcatgaatgtgtgtgccctgttagaacctccaaaccagttttatagaacataagcttcaagcaaaagtggaatgctcagttctgttctctagtgccaccatctaaagaagatttcagatgttttagtttcttgtgtggtttagcagtttact

SEQ ID NO: 73315 - DNA, 1039 bp, Homo sapiens
gacaaaccagaaaaagcagagctaggtagtagagtaaaggtgcttccccctttttacattacctaaaacaaacctaaaaacaaagctctacatgtttgtttctgagattagcttttacataatgttactttgggttaaacttttatctccatggaagttgtgtttggtttaaatggaaataagaaggaaaactttcaccaatagccaaaaatctaatgtaaaaactttaaaaagtgctcacatttttaagttcaaaaagttacaaatttgtaaatatatgcatttaaaaatctgatagcttccatgctaagctataaacataaaccttaggaatgaggctactgagactgaaataaagcttatacttttgtgacaataattttgtgcctcagaattctaatacaaaccattaatcatagatttcatggcccaaattagtcatcttctaactgctatgcagctttgcctggcaaataaatagtggtttgctaaatttctcattcttagaagctttggaaaggctagaatttaaacattactctcctttttcaattagtttttttctcccacacgtctgcaccatgccactttctgtgacatttccttagaaaatcaaatatttttgaaaaattctagtgctattaccgttaacttttctttagacataaaaagccttatgctcaaggttcagatctgaaaatttgcttagttatcacatttttgtaagcacacattttaaaaaatttatgataaatattaagctaggttgtcctggaaaaaaattaacttcacacatattcaggttctgtctgtgtataaaatattgcactggttcttgttttaagagatgataaaatcagatttacaaattgggtgtaaattttaagatagtctaaagggaagaaaggttcataaaatatcagtcaggaacagagttacaaagaatgcagactggaatttagtttttatatttggcacaaaataataaaattgtattcttattgaatgacttgagaccaataccatttcatctgttcat

SEQ ID NO: 73316 - DNA, 1129 bp, Homo sapiens
ttttactctatttcatttacattgtgtatttccatgactgtatcccagttttataacttaatacatagtaaaatatgagaatcattctttatttgtaaaaaaattattttcttagacatttataagaaatactaaaattagagtacaaggccaagcagcttgtaaaaatgatttaaagttgtctggtcagtatgatagagttcttaaaaacattcaagtttatgctaaatgaatgttattcatttacttattctcctactcaacaaagattttttgagtatataataagtactatagtacattgttttgggtatctcagtgacaagattctttgtcttccagagttctattagttcaattggcagacctggttggatgaataggaaaatgccaaattataaaatacctttgaaaattcttaaaaaactgtattcctgtattcgttttggttattaaaatagtcatttggagccaagcatagtaaagattttgagtcagagacaaaagaataaaatagtaagactttttcatttgtgacttctgaactaactctcaaggcaatctagaaaaaagtagttttagttcttctgagttctctagagtagatctctcacccttatagttcattgctagataacctaaagagtatctggcatttatggtgcccaagaaacacttattgaagatatatgtaataggcttcacttactgctgcttactgtgtatgtcacactgtgctgtatgttttacatgtatattatctgttaatccttcaacagccctgtggcaaaatcattatagatctcagttttcagactaggcaacaaagacttaagtaacatacccaaagttacaaatagctattaagtggtgaagcatattgaaagtcaagatcagagatacttcaaagcttatattctttttttttttaacaacattcttttttttttaatatatactttaagttctgggatacatgtgcagaacatgcaggtttgttacataggtatacacgtgccatggtggtttgctgcacccatcaactggtcatctgcattaggtatttctcctaatactttcccctcactgccctcaaagcttatattcttaatgactattcctttttgcc

SEQ ID NO: 73317 - DNA, 1007 bp, Homo sapiens
gctgttctctgacagccactatactaataaaatctctatattaaaacctaatgaattgagataagagctgtgtaaattaataagcatttgaattaaagtccattcttttaaaagtagctttattacttgttcagaatatttagaaatgaaaactaggttgagaatcacagagaactttagacatctaaataattaccttactttattggaggctcagattttgtgagttacagctagttatgggcagagttcaatacagtagtttttctactgtatagcatacattctggaaagacaaattgctaattatttttttctatgaattttctaagtatctactgaggtatactgtgctagttgctggacattcaaacaaaatctgaaaactaagttcctgacattcaagaacagtgtcatgggggaaaaaaagggaaaattaacagttgtattacagtataaaaagagatacacatagggtgttatgggagcatagaaggagggttactataacattcagtggtatgtaaagaaaaaattattccaggagaaaatgacacatgagcctcctcgaagaacagtggcagttggtcagatggacaaagggtctcaaggcactttagacagagggaaagtgttcaaaagcaacagaaggaaagaatgacttgacttatttgaataaccacaaagagattggaattgctaaaaagttgtgtaaatatgtggtacctgttgaaccaaaagtcttcctactacaaacatcattggaaatgttcaataaaataataacatgtaatctttcaaatacactcctgagcttctctctcttcccttcaccctataaaaaggaaaaaaaaggtggggactggggaagaatcactgtgggccagaaacaaggacttttccacatttatttgtcttctattttaagagacagggtctctttgtcacccaggctggagtgtagtagcacagtcatagctcattgcagcctcaaactcctgggctca

SEQ ID NO: 73318 - DNA, 1050 bp, Homo sapiens
tccacacagaggtggtctaattaggaagtcatcatcaatgctgtgattataccccttcccctcctccactaagaactcagtattacttgcttctagcacagataccacttctgcaacaggaattttgtagccacccaccactgcctgccaaattatcagcacctgtaggagtgatggtctttatctcacaccaaggagactcctcaaacacacaaagggacttcagattctatgcactaaaacaaatgacagcgtccactgcagtgcaagagaagacaactttatgaatagaacttgcttattttagcggaactagaactaaatatgagtcatctattgaatcccatttgcaaaagggaaaacaaatgaaatcttggacttcaaaaatagaaatgcaagttcaaaacagatggtggtgtatgctggttagacggtattcttttaacatgtttaaaagaagtattgacaaactgggattgtcccaaggaagataaccaggagatcatagaagcgtgaaatcacctttataaaacactatagaaatgcgtgaaggatgtttaacctagaaaagagggcagtgacttggtctcaagctcttgacctcgtgatccacccgcctcggcctcccaaagtgctgggattacggttgcattcaccaccatgcccggctaaggaagcagattttgacacggggaagaacagctatggctgtataaaaatggagttgtttgttataacagtgtcccatcttcatatgtgttcataccctggttgggtgatattataaaagtaattccagcatagaaagataattgtgattaggtgaattccagcagttattgtaactaaagatgctttgattccagaataatctgtttattaaactgagttctctttagttacttctgggaatgaggactctgaatgagcgtgttaaatttaacaagtctatctgtgcacaggcacataaggtaattgagctagtgaatggttattgctcatggtagacctataaatagtatatcaactagttaatttattaatacccac

SEQ ID NO: 73319 - DNA, 2087 bp, Homo sapiens
tgtgagatggggcctttgaacatagtttacactttttgaaaagtatagccttattattagataatcctgcctttgcctcgctttgtgcccttggcatgttactctgcttcagttttcttacctggaaatgatgctcacttcacttgttaggattaagtgagttaacgcaagtaaaacactccaaatgatgcctagtatgtactctgcactatgtggttatttttgaaaacatggtgatcatacttttacatattataactatttactgagtatcatcaaccaatatacttgatactttaaatttatttaatttcattctcacaacaatgctatgatgttgattaaccttgtcactgaaataagctaagacttcagagaagagcagtaaattgccttgctaataaatactgaagctgttattaaaatatatcttttaataccaaaattcactttctttccactgtacaacttgttacaaaccactgtcattatcattacctgtatatttttgttagctgttaataaatttcctctgaagttacatagcaccataaagtaatgaaagatctccaaaagttcttattctttcctgttgtaactggacatctttggtctcctttctggtctctacttgttcttggatagagaactctgaacctgcacctgaggctgtcttttcagattcgtggatatgagtaagaatgccatctactgagcacctgcactttaatttaaatcttaaatttaaaaaaatcagaaagaaaataaaaccaataatgaaagtggtagtctttattctcttaagaggcaaataacagcctgaaacataaatcccacctttgagacacatgtctatcaaacctatattctatacacaattatttgtgtattgtggatattccttaaggattgagtatggagaattacgttatacaatgacatttcagactgaatcttttaaattaatattatctcaaatgttctaaatgaaaattagcggcaggctgcatgagtaaaaaattagaagatagcacctgtggtgttattgaacacaaagagaatcattgtacatcaaatatatatttctgaaaagtatactttgatgagcttttgaattggttcataaggaagtctgaaagatggtcaaattcagggcagcagcagtagaaatcatttaatcttttttttcccctatatcagaaatgctgcaagcgggaacgtttgcttttttttcccccttgccctttcctgggtcactgcaggtcacgtgatgactgtcacgtgactcggtcaaaggatcttttcctcttacagccttgcaaaaaaaaaaaaagccgttctccaattaaagctgttaacgtgtactacgctgtttccttgttggattttcttgttctctgctgctactgtaaaaacgaaatgagtggtaagatttgctgttttcgaacattctgcttttattttaagacagaaagcattgtattaatctaaagtcatgccgtgtgtttttaaaaatagatgctaaatatcatcgccataaaatattttaaattgttgccatgtaaatacaaaaaggttagactatgtagagttattttgtaattttgtattccacggaatattccattctaggatctttattttactaggtttttcttctagagctaaaatctgaaaattggcatcagattatttggaagccattgtgaacgctggcttatagagaatgtgtagcacagcggcagcacgttgcattttaagaattaaaactcctggacaaatttgtaattttatttaaaaaaaacctcttaaatatgaatgtatattaacaaggaaagataaagaagaatttaagttatactagttgaaatatcttctttaagtcagtgatggcactttttaagaagcaggggtggggagcttctcaaatttcttaagacaattggttagaattgtttactcttctgcaggtttttgaaataggaaatgtatccttaatagctccatgattggggtaaatcatgctcaaatcacatagattataaaggagctgctaagtgtatgcacagttgttgtcaggtattgct

SEQ ID NO: 73320 - DNA, 1049 bp, Homo sapiens
aattggaaaacctaacactataaaagtgaaaggaagtgtagagtgagagaagctgaattttcttttttagaactttttagtgtgagaaacaaaaaaaaatttttttttcctttgggtaagtacacgtgtggcatttctctttgttcttaagcccccatagacatgagtcacacattacacaagtattttaaccctaacaaagcaagttccaaatttctaactattcttcctcttgctgcttttcactcttgcttttttattttgtccctgtaacttttgaaaattttgccttttgtatttttcattgattttatatgcagagtttagtttgatttttctctaggtcagtgtttctaaacttacactattataagagtcacctgggatatttgtaaagtgaatataatgattcaagaccccattgactaagaatctctaggagagcctgttaatatgttttaaaaagccctccaacctccccgccccccaccacccctaccccagcaactttaaaaaacacaaatgtaggtaaagggtaatttgtgcactttacaagataaatttttataacaagtcaatcatctgaatttctttttataaaaatgtagttactgttggcttgagtgtttagatgaagtattcaaaatgtaattcaaattgttttcaactttagcctgataagcaatcatgggttaatacatcatttatgtgacccattcaggtcctgctcaggttccaatgatgtccccaaatggttctgtgcctcctatctatgtgcctcctggatatgccccacaggtatgtttttatgctatttttcttttcatatttgtataatagtgataatgttattctctttgactttgattttgatttaaaaaaaccatttaattactgaggcttaccaagtgttgtgtatctatcataaatctatttcaagtattttagtacatttggaaaggaagaaaaatttttattggcagcactcatcatttgtccttgtctttgggtgttaagtcacaaaagaaaattcattctagagttttgtc

SEQ ID NO: 73321 - DNA, 1093 bp, Homo sapiens
aatttgcttagatgtaacccaagacaatgcttccaactttattcatacaatgaatctcagacactgttgataattgcatggcatattgtgttcaatagaaaagagtttagcaaccctgagggatgagggggggggggaaataaaaaaaaaaaatcagtatctccatacacctgtaaccttttatgcataatgactgggaagctctgaccttaagtatagtaatttatgaacacaggcaaactgaattaaactgtaaaatctgcaggtgttcaatatcttccactactgagatttcgtatggtctgcacgctttgcctcaatctattttgggaaataatcattttctctccctagcattgaatttacacttgaagtttttcttcaggccctctgttacttcctccctgattatgccagaatattggtggtgggatattggggtggattttctgcacactctgtgaagcacaccatcatatgaaccacagcaaaagaagagcgtgctgggaaggagagaatggaatgagatttagaatggattcagaaaagctgaatccatatcttatttcaaacctttgctggctgcatggtcttgggcaaatcaacttccttcagtctcagtgccttcattatgagatgagatcacgtactgaaattaccttgtaagcttttcagagtagtctctactaactatctctacttttgtttagcacactgactccttaatatagtctgcattctgtctatattactctactaaaactgctttccgctatgtaccaaatccaaagtcctgctttccagcctggtcctctttgacctctaaaaatttggtaccactgataagatttactacagatttccttgacatcatgctgccctgatttttgttttctacttctttgttgcaccttctcagatcttccttctcttacatgaagactgttctctagcatagttcagttcatgatttattgagtggcaccacgtactgagctctgtattgggagctagtgataaaaagatgattaagacaagttctttcagtgcacttaggttatctgctgttctctcatcttacagtaccttttcg

SEQ ID NO: 73322 - DNA, 1032 bp, Homo sapiens
gccataaaaaaggatgaattcatgtcctttgcagggacatggatgaagctggaaaccatcattctcagcagattaacacaggaacagaaaaccaaacaccacatgttctcacttataaatgggagttgaacaatgagaacacatagacacagggaggggaacatcacacactggggcctgtgaagggatggggagctaggggagggatagcattaggagaaatacctaatatagatgatgggttgatgggtgcagcaaaccaccatggcacgtgtatacctatgtaacaaacctacatgtttggcacatgtatcccagaactttaattaaaaaaaaaaaagtagagaaaaaaagcttcagaagaagcaaactatttgaaaagatgatacatagtccacataccaagattatgtactttacacataaataacctccatagccatttctggggcctgcttggtccttattttaggcagaaccttaatgagctttattgttgcagtttaataaataaggatacttttaagaaattggtgtactgcacagaggcagaaatatgtgccagtggaattaagttatcaaatgaggaaatgaacaaaacatagaactataaaacttaaatacaaagcaagtgatgccaggagtagaaggaacttaattcactggcaaatagtactaacttagagtccctaagagcattgtattgcaggacaggataacacttccgctatttcagtgataaagttaataacttatcaagagaagtttatgaactacctgaatgggactcctgaaaggcaatatcagaagttctgcctttctggtaatggctcccttaactgtttttttatagaatgtgggctgttatggtaatgagagggtgcctaacaaggaaggaattgtagatcgcatagcgtggggaaagaaactatatcgactttgggaaaagtttcaggttactcctttgagctgtgcttgctgtttcattttgcttttatgatggcacgcaggagtgaggtcagtgtgtttttc

SEQ ID NO: 73323 - DNA, 1124 bp, Homo sapiens
ataatcataagttaccaccaagctgtttctatggagattaataattagttgagaacagaaggaaataaatctctctgtaaatttacttgagagagagatatatataattagaataaatcacaaagcttggttctgatagtttatggagacacaaaggttgctttgttatgcaaaattcttttaaatattttataaaagttttatatgatagatttattttctgttcttttttcatggcataaacttatttggagaaagtgatcttcttaacattttgtttttattgcctcctagatgctcactctacacatggaaggtccaactttagagatgaacgatctagtaaaacatatgaacgtttgcagaaaaaattgaaggatcgccaaggaacacagaaagataaaatgagcagtccaccatcatcaccccagaaatgcccttctcccattaatgaacataatggacttataaaaggacaaattgctggtggtataaacacaggatcagcaaaaatcaagtctgggaaggggaaaggtggtacacaagttgatacagaaattgaaggtaactgtttgaagtactgaactgttctcattgatgctattctcgtgatttaacctactaaaagtatattctaacctttcagtcattttgtcatggtccaaatagactgttacaggctgctgctttcgacagtttggaaagcctcaattagtaatttcatctatatcgtaaattttactgactgaaatttctatttgataggaaaactcagagaacattaatccagattcctttcttctgattctgggcgtttgataaggctatgctgctggtttttaatcaaaactttttttttttgagacagggtcttgctttgtcacccaggctggagtggcacgatcatagataactgcagctggaaactacaggcatacaccaccacacccagctaattttttaatttttagtagagacagggtctcgctgttttgcccatgctggtctcgatctcctgggctcaagcagtcctcccatcttggcctctcaaagtgctgcaattataggcctgagccactgtccccaacctatcaaaactttttatttctcccaccttctttttg

SEQ ID NO: 73324 - DNA, 1800 bp, Homo sapiens
caccacgcccaactactttttgtatttttagtagagacagggtttcaccatcttggccaggctggtctccaactcctaggctcaagcagtccacccaccttgaccttccagtgtgctaagattacaggcatgagcctactatatggactttgagcactattatttgtatatacttgaatcaatctctataaggtaaaatatagctgggttaacagcctgtctttcatatgcctacagttgtggagttagtacccagtacttttgattgtaatgttaagcttgtaactactgcttactttgattaatgtagtttctatatgtatgttcttttaggtttccttaatactgactattatctgtttgacgtagatatgcgtatgtagaaatacatagatatgcatggtagaccatgtcaggttctaaaggtttcatcagaaatgactatgaaccataccaacatgtcatttcacaagcaccaataaccacaactctatcagtccttgaatatgcttatctaaattgatatttactatcaaatagtgtaggtaattaatatatgactaggaactaaaatgcttccaactttgagggaaatatcaaaatgtaagccatgtgaactcttcctaccttccttttccttaaaatttccatgcctcactaacaaatttcaaataatgtcttaactgttcatgacttatatattaacaacatttacataaatgttctcccatttatttgagacctgatcatcgttttcagcactgatgtttcagaagaaattaagttaaagttttttgcctatcagtggtggctataagttacagtcaagccaattatatttctaatttgggaaaccataactaaggcatgtcatgaaaaaatagttaactttattaagaggtatgagattgacaaatgagaactttccagagagaatattcttacaaccatgaataaaaatatacttgatataagaaaaatttggttcagatagatatagctatgtctaaatatatatagatatatctgtatatagtggtgttataattagtagtcacagttaagatagaaataaaaactaaagtagataaatgctgaagggccacaaactgctgagtatgaacaaaggaataaaaactagaaaataaaagtctcaaataccaacctagtttcagaatacatatttagggagaagaagggattgtatctaagttcttttttttaaatattcaaatgttttatttttttaagaaaaagatgaagaaactaaagcatttgaagcacttctttccaacattgtcaaaccagtggtaagtatcttatgtattttattgatgtttatatttaatatattagcataagatgttcatccatcaaaatgtagtttttttcttttaactttttatgaaaataggatcatactgtattctgtgacaagctttttcactcactatggtatgctttagctatctttctatgtcattacctgattctttgaagagctacatagttttgtcattcattcatcaaatatttattgatcccttactatatgccaataaataaaaaacaaatgcacaaacagaattctgtgtgatagtaaagattgctattatagaaataggaatgatatgatgagattaataggagaggttgttaggttaaatagagcaatcagggaagctttctctgacaagtgagaaaaagtgcaaaagtggaaggaatgggagagggagaacaggtgtaagtaagcatggggagttggacagagggaaagaaccattatcactggagtatagt

SEQ ID NO: 73325 - DNA, 1118 bp, Homo sapiens
agcatttacttgttgtagtatatattaaaagtataattttcaggccaggtgcagtggctcacactttcccagtcctttggaaaaccaagacaagaagatcacttgaggccaggagtttgagaccagcctgagtaatatattgagacctcgtctctacaaaaaacaaatacagatactacagaccaagggggcacacacctgtagtcccagatacttgggatgctgaggtgggaggatcccttgagcctaggagttcaatgctgcagtgaactaagattgtgccttttcactccagcctgggtgacagagcaagaacctgtctcataaataaataaatatatatataatttacagacaggaaaagtaaatcttaaagccaattcaaagactttcttactcaacattaggaagaacatgtagtttaataagatagtgagccctgtatcataaagtaatgctgatggttttatttgctttgttttagtttatagtttgaatgccgattcctctttgattaaattaattgtgagctacaaagtgcaggtcagggtttttgcttgcttgtttttgtgtgtgtggttgtttttgcatgctctagttcatttagagcactaaattaaatgtgttcattcactttttcattccataaatattttaccgcttacaaagtgacagatgttgtgctaaagctggagatagaatggaaagcaaaggatagacacgggctctgccacaaggcttagttcagtaaactaagcatcacacaatgaatgttaaattgtaacggtgaagtgccaggacaaaaagatagagagcagtcagagtgtgtaataggaggactaaaccttgacaaggaatcagggaagttttcctaaggaaggattattgtactgacatttgaaggaaaagtagtggttgggcattgaggacaggggtggaaagtgtgggaacagtattgcaaactgagcagcatttgaaaagcactggacatggcacatttgaggaacaacaaaaaaaaaggaaagcagagaaaagctcactcatgtgaccagagtgcagtgtataggggagaatgtggtacatgcacaagtctcatagtctcaactgtgtacttagga

SEQ ID NO: 73326 - DNA, 1056 bp, Homo sapiens
ctcattttgttgatgaggcctagaaccctaagagggtgagacttcagtatcaccaggcaaattagtgacacatcttgtgcttccctatttaatattttctctactgtctgtactccccacagatcctgataaagcaagcttcataaagtaggtgccaggctgggcatagtgactcacacctgtaattccaacactttgggaggctgaggcgggagggtggcttgaggccaggagctcgagaccatcctgggcaacatagcaagaccccatctttactactactactactactactactactactactgctactactactactactactaataataataataataataaagtagatgccagttaatgcttttgactgacccaccttcatagtcctattcacgttctcaaagtttaacacaactattatcatcccataaaatcaagagacacttatgggtatacatacatgtatagtagcagtttgttttaaaaaagaaaaaaaaacctgctcagtttcaagttaatagccagctgtatactggatcatacaaagaatcatttttaagttcattgtaaatgaaacacagtaccaagactttaagacagtattagagtgaatacagtattacatttcctgtgatttaacagaagcaaaataaatatagtaatagttttttttattcagacttcgagaactttgaaaaggacagaatgttacaattttatggagattacttaattttactttaattcaagataggagtaattgtcatcctagtggttattagtttggttttagaaatgctaaggtagttgttaaacatatataattttaaagcaagcttttatataaatgcctacatataatctggtacctttctcaccaatctgtaaaccttatctaatctctagatttttttcgctttaacaaaagtaacttgtactcataaaattattccagtagtataaaaatatataaaacataattgaaaccacatgtttttttctgtcacaactttctctgcgtctcaccacacttacacaaaatccccaaag

SEQ ID NO: 73327 - DNA, 1023 bp, Homo sapiens
tttgttttttggtgttggttttaggcacctagtgacaatggttctaaaatccaaaactttgtattagaatgggatgaagtaagtaaattgaatctttttaaatggttaacattatgtgcatatgttcaggcaaaattaacttttttgtttgttttaatcatcaagtatattcttctgtcaaaaaaagtatgaatgattttgtgtggtgcatgagtggattgatggtgttttcagaaaacattcctgacttaacttccctattttcaataaatcaccatcaaaattattatttaggtaactaccttgataaaggaacttttttttcacatcagccttaaagacaagtgtattcctttcctatggctgctataacaaattaccccaaacctgacattaaaacagcacattattctcttacttttctggaggccagaaatccaaaatgagtttctctgggacaaaatcaaggtgtcagcatggccaggccctctccagggactttagaggagaatctgtttccttgccttgaccagcttctgtaggctgtcctcattacttggttcatggccacatcacattgcgttttctccccttgtttccatcatcacatcaccttcctcctctgtcttcaaatctgtcttccttttttaggaacacttatgattccatgtagggtctattcagataatccaggataagctcctatctcgagattcttagtcacattgtacagtcccacctaccatataaggttatattcacaggttcaggggattgggacctggatattcatggtggccatgactcagccaaccacagcaagcatactggacttcattgtttagtacaggggtgtccagtcttttggcttccttgggccacacaaaatactacatttgtgcaaaggtagttgctgtttttgccattaaaagtaatggtaaaaacagcagttacttttgcaccaacctacattaacactaacaatagctaatgagcttttaaaaaaatgacaaaaatatctca

SEQ ID NO: 73328 - DNA, 1082 bp, Homo sapiens
tacagtatatgaattatatctcaatttttttaattcaaaaaatgataacgttcggaaaatttgtaaagcattgtcactagtgctggaaatagccatcccaaacctaagtgacatcctcacctgccagcacaattaacccttcaattatttacttagacaaccatgtgttaaaggcaagttaaatatgttaactacttacagttctattcagctcttgcacgatgtctctgggaaatctctgttcttgggatagcttactgatggtgaagttaccattggctccaactctataaactcttccctcaacacaaagatcgtcttctcttggctactatatttactgagactaagtggcctgcttcatcttctaccaaatgttcaataagcatttccgggtctacccactgaagacagaagcatcgaggtgaggattccactcaacagagcattagtcatattgcacatagtagaagatgaagagaaacccgggtcttttcacatattcattattgcccatatttctattgttagacatcgaatgaagactttgttttttccttttccagggatatggttttaagcctaaatatgatggagaagatcttgcttacacagtgaaaaatctcagacgtagtactaagtataaatttaaggtaagctttgaaaacccttaaacgatttgttccttgttcctattcttactggtgtggtggggttctttgttttctgtttgtttgtttgtttgttttttgagacgggctcttactctgtcacccaagctgctgcagtggcacaatcatggctcactgcagccacaacctcctgggctcaagtcatcctcccacctcagcttcccaagcagctgagaccacaggtgcatgccaccacacctggctaacttattttgtagagacgaggtttcaccatcttgcccaggctgatctcacactcctcggttcaagtgatcttcctgcctcggcctcccagagttctgggattacagacacaagccactgcacccaacctctattcttactgttttaaagacaagtatatacttcactcctttggttttagatctt

SEQ ID NO: 73329 - DNA, 1082 bp, Homo sapiens
aagtctagtcctaattaaaagacatcttttttttctttttggcaggaaataggtcatttcatagaaataaacactgctaaatgtgtgattcaagaataaagttcactagtcataaaacttactactaaaactagtatgatgtgagttaaattttagaagttaatccttctctgatatatctgtatataaatctaactgaataaactaaccttcagaagattcatagtatctaatgacttggtctaggtgtatagaggctgagcaatgtaaataaatgagaacaaaaagaacatgtaaatgcaacgatacagttgttcagcactcttacatttgattcactgtatttctggaaatcacaatttaaagtggatcataacaggcaaaatcctaactgctacaaacaaagaaaaaaaaaatccaggaaaaaaaaaaggtcttggtgaggtgccgccatttcatccgtcctcggtttctgtgcctttcgcagagcttccagcagcgctacgttgggccagagcatccggaggttcacaacctctgtggtccgtaggagccactgtgaggagggccctgggaagaatttgccattttcagtggaaaacaagtggtcgttactagctaagatgtgtttgtactttggatctgcatttgctacaccctttcttgtagtaagacaacaactacttaaaacataaggatgtttcagttcatccattaacagatatgaagagcattttaagaggtacagcctctggaagtggatcaaacttgaactcatatggcatactagatatgtttgtcaataaacttatgacattaaaaaaaaaaaatccaggacaacccaaagtgaagtgaacatctttttatggtgtaccttatgaaaagcaagaagaaagaaaagatatgacataaaatgtaaagccataaagaatagaaagagactggctggaataaatctatcagtgtttaatatccattcataccgttagaaccttctgccatctccactacatatttattgatggttgctccgccattgtcttttggtggatctatccaaagaagcaaagtagtattaggca

SEQ ID NO: 73330 - DNA, 1470 bp, Homo sapiens
cttctaaaatttaactcacatcatactagttttagtagtaagttttatgactagtgaactttattcttgaatcacacatttagcagtgtttatttctatgaaatgacctatttcctgccaaaaagaaaaaaaagatgtcttttaattaggactagacttcctctgatactggttttttgtactctttgtatgctataacgttattactggaccagtaaacacatttaaaatgcttaattaaaagtaaattatcaatctaggccaaagtctgtacagagttacagagatatttcacttccacaaagccatgcagacttgtctaggaagctgcacacataaagaaaattagatcatttccaggaaaccgaaacaaacctaaattgtttctgacaaattacacaaatacttactttgtgaagctaggatacctgatgtgtccatgataccagaacgttaaacattacctagtatctgattgaacacaattcctcaccttacaggaaacaaatgggaaatgatatacagtggtgctaccagggaacatctttgtgatcgactgaatccaggctgtttctatcgtttacgagtttactgcatcagtgatggaggacagagtgcggtaatacttatatgtagattcttttgtgttgttattaagtttggccaaatggggtaggatcaccaggtgccacttcaaatattgaaacatatccacaaatggagaaaagtaacttctgtaacctgttgggttaatttgatagtgaccaaaatattctaatgtggtacttagctcacagtaagtattcagtgtgtgtctgttgtctggttggtattcagctttggaaaaacaaatacatgaaaacattggagaaaattttataaagataaatttgagaatgatgctcaataaccatactaagcagagatagaaataaaataattatagaccgatttactgctccataaattatgtgtgtgaggacacatcataaaatagtatctgctgtttaatctactttctaatatttacttacttcaaaaaagttggccattattttattattagagactcaataaccaaaatgaacttaaaatgtaccattgatataaagacataatgttctagggatgtatgtttattaatgagtgattttttttttttttgggaaacagtctcactctgtcgcccaggctggagtgcagtggcacgattggggctcactgcaacctctgcctcctgggttctgcaacctctgcctcctgggttcaagaattctcctgcttcagcctccctagtagctgggactacaggcgccccccaccacaactggctaatttttgtatttttagtagagacggggttttaccatgttggccaggctggcctcgaactcctgacttcgtgatccaccggcctcagcctcccacagtgctgggattacaggcatgagccaccgcacccggccaagt

SEQ ID NO: 73331 - DNA, 1025 bp, Homo sapiens
gcaagccccctcaagtgacatgtagatctgcaacttgtgcacaagtgaattgggaggtattgtaatttccattgacttgtatctactttcttaagtgaatagaatagtttatataaaagaataaagatactgttcatttttaccgcctatattatacagagtaagccctagtttaattcacatgaaaaacagtgacttctttttcctctttgaagaatttgagtaaggtatatttgcattacaaatatttagattcctgttcattatgtgctttgtatttttatgaatggctttgtctcagtactgagatatttcagccactgtaagtttaatgttcagaatagacatacacaggaattagtaaattctatttctcttatatttatccagtacacatctccagtgtacttattgtggatagtaataatcagtgatgataattattatattttcagttccctttgaaatttaacaaaatgtgtgtatgcttttaacatttcatattaatagaattatcttgaaacatatttaccttaaaacactctttctaaagtgacttagtcatatttctacttctaattcaaaacagttatatatttgaccaatcttaaattcagataatcttaatgaataaaaaatgtaaaattgaacagttttgattgtgcttaaaagttttaaagaaactcaaaagcaatctagttttacatgtgctcaggtaaagagcatttttggccaaaagctatttaatcaacatcaagactaagacctttatccttttcttaatttaaaggttcctttgagtaatggaacagatgtcactgaatatcgactggagtggggaggagttgaaggaagtatgcagatatgttactgtgggcctggtctcagttatgaaataaaaggactttcaccagcaactacctattattgcagggtccaggtaaagatgatcagtaccttgtcacttaactctatccagagttttatatttcattggcattttcatggtcatgactttgttaact

SEQ ID NO: 73332 - DNA, 2879 bp, Homo sapiens
ttgagaaaagcaagaaaatgcttgaggaccgattttgcttgttctctagctgccctggggcacatctgcactccttaattcatctgtgaaccgtataagggtagatcctcgcttttgaaatttctcttgcccctatgcaacaaacagataagtactttaatggacaggtatttttaacatgtcatttaaaagataaaatcaatggcattcactggctttcacatgaaaaacaattctaacactagccagttttaacacattttctgtccagccttcacacgtaattcttccttctaatattttattaacagatttacaagggtcccgactcttccttccggtattccagccttcagctgaactgtgaatatcgcttccgtgtatgtgccattcgccagtgccaagactctctgggacaccaggacctcgtaggtccctacagcaccacagtgctcttcatctctcagaggactgaaccaccagccagcaccaacagagacactgtggaaagcacaaggacccgacgggcactgagtgacgagcagtgtgctgccgtcatccttgtgctgtttgctttcttttccattttgattgcctttatcattcagtactttgtaatcaagtgaaaatataactttattttttaactctattacattttattttgtcatgtactaaaattatttctgtattgcttttataaaaaacagtggcatttagcactggcattgagactatagcacatcatttttgccattttcagtgcttatattgttaggtagaggctggcactttattagaatgcaagccacaaaaatatcaattttgttttttttgttagggtgggtcttctttttttctttccctctctctttttttaacaaatgccttcttatagaaaaactttctaagaggcaacaatttagaatggatattttgacgaatcggcatgagtgtaacagtgataacctgatctgtttgttttaaagattattaccaagtgaaaaattcagaatgaatagaatttacactaacatgctatataaaatgttaaagtctgatgctgtgaaagcaatctagtgctatatttctacctcctcatttgtcttaattatttggtaagtgggattatgatgagtaactggaggggcttagaaacaaaaactggatgaaagagtatgcatgaagaaaagcttctttgataaatgtggagttcttcattataaatatatattcatgaattcacagataagtacttaaagaacagacagtttacttggcctaaaaatattttgatgtttactcaaaaagtacctcttcaggtcttgagaacatggaaaagaattgagtgcttttaaatactttttagaaagtaatcataaaagtaaattgaatttcaaacctatttggcttctgttttgtgaacctttgaactatatgtatgtgtataagggtatacacatacatatatggcatataacaagtgtacacatatacacataacaagtgtagaagtatatattacatacatacactcactctgtctggtataggctaattttgaagaactcccataagtttctgctgcttctcccataactgctgccaccaccatcagaattcataatcaaacctaacctttttgtttggggcaccaaatctgaagacaaaattaatttgcaccagtaaacttcaagctgctttctttcttgaaaactaaacgtttaacgtataatgtctgtttggatactgttccaaattgttgattgcatgtggttaatgttgcattagagcactttgcaattgcataattcattaatgttttgtgagcttgcatttgtgagttattggatgatcagactgaattttgtcaagtatcacattgtacatcttgcctagatgtcgatgactgcaagtaataatacagtttataatgaaactatctacaattcttgttttagcacatctgttatccgtaaaacacctgtaactagcttttttaatttattatttgaattttaggatagcgaatcactaatttttagttgctgaggttggcattttagtgattattaagcacttctgtcagtctttgaaaaaagaacgtattttttgtgctttgaagatctctgaagaatttcttttataatagaatgggcatgtattgtaacagttttatgtcaaatgatctgtgctgtagaaaaacattaacccttgttcaaaaaagaaatggataaacttggcctttctaagtggtaagaatgacctgtcactataatatactgtatgtttacattttatttaaatttaatctcttatgtatagggtgataaccttccccagaaacaacagtgattgcgattgttttctagaaacttctttaaagtgccacatttggcagtacaaatgagtctgagtgtaatagcccagagatttatatatagttgaatgtctaaaatggtaaaatgtgccactgtgtcaagttacagtggcttatgtttttcatagtaattcaaatgaacttcctatttttgatagtaaatgtcatttaatagtatacttgccatttgagcctcactgcaaaattagtgcagaggagaaaacaatttttaatgtaatcttgattttacctcatatactgtacattccaaaaactctaaactttttaaagattatagatacactaccaaacatatcaccttaaaattgtataaggctgaatgaacttcatacaaatgaaaaaaatctcataaaaatacataaactatgtagcaaaagtatctgtaaaatccatggaaaataaaagttgtatcattctttttgagatacgtttattgtattcatatatattcattatttgctacctgtttaagaaagtg

SEQ ID NO: 73333 - DNA, 2035 bp, Homo sapiens
aacattactaacctttcctctgtcacactgattgaaaaatgatctatttagtttgttgttttgtctttaattttgtaagctttaaaaagttaatattgcccttcagacaccatcccaacatcacataagaattttttcatgttataaattctttgtggacatatttgataactgttttattatgaggaggaccataattaattcaaccattcccctattttggtcatttaggtttttgggtttgggttttttgtttgtttaacgtctttgcttgctattttaaagaatgctgcactaaatgtgcatgcatgagatttcttctctgtatttagaatattttcctagaatggattctcagaagaattctcagtctgtggagaggaacatttttaatgcatggaagaggtatttattccagatagaaaactaggcaatattagttgttccctgtaagattttaaaaaacagccatggcaccatggaggactcttcgagtatatagttttagcgctgggctttgggatcacacttcacaacaccagtaactccacaaatgcattcctagaggctctgtgagaggctgggtaactttttcttgaaaaggccagataataaatattttagactttgcaggccgtgtggtgtctgtcacagctactcaactctgccacacgaaagcacccaaagactatataagtgaatgggtgtgtctgtgtttcaataaaggtttatttatggatactgaaatttgaatttctgacagttcgatgtgtcacaaaatgttcttttgatttgtccaactattttaaaatgtaaaacccattcttaacctgtgagctgtacaaagactggcagtggactggatttggcctgtgggtggtagtttgccaaccctcaggctatataataggtgacttggtaatagacatttattatattgagggttctagatatactgcaatgatagggtggattttataatgaaaaccctaaattcagcatgtatctcataattacctttcgtattttgtatttcagctggagttaaccgaatttcatactggcctgctgatccagaaataagtttgcttacggaggcttctagttctgaagatgcaaagttagatgccaaagcagtggaaagattgaagtcaaacagtcgggcccatgtgtgtgtcttacttcaacctttggtgtgttatatggtgcagtttgtagaggagacctcttacaaatgtgactttattcaaaaaattacaaaaacattgccggatgctaacactgacttttattatgaatgtaaacaagaaagaataaaagaatatgaaatgttatttttggtttcaaatgaagaaatgcataagcaaatactgatgactataggtttggagaacctgtgtgaaaatccatactttagcaatctaaggcaaaacatgaaagaccttatcctacttttggccacagtagcttccagtgtgccgaactttaaacacttcggattttaccgtagcaatccagaacagattaatgaaattcacaatcaaagtttgccacaggaaattgcaaggcactgcatggttcaggccaggttattggcatatcgaactggtgagttacatagatcgtaaattggggctgattggttgggttgtatttgtctctgaagtgttcgtctcatttatggtagagttcatttactcatagttacttaagttttgctgttcatacaatatagagaagttagtgagacccttgagtagacaactctttctcccagcagttttgggattccttgtagccttatattcagtaccacatttctacatcaggccctcattaatctaggcccttctttctgcttcttgcttttatgatttcactgttccttgagccctccactaaaggtaggacaagaagagaaaggagaggcccagtgcagtggttcatgcctgtaattgcaacactttagaaggctgagacaggaggatcgcttgagctcaggagttcaagaccagcgtgggcaacatagcaagac

SEQ ID NO: 73334 - DNA, 1005 bp, Homo sapiens
taaagcaggaagattgcttgagcccagtagtttggggctgcagtgagctacaatagcaccactgtactccagctccagagacacagcaagactctatctccaaaaaaagaaaaaggagaaaaccaaaattattcatttttgttaactcttcaatattttgatgtactgaatatttaacaatttttaaaaaatctttacaataacattaattcaaaataactaatagaatcaaggtaaaggaatggtgattattgcagattcttccagttgctggtatgtcttcaatcagcaagttgagaaacatttttactgtattgtattaagttgtatatttggaaaaggaaaatattacttgggatttttctttgttatgataaaagatggcatctgtatttccaaacatggaacaatattatcacatcttacctgatgtaagatttctcaaagtagaatcatgatcactttttaaaatgcatctttgtgataaaggggaaaaaacatagacaggaggagcagtagagtaagatttgtttggggagtgtactgtagtaggatttaaaaattatcccaagaaagaagagaaagtcatcagaaaaggtctctacagatgctgctggtctgcagtagtcaacagaagggaggttctcagctggcagcaaatagaatcgccattgaaacttttataaaaagtacagatgctatactttttacttttataaaaagtacagatgctatactttttacttttataaaaagtacagatgctatactttttacttttataaaaagtacaaaccccaacccagacctattaaaccaagtccctaacaaaatatggccaagttctatgtttttaaaagttccacaaggtgttctgatgttcgcagagttaataattgctcaattcttcttaaagattttgattctgtaggcacacattatatgaccccaaacaattgcattgtgtaaaagtctggtttcatgtaattatattctattgtgggt

SEQ ID NO: 73335 - DNA, 1044 bp, Homo sapiens
acctcttacttagaatcaataaattatttttagttataataattgtcatgttcaggttgtatcataacacttttgtgggtttacatactttgaacattcagtaattcagcaagtctaaggcttgatgatcattattaataatgtcataaatctgtttttaaaacagctcaattttagtgtttaaagatttttctaaaaaataacttaccctttcagaaacgacctttctgatattttataattttttttgtaggtgtcaagaaataaaaccagaagaaagaagcatgatttttgtgacaaagtgcccatgtgatgagtgtgtacctttaattaaaggtgcaggcataaaacaaatctatgcaggagatgtagatgttggaaaaaagaaggcagacatctcttacatgaggttcggggagcttgaaggtgttagcaaatttacggtaagtagatacacatttttttcaggtgtattttgtattatgttgttaggtaccctgctgcaatattgtaagttagtgattcccacccttttaaagagtttcaacaaattattattattattattattattattattttattattattatttgagacagagtctctctctgttgcctaggctggagtgccagtggctcgatctcggctcactgcagactccgcctcctgggttcaagtgattctcctgtctcagccccccgagtagctgggattacaggcgccggccaccacgcctggctaatttttgtatttttagtagagacggggtttcgccatgttgtccgggctggtctcaaactcctgagctcaggtgatccgcccgcctccgtctcccaaagtgctgggattacaggcgtaagccaccgcgcccggccgagtttcaacaaattattattattattgagtttatttatatgtgcaaacccttacctaactgcaactgttcagctaaggattcctgccttatgaatttacatctctgtagagaattgagccagtggatcttttggtgccatctggtggctgataaaagaaaaatct

SEQ ID NO: 73336 - DNA, 1061 bp, Homo sapiens
caccctttatttcctcaaatgagaaataaccacataattacaaccataaaaatcaggaaattaacattgatacattactgccactaatccacagattccagtcaaggttcattagctgcccaagaaatgtcttatatagcaggtttccccaacccctgggtaccagttaagaagcttcttctgtatttatggtcactccccattgctcacattactgcttaagctctgcctccggccagatcagcagcggcattagattctcatgtgagtgtgaaccctattgtgaactgcccatgcaagggatctaggttgtgcactccttatgagaatctaaagcctgatgatcccccattcctcaccatctggtctgtggaaaaacttccatgaaaccggtacctggtccctggtgccacaaaggttggggactgcttttatatagcaaaaggatcctgtccagaatcatacattgtttctatgacatccaatgatttaatcctggcattgaatgagttaatgtaacatttaactactagaatttgcagtgggaagaaaaatgatataaaagaaccgtttatatatttcagctttacattcctgccatatacatcagtttgagtccaggatacctggaacatacatatatatgattaacttggacatataacatataattatatatgtatataattttaaatatagaaacatactatccagtgtctgtcatgtgtatatgaagtatcataagtttttaccatttgtaatattgtcatttttttctaattgtcttatttaaagtttatcacatttttaaatgagggggtgttgacatggcactgaaagaaggcagagatgggaaagataccttttttgtaaaactcaataaaagcttatatccaactagtcagagaaatctctacttccgtgtttttgttttctgtctcttcattcctcctgaagagtgtgaataaataggtttttcaagttctcctcataaagattaagtgacttaatcataaagattaaggactatgagtgatgggttatggagaattctgaaatat

SEQ ID NO: 73337 - DNA, 1186 bp, Homo sapiens
cactcaggcacatgttccaaaggctgttgttcatggttgttctctgttctacctccagtgaagatgagctgtccatcttctcatccttctcatctggcctggctgcaaatattatgtagatggttagctagatacctagttttgtaaatgcaagtaattaacatgaactagaatttgttctaaatctgaatttcagtaccaagattatcaaaaatagtgtgtgtcaataaatttggtatttgtttttaagattaaagcaaattgaaattactttgaaagattttttgctttcctttttgataagttaccatagaccttgagataagtagttctattctgtggtgttgtcacaaaccaggctaggactgggcaacactgtttccaagaatagattttatcaatctatatccatgtccacatactcagttctttgttttctctttaatatgtgtggatttttctctattaggttatattacttatttttattatgaaagtagtatatgctcattgtagaagactaggaaaataaaaaagaacgtgtattatctcacaactcatagataccacaattaacatgttgctgtattttctgccactaaaagttctttaaaaaatattttaaataatttaacacaatattccaacccataggcctaacttatttaaccattcccatgttgttggacacctggattgtttctaagtttttacagttataagaagcctttttatgaatgtccttaaacataaattcaggattacttgtttttactttgtctgcccaaattaataggttttagtggtttgacgtctttcaaaaaatgcctaattttaaacatttttttggtaatttctcatgtagcttcctaccctttctaagtcttctctctttcttggtgctagcctaaaccatcccattcgtttaaataaccaaccatttctagatgtcctccctttccagggacttttaatacatggtaaaatgtttgtcctgtatctcatcccccctcaaggctcgtgatgttaactagttaatctgatgagtgaactgatgcttatggaagaggctcccgggtaatccatatttgtgtcctgagatggtgccctagcagggccttttggttaagtcattagtgattctgatagagattctatccagctgagaaaagaagggctgtgctat

SEQ ID NO: 73338 - DNA, 1031 bp, Homo sapiens
gtggcctccctggccagtgcccttgcaggaggccggccggcagcctgatgacccgtactctttagtcactgacgtcagattatttttataacgttccctgacagttcagagtcccttcgaattgcacttttctggtttcgcttatttaattaaaagagatgagtgtaagtataaaaaatgaaggtgaaataaccattggaattgtatttggttacttaatactgttccacaacatcttgggacgtctgttttcctttggagagtgaggccttgttattattcttttctgataaagaaaacattttatttcctttgggcttgcattagctctttcctagcaacccattatcccagctcagtacctttcaaacagaaaactagagtctggggttttgttgtgatctgaatttgtaagttattaatgtgaaagggggagcaggaagctccccctttgcacaaagggggatttgtttgcacaaagttcactgtaaatactgtgagaattgaattctgaaaaggtcatatttagtgatttcaaaagcacacatttaaatgaagactgactaaataaaaggtaccacacacttcttggttggtttcattccattgcatgtgtgtggctgtgtttgttcttgccaccgttccaggcagggaaagccttatgctgccccagggccccagcacaccttcctgtatgccccaccaaccagtgaccctgcacccgtcccatcgtcaaggctgtgaactagggatggtccagggcatcagaaaccatgtggaactctcccccactgctgcctgggaggttccccagctggaagcgtcctagcgttaggccagtagggactgagatcataatgttcttggacgaggctcttggccagagccaggcatctgcccagaagttaggattgctcctggagaaaacactcaggagcaccctccccttggaaatgtcccagaccctcagcctcataggcggacctcctttgatggctctgggggagcaatgtggctgtccaaggaggggc

SEQ ID NO: 73339 - DNA, 1034 bp, Homo sapiens
gcagtaggtttgtttacaccagcatcaccacagacacatgagtaaatgcactgacctacgatatcacaaggcaatgggaatttttcagctccattatggtgctatgggattacagtcgtatacatggtctgttgttgactgaaatgtcgttatgtggtgtgtgactgtattgatcaccctcactgagaattagagtcaggggcttctacgcattaataatatcagtcacgcatgaaacgcgagtagtgtgggtgaggtccctggcctgcactgctgtagcgtgggtgaggtccctggcttgcactcctaagtatttgtttctttttgtttcaggtgtttgtggccagtcctcacaaaacacagcctattgtggagatcctgttaaaaaatcagcccaaactcattgagtttctgagcagcttccaaaaagaaaggacggatgatgagcagttcgctgacgagaagaactacttgattaaacagatccgagacttgaagaaaacggccccttgaagagctccccggcccctgtcacagtcagtcgtctcatttgtccagtttgtacagtgtgtcatttcagaaagtcatcattcttgggaagactttggaggtgcctattttttctgctgtaattgttctgggtagatggagtataaacatttgaatggaaaaaaattaacctagaataatatattcattttagtcaagtctgtgattatttatgtgaaatgagaaccattgtatcagatgttgataaaagcaattttaacttgcagatgtgagcccctgggcacaatgagccgctaaatgggagctcaattgacaggcatcaccaagtcttcaaggaggactgagttctcaggggagaactgggaatggggccagggtgcaaaaatgctttgcccatctgtaggtagacacacagatcgctcagggcactgagagatcccagaaggtaacgttaatgttttcagtcattgtgtgtcctttgttgctgccaatgtctttggactgtaatcagtgcatccacacct

SEQ ID NO: 73340 - DNA, 1048 bp, Homo sapiens
aattcaggataatggtcatctcaggagaagaagtagggaagagaataagcgatatcatacaggagtgtccaatagccttcaactatatctgtaatattttattaaaaaaaaaatctgaaggcaagtatggcaaaagatattagattttgatagagccaatggtgggaatatgaagtctgatatgttactcttgtactcttccatgtgttagaattatttcataaaaagtttcaaaaaaaagaatgaaacaaaaatagagtgctgtaggcctggaaaatgcctacacattataaaatgataggccctctcaagacccttggaccgaaggaattgtagaaggctgtgtatcatatcattcagctcccacagaactttaaatgagaataaacttcatataattttgttcaaaaatgcagtattatatatagaaggaaacagtgggttgcaaaataaaaataacctatttccatcctctgagaagatcagaatttgggtcacctaatcattggacagggtaggtacatttaaaaatagttgaccgcttgtttacttgtatgtgtgtaacttggcctgccccgtaccccggctatgttccttccactgaagtatgaactacattgtttacttgccaaaaatattttgttatttagaaaaaagtaacagctaagtcctaggattgttttcacatcgtttaattaataggtttttttccccagagcaccttccgtagggtgcaaagaatgtggaacccagtcctgaaaatgtctttgctggattgttaatggctgactctcattagcctgctaataggctcagcacgtgcttcctactattggtgagcaggatagtgtggtgggaaagccccgatggaggtcaagagagcaaggtctttgttctgtctcagttgccagcagccactttgggcaaatccacctggatgcattttttcacttgcaaaatgaaagtgctgaagtgtaattctaagatactaggtcaggagacttttgtctctggtcctgactctcccagagatgtgcccaatatggat

SEQ ID NO: 73341 - DNA, 1025 bp, Homo sapiens
tgacctcgtgatccgccctcctcggcctcccaaagagctgggattacaggcatgagccactgtgcctggccctacaatagatttttttaacaggtggggtaggtgggagaattctatttgtaattctgtattcccagcctaactattgtaaatagtttagtacattttatttttcagtgcacacattccagagttttttctacagctgtattcacagtgtaccaacaactgatatcctaattttattacttaatgctataccataagtaaccattttcattattgctataaatagtttttagagccagtatatttctcaccatcatagtgtatcattgggtatatttcttctagtttaatagtcctatgtcattgatatttaggttactttcattttttcctactctaagtaatgctacaatgtgcattttatgcatccagctaatttttttaatatttaagattcttatcttctgatagatacctagagtggaaataagcattcagagagttccagatttttttggttcttttttctaataaataaaaaataaataataaatttataataaataaaaaaataaatatttttctaaataaaaaataaattttatttattttttaaattcagagacagggtctcgctctgttgcccaggctagagtgcagtggtgtgatcatggcttactgcagcctcaaattcctaggctcaagcaattctcccacctcagccttctaagtagctgggactatagacacgtgccacctcgcccagctaagttttttattttttgaagaaacagggtcttgctgtgttgcccaggctggtctcaaaatcttaggctcaagtgatcttcctgcctcagcctctaagtgctgggattgtaaatgaacacaagttggattgctcaccacacgcagagtccagttaacaagaggcaggtctggtaaaaagaaagttactttattagccaaaagtaataataggaaagtggccagattcccatccaacgcaactactttga

SEQ ID NO: 73342 - DNA, 1009 bp, Homo sapiens
ccatttctttccaattcaaaagtaatacatggttattatttaaaaactaaaacattttagaaatgtagaacagaaaaagaaagtacatcccataatctctccaaacgaaatcattagtgacaatttggggactacacctctggttttaattctctattgcaatgattattcttctgtttttcaacccaaacttttaactcattccttcacatcctgttttgtataaaccatttactcattgtttgctatgtgccagctgttgtaatgtctttacttatgttatgttgtttactttccaatactatgaggactacatattatttttttaccattttacagatgaggaaactgaaactcagagagagtaaggatattgctcaaggttatatggctaatacatgacagagcctagttttccatgcagatctgacactaaatcccatgttccttaccattaatatacctttaagaagattcgaggactgttcaaatgtgaagggagcgggaattgttgatgctcctgaggacagggtagtggaacagttgtaccataatcagttttacctgttaccattttctttttttttttttttgagatggagtctcgctctgtcgcccaggctggagtgcagtggcgtgatctcggctcactgcaacctctccctcccaggttcaagcgattctcctgcctcagcctcctgagtagctgggactacaggcccatgccaccacgcctcactaattttttctatttttagtagagacgaggtttcaccatgttagccagatggtcttgtgatctgcctgcctcggcctcccaaaatgctggaattacaggcatgagctaccgcacccagcccctgttaccattttctaatttagcactgaatgctagagatttagcccttcttaaaagtcaggatttttaccgaattatccttgtgaagtcactttaaaacctagggcataacttgattggtacatttacacatcaaacaataatataaat

SEQ ID NO: 73343 - DNA, 1026 bp, Homo sapiens
cgtctccaccaaaaccagtcaggcgtggcggcgcgtgcctgcaatggcaggcactgggcaggctgaggcaggagaatcaggcagggaggttgcagtgagccgagatggcagcagtacagtccagcttcggctccgcatgagagggagaccgtggggagagggagacagagggagagggagagggagagggagagccgaaaaagtttcttgtatagccccggctcttagagccaggctggcaacctttgatatgtaaatgcaagccattagaaactaggtccacccaaacatggtgattcccctcactgtttttgtttgtttgtaactgtgccattcattataaataaacagagcccaagaccaagaagtggttttttggattatttgtttgtttgtttatggcctaaacatttttattcttttaaccgttagcatacgttttggtcactaggcttcagaagaagtgtctaaatcactgcaagcaatgaaagaaattctgtgtggtacaaacgagaaagaacccccaacagaagcagtggctcagctagcacaagaactctacagcagtggcctgctagtgacactgatagctgacctgcagctgatagactttgaggtaagccagctgtaaaaggatgtcagtggtgcttttcaattttaatatctatctatctatctatctatctatctactattcaacttttgcttttcattatggctttccatgtgttattttttaaagttttttctaaaatgtctacaattaatctattttttacaaaagcaaaaagccaaactatagttaagttttatgcagctaggtagcaaagataacggttaatagaagtaataataagaagtaacatttgttgaatgcttgctatatgccaggtacagtttcaagcattcaactcgttgaattcttaaaactacctttgtgtttaatactgtattattagccccatgttatagatgaagaacctaaagttcaaagatattaagtaatttgcccaaagtcactcactt

SEQ ID NO: 73344 - DNA, 1083 bp, Homo sapiens
attagcattttgcagttatagttatatattttatcaatgtattagagacagctaattgccttccaatatctgttctccacttcttccctaacaaaacgctgtttatttcatcactttgccaaacagtataaaagctcaattttccaggctgtcgcctcagcttcccaagtagctggaatgtcagctaaaggagtcagtgtgacttagtcctggacaataaaatgcaagtaggggcttctgggtagacatatttttctttattcttctaagtaaaaccaaaagccatgtacattatgtttattatataaaatgtgtttgctttattgagatagaattaatgtatcctagaattctagaacacccattattctaactttattagaaatgctaagcatcagtattactgttggaattacgagaatttgaaagatagctgcatataaggtcaagaatcagtaagtagaactacaaagcagaaaaaaaattattacatttaatataacagtaaattctaagggacttagaaataaatttagcaagcgaagaacacatctgcatgaagaaaaaaataataatcatatctaagggcaaagaataagatctgaactagtgagcaaaatatctgtacattatatttcaactaaaaccaaaaggattctgaaaggtggagagacgacaaactggctagggacctcaggacccaggagaaaacatggtaatgatatcctgaattttcttatttttgctttctatatcccactctggatactggtgaagccagcaacccaggaacaccaagtgcaaagaaactgcctcccctctctgcccgcccctggaaaaagactgctttctctagccaaaggaacatgaaaggggcagcaagacagaaaacttaaaggcaataaataactccagacaaacaccacagaaaaaagtgaaactccacccgacccccaccagcaaaaaccaagtggaaagcctagacttccatccctgtctggctgtaagaggaggcaccccaagctctttccctaaatggggaacaaggggaaagttgggacattcatcccccttgagcatgat

SEQ ID NO: 73345 - DNA, 1014 bp, Homo sapiens
gtctccttgtgcacagaagttgttaactggatctattagtttcatttatcagaaagtttggttacctcttttcttattactgtggttaagggcttccatagcaagaagacaaagaaaaatgatcaagaaggaagacatgaggaacaagtgccattttaatgaaaattaaacctagcaatatgagataataaggaagtcataaggaacaacatatttatttaaaacccagaacaaataaatatgaattgcttagttacattcatttattgtagaagcagattcagtattttctttgattggctttgtgtttttaaattatattaccagtgtccttttttttttcaaaatcatttccaagattgatcatttactctgtttactttttaaataactcattttaagtagttcctaccagaataatttagtagcatgtattggcatttctaagactttttttttttttttgaaagagtctcgctctgtgttttattaatcggttccaagattgagcatttactctgtttactttttaaatgactcattttaagtatttcctaccagaataatttagtagcatgtgttggcatttctaagactttttttttttaataactcattttaagtatttcctaccaaataatttagtagcatgtattggcatttctaagacttttttttttttttttttgaaagagtcttgctctgttacccaggctggagtgcagtggcgcaatctcaacccactgtaacctccgcctcctaggttcaagcaattctcatgcctcagcctcccgagtagctgggaccacatgcgtgtgccaccacgcccagctaacttttttgtgtttttggtagagatggggtttcaccgtgttggccaggcatgtctcaaactcctggcctcaagtgatctgcctgcctcagcctcccatgaggtgtggtggcaccacacctagcctctaaaacaattttaaatgataaaaaaaacaaaaattcattgagtcttgattgttg

SEQ ID NO: 73346 - DNA, 1030 bp, Homo sapiens
tgctacaaattagaggttcccacaaccccctcctcagattccatgatttgctataatggcttatagaactcacagaagtatttactattaccagtttattataaaggatattataaaggatacaaatgaatagccagatgaagaggtacaaagggcaaagttgggaagggcctgagaacaggagcttctgtccctgtggagttttggggtgtaccaccctcccagtatgtagatacattcaccagtctgaaagctctctgaaccctgttgttcaggggttttgtggaggtctcattacataggcatgattcagtcatcagcccattggtgatttgcttaatctgcctctttctcttccctggatatgggggtggaaagagtagggatgaaagtgcgaactcattaaccatgcctttgtcagaagtgccttggtctttctgacaaccagcccccattctgaagctgtctagggatagctcacctctcaacagtcatctcattagcatacaaaagacactcttatcactactggagattccaagggtctcagaagttcttatgtcaggaactggggattaagacaaatattataacagaaggtgctcctctcatacctgttacttgaaattagaagggttttaggaattaggtcaggagccagggcagaaaccaaatatgtatttcttatgatgttacatgtactaagactttaaaaagaaaaactgagaagttattttaacaggatcaatcaccattccataaatcttagtctgtcacatttgctgaagttttaaggaagtacaatatttactaggtttgtattaatgctgttagatgttgtcaataaatgtcaataatttttgtcttttataatttggagccttaaggcttttaaatctctgaaaatatagtctagcatcaccagtctattttaagtaaaccatttggtattcaaagtatcctcaatttcagtgctacagtatagctttagaagagtagtttcttgaagaaaacagtcttcctttcacag

SEQ ID NO: 73347 - DNA, 1001 bp, Homo sapiens
ctttataaatcacttgacattagaatagatgaaatatacaaaaaaatttttcccattaaagctttaaaagttgtatattttagtattttatgtaagatagaatttcatgagtctctgaataggttattgaatattcctagttaatcaagtctttttataaagtttagcttaagatgtctttgtgtattttattaatacactgaaatctaccaagtagtgtgtttttgttttgttttgttttttgttttactgcttagattatctggagaatttaaaagtgtcaaaatgtttctttcagtatcagttgagttttcaaaatgcgtaacagctcttaagtagtgtctaaaagtttatgggaatagactaaatttttctgaccttccctttctcattttatcattactttccataaagattctttggcataaaggagatgtgcggaagagtgaatctagatactctgacacgtagtctttatttttagtaggtaatacctgggcctaacccttcaagtactaattacagggaagtttctgaaagttctctagagtagagaacatagtttcaaaaaacaaagaagtatctttagaaagaaacttctttgttaccctaatttcatttgttctttcagcttaatattaaattgactaagaaaaactatataattatttttttgattttcatgcctgtgagagttgtagatagacactgtttcatataatttggatttacaaatattagagatgtcattgcagtttgagtgggtctcaaaaggcccataaaattactttaaaatgctcacagagaaagctaagttcacactttagctccttaattggccatttcagtggctcacaaaacatttttttttctagaaattctgacctttgaatatacagtgtaaaattttgtaagtttttaggaacaaattcactcagtctaaatctaaattaaattttcatgtaaattaccaccaaacaagctctctaccaaacagttat

SEQ ID NO: 73348 - DNA, 1078 bp, Homo sapiens
ttcaccatagtacttccagcctgggcaatagagcaagactctctctcaaaaaaaacagcacacacacacacacacgaaaacaattctgaactatgaaatctgaaacagccccttggtatctcctgggcatgatttgcaaatcttttttttttacagaaaaaaggcaaagagtaagcactttgccataggttacttggccgtgatcatctatctagtggaaaaggggactgggaagcccaagcagactgggaaaccagacagctaggaaaaggagcaaaacatagcccagcaacctacagatgaagaaagttgagaaatccatttattcaccatagagacgcaggaatttcaggcaatgcactaaaatgaaatgggggaaaaaagcttgatcagtatgggaaccatttttgtgcaaaagggaatattatggatcagccagtatttctttgagctctgcctgtggagtccatttgacctttagaaatatgaggtattctgtcagttttatcttcttggagaaatttctcctaaaatcttgatttgctttagtctggactggttcatagccatcatcttccatcagtaccccagagattcactttgtctcttatgtgggatctgtttccagttagatgccattattttccttttccttggtttactcttccacatattggtaaagctcttccaatagcttttggaaaggaaaaatgaaaagtaaatgttttgaatctctgtgtgtttgacaatgtctttattttacccttatacctgattgctgttttggttggcaaggtataggattctttagtggtctccatgcccagttttgaagacatctgctagctttcagtgctgttgctgtggagtctgaaaatctgtcttctggcttccagggtgactactggaaattgaatgccattctgttccttctcttttgcatatataatccatttttatctctcttgaagcttataggtttatctttgtctcaatgttctgtccctgttaagagtccattttcatcctttgtactaggtgcctggtgggatcattccgtctgaaactaatgatttcc

SEQ ID NO: 73349 - DNA, 1013 bp, Homo sapiens
tcgttcacattataggctttcctcagagttaatggtcttggtagtctactcatatttaagtgtggaacaccaaaaagcttactataagctgagagtgtggtaaagggctctttgttttactatgacctacctgagctatcttgctggggaacaccctaatgtcagtctctttataaagggcctttcattttggcctggcaagaaatactctttcatcctcctgcatggagggcaaaaaaaaatttaaaaattggctgctagggtctgtctgctcacttccctgttttgcagaccccacactcttctgcaattcatttcatagttgtcaagactatacaaattgtcctttttaatgttctctcttctgctatccctagttggcagtcttcctctttacaacctgctgaaagtggaagacctccagttttcctttaattcctcagcaaaccaccaactattatatgtcttttttccagaacaacttattttttaactataattatatgcatttatgttagattcactgaaaacctcatcttgtatggtgctctgtaccctatgggtgctaaataaaggcttgctactggcaactggatttaggatcggctaattctgcgtccttttaagatatgcttatttaagccaaactcggtatgataatttttttttttttttttttttttttgagagggagtctggctctgtcgcctaggcaggagtgcagtggcgcgatcttggctcactgcaacccccgcctcccgggttcaagcgattctcctgcctcagactcccgagtagctgggattacaggcgcccgccaccaagcccggctaatttttgtatttttagtagagacggggtttcaccatgttgaccaggctggtctcgaactcctgacctcgtgattcgcccacctcggcctcccaaagtcctggaactacaggcgtgagccaccgcgcccacccggccagtatgatagtttttaggaggaaccctcaggagagtgattgttt

SEQ ID NO: 73350 - DNA, 1050 bp, Homo sapiens
gccagcctaaacataaaagagggtttatgataaggttttgggggcatttcatgtttcctaaaggcaggcatgcaggtgggtgtaagaaacagctagaaagccattgggaacctagaatgtcctctttctagcccttgtttttctttctttgcagactgacttgctctaaccacgtggcttcagctattgctcaaagcccattccacacttttaggataggggatcagactgacccagcttggcatcagggttccacccaggtcaatgagttattagaggtcaggattacaaagtataaaacatgcccggaaaccagggtcattcccagagaaatgggatggcttatggtctgctcatccacccccaaagttgccactgttttacccccagtccatttcccactcctggtttgattttccacttttggtatgattttctgacatgtagctttcaatattactttgtgcatactctggatttttttttccaatctgcagctgtattcttcaggacttgtggaatgtgaggatcaggatccacttaatcctgatagaagttttgatgtggaatcagtaaagaaagaaatccagagaggaaggaagttggtaagtgtaaatgatgttatttcttatactggatgaacagaccctcaaggaatgcattccaaaggagtctatttgactgatacaccagggatagagaagcatcttggagagctggaagaagtaggaactgtattggaaacctcaattcaacttaacatttaatttttttttttttttttttgagacggagttttgctcttgttgcccaggctagagtgcagtgacacggtctcagctcactgcaacctccgcctcctgggttcaagcgattctcctgcctcagcctcccgagtagctaggattacaggcacgggccaccatgctcggcaaatttttgtatttttagtagagacagggtttcaccatgttggccaggctggtcgcgaactcctgacctcaggtgatctgcctgccttggcttcccaaagtgctgggattacaggtg

SEQ ID NO: 73351 - DNA, 1045 bp, Homo sapiens
tgcctagccatcatgacaccactgtcacatataaaataccagatagataaatacaagccagggatcaaataaattgaaccaagaaaaaactgttaatagagttgtagaatttttaaaaatttttggccctactacctagattcccttactttatctcacattatcctcaatggcaactctgtaagacagatattatcacccacagcaggttctgagtccgaaagagaaatcacaccactctccgtggcacagccagcgaccaatctcgcctgtctcaaagggccccctagtggggccccttgcctggagctggacaagtttgcccactctgctttttagaaaattctttttaaaagacagagactgtttttttgaaacaaaaagcatttttctgcttttaatcagatcattacaaaactgtctgtccaagcattccggttagctgaggtttcgctgaaattcccaaatgagcagccaaatataagtactgtaccctaatgtttgtaacgggatggaatcttgctgatgatgcccaggataaaatgcagggcttctggaacttaaataacatttaatgatatctttgaattttaacaaataacaacaaacaggtacttactcagtaaaatctattcttctgtagaaatgcaaattttgtcataaaagaggagccaccgtgggatgtgatttaaaaaactgtaacaagaattaccactttttctgtgccaagaaggacgacgcagttccacagtctgatggagttcgaggaatttataagtatttaataaaacatttttaaaaccacatttgggggattgggataaggaatggttggattaagacaaggagactttgaagactaattttatgtaaatggttttcaaatgagaacaaagccagtttgggggatgcacaggggttatgtgaattttgaatttcagtgaaaaatctatatatatatatatattattttagtcacaatatcttgaataatgagatcaatgttaggacagcatgtttttttaaatatgatttttgtgagcta

SEQ ID NO: 73352 - DNA, 1086 bp, Homo sapiens
aagagggcaagcctaccattgaaagaagcttgctaaataatttttttttttttttttttgagacagagtctcgctctgtcgcccaggctggagtgcagtggcgcgatctcggctcactgcaagctccgcctcccgggttcacgccattctcctgcctcagcctcccgagtagctgggactacaggcgcccgctaccacgcccggctaattttttgtatttttagtagagacggggtttcaccgtgttagccaggatggtctcaatctcctgacctcgtgatccgcccgcctcggcctcccaaagtgctgggattacaggcgtgagccaccgcgcccgggctaaataattttaaatctgatttcgagcaagttccgtaagtattttgttgctaatcagacatgaaatgtgtaaatatgtaaatttcgtactgcacttctttttatatttgattcactaagaaactcacaggttgttatagtctcagagtttcatttttattatttaccttaccaaagagctcgttttagtatgacctttacaatgaccttaaacacaagatcaaatgaaaaggaatgtccctgctatagcttaaagtttgaaaaaatatactgatcacacccattagaagaactaacaaatagggactcaataaaacagtcttcttgcattgttttatcaaggaacaggtgaatttttacgcatttttaaactgaatttaaaccttcatgcctatcatacatgaggcaccttgctaggtgctacgagatacaaagaataaaatatagattgaacctcagagaagttatcacctggtgggaaggccagaagaagggtcaatgcaaacagaagcacatgggataacgagagcaggaggggttacatgaaaggagcttggccttgagaattgttgacactgtggaatggatggggacatgggggttcatcctgatattttcaacactgttttatatgtttgaaaaaatttaagtacttgggaagtgaaagtgctcagagataccagaatcaaagtgggatgagattaactttgtttgggtgttgctgggaagactgcatggaggaggtgg

SEQ ID NO: 73353 - DNA, 2005 bp, Homo sapiens
aaggggtgcttgtcaaacacctcttaatgttttataatacaaaacaaaaatatatttgatgtttacatctaaatatgaatatggggtttttttgtttttttttttttttgagacagagtctctctctgtcacccaggatggagtgcaatggtgtgatctaagctcactgcaacctctgcctcctggattcaagtgattctcctgccccagcctcctgagtagctgggattacaggcatgcaccaccacgcctggctaatttttgtatttttagtagcaacaaggtttcaccctgttgtccaggctggtctcgaactcctgaccttgtgatctgcccatcttgccctcccaaagtgctgagattacaggcgtgagacaccgcgcccagccagggcatgatttttactgtaggcatatcatttagttatgcacagcaaaagactggttttcattttatgcaatattaaaatcaatgtaatgcaatcttgattttctctcctagccacccgaaacaatgaaatgtaatacattcataagacaagtgaaagaagagcatggcagacacacaggtttgcgctaagtgttgtctgtaacaaatatggcctacaatacttataaaaatgtcaacccacctgtttcaaacttggtatcccgcctaaatctttattcttctaggcttgtggtaattaatgagtataaatctttatcgcaactgtccactctattgtaatcccagcatatcaagataacttaggttggaatggtccattgcattcagtattaagaaaagatagacttctattaataaagacacagacaggcttgcctgagctcagaatccagcaatgtgtcacccctcacactgtgacccctgtaactgtagttctctgttctttaaagaaatagacattccactaacaacacatacaaactgtgacaagaagtgacaggggctgttatgtcaaagacttaagggtaatttttaaaaatcctcttaattcaactacatatcgggtacagtgtacactgctcaggtgacaggtgcaccaacatctcagaaatcaccactgaagaacttatccatgtaacctgaaaccacctgttccccaaaaggtattgaaatttaaaaagttacagttttatatgtttaaaaaagcctcttaattcatatagttattgtaagcagagaaattttcatttttactttttgtaacattttattcattgtttcagctggccaaaaaaaatgaggtatgatgaaattataattaataaaaagggtgaaggtgctgtattattttactaagtatgtgcatccaccactaggcaaggtctgaagaaataagcataaagtaatttatgattagctgccctaagactatttccttctcaaatgtttgtcttattcttagatgcaactgtgaaagttccttttcttaagaaatgcaaggaagcaggacttcttaattacttacttgaagaaatattagacaaagttcattcaattccagaaaaactcatggatgagactacttcagaatcaggtactgatgaagagcaatatttcgaagtatagagacttctcccagatctagatttaaaacaaaacaaacccaagaaaaaaaaaaaggcccattttcttcctatactacttttttcttctatcagcttttggaaatgcttactatttatttcactttttggttttgccctatagaaaataatcccattcaaataaacattttttatattgttgcctacaatataagctgtccagcttgtcattctttacctttacctcattcttttttttttttttaagacggagtttcgcccttgttgcccaggctagagtgcagtggtgcgatcttgcctcactgcagcctctgcctcccaagttcaagcgattttcctgtctcagcctcctgagtagctgggatttcaggcacacgccactacgcctggctaattttctgtatttttagtagagacaaggtttcaccatg

SEQ ID NO: 73354 - DNA, 1050 bp, Homo sapiens
caagaattgggggccaggcgcggtggctcacgcctgtaatcccagcactttgggagcccgaggtgagtggatcatctgtggtcagcagttcgagaccagcctggccaacatggcaaaaccctgtctctactaaaaatacaaaaattagccgggcgtggcggtgcgcgcctgcaatcccaactacttgggaggctgagacatgagaatcgcttgaacccaggaggcagaggttgcagtgagccaagatcgcaccactgcactccagtctgggcaacagggtgagattctgtctcaaaaaaaaaaaaaaaaaaaaaagaaaaaagagaaatgccaagaattacatttctgacagcttccctgtagtgctgctgctgctgttgccatctaacattaaagttccatggcacatgactgctctctttcctttcccctgttttggattacatatataaatggaggagtttctgcctatacaaactgtttaatattgaaaatgtttctctccctccagactatgaagaaatcgggagtgcactttttgactgtagattgttcgaagacacatttgtaaattttcaagcaggtatatgagttatataacatctgagcagcatagttttgagaaatatttatcacgatattgaaacaatatactgtacaggtgataaaaatattttagaagaatgttcattgttttcttaaatgagaaaagccaattacaaaaacagtatgaccccgcccacctgcccacacacacaggaaaaaaatatcgaggtacatgtgcacagacaaaagctgcacctggtggagacagtagttggttgtaggtagttggaatatagtgatttttgtctgttcttttactgctatattttccagattttctatatacacacaaatacttttataatgagaaaaactcattaaaaaagtagagacaacaaaaaattgattcaaaaattggagcatattttggcctgtgtgtggcccaggcaggagctggtaaagcttcctgcggcttctctgctcttgggtggcgaggctatgata

SEQ ID NO: 73355 - DNA, 1886 bp, Homo sapiens
tagccaagaaatgtttgcagtagaaaatctcgtttggtttggaggagggagatttaaccttcctattaaatatcaaccatttattgagtgagtcctcctttcagcattaagatgccctcaagacaggctacacctccacttgtttatgagtctggtctgacttctctatcaaggctgccacacacagctgggcaggccgggcacagagtcaaacagcattggtggatggctccccctgaagttgcacaacagagtgagtgccctccacactctgcatttccacagatgcatctgtctctccagcatatggtaggaagacaataagatttccctgtgaagaaatcattagttcatatccctgtctcaacatacacaacctttctcattttggcttctatattatacatttctatttgaattttttactacatttataaccagcaggaaaaatactttgaaaaatctaccaaaaagagtgtctgtcttaatagtcttttgaggatgtctgctaatatatagcagtatccatatttttttaaagcagccttaaaaatttttttctaaaaagagttattttgtaggggacttccatgtgtgtttttctttcatgtaagggaacatgtcacacatcactacttggatggattaggtgggagtacatatattatagtgtagtatggcgggggtgccactacttagaactgcatgagattcaacttaaaaggcttaagttgggtttcactaccctggttgataaaaacttgcttaatttagccttactcatattttaagttaactatacgtatgcagttattctgaataaagtttgtatatgtgtgtaactgttcgattttgaggcttttaaaaattacattgccattgactactatttgttatttataaagcctaagtatcttcctcctaagcttttctaagtttccacaattaaaagccttcctatttctaaatgaaaccaaaagcctttatgtaacattaaaaattggacacatttttaggaaggatttgtccttaaccttggtattctagccacattctccaattatcatctctcaataaatggatatagtatagcatgaaggttatacagtcactgttttcaagttctcaaagatatacaaagggacttgttctgctataaatgtgcacaaaatcttaagggtttactgaacagctttgtgtatgataaatgttagaattctgtcctgaattagaaggaggaagtgaaggcataaagaaaccagctcctgcccataaggctctggatccttttcaccagaggcacgaggattgtgtatctgtacctgcaagtgaaaggggctagaaatggtacattatttctaataaaactactgaataagctgaaataattttatttcttcttttcatagcaatagagaaaaaaattcatgcatctcaacaaaggtggcagcagttgaaggaagagattgagctacttcaggacttaaaacaaaccttgtgctcttttcaagaaaatagagatcttatgtcaagttctacatcaatatcatccctgtcttattagggattaccgtttcctaagccaagagtcatgtcaaattgcaatcaggctcaaaaccagagaccaggctgtgaaatccacacatctttagaactagtcgtctcctcttggcctcagcagctcttccctgttcttactggttgacattttgatcactctttgcacactcttgtgttttttgctcactgtcacattcccagcacctagtatgctcagtaaatgtttgtggaataagtgcataaaatgttcttaacctttgattctacttacagcccatgatagcctcttagatataataaatttggattatactactttacttgta

SEQ ID NO: 73356 - DNA, 1022 bp, Homo sapiens
atggtggtgcgcgcctgtagtcccagctacttgggaggctgaggcaggagaatcgcttgaacctaggaggcagaggttgcagtgagccgagatcacaccactgcactccagcctggcaacaaagtgagactccgtcttaaacaaaacaaaacaacaaccaaaaactttgctaagacttaatatcaggataggaagctgaagctacagtaatcaataatcatctagactagcggaaatctgttcagagggtgttggatggggtcttcacttctgtagtttttaaagtgccccacatgattctgatgtgcggccggatttgaaatccactggtttagattttgtccctaagatataagaacttaggctagggctgccattacaactggaatggactgttctttttcatctcctgcaaatatttttccagtacttatttattacatgtcagacaccatgcttggagactcagttaaaacccattttgagacgcagcattattgaaaatcagagtaccatggtaaaaaatgagaactgtgaatgttaagttttcaggggtcagacgtgatagtgtgggcataaaaaccagaatcgtatattagattgagaaaaatgtaactgtcaattttttttttcattcttgcatactcccgataatgttcttattcagagtccaatttaaaatttaggtgtctgttttgaagatgatgaatctccacgtgataactgtggctgaaaagagacttttcaaaagcagactttgtgacacgaaaacaggcaaatttggtacaagtaaagtagtataatccaaatttattatatctaagaggctatcatgggctgtaagtagaatcaaaggttaagaacattttatgcacttattccacaaacatttactgagcatactaggtgctgggaatgtgacagtgagcaaaaaacacaagagtgtgcaaagagtgatcaaaatgtcaaccagtaagaacagggaagagctgctgaggccaagaggagacgactagttctaa

SEQ ID NO: 73357 - DNA, 1996 bp, Homo sapiens
cagcaggagcagtgatagttggggaattgtgagatgaatggagaggccccatcgtgaattaaagatgctgacctggggattgttaagtgctgccttagttgctagtttagtagccttactgtgaaggaataattaagattgtttcagacttttgtttgtgtgcttgcgttgatgacttttttaacttcaagataaatcaaagtaataagtttaacgtatattaaacctgttgaaatgataattatgtaaagataaatattctaggttagtcaagatttctcttaagatttaagtgcataaagaatagtaatttagaagtatccgtgaaaagttgataatgaaagaaatttgatgaaggtgaatattttataaattagaatctccactacttatccaatggtgttttatttcattaaggtagaacttgagaactcaagtttaaattgtcccccaccaccttcttctataaatgcaaacttaagaggaaaataatgacatgtatagtatactcttgccttcctaaattatgactgctgaatcatcatatctactatatatgactggaagaagtggttcttcaagtcaaccctcttacaagacttagtggaatttgctttatctactttaggccaaatccatcacacattggcttatgtgaaactttatcatctttcacttttggttttcctctgtttttaaacatcttaggtataacagcacaatttcaccttgaaaaagcaccaaaattatggtgttcctgaaaagatcctattaaaagacagtagtttatttgaactggttatggaaggtgactttgggatgtaagagtgttcaactgtgagtttcatcatgtgtgtccgttgagcttgcttttaagagcaatgttttgctttgctctctggtccatgaactcatttccatttgagtgagttcccttagtgaattttgtctcctgcttggaaagtctctcttctgaacctggagcctgaatacattttcagagccaaattacaagtgggtgaagacatgctacaactactatttttagcaatgtttttaaatttgtgtctattggggtgggaaggggagtgaggccctaaagataggaattcactgatagctgaaatagatacaagcctaggagccccagcccccttttcttgaccatatcacaagtgattgaagcccagtgaattagtcggttagaattcgttctacaacatgatagaacttttcttactagcttcagaaatgcacattgatttgtgctatgatgggtggtgtttgtaacaatcactgttctataggcttatgatctgagcaaaatgtgaacttcagtatgtttactattgctcttacttgaaaactttttttcaaaaaaagcacaaattaaagtagtaaattcatatccatagatagttcattcattcaacaaatatttaccaagttcctaatataagtgaaggaccacttctcatattagattactaagtcatttgtatgaatatgtgtggcagtgaagagaacaggtctttcaaaaagcatttgattattttttttaaatacactctcttatttttctacttgtttttttgttaatcatagcaggatatgacaactcttatttgaattgattttttcatctaatgtaataatggaagccaaagtattcatatttcttaagatagccctaaatgtactcttgaacttcttactggaacaatgtttgatactctagtatgtaagctgtatttatgtaatatttagaacgacatgttaataaacaaagtaacattaaaacaggcacatagagttgtttttttccttcaaaatcagtagtctgcagccttaaaaaggaaagaaattctgacacatggtgcacagaggtgaacttgaggatattatgctgggtgaaataagccactcacagaaaaatactatgtgatgccatttgtgtgatatacttagtcaaattcattgagacatagtagaatgg

SEQ ID NO: 73358 - DNA, 1046 bp, Homo sapiens
acgcccggctaatttttgtagttttactagagacggggtttccctatgttggccaggctggtctcgaactcctgacctcaagtgatccgcccgcctcggcctcccaaagtgctgggattacaggcgtgagccaccgtgcccggctgggattttctttttaatgtgccactttaggttgaccatatctcttcattacctttctgtttcttaaactaacccacatcttaattcttttctctgatgtcttgaacgtgacaaaacacattctgcagactaaagtggcattctgccttttacaacaatgtctttgagcataactagattatgtgataatcgtgcaggaaattctttcccttgtagatcttgcgtgtgtgtgtgtgtgcgcgcgcgtgtgtgttttgaagagtcgtactttgagttagaggaccattgcttttactgcgttgaataaatagtatgtgtttttctcacacctacctgtggtcacctttttgcctagttttaggtatctggcctctcaaatatcttttctgggggagggtgagagatttggggtaaagggctcagagagaagtaattcaatcaaagttgcctaaaaaagccatttttgtttttatttttgttgtgtgtccaggatttagaagaattctgctttaagttttgcatcaatcatttgacagaagttacacagactgcagcattttggcaaatggatggccctctgctaaaggaattcattgctaaagccagtaaatgtggagcctttaagaactgaagcgcaaggctgctgggttctgtgtgagtgctctggggcactgttgaggatgtgtccagtttgtgctctacgggtgatgtgattctgcaggtaaaagaccatcaggttgtttttttccacatctgggacacagttgtttgtgtaggaacataacaagggtgtacggcttttcttgagcccattttaaacaacccttgtttccagataagtgtattttaaatgtgacctttcgtaaatttgggctggaacatgtaaaagggtgaaagttagt

SEQ ID NO: 73359 - DNA, 1059 bp, Homo sapiens
aaagttgaccacgatgttttcaaaatgtatcttatttttgtttgaggctatattctgattataaatatttgataaggtcaaatgtagctgactttgtctgcagcccgacaacagatggaatgatgatcaaagtaaatcatttctaatagaaaatggggtatgatttttttcctgtccttcctgtgacaccctgaacctctttattagaaaagctgtttctttagattttatttccacccggtgatataattttaaattgggttagtgccttttctgtccatttggtgacggatgttagaatcctctctgggcctctccacgctcctcctccttgttaacgagttccatactcaggatcagaccttgctgactaacaccagtgagaacaacctgggcagaggcagatgtctcggctcaagttgctggaaacttcttcctcacttttagctaagatctgtcctaggaagtttacagaaaaagcctctgctgctgcttcctgtgccagcaggtcatttcctttactagttttcatttttctcatattaagtataaacatgataaaaacttcctttagaaagactccaaataagtgtgattccccagagtctgtcacagtgtgggcatggagctggcgctcaaaaatgcatgttgaattaaataaatgagtgaaaacatttgaaatacctcaccatgaaggtgtgcttaaaaaaaaaaaaatggccaggcttggagatcacgcctgtaatcccggcactttgggaggccaaggtgggccacttgagatcaggagtttgagaccagcctggccaacatggtgaaaccctgtctctactaaaaatacaaaaattagctgggtgtggtggtgcgtacctgtaatcccagctattcgggaggctgaggcaggagaattgcttgaatctgggagggagaagttgtaccactgcactccagcctgggcaacagagcaagactctgtctcaaaaaaaaaaaaaaagttaaaaaaaacttaaaatcctacaaatattacagattcaacgtagaaaaattagagaatagaaa

SEQ ID NO: 73360 - DNA, 1405 bp, Homo sapiens
ggttaatagttttggacctagtttatgaccataggcttttttgttctaatgttactgaaggacttttttttttttaatttatttttaagttctggggtacacgtgcaggatgtgtaggcttgttacataggtaaacgtgtgccatggtggtttgctgtacctgtcaacccatcacctaggtattaagctatgggcttattttaattttctagtagtgaagtataagttgctaatgcatttagcgttttagaaacaaaatgaggattgaaattgcattttttgctctttctttgcactattgaagaaattgtataaagtaaatataggagaggtgtggaagtggaggaggcagacagtaaaaaagagaatttatttactcaaattcagaatcttatccactaagaaacttctaatttacctgtacacctctgttcaccaaaacaaaatctctgtgtattggaaattattatacatttgattaaacctttcacatattttacttttaggtcttctggatttggcgacatcttactgtgaaaacagactgaaaaaactttgtcagcacattatcaagagaggaattactgtggagaatgccttttcgctattctctgctgcagtcagatatgatgcagaggtaacttaaacaacaaacagaaaccagaccacctttaactccctttgtgctcgtctcccccgcttcttgcgtgaggcatggaaaacgatgagtcactccacttctgtttagggaatcagtgaacccattgaaaactgaaatctgcccttgcttcttaattccctgttcattgtttcaaaagtcgttgttcctctactttcatttctaagtaagacaggaaacgaaccaaggtcctagcagctgtgctgcaggttggaacataaggtgccacaactaattggactaacaaacagcatattttagtttcaagtctttcttaatgtcagcatatgtgtttatttcgagacttaccttgctgtctttccacctctgccctgtcataagctggggatgtgtatgatttgtatctgtgtacgctctgcaattctattagtgtctaattacagctcacagttatttacctgttaagaacttgctgtggactccttttgtttttgcactgggttgagttcttaatctgagattcacagatctgttgagcctgtgaattaatgggctttggggagtctgaaagtttgtgtgcatttttttgaagaaccaaagcatcagactgtaagctcctcgtgagcaggaactgtctcattcgtctgtataccctatagtgcctggcacatattaggcacctgataaatgttgaactggatgaagatagtaccttaaaggaagcattaaggatgatcagtgagctgaaggcgggtatggttggtt

SEQ ID NO: 73361 - DNA, 1051 bp, Homo sapiens
ttctaggctcagcatggtggctcatgcctgtaatcctaggactttgggaggccaaggcgggaatatcacttgatcctaggagtctgagaccagcctaggcaatatagcgagacactgtctctacaaaaaatagaaaaaattagccaggtgtggtggtgcattcctgtagttccagctgctctggaggctgaggtggaaggattgcttgagcccagtagatcaaggctgtggtgagctgtgatcatcctgggagacagagtgagatcttatctcaaaaatgaaaaaaaaagtttttaagatatagttccttgtataaatgtgagggacctatgcgtttattagtaactgtttgccacaaaggttgccattgcagaaaaaggcacataagctaagaccattaaagtggccatttacaagtctttttggaaatttaggtaaaaacctattggcaaagaaatacatttgaaaggaacagaaaagccctatgtcattccttacctaagggagtaaatatctgaaccacagtattaattgaaaagatgaactggaactgtttctgtctgtgcacctgtggtcaaccagtctattcctttcatgtacagttttctgaccatgaaatccatgattctttcttagacaactatttcttttttatttctcaggtaattttttatgtaagtgaaactatttttttagtattctgaatggattctttttcttttttttttgagacagagactcattctgtcacccaggctagagtgcagtggcgtaataccagctcactgcaacctccacctcctgtgttcaagcgatcttccagcttcagcctcccaagtagctgggattacaatcgtgcactaaccacgcccagctaatttttgtattttaagtagagacaaagtttcgccatgttggccaggccggtctcaaactcctgacctcaggtgattgaggctgacctgcctcggcctcccaaagtgctggaattacaggcttgagccactgcacctcagaatactttttctctttgtgccgtatctcactttaa

SEQ ID NO: 73362 - DNA, 1061 bp, Homo sapiens
aatctagactcctggactcttggcccatcttagtcatttgtattcttttacccaccagtgatccaggttgcaaggtcaggggaagcctgacttttgagaggttttctacctttcctctgtagccaggagagctctgcattgcatggggtggagggagggctgtcagttaaggtcacagggcttaggtgaaaggtaatgccttgggggagagtctgatgataaagcttgcagataagctcatttgttgagtttcagcctaggttttagctgttgtccctcctctaggagttgctctggtaacagcacgctaccaagggaaaatggttcatcccaggcttggaagccgaggtctttgattaagacactgattattaactcagctgtgggcagttgaaacctgcttcgtgtatccatagcagcttgattcgatgcctggtcaggatctctggaatttaaaaaaatttccccattagcccttttctgcttcttttcttctttcatacatataaaacacaagaaagcattccgggaatttgtacaagtgcctttacttttccttgtagtaacacagttctacttaacatataaccacaacagcaattcttcttatcaggtaaggtgatcctgtgttcttataaaactgttcccttcatgtaggtgttgtttctaagtgaatttgctctgtgtttagacagtgagtaaggattatgcatatagtgatttttagggttaacagagatgtttagattccagatacttaggaaagagtttctctgcttgagaacatgaccgcttagcattaccatttaagtggtaagtttgtttcttgcacctccttgagttgggtatgctgaccccttgaaagtaccccaaagcagaaaaaagatattcttagtgtttcagtcaagggaaacaaattcttagtcttagaagagaaccactcgttttgagagggggttattatattatcatgaagtacctataatttttttctttaaaaatatacatttctaatgtataactaggcatataagatggtatttagcctttctaaataccat

SEQ ID NO: 73363 - DNA, 3831 bp, Homo sapiens
ctgtatagcatcctgtgtttatctgtgtctgtgatcagaccatttatgcggctttccatcattatggctgctgactttggcttctgtgaatgacccacatacagagctctactgatgaacatgtcagttttctaattttttgctgttatagacagagttgtggtgattttctatgttactctgtgtatgtgtatctttgtacacttatacaagtatttctatagaataaatttccaaagaatttctgggtcaagaagtatgccatttgaaatactgatagccattgccaaatttctctccagaaagttcatgtctgttacacttctggcactgggtgaaagtgcctttaaccatctctccccaggcccttaaagtccattccccctttccgctccatcatgttaccctgaaaagccccagtctatgtctgccgccctacattgctgtggggctcgatgccaccacaaatcttgggtttgtaatttgagcaaggcctttatttgttcctggtcagtactttttcctatggctatttggaacctttaacactcctgtcaaacctatgcctagctctgttactttcagcagatgggcctcctctcactctatatccaagggactgtcacgttctgggaagtcttctatttttaatcctctttcctctgctttccctctcatgatccccctatcactccttagtttagagcctcatcagagctcacctatttgctaacgagggaagaaatgacctcctaaaggttcttcctgcctctagccttatatgctccatcatctttcatactgtggccagcattatctttcaaaaatacaaattaaattaatatttcaatgagaaatttatagatgtattgcactttccctggtaggttttttgtcactttccctctgagctcttgcctttccttctagtctttttgttgttgttgttgccaggctggagtacggtagcacgatcttggctcactgcaacctctgcctcccaggttcaagtgattctcctgtctcagcctcctgagtagctggggttacaggcacgcgccaccacgcccagctaatttttgtatttttagtagagatggggtttcactgtgttggccaggatggtctcgatctcctgacctggtgatctgcccacgctggccttccaaagtgctgggattacaggcgtgagctaccccacccagccttcttctagtctttctactaccactaccgcagttgtgtccagccaagcccacctacttatcttctaaactagcttctaacacagtcaataccttctgcttggaatgtttttgctctccttcatccttcagctctgctccaatctccactttttgaaaagtcttccttaatctttcttcctagagctaaagccttcctccttgctgttctgcagcgccttgattatacctattgtagcacttgctacccatcagcaaaaaatttgcatgtatctatttcgcctgttaaactgtgaccaaaaactagtacctttcagagtgttctgacatacagtaggtacttaataattgttagtgaggctcaacttcctcatgtattaaacaggaaagagtgacttgccccagactatctaactagtaagtcatggagtagaaactgatgccaattctgtcatccccttctccaaaatagcttctgtttggagatcagttgcaggagcatagagtagaatataggtgttggaagtatctgatttgtttagatgggctggtttttttgtctcttccttcttaccagcagtttaaaaatctcactctctcccttctgtcctctctaaggtatatggctggggttacaatggcaacggtcagctgggcctgggaaacaatggcaaccagctgacccctgtgagagtggcagctttgcacagcgtgtgtgtgaaccaggtacgtgtggtgcactctcagttagtggcttcccatctaccttccttgctctaacttggagaaatattggaggtttactcttcagtcagtcttttctggcaatactctgtgccttcatcttccatatttaatattatatcttccctaatttcccacgaggagaagcaagactatggtgttggcaaaacaggctcgacaagttaaaaaaaaaaaaaaaaatggaaaaattcagtagcctaaggtttaggcttttctaatgcttttttttttttttttttgagacggagtctccctctgtcacccaggctggagtgcaatggcacgatctcagctctctgcaagctccgcctcccgagttcacgccattctcctgcctcatcctcccgagtagctgggactacagatggccgccaccacacctggctaattttttgtatttttagtagagacggggtttcaccgtgttagccaggatggtctcaatctcctgaccttgtgatctgcctgcctcggcctcccaaagcgctgggattacaggcatgagccaccacgcccggccttctaatgcttttttaatgttccagcaaatgtcagtccacccctgatgatgatttggcattctgcagaagctggctatagcctttaagtagatgttctccctgcccttcctgttttcctgctaatggtaaccgtttcaatttacttgcagattgtctgcggttacgcacatactctagcactaacagatgagggcttgctgtatgcctggggagctaacacatatgggcagctgggaactggcaataaaaataacctgctaagcccagcacacatcatggtggagaaagaaaggtaacttggctgtgccacgtcttgggactgtgtgtgcgatgtggccttggggctgtgtgtggcagagctgtggtgtttggctttgtgattcttctgtttattaacattctcattttggacaaaagagataaccttcccttctcccttcccccttcctccttctccctccctgcttcccccttcccccttctccctccccccttcccttcccttcccttcccttttttgagacagagtctctgtcacccagactggagtgcaatggcacgatctcggctcactgcaaccttcacttcgtgggttcaagtgattcttctgcctcagcctcctgagtagctgggattacaggtgtgtaccaccatgcccagctaatttttgtattttttagtagagacagggtttcgccatgttggccaggctggtcttgaactcctggcctcaagtgatctacccacctcggcctcccaaagtgctgggattataggcatgagccccaccgtgcctggcctatgcaaaagtgttttgagtagtagccagaatgaacatgaggttgatatgattcttatgtagctctctgaaataaccacctgtgattgataggtgtgaatgcatcttggtataattactgcagtcttgctgttgcccttttagtatggaagacaagtaaggtctatggccatgttgatgtttatggtgtaatataaacttttactttgagccaagtaaaacaacttttaaataaatctgctcttgaaaggacattatctgtttaaatattgatttgatataatatgtgttactggaatagatgcttgatgttgttcagcctaattgtaaggtcttacctcctatgtcctggagtgctgacttctgattatgagaccttacccaagaagcatactactgagaaatatagtaagtttggcttgttttccttttggattggaacgttcagagtccgtgacccccagccaatgcttatcagcccaatgagtgttctgagctctggtaggagatgagagaaaaagttacatttataaagaaatgg

SEQ ID NO: 73364 - DNA, 1048 bp, Homo sapiens
agttttttctttaaagattttgcatctgtctatcccgttctgtcacccatctctctctcctttactctgtccatggttacttaatagagaggagggggcaatgggagagaaatgaaggttggagaaggagctgtacgaagttctggggaagaaagtacagggttactatttctttttggagctgattttttgtgtgctttgtgtgcacagatggagtggtttatgcctggggccacaatggatatagccagcttgggaatgggacgaccaaccaaggcattgctcccgtccaggtctgtaccaatctcttgatcaagcaagtggtggaagtagcttgtggctcacatcattcaatggctctggcagctgatggagaggtaagtatgctgcttttattctttattctttttttttttcatcatagtaaatacacttaacataaaatttaccagcttcaccagttttaagtgtatagttcagtggtgttaagtatgttcaccttgtcatacaactgtcaccagcatgcacccacagaactgtttcatcctgcaaaactgaaacgctgtccctggtaaacattcactcccattctgtcctcccccagcccctgacaacaactttctttttttttttttttttgagatggagtctcgctctgtcgcccaggctggagtacagtggcacgatctctgctcactgcaagctccgcctcccgggtttacgccattttcctgcctcagcctcccaagtagctgggactacaggcacccaccaccacacccgcctaattttttgtatttttagtagagacagggtttcaccgtgttagccaggatggtctcgatctcctgacctcgtgatctgcccgccttggcctccaaaagtgctgggattacaggcgtgagccaccgtgcccagccaacaactttctactctgtttctttgagtttgattactctaggtacctcacgtaagtggaatcatacaatgtttgtccttttgtaactggtttatctcacttagcataatatcctcaaggttcatccac

SEQ ID NO: 73365 - DNA, 1307 bp, Homo sapiens
gaaggagtctcgctctgtctccaggctggagtgcagtggcatgatctcggcccactcaacctccatctcctgggttcaagcgattcttctgcctcaacctcccgagtagctgagaccacagacgcgtgccaccacgccccggctaatttttgtacttttagtagagactgggtttcatcatattggccaggttggtctggaactcctgacctcgtgatccgcccaccttggcttcccaaagtgctgggattacaggcatgagccactgtgcccggccggtacatttttctaaacatagatgctacctggctttcctttctttgtgcattgcttgcatcttgaatcgggaaatcttcatctgttctctggcattcatgtagttgccatattgaaagaaccggggatgcaggttgataggttcttgtccttttttactctgcctcttcaagatcactaagggagagtggacattttgtatgtgtgtgtaatcgatctgtactgtgggcacccaacactctctgaaaattcattatctatttaaatgcttccttttatactttagatacattaactcttgctctctttctctgaggtcctcagctttttgttggataattgtctagggtggcatttgggagatgatttgcatcccggcctttctttgtctagactgaggaatcacagcttcctagaatgctgtcacaggttttagtatctagccttctaagtgcctgtaactcctaactgaatctacttcaagttctctgcatctttctcaagagagctgtgaaatccaaatctgagcatcatcatgtggtatgaatataactggagttgagcataatgaggtgattatctcacttttgccttgcgtaatcatgccttctggcatcacactggttctttctttccttttttttcttttgagacagtctcgctctatcgcctaggctggagtgcagtggcacgatctcagctcactgtaacatcagcctcctgggttcaagcaattctcatgcctcagcctccgaagtacaattagaggcatatgctaccatgcctggctaatttttgtgtttttagtagagacagggtttctccatgttgaccaggctgatcttgaactcccgacctcaggtgatccacccatctcagcctcccaaagtgctgggattataagcataagccactgtgcctggcctttttttttttttttttttttttttgaggcagggtctctctctctctgtcacccaggcaggagtacagtggagtgattatggctcattgcaaccttgacctcctgg

SEQ ID NO: 73366 - DNA, 1028 bp, Homo sapiens
tcggaaagtggcccatcttcactctactctcccctcaagagatcgcgtctattcggaaggcgtgtgtcttcggcacctcagccagtgaagcactgtacgttactgacaatgatgaggtaagagtctcttgaaacctagtttcgttttaggacttatttggcaattggtcttcaaagtgtccagttcaaagatggagaaaaggcggggtataaataaagagatcctgaagttcaggaagactatggctttgatagtttctcttttttcagtttcttgatttaatacccgtctactccatagcactctgagtttcataatatagacaaacattctgaaacgtaagcaatgtccacagaggttgaatttttcttaacaaccatatcagtctcttttcacctcctgagctctgtagttgaaatgtcttattttcagaggagagaagggagcttttaatacagctttcggtcaaaagactcagaaaaaaaactatctattttctaggtctttgtatttggactgaactatagtaactgtctaggaactggagataaccagagtacacttgtacccaaaaagctagaaggcttatgtggaaagaagattaaaagcctcagttacgggagtggaccacatgttcttctcagcaccgaaggtaaggagggaacccatctaacttttcagtttgtaagaaattgaccggttaattctaagcttaggggagatagggctataccagataactgattttggattgtttgcttcttaatttctgagaggaagtacataaagcaggtgaaagttaaacacttcgggctaactctggaaaagctataggatgtcttgcaaattaggcaaacttctgaggttttcgactgcctccataaagctgtggatgattagatatagcaaatgatggtccttccagcctaatttttcagtggatttgtgttgcaatgcaacttttttatttatttatttatttatttatttatttattttattttatttttttattgatcattcttggg

SEQ ID NO: 73367 - DNA, 1068 bp, Homo sapiens
catgttggtcaggctggtctcgaactccccacctcaggtggtccgcccgcctcggcctctcaaagtgctgggattacaggtgtgagctaccccgcccggcctggatactttttatattggtaacagtttaaagacagatgctgctgtacatttacaaggcaagataaagtcagaaagaagtgactttaggaagttcactgaagttgttgaggaagttcagcccttcaagggccaggactgatattctccataagaaaaattagaggggtctgctgtgtgaccttggcgtcatttcacctttgagcctcagtcctcatctgtcagaaatggtttacagtctcctcctcacaagagtattacgaagattaaatgaaataatgtatggaagctacctaattaacagtgtctacgacaaggcaggttcaggatagttattcgtttcttctttcctgctgttagctttgcttgattgtcttgctagggataattacttgcttggccaatattactgcctctgttgttcttatctgttcaagaaatcccccagcttcttcattatatcttgaacataaaatgacaaatttctaggtttgggggaaacccaggctcaaaacagcaaacagctgtcatactgactgattttaaaagcaaacctgggacacaggcctcagcactctgttgttaccaccctaccaagcctgttggggatgcctttttcttttatgatgggtatggacatgtaagatacatgacctatttcttgaattgactcttaaatgacaagtctttggagaaataccttgtaaaataaagcttcatgtgatttagcactgggtgaagtcagtgcgtataataatgccccatcattatgaaggttagcttgatcttgcagtagattaccaaacccttagggcagagttgcccatatttgtttaatgattttagaataattgtgctgctgtcaggaagttgtgtggttttgaatgtcttaccttttgtgttgtaattttaaaggtggtgagtcatatttttggctaattctgtgtcatgtaaaattaaacattttga

SEQ ID NO: 73368 - DNA, 1003 bp, Homo sapiens
tgttccttggggaaagtaaaataaatgtgctcttaggggaattaaaagattagttgctacattactccttcagccttccagttctaaatgtagatttctaaaattggaaggcctgtgtttgtcctgactgaatttgctttcagagtataaagtaaaataaccttttcttcctcatgccacaagttctctgagggacagtgccaatagctaggataagccatcccagggaatgggatattgatctgtaggactaatggacgtaggataagtgcagtggggatacaggatgtattttcaagtgccagagaaaatacgaagagccaagtgggttggcatattatctttaaggacgttacactctttctacctctgcttgcatttttgcgttcctcttttctttccttgcacccttgttttatctttatacagttaaaaaaaaaagtcattgattcacctaataataactcataaagagtggtaattcaggctgcaacacattaatattgtttttcagaaagtatttcctaaataaaacatggaaggcttgcaaaaaaattactatcttagtgaggtacttcagaagtaactatttaaagatgactgacattctaattacagctcatcatttttataattatcaagatgacaagccctggaaggacctgtcatcttagcaatttgtttggtctggtttaaattgctgtatgcactggaaaattctaagaaggctatatttcttttataaatgctccgttgagaatttccctaatctgaacttatattctcaagacatgattaaaacagtatgattttacttttccaaacacattttttaggactgaaacctttctatatttaattttagaaatgtatctttgagtttattaatgcagtcttgataaaagcccacaggatgattatttgattttaaaaaattggggtaaaaggtatatagtgtaaaatttaccattttaatgatttttaattacacattttagtcaca

SEQ ID NO: 73369 - DNA, 1050 bp, Homo sapiens
gagaaggctacattctcagactccttagtcaagcattcagggcattcttcctttccctttcattctttttttttttttttctgagacaagtctcgatctgtcacccaaactggagtgcagtggcaccatctcggttcactgcaagctgtgcctcctgggctcacgccattctcctgcctcagcctccagagtagctgggactacaggcgcccactaccaggcccggctaatttttttgtatttttagtagagacggggtttcgctgtgttagccaggatggtcttgatctcctgacctcgtgatccgcctgcctcggcctcccaaagtgctgggattacaggtgtgagccaccacgcccggcctccctttcattcttgtagtactgtgtgtttgcagaagagagacgtggatgacagctgttctagcagctggggcaataacatattagtgtctcagcacatcttcgaaactttgcctgtgatttgcagcccttataccatagagtgggtgaaatggttttaagttttatttttatttaaaaatgtttgaggctgattcttagaggcttatctggacctgggaaatacatttggtatctcaatgagacagcatttgctcagtctcaaaaagcccatcagaattatatgtaagaaattggtaagagtaacatttggctgtttgtaccttgagagggtttttgaattgcttttgctgtagcatagatggaagacattaagttgtaatgttgtataccaaagtttaccccaaaccgtagagctctcttatttgaatgtttttctggaattaaatggattcagaaataaagattgtcatacccttcaatcttttgtgctcaaatggaacatttattgctaaaaaaggaagaaggctatgaagaacactttgttcttctaggaaactggatgatcttcactgaggaaaggctcacattttatcatctgctggaatatggagaatttggtttctgggatttcgtgtaattgttttctgttatatacaatttttatatagttgtcactagtttgcac

SEQ ID NO: 73370 - DNA, 1068 bp, Homo sapiens
tttattattttaaacatttgtgatatttgcattattgagccttttacttgcccatcgcttggccctttatcctcatatctcatttagtctgcactacactgtttgaggaaggggttattactcactctccccttttataatggctcatggtgagattcagagtcaggcctctctgtgttaagtcaggtgtgatctcaccaaatttccccaagaatgggtcaggatccctgagggtccttacttaactctgagaataatctagaaagggcagtgttgctcctctaaggaaagaatgagccttcattaattagattgacttgcccccatcaaaatagcaccacccaacatctgaggcccaacttaggacggttttcatagcgaagactgttgatgccgccattacagacaagatgtcatgactctgatgccaaactgtgccaagctggtggttcatcccgggcttctttctctccaacaggcatttcctgcagatcaccctgtgcgtgtgcgagctgtatggctgctggatgaccttcctcccagagtggctcaccagaagccccaacctcaacaccagcaactggctgtactgttggctttacctgtttttttttaacggtgtgtgggttctgatcccaggactgctactgtggcagtcatggctagaactcaagaaaatgcatcagaaagaaaccagttcagtgaagaagtttcagtgaactttcaaaaccataaacaccattatctaacttcatgaaccagaatgaatcaaatctttttgtttggccaaaatgtaatacattccagtctacactttgtttttgtattgttgctcctgaacaacctgtttcaaattggttttaaggcgaccagttttcgttgtattgttgttcaattaaatggtgatatagggaaaagagaacaaatttgaatttgtaataataaaatgtttaattatacattttatggctggcattaattgttccacattagtaaaaccaattatcttagaatactgcagtgttatattaattttttattccaaaggaaatgttcttgcctcatctt

SEQ ID NO: 73371 - DNA, 3236 bp, Homo sapiens
gggagaatggcatgaacccaggaggcggagcttgcagtgagccgagatcacacctctgcactctgcactccagcctgggtgacagagcgagactccgtctcaaaaaaaaaatagattagtaaatttatattaaagcactgtgggggagttggttctagtactgtcacaaacttgccatataacttgaaataagtctctttacatatttatgccacagcttccctctgtcaaatggattgtttgggtgtttttttagactgtctgcctcagggatccgggtacctcaagggcttctaagaaggaaaaaattagtgggattctggtcctccaactagaagcagccccgtgttttgtctgttttttagacaaaccactatcttagatgggggagcagtgtgttctgagttccttaggatttctccatgattaaaatgagtgtggttttgattagtatctccttatcaattaaccagttattttgattattttatttttaccaggtttggagaaaattgaagttttacagcaacatgaaaatgaagacatatataaattagcatttgaaatcatagatcagtatttctctggtgatgatgtaagtagatattaaaatagcgtgtatcttcatgtaaatgaaaacctatacatgatgtaaatttactaagagttttccttttattattaggatgacataagtttgtactgtatttctattagacattccatcagtcactttctcttaaatactttgaaacttcattataaggtaaagttgtaaaaacagttcttgtttcatttctaatctattaactaggaagaaatagtaattatataagtgatatatgttcagataggttaaataaatctaggtcccagatacagaaacttaacaatgcagtttcgaaacgtgttaaattttaaattgttaaatttcttaataaaattattgatttactcgaatatttttagttggttaaagcattcacatagaattatttgctaagaggtaaaaagtcaattccacttacatcataatgtatagtatcataacctaataaggatttttttcttgttttttacagattgatgaagatccctgcctcattcctgaagcaacacaaggaggtacctacaattttgatccaacagccaaccttcaaacaaaagaatttaatttttaaattcagttgagtgcagcatctttcccacattcaatatgaagcaccaccagatggctaccaaatgataagaacaacagcaacaaaaggctccaaaacacacatgcctctttgttttgatgcttctaaagcaagccatgtctcagtcactttgcagttgccaaaagtcactatcacatggactgtaaatgcatatgcatgatttcctaaactgttttagaactctccttaacaatctcaactaccctatttttccctgttccctggtgccacaggctgacaactgcagtctccagtttagaataaatattccatagtggtgacatgtcagctgcccactgatactcctttggaaaatggtgcgctgtggatcaagacactttggtatgatgcatatacaagttggaagactaaagaggtgcagtgtgatctgagcctccatcattgtcctccacaaacatattttcatattctttatgtggaagaatagattttaaagtacaagccaaatgattttcattggtggaactgacacaaaaaaagtaacttaaaaacaagaaacttggttattgaataaacagataagtttaaaaaaaaaaaaaaactacttcatctaccagtaattgatgtgtttattatctgcctcagaagccagggttggaggaagaactttagatatggatattaatgcttttgccattatacctaatttttgagaacagcaagccctatttgaccactctcttcagcctgtgtgttcctgctgttttgaagtaatcaaatgctgtgcatggtattttacctgagctgcaacctgttatggacttgaacttctgtttaagttgaaagcaagagtccctgagtataaaggaaaaacagcaaaacaaaaagcaaacaaaaaaaaactgcaaaagtctaaaatacccattggtgatgttttttaaaaaaatcttgctttcagctttcaggagttaatattctttgttttaatttgataattggatatggttgatttatattgggtttaaactgtggagctttcatgtttactgtaatttagtcttaaaatattttttacttagtaaccagtgcttttgataatgtggttggcaacaaaccagcaactatttagaagtgtcataagagttcattctttgagtattgggaaagttaattcagatcctactcaaaaagcatcttcacatattaaaagattcagacagggatctgtgtagaggagtaatttgcagttatttaacataaacctgatttgcagtgatctctaagtaattctgcaaaatccggtattactatgtcaagttattgcttttggtaaattgtctgacccagttattaatgaaagaatatggatttaaaaatttttaaactaaataatttgtgctgtcacagaaatggtattgttgctcttgtttactgggtataatttcccaatgcattgatgtgaagggatagaaaatctaaactaatttagttatccattggggggtgtatttactgtgatgaagatgagacagatgccatcagagctttgtgaatcagctggggtgttttcactgataaacaacacatagcaggtgtgcattcattacaaatatatgtatctgccaaggtggagccactttaaagagtgagttttgtcttgtatctaaagtggatacaagcgtatgtttaaactgcaagatttttacttgctagagaatctgttttaatatagtggtttggcctctgattatttataggttttataaattttagaatcaatttctctttaaggtggctcagatttttcaactcttgtgcacataaaattgagttgaagttcattgtgcctttttttctttatccaaattttgagttaaagcttcatatggtaactgcatcctgttcggacactatagtctaaatttttgaaactgtgtggtgttcgctaaaagtaggaataacaacgtaaaagctaattaaggtcacaaacttcggtgaaacccttaaaagtccaaatcttcttgatattgtgaaccgtaccccttccagtttagt

SEQ ID NO: 73372 - DNA, 1950 bp, Homo sapiens
gaaattcagttgtatagtggctgggcgcggtggctcatgcctgtaatctcagcactttgggaggcctaggcgggtggatcacgaggtcaggagatcgagaccatcctggctaacacggtgaaaccccgtctctactaaaaatagaagaaaattagctgggcgtggtgacaggtgcctgtagtcccagctactcgggagactgaggcaggagaatggcgtgaacccgggaggcggagcttgcagtgagccgagatcacgccactgcactccaacctgggcgacagagcaagactccgtctcaaaaaaaaaaagaaaagaaaaaagaaattcagttgtatatttatttctgtcttttagaggaagctaatgcacagacatgtaagctccatgaataaagatttctgttttgttcatttctataaaatcaccatttcctagaataatgcctagcttatagtaggcctatatattaatgaatggataaatgccaggttattggagcccaaatataattaatggaaatttccttataacttgtttaaaatggaagattttgtatacctaatcactttttaggtgcagtctctttaacgtaattcaggtgattttgttattgtctatataaaatatattagaaagacattaaaggtattatttttcaaataaaggtgccctatattttgttcaattataggaagcagtgtggttcctttccaacataacagcaggcaaccagcaacaagttcaagctgtaatagatgctggattaattcctatgataattcatcagcttgctaaggttggtcatattatgagttcaccgtgtctgttaatctgttaataaccaagactttttggataaagagtccattttatgatctcatttttaaccttcagggggactttggaacacaaaaagaagctgcttgggcaatcagcaacttaacaataagtggcagaaaagatcaggtgagtttgaaaacctgtaactgtcatgattgttaatactggaaagcatgctgctctcttatgtttcgtagttgctgactgtattgtgttctttttggggaaaagataattattattattttaagagatggagtctcactatgttgcccaggctagagtgcagttgctattcacaggcatgaccataacgcactacagcctccaactcctgggctcaagatagcctcctgcctcagccttccatgtagcacgacaccctactgggaaatagataattatataaataaaaatatttcttctcttttgttgtctaggttgagtaccttgtacagcagaatgtaataccaccgttctgtaatttactgtcagtgaaagattctcaagtggttcaggtggttctagatggtctaaaaaacattctgataatggccggtgatgaagcaagcacaatagctgaaataatagaggaatgtggaggtaagagtggattgatggaagaagagtatttgagcactggaactctgaaacataagttctttaaagtcaacttactagacagaaaattactaggatacgttgtttttaaatgatcacagtatgttgcttttctttattcactatatttgcattccaagaggattttccagaagacagtagtccatactttgcaaaatcaggttgtgaaagtcactgtatagccttctagagattgacaacatagcttttttttttttttttggagacagaatcttgctctgtcgcccaggctggagtgcagtggcacaatctcagctcattgcaacctctgcctcccgagttcaagcaattctcacacctcagcctcccaggtagccgggattacaggcgcacaccaccacacccagtggatttttgtgtttttaatagagacgaggtttcaccatgttggccaggctggtctcgaactcctgacctcaagtgatccacctgcctcagcgtccc

SEQ ID NO: 73373 - DNA, 1711 bp, Homo sapiens
aatcataccataagcacataaacataaaacatggtatgaaagccaacaagaaaaaaggtaagatagagcagtgaccaaagtgctttattatggaagcacagataattttgctagcgaagcagaaagcttcgttgacaaagtaacatttgagacgagcattataaggagacagaagtggggacagagtcaaagattatagtgttcatagttaccatttattgagtttaaaatctgccaggcactgttttaagcacttttgctatgttaacccatttaattcttacaaaattcttgtgagattggtactctcattatctccatcatctacaaacgttgtaaaagaagcagaggtacttaagtaatttgtctcatgtcatataactaggatgaataggattttcacaggttgagagaaagtcatttcaagaacacgggggaagatattaagaactcaagaatacatggaggtttaagagaatacatgtagataataacctaatacgttcgctaaggagttaatttgcagagtctttgattcttttttttttttttttcttttttttccgagatggagtcttgctctgtcacccaggctggagtgcagtggcgcgatctaggctcactgcaacctccgcctcccgagttgaaggaattctcctgcctcagcctctccagtagctgggattacagtgcatgccaccactccctgctaattttttatatgagtttttgattctatattaaagagttttaagtttatcttgtaatgactgcagagtcattgtagattttttaaatcgagaaatgatatttgttttatacagataaaattatctgtaacagacaaataacacaaatatggaaggtttgaagtagggaaagtttgactgtaggtagatgtattttgctatcataataggtttagggaagttgatgaaggcatggactattactaaattgcaataataggaatcgttaagggagaaaaaactttgagtgttaggaaataaagtgagtagaacttggaacttgttgttcctcagtggcggtattttccaaaagcaaaagacaatacagattttggattcgtcagtatttaagggattgatgaaaacctgggcattgaatgagatcacctggaggaggctgtatttcggaaggagggctaaaaatgtaacttaggaattcctggcgtttcaggaatggcagcaagggaagaagaaccaacaaaggagtttttaaaagtagtatgatgatggctgggcacggtggctcatatttgtaatcctagcactttggaaggctgaggacagtggatcacttgaggtcaggagttgagaccagcctggccaacatagcaaaaccccgtctctactaaaaatacaaaaattagctgggcatcatgatgcgtgcctgtaatcccagctacttgggaggctggggcaggagaatcgcttgagtcggggaggtggaggttgcaatgaaccgagatcacgccactgcactcccacgtgggcaacagagcgagatgctgtgttaaaaaaaaataattaaataaaattaaagtgtgatagaagcataaaatgtggaacaaatagtggggaaaaaataaggcagagatttaataggttctagatcatatagtcttgtctaaagaactacataccctttttatgtagtagataaggagccagagaataaatggtcaaat

SEQ ID NO: 73374 - DNA, 1032 bp, Homo sapiens
ccaggctggagtgcagtggcacaatctttgcccactgcagcctccacatccggggttcaagcgattctcatgtctcaggcatgtgccaccatgccaggctaatttttgtatttttagtagaaatgggttttcaccatgttggccagctggtcttgaactcctggcatcaagcagtccacccacctcaccctcccaaagtggtgggattacaagcatgagccaccacacttggccaactgtgtatctttataatggacatctttctctagtacctgctactttttgttgctatgcaaaggtattttgtgtgatttcctacaaccccctgctccctttctcccatattttaaaaagagatctctggggcctgaatttaacaagcaaagctttgtactttgtactggttcgaattttcttgactaaaggtgaagttgaaaactttaatttgacttaagtagcttattaagtaaaatcgtatttttacgttaagcaggtaagtgagacaattacggcagttttaagtgtagcttttcttaaatagctgtaactgtatatttgcatctccattttttccacttgacattttatgccataaagaaggttattaaaaacaaatgtttttattttaaggtacattaacttctgccagatttatttggatattttaacttgttaattgaacatatttcagtttaacatttgagatatgtttttggtttttttagattgaatttatcaggttttcattttcctaaaagatattcagacaaatttaacattgtctttctcgccctacaaaccatatttaccgctttttatgtcaaagttgttcatttttacagacatattaattaactaatgttaagtattgtttattttctttcctcagattttgccagctttatgtgtcctcatataccatacagatataaacgtaagttaagaagcagcttaaatgtgggattttgctcttgatgggacagaaagggtttttatgtaagtgtcagcatacattttatcaacttgtcaagt

SEQ ID NO: 73375 - DNA, 2624 bp, Homo sapiens
caaaaacaaaggctgggtgcagtggctcaagcctgtaatcccagcactttgggaggccgaggcgggtggatcacgaggtcaggagatcaagaccatccttgctaacatggtgaaaccctgtctctactaaaaatacaaaaacaaaattagccgggcatggtggcgggcgcctgtagtcccagctgcttgggaggctgaggcgggagaatggcgtgaacccgggaggcggagcttgcagtgagccgagatcgtgccgctgcactccagcctgggtgacaaagcgagactccacctcaaaaaaaaaaaaaaagttatcatgtgacccagcagttctactcctaggtgaaaccaagagatatgaaaacatattcatacaaacacttgtacataaatattcacagcaatgttattcataactaacccaaatgttcattaaccgaggagtggataaagtgaatgtggtgtatacaatggaatacaattcagcagtaaaaaagaatgaagtaccaatacctgttaccacatggatgaacctgaagaatgttaagtgaagtcagaccccccaaaaaacacagtatgatttcatttgtatgaaatgtccagaataggcaaatctgtaaagacagaaagcagatatttaatggttgcctgccgcttggggaatgtgtggcagaggaacaaatgtggaatgactgccttaagtatgagatttcttttttcttttttcttttcttttttttttttttttaagacggagtctcgctctgtcgccaggctggagtgcagtggcgtgatctcagctcactgcaacttccgtctcctgggttcaagcaattctcctgcctcaccctcccaagtagctgggactacaggcacacaccaccatgtccagctaatttttgtatttttagtagagacggggtttcactatgttggccaggatggtctcaacctcttgacctcgtgatctgcccgcctcgcttcccaaagtgctgagattataggtgtgagccactgtgcccggctgagtatgatattttttttttttgagacagagtcttgctctgtcacccaggctggagtgcagtggcacgatcttggctcactgcaacctccgtctccctggttcaagcagttctctgcctcagcctccaaagtagctgggattacaggcgcccaccaccacgcccggctaatttttatatttttagtagagacagggtttcaccatcttggccaggctggtcttgaactcctgacctggtgatccatctgcctcggcctcccagagtgttaggattacaggcatgagccatcatacccagccaagatttcttttgaggtcctggaaatgttataaaattagattgtggcgatgtcctcacaactctgtataaatatgaaatgtcattgaattacacacttaaatgtaaatttattgtaattatatctccgtaaagttgttaaaactgaattaatttaaattttaagtaaataatacaagtaatacacagatacagcaaaaaaaaaaaaatgaggtagtgcacagttgattgaaatttttaaaaagtgatctagcttatgctggaaatgggtataatgtatacattctgtaaagagtaaggattatgagaaattattttaaagtataagatagacctgatatgagattaatcagttctttggttaatccccgtatcaggaattgagattttgtagactaaagcattacattttaaggttacatgtttggggtaggaactcttttttttttttttttttttttaatggattataggaaggatttcatgctgttgctttcttttagttaatggtatgatagcaacctttagatactgccagttggttacggtacttgactattactaggggaaaatactgaaattgattctttttagggtaaagatatttgccacatttgttcttccagctacaatatgccaggctgtgtatttgatcaatttctttgatctgaaatctgtaaactcttcaacatgttgctagtataaatattagtttttctttattacagatgcagtacctctttttctgagacttcttcgttcaccacatcagaatgtttgtgaacaagcagtatgggctttgggaaacattataggtaagtggtttgaaaggaatcctcttaagaatctaaattaacttttttcctacattggcatagccattacatactatgtttcctctgaatttaatgtgtgttgactctcttcttgcctcataagtactgacttaagatgatgctctttgaaaaggatatacagtttgctgttagcattggtaggttaaatttacgttccccagatcaaaatctggagaaacaacacttgatgcctttgactaatggtgaggaaacatagaacgtcagtgttcccacatgagccattgcatacatttcagactttctcatcctgaatgtaagttttttttaaatataattttcatttctgtaggtgatggtcctcaatgtagagattatgtcatatcactgggagttgtcaaacctcttctgtccttcatcagtccctccatccccatcaccttccttcggaacgtcacatgggtcattgtcaatctctgcagga

SEQ ID NO: 73376 - DNA, 1047 bp, Homo sapiens
agattttttaagtagagatggctgctgggtgcagtggctcatgcctataatcccagcactttgggaagccgaggtgggcagatcacctgaagtcaggggttcaggaccagcctggccaacatagtgaaaccctatctctactaaaagtacaaaaatgagccaggtgtggtgatgtgcacctgtaatcccagctacttgggaggtggagacgagaatcacttgaaccccagaggcagagattgcaatgagtcaagatggcgccactgcactcccgcctgggtgatggagggagactccatctcaaaaaaaaaaaaaaagtagggttggctagcaggcaattggattataacaaggtgaaattcaaggacaaggcaaagaatagccatatcttatcagtcttaagattcattaatttaagtggtagttatgtgtctaaaaagatgtgttattgtttttttacagtccttcattacagtttgaagctgcttgggcattaactaacatagcatcaggaacttctgcacagactcaagctgttgtgcagtctagtaagtaaattccttactgtctgaactttttgtgttttaatgatggcaaggaagtagagttttgtaataaagaaattttatcttgtaacattttttaaatgatgacttttataagttacttttgatgaccgatatctttttcatagccgtcattaatttatcatgaaaaatttttaattgtggttattaaaagaagagtagagttttatcttttggagtagacatcatgctgtgataacaggattttaaattccgtttctgatatcttcaagatgctgaatggcttctgccttttagcttatgacatattttaaattttactttcctcaagatgggctaataattattgttaaatgacactgacacaagctctttagaaaagtactagatatcaccacgtacgttattatagtatgggacacttagctaattttaggtgtggtaatcaaggtgattttaagtagcatgtgatatggcagtaagttacattgaatcatgt

SEQ ID NO: 73377 - DNA, 1046 bp, Homo sapiens
aagcactctacacaatgtcaaacttatgataaatgtccatttattttttatttttatttatttatttttttgagaccgagtctcgctctgttgcccaggctggagtgcagtggcacaatcttggctcactgcaagctccgcttcctgggttcacgccattctcctgcctcagcctcccgagtagctggggctacaggcgcctgccaccacgcccagctaatttttttatttctagtagagatggggtttcaccattcacaggatggtctcgatctcctgaccttgtgatccacccacctcggcctctcaaagtgctgggattacaggcgtgagccaccgcactcggccataaatgtccatttgttattgcactcgttttttctatatcttttctcatttttttttatttttccacatgacatcttgaaagactttctttggctttataattttattttttacatttatccattttctcatttaagtcccccattcccagtattttgccaaaccacctaaccagcttaataactttctccttccagtctgaggcaacatatactgtcttactgtttttgatcttactgttttttttacttcttccctgcctctgatataccatcttatttcctgccttctgctagaattcatcatatacaggggaaattttaaaagtttgtggaaaagtggaatcaaaagacaataaaatatatgaaagataataaatatataaacttgatttctcaacataagctccatcaaggtcaagacacttttgtaagtgatactaccagccattgtctatccctaaagaactgagggtcctgggaatttaaccatgtcagcgcagtctttttcatgatattaactgaagaaaactagatgccctttacaggttgtttttttaagattaggaaacaaaaagaagtcacaagatggccaaatcagaactgtaaggtggatacctaatgatttcctattgattctcttgcaaaattgctcttgtttgatgagcagaatgaacagaaacattgtggtggagaaag

SEQ ID NO: 73378 - DNA, 2152 bp, Homo sapiens
gaggccgcggcaagcggatcacttgaggccaggagtttgagatcagcctggccaacacggcaaaaacacatctctactaaaaatataaaaattagccaggtgtggtggcgcacgactgtaatcccagctactcaggagtttgaggcacgagaatcacctgaacccaggaagcagaggttggaagtgagctgagattgtgccactgcactccagactgggtgacagagcaagactcttgtctccaaaaaaaaaaaaaaaaaaaaacaccacagtgggtgcttaatgaagtgtgtgtgtgtaaaagccagccaggaaattttgttaccgaagccagaatgtgacccttgtcattggtttgcagtatgcacatttaattcatattatccttatgtgttcagtatttgtttcataattgcctaataaagttgaagtagttttaatggatttttcattaacagtagtccttatgacttcttaagcatttattggttgcctttcagaacaaaagagatgaacacttattgaaaaagagaaatgttccccaagaagaaagtctagaagattcagatgttgatgctgattttaaagcagtaagttaccatgttttaatagtgattttaaaataatttttatagtaactgtgagaacttcatttttaatataagaccaactttataatgataatgaaagtatattaactcaggtacactgtttaatgaatgtaattttgttaataaactctgctgaactattttttttttctttttaagcaaaatgtaaccctagaagctatattgcaggtatgttactaaattaatactctcgttttgaagtattttgaaattgattttttttttttcatttctgaaatttacatttggtattgcagaatgccacaagtgataacccagtggtccaattgagtgctgtccaggcagcaaggtaaatactaatttgtctagagagagaattatgtcattcctcagttgtgttacctggtagtctagaagttaatatgttgttatttcttttcacagtttgaaaattatagcaattaatttctcatatttattttcctagaaaactgttatccagtgacagaaatccaccgattgatgacttaataaaatctgggattttaccaattctagtcaaatgtctagaaagggatgataagtaagtatggattttactccctattcagtttttttcagttaacttaaaagtttggattattacttaaccagtgagttcagtttggttttgtacttatgatgtttttcaatcgtcatatattttaatttaattttcttattctgtgatcatatttagcagacccagagtgcttctcgttttcatttctgaaggatgtgtatgttttctaggaaatttttatctcctgtttattgcctgttttaacttatctcaaatatttatagtctttattaggattttttattactaatattttaaaacaacccaaataatgtttgagtcactctttgcttatgagcctatatatagattaacctcatgactaagtcaacatggatggtttccagaactaagtggctctttcttaccctgggaatcttccagctgattactgatcctctgtgttgtctttaacagaacttcatccatgataagttgtccaatgtcagactttttgtttgctgcaaattaagaataaggggacaggttatatttacccaggagagaaggagtaaaactccactggatatcttttgaggaactggccctatttccatttttgtttagtgatatctcagtgctgtgccttaaactttgttaatttggattaactggggagaatataagtttgaactccaaaacatattaaaacaaatgctttttttttgcatttaagagcatctagactgaaacttgggatattttgctaaatgttgtccaaggaattttcagttggctagataagaatagtggtatataaatgttgccactaagggtttttagtatttaaaaataccatttgctttcgttgtgtgccacaacctctcccactttccacccccaggcctgtaacactttttaaaatactatcatgtttgttttctgtaacagtgttacttaagtaaaggtaagttttattttagctgttgaaaaaata

SEQ ID NO: 73379 - DNA, 1056 bp, Homo sapiens
aggctgatctcgaactcctggccccaagtgatcctccagccttctaaagtgctgggattacaggtgtgagccactgcacccagccaatattaaatgacttctaactcaaatacctgagtttttttttttcttcttcttcttttttttgagatgcagtctcgctctgtcgcccaggcctggagtgcactggcgccacctcggcttgctgcatccccccgcctcccgggttcaagcagttctcctgcctcagtctcccatgtagctgagattacaggtgcctgccaccaagcccggctaattttttttgtatttttagtagagactaggtttcgccatgttggccaagctggttttgaactcctgacctcaagtgatctgcccgcctcggcctcccaaagtgctaggattataggcatgagccactgcacccagctgagatctttatatactagcagtgtccgtattttgatacatctgtaatctttgtttttcttttctagacaatgcgaagacatagaaatgaagtgacagtggaactgcggaaggtaaggttgatttacatttaaagaaaagtaattagatttttctgatgttaaaattctgtgtatcttgaataatgaaaatactgtggcaaattagtggtcatccctaaaaccacacatcactggatactttatcatggtacttattcataatagctttcatttactgagggtactaggccctgtgtgaagcactttaccatcactgaaattctcataacatctgatgaagttagatacattttctttgacatcctctttctgtgggcttcctctccctttgcttatgtaaaagttacacatccttgttaaagatactttacagaagtaaataaaagtagaaaagtagaaaaaccttgtgttttcccaactgaaagcaactgctattaaaatttattgtattttcttccattatttttggaggattttagagttaccttcatcagattgtgttttcttttttctctttctttttttgagacagcgtttcactctgtccaggttggagtgaagt

SEQ ID NO: 73380 - DNA, 1630 bp, Homo sapiens
gaggctaaatgtttcaaattttggatggtctcactagcacaggaagagaacaggttcataatccaaaattataaaacacaggaagaaatatatcacagataatacagacaccaaaaacgtcagtcttatgtctcctaagaaattcagcaatagaggtaatcagagaaagactgtaaaataaatatttttaagatgattgaatcattttaagaaggacctaaaaacattaagaagtactacaaaaataaacttgctagaaatgaaaaataaatcattgatgttaaaacctcaatggacaggaaaagtaatggcatttaatattggaaatggagattacaacctgtagacagaaaagggaaacaaacattgatgactgcctgcttcgtgacacgagctgcttttattaatgtttattttatttaattcttggaactactttttgaggtagttgaatatcccacttttagagagtgctgttatctacagataaggtgaaaacagtaaattaagtaagaccagtgaggaaaatgatgaactcagttttgaatgtcttaaggaacatgtggggttttctagggagtgatccaggagatactttagttcaggagagagatccgggcttaaaattttaagctgcttaaattcccaaggttatgggacttgcagaacacaccaaaatctgtttacttagaaatacagcagtttacttaaaggatgctagctaaagggagctataattggaggggtgattgacgtctgacatctgacattttatgtcagcattttcaaatctatagagacaaaaagtagataaatggttttgtaagactgagatggggagcttggtagaatggtaagtgtctgctaaaggataaaaggtttctttatgtagtgatgaaaatataggccaggcgcggtggctcatgcctgtaacccagcactttgggaggcatagatgggaggatcacttgagcccaggagtttgagaccagcttgggcaatatagtgagacctcctctcagaaaatatgataaaattgattgtgttaatagttttataactcagtgaaatacactaaaaaccattgaattgtatgtatactttaggtgaattgttggtaagtgaattatatctcaaagctgttatgacaaaaaaggtaatggttccacattgctgtattgattaatcataacctagaatatatacaggtgagcaaaataataaatagtacgttttagatgccagatacaaatatttttctgtatttaaagattaactagattttcccttacatgtattctatttataacattgaaaagttacatattactgcccaattcagaattcatcaggaaacaaatctggattatccagagttattaatacttaattgataattgaagccatggagatatatatgataacctagaaagggtttgtagagtaactagatgaataggcaaaaccttgggaagagcaacatggatggatgaaggaggaagaccaaagaggaggaaaaccaggaatgtggtgttatggaagtcaaggagatgagaatgaatgaagtgttctcccgcaaaggtaccatgtaattaaggattgtgttccatgaatagaaggttgctgataa

SEQ ID NO: 73381 - DNA, 1006 bp, Homo sapiens
aagcgattttcctgcctcaccctcctgagtagctgggattacaggcacctgccaccacgcccggctaattttttgtatttttagtagagacggggtttcattatgttgggcaggctgatctcaaactccagaccttgtgatatgcctgctttggcctcccaaagtgctgggattgtgtagcagcattttaaatacaaagacacagtttgaaagtagaaagatgaaaaaatataatagtgatatgtacattttggactatgtaaggtaggtttgttgttggtactcacattgtaacttagtaataaagcacaagttttaatgaatgctttatataggtatactttactttgtacagtaaacaagtcatattttgtagatgttcagtaaggacttgttatggaaggtactttcactgtactgtcccagagatagattgtgatatcctcgtttcctaagtggggactctggggttcagagaggttaagtaataggttcaggatcacatagctagttagtgacagagccactcttatggtctttccattgtgtagctcttgtggctttaatacctaagaaggtacataggaatagatttttttgcaatttgagtcacattttttaaagcagctttaaactgtacacaatttgatactctttcacacacgtacatacactgatgaaaccatcaccacaatcaagataatgaaaatataatttgtaatagttctttttattctaatttaattgatattattctttttttcttcttttttttttttttattgagacagagtcttggctctgtcgccaggctggagtgcagtggcgtgatctcggctcactgcaacctccacctcctgggttcaagcaattctgcctcagcctcctgagtagctgcgactacaggcgcctgccaccacgcctggctagtttttgtgtttttagtagagacggggtttcaccatgttggccaggctggtctcgaactcctgacctcaagtgatcc

SEQ ID NO: 73382 - DNA, 1137 bp, Homo sapiens
gatgagaatgttctaaaattaggtagtggtgatggttatacaactctgtactagaaaccacggaacttatccttttaggataaattttatggcgtgggcattatatctgaataaagctgctactaaaataaaaaggaaaaatacacctaatagtagcataaattacctagttaagtcattttcagaatggagtttatgtagtaaaagtaacgtggcattctggcttctagtaatggtgcaatactgtagagttaccttcctatagataacaatgataatatctggacaaaatacattaatttttctttaaaggtactggagagtgatcaaaagcagacaaactggaggagagcctattcttaaaacataactatcttgtgaaattcatgagttggtgggtttttgtctgagggtgctctgtaatcctcctgctacttggtgaagaataccacaaccttatttgcatgaaatgtaaggatacagagttctgggctaacagaacagcaagaaacttagtgggtaaatcctggaagagaggcagctacaaagaaagtgagtccaaaaaaattcgcatataagatctgtccaaattcttggcagtttttaaatactatgcatgcagtggtggcatgtgtagtacatgtatgtgtggcacacaagttgggttcttgacatttagtaggtagaacattaactctgaatagattgttttaagttaaagtcacagttgtgatccctagtgagaaatctcaaaattaaaagatgaacctaaatgccaggagaggaatatctaatggaatgctaaaaaaaaaaaaaaaaaaaaaaaaaaaaattgattaacccaaatgaagacaggccggcaggaagagaaataaaaaacaaacgagatgatcaaaaacaaaaataccataatgaaatgcctgatttcaacaatatcagtcattatgatacatttaaattgactaaagcatcccgattaaaaggcagagattgtcagactggattaagaagcaagacccaactgcatactgtccattttaaatacattttgcactatgtagtgcattttggctacagtgcatattggcttctatgtagcagctttttttttttttttttttgagacagagtctcgca

SEQ ID NO: 73383 - DNA, 1119 bp, Homo sapiens
ggcaatggagtgagactccatcttaaaaaaaaaaaaaaaaaaagaaatatttttcaatattcaggtgtggagtaatttgaaatttgggtaggacagacaagagccagattgtgaaaaaccttttcgctggggaacattttaaacagtgaaatagatttgtgcatttagaagcattgctttggttataccataggggatggattggtgaagatgagaagagagtttgggagtaacagaaaaccctcaaggtctcagatggggagtttgggagtaacagaaaaccctcaaggtctcagatgggtggcctgactatagtgttggcactgagattgaaaagcagaaaaagttattaggactaatcttttggcatattttaccttatagaatagaggttggcaagttttttgtaaagagccataatattttttaaaagcctaaatattagggctttgagggccattctgcttgtattgcagctattcacctgtgtcttgagcgcaaaagcagccatagactgtaggcaaacaaatgagtgtggttgtattctaataaagctttatttatgaaatcagttgggggtctagattttgctcacaggcccttctaggctagcgtatccagtggtgaagattaatagctcaagcaatggctagagtaagatgataatataggtgagggattgtagggataagaaggaaagaggagcaggggaggaaagaaccctgaggaaccaaatcatattaggagaagaggtgaaaatggtactgagggagtctgtaggaagcttagcaggaaaatggtgtataagaacttagggaggagagtttcctgaaggaggggcagtaattgcagtatcaaatgctacagagaggagaggcatgatgagaccttacaataagccattcattgtatttgctctttgggggccagtgagaagggaaaactgagggtggtggaggctggaagctagatcatgatgagctaaggagtgagttggagttgagctatttagactagttagagctttgatttaaatatttggtagtcatgggaaggaggaatcacaggttagcttgaggaagacgtagggtggaaagaaggctgttcgtttgtttttta

SEQ ID NO: 73384 - DNA, 1097 bp, Homo sapiens
ggattcgtagggctgactgtactgtgccattttatagaagagatttgagcatctgcagattttagtatcttcgggggagggagcatctggagccaacccccccgaggatacagagggaggactgtattctcattttcaagtggaggtgaaggaatattaaaagtataaggaggatgtagctatcctttcttgcagttttgctgttaagaaaaattttcttacagcatagccaacatcagcagttaaaatatggtaaaataaatcatgactatatttacttggaattaatcattcttggttttctgggttagggaggttgtatacatactagattttactttattttgacacttgccttaaatagaatataatttagttgttttcttggttcttgagaatcaccattatgcatatggatattgggttttgcttttacataagtgatgccttcaggttgttaaattaacagaattttcttcttgatttttacgcttgtggagtttttgctcttcttaatttttttggcttgtccttcccttgcttttggtctatcagctttcttttgatactgtcagcatatttacttgtggtagcccctatgtttctttttatttgatgctttacatattctagtgacttgggaaacagatttattaaacatttatttagctttttttttttctttgagacagggtcttgctctgtcacccaggctggagtacagtggcacaatcacggctcactgcatccttaacttcccaggctcgagtgatcctctcaagtagctggacaggtgcacgccaccacgcccagctaatttttttattttttgtagagacagggtttcgccgtgttgtccaagctggtctcaaactcttaggctcaagtgattcacctacctcagcctcccaaagtgctgggattacaggcatgagccaccgcgcgcagcctatttagtattttctacatgctatgtagacatcattaggtgccaaagattataaatatgaaaatattccctgatctaaggaagttcagtttagtgggagagactgatacttaagcatatggctagtgtacagtgtggtaagttctat

SEQ ID NO: 73385 - DNA, 1006 bp, Homo sapiens
gtttatgagatttttcagtgagcctgatgcctgattatttctccagattcagccttcctcccccacccccttaagccctagcaacactgaacttcttatatgcttatacataatctggaatcccgcctgcccctcctcgccagtgctatttctattctcagggccatcttgctgactggaatatccttctctgcctcctgttgcctggctaattcctaccacttttaaatactcaactctgggtaggtaccattctttgctcctggaagaagtctgagtgtatctttctcgttgcaattatgataatgtattttaattagattttatttttcctactagattgtgagctttttgagggcacagactatgtatcttcattgcctaccacttagtacagtggctagaaccaagcaagcactaaaatattccttgaataaatacatcgtaggcaccgcagacacaataatttttcccatgtgtatttttgaactgaaatgtttactcttttagtgccttttcctactgcttcccaaatcaactccaagctttttattatgacaggtaaagttctgggagattaaggtatatacatagtgaatgaattagtgattaaggctaatttgtatggctaagtaacattctattgtatgtatataccacattttgtttacccattcatctatagatgaatacttggattgtttccaactttagtctgttgtctcccaaccatttaaaaatgccactaatttgttcgggtcagttttcttttattaaattgcactatatgaaattgcttttttccaggtttgtaacaacagccaagtattggcaatttcatatttagcctaatagactgtcctaattactgggtttgtctgtttccttctggtggtgcttaactggttcctcttatttgtttttttaccacccttcagattttttgtaatctggaagtttttttaaaaaaaaatttttaaacattatttttgagacagaatcttgc

SEQ ID NO: 73386 - DNA, 2249 bp, Homo sapiens
ggatgaatgggagtgagctgattgtgaaggatgaaagaaaggtggccaggcaaagggcgggagaaggctggtggaagaaaggggcattccagactagagggagcagtaattgaagagtcctgagagaaatgtaggagagagagagactaaagggtaaactggggtcaaatctgatgaagggcctttattggggatttaggcatatctaagagtagataaccatgcttagtcttgtccattagaaacagtacaacttagctctgtaactgagtagttgtggttatcaggctgttccaaaacagtgagatgcactttgataagctatgatgcctattttttcacatataggatagacaaaaactaaaacatgttataaattatagaagcagctgatacacaagatgttaggtgcaagaataagatccatacttgttaaagaaaataaaaggatagagttatgccaggggatttgagtagagagagggttgaggaagaaaatttctttgtcattcaatcgagagagactttaagagatctttggagaggaaaaaaaaaatgaggttagtgaatcttataggaaatatgtaccaaacttaaaaggggcatgttaactggtgaataaatatccaggtaaaaaagaagagtgattatattaaagagaggagacttccaggtggcctgtgttgatgcaagaatatcttgtggcaaagagttgcttggaagctttttcttaatagggagatgtgaaggaatttattccagagcaaagaggagatgtaacatgattagagcaatggaaagggtgacagggcagtaatacctagaattcattttggagaaatagcgctgttgtctgatctgcaaagaagagttttccaaaaaattgagactgggaatggctacaacctggaatgaggatttgatgatgctgttcttcctccctcttcctcctccttcaaattctctttataaagatcactgaagagaaagggagtaaaggttattctgaggtttataaatggaggaagggagggagtaattatcatcactgatagaaatttggagcttgggtaggggatgcattttgtagcaaaaactaggaagtacatattgaaagggaaacatttccttttatttgttctggaatgtgctttttttttttaaaaaaaaaaaaaaaaaaaaagagggtctggctctgtcgccaagggtggagtgcagtggcccaatctcggctcactataaccttcgcctcctcccaggctcaagccgtccttccatctcagcctcttgagtagctgggactacaggcacatgccaccacacctggctaatttttgtgttttttgtagagacggggttttgccatgttgcccaggctggtttcaaactgctagctcaagttatcctcctgccttggcctctaaaagtgttgggattaggggcatgagtcaccatgcccggtcctggaatgtgcattttaatgctagaccttttcatgtaaggcattgattcttaaaaacttttcctgttttcaaagataacttatagaaaagtgtgcaaaacagaaatgttctgtttaatgaataattacaaaacaaatgctcaggtaactgcaatccaggtcaactcattttcttgctgctgtatacctcaagggtgtgacattttcattagtaacagtaattaattattttaaaaaccttaacatttattgtttacagtatatcagtgctaagtactttatatagattatctatttaatcttcacaacagtcctatatcaagtaagtactattattatccccatttactgctgaggcaacttgaggcctacaacccttaagtaagtggccttaagtcttccatcgggtgttaagtggcaaagcctggacttacaatatatcaaagctttatgctaagcggctgggcgcaatggctaacgcctgtaatcccagcactttgggaggccgaggcaggtggatcacccgaggtcaggagttcgagaccagcctggccaacatggtgaaaccccgtctctactaaaaatacaaaaattagccgggcatggtggcgcgtgcctgtagtcccagctacacgggaggctgaggcaggagaatggcgtgaacccgggaggcggagcttgcagtgagtcaagatcgcaccactgcactccagcctgggcgacagagcgaaactccgtctcaaaaaaaaaaaaaaaatacaaaaattagccggtcctggtggctcat

SEQ ID NO: 73387 - DNA, 1054 bp, Homo sapiens
gttttactaaaataaattggatacacaggttcataattctcttacatacctcttgctccaagctagtagaatttccaagtggttgcaaaactaaacattcatcgcggtcactcagttagttgctactcagcatgttgccattgtctcattaaggtgacattagcaggtactatttgcaaactcggcttattgaggcagcgctagaggtctctctgcagctactgaaaacagtaagtataatgcacaaacttcactgggaccgtgacctttggatttgttagggggaaaatggttttaaggccgcagccttctttgctaatactaggcgacatgatttgcagttttgtaatttttgataagctagtgtgattaagaggtgtgttttatcctgtcttaaggaaggttgtggggtaaatataccattcagtgttctattttgtagagaaacagacaaactcaggccgtttttcagagctacaaaattaaatactagtaggaaagaacctagggagatatccgtggaattcccatttaaatgagtcaaataaagatcatatattctttcctggtcatggttaaataccctttgtaagaaatacatctaagcgaaagtaaaacttgggaataggaacaagaaattttggaactgcctcctgttattggtccacttgatgacaagtgttaattttgaacttttcccattaggaatttttcttgaagcctatcctgttccaaataaaaatttattgaaaaatactcattgtttgtacagaaaaaccagtaacattcttctctcggatattggtacaggtttttgtttcattgtttacctctattgtgttctggtagctcagtgatacttagtaaggactcctgcacataataggtacacaacaaatatttgctgataagaatgtaacccgtgacttttagatgcatgaaaaagagcatggttgctaagccattcagcctggtattggtcacaacattacatttctcgggattctatagtgtaactaaaacatgaaatagacattcaaatggtagttctaat

SEQ ID NO: 73388 - DNA, 1097 bp, Homo sapiens
ctcactaggcgtggagaattactccaggcggatcgtggcatgatgggaactgtagttgacgaccgccgccccgcgcctgaggggcagtaaaagtcgccaggtccggctccatttctggcacaaaacttgcagcaccgaggggttgtggagagcccttgcaggggaagagggcagggtcatcccgagaaccaacgggcacgtatagcccggcgaacgcccaagccggtcaccgcccccggtcacgtgtcgccagcctccgcggccgcgcgccgctctcagcaccgttcccgccccacccggcccggcagtcggcccgcgcctcccccggcgctactgccacctcgcgctcggaggcgtcacagaacgtgctcttctctcccctcccccctcccgctctccccctcctccccctcccgctccaagattcgccgccgccgccgccgcagccgcaggagtagccgccgccggagccgcgcgcagccatggccgagaaccccagcttggagaaccaccgcatcaagagcttcaagaacaagggccgcgatgtggaagtgagtgtgcttccgcggtctgggcccgcctggccgcgccggcccggcgacgcggggaggggcggggggccggcgccgggctggttctcgtcggcttgtggtcggccggagttggccgccgcctcccgtcaccgcggccccgggctgggcggagcgggcggcgagacgccggccgggctgcagtcaccccccggagctgccggcgcggcgaccgggaaatgccggcgttttcggccccgtcacgcgggcgcggcctggtgtcggcgaggaggggatgtggagctgaggcggggtccgcgggccagggccgcccggatgaacggggatgctgccgcccgggccctccgaccgcacagccgagggggcggccgctgcttgcgcccgccaccggtgcaaccttccgtccggtgcagccccctctgcgcctcccgcgcggctcacatggagcctcggctctgccggtccgggctcctaccttctgcgagccgggcccaggcgggcggtggcggcccgcagaggggggtggggaccagccgggtaactgac

SEQ ID NO: 73389 - DNA, 1815 bp, Homo sapiens
aattctgtagagaaagagcagcgttttctgtatgagtgtaaaaggtttctctattcatggtatgtagtacttatattatcttagcattcaaaatataaaatccagattatacaaatataattctaggatttaaactgttggctttgttttacctctaatgtggactcttgggatgttacctgactttatcccccctcataatcactactcatttttttagctcagttcaagtaggattctaccaaattgtcaacccttaatgaaaattgttgtcagcctatgcttagctttttgtgtttccatacttcccagtcaatgctttctgacggctcagcttttatggaacgtttctgttttttccttcctagggtattacttatgaccatgtcgaattaaatgtatacttgaatggaaaaaacatgcattgtccagcatcaggtatacgagggacagtgtatccagttgtttatggtaagcaaaaatatttctaatgtattattacatacatattaacttgtttggtgtgtgtatcagtctgttttcatgctgctataaagacatacccaagacttggtaatttataaaggaaagaggtttaattgactcacagttccacagagctggggaggcctcaggaaacttacaatcatggcggaaggggaagcaaacacatccttcttcacatggcaataggaaggagaagattgagcgaagttggggaaagccccttatgaaaccatcagatcttgtgaaaactcactcacttttacaagaacagcatgagtgtaaccacccccatgattcaattacctcccactgggtccctccacaacacatggggataatgggaactataattcaagacgagatttgggtggggacacagccaaaccatatcagcgtgtatgttacttttatagctatcatctagaaatctggacacattgttaataaggacctttttattttatttatttatttattgtttgaaacggagtgtcactctgtcacccaggctggagtgcagtgacacgatctcagctcactgcagcctccgcctcctgggttcaagcgattctcctgcctcagcctcccgagtaactgggattacaggtgcctgccaccacgcctggctactttttgtatttttagtagagatggggtttcaccatgttggccaggctggtcttaaactcctgacctcagatgatccacccacctcaacctcccaaagtgctgggattacaggtataagtcaccgtgcccagccataaggacctttttatatggattgtagtcggtaggatattacaatcccactttgcaggattaaggatagtttctgttccccatgtattaaaataaacttgctaaatacaatgattacacttaaatatgcaataaccgtactccctttttcaacatgtagttttatgttttagaaagtttcaaaaagctttactgaatttagaaaactttttctgcaagtcattgggaatgattgcatggccaggaaacataattataaataatattttggaattagagatgggaattttatgtagactgtacattaataacccttacaaaattccttaaatgttaatgctcttctgagggaaatagtgacttagaattttaattttaactttaattttttgtttttttgttttgttttgttttgttttgttttgttttgcgacagagtcttgctgtgtcccccaggctggagtgcagtggcccgatcacagctcactgcagcctcaaactcctgggttcaagcaatcctcccacctcagccaccccagtagctgg

SEQ ID NO: 73390 - DNA, 1454 bp, Homo sapiens
atttggagctttttgtttgtttgtttgtttcggttttgggttttgttttggttttttgttttgttttgtgacagggtcttgctgtattgggagtgcagtggcacaatcatggctcactacagcctcgatctcctgggctcaagtgattttccccacccagcctcctgagtagttgggactacaggcatgcaccacccacacccggctaatttttagaattttttgttagtgatatggtctcactttgtcgcccaggcatgtctgcttctgggttcaagcagtcctcccgcctcagtctcccaaggtgctgagattacggcatgaggcaccatgcctggcctgaatttggagctttaagaatgggtaacttgttctttctagaaagttctacataggtataacttcaggaagaaattgtaatgcttttaaaatactccctatattctattcattaagaaaccaaatccctttgatgtttctttattttcaatgataccagatggtcttggtgtctgtatactcaagttggagaatttaattaagagtttataggtaagggttcagcaaatttcaaagctagcatgcaaattatttattttggctaaactgttatttgctgataaacatttgttcccccagaccattgttaattggcagtcttggtatgtagctcatatcaggccacatgtagagtatgtagatgaatgtgaaccaactagagtgaactcagagaatggaaaccatatgaggtgtttgaatgtcatgaggagtggctagaggtactgagaagcctgcttgaaaaagaaaaaaaataataatcttgagacttgtttattctttattgcacaagaggacaaaactgggcaaatcaagtttcagggaggcaaatataaactccaaagcaagggttttctactagtagtggatgtgtacattatagaaatgactgccttacaggaccttaaaatgggtaaaatgggaaaaacactcttaatcaagataataaggcattttttgaagtgaagcaaatcaccatatcagcttgaacaaatcctagctttaaaaatgtaaggcagagccacgcacggtggctcaaacgcctgtaatatcagcattttgggaggccgaggggcggatcaggaggtcaggagtttgagaccagcctgaccaacatagtgaaactcagtctctactaaaaatacaaaaaattagccgggtgtggtggctcacgcctataatcccaggtaatcaggaggctgagacaggagaatagcttgaacccaggaggcggaggttgcagtgagcagagatcgcgccactgcactccagcctgggtgacagagcgagactgtctcaaatatatatatgcaatgaaaatactaggagtagagacataatttttaaatatctttagagatatttaaagcttttgtaagttagcgcttgtcttaaga

SEQ ID NO: 73391 - DNA, 1175 bp, Homo sapiens
acactaaaactttcttcctctttggactgaatacctataattataactatatggtagtttaagtttccttgtgattagtcaaaaataccattttagtatgaagcaatgaagtctattatttgttgtcccataattgagaaagcttaaatacaccttttattaagagtttgtaaattctagcttagtctacacagatttttatatcaatttgtttatatttttattaatgtcatttctggaagtgtgaaaatgttaatgttcaacaagcaacattaaaaatagatttgaaacatttatatatagagaggtacacatttatttactgtttaggtactgaagattatcacttaataaaaaatatatatcccagcccccttgaagcttattaatcttgggggtagaggagtgagtgatggaatgaatggacaaaaaagctggtaggtactatatttggtatgtcagagagtgacaagttctgtggagaaaataaagcagggaaagtgagaatgatgtgataaaggtgtttgtaaggcagaagagagatatttttaaatagtatggtcaggaactaccctacagagaggacatttgaacaaagacctagaaacaataagggagcaaaccatgtaggtacctgggagaagacccttctgagcagatgaaatagcaaatacaaagaccctgaggctgaagcattttttgtgtgtacatggaacagcaaagaggcacatgtagctgtgatcaaatataaacaggaagaatagtagcttataggatcagagagttgataggggccatatcttgtagctgtttaagctacaagatatctgagctacagattcagtttttcatactttgttttgagtgagtgtcgctctgttgcccgtgctagagtgcaatggcatgattctcggctcactgcaacctccgcctcctgggtccaagcaattctcctgcttcaccctcccgagtagctgggattgcaggcacccaccaccatgtccagctaatttttttgtatttttagtagagatggggtttcgccatattggccaggctggtctctagaactcctgacctcgtgattcgcccacctcggcctcccaaagtgctggaattacatgtgtgagccaccaagcccggcccagtttttcatacttctttaagatagtttt

SEQ ID NO: 73392 - DNA, 1148 bp, Homo sapiens
gggtctcactatgctgcccaggctggtttcaaactcctgggctcaagcagtcttgccttagccttccactgtgctgggattataggcatgagccaccacccctggcctaatttaattaaaatctgaacaaaaggccgggcacggtggtggcttatgcctgtaatctcaggccaaggcaggtggatcatgtgaggtcaggagttcgagaccagcctgggcaatgtggtgaaaccctgtctctactaaaaataaaaaattagccaggtgtggtggcgggcgtctgtaatcccagctacttgggaggctggggcaggagaatcacttgaacccgggagaatcacttgaattccagtctgggcaacagagcgagactccatcttaacggcaacaacaacaaaaatctgaacagaaatgctctatttacgttcttttccttatctgtagtgttttaaagtcattaaacttaaaaatgatgttcaggagaagatgagtgtatttgcatagtctgtcataactctggtattattttgtacaaggagtgtgttagggttttcagttgtaaccatgcagaaaatctacaaaataaaagcagttgttaattagtcctttacaatcagaattgtctattttggaaatttatgaagtacttcagatgtaatttaagaaattgtatttgagccaagcgtggtggctcacacctgttatcccagcactttaggagcctgaggcaggtggatcacaaggtcaagagttcgagaccagcctgaccaacatggtgaaaccccatctcaactaaaaatacaaaacttagctgggcgtggtggcgcgcgcctgtaatcccagctactcaggaggctgagtcaggagaattacttgaatctaggaggtggaggttgcagtgagccgagatcacgccactgcactccagcctggaaaggaggggaaagggaaaggaaaggggaaagggaaagggaaaggggattgtattcgaggctgggcacggtggctcacgcctgtaatcccagcactttgggaggccgaggcgggtggatcctctgaggtcaggagttctagaccagcttggcgaacatggcaaaaccccgtctccactaaaaatgcaaaaattagccaggcatggtggccggggc

SEQ ID NO: 73393 - DNA, 2235 bp, Homo sapiens
tctgatatcttttagagaaaaggaatttcatttctacatctgagaaagtggaaactaggagtttcttccttacctggtaaatgggccagaaacagggaataggaagattaagagctatgggatttgttttatttctcatctcagggtaccaaattaactcatcatcccaaggattcatattttagaattacttaaggattcatattttagaattactgtatcaaatgatatccaactctaagagaacttctagtatgaagatcaatgttgaaagtaaaatatttagattattaataacaaattatttaagggagaattagtttgtttagagctttttttcttaactatatttggaattaaaatgtcttaattagatatttaataaaattaacatttagaattaaagtatttttctttaaaagtatatttgcattttgctagcttaagtttattgaaactgagctcttgtatgtcatttcatgtttttcccttgatgtgaagtcttacctatttgatgaagatgtcttttgaaaggtgtactgcaaggaacaaaatgtttgtaaattctccttttaccaaggtaaagatcaaattttataaatttacttgtttgtttatacaaggaaaaataacttcatatattgaatatattcaaaagtttaagcatttagttgtattgccctgttaagttggcatagcaaataaatgcttttcttttcctcattttattctttgtgtttcctaacctatagcactgtgctgggcacagaatggacttcagttaagtttttgatgtagaaatgttttattattctacttaaaatctccttaaaaataattatgcatattacatcaatgttataatgtttaaacatagatttttttacatgcattctttttttcctgaaagaaaatattttttatattctttaggcgcgaatgtgtgtttaaaaaaaataaaaccttggagtaaagtagcagcacataatggtttgtggattttgaaaaggtgcaggccatattgtgctgcctcaaaaatacaaggatctgatcttctgaagaaaatatatttctttttattcatagctcttatgatagcaatgtcagcagtgccttagcagcacgtaaatattggcgttaagattctaaaattatctccagtattaactgtgctgctgaagtaaggttgaccatactctacagttgtgttttaatgtatattaatgttactaatgtgttttcagttttattgatagtcttttcagtattattgataatcttgttatttttagtatgattctgtaaaaatgaattaatactaatttttcagatgtatcatctcttaaaatactgtaattgcaatttaataattgtattgaatgccatcaagtttttttaaaaagcttatgcagcattagaggaatttattttaatgcacatttatattcaacatagacattaattcagatttttacttgggataaaacaaattctagttttccctttgttttgaaattacttttaaaatatgtctttacagataaatataaaatatattaagcattttgaacagagcttagaagacaatatttagtactgtttctgaatatttctttatatctgaaggggaaaagccatcaaaatatgtgaattaaatacctaaaattctggttgtcaaaacgtcacacttaaccataactttaaaggtagaaaaacccttacaagtgaccaacccactcattggatagctaaggaaacacaaaactcaaataatttgctacacatcacagattggggtcttagtcttatgtcttctaactttataatggtatactatttttttcatgtttttattaaaatgttttcttaaatccttagccaaagatttttgtttgataagtcaaaaataaggtcttgtttactttgtttacttttttgtattcaagatttaactcagagtaagaccaaattatcattgtagttttattgatataaaatgtcaacataatttaatttttttttttacttttttgtatttttaaaattttttattaaaaataaaagtagacagccaggtgcggtggctcacgcactttgggaagccgaggcaggcggatcaccaggtcaggagatcaagaccatcctggctaacacggtgaaaccccatctctattaaaaatacaaaaaaaatagccaggcgtggtggcgggcgcctgtagtcccagctactcggga

SEQ ID NO: 73394 - DNA, 1071 bp, Homo sapiens
taacaaggaaaaaacattaacttatatacaatttattttttccatatttcttaaaatatattaaattctaacatagaaaaccaacttaagagatttaaagattcccatctactcagatttattatattcaagttgaattattaagcaagacatttaatttacttattttgtctcacctttcaatataactactttttttttgttggaagattataagaatggagagttctggtatatcaaaggcccacagcccagaatataaaccaccagacttggaactatggttgttgtgtaaaggataaggactgaatgattctgtcttcagaatatttttgtatttttttttttagaagctcttttctttggctctacatctagccattagggctctttctgtatctggttaggcaaagtggcttttctttcagccagcaaacgtaaaagcagagatttaagggatggagtcatgatgatatttccagtggactaagataaaggattgaagaaatggcatggtctatactagtaaagatttcctcacagctagtccattttgaatggagagataagtatggaatagggaaccagttatctgcccaacacagtacctaataatgagaataattttctgtattcaaaggttcttagtggttgttaatgtcttaaaagagaccatttaactggaatggaagtgttttctttggagaaaagcaggaaacattggatagatcttaattatacagaccttgatacttaggcagaaagtagagattctacttaggaaactagaaattactttttttttttttttttttgaaacaaggttttgctctgtcacctgggctggagtggagttcagtgcagtggcatgattatggctcagtgctgcatcaaactcctgggctcaagtgattcctcccacttcagctcctgagtagctggtattacagatgcccagctgatttttaaattttttgtgtgggggtggctaaatgatgagagcacatggacacatagaggggaacaacgcacactgtggccttttggaggatagagggtgggaggatggag

SEQ ID NO: 73395 - DNA, 1043 bp, Homo sapiens
accattgcactccagcctgggtgatagagcaagaccccatgtcttaacaaaaaaactaacaagaatgctgcactgggctgaaacatacaaatgctgctgggtgtttataatctgattgttctgtgctgtataaggatcagaatacagcggtggcaacctcagttgaaatgttctaacttatataatgtgctgaaatttttaaagtcttccctctttttcctaggtttaataatgatagaatgaagaccacaataaaagagacctctacttagctcagcaattcttaccttgtaagtattaactctgagtctccctattactgtttggtgtcatgttctggtttatttctgatttttttccctgcttatcctattatggtaactttctaacctctcctagcccctctacacgttgagatttgatgttaattaatagtttagagcaagaataatgccattgccttggtaagttatttagggaagtattttatacccaggccctataatctccaagtctgagaatcacaattttgagcccttttccttcaaaggaattaacaaataggtaattgtcttttttagtactcattattcaggtttattggtcttatggttttataaattgagagtattctctccacttgagaaatgattttgtaaagtctgtttttaatttcattaggttacacttgagacttctttgtgaagagcttaacatttagctgttaaaacttgaggaggtggccgggcgcggtggctcacgccttgtaatcccagcactttgggaggccgaggtgggcggatcacgaggtcaggaggtcgagaccatcctggctagcacggtgaaaccacgtctctactgaaaataaaaaaattagccgggcgtggtagcgggcgcctgtagtcccagctactcgggaggctgaggcaggagaatggcatgaacccgggaggcggagcttgcagtgagccgagatcacgccactgcactccagcctgggagacagagcgagactccgtctcaaaaaaaaaaaaaaaacaact

SEQ ID NO: 73396 - DNA, 1024 bp, Homo sapiens
attataattagttgctgatatcacaagttaggtaatatattgaggatagaaaagaaaagctggctatggccacacaggagtgtttctttcacttttggactacattatctttgttttataaaagcccagtctaacaagaccgaattcttgttgatttcactataataaaagaaagaaaacaacattctatattaacttagtgttgtaaataactaaaagcaggcaacagatgaaaacttatgtcttttttcttactactaaactgcttactttttctatttaccatttctcactgaaatatcttttatctgaactttttatctagaaagcttagattattctaaatcttttggaaacaggactttgtaatttcaaataatatagaagaatgtttttatttttataatttgaatttgcgccgatttttataacctaaatattctattttttttcttccttttacatctaatttcaataggttagagttacagggaagtgtgaatgttggatttctataaatgttctgaatttatttgtagcggtcttggtgggaaactactaatgcctttttttttttttttttttttttttttagtgtataaagccaaatgtcccatttaaagtttgacatttgcaatagcattctatttaaaaggtaatcatatagttgctttctggtcaccttcattaaaatcactcctgatcactctcactcttaatattttcctgtgccaatcacagtaaattcagaatattagttccctggtaatattactaaaaaaagctttgtcatagtatgtgtctagttatctgaaaaaataaatgagcccacaacctttcttggcattgtgaagtcaagcatattcagccataaattgaggttacttttttgttgttgttgactaatgctagaggtttttaaaaaaaagtttatgtaatttaacagataacatattaattactgttacctcccctaactaaaacatgagttacataatcctctctattgaaagcacctcatttt

SEQ ID NO: 73397 - DNA, 1153 bp, Homo sapiens
gttactgtttcatacttttattttaaaatgtctcaaacttagccttcttgattaggtattattatttaaacttacttgccagttctagcctatgtgggtttttctttttaatagtttatagatctccaaatttttctgactttttatatttttctgaatcacaagttgcttaaggttctaaaagatgagttgcatttacagttaaagctgtaagtctataaatagcatcacattacatttaaaggtaattgaacagtgaatatttctatttctgttactcatcaattaatactatgtacttactaagtttttaactttgtattgcacatttaaaataggtaaattgcatatggaagtttttttaatgggatttatgcaaaaacagtatggactaaaatcttatttctttgctaatagtgtctaaagtcaaacatatggtggtgattagatatggggcacttgggagctagaggcattttgtaagcaaaataaagtgtcatttcttgattggagttttacactttcttattttccaggagaataggtagggaagttactctcaatgaatttaccccaacattggttaaaactcttcagagaattttgataattgagcggttaaatctagacttacaaggggaagattattatatatgtcattaatttccttttccttgcatacattataggttccctttataatcaaaacaccaattttgtcttttttctctccccaccccactttttaaagaaaaattattttaaaaataattttatcatatagtgatataagcagaccttgagaggtagattgatgtctgaaccatttttcctctgtgtgtcagtttgatattcttttctcagcttgctgtttaagaagcagcagcagcaacagcaacagcagtgaataaacaagttatcaccacagcccttgttcttaccccttacagctgggagcagaggctgggagatcgatgctgcttgtcagctgttgtgcagaataacatcaatatgcaataatggtggccaaaggagcctgcacccatccgtttttacaaacccaggtgggaagagcccaactgtcactgtaccacatacacagtatagagaatacattctttagcagaaaggttgcagcataaagagaacagta

SEQ ID NO: 73398 - DNA, 1236 bp, Homo sapiens
ccaggttcagtttgtcactttcaatgcaggtatctttagaacagccttaatgagttaaataggaaaagagagacagcatttgagtttatatggtagataagatataaatccacagagtcgtccaaatttagagagtttgtgatttgtgatctttgaagatatcaaaacttattttgaacacaaatatttagcatcatataattgttcttcctatagttattatactgggttataaacttctaataatttagcttagtaaataatttcatatctaaaagaatcaatacaaatattaacagtttacttgtatttggtcaattcttacagggtgagaaactttaacctaattaggagtatgggttattttaggaggccaattaacaaagagttcaactgctgtgtatgattggctctcttttaactaccccttgtaagacattttgtaaagattttgaccgttttaaatttgcaaacctgattatctaaatttaagccttgatgtgtagttaattatgttggaatttgggggaagagatttattgtgttaatttttatctttttttcagtgatttgtatctcattttttcaatatttatgtttttggctaaatgcacaatcagggttaaataacattcacttttgggaaaaattcttagctgtccctaaaatacagttataccatcattgttcctgtcttactgaaatagtttttttagtatagaaagaatatttgaataaactagaatagaggtaacttaacatatctacatatgaaggaacttaaaattattatttgtcagagatgtataatgctagtttataaggatatgttacattttaggcagtttgtcagctatgacattttaatagaggttttatatattgatgagaatttgttaaataatagatacaattaactttttaaataaaagttttaaaaatatttatttgaagcagttttgttcatgtgtgtattttgtgttttttcttaaactagcaaataacatccttaacctctttcagtttttcttcaaatgagatctaatgtatcagaattatattttctgataagcatttttcaaagggtaatatttaattaatgtgaaggtttaaaattaaatacattttgaagtgaaatttctattcacagcaccacaaaccacacttttgatacttcattaacatattatttgacttagttttactttcctattttcatggttagaatcttagagg

SEQ ID NO: 73399 - DNA, 1839 bp, Homo sapiens
actacatttctgatattttctttatgaactcctcttgtaccagtcctctaacagctacccgcatacacactcacccatactactttgaacatgaatgccctaaagagaaatgaaagcagaaacatattaatctgatttgtttgaagaggcttcggatgataaagcatatcacaggtgtttctaatcaagttatttctatttttaaaacattttcaagttagagcttctctgaacattggcaagattagggtcattttgaagaccatacctctgtgttcagggatcaactgtggaactgcaggagatggaaatctgttgagtgtcttcatgctataatacatgacatttttattgcaggttttgacctgtagcagagaaccaattctggagaacagcctcacttctttgattgaatacttacataatgcattggaacatgacatgagattaaggtatactaacaaattttaaaaccatataattttatgtctttgcaatataatcggactagacaattggtaaagttgaaatttttacgtgaactaaaatcaataagtaattactcataaacagaaatcatcatatgaagtggccataagctgagttgtctagcttactaaaactccagattttttttttatacaggtaatgttcttctcagcatcctaaggtctaactccaactgaatttattccaaaaatatgtatttatagtaatttttattttcttaaggttattacagtgtactcagtaaaatatgaacttttcatcttataaaatggagagtttaaatcaaatggaatttagtgcttagctgtttgacaggtggaagagtagtaggtagagcctgcaaaattaggtaaaattgatgagaatattttaagaaaatgtaaagtattccaagtactgccctaaccaaaagtggcaatatggtcgaaactgaaaaaaccactttcttaagcagaaattactagtatcttactcaacatacactgagtaaaatatttcagttgttaatatcaaaagttgcagactctaaaaataaaattgtagaatccctaaacctccagtgatttttatagttttagttgaaaatttcagacagtatttaactaatacaactttcattttctaaaatggtaatctggtatagtgaaaatgaacttattgaacagtattactaagtattacttggttaattctttcatagtaaagtattaatcttatatgtacatatatgtgtgcgtttatttgtgtaaaaactatttgctaaagtaaggtttactaacataatacaattttttttaattttttcacctaaaaatatttatatacttagaggaaatgtcaaaggtttgttttcatgagaaaattattatttagtcttaagaatgaagtatatcatcacgatcatagaactgcttttaacttccaacaatgtaaaatttttaaagatgaattctgaggtgtgtttaagagtgaatgttgaaatacatatcaaaatactaaaaactgaaatttgatatttctatattggatattaggtagataaaccaggaatgaatcaattaacagttgaagttaaataaaatgtaaagatgtttagaaatcagagtttaacataagggtgaagtttagatacttttatattggtgtcatactgtaatgtggttcagataaatatgaggtatggaatgtcttcatatgtttgatttgagatttttatgaaaaagcagcttagtttgaataaaatgaaaataaatacaatttttccctcactgacttaacagctatttttcaggttagagaacattaagatgaaaagtggaaaatacagtt

SEQ ID NO: 73400 - DNA, 1029 bp, Homo sapiens
tgctttatgtagtacattttcgtttgttttgttttgtggagacttgtgtgtatttttgtttgtttgtttgtttattggtaggtagtaactatttggaatgtcacagaatacttaaagccagaaatatgggtcagttgatttggtttacaaaatgaaaaaaaattcccagagactgtattagataattattatatatgacacattagctttcttcaaaagaagatgataaatttatagtttcaaaaaattattctataaaaatttctcttattttaaaatattacctaaaattggctcttgtgttttttttcttctgtctaatgaagcttaaaaattcacatattaatttctttttaacccctttttagaagacacagattttaggtctgattataactagaaaacacatcttagaaaaaattgtcatatatatagtttcgtgggggtttttggttttgttttgtttttaattcagcaaactttgaaacattgtatgccaggcaactaattttggcacataattagagctcaactatgacttgctgaaattttgtagccccaaatctcataacaccaaaggaaatcagtaataaaataccactttatttcaaataagcattgaaaatgagattaagcatttaatttttggaagtgacagtattagaactttaatgtcatgattgtcttaagagtaacaggatagatttttagaatatcacattactattatatgtttatttatctcgtagatcatataaatattactttctggtggggaactgaatgttttttatttttttgcctcggttggttttttgtttttattttttgatctgtattagagatgctttaaaggatcttccttttagaaagacaagttttaaatattgaaattgatattaaatatatatttgaatattattaatatttcttatcaaattataagaagtttactatacctttggttaatcctgccttatttcagtaaagaaaatttgtactggaataacttgtagtggtttctaagaa

SEQ ID NO: 73401 - DNA, 2024 bp, Homo sapiens
gtgatggccgtcatctcgtgacaagaaacttaaggtcgacagaaaattcaggacccggagtcatgggtccctccggtgggtcgtggcaacagtcccccccgccaccgcccggcacccatctatctatattgtcttttgacgctgaagcgtgaggtgccccaggaaagagtttcccaagccctggctgccctcccccggcgcgctgggtcccggtgaggtctctaggtaggtaggactggccgcggctcgcgcttccaagatggggcaggggcaggcttttgaggttgtagcgggctcttaggaaagatgctggactttagcttctttctggggatttttgtcatttgctctcgcagcgttgtcctttctcaaaggggaggagtgttcacgggtgagatgaaagatggggcttcgagctaacgatttccttctcgtggctatttcctccgagtcgcactttcttagaagacttttttcttctccggtgtttgaaacatgtcgcaaggaaaaaagcaatctgtgaaactattaatgttttcctcccccaaaagtctttacccggacaacttaacggtaattttgcgatccccaccttttcttgacgctgaggaggagggacgagagttgttatttgtctttcccttcggtgattttttttttcccccttagctggtggtttctatcaattcttactccacagctcttgagtgatgtgagccagtgacggcattaactttaggtaatacttctatggcctttgtaaaaatcccgcgttaaggatgtattagatcttgagttcttttccgcgctggaggcaccactagattaaccctttgccggtgtattgcgtgtggggcgcacggctctgggttgcaaatattccggagatgctttctgcagcagctattctgttcagttgttcgcaaagaggaataacgcttcctgggaaccgcggtgacacgcttctttaggactgcctgcctacagagtttttccccgtggaattgatgtaacgattgatttatttcttatattctatgaagactgggggacccgccctcgcttagaatgtttcccggaggagaatagaagagtgcaatgtgatgtttttcaaattgtgtctaacggagctccctaaactctggacttgttaccccctgattggctggaaggaagcgggcctggggggtttgaatgttgaacgctaaactataattctcgactttacgaaaaaatatacttttagccagagaaccacggaaatagctacgaaacgttaggacgagagtttagaaaaaaagttggtttttaatagttttttttcctctcagaaaggattttcgtgtggttctcaaatgtatattaaaagtaaaactgaagaggctgttttcgcaaaattatgtttctgctggttgaaattaacaagacttttatatatttgtcactgttctttattggttaaaaactgagtgaaaaatttagtttttttcctttgataggaatttttcaccttaaactacatatatttgttggatgcagattaccggacagttgtttcttttattttgatgcaaagaaactaattttcttaaggttcacgaatgatctttttaacattttccataaaaattgaacatcttatttaaaaaacttttcgcatctagtgaaaatatacattttgctaattcagtaactgcagtgaactaaaactttaatttacaaaacatttatgtttcttaatttagacaacaggtaagcacaggtgcgtatctattatttagttcctttgataaattcattatgaagaaatatattgtatacaacagtgtgggtgtgctgttttttatctggttgattttcagttgatttttgttcgatgttgcctgagacagcctcagtatatttccatttattaccgagcttgtcattccatttaattgcatcttgataaaaggcaggtgtcgttttcaaagaacagcggcaaactaactgataaacagctgtagatgctttgagaaacaatt

SEQ ID NO: 73402 - DNA, 1085 bp, Homo sapiens
aacactgtggcttatattgaccattaataaacgctgggctagactagcgggatacacacacacacacacacacacacacacacacacacaaactggatacgatggactccagtacccggagctttaaaagggatgggggatgggggcggggagggaaaggagttgacaaccagatgaagtggggaaaaggaggggagaagaatacattcagcaactgcagcaggtaggtaaatcataaaaaaatcagttcctgcaactaatgaaaaaaacaatctcactatagtctggggaaaatggttctctgacgcaagcctgatggtgagtctatttgtcatgtttcttttccggactatcaaaaaagttatttcgagattcagccaattgttttgactagcagacagaaaaccggaccaagcgtttcctgatgtaacgcaccggccgcggcagggcccagcgcggagagcgcccggagctgccctcccggggctgctcagaaaagatgctccctacggccctgggagaggcgagcccgagatcggccggagaggactgcctgtgttctgtgtggcgcctgactgcagccttcctttggaggaatacgccttcagttttcttctggaaggggaaatgggcgcagctctccacgcggcgaccaagattcccagtcgcttgacaaacttggaaactctgggacgttctaaactgagtttccctcgttcagcagagttccttgttatctactttaccagtgttaaagggctgcagaccgaggggtgctatttgagacgatttttttttccacgtcgactggagaagcgccgccgccagttccgaagacgacttgccgacctcagcgccccgggctcggcgaggcgcaccgcccgcccctccgcacccgcccagccccgctcacggagggagccggcgagggagtatcttatccagcggccagagctcggtgccagggcgctctcctgacataaccctgtccaggggggccgagacgtgcaatagccaccgcgaggctccccagctgccagccccatcctattcccgccagcgtcttccctggaagagcccccagt

SEQ ID NO: 73403 - DNA, 1017 bp, Homo sapiens
ctcatactttctctgatgttctgcaattttctgtgccctaggttgaacttctttcagcattgcactagcatcttcatcataatcgaatttacaggcaagggcaagatcatgggctgcttcttcccagtggcctagaagtctgtgtgctttcccccgcctcttgtaaggctgagctgaatcaggatttatttcaatggctctgtcacagtctcggatggctgcatttggcttctgtaatttgacgaagacactggccctcttggcatacaaaatggccaagcgaggattcagcttgatggcatctgtgaataagtcaatggctttctggagttcaccatcatttagggcttcaatagcagccacttttttatcatttgcctgatccatcacctcctctgttatctccgcattttcatctcccatttcttgaggagcatcagtgtctggttcaatcacaccttctttatcaatttctagatcactttcctcacttgatggttcgtctgcctttaagtcttcctccaccttactatcaggtttttcttccttggtattttcttctgatttagctttctgagtagcagtacctcccatgctctccacccactccctcaggaagcgcatttcctgggtgtgcagaatgcttggatccttcttacacattttcacaaaggcccgaagctcgttcactttgcgggggtccatggtagggagatggtgggcgaagccggggggctgcggcccggttccaggcccaggcgctggctcggcgtgacagcgcagaagggggcggctgcctatgctatcaacttttcaagccaggtttctcaatccagttttctgaaatattcaacctgaggttgcctagtctagtatcaatatgcattcattctaacaatataatgtacaaaggactgtaaataccctatcctttggtgatactgtcattcaacaaacatgtactaagagctcactacagatccagaggcagaattaagagtgccaggaatgcaaaga

SEQ ID NO: 73404 - DNA, 1043 bp, Homo sapiens
aacgaaattcggtccctgggcctcctcccgggcgctgccggtccctcagcgcgccgcgccacccggaacagacccttctcccgccattttcggcggggctgggagactgaggcccgcggcgctgagcctgcggcgccccggaagaggcgggcggcatggccgctggcgtggactgcggggacggggttggcgcccggcagcacgtgttcctggtttcaggtaaacacgcgcgcccgggcggcggggtcggcccaagaactggcggagcggcccgcgaccccgggcgcgccgccccccaccccggtggctcccactacccggcccggcgcgggatgggattctctctgggacagctggccccgcattttggtcacacgtcatagcaagccgcggttttcaaacccggaagcgccgaaaaggaccgagcgtgtttcccgggccctgatccccggtggctcgggtgggagggtggaagccgactcagcctgaggggagccacgcgggttcgcggtcaccggtgcgctgcgggccccggaggtttctgcccttggtgtcccctacctggcagctggccctgcttctgtgatcctactgggttggaaccagggatccagtaggctcgaagtggcctcagacggtgcgcagttttaagaaagcaaagggacaggcctgcagtggcgaggcaggagggaagcgggatgggagtcgcggttaggccaagggtagttcaaagcgattcagcaggatgatgaccacaggagtgctggagccgggcctttcagcccccgtgtggatgatgaccggccatccaggacatgcgagggcttgggacagtggacagccagtgccacacaaggaaggaccgattaaatgacacagttaaaggaatttggcctagggagtgcaagccagaaaggtttggtctttttatatatgtaacattggaaaaaaggaacatctcctgttccctgtattaagttttgactttagctcagcaaatgcagtgtttgtggcagtaaatatactctgataacaatattctt

SEQ ID NO: 73405 - DNA, 2992 bp, Homo sapiens
aacatacataaagtgtacggattttaagtatgcaactcactgaacttttcatacgtatacaccaccctagtaaccatcccccagttcaagatgtagactgtttccaataacgcctcatgcctgttcctagatagccccaggaacctctatgctgacctctgtcaccagagattagttttgcctgtttgaataagagtgtaccctttgtgtctggcttctttcactctgaaagattcatccttgttgtgaaattcattcatgttgtagcagttgtttggttggttggttagttttttcattgctgcttctgtttaattgtatgagtatccatactatgtatctctactgtggatggacatttgggttgtttccagtttgcaactattacaagttacacttctcagagcattcctttaggcggcttttggtagacatgggcactcatatctctagggtgtataccctggagtggaatggctggttctagtacttgtgtgtagagctgtagttgacaatgttaaatggttttccaaagtggttatactgatttatattcccacaagcagtgtatgagagttcccattgctgcacatcctcggtaaaaacgtttgggtggtaaaacagctaatgcaaaattcagggttttgacagaatctcgcaaagggctacccgtatacatgcttttcattagaaaaatcatcctttcttctcacttcgtcacatcaagacaattagattttcagagtaggaactctaatcattctttcagaatcaagtgcattattgttatttcagatatacacaatagctgatgataatttgagcttcttattttgttgttctgtttaatcagtattgacatcgtcattttatacgtgtgtttgtgtccttgtattaaacacaaaaccctcaaaagaattaaatattgattgtatccctgaaaattgtaggttttaatatatctactgctgggttgtgggaagagtttcagttgagtttctgttcagagctgagatctactgtgaccttttaaggcattgggggaggctgagcagctgttggaactgctagaaagagctgtgtggtcaggggggcaggaactcttaacagttaaaaacttgagctaccagctcctgcaattcttccttctggcctttagcgccacctgcaggctctgagggtacaacaaggtttgacagcgactgcagtgcaacactagttctcaaacttgagggcatcatttacctggggagctgggcctcagttcccagaggtgctggttcagtaggtcctgggctggggccagagaatgtgcattggtaacaagttcccaagagatactgatgctgctggtccggaaaccactgcccccaccccaggaaccactgcagtaaagactttgggaactagattgggatataagaatgacaagcctcatgtttggccctctttgtggtgggccagaatttatatggtcaaggaagtgcatgtaagtgcagagtgtgaggctcatcttcccagatgtagttgtcgtcttttccagaagatgagaaatcagcctgcttagttacccattcgggagttggaaacgatatgcccttggctgagggagcaccatactccagtaaagctgggcccttaataaagaaaacaaagattattaaacatttttcaaaagtatttggcggaggcggcttgtattcggttttagaaaacttgggatctgaagaacttactttgtgtactgaaaagtgagcacatgaacccacaggccaacagaactttaaagggatttatccgtgagacaagggtaaagatgcctaaccttgcaatgatacttttttccaacatttaattcatgctgttcatcgagttgcctgccacagcactgtgttatatcttgaaggatatatttaaatgtttgatttaggtatctttgcctctagttttcagtttgtttggagaagctggctatctcagataaacaaatctggaacttggaagagatactgtgagatatgcagacttgggacgttggttttcataggctggtgaagacagaaccatttcccatttcagcaaggcaagcatttcttttagtttgggatggtcttaaatgtttctgtaaaatggcctgggaatactagcctgtttgcagttttaatttctataagaggccattactttactttttggaaagtagtataagtttccatccctctttttctgccctaaaagtaaatgtttgagtcatatttttaatgtttttcttaagtccatttttcttgttaatgctactaagttgggatgtacccaggtgtgagaggtcacctgattcattgcgtttagaagactgcatttattgctgttgggggctgaacaattaattgggttcatctccaaggaaatgttaattgggaaaccctaacattgtgtattgaaaaaaaaaaaaagaagaaaaatcatttcaggcctgttaaaacaaaactcatttgggttcacttaggctgattaaaatattccttaatcagccccctgattaaacagtcctgaggtgaaactgcacctcaactcgaattttcagttagagacaagttttgcaataaagttatccccctttatttcatgaatatacatgttaaaaagtattttaggaaagattgcacttattatttatttctccacagaaagcagtttcatggaggtagaggatgggttgctttttgggagataagaatccctgtctaccttagacatttcaaatacaataacagctttttatgtgaggcatcgtgataatcacaaatgattataccagagctatctttccaattggaatgcaaaaatagatgtggaaggattgtataaattcatgcattagaactatgttctaattaaaggatttaaaaaataaatttaaaaggaaaaactaattttcttatttaatgatggagaaaatttatattaatgttatttctgattacagtcttga

SEQ ID NO: 73406 - DNA, 1081 bp, Homo sapiens
ctcccacatcctctgagactgtgattttaaaaaacaaacaactcagtcagtgtgctccaaagcctggctataataacacagacttaaaagctagatttatgctatttattagctctgtgtcattgggtggtttacttcctcactataaagcctcacttttgtcatctccacagtggggagaagagtaccagtctcatggggttgttatctgtggtttgagttactcataagctttcttacacctcaagcttttagccctgggcctgggacagagtagatatttcaataaatatttactgaacgaataaaagtctcacattccatttcttcctgcaatgtctttgcttattctgctttttcctccccttctacttctatccaaattctaccctttcctcaaggttccattcaactttattttccacaaagctaagccatttgctccagctcagcttctccgtcttgactttgtgtctgcctggaatcctgcctgctcttcactttatctacctggcaaattcctacttatcctttaaacccagctcaagtatcacctctaccaggaagccttcccatgggtctctcctcttgttactgcccaggttcgtggtacctctttgaccacctacacatttcatcatgattattcatttaagtgccatttttatataaatatgtattgaacacctaatacatgccaggagctagagagagtccaagtgtgttttccctgagtggccatttcgcttctcagtgtgggcacctcagccttctgcttcagagcacaacctccaaacagtagagcatgtcacgtaggatttccaggcctttattcagagctacctttatgacttccttgtctaaggatgactgtttgctaaagcagaatgggccaccccgtggcaaggggatgtaagggatttggggctgcatgttctagtccctgtttcattatctgtccccgaaacagctaagctggaggctggcttactcctccgagggcctaggtctcaacatttggtaaggctctcctgcatgattggctacctttgcctgattgtttttaaagattttttgttat

SEQ ID NO: 73407 - DNA, 1049 bp, Homo sapiens
tatattaatacccctctttcagtaattgattttgtttactcattatgggccatatttttctgcttctttgaatgcctcatagtatttgattagatggcagacattgcgaattttgtctttttgggtgatgagtattttgtatttctataaaatacccttgaacttcattcttggacacagttactttgaaagaattggatacttttaggtcttgcttttataattagtttggtaggaccagtccagcaaatagttagggctgactcttccctactactaaggacccttttgagtactatgcctaaagctccatgaattgtgaggttttacagtctgtctgggagtaggcacaattcaagaccctgaggaagtatgaggtactgctccctcgaatctgtttagatgggttttctcctggcttttgggtagtttcatcacatgcatgcactgatcctacttaagtaggaccctctgcagatctctggggtcttgtttctttttagccctctcctttcctgtgtgctgacctgtgaaccctaaccaccttggtgtctctggaattcttagcatcatctcttcaattcagtgagtcagctaggctttactgggttctccctttctgcactgtggcctggaagctcttttaaagcagtaagctgggcaatcatagggctcatctcatttgtttaccatctctcagggactacggtcctgcatggcttgtgtgcagtgccttgagaatagttgtttcatatattttgtctggtgttttgtgggtttttgttgttgttgttgtttcagagggttaattgaattcctgttattccatcttggtggaaagtagaaatctcaattttttttttctgtagatacttaatgtcactattagtttaagaaaaaatggtcgtattttaaccattcatgggtaagccaacttgtaaaatatgtctgctctatttaagcttatgaagatctgaagtagagtaaagggagtgggggccatagaaaaataaaagagagtaaaatctcccttctttcattctttctct

SEQ ID NO: 73408 - DNA, 2720 bp, Homo sapiens
cttctcatcattcctcatagcaatacatttaaactacctgaaattcaactgcaacttgcagagaaattggtaatttgctcaagatcacaacatttgtaagtgataaattgagttaaaaatcttacaaaagtcatataagtagaagaaaggaaaacagggtaaagtaaggtgagcaacaaaacagctgtgtgttttaattttagatattcacggtttattttcagaatatttaaaagatgcttcaaagaagatgaaaaatgggctaatgtttgtaaaactggttaacccctgttcaggtaagttctcttctcataacttgaatgttcttaaatgttgtggctaatgagtatatacacttttatgtctttgtgtccttgctctttctgaatagcttttaaagttaagatggcaccgtgaggagaagaaaacaaggtgatgacattactagtcttcccagataattcatttgacttaaacattttaaaaatttcttctcataattttaattcacagaactgttcagccatcagaaatacgggcaaaacaaaaaagtagcatgtttgagttctctttaaaaacagattaattttctttggcttccttaagccaacttttcttagttattcaacattagcctccatttatatccattttatcttataaagtaaaataaacaaccagaatttaaaaaaacaaaaacagaaggcttttacttgacatgccaagattttgattaggttcagttttagctatacttccctattttcttctgaccaaaaagtagtactttttttctccgtcaggggacttttttttttttaaatgataagcattgtttattgaagggattcatatcttattggaaaaattttattttaactttatattcagtgcattttcagttttgtcttcacattttttaggcaaaaatattaaagtgtattctaaatattgagtaatatgggtgatagtgtttatctctgtgtgtaattgtttttccattaatttataaggttttgtgtagacacctgatacttgccatattagaggtttctcctggtgacagtaatacggaatagtaaaagtatgggagggccactgagtagtgccttgttgttatagagacatgtaaatagaagcaacaagagaagaaacacattcctgactttctccagtgttcttttcttcaaaatgaaattgactgtaattggtcagctatatttagaaatcttagttatatatcagactaagttgacgtgagaaatatttcttcaagagaagttttaggtagcagtaaaggttctaaagcatttaagaaaagtacaggtacagaagaaagccagccctcttttaaaatttctgttttatctaaatgctcatagacaacagaggaacaaatgtttttatttgctacattggcagtgggaaagtaaaggctaacatttgctgagttcttactatgtgccaagtattggtttaggaaatttacatgtgttcttttttttaattcttataaaaacccttgaggaggttcagtattgtctccattttacagatgtggaaacagccacaggaaggtttatgtaacttctccaagggcacgtgcccagcatatggtggagatagagttaaagtcagcatccttgtctccagagattgtgctgtggttaaaaaaaaaatttttttttcattagttgaagtgataaaacatgcagatgtgcacagtcttcaccctcttgtgcctcctcccttttttttttttttttttttttttggttaagaaaggaaaggaaaaaaaattcattcagttgaataaagctttactcactccctatggcttcaagcatgtctgtctttctcacttagggttggcctgtggcttggtccctgtcagaccctgtgtggggagagccacacactgcccagaggcagggacccacgtgccagctcatgtcatatggctgaactgttgtgttttgatagtttaggaatggatattccctcttgatctgatggaggatttaaggacaggctttgtattagttaagataaatgacttgcactttctaattttttggtttaagtccagtgaggattatggagctggaaaactaccatctatgtataatagctgtaagctttccttggaatcagttttttagaatagacctgtgtatgtttatgttcatattaggaacattcgtcagagatactggatagtcttttggggtgtgtgtgtgtttgtgtgtgtgtgtgaaaacttacaaataaaagacagatttgtcttaacaggagaaggagccatttacttgttcaatatgtgtctacagcagctgtttgaagtaaaagttttcaaggaaaaacaccattcttggtttataaatcaatcagttcaatcaggtaggtgactagtgtaagcatttccaataactaaacacatactccagcttttccattcttcacacgtggggttgtgggtctgtcaccgggtttggagtctggtcactggtttagccttccttggcatgagagcaggtttaatcaaggagaaaggaaagatcatttgagcactaaggttaagtcatctcctgtgtgtcttagacggtaggaagttttaaactagcaactctgatttgtctcctaaaacagtgacacatcctgagttagaagttagatttgtacatggggcacatattgtgttgattagaaactcttttgag

SEQ ID NO: 73409 - DNA, 1033 bp, Homo sapiens
gtggtgttttctaggataaattaatgagcagaaagacaccaaccagcctcagcaaatgtattgatctgcacttaaggctccccctcccctttttgatagcatttctccatctcccattaggaccatgactctgggggattaaccctgtcttggcactctgggcacctccagggtgctatggcgagctcacgttgacaagtgcagaatgaagcagaaatgctgttcagggtggcctttggctttcattttaaaccgtcgtacttcccaaacacgtcttcccaagtgccaaaaatgccctttaaagtaacatttgagatgtttaggtatttccttctctacattttagacatgatcatttcctatttagttaaaaattattgatacacacttttgaaatgtgacctgttcttttaaactttattttaacatcagtaaaaataactttttttctaggtatcccactgctactagctttatagtcaaggcaggttgcttattgcatttccttcaatgtatatatggtaaataaaaataagaatgaaacactagttaattacaaaattattttatatcatgattgtatggtagtccattacatataaatattgttttagagtagtcaaatatttaagatattgattgatcatggaagactatagatttaaggtagaaatctaaagacagtaagacttgggaaaaatctgtgcattattcttactatttgaaggaaaaagaacatttaaattgagatagttcatggcactagttaacctaagagaaagtatggcaagctatcacgtgttcttaaatgattgagaagattttacccttaaaacccaagaaagctgcatttgcagaaattgatcagatgcagtttttgtgtcttcaggaggagttgtcagtacacgagaggtagagcgagctagaagtgggtcatgggcaaggccatacatctggtacagtctggtgtccccaaatcagggggctaataccttaatttagacaaacttcacctctacttgctactagtaca

SEQ ID NO: 73410 - DNA, 1050 bp, Homo sapiens
tttagtccagtaaggcagcaacaactcaaagtgggggtttccacgttagacatagataggagacaaaaggtggcattcttttgatcagccttccactgaatacacaatgtagtctggcttgagtgtggagccattgctagggaccggccctcttctgcccagaatttccctgcctcctgtccctatcaacaagattattttcctttcacattagtttgctgaggttttaaaattaccttttctacagagttgtttgtataatttgaaggttttcttaaattcttactcatttagtggttgatgactcctgaggtagccacattactactaacatttaaaaaaacatttcaagtatgttctcaggtttgtaaattaagcttttcaagaatttaaacttacaaaatattctttaaatggttaacttgtatatgatacaaccttaggagtttattttttttttaattcattgtgctgagtcttttttttcttttaaggtaatccagaaatagacaacaagaaatattacaagtacagcaaagagaagacattaaagtggctggaaaaaaaggtatagttcctctctagtgccttgtggtaaaagtaaaaattcagttctctaagaaattttcagagaaggcagtaagtctgaatccagagaccatcttgtatattcagtgaaaagaggaaaattgtgtagagataccaagtatgagaagaaggctttgactttttaatcctccctaacttctgtatctctgaagttagctttatgttttcttgtgacctgcattctcgtttctccctgctcctactacggaatgaaataatttgttggtgtagatttgagtcttccaagtaagaggataccaggcttggcacttgttggccactgtcagtcctgcaggtgtctccaagggtgatgcttacacacagccaggcaaagggacccagggacacagccaggcaaaggtgttcaggtttagaggaagtatgtcctgctctcagggtctggacactgatgaggggtcatcttacaggcaaaccctgtat

SEQ ID NO: 73411 - DNA, 1059 bp, Homo sapiens
atatttcctaggaagtgggaaatttatattattctatttaggaagttattacatataaattttgtgccaggttctattgtaagggctttatttacatatattacctcatttaattttcacagtagtcttatgaggtgaatgctatttttttcccccatttcacagatagagccacagaaaggttaagtaactagccgtggttacagagccaagcccagcagcctgactccagagtcagctctcagttatcacaatatgttgccttctcatattgtgtaggccatggaagtccatgtattgagatcatccagatattgctgccactcagcctttcttcaaatgggcaaccatttctcatcttctggtgtctggtgaagatacttctaggttctcaaatacttctttgcagatctcttaaatggtctgaaggccacctatgaattcatagatttctaaagttaagttgaaaataccctgcctttcccctcttggttgcttcataggttaatcaaactgtggcagcattaaaaaccaataatgtgaatgtcagttcccgggtacagtcaactgcatttttctctggtgaccaagcttccactgacaaggaaggtaagtaaagcattttatcagaaaagatttttgtctggagtaagttgcttatgtgtaaatgcctatcttaggatttaaaaatcttaatatcacagaagcctcatattcctaccaatgcctcatacacattgtggcaggtgtgcatcttatttcagaagcgaagaatatttctaccataggttacttctgtcattcattgatacttaagttatttattcagcaaatatttcttttacattgatagtagtaacaaccctggctatcatttattgagggtgtattgtgtgccaggccctttgctaagttgccactatacaaacatgatctcatccaaccctcccagtaaatttcataatgagcatcttgaggccctgtgcaaagtctcacaactagtaaatgccaaagctgagctacttatggagcttgtctctgaagcccacacttgtaatc

SEQ ID NO: 73412 - DNA, 1048 bp, Homo sapiens
gcaaatacctagtagtagagacatggtattttatttctcttaaatgagtacactcattactgttgaataattagatttattctttattgaagcaggcttagaaaagattacccttttaaaaaagacatgactatttcatattgttgtagatgatttttaaactttatttgtattcagtggtttcaaataagaaagcaaccctgagtttttgtttttaatgtcatttagggagcatctactgtattatacttgttttatcttatatctttggtatcatcacatgtcatatctcatccctcatatcttcccactagtctgaccgatagatattactatccccattttacaaatgagaaaactgaggctagagcttaagtgagttccctttatccagatagggtcagaatttgaattcaggtcaatttgactataaaaccaccataattactattttttttttttgctttcactcctccttctgtttctttcagaggattatattcgttatgcccatggtctgatatctgactacatccctaaagaattaagtgatgacttatctaaatacttaaagtgagtattgattatcttcagtcataatgaagtaccatttgcttcttggtttccccagcagtggggtttccttatggcttatcatatcactgtttatgatacaagattattcttcagctatgtcatatactttgtgctttggggatgatttttaatggatgattggaatgaactgatttgatggatacggattgcaggaactagtgaatgtcaagattggaattatggcttggtctgattttagaggattaactatgttaaaattttatcctcaattatacttaactaatttggttctttgtgatcgttttaagaggaagaaaggagggatggaaagagtagatggaatatagacttttttttaatttacaaaatattgatatcattttcactattatcactagatgttcactaaagggactttatgccaaagacttggaagtcaaagtaatatgaaacacaatctgtgtctttg

SEQ ID NO: 73413 - DNA, 1692 bp, Homo sapiens
ctcctagctgaagatacctttctagtaaaaaatgtgcatcacctaaacaccctttgctgtcttaatttaaatagaaacatgtatttttttttttgagacagagtcttgccgtgtcatctaggctggagtgcagtggcacaatctcagcttactgcagtctctgcttctcaggttcaagcaattcttgtgcctcagtctccggagtagctgggactacaggcacatgccaccatgcgcagctaatttttatatttttattagagatggggttttgccatgttggccaggctgatctccaactcctggcctcaagtgaccgcccacctcggcctcccaaagtgctgggattacaggcatgagtcactgcaccaagctgaaacatatattcttaacaaagttgcaaatatacattcacttggtgctgataggtggttcatttgtgatggattagtctttttcttttaatgattcatttgctagaggttgctgtgtggccaagaggttttcctatagtgtgtggtatattcccaggatgagcctctgtttttttacagcaaacaattttaagacatggtgttttatcctcttgggttatgggataaaacaccatgggctgtggaatcttttagcaccaactctacccgttctttgtttagcaaagcaggggcatgaagaatgaagctgggaagaagtctgtttcctaggttagatccatgttgggtctggtcaacctggtgtctccataaacagcctgaaaattataaaaatctgggttgtgatcaccatgcagtcaattctccatgttcaacagcaagacttgtcttccctgcttttgtaccttttacataataagtgtggcatgatttcttctatattgtgatcattaaggccttgacaagattctcacattcactggtgtaaaatgttcatgtgaaaggagaaaatattaagtaaaggtctgacttagttgcattgggcctaatggaaagaacactgtatcagaattgaaatcttggccaaagtcctctacttggtgaccttaagctattcatttagcctctctgtgcttccctctcttactggctgcttgcttgtgcaaggttgttcttgcatggataaagtaagataaatattgtcccttcattcataagtggacattaaactggcccaggaggtaaatgaaatagggattctggctggacacctggcccccttcaagagactattctcattttgacttctgtgccttgcattcatctggtaattagcaatcccctcatgcccaccacacctggcacctacaaagcctgtgtttgctggaccagctaaggggctcagccatgtacttacccaatcatatccaccatcaccaaggctgcttcttaggagtgatgtgtggctcaattccctagatgattggcaaaatgtaaaggagcctgtaaaaagtaagccctttgctgggtctgctgtcccattcgcctctgtagaggtctaaattatacatgttgggtttttttttaatggattgatgttgtgtcaaagtgacatttgacaccacttcactgctctaatgttgcagaaaataaagttatcagatgagcctgtagaagcaaaagaagattacactaagtttaatactaaagatttgaagactgaaaaggtatgtgggttcaggtgtagtggtgtttcgtt

SEQ ID NO: 73414 - DNA, 1001 bp, Homo sapiens
gattatataataccttggaaagacaaattcagggactgagccttatctttaatcattttaaagtgatatactgcagcattttattggaacttttagaaaaaagatatagtcttctcatgaatgcttatgcttccttatcaaacgtttacatgacaatcaacagaaaaattgagtgtgaatttccaaacccaaggtagaaggctgagactgatggtacttttggggttggagtaaataaaatatctgcggtccagtatttttttcacattctcctgcacctacctcctacttaccactcttcccagaccttcctctcccctcctatttttttcttttttctctaatttaaggctatcatattagagtatcagtttggcttccataactgaaataggaatatacatatttatttttctcttgtgtaacagtgcagaggaagctaatccaggggagatgtctctgctccacgtgaacactcagggacccaggctctttccatgtcattgctccctcactccctaagtaggttgctcttgcctgcatggtcaaaagtggctcagaagaaagtatccttgtttcagccaatagaaaaatgggaaggaaaaggctttgcacattcctttcacttgtaatcacctcccgttgaccagaatctactcacaaggtacccagagctgcatggggagctaagaaatgtggtcttttgtggcatgatcttgtgtccagttccaacttctgttgctatagcagctctggggtcagagggaggcaagcaacaatctctgatagatggctcagtttcatttgtggagttaggaaggagaagggaaataagatgaagaagacattttcttcatctggaccttgagtagtgacattgagggaaaaacaactttctagcttttcacaagatcaaagtcttcctatttatcccctgacagggaactggtctgactgcctcctccacaacagtcctccagaagacacctggagaggggcac

SEQ ID NO: 73415 - DNA, 1125 bp, Homo sapiens
tgtcaatctggtcacatctaaagcccaaaccaagacttctcttgtggatcaaaatctcaattttcctgtgattccttaagaaggaagattctgagccaagatttagaaaagtccacattatgatgttctagaattcaaaatagtgattttcaagcccttcaggtaagggaaatgtcaaggccaatggaaataccagctacagtatcatctttgcacagataatttactatccagagtagaaacaaacctgagcctttgagttggcaatagtttagccaatggtgtcttgagaggattgtagaacataggttctggcattcactccctgtttatatttgatataaatttcctataataccataagcaaacagcacctattgattggtagtagcaattcaactttgtgcaaagaaattcaatgtggttggtggaaaggagaacattttaaggcaaggttgtaagagtatgggtaatttgaaaaaaggaaattggacagatgagggaaggtttcaagactagcttattagaagaggacagagaaggtattgggaaggagggaggaaaagggtgtagaaacaaagggtgactgaagctgatgggacagcaggaggtcataatgaagaatctattgctgcagcaatgccttgggtacactcctagtcatgacggttagagggagggtctgtttactgtgtgctgtggacattgaccccatggtgaaggtcgtctctgaaaaccatgattaaggcctgaagaaacatcccttcctcacaagatctaacccaaatttgactgttattagaagcaacacattcttatataaaacagagcacctttcttattcttttacataatgttgactctgaaatgagaatcccttaatcaaagtatgataaaactgccccaaatacacggctagaacgtttggaagaagaaccgtttttacctgaaattcctttcaagttagctttgagtggatcaaaaagatcggtgactccccaagaatttaaaatgctttttaagttgaattgattttggatcctaaacctaaaaggcaaaaacaaaccatcaactttcaaaattctcactcaatatactttcatacacaccacatgaagtccaaaa

SEQ ID NO: 73416 - DNA, 1037 bp, Homo sapiens
taatttggttggcaatctttttctataaagggccggatattaaatattttagccactgcaagccatatggtgtctgtctcaactactcagttttgctgctgtagcaggaaagcagccatagatgatttatgaatgaatgagagtggctatgttttaattaaacttcacaaaagcaggtggtaggccattgtttgctgacccctgctttagaggaacaaaacttcatgagagaaaattaacagactggcatgttttgtcagtaggaaatgtgaatgcaagcttcatacttggcacatgataattgcttcataattattaaataagccagatctgcctgcctacctttctgctggtttgagcaaatataagtagatttgaatagcgttaaaaaaaaaaaaaaggtttcgtatcaaaaaaggtacttttaaaactaggttatttattagatcttgccagaggagtttgtggaccttggaagcctttaccaataggggagctacatgatgtgtgttaagatcagtcctgtttgaggacagagggttgatggcacattaggatgtacttttaggacataaaagggagagctttaggagttatgaagggacagtcagtaagccctagtgattcacggaatacagtgatgtagaagaaaatacagcgatgtagaagaaaatacagtttttaactctgatcatcaaaatcaccagcaacaacagggatgccatggctgagctctggagttgcaagaagacactggttagattttgcacattatcaaacatagaattctcttaagttcttcatcccttgctctttccttgccctccaatcttttcacttcagtattcctcctttgcttgaaatgtcagattatgcctgtgtcagtaaggaaagtttctgtttgagtcatttgaccaagtcaacagtatttacttggtatccaactgtgtgccaagcatcgttgtggacacaatgcccaaacttgactattgctttgctatctctttgcgtgttcaggcaatgagtacagagctggt

SEQ ID NO: 73417 - DNA, 1073 bp, Homo sapiens
caagtctcagccaaatgattgtttcagtgctttgttggtggacaccgttattctttgtgtatggctggtcatactcaaaaggttaaaagtcttcaaaacatgacgttgtataaacattgtgtcccaacatttcatcctcagcttctcataaatcaggataaacatatcatttgctgtttcttttgtctttacaattatttgctgtagccagtgttagtggcttttaaaatgttattgccagaacttgcttctagtttatctttttcatcttgtcacttagttgctaacactaagtgttagggagagggggctagagagagaaacacatagcacccggcccaggagagggagagagagtgctaagaagaatctgaaatggcctttgaaattaggctatggttagttgctttctccatttgtctcctctagcccactctgcacctctttctattgcaattctgaccagacatctggtgtggcataagttaacttacataacttccatactcaaccaaacaactctggtttgttcatttaagtcatagtaacagagaacttgtacttcttaccgagcagagattggaaactacctacttataaaagccaagaacaagacagtttcttcagagtttcaagtttgtgcacaaggagtattttgtggactaggaggcatgggtctatatcaaagcctgctgatcctaaagccagtgggattgcttaagaagagtatctttagctggcatcttcagtgtgagtgaaactggaattactcttaaaagctgcataacatctagtatcaaggagactgggggggaactacactctggtttcagctgggccttgagataatattgaatgagtccttaaggcagcaaaaaaaatatttgatgccaagaaggaagagataagtgacttgtaaatggggaaagagaatttgagtaaaatgattctgggctttgggaccgaaaggccaaatgtttgctgtggtggttggagttccatcagtagtacaaaactgcttggtaatccctcgtaaactggaagaagagaggagaggccagtattttctgatc

SEQ ID NO: 73418 - DNA, 1383 bp, Homo sapiens
gaataaaaccagaccaaaataaagaatatgcggcattccatccatcttgtaagatgtgcacaggatgttgggagttggctatattcactgtaaggaacagttattttccagcatcagtgaaggggacaggaagggccagaggaagtaaaaatcaatagaaacattcactagtgtcacttgtcctaaaatcagcaaagaatttgatttattttagcagttggtctttttctctagggtctttaagaaacaaatttcactatcaataattagcccctcttactagctaattaagcaaactgaaatgcagtgccaaagttacaaagagctttagggttaaagaatggttatttgacagtcatgagaggcttttactaatctccgagacttcatgactatataggatggtgtctgaacattttaaatgaatgttggtgaaataagcagagattcactatgaaaccccttatcagctaaaatacagtaaatgtgtctgtattagtctgggcaccttggcagtgtgagaaatgagaccagttgatgtggatgagtctggttagatgggccaggctatttcagtattttgaaactgcaactgaagagtttcatttaaacagtttctctccatcagactataggagtggtccaataattgacatttatatgtttgcacagccataaaccaaggtccatagcctatgtcatgccccagcatcagcatcttttaaattttatctctggtaagagttgacatttcaaaagaccaacatatgcgataaaaatgagaatatgggagtcatctatggttttgcatttttcctcccacttgatcttgtattacagattcctattattttttattgagtagctattgaaatattacagaactaatgaaatgaacctagaagtcaagcacaaagggattctcctggtctttttctactcccctgaagtgttgacagctgcttagtgccattgagggacatacgccctattttcccaaaagttgttctcaagattgtttataggtggcattctgtaaaagggttccatgattaattatatgtgggagatgctaaacagttttgcacttttgttttcagtaggggacttcttagagctgctaatctgctaacttttatagtgaatctctacaggacaattataatacatagcgtttaaccatagaaccacccacaccattctctgtcccagatttacaggattagcattttgggaacatactttgggaaactgtagcccaccataaactcgcttgctcctacaatacaacattctatatacaaagcaaaggggtgatactcttcctaccctccctcctggcatactctccactcttcttccataacatcttctatgggtttt

SEQ ID NO: 73419 - DNA, 1074 bp, Homo sapiens
ttcagaaacataaaagccatcttggcctaaccacagaaaatgataaaaatgtgagttgctcattaacatttttctaacacatttagaacacattctttaaaaatgtacttacaaaatttatagtatccaatgctgcttactgtgtagctagggaaagagtggaaaattctgtttttgtttttactggaggctcaggtagctgtttggaaaattcttaagactcaatatgttaccaaactttaatttgttatatatatttaatttgttaaaatatgtaatcgctcccaaaataatattcagagcactgccccattttttcagtggttcattttcagaaatgattctagttaaaactacaatccctccttcagccagtatttcctaaacttcagtgatcatagggtatgtgttaaaatgcagattctgtagcccgggaatcattttcaccaagcttcagagatcatttcccttgaatgcctttttggactgcactttaagagccacttttaaatgacaaagtcacaggtttttattacaggctttattgaggcacaattcagagtaatatgaatgtgtctagtgttgcatgactgtattctgtatacttaggtgtatcagttatgcaattaatttgcctcatgggctagaatctacaaagcaaatgagaggttagtataaatgttctatgtgctaacagtttcacagattataagtttagcaaataggactaagtgataatttagaggaattggctgatttttgtaagctaatcattaaccatttttaaacagctccaaagatgaaaggatacttgatgacacagtaaaaaatgaaagatttagaaccagaagaaacttaggaaatcattcagtccaatcctttcattttagagtgagctgtgaactcacctgagatcacacatttgaaaagcagagttgagaatattctgattgaaagcccactcccatcccacccctctcctccattcaaacactgccgcctttcagaaagtgtatgctagtcagctccaacatgccactgggaggtatctgtggcatgaatgttaaaatgatc

SEQ ID NO: 73420 - DNA, 1407 bp, Homo sapiens
tcatatgcagttctttaagctttgtttacttctatacaaatacttttaagtaatgcaagataacatttaatagatggaattgttaaggtaattgcctgtagtcacattgctaaattcattgagagttacacaaaatccagaatatattgtctgttcctaaattatatatatttagattctggaattactaggaggaattagaagtcattcagataaaaattcatacttaacaagagtatctaggaaagagattcagcccatcccaatattgagcagctttccttatcagaaagttttattttctgtttcacagattgctcatgacctttaatacatttttctgaatgaaccctggagggaggtgagaagtagcagttttgttcatctcttctttttgtcctttatctctctgccactgttctcacctcatcctaaaacctggtcaggagggtttgaaacctatcagaactaaaggttaatatctcatctccctcaggcttttttcatttaaaaaaaaaatgggtatattagttaaattagaatacttgttgtagaattattgtcaaaggggaagggaaatacatctaggggaaacatcatgtcttttaggccctttatgtcactgaatgacttaaggctcgacaaatgatattcttggaaagtttaatcttgaggttttcaaatctttttttttaatgtctcccatgtttctcatttgctgattgattcattagttgctcttagtaagatttgtcagttggaaataatgaaggctgagactcatttctaaactcttccataaccatcaccagaagagcagccactgtgttgtgtgatgtaggctaatgcctcccagatagaggtaaagtcacaaggactattagaattccagtggattgtggaactggttttggattatccttatattttcattctgattactgaggcagttctgaaaactcctaccattgaaatagtggtgtgtcttttccttgtttaaggattttacatcatttttatgcacttgaattccaaaatcagaatctctcttttacctatcaacctttattggctattggcttttggcaatgacctttctgttcaaatgtagtcctgtctctttgtttccttagggagtagaacctgtcctttttctcatctttcatttttttgacgtgtcctttctaagagaaggctctctgccgcctgttctgggtgataagtgatattttcatctaatcgttatgtggttgggatgatcatggtgaaatactaggaagacatactctgttgatggactttttctctccaaataatcccaaatagattattttctagtgaatggtttatatctttctcgtcacaaaaatgttcctttgatttctagcacaaggtacagcaggatgc

SEQ ID NO: 73421 - DNA, 1031 bp, Homo sapiens
tttaaatgctgctgaccaattttcatttcttcttccattttgtgggagattatattcatactttgttcacattcctttcaatattcagcttacaaagagcatgagaagaagctattgaagtatttgcttggggagcccaaatttcactagagtgtttgcagcccttgaatatattttgaatatattagttttttgtttttttgtttgttttttcctttttcttttcggttgtggaaggaacaacctctttcccattgtttagccctagagtgttttagggacaaactataatactgtactaggataataatttgctaatctttcaacatattttatattgtcgtagtattgatttttctattttcatttcactttgaaaaatcttcccaaaattttctctcctttcttaaaaaaattatactgatatatactattcattaaaaagtaattgagagtactatttattttttcatacaggtttaaaaaacgaatgctaatagaacaactggagaacttcttggatgaaattcatcgaagagccaatcagatcaaccatattaatagcaattaaaagaaaatagaatgtggccacttatttcactatcttcttcaaatacaaagtaaatacaagactgttgtgatcttgcattcattttctgacatgcattgttggctatttgaaatactaaaagcaaatctacagatcctttttccatcattttacagtgaccttttcttcattttggtttatttttgtaatgtgaaaagtatcactctaaaaaacatttttaatttaacaaactaaaaatattcctccaaatctcttgcttgtcattgactcttgcgtgtcaatttccctcaggttctattttcttaaaccaacctttaaaattgtcacctctgttaaggttgaactttgccaaaaaaaaaagaagttactttgtaatttttggggaaaaaagcacatacattaaaactaggtaatgttttgtatatacagttattttggatatattattgtaagttgtaca

SEQ ID NO: 73422 - DNA, 1986 bp, Homo sapiens
gcttacaggcttgtaccctggagattggcctaagatagtgataaggagagacagcgtgaatggcatggttgagtctcacaagagtgcaagggagtaattttgcaatagcactaggaagtgaaggaatcagtgactccatgtccttttatgcctatggagattgtgcaagagaaagcaatttctacttttggtctggaaaggagagcagtctccatacaggagagctgggtttcagttaaagcataagttgttgtagagaatattcagtaaagaggagtttgcaaatcatggaatcgaatttaggagagagtcaggaatttgggggatttgtgatgagtgtataggggaatatgggtaaactaagtttatagtttggacaggaaatgaggacagtagagatgaattcagctgggatcctggaggttggtgagcaatcagagaacttaaaattcagctgctttctgtggggcaagtctaataatctggtgttaagaggaaggcttgcgagctttcagttttagtagtctaataagctgaagtgggcaccaggttgctctgcactggtaaataaatgatgactagattctctagttagaaggtatactgtaaaacattacctgtttggtggtatgttccctgcagaatttggaacagttaaaggcagaaatataagtggaaagtaaaaactacccagtgtttacttttgcctctaaatgataccagatgtataaggcatatgtgtgagttagggctctctaaggtagagatagatgaccgtgataattttgatcatagatatttcattgaagtatcaagaacctacttgtttcaataaaattgctatagaataaaccagaaaactaaaaactacttgaaattggctttattttttcctccaagggtaaaaattgtaaatattttgtaaatactgtgtatgtgtcacattgaaatctaccgtatctttggcaatgcttaaaaactatatcacattatttgttaacttgcattagtcaaggaaaacagttgacttgctgtagtaatgttcttttgtagctttatttactgtatgctttgagactggatcccataattttttccccgtatctttgtttttagtttcagaaaccactaatgattcgataatacatgatgtggttgaaaatcatgttgcagaccaactttcatcagacattacaccaaatgctatggatacggaattttcagcatcttctccagccagtttactggaacggccaaccaatcatatggaggctcttggtcatgaccatttaggaaccaatgacctcactgttggtggatttttagaaaatcatgaggagccaagagataaagaacaatgtgctgaagagaacataccagcatcttcactcaacaaaggaaagaaattgatgcattgcagaagccatgaagaggtcaatactgaactaaaagcacaaataatgaaagagatccgaaagccaggaagaagtatgtataataagagacgaacctcagatctgatttctgtatgtgctcaaaaagcaaaaaagaaaaaaaaagtcaagtaactgtagtaaaagaatacatatgattctagatctgtcttgaacaacatctcagttaagatcctttattcatctgaccaacaccaaatatcttctatttccaaggtactaggtatggtggtaggcagcagggactgagagcagagcaacactgtacagataaattgacaggaacccatagtcttgaatattctgaccaacgatggaattttaatatagcagctagctcacaagagatatagtgaaaattaaatgacttcatgtctgtaaagttcttgtcatagtgcctaccactatgtttagtagttaaactgtgatattataggatatgtttaggccaaaaaactaaagttatgaaagctctctggtatatgaacacaaaagaacttcgtgggaaaaagttcagtattattggcattca

SEQ ID NO: 73423 - DNA, 1012 bp, Homo sapiens
gtaatgtgtgtggactattatcagagaggagcaagaatgaatgtagggaaaccctaatgaattaatggacttatcaattatatatagtggtcatacttacagcatgttaactgaagggaaacaaaatattatatgactcctgatggaagtatccaatactgcctttgaagttgtcttacccaaaaaaaaaaaaaccaaacaccaaaattgaacatcaatgtaatcaaaccaatttataggaaatacaggggacagagaaacatgtgggataccgttagtaaaatccagattgtagaaaactctacaggacaaagaatctgttgggtttttttcctggaaaaaaaatattttttccagaaaaataaaaggggtacggaaggattttacagattcaaatgtagtttaagagatatataagccagttgcaatgtataggccttaactgtactcagaatcaaacaaaatcaaacttttccacaaacagaaaacatgttggagagtatggacactgactgtatatttgatgttattaaataattgtgcatgcacaggaatcagttgggaaacccggggaacagatgctgctgacctgacagtggggtttcaagaagaatatgtatttgagaaatacctggacataccactgaaggacttggttactggtcagatgttgggaccagagcaggggaggagtcagacgtatgtcttgagagacactgggtgggtggaagaagaaatgataaatgagtttagtttagaagtgcatattaggtcatcaagtggagatcctaagttagaagatgaatattgagtttgggctcaggagaagaggattgggctagaggggtagtatgagaggcaggttactgcctattgcactgaataaaatctcaccaaggcaaaaagaagaaaaaacgctcagaacagaaccttgaaagtgccaaagttaagaggagaaagcagaaaaggagattgagaaggaagaattttagagctaggagaaaatagggga

SEQ ID NO: 73424 - DNA, 1060 bp, Homo sapiens
agaatatgttggtaaagaagactgtctagaataacactaggtagcattcatatataaggaaacattatttgagaactaattggaggttaactttttttgctgttgtattctttttgaaagatcaagtgcacagtgttcctatagcacaaatggggaactaccaggaatacctcaagcaagtaccttctccactaagagaacttgatcctgatcagccacgaaggttgcatacatttggcaacccctttaagctggataagaaggtaattttgaaatgttctattatgtaatttgtttatggtaggcactgtcagttttatagttcttaatttaactgaagtaagctgaagctattttcctggtagagtatctaataaatatgaacagaatatagttaccttcattggaattgacactggttgtgccatttaaacattgtttgtaaattcaagaaagttgtattcttttttgctaaagggtatgatgatagatgaagcagatgaatttgtggctggacctcaaaataaacataaacgacccggagaaccaaatatgcaagggatccctaaaagacgtcggtgtatgtctccactactaagaggcagacagcagaatcctgttgtaaacaatcatattgggggaaaaggaccacctgcacctacaactcaagcacagccagatcttattaaacctcttcctcttcataaaagtaagaattgtttttttcttaaacattatttgctgccttttggttccttttcaaggaagatatttttgttatagattatagaaggaaattgattagtagtacaatgagtgaatgaatgtatagaaaatttgtttaaatgagcatgtaatcatttttgtatgtctttttaatgaacatttgaacatttcttatttatgatgctttattagctattatgttctaacatacatttgcaaatctttcaaaataatactttcgaaaggagcattatcactatccacagaaagatggttttcaatttcagttgaagtcaactaattattaaatatgtatgctattttggataatgct

SEQ ID NO: 73425 - DNA, 1059 bp, Homo sapiens
gcctggggataggaatagtgattgactgcaagtgggtacaacaaacttggggatggtggaaatggattatgatgatggtttcacaactataaatttactaacattcatcaaactatatacttaaaataggtgattttatggtatataaattacacatcaaagctgttttttaaaaaacttcagtttttaaaatttggagattgatttttacttaaatgagtttacttcttttatccagaatatataataaaatctttagagttagatggtgaattgagattgtttggttgagctcactaccaaattttcatcttttggccctgaaccggtacattaagattatatcatatgtctttattttattttttttaagctaaccagtttatatatcttatttccaaacctatgctgcaggctagagattttagtctcttgtaattctatgtttgacaataaattttgtcctcgaatgttgtttaataggatttgaagccacagacatttagaaatgcttatgacataccaagacgaaatcttttggatcacttaacaagaatgagatctaatcttttgaagagcactcgcagatttctgaaaggacaggacgaaggttagaacatagtttcaatactggtatttttaattttttttctttatagtctgaaaaagcatagcatggtgatgtaaatttcaaagaattattacagtactataacattcttattgtaagttcaaacaaatgaagtaaaaggtgaatcatccctgattctgtacctttcttcctaccatcactgttgccccaaattctcttccctagaggtaacaacctttcttaacagtttagtttccttttatagcttttctcatgcattcatgcgcgcacgcgcgcgcacacacacacacacacacacacacacacacacccacttatcaaactgtatacttaaaataagtgatttttcttatctcaatcattttcttgagataataccagtatctgatggtttaactctggatggccagtttcatgacattttctgataattccttcttcacctt

SEQ ID NO: 73426 - DNA, 1982 bp, Homo sapiens
agtttttgttgtattatttcccaaatctctagaaacactttgtaaggtggataagtgtatattcttatagaaccatatgctttagaggacttgattacttcaaaatagtgtatcatagtaggtaaaaccaataatgtgcattttattaaatacatgatttagtttgtgaaagataactttttaacaaaagtacttaaaatcacttatgtattctgttttgatgcaggaatattatagcatttggctataaataatctttctaaatcatccctaatataattaggagattaatttcttgagctttaaaaatcatgacattttatagttctaacagataagttgtgttgaatgtctagcacacagtgcctggcaagtagaaggacaaaaaagaacaaacacttcgaacaggaactgttacatatgttgactcatttacgtttcatagcaaccctgaagatttagccaagccagataggtgttaaatatcagggctgggatttgatttcagtttgacaccagtgcttatacactttctaatatgtcaatgattatcatcctttttctggctctatccgattcacaaatgctagacactcttgctagtgatatttttcatcgtataaagtacttctcagtctctccttacaattgaaagttttttttaactttcaactaccacatccataataaatattagattgttttttcctcctgcttatgtttccttcagagctttttttcagctcagcatatgataataatagtaatgattaataatttgtacccaatggttttataaagtgctttatgtgtattaactcatttaatcccatgacaaccctgtaagagtaggtattgttattatccccattttacaaatgagaaactaagccacagagagccagagagcttatttataatctgatctagaatcatataactagtgagtggttgagcagctaattactcaaaagtagaaatcttgcattttccttgagtgtttttcacttactacccatgttttatcagagctacctctagaatgtgtcttctgtccatttattccaaacctagtttctcccagtggtaccaaggaagaccagtatcttatccttcttgtcttggggagttattatggcctctaatcctttttaactacttcaaacggcctttcatcccactgacaaacattttactgaaacataaatacgattgtgttacttccttattgaggaaaagaaggggaaataattttttggagaaaattttaagacagactatacatggaaccataagtttttaataagcttaatattgaatgatgttttcttttttcctatagcccttgaagaaagctgttaggatgatgggagcacctaacctaatagcagacagtatggaatatggacttagttacagtgtcatttcatacctcaaaaaactgagtcaacaggtaatatcaagaaatagagtgagccattaagtattttgaatggttttggctaggatggttaaacaggttaaaagctagttcttgatggttctaatggaattccattatattaatatattacattttagagccatatattacataattctgtctcacatccatggtgtgctatgttttgaaacattaatttgaaaattatataataattcctaatttatgaaaatggcttcatgagtgtggtcctagacttgctatatgtgaacattatttatcttttgagaaatttagattagaaagtcatttttccttaaaaaagaaaaaaaaaactctttatgttttgaaacctgcagatttttctttcagaatgggagtttctttgaaatgtttgtagaaaacactgaattttgtcattctggccataagtcacattaataaatactatagtagtcaagcagtatatagtttaactgactgtgaaattattaatgtcctatgaaatacattatttctccagtacttctgacattgc

SEQ ID NO: 73427 - DNA, 1036 bp, Homo sapiens
ttgttccaaaataatttgataaaagcctaaagttagtttctgggtacaatctagctatcatttttgaggagtgctgttggagaaaacttaccttccatgaaatcacattaaatttaaaagttatagtcaaaatattagtacgtatattttatagaaaacattgtgcatgctttgtttctgtcttcaaatctgctttgtgtctaggtctagggagggcatagattttccttgtgtgttttctgattctaacttaattcctgcatgtacttttagaccataattggcatcttttcattttatagaaaatgacaaaaccgtaaatcttactttcatgttaaaaaacgtctgatgttactctctcaaaaataacaaagcagactttaaaaaggaaacgtctttgacttgacttctatgtgtgaaaataatgagtagtgatagtttgttcacattatacgtttctagatgacttgtttaaagtgcataaagcaaaaccaacattgaagtggagacagtcatttgaaagttatttgaagacaatgcctccctactatcttggggtaagaatattatttaaaagaacttgttggccgggcgcagtgactcacgcctgtaatcccagcactttgggaggccgaggcgggtggatcatgaggtcaggagatcaagaccagcctggccaacatggtgaaaccccgtttctactaaaaatacaaaaattagctgggcgtggtggcgggcgcctgtaatcccagctactcgggaggctgaggcaggagaatcgcttgaaaccggaaggcagaggttgcaatgagccaagattgtgccactgcactccatccagcctgggcaacaagagcgaaacaccgtctccaaaaaaaaaaaaacaaaaaacttgttaattatattatgcttatggtttattgtgggtattataaacttttatttattgcttttatagattaaatgacatgaaaattgagcatacagatgaccactataggtataaaggtaaagagaggtttcagtgatttgcaga

SEQ ID NO: 73428 - DNA, 1030 bp, Homo sapiens
gttatgtacatctacatttataatttgtataattagaaatatatagtgtgttcaaaaactgatcaagatctatgattactttggaagtcgctactctctataagtaattgctacaaatgaagacttgtgagagtttctatatacatttctaattttttggatgtaaaaattaatgaatactcaattactaaattttgcgtaagacctaaaaatattttcatttctatagattttcaagtgtttatctttttgttgtgaatattacataactttagcattacattttcaagtgtttcctttcagcttaatgttgcttttagcagtaaatcaaactcttactagcaagacggaggaactgagtaaattttgataatgaggaatatttagttttgtttctgaaatttcatgtaagtagtaattacaagactttcccctttagccacctcgtacatctcatcctgtagtgaagttttcctgtacagactgtgaaccaatggttattgataaacttccttttgacaaatatgagttggaaccttcaccactgactcaatttatcctggaaaggaaatctcctcaaacatgttggcaggtaagctgaacaacttacagtgaccccaaaatttaaatgaggcatttcttaaaaagctgaattgaatcaatggtttatgtaacattctttaaaggttattaaagttttaaccgctcctttttaacaggtgtacgtgagcaatagtgcaaaatacagtgaacttggtcatccttttggttacttgaaagccagtacagcactgaactgtgtcaacttatttgtgatgccttacaattatccagtccttcttcccctcttaggtaagtcattcttgtcactttctccttggcttagcatataaaagttctcctaaagcgcatttctttgtagtttttcttgtcttctggaaatcaatgaaaatattttgaatattctaaaatgttgaacatctttaagaaaatataacaatctgttcgtgtttacagtaaattaaaagat

SEQ ID NO: 73429 - DNA, 1020 bp, Homo sapiens
gttttgtggactgattcaataaactgtgtgtcaggtgcatgctaggcacaggagcacaagatgagtaaaacagtgcttcccctctgaacattacccatctatgggcatgtcagacacgtacacatcatagagtacagtgtgccaactgtaatggaggggtggggcagagccagaggaggtgggcctgacagcctggtgtgtttttggagtacagagtgggaaggggtatgagggaagaggtcttttagaggttgttacatgccaactcatttttctaaactttgtttgcaatatgcaagggagaaaataagtacttggcatggctgaagtatggagtctgtatggcgtggtggtgggaaggcagatagggaccagatcactgaagatctttatatgtgatattaagtgtctagaccctatttttaggtgattggctgttacttttaccgaacagttttagatagggaaattatatgatcctatttatatttcactgccatggattgatcagacagggactgattagaaactaaacaaagcaaaaagcatttgtactagtctaatctgagaaatgatgaaggcccaaattaaagtggtaagaaatagaagataacatttctagagagatgagagtttagtattgacagaaggcagcaactagtaatgactacctaccatgtttatgtgttctggtaagtgccttagaatttgtgatatcagtttatccaggtctttgtgacagttaaatatggaggatgaggggaagatatcaagaataacggctaggtttttagaacaggttttgtagcttgggggagaagaaacaaattgtacatattgtgtctgaggaacctgtggaagattcaggttatgtctagtgggtagttagatacagcagagaaataggagccatctggccccaacagtagatttgtgaaccaccagggtataagcagtaactgaggccaatagagtcctttatagctatgacatttaaaattatttcctcatagctcattt

SEQ ID NO: 73430 - DNA, 1060 bp, Homo sapiens
caacaaaacctttttgaaaccttttgtacttcaaacctgtatcagcttttcaggataatttttattttgagtttataaagtgatatttcctttattcattagggatttaataaagtagtgcatgaagttaaggttttctaaatttcattgaagtatcttcattataccttttctttttttctgatagaaccatcatagttttttagtctggctttatggagaaacttccaatttctttggtcattttactttcttttctggagctctttcaactcttacagaacagataccgtatttgtatgaaatattgtcatgttggttatttattctatttatttaacatgtacaggagaacatacagtacctgagttgtaatggaaagaaatccaaaaccagtatcagaacccttatctattaatgctgctctagcagtctatcacaaattcttagaagccatagagggtaggtaggacttcaattggagaaggaaatagtatgagaaaaaaaatatggaagtgaaaaagaacaaggtatgtttagaggagtaacaagtagctgagtacgggtggatcataacatgtatataggacattgagagtactattaaactaaccaaattgcttatgactttaaatgcagggttaaggaatattagcttttaaacagtggagttcaaagagcagtcgaagatgtttttaacagacatctttagaaaaattgatttggtggtggttatatgcagtaaaattagaaggggagatgagttgaaaggcaggtaggttacctatgagggctattgatatggttcacgtaagagattttaagtggttgaattatgatgatggaagagagaataataaataatattggaaagaactggcaaactttagtaactgaaggatattaggggaagtgaaatttttataaattacaatattgaagaaatattgctactgaagttaagtgtaatttacaagatgtgaatttgaatcacggcactattagttattaattagtacctttggttatcttttgtaagcttcaatttcccatctgttaa

SEQ ID NO: 73431 - DNA, 1226 bp, Homo sapiens
gtaatcccagctactcgggaggctgaggcaggagaattgcttgaacccaggaggcagaggttgcaatgagccaagatcgtgcctctgcactgcaacctcaaaaagaaaagaaaagaaaagaaaaataacatatctatcacagggttgttttaatgattaaatgaaattatttatttggaagcaattcagcacccagtaattaattgagtctaaatctgaaattcattccaacaatacagatttttttcagtctatatcttcaaagtaagtttaagaaaattaaacagtatcatgtgctgttttagctatgtctgaacaagtaagcttttatatttgagcttgtttttcaagtgataggagagttgatgcagttctaacgtaagtgtaattaaagtaggctttttgaaaaaatagtctgtggaattcttattactgtttttcccccctactttcagcttcatttacctcttaattctcctttgcctggaagtgaattgaccaaggaaccttttcgttgggatcagagactctttgcattagtgttgcggttgcctggcaccatgtcagtagaatcagaacagttgacaggtgtgcctttagatgactctgcaatcacaccaatgtgtgaagtgacaggcggtaagttttttgctggcagtaatttggtaacttaaagcagattttatctgaatgttttaaaagtgtacattcaaaagctccatgtttgtttttatttcacaagttaatattaggaattaggcatatatgcttttaatagtacatttattgctaatggtctatgatcttcatttgaatagaatgtgggttactattggacatgacaaggaatggtaatattttttctacttgtatagaaaatgctattatttgaagttgttaaactaattttcttatctacaaagattgccaatgatttagaagtaccatagcattattttttgcaaaaacagtcttgagaatcatctctgtgtatttgatgaggtatgcttggttaagtgcaatttttcccagaggcaaagagattgatagattaaaggaaacagatagtgaggtcttatccagcttctgtttcacttatacatcagattaggtaggtactatgccaagtgaacatcaaggaaaatcttgaaatacaatatgtaatcaactcagaactcatttaatatagaattggctaacaggtggattaatttcatataggtatg

SEQ ID NO: 73432 - DNA, 1035 bp, Homo sapiens
atggtagccagcttccatggaagtggaaataaggctgctaggcctagtaagacttagactctgaatacctttgagtgcttcggagtactgtgccatctaccagagtaaccaagccaaaacaaaacaaaaacccattgatgacttagtgtaagagttgtttatgaaaaaaaaattaacagtagggaaatccaagaattgataggctaagtataactccaaaagacagatacattgagaggactggggaacgaagaaaatttcctaattattcctctgcattttctttaagcttgacctcaactgggctgctgatttcctgaacacttcctctttctttcctcatgtactccttttccctggacgttatttctctatctccctatattaaaatccaacccatccttaaaggattaaaggctttcttaaaaatctttctctcctcctttgcactgtattctccaccagttctgaagtttaatttagttttcatcccagtatttattattattatttcttgtctcctatgtgtttgatcatgatcttcactcttcattactccctaacttgcatgaggttctggattctcagtaaacttattattcttcacacttgctcagatgctacttcctctgagaagtcttccctggtttgtcccctaatcatttattcttttgtactttatgcatatttttattgttgtacatatcataacacataattgtttacttacatgtttttgaaagtagaagattacaatgtgtaatgtgttgcctttcattaaataaatcctgagttatagcttgatttctgatccctattttaattttttttaaaagtccccacatgttgacaataaaatgtgtatatttatcatgacctaattatttctttgatactgtgctgagttcattggtactaggccactgcagtaaacggtaaagaaaagttatgatttggtatatgaagttaaaaattacaagaaataatatatggtcaagttttttatatctcttaataaggcaagaatgaatatat

SEQ ID NO: 73433 - DNA, 1054 bp, Homo sapiens
tttttcctctgtatttggtatcagtccctggatttttgcttttatgagtctgtttctttcattcctattatttttgttatcaatcatcctagtgcttttttaaatgattgtgttagctttctagcttgtcttggctgctttcagtctgtcctgcaggttgcaaaattattttaaagcataccacttgagtgtattactctactgttcacaatgtttcattgctttccattgtctactaggttgctcagtgcccttcacaacttagccagtcacattatttattcatccatccatgtattcattcagccatatttattaggttctatgaaccagacaggatggaggaatatgtgctatgagagcttataatgaattagatctggtcaaggaggtcattggagagccaagatctgaagagagtaggatttgttactcaaaaaatagaaaagaggattgtaccagacagagggactagcatgtacaaaggcttttttttttttcctctgaaaggaatatattttgagaatgaagaactgaaagaaggctactgtggcttagacacaggggtgtccaatcttttggcttcccaggggcacattggaaggaagaacaattgtcttgggccacacataaaatacactaacactaatgatagctgatgagctaaaaaaaaaaaaaaaatcacaaaaaaatctcataatgttttaagaaagtttacaaatttgtgttgggccacattcaaaaccatactgggctacatgcagcctgtggaccacgggttggacaagcttggcttagagcataaaagaagagggatcgtagtacaagatggaaaagaaggttggacttgaccatacagggggcttccagaccatgctgagtaatattattaatataaaagcaataagaagccatccaagggttttatttagaggtagggggtggaggagagggagataaaagtggtctccgttggagcattgttgtttagtcttgacaatagcttggtcaaggaggttggtgatggcagaagagtttcagtttcaagagatac

SEQ ID NO: 73434 - DNA, 2028 bp, Homo sapiens
ttctaggataggcagatctgtttagtatacctttttccactgcatcatttcagtttggatattcttgactttcgaattgttcttggaaataattagaaagaagtagggattgggattgttggacggtgaaatcatagggagagaaaggaagttgaggaattcaatcttgagtcttagaactgtgtgtgtgtgtgtgtgtgtgtgtgtgtgtgtgtgtatagaagaactacatacatacatatatagaaggaagaaacggaaatgaatctataaaggcctgatagtacttacatattttcttgttattgtctgttatgttatgaataggacctgcggctgtattatatttgagaaataggatttaagaaatacccactcagtttcaccaaaaatgttaaaattttatttgctttaaaaaaagcttttattaagcttcttttccatctacattatccaagcaaatctgaataattgggactagagttggactagatgttggagggaccaactttctatttattaaatcacggaaagatttagcattagtttgattagaatgggtgctttcctgcccttaacacacatacagtgcctctttgaatgcatattttctgcaacaaagaaaaacaaattaacaaacaactagttgaaccttcaaggattctgaaaagcttctggcaaggtatattttttaggatattggttcagcttctctattgggacaaaaatagctggtttaaaaatacagaaggcttttcctttcacatcaaagatagaactggtagtagtcagggaagtggagtggttctgctctaagctattgtctagggttccaggtttcttctactttgttcctctatctttgcttttatctgaatggttgatgctggtttcacagcacatcatacaactggatttcagcctgtgggaaggagtaaaggcacacagcttcctaatataagcatgacctaaaacataaatgacgttgcaatgagactccatcaactagaatttggccacacttagctgtaaggcagagtggaaactaatccctgcttgggtggctgtgagtccagttaaaatttggggggtttaattagtagaaggaaggagagactagatgtggacgggcagttatcagaaattaaaggggtgataaagtaagcttgaaagcttctttgctttctagtgtgacagcttgttctgagcttatcttgtacatttttgcttcagacctgaaatcaggtcaggttccatgtattaggacgtggtatatggaaaccatagcatgggttttagaaaagggtgcattgccattgagttaatcatcattttcaggctttttcagtacagagctaggaaatatttttttctgaaagagaaaataggtcatgaatccatactactatttgcatttcacttttaaggtagatatttaaaatgttaaagaatgtgtttctgtcataaaaaccaaagtttgattcctggttctgcaacttattagaggtataatttttttgctcattttgagtttcagttttctcatctttacaatggggataataactacatctcatggttgtcatatgattaaatgagataagtgctcagaaatttttactgattttattattctctatcacaatacaaaaaggagagacccctaattcttcttacaggggttagagaagacttagagacacttgtgccatcagggaagattgaattttaaatgggatatggaggtttagtgagaagaaatacccaggtaagggacccagcagaggctgtgatctgcatttgtcaaggctggtgcataggattctattttgaccctttaaaaaaaaaacttttttcttatagtatttatcatagtgtgtaattaagtagtagtttgtgtgcttatttgcttactgtctgactgcctttctgtcccacagtgacaaggaaggactatcctgtctttctttttgattaccattataccttcagtacctgccacataatagtcacacagttgctgttcag

SEQ ID NO: 73435 - DNA, 1002 bp, Homo sapiens
agatgagaggaaaaaatttatacaaaggaaattctgatctttgcttcttgaataacatggatcatgatttatactaggggtcagcaaacattttctttgaagggccagatagtgaacattttaggtttttcagcctgtatagtgtgtactggaactattccactgttggagggcaaaagcagccatagacagtatgttaaatgagtgagagtggccgtgttcaataaaattttatttacaaaaaataggctctgggctggatttggttggtgggctatagtttgctgatcgctggtgtataccctgttttgtagactactgttctagaccttggagttgtattgtactacttctgttagatccttttcacattagttttagagagtggactttatggaattgatttttcctttatgaagtgggtagaacaccactagtagagagtattcagttaaagtgaacagatgcttattgaacagtagtgaagttcagatgcagggttaggtactggctcatgagtttgatatgagaggtacagttatggcatagtgtaagatgtaaaattattaaagcacaagctaataagatggtacagttgagaaagtgaggccggagctggctctaggaaatgtcttgagttggattttgaaaggttaattcaagtttgtgaagtagatgtatgcaaagacataaaggtcactgaagagagtttgggagaactgtatgtacctcagtattgatagctggcaaagtgttcaagaaaaacagcagcaggaaatgagactagatagattggcatggcacgtcctatattctctgccaaggagtttcgactttgtcttacagattgatgaaaaccttatagattgaaccttacagatgggaaccttatggattgaagagattttagtagaggagaaagttattagatttgcattttagaaagaagtagcgtggactatacaaagagcaggtttttttggcacctcatctgttttcact

SEQ ID NO: 73436 - DNA, 1054 bp, Homo sapiens
aaaatagtttttattcagagggtgaagcaatttcaccctgtgtttattagcctgttagaaccaataagcaataagagagtctacatatgtaaggaaaattttatttagagatgtttctattatccaattctagctcttatatatataaagtactgtggtatttagaacagtagctttgaaatggctgcaggctgcatcaaaatcacctggtgtgccttatagaatacacatgcctttgttcttattctggaaattttgtttcagttgatctgggtaaggacctgggaatctgtatttttacagtgtctcatgtgattctgatgtacagtcaaatttagaaactatagttttagaacacaatctaaccacaattttttttaagctacacaaaaagcatgtgaaaatgaacaactttaacaaaacaggttagaaagttagaaatgtttttgacttagaaggccaccaaaaagtatttttttaggataaaaataattcttgacctttagaattgttaaatttgggaacgggtttccaagggatatggaactggccttctgtgaatatttttaataggataatttctaatttgcttgatattttagaataagttattgaatagcccccaaaaattaacttctgtgctgactgcagtcaatctgcagttactgcttacagtgtgctatattgaggactctccttagaccccatatatgaggagagaggctaagaagagaagagcagttaatttatattatctgtcatgtgtttcttatccctggcttaggaatttttatccaaaggatggtatagtattctggtatccttactaagccataattcctgatttggatgtccatgtaattagcattatacacacacacatgcacacacacacacaccccctaccttaccagatgagagcagtttataaagaattggtgatagttacacttaattttctagacagttgctgcaaaaatacccttccagaatgaattcgttagattttgaattgtgaaagtatattttaaattaattcagcaacagttttcct

SEQ ID NO: 73437 - DNA, 2032 bp, Homo sapiens
gaaaaatgtggtgccatattgtctcttgacctggctaagtatgtataggcccaaatgaaccaatttcttataacttgtttgtcagaaaaatgtaggaatactgttctctgggacagctcgtcacttagcaatgtgttatgagttaggaaagaaaagtaatagatacattatgaatgaaaatcttgagctgtatatgatcattttacattaatttatgatttcaattatatccttgggcctcatttaataaaagtccaggccattgtctgaagtgtcatgaatgtatttctagtgtagtctttttggataactgtctaggatttctgatgattacttggattgaattttatgtgtatatatttggctttttttttaatgcagctatttgataaaactggttgtagcattttcacttacgaggagtgtgtttgataggactttgaattctgaaacacgataaaactatattacttacttccttagtagttaccgttgatgttgataaacatacctgtgtccagatactcagtactgtttgtcatgttatataactgatatatcaaatgttttggtagaatcaacaaattagagttattgaaaaggattttcttctgatatctgcagataatcctctctagtactgctttgcaatggaaaactattctgtactatgattccaggaacacatggctaatgaatattgctcaatagaggagcccagaagaaatcctgccagtactttcttagtgatgaatgacattccaggatagtgtagcagttatttttctcttccttgaaagtgctaatagtagtattgtctttcaaatattgagatttctatatgctgacaagtccttctgcatctctttaccaatgttatgattgctgtggaggctaacgttgagagaaggtatttgcagccaaagtaatctgttgggaagagttttacttgcttattagctgtcccagctttttaagcccaactaggacaactacttttgtaacttcatgggatagatattcggtaagggcatgtcttcatagaaagagaatgagtagtctcagctgtgtattcaaatggctgtagattggggtcttctattccaacttgtgggttctcaaaaatggatgcaaaagtccaccatgctttgagatatggataattctaggcattgtaaatgggtttagtttaactggtgaagattataattatgatgtgcatttaattcttaatgattaaaagacaggccagaaatttttgaaatcagtttctagtatctgaaatgattaaaaaaccacagctccctcccctacctcccataaaatgtttttattcactaaaatcactaaaaatatttgccttagggtgtcaaaactctgatttcattgtatacttttaaatatatatttaaaatagttgcttttcctaagacacttagaattttggagaactttctcttttttgaaaagatctgtaaggaattttgagggatgccacagtggtgtgatagaaaatataaaacattttatctgtgttacatgtgtttgaattttcatgtttatcctgtagtagcctcttcatagtgatattactagggactcagtaaaaatctgaagattagctcttgtcttactgatttgcgattcagatgttctaaatacatgcataacactactgtatatgttagtctctgtcaattcatctttctaagaacatttaataagaatttgttgaatgtagaccatttgtatttctttttctactcatatttttggccctgttctctcaacccctggatttattactgctggtatgttataggaatatatacatctgcaattattagtagtttaaaaatatgtaattataataatgcataattaaagaagttgatgaaatatttcaatttaatatagtaagttttcagcaatttacatttgcagtactcttattgatatactttttttcaagatcatgtagtaagaaagactcttcagtacttctaggcaaacacaacaatggagaaattta

SEQ ID NO: 73438 - DNA, 1007 bp, Homo sapiens
tctcaaaaaaaaaaaaaaaagaaaaaaaaagtcattttaaatttgaagctctcaaattaatttttcttcttaataggacacataatagttaacagcttcattcaactttatatattaataaattaaaagtcttttgaatgtttgttttgtttttatccataatgattttgcttgagaagttatttctgttttctgttgtaaagtattcttatgtgcgaggtgatgcatttgaggtgctgtctactgcctttgtagaaatgccctttggggtacaatgtattttgtttccatatgtctggatctgttttgtttgtaaaatttgttttgtggagacctcttctagcttaaaaatatcttgaaatatacatgtgtattggaattgctcacctttcttcctatgtctttccttgggaaggattttggaaaaatagggcaatgtgtttataacctgaaactaccttgctagtaaggttaggaagattttcctgtgggcagagtttttaccttttagttctatcttttacaatactagcatagtattgacaacagagcctatatttttaaaaagtattgattataaacattggtgtattgaatctggtagtcattgagttcaaaattgattaccgttgcaccttattatctgaggtggaaggttcatttgttttaaagcaaaagtaaattattttgaagttggaacataggccggtgagttgtttcaaggttaggaatgtctttgattccctgcgtgttttcttcttaatgtaccaacgagactctcgttggagcaatgagaaagttatcctagattaatttttgctaaatgttgtgagatattgtgaaatattctagcctaaataattatgggatttgttttaaggagcttttcaattcatagaaaagcataaagatgctttttgtattgttcttctgtgtttgtattgtgcacgtgcatgaatgctagatatgatctgtattctggttcctactagggaataacaattttg

SEQ ID NO: 73439 - DNA, 1050 bp, Homo sapiens
tggcctctcaaagtgttgggattacaggtgtgagccactgcacccagctgtataaaaaatttatagctaaccttatctattctacagcaacattcattatgcagagttgtgtgtggtgtggtataatgaatataatagatttttttaattttaaggtgtttttactatggtatttgaactgctctttaacatgggctgatatagaaaggtgattgttttgatggagctttattgtttgcatttgctttagtatcttaattcccatggtatttataagggtttaattaagcaggaaaagtatacattttaagttcagtagcttttagaattactttatttgtgtgacattgtggaatacaaattggacatggagtcagggcatgtgggtcctagtctttgtttatctactttctagcagtaaactttgtaccagtgacctgacttcctaatttctatccttctccatgaaataaagagaataacatttgccttacttcatagggttattggaagtttgaaataatgtatatgaaggtacttagtaggctgtaaagagaagtatatagtattattctttcatgaggcattggaaccactaaagagatataattctctgctcttatttgggggaaaagagctaaaattgttttatttgaacagttgataataaagggaatttaggatataattcatggagatagagctgaaaaatttaggtagattataatccatgattaaataatttatagtctatatataatcagtagccttggaatgctctgtagctgaacttgatgggcttttgggctttgttagattagttgacatgtacagccaattgtggtcctgctactttcagaaacaggtagacgtggattatataaaaagcaagcaataaaaattcattttagccgggcgtggtggttcacacctgtaatctcagcactttgggaggctgaggcgggcagacatgagatcaggagttcaagaccagcctgaccaacatggtgaaaccctgtctctaccaaaaatacaaaaaaattagctggg

SEQ ID NO: 73440 - DNA, 1049 bp, Homo sapiens
tcaatttttccaatgtagtatgccaaccagtattagggttacatttataacttttttcctggagagttgatgagttaactaccatattttcatttaacttaaggtagttttgaaaatttctaagcattatatcttaagattcagaaaaataagaccagatccacttatgaatttccattccactcgtgacctgacaagtcgtataacctctcagcctcactttccccattagacaaatagaatgaaaagacctatcttgcagaactgtgataaagattaaggaatgtacaacataatttattattgtaacacaacctattaatcatttttatgtattttctcttatttgaattttaaaaattgaaattatggggtactagaggtttttttaatcttgcttttttcagaacaagcagcatggtggtatggaaagaactgctgtattagaactggctgtgcctggttctgtcactcactagcttatattgtattgaaaagtcccttaatctctctgagcatcaagtttctcatccatagaattgtgattataccaatgcttaaattttgtgaggattagaagtaatatttgttaatcatctagcaaaagtgcctgcctggcatatggtaggggctcatttatgatgatgatcatcatctccagtattacggtaaacacttaacaggataaaagctttttagtctgaaacctttgacaaaaacagaattaaggttgttccataacctatcatacagttatgtatcgcttaacaatggagataggttctgagaactgcaccattaggcagatctgttgtgggaacatcatagagtatacctacagaaacctagatgggatagatgactatacccctaggctatatggtatatgacccattgctcctaggctatacatctacctgtatagcatgtaactgtactgattgctctaggcagttttaacacttacaagcattcatgtgtctaaacagatataaacattgacaaatacagtagaaatatggtatgaaagataaaaaatggtataccta

SEQ ID NO: 73441 - DNA, 1820 bp, Homo sapiens
tagttttgtgagtttcgtacatttcagggaaattctttctgtgactacaacttttatttgcttcctattgaaggaaattgacttgtttctgttttaggaaattttaagcttcttagggataacttcagtgcttaagtgtctttggaaataactgaatttagttctataacatttaaaatgtacactgaaattcagagtgagcttaccaaattgaacttccaacgtttagttaggtaaatatgtactttcttaccacattaatacttttatgtttttcccatctctgctgcttttattttgcaacttttaataatttaggtagatttgcaatgaactttttggtttgtttctgtaaaatagtagtggatttccttctcttttatattcctttgtgatatgtagtgcaacacagtcttactgcttaaggttttcatccttacctctttgagttcaaagagatatttaaaacttgccattatttggttacctttatttggttgtcatgttgttagtgtatggcagaactattagtttcctctttttctgcatcacatttcataagtggtcaaggcatttggacatattcacctcctattacctattaaaaatacttcttaaagattgcttccttcgaaaaactgcttgtcatggagaggctgaggacatttgtaatttaaacctgtattttccttttcccagttgatatctgcccccagagaacactttagttcttgtctataaggcttaccaaaagtttgcgggaaaggtggtcctgtgctgttaccactttgaccaagagaagaacctggagattgggatgtttttgcatgtcaggatttattaattcaataacagagagggatgatgcttctcacttattctgatgaatcagcaaagattgcaaagcataatattaatgcttatgtcttgaattggcacattaaaaatgacactagcattaaaataagccactgttttcaaatgaaaatgataatttgagtaaagagtattgaattggaagaaaacattcttccagaagatttttttcatcataaaactatctgatttaaacatttcatgttttctattcacaacaaggataaatgattaggaattttggatgtctcaaatatttaatactgaatattgttcatgtgttttcttctttgtaaaagtactttgtatctgcctgtttgctgtggaatacttttattttgtaacttcaatgtctttacataagtatttcccctttcctgctctatactaggatctgtggtgttcacagtactaaatacttgtatgtaacgttagtagttgaaggaaatgagaaaagattaggtggaagatagaacgtatatattttatagaacatctaaaaactttaatgttctgaattactttcttaaatgtctgggttaatatatatatttgtatatttatgtagatatccaccattctcccacatatatgcacatatatgatttttcataactaattacaagactattaaatctatattgcatttgttaacttagttaacatacctacagataaaacatctttgaattattagctaggatgctatcagaatttgcagggcattagtaaggttaagtaactgagaaaaaagaatggttcttagtgaatgttttcctcaagcactttgggtatcccactaaaaaattccatgcctacagacattgttataaatatttaattttgataatcagtaccatttactgatatttctacagtaatggagcaatgtatagcctttagtcaatcttttcctttatagcagtactttaagttgcatatca

SEQ ID NO: 73442 - DNA, 1320 bp, Homo sapiens
gtgggagcatggcctttagcagtgggatatcagaaaaagggaaacacagtctctggctcaggcagtagtgaacttggggaggaaggtgcagtctgaggtatcaaattgcaagggcacaagaattagattacaatggaagtgaagatcagaaagattcctgagactgtggtatgcagagaggggaacttactgtggagtcccgtggtctggtccaaggacaatttgagagctgtttaagatgttactgattgaaattcctctcccctcacccactaaaaaacactgctggaaggttttcagttctttcaaaactgttctgagagatctcactagaaagatatggagaatatcagaaacctttaaatttgtttgggggaaaaataatgcaaagaaaattgcatatttctatgaaatacagttctaattctagagagtaacttcattgtcaacgaatgttttgtggtttttataaacttccaagtaaataaactcttctggtattatttattattgttgttattttagtttttgagacagagtctcgctctgtcacccagtctggagtgcagtggtgccatcttggctcactgcaacctctgcctcccaggttcaagcaatcctcccacatcagcctcccaagtagctgggatcacagatgcatgctgccatgcccagctaatttttgtatcttttgtagagacagggtttcaccatgttgcctgggctggtctcaaactcctgggctcaagcaatccacctccctcagcctcccaaagtgctgggattatagatatgagccactgtgccaagcctgtattattattatatatacctggctaaggtgagcaatatctatttgagtccaggtctacatttctggagtaggcaaacccaagcaaacagttctgttgcagaattcttttctaaaagtttttaaagggcttttttttttgttttgttggcctaaatatgcacttattcatctacataataacataataacttgtagacaaaataatcacctggtgactttgtctacaggaaaacaaatcatgaatagttctgttttcatgttgacacactcctgataaaggaaagatattggggactagagtgaaggcagctcagttgatacactaatgtctcattcaaagaaaacggaagctggaaaatgtggactgtgacttcattacatgaatgaagtatggtagtttagggggaagaggtgaggatatttgccctgtttctcattgctatagcacacactggttctggaatcctagcaaagctccctgtaggtcaccacgccctctccgaccc

SEQ ID NO: 73443 - DNA, 1018 bp, Homo sapiens
aaaccccgtctctactgaaaatacaaaaattagctgggcgtagtggtgggcacctgtaattccagctacttgggaggctgaggcaggagaatcgcttgaacccgggaggcggagtttgcagtgagccaagatcgcgccactgcactgcagcttgggcgacaagagtgaaacttcgtctcaaaaaaaacaaagaaaatactctcttcattaaatctagaggaattaaaggggtatcagttacctgggaaagcagactttgatgcagttgagactattttgaattgaagattcttatggacttcatgtcctaaacagagttgcaaataataaagtggcgactgcctcacctctctgaaagttttaaagaatgcaatgtgatactggccagattcgtccttttgggttccctcaggcctaaatggcagtcagcatcagaaaaaatgcagttaagattagactggttctggagcagccatgtggtactaatgactctaaaacttgggtggagggttgaaaaaaaagaactgaagtattatgagaaacagtccctgtttctcccattattgcagtgggactttctgtctttaattcaattaaaaatcacagctccatccttttttcttaaatttttttaagctttttttgctcaatgtagcttgatgtagaaagatgagtgtgtgtgtgagagagagaagggaggcgggaaagatggattgtttagtttcatcttcaacattatattttgggtttataaaattgcactgaaattggaggtcgttattagttctcttttcactaaagcacaggattaatgcgaagcacatttgtgctgtgattgctgcaggaggccatgtgccaaccgtgctaagctttgcaatatttgtattcctgaagatgatatttgaattttaaaagaatgtttaagtggagcagttgacattcctctctctccccccctccttttttttgagtcccttctcctttagttaatttctctttgtttttattattgtttttt

SEQ ID NO: 73444 - DNA, 1007 bp, Homo sapiens
ctaagttggttgtttgaaaatgggactgtgtgtttgaatgatgtctttgaaccttctccagtgtttcctatgtgaccttgggtaaaacatctaatcatacccgtgaaaagtaggaataaaaaatatttgatgctgattgtgattatgataataggtagttcatgatctacatggcttctgtgaatatgaagggagacatataaaaactgtgctgggctctttagaacaactattaaatatttcagtattgggtaaattgtcaaaagaccccctatttagtgggagcagttaggagcaagcacaggtagagaaggcagggacctgggagctgactgtttagtaagcacttgttgaccacacgtggcttccaagcatacttaatttgcttaggctcgggtgtactcaggccgtcagtcctgcggaacagggagaaccagtccaggcctgggtgtactgacttacctggtttctttcctacaatgccaagccctatgatgagttggttcttttttagattgagacaaatcctcctctgtcattttcaatcagcagactccagcacacccccaaaggccaaaagcaaaaaactcctgttaattcacacgccccgaatcaattctgaatcaaaaaatagacttctagactcctgtgtgtatgtgtctgtatgtgggtggggagggtggagggataataagatctttcttttgtttgtctagttcagaaaggataggttatttctatttaagatggaattggagtggtacagagagagtggtaacagaaacgttacacagcacaaagtattgttaatctagttaagcaaatttagagtccatactgacagaaccagccaagaccaagccccttggaacttgcccagtttgagaatatcttatttgttatattcattaaaaggataactgaacaactatggggtggctgtaaaattactgtttttattttttggtgagtggatgttaaatgaaatgttttccaggagatagtgg

SEQ ID NO: 73445 - DNA, 1056 bp, Homo sapiens
agttaccttggccacatcaacacagcacatgtacacttcagaaaggcagtggctgggaactgatgagagtattatgttccaagttactttccctttgtcctaggaaccttatatctaaataatctatctcccctggaataataactgatgtaattattttattaatggcatatattcagcataaactctgcaaagcagggactgtgtgtacttgactctgttacagtctggcacccagtacaatgtccatgaattttaagtgctctgtaaatatttatagactgaattaatgagcgagtaaatgaatgaatatagtttattgagttgatattacaaagaggttcggagcacaagccctggtatcagactgcctctacccccctcaagttgtgtcacattgggcaagttgctttactctctgtgtctcagtttccttatctgtaaaatgggagtaatagttgtaccaattttatagggttgttattaggactatctgatatatacatggaaagctcttagaacagtccctgtatgtatcaaatgctccataaatattaactcctgtcagtgtcattatcatcatcatcagtagcagcatcctccatttgcagtaaccaggaagccttggttaaagtctatgtcatgagcatttagtgggccagttccaaggggaggaaatgtcttagtcatggcatattccttaggactattcaacttatttctggtcccatctttagtctttgctgttgcatcacaggaatttaccagtgatttgcaaaacatgggctgtcttctgacatggacactcttttttctgcaaaggagtttcttatccaagttgttgccattttaatcttcatcgtcctcaagaaaaggggttgggcttggagaggtgtacagagtactgaagatgctctgaatggatgactggagaagatgtagcaaatttgtcatcacaagtgactcccttattttcgtggattgagagtatggaataaggaaaaattgcaagccattaagggttaaattgctttctattgttttaggaatttggat

SEQ ID NO: 73446 - DNA, 1103 bp, Homo sapiens
tcagtacacagttgctgctgtctgcagccagtgtctgttctgattagccggtgtccatgccaaccatttggtcctgcttccaggtgtcagacttgggtaacagggatcatgatggaggcattagtggcgtgtggtgctttctgcttatttttcttttgtgttcatgtaatgcgttgtcacctggattttctgaagagtgtagtgacttcagaatttgcactgtagtttttttctttgctcatagagattcaatgaaatactctcctgagttttaatgtcattttgagggggctctttgaggtttgtgtgagtcaaaagatcagtggataaaaaatcaagagacagatccacattttaagtgtgggctatgcaacatacaaccaagtaagcctctgaccctgagactttttccttagtatctctagactttcatttccctatctaaaaaatgagtcattgtgctaggtaatctctaagaccccttacaaactctaaaactccacaaaatccaaaacttaacaaccaaagatccaaacttctttcaccagcagctttcctgagtagagaaacagtaattgtcagcctcataaccattaggctaaatattatgatgttaggtgtaagcagttttcaatttcagcaggcaacttttttgttcagaataattttctcaaaagttttgagctattttttctttttaaaaataaatatcagcaactaaactgtctaaactgatctcatatcatttgctgtttaatattacagcagaatttttattgtgtataaatgttatttaaaatgtacaacactctttcactgaagggtggcggggacacaaaatactttagctagcagctttctttgtgtgatacatcagtgttctggcttcagagtttggccatgagcaggatattccccattcactgaataacttccaagagcatctgtccttaagattctgaaatttgccagaggcggtcttgaaagtggttacatccaaacctgtgtgtcttttctcccttccatcctcttgggagggatattattgagaagccaactgcatatggttacttgcagtcagtgttggggaaccgggggtggga

SEQ ID NO: 73447 - DNA, 1102 bp, Homo sapiens
tttaggaaactagttttatgttcttatgctccctctactggttttctttctggagctaaatgccggatatcatagttctttgctatttctgcagaaagtagaatgtatttctatgaaaaagtcgtaaagtaacttgaacagaggagaattttttttttgtttttttgagacagaatctcgctctgtcgtccaggctggagtgcagtggcatgatcttggctcactgcaacctccatttcccaggttcaagcaattctcctgcctcagcctccctagtagctgggaccacaggtgcccgccaccatggccgactaatttttgtatttttagtagaggcagggttttaccatgttggccaggctcctgacctcaaatgaactacctgcctcggcctcccaaagtgttgggattacaggcatgagccaccgtacgtggccaaaaatcatattttgaccactggaaattaatagtgttaatacagtcttttttcttttatttctaagaaattattttattagcatgaacatatttgaaacaggagggcttgaatgtaaatctgccaaagcatactaattaatgaataattaaatacagacttgttcatgagctgttaggggactcattgaaggaaacagtgtaactataacaagaataactaaacaaactaagaaagtcacagttcagtgtaaagatgcaagttcatatagtttagaacttcaatttttgtttacagtggagactcacacagatccagtttatataaagtgcaggtcaagagatgtgaattgtcatccatagtcagtcatccgctctctatgtatatgatggtgccaggaaatgtgggtgaataaaacaagcataatctttgcccttatccatcttccagccagcatggaatgcatgcattagaccagtagttacagagaattcatccaaacattatgagtagcaggtgccgtggagccctgatgtgcacagaggcttctttggaagcaaataataaaaggtccactcctcttgcggataattaaagggaggcttcccaaataagtgtgtttttgtttttgttttgagacagagtcttgctctgtcacccaggctg

SEQ ID NO: 73448 - DNA, 1023 bp, Homo sapiens
tctcttttgacaagtactttgaagttaaccattttccaattacgttagaattattctgggtagactttccctttgacaatgcacattcttataattaatttcttgcaggatacaaaaattacatagaaaagcaacattttaaaaagacaaaaggggtctcccacgttctttctgtgccctcaccccagtctcatttcaagagagtagtcgctattacccacaatgtcatgccttttcaaatgccagtaattatatgcttaagaagattaaagctttatttgctcagatcttaagtccatgggacttctattagtaactaatcaaaatgatcattactgttagaaggtgggaaatggtagaacattgcttttgaaaactatatttggcaccattaatacaaaggctgggatcgttgtgatgagtgctggtcatgctaaccatgttcccgcatggctggtgattatgtcctgggttgggttctgcacggtagcctgctttgggttagggacagtcacacctggtctgtcctgacttctttctgggccctcctaaccaaaccaggggaggggagaaggacccaattcttttcctttggtgcacgtagcctggacccgttatggacagaggccaaaggaagataacagtgtggtgtccagagatgaaaccaagtggttgatgggcagttctttgagcaaccttgtttatgagcctattgatatgcagatatagaggcatccaatactattgactaatttaaaatcttattcagtgagtcaacactctaaataagcaatggagatggttccattcatttttttgcaagtatcatttttataaacataaatttcctgagatttttgttttcatcttagcctctgtggagctgcttcgtggttatgataagtgctgtgtgatgctcaccttgggaggtctgcgacatatattgaagtcatctctaacctgaagtactgacagactttctggaagaaaaggcttgtaggaggaaacttcagaattctatta

SEQ ID NO: 73449 - DNA, 1030 bp, Homo sapiens
atggcagccttacgtcagtagtatatgccactatgaagtatggccaaaaccctagcgtcacttgtaaccattgtactcttatggatttgtgtcttacaccatttgccttgctttttaaatgactttgtttttcaaggtgctgtcattttgcaaaaggaaatctttatatgaaatgtacaaaaaccgttactaactggacaacagggaaggtgctggccccacattagtgcctgcccaccgctctacttctaaccagggacacggatcttccattctctacatccaccggactgcagcccaagtctggacctggctgcagtgggcatattaccgtatggatatctttttctttctttttttaaagtgaggagattcttcagggggtcaggctgagaatgtaataagcctgacattggaacagatttctcccgtgtggtctagctggacccctccggcatttgccacactccctgccagtcctgacattgacttcctgaatgtgattaggtggtaatgagcaagaatttcctaggatattgaaacatctgtatccaggcccccaatcaaatgctgctgaatattgtgaatgtttttactccgctcactttcccactgtgctttcctctaaccaaaatatacgtgtagccattaccaatgtacaactctcaatgcggagttgccgccacggtttaaaataaatctctgtgaaaacctttctgcagctatggtcccatcacggttacatgtggccacgcacacaccgacaaccttgctgtgctgtttagccctgtgggttctgtccagttggtgggagggggaggttccagaccactccacctgctgtctagatgccagggagagctgctgtttggaggtgaagatgagccctgttcaccacagtctaagcacagcacacgggctcaagccatggagcccttttccttcatcatgtaagtcagctttttcttgtgcttagtaaacttttccagtgaggagaaatgacttcggggcaaacactgccagggaaagc

SEQ ID NO: 73450 - DNA, 1014 bp, Homo sapiens
agccagggaggaagtcaccttgaaagaagcggccgctgggctgtgcggctgcggcagaggagagggccagccacagcatggtgtccgcgccctgggcctcggagcgcaggcggtccccgaacctggcgtggaaccccggcatcgcctgcctcacacctgggagaaggaagggtcaggcggattaggacagcattctccagcaaatgtggttgacttcccttaatttaaaaaaaaaaaaaagtgcaaaaatgaaatgggatcataaactgctccttctattttatagcactcacccaagccactcggaaccagttccaaagaaccttgttacaaagcccccaaggtgtcacctgatggaaagtggtgctcaccagaggcctgattgagtccccatgtccccggggcaccagcacccagcccagccctgagagcagagtcgcccgcagagccctccctttccatcctaagagaggattctaatgagctgtggggctcacagtgaggctgggcccagcaaaccacttagtctcctgggttcaggagccctctcaaaccatctaggctcagaggatcctggctgttggttccctggactgttttagtgttttcctcttttagggaggagtagataagaggaaagaattcttcacttcctctgccaagcccctcgaggtgtcccaccctctgcatcccagggctacagggaggtgtttgcctggagtagcctcccgggcctggcctgtgccacagcgtcgggcactctacctgcccacgccttcgaggacccagccacacgctctggctccagtccacaccccattttcccacagacctcagggaacacagtgtctccacagtgagcacattgggaaacaaaatagttctctctcgaagccaaggaaagaaaataaaccagagaaaacaacaattaagagccttactgagatcatggaattttagagctagaaaggatcacctaagcaaaagccctccttttttaaattaaaaataaac

SEQ ID NO: 73451 - DNA, 1056 bp, Homo sapiens
acccttttctcccacacaaaatagttttagtgatttttttcattgtccattacttgccaggggcagttttagcagcacttttgatagattacgtctaatcctcccaaccaaccagcagggtagctattactgtccacattttacaggcaaggaaacaggctccaagaggctgaggactttgcccaggatgacatagccaatggacaagcagtgtctgtcagctgtgaaggcttcactcttattgtccttctaccttgaatagaagttttcctgataagaataaacgaggaaaaggtccttgcctcctggaagaacaaatctaccaggtgatctattcattgtttcaactcagaatgcacttgattcaggaggtcatctgaccttcaccttggatggttagtttcactttttacatatagtttttgcagggttttattttataaaatccaagcgcgctgttgattgtgttttccttgttttcagcccccccactccagcccgcagcacatttccgctgtccgtcagtaattgtgtcctctctttatgcttgcttggggaatgttgttttctgactaggctgatcattatctaaagaatctaattctgttgatttttaaaacttttaggaccataaacgttgtgttcatatatggacatggaaatatttatataattttatagaaaataaccttttagatggtcaaagtgtaaggagtttttttgtcagataatcatttctacttcaaaaacatttcatgcaatattagaataaagttcctgtcattcctctaaaaatctgcctgtgagtgagatgcgtggtcagaggccagtgccgtcttgtcttcacgagggcttctgtgaggcactggcttggcttcatgtctttttagggggcagaggaggataggattttaacagtagggggaatgagggtgggcagagcccccttgatctgccatccccagcactggtgtgagtccctttctctaatgcaggcctgcctcagcggcgtgtggggagaacgctgaaaggcagctcctgtcaaagtccctgccc

SEQ ID NO: 73452 - DNA, 1045 bp, Homo sapiens
ggatggctgaactttggtttcccacatcatttcctgtggtcactgagataaagtttgtgtccttgaaaagttcactcagctgtgagtctttgctgcctcccctctgtgcccacagcacacacctactgctgaagggagtgggcattcatgtggagtggcctggccccattttgtgctttgtcttttgtatcaagtttcaggaaggagtttctttaaaacaaaaatcaataaggaaaacacaatagaacagtaaatcctgtacgcaataggtaagaaatatagtataaggtaaacatctgcctgtttttgtgtgatgtttaaagtctttcaaccgtgcaatcaggttattagtggtaaaaagaaattagcactgaacttacatattacagaataattggatttgattaaataaacctagaaagaaaagaatagtgatttttttaattgggcaggattatgagaattttatttagccgaagaggtatttagggtatcagacttagcaaataaaaatataggacatctacttaaattttaatttttcataaacaatgaatggttttttagtataaacatgtccagctcaatattcatgacatatgtatagtaaaaattatttgttgtttgtctgagaatcaaatttaactggatgtcctgtattttacctggcaactttaatttggaataaaccattagtgtgccagtttgtatttgaagagcccttcttgattgattaggagctccttgaggacagccttgcggccagcgtgatttgtttctccttggactcaatagcaccccgcatgcagtaagtattcctgaaggaaatgaaagataaggtgaagttacggggtagctcagtggaaggatttaatatagagaactatttacaaaggtattagagagctggaaatccaaataggcaatgggaagaaccccagagattaacaacagcagggagctctgtcctccaggatggctgagggacaaggtagttactggagcccaggggctgaggctgctcggtgggagccgggacaatgaa

SEQ ID NO: 73453 - DNA, 1009 bp, Homo sapiens
actctgcgcctggctgccggacgccgtgggtcccaaaggaagcaaccgcggcaagagtgaactccgcacctggaaaatcgatccgctgtgcgcaaaggccagccaatggcctccaacgggcggcgggctttgggccgggaacgggggcgcaggcgcccaggcgggggcttctagtgggggaggtggccgagggagggagcgacggctgtcaatcacaggccacgccctcctcagcccaaccccccactgctgtcccgcccacgggggcgggagccgtgtgcgccacgccgaacactagtctacgcctcggcatattctattggctggaaggccgtgggaagcggctaccagtaaccaatagtaacgcacaattggcccgtgggggcggggcgagcacggcttgctttctcaggagccaatagggaaaaggaaagtgaagcgtttcctgagttcgggggtcggcggaagatggcggccggcgaaaggagctggtgcctgtgcaagttgttgaggtgagcagccggtcgtgtgggctcacagacgttttctcttctgtaggggtacttgcccgtccagtgtagctaaattttgcgggcaaatggccttccttgtcatgaatctaaggtaatttctcaggccaatgagcagtctttctttttcttgggggtcttctatatagactggaatagactaggtcttaaagactcaatttaccgcgttttcttctgcttcactgttggccgaggggtcgagttcccttccctgcttcagctttttttttccctttcacactccagttagtctgtcataaattattcatattcattccttatttttctttacgattgagccacgagacattttccaatctatcatgtctcttttcggtaaagaagaaaccggatcttccttctcatcttagtttctactcttaaactcaccaaaactgccattgttaacacgtcacttaaatataaagcttatgttgaatcctctgctttttgataat

SEQ ID NO: 73454 - DNA, 1050 bp, Homo sapiens
aaacgctatcttgtggaagattcactgtatcctcacttcacactgctgggccaaagtctaggatccatttttcttggctgggaagctctaatgcagtgtgttcctgatgtttacattgattcaatgggatacgcttttacgcttcctctgtttaagtatatagggggttgccaagttggaagctatgttcattatcctactatcagcaccgacatgctctctgtagtgaagaatcaaaatattggatttaataatgcagccttcattaccaggaatccttttctcagcaaagtaaagctcatctactactatttatttgcttttatttatggacttgttggttcttgcagtgatgtagtcatggtcaattcttcttggacactaaaccatattctctcactatggaaagttgggaattgcactaacattgtttatccaccttgtgatgtgcagacatttctggacattcccttacatgagaaaaagatgaccccaggacatttgctggtttctgttggccagtttaggccggaaaagaatcatccattgcagatcagagcctttgctaaattgctgaataagaagatggttgagtcacctccttcgcttaaacttgtcctcattggaggttgtcgtaacaaagatgatgaacttagggtaaaccaactgagaaggctgtctgaggatttaggagttcaagaatatgtggaatttaaaataaacattccatttgatgaattaaagaattatttgtctgaagcaacaattggtctgcataccatgtggaacgagcattttgggattggtgagtttggcctttaaacaacttgtttggtgccatgagatacacattttaagttcttttgataaaatgataatactctggaaatctgcatcatgccctaattctcttgccctcatccaccaaatgtgctttcctcacttgagaccttgtaagatagtagttaataatagcagctagtatttattgaccaattcctgtgtgtgggccactgtgttgagatttttacatgtattatctaatttaag

SEQ ID NO: 73455 - DNA, 2666 bp, Homo sapiens
attatccttgcacacaattcggggggcccaaagcttgacattgtggttcctcacgaaggagatataactggctttctggctgagagtgaagaagactatgctgaaactatcgctcacattctttccatgtctgcagaaaagagactccaaatcagaaaaagtgctcgtgcatctgtaagcagattctctgatcaggaatttgaagtgacattcctatcatctgtggaaaagttatttaagtaatgccatatctgtaaaattaaagatattttatataaactggttaaacaccttcatatgtaaatatttttctaaattcaatctcatttgtcaaatcattttactttagaaaacagacaaaatttccttttagaataaaaggaagtgttgaaaagaaaatggatgactagccttcggcttccattcttggtatacatgagagaggctggctgctgagatgaatgtgaaccaggttgcagagaatctggctttgagccaccaggaagaactagtggatttgccaaaaaactaccccttgagtgaaaatgaagatgagggggacagtgatggagagagaaagcatcaaaagcttctggaagcaatcatttcccttgatggaaagaataggcggaaattggctgagaggtctgaggctagtctgaaagtgtcagagttcagtgtcagttctgaaggatcaggagaaaagctgggccttgcagatctgcttgagcccgttaaaacttcatcttctttggccactgtaaaaaagcaactgaatagagtcaaatcaaagaaggtggtggagttacctcttaacaaagaaaaaattgaacagatccacagagaagtagcattcagtaaaacctcacaggtcctctccaaatgggaccctatcatcctgaagaaccagcaggcagagcagctggtttttcccctggggaaggagcagccagccattgctcccattgaacatgcgctcagtggctggaaggcaagaactcccctggagcaggaaatttttaacctcctccataagaacaagcagccagtgacagatcctttactgactcccatggaaaaggcctctctccaagccatgagcctggaagaggcaaagatgcaccgagcagagcttcagagggctcgggctctgcagtcctactatgaggccaaggctcgaaaagagaagaaaatcaaaagtaaaaagtatcacaaagtcgtgaagaaaggaaaggccaagaaagccttaaaagagtttgagcagctacagaaggttaatccaactgtggcactggaagaaatggaaaaaattgaaaatgccagaatgatggaaagaatgagccttaagcaccaaaacagtgggaaatgggccaagtcaaaggcaattatggccaaatatgacctggaggctcgccaagctatgcaggaacagttggccaagaacaaagaactgacacagaaactccaggtagcctctgagagtgaggaagaggagggaggcacagaagtggaagaactccttgtccctcatgtagcgaatgaagtgcagatgaatgtggacggaccgaatccctggatgttcaggagctgcaccagtgacaccaaagaggctgcaacacaggaggaccctgagcaagtgccagagcttgcagctcatgaggtttctgcaagtgaggcagaagaaagaccagtggcagaggaagaaattttgttgagagaatttgaggaaaggcaatcccttagaaaaagatctgagctcaaccaggatgctgagccagcaagcagtcaagaaacaaaagattctagcagccaggaggtgctgtccgaattgagggcactatctcagaaattgaaggaaaaacatcagtccaggaagcaaaaagcaagttcagaggggactgttccccaggtccagagagaggaacctgccccagaagaagcggaacccctattgctacagaggtcagagagagtacaaactctggaagagctagaagagctgggaaaagaagattgttttcaaaataaggagcttcccagacctgtgttagaaggacagcagtcagagaggaccccaaataatcggcctgatgcccctaaggagaagaaagagaaggagcaactgatcaacctacagaacttcctgaccacacagtctccttccgtgaggtctttggcagttcccacaataatagaggagctggaagatgaagaggagagagaccaaaggcagatgataaaggaagcttttgctggggatgatgtcatcagagatttcttgaaagagaagagggaagctgtggaggcgagtaagccaaaggacgtggacctgacactacctggctggggcgagtggggtggtgtgggcctaaagcccagtgccaagaaaagacgccagtttctcattaaagcccctgagggtcctccaagaaaagataagaatttgccaaatgtgattatcagtgagaagcgcaacatccacgcagcagctcatcaggtacaagtgcttccatatccatttacccaccatcggcaatttgaaaggaccatccagacccctataggatccacatggaacacccagagggctttccaaaagctgactactcccaaggtcgtcaccaagccaggccatatcattaagcccataaaagcagaggatgtgg

SEQ ID NO: 73456 - DNA, 1475 bp, Homo sapiens
attccagtccttactaccttttagagttggaatgagatggaaagtagatgaaactactttgaaaattacgacagttaagggctgggtgcggtgtctcacacctgtaatcccagcactttgggaggccgagatgggtggatcatgaggtcagcagttgagaccagcctgaacaacatggtgaaaccctgtctgtactaaaaatacaaaaaaattagctgggcctggtggcaggcacctgtaatcccagctacttgggagactgaggcaggagaattgcttgaaactggaaggcagaggttgcagtgagccaagattgtgccactgcactctagcctgggcaataagcaaaactccatctcaaaaaagaaaaaaaggaaaaagaaaattatgagagttacttaaaggtaacatcacatactaaatgtcttctataatcctatatttattaatgcattacaactctgtagattgttagttactaggccagtagctaggaattggtataaatttaatgcaccttctatcctgaataactagcatggaaaagtgaatatatgtgtgagcagatatggctataaagacctatagcttttgcactttatgcatatataatcaatcctttctagttcagtgaattgaccccatccacaggctgattcatctttgtgttaaggggcaaatgaaacggtatattatttctttgcagtctcctctcagtcattcatcaatgtggccagcttatctactcccaattatgttgttgatacatctccaagccatctgtcatcagatcaaaaagcagcaaacagagggtcagtcacaggatgttctgacacaccattgtaactttttgttagagatgatcccatttagaaaaagactggtagaaattggagtgaaaggaaccctacagattagcccagttctctcttattttcagctttacagacaagaacaatttaaatctaaagaatttagtagattccttcagtgtcacaaagctgtttcatgaaagaatcaagattataacctggatattctgactcctggcccagtgctttttcttactttgtagctacactttgaagtaagattcaaactgttatccactcaattgccttattcctgaggatgtagtgaaggaagaaaaagttttctggaattccgtaaattatattttaagcttatttcttcaaaattattttcatatatcacagatatatcattggaagatataatttgcatatatgttcattatcagtgttcctaatttggtattacatgtattctatttttttctgaatgatagcatgaaaagtgtcaaagtggtttgtccgctagcgtctgtctgcagaactttcaggatgactattaattcctctcagatgtcatttttgagtggtccaagcctgctgttttgaacccacagcagtggagatttgtattcttatttacagttgtgtactataaagtgt

SEQ ID NO: 73457 - DNA, 1059 bp, Homo sapiens
tggttatcaatgctttcagaatacttgtgtttatgtaaatataccccagagtccaaaactctgatatattcatatatattcacaatgagaggatgtctgtgccaaatctgtcaatcagtacaatagaaaagttaattatataactacaacacgaaacacaaatttttagaagcaaattatgtcctgtaatttacccccctccccgctgctcctctgctaactcattttcctcttttcccactctaaatgtaaggcaacccttggctttggagaagcatctgttccaatattctggtgctatgtgctcagttgtactatatgcaaatgttactagacacagaggaggtcaaagtgttgatacacttattgctaccatttacagaatgatcaatttgatagctatcatacatggctagcaagacactgatttttctaataaaaaaatttttaatgcatacaggtctggtgaacagtttcaatttaacggatgaggccaaggctaaagccagagtaaagtaatcagagccatgcctcaggaacacgatttagctaatagtgtgtgtaaaatgggtaaggtctagaattagggactaaaatcagctgaaagtgttgcagatatgtatacttatcacagtgaatacttccagtttacagcaaagaattcaaaattgttgagtaaagcttggtgactattacctaaaatagactagactttagccaagcatcttttatcatgggaacaaacccgataacctgacatgctttttttttttttttttttttttgagacagggtctttcttactctgtcactcaaggtggagtgcagtgatgtgatcacggattatggctcactgtagcctcaacctcccaggctgaaactaaagtgatcctcccgcctcagcctcctgaagagctgggaccagaggtgcacaccaacacaccagctaattcttttttttttttttttttttctgaggggtggatagagatgggtgtttccctatgttgcccaggctggtctcaaactcctgggctcaagcgatcctcctgcctcagc

SEQ ID NO: 73458 - DNA, 1192 bp, Homo sapiens
ataactttgtatgctgtataattagtgcatagcaatgaaataagaattaaatgatatcactctcctgtttaagaaagtttattactgttctgtagctaaggttttttttttttttttttttgagacaatgtttcgctcttgttgcccaggctggagtgcagtggtgcaatgtcggctcactgcaacttccacctcctgtgttcaagtgattctctggcctcagcctctcaagtagctgggattacaggtgcctgccatgatgcccggctaattttgtacttttagtagagatgggatttctccatgttggccaggctggtctcgaactcccgaccacaggtgatccgcccgccttggcctcccaaagtgctgggattacaggcgtgagccactgtgcccggctgtagctaagatttctaatgcactttacctttttattatttcagtttcagtaacaaaatatgagatacgaaaattgccaaatgtgctacagctagagttaatataagaccagagcatcagattcagtttgacaaaggctatgacaattatcctggctaggagaagaccgctgatcttagaaacagatatcaggctttgtagtctgctgggttttgtttgtgtagtttggttttaccttgacagtagatttaccttattgcatgtgtgtattattgctgttggatatgtgagcattatgcatgcatttacatctgtgttctcactctctgtataccaattcctagagagcgaaccatgtgctggatttagccagtcctgcatttttctatacttcaaatcaaaacgggccatgcttcacatctacccatgatgaataggggtactttgattaagaataaatagagctgactgaattctgaacaagtgagtattttgtgagaatcattatttttcattttaaatataaatgtcggccgggtgcggtggctcatgcctgtttcccagcactttgggaggccgaggtgggcagatcacgaggtcaggagattgagaccatcctggctaacatggtgaaaccctgtctgtactaaaaatacaaaaaaaaattagccaggtgtggtggcgggtgcctgtagtcccagatactagggaggctgaggcagaagaatggcatgaacccatgaggtggaggttgcagtgagccgattttgcgccattgcactccagcctg

SEQ ID NO: 73459 - DNA, 1035 bp, Homo sapiens
gaagcagattagtagcagtgaagatgggaaggaccagctgaatggaggagaaaaattgcccaggtagaattaaggggatgtgacatcatgggataatggtagggtggtcagagagagcaaagatttcaactggctgcgttggagttggtatccttaatgttagcagaagaatgcagatccggggttgagaaagatttttacatatgttatagtttttagaaaacaaacaaaaaaaatctgtttatgtcaggggcattttaatatagaagtgtgaaaaatggaaagtcagtctgaaaggggacgtcttgaatgtcgttttgaaggtgttgcatttgaagtactgatgcgatgctgtcagtggaaacaaactcaggtgggaggttaggtttagaattttattatattagtgttatggagttatttatacatggttttcctataatgtagattgctttctgtggtatgatagcagtcttgaaagaaaacacggtagtaaagattatatgtgagattcattcccctgattaccacctttctgtaaaaatacctttagtattaactatttatttagagccggagtttcgctcttactgcccaggctgatcttgactcaccgcaacctctgcctcccatgttcaagagattctcctgcatcagcctcccaaatagatgggactacaggcatgcaccaccacacctggctaattttgtatttttagtggagatggggtttctccatgttggtcagactggtctcgaactcctgacctcaggtgatctgcccccctcagcctcccaaagtgctgggattacaggcgtaagccaccgtccccggccaactttatttattattattattattattattattattaattatttttgagacagagtcttgctctgtgtcccaggctggagtgcagtggcacgatctcggctcactgcaacctctgtctcctgggttcaagtggttcttgtccctcatcctcccgagtacagtagctatgttacctatgttacttaatccttacaatc

SEQ ID NO: 73460 - DNA, 1138 bp, Homo sapiens
gttttatgcagagtgtgttttggtggccagtgttggcaagatctgataggtcttggggttggatgggtactgatagacagaattattaaaataattcttttttttttttttgagacaatgtctcactctgctgccaaggctggagtacagtggtgtgatcgtggcttactgaagcctcgacttcccctggctcaggtgatcctcctacctcagtctcccgagtagctggtactacaggtgcatggcactatccctggctaatttttgcattttttgtagagatgggtttttgctatgttgcccaggctggtctcaaactcctgagctcaagtgatccacctgccttggcctcccagagtgctggtatttacaggagcgcaccaccatgactaccagaataattatttatagggaaattactcatttgttctgtctggcagtgattacgtatctgcttggatgagaaattcacatttatcaatcaataatggctgggagagttttgtgtgtattttgaagctccggtgttaggtacatcctcatttaggattaaggttccttgctgaattgacccttttatcactatataatgttgctctttatccctggtaatatccctggttctgcagtctattttgtttgatattaatgtagttactctagttttcttttgattagtgttcataaggcatatcttccgtttttttacttttaacatatatatgtctatacgtaaagtgggctttaaaaaaaatagttggattgtgcttttttatctaatctgacaatctatgtcttttaacttagtgtttagattatttagttttatcattatatggttggatttattttgctggatttatatttgttacatccattctgttttttcatctttttttctgccttattttagattaattgaatattttaatggtttactttaactacactattggtttattatttataccttaaaaatgtatttagtgggctgggcgccatggctcacacctgtaatcccagcattttgggaggccgaggagggcagatcacttgagatcaggagttcaagaccagtctgaccaacatggtgaaaccccgtctctactaaaaattcaaaaaacttagctgggcatcg

SEQ ID NO: 73461 - DNA, 1048 bp, Homo sapiens
acatatttggttatatttaatattaatacatagtttgctagactctagtatgaaagaactgtcttaaatgcccagtatcttattctatagttgaatagtctatataaaaataagtgccttttccagccgggtgcggtggcttacgcctgtaatcccagcactttgggaggctgagatgggcagatcacgaggtcaggagatcgagatcctgcctaacacaatgaaaccccgtttctactaaaaataccaaaaattagctgggcatggtggtgggcgcctgtagtcccagctactcgggaggctgaggcaggagaatggcgtgaacccgggaagcggagcttgcagtgagccgagatctcgccactgtactccagcctaggcgacagagtgagactccatctctaaataaataaataaaataaaataagtgcttcttccaacaaataactgaaccacaggccagcaaggtcttccctgccctcttaggtagactgggaagattgctgtgtgaaccaccgatctcgtgatgcataccagcagcaacaagtattgcaggactgatgaagatgattgttatttgtctgttttctccttaggctgccctaaacaagggaagtcagggccacatggagttcatatttaattgtagtattctggggtatcttttttttaaaaaagctttgatcacttggatgtagctcctaggaattgataaatgaagcaatcctggtaacacaccaattgtgcaaggaaatgttagcccatttgtggacgccaggcagggagcatttgggtatacacagcacaatgctaaattaaagtttagcagaaatttagtaaattgatcagtgtgaaatgccaagcagataaataatgtgaaaatgtatccaaattggctattaactttgataaaattaagcaaataacaataaactctccacgtcaggatgtgctgtaaagagaagagactttggtgttgtgcaaagataattttagtgggtgttgggcatacctgcatattcttgacctgtgagttataatggaatga

SEQ ID NO: 73462 - DNA, 1073 bp, Homo sapiens
gagcttgatcttgatatttgagcctctactatgtctcttctgggtacttcaacttttgtaggattaagcattagttaaaatttagttatagtgtgaatgttctttggattttagtaggacattcagtaaattatttcttgcatatactggtatacattctgcctaccattagaacccagagtgtgtttaaattagtgtcctaaattaattacattttttttctgctgtgtgtttctattaggtttcagaaaagggatccctaacatcagaagagtttgctaagcttgtgggaatgtctgtcctcctagccaaagaaaggtaagtaaggttcttacctttcattacaatgtatgtttgtgtgtctgcatgaacagataattgtgtgggggtttttttgttgtttttttttaggttgctgcttgcagagaagatgggccatctttgccgtgatgactcagtggaaggcctgcgtttttacccaaatttatttatgacacagagctaagggttttgtatttaaaatcctttttgtccatatgcttgcgtcatgtagaggttgtatgacattgagctaagagataaaccccgatcaattgagaatttattggaacttcacagtgcaatgtaaatctcttttaatttctcactaaatatggtccaggaaatttatttagtatacgcataggaaaattcagaaaagtgaatgccaatatgaatttaaaatcatgctatagtgcagaaccctcagagtttaacttggaatatagtggattttaacttgatcctcaaatctaatcattttataaagaagggaatttagttttgcagagaataaaaagagaagttgcatgttcagacaggttagattattattttggtgtaactgaaattcactgattgcacatgacaatgttgggacaaaatatactgcagcatgctatatgaggctcctccccagggcttttagaagcagtcatagacatgtcttcaacataccaaataaaatacctttaaaaatgaaataattttatttgacacatatatttatatatattctatctagtttctctttg

SEQ ID NO: 73463 - DNA, 1027 bp, Homo sapiens
aataaggtagatttattatttatataaatagttattaacaaattgatatttgcaagaaaatttaaattttttttttttttttgagacagaatcttgctttgtcgcccaggctggagcgcagtggcgcgatctcggctcaccgcaagctccgcctcctgggttaacgccattctcctgcctcagcctcctgagtagctgggactacaggcgcccgccaccacgcccggctaattttttttgtatttttagtagagacggggtttcaccgtgttagccaggatggtctcgatctcctgacctcgtgatctgcctgcctcggcctcccagagtgctgggattataggcgtgagccactgcgcccggctgaaaatttcaaatttttatggggaaaaaatagagggtgcttcatttttttaagtcattttaattctttagatggatttcaaccaaaattcatttctcatttcaggcctttgaagacctcagcaaactaatgatcaaggtatatgtcatttatgcctattaaattcataccaattatgatacagtttttgaaatatattttgttagcagacattttggggacaatagtgcttttcagtctttactttttatttgacaggctaaggaaatggtggaattatcaaaatcaattgctaataaaattaaagacaaacaaggtgacatcacagaagatgaggtaaataagttgctttttttaaggcatttgaaactagataacacaatgcagtaaggtttttgtggtttacattggctttctgaatgtactgttttatttattatttatgttttatttattgtttatttatttatgagacggagtgtcgctccgtcgcccaggctggagtgcagtggcacgatctcggctcactgcaacatccgcctcccgggttcaagcgattctcctgcctcagcgtcccgagtagctgggactacaggcacgtgccaccacgcccggctaattttttgtatttttagtagagaccgggtttcaccgtgttagtca

SEQ ID NO: 73464 - DNA, 1012 bp, Homo sapiens
aagtcagcttaagggggtactcctggttttaaaacaggtgctgtttttctcaaaattggagtggaaatttgactataggtgtggtagagggatacaaggttccataaactggcagatgcaattatagaatggatatgtgcatctcttttgctttaatttttattgtaggtagtttctttactcattttttgatagttgactaattccaaattttataataattataaaaataaaagtgaggaagcttttctctgtgttttataatcacttaaaatatttatagacatttcttctaaggcacaaaaatatttactttttttattgcctatgtataagtttacaggacttatttacatattctttgtggactctcagcttattttttctacagcaacataatataataaatacagtgatttaccatatacaatttaaaagtgttatctttaccagttttctttacacagataaaaaaatctattaatatcttatatattaaaagtaaaaacctaagtgtgcaaaatgtgtgttttatttttgaaaactaggttggtgtgtgatttgccctctatttaaatgttagaattgacttagtttcagagctggcgcccagagtttctcacaaagggtttcctgcatctgctggctctagctgataagaatccagtgtttaagccttttgtttatctaaggaaattcctgttaggtgtgtgcacattcccctttgttttcagttattaaccttagtgagttggccataagaatacgcaacacactattcttttagcaaaatccttttgcagatgggggatgctttcctgcagatgggcataagctgatcagagccactattatatgtttcagaccaccatatggactgatatttcagttaatgacaagctgcttaactggttttaaaaaataacatctgtatgcatcaattagataagattctgcactgggagtatattttcagtaacttgaaataatttattataaatatatttaaatt

SEQ ID NO: 73465 - DNA, 1080 bp, Homo sapiens
cttcataatcagtgtgacatttgagagaatagacagtacagctgggtaatgttttccaggcctgtctaaattaatcaccaacactagacaggtactcaaatgtatgaaagtagcttgaataataacttaattaagaaccaaaatttaaactgtgattttttttgtacatttgagaccctattaagtatctgatacgtaatagcttgccaaagaaggaaaatgataggaaatttaacttatctctaaaatgcagagtaaaatatgccatttattgtatatttggtttttcctgaatgattttaagatcattatgtacagcaagaaacaaacacatgttttgaagggaagctaaatgtccgtgtatgctgtttttctttggttctttgtaggtcctttcccgccattgaaaacacaatgtggttggttacaaaagattttgtttccttcctattttgtatgttttattttctacctcttttttttttcagccaggaagaataagggctgtaggaattgtaggtattgaaaggaaactggaagaaaaaagaaaagaaactgacaaaaacatttctgaggtaactgttaaattctggctctccatctattccagccatttgtgtctattcttttagatacagctgtgcctaattcccttctgtaatttagaatatatttcatttgcctgaagctacatagtctcctattctctttaacaggtctacctcgggctggcaaaatctaaccaaaacctttttctaaaaggaataaaaaagaaatgcaaatttgtttgctgttagaaaacatcataaaatgttgtgtgtagattttacagtctagatgaaattgattggcggatactcctaatgagttcagggttctctgtataattattttggaagttgaagtaacttagttgagagaaaaatgctattctgtggccagtctgtggccagataccacaccattttatgttgatgaccacccagggatcagaccagacatcagtaagaacggctcaaagcagcccatcacttctactgggggacaaccctgagcatgtacattccagtgtttctgagg

SEQ ID NO: 73466 - DNA, 1903 bp, Homo sapiens
tggaattttaataaaatatcagctggccatttttacagataagttttcacattttgttttcaaatgaataagggtgtatgctttggcagaaattataggcccccttataacctctggggacgtttgtagttggaaaaccataatcataaactcaaaattttgcaaatttattttgaccttattttctaaagtcacactctaatctacagagctagtaacttgaagctttttggttcatagctttggttcaagttttaagtagagagatttttgaaagcttcattaatattgaattaatacacactttaaaaggatgctttttgggatgtttgtttctacatgaattttaaaagtgatttgaaatacataaaaagttataaaagtagaattagttatatttttttgaaagacaattcaatatattacatttgttctttcttcagtgccaaaatagtggttcatcttcacccagctcctcctaacaaagaacctggcccattccagagtagtaagaactcctacatcaaactctccttcaaagaacatggccagattgaggtaagtttctacatgaataaaatcgtactagaaaggtgtgtgtgtgtgtgtgtgtgtgtgtgtgtgtgtgttgtggcttgttaatatgatggaaggtagtattatacaacataccagatttcaccatatttttacaataaaatttttattatatcttaagccttagcagtgagtggagaatatgaagtttaggtttcagtgggaatgggaagcagaggttgtgttcccaaggaaggaacagaggctggaaaatacactaagtcatgccattcgcctgctagcagagttttcagtggtatagtttagttaaaggaacagagtgtaaatgcagtggtatgttgaactatctcagtatctgaaggttccccagctttaaatcaggctgtctgtcttgattaactccagttaatcttaatcacttaagtacttattctgcagtataatagtttgtatgttctgaataagttgctgtacaagaattcttaagataattagaagtgcgtatttattctccccatcaatatcataaattattattaatttttttctatatcacctcacccagtgctcctgacaagtgatcactaagcagatataagtgattgactaaagtttttctcattgaagttgaaaaatatatttgattatttgtgagcataggtatgttttggtcctactttttggttttatattttaactagacaaatgattctctgcttccttcatggagaatggttgtatatttttcctggcactgtgtttgtttcattatagatcgaaaacaatccacatacacaggattgtttaaagtaagtctattgatttcattgtcactcatctctttgttgagaatagcccactttatatagaaggtcagttccttctctttttttttttcccttgtgctttctgaagctgatccaagaaaagaacttcctttgattttctttgatgtctctgagaattctgggcttgctgcaaatgactgaacagacttttatactgaagaaatgttaagtggccgggcgcggtggctcacacctataatcccagcactttgggaggctgaggcgggcagatcacctgaggtcgagagttcaagaccagcctgaccaatatggagaaaccccatctctactaaaaatacaaaattagctgggtgtggtggcacatgcctgtaatcccagctacttgggaggctgaggcaggagaatcacttgaatcggggaggcggaagttgtggtgagcctagatcacgccattgcactccagcctgggcaacaagaacaaaactccacctcaaaaaaaaaaaaaaaaagaaaaaaagaaagaaatgttaagtaat

SEQ ID NO: 73467 - DNA, 1024 bp, Homo sapiens
taacatggtgaaaccccgtctctactaaaaatacaaaaaaattagccggacgtggtggcgggcacctgtagtcccagctactcgggaggctgaagcaggagaatggtgttaacccaggaggcagagcttgcagtgatccgagatcacgccactgcactccagcctgggtgacagagtgagactccgcctcaaaaaaaaataaattaaaaaataataataataaagaaaatacacccattgtaaaaacaaaagctagttacagcttcttttaaacttcttatgttcttccatgcagccaaatgccaccacattactgttttcatttaatttttccttaagttcatttaaggagtaaaatcattattgtttttcattatttttattattaaggcatatggcactgtaatgctataaaacaaggatttctgacaagtgttatggatgttgtttagagtctttcatttaagctattgatttcctcctaggagtgttgcatggccattctcctttcccaaattgtgttcattgaagaacaggcggctggaattgggaagaggtaagtctgtgtatagcacagtctttattcacagaaaacatttcctgttatgctattggccaagaggtcctatcttagacttgatgtacgaatccattcttaaagcatgaataaagctaaggtttgctgtaatatccttgtttattatacatgggtcataataaagaaatgtggcccagttatcattgtctttccgtagacactttgctttcacatccctgtgtacctgtcatttcatacttaaaatcggaaataacctatttgagaaaaataactgactttgctcctgtttctagcctgatcattaagtttgtttctcaagtttgacttgttcaggtagcagaattaaacagcatataataatagttattgtacaaagcaggacatttatcagaataatagggggtacaatgaacaattagaccagggtaacagggatacaatgggactatcccaggcacaccagga

SEQ ID NO: 73468 - DNA, 1034 bp, Homo sapiens
tgctaaccattacaatatctgacttttttgtacctgggaactaatttttgtctcctaggtctgatattgcccctgttgataatgcatgccttagagcaggggtccccaaccccccaacccccagtactggtctgtggcctgttaggaactgggtcacatagcagggataagtgacaggtaagcaagcattaccaccggagctccacctcccatcagatcagcagacgcattagattctcataggagcaggaaccctattgtgaactgtgcatgcaagggatctaggtcatgccctccctttgagagtctaatgcctgatggtctgaagtggaacagtttcatcctgaaaccacaacccctgctccccaggaaatactgtcttccatgaaactggtccctgatacacaaaaggttggggactgctgccttagactgttaatattgtctaatccttttaaaagtaatatatattcagaaaataaatctttttggggaggatagagtggatgtccttaaaccatatgttgataagttaatcttagtataattttttgattatcatataaagaggtcaatttggacaaattttagacttactacattgctagtcacatataaaaattaaacataactgtttatatatgttaaaaattgggctaggcgcagtggctcatgcctgtaatcccagcacgttgggaggctgaggcgggcggatcacctgatgttgggagtttgagaccagcctgaccaacgtggagaaaccctgtctctactaaaaatacaaaattagctaggcatggtggcacatgcctgtaatcccagctactcaggaggctgaggcaggaaaattgcttgaacctgggaggcagaggttgtgatgagccaagattgcgccattgcactccagcctgggcaaaaagagtgaaactcagtctcaaaaaaataaaaattaaaaattaaacatactggctagacacagtggctcatgcctgtaaatcccagtactttgggaggccgaggcaggggggtcactt

SEQ ID NO: 73469 - DNA, 1050 bp, Homo sapiens
ctctttgcttcccttctacccctttcctcacactttttctgagataatgattgttaacagataattgtgttccttttagacccctttcactacttgtgtgtctgcagacacacacatatactgcatatgtaatattataaattgctgtaaatcactttctttcccactcatccaatgtcttagagttctatggtaatccatgcagttctacctcgtcatttctttttaacctttgcatgcattgcagagtatgaatgtgtatcatacctggttgttgtttgcatttttttctaattctgtcaagactatacaaatagcttatgaagtatgtagcattggttctctttaatttgtgataagcctattctaaaagtaaaatgtttgtttatatgattaatttagtgtggtataattcatgaagaagaaaatcggaaccacaatgagtgatatgttattaatattttgtgatgctctttctttctagataaaatttgatgctgggactctccttcttagtacacaccgactgatttggagagatcagaaaaatcatgtaagatacagttttttgcatctgttgtaggttttattttgtttatttattttttagagacagggtctcgctgtattgcctaggctgatctgtaacctctgggctcaagtgattctcctggcctcaacctcccgagtagccggggctacaggagtgagccaccattgtaggttttaaatcaactggagctttttcttcttttttcatttctaataaaacttatataatgaatgcaataataaattttacttttctgaatgacaaaagagtgtgtcccatgtaatttctctgaatggagtgcaaaaacaggagttagcgtgtcgtcccttattcagctccagaaaaatccatgtagttactggatggagaatcatgttttttaaatactagtcaaattctactctatatctaaatgttccatgtgtaacagtggaataattcccccatcagttgtgagggagtctttacaaagagctggtatgtccttaaaaccactg

SEQ ID NO: 73470 - DNA, 2606 bp, Homo sapiens
gtgttaggacttttagaaaatatctttaaattcctcagccatttgtttacactatttttttttgagacagagtctctctctgtcacccaggctggagtgcagtggctcgatcttggctcactgcgaactccgcctcccgggttcatgccattctccttcctcagcctccctagtagctgggactacaggactacaagcgcccgccaccatgcccggctaattttttgtatttttagtagagacggggtttcactgtgttagtcaggatggtctcgatctcctgacctcgtgatctgcccacctcggcctcccaaagtgctgggattacaggcatgagccaccgcgcctggccgcttaggacaaatttcaactcaggtcttttttaaatttaaaattagtaagtcagttaattgttaacattgccctcttcttcctccccaaaaggaagcctccttggtacaggattgattgatcattttgtttgtttgtttttaagtagtagagatcagagagttgtgacatctgaggaccaagttcaagaagggactaaagtgctgaaacttaaaacaaaaatggtaagatgtggacatagcactcttaaactgtccccttttccattttgcctttcctaaacacttttcttaaataattctttcaggctgataaagaaaacatgaagagacctgcagagagcaaaaataatacagtggtggggaaacattgtattcctttaaaaccttcaaatgaactaaccaattcaactgtagtaattgacacacataaacctaaggatagtaatcaaactccgcatttgttactaactgaagatgatccccaaagtcaacatatgacattaagccaggcatttcaccttaaaaacaatagtaaaaagaaacaaatgactacagaaaaacaaaagcaagatgctaacatgcccaagaaacctgtgcttggatcttatcgtggccagattgttcagtctaagattaattcatttagaaaacctctacaagtcaaagatgagagttctgcagcaacaaagaaactttcagccactatacctaaagccacaaaacctcagcctgtaaacaccagcagtgtaacagtgaaaagtaatagatcctccaatatgactgccactactaaatttgtgagcactacatctcagaacacacaacttgtgcgacctcctattagaagtcatcacagtaatacccgggacactgtgaaacaaggcatcagtagaacttctgccaatgttacaatccggaaagggcctcatgaaaaagaactattacaatcaaaaacagctttatctagtgtcaaaaccagttcttctcaaggtataataagaaataagactctatcaagatccatagcatctgaagttatagccaggcctgcttcattgtctaatgataaactgatggaaaagtcagagcccgttgaccagcgaagacatactgcaggaaaagcaattgttgatagtagatcagctcagcccaaagaaacctcggaagagagaaagtaagtagatataattttctttattacattagttttcaataaagtactgtttgtagatttggattataatttccttgactgcattagaattttctttcatggtttctcttctgtcatatgcaggcaaatttatattgtggaacaatatgacctaaaagtttttgtgtttgagtatgttttataaggttgctttttaaaatctaaggtaaatgcttaataataattgggaaatactttataatctcaaatcaaaaaatgcattcatggaatcattgagcataattgacgttgatatgtttaatatttcttcaagcttgtgaactatatatgccattaaagtaagattacttaaaaatatgattttttcttttaactttatttgacagagttctgtcagcaatttcaaagtaacgtttatatctgcttctaactatagagctcgtctgagtgagtggaaagctggcaaaggaagagtgctaaaaaggccccctaattcagtagttactcagcatgagcctgcaggacaaaatgaaaaaccagttgggtctttttggactaccatggcagaagaagatgaacaaagattatttactgaaaaagtaaacaacacattttctgaatgcctgaacttgattaatgaggtagagtctttatatttgcttagcattttatagtttgcaaattaccttcataagcattatttcattaaattatattgtcagtctttttgaccaggtgatgttggtgatactatgttgacttaacattaactgtgaggttattttaacaattatttaattgcgagatacactgcttcattcattaattgtgagcttattagcctttaactgactacattttgcattgagttcatataaatatacaggttgagtatcccttatccaaaatgcttgggaccagaagtaattgaagatgttttttgttggattttggaatatttgcatatacataatgagttatcttggggatgagatccacaaagttcatttacgttttgtttgtttgtttgcttttgagacagtcactctcacccaagctggagtgcagtggtgtgatct

SEQ ID NO: 73471 - DNA, 1010 bp, Homo sapiens
atattctaaacacactggctctttaatgttatgttaatttaatagatcattttcttttatgtgccatatgaaggttgtcttccttggtcttgatcaagtactcatttttaagacccagcctaaatctcgcttgtgaagcattccctaaccatctccctataccacaggcaaagttagttgtttctttttgtgggttttaataatcctttgttcttatttcatatatagcatttatttcattttataatagtatttgttatatagttggcagcagtatttgctgaggaaaaggaatggttcagagatggcaatcgtgttcttttattttgaaaatgtggccaactaggaacaactttaatgtcttctgattttgttcttaaaattcagccaaaagcttaatctataaatgtattttctataggagaaaatatggagaagtcttgtgcaagcaaggaagaagtcaaagaagtcagtattgaagatacaggtgttgatgtagatccagaaaaactggaaatggagagtaaacttcatagaaatttgctatttcaagattgtgaaaaagagcaagacaacaaaacaaaagatccaacccatgatgttaaaacccccaatacagaaacgaggacaagttgcttaattaaatataatgtgtctactacgccatacttgcaaaggtaaacttttaaaatgtaccatgatttgttttcatgcttggagataataaataacggcatttaaaaatctttgagatagcttcagattacagctaccatttattaatatagaaatttcagtacgggcatggtggctcacgcctgtaatttcagcactttgggaggccgaagcagacagatcacttgagcccaggagttcaagactatcctgggcaacatggcaaaaccccatctctacaaaaaataaaaaaaattttggctgggcaaggtgctgtgtgcctgtagtcccagctacctgggaggctgaggtgagaggatcacttgagcccagga

SEQ ID NO: 73472 - DNA, 1016 bp, Homo sapiens
tgaaaaagaaaacttttatttgaatttactttaatctgtgtgttattaataacagtaggttttggctttcaggaattagccagttctacagatactcaggtatctactgtatacaagttgtaatgacaaattgagaaaaggataagtttctcacttcggtgagcttatagtacctctctaaaagacaattaaatgcttttacctgcttataacatacaagctatatagtatggtacatatcatgaaagtacagagtaaaaatgttaacatgtttttgaactctggaatattgttttaattttcagtgtgaaaaaaaaggtgcagtttgatggaacaaattccgcatttaaagagctgaagtttttaacaccagtgagacgttctcgacgtcttcaagagaaaacttctaaattgccagatatgttaaaagatcattatccttgtgtgtcttcattggaacagctaacggagttgggaagagaaactgatgcttttgtatgccgccctaatgcagcactgtgccgggtgtactatgaggctgatacaacataagagaaataaagctctgttagggaatggggtttttattatttgtggggtgttttgttttgagtagctttatattgctcttaggtctggagttggccatgtacctatgtatcctaagcattcacggcagtgagctcctttactaacattcatgttatggcaagagttgtcctctacattggaaagctaatcctaccttgtcagtttcaaccaactgagttttttctttaagaaaggtaaattttgtcagctagtttactatgttccttgaatataaacaggttataatactaccctgttcactttactaaatataagtacagtaatgatgcataattagaaaatgaggtattctaggtaaaatgtatgtttgccttgacatgtttttaaaagttatgatgtacctccctgcctttaaacagaatacttttttcttttttttggcctttctcagattagtcaaaaat

SEQ ID NO: 73473 - DNA, 1045 bp, Homo sapiens
gcccaagggggaaacttctggagaaacaccaaccgagcttccgtcctaaatagccagcgagcagccacgcagcgtgctgctagggggacgggaggcgacacgccggcgcggggccggctgggacagtggaggaccgattcctcccagccgcaccccggcccaggacccgcgctcccagtccccgcccctcgcagccatggttacggaggcctggggcgtacacgttcttcctcccttccaccgcgcccacgccagcgggcactcccacggagctttcagtagtactttagaagcacttttgtaacgtactgtcatccctaaggaacgtgtggcggttaggggcgtttgtatgtctgttaataacggaagctacttcgagctcccattttccctagtttttatcatggctgccacagctagccaagccctttcgcctccattacgtctttagcggctgcgtggtctcttccgggagcagaggcccggatgacgcgtggatccccgcgatctttgggctggggattctaaacgactgggacttgccggaagtcattctgcactaatagcggcaaaaagccttctggttcctggggcgacgcgcccggcggccgtactattcacttccccagaacgccacagcccaggctttcttcttagtgggcttcccagaccaagaagggaaacctttcatccgaaggtactgaggggaggaaggtggcctgaagttatctcagtgccgctttgtttcccaccccagtcggtcagcccttcctcagcgccctttaacccttgcagatcggatggagaaagctgccagcacgttctagggatgggggcagattgaggagcgggagggagtagtctttgtctaactttataccagtaccaaactatgttaatttaatgtagttttataataaatctttaagtcctgtaacttattctcccaagattgttttggcttattctacggcctttgtatttctaggtgaattttggaattagcttgttaaaaaggggggggattttttattgggctcgcatt

SEQ ID NO: 73474 - DNA, 2607 bp, Homo sapiens
ctggtctttttttattgcacagcttaacattttctaggaatctcaaattctatatggtgtttgaatcttcttcaaattagtaggaggaaatctgtaatggtcaatgtgtaacaattaaactcttcagaatatatgagctgataataatgatcatttattaagttctatagaccaggaactaaaagctttacggtacagagatgctacattagattgcctacttttgggaggaggggcaagagaagtgggggagatattgatccttttataaggaaaaactccaatattatatccgtgttatctttcctccaaatagcttctgacaataagttacttgattaaaaattatgttttaattagaatttgatggcttcttacaaacttttactgacgctccacatgtttgtttttgtaggagctgactaaggctttggaacagaaaccagatgatgcacagtattattgtcaaagagcttattgtcacattcttcttgggaattactgtggtaacgtttcttataaagtatattgcccccttttaataagttacttatacattttacccatgacaaattaaaagttgtctttgagaatttttaaattggtcttttatacaaggtaaagtagctcaaatgtgacagacatgttgagcaacacccatttaaattttatggatgtcgctttttccttcattgggtggagaatgtatacagatttcattcatagttattgggtatgctgataaaaaatagcatcacatttactatttgacagactattaaaatgaaatgctcgtttaaattttttttataaaaaagaatgtggccaggcatggtggctcacgcctgtaatcccaacactttgggagaccaaagcaggaggatcatttgagcccaggagttcaagaccagcctgggcaacataacaagaccacctgtatttaaaaagtaatgtatttctgtattttgtaccttctgaatagggaaaaactgaataccttgagtaaaattacatagaaaatgttaatgagacaaggaggtgaattttgtgacacagctgtattcattgaagagctttaagaaggaagctaaatgttaagccaaaaggaaggtacaagagtaatatttatttgaattctatcttgtattagcttttcctaatttaaaaccatttggcatttctaccaacttgaaaacttagaaatctaaaactgattcatatgttgtgtgtatttgctaggatctataaataactgactaaaaacccgtctttttctacacagttgctgttgctgatgcaaagaagtctctagaactcaatccaaataattccactgctatgctgagaaaagggtatgcagtagctactcttcttgttgagcttggtatagatagtaggtatttaatttgttgaatgagttcattgcaagctttatataagttgtaaaattctgtatttatacattatatagcagagatatgattcaattttaaatacaacttatagttctattattttgttaaccaaagtatgtgataggagatctgtacttagtaaattttaaaatagtgatgattgaagtatttgcaaggtatagatgaaactgatagatttcacattgcttttttttttttttttttcaatcttttggaatttactatatttaattgactggacaacatcctattcagcaaagctgaataggctacatttaatgctatgaaagcgctatatctgtatactttatatcccatcttgtttctgttgataagtataactattctttaagaaacttctttaattcctttgtataattatatttttgagtaagcaagtctgtacaattaaagtcagattccttctgaagtgagttctaaaattgaattttagtaggaattgtactagatcttaacagtatattagaaagtctctaggtttattaacatacacttaaaataaattttttctttcaacagtagaaaatactaagttttttatttagaaagaaggtattttccagattttttgtgtgtcttaatttgttttaaatatattcatgcagaatatgtgaataccatgaaaaaaactatgctgctgccctagaaacttttacagaaggacaaaaattagatagtaagtattaaaaattatactttaataaacttatctatttctgtcttaaataccaaagctgaattttggtaatgttaatttcaagttaattgtagaaacccaatacctgtttttctcatctaaattatatttcatattgattgcagatatgagatcacttaaaatcgattaaattagccttttggcatttaaatcatagatgaacttcaccattagaagtaaaaaaaactatggaaacacctaacatgctctctctgtttagtctggctttgtttttttctaatggagaagtgaaagtttaatttgccttggtcagaagtctgttcattttaaattattcagattgctgagatgtgaaatcttaacattaaaggtttttatggagaagtgaagtgtacgtttgggtaaattatgagagggtacagaagaaacacagttttgagagtattgtgacttttaatgttatattcttga

SEQ ID NO: 73475 - DNA, 1057 bp, Homo sapiens
taagaacttgtattactgagccacctcctatagtggaagaatatcatgtgtggtaaatacatagatgtgtggctagagttgaggatgtaattaagcactcttatctcaattcttttttctcttttgagtcttggatttgttaattttaaccattcttcaaccatactactatgttctcagtttgccttttctgccccttcctctttaaatgctaagtgacgacttttcttccttatatagtagtttatgtatacatttcatgtccctcgtttctgtgtaagtctttgaggataagaagcatgttttatttgtatctttgtatgtgccccagttagggtccccagataaagttacaagatgttcatttaagtttctatttaagataaacaatgaataatttttattatgtaaatatgtttcatgctataattttatttgctaaacttggcagccctcaccacatacattgcacagtgggtgcttagttcagtgaatgaattaaaattggattttggttttagtcccatgacattggcagagaatgtttattcttagttttgcaggtggaaaaacaatcatgttaatggagtttaaatactttccccaagtttacctagttaactaaattcttcagcctggcctaggagacgtagatacacttctgattgccaaccaaactagtgcatctttgcttaggtttttctaagttttgaattggagaacttagattctaaggatgtgtcctaaagaattattatttttcttgtcctgaccctggaatctctgtattttatataccatatatatatatatgtgcacacacaaaatcttgttagattactaactcttaaactatttggggggaagcaaattgaaagaagttttcttaattatgtcttaagggaaataaatgataaaatctttgaatttcctttttcatacagtagagggagacaatattaaaatactgaaaataaaatatctgggttactgaggcttacttcgtggacacttaagagacaacagtactaaaataatttgcttttcatgtattcag

SEQ ID NO: 73476 - DNA, 1064 bp, Homo sapiens
ttaaaagtttgccaataaattgccccagctctttagtctctgggaaagatcccttcatgtcagtctgtaatagtaggtgggatcttacttaccacttaagatggtggtgtctggatatcatgattgcttaagcgtaatgccatctctttaaatctgaaatttctttcattggaaagaattaaactctctgctatgcagaggagacttcagaagtggatggtagtacctatgctgttgagagctaatgatccagcacattagggattcttagtgtaatctgtgaatactcttttgggatattagcaacttgagagccttccctgtacatatgagagcaacattcaagcaaactaccaaagttttaagttacttttaaagtttttttgacttaaatgaaaatagaatggtatgttaatggttgcagtaaaaacctctgaaattggactggtgctaattctagaactatctgcccgaatcatgaagacttaaaacttcatttttaaaagcatgtacaaacattgaaagtgaattaaatgtaaaaaggatttcataggacattagtccctcccttcttttactttttttttttttgtgtgggggtagatagggtctcactctgttgcccatgctggagtgcagtggagtgatcatggcccactgtggcctcaacctcttgggctcatgtgatcctcccacttcagcctcccagagtgccaggattacacgtgtgagccaacacacctggccccttttacctttttaaaaaagctactttaagtggtttattacatgcagctattttaatgaatggattaagtataatttcaagttgaggtcagcttgtctcagctgaagcaggttgttactaagagctttgccttttgctttataaagtcctctttgttcatactgcacagttactcaggttatagtggctttcagtagatgcgaatgctactctgtgctgctcttcaggtgaaacaaggaactttttatagacagtatgttcatagttacaggaacatgaagtgtgaatatagggtggcctgtggccaagtttaatg

SEQ ID NO: 73477 - DNA, 1030 bp, Homo sapiens
ttattaaaatcttagttacaaaagatttcttaggcatcctttaaaaaatttcatttttagaattgttcgtactgtctctgcaacttttctgaaaacataaaagttctgtatacttttcatctagtttctgttatcaacatgaagaatctgcttttaatctaattttgtatagcatatcaaaagtttacactttattgagttattttgctcaaaagaaatccccagattttacattatggtaactgactcagtttttagaaatgtgaattttgttattgacctatataccagaaagacacttattgcatacctgaaattcagtaacctaaactgtttgctaagatgttccatatacatggtcacaaagtttacatattctcgacataattgaaacatgttgattaattacttctgcctttttttacttcatagatgtaaagaacctatatccatcatcatctccttatacaagaaattgggataaattggttggtgagatcaaagaagaagaaaagaatgaaaagttggagggagatgcagctttaaacagattatttcagcagatctattcagatggttctgatgaagtgaaacgtgccatgaacaaatcctttgtaagaatataaacttaaagaaatatatatgggagcaaattttacatattttaaacgagaaaattggtaatgtgagaccaaattgcgtgtactatagctgggagaactttttgaataaggtctgtctgaacgtttctttttgctctaagagtaatttttgaggaagttgaaaacttatggaagagatgagaaacaagtggtttatcttaaataggtattttttatcagtgagttagattgatatggagtcatctcacttggatttatcccagtagctgagtgaacttctgttgtttcccttctagactcatatgtagcctcagtgttagagatgaagaatatagatacgaaacttttcagaatagtgtttgcaagtagaaggtgcacgttattcattggtttaacaactctcttga

SEQ ID NO: 73478 - DNA, 1049 bp, Homo sapiens
agcacaaagtagaggcccttcaagttctcttcagctggtacaagaagagattattttgactggtctttacggtcttcagcaaaagagattataataatcattttttttgggagctaataatattttcaattgaaggtagtttttccacatgcacatctatgctcattagcaaaggatgtagtgcacctccctgactactttaggatttccttttcagattttatggaacttgttaacctctggaatgcctaagtttaaataaaaatattgttttgagtttatattgagctatatattttatctgtataatctattatatatgtattgcatagagtttatattgagctgtatataatagccaatatttggggctctatgcttggaacattttaagaaaaatattctattttgattatatggtccaggaattaatctatttttatttttcattgcagatggagtcgggtggtacagttttgagtaccaactggtctgatgtaggtaaaaggaaagttgaaatcaatcctcctgatgatatggaatggaaaaagtactaaataaattaatttgctctcatcgtattgtgtatattcacctaatgcccattgtgtattgatattgcattcttgaattttgaacactgaatatctttttgaaagattatacttctttacctctttgtgctttagaaattattttccttcaagtgttcaagtctaatgaagaatgaagataacattttatcacttctgtccttaaaggtttcagacatggtgaaactgaataaagcatgtcatttgctcctagatagattcattctatctagttgtggggatggagaaatctttaatggtatattttcggttattgccttatttttgatacagtattctgtcagtaatttattagacctggcagctttgggtgagcttagatttttcaccttcagtgttacattgtgtttgcttttaaaaactgcttttgaatggagttgtaaatacaatttttctatgaagatgtttggtttatttacctttttcttaagtttt

SEQ ID NO: 73479 - DNA, 1143 bp, Homo sapiens
gaatttgtaaatttaattgcactgagatattttggtcgttaccttgcaagtttctgtataaaacatagatacctgagttttaacacactgcaagtttatactaaggataatctgtgaaggtagggcaaagaaggttctaggaaagcccaactccacttgcttcttttatcacgacaggattcttgaaattacagcattggtgggttttttggtattttttttctttattagaaaatctctgttgtcacgtccccatgattactttggtttcattggtttatggtaactgctgtgagagtaaattaatgtgtatatgtttagtatttactctgtgcctagaatatatagatatcatgagaatacaaaaaattaaagacatgattattaacttcaaagagcttataaatgtagcagggaaaaaaaataacattcatgaaggaactgtggaaagattgaatgctgaactcggtataaatacactttagagacaggaaaatgttctgtgattaaaattgtttacagtctaggctgttataaagtatagactatggatgacctgtagatctgactttgttttctcaccatgattttctcaactgtaataccccagatgttggtctcagctctgttaggtgtcactaacatttttatggcaaagcactactctataccctcagagcagggggagtgggaggcaaacgggtcatcatttcagcctccaaaacagtaggaattcagctccttccttctcgtcctttgttgtggggtgtaggggagttactaaggaaagtttcagtaaggtgataccagatggtgcccaaacctgttgttatagcttgtttaagcattctagagttttcacttgtccttctgtccacttagagctactagatacatttttttcttcttgaacactgaaggaaaaggcaaaattaagttttggttggatggatttctaaagttttcttcttaggaaaataggatagtgacttttgtattctgtatgttaaattttctcagtaccattaatcctaagatgaagaggaaggctattgctgcagaggcatagttgaggacgtatagcactataccagagacaagaatgcttagctctagcaagtcttctgtcattgactaccttca

SEQ ID NO: 73480 - DNA, 1012 bp, Homo sapiens
cttaaagatgacactattaaaatagctgtttctgaccaggtgcagtagctcatgcttgtaatcccagcattttgggaggcggaggtgggcagatcacctgaggtcaggagttcaagaccagcctggccaacatggtgaaaccctgtgtctactaaaaatgcaaaaattagctgggtgtagtggcatgcacctgtagtcccagctacttgggaggctcaggcagggagaattgcttgaaccgggaggcagggggtgcagtgagccaagatcatgccactgcactccagcctgggcgactccatctcaaaaaaaataaatagctgtttaaaaaaaaaaaatctggtactatctttagttggttttaaaggatatattatctagaatatgcttacccattggctagatttgctaagtgttgtgggatttgggattttgctggtctgaagggagtttgtaaaacacatgactgaaagcattataaaacataccttgtcaaatacattagattcattataggtcaagggaattttgaaaagtaggctagattgctgcctaagaatcccactctaaagtactgctttgtttaatcattctagataatggaagcttgtaagcctccagaaagttaaaacaaaaaacttctttctgattaagagcctcttaactctatccttatcctctgctatctcaatgtagctattaattgttccctctttgtttctagactccaattttcatttctcaaattttggttctcagtgctgttagtattagtagccttttgtttcttcagaatgtatgtatttttcctcttaaatgtttcctttcccttttaaggttagtcctggaatacatgtttttcttggtcttgtagacttcatctcttctgatttccataataatttgcaccttgatgaatccagaattctcccactgtcttcaaagaatcttgaatagaataatctgctttttgaactctgctatctagtaatctctttagatatctatacca

SEQ ID NO: 73481 - DNA, 1021 bp, Homo sapiens
tttatttcaaaatagctttggaagatacaagcaagggaagacttatggcaaagcaatgcaaataaaaaataacaaataataaaggggttatggcattttagacttgaactaccctttcagtacatttgcatatactaaagttctggaaaacaattgaaaaaattctgttaagagtgtcaagaataaccgctcaggttgagtgtaaaaatattttgtggtcctatcagcatcaacctgccttaatgcttctttggttgtctcttcagctagttcttattttacagcacatgatatatgaagtgatttcacaccatgcccaagatacgggccacccaccagctacatggcatgatgactctgcaggccgaacggcagccttgataattataaggccatgggtaatagccccccaggggttcacagatcttctggcagtgggtgtagctccgcctacattctatacaacagattccttcgtgatccagtctagggtcgaatgtcatgctttccccttcctgctgctgtgaaataaaagataattatttgtgataactgcatagtgggaaggtcatagcatgcatgttatttttaaataagattctgaatttttcactgctacaggaaggtgtaatctgtaaagggtttgatcttgtttaccctgtcattcataattcatgttcactgctgtcattcataattccttttgacaccaaggaatctacacctacctcacctgtcactgactagaaagttgttttgtcttttaaaacgatatcctgaagtttctccatgcctttaatgaactatggttaccacttagtaactcagcttgttttaagtaggaaagcaagaaggaagcattatgataaaaagtagcatttctgccactgctaattctaagtcagtggaatgcttgtggcttcttgcagtaatagcttccagggctctagaagcactttttgaaactcatcaatctaggctaaagacagatttcaattccagttgcactggctctgagaac

SEQ ID NO: 73482 - DNA, 1120 bp, Homo sapiens
agaacaaaacacaatcgataccattattagaaaagaaccaaaggattataaaacagaaatataggtttgggattaaaatatgttaaaagagtatttttgatacatgaacatctcaagaaagatgaatcgtttcttattcgtctttgtagctccctttgcatatcttaatattgtggcacaccacaggcattcaatttctggattgaataatgtgtgttggggagtcacattttattagcttatattgagtagtacaaagaaaaaatgattttaccctgtcctgggtcttgcagtaaaagcctttaataagtgcagagaaattatacttgtgcattgagcagaatcatctgcaaagctatgactaaacaaagtgcgtctgggcacatacagagcagcagaggctgtccccagggcagagaccattctgaacatagtccttgtcatgatcaaataatatctgacatcacaatagctctaatgttagcatctgttgggtattcaaatggacttatgaggtatattttggtaccaacaagaggagtgctttcactcaaatgaaaagcatctttagcttttctcatcaatcagaggaagatgggtcgatgaggtgtttgtggaccaataaactatcagaagagacattattttcaagaggcttttttcattatgaagtttcacctactccatctgcagatttaacaggagtacacaaatagtgatgcctcttccttatagtaaaacatgaaagagcataaaatatttatgttggccaacaggaaattcggcctgaagtgacactttggtttgcagatgtacaccgaaacattgctgcacagcttaatgtctcaaattgcctgtaaatgaaatttttgttaaaaaatcaaaacaaaacagtctccttttcaaaggagatgtgaatgttttatctctaatatgctatggtaacatgctatggtcagaaaacatatgctataataggagaatttgctcatggtcattttctggattaaataggaaattggaattgagaaaagtatgcaaatagatcccacctgttgttgatgagattattaggtcattaaaatttccctcttcttcagaaatttaaatttcaaatctt

SEQ ID NO: 73483 - DNA, 1004 bp, Homo sapiens
ggggctgcagagcgtctatgagaaagtactgcacagagactatgacaggacagtcactctgctctcccctccccgtccagggaggctcccagacctgcaggagattggagtacccctctaccagtcccctcctggcaggtacctgtccccgaagaagggagccaatgaaaatgtgtaatcccatgctgcatgtcttcacacatatacaggtcactccgagaagcccctaagttattgaccggtttcagtgttgtatatataaatatgcaagatgtgccttacaatgaagttgttggaagctatttccaatcacattggtactgtttggtatttgcaaacaaaaatgtagttaatgtaatttttatgaaatgtgtgcagtatttaatttttcttatgctattgactttgatttcaattgcggcttgccattttcttagtgtttttaacctgtacattgtgtaatgtaatgtttgtatataatgaaattttgttatatttttatataataaaagctaaagtggaagttattgccaaaggaactgtctgtaagacaaaaaacaaaacatgttggaattacttaattgaaatttatctttcacctgaaacaacctagtgtttgagaaattttgccttgccaagtataacttgtatatcttgactctgtggtagatttcaagttcaatgttatttaattacatttggttttccgtaaaccgtgtcacttataagcacagtaataaaagatttgtcatgtgtttgaagaatctgccaattgcttttcatgaagctgcctatagtcagacattcacaaataatttgagtatcagaatgaaaccttctttcaagtgctaattatttgggcattattaatgttcatgacaatattaaacctgtaggatttcaagtattgcaaaatgtcacccaagtattaaaaacgtgtgttgatttcataaattatgtgcatctccatatgtattagtctataaaatccctgctctcattta

SEQ ID NO: 73484 - DNA, 1023 bp, Homo sapiens
cagcatattgccaaactataattcaaaaaaaaatgtgttttgatctctgttggagtcaaagataaagcaaaacaaacaatagactgaagggggataccataccacaggaagaccaaaatgtgaatgaagcaacaatttgttcctcttagtttggttttaaagggtgaggattttggtgaactccctacagagtttacttttgttcctaaaacaaaagcaacagatatgctagtgttccccgcaaatgtcaagaaatcagatctgaaaaacaggatttatattccaatcatttaaataaaagattttctgtgttattgaacacataacaccaatgtatccacacactagagcacactgtatgtaaagaaacgcaactttcatcaaaaacatgggaaaatattagcaccctaatgaatactgtctgtgcctttgcatatttcccctttcctattacagaaaaccaacaacatatgtttggggaaaaaattaagccataagaaagtttctaatttgcaaatttggctggattattgcatccatgtgtcagagtaagcatcaagttacacaggaccctgaactaatacttccctaggccagaaacagtttagtgccatttagaacaaatcactgtatgtactatactgagacccattttcatttctcaactgaacaaacattctggagacgaatgagcaaaatattatcaagtgcaatgttactgtcttcaagaagtaagttccagaaattgaagctattaagactgtttgaaagaaaacaaatcaacctaacagcttttttaaaattttctttttttaaatcattgcttgaaaaaactgaagtcaatcttcagcagtatgagtctccaaagcagagagaaattgttttaagttatttcataacaagtatcattatctcacattcttgttaccccattgtataatcaatttgttattaggtcttgactatgcggttatttataacaaaagttgtcagcaaattgctggtctttttcctgtgaaatca

SEQ ID NO: 73485 - DNA, 1050 bp, Homo sapiens
aggtggagcttgcagtgagccgagatcgcgccactgcactccagcctgggcaacagagcaagactgtctcaaaaaaaaaaaaaaagtaagtgaagtaggataactaattttaatagaatcatctcaaattaccttccctcccgctattaaaatgacctcctttggtttataatggtttatttcattgttaagtaaaaatcctcttctttctgtgggcccagcacacccactgaggtggttgtttaacggcacacaatcaaggacagtctaaccagtcaggatggtttcagtttaatgtccactttagtctcagtggctcatttaatcacttggaataatagcggttctcagatgtttaatgtatttctcagagccaaggtgttcagggttactacaggcaaggcagtctcttatgaagaaagaggggatctgattctttcttggctccagccacacataaacggcctcctttccattgcctactcttcatgtttgactccctgtcctcacttctcctccctgggggagcgtgtgttcttatgtgtgttctttaccatgggaacttggaactgaaagggacctctaaggtcatctgtacgtttcatagatgaggaagctgaggactgtagaggtcatgtgacctgcttgaggtcacacagctagtgcggggagtgctggacctggactctgggtcttttgacttccactccagagactttttccttctcttaggcttagaaagggacagtagaggcatcagagattccatgtggcattttaaaatagcgagactttcttttaagatttttctctcttgttttacaaagatgttaaaaaaaatttcccagttctcccattttcttatatggaaggataatctgacattctgtgcagagaattgactatttcccacaaaataaacagtggaaagcaagtagcacaagtatttagggatatcaggggtcctcagtgctccaagcttccaacagctcagtaaacatcccctccctgattgtcatgggagaggaagaggcaggaagaagcagtgtt

SEQ ID NO: 73486 - DNA, 4467 bp, Homo sapiens
tgcttgtatttgtccatgttgtgctaattgaagcaaggaatccctccctcaccaatggagtgaataggaggcaatcagaacaatggatggcaaaagcaggatggcccaaccaccaccaagaacttgtagctttagttatctgctctttgctaaccagctggttctggatagggccagaatgtctgcactataagtgactggatggagacagaaactgaaattcgtggcttaatgcagccagaaaccaaaatacagtgaggaaatttgtacagaaagaaaataagtaggtgaggggagcccaccctgcaggaaaaggcagtgttgtagcagaggctggtttctattccccagcctctgggctgtgggccagcactgttttgctgcatcactgggctgcctgtggctttgtcacaacagaggctaatcctcagggttagaacaataccccaaacaacaaaacactcatggtatccctgtggcatagcaaaggtgtttatgcaaacctgacttaaacctagggcccttaaaccataacaattgccacctgggaggcacctaagcctgacaatactgaggctctctggaagaagactttttataaatataggcagagtagaggcgaccctccctattgaagtatatccagtgacaaacagaaaaaaggagggagagaaagaaacctggatacaggaggagagaaaatttaaacatatgtgcatatacatgtttaaatttatgtaatttatatatatgtaattaaattaaatcataggtccacaatttggcccaatttgaaattcaaaatttactagaaataatttaaacagcaaaaagataaagaagtgttaattggctttagtgtctctatgatataggttctgaattcactttaacatctgttgaaattaacaattcatggaccttcatatacttcaacactggggctcaaattattgttatatctggaggtggggtgccactaactttacacaaggtaccgctataatcttgggagagttactgaatataaaataaagaacaaataggtatgcctcaccttaaccatcaaagctattgctttgggaaataaattcccatggtcatagcacccattgctctaaaatgtctcacagtaagcatggataatctgactcaatcagtaaataataaaaataaaaattagattaagtctttggcacctaaaaattggcttgacaaaatggaactacataacccccctagttaatatcattaatatggcccaatataaatttggattttaaagtatcaaacctcattatataagacctaattagtaacaggatgattatctccactgcttctccatttgacagcccaattttgtgctttcttatacctagaaagaataatagaagattgtagatcactacagtcttaatcctgtggttgcatctgctaaggtccccatactcaacaccaaatattattgaaattactttttaaaaatctaatcagcaatcagtaaatattttgctattataggtttagttaatgcagtctatttagtgcctattttggcagcctctgagatgcagtttgcctttccctctgaagggacccaacacacctttaccaggctgcccatggagtacaccagcagctttgccattgcacacagtctttgcaaggaatgtcttcaatgcatctacatttcccagaagcactgctatgaaactatattgatgacatcctcctgaggtcatttgacacattaattaaggacatgaaaatataaaatagcttataaaaagggaataggcaattgccccacatagtataaagccctgccaccttggctacatttttgaaaattattggtaaatcaagagatgtttcattcctgacagtatcaagaaacaaacagctattgaccttttcaaatgttaatacaagtccattgtttttagtaattttgggattctgaaggcagcatagtccacattttaaatttttacttgacatatttaggctgtcacttgaaatcagcccaccttaaatgagcccctcttaacaaaagattctagaatctgtccagttgaaataatcaggaattccccttagtgcccttagagagtcctttgttttagagcgtttagtaacattccttatgccactggagttgctgacttacttatgatggccacagttagttgtccacggacttctaatgcaagaagttgcctttcctcagacctgtgctatatatcattagagcggtaatagctggccacttactgggttctcctggaaagaggctttaacagactgtgaacctgttaccctccatatccagctgtccattatgccttacatcaccctcaaggttcagtatggctaccaaggtctctttgctacaggatggggccaaatctgggccatctgtatattctacttgcaggagaggatggccttctctgtcctcaatttcttgccatgttttggcactggagaaagacaccacttttccagaccccttggctacccaggaaactcgctggaattaatggagttatttgcaatgagattttgtacacttcacagatggaattgccatcatcctatgtgatggagcccagtggaatgttgctggtttccatctcttaaccaagacagccatgataaaggatggtacccaaggataaggacaattggccaaactttacacagtcatcttaccttactgggtgttctgcccaataaatggccccatctgcacatttttacgtactcttggactactgcctaagggttgcccccttcaggataaagaactttggaaatatcttgcctcacagatgcccaaaatataaatcaaggtaagagatgtctctacatatactaaggccacaacacgaggcttcaccagtacactccttagctcctgtgaagtagttccagacatcacccatgttgacaagacactcattcacttctcagaatatacaatgctgggctcttgaagaagatattcaatggaatttccacttttactataaaccaggcaattggtttcactgtgaggcctaatgagctccccaaataactcctgtttaaattatcaagtggtaaatggaccccctactgggtattgctattgccataggtgttgattaatctcagttcacacccctagggatgggcacttcctccacttatgcctcatgggtctatcaattatcttcagtggccataaagggagctacctctaagttcatgttcttgatgtctactccaccatgtggccctatccttcctggttaatgctgatgacccttccaaggggaatgctttcactctctaaaaatcttagttatcaacaaggtttaaattaacctcaagttatcaaggtactgaatgtggtataagggttaaaattaagatgcaatatgaagtgctgtcttgacaactttgtgcttcacagggccccaaccccaagcccaagtcccctgctctcctcagatatgcccccacccagctagctctcacatcagttggaccagctctaccctatccagtccttaacctaatggatttcacttctctgttggtctgaaaacttattcaaacaagccaattatatccttccactggaaccagggttcaccccagactcttgttactacaaagcatgcttcccacagcctgttcttgtttactctgttcctgaatgcaaccccagtgtggccctacagagcatttagtgtcttcctccttgggctgtgaatatatgtgactaataaactgctgtcattctcatttgcccagtgttgtgtgtttgccatcttcatactatttagggagggggtttcctccctcaccagtgggtgaataggaggctatcagaacaagagccagcagtatttactgatggtatgcatgtgagattaaagggaagaatcaagagtgttatttagatttttcacctgaaaaaatataaataaatgtccatgctatttattgagaagggagagaggagaaacagctttggagaaggaaattaagaacacagtttagagaaataaaagaccatattgtcaaacaagatgaaatgggataaatagggttttgagaaatgattagggagaaatcacttccagttggaggaataaagaggctcacatgaaaggagatatttaaacggaaccttgaagggttgaaaagatttttgtcactagtggtgttggaattatacatcataacagaagaaaatgttaaaccaagtcagcaaggtagagaagcccagaatgacaagtgatttcagcttggctgattggaagtaggagccaaggctataatgttattctgggatcttccttattgaagaccttgagtactaataagtccacattaagagtttactttgatcaggaaggcattagaatatgttgaggtttacccagtagtgattagggttgtgtgttctga

SEQ ID NO: 73487 - DNA, 1017 bp, Homo sapiens
atctggagttagttaataatgtctttgaaatggaaaataaaagtcacaaccctgcttcaatccagaaaaacaatcttctgttctgtgagcaaattatacaggctgtatagagacttaggaaactgaggaaatacgtcatttttcagagaacttaaaagagtcccttcccattgtttattcctagaagcatagaaatggctgacaccttccagagctgtcaacttctgatcttcaaatagacttataaggaactttaaaaaaattcctttatatcattatgaagttaatttttatatattttaatactttcttaaaggaacctaagatcttggttatatagaaatataatttacttattctattttaattttcatttgttaaagacagggtagtgcagtgtttccaaattgttgccagaaatgtaaggtgttagatagggaaccctgagcaacacagaacttggttaaaaacccactctacatccctcctgtttagactctggcatacatgcatgtgtgtgcatgcgtgcacacacacgtgcgcacacacattatccacctacactcaacaaaacaaacaaaaacttcatgaccccttgttactcagttgaaaaagtaggggtgtatggtatattaattgcatgcatctgtaagttattaaagtacatatattgtactatggtatctgatctgtgtcatttcctcttctatttctttttataatttctctcttgctttcatactctttttcgtgtacattaacatgtagagatttgctaagtaaaagtatttctaatctaaattaacatatctatactcgaaaaataacaatcccttcccccaaaataggcatgaatttcacttattactaatggctccatgaaagggaattgaaagtaaatctgtttttgagatgtttgttaaaaccatatttatttctgtaaatattttactttgatttactttgattccaagcagtgttaaagaaccagttttgcacaaattgccaacatatata

SEQ ID NO: 73488 - DNA, 1017 bp, Homo sapiens; identical to SEQ ID NO: 73487

SEQ ID NO: 73489 - DNA, 1017 bp, Homo sapiens; identical to SEQ ID NO: 73487

SEQ ID NO: 73490 - DNA, 1017 bp, Homo sapiens; identical to SEQ ID NO: 73487

SEQ ID NO: 73491 - DNA, 1017 bp, Homo sapiens; identical to SEQ ID NO: 73487

SEQ ID NO: 73492 - DNA, 1047 bp, Homo sapiens
agttctttatttggtggttaaattatacatattgctttagagagcaggtaggtggccatgtgttcagcagtgtgtccttaagaaaataccatctttctaagccactggaatttttactttactatttttaacattaatggatgtcaggtcatcaacctcaagtctttacatatccatgtatattccatatatattgtttatataggcccaagtttctccttaattgggatctatatactaccagcacaacatcaaaaacatgtaattgaatacatcagagctatatatgtaaggaaatgactggtgaccccattatcatcattgttgaattcatgttaagtagaccctctaggggaccataaggcaattgagcacataacgaaaaatgatgcaataagaatgtatgcactctctttgccaaatgcatgtgcttttgtgtaacgtggatgtaaacagaattgcagtgctgccgaaattcttgatcttggctaagagagtatttttccccttgtaattatgactctgagataaaattgccattttgaaatttccaaagtaacaactttttttattttatgaataaacttgggattgcaatttctctgatctgacaatcaataactttaacaaagatctaaataagtgtttcaaggaaagttttcctaagcaaatgtaatattacctcatttgggcatcattactctgttaattctatatcaaaggaaataaacttgctacttgcactaaatgaaaaaaaatgctttcttttgtctctctttttttgaaaacattctgtggataagctgagaatagactgtgctatgcagtctgtctaagcatctattttgctttattacatgtaataagtaagtgactgttcttttaccttcagttaaaaagcagttatatggaactagtcgggcaaggtctattgctttttatttccttaagttgccacctcctttcagctctaagttaataaagttaattaattagaactatgagccaggccctgtttatagacattggagaacagagtattctctg

SEQ ID NO: 73493 - DNA, 1030 bp, Homo sapiens
ttaaattgacagcattactcttcctcatatactccaccatgtttttgagacaacacttctgagttcagggtgctgcttgtgaccaagaaaccaaatggaactgaccaacagtttgaggacataaaccttctgattattttgaaccactgaactaacagatgctacatttactatgatgccccagattgaaataaagtaggaaaatttgtatttagagttgaaaaataaaaaagagaacattctgccatttgatagtaacatatttttctttgtctttaacataaaccataccgtaatacttgatgtaatttattctttttgtgcattgtgtctccaccgagaattcttatttctctcagtaacttaatgaattgccaagtatttatggccaatatgggtctccaatatttttttaatttcaaataccacatggattataaagttccacatactttaaggcttctgtgctaacacttatagctcttttaagaggatgtatgtgaaatggaacaactaacagttactgtatcttgtcctccttgtccattttcctgctgtcagaaccttctttagcttaccaggagtactatactctaatttctttcttttctgccctctgtatggtacatttctagtctttgtgttttgtgttaccatagagacaggaggtgctccaaagcccaaagccccgagaagacagactggaagcaggtctttgaggaaacagtccctgctgacaagagaagcctgaggcaagaatctacagcagtaaagggaaagagggggattgtgtggcccaatctgatggtgtgtccacagtctcaggaagcacaagctctgccaatgctgtgttaaaaatgagttgtttacagaaaccaattttacagagacctcagtgcagcctggggtttcataggaatcaaactttggtgttttatttgcaaaaaaataactgaagtgacattgacctattccttttactattttcctcattaaaagggagcagcttctgagaaaggtcctctttgct

SEQ ID NO: 73494 - DNA, 1429 bp, Homo sapiens
gctacagatgacaccccacccccagctctatgtattttcttttagaatctaacacaaccacaggacttaaatgtttgtatttagtatttaagacaaaatggaccctaattttgctaaaagtcataaaagattccagattcaatacggctttgaaaaaaaatgagaggtttgactgactactcaacacaatccaagctgttcttactgtttctacttgttacatagggaaggtaataagcaaatctctctgtcgatatagatatatgaatgtggttagattgtaggcttcctgaaggcagggactgtgtctgtttattctctgccatatccctgaaacataaagcagcatggcccactgttcatacttttgactaaatgaatgaaagcatattctttatcttgtgccttgcagtacaccaaagaattatgaaacattgtcctcttgaatgtagaatcttatgatgaaatatgacacatctgcattaaagtaccgcttttaacacaaagaatgggaagtacatagactctactttgaatagtttatggtcatcactagacttgagtatgaggcaggggcacaaaaaactacaacaccaggctaactaggatacaaaacatatgagagaaatacaatacaagttggcatcgctatgttttggaaaatcaggaggtcatatttgattgagatttgagggatgaaagattattatagacaatgattcagactagggaatagggtattccttgttatacagacagttttatgcagtattatatatagagtttaatgcagtattttatatagagttttctgcataagtacagctaaaaaatttaaaggcattttaagaaactgcactatttcctaatagaagaatagtgtcctaaagcatagcttgctagtgagagaaaactatatgctaaaactttaacctttaaaatagattgaagccaggcatggaggctcacacctgtaatcccagctactcaggagggtgaagggggaggatcacttgagcccaggattttgaggctacagtgagctataatggtgccactgcaccccagcctgggcgacagacaagaccctgtcaataaatgattattaaataaataatagagcaagatttttgtggttagctcatttttgttaaaaaagaaaacaactgaaaaataattttatgactctggacccttcgtacaaattgggtagtatttgttaaaatgtgaggatttatgtataataacatcaaaataactagcttctaatattttccaatgtactagtgaacctgggccataaattttgctgctcttgtcagtagatatacagcaaagataagtatggacagtactctgtaccatataagcagaaaacctggaaattaacattcctggttctctttaactagagagctaactatatttt

SEQ ID NO: 73495 - DNA, 1276 bp, Homo sapiens
ctcagtctttacagggaagctcaactaagagcagacaaagagaaatggttggtgcttttacatgaacccctagcacctccatggctctgaagtcgttactgttttatataccatgacttgtcaaagaccatgaaagcttctggtgtttgcaatgtttttcattgttgtcctagtgctctattctacttcagaaggctatttctgtaatgctttggtgcacatggttttgcctgaggatgtgtgatgatagggtctgctttagaatgttcttaccctggttgtgtaaattgataaacctctgacacaagccaggcaaaaggcttcctattctcccgcaaaactttctatacccctagcccgaaataactcagagattatatttgctacaacaaagtaaatgtgtataaaacataagtatgttaaaaatgaataccatgttttgtccgtgaacacattttatacattatctcaatgggaaaagatccttgagtttattaaatagcagtacttttttttttttcctgaagagcccaaagtgctttcttatttgttcttttcgaacctctgagtactcttgcatgacagtcacctgtgagccgaattttttttcctcttttgagtagaacattgatgtgaatagatatcctttgtgattttattcttacagtgtaagataaaaggtgtaagtgacatctctaaggtactaaataaggcctgtagtaactggcaaatttacagcttagaactagcctgtaatcatattatctgaagttagaattcttccggttccctttgtttcagaaaaaaagatgaatgactgagtgccacattttctggggtttatctacttctttctcctatagcagattccactaacaaatatttataacattattttcaatgtaattttatttgcttatagaatcaaatagcttttgaatcaaaaaggatcttatagatcacaaagtattttgtgactgatgaagctgagtctaaatacacagagtcacatgcagtggcacatttagtttggggattgccaacttttaactactgcaatgttaacttggactatagattttagtttatctcagattaaaaccaaataaaagagaaacacaggaatttcaaaataattgtagcagtcctcacatatcttccacatgaaaacaagatttatgatcaatagaactttattttttcttactccaactgttactacaaaatctttaagcctgtagctgcttagatctcctgcagctccagtatattattt

SEQ ID NO: 73496 - DNA, 1047 bp, Homo sapiens
gaccttttcagttattatttttttgtcagtggttttgattattcaggtgcacttttaccatcaataggtcatatctataaatagaagtctagagacatttttaatatgtttggggaaagaataaagaaattcagattttaaaattgcaggtgaatattgtgctagtgattagcttggccaacatactttgaaacaatttatcaagctgagaaaaagacaacaatagagccatcccttatgaccacaatttctatggcttccttcaaaaatagccattttaaagtttttgtttccttcttcttttaatctctcatgttatgaataatatttagctgaactcccaaagcaactgggggaagaaaatctttggtattgattttggataaaatatgagacatttacttttgtgaatgctaatctctgaaggcttcaatacaatcttttgttctctgggttcttgtgtcattcaaagatttaaatttagacaccaatatgtttttgaccacaagaaagccctctgaaacacctaagtattaaagttttagttgttaatatctataggatttcattattttaattaccatctcagcaattcccagtgggtaataatggcatgtggttgtcctgcctgtacttctatgggcagttcatcgaataatcatccttatgttacactacattgtggttcattgtctctctgaactttttattttatccatatttgcttagcaaccaagttataattgtttaaaatttatcctaacattctctgagttttttcaatatatcatttcaagacactaagaggagatgtcagattttgtcctgacgtcttatcaaaagggttaaaactctacttcctgtattcttagcctcataaaatcctttcttcctataaattccaaaatatgactgatcacaaagcatattaatagatctaaaaatgggtgtgttttctttaaaactgtatttgttggagacaaatacttatactccatcaaaagttttatcagctataattccctcttataattgtttttaaaagtc

SEQ ID NO: 73497 - DNA, 1169 bp, Homo sapiens
ttgttttggaattcacaaagcaatttcccatagaaagaatgttataaatggtggttaggttcccaggctagccctcaagagtctatttaacccataatgtagctgtaacactatgcagttgtaatgaaaaatagcagaaaacaacactgttacaaatgtgcaatgttttcattacattaagtaaatacaattcctcttctgtatagaaaatgcagtctagggcaaattataccaaccagcaaatgtaatatgatctagtgacaagagcaggatggctgaacataggccaagctctttcactaatttgctttataaattgtttaactttactatgcctgaatttctgcatctgtccagccaacttggtaattcttgcctgctcatgctgaagaaaaggtaaagtaatgtatataagaatgcattgaaacacataaagccctataaaaatgcagtgtatcatggcataaagtgctcacagacaaatgaaattagactgaattttggacttttaatggagtgaaaaataaaggagcagagttgatgtttcaacttcagttgcccaaccccatcacctggaagctaggtaaccatcatgttatcctttcttcaccatgagcaagtcgaaaacacatgagttaatatctctgggccttggtttcctcttgggtaaagtgacattgtgcaaattagatgaccttccagttcttttaatctggatgtctgtgtttaacattatttggatagagtagcaactttcatagcataaaaaaatgtcctggaagggtcataattatatggtctgaatttcttcagttttctgtgatcagcttacttaaagcatcacttgcataacatacatacacacacacacacacacactgcttaatacagttttttttcttaatctgccaaatctgtccgccctaaaaccaacttgtcccccaacatctgccaaatctttccaccctaaaaccaatttgttccccaccgtctgccatcaaaatcagcgtggaaaccaacttctgtcaaataatatctccatccaaacctgcagaatagcagtcttctcgtttcttactcagaattttgctttcttccatgaagaagaaagttttccttcatgatttgcctaaaaatttctccttgattctggtgcaccagatatatac

SEQ ID NO: 73498 - DNA, 1056 bp, Homo sapiens
tatcatatcattttacaataattttctttctctttttattaaaaacattatcatttttactgtttttgagatatcccatcacgtgcttcatgaattttgcataaactttgtgacttttttctaagattgggaaatacgctgtttttgttccgcaatgagtttccatgtgagattgcaaataattccgatactatataaagaccatccaagagcatctactttaaattgtctttacaagtaggagagagggatttgcactgataattttcctaattccttggaataatgtcatacacttttaagcctgagttttgacaatcagaatcagacaaagaactgagtttcatgatatcaaagagcttataaaaggacatctggccagcccatactcctacctaacatcttttagtggcttcctgtagttctttgaataaaataataaaataataaaatctcagttcatacaatgtcccagaacaccctcacccacaggcccaggctacctcttccgtctcagtccagtcactcttctctttggtcactactttccagtcataagcgccttccaccggaggccttcacgctgttccctctacctggaatgccgttcttccactaaacctgtcttgctaactctttcttgttctgttctgaaatataattttctcatagtaattttcctgtgactgccttccctctaaaacttaaatcaggtcccttgttacattcataattgtaccctttacttttccttcattgtacttacaagttataattacatatttgtttgattatttgtttaatgcctgcctttgccaatagaatgtaagctctgtgattaaagaaagagttggagtcagaagaaagattttattataatcagtatttcacacttttgacaggtaaattagacccaaaataactcccagggagcaatacacagcctggaaaacatgaaacaaggagcggctgtttggtgtaataaaggaggagcaccaggctgaattttcagaggcctaatagagtaggttatggttgatggaggtggtggtggtg

SEQ ID NO: 73499 - DNA, 1027 bp, Homo sapiens
acatctttaaagacatttatgctgcttgccttcaagtaaatatcagctacaaccaggaatattagactgtctcccttttccctgtaaagtgggcctttaatgggatggccacactttattgatgggaatcctgtgttcaagttgagatcacaggtacaaatgaagcctaactagtaacctacaaaatatatgcactagaagctatggcagtggttcaaagttagaaagatgattagtatattcatttttatcgactgtagcactttatgatgcttatggaaatattcttagtaaattattcaatcaaataaattttacatgagggttttactaacaagtctaaaaaattattttcaactagattcagtcagacagatggattttgttctccaggtggttgcgtattttttgcttgataacctatttggcagcactcttttgaacctgtgaatatttatattttagggccctctcaataattaagaaatccactttcagtaccagatgtttccaatgactgaacaactttgtttcattctacaactgtaactttttttttactttgtttgtgttttcaataatattttcccaagaaccaggaacaaaggaagcatttactaaagtcatatgttcactaagaaactttataaaggctaatttactttattaagcagaaatgtaggcatcccaagagcattgtttattttaacaatcaagcgttttagaagctataaaaattagctagtttataatgttttcagtgacttttcttcttaagttgttgaagtacccaactaagacacaaatttaatttcagaaactatgaaattatgctttcctgtaatgtattatctaacctttggatgaaaagctttaaatttttcaactaagaactgtgcaacaaatgaagagtaaaataacttcctttatagtaaactagaccaaaatcagtgtatcaacctcatacacttattctcggaataaaccctgacctgagacgagattttcattctatagcaaataaatc

SEQ ID NO: 73500 - DNA, 1037 bp, Homo sapiens
aagttaagcgtaatttcttttatgacaagtggctcagtcttcattataagttaggtaatgagaaggcatctagttagaaagctagggcatttcttcatctcacaaatgcagatttgaatgctgagtatgcctgggtgttgtatatcatcttcctaattaaaggtaagaaaaatacaattactatggccaagatggtaaaataaataataacaaatctttattcgttgaggttggatgagaggtttacttacagtaaaggaactatcttaggaaaggaaaacaaacagtaagaagaaaaggttgagaagtttaaggaataggtttcttcagggattgatattagctctaggcttacttaacacttttacaaataatctggagaaaggcagtactcagtcaaatatcagaggttttaaggaacgctaaactttctagtaggaaagaatcaataaattggagcgctgcccagggaagaccttgcagatctgtgcaggtgggcagatgaatacagggtggtaagaatgcagtgatgtatgtatggccattgagttagtatgtttatgtatgtgtgtatgtgatcttcaagcaatggcttttagcctttttgaaagatttccccattcatttgagaatctaatcatagttaagaaacttttccctaggaaagaaagctcataacccccacaataggaagtcatggtcttgaatgagctaaacatttcagaaataattttcttcagttcatttattcagtgagcaaacaaatatttattgagcttcagctatgaactctgacctatatgacgtgctgggaatacagagagataaagacacacttggcctctgacctcaaactgacctaggttacaatttggaaggagctagataagcaagcatttttgcagcaatgtgatcactgttcccacctctatgccaaagtgctgtgtatgtctctagagaggcactggattcagactgtggagggaactaaggatttcagagatggcttgcgagagagcatctaattgatgtataat

SEQ ID NO: 73501 - DNA, 1049 bp, Homo sapiens
tgaaatgaagtggggagaaattggtatgttagaaaaagatgagtaaattgttggagcattgtccttgaatgagagattatgaagtctaggttgcaagaggaggagttggccttattggagcatggacagttcatcggtagaaatgggaagaaaggtagagtctactggcaaagtgatgtaggtggaaagatgtcagcagtgaagggagtttgtagaagttcttgtttcactggcttagtaatttattttcatttcttctcttgcagtttaagaatttaataaaagcttttttcgaatcgtacagtatatttaaaccaccttcatagaaatattaaaccttgatatgaaatgtatcatcagctcttctaagttataaactttggggaatttaaactcccagaagtaccagattttctacttcaatccctttgattccaattccctttaatatgttcacccaattttaactttctaaaaccttattctgcagttttcttcttgatacgttgtaactgtgagaaagtccattttatttctgtgagctttcacatttaacttgagaaacctgttttccagatacttaaccagtttctaaattacttaaccaggtgccagcgtactacatttaatgtaccaagtaatgattactgattgctggtcaatccatattctaattgcttttcccctcaaggtattgttctcttgagggaaattgtcagctgttcaatgttttgagaccagaaacatttaaaaatgcattaaaacttaaacttggagcttagtagaaacgcatttagctggctttactactaggttctaatcacttttttcgtgtaatgaatatgacttcattttgtgttaaagtctgttttctcagacagatggatataaccattttctgaaattattgccacaataactgctaataatataatcatagttaattccttgcatttatatgcatgtgtcaattctacccaatcaaactattcccatggaaaatatgtgttattactataaaatagcaacatatttttgttagtactttc

SEQ ID NO: 73502 - DNA, 1046 bp, Homo sapiens
ggcacattaacctaattcattaagttctttatatttagtagctatgagtaggatcagggagtgtgtttcatttagaccggtaacattctggtgtttataatttataatgatttgccttgattaaaacactattgctgtttctgaaaatttgaatggattctcaaatgctaaacatctgattttctttctgagctattcagggagacttcagaacaagaagaatttagctttgtaatgacaagaactttccatagtaattcctctaaatgtttaggaccttattagggtggtttatgttctgtgatattctttttaaaggaaggaaagttaagtctgagctttttcctcaccaccagcagcgtggcatcagggaggtggccaaggatctgaccttgtgcctttaagactgtttttcctcacctgtaaaactggaataacaattccaaccatgagaggttgtgataagtctgaaacggaataaataatgtaaaaggacctggctagtgcctaatatatacagtagcagctcagtcattgttaatttttctgtcattgtattgttaaaattacaggttgtatgtttagtgatttctgtataggtgattagaaataagttcagtacaactaatgacaaataagattgtccattttaatagtctctctgtctcttttttctttttctttgtttttttttgtttggtttggttttggtttggtttggcttgtggtttttttgtttgttttttgagtggggtagaatggaactccaagggtagcatttcagaagatttatcctcctatacctataattttcttggttgccacctaacaatgttgaggtggatttccagttatatgggaaagccaaccagtattttgcatagataactgaaaacaaaacctaatcatttatggagcttttaaaagttctttaaatacaatatttgtattgtataatcatttgtaaccgaataggagacatgtggctagaaagtaagacttatcccaaatggtctgagtgagtggtcagactgtacacactggcc

SEQ ID NO: 73503 - DNA, 1346 bp, Homo sapiens
gtgaaattttaattcatagaatggaataggctttttatattctgttaaatatggcagctatgttttcaagagaaatatttccccaccaagttaataatcaggttggaattttaataagtaattataaatttttagcagaggaaagacattggtcatcaaagcatatgatgctatttttcccctctctcttttacctttgtaataaggcttttttcttaagttgctttctgctgtttaaaatggtggcattcgtgttctagcaataattgtagaggtttgggttattataaactttgaatatcaattcctccccttctgtgacagttctaccactagggaagtcaggcttgcaaggtctaattactgcagcattttgatatccctagctacaatattggcaggaatttaagctatggtagaattcattggtgacactgttgtaactaaaaagcacagaatctgttttcaagcctgttcaggatggaatcaagtattggatgatgtcaaatagtcttgctgcaagttcagaagtgccttggacgaatctaatatgaaatgctaattatttgcaatagaatgtaaataaggtggcagtaagtcttatttgcagtgactaatgaaagctgttgtactataatcattgagatatagagcaacaggacaattcattaggaaaaccgtagttgacaagcggttaattcatgccagtctggacctttcctcttgcttctgtttacttctattatttcttcttgataataagaagtcccatatggaaacatataacaaggataagaagaaactagcagctaaattttgccaagctatgctgaatatctacagactaagtcttccttagcttttctttgcctatgaaaaacaactgccatattaggctgattgaaaatatagtcattttctagtcagcaaattgctagtctgaaaatttttcatgttctctcaccagacttgagcaaaacttagctatgctgcaaattattgtatttcccagacatatattacatttcaaaatttagccacattttcacttctcagattttagcagtagaacacttttaacaactaaaaacagtaaattgcttgatacagctctcttctatgtattatagaatacagtccttgataaataaaagttgaaactctagaatagcttttcttttctggggcatatattcctcacagcaacaatagtgcaagatgctatcttattttcaactcatatagccaaattttgaacttatagaagaattaaagtaaacaaagtactttctattccccaaaggtgtaaaaattaggaaggtgatttctattatgtgtaattttca

SEQ ID NO: 73504 - DNA, 1099 bp, Homo sapiens
aaaccaaatcttatggaacaatgagggtcagaataagagattaactcgctttggctatattaagaatattatgctgatgttgttctaatctaatccgtaaactaataccccacaaagattcagcatagtttagcacagtgaatcagttctcataatactaggcttttaagtgttttcagtgacataagacaccaggattgagaaagatgatcagtaaagacatctagatgttaaaaatcttcaaattcaagtgaaaccagcagaaaataagcaagaaatctttctaactttaggtacaaacatttttcagctgtgaaaagctaagcaactttactttttggttcttcttaccattttcctttttcattttttaataactatataggactatagataacaagcaaactcgtatgatctttgaatatggcaattatgtctcaacgttgatttactcactcattctgtttctaagctttttaactgtggtgatcagtgtaattacagagctgcctttacggtgagaaggcacaatttacaggtcaaaatgtcatacagaagtagatatggtgtctgtctaattagattgcttaatatttatcagaatggcattcttttttgttgtgctattgcttgactctgggtcccaaatattctttcttaatataattatataattggattttctgtgaactttatagaacattaatcagaattaaacatttaagcttaaagttttatttgctgttggacataaaatcgacagttttttccccaatgtcttgtagtttaatgctaagaaattcattccatagaggttcattgtgttgctccagggagcacctgttttagatgctgggttgctctagctgttcatgcccttgtagactttacatgtccaccttcttctgcaacagcaagtaaataaataaagtagcagcttattatgctgtcaatgaaacaaatgagaagatatgataagcagcagaagcctttcttagtcacattcaagctacagtgaagggaggtcccagaagtttgcaggtaagcaacagtgaatgcaaggaggcaggaaagatctgagctttttagaagaaccagt

SEQ ID NO: 73505 - DNA, 1033 bp, Homo sapiens
ttaatcttgcttaatagttatattttttaaaatttgaaaataaaatgagaccagatggactgaagagagccgcctgcacctttctgcatggtggaattgctattggtttatgacaaatgccagtaagagaaggcagggactgggtcgttgctatcagatgagaactgaaagcagacaggttttgttatcaatcactggttgtcggtgtaagacagcagcggctgttataattgatttgatggctccgaatgacttgagctttagtggccaaagcggattgtagcaactcagccatgcatgacattgacatgaagaggaagtgacatgactcctcagaggcaaagttagatgatttaaaggggtaaatctactcatcaattcaataattcataaactttaacttttgatatgagatgatattgatgagaaaaaaggaaaaaataagcttttatttttcataattgggctttaggtggtttttgttggattagacccacttttcatatcttcttttttcaccctcagtactctgttatccataaatgatacttatatgttttaatgcagaatgtcacgtattatgtatcattcctactaagctgtttgatgggaacatgagtttaaaaggggagccaaaaaaggaagataataagaaccaaatatctaccttttatatatgacctaactcctcagtttgaagaatataaataaatagttttatcaagtcaggtaactttaggaactaaacacaatgaaaggttagaattcctgatgatatcatgcctaattataatcttaaatcaaccagatttctgaaggcatgtatgtattagccaattgggcatgcatactgggaatgcgtagggtgtgtatatgtgatgacaagctggtttccatactaatcatgccatagattctggcctgggccaaataagaaactgtctcctcccaacaactcattggttggtattcacttctttgagcactgggttggaaaatgctgaattggaaagaacatggtgctcatttagtg

SEQ ID NO: 73506 - DNA, 1002 bp, Homo sapiens
cacccccaacaaggtacatctctgtcctcttatctcacctcccaaacaccaacccaacttgctcccccatgttggaaacttcctcctttgccttactcacgaccactactacatacataccacatttgtcaccaagcatgatttattctatctccttaaggttgctcaagtctggtcttccgtctctttgagtgccactgctttatctcaggccaacttcatttccagactgctttgttgcagtaacatcccaatcattctcccttcctccagttgtcctcctgtccatttcattccttcatactatcactgccaaagagatcatcaaaaaatacaaatcttttcttgggctgtctgtgtaagttccagtagtttagaatgtgaattccccacatgattttgtttgtgcctcctaggcttatttcatcccactccatcaccagattccactgcctggctataattgagccactggcagttcccagtgtgatccacacttttcaactctgtacaattctttcaccttctaggaatgttgcctctttatttcacattccaacatttcattaagattcaaaatgtggtgttctctttgaaaatgcgtaccccaaaatctatcatttctttatttctgttgagtcatgtcaacttatgaaggatgaattgtcaaagctacttaaatatcaacatcaaatataagcataaaaagtaaaaacaggacctactgtgtagaagagacatgtcttgatctgcttctttcttttctttcttttcttttctttctccctttctccctttcttccttcctttcttcctttcctttcctttcctttttccttccttccttctttcctttctcttttttctcttttcttcttttctttcttttcttttctctttccttttctttcttttcttttcttcttttagcagcatccatgcttacatcagaagccagcccttttagattactactcatctgtggattgatctaaggtaagt

SEQ ID NO: 73507 - DNA, 2180 bp, Homo sapiens
gttttcagtttcctgctttaaaagtttacttcaaaaacagtataatagatattctcctgtttgatgtaaaattatttagaagacctgcaagattgtagctcctaatataaaatgcttagatatggttacaccttctttcatacaattacagacatccagaggttgattgaatatccaggtgtaatgaagcaacttaactttttacaggttgtatacatttatgtcatagcagttgattgaagaaaaaatggatttgtaaataacactcgtagcaatgaaagtaaaggctgcctcttaaggtgtttacaaatagaaaaatcaagttaggaggattctaatttaatgattaattgttttgctggaattttaaaggaatggatccataatgatatttgtttcaggctattaacagccagaaccttggctcccagaattaagaaatcagttcttgttaattaaacttaaagatgatggcagagatctttgtgccatgaagcgagagcctgatctatggctattttgttccatacttggtataacgcagtacactcttctcagccaaagccctatgttgtctgggcaactcccgttgccatagcaatgaaattcttttgcaggagcagggcgaatgctaattgtagccatttgttgttccttctgtcgatcccttaactagcacagttgtagagcagccagagactctgggtgaacagcacgcagtgcccccaaaagcattgctgctgaaggcaaccggctgctctgcttaaaaaatcatttgagcagccgacagtgctgacagtgccactatgtgggcagaagcacagcttgactcagaccctgacaactgttgatctgggagagggaaagagaagactgtttaaaacctgttgagaaggtactgatgacatggagattaatttgacaccagtccctcagaggtaggtgctaggcatatcgtagcaactgtttatccaggcctgaactcaatattggaatgcccagaggctataggagacagatcaacggttattccttttatttccatctaaaactgcattaccgtggcctacggtaaaaatattcatttggttggaaccaaccaattgtaattcacacaggtattagattcagtttgtactggtaactccctcctctccttataatctcttatttttaaagacttatgatttaactgccaaaagtgacttgaagctgaaaataaactcaacataaacgagagcagacccttttgaaaaataaaaggcaaagtgatacctaccaattgcatgatctttcatgctagtttaatttgataaaatgttcttaaacctggaaagtagtaattcttgtaaaacctaattgctgtaggtatttagagatgaaaaaacttattatcatggtaagaagaaacatgtgaggtactatttatactattatatcctccctttgaaagtgtattggcccataaaaatggtcaagttcatgaggtttttaaaaccagctattgtgtaaacatagcaataaatttcaaggtagttttttaggtataaatttaacgtatgtgccttctaattgagtagactgatagtgcatcctggctgaaatgttcttaaaattcaggagaactaatattgtaggcttgttatatcaagctatttctcactattgctttatgtttttttgtattgagagagtcaaaatcagtaataacaatgacccagtcattaccacagattcctctttttattgaccaagagggaaggaaggtttcaactcaatgtgattttgttttccttgaaagaactccatgtatatttaatgtttgtatcacttgtcctgctctttccagggagatagctaacagagtatcatgaagggccctgaaataaattagtttctgatgatggtgatcctaatacatcacttgtgtgcctcaaacactaaacaaattagtttcattcattaaaacagataccattccataaattctaaggagaaaaaacttgaaatttattttttgaaattttctaagacctgttgttttttcttttaagaaatacctatgaactgtataatactatttttaaaatattatatacttcttatttgtgaattttatatgcaaggtatcttgcatataaaattgtgaattatatatctgagatattctttcataagcc

SEQ ID NO: 73508 - DNA, 1079 bp, Homo sapiens
tatacctgtttcaatgtgtttatttcactgtaagtgacaagtataattatgatcaaaaattaaaatatagatattactcagaaaataccagccattaggcagtgtcacgagaggatatctgcttttctatctcaaaaatctcaatactgctactgctcaaacatgttcaaagcagttttcccccatgcagtacacttttgagtcccaaaaaactcagtataacaaaaacatatttttcagatttgtattactatattatttggagtcatgaaaatcttccagctacattttgtctgaagtttagtgatttataaacactcttgatctcataaattagaattacataaatatctgtgattcatcagagtagaagcctcagatatcgaatttcttgaaaagttttctaatatttgccctttactaatagatttgacaaaagttaggcttcatcaagtttatctatttataaaaatcatttttaaccctgaaattatttctgcttttgttctttaacccaatttgtttggtattagcctcagagctaaaaatacagtatgatctgagctatccagatagtatttaaaaagctggaaagcagaatcatttctgccagagagtaaaatatttgtaattttcattagtagctacttaccactaataaagagtttacttttaaaaataatcttttataaaatgaaaatggatgtctacatgtgttcttaagagagataatttctgttcagacactttacatgtatatattcagacattttataccaaaaccagaactagctaatgtgtttcattctctcttcattccccacttacccacatccccagataattatttaagaaatttgaatgattaaattaaatattattcttacatgctaagagttttttgtttagacctttcccattatagaatttgtacttacccttgttttaaaagagactgaagctttaaaatgactacattagctgggtgcagtggctcacgtctgtaatcccagcactttggaagtccaagacatggggatgcttgagcccaggagttcgagaccagccctgcacaacat

SEQ ID NO: 73509 - DNA, 2234 bp, Homo sapiens
acactttgagaaccacaagatctggatcacctttatctgttttgagtatttggaatcatcattgattaatatcatattttttattagtctttgtgagccatatatttcagtgtctgatcataataatagctattatttttataaggctcattatatggctgtacaggatatgattaattctatgtcatatcctgtatattatcctctatattcatatgtattctgaaccttggccacattagaaatacctagagagtttttctaatggctccaatatggagccttagctccacacattctgatttaattggtctaagatggggtctgggcactgtatttttttgaaactctctttgtgatttcagtgtgcaaaacaaaattgtaagccactgataggtaaagataaaaaatagccccttttgccaacaagtaacagattgtttcatctgtggctttttttccatccatgtgcctagccactcattctctttttttaatcagtgtggtatgtttttggttcttgagtataccattttgttcttctcttaattgaacttcatcctgtttttgatgaaccgtttctctaatctatcaaggtcattttaaattctatttcttctaaagcatttaacccctgcccaactaagtatcatctgcaagtttaatgagcagattttcaatttcctaattgagactgtgctcattaagttttaatattttataattttattgcaaattatttccaccatgtgggtgattctaccttgaccttgccctggctgtgcacattttcttcattatcaatgaacatttatttagtgcttagaagttgtgtggtattgaaacaagttctgtgacttctaaataattgaaaataagtactgaatctgacaccatgtagtttgaactctaaggagaatatgtatataacataagctgtatgagcaatacagaacatataagcatttaaacagaaaaactaaacattgaacgtatagttcataggtctgtaatgatctttactatacctgtatagaaaagaagttaatgatgtaggttgccactttactagctgtgtaacctttagcaagtcacttccttcttgtgcctcaggttttttggtcagtaaaatgggaccataatcattccagccttggttctttgtgaggcttaaaatccagtaatgcatgaaaacttatcagtacaacctagcacatagcaagagttcaagtaaattaagagtcaaatgagaaattgatagtaggaagtattttaggtttggtttgacaagactgataataatccaagtgacaaaaggatgattagtctcagatctaccttcttcagtgactaattaagctaatgtggaaccttccatttttacaaactagagcttatttttctgtaagtaaacagtttcgattttcattctcaatttgctatatttgtaattggaaagggtgcttttgcagatcattatagctattaagtggcagagtcaggatacaaactcagaacttctgtctacaagttggttactgctaaatggtagagcggagggaatagattgccccagacataagaggtgagaggagtgggagtctattttagaaagataagatgccaaaaagaataaagtagctagtatttgaccacttactacgtgtcagacgctgttgagtgtattatttgcattgtctcaaactgaggcttagaaaagttaagtaacttgcccaaaatcgtaaagctgataaatgacagaggcaagaattaaacccagatctgtgacagcaaattccattttctaagtcacttcagtaaattgcctttctttgaatggaatcaggagattactttttctggaacagaagatgccctcaaaaatatcagaagtagagagcagaaagataagttggatacaggagttgtgtttactccctggctgttttgtgacagattagatgggaacaatcagctgagggatttctcttcagtttagcatgtatttaaattggttgaatagctaaaaagtgaaggtgtcccagtaggaggaggctggagatggcctagatgagggttttagaaggggtgggttagaagggtatggaatttatatactttatcttcttttgttctttgatttacttaaaataagtaaatgtcaagggtgatctctttgagcccataaaagctaacgctgtttttgtgaaacacacatttttatagcactttac

SEQ ID NO: 73510 - DNA, 1563 bp, Homo sapiens
cacgcctgtaatcccagcactttgggaggccgaggtgggcggatcacgaggtcaggagatcgagaccaacctagctaacacggtgaaaccccatctctactaaaaatacaaaaaattagccgggcgtggtggcgggcgcctgtagtcccagctactcgggaggctgaggcaggagaatggcgtgaacctgggaggcggagcttgcagtgagccgagattgcgccattgcactccagcctgggtgacagagcaagactccatctcaaaaaaaaaaaaaaaaaaaaaaaaaaggatgacccataataactagctttcctaggtagggtttggcttttatgtttttcaatttttttttaccattatatatagcactgtttcttcaggataatgcaacagatatgaacaattttgaatctttttatacatattgcctcactggtctgggtggagtgaagagattatactaaattatactcctaccagcagcctatggacatgtccgttcatctaattctcaataacactggatgtgtctcagaatttttactatcgacaaaatggtgtcttattgttttgcatttttctttagctgtgaaattgcatatattttcatcctttatttgtaactgataaaattaagggggcaaaggaaccagaaacggagtaggagggagaaccttctcagtatttcttagcaaactatgtcatccttaaggaaaaatcagaaacttcaatattattatttcctctttcttttttctctattaggataaattattattactgtttgtgatgatttttcaatgctgccattgagtaggttttatttgtatgtttttatcattactgataataaatactattaactctgatgtactggagtaatgggttggaaataggtgaatgaaaatcagagacagacctaaatcccagtggcaagaaatagctggaacctcagatgggttcacacctccttccccaaggtttttgggtaatgaggtagcagcttaatggatctgtaaaactaactgtgactaaccttagtctacatgatgccatccaatgaattaagttctcttccaggctattttaacagcaactttagcagatttccctccctctctcccttcctccctccctccctccctccctccctgcctgcctgactacctgcctgcctgcctgccttccttccctccttccttccttccttctttccttccttccttccttccttctttccttccttccttccttccttccttccttcctttttactaaatttaccacatgtatctatttaagaaaaggtatttcaatagtgaaggtattagtagattataacttttttaaagtttatgtttatataccctacttatttctaggaagaatttgaaatggcttacaaaaggagacacataataattatgtaattataagagaaaacagatgctataagaaaagaaagttggcttcttagcttatagccttggttctcaaatttcagcatgcaccagaattacctgtggtcttgtcaaaatacaggtttctgggctcaaccca

SEQ ID NO: 73511 - DNA, 1938 bp, Homo sapiens
attaatatctcttgttctgcttgtgttccatagtggactataattattatgatctttttaaatcgtttgcccattctgaatctctcccttttcttatggcaaaagttcagagtctaagtttataaggaatcaatggacagactttagaagctccttgaactctgtacttttgttttaaattttgtgtttggacttaaaaaaaaaaactggtaaaaggatatgttggtttcctcaaatttctcccaaaataaaaatcccttttaaaagaggattaaagaattacttattttgtcgtttgattactgatttgttacacattgtctctgtttctatgtgttgtgtaattttgcattacttaaaagggaagccatttctatgatattaataattgtttgccatttgagaactaaactttcatgggcatgtcaaattcttggtgaatctacagttttagagacaaataaattgtttaacctaaacagttacaatccaacgaggtggtgctactgtggaggttcactgagcatacagaggaaatgacgtcatgtgtacctgggatagtctttggtcttactggatctctcaagctggaaggagtgcagggctcatctgggtcatacaacttggaaggagcaagaaagagaaagagaagccagaggaggagcgttctcccctaggagccaccagtgacaaagaagttgggaaagaatagtcaccaaagccacatgttcagaaaggccaggtacaaaaaggatggataagcacccgagcacagattggactgaaggactcgggtatcactgcttaccttgagaaacgcagtattggtagaaactgaagccaggtagccttggctggaggaggagtggagctttttttctttctttctttctttttttttttttgaaagcctagatatgaagaaaagaaaaagtaggaaaatagctgaaccaaatggtttgtgatttaatgagcatattatgtttctttgccattcatatgacaaaggctttactgtctttgtattctgaaaggaagtattaatagttctggaggtgtggggctaagacttaggggagcagtagcttaggttaggttcccggggaatgggatatgaaagcataggtgcagagcacctggacagttacaaaggaaggatgtttgaacagaagtggatgcagacagtaattgagggaaaattctgagctcccatctgataacacctgttttctctgagaattaggagataagatctcttccttaaagtcatagtctctggctgggggaaggaggcaaggtcattggggctgacagatctctagggaatgtcagaagaaagtgatcagggagacacaaaataatttttacattaatggcccagttgcagagggagatgattacttatgtagtgatagtatagtgtgtgaaatccatggtaagaaaagtagccaaggtgcctcccgggccctgtgaaaaagggcaaatgatccccagcagcctaaaggttctaaaaagtaatcaccacgtgtgaccacaatgctcaggcagtaggcagactgggtgtgctatagagcaccagccaagcagagtcatcaaattttctgataggataagatattttgtgttttgaaaactgtagtagttacaggaaaataatgaaaactcttttggaacataacaatgtgtggttcaccagtgtttctgctgttgtattccatctgtagtaggcattatggcagggatgggggaccctactgcagctgagtttcttccaggcatgtgccaactgcattatgtgtctgaaatcttttctaagaaaacaacacttggtatttatttataagataccattggatttatattttactttatttgccctccttaaaggtcagttccaagtagccacagatatggaaaccacctgtcagtattaaaaat

SEQ ID NO: 73512 - DNA, 1075 bp, Homo sapiens
tctgtgccttcttaaatcatagctatagtctcagacttcttaggtttctttttatatatagagagagcatcttttctctcagaatagaaaaaaattctggtaaagtatcctcctggacgttggggctaaaatgtccctatatgtattttagcaaactgacctcaagcattctaacttcagtggacttcagaagcagacatctcatgcactgaattatccagcctttgtgctgtggtccaaacctctaccaaaaacactttggttacaagttgtacctgttatcttttgctttggctgtaaaggcacaggcagaaatgaagtatgtgctaaatctttatttattcagcaaaatttattaagctgttgctaggcacttaagatttatagatatcttccaagaatgcaccatctagttgaaagacagactagtaataattgccctacttttggtaaatgccaggttagaggcaacaaaaaattttggcaagaccaggaagtcagaaagactgatccagacttcatgaggacagtttagagctggcttccagaaaggatctgaaatgcaagctgagacttgaaagatgagtagaaatgaggccaaaacccaagggcaagagtgagcctagcagcagcagcagtagtagcatgtatgcaatttttcaggaggtcctttctgaaccccagtctgaaccttgtagaactgtacattctagtaacaccctagtcttcccattttataatacacactgccctgaagatgtttttattcagtgtctgtcacagtactcatgagtttcatcagagtggagacaaggcataaaggagcatatctgtcttgttgactgctgtaaccccaatacttagttggattggtatcaggcatgtaagtgtttataagaatgtgttgaatgaacagacatgtttatgtttatacttgaatggaactgttaatacatattaaggagtaaaatcaaatctcttaatgtcacccaaataatttgatatgccagttgctaaagttccagctgtgaacacagttaaccgcttcccatctcctcccttgaagttatctatc

SEQ ID NO: 73513 - DNA, 1158 bp, Homo sapiens
tattgatctgtgattttagtagactgctgtgaaattctcaagttccaatataactaaaatagtaaaaatgtgtgcatgtacatatttgctatgagattgcgtactcgtatttttcatccttatattattgccttgaggttgtgtcttaggttcttctatcaggtctctagtgaattttttattattataattatctgaagttaacattcaatcattgctgatcagtgttatccaaggcactctttctcataacactttttaaagtagtggacttactatatgtcaagatacaatttgaagtattaaatctgtcatcttgttttaatctcccacatttgccagtgcagttagaaataccttaactggcattttggcaaaatggtaagtgtagatgagcttcatgtggtattattgtggaaggatgtgataaaatcactaagaagatgaattaacttagtctctgatatttatctaagatggactcctgtcaaaaatctctaaccagtcctccatgcccaaccgcatagaactctctgctctgttcagggtaccatttcatgttgattggcttttatttgcttttgtttttttccctctgtgttatgtccttgggttctgcctaccttccacagtcaaaacacattcgttgattgtgggtgctgtttttcaaagtgagattgtcactaatgtttgccagatttataaatgtaaaacaacttgacagattttgtatgagttttttgggtgcagatgacttaagttctggaattattaacatgtgactgagagaaaaacctgtgccaatttctagggaagctaaaataattattaggtaaataagaaaaagacatggatgtaattatcttttaataggtgtggggatccttactgccgaaggtaaagtatatatagtaggtgcttaacaaatgacagtaaaggtaaaaatatactgcagtctcttaaataggtcttttttgttgtttttgtcttgcctttctcttgtataacaatacaaataaaaagagttggaataagagaagttcactgtgaataattaagtaattcctaaatttagggttatgatttagagccattgtgacatattttacaatggcaaaacctgtagagagtagatctatcctgatcttaaggatgatt

SEQ ID NO: 73514 - DNA, 1028 bp, Homo sapiens
tctctagaatcccttttataaaagcactaatctcattaacaaaggctctgcccttatgatctcatcacctcccaaagccctttctcctaatatcatcaccttggaattaggatttcaacatataaatttggggttgggggggaacacaaagattcagatcatagaagatgggttccctgaatagcaattgcccatttcttggtgtttcttactgagttacaagcattctttattttaagaaaatcagaccgagggaatgccaatgtttcaaatattttttccagcttatcctttcattgtttatgtgtacagtttgttattatttgattttttattatttttaatagaaacaaagtctcactatgttgtctaggctggtttcaaattcctaggctcaagtgattctctctccttggcctcacaaagtcctgagggtacaggcatgagccactgtacctgtcctatttgatttttagatatttatattacttttggattttcttaggaatatcttcccattccagaactactgaaaatatacttttccatattctctgctatagttttacactttaatcttttaatgttgaaatgtttgatccacttggaatttattttggtataaataacaaggtgagatccaaataggctaatgctaccacagtagttattgaacacatttttttaatcttctactgatttgaaatgccacctttatcatgaattgacttgtcatgtgtatttgatatgaatcaccaagtgtagtacatgttacacattattattattgttattgagacaaggtctcactttgtcacccaggctgcagtgcagtggctcagctacgggtcactgcagcctcaacttcctgggctcgagtgatccccccacgtcaccccttgagtagctgggactacaggcatgcaccaccatactggctattttttttttaagagacaaggtctcactatgttgcccaggctagtcttgaactcttgggttcaagtgatcctcctgcctcagtctcc

SEQ ID NO: 73515 - DNA, 1360 bp, Homo sapiens
atgaggaagactgactcaattgacagtttattctgaatgagagggtagacttgtgcgtgattagatgacagtgacccagagggatggcagcagtgtaactgaatgacatgtgtctcaaaggcgggtgctttttacatgaggaaaaaaaagtgacagcctgacatagcagctttgatcaaggagaaagcagacattcccatgtcctccacctgtgccctgcagactttaagcacgtgagataggaggggaacaagcaacatctaccagaaggggtgagcagagatcatctgtccagtttccaagtagagcccattttcaattaagagaacgaggtgaaaggagtgtatggtgaagaaattgaggtagtagagagattgttcatgctaataatgctggaggaaataaagatcagaaggacactgttgtctaagaatgatggtgatggtggtttagctgccttcaaagttttagcccaactacagcaatccccagtggctaggttgaaaggaggagtcaggaggccatggcagattgaagtaattctaatattttcagatactcctggtctcaggaggaggagtgtttctggtctttctctctgaggaaggagcatctgtgaatgacctgcatctctcttattgtcagattctgggagaaagctcccgtcgaatttggggaaacgagcttgtgcttgcctgctcctgtttcctgctctgaaagctactacctctttgtgccttaaagcatttcctaaaacacctttaaatataagtcagcaaacctaaggatctgaatagttatcaattttcatgtaacacctctctcaataaaagtctatagtggaaagaatgagctttagaatcagaaagatatcaaatctcccctctgctaccaccctatggcagggctttgggcaccttactttacctttttgagctccaagttccctaactttaaaatggattagataatagctactttgaaagaggggagtgagaattaaattagaaaatctaggtaaaatgttccatacagactctagcacataggcattcaatcaaagtgatagttcctagtgtgtcttaattcatatttaaattttttattctttattttatgtatctcttgtttcctaaataaaactgttcttgaccaggaatgatggctcacacccgtaatcccaacactttggtaggctgaggtgggaggattgcatgaggccaggagtttgagaccatcctgagcaatatagtgagatcctgtctttataaaacaaaattttttttaattacttgggcatggtatagtctcaggtactcaggaggctttagcaggaggatcctttgagcccaggagtttg

SEQ ID NO: 73516 - DNA, 1031 bp, Homo sapiens
gatttgcttttagagaaatggctctgtagcaaaaacgcagatggatcagagggtgttgggactaggaggaatgagactaattaggacacttgcaattttgcaagagataaatgtagaagacctgaactaggatgcactgaaaagagaagacaggatggatttgaaaggcagtttagaggcagaatcaatggggctttctagtggattgggtgtggggagacagggagaatacttcatgaacaggtaggtgatgctgctcctaccagctttagaacacatagattttacatctccaatttaaaggctttttaatcttgggagtgttttttacctgaatgggcctggcatagggtaagaaacacaacatctgcacagtaactattaacttctttcatagaggaaaataaaaacaaatttgttaataaagacaactttgcaagtttttgtagctagattaaccgagaacctctgaaaataaaccatgtttagctcatgaggataagctggaggtggccctttcctggagaatctgaggcatggggttcaggtagggcaatggagagaatgtgtcccattatccccttgaaggaaaacaggtcagtcccactccttcctcttcatctaaaactagcccaaacattcagttccaaggctctaggattctcattattgaagtctgcattcgtttattttgctggcaggtgatattgttgtagtcagtatttggttattgttttttcattaggtactaattacaccttatctaacattctgaaagacattcccaaggctcctgtgtgatttgcttttgtgaccattaaatttctgacaaaagaaattataaaaatgggcattgaaatacttccttcattagcagaattattagtgtgatggtgaaaaaaagtatttctatcaaaactttctttcagcaaatatttatttatcgcatattatgtcatgatactatcctaggcactaggggtacagcagaaaataaaacaagcgagtgtcccggccctcatgggcatata

SEQ ID NO: 73517 - DNA, 1049 bp, Homo sapiens
aataataataataataatatagatcaataagtcatagactctgttctttgattttaagagacagattaaaaaaaaaccatgaagtaaaaaaaaaaaacttttccttgtcttcctatagccaaaagtatgcatttgcaaaatgaccagtctgtgttgaaaaataatgagttattgttattttgataaaattgatatatttataaattgataaataaataataattgataagtaaattaattaaaattgatatattgataaaattaatgataattgtcagagaaaacttaatctttaggcatatttcttgctacagagaattgtgtgatttttagatctattaatttgaaatggaaagtcatgcagttgaacttttgaaatgctagcaagcatctgggctgctgattgtttcagcaaccgatctagcacaaccattgtgcttcttatccttttagcccagcttatagaccccagtatttctatagtattgtttgtatatctttcaagatggaaatatcagtgtgtcaaaaggtcataggtggagccaggtttttctttttttattaataggttctctcttttctttgtattttgggtcattctgacattaaatccttaaagttgaaggaaatctattcattggtgttgaacttggtcgtgaaggttgctcaaagtctaaagtgattatctcaaagagggggaaaaaaaacaactcagtagtatttggcatttgatgatgaataaatataccctagggcagactggggaaattaagcaaagaaattgaatatttatatgttacatgtaaatggtataaataggcattagtgtttagatgaaattagacattattttgtaataggattttaaaatattgtttcctggatagcttccttcctcagatatccaatgtttttcaagagaattataagcaatatgatagtaacagagttaacaatgagggcagccttaacacaggctagaatgccccaaggcaggaagaatatgacagactagcatagtaacagaaaatagatgactgactgtcttt

SEQ ID NO: 73518 - DNA, 1583 bp, Homo sapiens
agaacaaagcatttgatttcttacagtaactcttattaccaagtgagtcatataaccatataacaaatatattactacatgcttatttattgataacttttttcatttttaaaaaaatcacaaataatacagtcaacttttttccatattatatgtagaatatgctttttgtcaagtcatgatttttataacatttgaaggttttatgaaatagaggttactagtgtatctaatttagcacttaattactgaaaatatgttaaatatcagttttttatacttttaaattgatacattgaattttatgcatatgatatttgacaaatatgatcttcaataaagacattgtactattataaaaatatgtgttatcatttctattattattttattggtaaaaaacgaaatatagcaaggccactttttattgttcttttattcatcaagtttttttctatatgttgagattacagtgataaataagaataaaaaggttcctgctgtaatgaagtttaaaattctaatgagtgcttcaaataaccaaatatataaaataatgtcagataataatttacaggaactaaaataagataggataatgagatggagactgcttaggctggtggtagtaacaaaatttggtctcagagaactaaggagactattagtatgtatcaaactttctagtttaaatattgtttaataaaaatcctcagaagttggtaagatttatataattagtgtatgtggtttttggataaccaggcttataagctgtactatatgtgctaatatggtgtgttttttaaacactgtgaggatcagttgaaactttatgtaatttttcttcgcaggtgttatattttagtacagaacatggtactgctcaaatcttcgtagaaatttttagcccgactttctcagccttaaaagaatgtggaagggtgaattattgaatttacattagtgttttgttacctcactgggccaggaactttttgttttagcttattttcatatgtaaggcacatacccctggatgatggaggaagagagaaatcttcacataactctgccataaacccacagggagcttccttccatatattttcatggctttagtattttctccatgcaaataagaactgaattttttcacaggtgtagaaattcttgtatcactatctgaggtagcacagtaaattaaattcctgttctttcttacccatagtaaatcattacttgccctcagcaagagaacaggcaactatttccaaatctactattatttactatcactatcatttcagaatgtgatttttgttaatagaatgaaaataaagataaaaatagtggactaaatttctccaagaagaaaaatgaagcattaaaaatccttctgagcaaccaaactaagaaagcagtctcctattttcatgttatagtgttaaaacatgatgtttttcgtttttgttttctcatttttttttaaatgatgaacctgaaggtctcttaaatattcacatacacagttttggttatttctgttgaatgttttggtattacataaacaagcaagttac

SEQ ID NO: 73519 - DNA, 1007 bp, Homo sapiens
atgttttaaagatgcaggtttaagtttaataacagtcgtatttatagatacataacatagttaacaagggtttctgtgcataccttttagaagactgtattactaacataactcaccattatctaaaagataatcatgtttctaccttaagcatattttcaaatagataactttccattttgcgggatgaatcactggttaaaattgatcatttttcaaaatttttttagcaagcaataaaggagaatatcaaaaaaagagaagcagaggaaaaagaaaaacgtgtcagaatagctaaagaattagcagagcgagaaagactcgaacgccaacaaaagaaaaagcgtttattagaaatgaagactggtgagtactatcaaatttgttatttattctatgtatacttaagatttatatgggctgctttattagtatattaatgaacttagtgaaaaaggaaaatacaaccacttgtttctgtaattaaaccatagaacaattctttctttatggtcttctttcccttccatttactaacgagtagtgtagtgtcttcattccagtgttggtcataggtgatttggtcctctgttatgctgttttcgttccagcgtattcacgtttctttaattactacctcaataatcaatctttaataatgtatgtcagttaataaagtaactgtcagaaatggactgtggaaaattctataggacatgtaacccggtttcttcaacaaaatatcccaagggagggaaaaaaagtgatggaggataaacattgtttaaaagaaagagacttaagcgacatatcagccaattgtaatgtatggaatttatgtgtattccaatctgtggtcccagctactcgggaggttgaggtgggaggatcgcctgagcctggaaggttgaggctgcagtatgccttgatcttgacactgcactccagcctgggagacagagtgagattttgtttcaaaaaaacaacaaaaagaaaaaagcagtctg

SEQ ID NO: 73520 - DNA, 1078 bp, Homo sapiens
gaaagtagttggaggcagtgcggtttatttgccagctgactaaatataaaacaaggtcaagaaaagatgatggttttaaaaaatcaatgtcttatagccaattgtctttatatctggctaacccttaacttttctttcttaattcaaatttaggatggaagtcactaagaggcagtcatatccagaaaaatgttgttctcatttaattattcagtttttctgttttaagctacttttacttcttaacatttagaataaaagaaaatctcaaattactgtttgaactcggatattagtctcagactcacctatttctgtgctctctattggtattttttcagctaaaattcttctcctaatagttacaatatgagaatatggtatgttttaaatgaagtaggcttttaaatgaaaatcaatagtgcatttttcatgaaacaaaataggtttaagaactcctttagaccttatttctaaatgtaaacattgttttataggtcttggaaaagtaattttcactttttattacccatgggaatgctaaaagggtgtggcaattatatctgatagcagattgcctattatgtactcacatttaaatgtattcagtcattagagtagaaaattcacatcagaaaatgttataccttaattagactcataaataagctacatgatatattatttatttattgtaggttcatcttgttcatttctctcaagcaagaaatagaattttcattcctgaatatttgcttttcctttctctatcacaacctatcttcttaccccatctcccttatagatacatacatgagtatacatgcacacacacatacagatatactcacttgtctttgaacccatgattatcttctcctacctttcttatgttgaatttttttttttttttttttgagacaaagtcttgctctgttgccaggctggagtacagtggtgtgatctcggctcactgaaacctctgccgcctgcatcccaggttcaagtgattctcctgtttcagcctctgagtagctaggactacaggtgtgtgccaccacacccagctaatttttgt

SEQ ID NO: 73521 - DNA, 1008 bp, Homo sapiens
tagcctctgctctaaaggttgtatttaaagaagcaacaaaaaacagattgagagacaggaagccataggtactatgaaaacaaatgtaaagaaagtacacaataaaacaatgttacataaatttataaattgagtgagagagatttagaatttgggttttctttattttagtcaagggagaaagggagatacagatattaattaactttaggtcttgttaagttgctaaaaatttatttgtgtaataaaaatacaaggataaccagtgaaaggatagaaatatcaagtataaattctaaactgtagtgagagaaatagactaagaaggatacaccaaaaaaaatcaggaaaaataaaggcataactaaagctagacaaatagatggaaacaaacattttataaatcacaataaattttttaaaggactgtaatatcgtataaaaaataaaatctggttttatgctgtttataagagacctccctttaccctatggatatagaaatgtttgaagtaacaggacagttaatgaaatacaaggcaactattaatcagaagaaagggaaactatgttaataggtacaattgactcaagacattaattacttcatgacaacaaaaagcttaattcacgtgaaagatacaacaatttaaaaatggtatgtgcctaataacatagccccaaaatgacattgtaaaaattaataaactatatcgataagttgacagatttaggattatgttaggaaatgtcaacaaagttctttaacttactgataagcagaaaaatatcattaaagacaagcgttaaacaattaacagacttgatttgattagtgtatatagaattcaaactcgataattaaagaatacacattttttcatgcacaagttgaacttttataaaattggttacatactagagaccatgaaatctcaatacatttttcagtgccagttttatttatttattgaccacaatgacatgaaattagaaataaaattaaaa

SEQ ID NO: 73522 - DNA, 1062 bp, Homo sapiens
tatagagagatcctgacttgcctatcattacatagctgccaaggagctaagattctttccaggctgtctggctccacagtctataccatatgtggctgacctgcgttaacatctattaaatgcataactgctattgctgtgtcaaacgggactagcttgaaacctaacccctctcccaatagaagaaaagaaaaagtggccatttttttggaacaatcgtttggtttgtaaataattgatctaaaatatgtatagtttaagattgtcttgggatttaaacttaagtagttaaaggctgggtttaaaagctttttgctatacctttgactaactcatacagtctctcctcagtgtttctagaatctcacgactaatatgtatagatacagcccttcgagttcatttttttgtttgctctatgagagccttgttacaatagctaaagaaggaatatctgttccagactgctgcctcaagccatgtagaacaagggggaaaagtttcaaaatcttgtagcttctctgaggaacagctgtttattttgacagcagtttaactcacttctcttctacttgagaattctcaactgggaattaattttttttttaaacaatcgactgtagataatgtgctcattgggaatggttctattttgaactactgatcagtttcccaagaaatagggagtaagtttgcattgtaattttctttagctttatttttgttaccatgatcaacagaacaaaaccaaaacaactgtcatggtttgaagttacttcttactagatccagtgcccagtgctttgcatggagtgtcccacctcgtctttcagtgttttttttttttttttgaggtccagaatgtgacaggtgagataactgcagggtagagaagctccatgtctttgcagagaagcttcagagttggtagggctaagactgaatggaagcctgcctgactccaaggcctgttctttaacagcttcaggtacattgctgctcagagagtttgcaagaaaagccaaggttgtaatttttaagagtgtttttgataacttacta

SEQ ID NO: 73523 - DNA, 1074 bp, Homo sapiens
tacacgcaatttgcctttgaataggttttacattcgtagggtttcctttaggatactttaatagggaggtcaggtctttgatgtggaatcctttcatttaggcattaaaaatatcttttcaaacatattagctgattaggtggggggaagaaaagaactacacacatattaaagtgagaaggcattgttgcctccctagggaaactggtgacatatttctacaatgaaaaattgttattcttaatagatgggtaagtcatttctgtattttagcaattgtttgtggcgattaaaaagttttgaggtgtgaagaaaaagaaggttgaatttaaagaactggttctttttaatctcaggaaaactttattgctgaggttgttggacttggttataattatttagttaggattagatagccttttaataaaaacactatttttaaaggaaaactaatttacaggaaaaatacacatttggtcacagttctaatttattttctccacaaattcaaagcaattctgtaaattatttttcattgccagaaatgaatttggttaataaatatgatatacctgtatgtgtcacatactttgcaatatattattttaaattttgtaatgttttgtaaagcaatatggcttagtggaaatagtaaagactttgcagtctgagagagctagatttgaatttcatacgagttatgtgtctgaagacttgtttaaccttgagcctcagtttccacattggttttaaaaaagtaatgtgaattccttccccataaaaatgttttcagtattaaatgagataatatatatttaatgtttatcatagctcctggcacatggtagttgctcaataaattattatacagtaaagggttaattcagcaggcttggggtgctcaaaaccttcatattccaaagaacactggcccctgactggctactaagagacctagaaatatcctgcctgataagggcgttttatatacctggggccttgggccaacctatatagatatgctaatgatgtgatttatgttgaacacctgttttgtctacctggggccctggg

SEQ ID NO: 73524 - DNA, 1112 bp, Homo sapiens
aaagaaagcttgacatttgtcattataagtagcctctgataccttttctttcccattgtagataagcttggacaataaaaaacacttttccccatctttcccatctactcactgttccctgtcaagagatgattttgaaaaatgttcaaattatatttaaatcagtccaattttaaaaaatgttttctttttgtctctgaatagactgatgattttgtagtatttccaatggtcaagaattctaatgaaacttatttctgaagtgtggtttatttgtgtgtgtgagcatttcttaaattttgtcttacgttttaaagactgtcttactgaatttcttttataactagattttaaattgaaaggttaaaagtgaaatttatttttattttataatgaattttcttacattattgtgagttgttttcatgaatgttttgtttctagggtgtcttaccttttatatattataattttgtcctttccgggcatttaatatactctcttttagtctctgtagaaacgctggaaaagaatttgaggcagatgggaaggcagcttcaacagcttgagaaggaattggaaacctttccccctcctgaggacttgcatgacaagtttgtgacaaagatgtccatatccttttgatagctaaataacttaagtcactagtcaactagagatacaatttatttaatattttagatgtctttgtgtaaccagagatcattctgtagtgccaaattacagaaagtttaacctttgccttcttgcagggaaatttatcaaagtgtctgtcaatcatgaataatacacaaatgtctgtctgtctgtctgtttgtttatttatttatttatttattttttgaaacccaggctggagtgcggtggcatgatcttggctcactgcaacctctgcttcccaagttcaagcaattctcctgcctcagtctctcaagtagctgggcctacaggcacgcaccaccatgcccagctaatttttttgtatttttagtagagacagggtttcaccatattcgccagactggtatcgacctcctgacctcaagtgatctgccagcctcagcctcccaaagtgctgggattataggcgt

SEQ ID NO: 73525 - DNA, 1041 bp, Homo sapiens
aagaaaaaagttggaaacgggaagagtaaatgaaacaccattggcctaatcaaatagaatcttggttgtggataattgacaagcagacataaaaatgaaagagtataacataggaaatatatgttaccactatgagcaatgcacagcaaggtattggaataatttaaatagttaaaaaggtaagaatatgtgattcttaaatttgagacaatgactcagataatagtgtgtattattatagcatttagtgtgtaaattcaaagtatcacagaaagggaatacgtgagaaggaaaaaaaaaacctactgagaaaatatgcatgagtgtaaatccagactagcttcatcatagtgggagcaaacagttaaagtaccatcactcttcaagcacaaacaagtattatatgtggttctcggaagagttcaatcattggactccttaaacgttgcatctgagaattagattgctaattttttaaaataagaaaatacatttaggttttattaaaagctgttaatgtcagaataccaaatgttattttctgtacaaccaggttaaaaaaacaataaaacaccatttcatattcttacacattatttttaatgtctccttactattttattcttttgaaccaagctaaaattaaaaaaaaaacaactcagtttcattttgttgggcatttagattgcttccaaggatattcctatccttatagataaaacttgaattgcacccattcttcaggattaattcaaatccttcaggattaattcaaatcctaagaatggcagattaccttgaattactgtattcattctttaaacatcattttatatagttcacattgaacaaaaacaatagatttttttttaacctagaattcatttgtacctaaagcaaatattttaaaagttggtttaggtcactctatcttctttttgcactattaaatctttttcctggtgtcatataaaattgactatgaaaagattttcagaaatgatccttaatgtctgttctgctgggtggctagtatattct

SEQ ID NO: 73526 - DNA, 1002 bp, Homo sapiens
agtccctctcccacctagctgagaagcactcactcattggggtagctctatcttcagttaccagtagctggcttcctctgagggcagcctagactttaggcacctctgagaatgagccaaaaatgtgcttctcttacacctccctactggaattctgccctctgaccagacatgtacttctatatccatacggtacaatgaaaagtaaatatttggtctttgccccctggttcctgacacgaagctcctagaagttttggaatttcctgagtgacacatattttgtatgttaatgtagtgactaaagacaggtaggggtatagcttcaggatgaagactggtttctagaagtagtaaacatacgattaaagggttagaactgtgggcttatacccaatgtatgggtgcgagaggggctgaagattgagctcaatcacaaatgccagtgatttaatcaatagtgcctttgtaatgaggcttcaataaagactgaaagaggttgggggagcttctgggttggtaacacatggatgtgcttggagggtggaagtgctggaagggcagtgaaactgtgcaccacccccgtcccaccattccttgtcctgtacctctcttccgtttggttgttcatgggttgtgtccttcataataaagctacaatcataagtatagtgctttcctgatttctgtgagtcattctagtgaattgtggaacttcagggaagggagttttgggaatccccagatttatagcgagtcagtctagagtggtcctctagactggcaactggcatctgaaatgagggtagttttgtgggagtgagcccttctacctgtacagcctgacactaaatctgggtagttagtatcggaattgaaggattttctccttaacttatggagtctgcactaactccaattgtaggacacccagttggtattggagaattagacaattgattggtgttggaacaatgtatttggtgtcagagaaaaaatcaa

SEQ ID NO: 73527 - DNA, 1976 bp, Homo sapiens
gaaaagtgagtttaaggtgccagctaaatattaaggaaacatgtccaaataggccattggagttcaggggaaggatctaggcttgagaaaaaatttggacttttttgaagtccagctaatacacaatcttggaattgtgaggctgacctggtctccaatagcagcaagtgaaaactagtcttacttgaaagtcagtcagtctgtgcttaacatttcccctgtgacaaagtaaaaagcagtaaaattgccctcccatgtacatgtacacagaaccattatactaagggaacattttgaatattgttattaaacatttctgttatgcacctcttatgtaatatttataccatggttttgaacatcttatctaagggaattctgaaatcttataggtaaacatgatttcctttgagatgggcttctcccactaatacactttctcttctaaaaggctgccgcctttaataccctctttgtacttgtaaaggacagggctggctctttctttcaggggatgaaatagctcaacagaattgactgggggcctttaattggttgtattcatttcctctacttgccttctccctttcttctttccatgttccatagcagatgaaggcatttctcttgcagtattatgtaaaaacaacaaaaattaaaccatcattgcatacagtatagtaaattaattaaggaatgcaaattccatttgttattacctggggttccatcaagaatcagaacaatgggaagaaagaagatctgagtcaggtaagtcaaggaaggtacaactacttgatgaggatgactggctgttcacttagcattgctcctttgtctttcttttttttgagacaagatctccctctgtcgcccaggttggagtgcagtgatgcaatcattgcttactgtaacttcaaattcctgggctcaagctatcttcctgcctcagcctcctgggtaactaggagtataggcaggcaccactacccctggctaatctttttaaaaaaatttatagagatggggtttcactgtgttgcccagtctggtctcaaacccctggcctcaagtgatcctctcacctcagcctcccaaagtgctgagattacaggagtgaaccactgcacccggcagcacagtttctttcaatttatctttgcctgttacgaactaagctacaatttatttttactttgattttttttcagtattgttttagttttgtatctttttgtcatgtaatggattttataatggtattctagaatttaggttttgttgtagacctacttaatagtcaagatttttttttatactactgaggtttgttttggaccaccttgtccatacaattttattattttaacttgcatttataaaatgttgctatagctttataaaatgcttttattattacagttgtctaggaagaaatatattgcttggagcctgaaactaaataattttgcacatgaaacaattgattctatgagtgtaggaaggtttgatttagtttgcatgtttaaattgtctatggtaataagttgttctttaagctttccttaaagaaatcaatttccctggattgtatcatgatgtgtaagagtgagtgtggcattttttagtaagcttattatgaaataatgaccaacacctccaggagatattcatagaggatttttttttttaattacaaagattatgtaacctctcctttcttacttgaaatcttaatctagtaaatcatagaggccatggtgttataaaaagcatgtattcatgactgctttaaacttaaatatttatagtttcgattttaacttttactctaaagcttctttaacacctctggtgtataattatcataataataagacacttggaggaaagcctgtgtctttgattttaatgtctgggatatttaatctgttatattttcctgtttcatttttaacgctcttatctggcgaggt

SEQ ID NO: 73528 - DNA, 2634 bp, Homo sapiens
aaaagacacgttaacctctttgttgctatagccttctaaaaatgccagttacaatttgttagtgagtttgatacatattttgaataatcagtattagttattagtttaattgcattttatatcccctgcagcagagtcaacaacacagctaacattatattggttggaatcattatgtcgtggaggttgtaggttggggcctcataatttgtgtacgatatattatttggtctttcaaatcaggagtagaatattagaatgttatgaaaagacactttttttttttttttaccaatatctgcctatatgatgtagttaataggttacattgttggtggtggaaatatttatgataaaataatttagttatagaagacaaccatgtgggatgttgcttttattgactggtcaagggaacaaaaatgttttctaactgttacaagctgtactgttccctcataaattcctatgttaaagccctaaacctcagtatgtcagaacttgactatgtttggagatagggcctttaaagagaggagagttaaaatgagatcattaggatatccctaatccaatctgacctgtgtccttataagaagaggaaatttagagtcacagccattcaggaatgtacatgtacagaggatagaccatgtgaagacacagtgaggaggtggccatctgcaagccatggggaggggcctggagcaaatcatttccttatgcccctcagaggaaaccaactctgccaacaccttgatcttggacttctggcctccagaattgaggaaatgaatttctgttgtttaagccactcagcctggggtattttatgaaggcagccctagcaaactaatatactaacttaagacatttttctcatttgcttagtggtctttggctatagaatacagtagcctatactgaatggtttttcactttatcaaatcagttgaagtagcagttgtagagctgctgtgttggatgtgcactagtaatcaatttagaaatatcaaagattcttctacaaactgaattatcagatgttttgaaataattgcaagtatgcttcaattcctcttttgagtagacatgaaacataaagtagtacatgtataaggatatattaaggcattttaaataaatatattcatgaaaattctcatttaatttcaggattagatctacggcatttcctagattttgttttagaatacagttaatcatactataccaagtttttgttttgtctttttcttttactcactatatccatatatatatatatccataaatatatatatgtttcttttccatttctccctgttttgctactataatagttgtaattttcatataagcaggtaactgataaacattagtaacactctgagttatctcttgacacctttccaaaagtaaggcataggtggatgatgttactttttttttttcattttcctgtgggaataatgaaagtatttagtatatccaagttgtgtagtgctggttctacagatagactgtggagtaaaacctatgttcgtaaagccagcttatgactcctaatggttttatgtctcagggaactaatttgactatctgcagtcatctagtaagtatacttaggaatttacttaggaattctaaagcatacattagtatactttacatttatatttagtaagtatacttaggaattctaaaataattttaatgttaatataagccaaatataataaaagttaaatttatttttaaaatataatttatatatgtttgcatatacttaccaaaatgttagaatatgtacaattttatgttcaataaattaatacttttttcacaaaaaggtatgatgagatataactgggccattcccaaggtaattacaggatttgtgaaaaatatttgtagtgtattgcaagtgtggtatagtggtaagagaccacatatttaaatcctgccagtttatttccagggattatctgtatagagttggcatgaaaagtttaagttgtagacttggatatgagattgtaagagtaatcattttgcagtgcaaatataaactgtgttggaaagcagcagagtggaatagaaagagaatgtcccaaaaatcactagaaggattaaggattctgtagattgacattaaagaacactgggcacagaggaactacttgcagctaaagattgctttttgagatactgagctaggaacatttcctgaatctgctgtggcttgggctaatagatgatgatgaagaagaaaaccacatcaggaagacctctatatctttttggaggttaacaggctgaaagtgtcatcaatacatcattaatcttttcgagaaactaacagtttacagtgtttgcagattttgggccagctacggatttgaagtagctacttgagcagttctgtcagtgtcacctatgaactatagcgaacatcaagtaacaggacagtatcaccagtgatgaccaaggttttagaactctcttacacttgtggctgtaaagcaatatttactgcaccttagttttgcaatatgaagtaggtgaaagaaaatttcagaatagtatattctgaaggacagtttaacataacaaatctgtgtactacaaaga

SEQ ID NO: 73529 - DNA, 1029 bp, Homo sapiens
ttatttgttgttaggtctccaactactacagtagctagtaggcattctatggatatgtgccaagtgataaatggatgaatgccaaggatgtttaaatactactattaaatagactcataggttactctgttttcctaggcattttccatatttttttctataaaacattgcatgctcgattaaacttattccttttttgcgacaaataatgattttcaccaagcagcaagtcaaaagtagtttttcgagtatttaaatatttgtttttcaaaaacgaaatcaactaattttacaacttttagtccttatctacaaaatacagtattaatattatttaagtagacagaatatcaacatacttatgactctgtgttttttctccctcctgttctatttagctaaaggacacaaaatcagcagatcagaaaacaacgctacttcatttcctggtagaaatatgtgaagagaagtaccctgatatactgaattttgtggatgatttggaacctttagacaaagctagtaaaggtttgtgcctttttaagaaacatttcatggctctgatcttcagtgctaaaagactgaaaattataccttttatttgtatgtactttccactttctcacagtgttttcatacccaatatctcattttaaaaataaagagagttgtaggatattatgagttgtcatgattggagctatgagtttaatttgtttagttagatgatgaggccttatattataaaatactttgttttacagtttaaaccttgtagatacctgctagccctaccttctactgctaaatctcctgcactttttggccagggtgatgctctcttgattcaatgtcattcataggcactgatagcctattacatacctgataccagaaccagcaatcagtgtccctccctacttacctgagtaccaaatctatctctgcccaacttgttggtgctctctttttttgttatagaagacaccatactgccagagtttcatttcactctttcctaatgcccaa

SEQ ID NO: 73530 - DNA, 2107 bp, Homo sapiens
ataatactagtttggggttgtaatgttttaagcacttaacatgtgttatattatttggctaatgtctgtctcatggtaagtaccaaacattaatgctgaggatgctactgtcatcctcagcattaatattattcacaggttgtattcttctaaaatggtaatggtgccattacaagatttttcagaattttgtcttgtttctggtgttcactaatgtccacagcatctaaacatctaaatattcaatgctgctttgatacatacctagattataggaacataatgatgcggagtagagttattaatgtgataatattcttaagatgtaagtttcattatttcaaacaggaagggattccagttccttgacttctgaagatcacgaagatgcttagtttttattttagggtttaaatttaaattattaccatgtgactaaataaatggaatattctttaaatgtcatccagatttgtgctgaatacctcaaaaatatccccaaaccttgcactgtaactgcaagggagttttactgcagactgacaactaggccatgatttattacaggatccacttttaacattattttgtctggaatgaacagagtggttggagaaactccatccatcttttgtttatttgacatttatgccacgttaaatgtaccttaaagaaacaatacataaataggaaattctgtttaacggtgatgattactcatcagtaagataaatctcttgacagtaatacaaaagaaatcctgtcaagcactgactgttaaagtttaaataaagcatacttttaacctgaagatatttttaaagcaaatattttattttctttccaagatttagcgttacaaagtttacataagttgttactcatcttcaacaaaattaacactgtattccaagctttacttgttctagctcagaaactgattatgatatgagtgagtatgatatgagtaggagtagaatgtgcctttttagttggtaattttcattaatgaaatgaaaaaaatattgagcaaatggataaggacctaatacattttatgctttgatgcttttggaagactttttaaaagatggttagagagaggggagggagagaatagagtagttgaggcaggaagagtatcttggcagcattgtgaaatttttctagagaatgttagagcataaatgaagaatctctgccctggagtttagagctgcatagtagtttataaatgagacaccatgcatgatcaacaacatgcttcttttctgaacctcttatttattaggcttagtttcaaatttatttacatgaaagtttgagtggtgtctttcaattgttaaatacccattttgaaatgataggaatattgtgcttccctttactattcagtgagtgtactttttaatactagattgttcccattatgctgcttgctactcagttgatgttttcaacaagacaacccatggtagcaccctcctcctaaatcagtgtttagctttataatggtctctgaataactcgaatctgtgtttgacttgagtatttaacatttattaaactaagttgctacaaactacattgttttccatgattctaaattctgaattctcattgcttacaaataaagaccaagagcaatccagttggttgttcttccgtcattgagatttcttgatacgttaatcctagcagttgctggctgtttagctatatcacagatactattggaatactctttctaggctttacaaattgtgaaggtagatggtgattgtcttaacgttccaaacagtctacaagggtgtagactagtaaaaatgggttgccgagaattcagagtaggaacagtgttccccaagtagtcattgctgtaaatgagggtgggtgagataaaggatctttgctactagggtgctttttaacaaaacagaatacaactttcatgttaacttttggtggctgtgcaaagagaaaactgtttgtaaaagtttgctgcttttaatctggccttacctatttaagatgatagtatgaatgaaattataggattgtaacgaaacttaaagattgtatttgacattcatgagtctatatgtaa

SEQ ID NO: 73531 - DNA, 1547 bp, Homo sapiens
ttctaagcaggagtcagcagcttccaaaagggttatagcatggcatgtgtgagtacagtgagtggcctactacctttgcaaactagatgggaaaggagtggggctaatgagactgaggtgataaattggtctagattgtaaagagctttgaatatcctgcctaatgatggagattttatggagtcacactctgtaaggcaagtaatatgatcagatgtttcgtagcaagatatgtctatcagcagtatggaagaaggttaagctgcactgtttagtactgttgccatgaaacatatatggctacttaattcaaattagttgaaatttaaataaaattaaaaacatagttcctcagtcacactcgccacatgccaagtgctcagtgtccatacccgttggcagcatatatatggcacattaccatcattgcataaagttattggacagcgctgggttagagggttacattgaggaggtatttggtgtttggttgacatgtagtgtgagacctaagagagcaacagaggaaaccaaactgagaaggtaataggaaagatggtatgggggtggcagagaagagagaaaggtcaaaaataattcctaagtatctaccttaggcaactaatgggagatattgctactggcatgtttgaagtggttgctcaaaagagaatgagatcaggggttttttgttgttattctactcttgtttacctcagtatcttaaagggcatatgattgaagctaccttattcaattatttagcaaaggtttgagtgtccactaagtagctatcactgtgttttgagatgatggagttccaagctaaggtaacggcagaagggtttgaggtagaatgtagtggggatgtagggaagtacacaaattcagggacatctgaggagttgtcaaggtgtgctggttatgaacttggaagctgaaggagaaggaggcaagcaagaatggcagattcaggctttccctgagaaggaaggcaaagtaagaaaaacagggtgaggggcaagataggggaaagttaatccacagccacacatgtactacagtctgtttcctcgtgcaaaagtgtctgtgatcctctttaggttttacatctcagaattatagttgacacaaaaaaactggctgcatgctcttcctcatgtccttatgccttcctctaaggagagctgttgacagggagactaggtgtgattaatgaggtaggatagcctactgcagtggttggtatatagtaagtactcaataaatagctgttgaatgaatgaaacttgtcataagacaaaaagtagtgtcttatgtttattttgttgttgaaaataaatagacatcctctcattgagatacaatcactgatgcatagtaatttttaaatcttttacaaatgcaatgtagctgttattcttttactacagttagtcggcaaaccagttaatctgtctgcagataaagagttgactttattttcttgcaatgatactgagtattttgatcatccctcttaggagccttctgttgtggaagaaaca

SEQ ID NO: 73532 - DNA, 1570 bp, Homo sapiens
gctactactcccatgtttcctaactctgattctgctaatttagtatgtgtcaggagtcattctactttcctgtgtttctgaagaaagtcaatttagtacaaattgggacctatttactctccctctatctaacacatactgttagtcagcagggtttctgaggacagcaattgctatttgaagaaaacaaaccctctttagacttttctgaatgtgttttaaacatgacccagtatattgcagtattgaacaaaaattattcaaaataatgacatgaatgccttgtaatttgtggcctatgtatcttgttacctttttagaatttagtttaaaaaatgcttactttattgcttaattaaacattatcatttaattaaagctttcttttcattgagcatctaaattgttaatttgggttttgagggatgactctggattccttacaaaaacaagcagggcttttctctcttcctgctatcagttttaggagacatatttcttctttggtactgtcataccaataaatcatcccagattacttgcagtcgtacagtactaaactataccatgcattttaaaggaaatctgctgttttcttttcaatcagatgagcaatgtgaagagactacggccacggctcagtgctattctctttaagcttcagtttgaagagcaggtgaacaacatcaaacctgacatcatggctgtcagtactgcctgcgaagagataaagaagagcaaaagctttagcaagttgctggaacttgtattgctaatgggaaactacatgaatgctggctcccggaatgctcaaaccttcggatttaaccttagctctctctgtaaagtgagtttgtttttttaaaaacacatatttgcctgaacacttgctcttaaatgtcagccctgattgcattatttaaatatttttttattttgatgtgctcattatcaagaacttgaactgaaccatgaactcaaacccagagtgaactgagctaatttactcaacctctgaactaaatccaaatattaattttcttcaatctgcaaatccaattcaaggattttatttaataacaaaattatatcataaacctatgctttctcaaaccaatgaaatggaacgtcaaaatattattaatactgactcgtacttactcagttcagatacctgtatatatattgaatattgcttaggattgccattaacatttttacctttaactatttaaatatttctctgcattgctttcataagcagactgaaaggagagaaaaatgggacccctttatataaaggggaaattattatattggaaatatatgcaactcggatattattgattttgaagtgtttctatctaaatataattctagaggacatgaaaatggagtaagtttagagccttttttttctcctgtgtctttcataggttgaatttccttacagcaaatatattcaatgttttataaaacagagctctttcctgaggagtgggccatagtaatagggctttattgatctgcttacaacaaattcttctcagttacacatcagaagaaaacc

SEQ ID NO: 73533 - DNA, 1036 bp, Homo sapiens
tctgctattttccattactgctatttttctttcttttccaaggatgccaattttatatccaagtctagatattacagttatttagaagagcggataccgaatagccaaagtgattttttcccgtttagtgaaacactagcactaacttatatgccaccagcatcaccactaccaaataatttgatttactatatttgtccaaggaaaatctaggaatttgttcaaattgttatatgttaggaaattcctttttttgtgtttatactgtcccacttacagtatattgacttacatttatgcattaaatagtcaaaacttagtaatataaattttaatttgtttaagggttctcagtttgtggctttatgctgaaactgtcattaggtcagtttttattctgtcaatattttgttccttgttgtagcattatgtgtcatcttcttatggtaagctatgtggcattactgaagttttatgttttggacaaatggagtctttctaccctattttatcaatgtttcctttttaagtagctctccttggaatcactagccacagtaaagtgcctaaatcattctgatcacttgaatgctagtattttctgaaaagatttaaggttccagcagcttaatattgttataagtttccttgacactgtatttgtttttcctaagttctgacccagaatttccaaaaacatttcatatttttaatgtaattaagagaaaactagttcaattagcttcatgacaatctttttctttactgctcaattgtctgttctattctcattctatttatgtgcttttgaggggtgggggggcaggggagacttctttccttttcttctctctttcttttttttttctcctgggaaggactatgtctgctgtggtcttagctacttcttactgaattcttattaccacttcctttggaattatccatgattttgactgctggcctcattaatgatctctcttagcagttagagaccactgtttcctcaacctgtacttcctaaaacgcaggtttc

SEQ ID NO: 73534 - DNA, 1023 bp, Homo sapiens
ggggcacatcatcagcaaggttttgtttgtttttgctgctggttatcacctctcaaaggacaattgcaatcccttacctagggaattgtacaaggtgattttatatataacactattgcagtttgtttcaaaaactaaccatgagttggggtgagagggatatttggcatttgtagggtatataattcatcagggacatttagaaagaagctagtggccatgacaacgtgtgtctgtgcagtgaaagaaaaaaaactttttgcctccagaccttgctctcatatggaagaaaatggaataatctctaatacatcatgataataaatatatagttcctgtattatgaactaagataaagttaaaatgccagaagtgtgcaggcatattcctttataaaataactctcatttaatcaagggattgagcttatttagttcaaatctccatcaaaatagtaatatcaaatcctgccattacagggaaaaaatcactcacatgctgccaattgtgttctctgtagagtgggaggataagtggaattgagctctgaatgaattctcttatgagcttttgttactctttttcccttgaaattagtagaatgtcagctatattaaataactctgcaattctttaatttattagaactaataaaaacccagcatgatcagaataatatgctatttccttgagctgctaataacttgtgagtttctcaaaaagtttgaaatttcaactgtgacttatattgatctctcttctttttaattgatggcaaaaggtacaaaattttgcttgtgttttatatcacgtgcatgtaaaatttgtgaaagaatttgatatagcatctcaagttatatttaacacagtctattcttaacacaacagccaacgacttcagtcacataatgttctgttttacctataaccctacaatgacttcccacctcagaggaaagtccagaattcttgtagtagtctacaaggctctacataatttgtccctgccttggtatttcttac

SEQ ID NO: 73535 - DNA, 1709 bp, Homo sapiens
aactctcatttaatgctaaaagactaaggatcctggccaaatggtgttttagaggagtgccctgagaggtggtctatctctgtatctttttatagtggcttgtaatgaataaggccatttacatgctgtttttgttggtttaggttctgggcagaggacactgaatactgactgatgtgcttaatttgaaatattcttttccctggacagtccaggacaaaattttcttgtggagaaattggtgtatatttgagaggcaatagcctcctcttttactcagcttaattttctatcactagattaacaaatgaaaatatactttgtcattaattggagtcattgcttgtgtctcttcttggattctttccatccctgtttatccccaacaccttctcgtccatctttccaaaatattacctacttaccaagggttgattccgatggagtagagcctgactttagttttatgactgcatttcttgtatttgtaggctttctttgatcaataagctattaggtaaaatcactgtgttcacagtggcatgctttaactgtgagaaatgatttatgtaaatattcagtgggatcagaagattagctgaagtttggaaagaggcctaaaaatttgcagttgaagcttggtgtactagactttctttgattaaaaattctaggtttttgagtatttgtctccacgttatttaattctgttaagcttcctgttcttcaaagaaatcaaacatttataggaagattgaatcgaacaaatgtcctgtttgtgtgctgtattttgatctaccaccatttggtgtcactgtagggcagggcttttaaactttgtgcagctgaggcctttttaatgaaaaatgttgtaggaaattcgtgcatatctccctgcattaaaaatccctcgctttaaaatacatcatatattcttgttgtaaaacattcaaataacatagaaatattgaatacaatgtagatgtcccccgtatcccactacctcttttcattccacacaaatgatcatttttaacaatctgttgtacttctaattccatttctgtgtatttaccaatgtatgcatgttcacgtgaacattttaaaaaatccattgttctgaaactttttggctgtgtcatatattttgaatatgtttttcatgttgtactgtttttaaattcgtgcattttatttcatagcccatattatgatttttccttttaatcattctcttaatgaaggacacttagttgtagtttctctccgtgcctcaggttttttaaaaaataattctgtatacatctttgtatttgaaggcagtgcattagtattgcacattgtctgggtttaaattctagctgtacctcttcctagctatatgatctttggaagttactcattttttgatacctccattttcttatttatgaagtaggactatattagtttcctgttgctgctataacaaattaccacaaacttggtggcttaaaacaacacaagtttatgatcttacaattctggagatcaatagtccaaaatggtttagcttgggtgcattccttctgagggctctaggggaaaaatttatttccttgccttttccagctttgagaagctgctagcatttcttggctcatggttcagcattgctctgacttctatttttggcatcacaaccccttctctgaccctcctgcttccct

SEQ ID NO: 73536 - DNA, 1020 bp, Homo sapiens
cttgtgtattcctttaatctttattcaagtagttctgttgtttaagtgtgtggcttacttaagtttctaaaggacctctacatgccttttatctgcaaggtatatcaatcatcatgtgtcttcaacaccttttaaaattttctttcacatcagaaaagttagtttgttttagagatatcttcagtttttattattaaaactgtaatcctattggtaaatcttgcaagcactgccattaaaattcccttgatttctattctgtcccttcccatgcctttttgtagcaatatgatgatttcttttatccccctgagtgaagtgttaaaatatgtttggctttgcctgaaatttctgacatttaattccctaaagctgaaatgtaatggatcacattcatccaggtgagaaagctgttcctttggtataggttgagttctctttctcaattatatagctaatcaaataaacattcagtttcagtagtgcttgatttgaatatataataactctgggatagagaaatggaaaattgactgttttcaagatgcagggaattttgcttaaggcttattaggagggaggttacctagaaataaaactgaagattaacttcactggttttctttcagtagtttttaaattatatttttaaaattcaagaagtacatttagtgaagatctttctttctggttttaatttttagaacttaataaagcatcttcctgatcaagagcaattaaattcattgtctcagttcaagagtgaatatagcaacttatgtgaacctgagcagtttgtggttgtggtaagtaccgagtctcagagaggatttttatactgtgccaaacaagagaacctgtcaactgtttttatatcgctaaatgtaaaaaagcatgtgagtaatcacatacatttaatatccatcttacttttttttaacttaaggatattcatgtgaaattaccttgatttaaaatatatattgaaactctggcattaagtgaagtccaaggggcttt

SEQ ID NO: 73537 - DNA, 1904 bp, Homo sapiens
aatatattcaaatggtagagttggcattccttttatgaaaatttcagaacctcctctccttcgtaatcactttgatctaaacccatctcttttctacaatgcaggcctgccaagatccccatggatagtatggcggcattggtgtattgtctagtattcaattctctatttctgggcactgctgattgcacatctctgcccctgtcaagttaggagtcaccaagtgacatgcttggaccagtgaagatgggagtggagttaatgtcactttttggggtggaagcatttcattggtggttgaagaagctccccctggcacccagaatggcattcagagtggtgtccatcatcctgatatagggatcataattaataattaacagaaactggtgtgatgaacatatggtcttcatgagaaataatttgtgtgtgtttgcttagaccacagagattttgtgttttttgttttttgcatgatgtacatattttagggaatttccctcccaaaagaactttgtctaggttcaaagcactgtgttttgaactatgtcagataatgtcagaaagttccgtatctgtgatctaaaagagatgattttattttgaaaaatgttcatgacctgcattacaaattactagtgttgattctaaatagtcttgtaatagttcccgaagaaatataatgtttaatagaattctttctgaatgggtcagctgtggtaagttagcctaaatgtccatctcatagttaaataactttttgaacacggttatttatttatgtattacagaacatgttctacatgggatttcaaatttaattaaaacagctaataaatactgattacctttgtttactagttctgtatttggccctttaatcttcactacaaccccaccaggtgggtattagcattaacagtataggtagggaatctggtgggtgtagcagttaagtgatttcaataagattgctcattttgaaaatattttaatgtttatatagtttaatgtatatctgttcctttttacagaaaacagaataacatttttatggagaaagatcctgtttgccttgtttaatttagctagagtatatatatcctattcatttaattgagaaacatgttttaaagtgtaagatgaaaagatacagaatttataccatgtcatattatgatgtaatccattttaagattattcttctcctctctgatggtagcaggcattatgatttaagctttaagaagctttagcagcctatgatcttcattgtaattatagttttttgtcatgaaatttagagttttgagagtctgaattctgagatgagtcttagaactgttttggaatgagataaattgaaataaaacagtggtcagtagtagaatactgatactaaaatggaaaggttcatttctaaagttcattgaagagaatattatgggtatgtactagattagaactttggagaaagaatctaaaagtcattcatttatctacttgtctatttaaaagtggttttggtttcctatatttttgagttcataaaggtttccagacactaggatcaagagaaggcttaggagttttataagtttcatttgtttatgattttttatatttaaggttgttttctgcaagcaagtacagcttaacttatttctgcctattttttttctcttacctaattgccctggctaggacttcaagtaatatgttgaatagaagtggtgaaagtggagatccttatcttcttccagattttataggaaaagctttcaacttttctgtttgttatgatgatagctgtatgtttgtcatatataacgcatatatttattgtgttgtgacacatttcttctatacctaatttgttaaaattctttatcataaaagaatga

SEQ ID NO: 73538 - DNA, 1057 bp, Homo sapiens
tcttgagaatactgtagtttcagtctgtgtttggttgcaaatgggagtctgtcaatatggaaaactgactacatttattgaaaaatacctgcatataagtgtacctgtgcagtgcaagcacgtgttgttcaagagtcaactgtgtagttatttcccaaagctttaaatcctgtttattgtgttctggagactaaacatttctcttccctccctcaggcctattcagtttccactaactgtcctggtgaacatgtacagcaagggaaaatttggatcaagtgtaaatgcaaagtgtggggagttatcctttctaatgtgcttggttgcagactgctttcctcatgcaaattccatgtcccagaggatgctctaggcttgctgtgtggtggtcagttcctggtctcaggtctgctcatagccaagccttgtgccaccttcagcatgtagcttatattctctgcttaggtttcctgatttatagaatgaggtggttaaagtccatactgaagggccgttctggttcaaaaatttgtatctttcaaattttgatactctttatcagcctcttagaatctcatgagttagaaggcaaagaaaaataacagccattatgcaagtaattcatagatatctccccatttgaagactgtcagggactggtgtttttcattttctaggtaaattattttgcttactttatttttttagttgagttgaatttattatcttctctctgtgtcatagagaagaatgcttgcttatttattcagatatacttattttcatactcttaaggctagtgtaattacagtctatttagaaaggtaatttattataaacattaacatgtaaaatttaataatatctatgctaaaggcataccagaaaaaaacttaaaaggcttaatattttaagtgcctattgtcataagatacatttaaccagggagcaccaacaaaagcagagtaaacacttattagtaacatttactgatttaaaatactcagttatagaaagagaaaactggtttttattaccttttatgcctatactgact

SEQ ID NO: 73539 - DNA, 1015 bp, Homo sapiens
gttatacgtaaaaatagtggaaaaattattattattatgtttttttttttttgagatggagtcttgctctgttgcccaggctggagtgcagtggtgcaatctcagctcactgcaagctctgcctcccggtttcaagccattctcctgcctcagcctcccgagtagctgcgacaacaggaacccgccaccacgcccagctaattttttgtatttttagtagagatggggtttcaccatgttagccaggatggtctcgatctcctgacctcatgatccgcccacctcagcctcccaaagtgctgggattataggcgtgagccaccgtgcccagctggacaaattaatttttatgaatatacatgtatgattccatgactgggaaacaccaacattcaagaagaattcacaggggccagatactagaagtatttcttatggtggtgagattttgagggcacataaaaatttatggatgttttctggagaagttgtgatgagccaagatagatgatgttagaacaggattcagttttccttcagtcgggttttgaactctctttcctgatatcttttactttcttctctcagtccttagatctattcagtcagagctcatctcaaattgtaatgaacccagttaacactaagatatatgtgatagataggcttaacttttcaggattatttttctccctaatccacagcttgtgaatttaaaaagttgtttcatctgttattttgaatggtgttaatattttatttgatttgaactcttgtttttctgctagttaaatctttggttatgagggggtgattatacccaaggagacctcaataaaatggttctttttgtaggggtcgtacttttgagatgagcaaagttgctaattattataatttagaaggtccttggatattaagcagtttttatgaaatattttgatttttaatttcatataggattaaagaggtaggggaagcattctttaggtagcctttgtaaaaatctttattg

SEQ ID NO: 73540 - DNA, 1023 bp, Homo sapiens
gtagatacatatacatatgtattgtttaactagaaaataaaaggtgactttgccttagtcaatataagtcaatatgtatatacagggatccacaacaaacctagataaagagccatttcattgttaacttggcttttgtctgaatattccaaatacatctccctggtctctggtcctgggtaaatggtttgaggcttttaagcataaggatggcttgggtttcctttccagaatctaattctatacattatccatgtgccacctgtctttatgcgacaaagaacaagaagctgaagagagtcagtttctgtgtaggaaaagatgaagatcttcctttcatgtaaaagtctgccctggctttatcactatgcacctttaatgacggagtaattgatatgggctactataagcttagaaatctgagagctgggtattcaaggaaatagaaatgcgattaggttcttgaaacactgaattgcccaagaatgaaattctttgtacaatttggagaggtaatctgggtgagaggtagaagagaaatcgttattttgtaacagcattatctatatcattatataaatagtcaaaccaatgtataagtttgaggtgtgcagtgaataaggaccaactctgcctttgaacacctcttgggaaagaacgtatacattttaaatgatcccagtttggtctgattaattttacagccacttagatttttgttcttcatttgacaaagcaaaattttaactacatgattcctacataaattttcaaatcaagaggtcaaattaaaatgagtgatttgaaatcaagcctcataaagaaatttttttctatttttaaatgttgtggttaagaatacataacaaaattttaccgttttaaccatgtttaactgtacagttctgtggcattagcaacactaacgttgtgcatccatcagtaccatccgtctttagaacttatcttctccagctgatactctgtacccattaaacactaactccccattctctactctct

SEQ ID NO: 73541 - DNA, 1043 bp, Homo sapiens
catgtttagatttttttgaaatccttatatattttgatgtgtattaactagaaaataaaaaggcaactttgccttagtcaatataaatgaatctaaaaaaattgttgcaagatctgtgagtcatttgttttatttttaaagttacagcttagaaatgaccttagcttttcaaagtgaaagaaatttttgtcaagtatattacatacacagggttacattaattcaataaactccattcagaaagcaatatatttgatagttaattattccaaatggtgcctgtgatcaaaagggacactcatttgtaatgaaggaaatctgtataatggttatcctgaagaatatttgctcaaatttgaggatggaagtaattgatgaagtgaaaaatcatatatatcttcttcaggcttagaaggagcagcttgtgaaaagctgagaaatcattatgagtatttgggaaactaagccaaaagagctaagtatggggataagatgttaaatttgataatttgagataaggtattacataggtcaatagaaatacgtgttttatatgttataatgcctttgggcctttgcatgtacatattgggaagaaatagattttttttgccatccttctttgctgccttattctttgaaatatgaaatatgatatttgctgctagtatacattttttttcctaattgagttgcaggggattttatatccaatgagaatttttcagttgttacttgaaaaatctagtgcaacgtagtaaatattttttgaaaatatgtccgctgactcttttagtgcttttacatctcccattaaccacttacaaagcaagatattgtcacaagcacacttgtctaaacatactatgcactatttttgtctctagcgcttgccccatattggtagaggcttctgtgaggcggtcttcctgtggaggtccagacaggaagctggccacaaataccctctgctctgggggtctctaatatctctttagttatttagttattctttggagttactccccaggtggctctccttc

SEQ ID NO: 73542 - DNA, 1020 bp, Homo sapiens
ataaatgattatgttattgtataattttatatcttcacatcttattgttccaatagatcttcacatcttcacatcttattgttccaatttcaaccgagattctttatgagcaagccttaacatttgacttttctgtattcttctatagagagcctaactcagtgatttgggagggagtgagtgagtgaatgaatgaacgaaatagattaagattttctttatcatgacagggaagccctcagaggagctccatattgagagctattacatttccagttgctattattgttctaacagggctttcttggtcctgtgtgtctgtgttcgtccttccccaggaaatggagtgtggtacagtaacagtggtctagaagcaggaagccgatttcttgtcttgaatctaccactaggtagctgtgtgccttggagaaatcaattctccaggccttagttacatatctataaaataagagttcttggtagcttaacattctacaattctttgaaactgctgatcttcgttgacattaagaaataaactgccaaaataaactttttttaaaaaccagaaagcccattttgttcagactcgatagaagaggaaatgtgctaacggtgttaaattgatcatatgtcttttctcataagagaacgagattattacatcggcacagttaaaagtagatgcaacaaatgcttatatatatatggaaaaatatgcaagaatattttagtaatattgatagcaaagatttataaacaacttaaatgctcattaataaggaaaatagctaaattattatatgtagccaaattatggtaccaggtgatatgctatgaagctgttaaaacaaatgttgttgatctagacatatgaacatggaaaattacactgggtttattgctttgtgaaacaagtaaaatgcaaaataatgtatatggtatgagctcatttaattaaggaaaaaaacccttcaattgtatatttgtatacatgtgtatacatcttttttgtttatg

SEQ ID NO: 73543 - DNA, 4026 bp, Homo sapiens
ctgggcctgataaacccatgcctgtagctctagctacatgggaggccaaggcaggaagatcacttgaggccaggagttttgaagctgcagtaagctatgatcacaccactgcacttcagccttggtgaccaagtgagaccccatctctaaaaacaacaacaacaaaaactaagtgtaatggaaactaggtagacgtacagggactagagattatctgagtgttaagagcaggtttcttggacacaaggagagtagaaaatgtggaagtataaatgctatgtcttggaataaagaccttctagaaataggtctaattctacagagtcaaagaattgtacagccaaggaattgggatgaaataatggaaaataaacaagattctaatgtggaaattaaccatgaagccaggtgaaaagcatcggctttggaatcagactacctggttggaatcctgtctccataatgttttgacttgggatgaattttcagtctctttcagattagctttaattttctcatctgaaaaagagagttaatactacttttaggattattaagagactgtgtctgttgagtgcctggtatgatacctgactcacattactctaaaaatggcaactagtattatcattatcatattaattccattttatttttattgcattatggcaaagaagtagctatcaaagctgttatgaataggatgttggactggattctaaattcccttccctatgtaggactccttttttattgatattccagatttcttcagtgatattaatttatttttctgaattgacagtttaaagcaaaaataataaataatgattttatgggacttcatgcaaaacgattgtggtttgtttgttttttttttttaaatacagagtcttgctctgttgcccaggctggagtgcagtggcatgatctcagttcactgcatcctccgcatccggggctcaagtgatgatcctcccacctcagcctcctgagtagctgggtctacaggtgtacaccatcatgctcaaaacaattgttattagtaagatgtgaaactcttctcttcctcctcctctccctcctcctgcttttctgtctttaaattaaatcacaaatttagatcgtgtctgattgtaacacatcaaaaatattacttcttttcatgaaatagtacagtaacagggtcaatgtttttcattggtttatttcaaaataggaaagcgttaagagaatcaggcggtggaccatgcagagttaaagttagaggagattgctgtttgtgataatgacatttccttcacttctgttgaaagctattcaacacgaacatgtgactcttttactaattgtaatgcattacagtaccccataatctatgagaatgttcacctctgcactctgcctgtccagctgttgtctagaacaattatcagcgagttattattccggtatgagctgtgtcatgctcgaaagtgggatgaaaaaaatgttaatgagcatgcatgaatgttggttgatgaaggttaagtggttgcagatatgccctctgcattctttcctatgaatgttcagactgaggcaatgggttctgatgagggattacaaacaaatggtgctgattgacagttcttgatttaacattaaaatggtatctaaaggcaaattctgtgtttcagctgaataatagacacaatgttgttgacccctgggtgcaactcaacacttcagcatccattttatcttaagagtttttttcccttatcgtaccagattttcaaatgttctcatttttgtattacattttattttaaagttgtgcctggcagtggtggtatagttaaaaaaaataacatatccgttatgtacttacatttttagaagaataactttgcaattttaagtatgattgaattaaaatattgtacacaatagctgtctaagtaggtaagcatgggccagtactcatcagcaacatgtttgtttctctttgtgtgtttgcatgtattttaaatgactcaagtgcttttttagcatttgtttatttgtgtgctacttcaaattagctgtctatatactctttaggaacttttaaaatttattgttgtgaacattgtgtttcatatgctatctattgagcataaacttcaaatacttctctttttttggaagaaatgaacaatgtaaagaatggtatcaggtagtgttcgggaggtttttttctctcatcactttccccatcattaataatcttgaacttggtgcattgtatccaaactggattctgtgctttgtaaactgtaaaatgttgtgcaaatatttgtttttacttaaccattttagctgaaaggacaatataataggaacacaatgctttgcaacatgtaacagaagtacaaaaaagtggaagattgttcaatcatcataggattgtaaagttactagatcatagctatcattttctcatttaatagatgaaaaaaatctgagcgctaagtatggaagccataaaagtgttgccagtagagatatcatttgacatatttgggttatttgttgatcattgagaaatattttcttattttttatgtccactatggagacagctctctgtaactcactgcctacttaatgtataagctttcagtaataagccagagtgttcgtcttcattttttcttcgtaagcatatttttaatatgtgaagctttcatttaaattttaattcatagatttttaatctttttttggtaaaattataattgttatggaaaatacttgtaaattaaccttgagtcatgaaggaaacaggacagaaatactcacctgtacctcttgaccctggttctcatgtcaatattcctctgtggaagagggcctccctatttcctagcccagcagctttgtgcttaaggactatttcttctcagagctctgtgattcctattgtattaagtgcttaagtcttagtgctagtgtggctttttttttttttctgtcagcaagtgaaattggatatacaagtcatattccctcaaggctagctgctacttagtactatgcctaggattgcagctatctgctatcagtaagcagggctctcgttttggttactgggtccatcatggcaaatcatgcagccagctgaacagttattcagccaagcagcaaataacattggatgcctctcccatgaaaggtactgtcctagctcctgggatacagtgctgagcagataacttcttgctttcctatagtatataatctaatggagaagacagaaaataaataggccaacaaaaatgactgtagtttttgaatgtgctatgaaagtaaatgagcaaggtatgatgaggggtgtgtttagagaggatagtcatggaaggtcctcagattggaaagaatctgtgatctaggatccatcagaagtttagtgtgactggagacaagggcaggagatgagatttgaggtgtggattttttggaaaatcttcaaagaaacatttgagttgttttgaagcatgagtatatgatttttgaaagcagggaggaaggtgagggccaatccagcagtaggagtggtaggggcaaaggaagcattggtacaatattgaaatacccctagcttagggcatagttatgtagatgttgatgatggtgttgctggcccgcaagagggagtggtggtgttacaagttagttagtggccagttatgagcctggaaagattgattactaagggcaagttctttccacatgttttgcctctctcctttctaaaaggttctaaaaggaggtataaaggataatagccccccccctttttttctaacacacagaaaagttgctagaaacaagttagtgttaaacatagtagtttttaattcaactatgcattaataataaatgtatatatttaaacaaactatcaaaaatcccattgtacacaaggtatgggtagcagtagaagtcaaatctatcaatttttctttccaaatttgagtccttacgattctgcttccttgt

SEQ ID NO: 73544 - DNA, 1026 bp, Homo sapiens
ttggttccttctgggagctgtggctgactgacttagagtacgtctttcaccaggcattggagagcccacctggattctgcccctgtcctccacattccatgtagttctctttctaccttcaaacagttgagcccttttttctcagtatctggaaaatgctgaagcttctggaaacattttattctcccactccttggcttgccaacttcatttcctattacctctctttcaattctttcacttctaccatactgggcaaccttcatgatgtaccccagatatgccaggtatactcctgccatgggcttttccctgccaggaacattcatgctccagatatgtgctccatgagccccttaccaccttcaagtcttaactcaaatgtcgctttctcaatgaggttcccatgctcaactcccaaattaatcctgccatgttttcctttgtcctcacgccatccccattttctctactgtgttgtagttttcatgtcatttatctccttctaacatactgttagctacttatatattcggtatgttgtcttattctctccctactcccactggaatttaagctcctttactaaagagctctttgtttcatttactgatgtatcacaagcacctagaagaatgcttggcacatatgggcattgaatgtttgctggataaatgaatgctttttcatttctttaaagcagaaatgcaataatttcagcctcctcaagcaaactgtcttttttcattttaagcaaatggaaattttggaaggggagtagaaatatttaaatgatctagattccaattaactctgcctctgatgactttagctctgagtgaatagcagactcttgtaaattaggttaaaaaaattcagagaataatgaaggtggttgggagtggaataggttcaggacctagatgctaaaatgattcaccttttttttccttctgttttagcagcaaaaagtaagaaggaggaaagtaaaaattataggtaaattctgtgttgttgttggatgca

SEQ ID NO: 73545 - DNA, 1482 bp, Homo sapiens
gttgtggagtccaccctacaagtgtgtgaccctggcttttacagcgtagtttctttcctctataaaatgggggacataatacccatatcatgaggttattgtgaggattatataatgcatattgtaaagcatcttttgcagtgcccagctcattgtagttgctcaggaaatgttagctgaacttaaatgttgagaatacagaactcatttcaacttgtaaagttttgtgtatcatctctgaatcttccacaatgtaacaagttaaatggcctatgttcactgtagccttgctttcaagtgaaactttctaaatcatgaaactactgtgttaactgacctatgttaatagccacttatggagactactgtaacactagttcataccattaactttagaaaataataatagattattctgtatatctagtttcatttttatgtatgtcttaaatgtcaagtgcttcattaagtttctcgagacagggatttgttgaatcaggaataaatataaagctcgtttttatttgctgattttttttttccatgacttttttcctttcagttgatgactcatttatgggactggggcctaataatatttgtaattttgagatttgaaagctgagattctaaactgcttttcttgttgtgattcagttttagagcatagaactggtgactttgggggtgatcttgaaaagctcattcagtctcataaaatattacttgtttttgctaataattcattatttttgacagttatttacattttcagagattagtgaggatggtagagatggctcaatataattatggaactgggttgaattaaggcatagagagcctttatttgataggcaaataagagtgccagataaagcgtatggctaaattctcccaagggtttgcaggaggcgtgataactcttaatgtttttagtttcatagattgctagcagaaggtttggaagagtgataattttttaggaatggattactcctttttttctcctccatttgtgtggtgcaagctaatagaaattagttgagtgaactatatgccattataccattttgacaatcgcagccttcacacggttcaactaaatacttgtttcctaaactggtgacaaattattaaggaaacacataaagaaatgtctttagtttttagcttaaatgaaagtgaatatttatacttccctactagcttcacaggtaatagatgaggaggacagaactcttgaagtgaaaattattcaactcagaatatgacttatagccccccaaatctgtgattggaaaaaaaccttagaattttacattctgtattagtgtatataaatcagtcttgtcttgtgaatcattgaggaaatttgcctgcagggaatgattaaaacaagaagtctggtggttggtggtcctagaattggttaattcaatatcccagtgatgtgagaactctaggttagcttctcatcta

SEQ ID NO: 73546 - DNA, 1020 bp, Homo sapiens
tactttaacctctaattgaaatttagctttttcttcaattataggtaacaaacatagcagtacctattaagtttccatgagtacaattcacatatactttcaaaatacattagaattattttagttaagttgaaatatcatttaaaatgatcagtatttcaaaattaaggtagttattagacttgcaactagatcttgttatttaattcattaataaagaagcagattttgttgattgcttccacctggaagcagacacagagatgctggagtgtaaatgtgtttttttttaagggtcaggatgcaagaccgggcgggaaaaaccttagaccatggtgtaaacctgataaattctcagccagtctagccaggaaggagctctggaacaaatgatgcctgtgaggggagtccctcgttgggtcctaatggcagtccttactacttgtgccaggctcagccattggctgggggctgcccaggaggagtgtggcctggactcaaaagctaaggaggattctaaaggtgctaacaacttgaagcctgtcagctaaatgcactccttgcggctgaatggaaagttcttcctaaatggagatctgagcagcacatctacattgcttcctcacatgtgtattactatttcataaactgctgtttaatgcattttgatagctgcattcaagtataatttacttcctttgaaatcctatgtatttttgtttatgcatttaaaaatactattttgagaaagggtccacttctttgactgtcaatggggtctttggcaaaaaaggttaagaattaatttagactctctaatttgtgcagtggtgagagtgaagtaacatcaaagacctgggcctgagcctcagcttaactgctgcctatttaaatttatattgcctttttttcttttttttaattcaaagaaccaatacatgtaatgaaatatttcatccaacttagaataatgttttaaggcagtttcaacatcagactgtccatttttgaatctcactt

SEQ ID NO: 73547 - DNA, 1037 bp, Homo sapiens
tttttaaactaatctttgtgaccatttacaacaacgcttctgtgggaaagtaccttgtgccatatctgtagaggaataggaatcctctctaatccttttcctgtgaaaaatcagtaattttttcctgattcacttacatcattttcttttacactttattttgctgttaagtagctcacttcagttttcttgattctctctgttgtaagtttttgggagacatcttagctttctgtattttaaattattctggaaatgtatataagcacttttccagattatgttttttctttttctcatacctcctctttcataccttccactttttcttattggctaccactgttccactcaataactatttattgggtgcatattgcatgttgtgcctcatgcttgacattggggataccagcatgaataaggcaggtgtgcttcccatactcatgttgcttttacattcctgatgaaactcagtcaagtacttagttgaagcataataacaaggagtggaataacaaatgctgattttgattttagaaaagactgacattttactaaattcagcttctgttaagacttaacaaggttataaaaaaagattgtttatctatctctctgaaatttaatcataatattcatatattgaacatttggtatcatcaaaataatgctaatgacctatgtatttttttttttttttttaccagattggaagcatctgttggttaatttttacaggctgttggaaaatggattagagtatactaacaggttattggtgttggatttgtcaagtaaaattaatattaactactttcattattcacaaactgttaatagggattaaagggctttctgaaagtatatgaatagtctaattcacttagactaatttattatgaaaatgtggttccacaattgttagctttctgaagtaatcatattttataacaggtgtgtcatttttgccagatagggcccataaattggtttataaattatttctcaactgaatagttatggcatatggaaac

SEQ ID NO: 73548 - DNA, 1905 bp, Homo sapiens
tacataagtgaaaattgaacttatttcatccaatttcgtgggcctgctacttacatttcaaggctgatatccacacagaatttttaagtattatataaaacttacattttaggtctgtagtgcaaaacacttagatcaatcattaccttttaattttcaaaaagaaatttttcactatagacttatgccacctatatccctgggctcatagaacaaaggaagaggtggcagggagagattgtactggatggatacaggtcagagacctttgtgtagagggttgagttgacttcctaaatgttgactgttagccaggcaccatgctagatgctttatgtatctgtttaacttgagcacagcagccaaagaatgctggcagatattttaaaaatgtattagtattcctttgaatgagtttctgaaagattagaatctctttctaaaaggtaattgtaaattaagaaattattaatgtaaattagaaactctctccaaaaggtaattgtaaattaaggtagttttctagaatttgataaaaacagttaacagatatttttgagtaccatttatcctgactaaagtattaaaaatggtatatttttggtctttgaacacagggagaattttctcagcaagctcaccctagtaaatttgtgaataagattttaattttaccttttgattatggaggatcaaaattttcttcaaataagattagtgtactcttctggcaatcaaggaaaatacatggcagttaaaatttgtgtttacatgtaaaacacttcagaatttcagatttcataatctggagttgattagttttccttttgctttcctagtaggtacaaatggtggtacctaaaaactatttaagtaattctgccatacagctactctctttttctccttactctgattactttcttaattaatgaggctcaaaagggaaacttgttagcatgtctttaatttagctgcaatgttagccctaaatgaaataattggacctttaaaaaattcttaagtcatctaactttagccttgagattcaaggttgaataaaaaaatgatgtatttgctctatctaatactagttagaaagattaaggtgaaaaggtgatcattttttgcatactccatatttccatctctctctgcctttgtactgctggtcctttggcctggaatctctttacttgacttagaggctggcagaggactatgataccttctgtctcaattcaactcaaatgctgctttcttttttttctgtgacagtagatgacatttccagggggaacacaaagagtggggaagcccagggttgtgactccgagccctgctaacatttctcagtggtaagcagagatgagctgtaaaggtgactatttttttgggacttcattttaaagaataattcctagaaagcattatttgaggagtcctaagagtgctttttggcattactggtcatctggcaatcaaggagaatatatgacaattaaaatgtgtatttacatgtaaaacacttcagagtattttataggaaaggccagtcattgctacgttcagagaaacaggattttatatagacatttaataggaaagatcagaaaggaaggaaagagaaagatgtccagagagcttagacaggactggtcaagtagacaggtctacttgtggtcttttattcatggcctggctgctgaggcattgggtccaaatgttacattcacgtatctccctgagtccaacatactttgtttgaatcaattttgtaattgctgcagaattcaaaactatggccgggtgcaatggctcccgcctgtaatctcagcattttgggaggtcgaggtgggttgatcacttgaggccaggagtttgagaccagcctggccaacatga

SEQ ID NO: 73549 - DNA, 1037 bp, Homo sapiens
atcagcatgagaagattgaattggttaaaggtaaaagaaattaatagaggaaaatacttttacttagatctaaatctaattttggatttatatatacataatttctaatgagatttaatttatgcctacataatttaatttatatatacataatttctaatgtcactaatcaaagtgacaataaaatagctttttttttaaagtattgggacaaatccctttcatattgactaagactttctgctttataaatacagtgagagttgatgttgttccagtggaatccgatttgtaattaaattgataattaaacattattgcagtgaatcctatgtttatgaagtgtttctcaaaaaaaaatgatggtgttcttaggaaattttctctattgatagatgttgggaaagtgttaactagttgtcagaagctaatatctagtcagatcttaagaattcagaatcctgcagaaaaatggtttcatggtaacagaaacatggaaaatgctgtataatgtgtcctgcccaccaaaatgtatagtgcaggtgaagattattagagactatgagaaatgcaattgagaagaagctaattaaatcgtatttcaaatcctcaactattggatcatggaagccttttcttcctaataagaccttaacatcctgcagaacttgtatcttattgaacacacttcagggaaaaatcttacagatacgactttataaatatctgctgacagctatgatactcagtgtatgcatagtgcttgacttgggacaggtgaaacactcacctattgatgaatcagtcttctctctgattgtagatcagacctcatgaaatgactgaaaactgtttctggataaaagtaaatgaaaataagtatgaaaacgtggatttgctttgtaaacttgagaatacattttgttgccaacaaaaaggtaagtttaacatcttgattatttattaatttgattttagaattttaacatatactttttatgtatcaattttcagaaaacattattttatgaatcctg

SEQ ID NO: 73550 - DNA, 1003 bp, Homo sapiens
gtgttagttagattcagaaaatactatttgctccataaaatatttctattgccatatcattttgtatatatcagcaaaaactttgttctgatagttttataaggacacatgtaaatactttgctttaggcaggaagctatcatggttgctagacacattctttattttggtgcataaatttgaaaaatgaagaccagaaatgtcagaaagtatatagagaatattgaattatcaaccttcttgtacagatgcactaatacattcaccctagagaatgaaattaagcagagcctcaaccttaactgtgtctttcaacatttttttgcatgtaattttgtaagtgtaatatcgctctagtaactctttttggagaaggctatcatatcagtttttataaggtgtgcttttaatggagattcattttttccccaaggctacagtgatttgactatagatattacaaaaatgctaaaacaaagtttatatttcagctatctttttataggcgaggatgtggaaacttattttttcataagtaatacagttactttagtattagcaagttaatttaataaatgttcttagaatgtactcattatgactgtggttgtttttataatttttatcttaagtcccgaaataattctttttccttatgaattttagtctaggatttatgaaatagatatttcataattcacatattgatattgtagaaaggctttttcattcttactctcataagaacgtaattttttttcttgctgtgtaacagtgaactttgtcttagttgtcaaaaagagaaaatgacctctcaaagatttctgatgctgggagagtgactatgttgacatagtcattcaacatataaaggaagatttgacgaggttggctcatcacttcgttcaacaaatatttatttgactttaattatagatgtaagacactggaaaggtgatgaataaaatagaaaagtttctcacatttatgagctttcaggttg

SEQ ID NO: 73551 - DNA, 1465 bp, Homo sapiens
tctcttgatgaatggaaaactattttattatcctattttaggtaagtgttatctatccaataggtatattggatatgttcaatttctgttgtatgtgtgtagagtgatattattggacaagaacttagcttttggttacaagtgtttttttttttttttttctatttttttatggagcagtagtaacggctaatatttttccatcttcctttcacctcagtaaccctcaaataaatgagaaataaaaaacgccactgaaactttatttcttctgtagtttataactgactgaaatattttgcttacaaattgttttaataggaaagatatttaataatgctggaacaaaaccttgaagtttacgtttgttactctttctttaatgttggaaacccagtctgtctcactgtttgatctcttgtaggtagcttgtatgcagctcatcaatgccctggttacatctcctgatgatttggatttcaggcttcacatcagaaatgaatttatgcgttgtggattgaaagagatattgccagtaagtgccctgcagtctccttattaatatttaaattaaaagagtacttgagtagggggaaatttagataaattaccttgaagaataatttatctgtgggaaaaggcttgagttaaaaaatctatttttgaaatatagatgataagattcgagtgttatttaacactttaaatgttcgaatgctataaatcaagttgaatggttggtttattgtttatatgttttttattcttttgcataattaaaaacaaaatcattcatcataatttctatttcatatctctagaatttaaaatgcattaagaatgatggcctggatatccaacttaaagtctttgatgagcataaagaagaagatttgtttgagttatcccatcgccttgaagatattagagctgaacttgaatatccttttgttctgaagtctagtcaaatcatatataaaattattgctaaatccaaaatactcagccacaaatatttagctcatttctatataaacaacatgaaatcaaaccttcatgcatcagaagaatgttattattttattaatttgtgtgtttttatgaatacacatatatgtaagcgtatgctgcaactaacaaatggattctgtagattggtttcttatatgtatgtgtgcaatctattttgttttctttttatatttgacacttttccttctacttagggctttttagcattaggaatagggcagccttagtcactggctgctctttccctgcatcttgggtgcatactcatgggtcgcatgttaatctgtgggtctgcagacgtctgtgctcctcatgagacccaacaggttcctatcctcacctggggcttcttcatggtagataattaacctgaccaccagctctgttggtcaggcaacctttagaattcaacacagtattcatagccagcttc

SEQ ID NO: 73552 - DNA, 1030 bp, Homo sapiens
tctatcttcaatttccttcgcagcttttaagatttagatcactaataggcatttccaacttatcatctccaaaactgatttcctctctcttcccaagcctgttttctcccgtggtcatttctgtttcaataaattacaatttcatcctttaagttgctcaggcccaaaaccttggagtcagtcttgactcctctttctctcaaagaaatttccatcttttttcacagctgtatgtctagcaccaagaacagtgcctggtatatagtaggcatcaataaataggctttgaaggaatgaagtatgtgagccaatatcggggtaaactgcttctgatgccctaagatggaacctttagttaactagatgctctcaagaagatggaagttccttgttttcttacccttattagcgcagagggaggttggttttgtaatgtatcataacgatttctgtaacatgcaaattaagagagatcatatgctacatttttggaacatcaactagagcacagagattacttccttatgacgaacatctcacttttggttctcattttttgagtatgagtatctccagttgacagaagttgtaggtagtcagtaattgtttttttaatgaatgaatgattctaatatacatctcaatcagaattttgaaagtaggatttatcctattctctaaaacctgttgctcttcttacattttgtatgtctgctaatggtaccactttctatctagttaaataacaaaagtgggaggcctcttgtaaatgcttttcttctacctcattctatcaatttttcttcatatttcaaatgtttgaaccttcctccttgctcaaaaatttacttctacaacagcttctgaacttgaatctattgcctctgttattgtgcccctgttgcataaaattccttatgattttcactatttctggttgaatctgaattttgtgacttgacacacaaggctatgccctctctcctgtctccttgttcaacctcatttcttgacttcttcccgttactcc

SEQ ID NO: 73553 - DNA, 1069 bp, Homo sapiens
attgccttgcgtgttggtgggtgcctatagtcccagctactcgggaggctgaggcaggagaatggcgtgaacccaggaggcggtgcttgcagtgagccgagatcgcgccactgcactccagcctggctgacagagcaagactccatctcataaaaaatatatatatatctatatctatctatctatctatatatagatagatagatatatctatatatatatgtatacacacatacatatatattatcaggaaagaaagtacaaatataaatctaggacttaaaataagcatacattacttttttttcaaacatcagacagggtttctcagctgcaagcaacataatcactctgggtaatttaagcagaaaatgttattacaaaattaaatatgctatgaaacaaattgaacagatttcatcatagcctatatcaattaattacttcacaaattttgtacctaccttacaaaatttctggtaggcccagggaatcatgtgggtggtctgtagctagaagtaatacagaagatacgctgcactgtatcacagcaatgctctaatggaagtgccactcccaactctctgctgtggtcagcacttgtgacaccagggacagacagccttctgccacagttgccccaggagaaccaaaccctccatcgtagtgtccattgttcatgtgtgtgcttgtccctcatgttggccagtttttccttagtagaaaaggactgggataagtattggttaaccaatctctagtttctgccgtcctttaatcttctgttatttttatttctctcctctttttcttttcctttctgtgtcttctgtctactcttgtcagggtcatactttcctggagtatcaagagcattttctagatttcaaagagtttgttgaaacccttgctgttggtcatacgactgattgaattgtgatatatttttggaagggaaccaaaacatgggaatcctagagcattttgggtggatatttggttcttcttctgtgtatatgtcctcaggtctgcagtgatagaatgctgtaacttccttttcctgtggttt

SEQ ID NO: 73554 - DNA, 1051 bp, Homo sapiens
gtggttgagagcatttatatggtgcccaccacataaactgtctggtttcagattcttgctccaccatttcacagatatgagaccttggacagattgcttaacctttttctgccttagtctcctaatctataatacgggttaattatagtacctacctcaaacaattgttatatactttaaaatgagttgatgtttgtaaagtggcttaaatggtgcctgatgtgtagtaagcattatataaatgcttgataaacatcttcacagggttattgtcagggataaatgattaaaatgtaacatgcttagaactgtgcttgatacatggtatgtactcagtaatctacttctaaaatatattggctgcttagggtattgacttctttagtaggataaagcaattgtattatggcatttgtgtttgctacttgcaatttaattgactcaaattttccaatagccttgaagaagttttagaagctttaacttcagctggtgaagaaaaaaaaattgacagatttttttgtattgtggaaggcctccggcacaattcagttcaactgcaagtaagttttgtgtgtatataaaatctgtttttaaatggcatatattacttttaacggttttatgattggtttatatgaaaacattgttatgaagctctgcatgccttttaatattcttttatagcattatttatttatttatttatttgagacggagtcttgctttgtcgcccaggctggagtgcagtggcgcgttctcagctcactgaaagctctgcctcctgggttcacaccattcttctgcctcagcctcccgagtagctgggactacaggcgcctgccaccatgcccagctaatttttttttgtatttttagtagagacggggtttcattgtgttagccaggatggtctcgatctcctgatctcgtgatctacccgcgtcggcctcccaaagtgctgggattacaggcatgagccactgcgtccggcctagcattatttttagaatatagaattcctatttgtactgtgtcataatttatctta

SEQ ID NO: 73555 - DNA, 1902 bp, Homo sapiens
tagtcagttctcatgctttagtaggatcctctgagatgcatgctagataaatagtactgttttattgtttctattcatcttctgtattttgacagttatctttcatagatacatcattaacataacttatcttctaattggatttgacttcctggcagtagtaaataaactttatcctaatcccaatcgtctcatttatagaatgagtttacaactgcattgttttccttataataaataccattgtgattagaatacctgtgcccattgtggcagtttctacatggtatctgctcaaatcatccttcagtttttgcttatttatgaactaagtgctaatatctaggcctgtattttgtaatatggtagctacatgtggcttctgagcatttgaagtgtggctagtctgaattgagatgtgctacagtataaaatacacactggatttcaactatttaggaagaaaaagaagtgaaatgtcatcaataaatgttttatattggttatatgttgaaatggtaatatttggggtatattggattaattttattgaaaatagttttgcttgcttgaaatttttaaattactcatgtggtttacattatatttctcttggacagtgttgatctgtgtgtttgcttatgataatatatctcttaccaaccttccttcccaggaaaaagattttcatggcctcagtgtctggttccgtatctggctgtttgtttcatatgcttctgttggcaaatcccatgtttctgactgcttcccactttctcaatttggctacttaacctgtcttaataattgtcagctgtattgttgtaagatcaccttgagttatctttatttggtttagttttgtggttcttgacataaagtgaatacccttatgaactttttattttattttttttttgagacggagttttgctcttgttgcccaggctggagtgcaatggcgtgatcttggcttactgcaatgtccacctctcgggtccaagtgattctcctgcctcagcctaccgagtagctgagattacaggcatgcaccaccatgcctggctaattttgtatttttagtagagagggggtttctccatgttgctcaggctggtctcaaactcccgacctcaggtaatctgcccgcctctgcctcccaaagttctgggattacaggcgtgaaccaccgtgcccagccatgaactttttagagtgttacacagtctatattttttagctttagtaagtgtaaaaatgtcctataaattttttttaataactacatttccttcagggtattatttttctaactaatttctaacatttgacctcttattttcaaaatattatagtatggcttggaaagaattatgagtgaggagaggagcctttccttattggccaaagccgtggatcccagacaccccaatatgatgacagatgtggttaaacttctctctgcggtatgcattgtaggggaagaaagcatgtaagtgttatcaacatattcccctaattatataataatttaatacagattgattcatttaatgtttcattatctactctaggctagaatttactagaatttaaataaatgttgaggtatatttaagcagctaatatagtttcttattggctggaaatttttgagtaattatttctcttaattgatttattagttatggtctaacatacttctatgaaaaactgatttccttatcatatttaaactgtttttttaactgaaaccctaaattaaaaaaaattctaaatggaggctttgaaaatatacaaatggttctatttcttatgtgattttttttccccacatagaattatttcaaactgtaggtcttctctatccccttgtaaaagcaaacatattacgatttggaa

SEQ ID NO: 73556 - DNA, 1031 bp, Homo sapiens
acagatattattttcaaagaaaatatgtgatgtaggaatcacaactcctttctatgctgaattcacggttctttgaaaatcagatattagatatataaggtagctttttacatatctgttttaagagtaaatgaatgaaagaatcaaattgctgatagggagaggtctttgcccactaagtacatagaactggtttaggaagccctttttaaagtgagaatatagaaattggaaatttcattggtgatggaaaagccaaaagtagaaaaaatctaggaactttttttaaaccaaagggacatttggatcataatttgaatttaagaagaatatcatggttaaattaaggtggtaaatagaagataatattcttactttgtttcataatgaatctgaggaagattgaactttattttctaattaatatactatttttctcttaagagatttttgttgcttgtagtttatatacatggagctataaaatattgccattttatttggtgcttttatctgtgttattaagaataaaaagttaatttaagttattgttacttagtattatagtgtctgaactctaaacctagcaatatgtgaaatttttggtgaagttttttttcccttcaagattggttaatggttgtcttaatctttatttgatcacatctataagtacaaaatttgttaaacctcacttatacagtctttattagcattcattgaatggtgaaaatataagttttaagaggaaaaaaatgtggtaccttatttggtactagtaattaattatacaattaatgggcaaatttgataacattacatgaaagtgaatttcttataacattaaattggactaagagtattttttaaatggaagagaattttaattgcgtaggggaaagaaaagataataaggatgaaaagttagtatattcaaattgaaaggtaattagaacagagacttcagtttggtcagttaactgtgtgtgttgctttgaagagtgcacccaaggtgcgggtgctttgcttct

SEQ ID NO: 73557 - DNA, 1510 bp, Homo sapiens
tagcgaggtagttttcatgtaatccaggcaagctgttgtctagtgacagtaatgttctagttatgtaaaggcctgtgattgggtcagtgggtttatgggacaggtttggtttggtgaacatggagataactcatttaaaacccagtgatgcagtttgtttgtttgtttgtttgtttttaaagcaactgaactttgaaacttaggaaattcttaacatttgtaggaatgtatttcagtggtttggggaattctgctaaagcatctcttttttttaattaatttttgccagtaatctttttctttatgttgatctacatctttcctccatagatctttactcacttgtacaatttgtcttctttggcatagccccaaatgggctgtaattagtggtatgctggtaaatgtttagagccagctctgggtgcgtgggtgggggaggctctgattggtttgccagtttctttggtgtgaatactttcactgtggctgatttcaagctacccacgtgatgtccctaaacatgaaccatggaagagatgggcacagtctgctcttacaagcctgtgcaagcggagtttagcacactattggcatatccatctttgcttctttcacaactaagatgagtcatgaataatttttatatatggtgttattcttatgttttagttacgattaggaatatagcaaatataaaatacttgtaggtatataatatgataacacaagctgcgttactgacaatgtgtaactgtcttttttctgtttttcagttgggtggaaagctttggacatgaagggcttggattattattagacattttggaaaaactgattagtggaaaaatgtaagtattgctaataattattttcaagtaagcatcattcatatgtccaattataattccaacactgctattttttatgtcaatacagccaagaaaaagttgtaaagaaaaatcaacataaagtcatacagtgtctaaaagccctgatgaatacgcaggtatgtacatacgtaattagtatttgtccgtcaccaattttgtaatatatgattttcagttgcagtaaagtgatggtaaattgttctgatgtgttttttagtacatgatggaaaaatattgaattttattgaattctagtttcaactgtcttgcaataggagaaacttgataatgaataaacctcttctggtgctgaactcctcatgtataggttaattatctctccccaccctttcctccctctcaaccctgcccaccccaaccccatcttctttctttttttctctccacccaccaccctttctctgcttttttgtcctactcttcctcttttcttccttccttcatttcctccctctcctaactctcaaaagtacggcgtgagtcagctttaagatcatgattattaaatgtgagctgcaataatacttattaccaaaggttcaagttaggaagatttcttatattctaggaatttaaaatctacaatgaaattaatg

SEQ ID NO: 73558 - DNA, 1459 bp, Homo sapiens
gcgcatgccaccacacctggctaatttttgtatttttagtagagatggggtttcaccatgttggccaggatggtctcgatctcctgaccttgtgatccgcccacctcggcctcccaaagtgctggaattacaggtgtgaggcaccgtgcccggccaaaaatatccctttttaacatgttaagtttgacatgtttaaaagagtatcacaatttgagacatcaagcaaacccctagatgtgtgagtctggagcttacatatgtggagtggagatatttaagtcctgagaatggatgcaatcccagtgtgggcaggttgtatggagaaggaagctaaagatacaggtgagcggtcagaacaagttctgaaggactccgggttcagaaagtgtccagaaataggtgatccagaaagggaagaggaggcagaaacacagactgaggagtagccagtggggaggagaaccccaaatgctggtttctggacctaaaggaagagtgtttcaaaataagggagtgacaaactgcatagcgtgctgctatgaggtggggcaagatgatattattggaactggcaagaggaaggttgttggcgtccttttagaaaatagatttttttggagtcttggtggtagaagccagactgaaatgagattgagtgaatggatggcaagaagtgctgaccatgcttgtgatgaaattttttgagaccttttgctataaaagaaaggagagaaatgggaactaacttgaggggtatctgaggtcaagtgaatggaacttggtgaacacatggagaaatcaaatcagcgagagttcaaagaagaaggaaatgtgaattggccttgaaagctgaaattgtttcagttgttacaaaggcagttctgtggaggggagcattatgagtgcattgccacacaaaagtagcaatgaaatttatagaatcaagggaagatcatgggttttaataattaggactgctctgaccagcattgggtagtagtgacaagtatttagggtggggacaagcggtgaaaagcctgaaatgtgaccataacgtcttttccacatatattgttggcaaattagtctatatttaaaatgaataatttagtgctttcttgaactaatgatgtttaatttgatactaagaaactacttactggtactggtagtgccctttagttaaatattagtgtactaatatttaacacattccaaataagatatttccttttttataatatgttccttttaatagtggacttaagttttgattagagcacataccagtatctatgttttaaaatccatacttgttttactgttttttcatctaaaggtcaagaactcttgtttcttgtgctttgtttttttatcattcctgttaacctggttttattttcattttatttggaatgctttctctagatattttatgcctttcagtatgttatagcca

SEQ ID NO: 73559 - DNA, 1054 bp, Homo sapiens
tggatatttgtccccacccaaatctcatggtgaattgtaatctctagtgctggaggtggggcctgggggaggtgtttggatcatgggtcagatccctcatggcttggtgctgtctttgtgatagtgagtgagttcttgtaagatctcatcatttacaagtttgcctccccaccccctctccagccaacacacacactctggctctggccatgtgacatgcctgctaccccttcaccttctgccatgattagaagcttcttaaggccttcccagaagcagaggagatgctggcgccatacctcctgtacaacctgcagaactgcgagccaattaacctcttttctttataaatcatcaagcctcaggcatttctttatagcaatgcaagaatggcctaatacaataatatgaaagaaacacccaaaagaatgttagagccactgatatcacctgcagtccctctgcagggctaagtagaagtttagcgcatttgaacagaagcctgatagaactttctacaatgacaaaaatggtctatgtctgtcttgttcattacagaagctacttaccacatgtggctgttgagcacttgaaatattgctagtgtgattaggatttaaattcagaatttaaatagccacatgtgtctagaggctaccctattggacaacacatctttagagatcagaaaaacatttcttgtgcacttgttttgagcctttgtactcttgagtctatatgtgtggctgctctctccactgtgctatgaatttctgaggaggggacccggtattgtatcattgtgaagccttaatatgggactcaggagagaagatcagagtacatgttaaatggatttgaatagtaaaaacagaataaggagattaatgcttgaaataaagtaaaatacatgagcctgtactgctcatttgcaagacaggagagcaggtatttcaagtgtttttatgtattctctgtttggaatactagatgaggtgcaaggatttcttttcttaaattgttgcgattccttttagagagaaacatctaacat

SEQ ID NO: 73560 - DNA, 1052 bp, Homo sapiens
gagaggtgaactggcccaggtcagaaacagagtagattaaactcccatgctgaacagtagtgggattgtgcttgtgaatagccactgtactctagcatgggcaacacagtgagtccctgcctcttaaagcaaagcaaaacaaaacaaaacaaacctaattatttgaaactatcagtttactgtttaaaagacaacaacagaaggtagagtgttaaaccaaaacaatttggaaaaaaaaactcattaaactttacagtttcttatggatataaaggtagaatataataaactttctttctttttaattgttaatgcctgttttctgagaatgtaaaccttatgtgtttatggctttacagctatcagtatgaagttattaactgaatattttggtttctttggtttctgttgaaagataaatattttcaatgagagaaattattaaactgcagatactaaagcctctagttattagtactctacatacaaagaatcagtatagtttattccttagattaattttctgggcttgttattatgtcttagagtattgccaagtcggttaagtaaaagatttttaaaatgatgatgtttatcttggtattcccttacatatctatacatgaagaaaggccttaatacaaaggaaggcatcacattgacaatagaagaagttttaatttttatcattcagaaaactttttaagagtaaaactccgtcaattagattgatgatggattaatagttcttttattagaggggcagtatatgtctgaaaggaacaggtacagtttatttcagcttcttgtatattaaatttcataaataataattgatatagtttggatatttattcttgctcagatctcctgttgaattgtaatccccagtgctgaaggtggggcctggtgggaggcgttaggctcacgggagtagatcccaatgagcttggtgctgtctttgcaatagtgagtgaattttcatgagatctggtcatttaaaagtgtatgtcacctctgcccacactctctttcttgctcctggtctcacc

SEQ ID NO: 73561 - DNA, 1059 bp, Homo sapiens
catttcatatcatctcattcttcttcacaagtctcatcacctgagtaggtactgggaattcagcaattgcaaaatcaaagaaaaactgaggcagttaattaatggttattgacttaaatagaaacctacaggcatagagatagatacatatacccaggcaagagtgcatttaactctcttatcactatgagaacgtaagctttttcactatttaggctttatgtagataacagttttctgttttctgtaatttacttgcttaaaattacaaagtaaatgttatggagaaggatctagaatctagtaactaacttcacttaaaaattaaagttcaaactattcttacagttctctgatatcttaatattttaatctctagaggctatatattatgggccttcatgttaaaaaaaatactggttttctctacaggtttaagtgtgatttaaagattaagctatcaccagcagttgaagatgttgcatggggaattttggtataggctactatctgggagaaataaggtatcatttagtgagttggaaaacagtctacagtgattggagtagtgtttaagaatataatttctgactcctttgatatcacaggtattctaggcaaacttttgctttaagcaactaccatatgttagatacttcattaggcagataaagaaggtcattgtcctgattgatattggcattatgctgtatcatcttctttcagagtgtgtagatatatcagatttagtttttttttacatttattattttaaaaatctggtcattaataaatggtagattctttatggttgtataaaaaccattcagttatttcaaaaatcaactggtaactagaaattcaatgtattcttatacattgaataaagcaaacaatgagatagaatagtgagtgaacatacactgaataagtgttacacctgaactgagatgaaatgtagtcatttaggtaggggcaaagtaatcttttcaagacaggtcaaaggggagggttactattacctgtaatagttacctagcaaaagaaagagcatttagt

SEQ ID NO: 73562 - DNA, 1039 bp, Homo sapiens
ttgtctgattttaagaaattgccacagctaccttaatcatcagcaacaaccacgctgatcactcagctgccatcaacattgagggcaagacccttcaccagcaaaaataggacttgctgaaggctcagatgatcgttaccatttttaggcagcaaaatattttaaaattatgtatgttgttttaagacctaatgctgttgctcacttgatagactgcaatatagtgtaaacataacttttctgtgtactgggaaaccaaaaagttcacgtgactcactttttgtaatatctatctgctttattatcatggtctgtaactgatcctgcaatatctctgaggtatgcctgtatttttgttcaagttccttcacagtaccacagaacttaagaatctgacatgttcaccttttctactggcacagatatccttattcattcatgatgttcatgaggggttgtgcttggtagatgtcagaatgtaaaggtttaaaggtaattggaaggaaatagtatacagaaacactggtttaagtagtaatcgtaaaaaaactactctggaaagaattacccagtaaattggtaaaattcccaagcatgtatttccagagctcaacaggaattttgcaggttttgttcatttttgtatttttaacatgtaaaacactgcttgtatataatagatgtccagcaaatgtagaatggataaatggatgtaagtatcttgttttaaccagtagccccaatatggttttaatcaaggattacaaaaattttttaaaatgttttttgagttcctgttttctgagatgcaggtaaagataaacccaacatttatctttctctcaaggagtctttaatcttgtagtcataaaatgtctaaatatgtcactgaaacaaggtagaagtaattaagataaaataggggaaataaacctaaggtgggaatttgagggtcagcactatctcctgccgagggggttagaagaggttttgttgggaaggagcagataggatttgaacatttggaggtggggttgtg

SEQ ID NO: 73563 - DNA, 1039 bp, Homo sapiens
ttttttttgatatagggtctcacactgtcgctcaggctggagtgcagtggcgtgatcatggcttactgcagcctcaattcctcatgctcaagcaatcctttcaccttagcctccagagtagctgggactacaggcatatgccaccatgcctgcctaatgtttcatttttattttttgtagagatgggggtctcattttgttgcccaggctggtcttgaactcctggagtcaagcaatcctctggtctcagcctcccaaagtgctgggattataggcgtgagccacctcacccaggcaagaaaataatttttgaaaaatataatttcgaataccaattatatacttccataaacatatagttccttttaggaaagatctgtaattcagtgtcactttgatacattttggttaacttgatgatattgagatatgtatgaaatcagattgatgattgagcaatctaaaatgaatgtaagctgttgccaatttaagatggaaaaaataaatatctgttttagatttttaagcagtttaaaattcatatggcatgtgccatttctgattttcacaagaattctaatttcattgagggcagggattatgtaatttttaatctcagcctggaatgtagcatatgaacaataagttattgatgaataaaagtgatttataactacagtatatctcaaacacaaattagtctagcacaatatatccttcagtggtggtctagattcactttctcctttgcattcagtgacattgcactggttgcttgtaatcagccatctgggagtatttacatcacatagattggcaaacaatattagactgtttttgcgttactgagaaatggttgttaaacatttaccagcaacaccactgtatttaagtatgaatcatgacctgtgatatggtgactatacaaattaattcatgaaggtgagtgttacattctgtaatttgtgatgtaattgtttcatcagaaattagatataacatttataatatataggatatttttctcacttaaaaattt

SEQ ID NO: 73564 - DNA, 1037 bp, Homo sapiens
tcagttctgaatcctagaactctgaggaatgcaatgcagactgctattgtctgtcctgatgggagaggagtacagcaatcagaaaaggaagatgataaaagagaaatggaaactttggggtcaacttctccttggctacaaataggtcagaacaatctcaatctgtaaataacacaataatgactctgaggttaaggttaaggctagagaataaacacgtaaaatgggaagtattttctgaaattaagtattagccattgtatccataacttttgggtgagtggaagtgagaataaaaattttgcatgtttaagaaaaagaaacatttgtcaaatggaaattctaaatgtattattactgtggttcttaggaataatttaaataataatgtcaattatacatcaatttcaaaagctttagctattgtacatgaagaaataattcaattccatttctctcaaaataaaccatgtaatgatatgttctttgtataaacatgtggagacttaggaatactgacatgggtagtgaaaatggaaaataatttatataataccaattttctagtactgacataaagccgcagtgtatcaaactcaacaattcagttgggtaagtatatggcagtgttagtcagatttctttttgttgtcagtgacagaagcctaacttgagataatttgagcaaaaagggaaattttattggcttgaatatctggaagggaaggggtaaggttggaatgacaccagaatgaagtccgatgccagggcattttctcccttcttcccttggcctctttctggatgttgatgtcctttttgcagactgcagaacagttttctccaaaaactgaaaacttgaaactaaaataaaacatagacatgatcaacttttttttttaaaccctaaaactgtttttatgtcaaattaagcacaggcaaaagacaaataatagatctggtaagaaatatttctaatgatttttacaaagagctgctagcaataccctgcagtgggcttttaggacttggctaga

SEQ ID NO: 73565 - DNA, 1055 bp, Homo sapiens
gattgtcgtcagcatcttagcaggcaacctaagcactgcaacaagcatctcctactgtggcctcctttatcaaagttttcagcattagtaccagaaaatatccctttagaataatgttttcttagcagaaacagaatctgatattgttcctaacagagaacaccatttttgtcttgtttaccaggtcattttgccacagtgcagatggcctgataacatggaccacatttcaattaggaaaaataaaaacaaatcagcagagctaatagcatgctgtttgcaaagcttttaaatgtgacttggaatagcacaaaaattcattttatattcttgtagtaaattggcactcatttagtaacttttatttacagaacttaaagtcttggaaacatctgggtaaatctgtgaataatttaagtgttcagtttgtgatcattgtcaaatagtgtttattaagcatttacctatgtgttacaatgctggatgccataaatatcaccataaatgaaaaatagaggcagctgggatatttacctcataaaggaggtatgttactacattaaaatatatgaaaagtatgattttatatttgaagaatttatgtattgtccatctgagagtttatttaatgttacataaacggattgcttttaatctaaaaaattagaggactagatttgataacatctaagttactttccattttgcaaagttctttcattccttcatttactaggaaatgccacccagttataattcttgcttccaaaaggattcagttgaaaacttggtattttcatcttttttttttttttgagacaacatcccgctctgttgcccaggctggagtgcagtggcgccgcctcggctcactgcaacctccacctgctgggttcaagtgattcttctgcctcggcctcctgagtagctgagattacaggcacctgccaccacgcccggctaatttttgtatttatagtagagatggggttttgccatgtctaccagcctggtcttgaactcctgacttcaggtgatctgcctgcctcaccctc

SEQ ID NO: 73566 - DNA, 1062 bp, Homo sapiens
ttactattttattgctttgttttgtctacttatgtgaaaaaggtgtatgatttatatatacttctcacattaacagtgctatagaagtaatacttctgatatatgatcagaattcagatatcattttaatgcccaataaataagtaacaagataaatgagtgaataaaatgtctttaaataattacttttgtataatgcttatttaagattagtggcaaaatccaagttaagattgtgaccagtgggtaatgtgccaaataaaggtatttaaaatacaacagttttaacagtctttttttcttctttcagaagtgattcattgttgcagaaaatttagaaagtataagacattatgaggaaagaaataaaaatcctaccaaagatgaggcatttatctctaatattaaggttgttttgatttttgaacagcctatataggaatttaataacagtaaaactaagatttctataacagaaaaattaaatatgactttcctgttatgtcaacgttttgacagaagcccaggggctgaggatatcaggtgctgaaacaacacagccatgaaaagagactgcagagcctattgtgctaccattagcctgtcatctactttgaaactatacaagataaggttcacagtaatttaagaaatggaagatcgacagagggggtttcttcggagagagaggtgtcggaatgctgtgatattatttctgaccccttgtgagggactggagccaaatgagtgggcatttgagagaagcactcagaggttgatgtgtatcccttccagtttggagacccagattggaaacttactgtgttcactctgctaggttctaaaggcaagaggctattcgagctgctttggtggcagagcaaagaaaaaggattagacttatggttggaacaagctggacttgtgccaaaacattggtcagatgtggatctttcagaaggcattgactgtgacttgtcttaggaggaattttgtcccaaggggaccccctgcatgtgcagtgacccccaatagggacagtttatgcagggtggactgcta

SEQ ID NO: 73567 - DNA, 1024 bp, Homo sapiens
tagtcacatttaactattcagtttgaatttgctgttttgacttcagcattgccaccctttttgcctattgagttagtagttgagggcactgagtgagatataatatgctttggttctccctttttgtgttgcacttggaggaaaagacatgtactgaggtaatgtgtcatttaggcaaaataaatccttaaaagagtattacttttgtgaattcttcattattcacattgatggggatcttggaggctcacaaacttgattggtcaacatacaaagactcagttttcatttcatgagcaggtatacaatctgttttaatggagactgatgtttaaaaatccaaatgtcactttagtaatttacaatcagaaatattattcttaagaagactcttgtagtctcttctctccttataggctagtctacacaggaagccaaatgatagagagttgcttacttggtttgttggatgatccactgtggagataatggggcgtatatttagactaagatcctgccactgtgcgtgcacccagcatcatgtgctttctttaatgtgataaactagaagctccacgaaggcagagaaatcttgctgcagcaaaaactagataattgtgtttatgtgtctgaatactccctttcctggggagttgcagtggtattttgcagcactttaggtctctggacatgtttgcaggtaccatgcagactgcctcctcctgtaacacatattcacttctcttagagtactctgaaattgataaagtcatactttcttatggcaactaaaataaatttgttttattttgaggtcataaattaattttattctgatattggtgcaactgtgtgtgcgtgtaatctcctgggtcattttactgggaggctcatattatctcatattttgattttccttaatttaatctgaagttaattataatttaagatttgggaatatcttatagttggcaaaatgtatctctcctaaagtatacttcttgtctggttatgttttagagaa

SEQ ID NO: 73568 - DNA, 1021 bp, Homo sapiens
catcatctgtgataaccatttttgtgtatgttttgagtagaccaataatttatactcgtaaagcaatctaagtttagacttataggagatgtatatggtatttataatgtgatttttttgttatcttaaacctatacctaatttttaagataagtttttttaagcaacttaccctaaccttgtctttcttaagccctaataatattctttcttttaattctcatatatgattacattaatgaacacagaacagttcataaacaggggtacaaaaagtcaactcttggtattcacagaattcaatttatggaagtagatgtgtagccttcagtatgctttgagcatctattgcttactatgtattataaaataatggaaagcctaatattgaacatctatctctggaatcttaaataaatcatgctttattttttctggtgaactttgttttctgccctttccccaatggggtcatagaaatatatttttctataacttgttttatttttccctcagttaacttttctgcccttttttctgtcagaaatgacctactgaattcaaactgaatcaaaaacagagcatattggctcgtgcatctgagaagcctggtattggcttccagcacgcatagatctgggttctcaaatgacctaaggatcggttctttctgtatctcttagccctgcttttctaatcctggcttcattcatgtaagttctttctatatctagaaggttagtagaacctcccagtttaacacctgtattttaggtctagtagtatccaaaaattttaggtctctcaccccattgatttttaaaaagttgattatatgttactaagctaatatatatgtatttgtctatacctcatatttgttattttatatgtaatatagattttatttcaaatatatatgaattgaaaatataaataaaataatgtattaatatttcatctgaaaattttgcctcttaaatcagtttggtctctctttaatttttatcatattttaggt

SEQ ID NO: 73569 - DNA, 1097 bp, Homo sapiens
gattttgctacttagttattttgtctttttttgtgggagatcagggagttttcaaaactgtattgctgctgccatctgcctagctcctctagtctctgattttgaatctcatattcttttctttattctatgccaatttatgtctttggttaaaaaacaattcagggttattagcacccccgctgccctaactattagggtagaaaataatgacatttttctatgtaacttttagctgttagctcttggttttgctgttatttcatccataaactttcattaaacctcttaatggtccatgacctacaaatagttttaagtttaatttctatgctatgcttatgcagtgttatcatttccttatgtagtttcaaagttatgcaggatgcatccctttctgaatcccattgatagttgggaaattcagactgcccttcagtactataccccacccctggaaaaataggtctcatctgcttgtatatgtctataaattagtgagtgtgttaaatctatcacagcaggaaatcacttcaagcactgtgaaagactatcttaaagaatttaaattgattgcagatgttagtgcaattaagcaggcctgatgagctcagaatcatgtttctcagatttgaatatgagcgcattttaaaaaagcatagtgatgtactccatgtaaattgagttcataggcatctaagagtttttatcaccttctgttttaaaatggctcagtaatgtgaaaagtgatgtgtgaccccttgtgcagatacttgtattactttggataaatgtgtattatttgtcttaagtatatagagttgacactgaatgattatttcctttgttaattcatttgtctgctgattagtttgtctaccttttgtgcctataattcatttaaaaattatcctatagacagaaaatgtaatgttatttcattccatttttaagaaaaaaaatgagtatgacaagtcaaacgtattggcttagattataggagcataggatcttttttacccttgagttcagatttcttgactaatcaaactttacctaccttaatttcttttgctttattttagctgaaatgtaaa

SEQ ID NO: 73570 - DNA, 1050 bp, Homo sapiens
aaagtgctttgtcttttgctggaaccagtactggatatttgatgtggctatcagaatctgaaaattggttggtttatttaccttttaatttttatgacacacagagcagctctttcaaagcagtggaagatagcttcaggtgcagctgttgtaaaaataaataaatatattgaaattgtgtgaccttatgaatggcagaaatctgcaactgtctaattatctatagttatgtgaatataattttatttgcctgctgtgaattttaaaagttcttttagtaagtgttttacctgttaaaatgatctagaatactttcttctctccctctccacctcttttctctctccttccttcaggcagaactacacgtaaatcattccaaaacaattaatgctgctttagtcacaaattattgatttttccatttgtagtgcatgtagaattgctgctctacttagattctaaaatgaggcattttaattgtgttttccaggaagatatgaatttaaatgaagataaaaaggcaccattgcgggaaaaggacttcagtatcaaaaaagaaatggtgatgcagtacattaatactgcttctaagacagtaagtaaaactgtcaagttgaaaaatactgccgaacatgttttaacatggaaaacagcacatttatctaatgaagtacttaagtttgtgggcaactgtaatcagagggcttctgaatgtataattaagggcacaagtatattatacatttgtttaaattaaaaatatttctcatcttaaaacttttaagctgcttctgttttttagctagttacattgctaagaaacactgggagggggtctactctgtcacctttccttgttagtgaattaatatagtcattgatttttaatgtcacttataaatcacagtgatatctgcattatagaaaagtgagaccgattttactctgtctacatcaaggtacataatagtggcttagaaatgtctttaatgtgagtctccctatgaataaaattatcttgtaacaaattataaatgttggtattga

SEQ ID NO: 73571 - DNA, 1041 bp, Homo sapiens
aagaaactggaggtttttactggggccaagaaaaagatggtttgggagtgggagaagtggcaagatggaagattgaggtcagagataaggattatggagattctgatgatgcctgtggtggacaggttttagataatgaaaaggtccaggtgtggtcattaggactgtagctgaggacagtggaagtgaagcttgcattggcaaggaagccaaggacactctagggcaggggtgcccaatcttttggcttccctgggccacattggaagaagacttgtcttggaccgcaactaaaatacactaacacttttgatagctgatgagctaaaaaaaaaaaaaagaaatcgcaaaaatatctcatggtggtttaagaaagtggtttgaatttatgttgggccacattcagaaccgtcctgggtgcaatctggacaagcttgctttagggccattgtgggtgatagcaaggtgtggagtgtcagaggaatcaacccaagttgatggcagtggaagtgttcagtcagatgttactagccccaaggaaatcggactttagatgataacatagataaataatatggaaataagaatgagggagatgagatagaacagagtttaaatctaagttaaagaaccatggtcaacttacagaattttcctaaacctcagctctctcctcaataaagaggacatacctcaagttactgaggattaattaagtaatgcttatgaatgtttagcacagtgcctggctcaagaatttgaccatagtttaagattacaggagtactagaggtctttgtaaaatggttctgggagaatgggtgagaaggtcagtgcatagagcaggtttggaatgaaaataggaggaaatgtaaacagttggagaagtttgtgttttgaatggaattctgttacctgtgtctgacctacttaacccttcctctcaggacccttggatttgtcttgattgtggtttccttagtctcctttcctccctcaattcagtgtgtatttactatagccgaatattctacaaacctc

SEQ ID NO: 73572 - DNA, 1046 bp, Homo sapiens
atgtaggttctagtgagtgagtggaagctttcacctcactcttctctcacctcctaactgttctctgggccttcttcctcggtataactgttaccagacaactctagtacattccgatgtgatttctgtgagacttcactcaaagatgaatgcggcctaataggactgagctttgtttacctgtacctacctagatgtgatgtgtcttgtgggatatatgctaaattatacatcatatttatgaaagaaaggaaaatgactttaattacctgaatttgtgcctaactttaaagtcaagtaatagaacataagtcagtagcttttaaaaataaaggctcaacctagaattatttaagatagttttatcttattattctagtaggatataaggctctctgtactataatttactttctattttcattaactttttatattttccttggtaagttaataacaatgagtgataaaaagtgtgatgtaccatctgcccaaccacagtttttcagtaaaactatatattcatattatactcttctgtgtaaagtagaaataccagcatggattggggcgactgaatgtaaaatacatccaaacaagttctgttttaaataacttaaactgttcatttagtcaggtgggcctttcttagcccattaatgagttaattaggacttcctgtacttaaattttcagtagtaatacttaagtactatcttagaatctttaaatatttataggatagtttagagagctcctcctcaaatcagcacaaacttgggaataagatcaagagctctcagagttgaatatactaatatgtagtagggtgtacagacttgtatattcattgttttgtccactcattcattaataatttgttgagtgcctagtactcttttagaaatacaaatatggaaaaagaaggtctctgtcgtctgggtgcagtagagaaatggatgtatagacaatcagtagttttagtgtgatatgataggggctggaaggtcacttgatcttagaagacttcatgtgaaggtgacttt

SEQ ID NO: 73573 - DNA, 1534 bp, Homo sapiens
tagtgagtattttaataaatttttttgttgaacaagtgaaagagtcactgttctgataacctgcctggtattggatctcagcctggcttggcgctagtcaggcttcccagagacagagtcttgccttttttgcacaaggtaagggagctgtaatgaggaccttctgtcagtctttctgaccgcttgcctggattgccttgcccctgctttcttcttaattgtacacgtctgtctctcctggattcctcattgaccctcttcacatggacttgctgactgaactactgtctcctcactctcactgttctcttctgatcttgtgctttagcttgtctcttgggtaggcccagaatttagtccagggaaggatcaggcaggtagcctagtttaggcatctgtatctgttgctgtagagatttgagaataagcatggctatcttcaacaggagacaccaaagagtaaattctttcttattcattgttgactgatacagtgtagaaagagcattgttggatttggaatcagaagattcttggtgaaagacagaattttacctcttattagctctgttaccttggcaaatcaattatttgattgttcacttatttaaattgggactaattatacagtttcttcctttctcatagttttggtgagtttcttaagtttaagtatgttgacctgctgcattcagttctgtccgtttttacccctttaaaaaatatttcttgatgtacagacagagaagtggtgtgacacatttgcagctgagccttccagggtatatgttatagatcaatgcagagttgtgagaagggaaagggtagctggatattttgagggctctttaaactatttctggtgtgttagagctcagggcagcatttgccaatgatgctttgatatgtactggcaatatgttttctgattgaagtttgcccccttacaacatacacattgcatgtatgctttcaacgtagaaattcttaatgtgaatagccttttttttggtcagaacttgagagaggcatataagaatagcaatgtgctgtagtcatacatttgaataacagtattttagaaacattaaaacatcacgggaagcattaatgttaaaaacctatccctttaagttgttttgttaaaggtctgcaaaagtacttcatgttttaaggttatttcttgagttactatcagaattgaatttcactgtcttgttaaaggaataaaggattgctatattgttgggttccctaggcagagttaatagactataagcagtgtttgttctataaatatgagcattctctttgtataaagtgcagcttaggtgctagggtaataaataaaggtgaataaatgtttagcttataacttccattgcttatacctgggttttgaagaaggttttcctcatagaggcaaaaaggttgggaggaggggggagtgaggggagacaggtttgaaaaggtaagttggaagacattgaatgtggatgtgacaatgctaaattatccatcagtgtgtccactg

SEQ ID NO: 73574 - DNA, 1050 bp, Homo sapiens
gaaaaatcatcacattaaaatcttttatatccagtgttctttttcattttattttttctatgtgccctcattctcagacagatacattgtgttctaagttaatatacttaatggtaattaatactgttaattgggataatatatttattgtaccatagttaattttttagtttgtgagttttacaaagtaaaaaaattttagtaagtgtttggaactatcacacgcagggtaacttttgtccatctttttgagaaagagattaaaacgattatatataatgtgtttttattggactgtcagaaatttaattatattcaagttaggattgtagaattttgaatgtaccctattaactaaaataaagaagctgttataaattactaatatgattgcttttttttaatttgcagcatttaaatattaggacactgacggatgatatggtaagattatcctcaacttttcctttgttatgaattgtaactaaccatataacgttgatggtgtgctctgctaacatctttgaaatggctaaaagtcacatatattggaaacgtactattcttatagtgctgaaataagaggcagaactggtaaaatacactaaattgttggttttaagttgtaaagtgaatggtggatatgttaattaaaaaaatttgtttaattacaaattgttagtcaactttgaatcattcaaatcaactctcattctttaggaatgagttgcacacttcaaaaaagaagtaaaaatagcaaagacatgtcagcttttcagaaatatgtagttgctaattaaagtaagtcagactaaaatattatgcatatatatttttaaaattttgcttaaaaatgagagaaccgggtatgccttactacgttttttatgttgaaaataatagggcttctcatagtaacactttatagcaccattgtagattcttgcatagtcaagtaagtttttctgagaaatatatttttaaatgtaacttgtggttaatagtaaaggaataacaagaagaacaacaacaaaacacaaacaatgacac

SEQ ID NO: 73575 - DNA, 1049 bp, Homo sapiens
aaaatacaaaaattagccgggcatggtggtgcacgcctgtggtcccagctactcgagaggctgaggcaggagcatcacttgaacctgagatcaagtgcactgctgcactccagcctgggtgaccgagcaagactgtgtctaaaaaaaaaaaaaaaaaaaagtcaattttaatggaattaaactgtgtcagccaaagattatttaaaaatgctaccacatatttggttctgataataataaattgatgcaagcctactggcttgaatctgatggtggctgtcatgttcctaatgatatcaatggacagatcctttgctccattggcctgctagttcagatatgctaaccaatgaaagaaaacataaaatttgcgaaaagtcttgggctacagcttggcatctttttcactgtgtgtggacctcctgggtttgtatattgctttgtgtactacaatttatctgtctttgttacttgtaaactaagttagtggggaaactatttcacatgcctcttgatattcacagcatttagcacagttctctgaaagctctaaatccattttttgacagcatgtactatcttcaataaaagttttgatgcattgcttaaatgggaatatagagaccgatgttctgtgtttctacttttttccccccgactcctatgttcttttgaagaaaaatctataaaggctttttttctctttcaattccagagtgaccctcttgaccattcatcctaggaactgtcattaacagaaaacattgttacccatctgtatgtggttctccttactttttagggagaaaatagaattagtatttgagaaacataggaccagaggaagaaggatgagtttttagcttaggaaaagagccctcatattctttaatatcacaccttaaccaataaccagtagtcttgtggacagaacggttatttattattattttttttttttttgagacggagtctcgctctgtcgcccaggctggagtgcagtggcacaatctcggctcactgcaagctccgcctcccgggttcacgcc

SEQ ID NO: 73576 - DNA, 1047 bp, Homo sapiens
tatataaacttttgattgtatttcttaattcccaagtatggattctagaagtagaattattaggttaaagtgtgaacatgggatttgttttaccaaattgtttcctaaaatggtttaaccaaatttcctttatggtgatgctgaaatataaacaaaatctttctcaaatatatgtgaaagaatgggtgatgctctgtcagtctcaggaacatccaatctaaatttgtgttgtggacaagatgtctaggatgctaagccactctcagaagtaatttagtagttgcgataagcttcaaggtgactctgggagttctgggatctctaattctctgtatagcaaatactgtaaatgcttttcagccttctccagacaatgaaaaaggtcttggattcccataacctagaactgaacctacttgtaaagtggttcagagattcgatttgcttttccctggacatgttgcaaaagagtttttcatctggtagtataggtgaaaagaactgaaatagacgaagaggcatcttaaaatatgtacaaaagctgtgttactaaattagccattatatttttccttttattttaccccaacattgaatgagttcattcaaggaaaaagaatattggagttatgttagaatgaaaaatgacttgttaggttagcctctgtggggtgcaatctaggtcagagtcccaagccacaatatgataattgtttttttctacagaggcagttctttcctagcaggtatgttgcctccttaaaccttgtgttctcagagaaatgcatcttttcactgctgtggacacttgaatgatgccttctccttaacgctgatctctcgttggctctcctttcacgatggaggaattgaggggcagggaggtctggatacttgagtgcatgacagtagagaagctttggatagtgagtaatacatggtatgtttgtctttctgaggttggcagaattgcagttttgaataaatgagcagattaaaagaggctggagagcttttcctaattctcacctgttcctaacatctccc

SEQ ID NO: 73577 - DNA, 1008 bp, Homo sapiens
aaaaaggaggaaacaccctagcaaaccatgtattcttattagtgttagtcaattgacagaaattgcaacccccctccatgcccatttatctttgaggttttgttttttgagacggagtctcgctctgtcacccaggctggagtgcagtggcacgatctcagctcactgcaagctccgcctctgagttcacgtcattctcctgcctcagcctcccaagtagctgggactacaggtgcccgccaccacgcccagctaattttttgtattttttttagtagagacggggtttcactgtgttagccaggatggtctcgatctcctgaccttgtgatccacccgcctcagcctccctgctgggattacaggcgtgagccactgcgcctggttttaaggtgtggttttgtagtcagtgttgttgttatcatttagtaatcatccaattggaattatgctcatctttcttgttaagatttcatttttgaattctttgctccataaataattcagaaactgcttcagcagctggctgtcccatcatagttctggggactgagggaaaggaaggagagtgaggctggatttttgactcattcccagcctaggtactcaccaacccttataagtcacttctgtgctgttcaatttcctgttctctaagatggggataatagcgagtttttagggttgctgggtatactagtaatcgcaaagtgtccagtaaggtgtagtagtagtgataaggtgggctgtatcatatgggtacctagggacccatttagcaatcttgggttctgtctcagttaaaggcccatttggtctaaaggaacagatccctatacaatatctactgtaatcctgaaaggaggaattgtaaagatacacaagagtagcacctctaatcaagctggccgtcacaaaggactggaaccaggaactaaaagctgacagcttttctcagtctctttccctctcaggccatccagtgtctctttgcttctcactaggcat

SEQ ID NO: 73578 - DNA, 1044 bp, Homo sapiens
attagtaagtatcagtagtgaaggatgtatacaatgtgtttcaaaacagtttgcttctaatagtttttttggttaaataagaaacttgcaatctttaaaaaaatatattttatcatgtatgtatcatacaaaagaggtgtaaaacactgtatactcactaataagcttaaaacattaaatatcataaattccattgaaatgttcattttctcccttcttatctttatctccttctaatctttactcttcatttcctgggtttacagggcttttttttttaattcaattttgatttttttaaattcaattttgatttttttagggttccaatttatatatatatatatatatctttccctaaaagtaaatctgtgaatggaattaatactcagtagctttctgatctctccatctttgaggatcatgacagatcttaaatactggaaaggaagggggagactatgaattaatgtaccaagtgtgaggtcattctgtgtgctgagggatgtgggatatatccaagtagctgtggtctaagtacacaccctcttgaattaaagaagactgaatacctgttcagtcatagttctgtcaaaggagttatggtgtagaatttcttgaagcccttagtaaaagccctgagtagattaattgtgagatccataatgctgcatttatttagttaattttattatgaagtatcttcccaagatacagagagtttatcccgtaattgctgcatttttttccgaggttggctgtttatttgggtgtcataaaatgaaactttgtaacattcagtttttaagtaaaagatttgcaaattggtgacattaattatggactttactatagaattaaactgtttttgtttattaaaacctttgattgaattccttgcataatgacaattacaattcttttttaatgaaaaaattgacagcctgggaaatgaacatgaaaaatggagtgcatataatctgcattgagaaattcaatatgactatttcacttctttataaaaggtgacggtctccaattaaa

SEQ ID NO: 73579 - DNA, 1280 bp, Homo sapiens
tagaaaaataaaccaccactggaataacaaccaaaacctccattcatgttttgtctactctgtatttatagtttctaggaagctgggaaaagatggaggtgatatctaaatgctctttttgattttttgaacttgttccttcattgagttctcagcttaagtgatgctctcagttgtcctagggttaaactgtcaagaattgagatactgtttttagttgaaagctttaggcacctaaattttattcgtgtcagaattctacctaacacacaccaggcattgtaagcttcagaaggaggtaaaatcattttattcaggctgctgttctaagaaattgctctgaattttcccagccattctttcctttctatccttcttaataaaacagaaaaacccagaaatttttttaaataaatgatttatcaaaagaaacaatatatattaagtggctttttgggggatacatttagttgctgaaagtagataacatatggcatttaatactcctggaccactctgggtcttttctttgacggtaaaaaggggtgggggtagagatagggatgattgtctcagatttagaacagggcttaattgcttttttcaaagactcatgtctttaattatgaagcaagcaaactgacatacatttattacatggtgaaaccttgcatctcatctagtctatcttgtagcaattgcttctgaacagatgttacctgaaacacctttgtgcagttggtggaatgctaaaatttgtcatgcttttattattgttgtcttgaattaactctactttatggcgtaactttattgctgtgtcctagaatctttatatatttattgccttataaattggatttaaaattggctttttatatagaatgtaaattaacatgtgtctaacttgtttatgctgcagaataatacaggaaaaaactgctacgtattacactaatgtaattgtctttaacttagcacatagtatcctctaaactaggaatcaaatgaatgctaaagaatatgcttatccttacactcttgcttgtttatctcagaaactaatttgacttttagatctataaaatatagattaagcataaccttttacttcatgggatattaaggatcaaagcatgggctttctttgaacaggatctacaaaggtaacttttctttcagtagcagcaggatggcattgaaataccttaccattgggagtaatttttctcaaatagcaaattgaatagtctttattaacttaggggagaatttaagag

SEQ ID NO: 73580 - DNA, 2106 bp, Homo sapiens
atttggtttccagtctctgtgctgtttttcattcttatgtatgtcacattgaccatctcagcatgccatttgttaaatggattctcataaagatgaaatgacatctaaaagataacactcttaagctgtaaaggtaaaaaacacatctaaaacactgtgtttttgggtgggagtctggtatgaatcatgacttccagttaatttagaagtaatttggactcttggtactttgaaactaatttaggttcttgcttatatggtaatttctttagttatatcttccagttcattaattttgttatcagctatgtctaatctgctacttttctgaatatttgattttagcaattattttttattttaataagttccatttgcttatttttcaaatctgtctgggcattcttgatagtcctttgtttcttattcatttatttctttagacatttcctacttgattgttcttattctttatttgacagttctgctgtttgcaacctgggctgtctacattgactcagattcatgatggcttgctctctttcttgtgtgtatttatctttgtaagctcattgctttatcttcacctgtaggattccagagatgcttttctttggagatagtttgagtttgtctgccaaggagcctgggcatgctactgattttggaccaccttcctgttgaactggaaatcttaacatgggcagaagttccaggcacagctctactctgttcctgtactaaagttcagtatcccagtctcaagactgcttcctgagcagctcttcccagtttgcctacctttcactgctcttgattgcacaccagtaactcttgttttttggatggagagggatctttgagaccatcaaagttcccagcaatgcctcagaaagtaattgtacttgtaggtgtcaagtcagtcactgttcttgcagatgtcaagttagttcttggctttttcttgattggatgaagtgacgttatcctaaatcttttcaggtcacccagtcattatctgagcctggggcagctgtttttgatgggaacaagtaatataggttggtgatgtgatggataggagtaatttaggtggccagtgttttgcacacttctgcaaagcagcaagcgagtagtagaatggagtggtagactggtcactccctcctatcttagtgtaagaaagcaggagctctggtacccgctgaaatcttgttttactttgagtcctgttaaagttggcaaattcttgttttctaccaaatgtatagttgcgggcttcaagtcacttgtgagttgggtaaaagagtttgtagcttagatatctcttcccatagataagtataaatagtagaaattagtctattgtaattgtatgatactttggctgtgctacgaatcaattgactttgggatgcttgtgaattaaccaacttggtctcatttgaaaatatcttaagccgtgagcattgagatggtagggatagctactggggcatagaagagagatggaggaggctgagaggacagggcaagtatctgggtggagactttgtgaaggcagataaaattccgtaggaattaaacttggaacctgccctaggccacactcaatacctggacctgagtcctatatcctttgtagaacagaacagttgtcctacagattgtggaaagcctttcagtaatacctgtttctcattactcttggcaacacacaggtagtggtggcagagcaggacatgtggcttctagaagtgtccatctctaggatgtaggtcagtccattcaaagggagcctgtaaattggtggtccaagttgatgaaggagttctttttaattaggagagtcctctaaaagttctcacagacttcagtgtaaatcgtctaatcgtttccatcaaatagattgttaattattgattgattatgtcattgtagtaccttcagtgttggttttgagatttttcttttcttttttttctttttttgagacggagtcttgctctgtcgcccaggctggagtgcagaggcgtgatctcggctcactgcaagctccgcctctcgggttcatgccattctcctgcctcagcctcccgagtagtt

SEQ ID NO: 73581 - DNA, 1069 bp, Homo sapiens
ctcttatgcttttccagggcagggaagtgagtcttatttttctccttatctggattgtcaagaaatgcaccagattgtaggttctctgtaaagtctaatacagttgaccttggaatgcccctgccagtcagaattctctgggcagggcctctgcagaagcttaggtagagtcccaccctgcttcgttatattgttataaatcttcagcaatgttatattgtagcatttgctactttatattgcaacttaactgtttatgtttctcccacctgtctgtgctgcttctgtatggcagtgactcataaaggcagtagtaatctgcggggctaaaaacactatctttctaggaattgtgagtttcatgtaattcctgctaggtctcgaacagactaggcatgaggatctcctaggctttcaggtggcttctactaggtctttaattggggacttactatgttaaaatttagaatcacaaaggtttaaaggcagaaaagagcactggagggaaaatttctgactgaagggctttcaccaactcattttagttcttatatcctgagtttgctcttacacttggggttctctgttaactgtcactgacaaaccatttttcttagtattcaaatctatgtacttagttacttgtagaagctaaaaagaagtagatgctaaaacatggacacactattgttaaatctgttctataggcttcacctaaaatagcagattagggaaatatttagtgctgaaaagtttacaattctgaaaatgtgatcttcaggggggtacagaagatctatgtagaccaatctgttcaagtttacattatttttaagcgcagtttttttccttcttaaggttttaatcttcattagaacccctataaaaatcagtattttaaaatataacttcaaaagtagctacctggcggacttaaaataatttttgttcttcaatggccagtagcacacaaactattagattttgctgatttgaacttgaatgttccagggctttctacagagtagtgataatgtttaaataatgcactaaatggtaccttgtaaag

SEQ ID NO: 73582 - DNA, 1050 bp, Homo sapiens
ctaatacttatttagcacctactgtattccaagcatatgctaggtattacatgctgtctcctcatttattcttagaaaaactctgtagatcagtattttcagtacggtctttttcggcaagggtaaactgaggcacagaaagatgaagtaaattgactagggtcccacatgtattgaaaggtaaggctgagattttcatctagttttcactagtttcactaaaaagtgatagtctctccagctactcatgaaaatgccttccaatttttgtaataccttacatttataaatagcatttcttatggaaacttaaccaagtatgtgatctccttggggttaattctggaaggcctcaccttgagagaccctcagcatggactttgtaggcagcaatgctatgagtgcagtagtcagtgtagtgtttagggcattaggcttcatgtaagccttttgaactgatatatggttttatagccactacctttttgctgagaaaaagaggacagaaatattaagtaatctcacatcttaaaatctgatttattaaaaagtaaccccagttctgcttctgaattaatgtatgaaaatatagaattagaggaaggctgtaaattataaccccaatgaaagtaaaaatatctaggccttcattttatacttttaaatttatgtggagtcatggtttacaaagatgaataacaacatagttaggttaccattgccactatactatgtaatatatcaattatgggatttcaaaggaattatttacaaatttttacttgctcagctgttacaatttttttaataccaaataagcattctagggtgaatgccttcatggattggtttatgtatggggaaaatattttaatattttgaatatgagtcataaaatagaagtttgttgtttattacctatctcacgatcattttaaaatcgtcatgctgtattttgatgtcacagaaaagcaattattgaaataatgctgaaaatactttttgtaactattctacagcaaaaaagcattagtctgtaataatttatgt

SEQ ID NO: 73583 - DNA, 1023 bp, Homo sapiens
agggtcattgccctggatttaaatcttctttctcctgcttattggtttttgtgacttttcataagtcagttaatcttgccagattttaatttccttatcatttaaatactactcccttacaacattgaagacataaatgagataatactaaatccagtacaatgcatatggcaagcttcgagaattatgagcaatttaggatggtatttttatcttgaaagtctaagaatatgtgaatccttattatgtcagctaggtatcttgttactgagagatcttcaaggggattcaataaataaggtaaggcaaattggtaaatcattattgtctgggttttggccccaaaccccatgcagaattctactacttgaggtaggttggtctctggtagaatgaaagcaagctaaaaccccttctctgactgtttctactaagttccaagcccatctgatattaccatttctgagagagaaagccaaaggagagtgaggattggagagcatttggcccagtatttaagaagcaaagagttaaaaagcaacatgttgcggggaggagggtgtcatcttagtagaaactgcctccattaacgttgtgtggtgcctttgaaagggcctcacccatgtattttccaaccaccttggaatctcattcactaggcctgaggctcagtacaatgcactggagcttctccaagacatatcagtaatcttttttggaagtagattaaaggagtgtagagacgagtcttcaaacttcatctcctgaaagcccaaagtaaatgatcacacagtgtgtattattatttttatagttaataagacttagataatgctgttttcagcatttgggaacttgagagtgggaagggagaatggagagctgatagatctgtcatcaggtaagaaagattgtaagtctgcagttagaagaccagctaatcctggacatattgaatttacagctctcattctaagacgcatcagaggccttcagaaaggcgtcgtcctgaagctttgaaac

SEQ ID NO: 73584 - DNA, 1039 bp, Homo sapiens
ttatgatctaattattcttaagactttgaagtgtgttttatagcttcttaggggttagagaatataataaaagctataatttcaataatattatttggttataaagttcattctgaaaaaattcttgtatagcatcttgcagccttgtacatgggctgaagataggtaatgctgactgtgtatttattggtgtcaatatgatatgtttatattactgaaatttttctgtatttgtggaacacatttctttgagatcttcccattttcctttttattaatgagttgagaaaaagttcattttatactatttttactggtaagattggactggagatcagaattgagggcttctttttaggcagtgatgcctttttttttactttatgagacaaaaatataaaaactttgaagcctgatacggggggtgggtatgtttttagagtgtggtttataagtgcagagacatctttttatatgttaatataattgtactaaccaatccacatatgtatattgtggtataatatggaaattaagctcttaattacaaaaccaaatttatgtcttattgtgcattagtcaagattgtttgaaatctaaaattatttattaccctaaaatgaaggctctcttgatccagtgtatgttttaaatatgtgccctgtttagatagccacatatttatatagcttttaattttatttactagttacgtttattgaaaagttacttttccagttttctacttttacttttaaatatatgggatagaattttatttgtgtaggcttttagctattgtaaaagatacaagatacttttgaagaagtattactttctaacgaaaacttgaatctcttttggaactactaagttgacttattcttacttgttttactagaagtgtgtatctcatgtccaagtggatagcagagaacttgatcgaagaaaaacattgcaagttacaatgcctgtcaaacctacaaatgataatgatgaatttgaaaagcaaaggacggctgctattgctgaagttgca

SEQ ID NO: 73585 - DNA, 1061 bp, Homo sapiens
gtatgaccatgcatttaccaacagtgtgtgggttgatgtggtcaaaatctatgtgagttctttaatgattatttcaggttttttttttttttaataaggaagtaagcatggtcaacagtgacatgagaaggaggtttgagaagtgaggagaatgtgtaaaatagtggtctagaagattaggtatatgtgtgtgctagggaaatatggtaagattgctagacagcattaaggcccacttgagtttcacagtcatgatgatctcatggatgcctaattcatataatatgagcaaaaagatgtggctcataaagggcaacaccagttaccttatgggtaatatttaggttgtgatggttctagatatttatatgagtgagtagtaactattttagagcagtaaaaagcaactccgaaaatgctgcttatcctattccttaatccatacaatggaaagaaaattataagtaaatgcatccagaagatgggactatttcactggcaccaaaggaaaaaacacttttggaattaggggatgtaaattttggaaatatatttaatttggagcaggtgagattccagacttttcaggtaattttgttctagtatattaaccaaaatagtaaataccatctgttattgagtgtttgccatgtgccagctactgagataatcacttcatatcaatgatgtcatttaattctccaaatatcccaatgaggtaggttttctaatcccagttttaaagatgaaaaacctgaggctctgtggaaggtggaagttaagtgacttgcctgaaggctaaagatagtggctgggccaagataagtcccagccttgtctagttacaaagcctatgtgcttaactgtgctaccttgcctcctagtctaataaattttgtatcacattaataaatacgtttttctagttatacaagtaatgactatgaaggcatttcaaatatttttttttttgctgggattccataaacccaaaattgaatgaatctagtaatgaatccttggtaattgaagatgtggttttaattttgatttgagttaaa

SEQ ID NO: 73586 - DNA, 1052 bp, Homo sapiens
aataattttctaatgttattgtattatatataatttatatgtaagatgtttccttactgtaatcattttaaaacatattttaaaatattggtcattgtctctaataaaaattgttttagcttcttcttttattatatccatgagaactataaaaatatttgccaggcatggtggctcatgcctgtaacttcagcactttgggagggcaaggtggatagatcatctcaggtcaggagttcgagaccagcctggccaacatggtgaaaccccatctctactaaaaatacaaaaattagccgggtggtagtggcacatacctgtaatcccagctactgaggaggctgagacaggataatcacttgagcctgggaggtggaggttgtagtgagctgagattgcaccactgcactccagtctaggtgacagaaagaccctgtctcaaaaaacaaaaacaaaatctataaaaatattgtttaaccaaatgtttcatactgtacaggtaacaactggcgatgcttttcagttatgaagttgtgtctttcaaaaccaatattatttatgtcctaatcttttcctaatagttttgaaaaacaaatataagataaaatcaaattttcaaatttaatgtcacatatatatttattcaaaaaagacaggccaaataagaaatacagacttaaaagcttttatatgcagtcggtaagaaatgacatattacatgattaatgaaaataataaattagtaatgagagtttcaatctaatgttcaaacttgtttactaagattatgcaatcataatactgaactatggacataattttaatgattcaagataaccttgcctggtagctggatttagaacccaactctcaaggcagtagtcaagtattttaccctaaaatcattttaacaagtagtcttcataatgcttgtagtattttcttctctatagttgtacactcattttcatgacttcccttttattcacaaatcatgtaattatttttattgcctggcctggatttgtgaataagagattgtgactagtaga

SEQ ID NO: 73587 - DNA, 1055 bp, Homo sapiens
agtcttttatttcaaagttttattgccaaaataagacctacccattgtttcgaatggctactaaatactttaatcaggcagacttgaaaacactatttggtttgctatttcattgttttaaaggtttaccttaccaggacctgattgcaccattactagtagcttttctgaccctaaactctctttgatgatgttggcctcacacagaagagattcatgataacacacataagtacaaatagctagacgataaagtgatacacacacacatatatatatggaagattattttgcctgtagctatttcttatattctcttggttctgtcttcatgggtacaatgaagataacaggattgatgggaaagctgtgtgttggttgccctcaggtatctttagcaggtatcgttgtgttactttctcttgttgacctgctcacactactcagtgccagtattcttaggtgagctggggtatattgtaaaataaacaaacaaacacaaaaacagttgaggcaagctactgaattgtttttcagctcattttaagatagcatgtatttttaattggagttaaagcccagagtaaatttttacttttataaagttgaatctccactttggtggaaaatttggttattttctgtaaatctcttgttctaaaattaacttcattgatgggagaaaatgttggacatttttctaagataaatctagaaagtgtttcaggataacatcttcataatgtttaatggttaaatgcattatggacagctaatgaagagagttaagatcttatttatgttcatattagcagcatcatttatttgggtctgttatagactcaaattgacattacaaagaagtaattgtgattcagtgatatgcatatatttagggtttaaaaagtttgtttttctaatacagttgcataatcaaacctttcttgcttctgtgttttgtatcagcataagctgtctgaggattttgtttagttttagtacctctagaagtcagaatttagcgcagtaagccttggcttggatggacttgttat

SEQ ID NO: 73588 - DNA, 1128 bp, Homo sapiens
agatggatatagcttttcttagaatactagaacacatgagcctctttttcatttttgccattattttcttcctcctcaattaattgtccgttcgcttatacatttattaaccataagataaaataatgtgtcatttattgagcatctgctatgtgccaggactatgctaggtgctttgcatactattaattcattttatcatctgtaaatgcaaaatatatattatttccgtttgacagataaggaaataggtttgtatattaatatttgtattaaagcaaaaataacataaggttatttctaaatggtttttgacccacaagtctagtgcctcgtatataaatacctgtttatcaacaagagagccatatctgactttatctaagtagctaaattactcagatacatgtattttcatttaatggatcaatttgtccattagtagtttttttaaccctggcagaaaaatatttttatagtaatcctaacctgagtttcatgatgaaatactgaaaataactcatggttattaatgatttaatgccagtagtataatggtagctttgttgaggtttaagagggaggttaatactggggtctggaatctactcagttaatcccccagctctaccctgtgctagttgtgtgaccttgtcaagcctctttagcttccttatctgtgaaatagggatgttataactgtactctgaggtaagctcatttggttttttaattatgtgagaaattttactaaactagaaatttttttcttttttgtatttgtaaggactagtttgggctttgcatgcattttacatgggactaaacagggcaatctttgcagttgtattgttggtgtgtgtggcactttttcttagaattctcatgatttgttcatttataacagcactagtcttatgctttatgctaactttttaaaaattggcttttctcagttttcttttaaaaggggctttgaaacaccaaaaaattagttgtttgaacactgggcatcataaatatgtttattttgagcttagtcttcaatttaatatgtgttgtatctataaagattttaatgagaacaggaaaacaattgtatatatttgaataattatacaaattata

SEQ ID NO: 73589 - DNA, 1682 bp, Homo sapiens
tgcaaaggctagaacatgactgataataatagctatatatttctaaattagagtggcattcagaaagagttgatcagggttgtacttgtgcagtttcatagcagtttctgagttagcaatttgcagttctatttcattaatgttttaggaaatgatttaccagaatagcatatgtaggtagctgtattataagaatttggattatccatcatttttctgtggtcccttttactactttactttattaatgttgctgactaagaaaactgtacattagaaatgcaggactccaaggaagcaaagaaggagtaagataatgaggtaggaagatggaagaagattttagaatagtagtttgataattttgtattaatagaataaagcattttaaaataattattaatgcagagtcttcatcttaatttgcatatggtatacttttacctttcagaacctaaatcacagccacagcagcttcatcagggacaatacagatcatcaaatactgagcaaaatggagtaaaagataataatcatctgagacatcctcctcgaaatgataccaggcagccaagaaatgaaaaaccgcctcgttttcaaagagactcccaaaattcaaagtcagttttagaaggcagtggattacctagaaatagaggttctgaaagaccaagtacttcttcagtatctgaagtatgggctgaagacagaatcaaatgtgatagaccgtattctagatatgacagaactaaagatacttcatatcctttaggttctcagcatagtgatggtgcttttaaaaaaagagataactctatgcaaagcagatcaggaaaaggtccctcctttgcagaggcaaaagaaaatccacttcctcaaggatctgtagattataataatcaaaaacgtggaaaaagagaaagccaaacatctattcctgattatttttatgacaggaaatcacaaacaataaataatgaagctttcagtggtataaaaattgaaaaacattttaatgtaaatactgattatcagaatccagttcgaagtaatagtttcattggtgttccaaatggagaagtagaaatgccactgaaaggaagacgaataggacctattaagccagcaggacctgtcacagctgtaccctgtgatgataaaatattttacaatagtgggcccaaacgaagatctgggccaattaagccagaaaaaatactagaatcatctattcctatggagtatgcaaaaatgtggaaacctggagatgaatgttttgcactttattgggaagacaacaaggtatggatgctttaaagatattatacactaatattacgaaatgtaacattctagtgggactttatagaagctgtcactttggaactatgagtctttttctactattgtacctgtttaaaatctttgaacagatttatagatatataaaggataaacaaaatatttaatatttttatggatgcctagggacaatctgtcccgtaagatttggttaagttcggtttggttttagcttacatgccagaaaagtattgtaaaagtaattatgtgaagttgagctttattttacttatcatcaactgaattacatatgtttgcttttcactctggtaaaattacactgattcacaaggaagaaaatcagttgagaggcacaaagt

SEQ ID NO: 73590 - DNA, 1066 bp, Homo sapiens
cttagctggacaataaatttatcaggtgtacagctcatttagtgattctgttctgaactacagcaatactttcatattcttcctacttatttgtgaatatttatcctttattatgtcatttattaacctattttctttctctgcagtcaacttagaaatcttttataaaatatttgaaatattttacagaaagaagcaggatagaatcactaaatcttttggagattctggtatttcttttctcctacttttataatcaagtggttgttgacgttttatgaatttgcgtaggttactataacagacatctctggatcatgcacattatgatcagcctttcttctttatctgcataaataattaacttagttgagagaaatatctcctcgaaatatagaggccaccagcttaacatatctcaacctatttctattttaaaaaatatttgtgtgcatatagatgtaaaaaaaccctgaagaaatatagtctgtgttgctgtcagtacatgcaatgtagagttcatatagaattctcttagcccctgagagtattgaaagtgttaatgttggggtctttgagtactttttaaaaattttggtaagaggaaactgtaacaagttttaagtcaaaaatgtacaaaattatcaaaaaacaaaacattcactgtaccaataagaaggtaactgtaactgataagtcatactagaaaaattaaagggctgcaaagctgcagggaaatggttagagaggccttagcacaattacactatggattgtggaatttttaattttttaacttgtgcactatatatgtgcactacaattttttttattgtgaaatggtattgtatctttcattaagatttatgtttgtattgccacaagattttggaaaactcttgttttcctaaatgtagcagtgatcatttagtgaagatttttttaaactagtttgcagaaaaacagtcaaaaaagcctgcatataagccaaaagcctttgtagaaaattagttgcttgtgttgtcttttaaaagtataagcataaatcattaaatagaaagcatga

SEQ ID NO: 73591 - DNA, 1031 bp, Homo sapiens
aagcaagaccatatctctttaaaaaaaaaaaaaaaagaaagaaagaaaaaagaaaagaaaaaattgtcaaaactagtaaattccattgggtatgtgtacatttttaaatggagaagaggcctcctaaaagaccacaatttctactttgtgtcaacatttatattgctcttttattaataggctactgtgttgtctctgaagcctttgaatagtatattaattcattaaaagcttgttattcagaaccttctaaaaaacaaactcttattagtacttaactgctcttgatctcctattcttactttcctgataccagttgataaatcagatgagctgtgatactccatatcaaactccagagctcacttgagagatttcaaagtgagttcatgcaaaggaactctataaataatcaatagatgtatactataagtaccttctcttttaaatcttgatagtatcagaattttaagttagtatatgaactgggttgttagctaaaacagtggaaggagatcagtaattatttattgaatgatggtatattcctggtggtcacctttattactgaaaagtccttcttcagacaccaagcctgtacatgacagtttaatatgatagcttttcaacaaatattctgagttctttttgtaccaaagctactttagaaaaatagatgggtctatatgctcaagggattaaaaggatataagagaagtagaaggtatgttttcttcccttcagaagccacctaatattgttaaggctaccatgacactgagatgataccagtctgggaaccattgctggcatgggtcttgattatagttttacatgataacagcatgttaagtgaatgagataatttaggaagtaattcgggaagcccaatatagacttttcagaaacttctatttaacagccttttattggcatcttttatcatgtctgattatgttcacttttcccagattgtgtaattaggaaattagggtcaaccctcttggtcatgattattaaagagtttatta

SEQ ID NO: 73592 - DNA, 1758 bp, Homo sapiens
tctttcttattgttcttgtagaaaatcttggggatactttttcttccttcaaccatactcccatcaaaaatgactgagaaggttttctaagcttggaaagagaataattctttttaaaagagagctaattactaatatgttgaaccttttgaaatctcaatgtaagcaaaaattcatacatttaagcatattgcacaaaatcagcatttatataacaagatgatatattctctactaacttactgaggtaaagtagtataaatggttgataatgtgaggattagagtttcaaaacatgattaccattggaatgcttattgtgtgcttgacaccatgtataactcttgatgtacattaactgatttaatatctataggatctctataaaacaaatattaatgtttactttacacactaggaaaactacaaatatgggttcagagctgttaagtaacttgcctaaaatctttgagctagtaagttgcagagctgatagtcaggtttaggacttggtgacatcatagagcatgaaccttcactttatctgtaaatggaggtaaatgataccaacgtacttgagaatttttgtatgaatttaaggaaataatgtttataaaaatgtttagcatattaattgattctcaatatgtgataaattgttctgatgagtatcatttagttcattcaatcttagttctcacaaactataagggtgagaatggaaaatgtagtggttagaggtatcagctggtacttttcaaggtgatagaagtattttacatagggtaggaaaaaaaaccaacctatttctttcttttttttttttttttgagatggaatctcgctctgtcgcccaggctggagtgcagtggcgcgatctcggctcactgcaagctccacctcccaggttcacgccattctcctgcctcagcctccttagtagctgggactacaggcgcccgccaccatgcccagctaattgtatttttagtagagacgggctttcaccaagttagccaggatggtctcgatctcctgacctcgtgatctgcctgcctcggcctcccaaagtgctgggattacaggcgtgagccaccgcacccggcccaacctatttcttttaacctattattccattgctaaaagaacttaattttacactaagactatctttattgtcttctaaaattcaataggatcttggttcaagattaaggtacatttcaactacccatttagatgttacccttttagatggtagtcttctaacttccactcagtttgtaaaaataaaggctgacaagtcaccaaaataacttttcagaaatacctgatgtaatattacatagttaatttcagaatataccaacaataatactgtgccaaaataatatctttcattaacacatggactttaactatacttaaatttaaaactttgtatttaggttgggaaaataattctctacaaatttagaataaaatagatctgggaatagattgtaagcatttcatttgatggcaagcacaatatgagtgaccagtaattgagcacctactaaaaatattaaagcaagattagatatcagattgcctaatagatttatatattgcctaatagagtaccttcatgagaactaatagcattgtattccaagtaagccatacttggaatgttattcttagtactaggttatgcagaatggtaactacgaaaatgtataaaggaaaagatgatcaagatgatggagattctgg

SEQ ID NO: 73593 - DNA, 1039 bp, Homo sapiens
aggaaacagacttaagaaaatgtaaatagaagttccagaggccgggtgcagtggctgacgcctgtaatcccaacactttaggaggctgaggcgggcagatcacctgaggtcgggagttcgataccagcctgaccaacgtggagaaaccccgtctctactaaaaatacaaaaaattagccgggcatggtggcacatgcctgtaatcccagctactctggaggctgaggcaggagaatcgcttgaacccaggaggcggagcttgcggtgagccgagattgtgccatcgcactccagcttgggcaacaagagcgaaactctgtctcaaaaaaaaaaaaaaaaaaaaagtagttcctgaagttcagatttgcactttctagtgaaggatgcaaaccaatggagttggctgcctgagaaagccagagagctcccttcaccagagttatttgcaagaggcagagccaccatttgtgtgaaacgccatggatgaattttgtgctaaagggaagatcagagcagtgactgctggagtacctcacatttttgaaactatagctttagtactcagcctgataattgataaaggtttgtaaaccatagttttctttatatttcactgaagagaaataacaaactatgggttgttggacatgaatagggagttaaatgtgataatggtgtttggtacattgggccctgcctgctttaaggcttaaatttttcattcttttcctgtcatttttatatttcttaactctcattaagagggtgaaaacatcagcaaacaactatttttgtatcatttgatataaaaattttttcttatatcaagcatttcttataattatctctcctaccactccaagttttagtacttttttgtggcatcaatctggcctgtattttagcaatttggcataaaggattttttttttcctgattttttttttttttttttttttgagacagagtctcgctctgtcaccaggctggagtgcagtgtgcaatctcggctcactgcaacctccacctcccgggttca

SEQ ID NO: 73594 - DNA, 1071 bp, Homo sapiens
ggcttctttcttttacatgcagactgaaacttaaagatttaaacagcagtgttagaatgcaaaaccgaaagatactactgtcttagaagtattagggcaaagtcacaaagctttcccaagcttcagtattctttatataaagtggaaataatagttctttttttttttttaagactactttgcaggatgtctaaaatgagaattatgttcatgccaaatttaaaaatcattgctaaataataggatttgaccaaattatcttaccatctttgtttccattaggtaaaattgcagtaattggatctataaagatttaaagaatagaactcagtcttcttatttacttttctatgttattaataaggtcaaaggaaagcaatattttgagaaagaagattcaaagataaagtaaggaagagaaaaaataggattaatttccaaagtaatgcaaattattgtgctctgataattcagttggaatttaaactccctacttagtgaaatagatgctttctttttcataagcaaaactgagagctaattttttctctctctaatagggcacatacttcatagctgtgttaattcaaaaacatttaaataacagggtggcagtactcagtaagaaaccagtgtggctttggctgtattttgttgcttctaagtccttttcaaatattatcattaactatactctttatgctatttaatctgcttatcctaatttccctatgctactccttgaactggtagatatacccactcagtaagaaagcaaataaaaataaaatagtttgagtcttactctggtgatctctctatcttgcatgaagctttctttatatgtaaattgtattcctcccctattccaaaccattatttttttctgtctctagatgtaaggttcttaacagtgctggagatttcatcagatggggacagacagctgatgaacattctttggctcttcaaccccttttctttattctaccaaaacacttttccatgataaatacctagaaacatttagaagcccaaatattcaagaaaattgtcattataatgcttgct

SEQ ID NO: 73595 - DNA, 1095 bp, Homo sapiens
ctaaagatataacaaaacaacgaaaatgtagagtacaaaacaggtgtaaatcaatatctgttggatgagtgtggaacccacacatgaaatgataataaataatatcagactgtgagagtgagaggaaaatacagctgccttgcaagttcttttaaaatccattgaagttgcatgttctcgtaaataatgctgctcaagcatttgcttattcaattaatgtaggtgtgtggagttttcagaagtttctgcacatgtgcacagatactaatgcgaaagctggccagaaagccttgtatttgaacatttgcagagaacatggtcatgaataatatattgcgatgctaaaaatctcaggatattggagacaccctgagaggagtgacagtcatccacatatatgtgagaagggtgtagacatggcaaagctaaaaatataaagttactattcctttttagaaaagtgtgcttatgttgagttaataatgaatgaaattctttttcagtccttgaagattgaaaactgtgagatcccattttaactactatccacataaactggaaatctaatggaaagtacctatggttagaagtacacattgacaaatcaaattaaataaatattttcacataaacagttcgtattataaaatacctattctaatttcaaaatacggactgtaaataatcttttaatataagatacctaatattggccgggcgtggtggctcatacctgtaatctcagcactttgggaggccaaggcgggcagatcacttgaggtcaggagtttgagacctgcctggccaacatggtgaaaccctgtctctactaaaaatagaaaaattcatcaggcatggtggtacatgcctgtaatcccagctacttgggaggctgaggcactagaatcacttgaacccaggagtcggaggttgcagtaagctgagatcgtgccactgcactccagcctgggcaacagggcaagaccttgactaaaaaaaaaaaaatacttaatattttatgagacagttttaagtatatgtatatattagaggttttacaaatcctaacagtgagtgatattttaaacttaaaat

SEQ ID NO: 73596 - DNA, 1013 bp, Homo sapiens
ttgttttcctgaactgcaaaactactatataccaattagaagcaaagcggaggggtgaagtaaagatgactattacgtcttccggtatctctgcaggaaagagagtatgatcttcttggtcttctgtgatggcccctatttaatgtaagctcacccagtagaattctgaacctgaggagaaaatacatacactagatatactaggtacagttactgtgaagaaagctatttcacacatataccacatgctgggtttgttggtgaagggaatgaagtggtaaatgaggatccacaaagacttaacataaaaccacccaccattattaatgggtgcaggggtaggacagacttgtgatgaggaaagggcaggaaagcaggagagaagggacaacattgatacagttatcaatcacttgaataatatattgtaacaataagactgtacactagaattcttgcctttttttgtaggaagtttatgtgtacatgcatacaaaatataaaacaaatattgcaatgactaaccttgtagttaagaggagtggagtgcttaatcaattattcagcaagtatattttgaacatgtactgtgtttcaggtgctacaggcactggggatatggggatgaacaaatccagctagataactgactccagataaatatttacagtactctggcatgtagcttcaatgttagcatttttaggtggaaatgttaaaaactatattgtcacatatgaatgatttttttttacatgtggaacgttatatggactagtgcctctaacatgtgtttatatatgtatgtttgtgaatacatgttctggctttatttttttctcaaagatcatatatctagtaatctgtattggtgcttcttgtttttttttgactatagaaatattttaattcatatgctttaattacattaggtaataatactacagtccattttacaagttaaatgtatgagaatgtatgaaatagaaatgataggaaaaaaactaaatatg

SEQ ID NO: 73597 - DNA, 1091 bp, Homo sapiens
catgtttaccacagatatggaacatagatattaaattctggctggaataaatgtttggtttaattggcttctgcctccagatggttctgattttatcaagtccattttcttatgaatatttatcacagtacttcaaggaaccaatgcaatgatataaacgttgaaaacaagagacctttattttatatatatatgttttcctaaattgagaaacatacatatcctgaaaatttagttttctttcatcatcgaagaaaatgtcataattcggctattacagccaagacagactatgtttttttaactcaattatttctaaaacactaacttacatatggataaatgtttatataggaaggtcatccccaaatttcaaatttttatttaagccaaaaatttgtattttaaaaaataatgcatataatgcctcacctgcacattcttgtacaaacatattttaggagataaatctttattgccagaaaacatactattttaattgcaattagacttctgtgataaccatcaagctggtgcctaaatctaaaaggatctttccaactgttctgtggatgcttaggcttaggcaactatcaccaagtaattactataatttaaatgaactacgaaattgaaacctgctaaaatatgtagacctcaggaatcaaatgtgtattaacacttgttaattaaatattattggttaaaattaatttagaaattattattgggttgatatgaccaaccaaaaaactatatgtaaatcacttcttaatactatgaaaatatgaacagtttggtaaactaatttagaaccaagcaacaggatatattaagcttaggaagatacagacatttaaataaaggttggtatagaagtcacatgatagttgctctgtctgtagtaaccaatttctaaataaaatcaaaaatgtggcattctcaccacttttcacagtgacaattaacttggtgtttttacgtagtttcaattccttgcttattctgatttttataagtgactatgcaatgtattaccacataaaataaaacagtagtggttattaaaatcagtacttaaattttcccat

SEQ ID NO: 73598 - DNA, 1052 bp, Homo sapiens
cttcagtgttcaattattttgtgtttatttcatatggcatgaaaggtcttttaatttgatttagataagacctttcaaaaagagaaaaagccaacataatgcaaatatcattttttaactgctacctaacttgacaaaaaagatctatttatgtaagtatttttctttatcaattaaagtttattaatttgactttcattgcttacactctaatggccattttcctaaaaatactatttcccaaaatgtttgttttctacagtatcagttactttggatcttatctttggcaaaaataaaaataaaatattcacaaacaacatggaggttgtttgaaactttatcatcttgattaatggtttaaggatggtgagttgttgagtttgcacttaaaagatgaatggtgatatacagatgcaactggattattccatttgacaaaattatatatgaaaaagttatctgaaatctttagtgaatattctccgaagttattttccaacagcatagcacaagagagagaatagaggcctggtggcaggtgaacctgggtccacattgcagttgccacatctacgatttgtataaatatagaccaataaaaactacccaaatcagctgggcgcagtggctcactgtaatcccagcactttgggagaccgaggcaagtggattttgaggtcaagagatggagaccatcgttgctaacatggtgaaaccccatttctactaaaaatacaaaaaatagctgggcgtggtgtcaagcgcccacagtcccagctactcaggaggctgaggcaggagaatcacttgaaccagggaggtggaggttgcagtgagccgagatcgcaccactgcactccaggctgggtgacacagcgagattctgcctcaaaaaaaaaaaaaaaaaaaaacccaaatcacaatattgtttgatgtactatgtgaaatcacataacagtaacattaatacaacttctggcacataagaagtgctttatttgcatttcccttaccatgtgttaccatactcccagtttcacttttggtaa

SEQ ID NO: 73599 - DNA, 1035 bp, Homo sapiens
tttctcttcaagaaaagtacaaagggaacatgtactaagtagttataggttaaatgtgctatcctcaacaaaatgtctagtatcaaacctctcaaatatttcctagatatataaatatatgaaaacacatacaaacggtgttcgcagccgccaccgcgctgccgtcgctctccaacgccagcgccgcctctcgctcgccgagctccagccgaagagaaggggggtaagtaaggaggtctctgtaccacggctcgtacaaagcagactgcccgcaaatcgaccggtggtaaagcacccaggaagtaactggctacaaaagccgctcgcaagagtgcgccctctactggaggggtgaagaaacctcatcgtaacaggcctggtactgtggcgctccgtgaagttagacgttatcagaagtccactgaacttctgattcgcagacttcccttccagagtctggtgcgagaaattgctcagtactttaaaacagatctgcgcttccagagcgcagctatcggtgctttgcaggaggcaagtgaggcctatctggttggcctttttgaagacaccaacctgtgtgctatccatgccaaacgtgtaacaattatgccaaaagacatccagctagcacgccgcatacgtggagaacgtgcttaagaatccactatgatgggaaacatttcattctcaaaaaaaaaatttttttttttctcttcttcctgttattggtagttctgaacgttagatattttttttccatggggtcaaaaggtacctaagtctatgattgcgagtggaaaaataggggacagaaatcaggtattggcagtttttccgttttcatttgtgtgtgaatttttaatataaatgtggagacgtaaagcattaatgcaagttaaaatgtttcagtgaacaagtttcagcggttcaactttataataatcataaataaacctgttaaatttttctggacaatgccagcatttggatttttttaaaacaagtaaacttcttattgacggcaactaaatggtg

SEQ ID NO: 73600 - DNA, 1327 bp, Homo sapiens
actcaagtctggacaagagaacaacactccatctcaacaaaaaaaaaattgtgccttgtatgttgagaagtttattataataaatgctctgtatttcattgggatactcacaagtaaggagaacacaaaaatgcacaagtataaaacagccgcaaattgttggattgtcttcactaataaattaaacataacaatctactgtatgccttacccaaagaataaatctcatatttactatttaaacacttgatgtttatacaatgtttgtattttttttatagtttaatgtattttaatagcaaacttacaggaacagcacagaagacagacaacattaaaaacatgtacttgcatgtagtacaactcagaaaagtatagtgaatggatggaatctactgtatgataaaaatgctacaaacaccatttagttgccgtcaataagaagtttacttgttttaaaaaaatccaaatgctggcattgtccagaaaaatttaacaggtttatttatgattattataaagttgaaccgctgaaacttgttcactgaaacattttaacttgcattaatgctttacgtctccacatttatattaaaaattcacacacaaatgaaaacggaaaaactgccaatacctgatttctgtcccctatttttccactcgcaatcatagacttaggtaccttttgaccccatggaaaaaaaatatctaacgttcagaactaccaataacaggaagaagagaaaaaaaaaaattttttttttgagaatgaaatgtttcccatcatagtggattcttaagcacgttctccacgtatgcggcgtgctagctggatgtcttttggcataattgttacacgtttggcatggatagcacacaggttggtgtcttcaaaaaggccaaccagataggcctcacttgcctcctgcaaagcaccgatagctgcgctctggaagcgcagatctgttttaaagtactgagcaatttctcgcaccagactctggaagggaagtctgcgaatcagaagttcagtggacttctgataacgtctaacttcacggagcgccacagtaccaggcctgttacgatgaggtttcttcacccctccagtagagggcgcactcttgcgagcggcttttgtagccagttacttcctgggtgctttaccaccggtcgatttgcgggcagtctgctttgtacgagccgtggtacagagacctccttacttaccccccttctcttcggctggagctcggcgagcgagaggcggcgctggcgttggagagcgacggcagcgcggtggcggctgcgaacaccgtttgtatgt

SEQ ID NO: 73601 - DNA, 1017 bp, Homo sapiens
agtacttaaattaaactgaacatttgggagcaatcccagtatgtagcatggtggtagaaaattaatcatgattttgtgatagattattaagctgttcatttgaagggggtctttcatagaatcagaagattaactctctggtgggtatatagtagtacagaaaaaagcccaccctatatatcacaagttatgttaggactcattttagaggggaatgatttaatgaaagacaacatgcatttatataaaaatgtgtatgagatcaaaacatcactagcagattttcagtttctcggaccttactatttttttttaacttgtatttattagtttctatgtttatttttatataatactatttaacttaaaccatgtggttactaaatattttaaatggggcattttaacatgagaaaaactaacaattccatattcgaaatatttaggaataaaaaaattactccagttagattaagagttactgaggaaatagtagccacaattttgaaggaaaactctaaatgtgatgacattttaaaatagcacatgcctcttcatttgccctagaagcacttcatgtggtggcgaaaaggctttaactttattcagtcattttatcgtttgtacttaagcttcttcaacactatttgatctatatacatttctgggaccataatcaggcatcctaccatttaactagattttattccctaacatattgcctttgctttgtcagtttgttcctctggaaccatgctgacatctcaagataagtcctatcagtcttgggctattgactgaatttgattgtgaagaagccatcacttagagtagagagaaacagggtgaggtgttattgctaagaatatactttatgttatggttctaaaatccaaaagtaaataagatgggattggcagctcttccttttttattaggcataagatagattttgagagctctttttgtcttgtcttcttttcccttcaggagtcacaaacctggtagttttgctct

SEQ ID NO: 73602 - DNA, 2246 bp, Homo sapiens
tttgctcttgttctctctgccttgtagcatgaaaggtctttttcatttttaatccctattactagaataaaacacagaaacagacaaactaatgaagtctgtggcaacaggtctgccataggttaatgtttcaagtagcagtatgttttttgtgctcttaactattattttaggtgatataactattttccactgttagcctgtggactgttaactgtacattcaaaaggtagtcctgatgtatagcaaaacatgaaaagcactgcattactgtgataaaagtggttctgttttatggggaatagttgtttgttaatgacagtgcagtattgacaaatttatcttcatgatgcctctttttccatggttttattgtaatgaatcttactttcttgttctaggctgctgaaaatatgacaagctgactttctggagaaattctgatgagatatgtcaagctctgcaagagggtttgaagattgcattgtagttgagaatgtacaatgaaattactgcatgcagcagtgtagaaaaattttactttttaaaagaattataaaaccatagctttataaatcagtggaaagtggcttacagagagaactatcagatgtgtttacatcacatcttattcactttttttaacagctctaatgctttggcattgctatgttcatatttatgtattccttatttatagctctgatagctttaattttctaagcagtctgtctatcagatgtgcacatctgctgtgccaggttgaagtatagtggaacccatcagtagtaatgtgtagtagttatgacttgttgacatttccattataaactttaattttgaattgtttatgcattataactgtggatttatattgtattgggctgaaagttgacaggatttcagccaccacttgtgaatttttatttagattcattatgtatatcagaatcttgttttttgaaataagagcatggaaaacatttcttgtaatctactcttgaacaaagaatatttagtttttcaaacagtttgttgggcagctaatagtgtgaaccaggtcatttttgtattgagtaaaaaaatcaaactttgagaaacttggattttaaaagtaatgacaatgcttaggttagtattatttgtaatttgaatcatttacatctaatgagaatgttagttgagaatgttttcttaaagttttatatcctataaataacggaataaaaaaatttgtaaaatgaaacaacaaacatgcaaaattcctatttacttttattacataaaagtaattttagtgcttacctaataaatcttgaatggttatttaataaattattagatgggtgatgtgtttcaaaagatacttgctattttttgaagaaataaggatttccagtcattaaacaaaactaaacaatcttattagatgggtgatgtgtttcaaaggatacttgctattttttgaagaaataaggatttccagtcattaaacaaaactaaacaatcaaatgttctatattaggaatctcaagtatggctttttttaaaaaacctttttaacatcttgatgtcaaggattataagtatggcttttcagaattgttttgtttgtcattattcttgcctttaaaattttaactcatcaaagtgaagattagaaataaattttagaaaatgtagaatagtattgattctgttcctgtaatagaatctcagtggagtttttttgcaaaactaatatggatttcatctgattttattatttcttaaattttagattttattgagtaccatttatatgattgtacaagcattcactctttactagcattttttgtttttcagacaagctgaagtggttttattaagatttggtaatatttaaatagcaaccttctctgcctttttttttttttaatatagaattttgaccattttgactttttaaatgcctggcatctttaccaaccaagtaaactggaagatctgttactggtagaacaggttgaggagacagtaggaatttgtaaaaagtcatttgatttataatcaacactacaaatactatgtgttatttataaaatcataaagaacacttttgtcagactccaaaatttgtatatacttccaggccataagagttgatagtattatttatgactttgtagattaagttatttatgtatgaaacaaagcaggaaaatatattgagaagggatcgtgtttacagaggacttctttaa

SEQ ID NO: 73603 - DNA, 1094 bp, Homo sapiens
agcagttctacttctagaaatttatcctaatgaaataaaatttagtatgtacagattcttaccaatattattttaatgagagaaacatgagagcagcctaacttttaaagtaacagagtagttaagtatagtgtttccataaaatggaataatatgcgactagttaaactgcattttaaaagaatactaaaaaataagcaagtgttcagaattatcctaagtatggtggatacatgttagatattaaacaagtgctagaatatatagcaagatgtaaaaggcagttatgtgaagggaaggtgtaagtttatatttatatttaagtttctaaaactaagtaaaggcaagaaagtattacatgcagatttccaaaacctgggatgctatgctaattccttggtattgtgcagtgatatataaattaatgaaagtactatatgcatatttttaaatgctgtaagccttaagttttttttttttttgtatcttttttcagttctgcttgagatttcaagaattttgaatactggcttagatatggaaactctgtctatttgtgtacggctttgtgaacaaggaattaacccagaagctttatcatcggttattaaggagcttcgcaaggctactgaagcactgaaggttggagattcctattagttcattctaaataaagatgcttttatttagaaaaatgattaatgatgaagttatgggaaacatcctggttaaacaaggttaaactaacatgcaacaccactagaagaccaggagctcaatagtgtatgttcatatcataaaaattactactactaggccgggcgcagtggctcacacctgtaatcccagcactttgggaggctgagttgggcggatcatgaggtcaggagatcgaaaccatcctggctaacacagtaaagccccattctctactaaaaatacaaaaaaattagccaggcgtggtggtgggcacctgtagtcccagctacttgggaggctgaggcaggagaatggcgtgaacccaggaggcgcggagcttgcagtgagccaagttggcgacactgcactccagactgggtgacagagtgagactc

SEQ ID NO: 73604 - DNA, 1018 bp, Homo sapiens
caaagtgttgggattacaggcgtgagccactgcgcccggctcaaattgaacttctagggatgaaagtgaatatctgatatggaagaaatgggagggacctatctcatgaacatgataaatactataagaattttcagaaagacttagacttaaattaatgggtgactaaatattgataacttgtccattcttcccaaaataataatgtagtttttatacagttaatcagaatccagttggaatttgtttttagaattgatgaaaaatgttcagttcatccgaagaataaaatggcttatataaatgaaagatgacaacggaatgtttaccctactacatgcaatataaagttagaaattaaatggttgcccttacaaaagatagacatgtaacaaatttgtaagtatatgggaatttactatgaataaaggtggcatctcaactgggtggggaaaacttaggtcattcaataaattttactggggcaactggctcatttctgggaggaaaagttagatcctattttccacccaaactctagggagataaatacttatggggggttttgggaaataaacttcaaagtgctggaagagaatactggtggatataatcttttcatggggaataattttctaagcataatgccaaggggaaatgatataggaaacaatagataatatgttgacagttgacttaaaatattctaaatactctctgggaagcaatcttaaaacaaaattcagtggaaccggtgtacttacaacctgtaatggaagggattctgaaaatcactttggaaaccaagtttctctgtttgtgcttctcatgttaaagacaatgagttctatcaactacaataaaatgcagtactatacaaatgaagtttaaaaaatataaggtttcatttttattattagattcaacagacatgattacgctgtcaaattgttataaaagtttctaaacacttttaaagccttaaatatgtacattacctttttttgactattgtatg

SEQ ID NO: 73605 - DNA, 1130 bp, Homo sapiens
gatggagtaacagagattagatttatgcttctacttgaaacaaccaagaaaactcaggtaaagcatacagaacaatggttttcaagacactggacatcaggcatcagagtacagtgatcccttagagacaggaaacaagcaaagtgatttcttgggttgccccagctcactgccttcagagagttccaggcctcagtatagcagggagaacccagtggacacactgaagtgagtaggaggagtttagaagacctgggagaccaaggcaggtagagtttgaataacagtacctgagaggggagaactgcacagaaagaatgctggagatctgtagaagtgtcccccttaagtattcagagcattgattagcagatgtgtgaggaaagtactcagaaagctgggagggaaccatctagaaggattagagtgaaccgtgcaccgtgcttacacagggctgaggatagtgcctgtaactaccagccagaatggaaatctttgtaattcataagacattggatacagtactcagaattcttacctcaatcataaggggaataattagccctatcctaaacagggctctggtcctgcctaacagatctaagaagtaatatccgaaaggatcaaaccatttccagataacggtatctcattataaagctcaagaattagaaatacaaaactatccggtacctaagtaaaattctaagtacatggcatccaatcaaagattaccagatatgcaaggcagaacagtatgacccatgatgtgaaaaattcagtcaattgtaacgaacacccccccgatcacacagatgttagaattagcagacaagggcatcagaactatactccatatctccaaaaagtttagtagaggcatgaaagacatttttttttttaagactcaaattgaactgctatttttgtttgtttgttttttcttttgagacagagttttgctcttgttgcccaggctggagtgcaatggcgcaatctcggctcaccgcaacctttacttcccgggttcaagcgattctcctgcctcagtcttccaagtagctgggattacaggcatgcgccaccttgcctggctaattttgtatttttagtagagacggggtttctcc

SEQ ID NO: 73606 - DNA, 1054 bp, Homo sapiens
attacaggcgatttgtgaaaataggaagtaaaaataggtgtccatttgaaaagaaggcttaaagaagaaaccacaaatgagatggactaagaaaacagcattgagttatatgaagggaggataaaaggcagaggagaaaagcaagaacaaaggcatgaagtcaggaataagcatagcctttatacgtgggggggtctaccatgaagagaacaaactggaaactggagagagaagggagagaatcaactgaaaaactgttagaagcatcatagaattcatcaaggtgactggtgattaaaaagtttaatatgtagtgttccagtatactgatggtaaccacttagaatgtacaagggctaagtagaatccatttgtgaagacagtcaaaaataaagtgaagattcaatatggtagattgagcacttgctgaaactctaagcatataaaaaaataggaaatagtaagaaaatataattatcaggatagacctgttcaaaagcaagaagggaagtctccattgattaggaagagagaggtttccccccaaaagaaaggagcagatgggaaccacagcaggggattgtcgggaatagaatctgacaaagcatgctaccctgcctcactgaagttgggagtcagaaatgtgccatttgtcacagccagagattgagaagcaccatccatgtgttttttggatctggaccaaaaatactacaaggcctgatctagaggcctaaagctagggtacggcttcctatcttagaatgggccaccagtccaggacacctaaaataaatctatggaagatgagttttcagccaagaatgacaaagcacctaaggtagatgaaaaacatgagcaactaacatggaaaaggaaaaagagggaaagtggtagtaacagggaactcttttttattgagccctaccgtatgccaagcaccattccaaaggactgcaaggcagtgtcagcaaaacaaatggataccattctaagtgtatcctttaattctcacactaatcctttaaaacaggtactcttattatcctcactt

SEQ ID NO: 73607 - DNA, 1066 bp, Homo sapiens
ggcaggcaagtcaggagctgggaaaagaaacctctccattcagacaggaggaaaggccagggaccacaaagagcgtacctaccggtgcgtacaaaacgaagcccccagtaccgactccagggagctccgggggccaggccagcttccacgacaggcatagactctttaactccccgcttccgcgctgtcttgggccaaccagggcacggggcttgtgagcgactagccaatcgtgtcgtcccgccatccgcgaaccagccaatcgcacggaggccgcgtaggaaattcgaatggcaactcctcgctccacgttccgcgcagaggaacgtggctccaaattcaaatcaacgcagcctcacgccggcggcgagcgcgaggggcggagcctgcccggcgtgggccgagacgcgctgtgtgattgcctcggagagaggaaggcgctccagttccgggtcaggcccttctcccgcctccctcggccttagccatggcgagtagcagcggtgctggggcggcggcggcggccgcggcggcgaatctgaatgcggtgcgggagaccatggacggtgagtttccgttgcgctccctttaccttgcgtgccttcccagagccaaggcccccaggcgggaatgagcctggggaggacttcaggtccccttagtgccccaaacggcatcttccaagatctttggtagggacctgccagggccgcagggctgatggccctatcccttgagagttgtctccgccgctgcgtagtttgtcgcgcgcgctaggcgttgcggcccctagtcagccggttgcgcaccgcgtccctctcgcgcgaatgccgcgccccctctatcccgcatcccaggtccgccctacccgcccgatctcctgcggtgacagcgtcacgcccaccccacccagtacacccgttccctcctgcgtgccgcgtcccacccgattcccgcccggggcgcttcgggggtccccaaggttgggatcccggcggggacaggggccaggtgtttggtcaccgctatgcctcctgttcttcgcacttaagtaggcacctttaat

SEQ ID NO: 73608 - DNA, 1075 bp, Homo sapiens
acatgagatgatgaatttaaaaaaaattgtagctataagtcctttagttgagaagagatctgggcctgttgtaacctttagtttcctcagaggcagatctgaattcattcatatttgattgctgcgtataagccacttcacttctctgagcttaatactttcgcaaaataatatcactagtaagttactgctatagctttcaaggttgtttcgaggatcagttgagaacatttatatgtgatactttttttgtaagctgtatcatagccccaagagtgtgaggttttgagttgttttttgtgacacatttgtcgagtacattttaatagttaaaattaatatctatgggactttgtaattttaacatgcatactcttgatttctttttagttttctctctgtgctatgggagatgtcaaggaatcaaagatgcaaataacaccagaaactccaggaaggatccctgttttaaatccttttgaaagtcctagtgattattctaatctccatgaacaaactctcgccagtccttctgtttttaaatcaacaaaattaccagtaagttattcctgactagtgtttacaactaattttaaatgtaagtaattacaaataattttaaatgtaaacatctgtctttacaaggtaaggaggaaatacattatggagcatatatagctgcaatatacttttttaaattgtagtgttcattataatctagtggttaggttaataagttagctagaagatttttttttttttaagttcaagaacatacgttagcttcctgcagttgtgggtgtagctacattctgtggttgacgatatagctactaatacattagagaagaagctgcatcatctaatattctgttctcacttatttggcaaacattatttgagtgttgctatgtgtcagatacagtgctaagcagggattacactgtgaacaagttaggatcattaggcacaaatccttaaggaggttatactccgatgtatgggtcacaaactttctgttaggggccagacagtaaatatttaagctttacaggtcatttggtctctgtcacaa

SEQ ID NO: 73609 - DNA, 1912 bp, Homo sapiens
attttgaaatttgcacttttctacatggttgtggcttctgccattaacttgtttcagtttgtctttttgatgatttggggtaaagcaaaatgctgtttcattgttatctatgtttggggaaacctaaaaccccctcaaagagttacgtatgcactgaatggaagggtatccattagcaacagagcggttttttagacatcatccaactgtaacaattcacttggaatctgaattacattttctagaattctacatatcacccagtgcagtcttatttgttgatgtgttgtttaggtttcaaggcactaatgtactgcagatttagttttttattacaaagtgtaaggtcctattattcttttgtagttttagggactcttgtttatatgttttatagtctgattttttaatatttgaaaaaaatcaaatacatggtatgaccagattttaatttgctgtcctaaggtagacatgttgttagtccaaaacaaaggataatccttttccctttgacttaagaattcagtcacacaacgttgcacacatattgagatattctggtaaatacttactggcttttctcctccatcttctctttgcttggtaacatgatgaccattcaatcataaaattaatgtccacccagagtgttaataggaagggaatagaatgaggatgaagcatgaaaggattttaacttaaatttaaataatacctttgaggccaggtgtggtggctcacacctgtaatcccagcattttgggaggctgaggcgggcagatcacttgaggtcatgagttcaagaccaggctggccaacatagtgaaaccccatctctactaaacatacaaaaacattagccgggcatggtggtgcacacctgtaatcccagctactcgggaggccgagacaggagaatcgcttgaacccaggaggcaaaggttgcagtgagctgagatcatgccattgcactctagcctgggggacagagcaagactccatctcaaaaaaataaaataaataaataagtaaataaataatacctttgaaagagaaggtgagatgaatatctaaaagcaaatgagtcacagtgactaattttttgtttcacacgaacttaattatgcttaattattttgtctcatttcttcaatatattgaatgatggacaattattatattgatcagtcaagagatacttattgagtactgtgagggactgtaagaaacactgaagaagtacaagatactaagagtcaagagtcaaaaatataattagaccaaagttgtaacacagtgcttctgttcttactactaaatgatatattgtctgcaaaggtttataaagataatcttggtgtctcttagtacatagatttatcatatagaagaatggaaaagagtgggaaaatattataatttaatttaataatataattcaatgaatggttatggcttctaccaaggatagtcaatatattcttcacagagcatctcgtttcatccttagaaacaagcagtgtctttcagtatctcttcttacatattagccctctacttcaattcttcccatccttttcatgccaccatccacacagaaaattgtaactgaaaagcataccagtgtaagcaggtgagtcttggccatgtaggtgaccagtcctgaggtcccctctcctttgccaccctgcaaaggctcaacattcaggccacacctatacctatatgcatcatactggtgttcagtggtatgctggtcaggatgctctcccctgtatgacttcttagaatcttgtttgatctgactctagagtatttggccacagtgatttttacagtttccagcaatcacctgagtatttcatgttcttgaagtccctctgatgaagtagcaaaaggtttctgaatgcag

SEQ ID NO: 73610 - DNA, 1489 bp, Homo sapiens
ttttatttcagagttaatatttttgactgtttagaactgtgaactatcctcatctattttacagtaaaagttgattctaaaattattgccatgataaacttgttataattgaagagaaaaactttggacaatttttagatgtatgttgaattaaatacttcttaatttgtattaagggacaaagtttatcaaatttatattgttaaaagcaatttaatatcaatgtaagtcttttgaaataaagtatcattgcattcaaactttgaatggaaaagagggaggtaagcctaacagctaactgctgaatttcagaatactgcctaaatgttactaaatgttacaagataccactagtattaattataaagtgagcttaacatttgccagttttcaatgaagggagattatttatttgaaaggttattttttaaaatgttcaataagcttaagtaatagcatggttatttttcttctttatctttgtatagaatagataaagatgtggaagacaaaagacaaaaagccattgaagaggtaacttaaactgttactgatcattaaatcagttaaggatcaattctgcatgtacatcacttcttttaggaagactttcttcaattccttcactgtcctatctcccctccaagcccttcacagtcccatctatataaagcacccttctgtactgtcctaagaccaataatttccagctatcccagtaccttgcatagcacttgcatactgttgtaatgatcagtttagtgtttctgtcccctagacgcaatcttttttggccaatactgtacttcatcctttcattctcaggacctagcacaatttgtcttccttgtgccttcaaaatgttgattagcacaaactttgtttcaagttggagtttatgtagaggaagtcgaatattctcaggccttcagagtctagattggcattgggaatggctttgtctttttttgttaatactttggatttttaagatattcatgaaataaaatctcttactgttaaacaggaaaggtatatcataatgtaggctttctaaaaaataaaaataattaagttttttgcttttttatgtctgttgaattgcctttcttagcatctaaataaggttattattattattattttttgttttttgagacggcgtttcgttcttgttgcccaggctggagtgcaatggcatgatctcagcccactgcagtctccgcctcccaggttcaagtgattctcctgcctcagtctcccgagtagctgggattacaggcatgcgccaccacacgcagctaattttgtatttttagtagagacgggatttctccatcttggtcaagctggtctcgaactcccgacctcagatgatccgcctaccttggcctcccaaagtgctgggattacaggcgtgagccactgcgcctggcccagcatctaagtaagggttacttaccttgttctttcctcagaaagtctttat

SEQ ID NO: 73611 - DNA, 2145 bp, Homo sapiens
ctcagactctcaaaatttccaacattttgaaaaaatactttctttaagaatccttaattttaaagagaaacccagcaggtaaacttaagaaaatttgtttcttttcaatatatatttttgaaaatagaagaaacatatacatatagtaaaaacaaaaagaaaaaatataaaataaaaagcctcctgtttccccatcccacttcatgaaggtaatgactataacatttcttatgtgtactttcagattaattttacttatttaatagcatatgtccttaaaatattttcgacaaataggattatcattctcatactattatcgttctcatactgcatcctcctttttttgcttcatgatttttcttagaaatttttgataaccagcatatacagatttttacattctcttagcaacagcatagttacctagcccctgttgacagatgtttaaattgtgtttattatttttctgtcacaaataatgctgcagtgatttgtatatatatctttatattcttgaaatggacctagtaagtcagaggctttgtgaattttcagttttggtagattttaccatattgccctcctaaaaggttataccagtttatactcctgattacagtgtgacactgcttgattttccatatctccaatattgattattatcagaattcttaatttgttctactcctattactttaaaaatgactttttttttttgtatttctttacttttgagtgaacttatacatcactttgtaagtttataggtcctttaattttttttctggtaattgtctatatctgccccagtccacctttaaaaaaaaaaaaaaaaagaatcttttcctcttagattcatgggtaatttagttaagaaaattagctctttgtcatatgtatagcaaaatatgaagaaaatatgtttggttacttgcaaaacctagggaagggaaaacactgtggtagaaatgaaagaggaaagaaaagtatacaaatgctctatctcatttgaatatactggccagtagtgtgctggtgaatgtttaacaacttgctctctggtcgtggaaggagtacgatttatagcgattcctgctatccatagtgtaagtactccaaccatggccagtttcaagctactgatgtgacatcactgaatgggaaaggaagaatagtggcacaccattatatgtaggaattccaccatacagatacaaaatacattattaacctcaagagcatagacattgataaatatataaaataattagcaagtggtgagttttggatatttgttacctttatttttaatatatttaattgtaagtttacataattttatttttaatattggttttaacaactggtgcacagaattcttgaaaatttaataatcagatcttgagagccagaacaaacaagccagcttcagtgccgtcattcatactggcctacttgcatgtctctgtcttaatatattccttcccttttcatccttttttttgtaaccccatcaaaaaaacctgggaaagaaatttaaaatactttgtctatgattaatcctcttagtttagtttgcaagtttcaaatttaactggttgatttgaagtattaagattcctctttatatatactttaaatttcttccatttttcctttggtcatttgtattaaaatttttgcatacagttataaagttagtatatgacatgtttaataattacttggaaaaacacaggtaccgtctcacattttgggtggaatttatgcctaattgtatgactttaattttcctagtttttcactaaagatgtcatcgtaccctctccttggactgatcatgaagggaaacagctttcacaatgtcattccagtaaatgtgagtgtactaaaaatgatatgaataaaaatcaaaaaagtcggtgaatataaagcaacatatcatgaagtgccagtatatctgctttgtaagaagcttgctttaaaattctggataacatagaatttaactccttttagggttagaattaaaaatttgactaaaatttattgaattgttttttagctgttatactctgaatttaactttttcttcatgactattgtgaatgtcagttataatgatggttatagaggatccat

SEQ ID NO: 73612 - DNA, 1050 bp, Homo sapiens
attggccccattttataggtaagaaaacctagttttagaaagatgagagcatttgtccagggttacagagatgataaaagtgggaaaacctgaattcaaaattctcaaatcagatgctgtattcttagccattatgaattagtggtagcacgcaatagtagatggaaatctggattgtaaaacctcctacttttataaaccagagaggtgaccttgatcaaattattctctttgtacctcagtcttttatttgtgaaataaaaggattgaactagagttgtccatttacatccccccagctctaaaattgtgtgtccaaggtggcattctcatagatactagtttttcacccccagattctttactgttggattttttcaacagatgaatcaaccttcttaagtgattttttaaataacatttttgtattccaagtatcctgttttagttcaagtgatgcaggatcaagaagatgcttaaaaacactttagactctttgaaatctaatcaagcccacgataacagtgcagtggttaataggataggctccagagctgtgctgtttactgtgttgttgggagacaattctccataggcctcacatttctgcacacctttcatgaagtggcatggacaagttctgttccaaactatcttttctagggtgtttgtcttggaaggtagagatagtgtgtcccaccagagcagagggtaagtttgttttgctgtccagtatagtaaagatgatgtctccctctggagcagatttgtttgcagtctctcttaaaagaatgggatttcctaagcttggggttccttagctatggtgaaaacccattgtgtgtccaccagccacctgggtattttaatttagaatcttttaagatagagagcactcctcccatgattaggagagacacaagatggaaataaaaattttattacttacaagtcctaggggtacacagcatacctgaacaccacacagggaggtcaggaagagagagaaagggacccatgggccaacgcctttattgggtccagggcatt

SEQ ID NO: 73613 - DNA, 1033 bp, Homo sapiens
tccatcaacagatgaatggactttttaaaatgtgatatatatatatatacacacacacacacacacacacacacacacacacacacacacacaaaatggaatactattcagccttaaaaaagaggaaattttgtcatttgtgacaacatatatgaatctagaggacattatgctaagtgaaaaaagccagccacagaaagacaaatactgaatgatttcacttatatgtagaatctaaaaaagtcagactcttagaagtagagaatagagtggtggttaccagacggtagggaggaggggtggtgggggagatgttggtcaaagggtacaaagtttcagttagacaggaggaataagttctggtgatctgttgcacagccaggtaactatagctgataatgaggtatcatatagttcaaaattgctgaaagtggattttaaatgttcccaccacaaagaaaagtatttgaggcaatggatatgttaattagcttgatttgctcttgtcatagtgtatacatatattgaaacatcacattgtaccccataaatgtatacaattatttaaagaaaaatgtaaaaaaaatattgcttggtgactccttatttgctgtggtaatcctttagttttatccttgtattccctcaaaggtaaaaaaataatagaaacataccaaaatatatacttatatatgcagattttttttaatgttgcaaaataagtttccactttcttaattttttactttggaaaaagtaatgctaaagcaaatgaagagtataaaacataggatttttcacttaaaatgtcttacaggcactaacataaatagtgactctccagttggaaaaaagctgaccattcattctgagaaaagcgatggtgagtatgaacacaatttgaaaagaaggatgttccatattaagctacattgaattctaaacccagttcaggtagtaacactttactctggaattgaaattgtttcctttttttttttttaatttatttttgtttttttgagacagggtc

SEQ ID NO: 73614 - DNA, 1069 bp, Homo sapiens
aaagcattcttttgaaaattggttaatgtgagaaatctccccccagatataggctggcttccttttcaagtgccagtaccagagccaggagttaacttttactattaacacgtttacaccagttgcggagagtgtgggaaaccacttctagaaaggtggcagggtatgtgatagaatgcagaaatgaataattccatttggctggaacatcacggggagatgattgactgggcagcacatgctgaattgtatagtgtatactttcattgatttatcccatgtttgaatttgtttatttatttgcttgtttccagctgcttgtcagacattgctgtctcttcctgtggattttaatttagaaaatatattaggtaaatactgtatttgtttaaacttttaataacttgaaccaaaggttttgtttggctggctttttgtaaatggtaacatgggaaatatgtggcagtgcctctttctaaagaagtggggaaactgccctgaaatttctctttttcttgaacatggtttgaactagccttattatcatagtgaactttattactatagacagaaactataaacattttattgatattatactaacaatgtagcacttaaaaactaaggaataatttaagatgtaaaacatcaaatatgcaattaaactttgccctctttttgggaaaaaattcaaacatagtgcatgctggcttcttaaaagttgagtaacagaagtataattgccctttaaaatgactagctttgccttttctcctattattaaatataggtgactattttagagctgatgaatttgcagatcaatctcctggaaacctcagttcttcatccctcagaagaaagctgtttttagatgggaacggaagcatctccgactccttaccttcggcttctcccggaagtcctcacagtggtgttcaaacatcactagagatgttttattcaatagatttgtctcctgtaaagtgtaggagccccttgcagacaccaagttcggtgagaagtatactaaaaagcagttggctaatatgctgtcaagcttgaaccc

SEQ ID NO: 73615 - DNA, 1029 bp, Homo sapiens
gacttcagatgtatagtggtggtactcagtatcggacctcagtgattcagataccttttactcttgagactcaaggtgaagatgaggaagataaagagaatattccttccacagatgtctcatcacccgccatggatgctgctggaatacacctacggcagtttagtaatgaggcttctacccatggtacacatttggttgtgactgccatgtctgttacacaaaatcagtccagtgcttctgagaaagaattagcactgttgcaggatgttgaaagggagaaagacaataacactgtggatatggttgatcctatagagatagcagatgagaccacttggattaaggagccggttgataatggcagtttacccatgactgattttgtaagtggcattgccttcagtattgaaaactctcatatgtgcatgtcacctcttgctgaaagcagtgtcattccttgtgaaagcagtaacattcaggtaaggtatttaatattctatagccccttcctcactgccttggtgttctttatcctttctaagattatagtataagaaagataatggattaaacatgaggactacagtattatataatattttttaaaaatattaataccaagtgatatgagaagagtaaatttattttaattatgacagataaggcatattttatattcacattaactgatatttgtatggagtaggaaaaggtaagagcagaaaagaaattagcctgctctagagaaatcaatcctgctagagtcaggcaggattcatcactgtttcatgtggatccagtcccccaaaacatgcaaggtctggtatagtatttgcattctaaaaataaaatcatttttgtttttcctttatgtgatttaggggggataaaaagagtttagagcactggttttttttttgagatggggtctcactctgtcacccaggctggagtgcagtggtgtgatcttggctcagtgcaacctccaccttctgggttcaagcaattctcctgcctcagcctcct

SEQ ID NO: 73616 - DNA, 1045 bp, Homo sapiens
accaggagtttgagaccagcctgggcaacacagcaggccctgtctctacaaaaaaataaaatgcaaaaaaaattggcacataaaattaaagactgtcctgactagtgcctgaaattatgatgagtttcttcaagtatgaatatataaccaccacctggaaggttcagtaaatgccctcatcaaatacacgctacctttgcacactttgtagtatgtaagatacttgtgtattcagagtaaccaaaatatttaaaggttattggatgttaagaaaacaggcttaccttttagtgttttaaatttcatatagtttctcaatagtactattgtctaataatcaaaattattttatatttctaatctaaacaatattaagctttcactatattttctccgtaccttcatattaaatgcttgagatttactctcaacttcacatgtttgtgcatcactttctttgcagtaactttctgccccaactgtatccataatattgcttccacaattctgcgtattatagccactatccatctgacaggagaaaaaagaaaaaaatatattgtgaggaacttaaaagtcaaatatttaaataagtaaaccactataaactctcattcactacatctgaatgatcctaacatgtaatattgatcatgttgaacaaaattcaaaagtaatgcacaaatataaaaggtagtcctgcatagtactgattattgtagtcattttacaattccttccaatgaaatatatcttgtaacttccttaagaatcagtgaacagcctactgacacaatgctttcctgttattttgtgatcgtacctagtagacaaaaatgagtattacaactaacttcaccttccaacgcattttccaggcttgtctctaaatggcttgaggcatgctgcctttaaaaaagtggattatattatatttacacctagttgttcacaataatgccacatatataatggctctagatgttagttcagcttttcatgttaataaaaattgtagcatcctaagatacactgtttcagtgca

SEQ ID NO: 73617 - DNA, 1042 bp, Homo sapiens
atgctacaatttttattaacatgaaaagctgaactaacatctagagccattatatatgtggcattattgtgaacaactaggtgtaaatataatataatccacttttttaaaggcagcatgcctcaagccatttagagacaagcctggaaaatgcgttggaaggtgaagttagttgtaatactcatttttgtctactaggtacgatcacaaaataacaggaaagcattgtgtcagtaggctgttcactgattcttaaggaagttacaagatatatttcattggaaggaattgtaaaatgactacaataatcagtactatgcaggactaccttttatatttgtgcattacttttgaattttgttcaacatgatcaatattacatgttaggatcattcagatgtagtgaatgagagtttatagtggtttacttatttaaatatttgacttttaagttcctcacaatatatttttttcttttttctcctgtcagatggatagtggctataatacgcagaattgtggaagcaatattatggatacagttggggcagaaagttactgcaaagaaagtgatgcacaaacatgtgaagttgagagtaaatctcaagcatttaatatgaaggtacggagaaaatatagtgaaagcttaatattgtttagattagaaatataaaataattttgattattagacaatagtactattgagaaactatatgaaatttaaaacactaaaaggtaagcctgttttcttaacatccaataacctttaaatattttggttactctgaatacacaagtatcttacatactacaaagtgtgcaaaggtagcgtgtatttgatgagggcatttactgaaccttccaggtggtggttatatattcatacttgaagaaactcatcataatttcaggcactagtcaggacagtctttaattttatgtgccaattttttttgcattttatttttttgtagagacagggcctgctgtgttgcccaggctggtctcaaactcctggtgtcaagcagtctttctgcctc

SEQ ID NO: 73618 - DNA, 1463 bp, Homo sapiens
gagacagggtctcactatgttgccagggctagtcccaaactcctgggctcgtgcgatcctcccaccttggcctctcaaagtgttgggatgctttttgatgcagaatattgatttataaaatactgtatctttactgtcccttcagagttcagctaaagaaacgtgcttttaggttttaaaaacagtcccgataattgcatcctccagtggtcctacttaaactgaaaacaaggtattgtcttctttttcacagcaagaccacacaacacagaggtgttggatgaaaacagcaagcccttttcaatgcagcagtccatagaatgcctctgtcagaatcaaagactaagcttaagagttcctcgcatatatcgttgtgcacaggatcaacatgatggtgactgggaaaaaattacttcaagtaacatgcttagctttccctccttaatgtgaaaaatcaagggcttactgacataggaacaacagaaatgctcctggaacttcaagttgctgaattataagtttattttttatcaataaatatttttatacttacattgagtgatgtgtttaacaacaaattgtgacagagctgagtgctcctatcttacagggtcaatgaactacttattaagccttactggtagcactgaatttagcagttctgagaacatgtgaaactatgttaaaactgaaggcactatatatttttacataaaagcttgaacatacagatgaattataacctatgtgaagaaatcttagatataaaactaacttttcaaagatacaaaagaaattaaacaggtttcctgaaattttagttcttggtctgttcacctctgtggggaaaattcttagttccagtgataactgttctagttactacttttaagtatgtaaatactagaaaggtagtactagtgacatcatcacgtgtattgttatctatggggcaaatgtgtggtgcccagaataaaatatacctcatgcctagggtagggacatcctttccagctcaaacgtgggtagggatgtgggagaataagaatgtgggagaaccaagagaaaaagtggggctgggagagtggagttcccgtagggcataggcctgtgaagtaacactggggcagatatgtatgttatatacaactatttttttaaaaaacttatatccatgttgggagtagatgggtatataacagtttggaaatactatctttggagaatgtatttttgtatttataaatcaacttttaaaaactgtctcattcaaaagggaataaagacctgtgttatcaatgtgtcattttcttctttcctccataactgtaccttgaaaccttactgctgacctgcagaaaatgtgccgcgttatgtacctggctcatcttcaacacactaaccatgaacactaatagccattaggggacatggctacagatactacattggaaagttgtctt

SEQ ID NO: 73619 - DNA, 1119 bp, Homo sapiens
atggcagaaaaaggagaagcaggcacctttttcacagggcggcaggatgaaaatgactgccagcagtggaaatgccagacgcttataaaaccttcagatctcatgagaccggctcactatcacaggaacagcatggaggaaaccgcccccatgatccagttacctccacctggtcccacccttgacacgtggggattgctacaattcaaggttagatttgggtgaggacacagagccataccatatcagcccagatcaagtagtgacagagtagggatttgaatacaggttatagtcactattgtgttatttcttgacttttgtactattaaaaaactgtagccagtgaggcttctacccttagtacccagaactccttttaggtatagcaattgtttttaggtaaatttatattgagtttaacacctgtgtgattaaagacaactttccaatgtagtatctgtagccatgtcccctaatggctattagtgttcatggttagtgtgttgaagatgagccaggtacataacgcggcacattttctgcaggtcagcagtaaggtttcaaggtacagttatggaggaaagaagaaaatgacacattgataacacaggtctttattcccttttgaatgagacagtttttaaaagttgatttataaatacaaaaatacattctccaaagatagtatttccaaactgttatatacccatctactcccaacatggatataagttttttaaaaaaatagttgtatataacatacatatctgccccagtgttacttcacaggcctatgccctacgggaactccactctcccagccccactttttctcttggttctcccacattcttattctcccacatccctacccacgtttgagctggaaaggatgtccctaccctaggcatgaggtatattttattctgggcaccacacatttgccccatagataacaatacacgtgatgatgtcactagtactacctttctagtatttacatacttaaaagtagtaactagaacagttatcactggaactaagaattttccccacagaggtgaacagaccaagaactaaaatttcaggaaacctgtttaatttcttttgtatctt

SEQ ID NO: 73620 - DNA, 3547 bp, Homo sapiens
attgcttttccttggattacctggttaggccctatccttcccatctagaagagagctgggagcagtaatgttggactgcagggcattattcgatcatgatggcattggtttctgattttggatcagacctttacggcatgcatgcccagcttctccagattcataggaattgaatcagcttctcactcctctgctccaagccttaatctgtaaatagggattttttccttcattgtcttatttcttccaaagacctaagagaagagatgtatatttgactcatctccctagggtagaacaaagcagctaaatttgatgaatccgaacattgttctgacagaactgtagtgaccagtacagttttgtttctggctactacttctactttgaagggaaggaaaataacaaaaacatgatgtttgttcagtcagatcagttatattttgaagacataatggtactgacttagaaatgtttaatatggtgctcttccctcctttttgtttacagaatttggaaattaagactgatacagccaagtctttggctgagtctttggatcaggccgaatctcctacttttccatatctaaacactctgttgagaatattagccactcgctgtatgatgcaagctgtgtacttctgttctggaatggataatgattttcatcactatggcttagcgtctccaatatacacacattttacttcacccattagaaggtattttttccttatgaaattaaaggagatagaaaatggttaattttgaattttaaaagcacatattagtactgacataccatggttcttatttttccatctatctagatacgcagatgtcattgttcatcggcttttggctgtggctattggggctgactgtacttatccagagttgacagacaaacacaagcttgcagatatatgtaaaaatctaaatttccggcacaaaatggctcaatatgcccaacgtgcatcagtggcttttcatacccaggtatttgccttttgtcgatactgctagaaaaaatgaagttttgttcatttttaatttaatttcaattttttgtttatttaaaaatttttaagacaatttaaataagttgtatgttattttacagttattcttcaaaagcaaaggaatagtaagtgaagaagcctatattttatttgtaagaaagaatgccattgtggtattaattccaaagtatggtttagaagggacagtcttttttgaagaaaaggacaaaccaaacccacagcttatttatgatgatgaggtacggtatttctcatgtttgttttcttttccggggggcactttttctttgagagttcataaatggtacctataaagcataaaattattttttgtaccctgaagaatttatcctgatctccaaatacatgccagaaaatctacatttaattttgccaactaaactatggttttactcacaatttctcaccactatatgtcttctcatatgcaattgttgtctttgatttctttcttttataccatgtaaagttttgccctacatggaacaataaatgactctttataactcggggaaggaactttttttttaaacttacttctagtgtttcttatttgacacacatactccctattctccttaggagaaccacagccctgagagaatatttgaacaataaactggccaaaatacctttgtgttcctctactagactaaaaatttcctatttattagtggggtgattaattaatcaccaagaatttaatgaacatatatattagaaataccttaatgaaggagaaagtaagcacataagtaggtcatatttatatgagactactaggtttgtggcctttgttatgttgaacacgtagatgcttactaatttttatatttaaacttctactatgtaagataaattgtaaaggattagaacaaagcctcaaatgtaaggaagcaattaagaatgataaaatgtgttttgtttagataccctcacttaaaatagaagatacagtgttccatgtatttgataaagttaaagtgaaaatcatgttagactcatctaatcttcaacatcagaagatccgaatgtccctggtagaaccacaggtaaggccaaacttaaaatttccttgttgtgatggaacaaacagtacatattttgtcaaagaagggacgtagttatttctgtttaatgttagagggaaccctgtaagtagtgtagaaaccaaatatttgcatagcaaatcctgttttctcactgatttctttaggccacgggattctagacatctgagattctgttcaggtctttggtgctaaaataaaaaggtcttccattctcctgcctagtcttttctatctagaagttttgaactctgcattttgaagatgaagtgtaggtgtttcacctaagatactggttcttaacttttgtccttccccaacacacttgaaatcaactctgattctgtcaatcacagtggctccccattgggaaggctgttttgtagttaaaaagaacacttcctaaatgacatgcttctcacctgttgagaccatgtctagcttttacatttttgaaccactgctactttgtaaaataccttctgtgtataaaacctttaattagccccctttcccctccctaccactacatccttttaaatttgaagctggcagtggggaaggggaggatgaggttgagatgtattctatcctttaaatcaccttatttccccccatttgcattactttagataccaggaataagcattcctactgatacttcaaacatggaccttaatggaccaaagaaaaagaagatgaagcttggaaaatagctatattcaacaaaaatcttcaaagactggtttcttttttaaaagaaaaaacttgaaagaacacttctaagcctaagtgtgtgatacagtttgttacttttaagtacattttaataatttcagacatctgcatttttattgaacagttgactgtatctgacccatcatactactatacttctgggttgaacagaattatttatgcagaataattcaattgaatatccatcacttaaatacagtgacaggacagcaacttcagggatctgtaaagatcatttaaatggagtgctcatctcattgaggagcagattaattttgcgtaagtactttgattatttaatatttgtaagaaaaaactttcattttcctacagaggaaaatagaacaattttagaagcaaggaacaatctcttttctaagtcttggaagctgtcagtgttgaggatgtaatctcctttgccatctttaattcacctaacttacactaggtgttctcttactgtctttaaaagcttcctgtattttattagtggtccttgaaaaactgtgaatgtttgggaattggtagaaaggcaaaaagtaggatattttgacctgactggaaagatggttgtgtttttattgccaggtaataagtgtgatcattgttgaacttcagctccagtgtctctccagaataagacattggcat

SEQ ID NO: 73621 - DNA, 1247 bp, Homo sapiens
acacttagcaatcaaatattaatagccatcactacttgtaacctattagtgatactaggttatcagttgcttctcttttggttcagtctttgtggaagatacttttgaactgtggatcttctggtgttactaagctacccacagcagcttccccttttgcccctctttattgtcccctgccccaataactgttttctgtagtaaattaaatacaatcaatccccttctttatttgtaaaagtgattaaaaacctgtgtagctcaataaaaactcatcgtttgggtacagaagatataaccctcagaagcacagggattcagatttccttgtgttgctatcgtcctctcttgttaaatgcattttaaatctactgagctgttcatgaaagctctactgagctgtttatgaaaatagaacatgaaacagcagatggtcataaagccttcagaagagcaactattacacacttgctgtagtcattgtcttttttaaaagaataatttctatacttttgtcttttattggcttgcttgactataatttttctctttaatttttatgtagggctttgactctatcctctcctgaagttcgattccacatggacagtgaaactcacgatcctatagatctgcagaccaaggaacttaggtttgtaatttttttgatgggcattagataagatttttttattttaattgtcatgtctactgtaagtacaaataatgaaaacgtttatatacaaaataatgattagggtcatgatttctactttatttggcttgcaaaggacagaaaagtaaatttaagctcagtttttcttctataaaactgcgtttagtcgcataatagaaaaactttcaatttgaatttgtttgctttgatgtgtgatgtattagaacttgactagtaatagttagagtaagataaaaaaaattaccccaattaatttctaaagtagaatatactgtagtgcaggggttcccagcccctgggctgtgagctttactacctgagctctgccttctgtcagatcggtggcagcattagattcccattggagcgccagtcctattgtgaactgtgtgtaggagggatctaagttgtgcacttcttatgataatctaatgcctgatgaaaccatccctccctccccttgtcgcatagaagagttgttttccatgaaacccgtccctggtgccagaaagatgggggtaggatagaataatagatagtaggatagata

SEQ ID NO: 73622 - DNA, 2000 bp, Homo sapiens
taacaagtaaagtattgtgaaagtcaaggggaagattaaacttagtctattagtgatttattgtcagagttcttctgtatacttttttccataaaaatttagtttctcttttctttttttagtattttaaaaacaccttgtagtttatattaagcattggagaaaggtccagtcatagagtgtgtcaggtatcaagtataaacttatacagaccagagatttaaaactttcagaggacagctaggtcgttagtgtagagggcttaaacttagattaattggcatgaagtccagttttccttcatagctttccttctttaacaattttgtataagtgcttttatagaaacaaaccttttatttgaccttttctcaattctcctatttacaaaaagcagaacactcttttctttccttgtttaattaatgttatttgagaatagaacctcacataaatgtatggttatggctaagtaatctgtggttctatttttatcttttgcagaggattgacatggttccagagttgcttagctctaacttgtgttccttaaaatgtgacgtggacaggtatttctgcatggttttttttccttgaagacattgtatttactactttaacctgattcccattaacaaatactctgtattttccttcacaggctggcattttcatgtatttgggaaatgaatcacaatgctgaaatcttaaaaacgaagtttaccaaaagtgttattaattcaaaggttcgtttcatggctattaatctctaatttttaaactttttggtacttttttgaaaaaagctaaataaattttttaaagattcacatgtacgtatatatacacatatataaaaatatttatatatttgaaaagagatgttatgtataattatatgtatatttacttaacctaaaatagaaaaaacatatacatgtaagtacctgagatataaacatagtctaaaaaagtccccagctgcgggcacgtgcttaaacatgtacagatgcacttaaatttacactaaaactcatttggcccttttgctacctactctcagagaagaatgcagaacaggccaccagagtcttattgccagctttcttgacccagctagtaccaagccaaagtaaccagccccagccctactgccatcacctaaatttgagattcctgcccacttcttgagaatttttcagtcaagctagatgctcttttgaacatgtaaagtggatacagacaaatgtatttcagtttgggtgggaggggaagagtctttctaggcagaaaaacaagggctaggtctgtgccctcaggatagaatgggggcactgttatagcaaaattttgagggttttttttttccaattataagcagataatttttgatgtgattcagaaattagttcatgttgcagttgtcctgtattcagaaacttacaaagaatatatacttgaaaagaccaactagtggttttatgccctaactcaagaaccctagtaattgaagctgttcctacttataaatggttagtgttttaaaagtcagcaggtacaccacttctttcttcacattttctcacagaaatgatgtttaagtcaccattggattttagtagaactagcctgagatcatgtttattcataatggagccaggttatctttcttgtccttttcctgtttctttgtacttctcccaaaaatcccttatgttctctcttattttgccctacatctttcttcaagatttgccaaaccccttatcttctaatgatctgttttccaagcttaacctgttttttctggccctttggcatccttcttgctgttctgctaaccagtggttgcaaagaaaacagtgttagactggtaaataatgatgtgtgaattatttaagccatcacagtttgtactttaaaataagaatgacttttaattctttaagacttggtcagtataacaaaattatatgaaaacaaacctagtgaatatataa

SEQ ID NO: 73623 - DNA, 1074 bp, Homo sapiens
gttccccatcagcctttttcacaggctgttcttagttttctgccaaagatgccctggagcattactgaaaaggtaagttgaaagtaatttgtagtgactttataaattattatatcctgcctagttttgtttaatttctatatgtgtttttaaatatgtagacaccacgggccctcttttcctgcattttgttgggtatagcattcttaggaattatagaagaagtcatttgcttcttcattgaagggtaagtttttctatgtggcagacactttcatatgttaaatgtttcaaagggaaggaaaccattagttacaaatcatacgtggtgtctctctgctccagtgcaggaaaaagaaatgtggttgtcatcaagaaaatacagctaaattgtttttgtatacatattactgatttcacaagagctattaatatgttgtagttgtgctttggaaataatttatttgtttatcatttcatgtcttctaggacatgaaaaaccgagaagacctgaggcatctgtgtatttgtagtgtagacccaccaggatgtactgatatagacgatgctctacattgtcgagaactcgaaaatggaaatttggaggtattcatatgtaatagtgttcttacctaaatatagttctgttctgagttcattttcttttgaactagaatagaatttgcttgttaattactcttgtgaagtataattgtagctgcacgctattggccatatgtcagaagttgaaatggtagaggtgactgagtcttttttaaatttagctaaactttatcttattaaaactccattaggtacatttacccagtcaagcatattgacatccttttatttttatctttttaaggttggtgttcatattgctgatgtgagccattttattaggccaggaaatgccttggatcaagaatcagccagaagaggaacaactgtgtatctttgtgaaaaggtaaatgtattgaatttaaaaatttaacagtcatggacacttaaggattcttaaacggccatgaattagctaagaaaaatacatggaataatgtggctttaaat

SEQ ID NO: 73624 - DNA, 5121 bp, Homo sapiens
cctgtgaaattgtattataatttgtcaacaaactattatttagtgtctcaacctaaagtataaattctgatcttgaatttttctttttaggaaataaaattgtattagcctttttcttgtccccttaataacataattttcttcttttccaagcaaattgtttcttaaaaacttaattataagaatcttgatttcttctctgaggtgtacatctgaatacattcaagagaaaagatataccattgactttttctagtttagtggttaagcatttatgtgctaagagttttcacatatccttgtttctactgatttccttttatttcgttttttctttccatttagagaaacctatgtagaacaagaacagggagaaaatgctaatgacaggaatgatagagcgattcgagtagcagcaaaatggtacaatgaacatttgaaaaaaatgtcagcagacaaccagctgcaagttatcttcataacaaatgacaggagaaacaaagagaaagccatagaagaaggaataccagctttcacttgtaagtctaaatgtagaagtacttagtgcatgtttgcaaatgcgtgtaaaaataatcattaggcctatagtcagatgttcactttactatttagtattttcgtagtcctatataacttcatgtgatatttttgtatttttaaatttcacatagtttttaacctaaatatgttgtgcccagtggctgttaattttcccctcactatttgcaactggtttagcaatgaaatctcataaatatactggaacccctgcttctgcttaggtatgatcacatcaacagatttttgggttttgttttttaaataaattgaggccaggtgctgtaatcccagcactttgggaggtcagggcaagaggcttgcttgagaccaggagttcaggaccagcctgggcaacatagggagactatagctctacaggaaaaaaaaaaaaagccgtgcatggtagtatgtaactatagtcccagctactcgggaggctaaggcaggaaggtagcttgagcccagggattctaggctgtagtgatgtgtaattgcgccgctgcactccagcctgagagacagagtgagactctcagtgtgtctcaatgaatgaaagaatgacgtgtatactgtcgcaaacaagactatccatttttttcatatctaaggaaaaaacacttatcaaaaacaacataaacttattttttcaggtgaagaatatgtaaagagcctaactgctaaccccgaactcatagatcgtcttgcttgtttgtctgaagaaggggtatgtttttgttttgtttttgaaaagtaaaaatattaaaatagccactttggaatattaggcatatagttaccaaatttaaaaattggaatgtcggtgggtaagctggatttggaatagttgtgttataaacaggagtggatgtcataggcttattgaaatgccattcctaaaggagttaactttctaaaatagatatattcccattaacctgagtagggcctggtacctggtagcactgtttggttgaggaaaaaatgaacggagtccatggctgatttgtgaataaagagtagctgctgacaaatgaagtggcaggcactgcagacagaggaaagaagagggaggggagtgtccagatagtaaagacctagaacttattctgtaggttagtaatttttcaattgatttataaagatctccctgaagggctgctatgaagaggaaaggattctgagatcccttccttatatgtcaggctaagaaaaagtaatggtatatgaatgtggattggtggagcaggagagaatgattggaaatggtatttgtttgtaagaccactctcatgtcagtgtgtaacattaagcattttatccaggaaagattagaggcagagaggtgagtaaaggagtcattacaatagctgatgtgagaaggagtgctaagggaataattaaattctgagcattcattttcttatatataaatatataatgtttagcaataataacttcatagtgttgttataaggatcaaataagatgataactgtagcattaatacaattttcatcctagtgcctggcacataggtatggtaaatataaatggtagcccttgttatagaaataggttttaagtgataggacattatacataaatccagtctttacacttctgtcatcccttcttacctttatgatactttatgaaaccaaaaggaaatgagaagataaaagttgggtttgatttttgaaatacagatttagtattgccctaatatgtagccacttagttatatatgactatttaaatttaatatgtattaaaaattcagtttcttggtggtactatctgtctttcaagtgcccaagagaaacttgtgtctagtggctaccatattagagatcgcaaaatgaatacttccttcatcatagaaagctgtttttgttagcactggcctataagaaacactgctatcttctctcctattcagagttgtgtatatcataatgtagatttcaaaaattctctgatattaataatagttgtgtattgagtgaacagaagacttattagcggcatcttttggtttgcttctttcatagaatgaaatagaaagtggaaaaataatattttcagagcatcttcccttaagtaagctacagcaaggcataaaatctggtacataccttcaaggaacatttagagctagcagggaaaattacttggaagctacagtatggattcatggcgacaatgaagaaaataaagaggcaagtatataaataaattccttatacactaaaataaagatgatattttatatattatgaacacttaatggtaaatactatttgtgtaacatatgaggcttcacatactttaaagcaaatagtaacttttttctttttttttttgcagtgctcacaatttgtcaggtagttttttaaatctttgcgcatggcatttcatttaatattcaacccaacctataaaaactaggtagtgtactcttatttgaccaatcaggacttgagatttagagagcataaataatttttccaaagtctcttgttaccagtgtaagttatgatggagccatgaacacagcctgtgttttctgacttacattttttctacctggtattgagaaattaaagttgtggaattagggacacaatagagaaagaaaatctataaaggagaaatagagattccatagagatattcagagtgtatgtaaatatctgttagatgatcttccctttattatattgccattaaaaataatttgggcacgtgccctctgttgttttaaacagataatcttacagggacttaaacatttaaacagagctgttcacgaagatattgtggctgtggagcttctccccaagagtcagtgggtagcaccatcttctgtggttttacatgatgaaggtcaaaatgaagaagatgtggagaaagaagaagagacagaacgaatggtatgaatctaagcaggatttttttttgtctgtgtagctttgtattattaatatgtcagctttggaaaacaagtttcattgctttcagatttattgcataaaatcatagttctgtatatttaacgcatgtcatacacatggtttttttctcttctatgtagttttcttttattgtcttaatttgctcaaataaatgggtttaaatgcaaacagactgttagtatgagttaatacaagtatgaaactgaaaatctgtgacagtcaagtatattattagacttagtgagatttaagtaaatatgtgtttaacattttctgaaatgctttaagtaatgttttaggaaatgttttagaaaatgctttaggtaaaattcccttaacataatagacgtaattctgggccattatatttgggcaacttatctgataccatatttattatgaagagaatactttcagttatttcttatgatatgcgctaagtctacttgatatggcctatttctgtattttataattacaatattataaatagttggaatgcatgtaacagttttttattcttctttttccatcatttatattcattgctctggagtctcactataaaattatccatggagagtccaggcctttggatagtgttaagaggtgaaataccataggaacttttgtaatttctaatagcagaccctctttatttgggtttttattttttataaggaagaacctttagaattaataaataaaggtccaaagggaactagtcaccataccacatagctaatttgtacaaactagtactaaaaccctaatctaattcccagacctgtgtgtgtattttagtcagtaaatcctcatgttaatcctgaaaagtgttgagttctaacatacgtattcagttatatttatttatttgtttttgctttttgattgttttgtagtactttattatcaagagagaatgtctgtggtttggtttggcatgcatgttcttgtctagaatgttgaaacatcaacattctgtagtcttatgtcataatttactgcctgaatggattagtatccatgtatgcattttgattttgaaaggaaattgcctgataatacttagaggaatataactgaacattttaatttttatatctcagcttaagactgctgtaagcgagaaaatgttgaagcctacaggtagagttgtaggaataataaaaaggaattggagaccatattgtggcatgctttccaagtctgacattaaggaggtgagtaaagagcatttactatgtaataaaaaaatgataaacatttaatagaacttatagcctttcttttgcctccatcctcagattttttttgtgtaaaatctttattcctaatttttgctagtcaagaagacatctctttacacctgctgataagagaatccctcgaattcgcatagaaaccagacaggcttccacattagaaggacggagaattattgttgctattgatggttggcccagaaattccagatatccaaatgtaagcttaaagtattaattttatgtggggatgtttaattaaaattttgtgaatagtatttctgcttttaataaaaaca

SEQ ID NO: 73625 - DNA, 1072 bp, Homo sapiens
tgttgtagttttgtaaatatttatctttattactgataagtgagagcactacaaattacaaattttaattgtaatttggatttaagactgcttattaatttaatttttttcaaggttcgcttctatgagctagtgaatccattaagaaaggaaatctgtgaactacaagtgaaaaagaatatcctagcagaagaattaagtacaaacaaaaaccaactgaagcagctgacagaggtttgtatggttttgattgctggtgggaagaagcttcggctttttctgtagagtccctcaggatttgtgataaggcatataaaagtcagtgattgaaaaatgggactatgggatggtgactgctacagttcaataatgggaaggaggttaaattggaagtagtcatcttaaacattgacaagacaagtctgtgttattgacgtatcctatagttgagcttttattgttgcaagtcaattttataatcaactgcttttgaaatcctaatatgggctatatctgaaaattgctgtgtatccttagatgacgcatatgcatgtatttatttagtaatttgtctctatttttaacatcactttgtcaggaaatttaagcaagaaacaagaaatgtaggccaagctatgcaggggatctcttgcaggtgccataagaaagaagaaaaggagaatatttttactttgaactaagttgactcgtaggttctggtttgcctaagactgttgccattattcctgtgaataaatattaatagcacccctttattttcaaaattatctcagcctagacgatgaatatagtaatcataaatcaacatttatatagaagggtggactaatcattaacttggttgtattattgaccagatatcctagaatactatcttgtagttatagtctactaacaaaaaaataatggtagattgattcattctaccatgtaacagttggaaatgggtggctgtttttcttcaaatatttcgttattctaaaaggaaaacacttctagtttacaaatgggggctgctgcagttcttcattacaagttagccttgttcgtg

SEQ ID NO: 73626 - DNA, 1737 bp, Homo sapiens
gcacccaccaccacactcagctaatttttgtttgtttgttttttgagatggagtctcgctttgtcgcccaggctggcatgcagtggcacgatctcggttcactgcaagctccgccttctgggtttacgccattctcctgcctcaacctcccgagtagctgggactacaggcacacgccacgacgcctggctaattttttgtatttttagtagagacggggtttcaccatgttagccaggatggtctcgatctcctgacctcgtcatccgcccgccttgacctcccaaagtgttgggattacaggtatgagccaccacacctggcctgaagttactaacttttaataagacatgatccaaatttttcatatgacattattcaaaagatcttcataaagtgattcaacaaatattttattcttcaactcatacttatttaaggttggatattttaagataaacaacattagtcttattaatgactttatgtaattttaaagttggatacaatataagctttggggaaaaaaacatgactagatggtattcacccaagaattttaagggacttaaaggatgaacctgaaactgcagcacatgtataatattgctatcaaacagagcacttgaagtaggtgtaattgcttgaaagctggtaaattgcctgcctgagtctagaaactaaagacctccacacttaaaactgataaagcactcttttatgcttactgagcttgtgtaatgcatgaagattaggatcagtgaatacttaggcaagttaaatacttccccttatgggggaaggtcaacagagtggtacaaatggacaaattatatttcacatatatataaagagaaaatagagaacaaattatatagactttcaaaaagccattgacaggttttaaattctagcttttaaaaattggcaggcttttaaaaaattacagtgaataacataacattaaatttaagactttattttcatgtatacaattcagtaaagaatactcacattgtgcaacagatctctagtacttttgtatgttgcaacactgaaaactacccactagacactgattctccctctcccctcccccagtcattggtaaccattttttaactttgtttctatgattttgattagtttagattcgtcatatgagtagagtcctacagtatttgcccctttgtgattggtttcaattagcataatgccctcagggtttatccatgttgtagcatgtgacagaattttcttttttttttttattgtactttaagttctggggtacataggcacaacgtgcaggtagtgttacgtaggtatactcctgccatggtggtttgctgcacccatcaacccgtatctacattaggtatttcacctaatgctatccctcccctagtcccccaccccctgataggccccagtgtgtgatgttcctctccctggtccaagtgttctcattgttcacctcccacttatgagtgaaaacatgtggtgtttggttttctgtccttgtgatggtttgcggagaatgatggtttccagtttcatccatgtccctgcaaaggacattaactcttccttttttatggctgcatagtattccatggtgtatatgtgccacagtatctagtctatcattgatgggcatttgggttggttccaagtctttgctattgtgaacagtgccacaataaacatgtgtgcatgtttttatagtagcatgat

SEQ ID NO: 73627 - DNA, 1088 bp, Homo sapiens
ttccatttgtcagtaatttcttccttttcattactgagtggtattacattgaatggctctagttatttaccatttaatgggcatttgagttatttccgattcagagactttacaaacaaagctctgagaacatttgagtatggttttttgtgtggacatgttttttctcttgagtaagtacttaagtgtggaattttttacttctagaatttcagtttggttatttattatagcttttatttctctatttgtttacttattatgaacatattttcctttacaccactgagaattgttaaaataggagctttaaaattcttgtctgctaattccaaacactgggtcaccttggagttgatctctgttgattgtcttttcttttagaaatgggtcacatgttcctctttcttcagatgtcaagtaacttaaaattgtttagaccatcgagtaagtgtagatgagaacattgtgagtattatgttgttgagactctgcattttatgtacctctaaacggtggtgatgttcttgttttagcaggaaattacttggttgtactcaaacagcatactctgtctattgggcaggtgttcaaatttcagttcaattttttttggtattattggggctgctcagagtctgtcctacacatatgttgtttagagggtagccagatacttaagcagaaattacccagagaattcagtttcccctctctggctatctctgaaatttcctcctcatttagagcagctgcagttcccataaataccaaagattttctcatgcaccttgatccatccaacctggcacagaatgggactggcctcaggctaagggctactaaacaaaaacaaaaaataccaggaaactcacctaaatgctgaaaatgatagcaataatgacaactccatagtggtttactaagagaaactaaggtatttgttaggcatatctctgagttttgagaccagcaattaagaaaacaaattttccattttacttaaaaagtttattctctacagagagttcatgaatctggagaaaataaaattactctcagtctttccgttttactttatggatctt

SEQ ID NO: 73628 - DNA, 1047 bp, Homo sapiens
gccttggccttgaattttattgatctcatctctagtgattgccttttctccattttaacactcagtcttatagcccacatttggttccttgccatccagaactgatttacttctgaagttaccaattcactttcatccactaaacatcttatttcctatattttttatgttttaccattgtctgctttcaacttgtctttaacagaatttccaatccatataatttgtttctttatcaatcctttcctaaatttattttcttcccttgccaccatgttatcagtcttaaacttttttttttttttttttttttgccagtatcatctaattcctctcccagctttctttttatcaaaccagactgaaaaactctcaactctttatttttctagctgagcactactggcaaaaatcacacaagcagtaacaagcactgtcagtttattgttatcagcctcaaatggacccacacaattggtcgtaattctattatttctagttctctcatttttcgcagagattacttaaggcaaccagccactcttcttacatctccagttttccacgtttcttgtcgcattcagcagatgacttggtatttcatttcacagagaaaatggaaatcttcagatgagaactcccacagtgtccttccaacaaatctactcacatctgcactcattctggtttgtttgttcttagtgtttataatggaaagagtctcgccctcaagggatgggaaaatcatatgcctctagaaaccaggtggataatataaatttgtgaagccgtagggtaagattaggctgtggcctgtagcaaattgataagagctatctaaattattcaagttgttaatactctgtatcagctggaaaaaagcctgccttgatgaacatggcctctgatctaagactaatctgcacatctaagctgtggatcccatctcctaaagcccttttcaggagtatgcttcattcccctgagtatgcccccttttctccaacagtaattcatcttttgctgttgtttctcaccaatatttga

SEQ ID NO: 73629 - DNA, 1052 bp, Homo sapiens
ttctgagtaacacaattggaactgcatgtttaatctcttcattaattatttttcattgtagatactgatatccatatgacttttcatctctaaactgtaaaatcctcaagaacaggaagtgtgttttattcacttctgtatcttcagcatctgatagtaactcagtaaatgtttttaaaaagtcatttaacatttgtagtcattttatgttttagcctagtaactaaaacatagttgttgtgttatttatttgaaaaacagtttaagttttaaacaactgagtttacagaccactctgtgaacttaagattacttgcctttgaatagggaaaaattactaaatttaaaaattgaggaattttttttactgtttaattacaaggacaatcacagcttaacagaagacttcaatacagaatttgggcaactatgttaagtgtttagtctgaaatgtgttattattcctttggtttatagacatatgaggaagatcgaaaaaactactctgaagttcaaattagatgtcaacgtttggccttagaattagcagacacaaaacagttaattcagcaaggtgactaccgtcaagagaactatgataaagtcaagaggtaagtagttaaaatggctgcagtagtagttctctatttttagggtgcatcaaagtcacctgagtttttaccaacaatcagttgttaattttacttttaccttattcttctttgcacaaatgcatgcagttttggcagtttgttgggtttatattgtatttttatattggttgtttttgttttatttagatgtcactgctgtcttaaaatgtaaacagagatagaaacccagtaaaatcacacgtgtgtaaatattttttcagtgttatttgatgattatttttatgtagtggaatcaatttaaatacttaacagttttccctgaagtttttttcagctgtttcttcctgacaaaagacacacactctttcaaaaaaaaaatgacactttctgaaaatatgtttcctaatatttgctacttatagcaaataccttttttta

SEQ ID NO: 73630 - DNA, 1038 bp, Homo sapiens
ttcatcttgattaaaaggcaaaagttttgatctttggaagctcatggctagttgtgtaatctcccagttagtcattgttgttatcttccagctccccttaactgacactaaatgtattctttctatcaatttcagttccttcctactgtcctcacaactgttaagtagatgacttttccagtaccctaacttcatacttctttgagccctacatgaatattgaccttcatctcagatctacttaatttagtcatactaattttcatacccgatcttgttagccaccaaaattctgccactgaaaagtgctgttctacctccaaatcaccattctccagtcttccatcttgcttgtacaactattacactttgacttaatctgtcatatcttatcaggacctctaattctttgtcccttctactttctcctgtctgtcaacctgtgtttccttcccattccttcctatataactgagacttcaaggttcttcatttcaatgattctcttgctcgtatcccaaaccgcacttttattttgattctccacaatatatctttcacttaaaatattttatgggacatttattaacctccccaaacctcagttttctagtggataatatatgaataattacacctatctcattggattctcgtaaggaatacataaattactatatatacaaactggttagccaaccctttgacccatgcggagaagggtggtgtgacatagagatagaccatactggcacctacactggtgtatcctgctcttagatactcaaccaagccaagcaggtttatatagtgtacactttgggtccccaacttctcagatgggtccttaagattgtcagatagtccatctttaagaaagaacatagataaatcacgcatttgaaataactgaaatccatgtttaaaatttagaaatctccgagaagcaagggataatgctgtggctgaaaaggaacgagcagtgatggctgaaaaggatgctttagaaaaacacgatcagctcttagacaggtaagc

SEQ ID NO: 73631 - DNA, 1649 bp, Homo sapiens
agattcaatagaagaaaacattttctgaaataaggaatctgcaatttagaagaactcatcacattctgggtagtgggaagaggatgggaaacagcaatgttgtaaatctaagtgaagttacagaacatgaatgttaaaggaatagaattagaagtatctgcgcaaaataagtaagtcatttactaaggaaaaaataaatctaagctgcatgcagtggcatgcctatagacccaggtacttgggaggctgaggcaagagaatcgctaaagtccaggagttgaggaccagcctaggtgacatagtgggatgcccatctcaaataaataaattaattaatttggttgagctcaaggttttcttccataataatactttatttatttagcaatatttattaaccaccaagcaccattttcaggcactgtgattaagggtttgacaagatgaaaggctctctgtcttaatggaacttgtatttctgtgatgtaaatcagaaaatatacaaataacaataatttttagagagtagcagttatttgaaatatatgaaattgagtatgattcagggaggtttgcagtctgaaagatgagaaggaatcagtcatgtgaggtcccatgaaacatattacctataaggccttcctgaaaaacctactggaaattgtaacttcaccaaagaaggaaagaatcaaagaactcatggactgagatgtcagggtaaagaagaactggaagtgaacgtttagtgtaaaatgtaatcttaatgacctttgtcattttggttacaaaagattgtaatcataattgttaacaagaaattataacataaaaataatagaagtagaggcgaaatagcagaaacttgcaactaaaattagggaattgatggtaagagaaatagtgtttgtacatatataatgttctcagatttcatgaaagaatcaatagttttatgaagaaatacatgttttaatatataatttaaaactataaatggaacagactatatattttgcatactaccagagggaggaaaaagatcaatcacaggctatataacaaaggacagacagcaaagcaaacaccaaagaagtaaaaaaacagagaccataaattaagatggaagaaggctacacccatcttttctaatagcaattgtaaatgtgacaaacacaccatgtatataggaaaagaaatacagtttggattaaaaaataaaattttttccacattaataagtgactcagggccagggcgcggtggctcacgcctgtaatcccagcactttgggaggccaaggtgggcggatcacgaggtcaggagattgagaccatcctggctaacacggtgaaaccccatctctactaaaaatgaaaaaaaaaaaaaattatccaggcgtggtggtgggcacctgtagtcctagctgctgaggaggctgaggcaggagaatggcgtgaacccaggaagcggagcttgcaatgagcagagatctcgccaatgcactccagcctgggcgacagagtgagactccgtctcaaaaaaaaaaaaaaaaaagggactgaggatttttaaagatggaaaaaagacaaagtaatacagaattaaaactattctgcaataatttattaaggattgtcttaaaataattc

SEQ ID NO: 73632 - DNA, 1066 bp, Homo sapiens
gagatcacgccattacactccagcctgggcaacaagagcgaaactccatctcaaaaaatatatatatatatatatttttttaatcccaacttgcagtaaaatgtcattgcatttcaagttttttacccagaagatgttaacctgttagttaaaattccttttgggaagtagtgtgacaatagcagaatttaaaagtaaattattttcacataatttttttacatttaaaaaaagtaaggccatcaatacatgcttagagctgcacagtttttaatagagtaacctacataagtacataattttattgttgcaaattaaaataaagttgttctgataaaataatatttgtcctaatttaaaaatcatttatcaagaacagaattgatgactttgatatgttatcattatttgttatattacatagcatatttcatgcaaaaagcctttgagtccttcagaataatacatgtattattatactttttaacaagaaaacctaacatgatatgatgcaatcccttatacatttcaaaaataaatggagcaaattcaagcaaggatatactttaagaaatatgtttctacttacaaatgggctgtttaagattacatattagccctttctaatgtttttatcctccctaatttgttataacctcctttattttcacttctgccatcttttttaaaggaaaaataaagttatttcacattatacactttaatattttccagttgaaaatgaagatgaggctgaaagggttcttttttcctacggctatggtgctaatgttcccacaacagccaaaagacgactaaagcaaaggtaaaatcaatatatatttattttatttatctactcaagatgaatgtaattacatttgtgctttctgataatgtgctgagttcagtgacaaagtcctttattcttactctgcataaatattaaatttctcacaaaataaaacactaataatcatgtatttcatatatatttaaataaatttagtggtttgtagaagtgtgcataagaatttatgtagaattagattcgatgataaggacc

SEQ ID NO: 73633 - DNA, 1015 bp, Homo sapiens
cccaatcagcaatgttatacagttgaaccacattaaaattaatttctcaaaggtagctttgaaggagaaagaagttgcaaacacttgaactcaaattctgttctctaaccctaatctcctttccttccagctctcctagttctttcattcccactaaatttgtactttatttggactcattacaagtccctgtctcataaagcccttccatatttttccaatctgtcaagcccctcctcgttttacttttcttcctgcctatccttggactttgtcagccatctgagtactagaattcaccatctctctagattgctttgtggccaaatttatacagcaggcttttcttgacaatttctacctttagcatattatcttacaatctgataattagcctataaatatttaatggaagaaaggcaagagagagaaaattcttaggttttgcagtaacaatactgaaaaattcttgtggaaatctgtgtgactcgtcctgcttggaagcattatgaattcatgttattgaatatcaactaggcccttaactactgttgcccagtgtttttatttttctgtctccatcctatttcccattatctccattgcagatcacttctaatcccaaagctatcaattctattatctgtctccttttttcagtatctctccttaccctttttctcctctttagtacccccttcaaagtatgtgtgtgtatgtgtgtgtgtgaccaaatgccaaccaccactgacacacatacatacatgggggaagtggtattggcataggcaactttcaaaagttaataccctatctttgtgcttaatttattcttctctcctcccatgtcagctacactctcctcagtggtcattaatgacctctgaatggccagcattttcttctcagagcctatacaatttgatctatctgtggcatggcattatggatattctagaaattctgtcctgttttggcattacaacacaattctccctggctctcgtcctgtaac

SEQ ID NO: 73634 - DNA, 1021 bp, Homo sapiens
gataccttttgaaagtaaggcttctggcccttaactttgtttataatactaaaacctttagccgggcatggtggtgcatgcctgtggtcctggcgactcaagaggctgaagtaggaggatcacttgagtctgggaggtcgaggctgcagtgagctgtggctctgcactctagcctaggcaacagagtgagatcctgtctcaaaaaaatatatgtatatattaaaacctaatatatgtaactactttcatgaaaaaattgaactaaaataattgagactgctgctgtatattttgtgcaactaaaataattgagactgctgctgttatgttttgtgcaattgaaattagatttggtatgttttaaacagctcattctagacagaagttaactgaaattcataaatgttcttagttattccctgccaccctttccccacacacacacttgaactgttctgcactttgaaacacaaagcaacttgtcagttcagtttattcagtcagggtcagttctgtgaaaacaaagccaaggcaattgtttgatttaattgactagacaaactggttatacaggttagtagaacttagttttatttttgtccagctgcatatttgaatgttcataaagtaacttagtaaaataataagattccagtgacattgtaatatattttaaagaataattaccaaagcaaagaaaaaaaacattctaaaacccaaactatagaagctattcatggtatttttttctttatggctccactttcactataatgaaatgtgttcccccaaaaaagtagccttcttttctttcactattcatttccttctttttttttttttaatttttttttgaagattttttttcctgggctgtagttaatataactatcagaaaatttcctgtacaatttagatgaataaatgcttttacagaatagttctctatgtgcaagcagacatcctctaacagttggtcagcccccttttggcttcagtgtcctccttacccagccaacct

SEQ ID NO: 73635 - DNA, 1077 bp, Homo sapiens
ggaagaacacctcttaggaagctattccagtatttcagtgagtgaaggtggtgtcttgaactagattggtgatgatgaggtgaaacaaaaatggaccgatttgaaagctatttaagaagcataattggccgggcgtggtggctcaagcctgtaatcccagcactttcggaggccgaggcgggcagatcacaagatcaggagatcgagaccatcctggctaacacagtgaaacctgtccctactaaaaatagaaaaatttagccaggcatggtggtgggcgcctgtagttccagctactcgggaggctgaggcaggagaatggcatgaacccgggaggcgaaggttgcagtgagctgagattgtgccactgcactgcagccttggcaacgacagagcaagactctgtctcaaaaaaagaaaaaagaaaattaagaagcataatcacggtccttggtgatttgagtacattagggactgatgaagagaggagggatgagaattgatgcctaggtttttggcttgtgtctttagtggtgctacaaagaacctagaagaaagaggtttggggaagaaaagttcaagaaaatatctaagtggatatatacactagagagttggaaatgtaggttcttgtgcccaagaaagagaattcatctgttaatagaaatttgaaagtcacaacataaagatgttactttacatggaaatagagtaaatgaactagtgagactatatagagtaagaacagaaaaaggcctgtgacagaatcttaatgagtaccagcatttaagggaagggcataggaaaaagtgcttacacaaagaagagtgaagagtgaccagcatcagtgacgagcatcaggaagagagtagagtccctaaagcccagggagaaccattcataacagagccagttgtacgcagtgacgtgctctcaagaggtcaggccaaagaaagatttttaaaaaagagtcatttggatttaataagatgctaaagggccggcacggtggctcatgcctgtaatcccagcacttgaggaggctgaggcagacagatcacttgagctcaggagttc

SEQ ID NO: 73636 - DNA, 1102 bp, Homo sapiens
tttctgtcatctttttttttttttttttttttttttgagacagagtctcgctctgtcgcccaggccggactgcggactgcagtggcgcaatctcggctcactgcaagctccgcttcccgggttcacgccattctcctgcctcagcctcccgagtagctgggactacaggcgcccgccaccgcgcccggctaatttttttgtatttttagtagagacagggtttcaccttgttagccaggatggtctcgatctcctgacctcctgatccacctgcctcggcctcccaaagtgctgggattacaggcgtgagccaccgcgcccggcctctgtcatcttaaatgtattagaataagaagtagataaacctgctctgctctagtcagtacttctttctttattctgttctaggcccaaaaattttcaatgtaaggaaaacaggatgatgaaagaattcttttcagtcataagagagatgaatgaaactggggatgtttagagaagataagacttagtgaaagataagaaattcaaagtaggcacgtaaaacaggcagtaagagatttgttacacatgtctccaaagtccagaattaaaccaaaggctagatgctatgaggagacacatcctgttttgttgttctacttttttttttttttctttttgaaacgggagtgttttggttttatagttgagtaaggaaaacctagattaatacctaatgtgtcttcatttttaaagcctgggctaggtggccatatagtcagaggggatttcttaattgtatagagagactgggctaaataacttgaagatctcttccaaacctgaaattgtgtgtatcacagacattgatggaaggcatctgcattattgtataatgatagctttgaccccagaaaggccttacttaatttgaatgctgtttcacttcttagtagctaaatgaacatggttaattttcttgagccttctttttatttatttatttttatttagaatttttttattttcctttgttgtttttttttttgagaaggggtcttgctatgttgcccaggctggtctcaaactcctggactcaagcaatccacctgccttggcc

SEQ ID NO: 73637 - DNA, 1049 bp, Homo sapiens
ccaggcctaggctagaactgccagaatgaaacgaagctctagattagaatactctacattttgtcattttgagaagggagcttcctttctgcctgagaaccttagggtaaatcctgctacacaaattatcgcatccacgtacacagagattgtactcaatggtgtcattaagatgaatagccccactttgggatgccgaggcaggcagatcacttgaactcacaagtttgagaccagcctgcgcaacatggtgaaaccccatctccacaaaaatgaaagataaaaaaataaaaaaataattagccaggcatggtggtacatgcctggagttccagctgccaaggaggctgaggtgggaccattgcttgagcctgggaggcagaggtgagccaaaatcgcaccattgcactccagcctgggtgatagagccagaccttgtctcagaaaaaataaaaaaggccataaggcagaaagaaaacatgtgagctggtcctttattcataaatgggatcacacaaccaaaaactatcagaaactggaagaaaaagcatagaaggaaaaaaatagcaataaacagataaactgggggaaaaacaaattctggagcagaaaagaacttccacattgttataattaatttcttcagaaagatttggaaaagtaatatttccctaatataaaaatcagtaggccagatgcagtggctcacgcctgtaatccccacattttgagaggccaaggcaagtggattgcttgagtccagcctgggcaacatggcgaaaccccatttatacaaaaaaatacaaaaataattagccgggcatggttggtgcatgcctgtagacccagctactcaggaggctaaggtgggaggatcgcttgagcccaggaggcggaggttgtagtaagccaagattgtgccactgcactccagcctgggcgacagagcaagacctgtctccagaaaataaaaataaaaataaaaataaattgtgatattttgaagaattgcgaaagtcaaaatcatgaagtaaataaagtataagtaa

SEQ ID NO: 73638 - DNA, 1057 bp, Homo sapiens
cccccccggagttgggtgaaatagaggcgggcgtcaagtgtcagtagtcgcggggcaggtacgtgcgctcgcggttctctcgcggaggtcggcggtggcgggagcgggctccggagagcctgagagcacggtggggcggggcgggagaaagtggccgcccggaggacgttggcgtttacgtgtggaagagcggaagagttttgcttttcgtgcgcgccttcgaaaactgcctgccgctgtctgaggagtccacccgaaacctcccctcctccgccggcagccccgcgctgagctcgccgacccaagccagcgtgggcgaggtgggaagtgcgcccgacccgcgcctggagctgcgcccccgagtgcccatggctacaagggtgctgagcatgagcgcccgcctgggacccgtgccccagccgccggcgccgcaggacgagccggtgttcgcgcagctcaagccggtgctgggcgccgcgaatccggcccgcgacgcggcgctcttccccggcgaggagctgaagcacgcgcaccaccgcccgcaggcgcagcccgcgcccgcgcaggccccgcagccggcccagccgcccgccaccggcccgcggctgcctccagaggacctggtccaggtaggaagagccgctcccctcccaccgcagcactcccgggctcgggcgtgtcccgttgctgcgactcgcgggcgacaggggccgctccaggctggggcgtgcgtcggggcgcaccggagccggtgctgggtgggcagccccgccctgcacgcctggccggggccccgcgtttcgctgagagtaaatgggggggggggccgggggtgggaaggatggaggggaatctgccccggcgggtcggcctgggagaggtaagagggagggaactgggtgctcacgcgcaccttagttgtttttcttacacttgagggacgaaaccttgtaccttacgctcagttttacttaaattacgccttcgcctgtaccgctctccaatgccaaggcattggagccctcccccccatccccatcgtctcgggttaagtaga

SEQ ID NO: 73639 - DNA, 2210 bp, Homo sapiens
gaatgtagcattggcccactgagaaggacatgataaatgttttgctgatgactgtgctagggatacagcagcctccccacccacgggctccttagcagcactctaccaagggagtgattttcccctaggtaattaaagatctgttttagatagggatatgaataggaacatttcattatcatattaaccaattacaggatctgctgatgaaaatcaacatttagatcaaatattgaatgtgaaattgttttgtttcagtggatacaaggttttgcttagaacgttgtgtttaatttctcattgaactgtaaacaagaaaagacactgaaatagccaaataatatttttatattacttttgaagtatctagtcaagaaaagaaacctgtgcaatattttaaaggtttgcatcgttttttctattaaaaaaaaccacgctttttaatgtttgtgacttaaacagaattgaggtagtttggcaacatttcaatactgtactctaattgcaaacttaactgtgtaatggggcagggaatcctgcttgtacaggggtgatggtaccttgttattgcatcagaatggaatgttttaagtttgctttcttttttattcttgatttgcgtctttcacttttgggggtgattgggggagcagttttaccagttacacagagtttcataaggttttggtcaaccagttattacacaatcgacaaaataagcctgatatgtttataagcaacactgaggagtttgccctagtaccttacacagggattgggggaatttttagtaggcgccgattgttcgttcttcccgagatggtgaatcaggtggattatgcattttatatctcttcttttttagacaagatgtgaaatggagaagtatctgacacctcagcttcctccagttcctataattccagagcataaaaagtatagacgagacagtgcctcagtcgtagaccagttcttcactgacactgaagggttaccttacagtatcaacatgaacgtcttcctccctgacatcactcacctgagaactggcctctacaaatcccagagaccgtgcgtaacacacatcaagacagaacctgttgccattttcagccaccagagtgaaacgactgcccctcctccggccccgacccaggccctccctgagttcaccagtatattcagctcacaccagaccgcagctccagaggtgaacaatattttcatcaaacaagaacttcctacaccagatcttcatctttctgtccctacccagcagggccacctgtaccagctactgaatacaccggatctagatatgcccagttctacaaatcagacagcagcaatggacactcttaatgtttctatgtcagctgccatggcaggccttaacacacacacctctgctgttccgcagactgcagtgaaacaattccagggcatgcccccttgcacatacacaatgccaagtcagtttcttccacaacaggccacttactttcccccgtcaccaccaagctcagagcctggaagtccagatagacaagcagagatgctccagaatttaaccccacctccatcctatgctgctacaattgcttctaaactggcaattcacaatccaaatttacccaccaccctgccagttaactcacaaaacatccaacctgtcagatacaatagaaggagtaaccccgatttggagaaacgacgcatccactactgcgattaccctggtatgtgctcttacctggttgaagcatcaatagatgtagtgtgtgtgtgtgtgtgtctgtgtgcgcgcgcgtgtgcgtgtgtgcacgcgcgtgcccttttcaacctcatggctttaaataggaaagttgtacttgacagtaaaaaaaaaaaaaattacctttttttttttctctatcctatctctgtgctttaactttggtatgtaaaccagttagttgtctgttgcttatgttatgcatcaaaaacttggctagaatattctggaaaaagttcccttggatttttttttctttaatattaaaacagatttgaatttctaatacatattatttcgagttaggccagagttactttaaaatggcaattgaataaattgcagtttttaattctaaattaagtgccccagaaagagattaaagtagggtgggggaaaataaggtttggtggtgaagtggaggttgcaggcagct

SEQ ID NO: 73640 - DNA, 2790 bp, Homo sapiens
tcagaagccattttaagatgaaaccaggtggcatactttaaaggccccccaaatactccaaatattgtcaaatatatagatggttactatttgcgattttcttaaaagagcagccctaaagaaaagaacttatataaagtgattgtgtttttttccctcaataaatacagccttacctaaagttcagagaataagtttgctaataaaagcaatgacctagcaaaatgtattattccatcattgctatggaaaccaaagtattcaacagttcctttgaatgggttgttggattagtgtgaggacttgaatctcccgaggctagatgttactatggaaattgagttttgataaatgaagtagttatctctaactgctgcattaaaaagtaaaagcctttgaacaaaggtcagtgctgaggtagagccctaagaggaatatggttgcagacattttgtatgcatgttaggaagcattgcttgatatcccagtgataaacactacttactaaaatccgatgacaatgttgtagattccagggctttttgagaaactgcttttaaggagaaggcatcttatgtatttatctatgaaatgagcgggctgttttggcctgaggtttttgcatggagacaaactgattacataagaggaaggatccttcataggcagcccaaggtagaaatttttatagttaaacacaaatgaattaagcatgttataaaaactccaacttaaagttttcaaaatacaaatgacaagtgccaggaaaatattccatgtagaaataccaaaatgtccttttacagaatataaatggaaatataaagacatttgaactattgtttttttcacttttggaagtccttgagagataggagggaacacattttcctgggtttaaagtctcctaataaaagagcacaattgcatataacgatgtaatcaactacttattgcagggatgtagtcaaacccatatctgaatagcctttcaccccgtcagggtttagtgccctgaatgcttatacctgcgattcaggaacttgacctgccggcaaatacatttaatcgtgggttgtcttaacaatgcttgtactaataaaaacagactgaaaagaagaccgagacctggtttgggtcccttgcatcagctttttcacctgaccataaacattgtggccttcaacatctaatgaatgagaacatgtaatccagtttaataaagttttgtttgatagtctttcaaatgccttggggagggtttgtagcagacttgttcatctggctaaacctgttcttgggtaatcatagagcattgaggttgttttctcctcatttctcatttctagacaatgccttttaaaattacctgttctctcattgcatcctccccaccctgcccgcctgttgtttttaaatgaatgtatctgaagccagcaaaggtgttttttttttttctttccctttaaggcccaggtagaacagttaggacagtttttctaaattacttctcttatgtaatagctttttttggttttctttctgtcctcctcctccctctcggaccgttgatcagaggactttaaaaaccacacaacagttgatgacataaaatactctttaaatgattgtcgttttacaggcagaatgtgaagcaccctagcatttctttggaaaataattgtaattgctttaaaatgtcaagttaccttatgttttaaaaataatttaggcaatgaaaacagcctacatctgagtttaattacttcttctggatttttagattggaagtgcttctttaacttgggttgcaaattgaacctaagcaaataatagtcttaacaaaatagaactttttaagtaatctgagatgacagagtagatgatatatcagtttcttaaaccagaagtatagcattcaagtcttctaagttcatatactttgatttctttatcaggaaatcgcatataaataatacaaagttctgtcttctttgtgtgattagacaatactggaaacatttgcttctattctagggaataattatattttatttatatctgtacatacatagtatagcataaggcctgtagaagcaccccttatagatgtggatgttcgcatgtattatttgtagtatgtgtgtgtatacatttatcatgcctttggtgagaaataattatggctgcttctaggtaacaatgtcaatgagtggtgtatttccaattcaaaatatttgtacttttaacagcatttaaatgaacattgtactgaaatttgtatgcctcatgatgtctacaaggggcggaacacattgctattactctaaagttgctcccaagtatactgttttgtctttataaatcaacatgactgataaactgtctattgcaaccagtattatatgctcacataccttacttttttctttaatataatgaacatttaaaataatgtctaagtttgcaaaggtttgaggcaagttgaaatcagtaggaaaatatattgactgtatcttcaaacaaaaatttgtagaaatttaaaaagttcttaccagagaaaaagttctgaaaaagtaaaccatgaactcaacacagatgtttgaagtcctagcggttcccttcatgtgcgtggatatacacttaaccttagagaatatggaaaagctgttgggaaatcagggtacggtaacgtttctagattttttctttcttttttttcccccgtttcagctatctggaacagggcaagaaattagcatttgtacaaagaaagtctttgaacaacac

SEQ ID NO: 73641 - DNA, 3571 bp, Homo sapiens
gatttttagaagcaaatctaatatgagcctatttcagagactaaatttcgtaagtctcaaatgatgggaaaaatctaattattattgaattgcatgaaaatattttcctcttgaaataagagcccattttgagcttcaaggactcttaagttctaagagtttagattaggttgaaataatttattctactttaaaagtttggattgtttaggttcgcagaacaagatacaagattttaagttctttgaggccagaaaccaagtcttatttgagttttgcaaggcatttagtacaggttacaccttcactaataaacagtgactttaattctcatgatattttagctttatcagatattgattgagttgtcttttagtcaccaggaaggaaaccgatgtgtaaatttgctgcaataaacttttaaaacattatctaaaataactattttaagataaatattttatcagtgatttttattcttttgttagaagaatctatgtagaacattttagggaaaggccttggtatgtctattgaatgtgttcagcagagcagagaaacttcccattccattgtgataggttcagaagtcattcagaggggggaaaaaaaaggacaattttcagtttgttgctgaggatttttaaaatggcttacaaacatgttccactaacccactgaaattcacttaccctgggggaaaggagctatcgttaggtgatacctgggaattggcaatacctgaacagtgctcaggaccccacaggccccacagaggctggcactgccaggttgtgctctctgtttcagatcgtctggggttcaaggcttgctgtgagtccattaagccattccttagctgaccttcgcaagtggctttagaatctggaaatgaatttgaacaatatgtatgtgttccttaaatcgttcaaagagagtgtattagtgtttgctaatggaagatttaagtgagacattaaggaaaagtggcagaccaggattcttaatgtggagctcatcgttttgcttctaactctacggggttattgtgaggaagcgagataatgagaagtacctcgctctggagtatgtgctccatggctgctggtgcctgctcccttttccttttaccggtaatgtttctgcttaacatttttgtaaagtatgttaatgactttatcagcgtggatagtatgcatgtttaacttgaacatagttttcaaagattagagattctagcaaaatactcctgtaatttaaaaacagaatgagaaaacacatactttgagataaagtgggagcttgttttctgtgctgtacaaacttgtcacttttttctttttgcctttggaaagtttcacgttaacagcatgagaacttaaaaatacagttgatgttgaaagagcttaactaaatattttaaattggtggtattggaaagagattctgtaaaaatccaattaaacttttgaaagctctatcctgttgaaatataacttaaaggaagtcagtttggtttcccagaagtactgtgcatagtgtttctggctgaggaagaaaggcccaagtctgctgtttggccagaaattgggtaccagtttcctctacgatgttttacttgaacggtgttgacacttgaacaaatcccatagaaactgccccaagtggggggatagttgtccttacttttatggtaagacttggccccagtaactaacattccagacactggtagtattcttggctgaatactctatagatgtgcataaattgagagcaaaaccccaaatgttttagaaactttaatggctaccgtatttcaagcaatcagtaaagtaaactttaaaaaatactggtgcagtttattgcttcatagccaataaaaatagtgaacaaaaagagtctagtgtcccttgtttcttacataaactctgaaaattcagttctgctatttaattattaaattcaaaagactagaatgatttcttttaaaattgggagcactataggaatttttttccttgtctcagacatcagaaataactttttctttccattaaatgacagtaaagtatttaaccaatatgtttgtttctgtggtttatttttcacagggaacaaaaactaatagtactgtgcaaaaattttttttgtgatcaatttacatctacaaatgtgatagctatatttactactggtgttaaaatatttctatatatcagacattttatgtgattgtaagtgacagaacgtgatttatactttgttttgtaaatggcttgagtgtcttaggttaaatttctggttagaatctactatgaggggagaaaaaacttctagaattgagatgttcatttttaaagtggattgataggaaccagaaagggaattaaaacaaaaactgtctgggtcagaggcagaggagagaagagaggaagtatggcacagcaatccataccatgggaaatgtaggtgaactctcaagggaaaaaaaattgggaccactttcatgtcgtctgttttggcactttcttctttgtctgagagtcagagtggttatcatgacaacaaaaatatattaaccacaaattgtagaaatctcagttgatgaggacagggtcttttaaagtttagactgacttggttaatcctacaacttcctgaacatgatactgctaaattaggcagaaaggttgtgcagtttctgtttcgtcagaactaaacaagtgttcaaagcaactctgaggttcctccctttcagaaggaaacatttttttaagggaatttaagaggtgaaaaagtatctatataaaactcagcagtaagccagtaatactttaatatacaaatttatctcacgaattcttataaaaaattcatagaaaattataaaatcataaatgtaggaactgctagttaatgctcactgaaagaacgttttggcatttattcctactggaatatatgatctccagtaggattcttcacaaacagagaattaagactacattatgaatatttagtggttttgaaagttaaacagctggcaagctttggggagcattaggaataatatacattacaggatgggagggaggaacataccaactcaatactcaagggaagagaactgtgaaagaatggaatgggtaggttgaacaatttcagacttttagatgtatattacacatgtaagctccatgaggccaactgtttttattttgttagccattgtatcacaagtatttgggacagttcctggcctataatagatgcttggcgaattgtttatggaatgaattttgggtgtaacacatgacaaagaaaaactaaatacaagtcaacaaatgtcagtttttacagttgtttcatggtcttttttttttaccaatgtgaagttatcagtaccagactattttgcttcaatctgcaaaaggaaggtgtgtgaaggtgtgtgtgactctcaaagagtgaatgccctaatagtccattttggaggccatgttttcaagtgaactgattgatgagctgcaagcttctgtctggctaatttagaaacatctaggaccag

SEQ ID NO: 73642 - DNA, 2029 bp, Homo sapiens
aaacaaaagcaagaaaaccacaactaaaactggaaatgtatattttgtatatttgagaaaacagggaatacattgtattaataccaaagtgtttggtcattttaagaatctggaatgcttgctgtaatgtatatggctttactcaagcagatctcatctcatgacaggcagccacgtctcaacatgggtaaggggtgggggtggaggggagtgtgtgcagcgtttttacctaggcaccatcatttaatgtgacagtgttcagtaaacaaatcagttggcaggcaccagaagaagaatggattgtatgtcaagattttacttggcattgagtagtttttttcaatagtaggtaattccttagagatacagtatacctggcaattcacaaatagccattgaacaaatgtgtgggtttttaaaaattatatacatatatgagttgcctatatttgctattcaaaattttgtaaatatgcaaatcagctttataggtttattacaagttttttaggattcttttggggaagagtcataattcttttgaaaataaccatgaatacacttacagttaggatttgtggtaaggtacctctcaacattaccaaaatcatttctttagagggaaggaataatcattcaaatgaactttaaaaaagcaaatttcatgcactgattaaaataggattattttaaatacaaaaggcattttatatgaattataaactgaagagcttaaagatagttacaaaatacaaaagttcaacctcttacaataagctaaacgcaatgtcatttttaaaaagaaggacttagggtgtcgttttcacatatgacaatgttgcatttatgatgcagtttcaagtaccaaaacgttgaattgatgatgcagttttcatatatcgagatgttcgctcgtgcagtactgttggttaaatgacaatttatgtggattttgcatgtaatacacagtgagacacagtaattttatctaaattacagtgcagtttagttaatctattaatactgactcagtgtctgcctttaaatataaatgatatgttgaaaacttaaggaagcaaatgctacatatatgcaatataaaatagtaatgtgatgctgatgctgttaaccaaagggcagaataaataagcaaaatgccaaaaggggtcttaattgaaatgaaaatttaattttgtttttaaaatattgtttatctttatttattttgtggtaatatagtaagtttttttagaagacaattttcataacttgataaattatagttttgtttgttagaaaagttgctcttaaaagatgtaaatagatgacaaacgatgtaaataattttgtaagaggcttcaaaatgtttatacgtggaaacacacctacatgaaaagcagaaatcggttgctgttttgcttctttttccctcttatttttgtattgtggtcatttcctatgcaaataatggagcaaacagctgtatagttgtagaattttttgagagaatgagatgtttatatattaacgacaattttttttttggaaaataaaaagtgcctaaaagatgtatgtggtgcttttcttctttacctgcaataaagagtctgatcagggcggttagtgagaaatcaattccacacatttgtagaggagccacattgaacccgtacctacataagacggggatttattttttgagacggagtctcgctctgtcacccaggctggagtgcagtggcgcaatatcggctcactgcaacctctgcctcccaggttcaagtgattatcctgtctcagcatcccgagtggttgagattacgggcgcacgtcaccacgcctggctaatttttgtatttttagtagaggtgggctttcaccatattggccaggctggtcttgtgaactgacctcgtgatccacccacctcagcctcccaaagtgctaggattacaggcgtgagccactgcgcccagctgggggatttattttttaaattagcataaagggagtcataattcacgaatac

SEQ ID NO: 73643 - DNA, 1044 bp, Homo sapiens
caaaacccactttaatctaatagccaagtgttaaagctcctcagttactcaaaatctacttactggcagattgcaggagccttggaggaggtaaggtcttggcatttttttagtgagtcttgccctaggtccctggtttctaaatctggccaggtgtcatcattggaggaactagttaaacatctgcattcctggcaccattccagcctcggtgactcagaatttggggtgtgctgcccccagcctccaaagagtacagcaggagcctcaggaatttgaattttaacaagtgttccaggcaattctgatacctgggcagatagtccaaacatttagtgtaaattccttccagggtcggcaaagggacaagggagaaggatgagttcaaattttggcagagattgggagtgagtctgactatccgtccatgttgtctatgtatttttactcttctctttagagcctacattttcctccctgccttccacggttgacttgtagactgactctaaaggacaaggacttgctacttcattggtatcagaagcaggaatttctatgaaaatgaatagacctgaattcttttatcttacaatcctggaattgttaggaatcttaaaggtcacttagtgatcttatttagtgggacaccttagatatccaaaggacaagcaatgacatcaagattagcaactcacataattgtggtgagccacccagggcaggccttccctgaggcttccagcctgaagtctccagcactgcgagcggagagatcagaaagtcaggagtaggcctacgctgggagagaagcagggggctgcgcacaggaaaatgaagggagatcagatggtatatggagagcaaagagggagtggaagaggaatgtgggtgagaacaatcttccagtgcactcaaacacaaaggaattcacttacttactccccaaacacctgcgaattatctccttagaacctgatctgatgctaaccacaggtcttgccctcaaggagctctcaatctagtgggatagacaaataccca

SEQ ID NO: 73644 - DNA, 1611 bp, Homo sapiens
ccattgttgattgaattagttatagtaactcatatttattttagcaactagctaatataaatgcaaactcttcttatcaccagatgattgataggcacattaagaagttgttcaacaggttgcttggtttgaagaaatgtttaaatcctgatgggttacctttttatcagcaaagagtgggaattagcacagataagcccatagtaacaaaattttattttcgaagtggaatgttgtcagttctttatatttgattttgcttgaagcagtagattctatcagttcctttttatagatttaaatgtattttggaggtattgcttttctattgttgactggagaaggtatcctataaagaatattatcaagcagctgaaggtgatgaagtatctgttggcactaatctgactttccttcttctttctgttttgtttttgcataaaacgtccattttgtaaaggctttcaggcacttgaactaagttagccccacaaatgcctaacatttttttcactggtaaaagtactgttttgattcttttttttttttttttttttttttttttgggacagagtctctctgtgttgacacgctggagtgcagtggcacgatctcggctcactgcaacctccgcctcctgggtgcaagcgattctcctaccttagcctccaaattagctgggattacaggcacgtgccaccacatccagctaatttttgtattttcagtagagatgggatttcaccatgttggccaggatggatggtctcgatctcttgacctcgtaatccgcctgcctcggcctaccaaagtactgagattacaggagtgagccaccaagcccggctaattttggtatttttagtagagacggggtttcaccgtgttggccagactggttttgaactcctgacctcaggtaatctgccagcctcagcctcccaaagtgctggcttgagccactgcgcttggcttcttcttcttctcctcctcctccttcttctttttttttttaaatggaaacatgagcacaatagggtaaggtaaattgccgatggctatccaataggtgagtgacaggattaaagttcataggtcctcatccttaatctggtcattggtgcataggcccagcagggcttcttaacaactggctgtgattttcattataatatctcttcctgaggacataggtactttagtgataagcactagagaaaggtctaaatatggacatgatgggttagtcaaaagaaatgactgaaaatttcttcttgattggaaactgaataatgttcctagaaaattctgttgaagccgggtgcagtggctcacgcctgtaatcccagcacttttggaggctgaggccccgggggggatcaccttaggtcaggagttcaagaccagcctgaccaatatggtgaaactccagtctctactaaaaatacagaattagccgggcatagtggtccatgcctgtaatcccaactagttgggaggctgaggcaggagaatcgcttgaacccgggaggcagaggttgcagtgagtggagattgtgctattgcactccagcctgggcaacaagagtgaaactccatctcaaaagaaaa

SEQ ID NO: 73645 - DNA, 1973 bp, Homo sapiens
ctgggtggttgaggcaggagaatcgcttgaactcgggaggcgtatgttgcggggagccaagatctggccactgcacttcggcctggttaacagagttagactctctcaaaaaaaaaaaaaaaaaaaaaaaaatacaactcgcttagagtcacctgctagaggtttctggttatttggagatttgctggctctgccatggacatgatggcatattcgtggatgatatggagagtgacaaaatggctgagtgtctaattattaatcaaatcacagattcatatctctctccccctcctccactagtttccttggagacacagttttttgtcaattttttgaattgcattaatattaactatgactttgaatcaggaagaatgcaaaatatctgaagagtagtatttatatcttccacgtgacatttgcatcacatggataaactttaaaaatgttcttgagaacacgggaaaataaggaaatagagttcaaaaataaagtatagaacttgttagactagtttctgtttaaaactcggtggattatacctctttgttttaaaccattagaacagcaatgattaaatatcagattccttaaagagtcaccagttccttttggaaagttttgattaaagcattgtatttattaaactgttctacccacacatctttccttcaagatgttgtttttcccacgtctactgttttattacatgacagttattgaaaggttagatgtggtttaatttctcaaggtttatttttatatgtcataaatcaagctttgtttttttaatactttacaagaagcagtgtggtctgttcaaagggggtgccgggagacctgggttctatttctgactatgacatgtgactgggtaagtcgatgaattcatcagtgtctcagtctcccttgccatgtaatggggataataatatctcccttttacctacttcacagtttttttttaaaggattaattagttgatgtttgcaagtcactctgagctcctttgataaaatacaaagcaccattatttatgacaataataatagtgtctcgaccagtacgtttcctttcatccaaggatggcaaagtactttaccactgggattgcagctttacagcagattactgtgtggtggctggctctccctgaagaaacagatggtaatgagcagtctggttttcactagagagtaattaagtctcccaccaactcattgaatcatttgcataaacttcccaagacagaagtgcagctcccgaaagagctgggagaagctgaattgggctctcatccctcattactatttataaacaagtcacaggggatgtggatcttggaatatcaatattttcaacccttaaatcgatatgctgaaaggttgctaaagcatgggaatatttagacaacaggtaaattaggttcaacaaaaacatacatgtaagaagcgtgggttacctgagggtatttcaagttgtgtagaccaattacgtacaagtcctgtgatctctccttggcagtctggttagactaactttcagttaattgacaaagacgaattaagtgcctgactcgtgtgcctgtctcgggttattaagaagaaaagtgtgcgatgtggtccctgccctcaagttgtttacaacgtatttgagaagatgaaactaagatacaggaaacaattagtggagtatggaagacagcatataattaagggctaaattgtgtggaacagaccacaggacgttgaaagaaggaagtggtctgtatggaccagtgtagttcaggaatgcttcaccaaacacgtgaattaaagaagcacattttccatgtactccataaatatatagacctactatatacccacaaacattcaaatttttgtttgaatgaatatatctatatagaatatctatatagaatatctatatagaatatatagaatatctatatagaatatctatataga

SEQ ID NO: 73646 - DNA, 1036 bp, Homo sapiens
gatgtaattagattactttgtttctactttcaatctctcttttttcttttccttctttttattgtattttatttttatttatttatttattttttttgagacttagtttcactcctgtttccaggctggagtgcaatgacgtgatctcggctcattgcagttcaagcaattcacctgcctcctgagttcaagcgatttgcctgcctcagcctcccaagtagctgggattacaggcatataccactacgcccggctaattctgtacttttagtagagacagggtttcactgtgttggtcaggctagtctcgaactcctgacctcaggtgatctgcccgcctcggcctcccaaagtgctaggattacaggtgtgagccatcgcacccagcctcttttttcttttatattctctctctctccccactgccccaccccctgaggtggtgacaaggtggaagaccttaaatggccaaattagacaagatggaaataccgtcctggcttagttcgctgtaacttccctatatgactccactgtgcagccaggacctagaaatacctgtcctgttactaacctatcatttaaatggtttagtgtgatttaatcattcattctctcccaacagcttaacatgcagtcactatcgtggtttcttatcaatatgggacaccaatgaatgcttttgaattcccagtgttttgggaaactcttggcattgcgtccagctgcctgaggattgactctacggtctgcattctttttttttttttttttttttttttttttttttttttttttgagacagagtctcactctgtcacccaggctggagtgcagtggcgcgatcttggctcaccgcaagctccacctcccgagttcacgccattctcctgcctcagcctcccgcatagctgggactacaggcgcctgccacgaggcctggctaattttttgtattttcagtagagacaggggtttcaccatgttggccaggatggtcttgatctcctgacgtcgtgatccgcccacctcggcc

SEQ ID NO: 73647 - DNA, 1022 bp, Homo sapiens
acaattcacatgattcaacatattacccgtatctctagatctctctgatcctttaaaccctttctactgattatcaatgaaagtcctcaagggtttgaggtcctggctgttttcctttcaagtatattcagaatcagcagcttcttgaatttcagaatataattttagggctgcaagagcaattcagcacccaagttttgaaatgtgatgccaacttctagtcattgtccgtcctttctccttttcttccttgcccctgtattcccgctgtctgaactctcccatgacatcaaaagtagccctgctttgaggggacaaaaactgtactcatgggacattccattttagtatttcaaatttaaatttattaggaccatatttcattttctatttttcctagagcccagcccattattgaattacaacaaatggaaaaaaatgctgagaataaactagttaaatgttatactaagaaatgcacagagaaggttgaaaaattgttatgattgtggcctctgctttgtctaaagttattttattgttataacaaagtattgcttagttttactctttttttaaaacacagaatttatgttatatggagtacaatcaatcaaaaaccccaataattgactacatttaggaattaatgttactttttacttttatgtaaaaaaagcatttcttaggttcatactttaaaaagacaaacagatttagataaatatattctggctaggccgggcgcggtggctcacgcctgtaatcccagcactttgggaggccggggcgggcggatcacgaggtcaggagatcgagaccatcccggctaaaacggtgaaaccccgtctctactaaaaatacaaaaaaattagccgggcgtagtggcgggcgcctgtagtcccagctacttgggaggctgaggcaggagaatggcgtgaacccgggaggcggagcttgcagtgagccgagatcccgccactgcactccagcctgggcgacagagcgagactccgtctcaa

SEQ ID NO: 73648 - DNA, 1018 bp, Homo sapiens
agagtttcagtcttgtcacccaggctggagtgcaatggtgcaatctcagctcactgcaacctctggctcactgcaacttccacctcccgggttcaagtgattctcctgcctcagcctcccaagtagctggaattacaggcgcctgccaccatgcctagctaatttttatatttttagtagagacggggcttcaccatgttggccaggctggtctcagactcctgacctcaagtgatctgcccatctcagcctcccaaagtgctgggattacaggcgtgagccaccacaactggcttctcggagggtgtgtgcgagtgacaattgagcccatctctattttttaacgtcccttccctgcgtgttattgtggcaggtgctgggaatatggagaattgcgttcttgtcccagtcatgtatccaacaatttatgtgactctgtggtcaggagactactttgtagtccacgtattttccatctcttaaataggggtaaattccttgtccatctgtctcttccagggtcacttcttcatgctaatctttggaagtattacaaagaaagtatcttaagcatgaatttcagcccatgtttttgtgttcctgttcttggaccattggttggtttctttggagacagcttctgactgttatgccaattgttacaaagtcatggatatcaaattacaacctatagttaatattcagcattattagaatattttaaagcaaaattcaccaaatacagagcttgtggagagaatatgtgacattgtctttcttcctgtagttcttcaacaaaatctggttttatgggggtaagatgtaatttatagccaatgatggttttctgtactgcagttaacagctatcagaagaaaaattctctagttttaaagaacttaaatttgaatgatgatgataagtgaataaatataagaaatatacttctaaagtaataaagaaatttatataaataccatccagtttgtaatagcagcagtggaaaaaaatcacagaa

SEQ ID NO: 73649 - DNA, 1046 bp, Homo sapiens
cttgggaggctaaggcaggagaatcacttgaactctggaaaaaaaaaagaaactcccaaattgcttgaacctggggggcagatgatcgagtgagcggagatcatgccactgcactccagcctgggcaacagagcaagactcagcctcaaaaaaaaaaaaaagaaaaggaatgtgatcctggttggtacaactttagtttctgctttccaactgcttcagttttcttcatgcaattatttttcatttttcatgtaaaaaataactaaaaatactttttgtaaaaatttaacttacaaaaaatatatgacacctatggaattgcctcctaaaattcactctctgccctgtacctcaaatgctactttcctcaccagaagtaaccactgataatactttgttctacattcctgatctattttctattttctctctgtgtaagtacaaacaattctatcttttgaatttcatatatgggattatatcacacatattttttctataacttaatgctttcacttgtttttttccataacagtgtacagaaatccagctaatccctttttttttttttgagacagggtctctcactatttgttgcccagactggagtgcagtggcatgaccttggctcactgcagcctcaaccttccaagctcgggcaatcctcctgccttagcctcgcaagtagctgggactacaggcatgcaccactacactcatgtattttttgtagacatggggtctttctttgttgcccaggctgctgctcattcattttaaatgctgcaaattaagtaatcaataaaatactatctactgcacttttttttggttttatcatatctctattaataaatcatttagaaactcctccaagatttcagctacaaaatatgttatcatgaactttcttatacatgcttcttcaattgctttcttttcttctagtgaattgccttaggagactcgttcttcgtatttggggtcttgggtattgactgcaaagattgaaatatgaaatgtggaggtgctacttttgacttttc

SEQ ID NO: 73650 - DNA, 1060 bp, Homo sapiens
atgttagatgagtatttaatgactttagttattattattattattatttttagagacagggtctcactgtcactcaggctggagtgcagtggtgggatcatagctcactacaacttcaaacttctggactcaagcaatcctctcgcctcagcctctcaagtagctaggactataggtgcttgtcaccacacccagacaatttttattttttatagagacagggtcttcctatgttgcttgggctgctctcaaactcctgggctcaagcaatcctcccaccttggcctcccaaaatgttggaattacaggtgtgagccaccacactcagctgaccttagtctttaaatacttattaaaccactattatttccagacattctttcaatctctgactgtctgatgctcttccttgacagatttggttctgcggttgggatgggtggagtcagtgggaaaatgccagaaactgtgtcctaaggcagtgagtgccaggtcagggccagtgtaaacaatataaaagcaggtcagagatccaaataagattggatgaatctaggaagctaaggcatgaagccaactgggttggtgtctgtgtttttgaagaggctggtggaaaggaaatcttagacttaatctcaggtccatgagagacatctgtggcagttttttattcactttaagatgctcacagtgtcatagtccctgggatacaaagatgaataggagctcatggttttgtgggaaaacagataggttaaaaaaaaaaaaacttacactttgatgtaagaagagacataataaagcaaacgtatacaacatttgcttggaataaattgtgatgactttggaaaaattctggttatggaagtttttgtttgttttttaaaagagaacacctcgaatttggcatttcagctcctcagatgtcctcaggacaaataacaccctttgatacatagaaaaaagttggatggttctattattccaaaaggatccacatcacaacttttttccagggctcatagggcctgctactctgctactctgtggaaatcttttc

SEQ ID NO: 73651 - DNA, 1091 bp, Homo sapiens
tttttctccaaatattgaatgtgaaatatcatttcaacatactctggaatccgaactagcaaacgaaggcagcctgaccaagaatgctgtgctcctgtgccgccaggcctccttcctcctggttccgattactaatactgtcccaaagtaaacagaaacttgaccctccattaacttgctgtagactgcctacaataacatttcccctaatggtactagggggaaatcgacgactcccgaaagatatttgcacattgctggagtttcttgaccttaagatatctttttggaagcatttaaagaactaaggaaagaaactgccctttaagtagaccttgtgacagaagtaggtgggaaaataatgacactgcataccaaaccttacctttgcacaggataactccctgacaaatgctatggcaaacatgctgtaagaataccatcatattcattcacctcttttgtgataagaaaggctatggatttgatatcttgaaaacctttgttttgcagggtttgctttagcagctcgcctcttactcaccatgtatagagactgaattactttggaatccgttttcatttagtgacttgaggtagagcattcagtgtattttgtgttagaaaccacaggtgggacctgtttctgtaaatgatttatttccagggatctgttcctttaattgatttcatatttacttaagaaagttctttctttgcttgccttgtcgtcccccactgagagcttttgtaaagtgcgtggctgtcataaataggctgcttccttcccagcccagtcatttctctgaggtttacctgtctttcttttattctttttttttttttttttgagacggaatctcgttctgtcgtccaggctggagtgcagtggtgcgatctcggctcattgcaacctctgcctcttgggttcaagtaattctcctacctcagcctcttgagtagttggaattacaggtgtgcaccaccaagcctggctaatttttgtatttttagtggaaacgggcttcaccatgttgtccaggctggtctcagactcctgatcgtgagtgatacacctgccttggcctccc

SEQ ID NO: 73652 - DNA, 1036 bp, Homo sapiens
attctctaacttgaccatgttaactggaaatactccagagtgttaataattttaaaatgtagattccagaaaaggaatgactttcctgatctatagtattaattctagagaacttgagatatttgtaccatttattaggctcacacactgtagaatttatataatttttttttaatcaaggaggaaggagggagagtttccacaatttcctctgtttctgtggttttgcatgtaaactagatgattagttcctgataagcagggactctgagctgcaaatctctatgtccttcaaagaaggctctggacctaataggcctgccatcatttgattttgaaaaatcaatctcagataatgaacattgctgactctagtgttcacttttctgctcttacattatttgatttcttggcaatgttgacactgttgaccactttcttcttctggaaatgcttcatttggttttcctgagaatctactctacttcttagtctttttttgtgatttttctttagtgttggttttctttgtgattcattctaatgctgttgttttttgttttttttttactcaactcactcccttgacatccatttctatgccttcaataaaatctagttacaaatgatatctttctcttgagaactagaccagtgtaggccttctccacttgaatgaccaaaggcattaaaatacacaatatgttcaaaagcttgaattcattacattcattttgtttttttttcaggatcatattttcttctgtattcgtcactacccactgaggaattcaagctggaaatctgggcatcatcctcaccctctgtctctatttcccaccatccctttcaattaataattatggtcaatcaattctgcttcctaaacattctatgggtctattcacttctcttcatcctcattgctacttccctattctggataccatcttgggcgtggattactgtaatactcctacaatcagattttagaagtctggggatgcttaatagctaaattcctttcatggggaaa

SEQ ID NO: 73653 - DNA, 1035 bp, Homo sapiens
tagattttcccacactgtggcaaatgttgacgagagggtggcaccttctgattgcctatgaaaaatgccacccagatggggaggcctgtggtttgctggcctgcttcgtccagtccgtgacagagtggtgtagctattactaccagacaggataaatcctggacagtgctctctgggcactgttgacatttgcctcgatgattcttctttcttccctttaagacggaccagtgtcttattctatgtctccttctgatatgctaaaaaccttcaatccaggccgaggtcaagtgctttctaaaaacttcctttgtaaggttcctctcttaggcagatactacatatgaaataataactaccagcagtagccaaaagaccctgtgctatattatttttatcatctcttcctcactataaaatatttgagaaatgtaattttacttttgaggcatttaaatgaggaaactgacataatttaagtgatttttctaaagccacactgcttagcaaatctggaccttaaactgacgaagccatcaaggcaatgttaggagtctagttatggctgatgtggcatacaattcatcacatttttaccagctccgtaattagaaactgggtggttatgcgtggtttactgtggtagagattgatgatggttcagttaaggatcaaagaaaaatcatttcccagttctctatccattcatattgttgtggttttttttttttttttcaaatcttcctaattttcctttttttttttttcttctttcccggagtgagtgcaagccaagaaacctttggagtgtgactttggggccaggcagtgtttcggtgccacataatgatatagtagtgcatcatcagttgctagatctgggtctccttgggtgatggagtgttcttcctggaagcctagggcaggggaaggagcccggggtcatgaacaaacctgttggtgttctatcaaattagtacaaaacttttaaaagttcttttattttttcctttcttcctatatattgaaaatatt

SEQ ID NO: 73654 - DNA, 1004 bp, Homo sapiens
gcagctccggcaatcacaaccatgactcaagaagaaaaaagaggaagagcggcatgagcgaagaggatctgctgattaaggcagtctcctttatagagtgtcccctgacgtgccaccacatcacatgcctgtctgggaaagggctaagaaaggtagttttctggactgggcacctgccttcctttcccagtggttctgctagtaaggaaataagggtaatgctaatcagataagatttagaagtctttatcataatgcagtaggaaggaaagcagtagattaacagtactgaaggcaaaccttgcttattttattttagcaaggatcaaaattttcagaagccaaaatgtaaatgttgcctttttgttaagataatttagctctggacactactaatcaatactacaacatgacactgcttcgagggctggctgggttatcaaggcaacaattagagaaaattcagattactgaagaattaaatgttgatactcactgatctcataattctatagagctatacttctagcaagaaggttactatcattattactattttggatggtgtttgagagtcaggagatgaatgtggagctgcctcattttctttaaagcaatttttcagaggtcacttaaatagctaaatccgcctccctatatcccactatgatagggacaaaaggctccaggggccccagcatttgagaacttgtagtcactagaacttttctaattgatgtccatgggtaataaatgactttgtgcagttggttgtggtatttatgctttaaggaaaagtaaacctctgatatctatcttgcagctctttgtctactgacaaccattgatctcttctcaaaaacttccagtgacacacacatgtccctcatctccacctatcatacacaaatgggatttaagaaacaaggtcactcctaaaaaaggatgttaaaaaaagcaaaaaaaaaaagcaaaaaaaaaaaaatcctttgttaactctaaac

SEQ ID NO: 73655 - DNA, 1073 bp, Homo sapiens
cataatcatctggagcccgcagcctgcctctttcatctttgagtccccttaagatgagccttgtacttagtaggaactcagtgactgtgtgttgaaagcacagagggcctggaaaccgcagtggcaggcatataaatcacatagaattaaggttcattttcttgagggttgttgaatgacggaataatttactgagggaatgttatctcctctagaggtcttaaaaaaatctcctcatcaatttgaaatgatttaaatatgatcttgcgtgtggccagaggaagtgagcagctgagctctcaggattctgtccagagcccagagctctgatctgtgatgaaaaacatcagcttcgacttctctctctttcattctttctcttcctccacttcccggtcaaccatgtttgaatccaactgacagtgataaatgaacagtaggattcttgcattttgtactttcatgaaagtctctgagtacctgaaagagagatctgggcttggggttattcaccagaacagggtccagccgttatctgaggcggtggcaggtctctgtttcttctgctatgatgactgggcacttaggagcaaatcagatggcagcactgcctccttcatctggcctgaaaaaaactgaggctgttcaaaatgtgaatgttttttggatatgcggttttctggaaatcttccaaatagggactctaaccttagcatgaatgttttttgttttttgtttttaaaggcatctgagattttgccaataattcttggacatagcccttcatgccacccatcatatgcagaggccagggggaagctttcccccttttctgctctgaatccatggcactcagtgaaaataaagggatttttgacaagggaattacattctcccatttgacagtgaaatcgtgtttctttacttaaaaggaactttgcctctgaggtctaattttcaaacagttttggaatgagatgtttaggactattaaaaatgcatctttatttttgatttctcattttgtttgggctccagaggttcctagtttgcttattatgattagctttcat

SEQ ID NO: 73656 - DNA, 1047 bp, Homo sapiens
ctacagtgctggagatctttgtttttgttagggagtgggttttctctctctccctttttttaatttgtcttccattagaaaagtattttttgattgcttgcacggtttattttgtggaaataagactctattgttctatcaggggaaaaaaacatccaccgcaataaccatttagcacaaggagaaggaagaaaggtattttggagaaaaataattcctttcccatatttctcttaagttgtatatcttggaactagttttccattataagaaacttctcttttgtttatgaaaaaaaaaaaacctctaagaagtcaaaacccataggatttgttctttttcctagctaattttcaagcaagatgcaaaactgccattaagcatctctgttccttgtccagtccaatttaaaaatatttttttagaagttacaaaagatttcaaaaacatgttaaaggactcttcttaaaaagttgactccccttgggaacttgaaaatcagctttttaaaaagtgcttctgagctgtctctgaaatttcttcttgaatagcattatactgtcttcctagcaaggagtggtttgatctagctttccaacagtgtgatgatggaggtatgagctagtcagacagtgtacccaatttgggggttttattcacagctttcattttagttcaccatatagattgtggagttagattcttctaatggagattgtttaattttctccatctagaaatattttcactgaggcacatttaacaattttcttgtatatatctcaggtgtgttagtgtttttcctccgcaaatggatgataaatttcacatagctggaggaccctcaataatattctttggaatttcccttagtgcttggtccctttgtagctgctccataaatactatagtagtccatttattggttgattatctgttagtgcaatctgtaatccattagaaaattagaaagaagggtgaggctgtccatactcaactcagctaatgaggaagaatttctaaagcaaaatatccatgtatttctct

SEQ ID NO: 73657 - DNA, 1049 bp, Homo sapiens
taaagcacccggactctccagttagaacagagcaggatcaaatcctgcctttgtacttggtgtaggactttggttatcacccatctatgaaacaggaataaattataggactttcctcttaaataaaagcatggaaatcaaggacttagcatgtgtgtctggctagtcagtgctcagtacatggtagttattgtgagtgtctgttggtcttcctgcctctctatctcttcctcccacaattttagtaaagtggtcttcctcctacaaggagtcaatcagtcccctgcactcttcagacatctgcagtcattgctagtcctgatggtccaggcttttcaatgcactcaaagactttcctacaaaacagaggaaccccagttccttatgctcaagtctccatgtctgtgtcctgcatcccagtcccacaggacattttgtgctgtcgaatccactcttgtacttccgggcctttgctcacgctctgtctggaatgcctctttctttctctgtcccttgttaaaattctactcatccctcgaggtcttgttcaaatgccacatctttcgggaaatatttttgtctaaatgtgttttgaaatcttccttggccatctagttagaattgattcctccattggccacagtctcacagcactttgcttgtaccttgggttcaactagacctattgtattttgcaaaagagttagttgctcaaatctatgtccttcctggccttctaaacaacttcagggaaggaactgtgacttcgtaaaatcaatatccacacagtgctttgctcctaatatgtgatctgtgttttacaattgaattaaaactggatatgaaatagatggcttttaaatatctgtgagtgagctgcgtccattggtctgggcagatctgttacagagcttagtaagtgagtgtggctctggcaacataacagtatagtaaagggaaaggcacaggactttccaatctctttgacagcagcctagacctcacttattccaaacccttgatgagatagcagatgggatgtgagctaa

SEQ ID NO: 73658 - DNA, 1084 bp, Homo sapiens
ccaattaagtgtcaaaggaaagctgctgggttccttaatctcactgaagtcaagtcttctgactgggcttcttaccatgtgttgtctgaaaaaactaaagtaccttgaaaggttacacattcagcaaaccatgaagataatagctattctttattaaacactgtgtgccaagcaatagactaggcaatttttagatacgttacctgcaacctgtacaacatttctacactttatggatgggaaacggagacatgggaagtgtggctgagttgttcatggatgtagaaatagtaaacggcagagtaggaaagtgaaaccgcctatctctgacctggaggtctgcctgtatctttcccactccaccacactgcacgtgggtgtcccgaaaccaccttcccagattcctgactctcagtaattttattatggacaacatgcatgagtagtcatcatatttttcaagtgaaatatcgggacatgatataacacatgacttaacaatggtactgaatatttgaaatcaggcctttcccggaaaatcatgcatgaaggatcattataaacaaacaatagcaaccagttgtctccccgaacttgtcacttttctcataaatgtctggcctggagctccaaaatcatccaaatacttagtagcattttagcctgagtacactttctcagttcctcaactctttgtatacctttccaccaatatagacattctagaatctgcttcagatgcatttgaaattttcacccccatggaactagtgattaatatcagagcccactcttgcagttggtaatggggtggcaatcaaacgttcagatgatgataaaggagagataatggataattctttttcagagttctcacttaacagctctgttgtggaatgttttaaatagtcttataaataatttgtttatagtattgttgttagtttaattgaattttatgtaagaagctgtccaacatcagagaaatgaaattcctcccactttctgtgtagaacaaggtctctgacagtattgattcatggaagtactaatggacttagaaaacattaagagaatgtcattt

SEQ ID NO: 73659 - DNA, 1079 bp, Homo sapiens
aagatattttactgtattcgtaacatatgtgatagtggaaaaagtattttcaaactcacaaattttacagaggttgtaaatagtttgatgaagtatgttgggaaagagagcttctagttttcatcacaataaaaagaaaaaacttgttcagatatgccttgtatatcttacacacaatgagtgaaattgccatgggaactctgtccaactttgtcagagcatgctcttcgtgttctgttcaaaatagagtggccacttgtcatggtttagccaggatggtttaaaatataatgaagtcattttaagttgcagacaactgattccaaactagtaatgtcttttcctgaaaagggcaaaacagctgcacaggattttgcttgtactaaagaggagcatcttacaattgttctcttttctcagttatctccctcctcaacagagtgtgaacaaccatacaggtgtttattcttgttttattccagggagactgcttttaggtataactacatgttgacaagattaagtgctgtggatatggccacgtgttaaaggaatctatactcgcaataggaataagctaatgcccattttcagaaataaattaaatgctgaaagtgcctgtcagtaaaccttatgaccaatgagatattcctatacttttacacagcaataattcttaataagactgggttttttcctgcacatgtgaacacacacacacatacacacagagagagtaaatacatacacatagtaaatcaaatctgttcacatgcccacaaaaaacgcttttatagctttcaaatatacctaatcttgtttacattaacatttcttaatttgatctttctaacttgcagaacgttaagaacacaaatctgaacattaagtttatcttcagtgaacactattgcatatggtaattataatttccagataaaaagttgactgtcatttgccccaaacttatgaaacagtatgtatgattcaaaaagttttgctcagttaaaaacaccaatttatttggcgcaaaagactgaaggatatttgtttgcttgttcattttatccactcatatc

SEQ ID NO: 73660 - DNA, 1046 bp, Homo sapiens
ccaataggttcttctataccgatttcattttctaaactgtatcaggacccaggtgtcctgcattggcatctgcagggatattgaacccactcatcctgtgcagaggatgagaggaaggtgttagttccatcagccccataaaattatgaacctttttgcaactaggaacatatacagtaaacaagcaatacatcaccaacgagcattctttcagaaaaattaccatatttttgtccccaccacaagctgggtttttttccagctttctgtggctgaggggctggtgagattttttgttgttattgttgttgttgctagaattttttatagcttagatataaaaggtctccaacaaagacctttgcaatatattttaattacaaacacttgattttgggaattgcacatattaacctcacaatattactagctcatttttaaatgtctggacattctgaaataatttccggttacagaattaccctttttaggatcatcttctaattcagataatcttattctgatgaagcgagaactatgaacgttgaaacaaggacaatttgtgttggatggtattcaaaaggaattttttaaaacattaagcaacagtgtaatgattttcaggtcaaattatggcttcacaaatatgtgctctatattgtctgccaggtctcaaaaattcatcaagcaatttccctccaacaagggctgcagttctagtgataaatagcatctttagctgcacagtctactactcatcaaccagtgggttttttttagcacctggaaagtttttttgtactatatgcaactcctacttcacattgcctgtgaccattcagaatagaaaaaggtctgttgatgcatgccagtgctggttactagtcagtgacagagaacacagagagggacaaacacagccatgaaccccctggcactagtaccagcacctagttggcaagtagtgggtgcatctctcaagtgaagtgtagatttgtatttagtcctgcttgctctcataaaaagagccagttcttttctctgct

SEQ ID NO: 73661 - DNA, 1042 bp, Homo sapiens
ttaatgatggctttgcttggaagtagtgtgttccctatcactgaaagtgttgaggcacaggctggaaatacaggacagaatcattattctgaggttgcacatactttttcaagtctaagaaataattattctatattcattttcttgatttgggcccattattctaataaattgaaatgacttgaaagttctccctacccactttgctttcattatttttgctgtctgtttcagcttcttcatctgtgccaggtaattgatgaatgtattgaatgggatgcgttcaaggaaaaaaccctaagacatgatccgagaggcctccattcagataggtcttaattctttaaacagtagccagaatccacctagctctcctgtttccagctcacatttctctgcctcacagttaaatctaaatgtccttgtgaaatacctgcccaaaaccaagatatgtcaaatccattcatccacttagcagagagatagttactatgtgcagtcatggcttccttgaactattatcagtcaaataacattatttttagaaagaaaaaaagtgaaatttggttgatttttctgtaactagttcaaaatgagcccatcctgacttctgatttataattatgtataagattttgtaacagtgttcaaaatgaaatcaaaactatttctatagggaatcaggttggtttgcatgctcttagtaaacatcttcttagccttacctttgcttcaggcatattgagtaagttacttgtgtgtgaccaacaattaatttggaatttgggattataccagttgacttacgagagccatgcacgctatgggaggggagtaagtatcagtgagaaacttgctttgagaaagttaattttgcctttaatgcttcatctttttgtaccatataagtacctgatcagtcatctttttatttacaacttagtaacttaaacatatttgtaggtatttgaaagaggtacattttctagatattagcaaagaatttagaatagaaaaagaaatgctgaggagtgcctttcta

SEQ ID NO: 73662 - DNA, 1014 bp, Homo sapiens
agacttccctgcagtccccccacccatcagcctcttcttcctctctgatccaatgccaccatatggagcatagcatcacttttatcatgatttactgtatttgttggcccgtgtgtaatgttctttccaccttctcctcaagcctgaggccctccagtatgaaggctgtccttgcctggctccaagcacagcacatgtggcagcaggttcaaggcatattgatcagtgaaatgaagacatctcttccactatcctcatctattggtaggaaaactgaagcccggagtttgaatgattttgtccaaatttgcacaggagctaggattagaacttagaacttctgccgcctgactttggtggttccctttccacattttgatggctgtttcccattccttagtcaatattttcagaaaagtagaaatactcaaattcagaggatagcaagacatattttcacattacagacatctttaaacattggttacatcatttctgccctttctctgtttatcgttgttatgcctgacaaaatgtttgaagaataatggtgactactgacctgaatttcagaagctaagattttagacctgttctgtcactctctaattatgtgatctggggcaagattgagtcccttatgcctgatcttgcctgtttctttccacagggattatgtgaaaataaatggagatgagtatgtaggaaagagctttatgtcacagaaggcaggatgctacaaaatacctctgcagtattgtcactgttcacttttcttttaaatataaccacttttattcatgctttagaaagaaaaaaccaactttcataagtttcctttctcttcttctttcgacaatccatatagtattataaaagattgggattctaattcttacctccacctgatttttacgtttttggccttccctctgatccacttgatcctgaatttaattatcaggcttacattaacaccctgtctctttgcttgctctgcctagcagttcttca

SEQ ID NO: 73663 - DNA, 1035 bp, Homo sapiens
aatttttctcagttgaccaccagatcttcataaagtttcttagtaatttccctgaaactagctatttattacatttcttggcatagtacaagatttgcctaaggtaagaccagtatcctaataatacatttctttaaattagttttaagagagcaatagatagcgtgcaacgtatttataaaaaagatttaaaccaactcagaatcacacaggttttgtcacagctgttttacataagccctcagctaactaatagctaaggggctgaggaccctgctgaaatccactgtctacttgtggctgttatctctgtctaaatattcatttagtttagtcccttttatcagatgaagttctttttttgtgtaaatttatgagatacaagtgtaattttgttacatgcataggattgtgtaggtgaagtcagggcttttagagtatccatcacccaaataatgtatgctgtatagatggggttcttttgttggaagtaatggaaactaactgaatatggctgccttaagcaaaaggtgatttttcaggacataaggtaggttatatggagacaaaagtaaagaagaggatctgggcctcaggaaacacaggagccaggacagcacccagggtccagggagcaagatttaatcagcaggtacaggcctgggaggggtcagctctagttcctctgtgtcacctcctcaataatcacaatagaggaagctagagtatgattggtcctgggttaggtgcccagcccttggttacaatcctacaaagatgagatgaggtgggagtagtttcccaaaggaaaagtgttagtaccaaaaaatgatgggaaagactactctttataaattagaaccatcaatttgccctacctttaaattacctgaaagctctcgtaagggtagtagcttttccatgacaagctttaacgctttccataaggtcgtaatgccttacgttttagaaagtgaaagcactctatcattagttactaggtcctttctccttggtcttactcttagttatcga

SEQ ID NO: 73664 - DNA, 1042 bp, Homo sapiens
aaaggaaggaacaaggctgtcagaaaatccatcccaaagaagaaagcttttgagcaaagacctagaattagtaagaaaagcagagttgagctagtgtttcctttatagattgatgcacgcatagaaagacctggagatatttccaaattgactctagtaggagcatacatggatttaatacgtgtacgttatttggtcataagctagctaagatttctatgatatatactaccttgaatcttccttaggtaaatactgtgagtctagtatatggaaataaatcacctggctaggaagaagccccatgaatcacccagcctgtacttctagtaaagtgataaacacttgttatttcttagtgaaatattggccctgaaaattcagaaagtttaaagactcacgctggcaatgaagaggaagggaaagtgatagttgctgtcccccatctatcaactgggtaatttgtaggattacatgtcaagttcaacactagcttggctctggcttgggttcaacccgcaaacactgtatttgagaattaggaacagtgatttttgtgaaggtagcttagcaaataccccaatcaattaaaaaattgtgttcatcaaataagtaattaaagttcaggaaaagaagaaaagcctccaacttaacactattaaggtatgtataggtaaggtatgaaaatcagtaggttgggaaagcctatggctgttgttgagttcccaaaccagtgtttattattgagttaagatggtttaaacttttaactagcatttttctttgcatgatattgttacgagaggcagcatctgctggccttgttcatctgggaacatttcctctggagctgaagaaaaagaatatctgtataaggcaaacaaaatccactggaattgaaagtgtggtaatattgtacatacccagggaggaaacgagagtgccagggcctaagaggcccaacgacatatgttggagtggattcaggcttgctataactgcctgctaactccaagggattaaagaatggcaataagaactt

SEQ ID NO: 73665 - DNA, 1049 bp, Homo sapiens
tctgttttggaatgattttcacttattaaacaactacagagaactgggtttcttacaaaccttggttctaactggactttaagaccagttttatatccccattttttttcttgtaaataagagcaatgtatgaagcataaagggtgaaggtaatacaagctaagactgcttggatctcacaaatcctggctaaagacagaccataacaggaagctggcagccggaagtagggcgtattgttttgccggttagtgacccacaaagaggcggaggtttactagctaggctttgattagaagataacagcagttcccggaagctttaagctgtttccagtggataagtccaatcctggaagcttggaaagcaatatattcttcacttctcctttatctggctaaaattttgaattgactttactttcttcaaagtccagtgtagcacatcacttccagaatgtactcctcctaggagtacctgttcacccttccttccttccctgtgcctgcagattctgtcacagcacatttgaataacgttgtttgcttcctagagttttaaatgtggtagagtgaaggagagggcacttagacacctctttgtgcccaccctcatgggaacaggtacaaagagggctcactgaactcaggcaccataccttagataacttttacccacccttgtacctggcaagggttaggtattcagtcacttttgttggactgaatgaatgcatcagtcctgcctctgggagtcttcagagtgaacattatgacagacctgttgtcttgagagtggttaagaaggaaaaaaggaccacagatttgcaggcgtaggaatttaattgcatcatttactaagaggggttcaagttctggggattttgtattaagcaattctaaaagaaattatttataaaacatgccatttttttaaatttgcaattgggaatatgctttttcaatgactggattattcttctctgtctacagggtacatccgtccccagtatcaagggtccggggcaatcgaatgaataatcaaaagtt

SEQ ID NO: 73666 - DNA, 1010 bp, Homo sapiens
ctagtgacaatagctaacatgtattgactgcttcctaagtactgagcaccattctaaagattttatagctgttaactgatttaaacctcgcagccctaggtaataggccccattattacctccatttgccctgatgaggaaactgaggcacagagaggttaaataacttgcccaaagatgacaccgttggtaaacggtgaagctgggattcagtcaggcaggctggtcacacaattttcactcttaaccacttcatcctaattccatttgggatgataagattgcattaagttatcacagcttttctgtggtgcagatagtaaagtgggaccagtatccttcccccagcaattcatgagtgctgatgatttgtgttgggaatcaagatgttgcatcccacctccagtcaccagggggtgccactcaggtaggtttatgaaaacattgaaaaccagagtgatggtattctcttgattaactataaatggcagtcattaagatgcaaggttttgagagtcaggttctttggtgcttatacccaaagaagaaagagccgtttttgtattaagtcatctaaaaagttctcatatgcttagcaagaaagctaaattaagctctgcactgggtaaaattataaacatgctctctgctccagatgagtaagtgtatataaatagaacagttggtacacatggccctaatggtatagcttccctgttttctatgtaatgtaaatcaccaaatgtgagcatttctacctgacaaactgtcagtctcagaagagcacattcaatacatgttacacaacaaccaagattgcccttttgttcagcgtggtgttttttctttccacatccagcagttagtactaaggcctgaaccccttagttacagaacaaagtggcttagcagtaatcgagcctgtgtgaggctaagggaagaataatgaacattccctgcaagcttcctgcctagatgcaggtgcaagaatcaggaggtcatgaataatg

SEQ ID NO: 73667 - DNA, 1074 bp, Homo sapiens
tttattccctatactggcttctttgattacccacatcagaaccctggatgtcatccaaaaattgttaccttacttctgcctcacttacccccacctcacatgtacttagaccagatcctgcagatacgcctaatctgtgtccatcttcttctcactcctccctcgacccaccgtcattcctgctgtgtccatctgaatcccgctttgtgacattattgcaggtgtcctcccatggcctcctgtgccttgcattcccctcagaccaccctctgtactgctgccaaggtgatttttctggtatacaaatccgactgtgccagttccaatcttgaaatcctttgatggctgtcctttaattctgtttgagttaaccatttaccacaacacacgacacctgtaatctcctgcccctccaggctcgctaaacctttccctctggttgtctacaccaatttgtggttttgctattggacacattcctaccctttggtgctttttcatatctccagaattcccctttccttttccacatctgagaaatgtatcctttaaagtgtacctccttcattgtcctacggaaactcccaggttcactccaaagcttaattcagatgcaccatggccgtttatctgccactgcagctgtttatcacatggcaccatcatggtcaattatttgtctaagctcaccttgcagtgctggcttcttcaagtcaggaactgtgtttgaatccttgtagcatcccctcccctcacacacttcatagcacataggagcctggaacacacttaagaacttagaacagtgcctggcacagtagagattcaactaatatttgaattaatgagtaagtaataggtgcacaataaatgttggttaagtaaaagatagacaggttgtatatatggctctgagcaatagaagaaaggctgatgtggctgcacagctctgtgacccagttcccgactccttagacatttatgtattgatatgtgcatcttaatcccatcttaacatcaagcttgtctcccgcaaatacttgcaagaatctctcccctctggccatgccatat

SEQ ID NO: 73668 - DNA, 1032 bp, Homo sapiens
aattctaatgctagctatgcagttagcacagatgccacagctcaagggctctgtccctcaagactgctagcacttcagatgccagctccaaatgggatccccaagctacccacacttttgtctgtctaactagaacttgggaaattcccatgatcctgtctccagttcagtaattggtgagaacgccttgcagaacttaggaaggcatttcacttatgattaccagtttttgataaaggatgcaactcgggcagccagatggaagaaatggatagggtaaggtatcagggggaaccctgagtttccatgtcctctccaggcactccatcctcccagcacatggatgtattcaccaacctgacagctctccaaaccctgccctgtagggagttttattgaggtttcattccataggcatgagggatcaaatcattggccactggtgattgtgctcactctccaggcctctctcccctttctagaagttggaggttggggctgaaatttctaaccctgtttctggtgaggagctaaaaacctgaaactctctagggggttctgccatatgtcatctcattaacataaaccaaggcatggtcaaaggaggtttattatgaataaaaaaagatactccagtcacttaaaaaataccaaaggttttaggagctctgtgtcaggaagcagggcaaagaccagataattaattttttattatacaacacataggcagactaatatgtatattatatgctgtgtattgataaattagatggtcatttaaatagcccagactagtttatgacttctaaactaatccttaactgcaaacagcaccactgtttggtaaatatgaaactataatatttgccacacattctgtcattctagcttatgtctacttaacattttttaaaagagctgcttctttgctcttaaaataaacaaagtaaggtgttgtttaagagtgtggcatggtagtccctcaggcctggacttgagtttcaaccatggtatgtgaccttgggttaggta

SEQ ID NO: 73669 - DNA, 1545 bp, Homo sapiens
ctctggtaaccatcattctactgtggacctccatgagatcaacctttttaactcccacatatgagtgagaacatgtgatgtttgtctttctttgcttagcttatttcactgaacataatgacctcagttccatgcatgttgctgcaaatgacaggattttatactttttttaagcctgtatttatgtaagcccttcaacccttatattggtcattacctgaaaaagccataatgtaatccatccatgatttgttttgtgtggtgtggaatgattccagcaggggagcaggcctgtgtgtagccggatgatacatatgtaagaggatgggaatttcaaggtctctgctctttaacactgctctgcgtacagaatacgctaaatcaatccaactgcctgtcctgtttttccccattcagattgatgacactttgtaaacacaagccacaattaggacacagcttgacaaattagagccccagacacagtagagaactcttttgacttctgaagcagccactcatctgatacacaatcaacaccaaattttgaaatgcacagactcaaaactaaaaagaaactaaagtcacttggcaaccactgggtcatacttcctaatcagcagataattagtatggtcggttcaacattgcatttccaaaatactggttactctgggatccttgcagaatgcactctactacagctatagtgattgaagtttgtcgggttatttaacagcatgttgcaacactctggttacttcttattttaaaattaagcatttaaacatttcttcatgataaactcccctagttaggtacaatttgggagttagctgtttatttcaaatgaagaatatttcaagtcttcatcgtagtcacttagcatttagcctgtcaatgccagcacccagagaaacagtctagtagctattgttcttactttaggagaaagttaggcacaagacatggaacagccagggacacatgtcagcactgcagcatgagactccagtaagtaaggacaagatcatcaagctgagacttggatagaacacactgtgctccaggcattgttttgaactatccccattatgaagataggaaacctgaggcatagaagattagatttctcatctgtaaaccacataatcaataagtgcagaacctggatttgaaccccggcagtctggtctagagtctagactcttaaccatgttactacatagcccttccatgaagtttctatgctgatttatacatttataccacactactgtctgttacctggcttagaaaacagtagaaactaagaacatgttctgattcattaattactatttttaaacattgaaatgttaatcctttgtatgattaaattgtattgccttgtttcttaaattcccagggcaagaatgaaagagtgaaaacatcaattgattctattaatatattaattttatcatttcttttttttaattgtggcatttctattttactgcttggtaataggcagttttttaggcctgtgctttgtgtgttgtt

SEQ ID NO: 73670 - DNA, 1085 bp, Homo sapiens
ttcagaatattcctgattagttttctgcaaaattactggtgtggagaaaggaattctaaacttttacttatataataaaatagaatcctgccagtgtttagttttaaaactatctgatatatcattaatattattttatctgtacttatggaaaaacaaatgtaatacagaaaactggatgcattattttaatgctttaactctaatttaaaagtaactagatattcttaggtaaaatgattattttgtcaacctaatttttaatgttagactaagtcatgtaatatttctagataaaattctgcatcttaattaatgtgaatgaaatcacatgactaagcccaacatcagtagggtgaggaaatattttcctcctagcagaaggagagctttaggagagtgatgattactgtattaatattttagaaaagaaacactgttgcttatagaagcaattcaaatgaatggatgtatctgtttttctaatctaattcgtaagttttagctaattttagtcatgttctcttataaaaatttctagatgattctggtggttctcataacttcttcccactagactcatgtagtgacctaacttttaaaatccgtaacagctacatttgttttgtcttaatttcataatgtaaatccttattactagggtttcactctcaggaatgccgttttgttttgccaagtataatagagtagtgtttctgaaatacagagcttgacaaaaggcttattctaggagaataaacaaaatctgtgaaacatagttatattcagtctataaactcaaattaacattgattaacctctcattttgtagaaaatgacaaaaaatataatcagctattgtgtctttccccctgatttctggaattacatagctatgggctacgatagtgacaaaacacaaataaaatataaaattgaaactattatctaaataattggaaataaaatctttgagctaaaatttcatgacctttcagcagaaagtgttgcggtcttcaattctgcatccattctctattgtgttttgtatatgtaagcactattacaagtgacacagaagatga

SEQ ID NO: 73671 - DNA, 1021 bp, Homo sapiens
ctagccttctttgtgtctccagagctagcactgtatccatcagacactggttttaaacactagaaaagcattggataaaatagacaaaaatcactgatctcgtggtgcttaatattctagtggagggggtgggaggagagagacaataagcatatgattctataataagcatatgattcttctgtccctggagaaggtaagtgctgtggtggtgaagcaagaaggatgtggggactgggcagtgtggaaggtggtaggcagggtttactatttcatgtgaggtgtttggggaagaactctggtaagattacattttaggagacttgaaagggtaggaggtcaaaccacatggacagctaaaggaagagcattccaggcagaaggaataacaagtgcagaggccctgaggcaggggcttctcgcaaagagtaaatgaacaatttcactgaccaactgaagaagattcattataattccttaaaacttacagaagaaactgaacttcatagaggccaactgaatagtctagcatcaaatccctagggagaagtcagaactgaatctctttatctactcatgctttctcttgctgttataaaaattctgtttttctaagggaatctgtaaatacttgtctaaccaaaaacaaacaaacaaaaaaccatgcagagcaaatttttctttcaaaacctttgtctgctttgtacttcttttaggcataggttcttgaaatctagttatatacatatataggtatttgttctgtttaattgtttaccaaaaatgataaaatgtccatattagtgtacatgttactattggttatcataccaatttgtgtttgaatcagtttattctttcaaagtgagttttatcctggtacatacctgtatatcccatggaatattatggagccataaaaaagaatgaaattgtgtctgctgcagcaacgtggatgcagctggaggccattatcctaagccaattaacccaggaacagaaaaccaaataccacatgttc

SEQ ID NO: 73672 - DNA, 1034 bp, Homo sapiens
atcactgcaacctcttgggctcaagcatttctcccaccttagacttcaagtagctgagactacaagtgtgtgccgtgaggccagctaatttttgtatatttagtagacagaattttgccatattgctcaggctgatgttgaactcctgggctcaagtgacccccctgcctcggtgtcccaaaatgttgggattgtaggcatgagccaccacatccagcattaattttaaaacttctaatcttcaaatccattgttattttaatataatttggtttagggagaaataattatattaaatacattctctgatacataaaaaaaattcagctgttaatctcaacattacattgaaatgtaaataaataagatgtaaaatagtagagtgtttttggataaactttactattactaatattcaaagaaaatcttgggaaaaagttgtctgagagttaaaagggcactgagtcaacttattttgcaccctttgatggaaaaacttgagaatgtttgggccatgtctcttctctgctgacaagaattaagtcagctgcattgattgtgttctgagaaaaagcccaagaaagctcatgtatttggtttctaatttcagtgttaaattatttcaattttgctcttagatgcttcccataatcctggcacattaaaagatgcttcgtttttatttaacaagactagtaggtttgggacacctttaaatcctcacttcagagactaccaaagaaatattctttgactcagatatttaggtggaagtcagctctctgttagtgactaaatatcatgcctgttgtggtgctgctgatgggcaaatcagggagccattcattcttgccaggggagataaatgctgttagattgctcttttttgaaggaggtcagaaaaagctttgattgactgtgaatgactgtagataaaacctaaagtatatgctttgccattatcagcccaccagccttctaagcttcaaaaaattaaaaatagtgatcccttagtaactcagtctgtgggtatt

SEQ ID NO: 73673 - DNA, 1012 bp, Homo sapiens
ctaatacctcctgcacccttctcctgaactctgcaaaaaaaaaaaaattgttatttttgaatgtcactatttgattatcatcatcattattattacacaaagtcaagggaaatatggcaaagtattgttatcttgttttgataggaaattacagaatagctttttggaagatttaaatttggaaaataatatgttcatcctttgaaaagtagtactcatatgttatttttaaatgaatcttttctctgtccttttacctggaccgcagggttagatttcagccctcgtttattgaaaatagctgcttttctatcagtcaaccttgtacctagaattgaacctaaatgattgaaaaaaaaaatccatgtttttttttgtagaataattttttcagctttattgaggtctaattgacacattaaactttatatacttaaagtatatgtgctgatttaacatacatgtacatagtgaaatgtttaccacaattaagttaattaatacattcctcaccttacatagtttttttttttgtgagaatgcataagttctacactcctagaaaatttcaggtatacagtacagtattattaactgtagtcaccatgctgtatattaggtcctaagaatttcttcttcttctatctgcaaatttgtaccctttgaccagtatctcctcttttctctgacaccccagcctctggcagccaccattcctctctgttcctatgaattcaactttttaaaaaatcttccacatataagtagtgtcatacaatatgtgtcttctagagtaatttttagtaacataatcttgaagatgaggagggtttaaatagccactgttattgctgacatacttgttaatgaacagttcactcaaaattatcttagttacctttacctctgttatatccatttattttccccaaatgttgattaaatacctactttgttttattcattaggctttgaaattaaaaaacaaagaaaagagagccttggtattgca

SEQ ID NO: 73674 - DNA, 1055 bp, Homo sapiens
ggaaaaggggaaacccaaggtgcaagtgcttttcaagcctctacttgtgtcacatttgctaatgtcccattggtcacttcaagtcttagagccaagcccagagtcattgttgagaagtggccacatcagggcatggatacagacagacatgatttattggagggatcgttatagtaacaatctaccataggagagtatttgaaaatcagagtatatcagttcaacttcaggtgttgggttctgaaattttctccccaggattttgacacatggaatgaaactcacgtaggattccagaacacctccaactccgaggaatgacacctctaccagcagtgagctgggttacccaaaactgtctgatccctttttcattaaagagcaataaaatcttaagtgtaaatttttttcaggtgtttatagatcatctcctgttctcttacttacagaggctgatatttttttgtttctggtgtccagataactttctttggtctttaaatgggcatgccagagaatcagtccttcctaaatgggctgagatgctcaaagactgatggaggttaactagggttgatgtccctattctacatttaataaaaatagagtggaattatgcaagtatgcagataagctaatcatctgacctaatcagcaatgcagattttgaaaagcctttctaattacttcctcagcttggctgaaggtatgggtaaaaagattttcccagcatgatggtagcagatgtatttcataatatttattgaaaatattggaaagaaatcctcaattatgctcctgaaaagtacatcaaaaagatatcatatttaacatattttaaactttcattaagatacaaacataacataattagatgatcatgtaacaactctcacacaaggttttggaatctttcatacaattagactttaactttcagagccagattgctcatggttaactgcctctatcttccttgagttgtattacttactataagagctctagttgtcttggacaaaatggtactatcagaatattttcttttttcttgg

SEQ ID NO: 73675 - DNA, 1023 bp, Homo sapiens
tcccaggctcatctcgagctcctgagctcaagcaatctgccttcattggcctcccaaagtgctgggaatacgggcatgagccaccacacctgtctgacattaccttctatgtatcttgaatttctaaaatgtaatacctattaatgtttaaatgtaaaaaaatgcctttaaaggacaaagtaataatttgggactcatggtttattttcagttatcctgcacattccactaaacaatgaagaaaaaatgttgatcttataatttctggtatcatttttataattatcaatggaactcaaattttacttttatttttacttgtttgctaataatccagtaaagagttgaaaatggacaatcctaaacaggaagaattatagaagcaaagtccttaattgcacgttattgcttatattgtactgtgaacacacctgcatcttgcagtaattaatctgaattctaaagtctatttattatgttgacaaaattgttaggaaaaagatacataatggaaaatgaaaggaactacaaaaaacagaagataatgatgtaggattattcctgatggcatataaacttgctatactatctccttcttttaaaacccctcccttgagaacctaatgcctctccagctctcattccatttctctacaactctttaaagcaaaactactccaaagaactatcgagactttcagtctcctcttcctcacctctcatctgaacaccaacttacttcaggcagtcttttgtccccaccattccactgacacactgcaggtcagtgtcaacgatgaacactccctcgccaaatgcacaattctcggtcctcattttatttggtccctgagcagcatttgataccattgacaagctgctcttgaaaacacgctccacctgcattctctttaacattactccactttcctcatgaacagatgagtttccatgctgactcttgcatccctcttcactttctaacctcacaatgctcaggtgtccagtcgtccatgcttctcc

SEQ ID NO: 73676 - DNA, 1103 bp, Homo sapiens
catttaccttataccaaccacatttctaggaattggtgtcccaaaatgagcaagtccctactgtcagggaccttacattctagtagcagtgacagttcatgtgtatcagatgctacaagtgctatgaagacaaataaggcatgataagggagttggaaagttaatgggagaggggcacagctttaggtataatcaaggaaggcctctctgagaagtaagctgtgtcagtaatagctgtggaagacctttgcaaaaagagagagctgcaggttcaaagactctgaggcatgagtgagtatggcctttgtgaggaggagctgctaggaggctggtggaactagagaggcttaagtagggggagggaaggggagggtaaatgaaggatctggtaggttctcaaggcaatgctgtacagtctttggttttgttttaaatatgttgggaagccactgggttcagaatgaacaggagggtgacatgatccgttttaccttttacaaaaatcgttgaaccactgcatgctgtaaagaatatggggaaggagcagaactaggaagaactagtaaaggggactattgcagtatgggtcggatggtgggatatgagggaaggagaggaagtgagggtgacttctaggtttttggctgacctattgttctctactaagatgagcacagtggggttgagagaggaattccctttgggacgtgttaaatttgatatgcctgttccacattttaatagagcttgagatgggagttgggtgggcgagcctggaactcagaggaaagaggagacagatttggagaaataaaatttgggtaccactagggatcatctcaggagagccaaatggagaaggagaagcatggacgactggacacctgagcattgtgaggttagaaagtgaagagggatgcaagagtcagcatggaaactcatctgttcatgaggaaagtggagtaatgttaaagagaatgcaggtggagcgtgttttcaagagcagcttgtcaatggtatcaaatgctgctcagggaccaaataaaatgaggaccgagaattgtgcatttggcgagggagtgttcatcgttgacactgacctg

SEQ ID NO: 73677 - DNA, 1027 bp, Homo sapiens
ctgggcggtgagccagtagtgaaggctgagagaataaagggagcccccatttcccttcctacttcggatgtgtatttctggtatgcatgagcaaaggaaaatacgatagggaagttggattttcaaaatgctaataataaaaatacaaagtgtaatgcataaatgtagatgattgtactggctacttttaaagttggtataacgtatctggtctctgatagagaaataggttaccctacatgtcacattacgtgaaggactgtgaatgcgcatatccgtctaagctcacatgtcctgtcagttgaaccatttgtcctttcagctgtctattgtgcatctatcattatcaggcattttattgacaccaaagatacagtgttgggcaaagcagatgttgtttctgtctcatagtgcttacagtctaatgagagctactgactttccacgaaataatcatagaaacaaataactgataattgtggacagagttggactaaaatagaccagccagggagttgcccagtggaatgagtttaattataatcgcaaatagagaaagctgtatttgaccaaagtattttcatgtaggatgtcatgttctaggaagacatgtatttactgtgatgctcatggagtggtgagggtttgggaaggggtggggtgaaacttctgcaagggatgcttgactaaggacagaatggcatgcaaagatttttttaaaactccttcctgagaagtgtgaaaatgccttctagtgaggctagaacctcagcctttccaagtgtgcaaagaatagtgatctaaagcaatggcaggttgtcagctagcacagaacaccccgacatctctactgggccttggatataatatgtgatatgaagaaaaatggaatgatgtcctagaaggtatagtaaacaaacataatttagaattgagctatgagagggaggatgtcaggaaacgtctcccaaggaagacatttttccacttgatacctaaggacaagtagcagttagcccccccacag

SEQ ID NO: 73678 - DNA, 1299 bp, Homo sapiens
gtgtgggaggttgaagaactttatgcccttttttaatgctcagaatatactgagtatggtatggtaactcttgcaacaagtatgaaagtagaaatgtcatagtgagttttcccactattgttgccaggtaatatgtttccgtattgtgatagtgttgagtaagggttagaatcctagagattcatatggcctcttttctccttcatagagcactgatttcatagtattttaataattgtctatctgtcccaatggaatgaaaatgtctttatggtagaggccttattctgttttgtactcttatgccctcagttttaatcacagtgactgtctctgagcaatccttcagatatttggagaacgaataaatgtcccatagcaataagagaaaaagtaataaacgttcaagtggtaagccatgcatcgataaaatgtgtgataaacaaagataaatatatgttccatttttctccccacagtctccaaacgtccacaactatcccgatatggaagccgttcccctgttgctaaataatgtgaaaggggagcccccggaggactcgttatctgtagatcacttccaaacacaaactgagccagtggacttgtcaataaacaaagccaggacgtcccctactgccgtttcatcctccccagtttccatgacagcatctgcctcctcaccttcttcaacttcaacctcttcatcgtcttctagtcgtctagcctcatccccaactgttatcacatcagtatcttcagcgtcatcttcgtcaacagtattaactccagggccccttgtggcctctgcatctggtgttggaggccagcagtttttgcacattatccatcccgtaccgccttcaagtcccatgaatttacagtctaacaaactgagtcatgttcaccgcatccccgtggtggtacagtcggtgcctgttgtctacacagctgtaaggtcacctggaaatgtgaacaacactattgtcgtgccgcttttggaggatgggagaggccatggcaaaggtaagagacataaacaagccttgatttatttcagcactagaggtgacttcatttttgcagtgaacaaaacctaaattgtatacaaacactacatctaaagaagttctgtgtagagcaacgtggagacaccagctgttcagccttaagtagaacacagtttagagggaactcaccctatgtttatgtaggtatatgctccagttttgcttagtgtatttttacttaccataggtcacgtaatgttagaattcagatatctaagtttgcaaaata

SEQ ID NO: 73679 - DNA, 1514 bp, Homo sapiens
tgtgattatagagctactcatgttatttctttttatcctaacagaaagcacaaagttatgtctggaatttaggcaatcaagttgaccttaacatttgacttattatagactccttttttgtttagtggaaggggccttgattttttatttgttgtttttattatataactgtatatgtctttcatcatatattttctgtcagacttccttatacctgtacttggacaattgaagcttttaaacctgtttacttgttatttactccttaattttatattggattgaaaactattactctaaccttattcagacttgacaacattaagtcctcttcaaaattcttatttttatggtcttttatgtaccacttttatcgcatatatattccttcattctactgtgatcttctcatgtcagtgattaatgaaaatttagcacttcctgaatgatgaattttgtgttgattgatgtttctgttgaacagaactttcagcacattttacccaggcagttagactaacttttgaactcctttgtaatttaaaatcttttggattgaatattttggatttatagtcaataatattttccttactctgatcagtgaatgatataaacgctttccttcagtcttttataaatatgcatcagatttttttctacctcatactggggactatttacaatctgatataattgttgtgtatctgtgggaagataatagatatagaccagtgttttttccctagagaactcagctccatttccaatcatattgcttatgttctgcttcatctactgatcagcactgaggaatttaatagtttgttaaatccttaaatctaataatttaatcccactcactggtaaagtacaactatgagagaaattaattcctaattgaaaccaagtataaaatgggtaatgctatctgtatgtcactttatacaaatcaggatatctgccatacccttttaaaaattagggagtaattacttaaacttgaattgctatttagaattccatttactacaaattattcagggatattttatgtaaaccaagaggaatttttaactccccagttatcttaccctataatgttatgacatgtagtatattattaatggaaaactgtagaatcaaggttagttgtatcattctatttaatccatttccacaacttcttatctataatctaaaatccttaaaaattctgaaaaaatacttatttagaattaaaaactgtactaaactgacatacaagtatttatagtctttataacactcagtgtaaatgttcatgtgttttactgcagagatattaatgtgttggagtatccagttccaccccaagccctcctggcggggtgctattaccttctaaaaaacctaccaaaagtttgaattcctgaatatgtatggccccagaagtttaaaactagaaaactgtgcatctctagtatttgcctgtctgcaccagatgaacatattctaatatttgaccctacagt

SEQ ID NO: 73680 - DNA, 1657 bp, Homo sapiens
atgtataatttcccaaagaaattgaatgggaatagaatgtgtaagacagcaagcaaacaaaaaagtatttcttttcttttcttttttttttttttgagacggagtctcactctcacccaggctagagtgcagtggcacggtctctgctcactgcaacgtttgcctcccggattcaagtgattctcctgcctcagcctcccgagtagctgggattacaggcgtgtgccaccatgcctggctaatttttgtatttttagtggagacagggtttccccatgttggccaggctggtctcaaactcctgaccccagatgatctgcccacttctgcctcccaaagtgctgggattgcaggcataagccaccgcgcccagccacagaaaagtatttctgtgtcattttttagaaatcagaattgaaaaaattaaacaaaaaggacaaatagaaacataaaaaataagaaaaggaataaggtaaaaataaagccaagtatcactaattataagccacgtaaatgaatgtggaatgcacaattctggctggcccccaagagttcctgtctgcttcagcctagagtacatgttttgcataatccctggaattgtgaatttgatggattttacttctgtgattaggttgtatcctgtggcacaattgtctttaagaaagggagattgtcccaatggacctgatcttatcacaggagtcttttaagggaagagagttttctcaagctggtcctagaaagggaggtctgagagattgccacattgcaaggacctgagagtagccactaaaagctgaaaacagtcccagctaaaagccgaaaggcatctgtcctacagccacaaggaactgaattcagccaataatctgtggtagtgtgaaggtgagtctttgctagttgaacctccagattaggactcagcaagctaaaaccttttttttttttttttattttagctgagtatagcacccagctaaaatgtgctggattcctgactcacaaaaactgagaataatacattgtcttgttttaagtcagtatgtttgcagtaatttatcatgtagcaatagaaaattaatacaagaatctaattccaaaagccaaaagacagagactctgagtttgaatttaaaagtatagtcatatgtggtttacacacctaaacatgaaaacaaaggttgaaaataaaggaataatgacaaatttgccctggaaatacagccattttgtttcagatcattcagattttagcacagaaaacaattgggtgaagatagttttactagtttatcaggacagtataaaaatactaaacctgtaagcattttttaaaaatagcatgaaaatatataaagcacaattcatcaaatgtaaaacgttaaaaagtcatctactacagaggtagattttaatacacctttatcaattatttttgtcaagcaggaaaagctggtaaagattaatgatttatacaacacatttaatagggtaaatggaataaacatatatagattcctgtatctaacagtttagaaaataggcattctttcaaggacatgtagtaattgcaaaaatgtatcacacaatgtacaacaaagcaagcttcatcaaatttctgaaaatttctgtcacaaaaaccatgttttctaac

SEQ ID NO: 73681 - DNA, 1034 bp, Homo sapiens
atccacaacagggtattgatatgtccttcagctgagaaaagagaagaatataggtacagttgcattttagacaaacaacacattcaatcctcagaacaactttaggagggcaggtactgttaatatcttccttccagatgagaaagagttccatcttatttcgagacataatattgataggtaaactgaggttttattctgttagctttttggaaactaagtaggggagttaaagttttcacatagtggtcaaaaaaaatgtttctgtttttcccaactgcgttaaattcggagaaggtacctcagaaaggcaggctgatcagctttctccagataacttctatctataattaagttgactgccactccattttatcagagttcatggcagaatagctactcagtgtggaacagaaatatggtttatctcacacaatgtcatatcaccctaaatttaacttccaacaaaagttaatgcttttttaaaatatgagttaattattttatcaactatctactagaggcaaatgccctaccttttgtcatgttgttctttacagttaaactatgtacatgcctgtttgtcacactgggttataagctccttgaagcaaagatggatgtatctttgctttaccgtggagtgctctccccaaagctttgcaaataattagacatgtaatagaaatagcttggattgaattaactaccatgttaactgctgctgaaatcaggttcaggtcagcagtatcccccatctattttccttttgtgcttgatcttagggggttcttccctgtcacatctcttcagtttaccaaagagaaaaagaaaaatccctaaccacgtgctaccttgattggatgtcgtgtcgtttatgtaaggcaggttaccagtttggcaaggacatttaaatttatcgtctgacttctgcagtactgtgccacgcattcctaaggcttgtatgataactggtacttcaacaaagagaaacttgtgaggctgattcaatcactcatttttttctcatgcaa

SEQ ID NO: 73682 - DNA, 1030 bp, Homo sapiens
gaggctgaggcaggagaatcacttgaacctgggaggcggaggttgtggtaagtggagatcgcgccactgcactctagcctgggcgaaagagtgaggctgaggctctgtctcaaaaaaaaaaaaaaaaaaaaaaaagtcaatattgttgattgagtgcattctaaaacaatgagactgaaaaaaaaatgaactgatcaaattactggcagaaattgagtcaactaaacctaatgagaagagccacaccatacacataattaaattagatcacatggattgtgtttatttagtcattagaaaagagatttgaaggtgcccctctctctgacccagtgctaattggaaaagcattgcggaggtgtggggcaaggatttttttgaaagagtgccttttcaaaataagatgttagaaagcctgctttgggggctgataatcagtcagcagaataggaaataagaaaagggtttttttttttttctctttcaaagctcttgcctctgaacatagtgtattatctgaacacatttacatttccataagagtgctgatttatgttatttctttttattataacaaaagcaatgtattattgtggtaagaaaaattttaagtaagttatggttaaagagtagtagcttcaccctacccacctctattcccacaaatataagcaaagtaaatggtttattgtaactgagacagtggtctgtgcatatactacgaatacacaaattgcatgttgctgtgcaaaaactgtctttcagtttctttatttactaaaaagaataacttagatgtctttctctagcaatccataactctatgccattctttttaatagctgtatagtactctgttgtatggatactagtttgtcagattccttattgatggccattagatttctatactagcagatgtcaaccttaagcaaaataagagtttaactgttttttgtttgtttgttttggccatggtttttatacgttcctattttacttaaatacctgctagagtagataaagtctt

SEQ ID NO: 73683 - DNA, 1115 bp, Homo sapiens
ggtctgcaaaacttgttaatctaatatcaaactacctattgtccattccctccatctcagtcaggtcagccttttattgctccctgtcactcatttctccctgatgtatccttgaccttcctcctgtgccctgtgtagtgccgcccactctttattttatatatggttcataattcaccctgtaacccttgtcttcaatgtcaacattactaaccacccactataaagatacgaggactggcatagatcagagcacctattttacttttctaatgtttcaggtcttaaatataatttcatatatgaaaaattccatcacccaaaccaagtacacaagagaattatgtgatgtgaacagtgttgcctggttgtcagggtgagatcttatccttaagacgactagagactaaagcacaccattggaaaaactacttaactgtggtttcaccatgtgagagcaaaagtgttccaagggagccgttctaggatctcatgtatctatacaaatcttctgtcactcagaagttagacaataacctcagccacctagaacagctctgaatctagaaactgaattaaaaacatagatttggcagcaaaaaagcaacttatttatccagcaatgatgaatctacagggggtgtgttggggaaaccacagattcaagtcagattgtaattatgtggttcataaatggaaatacccagcaagaaagaaagaaatacgtttgttggctggctttattatataatgccaagacattttccacataagccaagaaatataggaggattaagagaaaacagagatagaagaaggaatcaaaaggaaatccgttgataaataagaactattactctataatcctctcactaaattttgacatttgacaaaattcaacagctattccttataaaaatactaaaaaatagaacttatttaaaagcggattgggtattttttcccatagtcaacagtatatttaatggaaaaagtcaaaagaattttcattaaaatcagaagataagccaacaacctcctagcacaatcattattattgttttgttttagaaaagcctattcagtgtgtatatgcgatacaaaaagtactaaat

SEQ ID NO: 73684 - DNA, 1020 bp, Homo sapiens
aactgtgaaactcctgtattctctcatttaaaaaaaaaaactaatcgtgcatagtaaaaaaattgtttctccaacaccacaattgaaattgcattcttgaaagaaagtgaattcattctgctgccaaaattagtcaaatgtctacatgtttttcctttaacaataacactgtattggctcactagatgtattcctcatgactataaatggaggaaaacaatatactcctccacacacattctcatcagggttacatttttgtgggcccgtctgctttaaattttacaccaagaaaaatcttgaaagttctgagttctagttttaaaaccagaagataaattctgaatcatagactgttagcctttggaaaccacttccagggtaacttaatttcaagacgatttgataggagtgtctttttctttaagagaaatagacctctgtaaacagtcagtgcatatacactaaactcatttaacatacatgggtcactcttaattgtgtttttgtgttgctgtttatgttgtttgttcaaaaacttcatccacattcagcaaacatcctacaattagctacgacttcacctacagagacaagtagcacaatgtcaggttcctaatattcctttgaaatttacttcaaagctgggctaaacaaatcagtcagaaagcttcagccaagtagtccacccacattcaacctttttctacctaatgataattacagtctgtagaacaggcagtctctaataaacagcatcaactttagaacacagatgtctggaggggcctttttgttgccatagaaatatcttcagtccaccttgtcctcagcactaaacattatctttacattagcctcctattaagggtgtgtgtgtatgtgtgttgggctagattggaggtatatattagcccaaattataggattgctcactctgtcctgatggttataaatgattgtggtccttcattctaaaaaaaaaaatccccaaaatggagcacacaaatcttcctggtg

SEQ ID NO: 73685 - DNA, 1131 bp, Homo sapiens
gtgacttacccaagttcacagacgtgcttactgggctgccaggaagtgaaaatgattctaattcaatagctctttccagaactgcattacggcatgactttaggtgttactttatttaggagaatggtcgcacttacacaaaacattctaaagtgttctttagacaaactttctcagcacacagtaataattcactgttaaatcacaaatctttaatgttccctctattcttttaattttcaaagataatccctaattgtataagtactaaatatcccacttcactttcaatgaggtaactcactgaggtgactttcaatgcaatgatttaaagttccgtgttactttcaataagatgattgtaactaggattgctgaaagtttaacacaaggagaaacctaaaaaaaattctgtccagcaacatgaccctgagttatttggttaatgccatttcttttggagaactgctgagacatctatctgtatattctccattagtttatctaataggacacagctggtttattcagatcagttctcctgtatgtggcactgataaattatctttataattattttgacaaaaatgttggcccacaaatcaagacattatattttttcatctgggttaccccaagttttcatgtaatatgatctaacaaaagatatcttctcacttggctggtgtctaactgatacattaattttttaagcaatgctggttttttttaaaggtctgttgtctgtgtggcatctgtgtgtgccagaacatgctgtgatagtgatgaagtgatcttcatatcaagagatgggcaataaacactaaaattaaccaccgagtctaaagtcttattaattatggcattccacaaacacataaggctgtaagtaaaacagtacaagggaaataaaagggaatgacaaatttgatataatatttggaaatatattaaaaagacaaaaacctggctatcttttcaggatattcattttactatgaaatttagtaggatttgtacctaaagccgaattcaagaatagaattgtatacttactggtaaatgtttattcacaaatcaagtcatacaattctcaaaaggtagatcgcctaaattttaacaattgggtgt

SEQ ID NO: 73686 - DNA, 1067 bp, Homo sapiens
tcacagttctgaaggctggaagtccacagttatcatgtcaacagggacatgggctctctgaaacctgtaggagagaagcttccatgcctcttctagcttctggtgttcgccagcaatttttggtgtcccttagtttgtagatgtgtcactccaatctctgtctctgcttctccttgtgtgtctctgtgtgtttcttctcctgttcttataaggacacctgtcttattggattcagggcccaccgtcttccagtatgacctcttcttaactaattacctttgcaatgaccttattccaaataaaatcacattcagaggtactgagggttaggacttcaacatatcattttggagaacacaattcaacccaaaacagtatccacaaaagagtgtttaagtttatgtttttccctgggagttgcttaaaggaaggccacacagtgggaacccacacctgtgggctgataaactgtggtgatttttttaatggcctattgaagaagaaaaggcaaacttgaacataatgaactgagaaaaagaacactaaatatttatagctctagtagccctcattaaataaacaatgggcagcattttcctgagaagctgtgtggaaactattttagaaactaccttttgggagttattgtgaaggagaagtcagtagttaaaccatcagcaatgtccttattgcaacaaaacaaaaaaagcaagccctggacacatcctattctaaatcattgtatcctacagaaacataaaaggaacagaaacacgagctgatggcagagtctctggcctacatgacagagttttattgaaaaggttatatggtatttgctttggaataaagacgtagaatgaaggcacaaagacaaaatccatttccataattcagtacataaagaatgcaacttttagtttgtactgtcttattatctgaacatttttcttatttctataacttctgacatagtgtttattacattctaggtactcttcaaaaatctgtaattcttcagttagaatagggaaataaatactctcaagttcatagaaattcactgc

SEQ ID NO: 73687 - DNA, 1552 bp, Homo sapiens
ctgaaattgcttagtagatacatatacattctgagtggcacaaatgattcctttaaaactccgtgagagttgggaggaaattgagttataagaagtatagtaagtgagatatgggtaatactgggacactttctccagcagcctttgaattcctgcagagtccagtgaatttccattgtcataggcagcattgtatttccaagttccaagccaattaccattgaatcatgagaaatgtactcactctatctttgaagcagtagttcacattttagtcattgacattttattttacctcttctctgctaagagagtgaatgactcatttagaagataaaaaaaatacttgaactgtttaaaatattgatgttataagtgccataactttgaagaggaagcatgaaaattggcatttaaatgacatctccaaagattccacatcttttgtacagaataagagtcactattggagtgaacctgagatgctggatttcgaatttgtggcggaaggtctgatggcagggctgctgtgcctggctgagtaccacataaagccaccctacagaggaggcctgggggttaatattcagtctgtgctaacctggccaatcaggagccctagtgcatgatttttctggcatgtatttttctgattatctgaaaagaaatgtctggtttttacaagtttgaatgtagggttttggattagctgaagccttgcacaatacctaggacagtgcagaaagtgtgctcccagtcagtgttcactgtcttttaatttattgagcctgacaagaagtcagagatgctgtgtttctgggatacagtgtacagagaattctcattccattatctctgacatggatgatcagaggaatctgcctctctcctggttgtaagaagagacagattatacctccccacccccaacaaaacaaaattaataaacaaattgtataaaatcttacacataagattcatgtcacactgttctccctcagctgttcctccagtccaaaatcaaattcctaatttctctttggctgtgcagcttcttgattttgccagtcttttccatgggtgctgagatgttaagctcatcttcagtcctgtgctgtacctgaaatacaggaatgatctgtttatgaccaggagtatctgtagaatgtctaacatagacaactgaagggggaaaaagcaaacgccactttggtctgcaattcatatgtaaaatgtttaaggcaaagggcaagaataaagtaattttcagtgtaaagaaaatatgaaggttttactccttgaaggtaatatcagtgtaaatagaaaatagtttcattgaaactagacaataaattaattcagttaaatgcaaactagataccaaaacaattgtatgcaatagtagaaaatcctgattcttcatactgtgaaaagcatgactttttttaattaaaagattgtgtacaattaaaaaacataatgctaattattgattctgcaaccacataatagaaagcccacagattctaaagctcctctttcctttgtaatc

SEQ ID NO: 73688 - DNA, 1028 bp, Homo sapiens
gaaagggtgcaggcattgccgcagacaagtatagaatcacgtcaatactccatgccttaactaccaggaaatatccaccttggccagaccagagattcctatgcactccctcattttagaggcagaacaaaagaggataagggagactcagtcttttccctagaggcagcttgcagtaactcttagaaaccattctgcaggacattaataacaaggtgttgaagctattcctatatcaccaagagctgactagcatcatgaagtcagctgtaatgtaacttccttaagagcagagcttatgctttatgtttcttgttattcctcatcatctcagcacaggagcttatgaatcggcagggctcaataagtggtgattcattcatgtgctatttgttgtaagtgagaggctgtttgccacactggaattgagaggatttggagacgggtgcttttttgaaaaagactccagtcgttaggcttaataaagaaatatagacgggtgcaggtattgtagctgaacctggaaatgtgctatggaatgtttacttaacgcaggaaataaattacattaaaattcagtagcattagggggaaaaaacccaacaattagcctaacttttttcctcagtaaacctatttaattttacactaacgatctagtgtacatctgtgcgtaaaggcgtagtaagacagtgttactttaatgactttatcagaagtgaaaaaagggcattattaaaaatgccacttgcattaccctttaaccaggggctcattattccctctcctgctgtggaacaggggccagcgtttgactaaattggtagaattatcttggaaatacgagtttgcttatcatttaatattctctgatgacctgctgcttgagatcttttgatctgtagtgaaatctttgcatgtcactacctggcttcaaagaaaaacatttgcagttgctgtgttatggctaatgtgagaagaccatttttttttttaagcggaaagaaatatctgctcttgcaaaactc

SEQ ID NO: 73689 - DNA, 1787 bp, Homo sapiens
gtgctgctcatgtggctgagtgcctgttggctacttattttattaaaccaccaccactgaggcagcacaggtgactgatagaaggacataaatacgtatataatctttaccttatcagtgtctctcttattaaaaaatcataactaaaaattagcaatgttttgtacttgaacattcaaaagaaattttaaatgtgaataaaatctcactgttagagtataaaaatcaatgtggatgagtacatccgggatcccactcaaagggttaggatattaatgtcccaaaaggatttcataatgagaacattcaaggttatggatccagatggtagtatttagagggtctcttcaataacttctgcatacctgagcatcacatagcaggctgtgtggcatctcaatataatttctgtttttcagtgtaagcctgtgtttgaacagagcctcatcgtggtagaggatgtcatttcacctctatgttctgggttgagttttgtagctttgaaatgaactttgtggagtatgtcaaccaataacatgactccacagtcctatacatgatataatgaccaattcataacagattcagcccaagacacaggcagtagaggatcatgaaggagaagaccgtggcaattactaacattggttcagtatagaaaacctttcagaaaaagtcatgtgttcaactggattttctagctggattcactaagttaaattgtatataccttccaaaccttatagatagtttcaacctttattgattaacctaaccatggggaggatttgtcttagttctttagagttctgttttcttaattcatttcttaatctagttgcattatcatgagtttagtaaaataaacttctgctcagctcatatagagcctggcgtctcattcagaaaggatagccttttcccactgctcatgggaaaaaaaagtgaaaaagcagtctgcatttcacaataatttcttcaacttgaaataacaatctgttcaaactgtgcatgttggaggaaggcaaaaactatagcaaaccagtcagaaacttagccccagaccaatggtcaaagccaggatcgtgggttgctgtcaccagtcttggtaatctttaacaatatccatatagttctttcccctttattttttggtttcaaggtaaggtctacctgaaatatttaggtgcacaaaaaacaaaagccactattcccagcagttttgcagtgtgaataagaactccatgtcacattatttatagaaagcattttttttgtccttagagagggacatgaaaagttgtgggttcataggtattgcctaatgcctgttcatgaaaatcgattttcctccttgtgagtggagctgatgttggtattttaactcttatttagattctgcatgttggagggaaatagaacttttttttttcctttgggtttatgtgtacctcttaaatatatgacagatacaatttcattctcttttgtagcaaagcttcaagagaatcagcctgtagtgtttaatgaaatgtataatgatttaactctattagaatacaataattttaacaattttgtaatgctttaaatcaactcttgtttgaaacaaagtctagaattttggtgactttcatttttggccactttgctgggtttttcattgagaagatgcgttgggtgttatataccatataatgttcagaatcttagaactatttttagataaggagagccagaatttggaatatttcatgacttcctcatttatgacttaaaggctggtt

SEQ ID NO: 73690 - DNA, 1896 bp, Homo sapiens
gttggtgtgggtgtgtgaaagtacagggtacctgggttttctcttactagttatactgtcacacatattacttttccattgcccactatttggatggaaggtcatgaatggtataaaattagacatttgtcacaatacttcagaaggaatctgtcagtactttcaagctagcttccccatttgttgatttcactggtaataaattgtagaaacaaacgcatgagttgaacctcagagactgttcttgcttaagttccacctcataatcccatagtgctaggttttcttctcatctgttattgaggggcacaatctttttgccagttcttttgggtgtttgcatttctgaaccaatcaatcagactttagcatccaagctgtacatgatttcttatttaaaattagtagcttgcataaatataaacaatgttttttcaagtaattacatttagataaatatttctgcttctccttgacaacttattttctatgtcaaaatattaagattttctgaagttagtattgaaaatgaaagatttatccattggcattattagcgtcatacgagtactaaattatatacgaaacttttccatatagaaaattggagttatttttccgaaaactttttaacttaaaaggtagttgatataaacagatgttccaaaaacattgttgaatgacttgtcctaattgttggaagtagtaaaacctaaaaccattttttaacgtttatataatccattctaaaattgaaaataaatagaaaagttaaggttagttgaggcagagtgctgtgtctcaatgcctgcgatggtttttcccactggatgtttttcagggacatacaaataattccgagtgtgtgtgtgtgtgtgtgtatactgaagtactatacttcagcatatatacgtgtgtgtgtgtgtgtgtgtgtgtgtgtgtgtgtgtataaatgactctcttatactttatgattgttaacctgtatagaaactttgatttttctatcccaatagaacacacatattcttacatcttctggcacaaaatgactatgctttatttaattgtattttaatcttttatttaataagtataccagatagcaattttctttactgctaggggaaaaatgattaaatgcagaatgatatatttgcccatgttgcctggtatttcaaattattaaccaatcccttctattggtgttgacaaaatgctaaaaagtaatgtggggtgatagaattatgtttgaatctctgttacaagtatgcttaagtaatataaaattgtgtgagagaatggtctgtttcttcaaaactcttgagatagcaccttgctactttttataattttatagacttggcaatcgtggttacttttaggcactagtgtttttacatatgtctaaatattaattatagtacccctgaagtgagttaggaaatgcattatcgaattgtccatttatttttaactgctttttttggagaccatggtacagagtatattctttttgtttttgaattttaaaaagtagaatttgtgattaaacttgcgaagagatttttaaaatacactttatttttagaattttgaatgcacagcaaaattgagcagaaagtacagagagttcccatctacccctcatccctacacatacgcaacctccttaaaaatttcagcatcctgcacgacagtggtacatttgttacaatggatgaacctacgttgacacatcattgtgattcgaagtccatagtctgcaatagggcttactctttgtgtacattctgtgggttttgacaagtgcatattgatgtgtattcactatcatagtctcataaaaatagttttattgttctagaaatcttctatgcccttcctgtttatctt

SEQ ID NO: 73691 - DNA, 1059 bp, Homo sapiens
ctcaatattactgagatgtctcataaggaaattattcataatatgtattaaagatgggctatatgtgcctgaggaaccaccacgctgttataaactattattcaattgtattgataattttattaattgaattagttatagggagtcgaactttgaagattgttttaaagacgttctttaatggaacacttacagtgaaaatgtattaggataatggggaaagtttcaggtgttgatgtttgttattgtcagtgtttctttattctgctgaatcaaaactcataatgttagcctttaaattcttcgtctgtggtttaaatcttttaacatgttgctgtgattttacatactcgtgtatattatgttttttcctccctttactcaaagcatttcagaattttaaggttgtctttagcatttgttacaggttggcatttcttttcctgagcatcatttcatatcatttggtttgatttaatgaacacttaatgattcggtagcacccaaagtctgatttgatgagtgtaattgtacagctggttaatttgtgagtagaaaacaatactatttaaagcccttaccttatgagtcatctgatcaattcacttaaaaaaatctgttagctttcttgataaatgaaatggggtcttgctgtgttgcccagggtggtcttgaacttctggtcacaaatgatccttctgccttagcctcccaaagtggtagtattacagtcaggagccattgtgccgagcctgttagctctgtttattcatagttcatatcaccattgtgaatgtagtattttcattgacgtcagtagttttacataaggtctcttgatggtgatgaaactagtcactattaagatggagtttccttgtttggagcctcaggagaaatacccaccatgcttttttaaaatcaggggcctccatagtatcaactttatagttgatggtttagtaccttttcctgtcttaaaaaagatactgtcatggaggtggacttaaactggaaaagagtgatatagccgaaataaattatatatacatttcattg

SEQ ID NO: 73692 - DNA, 1046 bp, Homo sapiens
tttttctcagaattttagtgtcaaagtaatccttttgccatagcgtctctgttaatgactcatttgactggattttattattaaagagtttattttatgaaggtcttgtggatgctgcatttcctgacttcttgcatctttaaatatattttcttttatagtcaaaaggtatttggccttgtgaaattcttgagttgcacttagaaatctgtagacgatgctcctttgtcttctggcattgagtgttcctaatggaagggtgagaccagtttgacttctttgttcccccacataagtgaattgctcttttctgcctgaacacctgcagaattcttttttttttgtcttgaagttcagtgacttaaggatataactttttttggatcattctgtaacaatttttcctggaacactgtctgttatttcaatctgttcttcgtgttagggaaagtttatactatttttacttgaaatatttttctatccaatttttgggttcttcaggatcagcaattttcaggctctctttgttctttgtgcctcttatcttttctccattaaaaaagaatatttgtcttcctcctctgtattctttggaattaagcctttcttctacattattaattcaatttttagtcatattcctttatttttagtcatgtctcttcctttccatgctgtttttattgtgtttacgagtactgagttgataaatttttggtctccggtatgttttattggcttggtgacatctttctgttgtcttatcatttcatctttgagctcccattcgttgataatcactttttggaagtcctgtaacatgaagccttctgcttttaagctgtgtaaatgttaggagtgagtgctttttcctcctttgcatgcttgttttcttccttctctttctttcatttcttctttctttacttcctttttgtcctgtgctatgtttacctgttttccctatgactttgttttaccttgtcttgctgggcagatgttctatgtcttgtgttggttaatctttctttctgccttttcat

SEQ ID NO: 73693 - DNA, 1033 bp, Homo sapiens
acatttgtatcaactgtaaagaaacaatcatttcccccaatgaaatgacattactttaaattctctcagttgctaagaataatgaagccaagggttccagtttgagtatttgggacttctcttttatacaggaaatttacttataaaccttttttttacttggccattttctcctcagctgtctctctctgttgcatccctttctttttattctcctcctcccttcctccctcatttttgtctaggtcttaattatttagtgcccaggatcttgtcctagtgtcatagctggtgtttttccctctactgcattttgccctttgatggctgctgaagagcaagccaacaacacatagctgaagaaaagatattcctcagctctatgatcacgagcttaaggaactgtagaattaagatgtatttttttccccaaaggagcaataacatcaagttgtagaactttctctcatcatttgtctttgtgtttttcttgcaggatcaatgtgactctaagaacaaatggatgaatgaatatccatatgaagagaaaaacaataaaggttggttagtcagatgttaaaattgcattgaaaatattgctactttgagcattacttttgggcagtttattctcattagagtaccttcttgtgtgaatacgagacagaggtcagtacttacatgtgcatatctatctgtaaaatgtaatttttccttttagccccttaaaaaattatatggaagcaactcctcatttttttcctgcaagtctagctgtaattcttttccagaacttaagctggtattttaagaatcaactttcagatgaatattaaaaaatggaaaactgcttgatgcaactgatcactggtacaaaaaaagaagccagattttttttaatatacatcagttttctacaaacataattctaataccagtgccatatggtgcatgattgctgtcaaatgcagtcctatgcccctgaagtctctgcttttctcctagaagtaggatcatcatggaaaactttaat

SEQ ID NO: 73694 - DNA, 1332 bp, Homo sapiens
attgaatatgtatgtaaacctttattagttgatttttaaaatcggtgctggaaaacacaagatcataactaatgaagcagtgatttgtaaacttgaatctagaagacagaattccaaataagataactatatcagcaccaccattcaattcactcgaaacagagcaactaaattacctttgagcagagagtggaatccctggctagttagatgtctagtgtgtttctctgtctctatttaaagatacataaagggattctcagaggatctagcaacaagtatacttatgggtccattttaatacatttaaaatgtattaaacactaacctttaaagactgagaacataatagatcatttaagatgtgatgaagagcaagcaatctggtactgtagtataatataatgcctgtactctgaggtaattgtgacagagtagctgcttatttgttaaagtggatagcattcactttcactatggccagggtcacttctgttgtccagggtgtactgtctttgagttataaaggaacttgagtgatcatatgtggaaatttcaagacagaaaaagagaaaggaaagaatttaaaaatcattctctattgcttgcagctactaaagagaaacaggtgtaactggaatttctccagtctctcctctaaaaccatgagtatttacccatggttccaggcagcaatattttggtttaaaagtaatcttaaaatactttcaaaagtgtaatattttatgccttgctatttttcatgtttttcatattgaaataagcgaccaatcctttgcttttcttcacctaatgacaattgagaaacatttttgaagccaggaaaatgaggaccaaaaccatgcgtcatgagcattttgatgaggccactggcctttaaaacttctgtgctttgggaagatttactggataatttcagaaacctatttggcagagctaagtaaatttaattcggaaattgatgagctattaactgttattggaaatgtgccattttcctattttatatcatggcttgcttttgatagggattggggggaaaaactaaaggccccttagcatgaataaaattagagatgtatctgttctatcatgtggcctccatttagagaaatcttttttatttcctattcgatatctaggctgttgattaaaaagtggtaattcttacacgtatgacatttaacattttacagattgctgtataaacattactgcaattagagtaggcaagtatataaagcaggtattattattattattatccttgcttcttggagaagaaaactgggcatcaaagaggttgaacga

SEQ ID NO: 73695 - DNA, 1506 bp, Homo sapiens
acttgaatataactgtagggcaaacttgtcaggagtggagtagcagtggttctctccagagagtgcatttcttgtccctgccactttcagccttactctgtctggctagccacctcggtctcaaccctggctctttttagcatttagacttgtagctgcctaagtaaattcaagtgctgtgggttgttataggtatgctgagatagtgattttctctgacacttggagaatgatgggaataaagttgggagatgcccagttagccttttggtaacttcaggcacagcctggcattccccaggatgtcccaaggttaggggttcagggaatccgttcccatgaggggcctttcttgtgttcgtacccagctgttgaagactgccaactcttaaaggccttccacagacatagaagaaagaaatctacatgttctttaccaggcgggtattctttctatgtcacagatttgaattagctgcttatgtttcctcagaaaaatggtccagtttggcaatttgctcacccataacgggctctatcgaagtaaggcagggatagttagtagaggtcatatatttgaaaacactgtctttatgtataactccatgaaaaaaatgatgagtggttagatataatatgtgattgttttttaagtactgctagttgtaaaggaactgaagtactgcaaaatagcttaagtgtacagtgatttctttcagcacttttacctgttatgaaaattatgaactgctaagcaagtttgtttactcagaagaatgcttaaggaaaaacataactagaagcaacagtaagataacaactgaatgaaaatgttgtcagaggtttgacatttaagaattttggaggatggcttggcctgagtttccagatgatactgtaacataatatacttagttgtgctcattttaatcatgtatattgtcacatgcatttcccatcagcaatgtagcagggatgtgatataaaataggtgacattttattttatcaatttaaaaaagcagccctgcttcaggacatgaaacagtgtactcaggaatagatattgggttatatttctggtcctctgggactcttttcgttttaatagtctatgaggattatggaaagctcttgacacttccattcagacatggctgtgcacgaatgactgtgctttggaagacacatccagcacttttgggatcactttgtagaattttctaagaactaaaggttgataatctggtgagataaaaattaggtaccaagaagcatcaaatacattctgcacaattatagctctccaaggggctgaagattgtgctaaattaacagtacatgtgatacatttacatccagatgcattaaatgctagattaaacaagaaaacatgtctttggggagtttagtggatgttttaaggtctatataaaatacagttaaaggccaggaaaattcccagtgtgtcatacaagggtttgaaatgtggaaccttgaccagtac

SEQ ID NO: 73696 - DNA, 1040 bp, Homo sapiens
tatattgtcatgtaactgtatctaacatggaaatatgtgcatgcatatgtaacttacaaagatgaaaactgttccttccttattttgtaatagaagaaccttaaatatcactattttaattttctttttaaattgtgaaatacaacttaaaattttagtttaaccatttttaaatgtataatacaaggtgatgttttttcactatataagttaggctttacataaaggaattacatacagttctattagagaagcatgcaactaaaaagaggttgatttgcagatatttcacttttttggaaatgaaataactgatttttttcctcttccatccctctttatttttctacacatatattttggtacttgaagtattgctaagtttttgaacccagttttcctccaaggtaaaggttttttttttttttcttcaaaatcttgagttaattttttcatgtaatgaatttgcaatccatgtgcaatcgatctttataataaaaataggaaattgacatttcacattgtatccataattggcataaattatgatgattaataatgtcaagtttgtgagttagggtacccaaaactcaactgtttcactagagaaatcttagcaaatccaaattatttaattgtttgcattttaccaaataatgttttcagcctgttatggggactctagagaggtggttatctgacagttgtcaagtcggaggaagttaagatgcctttgtatctacctgggctcatcatttagctatatctgcagtcatttggtaatgtcatccagtcagtcaaatgtgtttcatttactttattcatcaatataatctacattatatttacgacagtgactgtttataaaaaggcagtatataaacctggacagttctaaattcccttgggtacctttcttacctcagtatatgttagtaaatgatgattatgtcctatgcagtggagtgccagaactcttgcatctgtttagactactcactgattttcttttttttttttttaactctgaacaaaccaaa

SEQ ID NO: 73697 - DNA, 1077 bp, Homo sapiens
agctaaatcttgtgaagtaagatgctatcttaaatgtcaccctgaaatgaaataggaacatggcagaatgctacttttgtggcttgtattaacatataaatgcatcctttattgtttgctataggcttctaagaagtgatactaattggcttaaatattatctgtgccatataattattttctcttggatgggggccaaaatgagagagagcgtgggaggaaaggacaggaaggtttttttctgaaacagtagaggtgttcagacatcttcatctaggtatttagaaatttaattaaggcccatcttaaggtagggtgaaatatcctcttttctaatgaaagaagttgatgtctaatgaccatatattggcagtaatagacacagagtctgaatcaggaataggaaaagagaggcaataacgtgtaacattgggcagagtgtgtgctcctgctctgctcttctctaacagcttctttcctgactgttctttgctttgtccgaaagaggtagtctctctattgtcaatgggctctgtttttggtaatcttctcatttgttttcttctagtgagtcctggctaccatactggctaaaacaaaatatgctcccactccattcctatccatgacttttattttagcctggaggttcaaatctctaaggacattttgacttttatatttggctatcagtgttctcagataattcaagacaaatagtcacttaaaaattttttaatgtgctatgaaatgatctactgtggagttttatggaggaaattcacatatacttataagaaaatacagaactttaagtaatttagaggcatctgtggagtgaatcaggctcttcctgtggcctcaactctccttcctttccatactttttcacttcagcttccttgtgcctggctctggatatgcacttaactataggtcagaggtaagatttgataagcagtgttcttaggagattaagttatgaaacttaactcatagggaaccaaacatttgatttaggaagggagctaactgcctaggaggtccttaggtgttatttatgctagaaagcaaggt

SEQ ID NO: 73698 - DNA, 1078 bp, Homo sapiens
ggaaaatctgtgaagacttagagagtgggtggtgtcagatggttcacaaggagctgatgaatgctaggccttgcggataggagtgtataggagcattctgaggcaggagctggggatgtggccgtggctggctggttaatgagtgcactggaccggtcagacatcctgggttcaagtccttctaccactagacctgttaatttaagatgaggttcttccctattaactcccatgtcacattaaagttatgaatagtaaataaaatgtttatagaaaagtaaaaaagctttctaaattgcaaaatcctatagagatttgaattgttactctcaaattaccagtcttagaaatcaaaattttaaaaatttgtgtacaatttaaaactgaagagcgtctgaagagatgctgatacttacccatttttaaggatatgaaatgacagcagatcattttaggatgaaaaattcattcccctttcaacccctcagaaatgaatttttagaatgattatgattctcttcagcttttctaaaaatttgtgagagaaagattacttctaaagaactgggtagtaccagctttttgtttggcttcattcagacatcacatttaaaaacaaacaaatgagaacaaaacaaaaaaatgtactatgaatttttcttcctcctttcttttgagacatatttatcgagcacctatttggatgccagctcctgcaatggggatcaaaaataatcatcattcttgcagtggtgcagataaccacattaatataaattgagtcaaccctctgtttccaagggtttctcatccacaaattccaccaaccgaaattgaaaatattaaaagaaagacaacataaatttaaaaatacagcacaactatgtatgtagcatctgcattgtattaggcattatatgtaatctagagatgatttaaagtatatgggaggatatgcataggttatatgcaaatactacatgctactgttttacataatgggctcaagcatctttggattttgatttgtggtgggagtcctagaaccaataaccgcaaatactgagggattactgta

SEQ ID NO: 73699 - DNA, 1055 bp, Homo sapiens
tttttgctagttatagatattcaaattctaatagcataaagcatttttttttcccctgggatgttatcgtccctaagttttacatgttttaaactaagctgtaaatttagcttgaacaattttaataacatttccaaagatgtatcttaaaaaggaatttaaaagaaatactgagcttttgaagtcaaacacaaccccctttcttacaaaagcagtcaacttactttaactgaacatttctttgtcctgaagttagaaataacttcagcaaaaatttctccacagggttgatattttaatgatgggaaccttaggttaatatgttcattttatactagtcgtttatagtcatttgtgaatggaatggtgattgacaaatacatttgctttaatgtggagctggactataatatatatggatcaacttcaggtgttcatgtctgtctgttctccatgtcgagtacgattgtaccttctcttccctcctgcactgctttttgtcgtggatgaccaggctgtgagttcttccagatcaaagatcatatcatgttgtgtctgtagccccagcatgtagagcaatgctaggcagcagtatgtggttaataaatgttggttgaatgaatacatgattgactgaatgcatgtatgtctaacagtgtttgcaactgacagcctttttgaaaaaattattttgaatagttataagttcacaggaattccccctcccattcctcagacacaggagattccttgtctcctccctaccagttttccccactggtagcatcttacatgacgtaatacagtgccaaaactaagaaattgacattggtataatccacagatcttcttcaggatcactgactttacatgcactcatttgtgtgtcctttgtatcagttctaggcagttttatcacatgtattgatttgcatggctaccaccagaatcaagataacagatcttgtgtatgtggggttccatgcccacaaggcttcctgtgctactgttttgtagctaaccctgacccctcataacaggattttaatcatcct

SEQ ID NO: 73700 - DNA, 1616 bp, Homo sapiens
tttttctgaagaagttgctttaaagctaggatgtgaaggaggtgggatttctgtgaggtatttgaggtggaaggagtgatgtgagcggagtgctaaggaggaaaggtgtgtataagtagtctagtgtggttgtcagctaagatatctttgtggggagaaagaattttggagatgttatttggggttgtattgtgggtttatttattgtcaccctagacaactgttgcggcaatgcaaatggacaagaagggatcagtttgagaggttttctcagatagaacttgtaggacttggcaactaatagaatgggaaaggtctgggtgaaggaggggtcaaagatgatgtcaagcttttaagttgagctttggagagggcagatggaaatcagaaaagctggttttcattctggcctgctttgcagaggcaaggattattgtgagagttgttatgaacatttttgacttcctcagcttcgggaatactgttttgtatgactatattatatgtagggtgtgtatttaagcagaggggatgactccctaaaggaatcatggagaaaatgcctgttaacagctttcctgtgtaatgcattcattgtgtctaagtgagtttttccaagaaccttttagtcagtctcaagttgtttgaaaatggaaaaggtgagaatttgtaggcattctgatgttggcactgagttttttatactggaagtctttttcattcctgaaactgttcttgatacaatggaggctccccaggtcttctggaatcccaatgtcccaggccggggctgcagatggccagtgcatccactaggggtgtcagtcgtcaggagtggtgcctggtctgcatagcacagtaccgtattccatagaccagcagcacgagcacactttttctcttcctcatagatgccctccttgatggcatgaatcctgtctgtctgtgactgttgaatccctagcacctggcattatgcctgatacatgttagactaaaaaaatataaatgaagtgataatgtgtttttcccttagtctgtggctatcacatctgtcctgtttattaataaccctgtgatatacagattttgaattaacagataagttttgaaagataatgtagtggccatttattagggaaaatttgaagaaagggtcctatatatgtgatttaccatttatatattttaatgcattaaacccacagttgaatactttcatctagattgtctactaaccacacttggtctttgacatccatgagttggtgttcgagcaagccatactttttacattgacagccgtaagtcactattttatactgaattttgagcaatagctcatgtgtgaaaattgaggcatgacaggacagtgttatgtgtcagacaacagtttagtggagtcagcattaccatcttttgtgtctgtcatcttgaatgcagcactcatccaagctgaggctaaagatgtgtgaagaatttctatctttatcctaattgtattacgcttttgaaatataacattgatatttcattttttatttccccctatttccagaagtactgtccattttgtaataaatctttaaggccaaagcacaatatcattaaataaa

SEQ ID NO: 73701 - DNA, 1052 bp, Homo sapiens
cccaggctggagtgcagtggtgctatctcagctcactgcaacatccacctcctgggtccaagtgattctcctgcctcatcctcctgagtagctgggattacaggtgcctgccactatgcccagctaacttttgtatttttagtggagatggggttttaccatgttgggcaggctggtcttgaactcctcacctaaagtgatccacccacctcagcctcctaaagtgctgggattacaggcgtgagccactacacccagccgataaccccttcttcatactgaagttatgactaaactatacattacagaaaatgttaatagcaaacacttgtatagcacttatttagcacttatattttttagatgtttatatgaattatgatcttcattttgtagatgaaattaaggagcagggtatttatatagcttgaataccttcacacaataatgtagtagaggaaatattagaccaaagcattctgactcaggagattgctctgaaaactttgctattctgccctgagtgttttcttttctgttttgaaggggtgtgtgtgtgtgtgtgtgtgtgtgtgtgtgtgtgtgtgtgtaaatcagcgatctggggaatttcatagctatatctttgatttttaatttctctttcattacgctgagccgtggatgctggtgattttgatgagttttaagaaggaagagttgctgcagcaaattgaactcttaaaagcccccatcctcccacttatcaaaattttagctctacttacacaatgcttgaatttgagagtaagtcagcatcttaacatgaatgttggaagccagtttcatttgataaatatttattaatctcatcctgtgagccgtgtcttatctgaaggacagtaatcacaaaaagagaaataaaactcatccctgaactgtgtgggacaaagccagtcttttgatatataaatacttccataataaatacctacatgagaaactatactacagggcacatgaatggtgcaaaatattgtggggattcagagatggtagataatatgggcatg

SEQ ID NO: 73702 - DNA, 1038 bp, Homo sapiens
tgtttttgagatggagtttcactttgtcacccaggctggagtgcagtggcgtgatcttggcttaccgcaacctctgcctcccgggttcaagcgaatcccttgcctcagcctcccgagcagctgggactacaggcgcccgccactacatctggcaaattttttgtattttagtagagacggggtttcaccatgttggtcaggatggtctcgatctcctgacctcgtgattcacctgccttggcctcccaaagtgctgggattacagacgtgagccaccatgcccagcttgccattggtaactcttttagttgacttttgtatctctctgacatatctcccttattgtatgtcaaacatttttttttaattgtacttctctactttctggtactttcaagatgtgccatactcatacccatacaccatcttatatatctcctgcctcagtcctggaatcattcatttcatcacagagccctcgttcctcttattgacaaatggtattagaaaccaagatctgggtgcggggtgtgtttgttgccactggggtgttgcaaggcaggcatttttattatcccattttacagatgaggaatgggacatctcaaatgacagtgctagtgaaggaagagggtggggcggttgtggtcagtgtgtggagtaggggtcttgtttctgggtagcttccttttcattcctcttcagtgtgcagagtttttctctctcactgatacttttacaaggtagtttatattcctgggcattgaatcattcatctaagggcaaggtataagaaagtttgtattaatattctgactggagaaattatttattgaccatatcattctttttgttttttgcagctttgccagcaggcatagaaatgaaatattatgtattaaagaatattgtatattgttggtagcaataagaatagatgcagaattctctgcaagattgttagtaaagatagaatgctgtaggagtgtttaatgaattgaatgctctcccactcttctttcaacccacacagcaatt

SEQ ID NO: 73703 - DNA, 1067 bp, Homo sapiens
taggctatcaaaatgtggcagcaatacagctgctggttgcctcaaatttccatcataaagtttttttttttttttatttgagatggagtctcattatgtcgcccaggctggaatgcagtggctggatctcggctcactgcaagctctgcctcccgggttcactccattctcctacctcagcctcccgagtagctgggactacaagcccccgccaccacgcctggctaattttttttttttgtatttttagtagagacggggtttcgccgtgttagccaggatgctctccatctcctgacctcgtgatctgcctgcctcggcctcccaaaatgctgggattataggggtgagccaccgcgcctggcctggctttttaaagcaagcacttttctgataatttaacacttggcctggtcacctatttcctaaatcaatcaaggtgactaaggggcaaatcctcacagctgttaggcttgggtcatatgaccactgctgatgtggaggggaggggacatccttacccaagcatgtagactaagtggcatttctctggcatagaggaggactggttggagaggattctcggaagataaatatacatccagttgcattatataccatttagatttcataatgctgtggtttaaaaaccaatatatatgttaatttcttgatttttttcctgtttttcagtagttctttcctaagaaaacaatgaatattaaagtcaataatttataggagaatcaatgatagtgaagagataaaaaataaaatttaagatatataatttggtattttaagtcttatatggtatagtaaggaaaatgcaaaatattctttgcctttataggacacagtagtaatatcaaatgaaagtatctgtggttaaaaaaatcataacatttgtctaagtaatgatcatttatgttagttataatgaaacattccttcttagagtggttgcagtgtatttatgcaaactgtcacaactacagttaagaaactaataatcttatatgattcacttctgattgtaatctcttacagtaactctcttttttcta

SEQ ID NO: 73704 - DNA, 1624 bp, Homo sapiens
gcctttatgtggcctgtttttgtcaagttttgcaggatactcagtgggccctatcattctgtaaacgtaagtccttcctttagggaattaaaaacaacaacaacaacaacaacaacaaaaccaccatcaccagaaatctcatggtatccaaattgattcatttactgagttcagatggcaagcaacagtgttaggacatgtcagaggattggggtactgtttcttccaaagatactattgcagaacttactttcctcttccttttggttcctgagttcggagaatgagaatttgaagagcaagggatcccctatttggttgatgctgttcttatctccattttctctcttctctctttagctctcattctcaaatgttggattatcccacgctggaattccaattttattattattttgctcctgttttcagtcttgttctgctttctgaaagaccacatcatcattgtctttttgtcttcttatttattctttaatttttactatcatatttttaatttctaagaacattttcttgttgttctgagaataacacttttttaatgacgtcctcttatttggtgagtgcattaataatgtctgtaatctctgtgtggggcactaagcagcttcctgaaagctctgagctagtctgtgctcttctcagcagagtcacctggctgggctattatgtgttgcacccttgatggcaggaactgtctttaggcttgagtctagggctaattaggtcttccatagaaaaacctttcaagcttctgcctaccattgtagaccaggctgccagcagtttgcaatttgaatgagaagaaactggacatcttatcactctttgttccctcactctgttcttggtatgattttctcttgtacaagatgtctatggagtctctcagtggaggccctttgtttgactctgcactagcaataaactgctagacttctggggctgagaaggacagtcctccagctgtgttcacgaggatatgtggaaatctaactaattctcaagtggactgtcaatcagtcttcctcattttagctagacttttaccgccatttctggtcgtagggagctgagagtgtcccagattctgggaggttttgttggctgtgtcaggttgcttgttatttttcttcacaattggccggcctccctcattcggctttccagggtctgccaaatcatttcttccacttactttttaaccttttcagaaatcttgtgcttattgacttatctcacattctgtatctaaagaaaaatctattccatcttactttatttgaattggggagagagtgcaagtcaaggttcataatcagtctgttttctttactcagaagtcatattctagttggccatttaagtttccctttctgtcagttatttatgttttaccagggctttgttgggtttcttgacttatttccttatctattccagaatttaattccttattaaattcacattcttatgttagcaactttgggccacatgataaagctctactctcaatggtctaaaatgtgaaattaggtgttaatattctgttctctaagtatgtgtcattgctgtatgggattcccaaaacataaatactaca

SEQ ID NO: 73705 - DNA, 2114 bp, Homo sapiens
atcttttgtttctagagctagatggattttttcgtttttcttttttaacacaaaagggtcagaaatgcaaaggatgccctttgctgacacagctctgtaagagattacaagcaaaacaaagacagatttatagataatttatcagcatattgaagacaaattgaatatcatgctgcacagtaaattacttcagaacaaccccaaagtggaagaaaatacttgtaaattgcatttttaagcccttaagaacaagttctatcacttgtttaaaaaaattgttttgtaacatgaagtgcattttaattgtctgactatgaactcttgccttatgggctcagtcactaaagatgcttaagagaaaagcataaatgaatacttgattgatcataaaatcatctacaggatgctgttttaaccacttccgaaacgatctaaaagtgtacacagcttcatccctttagagacttagaaaaagtccagatacatcaaccaaatagagacaaatatagagaaaatgagagactaagttttgagtgtaagaaattaactcattttgagcttcactgatgaaaagcaagattttaaaacaagaggtgctccatgatgagtcgttttttacaataaggaatgaagcaaagcagacactctttaacatgggtgcactcaggggtcagggctatgaaagctgccagaattcaaccctgatttagcaatgagaagccagagacaggaagctgccttgtttattagaaatagggtaaccacagtctcaagacaactgaggaagactctgctggcacttttcttctgaaagcaagcactagtgcaaaaaaaccccaccaaagtatgtagtataggtgtttatatgtgactaaggcttatgtattcatatattcttttgtttacttcttaaaatttatggttagaaaggcacaacttttatattttttccagttaaaagtttcagaaagctatcatataacgtcaaggtataaaaatcatgtgtgaccttgatttctacaatactttacgtattcaaagtagttgaacctttatttaggaggatgcttccttcaaattaaagacttttgctcagagagtgccaccatgtttcagtgggaaaaggatcagattagcctcgggatacttggaagttatggcagaggttgcagagtaatttttcattatttgctagaacttgggacatcattgggattgtttttaatcacaggtgaagaaactgagaccccagagtgttttttttatctgtggtctcacagtctaggaagtatcatggaaattagatggatgagtctaattgaaagtcactgtgtgcaataactggcgtgccactttagagggcaattaggaaaaactgtagtatgcttatattaaatttttctggaccttgatttcatctgtctttggaacttagaagtttcttaaggatcatgaaatttgtcttagtgattaaaagctaggctccagaacccacctatctgtgtttgaaacctagttcctccctcagtgttacatgacctaggctaagttacctaacatatcagggcctcagtttcctcatttataagatgaccttattgatagaacttaaccttaaaggattgttgtgatgttttgagagaatatatctgaaatgcctcatttggtacctcctacataaaaagaccaaagttaatgtgaactcttgctatgatgaatgttactttattgtacaatgcctcaaggccttgattcgatagctgcatttttgtttgtgttgaaagtattggaccacacatggtaacccagggaccaaggtctagacttagcccatgagatggtactattcccctcacccttgtctactagaaaataatttctcttctggtaggaaataagtgctctatcaatagtgaagtgctttttcaggagtaaagttcaagaagttaaaacctgtgaatagagatcagtgaacattttagaaaatagaaaacgaccactcctattcaacagagtactggaaggcctagccagagcaatcaggtaagagagaaataaaagacatccaaattggaaaagaggaagtaaaattatctctgttcactgatggcatg

SEQ ID NO: 73706 - DNA, 2189 bp, Homo sapiens
attttggtaactagaagagcttaatacaaacttgcctactttcctgtataccccttccctgacatcatttataaaaatgttaaataagaccattttgagcacctgtctcctggaagtgtgcatgcttatatatctgtttctctgtcatttatccactgctttcaccatggcaaaatgtaatttttaaaactaaaactattctttggttggttactgtctgttgattgctaccaagtagagtgagtgctcaatcatatcacatcattaattcctgtggtttttttcttcaatatgtagtttcttcaatacttgaaaggcctttattttgaacattttgtggataggtacctgattagcaactgcatccttctatatagtgattagttgtaattcaggttttacatctgtgccaacaatttacacatttcctcttgagtttttaacactgtgataatgccaaacaggtctttgcttttgttatatctaatgtaataattaggtttagactcttccttaagttggtaattgtttgatttagttcctgcaatctgtttccaaagataacttagtatttacaatatttttaatacttcatagagaccaaggacaaaggtattcaatttcatatacagactctttttcatctgatgtacatgctttgcagaaaatctcacttcattttcaagggttgtatcttgttaagcaacattttttattttctttggaatactttgcaaggttgttcaaattctttcttggcaggcctgattattagtttgtacttgacctgctaaactttgagggttttcttgtaatccttggtaggagggctttaattttccaatttttgaaaagcagttagctatgtgtgtccctgtccacactgtccccaagcccctgcccagggcctgatctttttgatccttagcagatgtttatcttgggctatgggtaagttctttaaaatggtcttcaaagtacctattgtttatttgcttaaagctgtatatttcctttttaggaataatgccccatttttaagagttgactactagtgagctttatagctcccttcgaaggccagagtgatggtgctgcccagtttgggaggactatcaaagacagctatctttgatatttaaatgttaagcaaaatccaggaagagatatatattcacatataacatcaccatgattattcttggtgttttatttttatattttaattaaaactataatttatctaaagggctcataaaagcagttcctcattgtttggatcatggcttgctgcagcatcaaccttctaggcaggcccaagtcgttctcccaccttagcctcctgagtaactgggactacaggtgcgtgttggctaatttttttgatttctggtagaaacaaggtctcgctatgttgcccaggctagtcttgaactcctgagctcaagcgatcctcccacctcagcctcccaaagtgttgggattataggcctgagtcaccaggcccagcctacagaggctctttcaatataatgtatttacgagttggtaatggatatatttaataatgaagaaaaactatggataaagaaaagtgtgctggacttttagagcaagtagcttaagaaaacaagtgttcataatattcaccatctgcttcagtcgactttttgagaataacatcgtacagtctgaaacccacagatgttgggttccatatttcctcttcatagtcttgtcttctcagtgttgcctgcaggtccacgggccttactgacctgtggatgtggatggagcatataatccacaacaatccacattttctgtttatgcacctccctgctcctgcaggacctctagcctccataaagtctccctaatctttttatgtccgcgtccccaggaatgtcttctatgtacatgtgaattactgtatcagctagttaccctgaagagtcttctccatctctgtctactgcttgctccccttcttcataaaacctctgtgaggggctcatgattgagattctaactccagttagaatcctcatgtcacatgtctagagagatcgttcagagccctctacgttgccagcccttgaggagaggggaggatgttcctcaggtcacactttgtagttgcggtcccaagccacgttgctcatgcacttccctcacgtcactcctac

SEQ ID NO: 73707 - DNA, 1039 bp, Homo sapiens
gtaccatattccagacactccattaagtgctaataggtacaaaagaaatgtatgataatatataatcacttgagttgtaataaaggtagaatataatttgaagtgaagccaaatggcattgatctgccttcatctatttccaggtaaatttgcatttctagttaaaatttcttttgtagagagaacttggaggttcataaggaggtttggatactaccccagtattctatatagtatgatgtaagtttctgcggtagattgtccagttgttcaggtgggggggttggggaggaaaatttagaagatgctattcattacattacactaacactcttctgttaatatgtggagaattgttcattctttcccattggtattgatttaaaataagaaatcaccatacacagtcagacccatgaccaatcagttttctcccctgtagcttcatgatggggttgcctctttaacgtagttcactcgtatcttaatttctttaagctactacttgtttctttgaatccatttcggtttgccattcagtcatttcttttttttcttttttgagacggagtctcgctctgtcgcccaggctggagtgcagtggtgcgatcttggctcactgcaagctccgcctcccgagttcacgccattctcctgcctcagcctcccgagtagctgggactacaggcgcctgccaccacgcccggctaatttttttgtatttttttttttagtagagacggggtttcactgtgttagccaggatggtctcgatctcctgaccttgtgatccgcccacctcaccctcccaaagtgctgggatgacaggtggaagccactgcgcccggccccagtcatttcttaaaacttgatgaagttttaaaaaattttagtcttgcggattataggtttaacacctgccatatgaaatagcaattgattcattttctttatattatttgtatttgtctcaggttttaataaaatactcctgtgtgtactgttgccaggatgagatggacaaatggtgttataaaat

SEQ ID NO: 73708 - DNA, 1032 bp, Homo sapiens
ttctgcaggttttagaaccctgtttggcctcttggcagatttccttctctgggagcaagaggacacatgctgtcttcctgtaccagtttatcagagctcactgggtttgttcatccctcctgtacttccctagagttgcttggatgttttagagttgacttgacataccgaaaaagagtgcttcagagtagcaaaatgtgcacatgcatctgtgcatgcgtacacacacacacactctctctctctctcgaatgagaaaacagtagcagaagggacagtgttttacattgctttttaatcagtgattcttttacttggttatttctagctttccagcctctcagcctatagaaaatgtcttctaaataagagtaaacaggtatagattgctgggttatgtatatttctgcagtgcttctattgaaaatataaaatggggcaagaaagattgcaaagcttattaacaaggcattccttctgtttgagtctttgctgttactattggcattattaaatttatgtatgcgaccatgcataatgataactagagacatagcatgccccgtgctcttaggaaaatattttcaaaagtaaattcagcttttgttttgtaaatgaagtgattggagtttagtctttggggttcttccctcacactgcattcccccctcaatccttatactttgtatttgggccatttgactccttattccattttgcaaatagtgtattttgtggacatgtgtgttggtgtgtgcctgtttaaaaaatattttgtttggtaaccctttgggtataccaatggagcttctgtgtggccaccactagaacaaaacttcctaatttcagtgtcattaagtcagcagctggtgcagctgaactcaaagaaacaagcatagttattgactgttttctctaaaaacagcctgaacaaagcatttccttaagcagcattgagcaggatttagaacttcctatgcctcaaaaaagtcttagagagatttacggaagtacaaaggtcaacattactgc

SEQ ID NO: 73709 - DNA, 1040 bp, Homo sapiens
cagtacctttacctactccccagagattgtaatttaatgggtaatttaatctggcatgggacctacatgtcaatagttagccaatttaagtttcctgtatgattctgatgtgtggcaggattgagagccattgctttacattcttgctatcagattttagtaacagaaacctgcagcttattattatttttttaacctagcttaccttttatctgtctgatccttcaagaaggactgattaaaccaaagctagattagaaaatggagaaaaggaccctgactaaatcactggccagaacctttgaagctaatttgccatattttttatcttcacatcctcagtgcttagtaaattcctgctctgtagacgttccttccttcccttccttcttgtccctttcttcctttccttttattccttccttcaacacttattaagtgcctactgtctgttccagcactgttttatatcctgaggatataaatacaatttggaatccttcttacatttgagttggcagaagatgcctaataaatatttgttgaattgaatagaatcacagctgagccctcttggcatactgctgtgctgtgtgcttcagttcctttgtagaaattatgcctttttgatatccaggaacagtccaagcattatctgtcacttcctcatttgtctgtctttttcccctttctagtcaggaacatgccagctttagccaggcttaagccatcaggatgtagttggttaagacaggtaactttggtatcccttctccatgaatcctccataatctgtacataatctgtacaacaaacccccatgacatgagtttacctatataacaaactttcacatgtacccccaaacctaagataaaagttaaaaaataaaaaggaaattcatggccaatgtgatggtattaagaggtggggcctttaagaggtgattaggccataagggcctaatcattgatatccaggaacattccaagcattggaatggtacctggtacctgggatccactgaattatggagtttt

SEQ ID NO: 73710 - DNA, 1044 bp, Homo sapiens
aggtgggatctctaagaggtaattaggccatgagggcttctcctctcatgaatgggattaaggcccttataaaagaggcttcacatagccttcagctcctttgcccttccaccttccactgtgtggggaacaccacagtgttcctttcctccaaagaatgcagggtcaaggcaccgtcttggaagcagagaacacccctcacctgtctgacaaaccttccagccccttgatcttggactttccagcctccagaattgtgaggaaaaaaatttctctactttataaattacctaggttattttgtttttataatctaggttattttatcatagcagcacaaatgcactaagatgtgcaattatgaaaacagtcgtattttaaatatagtgaagaaagtaaatctaccttttaaaattttcttttaaaaaatataatagctttatcaaggtataatttatgtaccatacaattcccctatttaaaatgtacagttctttagttcttaatatattcagagttgtgcaaccatcaccacaattaattttagaacataagaaaacctacttttaaagtagtggtattcagggatatccggcttgttttcagtttttggctgtaaagagcagagctgcttttaagaaagtataggtaattataacaaaataattaatcttcaagttaatgtcagaattgtgtttgaaaacctttaattacactgtaattatttctcagccatttagagacactttctgctggtgtgctgggctgggaaaattttactagatgtttaaaatgcctgtcttgtgtgtatggctttttgttgttgttatatcagtgtcttactgtttttccacttttttgtgtgtagtcagagaaacaaagtacattgatgtttgtttaaaggtatgagtttcctatattgtgggaggagctataaacatacatgtggttattaaatgtagatttatgtttttgcttattaagttcacagtggaatataggcagaaaactttacatagcattgtttaatgatcagtggttctc

SEQ ID NO: 73711 - DNA, 2054 bp, Homo sapiens
ttttgcaaccatcagcaccatacatgtccagaacttttttcatcttgcaaaatggaatctctttacccattggacagtaacttctcattcccctcagcccctggtacccgttctattttgtgtctctacgaatttgactgctttaggtacctcatataagtgatttcttctggtgactggcttatttcaaattttaaagaagtttgaaaataccttgtgcaacatttgaaaaatgtctctttgatagacatttactgagtgcctactgtgggaagagaataccgtatatcaagtctgggatgcaggcatattctctcccactctctcctgacctgcttttaaacgtctctgaaggcgatttggcattgtctaatagtttaatggatagagtttttgtctcttatttgcacttaaaataatacggtacattttacaatctctaggaactcatttccagtgacgggggtaggtggttcctgtgagggaaaatgattgtctacaaaacactcatttagggatacccctataattcccaggctataaatgttttaatttaactcaggaacagagaagttatttggtatcattaatcagtacatttgaatcattactctgaatgattatgcttcatttattttgtgtcagaatgttttccacacaataatagagaataaaagtgcatcattaattacagttgagcagctcacacaaatgtgggtgtatacatatatttctatatcatcacacaattatggaaatttgaaatttaatataacaagtaatccttacaaaacagtcaaatatttaattaagtaacagtgttaaatgtatggccatttataattatgccttgtaacagttttaactaatgcttgaaaaaggttggtgaaacatttccacaagcacgtgtcttctgtttctagatgaaaacatttttagtaatatggtttttgtcttttggggtaacagttatgtgctttggagaaaagtacaattttttgaaatgggatcaagtaatttgcagagcttcactgtgacaatttatgaaagaggagactaattgtaaaaagttatacttctatgcatggaattttggcttttctccttgactgtaaatgcgcactcctcctgattaagatccactgtgtaaatctgctcttgtaggttccagaactcccatgcccctcagtaactgctttccttcagtttggctggctgggactcttgtcagaaagccactaaacaaacaaacaaacttcacatggagtcgctgcaatattacaaaaacacactgtatcttccttggtctaaaaggcagatgaaagaagccaggccaccagtttgttacatcagctgcatttattctccagagtgaagcggaggacttaatttagaagtttaataacttcttaaaagacaaacacatctccctcttatagatgagaaaatacatagacaagaaaaattaaggcagtttaactgatgctacaaggaaaattgggcagagaactaaatttgggagattcctggacaaagtaaccatgtccgagaacttgttctttctctttttgcaacaaagccaaaataatttcaacactttttaaagccaccaaacaattttcaaatgatttcttaaacactgcttcagtttattctcagaatgaatttgtgatttacagtttttatcaccattttgagtcaattgtccaaggttactcatctcacaaatgatgggggtcagaactaggatttgggacttcttgctcttaggcctgcttcattttcggtgcatcactctgagtgattcactaacttaatcacatttcatcccctgccccctaattattatactgttaattataagtttttaatgttaacttttatagtttcaaaattttgctacaggttgaagccataattcttttagtatagaatatacccttgagtatagaagaacatgaaaaagaagtgagatttgatattaaaacatgatttaatattttgtggagtactcatagtccaaatacagtgctgtagtttgaatgtgtcccctt

SEQ ID NO: 73712 - DNA, 2078 bp, Homo sapiens
tgatcctcccacctcagcctgttgagtagcggggactacaggcacgcgtcaccatacctgggctaatttttctgcactttttagacacagtgttttgccatgttacccagtctggtctctgggctcaagtgatccgcctgccttggtgtcctaaagtgttgggattgcaggcgtgagccactgcgcccggcctcaatacatctttgatggaataaattggattggatttgtctaaattaccattactccttataagacagataataatggatgatctagagatgatgcctgactgtgggccccacgcttttaaagccaggatgtttgagctcactgtgtactttgtccaacccatttcaatgttgtcagataacccaaggtaaactttgtcaagtcactcttccttatttttaaatttcatattgtcacctttgttgaaacatttttctttattttgcctgtacttgttttgctttgcttaatgtagcaacagtaattcttgtattttcttcttttcctccctcagaatttttaactaacctaactcttgccggaaggtctgtcagtgtgcctccccttccctgccccgggaaaatgctccctggctttgtttgtttaatcatggaaaaaatcctttctttcttttgaagttatattctgtgcttgctaaaggtccagttaaatcacaagagataaaagttatactgacaaccttggatgttccctgcccttttgccagaaatagcaaactagatactcatcttatacaaaaatatgtacatgttcatcttcactaaaaacaacttgtatttggtctttcttagcagagcagatgtttaagtcagcacacagtgtaaaatctggggaatagtggaggtgagggtgtcagaggggttggaaaaaaaagggttggggagaaccaagtgtggtgctaaatgaatggagaaaattgatagactattgatagaatctttagtttaatatcacataatctcttagctacctatagtataagtagtatagtatagtggagtagctatgaaagctcaagctatgttttttagctcacttatattttttcctaactgggagaaattttacatgtgaaaaggatatgtgtggattggagagaaattgtgaaggctggatggcagttggaactcctggggtcaggtgatcctcttgcctcagcctcccaagtagctgggattacaggtacgcaccaccacacctggctaactttgtttttttttttttttaagagacagggtcttgctatgttgcccagttttgtcttgaattcctgggctcgagcagtcctcctgcctcagcctcccaaagtgctgggattacaggtgtgagccagcttgcctggccgaaaatatttttctttatgtgaatttcttttgttcttgaatcaataattttgcagcaaattacttttaattaggtaacaattctttggttttacattggctcttttacaagctaatgggcatgtacagacatttttcatttttagaccaacccattgtttgagggggctggaacatgagacactatagttgtctacgtagttgaaattgatagttttaataattaaataaggtgacttattttctgacattctctggcacgagtaatataggagaataggttattgtaaatctatggaaggaggcgttccatgcctgtatgcaaagatatatatgtgtttctgctgttgcaataaataattcaataaaacagaatagattttattgagcatggatcataaactcaggggtagggatcagtgtattctagtgcctaggatgatgcgttgctcatggcagatccattgtctgttgagtgaatggttaagttgataaataacatgtctactgattgcttagtaccatgtgatgagcttcaaaggacatagaaaaaaatgtaatactattaagcatggtccttgaggtaaattaggagtagaaacaaaaatcagtacatatttagggaatgattagtcctgaaatctatagtacttaaggtaatttttataaaagacgagatgaaagaagcatcagcagtgaaaa

SEQ ID NO: 73713 - DNA, 1028 bp, Homo sapiens
atgcataacctccttcattatcaacatcccctatcagagtggtacatatgttacaattaagtaatctacattgatgtattatcacccaaaataaatagtgtacattaggattcactcttggtgttggcttttcatagcttttagacaaattcacaatgatacataaccactaatacactatcatacagaggtttttttttactgccttaaaatcccctgtgctcttcctgttgatctctccctctccctaatcctggcaaccactactccttttacatttatagtcataattgctaaaagtttagaaacaaccaagatgttcttcagtaggtaaatggatgaagaaactgtggtgccttgagacaatggaatgttattaccactaaaaagaaatgaaatattaagccatgacaagacatagaggaaacttacatgcatatcactgagtgaaagaagcccatctgaaatgtcttcatactctatgattccaactgtataacattctaggagagtcaaaactacggaggtattataaaaagatcagtttaactttttgttacttgtggttttggtgtcatatctaaaaatcattgccaagtcataggtctttaaaatttacccttgtattttcttctaagaaatttattgttttagttcgaatgtttgttctttgatccatttttaatttttgaatatgttatgaggcaagggtccaaagtcattcttttgcatgtggatttccagttatctgagctccatttgttaaaaagactcttgatttttcatacagtgatcttggtactcccgtcaaaaatctattggccatagacacatgagctcatttttgaactctgaattctgctccattgacctacatccttatgctaaaaccacactggtcttgtttcttgatgctttgtagtaagtttcgaaatggaagagtatgagctttcttactttctttttttttttttcaaggtagttttggctattctggatctcttgcaatttctatacaaattttattt

SEQ ID NO: 73714 - DNA, 1724 bp, Homo sapiens
gtgagctattatcacaccactgcactccagcctggatgacagagtgagatcctgtctccaaaaggaaaaaaaaatacgataaaaaaggcactacaagtattcactgtaacaaaaactgtactgtctcagaggttttattcctcgaggattctaaaaaagatgaggtttcactgaatataattatattgctataaacttttgaaattttatatccaaaatcccatgtgggggttttaatcatatcttgaaaaagacatgatctgaaaaaaagatgactgatctttgttttgtctggagacttgaaaaatgtgaacttttcagtctggaggatatatgatcagagtccataaaatgcagactttattgtatcaaaactcagaaatctttattagaactgagttttcccatgaaaattgaaacacattaactataaaacaagtgaaaggaaataatactacatacaatgtgtaggataactgtaaaatatattacttacatgaggcattttatactggaaatatgtagtttcaaaaatgctttacaaatgaaagatggatataaaagaggccaggcgtggtggctcacgcctgtaatctcagcactttgggaggctgaggtgggtggatcacttgaggtcaggagttcataaccagcctggccaacgtggcgaaaccctgtttctactaaaaatacaaaaattagctgggcgtggtggtgggcacctgtagttctagctacctgggaggttgaggcaggagaatcacttggacctggaaggcggaggttgcagtgagccgaggtggggccgctgccctccagtctgggcaacagagtgatactccatctcaaaaaaaaaaaaaagaaaagatagaaaagcttttctggttgtggggtggaaaggcatttactacctcctatgtgccaggcattgtgattgatcctagagattcctggcccagttcttttgcatttgaaactcatgatctagtgagagttgataagccaagtagtaatccatggcaggttacatatcaagaaaatgatgatatgtaaaggaaaatgcacagtgctatggaagtccattataccatggatcatttcttcccctccacaaatgcatattcatatactttttaaagccaagaactattttctaaattcctgcagaatgtaaatgttatagttattattaataaaaaccatcgttctttgctttctcggccaccaagggacgaaagtatagctaattcaagtagataaatgagattttaaaccttttctactgtgtctgtatatatttgtgcatgtatatgacagatatttatgagcttagtctatatataaggtagaggtgggcacctgtagtcctagctacttttgcccatctgaaatggctttaaaattatatacttagcatgtatcaaatatactaatttaaagtgttgaatacatgtttgtgttgtgtaaatatgaactagctattgtatttttttttttgcattttactgatactcctaatgaactctgaaatagttgggaaaaatagccctttcctaagaaggaatgactttcaaatgtttgtggtgagtaacatgttgaagtcagagtggttgattgctatttaaaccaaagtaatgctcatttacattagtttatatttttgtttattttacttacctagagaaatgatctgaggtttaatgtgttgaatacaggctctctca

SEQ ID NO: 73715 - DNA, 1435 bp, Homo sapiens
tgcatggtgggtcagcagatgtacctataagtcaaaaggaatatttaaaaatatatatatttggaggagcagtttgtggagttggggtctgaagtgtggggaaattatgtgttgctgctttaggaaaaagttgctatgccgttgcagacatttaactaataaaagcacatgaacatacacacacacacacacacacacaaatacatatatatatatgtatataaaattgtattttcaagtattctgtgcagttaaatgtttgggaggatacctaaacgtgtgtttaaaatattgagatgatggtctccagtgtctgaatttggtaaaacagtgaatctcagcagcatatgaagtctttggatctttgggccagggttgtataccctacaatttactgtgatttaataatggattttagaaattcaagactgttttaataaactctgtagtcaagtgtgtaattcaaccatgttgtgatttgtgcatcagttttctttctgtatttgattgttgatatgaaagtcagagcaagcttaggtaatgtggtcccagcacagatgtacagtataaaatgatcacattttcagagttgaaaggtcatgcacagatgtttgtagaaatgacactcattaaactttctaaggatgccatgtccctttgtaacccctctaagatgggaactcaaaaaagaaaccttatacactggtcataaagtccttgagaaactacctgttttgttatctttaaacgtagttcttggagattctttagagacaaaattaatcctgaacttggtattttgtatttctttttaaattgtattcatatactgcaacgtgagctaggtcttttctccttattaagacttggaaactgtagttcagagaggtgaagtaattttaatttacccaaggggaaaaaaatttggaatttgaacttggaagtgtctgacctgatgtttctaacaaatccaggcttttaactcctttgtttcaaaatgtcatgctctgtgttgagcacataataaactagattataaactgttttccacctttttggagctctctgtgcaggcatttattctgttaattctctgtcacacctgagaaggagatgcagtctgagaaattggcattctatgtatctcccttctcatttcattgtgatattcaatgatactagaaggtaatttttttcttctagtaagcagtaaccacgttgtgaaccaaggataaaaggaaaatgacactggtagagttttctcgtcataggtattacctagtttcctaggaaacagaaacatgatttatgaatattgattttcaaaagcttaaaagaaaccctaggttattgtttctgccattaaaatagtttctctgaagagatcaacttacgtaattgaatctcgaccacattttatttagtgtacatcttg

SEQ ID NO: 73716 - DNA, 1038 bp, Homo sapiens
aaacagctccaaccgaagatatggagtttgcgcttcagaattcgctggggggtgtgcttaggctacttttaggagaatattagtgactgccagtgggcaacatatccctgctcctgtgacccgctctgctgtgttagatttagagtacctttgagggcattttccgtgctgcactgctgatgatatttcttggcagctggactaacatctttgaacacacacatttttgaagatcaaatcattgttttaatttgccaccatgagacagcttcaaatgatcagctacaaggatactcctattttaagaaatgttttaattatggaaatttttcaacagctgggatgaaattgtaaagtgtcctacagttagtttcgggatacaaattttagaaataataatgtttaaaattacttataaataattttaaatgtatagcaagttgtgtgagcagcacacgtttcgcatttcatcatgtttgctccatcacatacccctctctcccattatcattggtcttttaatgaaacatttgagaacaggctttagccatgatgcctgtcatccataaatactttagagtgtgttactgcccccctcaaaaaaacaggtgaatagagttccaagggaggaagtccatgttgatatgacacaaccatccaatccataaaacctacttagatttcaacaactgtcctaaagctgtctctttgctcttatggtggtgaactcatgcaataattatatcacagtcagtggtgacgtcttttcatactcaccaatctggaacatttcctcagtcattccctgtcatgtcctccacagtttttaagtgtgcaggtctgagatcctgctgtaggatgaccctcagccagtgatgatgttggagttttttttttttgagacagagtttcactatgttgcccaggctggagtgcagtggtgcgatctcagctcactgcaaccccccacctcccaggtgcaagcgattctcctgcctcagcctcctgagtagctgggattacaggcacctgccaaaa

SEQ ID NO: 73717 - DNA, 1050 bp, Homo sapiens
cacttatacatcgcgggggaggggggaacctaacccaattttggtaatgattactagtttaagtttcaagtatgagagcctatgccctccatattttatctcctggtcaccactctttattggtttgctattgtgattctcttttcccctgctgttctgttgcttcttaaaataaatataatgaatttagaagttgtcagatttaatttggagcactatatgtatatttatgaagtcatatactaaactaggaaaaagttttcttgatagaacattattgactcaggaaattgtatactatctcaagcgatattatattttcagtctgttacattgggcaatgggagtaccattaacagaaaataagaaagctgagagaaatgtgagggagcaggagaaaaatacagtgaacagtcacatctgaattgatcaagaaagtgggtccaggttattcaaaactttggtttttgactgaaactctgtgttttgaaggacagtctttaatgattcatagaacatgcaagttaagttttactgccttatgcatctttatgaatctcagtttatgtgaatgtgcagaaatgtcgagctgtacagttacggttgaataaatgtcagataacacagtgcatgagtttaatcattcactaaatatctctgtttccacagaggaataacggtgcactactcaaaactgtctagaaataaaatatacaaatcattgaaacaatatactaaaaacatgttcaaatgtgatgactcacaagtccccaaaacaccttatctgggatacttcctaatctgtacatgcttctctattgttgcatgggatgtgtgtttgtgtgtgtattttaatacaggataaaattttataacccattattcccagtggaaaaattaagggtaattatttccatgggaaaaattattcttatctttctagtattacatttgcttttcaggatctattacaatatcaggctttacttaaccccatagacttctaacaaaacttatcatttgtttctcaattactttgtaaactgatgc

SEQ ID NO: 73718 - DNA, 1093 bp, Homo sapiens
tttttactttctgctatgtggtttatttctctgccttttatttcaaggatagagccacccttaatggtttgtcttggctttccctgatttctagtttctaatatgtagtttatttctctgccttttagtctttatattggttcacatgtgtgcgcatgcgcacaaatacacacacggtgagagagacctcacatttaagtaagtccaacatacaatgatctaagaaagtgaagagttaactttcctttttacttttatttctgtagagatattgttaccttgaaattcaacctatttctttattttaacttagtgacattgctgtttcaaattttggttggagagtttggagtagaattgattgcatagggaccctaccctagaatagttagaaaccgaactgggaatacatgtgtgcctcctaaaggcatctactatggtctgttgatgtcccaccaaaattcattatgttgaaacttaatctccaatgcaatagtattaaaaagtggggcatttgggagcttattgggttatggtgctccacccttgtgaatgggattagtgcccttataaaataattcaagggagcaccctagccccccacatcccttccaccatgtgaagacaagcgccatctgtggggaatgggccttcctcagaccccagatctgctggtgccttgatcttggacttctgagcttccagaactgtgataaataaacttctgttgtttatagattaaccagtctaaggtgttttgtcatagcagcccaaaaaatgtaagacagcatctttaattttttttttttcctttgagctcttttgaattggacctgactttcttaccaagattttaccatcataatatagaggaagcataagaaagtctttaatgaattgtttggcttggctgtgggcagatagatttgagttactacacaccttactgtctttgcaaatagagtaaaatacctaacaatagttgtgttggagcaggtgtctaatgatcatctgtttagcccagtgcagtcatctgttttctaggcagttacgttttgttgaatattattaattcatggtcttgataatccag

SEQ ID NO: 73719 - DNA, 1037 bp, Homo sapiens
tgtgatatatactgccagtttattaaaagcttctatgttgctttttagtaaaaacggatcggttttcataatttcagttctatagatacttgatagtagttgctgttgtgaatgttccccttgctctttatatttcttaagtggtcattgttggtgtgttcttgtaggaaatttccattggcttgaactaacattttatcatgttaaagaactgtctttttatttttattttactaagaattacaatcaagtatagatttacaattttatcaaatgcttttggacatcttacaattttcttctttgaaatattgatgatttgacatcatggtatgttgcttttaactaatacatgaggaagtttcccatcttttcctgtgttctagagtacttcttacagcattcaaataatctgttcttttaaaaattattacaaaatatattatctattcttcaaatgttgggaaaccttatatatctgttagcttttaaaaataatcaattacttactccccccagtgctccctgcactccagcaaagctgttttgcagtgattgatccagttaggtctcttatttaaaaaaaaaaaaattgacattaacacttaccttcaataattttctagctacttttaaatttagtagcagaaatttaaagataatatatgttaaaaatttccatgtggtagttaaaagtgattcttaatttcatatttgtatttttatatcttcaaaaactagttgatgatttatctgttttatcaactttttttcaaatatttgtgtttattacatttttgttttcgattgcattttctgtttctttttttgaagtgattggattttacacattaatttctagttagaaaatctaacatgccatttctgtgttttggattttatggaaaattctttctcataaaatgaatgattaatttacataaattttcacatatacttgacccttgaacaatatggatttgaactgtagaggtctacttatacatggattttcttccacctatgctaccttggga

SEQ ID NO: 73720 - DNA, 1065 bp, Homo sapiens
gctggagtgcaatggtgggatcttggctcactgcaacccctgcctcctgggttcaagcagttctcctgcctcagcctcctgagtagttaggattacaggcgcccaccaccatgcctggctaatttttgtatttttagtggagacggggtttcaccatgttggtcaggctggtctcgtactcctgacctcaggtgatccgcccacctcagccttccaatgtaacttatattattgaagtcaatttcaaatacacaactagaatacatcacgtcttcttgggcttcatgtagtactcatatcctatttgcagattacaaacccttgagttcttatgtttaatgttgttcttatctttgctgtatctctcacctcagtgccctcatttgagaacagggtcccaagtaaatttaactcaaccgagaccaaccagctgtgatatgattggtgaagttggcaaaaaagaatttagaatccatttatttccaggacctgtttagttgcttacccctctgagcactgtactacctgtaaagtaggaaaaatacctgttttgcatttgttgggagggttacagaaaaactctgtagaaagcatcatttcagtgtttggtataaagaaaggccagtaagatagtagatggtattgttattagacactgttcctactctcaattctagaggaagagacagaatacattgggttactatttgttattacaatctattgttagaactgtaattcttgtagcagagggagagtaatgataaagccataccagaggttctaagaatgatctgttgaggactggcctgtaagccacacgttgatgggtgggttgcatttgactgggtggagaaagaggacggggctgtccaacataggaagcaacttgagctctgggcgaggcaggaagtgttgggtgtgtatagggcagaggtccactctggccaatttagcgtacagaaatgctttctttggaaatagtgctttcaaagacttaagcctacagagaaacatgtgacatttcacttaagaaaatctagatttccaaattttcttgaaaaa

SEQ ID NO: 73721 - DNA, 1016 bp, Homo sapiens
aacacacacacacacacacacacacacacacagacaatatctgcaaagtgcagtaaaatggaatgtaacaaaataaggcatgcctgtataaagaactttttatattctgacagggtcagtaaacttgcgtaagggccagacagtaatattttaggcttttctagccacataaggtcactgtcatgcatacatatcatacacacacacacacacacagatgcacacacacacataaacgtttatttaacagccctttaaaaatgtaaaaactattctttgggagcatgcctttcaaaaacaggccatggctctgtttggtccataggtcattgtccactgacccctgttctatggtaataagttgggtgttccttttttctttttgcagaagagtcatgtatttttgctataaagaacagatattaaatatgaataacttaaaatctgagccaaaatatgattggttgaagcttatgactttctagccttaaacaaatactgaacaaatttagaaatagccaaaaaatgatctagttttctgtaatatatttgccttttttataagtggaacttttaaaaacatatctttcacaggtctaaaaataaagaggaaaacatcatcttgaggatttctttaacttctttaaaataatacatttctggtttagtaactcatagtacttttaaaagaccttttttccccattggcacaaatgtttttcaatgtgagatgttctattgaatttttaaagacacttaaacaaaaatgtgttctttagggtgaatgattaattggacttttcagattatcttgtgaaagagttttgttactaggttgtgttctcctttttcagtcacagctcatgaaacatccccaaatgcttgtagctttagaatttttcagcaggttacattagaattactttaaattctctgaaggtaaattgattatagatattttaaagatttatttaattttttaaaagaagcctcttataaggtgattcatttttgat

SEQ ID NO: 73722 - DNA, 1909 bp, Homo sapiens
tgtctactttctcttttaggatacaaacaagtaccatattgctttgagttgttacacctgttaagttttctgttttgtggcagtttcttagtctctctttttatttcatgaccttaagaattttaaggagtactggtcaggtattttataggacgtccttcagttttggttcatctgatgcttttctcatggttagactggcttagggggtattggaaaacaatatcacataggtgacgaacccttctcagtgtatcacatcggggtatcattgtatcatatcatgatatccacaagataccactgatgatcttaaccttaattacttggttaaagtggtatttgccaagcttctctactgtaatttttttccatttccttactctgttctgtggaagtgagtcactaagtcttgcctactcttaaggaataactacatatcatgtttagaattctatagattattttgttctcccccatttatttttaaatttatattggcatgggtacatgcgtatatatcttacatgtggagtcataagctaatactgtgttagtctcttatttagatttttctggttttgaccaaagaccactttcagatttgctcttgtggcccagtgacatccccttgtccttttgtttttgaatactttgttaactttctggtattacaggatactccaggctcatctcatattttccctgccacagctaccaaatcagccaatccttcaagggtctctcatttcattgtagaatgatatctagaaaccatggactgggtgctgagtgttctttttgctaccagggtagatgctgttctaattgtgaatcaagttgatcagaatcagtctttctttaaaccttatttttttaataaactgataaatagaggaaataccaataattctgtttgaaattattacattattttggctaattgactggaattttcataacttatgttgcgataagagtagagaaaatagattttttaccaaatcttgcagcaagttgattgacatttttcttacgtttgctcttggctaacttttcattatcttggttccctggtatggtgggatattagggatgttttatttgaagagtttgagtctatggatacattatattgccagcattattttataatctgctagatagtactatattaatagttaattggtcccttcagttaataatgtaaaccttgaatagaacaattatttcaggcctaattatagtttatagaagttttgaaatttctatcctagtttccaaccctaatttgaagatcatagcagtctttgatctttgtaagattaaaatactttctgaaaagttctgctatgacatcttaaactgtgtctaggaaacaatcatagccatgggaatcaacttattctcagtgaatgttcatgatgtgcaagggattgtgtttcaaatgaaagcctaaaatcttgagaggtaaggctttaaacacttaaatttcctgtaaggataaattcttagtagtttggctttctaccattcatgtaaaactacacgtgctgtaaaatgttcatggccacgtataaagaatttaaagaaattgaaacttcacttaaagcaggttcccactcgatgtgaataagagtgtttctttgtgaggaagaaaatatatctctggccttttttccctaggagcaaagaaatggtctccagtgatctgtcattgggcattgtgttaagtaatccttagtaatttcttagtaaaaaaaatgctggtgaagctttctggctatgcctcagtggttccttttcaaagaggatattagcagagaagggaagaaattaagttttcctgtttccacttttcctcatttttgggtttatctataagtttatttcatgtgggtgtaaggta

SEQ ID NO: 73723 - DNA, 4152 bp, Homo sapiens
ttttgtgcttttagtagagacgggtttcaccatggtggccaggctggtctccaactcctgacctcaagtgatccacccgccttgctgctggggttacaggtgtgggccaacatacgcggcccagtttatattttttaatagaaaaagcaaacctgctaatggatgaatgcaaattaaaaacatattttggcagctgtggtgatttccctcttatttttttctgttatcttttagagctgatggttttatggtgttttggcaaatttttatcatttgccgtatcaccaggaagttttcttttccaaaaatagattctaggatatgcttggccaatagggtatatggtgttataatgagtttacagatggtttatttgggctacaaaagcaaagaaagttgactgatgaatacaactttaaatgcactttatgtgatgctgtctaatgaaggtcttccatatttttgaaaaaatgtgtagtattttacttttaaatgatcggaattttaactttgacaaaaaaatcttttaaataatgggaatatttagtttgtattaaaatattatttaaatattaagaggaatacaattttgtaaaacgtgagaacaatggaaggaaaaacttgaaaacataaattttgcagaagatcatagttgcagtttatcagaagtgttgcttgaagggatatttagaagcttgaagtaggtggatatttcaaggctaacagactttggaatatgcattagctcttctgctttagatatgaatacaagtaactttagcaaacacaaaatatttcattgaagaaagaaatgaactcaatgagtcgattaaaagcattaatggaatttttttttagcactatattgagtgtggtggaattataccaaggctttaggctgaggccgttaccttgtgttttgtttataaataacagtaattaagacagtttagaatacttgataagtatgggctaacaacaacaacaacaaaaattgctttgtgcctggtggtttagagtggatttagtttcatcttgatagttctgtatggtggattgaacacatgttacccatgtaactgatgagaacactaaaatcaggagaaggtaaaagtctagaaattggcagaactagaaccctaattgccaacaccagtaaaatagttttttcccattgcataattactactgtctttctgactttcatttagtctcgataagtaaaaactttgcaagtccacattacataaaagaagtgtcactagtgtctagctcatatgaaatgcccagtgaatatcagatgaatttttaccttcttccaaaatgcactttaaaaaggtagaaagaatccatatgtaacagcccagagagatcaacccgttgaccctggaatagagagtgtgcagttagagacatccatactctttgaagaaagttagggcatttaccatgtgccaaggcttgtgctaggtgctgtaaatacatacgtagataaaacatgggctttgtcctacaatgtaggcagatcaagaaagaagcaggatagctaagccgaaaggcaagcccaagctgatagattctggattagtttatttcttttagatctttaatgtgcctagaaggtaccctggatatttttagatttatgccgtagtctctttggagtacttttaatcttactagaaaaacttttcctatttaggtatgtagtttcgtaagttttttctttcaaaaactttttgcacatttttttaatcttaaatgtgtataatacattttaaacgcatttcattttatgtttccaaccaacacacagataggtatttatgatattgacgtgtgatttatttttatctttttatttctgtgactctttaagttttcaaagaaacacaactgaagatcgttagaaaataagcattgttttgcaaaagctcgctttaatgggcattgtttacaaatatattattctgataaaagtgggtatacttgtatggaaacttttaaattcattctttttttttttttttttttagtgacctgttttgtcttttacttagttctttttcttctagccaaaactagcattccattagtccataacttatgtttttagcacgattatgtgtccttttatatttttatccatgttcttaagcgttaggaacacatacacagtttttagtcactgcttacaaaaatggaaggagtttttttgaaactcttttatctttttttgttcagtgctgcctaagagaaatccttctcagctgctactgttctaatcaattaaaaatttgttatattgtattccaaggagtggttatttcatagtctactcactcatttattagagggaaatactgtgtttccagtttttgtcgcttttaaactaatgatgtaataaataactttatgggtatcttctgagagacctaaagaatagattcccagggataggaccatccattcaagatgtatcaattttcataaatgttgccacattgctttgacaaggatatagtaattcatattattaccagcaatgcaggcaaatacgctctccccaatcaccatcagtaatagttcatgtttcccagtctgataattgtgtggtaatatcttactgttactggaattagtattttctgattgttagtgactttgaacatcttttgtgatgtttgtaggaaaattagaattattctaagaattgtcctttcatattctttgcccatttaaaaaaattggttattgtccttttgtgggaattcattttatattaaagccactaaccatctgcctgacatctccattgcaagtaatttttttcataagctgatcttttatctcttgcctgttcaagaagtatcttttgaatacaacctttaaaatatataagcaattccttctctttctctctggtgtcctgttttaaggttttctccattgataaagtaggcatgtaatctcctcactagatttaattttcccccccatttttgtctttaatctatttggaatttattgttgtatatggtataagagagggagtctactttttaatttcagagcatagacataccattgtatcagcagcaattttgaggtagtctttttctttttccagagaatataaatttcacatttgtcatgtaatgttttcatatatccagtagtacctggatttctttataaattttcttaggtattctaatacttgcaactagcattcatatgtgaggaatattttatccatcatcacacctctcctgggataaaaaaattcaaaaaccctgttgtgattttaattgggattgcattaaattatatatattcttgggataattaacattttaatgttatttgcaatgcattatattatctcaattcaagaatgtagatgtttttcatttgctcgtgttttattttttatatttcaaaaatatgcattgcttacataagctttgatcttatgcatagctggatttgatttttaagagtgtttttgtttgcttgtttgttttgttttgtttaatgggataatggtcattagcttttttcttttcttttaatgtattcatctgatactggtttcagggtattcataacgtcgtataatgagttgggaagtttttcattctcttctattttttggaatactttgtgtagaattggtactatttcttccataaaagtatgggagaatttactggagaattctatattgttctatattgttactgattttttgactccttattctgtcagttattgggaaagtattgaagtacagttgtgaatttctgtaattctcttttcagtgctgtcagtttttgctttatgtattttgaaactctgttattaggtgtgtgcacatcaggattgttgtgttttcttagtgaattgacctctgttcttaccatctctaacttttatttggagtgttttggcaatttaatgtaaaatactttttgtataattgggtttctggaacttgctatttgttttctatttttctcttttgttccctcatagtcacctgtatcttgctctatttgggcttgattattttttagtattttatataatcttctttattggcttattagttaatctgtttgttttgtatttttagtagtgactctaata

SEQ ID NO: 73724 - DNA, 3642 bp, Homo sapiens
cctggcatgatgtatatgtatacagttggccctctttattcgtgggttctgcattaagggagtcaatcaattgtagattgaaaacgttcaagaaaaaaatacaacaataaaaatgatacaaataaaatcataactttatatagcatttacattgtataagtgattgtaagtaatctagagatgatttaaagtatgtaggaggatgtgcacaggttatatgcaaatactgcattattttttataacggacttgagcatccatggattttggtatctgctgtgggatgggatcctggagtcaaccctccaagggtactgaagaatgactacatactgtatatacatatatattcatcatcttatatatctatatgtgtatgtgtatatttagtatttatctttatatgtttttacatgtgtttttgtagtctatatctatattagtacataacccacccacacacaccatacacaagagcaagaattacagtaaaatttcatgaccgagaaatacagtaaaaagccacacgtgtgtataaaaaagggggaaaaacagtctttaaaaaaaattctatctttagtaatactgtgctcactttgaaattatcgagctaacttgtaacaaaagaaaaacaaccctgccttaaagaaaacaaacctaaatggcaaccaagttaaattattcgaaaacaatgtaaagaaaaccttccttcatttcacaatgaatggtaacctctaagatgatacatccttgaatcacaactaatttcagtggcagaaatatctcagttcgattcttactctcttgcttgctaactatggatgaccttggtcaaatttcttaacctctctgagtttatacaatggaaaaaataatatgtagtttacagggctgtggtgagggttaaatggggtaatgtggccaaaagtcactttgtaaaactacaaagttcttgtgtggcaactgatttgataggaaaagcactccagccatacctccaccgcccccacactgccctcccctgaaagggataaactttcctgtttctcaaagtgagcatataaattacacttatggggaaggaatttccgagtgtgggtagaaaactctggcagtcaaaggtcatgaattccattcctgtctcaccagagatttgctctgtgaccttgagaaagtcactcttaaaaagtttcaacgtagctggtataaaagttactgattattaacatttatataatacaggtgaagtatccaagcttgtcaaaagaaaaacacatgaaattacagttcacatgatcatttacagaaaattgaaaataaagatgaacaatgattagagattgaaaatctgcaggctacttctttaatgagtcacctgaagcttctatcaactggtcattaaaaagaatgcccttaattttaaaaatagaattattaaatttgtgatatactataatttcaagcagtacattgaactgcaaatccccagttaaatcaagattgtgttgattaagctatgtctgatttatggcttaaaagtcacttggttagactcaaacattgttgcaacatgctatatgttattcttaactaacattatacaaaatgcacaataaaggtagataatgaggatcttacacgttatttgtacatttattgaatacctatttataatcacgcatgatttctccgcaactgcattttctccagttaaaaaagaaacaaaaacaatttttttaaacccttgcaagagcaaagaaacaaactcaaactatctcttcaatataactgatttagactctttccatgttacaggtatcttgcctgactccaattcatgttacaattatcactgcaaacatcagcatcactttttgtgggactctcttatttatcatcccctgctttaagaatacactgtgttccggttggtattctcgggccccacaactcatagtattccttctggtgttaattgcttgttgatttgccttgttctaaatgcccctatcatggtcttttccaccctaagtagctaaatatattcaacgctgtcaaccattcctcgattcactttatttccctgaaaaaattttttatgtcttcttgcaaaaagaaatcttgtagtatagtagaattaaaccatgctgcatttataaatatttgctctagtgtattgatggctctcttaaaagctgccattcaggccgggtttggtggcgtgtgcctgtattcccagttacttgggaggctgaggcaggaggatcccttgatcccagagttcagggctacaacgagctatgatcaattgagccaatgcactccagccttgaaaaccctgtctctaaaacaacagtaacaacaaacagccattcagagtaaatagtaggtacaaaataaaatactccttattgtatacctagtataatacagaagttaagaacttggtttttcatatgttagtgtgtttaatatgtactctttagtaaacaggtactggtagcccttggcttttatatcattgacttttcaaataactggcacatggaatactatacgtgtcacctctgaaatgccatttatatactggattttgacttacgaacatcatttgatgaatgccttttttgggctgtttgtgttgctgtcttgccaagtaacccccacctgctacagaactgtgactttgccacttttggcaaaaatttcaaaaattatttggaaaattttattgctttttaccttattttaacaaaacaagtggaaaaaggggaaatgaaagcatctagttatgagaaagtttattatcttgatataaaattgagacaataatcattagatgtgctgaaagtgatgaatctttattggaagtgctgcatggagttaagctgatgaattgtgaaaaaaattgtgaaaaaaatgaaatagaacacaaaaaatacaaatacttttaatgactaatagattgtatataatggcagattttgtgattttccttttgtctgtgagaatgagtctcctttaaaacatgtctggtcccttcacttctgcatatttgagttttgtatgctttcaggagaaaacgtacaaaatctcatacaattattagattccatcctttattaaataaatattcaatgatatttgtataatataggtatagtaatcctcatagcctatgtatcatatgtatttgtatcatttaatatatatttgaatcgtacaacttatatgtcatgtatagtatatgttatatgacatgtaatacagcacatatgtgctatatgcactatgttatgctttctgttttattgttggactcttatgaactgtattatgatttttatttcatagatgtggaaattgattttcagcaaagtaaagtaatgaaattatagtgaatagccagttagctgtagagagctgaacgctagaaagccccctggactttccccttgtgttactcctacctccctctatcattaaacgtaatattccagagttagccttactgtagaataaagcaaaagtggaaggattatacaaataaatatggtttagaggctgtattattatatttgttgtagatcatattgacatactgtgtttactagaatacgtttactacaagatatacttcaa

SEQ ID NO: 73725 - DNA, 1042 bp, Homo sapiens
agtcaagttcataaatctagctgtagattgtgtattaaactataaaactagtaatggcacaaactcatttgaaaagtttttgtttataagtttttctgcttgccacttgcatgctgattaatgaacatgagctaaaatcccaagacagttttattcaaaatcaacaccattattaccttttctgcttagaaaacagctttttttttttttttgagttgaggtctcactctgtcacccaggcgggactgcagtggcatcatcatagctcaaattcccgggctcaagggatcctcccaccttagcctcccaagtaggcaggactacaggtgcacactgccacacccagctaaaaatttttttgtagacacggggtcttaactgtgttgtccaggctagatcctgaattcctggcctcaagcaaacctcctgccaaagtgctgggattataggcatcagcgactgcgctggctacaagtttaatttttaaaataagtctgaaataggttgtagttgcttatctgtcattttctatttgaaaatactgtatgatcatagactggaaatggcttatatttttgcccagtgtttatttttcctttcaaactcacacttacttgtttttcggcctgcaatttatgcacagctttgaacttttaactgtgtacagaatgtaagggtaaaaatattaaaattaaatcactggcaacgccctataaccacagccttaactcatctaccacaaccactcctcccaaaagcaagcaagtaaacagatgggccttgccctatgcccagaaggtcaacagtcttaggctctgttagacctgctaagtttctggatcccaagcccagcccagagagctgcctgacttccacccgccagaattcatttttagggcctaggtcggccacaccccatctgatgtcagctattgagttcttgtggtagagaacacatgctgtggattaaatggttactttctctctatattgtcagtaattatgttacaaaaggatttttccgttttgggtgtttattgtc

SEQ ID NO: 73726 - DNA, 2468 bp, Homo sapiens
ccccattcatttcctgagaactgcagagagccgctgagaggctctgcgtgtgcgtgtgcgcgggtgacgccgtgtgtgtgcgagtgtgtgtgtgtgtgtgcgcgcgcgcgtgtgagagagagaaagggagagagagagggggactctgtgtgagggaaagaaaacaatttctcctgctctgcagcttctgttcaggtctgtgccgattccgtttcttatcaaaataaacaaccccctcctcttttttttttttttttgccatcccaaatcagaccgtattctcttaacgtgttttattttccttctgtcatctgctcaagttaaatcattttggttggtctgtgttcttaaagggggaaagtgctgggaagcgggagggggccggggaagggcgatgctgttgcaaagcaagtagcgtcggtcggattcgtggagaagaaagaaggaggtttcttccccacctcccctaattttttttttccagaagaagttatcaagtaacgtgaattaagcaagtgtttttctacccctagtggaattgttggttgcagtgtttgcctgacagttgccaaggatgtgaaataaaaccccagggctgaacttgggggggagggggggctcgtggaagtagttggccccccggcctcgagcggggtggatgaatagctccgcaccgggaccgtgtgggctgtgtgtgcgcgctggagagagtggaggggaaggggttaaggcggagatgacactgctggcatgaatagtgctcctggtgctacattcattattgtctctggtcgtaatgatgtgtaactgtcacttgctacagtgcctggtccatgcaagtagccaggggctggccggtggctgttattttcaattacgggggacctggccggagttgacaaggggcaactttgtacgtccacccgggccgggaacccgcagagccggcctgggagccacttcttgcctcagaagctcactctgagggttcagacttgacctccgcgacattagttggtgttcacgttagatgctcccctacggggagaatcagtcctgcttttgttgggtagcgagctgtctgcaagaactttgaaaacttttatctttggggaaaagggtggggtgcactcaacagttttgtttcgcagtgcatttgaggcaaatgcttggaaaaagtaccaattcctttgttatatgccctgcagcttcccaacccccttcaccctgcgcttcgagttttgcatactttaatagtaatagtcttatttcagctgataaaagctgactgtgttgagttaaagagtattaatacaacggaatgtgtaatctggataaacagtttgcgtagttagtattgtcagcactctaatttaactgtatagatggctaaagtgtcgttctgtatggattgttttagataattccactggctaatggaattctcggcgagcactctgatattttattttacaccagcgttaagattctctgtttccctgtaacatcggagagacgagcaactctatttacatttagtgcgtgtgcatctagtgacttcggtagacatctgccaatcaaatacacgtcattctgcaaaaccacctagacgcctccatgcccttttcttactggacgatagagttgtttagataagtaaatgctttgaaataaatttggtggcttttagcaagaagcagcttgtgatgggaataggagtggtcactttgaggagtgggtgtataccgtcttctaagaaacgcttttagaactgacatttatttaaaacagtggaccccccctccctcaaggaaaaaagcttgcttgtgctattctcagacctcattcacatgttgtgtgcattttttaagaccacatagaaattggttccgataaaggagtatacttttaggttagaaaatttcaaactgtagaagcatagtggaaataggatgttgaaggacagacgtttcagttgggtaagttatatctttattgttgcagacgggtcttgatactagattgaatatattaagctcctttgagttggggaaagagcaatttgagcatataaaaattaggaaagcagtttattattctgccaatttaataactattatgaaatgtactgggaaaatttgaaatttgaaatgttttcacataaaattttcataattttgaactaagaccatgtaaccaacatggctatgtcaggttaaacaaaacattcttgagggtttctgtttatttttgaaaaccttcagttatttatctactacttagcaatgcagtcagctgaactttattgtggaatgctttttattactgtttattgaaaaaaattgttgtgctaatgagtccttaatattctccacctcccactccccagaagttctttttacagcaatgactatcatttgggagtaaatggtcctggtatagcatttgagaccttgaccttagcaact

SEQ ID NO: 73727 - DNA, 1197 bp, Homo sapiens
ggcagaattcagactggataggtggtgtagcatgagtatgtcaatcaaatttatggagagataaatatgaaatgtgactccaccctcatccattgtgagtttttgtagtattgttggtgaagttatattccttttccatacttgctagtgctgtgagattcctctacccccactcccatctcacaatgtggtttaaacagggtcatcagtcaaaccatgaggataaatctgtgtttataatgtagaaactcatgaaggtcaatgaatgttcattacccattgtgccctgctctttcagttatgtgcatttgaaaacagtaatagttttgtgggacccacttggacctccagagtcagtataaaaataattttcaagtgaaaatatttgagctaagtaagatacagaaagaaatcataactgaacttcttttattgggccaatgcagcactttcagaaaatgttgctgctctgtactcccctccaagggagttttctgagaattcagctgctgtggagacagacttcccattttccttagcatcaaaagcccaatagaaccctccatgtcttccatggaagccctccctcccttccctgcctccacattttgtcaaatgtggaatataaatcctttatctctggctattcagtgagttactcatcactgagtctgtataaataaaccttgtctattctcctttcttttctttatctttctttttctttttggagatagtgtcccactgtatggcccaggctggagtgcagtgacacaaacacagcttattgcagccttgatctatcaaactctcaggctgaagtgatcctcccacctcagtccctgagtagctgggactacaggcacacaccactatgcccagctaatattaaaaaaaaattttttttttgtagagacagggtattactgtgtttcccaggctggtctcaaactcctgggctcatgcaatccttccaccttggcctttcaaagtgctgggattacaggtatgagccgccacgctcggcgtatcttcttttaatctattgtcagttaatttgcaagcttccaaacactggacccaagttggaaaatgaaaagttttcctctggacagtgttttcatacaaagcaacgaatgggtcattgtacaaggaaattgcatgggatggttctccttggtagaaatcccagtggac

SEQ ID NO: 73728 - DNA, 1021 bp, Homo sapiens
gaaaaggtggaaacatttatgtaactttatgtgtatctgtcttgatatctactgacattgtctatatgaggaaaatgattactggtcatgctcctgtgagttttttgggaaggtagggtcatttctccctgcctgctttgtgccaactagcatgttgcatctacatgcattatgagtctggttaggcattactttaaacatacataaagagacagtaggacattgtggctgagtctacccagctcaaggtaaaggagaatgttgctaattttttagcaaactagaccagcattattactcaaactaaaaatatcacacctgaaaaatttaatttaggacctaaaatgtctagattagctttctgctttttttatttgaataactcattcagttgtgaatgaattcctctttatttggtgccacagtcaccaaatgacaaggatttgccactttcccaccaaattgtgagtgcttgtaatttaggtctctctaccttaaattcagtataaggaaacgtaattatgattgattttttccaaagatgacaagctgtgttgaaatacattttttcttttgaccaattgacagaatctaataagctttaataatcttccccttttatgtgaaaagttttgagaactgtgaaatgtttaggaacaaactgttgaaatccattggaagggaaaaaagaaagtggtaccagtgttaccagctcaactaaaacctgcaattctgcatttcaactcttcacttcctcagcctacaaatagctcattagatgacattcacgcatgctgggtataggcaaggaaagtaattttcaaagtacatttgcagttctctttttcagagatgattctatgatagtgcctctgaaagttgatgcagcatttttgcctttccaaaaagtatttatcctcactgctttttgcagtacttgtattttcacagatggattatctggggtaattttcttcaaagggagtttgttatacacagtgaaaatgtattatagagtaga

SEQ ID NO: 73729 - DNA, 1085 bp, Homo sapiens
gtagaccttcggagatcactgatacctagccacttaatctcgttcctcacagccagagaatatacgtaagtaaattgcagaagtgttggactcaggagaggccagttagttttggggcacctctcttacagagctctttgggtggaaagaagaagtggtgaaatgacctatgcttctgtttcatcatgacagggaaatctggaaggggaattcagtctagtgaatttacttaaatattagctgcagaaactaagttacagggaaagcggctttgtgacatttttaagtgtagaagatcagatgagaatgtgaattctacagaaacttgggtagtctgggttactgctaaggaatgcctctcactgtgttcttctctgcagatggattggacaggaacgagctgctgccactgtcccccctctctccaaccatggaggaggaaccgctggttgtattcctgtctggggaggatgacccagaaaagattgaagaaagaaagaaatcaaaagaactgaggagcttgtggagaaaagctatacaccaacaaatcttgttacttcgaatggaaaaagaaaaccagaaacttgaaggttagccattttaacagactaaatgctatgatgctatgattgaagggtgtatgttaaacctacctttctctccccatacatactatccgcactcagttttggactgtatgcacactttaagaagaatacctactgattataattgttgatttccattttgtgaggtggttataacatgggaaaggtcagcttaagatatttgtggttttgttttaaatgggtttgcattttaaatagatttaagacttaagaaactcttagagtatatttaggtaaaatagaatgtagataatatggaatcaatgtatttgatgtgtctgaaagttcattatcttagtgtcacttctaaaaaatccttaaatatgagaaagcaaattttcttttctttgaatgtgattttcaagtttcaggttaattacattcataatgggagaaatatgcctacctcaagtaaatcctacttacattgtattcaatttaactatttaattataa

SEQ ID NO: 73730 - DNA, 1145 bp, Homo sapiens
gctgtgattgcgccactgcgctccagcctgggtgaaaaaatgagaccttatctcacaaaataaatgtcaataaaaatataaaaagatctattttttaacttagccatccaatcttatttgaccccagttttttcttagtatatcacctaccaataatcccaaggttgactgttctgcttatattcaggttatcatctgccatgattcaactgttggtagctgaccattcagagacacatcttaacagtcgtaggcaattagaaacagtctttattgacctgttctataagagctctaacaaaagctctttgtgaggcttttatggaatatttaccttgtttcaaataagctattcatgttatttccttagcaaagcatgaattcatgacttaagcaacctgtactcctccttataagtgcttctgttcctcagattagaactaggactggttggctgctaaggaatgagtagaaacaggggagcttctcttgactgggctgtggcctagattgctgtttccccaggatgtggtggcctgggtgactagtgtgcctggtgatgcattgctccatgttgcctgtggcttgtgcttgcccgtgacagaacttgtgaatggcttgtgctaccagttggttgtgaagtgccatgatgtgcagctctccttataagtgatatgtttatttgctttcaacagtgatggagaagggagaaaaaggacctcatctacctgcagcaatgagtccctaagtgtgggaggaacctctgtcactcctcgccggatctcctggcggcagcgcattttcctcagggttgcttctcccatgaacaaatctccctcagcaatgcaacagcaaggtctgtgttgcactccctaaggaatttatccctctgagtgtcagaaattagctaatggaatgcacgtgctgtgtataaagagatttaagtgattacagtgtagaaatatctttctgtatgtgatacagtggtttctctttcaggtatcattagaaaacattaggcattcaatacctgcttgttgaatgaatgaatgagtgagacagtttccaaaaacctgtacttgggcctactccacaaggtagacggaactgtgatagtgctaggaaagaagctgtatgtccttttt

SEQ ID NO: 73731 - DNA, 1036 bp, Homo sapiens
ctcccgggttcacgccattttcctgcctcagcctcctgagtagctgggactacaggcgcccgccaccatgcccggctaatttttttttttttttttttttttgtatttttagtagagacggggtttcaccgtgttagccaggatgaccttgatctcctgacctcgtgatccgcccgcctcagcctcccaaagtgctgggattacaggcatgagcaccgcgcccagcctactattacttttttaaaagcacattattttgaaattttaaattcagattaggcatccatttccaggaccactatcctgaattactgaaaacaggttactatttttaagcaggctgagaaaaaggagccaagatctttttaatagttggttagtagatttatttgcacataactgaaatgatagaggagagggaatgtgtgtattttttcttttacctcactttgaattaatttttcaaaatttaatgttatttcattgtttagtaaactataattttatataatgttatggtaatttttataacatctgcttattaaatattatcacagacatatttgttactttttacagtgcttctcaggttttaagcctgtgcttaaaaatttatttatgttgaaattcattgctcagaagtaaatgacagtcaaaaaaaagtaaatgatagatactacttctattcactgataaaacttttcaatgagaaaataaaatctttgatgatgaagtactttgtggtatagtttttgttctatatttctcttgtattcagtgaaaaaaaaaggtataattattcattgtggttcattattgaagtaaccttaccatgacttattgatgacttattggaatgccttttatcctgaatcctgatttggacatatttgtgtgtgctaattccattccttgttttcctgttgtaccagacaagacactgcttcagaatcaaggtgattagaggtctacgtatttttatttaaaaaaaattcacagattcttccaactgaacatcatccttagtttaaaaagc

SEQ ID NO: 73732 - DNA, 1136 bp, Homo sapiens
acacattagttttgggttgaaaaatttcacctttttgtagctgtgttgttttaagtggtgtattgaaatatatggcaaacttttaaatttctaagatcattaaaaaatccttgttttctgtatgttttaatgttttcttggctatgtgcaattctaaaaatcagagagtacttgtttgtacccttttctacactttgaaagtttgatagcagaaaatgaataggccaaaagtgtacttaaaaaattgttttcccaggaaaggacaccaattgaaagcacacagctcaatggattatcacagagtgaacaccactatttctcttcaccccagtcaataaatggaatgctagcagcatgcctgcaacttctcccatgtcccccatctaatcaccatccccatgctgacctcagatatcttagattagtggtgcttggctttgaactttgtataaatggaatgatacagcctatattcttttatctcacatctttcactgacattcgtttgtgagatttaattcctcttttaatgagcattttatttcattcattttattgctatttagtattccatttaatatatctcaatttttccattctcttgtgagtagacatatgggttatttctaggtttttggcttcaaaaagagtcctgtcttcactattattatacatgtctttaattgtacctacatatgaattattgatgaatatctacacggtagtaaaattgttggacaaaatgctctcttaataggtttatctgaactagtaagtcacttcaacataaatgttcaagttagaagattggagaatttttaatttgtattttgaaacaatttcaaatttatactaaagttgcagaaatatcacagaggattcctgttaaccctttatccaggttaatcaactttttatattttgctacatttgttttataatttttggtccatttacatatatatatacatatatatgcaccgctatatttcctcattctaagccatttgtgaataagttgcatgcatcgtgtccgtttactcttaatactttagggtgtatttcctaagaaaaaggatattcaattcaagagcatggtttctgaaacccagtggtttctgaactctacattctca

SEQ ID NO: 73733 - DNA, 1045 bp, Homo sapiens
aatccaaaagccactgattgacataactgtactaaactgatagatacaataatgtctttatttttaagtatatagaatatttcctaggcatttctttgatttttcaatgacagacttttctggatctcaatataaatcgcataatggttacaagatcatatggatagcaactcttagatagcatgagggatctgtgaaggacctcttgaatcttgtgaacgacctcttgaatcttgtgaacattctattttgttttgtttttatccccagtatggaaaatgtatagcctgttaaatcttattcttgttcttttagtaacacaaaattagacgtagtgatttttggagaattgctttttttaaaaaaaattaaaattatacatgcaataatattgatcattcaaattcttagtggggtgctgcagcctctagaaagtaatgggcttacttgggaacctttctaaatttgttggtgtcatagatgtttgtgagattcattcctgtttttgtgtatagcttgacttattcacttttattgctgtatagtattccatttcatacattacattttatccactctcttgctgatggatatttgggttgtttcttgttgtttgataattggcacttcttgtagtcaggagaggaatacatgttatccactagcctgtgtgccattaacatcttcttagatattcttttggcctatttctcttagacatagtacatgctaaaagttaatatataactaggtagcactcactcactagttaaagtagactaatccttgaattattcctgagggtcttttgtccatgtgtgcctttttttcactttaagaaaagataactaatactggattaatataattttgatcctgaactttcctctgaattagtacaaagtcatgttccaacagtgaatttgatttatagtgaagaaagtatatgaagaatttactttagagtgctttcagggacgaccttatggaagaaatttcaaaggaaatagccacaaaactagtataagatatatagaatatgaaa

SEQ ID NO: 73734 - DNA, 1007 bp, Homo sapiens
tcctgacctcaagtgattcacctgccttggcctcccaaagtgctggcattacaggtgtgagccaccatccatgcccagctcaaaatgatcttttttttttttccttgagacgaagtcttgctctgtcaccatgctggagtgcagtggtgcgatctcagcttactgcaatctctgtctcctgggttcaagcgattcttctgcctcagcctcctgagtagctgggactacaggtgcgcgccaccacgcctggctaatttttgtatttttggtagagacagggtttcaccatgttagccaggatggtctcgatctcttgaccttgtgatccacccacgtcggcctcccaaagtgctgggattacaggtgtgagccaccgcacctggcccaaaatgatctttcaaaataagtttgcttctcagatcgagatttattctggggcctttatttgaattcgagcaatagatatttagtagtagaaatatatatgtatagaaaaggggaaatagaatactgatgctcaatactataagaactttaaaaatcatttcccatagaaagttataaagaaattcttcttttgcccattgtattagttcattttcgcattgctataaagaaatacctgaaactgggtaacttgtaaagaaaagaggtttcattgactcacggttctgcaggttatacaggaagcatagtggcttctgcttctggagagacctcaggaagcttccaatcatggtggaaggcaaagggggagtgagacatctcacatggtgggatcaggaacaagagagagagaatgaggaggtgctgcatacttttaaacaaccagatctcatgagaactcagtatcatgagaacagcaccaagtggatggtgctaaaccattcctaagaaatccatccctgtgatccggtcacctcccaccaggccgacctccaacattgggaattacaatctgacatgagatttgggcggatccaaaccatatcaccgattcttaggaa

SEQ ID NO: 73735 - DNA, 1052 bp, Homo sapiens
gttttataggtttttttgttttttgtttttaagacggagtttcacacttgttgcccaggctggagtgcaatggcacgatcttggctcactgcaacctccgcctcccgggttcaagcgattcttctgcctcagcttcccgggtagctgggactacaggcatgcaccaccacacccggctaattttgtatttttagtagagacggggtttctccatgttggtcaggctggtcacgaactcccaacttcaggtgatccccccgcctcggcctcccaaagtgctgggattacaggcatgagccactgcacccggccattttatagggaatttgagcaggcactgacacattgagctaaactaatgatggtcttaaaatgtaaaagaatttgtgggttttggttaaaaaaaagcattaatagtacatgttcgtgatttagaatgaacatacattatttttagttatattaatctattattttatttccaattcatatgaacattttatttcatcgaaactggagatagcccaaatggtgaaacagcagtaatatcatgtaaatggtaccctagctgcaaactgagggatggtatttttgtgcatgtggtctagaatttatcctctgctgcatatagaagaagcaggaccaccagccgtaacatcaaaggggattgtgaaatatttactcttgataacactaattcaggttatatctttatttcactatattcagaacaaatcacatattgttagtacacagtccttcatttagtcacagaacaagcatttcttgagaaccttctatgagttaaactatgtgatggaaaaaggtgacaaaaaaacctgatgaatgaatcatgtcctctccagagaatagctcaaatatttgaaaggggaatgcaaacagatcaatagatacatagaataaagtcaataagtggctttaaaaaagaatctgtagtgagcacaaaagtagctgtgtctttgctttggagctggagtagagagtaagagaagaggagattcaagaggaaggacattttgagggagttggaa

SEQ ID NO: 73736 - DNA, 1033 bp, Homo sapiens
taagaagaagaaaaggaaaaggaaaggaaaatgtcttcagtgtatgagaggacagaaggagggacagtgcgatattaaagtggaatgaggagcacatgagaacattgatgtgaggttgtcttgcaagtgccagtgaattaaaagtggattgtctgctgtgagggtcttctcttctttcagatgactagagaataaatgaaatataggaaatgatcagctgaggggtgtgatggagaatgaatgctggtaaggaagtagaaataaagtgagaaggaggatatactaatatttggaacatactgtttgaactttaaaatagggtgatttttgcatttattttgtgtgcattttaaaatacggccttttggttatttatccaacacatatttatatgtttaattattcagcaaatatttgttgaaaatctttggttttatagggcttctgttttatcatgggaagacagacattaaaaagataaaaaagtacaatattatagcatgctaagtggtgagaagtgcttaggataaaaattttacaggaaaggggttggggagaaaggaagagaaggactgagaaaaagaaatgatgaaagactggaaaaagaatgagagaaagcgagagagagggtttcagtgagtgtggccaatggagttgtcactggaaagacaacaggtgagtaaagatctaaagagagggacaggacttccatggccacaggaggaagcctcctgctctgtggaggagcagtcaggaggccacatggctggagtggactgagtaagggagagtggcaggcgaggagctcagagagggagtagggcatcagatggtgcagggtcttgtaaaccagaagactgcatgaaatgactaagtggagcaagtgtaaatagaaaagaggaaagggccaatcatagagccctgggtagccccaaggattagagttctgagagatgagaaggaataagaaaaggagtctgaaggagagccagtgaagtggagaaaacctagcacagtgaagtgtcctggtagc

SEQ ID NO: 73737 - DNA, 1085 bp, Homo sapiens
agatcgcgccactgcactccagcctgggagacagagtgagactccgtctcaaaaaaaaaaaaaatgtttatattttgaaggtattcattccttttttgttttctttttcttctgagacagtctcttgtcgcccaggctggagtatgatggcacaatcatagctgactgcagccttgaactctcaggctcaagcagtcatcccacctcagcctcccgagtagctgggactacaggcatgcaccaccatgcccatctatttttttttttttttgtattttttccagacagggtctccccatgttgcctgggctgatctcaaactcctgggcttgagcaatctacctgcctcagcctcccaaagttctgggattacaggtgtgagccactgtgcctggccaatattcattctttctacttctgtttaaagctttttgttttggggatgctttttctttcatttagttttggacatgaatagtctgttgtggttattaagagacaagggattgcacaagattgcttccaaacctgtgtaggtatttgctcctgcaggtaagaaattgagccagtggctgaatagttcctgagtctcataccagtgttgctagggaataaattcaatgcaaggtgagtaagaacaggtattatttgatttatatgtgtttatcctgatgtgtctagaatcacagtctttgatatagccaataacaaatagggttgacctcctcccatttattagccggatacatgttttctgtgaagccacttagtaatttcacttatggttattttgataaggggacttgatctgtgacttaaacattatcaaaaaggattttttcccttttctacacatcctccccaacacttgtggtctcttctctttttggtaataggcttcctaagaggagtgaggtggtatctcattgtattttgctttgcgtttctgtaatgattagtgaagtcaagcatcttttcatatccctgtcggccatttttatgtcttctttggagaaatgtctattcaagtttttctcccattaaaaattttatttcaattgataagtaaaaattttatacattta

SEQ ID NO: 73738 - DNA, 1063 bp, Homo sapiens
gcattaggggacccaaggccccttcctatacaggtttttttaattatgactccaggaatcaattccacttaagctcaggaaacaccaagagccttaggatttgccacagtacagtcttgttaaaacacatgagtaacatcattacactactgcttcttgacaccacctctggtgagattgttatgactttttttttctatagtgttagtgaaaactcgatctctgcaggaatattggcaatactgtgagtgcgttaacagttaccaaatgcttgggtgtttgactgatggttattagaacatctgtcacttaaacagcagttaaaatatcactttacgtatcaatagtttggcagtttcctggaaagtcaggtggtagatcagcctgtaatcataaggttgtgttctacagtcattgcaaggacattattacccatgctttgctgaagctagataataccaatagatgaaatctgttgtcagatggtaagaggacatgagtctaggacacactgaagcataattatgagcggtgttacaagcagcggggaggtgggatgatctgtgatggtgatgagccaaggagggtcgtggctccaaggcccagacagggtccccaaataatgaggtgatctacaggaagacattactctaattaatgtaattaagactttatttatagtcatttgggctacattgtcagcaaaccaatttgcccaaggtggtaatgattctctcagctttggaaaatgatgctgtaggcattggtgtagggatggggggcaggggagggtacaatttagctctgctttgtcaaatcttttttttttttttcctttttccctctaccctccaccctcagaggtttgtgagtgctggaagaacatttagtcctggaaaaaggcaatattttaactcttctacctagtaagagataaagttctgacttgacttccccagaaagcaagcaagttataaatataacattcttctctttgcttatctattttttgaggtaatgtacaatttggtagttaccctaggtatcatattaaactttaggt

SEQ ID NO: 73739 - DNA, 1033 bp, Homo sapiens
gtgtattatttactgaagcttgcaagaatgattttaaagagactttacaaattgtgttcttaagattaaaaaaaggaatttaatgccagtgttttcccaactctcagttctcttaaaaacgtgtattactatctgagctttattcacgtaaccagtttttttgtcaatatatttttagaaggtcatttttcagttctttttcaaagttgatggttagtagctttgagaatatactagtaagaataccagagaaattgaaacctggaagatttcacctctctgtgctttctaagaagtttgttctgtggacagatagatctatctctttttttgtaatcattttttattctctctcctccttgcagtctgaagtggaggttaatttgccttggctctgtggtagaatcttgactgcaatatctggcggaaaggcacaaacatagcccagagactcccagccacaatggagcacattatgataggagccctaagctgaaaattgaaggtgttcagtgtcagggcttgattatcagaaaccagagattctcaaacttcagtgtgtgtgtcagaattacctagagggcttcttaaaagagaccactggaccctaccctcaatttctgatttaacaagttctctggtgatgctcaaactactggccgggtgaccacagttttagaaaccctgtgctaagttatttggttcatttggttggctgtatgaccatttctgttcccctggatatttttgtagtctttctcagacttgaaagttcaagtggaatgtgaggagaaataatatttgactctggaatatttttaagaagctcttcatcttctagcttaatgatttgcctgtcctttccctgatatagacattattctgccagacatcataagaccatgcaaatgttgaatgaaaactttgcctttcagccaaaagttttaagttctgcaggtggaataaacagttcattttgaggggaatacagataacctaaaaatctgaagtccaaagtgttttaacgtcagaa

SEQ ID NO: 73740 - DNA, 1024 bp, Homo sapiens
aggaagacctgctgtttgctttgttctgagttctatatttgaagtggagaattatttatttggacttaagatcattgttaagagagtctcctaagtgtttccctcagtcctcgacagagtctataaagtctacaaacgtagcctagagcagtagacctgcaaacatcccctaacatacttgtctgtggtttgtctgtcatgcctattcctttaatgcaatggccctatctgttggatgaccgtatactttattgtttgatatgggacaattttattgtcaaaaggggcaccactaataattatacaagcactgtgagtaataaacctggactgttgaggacaaaccgagatatatggtcaccatggcaaagtttgtgttcatgcagagccaccgagttggaggattgtggttactaatataaaatgataatgttttcaagagtatctactcacatattggagttggatctacatttgaccttagagctgggagtgctgtactaatcgcttgggggtctgttgtggggagttgccacagtgatgtgttccctcttggctccacacctccctttgggtcagagtcaatttaaggatgtgtgtcaggagaagcattcaaccagaatggctcaatgcaccactgtttctccaaggtgcaaagagaaatggagatgggggtgaaatgtatgccaatgcagatctgtctctagtcaagcctatgtagtcttatacaggaggaatgtcaggcttagcacatttcagctaaacttgaatatttgaactgggaaaagggcttaatcccattggcatgaagtgaattacagacttaaactgattggggaaacaagaatatctgattctctcccaaaggtctaggataggtcactaatactctgtaaatatttatccacttgcaaaaagagtctgtatggcattacccaaatttttctgttaaaaagttattttatgttatacatacattactacaataaaaaataaagcaggagttgttattgaaaatatgaga

SEQ ID NO: 73741 - DNA, 1056 bp, Homo sapiens
gggaggggcggggaccccactttaaggaccgactgaggtttggctgcaggcgcgcgcgctccacgtggcgcgctcaagcgccggctggccccttccctggaccttgggagtgggagagaaggcgttcgggggctgggcgagcggcgggagcggccggccggctacagcagggacccggagggaaaaggacaacggtcccgggatggagggggagctggcgcgtccaaggagcacgcgtggaggagcgcccgtcccgggaggacggcggtgtctggggtgtgaccggagatggcttgcttgccgtgtgtgtgtgtgtgtgtgtgtgtgtgtgcgtgcgtgtgcgcgcgagcgcgtgtatgaacgcagaaggttgggttcctagaggtcctcactagttctcaatcgcagtcaaatccttaaccggtttggctggtcgcgtcatcttcgcagcagcacctgcaggtctccggtctgggaggcaatttccgagcggggcttagggaaaagttactagacatcgtcagattgtctgcaaagaaggattctacatttggatattgaatggaaagaagccctttttttgcggtttttaaacacacttattggaggcagtgtagtagaacaggtttctaatatcattttttaaatgtttttttcacttttgtttttaatattttttttccagagtcttctaaatctaattaccaaacagtaaactttacttccttaaaaacagatatggtccttatggaacagggagaggagaacttgactatgcagtgattgtgtctttgaaaacagagttttccccctttaatttgtaatgagttttctccccgccatatcaaaagcttccaaaatgctgttttaaaaatggttatttactgtttgcacagtactttaggttctttggaaaaatagtgttgtctaaatataaataaagtctcaggttgcaccatgtggctttcttttggtaactgggaaattaatcgtagtcagatgagaaaaacatcctataaatatggctttaattttttttatttcacaattcttctg

SEQ ID NO: 73742 - DNA, 1109 bp, Homo sapiens
ttaatttttaaatgacagagaaataaacttctaccatataaaccatagttaatgttggatctctcttctagtaattgaacccataatcttaaatgagatagcccttaccacactgaaatgcggtcctttactagattgaaagtgttttgaggcctggaaccaacttgttatttttgcttttattttcagtgtctaggacagtgctgagtatttaataaatctggtgtgatcttaaaaggactttctcatgtgctttttgaaaagtttagtcataagataattatccaaccccacagtagtatttttgcttgcagtaccaaattgcacctatttcttacagcaaccttcagtaattgagaatgtaacactaaaatgcaaacttaatatgttatatagtctccggtagtcagatataattaaaataactacttaaatatcttctaaaagcaaaattaatattattttccccctttctctccagaatttctacagacagttcaaggaaattgctgcagttattgaaacggtgtgaagacggattctttggttgataaattgctatcattctaaagtcatggacttcactttcggcaacaaaactaaataaggatggaacatttattgaatgaaaaatgcacttttgtttttccatttttttaaataataaaaatcagacaaacaggaactgggtagtggtgatgaatgcaaaactttgtgaatgtgctttataaaagtgataattagacactttagaggatatacttggtgataatgtgaatgatgtaatcagactaacagttgaatcattgctgttggaggcagcacaaatttatgtgttacaacagtagtttaaaaacttgtactggatggaacccattttataaacagtcttatttggagtcatgtatataaaaatatatataaattagaaaagtagtatttgattaggataactttacaaattcaatagtatagccatcacttattataatggcaatcagaagagtgaggcttcttttttcaaacttttgtaatcagattaagattgaccattgctcctttacacagtattagtctagcattcaattatttctgttattaatggttgt

SEQ ID NO: 73743 - DNA, 1038 bp, Homo sapiens
aacttttatggttgattgaggcacacttgggaaccattctatttctttacctcaccatagtcctcaagctcaaatatttcattagtgtaaatagtgataaggtggtttggatttcatcattgttcatgatggatatgtggtaggatacgtggtgggatttacaaaaatcctaacttttccaagaagaaatgtattaacaagtgaagttttttgcccagtgagcattagttttgtagaaaaaggtatcagtcagtgagcaagtactttttgagtggctgctatgtaccaggctatgctttggaaacaagacagacagtatttacccctgtgttttatgttttagagttatgtgccttaatatgaggcagtattaacagctgcatgttttatgccatggcatcatttaacaatcattgacaggaattagattaaaagtattaagacaaccagtagtcactaagcatgtaatctttggagtcaaacagactttggcttcagttctgattccagaaatgtgtgactttatgcacattacctaagctctctgaagttggcttttgtcatctgcaaagtggaaacaataacctatagtgttatgttgattcagtgaggtatgtaatacatgtaaactgcatagcacatcacccagggtatgtatctgtcatgaacaatgatgaaatccaaaaccaccttatcactatacatgctaatgtaagtcttgagcatggaacagcaaagtgaactaaaagatactccaagcctgttaaaggaaaccaatactgccacatcttccttccacttccgttatacattggaggggagatttttttttttcactttttgttttttccattttaaactatgatggtgttttttaactgtttatatcccttataacctctccattttttcatttgattattgttcctctagcagtattaaaatgaagatactttatgtaaatatgaccagcgttgaaactaaaagttgagtgtaactgcagtaaaattgaataaatatctgcattccaggtaatgt

SEQ ID NO: 73744 - DNA, 1063 bp, Homo sapiens
ttttctagcgtaataccgaaagggaaataaatttactttagcataactattctatttagcctgtatgcttagagttagaaaaagaattagaggtcatctgctggcttattgccttaaataatcacaataaataaatcatataaattctcataagaattctctaattagtagataccattttaggaaaaaaatctttgttatcctgtcctccttgagctgctgccttacctgttttccttctttgtaaactttccacaaagaattgttcatagctgctgcaactgctacctcatctcacattcttttccttattcattcctgtgtagcttgcttctgtgtgtaccatttcgtagtaactttttttgtcaagttcactaatgattgccactttgccagatccagtgatcacttttctgtcaccatatttcttgacctttcagcagcatttggtagaatagctcactccatctttattgaaacattatcttttcttggcttctgtgagaattctgatggtcctctattttcctaattgcttcgaagagtctctgttgctagatcatctcccttccaacttctaaggagcgcctcagccacttcatcctagactgctcatcttttttatgtgttttcttgccctagtaatgttttctgttgtatagttctaataccatcaattgtcacatagatgaccccatgttccttgaaaccctaacattgccaccaaattggaaacctgtatattcagctaactctttggtatctccatctggatgtcttatagataccttaaagttaatatggccaaaaaagaaatatgggttttcatcttcccatctctgctctaaacccttttcttccccatcttccaagggcatagccatccatgcagtgtttgaggtgatgagttgatgccgttgattcttctttcagattgccattccagagaggccgtagtatcttgatttgattcttggattgtaatctctgctttgctatctaccagctctgagaccatggacagttatctaacctctttgtgtcttagttccttaatttcttt

SEQ ID NO: 73745 - DNA, 1066 bp, Homo sapiens
aagtgctggaaatgagtttaacatatcaaccaagccaacttatatgtatttgatgaagtccaggcttattaaattcaattccaaagaaatggagtttgaaaaaagaggttttatttcacatgttatgaatgttaaatgtttgttatgtgctataaataaattgctatctcttctcaccctattcatagaaaatctgctttactaccattctgcccccctagttttactgaagtataattgacaaaaattgaacatatttagagtgtgcattgtgatgttttgatatgtgctgctttactgcattcctactgaatgtcagttacatttgtattttatccctttataggtattagatacagagtacatatttgttgatcatttcccttttaacactatgtatagtatactagttttcttttaccaactaatgttccattgttttttttttctttctttcttttaccagtttcttaaacaattaggtctacatcctaactggcaattcgttgatgtatatggaatggatcctgaactccttagcatggtaccaagaccagtctgtgcagtcttacttctctttcctattacagaaaaggtaattgttatgtaaaatagaaagtttctggtaaatacaatttttgttttattctgtcttattttttgaggcagtatctcgctctgttgcctaggctggagtgcagaggtgtaatcatggcttactgcagtctcaacctcccaggctcaagcgatcctcccaccttagcctttcgagtagctgggaccacaggcatgttccaccacacctagctgatgcttgtgttttatttttgtagagacagggcctcaccgtgttgcctggtctggtctccaactcgggctcaagtgatcctcccgcatcggtctcccaaagtgctgggcttataggcatgagccactgttcccagcccaatttctttttcttctttttttaatttacaaagtttttgataaatacaatctttaagaacaaatgatccccttcttgcataaaattaggcaatctagtcagtaaagaaatcttaaaact

SEQ ID NO: 73746 - DNA, 1608 bp, Homo sapiens
aatctattatgctttatagtattctattacgatatgccataatatattttaaccaaatctccattgatgtcttagaccaatctcctacaaaggaaattgcttattggagtgtatgagaatttaaaatgttaatacatattgccatatgccctgtaacgtgatcgtacaaatacatacttttaataacagcataggagaatgcctttttccccataccttcaccttcactggctactgctattcatttttcaatcttttgtcagtctggtaggtgataaattaattcttttattttaaaccctttctttcataataatattttttatcatttgcattttttcttttacagactgagttttttaatatgttattttccacaaatacactgttgactttttttttttaatagtatgaagtattcagaacagaagaggaagaaaaaataaaatctcagggacaagatgttacatcatcagtatatttcatgaagcaaacaatcagcaatgcctgtggaacaattggactgattcatgctattgcaaacaataaagacaagatgcactttggtaaatgatttttcattactgcattttttcccccttaagatacaagttaattgcattgagcagtaggtggtgctctaattctttcttcaaactataaaataaagcattccctgcttccttgatgatgggaatgtatatactgttagaagaaatattaatccttctcattcttttatattgttgactaataggggttaaacaaatggacaaatattaataatgtaaggcttatcatttataacatgatccttacatttctaacctaccaatgaaagaatttaacctgaaaaatagtagcatacttctagtattttcatatattggtctctctgctgtatcaagcctttttaattttatcttctttcatattctcagaatctggatcaaccttgaaaaaattcctggaggaatctgtgtcaatgagccctgaagaacgagccagatacctggagaactatgatgtcggtaccttctttccgttttgatctcatgtgggcaaaagtttgtgggattgtagatgtgtttgggggttttgtcttgaaaccatagttttgagcaattatggattttattgtatccattaagaaaagccttttgtacttttcagataactttgaaatatccacaaatgctgataagttgccatttcttttctatgttcagagctgactgaatggataaaatcagtttgatttacaaattttttttttttttgatatgcagtctcgctctgccgcccaggctggagtgcagtgatgccatctctgctcactgcaacctctgcctcctgggttcaagcaattcttgtgcctcagcctcccaagtagctaggatttcaggtgcgtggcaccacacctggctaatttttgtatttttagtagagacagggttttgccatgttggtcaggctggtctcgaactcctggcctcaagcagtccctccacctcggcctcccaaagtgctgggattacaaacatgagccaccgtgcctggccctgatttacaaattaataaaatatcttatgattgactattccttac

SEQ ID NO: 73747 - DNA, 3196 bp, Homo sapiens
cagctgaactagctaacagggtaaagatggtaaagatcattacattaccctgaaacaaatttattgagcaaagaaaatgatgtggttttctgctggaagcaggacacaataaagacacaggctatttaactgtacaacagtgcaggtatttttctcaaaatagttggacctcacaggaatctgatagggaagacacaggccaccaagccgcacaaacagcacacaatctgcattatctctaaatgattagatgaactgaaacagcagacagcagcatcttaacagcttgtcaaaacatgtccttttgctactttatgactgcttttgcttaagcaaattctctcaaaggaaaaaacaaaaagccaagtaactttctaaaactttatgtcctacaataatactatggttaaatttacagcaagaaatttatatggttaaatttatagcaagaaaaatttagaaaaaatgtgaaatacctcagtctgaccttcatgggcactggtctcatgagtaactcggatggcctgtaataagaataaaggtattcattggaaaaaatgcctatactcaactttttaaatgaagacaacaaagctaaattttaacacctaaagtcttctaaagaaacaacaaattgaaggaaatttaagaaaagcttagtactagatatttaagaatgatatctgggtaatcaaatgaattgctgtactgtgtaacccgtaaatctctgaaaacttaggaaattgaatatctgattatttgtaatttccaggctctaagtaggggccatttaacttattcagttgttagaactaacacttaacactttattcaattgagactagaataaagtaagcatttcacagatagagactaaagaagcttatctcatctgtttctccaggttccatgctcctctgcagctctggctgtatttatgtttaatcatgcagtttcagtcagcaattgagaaatgtggagcacaactcatgcatttatcagaagctacagaatttagtttcctgaactaaaaaaaaaccactcttatagtacccactatttgcaaacatccagagaaatgggcacaatagtaaattacaggtgaaagtacaatctttataaatagcaatttggcaataaataaatatccaagccttaaaaacatgcaaactattttatccagcaacttctcttctaggagtttatatatttacatataattgtacataattatatataattaaggatatttacaaagatttagctacaatgatgtaccttgcagtatttattaaaatagtgaaaaagaagaaaaactattaaatttctaacaataatttattggtgaaatacaatactacataatggaaagctatgcagccattaaataatatcaaatatatacttactggtatgtaatacgtttctgataagtgaaaaaagcaagttataaaacagtattacagtatgatcaaattcttgtttaaaaaattgtgtatatatatatacactccctaaaaaatattaatgtttatctacctctcattagtaagagtactgattttcatgtttatttttatgtataataaagatgttttatgaagtctccagtttttttttaaagaaaaaaacaatttaaaattctcaaagtatattggaatgcataacaacataatcaaaccaattaatttatcaggcacaaattctacataaggcattgttctaaccaaataatttgtagattatacgcctaatttcaaagaacttacaatctatttaataatgttattaaaaggtcaaaagatttcaaaagaaaaattgattccaaaagcaataaattttaaaaaccatttcagaacagttatatgaagtggtaaaatcactatcatctgaattaaatataacctatattatatatatagcctagtttatgtggcctttattacactgatgaaatagctacagtatggtctaatgtctacctttaaacctttgctttctcctttcatcttcagcctggttccaaattcccaataaaagatacacagggtactggcaggtatatatttatttattttagggagggaatagtaaggaatagtcaatcataagatattttattaatttgtaaatcagggccaggcacggtggctcatgtttgtaatcccagcactttgggaggccgaggtggagggactgcttgaggccaggagttcgagaccagcctgaccaacatggcaaaaccctgtctctactaaaaatacaaaaattagccaggtgtggtgccacgcacctgaaatcctagctacttgggaggctgaggcacaagaattgcttgaacccaggaggcagaggttgcagtgagcagagatggcatcactgcactccagcctgggcggcagagcgagactgcatatcaaaaaaaaaaaaaatttgtaaatcaaactgattttatccattcagtcagctctgaacatagaaaagaaatggcaacttatcagcatttgtggatatttcaaagttatctgaaaagtacaaaaggcttttcttaatggatacaataaaatccataattgctcaaaactatggtttcaagacaaaacccccaaacacatctacaatcccacaaacttttgcccacatgagatcaaaacggaaagaaggtaccgacatcatagttctccaggtatctggctcgttcttcagggctcattgacacagattcctccaggaattttttcaaggttgatccagattctgagaatatgaaagaagataaaattaaaaaggcttgatacagcagagagaccaatatatgaaaatactagaagtatgctactatttttcaggttaaattctttcattggtaggttagaaatgtaaggatcatgttataaatgataagccttacattattaatatttgtccatttgtttaacccctattagtcaacaatataaaagaatgagaaggattaatatttcttctaacagtatatacattcccatcatcaaggaagcagggaatgctttattttatagtttgaagaaagaattagagcaccacctactgctcaatgcaattaacttgtatcttaagggggaaaaaatgcagtaatgaaaaatcatttaccaaagtgcatcttgtctttattgtttgcaatagcatgaatcagtccaattgttccacaggcatt

SEQ ID NO: 73748 - DNA, 1040 bp, Homo sapiens
aatacagccagagctgcagaggagcatggaacctggagaaacagatgagataagcttctttagtctctatctgtgaaatgcttactttattctagtctcaattgaataaagtgttaagtgttagttctaacaactgaataagttaaatggcccctacttagagcctggaaattacaaataatcagatattcaatttcctaagttttcagagatttacgggttacacagtacagcaattcatttgattacccagatatcattcttaaatatctagtactaagcttttcttaaatttccttcaatttgttgtttctttagaagactttaggtgttaaaatttagctttgttgtcttcatttaaaaagttgagtataggcattttttccaatgaatacctttattcttattacaggccatccgagttactcatgagaccagtgcccatgaaggtcagactgaggtatttcacattttttctaaatttttcttgctataaatttaaccatataaatttcttgctgtaaatttaaccatagtattattgtaggacataaagttttagaaagttacttggctttttgttttttcctttgagagaatttgcttaagcaaaagcagtcataaagtagcaaaaggacatgttttgacaagctgttaagatgctgctgtctgctgtttcagttcatctaatcatttagagataatgcagattgtgtgctgtttgtgcggcttggtggcctgtgtcttccctatcagattcctgtgaggtccaactattttgagaaaaatacctgcactgttgtacagttaaatagcctgtgtctttattgtgtcctgcttccagcagaaaaccacatcattttctttgctcaataaatttgtttcagggtaatgtaatgatctttaccatctttaccctgttagctagttcagctgggttgcttttcctttccttctcttgcctcttttttcattttttggtttcttcatttttccttccatcttttctttctttctttccttccccccagccctgactg

SEQ ID NO: 73749 - DNA, 1415 bp, Homo sapiens
ctccattgctgtttgtattccagcctactgatttttttgtcagttcctacaaaatacataggtctttgctgtctgtattagtttgcttgggcattcatcacaaattgttaccaggtgcctttaacaacagaaatttattattacacagttcttggggctggaaatccaacagcaaagtgtcagcagggttggcttctactgagatgtcccttcctggcttgtagactaccaccttctcactgtagccttacctggcctgtcctgtgtattcatatggagggggtgtggagagagacggggagagagagatcaattgatctgatgtctcttcctgttcttataaggataccagtcctgttggattagtgccccattcttataaccttagttaacattaactacttccttcaatgccaagttttcaaatatagtcacgttgaaggttagggcttcaacgtatgaatttggcaggggggacacaattcagtccataacaccgtctttgtgctttctaacaacccagtacacttccgggtataccgctgctctttgcagagttggagacttctcatctttcaggtctcaccttaaaagtcacttttcaggctgggcgcggtggctcacgcctgtaatcccagtactttgggaggccgaggcgggcagatcacaaggtcaggagatcgaggccatcctggctaacacagtgaaaccccgtatctactaaaaatacaaaaaaactagccaggtgtggtggcgggtgcctgtagtcccagctactcgggaggctgaggcaggagaatggcgtgaacctgggaggcggagcttgcagtgagccgagattgtgccactgtactccagcctgggcaacagaaggagactccatctcaaaaaaaaaaaatgtcacttttcagagaagccttctttcatcactgttaagtaggtccttctgtatttttttttatgataaaatcctgtttattttcttcctggcactttaaaatagtcaataataagttttttcttccttgtgtatatttgtttattctgctaactagaatgtaggtcccatgaggaaataggccttgtttgtcttgttcgctttgaatccccaagacaaactggacatatataggcatgtataagaattacatagtttgaaggtaagagcacaggatataggtttgtatactgactccactgcttattagcttaggcaggatactttcttcagcacaaaatagaaataatggcatttaccttatgggattgttgtgaagactaatgagttaattatataaactgcttagaatagtacctggcatttaatgggcattcaataaatattaggcggtaattttattttactaggcatccagtaaaatgaatctgaatggcagaagatgaggctgaagtaa

SEQ ID NO: 73750 - DNA, 1011 bp, Homo sapiens
taaaatcgcctccaaaagattaagtcatgttgaaataaagaaaatgaggtatgaaaagtaaagaaaaacaaagatcagaaagttgcagtttcagacttttgacaaaactggactctacatcttgaaccgcatgatacatgtattgtttccgcctgattcttacaagataatcggcaacttaaattttatattatttaagaactaagcttcttcctaatatcctcagattctttcaaaatgaaggaagaggaaataaattccaaaaggagggaaataaatatgtgagcacctcaatttgtgcgtaaatcatttttggcttattggaatgatttctgttatctctttgtaatcccaaaataataaaaataactaaaaactatacttcagagtaaaatgaagccatgcaactatacatatacatctaatgaagatgaaactttatactatttactgccactgacagtctgtactggctgggccaaaaaagcccagtagattctaaacagaggattttcttaaattaaaaatatacacacccacacaaacacacacatgtatctttaattatgtatatatatttatgatgacatacttgaaatcagaaattatgcactgtttaccccagtggtcaaataatccctcttttataggtcaacactaaccaaaatagattacatattaatatttcattgtaaattaattacatattttatgatttaaattaacttcaaaaacttttactaaagatcttttaagtatcattagcaatcaaacatgttatttccccctattaaacaagcaaaaatttagaaatggaattcaatactggcaagcgattttcaaagctgcagtcaccactgaagtaaaagatctttgaagacacaaattatgtctcacttatctttgtatgtacaattataagcacagtgcctagtacagtaggtgctcaaacaggttatctgattgaacaaatgaaagaaagacaacttcacattatttaacaagaatcat

SEQ ID NO: 73751 - DNA, 1029 bp, Homo sapiens
ggttcaagatgtagagtccagttttgtcaaaagtctgaaactgcaactttctgatctttgtttttctttacttttcatacctcattttctttatttcaacatgacttaatcttttggaggcgattttattttattttatttttaaaaccaaaaatgctctgggactccctagcttgtctctgtctctcttctatctttttttgtttcttctgaacattgcttgaatagaggccttccctttccccttttctctccctccgtctgtcttcccttctttttttcctctccatttctctcctttcctccccccttctttcttcttttctgatctcagaattttagaaatggagatattaaattattacttattttaaaggaaaattcttagaccgaacttaccagttcacacttccagatctgactagatgaaactcgtctaagaatgctttcagcaataaaaatagaactgatgttgtgtttggtgatggtgaaagttttctgttagttttgttttatatcacaactttccagagtagagggtaatgttaggatataagatttttttgatttgtaataaaggagaactttatttggggctactctcaaactgtaaagaaaataatttctgggaattagtttgagaagtttaacaatggtaagcttaggtttaatgtaacatttagatgtacaggtattatattaatagatatttctaacatggagaattataaactgaagggagagaaaacataattgttaaaccagtcagggaaaaaagtctttttagaatatcttgatgtctgtgggcatcttgatttattaggtgagcaaaatgaagaaacttaccattatccagattttccatggaatatgtagtggtattttgtgtattttgatatctatcccatatttaacttgtgacttctttgccaaccgaacatggatactctgtaggaaactttgcatcttttgtatggatctggctttaatttcctttttaaaatttgaaccttaaatttactgtaatcc

SEQ ID NO: 73752 - DNA, 1043 bp, Homo sapiens
gaactggttttaagtttgacaaccagaagatagatttggattatattcaggaattcagatagaaatagtaatagatgtgcccttatgaatcagtcaaattagttgacagttgatgggcgagtgaccttgcaatggaaaacactgaaattggagctgggagtcatgagtctgcctctggctttcacactcactagttatgtggctttgggcaagtcaagtaggtccttgtgcttctgaaaaaaccaaaactgtcatgcttatggtctgtattctcatagctcactttctctgtgtgtgtaagtgaatgtgtgtgtgtgtttaaactcagaggatttaaatcagaattaatgcttaaaaatctcatgcaacaattacttattaaatatcttggcattcttcctgaagagtaaaacatttaatctgcattttaaaattcctcaggtttctgaaaagcctagtctaggtttttttgaactataatgaagagatgagtttatatttcatgtaaagtggtgtatctacagtcacattatactgttgcagtgcccacatagtcagcagtgagggcacaggttcactgttaatgtcctggcaaacattggtgtcgttaatagttttgatgaaataaataattgttagtgattttggactcttcaccagaatgaaaaaactgaggaagtgagttctttattcagactatctaaaaagtgaactctctttaagacttttatgaaagattcaaaaataaactgtagacatttaatcttttccaattagtatggaagacaatgtgaaaaattagccatctagctcaagattcagctcacagtttaaattttcatatttgaaagcagagctaaaaattaggttgctttaacaattgcattaacagttaatattataaggatttaaaagttggtgtatgtatctttaatctttgtaattctaagaggaaagcctgtgaattttacgtttccataatagcacactttatttcaaagtccttccatctcttgaaatgttattgcttgaaagtctttttc

SEQ ID NO: 73753 - DNA, 1868 bp, Homo sapiens
atattatgcattatctctggaaattatacagttggagatatttgtatagtgcgttcatttagcatgaggaggtaaaaataagtctgactagagtaaaaatttagaattattgattctaatgttttaacattttgacatacttgttagaaacaatctttagtatgctatcataggagcagtaaggtagtagacaaaagctttgcctgcccccaggccttacaaagtagtttaaaaataaacaattacaatatattgatatgctatcctattttgaatgttgtaaaacattagtcacatacaaacacacacacccacaagctttgacatatgggactcatttaacagagtgtacttttagactcattatccttttcttattccttcctctgttatataagtttttattagaaaacatgatgctcaaaaagaaggctaaaattactagtgtgataacatttggggaaaattattctttgtctttaaaatagaaataattataatatgtaccttataggattattgtgaagatctgtagcatctatagtttagaacatctggtaaaagatagtaagcacttgatattagctattatggttgttgttttataacatcattttggataccaatattattactgttgactgatgcatatatagatacttgtgtgcacattttcactaaagcgtaattgtagaaaaccagaaacaaactaaaggtgcagtattacatttatggtatgtctatttaaggaataatatgttgccatgaaaaatgatgtagagatatacttactgagatgaatagaagcccaaaatttatgggtaatgaaacaaaatagctaaaaattttaacaaattgcttaaggtcaaaagtaggctaccataagactataaaattcctgtaaacagccctgaagggagagctcatatccactctctgcagacctcaatgggtgctcatgagattaagtggggacaagatgggagagaatctttaagtgcaggcctaggggaggagagcagttgctgctgtgggaaaggcgtgaagcctggattcttctctcctgtagaacaaagcctaaagaccttgagacagaaaacctttcctggggaagggaagagataaaaccaccccttttgcgggaggggcaggttcttctaccactggaggaaaagacccctgagaaagtcttgtccttgatatccagggacagaggctgatctacaacaacaaagaatgcctccacaagcccaccattagactagcaagcaccaagaaacaggtctcaaatgtgtggggatgggtcaataatatggagagagaccttctctgaggcatagcctctgagcaaaagcctaaagctgagagtggaacaagagcattgaaaaagaaaacatcctacaacccaacttccactctaagcacaaggttatgccagataaattttaaaccaatggtattctcaaggtaatcatagcaacaataaaacccaaacagtaaactcttgactaggttggcttatccccatacactaagttgtagcagaagatgagacacgcccatttttaggcatacatattatttatcacagtctctatactcctagagaaggtgtctggcttttaaccaaaagcattcagcagagctagactcatatatgatctagatgtcaaactatcagacagggaatttaaaataattaaatgctcaagtggaaaagatggaaaacatgttctatcacatgggtaatatcagcagaattggaaactattaacataagaaagaatcaaatggaaatgccagtaatgaaaaatacggtactagagatgaagaatgccattaacagattcaccagtagactcaacaaa

SEQ ID NO: 73754 - DNA, 1034 bp, Homo sapiens
gtcctagccaatatagtagggcaagtaagggaaataaagggaatattgtttaaaaaggaagaagtaaagcagtctctaatcacagagatcatgactttttaaatagaaaatgatttattaaaaaatggagaagggcttgatgtttaaaatataaaagataaagactgttagaaatgttccaggttaaaagatactaaggagacatgatgaataaatttaatatctgtgcttagattagatcctgggggaaatgctataaattacacaactagataactggcaaaattaaaatatgggagattaggagaaagtattatatcaatataaaattttgagggtgataactgcactgatattaatgtaagttaattcccttagtcctaggaaatactgaagaatttaggattaaagggccatgatatatgtaacttatcttcaaatgattcaggaaaaaaagttatgtagaaaaaggaaaagagtataagtgcagatgataaagcaaatggaagtaaaatgtcatagtcaaatctgggtgtttcctgtattatgcttgtttttgtaactctgtaaatttgaaattatttttttaaaaagaagttttcaaaaaggttcttcaaaaatgacaaaagaagagggccatcatacctgaagttggaaatcacatttctcacaggtgtgtttggagtaagcaaccttaagggatgaggtaatgtctttgcctctggaacaaagagcctgtttgcttactgcttgctgtaaaccagtggtttcccccagctcagtattcctctcttgtaacacagcctattcttttgcaaccatccaccctagctctgtctgttgctctcatgtgaattgccacaaacgtattgatgatcatgctccttgctgtgctataagtaataatttttttttttctctgacccaggcatctcatgccttttgccaatacccatgaaaaagtaagaggctaactgattaaattgaaagaataaactcaaatttcagatctgacagattactcttctaaacat

SEQ ID NO: 73755 - DNA, 1070 bp, Homo sapiens
cagagaatggtggtagtctttaatgtattaattccctactctaataaattgtaaggttaaccaatgaaaaggactgagttatttctcttttgttatcaccctcccttttccttggggcctcatatagtttctggcatatgtaaaggggaagaagtacatattttaaaatagataaaatgactccttgtggatatagagtagagcattgggatttagaggtggatttggaactgattgaacaatcagattaaaaaaccattaactaataaattattgtctacctgaagtaacaggaatactttgaagcagttttagaaattttattttgaagtaacttaagatgtttgtagaagttacagaaatagtatacagagctcccatacatcctcccacagattacccagattcaattcatatttctgagccatttgaaaataagttgaagacatgatgccccattatctttaaaacttcggtgtgtattttctcaaaacaagtggatactctcctacataactatagtatgaatatcaaaatcaggaaattattataacattgatccagtattatctgatccacagaccccattacagttttcctgattatcacaataatgtcctctattcaggagccaatccaggattatgtgttgaatttgtcatgtttctttgtcttctttaatctggaacagtacctcagaatgctttcttgtctttcatgactgtaacatttattttaagagtatagggccagttactttgagattatcctccaatttaggccatctgatttatcctcatgatttatgcatttttggcaggaataactgcagaaataatgctgcgttcttctcagtgcatcatatcgagaggcacatgatgtcaatttgccccattactggtgatgtttagtgacttttaggtagtttcttcacaataaagttaagaagtatgtcatgcagttgctcatcaagcttttatcctccagattttgcatccattgattattcttgactggattatcattatgactattgccaaatggcaattaaaaaaaaattcccccaacat

SEQ ID NO: 73756 - DNA, 1046 bp, Homo sapiens
aggctgagataggagatttgcttgaacccggaaggcagaggttgcagtgggccgagattgcaccactgcactccagcctgggtgacagagggcaagactctgtctcaaaaaacaaacaaacaaacaaaaacttactgtatcttatacttttgtacaaagcaaattagggcacccatgttcacttttctggtgttctttatttctcatttggaaaaggaagtttgcagtgtaaaattagtatgaattagaaaaatatgaaatgtttatcatttgtaagtaaaacacttttacactgaaaaatcatacttttttttttcctccataggatgccatagaagtttgcaagaagtttatggagcgcgaccctgatgaactaagatttaatgcgattgctctttctgcagcatagcttgtcaataatggaaacaccaaaaactgtattatttgcaactaaattttctctgccatacactaactcaaaaattttgatattttcattaacttgatgattaaactttatgtgagttaaactttgccttaacctgtgttttatgttatttttgctccaggttaaaggtgcaatgctttcctcctcttttcttgtgaaggatttatcttgtttgaaaactagcaatagctttcttattctttttagattttacaggaaattttgtattgggatactaggcacaatttccatctgcataacatgaatatatattatctatgttaacatgtttatttagaaaacatttgtgaagcgtctacttgtaacgagatggatgccattctgggttcagaagttaaagcatagaacgctgttgaaaaatgtgatagtcatggagcttatgttattgtgagaagagataagtaacaaacacatcaagataaataccaatgatagatgctgtgtggagaattaaaataggatttgtgttagggaatgaccgagcagctactttagattttgttgtcagggaggcttctgtgaggaggtgactttaaagttgagatctgaatgactaagcctgtcataaaggtggtgg

SEQ ID NO: 73757 - DNA, 1691 bp, Homo sapiens
tatgcatttatcataactctgaattgtacatttaaaatctgtactttacatacattttatcttaagaaaaaaaaccagggttgggttgaaatgagtataataggagaaaaaccagattggtctagaatgaagtttttgaccagtaattgaatatagatgtttacgcacaattcactgagttaagagtagtaaggcgtggcttttagaatgaattagatctttgttactcaagtgtggttgcatcatagtacctgggagcttcttagaaatgggaaatttcagaccccacccccaaaaccttttaacaagatccctgcttattcataagcaataaattaagctggaagcactagattagattagttaagcatttttaacaagatcccttcttattcataagcaataaattaagtttgggaagcactagattagaaaaatagactataacgaggaaaataacttcggaagatatttaagcttaccattattctacagtgaaaagggcatgggtgaaatgttggcaatagggatgaaaaaataatctgaaacaatttgatagactgtatatgcagatgatgcttaccataccaataataacgacccacatattctattcttgttacattatcttttctgtgttatcttaaatattttaaacattcctaagcagttttctgcctgttgccttgctggatttctcttaattatatgatttcttaatagatcctaaatcagtggcacattacctagaatttacatagtttctcaaaatatgctgtgagaaacactaactttgcaggactcttaatgggtaagaaagatttgaagtcaagtatcttgaaaatattgggttaaacaatttttttgaaagttacaggtatatttggagggggggcaattatagaatgcctcagttttttcaaaaaatattccatgtattatgaacaacattttctaaacattttagggagcagcacttagagctagccttctttggcacacagtttaaggtggtagtcccttgtggaacagacagcttgaaaacttttcttgcttctctcttaggtttatgtgtaaacttctagttctcaactctattccctacaatactttgtttagtcactttcttaaaacttggcacttgtagaaaagattaatagtttactttgtgtgaaaactcgtggagacactaagtttgataagttgtgggttatttctgtatactgctgttaatgaccgtgatagcggggaaaatagaactaaaatgagaactagaactaaatgtttttgcttggtggacttttgagaacatcatctttcactgggtataatggtttgctttaaattactgaaacagatgagcttttataagccccataatacttaacctgaatattttcaatgttcatttgtgagtaaagcagaaattacctgtattctatggcaagtcgaagtttaagctatcttaaatgaaaactatctttgattccttataaaaatatttgaacgaatctgatttaaatttattttattccatctttgatttgtgtgcaagccttatttgataagctttatcactgggctgtgtataacatacaacctgcttatttaatgaaaatagtagagcttaaaaggtatttttagacattaatgtttgtctactactgtatctttcaaaagaagcattatag

SEQ ID NO: 73758 - DNA, 1021 bp, Homo sapiens
gctcagttcctcagtgtcaggaagtggcatatacagatctcacttaatcactgaagctataattttgggtcaagtgtatgggtagctgtattatctggcctttttttggtaatacagttaatacaatggcctggaatatcagcttagagttcaaagaagcaagactagtatgcatgatataatccatcatccttcttattcatgaaagtgcttattaaacaaccacattttgataaatgtataaatacagatgagtaaataacaaaggcaattttaagtctttttgtgtagcactgacatttgttctattattagcctgtttctggaatatgggcttcattgtgcagccattaaggaattcatcaaaatttcatatcagctgtgtggatctcccctgtctgtggctgccacctggctctgcttcaggctggggtgataattatttcatgtggcactgggagccctcctccctaccgtcactgaatctgttctccttttcctccggcttttctgtcttctgactccatgctctgttccaggacatagggtaattatcattattctctgttgtggaggaaaatattagttaatgctgggtttcagacttctcctctcctgtcaaggcatttgttaggtctttcctttcctgccaaaggctcagagtgttttcccccagcgtaggtgccatctgtctgctcagggactcttgtttctgcatgtggccgaggagcatgggtggcctggctgagaggcagtgaggctggttttctttctcaccctctcctcctctttgtgactgccttctgtggttgttgggcagctcccccatcttgctgtctctcattgtacctaaagtcaacatctttttcctgatttgtgctctttagtctctgaaccttagttaaaacttctctgtatgccttgagcagtagtctgtcttttcttttaatcattttgcttttaggggaccttaaaataaaaaaaaaaactatttacgaatacttactgtcatgcatgtcat

SEQ ID NO: 73759 - DNA, 1039 bp, Homo sapiens
ctacatggctggggaggcctcacaatcatggtggaagatgaaggatgagcaaagggatgtcttacatgatggcaggcaagagagaatgagagccaaacaaaagaggaaaccccttataaaaccatcagatctcatgagacttattcactatcacaagaacagtataggggaaactgcccccatgattcaattatctcccactgggtccctcccacaacaagtgggaattatgggagctacaattcacaatgagatttgggtggggacacagccaaaccatatcaggcagtgtcttccttttctttgttatcttgaaagggaacatgtgtattgatcttttatatttctcaatataccagaaagtattttaagatactattcttcatgcttcaacttttataacctttaatcaaatgattccaataagtggaaataaaattactacttgatcaacgggaaactaataattagatgcattgtagagctgtcagtgtatctacttttgagataaataagctggaaactttgttgagatcgcttaaggccctagaaagaatctaggaaaaactgtttctgcaagttgtttgaggaaagctgatttctccacaattctgccattgggaatgtaattaactctcaacagggagttggagaattctacaaacccatttaatgtggccctctttgtgatatctttcgtgtgttttcagctttgagaccatacaattaaagtgaattatggaaaaagacaataaatgtacctgagaaaaccttgtcctgtggaattatttatatataatgcaaagatgaaacacttaagatagatgcaaatatatgaaaggaggaaatatcagaatttcatattaaaatatttctggatataaagtagctggggtagaaattccactttgcaaattaagacctattcttgtgaaaaaaatataaatacatatatgtaatataatatacttatatatttttaagagatagggtctagctgtgttgctcaggctagagtgcagtggcaggatcatagctt

SEQ ID NO: 73760 - DNA, 1022 bp, Homo sapiens
taatttctttcagaatactgaattctcaacataagaatgagttcacatttaaagtgtgatttattcttatttttaaacaacctactttcactatgttttgagatggtttgtagatttataacttttgcaatgttgtcagaagacagaaagtaatttaataactcagtttcttcctttaaataaaggatgttgcatctggcaaaacagacatttatctgctaagatgcagcttcttactttcattctacagatggatagtaacaggtaataataacagctagcatttgtgagtgcttgtcttgggtcaggcaagtgctaagtgtttcatgcatattatctcatttaattctcaccataaccctttgagatgggtacatttaatctccatttcacaaatgggataactaagatgttatgtagcttgttcagaattgcaggtagaaagtggcagagcagggctttaaacccaggcatcctaattccagtgcccctacttggcctcaacaggccaccattgacatcatgttgtgaccttaaggtaagtagctgaggcagcctctgtagacctaatagtcctgctataaaattgtgctttctttttttggttttaaactcataaaaaatttttgttttattttagggggagtcttaggtgagtttacaattatatggtataagagttgctaattaaaaaatcagatttttcgagttattgaggttggagtagctagtatgtgcagtacaaatgttttataatgcttgtgaaaatgcccacagaactgttaaaacatttaaagagaacttatcttatactgaaatttagagtattatatttttattatcttcctctgtctctcacacctacacccatgcacacacacagtcattatgtgttaacacatctttttatccaggaaaattggatgaaaagattaactgaacatttttatttactgatctaccttctatacccttaacagaggaggattatttttgaagctgtattatgttgtaaaataccc

SEQ ID NO: 73761 - DNA, 1011 bp, Homo sapiens
aatattctaatgggtagaattgcctggtttggaagttaatacacaaaatctttgcttcatcaataaatcatgatgattggagtggtagatttttcctttaagctttaagtggagtcattacattaccaaaatcaatttgagttgtggaccattcattcaattaatagacaccattgagaaccacaccccagactttgcttacaaagaagtaagataggctagtaccatgattgatagtataaggcctacattgtatgtgtagtgtaatattttgttccccaatggatgcatagtacagttagtcaagtatatgaactttgggaataagggagaggcaggcctgtgaggcataaggatgaaatcctgggtgaaggtagaggttgcagaagcgagcaaataaattctaagaatgtacttgagtactcacccacatttttgaaagcacttaattatttcaatctagacacttatcgcacaggtatttatgctatctgtccacatgtaagcagtgagagtgtatacactagtacttagagattttgattatccttttgaaggagttgtttgcagcaaaaggtctggagtcaaagggcctaggttagatttcttgctccattatttttggacctttgaataagtgacctcacatctttgaacatttgaccaagtgatttaacatttgagccttattttctcatcggtaaagtagagatcaaggtatctgatgtgcctaattcacagagttgctgagttcaacaatatatattttaaggtttttataaacgatcaaactttgtatatatacaagttgttgctagatgatgggcatgtaaataacagtctatcttgtcagctctgttggcaagtgttcaaagttctttgtcttaaggtgatattattaattttgttccatatgaagttgctgatatttaaccatttgtgacctaaagaagtgtcaatttcgtgtggtttcacctaacgtataggtgacatgtataggacacacatgtg

SEQ ID NO: 73762 - DNA, 1087 bp, Homo sapiens
tagtgagtgagttctcacaagatctgatggttttataaggggctcttccccttttgctcagcacttctccttccttctgccatgtgaagaaggaggtgtttgcttccctctccacaatgattttaagtttcctgaggcctctccagtcctgtggaactgtgagtcaattaaacctcttttcttataaattacccagtcttgagcagttctttatagcagcatgagaatgaactaatacaactagacatttatatttttaaacacattaaagaaggcatctttaaaaaataatttgagacaggtacactaaaatcccaggcttcagcactatatagttcacctgtgtaaccaaaaaccacttgtatccctaaagctattgacattaaaaaattaaaaaataatttgaggtgaaattcacataacataaagtattaaaaccattaaaaaccattttaaagtacacaatttagtagcatctattacattcacaatgttgtgcaaccattaaacatttctaatatttcaaagtaaaacctcttaacatcaagtggtttctccccatttcctcctcctccattcagcttctggcaactaccaacctgcatttcgtctctggatttatccattctggatattttatacaaatggaatacgtgacttttgttttctggcttctttcacttactgtaatgttttgtagcacatatcagtacttcattcctttttatggctgagtgctattccattgtatggatagaccacaacatgtttatccatttacctcttagcagacatcagaacggtttgtaccttttgatatgtacatgcacatgcatgtacatgtaatgtacttatttgggaatctttttaattctttgggatatatataggatatatacctgggggaaggcatctttttaatagaaaggaatgggagtgagtgggaatgtgggatgaggaggaaaataattaaaataacaaaataaaatgagagagcccttatactgactgataagagcttgcttaaataggaatgatgaattcaactttgggtcctgacatttcttcccaagcacttacattactg

SEQ ID NO: 73763 - DNA, 1037 bp, Homo sapiens
agtgtagattactgctcagtggctaggcacttgtcctgtaacaggtaatgtttaacgtgccagtcacaaagatcacagaaacagtgtatgcccgggcataagatagcacgactgtgtatgctctggaggactgaaaggctgtacaagccctatgtattttttttcaaatatacatatgcatgggtcttgctgctgcctcttttgctgactgtaattggactttgaagcttcgaagttatatcataaaaatttgtaacctttgtctgagagagagctcagctaagcaatcactttccacttcttttcacaggataatataaacgttttcttgaaagcttgtgaacagattggattgaaagaagcccagcttttccatcctggagatctacaggatttatcaaatcgagtcactgtcaagtaagtttcaacagtttgttagatatatatatatatatttaaacttagggcttgtagcttaagtgaaaagaattgctgagagttcatgattacagaaaaattcttctgttctctctgttttcctctgttctcattctaaaagagactgttttaaaaatggcttagggactgtgaaggtgaagctgtttgtaactcataacatagcatagtcttactataaatctctataccgacaaaaatggtagtgttaatattttaatgtgtgtccaacatggtagtgtttggttgctaatgttgaggatactcataaagtgaatttaggggttatattatagcttgcagagtaacaacaatctttaaatttttttatatatttggaattaagacataattattagcataaaaattagataggacagtagtaaaaaagaatctcttaatattgtgaaggcagcagcgcctgggaccaacatgtaatgccaaggaccttgtcagttgtggctgacttttaaaaatgagctgtttttcacgattttaatagtgtggatgagaaagtgaaagtgggggtgagaacacgtatgccagtatctgttagatttttggtgaaaaatggtgtttgt

SEQ ID NO: 73764 - DNA, 1068 bp, Homo sapiens
aaaaagaaagggaaaaaaagccaatttcggttatttctagggatttccctccacccccaggagacatttggcaatgtctggaggcattttttattgtctcattgggtgggtgggggtgtgtgtgctactggcaactagtgccttcatagccagagatactgctaaatgtcctacagtacacaggagtgccctacaacaaatagttttctggccccaaaatgtcagcagtggtgctactgaggaaccctcattgagactataaatctataaatgaaaaatctacatcacattgcctttttattatagtgtatggtaattccaaagcctcttgcccaagttttagcattgattgctcttcagagaattcctatagtacctgatggaaatatacttagaggtacataaatcagtatgttcctatctccctctgaaagttggggagccttaaccctagtatcatggaatttctgtttgccgtataaggctatccatgattttatatttgagaaaatttgccacatgctggttcttttcgatccttactccttagatagtcacctataaagttcctgaaagtgagttctaaaaggaaatgccttaaaactagccaaaaagtgacaggagcatagtaggcaatctgcatagtgggagaagagagtaagactttagcaaccttgttttatgattgacaccttcttccttaaagttcctctttttccttctaaatgttatttttaaaaaattctattcaacagaaaggcaagatgctagatctgtattttttggaaaaaatccagttgcagttctaaattggagcctttccaaataaggaaatacaaatgaagcaggacttgtaagagacatacgatgtgatttgccagctaatcatccttcattcaacacaacatactagagctgtgcaatccttcatagttttcccaaacaattttcctgatgctatctttggtacttatctcaaatctgtgaggccgacagatagggatgtggagatagagaaacaaatattgccgctttcccaaggacatgtggcttgtgagtggtagaacc

SEQ ID NO: 73765 - DNA, 1918 bp, Homo sapiens
taactaggttgtgtgttgtgtatagctacagcaagacaagtattactgctgttttatattttaaaccttgatgctggtaacatgtgtttcttccttattgtgaaagggtgttacaagtggtatcagcaaaatcatttgcttttgaactctgaggtatttatatggcccctatgtgaagagtgctttggaaatggtttaagcccagtcaactctcttttatctgtcggtgggttctgagccttcctgctgcagctgtccagtcctttcctggatgctgacactgaggttggagaaagtcaaggctgggcatgtactggtggggggtgtgtgtatgtgtgtgtgtttttctctctctcatcaaattccaaagccaaatagaaatgatttctggaatcaccattgtaaaattgcccatgccttttctctcctccaaaacaaataatagagagttgagtgtaatttatttctattgtgagcagttcatttttactccatttttacaaataaagaattccagagacgagacactgagacttgcctagctttatcctaagagtgagtgacaggttactctttctacctcattgggccactttctgagtgatgactgctatgtatcccagatggcaatattcacgtttctgaatctaagcacttttctttcttttctccttgcccgatcagctggacggccaaccgccatgtgatgtaagcctccatacgaaagcactgttgcagatagaagaagaggtggttgctgctcatgtagatctataaatatgtgttgtatgtcttttttgctttttttttaaaaaaaagaataactttttttgcctctttagattacatagaagcattgtagtcttggtagaaccagtatttttgttgtttatttataaggtaattgtgtgtggggaaaagtgcagtatttacctgttgaattcagcatcttgagagcacaagggaaaaaataagaacctacgaatatttttgaggcagataatgatctagtttgactttctagttagtggtgttttgaagagggtattttattgttttttaaaaaaaggttcttaaacattatttgaaatagttaatataaatacataattgcatttgctctgtttattgtaatgtattctaaattaatgcagaaccatatggaaaatttcattaaaatctatccccaaatgtgctttctgtatccttccttctacctattattctgatttttaaaaatgcagttaatgtaccatttatttgcttgatgaagggagctctattttctttaccagaaatgttgctaagtaattcccaatagaaagctgcttattttcattaatgaaaaataaccatggtttgtatactagaagtcttcttcagaaactggtgagcctttctgttcaattgcatttgtaaataaacttgctgatgcatttaacgagtgggtcgtctttttcttaggtgtatgtgtctgacctcaggccttttagccatatttcagtatgtggccttttttgatgttatgttttatccagtagctttactaaggtataattgatgtaataaactgcatatatttaaagtgtatactttgacaaattttgacatggtgtataccttcgaaactatgccacagtctggatgtgtttactgaaacattttaataaggaagtttatttttgataaagttatgtttttggatacaatatatttgtatggtgagagtgatgaattgttggatcatttgaataaaatcttttactaaccccatgataaaaggagaagacaacagtgagcttagaatatctataaagcaaaaaatgtagtctcttgtttaaaaaatctggagcgggaatgcaaggatacaaaactttagcatgctttgagcaaaaatttaaacttactggaatctttt

SEQ ID NO: 73766 - DNA, 1010 bp, Homo sapiens
gcttgtctcaccactagggggaaggcaaatacaactcttgggtgcttctgtagctcacacgagggtaaataacgaaaagttttaatataaacttaaaaattaaaaaacaaaaataagtaaaataaaacttggggtttctgatagggcctttgagtactctcaactctagcccttcttgttgtttaggttcaattacatgcattgcatgccacaagaatgtctagcattttttgagtgtttactgtgtggaagacactgtatggaacatgttacctttaatccccaggaaaactgtgcaaggcgggcattatccacgttttacccagaaggatcctgaagctcacagaggttatgtagcctgcctaaggttacccagctagcaactggcaaagctaggaggtaatgcagatctgattgcttctaagccagactctgcttttattttttgctgattcccatagttcccctctctcacagcccactggatgtgtgcatatggtccactccatcactacagtcatgaaggataatgccatgaaaacattttgctctgtgtttgagtgattctgatttcatgaaatgatagaaattataactatgttaaatattgtcagaacattatttctggaatagtatttgattaacttgtactgtctccattcatcccacagagctctggggcccacattccacactcctttgttcttccaggaggctgttctccaccagtacctctcctattttctctctctgcagcttacagctaccaatgaccgtaggaatcaacacaaactctcccatccggcctctactgtttgccatttgcccctccccatctcaccttagctaaggttttgcattgacctgctatttccaatcacgtcagtcaatgtatgtttcttaacagtagccaccatttgaactattctgtcatacttgccacgttcagttgcttagcatttttaacatcaaattcaaaatgtatccttcaaaatactttcattgaatat

SEQ ID NO: 73767 - DNA, 1073 bp, Homo sapiens
aggcaaagagctttattaacctttgtttcaaactttattcccaggcttcttcagcttaattagctgcaaagagtgaattgtatataagcaaaaactgaaaagagctgcagtgtccaaggggcttaaaaatattagagatctagattttattagatctgtaaacaaaacatttttaaaaagcagtcataacataaaacagcagctctcagtaactacttcaagttttatcttcttcagaagttgacttaattcagtttgcctcattgttggaagcctcatcagaattctccacaagatctagaacttcatcatcctctccagtagcaagtggtgcttttccacccacagattgtttgggcagtgttagccagtctctttgaactagtcagaccatctgcagcactggtttatgatcgatgctgagtagcatttctgtcagctgctttgtctcagcatggcctgtcatggtgaaagtgtttgctgccagcgatgcctgaacttcagggttgttaaagtgaatcactgttccttggtgtgtaaacatattcacctcttcaataccagggatattgtttacccctaatttctttaaggagaactgaaattttttatcctctgctgtcgctaggtttatgatcaggactacccttatgtataaaaccgttaacctctgagccttgaagggacaagataaatgccagctgccagtcttttggttgtaccagaaggcctggacaatgagaaccctttttctggattggttccattgctgttttgtccctgaagtcaagaagtaccttaccaaactgacttttaaagttcttttgatattggccaatgtccctggacattcaaaacctcatgagttcaacaccaaaggtgtcaaaggggcctacttgccctcaaacacagcgtctcagatgctgtgaaccacctttttcctgtgagcagttcctttccgaccagtgtgcacttctgcttgccgtttggtgagtttttggttcatgattgtttctttcatcttatctgagtggaaaaggggctgcgtgggggactagggttggcacttgggg

SEQ ID NO: 73768 - DNA, 1034 bp, Homo sapiens
tccctggtattgaagaggtgaatatgtttacacaccaaggaacagtgattcactttaacaaccctgaagttcaggcatcgctggcagcaaacactttcaccatgacaggccatgctgagacaaagcagctgacagaaatgctactcagcatcgatcataaaccagtgctgcagatggtctgactagttcaaagagactggctaacactgcccaaacaatctgtgggtggaaaagcaccacttgctactggagaggatgatgaagttctagatcttgtggagaattctgatgaggcttccaacaatgaggcaaactgaattaagtcaacttctgaagaagataaaacttgaagtagttactgagagctgctgttttatgttatgactgctttttaaaaatgttttgtttacagatctaataaaatctagatctctaatatttttaagccccttggacactgcagctcttttcagtttttgcttatatacaattcactctttgcagctaattaagctgaagaagcctgggaataaagtttgaaacaaaggttaataaagctctttgcctagtaaaatatgtgtgtgcctgtgtgtgtgtgtgtatgtgtacacacatatatacatgcatacacatatatgcatatattcacacacatatataaatacatacacatatacacatacacacatatagtattcattaagtagaagtggatcaccacaaaggtcttcatcctcgtcatctttacattgagtaggctgaaaagtaggaggaagaggagggttggtcttgctgtgtcaggggtggcagaggcagaaggggtgaaggaggtagaaggggaggcaggagaggcagggacgttacatgtgtattagtccgttttcacgctaataaagacataactgagactgggtaatttataaagaggaagaggtttaactgactcacagtgccacatggctggggaggcctcacaattatggtggagggcaaaggaggagcaagggcgtgtcttacatggcaataggcaagag

SEQ ID NO: 73769 - DNA, 1012 bp, Homo sapiens
ccacaaatcatctgttaattgtccttttagtagccaagacatgaagtacccatctcccttctttgcatttggtgaaaagattcgaactcgagccatctctgctaaaggcatgactttagtcaccccactacagttgcttctctttgcctccaagaaagtccaatctgatgggcagattgtgcttgcagatgactggattaaactgcaaatatctcatgaagctgctgcctgcatcaccgctctccaggcagccactgaggctctggttgttgaagtaaccaaacaacctgctatcatcagccagttggaccccgtaaatgaaagtatactgaacatgatccgtcaaatctctagaccctcagctgctgatatcaaccttatgattggcagtacatggtatggagatggtccaggtcctcctaagatggcccaatatgacaatggaagcggatatagaaggggaggttctagttatggcagtgaaggctatggcagtggctatagcagtggaggctatcgtagcggaggctatggtggcagctccagctcctgtcgggcaggatatggtgcaggtgttggtggaggctatagagaagtttcctgaggtggctatagaggcaactctggaggagattacagagggcctagtagaggctacagatgatctgggggattccagcgaggaggtggtaggggggcctatggaactggctactttggacaaggaagagaaggtggcatctgttaaggcttggttatgtcagttcctgtgtgtagacagtaagaaaaaaaaagccatgctatgtgtgacatttttttccaatgtttatttcccaccaaaaagtaaatgcattttaacccattctgtggttcactgtagcttaaggaaaccaagcatatagatgcattagtgattttgtttatattatgtaaaatgtaacgatctatcttagaaataccacagtttgtatttttctttaaggagtaaagatttgtctttaaaaataacttg

SEQ ID NO: 73770 - DNA, 1014 bp, Homo sapiens
aaaattgaacacattggaaaaatgttcatttattctgtaaacatttgcaaatgtctactatgatctggagctataaaaattttaagacaaaattcctgtcttcaaaattttcacagtgggatcagggaacagggaagcccgtatttatcagagtgcttttagtttatcatttgctattaaaaacattattggaagtttgttcacaagataacaaaatgtgtgtttatatttattaactatggtccgacctttgaatggtcccctaaaaatgttactggattctaaaagacgtgagaagaatcagattcattttagaatctaagtagatggtttctttttctttattaggcgctttgacttccgtccaaaacctgatccttattgtcaagctaagtatactttctgtccaactggctcacctatcccagttatggagggtgatgatgacattgaagtttttcgattacaagccccagtatgggaatttaaatatggagacctcctgggacacttggtaaggatgcatcttggtcttataactttggttaattcaatgatttggttattaagttgatttttaaggagtaatcactatttagatggctgactttagatcatgttggtgtttgtcttagtacatttaaaatgagtagtcaaaaatagttactatcagattttgtaatcttgacaacaacaaatgtaatcaccattatccattgtaatattatgaatctgaaaccagctcctgtacctagctcctggaaggtgagaagaggcccagaagtggcagggcaggcaggtaacacctcttgatttccatactctgttgtagtcacttttccaggttaacccatcaccatgtgaggtctgtagagctgcttccagagactggcatgggggctcctcacacttattctaagctctaaggaaattatcagcttgtccacataacatgcaggcctcctatttgagatgagccaaataggggtgtagtggccaaagctggggtggatg

SEQ ID NO: 73771 - DNA, 1117 bp, Homo sapiens
tttcccatgcatgtttatagcagcacaatttgcaactgcaaaaatatggaaccagctcaaatgcccatcaatcaatgagtggataaagaaaatgtggtgtatatataccaaggaataatactactcagccataaaaaggaatgaaataatggcatttgcagcaacctggaataatggtctccaattccatccaagtgaagtaactcttcaggaatagaaaaccaaacattgtgtattctcacttgtaagtgggagctaagctatgaggatgcaaaggcataagaatgattaactttgggaagtcggggaaaagggtcggagaggggtgagggataaaagactatacattgggtacagtgtacactgctcgggtgatgggtgcgcaaaaatctcagaaatcaccactaaagaacttattcatgtaacttaacataaccagttccccacaaacctattcaaataaaataaataaaaaatacaaataagagatgaaaaaaattcccaaagtttaatggttccaaaagtacattttacaaatgacctctaagtaaaacattactgaaatgtttcaatggaagtataacaatttctttcatttggtttttgatgcaatgatcaaatattgctatattttcacaacttacctgatatagttgctacttgaactaatgtcccattttccttccagtgaacatcatcaattccctcaaaaaagcaggcagcgccttgattacaccagaaaggggcatccatttcaggtcggagatggggaaatgtacagttgccaagttggaaaagttcataccattccattgtgtagttcttgccagttaatgtacttctgaatccaatggcatcatgcataattttctgtgtaaagacagtacatgtataaaagcaactgtgacacaaccatgggtccaggtaacctgataggagaaaatgtggcacatcacaaatgcatatcaagtagaacaactgttcagctgttcttccatgctgctactgtcatatccactctgtggccccaaactccaggccctcatccaccccagctttggccactacacccctatttggctcatctcaaataggaggcctgcatgttatgtggaca

SEQ ID NO: 73772 - DNA, 2203 bp, Homo sapiens
aagagagggttagccatcctggagtatgaactcggcctaaaacatttccagtttagttgatttgttggaaggacttaacgtggcaggtggagaggtcatcagcagcatcccagcaactccaagtacagggaagaaagaaacgtaccaaacacacaaggtggatggggtatggtgcttgttctcataacagtaatagccagccttctagagcagtggctcctcaggcagccattcatactttatgtgtagcatgctttgcaacagtgaagctccacatttcccacacctccattttccttacactgtctttgcccattctgcttttcctctttcgcaattctttttgtgctttccttttctcttttgcctctgaatccaagatttggtgagttgggtagagaaagagagcttctgcatttgtataatttcgctttgactatagcttaaatgattatagaattagtatgtaagatgacttctccttatacacctattatatctaatgtttataattcagaaatatcttgtgccttgaagaatggaataaaattggctgagcttggattcctgttgtgaaatgcaggtgtggaaattcaaaaccattgtttactcaggcatccagtcttaatcaagttagaacattttacttaaaattaatatgattaggccagccatggtagctcaaacctataatcccagtgctttagaatgctgaagcaggaggatcacttgaggttgggaatttgagaccagcctgggcaatacagcaagaccccgtgttgcccaggctggtctcaaattaaaaaaaagaaaaattaaaaaattagttgggtttggtggccagcgcctgtagtcccagctactcaggaggccgaggtgggaggatcacttaagcccaggaggtcaaggctgcagtgagctgtgatgttaccaccgcactctagcctcggcaacagagggagacctgtcttaaaaaaaaaaaaaaaaaaaattaacatgattagctttgttcactaggtgactttgttttgtttttttaaactaggaaacatgttcaaccaaatggcaaagtgggtgaaacaggacaatgaaacaggaatttattatgagacatggaatgtaaaagccagcccagaaaagggggcagagacatggtttgattcctacgactgttccaaatttgtgttaaggacctttaacaagttggctgaatttggagcagagttcaagaacatagaaaccaactatacaagaatatttctttacagtggagaacctacttatctgggaaatgaaacatctgtttttgggccaacaggaaacaagactcttggtttagccataaaaagattttattaccccttcaaaccacatttgccaactaaagaatttctgttgagtctcttgcaaatttttgatgcagtgattgtgcacaaacagttctatttgttttataattttgaatattggtttttacctatgaaattcccttttattaaaataacatatgaagaaatccctttacctatcagaaacaaaacactctctggtttataaaacaccttaattctactgctcttttttctccaatcaccagcatctgtttttcagggggtgattttacttttgtgaattccttagcctttcttccttggtgcataaagttaaaatgcacatcagcagaattgctgcatattaacatctcaggactcttctcttgtaaagaagctgaaattcgtactatattggccaaagtgagcgagttaggtgatcttggtttcaatttccgagcctttgttaatatggagaattatggttcatatcagttatgtaggacctttggacccagggtcctacagatagatatggtgtgcccagattttaaaaataccttcaaaaataaaaaatacattcagtgacattttcatggtgggagctcttctttctgatatggcagttacactttttcacttaagtgctttagtttagactaactttacaacttctataacttttggaaccaagtttagtatagtctgattacattccattcacctaactttagacattcgtttagacaccataactggagtgattgtgcttctagatgtggcaaatccagtgttaacacatatttctggctgagattttggaactagctagtaactggcttgtgttctttaagcatactaacatcactaaa

SEQ ID NO: 73773 - DNA, 1057 bp, Homo sapiens
tcaaatatggatttgaaacatttttaagtttaaagtcaaatgtttgtgtagtttttaaaaagtaaaatacaacagcattagtaactttttattctcaaagtgataaaagcatttaacatatactttacagtataaacaaattaagtactatgcattttgcttataaagtgacaaagtattttaagcattatataattcaatttgtacaaaaagtaaatttccaaatacaagctttggttagtagaactgattatgtactgtcaaatccatttttccaaagttgttcaaggaaaaacaacaacttgactagcacaggtaattcttgtacaatcagagctttttactatttagaaggaggggatatattactataattgctgttaattttcgaatctagataagccttttttcttctcatatgttgctgtaggagagcatatcatcacttttggaaagcaaaaattatgtagaaaatcaccttttgctttattcttaagaaggccatccgttttaaaagtagatctaagactgttagcttcctcaaccactgagacacaatctaaaagtcacaccactgaaaagagccgctttaagaattaatgtattccaccggggttaaatcatttctgatttccctcaggagggtagtaatatctactagcactagtgcccagcatcaaagtttatatcatcttttaaaactcaacattttatagactctacaatgcatggattacttttattcatatgaaagtaatataaaatgttacctaacttaaataatataaaatatcggtttaaccaaattaacaatcacaaaactgcagacatttttctattaaagttttccagttcactgagcaatatttactgaaaaatatgattatgaacttaaatatgtcctctttaaaatttgctgtttatgctagactgtacaatggtgctccctttatgatttttaaaaattttacttacataactatgtaattccaaaatagaaaagtgagtgagccatcactaaaatttactggaaactaatattctttcatggaaacaa

SEQ ID NO: 73774 - DNA, 1940 bp, Homo sapiens
ttgtgggacatgtacttgattgaatttttcaacagataaacttttacaaaaacttgcaaataattttttttttctttcaaggtatcctttgtgtggctgatcagtgtcacggcttaagagaactagccctgaactaccacttattgagtgatgagttgttacttgcattgtcttctgaaaaacatgttcgattagaacatttgcgcattgatgtagtcagtgagaatcctggacagacacacttccatactattcagaagagtagctgggatgctttcatcagacattcacccaaagtgaacttagtgatgtatttttttttatatgaagaagaatttgaccccttctttcgctatgaaatacctgccacccatctgtactttgggagatcagtaagcaaagatgtgcttggccgtgtgggaatgacatgccctagactggttgaactagtagtgtgtgcaaatggattacggccacttgatgaagagttaattcgcattgcagaacgttgcaaaaatttgtcagctattggactaggggaatgtgaagtctcatgtagtgcctttgttgagtttgtgaagatgtgtggtggccgcctatctcaattatccattatggaagaagtactaattcctgaccaaaagtatagtttggagcagattcactgggaagtgtccaagcatcttggtagggtgtggtttcccgacatgatgcccacttggtaaaaactgcatgatgaatagcaccttaatttcaagcaaatgtattataattaaagttttatttgctgtagttctgatataattctactattttgtggcacagaaatttgatatcttcagtcagtatatgtaaagattgtttatcggaagacccatgaatgagttttggtcagaaaattccacttgtttccttagtgtaatagcagtcatatctccgaattttttttaatgtggttcggatgtgaaataaccagttatacgtattaaacagtttacagtctaaaggaaacaaaacctatatgttataatatccaagaagtactaataggttttctgaaatgttatattctctatgcatttaaaaaaaaatgtaaacttgacattttagggtcttcagttacacatacacctgttataaggtgtttaatatagctcaggaaagtgagcattttgtgagaaaaatgaatatatcatatctaatggaaaagattggatgaatgttctcaaatgttacaaagctgtttaaagaaaaaggtatatataagtaatcagaacacttagaagactgatagatgtcacacagtggtattatagaaggataatacagagccaagatcaaattaaaagacaataaatggaacagaagggaggcagtgtttagctttgtataaacttttaggtttgctctgtaatctgctaaaccatatacattcttttgtgatatgttattatgtatgtggcacttgaggcactgtatgtaaagtaaggaatgctttactagttctccttggttttatctttgtttaaactagctttaaagtattaaacaataattgaaatgaaaagcttacctattttaaaaagccaaatttaaataaatatagaactttaaaatgtttatcagttgtttccatgaaagaatattagtttccagtaaattttagtgatggctcactcacttttctattttggaattacatagttatgtaagtaaaatttttaaaaatcataaagggagcaccattgtacagtctagcataaacagcaaattttaaagaggacatatttaagttcataatcatatttttcagtaaatattgctcagtgaactggaaaactttaatagaaaaatgtctgcagttttgtgattgttaatttggttaaaccgatattttatattatttaagttaggtaacattttatattactttcatatga

SEQ ID NO: 73775 - DNA, 1092 bp, Homo sapiens
attgagtttgatatgaaaatattaggagaaaaatattaacatttaagtagttaaatagtttatcaaaatctagttaaccagttgtttaatcacagtagggaaaaagtaaattagggaattgtgatcaagaaggtagtgttttggttgggtgtggtagctcacagctataattggagtactttgggaagccgaggcaggaggttctgttgtggccaggagttcaagatcagcctgggcagcatagcaagacccatctctacaaaaaaaaaaagttagctgggtatggtggctcacacctatagtcttagctactagggaggatgaaacaggattgcttaagttcaggagttcaaggttgtagtgagctaaggagtgccagtgcactccagcctgggtgacaagaacagtactctgtctcaaaaaaaaaaaaaagtaatgtttcattatactttcttggctcttagcctgcccttatcctttttcactcctgtagagaatttataaagcttaactggagcatgaagttggttttgtagagaggaatgtgttagaccatgtattagcctttctttactctcctagattctttgcccagtggtttcaactcatatcttagctccgattgagagctgcatactttgagaatgctttaattcctgtttgcctacattgattcctttagatcaaatcctgtccaacagatatataacgtgtgtgtgtgtatgtgtgtatatacacatatgtacatacatacaaatatatacatatatgatgaatgatactcattggtgcttttgtggatcaaaatacattaaaatagaagacttgaaaatattgtagataacatttgaaggagttttaaacttggaattttaagtattattttgattgttttataatcaaattttctatgagttttcatatctcaaatgagtctgtcatagattttgaataaattattaatttttaatgatggtgttaatagttactatttagtggtcataactatcaaacagaaaagaaatgcagtttagtgttatagaacactagggtttccagatatggcaaaatgaagtgtctgagagagattct

SEQ ID NO: 73776 - DNA, 2133 bp, Homo sapiens
ctgtttggttttagttatctttgaattgtgtaagagtgttctaatggtaaattgtatacaaagatgagtataatacaaatacattcctctgataggtcttaaagtccagttccacctagtagatttgctgggtcatttttatagccctgtgatacaattcaggtgtatctagtataaccctcataaaatcatttgtgcaaaagttgaacatttttagtagggttttttttttaattttcctgaggaaataatttctgatttacaaaaaagagtcacatcacaggattcttctgggctctcctgatagtcttcactgattatagaccaaggaggcttatagttagaatttttagtctagaagagtggttctctaactttatgtgcatcaaaatcacctgaagggcttgtaaagccaaaaattgctggtcccacccccacagtttctgattcagatggtctgggttgggtatgaacatttgttcccatttaagttcccaggtgatgttgatgctgctagtctcagggaccacatattatctataagtagctctgaaactaatataattagcacattagttttacaatccactcttaacatttttgggataaagtagtgtatatgaatctggaaattaataatatccttttaactgttttaaggtgcttcccaggaaacaactaactttttgatggatgaactcctttttacatccttgagggattttttggccctttatccttcccttaggaaatgtctttgcagaagtatgtgtgagaatagctacatcttatttagtttagattttcatgcctgactggtccagtacactcattttacttcacatctttccattaataacattaatgatgaatcccaggttgtgatacacgtgaacattttgagtaaatacttagtttttattgcataccatagacactgtatttacatctattatgtgatccactaccaaatacataattattttttaaagactataaattgatttactccattagtttatacagtcactttggaataaatcagtgtaaaagccaacattaaatatgtctcttatcataatgaaagctaggtcttgtcttgacaattgcccttatactttttcagagagacttagaaaaggccaagttggaggtgagggtggagggtggatgattgaaagaatattctttaagttataatgcaataaactagtaatgatacttctataaaatgaatatgtgtacagagaaatataaatatatacatgagtaatcttgaagtctgggtatttggggaaaaaagtaaaaaaataataaaatattcatgagtaaacggtgtttcttttctaaggtggacagcagcaaggaatcagctgaagcagcttgtgatatactatcgcaacttgtgaattgctctttaaaaacacttggacttatttcaactgctcgaccaagctttatggatttaccaaaggtatctgctgtttttgttttattatctattactgagaaattcagtgaaagtctaatcttttttttttgtattgacagtgtgagtataaggaaagttatatatatacataatggaaaaccagttactatttaggatgaaaataaatagtatttttttaagcttttttttttttttttttaaatcaccatacttctaaattggtatggttaaagaaatttacagaggcgtctataggaagtattaaaagaaattcagtaagtaaaatagagtcaagcatattagaaaaaaagggacacatagatactcattttggggcttccagagcaggttggtgaagttagaatcaaagaaaagtagagtgccaatattgagagcaggtatagcttctaaaatcttttggcaaatgttctggaaagatttaatcatgaccaaagttagtctcagcacagtttagattaatttacagacttaaagacatcctttctttgggtgaaaagttaacatatattcttatatatattctaacatgatcctgcatataatcagagatcgtgtctctctctcacaactattctcttaaaatacaaaaataagaagggtgcatttttagaaaggcaactggtaaaggtgtctgaatatgttagctaatggttaatagg

SEQ ID NO: 73777 - DNA, 4514 bp, Homo sapiens
gatgctctgagatgtttaattttatgtatagcagagtttcatgtgtaaatagatttaataagatactattaaagtagtgtaaattttttcatacataaatgaaatcaacttggaaaaattgacatttaaaattttaagtgtccactcacttctgttattttcatgcacaaatgaggatagtgcagaggatatttttattggaatttggccttacatttttttcaattgcttaatgcactataattgtaacatagacatattacgtatgacaattaacagacttaattcagctatttgtaaactggtaagttcttaaaataggctttggtgatcatatagtgtttttatatctagatcaagagatactgtcccttagtgttgcatactgttaaaaaaaattttgtcaacttctttaacctgaacttggaaaggtatttaagtacattttatttaaaacagtactataatagacaaaagaaagtttctatttttaggaccagcaaagtatttattagcaaagactattatgtgaataaggctaccattttatttttgtttatatatccatatactctaaagtaaaatgaatcattccgtctttaagttgtctagttctggttttagaagattgttctccagaaacaggcaatcagtattctataataaggtgtagaaattgcaaagactgtcattcttttttgaatctctgtatctcaaaattgtgagtagttttaggtggtcagaagagaaattataagctctggatagcaaacactttgttctttgacccaaattttatatactaaaattaaagtaagccttcagggtaagttaaagcagaaaaatgggtcataataacagtgttatctcagcctctagtgagggattattattagaagagacttaatattaaagattacagtgtagactatacacttttctctaaacttattaaaaaaaaactaatctcaagtcacacataatttccagtcttccatcagactaccttcttgctgtcacctctgtcattctattttctctcttgttctctccctgatcagtagggtatacgtaatatattttattcacatagttgggaataggagcagtgaagaataggcagtttattgcacatatgctaagacgtctttgactgactttcatggcattaaggtcagaggcctctgccattctctttttactctccagccctcaatcctctttcacaagttttgcgaggtactgggtggagaaagtctgcagaaacatttgttttacagtaatgcatatgcatatccttcatctcacacaggaatgagaaattcttttatgctgataggccagaggagtgttggagcaacaagccatctttctgaaagattgtgaccccaagtttaggtcgaaaccactaccctgccagaactgttctctagaaacaaaagtattacaggctctgaactaagtaactaccagtgagtggtctgcagccatttagtttagagcctgctatacttttccaaaaagtccgattacacggtaatgcattgatagtaaaagaaaatgtgtaaaacataaaaagggaagagatgtttgcaagaaaaaaaaattacctgtaatctgccgtctactgttggttactataataattcagtgagtctacttccagggtgtgttttctcgtacacaagctcacttgccctgtctctctgacacacacacacacacacacacacacactctctctctctccattttaaagcaaaaatagagtcgggtgtggtggtgcatgcagatactctggaggctgaggtggaaggattgcttgatctcaggaggtcgaggctgcagtgagccatgatcgtgccactgcactccagcctgggtgacagagcgagaccccatcttgaatgaatgagtgaacggaatgaatgaatgagtgaacggaatgaatgaatgaatcattctctgccttctgggtagtaaccctggtttttagcatgttgtgtactttaatgtcgttaatgctggactgctttcctacacaacagtcatatctcaacagttcaacagtcgtatctcccctttgaaaagccttaatagtattgcatttctcacagaaaccctgttttattaaactaattttggaaatttaagcacaggaatatcaagtaatttgctcaaagccacatagccagtgagaggtagagccagaattcaaacccaaggagcttggttccagagcccattctctttagccataatactgttttgccatgaaaaaactatctttcaaagaaactaatggaatgaaagtgctaagaatacatagaataaacaaataggtataattcagaaacacaacttggggaaaacagtgcaatattaagtgatgtgtttgaagaagcagctacattccagaccaaacaattcatagtaggggtggttttgcttattttaggcggagttaagaaatgtctggcagtaacacatagcatagcccagtgcctgtccgtggcagggggtgatttcaggaagaaactgttccacctcagatcatcaggcattaagagtctcataaggagcgcacaacctagatccctcatgtggacatttcacaataagattctcactcctatgagaatctaatgtagctgctgatctgacaggaggaggagttcagactgtaaagcttgctcacttcctgctatggggcccagttctggtcctcaggccagaaccacaggacccctgtatagactattaaatgtggaacatcctctctggaggttcttgggaccctggttggcctggaattcaagaacaaatatccttagatgacttttaagaaacctttacaaagtatcgctgtaggttcccttttatattcattttagttaagttgaccacaacttttgaaatataaattcttagcatagtttcaaaatcataatactctctcccatgtagtatatactgtatattatactgataaatgtagatgtttaaaaacatgccaaaaaagtgtaaaatttataaaaccattgttggccttcattggcatttttcataatagtttgttttggtattcttgaattactgatccagtttttcctgcatgtttgtgtatataaacacacatctcagtgacagaagaatgaattttgagtttatttctattcaaaagttgagtaggaaaaaaactgatgcatttttcggaataggatgaaacgaggaggaagagatagtgaccgtaattcatcagaagaaggaactgcagagaaatccaagaaactgaggactacaaatgagcattctcagacttgtgattggggtaatctccttcaggacattattctccaagtatttaaatatttgcctcttcttgaccgggctcatgcttcacaagtttgccgcaactggaaccaggtatttcacatgcctgacttgtggagatgttttgaatttgaactgaatcagccagctacatcttatttgaaagctacccatccagagctgatcaaacagattattaaaagacattcaaaccatctacaatatgtcagcttcaaggtaatattttaaatccttcttttaaaaaataaagtatttttagtggctttgtttcctaaaccagtacatcttctcatgcctttaaaatatttgctttttcagggaaaatgcttaaaaatttagaattattgtataccttagaagctgtcacaaaatattatatttgatggagctaaattactctattaattattaataatttcttaaaacagcaaaagcagccactaaataagcataagtcattgataaagctgtgaattacattgaattattgtgaacgattttgaggaagaagaaatatctaataaaataaaaattgggagattataattgagtagagcttaattgctatttctatctaacaggaacttagtgttacttactgatggctttttgaaatgggatcttcagatgaaaaggaagcatagaaactttatgtagaagatttagatgaatatattttagagagaaatagaaaaaggtacatgggagaatgccaaagggaactgtttatttctttttgttgctggaaggaaggtattggaaatcatgcagtgatgagataaatgaagtgggtggctttttgcgatatccagaataatttaagaaatcatagctggatgtgggtacctgtagtcccatagtcccagcttctcaggaggctgaggcgggaagattgcatgagcccaggagtttgaggttgtggtgagctatgattgtgcagctgtactacagccttggtgacagagcgagaccctgtctctatttaaaaaaataaaaaatcacagtggtttgtgtgaggcttgtcatgttttgtttgggtgatgaataatgaaatatggacatgtttactggatctttaaacaccagattttgtggtagcaaataacttattgaaaaaaaaaaacaatgcatgaatacttgatttatctggacacaagcag

SEQ ID NO: 73778 - DNA, 1701 bp, Homo sapiens
ccttcccattttaccagtgtgggctttttcatcagtaaaaataaaagggaaaacatggcttctttaaacttaaatgtttttacttatagaaaaacattctacacaaaaatctccctgttttctattcagaaaaataatgttctgccagactaaattgaggggttttgtgaccttttttgttcattactctgttttaaaatgatatatctgatgcatttattaatagaaaaagatctgtagctcgaagtgatcctctctaggcaggatatagtgagtaagggaccccatcacttcttccattgtacatatctgtgttgaattttttatagtgaacattttttacttttgtgatcagaagaaaaatttctaaatgttatatttgtataaccatagtcatgttatttctttgaataacctatcagtgatttatatttctgtgaggtttatatgtgtgtattcttaaaacattattttcctttgcctccttcaaatttatacaggtcccaaaggcaagcagttagaaggaactgaatgtccactccatgttgttcatccacccactggggaagagtttgctctgggatgtggagtgtgcagaaatgcccacactttttagaacacgcagatcctttgtctacagagagaaaaattgccttcatcccccaagaggatgcggtgaagtttaaactctgctcaggataaggacgggaccatttttacatccatgaaaatgaaccattcacagtgcaagaaggataccaaataccatgtacataattcttgctatgaaaagtttccccattattttggtttatcttcttttgaacaaatgacatcaaacttgtgaggtgtttgcatgtggccattaccgtcattggcctgtgaagcattggacatttatagataattgatataaaagaatcgccatgcccatggactaagaacgatgctggctttcaagcaaaaaagaaaaataatcattgtttattgtatactgcctttttgtaatcctgtacaattgcatcacgggtggggataaaaagaggaatattctggtttatttcctagactgttatttaaaaaaaaaaaaaacattgtgttaggacagcatataaatgtaataagtatcacactgtatataaacatatcaatgtttgtcctgtataagaattactaaattacaaatgcaatttcatttaaacttctaggttaagtttgagcctgaaattttaatgaagtgcaatactgagtgtgcctcattatcttgcagctgtaaacatattggaatgtacatgtcaataaaaccactgtacatttttatacagtgataaagtctaccactgtgggaggtattgtttaaaaaacaaaatttgaacacctttaaggtctaaaagtccagttttcctcagaaagaaatttactaacacaacacattcataattttcaaaactgttagagaaaataagaatagtaatgaagtgcaatgttggaatcttaaaccctaagcagaagatcataaatatatatatatatattcgtaggtaaatatattcataccaaagacagaagaaagcatttaggaaattaacttctattttaactagcagcatttttaactttatttatttatttatgagacagggtcttacactgtcacccaggctggagtacagcggcgtgatctcagctcactgcagcctc

SEQ ID NO: 73779 - DNA, 1013 bp, Homo sapiens
gttcacagtacatctgtgagattataagagaggttaatttcattaattttcagtttgaccagccataaaacattcataaagaaattaagtaccttgcttattaaatcagatagattatgatggaaatggaattagaacttggatctttgtccagaccttttggacaggccacatatttatttgttagttttcaaacatgtgtatcatcagtttttcaatcaatttttagagttatgtaggccctcaaaatatgaattaaggagctgtctatgtatatgcctatcttaagtgtgattgaaatagtctcactatgatcttgtgtctgtctcttctcttttgctatagatgtgtcccaaacatggcacagactttttggaatataaatgtcgctactgctgttcagtggctgtttttttctgttttggaacaacacatttttgtaatgcttgtcatgatgattttcaaagaatgactagcattcctaaggaagaactaccacactgtcctgcaggtatgcttttaatattttaaaatcacgattatgatctatataccatagttttatgtaaacattatatgaaagctctgtttcaagtgacagaaactcaattcaaactagcctaaagaagcaggaggaattccttgatccttgtaagcttatgactttctgggtgaattaggaagcaggctcatcatcatgagtgagaagttagctgtgacggagcagatctcatggggagtgagaatgaagtctactaaggattggtgaaaagatggctgttcagcactaaaaagtcatatgaagttcaatattacagaaccatttaaaaggattctgtgatttttttttttttttaacgaagcctggaaccgttgccataaaatgaaccaagtgatttaatctagaatggctgggaatcagtagtgtagtgagcatcagaaagtcaagggaattaaagaaaccactcagaatacaggagaaattattgtctatggaaagcaggctgagggga

SEQ ID NO: 73780 - DNA, 1618 bp, Homo sapiens
aagagtgaagctatcacaactcctggtgtgaggttttataatgacccagctggctatgcaatgaatagatatgcatattatgtgtgctacaaatgcagaaaggtatgctataaattatactgagaagttttaaaaactagagcttacctatatgattaagaattcaaattgtacagtgatatctaattattccatcttaagcctgaagttaaaaataagatagcttggtacaatgtttcccaatgtttccagtaaaacttgtttacttaacttgtttggggattctttatttaacctgaacaaacttttcgaaacatgcagtatttctgtatacaagctgcttcccatcagtaataacctgttggcccagggcaattccttctcgaataaacttctctcacttgactctgctaaccattccttccttaaaacccttaattccttggcttccaggacaacacactctttttctgtcctccttcctttctagtcatttatctttaactacttcttctttttttttttttaacctaccccttacatatttgttttcctagagctccattcttgcctacttaataaatacttccttaccttgggtgacctcttttacatctataccttcacctaccatgtatatgtttatgaccccccaaaatttttgagatttagttacaaataaccaactgcgtaccagacatttggatctctcacacatacttcagagttcacatgtcaggtattatattcatcaatcttggccgggcacagtggctcacacctgtaatcccagcactttgggaggccaaggtgggcagatttcttgagctctggagtttgagaccacccagggcaagatggcaaaaccccatctctacaagaaatacaaaaattagacaggtaggttggcatctgcctgtagtcccagctacttgggggactgaggcaggggaatcgcttgagtccagggggttgaggctgcaatgagctgtgtttgtgccactgcagtccagcctgggtgacatagtgagaccctgtctcaaaaaaaaaaaaaaagactttaccaatctctgatctttattgacaaaatcctatcaattctgtctccagatctctcttgagtccttttttctttccattacatctccagcaaacctaatcattttccttggtaattacagtagccttcttcctgagctcgggtgtagaacccctaattcctctgttgcatcccttacactgctgctaattaatacttctagatctaaaatctaactggatcactcttctacttataatacggtagcccagtctccctctccagtctcatctcccaagatgctaccatttgctctccatttgctgccacataccaaataacttgcatttcccaaactcagccctgtctgctcacccactgacacccccatgccattgcacaggccattggtgtttaaaggatgctcttctctacctccccctgcatattttactctgacctgccacccccaaccccatacacacatgctgtcatgcagagcctaatctgtcttgtcatacctcgggcttcagctcaggtttcacctcctctgtaacatacccccatctcacttccatc

SEQ ID NO: 73781 - DNA, 2486 bp, Homo sapiens
ctgaggaacttttattatctagaaggatttaatgtgtacctgactactcatgggactgtacacaatttagcagttgctgtaccaccttctttggcatttaatgatactaaatggaaaaatattcagaagacattagtagtaaatattaaatatgccaattcatttattcatatgttgtttacatagtagaccaataaaggataattttatttgtcagatagaagacagggtggttcatcagagaaacagtcacttgttcagtagatatctgagtgcctcctgtgtgcatggcacataggacagtgatcgtgtatgcctgctaccacatcaggaagacttgagtgccactgagtatctatgtattttcaaaatcagccagcatttattgagctgttgtgatgtgtcacagtcagcatttcataagtctttcctaaaaattcagtggtgtaacagccttccctttcaacagctctggcttgctctcgcatccctatgtgttcttgatcaggaccacgtagatcgtctctcctcggggagatggatgggaaaggatggacaacaaaaacaaatggtaagatcagaattttgtaagaatttatcttgctttcctttacagtaagctttagcttagcttaaaaacaaacaaacaaacaaaaaacacatcaacataaacagttagtggatctcttgaaagattgtgtcccttcggccaagttcatctcacaagtctatttcagagagtccctacttcatagtatatggaaactttaggggcttttatttaagtatattaaagagctttcttcttctctgagtcatgtttgcatcatatcaaaatttatttttagccagagtctgatttagtgactagatattttactaaaatgtaatcagtcttatggtaggaaggaaataaagcaataacacaggcaacatgacacaccacctgttcacatatatacttaagtaggtttgatgggtatctttaagttcactagaaaggaaaactttatataggccctttcaccattttcttattaatgttcaagtttcaaaaataaacagtttcttcctttggcatacagaatgtttagatatataatggggcagacatttcttaagtctctaagtaacaaagtatacctgttcattgtattaatcattgaacctgcaaagcacattaatgattggatttggagttttgagagatttttatagttaagtacatttgcaataattctgtttaatattcagattctaaattcttaatagacttccgaataacggtttatttttgtaaataaattatattcaatttgtatgagagtctgagacttgcttgttaatctaagtaacgtggaaatgtcttattttagcctatgtgtgataaccatgatgatggtgaaactgcagcaatcattttatgcaatgtctgtggaaatttatgtacagactgtgacagattccttcaccttcatcgaagaaccaaaactcatcaaagacaggtgaagatttttgtctctggagcataaaatatgttcagtgaattttgaaataaatgtgtgaaagaggctttgtgtagtagggggaaaaagtggactttggaatcaaagaccttggttgagttcacagctgtctcgcttaccatctataaatagcaagttgttttatccttagaaacacttaatttctccatttataaaaaagggactgctgtgaagattaaagagaagattggaaatattcaaaacttcttagagtgcttaaatgaaagccattattattattgaataattaaattttatactctccctttcagagtgataaataagcatatttttccctgttctttaatgaaataataggtcttcaaagaagaagaagaagctataaaggttgaccttcatgaaggttgtggtagaaccaaattgttctggttgatggcactggcagattctaaaacaatgaaggcaatggtggaattccgagaacacacaggtaaaaggtttaaagattgagccatgcctttaaaacccacaaaaaaagattaaaccgtgccaactgattaaactgtgaataattttgagtgatattctgatgtttaattatgacatcattgatctatatatttactaaatatatagagtgttctatggtgaagagagcattagaccaaaagtcaagaaacctgatttgccactaactagctgtgtggtgtcgagcaagtcacttaacctctggaactcattgacttcatttataaagtgagaggatcacaactaatggggctccatagataaaatacatttctattgataattcccttctagttctgctagttgttgccccacaataaaaattgctgcactagatgatcactaagatctctatttattataaggttgtatgattttatgatatttagaggtttttgtagacctaatgcttctgaaggtgttgtgaatggtactgtttccattgatagc

SEQ ID NO: 73782 - DNA, 1070 bp, Homo sapiens
taaaataatatcaacttaatgtctatttaaatcacatagaaatcgccaggtcatttcttggttattaaatgccataagaacagtttttattttatgaagggaatagtgtcaagaactatttcacagtatattaacatttaatccttgaaaaaaaaagtcatattctcaatgaaaattagtgaaataaggaatcacaagtgtgaagttacatattatgtaatttttgttcaaaagtaaaacatattaagtaactgcactttaaagtcccttatctttaaatggtactttaatgtgaggatgcacaaaaaaagaacccttttctgatcttgtgaggtttccacttacagatgatatagataaagtacagtcatataaattatttgtaattatttcactcatataattttgctcggaagccatatcgtagtcaggcctggattttaattctcaattccaccatttactgaaaatcccttaacctgtattaaccttagtttcttcatctgtgtaatagctactataaataatattacttatcttcacctggttgaaataagaaaatcagtgtgaaataacctcataacctttactctgtgcaattctttgttatttgagcttgctggtatcaatgctaagtccagcacagtgataaaagtgatccagctgaatcaggttcctgcctcttttctactcaaccaggttgatctggattccaggcacattggctgggtaacaagtgaacttccaggaggggataatcacatcataaaaattgaattaaaaggcccagaaaatacactgagagttcgacaagtcaaagtcctgggctggaaagatggtgaaagcacaaaaatagctggccagatttcagccagtgtggcccagcagaggaactgtgaagctgagactctgcgagtattcagactgattacgtctcaagtgagtgtccttacaacatattctagcacaggataattgatgtaatatattttaagagtgtaacaaaatattttgtgaaacttattacagaaatttctggctataaatgttgcccattttttcttttcata

SEQ ID NO: 73783 - DNA, 1087 bp, Homo sapiens
tttaggtgctggagtctcaaattcaagcaatctgatcaccagttccttcatcagagcaacgtctttcatcacattaacaatattttgtcaaagtcagatgatggcgatagtgaagagagttttagcatcagtatacagtctggctttgaagctatgagtcaggtcagtcatttcagttattatcctggttgtcctgttagttaataatacatcaaaggagaaactgtaagttattcataatcaatttgatcctgtcttccattatgttttatcttatacctgtttgttttatcatcacgaaagatttgcttttaagtatcataagtacttatatttgtttctgataggaattatgcatagtaatgtgcttaaaggacttaaccagcattgttgacataaaaacttcaagccgacctgccatgattggcagtttgacagacggctccacagaaaccttttgggaatcaggagatgaagataaaaacaaaactaagaacatcaccatcaactgtgtaaaaggaatcaatgcccgctatgtgtctgttcacgtggacaattcccgagatcttggggtaagaaagcaaacgtgatttacggctctttagctcttttcagatcttagtattcatgcactttcatttctgaatttagcaacaagctttatcacctggaatttcaccaaccaaacatcattgctataatccccaaataaatcttaagtctaaaaacaaattaatatgattgggagcactgtggaattccatttctgaaaagaggtctgattacaaatataccatggctacagctaagcaaaatgaaagtctgctctacaattttctgctgccattcccttggttaagattttcccgtgacctggaagtcctccccttaaactctgctgatcaattcttccagggtctctcaaactcagcagagaaattctaagtaactcctctaaaaaattactctttccctctgctgattctttttgtattactctggtggcacttaataataatctttgacctatagtgtaatcagcttttttttttttttctgagatggagtctccctctgtcacccaggc

SEQ ID NO: 73784 - DNA, 1473 bp, Homo sapiens
ctgtatgagttagtgaccaccccaacttctaaacatatgttattttttatacataaacatacacacaaaacatacctacatatatgtatgtgtatatatccatacacatacatatatatgcacacacactacacatacacatgcatacacatgtggattcaccctacaggtatctttgtgagtacactagaattgatacatttattcatttgcatgctgattttgcttgtgactaaacttacagcttttttccctaaaataatacaagcataattagttaaaattactgtatctttctgggtacaatttggttttgttgtttgtatttctgttacatgaccattttttaagtatacataatagtcttttgtgaagaggattccttccagcacacaaactgataaacttgtttcaatttctgccttaggagaaagatacaagagtatgtgaacatccactctcagacatagtgattgccggggaagctgctcatcctttaccacacacctttcaccgcttgctgcagaccatctcagaccttatgatgtctctccccagcggcagttcattacagcaaatggccctgaggtaattttggtatccacatatcctaggtacattggacaagagagtttatggaatattcaaagtatgaaatgctccaaaaaaagctctttaaatagtaagatagaatccctacattatatagatggtgcctccctccttacagtcataatttttagaatggtccttcctcttagttaacatttgtttgccctcctgtaaaatgtggctaatgtaattcttagtgccctaaattatcactgtagcaatctccctcactttccccagtctcctacctcaaatcacttaaatgtcccaaaaagagagagggaaaatgaaatctcaaaaacaaaaaccaaaatagagttttgacttgaaaagaatcttggggaaaacagagcctggttgtatgcacccagtcctaaaagcaccttaaggagcatcacagatgctcaacagattccaatttcaatttgaaatgtgttgagaatttagcattgcttttacactgtgaaccttgttactagattcacatactggactcacacttataaataaattctcctaattaatgtatacaagaaatagattgatggaatgcttgggcttcccatgttactaatgataagaccagtggaagagagatttctctttgtcctcctcacaagatttttgaactacaagataaactataccctgatgaattagtatggcattgtaagagtaataaatttgaggggttgttgcagttggtgtaccacttgtttacacaatagattcattaccctttttgcttctgtagccttgatcttcatctgtctaattcttttatatttaaaatgggtcaactttccttagaatttaccttgttccaaagaagttacctttatttctcaaaaacaaaaacaa

SEQ ID NO: 73785 - DNA, 1071 bp, Homo sapiens
tgacaatctattccaggatgaaatgagatatctacgttcaacatctgtacctgccccgtatatatcagtaactcctgatgcaagtcctaatgtatttgaagagccagagagcaatatgaagtctatgccaccaaggtattttagttctctcctgtctgttgaatagctagtgtttggtggaagaaagactttgaactagaaaagagtcctgtagaagttctttaatacatctgtgagccagttttgctaactgctggagcagtaagaaaaagcatacatgtatgactaaggtaaggtccttgatgggagaggcagactagttggagagaagagatcaactagtgaaggaattaaagattacattatatgacattacttaatgctgtagtaaatcagagtagggaagggttactttgagttttcatgggagcagtggcattgaaaataaatcttaaacttcttggattattgtttacagtgcctcctaacttaggtatggtagtatcagagtaaagagcttctcggaaagctgaatagaaacttgttacaataatgtaatacacaagaaaatagaggccaggcgctgtggctcacacctgtaatcccagcactttgggaggccaaggcgggtggatcacctgaggtcaggagtttgagaccagcctgaccaacatggtgaaaccctgtctttactaaaaatacaaaaaattagccgagcatggtgacacacacctgtaatcccagctactcgggaggctgaggcaggagaattacttgaacctgggaggcagaggttgcagtgagctgagattgcaccactgaactccagcttgaggaaaaaaaaaaatagagtaccactgaaacttttttagaggacgaatgatgtgataaaaatgcaaaggtagtctcacagtgacaattgagaagctgacatatggattaaagagatatattttgtaggaaaaataagtgtgacttgttgactaactggataatgaaaaagataagtttaagatgacatgaagatttcagtcacgaataactgtgaacatggtatcattggaaaggaag

SEQ ID NO: 73786 - DNA, 1493 bp, Homo sapiens
gaatccctcatcttaaaatctgatgctgcaaagttgaggtcagattcccacagtaggtcattatcccccaaccataacaccttgcagacattgaaatctgatgggaggatgccttctagctccagagctgaatccccaggaccaggttctcggttgtcatctcctaagccaaagactctcccagccaataggtctagcccatcgggtgctagttctccacgctcctcctcaccacatgataaaaatctacctcaaaaaagtactgctcctgttaagacaaagcttgatcctcctcgggaacgttctaaatcagactcttacacacttgatccagataccctccgcaagaagaaaatgcccctcacagaacctttgagaggacggtcaacgtcaccaaaaccaaaatcagtaccaaaggattctacagattcccctggatctgaaaatagagctccctctccccatgtggtacaggaaaacctccacagtgaggtggtcgaagtctgcacctcaagtactttaaaaacaaatagtctaacagacagcacctgcgatgacagcagtgaatttaagagtgtggatgaaggttcaaataaagttcattttagcattggaaaagcaccactgaaagatgaacaggaaatgagagcatctcccaaaataagtcgaaaatgtgctaatagacacaccaggcccaaaaaagaaaaatcgagttttcttttcaaaggagatggatccaagcctttagagccagccaagcaagccatgtctccttctgtggccgaatgtgccagagctgtgtttgcttccttcctctggcatgaaggcatagtacatgatgcaatggcttgttcttctttcctaaagtttcatcctgaactttccaaagaacatgctcctataaggagtagtttaaatagccaacaacctacagaggaaaaagaaaccaagttaaaaaatagacattcattagaaatatcatctgcactgaatatgtttaatattgcaccccatggaccagatatatctaagatgggtagcatcaacaaaaacaaggtattgtctatgcttaaggaaccacctctgcatgaaaaatgtgaggatgggaaaaccgagaccacttttgaaatgtccatgcataacacaatgaagtctaagtctcctcttcccttaactttacaacatttagtggctttttgggaagacatctctttggctactatcaaagctgcttcccagaatatgatttttccaagtcctggttcctgtgcagttcttaaaaagaaagagtgtgagaaagagaataagaagtccaaaaaggaaaaaaagaaaaaagaaaaggcagaagttaggcccaggggtaatttgtttggagagatggcccagctggcagtaggaggaccagagaaagataccatctgtgaactgtgtggggagtcacatccatacccggtgacctatcacatgagacaagctcacccaggtaaatgata

SEQ ID NO: 73787 - DNA, 1096 bp, Homo sapiens
agcataaaaaacattttcctacatcatctgaatttgttcacatccttttttcttttaaaaaataataacatgcagttatagccagttaacaaatctaccttaatttcctaggaactgtctttgaaaaaatataaatacttccagataggtttatggattttcagttttttataccacttgaaacccttcagtcagattgcttttctcctaacaactaactggtatcacttgcactaagagtagaagtttttattttaaggaggaaaggtgatgttgaagtttgtaccatttacttgggtcacagacagcctggctctaatgcctcaaagaaaagcataaaatagaatgaaggagagacactgaatgaaggcagggtgctaaaaacaattaatgtccatgcagaaacatctaatgctttgccttagaaaagggaggtgattcttcttttcatcctgtttttctgtcattctcctgactccttgttttgagggtccacagttcagacttttaccactcattctgaggatccaccgtttctgtggtttccaagggaacacaggctctgagttctaagcagctaagcttcctgaacttttggagtgtaacctgtttataaataattaaataacagcttcagggcattcatgtgctcattgtaaactagtctaatctgatcataaaacagagtgcctcttaagcaactctttgttagcctaattgtatgcatacacttaaaaattataattgtgtctatgcataaattcagttctctaattcaacaaaacccataccgttgccctaaggatgcgaggtatcactctgctggaaatttagctctactctacatttaaaatacaagttttcacattaaataatttcttattccccaaaagattaatttctgtctctttctagtccctcactgaatttaaattctaactagttattgcactagggcagaggttgagatatcactgatagttcacactggatttgttcaacctgttgttttgcgtccatgaaaatagtttttggtggtaatgttgtgtaatgatgtgtagaaattttattagaaatatttcccccttctttcctt

SEQ ID NO: 73788 - DNA, 1092 bp, Homo sapiens
ttttagcaaactgtttatatttgttggtattttgagcagccacaacatacaatttttagtaatatttaataacatgctgcaaaacatttgaaacacaaatgaagcagataaacataaattagcacaggggcttaccccacttaacaagcatagttttttttaatatataaaatacgttttggaaaaataaatttttcaaaaagatttagttatcatttgagaaatacatctgaaaaagaaatatttctgccattatttgtatgcctaaacttcaacaggtatttagctgtcaccacttacagatcttaagaaaatattcaccactattagagatataataagatatacaaatgcctattctttctaacactatgtaataaacttttttgctcacatatgacaagtggtgttcctggtatttggcagattccatttttcaggcaaccacagaggttgttttcatgatgagtaaataacctaccattgtaagttcatatgcattcctagaatagaggtagcatcagcaggtattcaccattcctttgcatgcagctgttgtgcaggtcaaccactaagacacatctgacacagggagtaggtaatctttgtcacgaacccttcctatttgttagaaatcctacacaagttgtccttttttataaattagagagaaaacctctttcagtttacagatggattttttggagaaagggataccaaatataaaagacttactaattgtttgtctagattcccattatgtgtggttcagtttctgaaataaatgtgatgataaaggtgataaacatgtctccagctgtcagattaataacaaaaaacaagtattccaaacatcacatactcaaaattaatggccatgactactgatttaatctaccaaatataatttgtttaccaaatttgccatatgctgttactaggtcagtaagattagatgggtagcaattttttgaactacttttgaacagtttaagggtacttattcatagatcacatctgtttatctgtgctctcccaagacagcattgatagttagaattctaaattgggatttttttaacccttttttca

SEQ ID NO: 73789 - DNA, 1032 bp, Homo sapiens
cccagaaaagtagccaaacacagtgtcaccccgagtccattctgagatacatactggaaaattatagtaatcggttcattcaggaaaccaagtgacaataggttaagccatgagtaatataagtaatataagtaacatttctttatcttccactattaaaaaaaaacttgtaaatctttatttaaatgaacaccaaattaaagaaaactgagccaaagaaatgtaagtctaaaatgaaatgctcaattttgatttatcagagatataagccttactaagttttaagttaacaaatttggaccttaacacatattaatctaaattaattaattcgacctttgttttcagttttagagaaatgtaaacttgttcaaaaatatagcagaatataaactatttaaaataacagtttatacttgcataccatttgaaatgctttgtttttgcttgtgttctctgctaaattttttttccattgaatctgtgctgcttctttgccaatgttttccactgtagaatctccatctcgcaaccttgcttctcgtgagcgcatttacaaaaattatggtgtagctgggcctgcctctgctctctcatctctgtctcacaaactgaagggtgggtatacatgcattcatggatgggccattcttaatgaacataaggagtgtcattaaagatgtttccgttcgtctcagtcatgttcatgccattccatttttttaattaaagtttatcattttatttacatttatatatgtttgagtaatttatgatgctcctattcagtattataatatagattatcccagtagctatgcatgtttattacatctataggttaaacattactcttacttaattttaaaactttatgagatcattaaaattaaaataggtataaggaaagaattacctaattgggggaatttttgaaatcatttttatcagaaaaagatgatatatgtgcaaggcataaagcacattttttagtcttaaacttattgttatataatataaaaatcattttac

SEQ ID NO: 73790 - DNA, 1257 bp, Homo sapiens
atttctgttttatgtgtgcttccaattaagatggtattcttctgatttcctattcctgtgtcttcctgctatgtggagtcttcacagatttttagcagccaggccaggagattgtattccttcctatattggcaggttggattccccctgaattaactcttccattcagaggctgccaccgttctagttcgtgtcttgaagaattgtatcaccctcctaactgatattttaacaatagctgcaaactccttattatatgacacttaaatagcataagagctccttttgcagcacctgacatcttttgaggtttatagatttgttcaaaatgaaggatgtacaaaaatattaaaaatttaactttttaaaacttagattaagatggctttatgccatggtatgttgctatctactcctcccattgtctcttgagcccactgcattccagctttagtccctatcctcggaaactgctgtagtcagtctgtgacttttgtgttgccaaattcagttgtcggttctaaggtgtcagttttacttaatctgtcagcagtatttgacagagttggtctttcttcctagaaacacattcatttgcctgccggatatttcctgccttactggctgctgaattctagtctcctttctacatcctcatctatttggtcatctagaaatgtcctagggctttggcctcttctaggcgtcactcccaaagtggtattctgcagtcatggagaatgacacatctgtaggcatatgactcccaagtttctcagcacctgatgtgatgtatacttatttgttcattccctctctcctttctcctaaatataaactctgtgagaatagggactttgttcctgttcaccactgtgtctgcaatgcatagaacagtatctaacacgtaatatatactcatactttacattgaatgatttcttaatttatgggtcattcatcattaatcttgatcataataatgaatcagccgaaaacagcactttttttaagaaaagtgtgtgttatgtctagtttatttcaataatactaagacaactatctccttactacctgaatttatttcagcacaaccgattaattttaattgctatgagttaaaaactttaaatacagtgagtttttttaaattcagatagagatgttttttagcttactgcttttaaaagactgcaatttaaaggttctgttaattcttcaaaaaaagataaattaagtgcttcattttcctgcata

SEQ ID NO: 73791 - DNA, 1048 bp, Homo sapiens
tatattgtccttctgaatagcctgtttacaattctttgaacattgcctgccaataatttagcaaattgttattgaatgtcacagcttgattatagaacatagtaagaaatcaacaaattgaacaccaaactgaatttaatgctaaaaattatccttttaaaaaataatgtattactaatttttactcatgaaatttaacatttccaatcattgcttagttgttgactcaacactcaaaaataatatatgctacttttaaaatcccaaaacctccagatttgtgtactgccaccaggtgttgacaggtgccttgattcttctagtttgtggttccagagataaggtcagggtcctgatacagcaaaaccaccatttgtctttgttaaactgaaatgagaatgcgttccttattggaaagaaaagttacacggttttattattatcatcagtacttagagaagacttaaaaagtacaacttaaaatgaactcaaagtttctgtgactaggaaatgatatgactcagggaatttaatacttgggatccaaaacaaagaaaacaaaatgacccataaagaaccatgttgtttatgagggcaaactatagtaagcaaacaatattaacttcaaatgagcactggagaaaaatcctgattctttaaaattgtttttaatattattctcttaaacttagtgatacccaaaaaagaatcaaaattttgtggagaggaatataataactggttgtcttatctgtattaacaggattttgtaaaagcattattatttctgtcaattgatttttaaaacatctatcaactttttttcttttgtgtatagatatcaatgtatctcatagattgcttcccttttttaaattaaaaagtataaatctttataaaaattaactataactttatgaaagtatgtttaaacttgagcagattttgtaaaaatttaatgtgtagaacatgtgttgttttcagcaacagcttaatttctttagtcacttaaccttttttagacttttgtttttaaaaatatttcttt

SEQ ID NO: 73792 - DNA, 1045 bp, Homo sapiens
tcacttgaggccaggagtttaaggatgtagtctgctatagtcgtgcctgtgaatagccacacgctccatcctgggcaacagagcaggatcctgtttccttaaaaaaatattaataataagcctactcttgttaacaagcttttaaaatatttagaaggagcaaagaaataataagaaacttaaacttgatgaaatatatctaactttattatctgtaacagtagttcccattttaactcttaatactgtccaagatcgaagagctgttttttgtaagtttttttttcttaaaacagtattttagaaaattcttcatgatctctaaattttttcctataatctacagcatttatttattatttcaaaaaaagatatatggctcgtgtacacagttctttccacataaatctatcccgtgtaggtacttcagttgaaattttcacatatgaaactttattatatttcagaaatatgactagaaagatactattttccagtttctgcatcacctagtctggatgtagttccctctccccacctccagcatcatttaaactatttaatgtatactcacaaataaggagttattatccatcacataatttcattatcttaaaaaaaatttttgtaaaaccttttggtacaaggaaaaatgttagaatcgatattttagatactattcaaattaggtagctcataatcctttttgtcatataggacttacagatttttaaattattcatctaagcaaaatatttcatgcttttaaagtagaatttctttggcagtaacaacttaaaaaagaaagtattaatttataactataatgtaaacacattgctatgttaataacatactttgccccattctgctttttgaagaaaaactgttaattgcttattttctgcatgaaatatactgccgatgaggcagggtggtattagtcattgttgggaactatggaaaaggcatcatttacttaaatcttcatttatatatgttcaatattgaagcaatttatcactgattcttcatagagtcttcg

SEQ ID NO: 73793 - DNA, 2098 bp, Homo sapiens
ttttccaaattttggaacctgaaagatttgaagtagagttgaagagaaagtatcatttgttaatcttgtttgtatagcttcacctgggttaattgataaaattggcaaatgtttcttgcattttaaatccaatttcattcctttttacctaataacattaaatccaatttcattcctttttgcctaataacacttagcagtcacagctttaacataccccagatttcctgattttgttaatagctttgtgtgtatgtgtatacataacccgtgttttaatctcaataatattaacttaatacaacattagtaaatgtgctgttcttatatggttaagaacagctttatttcattctttagcttagtgttaaagtttcgtaaacagaatgagattaaaacagttaaattaagattgtaataatatatatacgctattcttaattttcctgagtcatttcatcattttgctttaacaatggcaattcttagctttgtgcttatctaacacaaggaaagatttttttcttttatttgcatgagcatttggcatggttggtcacttattttcactgtgataattattcacttgttggtctcttttctacgccatgaaagattatcagcttagagttgcaatttggtgttcattaatttagttagattcccagtatgctttaattttctaattttcttgacagaacttttctgcctttaaaatagtatttgagaatgaaatgttattttatatatatgtgtgttcgtatatacacatgcacacacaagctgtgcttataataatctgtgaaattatactatatgaaagctaacatattttaatagtgagaaattggggctttggaaaaattaacattttcctgaatgttcatatctttagactaaaacatttctaaatttccaaagaacactattcaagtgtgtgtgtgtgtgtgtgtgtgtttgtttgtgtgtgtgtgtgtgtgtgtgtgtttgagatgaagtcttgttgttgcccaagctggacttgaacttctgggctcaaggagtcctgccttctcagcttcccacgtagctgtgactacaggcatgtactaccatgccgagctatatttttaaattattttgtagagacgaggtctctctgtcttatccaggctggtctcgaactcctggattcaagcaatcctcctgtctcagccttctgaatagctacgagtataggcatgcactactcacccagctattcaagtatattttatttttaaactccagctttctgttagtcaaatttctgcttcttgataaatgcagttttattaggacattgcattttgaaaataatcttagggtaaaccagtgtgaattaagaattttctacaactgcagaacaaaagcaaaaaagtataaagtttcaatttacatggaagcatatacagaattgattttattggcaatttattaccacagttagcagttaacatcattttaaaatatcattgtacatgttgttgactgagaaagcacttatgtttgcacattgacttaaaagagagacataagctttaaatattgtcaaccagtcatcacattgcttctttatcactaactttacctgcattacttttaacaattgcctttcatgttactttaatactagaataatttatgctaaaaaatagaatacgctaaaaaaaagtgatattgttttatgtcaaaaagtctgtcccactatgctttgtaagggagaaaaacccattgaccaagtactctacaaattcttatatacgtggatgaaccagtatagacatttttcccctaaaacatagcacttcaaaatgctctgcaatatgtttttcactttacctaaagagaaaggacgtattccctatccacttttaattagggggcagttggctttggttttggtttacatttatttgtaggcatattattagacactttgtttagagttttatatgtcttatatttatgaattagtatatatttatgtagatgggtgtgtacccacattcatctgtacatatatatgtatatatccatatatatatatggatatggaaaatatagaactagaaaacag

SEQ ID NO: 73794 - DNA, 1047 bp, Homo sapiens
attaaattgcattgtgataagttgtggaatggcttcacttaagtgacatttgaggaggacttgaagaaaagttgccaggaaacagtaaaggaatttctagacagagaatcaaatgttcagagttatggggacatgctatgtatgtgaactaatgaatagttgatataggtaaagcagagaattgagggtggaaaacagatatgtactggggagaatagctttctctcttccttctcaggcagcacttaatctgtagaagtagagaaggcttacttctttctccagctacccataatatttgtttttcttgccttcagcccatttgtgtttatgtacctcttatttctgtttttaagctacttaaggataaggactcattcaggatcccttctcactcacatttgtttcttcctaagcattaaaaattacactttgctcatagtaggttttcacagtttgttgatgctttacacatttgtggatgcttaattttagttctttgcatttgatatgatcattctgtttaaaataatttctaacatatatatgctccttgccttaattatctcatttaatcctcattgtgaccctgtgatgttaagcatattataattctcatttttgcaatgagtaaagatagccactcacccaggatcacaagtagaaagtagtggagctggtattggaacaccagttgatatgattccaaagcccatgcatttatgttccgtatgcattaatctagtggagagataaggataaatatagttataaaaggatgaagcaactatagctgtaataatcctgttactttgactagaactgccaaactacagaaagataaatacttataaccttaatggttgaatgaggatgaataccatatgtattgaagatgacatgagttattctttgattgcatacctggggaacattgattgattttaaattaaaattctgaagatgtggaatctgcaaaatgtgagctagtagaatgtttcaaatatcagggacaatgcaagtaaaaagatgaagagagaatttatt

SEQ ID NO: 73795 - DNA, 1050 bp, Homo sapiens
aaaagaacaatgttcgacatagtattcagaacctgtacatgtattcactgaaaatgggtatagttcttcatgacattttaaaatgttgtttgttttgaaatgtgtttcttactgctttaactttggacagtatatttttctggtaatataaccaagtaacttctgtttcttaaaatataaatataagggaaggaagactcatattcctttgggaaacatctgattttactgtttatgtatcttaaagtgtggtttccttgtgtttttattcctaagtgaaattgtttttacagtcttgccacatgaattaccatattgtgttggcactctttgctgctttttttttccctggagggtctctcagacttactttctgcaaaaactagatgcttaatctgcacatgcaccatcatttttctgctttgcagactttcagaccttgctagcctcataggacttacaggaaggcctggcttgtttctgttgcttttttctatagatccataatgatgatggtgtgtggctgaggctgaatgatgagacaataaagaagtatgtccctaacatgaatggttacactgaagcctggtgcctctcttttaatcaacatcttggcaagagtcttctggtccctgttgacgtaagtaaaaggtggttttaaaaagcattatagatacacgctgtttgttttacagagctttctttaattaaggcttttcagttctgaggtaacccacaactaagtaacctttactttacaatttcttgaattcttaagggcttctgtgtaatgaaagtgaagtttggcaaggttaaggcccttagtgcagattatgatccatcacagataggcaggaagtagtaaatttaattaattgctacttaattaaaactactgaattcctttcaaagaggtagaaaatgagagtggttacatttttttctttcttatttatacagctgtgtggaatgaattccaaactaaagtttatgaactcagaattatacattcaaaaacatgtataaatgtatgttatgttcacattttgc

SEQ ID NO: 73796 - DNA, 1026 bp, Homo sapiens
ctttctgcaaatctatacattattatatgacatctctatcggcaacctagaaaaatgctataaagtatttatttatagaaaataaagttgaaatgcaggatgattttagttgcaagcagctgacaacacatgttttggttatactttgagaaaacgatccttacctcttaggagttggtgatgcaaaacgtagttcttcaaatgaataattttcataaacctttaagaaagagaccagtctgaacaatcgtaaaatcatttaaaaacattctcaattaacagagtaatatattattcaataaatggttgtgagacaactggttatacatataggagaaaaagaaaaaaaattacctactttagaccatttattaaagataaattctacaaggtttgaagatccaaaagtaaacaccaaaacttaaaaaaaaaaagcaaaagaaaaaaacagataacatcttttgagtacattaaaattttaaagttttccaaaacaaatactatacagaaaggaaaagcttccaccttggagaaggagatttgtaactcgtataacccaaaggtgatatgcatccataacatatagagaataaatccatacaaaagagataaacaacaacaaaaaaagacagtcaagacaattctctgaagaagaaatctgaaaggtcaataaagactagaaaagttatttaactaaacttggaggaaaatacgaattaaaacaaaactaaaataaatcacatcatggtcatcaaattgtgttggtaagaaccaagcgcagaggagaacatgcagcacctgctactttcatacattgctcgtgggagtgtgagttttggcaatacttaatgtagttgtagttgtgcatgccctacaacttaacaattccacttctaagtatgtatcttacagaaactcttgctcatgtacaaaaggagacaaatacagaatgtttatttcagtacagtttataataagcgtccatcaatgggagaatggacagattatggaatagatccccaatgg

SEQ ID NO: 73797 - DNA, 1052 bp, Homo sapiens
gtagagttagtagatcaaagatagtcccgttttgttgaagaaattgagttgcaaagttataattcctggaaaatatatctaaaaggtatttttataagacaatttgtattttcagtatattaacatccattaacgaatctgttttttgcatctatactgtagagttagtggacgaaagatagtcccattttattcttaaagaaagtgagttgcaaagtttaattatttaatagattgcttaaatcaaatgttgatgttggtgatagggctgtctaataatattctttcttcacccgagtaaagaaacatatttgggctttaggtataagatttgttttattaagtgttaatttttgaaacttctataaatagagtacattttcttctgtagaacagtgcagctcaaactgacattagtgctttaaaatgtgctgagattgtgggaaagcatttacacttgcattacctgataaaataatttgttagtccctgcaataacttaatgtagattcattccactatcttttcctgtactttattagtggtgcatttgtttttatgttttgatatctctgattatgtattccaaaactatgaggccttgtttttacaccgtgttcatggttcatattgtcaacccatcttgaggtcatttgaactcttttcaataagcctttgaagggaatgccagagacagaccaatgctaacataaagtatacataattatgagtttataatagtaagttgcttattttgatgtcagtgacaattaaataataatggtatttggtttctataataccatgtttaggtggaagtgaaagctgtccctgtttctcagaaaaaaatgtctttacaacaagatcaagcaaagaaacctcaaaggattcctggcagtcctgcagtaacagctgcatcttctaatactgacatgacttatggagggctggcatcaccaaagctagatgtttcatatgaaccaatgatagtgaaggaagctcgatatattgccataacaatgatgaaggtaatttattttacttatcagaaa

SEQ ID NO: 73798 - DNA, 1102 bp, Homo sapiens
agttatgatagtatatgataagaccaggtgcaatggctcatgcctgtaatcccagcactttaggaggctgaggtaagtggattgctagagcataggagttgaagacaagtctggccaacatggtgaaatcctgtgtctacaaaaaatacaaaaattagccaggcatggtggcacactcctgtagtcccagctacttggaggctgaggtggaaggattgctcaaaccctggaggcagaggttgctttgattgtgccagtgcaatccatggtgaaaccctgtctctgcaaaaaatacaaaaattagccaagcatggtggcacacacctgtagtcccagcttcttggaggctgaggtgggaggattgctcaaaccctagaggcggaggttgctgtgattgtgccactgcaaccagcttgggcaacagagcaagaccctatctcaaaaaaaaattaactaattaaattaaatttattatagttgttaattgattatttttgttgctttttgtttttaggatgaaaagggaaaaaaatatgctggcctgcatgattttactagtaaaaaaaaaatcccaacttttttctggttttaattttaaaattgcagagattactctttagtttttaaaaatcacaaaatagtgattggagaggaatgtcaaatcacttaagtcagcctcactactatactatgcagacgtttttatgtaatgcatggtagaattacttattactcagctcacaggacaacttgaatgtgtagatcacagaatgaattcaggaatgaacatcacaaattacacaacattgatgcattttaggtggaaagcaaggtaatgaggaagatagttgagaaactgtgaaaaaaagatgggcagtacaccttgaacctggctgctgtcaggcaagtagagggccatttctacccctgcttttacagagacactgctttttccaggcttgcaggatggcagagtaaggtggagctccttcagagagaatgagcctgctcaggacttcaaattatgcacaacctacattcgtgttcttggtgattttaaattagccatagttaaaatttcaagtttcctggttttaaaaag

SEQ ID NO: 73799 - DNA, 1742 bp, Homo sapiens
cccttaaatataaccatagtattatcacattgaagaaaacaatttaatgtctgcaaacatcatgtaaatttttaataatttgagttagaatccatataaaatccatatattgtgattagtatgtctcttaagtcccctttaatcttaagtccctttaaatctataagtctccctctgtctctctctctttttgttcccttgagttctatttgttgaagaaactggatcctatgtatttgttagatgggagcctcttcagcttacctgctggttctttcagacacccctcttgcagtcattcctagcttccttgctttctggtaggataagatgttccaggctccctttatatgtttgatgcctcagacttggaactaaccattttttcaaagtgtcctgatttctgttatacatacacacacatgttatatttatatatgtatatacataaatgtatatatgtttatgtacagatagatttatgtgtatagttttttaaagataaaatacctcatgagtttatactgttgatactaattcaaacaaggaccacagacacacctcagtctcctttctcttatatctaaaattcctattagtgacactgggaatatcagaattagaaaatcattaaattatttcatttggtgtgtgtgtgtgtgtgtgtgtgtgtgtgtgtgtgtgtgtgtgtgtgtgtatgtgtgtgttttgtctttgaagtatatcccatctaagtgtatgtcaaattactgtgtttaaagtaagttggaatgctccctctgcatgattatgcattcattggatatacacttagagagtcatttattttatcttagattttaggaattgctttttaaatttggattttgttttataattctttacataattacatactttgaagtcaaatttatgaaacaaatctagcttttatctctgtcctctttactctgttcctccttctctgtcataggtaacattttattctattttaattttgtactttatcctgttgtgtcatttaataaaagcatagacacacacacacatacagatgcagatgtgtatgtttgtgtatatatatatctgtattcatgtcactttgcctgttgacctcaggtgacattcccagaatgtgtgaggtggatgacaatcgaatttgaccctcagtgtggtactgcacagtcagaagatgtccttcgtttgttgattcctgtcagaactgttcagaattcaggatatggaccaaaattgacatctgttcatgaaaatcttaattcatggatagaattaaagaaattttcaggatcctctgggtggcctactatggttttggtgttgccaggtaagttttttttttcttctgttttatgtggtaaaataagtgcatttatgtatatttagtaagggtgtatcattgaaaatgtttatctaatttttagagaaatttattaaagacctactatgtatctggattgcattcgaggaataaataaggtaccctgggcaaggggcacagcctgatctgagttttggagaagacaatgttttaaggattttgtgaaaaaaagattagcttgagcaaagcagagtgttaacgttgaggagtagctagctgtctgtgtagttgggtccaaattatagaaaacaatggattagatcttttattttcccaggaagtgctaaattttcagaacttacctaaggactgaagtccttcattgtaagagaattcgtaaacc

SEQ ID NO: 73800 - DNA, 1051 bp, Homo sapiens
tggatcatgttttacttaccattgtaaaataatctcatgtttgctcatgctacaggagtgaatttgatggagatttacaatcccaacttctgagtaaagccaatgaagaagataaaaactgtagcagagcattgtctgttgtaagcactgtcgttcgagcctctaaggacctcctgcacagagctcttgctgtggatggtaatattttttctttctcagtagtcatattttagattctttattcactaaatttttgcatagaattattgaagaggagccttctattatacaattttatagaatctaagtgttatttatagatccacccatggattaattttggataggtcacactctccatactgtaatgcagaattatttagaatgctcaaaaggagttaccatatattcttattttcttagttaatttagtaaaagaaaaattgtatttgagttaaactgggtctttattcttcttttagtaatcaaaaagctttttcttcctctctgttctttttccagtaatgtatcgctatccacccaaaactctggggtaccctaaccatctcctcagaggcacttgtctaaattcagctctatgagtttttccattggaatctctctagtttgtattctcctctctttcacttcttctcctgctgtcatttagactgccatggtgcaagtacatttcattttttaatatagggttaatatcccgataatctcactgctgcctttcccccattctccatctagttgtttagttattcttcacactggcagcagagttatcattatgaaaacatggttatggccggacatggtggctcatgcctgtaatcccagcactttgggaggccgaggaaggcagatcatgaggtcaggagtttgagacgagcctgagcaacatggtgaaagcccatctctactaaaaataaaaaaattagccaggcgtggtggcaggtgcctgtaatcctagctactcagaaggctgaggcaggagaatcgcttgaacccaggaggcggaggctgcagtgagccgagatcg

SEQ ID NO: 73801 - DNA, 1928 bp, Homo sapiens
cagagaagtaagaaaatattgtttttgactcactaattttttctcagagaaaaatatgcaatgatgtttgatgagcctgttctcctgcaagctgggtggtggtatgtggcatgggcccgagtgtcaggacccagcagtgactgtggatctcatggacaggcatctattaccacagatgatgggtaagtaaatgcccaagtgttacttaagcaatacttatttttgttagaggaatattgttttgaaaattcagagtactttcagcaggattcaaaagcttaggaagactagagcataatataactgctaaaaattaaattcatgtaacctcatgccaaattgaggtctagacagaacaaggagataataagaccactgtactttgctcctgtcagatggtatttgtatatatttctgggtattacattgtttacgagcttgattaccaaattagaaattatatagaggaaggtgacaaggaaaatgaggagtttggaaccataaaaaagaagtagatatgtgatattaaatttgatagtgcatgagaaaacagtttaaaatttcaaagcttcagcaatgtgtgttattttaataaaatatagggaaaattttgctgttttaaaataactttcacgtatagagtacttttcagttcatattcttatattttatctgatttgatgccctcaatagctttgtgaagcagttattagccccattttatactccagggactagagaaataaaaaggtgaaattatttgctatttcctgagagtcatgtggttaaaaccaaggtcagacctgtaacctgttgactctaaatccaacatttcaatattctattactatgatttatgtattctaaaggactatcatttgtaagataaattcagtttattcttgattactcctgagcataaactatttgaaatcagttgaagttatataacagtatatattccagtgcaggtcaattcataacaaagctgaccaaaaaaagaaatagacttatttgtgaggtgaatttcctgttgctgaatattcaaggagactactgtagaaaaatcacatctgttgttatgtgcatcaacttaagaatgtctttagaactaagtgactactttgaccctggactgtatgattttcatagacagttcattcagacttggaatgtcatggcacactgaggctaaagcttatcatgcagctagtcaagcagatattatactacttagttgtaagtagaaattttagaagtttactgctgtggttaaagctgagttggagagctaggagggacaggacagctactcatttaggagtcctaatcacgttcagttctttcattttactgactaacccattcagagctagaatgaaaatctagaaaatacctttttgcttttctttatgtaaaagagtgaatcattttcattgacataagatttgaaaacatgtttcttaaatttcttatttcctgtaatgatcatgttgtttttggtatcattgttttctcttcttagggttgttttccagttcaagagttcaaagaaatcaaataatggtacagatgttaatgcgggtcagatacctcagttattatacaggtatttagcatatttatactgaattagtatggtttattattttgctataatgaagtagaatcattacaaaacgtggcataatagggagaaattatttgaagcattcagcaaattataatatgctggtagaactataaatatatttaacaaaaacagttaatattttgtatatttttaaacattttccatacaggcttaactttaaactttgcctgattactcagattatctgtattataccaataacaatattttactgactttaaaaaaaatctatccattgattttcttactaatttcaaatgttgtaaaagaataa

SEQ ID NO: 73802 - DNA, 1093 bp, Homo sapiens
attctacagtattcacttactttttaaaagtactgtgagatgggaactgttagtatccacccaccttttatggatgaggaaactaggtcccaggatctcagttagtaagtgatgaagcaacattctacctcatttagaatgaggtagaatctcacttagtgagagactcacttagttaaaattttttgttggagttctctcacctttttcagatgcacatattaggtacaaaacttgtatagaactatttagagcatttgatgtaaatagatgaatatataaattaggaaaacagagattaatgtagaccataaaaccttgtttcctaatttaaatacatatgtttgtgtatttcacatagtaatgttaaaaaagcaggtactctgattttttacatttggtatggtccagcatacattcatcatgcacaaaattatgaacacattgttcatcagatatgtatagctgatttatataaatgattgtctttctcctttccttagctgtttgaattgggtcctgatggaggagatcatgaaactgatggtgaccttcttgcagagactgatgtattggcttatgactgtgctgctaggtaaataatttgtgcattattcattgtaactcttgcatacttaatattaaaaatttattataaatgaataaacatactttaaaaggaagttttaaatctgctatgaatatcaaatacttgagaaattaaattatatattaagcaatataagtattgctttcaaaaatgctgaattaaaactaatatacttcataaatttatttcataagtcaactgtttcaatattgaagataaaaatggaaatatgcatatattttatacacctttactttcatgcatctcttacggaatacctagtttgctggtgttctagtaataatacagttatttattactcctagcattacaggtaataaataattagcgtcaagtggtcatgtttgaccataattcagattacccatgtactctgacatcatgctgctagaatatatttgataataacacacttggggaggtgactagctttactgaaaccttttgggagtttataaaaat

SEQ ID NO: 73803 - DNA, 1486 bp, Homo sapiens
caacatattcatcttagggaaaatacagatgtgctcatacttaaatggccaattataagattattcacatctgtcaattttttattgacaatgtttaattttttatatagatctaagctttggtcttattgctgctcattaacactttactgaataatgagcttgaacagattttttttttttttttgagacagggtctcactctatcacctaggctggagtgcaatggcatgatcacggctcactgcagccttgacctcccgggctcaggtgattctcccacctcagccacccaagtagctgggactgcaggtattcaccaccacacccagctagttttttgtatttttagtagagacagggttttaccatgttgcccaggctggtcttgagctcctaggctcaagtaatctgcctttctcagcctcccaaagccctgagattacaggtgtgaaccaccatgcccagcttgagcagaattaatcttgctgaattcacttgctggttcttgaatttggactaaatttttggccacttattaagtgccttttttctttgataaactttggttaatgtctgagttataggaattatactcaattttttgatatcaaataccatatacagatatatatataaaatatatattttaattctgccactgctgctgataaagattaagaccctcatctcaatttttttacttgtaagattttcactgtctataataattgagaagttgttttgtacagttacagtttgtttcaatgaacaaaatgtttctagtattattttgacctctaaataacagctgctacttttttagtcattgtggttgtattcactaaattaccaacctttaaaaataatctccttccttgatgctatgtctctattgtgggatttatgcctatatttaatctcctactcaagggaggagacaaaatgctaaattcaaaggtaaaaccttataactaggcatcaatacatttatataaagtggaatgatacttgaaatgtttaattaagtctggcagaatcatatgaacacaatgtattttctatgttaaatctcatttggttttaataattagacatttttaccaattgagataaagccgtaaaatttctttacatctggcgtcttattaaatagcctttggaagatatgtatttgtgtgtgtgtgtgtgtgtgtgtgtgtgtgtgtgtgtatgtgtgtgtgtgtgtgtaggcttttgcatatattttaccattccactatctttccaacatgaggaggctttgaactgagtatattttattttggatggagtgaaactaaatgttgttggttttttttttttttttttagtccatccattctttgatttaatttggcaaacccacattagataatttagcagaagaggaattatatcttcatcctattatagtaaaacctctcactaattctgaatttatgatatttgagatgcagtatttgtg

SEQ ID NO: 73804 - DNA, 1142 bp, Homo sapiens
aaatgatttaatgaaagatgtttccaaaatgttatttgggttaggtgccccctttaccatcaatataaagcccaagctcctttctctctctctctctctctcgttctctctctctctctgtgtgtatacatatatctatatgcagaatatagacatttttgttttgtttttgatcatctggttttcttaacctctatttatgatttgtagtaaactcggtaacatttttattttggttttgtagcaagattaatacaaatattaaacctggaagagcttgttaaaacttaatggttaatttaaaaattagtttttatgtttcaatggaaaagatatctgtcttcaacgaatacatggtttactgactttgaatatatatgatattaaaaaagtatttgtaagataatttgattgatttaaattgaacttcttgattatctatttgagactattagtaactacacaataattttatgagtatacaagacgggttttgtactttataaattatatttaagatattaacttttatgtgaaatggtgattaggttatgggtgggggtggggggctggagtggggaaattggaagaaaagtataatgtccaaaaccgttaagaataaatttttatgctttttagtttgaattattttttgttcattatagtgttttcattttgtgagtttttctatgcacatacaaaatgtttctcctcaggcccccttgtatttgctggtcctatttttatgaaccatcgagaacaggctctagccagactcagatcccatccagcacagctaaagcataaacgggacaagcacaaaggtatttggtcttccttatcacctaggtgggatactttcccaatttcttccactcatttgaattttgtctctgggaaaatgcacaaacctgattcttctactttgcttctatcatgatgtagcctgaggagaaagaacattctgaaagtgataccgtttgtcagtgactgtcatgcttcttgtttttttgttgtcgttagctttcataaaggagatattttacaatatatcttttccttgtccatttcttttcaaatttcaaaaagttaagggaaggtggaaaaaataattattgctttctgtcttacatcctttatta

SEQ ID NO: 73805 - DNA, 1060 bp, Homo sapiens
tcataattgtgagctgtagatgggctaaacccatgtcctggcttacatgggagagtcccattttataggtgtccaggcatatttctttttttttttttttttttttttttgagacggagtctcgctctgtcgcccaggctggagtgcagtggtgctatctcggctcactgcaagctccgcctcctgggttcacaccactcttctgcctcagcctcccgagtagctgggactgcaggcgttcaccaccacaccgggctaattttttgtatttttactagagatggggtttcactttgttagccaggatagcctcaatctcctgaccttgtaatccgcctgccttggcctcccaaagtgctgggattacaggcgtgagccaccgcgtccggcatgttgctattactttttaagcccttaaaaccattatggttttcttgatttgacgcatcaaatccaatattagctgatattccagtgacacataaaagtctctttttaaattaaagtattatatgaagaatttagagagtataagtaagaaaaaatagatcagcataaccctttatacaaagagaaccattagtagaattttggtgtaacttctcacacttttttacttatttcatataatttcatactgtgatagatattggtgtcctgtttgtattccctttaatattatatcatgaaatttttttgtgctttattgcaaataccatattaaagtaatataggaatttaggtcaaggttttgcataaacctattccttaattcaattattgtttttatttcgttgtcatcttctaatcaagttttacttatttctagttatatcattgactgaattttgttttacatttttgcttagtgttataatacatatatttttatgttttgcttgtattgtacccctaccttcccatttccatccccccctcaaagtaaatgttaatagtctaatatcttactctattaaaatataatcatgtacagagacttacacatatgtgaaagtgtagacatatgtttatttacaaaagtagtattctgtatatacat

SEQ ID NO: 73806 - DNA, 1044 bp, Homo sapiens
cagctactcaggagactgaggcaggagaatcacttgaacctggcaggtggagcttgcagtgagccatgatcgcaccactgcactccagcctggcgacagagtgagactccatctcaaaagaaaacaaacaaaaaaaatttaactgtggttataattggtatttgaatacgcaaagataaatatatgtattactaaagatttccttgctcagtaaattttttttttgtaggattaagacaaattgttatggaagtctatgattttattcctccaataggcaaaattttgattagaaatgtttactgatattgcatattttaaatgcttattagaaatggcatgatatttgatgcatgaaataaaccttttacccatttaaccatcattatatttttttctagctattctttttgttaatatatggaataagtagtaaaatgtataatacacatggtgaattctagttttactaaacttaaattgtaaaacatatacttggcacatgaagagtgttcttcatagcatctgataagtgatgttgattgataaggtgaatatttactattgtttggctttgcttgcataatgtcctttaaaggatattttaatgagattaatatagatactgtcagtatttacattatataagtatatgggaaaattgcatgttaaatatttcttacaaaacaggatagaattaagtttctgatgtggtaattaataattttttatgttgatataattttttcagattagttaccattctatctgtttgctacctgtttcttctttctttagaaatattaggttgagcgacatgaatgaacctacaaaatgcagctatttcttacatttaaactacagtatagcacatccttacacttaattattcacatttaattacttgcctaatgcggtgtatcttgttactctttttctcttccctctaaaaaagctattcttctctaggtatagtatatttgtgcatataggaaataaaggaacattgaatcgtgcattgataacttgacataacttggtgat

SEQ ID NO: 73807 - DNA, 1190 bp, Homo sapiens
gccatcttgtgcctactgcctcttgctgagttttgttcttctgaagaccttggaaggtcactggaggtttgtaaattatgaagttgtcatgtgctttgggagggtgattggtggcagtaggaggatgatctagagtggggaactcttggcttggagcatggttgggaggctttctttggtctgttgaatgaaagtgttggtagtgaggatggaaaacaggaaaagatttaaaagtatgattgacagaaggtaacagccaagagacatttgacaatagccttccttgccttcttttgcagaaatgaaatggggagagtgtttattagtggtccctaaattaaaatttatttttgttactcaaatttaagcatttctttgtataattgcttggattagcatgctgtcattttttaaactgggaaatatagtcatccatcttttatacatgaaagtaacctgtataaaaattacaaattgatctgtcaaatagggtttggagttgaaaatatggcaacagcaatggatgaagacctggaagaagaactagatgaaaaagatgagaagtctatgatgtgccctccaggcatgcacaaatggaagctggagcagtgcatggtttgcactgtctgtggagactgtacaggttatggagccagctgtgtcagtagtggacggccagacagagtccccggagggtaagagacaatgattcctactaaagaacatgtgcagaacacatttctttgcaaaatcattccggagtatactctactattaatatttttttcttaaagaccagtggcatcttcacttgatcttagccaaaaggccaagaaagtattataattcttataattgttttctgttataataatttataatttaatgtcatctctaaggttgcctttctttcatttgattcatttaaaccattatttaaaaacagaccataagtttttcaagacttggggctgtacttttatttgtattatttttcaaagcctatttaatgctagatatctattatatttctttctgttgaacatgaatcttttctaaataaaattatcgatatcataaagagtacttgattagatatatagttttgttttaaattaaatgtaccatttataaatttagaaacgttgtatgcttgcttctaaagttacatcatacctgctatatttatc

SEQ ID NO: 73808 - DNA, 1188 bp, Homo sapiens
tgcactattccaaaaagtaccataattcctttttttttttaatacataagatatattacactggcaaataccagagtcttggaatcaaacaaggtggtccttcagcaggaaaatgggttgagctaccaattacaaaatctccaaagatagtacacttctcagttggacacgatggctctcacgcccttttagttgcagaagatgggagcatattctttacaggatctgctagtaaaggagaagatggagaatcaagtaagttgagtgatcaactatgcatttaataaaaataaatgctttattttagtaaaaataaaactttattaagataaagtttatgaatttcaataacaccacaccaactttatatatatatcattgacttgatgtaactgcttaataaatacatattgaatgaatgaggaacttattttactttccaggatctaacaagaatacatgtgaattacaacttgggaaaaaaaggagattttagatatgtgttagtagaatggtattaataatgcaatagctaatttagagattgggccctccaggagtttggtagaaaactaatattactcactgagaatttgaatgtacttcagggaatgaggatctagcaatgatagcgtaaatattaattgaccagatgaggctagcaggttcactgattttaaatgacatgttgggaagcccaggcctttgtgaaaataaacaaatagtgtcataaatgcaaataatatgggttttttttttagctttatatacaaaccattattattattatttgtacatagaggtcttgatttaatctaatttcttttttaaagctaagagcagacggcaatccaaaccttataaacctaaaaagataattaagatggaaggaaagattgtggtatatacagcctgcaataatggaagtagttctgttatttctaaagatggagaactctacatgtttggaaaagatgccatttactctgatagttcaagtaagttaataaaaagttttacttttatgcaaagaagtttcaatactagttatgtatgacaaagacatatctagaaaatttatgttggtggcatgctttctctacattttttacatttccttccaaatgtgaaatatttcgaaagagaaattttctgtcatatcttgtcactaggagcactgtccctagt

SEQ ID NO: 73809 - DNA, 1650 bp, Homo sapiens
gtgtgtgctgtattagtggtgaagaatgaaccaaacttcaggaagatagtcccatatttgtcttcagaactggcagatgttgcttgatatattcctgaagatacaagcttaaaatattacatgatggataaagaaaggataaagagaaaatcttgaaatcacgtggcagaagactcctccctcaagcctgaagaagccttttgtaattttcttgtttctttgacctggactgaattttcatccaatagcactttttgtttttcgtgggtaggaatagctctgctctgtagccttccaatcaaggagcagaagtaaattgtcaggtttatagatggtaatgaataccatgtttcaagttgacataaatcaggtaattccttgagcttcatgttccagcttgtcttacagtatagtttatttaaaaagtatttcaaccttgttttgatgaacttaaaacatactttttttatctgataattgtcattttattctttaaacctcggcttatcttacagattgtatctttatgtcattttctctccatgtctggtgacaggttgcctcagttcatgaggctttttgctactcttcttgcgccgcttcactcctcacccctgcgtttatctgaaattataatgagtttttcttctttgctttttagtttaaaatcttactgcttagagcttgagaagcatctttcttgcgcctctttgtgttctgtacagtggactaggaactctttcttttgatttctcctctctttgattaccaagtctcttgggctaccagtgggccttgtctcccagtttctatttccagtttgtgatccctgaattctctatttggtaagggtctgcctgtgttttgcatatttatgataaggaagtatgctagtatgaagctcctgggcaaagataaagaataatccagcttattcgggtgggctccattactgcatttcaaaatcagaattttatgttttgttgattcaggtgcaactagaaatgaaatgttattttttgttttggtattgtgattaatggagagattcatcctagttttctgcagttattttgggaagtatgtgtgtgtgtgtgtgtgtgcttttaacttgcttgctgaaaatttgtttttccaaaaggacagaatttatccttgatgttgattttgcttgtagttttgtgttatttagtagcaatcactaacacgtgttcctgtggtccttctgtaatactggtatcccttgttacaattgagcttgtgcattattttgatcaaagtatatggtgtactattctatggagatacatgcagtattgatgaaatatggtattctagccaagatacatgactgctttgagataaaaataaaagcataagcatatatttgtctgctcttgttggacaaacatttaaaaagtttagagcacactaaatgctaaaaatgctgtgaataaacattgaatttttaagtgggaaatgtacaactggttttgaatatccattttacaaagcaagggatatctgtagttggacacaatagatgtcaaatacagaagctttaggtcgtatttttctgtgacactaatgactgtgatgtatgtctgagagtagagtgttgcctccattgcatgtgattgtattgaaatg

SEQ ID NO: 73810 - DNA, 1050 bp, Homo sapiens
ttttatctaagaaataatgccgtggaaagtatattattatagcagtgtgttcaatggcataccacaccttctgaaaccactatgctattcattttcaaatagcaaactcaatacttgttatttttcttaaagtacttgttaaagtaacagtgatcattcatattatttacttggcaagtggtatggtcattttgaacaaaatgtttgtaactgtactgtcctgtttagtatacctaattatgtttctgggaatatgttacatcaattttcaataatgtatgacttttcctctaattgagaggaatgttcttatatttttaatcattaatatcttttagacatcaatattgatgtattattgtacctcaaaaacctgtaatatggagctgtatggctgctgtttctgctgaattagtaataaatattttaacaggaaaattttttgctgttatcagggttatttattatatagagatgtgaataaccacagcatgacagccataaggataagccctgaaacactggagcaagatggtactgtgatgttaccaggtatgtttcaagtagtcattttttctccacaagcaattttaagaaatgtgcatgttaagctatttagacacataaagaatgattagcaagggatagtgcttgcttataaaagggttttaaaaatcttgacatacaaagcattttatagtctacgtgaagttaatacatatcaagagaatagacatagaaatataacaagttttaatatttgttttcaaacttggccgtctatggcctaatctctgacctcaccccaccactgctgaattagtggggtgatgtaactgtgttgctcttaataaaaatcagaactctggctctcatgtgactcagtataaagaaccttctgtttatttttactttaacaacagtgcagttgggttttcctccttatttaatttaatttaattttatttaatttaatttaattttattttattttattttatgttaaaggggtttcagagacagagagtttagggtaggtcaggaattttt

SEQ ID NO: 73811 - DNA, 1166 bp, Homo sapiens
attagaaacttaaaatgggttaactattgtataatatggttgaagatggaaatggtgaactgaaagataaagaggaagaaattatctagaatgcaacagagagacaaggagagaaatatggaagataaaataagaaacatggatcgagaatgacaaaatctaatgtaatacaatctgagttccacaaggcaataatagatttgtggagatagagtacttgaaataatggctaagattttacagaattggtgaatgacatggaatcccaagagtaaggaagtctaccttgcttgagatttgcttcttatagatgaacttttagttggtactttttgctggcatgcgaaatatcattctgaacaatttattgtcttatgaatgatgatgtattaccaaagtatctttgttctgtgtttgtaacatttaaaaatgttttttcattatttttcttctcttttgattaggtgccaacaattctaaattcgctacagagaagtgtacaagcagttttggtgggaaaaattcaaattcaggactggtttagtaatggcattaagaaagcagctttaatgcacaagtggccattaaaagaaatatctgttgatgaagatgaccaatgtctacttcagaatgatggattttttctttatctattatgcaaggatggattatataaaataggctctggatacagtggaacagttagggtaatgtgattccttacagttccttaattatacagagttataaccataatgaattgtgttctgtgtgtttctagtttcatttctagaatatgatctaattttagtgtaataatatttatttgaaaaccataattgaaatacatgcattaaatgtcattcacccatttgtattatttttcattgattattaattatgaaaccactgatatactaacttttgttttttttgcagggccatatatacaattctacatcccgtattagaaacagaaaagaaaaaaagtcttggttagggtatgctcaggtaagaaactatccacaataaaccaaaattttcttatcttttacaacatgtgatttgtccttgtttaatcagtaatatcacttctatttaaacagaaatgataatatatttttactaatatggccataataactgaatagtgtagcgtaaagaac

SEQ ID NO: 73812 - DNA, 1245 bp, Homo sapiens
tccctgaagatgtgacatatgagatttagagggtgaataggagggagtgaattcgattataagtgctctaggcagaaataacagcatttagtaaggctctgagacagaaaggagaatgaatgaaaagaagagcaatatggctagaatgtggagagtgaaggaaacagtcttgtgacaggtgaggaaggaggcagggacatgcagagctttacatgccatgttaaagaatttgattagtgggctaggaggaatggaaagtcattctctatttcattacatgaagaatattgttttttaaatagccttattttcttaaattatttgtttaaactattgactattttctttccctggattcttaacctttttgaaagggtagagacattctttgtcatgtttgccaataccctagtgtagaatagttgccagtgtgtgagagttcggtatatatttgctgaataatcaacagatgtactcactgaaggataataattggaggaaggatgggtagatggaaatatggacaaacagggatagatgaaaggatggagggaaggaaggatagctggaggaaaaggtagaggaaaggataaatggaaaaaaatggaagtataggatgtgtacagacaagtgaagagaggaagggggaaagaaaagaagacagaagggaggaagaaattaacaaaggagtgaaagaattttaagtagacaatcagatttttggtttgaaattctccctggctattggggcaaaagcgaatggtaagagataatttcttaacactttttatcaaagagatgatgatagcatggattggaaagatgatgatgagatagggaaaagtggagttatccattaggaagtaaaataaacaggacttaatttgggattagctatggaagatgagggattggtaggggctgcctgggtttctgtaagttaccagataacccacaggtggcattttagtttttagagaattgcagtacattactcctctttctcttgttctcctccttctctcccttccctttccctctcttcatgtttctcagtttttctttttctaactctctttttccctctccatctgattattcactctataaggattttcaagtctccgttctatggaagaaatacccagatgtctgttgattgaatcttagatggaggtgttcagggaattttgtgcagagacctctgctggttgtaaaacatttgtgtgtgtgtgtgtttcatct

SEQ ID NO: 73813 - DNA, 1033 bp, Homo sapiens
attagcatgtatcagagttatcggggacttccctatggtgtttctgattccatagacttggggtggggcccaaaagtttgtatttggaattagtttcttggtgatacagatgctggtttgaggagtacactgctggtttagactaaaacttggtcctttttttccgacttggctatttagattttgtaggacccacctgtgagaaccaaactgcatgaacctaactacatgtcagatttttcttttttggtcgcatgtggggactcagttattgtgtttgacttttgtttgttttaatgagagggaggatgctggtcattgaatcaagctgaggattttttaaaaccacccccctcacatacacagttattaaaagctattaccaaatagaagctgtcatgttggcaggcaagcaccgtgttggttattgttatgatagcaccagtgatcatattaatattgtgaagtgctgcttggcttgacagcattttactgaagatttgatttattttatttaacaatattttgctcggttttcttggatttggtttgttagttagcaaataattggaatgttgaaatacccgcgaagacttggatgtcgtatttcctactttgaacatgttatttctttcctcctaagtcttctaccattctcatgtctcatgtcagttgttatatactttcctttgtatccattctgtacatactttctttcctttattcttttaaaactagaacttgttcttaatactggctttggcatataatatgtgctttagtcttatcttccatcaaaactttcacattattggctgggtgtggtggcttatgcctgtaatcccagcactttgggaggctgaggcaggaggatagcttaaggctgggagtttgggaccagtctgggcaacttagacccctatctctccaaaaaaaaaaaaaaaaaaaaaaactgggcatggaaatgagtgctactcaagaggctaaggtgggaggaccgctcgagcccaggagtctgaggctacagtcggct

SEQ ID NO: 73814 - DNA, 1167 bp, Homo sapiens
tgttacttgaatgagaatgaaatgagctgatgaaaattaagtgtttttttgggaggccctcatttctgtgtaaacttctatatctacttttaaaagcattcaaaatgcaatctaatgtttgtagtaggtcattgagactctacagtgtgtctagagtctcttaggaagtcgtaaaatgaatttcctttgatacagaactctaagagttaagctttgttgagtctattcctgtcatggcgatacaagaatatttctaagttttttgcccatccttttccagcccttgtcagattggttggttattgctgcattgctcaaaaaatagtgaggtatagaaaaggggactagaagttgggtccatagacttagactgtctctgctgtgtcacataatgtgtcttctgcaagtcagttagtgtgtctaatctttacttttatgtaaaatgggacttgatgatagaaaagagtgtgaaatggaaatattctgttttgtatttcagtctgaaaacttagagaatacagtaatcataccagatatcaaactacatagcaatccttctgctttcaatatttactgtaatgtacgccattgcgttctggaatggcagaaaaaggaaatatcattggcagccgcatctaagaactctgtgcagagtggagaatcagatagtgatgaagaagaggaatccaaagagccccctatcaagcttccaaaggtaagccactgagttctattaatatttagatgtgtaacctgcaggtgttctggctataatgcatatatacgcattgctaaaatactttgctttatgtaaaattgcacactaaaaataacacggcttatgggcaaaaatagatttggagcagaaaaggaaaactctgcaactttataactaaggtgctaacaaagtcaataattgataattcactggaaagcgcaggaagggagatcagtgggttggagtctgttataggggcaattaaaaaatgtacaaaagcagtagggtggaaatgctagtatagaggcattgagccatggcagatggaagtagagctctgagccagtgagccgagagtaaggtgggcacaagagaaagccaagagccctggaaagctgggaggtgctcctcacctgggatgcaggtatgcgtttttatttttcttgaaa

SEQ ID NO: 73815 - DNA, 1021 bp, Homo sapiens
ttggcagctaaaactgattgcagctgagtcccactccacgcattgccctgagccaagagttgcctcccccagagtcatgcctcctcttcaggggcagtttacatctaatatctatacagtgtagggatataaatgcctagcgcttttgctataagacaagccaaccttgaagtctatcccaacaccagagagctctcccatgggtctggctgagggcttcctgggactgcattgcagatcaactccttcctctgttcagtcttacgtctttcactgccccacagttgttggttcggagggcactccgcaataaacttccggtgtgcacatctgcatttgagagtctgtttcctgggaaccctcctacccaaagcagttggtgccaggagtggtctcagaaagtagactttacagtgaggttttgaagctggattattggctggctggctggcaatgagaatcgattctggtgctagatggagcactaatactgataacgcttggcatgcactgtagctatgcaacttaaaactttcactggtggtgagttggaatgctattcctgttgaagggaatgcactggtgagtgcactaggcttttgagaagttcagagaaattaattatgaggacaatcatcagatggcttttggtaaataacattgatagattggagaaagatgatgcaaggtggaagataattgggggcaaaatgtaaaaggaaatttatttagcatcatgtaaagaaacacatatacagtaagaggaaaaatctaaggcttcaacccaaaacttaattttaagggtagcagagcaccaaggtaggtagaattctctctcagctatgctaaggtcagtgttctggttgggcaggaatcctgacccttaggatggggcatctgagtgcacttgaaaaccctgaaaccccaaattcctcttaaccctctgggcctgcagaagtggccttcttctactagctagaggggttgcttgcagactgtgctgtccctcttacccccagct

SEQ ID NO: 73816 - DNA, 1025 bp, Homo sapiens
cagtctcctccagtagctgggactacaggcatgcaccaccatgcctggcttgttttttattttttgtagacacagggtctcaccatgttgtccaggctggtcttgaactcctgagcttaagtgatcctcccacctccacctcccaaagtgctgggattatgggtgtgagccaccatgctcagcttgctcagggattattacttggcactaaccattggccctataaaaatttataagacacaaattctagacttgagtttactgtctatctggaagtgcaagatacaaaggcagatacttatagaagtgttaaatgaaatgaccaagaaagtataacctactatgacaaaggcatggcattctaggctggcttaaaagcatcagcagagacaggaaagcacagtttgtatgtaggtaacagtaggaattctgttagagctagaatgcaggtgtcatgaaggacagtagtggaattcattctggaaatggaggctttggctaggatggggcatcttgaagaccaaggtaagaattagattttattcagtagacactgatcacccttgatggttttaagctatgaagagacgttatttattgtaggaatatgtcaggaagtaatgcgggattgaatctgtatgtgtacatctgtatttgtgcataggtagtaattttcttcatgtagctgttatatcagtggaatcctgtatagtgtataaacacaagttaaggcaaaaactgctctattggtatactggtaggtagaaatgtgaaatgaattagtttcctaactcaagagaagaaaaaaatcttgcctctgggcttaaaaggaaaataaaaatgtcaatctaaaaatacttttgtcctttaatatatttgtttaaaaaatcaacagaatagtctcacttttttctcaaaaaccagattaaacatttaggttttctgaggaggggttaggttaattgaggtttaatttatatacaataaaattcatcctctttaaatgttcatttgaagagtcctga

SEQ ID NO: 73817 - DNA, 1024 bp, Homo sapiens
ctctaggagagtggattgaaaattctcagaagtggtaaatgttgaagaaagtgagaaccgttttcaggtcattgataacttttgaggaagtggtcagaatagagggatgtggtgaggagtgaatggaatgtgtttttggtaactcaaggggatttcaaagttgagggaaggatattcaagtataggaggttgggtgggatatgcaaatatgggaggctaaatggagagacagagtgaagaagtgagagaggggataattgataggaaaaggtcaaagggatctcagggacaggaagaggtcaaagggatctcagggatagagttaaggtgacaggtggagaggttagccattgaaaaaaggagcagttaatatagaaggggtggaggtgagtacttgtaaatataaagactgggagtttattgaggataggcatcatatcctattcgttttgataatcccaatgtctagcacattttttggcatgaattctgtaaacatcaagtgcctgctctgtgccaggcagtattgcagatgctgaagatgtagcggtgagcaagatagacaaagtctctgccgtcttggaaaatccactccaatgggagaaatagacaactcataatttcacttagtaataagtaactgtgaaggcaataaaacctatttcatgtgatagggcaatttgtagtggggctattttaggtaacatggtcaggaaatgtctctttgagagttggcatttaaattgaattgccatgatgaggaggcagatgtagaggaagaatgttctgggaatttataaaggccttgaaatgggaacaggcttgtgttcaagaaacaaaaacatgatgagtgagttatcagtcaatgtcaaatgaattaattactctttgctttaggtgtacagttgagaagttgagagtttcaaacctaatggactcagtgactttgatgacagtctaacaaagtggttaagagcttgggcacagaagctagactggttttgcatcctggttttgtcatttg

SEQ ID NO: 73818 - DNA, 1045 bp, Homo sapiens
tgtatgtggatttacctctgacataggtcaaatattatcctctgaaacctagccacattcaacaaaaaagcctcatctaagacaatctttgttcaatccaccaatatcagcattatctaaaggctctactttgtgggagatgggataagagagcagaaaggacatgtgtttgagtcagacagatctggtttcaaatgccagttctgccacctcgtatttctataatcttcataaagtcccttaatgggtttggatgttaatattctaaatacctccttcacaaggtcacagtatgcttttgaggagataatatatgtaaagtgcctagaaaataggaggccctccttgaccctatcgtacaagatactgtgaatgattgatagctttctgtgttttcagggaaccagtgtggcagagtgaaaaataataggttggtgcaaacgtaattgctggttttgctgttaaaattaatagcaaggcctttgaagttgtgtaaaatcaggtctcactctcctttgccatttttttggtggtctgactttaggcatattacttaacctctttgggtttctgtttcctcatgaagacaaaaagaaaagctcttctatctgcagacacatgaggaattagtgagttaagatatataaacatctagcacaatgcctggcatagtaaatgctcagttaagagcagcctcagttacagtatgttattactgtgggattaagatttatttattaagatttttttcaaagttctttttatttccctttatgttcaaataatcaaaacctcccggactacaattaacaatgcgaaggctcagattaatttctgagatgagtactgggtatttcatttcattcctgcccctgtttatgaaggagcagaaaagcaaatctcacagttccacatgctgcagagcagaaagatggtcatcagctccatggaggtgatttttcatggctccaacaacctaatcttcatgattgatgattgctgctttaagacgtttaatagttccttccaaaagaatttgtatttc

SEQ ID NO: 73819 - DNA, 1046 bp, Homo sapiens
actcatcacttttgggaactttaagccattttttcaaagctgcacccttatttctgtaaagtaatctcagtttcagtctgaatgtggtactagaaaatgctctcatgatggtccttagatttcactaataactctcagcccttatgccactttcaaattattttaggttgatttagtccctacttagccttttctgatggtatgtatgtaaacagtggaaggaaacttgtttacatttttgatggggagatatatgggatcagttttatgcttaaaatatttgcattttaaaatttattgtgatattgtttgtaaatatgagattagtaatctattaataactttccttcttttgaatggatttctgtcatatttagttagcatcctattactagcattttggtacctaggctttctttttatagtttaattttgtccaaatagcattgaaataatcaactttaacagaaatcacccacttagtggtattagtatattagctcttcagatggtttgaagcaaatcaaagttgaagcaggttctatttcattcaacaagtacacaggtgaataaatcaaagccttgatgctttacaaatgtttctagagacaaatggcagagaatcttcctgaaaacaagcctgagattagaattccaggtggaaaaacaaggagggttcattaatcttagtgggatggtcttaaaaattttaaagttacctgatttacataattttattattacattttatgcatcaagattttgtttgcattgcaaatctttttgatgaagaaaatatcaacagggtttaatttttaaagtttaacccacttgttaatgcttgcaaagcactctgttcctttatcactgcagactatagtgtcccagtagtgtggtctcagaaataagagtgctgttcatttggttccctgatatgtttgcaggatggcaacttatttttatttcctgtgtttattaagaaacaactggagtgggtatatagtaccttattttaaaaatatttaaaactacaagttttacatgct

SEQ ID NO: 73820 - DNA, 1105 bp, Homo sapiens
ttgagtgacttctatgtaccaggtaccattgtaggtgatggagatgcatcagtgaacagcacaggtattaagtctctgccctcattgagctcaccttctggtattcagattttcacttagtcctccagatctgtaaggtatttttatttgtgtttgtaaaatctagtggctttctatttcagtttattcaggtaatgaagcctgtctttgatcaaagtaggagaggagcagttgcctgagcaggcggggtggggagctggagggtttaggtgctttcctatagattttcagtcacctggtttttttcacttcaccacaaaactccctaccctctgtggtacttcgcacctacgattccagaaccttgctaggtccttattagtttctttttgctgtaaggccatagaacagaggatgtcaaaacccaagtctcttccgcttttcatttctaagatgttgtgaccatcccgagtgtgataattgtctcctgtcccgttcagtcttcctatggctttataagagtttgagtttaactcttactgtagtgtggttttataagagaatagggaggaattcatagttaatcccccatattgaagaatacttactggcttccaattaagggggtcctttgtcaatgatggttaattgacagatatcaaaaattatggttttgacccacactttattcataacataaagatttaattggaataatgcgagctttccatatttttggtttcaataattctctaataaagcatttttcttttttttattatactttaagttttagggtacatgtgcatgatgggcaggtttgttacatatgtatacatgtgccatgttggtgtgctgcacccagtaactcgtcattttatttttctttttgcttagacttaatttctcccttgggcagtccgcatttttgagtaacagatattactgagtgttttctttgagactagagttgtttcttttcatttgaatataaattgcccaagggaatggactttgttttgttgagcaccagttctctaattcctagaagggtacctgacacaaaatagatgctgttgctaaagtaaatgaatgtttttttgag

SEQ ID NO: 73821 - DNA, 1050 bp, Homo sapiens
tctttgttcttttaagattaaattattaagtttgatttaaactatagcagacacacagacctaaagggaaaatggcttctataaaagggaatttttaaacatgcctttgaagtgtaattactactacattttttttttttaaatctccactattaattgcagatgggaagtcagaagatgacttgtgaagttgtagcagtcactctggtcctggataatactggatttgatctggtgtgcttaaagctgttgtcttatcttcagttttgaccaatgattaagtggaaacaagttgatagtcaagataacttcccctttctgacctttatgtttcagctctactttgagactgttgtcctggttaaagaagtcccgcagaaggatccgataatagtcatgagggaagagcattagatgtgtgatcgtgcagtgggttaagatctgagaagtagataaggtctaatcctttaattatgattagatgccttatccattaagattatgtttcctattaaaacctaagaaacacttgaccttttaaacttagtgtcaagaataattataaaactctgatttccgtggaataaatgttattcagtagtactccttatgcaacatggtggaatttgtaactctcattcaacaaatatttatgaaacatttacctgccaattgtcaggagtatacaactgctttgttacttttgaactgaatatattttaaagcttaatcctaatatcaaaagtgattttcttcattaactctgcatattaattacatatgaactaatgaactcttgcattgggtatttcttaaagatggtatataaatcatgttttaaaaatattacattttgagtaaaattggaagtttaaagattgagtatctgtagtatcctggtatcataggtactcatacatatatatgatggttaatgatttttaagttattacattcattgtcatagtttgaatgaatgggaactgcaggaaaagatacaaactaactttctgataagtttttcatagctaaatttgaagactgtgagac

SEQ ID NO: 73822 - DNA, 1016 bp, Homo sapiens
aatgttggctgggcggtggctcacacttgtaatcccagcacttttggaggctgaggcggatggatcacctgaggtcaggagtttgagaccagcctgaccaatatggtgaaaccccctctctactaaaaatacataaaacagccaggtgtagtggcacatgtctgtagtcccagctactcaggaggctgagacaggagaattgcttgaacctgggaggtggaggtttcagtgagctgagatcgtgccactgcactccagcctgggtgtcagagtgagactcagtctcaaaataaaataaaaataaataaataaataaataaaaaagaatgtagaatgtttttgctacaacttgctataacatttcattaaaaaaagtattaccatttgtgaatgcttgctgcaggctttcatcctgtacccatgaaaagcctgtttatttcttcctacaaacataactttttttcatatgagaacactgcaacatttaagatgttatgatttgctccaaatttcaaagctagtatgtggcaggatgaagactggaactcgggcatctgaattcttactgaagtgtcctttcagtcttttcttggtctttattacaatatgttatggaaaactgtagtgaagaagtatcctgtcagccatcactgctgtgtctcaacacctgatgctatggttccagccctgcacgtttttctgagtgactattataaaactggtaatatatgttagcccggggttgacacactatggccatatctgtttttctgcctgttctgtatggcctaagagcatttaaaatgtaaaatgttaaatgccttttatgttttttaatggttgaaaaaaacaagaatatttcataacccatgaatattaaattcaattctcagtgtatataaattaagtgtatctatgcttctataaaacattttcatttcagttttttcaatagctgctttcataccataatgtcagcattgagctggtgtgacagaaaccctatggccagcaaa

SEQ ID NO: 73823 - DNA, 1043 bp, Homo sapiens
tccagagatatgcttttcagactgacccaggcagtcactttcatggttaaccattttccttgtttccagtagtggccatcctagccttttactacatgaggttctttattccagcctctggaataaatattctcagcatatttattgcctgtaacttacagattaaaaagccttaaactcaccttcctctccctcattctctgtattctgtctttacctccctgtttcagaggaagtgagaaccctccctttccaaggctgttccccctagctaatctctgtcccattcctctcatctccaggaacttttttccatgcttttctttttccttagactcttctcttgtctgttatttctaatctccaagtctccttgatcctaaaagccatcctcccttgagccttatactcctcaagctacagcccccctctttttttaaacaacaacaacaacaaaacaacaacaaaaacatttatagccaaatctctcttcaaagactttttcctcaccttatatctgcctgacctgctaacactgatttttccttatgtcttctgctgaatctgctctcatcagtggcctggttgttctagccagtagcctctttttagtccttatcctacatgccctccctgagtagttgccactattaactattagctcccatgttgaaactcttctgcattagtctttttttttttttggttgggactggatgcatctttgagcctctggaattctcctccccaaattatctttctcagtttcctttactcattctccatctgtctactctaaattgttccttccagtcccttctcttttccttgtgtattttctccttgggtgatttcaatcatgcttcatctaacacctatttgttgatgtaccctgaatctgtttgtctctctagccctcttccctgaactccaactccatactggacacaagcatgtaggcatttccagtaaccatcttgagttcaactaattttttttttaatctaaacatgagtatctcatgctctccatgtgcgatggca

SEQ ID NO: 73824 - DNA, 1055 bp, Homo sapiens
tgaggacctcccctggagcctgtgttgcctggatgcctagatctagctgtttggtggacaatgagtgtctcctttagtcctaaagattcctgagtctttgttcatagagtgatgagtcttgctgcctctttaatgtgagcaagctcatttgaattctttacttggtctattcttccagtttcctgctgcatctcagcccttgaagattaaactgctgatttcttgtgaagatagaactagaacattacttttggttccctgaactttaaagaatatgtggttattaaaacgttccacattgtttgacaggaaatgtacctcatttccagatggtctgacacaagttggagatcacagctttgttccaaggggaatagtgtcctaaatatttacacttggaagaccttatttttaagagcatatttcaggattaaagctttgtgaaactgacttgttgcttaaatatgagtaaagattggttttaaagactaacacagattagaggcatagccaaatgtaacgtatggaccttgattggatcgtggtttagaggaaaaagcttgtgaaagatattcttgggatgtctgaaaaattttgtatgcagattatcatatgatattgttaatttgtttacatgtgattacaatattgtgattccatagaattttctcaggagatcaatatgcatttaaagtgtcaagatgtctgaagttttatcttgtttagcaaagcaaacaaaagtacatgtggagatgaattaaatatggcaaaatggaaacaaccagtatagccaggtggaaaaacaggtgtttatgatactattttttaacatttctatatgtatgaaaactattatagtaaatagttggagagagattttaaaaagaaatatagaagctcaattaattttctcaatagcatataattatgttcctgtgcctccctgctgcttaaaaatatatgtattggaaatatgtatagtgaaaatagtctagtactgatagaggctgtcttttttacaccagtttttgtaatagtcaaaagatctagatatg

SEQ ID NO: 73825 - DNA, 1016 bp, Homo sapiens
aaaatcatcatttctaagtcaagcataatactgagagaaagcccccaagaagaatattaaagtgtaggagaaggaggactctcataacttttgtttcaaatcttaagattatgttctcatttactttcatttctgagcattctaagccactgttctttatgcattctaagttcctatcatgacaatttctggttctgggccattttgctttctggaaagaacagaggtaggatagagagttggaaaggctgcaagtatagaaggaggaacacagttgtagtcaaagacctggttttgggtcttttcttaatcataaattctttggaaagttaagtattctttctcagtcttgttttctcagttgtaaaattaggattatgcctattaattctaactagtttctcttatgtgtttttttttaaatcaagggtggttatatatgttacatgtaggagagatagtaggactctattcctgaataaactgttctgtaatttcatttcaaatgaaattggttggcatttcattgactctgcagatcaatttttggaagatcttaacaatattaagtctttgcatccattaatatgtaatagtcctccattgactcaggtctttaatatcagtgaagttttgtagctttctatatagaggttttatgtttctatagttaaattaatttctaggtattgtgatttttaataagtagtatttttataaatagtatttcctcaggtttctttcagtttctactagtttgctggtattttgaatataattgatttttgtgttttgatattgaatccagcaactttgctaaattaatatctcctaatagttacccaacataatgagtgcatatgatcaccaaaacatgttcaaggaggttcataaaaccccaaattagaaataacctagctttctgtcatcaggggaataatcacatttatacaatggaatactgcttagtaatacagcaacacaggtgaatctcacagacaaagtgtcgagtgaaa

SEQ ID NO: 73826 - DNA, 1031 bp, Homo sapiens
tgggagataagcatgcagtgaagacccgtaagtgtgaaccacaaggtacacttgagatggtgccagtggcttctcattactgcagtggaagaacatagatgggagagtaggtcaaagtgagtgatgtgactcataggattattaacaatctctctctctgtttttcttgtctctttttagttttcttcagcctccaaagcctctgtcttcactcagcactctgagggatggaaattggagagatggttgctactaatgcagttttatgtacccttgaaaaatgggaaagaagtaaaaatgagggttgtgttacctagctggctgggtagcagtggatgttgggatattctttcccttttgtgttttaatatatttactgcattgtttctcaatggaccagtcaccagagactaattattgcacttaaatatttgcctgagatactgcaacattctcaaacccatggttgcagtattgtgacacttagatctaggaagtttttgtagaactgctctgtacctgaatactttttgagagaattaagatgtatcaataatgctttgccatatgagttttttaaagtaacttgttcaatttactcacgtgttctaaacatctttccattacatgttctgtattttaatacattgcatattgacaactaggttctataatgtatgctttgaaatttacttttttatagtttacaggaattttattttttgtgcctatttctttttacacctatgtgaaccactatggaacaacttaaattttgtgccataaaaatatttttgtggtaaggtactatttttttagctctagggatatatcagcaaaaacacatcatgcaatttgagacacataattttgtgttgaatgagcacaacataatttgaagcattgcaaggagataaccagacagcagaattaaatggtcctgtctttttcatttttaatttattgtcatacatgggtttcatatttataacggcatcatgagctcattgcacttaatacctgcaatgttt

SEQ ID NO: 73827 - DNA, 1067 bp, Homo sapiens
attatttatgatttggagatttgcagcctggggctggtttaccggaactgttttgaacaaaaacaaaaggaactcttttcttggttgctccaggattctttgattctttgatccaaagaactctgttgtctgtaggagacgtggaggaggagtacacacagaagaaaggccttttccaggccagtggccttgcttgttttatatgagtttaactttcatactaaatctcatccacttcagcaatttctttatggttaattaaaactccctgtgattgttgtggtatggtagagatggaatggagatgacttaggagtgaataagatgatttccaggcactggcaggtgaaatgtgtaccattttgcaaggcaaaattatattataaatctttgtccctggtatattgagcaaaatggataagggtcactcataaaccctcatgctgcagccgccaacccctttttaagactcagccaatgcctcaatttctccaggaaacttttctgatctcttcatgctccaggctaggcagccaaactctatgctccacagcaccttgttattgcattgattacattagcgttacaatagatgtttgtgtttaataatagtttgaaaaataggaccataactttgtcttataagtctttatactgccggtgacagtttccaatgccctaaaatttctcaatataagtctttgagaagacctgaattgagtttcatttatttatttaataaatatttagtgaacacctattatatggagacataaggaagaggaaaatcagacattttcagcttttcatttttgctactaaaagtcatcagtttgattatatcagattgaaaatttgtttcaggatttgacatctgaagccactcagacttgtctgtctatagaactagtgtgcttccttcaattaggcaccagccttgtataatcatcctatgtgtggacaactgagaaagaagatacccaataaaataagattcttaataaatcttcaaaggacaataattgactaattagttatcactgatgtctgtgtatatatttaaacat

SEQ ID NO: 73828 - DNA, 1016 bp, Homo sapiens
tatatatatatattttaagagacgtggtttctctatgtcacccaggctagagtgcagcagtaggaccatacctcactgtcgccttgagctactgggctcaagggattctcctgcctcagcctcacaagtaactgggacttccggcacctgccacaagccccagctaatttttaagttttttatagagacagggtcttgctatgttgccgagactggtctcaaagtcctattctcaagcaatcctcctgacttgacctctcaaagtgctgataatacagatgtgagccaccatgccctgcaaaaatagttgtttacgttctccatctcatcttgggatgttttattcttggttattcatctgttctcttctgcggagacaaatgtagccactagctcagggaacttaagacaaacatttctcctctgttccccaaggatcagggaaccagcttgcagaacaagaagctttatttggtaggcggtaacaatttcccttgactcttggttgaaatgtcactcaattaggagtcttcccctgtactgctgagcagagagagacaattctcctgggatgcttctcttttccaaccctacttctgagataaagctggtagttggggaaacatattcttcctctgaaattggcagggacacttaatatcacagggcagaacttggtttgctgaagatagaacttattcaatttctttttggactctctttttggattttctattgatgaattaagtcactgctttaaaaacctatatatttataagcatatacgattaaatgcatgttatctgtgaggtgtaacttggtcagttccaacagaggaatgcatgatattatcttaattctgcctcttagcagttgagaggaaagttgttcaatatcgggtgtgtgacgatttttataatgtcttaaggtgggctttgccattgcctcaagaactttccttggcatggcctgtctctcaattcaaattaccgctattgataatgatcagaagacag

SEQ ID NO: 73829 - DNA, 1072 bp, Homo sapiens
agttagtaagttttgcttcttggtaatggggctcagcaaattttactttctgacacattttataacccttcagagtaggtacagtaattacaaatgactatatcaccacaccctgctggtgccaggctctgctctaagtctctctgagaatgtttttgattgcaactgcataatttttaatgattaaaagaatgatttgatcggtgcatcaacaatacagtgttattttgtgggactctgatacctgttggtttccaataaggaaagggaatattaatgctttcatcaaagaaaaggatgttaagaatgggtcttattagagaaacataagtgaggcttctgtttttaaatatagaattcatcttgcattttaaaacaccaaagaaattttatttgcagtgacttttgtaattccagtttctgaagtcagacacgtctctcatgcgctaagtttttctttgtctacaagagacaagaaaatagagcatttctacactaaattcttttcacattaaaaaaagaaaaaagaaaaaatgaactggccatgggcctgtacattaaatttcatgacttaaaaccatagcaatcaaatattttataattagaatcattattttcttcatgttttgagctgttttacaaacaaagagaaggcaaaaactccacacttacacattcctacattaaatgtagaaacattacaaaaattagattaggaaatagatgaatataatgaccttactctcaatcatatgctgctagctaagtgtttgagactgaaaaattgcactaatgaagctatttgaaggcttttgtggacaactgcttcctctttgaagattaaatgaatgatgttgatgtgattaatcttagtacagggagtgatgcagcagctagaaaataccttggtgattttcataattaaactgaatcaacatttcaaagaaatgccagtgttatcacttgtatattagaattacattcattagacagaagaaacaaataatttgagcaaacaagattttccttttggtgtactgagacttctatcatgtctcagagtatcttacta

SEQ ID NO: 73830 - DNA, 1010 bp, Homo sapiens
agatttacaaagggttttttttaaagtctgcctcaagcagaaatgttgcaggcaaacacatgtgtattatataataatgatcaatgtaggtattaagaatttaagaatttgctttaaataaaacctttaccacataaaaataagagtattatgttaataaaacatcatgaaaatgaatttcctattttatgtagtaggaaactgtgcaaaacaaaaaaaaatgctttgctttctggtaagcgaatctatatatggcttgaaggagtagtaagactattctaagacgcctttaactgtcaatccatgaaaaaaaaacaaaaagggacctcctgaagaggccaaactatcattgaagtgggtgtcaatgagtgatagtttggcctttcaaagttttctagttctgaagagaagttcactctaagcggattcctccaccagttttggggtgaatatgataaaatgtgtgtctcggattcttttaaagaataatctcaaaataagtttgagagagtgggaaaattgggctccgtttgcatttcagcttctcaggaaatccaggcggcggcgggggtggaataggaaaagcaaaagacaaataagcattaaagcatctgccacatttatgccatccatttgtcttaaatttcctcttttccccagttctagctccaggtcgtgttccttctgtaggtctaaaaaaattatgtcctcaagacccatcaactaacttctgaataatttttgtttaatgcgtgttctgaaattgctctcaacttcgattacagtttcataaataaactgtaggcacccactgccgtgattgtatcgatttttgttttcttgtgatactgagactacttcggtccagttcctcctacacgtggcagcgcacgtgagagaacagggcgccccaagcccgcaggactcactcagcgatccctgccctctgcctctgccccgccgccccggcctctcctgatagcacctggcacctgcgtgaagtatcccta

SEQ ID NO: 73831 - DNA, 3225 bp, Homo sapiens
atcataaatctttgccattgttttaggggataactcttcatgcatatatgagctgaattgatacagccagctcttcgaggggaaatcatcagcacatttctgcctctctgctaccatagatctgatttaaccacaaaaatatcctattaggttttgctattattatcatatgtttattattatgtaagtggggaaaccattttttgaaaatatacatctggcatttgccctactcattgagtggtctgaaatgtcactgttaggtgaaattagaatagcctgggacagtttgcactctcaaaccttgaaaagaaaaaagcttgagttataagattaactatctttccattctttgtaggtttggaaggtttgcagttgctgctcttcagtccaaagtagaacagtatgagcgtgaaaccaatcgcctcaagaaagccctggaacgaagtgataagtatatagaggaactagaatctcaagttgcacagctaaaaaattcaagtgaagagaaagaagctatgaattccatttgccagacagcactttctgcagatggcaaagggagcaaaggcagtgaggaggatgtggtgtcaaagaatcaaggcgatagtgccagaaagcagcctggctcatccacctccagttcttctcacctagcgaagccttccagcagcagactgtgtgacaccagttctgcaaggcaggaaagtaccagcaaagcagaccttaactgttctaagaacaaagacctatatcaagaacaggtagaagtaatgttagatgtgacagatacaagtatggatacttatttggaaagagaatgggggaataaaccaagtgactgtgtaccctacaaagatgaagaactttatgatcttccagctccttgtactcctttgtcccttagttgccttcagctcagtactccagaaaatagagagagctctgtggtccaagcaggaggttccaaaaagcactcaaaccatctcagaaaattggtgtttgatgatttttgtgattcttcaaatgtttctaataaagattcttcagaagatgatataagtagaagtgaaaatgaaaagaaatcagaatgtttttcttccccaaagacaggattttgggactgttgttccacaagctatgcccaaaacttagattttgaaagttcagaggggaacacgatagcaaattctgttggagaaatatcttcaaaattgagtgagaaatcaggcttatgtttatccaaaaggttgaattctattcgctcttttgaaatgaaccggacaagaacatccagtgaagcatcgatggatgctgcttaccttgacaaaatctctgagttggattcaatgatgtcagagtcagacaacagcaagagcccttgtaataacggttttaagtcactggatttggatgggttatcaaagtcatctcaaggcagtgaatttcttgaggaacctgataagttggaagaaaaaactgagctaaacctttccaaaggttctctaactaatgatcagttagaaaatggaagtgaatggaaacccacttctttttttctcctctctccatctgaccaagaaatgaatgaagatttttcactccattccagttcttgtccagtaactaatgaaatcaaacccccaagctgcttgtttcagacagagttttcccagggcattttgttaagcagttcacatcgactatttgaagatcaaagatttgggtcatctttgtttaagatgtcctcagagatgcacagtcttcataaccaccttcagtctccttggtctacttcctttgtgcctgaaaagaggaataaaaatgtgaatcaatcaacaaaaagaaaaatccagagcagcctttccagtgccagcccatcaaaagcaactaaaagttgactcattagaaaggtgtcatttgtggttttgtcctgagagaaatagaaaagttgttaaagttaccttttttcctcataaaagttctatacaaattggaattgataatctttagtcaagtatcaagtcaggatggtggattaacctgtacccagaatacttattgttcattttgaaaagactttgttcttttcatttttatttgggagtctttgtgaccagagaagttagggaggaggttatttttgtgttttggggttggttggttggttggttttgtttttggttttgtttttttactgaatttgatatgtatctcggttggatatacattgtttttttaaaaaatgttatttaactgttagatacagtggcctgttgataagccccacttgtcttcagaacttggatttcttaaataaaacttttagtgttgtctatacactgctcaataagacacttgagtttaagcttttcccagggtggaaattattttacctgtccctttttatttatgtttagtgatggcctagtttttctgcagggccatgatggagaaatagcactctagccttagtccaatattgatttactttctttttttaggttttatgtatatgtttgcattttttagcattgtgttttgtccagttttgtgaaaatgttctgctagtatgaaagaaaacattttctatatgaagacatttgttttatgttaggtagcttacattttctcctctgcgtgtgtgtgtatgtgtgtaaaatcagaaatttagcatactatggaaagaaggcatggagcacttgggtttagaggaacctaaaacatcatagcttcattgttccagatgtaacaggtttgaaagagctcatcgccaagttcttgatccacttgcattccaggggagttttcttttgagtagtatgtttcttgtttgcatgttcctgttctttgtggaaactatgcatggtagcatttttgcttgctgtgttttccatacttaagaaaaagaggtttcagttggctgatagaatatcttttatgtaggacaaaacttttctgtgaagagtgttgagggggtgaagataggtaagaggtaagcacaatttttaatttaggctctgaaaaagtgtattgttctaaacgtatttggtatgcctatataggtctttaaaaatgggtatgtatgctgtttaatgtgcactgaacattttacattaatattgtactgttttacattaatactgcatgcttttctatgtgaattgaataaagaatgtcataagcactgtgttccttgatgtcgatgatgattctttgtctcgt

SEQ ID NO: 73832 - DNA, 1048 bp, Homo sapiens
taagcttctgttagattctggcagaatacagttccgatatcaattgtagctcccaaactgctctgcagtgttttttctggcacaatgaagcctttggccatcactgctactttgaaaatcaaagccttttggtctctaatggaatgtttataaaaatactccattttgaaatttactcaagaaaaggaggaagtatggtaaatgatattagaaatccctccggcttgccttggcatagcttcatttagtgttgtatactccaaatatctagaattagtgtgaatacaaaagtattaaaacccaaagataaataagctcatgtccttcttctatggaagtatagcatcagatacttatccctaattgttatttctctataataaggtaaattgccctttgccaaatttaatatagttatcttggataagctgaaaatttcctgacacatgtcaaaagtctcatctatttgcagtcttactaaggtgaagttttttggggtggagcagtatagaatgtcaagcctgtagcaaaaaaggctgtactgtacatatgtcagtctctgttgctttcctgggtgtcagtgaaataaagtaaacagtcaaatgtagtaaacaaaacatgtttactttagtaatacagtgactgtcataatacttaacatgtaaaaagaaggccaaggacctttagcttatcctgtggtgtcaaccctgtctcaatgtaaggcactagtgtatcttaaagtaagagaatgacttttattcaagaaatacacaacaggcaagtgccgtataccaggaattgttctaggaatctggcagtgaatataagacaaactacctgctctccttgagcttctattctaacgtgggagaaagaaagcaaataaattacatgaattgattaattgatcagttgcatggcttttagtatacatttctgtcagtctgccaaccagcacaggtcccttattagcatgggagaagggcctgatcactgaaagtattatagatttatagagtattgaaaggaaacttaaggaaattggggg

SEQ ID NO: 73833 - DNA, 1038 bp, Homo sapiens
aaaaagaacttaagcccagctttgaaggatggagatttcagggaggagaaaggcattctgagtgagagaaaacagcatgtgctgttaggagtactaagcggtcccttcagccccagtcctttttctccagtagtagtagccacatatcgtggtactactcagtaagcacactagctttcttctcaaatttaccagagcaaaagtccatgtaatttttacatctctctactgtgaccatcatccctctatttttatagtttggtagcatgactccactacatccaccactttctactctaagcagaagggcctgttctcagtctgaatatttagtggggaatgtgaagcgtgtcacatccccacatggtaagaaacatcaagaaagggaagaagctgaagggaacacttaagtactggatttctcatattcctaaattcccttgactttaattactactcctaaactgtgccaagctatgtggatatacttatccttggtagagttagaagttccttagtgacttttttaacttgaagagatgtgaagaattgacttgtaaagcatttgaaagttctgtgccctctctccatgtctctgttcagttgtgccactttttttttctctagccacttgaggcagggatcatgctatgtcaccaactattatgaggatttagtagagcaggtatttttgtcctcagctactaactcaccttaatagtatgggatatactattaggtcatttatatcaaacttggttataattgaattaatggcttttctttctataaatatgtatgcaggaatgttatgtgttctgtcattgtgtctttagtgagatctatgggtttgataatgtctccctgagtgcagttcattttactgtacagcaaccccaaggcttgtcattatggacaagtcttcagcaatgcctcagctccttttgggggaggataaaggctctagatactctgggcagtaagtaatattttctgttattaagatatgaaaagaagtgttctgaagaggaaggaata

SEQ ID NO: 73834 - DNA, 1023 bp, Homo sapiens
tgtggtttttaaaaatctattatggttgtttttaaaataagtaccttcaaaagcataaatagccatattatcttgactcatcatcagatgatttgtgaggaaaggacagaatctctggatgagcatttatatgcaataagaagactttttcttatttaaatatcattaactgccaagaaatatcaggtggttccatgtgtgactataattagagactgttgtgcttctgtataagattgcatcttcttctagaagaataataccaatttaaaggatgtgtttctgtttcgtcctctttgtggtttgccataggttttttaagcttatatcagcgacttcccctgtgtacctaaaaacaaacacataaccattttcgcaccaatgaaaggaaaagttttgaccttatcttttcttttgctaccactctcttatttttaagattgtagatagataaagacttggtgactaattccaggacagcaataagcagctgcttcagagtacctcatgcaaaagaatgttgtgatttatgaaactggttcatttttttcagtttttctttgaacgagatacagcatggtgaaaaaggcaaacctctaggatttttcggcctagaaagggagataagatccatgccatcagcactagatgttacaggcaactcctacaacaccatcttgacccaagtgatcagcctttagcttgagttcaagtttatccacagtggagtcctcttgtgctgaaaggagatggctttgtagtactcagttctacaatcacatattcaactatttgcatttccttaaaatactattcctgtgtgaaattactaaatcttatctctcaaaattattaatgagctccatatggtattttaaaggagttcccctgtatattggctctcaggtcctcaggttaagtagcagagaaatacttgcaacttagatgtaagccatcttccacatataaaataaatgttgtttgggctcagaaaaggccagggtgaggagaagagagagccta

SEQ ID NO: 73835 - DNA, 1039 bp, Homo sapiens
ttggcggatgtgtggggtttaataattaggcgaaaaactctccatccttcaccccatccaatccccgaaaacaatttggggatttaaaaaatcgcctttccgtatcttcctcttctgtctccactattccgctttcctttagattttccaagatcctcgatacttgtagtaaactaccttcctacacattcgcaggaatcttgcagctccctaatcagtgaattttctttctttctttctttctttcttttttttttttttttttttaatgaaaggaaaacgccttggagatcgcgcgtttcgaaagcgcgttttcgttttctctcctgggcgggttatggccctaccggggcgccgtagccggcccgcgcgtgcccagtcttggcgaagagtagcggtaggtcggcgggacttccgtgttggcgggattctgaacgctgccatggctcagaccgtgcagaatgttacattgtcgctcactctgcccatcacgtgccacatttgcttggggaaggtaatgggtgattgtgggcacagctacaaaacggggttggataagtcgctcgccggggccgagggccgtctcgtgcgggggcggggaaggggcgtgaggcgcggagatgggagaaaacgctaacccgcgttcttgatgggaggccgcgtcctgggagatgggggtagcgcaccgtgattaatggattcatctgggcgcctttcggaggagggtgacagcggcccgtggtctgccgggagggcggcgagacggccctgccaccgcccgcggcctcacactggcaagacaccggcctcgaaggaggccccatcagaaacgcatcgcagggatatttaacttccctctgcagcctcgcgtggcgtgtagtgaagcccattaaaacacatttcctgggagcctcacctcgggcttcttagtcctctgtaactagtgttcatcctctggggcctacggtgctgtgtattgagtcttttccatttccaagaccttttgcctttatcctggccttgaggatgacctttgctc

SEQ ID NO: 73836 - DNA, 1034 bp, Homo sapiens
aaggaaggaaggaaggaaggaaggaaggaagagagagagagagaaagaaagaaagaaagaataaaagaaagaaagaaaggaaaagaaggaaaggaaagaaaaagaaagaaaaaggaggaaaaagaaaacggaaaactgttgggcagagcaaggtgaacccgactgcaaatttccctgacatagacttcaccattgtctggagggtttcattgctgatactcggagctgtcgccatgtgttagcatgcccagcagataaagttagcaattggatttgcatcttaaactgcgtgttcccatcgtggcagcagagcagcctgcttaggcttctcgagtaatctgggccctctcttgggtaagcatagataagaggctgaacagtgagcactctgcccatttaacctactggaaaagcacatttacagattaagactgcaacaaaccttttgttgtcccaaaaagataaaaccagacgtgttagaggaataaaaatgtgatccatgttctgaatgctatagattgggtgctatgtctgccatataagattagactttgcaggcagatatatctagttttagcctcatagcactttttgagaggcccctcaacaagatcatcattttacagtacaattaatgaactccttaagcagattgcatcagagttgacagcaaaactgcccctcctatcctttcacagtgagacatacacagttggggcagggctaggagaaaataacatttaggttttgatttaggcacattattttctaaatttgagttgtgcatgtcatgtgtgtatttagttttggccaattttctttttcttgctggttttttctttttgtaaccttaaagaaaatttcacagggtacagtgtgtttctttactatatagagtgcttggttccattttagaaaattgctatggagaatccactaatgctataaattcatattaaaatatatttgtacatccacagacccagcaatcccactcctagctctatactctgtagaaatgaaaatacatgagc

SEQ ID NO: 73837 - DNA, 1499 bp, Homo sapiens
cgtgcttgctaggcattatgaaggtggtgggggtgggaaggaagtaggtgggattgtagaagggcgacaagagggatccttatggtgatggaaacattctgtatcttgactgtatcactgtcagtattttggatgtgatatcgtactacagttttgcatgacaacaccattgggggatatttggaaaaggacacatgggatctctctgtgttatttcttacatctttgtgaatttaaaatgtctcaaaaagtttaatttggaaaagagaaaaaagtaatcaaaggcagaataacagctaactagcaacatattggacatgcagaaatgccttggagggatgtgtgctccctgttaagaatgaacttgggaaagcaaggattggaggtatagaaaaggaataaattgagtttgctcacctgagagtttctggaggcactgcaaactcatttctcccaatggtttcactgcaacctgtgccagtaagtaccacatgcatgttgcttcttttattctttcaccagtattgctaactgaaagagactctagactgagaaatgacagatctcatctacctcaaaaaggtggatgacaatgaaaacaactaatgtttgctttgctctctctgcctttaacatagatcaggagggttgaaatcatccgaaatgggaggagacagaacaaactcataactgtaaattaaattctctgaaggaaagagacagtgttatgggagtgcaaggcaaatgaacctgacctaggatgatgtgagaaaagccttctcataagttcagttgagatctgaaaactgaacaagagtttactaggggggagcatattcttgatacaatgaacagtttgtgcaaaaatatagggggaccaaatatggtgcatttgaagagctgaaaggccagtgtggctgcaatgcaaagacataaaatttgagaattattgatatggaaatctaaatataactgataggtaaggattggactctctagagatcaaatatagaatgagcagctctccatttaatctaggtaatataggctaattctgcaaagaagaagtagaaggggcagccaaagaggtaggaaaaaaacaggaaagggagttaaagaggccaaagtaaaaaaataaaatggctttaggaatgagggaatgataaacaatgtcaaggattgcaaagtaagataaatgaaatgcaaaatataccttggatttttggataaggaagccgtcggtaaccctggaaggtggttgttttgttttgttttgcctgcttgctttatgatgatgatgatgatgattattattatactttaagttctagggtacatgtgcacaatgtgcaggtttgttacatatgtatacacgttccatgttggtgtgctgcacccgttaacttgtcatttacattaggtatatctcctaatgctatccctccccctttcccccaccccacgacaggccccagtgtgtgatgttcccccccgcctgt

SEQ ID NO: 73838 - DNA, 1020 bp, Homo sapiens
gcaaactttttttccccttgagtatgcattgcatttgtcatgaagagtaaaaagaatgtaataaacacatcagtcataatgtaaattaactgttttgatccacattggttggatacagcatggttaattctaggcttggttaaaaatacataatttggaaagtcttctaatattttaaagacctagtagtttacaaggcctttttttgttgttgttgttagacttttggttcacatttacaaactagccacagggtgttcataaatatttccccaaattagttgagtatttttaattgtaaacaaagaattttctgcccctactacactggtttactgctagggtaaagaccattgtctgaagacactaaacttggtgttaacagtgttgattgtttaatggatatggactacatgccactacctgcaactttgtcatcctggagtttttgtttggtttggtttgatttttcactttttgcttttaaaattaaaaacaaagcaaaacaaaattgaagataccattgagaatcagaattcaagatgacttgattctcactaagatcactgcgcttttttaaaattgctttgagatctagtcagttacatatttaaaatccccgtgttgattagagataaggttttcattattttattttcctaaataggattctcatggagctattgtagataactgtacagaatcacttttgtgtaattgaatgaagcagtttcctctgcatgattgcataatgaaagccttttatatatctatatttttcaatacttagattttacactattaagctgctctagtcatgctatatttgtttttttaatagagtttataaatatttatgctcaaaatacagatcaactgaatatttttggtcttgtttacaagataaatcatactttaaaatgatacaggcccctcaagtgtcttaggaaaaagtcattggtgctataaaacctttcagtatcatttttgaacccattgttcagactttgctaggtttta

SEQ ID NO: 73839 - DNA, 10067 bp, Homo sapiens
aatattggtttcttgaacttttctaatataaaacaatagttttatcaaaatgaaagtaattatggaatatgtttcttataacatcagaagttcttagttttcctgagtaaatttacatctttacaaagcaaaaactcagttctttcaaaaatttacacagcctaattctcaagtttgtaatggagcaatgttaataaaaagtttgtaaatcattttgtaattaaagttgaaactttagaaagttgtagcctcatcttatagatttgaggagctgtgtgctgaatatagagatgtgtaaagttagatcatcagaaatttttgtcagtaacttatttttgaaaatgtcagtaactcttttgctttttaggtgaattttttttagctgaatgtaaggatgagttttatgagtaggtattttgcattaaacagttggaattccttatagaatatgatacatttttatgtaacagtgatagcttcaaaaaattgcaaattgtcctggaactaaaatacatataagtactttttaaaaaaattctagttgtatgacattgtgacaaaaattctctgagcagcatttgaacaggcatgaaatcttttaaatttatcataaatttatatgtgcaggtttaaaatttatacctggggattttaataccacacaacttatgtcaaatatcattgaatatgtaattgtttctacatttcacattatgctgtactttgagattgtattataaatcttgtgtgagtataagttatttggcaatatgttgctaacactgatttaccttagttcatgttactctaatttgaatgcagtttccaaaccagccacttaatatagcaagtacttagacatgactattttttaagttcacgttttatattcagttataaaagtttggtaggaaaaactgtttttcaatagaagagttcagaggggttttttttcctttcattgagacacttatattttgttttagttttataataaacattttatggtagttggtcatttgatgtaatttgaaaataatatactttacacatgcaaaattattattaaagattaataattatataccatttgtaaatgaacagtaattgaaataaaatatatttagcatattgatcctaatttagacattgattcagacattaaaactaggatcttgaagtaccttgggattgtcatcttaaacagcagttgtcattgtgttataaacatgtagacatatttcttttagtcaaatattggccagtagtgaaatagctatattttattatgagaaattattcttgttttctttttaaaggaatttgcaattactagtctgattgtaggagtaaataaccataaaaagtaaagtgtaaattataataatagtaaattgaatagtaaataatcaaaaagcaaatgggcagatagccatcttcagttgtctttagctattttaattttaatgttaggcactatgacatttatttttttcttcagaaatttttaatgtcttatattccaatatttttaatcattttaggctgcagttcatggagctcgtttcaaagggcaagatctaaaactggcatggaataaaccagtaactaatatttcagctgttgaaacagaagaagttgagcctgatgaagaagaagtatgttattttttttccacttatttttacccttaatcgttcatagcttttatataaaatgtgatttttatggccgtgattttaacataaaacttttattcctgacccatagtccaggcaggggatatcagataaatgcaaacaactttaaattttctggataatgagaagaaatgtggattgctaattcaaaaagaatatatgaaaatcatatatatatactcaatttttatttacccttagagacaatgattattcattagatttttatccacaggaaatcttgtaatattttaagttttaggataatctattctcagttgctttattaacatttcagctttcctttattttaattcatttatcattttagtcattagaatgaatgcctgttatatggtagatactgtcataggcacaaaaatgaataagacacggtccctatctatcatcaaggagcttataatctgaaaaggggggtggtggcagacacataagaaactagttacaataaaaggcagactgataacgctgaataaagatttgaacaacatgctctggaaactcagaggaaggagtgattgtttccatcccaaaaattttaaaggaggtattgatagtggaactgggccctaagcagtaaaacagcttcataagctagaactggagctggtaatataattgagaggtattttagatggagggataagcatcaggaaaaatgaaagtgtgcatttttctttgagtaacagcagttagtctgatggctaagaggtacgggccagtgaagtgttagaggcctttgaaaccaaaaacttaaaagtaagcaactcttacttaatcacaaaataaactttaggaaaaagtttaagttaataaataaaggtaaggtgggaaaactaaataattccatgttttaccttcataatggcacttcattttgtttgaagagcatttcaaggctgttatacatatccatagtcaaatgcaagaataaaaatgtatattttgaaactcatatacatgatttgtcattttatattttagattatacctttgtccttccatgagtttgaattgaatggggagaaaagcaggagagctcctggtattaggtattttgaaaagtttgaaatagcagtctgagaagtgtttatgaagggaatggggaaaagaaaggaatgcaataatagaaaatgtttgttgcatacagcagaaaataaatataaatataaatcttggtagaattttatacaagtcattggttgattttagtattcaaggttaggagggtaaattagagaaaacttactgttttcttttttaaaaagtttgaccaatattttaaaggtacagaagatggcgtaatttgctaaagagaggcaggaaaaaatggcatgtacaaaggctttatttgatatttgtttagtgtgtttcatgcaagcaatagaatagatcatatagagaaaccattgagtggttaaatgttgcttttctttgttttgtgaatgttctagctataaaaataccttttgtattcaactctgttgagagagatgagtatttaaaagtgtcaccttttttttcttttcttttttttttttttgggtaaattcctaaatacattttaacctaaagtttcaggaagagtctttggtggatgactcattacttcaagatgatgatgaagaagaagaggacaatgaatctcgttcttggagaagatgatttgactgatcattgatctgcatatgctagaactctacctgtgtttcattagtattatctaatgtacttttacatatttgtaaaaacaatttttggtaaaatgtgatgaagatggatttcacaaatagacaaaaaagaagaaaactaccttctgatcttgtattttgaaagattgatgtttgcattttacttcagtaaacaattgctaaagacatcacactagaaacatatgcaatgtttttattacatacttctactggacatcacagaattctttgggttctttgtaatttaatgaataggtctgaaaacttatgaccaatacttgttataacttagaggactttgttttattccaaataaggaatgaatttgcatttaaaatcttaatgaatgttttcaaaactgaatagataacatagtactctaactaaagtctccaagttatgtattataatattacatagtagtatgcttaggctttactatgtattagccttttgttggactgtgtatgtattttaccatatgggttttaatgataatggtgtatgactgctttacatgagtccttatgcatccagatgttataataaagtggaatggtctctttaaaaaaaaaaaaggaaagaaaagagaaaagcaatgacaaaaaaaaaaaaaaaaaaaaagccaagacaatgttccttgatttaaaaaaaaaaagaaaagaaaaaagaaaagaaaaaaattaaaatagaccattccagatggtgatctacccttccccccaattatcacaaaaggagctataatcactaacttattcttaataataatggttactggtacccttacaataatgtacaatccaatgtttaaaaattataccacttgagtttggtttgatcctataaattttcaacaaatgtcttaaaatttaaaagcaggctgattagtttggaaccagactgcaagtagagctaacatttggtgaataagaaaacatcacattacattttggatgtatgaaagaaaacttgaccatttgaagatatatgaataaagaaatgtactatagatactactttaggaaaacactgtttggtaagtgttccagtctgatattttaagtgtgtacttcctatacttgtataaaaatctttgatgtttgcaacaatactgtgatttttttaagtggatttcttttgcaagtgaacatgatcattgaaagttgatatggcagtttccaggaaataaatgcattctttgtagaatgggggtgggagattacatatttatattttcaaattcatcattttgattgcaagtgtttctgcctctcttgagattatagtgataatattaaaaaatcacatttaaaaaattactttcttccatattggggtcctcacaatcaaaagctgttgttccaccaccaccatagtcttctgccagtggagtaacttaaggatgctgttctttttcttcttccccatacacccctaattggggttgaagttgtgtgtattttcttgatggtaacactatttcatagaaatgctttgccttgcaattcgtgtctacgtttatatttaaaatttcaaaatcagatttcagttgtcaaaatagtgactttgctcaaaaagtcactatttttacttatatatttaaatcaaagatctatttttatgtagtctcttgtatgttgactatgtgctattctgattcattaggtaagtttgttttcttttctttttagtagtcgtgaaaggtgccaaattggcagaggctcacgtttcttctctttacaccaaacaggtattacaaagaaagtaaatctttcaaaggccagttaaatctccatgctgatttttggctttataatttgattagtatgttttagcctgatatttcaaaaattataaaattcccttacaatgtaactgaaaatacatattctgtttatttcagtccatgaatagctaatcagttttcctagaacttaaaatgttttaagccatgttgctttgaatgaatcagaagacaaatatatttcagcgtgatcccaaagaatggagattaaatcttaccaacattaattaggtttacaattatattattcatagtattaatattattttaattataaatattacttagtattaagttgctactgaattttttacttgtttataaatactagcactctacatgtactttcatatgttttcatttaaaacttaggaaggagttgttcatttccattttatagataaggaaacttaggctaatagagatggaatgatttgcccagtcatagctagtgggtgaaaatagatttgaatgcaagcattctgatttcagtgccaattttttttttttttaactctacgttgatgctgctgctttcctaattattgatggagtggaacatgagattgtgtttatagtaaatatggtagttcttgcctcaaagatactgcacaaaattagcagactacttggtcattcgccagttcatacttataccctcccttttaatacagcactttgttcatatctctgttacagtacttacattgtaatataatttatctggtttatgtctgtcttccccactagattacaagctcctctaggaaggtggaccatgtcttattcatcattttatctttagtgcttatcacaaagccaggcttatagtgggcactcaaatgtttgttggatgaattaatgaatgaatgaatgcatatttaaatatccaatcatagagtgacaaatacctcccttgttaattcttatcaattttccaaaaatctcttgaagatctcctcagtcactgggagcattttgctaagcaattgatacagtttgagtttgtcacttgtggggttacaagtactgatggaggtatacacatatgtaggcttagtggaatttccacaacatttagtaaggcattaatattttggactaataaatgttgtctgtttcagaggtaaaatacacttttggtttctgtcagtgtatatgattagaaatgctaagagccaccagtctagtccatcccactaatttttatatccaaaggtgatctagtttagaatactagacaaggtttatatgatatttagtttttggtcccaattctgcaactaactctgtggccttagacaagtctcttgccttatccagggctgtttccttgtctgtaaaataaagagttggactagatgatctctaaggtcccttttacatctatagtttccttggtactatattagtgtttgagacaaaacaatttaatatatctaagccagttctccctgttatcgttgttgttttctatcattttatcattggaaacaacttggatttggttatggtaatttatatgatgcctcttggtacagttttgtgtatagtgttcctacatgcttgcatttgccagtacaaattacattcagcctataaaatagagatgaacttctgtattcaccagcacttcctttttccaattgtaacttttcattttccttctaaattcagagttttaaagtagaagtacttgctagtaatgcagatagagtcagttctctcaccaatatggatttaaattgtcctttccatctcagtttactcttttttaaaaaaaaaacaaaccaatatgctacctgaaactagaaacacatttttaattctgcagctctcctaacagattattttgctttagtacagagctgggctgcaggctgagttgggagttggtaaaggattgaggacagcaatgtaggtcgcctcttcctacaggaaaaaattgaggaacgttgtgtattactggttaaaagattgattaggattatttcaagggatggttgagttgtcgttttacttatttcacccaatattttgtgtctctacttaagcagtgttgttttaaatgttactggataattgtaacataatcaaattaaattttatatttaactgatacccaagcatttgatgaaaacatgttgcaggaatgggagagtattccatagcttttgttttattgtgatttgattaaatgtgacaactaatagtttaaagacaggacttcactgttttagctgatttcctgtagaaagtgtggctaagtttaattgaaagaaatgtcttcttactagaactgattttgggggactttatccactcttacttggaacactaactgttggcttataagggttcaaaaaggaagcaacagttgcttatttggcatgttgaaatatcactggctattttagagtatgaagcaaactttatcaatatgttttcttttccctccttacacacaatgtagactgatagaaaattagttttagttcttctagaatttatataaattttgtaagctccacccaacacacacacacacacacacacacacacacacacacacacctgccccacttacaaaagtctatattagccttttaaaacaaaaatttcctgcgtgaaattctggcttagttaactttttggtctttctctcggggcttttcttgttcttataaaatactgtaaattacaaatggaaatttaatgcagaattaaatttctagtgtacaatatttgtaagacaagaagaaaatttccttttcccagatctcaggaactaccttgttcctgttaacttcttgaactggctagttgctcaaaggtatgtatacaggcctttagggaagagcagtttttaaaattttcctttctgatcattatatacctgtcagatgacaatagataatcttccaaagttgctacttaaaaatcctaggaaagaaactttggtgaacatgactgccattcccattaattgctaatgaaaaacatcaaacttgcttagtagaaaaacacctaatttggtataactttcttgcagtttatccatattatgtgcttgttacttaatgtaattaaaagcattttaaaattctacttttttcgtatccactttttatacttgctacttcctaaatcctccctcactgtttatttcatccatctactcatttcccatcatccaaagttagcctctccttgtataccaggcactgtctgatttccatgtattccttttatttttactgtgggcctttgtgcttagtatacttttacttcatataatgtgattaacaaatgaagtgattatcatatggagtttaaggaaattagatgtatcttgcaattactttgaaatctttgggaaaccttaagaagattgtatctgttttcatttttatttacaacatcttggaatttgttcatgatttcctaaaatttctttgcctacccacatctctgtgaaaattttccatatcagttaagtagttttcgcaatgaaaattttagaccatagatatgttgtatgctgtgatcttttgcagcctaatgtttgaagggagtatgatgcagagaggttttggtaaaatcattttagcccaaagctttgtgtaattttcctgcaactttgattttgatttctttctcaaatagacttttttaatgtttagaaaagttggaggtcaatttatgatgtgattcaagttttagatttatttgctattttcaaagttttttttaatagtcttctctttttccagcagagagagatcatcattgcctgaatttagctttgtgactgcaagagcaagaccagttcctgtctggagacgactgttacaataatatcatcctattattttatgttcactctttatcaatttgaacagatgtttacatgtactataattagcattttatctctacagttctctaagagtacatctgagtccaaagtgtatctgaatgtgtgctctgaccttattcttaaatgttttctccccatactttatagccatttattttttaaacaccttaagaaggaacgaaaaagttctcttggatgacgtatattcaagtctgagccaaattgaggattgtgtctaggaaatctgtaaagccatactactgtgttcattagcatgagcaatttaaaatgaaaatgaattaaaaagttaaacatgagtttggttttaattttggggggatcttaagatatatttctgggagtaggatagccactgaaaataattttgaatagatgataaagtacttttttatgtactgtaatagcttgtgcatttcttctgaatatactttctgatgttgccaaggtcatttacccaaatatttttttaaaaattcttagcccttcaaaaccaacaaagaaaataattttcttccaagtgacaaatgatgatctgtggattataaatattttaaaaattatatgtcttaacataattttttcacatttttttgactttcaatcaagacatcgaagacgacctttaaagcaagaggaaatagtgttgtgtgcctaacattggtaaagactagtttttaaccattttaagaagtgtatgtccaaattatttataagcagtatgacttaatatggcttagaattacttataaagaatctgattaaatctcatcctaaatatgtagccacaatatcttttttataatgggactataagaaatgtttgcacttagtttctgagtattccttcatagattctcaggaggcatttaaaaagttggaagctatacttggtagtaactatattagaaaagtccaattgacactga

SEQ ID NO: 73840 - DNA, 1622 bp, Homo sapiens
caaagttcacatttaaattattagtcttaagtatgagcacaggtttagttgaagtttagcttcttttctctcaacctatgatttgaacacatgatggatgtcagaggaaaaaaaatttacattatttaatatatgtgatgttaaaggaccattaactattacaaattgtgattaacaaaaatgctgtatcttccagtaccagtagtaatagtaataaaaattataactaaaaacctatagagcacttactttgtggcaggtatgccctctgagtgccttacaataattcattatgaattatttggataaccctgtgaggtagatacctttatttacgcccattttagaggtgaagaaaatgatgcatgatgaggttaagtaacttgtttacacagctaataactggcagagctagaatcttagtggctctaggacattctctttactgtgctctacagaacatttctatgatatgtgtggagctaatgagattacagttataatttttgggggggataattaggaaggtattgataatgatatataaaggactagaattttgtgggataaaggttgctgtttgtagaaaaatcctcccacacatgagggaaaaaaatccaacaaaccaaaaacaggaataatataatgtgtttagcttttaaatgttctaaacaactataaagtacagtagagtgtgtagtaagcaaaaccatggtcagttagggtgttaaacttttgaatcaagagacctggaatctcttcccattaattaacaattaactttggggaagttacttaaattttctttttctttctttccccatttattgagaatgataccaaaaactcacaaattctgaggattcagtatgttgcttaagaaagagtttatcttgggattggtttagtgagtataagaggaaagttagttagcaagaacgctcaggctttgaccattatttccttcatttaaagcatagttcaattgagtataagttttactaattctgggaagtgtgaattgtatgtaagattggaagacaggaccaccttttatcttatcaagtactaaaataaattactcaccatacttttctgttaaccattatgaattgttatgtattctgggttatatttattagtattttaatgttttttaataccattaggatttttggatatttcaaaatatttatttggaggaaatactttttttttaatttaaagcaatatggtgaaattgaagattgtcagattgatgattcctcacttcatgcagtaattacattcaagacaagagcagaagctgaagcagtaagttttaaaaataatttatcaattcagatttaaatgatttataagtattacttttaagttttaatataaatgaattttttaacttactaaataatatgctttgacaataggtagaacacctgaagtggaattcatgccctcaaagaatgtcctaatgcagttataagcaattctgtgtgtaacataatacaattaaaatacatatttagtcaccaagtggaatgtcaaattgtgctgtcgtgagataccagggattctcctttctttctttttcatagtagatagggccactccactacccatta

SEQ ID NO: 73841 - DNA, 1026 bp, Homo sapiens
tattgtgaatgtaggtattatctgtttattatcctgacttctgaagtaacatttaacactgcatacttggaaatcaggagttgctgatctttttgtgatatatcctgatgtcttagagagcaagaacttagaaaaaggcacatttagtaattccaagacctcagtgttatttttttgtttcagtttactagccacctacatttactttcactaaactaaaaccccaatttaaattatgtgatccttttatagggcatttgaatacattgtcaaattgcattaaagttttattcatctgccagagtgtaatgcttggcttgtgttagtaatcacagcattgtttaacctgtgtgtctaatctcttctaggctgccaaacgagggattctttcatctggtcggggcagaggaattcattcaagaggtcgaggtgcagttcatggccgaggcagggggcgagggcgagggcgaggtgtgcctggtcatgctgtggtggatcaccgtcccagggcattggagatttctgcatttacggagagcgatagagaagatcttcttcctcattttgcggtactttcttactgctcaacaaaacaaatgctgataatcatcattggggatagtagacataattaaagaggaagttatgaaaaggacataagtaatttcaactcgttaatctgaacaaagagtttaatctttaatttttttgttaatttaaaaacaaactgtaggatttgtataattatctagaagagacattactattcttacacttagtaggccatgaaatactgtgaaatgaacaatataaactttgctgtttcagagagggaagtcttgtagtttagtttgatttgatatttacttttaaagaaaaagttaacatattgcatgggccatccagatttttaaaataaggtttgtgtttgttaaaaatgtattcttgatctagctgacccagtattgaaacaagataaaattttgacctatgatcttgaagttgcctccgtcagtgtcaggatgt

SEQ ID NO: 73842 - DNA, 1999 bp, Homo sapiens
cagtgaaagtagcaacaagttaggaagctgttgcagttattgtggaggtgtggagtattttggcttggattagagtgattatactggagatagaaatatatggattaaatgggactgcgtaaaagttactttaaaaaggtttgtatcaatacaggatagtaattactgtcacctaaaatattaattactattttttagatgcagaaggaattacttgacacagaactggatttatataagaagatgcaggctggagaagaagtcactgaacttaggagaaagtatacagaattacagctggaagtatgtttaatcacaactacacagtaggcttaaaagaagcaaatgtagttgtagtggtcaatttaaaaatatattcccttcccttcattctcattagtaattgttggtaatccctggcatacatattgagatgttaatataggaaagagggaagaggtcaacaaatttttcagaggtactagataaaatcttatttaatgaggagtggcagtaattctgcctatatccccaagttcctccatttctaatgaattttatttctttctatttttggtctgtcctccctggaatagaaaacttataataaagtcttttcaggtattcttatggagatattctttgcatataaattgagttgctgtatgcgagttttagttggagaactatattgagaactattttgaagaatatgtttacttgagttttgcctatagatggtgctgtggatgtttagaaaagagaaataaacttctttcttgtaatttaattagatggttatttatataagaaacaactcctagtgaaattgattcctgttatatgatatgagagagaatttttgaatagcaaaaagaggttcaaagattggaactgtattttgaaatagacattaacgtcattaatatagttggcacatgtctgtattgtggtttgatacaggaatttaagatttttatactttagattatttagctttagctgagattaatgcttttttcttaacttgttggcaacttgatcattttttggacacggtagaaatctgttttgaatactgccatccaggtattaaagacttaacatttagtagctaccatacttgccttaaagctctgtcttctctgaaagtcataggaagccataggatgttgtcctaaatgttcatacctttgcattctctggaaacttgatgtggttgcatgtgtgtcctgcccagtattttttttggggaaaaaaaaaagtttgaaaaatatttcttttatgttaatagagaaattgtgtttttcccattgtagcgattttatgccagtgttggtggaatctttgaaacaaaatatcattttcaaaattctggcccataatttaaataaataatagcattaacaaaattccttattattctgtgttttgcttttttattataacatagctaaacactgaatgacattttctgtttttcctttatcacggcttacgtttagttttcagtgaatattagttttatgcagtaatgcagtacttcccagagtgtgttcattcagcacagtcattccattagttgttaatagaaaactggtgaaaaaaggttcttaggctaaataatacaaccttagaacaggttatattggatatgcgtttttactgtggggtttcttagaggcttttaatttctgaatctctaaaaatacatattaagtattcagtgttactcaagtttatttgtccaaggaccctccttttcaaggagcattttgaggcattaatattcctcagagcatacttccgtatatactgttctattactaatattaatccttgagcttcaaaatttattattacgtgttattttgttatattgacaaatgaagaattatatatatgataatccaaaatgttttgatatatgtgtaagttgtgaattgattacgtcaagctaacatgtccatcaccccacatacttgtgatttttttgatg

SEQ ID NO: 73843 - DNA, 1050 bp, Homo sapiens
ttctgggctggagatgacattgatagtgggaatacttagaggcgtaacatcaacaaatggattagaaagtaaaattgttaatatatttttcaaattgataatttttcagtgatagaattgagtttcttctggttgtgtgcttcaaacttatgttctgagagacccaaatagtaacagttcttcacaaatttaaccaagagtaaaacttgagttgagatagttagcatcaccaaatctgctattctgcgatctttagataattcatggttgttagccttctcacgaatgcataaactaaaaaaagtagtaatatttatttttaaattactttgcagtgtttgttttgttaatgataataggagtaattagctttatttttctctttttaaaaatttggcagatgttaatttcaaaactggagaaaaacaaaacaatgaagtctgaagataaagcagaaataatgaaaactttagaggttttgacaaaaaatattaccaagttgaaagatgaggtcaaagctgcttctcctggacgctgtcttccaaaaagtataaaaaccaagactcaggtatttaatttcattgttgttcatattattacttattaacaagcattagacactacatttttaagattcagtttttcttgtaggtaatatcttctgttcaaaatctgaccattgtatgtaccattctccccctgccataaataaaaaagtacaaacaagtaaactctactaatcttttaaattctgttatagttggaaagtcactaattagaaaaatagtcatgggtaaccttgaaaaggccgcttgaggacaaagtgatataggtacttgactgcttgactagttttatataatagtagttggtgatatagagggttaataatagacaagtatgaataacattctgacaacaccgtacacggtggattgactgaaaaggggaaaattcaggttgatcaggtagatcaatctacatagatggtaataagtgattaagaaaaaaacagggttatacaatgtttatacttggtgtgtctgtatg

SEQ ID NO: 73844 - DNA, 4000 bp, Homo sapiens
taaaccatataaagattggaaataaaactgtttacttgcagatgacatggttgtagatatagaaaattcaaaataattcacacagttgggattaagtaagtgtagtaagatgtatagaagtaaatatgtaaaaattatagcacatatagaaatgcatttggaatatagaaatgtggttgtttggagaagtcactgtctctgttcttaggaattggagtatcttcttttctgttgggctcgttacttccctccactaatttcagttttaatagattttcttcttttgaaaatacatgtgtctcttactatccaaactgtctaatctccagaaccagatagattcaaatagtgaacaatatagttcattgtttataagtcacatttttacattttaacacctctgacgttgggctgtgtcttataattgttagacacaggttatgattggcagcctttttttctttagtaggggtacataaatgatagtttgtcttacagtcactgagttgtagccttagtgagtcacattcgtggatgttctagttttacagaaggatgttcctggataaaaaaggaaatgggaatacttctaggaataaaggagtcttatcattgtcagatacttttattcactttgaaccagcactccttagtctgatactacatgtcaaaaatgatttgaaaaggagtattctcactgaaactggagaaatacttggttaaataaattatatgggtttgttcttggcttctcactgcttttattatgaagataatataaattaaaaactggaaaattgggttacgatattcattgtttcacacttaaataattaggagttttttcttttggccacaacttttcaacttatggaatcctcatgaagaaaacagtttgtgaaacttaattaggctctgttttcagtttatcctgtgtttctctactaatatattgtcttgtctttgtatagtcatgtggtttggcattttgtgctgtggttaggtagcatggaagaaatttttctctagaattacaaagaaaggtcactgaagtctgaccacaaacaaaatctttgtttaattggtcgagtatggtggctcacacctataatcccaacagtttggggcgccaaggcaggaagattgcttgagctcaggagtttgagaccagcctgggcaacatggcgagaaaccctgtctctacaaaaaatacaaaacattagccgggtgtggtggtgcgcggctgaggtcccagctacttgggaggctgaggatcacttgagcccatgaggtggaagtttcagtgagccaagatctgggccactatgctccagcctgggtgacaaagtgagaccctgtctcacaaatataataattgatcaaattttaatacacatcaaatattgttaagaacctttctttttaaatatcagctgtactgtatgaaactagtacaattataatattttaggtttttatttcgtttagaggctaacactttcttgaatacttagaatagcgatttgtgatgttccctaatcagatttcatgatgaaagattagaaagtagtcttcagattgctacttacctgttaaccagatgttaatgtttcagtggctaaaaaatagggccacttttctcatttatactcttaaacttgagtagttcttttaaccttatttaggtcatgaactcctttagaaacaatgacttgagaaaacaatgtttttccttagaaaaattgcagtgttcacacacatgctttcatgtttagttttatagcattcgtagatcaccctacagggattcctaggcttctttttaagaaccagtaaccagtcaccccgtggaacttaaactgtttttcttttgaaggataaaaaagatacccaatactttttttttttgagctgaccgttgtatagaaaaggttgtccactctgacctatagtcatttcagtctagtttagtgcagaaatgttttttgagtacttaccctgtgccctggcactgtttgtagcactgaaccaagttaaaaaacaagcaaaatctctgccctcttggaatgcatttttgggtttgtaaggactttagacaccatcatgttcatcttctttattttatagatgagcaaactgaggcccagaatggtacttaatcttacccgtggcctcataattagttggtggcaagacttaggtactggaagatgcgcagaagagaaaggcaagtctttatgttaatgcccttacattgtagacgggggaaaagacacattaattaatatattatcaggtcgtttttttttactaaatagctgacactaactaaaaatagctaatagcatttttacctaatagccaaagaaataaaatttcatataaggacctaggtagaaaagagaaatgatccaggctttgttagaggtcttgattgtgttaggctgaacctaagctgagtttaggggagtaaggtcagttcaagcagaaggagcattgctaccaaaggattggagaatgaatgcaatagggtatgtttcagtactggaagttgcaaatgattgtgttaaattgagggacagcaaccagtttcctcctgtgccatgctcttgagtgtggcttctgctttagtcactacaaatattagtaaatgtattcaacaactaatgctttctcagtgatgtagtaatagtaatgtttttctttttgacattttcatgtttttctttacttttttttctataggtatttggtgttcatttttttaaattttagagcttattatttatactctacctttcaaatcaccaaatatgatttcgttattataagtataaaatacatttagttcagtgtgttttgaagctgaagtttaacagtagtgctttaaagttgagtcttatagaaaataggatatcatgaacggctgatatatatttttaaaagttgaatttgtattggtaggtgttgtctacatctactggcctaacaaaaacagtgtataatccagctgctttgaaggctgcacagaaaaccttacttgtttccacctctgcagttgataataatgaagcacagaaaaaaaaacaggtaagtacaactggtatagtataaaaaatttttgcatataggaaagctttccttgtgtatgtgttttttcagtgcttattgcaaaataagactacaagggtgtttgttggctgccactgaacgtttattttccatagtatagcggtaaataaaaattttttctttgaaagaaaggttcctgtgattaatctttgaaacttgcatacatattttaagttttacatagaaaagccttgcatataatttttgttgacagacttctgcagttacaactatttctcttctcttgaataatattgtttatccttagtaatattctaatgatatttttgatccctgattctaggaggcattgaaacttcagcaggatgtaaggaaaaggaaacaagaaattttagaaaagcacattgaaacacagaaggtaaaatgttaaagttagatttggccaaattgcaaatgttataatttggagtgaacttaatcttatgctacctagtcataaaaagatttactataattggtaatggtaaaacaaatatttgtcagtgataatattggagatgaagagcatacatcagatggtgggtatactttatactttaactggtactatagttatcaacatgaaattaaggtgttcattcagttgtgttgctgcacagtagttttttcaacagataattaaatggaaccttttttctcagtattgatatgtacctttcttcactagcttaggatcctctagtcctgtgttttttagtatagcagttagtagccacatgtgactgtctatagccacatctgactgttgagcatttggaatgtgtctagtccaaattgagatgtgctataagtgtaaaatatacactagatctcaaaatgtagtacaaagaaaaaagtaaaacatcac

SEQ ID NO: 73845 - DNA, 1714 bp, Homo sapiens
aatacacaaatgtaacattttataccttccctatcaacaacacacagtaaaacctttagtgattattctttatcctgagaccccattttcgtgaggaggctagaagagaggaaagttaaaacgtaattgctgctggtaaatatgaagatattgcaagaggtatttagttattatgtgaatagatttgataaattatgtttgagtgcctctgcttactaaagaaattcatgaagaataaagggctacatctgtgtatactgtcctggttagttttttaaaacagacttaagaccgttcaaattatcttgctgaatcccttctaaattctaagaaggcaaactgcgtaaccagtggaatatttaatcttctttatcatatcagctttaaatatcagatttatgatacaggatgttattgttcttgtggtttttgcaatgtaaaaatatatcttggtctctgcatgatgatatattaacatctataccatggaacttttaaaaggaaaattgtgtggtataattaaaagaatattgcatgttatagagaaacttcacctgttgatttagcaggtgccattgtgtagatgctaagcaaatcttaatatgtttccttggatttttgaaatttgaatttgttgtgtaactttgctagttaaaagatttagagggatttggctgggcgcatggctcacgcttgtaatcccagcactttgggaggccgaggtaggcagatcacgaggtcaggagttcgagaccagcctggccaatacagtgaaaccctgtctcttctaaaaatacaaaaattagctgggcctcgtggcgggcgcctgtaatcccagctacttgggaggctggcaggagaatcacttgaaccagggaggtggaggttgcaatgagccgagatggcgccactgcaccccagcctgggtggcagagctagactctgtctcaaaaaaaaaaaaaagagtgggatttatcatagtttttttttcttaactgttattgactatttttaatttttattttttaattcagtggcctctcaggattattacctgcatttttttttcaggaaaatatgaaattaatttatttgagtgtattagctttgctgaactttgtagtaactaagctatttgtgtagcaaaaattcattactagctgtacatattttttactttgatgtttgttaaaatatttctctgcaagttttttaatctttgtttcttttaatccctttgtctatttcacttatatgtggaatcttaaaaagttgaactcatagaagcagagagtagaatggtggttaccagtggctgaggacaggggattgggaaatgttggtcaaaagatataaaacttcagttagatagaagaaataaattaaagatatctatagtacaacgtggtgactatagttaataacaatgtgttgcattcttgaaaattgccaagaaagcagctcaccacaaaaaaaagtgacgtaatacaaatgttaattagcttgacttagccattttacagtgtatatatttcaaacagcatgttgtacatgataaatacacagacagtcatcaacttacggtgacttgactaacagtttttcaatttgatgatgcatttattacttacaagttgaaaatgtattttcaacttaaatggtatttcagcttacaatggatatagccccatcataagttaagggacatctctat

SEQ ID NO: 73846 - DNA, 3231 bp, Homo sapiens
ctttagtccagcagcccattttgcctgttgtgaagcagtcagtcaaagagcggctgggtccagtaccttcaagtactattgaacctgcagaagcccagagtgcctcttcagaccttcctcaggtaaagcaaaggtcttacgattgtgcccgtaataggttctcagtaatttagtttcccttggtgatttgaattatagttaattgtatatattttacatagaaatatgatagtctttacatatttgaaccccacctataaggttgtttttttttttttaatttttaccattaccataacattttctcagtctctacttttcctatagtatttaaatcttaaattcctctctccagttaatatttatgagaaagatttctctctcactttgtggaggagatacatgtcagcaaaactgcccgaagagtgaagttgagtacattaaatcttattttttccatcatctttttacttaattagaattctgttccggagataattgtgtagtagactgaactaaactaaaagcttatggtaagggaaggcttaaaccatcaagttaagcatgcttgatattatactgttttaagtacttagactgctctctcataactttgcatcacttattcctgactctgggattcttttctccatatatcatttccttcccacttccttcaacacttgagtggcagtttcttgtttctacattctcagtctctgaaacttagctttcctttgtctcccgatgtttcagcatttgctgtgtaaaatagagttaggatgtagtgtcctacttagctagtggatgccaccttattaaagtagtcttcctagataattcctgaagagtaagatgctgaatttctgcaaggacatgcagaatgtctattggtaaattattagttaatttaaaaaattcccagtcctatcatcccaaattatcaccaaatacagtatatttggatataaaataaacatactttagaagaagttggcactatttttaagctcagtaagtgggcatatattttaatttttaaaatttgagattttctcctaatttattctgtgtcagtggcagggactttagcaaccacgtggctcagacctcttagtttacatcatttttcatgattgaataatattgcatactgtttatttttgttttcccacatattttctttctgtctcttttaagaaggaccaagtttttgtggttagtattggtatactcatagactctgtatatattagtagaatcagaatgttcaagatcccaacagacttttatatgtttggggaaacactgaatatgtccattttaatttttttagaatgtaactaagttatctgtgaaggacaggttgggttttgtatcaaagccatctgtttcagcaactgaaaaggtaagaagaatagcatgatgtgtttgtcttggcttcataaatgttttcaggtggcatcttaatttttaattttttttcatagttctaaactcttgcttcttaatagtatctgtatcttttcctaccttttggtttccatttgctgaaaaagaaaaatattttcctttttttacttttgcatcagcattttaatacttgcctcccactatatttccatgtactccattccttttctttgttttattctttttatttactttgttttctttagagatactgtgcattttgatttgacaactctggcagcctaatagaaagggccatgattaggaatttcacctgagtttgagccctggctcttcacttactaactgcatgacgttgggcagtgttcttaatttttctgaatctttttactcatcggtaaaatggtgatggtaatatttatcttgctcatggggttttctgaagatcaaataaaatcatttatttacaaatatttttgtaaactggaaaggatgatgtaaatgtaagtttttcacttattactaaacagtaatagaggtagcatagcaatacatatagtcatttctttttttttaaatgaaggggggtaaatatttattaaatcaagaccatttatggatatatcttatagttctgtgtagatgttattttttttttttgtttaggtatgagtaaatactttgtctttgattttatttgaggcatatgaaatcacagaatgtgagaattaaataatctttcttagttctatatgcttatcttaaagtcaaggcccaaacagtgttatgatttcatctgtatactgtgagtcactgagccagaactagaatttggggctcctatttttagtccatggctcttttcagtctgaagattgggaatcaatttcagagataatgcatcagtgagatagctgccctgctgtcttcactatattcttcagtatattattttctttatttacaatgttaaactttggcagttttaggtatttgaatctgagtttgtgtatcagactttgctcttgggcatctcagcattacttcgggcataatgtgcctaaaatgaattcattatttcctatataaattaatttatcctagcccttagctcagaaagtgataacaccattttctaagctgtgtgatccaaaagccttacaatcatttgcttgtgtttgtagaccacttctttttctgccaccttcagttccctagcctctgggtgcagtgtcttaactggcatcctggaattcccctcgtctagtttatactgtcaccatcttacactcagacttattttggcgttaattcattatagaaactttgagtttctcagctaaattactttccttgattcacagctcatcgataactcaataattctggttctattacttctgctctagtctttttacccaagggagtacttttctgctcgttttcctttggcctttcctgacttttattattttattttatttttttggtggtgatttttctggagtgcatttccccccccgccgccccaactaaattccagtcattatttaaagagtgaaagtctctctaacatctcccatgaaacctccagatttttctgttatccccacctcctccttggaatttctgtgctgcttagtctgtgctactaaatttagcagtatcaaatacttacttggattaggtttatcctcgttgaaaataagtatttcagaaaaaagaaacactggaagtgtttgaggtgatagattttgattattacataatgtatatatgtatcaaaacatcacactg

SEQ ID NO: 73847 - DNA, 1049 bp, Homo sapiens
cagatggatttttctgtaattttttattagagataaccccttgcaaagtaatttactgccttcttcagattctgtggatctttgccatgtcatttattgacaatagggattgtttctcatagttgctattaaaattgggaataaaaagagaaacactttgaatgcctatatgtaacatttatgcagtcgactttctctgctattatatagaggaactctttttatgctgtgaacaatccttggttactatttcttctggagtaaaagtagactgtggtctactaatccagataccaagaagtataaatacagaatcttacttggaaggaccagtatttcacttactggggaattttactctatgaagcaacagattcctttggaaattcactgttcttaatattttaaatcttaggttgcttataatggtgatcctgaaggtgccctaatccaatttgcaacatacgaagaagcaaagaaagcaatatcaagtacggaagcagtattaaacaatcgctttattaaggtttattggcacagagaaggaagcacccaacagttacaaactacttctccaaaggtaagagaggaatttgtgtaaaagtacgcgcatttcttagaaagctcttagcatagcgtttacgagtagaggcattggaatcaagtaggcctgagttcataccctggttctgcatttagcttctgttacctgtaaagacttgaaaaatttactcaacctttctaacctgttctctcataattgtgatgttaattgctagttgaaagaacagcatggtgtatgtgagacatatggaatagtccgtggcagataggagtactcagctatgtatattccagaaatttagactgtaggttcatcttagagattctctcttctttcccctctcccctttctccctcctttttgtcccaacccccatcggtgtgtaatgttagagtgtttatagaggtatattacaacagtatgggttttgattgttagaagatattgaaagttggactttaatttattccagtaaataagttat

SEQ ID NO: 73848 - DNA, 1053 bp, Homo sapiens
gttgagactgtcatcaaagaaaataaaatttaaaatcaaatttaaaacataaagttttaagataggatattttttagtaagctgacttttacagaatcagaataaaggttatatatgcaaattgactaaaagaggatattgagacttttcctgataggaatgttaagtagaggtggatcagaagtggaaagtaacaaatgatatggcagaacccttctcagttggcttccatgaaagatactaacagtgttcatttggaaacttcattgttggaagaaaatttaaatttcctttatcaaccagtaatttcagtttgggggaaaattgaacttaattggatatctattttgttaaactttattcccttgtatttggttagggtcaggatttataaatgtattgactaacttgaattttgtttgcagaccaaattttaatagaacaaacagcccaggctttcagaagaaggttcaatttggaaatgaaaataccaagcttgaacttagaaaagttcctccagaattaaataatatcagcaaacttaatgaacattttagtcgatttggaaccttggttaacttacaggtaagagccatgaaatggttttgttatctcttctttctgtttagggaacttaatgtaataagaaaactacctttataaataaatattttaaggctgggcatggtggttcacgcctgtaatcccagcactttgggaggccaaggcgggcggatcacctgaggtgaggaattcgagactagcctggccaacctggtgaaaccccatctctactaaaaatacaaaaattagctcggtgtggtggcaggcacctgtaatcccagctactcgggaggttgaggcaggagaattgcttgaatctgggaggctaaggttgcagcgagccgagattgcgccactgcactccagcctgggtgacaagagcaaaactctgtctcaaaaaaaaaaaaaaaaaattgttattctgaattgggaaaattggacatgaaatggaactctaccttttaggaaaaaatacaatttttagtgttt

SEQ ID NO: 73849 - DNA, 1905 bp, Homo sapiens
atgttttaaactttggagtcatttgggaataacaggttaaatgtactatgctcattacatgccatgtaagtaaatataaaatgttgaaagtaacagacttttacagctcttttacactgtattttagacttgaatcttttccttttttaaagcaagtatgctttcattacattcatattttatgagtctattccatatttaaaagcagctcacttcaatcataactctaacctttcacttctcaaagattattggattagtgtaaagttttgaatcttttagattgtgcatttgatttcaaaactatgaacttaaagcctcaaagtgattattttctcatttgtgcattgatatatatatatatatttgtggtgagggtgatggtagatgggaacaatgacttgggttttatctacaaagaagtgacctacagaatcacattttaatttggcatgtgagaattgattctttttcatagttaattgtgaaatgaatatgttgaaataagtttgaaaaaacccttagattactgtatttgaatgtacagtaattcccctttgtctgtgggtgatatgttccaagactcctcgtgtgtaaaaccacagagtaccaaaccctacatatactatgctttttcctatacagtcacacctgtgataaagtttcacttataaattagacacagtaagagctaaacaacaatgtctaataataaaatgaaataattataacaatatactataataaaagttatgtgaatggtccctgtctttctctgtcaaatatctttttgtatttacccttcttgggatgataggggatgataaaatgcctacatgatgagatcaagtgttggagcaggatggtgtgagattttatcacactactcagaactgcaggcagtttaaaacttaggaattgtttactatttctgtagttttccataattttggactgtggttgactagagataactgaaatcgtaaaaatgaaactggataagggggagctactatacatttatttctatttcttctaaaaaaaaaattatatatatatatatatatttagacaaaagccagaaattttcctgtatgaggaaggtatctatgataaatagaaaatattaacctatgcttatttttttcattttcttttgttttaaaacagaaaagcctcccaataaaagcagtatgaggatagtagtggactcagaatcaaggaaaagaaccattggttctggagagcctggagttcctacaaagaagacttggtttgataagtaaggtggccaggaaaattgaggagtataattgtgcattgattttcaggatcatttctgtattattatgacaatatggtttggtttcttccaaaaatgttactctgttctgtaagcaatccccaagtgtgagttttctaaaaattggcaagttagttgtctgatgttagaaaagcattttcttacagaaatggtgtggtagttcagggcataattttttcctcttatcatttaccctcctccaaaaaacccactctttaacttagacctgttgaatactagctatatacaggatagtcatgagcctctcatcattagaggaaggaggtatagatcagacctgtcaagagactttcatatgtaggcagttcctgctaggtaggagctagaaagggcttttgtgggggttggagaggctgtctaggcattgaatggtcaagaaagagcttcagataaaggggtaaggaatcagaatgttaagatatgtgtgaggtgattcatttataaataaatctgtgaagagagactaggatcacttttagagctttaacatctacttaataatggatagtttctagttgtttgtgattaattctgtgatttaatgcagagtaacctctcta

SEQ ID NO: 73850 - DNA, 1031 bp, Homo sapiens
ccccatccccactgagaatcactgaaaaagatgaatgaagccatggcagtagataagaaagttattttaggaaggctatgtaaagtgagatgagaaaacccaagtataactacttgacaaatgtcagcatcaaagtaaatggacagagaaaggagaactttatagaaaacttagaaatgaagcccaaaagctgcagacaaaagcaaggagtggggattcctaaaaacccagggaatataatacctaagatggaaaagaagatgatcaacagccgcaaattctcctgagaggtccagtaagaggactgggatgtattcataggcttaagcaacaggtgaggacatgagtgattttagcacgagcaagtaaagtgaagtaatgggagcaactgccagttttcagaggattagtgagtgggtgttaaggaagcaaagttagtaagtgtggacattgattaggaaagggctgtgggagtatggagagagatgttgttgctaaagggaaaactggttttacgagagtttcttttttttaaaatggagtaattagagctgtaatgtttgaatgttgatgggaggtatcagtgtcctgggaaaggttgaaaatggaggaaagcagcaggagtctagagcgttgatttgagtctctgtatgtatggcatatgtgggtagtcatatatcaaatatgacttgactgggatgattgggaaaatggtagtttcattaatagaaatgtttaagaaaaataaaagatagacttaatatgaaaataatttgaacgttctgcatagtgagttttgagatacctgtaggatttccagagagaacaaagaagttgaaaatttagaattgagtatatgctctcctcctgcaggagaccatagctgtggccatgagagatattgtgctgaaacagatcttcagttcttttggttagttaggtgtttagaaatatgtaaaaataggattttagacaaatcaattttgccatctataaaaaaggagtttttaagttacatttttctatgtgga

SEQ ID NO: 73851 - DNA, 1370 bp, Homo sapiens
cactctaacctttgcctcccctttaagtgattttcctgcctcagcctcctgagtaactgggatcacaagtgcctgccaccatgcccagctagtttttgtatttttagtagagatgggatttcaccgtattggccaggctggtcttgaacttctctgacctcaagtgatccgcccgccttggcttcccaaagtgctgggattataggcttgagcccccgtgactggctgggatggcgattttgtttgttccctgtatccttcgttcccccgttggagaaaatatactgtgtaattctgtatttgtggtagaggtgacactttattatacaattattacactgtccaagaaggaaaggaatttccttaaagaagcacattttcttgggtagcctttttttttttagtaatttgtatcatttgtaatcttgagagtaacgctttaattcctaaagataagtttattcctagtttgaaaaatcaaatagtgcttggtatttatttttgctgactcttcacctgttaaaatttgatattagtttgcgtatatttttaagcaaaggatatcatgtgttaagaaatgactcttaaaattttcttagaggagacagacttttggataaaatttctaaaaggtacaatttgggttgacatagtcacaagctagggcagcaaagtgccctacatctagagtgccctacatctagagtgctacactagagatgtaaatgtaaactaataagattcagagggagaaagttcacattaatttggaaaatacagtatttgctacagatcacatttgatatagggaaatgaaggattgtcagacataatggaaaatatttcctgggctaacaaaaaatatatctttttccctaaccacctcaattaagttttaaatcccattttctttccagtcttttcttgtcttacctagtcagaattaaaaaatcatgcttcgtcagttgtgaataaaagtcttagttagtaagtaacagtgcctaatggagtttggtaaatgtgtgattacttacatatactttgtgttttttcttttattcattggaagctagctatcagattctgagcatcttccttgaatgtttaaaggactttttgtaatgaaggtgtaaggaatgttttaattcagatttatatcctcttttagatcataggacaacatttaatgtggatacccattcctcttaaattctctttgaggaatttcaatagctattattaacaacaatagaaaaaagattttttttaacagcttgtatgtgagggatatatggattccttgtaattgaaaagtggccacttaagattttaactgttgtgtgatgtttacctatatcctgaacctgtct

SEQ ID NO: 73852 - DNA, 1849 bp, Homo sapiens
tgcaatgacacagtctctgctcagtgcaaccactgcctcccgggttctagcgattctcctgcctcagcctccctaatagctgggcttatgggcgccagccaccacgtccagctaatctttgtatttttagtagagatggggtttcaccatgttcgtcaggctggtctcgaactcctgacctcgggtgatccacctgcctcagcctcccaaagtgctgggattacaggcctgagccaccacgtccagccagattgtcacatttcaacatgagatttggagaggataaacatcctaactatatcagtatgttaaatatactatcactttacaagtatttatattactggagaagatcaggtagctcttgggaaatggttaattatacttttgtccaatattaaaaatattcatatttttaaatattttacttttgctaacttagagaaaatatatatttccagtgcttttgacatttgtttctaactattccttcctcatagaaaagggtttttgtatgagaggagacatgtgtccttttgatcatggaagtgatccagtagttgtagaagatgtgaatcttcctggtatgctgcctttcccagcacagcctcctgttgttgaaggaccacctcctcctggactccccccacctccaccaattcttacacccccacctgtgaatctcaggcccccagtaccaccgccaggtccattgccacccagtctcccacctgttacaggtaagtaaatctgtttgtttccctgtatttatctagccattcttagtctatttttaaaacttaatagattcttaaattaaaagtatctaaaggaatcccaaaaatgcctgatagaaattaatagcagtatacttccatttggaatacacctccactttgtagcctgtgccaagccagttactatggtttggagtgaccctgtgaattaagtatatcactggtaaaacccagctgcctgcaggccttcatagcttaaggcaaacctgctttggaatgtattaaaaggatattttaccctggatatctaattcagttgtaagggcttggtgtttgtagatattatagtttgataaatgagaagattatgttcggatgtgcaataacttgttttatttgtttgctttcagatgatatttcttattctttggttttgacaggaccaccacctccacttcctcctttgcagccatctggcatggatgctcctccaaactctgcaaccagttctgttcctactgtagtaacaactggcattcatcaccagcctcctcctgctccaccctctctttttactgcaggtgcagttttggccctttttatattcgtaatgtaacacagttttagatgaagaattttaaaatgtctagagagaattgctctgtgaggactacttttctcactaaaattatgtagccgtggtgaatgaacattaaataagccctcagttttgaatgttttcaaaaaaacattttctttttaataacttttttaaataaagttattttctttttgatacatatagagcatgttatatgttaatatgttatattgtttactttttctcttatcaatattaaaaaattaccaagtggagttttataattgttttttaattacagtttttgtattaccagatacatatgacacagatggctacaatcctgaagccccaagcataacaaacacttccagacctatgtatagacacagagtgcatgcacaaaggcccaacttgataggactaacatcaggggatatggatttgccacccagaggtactataattaatctttccttcctgtcattttcataatataaacagtgggaaa

SEQ ID NO: 73853 - DNA, 1071 bp, Homo sapiens
ttttaatacagtgtagttttatatgtcatttatctttcgttgcagaaagggatctggtaaaacctaaatatgacctggatagaacagatccattagaaaataattatactccagtctcttcggtacctagtatttcatctggccactaccctgtacctactttgagcagcactattacagtaattgctcctactcatcatggaaacaacactaccgaaagttggtctgaatttcatgaagaccaagtggaccataactcttacgtaagaccacccatgccaaagaaacggtgtagagactatgatggtaagtctttcagctgtttgataaagtatttaattaatatttccagctgcctaaattctgtgtttatgttgtacatagttattcaaagacttacctctgaaaagtgggaaattagccttagtcactttttgaattcctcaatatgattgaaacatttattagttgccactaatttgattatcaatttaaaggtagtatttatttgcaagtaagtcttaataaattgtgggagtttaccaaatgagtaaatatctactgagtttttatcagggaatctgctactgaaacattattgacaaaactcatttctttagaatgagtgattattggactgtaaatagaaatgtatctagaaatgtaaatgtcacctttgtaagaattttattaaagaattaaagacttttggctgggcgcagcggctcacgcctgtaatcccagcactttaggaggttgaggtgggtggatcatgaggtcaggagatctagaccatcctggctaacatggtatgcaaccccgtctctactaaaaatacaacaaattagctgggcgtggtggctggcgcctgtagtcccagctactcgggaggctgaggcaggagaaggcgtgaaaccgggaggtggagcttgcagtaagccaagatcgcaccactgcactctagcccgggtgacagagcgagactccgtctcaaaaaaaataaaaataaaaaaataaaaagaattgaagacttttaaggatttaccgtaaaagatttataagtagtattaa

SEQ ID NO: 73854 - DNA, 2463 bp, Homo sapiens
atgtaatatataagatatattttatatagcatataaaatattataaatatatttatatttatataatatataatatatttatataaaatatttattataaatatatatcatataattataatatatatcatataattatatataatataaaatatataataaattacaatatgatacataaatatatataatatgtaaatatatatttatatatataaacatgtatatgtttgtgtgtgtgtatgtatttatgacttggtgagttctaatgtattctcctatattccttgatgtgtttggtaccacaccaagtccacgaaaccaaaacatgaatatatgttagacttttgaaagaggaataaaattggatttccattaattatgttaaatgagcatacttgcttaaaatgttttctcaccaatgtaatcatttcattatagttaaatgattatacttagtagagaaatttactttgtttggataattttagaagatgacaattttgcttctacgttatataaactaattttaatgttaattaaattttatttaatgttaattaaatgttaatgttaataaagtcattaaagcagtaatgtgtctaaggcttttttttgtttgtttgtttgttttgaggcagagcctcactctgtcgcccaggctggagtgtgcactggcgcgatctcagctcactgcaacctctgcctgccaggttcaagcgattctctttcctcagcctccagagtagctgggattacaggcccctgccactgtgcccagctaatctttgtatttttagtagagacagggtttcaccatgttggccaggctggtgtcgaacttccgacttcgtgaaccacccgcctcagcctcccaaagtgctggcattacaggcatgaaccactgtgcccagccctatctaaggctatttaacagtggaataattactaaacttgtacacttttttttttttttttaatcagatcactaaggaggaagagcgagagaagaagttttctagaaggctaaatcacagtcctccccagtcaagctcccgatacagggaaaataggtgagcagttcattgaaccatactcagtgtttcgatgtaagttatcttttatacaaatgtttagacttgggttatcttttacgcagaggcaagtaatatctactcttttattggtctaggaaaatataactaggtccgtttctaccatgaaaatctaggtcagatttgtagatcttgggagtgagtttagaacagtgcttgacatatattagctgcttatctttttattcctaacttcagattccagtagaatcttaatgtgtgggtgttttttttttgcctgctgtttccatttagtgtgattaaattgtttttctcattcaggcttcaaaagcacttagaatacaatgcatgtgatacatgtctgtaagtgagattatatgtacgggatagtatgttctatatgtactctaagtcttatatacagatgcctttatctacagatgcctaattgtatagttgccaatgtgtaataagactaagggttaaggctttaaaaagattgtttttcatttaaaagggatttaaagtactgaatattaagctcagttttttcagttgtctgatggtaggatagaaagttaagttacaagaattaaatgtaacttttgcatttaattagctttttcctgtgtcacttaaaaattatttgtattaaagtgatcacatatttctttagaagccgtgatgagaggaaaaaagatgatcgttctcgcaaaagagattatgatcgaaaccctcctcgaagagattcatacagagaccggtacaatagaagacgagggcggagtcgcagttatagcaggagtcgaagtcgaagttggagtaaagagaggcttcgtgagagggacagagatagaagcaggactagaagcagaagcagaacacgaagcaggggtaaataatatattttggttatctttttatgaaaaactccatgtttaaatgtttttaaaaattgcttaacattttgtcagtgttgtcttcatttttttctattatgatgtattctgtggtccaagagaatgctttttaaaaattcctttaaaagttttattccttgcaaattaaaatcacagttaccactacacattcaacaggatagccacgatgatacagactgattctattccatgttggtgagaaagtagataagctgaaactctttggaaaacattttggcagtatgtaaaaatattaaaactacacttagcatatgggtccgctattctacttcttactgtttacctggaagaaatgaaagtgtatgtccacacaggtgtttgttcacaaaggttcatagcagacttatttgtaagagccagatctagaaacagcctaaatgtccatcaagaggtgaatgtataaacatgttgtggtatatccatac

SEQ ID NO: 73855 - DNA, 1055 bp, Homo sapiens
tcctagtttggtctgttaataggatttccatttgatttctcatctaaagtggcacacttttttttgtttgttttttgagacggagtcttagtctattgcccaggctggagtgtcgtggccccatagtggctcactgcaacctctgcctcctgggttcaagcaattctcctctctcagcctcccaagtatccctcctgtaatccccttttgggattacaggcgcgtgccaccatgcccagctaatttttgtatttttagtagagatgatatttcagcgtgttggccaggctggtcttaaactgctgacctcaagtgatccacccacctctgcctttaaaagtgctgggattataggtgtgagccactgtgcccagcataaagtggtacattctgacagtcagaagcccttatcaaaaggatgctggaacagctggcataaactgggacatgtgtaccctgtgcgtagactacctgcatgagaatatcttatggttctcagtaacacaaaatcttgagccctatcttatttatagaagccacttgcacgatatttcctgaatttgttcaacctctaagtccctttttctaattacctagaaaaacagtgattcctgtcgttcctgttgttgaggaccattattctcaacaatatagtctggagaaagtagcactgagaatattttccaaggttgctttctagtagctatataatgtgaatggaggcaccttgtaggaaacagaaatatatagctgtcatgctgctgtgagaaactggagaactatttcaccttatatattgttttcccagatatatatatataaaatattatatattattatatatagtaatatatatatataaaatattatatattattatatatagtaatatataatatataaatatataaatagactatataaatatatatagtaatatataatatataaatatactatataaatatatatagtaatatataaatatattatataaatatatatagtaatatataaatatattatataaatatatatagtaatatatataaata

SEQ ID NO: 73856 - DNA, 2971 bp, Homo sapiens
cgtcttgaaaatagcatgaatcagtattgcctcaggacttgtgccatggcacactggttgggaagctgttgatattaggatattttctttctttttacttttttttttttgagacggagtcttgctctgtcacccaggcgggagtgcaatggcgtgatcttgagtgcagtggcgcgatctcggctcactgcagtctctgcctcctgggttcaagtgattctcctgcctcagcctccctagtatctggaattacaggcacctgccatcatgcctggctaatttttgtggagacagggctggcgaggctggttttgaactcctgacctcaggtgatccacctgccttggcctcccaaagtgctgggattacagacgtaagccaccacgcctggccagtgctagtatattttctagtttataaaagtcaaggtatgtttcatcatattagagataagagatgtggaagcggggaattaatcttaacaaatgtgttttaatctatggtgtttggttttatttttagagacacagatatttgtggaaaaactttttgatgctgtgaatacaaagagttacctacctcctccagagcagccatcatcaggaagcctgaaggtagaattttttccacaccaagaaaaagatataaagaaggaagaggtaacgatttgtgttaataccttacaggttatttaaacacataagaggaataaccaaactgagtttttatcttctatatctttgtgttggagtcctcaggaccactcccagtttaaatgatttttctaggaggactcataggactctgcatataattgtgcttatggccctggcttatttcagcaaaaggatataaagcaaagtcagcaaatggaaaaggtgtatgaggccaagtccagtggaaaacaagcacaagcttacaaagtcctcagagttgcacaggatgtgcttaattcccctagcagtgaactgtaacaacacatgggaattaggcaagctccttagaaactctgccctgcgttcttatttggaactggtcacataggcaccgcctacctagtatgtaccaaaattccagactcctgggaggaaggcagatgttcagtgtagaccatattgtttcataactaattcaggcatagtgaaccattccttatcagggggtaatgggaaccctcgagaaatcaaagtgcccaggagccagccttacaagcatgctggctttctaaggttagtattgtcaggcctgcttttactctgcacaatatcttacagacatagagtcttaatatctgttctatgaaaataattaggttgacaattggtctgtttgcttttgtcatacatgtatttagtaggggactgtttttaaggtagtaaaacacaaggaccttcacaagacagtggatatgacttcatacttcaagaggtcccaaaatttttgtgtgtattttacaaccttctctcttcacccttagttactagtcatataataatttatatcttttcaatttgatgttaaaagattataatttggccagggtgagcgtggtggctcatgcctgtaatcccagcactctgggaggctgaggcaggaggctcacttgagcccaggagtttgagaccagtctgggttatatagtgagacctcatctcttatgaaaaaaattttaaaattagccaggtgtgatggggtggtgcatgcttgtagtcccaactacttgaggggctgaggtgggagaactgcttgagccccagagcctgagggtgcagatcaaagcattacactgcagcctaggcaactgagcaagaccctgtctggaaaaaaaaaacaaacaaactataattttagtgaaaataattgttggcagtcaagccattatgtttctgcatttagccctagctttaggtcacacatatcttggttaaaattttggttctacaaatcactggtttgtgaccttgaaaacattacttttctgagcctcattttactcagctgcgaaatggaaatattaaaggttcttgtgaggaataagtaaaataatgtatataaagcaccaatcaagtgctttatatacattattttacttttcacatgtggcacatggtaggttctcagtaaatggtagctgctgtcatttttgagattgtaagagatgttgatgttgtgacctttttttctccttttatgctttttccagattacatataaataatacattttattatgcaataaaatatatattataatatgtaatctcaaatatatttatatctctatctgaatatatttacacacatgtatatttgtatattttcatatacacatacccacatgtaacatcccaatcagttttatctgcctgggaagaccagaaatgtaatttataactgaacctatttcatacctaacagtataagggttctgttaggaagaaagggacggtgtatattgtgttggcaattgcttatgcaacatagagatatgcaatggtttattcaagttttgcctactggtggaactttggtttggtttcagatttttgctgtgaaaaattatactttggctgggcactgtggctctcgcctgtaattccagcactttgggaggctgaggcgggtggatcaccttaggtcaggagttcaagaccagcttggccaatatggtgaaaccctgtcgctactaaaaacaaaaattagccaggcatggtggcaggtgcctgtaatcccagttactcgagaagctgagacaggagaatcgcttgaacctgggaggcagaggttgtagtgagctgagaccatgccattgcactccagcctgtgtgacaagagctaaactccgtctcaaaaaaaaaatatatatatataatatatataaatatgaataatatatattatttatttttaaaatataaatatatatttatatgatatatataaatatatatttatatatatcatataaatat

SEQ ID NO: 73857 - DNA, 1050 bp, Homo sapiens
tttttggtagagactgggtttcgccattttgcccagactggtcttgaactcctgggctcaagcgatctgcccgcctaggtctcccaaggtgctgtcattacaggactgattcactgtgcctggcctcaatactgtttattgcataatttatctcttcttagttggtttggatgccacttttataaaatctgaattcctagtacatttggatccatttctagactttctttttttgctgtttaaactaatatactgatgggtatgtttttaagaaataaaatggctacacatagcattaaggagtgttagtataaagagaacttaaatttcttcaaggtcctctgtgacccgggtgctttttacatgtattaactcacttaactattattctcactaattcagtttgtaactggaatttgtagaatgtgcagttggctaaattttcttcaacattggtttttttctttagctgtgatgcagatccatccgccctagcaaaatatgttctggctttggtaaagaaagacaaaagtgaaaaagagttaaaggcattatgtattgatcagctggatgtatttcttcagaaaggtaagatctttggtttaaaaatactactatattttaaaaagttatttaaggcttggcatggtggctcacgcctgtaatcctagcactttgggaggctgaggtgggtggatcacctgaggtcaggagttcaagaccagccgggcaaacatggtgaaaccctgtctctacataaaatataaaaattagccgggcatgatggtgggtgcctgtaatcccggctactcgggaggctgaggcaggagaattgcttgaacctgggaggcagaggttgctgtgagctgagatcgcgctactgcactccagcctgggcgacaaagtgagactcatctcaaaaaaaataaataaagttatttaaaataagtttatccacagaatattaaaggaactcggtaagaagccctaattttaacaaagttaaataaacaatattattattgagtatatccatagcttatttaaaat

SEQ ID NO: 73858 - DNA, 1020 bp, Homo sapiens
accctatttgtacacccaaacaaaaattagccaggtgtagttgtgtgcacctgtagtcctagctactggggaggcagcggtgggaggatctcttggcaggagttcaaggtttcaatgaaccatgattgcaccaccgccctccagcctgggtaacagcaagactttgtctctaaaaaaatgaaatgaaaagaaaaaaaaaaaaaaaactttattagctgtatccttaacacagtatattcaggaattgacaaagttttatttttatgcctttaaaatcattgatgtgaatgacttcatagtgatttggaaatttaatttgccaaagctcactgaagcagttaatttgaaatccttggagaattaaaattggaaaccccagtgttcgtgaatgctcactttgctccatttcactggactcctgtccctcatatgtgtcaagaaggtcaagtaggccttaggctctttctgatgggttcccttggcctgggctttttaaaattttttcttttccggatagccataaagcatatttgcattccatttccattcctatctaaattcagatccctgtttaaatgtcccttcaacagagtccttccttgatgatcttaaataatacttgttttatcttttctgttttctttctccttacctttcttcctttctcctcctttacactttatcttttcaacctggatttttcctcagagcacgtgtctacatgacaatacatactataaacgtatgtttgtgtaatatgcatattggttccccccaccccccaatgtaaattccgtggcaacagtgatgtttctaaaagttgtattttcaggatctagaacagtgacagagtaggtgcttttaaaattttcttgaataatgaatgcgatatttggacgataatcactaaacccaacatacttattttcttattttattcatcaaactttatatgaagatgaaagattccctgacagaaatgagccattgatctagtgagacatatatttgtatgtatat

SEQ ID NO: 73859 - DNA, 1883 bp, Homo sapiens
gtgttttcagcgtgaaatagaagtctgcatatctgtatttactgtttcataacttctgtacatgtatcagggttctgagtttcataaattattgaaaataattttcaatgtctttttcataaattgagaattttgaactttattaaaattgtcatcttgaaatgcttaagattgatgttttgttatctcaaagatttgcttagtcatacttgccaataatatgaaactaaatgttagtcttttttctaacatttcgttttgatgatgagaagtcctgaaaaaaaaattaagctcctttgttgtagtaaacttttaaacaaacaaaaaaaacagaaaacactttctactgtatttaaaacttttaggtggacttacacatcaaagtcatgtttttttttttttcctgaagagacacctaaacatctaatgaaactttaattttttagaaaataaaattgaggggcaggtggatgtaatgacgtactgaggttttgtgagttgagtagtaaagaacaaaatgcctagtgttgtgcttctgccactgtgtagtgctgtggaggaagtgtgtggtggaaggaagatctctgtgtccagatcagtattcaaatctcacttctgccatttattagctgtctaggcaaagaaacctcctctttccttattggtataataggaagaattacagtatttccatctatagttgaaagggttgaatgggacacatgtttgtgagccttgcccttcccctcctttcttagatattggttgattaaacacagataggctacattactactgttgctactgttagaattatcaccaacactcctgctgtgactaccacctaaactgtatgcattgttgttaaacattttgtattattgtacttacaagttttatgaggtaagcattgttatctctccattttgcaggtgatgatactgaggcactgaagcatgaagttatttgcccacagtgatttaaactaaggctttttgactctagagctgtgtgcatattcttaatttactactacagaatgcagcatcctagtgttttctgttactgcatatacttttttactatgacattttgatagtattggctactattgtaaaagaacaaagttctaaagcatcgtgattatcagtgctttagagtttaagaaataaacatctttgtggtttttgtagtatttttccccttcacctgtacttgttactacacctttctcaccacattaaaatttatttttgttcgtgtctgataggaagagttattcttttgggttggctaaatgatctttttactcctgaacttttgagtatttttgattcctttgacctttccttttcagttggcttcttttggcatagtaagtccatttcccattctttaggaaaaactcagcaataatagcaaaaaacaaaacaaaagataaaacgcttctagtcactttcttgctagctttctgttcctgtcgctggtaaatcttgaagtagtagtcagacttttaattttttgttaatttgccctcagccatttacttcttaatgtcttggaatagaatttcttcgttgtaatataattacaaccaaaattacttacctcagtgttaccaatcaatttatatttattgcctgaagttttatattttttgccctatgcgtgtataacatcagtgttgatgccacctttttaacttacttgccttgaatccctaatgtgttggttccttttcttaagtcagtcttaccctcttttgttccttttcttcagattctaattgtatttttcagtgttgttacattgacatttttttcttcatccattttttacttctgacatttcattaattactgctaagatttgaatgtttgtct

SEQ ID NO: 73860 - DNA, 2200 bp, Homo sapiens
ataatgcaatggggaaaattcacgtatttaataaagttattaggtacctactgtatactacgggaggctttggggatagagcttttaaattctaaaatcgacaagacataaataaatccagatattaatagagttgtgactattgtaataatagagaatcatgtaaaagtgattatgaggggggctatttcacattggtcaaggaaggactctcagagaaggtgacattggagtaacatctaaagagaagggaccatgtgtgtcaaagtcttggaaaagaacattccttgcaaaaggaagagcaaatgaaaggccctgtagcagaagtgattgtggtgtgtttcaggaagagaaaggccactgtggctggaaagagccttgtgatgagggagaggatataaaggcaacaagttggacaagtaggtaggggccacatcatgtatgggaagacgtgagatgatttaaagcagacaaggactgatttaattttgttttaactctgcctattttgtagagactgaaagggcaagaatggaagtaagaagattattcagaagtgtgttgtaggcagagatgtggctagtttgcattagagtgatggtggagacaggcagatccaaatacatttcataagtaaaattaatggattaaatgcgggagatgagggaaagggaaatcaagggtggtgccttagataacccaagcaacagaatgggtgatattagagaaggcagagaacaggttaaggggagaaggaaagtggatggctagttttgataataataaatacagtaagtatgaagtctgtgggatacagctaagtgtgatagcagatcattgaatatatgagtctaaaactcaggacaggactggagaaatctggagtcatgcagatagtatttaagacgatgacattgtgggaaatttcatagaaaaagtgtgtaggtagggaagagaagagggcctagtactgaggcaggaggaaaactgggctttatgtcattaaaaaacaagtgtatggcaaaagagaggagtttatgaaatgctgcagaatgcatgaaaaaatggaggcaaataggtagcccttagatttagcaaagtggaagtcattggtaaccttagcaaaatagtttcactggagtagagttgtgcagatggaagtcctatttcggtgtattggagagtgggcatcatagtatagcggtgaggagaactctggagcagaatgtctggctttgaattctgcctctgccacttaccagctgtatgatattgggtaagttacttaactcagggcttccatttcctcaactgtaaaattgggaaaataatgggtgtatattaaggaaatcttagactactgtctggtgtgtaattagcattcagtagttattaggtgaatacaaaacttataaatgttttggattgaaatagctttcctttaagcgttcagtttcatattagatttactgccgtatccctccatcttacctaaatgagaagactgtagctacttagagtgtatgcttgtaatttttctttagtcttaatgaaacatattccatgtatcataaagcctactctcgatggctgtagcactgcagtcattatgttgtaataaataaggctctgctagtagagcctagacactgggaattgtaattggtccttttctaatgtgtgtagctgtggtaaaattgagcccttattcaagttcttgtccttttaattgcatttcaggtggattcttttgtatgatgacttataaaagctgatcccaattatggatcagtggtttctaacgttggttttgtgaaatgttatgatctgttatctaaaaggaatttttttttttttttgctttaacattgtaattaccaaacgacctctgtttgagagaggaacatacagaggaccaagggtaagctgtaacttgaaacttacataaaactttttagttacctgtggtggttaaatacttcatggttttggacttactccacattttgaatgtgttaattcagcaaacatttattttaagagtacttaacctactctgtgctaagcagtgtgcaagatatagtaggtaacaagacatgaaatgactcacttcattttatttaccatttagcaggaaagataggtgttgaagtctgggaacatcaggaaacacttccctggtgtaatgtttatctcagct

SEQ ID NO: 73861 - DNA, 1035 bp, Homo sapiens
actactgtatatatctttccatacctgccatatggtagactttcagtatttgataaagatgaatgaatggtgctagttcaaggccaattttatagacataaaaccttgcctatgttattttattcctttttatatttattctgtttctgctactgagacctgggctctttaaggtgggggtgatggtggtggttgtttctttgcattctcttccagcttgaaatatattgcttagtcttcctctgtctctctctctgaatggtgtcctttagagttgttcaataagtagcccatgaagccatatgcagtggccctgcttatcaccttcataaactgcggagttgtgaatactggtttgattttccttatcttttttatattgattacttggcaactattttcttcttactattttcttaatatctgaccttcattctaaaacattgctcaattgtatgtgtattcgcaatatgttattttaggattttgtatgtattctatatatgtaggcctgacttgagtttaattaactgtggaatggtatggaatcttctactgacgtttagtcaatgtaaatttactgacaagatcactgtaattaaggctatgcaattgtaaatcatcgtatgtctctgttttcgggccatgttgttatggtttctttcagatgtttgatcacttagctggaattagggtgtgggtaaaattcttgttaaagacgtgccaaatgcaagttgggaaatgctgcagtagtctaagatttactgtcagattatttcagggttttgacttgcttgcttttaagatttgtttgaacatgtacagtttaatattttaaaagttcaggaatgtgctgtggtttagttcatctatgatgtttctccagaattactcataacattatgtaaagaaattgtgctatttggacagaggttttgagaataagggagtgaactggatttcattttgtaaaagaatcttctaatgtgatggtattaacccctttactaattttgggggtcttaggacatatag

SEQ ID NO: 73862 - DNA, 1002 bp, Homo sapiens
aattcctgtgtatattttacccagtttccccaaataatattttatcacatttgttttctgatgagttctttacctgtatttgtatataagtacattttttcttgaaacattttaaagtaaatgacagaaatgatgtttctttatatctaaatgtttcagtgtgtatttcccaaaaacaaagatgttgtcttatatagagtgcagttatcaaaatctgtagcattggtgcaatattaaacatatttcaccagttttcctactaatgtcacatagcaaaagaaaaaacatttttataaaaaattgagatctgatctgtgattaaacattacactcagttatcaagtctctttacctggaacagttctctaaatttttttttttttgtctttcattacattaatgttttagaaaggttcaggtcagttattttgtagctctgttttattatactttcactcactggttttaaaattcattggtggttcttgccttaaatagttataactttagtggttgtcaaatggtgatttcctaattccatttttttctatgtttattaattagaattctgtaaggaagagttttctcttgctccccatctattcatttatatcagtatgaattcatggattcatgttttattctatgagttataatctgatactgtcataatttattttgaggctcagattatcccagatttggccagcaggagcctgttccatctgctcttgcatccttgtaacatgttcttggcatttttgtactttcttgccatagagcattcagataatgtgaatatgtctgacttctagaatttaatttgggttgaagaagcactgtttacacttacacatggggcatcagtgggagaaaactgaccaacacaacagttactgccataatggcttactgctactgtgctgggtgcctaatgaacattttctcacagaattgcttgtggaaaggttgctagagtcctttattagccggattgttgaa

SEQ ID NO: 73863 - DNA, 1070 bp, Homo sapiens
tatctaaaaatgccattttctttgtgtttggccaaaaagcgatactgtgtctgaaatgataaaatcagcttaaaatttaaaaaataattagcattacattaatgttttgtttttcttttgttctcttagcttcttaatgaagaggataactcagaatcatcggctatagagcagccacctacttcaaacccagcaccgcagattgtgcaggctgcgtcttcagcaccagcacttgaaactgactcttcccctccaccatatagtagtattactgtggaagtacctacaacttcaggtatgaaacatctagtaatgtttttattagttcttttttttttttgacattttggttttgtgtaattatcatgtctgttaatgggcttataaacatatatacacatggatatttatatatgtatatacatactgtgtgcacatataaatatacagatgtatacacacatatatatgtgtgtatgtatatatgtgtacgtacttatataaccataaaacaagatgatggtgagtgtgaatgagaatgtggtatatgtgactgtaggtgaagggtgtacgtagtgatatcccatacatatgataattactgaatacaaggcaataattcctgtttgctactgttcatcttattcaggtcactctaaagaactaatctatttttctggctacaatttttatttcctaagcaatgattaattattcagtttgatcagttttgtataccagtgtgatttagtatactatctgatgattctttaattttatatgtgattataacttctctagtctaataatttctaaataaattctaaataacttctctaaatattttatatactcattatgaaacattttcattttaaaaatcagttactgaaaaatattttaacagaaaaaatttttcactagaacttttcatcttattctgtatttaacatcatctactgctctcaaattaatgccagctttctctggttagcatttttgcatttggaatgtgtaaactcaatatttcttctaccaaattcatttactttttttgtgtagttactgaa

SEQ ID NO: 73864 - DNA, 1014 bp, Homo sapiens
aacttaactttcctgaacctcagagatgctaagatcaatgtatacagaagtggtatatgaaatggttagtattatgtaaatgtttgttattattactttttctttttgcttttttggctgtgagatagtgggcaagtaaactaagttctttgtgcatactaataagcacatagagaatactcatatattatgagattcttacttctcttgtctggcactctttttcagaatttcattctagaggttcttgtttagtgtattagcctttaaacggtatttatccattctttctctttataataaatttggactaaagtaagatatatgattgtaatagtaatttatatattttatagcttataacataggcctataatagcaatagtagtcctgtattggtggccagttgtaaattattaagtcatggctatggctacaaaattaaatagattttattggttattctttttgaattctttcttcagatacagaagtttacggtgagttttatcccgtgccacctccctatagcgttgctacctctcttcctacatacgatgaagctgagaaggctaaagctgctgcaatggcagctgcagcagcagaaacatctcaaagagtaagaaaatttcatcatttcttttgataaaattattttcgttaattgatatatacatttagtaatactaaaaacagttctttgtgtgtaagtgtgtatgtagattttttttgagcattatgggtttaaactgcacaggtctacttgtatgcagattgttttaaataaatatattggaaaaatattttggagatctgcagcaatttgaaaaaacttgggacaaattgcatagcctagaaatatcaaaaaaattaagaaaaggcctgtaatgaatgtataaaatacatgtaaatagtagtttatgtattatcgactgtttatgttatcagtaaggcttctagttaacaataggctgtgagtcgttaagttttggggaagtcagagttatactcaaa

SEQ ID NO: 73865 - DNA, 1194 bp, Homo sapiens
ttgagaacattagatgttgctgaagttcttatgcttacatttaagatgataaagttgtaatttttagtgagctattccaatgttacatatttacagattcaggaggaagagtgtccaccaagagatgacttcagtgatgcagaccagctcagagtggggaatgatggcattttcatgctggcatttttcagtaagtaatcttcctaaactattttgggttgtttttatgaattggctgtatgtgtattaaagtaacatagtgaagagaagcaaatattgttagcatatgtctacctttcttaaaatgtaaattgttcctgatattggactaatgaatactgtgatcatatgtttaaatacaaatcctagaatttatcaaactcttgttggataaatttatgcgttgcagccattatgaagatgctgacatgtaaaagtacataagcatatttaagctatttcagatttttaaagagaaatactgctatattggtgcccattcagctctgtaggagcgtatagaatgaaactataaattgcactattggggcagaggatttccatttgagtgtccttaagctagaagaaggattggaaaaacagatattctgggcaactggaacagtgtcacttgggacagacagttatgaaagtataagtcttatttgggggaatgttaagtagttagaagatcagaaacagtaacattttaacatcttgcagaattcttagtatttgacttataaagtaaatttaatcttcttgagggaagactgtgtcaaagtcttcattatttcaattcataatacagggattgacatagtaaactcattaaataataagatgcccaatcaactgtttaaattactaaagccagtggtagaaacccaatattcatttaagtaagtttattagtctatgatatagttaatttctgccctcaatctggttaaatgatcaagctttcattcttggatagaatgctgatttaattcaatttagttaaaagctttattatgatcataaaaccgagaaataatttacttatttaaagtgccacattcagctttaaaaagtagaaaatacagccttcgtgagttgtcacttttgagtctgaaagtccatgtaaaccctgtcctccaagtttgaaatggtttcttgcttcccttctattttcatctgctgaagaaaaga

SEQ ID NO: 73866 - DNA, 1014 bp, Homo sapiens
cttttaatgatcttaggaaatttgagagttggatagtttggttgttctatctgttctcttattttttgatcatggaaacattctttatgcttttgaaatgtgccttgaattaatcattaatcagccaggcataaggaaaggctttatgcctaatgatcacagtgcttctgttgagttgtcttcctataagacgtgtctttttattaatattgatggaattttatggattttcaatttttgttcccttttgttttttaccttcaatgtgagataattaagttaatcattaaatcacattatatctttaatccacatttcagatgtatttgctgacataaggaataccttttgtttctagttaagagtaaaagcccatgtttcactcagaattttaccagaaaataacagcatttcagtaggtggcagtcttctctctgagtttttatttagtcatactgttggatctttaggatcttttgggaaacaaattattgttagtcagataaggtcacttaattctttaatagctatattgaaattattttagtgttgtgactttgttgagatgcatctggaggtgaagccagttttatattatgtgttctaactgcctgaatgccgtgttctttattgagtttcttacctaaaagtgagaaggtttataaagtctattaagtatttaagcatattaaatgagtacatttgtgtgtatatatatattatttagagattggaggaatcttaaggaggttagtgtggggcagagtagaatacagaggacaatgccagttccacttcagagccataatctagtgtttatttatttaggggaatgtgaaaatgtaatcagtgataaaaatgttgctctcacatatgctgaaaagaatgttgagcactttgtagaatgctgagaaacagtagccactgagcgattggtttttaggtatgaactgggtggcttcttttagaaaatgcctgagaagtaaaatgtgtgttagaaaacagcagctttag

SEQ ID NO: 73867 - DNA, 1034 bp, Homo sapiens
ctgtaaataaccatgcataacttactttctgcaatgttttcttagaaattgtgtccagatagctttcactaattttaaattaagtgaactaaatatatatgtgtatatgtatacacatatatatacacacacacatatatatatttagaaacgtgagtgttaaagatagaatttgttttaggacaaattttaagaaaatgtgggaataccaaatgtcctttataagaaaaataaattttattttaagggacatactagttttagggattttcagatgggaagctgcatttttaggattgcccatcttaagagatcttgcaggaagagattgtattagatattatatttatttcatttaagataattttcaaagttaattttctaaataagataattctcatttgtgtttgtcttttaaaaggccaataaaatatctttcagtatcattgtaataattttttagagtttaatttgtaaagcttagcaaataaaatcttgtactatgaatagcttcttgctttatgactttaggattaacttgtaaaaaacatatcctgaactgagatatgcaaaatactcattttcaagttatggaaatgtgtttgtggcatataggactgtggggtctgtgtgtgtagtgagagtgtgtagccactattataactggaatttaatttacattcataaactactatatttcccatcttgcaaatcattttatgtctcatctgtttttcctttcggttatatctttggttttgaataccaacatttaaaatgatggtattttatcttttaaacttaaaaattatttaatacagctatatggaccttataaaattgatttcttatttattattagacattactactaaaaggtacatctaactattcagggacatttttccatttccaaaaaataaaatttattatgctttataacctcttctgtattttctaattttttcattgtctttgataaataaaacagttttgttttgctaatatagcctattttttgttttgtctcattc

SEQ ID NO: 73868 - DNA, 1097 bp, Homo sapiens
ccaatattctgattgtattatagttgtttccttctatctctgcttacagataaatatttcttaaatgcattcttggttacctgatgatatttctgtcctgtcatttttatacctgggcaaccatgtactatttaaaattgggttattctaggctgggcacgaaggatgcttgtaatcccagcactttgggaggccaaggcagacagatcacctgaggtcaggagttagagaccatcctggccaacatggtgaaccccgtttctattaataatacaaaaattagccaggcatggtggtgcacacctgtaatcccagctacttaggaggcttaggagcaagaatcgcttgaatccaggaggcagaggttgcagtgagccaaggtcacaacactgcaactccagtctgggtgacagagtgaaactgtaaaacaaacaaacaaacaaacaaacaaaaaaataataataaaatttaggctattctaagctaagctatcttcttgtatgagttctactatgattttggttgttggaattgtcagcagcattgttactattctttcaagtcagtgattagtagtaggtcatatccaattacttctcagcaattctaatcctataaattaatgaaagaatacataaaccttctcatttttgatacataaattgcttgatttggaaacatatctaaaaggagatctatgaaaatatatttcctatcccttctgtgtgttgcattttaatgaatcacaagtgacaaagtagttgaacaatctatgggagttttctcaagttctttaaatttaagaacaatttatttaatgttttacacaaagtttgccatttaattccctggtcaactatcatttaggaatgtatcattttattttcattgatatgcctattcctaataactatggaatgtaattattttatggctgttctaattagattaatctaaaaatagaaaaagagatgggaatttaaaaaccaaactattaatactaaattttacattctatttgaattccatagaactggctaatgtaagatttccccaggaatgtactggaattatcattatgaacctcccaaattcta

SEQ ID NO: 73869 - DNA, 1018 bp, Homo sapiens
ctctgaaacatcaccattttacctaattccttatgttagaaaagacatgaaaaaaagaacttgctttgattctggtatttggtatcataaaatttgatctgatattggtcttactcaagacaaagaaggccaatttaaggccctgacttattcaatcagattattcagaaaattgttgctctgggaaaaagatgcagcatgagagtcagtgtgcttggagctgtcttttagaagcaaaggtacagcaagctgctgcaagcccatcttgacaaatactaggttttaagtcacttgattagtcactttgtggctgatgtttgttttttttttttccaaaagtttgtacttttgctgccaagagtcactggaagtctagaaaataatttatctgtcattattgtttaatctcttgtttcctgttctgaggctccttcttagcacaggttgtcttctgttatgttttttaaaattggctttcaaggaactatatagcctcctacattaagacattgctctaaggaccttcaatttcctctgacttcctccaagaaacatagttaacttagaaatgatttaagcttcaactttgagttactgaatgtttcaattctaacactcttaaaacgtcaccctggtggtctaaggaagaattccgttgctggagaatagggtagggtttcttattcattatgtagttttcaagatgtgtaaagcacaaaaattttgactgattaggtttgttcatcaaaaactgccatgtgcattgacagagctctttttggtataaaaattgtgagttaaatatttttttttcaccgcataagtggctttcaaagtattcttagacatattgcatcagatgtcattgagtgtttattgaaaaagtaagaacctcttcccatagttactgagtcagaatctgatggtgtggcctagaaattagcatttttaatcattctacaagtgattatgtgcagtgtggcaactactgacctaggaattgctttctaacttggtt

SEQ ID NO: 73870 - DNA, 1036 bp, Homo sapiens
aaaccaacatagcatcattaatcaggaatattacagtaatgaggattttttctttctttttttaatacacatatgcaaccaactaaacagttataatcttggcactgttaatagaaaggtgggatagtctttgctgtttgcggtgaaatgctttttgtccatgtgccgttttaactgatatgcttgttagaactcagctaatggagctcaaagtatgagatacagaacttggtgacccatgtattgcataagctaaagcaacacagacactcctaggcaaagtttttgtttgtgaatagtacttgcaaaacttgtaaattagcagatgacttttttccattgttttctccagagagaatgtgctatatttttgtatatacaataatatttgcaactgtgaaaaacaagttgtgccatactacatggcacagacacaaaatattatactaatatgttgtacattcggaagaatgtgaatcaatcagtatgtttttagattgtattttgccttacagaaagcctttattgtaagactctgatttccctttggacttcatgtatattgtacagttacagtaaaattcaacctttattttctaattttttcaacatattgtttagtgtaaagaatatttatttgaagttttattattttataaaaaagaatatttattttaagaggcatcttacaaattttgccccttttatgaggatgtgatagttgctgcaaatgaggggttacagatgcatatgtccaatataaaatagaaaatatattaacgtttgaaattaaactgagctgttttgtcttcttttatcttgtttctttcaagtgtaagaaactacattttatgttaagggtaacattttaatgaaatagttaatcacttgtctatagaattattttatgattgccgctttaaagtaagctggatttgatgatttttcagagacaattctagcaatcaagagaacatttaacttactatctgtacttatatgggagctgattttagctatatcattgttcttgttc

SEQ ID NO: 73871 - DNA, 1097 bp, Homo sapiens
atcgtaagcaggggggcagcctggcccatggacagcgtcagtccgcctggagaaactcccctggggatcggctgtgtcccacctgctggggacggtgttggggcacagagaggcgataaactaagtgaaagcaaagagcagcgttgtcttctgccattcttttggaggtgaggagatccggtttccagcactgccttgctccgaattgggagacgtttgtcacctgccttgttcgctgtggcctctattctaaagagcggagatcggataaaggtccacttttgcctgttttatactttttattgtcatataggcttgggaaagggggtgatcgttttgaaattgaagaaggactgcagtttaaggaattccttgacagaatgctagatacgaaatgtgacatttgaatttttaaaacgcttttctggttattatcacttcgtttgtgttctcaattagcagggagaacaaccttttagctgcagaatctaaggtggtgttctaggctatcagactgtaaaatagttaattcttaagttgttgagaagttgaaaataaattcatgtcttcttcttgttaagtttgctttaatgtgtttctggcacctaataggatttgatttgcttttagttctataactttgtgctactatacaattaataaaaaatggcatgattgttgtagaatttgggtatttacttttttgcatgccatattcattctacctggtttgaaaaagttacagaatgccgtatacgtcacagttaaagtgtttgatgtaaaagtaaaaattaagaaccaagaaagaatcttctaggttgcattattaacgcttaaggcaaaaatgactatgacaaatggaaacctatttcaaattttgaaaggattttcaacttttgaaaacattggtagcagtgttatattccagcaatacttccttgcgatttttacgttgaacctgaaccttacaaattgtatgtttctttgaataaggaattcttacttaagtgactcaaagatcagttttgtattgttgtacatcacaggattacagaattgtcagtagcccgccgtaatttttacttttgggtacatgc

SEQ ID NO: 73872 - DNA, 1059 bp, Homo sapiens
gcaggccaacggcgagccccccccgggcgggccccagaccctcctcctcctcctcctcctcctcttcctcctcctccgcacccaccgcccccgcctcggcctcgctgcctcgcctccacaacgcccagtctgcaccgccgagagctgcgcgccgcagcgctagcggaggagaggggccggcggagcgcgcagcgcccaggcccccgcgcccgcccggcccggcccggcccgcgcccccgcgccgcctccgctacgacgcggccccggccgcaccacttggcgatctggctttaggttctccgtaaggccgttttcttttcccattcgctcatctgccaggaaaagggacttgccgttggcgcttcggcctcttgttcattgagaaaaaagaggaaatactccgcgtgcgcttgtagaaggggagtcgtctccagctccgaaccccggagtgttcatcagcggggaatctggctccgaattctctttttttctcccgccgattgctcggaagttggtctaaagcagaggttggaaagaaaggaaaaaagtttgcatcgagactggatttatttgcacatcgcagaaagaagagaatccaagggagaggggttggtgcaaagccgcgatcacggtgaggcacgtttggctcttcccctcctggcgccgcggccggcgcgttgtgggcaacatggagtaggtgcagccggaccaggagttgggtccgtctctccccgagcctccctttctcaaatcccgcagggtcttcgcgaggatccggggcgctccccgcggacctgcctcgcccggggcttgggctcggcctgcctctgcggggacttctgtatgcaccccgtgcagtgtccccgacaggcgaccccgcgcgcccgcgctctagggggttgggacggaggacagctagcctgaagtctgctcccagccgtgcactggccgcgaattcggcgctgagagcgggagagggagagaaaaacactttgtattttccaggttgcctttgcaggcgcccgcatttctaacctgttcttcctcttggtggaaggc

SEQ ID NO: 73873 - DNA, 1002 bp, Homo sapiens
aaataatttactttaatacaaggagggatttttttgggggaaaagtggtttatttctctaaaataaataaggctttttaaaattcaaattctggaaatgtgttactaataccaattgatctccacatattcgtgtatctgctttcctcattcctggaatggggtattatttaaattcagtttctctggaatgttgcctttggcaaatagcctgaagaagtacatagatttaggaaagtctttgcagatggaaattctgctttccctattttattaccattaatgttcttcccttttcttgaccacaaaaaggaagaattcaattagaagacgtctttaggtttaagctttgcttataataactggatttatttagttatcacaggactaacagatgtgcctaaaagccaccttatgttttccaacataatattgttgatctttttttttttcctttttggaccagggaccagacaaatggtgaccagacggtccagtctagaaaagcataattgccaactctgacttcagcaagggtggaaaaactcagaggaaaatgggaatttagcctcaagatagtagtttccatgtgtgagtgggttttaaattctccaaaggaaaaaaaaaaaaaaggaataatagaaaaaactgcaagaaaaaattatttgaaggatttagggtgataagtttatttttgggaaatctatttaaaatatctatttcctgcatacctatatttgtactaatagaaataattaaacttgttttgttttgcagactttagagtttatcatcattactttaaaaggagttaactgagctgacagatttgattactcaaagtggtctgtctcattttttatttcactttgacataagacttggcacaagtctgttacaagctatgcacttttattgctgcacttctaagttataaatctggtttacatctatggaaaatgtagtgtagaattgaagacatgtccaattatctgggcaattt

SEQ ID NO: 73874 - DNA, 1178 bp, Homo sapiens
cttggggctctacatcttctgaaaattctcctcatagttacagattcttctccccctcttctctcattccaaatatttttcttcacatgtttcttgtcactcttggacgatctgcacaacattcctacttgttcctcagaccacagcactatttggtctccctgcagtctatcccaatcacactttgagtgcgtgttcttctaggagcccatgtacgtagaatcactgttagacctagttgcctaaccctcaccttgttaacggtttttgcagtctttgtatctatttcctgtccaaagtttcatttttcatatttttattaccttctttgaaaacaggatgacaatttctatcataaatcagagttgagaaatgaacttccatggctgcatttaccttctttctccctctccgaactctcattccccctctctaccttaaaaaatcatattgataaaagtcatcactcccaagacacaaacttgaattttgactagcatcttcattgtttgctaggagagtaacactaaatctgattggttatctcacttcagaaggaaatgaacaaatcatatttaaggtattgcaatagttagagctagtaaaatttaggtactgagaaagaaaacaaaaatatgtaatgagaagaacttgtgatccagaaggctcccatagtgcagcacaaggaatattgatataaatgcaagaggcctgggtgtgagtcttggctctgccccttacttgtgtgatattgctggacacttttaagtctcagttgtctcacataaataggaaaatgttatccctctcaaagaggtgtcatgttaaaatcaaatgggattattgatttgaaagtatttatttttattatcttttattatcttctgtccttttagtatcttctgtcctctattcttatactagttagtcagtgctcattttcatttttggctctttgtttttaaacctgcgcttatcacagaacaggatgcagggatgaacttcaactgatgcaattctcctttgatgaaggtcacacagggtagctgtcaaaagtgtggaatctgtagtcaggcagatctgtgtttgtatctcagctcttctgctccctgtggtaagatgctaaatttctttaggtctcagcttcctcatctgtaaattgggaataataatggtat

SEQ ID NO: 73875 - DNA, 1028 bp, Homo sapiens
cagcttcagtgcctgtatcagataacatcttaggaagtctcatccaggctacccttcctccagacacactggatatgatcttaattgctagaatattaagagaagataataagataagaagggaagcagcaaccatatgatgtgataattgtgagtctgggacctggaagctttacaaaagatattgggtaataaagacttggagacttacatgtttaacttccttatccagagtgatctgatgggcatatttattatgatgatggtaaagatattaagttcaaattcaacccccatctgagaggactggaagactgtttaagttgtcagggtagcctgacaatgaaccagggctgcatacaaaccattagtgaaaactgcaaagatacatgtaacacacaggcaaatatacaaagagaaccttgtatggagtgtaaaagaagcatacgcctacaaactgctggaggctttgaaagcaatttaccgagaaagctttttacagtggcccactttggagccatcgataattaactaaacaaatatttcagagtgtatccaactggtttcagccaatttccttagggagttgtgatactttaaattccatataatgatactgttggatcagtgtcttcagctgcagtatgtaagcacacaggacttgattcatgatcatatgggtaataatttgagatcaatattttaaataatgtaatagaaaaccagcaaggaatctctcacaagtaataaatagcgcttgagccttagttgtgggtatatggagtcattatgaattctgccaagtatatagatttatgcttatacaaattactgagtgataaaagacaacatttctcataatagcaatatggtttcataacctatccaagagcataggtttcttcatgtaggacaccaagaaaccaaagcattattctaaccacttattcataataggtctgactttagcagctgatatttctgccttgcagagactctgtttttcccagtcttgagatgagatgtga

SEQ ID NO: 73876 - DNA, 1027 bp, Homo sapiens
cggagccttcaattgtgggtcacatgtcaatcagccatttccagaattgatttgaaaaactatatttagatatgaggttgccttttcagtagatacaaccatcttttccactccttctcttccacttagctcttccataagctatccagtcccccattctctggtttatcagtggacttctaccaataatactttttctatctgcctgaatcattgtgttagttgattttccaacattcttttccagctgatatcgaaccttgagttattccatctatctgatttcattgttcttgctccagggctgttagctattctctagctaatctccagagattgctagagagaatcatccatcctatatccatgcatgcccttgtgaatgtcctgtctggacctagctggaactcacctaaccacaggcaaaatgaatgtagcagctaaatagctgggtttgcaaaatttgttctgaaccaagctacattgcccacagacattactttttcctgcactgctcaggctctgactttttacctcctcattgcatttgtgtttgccccacttccaattttggcatctcggtttattattacatgcttcatcttctggctttaagctcatctccaagggctgtcatgttcaaactcattagccaatattttgaatactctggctttggcccaagactaagttttatgactgtgttagtccattctcatgctgctaataaacacatactcgagactgggtaatttataaaggaaagaagtttaattggcttacagtttcacagggctagtgaggcctcaagaaacttaaaatcatggaaaaaggggaagcaaacacatccttcttcacatggcagcagcaaagagaagtgcagagcaaaggaggggaatcgtcccttataaaaccaccggatctcgtgagaactcactcactatttacttattgttttatctttagaacatgacaaaagccctttgtcttaggcactcaataaaaggtgccaaatcaatgactaaat

SEQ ID NO: 73877 - DNA, 1107 bp, Homo sapiens
gtaattacatatttacatggtcagtaaatggcagagccaagattcaaacccaaacgtaggactggttcatttcagagagttggttcttaggtaactatacttaaacattatttttaccctacagcctaacgatttctaattatattttaattatagaaagtttagatacttcatcctattaaaaaataataattacagctagcatggattagacccttactacagagccaggtgattttcttagttctttatgttattttccagttaaaatcacacaacttttaaatttttaataaacttaaaaaaaatctaactttcagggtaggtcctttaaatttaaaaaaaaaatttataattaaggaaactgaacttcaaagatgtaaaaccactgtgcaaaagcactcagctaaattatggatctgtaattcaaactcaggcctgcctaatatcagcaggttaatattttcataattctgcacatttcaggactcctaagcaaagaaaactagtacctgagttaaaggacaagcctgggaaaaggaaataaaagatgactgaataaataatgagcaatctatggagagaattgaagatttatttctaaatatgttcacttttcaaagcaagataaagcctggagtcatgaagccatctgttcacattctgaaggactgtaaaacattagggaggaaaagtttcttttctctttaggagggaagagggaatagcatgtagcctgtatgagcttccataattatatttcaggcatcctcacatgtggtgtaagaaatcccctttgtgcacaggcagagtctatctggttctctcccaacactctgaatggcattggaaaccaaatgagcatcggaaaccaaggccgttattgctgtaagtactaatagtcagtcccttaccctgacacctcgggtttgctttcaggataatataaataacatagatattaaaagcttatttcccaacttcacataacattccaacactgtgatgttttctttcaaaactctccataattctactctatcctatgaacattctactattttctactgtttctgaaatgaactctaggttctcctccttactatc

SEQ ID NO: 73878 - DNA, 1031 bp, Homo sapiens
tattcatgttttatatatatatatatatcaatctaatctatctagttattcagcctccttctatttatccatctaccatctacctcgttacaaaaggcattcaacgtggacaaaaccattccaccaaaagaaagcatgtaagtctttttggaagttattagggtgttcagcaatttttagcagctacctgaatttgatgctatatgtcctggactttgctctaaaaatgatatatacatgacttcatgtgaaggccatgcatagataaaaacacaaacttgaaaatgggaataaattaaaatttcttctccctgtgtaatgtcttcttagtggagtggagcatgtttttttgagcaacagcacccagatttgtaagacatcaaactaactgcttcattaggcctgtttttctcatggtaattttggcaggattaagatgccatgagctactcaggaaggaaagtaaaatgagaaaatacaaaaatagctacattaaagtgtggcttaagaaagaggtaaagcccagtaaacgtggaggttagtgagaagtgggcagatgattctacttggtgaaaatcatcattgactgcaattccaaacaggcatcatgaaattgtgcctagatacatgagtttagatattgaatgaagacttaaaatattgaaagaagcagcaaaattccaaaagaaatgttgtggatgtaatgtactgtgatattttgtgggggttttacatgttttgcatgttattagctaccccagatgaatggatttgcctcagagccacacaataaatcatcgtcagagttcgttgtgatagttactatttattaatgcctgtgtttcatactgaaatgtctttctgtgcttacttgctcgtctttctttgcattccactgatcatcaatcacaaaagcagcttggccatttctctctgtcttgcctcagtgaactcctactttccttgattgttaaccccttgctggaatgcacatggcctgtatgcctctctgggcttctattcaactctcc

SEQ ID NO: 73879 - DNA, 1071 bp, Homo sapiens
ggtttgttgcatttatacaataaacttgatatcaactaaaatgcacacgtacgaaatctacttatgagcatattttgctttttggtgcatgtgcaagattttaatgtgggtattactaacctctacttaggaagttgtgagtttcaaagtggtgtaataggggatttgaaatttgtaagcatgtaaaaatgattaagttcagtaaagacggcacacttaattaggtatattttcctcaaataaaatagtttctacagaggtaccaaattatatctgaacccagaaggtcaattcaatttgatttgtctgcttctggttcagactgggggtgagagaaagctgccattcatattttcagaccttaaataattccagttcatttgatggagttgactactttctcctcgtgaaaattcttttttcactgcttgtatgacactgttttgttttgttgctgttgttgttcttatttttcttttagtacaattttactttcatcttctctctctctctaaatatacatataataggtatactgtgtgtatatgtgtgtgtgtgtgtgtgtgtgtgtatgtgcatttttaaagcaataacctattgtctttgtttttttccttcaagcccatccacttttagaaatgcaacacttaaggcaaatatctccaaaatctttatcactagctctgaacttattctagatttccccagactggtggaaaattttacttttctaatttgcagtctcgttgactacaatataggtaattctgaatttatttttttatttaaaaattattccactttctatgtttattctgttttttttgttttgttttgttgttgttgttgttactgttagtgacaccagtgtcatctcagctgtccagacttgaaacctcggaaaactttactctttaccacatacctcacaagtcactggttacaaaccctttcaataatccccagtactgttccatatgattcagtaatgcactcactcaacaaaattcaaaatttgatactaacaaaatatcaaaattagatatctatatactatttatttactatttt

SEQ ID NO: 73880 - DNA, 2096 bp, Homo sapiens
taaatgcattcgattttgtgttaatttttaaaaatttgaaaataaaaagaatgtaaagtggtcctgtcatgaatgatggagggaccctcttactaacagtaccttacaattttctgtaatgttgtcagggcaaaataaatgccctcatttttgtaatagtcaatgaagaatggcatgttgatcttgtccactcaatgtccactcaaaacaacttttagttataattgtattttcacctagaaaatacagttttggattctaatgcagaaaaattatactccaagtttatgcaagtacacaaactaaaagtaaagttgttccttttcatgtagatttttccttcagtcctatttaaattgaagtttgccaacttcattagtaacaaagaatacataaaatttaaataccaataaatatataactttaaaaagaaaaccgcttcgtaagtaatttttacactgtgtatatgcagacttttcagtactctaaatgtcatgatcctgtattgacggtaaatttttttttctgagccattttccccaagctttgctacagcacttttctactcagactctagttgtctagttccagccaacaaattccacactgctaattttctgtcaccaagagaaagcaaattatttttatttttataacatcaatttaaaataattgattaatccacagagtaaatttacattagtaactatcatgatactaaatcagctaagttttactataaataataaaataccatgtacctaatacggtggtcttttatttactgtattacacttaagggtaaaaacaaacttttaagcgaagtacaaaagcaaagtccaaaaaatattttcacccatttagaggtgcagaggttaagagatttgcccaaattcacagagggagaaggtagagggagaattaaatacccatatctgcagatataatcattatctcctaattgtggttatcattttggtagagcttttgcttacatagttgcatgttttttcttaactttaatagtattttgagacttttaaagtgtgaactgcattgaataaaactgaattcatcatttgctttggcatgctctgttgctttaacatctttagacaccattttagcaacccttgaggcagaatttaatgaactgtatttcctgcctgaagtgcctgcaatatttagggttccgcaagtgaacctaggaggattctccacccaagcatgatttatctctttgggagttccaggttggtcagggttatatttaagtacatttgaaaaacatgccattttctgacatgatgtcaagaaaccatcaagagctttcagaatgaaattcaaatttcctatcctagcacaaaaagaccttcactgctgattcccagtccaattttttagcctcacaacacacctctgccatttatattctatcctaaccaggtaggtgtctacttgctatttctaaacataaacttttcattttcacatttctctgttgtccccagtgtgaaatattttacaactcttttgtatcctccttatttactttcaaaaccagtatgtaaagacacttgttctatacaatgtttcctgacctagttgtgagaatttatgttactttcttcttggtgtccattatacattatacagagtagtagagtcagcatttttacattgcaatttatttatttgcttgcctgtttttttcatatatatttctccctcgctaggctgtgggcttctttgagttcaagaggtccagatctttgaagtcattaaggtttaattaattgaactatgtgaaagttgggaacttcttcatgctctccggcataccaaattatcttattatcaacatgcaaaaaagtttttcctagtctttgtaaatgccacttgcaaacatcttcatcttgagtttgaacttttaagtggtactcaactatatttgtaatgtttttattaaatagtcataatttaatgactaaaagagaggcaattactttgagtttgtcacatactgcctgtctcgggtttttaattgtaaaatagggatagtaattattaataattttttcatatattttcctgaa

SEQ ID NO: 73881 - DNA, 1073 bp, Homo sapiens
tggtattttaaattgagaaaattgataaattaaaattacttgctttctgctgtccaggttaatccagaatgtagttttaactttaacagggaaaggaagaggcaaaaatgtaggataacaattttaacaaaaatgtcaaacatggaagcagaatataataccttaataaatcatgacactgatcaaaaaaacctttcagaggagctacttaaaatgtaataattataatggatttgcatattttattttaattgcctgatggtcttctgcctggaataccttttctatcattatttagatctctgttgaaatgctgtatttttagagagaaagttctatttaagttacactctagccgtgattcaacatataatatggtgctactactatttgagtatattaactgcctctgtaaaggacatgggcttctaaatcaagaagtcaggggtttagtcaattttatttattattccattctaaatgcctggcagataataagttttctgtaaatatttggggctatgtttattttttttgaatatttgtctcttctgctaaactggactgttcacttgatttggcagagagtgataacttcatcgtgttctcactgcctgggtgtgcacctcgcacctaacaggaacttaataaaagtacgtcaactgaatgagcaaatggctatgcaaatggatacatttaattattcattctaactcctatagacatgaatttgaatttttgggagagataacagtgaatgaaaacctgaaagatatgttgcactaaaaatctctgtgaatcattagaatcctggggtcgctgctggagaataattaaactactgtggatggtcgcacaccataaagaaacagaggcacaggggagcagcttctgcacatttctgcattggcactgtctgcagttctgtaggcattaacataacaacgtaatgcagcagctgccagcagtaaagatgtatgctccacagtaaatataaccacagggatgggagccagaatcgaaaggaaaaataaaaatagaaaaatagtggatccagaatgttggtgctgacc

SEQ ID NO: 73882 - DNA, 1061 bp, Homo sapiens
atccttaacagtaagtacacgagacagcagcattctgaatggcaggaggaaggcaggcgatcagcacagggctggaatcatctgttcctgaccaccagcaagcctggcactgccggggttatttccactcctccctttcccaatccgagaattgcacagtcccacgctcgaattacacacatggtccaagacttctctctcttcctacgaatgtgacatccaagggggccccggttgcgccgccctagcccagggacgccttcgccctcggctgccatctatcggccaccgagcgcccgcttcgccccgggcccatcatgtctgctgcagcttggctcgcaccagaggcgcgacaataaacaagtgcactggactgggccctgcacccgctccggagcagctgtctcagagacccggtgttgcttaccgcgttgccacctcctcggcgcccgggaggaagacgcaactttctcggagttttttttagagccaccgggctgccaggacaagccacaggcatagaacgacgcggttgctgcccgccccccccttcccccagaaaccccaaaggatgtcggtgatagagagttccaactaatgacgattgtgcgccgcatctggggaagggatacagaaaaaaaccctgcaaacaccgtgaggatgaaactgccaaagggatgcaagagcctctcaaatactaattaggggccgcggcggcggcgggctcggcgcggagacagcgtcggcgggatcccagcgcggtggtcgccgctgcgctggggggcggaggacagcgcaggagctgcagccgccgccttcgctggagcagccgaggggccggtgccacctttgctcgccccctcactaccatgtacagtgtgcgctgcaagaagaaggcgggagatgcatgcacacccccgcgacccgctccctctggctcgtcccccggcgtgcgccactgaccaggggggaatgtggtgaagacggcgaggaggagagccgaggggggaggggagggccggccggcgcgaacccaggccggagggtgcgaggagccagag

SEQ ID NO: 73883 - DNA, 1045 bp, Homo sapiens
ttctaacatggcaatcaagaactatgtaagcaggacttagtgtgaataaggggatggggattttaaattgttactatgaatttgtgattcattagtaattttaaatacacaacatctaaaacataaaggtggcaatttcttttttagtatattttaaattacacacttttgttgacagggtaggtaatatagtttacaaaatgccactattgcctgcttacaaacattaagaaacttggttgccgactgatgactcatgtggtaactcctgaacaatctgttttatttgatcagatcagctttatttcctttaaaaaaaattttgaattcaaatgattttaggctagatgaatagcttccatatttccatattgtcttaacctagaaacttcaaataattttacattaccagctagaccataagtgtattttaactttcaatcatgattaaataaaatttgttcctctaatattaaaatgtatctatcataatcatggatttttagatattgttcttggggagctcagagtttatcaaagctttatatgtgatatacgaggtagtaaatactatgtaggtttatattaaggaaataaaacaaatataataaacacgagaatgaataattttacatgaaaagggggagctggtatgctgtatattaatattgtatttgaaatataaatatatgtgttaaagttaaccatttacagtgacttggagtctcccagagatgaaattactcctgtttaggtgattttgtaaaatgcactatctctcacagcccctggacatcataagggaagtggcagcagtaatttaagaggtatgtgaatacagaagggaaattataattgcagcatacacagaagcttttcctaaactgttcaactgctcatatacttgacaagagtgtaaatggccaattcattggaaatatgtgaaacatcaaatatgagaatcacttttaggatgacaggtataatttggaaaatctgatccgatagaattaagaccaaaacttttttaaatgggagaagacag

SEQ ID NO: 73884 - DNA, 1056 bp, Homo sapiens
caactaattttgaaaggtcatcaatgaggaataagcaataaaaaatataatgcataggtttagtaaatatataatgcaatatgaagtagcttacttgttgattatgtattagtgtaatatatttcttcctgtgtagtgaaacaagaggaagataatggagaaaaattaaatgaaaacaaaattttctatttataagtacctagaatagattccaaattttatgcatatttgcgcttcaaagtctcaggttttatttaaatacccagcattttgtagtcatgacgttcattgaaaataagcattgtcctccagtacaatatgttacaaatatgtattacatttctaatattgcccaggcactgtgactgtaaccataaagaagcctagcatttgtctctattctagaatatacagccatacttctcaaatggtagtttacatgcagatgccttgtggatttctacatacatgatttctaataattctgtaaataatctgtttctactttgctgtgggaaaaatggatcagaagtgaagtacgtcaaggtcacttagtaagtaatgaagccaggactcagaagcaatgccttctgtctccaaaaaactaagaatgtgtcgaaaagtttatataagaaaaggcaactgtgaggcctctcatgcaaatgaaaagggaggttgtgagaattaaaatgagggaagatgcactagcctggggattataaaaatattatagaagaggaggtatactcaagtgtttgaaaaataagttaaaaattttaacagggaaatgtggggattgtctgatgtgtagcagcaaccaaggcatggaagccagaaatccaagtgacattcctgagagtaggaagcagtcctttttaacattaggattagttaagtggcataatttgcagagcattctggaaaatcaaatcattgttcataaataaactgccttaaagaaatgttgacgaatttctaggcaataagaaagcaattaaacgtttgagcagagttctgtcataatgaaaattttttaaagaaaaataaatcatagag

SEQ ID NO: 73885 - DNA, 7079 bp, Homo sapiens
tctggcgggcggggcggagcggcccggggcggactggcccggggcagcgtggcggcggcggcgtggccggggcgggtctcggccgttggccgccccggcgtgtggcagccgcatctggctgccccctcgctcgcccgcgggccggcggaggggggcagggccggggcgggagggtgggagggggcggcgtgcgcgtggcggccgcgcccgggacccgcgcagaccctgcctgggccgacccgaaggcgggtgggcggacggcgaacacaatggcccctcggggagaggacgtgcgaggcccgtgccttctccggggcccggggcgcgcgcggggcgtggggtctctgggtaggaaagtttctcccgagggcgagagttaaagcgcctccagaacaaagcggcggcggcggcggcacatggggcaggccgcgggccgggagggggcgcgcccacgaggtacctgcgcgccagcgggcggcgtggcgtgggcgggagcccgcggttccccaaactttgtacgcgcgagggtgggcggaggggcgccgagatcggcgcggcctgggcgccacccccgctccgcgtgggctttgttagcccgcgtgggcagcctcggggcggggcccgcaacttccccgccgtggccctcggaggaggccgcagtcggcctcagccgcggcgtggagccgcctgcgcccggccgcttgctgggagtgtggcgcgggagggccagcccggctcggcgggagcggcgtccccgccgccatgttcctgcggggcgggctgcacgggggtgagggcgggggacatggcggcgactgcgcgccgccgccgattgttcccggcttaggcctcgggccgcgtgcgacgggcaccgcggccgcggagcccccgcccctctgggccgggctcgggggggctgggggacacaaaggaggggcggcgcgcccgcgtccccgccgcactcgggcctcggcgccgccggtcgccgcgcggctgccgccgggaaacgggttgggggggttgccgcgtccggcggggcctgactctgacccgccgccccctggcggctacgcggagaatcgcagggccgcgctcccccttgtgcgacatgtgctgccggcccgggctccatgagcgtggcgggcactttgcagtctcgggtgttcctgcccggtcttctgttcctaaactgcagcaaagggaaaaggaactgaaaaaggcaggctcgtcgttgcaatatcaccaaaagagaaaattaacggcatgccatcaggaccacagcagttggagaaacaactctttatcccggcttgcagccacgaggtcttgattgggggaggggtggtgaagaatagtctgtgggctgctttttttttttccttttactggagctgtacagtggagtcggtgattgctgctgatcataatcaagtattttaggagcttatttagacatgtatctgatagctaaggatttttcaactttattctcttacgtatttttcaactgtaaattattgggcttttaaatcctgctagtattgctcgactcttactctcacaaatggatggaattaattgctgttaggaggttggaaaatagcaaatatagatttggacggtggtagtaattttgagcaaataatgttttatcttttttttccttatttttccctattccagtcatacacgtggacctaactgcaccagtagcttttctgagaatacttgctgaaaaggaagttttctggaatgggtaagtgtattctgattttcttgaacttttcttaaaaacaaatttttcttgctattaaagttgaataaataggattggtttcttagagagtaaaagtaggtgtttctttctttagacaatgtaccttttctgaaaaactaactcattaagtacggatttgctaattttaaggtagtaaaattacagtgtaaatattcctgtacatttttggaaactggcttatgcagtttacgaaatataattttagaccctcttttaagttgggtgataaagtagatataacctgagatgatagatttaaacaggatatttacgttctgctacaattgactgataacacttgaagtgtagtctgaacagtaattttgttaatcatttcaacaagtatttgctaagtggaagccagaagaggaggaaaatgttttgccacgtggatgtgaagatttcctctaaaaggtacacatggactaaattgcctttaaatgttccaaaattagttctcatttatttgcagtctcattttgttttgttttttttctctatgtgtcaatccatttgggagaggccagccattggaagagccaccacttccagtgctagttggatggttggttatgattgccttctgtaaagaattcttaaggcataaatacgtgtctaaatggacctcatatctttgagataattaaactaattttttcttccccattagggattatgctgaatttgtatggtttatagttgttagagtttgaggtgttaattctaattatctatttcaaatttagcaggaaaaaagagaacatcaccttgtaaaactgaagattgtgaccagtcagaataatgtcaaagtgcttacagtgcaggtagtgatatgtgcatctactgcagtgaaggcacttgtagcattatggtgacagctgcctcgggaagccaagttgggctttaaagtgcagggcctgctgatgttgagtgctttttgttctaaggtgcatctagtgcagatagtgaagtagattagcatctactgccctaagtgctccttctggcataagaagttatgtattcatccaataattcaagccaagcaagtatataggtgttttaatagtttttgtttgcagtcctctgttagttttgcatagttgcactacaagaagaatgtagttgtgcaaatctatgcaaaactgatggtggcctgctatttccttcaaatgaatgatttttactaattttgtgtacttttattgtgtcgatgtagaatctgcctggtctatctgatgtgacagcttctgtagcactaaagtgcttatagtgcaggtagtgtttagttatctactgcattatgagcacttaaagtactgctagctgtagaactccagcttcggcctgtcgcccaatcaaactgtcctgttactgaacactgttctatggttagttttgcaggtttgcatccagctgtgtgatattctgctgtgcaaatccatgcaaaactgactgtggtagtgaaaagtctgtagaaaagtaagggaaactcaaacccctttctacacaggttgggatcggttgcaatgctgtgtttctgtatggtattgcacttgtcccggcctgttgagtttggtggggattgtgaccagaagattttgaaaattaaatattactgaagatttcgacttccactgttaaatgtacaagatacatgaaatattaaagaaaatgtgtaactttttgtgtaaatacatcttgtcttgttttcattcaaaaacatttcacttttggggttgcgtgtcagatttggcagtataaattctggctatattttttgttgttagatttatttggctgttaagtattgcgatatgactaaacatactgtatacctgatgatcatctgtaaagttagagtatatctttttgctttctttggagttagtgttattccaggatattttacttaatctaaaagttaatttatgttgctcatatattactcaagtatttaaatttagagagaatgccgctctgtttaaagcaatgtgtaaagatgagtttttttaagcatggaatttagggttggggtacaatttgtttctattaagcaagtaccagtttaccaatacatgagtaactgaagtgtaactgttaaatgcttgtatactagtttttctttctgattgtcagtgatttataagctataaatgaccaaggtcctcagactgcttttagcatctgcaacttaaaaaaatgggagttagaaaaagaacaaatgctaaatagagtaacagttaaatgtatgtgtacactcttcccaaatgccaagagtgcagcggtggggtgagattcagatattcatttatttctaagtctgtagttaacatttatgttccctactccctacgtaagccagactttggcaacagtgatagttgattccaggcttatttgacttaaagtcactgaagtggaaactaagaagtggcagttagtgttttacccagcatttctgccttctctcttttcttcatgtgtttttgtctctagcctatgtgtatttgtgtagaataatgtgggatacctgaataatagatttaaaaggaccaagtggtaaaattgggcccaagctgaagtacaggcaaacttgatgtttgaaagataagttttgagaaatgtcattgtattttggagtaaaagaggctatcttagtaataagaaataaacttccataacactaggttagaccacccaataaatctagaaatcagcttttaaaaatattgtctgaagtctaacaaaagttttcacctctaatgtgttctttaagaaatttaaggaacttagccttggattcctgaatagaaaggtaagaattctatcattctggagttgatgaaaacataaattttcaggatgtgaaatgaacagtgatttataaaatggaaatcaaattgtacattagcagagttcttaagctttttgaattgaaggagacctaataattgtgtctttttggttatttagtgacaaacgtggctttcaaactatgcttaaaaagttccggctggacacggtggctcacacctataatcctagcacttggggaggctgaggcagacggattacctgaggtcaggagttcgagaccaacctggccgacatggtgaaacgctgtctctactaaaaatataaaaaattagccgggtgcagtggcgtgcacctgtaatcccagctactctggaggctgaggcaggagaatcacctgaacctgggaggtggaggtttcagtgagctgagatcctgccactgcactccagcctgggcgcaagaccaagacttaaacgcaaaaaaaaaaaaaaaaaaaaaaaaaaagtttcataatacagcatggtctggtagtttgcaaaatggtgtgcttttggggagatacactagcaatttttttaaaaactggaacagtgtgataggaagcctgctggatgatttcttaaatattctaaaatgtaagtcaaatatgttttaataacaaagacttaaatggcttttctccctagagactgaaactagtattcattgtgttcagaacttaattgggcttgaactgagatttaaatctaataaacaagttaataaatgtgtatgttttgttgtgggtttggtagtgatctgtggttctatagggtttaataggaattgcttttgatttgtttctggctttagaatgtgaggcaaattttacattcttggttctattaagattttcttaggcatgctaacatgccaacaaaaagccatgtaagtattgtataaaaagattcacattgttaatttagccattttgaaattcagatgagtgagcaagttgataatggcctcatctctgacctgagaaaaaacaactttgacccttgttcttaaaatgctttaaccttgaagttgcttgagacttaagaggtcatgttgctttaggtttaataaatagccttaactatttggaggggaaaaaatgggtcaacttttttttttttttttggcgtttgcatgtacaactttctatttttagcctatatttggaaagaaagcacttaacattttaggaattctttttaaagctgcttgcaaagtgttggtgattttactgaaaacttttgagatcttcattttacaggcagacctgtctaactacaagccagacttgggttttctcctgtagtttgaagacacactgactcctgacaaaatgcagcctgcaacttcctggagaacaactcagtgtcacattaaagtttattatgtatttaatgatacactgtttaattgacagttttgcatagtttgtctaactttagagaattaagagcctctcaactgagcagtaaaggtaaggagagctcaatctgcacagagccagtttttagtgtttgatggaaataagatcatcatgcccacttgagacttcagattattctttagcttagtggttgtatgagttacatcttattaaagtcgaaattaatgtagttttctgccttgataacatttcatatgtggtattagttttaaagggtcattaggaaaatgcacatattccatgaattttaagacccatagaaaagttgaagaatgcttaattttcttatccagtaatgtaaacacagagacagaacattgagatgtgcctagttctgtatttacagtttggtctggctgtttgagttctagcgcatttaatgttaataaataaaatactgcattttaaagctgttaagaaattgtccagaacgagaatattgaaataaaaacttcaaggttattatcgcagtttttatggcgtttttgttttgtcactacagatggtctaaaggttacttattaattaattggggaagtggagacaaggaccaaagtttatctggattttcttatttaatcttcattacctgtgaaatatgtatttgtattcttactttacatatgagatcagaagttcattttcaagcagaatggaaaggtggtaaatggactctgaattaaaatatgtcagtattttaaaaggttatcttctgcctagtatttttatggaatctgacaagttctcagatcacacttgtttccttaaatcttggtaagtctgaagcattcttcattttgtttatattatacacgttagtaaggtgggagttcttttgttttttgtgttttttggccagttgataacatgaaagtttaagagaggaggccaaagtatataaaaagtcttaaactcctgcttctaataaatgtccaatatgtgttggctcctgggttgagtgtttattaatgggtctgt

SEQ ID NO: 73886 - DNA, 1103 bp, Homo sapiens
tttgttattttgaattcattacattactgcttttaacaaattgccacaaactttttttgttgtttgagacagtcttgctctgtcacccaggctggagttcagtgacccaatcagctcactgcaacctctgcctcctgggttcaagcgattctcctgcctcagcctccccagtagctgggattacagatatgcttgcaccagcacgcctggctaatttttgtatttttagtagagatggggtttcaccatgttggccaggctggtctcaaactcctgaccttgtgatctgcccacctcgggctcccaaaggccgcaaacttttaatggcttgaaatcttacagttctgtaggtcaggagtcttgacacaggtcccactaggttacaattaaggtgtcagcagggctgtattagtccctagagtctttaggggaggcaaggttttttttttttatcttttcaagcttctgaagactctgcctttggctcacggtctcttactccatcttcatatctagcagcagcaggtggcgtctgcatcacactggacccctcttacctccctctttcacttttaaggacccttgtgattaatattgagcccatccaaatatttagaaataatttattttaaggtcagctcattggcagtcttaattccccttgtaacatttcacatttgcaggttctaggattaggacttggatattgttggaggtcattctgcctgtcttagggaattgtgttggttttggacatggttatagttccaggcatacataactgcttagagttgttttcagacagcgtaagtgaaatgaatgagctaaggaaaatacttaatccaataaaaaatagaacatactcgggctgtctcaatgttttcctacggtatttaagtgccagtttatggaggttttaaagaaaagattttctcagacgagaagagcttataatatacttcctgcaaacattctagaaaatgtaggtccttatcagtcaaccttcagaatggggaaaccacaaaataagtgaaattttgttaacctatctaagtaaacattaaagagttgcttttagaaatgacacaatgtaaagagaccat

SEQ ID NO: 73887 - DNA, 1010 bp, Homo sapiens
tattttctgatttctgctaattaaaattttcaaatagcataactatatgttactcaatatttgctagaaattttttgatttttatatggtttttaatgtacttatcagtattcttttatcatgaaatatttccatctattttccaaacagaacttactgaaatgcaagccaatatattttttcctcaatggataaatcacattgctttaaaatataaataatacatattgtctacatgttattcaacattttttccttcacagaattgtgtttcttacagatatttatttcttgttctgtgagtcaattagctgggtattgccacttttgaacagttggtggctccaatgctttgcaactgtcttgcaagtgtgataccaaaaataagtagctctcttctaactcttcattgcagaagttgataatgacaaaatacatttgagtaaatatagtgtattttatcagaaattaaaagttttatcagatataaattgagaaggaaagttttaatactaatgtatgcttcagactaggtaatatgaatacatattacaaccctcactgtgtgcgcttaaaagatctaaagcgttccaatagaaatataatgtaagccacatacataattttaaattttctagtagccacagtaaaaaataaacaggaatgggtgattaatattaataatttatttaatacgatatgcctcaaatattatttcaatgacataatataaaaattactgatgagatgttttatatgcttttcttttgttggtcttaagtcttcaacacccaatgtgaatttaatacttatagcatgtgtccattggactagaagtgctcaatagctgctgcagctagtggctacaatactggcgagctcagatctaaagtagcaagtggcaacccttctattcacattagatggatcctattaatatttgatggagagtaatttttataagtgaaattctgtaaagaaactctttttgcaccaattttggttctaaa

SEQ ID NO: 73888 - DNA, 1133 bp, Homo sapiens
ttatttattttcccttatgaataaatcataccaacatgtgtacacacttagaggatgtataccatgttgtattttgtatgtatttaaaatttctgtcctaggtacagatatcacattggatttctacatcttaaagttttaactaaagtaattggaatttctttttatgtgctatagaaatccaagctccccacgaagtttctgcacatcccaaggcttgcagtcacatagtcactcctacctctgctcccttgcttttaaaaaatttgctgttgtctgcctctttcctgtcatattagctgtatatgatttttttctcaatttccagttcccaaaacacacacacattatatacatgcaacccactcatgatgtatgtgtaaaataacttttatgaaatgatgattatagaggaagacaaagtctaaagaccacatactttcaataatttcaaattgaatgttgatttctatttttgcaagtctttttcagccctccaacatcaatccatgaagccgccattctcagctcattctctctggcccagagatctcccattcttgtgtgatactctcctctcctccccagatagtgagataatgtatcttccagtctcttacatttattatataagcagagaaatattaaatacccaccgcagggctctgaggatgaatgtaaactgaatgctttttgatcagcctgttgtctgttagatattttgggagtaacaatttttccaaaccaaacatacaaagtatggtgatcctgtataaggtatagacaaagtgtataatctttttttttagtattagttaaattgagttcattttatatttccaaatgttaacttttttttttctttttgcaaaatgttaacttttgcaatccatggaaagaaataaacaattattagcttcttttaaaagagaaccaatttatcttaggaatgtttgcttttaaaagcaataataatctgcaaagttaataatttttttaagatccaaaatatattgtatttaaatgattttttatttcttatactaaatattttaggaaaaagtaaaatcagcttaattaaaatagcatttttctaattaatgtgtgaaaatatatatcaagggaaaattgta

SEQ ID NO: 73889 - DNA, 1021 bp, Homo sapiens
gaggggagtagtgttactttgctacctctttcttctgcttcctttagcttggcttatgacagttgaattttccaacctggcagggcagggttagaaaatcagaatggaatcccagaactgcagtttcaagatatttaggaagtggctcagtgagaatgctatatatcaagtgaataaaataaagctacagctctaaatgctaggaccaccctgaaccacccagcaccactcacgacagctaaaatgcatggagcctttatagcatggcaggtaatgtgctggttacttttagtatcatctcatttagccttaccttcattagggaaatgctattttttgttttcattttatgagcaagaaaaatcaaagctcagagtatgtataacaaaatggtgaagccaagatttgaaccttggtactgtgactccaaggctcatatacttatgctctcagatctggtgtatttaggagaatggatatggtcttaaacacttttattattcagcaagaatgatttaaagtaaatcaattacacttcaagccaagaacttagaaaaatagtaatgaagtctagaaaagagagataaagataaaagtggagataacttagaaaaacatcaatatatttactatgcatgcttcattaaaaaataaagcaataaaatcagtacagcacagagagaaagagagagaaattccaggcatgagaaagtaatatacaagacagtgaatacactcagaggaatggtagagcttttcagaatgatgagagattatgtctttactttttgactaaaatttctagaaacaatttgaaccaacaaaaatgactcaaggaaaggaagaatcatcaataactctgcaatttattaataataataaagttgaccaagaataccatttattttccagctccaccccttctgtaaaacaagcaaataaaaagacttttaaaaacccagatgaaattgtgagcaatttaattcagatggttaggaggctaatatttacaattaataat

SEQ ID NO: 73890 - DNA, 1026 bp, Homo sapiens
ggaccatgccaggaagcaaaacaatctcagcctttggccttgtggaacagacagtggcggggaagatagataatgaacagcactgaaatgctacacaagatagataatgaatagcagtgaaaatgctacacaacagaacttacagaggagtctgggagcattaaaaaagggtgctccaaatgattagcacaggccaccgaaaggaagcaaaacttaaacaggtctgtgaatgcaattgagtaacttccataaatctttttccaacaccttctcagtctactagatattctttagaggtaattaggtacttgaatcatgtatgtgattccaaaatcaatgatttagagccatctacaacatactccttccaagtctgaatcagagacttgacatctggaattgtgcagttaatgaaaattggggttggggatatttcagatgaaatattcttggtgctttattatttttaatgaaatgagaagcagcatttctttttagctgctcccctctgagaagttgcactgaagcataataatacaatttttcttttttgtgagaaaggacagtctgccctgctgagaagacatagtggctttgtcttggaaggccattatagattatatattgctcacctaaggttcggatatttcatgattatatattatgatttaagtataaattaactttagaagaacagaaaataattttcttattaaagttgaaaaacatattctcccctttattctctctatccctcattattcatagaaaccctatgtgttacccatatgtacatatatatatagtaacaataagtttacaaatacaattgcactctttttcccttttaaatatattatcttagatatacattgcctatgcaaatctagccaagttaattctttatacctcagttttcacttctgtaaaagagaaatgaaatgattttataatgtaaagtgtttgagcaatactatgcatgcatttagagtttgtcagatattggctgttgttagggcagtccat

SEQ ID NO: 73891 - DNA, 1057 bp, Homo sapiens
ttaacagccagttcacaaaattccttaaaatttaacagtcttctaggctataatgtggggcactgaaaattatctatacttgagcaccgttattcagttttggatactctgatttaattgatttgggaaagggcacagtccttccttcttctattcttctctccttccttccttcattctttccctcctttcataatttcctaatttagatgtgctcccaggattgagaatgagtgatgtagagcagtgagcttcctaaactttactatgcaccagaatcaccgaaaggcttgcaaaacacaaatggctgggctccacctcccagactttctgattcagtagtagttctggcctggagtctgtaatttgcgtttctaacaagttctcaggtgatgctgatgttgttgggtcaggtatcatactttgagtctctggggctcatactctggttgccattcattgtggttttaaatatggatttctttcagagtgggcagtcaccttttggataatggtttttgtattgttttttacattggttgtgggtgagaatctccacccacaaagtgtgttactgctacaagttgtactacttagatctccccgcatactttaaaaagtttacatgagcccctagggggactaaggaaaagagcagaatgggaccagagcagtctatcccatgtctgcctggaacaaaagaggccaacgattcttcttcctaagtagaatgggctctccacattgctttaaatgggaaatgggcaatggcatttcaggtttctttcaccacaggatcctatttttcttactaatatggtatgccttctgttggtacctatgactcttaattaatttttggtcctgttgagatttctggtcaagagaaattccatccccccaacctcctccttgagctgtttttcctatcctagcctctcaggcacagatctagccatttcccctgacttttagactgttatgcaaggcgactacatttagagctggtcactctgcattttgtacacattgaattaaagatatagcataatacatt

SEQ ID NO: 73892 - DNA, 1063 bp, Homo sapiens
tccagtggtaactagcagaggtaagagaaaaacagccatgcgggtgagtcatcattcctcactccaggaaatggctcattttacaagcttttggaaggacctttgggaagttgtgagctgccaccatttttgaattgaaaatatacatatgttgcaactctgatgtaaaaggcatatagttcctttttcctccacctcttggtttctccttctccttctcttcttgctcatataacctgtgtagttttccgcaggagctcccacttgatgggtaacaggagaaaacattttagtctgatctagttgaaaatgtagtctgatcagttttgcctttctagctgacagtcaatcaagtgggatacttgctgtggtgcagtggctttgactcctggctcctctacttagccttttctgaacctctctgtgccttgatttttccatctgtaaacaggggtaatagcaattcctatctctcatcactgggattgtgctacacgaatgaacacttctaaagctcttagaatagtatctgacaagtacgaaaggctgtacacatgcttgtcaattaacacagagtagaggaggaaataaatctcttagattgcggagtgataaaggagtgactctttctcacgaaagaaaactgagggtcctagggctctgcccatttccagggccctgctggcctgcatatctgggggtggtatactttgtgatctgctcttattcaagttgggaaggaccgggtaactagtccccttcctttggtattcaccctcacattggcctttctgggcatgaagacctcctgagtcactggtttgtcactcaactggcctctggcccacctccagccttgatcacttggcatggggggaccatgacaagcctctggtttgcaactccgctgctttctgagttcttcccaggagggctctagggattgctgagccagaccagtgctacccaggtgaggggtgtagctctccctctgagtactctgtgccccaaagttgaccctaaagttggtccaggtagcccaccaggcaatctcttcacagaa

SEQ ID NO: 73893 - DNA, 1039 bp, Homo sapiens
ccattactttcactataagtggaatggtctacacttacctttcttaaaggataaaatagtctcttctcttttctctcgttatagcaaaagtatcagatgattggcctttccatatagttgaaggtcacccattaatgaaatgaaacagaatcaaggtaaactatggaaattacagtaagattgttaaaaagaggcttcatgttgcaacactgcatatatgttctgataaaacagaacatttattgagctctctctaggtcccacatattgttttaaactcttgtagtatctcgcataatccttacatcatcttttcatcataggcatcatcaccacattttacagatgaggaaactgaggcagagaggaaactggggcagagacaattcacttgtccaaggacacaggtgggaaagcagataagccaggcagattctaaagcccacatacaaaactactatctaggtgaattatatgatttcattttcaaaggagaaaattaactttttctagtattaaatttctcaaatcattgagctacataccctgtaatgcaattctttccaaatattaggaagcatttagctctcagttgttagagaaggtaagaagtagtaaaaaattattccggtattgagacacttctagaaacttccagtaagatcaagtgatagcttattagtttgatagacattttagtcattatgggtaaaactttgtagtattacattgtcattactcgggctgtttgcatctgaatgctcctcttcagtttgagaaattcccatcctcttgagtcttcatgggaggcagagcttccctaaagttacagaaactgaaaattccagatgcttgctttccccagctcctttgcatccaaggtgtgggtacatgacctacaatagaccaatgatatatgccagtctcagtctttgctttggctacttgtaacacaaagaagcagcaacagtgaagaactcattctgcaggtagcagtggccaaatggcactcatggaggtttcagcattgtcctcaagt

SEQ ID NO: 73894 - DNA, 1051 bp, Homo sapiens
ttaccagccttctgagcacttagggagtggcggtgaaagtgaagtcattctgaattttttgtccctccttttctcccttccttctttcctgatgctgttagtgtttagtgatacaagttgaacattggcattcccaaatctgatacctgaaatgctctaaaattccaagctttttgagttcccacatgacaccacaagtggaaaattgttagatatagacacctttgctttccggtggttcaatatacacaaacgttgtttcatgcacaaattattaaaaaatagtgtataaaattaccttcagactatgtgtatgaggcatatttgaaacataagtgaatttcatgtttaaacttgggtctgacccccaccaagatatctcattatgtatatgcaaatattacaaaatctgaacatgtctgaaaccttgggtccacattctggtcccaagcatttcagataaggggtgttcaatctgcataagataaaagagcctactgagaaatttaattatagcttcataagaatgtctagatcatttaaaaagtcgccaatgagaacagaggattccataagagtgttttggccaaaagtgagccaatgacatagaggcagggacattggccaccaaggagtgtgaaaagctggttctggggtgaggccgattctcgcaggaggcctccccgcctggtgtctgttctcacccaggaattggccagcaactcatccagatctttctttactcttggaaatgccagtgtggttcttatgttactgggcatgcctttgtttcatcttgaagaacttatcatcacttcaacccattcaaaagatatgagagaggagatgtgcaattgagtaatgattaggaatgtagcacatattgcatttataaaacacatcaaactatttttcaaatattagaaggtgtaattgagtctgcaacacattttactaaagatatttcctttaatttttaaaaccatgtgtattacggggggaaatgagatccatatgtttgattcttgcacagttaaatgatatattaaag

SEQ ID NO: 73895 - DNA, 1109 bp, Homo sapiens
gtgtcgatctctttttaagaaaaataatgcaatgcagaacaatttatatgtagtatataaatatttatatgccgaaattactaacataaatatatgtatatcttcatatccacttatagacaaagatatatgtatagggaaaaatttaccctatgttgataaaacttgtatgcacagttcagcctttcagtttagaggatcaaatcctaccaagagggtcaggcacattttattttattttgagccgtttgagatgtatgtgaattccaatttatataaaaggatttgtttattgtatacagctgtcattgctttcaggagtaaaaggtgagcagcacagtctgaaaataaatattgaaacttcttttacattttctgaattgttgtactggtcatgagaggctgatattgcatggaaaaatagctcctcttttgaaaaatactattttatggcacatggactcacagagtaaagagacattttctgttagtatcatcacttgaacatgcacttagcaagaaactgaatatggtagaatttctttactcagttcaaaggattactcatttttgtttcatagtgtttggtctgggctctaaatgaagcaaggaggttaatgtaacgagactcttggtaatcatgcagaaccatttgctgacttgataaggttcaggtgcaaatttgtcaggtcatctagatgcttgccccaataaagaatgtttgcctgtgacttttttaaaccatgaaaaggacaaatgcaggcagtggctgctgggttaaaatcaaataaaaataacacaaatgaacaagagaatagagggatgatattgtacgctggggcatatcaattaagaactatttccacaatctgtccagaaattcagtgataatatgcactatacaactatccacccttacgttcttatttttctttttagcaatgagggaaaaaatggagacaataaaacgagtaaattggttcattttattgtaatcaaacaatttggttgaagtctcaatgatactcactctgcagttactcaggaaattttatacaaataatgatctttgatgtatctgattttcaaagcaacatagattagaggaa

SEQ ID NO: 73896 - DNA, 1055 bp, Homo sapiens
tgtctttaacagaacaaaaagtaaaaagtaaaaaacaaaatgattttccccaccctccccccttcacctcagctaaaatgtcacctcctccagaaattccttatcatttggttgtaccactgtttgctgcttaccactgtcttaagttgtaattacgtatggtcttctctctaggtagggaacaacttgagactaaagacgttgtgactcacatgagtttgtataaatgaagaaaatgcgatgggacataagtagggtgtggggagagccttcatggggagatcatacttgacctgagtcttcccaaaagcaatccctctgtcttacaatacagctgtcaccacaattggcttgataaaatatggagtaacaaatgttaggttcacctagactaatcttcccttcctatacatgaagtacttggaggaaagagaaagcagtaaagtgattttccagagtcacacattctgacataggcagtgccagaccaaaaatcagtcacttcccataaggtggatatgcacactcacagaaagaacgagcctatgcatagaatgatctcattttcaagtaaaataatttttgagatacaaacatcagcaatgacaaccacaccccattccccagatcttgcatgtacccagatttattataaatattttgtgataaactctaatcagagcccagtccctcagtttaatagtcatagatttcaggattttgcttctgcttatcttcccaggctttcttcctcttctgtcttcttatggactggagaagtccttgtccttctagcaggcaggcacaccactttgggtttctgtttgtttttgtgtttttcagacagggtcccactctgtcacccaggttggagtgcagtggtgccatcacagctcactgtagccttgacttcctgggcttaagcgatcctcccatctcagcctcaccagtaactgggagtactagcacatgccactaggcccacctaatattttcttttttcttttttttttttatagggatgggggtctccctatctttcctaggctagtctc

SEQ ID NO: 73897 - DNA, 1314 bp, Homo sapiens
gggaaaataagtaagttaatacacatgaaatctttaggacagtagctgacaaaatgagtgctagttaaatcattactattactattattagtggtaatatctttaaaaataaattctcacaggtttttgagattatcaaatgcgaataacccaacccatgccaaagctttcagcataaaccccaggtgatagaagacttgggttgaagaagagtgtgggtcaagttttcaatgaatcagaggaagcttgaggttagtagatgatacaacaggtaggagcagagggttcttaaataaaatggatgaattacatacaatttttttaaatacttagataatttaataatggattcacaatacaaagtggggaaaattccggcctcattttctcatcctagggttcaattagggtgagaaaagaacatttgagtaggcagcaaggcagcgtccatagagtttcaataaaggcaaaagatggattttgcttatagagacagtttgggcaatgtagatactattttttttttttttttttgagatggagtctctattgcccaggctggagtgtaatggcacaatctcggctcactgcaacctccgcctcctgggttcaaacaattctcctgcctcagcctcccgagcagctgggattacaggtgctcaccaccatgcttggctaatttttgtattttagtagagacgggatttcaccatgttggccaggctggtcttgaactcctgaccttgtgatccgcctgcctcggcctcccacagtgctgggattacagatgtgagctactgcgcctggccgtagagactatttaatatcattgaaagacattctaaaacgtgtagtgcaaggggaggtgtttgttgggattttgcaggaaagaagaaacactgccatcagtgaaactctatcctagggcttacatttccatgtgaccaaggctgtgaggcatagtcagtgcagccagcgcgaggttttcaaagaattgctgctggcttgtctgctggtagatggcagttgctagccttgtctttaggcactctcctggctttccaaaggccctgctcacagttctggaaaatctctagaatcttccacatttacctctgtcttaacttcctcttggttttccccactttgattcaaagagtctgtggctccatatgtagacttctacctggatttgagttctccatagttttcactatgttttggagaacataggaactgttattgagaaattattctgacacatgttaatgacacaaagacagatttcattcgaggtactgcagaacggaagag

SEQ ID NO: 73898 - DNA, 1074 bp, Homo sapiens
tgataaattatctcttttgttgaaattgatttgtgttactgcttttcatttttgagcagattttctcattattcgtttatatcaaagtgtcaatagatcctgagaacagggtacacttatgtcctgtgtatatagtgtgcattaaagggccttattcccaagtcaactttcttccacgttgtgagtggcatatgtacacctattgcttgctattttgagttttaaattatctaagcaagaaagcctgaaactaattaaactccagtggtttatttattaatattaatttacaacctgatggcttaatcagtatcctgctttcttttttttctttaaagacttggcataattttacatagccttgtgattgctttgaaaaggctgtagtgttcttccatcattagatgacaattttcttttctagtttgaaaacttagcttaagttctcaagtcaatatgcctatagtgaaccatttattgaaggggtgttcattgcgaatagcatggccaattaaatgaagaataattggtttagttgagcaccttgcaatacttctctggtttagaatactgcagaaactcaatggttctttctcatgctgtgtgtgattttgctttgtttaaaacctgatgtgcctaagtagatttaccttaccagtagatggtttaatttgattttaatgatattctatttggctctataaactgtactgaagccagcgctgccatgctgttaaaaatgtaatctattctataatggcattaggtgataatgaaagcagatattagagacataaccattttcatatttaatagagaagcaatgtgttctaggtaatgaagttaagacttcacatgacattgtcagcacatgttaactctatgttttggaaggctgctttttagacctaagtaaatataattcaaaatgcccctatacttgtttatctattagatgctcttgttttgttttacacatcataactgccaggatcatttatttggcagagcctcagaataaaaacaactcaaaccaaccaaacaaacaacaactaagaactaataaaatctttg

SEQ ID NO: 73899 - DNA, 1022 bp, Homo sapiens
ttacaagtaaatcattcatttttggaaatttaagtcaaccactaaatattaatattctttatataattttacattatttcactaagactaaaagtgtacctaagattggttgttgtgaagttttaaaaatgtgtatgcttttattttaagagattaatattatatattattaggatattatatgagcaaacatgttttcttcaatttttttttaaccatgtatgtagtcagtcattactaagagagagtgagtggggagtcactgccccatccctttatctctgcgtaccactgttctgaagatattttgttgatgacatatatgagcaagatatttggacaaagagtctgttttctgatcctctagctaatatgcatatatatgaaaaaaattaataacgttcatatatgtgctgtcttttgttcatgctcaaagcagtctcaatgattttttcacaggggtgttctcctgtatatacttgaggccaccatcagatttttaaatccaggcttagaatagtgactataaccaggtttatcttcttttatgcatccatggtatattgccttctaaactgtacccaaattctttatcagaatcatttttaacaaagtgctccaagctgtaaccttcatttgatgaaccttgctctttgagtggagaactattttttattcatgccctagactattaccaagcagagagcttgaaggcagtccattgtccagatatactaataaaatcgacattcatggctagttttcctaatgtgtgggtatatgtcattatccattcatggtttgtctttcatgcttttcatacacatcaagccaaatgtctgggacacaaagatgtccaatatttccttaatttcaaggagctcataattaagtgttacaggagaacacatgaacaaattattgtgcaggttgaataaagctattaggtataatgtgaaagtatgctctagggcataaagggaaaaaatgatgagagtgtttatactctaaactgctatcat

SEQ ID NO: 73900 - DNA, 1012 bp, Homo sapiens
ttttaaacccatcaagttcaaataaaaaatgatttttcttaaagcaggagcatttatatttctctctagaaaatatcagtaaatacactcatctaataaataaaagaagttgcatcactaaggcactgccccaaatgctccatatctgtgagcagactagacaacaaaatacaagttgcccctgatcttttaccaagaattctcagcccatttcaacatctagtgtgagaccagcattagctacctgctggatgggctttctggtggggttacatctagaagtacagaacttctcaaactctctgtcgtgatgaatcagtcttcctcttcctcccttcttccccctcctccacctcctgctctcttttttcttccaatccattgcagattggttctctcataaaatacagctaaattaatttatacaattgtataaaaagacacataaaatacatgccccaaattgttattattagatctaatggacaagaaaacgttgacttgctaccaaaatttctaagtttattcttttttaaaacttttaagttcaagggtacatgtgcaggtttgttacgtaagtaaacttgtgtcatggagtttgttgtacaaattatttcacccaggtattaagcctagtacccattagttatttttcctgatcctctctctctttgttcaccctccaataggccacagtgtgtgtatatgtgtcaatgtgttctcatcatttaaatcccacttataagtgagaacgtgtggtattcagaaccagaaaatctaagttaattcttttttttttctttcttcttttttttttttttttttttttgagatggagtttcgctcttgttgcccaggctggagtgcaatggtgcattctcggctcactgcaacctctgccacttgggttcaagcgattctcctgcctcagccttcccagtagctgggattacaggtgcccgccaccatgcccagctaattttttttgtatttttagtagagatggggtttc

SEQ ID NO: 73901 - DNA, 1052 bp, Homo sapiens
tgatatcagtattgctgttgctattgtagtattatattttgagtatagcagggggcttgagcctatctgcatcccgagtaaacagcatctcataccaaacacatggaaaaaaactctaaatgaatgaaaaaaaattaaaaattaaaaaactgcatgcacatactctttcccacatcaaaattaagaatagtaatatattttgtaatgtatttgcataacttttgaaagaaaaggaacagagtcattcattggagtttcatacacccacacaaaaataaaaccccaatgaatgcataatgcatgcaatagggccattttgttggtaaaattagctgatgatggattttctttggtattttcaccacaaaacttttaaagatgatgtttatgataaacctattttttattaaattttaccacgtcttgtttggctttaaagtgatgttctggtacaagatatcttaaagaataaaaagcttactgtgcatttctccagcatgtttgctgagatctgaagtgtgtaacagaattcttcagtgaggtaaagaaaagttcaccatagtttgcaagactggttcatgtggaatttataagaatggactgaccagcatgcccttttaaaattccgtagttaatctctttattgaaagctgctggactacttgattaagaaagctttatggaatgactgcttttagtgtcacacaaatgaagctgaactgttgctaagtaaatcactgtagatcaaagtactttgtagtcagagaactgcagttcatttttttttcattaagttttaaagagaaggtgaagggttgaagaatgaaacacaccaaatttgacatctatgatgtccatttacattcatgcacttctttaagcatctaatctgagtgattaggcaagtagtgcagtaaagcataaatgggcaagtgtaaagctgaatgaattaatacttgtttcctgtatataattgcccagatccttcctagccattaagaaatcagtaggcaagtagagaacacttcgggtgctcccaggaaaactgaagt

SEQ ID NO: 73902 - DNA, 1031 bp, Homo sapiens
caaggcaatattttctatacaattatggagtctattagaaagacttcattttggttgaagctttataatatcagacatactgttgttggtaaagaagatttaaactgagtctattagcctgtatctgagaggtagctgatagaatgcatataatgagaaaattgttcttgaaggacacactaaacaactgtggtttgtatttgtttgtaattctgttgtgaccagacagatgggtgactataaacaaaatatcttcctattcccttctgagacatatgcagggtcgtctttccttcagcactgtcatggagcagcacgcaattagctacagaatgttagccaccctgctggatgcaactccacatctccctctgtggtgtataatagtacaaaagtgacattaaacctatcaaacaatcgtattcaggcagcatggcatcacacaaccccagctgtttgtgttagtgattttgtttttcaccagaggagatttttggggtgaatgtaatgaatggacaggctatgcttacttttaatgaaccccaagttaatgcttcggtctttttctgtccatttaaatgcaaaggagcacatttcagatcataatgaaataagcacactaatacacaacctcctttcttcattctgagcctctgcttccagaattaatagcttcctggtagggcatgtttgacattgttgctaaactctaaacagggatctaattcagagacaaatttacatcagcttatattttgacttttaattcctctggcaaccaaagaacaaacaagcaaaccaagaaagtataaagagtgactttatgaagataaatcagaatgacctgtatgttgaatccttgagaatacatctcttgtggtttcattatacttagattagtgtgtcgtctgtggtgatactctgtaaagcaaaaaatataggtcagattaacaaaatgaatgcaaaaatcaatgcctgcaagaattagtgattcaaaagatagtattaactaaacaaatttatgttaatca

SEQ ID NO: 73903 - DNA, 1030 bp, Homo sapiens
tatataaactctgtggaaagtcaccagtatatcacaattctcttggtctcctccttgagatctttttgtggctacttaaataaatactatgtgtcttttattatggggaagaatctgctttatcatgggtagtgtgcctggtaatcaaggaacaacttttaccaactttgctatgtgctgtatcaccaagtttgttataatgatatagaaaaaagggagttcatcatggagcagtgctaaaataccagaaattataataataatatactgccatttaaattaggagcagtgtaatttagagccatagggaatatgaaatgttatttagaaaacgattatcctctcctacaagtctaataactatcttctaagccataactttagtataaatttaacttgtcctttttcagggacgtagtagagagattttaaatgatataattacaaccaatgtcactccccataactgatgtctacctggatcagattgattgtgagtcttgatgacaaatgccagctacttttggtcactggagaaaggccatatttctcaagtatgatttgactttcagtaaaataaatccacgacttggttgtacactaatggaaagacctttcaggagtaagtgttgctttgtacagtacaggtttttaatttgatccttttcagatactaagataaatacataagcatatgcattcgttttgttaaagagaaaacatttaagcataattcaacatgcacttcttgccatggctctttttgagtttcaacttgtctaatgattctgccaccccctcagggtgggttttcatttcttggggttctttttcttagcttttaagatttagtggcctatactaaggggcacttatcttgctacaagatagcatgtttcattggctacattcactctggcagatgagttacggcagattctttaatatatatattttgcttttttcctatagatggaccctcatagtgttttgacagttaaaaaggatggggggttattgaacgtctagt

SEQ ID NO: 73904 - DNA, 1031 bp, Homo sapiens
tcccataactgttaatcaattgtagaacatgttctctaagcaggacagaaagttgagaaagagctaaaaatatcttaggattccatgtttataaaagaaaaagtcaaatgtccctgaatattgagtaatacatttctcattgcttaatattaggagaatgtctagaaacactgtttcagaattttttcctttttatttacatccagaaattacataaagcaaaaatgtttttgttattccacaaaggataatatgaatttcaagtaatttattgctttcagttgttttcagatctgtttaaatgtgcttattttttccgcggttgctaagttattgtagttggacttgatcgtctctctgggaatgatttcttcttgagcattattttctctgctcagatgattccaccttctccaccactccgccaccaacagacttctgatattttcttgactaatggaggtgtgatcattttctcttttgaccttataaaataatgagagctgctggagtgccctttgagttaaatcaatagaaagtgcttcatgtataatatctcattaatagagatggctaatggcaaatgtgggacagtttatgcagctgacaagcaaagcacctgccagtatttaaggaatggatgacctgtgaccaccgagacacttgagaaaaagtacaacttccgtatctggtggaaatctgctcctaccctcctttgcaagagaggatattgtgtctggcttttctttggttcatagctgtgccgcttcttttttccagatacattttaagggtttcagtgtgccccatggtgggttccctgggaaaaacactctgagacagatatttgagtgcaggaagtttatctcaagagagagaaagaaacaggattgggcagaaggaaaagttgagctttgctatagttgccacgaggccctcagctggtgtcacctctgaggccatctgcctctgtgatggtccttcagagctctcaagattgaggcagggaagctcagccctcgtgccccagc

SEQ ID NO: 73905 - DNA, 1049 bp, Homo sapiens
attgaagaaaagaaagaaataacatctaaagatctgtgtttcatggacgtttgcgaaaatggccgtcacaactcatctggtagaccagaagaccaggtggacgtgacttatattaaatcttgccagagctggacatctggctcttcagttgttctggtttcaatttggatgtgaagcaccgttcttagtgtgattcaagtactagatccacttaaagagttcttgtgtagcccaggtctctgccatgtttgagagctgtggtttgttttttgacaggaaacctccatcagagtttattgtaggtatctcattagtaatttttagcatgccactgtgtaccaatgttgaactttatcagttgaattagagaccatgttaggacctgaatgacaacttccctaattaacctgaaccacattctggaacgccttttgacatattgttgccttgtaagtaaatggctccacttttttttttttcttttttcatacaaagacagttttctatctatcctcaagcacaccaaccatgttgttgttgttctgacttacggcatttgcttgatttattttccaccctgctcttctttgcttacgtaagtcctcaaatttctgcttaattgtaatgatccctgactaccttataaaggcatatctctgaggtatggtggattcagtaccagaccacagcaataaagcaattatcaaaataattaagtcacacaaatgttttagtttcccagtgcataaaacttaagtttacactatactgtacactgagtattcaatagtgttgtgtctacaaccggtacatatcttaatttagaaatactttattgctaaaaaaatgataatgatcgtctgatccttcagtaaatcctaatctttttgttagtgccacaacttgactccatgtttttggctgctgattgatcaggagggtagttgctgaaagttggggtgaatgtgacaattgccttaaataagacaacagtgaagtttgttgcattgattggctctttctttggtgaagtatttccctgtagcatg

SEQ ID NO: 73906 - DNA, 1022 bp, Homo sapiens
tgattagtgggaattaaggtaattattataaattaatggctgtgtgagttataaaaggttagatattatggagttccattgtcatggagggaggcaattaaagaaatatacacttatagactgtaccatagatcttgtgacatttctagccactttgcctttcatcgttttactctatgtgatatgatcagtgttgtagtcatgcttttacagatgcctactgaaattgcactattttatagggaagaaaaataatttttcatgaagtcttacaggcagttcaatttgattatgttcttaatcactctcacctagacttggcccttttactgaattggtctgaactagtttacagctcttgggctttgaacagtaaatcttaaaattctaatgtcagctgttatatagtttagtaagaatgctgatctgctgctatcaggagcaaaaacgagcactttgaaaattagtttattgtatatcaccccagactcaccaaattcaatagtaaagtggctaactttgagtaagcaaagagggctgtgggactgcaactgcaataaacttgaaattgattgtttgtgggtgaatttatagatggtagttggtttgatttatgcattaagagtcagagagagtgaaagatggaaatcagcatctctggtcagctgagttgtagaaggtcactgggaggtggtgaattactgtttgccatggtttggcaagcagtgttgaagctgcttaatgagatctaaccaaacttgtccataaagatgacacatgcaaaaaggaaaaatattattcagataagataccattcaggctctaggactaaaaacatctttggatatttgaatatgaagtttttggcatcttctaaggtaaatatggcaaatgagttgtgagcaggtctgaaatttgcaacatatttataaatactatttacatttccctgtcttgagttagcgattagcctttcttttggatatgaagacaatatatttatgaaacacaaatggaaaatg

SEQ ID NO: 73907 - DNA, 1022 bp, Homo sapiens
cttcacaaaatatttcttgccatttaaacaaacatctgcatgtggagtaaagcatattgatagatagccaacatttcacattcagtgaagaactctttcctttatcctaagtgataatagtaaatttaaagactaattaatttctttcactggaataataagttctgggaaaatatcagatattttaaacattggaagtgaagagaaagttgcatctatgaaaaaataatttttagtaagattgatacacatttatatcaataattgcatactatatccctatcgatatatatatatatatatatatttgttgcagttcttatattctaatactgttttcttttccattttccccaggaaacaaaaatgaacatgatcctaaattacactttatatttcacatccgctaatagggctggtattgggaaacagtgccaaatatacaagagccgagcagttttctatttgagtatttgtttgcaaaacaagcccaggctaatggaggatcatttgtaggaagctaagtcatgctgggtgctcattgataacttagaaagactctctagtttgcattcccccaacccccagttggagatagtcatatgtgtttcaattaaaatatccatttacttccagctggcaacgttagtatccattctaccgacagagagcaaaggtcacaggctcctgcctgagcagacattttaaaaaatatgccatttgccttccttgtgaagatacctttgagccacccattgcaggcttggggagaagattttgaagggtcaaattgcatggggactttcaccttatttactgatatagctttagtagctgttggtccagatgctgcaactgctgttgctttgtggattgggattcagcagcagctgttgttctttgctacagcgtgtttctgaaattcaaaatttaatagtctgagaccctagtcattgaaaactatgctgaaagttaatttgctgaatccaagtttattttcctgctaagccatagtttgtgat

SEQ ID NO: 73908 - DNA, 1072 bp, Homo sapiens
tagctcagaaatataatataggaaaagaagaagaaggaggagaaaaaggaggaggagaaggtggaagaggaggaagaggtgcagtagtacaagatttttttcagatgggagaaattatgtgtgtgaactatgagaggagggttaattcttcttcattttataaagttgtcctgactagacttgaaattacaatcagagatacagggctttctgtgatttgtattttgctgggattttaaagtataatttgggagggatagatgagaaaggagacttgattaagatgcttgaagtctacaattaaatttcatatgattttcagaagcaattttaaattgtttaggactcataagacgagatatgtcatgattagcatggtgactcacaaagacgattctcatctttgttggtaatagattggaagtaaatgatggagcccctcactgtgtgtggctccctccttacatgctttccagttttccattatccatagacccctaaaaagctttgcccaaaaatacacttttcaaaaagtgcccattttcttaggctatcaaaatattgtagaaaattcagaagtaaaatgtactctgcttatttctcattccttgtatgtcccagtcacttcaggctgctataacaaagtaccatagactgggtggtctgtaaacaacagtcatttatctctcacaattcaggaggctggtgcaagtccaagatcaaggcgcatgcagattcaaagtctgatgagggcctgcttcatggttcatgggccatcttctcactgtgacctcacctggtggaaagagcaaaataactctcttggggtctcttttatgagggtactaatctcattcatgagggctcatgacctattcatcttccaaaagccctaccaatgaataccatgacattgaaggttaggattttacatatgagttatagggggaaacaaacatttagtttataacatgtattatataacctacagatttgtatttaaaaaccttttatcactctgaaggagcacatgcagtcaccccgaagactacattatacacatagcaggtgt

SEQ ID NO: 73909 - DNA, 1743 bp, Homo sapiens
gtatcatgatttctttttctttgaagcaaataggcatatcaattctagaagagaggcatggtatcatgaaattgttgctgaaaaccaccctgatgggtgtttttacataagatatcaggggttgttaagagcttaatgctatactgagattaaagaagttcctctgggtatgcagagagagacggttcacatgagaagcttttggattatctggtggtccagaatcaacaaaacttaaaaactaaattttttgaaggggaataaataattagcaatatcccttagaagaactctccttgttatttttagttttaaataacaatataagtgaaaatcttttgccaacaataaaattctatgcagatattaatgatcactattcctcttgatgccatgtttggttaggtttttagttagagattgaagttgtagaagaggacagagagcctatgtcatggagtaaaaattggaagaaagaaaaagctgtatgctctggaacagtgtttcccaaatgtttagatgtaaatgaccaagataagtcaatttcaaaatctggaaactggcatagtgccacctattcttcaaaattttgttaagcaaattaaaaggctacaatgtagattattaaccccatttcataggaagaacataatctatgatctagattattaaaaggctacaatgtagattattaaccccatttcataggagggacataatctcagatgaaagaacagacctttagattgaacatatttagcttgataaggtactctttatctttatttttctattttgctaaggcaacttggtacttggggatggattgagaatgctggtatttgggaatctccactgtaactcccagcctctgttagattggagtagcttcttaccaggttgtgtttaccttagtacagaattgcatttctatgactgtcaggcaggtggactgtcaaacgtgctaggaaaagcgaagtgaaacctgtcgttaagccttaagggtagccaatgcactttccagagaaggccccaagcttatacctagagacagttgtgcagttttccttggaaagtatttcagaatccgtgtagatgttcaaaaaataatgcagagttcttccccataaaacatgagatatcagagtgttcttaaaacacagaggtaaaaggctctaacacagtctcaccttaacaggtgatttactttattgatcagtgaagagcaccccagatagctaaatgagatggctgaatcttaagaaactgataggagtgtcccactgaatgacagagtattcttgaccccaaataaaggttgtgttgctgttattcagttgagttttagaacacaggtattcattacctaagtgacaaatgcatgctaccatctctcagcatttagtcgtctccttttctccctcctaagagtcaaccttctgtatctcttcccttcttattggttctgaatttgttttaaaagtaatgcacattgtgtgtgtgtgtgtgcgcgcgcgcgtgcgtatgtgtgtgtatgacaaacctgccttactaattgaagatacctcttttattttattttttttctttgagacagagtttcatttttgtttcccatgctggagtgcagtggcgcgatatcggctcaccgcaacctccgcctcccaggttcaagggattctcctgactcagcctcctgagtagttgggtacaggcgcctgccaccacacccagctgattttt

SEQ ID NO: 73910 - DNA, 1073 bp, Homo sapiens
ttggattttcacaaatcgtttagtaagatgttctctgccaaaatatattgcattcataatcttaaatccatgaggtacactttattcaacagaataaaaaccaactattttgtcaccattgagtcagtgtaactgattaacacattgttctcattgaaacatatggctagctcataattaactgaaaataattcagtggccttgtctggctttaaatcaagtaatgttctacttgaggcagccatggctgacataatttactatgttagttatattgtagtttaaatcatatcagttcatttcctctctggtattattctttcccatcaagttctatttctttagctatagaatgcctctaagccacatctgtgttggtctaagtcatgagtaaactttttaaataaagtgtgcaaaatgtgttcttatttataccgaagatgttttcaattaccattaagttcattgttggtctgatgttagcagcttaaatatttgaagccgctctctggaaatcagacacacatccaaattctaaaaatatggtagattcttcattttattgtggttttctgagcaactgttgattgattgcacaaagcagaattccctttgatgaacacaggtttagtcagaatgctctgtgtgggttagtatctgtttcccttgaaattaaccagtctccccattcccaacctttctgccaccttagaccttttcttcatgtaccaccaacgaggccacatccttcacctatttagatgagttagtattgtttttcatctcattgggctgcacttttttgtgatatcttttccccccagtataatcaatgagtgtttattgaatagctagtttctctgtgcttatttctttaggttctatttgatgaacagaaaatttgtccactgtaacagttatggtggtgacgaattgcaataaagatttatttcttgcttatgctacatgaacactatgggtgcaggggaaagagggtgaggttggtgctctactctctataattactcaagagccaggttgccagagccctcaaggctcatctcagaaaggga

SEQ ID NO: 73911 - DNA, 1065 bp, Homo sapiens
ttctggggaggaacataagactgaaccgggggagatttttgtagggaactcatgagaactaagggatagcctcgatgctgaggcctgcagagaccagacatgacttaggacgtggatgaggctcacatacttctgaggcctgggtcatccctttgtgctcatgggatcctgcccatcatggtcactaaattcctttcaatccgtgattcttccataactgtcacgtcaaatcacttacttcaaatgacaaatctttcacttattgcaactgcagcttattcaccatttcagttcgctcactgctttctctattcttgctcacatttctgtttctactcccaggacccatagcctggctctctctgtctttttctgttcaaagtcctgagagaccatgtcatgagtgaactggctaccaccagtcttcttgaatccgacacccttccctggtgtagtcacctctaaccaggggtatgaaagcaaatatcttgctgcctaaacacgggagtgtttgccttggaatgggctgtaaggactcctttccaaagtgtggcgagtggcaccatccttgaaaatggttcagggatggcattagaggagaaagatacatgaactgcccttgtcaacactcttgctgtccaaagccagcccctccacctgggtactgatgtcatccctgcctttctacaagagctcctgctaattggatgatttccctctcttgagactatgatggggattgagcataatttttaacaatctacagccccatctgctaagaggtcatggagaacacatggaaatcacatataatacaggtgtaaggcttctcgtgtatcttgatgaaagaaaattactgaagagaaaataaaattgatttttgagtgttgaatttgccaacccaaaagaataaagtgatgatattattaaatatattcatataggaaataaggaataattttactgaaattgtagcatgaacttagacatacatcctggaatgggagatttgtgatcatatttggccttacttatctaacatcttattatctttatccttgagcc

SEQ ID NO: 73912 - DNA, 1087 bp, Homo sapiens
aagtctcctaatctggaaaaaaaactatgccatttaacattttcaaaagcacgcagttaaaaattctcatttccaagacaatttaggaagtaaaatagagcttttgaattacttatgaaccaattttcctggctatcaatgttatttttcaattcctgatttttcttccatgtacatgttttaagggcctgttgaggtaggtatggaaaaaaattttagcttctcgcagaaggtcagtaaattatggattaacatgtttatggtacttcttgttgagttgcagtgattaaagtgttaaattctttattgtcccttctgaatgtagtaaaacctgacataaaaacacttgcagaaaattaagatttagttaagcttagttttttaaaaaaatcatggacctatgattctggaaggatatataaattcaagctttgtccttgagagtcaatctgtttgtccaatctgttcacattttgtagtctttgcatacaatttacattttagaattcacctctgggaaactcttctgttcttctttagagttgtctctagatttgggctgagggtgagagatgctaaggaataatatatatctaaccattattgcacagctcctttgaactcattaaagaggatcttccaggagattgccttaatttacactggatctttagaagggacttgacaggtgctgcttctatttatttttccttcaaaatgatgcaatagcagcaggctgttaggctctttgacatagctcatgacccatctgagatgagtggaaatgaaaagcaccttctctcctatgggagcaagggttgggttcaatggaggaaatatagagcacagtctctgcagtgagcagactatcattggatcctgatttgcagcaaggtagctgaaaagatttactgcacttcttggagacttagtaaactcatctgtagtacatgcaaggagacaagaatgtacacatgagagaatggtggtcaaagatgatacaagcttaatagtgacaagtgttctgctatggtaatgtgctgtattacctttcttttttccttttcttttttatttattaggagta

SEQ ID NO: 73913 - DNA, 1075 bp, Homo sapiens
gactggggaagctaaaatgaaagaatagcgataataatcagtatgaaagcaattcaactttaatattttaaatatattgtaatttttagggaggcatccccagatgtaataaatgcttcagaagactgctctcactcagtaacggttttacaattcagtagcagaatagctcatcgtacaggtcacctttaaaaggactaaatgcacttaagaaacaaaaatgtttattgcccatttgcagcaattgtttctggatgattgtgagatcaatttttaaatggctttatttttagtatcacgggatgctaacactggaaggtgcttagaaaccattccctttcattctctaattttaaagagcaaagcgtcctgccttggcttcttccttttggtcttgctccctttccattcattttcacactgttggcaaagcaagggatctttttaaagccatctgcttaatgtctctcaatggtttctcattacctacagcagcatttgccaaagtctgtgccatgaacaactagctcagcctgttgtaattggcattattttaaagaacagggagttccacaatcatgtgtttgacatactgggttcaacacaaatggtgccttttctgcaggacttctcaaacccttttatagacaatgttgaccaaacttgtttaggcactgaaacttttttttttttttcccttcctcgaagatctcccgggactgacttgtgattcactggcctgattaataaggtccacaattctaagcgtggaataccattccttcaaaactgacccctgccttctggttcaacttcatataccaatgctccatgtttagattctagatcacacttagaaccaactaaagtaagcttttctgaaaagctgttctgttgtatcttccctctggggtgttttggctttgcttggttaccaactacatgggctttccagattcagttccagtgtcaccaccaggaagcctctgtttgttttctctgggtttttaagggttttttaggggttttttttgggttctctggtttttttagggttatctgacctaaggatggc

SEQ ID NO: 73914 - DNA, 1031 bp, Homo sapiens
tatttttttttgcttttaaagtagaattaggcagcattattcttagaaaatgacatttttatattgaagttcctttagctccatgacttttgaatatacacttctgctatggctattagacatttctctcttgagaggtttccataattctgaaaacatcctttcttcctactgaaattctgttgtcaattactttgtttgtgcagctgagcataatttgtcttaaaatgaaagcaggaaattcagaaagagatttggattctttggtgtttcatcattattggaaaaaatacattgtgtatctccaaactgggactttgggtttactcaacagtgttaaagataaatagtgtcactaagtgtcttttagtgtcaggcctattttggatgtggttctcttagttaattgacagagaaaagatttgagtagtttacacttggctggttaaaaaccagattcccgtcaggaagtactagcatatttttcaaattattaacagaaaatattataaataacagttcaggactaggaacaaacataattaaaagcacattcagaaaggctatataaataaggtccatcaattacaagggtttacatagcttacttccccttgcttgtaaattaccattggaatgaatggtttcaatttcattttcagtggaaatacttacattcatggatagagtattctaggaaacaaaaataggaagatccttttggttgaagggcttcttttcttgaatgcatattttgaattacatgaacataattgaagtaattaaaaattggtctggtaaagaagaaattattgtaatactcttgaacaaaagtaaatgcatctctaatattgttagtgaactccacagaggattactattaaagatagtatgcatatctgtcatttaaaaggtagcacctcaggtggactttaaatgacccaagggtatcttggtacagagcactaggagttgggaaatttagttcatgtattttgcatgttcatcctgccaaatctgtccaagatatc

SEQ ID NO: 73915 - DNA, 1024 bp, Homo sapiens
tatcagatgcaaatccttatgatttatataatttgctcaccaagttgacactaaaaaatatatggagtaatgcgcaaaaatgccaagacactattgacaaagaatgagagagaagatatgtcctttcagattaaaaactatcataatagggcaatcatatgaaatataaaacattgaaccccaaatagaccaagttaatgaaatgcagggaggtagcacgcatcagtagggtgggaaaatcaatataaagtatgtcctcacctgtcccctgtgtatcaatattttgttttggctttgggtacctagtttattaagtgataataatctgatcaaatgatggttttgcctatcaagtctgcctgtcttttcctgtgtgaacaccttgaataaaatagaagactgtgccccttatatgtatgatcaaatttacctattaaaataatttttggggagtcctaaatggagtgtagtttttctatccaatatttctgatatattttgtcctgttttttttctcttctgtgtatgcctacccaatttatattaggtggtgtaaaattaataccagtttttgccatttttttaagtatgacaataaccacaattacttttgcaccaatcaaatattttcctggggaacaaaatcaattccatttatatttcctgaaatattaggacaagactgctaataatatatatttcagaagataatagcgtattttaaaaattgctaatgtattaagccgcattttaaaaaaatttctaaaagtaggcaacatacagaatgtattttcaatcaaaatataataaaattatatattcacttcaaaagaattggcaataaatatatatttatgtatgtatttattaaaaacctcttagcaatttaagagatgtatctggatggctctttgattaaacagaaattaaaaacataaattttaacattttagaaatggaggtgcaaaaacacattttatccaaaatataggattcaatattaagattaaaaatttagcaataa

SEQ ID NO: 73916 - DNA, 1171 bp, Homo sapiens
aaaagaagtaagcatggagaggctggagagggagtaaaaccatttcttgttttggcagccttcaaaccttgtcctcagaacttgagagtttttaactgcggcctttcttgaagcaaaaagttgatgacctaggagtgacttactaaatgcaggtggctggtagaagaaataaaacaggacctcaccccttgctggaatgtgcaatttgtggtaaaacttgagggcgcattatgatatgttgacagcattcctcttgaaagatcaggacaaaaatgaaagctagagaagcaaactgcatttagattgtgcagttgctctgtggtccacagggctttgtcatgagggagtgtgggatacagtgggatacaatgaaggaaaaggttaccgaagattgtaggggtgctcattccctgcattacagtactagggagaaaatgaagagggccatcgtctgtagtcagtgatagtgctaggaccagttgacaagtgagttagcttttatggctctttctggatctgaattctttttccaacaggaatatggtagccacactacatcacaaaactctcatgtgtttttgaggtcttgccagattgctcctcaccgtggcaatgatgtctatggggagaatctgtaggaagcttactgagtcttttagccctgaacagagcacctagcttctgaatggaaggacggttgtcatggaacattccagactgctggaaattagcttggtggttctatctccttcacaaacccaccattgtgttagctttctaattacaggactttgcaaaccaagcgtctattctaaggaatattaattatatcaaatgtattgtatatactaaggatagttactaaagtattcactttttcagtcatgtgtatgtgctgtatattttaagtatggagtatagatatacatgcagatatgggcatccattgtacatctagatatgagtggattatagatatggatgtgagcgtgaattgtatacaaatatggaatattcacataaaggaagcctagttataaagggaagaaagggccatattaaggcatttttattttttgaagcagatctgtccctccttattagccttgaagatcaattctgaaaatctaactaatttgagaaaaaaaatgacagtatatatatgtaataa

SEQ ID NO: 73917 - DNA, 1062 bp, Homo sapiens
gaacgagattgaccttctccattttccaatatgccattgcaggcattctgtgtccaccttacttttgcttttctctgcaactctagttgtacctttttattttctttctgctgtttactttgaatgtgtgcttcagagcgtcctgcatgcattgcttggccattgcactatgactggcttaagtaagttgaacaaacaactatttgtagaaactagaatcctggttgatatggatttatttcaagcaagaagaccaaaatcatctcttaatggattatagtggcctgcgaggacctttaaaataagaagccatattactcatttaattaaggctttgatgaaagtgcttaagatttttcctacaactgtgccatgttttctaatcttctgaagtacattaaagatagatagcccccgttctcaaaggtacttcaattaaaaacaacaggagcaccataatccttggtagaaaatacttggaaaacttgataaaaggagtgaaaggaagacaatcaaagttcaacattcatcgatttatttttagaaaatgcaatttaattaagtatagtctccatctctttacctgctttcactacatcttgagagactcgggaaagctttttttacaatagaagatgagtgaataacaatttctgtgaaaaaatatgtttcttcttaaaaattattggggccattcttcctagaaaaagtaggtgaacaaatataattttttataaaatgttcctatgttgtgaaaatgttgattggtaggactctatactctagaaatagctttgtcaaaacattatatttattttggatgtctttacagaacatttgaatttgctgttagtctcaaagctttttctaagatcagcttttccttaataatcaagcagaagtatgtttttaaaagtactcggaattatgcagccttagacttgaagcaacactgaaaactcacttgatgtcatgctcctcaaacttcttatattttcagactaaagatatctacaacttgtgccagattaccaaccacttttttacctggacaaacaactt

SEQ ID NO: 73918 - DNA, 1034 bp, Homo sapiens
cattaatatatactatttatattataaacttttttaaaaaaaatgagatgagtttaacttacattttcacttctgtgccttctagaaaatagaatcatatggagaagtcaaaactttgtcacagaattaatgtatgccccaggttacctgcattattcatagtaaggttaatctttgggataattattgtcccacttaacaaacattcacagtggtaaattacatagcaccctaaagctacagaaatacaggacaattaatgaaatgcaaaggtatctgatctgattctagtgctgacctcttaaaagtaaaatcattgctattattcctgttaagagaattttcacttcatggaatgggcctgtgcctccaagaataacatggagctgttctcaagttgtttcactttttttgaaagttaaccttttgatatcatggataaaagttaacatttgtaaaactcaagctgttagcccaaatgcaaccttgcctcctatgttagtacattacgtcaatgacaaatgagccataagtttcaactttacagtagtagtagataccttgacctttgagacctcactcaagtcataccatgggtgttctgatattttggtggtgtttgcagtcatgtgcaaagaaaaggctatgttttaagttgtataggtcttaatcagtacagatttctgttcctattcaaatataaactttataaaaattttcagaagttattcagcaaaagaattaagaattcaaatgatgccgtttttaatgaaattataaaattgaaggagatctgcagatgtctcctgaatccttggaaatacgaccaagtcatagtgcagtcattaatggattttgcatgggtaagtttcaagtctgaaacttttcctttgttaagaagtccagttaatcaattgcattaaattaaaagatgaatgagctctagagatctgctgaatagcattgtgcccatcgttaacaatactatattgtgcatttaaaattttgttaggagggtagataatatgttaagt

SEQ ID NO: 73919 - DNA, 1044 bp, Homo sapiens
catttcactgggaagccagtgattaaactgctaaaattacgattctaggtgacaaatctggcagcatcagaaaactagaaaaaagggaattatttcaaaggtttttgattatccagacatgagagataagggcctatattaaagcagaaggaaagaaatatactatagagaatatgataaatgaggtagaaaagaagagtatagtctttcaaaaacttctgtaagttttgaaaatggatcacattggctctcaaaattggttatgtgtaattatcatctgggaaatttttgaaaagacctatagccatggtaatgtttctgaaggcctagggtggggcttatggttgatattttaagtaaatggctcaattgtttctgacacagatggtacgtagatcacgatttgagaagcatcaatttcgtagatagctggagaaggaaagaaaagcaaggtactggggaactatcaaacagctgttctgtgcagtttgctatggccattgttttctggttttaaactttattcactagacatttgttaatttaatattttagaaaacataagtcaggcaccatgattcatgcttgtaatcccagcactttggaaggctgaggtgggaggatcatctgagcccaggagttcaagaacagcctgggcaacatagcaagaccccatctctacaaaaaaattaaaaaattagccaggcagagtggggtttgcctgtgatcccagctacttgggaggctgaagtgaaaggattgcttgagcccaggaggtcaaggctgcagtaagtcatgattgtgcctctgcactccagggtgggcaacaggccctgtctcaaaaaagaaagagaagggactcatcaatatattttgaaaaggaatggtaatgagagtaaaacttgtctgttaacatacattaaaatgatagaagaattttaggaaagtctagagttctcaggtgacttaaggcctccttggtcagtgtggacgccaaacactcagatgttattttcaaaaccataagattagataaaagaagac

SEQ ID NO: 73920 - DNA, 1217 bp, Homo sapiens
tgcattgaccttagaagtaaagagataatttgggggaaattatagtaacacttcagtgatccctctaaatacatctttcactgtaacaaaagagcctctgtggggaattagtgacttcgtgccatgatttctgaatcgtgatacaaccttattgaatttatgaaggatgaggtcagaaagccagacatcacttctaggcttaataatcagtttggatttctcattgtgtagaagtaaacaaaaatgtagttgattccagaggtagcaaaattttatatctacaactaaaaatataatggacccataaatgaacataattagatctgaccaccaaatggcatcaggacattctgactacgggttgtggcttatggccagcagtccatctggggaccagtccatctggggtccactccatagcataagtcacatgacctgtgtaaagcagctgacagaaaaacaaaaccaagaatgccttgaaacatcttatattttatgaatgaatactaggaagtcctttttgtttttctgttctttggttttaggtatttcaaaatctgttaaacaggtgaggctgactagggaagccaacaaatatagcttgtgattttggacagttgtgtttccaagttgagggcacttttttgatcaacttccaatcatttataaagcaaaagatagtatccaattagcgcaaatttatgaagtttgttttatgttacatggggatatcataaagaagcatgtttttcattactgctgaatacagcctgtaagatatgcatagcctgatggtcatcgttcattcctacagatatgatgcctcttggcatatctcttaggtgaaagagtttcccttctggtaatgtcctagggaaaaaggtcacttgtgtccaggagattaaaaccaatattaacttctacaatatgtagaggacaggttagtcttggaaaacactttttaattatctgatcatgtggctagaatatgtaggctgataattagactaccttgctatctgaacaccagaaatctcccctgagcccaggctgagatacagtactttcttctcttagatgcttttggttataagttttttcctgaagttgacaggaacatgaaaactacacaacatttaatttttccttgaagaagtgcttatattttcagaacacatagtccctaattagagtaaattactcctgatggaataagc

SEQ ID NO: 73921 - DNA, 1085 bp, Homo sapiens
attaggaatctgaagattccagaggctgtgtcccaaatatttgctgtggttcctgatggtttctatgccaacagtagattattgtattgcgctggaactaatctctttcttctccaaaccactaggatgctttacacatcttctttgtggtacttaacactgtaggtttaccttaggtaatttcttgtagccatgcacaggttccttatcttaatagtctatcacagaggaaataagacagagtagctctcttgagggacttctgcatgcctttatataccttcaattacttgtttactgtaatcaataagtatttgtcgatggatgggtgactgggtttatggattcagttttgagtcaaaaacatatgcataggttgttacatcgagtgccttttgttgttatcgaaaggggcaccatcatgggatagtttttagatgaaaatttggaatgggggttaggacattttactttgctctttaagttcatctgtgtgtatgatttctatgcatgatatacatcagtaatttgtaccagactgcttgaatagcaagcatattacaaatgtgaatgtagttttctgttataaattttacttaatttttttttttttttttgcttagaaagttatatttttctgggagaaaaacttctcattcctttcctctgctacataattccccatgccttctagatttttttccagtgctaataatggagactcaatttcttgagtgctaagatatatttgccatagtttattatataaccagaaaaaataaaataatgtagaaagcttaaattattaatggggcatttgttttctgttaatcaaatttatctcatttaaccctgtaacactagcgagacatgtcaaaagatataaagaggagaaacaactaaaatatgaacctatcagtggaaatacaaaggtataatttttaaaaagctttaaaacataaaaatgatattaacaactttttaaaaaaatgcatgcccaagtggctatttgacaagtatactacactttcagtctaccctattactttaatgttcacagtgtatactgctatgtttattttatt

SEQ ID NO: 73922 - DNA, 1646 bp, Homo sapiens
tctttgctgagaccactagctggctgattccatcttgtccttctggtatctgtttaaatgtcacctggctagaggaggcttcctgactctgctgtgtaagatagattacccactcccttctcatcactctctaacctcttctcttgctttggtgtttgtcttagcaattgtcactacctatattgtatatatatttattatctttctgtcttttacactagaataaaagttatgcaaaggcaagcacctgagtgtcttctttacctatttccgtagcctataactgtgcctggcatacaatcaatatcttccaaataaatgagtgatacttgtggttttggcaaaatatacaggtacggacaacttcaatttctctaggagccttctgcaagtaaatgcttgaatcatacaaaaacacactctattcaaagtaaaacataaattataatattgatcctgattagaaagcctattattgagtgtttagccaggatgagttatatcattttcgtgaaatattacataaactcgttaagtgaagaaaataagaaaaacataaagaagaacaaaatgaaaggcaggatatagcactgcacatattagtatcacacacacatacacaaatggtaactatcaaaaaaaaagaaaagtctcaagggaaattactctggaaaaagaaacgtgaaaactgtgagtaacaaatgggaatttccagccaagccagttatcacaataaaagttcactgttatccttctatctgatcaagccctgtttgaagttgctgacccctcttaaggagatcctagttattggcaccagcccctttaatttgacccatgattgggtactcagatatattgaatggaagcagaaggattttaggaaaaaaaaaatcataaagtcatatttcttaacctttatttgagaagcaattataaagttacttttcgcactatattctgatgctttccagttttcattttccaaaaagatatttttcgatttatatataatttatctccctcctcttccttctcccttcctgcctccctcctctgctctcaggttccatccaatcaacaacgtagattcctccacctccccgctcctacccaccccagggccagggtacagtagcttttattgaactttctatgggttagttttgagaggaattcaggggaagaatcaatgacaaaactctaagaatttacagctcgtgtgtttgtgtgtgtgtgtgtgtgtctttgtggctgtgtgatatggtttggctgtgttcccacccaaatatcatcttgaattgtagctcccacaattcctacgtgtcatgcatggaagggacctggtgggaggttattaaatcatgggggtgggtctttcccatgctgttcttatgatagtgaataagtctcacaattataaagcagagtttccctgcaccagctatctttctcttgcccaccaccatgtgagaagtccctttgcttttccttcatcttccaccatgattgtgaggcctccccagccacatggaatgtgagaccattaaacctctttcctttataaattatctagtctcagatatatctttattagcagcatgagaactaatacaatgtgtgtgtggcggggggtgggtgtgtgt

SEQ ID NO: 73923 - DNA, 1043 bp, Homo sapiens
ccaaaaaattgtatgcatttatcatatacatgatattttgaaatgtatatgtactgtgaaatggctacattaagctcattaacgtattattacatcacagtggccagtttggattactttaagaggcatgtgaaaaacatgaaaagagtttgaagtagagaaacaaagatgtaaaagccaacatatttaaaaggttatcatttattacacaaatattacacacagcacagtgctactgtgcattttacctactttgtctcattttaaccctcccaacaaacacataagttaggcatcattacccacattttataagggcaggcgctgaagatcattgagatttacaaactcacttaaggccatagttttaagcagtggagcagaaattcaaatagaggtcagaggtctccttaactccaaagtcttttctatttttttttaatcctagtgtagagaaatgtggatgatgatttgagaatgacctttaaatataaagtgtgttattttgtaaaagtctgcaactacatattctttttattcctgggaatagaagaagagaaataaaaagaatgaatctatttgtagcatgaaaaatttgagttggttataagaagtagtttcctgataaaagttgtatgtaaaactgttcttgccttgaaatggagaagtccaagcagaatagattccacattgtgccttaaattgtagcataagtccacatttaccagtatttagtgcagagatgaaagcctaatctagtaatctattgctgtgtaacaaactatcccaaaactttgtggcataagacaacaaccatattattacgctcgtggttctctgtgcctggaatttgggcatagtacagctgtgaagacttgtctttacttcctgatgtctgaggcctcagccagggtggcttgaatgtctggggatgggcagaatggctcatttgaggtaatgtttctagggcttctttctggctgttggctgagttccttggatcttctccacatactgtctttggggactgaaatgggcgagat

SEQ ID NO: 73924 - DNA, 1019 bp, Homo sapiens
tattcacctgtatgtgtgtatatgtgtgtgtgtatgtgcgtgtgacgtgtgtgtgtgagatgtgggtgtgtatatatgtgtattgagatataggtatacacacacacacatatatatacgtatatatcacacatatatatacgtatatatatgtatatatatacatatatatatgtgtgatatatacgtgtatatatgtatatatatacacgtatatatatagtccttgaaaccgtttggctcaaaacacctctattatttagtttttttctttctacagaattctcaaactttccatatatttttcttaagctgcttcttgctccccttctcatcttgcccatgcttagatgctgtcagatcattcattttgctacagtttccattcattttgttgccttcactctgtctgtgccaccttccctcgtggtttttgattctcagaacttttgctgaggtgtcttcacttttcttttcttccatggtctccctaaaacccatctaccactgtgattgtttttctacttctattgaacattctcactttaaggttttatggagcatttaaactccttctttgtatgttccccttttgactcttcatattgtcatctttatcatcctgaatggttgcctcctactttccccttcagactggggttttcagtccatctttggtggaatatttggtctccacttatttcatttttattcattattgtcctggttctttgtgtagaattgcctctccataaataagccctgtttctccttttgtagaacagtttatttttctgtatttgtttctccacatcttgttcattctagcaactttctttttactcatttgacttttcttccaacatttgaaatcaaacatcaatttattttataagtatttcttttgaattgtcatgcaacattctaaactcaaatcataaagtcagagaattttagaggtagatagaaccataagtatcaccttggccagaccgtatgtattaccaaaaaggaaagta

SEQ ID NO: 73925 - DNA, 1055 bp, Homo sapiens
agaggctcctgcagctcaaaattatgctgacctcctctggctcccaggattctgcttgatcttagctgtcctgttttgattcagtagctcccagaataatcccaaatgcacatcatcacagggctctgaaagctccataattaatgaggaggtgggtgctatttttctttctctacatgttttgacattattctgggcattgtttgatgcatgaaggaggctttacgtaaatagtaaaaaagctgttttagttttactgtcactcagtttttatccctgtaataaaacagtaatgcagaatgaatggctcaaaactgaaatgaaatgaagatggcaaagtaaaatagtatcccaaaagttagaaaattaattcatttggtatgatgtaattattaaataaattttacagaagcttctctttgcagtgaagaaatagtcaaattcaaatgtatcataggactttccttagatgacacataaagatgtatgtgccaaaagtatgatctatgtaagtgaagactctgagcagagaaattaaaacatgtagctttcatttttgttaaagaatcttcaaagagaatttcactgaagctagttggatgtagtaacataggggaaaaagtatttctaaattgcatctacatgtgcaaactaaaaggcatacttaggaatcatctgtacaaactaaagcaaaaaatataaaggtttcatctttgtgtcattatctgaacatataaatatttttaatgggaggaagctatcttagataactggctctgaattcatttgaataattatatatagtttaaataagggtttcttcatttgaataaccaaactaacaataagtgaatcaaaacaaaatgtatttttcttatgtaaactaagccctgcagtgaacagcatggggctgatgtggtagctctgtaatcagtgtaacccaggctctttcttactgctctgctatcctgtaatgtgactacctatgggcccaaggtatttgagtgagcctgaccatcacatctttccagccagaagtaaaaaaagaggccagg

SEQ ID NO: 73926 - DNA, 1050 bp, Homo sapiens
ttccaaccactactgaagttctgtagttggggtgtgtgtgcgtgtgtgcatgcatgcgtgtgtgcgtttgtgcgtttgtgcgtgtgcatgtgcgtgtgcgtgtgcgtgtgtgtgtgcgtgtgtgtgtgcgtgcatgtgtgtgtgtgtgtgtgttcttcgaaaaaatcaggagtctatttaggatgcattttcaaagtcctcctccaggaagtttaactcagttccctgcacagaggaattgctcaaaagattcttaccaagtaactgttataagaaaaagaaactccatttttacatgaagaacttttctttgaaaacttccttacaacattgaaaaaatgccgctagacctattttagagtacttaaaaatcctcatcagcctcaggcccgccccttcacttgctttgtagtaagtagtgtatggggttccccaggataaagcacaacccagattccacttgctgcatccaaatgaatggtgtcttacgtagcacccctgagctaggcaggaccagaagaaacaggagagtggcttttagcctattgtcactattagaaactatgcagtgcggtaggagaaaaccctgttttaaggcattaacagtctctgctcaggcacttatcccaggtattgccgtattttcatacaaaacttatcccagcctagcttttgcatgctgcccaaatgcaaaatggttttcttgaaaaatgtttgtgttaaattaaaatctcctagagggagaaacagtttgtgggcagaactcgcttcagtaatatcctgtggttattttgagtgtttggcattgttatcaacgctccatagataagaattgttctatttcacaagaggccatgttgcagattacaactagctcatgaacacaaaagtcaaggctgaattacatttatatagctatagtaaatcttacatctactttaaaattgaggatgtgtgggacagcttctgcaaacatctggtaccttctaagattttatagactatgagaaccagagagagatttctaaaagatgttgccaatgaggagag

SEQ ID NO: 73927 - DNA, 1481 bp, Homo sapiens
agacaatttaagtttttcctttccaattggaagccttttatttttttttcttgtttaattgcactggctaagatttctagtactgcgtttaagataagtgataagagcattcctgccttgttcctgatctcagaggaaaagctttcagcttctcatctttcagtatgatgttagctataggcttgttatatatggcctttattatgttgaagtacatttcttctatacccagtttattgagcatttttcattataaaagggcattaaattttgtcaaatgccttttctgcatttatggagatgataatatgctttctatccttcattcccttaatgtagtatttcatatttattgttttgtgtatattggaccatccttgcatcccagggataaatcccacttgatcatgctacatgatctttttaatgtgctattgaatttggttaggtagtatttcactgaggatttttatcatctatgtttattagggacccaaaagacatatatagaacattctacccaacagtggcagaatacacattctttctaagtgcatgcggaacattcttcaagatggatcacatgttaggctacaaagcaagtcttaacaaatttgagaagattgaaatcatgtcaagtatcttttctgaacacaatggtataaaagtagaaatcagtgacaggaggcagattggaaaattcacaaatatgtggaaatttaataatatatttttgagcgaccaatgggaccaagaagaaatcaaaaggcaaatccaaaaatatcttgaaactgtgaaaataatagtacaacagagcaaaacatatgggatgcaacaaaattagtactgaaagagaagtttatagcaataaacacatacattaaaaaggagaatgatctcaaaaaacctaattttctacctcaagaacctagaaaaagaacaaactaagcccaaagttagcagaaggaaggacacaataaagattagcgtagaaataaacaaaatagaggttggaagaataatctaacaacaaaactaagagttggttttttgcaaagataaaattgacaaactaagaaaaggcagactaagataaaaagagagaagcagcaaataaaattaaaaatgaaagaagagacattaaaaattgatgctgcagacatactaaggatcattgcactactgtgaacaattacacaccaacaaatgggatgtcctagaaagaaaatgaataaatttctggatacatacaacctaccgacactgaaacatgaactaaaagaaactctaaacagaacaccaacaagtaacaagactgacacagtaataaaaaacctctcaacaaagagaagttcatgaccagatggcctcattggtgaattctactaaacatttaaggaagaattaatgccagtccttctcaaacccttttaaaaaattggaagagaaaggaatctttctaaactcattttatgagccca

SEQ ID NO: 73928 - DNA, 1035 bp, Homo sapiens
catggattagggatatttttccctagaagaagagatatctaagttgaaacacaaagaataagtaggatcaaatgaagcagaaagagagagatcagcagtatatatatatatatatgtttattgaatgagtaaataaacgaatgaagacaatttgacaagaagcacctgtaaagcatatcactgagaccttggtgttctgttggtagcttctctttctgaaggcataaggtaaaactgtccaaatataaatttccctcctagtttgctcactctccagaaagctctgagcattttgaaatatattcttatgatagctcattttataacataaggaaactaaagctgcctggccttatggatggagccacatagttatagataagtcagacaccaagataaagagcatttccatgaagtgaggtagaggcaggtgtggaatccaagcttactgaatggtctaatgctgacttttttacacctagaatacctttgtgaaaatgaaatatatcaagaaatgaggacatttaaggaaggcaggcagcagaaatatgtatatcaaaaagctgaaataattggatgagctattctctatgaaaaccacatttttatcataactggaaaagatctgttataaactgaacaacagagaaatgttaagaccttttatatctgtcccccttgacactacactgagagctatgctgttgttatgttttccgaatccctctgtggcttctcttgtaagtgagcaggacactacagaagctgacatgcgaagggccctgataaaccagaatgctttttccatacagtaaattcgaatggttatttgagctcaacagtgttttctctggtgtttgaaaagcaaaaatagaaggatccaccaaacactgcaagtcatggaaactatagacgaattgggtgagttgagggccctgtgatggcagagagatgtctttatccgaggcaatggtgcacaggtagacaagcacactacagcagctctgagacatttccagagccttccttcgaaag

SEQ ID NO: 73929 - DNA, 1030 bp, Homo sapiens
atcatattttattaaatgcaaatattctcacctctaccatacattttgtaagcttccttactcttgcacgcataaggctcttatacttttctttttttcaaatcatgattcaaagagcagagagaaaaatctaacaaatgaagcagatgcatccacaaccatttcctcatctgttcactcttccttcaaagataagagtgtttaaaaatccctttaggctttcagtttatttctgatctttgtgttttcaatcactgacagaggtagattggcatatgtccttggtgttcatagacacagttaaagttttctacttttgctgtatacagttaaggtttctaatgtgctgtggccatttacatgtcttattagcatgttgacatatatttttaacaagacttggtattctcagtaattgccattcactttcctgagcacctgtataccagagctcatcagattcatcatttagttaggccatttggaattgaactgtgatgaagtcttatgcagcagacaagaagacatgtaaagagtatggccattcatcagaaaacagcagtactatctaaggagccatgcacaagactagggtgtcagctagaatattctgcacttcagtttaaaaaaaccaactcaaactggctttcataattgtattagtccattttcacactgctgataaacgcatacctgagactgggtaatttatatggaaaaagaggtttgagtgactcacagttccacatggctgggggcctcacaatcatgatgaaggcaaggaggagcaaaggcatgtcttacatggcggcaggcaagagaagaatgggagccaagcaaaaggggaaaccactcataaaaccgtcagatctcataagacttattcactactacaaggacggtatgggagaaaccacccccatgattcaattatttcccactggctccctcccacaacacatgggaattatgggagctttaattcaagatgagatttgggtggggacacagccaaaccatatcaatactg

SEQ ID NO: 73930 - DNA, 1027 bp, Homo sapiens
ctccacagccatttcttgtgaaaataatggctgcacctggacaaatatatggtatccacactaatgaagatacgatagcttctatttccttgagtataaatggaatatatttgaatttcccaagtagtaatctaacagttcattcattgacactgtaatataaattagaatctcataggtaaataaaacattacccttaaaacatcaaatctaattaaatccaggtaacattaactgttacctggatttaatataaaagattagagctctgtttgcaaatttcaatatttgcctatatgagaatagcagcacctttcccccattatggaaacctgctgagtagaaagtgggaagacagaatttttaaaaaccacaggagccgagacgggatttacctgcagccactgcttttcaggttaccagtagtgactttttaaatgtataatcaagctgcaaaagacaatgaagaagataaagaagataaagaggtaaaggtataaagctacatgtgcctccaaaagagtgggcaccttagtttattttaagagaaatacgttaagatgccctaatatttttaaaggaaaaatacttgtatttagaaacctaagacacagcacttaaacctgttatcaccacacctcctcttccttcccatccctccagaattataaaatgtttctcctttcagcccttcctatcctaatgtcagcttctttaatctcagaatgccaacagacttctgagacattatcttagtaatcctcttaagagagaggattcatgagccagatatcttcctaaaatccacaggttttgcaagtcagctaggtggaaggagaattgctttgtacatctgtagcatctgtctgcattgaagcttccaaatactttcccgaattatctaattatcactttcaacatcccttggagagaagcaggcagcggtcaggaggtggtaataccgattctgtttcttaaaggggtagagcgaatgatttgtaccacaataagttggcttatcctgcag

SEQ ID NO: 73931 - DNA, 1319 bp, Homo sapiens
cttagttgaattttcaaggcattctctattaaacagggaggtgggaggtagggggatgctatagtaaaaatggttatgaatgagagtgctgtatgaaacctaggccctttcatgtttgctttttcatatagggtgacatatgtgattctcactttgtgaaactgctttttgaaacagagaaaatagatatagtactacattttgccgcacaaacacatgtaggtaagcattgttttatgttacagttatgattggcagttctctccccgccctcgcccccctaatacttatatttgaaagaggatatatcatactgtactagaaaaacaagcccacggtgactgtgttatccataaactcagcactttttagatacttttattagcattgcaaggctatattagtgaaatacaaccttgactgctgtctgaaaacttgagtttaaccaattcaggatagtgaaggggagcaacggggagatgggccgtcaactgtattttttatgttgtttttcttaaattttgttgtgggtatgcagatggacattatttatatcattttatgaattttagatattttctaataatttgacagttttattatgaaatataacatattcaaaagcatttagaaatagttaaataatgataatggagtacccatgtatctgtcacctgaacaaaagacagaatgttgctgaatcctcttcagtagtaaatattactgctgcctattaccagatttaaagttataatttcctttgcttttgtctacacttttgttgtctgtatatttatccctaaacaatacagcttaacttagggtgtttttaaatatatgtatatttaatattatatatataaatatacttaatatatgttaaatatatattttatatatatatataatgatatgtagagttttttttgttttttcaaaatcgatgtagattaatccatggagttggatatagatacagtttgtttgttttcagtgtcataatattccagtctaaaaatacatatatacacatacactgtagtagtttacttaatatactttattcttgatggccatttgggttctttacactttggagcaattttgagcactactaccttgaacatgtatcatgatacataagtatacattacatttggctatataacagatcataagatctgcatacttcacgttgagataatgtcaaaacatgttccaaagtaattataccaacttccactcctccagaagtgtgtgacttcctgttgctccagatatcaccaaatcttagttttgtcagtctttccatttttgcc

SEQ ID NO: 73932 - DNA, 1027 bp, Homo sapiens
ttcttttgtaaaagtcgtagataccaaattttgttttaggtataatatgtctaccccagaacacatacatttaaactttcctgctattagctatgtttattttttatattaagagtataattaaatattaacacctatgtcatattaaaaaacagaaactttggtgggacatttctatagattatgaataaaatataaaatgtgaagtggttgtaaagtgaggcaaaaattttaatacagtgaattgttcaaataccccagatattgcggtttattgagtgaaatatcagttatcagctgaatttcaaggaaataccacacgttcatttgaataatctcttgcttctgaatgttgtgttcattatgatgtgatttacctagttaagcgagatttaagaagaattgtgctttttaaatttccattttggtaagtagaggtgttgagttgtcctcatgtctcagtttcatgtaagaccaaactagttgatgatttttgttttaatgtcaaggtgaccatgctcttctgtgtgtcagaatcaacaacatagcagtagctgttggaaaagaagctaaactctacctgttccaagcccaggaatggctaaagctacagcaaagcagtcatggttatagctgtagtgaaaaattatccaaagctcagttgacaagtgagtatatccttttttctttgatcattagatatagtttttttcctcctaatgttgaaatatagtaccatatgtacatatgttatgtttcctgacagcataatcccactgtgatgacactttgtctagtacattttaagctgagttttaacagtgcctttccctttttatcattcatcgtttttgaaaaaaaaatccagataatttatataggagtcctttctttcattgactctttacagtttgcataatttatgccaatatggaaactatattttgacccagtggcagcatggaatgaatggtaacatttgttgaatgctaattatctgccagcactgagctaaatgccaatgtat

SEQ ID NO: 73933 - DNA, 1040 bp, Homo sapiens
acccgggctacatgatcccgtgcaactgcagcgcgtggcccagccccgggctgcagccgccgctcgcctacatcctgctgccgggcatgggcaagccccagctggacccctaccccgcggcctacgctgccgcgctatgaccccgcggggccgcctcgcgaggaccggtgtgcacacgtgtacatatgtataggtacgagcgctgcggcctccccgtgcgccctcccgcgaccgggggcccggtttgtatgtacatagaatgtataggtgccaggtagaggcagagaggccaggcggggcaggagtggccaagcgcgcaagggcgcgggcgagcaggcctgtgaattcgcaggatcatttcagacccgcacttcggcagccaactcgaaagcaggcggttgtgtgcggcagcagttggcgtttgctttgcacttcggaacctgttgcgttttgacccacggaggtggaggagtaactttttgacatgttggcctttccagttttgttggaagtttcatggtcggttttgtttttgtttctcattcttcttcctcgcccctcagccccccaacccccaaccccctcccggtccgtgttgcatgcacgctgttcaaatgtgaggtctgaaatggctggcacacgggaaaagctgcttgtgtcattcgtttctgggagtgggatggctctgagcagcctcgcctccctgtttgtactatttgaactttgcagatctctgttctctcaagcagaactcccaaccagatccattcttgaccagtgaccggctcgaatctggccttttgtgtgagatgatcacggtttcttttgtttatcacgccatttgcaaatcagagcaagagctctttctcaagggcaagaaacgcaaacaagaaatatttgtgagatgaaagttgtcaattggattttcttcctaaacaaacaacaacaacaaactactagaagtctccctgagtccactcgcttggatttctgacacagtttacaaaaaaggaaaaaggcactgctcctattttccctta

SEQ ID NO: 73934 - DNA, 2756 bp, Homo sapiens
attaaacgccgggatgtttcatacgtatatgccagcatttcaatgcttgtcaatcagagtttataaaatatagggattacaacttgatattaacatccaaatctattgtgctcattttacgtgtgaaaatgagaaaccctcatgcagacgctagatttcccagcctctttgtcaccctgtttttaatttatctccaggttttgagtcagtaaaatgattccgcttatcaatttaatacagagataaaacatatctatgaatcagagtgatcggaactaaaatggatctacaggttgtttggcattcagcccagccctgctgagggttttagtggggctaatttctctgtacagtagattcatccctgttcttaaattgtgcctcagtgagggatatgatttgcttcacatgaagaagtagacacagaagtgcattgtttcagggaggagactttaaaattttgaaacattctttttatgcttaccttttttttttctaggtatacttcaaaagaaattatccacatattggtcacactgaccacatggttacaaacacttccaatggacagccctcgaccttaactattttcgagacagcactgtgaatccaaccaaaatgtcaagtccgttccgaaggcattttccactagtttttggactatgtaaaccacattgtacttttttttactttggcaacaaatatttatacatacaagatgctagttcatttgaatatttctcccaacttatccaaggatctccagctctaacaaaatggtttatttttatttaaatgtcaatagttgttttttaaaatccaaatcagaggtgcaggccaccagttaaatgccgtctatcaggttttgtgccttaagagactacagagtcaaagctcatttttaaaggagtaggacaaagttgtcacaggtttttgttgttgtttttattgcccccaaaattacatgttaatttccatttatatcagggattctatttacttgaagactgtgaagttgccattttgtctcattgttttctttgacataactaggatccattatttcccctgaaggcttcttgttagaaaatagtacagttacaaccaataggaacaacaaaaagaaaaagtttgtgacattgtagtagggagtgtgtaccccttactccccatcaaaaaaaaaaatggatacatggttaaaggatagaagggcaatattttatcatatgttctaaaagagaaggaagagaaaatactactttctcaaaatggaagcccttaaaggtgctttgatactgaaggacacaaatgtgaccgtccatcctcctttagagttgcatgacttggacacggtaactgttgcagttttagactcagcattgtgacacttcccaagaaggccaaacctctaaccgacattcctgaaatacgtggcattattcttttttggatttctcatttatggaaggctaaccctctgttgactgtaagccttttggtttgggctgtattgaaatcctttctaaattgcatgaataggctctgctaacgtgatgagacaaactgaaaattattgcaagcattgactataattatgcagtacgttctcaggatgcatccaggggttcattttcatgagcctgtccaggttagtttactcctgaccactaatagcattgtcatttgggctttctgttgaatgaatcaacaaaccacaatacttcctgggaccttttgtactttatttgaactatgagtctttaatttttcctgatgatggtggctgtaatatgttgagttcagtttactaaaggttttactattatggtttgaagtggagtctcatgacctctcagaataaggtgtcacctccctgaaattgcatatatgtatatagacatgcacacgtgtgcatttgtttgtatacatatatttgtccttcgtatagcaagttttttgctcatcagcagagagcaacagatgttttattgagtgaagccttaaaaagcacacaccacacacagctaactgccaaaatacattgaccgtagtagctgttcaactcctagtacttagaaatacacgtatggttaatgttcagtccaacaaaccacacacagtaaatgtttattaatagtcatggttcgtattttaggtgactgaaattgcatcagtgatcataatgaggtttgttaaaacgatagctatattcaaaatgtctatatgtttatttggacttttgaggttaaagacagtcatataaacgtcctgtttctgttttaatgttatcatagaattttttaatgaaactaaattcaattgaaataaatgatagttttcatctccattcagagatctgtatttctgtgcttcaagggattcctgactcatgttcttgctgatgaatgccagtgagttttcctgagatcgaaaaatacagtatcaaaggataccttctatcatcaaccggttctcttggcaaattaggtgtaccaagtattctaacgggtagatttcagtgggtttcagacagtttgaagcagttgctatttaagcaagtccatttgcaccattctaggaagaaagagtattagcttatgcctcaggcttgagcagtattaaatggttgaggtttttgcttttggttttggtttttaaggtgactttgtccaaaactaacaagaaacatctaccgctgttacgctgaaatcactattaaataatgattctcaaagtgtggtccctggaccagcagc

SEQ ID NO: 73935 - DNA, 1044 bp, Homo sapiens
gacatagcttacaacatgagggctttgctaaaagtagttcagtaatctcaactcccttcatcacctgcactgtaaaaaagatgtttcatctcacctgtgctgttacccatagtgtgttataaaacctggtagcagaagagaaaaagaaaggtcaaatcaaagaatatatacacaggaagtttgtttttgactaagtatttcagaccatgaagctaagaccatttgggtttaaagttgctaataacaacactttctttatatatatttaaaaaaatacatcaagagggttacacagaaggaagcagcctatttggggaaggctatcaagcagtagaaagtgatgtgaatgtctatttgttcttttggctgtttttagtttcactacagaatagcctttttggagtacataaatctataaccacacaaaatatggctagcttaaaaaagtgggagagggagatgatatgaaattatcccctgaaaagtcttacttttgaacacttgcattataatggaaatagcctcagatttcttctggtggcattccagcattattggacaatttattttctccttaagtgacattttagtacattgtgtgttatatgtaatgatatttctggagtaacaagtgtgcaagaagtgagagaaaaagaaagtacacttaatatgtaggcaggtgtctcagcactttcttttttgtacgtgaatcccattatctccagtgataactttgttgacagcacccaccaatatattcagagcaaggttttataaaatagatccagaatcgtatgactaagagacccaggtgacacgtgtcagcctcagatagttgctacattttctgttttaaagattcaaacaaaacttttcacattcttctttggggaaaaaaaattacatttgaagtcctttttcacccaaacacgttttgagataagagctcacaagtcttgacattatttcattttgttatgcgcatctgtcaaggaaccaagatacgatacagctactaaaaactgatgattgtggaacagagaa

SEQ ID NO: 73936 - DNA, 1095 bp, Homo sapiens
ttgttgaggcttgctcttcatagacatcttctcagccttgccacagccccattggttccagttgcatatggcagcccttcatgatattttaccattcaggctctcctgatttcacaaagatttagcttattttttattaatgaatatctttgatgttcagagtggtttctgaaaggaaaaggagaggaaattcattactccattatattaaaagcagaagtcctttctaagtctccattactctttgacaatatgcatgccaattatgtacaccaaaattagactggctttaaaaatgatgaacttgaggccttgagagttactgtgattgaattagggccatacacatcagtaaaaatgaactgacagggtcttgagcctgaattcaacacatcagatggtatcttaggaatgcaatgtcaatcaaagcccagttgctctcctttgtccacgtgcgggagcttgtattgctctgttgattttagtaaaatctagctctgttacggtggctttactgatgagttagagtttaaatatgaacttagtttcaacctacattagaggaactataatggagcaaactcaagagaagaaggaaaagagggacaaggtttcccatactcactgacctgatactcttcttgccgcaaacgtgaacgcttatggcattgtctcccttaagcttcacagtccttctgaactgctgttattatccccttttgacacatgaaaatgctaaagtacaagaagctgagtaacttttttttttttttttttttttgagacagtctctcactctgtcacccaggctggagtgtagtgttgcagtctcggctcactgcaatctctgcctcctgggttcaagtgattctcctgcctcagcctcccgagtagctgggactacaagcgtgcaccaccatgcctggctaatttttgtatttttcgtagagatggggtttcaccatgttggccaggctggtctcaaactcctgacctcaagtgatccacctgccttggcctcccaaactgctgagattacaggtgtgagccaccacgcccagcctgagtaagttttcaaagccaccagttcaaaag

SEQ ID NO: 73937 - DNA, 1012 bp, Homo sapiens
tttagcaagtaatttggttcacttatttacttagtctttagcattagagagacctgtatttttaaattgcagattttttccttcctcgtcaggaggagtggttatgttctgtaatgctatgcttaagtaaaattacacatttggggtatctaaattggcatgccaaattataggacattttaattgttatgtggatgtgacagattcaattattcttgaactcttttgagaaagctgcccttagcagtgattcacagtagtaaacaaaagattaacaggaaaatgccctttatgaggcttaataaatgtgtccgattaaataccatgggacggaattaactgcaatatctacatgtagaaaaacaacctgtgtcctgcttggaggttcagcatattctcttaagataaatttactctaaatatggcctaactgaagaactaagtgccacttaacctcagaactgttttcctaggtacgtcatttgggccaattgttcagactctttcttccctctgaaaccattaaccaaagccactaataagtagaaatgcagagttaagagccccttcctccctctttcaatttccagtggacatattaatgagcaataaagcagctaaaaggcaagcagctcaagaaagagaaagaagcaaagaaaggtgattgggaaaacagatattcagccctcagcaatgcagactgggctgccccgtgtgccatgtgggctgtgatcacaggaatttggagctcaatttcttaattggttctttagtcttatccaaagagaaaattggatttctagagatttcttctgtgcagagagcaattatgctaaagctgcttaggtaacagctttttcggctagcctttctctctcggaataataaagtacacccagagccgatttcagaatgcaccttaacctcaccatccagagtttagcccctcttggcagctgacatgttctagaaccttaaagaaattccagaagcatttacttcttttccattg

SEQ ID NO: 73938 - DNA, 2351 bp, Homo sapiens
tgggatttgctgttaccgcattggtgatagctactccttttattatctaatgcttggaagtgctgtcaacttagaaggtctgattagttagagagacagcaagcaaggacagaacttggcagacaagtcagttggtcactcctaaatctgatcaatcagcttctgaccacataaatgtctagttcacaagcatcttcttgatccatcagcgctgttaccattattgaagtgtgcccattagtttattgctttatataccagtccctctaggtagattttgagaaccttaatttttttctctcttgagtaatgtctttatctaaactctgaacatggttctacaaagcaatttacagttggcccctccctacctttctagcctttcctccctctgttctctctctttcctttgcagtaaaagccacagtcctttagttattgtccttcagttcatcaaacgcagcattcactgttgcggtcatgccctctctacaccatgcacaatggcggcttagactatggtgtgagcagtgaagatggtgcaatggatagatttggagtaaatagcaaagtaaagcaactggactgtgatggattgaatgtgagatttgagggaagacaggggtagtcagtcctggtttctctgtttgggacctgactatctggatgaatgaggaagacccggaagaagtaaacttggaggagggaaaggcaagcattcccttggaggatgtaactgttgagatgaccttgcatttcaacatggagctttccttctcactcccaactccattagtgtctccatctatggcgatctctccaatgatattgggagagcttccatttagggctccctggccacgaggtcatcagtggcatcacaggaggtcctaccaggaggtataaatttaagtaaggagtcttattacaagctctgaattctttgtgagaactattttccaatttttcttaacaggcagtggcaggattcagcctcagggaacccaggagacatgcattctgtagcttgagattgggaactggcctctatgttccctcaacccctagctgaaagcatctcctgtattctagagcttctgatcatcagccagctttcaattcgggggaacaccataaataccattcttcctcagatctttgattttggaggtgttttgttttttttgtttgtttgttttttccccttgtttgctttagagataccgttccagaaaacacatgttctgttctgttattctgaaagctgtgaaaacatagagacaagtgaatcagctgcaaagctcagcactccaaaaggcaggctcagggagtggctggggaagtgacagatgttaatgaaggacataaccaacactattgtcatcatgcagtcctgtaattgcaagtgcttaaggtgtaataattacgttttgttgcattggtgaatacttctccacaaagacggatagatatagttttgtttactgtaagtaaatcaaacaaaaagcttgttgggaaacaactgcgacctaattaatagctttgtttatgtgttgactctccaaagggatttacccagttttggttcattaagcgccatcaatgtgttaagcttagaattttattttatgaagatgttctcccagttttaactttattaaacatggtgtagtcttaatgacagctaatttaatcttcatttgctcagttgccacaaaacagtagagcaagacagacaaattagaaatcctcttttttctaatacgcaccactatctccacattaaagacagcttcctccctgtagtttttaggattagctggttacttgtgacctgttttcctttcagccaatagcacagccttttcctccagtccctgcacacccgtccttacaacgctctggattctccctggtagtgtgagtgaacgaggaataagcgaatctgcagttagagaattcttcgggagtgaattacagagaagcaaaaccaggcctgagaaattcagattgtagctcttttctttgtaggcaatcttatgggtgtataatgtatatctttctttctaaacccaaatctctttttagtagcgtttcctcagagaaaacaaactagaaatcgttctagcagaaccagctggagaaacacaactcaaagctaacctgagttttatttaaattctatgtttcatcttcatggaacttctctttaagaaaccgacaacggccacaattagaacatttcagaagaggaaaaattacttcttgaaaaatatgctgagacatttaattaaagtgttcagggggacaaagaactaatgtgaaggtagaaagcacaaactggggctggg

SEQ ID NO: 73939 - DNA, 1641 bp, Homo sapiens
aaaacatctctcttaccccaagaaatttccttgtgtccatttacagttaatcctccagccccttggcaaccatcactcttattgtctctctaaatttctgtaatcttttaactaaaaagaagggaattttttttatctttctgtattttacctacagaatacttttattgatcatactgtgtttttcttaatgaaattggcccaggcagtattaacacgtgaccctgcatgaacagactgtgtttgctgatggtgataaaggagcatcttgggttccattgtttgttctcttaagtcagaatatttccgttttgtgttgactctaccatctttctcattgaacattaactagaggtaattcagcctcatgtgtgtgtccacttaagttatatctctcgagagaagggacttgaaggttctaatgtctatgaggcttgactacttccatagcggcttgaatgatagcagtcattcttctttgtacatctacaggtacaacttaaagaaaccattgaagatcttcctggtaaaatggatactgaattagcagaatcaggatccaattttagtgttggacaaagacaactggtgtgccttgccagggcaattctcaggaaaaatcagatattgattattgatgaagcgacggcaaatgtggatccaaggtataaagctgaggtccatgtaaccttgagtccacattttaagtgtgtaaatgggaaacatggaatgattctgagaaatatttctaagtgctctgtttgccccagacataacattttaacatggataaattcattctgaaaaaaaaagaagaaacccaaacgtgttttccagtgtcagagatattattcagtatcccaggagagctagattcctaaaatccactcccaataatcagctttaagcaatttggagggaagacatttttcgttgttttatgaaaattagtaaattactacatagatttttatacttgtttttaaagaataagattgtcctaaaacattttaacatgatttttaaaacattaaatagatatgatcttttttttttaaatctctattgtgaagtagagctttttaagtcttaagtctactttttgcatctttacgaaattaaacttaacttctttgattgcagaactgatgagttaatacaaaaaaaaatccgggagaaatttgcccactgcaccgtgctaaccattgcacacagattgaacaccattattgacagcgacaagataatggtgagtccttcacctgcggaattcctgttgctcccaattatgttcactttttcagtttattccttccttgtaaaacttgatagaaacccctagtaagttaattttctgttaattttggctctcttcccagcagtaattcatatgcttaactacaccctcagtgctactaacaatatatccaatgtatctctttgcatataatcatatgcaaaaatcatatgttaaaagtttaccatgaaaatattccaaatctaagattcagcttgtgatgctaactgtcatactacggagtagtatccaatagaagatcacagtcattgtcactgtcacagttgtttcagcatgcttgatccccttaatgaaagatttaggtttttatatactgcaagggg

SEQ ID NO: 73940 - DNA, 1480 bp, Homo sapiens
ctacaattaagactaggttatatcatgttggaatagtggagaaattatctaatcatgttcaacattgatagaattgctgttagaatacaaggatgtcttgtattcaggacaccataagacagaaatctgcacatcagcagtgtccacatcctctgggccttctattccccacaccttgcacctccatttttcccaggcctgtattgcccagaatgggcttccgctcgcttcgttcacacttagctgtgttcttgttaaaggttgttcccatctgttgagttgctgtttatcacatttcagtctctggcatcagagacttcctttatgaaaagtcagaaagttcaaagaaacatggaaacagaatctgacatccacatgagtctctttgaggctttgaaaacatttatgatgatagaaatgggctgtcttagaaagttcagttcattattttcacttttcctgtagtttcctattttttctaagcttcaaaataacctgatacattgtgtttgaaatgtatagtttcaaatagtatgatttgattttgttttcctgaaattacaacctttattaaatgtagaaaacattaagttttctatattttaaagtataatgttatgatatcttggagccaattaattttataaggactgtttcttttacaatgacatttagtaagaaaattgtatgtaaattctatttctttgtggatttactttgtaatttataagaatagacatgtcacaaaatgaggtatccttgtgacttcatacattcaacagattatgtgtggggaggtttttacataggcattgtagactctggagctatagcagtcatcaagagagataaaatccctaccctcttagggcacaaattcttgtatggaagatagaaaataagaaaatgcatatgtaatataatattaggtactggtaaatgcagtgaagaaaactacagcagtgcatgaaaagaactagctgactgcattattaaaaataggcggctgggcgtagtggctcacgcctgtaatcccagcactttgggaggccgaggcgggtggatcacgaggtcaggagatcgagaccatcctggccaatatggtgaaaccccatctatactaaaaatacaaaaacaaaattagccaggtgtggtggtatgcacctgtagtcccagctactcgggaggctgaggcaggagaatcgcttgaacctgggaggcagagattgcagtgagctgagatcgcaccactgcactccaacctgggtgacagagcaagaatccacctcaaaaaaaaaaaaaaaaaaaaagaataggcagtatttcattgtccaggaaggagcaaaataaacaaaaagaatagatattatctattgatctcttacttggtaccaagcactattgtaaatgctacacatactgactgattttatactccaacaattttaggagataaacatcttcaaaataatcttagtat

SEQ ID NO: 73941 - DNA, 2071 bp, Homo sapiens
cagaagtgactctcaaggagtgttctagagattggattatttgtacaataagagctcctgtcattgctttggttcatatttaacataaattcagaaagtattcattgagtaattactattctccaggtgtatagtcatgagcaacatagaccttgtccccaccggcatggggtctgcagctgtggggcctcatggcttccatcggacctcacagttccatcctgtccttcactttaacacctccacatattcaactccagacatggctgggttttttgtttgttttcttttaatgtgggttttttttttttttaacactctatagtcattgaggggagctgaggaacacacacacacacacacacacacacacacacacacacacacaaacacatattctggagaagagaaacacagagaggagacaagagcaaaacccaggcagtaatgagctttctgggcatgtggatataaacaactcttcaatgcctgtttagtaggaagcatagagaacgtgccaccggaagggaaggagaatgtgatttttatcttagaccaagtacagttatggctatcctagcactgacctctaaaacaattggaatcacgcttaagtaatttggaggatgtgaagaaattggaaccctgtgcactgttggtgggaatgtaaaatggtgcagccactttggaaaacactgtagagattcctcaaaaaatgagagctaatgtgatccagcagttccacttccagaaagaattaaaagcaggatctcagagttttgtacatccatgatcatcacagtacccaaaaggtggaaatagctcgtgtccatcgccagatgagcagatgaataaaacgtggtctatccatacaatgggaaattattcagctttaaaatggaaggaaatcctgacagtctataatgcagatataccctaaagacattatgctaagtgaaataagccagtcacaaaaggacagacactagatggttcccctaatatgagatacctagactagtcaaattcacagagacacaaaggagaagcgtcgtcaccaggggctgagggaaggtggggggttgggagttacattatttcacataggacttcagttttgtcagatgaaaagcgtcttgtgaatggatggtggtgatggctgcaaaacagtgtgaatgtccttaagaccactgaaatgttgactttgaaatggcaaaagcagtaaattttatgctatgtgtattgtaccacaatttttatttttagtttaaagaaaaaaaagtatccctttcaggataaaatgggaagaaatgtttagcacgttagattccctctggctattagaagcatgacttagtgcttacagtagaaaatgagagtataaattctcaagttttatattttggttatgcccatctcaaaaatgggccaaatgaggtttacttagcagagataatgggcatgtctgtaaagtgcttttatatccttggatgaaaggttctaggaacgtgccctgcattactttgaatgaattcttaataagaaatagttgtgtgcttgtgtacataaaagaactctaaataaagaagtaacattagatgattcttggctctgccagtaatgttttggaagcacatctgagcaaagactaaatataccttgacatcaccaggttttggttcagttccataagtttccaccctacttttgagcaaatgctctatgtatgtagtccagggagcatgcttacaaaacactgctaagctttgtatccatgtagatcctgatctccaagcattgtaaacagagagactttcctttttaactttgtatggctttgtctccaaggctcaatgttggttgaaaaaaagaaacatagtctagagggactgtgcaatacttaatgcgacccaggaaatcattcagcagactgcctgggatagaatctttcagagcatcttctaagcgtcaacacgacccacatttttattccagcactgcctgatagaagtgtgacctcaatgaagtcacttagcctccaagcttcagtttcctcatccttaaaccaaac

SEQ ID NO: 73942 - DNA, 1381 bp, Homo sapiens
ggatgtcatttcttgggaagttcccaccaggaaatttgcagttgtgcaaggtcattggtgcagaggccagtttctgcatacagatttatatgcacacatgtgaaagccagtttttacaatatagacgtattgcccccacctttttaccagcattttattgattctttgatcgtattggcagtgcacttcatttctctctgtcttggctttaatagaggagtgatacttgacacaaatgtttctcaaggggcaattgtaagtattaattagtttgcagcatgccttttgaactgtgcagatgaaaggccttacgtaaatagcaaatgttacttgcgttgttgttgatctcattatgtgttttttggctactggttactactgtcttttaagacattgcaatcttcacttcagaattttgaaacattttgagacaaaatataggcagatatttaatatttggaagtttctctaccaaagaatatgttatcttaaataatagaactctagaaaaatgaatactcgtttatgtcacttctgacacctctgtcttgaattaatatccctgtgaaattatctcagaaattcagattactcagatcctgcaagcaaagctaatttaaaagttgccttttcatgggccacttaggagactgttgacttttcaatgccagtaaacagattctgttattttcaactcttttttagaacagtggatctcaaccaggggcagttttgccccagaggacgtttgtcagtgacatttttggtggtatcattttgggagtgtgctcctggtatctatgcagtagggtccagggatgctagcgaacctcccacaatgcctggggcagcttccaaaatgaagaagtatccagctcagaaggtcatcagtgctgaggttgggaaactcttagactacactcaatatagaatgtccttaattcttcttcaaaaaccgaaagttttctcctagttttgctgcatcctgtgatttttttctttttttttttaatcctgccgcctggatctctctgtaggttggcattgtgggaagaaccggagctggaaaaagttccctcatctcagccctttttagattgtcagaacccgaaggtaaaatttggattgataagatcttgacaactgaaattggacttcacgatttaaggaagaagatgtcaatcatacctcaggtatgcaagtcatagcgtccttacctgccccttttataagagctactatgtttaattgcttttactcttattgctttttttaattggatgaaaggattgttttttttttcacccaatagagcatgtttttatgagcagatattttcaacaggtattttcatcagatatccagctttgttcatttctct

SEQ ID NO: 73943 - DNA, 1029 bp, Homo sapiens
aggcagagagctgtacttcggaagtttaatctgagaaatgagtgcacggggaagacgctgaaggcctgaagccaattgattttatgtactgctggcaagatgtgatggggcaagtgattccactttgtagaatcaaactaatgttgattaaaacaaagttataataccctggttagtgaatttgcagggatacaggtgggagtagaaattggtatcatatttctggagggtagtttggcatcacttaacagcctcctttgaaaatgttcatacctgttcctcagcaattccacatctaagaatttattttaagaaaccaattaagattgcttgcaaagatgtagcttcaaggatatttaacatggtattatttacaatagcaaaatattggagcctaaacatccacaaataggggatttgttgaataaataatcatatatactgtaatattatgtagctactgaagtaaatacttttattaaataatagattataatattctgtgcatattctcattttgcctaaatatatgagattatatctttaggaacacagataactcacactcaagttcagaaagaaaaggtattaacatgtgacaaggattctgtcagattgctggggttgtggccagcatttatttatttttcgaattcacttgcactgattataactagcaaaagagtttttgtttttcaaatgttaatgcagccttgcactgaggtaatggctgcagaaattaaagtgagggtattgagtcaagaaacagaacaagtaatatttttagtgcttggagttgagaaaacctgggagatgggtgttttgagcctgtgaacttggggaagaatttattagattaaaatggaggagttagaagcagcagctgtttggaggggggctgttgggtattaatcatgttgagtttcatatatgaagagagatccaagtacaaatgtctaatgtttggccaaagagaccactcttggcccagttggggaaacaaaaagggtcaattgtaaagcaattaaa

SEQ ID NO: 73944 - DNA, 2065 bp, Homo sapiens
ccttttgtgtattttaccacaatttttttttaaagaagatagcacgatggcatgatttataattctgggtcagcatctcacagtaccctgagcctcttaaagtcagggagcattttatattcgtctctgtacccccagaaaatggcatgctgcagggcacatggtgggtgcctgtgagagtgagggatatgcacatacaaagaaatcggtaacaaaacacacacgacagctcccgcaacagcccgttctctgggtgtcagtgttagatactttcggaactgctcttttcagctcttcccaccacagacccatttaatgggctatagtcacaattgaatgaatgatacccttgtgccatgaaaaataaatatacagcttcatgcccagaagatacccagggaaccagcaaaagctgattcctcattatctacccagcatccttgtgagtgtgaagaaggtggagaccactctgcaggcagcatcagctgtagctcttgctgaaagcaaggtttctcagattctgttcctgatggggccagggggatgtttgcttactctcagacaatgtgttattaggtcctacctgatcaacatcattctgttagtttggccacgttgtaaatttctcttgtagccataaaatatgaattatctacaaacctctgttgtacacattagaaaacaacctatatccccacattgatatcgttccatcttaaaacccccccaaatcataggattacctgagatctgaaatgtgggagggtaaattgaatttgaagactgaattatagctacaaccacttggcttttgagacagagtctcgctgtgtcatctaggctggagtgcagtggcgcaatcttggctcattctgcctctcaggttcaagcgattctcctgcctcagcctcccgagtagctgcaattacaggcacccgctgccatgcctggctaatttttgtatatttagtggatccggggtttcaccatgttggtcaggctggtcttgaaccccgacctcaagcaatccacctgcctcgacctcccaaagtgctgggattacaggcatgagccactgcgctgagccccacttggcttttgatttgtgtcctggttcactcacagtgtcacctttagcttcatttgtgtattcaggcaacatcgtggtgagttggttccactttttgtgtgtatattcagggttcgtctcctccacacctgcctgcagccccaggatctcaggcagtccctttgctgttggagctgatggagaggggcattgtttccagtggagatgtaggaatgtgtccacacagcagaaacagggcttcattctctttcaattgcttcatctgctcagatttcctggacattataacaaataggaaaaagtaataggcgctaagtaggtttctaattcacagaagaaatagcaagtaaaaaagaatgaaccaaaatgaggtatataccaccctagccttcctggttagattccaaacactggctgcatttttcatttagatggttttgtggttgatttaatcattttagagagtactgggccattttaaagcatttttcagctctagaggtagattgattttggtttgttatttttttttccttgctcaaagctattacttggataatacctttttacagatgtgtactagaccttgctatagtgtgcaaaaatattagtttcttatattctctccttttttacattaatgtttgctgagaaacccctcctctcacagccagattgtcccacttgccctgcctgcttgctcatctcaggggctgggatcagcatcacctgcctctgcttggaaacatgttagaaatgcagactgtcaggcccaccccacccttttgattaaaattgcactgggacaagaaccacccccactcctgcccctgcattaaagccgttgctctccggtaagcaattttggatgactaataatctgtgatttccaagaaacttcctttgacaacttgaagtggagctcgtggattgccccagcccctcttgtgactaaacatgagactctggatagtc

SEQ ID NO: 73945 - DNA, 1022 bp, Homo sapiens
ctgggattacaggcatgcagcaccacgcccagctaatttttgtatttttagtagaaatggggtttcaccatgttgaccaggctggtgtcaaacacctgaccttaggtgatccacctgccccggcctcccaaagtgctgggattataggcatgagccaccgcgcccagccagcaaaagattcttgattggtggctctaagtattcctttcctttacaaaattttcttgcctttaatacaggtgtgagaagtggataaataaaatctaagcattcatttctctcattcttttaacctaatgttgaaggaagtggttgtaagtgaaggtgttacacaatgatgaaccaaatttgtaagtcatcaacatcctcgtctgtctcctgcttctctccttaaccaactatgtatgaaagaagaacatttcattgacagtctcttaacatccataaatgacaccctccattcctaacccctcgggatgtcatatttctttcagatgatctcagtagaaagggtcattgaatacacagaccttgaaaaagaagcaccttgggaatatcagaaacgcccaccaccagcctggccccatgaaggagtgataatctttgacaatgtgaacttcatgtacagtccaggtgggcctctggtactgaagcatctgacagcactcattaaatcacaagaaaaggtttgtttaaagcatcttgcctcttctcaatttcagaagatttagtgctatgtctgcttgttgtcttccttgtggatgtgtgaaggggatcagtgatacgtaggttaacctgtcttggaaactaaccatggaatgtggataccaacattcttcctgctgtgaactgctttactgtggttggtgggccccgggcctcagggctggagcttaacgtgacccaggatactctgtttgatacctaattactcatggatttttccaggaagtcaactctggctttgtgtcaccaacactcctatgtctaattctgtcgatttttactttgttgcatttctc

SEQ ID NO: 73946 - DNA, 4049 bp, Homo sapiens
cggtggctcacacttgtaatcccagcactttgggaggccgaggtgggcagatcacctgaagtcaggagttcaagaccagcctggccaagatggcaaaaccatgtctctactaaaaattcaaaaattagccggccgtggtggtggacatctgtaatcccagctacttagggggctgaggcaggagaatcgcttgaacgggggcaggtcggggcagggcggcaactccctcttaaaaaaaaaaaaaaaaacctacaccacacaaacaaaaacacaatggctcaaggaggagcagctggtcagggaacctcatgggatatacagctcccaaagaaaaaagaagtcacacaaaaaagaattcacttcttaaaattctgtagagatgaagaacccactgagaccacagtcagattctgaaaaaagcaatggcacatgccatagagacctccagagatcaggacaagtttgcagtggggcagtcataaaaacatctgtccggttcctggagccaatgttaagaccattcagagacatcttggctgggcaggttccttgggcacggcacaagggcattgcagcacccaggtccatggagatcacaaaggattcttccagcatgagtgggcacagaagattccccaggatgcagggaagtgacagtctgtctgttcagctcacttactgagtacatgtcctgtgccaggtaccatccagttaccagggtgcaatggctatagctgacccttgagaaattagcaatttaaggtggggacagacacatagatggctaattgtaattcagtatggtgagtactcttaacagagaattgttttttaaaatcctactggctcaaaaatcagaaaaatatcatttctgcccaaagagatgtcagggaagaatatggagaggaggaagacctggaaggctgagttaggaaggaaagaattataactagatttgaatgtggtcaaaaataggacgtttatttccaggccccttatgtgaggtgtggtttgagcaggagcttgagattccagtggcagggtcccctcaggctattgggaacatttatttttccttgaaacatgaagcctcctaggaggcctgcgtgtgctgtttggtggatacgtgaccatggagcttgggaggccgcaggtttttctgcacccagcctcactgagctgttttctctgtctgtttccccagctcggagtccagtgttttcccacttatcatcttctctccaggggctctggaccatccgggcatacaaagcagaagagaggtgtcaggaactgtttgatgcacaccaggatttacattcaggtctgtctatttctggaaatggtttcaaaggacaggatctgctgctttttctggcttaacctccctggtcagatgagcttgttggcaggcacctcagggcccagccccacatcctgctttttttgcgcatcttcgtctccttccccatccccttcttctgggcttggactcctctcggaatcgctgctgcacgttccctctttgtgccccctgactggcttgtggggtctttctctcaccatgcatggcctgtggctctgtcagcaaacgttttctgcaaaaggccacctagtaagtgttttaggcattgtgtgccattattgtctctgttgtgatgaatcacctttgccattgtagcacaaaagcagatgtcaatacattggcaaatggctgtgactatgtttcaataaaactttatttacaaaaataggtgctggctcacgtgctgtagtttgctgaccccttgcatcagtgaagattttttcaatatggaaatttcagaatttccaccaaatctacaaaattcagatccgtcattccaatctttattttatcttgctgattaaatggcactttaaaaaccacatgctaaaaggaaaaaagaagtagcaaacaaacaaacaaaaaaccacatgcaaatcctgttagtgaggtcatttttatatagcccctaagcaatagtcagtgtgtgtgggccttctggtaagtatggaaggtgggagaagtaaaatgggagctgcactctgctgttggagaactggaccagtcaaccatgtgtgtgggtggacttcacatgagatgcacttcacataagtatttctcagcactgtacgagatgtccttatgagactacttttctcagttctttattaggatcatatttctgggtttcatattcgcatgcatcctcacagaaagccacggtaccattgtgtatgtgtatcgtatattgcctgtatcacttagctttctggaatctaaaggttccttgggtgtgcaactttggtgccctactccacgtaaaaatcttctgtagctcaactgagcaaaacacactcgcacattcatctacttattcatcatgcttattaccgttctcaaattcagaggcttggttcttgtttttgacaacgtcccgctggtttgccgtccgtctggatgccatctgtgccatgtttgtcatcatcgttgcctttgggtccctgattctggcaaaaagtaagtacagatgtgaataactatgtatggtatgattacaatttatagctgtgtttacatttattaaactcttgccaccttgtctactactacatactgtttggtcctaatgaagtgtattaaatcatttacgatgtgtcaggttgggtaggattcagcagtgtgactcatttaaggagtcatttgggtcttgatgggtttatctttctttgaatgggttgagatatgcgcagttgagattctgaacattcctgttagtgtctggtagttgtgaagagaaaaccaatttattctgaagcattttgtccaacttagggtgttagccttccaactacttgaatctattgtttgtagttgcctggtgcatgaggttgagaaaaattctcagcaggagagtattatcttcaatgccacatgggtaccagacaagcagggcatgagttcaccaccccagtaacaacagtgcattacaatacttaataatggaacaaggagagtagtattttagtctcaaaagcattggcacttacaacctattgctttgtttttagtggtttccagctgtggttgcattgcacgtagaaagtggaataatgtaatgagctttgaaaccataataatgaatgtctgaataatgacattatttcttgcgtttgtaatactgttaattaaatctatgtcgatcctgttggaattcataaaatcatctaaaaatttttctaaatatacagtgttgttttccccattgtatcttgatctcaagcaacaaatggtaaaagtatagctattaatgtcattaaatgtgaattgtttcaacattatgaagggttcctcttggtaagtggcagaaggagccaggcttaggtttgaagtgagactgactttattcccttcttcctccttacgtagctctggatgccgggcaggttggtttggcactgtcctatgccctcacgctcatggggatgtttcagtggtgtgttcgacaaagtgctgaagttgagaatatggtaatatttaccttcacgttctttgccttttcaatctccttgccattaaatggtataaaagccattcttatgtgaaatattaaaactgttatttttacatctttggtaacagattttttttaagatccttcctccatctgtttaaagttaatgtaaaataaaatatatacatctttttctgagtcttatggttgctctgtcagcaggttttatattcatcacaagctttttcagatgtaataaatgtctctgtaggagggaggttctgaaattctagagaggatataagctaatttcttagaagcctgtttaattttgtttcttaacgggtaattcctcattcctgttaaaagaagacttcagtattttgaggttgtttacatttaattaataggtctcctcctctcccagttctagcgtttactctcttatgtgaagaacagaagggaggaaggccttaactttgctggtgtgccttcttggtacagaaagcctcc

SEQ ID NO: 73947 - DNA, 1031 bp, Homo sapiens
ttttcatattattagtagagatggggtttcaccatgttggccaggctggtcttgaactcctgacctcaagtgacccacctgcctcagcctcccaaagtgctggaactacaggtgtgtactgctgcacctggccaacagtgaactctaagaggcatttatcctaagtgtctgcatgaagtagaaggggtgacagtccataaaagttgtagaaaaacttttcagtcatcaagaaaaccagctaagctaccatgaggtctagtcttgtaaggttttcagtgggcaggccgagcagtggagtccacatgtgagtaacacttggccaataggacttgctagggaaggtagagtataattgctgggagaccttccttgtgcagatgactggccctagccagtgttgtgtgtggacagcaaggctgtgcaggcattttatggtttgggcccgctcatgaaatgaagttattcgagagtcttgttttaagggagtctgtggtatgttgaaggaagcagccgttccagaaggaacatcttgacgtagactgtctgtgtcaacagccacatccgatccatgtggatgtggagaaaagggggacttaggaaggctttttgggaagcagtgtaggattttctctcttgaatttcagcatgtaccttaaagcttgaaaacattttcatgtggagattctgacaaccttatcatggcccctgaggcatatttgggtgttcctgtaccctgattggctgtaacaatgagttaaatatgcaggattctttctccatgcgctcagatcaccaaccacgggggctggttggttggaactatttactgttattcgtccagggtggtgggtctctgccataagtcacaattccactgtttcttctcagcagcagtggatcgtggtttttgagaccactgctggagtcaccagctgaaagcaggatgcctgactgccgtggcagggaggcataatccagcttcatccttgtgccctcaaggatttccaaagcctctgttggactgcctcact

SEQ ID NO: 73948 - DNA, 1114 bp, Homo sapiens
ggtgggcagatcacttgagatcgggagttcgagaccagcctggccaatatggtgaaacaccatctctactaaaaatacaaaaattaggcatggtgacatgcacctgtagtcccagctactcaggaaactgaggcaggagaatcacttgaacacgggagtgggaggctgcagtgagaggagatggcaccacttcactccagcctgggtgacagagcaagactccatctcaaaaaaaaaaaaaagaaaaaggaaaaaaaaacctaatggataagtttatatcatagtgtttggcacatggcaggcatgtaatagatatcatcaggaccacctatacttttgttattcctttgtatggaaaagcagtccctggtactacaataagtctttcagagaaaggagtgtaatcctaacaacaactcatgcaagtatttttgaaaagaatacttgataaggaaaacctgcatctacttctgctatttcagacattgctacaagtggttggtgtggtctctgtggctgtggccgtgattccttggatcgcaatacccttggttccccttggaatcattttcatttttcttcggcgatattttttggaaacgtcaagagatgtgaagcgcctggaatctacaagtgagtatggaaactcgggttggtatagacatgctagctagtttccatttatgccataaattacagagaccccctgaaattcggcagactctgtcttccagaatttctctaacattaggtaattgaacgtattggccattatgaatcattgtgtcccttagagcatgtggaattgatagcctgcaacgtgcaactttgcatttggaataaggaaggagtgaaggccatatggggagtaatattctacaggaatgtcagcactgtgaagacagggactctccgtgtcttgtttatgacatactttcttacacaaagccggcacttaattaaacatttttcttagaaataaaatatttgatcatggtgaaactaatatagaaggaaaataattagggtattttagtatctttccccgaagatactaaaaatgacaaggaaatgagaaggatggagaaaggaaaagaggtgtcagaagcaatgt

SEQ ID NO: 73949 - DNA, 1046 bp, Homo sapiens
tgttttttgttttagtctcatgtgttcccaaaataaataagtagaagaatttcttctgccaccctatcagtaaacaccttactgatcaaaaactagtgggcaatttttttctctctaaatcagaagaaaatcttgccatagtctctcaccaagaagtgaaccctgctttgtttattacacctaagatttgtcttctgcgaagtcagtaatcgtttaaagcaatctggatgatttgtacttatcacagcttagaacacaattcttcagtggcttacagcagaattaaaagctttccactttctgtgaggtgttagcaaccttaatgatcctgattttatgttttaataccataaacaaatcatgaaaataccatctactgattaagtgacctcatgattaaatacatatttcatcttgtacctaatagaaggttgacagagagagggagagttcaaatgaggaatagaatgagccagaaggatggatggcatttttatttgcagaaaataggaatacatttttactgctgtttatagaaaacatgttcgttggcacaagcttcacaaagactagcaggaacagaatcccacaaaatgaagtttaaagtaaatagtggatagatacctaaaaatttctccaggactcaaagcagtttggtggttaaatgccaaacaggcattgtagttaaaattatgcttgttaaaagaatatgttccattctgtaatgttcggatacaaaattaattctagaagagtctgccgggggaaattttatatttttcactaccattcaaatatagatattgaatatgaaatgtattcaaccttcattttgtgtcctgaggttttatatatttattaaaatgtggttcttctttttttcttaagtcattttgttttctgggtctagaactcatctttttgtaagacttttagatgtaaacaataattcttaaatcaatatgtgttgccatgttctattagcaaatattttaagactttttaaagatcagctcttctttttgagctgagaagtctgttatttc

SEQ ID NO: 73950 - DNA, 1052 bp, Homo sapiens
actggtgtaaacagtttataaagtataattattttttatgttcttagattcagtgtatttagtatgttatttagtgttcttttttgttgttgtttgctttttcacccaagctggagtgcagtggcgtgatctcagcttccggttgcaagtgtttctcctgcctcagcctcccaagtagctgggattacaggtgcccgtgaccacgcctagctaaattttgtatttttagtagagacggggtttcaccatgttggccaggctggtctcaaactcctgaccttgtgatccgccctccttggcctcccaaagtgctgggattacaggtgtgagtcaccgggcccggacttagtgttcttaacacagtttggtttataattttcctttctttggtttttatatcaggataatgctggattccaattctctagaagaatttgataaaacttctgcaaaatcatcttgtgacccatctttgttttttctatgggaaatttttgtgtcatgaattcatattcttaaattcaataatagaattattcagatttaggttttttattatgtcagtctttgcccatcatttttccagaaatttgccttttgcatcaaaatttttaatttattggaacggtgtttattatatattctttttaatgcctgtagtatctcttctgttattccctgttaattcatgataatgataattttcctctctttttttcttgattagtctttttgaagtttattgatttcatcagtttttttatataatgaggctttgggtttgttgatttttctccttcaaattagttttctatttaatcattttctccttttttctaatttccatttttctcagattttaatttaatatgctactcatttttctatctttgtaaggtatatttttagatcctttacttttaacctgtctttaaaaaaaagtttgaaggaataattttacttgtaaacagcattagttgcagtcctgaaattttaatattattaggttttcattttcttttatttgaaaagtttctaattttattgtaatt

SEQ ID NO: 73951 - DNA, 1052 bp, Homo sapiens
agtctggtggtattcagcagagcatagaactttccattctggcatattggatgatgtccattgcaaaacaatagtggccattcgtggtgctttctcttcttgtcattttgcatccttagtaatgataaaatggacagctattacccaggagaggaaaatggccaaatgtttacttaattgaggacctttaaattctctctatgctattcttgattgattacattcatttttgtctgtatacctactgagttttcttgataagatgaacaaaaaaaggtttggactggagaacttgcctgagttttattaaaatcttgcagtcactattttctatatggatgtatcacttccatctgatgtggggcatgggtaagtgtaatctgttctacttgtgagttttgtgactcacttgttttctttcagccctttccctgggttcattgacttagtgttctctctcatttgcgttgagtcatgaagccgatagtgccgcttgtgcatcgcagcaaagggccagccacctatgggacacgtatcaaacatggatcaggagccatttttgttctagggcacatgggctggttaccattagttctcacatttgccctttcccaccctcaatgcacctgaggagatcatctcttagcgttatggttgtgtattgatacactgcccaacctctgcctgaacatggccaaagggatgggaatgaaattctagtgtcatattttttttaccctatctatttttattgaggtatagtttatatacaataaaatcgacagttttttttaggttgaattttactaattgtgtacattccaatatccaccctctaaaacaagatgtagagcatttccatctcctcaggaagtctcctttgctcctctgcagtcaattttcacacctctacacctcttccagatttctgtcaacatcaattagttttcctgttcttgaactacgtataaatggaaccaataatttttctgtggctggattcttttgttcaccatgtttttgagttctgtgtatgtttcagtggttcattt

SEQ ID NO: 73952 - DNA, 1265 bp, Homo sapiens
gtctgagttatctagacttctgctagctaaaatctttgcctctaagaagtcttcctactagaaaaaaacaaatgaaaaatgaagataagatgcagaggttggatttaggcattttaattttttctgtttaaatttgggagtgctccgagtgtgctaacttgcacacagctgcactcagcaaaatactgtaatatattgaggcacacggaattgcaaaacctttcttccctacacacccctcatctaaaaaaaaaaaaaaatcagcagcttgactgagcttaaataactgacttttcatatcctttcatggaacacaaaggactagtcctgaggctacttgagccaccaatgcaggcagcagtggagaccaccactgaatgtgccagtccctcctcccacaaacaaaacacattgactgcagctttatgaagtgaaatgcccaagaaaaagaaaatgtgaaggaggtgtcctcagtcatttcttccctaggggggtgggagggcaggatgaggggcaggagaaaaagctgctgcatctggatgtggagaacaaagccatcctaagacttgagtataataggttgggtcactcgcttttatagaagcaaaagagtggaactgccttgacttgtctcagtaccactgacccttacatttcattgtgtagagatgtcagggaaagtgtgtagaaagcacactgaacaatgactttgtcattttgagatttctgaggtttgttcaccccttcccccaactcctaccctcaaatccccattggacaaaagagatcgttagttaggtcgccttgccgtcatttgaaagatctctgttttactgagtctttcaaaagtaaactcatccattttaactgaatcacggcgttctcatgctttcaaagtcaacaaaagagttttagtcactgcatttacaaggatggactagtctgtgaaaatgccagccctagagataatgattcatgccaactgccacattaaagtggatttccttgttaatagacagggcagttgatgacatgagttactggaaatatttgccaactcttgacccctggatttctgagatcaggatgataggattcacacaggcccactctaacaattcctttaccttttcttttttaatgaaagatgcaatggttgggttttttccagtgtgatagcacatgtagaaagcagtactgtcaccattagtgtggtgacagttaatcactggggaccctcccaggcttcccaggctggcaaccag

SEQ ID NO: 73953 - DNA, 1122 bp, Homo sapiens
tttttcatgcctgtaatctcagcactttgggaggctgaggagggcagatcacttgaggtcaagagttccagactagcctgaccaatgtggcgaagccccatctttactaaaaacccaaaaattagctgggagtggtggtgcacacctgtaatcccagctacttgggaggctgaaagaattgcttgaacatgggaggtggaggttgcagtgagtcaagatcataccactgcactccagcctgggcagcagagagagactccatctcaacaacaacaacaaaaaaacccaaaccaaaaaaacctcaaaaccaactttaaggattttgtattgtgtatcccttatttccatgctggccaaatacaagttcacatcacagcagcaaagggctttgtctgttgccctgcttggggaagctggtaaggcttcctggttattcctgagccatgtaggggagaaggaggcacatatggcaggaagtgcaggagtttaggatatctacagggacactgcagtgtggaatagctgcatcaggaggtttgagacaaggcattagaggagatcagatggagagatgcagaggggccagatcacaagaaggcttgtttcttaagcacaggaatttagagtttagagatttgggtggaaggatatggagaggaatgggagactgtcagaaagatggggttgtaccagcatcaggaaaacaagaaaggatactggtttggacaagtttctctttaggacatccaggtcagaatgccttgtgtggctaatgaaagcccttgcttctgaatagggggcccacactgcaggatagtcgatcccctcaggcatgtgtcattcacaaggctgtgtcccagtagaaggccagttaggtttgcacacctccgtgaatgctttactagatcaactgttaaagctgtcagatatcttgccaatcctgtcaaattatagttgcttgcaaaattggagctgttctcaattccaaaattaaaaggaagccagcatcatttatgtggtctgtttagggtgattctacctcaggatatcagagccatgaaaattccctttgcaagtgctcttggttctctaggaaaagcttcaggttttgtttttgttttc

SEQ ID NO: 73954 - DNA, 1062 bp, Homo sapiens
tttgattacgttttctgtatgatggtgatcgttttattggttttgtaagtaggagtctggaactgtggaccattgggtcagaactgaactgtttccaattgagtttgccaaagactggaggggtagatctgagaggagaaccctctgcttgtggcttggtgtctagaatgtaggctctgtagaagcaagtctgaaaccatgcacagattttattactctcccgatgaaatcgctgagataaggaaattctggtttacatgtgaccagatttgctggccagatagaggcaattaacctaactttgatttttggacttcaataaaatatttgtatttgtgagttttcatttgtttttatatagttagatgttggcactcattgcagatgggaacagtgacactggtaacttaaaagtgggtgtcatttgctgtcctgtattaagggaagaaacccagaggggcagcgagggtaatgtgtcactttggaactcagattggctcaggtgtgcaacagtagtgaataaagaaaggtgaggtttttgattaggccttttggaaggaaagccagaattaagggaagtttttgaatatatcataagatataaatatatcactggaaataaataacttatagaatacaaatgaacagtctgcaagttacctcaaggttgccatgggctaatcagataatttagccaaggctggcagtgcacatctggcttataaagagttgttcaaacatgtttttcttgtctgctttttcaaaacttgtaacagctttgaacatctacaatatttctaaagccaagtcatttatgaacatagaatggctcttcacaggttaaaagtgaatatcttgttttcataaagaattgaaatacaaatagcataaagatcttcatctggaacttatgttctttgaataggaatttggcattcaaaacatagtatgtttgcgtaaatcaacaaacaaaaacatagagatgatagtcaacattcacattttaaagtgcttgattacttcctttttttctgtggttttttttttttttttctttctttt

SEQ ID NO: 73955 - DNA, 1697 bp, Homo sapiens
tttctttgcaacaggaagctaggcaaaggttgagtttccgaagctggctggcccactatgtgcttagcagagtgagcggtcgtaattagtatcccttatgtgctttgtctcacatatggagggagagggatggatgctacttgatgtcaatataaaacatttcttagaagcatgaggagggaaaattctagtctcgttgtacttctatttaaccagagagacaagggcgtttgttattatccactcacataatcttggtaaacttaatgttgtggaatcctactggccccaattagctgatttcttgaatctacagcgaaggttaaatcctaatgttattgtctccaagaaaggagttttatctaaaggataacttagttatcaattatgataaagatctattgtcacttgttttgtttgcaggtgtctttaataaggcttcccataatcccttcaggaagaaatattttctccttttaaaaatagtattagctaaatataaaagctctggtccctgccattgttgttgattctttgagggacatttcccaacattcattgtttaaatggttgtcaggaagaatcaagtgaaacgtggtaaacaatgcagtaactggttcatcttactttgtgtgccgagcctttctcccggggatttgcattcgatgagtgggcttttgactgaggtatcgccaggatcattttaaagtatttgggcctgttgctatattaggaagtgaaaatttttattaaagccacccacccaaaaaaatgcatttaacctgccctcaaataaaggccaacaaaaatctaaatgtaattttttttttttttttttaagttgcctaggcctctctgtaaggatgaaaacagcccagtgctgttctgggactcttaatggaatcatgtaaacttaaaataaacactattatggtaagcacatagaatgaaaactaattttccaaatcaaatacattatattcaattcattttccccaatcaaccaaatgtttaaaacctgttagttataacagcaatcttctggaaattaattagaagcctattagctctgctagctgagccgaatgaagggggttgctcggtacatttctaagtagtctcctgaattaaagcaaagcaaggtcaaaatgacagttagctttgttcacctcatggctttgcttaaagtcgttgatcttttaggggggaaggagggaggtgttttgttttgcaaaggaaattttgtctactttgactcagttctgtgatacatttttaaaatttatttctagagccagtggggtgagccatacaggaagcctgatgttatctgtgtggatagtagccttctccattgcatgggcatctgaaatggagttgaattttaggcctcgtctaccgcatcaattcttctacagggtttatttagcccctttcaaaattcagatagtaggaaatttcctggatgactttgtgtttaacatccttagcaaaacatgcttcggacactggggccctgggttttgtggctgtcatcaggttctatgggtaataaacatgctgctgacatcacgggccctgggttttgatggctctcgttaggttcaataggtaataatcacagtgactagcagttcctcctaagcccagagaaactcacagaaagtgaggccttctcaacccagcagctgagattg

SEQ ID NO: 73956 - DNA, 1038 bp, Homo sapiens
cttggatgatttgctgccgctgacgtttttagatttcatccaggtaacgttgagagtaatgtcaggatctcaaatggaaaacggaagttcctattttttcaagcccttttcatggggtctgggggtgggactctcggcctggctgtgtgtaatgttaacttaataaagggccatgtttgtaaaagaaaggtgcggttataactcagaggctaagttggcatgagtaataccttgtgtgtgggagtggctatacagtcgcgtcagggttagtttgaagcagcttcgtgcttggtaagtggctctccgtctgcctctaggtatctggcgtggattttgctttactgtgaacacatttcataatacagaaacaatcacctctcacggaaagatagcctagattaactaaattatgcattgtattaccacaaagggcaaatacttaggcactttttttttttttttggatagaaccaggtgtggttacttacaaagaaaagattagtaataataaggtgaaaataatactttattaacaaggacaatagagagcagttattgcggatacaaagcctttaaaggcaaggatatctaagccaatttgagtacaggatcaaagtcaactcagaaaatgtcttttttgttttcacacgttgattgctctaagtcttaagctgtctttaaaaaaaaaaaaccaacaatcctacagaaataccttctgtaaaacttttcttttgtttgtgaacttgaggctctaaaaaataatattgggtcatctctcatctccttattcagtactgttgctcatgtggtttggttttattttattttttcctattgtttaattttgtctacttgtcagtggttcaagctggggcactttttttttcccaagtgtttattttggaaatgcatctattaaaagctatacatattccaaaatctcagctgctgttgctaacactttatgaaatttgaacctctgtgactttttctaagtgccaacttagaatagttgtaatcattagctgaatttaaagc

SEQ ID NO: 73957 - DNA, 1037 bp, Homo sapiens
caccccacctgagttttgttacatgctggcagtttagataaatggatattataatctcagcacatttctgcccaacaccactgcacagatttgcaagagtctacaaaagtgataatattctgtcagtttggagcctagaaaaagaagaagaaggagaaaaaaaagcattttcttgttcgtatttctaggatgcctgtggggaagccggaaatgccatatagcagtttacatggctaaatacacatgaaaaaagataagggacccaaagatgtttctttgtaggcacacgggagaagagtcagttcaaattggtaattgtcagctgtgtttggagatacattctccatcgcaaccaaagatttttctttttcccccttaaactcaccatttccttgaagaatgcagtctatttttaatgactttattgatttgacgattgggttacaatgtactttatttactgcagaaatgtttcgttcctgtcagcacttaatgcgaataaatctactttttggcaccactttgatagactgtaaaactgcttatatttgcaggaaaatttgttttgccacggtatgtttatgtcagactcagtgtgactttttctcccctcaaaatcattttatatcatagtgtagctgacaaataaatacacacagtgcagtaatcattgtgtactgtcagagcagcagaaaacaaaatgtgggttttatgacagggatcaaaaaagagatttaatattcacaattaaagccacttatttaatgctttctgtttttgcttctgtattaaggctttccagtttttggttcatagtttgtatatctcttaaaaatagtaaatatacagtaaaccctacattcactgatattgtctgcatgtgaatttaatatttattatccaagaagacccaataaaagtcgatctttatttcctattgttcaaggtataagcaaagtcaaaatacatttgcaatacgataagttttctgttaagtttctttcttttcttttttttttttttttaagatggagttt

SEQ ID NO: 73958 - DNA, 2734 bp, Homo sapiens
cggatgataaataatgcatctagacaaaaagagaaacaaagtgaaactcagtgaaaagtaaatcgacctaaacagtctaagaacatttaacgttttgattacatctcatgacatttgatatcttgaccccttcagcctgtgctggctgttgcctttgcctccgacttgtaatgtcagaggattaaagctcttttactcctttctggtgaaaatatttgcaatttcagatttgtaactagtagatctgttcagctgtaaggaaacctttcagtgatgagcaacacgacttttcatctgagggatgcagagtctatgactgcccgagagattgggatcctgtagtggttttatttcattatgagcctccaccagtattatttaatgcaaccaggttttgaatgctggtgagaacacagttaaggtcatggtctgcaaggactttgatgtcgtgcagaagcctgattttcccataataggcatgaaaagcttgtgcaatatagctcttaggagatgaatatttgttcctgtaggttacaatagcagacataacctgtgagtgatggaaaatgtcgggcagaatatggatttggaggaaaaaggggaagaactagtatgaaaaaattagccatagaaatcgatagatactaggccaagaatataactgcaaacgtgtcagctgggttttcccaagaatgattgacagacactattgcagatcctgcaagtaaagaatttctgatgttttctttttttttcctttaaagttcaactaaatgatttccttatagatttgaaactcttttctccttatacagaaatttctcctctcttcttagttcccagatttttgtgctaagagaatgcataaaaggcaattattctgttgatatctttttaactatctgtaaagatatccatattgattcttagggccactaccctggtacagtttttggtggcttgaattaataggatggtttgctgtccattttatttgtgtctggagaaaactttaggttttaatgcacttgcaaattccttgggcaatctgtagcctgtttggctgtctttgttgcctttcctttagatgctatgccgagtccatgaagtgctcttctctctaaggaatacagagactggggatagtccccagagttgaggaaacgtagagccccgtaggtgtaccagttatggtgggtggtgggagtgccctgggctagcgctgaaacttcaggttttcagtggttgacatcatgagtgaggagacttttggaagaagcagaactgaaggtaagactgagtaagtggatctgtccaagagtaaggagagatgaggcctggagatggtcaaggcaacacacagaatctgactttggcagtggatcctagaccagatcagaaccagaactagagatcaggaggtcagcatggaatcagtgggaagccttccatctgcatggttgccagcttcgtgccaagggatgttctggcaattatggaagcacatattggtacaggtttgactaaccacccagacttttagcactggagtttgttgttgcttttttaaattttttcccccaggacagctgtcaatttggggagatatacaggtatgaattgcatgggaaagaaccattgaatatgactctgggatggttaaatatcttgaagctgcaaagaaggaacatagaacaaagaacaagatgaattctcatcttatgatttaaactgcatttaaacaatgtccgtagatcctgccttcctggaggtagaggccaagtagcaccatatacatatgcgtgctatttctgagcactcacggccccattgggcatgggctgtgtaggtgccaaggctggaggggctcctggggctgtgggtgttttgctcaccccctacacagcttgccctcatgcttctctgtaacagggtcaagtttctgggttacagctgccacaggaacaagctggcacattcttcttgttttgaatttgaccactgggtatttatttattttcccacctttgattgacatcaacgtttggtgacctccttcatccctcctttgggcggccaatcctgcccagccacaacactggtctcagttctcataatgatgttcccatcatgtctcttttgtaaacagagcaaatacagaaaatgccagtttctaaactttcacttaatttctacccatccactcagaaatacccactgagtcttatcttgagttaggcactgtgtttggagctaggccaagaggtcgtcaaaattgtggggaagatggatgcgcagtaagcagcagagggctgggcttgggattggctccgtggaaggagaggcccaggggccacgggagtacaggagacaagccaaccagatttgaggtggggcgagccttgaaggatctctcacggacctgtcatggggatgggtggttggggttacagcagccctggaggtaagggaaaggagctgcccagctggcgtggagtgattgcaggccaggtggtgtgagggcctgcccaggccaggttgggccatgcagggcagataaaggattttaaactttatccctagagcaggaaggctttgtcttcagtaaaatggatgcctgataacgtcacctttcggtgcttgccggagctccatttcatcagggaacctattaagagtaaaaatagggactcatttggatttttaaacttttttttttagaatcaggatctca

SEQ ID NO: 73959 - DNA, 1036 bp, Homo sapiens
ctaccatagctattccttggcatttgtgtcctactgggagtggaaataattctgtctttggtatgaacattttttccttttttagctctccaaagtgataatggagaactttttatttatattttaataaaaaggagagaaagagggaaaggagacagagaataaactctcaaatccttccaaattagaagtcctgttaactatttcaagatgtctttggtcattctcataaattttagatttaattataaatgtatctagaacatttcatgtaggctattttggaaatgcagttgaacttttaataggactcatcattgttagactttgaatgacagaataacatggtcagaaggggcatctcaggaggttcctgttagaagaaccacagccaagtgcctttcaagcttgtggaaatcccatccagctgttctctaggcctgaaaaaatgtgggaaatcgaaagattggtgaattctcttggtggtctactcagaagaaaccatattagtaatgttgatggttcagtatcaaacctggcttgggctcagagcttgtgagcctagagtcacacatgtaccaatccaggtgagaccccagctgaaaaatttctttgccttgttttatttatatagctaggctttttagtacatggcccactttttagctacttgccctcctccacccataaatcatggtgatgagaaagacagagattcttctatcatccattttattccttgtttcttcttcttattattatatttttttggcagtaatttaagagatttgctttctttcttgtttgctgtagaagtcaaacagtatttggaaatttgcggaaaatagcgtttcataaatcttctaatttagtcttcacaaggcttgatattttatagtgagacactgatttttactcatacccttttcacaagtagtatgatgataagatctaatcctaattctagccatctatttgttctttgttctaaaacttaagtgtgtaccttagatatcactatttcttttttttctgg

SEQ ID NO: 73960 - DNA, 1649 bp, Homo sapiens
caatgaactgtattgtagacagaagtatttcttattggtgccaagttggaaaagttagtcttgacgtggtcctgtaaatgaaaggaaaatcaacacatacatttcaggatcatgagtgatcagtgtcactagaaaagtgttcttctttcactttaagattaaataaatagttgttgacataaatagccggggtaataaaagggaacacctgtgtaatccagccatcagcagttttatcgtacaatcagataagctgctgtttgttaaggaattgtcaagtctttagaccagatgaatagatttagctcatacgttagagaattttaaaaactgaacagaagaagctttaatttcccttgatgccaaatgttctaaccactctcatctcctttcacacacgagaagctgtaggagtttaaagctcaattgacctagccttcaggtatgtcttcttccattagttattgctgtaccaaagtagctaaatgttctagatgagattagggtttgaaattttatatggcaaaataagtacctcatcatttttggataaacatggggtattttttttctaatacagctcatcttttctctccctttaattctcatgtccactttcatttgatgtcaaatgagagagaactttggttgtcatttaagagcctcttgatcaaaacagttatcttaagaagcattgattgtgtgtgtgtgtgtgtgtgtgtgtgtgtgtgtgtgtgtgtgtgtgttgtgatgggtaggggagagggagagagagactttttagttagcttgtcccaccacaataagaattatatttttggattctcttaataatatgtgaaatttaaaatttgaaaattaatcagcaaataagatgtcctttgacttcacccaccagcaaatggaaggatttttctttattttctaataggggatttaaatcactatatgatttgggatccatggtacccttttggtaaaaagcatgactttagaatcagcctgcccaaatgtgaatctcagctcttccttgctgaattacttaaactctttctgcttcaacttatttgtagtatggcgatgatattaacagtacaatcctttttttgtgtgagtgacaattaagagaatcaatatatgaaaagcatttgatatggtacctaacagctaaaaattgatttttttgactaattgagatgatgaaattttagtagtcttaaaaaatgtacaaattccaaatttgctagttttgatgaaacaataggagtctgggaagggtgtctgtgttttcctggatgcaaagaaaaatagataaatgaccaagactaacaagccacaaaagaaaatcaatagagtattttttttgtttgtttgcatgttttctttttggttgtgttttcaatggggcttagcttcattccagagttaattttaaatttaatttggttttacaatgagagctcaattttgcatgtaagtaccaaacatctggtttactttttgtttgaaaacgatacagctgaagttgagtacagaagtctattgtgtaattaaggaaagagagtttgaaattttgtaaaataagttctatttaaatggaatattggaattattccagagaagtggatatacttcttaggagtaggaga

SEQ ID NO: 73961 - DNA, 1074 bp, Homo sapiens
catgttggccagactggtattgaactcctgacctcaagtgatctgccttcagcctcccaaagtgctgggacaggtgtgagccaccacactagaccaacaatggattacttctaaaaaccatcctgtgtcagaatctatgatctcatatcaaaaagatgcatattaaaattaatgcagctgccaaatggaagtctagatacttttctagatacaacacacatgagcatagctccatcagatatgtcttcttcataattcattggccttgattttataaaatttccaaaaatggttcttttggcacttcaaaaccaattgtgttcaaaagaaatcataccagtgggagtagcagaggtgttcaggaaacaaaataaatgattctttatttcagatcataatctctaagcttcaagtggactcacaacaatttctagctagactcttgactgggcctagatgcttttctgagccactgggggaggtctaagtgctacagctcagcttaggaaagtgtgttggagaaaggggagggacttccagtgttgccctttacaagtacctgtacacgctttgggcttttagaagtattgataggagaaagaacataagtaatgatattttccctgtaagtaatgttatcatgaaattcaactatgattcactgagtgttctcattcttggtcaccaggattaatgtttgagaaatttcttcctcgtttaaatagaagctctttcatatctcaaataaagactcgacaagcttcaaagtacattttgaggccctggcagtggggaagggggagggagggggaggaaaaaaacaggacatttttgagaggaagtttattaaaaacaagttctctgttctggaaacattttcctttcatgtcttgtttgcatttgcattttaatagattatatcacataggcaaatgttccagcacctcttgaacacctggaaagcctgtcttagacttgttctggtgtttagaaatctttaggcagacagtgttccaaatacagtcatgctcgccaggcatggtggctcatgtcatataatcccagctacttggg

SEQ ID NO: 73962 - DNA, 1051 bp, Homo sapiens
aaaaaaatcagaatatttacaacgctgaggttgtgacattttgttttccatgaagtttaaaacatttttgcttttatcaagtttttgatagtgtttatgaaaatgatagttacattctaatttaggtaattacgtatttaccacccttgtcttatgttagccttgtttcccccttgtcttccttgccttgttttccccttgtcttcttggagcttatctgttgtttccttgctaaatcccctgagcccaggattggatacactgtatctgattagtaaatatttgttggctggacagaacaagaaatagttccaagagtgcatttgcatctctttaagcaacacccataaagaacaatgggactttacagtgttgaaataaaattagagtgttttttgtcttacagctggtacttatattaaatttaactcttgcttccaattttctttttcaaaagtacagtttgtaatagattactttggtggactttgtttctgatacgtgatggcctgaagagaaaaaccgtacattggttctttggaagctgtgattcatggaactagaccaagttctcctgttgtttaccagtcaaagaaatgaaactgtcaaacacctaataacttttttgggggtttagttgtgtgttgaaggtgacttttaacactctgtgggttaagcgtctggtactgtatagttttgtttcataaacttcatgcccttaagaagtaaagagaggaattaatccatttaaaatcatcagtagacattgaaaatctgttcttgcacagggagttgaggtgttgagatgccccaattctgctaggatcatagtttgtggtaactaagtcggtcacattacttctcttagcctcagggttctaacaggtaaaaagtggctttttcattcatcaagcatttcttggtcttctactcatcgtcagttgtggtcccaaacattgaaacaaaagtacctgttttcaagggacttgcaaacttaaatagttgccgacagtggatgatgatgatgatgatttcttctccttcttctcct

SEQ ID NO: 73963 - DNA, 2119 bp, Homo sapiens
ctttgtaagcatgagtttgcagagaaagatagttacacagttagtttctttagttttcttccacgccaacagagttagcagagacattttattcttatcaggtctctacaatttcactctttgttttggagaaaagatgagcggtttgttgtcctgttttctcatgcctaattatggtgacataacatttagctaagtacactgactctaatgggtgccagataaatgtttacttgctttcaatttgttaatttggctttaagaacccaagagctggtgttggtagaagtgtttgtttactctctcagggaagtaaaagttaatattgggttacagccagtgtgttttacacaactggtttttctccagtgtgtgcgtggggagtatgtgtgtgtatgtatatttatgttcatcgatgccttcaacagtgtaacaaaaaaaccagattcatatcattcttttttctttatagattaaggtaaatgagagctaaaacactagataaaagaaaaaagaaacatattgacttcttcccatgtttcttttttttaatccagtggaagatgcttgtggtcactgaggtatggaatgcgaatgctagtactagattttaagatagacatattctcctatgttccctaatcaaaaatcgagggttgccccagtgattaagattctcagcttttagccaggcgtggttgtagtcccagcagctcgggaggctgagtcaggaggattacttgagtctgggaggtcaagactgcagtgagctgtgattgcatcactgcactccaacctgtctccaaaaaaaaaaaaagaatgattccttcccagcttgactgaatgggaagttaggatgtgcatcctacaggaattgaggggaggagggtggtagtggtttgaactattgttctgtttctgaaacctggaaagggactctggaatccactacaagttgctaaataatttgtggagaactgaaagcaacctccatgatgagctttttatatgatcagaaagactgtcttgcgatactctataaaatctgatgtccatatcccacttccttgccagaaaaaaagagtcatcaataaagaagaaacataattgtagggatacctatttatctgtttattcagttcaaatgaccactggagttggtgctaaatgtgcatttttaacaagtataatatttcagcactgtcaaaattacctctacaataataggcttgttaaattatagctctataagctagggggtaagatggctctgcccagcacacattaatctatgcctgttcacacaagtgattctgctgagcaggtagcatgtttaaacaagaaatactggtcctaaaacctctgatttatggtaggtgttgttttgacacagcaccattcagacaatttacaaggcaaagcttcgtgctaaaatatttcctcagtgtcatcattcgtcaccagtataaatattcagtagtgatgctggaaaattggtaatatgcccattgatgccaaatcactcgctatgtttcctttcaagtgagatctgttgtggatatggttaaaagaaactatgatttttcttccttgagagcagatgagctgtaagaaattgagaataacaaccgtcctgacagctttcatgtactcaatcttgcctatattgcttttaattctggcttaagtcctgcgggctttccctcccacccccttgcctgatgcgtattgtaaagaacacatttatatgtacattagttagtttaagaggctttttgtgttcaaaggaagaagttagtcatcaccagaaaagctttgttgcaaaacaaaaacacacatttcccctttcattttttcttgttaataataacaaatgcaagtgactataaagggaataacacaaaagattgcatcaatcataatgattctcaatagccacataaatattgttttttcagctttgaatgaaacagctaagagtttgaagtaggtgtggtaattaaatcctgtcgggttatcacaaattaaaaataatgtttttttcacataacaatggttatatgtacttaaactcttatcaggggtgatacgaagtcatattttatgggagttgctcctt

SEQ ID NO: 73964 - DNA, 2312 bp, Homo sapiens
tatgtgaataatggatcctcattcatgtcttaataaaatgtatgatttattttattcatttaaaaatgtcttgtgtctatgtaaaacagtgggggattagttgcttatttagattaattatcttatgttaaaatataatttgtgttttcttgcaattcaattattcaagaggttttccacatgcaacttaatacggtatttttaaattctttaaagctacttgggcattttctacaaggaaaaggtaaatcatttctcctattccttgttaatatcacatgttggtatcaaaacataccaccttttttagattatgggacataatgtaagtaataagatttggaatatggagaagatcaactacacttcatgattatctatcctacttctgagtttttaatagaacttgcaattgaattagagcctagaatgaaattgtattatacacctgatttttcttttctgtgcagtttccattcagtgagagaaaaataaactattttaatccttctttgtcaatgtattttgtaaatacattatacttatgtagaatccagatgctttatggaataaattaagtaacatctttataaactacctggcttgctttagcaactattgaagaaaatgcagagatatgctgtgttctctaagtgatatttctttatttcaggtttaactgtagctaccgttctttttggcatagcaagatctctattggtattctacgtccttgttaactcttcacaaactttgcacaacaaaatgtttgagtcaattctgaaagctccggtattattctttgatagaaatccaataggtaagtctgacaccaagtttctcagtaagtatgtcttgttaacaacacatttaggatctgattacatttccatctttgaaaatggaagggatgctgggaagaaaatcactatgcatgttgattcattttccacaagaaacttcactgatatttttctcctaccagagaaaatctaaatatgcggggggaggggggggcatacaatcttttattccaatttatatgtgtgtggaaaaataaatgaatgttcactttgcagaatgctttaggaatccatttgctgtgaggcaagtgaagcatcctgcattccctgtaaacatgtttaaatgtagttgaatagttgctaaacattggctgtgtttacatagtgttaggttatgccatttttcagagggatctttgtaatcaggaatgctctgacgtgagacaggccgtgcatttctttctttcattgggaaacccgttcatttctggaaacacagggtttttgtacataccctgactgtgaggtttccctgaaagataatatgtggttaattaaaagccaagattgataaaatgtaaactccccttcaagaacagtttctaactctgtggttttgaagtagacttttggttctataatagagactttgttgaacctgccatatagatcttcagtagcttgtttcctaggtatacccaactatacccagtattttccaagtggttgatgcctctgcactatgcgcttcttatctgtcctgcttctgaggctagccttcctgacctgggttcctagggagaattagttgtgcctataagtccccaccctgctcagttgagtggacttgtggggaggcctgagtgacattgtgcaaatgataactgccctcatagaagcagggaggtggcctggagagaacacaggcacagctttggcctggccattgactagctttttgaccaaggccagagcacataggtgctattacacaggcaagtctccaagcagatgctgtagttcaaagtgtgaactcaagctaactacctgggttcaatcctggtgctggttactaattgttatagctgattatagttacattcatattcatgtcctagttacttaatttttctgtgtcacagttttcttatctgtaaaatagggatactattcatacccaccaaattgaaatcttatgagaattaagcatgttaatacattcctagcacatgaaactgggtgtagcaacatggtcagtgcctaacgaatgttagtgacaatgaagccatgtatctgtgaactgaatcaccttcactgtggggtggaaattactcctaccctctctgttttacatgatttttgtgaagattaaagaagactgttctggaaagcatcttgtgtagatttatttaacaaatacttttcagtccaagcactgtgcaacgtgcaaggatttgtaaactgcagagaccacacaaatatcggtctgatttcagctgttattagaaa

SEQ ID NO: 73965 - DNA, 1050 bp, Homo sapiens
caagtttgatttttgtctttgttgtttctcccctcctaggttgcctatgtgcttcaagattggtggctttcatactggtaagttatttctggtctgatgtatgaaatactccaaaatcagtaagaagactcgcttttccatagagttagagggaggtgtttgttgatccttctcttctaatcctcacttcgtttacccgaagaaaaattagagtgcttgctggtggagtgtaaactgcggtggtctccacccatgtctgatccgcggcatcatgttcacagacagtttcgggaactgaaagttgtgatttaaattgaatttttataaggtagatatacacaagactaagtgagctgagaatcattttccagcatgaagcgtttctcccaaattgtggttcatttttaaaaaaatgtatttatctaaatttcatatatagcttaatatttttttctccccatgttccatagggcaaacaaacaaagtatgctaaatgtcactgtaaatggaggaggaaatgtaaccgagaagctagatcttaactggtacttaggaatttattcaggtaaagtttaatcatttggtgtattgtatgagaggctgaggtgcttacaatgagcctgtgtgagtaactagggcttccaggagtcattcagtaatgtcttaacagatcaggagtctcagtcgaatttactctgtgaattaattagaataattattttaaaaatctactagaagagaggttgactgaagactcttaatttgctctgtactggattttgaaagttaaaccaggattgagcattcagaaaatcagccactggaaatatgtggctattgtctattctaataggttgctttagctaaatcttatatcattatacggatgggcagggggattagaaacggatctccaccctgtggttcggatggttccaattctgtctaaataaaccctggcttttattgaacttggatgaaatcctctggcagcaaggcccccaaaataaaagcattattccctcccaggtatgcaaagctcccttcagc

SEQ ID NO: 73966 - DNA, 1009 bp, Homo sapiens
atagctgggtgtggtggctcatgcctgcaatcccagcgctttggaagtccgaggtgagaggatcacctgaggtcaggagttccagatcagcctggccaacatggtgaaaacctgtcttcactaaaaaatacaaaaaattagccaggcgtggtagcaggcatctgtaatccctgctactcaggaggctgaggcaggataattgcttgaacctaggaggcagaggttgcagtgagccaagatcgcgccactacactccagcctgggaaacatgagcaaaattctgagtcaaaaaaaaattaaataaataaaaaataagtggatgtatagtttggctagctatttccacacccttctccacaggagatggatcattttggacttctgcctgtttccccacagctttgtcaacagagtgcattgtcatctttgggaacagttttgtatactgttttgtctcttaccaccttttttcctctgcagacagagaatgtcccagttacactatcagaggagaaccgttctgaaggaaaagttggttttcaggcctataagaattacttcagagctggtgctcactggattgtcttcattttccttattctcctaaacactgcagctcaggtaaataatgacatttgttttgcgccctcaaaatgatatttacagtacctatgtttatgctattatgactgcatcttgcagttcacttggggtctgaattgaaatgtgctgtctttggggaacaaagtgagggctgcctactggtgttccatgtccgttacaaagacctgcgaaaaaagggtatctttcaatgattttaaaatggaatatgcattttcttgaacccttgatatctgggagtttgggcttggcacagacctgagctggaagaactatgcgagttctctgagccttttattctttctttctttctttctttctttttttttttttttttgagatggagttttgctctgttgcccaggttggagtgcagtggcgcgatctt

SEQ ID NO: 73967 - DNA, 3003 bp, Homo sapiens
gagtttgagaccaacctggccaacatggtgaaaacccatctctaccgaaaatacaaaaaaattggctgggcctggtggcgctgcctgtgatcccagctactcaggagcctgaggcaggagaatcacttgaacctgggaggcgaaggttgcagtgagccgagatcgcgccattgcactccagcctgggcaacagactgagaccctaccacacacacacaaaccatttttccactggtgggcacccaggatgaatgtgtgtccattcttgcttcttgctgtcgacccagccccttccctaacagcagacagagcacggttccccctcggaacccactctgcattgctcctcagtactcggcttctgaggaaaattgccatctcagtaccagtaggagtttccttgtgtgtcttacagatactatgtgaaaagtggtcattttatcaaactaggtgtgtcacttttacctcctgtgtggaagaagacacaatgtatcatgaagcatttttgaattctccagttatcaaactggtccaaagggcccaaggtgtcgttggattttcctcagtggacccaccttttgggggtggggaggattggggtagcagggagggtcctggccaccttcccccacctgacttgccttagccaggagctgctctcctttgatttgttttgtattctgggagtttgcctaatattttgtttgctgctgtttgaggaaatcagttgggtctcatttcatggggtacacaaatagtaaagatatttgtacattattttctatgactttgtaaggagagaaaactgtgcaaggttgtgtcccatggaatgtcgaattttcagttaggaactccctgagtctttggggcaattatttatttatttatttatttatttatttatttatttatttatgagatggagtttcgctcttgtcatccaggctggagtgcagtggcttgatctctgctcactgcaacctccgccttctgggttcaagtgattctcctgcctcagcctcccgagtagctaggattacagatgcccggctaatttttttgtatttttagtagaggtggggtttcatcatgttggccaggctagtctcgaactcctgacctcaggtgatccacctgccttggtcttccaaagtgctgggatttcaggtgtgagccactgcacctggcctgtggggcaattttagagtaaagaccgtgaaggtgcagttcatggggtctatgtccaagtctggttcccacacgcctttttccagcagggcccatggccagtggaggcttgtggagtgcttcctacctgtgcagatatgcctgttcctacctccctatcagtgttaggtttctttcctggaatatcctcctcaatttactcattccttcaattcttattgcataaggtttatcacagttttcatgttctgtaataagactaccaatacggtcaccaacatctgtgtgataataatcgccatttgtaacacactattaccattttaaaaatattcttcaggacctaacacagagtctggctgagaacagaacactcagttgtgtatcaagttgaattgtattagatttgtcaactaggattccggacctaagtataatcataacttaagatcagttactttttctggattagaattagattaggttaacattatcacctgcacatgtatctctctgaaattctttatttttattttagggtaaaatggtgcagaaggggacttacactgagttcctaaaatctggtatagattttggctcccttttaaagaaggataatgaggaaagtgaacaacctccagttccaggaactcccacactaaggaatcgtaccttctcagagtcttcggtttggtctcaacaatcttctagaccctccttgaaagatggtgctctggagagccaagatgtgagttcacctcctgttacaacatggcctggttttgttcactgttaatggccttatggatctttggtctactctgttcaaagcttcatcttttgtcccaaagtggattctgtggtttcagggctctattccatgatattggtagattaaaacggaaccaaggcaaaccaccctggttggagttatcctttgtatgtaggctggggaatgtcaaggaggtgagtagcgggtgtgtatgctggtgcaagtcctaagctgtgtgtgactcacactaatactacaattcttgaatttactgtagtgaaatcctacttagtctggtggcccccgacttctctttgcatctggaggcataatttgaagacccccttagagaaagtcctgctgtgggccacatgaaattagccacttttcctgtatgttggaatgttctgatgctgcaggtggctgatggaggtattttgccctgttgtcagatggtttatgttagttaggccagaagtagcatgtgcaaagacccaacagttcctgacacacagcagcccaacttccttctttacctttcaagaataggagctgcatcttactcaccttggtgttcccagtggccagcatagagctgctcaatacatcttcagagtatgtgaatctcatgccttctaagtcctccgggcagaaatgtaccagagctcacttaaaagcatagatattccttgccacacaaaccctgactatccaaatccaggagactgaaggattcttgcagatattcagattaggccctcacatgccaaattatcaggagtcaatttctgaaactcaggaaccaaatagattaggatcatatgctatcccttcctttccaaactctggttactgagactcactgcttgaccccagttactgtgttgagctcatgttttgaccccctgctcttttatgtttccatcttgagtgatgcagttgagagttccatatctttttgtatatgattttggaacaagtttctgtattgacacttgaatttgggtgtgctaggtaagtgctgaacatcctgatggcatcct

SEQ ID NO: 73968 - DNA, 2725 bp, Homo sapiens
tggcctcattttagtgtaattacttctctaaaggttctgtgttggccgggcactgtggcccatgcctgtaatcccagcactttgggaagccgaggcaggcagatcacctgaggagttcgagaccagcctggccaacgttgtgaaaccccatctctactaaaaatacaaaaatcagtggtggatggtggcgggtgcctgtaatcccagctactctggaggctgaggcaggagaattgcttgaacccaggaggtggaggttgcagtgagccgagatagcgccattgcactccagcctggatgacgagtgagattctgtctcaaaaataataataataaaaaaaaaattttaaaaaaggttctctgttcaatttctaaggtgctagggtgagggctggaacataggaactttgaggggagcatggttcagtccataacaagtcctggatagcaaagtggatagcgagtcggctgtgtgagagtaactcatctctgggctctggattccaggggtttggacatgaagtcatccactgagcatggggctctacgtgggttcctgaacgtttacccaccagagtgcgtatgcaaaatgtgcctggtatgggatgatgaagtggatgtgtatgatggtgatggttgcacaatggtgtgtatgtacttagcgcgaccaagctatacaattaaaaatggtgtaaatggtaaatgttatgtcttgtctatttttccacaaccaaaaaaaacgtggatggcagcattgaatctttctgaatgcagagtgcaggataagctggcacttggcattgccgcagcagtctgatcagagcctcgtttcctgctccctcctcattgtgccttgatgaattttccatttcgccgagaagggcctctgtggcttgcttgagtcttgcgcgaggccccaccagttctttatcactcaaacaacaattcccggtgggacgctgtttagagtcgccgcggggaaggaggaaggtattttcattgctgagtatcagtgtgcgtatcgcacaagctccctcagattttcatttgaacacaggaggtatttataaagtcctcttgcacctttaaggattaatgactttggatatatgcttgttagaagcaagcttgttaaaattgttgtttgctaatcagaatcacattctttggggaaacttagggcagggagcacgaatgcaatttaggaaatcactcagcagcaactggagaatgttctcaacgagttagaaaattggattgaacaatatgctatgaaagatggcggttgtgttgaagcttagaaatgtgaagtgttttgtattaaaagtgaatgaattacgcttctatttgccattaacagttttacttcaatcatgaatatatatcgagagttgttaagagttgtgttttacaactatatgttgcaaacactaagtggattttatcacatacaaaaagtgagggtcacttagattaaaggatgctaatccaatttgttgcctgctatagatgtggttgtgttctagaaagcctcaaattctcagacccctgcctctttgagtctcctaatcagatctcccacactgttgcctacctatttgtcttagtccattcaggctgctgattcaaaatagcataaactaggtactccatataaacaatagaaaattgtttctacagttctggaggacaagattcaagatcaaggcgccagcagttttggtgcctggagagggctcacgctctggttcatagacagctgtcttgtcactgtggaaggggtacggcagcttccctgggctggccccttctactaataccatttgtgttggcagattctcatgaaataggcctcacctcctaataccattacattggtgattagggttcagtaggaatttggggagggccacaaacattcaggcacagcactagttcaccttccctctttcaggtcctctaggactcccctacttttaagctacagttctaagtcctcgaatggcaaattgccctttgcagtctgccccattcacctttccaacccttgccatgcaagaccagtcctccagccatgcacacttctttggggtgcctggaaggaggtgtgaatttctcacgtctgcctgtctgtaagggtatttttcctgccgttggacaaccagggatagtttgcctgggcaaaagagaaaaatgaaagacacagatcctacctcctgcctttctcttctgctcctcggagggcatggcgctttctctgtcttcccacagccctcaatgagctgctcttgatccacctatgtgttcttccctccagcccccgcactagactgcgaatgcatgaaggtgcctttgcacagcgcatttgtgccccgggaccattgcacctgctgtatctgccaggaatgcttcccccagatagtctcatggctcatacatcacctccttgcagagaggactttcctggccactccctctaaagtacaacctttgcctggctgtctcttcatggtttactttactatccaatagtgtgttttctgtgtttgtgtagtgagtgtccctacacgactcagggtgttgtctgtttgcttgaccagtggatgtatcctcatcacttagagtagtccctggtacttcgtcagtgctcagcaaatgtatcttaactgaatgaatgaaggtagtgactgtatctgtccctctctccctccctccatcccttcct

SEQ ID NO: 73969 - DNA, 1739 bp, Homo sapiens
ctctgtgccagccagtccatcccctgacaggtctctgctcagaccccctcgatcagagcccttgttgacctccctatataaagtggactttccctctgtcactctgtctccctaagccagcttccttctccttcttagcacttatcacctcttacatttgtgtcaatcttttattgtcaggtcactcactgtggaaactctttcgctgctgaattcacaaggagttgctgctcaaaaaatttctgttaaaatggctcagtgcataaatgctatgaaaagctacagcattaaaatagataacgtgccctgactgtgtatttgataggttcaaacttacaatttagttactatgaaatatttccattgctgttgatcaaatacatgtaaatttctgaagaactaatgtgcaaagtttaggataactttggaagaacacaaagaacagaggaagaacatgttttaagtctctttttccccccttctttcctttgtccatacaggatttacagctgttggaggatggtgatctgactgtgataggagatcggggaaccacgctgagtggagggcagaaagcacgggtaaaccttgcaaggtaagttgcatttcagcagccactatgccggtgtcttttgataccttccagtggtggtgagcacataggacctgcttactgtgtattgcgtcctgtgtgaagcaccttcttgggttattctgttggcatttgaatgaacatcccagttgttgaaagttgtcatgttcctgggtgagagtctgatacctctttgtattttctagagcagtgtatcaagatgctgacatctatctcctggacgatcctctcagtgcagtagatgcggaagttagcagacacttgttcgaactgtgagtgtgtttgtgtcttaagtcatttctgcttttccagagccatttcgagttggctcaggaaagcctttatggctttcagctcatcctactctggtgtccgctcccctccccacactgtcccctgcttccctgaagatccattttagagaaattttgcagaaatacaaggtcaaggtaggaaaatacacaaagtgatttcagtgtgttgcagtgagtggagtgtatcatgttttagggagttgagaaacagatggcaaattttgcaagttttcccctactagtaattacagttgataaccaagaaactgctgatggaccaggccccggagataggaaagatggtactccatttttcaatggaagggtggcacttggcaacctgagccttgtctttcagctcttttcctccatcatttctctatgacaggttagaagtgacgtccttgggaccaacatagggctttcttgggaaggctttgttgctctttacatactaatctgtcagtttggagataacctactagtaaaatctagaatttaagaatgatttgctccatagtagactgtggtttcaagaatctaatgttgcttcatggattcttaccagagtgaacacttaaaacccacaggcatgtaggcctggcttgcctttgaaactagttgtctagaatctggcttccctcccaactcttacgtggtgtttctgggattttctttctttggctcttgcttagacactgagccatggaggtagaactactctggaatcttttctgtatattctataaactcatgtgtgccgactgacacttcctacatagtctagactggcctttttgaaagcattgtga

SEQ ID NO: 73970 - DNA, 4221 bp, Homo sapiens
cactcccgcctgggcgacagaacgagactccgtctcaaaaaaaaaaaaaaaaaaaaaaaaaaagaatattgttttaaatgagaacacatggacacagggaggggaacattacacatacggggcttgtcggtgggtggggggcaaggggagggagagcattaggacaaatacataatgcatgcagggcttaaaacctagatgacaggttgacaggtgcagcaaaccaccatggcacatgtatacctatgtaacaaacctgcacgttctgcgcatgtatcctagaacttaaagtaaaaaatatatatatattgttttagtaagttagcatgagttttcatttcaagaagcttgtcttgtcatttttactatctaaattttgtggaagtctggagctgtgttcacatgaaaatctggtaaaagggaatgggccttccttaagtactgaagactccaaactgtgtaaaaccccaccaaaaaaatatgattgtatgaaaaggactctaggatacaatatcttaaaataggaaggagaaagatttgggttatgttcatgtatcaatgactgttgtattgttttcttctctttttgaagtgatttgtgtgactttattgaaatgggcacattttataaactttaatttgtaggcatcagagaccccaactctacaaggcctttcctttactgtcagacctggcgaattgttagctgtggtcggccccgtgggagcagggaaggtgagttagaatggcttttggcagcttgttgcaaccccacttatcatattaacttcgtgggtttgagcccaaggctacgtgtaacacaattttgaactgggtacacttggcacggcatttctcagtgcatggaacattcgttttgcaagaagggtcacatgaccaaataaatgtggacaatgcatatcatgtttcccttggttcttcaagttgagcaattgggaactcctagaagttggacatctccatgaaagaaattatttatgtgaccactatgcaggatggattgactaagaaagtgggaacttctttttgtcagaggggaccctagatgctacaagacatctggaggttatgaaggcttgtctgaaaagctttaaacatgttttgatatgacttctccaagtcacatgaacacacatttaataaacctgtagccaggtgtatagtcctgtgttaggagtaaaagatacacctgtaatcaagacccagacgccactgccctccagaagtttctggtatctggggtgagacagatatacaaacaggtgatttcagttcagtgtcgtaagtgctctgatagtggggggcacagacacgtcatgtctgtgcattgtagaagatgtgaaggaaacgtgcgtacagacttagtctcatatattctaaagcaacgcaataaatctagttgtaggtgtataacaaatagggtggtttaacaattgaagtttgctcttcagagacacgattcttgggtatttaaaaataaaagtccttcctagtgcacaggatttattatttatttttatttattcattcatttattcacgtatgtatgtatatttagtttttgagacatggtctcgctctgtcacccaggctggagtgcagtggcgtgatctagagtcactgcaacctccatttccctaggttcaagtgattctcatgcctcagcctcccaagtagctgggattacaggcgtgccaccatgcccggctaatgtttgtagttttagtagagatggggtttcaccatgttggccaggctggtctcgaactcctggcctcaagtcatccacccgcctcggcctcccaaagtgctgggattacaggcgtgagccactgcacctggccaggatatgttatttacatacagcatttctaggattagttctttgtcaaaaaagatacccgcatgcaggaacaatgcattcagtattggatatatgaactatatatgtcatgcttggctactctgttgctgtaaacattcttagttgatctttgttccgtgtaccatttcatttaggggcatgaaactcatttagggaaactcattagggcagagtagattgttacactctattttgttaatattccttataaactactagtttatgtggaccattatgttatttccaatttttaatcacaacttcctgtgctcttttaaatgaatgaatggtgtttttcaagctcccagggctgggcaaggctgcattgcagtggcttattcttgtctcgagtgttgactgaacatgtgcttttttacaatctgtttcagtcatcactgttaagtgccgtgctcggggaattggccccaagtcacgggctggtcagcgtgcatggaagaattgcctatgtgtctcagcagccctgggtgttctcgggaactctgaggagtaatattttatttgggaagaaatacgaaaaggaacgatatgaaaaagtcataaaggcttgtgctctgaaaaaggtgagtgatgacttttggatttcatgtactcgaatgtccagtaatactagtgttcacttgaacaacaaggtttattaacttttttttaatttttaaagacctttgaatgttatttaatactttaaggcggtcctcccagtaaataaacacacacacgctctgtccttttacgtctgatgcgaaaatgatgtttacagggtgaatttcgggggtttggttggttttgtgaagttttatttacttttaacttttctttttttcaaaatggacaattataaaaatttgcaaaagtggagagaagggtgtcttgaacctgcctgtacccattgctcaagttcaagtgcgatcaacttgtagccaattcaactccgtctctcccctggccctctgctagctccacccccaacccagattcttctgatgcatacccttggcctcaattgtattttatctgtaattgtattttatctgtaataccttattacttatctctagaagataagaacacttttgaaaaaaaattacatctcactcaagaaaaaaaatcaccagaatttcttgctatcatcaaccggctaggcagagattacagtgctttagtatctcattacccattggtttgcgtcagactccggaagatgtctgcaccgtgcacttggctgatgtttcctgcttgggtccctctcaaaccacaggtttccttctccactccctttaaaaaagaaaatttgtttcagtagattttggggtacgggtggtttttggttacatggataaatttacagtgcaatttattatttaaaggaaactgttttaaaatttatttttcattgtgtatcatttcaccaagagagtgattgttttcagaaaagatgaagtgtttgattgtacactgaggttttcataaacctggtggatagttgatgaaaactgagcatacttaatagagggctataagttctagaagatagaaaaaatggtaaatactgataaatactatgttaccttctttgggccataaaaatcagtgaataatggcattaaagggctctccccaggccctgtgcagtgtggcctggacatcctactgttcttttatgctgtctggaaaaggccgccacagactgtcacaggtgtgatgcagaaggcttccagccaggtttgtgaggaatgagtaattttgcttgaacaatggctggaatatcagagtctgtcaatcaggtgagtagtatttgctggcgatttggatagagaaatcattgcttgtttaatgggctgtttcttcatcctggactattgttaatgagagatgatgcattttcggaaatgacattaagttagcagtaatgagctagatttttattgaatagtatacactatataggaaaagatgcgctaaggcaagctcctagttattcagatcctaccaggtcttatttttttttctctgtctcacacgctcacacatatgcacacacaaagctgtgtaaagttttaatcttttgccatgatttcccagtgcctttgctattgctatcctcattttgtttatttttctgatattgctagcctcgcttttttaaagtaaaattttcattttattcaaagtttgtacagaattgctaacatttccctaaaataattactatacttcagcttgtcctgctctggtgtccccccactgtcccctgcttccctgaagatccattttagagaaattttgcagaaatatag

SEQ ID NO: 73971 - DNA, 1245 bp, Homo sapiens
aatctaagtgactggccagagccagggctgccttcagaggctctgccctgtgtttcctgcctacccttctgggctcacttgcttcctgaaggctgggaatggccttgactttcatgttgccagcatctagcgcggggcttggcacatgatgaggattcatgaaatattcatcagatcatttccaaccaactcccgtgttcaccattagtaacacaaaagtacaacagtagaactatgcaggctgtcaatgcactcagtctcagagcagtattttcggtttatttaggaacaagtatacttgttgaaaaaaattacacagatagttcctaaaattacaaagatagttcatggccatgaactctttacatgtttatttattaaataaatatcatatgctgatgtgaaccgatactttaaatagggttggtaaaatgatctgtaggctgtataaagttttatgttacaaattccatggaagcagtgacttttgtttgtgcttttgtttctgtaatttaaacaatctgtgtttttcccattttctttagacctttttgctacttgatgagatatcacagcgcaaccgtcagctgccgtcagatggtaaaaagatggtgcatgtgcaggattttactgctttttgggataaggtaacatatccttaatgcaagatcatgactgctgaagataatgagtgacattgatttaatagagaattttgaggtgttacacatggtataaaatatggcttgcttatttactgaaactatgttacaaagattctcaaaattaggagtaagttttgcaattaatagaaagtaggtatgaaatcagacttaggtatttgacaagttgtattttatctcattttcaaaaaaccaaggaaagtgttacctcgttctaaactaaatgtcactaagtttggacattggcaacgctggattttataggattggacagactaggggtgcagcatggaatgggttaactgctgagtacattgtagattattacggagactttggggtatcagtgcacattttcagcttagcgttttcaggtcatcttattacatattgagaaagcccatgacttggatttttgccacggggttggggtggggctcccctattccaagcatctggatgttgccagctgctttggtggcagcccaaggccgaggggaggctgcaggccggcgtagcaagctccatggattcctgactgaagggtttcaccgtgtggtaa

SEQ ID NO: 73972 - DNA, 2783 bp, Homo sapiens
ggcggaggttgcagtgagctgagatcgcaccattgcctgggcgacaagagtgaaactctgtctcaaaaaacaaaatatgtattttttttttggcttttggattaaatatttgattagttgttgcattccagcacatgatacttcttatgatttcttgggtagttcctggccacctctcacctttgcacttttttgttgttgttgcccaggatggtctcaaactcctgggttcaaacaattcatccacctcagctcccaaagtgctgagattgcaggcgtgagccactttatctggttgacatcactgcttttttaaaaacctgtactctctttcaggaaggagatttccaagattctgagaagttcctgcctcagagggatgaatttggcttcatttttcagtgcaagcaaaatcatcgtgtttgtgaccttcaccacctacgtgctcctcggcagtgtgatcacagccagccgcgtgttcgtggcagtgacgctgtatggggctgtgcggctgacggttaccctcttcttcccctcagccattgagagggtgtcagaggcaatcgtcagcatccgaagaatccaggttggtgtcagatgccattttaaagttgtaggtgcatttgaagtagaatgatgtctccttttatttagcatcactatgttccagtgtaatgacatttaactctctcataaccaaaacgtgccgccattccagaatgttgtgtgtacttccctatcttagatagagcgcggtaaagacaatgcaagcattgtgattcatttgttggcagcaacataaacagcagtggcacagggcttttgatgtacaggtggtaactgcaggggtgattaaaatgtctaagctgtctaaaagcaggaaaagcaaatagatttcatctcttatgttaacaccaatgagaaagtagtgagtatgagttgagtatgattcttctgtgggctggaaggaaagagcttgctgggggtctctgcttcttggtcaggaagaatggcctcaacttcacttagctatccctgtttgaaaataagttctttcctctgtagatgttttccttgttaatttctgtgcatgcctttaggacctctgccatttctttcctgtccgcttttcacttttttcttactgttgatgaacctatctctgccagacttctttatttccaattggttgatttctactgccttgctccatttgtacgactgtaacaaggaccactctctgcttcccagatggacctctgtgtcctcccatcgtggaggaaacagaaggacaaaatgggcctggttagttctctccagccttctgtaaggacactaatccccttcaggagggctctgccgtagcgacctgatcacctcttagaggccccacctcttaacactgatgctggggtgaacttccaacctgtgaatttagaacaggcatgcccattcaaaccatagcatccactttacacaccatcaccttttcctaagtcgctgtcactcaattgccaggggcaaataatttatatcaccaaggtaaggtcctggcacataatgtatgctcaagtatttgtgtgtttatgaataagttgaaaattaaaataaattggctttgtgagagggcttggcaagaacttgactgtctaagcttttcaaaaatctgctttgttttattcctggttcttaatagagatggatgcccaaggacagactcgagtgaacttagctgacactggctgtgattatttttttatttttatttttttggtaggggagagaatggggtgggtgttgtcataaaagctaagattcttttttatgatgaagtttgttttttaaagatgagatcttgctgtgttacccaggctggagcatagtggctattcataggcagactcccactactgattagcaagtttgtatttcataaaaaatattacctataaaacagaccatacagggtcatttcttatccccattctttctgacaacagcttcaggtaacactgtgaagggatggtccatgcaggtcagtaacacttttttcatgtagcttttgcatcttgaaagaaagaacttaggagtatactttgaccagagtatctttctgagtgtgcaggacacctttttcagacggaagggccacatgtgtattgtgctgctgtaattctctgactgctgttgctgcccctcaccgtgattgcaggtgttggtgtgtgtaccgtggaccagggctcttggaagcctgtacatgttatttcatgttatcctcacaattgaaggagataagcattagtgtccccactttacagagaatgaaactggctcctgtaataggttaaggagtttgcctatcttagaactaggaatctgttcagaaccatgatttcttaaccatggtatgttgcctgttgtattaatctgtttttatattgctataaagaacttcctgagactgggcaatttatattggaaagaggtttaattgactcacagttcagcatagttggggagacctcaggaaactcacagtcatggcggaaggggaagcaggcactttcttcacagggtggcaggaaggagaagtgcaagcagggaaaatgccagacgcgtataaaaccatcagatctcatgagaactcactatcactagaacagcacaggggaaactgcccccatgatccgattacctccacctggtcccacccttgacacgtgaggattatggcgattacagttcaagctgagattcgggtggggacacagagccaaactgta

SEQ ID NO: 73973 - DNA, 3970 bp, Homo sapiens
acctagccctgtctcccaaggcaggaaaacatgactgtgtcactgtatctgctggggctcctggtgtcctccagatagttgatactccatatttgtcatttcccattgaacacattgaaaccctgtgatccaggcagggtgaagagactaaggccccatgtgtttaataatgttgcacagagaattagtgattggtacggatttatagtccacgtcctctcattttgttcctctgacagcctctctgttcttccctaatttggctcaaaattactttggttggctcttaagtagaaacttatgtccttttgtacttgggggcgtgtccaaattcattaaatgaggtgggagatttttcttcttcctacctctcgctttgctgtcctgacacagctgccaccactaaaggtgctggtggggcagagagagggggcagtgggggggtggggatgcttgtgcttagatctggtcttgacatcacacgagacttcctcaggtctgctgtgtcctaagcctgacttagtatcactgcatgaatacaattctctacttacctcttttatttcaggcacttcgtcttagtaacatggccatggggaagacaaccacaggccagatagtcaatctgctgtccaatgatgtgaacaagtttgatcaggtaagctgcagctcagggatcctttttcattgcattaaacacccctctttccccttttattctttctggaggcaggggctcactctgttcacactggattgcagtggcaggatcatagctcgctgaaggcttgaactcctgggctcaagtgatgtgcgatcctcctgtctcagcctcctgattagctgtgactacaggtgtgcatcaccgtgaacagctaatttctttttttttgaattttcatgtcagatgggctattgtggaaacatcataacaaaattcaagggtggcacatctcacacaagtgcgtgaacacccgattatcatgctcatgaactacaaaaggattgctggctaatttctttttttattatttgtagagaagggatcacgccttgttgcgcaggctggtctcaagattctggcctcaagcgattctcgctaccttggcctcccaaagtgctgggattacaggtgtgaacaccatacccgcccagtatccattgtttaatacttaccttgtagcggtatcatttttccagggcattctagctgctggccatattcattttgcactaggaccacttcttttttccaattattcattcatcagaatgaactaaagcctccgctcagtgtcagggacaatgaataagacttggtttctgttctgaagaagctcactgcctgtctgggagacaaacacacaagtaaattactggagtatgtggtgggcactgtagtacaggttttcttggggtactggggagccccagggcatatgggagctgaattctgtggcagagagttctggaaaatgctcagctcatcagtgaagatagtcacgatcaagacattcttctaatgccgctggtcggattctcttgcgagtctcccagacccactctttgtttccccagaatggcttcacctgtggtgggtgcttggctttctgctttagcaggtgtaaacccactgtggccatttctgtttaggatcttgcctgttcttttccagtggatcgtttctgtactgtgttcttactggttttgcttttctggagtcctaagaacgctctgtctttttctttaaaggtgacagtgttcttacacttcctgtgggcaggaccactgcaggcgattgcagtgactgccctactctggatggagataggaatatcgtgccttgctgggatggcagttctaatcattctcctgcccttgcaaagctgttttgggaagttgttctcatcactgaggtaagagaaatactgctgtgaaaaatgtcatatgtatttggtaacatccacagtcttcccaatgcttttgttcagaaacaaactaaatgccttttattatctcttccttgcatatgttgcagctcttcaggctcagccaagggggcctctgtccttatgctgaaggcaaatcttcaagggagaaaggtgaaggcattcactggctcctcccagccagcttttcaggcgctgtggcctcaataagtagagtgtccttaagcagaaatcacatatgtagaagttagttaaacatataatgaataatgataaattgaaatgtttcataggctccattctagctgcatacatctttaccgtgcttgtgttagagctgttttcacgtgtatatatgtgtgttatttttaattcagtatttccattaaattgtaagctccccaaaggcaaggtgaattttaatgatgtagttataaaatcacacagtcctagtagcatatgtgttaggaatatggttgttagctggtcgtggtggctgaagcctgtaatcccaacactttgggaggccaaggcaggtggatcacttgaggccaggagtttgagacctgcctggccaacatgacaaaactccgtctctactaaatttaaaaaattagctgggcatggtggtacacgcctgtaatcccagctacttgggaggctcaggcacgagaatcacttgaatccaggaggcagaggttgcagtgagccgatattatgccactgcactccagcctgggtgacagagtgagactctgtctcaaaaaaaaaaaaaaaaaaaaaaaaaaaaaagaaatacagcttttgatcaagagattaatgatgataaaataaattagacttgaagcaggttccaacgaattggaaatggttcattgtcaaggttgtcagctggatcgagatgagccactgttggaagtgcattgagttctttgttttatgcttttgcttatggtgtattttctacttggaccttcccctctttgccatctggagaaatagtccttgtcctttgaggccccgttcaaatgctcctggtcctctgaagcttttttttttttttttgctctcctctttcccggtggagttaacaaacagccctttcttttctgctccccagcacttcattcccattttagcactctctgaccactgtgttatcgtcaggctcgggtgcctttctgcctttcctgcccacctgtgagctcctcgaggggacagatgacatctgactcattttcatgtcttcctcagcagatattacaaattctccaaaatacttgttgagttggtatagattgttgacttcctaatcgaagtctttttctatttgtattttgagtaggacctgtctgtgttgtcggaagcaaaagcgctgtagggaaccatgtgatgcaggtccctgcctgtgcctgccgctgataagggcaggctgtgatcgctcaggctcatctcccgtgtctggttccccttaggagtaaaactgcaactttcacggatgccaggatcaggaccatgaatgaagttataactggtataaggataataaaaatgtacgcctgggaaaagtcattttcaaatcttattaccaatttgagaaagtaagtttttgtatacattgtaccatatttttgtatttttctatttgctattcttgttgatggttttagaagttttactatgttttcacattatgggaagttcagtacaatccatcccagtccccacgcttggcagttgggttaagtagaatggtagagaacgttattttcacttggtcttccatttaccatgttcttaaacagaaagcatgtatgcttcttactaatacaaaagtgaaattccaaatgtttctgaatatcccaaatcccaacaatgagtctaagatgttagtatttgagaataatggtgtttaaaataaaactataatttatattaatgtagccaaatggacaagttatagagactgggcatatctatattggaccaaactatatgaatcagtatttttcattccaaac

SEQ ID NO: 73974 - DNA, 2439 bp, Homo sapiens
ctggccagttatttttgtctgtctttcagcactgtaaatattgttctgttgtcttcttgttttcattgtttctggtgtgtcagcttctgcttgtttttgttgtttctctgtgtttaatgtgtgtctaggtatagatctctttgtttttgtccttcattgaacttgctaagattcttcattatgtaaattaatatttgctaccaactttggtaaaattccagtcattatttgttcaaatattttttcttcccctatttcttcttcttttaggactccaattacatgaatattttattgcttaatattcttccataaggaccttcattcagtctttgttctttttcttaactctttttttctgtttgttcttcagatttcagttgtaaactatagaaggaagggttagcgactctgggaataaatcaatggaaagtatctgctattaatgatatctaatttatttttcatttcaggtattaccttttcagtttgagaagttctatttggttctttttgatattacctatctcgctcctaaactcacatctacttgttataaccatatttttctttaactccttgacatattataataggtgcttcatagttgttgtttactaattccaaaatctggatcatttcagggtctatttctgttgccatttccctcctttgattacaggtcacattttattgtttccttgtgtatctagtaattgttttactatgttgaacattatgatcgatatactatagggagtctggattaaagagcattgagttttgttcatgcaggtagttaaattcctggcagattggcccctttagcattgaatccttctgtctgtctgtcaatcagttaatcatagggcaggtagctccattctgaacttattccaagtgcacagctgttaatctagggtgagatctttattactaagacatagccttcctggtgtctcaggtgaatgcctgaggcccagtggagatttccttcctctcctcgggcggcatctcctactgcatgacctccagaatcttcggtcagcactcagccccatagctgctgctttcctaggcctcatggagtctggccctgcttatgaagccgttggcaaagtaccctgggtaaatccctactgaaacttctggggcaaaccctctgctactcaggctcacaaattccagatgcttctacaacttggaacaaccatctcttcctccaccgctcagtgaaactgttttgcttgggcagaaaatgtcctcaggcataaagccaggtcagtcccgggccaccacctacatttcccgtctcttgaggctcacagcctgtgttacctgtggtccagtgcctgaaaacagctgtgtcatatgttttgcccaacgttacagttttccaggggagggcaagtcctctctcatggttggaagcagaagcctggtagtttgcttgtcagctgtgtcttcctctttttttttttttaagatggaatcttgctcagtcgccgaagctggagtgtaatggcacgatcttggctcactgcagcctctgcctcctgggttcaagtgattctcctgcctcagcctcctgagtagctgggattacaggcacctgccatcatgcctggctaatttttgtatttttgtagagacagggattcaccgtgttgaccaggctggtctcgaactcccgacctcaggtgatctgcctgcctcagcctcccaaagtgctgggattacaggtgtgagccaccgcacctggcatgtcttcctcattaataatattcatggcccttcatgattttttttatcctatctggagtatgactgatttaatttcagcaggcccttaatttctgtgttgactgtagagttatcgttcacttgggttaacttctattacaacccgagtatctgcccagccttttattccacctctacacctggtcacagtaatacacgacttacaagtagccctcctggtgcacccagaagaactttgtctttttcacaaattggcatctgtgctgtcttacctaaatcctcattgttggcctcagacacaatctgtggatgatagttcaagttgggcacaattgacttcagatttcttgaaaagggtcagcttaggcttagagtttggtgttgacattttgcttttatttttttaaaattaggtatcaaatttacatgctttaaaaatgtggtattttctgcatgtgggattaacattttgtatgtaagactggctttataaatatttacagatagtttgtagtcaataaggcacattacgttctgtttctttcctacaggggcgggctggtctctctccttccctttcttctccctcactcctacattttcttctttctttgtattttacgattgattcacttatatttgcataatagcattttttaatttttttttttttga

SEQ ID NO: 73975 - DNA, 1053 bp, Homo sapiens
tctttccacctcagcctcctgagtagctgggactacaggcatgtgccaccatgcctggttaatttttaaatttttttgtagacaggatctcactacgttgcccagtctagtcttgaactcctgggctcatgtgatcttgccgccttggtcttctaaagtgctgggattacaggcatgagccaccctacctggcctacggagaactttctgtataggttttcaggcttgtattccagccatgaaaaatcaggtgaaacacaaacaaaagcctcagaaggcagtgaaactgtcagattataaagaacatacaggttgttgattttggatggacattttcatctccttaaatttcatttcttttacagaattagagaaggaatgtgactttggtagtcacccatcatgtttacgaggaaggaggatattagccagtccttggatcatcccctcagaaacagagattattggttttagattgtgcagtcattaaagtagatatgttgttactaagcaactctggccaacagtattggaaaaatacaggcaattttctgcttcaagtgattaaacatactcatcctagttgcctgttgcagaaatacccagtttaattggaagtttcattacctcacaaactcaactctggggtagggtcatgaaccaggaagtaagcaaaacataaaataaataagatagataatacttactttatatgcttattcagaacgtttttactctgactttacttacagcactcaaaagccacatcctagtctaaaacactagtaggtaatggtgtgacattctgatgagaataaagagatacctgatagcctgacagccaggggcaagatggatcaggaagtacccgaatccgaaaagtgtggccatttggggactctgtgagaggagcatccctgtccaccccgggtcattgacactgggtaagagccatattgttgtgaggaatttgcatcgtgaaggtgatgaactgcggtttgcatcttttgttttatttatttatttttttaatttttgagaaggagtctcact

SEQ ID NO: 73976 - DNA, 1797 bp, Homo sapiens
gtgctgggattacaggtgtgagccactgcgcctggccttgatcttttccttctcttttcttggcattgctgcagggcaggtatatttttaggtcagtggtcagagcagcagacagcctcctctaccacagactgagtaggaagtggaaggtgccctcccataatgcacagagaggctgggcttgtgcacccttcccaagtcatgtctgccgccctatgcaataagtagaacctgaagtaaaaaaaataaatgcaccgtcatgcgctgatggtgagaagattgcagccacctgtagctctctggctgcatcccagtcttcccaccccgtctccctctgggttttctcagtggatgtggacagacaattgatagcaaattttgtcagcaactgagccatacagtgttgtggtcttagttttaaaacagaacttttgtttttatttaaagctatttttatttcactgtagactgtatattgctttatatttagactgaatagtatgaaattacagatattcagggccgggtgcagtggctcacacctgtaatcccaacactatgggaggccaaggtgggtggatcacttgaggccaggagttcgagaccagcctgaccaacatggtgaaaccccatctctactaaaaatacaaaaattagcctggcatggtggtgcacgcctgtgatcccatctacttgggaggctgaggcacaagaattgcttgaacccaggaggtggaggttgcagtgagctgagatccgtgccaccgcactccagcgtgggtgacagaacaagactcttctttaaaaaaaagaaattacatatattcaactcctttgggcctttttacaaaactagcaatttcatatggctcaaactaatcttttgtctattagtctgtagatcggtttcctttctgaagattcgtagagagcctcttgacagtgttgtcaaagtgaaactgtgtggtgtgtgtggaagttatctccctggacacatgtgatactttggttggacttcctcttctaatgttattttctaagtttctgacaaaattagaatgacccagtagtgcttcttacattgtccataatacgttaaaatttttgtttcaaaaacttttctcccccacagtttttggttttacttctgatgtgaacttgaattgtacctgggcattttgtgagacattaatctcatcaagggacaatttgtcagtcttctagtttgctagggaatagcttaagaggagccaagttaactttccatagcttggagtttgagctaagaaagcaagttaaggagggaggacttgttttgtttggatttttccaagaggaaatttctgctgctggagatttaggagtgtcagatgcgtcccatcatctgataattgtatttgcttcactggggtgtgggtgcaaactggaagaaaatgctttagctcagtggttcctcaaactgctctctgttgtattcatgaggggaaatctttaaaataccactggtgtctggactcttcccctaaacattctgatttaattgctttagggaaattttaaaagctcctatgtgatactaataggcctcaaatatgtgttcagcttaattttatgctttataactaagaccttccagttcacagagatagcatatgggttgcgggtttaatccccctcattggtgaataactccttcggacttgtaggtataaacctcaagcatggtagctgttcatcagcccgagtgtcctaccatctggtctgggaatctcatatgcaggagagcccgggtgttga

SEQ ID NO: 73977 - DNA, 1353 bp, Homo sapiens
tactgtttttcacagtggccacaccattttacattcccacttattctttaataatttgtctgtttaacttgagaactaaatgagatgtttttatgaatcatgactagctttaatttggattgatggctccaagggtggtctgttgaaatggttcatggtggtttgttcaggttcctcggaactctgtgttatttcttacaacttttaccaaataaaaagactgtgcagcacaggctgtattttaagtgaggtcaacagattggcattaagaatatgggctcctcatggcaatagtgtgctgaacattgtacttgctcatgttagaatgtcgtcagtcacaagtcatattcccagcatgggttcgtataacctctgcagtggggacagtgccttatctcctgtttttactttttagctatctgggacacagaagcaggggatgtgtccatcttcaagtctcaaggggttacttctatagcttagagcacatgagttggggagttggctccatgttggaggaagagggtccctttagtcaaactgagcctggattaaggatagctgaagatcttcagccccagccaccagtgagactggatctcccatttgcccttgcctaccttgacttagggccaggatagatctgagcctgaatgctaaacatctgaatgctagacctacgatggaatggaggacagtttcattaatcaggatgggcttgtcatcccagcttttgtattatcaaatacattaggcatagagacttttccttaagatctgtggcctaattagctcaagatttcttgactttgtatctaatttgaagaaccgtggtggttcctgcagtgggttggcttctgagttgtggattttgatgttgggttggcttgtcctgaatgccaggtaaagctacagcagtacctgagcctgcttgctggtgctcctctctgctgtttgcagacttttttgcagaattgagaaagtttggggaaactttttattctggataaaactgctcgtcttcactttctttagagttactctgaaggatagtttgaggtaaagtatctgtctgtccttcatcttccaccttctaaggtgtgttgagtccctgcagactttctagttttcctttatcatttattacagatctgccctagaagaatatatggaatatatgtatgtagtgtatctcagaggggtgctctctatagatttctgtgttgagaaatatttgtagttaccctaagtgtattgtttaaccatttatgtgatactgtgtggttctctttttagaattctgtaacttggggggaaatgcatattccctgtatgcagggaatatggatactc

SEQ ID NO: 73978 - DNA, 1494 bp, Homo sapiens
tttcaggttaaaactcctatcggcttgtcttaaagaagaaaacagttctgcttttcttttagatgagtgatgaatgttgcactttgaaaatataaaacttgtgttaagaaaaaacgagcctaggtgccgtggctcacatctgtaatcctagcactttgggaggctgaggtgggaggatcacttgaggctaggagttcgggaccagcctgggcaacatagtgagaccctgtcttgaccaaaaaaaaaaaatttagctctacatgatggtgtgcacttgtagtcccagctacttgggaggctgaggtgtgaggattgcttgagttagggagttcgaggctgctgtgagctgggattgtgccactatactccagcatgggtgacagagcaagcaatatctgaaaaaagagaaagtaaaaagaaaaaatggtgtggtctgtatgtctaattaaaggcttttctttttcttcttttaggaaagtgccaaagtaatccagcccatatttttgggaaaaattattaattattttgaaaattatgatcccatggattctgtggctttgaacacagcgtacgcctatgccacggtgctgactttttgcacgctcattttggctatactgcatcacttatatttttatcacgttcagtgtgctgggatgaggttacgagtagccatgtgccatatgatttatcggaaggtaagtgacattcagcattaaacatgtacctcacctgaagcatcagaagcattctgaggaagttttatgtaaattaaatactgcataaatagccactgcactccagcctgggtgacagagcaagaccctgtctctaaaaaaagaaaaacgaagaaaacttctgtaaatagaatcatttacaccttactagagaagcttgctatttgcatcaggccaatgttttttttctttatgcaaaattttccagtgtataatgaaagttttctactgctgtcagggcatggctgcctttgataacaggctgttgcagaatactaaatttataatgaaatctaattaaaaatatcaaattggttttcagtgtttctttgcctcaatctcatagttgtatttatggaaatttttgttgttgttcattaaaaccttcacttacatcacagttgtattcagaagtgaacttcagtgaaattggatctatgaaattaaatctaggagaaaagaatatatttgagaaagggaattcttatattttttaaatgaaccatttagtcatattccatataattttcttaactgaagaaaaatgtaaatggaatccacgtcggatacaggctttctttatattctaaatctagttgtggttgtttttaatggtatttaagaaaatagttggatgtttgggataacactttgaattgttgattgtttttcacaattttggagagaacttatagtgtttctattttatgttggttttcattcaaagtaagtttttacattaaacagttgtcccttg

SEQ ID NO: 73979 - DNA, 2196 bp, Homo sapiens
ccttatctctggatctttctcaaccctagttttgtcccctgttcccccatttctttttttttttttttttttttctgagatggagtcttgtgctgttctccaggctggagtgcagtggcgcgatcttggctcactgcagccttacctcctgggttcaagtgattcttgtgcctcagcctccccagtagctgggattacaggtgcgagccaccatacccagctaatttttgtgtttttagtagagatggggtttcaccatgttggccaggctggtcttgacctcctgacctcaagtgatctgcccacctcggcctcccaaagtgctgggattacaggtgggagccaccgcgcctggctgtatttccccatttctaaaacaaactgcttactcatttttccacagctcactcttttctgcttgtatttttcactcaaacatcttctttggtagcttgtttctatttcctgtgttttctttccttcccatgcaatctggtatggtgcagttgggcaaggaatatctgaagtgcgtgggggagcaggagcatggaggccgcgtgcccgctgggcctagacatgtaatgtgtcactccaagaaagcaagggatggggctcgaatgtcaggaggctgagtaccaaatactccattgagaagtatctgccttcaagtactctgggactccagtagaacctgaagtatggaacattcaagtatcctactggactctcaaaaacctccatggtttcacagtcgaggagaattcttgtgaaggagtaaggactattcttagcttgtttgtggaaagactcttcaccaggtcatagattggttggtctctaaggtggagaatttatgtgagttacttttgaccttggtactgatatttagaaagtttaaatttggttagttgtaattttgataatgagtattttcccagttgtttcgtttcttattagttgaaggttaagatggagaggtccgtggaaaagcatggaccaaaaaccagcattactcaccaatgagcccatttgcttgactggattattaaatgctgtctctcggcagggaaatctggacaattaggtagtcgtgacctacctgccttttgcattctctttcgctgggtttattgcatctgttatttcctctgggggtcatccctcttgccgtttgaatcatactcacctacggctgaaatggagaagcgtgtaacaggtaacagtgactcccagggactgtgagaagtttcaggaacatttagaaaggcaaagagcactgagcgtctggctgatagcccaggtgtgtctgctgcggccctggttgcccttggcactcctgagccagggctgcccatgtgtacagtttggccgtcttgcttcttgatgtaaacgtccagattttcatctcagtaaactctaaacagtccgtgttatgacccattgtactgggggctcttccataaactcttagtgccttttgaatgattggccatgctggaaatgtaatggtgagcctctgcattcttgatatctgatcatcttattcataattcttcaactaaatggtattttctgatttctgtatcataggggaaaacttccatgacctcatggaaggcagtgcagttggtgaagtgtgtgagagagagtgtgtgtgtgtgtgtgtgcgcgcacgcgcgcgttcacatgccgagacaggcttgttgggatttaatatcatgacccatctgagggatgggaatgtcttctgtaaatatcctgatcccgtgctagttgtttgggatgaaagtgtgtgttaattttgtttttgttttttactgattgttcttctctcacttcagatggacagaaaacagctatcaatggcaaacctgtcaggtgtttattatgtctttgttaagaaggagagattgcttaaaaggaaaagttgtttttcaaggttaaggtcttgaaagattttcaaacattttgcattttgtcttttgagaagtcaggaggaaatgatgtcgagggcctacatgtttacttttggtgacctggatttgcaatgagtgtttggttttctttgttgggggaaaagggtcccttacaacgggttcgagagggaggaagtaggttgccgggtgaagtgctcatttggcagggagggtaaaggaaagctcctttgcttacctcaaaccgtggctcaagctgcgt

SEQ ID NO: 73980 - DNA, 1494 bp, Homo sapiens
ggggggtttgctcctgttgaacatgctttttgttgtggagggcacggtgggcagtgggaggcaggtaggtgagctctgccctacaccagaggaatctgtcagacaacaggggactggacggtcctgggagatgaatggtctcattggtgacaaaggtgttttggccagggtgccagatggtgaatgccacctttgagagggtacccgccctgcctgcatgctactgtggctttgtggcagatggggtggacatgcagaataaccggtggaactgacttgagggtggaagagggctaggagcccctcaggttctcccagcccctcttcaacctgtgctggggtgtcccagcgatagtgtttccacatggccccgatcagtttcagttggaaagaaatagaatgacaagtcggtgtcaatgtggccagtgtgtgcaggatttcctggcccagtttggctgtgcaacctcagagaagttgtctggtagccatggagcctctgtaagtgtctaaggctcatgccaggtgtctggttaggtgtagtgggaatcaatggcctcacataggtttcgaggcatgcctccctcagctacttccatttctctagtttccctttgtcaccagctgcttatgaaattgaaaacaggatgatttagaaggaactgagcttgtcatgctcagggctgtccatgctgtcatgggctgccagccacttggggtggggtctctaacccacagatggtgactggactacagtgagatttgggtaagcttttgggagaagcaggcacagaagtagaggctgtagaagcgtgaatttctcctgagacttgaggacaggccccactctggtgcaaggagcatggtaatctttactgctggtgggcatgtgggaaggggcccggatcgaggggagctttaatatgggtacagttggtggagagctggtcttttagcggggtggttattgggcagtcatggcagaaaagtagggagtggaggacctggcaaatatgggggctcatgctcagtactgcttagcagcagcagtgctagtagaagcagcagcaggattagtagtggttggtactcagtagtagtagtagcagcagcagtgatagtagcaatagttgtaataatactgacagtgagtacttgaaaaatactatgtaccaggaactgctatgatttctttctttctttctttctttctttctttctttctttctttctttctttctttctttctttctttctttctttcatgttattttattttattttgttttttgagatagggtctcactctgttgccaggctggagtgcagtggtgctatcttggctcactgcagctttggcctactgggctcaagcagtcctcccaagtagctaggaccacaggtgcacgccaccatgcctggttaatttttgtatttttgtttcactatgttgcccaggttggtcttgaactcctgggctcaaatgatcctcccacc

SEQ ID NO: 73981 - DNA, 1700 bp, Homo sapiens
tgtcatgatttatttggatgcttccattatcacagacttgtctagtgggaccccgtcaagctgggtcctctgttctttgggcccatcctcttgattccttgaatgtttccttatcgtatggtatctcatgggccatctttttctgccccagcctttgaatcagctatttcttcaggaagctctggttccttttagataataatggttttggaaaccaagatctgggcaccagcatgctctcagctactggtgtgtcattgcttctggggcctgtctgtggatagagctagggactgtgtgtgtgtgtgtgtgtgtgcacatgttaacttttctctctctagctctatatattcatatctgtctgtctatatatagctgtatgtattttaaaggtaagtttaagcaaaacccatggaggtaggagtctacttaaacacggatgtgtaattctggatatatgtctcttttctcttgttaacaggtggctcaatcccttgtttaaaattggccataaacggagattagaggaagatgatatgtattcagtgctgccagaagaccgctcacagcaccttggagaggagttgcaagggtaagtcggaggcagtaaagtgggcattaaggaagcgtgggtgtctgtgtgtggggagtgggttttgccttcctgggtcctgtctggagcctccgtttacccttaaggtgaatatgtgtcaccttcctcaggctgcccctaggctcagcctaccatggtggcctgggggaaactcctgttgcctgtgcctccgtagaggtcaggggagccagcaccaaaggcccgagatgcctgaggtctgtccctctaggtggaagtgttgtggttggaggaggttgtctggcttatctgtgctactgatggggcttcaatccagtaaagcttggcagtaacttgtttccccagacttcccctcaaggcctgtttttctgatgctccagattctgtaccacacataaccttcaggagccctgggagcaattagtagcatttatgaaatcgtcacaaaatgccctgtcttaaatgcatacctgtcactctgccatctcccctgttttatattgtggcagggttcactcttatttacgaagctttttcctcattgtaggttctgggataaagaagttttaagagctgagaatgacgcacagaagccttctttaacaagagcaatcataaagtgttactggaaatcttatttagttttgggaatttttacgttaattgaggtaaaagcttttacataccatgaattgtttttcaggacacatagagtaaatgtgctcgccattgactggtgctgtaatggatgggggaacagaagggagaagtggccagatggggtttgaaggtattttaaggtctaaggattaaacatgtctaggaagtattaggtagttagttcagtgagcgtatttatccaggtgaatacttaagtgactgaagttcaaggtcattattgtttttcttgtaaccaattaaaatgcagtgtcatggaagaagagtattttattctatggtaggacaatgttggtgctcggtaaatgttttaaatgctaagagtcactcctggtcaaaagaggatcctacagccttgaggagtgcgtgccctgtggtttagaggaagtgattttggatcggagcccagaataatgtaagacattttaca

SEQ ID NO: 73982 - DNA, 1048 bp, Homo sapiens
gagtttaaatatgttaaaataggtaatttttacaggatgtgttcattcacgtgacaaatctgggtgacttctatgtgcccagcatgttgtaggtgtgggtggcttagcagcaaacaacacagaaaaaccccatccttgtggagcctagatgcctccaggggaaaacatgatttcaaaaaagtgaaatataatagcccttctaatgttgacaggtgctgagtagaaaatttaagcttgggcaggggcagagggtgagccttatagggtcaatgtgactgtttctggatatactttgcatgttgaagtaataggacttggatggcttagatgtgtcctatcaaagagtgacaaagaagggatgggctgcagagtcacctgaaggttttcttttctttggaaaatctgggcaaggggaaagatgtgacggctgataactgagagggagaagcctgggaggagcaggatttttttgtgggatgaaaaggtgttctgtttggacattatttagtttgatatgcttatcagacacccaagaggaggaggtgttgaatcagcagttggttatgagtcaggggtattgtatgtgcccttaggcactagcaatgttttttgtgtttttttttaagcaaaattatgaccatcatttcagaaaactattttatatatataaagaggttgaaagcttattaagactagatttagaaaaaacatataatactctgagaaattctgtgtgtagtgtcaggtagaaagtaaagtgttaccagttctgtttataaaaccccctttaggccaggcgcagtggctcatgcctataatcccaacactttgggaggccaaggtggggggattacttgaggccaggagtttgagaccagcctgggcaatataatgagactctatctttacaaaaatatacttaaaaaaatagccgggcatggtagcacgtgccttgttatcccagctacttgggaggttgaggtgagaggaccgcttgggcctgggaggttgaggctgtagtgaggtatgattgcgccactgcactcca

SEQ ID NO: 73983 - DNA, 1046 bp, Homo sapiens
aaaagtcattttttctcttccccttcccacagtcattgttgattagagaaaatactaacaaaatatattaatttaatttccaactacagataacaccaatattaatagttgggtgactgtccctcttttcatggagaaaacctaatgcctatcaaatgcccaacgttgaagagctatacaaatgtggattttctggtcgtcttcctccctcccttcctttatcctctcttatgacagaaaattacaaacatgtacaaaagtagagggaacagtaatgaacccctgaataccagtctgtcaacaatgatcaattcccagccaatcttaaccctccttctactcatttcctgccctagaagtgttactttttttggcacatctgatgagtgaagtgaagaatggtatttcattgctctgtttttcttttctctattcttttcttttcttgcaaaaccccacactgtcaccatgcatttgttatgtaattttcagatgtatctgtaggaaatggtcagtatacgattatatatacactgttaaattatccattgaaatcacattgtgtaccttctcactacattttttaacctttatgttataaagcagatacagaatattatacaaacaaatgtgtaacgtggataataaattataaggttaacatcctggtaagtagcaaccagatcaagaaataagattttgctggtccctgttctgtgtcctgtctcaattccaggctcctcccttccctcagaaagaactgaaagtcaacttcaaactctttgtggtctgtattacttttaaatcttgatcaatgttgtgtgtatatatatatatatatatatatattttttttttgagatggagtctcgctgtgtcacccaggctggagtgcagtggcgcagtctcagctcactgcagcctccacctcctgtgttcaagcagtcctcctgcctcagccaccagactagcaggtgagctgcttgtgctgctgacaggttgtaggctctgtatttggaagatttaggtatggcaaatcagggtgg

SEQ ID NO: 73984 - DNA, 1063 bp, Homo sapiens
aacatgctggagcatttcctctgaggaagttatctcaggtactagagattaatcagcctgcacctctttgtgtatattcaataatttagattttttgtgagttcaaactggctttttcttaaagttggtggggagaggcatgtgatcagacttcttgggtggttaggagctttttggattgagtcccgtctgttttccaggctgttggctaatggtgattaaaggcccagggaatcctgcttgtctccttccagtttcgtgcagagctatgtcacgctgcgtgctctgtttctgttaggaccaatgtctgtttgttatataaatagaaaaggaacataaagctaaggaaccaagaaggttccattacagatcagtgtctcaacgtatccttgaggtttggtacaagttctccgcttcctgaaatttttggacaaacattgtgacattcataaataccggactgctaggatattgagggctgaggtaacgcaaatacttgctgtggttttatagagtaataatctgttaatcatagctgtggccttagagaataaacaacctctgtgtaggcttctttgtaagaatggcacagctgacggggacctctgcgaaccaaaggccagcgtgtgaccttcttatcctctgcttcctaggccagcagtgactgcctttggagatctcattgtttacagccctgtctctgactcagggtggcagattatgtttttggtagagcccagccagcccctatcacattgcacactaatgtaatccgtcggcagctgtctctgtattcattatttagctgcactaactggagttaatcatagatctgagctaaactttgttatgggtcaagagagaaaggccatctggctatttcttgggtcgtcttgggtgtatttttccactgcttatcatttgaccaccatctgttttttgagacggagtctggctctgtcccccaggctggagtgcagtggcgcgatctcggctcactgcaagctccgcctcccaggttcacgccattctcctgcctcagcctcccgagtagctgggacta

SEQ ID NO: 73985 - DNA, 1416 bp, Homo sapiens
aacctgttttattttattttttgagacggagtcttgctctgttgcccaggctggagtgcagtggcacaatctcggctcactgcaacctctgcctcccgggttcaagtgattatcctgcttcagcctcctgagtagctgggattacaggcacccaccaccacacctggctaatttttgtgtttttagtagagacagggttgtaccatgttggccaggctggtctcgaactcctgacgtcaagtgatccgcctgcctcggcctcccaaagtgctgggattacaggcataagccaccatgcctggcttattctatgttgttttttgtgatggtcagtgagatgtggccacaggaggaggcagaggaggtgctcaggaaggccaaggttattatactcacaggtcttagagacgggaagcatgtcatgccctgcagggccacatggggaagcatcagtcttggtcccccctgtaggagcctgaaggggcaggagtgaggggagagcctgggccatggtctttcttgagctttcagggacagggcaggggagtgcatgtgaacagtttagaattggctagtttgaataattttggcaggctgtaagctacaggcatggtttctagttgcttgttatcaggctctggcatgatataggtgaagaaatactgcttcctggggtggacaggctagataaagacggcatagctctgggttggttggtttgcatatcagagctgtgctcctggctgggcccttctggttctaagaactggccagctctgggaaggacagtctctccccagccagagaggtttccaaaacgtcaagacatcatagtatgcacaaagtaaaaaatataaacagtacaaaggccctgaacagggtcaccctgctgtatgagaaatctactggcctggctgaaggggaaagttgcttgggcagaacagtgaaaagctaaagcaggcttgttagttgtatgagtctgttttcacgctgctgataaagacatacctgagactgggcaatttacaaaagaagaggtttagtggacttacagttccatgtggctggggagacctcacaatcatgacagaaggcacggaggagaaagtcacgtggatggcagcaggcaaagagagagcttgtgcaggcaaactcttatttttaaaagcatcagatatcgcgtgaaccccggggggcggagcctgcagtgagcctagatcgcgccactgcattccagcctgggcaacagcaagactccgtctcaaaaaaaaaaaaaaaaaaacaaaccaaaaaaaaaacccatcagatctcgtgagacttatccactatcacaagaacagcacaggaaagacccgcccccatgattcaattatctcccattggatccctcccacaacatgtgggaactgtgggagc

SEQ ID NO: 73986 - DNA, 1286 bp, Homo sapiens
tttatcacccatattacgggctgaattatgtccccccaaagttcgcatgttggagtcctgatctctagtacttcagaatgtgattgtatttgaagacggggattttttttttttttttttaagatggagtctctctctgttgcccaggctggagtgcagtggctctgttgtccaggctggagtacagtggtgtgatctcagcccactgcaacctccacccctcccaggttcaagcaattctcctgcctcagcctgacgagtagctgggactaccggtgcgtgctaccacatccgggtaatttttgtatttttagtagagacggggttttgccatgttggccagcctggtctcgaactcctaacctcaggtgatctgccctccttggcctcccaaagtgctgggattacaggtgtgagccatagtgcctggcctgattgtgattttttttttatggcagcctgagcagactatattacagcccacaagcctcacaaagatattgcctggagttagtgccactggttgtcattttccagagctgctttgtagggcagtaatgtgtcctctgttagactgaactcgccaaggagtttgaccctctattccacctgcttattatagaactactccctcttttcctcatatttcttgggttgagtttgggtaagattactaaaattcttcagatgtggaaccaatcttcataaacacttcagaatactttgcttccttctgaattactacagacaagcagtctgggaggtccaagtctgtataattattgttcttaacattctgtcactcattattgttggtgttcgtttctcaatgccagatgaggtgtgtcttgggcaaaagcctgtccagtgtaagctgttctgttctttcaggcagaatcactcagacttatgctctcaactttctctctctctttttttttttttttttttttttttgagagagtctctgtcgcccaggagtgcagtggtgtgatcttggctcactgcaacgtccacctcccagattcaagtgattcccctgcctcagcctcccaagtagctgggattacaggcttgcaccaccacacccagctaatttttgtatttttagtagagatggggtttcaccatgttgccacagtgcctggcctgaactttctcttttacagccacatgcaaattacctgaactatctggcttttgggaaaaccctgtgcaagttcttagcatccagtattaaaagaaaagagatggctctgttctcttagcaactcaaaatcctcttc

SEQ ID NO: 73987 - DNA, 2203 bp, Homo sapiens
gtagctgggattacaggtgcttgccaccacacccggctaatttttgtatttgtattttttatttttatttatttttttgagatggagttttgctctttttgcccaggctggagtgcaatggcgcgatgctactgtgcctggcctcacgatttcctcttttttttttttttttttttttttttgagacagagttttgctcttgttgcccaggctggagtgcaatggcacgatcttggctaactgcaacctctgcctcccaggttcaagtgattctcctgcctcagcctccccagtagctgggattataggcatgtggcactacgcctagctgatttttgtatttttagtagagatagggtttcaccatgttggccatgctagtctcgaacgcctgacctcaggtgatccacctaccttggcctcccaaagtgctgggattacaggcgtgagacaccacacccggccatgattcctcttaacacaagctggctcttggtgctgcttttcatgaatatactctcaaattgctcccttcaaatgattgttgatgtgcattatttcttttaaccttattagctttattttttctaaattctttttagattacatagcagtttcttagccctcaccatgattggatcacctggacagccataaaaatatggatgtctgttccccttataggccaattggaaaaataatttctgggggtgggatccacgcatctatctatctatcatctatctatctatctatctatctatctatctatctatctatctattttttttgagacagagttttgctcttgttgcccaggctggagtggaatggtgtgatcttggctcaccgcaacctctgcctcccgggttcaagcagttctcctgccttagcctcctgagtagctgggattataggcatgcgctaccatgcctggctaattttgtatttttagtagagatggggtttctccatgttggccaggctggtctcgaactctcgacctcaggtgatccgtcagccttggcctcccaaaatgctgggattacaggtgtgagccaccgcgccccgcacatcaatattttaaaaaggttctctacgtttctgatgggcactgaagcccaagaaccactgatcaactgcttgccaaagtcaaaaatatttctgtgcatatttccatttttctggccaaaggttcgctgcccctttttcaggttcctctcaaaggacttgtctgatctcaaagcatgagaaccattaccacaataggacttactcccctctgtgggtgctcagccagtggctgagggagaagggggattgctccgtgccagggatgttgttagagatgccgggttcttcgatttttatagtaaccccttgttgagggtggctctgctcttgtgttacatacaggtgaaggaaactgagagagtccaggtagcataatgagggtcacccaggcaggacatgatggagttgggaactgagtcaagtctgacaaattccaaagcatgagctgcagcctctgcgtcactatgtttattttctcaccctgggtcagagattaattgagctcatgagagtacttgacaggaaatctcacacttgtgaattcagagctcgtgagcataaaattgctcttctaatcacttgcttttatttgctgatctttattggtgcattttattggtcaggatgtgattgagattatgtaataaacccaactgaccgcttcttttaacttctgctattgaagtaatccctcagattactgtcttgagagacggagagtgcatacagtccaacagtgtgtactcttcctctttaaagacagtagaaaggtatccatcttgttttaaatagtagcagggaggtttatcaatggcttaacatggtaggctgggcctggagagctctcaatgtaacagagctcaaatgtggcatttacatgaattctaagttgattaagcgacacaatttgttcaactataaaacataatacattcttaatagattttacctattattgtatatgtaagttcctagtacatattaggctgtaggtaaatgggatgatgagggttcttgctaaatttatcccccatccttttttttttgagtcagagtcttgctcttgagcaacctccaccttctgggttcaagcagttctcctgcctcagcctcccgagtagctggaatt

SEQ ID NO: 73988 - DNA, 1147 bp, Homo sapiens
agcctccaaaagtgctgggattacaggcatgcgccatggtgcctggacaggagtttatttttgaccctgttaagtttgagatgcctgctacacattcaagtggagatgttgaataggcattcaattggtcatgagtttggggctcatggagaagtttatcttattattattatttctttaaatggagtttcactgtgttgcccaggctggcgtgcagtggtatgatcttggctcactgcaacctccaccttctggttcaagcaattctcgtgcctcagcctcccgagtagctgggattacaggcacgcgccaccacacccagctaatacttgtattttagtagagatggagtttcatcatgttggccaatgtggtcaggaagtttatgtcaatttgggcatcatcagtgatacatgcagttgagctatattggacacatggccaattgacctcacagtccgcagggcttgtccccatgtaactgctcttctatccctatgcaaattcattttgtagatgctaacgtttagcagctcattgttgctgttgaaagttcttggaacactttcgtagtctgaatgctagaaaggatgggtcctaggaatgtcctctaggttgtggcagatccactaatcaacactgtggttgctagattaacttggccacaagtgtcaagagaggtcgtgtcatatggaggtctgctttatggaagtcaagaggtattggagtattggatcacctgggcacttctgtcttttttttttttttgagacaggatcttgccttgccagccagccttggagtgcagtggtgcattcatagcttattggagccttgacttcccaggctcaagtgatcctactgcttcagccccccaagtagctgggactacaggtgcgggccaccacagctggctaatttttctaattttttgtagaggtggggttttgccatgttgcccagactagtctcgaactcttgagctcaagtgatccacctgccttggcctcccaaaatgctgggatgacaggtgtgaaccgtcatgcccagcctgggcagtcattcagaaaccctaccaagaaaagggttaaagtcatttggcatggtttcctctttttttttttttgagacagggtcttgctctgtc

SEQ ID NO: 73989 - DNA, 1011 bp, Homo sapiens
tttcacctatttctttcttttttctttcttttttttttttatgagacagagttttagctctgttgccaggctggccgtggtgtgatctcggctcactgcaacctccgcctccagggttcaagtgattctcctgcttcagactcccaagtagctgggattacaagtgcccaccaccatacctggctaattttcatgtttttagtagagacagggtttcaccatgttggccaggctggtctcgaactcctgacctcaggtgatacacctgcatcggcctcccaaagtgctgggattacaggtgtgagccactgtgcctggccttccattttcttttagctattgtttcatttctaacaataaaggcagctagaatttcttttggtatttgatatgagatagtccccattttttccccaaacagctcgttttccccattatcatttattgaataattcctcctctttcccgttagtggaaataagtggcatagcctatgaactgtggccagctgggcacaagatgggtcaatccctgagactctcctaggaattgtcctgctgccccctggtgcccggcaggcactttgcattcctctgcccacacctgatccagaggtgatctggggtcagcagcagggtggaggctaacaacgaaggacttttccctaaatatgggcattgagagggatctccagatgcatctggcccacagaaagtggttaaatccttgctcccctgttgctggccatatctcagtgggtgaagtgtcatcttgcaaagcctgtgctgctgtggaaactgccactggtgaccagacagactctctggagacctgccctagagagctgatgacatgactatagaagcaaacacaagtggctgagggcaggggatggcttagagaggaagggtgtgtgaggccctcagtcaatgcatcaaatgtttaattttatattttctttttctataataaaaaaaatatttttcttgtagagatgaggtctcactatgt

SEQ ID NO: 73990 - DNA, 1616 bp, Homo sapiens
ggcggaggttgcagtgagctgagatcgccccactgtactccagcctgggtgacagagtgagactccgtcttgggggagtggcgggtgtgtgtgggggaattccgtctgctaactacataagcctgaacctttgaagggcttcaatctcacttggatgattattagatcttctgtttcttgacctctgccgcctcatctttcccacatgttgatattgccttttattatgggacaacctagggtgggggtctccaattttttgggttccctgggccacactggaagaattgtcttgggccatacataaaatacactaacactaatcatacactaacactaatgatagctgatgagctaaaaaaaaatcgcaaaaaaaaatctgatgttttaagaaagcttacgaatttggcagcccatgggcctcaggttggacaagcttgacctaggggattccaagaggatgagtcgcttactcttgtttcgattgtggtacactcagtgggtgtaggaacttctcttggttgtttggcggcctttctcttaaggagaggggcacgtggaggaggaaggaatatgggtgtggtttctgcaaataataacttgaggtagacaaatggtctcctcaacttcaggcagggcaaggaactttttttttttttttttgagacaggatcttgctttgtgcaagctgtgacccaggctggagggcagtgacacattcatagcttgctgcagcctccaactcctgggccgaagcaatcctcctgcctcagcctcccgagtagctggggctccaggtgtgtgtcaccatgcccggataataaaaaaaaattttttttgtagagatagggctctctatgttgttgctcaggctggtcttgaactcctgggctcaagtgttcctcccgcttcggccacccaaagtctgggattacagatgtgactcctgcctccttatatttttctccccctgcattttcaaaatgtaggtggcagggaaataggaagtgatgcgctcccattgatgacttgagtaggtgttcatttccggtttccctgatggaagggaaggagctagtagacctctgttttactccgaggacacttaagctgagagtggttaagttgcctggactcacacaacaatcaagtgtcagagcaggctccaaagctgggcagactggctccccagcctctttggagctgctgtactgagctgcttccagttcaggtgctgtcggaaatgcatggagaaggcgctccctgttctggaaggctagagtttctcaagggaaattcttaaagtacctgcagttggagatgatgcatgtgtaacaactattagtgtgctttagggcagctgttctcaaagcatagcactcagagcagcagcatcggcatcacttgggagattctaagagatgcagattctccagcatccactctggactgattcagtaaaactggaaacactgggtgtgtgggtgggggtggtgaggtttcaagtgctccaggtgatcctgatttgaggcgcttactgcttccagctactcctttcattggagtattattacagtattatgcttttctttatttttaattgttaaaatttcttt

SEQ ID NO: 73991 - DNA, 1026 bp, Homo sapiens
tttttttgagacagagtctcactatgttgcccaggcttgagcgcagtggcaccatctcggctcactacaacctccgcctcccagattcaagcgattttcctgcctcagcctcccaagtagctgggattacaggtgcccaccaccatgcctggcttaattttttgtatttttagtagagatgaggtttcaccatgttggccagactggtctcgaactcctgacctcaaatgatccgctgtcttgtcctcccaaagtgctgggattataggcgtgagccatcgcgccctgctgcatttcatttttttgtataaaatttggtttgttcgtttttgaggggaaccattcctttatgttgccccttactgatgcccaactaatgtgtttctggttactaacagaccttcatcccccaccctccctaaattcttcggtgtaatctaagcgttatctgcaccacttctgaataataaatgtgtttgaaatgcacacctacacaaccctgtcccacactggcctgtaggacctaatctaccttcatgtctttcagttgatttgtatttctgcaaaagatatttcaaggattatcaaggtatggaattttttttattttttatcttttaacaaacttgttcatttccttttctttccattgagcacctctgaacaatgtgattcttttttttaagtctttcacacttcaggaaaatactacattcacccacgttgtgattcatatcggacagtttcttactcaaagataacacaaataccaattcttattcatactttgaaactatattttaccctagactgccttggttcaaaggcctagtttcgacattactgtggcaaattatttaagctctctgttttcatttctttttctgtaaatgcaggatgaaaacaatatgtatctcctaggatggctgtgaggagtgagtgagacaggacatgaaaggtgtgtatgaactgtgataactgttgcccttgtgggcatgttatatagggctggctctaggaagaagc

SEQ ID NO: 73992 - DNA, 1149 bp, Homo sapiens
gattaatgacaatatgaaattatggatttttatagacttgacaatgtgcttgtttaaccattgaggccttctcttctgcctctacccaccacttacaggacttcaagaaaatgaatcaagcacattaaaaagcagcttagtaactgtgactgattggagcgacacttcagatgtctaattccacatgtcagaagattattccagaagccagcagtatttcagtatcacagtgtttcagtaatttgcctccatgattctagtgcttctgccttaccgtgtttcccacagcaacacagagactgattcaaagaacaatggtctctttaatggcacccaatacagtattgaaaatcagatcatcaacagtatttcgaagcatgtaaaggtgtttaagacttccgctgctgcttaaaaataacatgtcattgaagtcataaaaagttttttcttcagaaaggtactctagtgttaagtgtatttttttcaactaattttttagtgaattttttttaaacttacagcatgttttggtttgaattactaaaactttaaaaaatatttttcttatgtatgctgtcgtatcgtaggcgtttatattataaaattctgttagtagtcttaaaattgaattggtggaaccactaatccttaaaagttagtctggttatttttcatatagaagtaagtttaatccgagtgtggtggtgttcacctttaatcccagctacttgggaggctgaggtgggaggataacttgagcacaggagttcaagaccagcgtgggcaatatagcaagactccacccctccacaccccaaaaaagtaagtttaggattagaatatagctaggtccaatgttaaatacattttcctggagtacatttgtcacattcagctttgagccactgtaagcatgttactattaaatggttggttattttatatagcatattctttatcttggatattttatgaataaagtatagttattttaagtgccaattaatttatcagactaaatagaaaatatttgagccattactgaattcacatatgtatgtttttttttactatttaaaatacccaacatgtattatgaaatacctcaaaagtaatttagttacattcttaaacaatgacattgtcgaa

SEQ ID NO: 73993 - DNA, 1076 bp, Homo sapiens
atatgaatattccactcatgcaggttatctcactgaaattaatttctgaccacacacttgaatgagatcctctttctttgatttaaaatgtaaactttaggccaggcacagtcgctctcacctgtaatcccagcactttgggaggatgaggcaggaggattgcttgagcccgggagttcaagaccagcctaggcagcatagcaagacctcgtctctattttttttaattaactaaataaaatgaaaatgttatatagctcatagtctgaaggattatgatttttttaaggattgtgtgttaaattttctaaccccaaagtacatcaactgattttattttaataatacataattacttccaaagcttagactctttcaaagtttcctgtaaggttattttggaactaaagatagattaaatttttaaatacttaacttgcctaatttttattgatcttataggagtcgccgttaaaacacctactgaaaaagttgaaaagatgtttccacatcgcaaaaatgtgaacaaaccagtcggtggaactaatgtccctgagatgtttatcaaaaaagaagaattacaagaactaaaggtgaaatcacttttacttgctagatatacataaatttgtctttggacagcaccttaatggtcacactttttgtagtgaaatataaaacagatagttagctggtagagtagaggttgagattttcacctttcttgttctcagtattgcatttctttccattccatagacaaagatattggagtgataactgtaacaatacataataagcatgacactttacaggttttcaagatcctgtcacatgtattatctgatacttgcagatatcaaatggtttgtacaaagaaatttgtgactggccagaattggggcccttcagatcttcttcactaccctggcatgagaccttaggtacttttgagggtttagctccacttgggagccgaagtgagggtggaggccaagctcctctgtctgcattagagaagaagcccaaacattttcccagtggttctaacagccaggacgccagaggtgtttctg

SEQ ID NO: 73994 - DNA, 1050 bp, Homo sapiens
ctgagataccacacatgtggatccctgcccagcctcctggtgagcactcggtaactgttggccatttttaccctggctcatcacccactcccaggtctggtggtagaatgaaatgacctcccccttggaggtaaaagtggagagctggtggggggaagtgcactgtatcagtctccaagatgaaggtgagtgaaccatgcaccaactttgctggttgcatttcatcccatatctaatgcctgaccaccatcattaaaccttcacctaaaacctgaccttcaccatgaaggaaatttccttcagttggtaggatagggcttggttttatacctgctgctggcaggcttccttgtgtatgcatataacatttctctgggaatagtcacccaaagacctcatctcccctgagtgcggttgccattctggggtgagattgggaagagtccttcctcatctgcccagctgtggggctagggcattctccagccccagaactaggtcgtgaaatgcatccatgcaggtgtcgaagaatggctctcattcttgctgctgacctctcgcctgtcgttccccttttatattctgggtcttaccacttgaaaaccgtggggttagcacccagaacaagtgggaatcccaggaccttgggaatttttaatgtttttgtagttgaaatattttcattaattttctgtttagccacttgattgaaatactttataagtaatgaagatcttttgcagttgtgcccttgtgtcttaaaaggctaccgtgtactaggttgatgaatgagaaactttaacttaattatttaaaactataatttctgtagagtgtagttaatggaaagtacatagaaatcgaagatatgatgaaaaggtgaccatctatgactgattgcctcaacgttttttcctcagtaaattcttgctattcaggcatgactaaaataccatggaatgatatctttcaaaatcatttgaaaggaaactaatgtaactttgctgttgtcctgtttgtactgttcttatttttccttgttaatagaac

SEQ ID NO: 73995 - DNA, 1357 bp, Homo sapiens
caaagtcacattcaacgccgccacactgaagaaaattctcattttggtgagtaatgagttctgtttgaaagctcttttcttcctgctccctttttcttttggcaatgagacttggtccagtgcatttcccagtcctcttaaaagaagcatcacggtccctgtcaattcagtaagtaaatatggagccctcaggaggtgcatacagtgcaccaggtgctggagatacagccacaagctgaacggagaagccccactctctctcgagttttacattctaaagggggttgaggagacacatttaaacagataaatgagtaattaaacagacaaatgagtaattcttctcaaatggtggcaaatgcgatgaagatcatagcgcaggacaatggggtagagagtgactccaggtggggtgaaagtctcagaaaagtgtgtcacaggccaaggaacactgactgtaagggacgtgaggtgtgctgggatgatgtgtttgaggaacagaagggctggtggaatggaatagaataggtgaggtgatggtgtgtggtgaggctgaagtgctgggggcctgatcacaggaagccgtgaaggcgtgggctggaatgtggagtttttatatgcgtaaggtggagccactggaggattttaggtaggggaagggcatgatctaattaatgtgtaccttagcatgacccttctagctgtggatagagactactgttggggcgacagtggaagcagtggatgagtgaggggaggaggctgcaatcgcagccgaggtgagagagacgggggcctggaccagctttgtccccaggcaggtgggcaggtgaagttgtaacagataagttgtggacccagaagctacagaggaccctgggtttctgtcctccatgtttgggtgaatggtgatgctttctgtgatggagggccagggtcgggaggcaatttcaaggaggaagagggctgagagtttgtacttgccatgggtgcgtttacatcacatgtgcaacagacatgcaggtgggggtactgaagggctgcagcttaaggtggagacccaggctggagatttaaatctgggaatcactggagtagagctggtctggctgaggtcacctagatagagaatagaaagtgatgaggtcagccccaaggtcttcccaatgctaggagctcagaaagagcagcagcagagagtgaggaatagtctctagcaaagctggagggaaacctggggagtgtgttgtcatggaaaccaagggaaaagtatttcacagaggaggcagtggtcagtcatatcaaatgccgctgaggtacagagtaagatgaagactgacaatggacggctgttgtc

SEQ ID NO: 73996 - DNA, 1076 bp, Homo sapiens
gttaaaacctctaacatacagaaattgtatgtttataaacttttttttccttttttggggttactatagaaatggctgttataagagaagattttctttctttctctttctctctctctctctttttttttttttttttgagatggagtctcactctgtcgcccaggctggcgtgcaggggtgcggtcttggctcactgcagcctccttctcccgcgttcaagcgattttcccacctcagcttcttgagtagctgggactacaggtgtgcaccaccatgcccagctaatttttgtatttttagtagagacgaggtttcaccgtgttggccaggctggtctcaaactcctgacctcaagtgatccacccacctcagcctcccaaaatgctgggattacagacgtgagccaccacacctggcctaagagaagattttcaaatgtgaatgataagtaatgattaaaaggtaatgactcaatttatcaaatgagtgacacctactactttttcagctaccagaccttggcaagttgctcaacctccctgtgcctcagtttctactctgtgaaatgggaatattaattgtacctaccatatagcagttgttaatggggattgaatgacttagtgcatagactgtgcttagagcagtgcttggcatgtagttagttattgttttagctaatacctgggaatgagggaaaaacgttttgtggcatgacaaatactaaagctgacttactacaaaatgtgaacaatcatatgactgctatcatgtgagtttttctttcttcccctatacagaaaatccaaagcctagactccttgttctgacacaatgattgggtccaccgcattatcagttttacctttgagaaattgtggtctcattctcattctcataccacttctctttgtctctactccctttgctttaagaaatcataagaactgagtagctgagacaaaaaaaaattaaagatgcctgttcttgaaggcttgaagacacagacagacagacacacacacgcacgcatcctaatgggttttttcccccatggggtgtgcgtgtgtgtg

SEQ ID NO: 73997 - DNA, 1042 bp, Homo sapiens
cagttcccatttgataggcctgtcccgtatcaccactctttcttcttaaagatttatattgtatatcagaagacacagtatatttaagcaaaaacagtcatttaaccaacaaatgtcatggttcattaccttctgcagacaatcaggggattaataattaaacaacaaatgtcgtctgtggtgctttatggaagttatctaaatgctggttgttgaaacactttcctcctccgaatcaacctcaacatgaaaaaaccatatacaaattgctgttgaagccagtccccaaacgatgcagaatgtttaaatttgtagggtctttttctcatttttataaattttgaaatactttcaaactgacagaaaagttgccaggagactgtaaggaattttcatgcgcccttcacccagattcccccattattaacattttccacagtccctctatttctgtatacatattattattacttttgaaccatttcacagtgagttgcagatcctaaatatttcgatgtgtatattttctaagaacaagaacattcacttacataacagtatttaaagaataaaatatttttatcttctggtcttaatcttctactgttttgggttagacattgagtccaagataaatattgcaatttttgagtataacataaaccaatgtattttttttttattgactagttggaggaagtgcagaaggtataaacaatgattgagaaagatattgaagtaagcaacagattaacaagattgatgtcatgcccttactttctagtcctttcggctgactatggcttaaaaggcctcactggatttaggaatagtggagctgatgcatgaatgctggagagaactgggtgcagggcagagaaaatggtgcagttaatattgctcaggactgacccagcaggagtgttgagtgttcttaagataggggaacagtggccgggtgcagtggctcacacctgtaatcccagcactttgggaggccgaggcgggcggatcacgaggtcaggagattgagacccgagac

SEQ ID NO: 73998 - DNA, 1024 bp, Homo sapiens
ttgatgctcttaaacagatggaggaagctaagtcttagagctgacaatttgttctagatcagggagcaagtaagtgacagaatcaaactttgaaactatttatgtctttagcactttttatgcctggttgcagggaataaaggccaattaacttggacatatggtttatttgaaaccatatgaagtgcgtgttttatttcctggatgtttttgcatgggtttatttctagttaacaatatcttgaaagtgctaaatatatttgatattacaactttgcttccagttactctgaattgtattttcctttcttctgttcacatatttggatgttaggaaagaaaaaaaaattcctgatgtctggtccaagcaggaattccccggtggattggggaatgtctggcttttcctcagcttattgatctctgtggtaaccactggaggcccccagaagacccatagaaatgagaggcctgaggtctacaagtcgctgctagaaatattttagcctctccaaagcccagaatgcagccccgacccaagtttgtaaggtaaataccatggccctgtaaaacttgttggtaaagctgatggctaaaatccccctccatctgtttctaccttcagcattttgagtatgtatccttttggaaagacaggtgaagtattacatattttggggagttctttggttcgtacttttatcaaaatgttatatttaggctgctaacctacaaaggaagaaagactccatttaaaaagcaacttgggtgtcagaaatctagaaagcctgccatcaaatatgattaactgcaaatttcatttaaaaaacaactttattgagatataataaaaatgtacccttaactttaaggacacaattcggtgaatttggccaagtgtatattgctgggtaatcaacaccacaatcaaaatgaaaaacatttctgttatgccaaaagcttcctcatgcccttttgcagcgagtccccctctatcacatttaattatatatattttattgct

SEQ ID NO: 73999 - DNA, 1049 bp, Homo sapiens
tctcctcccacgataacatcaggcgccaggacggtatgaggggcaggagttttttaatgttgctcacttattgcagatacctaaaatagtgcctagtgcattataggtgcttaataaatacttaaatattgtaacagtctctatgatgttcattaaaggtgagattctaccttcaaacaattttcattttattattcaaaatatttttactacttctgcattacacaacttccctttattttctggactggttacattcttttgactgattaggtcaagatgggtacattttttgtcttgtgctccatataatgaaatagggtttgtattttatgttacgttctttacatcatttttcagcttctgtgacttttctcatctgagtagatgactgagacagataactatttttaatattatattttttagaattaaatcttagttcgtggaaagttaactgattgtttttaattttatttttaggtgctgaatgtggagtaaatgcagatgttgagaaacatcttgaattgggcaagaaattacttgcagctggacagctagctgatgctttatctcagtttcatgctgccgtaggtttgtatcatggaaccaaatcactcagtgtctgtcttagtgaattctagtaatagctctttttttaaaaataacatttaaaataaacattatttcatgtttaaataaaacatttaaatatatttgtgggattctgagcgaaatagatggataaaataaatatataacacttaaatgtatgtgcatctaacatgagagaagtttgaaggttagtgaggcctgctactaccaaggataactcaagatatttctgacaaacagcttttctcagtgtattatttggcttctgactttttttttttttttttttttttgagacggagtctcgctctgtcgctgtcgcccaggctggagtgcagtggcacgatcttggctcactgaaagctctgcctcccgggttcataccattctcctgcctcagcctcccgagtagctgggactacacgcgcccacca

SEQ ID NO: 74000 - DNA, 1050 bp, Homo sapiens
gctgcagagggccatgatcatgccactgcgctccaacctgggtgacagacaccttgtccgccccccccccccccccccccccccgccgaaaaaggttataagttgaatatagttaatattctagaccaggggtttgcgaactttttttctaaagggctagacaagtagtttcggctttgcggccacagtcttatgtttttcttttgttctttcttttttttgggcaacttttaagaaatgtaaaaaacattcttaattgaagtctgtaggtcggatgtggcttgggctgtactttgctgacccctattctaggtctatttgcactgatcttgctaggcaacatgactcttttttgatgatgagattcttttcttaatgtccatcttagtagagttgcaagtgctgatactgtccaggtgatttgtttttttttaaatttttatttttgaataaatgactaagaggtaatattattttaattttcagatggtgaccctgataactatattgcttattatcggagggctactgtctttttagctatgggcaaatcaaaagctgcacttcctgatttaactaaagtgattcaattgaagatggacttcactgcagtaagtatatctcaactttctttaaaggggaacttaacagaacttggggagagataatttgtttcataaggtgaggactggcatgctagacatagctggaagagatcaaagctacagtgatgttgtggactgaggaacaagagaaattcaaagtccctagaatcaaagatctgtgtgaaagagaacagcgggtacattagatgtttttttttcagaagtctggcagtgatgtcagctttgtggtttagaaagacaaatctgtgtggaggctggagtgtgaggcaagatgtgaggctgagacatgagttgatgaagaggctgaattaagatgctatcaggtgactggcagcagttgcacttaaggctgtaccaggaagaataaagtggggattacttaattgggctatgatttgtggtgacaataaaatgctaaattagc

SEQ ID NO: 74001 - DNA, 1039 bp, Homo sapiens
aatgacagaattctacaagtgaatagattagtggttgccacaagctaaggaagggataggaacaagagggaagtaggtgtggctataagggcaacatgaggtgtccttgttgggatggaattattctgtatcttgactgcacccacgtcaatatcctgattgtgacaatgtactatagttttgcaaggcgttatagtctgcaagatgttgggggaaaccgagtgaagcattctcatgatggcaacttacaaagctactaaaagtagaggaattggagcctattttctattaggcagttttgtctgcagtgccctctactcttttcagtcctcctgcccagcctataaaccccctacaaacaacactcacacagacacagcctcttacttctgtccacttttacttattctttaggattaggatttaaatatctatcaccttctctaaaaaaaaaagctcctcttttactccttgcctttaccatcctggtttggagtaaatactcctctttggtactccaattatcctatgtacattctatcactttggtatcatattgtcttttaataatcaattcatatatttgtctcccacgcaatgctataaacttcttaagaacaaaaactattgtcaagtttaagtctgcaccctcagtacatagctcagcctgatataggagataataaatatttggtatagtacaagtaattctgctggtaaggatactacacagttactattatttatattcttccctattccaaaaatgtccaattctggtagttttgctaaggcccagggctatctagaataccccaccctcaatggctgagaagtaaaagagcagttctgtagttcacttgtgcccacagccccgcacataaggaatggctggacagttggaacaaccatattctcacctgccatctctgatgagctcttcagctgactcaatcagcttattaagtttctttacttgtttatagtgtgcaaaacaccttttatgatcctggtcaagtttaagacattcccgaacttc

SEQ ID NO: 74002 - DNA, 1255 bp, Homo sapiens
ttgttgtaaatactgacattaattatataaaatggcacgtaatgggttccattattttcatggaagtgtttactgaccaagaaataaaacttgatctctgtattgttcaaggtgctcagtgtaagtcagacttcaacagggtgttttactcaggtttggaattctgagcaatgtttctgtaaggaaattcttctggtttgattggtacttatactcacaggtatgctttgttctgtccatctgcatctcctatggtcatatgtttttatttcctaactcttaattatggagtgtaccttctatgggactctagattaataagggaaaagccgaatctgaagccatgggctcatccaattggattgattaagcaacacatggtgaagaggggaggagcctttctacagctctggaaatcaaatgtcatcatttcttatcatgatttgctcatttcttagatacacagatgctaccagcaaatatgaatctgtcatgaaaacagagccaagcattgctgaatatacagttcgttcaaaggagaggatttgccactgcttttctaaggtaacagttgacttgttcccagaaatgtgaaaactcaacatgtggaataccaaccataaatccttgtctcacatttccttttaggacgagaagcctgttgaagctattagggtttgttctgaagttttacagatggaacctgacaatgtgaatgccctgaaagatcgagcagaggcctatttgatagaggaaatgtatgatgaaggtaaatctttaaggatttgatttgcagtaccgaagtgttgattaggaaattatcacattttaagcttccttttccttaaaacaaatttaccagagtacctggaaatgttgacaattttagaaaaatggcagagaacttgaaaattactcttccatagtggaacctgaaaggtataccatgtgaggaaagagttctgccattgaaaccagttcagtacaatagaaaaataaatattttagctttttttgtagaaaggaaaaaaaataacaaaatagaaaatttaaattgtagctctcatgttatccggaagtaatcactgttcattttgcatttatcttttccagcttttatctatgcacatatattactctatattttatgcacatatacatattctctctctctctctctctctctctctctatatatatatatatatatactcggtgtgtataaaacataaatacagaaagcatacatacatgt

SEQ ID NO: 74003 - DNA, 1569 bp, Homo sapiens
tatggaggccccgctcccctcatgtctgaggagccttagtgctagaatgctcattagatgcttgatgaggtcattgccttacagactttattttggggattagggtggtgagctggctgtttcattagaattgtagactcttggaagtttctcttgaattatttttttccaaataatttcattgggtagttatcaagcttgggtggcttcttctggagtgagatttaggggcctgaatctcaataaatacctattatcaaccctgaacctcaccctccttgtggcaaatttctctagtctgtttcttcagggtgggaatgggagagcctggatttgaatgtcaggcacaactcttgataaccgaaaagtaagtagctcctcaagcccacccaccctcctctgcccaaagaaaacattccccctgcccctataccttagatattatctggttcttaattttctgatttctttctagaaatgagaaagaagtttgacgacggagaagatcctttggatgcagagagccagcaaggaggcggcggcaaccctttccacagaagctggaactcatggcaagggttcaatcccttcagctcaggcggaccatttagatttaaattccacttcaattaaaccaactgtttttctgctcttcttaatttttttaaagattaaaaacaaagaaatcttgttccgggaccctaatgaaaaaaaatttcaaatcttttcagtttgtccatgaccaaagagttgctttaataggaaaaaatctgttcttatccctgtcagatttatggttaatgggtttgcaacggcaaggaggcaaggaatggttctatttctgacagagcagcctgcatctgctttatgctgtctggagggaagtggtctgaggcaggctcacccgtggaagtgctcacgtattctgtattatttttctacactggagctgagattcttctcttcacagccttgcagagtaagtcagtgcctacaagtgtaagaaggagctgtaatcttcatgaggatggttatacttcagtattcttaaagagaacatgaacatttttgagctgtatgttcttagggacaactgtgcttcgatgtggtcagtctcgtcacttgtgagtagctgtgaaatctttagtgtgcatgtgtttgcacctctgtggtctgtcaacgtggctgtcactgaaggagcaagagaccatcttttaggaaccctgccaccaaataataatatatccaggcttagactttggattaatgttaaatgtacatttttttggttcagtacctgaagaagaatactgaaacttgaatctataaattcctatggacccttttaatattaaacacaacaaattaaaagttgttataggtaaaataagttcagataaaatagtggtggtatttaaaataatattgctgaagtgcagattgaaatactttttaaacaactgaagttctgagtttttatagggaatttcatgtaacaagactggtttagaaacgtaaagttgcgcagtcaacataaataaatacagaatgccatgttctccacttcta

SEQ ID NO: 74004 - DNA, 1054 bp, Homo sapiens
tgtcagagtgctgtgtcctcccatcttagatgacgactatatattaatatgtcctctgctttctgttgttccattacattaagggtagaatactgtattcacagtgaataatctgttagtattcttcaagacctcttatctgccaggcaggatgctagatcctaaagataacaaagataagtaaggtatgttccttgtcctcatagactcatgggagctcacattctaggtgggtagaaagaccagtagttatgagacaatataatagacatcacagtgtacaaagagctattctcgtgttgcgtaatgaagcatataggtactgaactagcaaataaaggatcctcagtcagtaccggtgcttcctcatcatatgtaagtaatatttaagatatttttatgtttaagatgccagaagctaaataaacttttctcccttatagttttgacacatgatgaactctagcactggtgtatatgagaaggaaggcgaaagcatgacaggaaacctgccgcctgctggggaagtctggagcccctgctgagacgatttggaagtctcgttaagatcagtgacatattctttaattttaaaaaattgtaattatttaaaacagttatttaatgtattgaatgagtttaagttatataataaatgaccattgagtatttaaaacctgattgttcctttttcctgatcaccagttaaagtttgacattttgccagatagcccaggtaccggactagctggtgtttatcaaactatagccttttgtatctggttttatgtgcatccacatttccttattcacaaaatgcatttaaaattacagaaatgcatttaggctgggtgcagtggctacacctgtaatcccagcactttaggaggccaagacaggtggatcagctgagttcaggagtttgagaccaccctggccaacatggcagaaccccgtctctacgaaaaatacaaaaaattagctgggcgtgacggtgggcgcctgtaatcccagctacttgggagcctgaggcaggagaattgtttgaacccgg

SEQ ID NO: 74005 - DNA, 1028 bp, Homo sapiens
gcagcagccaggcagcccagctttgctaagggtctctctcagtgtgctgaggctgcggaaaggctgcagcctgcaggcacttggcacacaccctccctgctgctaggatgccaagaggaaggtcagctccaccgaagggacagcgaaggagtagctcatgagaggagatctgcacacttgtcagctaaacctgcccctgcgaaagtggaaactaagccagaaaaggcagcagaaaagggtaaatctccagacagaacgtgcaaacaaaagggaaaggaggagcaaagggaaaatgggctgaagtggctaatcaagaaagtaaagaagatttgcctgcagaaaatggagaaacaaaaaccgtggagagttcagcctccaatgaagctagagagaaagaagccaagtctgattaatatcctataccatgtcttatcagtggttcctgtctcccttcttgtacaattcagaggaatatttttatcaactattttgtaaatgcaagttttttagtagctctagaaacattttgaagaaggaaggaatcccacctcatcccattttttaagtgtaaatgctttttttaaaaagagctaaatcattcaccagtttatttttgggtacaaccagaaaatagtgtgagatattgaattataggaggctttgactatcttaggtgtcaggttaacattccatagatggggggttagtttttatatcctataatacaaagcatactaaacagcaatatggagtcacggtcctgtactgaatgtcttaaacatcttaaattacttctgttcccttgttgttttttagtagaattgtttcctaaagaaaaccactccatattcgtggatttccctgtctgaattgtgtgcactctgtaacatatttagttgtgatagtcctgttttccaataactttgtgaatgtgctgtgaatgaaaatttgagtatgtagtgtacatgctattcagttatgaattggtaggacgtatttaacagcttatcaacatgtgaagatattgg

SEQ ID NO: 74006 - DNA, 1026 bp, Homo sapiens
attatgtgatacatacacatcctactactagtaaatatggagttggaaccctgagaaccgagatgccatttccatgtttttctactgtgcctacaaagcacactagtctgctatgttcttctacatagtggtaatgtaattagatcttttgtcaaaaagttttacataatttttttttgacagacttatgagtcatcagaatgtctttcaacaatttttatttaaatttctgattgaggtatttgtattaagcaattattacatacataagttgtgatatatcatttcacctgatcctgtgtgtattaaacttccagtacttagtaggactctgctttttataaaatgtattttgtttgccctagtgacacagcattgtccttatgtttccaggagcatggtctttcattaacaaaatttacttaaacttttagtgcaataatcccaaaacaaaagaatccaaactaaaagctgctgccagaattgtcccagaatgggtggagtatgatgctgagataagacaactattagatcatcttgaaaacaagaagcaagatacaagtaagtcatcaacgtgttgtgatgtctgaaacatgcgttgcattaatgagattagaatagactacagactcatttcttagtgaatttataaaatgattaagaatttctttaagaaagtctgtggcataatttaaaggtgtatttttgtgtagactaagcttacaagtttaaaacatagataatctgtttccccatggatacagcttcagctcataactctatatggatagatagtgtaacattagtctcctgacacaacatagaggtgaaaaataaaagtaaaaggagtgtttgtctttaagattgcactgaatttcctaaatgtgaaaatttgagcaagtcctaaaaattaataaaagctttacatagctaactaaaaatatcatttcctatctccaaaattaatctcatatataacagaggtttccccacgtgtttgtggttctagtatgtttaatcatgggc

SEQ ID NO: 74007 - DNA, 1044 bp, Homo sapiens
tatttttaaacagtttatatagaaaggtcacagagaataactcaaaaatatttgaattgtagcactgatacgttaaaatggaacttcagattcatttgtatcctttccatttggaggtttaggttagcaaaccaaatgacccatccagtgaatttgtcaatatagatagatcattcagctcttcagggtttgtagacttaatattaatcacacagtcatggacagctgggcccaggtgaagctaccatgatgtatatgtattcatccttacacattacatacttgataaaccatattttagtttatttcttcacatttcattgtgaaaaccttctaattcataccttcaattatttaaaagcctttaaaagacctatgtaacaaacctgtatgttctgcacatgtatcccagaacttaaagtaaaatttaagaaattaaaattaaattttaaaaaacacttcaaggttaaaaaatatatatgagctcctgttactgttaatgtatattgggtttaatattcttttatacagaattatgatgctttctgttttgcgtaacaccaaaacaccagtgaaattctggttgctaaaaaattatctctcaccgacatttaaagtaagtacatagctttttttgtagaatggttaatgtttgaatagtaaattatttgtatcattgtaagtttatatgatatttctcttttcagaataagctttttgaaaaaatggtatttagtatttttatgtagcttaagaaaaattctgtacaatttttatttagagatgttcaaaggagaggacagaagactgtatatttttaagtaaaatcaaaatcagaatggctagtagtttttcatgataatgagtaattaaatacaatttggcaatggaaaatatatacagattttcaattaaaagaaatggattctgtcatttttgcaaagataggcagaaacagtagtagtatcaagaaaatacaaagactatacctataccgtagaaaatagttttacagtactgaaacaaaaaagctctttcgtctgt

SEQ ID NO: 74008 - DNA, 1052 bp, Homo sapiens
cagaaacaactggaatgtccagccatttaaaatgatatttatagagacagagacatgttcttagaaaaccatgtttaatgaaaaggcaggttactttcttacaaaaaaaatttatgaagacaagaaatagaaatcagtgtgttgatgtttatatcagtgtttattctgttgaggtgcgttctgttttttcttctttccactttggaagtggaaaacgaatttttattttttaaaattaactttaaaaatatatcgatcaatttataattagttgattatagacattaatttttttaattacaagaaagccaatagatagtaagttagctttcttgccaagtctgaagtgggagcttcaggacaacagcaaactgaagcagattctttaaggaatttcccatctaaatctcatgttcacgtctttcctgcttggttatattggtgcatataccatgaggttcaggtaaagctgatgtcatgaaaaagaaaaagtttatcataagctttttgtcttgaagaaatcagttcaactcatgaattcactcatgtgtaaaataaagacttaaagttagccaccaaaatacattggccaatattaaaataatcacatttatttatttcaaaattttgtattatgagttttacataacaccaaaaacaatgacatacttcctccacagactgagaaaactgttacagcagaatatgaactagaatacttactactggaaggacaatgctttgataaagtgacagaacagcctcctcggggtctgcagttcacactaggcacaaaaaataaacctgctgtggttgatacaatagtgatggcacatcatgtaagtattatttaattgatggtgtttaatttgatgttttggtgaattctctgttttcctaagagtaaaatgaaataatctttattctgctgttgctgaacagtttgcagaaaacaaaattgaatctttgaataagataaataaaaaatggggaaaatcatactttaataatttttgacaggttattgtaaaatctctttacttggaattgat

SEQ ID NO: 74009 - DNA, 1744 bp, Homo sapiens
tggcatatcgtgcttactatgtagatatatagtaatactgcaatatcagttgttaattgcaacgataggttccccactcaaggccttcttcctaaaaaaccatgaggtccgtttcttagagaagatctgtataaatgggtcaccttacagagataccattttatgattacttgtattaagcatcctaggttgcaaacttaaacaataagttgaaaattatggacatttggacatcagtctttgcagggggcaaggtggggaacaaagttgggggcacacaatataattggatatacattccgttggtaacacaaaaactatctggaatggtgagcgaggaggtgagaacatctaggactgaaggcagaagcaggaagccaactctgaaaagaaatacatggcaaacttcaaggggccatcatatggattatgtgggtcatgaaggggcaggaccccgggctggtggtttgaatccagcacagaggtaacttctgaccacagaaactggttagaataggatggtggcacatcggaattacctcttgtatcatatcactgatgattttttcccattatttttgtgttgcttttccccctcagttatttttttggcaggccattctttctcactctctttatgcttccttctttattactgtacgccccttaatctgcatgtccagagccttaaaagactcctttttagcattcttgagtatatatagaatcatagcattttatggctaaaaaggattgaagagagaatctagtcccacatttttcatggggaatgtaaccataaaaaggtgaaatgatatacctaaggtttcttgagggaattcatgtctccattttcataatttatattcaatgttttgcttactatatatcttgtgtttactatggaaagtgcagtggagtgtgccttaagcacctgcttactatgtgccaggcactacgatagttctgggaattgcattttgaatattggcagccctgtgtagcctaggcttcatctctggtaagtgagtatctctcccattcttaaataatgatggaaagatattctatctgcatcattttgtaggatagaatggcaatttttctcttttataacgtgtattccattagttttgttagaatagtttgaaccctgtggatgttatattaaataggaccttctgtgttgcaggttataccaacctaacccaaatttatttcagccagaggggaattattggctaacccagtcacaccaccggaaggttggggagaggtggtttcaggaatgactggaactggagatttggggtctttcttcccatactcctttcgatattgatctcattctatcaaattggccaattccacaagatgggcaaatgttcttcatatctaatagctccacagccgagagggaagcaggccttctcttagttccagtttgaaattttggggaatgactctgattagcccagcttggaacttgtgactattctttcagtcaatcattgtgtccagagagagagataaggttatctgactcaccttgtatcacagaaccatttatatgactggtgtgtgtgtgtgtgtgtgtgtgtgtgtgtgtgtgtgtgttatcaggaagaagaggagctgccatagatacagctgctggatggaccactggattctggacaacccctccaactgtgtcaattgtaggtgcaaatacatgagaaataaatgaaccttcagatctctt

SEQ ID NO: 74010 - DNA, 1285 bp, Homo sapiens
cactctcagtaaaaacttgaggaatgtctgggtaactactgatgttgtaaaaggaatttcttcttggggaaagggttagcctggatggccttttattttaagtttcgttagttctaatgtaagctgagtgtggggtatctttcttctcctccttcctaccccatgcttagaaaagaaaaaaaggattataaatgaactagtcctctagcatttgtaaatatttctaccaaggaaactttttgtaaagtctgatggtatagactgttttacacattcagggccaaaagcagtaaatgggtcctgtgtattaggtcgtctgcttcttaataataagtataaaaagataagatgagaaaatataacacaacttgccacaaaaaccagaaccactttgaaacattgtctggttattgcttttcctttagacagcaggctgaaatatataaggaggttacagagctctgtttcaaagactagactattatggcctgtactgctttctaaagcataagctgtttgatgtctcttctaattagaattgttgaactaccaagaaggttaatttttaccataaggtttttgtagtgtaaaactaaagagcagtgtaaaactaaagagatatgagattgttctgtctgtaggccatatctactgatttgttcattaccgagtctcctaaaatactgcttctgcttcaaaccaacaatatttgctataaatcagaaagaggttaaattaaaccctgtcagttttttgagtagtgaagacatgaattggaagtggtaaatggtaatagatgatttatgcttctgccttcttcctgatggttaccttggaattttgattgggttgattttagagaaattgaaatgttttcataatagaagtgaggcaaatttagctgccaacaatgtggatttgcttagtcttagactcttatattaatattccccaaagctaattattatcatctcattttgactaaagacaatcagaagcttatggcatttgaaagttatttatgcttgataatgaactaaacagtttaattgagaccggcaaatcctaatgtgattttaagagtcatgaaataaattattgggccaagaaataggttcagtatgaaaacaattaaatggaaaatccaaattaatattttgtagtaatcacttatcttgtttttgagttcgttagattgtggatatcatttataaattccctgttgattttaattggccaaattaatgttttgtagtaatcacttatcttgtttttgagttggtta

SEQ ID NO: 74011 - DNA, 1053 bp, Homo sapiens
atgatggttattaaacagtgttttgaccgttgataacagagttacttcagagtttagggaaaatctgagacctttttaaaacctaaagagagatgagtccaagaagaaatcaaactaccaaattcatggcaaagagaacttctgcattgcataatttggcagagtggtatccagaaaagacctctaaatttgtaatcaggcaaccaggatttgaatctgggcttcctcacttactcgttcacttatttattatatcatttcctgccaacatatcagtttcctgaggttggtgagtttgtggtctcctctgcattatcagtgcctagagtagtgcctggtacataatggctgtcaaacaaatgttgactgaataaacgaaagaatgaagcaagcgtaaataaatttactaatttatgagacaatttggataagaatgtgtgccctatatcctgtttttttggagttgtggggtgagaaaatgactacgaaggcacttcgtaaattatacagtactgtgctatacaaatttaaatttatattgacgtaagaaggcttttgatataaaatggaaaaggaaggaaagttggattttgaaaatgcaatgaatatgtaattcagcttttatagagcatttcaaaacaccggaatgacaaagatgaagttgaaaatattcaaaatacacatttagctcaacgacttgttagagtaatgagcagttccttttaaaacaggacattctatatcataaatgacttatctaagtgcataagtctttcgcttagaccatcaggaaaccttttttcctcctagggatttggcatagatcaaggtttgaggtgtttttttttttttttttttcccattgctttacccttttgagaaaattatcatgaaattaatattttaaattttgtgttcatgactgtatatgatagagataaattatagctacaggttaatatgtcctgaaagtgacctgagaatgtaatttttcttcatttaagaaaatgaagaaaatttctgatttgagaagactgttgaattgttctattc

SEQ ID NO: 74012 - DNA, 1017 bp, Homo sapiens
cctagtttatttagtcagggatgcagggttttattggagtggggaggtcacatagagcaggagcagatgtagtgaattccaacagctctcttctgtcttggggacttctagtttggtaagggtgtagggctgctgcaatgggcactgccctcatggtgtgtgtggtgttcctccagatccgaggagatcaggtggtgctagacctcaagcctgtttatgctcagggcttaaatcaccatccaaggatgagtcacacaaacacggattcacttaaatttaaggaggtgtttacaataatcaagctctcctgttcttgagccaaacttagcctcctcaaggtcacagactatctatggggagaagccagactcagagctgaggccaggtatctctgagcaggagctcagtgacttgttttctagaagtttggaaagcacacccctgccccccattaacagattgacagagtatgacaggaaaggattattgactttcttaaaggcattcaaactggtggaaaacattattacattcttaatagataattgggcaaagcttatgtacagttgtttcattaagaaccttagtaaataaataactagaaaaatattaacctcatctgtaagcaatgcaagtaaaatataaattaagaaaataacatagcttacacttactaaatgagtaaacattaaaaagcatagatataatattcggttctcatgaaattatggtgaaatgggttcatttgtaaatttggaaccttccattgctggtttttggaaaggagtctgactatatattaggaatcaaaaacctgcccatggatgtttgtaccaggaatctcacctctggaaatttatcctaaggaaataattcaagagaagaaaagacagaaagtatatgcactaatatattcattttaccattatttataatggcaaaaagttggaaaagtggaacaactaggaatttggatagtaggggaatggttaaactatggtacaacaaattgatgta

SEQ ID NO: 74013 - DNA, 1019 bp, Homo sapiens
tccagtctatcattgggcattcgggttggttccatgactttgctattgtaaatagtgctgcagtgaacatacacatgcaagtatctttatagtagaatgatttatattcctttgggtatataccccataatgggattgttgggtcaaatggtatttctggttctggatccttgaggaatcgccatactgtcttccacaacggttgaactaatttacattcccaccaacagtgtaaaagttttcctgtttctccacatcctcgccagcatcaattgtttcttgactttttaataatcaccattctctgactggcatgagatggtatctcattgtggttttgatttgcattcctctaatgatcagtgatgttgagcttttattcatatatttattggccgcataaatgtcttcttttaaaagtggtgtttatttttaaggatgctggggcaacacagcagcatctctggaaaacaagacaatagaacaacaggtgacaggaagagtcataagaacctggtcagcttccgggaactcggccgcaggaattagctctccttcaacgactcgagtgcatagtctgttcacttactggcttcttttacactgctactacctgaattgctactcataggcctgattatatatttttggcagagaaatctgactggcccacctcacctttttgtgaggtcccatggattgccaatcagctatagtcaggtgtctgccctgacccaactgtggggtgggagtggcaggagggaatatgctggtgatgatgtacacatgtggtctcccctaatcagcagagattttccctgaggcaggctctttgagaaagaaacaacagcatggcagacacccccaaaatgcgtttaacgtgcagtgaaatctcccatccccactccattcccaaaccatgaggtttcagcagcagataagcgtattattcatccatgaattctaagcaatcagggtggtgtctggcatgcagaaggtgctcagtatgcactattgaa

SEQ ID NO: 74014 - DNA, 1025 bp, Homo sapiens
gtttagaaatgaggagaagctcatctaaaaaattgtatcctggaaaataagaaaggatcaaaagaattttataaaacaaaatgtcagctggcaggaagagatatttctgttggttcagagcaaggcaaatctgagtaggaatagacacagcactgacatttcagaaagcaatgaagtatttgctcagggacctgtgagataatttgtcattttggactttgaaaggaggaatcaagaaagcaacagtaagcagttggctgacttgggaaactggtgtgctcaagagaaactcttttatttgttcagtgcaggtaactttcagtggataagaactagagggttatattttgtgaaaacacttatttcaggaagaaaaaaataatgtcatattaatcacctcttgagctgtttttgtggttttacataatgaatgattagtgtgcaagaggactcaaaaagtgacttaatataagtgttatttcgaatgcggattctatataaaccttaccagacagatggattagctcaacgaagcagatatctttggagacgcactgtgagctaggacacagggaggaatgcaagacagccccttccttcaaggaacaatgaagacagaaacagaaatgaagtggggcgggactgtacaaaggtaccgtgggtgccgggatggtaaatgctgtgttactggtgtacacaaagtggtttgggaacatcgaggaggaaatgagttttcttaggaagatgagagaaagcctcacaaagtatgtgacacttgagtggccatctgaaggttaagagcgatgtaaaggaaggacaccattgtataagggtatcaaggctgtgggccattcctgggggagaactgtggtgtggttagatgggtcgcctggctgtgcaggaggagtgctaagacatgaggctgtagagggagatgcgggaaggaggtaaaaatgattggtggtttctgctgggagatggcatggatctaaattgggaagaaaagctaatttgaagtggagcct

SEQ ID NO: 74015 - DNA, 1116 bp, Homo sapiens
tagagaatagcaacttgatgtcagagtagcacagcctacttacattctcttcctcttgcctaaaaataagtcatttcatgtgatcctgttagtgagcttttcctgcaggggcaatgaggcagccaagcaattttctaaagtctgcagatctccagaagtttaaaaatggtgggagagagggtttttttttcaaaagctaacacctggagaaaagctgatgagtaaggaaaatcttaggactcagattgataaagacctcactggaactgtcatggggaactcattgctacagaggaggaaaatggagatgagaaaacagtgaacccatttgactgcattactgataggcacaggaagtggtagaaatgctattgggttgtgaaagctcaaaaaccaaaatgaaaaattggacaattgatagcaagtgaggccttgatgtagcacagaaacgtggtggaggaaactgtattgaatttctggaagtaggaatgccagatcaaggggtttatattatttaaaacacacgcgcacgtgcgcacacacacacacgcacgtaggccaattggattgtactgaaattattttaaaaatgtttgggaaagatttaatctcaggtcatgctgataagtggaactttatccacatatagattagttagatacctttttatgaagaaatgttgaagctatatttttggtgaagaccacaaaatcccataattttagaatcagctatgataggaaatgctcagatgttaaattaaaaggtgaatattattttaaaaatatgaaaccttagagagaatggttgagaacaaagtacccatgaacatgaaattctgaatttccatgcatttatctttaaccatctccttccaccttcctcgaccctttctcacccctcatccttgcatctgtcctgcgtgagtggtttctcaggtcaaaatgtcttttctttctttggcgacagggaagcatggcccagctgcagggctgtacttacggaatggaattgccctcccagagtttcctttgcagaattctttgatttggtgtccaggatgcttgctcaggcctctcgggttatcgggatatattttctttgacaatattcttc

SEQ ID NO: 74016 - DNA, 1051 bp, Homo sapiens
attaagagtctgaggcttaaagccattaaataagttgttcatagctaccaagtggtgagtctgagatttgaaccaaagacaattgtattaaagtaacaaacatcatccatccatcctttccttcctcccctctttccttctcctttttttctttattaatgtggataacttataaagaggcatagggaataagaatgtttgactacattggtatggagttatggagagttaatttgccacaacatacttaatttttataaaataacattctgcttaaggtaataatattaatgttctgttatcacatgcattggttatttagtgaacagtagtggctgactaatttaagttgttcaattttactctgcatgtagtagagaaatactttatcttattacataagttactcaatataatcaaatttagcaattttatcttctaggatatttggtactagattataaaaattattcctactcaaaatttcatggtatattacagacctttttttcccccaaactttcaactgtgagaaacttcagaggcacatttcctcaaaaaaggagcaatgggtcttcaaatgtatacacattgatatttcctattgcgagtcatttacattgacatgtttttgctattgcgtcgtgctcttaaaatgtcaaatgcatttatcgtagttagcaatgactggaaaaacttttctctgaatattttcctgaggaaaggagaggttttttctgcctcgtttgagctcagtggccagcagtttcctgggtctctagctgtgctgcaggcctctcagggccctggcctggtggagttgcagatggtctgcttttcagagctcttgctggggtctctgtcttagaggtgcgcaggaggcacattcgactcggaaggctgatcctaggatggaggatgcttgctgccatttcagaactctgtgactgcccaacatgctcctaaaacagaatccaccctcttgagatcttttagattgagcgtatttgggagttggctagaacccccgcccttcaaagctgtttctcta

SEQ ID NO: 74017 - DNA, 1024 bp, Homo sapiens
tgacttgatcatctttcctattttgacaggcctggcattctcctgccttaggactttgcactggcagttccctctgcctggaaggctcctctcttaggtattttacatggttaattcccttaagtcctctttgtgctccaatattgcactcttataaagcataccttggctatactatctaaagttgcaacttggccatctttcctcttctctccccagaccatggcatacctagtcctccttactctgctgtagtatttcattttggcacattttataactatattattttttcccatttgttatatctgttgcttttggatatcttcccccaaactacttgagggcaagaatttttgttttgctcgctaatgtatctcaggtacctagaacaatgcccagctatacttttgagtggatggctacagaatataccttacatcgtattcagaatgcctctcatttcaaattcctctcactttagcttttctttaatacatgatcctactttgcctctggactgtaaccctccttcattcctagcctgatcccaccatcccatttttgtgtgtgctctagtgccacccttgggcctgtcaggacagagcccaggctagaaaacttacggctgtgagttcatggcaggtggccatggtattctgcctggttatctctgagattagagacacagttgataaacgacagcctgccaggcatctattactacatcccagctgtgcatgggagtgggtgtgcatcccgcagacagctatatgcagatgcacctgtttcactctgagctctggcatgtctcagaatttctgacgataggggctaaatagacggatcgatttggggcctgatttaagtggtgaaattccttgcctccaaggaagcttggcctgcaaaatggcatcatcagaatttcagatgagagctgatctgctttccaattagcttccatttcaaatttctaaattccttgcgtggaggaagccatcctagattaggccagttgggataa

SEQ ID NO: 74018 - DNA, 1027 bp, Homo sapiens
aatttttatttgatggtttatccgaaacacaatattagacagtgttaaatagtagcagtcctcttctttgatattatttacataacacactttgatatcctcaattaaaagggtacgaggtgaaagagaatttttgttttttgtttaccctcatttattttgggaatagttgttaatacttcagataacaaggcagatttttcccatgtataaatatcttcttggaaatatggaatattggggaaaattagcaggcacctttttttgggaagagaaatactgtttttaacattactgcttcactgagcccattaactgcatgagtttgtgcacactccaaagttatgtaacagataatttcggattttgaatttggcttgggatacagaactaccatagacttgtcaattgtaaataagttttgaatgcggatttgactagtaggagatacagagtgtagacatcaatatagtaatatagatggaaagatggattgtctatgtaattccttgatcttacaagggagagaattgagaaaatgagccattgagcaacttacagaagttgtgggttagcggtagcggggatcatattagaacaaggtgtctcaactcctacaccagtgctcttgccacctactatgctggattttgtggagaaggtctgaggtcatggagtgaatgctatacaagggtaccacagtgtaacagatggttggtgctccccagcttttttctggtttcctgtgagaaaaaaaatcttcgttattgttggcctctagactttctcaagctcattatctgttatgaacaaggagtcatgagaataggtggatgtaaaaatagtgggtctgatagtagtaaaagtagctgatacctttttgggagaatttctagtcaaaaaaataacatttggctatagcagtgtcagcaggaccttctacaggttgcccatgtggtgacccctgccacctgccccacctctcatgccacccacccatccaggcttttatttcctcaaatatttc

SEQ ID NO: 74019 - DNA, 1420 bp, Homo sapiens
ttgggtttttagatgcaaaagtcaaaaatttgcttatttgggtctactctgaaatagaagcccccaagtgcctacctgtttcctagattttgagaatgtgggaataggggaacatcctgggataatagggaatatagagggggaaactacatgagttaatatgttaaattattattttctgcaagtgtaaacaaaccgaatagagttttggaaatgttaaaaaaagattagggttagtcagtctgagtaacagaaagctagctaaaatattaatgaaatatattctttattagattaaataatatgtatgtagatacatgagtggctgttttgttgtggcttgtagtgacctattagtttctctctctcagaggagagccatatctgtaaaaaccagatttagtccagtactttaacaattagaaaacagagatccatagcatgaagacacacagccagtgtagccaaccaggccttgaaacgagattctcttacttagaattctttgcccatttcctccctccctgcccaagactgaaattattttgcaatagaagaaaattaggttagctatcaaggtgaactttttgatgctaataggttgaaacattgaaatacattatcgaggacatttgcagtggttattttaaaaaatggttaggcagctaccttttcactctggtctggggacagtcctgtagaatcagggcttactgaagttgatttctttaccctggtttttagattacatgattttaaggcagatacttcaaaaaaggtttacaaatatagacttgattgaaatatttgccagagaaactgccctggtagcttctctaaattccagaaatacagtgtttgtttccttttttgtgtgtgtggaggtaacatcaatctgccctttcaagcaaatgtaaggatttttcaagatgtttaaaaacaggagagtgaaattgtcttcagatccctagagaagatcggattgcatagaactttagcttcttccccacgatggaatggatttccatcaggagaggatttataactttatgggccaggtagtgtaaaagatgtgacaggcttcaaaaataagttttcagtgggactatttcttgagaatggtaattgattttgcttagtatctgctgctaaaaacaaacctggaagactgtgttgcattaaattaaaaaaaatagaggaaagtattcacattcttgtgaggatgtgtagagatttagatagattttagagagattattttgtattttattacaccctgggctgagagagctacattgtggaaagcaaatcagacatttcctttccctctggtaatatttaaaatcttaactttcaagagaaatctctcagaataactttcctctcccatcctggaccccagaacacctctccagtcctt

SEQ ID NO: 74020 - DNA, 1061 bp, Homo sapiens
atcttgaatggtcctaggcaaccaggggatatatggtctctctatttgtggttgatgtgcttcatttgggatctggtttaacatttcagctggagcatttctcaaaaggacttcctgtttctgttgaattaatatcataactgcattctaaggatgagtggacttatttctgaggatggcctttctcagaagctttagagattcttccaaaggcaggagtttcgccccttcactgtacttaatagtgccagtacttaatggtaccaggaccttgagattaatgggtttaacaagagactagaggattttccttcctaatcctactacgctggcctcagaagagtctttgccatctatctactgtgcatctgcaggaaaagtttaattccagtcaagtaataacacctgtaatacagagctctgtgattcaaagtcaaagattatttatagattatttgcatctttccaattatccatgctgatactcctatccaaggttgttatagggattatcatatttatctgagaggcagcctacctggaaatttgaacaaagactagtgccaaactgtttgggtttgaaaccttgctttacccacttatcaattttgggacccttgacaagttacttaattttttcaatttcttcattaataatataataatagtagctacttcataacattgttgttaattcatttataaattaacatttttaaaatgctcattacagtgcatactacttagcaagaagcatatacatatttctaagtaaaagtataaataaagcttctacatataatcaggtactgatgacattaggtttgaaatgcttgcagacataaacatgggaataaaggaaagaataaaataaaagtgagtgctatagacagcacagagtattagagagaagaagaacagtaggaaatacattccacaggagattttaagatagaaatctttgtgttacaagagctgatatttcattgggtataatgaacccaaaagacaaacgtcattttttcctttgctttattctttgagtgcaattgaattttgca

SEQ ID NO: 74021 - DNA, 1071 bp, Homo sapiens
agatagaatgtgtagaggctgtggctctgtagagaatatggtccctgttttattttttaaattgtttggtttctgacattgaaatatgaagataaaggtattttatggttccagactaatccatttcagcctagtctggtcagtgtgtttggaatctacaagaacacaggtaacctgaaccaaggctcttatggaaggaactgagagaaggatcaaccgcttttgtagaggtacaataagaaccctagaatcatcttagaaagtaaatgtgtattaccatgacagtgagatgatttatccctgtggtgtttatctgggatgaatgaaggttatcagaatggtgcatcacgactgtcattcaaaatgtctcaaaagtaagatatcaacatcatcacaactaggtatctttatccccaggaaattaagaagggccatttaactctctgactctaaataaataagagtgagaggaaaaagttattagcaggtggaaaatgtaaagaaaaatagaaatagaaggcaaacgttttctatgtttaaaagactgttagggcccagggacctcttgtctagtctggagttgttggttgagctttaagacagaagcattaaagtgggaaagtctgaaatccctgaagagtctgggtggatatttctgtcttctgtgacgtatgtgtctgaggatagcatgtgtctttttggggaaaaatcaagaaaattatgaccaagcctagattgtaattgttcctttacatagtaccttttaaagtttttgacttgatgaaatgaaaaatcagacagtaaaaaatacaaaagtaagattatctgtgaacagtttttaagagttacatggtcagttttgtgtccgtctacccattctgggtttaccagagcagaaattagtccttattcagctaacctgactgttgtactcatgcatcaaccagagagctgggaaagttcctttctctttagctttcaagaaaggatgtctcttaaaagaacaagaactaatcagaagtgacatctgcaattaagtcaaaatagggcatacgatattatcagatacga

SEQ ID NO: 74022 - DNA, 1053 bp, Homo sapiens
tggaaaatacaagttgctaactccccttcactgggcgcctcagatcagagtgtcattcatgttaaccagttttggggacccaaacttctgttagaagaggtatggtcattcctgactctgatcctgagagggtttggtgcaggcattacaatatgcagagattggagaatcatttgcaaagggaatgtgaggttgggtgtaaagattctgagattacctgggacagaggtctgggctgaaggacaggataaacagcaagttactttttgttgttcccactttacacagtagatatgtgtcaataaatatttgaaagtaaaattttacattattcattcatttctccactcaaattttgctcatctttttttcctaaaagggtgacagagtagtttaattgacagaacaaagggctgggagacccaattttagatttgcactaattcccattttgactgtgggtacatcccttgaaatttctaaaattcttttcattttcaatgattaggaatgttggattaaaaaaatacactatagctaatatatttgactttagactttaatgagtctttcattcatgcaacaagtgcttattgaacgcctgttcaataaatgcctatatgccacacacattccagctaccaataaatcagaagtgaacaaaataaatatagtacctgcctccaaggaatggtcagtctgcgtatcctgagctgtatgttctaaccatttctgaaagattggtgatatggtttggctgtgtgtttccacccaaatctcatcttgaattgtggttcccataatcaccacatgtcatgggagggacctgatgggagggacccagtggaaggcaattgaatcctcggagcgggttttttgtgtgctggtctcatgatagtgaataagtctcacaagatctgatggttgtgtaaagggcagttctcctgcacatgctttcttgcctgccaccatgtaagatgtgcctttgctcctccttcaccttccaccatgattttgaggcctccccagccatgtggaactgtgagtccatta

SEQ ID NO: 74023 - DNA, 1034 bp, Homo sapiens
tggctgacatggctaacctgtcttaggagagccatcttggaaacttgctatttatctatacttattgtaaggtcgatatttcaatttcctcccaggagtagaactgccagtaggatatctgaaattcaagacctatgacaatcaataccttaaacttcttgtactcaaaatccacatacaagcgctttttgggactgtcttgcattttgtttgtgtggcaagaaacagtttctggtctttgaatcatcatgtccttttccagcataatatcctgtggggttttcatcagggaagaaaggcagcacaccggagtaagattttgctatgattatctcatcatctcttttcatttgcagtgccactggcaaaactcttttttaaagaagggttcagcaaaatgattggcactcggtaagtggctgatattgaataggaaaagccaagagctaatttgaagtctttatataatgttctttgtttaaaaaattgaagagaaaaaatccaaaattagaagactaagaactagagcagtcttgcaccatactgttttaattggctgttgctcatgagaagaatcaataatttcttttgaagtttcgcatcaactgcttaattttgatcaagtcttataattaatcaggtgtgaataaaatgaatcagctataattttaaccatgttttcttaaaaaataactacaatgatataagtaatgggttatctaaccttattcaaggttttataaatgatttgagcagtattttagaggaactacaacttatcaattaactcatgagttttggcaatcacattttcaatatcttttaagaacaaatttattgaaatgttaatgtaattttgtgttcttcaggtattatacctgttttattttaaccatcaagtagtaatataattcctgctgaatttccaacactgtgtcagccctcatggaggcagaacaatgagtgaacaatgagcagcccaggttacggacttcatcctcaaagatcttataatataaatggaggaacagata

SEQ ID NO: 74024 - DNA, 1031 bp, Homo sapiens
attcttctccattttctgcccatttaaatccctatcatgtttaaaggctccagagctacctctttggaaagctcttctgtcagaaagaattaatccctccctttggatttccccatattatttatgcctcgatttagcactcatttcattttgtcttagacaattctcatttacgtatcttaggtcatgcagttcttttccacttaccttcaatggtgtcttccctcttcttgcccattttcctaaatgctgtagattcatcccaagtctactacaaatgtaatgtcccccatgatagcctcagatattctgttcctcactgatgtgtttcatttctgaattcctattatcttcttagcttaagtcactgaaatagcacctctgattcataagcttgccttgttctctaattttatgatggtccaagatagaaaccagaaagaagttagtatattcttgttctgacccgcacaggtgtctgtgtgagtctccttgactctttaattgtagacgagattgacttgattgaccactgcacactgagcatttgcctaaaatcctccccaaggccgtaagtggtagttcatgcctgtaatcccagcaccttgggaaaccaaggcgggtggaacacctgaggtcaagagttcaagaccagcctgggcaacatgacaaaaccccatctctaccaaaaatacaaaaatcagctgggaatgatggtgcatgtctgtagtcccaggtacttgggaggccaaggcaggagaattgcttgaacccaggaggcggaggtctcagtgagtcaggatcactccactgcactccagcctgggtgagagtgagactccatctaaaacaaataataataaaataaaatccttcccaagctctttggcttttcccaggctggagtacaagtgtggttctcaagttcacccagatatgaaatccattatcttacttagtttcgacaaagatactcacacacataaggcagttatctatacgctttactaagatattgggaaatttttatt

SEQ ID NO: 74025 - DNA, 1103 bp, Homo sapiens
tttcagatattttcttaaaaagttactcatctatcccatcatcagaaagaaaacgaaagagaaattcttcatgcctttgaagtctttggatgtaactcagcattgccagactaatgcttattctattcccaatagataaagcagtctatatgtctttggagagggtagatattttatgttaaaaaaatagaccaacattgtgaataattgttgcactcatcaacatggatgaatttcaaaaacatattgtggaatgaaagaatctcagaggagaataaattcagaattattcaattcaaataaagtataagaacaagtaaaactaaactatttattgtttgaggttatgtacaaaggtaataaaaataatttgggggcatctgggaatcctctatttattggccagggagtcagatgcaaatatttcattttattactgattcttaaattgtgcatatacatgtatacattttcatatacttcatataatttcaaaatataataaataatagattaggcaacaaaagcaaaaacaaataaaatataccaatatcaacaaagcagaatgtgtcagaaactattaaatttcccaagtctaacactagatctgcagatgaacagaccttacctaaatgtttttgaccttgggaaaaaataaagtacaattgttactaaacagaaagtctttcttcatgctgaatatatcagctgtagaggagaaaatcagtgactcataacatactacacccagtgtctgcacaaaggatttagattaattattcttggttggttcagacatatttctctaagatcttgacaactgatattggttggttatgacccaagccattacaaagaaaccgaagaaagggactgtaatcatttctgtgaaaacagaaaagtttaaacatagccaattattattaatatttgcagaataaacaaaaataaatgtaacacattgtttaagctgataactagggatctttactcagagtgtaagaatatgcttttaaacattttatttatatttagaacaataactctggtacaagtttgcatttaggtttttagattaatacaggatcctctttcagagacta

SEQ ID NO: 74026 - DNA, 1136 bp, Homo sapiens
agatgccagcattatacctcctgtacagccttcagaaccatgagccaattaaacctcttttctttatgaattactgcattcgtcagttctcacactgctcataaagacctacctgagactaggtaatttataaagaaaaagagatttaatgaactcacaattccatatggctggggaggccccacaatgatggtggaagtcaaggaggagcaattcatatcttacacagtggcggggaagagagtatgagagccaagaaggagggttttccccttataaaaccatcagatcttgtgagacttattcactaccacaaaaacagtatgggggaaaccgcccccatgattcaattatctcccaccgggtccctcccacaacacttgagaattatgggagctacaattcaagatgagacttgggtggagacacagccaaaccgttatcaactacccagcctcaggtatttctttataacaacacaagaatggactaacacataggtataagttctttatagtcattcttcaagtacctagttgatgcttcttcttagctctcccatcagttggttagtggcaaaggaggataggtgttcagagaacttaatgagcttagaaaacatcttccaaaacttgtgtacaaattgggctgggggctggtgggcatcttgacctcccatggaggctgaggatcttgttgacatgaggagggtgtttgttgttactaactgggggtggctggtgcaggaggtgtcatgtgtgccatgtgcccatcaaagtccatccccagaagctggagagcctgggaccacaccaagggagaaggtagaaacgacatccaatgtgaggtgtcccaggaactcttgcaggttaaaagaagttgaaaagtttctagagtcacccagacctgcttttgaccaaggtaggcattccaagtgatggtatatttactgacaacaccatattcgtcattcagtggtttgaactgaccttggtgatgaacagggtggtttgggggcccctgtgacgtgcttgactgctggctttgcccacggagcagcacagtatcttgtcttaagaaagctggcctccctttctcatccctgtggctctggttatttggtacctctgtaaata

SEQ ID NO: 74027 - DNA, 1067 bp, Homo sapiens
ctggagtgcaatagtgcgatcttggctcactgcaacctccgcctcctgggttcacgtgattctcctgcctcagtctcccgaggagctgggattataggcgcgtgccactacgcctggttaattttttgtatttttagtagagatggggtttcaccgtgttagccaggatggtctcaatctcctgaccttgtgatccgcctgcctcagccttccaaagtgctgggattacaggcatgaaccactgcactgggcctcgttattacagtatctttacttgtctctttatcttatttattttaaccttatttaacatatacctatatggtgtatattatataggtgtgtatacgtaggtgtcagaataagctcttaaaaatgttaacactttaatattcctaagaactctataaggttgccctatgaaaggatctacttctaggtcccagagaaaatagtaatttgtctaattattcaataatcaatacaatcctttcttattcataaatttcacttatgactgaaataaactaatacaactatagaaataacatgtgaggaaggggatgcttgtatatcttctgtgagataagtatagttgtcttcatttccaagattgagtctcaaaatgtagacttgcccaaggccagacagtttgtagctgatggtcaaaacgccaaacttacaatctttgtatcatatgatagtatcttgaccttatatttataggtttgattatgcattgctgctgctctttctctttgctactgattggtcattttttgaacctagtgagtgggcatattgcattttggtgtgtgtttattaaatttatcctctctcctgtggtggttagtggtacacactgaccctgaactgtcctctattacaaagaagcgtttggtttgtatttcacttccttcatttgatgttcctttcatgctggctgtttctgtttaatgaaggtcattgcttgtgaacaatgttgttgttcaggaatactatcctaggaatcactgtgatgaacctgctgattgaggtattatacgaatgcctgttttgctcataga

SEQ ID NO: 74028 - DNA, 1037 bp, Homo sapiens
agagaatatttaaattaaaaaaattagagggacctaaaaacagaatgcagtgtgtggagttcggatagtgggttaaaaataaaaagaaaagagagaaaactataaatgatatttgggggctttgggaacaactggaacaatttgaatataaattgtatatcagtttatatattgaatttcttagttgtgattatggttttgtagttatttaggaaaatatttttatcttcaaagacgcatgctgaaatatttaggggtattatgctgtctgcaaccaaccttcaaatgattaagaaaggaagtatatatataatctatctatctatctatctatctatctatctatctatctatctatctagagagagatgacacagagagcaaatgtggcaaaataataattgattaatctgggtaaatgtacacagatatttactgtaatattctctgggtttgaaactttgcaaaaatgaaaagaaaaatataaaatatgtgttaatggcttacactctttccagtggatgctttagaaggtacttggtgctgacttcatctttacttttgggggcaattacaatgtttaggggagggtgcttgggaaaggcctaactcggcaagatgagtggggttctcattcttactagaaacaaatacattatgattgataatgtaaatgaatatacttacagcagcctcagctatgatcacttttttcatcctaaaactttttgtatctttaatgagattgtttgtactccacagttgactgactgtcagagtattgaacagctcatcataaaagatgtttgcttttaaaattattgaactggatttctatgtaagaatgtggaaaactgtctacttatgtaggttgattaatcagtacacttttagaaaaccttcttttctttcattttaaccattaacagcctaacaaagtgtgattctcatatgagcagctcggtatcacctgggacatttattatggtttcaaattaatcagaacattggggatggggcccagaaacctggtttta

SEQ ID NO: 74029 - DNA, 1054 bp, Homo sapiens
aagaatggtatattagttagataaaagggttaagattactaattgggctattaatagctaacaagttgattctcttgatttagagagtcttttgatacatattatttgattaagtatgatttgttatacctgtgagtaacacgggcacacttttatccccatattgcaaatgaagtccaggctaacagtaactgacatggctcatccatagaagaccatgatttcaatccagtctctgactccttactttatcacagtgctctgttgagcctatataaaaaacccttttggctctttttaaatgactttctttattttatcttattctgaataatgtgtaatagaaaaaatataagaagttttaaaagactaatttaaaaggctgttagggaaggctaagatagtttcatcttctcatgtctcagtttgtatcctaattcacatcatttaaaagtaacacttaactagattcttcccatctgacagactcaactatttgaaaacaacaaaagggtgagttatccatccctggaagtgctaaaacagagagcgggctgcttgcttattttgggattagataatctttaagatctgagtgccaagactccatcagaagctggaagcaagtgaaaaaccagtggtaaaaaacctaccaaccagccaaagaacagcaaaacccagtttctccaacaaaactcagtttctccatagttaaagtagatgttacagtgtctggctatctaattcaacttatttggttcattagagatgccttcatgtaggcttcagagtcctgcttctcttgtttgaaaaacattacaatcttattttttatgattttctagatcagtggttctcaatgtgtgactctcagaccagcagatttgggatcacctgggaaactggttaaaatgcaaatcaatcagaaactctggtaatgggacccagcaacctgattgtaacaagccctccccgtgatcctgatgcagctcaagtttgagaactgcagtgctaggtaataggtgagcggaagttgcaagttaaattcagtgga

SEQ ID NO: 74030 - DNA, 1075 bp, Homo sapiens
atatttgaatgtttggcctgtgccagagggctgcccatcatagaatatcactgaccattgccagatctgaggtggggctggagatgtccaagggtctcccatgtacactggctggtgccattggtcatgctgtctctcttcttacgggctttcaacagatgagttctgacttacaactgaaagacataagtttaataagtttatttgtgtatttactgtaggatgcaatattagttgtcaccaactcataatgcctacattataagtaaaaactatactccttgctattgaagtcttttcctcagtgatctggtctaatttactacgtcagtcctgggaccctctgctccagaacccaaagtttttttttcaggggagattggtcttatcattttcacttctaggttttgttcacacaactcactaaaagtttgagtcctgtttttcattcagagagggaagctcaggtctttcaccttttcagtgggagccacctctgcttatctcagtatactggaaatgctcccttcaattcagtagtgctgaaatcacacacacacacacacacacacacacacagacacatatatgcagacacacatatacacacagacacagactcacatgcagacacacacagatacacacacatacacacagacatacacagacacacatatagacacacacagacacacagatacacacacacacacacacacacacacacacatacaaattcttgactcctgaataggctgggaattccttcagagtagggaagagtgtcacataccaatttttgtaccccataatatctagtaaagtgtcctgataggtattaatttgaggtttgttaactgattaatgaattaattggttagtgtggataaggaagtggtaatggatataattagagaggtgataacaggaacttatcactgttgatgggcactggggagttggtaatggctgtaattagagacctttgaacaggagcatatcagaagagggatattgatgggaagatgaagccacaggagaggagtgacaagagagaaggtattgggactga

SEQ ID NO: 74031 - DNA, 1163 bp, Homo sapiens
aaacgccccgataaatgccttcttgattgattaactgtcttgaggctttttacagattctaagtcagactttttttctagtgtcaattgaataggcggatgcctaaaatgcctttattgtggagaagagcctttcattctgtaattatagaggcaaggaaaagatcataaaaatattcagatgtaacaatttagtgtgaatgcttttcagttaaaatgtaattagtcaacaaatgtaaatcactaattatgagttccttttccgttttaatgtgaaaccatccttcaagactctgccacaggaagagaccttaatactgaagctgcataaaagtgtaggggggaagtagaatggccttttatagaacaaaacaaaagagaaaatgtgaccattttgcatctgattgagcctagacagagaaaagatgggttatgatatgtggtatttgcaaaggcatcaggtctgtttggcatgatgttttgatgatagatagataaatggaggtagatagatggatggatagatagagaggtaggcagataaatttgtataaaagagtatatttgttttgttttcaagggctgccataacaaagtaccacaaactgggtggcctaaaacaacagtttattgtctatagttctggaggctagaagtccaaagtcaaggtgtcataggccatgctccctctaaaacatgtagtgagaagctttcctttactcttctagcttctggtgttttgctggcagtctttggccttctttggctgtggatgcatcactccagtctctgcctccatcacgcatagtcgtcttctcctcgtgtttgtgtccacatggcatttccctcttcctataaggacaccagttttgttgctttagggcccactccaatgatctcatcttaaattgattgcacctgcaaagactctatttccaaataaggccatattcacaagtactaagggatagggcttcctcatgtcttttgaggggacacaatttaaccccataatgaaagagttatgctatcattcataaaaatcctgtatataagtttggggtacaacctcatagttatagcttaggtttcctttggactgcttcccttcctgctgcaggttttccttaagttttccagtcaacagcagcaaacaactcactt

SEQ ID NO: 74032 - DNA, 1032 bp, Homo sapiens
ttctttgttcttagatctccaccttctgtgcttcattaactccaaaaataaaagaataaaaagggagaaaaatcccttactattgctgaaagtttcagcaaaatgctctcttgtctttctccatgcttatcctcaggtatgttattcacagtgtctcacacactggatgccttacaaatattcttattaataataacccagagagttacctgtttctacaccagcaatgatatttactagttacctatgacactgatcttcggggttctttctcctggggcaaatgcatgctcattatttaggtctgtcaatctgctttctttgccatagatcccagtggaggctgaatgagagactggttgtgatacagagatcattagctttcaaatctgcctccttgaaaccaaatagaatgtattttctgctcatatgacaataattttttcatctctttaggttcacagttcttgttttatttttcttttttttttttttccgtaaagcctagcttagaggtagccttgtctgtcctatagggactaactttttatctggtctcctctgcagtgttgttagaagcccataatgatcaaacgacttgattaaggtcatttcctgggctgaggcagctgaatctttctaggccctgaccagctttcaaaatgactttccatcaattccatccagcaattgtccttcgtcacctcaagttcagtcaaacattaaatataaagaagtggataagatagaaatctacggaagggtgcaaaactaaaaaggcagattaatctgcatgagtatgtttcacttttagttgttcctagcagagcctaggaaatattgttaaatggaaaaagttttaaaggtatgcccatgcctttaagtgattaatttttctgacttctttgatgcatccccacaaatgtgcattttcttcctaatgttacttttagcatgtcatacactaaaagtagttcttaatccaccagctgatttgatagtaagtggtgtttattgagtacttaccttgtg

SEQ ID NO: 74033 - DNA, 1133 bp, Homo sapiens
tgtcctcaaaatactcttagtaggtaagaatgagacagtctcaggttcctcattttacagatgaaaacatgaaacaggatgctggaatgagtactgattttcaaaaacagaatttctgattccaggaatatttcctgattttaaaatgggaaaagtattttcaccatgtactatatacaagtggggaaacttcccatgaaggctgcctctgcaagttgcagctgccattaattcatctcttaaataggataggaaaccatcttttgtagctatcgcttattttcctattgaatgctgcctttccatttagatggtgattactgtttcagtgctcaatgcaatcagtgaatggagagagagatccatgttatttctgctcctgtgaaactgattacattggtatagtcctggataagcacttataaggtacgtacaaatatcattatgctgccatacaggttatccatatgctggcattatggttttcagatgacttccacctgtagcagtgtgtaactgaaaaccaatcactcctctcctgagaacatcacaattcctgctgctgaaatggaaattgacaggagttagatacagctgtacctgatcgtcaagggataaattattttgtgtaattgttagagccttgctaagacctaatggaatgaacatgttgttttccacacccgtgggtatggatagttcttacaaatattgtgtgcttggatttaaagtagtgtgagactgtcagtctgttgacaatgagaaaaattaatttgaactgctgatgaggaagggaaacatacacaatgaattaaatttaatagactgaaaaaaattggtttcttcttactatttccgtgtgggaatatgtcagacttcatttaactcaaataactacagatatgaaggacagccacactgcagcctctgttggagaattctgctggcaatttggtgcatccactatagacactgttttggtcaaacttaccttttaatgtgaaatggaatgatgtatgtcctgagcagaaaacagagtgtttggctgtcaaggacaaatcagacattgtttcttttcactatcctttgtggttttgccttttcagtaatgaacaatggagtaaggccagacc

SEQ ID NO: 74034 - DNA, 1091 bp, Homo sapiens
tcatttatgatttttgcttatttaacatttagatgattttttaaatattagggctaaatcacattgtatttatctgcatttgtaatggctttcttctatcaaattattttcttagcataaatttagataggatcacccttatcttttattatacaagagcaaactgtctattttaaacaatactcatttctcctctccattattctagaggttgctggtaataaggccaagtgtgtccaaattttatttgtctcaatacctcaaggaataacatgaatccaagaacatggagggtaacagaccagaaattagacttggggctgatcttcaagttctatgattagattggagatagtctctgatgagcactgaatgatgctctgaaaatgaggcatttataggcagaaaaagagtgaccaaaatcattgctacttagaatatggtcagtggaccaactgcataggatttcattaagaaaatatgatggacttgtttttgtttgttttgcaaatgaagtttgggagtaaggacttggagcactgcccatctgacttcctcttttcagctcccaaagtacctcttaagattcctagggattaatggaacataatttgaaatcccatgatctggatagtgaatgcagtcactcagctcacatgtagtgcctaccttctctgtaccagatttgcagtaggttctggaaagataagataaataaccccttacttgaaagttgacccaaatagaagcctcagaacttcatcttaattcttcctttacacagatattctttaactgatcagtttcttttttctttcccttttttttttttttggaaacaggtactcactttgtcgcccaggcttgagtgtggtagatcaatcatagctcactacagcctggacctcctgggctcaagtgatcctcccacctcaaactgagattataggcatgagccaccatgtctggcctaactcatcagtttctaaaaccattctttctacttctgatacgtctttgaaatctattccctccattctatttccagcaacagtttggtctttgtcatcaatcacttggactactactgg

SEQ ID NO: 74035 - DNA, 1086 bp, Homo sapiens
ttgtggactttttttttttttgccaattcacttgtccttacttcatactccattcctcccgaatattctgaatcaataaatctttaatgaactagttcatctaatgcttgaaacaacttttaactctaaagcctaaactgttggtgctgcctgggtctctgcctgcaatgagctattgcattcaagacacaagggcaatattctaacacagtgactgttcaacttccaagatgcatattggaaaagtgtcccagtgaactataccttatccattctaattccaagaagcaatgataggcacattgtgtaacactgaataatccccaaatcattcatgtacgtcagacttcagagtatggtgtttgcatttatatttcatatgatagttatcctattcaatgaacaattcattttcagtgttataatgaatcctcaccctaactcaaggacatggtgcagagaaaagaacttagactaagtggattctaatcccatttctactaacgactagatgtgtaacattgagcaagctgcctcacctctccggacctacttggctggtagacattaagttcaggttaaaaattagaatgtcttagagttcttttcttatttctatttcctgtgcgatatctccctgtctactcttaatgaaaatagtgttttatgttcctgactaaagtaccttttatttttttcttttaacttttattttaggtaaagaggtacatatgcctttttatgctctctcaaaacttttgggcctatgggcctgcttttctcaggagcccacagccagatgcatgactccatgaagcagaaagcggaggcagagcacgagaggtcctgtccctgcaagagcatctgggccaagagaaaagatacaggaagaaggaatggaattggaaggaagaagtctcatttcagaaataaaatagctcccctcctctgttgtagctgttcctctggcaatacaaactttctgatttcagggtctgcagaattctagaactcgagcacccaatcaggataggaaaaatacatcctccactggagtccaagttggcagcaggctgttgtgagagc

SEQ ID NO: 74036 - DNA, 1946 bp, Homo sapiens
tggtgagataagtacccaacaacacctacagaatgtatgcatgttagctttcaaaaagcaaaacaaggtaatgaacaatgttgatacaaaagcaattttagaaagtaagtcaaaataatctggattgagaaagaggaaatatggattcatgtactcatggctactggaggtgtaggaagaaagaccaagccaaggggagcagggaaaaaaaggagcatgttgaggatatagacttcactgagagtttgtactgaagtggggaacaggaaagttctggagatctccagtgctggctgggaaggcatttgagtggaatccaattctagtcataataccagattccagccaagacacctaagcaagtgaggacttgtacaatctgtctaaagagaacattttctattcaactccagctgttgcagccatgagcaaatgcagatctggtgtctagatcttcagatttttcaaggcatccagacacaaagattttaaagaaaatgctcttcattttaaacattgactcctttttaaaaaccactgcaggagccaaattaaagatgtctgctgtcatgatacagcctaagaaggacaggtttgcaattctgcacaatcttgagaaccaccagaagatttaaacgtgagaatgacataatgctaacagggaattagagagaggatcttggtaatcatgtgagaaattagcaggaatcagatctacacaaaagtggatctgtggaaactagatctgagggtctaatttaaaagaaatttccaaagaagtgacagaatttgcaaagtttattagttcacatatgaaaataaaattcatggaaagaagcctatcccaagatcttgtacttgagattccaggatgatggggacagaaaatggaaagttgaggacttacgggacaatgagaaccatttcttaaatatgttccagttttcatggagatactggagggatatcctgaagcaagttggagattttgaactaatgagtaggagatgtaaatttcagaattgattaggtacttatctgatctcctgtataaataatatatatttgtacatatttcctctcctacatatagaaatcatttatctttcatttttgaacttgggcaatgtagcagatcggctcattttccaaatatgttccatcctctatttacatatgcatatatttgtccattcatgcatgcatagtgttgccagattttgtagataaaatgcaggaagcccagttaaattttgattttagataaactacaaataatttttttgtataagtatgttccaaatactgcatgggatattttataccaaaaattattcgttgttcatctgaaatcaaaatttaactaggattctatgttttatctggccactccatgcatgaacgcttccaggtcatcatcctatttctctagaaccccagccatagtcttcttacttgcccctttgttttcacctttgcccctctaactgccattttgcatccaacaggcagggtgatttttaaaactctatttatgtcatttccttgcttaaaacgttttaatggcttcaatttctttttcttttctttttttttttttttttttttttttttgagacggagtcttgctctgtcacccaggctggtgtgcaatggtgccatctcggctcactgcaacctccacctcccaagttcgagcaattctcctgcttcagcctcctgaatagctgagattacgggtgcgtgccaccacacctgactagcttttgtatttttagtagaggcagggtttcaccatgttgatcaggctggactcaagctcctgacctcatgatccgcccacctcgacctcccaaagtgccgcgattacagatgtgagcacccgcccaatggcttcactttctactaagaataaaattccaacatcttaccatgactttgatcat

SEQ ID NO: 74037 - DNA, 1027 bp, Homo sapiens
atatacctaaaagtggaattgctgggccatagggtatgtgtatgtttagttgcaatagattctgctgaacagttttccagaatgattgattcagttggcttgcatgagaagtaaattgctctatatagaagagaatatttttaatgcaataatttatacgatcatgttatgatgaaaacaagaaatgtgttggcttaagagagactgggcctagtttgtaataatttaatgtatgcttggcatacttcacagtttataacaaagctgatcactttattttgtgaaattttacccatgtgtctacttgaacctacttcagatcggatcatggtggcaaggatctactgaggctaggaaatttaaattatctacagaatactggggatataggaataacttggtctgtaagtgtatagtgctcctttaactaaatcataaaaatcattgctgttttatatgaaaagtttatgaggtcacatgaatgcttgcttactgtgcatatggtaagagctgtgcatttcaagttaaatataggagcagttctggctgtaaagaagtagtttgagaaatcaagagaactataaacggccatctgctcttttctccatttttatttgctgaattaacccagtgcaatattttaatgaataatgggttggtattccatctgctcattaattttttcacactgtagaataatccatcatttttactgagtggaaacaattttctactttgtaaaaatattttttaaaatagagtcagtgggtataattcaaatttccattaatttcaagtgtattttggaaatggaggtgctgagaatatctttagggtcctagtgctagaaaaagaatttcagttctttgagatgacaatgcatattggttgatgtatatctttattttatcagatacatttgttttggcttattttgaaataaccagaaaagaacctttctctgtatgatcaaaggttgcagagatgtaaatggcatcaatgataatataacactttgttaagagta

SEQ ID NO: 74038 - DNA, 1047 bp, Homo sapiens
catttttctatgacttcttttcagttaattttgttctggaatgtagagttatctgacttttttctggtttaatgatagtagtgcttgcatttttagtatttatcaagtgctgactggatctttttggttaaaaagttggttagggaaattactatcaagctcactcaccaccatagtaaccaaattttaataccttctggggatacaggcatttatataatctaactctgtggcactgaggtgcagtgtatgtagtgtatttatgattgaacagaaagtttcaaacagcagcctgtgaaattggattttagatgtaatgtaccataaataagtgctataaagattgcctttaatgctataaatcagattttattggtttcagctatctcattctggttattgtattacccacaaaatcagaggaaatcaaagagctggaatattttttattttaatatcccatattctacagtaatggcacatgcacccttacagcttcctttttgggtaggttggacaaggttgacagttggcaggccccagcaacatatcagtggcagtattggtgtaaacaatgaaactttggggcttggaacagtttaagatttcctgtctgtgaaacctacaaggtaggtgaattggcagatcccttccccgtctgagaagctggttgtcatgttcttcatgctaagctgacacctgtgagattggcaggtgatgtatgctttgcatcttctggaaagtttatagactttggtgatgaggctatctatccattggggatggggatgcccatgcatgacttacctgagtgatttaaagcacccaaaactattgctataaaagaaagttgtctgcttaaacaatctcccaatatttgatttacaaccaatgcttctgcacccctccctaacactttgatggttttctattaagtatggtttagtcaagaaaattgactgttttttaaaaatgcttgggaaagcttacaaatggactgttagagcccaagaggctacggtaatctaaaaatgaactagttaggtc

SEQ ID NO: 74039 - DNA, 1031 bp, Homo sapiens
gagtaaaaaaagcagtagtcactgataaaggggatttttatgacactttttagctgtggtaactacttgggagaaatatcatttcctgttaaattgtcagctggctttatttgcatctattattccagtttgttgaatggccaggtgtatttttttactttctcagtctgactaatttttacttttttactctccatatcacttagaacagttagtttgtaaagaaaaatacttgacataaatgggattaaatggttaagaatatgtgtgggctaacaacagaaagtcaaggaatagaaagggtttcaggcaagatttgatcaaacagcttttaaaacaattactataaaatatcttatttctgtctcttcccatggctttctgtactatctacttttcccacatcttaaatatggcttcttttgaaagtcacaatgattaagtttttgcctttttgttgttttcatcctaatgctattctttcattaattcacatttttctcagtcctacttaataattttcttaagaaaatatcaaccttttagttctttcattctgtcttcatatggttgttatttagctgtttaatgtgtctcttgtattttatattttaattgctctatttctagacattccaggtggttattttcaagtctgcctggctttataatatcactcatgctttttacacaatttcaatctccctttttatgtcctcaatcattttaagtatgtgtagtttttattctacatctcatagttctattatctgaaatccttaggatctattattttttatttatctgctgactctcacatagtgaacttttttcattttatttggtaattttgcatcataaacttattttctttttacttaggtgtaagcattagggtggaggtacaggtggaaggcaggaatcccaggagtattaccagccaagaatcagggtaaagattcagaccatgagtctatgtgacagcatatctgtaagtatatattctcgaggaaacgttgatttacccagac

SEQ ID NO: 74040 - DNA, 1033 bp, Homo sapiens
agttcatatgctgagcactttccactttcttttttttttttttattttattttaacttccaggatacatgtacaggatgtgcaggtttgttacctaggtaaacgtgtgccatggtggtttgctgtacctatcaacccatcacctaggtattaagcactgcatgcattagctatttatcctgatgcactccctccctctcccatgcccccacaacaggccccagtctgtgttgttcccctccctgtgtccatgtgttctcattgttcagctcccacttatgagtgagaccatgcggtgtttggttttctgttcctgtgttagtttgctgaggataatgacttccagctccatccatgtccctgcaaaggacataatctcattcctttttatggctgcatagtacttcctagtgtatatgtaccatattttctttatccagtctatcattgatgagcatttgggttgattccatgtctttgctatagtgaatcagagcactttctactatctatattgatctcagacctctctgcagacccctatatttgatctcttatttaatattgacacttggacatcttgagctcaaaatgtgatgatctggactcctgattttccccacagatttgccccacccacaatcttttctatctcactttatggcaattccatctataatagtctgctctcacagtgctaataaagacataactgagactgggtaatttatcaaggaaagagattcagttgactcacagttcaccatggcttaggaggtctcaggaaacctacaatcatggcagaaggggaagcaaacatgttcttcttaacatggtggcagcaaggagaagtacagagtgaagagtggggaagcccattataaaaccatcagatctcgtgaaaactaactcactatcatgagaataccatgattcaattatctccacctggtccctcccatgacacatggggtttatgggaactacaattcaagatgatatttgggtagggacacagccagaccatatcacca

SEQ ID NO: 74041 - DNA, 1021 bp, Homo sapiens
ttctgtcacaaatcaaaagttcagatctagaagttattagatagtaaactcatgttccaagagatatgacagaaatccattgttggaactaattctgaccacatttcaaacttctgctcactctgaaagtagaataaaggccaggaaacaaaagagatgatgaaaacaaaatatgttgatgtggaagaaatgtgtttagggccaaggctttgggctcaaggtcagggtcactgtgaacttttctgcctctggacaatgtgcggctctgagctcttctgtagtagaatggaggaaggagtcgcaaaaacgatggcataggaatcctggtggaatccttcaatgaattggctattctgagaaaccaaggctgatgctcttgagctccaagctttaggcaagttctaaaccttacatttcatagcaaactgactggattgacggaattatatacaaaataatcttatgcttgctctaaagccatgtttggaatgtgtcacggccagatgcagtttgtcaaaacctgaatgtgttatggccagatggattactctggcttttcttttgtgtgtgtgtgtgtgtgtgtgtgtgtgtgtgtgtgtgtgtgtgagagagagagagagagagagagagaaagaatgagaatttacatgtgcacatgtgtcttaccctgccacacctgggatgtgcctcaaatggcaaagcaggaaataatcaaaggtagaacccaaccatccctaatatttattcagcaccaacagagatgtattctttcctaatttttgtttattgcaaagcaaaattatcaaaataatgaggagaaattttaaaaagaaaaaagatattgtcttaccaacctagaactcattcacttttacgatgctttaaggccaggcacagtggctcacacctataatctcagcactttaggagactgcagtgggaagatcacttgagcccaagagtttgagaccagcctgggcaatatagggaggtggcacatacctatggtcctagctacttg

SEQ ID NO: 74042 - DNA, 1121 bp, Homo sapiens
acaatgtgactaacttagtcactgtggaattatacaccaatacacaagcacatatgtgtacatacacccacatatacacatgcaccccacccttcaggtttaagaaaaggaaggtcatctatgtctcaatcaaagctctcctaccttgttctcattaccactggtttggaaaagtgtgtgatattgaagttatgaaaaaatggctttggtatgtatgtgttgtgtagggtagtgagaattgcaaaagcataaaaaatcttcctcatttgtaacctgttatacatcttgtacacagcttccatggtaatttcataaactcttgaattgcaaccctgaaataaaactggtttgtggatgctgtggcaaatacagaatttgacaacatttctgttcattggaggcctgagcattgtttggtgataaatagtagctgatgccatgtggaagggataaggatgaagaaattagactggggactgaagaatgcggactgtggtgcaaagcctgcatagtacatatgtagtccaaatgtgcatcagcccagaaattaattattaagtgggtaagaaattgtactcagagctgaaagtgaaaaagacaggtgtcgagacaactctgtcaaatagatcctcctcaatcaagcctagctaagaacctgggtctttggaaggagctaatattacaatcaggtaacttccttgttctgcctcctttggaagccgttatacttttgctctcccatgtaagctagaaatgggtcaggaactggaaagaaaagcatccctaaggtcataccaccttgttttcttttctgtcttctcattcaggcagacacagtagagtcttaagactcaagctcttttcaagggcctgaaaagaagaatgctttcattatttttccgatcactagctccaacctcctcctctctttgtttaccttgatgatgcttggaaggtaggtcacacttgcttagcatgcagacaccacttttaactgcctttgaagcaacagattaaggaaaaaggaaatggatattatatatgcaaaagggagaatgcttagcgtcattccctcagctagttgaccgtgcagaaaagtaattgccgacagtgatttgggg

SEQ ID NO: 74043 - DNA, 1025 bp, Homo sapiens
cttttttgacatggaaaatgccaaagacactggtcaagtttactctcagctccctacctccagtgagggggcctcttattaggaatgaaatatccaagagatgggcggtgctgcaggggagaccaaaactcagaggaggcattcaaacacttctagcaggttgtctactccatccaactcaaaacctattcaatatgaaggccgagggaatgtgctcacaactccctattaagggaaatcaatataaacccgcccccaccaaccaaaaaaaaaaaaagaaagaaaactctccctttttaatgtcttcttccccaggctcctggtactttgtcagcaacatactgctttcattcttaaaggtttcattggctgttaaatgagtccctttgcatactcactggagagaggaaatgctttaagttgtcctaagataacatctgcacacagagagtttatctgattccttatcaaccatgatctctatctgaggtcctgtatagtgggatcatttagagatgggggttagggagagtaggagtaactctagagaaaattgtggctcctaaaggaggcagatctttccaaggtggaaaggtaatgaattaaatatatgacatgtaatactgaaaaaatagaaaaatgactaagatacagtctctgtcctctagaactagggcagcctggaaacatatggactataattattttagctatttaaaagaaatgaatgaagaggatcttgagacaggaccagagcattggaatggttgtagggactgaaagctgagttggaaggatcagatcaaagagaaagctgggttggacttacacaagaataccctgatctgatcgcagctgtgactccaaggttttcctttcccatagttgctgtgaccccattggtcaccagagcaactgcatgtcttcaggctgggtattagggctggctgggtctgatgattctacccattttgtgccatctgaggagcatgcgagggttctttctccaaggcactttcggcctt

SEQ ID NO: 74044 - DNA, 1044 bp, Homo sapiens
ttttgttggctttttccccctaaaaatggcagcaaaaatgaataaaattgtgaagctctgcacagtaatacaatgttaccatgaagaaacatgtagagttgctaatcccatgcatttagttgtttaattgattgtttttatattttttaatgcaagaagagtgacatcaacttgaagaccccattagatactaacttcatacaggaacattttttgcttcttttgatttttagggttgaccttactttttcagagccacacatttaataataatgcattaatagtaatgcatttaactgtagtgaacacaaatgttaagtgtatggtttcagcggtaaacctaagatacaacccagtttctatctagacatcttccgttagcctttgctctgactggtttaagagagatcctactttcaacttaaacagaataaggacatcaacttgcattccctgtgctcttaattagtgtttcctacaaaacaataaggtaaagcaaataaacagaaaaaaagcacaaggggcgtgaaattcaattcctggaagaggaaggttgacggtcaataagctcatgagggcatgttcaacctcccttataaaagagagaaaggaagattaaagaaacaatatgatgccatttctcacctgcttagcagatcagccaaaaattagaagtctgactacctgagactgggtaaggacatggtgttatgggaaccccactcgctgcttgtgaggttacacatctatatattttgaaggaaaatttggcatcatctagaaaagctgtacattttttttattgtgaaatatttttagtatacaaaaaaggtagagaaaatataataaacctctatgtaccttccatctagcatgaaaaatatacactgaaaatgctctgtttatctttcctcattccccttttcctcatctcaagtgaaaccactgtcttgaacttggcatttgtcatttttcatgcttatttcactacttatgtatgtatccatacaccacatttttgacctttacataaatggtattata

SEQ ID NO: 74045 - DNA, 1039 bp, Homo sapiens
actaagctgaaaagattgaatcaggcagttaggaaatcactggtgacataaaaaccatttcagtggtggtaggggccaaagcttgtttgtgcaatgggttgaacagtaaaataggaagttacaaattgctggaaatgatggaaagaaagaaataatgatgtagcttaaagggtgacatacttaaaagaaggggttttaaatttattccttctttaggatagaggaaacctaaggtttagtgtagagtgagggaaataaaaaagtcagtggaaagattgaagagagatgattgaaggacaatggacataaaatactggtctcgaactcctgacctccagcgatctgcccgccttggcttcccaaagtgctgggatcacaggggtgaaccaccatgcctggctaagtactgatatttttaacagtcactaggttatcataatatgcagctgaaggtgaaaaagattagaatgaattttgattctcaaacttgatggcacattgtaaatacttcaaaatttttaaataataatgataccaaatgtgaatgcatctcaaaagcattatgtttagcaaaagaagtcagcagcaaaggaaaccacttccatgattccatcctgattccattaaaatcaggcaaaaagtaatctaagaggttaaatactagaatagtagttactttttggaggagagggaggttgaccagaaagggcaagaggaaacattctaggttgatataagtgtcctatatcttgattacagcattggttactcagatgaatacaagtgtcaaaactcgttgaactatatgcttagtatctgtgcatttactgtatgtaattataccttgattaaaaaataactccaaaaaacatttgactcaattagtatgagaagtgggttgtgtattgggatatctatgagcctcccaggttgttgtaacataaaggaaccactttatggtttgagaaccaccgagctcagtcatctgctgacattgagatgaggttaaagaaggaaccacgagaaaactgataaagac

SEQ ID NO: 74046 - DNA, 1034 bp, Homo sapiens
gttgaattatttttcctttaaaaaacatatacatatgctttgtcagatagtccaaggacttcagtttcatgtacaacctggatttctttggaatctgcggagtttcacattttcccaagtgttcacggtgaagctcctggcttcgagctggctgtcttcaagggtgttttcttgagctacccctctctctgctctgccaattatgtgccactttgtcttggtgctatgattgctttcttctgagagggaaattcctctttcatcagtatggatgcactgtttttacacactgcaagtgctgtgttactgtgtcagtcatcctattagggccagtttcagacgagtagggctgacgagctggctggggattggctggccccggctgggagggatttgtcggaaggaagggctgcagcttacagcaacagagtttagactgtctttgcttcatcatctgaaggtaaaattttccagatacggcagacggctttcagagtacaataaacagggaatgagaactatttacatggaagtttctttctcatgatgcggtggagaagcctcggccacttggttctgccagatgttcctggggttactgtaaatgggaaggacaggcagagctaaacaaggtaggagaatcgccccccttttttgaatgtttaaagagtttgctgcagtatgctgcattccatgtgtgctgcttacgggagccagggaaactggattccactaattcaattgtaatacttgcgggggaccctggagttttacgtaacattttgatttgagaaaaagaaatggcaaagcttgaatctatgccgcctgtttggggtgaggcaagaaatcgagtttttatgcaaagaatcgattcatttattatattattttttaaaaaccatttgaattctttggagcaatcttattttcttgctgtgaaaaattgttatattgccatagctagttcccaaatagataaagtttacatggatcctattatttgaaaacagacttgcaattaaggattaaaaaaa

SEQ ID NO: 74047 - DNA, 1050 bp, Homo sapiens
acgatcagcttagaaaacagaaaaaccagtgatgccaatggcataaacacacaggaggatgggggaagacaataaaattggctctgatcattaagagtttgaagtcggaatgtcctctgagaagtatgggtctaggcttctgtagcgtgtggagcccaatgtatatttggaattcatccacagaagactgatgtttgaaatcatagaggaattgagatagcaaagaaaacaagtgcaatctagaaaatggtagacgacacaggcttgggtagatgacacaggcttgggaaagccttacattgaagggaatttcctaggcacacttccactggcacaaaaatccaaagtgaagagcatttcatccaaggtgagggcaccttggaacaggtgtatgggcctcataacctctctcattgcctttggatctgtgacaaaggatcatgctattcactgtgtcatagattaaggcttcctgaaaccaggtgagaatgggaaatggtggcagatcctaaagaaagttcaataaagatgaagaccgggcccagtcctatgaggtgcagaagccaagacaacgcctctgacctttgggaaagtccctttttggaagagtgctgcgtgggctgctgaactgcaaggcaccagggaagtggaaagtgaaaacgattaggtagggagtgggagacaggtagcacagccaaaggggagatggcggtgagcagagaagaggcagggataaagtaagcaagtttaggttggagggcaaggtgtgctgggctgcctggtggcacctggggcaacttttggctcattggaggctgcctgctggggattcatgagctgaggccactgggaaaaaatggtttttgaaaattgataggcttaagtatgattctgctctaccaggaaaggtgaaaaacattagataaatgtgaaggaaggtggtgaggtgaggtctaaaggcgtctccaaggaggcttccagaggcctttgccttgaaatgaattctgctctactcaaaataaccgtttcggagagggctcaagatgctac

SEQ ID NO: 74048 - DNA, 1143 bp, Homo sapiens
aaggttctttctgcaagggtggtaggcatttcactatcttaattgatttagaccctaagtaaagaaattgaatttactaaaggtagccatgtacaatgcatttttatttctactaagttggaggaataaaattatttaacaactcttctttctcctgaatttgatatttaggcaggaggaagggctgttacattggattgagtccatcgaaatggtattttaatatttcattttaattttgcttgtaattattattgcactttttgaaagaaaatacttagttccttccactgaaacaaatctgaaattcagagccaagtccatgcagcagcacaattttccattattttgaagttaagtaacagatgatgagtaggacaaaggaagggaactagtgcctttaaagcacctactatgtttcaggcactttgatttactttcagaatgtttttctccctaatttaatgctcccagctacctaagagatatatggtattactacattttatagataagaaatgtgaggtttagaaagggactgtttgttcattgtggaacttaaattggaactagcctccaaagttggctgaaatttctgtttggaattcagaatttgaatgcataccacttgtcccaacttataaacaggactcttgtagtgaagttttttggattgactaatataaatttaagaactttagcatttttgaaagccgttaataactgttggctactgttatttcacacacacacacacacacacacacacacacacacctatttatgtgggtgaatccctattgaacttcaaacatttattgcaaaccactttgcctttttatttcaaaaagaaaatgtgaatgactactccttatgttagaaaattatttaaaacctaaaaaagtgaaaattttacatgaggataaagactgttaacgtatacaataaagtcagcagtgcgtgtaagaaatctgaatatcgtcctgacattttatatgtgtgtaaattgaacttctaatccagagagaagtctgcttttagttaactactgcgaataaacttctgtttctaaaattctcagtctctgtctttgggtaggaggaggcagcgggatttgtggcagagagatccccttccacccca

SEQ ID NO: 74049 - DNA, 1135 bp, Homo sapiens
aaactagtaattgaaattctttcttattgtgcaggctgacagtctcgaaaccaattctttgagtacctattgtctatctctgaaatttaatgagataatgcatgctagaaacactttattcaccatacacaattctatgtaaatgccagctgataatattaaagataataattgtattaaaaattttaactaacacatgaagagagcttcgagattgtctagtatgtttctttacaaagttgattgattaaaaactgcaatatgttttatttgtttccttattttcaagaatatttggaagaaaaagcacttgaagcctggctttatggtaataatataaaaaccaacagggcactgggtttttttcctttaaaatggtatgccaccctgatttttaaaattccaagttaccctttgattccccttaaaagtgagataggagaagagatatgctgtaagttctaggacaggagatggctaaacatgaaccccgacataggtcttctttgtgctcttagggttggcttcatttctctcatacctgtttctcttgtttattgattgaagttaatgatataacttggagcattagaatattccaatgtaaaatgtcatggttattgaggcagtggtgttacttataaaaaaattgtttagaactctaatattttctttagtgcgttcattaaacagctaaaagaaagcagaatggttaattagcaatatcatttattccatattttaaatcacattctagttcattcatcattttacttcaaatagcttcataagcagttaatatttgaatctgcagccaattaattgctctacctgtgaattttaccccaaaatataggtttacccaaatctagaaaacatttactactcaacactttctccccaattaccttttcagtctcaaagcgtatacgacaaacccttcatcacatgttctaaacttttcatcagaaaaccttgttctggtttagtgttttaatgctacattagaaatgatatttcttggcaaatactcctttccatatttattatctggatttagcatgtaattatttattatttgcatagcaattcacttttcattatatatacgtatgtgtgtgtatacacacacata

SEQ ID NO: 74050 - DNA, 1019 bp, Homo sapiens
aacatgtgctatgggtctccaaagggacaaagccctagcgtaatatctctaaccatttaaagcacaaaaagaaagaaatcttgtgtttatgattactgtaaagaataataaaatcaagataactttttttttagaatcctctctttcttctaaaatcctataaaatcagataaagaaaaggtgggacaaaatcctaaatgtaatgttcaaactgtcatatgtggtgccttaatggttaattttctattagttatgttttattattagaagcaataatgagcagttataatttaacatttttatgccaagtctatggaaaatgttatgcaaattttactattattagaaagctacaatttgcaagccattgtcactccattcttttatttaatctcttttcttaaaagtggccacccccaaccccactcattgtgagttgaaattattcaaattaatgtcaagttgtttatatattaaactatattttaccttgatacttagtttttaaaaacacataatttctgctacacaatttggacagcagactgtgatatatgatatgcctactatatcgtcgtaatgggcaaggttcattataacaaaaatgtgtccagacttagtgagataatgtgaattccctatttctcaacttgcttgcattttaagatgttcagtctggaaagtgtttccactgtttgtgaatgattgtccctagatggtggtgacatttgacctattgttcagttttgaagatggaaatgacatgttcgcaagcataaaagcccagggggcatttttagaatttttgtcttagaatgtttttagttttattttattttctgatgataaaatacttgcttcctcaaggaaaaatatataacatttaatatcttctggtaaacactggagcctgacagtctccattgctagaacacatggtttttaagagctgcttaatgtctgatgaaatgaagatatcattatttattttagcatttcctgttgcttaacatttacat

SEQ ID NO: 74051 - DNA, 1027 bp, Homo sapiens
cctttgcatatctgagaaggtttttcattttcatgttggaaataaaatgcaattgggtgtactgttttgagtattaggtttcccccctcaaagttctatagacatatttctattggcttttgctgttttatgctgcaaaagagaagttggaagccaattgatttgtttgtagttaacttttttgggcaggaggctaagtaactttagaaatcttcctttgtctttgtgattgctacgaggttccagcttggcaaagctttttgctggcttagcccaggacacggaagtctggttggttcttctttctcagctttttttggaactttccaagattctctaagctacagcttttaattattgcttctatttcatttgttctttatttcttttttctctccaggaacaccaataattcttaggttgaatctttgttttctgacttccatatctgccaatagttctctgagcagtttaatctcttttccatgtttctctatattgtgtaaaaaaaagtttcaggtatattctccagctcattggttctattttatttgctgacagtgcactttactgcatcaaattcaggttttaattctgctgttgagatgttggtttcctctcattcctttcttatgtcaaccaactgccacttttatttcgggctgtctcttggtcccttttcagctcagtctgccttttccccatctttactgttctgttgtataagttctttaacaggcattgagcttactcaagaatgaagttcttgaacttcattaaaaacataaaccaaaatgctctcttcaattttttttttaatgataaaccttgagctccctttctgaccctccttttagtatgcagaatctttccatcagtcattttggatttttgttgcatgttgagctattcatttgtttgctttttattcattcaatgatcttgaaagaaaagaagtctgtccaggcttggcttgtttttatttaagacagagctgagaaatcattttagacagcctcacttcctg

SEQ ID NO: 74052 - DNA, 1049 bp, Homo sapiens
gtctgactcagaaataggcttgttttgcaaagatcctttaatcagctccctaggaggccgatgtctggcaggcagctaaaatatcatagatgacccgaaagtaaactggaggaactgtgtgctgcagaattatttcccttaaggtggtctgaaattttgatcaatctcagtctcaacattggacatgactgatgtttttcccttaaaaaatgtacaaactatctagaaagcaatggcacggaggagacacctggggtccacagccccagcttgtctgagaggcgtggaatggagggaggtcgcctccttgcagagtgaaaagccaggctttccagactcaccctgcataacttagcagctgcaaaagaatgtgagcggcaagttcttttatacagtcaaaagtgaatgctttctgaaaatctaacacttagaagagttcttaaatacattttgaaaaatgaagtgtcatgtaagtaaagaccctaaaaatagcttgggattattttgtacagttgaacggcacatcctttggcatttcaggaaatactacagaacctcgtttctttcttctcgaacttcagtcttgccttttctttaaagatgagtcaagcagtgaacctggatattccttaaatcacacgccttctggagaggatggggcactacaaagcagctccttctgatggctgagctgctggtcatcaggccactagtccctttaaagtggtcctctctcaggcaagtgtccgtaaaacaaggccgcacccaccccctctagaaggctatgggtcattgtctttcctaattctcacagaaggaagtcttagctgaaacaaatctctcaggtgttttctgtgagtctggctgttttgttgttttgtttttattgatcagaaacagccgctgggggcagcccggccagcactcttacaattgtttctagggaaatcagtgaactcaaaagcctgcaggtaactccaggtggacatctttgttcttttcagcaagcagcaggatgcctggcacacagaaggcaaggaatgcttccg

SEQ ID NO: 74053 - DNA, 1118 bp, Homo sapiens
tctttcgctgtgcagaagctctttagtttaattagatcccatttatcaattttggcttttgttgcaattgcttttggtcatgaagtctttctgcatgcctatgtcctgaatggtattgcctaggttttcttctagggttttttatggtttgggttttaaatttaagtctttaatccatcttgagttaatttttgtataaggtgtaaggcaggccatccctgcttttaaaagcaagtttatcttaaagacaaatagggtgtgatctcacttagaggttctaagtgttctcacaactaaaaaatgctaagtatgcatatgttaattagctcaatttagctattctacaatgcatacgtatttcaaaatatcatttgtatataataatcctatacagtttttgtcaattcaaataaatacttaattttaagcaagtgtatcttggtagagtctgatcatctgaattctggtgggattttcatagtaagttgaaatggaaattctcccagggggaaaaaatatatatttcttccagggggaatgaaaaaggcttcttacctataagtatgaataaaaatgtacagcattcactgaactgcattggaagcatagctcctggagaacttttaggaacatctgagtaattattcttgccatctatgcaacagtacctatgtttacctctttcttttcctccatgggagcccttgggagagactctgctgcctttgaggttgagcatctaccttgggtcctggtactgaggacttggggactctacgtaatatttttcaaacactaagtgtgttcagcccatcatttgaaatatccttgtcattggtgcctcatctcccttgatgcaggcagaaatatgtccttgtcctttgctttcctcatcctttgttctccatgggagctagaggtgcaggttgaggtaataaagatacaagtccaggctggtctatgaaacccaacccatattaaatttggttattaaactcatcttcttaagctccctagcttaggctagctgatattagcttctgtgaatgcagcgttgccaaacagacatgcaggagcctgcctggacccctcaaatattttataattgaagtttgcta

SEQ ID NO: 74054 - DNA, 2188 bp, Homo sapiens
actgttttggcgattaagcacattagatgggattgtttcagaaggcctaattattgtgtctgccacactcatctgtttgagtcattcctaacttttggactgctgcctagacaattctgcaatacggtttccgttgcatattcttttttttatttaatgcataacttttctcactatactcaaagctcaaagctctaaactgtgcttttgcaaattctagataagagttcaatagttcgttgaagtggtgattccattgagtttgtgtaaaggttaatatttcatttctgttttgcaggtttatcatttaaaagtgcctgtgtgaagtcacttttgctggaaaactgcagcttgggagctttctttgtattcacatcccactcttctgtcaagtacactttaccctgaccttatgagtggatgaagatacctcagttgtctgactttgccaattgcttaatttcagaatttaaaaaggggaaagaaaaacatcctgctaaaatatgaacatctgagtgtcttattttccaacatcgtcaatagctgtgagcgtcagcattaaatattctcccaaggagtgccatgatattgaagtcactttattaataacagctgtatctgcaaaacagtcaagagactcggacgttgaaagccagagatgacactgagcatgcttttattgcggcctaccatctttaagtgggacatattgattgatgagtgattgcctgtccatacactctctcatcatcctgttccttggattggacttcactaagcaatttatcactcaccttcagacttacatgtgggagttttcacaacagtagttttggaatcattagaacttggattgatttcatcatttaacagaaacaaacagcccaaattactttatcaccatggctttgaacgttgccccagtcagagatacaaaatggctgacattagaagtctgcagacagtttcaaagaggaacatgctcacgctctgatgaagaatgcaaatttgctcatccccccaaaagttgtcaggttgaaaatggaagagtaattgcctgctttgattccctaaaggtaagagaatgcgttttatgtgtcatttcaataccacattggaattgcaaacagaaggcttttcattgcatttttacagaagtttaaaaattgcttttagattctattttcttgtttgtggtgactgttgggagatttttcactcaaattttttcatatcaggcatatataaattttttacatacccatgtttaaattaaaaatacatgatgatgtatttctggtctggcatgacattcatgtacccaagagttttaaatcaaagtctggcttgtgacaactgaagataaatattttatcaacatttgatcttctggaggttatataaaggtgaagaaattgaatgtgtcacttttaagtgccagttattctggcttagctcttgaagagttttctattcttatggcttttttttttttcctttgaccgagtacttcctaaaacgcttttctgaaaatgtgtcatggctaacagaaattattaagtacacgctcaatactcaatacttgagaatctacttcatgtgagttatatgacaaaagaaactaaagtgattcagatggcacctttgatgagcttactgtctggcagggacaattcagcatatcagcaagtatctacaatgcaagaaggggacacatgccttgtgggaggaacagacagcaaaaacatttctatggagtccatagaagaaagctggtttccaacagactgtttcaagaaatgtttttggagattcaaggcatctgagtcatatactgagttgggtggagttaggaggatggagagaatttaatgaaagatctagaagtggcatgagttaaccgctaatgctggggggtgtattcagccctaacattatgaatctgagattgtctagggcgttcctacaggcataataatattgttttcaggagcaataagtaaggcacataggttaaaagagctcagtgtttacatctctgcaagacttcagcaaggttaccaaacagttaagaaaattgtttatcaatgctcttgacatatgacttgagaaattatagagctgttagtttacaaaatagtgaccctagcctattcttgggtgttaaagagactgagttgtcctttgg

SEQ ID NO: 74055 - DNA, 1659 bp, Homo sapiens
acaagttaggacctggcaatattagtttctttcccttcataataaagtatcccaggatagtcactgattttgatgaccaactttaaaggcaagatcttgtgcccaattcttaacaagtccaaactttcaagaattaactgtgtgaatgatagtacctcaattatacaaattagtcatgacaagaaaaaagatttgggggacacaatatttttgttatttattacaagatattttgtgcaaacactgtggacaatttatttataactgcgaaaggaatctatgttggcctatcagtatggggacaagtcaatctgagtctttttttattgttgttatatgttatttacaaatatgagtaaacttttccgtaagtatgtactaaatttgttggtggaaagtgatttgctgagttctttggcatgagaattatacatatataaatgcatttgtagaagacattttggaaaatatagtacagttcttactgtgaaatttgtgcattattcacatacctcgttgcattttatgtaaaacactgaacatacaagtggctgtgatttttttggaagtttcagtattattatgaacagtagacattgtttaatgatttttctggaaggccaggtcacattccagaatgctgtgttccacgagttaggttaacttgacaaaatgcaaactgttttatgagcaatcatttcccttggagcagaggccttgaccacattaaccgtgtctctgatgcttttacgatccatgaaacgctttccctcacagctaaaatgtttgagatttttgtttccagattctttttcctgtgattgataggaattaatctgaaccatttggcaaattgaacatcaagaagggggtgcataaattaactttaatgcttattaagactaaaagtgtcagtatttaccactttcgggaagtatttatttgcttaaacatttgaattcacactcagctttaaaaagggacacaattttaaaaatagtattgctaattttggttgaaaacactcagagtatgggggaaaattgtttagacaatttttagaaatttagacataatcttttgtaataaaaattcatttcaagtacagcgagatcctttttaacacctgcatcagatgatgtcactgctctgttcaggatcttccagtggcttctcaccacactcagagtaaagagcaacactgcaaaggctgcctaggccctgtgagatctgcttccccctcccgccacctgacttcatttctatcgccaccactccctccaacccactccagccacgcatctttgctctcccctgaatatgccaagcaggctttgccttagggcatctgcacttgctctttcctctgtttggaatactcttgcctcagccacacaaagagcatgtttcctggtttccttaaggtttctgattaaaaatgtcagcttgtgaatgaaccctttctgccaacttatttcaaatagtaatgctgccattgctgggatcccatttccttctcacctggctttactgctccccctaacacgagcatttgatatgagagatgcttacttgtttattggttgattatctgtctccctcctccactctgctagaacataagctctatgtggatagggactatgtctgttgtgatca

SEQ ID NO: 74056 - DNA, 1063 bp, Homo sapiens
aaggcattgttggtgtgtgtgtgtgcccatgtgattttgaaatgcttaagtcagttttataatgcaacggagtacaggcaggttcatgcttaaagattcttggacccaccagttgtacttcctgaaagcaagcccatctctctttcatttggcttcagctgttctgggtatatcaaccacttcccctgtgcaccctctctggacactattcagacttcatgtcatagtttactcctggaaatccatgcccagtgagagcccagaaatcccatctgaaagatgggattgtgtcttacttattgtgccccagcacctagcgtggcatctggcacagagcagaagtgcagtcatccccagagaatgcagacatgaacaaagaaacccttacaacttttccagttgaacctagtgctgctccatcagtgatctccagaccaaaaccttccttttatgtcgttcaccatttcctttaacatctccgtttcattttgcagatttggtcattcgaggaggattctctcctgctactttttgcctgtgttgttttcctagttctttcaccacgctcaccgcccttcctactttccctctaatgccacctcttcctccccttgctccctcagtgtggatgctctccaagacttaggatcagcctttcctagttcaggttcagtcatcagctctgaaagcttatctgctttcatgcattcatttcccacctctgtgccaatgaattccaaatctgggtgtgtgcccttgcttgccaccaccatggctgcaactacctactgaacatccccatctgaatggcccattgtcacctccagtgccacatctctaaatccaaactcttgccttcctactacaatccacccccacccctgggtgccttgttccctgggcacaaaacctgaccactatggcccaaactcttggtcctttcttttttgttgttgtttttcaggttgtaaggaagtataatacctttaagaattaatcaaaactaagaaatctttacccaggaaagtatccatactcacagactatttcaaacaatctgcag

SEQ ID NO: 74057 - DNA, 1048 bp, Homo sapiens
agaaatgtatgaatgaacaacaaagtggttactttggaagccgacataccgttatattggatttcagaaaagtcaagtaatcccatatttcatgtgattccaggtaaaagaaaaaatatttagtccacaacaggaagggaaaaataaattcaaaagctcccttgtgcagatttgtgatataaacactgaaaaatttaatgtagcagcagtatgacaaattatattagtaaatatgaattgctttttagacaaaaggatattcatgacatttttgctgtttaaagataaaatgatctctttcttcttcattgaatcataaaatcttggacctggaaaagactttagagaattaaattattttccacccaagtgccaagatagtgactcctcgagggcacggatcgtattttctgctccctcttcaaaatgtccacagtgctgagtcaaacgctgtgcactcagttcccttaaataacagtcaatgatgagaatgctgttcacagatacaggggataaaaacaaaaatcttatcctcactttctggaattgtgtttctctttgataacaacccattttgagccatagagctattataataaaagggattacatctttgggattttccttgtatcactcattaaaatgtcatgcaaagaaccacactggtccttttgttgctggacgaacactggctggctgccacatgcctgcaggccccagttcacagaggccccacacattgacctgctcattcaaaactgttgcgagggctttacctttatatcaccacagtacagtgacttacaatgattccagatcaatactcctctcagagtttgtctaggaagtcctaccagctgtcatgtaagggtaattaacacatctctctcaattatgcatgctggtggaagaatttcaaacatttggctggataacaaatccatcccctctgttagagaaaggtcatccctctggccatctgggtatttacttttctttagaaatgagcttcatggaattttctgttggaaggggaaaatgatgagga

SEQ ID NO: 74058 - DNA, 1063 bp, Homo sapiens
tgtaaagagccagaatgggaggtagagttaattgtggtgcactcattcaagcaaacacaatgccggcattgtaaacagtgaggttctccagcagcacagagaagcaaggtgcgtgatcggctccataagaacaatcaggagataaaattatttgttcaccaaggttctaactatataaaaatatgaaactgtcaaaaatgagtcttcaaacatggtggtaattatggtagagtgatgcttttaagcgtgaatcccctctcaccatgtttcccaatgtttaatgatgtttacaattaaatttaagcaaacaagccagctcacacacttaagcttttcattctagctatgctttatgggattacattttttaattaaaagaaaagagatttcataaatacaaaaatagcaaactgaaattgtattccttagaaaaatcaatttcttgagatagcgttggatttttagaggggattttttttcttttttttttaaaaaaaaaccatgtgtagatgtgtggtgctcatgcagaagtcctccttgtttgctttgaggtcatggaagctgcctgaattaaacatgtgaggaaataccgttaaggggctacaggtgggttaacgtccaacagtcctctctccttagcagcctcctaagcctcctcttcggttaaatctctttaagtgaatgtccaaacaccaatattcctccttttgtataacctgccccacattccattacagatagtccttttttgtgttattcttgatcttattttttctttgaatgaaggaaaagagcttctactcttggtgttaacttgaatgaaaccaactgatgactaaaaactagctcttagtgttgagttcaaacattgtaaagttttaaaacttcaaatccccatggcatgtgagaacattctggaaacgatccagcatagacaataacttgaaaaacagattcatataagaaaagtatagctgcacatgtcaacagttgctccagcctttggcaaagtgcttccgagtgcatgaaaatcaatcaatggaatacattctgttaatggaat

SEQ ID NO: 74059 - DNA, 1069 bp, Homo sapiens
cctgtctctctcagttctgtttttctctctagcacttatcaccatcatcatattcactacatgttgtatttattgatcttgttgagtgtctgcattcacccattaaaatgtaagctctatgaaggcagggacttttgcctgttgtgctcattgtcttgtctctagtgctgagatcagtgctacacagagtaccatacattaaatatgcaccgaataaatgaacacttatttatcactcaatcatgcaatgaatggatgaatgattgaaaactggtagtcaatgctgtccaagaacatgactcttgggagactcttgccatgctattttttcttctttgagataatccgcagctcaggcactgaggtcaacaactctaatgttcaagatcttccaagtaggagggaggaggttggataaacagagtttgagtaaatttgcccttggcttttgagagagctaagtgagaatcctggctttcccacctcctagctctgtgaccactgataaactattcaacttaggtcaagctgttcaactctggccttagctcactcaatatgtaaaatagaatgatatgaaattcagggatttataagaatcagggttgaaaacattgggcatatagtaatatactcttattaaaatgaaatgtattttcatatatataaataatttgtattaatttgtagaagtttgcttattgataaagcagacagtcatatatttattgacattttcattttaggggacacaccatatctatatttaaaatagtattttttgtcttactggaaaaaaagcctcctatgtatactttgattaaattatcacatgtatttctgttatttaaggatcctaaaatgaaaacaaatagcttctaaagcagttaaaataattatcaaggtatatttgttcactccagatctcatcccacaaggtttacaagagtcttggcttttgaaatctgtgtcttccaaaaattcatttgttaagcaagcactgagcacttgctctcttccaggcaccgggctctacattactggctattcccaatggcaggaaagagct

SEQ ID NO: 74060 - DNA, 1429 bp, Homo sapiens
tctaaattgttttcacctggaaggctgagcaattcttgctgccgcacttgcttctcatggatttgagaagattaaagaagacaagtgtgagaatgccttgagaactaccagaacctttcacagatgtaaagcattattatccacaataatattaacacggagtgagcctctctgcaaatcaccgtaactgtattttttaactaatcaacttcaatgaaaaacatgctacatcaaaaaggaacatatccaactgcgtctgtcttcgtaaggcctatgaacttgcaactttcagtttcacgtgacagaaaatatttttttcagtccacatttcaaaaggaaagggaaatttgttgctatatttttactcacttttatacccttactatactgctatgctcattacatccctgttgcagaactgttagataatttgaggccaaaaaaaccttgatggacattgatttttacagtattaatgagagctgctttttactgagttctgaccatgggaaatgggagtgcaatagcgccttgttctgcccaaccctttcagctaagtagtttcacttactcattgcagataagaaaattaaagcccagggaggttaatttcctccccaggttaatgagtagtaagtgtcagagtgctaggtttgaattcaggcctctctgagtctaaaatctatggttttactttaaaatattactatttctctgtgaactgtgttattgccatcatcaataaaacatactgggacattgattttagactatgaaatcagatgaacaagtgacatatatttttgaagacaaaagttacctaattggaatagatttgtcgatatccaaaatggttttgggaaatgagttttgaggttctcaatcctatcgacaaagcaaagtacaacccgtatttatggtaccacactaaccctagcttcaaatgatctagcatcaaatgatctgtgggctgggagggttgagaatttgcttccagagaaaataaaaatggcagtatgggggagggctcttttatctaaatgtttacgttgatagtctctgggttaaattacacatttagtgcaagttttttaatactatttttactcctcacatatgacaatgctccccaaatttggccatgcatcagatcatttagtaaaatttctaaaattcaagtatcaaggtctcagcctagatctactgggtcagaatttaatcactatttgtaaaatctcccccaggcatttctgacagagctagtccactgaatcactgatgtgctgtgatttatgacctttcagaattgattctttttaaaaatcctaacattacatagtccgtaaaccatttaaatcacttggctttttctccagtagtactaaattataaaagctacagttactgaaaatcataactttctataatt

SEQ ID NO: 74061 - DNA, 1526 bp, Homo sapiens
aaaacctttcaggaagggaagactgactggatctagatgtagttgaactacagcaaaaaatcgtaggtttatttgaaaactacatttgaattttgggaatatacatgctagtgatggaatacggaaacatactggtgagtctggacaaaataaaattccaagtaaccccactgtttgagaatgcatagacttggccaacttgaaaatcaggctgtaatcaaagggttttgtgactcctctccctttgagaaacatgtagaataaatcaaagattattagtcagtattctatagcttttactaccttagtgttataacatttaatagtttggaatgttgagtaattagagttgaaattattttcttttgttgagaacactttcatagggacaaaagcttaatctagttcctgtaactagaggttttttatgatgttctctcatatttctgtatggtttggggaagagagggtctacatggatgtcatttttattataggtcagcattgagctatacaattaacacagagtatatgatgaatacattttgctcaaatgacatttgctggtaattttttaaagttttattctaaataactctttctcctgtgttgtcttcctttaacagcccactttccctgtaggtcccgcgatagggacaaatacggctattagctttgctccttacctagcacctgtaacccctggagttgggttggtcccaacggaaattctgcccaccacgcctgttattgttcccggaagtccaccggtcactgtcccgggctcaactgcaactcagaaacttctcaggactgacaaactggaggtacttcaattctacttgtgttttgacatgcatttgtggtagaaatatacttctgtgtaagtgattgcttgtaagatattaattcagtcttgcaaaacagccatgtaaacacacacacacaaactcacctaaaacccatgtattcataactctgtggtttgaagttaaggccaagtataaaggaaattagtctatggaaaagactagttttaacacaaaaatcagctgcatggaatatgcgtttaagggaaaaatattaaacaatcaatggaacagtgactcaatcatgatgcagcccatagagatggctccaggtcctgaaggcctcctcatgtcaaggtgtaatccttgcaagaccctggaaagttctggaaactggtggatcaggagcccagcaaccagggcagccgaggacactcagggacactggtgggagtaagtgggactacaactatttaccaattggtatgatcatatttcaatgtctcaagaacaagcatggctgctctagtgtgttctggcatattagttctgattgtgttgttgctaaacaggggaaattggaggatgagtaaatttagttttttgttttgtttggtttggttttgagacgtagtttcgctcttgttgcccaggctggagtgcaatggtgcaatcttggctcaccacaacctcctctgcccgggttcaagtgattct

SEQ ID NO: 74062 - DNA, 1087 bp, Homo sapiens
ttgaagatatagagagaggtagatagattataggtgattgacagattaaatagatagattataggtaggtaagcaggtatatagataggtaggtaactagattagatagatgattaattaattgatagattttagatagatcagtagatgatagatgatggatggctggatggatagatgatagatggatgaatgaatggctggctggatggacggatagatagatggtaggtaggtagatagatgatagataatattaggttggtgcaaaagtaattgcagtttttaccattaaaaataatgatagattaacagataatagatggatggatggatggatggatggatggatagatggatgggtggatggatagatagatggataatagataatagagggatagattgatagatgatagataatagatgatggatgaatgaacaggtggatagatgattggatagattgattgatggtagatgatagatgaaggaatggatgcatggataaatagatagatgatagatatatggatggatggatagacagacagacagatcgatagacagctgcataatatgctacccagggacaatggaggccttgttgcttttcctttgttattttagctgaactgcagatttcgtattattttctcaatatagattttcaccctagaaaaggcggtaaaacaaaactcaaatgactgtgtcagagattgtggttacctgggctccgcataatcaatcttttcttgtcagtggtacatgagccaccattgaaagcgaggcagcctccgctcctcccgcggtggccggggccgcaggggcgcctgggctcaggcttgcctctgcagcgcggctcttcttccctgtcttaggtatgcagggagttccagcgaggaaactgtgcccggggagagaccgactgccgctttgcacaccccgcagacagcaccatgatcgacacaagtgacaacaccgtaaccgtttgtatggattacataaaggggcgttgcatgagggagaaatgcaaatattttcaccctcctgcacacttgcaggccaaaatcaaagctgcgcagca

SEQ ID NO: 74063 - DNA, 1160 bp, Homo sapiens
tgttgttttccccctttttgttttgttttgttttcccctcctgccccccttcagcacaataagtaaatccctcaggtgcagggaaagtcctggggtccctgagctccgttccccctcctagggtggcggagattgagtgtgctcacttagggtctttttaagagaggctcaggggccttgtaatgaacatgaaggtgggcaccgcttcggagaggggaaagaaaggtgcatttctgcacctgagcacgaggaggcacccagctccttggagcagccacggaggacatctgtggcctaagagaagcccagagagtgatttggcttttcgctactcccattttctcctcttctttcacttattacaagggcaatgctggtcagattccccatctcaatgaggttttatgcagaatagcaatgcatgaaacagatgaaagtggagccatcctggctggtgcagaaagaaaaaaagacctgtgacctaggcttgcttccctgagtcaccctactgtcattagagaccagcagtacatcatcattatcatcgcctgggagcctgctcagaatctcggagagcctaactgtcccttagagaccagatgcaccattattaggatcacctagaagcctgtggagcctccagaatcctcagcctcaccccagacctcagggaatcagaatttaagttgtaaaacatctcccaggtgttttgtatgcacattaacatttgagaagcacctgcctagacattgcttatcaaacttggctacattttggaacaacctgaagggtctgacctgacatctgtccctttccctgaagtttcttattttcttatttagttggtctggtgtggtctgggcagtgggattttttttttttttttttttttaagacaaggtctctgtcacccaggctggagtgcagtggaatgatcatgggtcactgtagctttaaactcctgggctcaagtgatcctcccacctcagcctcctgagtagctgggaacatgcccatctaagttctaattttttttgtagagacagggtctcaccatgttgtccaggctagtctcaaaactcctgggatcaagcaattctcacacctttacctcccaatgtgttgggattacaggtgcgagctaccatacctggcgacag

SEQ ID NO: 74064 - DNA, 1606 bp, Homo sapiens
ccctccaagacctcagtgtttactttaaaaggagagatctgcctctaataaagaaaactcccaccacagagtggtagaaagagatacacgtcactgtcctgctcactctagagatctcagtttttttacattcctagattattctaaattctatggaaattaagtttcatcacactaagacaggaagaagaagaatattaaccttccaggtgacaatcctaaagggaaatatttattatttttcattgtacttggagatttcattaaatgattctttgttaagtcaaaattttgttcatgaatatcagcctttagagacataatcgctcatctagttaacatgtcagaaaagatcaacccattagtggattcattctgtaaatacttaggactgcaaatgggaaggggaaaaattgagtccagaaagttaaggccaaaatgattttgagtttaacgatccagttcatgttctcaatgtgctctatgagaataggctttgtaaccttctttagctgatgcagattaattgaagctcaaaaaacaaaacaaaagaaaaccctgcactacttaacaatgcaaagctgtgcaaggatggaagattcgaaacaaaaatggcattatggaagttacatgatgtcaaagttacatgcaaggaaagaatatccagtacacagatgttttgtcagctcattgtttttaacgttcacaattgtactttcacaacattgatttcatgttattcgatgactccgatcaaaactaccttcccaaacattttcttctccattggccgttctaaatctcttctctgcctgtagtcctttctacttgatttctagtctcttcccctccatagctctccccttatcccctattatctccatactttttatcctgaattataaaacaataataaacatcctttatttatccaggaaaatgtcattaactgtttcccattttaaaggtttagtactgtctcatgtcaaatgacaaagttctatttcagaactttagaatataatatttgtatttattagagaaaccttagggacttacctattgtgctaagcatagaaaagggtatttcattttttatttgcattggagcaattcctttgaattattttatttgcaaagaattccatcatagaatttttagttttttttttacaacaattaacaaagaataggaaaatttttcattgtggtctaaatcaatccatatttgtttttatttcagttgtttaaatgaaactgtcttcccaaaattatggttcaaagttaaagatagtattttacttctaatctttcaagcagttctttgctattatttttagctgtttgctatttttagctgttgtatttgttctttccaagagttccacttttcattaatggggttgctcactgattgtagctaaaagtacaaatagaattactaaatagaaattattttgatagctggggacactacataccttttaaaggttattttcttagtataatccggtaagttttttgagataaatgaaatgaacatttcaaatgtagtagaaaacagaatggatgataagttggttgttagaaacaagatgatggaata

SEQ ID NO: 74065 - DNA, 1048 bp, Homo sapiens
aaattatttttatgaaaaatttcaacttgggtcatatccttactcgatggactcattatttcatatttgaaaactaacttatcagaagttcttcgatcctatggcccttacaaattttgcatttttttttctgaagcaatataaaaaatgcttatggtgtgtatgcaagctgctgttttaattaactttcctgaatttcaaacatctatattttactctcttatatgcttttaactaaggtatagtagatgcatttttgcttcaatactaatttaaggtgtaatattcatttctttagagaacatttttgttgttgtgcatgcctagtgttttgtacgttgtatattgcattcagaatatttttttccttctcacctatccacaatgcaatgccgttcccatgatgcacctctgcttgctgtttacctgtatgttaattcgcttgaatcccattggcccactgccatcatgtgctcgctgcctgttattaaaagactcagtcgactgccaaagcaatgaagcgacctctcgaagcaactgtagacctggtactttgacctttcacctttcgctttgcatgtagcttttcagagaaccatctgagatttgtattacttgtaaaatactggttgcaaacaatcattattattaatttatggaaaaaatccaataaggtgtttagccatctcattctcatatgtaatctgtgaaataaattaatcctaacaaattttaataccttttccaaaagagtgaagcaaatttaaattatttgactcagaaaatgttcattataattcgtattaacctttaaattcaagaaattgccatttagttaaagaaaagaataggtattaataataacaccaatgcttcgtccccccttagaatagtttaactcattttaaaagctgaagccattttttttgttgttgttgcttgatagtttttcttttccttagttgagatgctaccgttttgggttacagaaatcatgctttcgctctcaataacaaattctcactcattcgacattgccgctgtttaa

SEQ ID NO: 74066 - DNA, 1041 bp, Homo sapiens
tttccttaaatcccatagcttatcagagttaacatcagagggaggtaaaatatttctgtgatattctttgtataaaatctacactttgaaatggattagtaacctgtgaacaatacatattttagttaacatataaattatgtgagcaaagtggttttcagtgtttttttcttattttagttttgaacctgtcttaaactcacagacttgtagaagaaatctctaattcagtatttattaggagttcacttttgccctattacagccttaattagtgacatcccagtgctgttacagcatagcagtgtcttaatatgtaatctaattgaaataacacatttgtaaaataattactagaaggtaaacttacgttaatgtcctgtgtggtttctacaaagtgtgtcattgtagacctcttggccactagatattttaagataaaaaaaaaaaaattaaggaagaatatactgaggggaaaaacgtaaaaggagaagcctgtttctgaagaatggatgttactgccattaccatgtcctgggaatacctatgaagctctggtgctaagcctgccaaaagaatctgaagccctccagcacatgtttaactctcaaacccaacaatgactgatttgttaaatcactgaaagaatcatcactttaaaatgtttcaccttttaaacattttaaagcaaggataaacatttccaaagcaaggataaacaacatcccttacgcaacgacctgatttttgttgatgaaatgtatctcatgaaggacccatacggctacattggctgctgtggttgtgtacttccgccctctggtggattctttaagaacagcttaagtgtgtctggcaaccctcaatacagtgggctttggaagccaaaaagtgggtcctagcgcaccaatacagtgactagaagggtttccatttcttacatgacatgaatatcagagtgaacaagcatgtggatctagtgttctgaaatggtatttcaactgctaagaattttcacatttctcttaaatgaggaaagag

SEQ ID NO: 74067 - DNA, 1041 bp, Homo sapiens
gagttgccagaaagaaaaactgtgtgtgtgtgtgtgtgtgtgtgtgtgtgtgtgtgtgtgtgtgtgatcaaaaatctaagggaagaaagtggcttccgatggagggaagggcggagtgctgaatgctgctgagaattaggaacagtgagatgaggacaggagagttcctgctggctgcagcaatatgggatttttctgtggattggcattcacaatttaagtgcaaaggtcaaatgaaagccaaattgaagaggaatgaagactcagtagggatagggaagtaaacatttatgtgtaggtagatttccagaagtttgattgtgaagatgagagaatagggctggagaaaggtttaagttggatgtattggcacacatttgttgaagaatctggcagtagcccagttaaatagccccctcctgactaggtcatgttagcttgatcgaaatgtagttcaggcaaaaagtcgccctccagcgtgaacagctccacagagagaataaagacctacacatctcaaattctccaactaatatctcagaagtcagttctgaaactctaagagggcactcctacatttacgagaaactacttctcaggcacctacatgacacccagtcttcagtgatctaaatccatgtattaccttgtttttcatggaactgaaccagtagcagataattcctcaaagctttcaatacagctttctttcagttctccacaacatgcctgaatataatattcatggtcagagtcatgatgcgtgtatgttattatgaccaccacaagtaagacagctatttctaagaaagggttgaaattgcccctcccacctcctacctccccactcagatgccaacttgagatttcctaggagttttgccagaaatccccctcagggatcactttgtagtagtcatgaccaaattccttagccctggtcctaactcagccccaactctgcactattttgctctacagtgtttaagctttattgccaggcactactcctttatcataatgaatcttacaacagagaga

SEQ ID NO: 74068 - DNA, 1169 bp, Homo sapiens
tgtaagaacctcagtcttcttaggttattgggctttcaagcagcaatctaaaattcacccatcctgccctgcaagcttctgatttggagaatatcttaaatcttaaacactgttattttcataccgttggtgacacaaaacatttacagtcaaacaaacaagtaaacgtttaatgcagtaagttcagtgtattctagtgaatataaaagttgacctggatttacgaagagaattctatttctagccttccccttgacccacaccatgcatggccttggaggagttactatgcctcagatttttcatctgtaaaatacctacttcctaccttggaggattaacttgataatgtctgtaaaatactttgaggtcttagaggaaggacaccacggcattatcacatgtcattcttattagaatcatgtcgatgcatatgaatagaaagtgtgaacagtggtctaaggagtgagcttggaataatactggcttaaaataagtcagatatatttgtgtctgtactgacaatgtgaatggccctaaaagactgtgttaactaaccctacttatttctggttgtgcttcaatctcactttgaatgttaactctaaaccgctaacctgtttctttccctttattcactttttccacccaccattgcatgacatcagggtcagttttgtgcatgacacccgctaccagtattggtaggtttcaaccttttttatttgtcttttatatgatgtacaataccttcacttgcttgaaatttatttcagagatggtagaaatgctataggaaatagtagatttgaaggcttatttggctttagagttaacatataggtttttaaaaatgtacttgtatatttaagaaaatgacggttttaatgtgacctcttgtgctagaacaatcactacaaaaacataaagccacaagtacgagtctgctttttaatgatttgtgttttgtttctctttatagtttatatggtatagcgtaaggaacagagcttactctatcagcgaggcaggctaatttcatcaatgtttgaaagtttcatagtggtgtgcctttatctcctctttgctgtgtgttagagcgatcagagtttcccagaagtattcattttttacaaattataaatggatgtattttgaaaccgcatgtc

SEQ ID NO: 74069 - DNA, 1130 bp, Homo sapiens
cagccagctgctatttcctactctgtggtcacaagctgattgtatccgtgaccctagcctcccaacttgcaaacatgtgctcctagccacaaggagacagcgtgagggtgagtgagcagaaactctcacctcgcctggaagaatacttcattgcgcatgccctcccttcacagaagaacaattttggtttggtttttagtttcatgggtttttaaaaataaaatcagctctgctaataaaagatgacaagggataaaagaaattaggggaaatcgtgttgggggatcacggcagtcccaacccgcattctgcaggctgggagggctgagtcatgctgctttccacattcaagtgaatccacgattccagctctgcagatttcatccctacaaagagaggcgtgagtggacaggaatgcaggaataaaagttaaaccccgtgacagtgctgactgtggcctcagcattgtgacagagcaggagagagcagagagtgggggagggaggggaggccgaacagcagtgcagaggcaggtgtcaatcaactgaggacgattcttcagcaattcactcccacctctaaaatgccaaccggtcctctaaggaaaaccaacccagcttcgaaacaaacagaacaaagaacaggcaaggattagttccttagctgggaagatgatgatgatgattattatttaatgtgggatgggagaagggagtgagactgtttgcatctttccattattaggtccaaagctcttctcaatcactcattcttaatagggaagctggatacctgtttctttcaagtctgaagtcctgcctccttgaactatgtttatgtgatttttgacccaatttttattacaaagtccttttataagaaaacaagtttggactgagtgcagtgcctcatgcttgtaatcccagcattttgggaagccgagggaggagcatcacttgagcccaggagttggagaccagcctgagcaacatggtaaaatctggtctctacaaaaatatgaaaaaaattagccaggcacggggtgccatacactgtagtcccagctacttgggaggctgaggtgggaggatcgcctgagcctggggaggtcgaggctgcagtgagccatg

SEQ ID NO: 74070 - DNA, 2369 bp, Homo sapiens
ctcaaaagtataaaaaactttaatacaagtacatacatattatatatacacatacatatatatactatatatggatgaaacatattttaatgttgtttacttttttaaatacttggttgatcttcaaggtaatagcgatacaattaaattttgttcagaaagtttgttttaaagtttattttaagcactatcgtaccaaatatttcatatttcacattttatatgttgcacatagcctatacagtacctacatagtttttaaattattgtttaaaaaacaaaacagctgttataaatgaatattatgtgtaattgtttcaaacatccattttctttgtgaacatattagtgattgaagtattttgacttttgagattgaatgtaaaatattttaaatttgggatcatcgcctgttctgaaaactagatgcaccaaccgtatcattatttgtttgaggaaaaaaagaaatctgcattttaattcatgttggtcaaagtcgaattactatctatttatcttatatcgtagatctgataaccctatctaaaagaaagtcacacgctaaatgtattcttacatagtgcttgtatcgttgcatttgttttaatttgtggaaaagtattgtatctaacttgtattactttggtagtttcatctttatgtattattgatatttgtaattttctcaactataacaatgtagttacgctacaacttgcctaaaacattcaaacttgttttcttttttctgtttttttctttgttaattcatttaaactcattgaaaacatagtatacattactaaaaggtaaattatgggaatcactgaaatatttttgtagattaattgttgtaacattgtctttcttttttttcttttgtttcatgattttgatttttaaaattattagcacacaactattttcagccctttaataatggagcatcaaaaacatcacctgtaaccccaagcaaatatagaagactgtattttttactatgatatccattttccagaattgtgattacaatatgcaaagagtcataaatatgccatttacaataaggaggaggcaaggcaaatgcatagatgtacaaatatatgtacaacagattttgctttttatttatttataatgtaattttatagaataattctgggatttgagaggatctaaaactatttttctgtataaatattatttgccaaaagtttgtttatattcagaagtctgactatgatgaataaatcttaaatgctttgtttaattaaaaaacaaaaatcaccaatatccaagacatgaagatatcagttcaacaaatactgtagttaagagactaactctccacttgtatgggaactacatttcactcttggttttcaggatataacagcacttcaccgaaatattctttcagccataccactggtaacatttctactaaatctttctgtaacacttaaagaattccctcattcattaccttacagtgtaaacaggagtctaatttgtatcaatactatgttttggttgtaatattcagttcactcacccaatgtacaaccaatgaaataaaagaagcatttaaaaggattgtatagtcttccttctttttgtgttgagacagattgataattcaccaaacaaaatagttttcaccttcacacatacagtatttgttaacttcaaagaagaccaaactcgggtcttcgaatggaaaactgatagtttttgcttttggctttggctttttagcagcaagaaaaacaattaaaaatggtaatttgagaagtatttttagtattctttaaaattagaagtgaaaataaagcccaccactcagccctcttcttcacatctcagactgataatgaaaagatatgggatcaatggcatcagtaactaaatgggaaacaaaatgtcagtttcatgaatagattagattttaaaaaggacccattaaggtataatagaggcttctgtaagagcttgatgggataacatgaatcagacctgaggctgcagaaagagatagaatggtgagttctattctatgcagaggtcctagctaggtggctcaagaatagaacaggaattcagcaaagagagggtgatgagggtccctgctattctgtcagtaagcagtctcctcctaagaggtggtgtgtgggcagaaggagcaacagaagctccttcttcagccttttgagacccaccatatttgtcaaggaaggtgctattggccttttgggtgggaacactccttgtcacactgagattagcagaaattgccttctctgtgggccaaggcagaaacatgagttttctccatggcagatttaaagcttcaggcctcctgagtggtt

SEQ ID NO: 74071 - DNA, 1107 bp, Homo sapiens
cattttactcactagtctcagttcttgatataaaaagatcattgatcagctgaagtagagttcataaattctcttcaccagaattcaaccgttgtatacataagaacctcttggaccctcacttgtgtgtctttgtaatatggtagtagtaaggtattttacacctcatcctaaccccagcgtctggcttcccatcattgatggagaggacatgtgaatgcaggtggcctcttctttaccagtctttcagtatttgatatctactgtcaaattcagtattcagctttaggtctaggtcagcacttttcaatagagatataacgtgagccacatatgtaattttaacattcctagtagctgattttttaaaaataacataaatatatggaattaattttaatgtattttatttaacccaccatatttaaaatagaatcattttgacatgtcagtattcaaaaattattaataaggtactttacttctttatactgtgtcttcaaagtttggtatgtgtttgacctaccacatctcaattcaaacaagtcacatttcaagtgctcagtagccgtatgtggccacaggctgccatattggacaacagaggtctaaggtgtatatgatttggggaaatgcttgcttatttctctaagcttcagtttccttatctgtgaaatagagattagcatgcaccttccagagtccttgttagaattaaatgagataatgtattttaacattcccaaaacaataccagtacacagaaattgctcaaaaaattctagctgtcattcttactttaataactttgtcatttatcttccttaaatgttacccttgatataaatgtaattttagaagaaataaatttgtaattgcattttggaattcattacttagtatattcaagatgagactaaaaagcaatgaggttaaaataatccttggaagaattgtgttggtattctcttgaaattatttccccttatgaaggatctgatggaaaagggcatgagaatgaacatttaacttcaagtacagtatagcaataatgcatagcactaatgcatagccaaacaacgaatggagcttttcatttttcatttt

SEQ ID NO: 74072 - DNA, 1103 bp, Homo sapiens
agataaggactgatggtgaaacctctatccacttaaatacaaaactaagataaaagaattgtgagaattatggctgccaaacagaatattaaagttaaaaagactgacaatatgaaacaaacaatataactagtaagtcaggatgagaggagggaaatagttatgagtgctcacttcatctttcatgagagggatttaaatggtcaaaaaattgaaatttgttttgaaaatgactcgaagagctcagtgtttttcatgatctttttttctttaaaaaccactttattgaggtatgattgatgtacaaaaagccagacatatttaatgtgtacaactcagtgagtttagagataagcatacacttgtgaaatcaccacaatcaatgctgtaaaactatccatcacctccaaaagtttccccctgctttatttatctatccattcattcattcattcattcattttttttgtagtaagaacacaacataagttctgtcttcttagcaaatgtttatacaatacagtattgttaactagaagtactattaccatacagatgtctgggacttacttatcttgcataactgaacttcatacagtgaatcactttatgtggcccagaagtttttcctgaaaaggaaacttttgttttggctgcattgtaaaattacaggttacagtatatagttttctttttgccactccaggattgtaatttttaaagctcaatttggagttggaggagatgatgtctcttcctctctaacattctgtgagagcacttttgtctggccggggtgatgagggaaggggtcaagtttaatatgaaccttaaagaatcagcagcctgtgacccacaattttgtctagttaagatttgataattgtatcaataaaatctacaataaggaataattatactaatacttattttttaatggagggcaaaaataatttaaattattaaacattaaggaagaggtagaggaactaagaaaaatcactggatttcacagccaacaggaagagccaacaaagttggaatctatttgctaaagtttcagtagcaatatacttgagtgatttaatttctgtgtgtgaagt

SEQ ID NO: 74073 - DNA, 1036 bp, Homo sapiens
ctgtagggcaggaggttgtaaaacaggctgattgcccaagttgatgaaattcctataaaccctggaaacctccttgtctgcttacagataggcttttagctagtcgctgtagatctgctacatatttttatgggatagttggttgggggaatcactgaaaaagcaatgttttaaggtaattattacggaagtagcataggatagagtagaagagtgagaaattggaggcaagaccagttaggagactgttgcagtgtcttaggtatgagttactttggaaatgaaagcgtttttgtagtgggagtgaaaatgatgggacagatttcctcacatccagtaattcctgttctgtccatccctgtaatcactactggactagacctgttgttgcggcctctcattacacctgatcatgcttagagactattggacactctgttgcttaccatccactctcccttgccccacagtgaattcttaaaactatctttctgacttctttcatttcagtgttggcttgaaccctgtcaaaatgtaactcttcattctccattggctgctgttgagggccataacctctgccaacaatgatagttttcagctcctttcttcattgtgcatttgttttattttttttttccatgtcatctgttacttctcctggttcaagtgaaaagacctttttaataggcatcgccaataaatctcatgccagttgaaccaaccagttacaacaagccatgaataatgaaggtactcctcttcctcttctgagttgtttattgctgggcagaagaaatgctaattctgttggcctcataacctgagttttctagaaagctgtattatagagattcagtgtttggggttttttttttttaagttttatttagtgttatgtgtactgagtgatttagaaatgataaatattctaagatcttactacaacaatagaaaaatcttgcaggataaatactcttctgttcataatttaaaagttcctaaaaatcttagctcttcatagctttcaagcttc

SEQ ID NO: 74074 - DNA, 1642 bp, Homo sapiens
gctactaaatataatacatcttcatatacgctaatggaggacagataattaaattatggcacagttatagattctataaaatggagtactacctagccattaatatgatacatattatttattaaaatggaaagctctgtaatagtggaaattgaagctaccaaatataattggtataatctctttttataaaagctataggtatacttatattgatatatggaggaaaataatttggaaggatagatatcaaaatagttatagtgatcattctcacagagccaagattaagaattaaaaaaatgtttttttgtttcctattaagtattgccaggtatttttttaaaatcatgacttatttaatttgagcaagagtaggagggacctatatcatgttggagaaaagatttctacattctaaagggtaaaagaactagaatctatgagaagaaggggcagggtgttacagatcacagttccttatatacaagtaaacttttaaactgtgactttttaacactaacatttaacagacctgacagtacaaaatgggttgcctgtaggtatgagttccacgtcactaaaaatgttcagacgtaagctccaaagccatttggtaagtttatcatggaagtaattgaagcatcagtttttttgacgttttgccttgggactctcttggtagatgattttaactgtgtgaaaagatgaatgaggggacttagaaaagcctttctgattctcatttccaaattcaaagagaattatatttcaacctgcttatcactaagaagataccagcatgttaaaattcacatgaagtatgaccttctttaaatacgctacgatgcagcaccctcaaaagtaaagtacagaaactgacagtagtggtatctgtctacagtttatcattggtgaataaatgaagggaagaaggaattgagtctggacttgccgcatatggaaccatgaactatacacatagaatgttgtttggggtcacaaagtagtagattaggccagtgattcctaaaccctgctgaacttcagaatccatcttcagagcttatagatatagacatattacatattttaatagactcttgggtcctgatcccacagatttagattaactagctctggaatagggcccagaaatcactatctttaaaagaattctcaagttgtgttgatgatcagccaagttcagacacgaccagaataaaatatatatacgtatacatacctacatatcaggacagttacaagaaaggagaaagcaaaataaagtattttgataaacacatcaagttcttttgagttactgatattttaaaaagctgtctcggtgagaagcccattaacattctacagctaagtgatgctacagccagtatttctgatgtttcattcagtccattaagcagagctgcttaaaagaactagttttatttatttatacatttataatcaggttcatgaatacagtcaacactatggaaattcttgtcaataaaaaagtgtttgtccacagactacacacagaaataaaattattagacctgcatcagtcaccgtctgagctggtcatgcccttaaaggaaatttcaaggaagatgggctgaagttggtgagatatctg

SEQ ID NO: 74075 - DNA, 1052 bp, Homo sapiens
taatttgggcttaaaagtgaacataaattatagagtggaaggtaagggacaaaagccttttacctttaattttcctggagaattatataaaggttttcttagaacaattttgccctgattactgaagcgtcaaataaagctggagtgaaaattttgttttgaaaaggtgctcaagctctgacatttttggttttcatagtcgtgaagtatttatcatttgcatgactaatggcacaggaaaaacctattcataagttttacaatcaagtatagaggggtcttcagctaacttagttatacataaatgctgaaaagattatcttgagctgggccttgggagaagaatttggccttcagaactgcaatatcactgagcctgcgatctatacaccaccccacattttgttggtttcacagtcttgtgcaagtaacctctggtcttacgtgtgtaactgagagaagagtgtgtgtttgtgtgtgcatgtgtgtttattgttcctaagaatttggcacaagtcagagataattgcctatactaagaatctatactgcagaatatagtgtatcaaaaacttttttcttttaaattattaaagtgtcttttatacttttatgaaatcattggtagccccccaagtgtttaataactggcattaagcttagagggtgaaaaaaaaaaaaaagattgatagtatttttcataatgaaaaaactgaagagatacgtgaatgaaaccaggccatagctgtcataaatctttgacttttgaatatttacattcttcagtataattttttataatcctcaattatgaaccaccttgtttataggacaaaaaaatttaaccaattttattgaaacgaatttcactgtgtaaaagttggtttgattcaaacatgtagagaagttgtagattcaagatatatgatttctctatggaaataaaaatatttgttagtgaattggttgagttttgattcctctaacttctcagaatgattctttagaattctataattcatagcaatttttgacaagtaagattgcaaaat

SEQ ID NO: 74076 - DNA, 2470 bp, Homo sapiens
atgacctaaaattttgagttgtattaatagttaaaaacatttgtgtcagatgacagggtgggcttttactgtcaagacatgaataagaactgatctggctgcctgatgagtgtttccacgcagccctgcatatttagtgaccaaggcatcaaggacatcccgaaactggaaattcatatccatctggtatgaatatataactcagctggcaaatgaatgtgtttgttgagatattacagtaataaaacacttaagaacaggaagattacatttgttggcatacgaaaccttagtggctacagaagaaagttgaccttgtgtcactatttattttatgccctgatcagactagcaacttagataagtgaaagtttttctaacatgccttaaaaatattatggtttgatccaaagacccactttttctttagctcttgtgataagattttcttttttttacttttatacaaaggcagcatctttgaatttttttttcttttgatgttgcaacttttgggttcttttaaactgtgatagtgatggtaactgatgcctttcattttgttcaacttatacaaaacaagccagcatctgatcaaaagtattacataaaatattttcttaaactattgaaaggtgctttgatgattttctcctttggtttgtagaattaggactgaacttttgactcaaattgctacagttgccatcacctttctgtggtaatactactgatatttgcttttctatataaagaaatgttgcctaaggctgtctggtatttcttttcaagggttttccagtatgaatgttaatgttgtcagtgtatgtatgaatatgaaagtgctttgttttgtttgttgctgttttttgtttatgtgtgtgtttttaatttttttgttcttatcagcagtcttgtgttagcactgggtaagctttaattgtcccttagccaatcaaacattaaggactatggaggtctttttttttttatttaacatgtcattgttcatctattaaatcttgatcagggtttcaagaatgactgcagtgggttttggaaacagacttatcattattgatttgaggtttcccagagatatagttcacagttaattgttgcgctctaatacaactgaccatttaaaattgaacaagtttattgttttgtaacaatgtcagttgttaaaccttgacatttcaattaaaacatgaattgtagttataactcaatgcaaattcaacagttgtatttggagttaaattattttaacaaataaatttatttaatgaaactctggatttgctttgttttgtacatgctcatgagagaaatgtattatatacaaaaacaattaaaaattgccatataatgaatttagtactcttcatacaaaaatattttagctgatttgagagttcatcatataaaaaggcaggtaggtagataattttcatagtctttaaaaataaaaataacatgtaagagactgtaaaatcagttattataaatataaacttatctctacaaatgattttatattttgaatggtagctggttaatttaaagcctgatgctaaggttaacagaattgttcaaataattaacattaattagcaatatcactaaaatgattcagaggccttctagtgatggcttgaagccgtctttctgttttcaggtcatgtggatccgaaggtgccagaagctgaaggttgccgccaggctgtagggcctgcttgttctatatggggccctatgaaagttgacagatgctgttaattgtatacagccttcagctgctctgataaggagcccattcatttcctaagccaatttaaactatgccttttggttatgttgccttcaaactctgttgaaatcctctggcagcattccaccagttgagaagcttcattgttttagattataagaataatttgaatgaatataacagaggcactgtagatagaatcccagatatttaaaggaaaacatgcctatattttaggaatatcttctgaagaacttcataattttatttgaagtgtttgtaaattttttaataaattatttaaatgtatcaatagtggatagttggaagaacgtctttgaggctaaaaagtagtactctgaaattctctcaagttatattatttgtctgttagaggtccacgaatgaaaatatatgtagctaaaggagtaaggtgctgcccaatttggaacccaactgacctctaggatctatgaagcagagaatattaccacaaacttctgaaagaagctgttgacctcgtttcttaatttaaaatatgttgccacataaatactaataaaacatagttgctcttcatctcttaaatggatcattccaactggttttacatcgttgaatattatctagtatttttaataaatattttcataaatagtttttgtggtttttttgtttgtttttgagacagtctcg

SEQ ID NO: 74077 - DNA, 1056 bp, Homo sapiens
gtactgatttctatttttactccattgtggtccaagagaatggttggtataatttctatattttttaatttattgagacttgctttacggctgagagtgggattgatcttgaattaggttctgtgtgcaaatgagaagaatgtatattctgtggttgacgggtggggcattctgtagatatcttttaggtccagctggtctagtgttaaatttaagtccagagtttcttttgttagttttctgccttgatgacctaacactgtcagtggggtgttgaagtcccccactcttattgtgtgattgtctaagttgtttcataagtctggaagtacttgttttatgaatcttggtgttctaatgttgggtgcatatatatttaggatagttaagtcttcctgttgaattgaaccctttatcattatgtaataccttcctttgtccttttgtgtggaggtaatttttctgattctgtccccagattattgaaagcatatctcatttgagacttgcttttacttttcctagagtagctatttctgtctcccattctcagtaactattccagtctcgtgaccaaccaccactcctcatatcttagtagacagcctcatcttggttgagaaaataaaggctgttattactctattcctaaaacttgtctgtgtttgagagtatatcttataagttatatataaagtttaatatatacagtcatgtgctacataatgacattttggtgaacagtgaattatgtagatggtggtgaggccataagattataattgagctgaaaaattcctatggcccactgatattgtagccattgtaacttgttagcacaatgcattactcatgtgtttatggtgatgttgatgtaacctactgtactaccagttgtataaaagtctagcacatatgattatgtatagtgtataatactgataataaatgactatgttactgatgtatgtatttactatacttttacatcagtattttataacattactcttctacttattttatgaataagttactgtaaaacagcctcaggca

SEQ ID NO: 74078 - DNA, 1032 bp, Homo sapiens
ttcattagactggaatactctggtcagatttttcccatggctcgctccattatttcaggtattatctaaaacattttcctagtatggctcttttcttggaccaccctacctaaaacacctacctttccttccagagtgattctaccattcagcatcctccttactgcattttattttttatttatagcacttctcactatctgaccttatattatgtattttttttattgcccccttcactaaaacatgactcctgtgaaggcagacaccttacctcttttgttcattgctgtgtttactatcctggcagtaccagaatagtgccaggatagtaagtgcttaataaatgttgaatgaataaacataattctggaaaagcagggatggaggggtgacttgtaggtattagagggatgttaaacattttttatgcattcactcctccagcctcatacccttgttttggaatatgcttttccacatgatggaagcaggcaatattcagaaggaactggagaagatattgaaatactggaaacaaaaatctgcatgaacatcttttaaaagtcaagtttaaatcagaacactgtctgcccaggatagtgcagtggattctatgtgtccttaaactatccaaaatttgtgtgtcacactggtctctatttttaagttatgcacaaaagttgaccaatgacaagaaggccatggaagatgtattagttaccaattgctctgtaacgaatcaccccacagtgtagtagtttaagaagcatacatttattatctcatagcttctgcagttcaggaatctggaaggcttagccatgtactcagcttctggatttctcacaggctgtaagcaaggtgttggccagggctgtagctatctcagggcttgactggggaagcacacacttttaagctcactcatgtggctgttggcaggatcagtttcttgtgggctgttggctagagacataagttcatgctggctgttggtcagcagccacccccagttctttgacacatggg

SEQ ID NO: 74079 - DNA, 1466 bp, Homo sapiens
cgcaggctgggcccggcgggcggcggccgcgcagcccacgtgtgaggcggcccgcggctcccggtcgtgcccccgggcttttccggccattgctgccgcggcgcctggcaccagttacctccccgccgccgctcgcacccacgtgcggccgctcccgacgcgcccccgtccaggtgtggggtgccgggcgggcccggggccccaacttcgctggccaccccgcttcccagctccccgcttgcccctttcccgctttctcccagtgggagcccccactgcccttccagccgctgtctccacccagcctagcgctgtgggtctcccaaaccctggctgctacctgacccgtcacgcctgcttctacccctgctcatctcccacaccgtctgtccctctctttttaaatatgtgccctgccttgtccctactgcctttttccatttagttctttctcattctagttcctaacatcagaagccagatttccctaccccctcccacctccagttttgtgaagttgcctttagggtttctttctatgcagtttccaccttactctgggcttataatacacttactctgctcttcagacaaattttctttgctctctagagaatcgtgggataaatgggatgtagtgggacttccgttgtttaactgggccagtaccatatgtttaagtcttcaacttcattaaatctaaccgtaatctctttttttcaaaccacctcttgttcctggcctccaaaatgtggagagactttcaagtgacagtattttaaatatatctgtaagctcatttaccaagttcactagaagactgatgttacattttcagcgttgagaccacgattcttgtgggatacttccaggggagggagaaactttccagtttcttagctgaccgccaaacttggttatatatggggtttttgcaaccatgcgattgtagagtttcataagattaagtgaaggatgttcagccagatatttttaaataacaaaaattaattttacatatagccaatgaaattgactgcaagtcctcttctgaactcaggcctgaagacttttccaggtgtctttgaaacgacggtggtaatcgttgttttgaatagatggtggatatgctggttacacttaggggttttatattaagtgaagtaaacacacccaaaattcggttctatgtgaaaaagcattttctactattcacttcattaagtttttatttattatacatgtaatacatgttcagggtaaaaattcaaacagtgaatcgtttcttatcccgtttcccaaaggtgaccgcttgtgtcgtgaatcttcgctgaaaatttaacatacacattcattttttacttaatgggcttataatactatttacactattttgcaacttgaatttttcactctatatttcacattgcctcataagtgaggttttggtcagctatagattatac

SEQ ID NO: 74080 - DNA, 1029 bp, Homo sapiens
atggattttattttcttactaaggttctccatacagaatttgttcctcattgactctaatagagaatttcattgagtgttttttgtagagacagggtcttgctgtgttgcccaggctggtcttgaactcctggcctcaagtgatcctcccatctcccaaagtgttggaattacaggcatgagccaccacacccagcccattgttgagatttcaatagacagaggataacattgaaaaatatacctgattgttgaggaaccagggtgttaatagataaaagtcatgtgtcccctcttttacttttcctcatacaaggtaggctcactataaatatttatggaatgagatgagtacatatgagcatttcttcttcgtgggcagggaagaggcggaggagaagtctttgcattgtgtaaattgtataaggtggaatcaaatcaaattgaaattttgtttgccacaactgataacattcactgaacctaactggactagtgctaggaatagtattagaaacagtctttataattcttatacactaatatgctacgtacttagatacaaagataaaaagttaccatccctgtctgtgtggaacttagactgtttaaccattatccttgaccattgtgatggtattgatgtaatactatatttggattaccacagtggaacatatcacatggagagaaccctctctcaacagacatcatctgtcactcgtactaaactctcccaccattggcttctaattcattatggagtagagtttaatatttggcccaatgttaagttgggtcaattgttaagtctactagagttagcatagtcacaccaacagttccgcctgggcaagagtagggagcctcaggatttatattaggttttctgacagtgatagcctagtagagaagtttatggctgggcgcggtggctcatgactgtaatcccagcactttgggaggccgaggcaggtggatcacgaggtcgggagttcaagaccagcctggccaagatggtgaaatccca

SEQ ID NO: 74081 - DNA, 1016 bp, Homo sapiens
ggttctaagcagtggtaatttgaaccagttgtacatcatccagtctaaaaatgttaacgaaacagtttctcatgatgtaaggtgattttaagtgagccctaaagtttgcagcacaatggcttaagtcacatttggcaattttttggccctcttaggccttgagttttgttaaccagggagcataagttgggaaaacatgcacacacattagaaacatttgtttaagagatatatgtagaaaggaacttgataagtaaccctttggacatctcttccctaacatatctgaagtgtatttcatgtcacagaaggtgttaacaccagacctagattaaataatttctcatgcatccttcccactgtttatttctttcactggtttactcatgaagtttcctaacattctttcctaaccatttttttttttccatgcaggaaacctatgagaatatcccaggccagtcaaagatcacattcctcttacaagccatcagaaatacaacagctgctgaagaggtactaccttaatatttgtgactattacattcttagaaaataagttattagatgatgatcatagtagaaattagagaaatgagaattgtgattaaccacatagactttactagaactttgtacttattatttgctaaaagctacttaggagttataatgtaattttttgaagtactttgtattaagaatgagagttgccttttttccgcataagataatgtgtccagggtagatgaagattaatggttttataagtaattgcataagaattattaaattaaagtgatttgatttgattgattgattttgagatggagtttcactctgcccaggcttgagtgcactggcaccatctcggcccactgcaacctctgcctcctgggttcaagcagttctcctgcctcagcttcccgagtaactgggattacaggcgtgcgccaccacacctggctaatttttgtatttttagtagagatggggttttgccatgttggccaggc

SEQ ID NO: 74082 - DNA, 4676 bp, Homo sapiens
gcactttttaggtatcgggaactcgtaatgtttgtttgcatgaaagaagcattttatctaagatgctaatgaaagggcggttatgtaacaagttaggtcaggctgggagcctaaggttgggtgggaaaggcgcttgatattctagaatgagaccagacagagaggtaggaaaagagcattcattatagggtttacaatttaagatttgtttttctcccaaataatgtgttaaaaacagggattaaagacaggtttatcattgctaaaatatgtgttcctaattgaattgtaatgtgattagaagttctcctcaccttaagtacaaatggcttattttgtggcactaacaaaataagtctgtataatagactaatgtaattagaaagagttatatatttacttctttagaaaattaggcgcttttgaaatataaaaatacaacagtgaaatacatcaatggcagagtgaatctagttattaacaatgttatctgtttataggctagacaaatggccgccgttctcctaagacgtctcttgtcctctgcatttgatgaagtctatccagcacttccctctgatgttcagactgccatcaagagtgagctactcatgattattcagatggaaacacaatctagcatgaggaaaaaagtttgtgatattgcggcagaactggccaggaatttaataggtgtgtatgcaggtgcactcatgttaccaagaacatgggtatatccttccttttttttttttttaatggaatcttttagagtaagattcataagtacctgagtaccatttattctgtttaaaatgaatgtgcttatggattttgcatttagagccagaaattacagatagatgtttgtgaaatccagtcataggactcacctattggtattcaaaatacccatgtgaggctaggcacagtggctcacacctgtaatctcagcactttaggaggccgaggtgggcacatcgcttgagtctagcagttcaggacgaacctgggcaacatggcaaaaccccgtttctacaaaaaattagtgggcgtgatggtgtgcacctgtagtcccagttacttgggaggctgaaatgggagaatcacctgagccccagaagctggagactacagtaagcggtgatcacgctactgcactccagcctgggcaacaaagcaagactatgtctcaaaaaaaggaaaaaaaaaatccatgtggaaaaataattttgtaatttgcttgaaaattggcagttacattttctcctaaatctataatgttttagaagcacaggctaattaatggtatgacctactttgtacattaaacttgccagttgaactaaaaatcagagactccagtgcttttgctgttgtatatgtgtggtgacaaatatatacatatactgttacgtagctatactatgtatatatatattttttttttttgagacggagtttcgctcttattgcctaggctggagtgcagtggtgcaatcttggctcaccgcaacctccgcctcccaggttcaagtgattttcctgcctcagcctaccaagtatctggaattacaggcatgcgccaccacacccagctaattttttttgtatttttagggtttctccatgttggtcaggctggtctggaactcctggcctcaggtgatctgcccatctcggcctcccaaagtgatgggattacaggcatgagccactgcgcctggcctactatgtacatttttaatgcccaaaaaatatttttttaagtgaggtaaaaggcaaacatcataaaaaaatgcattttactaaaggtaaaaatcctttttagtcaactaaaaataatagtaatgtaattgaacatgctacttttttatcttgctgcaaaaagctttatttccatttggtctagtgcctgggagagggctccagcttggttaaaaagctacctaatggctggagggagagggtcaggcagaagctctgatacattgagggggaccctcagaggtcactgggcttttagtgttgtttgatgatgagccttttgaagagacacttgcccagctcaacataggagccaactagcctgcggaggttggtcacgtggtcacccatcttaatgagtttcacttcctcatctaggaagtggctctccaagaagtcacagagatggggatctgtgcaggcagaacccagggcatgaagatccaacagggcctggttcctggtacaagttcttctccagggccatgacagcttccatggtgtcttgggttttgtcccactcatcttcatacttcctgctcgtagaagagagtgtagccaccactttttttttttttttagacagggatttataagtgtggttgtaagcgcagcttgtttagatggcatttttaatagttgaaatgaagatcaaggttacatgggagattactattgattgagcttactacattatgacactaattttaaaatctcatcaaccagtaatacagtaagtccttgttcaattcagctagcagattgtatcctttcttatgtcaaccatttcttagaaactaatggggaatgtgtcaattctttatattttagatgagttcaaattaatttttttagacagttttgttctgttgcccaggcttgagtacagtggtgtgatcatggcttaccgcagcctccacctcccaagtttaggtgattctcctgcctcagcctcccacacgcccagctaatttttgtatttttttagtagagatggagccaactgggtttcaccctgtttgccagcctggtctcaaatgcctgacctcaaatggtctgcccaccttggcctcccaaagtgctgagattagaggcatgagccacagcgcccagccctaattttgaatatttttaaattgtttagaaaattctactttccagttttaagtatgcagataggaattgttataggtgacatcatttctcattcagaaacacttaacaatgcaaacctttccaaagtattcaaagtgctctcatagattttttttttttaagctgctattttatttcccctcaaagcatcatctttaggttgaagaaacatttaatgtcagcttagcagcacaattgtcatttcacaaaagttcaaatatcgggggacgtttaaaaagaaaacatctgtaattcatctgtaagttgtataactcttaaggtctttgtgacaatataaccagagtcttataagtggcacagtagatttttgtggtcactcatttttattataaagtattatttaaaatctcttaatcttgttaaatagtaaacatattaataacatcctctggcactatttgaaccaaactgcaaagtgtgagcaccctgtatgggtcctgagattctaaccctgatgtcttctcaagttccaaagtagttgttactttggtttcaagaccttgccaccaaatactagctttgcctactttttcaactctttaatagcaatggtatatataaaggagtcagtcaatcagatatttgtacagttaaaagtgctgccttctcttcaaattccactccttagaaataacctctgccagccaggtgcggtggctcacgcctgtaatcctagtactttggaaggccaaggcaagtggatcacccaaggtcaggagtttgagaccagcctggccatcatggccaaacctcgtctctactaaaaatacaaaaattagtcaggcatggtggcaggcgcctgtaatcccagctactcgggaggctgaggcaggagaattgcttgaaccctggaggcagaggttgcagtcaaccgagatcgcgccattgcactccagcctgggtaaaaaagtgaaactccatctaaaaaaaagaagaacctctgttaatatctgattatctaacccaaatacagagttgtttggtttgttggtttgtttggtctttttttttttttaacatgattgtgatgccatttttatggctaaaggacagaattttgtggagtttttaaaaatagcaaaagtgacatttttcactactccaggtttgaatgaggcttatgaaatgaaaggatttactcctagtatattgaagttctgacttacacaactttatgtctggatttctttactttcagatgaggatggcaataaccagtggcccgaaggtttgaagttcctttttgattcagtcagctctcaaaatgtgggactgcgggaagctgcccttcacattttctggtatatacattaatctagttttttgagacatttgatttaatgaatgccctaaacaccttttaactgattattttagcctaatttaaccttatacttaaaatgataataatgcctttacataagttttgtttgtatttgtattggaagcaattttttttaaaagggccttttatttcacattatgatcttttttgtacacaaaggttctctacagcttgcttgctttctctttgtcttttatgattctgaaagttttattgaacagtttcctctcctttatttggagattaacacaatactggatgtagcttttcaaaagccacattaataatggtgtcttgaagaggagaaggagaatgcaggtgaatccccattatgttttctgggtcttgtgtgacccaattttataatatgttaagaaacctgtatatt

SEQ ID NO: 74083 - DNA, 1026 bp, Homo sapiens
tcacttaacccaaaaacaggattgcttagagaatgggtagatgatgttcaacctatggattaatgcgtactgagtcaggtaaacaaacagttcattagagattctagctcatactttaccaagatattaatataatgtagtttttaaagaatgtttggattatcttttaggaactttcctggaatttttgggaaccagcaacaacactatttagatgtcatcaaacgaatgttagttcagtgtatgcaagatcaggaacacccgtcggtaaataatttcaatcctattaatataaccatctattttaatctaatttgcgaaagaaattagtatattaggaggttgttttcacttttatactttaaaatacaaacaccagttttactgataaagaataatttgatcttgagtaagaaaacttgaatttgcgtttatcaaaaatttctcatgtttgacattttttcctcttgattttagatcaggacgttatctgctagagctacagctgcatttatacttgcaaatgagcataatgttgctctgttcaaacattttgcagacttgctaccgggattcctacaggtatgaaagcaatatagaataaatcataattatatcttatttggttctttaatgcattcaatcatttatgcaataaattcatattgcctattatgttctggcgctaggcatacagcagtgaacaaaacatgcaaatctcagtctccattaagcttatgtttactgcctttgaaagacatttttagtctcttacaatatttatagttataaaatttttctgtaatgtaaatgttgtaagcaattatatgcttattgttgaatttatggtcatgtagattatttccattaaatcaaccaaataacctgtgagatttaatgcccattttacataaggagaaactactcttaattacagggtgtgtaatagtttgtattataatgtaagtttatggttaattcacattatcgttaaggatgttaatttttaagaatactttctgcttt

SEQ ID NO: 74084 - DNA, 1050 bp, Homo sapiens
atagtttcactgattttcattttgacttagatgtaaatctgttttgaatgtttctagttaacatccatcagaaggaaggtatacatgtgcctgcaggtagaacatttgcataatatagattgctaaattatttagtgaaaaatagtttagtaatatttctctattgtcagcatcttaggaatcttttggctaatgaggcattataaagtgaatcttcagcaccgactttctgtttcatcttttctaggcggtaaatgactcgtgctaccagaatgatgattctgtcctaaaatccctcgttgagattgcagatactgttccaaagtatttgcgtcctcacttggaagcaactctacagctaagtctaaaggtaaattaagtacgttagtaaacgttctgtttgttattttcagggactaatctaaattattaaatgtatacaaatatgtcttctttgtagttgtgtggagacactagcctcaacaatatgcaacgccagcttgcccttgaagtgatcgtcaccctctctgagactgcagctgctatgttaagaaaacataccaatattgttgcacagactagtaagtcaatggtcttcagatagtttatgtgtattgtggccaaatttttggataaatttgctgagggttgtgtgatttctcagattgttgagaatataatgaatatccttttagaatcagatgaatttgggaaaatgcatctcaatacatgcaagcgtggacccccacattgtggttatgcctttaagactttgcagacaccctgaaatctggtgttaaaaataacatttctagagtggagtgtgacagactctatcatttatatgttaatattgggcacagttaatagagtcaaaaacaattcagcggggatatatagatgcacagtagcgaactacaaaccaaaatagcatgtcttgcttaccagtgaagccaagattagaagaacaaggtctaacactagtcatggctctgttcactatattacattgcttttgttttatagaccctcgttgcagcagaaacttaa

SEQ ID NO: 74085 - DNA, 1037 bp, Homo sapiens
aagtaatgcttaatagtagataattttctaagactgaatcacaaaccattgatgtaaacattgccaaattggcaaatgcgaaaacaattttttgaccaatcagatacaccataaatgaactgaaaaaataagccacaaactggaagaaaataattacagtgcacacaatcaacagttttgttatctagagaatacacaaaggctgagaagaggaaattcattgcttttttcttctttaagatggggtcttgctctgtcatccaggctagagtgcagtgacatgatctcagctcactgcagcctcccaagtagctgggactacaggcacgcactaccacacctggctaatttttgtgttttttggtagagatagggttttaccatgttgcccaggctggtcttgaactcctgggctcaagggatcctcccacctaagcctcccgaagtgctgggataacaggtgtgcaccagcaggcccagtcaggaaattcgtaaaagagggatctgaaatagctaatgaaccctgctaagtctcaataaaaacaagtgtaattgtggaatacaagttgtccagaagtttgacagtatcaattgttaataaaagatgtggaactgagaggacgcttattccacccccagggcacttcacacatttttgtgaaataacggagacctccacttaaacttcacatagtttatgcaacagctgtgcagagcgcagcttgtttggtaattttctttttttctttttttagacagagtctcgctctgtcgtccaggctggagtgcagtggtgtgatcttggctcacagcgagctccacctcccaggttcacgccattctcctgcctaagcctcctgagtagctaggactacaggtgctcgccaccacacccggctaatttttttgtttttggggtttcaccatgttagccaggatggtctcgatcttctgacctcgtgatccgcctgcctcagcctcccaaagtgctgggattacaggcataagccaccgcgcctagacttgtttgataattt

SEQ ID NO: 74086 - DNA, 1035 bp, Homo sapiens
atcagctagacagtgggtagtatgtttatataatggaatgctattaaataaactgaaatccttatgtgttgagaaaaaagcaaattgccgaggtacatatattatgaaaccatttattatataaaaaatcaaatcttgaaatagtactataattttgtatagagatatggaaatctgtagttcaagtgtgaaaaaacaattgcggaatgagaaacatttgtgatgttgcttcttacctctggtgatggggagaatgtaatcggatttgggaatttcataggagggtttgacttaatgaatgttgctttttaaagaaacgataaaagcaaatataacaaggttaaaatttaacaaaccaggttttgggggcacagacaaataattgttttgtcttgttctcttacaggcaaagtaaaatcttaaaattcttgtttataaatagtgatatggataagataaagtcacagtcttcgggtatgaaataattgtttactttagttcctcagatgttagcaatgatggttgatttggaagaagatgaggactgggcaaatgcagatgaactagaagatgatgattttgacaggtaatcaaacattgtgtccagggtggcagtgaaagccctagggctccacggtccatctcttcactattgcaccctgtaacctgaaggtaaacttttaagcctggaatatggggcactttgccttgctgttgtatttattgctgtgtcacatgttataagtagtattttctttagttttcatgtataatttatattaataaaatttatgtttcttggaagttcataaaaatattttaatagttaatacataaagttgtattttataatcaggaactgaaagatacctacaacaacaaacaaggaagtttttcttttttaaaaaaaagtatgacatgaaaacagcaaataaagtagctatgttttttgtttggttttgagacggagtctcgctgtgtcgcccaggctggagtgcagtggcgcgatctcggctcaccgcaagctccgcctcc

SEQ ID NO: 74087 - DNA, 2934 bp, Homo sapiens
catcacaaagtcaggagatcaagacaatcctggctaacatggtgaaaccccgtctctactaaaactacaaaaaaattagccaggcgtggtggcgggcacctgtagtcccagctactcgggaggctgaggtaggagaatagcatgaagctgggaggcggagcttgcagtgagccgagatcgtgccactgcgctccagcctgggtgacagagcgagactctgtctcaaaaaaaaaaaagaaaaataagaatcaggcatgactttctaaactatggtggatcatgataaaaacatttactcttttttcttttctaagctgcagagtttttaacccctaatttcaattccacatttaaagacagcttgaattctttctcagtcttagtttaataataatatggttagaagtatgtctgtagagtatactatttcttttgtgtttcagatatattgagtacataattctgtttatgtgtttagcaatgcagttgcaggcgagagtgctctagatcgaatggcttgcggacttggtggaaagctcgttctgccgatgatcaaggaacacattatgcaaatgcttcaaaatcgtaagctgtgtccttcaaatgctagaagagtgaagttgtgccctttctaaagcttaaattctaagatatgtttagactgttaaaaattaatctttgtctttttatcatccatatttaacccaattcatttattttaccgataaaattgtcaatcccaaagaaaatgtacagatttacttcctagccaaaagtatttagatttgaatttgaaaatgatgttattatttgaatttttatggaatattagaatgtttgaatcatatactcttctttcacccaatatcttttatttttaaaagaagaaactctatctaatgttatcaaaagagaaaccacttctttctttctgtttttgcccctgacggaggtgatggtggaagcccacctgccctggagggcagctgttgttgttgacacaggatttcgccatgttgcccaggctggtctcaaactcctggcctcaagcagtcctcctgcttcagcctcccagagtgcttagattataggcatgagctaccacacctggccatccttcctttttatttctatgaatatttcagttacctttgtacctgtaatatatatatcaatcccaaagtttattgttgtatgtgttttattttcatttgtgttttttaattataaagttaatgtgttcttttgttaaattaaaattcagaagtattaagttagaaatttgtttgttttttggtggaatctcgctctgttgcccagggtaatgtgatctcagctcaccgcagcctccacccactggattcaagcgattctcctgccctagcctcctgagtagctgggactacaggcacatgccaccacgcccagctatttcgagacagaatcccactctgtcaaacaggctggagtgcagtggtgcaatcttggctcactacaatgttcacctcccagtttcaagcaattctcctgtctctgcctcccaagtagctgggattacaggcatacaccaccacacccagctaatttttgtacttttagtggagatggagtttctccatgttggccaggctggtctcaaactcctaacctcaagtgatccgcccaccctggcctcccaaaatgctgggattacaggcatgagccactgcacccggcctaatttttgtatttttagtagagacggggtttcgccatgttggccaggctggtcttgaactcctgactttaagtgatccacccgcctcaacctcccaaagtgctgggattacaggtgtgagccaccgcgcctggcctgatacatacttttagaatcaagtagtcacgcactttttctgttcatttttctaaaaagtaaatatacaaatgttttgttttttgttttttttgtttgtttgtttctgttttttttttgagacagagtctcgctctttcgcccagaccagagtgcagtggcgcgatctcggctcactgcaagctccgcccccccgggttcacaccattctcctgcctcagcctcccgagtagctgggaatacaggcgcctgccaccgtgcccggctaattttttgtatttttaagtagagacggggtttcaccacgttaaccaggatggtctcgatctcctgaccttgtgatccgcccgcctcagactcccaaagtgctgggattacaggcgcgagccaccgcgcccggcctatacaaatgtttttatattatatatacatatacccttttcaaaaaagttttgttactcttttccaaataagaacttttatacatctccctctaccagaatgacatgtttatagtgtgtaattgctattccatctgtaatttttttcggtagctgactggaaataccggcatgcaggattgatggccttatctgccattggtgaagggtgccaccagcaaatggaaggaattctaaatgagatcgtaaattttgttttactttttctccaggatcctgtaagtaccagtaaatatttgattcaaaatgattagtgtagcttcatgtggaaaccttcttgcttttactaatgaaagggaacattttccagcatccaagagtaaggtatgcagcctgtaatgccgtgggacagatggctacagattttgcacctggtttccaaaagaaatttcatgagaaggtaagtaacaagtcctcaaacacttaaatcagactttaggaagaagggtggacatttcaacatgtgtgcccatttggtttcatttcacaggtgattgcagctctgctgcagaccatggaagaccaaggcaatcaacgtgtgcaggcccatgcagctgctgccctcattaactttactgaagactgtcccaagtcactacttattccatacttggataattt

SEQ ID NO: 74088 - DNA, 1371 bp, Homo sapiens
tcaacccagctgggatgtagtggcgcaatctcggctcactgcaacctctgcctccccagttcaagcaattctccttcctctgcttccggagtaatgggattacaggggtgtgccaccacacctggctaatttttatttatttatttatttatttatttatttatttatttatttagtagagacagggtttcaccatgttggccaggctggttttgaactcctgactcaggtgatccgcctgcctcagcctcccagagtcctgggattacagaagaattattttaaaatattgctggtgacaggacgggcccagcagcaaatagttagtaagcatttgttactagctgggtcagagaacaccagatctttggtgcagagaaaaaggtcatctcatctgtttcagcaagacagatgcaagagaaggcagcagggttccttcgtgcgatcttctggggagagggggttagaagataaaggaaggggccaaagagggaattttctttatgacgtagtaagacagcacaaaatataatcataagtagaggaaatcagtgaagaaaaaaatgaggatgaagtgtaggcattaaagttgatgaacacaaaaattttgattccgtatctgtactcaagaattagctgtgctttgagatgagactaacatgagttagaggtgttgtgttaatagaagagagaaaaaaaaaatctcacataaatagttcaacatagattctttttatagaaatttcctccaaaacctacagtctctgcttctggagaggtggtctcattctgctgtttcagaaaagcattcaagaacttgaagggagtagtaattgtaaatttaaatacttcttccagttttcctttgaggtaataatttgtgtcttccttctagctgattcagaaaggcaccaagttagttttggaacaagttgtgacatccattgcatcagttgccgatactgcagaagaaaaatttgtcccctactatgatttatttatgccatcactgaagcacatcgttgagaatgcggttcaaaaagaactgagacttctgagaggaaaaactattgaatgcattagcctcattggtctggctgttgggaaggaaaaagtaagtaattttttttttttttttttttttttttttttttttttgagacagagtctcgctctgtcacccaggctggagtgcagtggcacgatctcggctcactgcaaactctgcctcccaggttcatgccattctcctgcctcagcctcccgagtagctgggactacagacgcccgccaccacgcccggctaattttttgtatttttagtagagacaaggtttcactgtgttagccaggatggtctcaatctcctga

SEQ ID NO: 74089 - DNA, 1458 bp, Homo sapiens
ctggtctttgtgttttgcctcacctgctgtccatatcccagtgtagtgagttcacagggatttcattattgattctgaaccttttaagtacataacctttagaaatgctcttactgcttaaagtactgtgaacatatcaataaaacattgtttctatgaaataaggaaatggctttctttatcacgtttacccattgttttttaatctattttaattttaaaatttttccccagatctcttacatgatctcagcatgggccagaatgtgcaaaatccttggaaaagaatttcagcaataccttccagtggttatggggcctttaatgaagacggcttcaattaagcccgaagtagcccttttagatagtaggtgtctttagaaggagctatcggttataatagttctctctttgttattatttttcatatgcatttgttttcttctccgttaatagcccaagacatggagaatatgagtgatgatgatggttgggaatttgtgaaccttggagatcagcaaagctttggtattaaaactgcaggactagaagaaaaatcaactgcttgccagatgttggtaagagagcactgtttttactaaacttttattttacatcttatatacatttcatatgagtgcttttaatagctgctaaagaaattactttggagagccagtaatatgttccttaaaaagtaaagttttctttccattttaaagaaatcgtatggataaacctttcattatcagtgctgttttaaatagcaaaaaacaacaaatagcccaaattcctgttagtgggaagatgaattactgtgccttggagtaatatacagccattacaaaaagtttataagctacatgagggaaggatttttgttggttttgttcttagtctatagtaggtggccatggaatgttttttaaacaaatgaacagaagtgtgttcatgctatttaatgtgaaacaaaacttgtatgatttcaattgtgtaaaaaaacagatatggcaggaaaatcaaaatgttcggttattatcccttatggtgtttgtggtgtgcatatgcatgtttagttcctagttttctttttgttttctttatgagcatgcgttttaaagtgaaggataatccttttttttttttttttttgaggtggagtctctctttttcacccaggctggagtgcagtggcacgatctcgactcactgcaacctccacctctggcgttcagttgattctcctgcctcagcctcccgagtagctgggattacaggcgcctgccaccacagctggctactttttgtatttttagtagagatgaggtttcaccattttggccaggctggtttccaactcctgacctcaggtgatccgcctgccatgacctgggattacaggcatgagccactgcacctggccaatacttacttttaaagttagattttagaaattaa

SEQ ID NO: 74090 - DNA, 1035 bp, Homo sapiens
tgcccagccatgattttttaaaaatacaaaataacagaagcgttttctacagatttacaaagtaaatgcttcaattaactgatggtttcagggttttttgtatcttttagaatgatttttcctcaattaagtgatacattttgtttgatgtattgctgaaacttgctgaatggaatacgaatgattccagcctttgaagggacaatatatacgacaataatttcctttttttttttctttttgtcactcaccaatactacaatcatttcatgacccttcttttaagactctttttagttggaagactaatttgacagttctacatgcaactttaaatgtagttctagtcaaaatacaacctcctgtggtccttatgattttgctgtttgttaatattaatgcttgaagactaacatgaatctttatttcctcccaatactttggttacaggtttgctatgctaaggagttaaaggaaggctttgtggagtacaccgaacaggttgtcaaactgatggtccctttactgaaattttatttccacgatgatatcctacaacttctgaatacaaaacatgtctagatttagtaaacttgtagtttcttggagtattagacagtgttgactgaagtagacttcaccatgattgtttgtatttgcactaagtgtactcttaggtgataaactcggttctctgcatgtgcctttgtttccacttgtgccaaaacatgaaaaagaaaacgtgacctatcctatgtttgtcagctttctgtggcccacttaaggatttaaggataattagcaaatgattacaattatatatagttgctactttccccaaatatcttttggtaaacgttaagaaaataagacttttattttaagagatggtgtctcactctgtcacctaggctggagtgcagtggcgtgatcaggacgcactgaaaccacaacttcccaagtagctgggacccaggtgcacaacaccaagcccagctagatttgattttttttttttttttttttttttttaag

SEQ ID NO: 74091 - DNA, 1598 bp, Homo sapiens
tgcatggcacgatcttagctcactgcaacctccacctcccaagttcaagcgattcttctgcctcagcctcctgagcagctgggatcacagacatgcgctaccatgcccagctaattttttgtattttttgtttgtttgtttttgtttttaagtagagacgggctttcaccacgttggccaggcaggtctcgaactcctgacctcaggtgatccacccacatctgcgttccaatatctttctcaacataatgatagccgtaattaatattttccagtacatttttatgcctttacacacgagagtggtagacagacacaaacccagatctgtctgactccaaagcccgtttgtcatcattccttttacggtatcctatagtggtatcctttacagaagacagcttttacccaacaaagacttaacttcccaggatgccagaggacaaagcgggattgcttttaagaggaagttatcaagaccttattttataaatgagattagatagggaaaggcaatttaatctttattaaaaactgaaaaggccagcataggaagaggtcctcggtggtctttttcagggaaatacttcagttgcttttattagaaacagatagtacctaaggttttgaggtaggtacagcttaaggcatgctaatggtcatgggtccttccatagtcatttttgtattttggtttacatttgagcaataggcagcccttcactgctgctggactcattcctgccactattacaggtgacagaggagacaggaggtatgtcttttctatttttatacatgctttatatttaacacaagctcttgggtatcttagataaacagaagttgcctagcactccttttagtgcattgaaccctttaacatttaagcaaaataataaacagtcttttgaggttccttaacaatgaaacgtgttcgagtggcagcagcggaatccatgcctcttctcctggagtgtgcaagagtccgtggtcctgagtatctcacacagatgtggcattttatgtgtgatgctctaattaaggccattggtacagaaccagattcagacgtcctctcagaaataatgcattcttttgcaaaggtgaatatttttctcttaaaaaatatgtataaggttgtatgttcatttattagtcttgctaaaagtaaaaaaaaaaaatttgagacagggtattgctctgtcacccaggctggagtgcagtggcgcaatcgcagctcactgcaacctccacctcctgggttcaagcaattctcatgcctcatccttccaagtagttgggattataggcatgcaccaccacacctggctactttttgtatttttagtagatgttcctcaggtctcaaactcctggcctcaggtgatccacctcggcctcccagagtgctgggattgcagatgtaaggcagctaaataaatttttatatgctatagtgtatgatttgttaaaaaataaaaatgttaaattttttgttttaatattttggtattattatgtttgttttaaagagggtaaatttgccttggaagggcagtataggtagagggaatgatatgggcagcagcatggaa

SEQ ID NO: 74092 - DNA, 1188 bp, Homo sapiens
atgtccttatttacactcctgtaattcagaattgcttctgattttccaaagacagcatgcttccatacctttgcctatattttatttcttctacctctaatgcccttccttcagtgttcttgtatgttgtgtgtacggagtatggatatagcaattgtgttccttaggagctggttgtgtgtgtgtgtgtgtgtgtgtgtgtgttttccatctttgaatcctcagtaccaagcatgatgcctggcacctaggtatgctcagtagtgttcaaaagaaaatatttttttctaactccaatctctaaaatgctgtcattctaacaaatacaagctaagcatatgtaaataatcttccaggatactgaactgtgttcatttttccatatgattcttagtggagtttaactttggactccaaacaccccaaatcttatggattgctttctttcctcaacctcattagtgcattgaagtaatgggagatggatgccttaataatgaacactttgaagaactgggaggtatattgaaagcaaagcttgaagaacattttaaaaatcaagaattacgacaaggtaagttttccatgcttttatttctgaatataatccttgaccatcttggcaatcatttaaaacatttatttgggtgtgttttagttaaaagacaagatgaagactatgatgaacaggtcgaagagtcactacaagatgaggtaagttattccctttggaacttacttacgtgaccacttgcatctgaaagacttgtaaatgcctcaatttctgatttatgtgacttgtcattctgatgtaattatcagtctttagcagaggagtcagatatatttcctctcttaatttatgaataagtaatttgaaattaaactgatatgtctttcggtgctatgtgcattttgttgtaatacctcactcaacaaaacaccttgaggtttacctagttcatttacatactgctcacaacaaccatttgtattttgtggtgctttcactatattaaagatgagtaacctaaaattccagtgttaaatgattgcctagagtcacactgttgacggtctggggcctttttcaccatgttacttagttctctcatcaaaccacctaggactgtcaagcatacttcattgtgtgtttagagtccagcatctcatatgtggccacttggt

SEQ ID NO: 74093 - DNA, 1020 bp, Homo sapiens
ttttattgtattaagtagtgcagtacattttttaaaagattcgggcacacatgacttagcctgttgaataaatgctataagttaagatctttgcagcttttattattattgtatttttttaatgtagcattaccattgtcttttttacaaagtaaatttatatacaatgcttccactgtcagttcttctgtgtgatagtgtcagattgtagagttctgtaacaaatcatacaagtctttgaaacctaaattttattaaatctgtgtatttgattgaatatcgttggtcacaagaagtggttgttactatgttttcttttttcttttgcctgtatgaggaatatcaatgtaagcagatagtctatagtgaatatttctttacattctttgtgtacaccagtatttgaagcttaaaagagaatttcttttgtagtgtccacatagaccatggccagacagacaatggggattatgcatctttgatgatgtcatagaacactgtagtccagcctcatttaaatacgcagaatatttcttaagaccaatgctccaatatgtatgtgacaacagcccagaagtcaggcaagcagctgcatatggcctgggagtcatggcacagtacggtggagataattatcgccctttttgtacaggtacgtttgcttattccgttacgtgcatttcattccagacatcctgtgaatccctactttactctctttaccacactcccaaacattatttgcctatttctgctgtagtctgttttcagacatctcatctgtagcatttaggattttagatgataaaaagatgatttattctcatagaaatagaatcaaagacatcccctgcccccagccttccagggtgcatttctctttgcgttttggcaatatacaacagccttagaataggacttttttttttttctttaattgaggcccaggctggagtgcagtggcatgatctcggctcactgcaacctccgcctcccgggttcgagcaattctgcttcagc

SEQ ID NO: 74094 - DNA, 1114 bp, Homo sapiens
atcggcccacctcagcctcccaaagtgctgagattacaggcgtgagccaccacacctggcagaataggacttttaaaacttactggggaatatagttaggcagcttttaaagtttaaggaccctcgggtgatgtgatgagtactgtaaatctggaggccactaatctctctgggtctctaagttagtagagggctagtgctcctgtccatgctggggcagtcccccctctgttgccattctgtaatgacatagccaagaagacaacacttcccatacactttaacatttctttaccataatcaatatctgaaccaaatacaaaaatacatatattcatttgcatgaaaatgtgaggttttagctgaacttctttcaaatgcttattttagaagcacttcccctgctggtaagagttattcagtctgcggattctaagaccaaagaaaatgtcaatgctacagagaactgcatctcagcagtagggaaaatcatgaagttcaagcctgactgtgtaaacgttgaagaggtccttccacactggttgtcttggcttccactacatgaagataaagaagaagctgttcagactttcaattatctgtgtgacctgattgaaaggtaggaaagcagactgtgaccttatttccttctcctccacagtgcttcctggtttttcttgcctaacatcagtcttttaaggtttaaccacatgatctctgcacagtcctcagttgtataggtttataatagtgctgtctttataaatcatattaagaaaccatatcacagttaacattgcccttataataaggtctaattttgagttattctttatgaaattagattcaacagatgaggcactttaattatttatttctttgtttttaaatttttttggtagcgacaaggtcttaactgttttgcacaggcaggtcgcaaactcttggcctcaagagatcctcccacctcagcctcccaaagtgctgggattacaggcatgagccaccaaacccagcctaagggaatgttgtttagtgtctgttttctaagtccaagttccccccaaatatcagtcagatctaagctctgtcgctattattatttttaggttat

SEQ ID NO: 74095 - DNA, 2360 bp, Homo sapiens
agtgaacacataatcatatttctccttataaatttcacttactaaggttttcttctcatttgtcagtaatcatccaattgttcttggcccaaacaataccaatctgcccaaaatatttagtataattgcggaaggagaaatgcacgaggcaattaaacatgaagatccttgtgccaaacgtctggccaatgtcgttcgccaagtacaggtaagctgatttggttgaattggggagggggagataaaacctttttttctttgtagtcctctatgagaagaaactagaaatctaatgagctaaggaattttatttttatattttcatagtctcttgtctccaagcctcaaatggattatacttaatgtaatccatccgtatgtacttattatttattagaattaaaaccttcatcttaggacattttgagcttaccagttggtgcttaacacaagcttatgtgtagtttttctgcctatcttaagaaaaaaaaacaagatttaataataacttgtcatctgccaaaaaactttatatgatttttacttcctatattcatgtggtatatgggttactttaagatgttacctgcttagtgtagctttttcagtgcaaaaatgaagaaaacttactggaaatgaaatgaactttaaaaaaatgaacagatttcttgcttttacaatgatactcatcaaaataatgtacctagggagaaggtattttgccatgattacagtttacctatgatgatgattaaaatccttccaaatgagcatttcgtcctaagtctgtgaaaatgtttctttccctagacttctggaggactgtggactgagtgcatagcacagctcagtcctgagcagcaggccgccattcaggagctcctgaactctgcgtgaagggccttaatgtcacccaccagaaaactaactccaaataaacgcttaccctttcctttaggtttctttgttttgtttttgagcaaaagagatcggtagtgttgtgtgtaggccattcttctggagagccacaagcaggaagagcagcgctgtgttgcagaatggagtttccatggatttctaccagaccactgaaggagttcctggaagccctgcggtagctagcactgaagactatttttctattggtataacccgcccacctgaaggggaaagggaaatcaaattaatttttctcgttagacataaggaaatttaaggaaaaacagctttaagaacagttactcagcgtagatgtgtgttcacacaaattgctctgcattcagtgttcattgtgaattgggagtgtgagtctttctgtagggtagaaagaagcctcctacccagcaaaccagtagacccaaaagttgaaaaaaactgatgacagacaacaagcatgaagatggcatatttgatgtcactttggttctttttcccagaaggcttatacagtgactcagtcgggaagctttccagcttccagcccttgaatgtgaagtgtcattggcatgtctggcagtagtctctcattcactcctcaataaacaacattgaatacaaaagaggcttgtgtaaaaactcagtactgtctggcttggattcatttcatgtttttaatataagaatgatctaatatttttttaaagtaatagctatcagtaatagctgagtgttttttcccctaatattttccttgtgcaattcagacttaagcatcgagtttttaccatcttccactttaagctaagttatgatacctattccattcacaattggtgttctttttaaggtttgcaaatttcagccaattttgtagctaagattgttctgatcagctcaaaaagatttggcttagtgttttcattgcaaattataattgctgtagagccacacacaacttttgaacttttaattataagtgttatggctaaagttatttactgaaaatttcagtaaaatgtgtgaatgtttctttatgtattaacctcatagcagtaaatgacttgctgttgtttaatttttctaaggcatcttaatagacttctgttgaaaacttcagtgttaacatttttatagtttgtactaaatttaaccgtgatataaaaatgaattttatgcatagatcagaattttaaattaaaggttttttctttaaatgatttgtattactttattaaaactaaatctgaaatggaatagaaaatagaatggattacatacagatggtttccttgttagcagatgcccttcaaatatattttacgtttgcagcacaacaccattgcccggaggcttccgaatctagcaaagcagcatattaaatgactccacctgcgcagtccttgtgttcagtggatgaatac

SEQ ID NO: 74096 - DNA, 1113 bp, Homo sapiens
catcctcaccccgaacacattgatcaaaatcccaccaactgccaggcctctcccaggcttgtgctccaggccagccttctctcctgacagtgctgatagctcacctccaatcagaccttgaatcatggtctctaatcttgcccctcgcactcattattcctggtgcagtgactcagttttttaatctgcaaaattaggcactggggcctgatgatgttaaaggctacccccaacccctttccttctttggaagtgaggaccctgtgttgacatgctccttgacaaattaactttttgtgactgtatttgtgaattctccagacagatggtaaaatctttgaggaaagaggtttttaatcttagagcaaaccttgaggcccccaaagcctgattagacacagtgggtaccgtgtgtctactgttaaagaaagctatgtgatgagagtgaagaagcatgccacgatttatatgtcccatgccagttgcgggccgcaggaaatgttgtgattggccttatgtgcgtgtggggtggctgttttcataaaactcactgcactccatgctgcactccaggctgaactctatgctgtttgaccatgggaaatggaagacggaaagaaatattttcttgataatacattattagtagaaaattcaagtttaagttgaaatcagagaagacctaaagtttttgagaaaagtaatgagtttgtatgtcataaaagaccacgtaggttcttttctggtgtcagaatcgcctgtgctatcttggagacctaattaggagtgttacaaattcagtcccatacatgattaaacattgatttcatttcattattataccttttgaaatgtaacagttctttcattcctttaattttcactgaaacctaggtttgagatcaatagggagcttattctctgagagctctggttcagagtaaggtgtccactggtgacagattctagagctggctccataagctccatctcagaaaaagggacggagccgaagtttgtcttttcagaaagctcagggtttcctctttgtggccctgcagttgacatcaggagctgggcttgtgctcattggtagcaactgtgcctttatgg

SEQ ID NO: 74097 - DNA, 1443 bp, Homo sapiens
ggatcaatgggagaaaagaaagcgaatgaaagcacttaagaataaaaaatcatgtgcttctgtcagatggagtcattcctcttagaccacagctgcctgtgtagtctcacatcaaactggggctttctttggaggggaatcattacctaagccaaagctgtgtcccaaggggccttttggaaggtctataagaaccaagcaccacttggacaattgccgtgaaacctccatttctgccaagctcgtttactgcgtttttgtggacttacgtgcagcttctgtgagcttcagtttaatcaacttgaaaattgagggggttgcactttgcgctcagaaattttacgtgcatttttgctttcctgatttcttgatctcctctattttcttagcttcaaaacttttccattttcctagagtcaggatgttcctgggtgaatcatgtgtccctctaccatggactggatgaatggttttaaggtagacataggatttcaagatcctctagggtaggtcttctcaatatgggctctgtgggttcatttgaaggaagtgctcagtcagctggatgctcttgtgttagaatgtaaatataaaaacattgcacatattaaatggactgattttaaaaaactatctgccatgtttgaatgttcaattatttgctgtcttctatcactttgagcatttgagctggaggtaatgattttaactcataagacagacacagaatgacttagtttgggatttctcttctgtagatagaatgatcatgtaaaagagcagttctcaaagctgttagcactttgtaactttgaaggagagcctcataggtctctgtttcctcatttatacaaacaggaagttggaccagatacccacagtggaattctgtggctctggttttattttatggaatgtggtcttggaaacatgatacgggtttcacaaatgtgtatcaacatggaaggcaaggtgctactggtgataagaaaatgaataaaaacaataactaccctctgaaaaatcccttgctgtgtgccagacattgtgccaagtctgcccgtacattatctcatttgttgctaagtgaacctgtgaggcaggtgagaataacaccgattagtctcacagggcataagtgacttggcgcgggtcagagtgctggagagaaggagctggagtcccagcccaggaccacatacacctaagcctgtgtgtcactcactttgttaatggtctggggccataaagagccgttaggataatacaacatgttggctgtgctagtgcctgtgacaggtgccagtggagggtgctttttttttttgttttttgagacggagtcttgctctgttgctaggctggagtgcagtggaatgatctccgctcactgcaacctccgcctcccgggttcaagtgattctcctgcctcagcctccccag

SEQ ID NO: 74098 - DNA, 1474 bp, Homo sapiens
agttttgctcttgtggcccaggcttgagtgcaatggcacaatcttggcttactgcaacctctgcctcccaggttcaagtgattttcctgcctcagcctcccaagtagctgggattacaggtactcgtcaccacgcccagctaatttctttgtatttttagtaaagatggggtttcgccatgttagccaggctggtcttgaacttctgacctcaggcgatctgcccactttggcctcccaaagtgctgggattacaggcatgagccaccgtgcccggctttttttgtttggttggtttttttttttttttttttttgcttaactaatgaatctttaggggcctgttgtttttaattcacttagtctcactttaccaccatgtaaactacagtttggtatacagtcacttcagattttatttacttttgttttgaaggagaactgctggtatttataggaaaagatttctgtcagaagtagttttcagattttcatgctaggagtgtagatttcataaatgggcaccaatgtgcctagttaataatgtatgcaaagatcatctccttacagattccaggcatgcctcatcttattgctctttgctttatttgcctttgcagatattgcgttttttacaagttgaaggttggtggcaattctgcatttcgcatgtctattggccccatttttccaacagcatgtgcttatttcatgtctctgtgttagcattttttagcaataaagtatttttaaggtatgcacactgtttttaaagacatgctgttgcacacttactagactacagtatggtgtaaacattttttttatgcactgggaaaccaaaaaatttgtgtgactcattttattgaaatatttgctttattgcggtggtctggaaccaaactcatagtatctccaaggtatgcctagatatctgttctgagaaagctgcggtttgaaacttcatattgagtgaatgatgatttcaatactactgtctgatttttcccagaaatcaatctctaatggtttccctattgacagaagatcaagtgaggaccctgtgaaggcctttcatggtatctgttgtcatttaggaggctcagaagttcaagggcctttgtctgcaggctggtgtgttcttctgggccccaggccctcaggctttgaggctgtaagcgagcacttgcctgggggtaactatccagctcagtgggtaggtttttccaaggcatggatggttgacagcttggcagagcatctcatccagaccatctcactttttccatttgtatagaattctctgttaaaacaaaggtgttgtctaatgttaagagggagtggtgttaataaataacatcttcctctcctgagttcagaactaattaagaaagaggcatgatatccatggctagtcacagtgtccaccctgttactgatgaatgctggaccttgatgcctgtcagccaggctgg

SEQ ID NO: 74099 - DNA, 1086 bp, Homo sapiens
caagcttctatgcatgtgaagaaatttgaattctcagggggaaactgaaaagctctggaaatcacgtactgctcaattcaattcagaaggtgtgagttcctaaggagcattttcacttcctttcaaacttaaaaaattgtggtccaaggaatgacatgggattctgactttttatgacccatgctaactgatttggtgacttctgccagtgcaggaggctcggattttcccctgaaagagcgccctgctcatctcagaaaggttcaggctgtcgggtccattccgcaaggactcgcttcatgtatttcctttacaagtcagaaatggaaaaagaggaaattaccatcccacatcttttcttgatgtgtatgaatgcgtctgcctccaactctgagggtttcttctccaatcaggaaaaagttgacatttgccaccaagtcagtacgcttctaagctttcattttatttcatcaggactgactgagcgtcagcattctggccgagtcctgcagttttacccactgtgcaggtcagcgttttcttcaaggactctggccctggcttgctggcatcctcagagtgtctggatgttacccaggggcttcctctcacctcaccttcattcttgttccttgttcttagatggatgggaggttcagttgttggaaactaccagttagactaagaaagctggacttctttcatactccttaaggcaagtagggtataagtaagtggcctgttggctgatctcaaacatgagagagcattaggttcattaataatattctgactttttcttatctaagccagtttactgattaagaaatcatctggtgaaattaatctcaaatatttttaaatgctcaaagaacatattgcttcagcttcattaaatacttgtctaaacacctggaaaaaatttccacctccgtttcacaatactttgtgtagtgaaacctgatggagtgatagtgtgttagttattatggaaatattgtggacaattcacaagcagagtgtttgttccataaaattaaacctgaaatatgtttgcttgctcttaagttagaagtattgacaagc

SEQ ID NO: 74100 - DNA, 1010 bp, Homo sapiens
aagttcaattcactgttgactttttcaagaggagtattaaatttttactccctgctgtacatgtggaatttcagtgtaattttaagccaaattctttaaaatatgtgaaactcatagtgctattacaaaataattacaaaggaagcaagttttctcccctgagcatcttatttctagatttttttttttcctaagcaatctcttgaaaaggaatatcagtgagcagatttctctggggccatttgaacttcattaaaatttcagagagggcttttcaatgagaatatattcatgtaagcactggagagttttgcataattttaaagttgaacagaattgggtacaattagtgatgaaaatacagtccatcccagattcctagctgattgccattttggttttcccagcaaacaccctttctaccccacttcctagctttattgagatatatctggtatataaaaaattgtacataactaatgtatacaatttggtgagtttggatataagtataggctggtgttaccatcacccagtcaaggtaataaacatatccatcacttccaaaactttgctgtgtctctttattgttactgttttttaaaaaacaacaacaaaaagcgccttttcaagggagtagcatttgctctcctctcttcccagatggtgtcctcatcctccttcctcaaagccaccggctcctcctggacgggttgggtactgagatgctccatgaagcccaagcaccattcacatctaattgagaagtttggagaggacagaattctcactcatcttacaggctctatttcttacacaaactgggctggaagtagaagcttagcggtcacagtcactgaagagcttcttaatcttttttgagtcaggacttgaagtcctgtttcattatttcattcaaagaaattgattggcaatggccagagttaaattcaaaggtgacattaacacatttcagtgcccaataagtgatttttctgctgggtaggagt

SEQ ID NO: 74101 - DNA, 1080 bp, Homo sapiens
acggagtctcgctgtcacccaggctggagtgcagtggcgcaatctcggctcactgcaggctccgccccctggggttcacgccattctcctgcctcagcctcccgagtagctaggactacaggcgcccgccacctcgcccggctaattttttgtatttttagtagagacggggtttcaccgtgttagccaggatggtctcgatctcctgacctcgtgatccccgcctcggcctcccaaagtgctgggattacaggcgtgagccaccgcgcccagccccgagataaattcttaattctcatctgtagatcagcaaaaataagcttagtcttctgattcttgtaacttaaaaaaaaattagagtctatagtttttgtctaggaaacatggttgtcagttttcattgttagagtctcaaaataagtggtgtgtgtgtgcttgcttgtgtgcctgtgtgtttgtgagtgttgtgtgtgtgtgtttacatactatactccctccttctcctctggggataatctaaaaagctcaaagttcttagtcctgggtactgaaacaatgctataagggaggcatttagaaaagcttaattttaaccaggtacttacaccacaaacagaatgacatcactaagcacacagcacgttagtgaacagtggctttgtcagagctttctacccagagccctgaaatggaacattgttaattagctttaaaaaatccagctgttccttgagcccatggattctgcctgtgcacttcctgcatacaaccgtctacacagaaccgagggctggaactcctgtgtttaagaaggcagctgttccttggcggggcacagttgctcacgcctgtaatcccagcactttgggaggccaaggtggacggatcacctgaggtcaggggttcaagacccagcctggccaacatggtgaaaccacgtctctactaaaaatacaaaagttaactgggcgtgatggcgcatgcctgtaacccgcatgcctgtaatcccagctattcgggaggctgaggcagaagaatcactggaacccaggaggcggaggttgcagtgagctgagatcg

SEQ ID NO: 74102 - DNA, 1107 bp, Homo sapiens
cagaaggaggcctcttcacaaagtgaatgccaccaagccacggatgtggtcatcagcttccagcgatccttgtgaagagctgtgtattgaatgctggacacttgatcagcagtcgtatgataagaataaaccagttctcagaagagtcgcagattcctgacactaagaccagaaacacatctctgccaagggtccaagaaggaaacaaattttatgaacaaaaaccttcgcagcctctctcagcatcagagaggcgggtacctcggacctgtcttcccaaacaggccaatgggtgcaatcccgtccagcccagcaaacagcaactctaatgagagaaatgggccaatgacacctctgtctaatatctggcatgagtaaaggatagattttgcagtacctagaaaaatagtgaaccagttctctctgaaatattctgtgatttttgaactcttttctactgtatttgggtggaatgagatttaatagtggactcagggacactgagggtagagggaggggtaaggagatacctcctagcagtgatgtgagctgtttctccccgggtagagggcttccccaaggtattttcctgtggccatagacataatacagtatccttttataggatgggatagtgtcaggaaacaaaatgtctcatgttttaagaaatcatgagaagcttcagaaatacttttggatattaatgttaaatctaggatatgctgagtccttaccacactggataacacattcttcatggattccgtatttgtgaatccacctactccctaaaatttgtagtccccaaatcaagcttgtggtgctttcctggtcatttgtggacctgcccaggattacagaaaaatgtgagttgcccaatgtgcacattctcagctgaactcaaatgagggtctgccttcttgtctcagctctcgcgctggaaacaggtgcctttttgatgatctagttagtgccgtgatttgtttgcgttttcgtgctttttgttggtgatttcactgtttaaaatggctctgaagtgtagtgctagaagcactgtccagggttcctgagcgcaagaaggctgagaatgtgccttacagagaaaac

SEQ ID NO: 74103 - DNA, 1108 bp, Homo sapiens
tataatgaaggactttatgtgcacttgagcgaatttgtctacaccttaaagaggatcattttgacttgattgaacaggataactctgcataaatgctataatctatatgctttgaaagtggctttcctgtcatttgacttagttaggaattttcataaggaaaatcaggacatcttcattctaaggagaaaaccaaagggaagttttagaggaagccgttcatgcaaatttaaggtcaagaaagactaaaattacttgggttttgtcttcaaattttttagaacagtagaatgcaagaggctatcctggaaaatgccatgtacagcaattaaaagcttagtcttctccccagaagcctaaggatgcagcagagtttaccgaagcccttgcagagaggcaggataataaacagaggctaccaaacaggacagaatccaagtgttgggtgttctggcgttctaagaagctggttttgtttctgtttttttcatctgagaaaaatctttggataataaaccttccgattttatcagcctattcactaatatttttaagatatttgttcttgctttaggagaaagcaccctgaaggttgtgctcttctataattagcatatacctttaagtgaaattttcctcagcctataatgtggttagtttatatatctctgcagatgaagataattacttagcttgtttatagaatacactgccacaaatatgggtatttgctgactataattaaggatgtacaagttactgggtaaaataaatcccaaaatgttcaaagttagaattttctgtttggaagggcagctaacaaagaaggtaggttgtgtcctttaaatctatgctgtgcagtgtggaagggctccagcaacatatagtgatttcagtttaaatgaaatacaattaaaatgtttgctcctcagttgcactggtcatgtttgaagttctcaatagcctcatgtggctggtggctgccatattggacagtgcagatatatctagaacaagtttgtccaacgcccatggcccaggatggctttgaatgaggcccaacacaagtttgtaagtgttcttaaaacattatgagactttttgtgtg

SEQ ID NO: 74104 - DNA, 1169 bp, Homo sapiens
gacattaaaacatgctcattatccttcctgtaatctgctgccttgtctcacagaaatttgaaacctaagtggatcctggttgtaatgaaaagaatcatcatcagccctttttacatctgacattggggtaattttgttttgcgtatttggtctcaactgctttttaatccaacaggcagcattcaaacgactctcttcctttatggagatgatcttgttcaactgcttccgctgttattagtcttaagagttgaaaataaaatgcttatagtaggaagcttactaagaagacaagttgttgcttttcaaccatcgtttgggagtaacagtgaacttgacaggagtcagtatttgccagaaaaatgatcccaagccttgctccaggctactgtcttctcacccactgttccacggccccttcctggcccgtttgggggtcccctgtgtctatttcaggccacgtctccctctgcatgcagacctatgtatgccgcttcctctttgctgccccttaggtaccctgagatcagtatatctaacactgaattgactctctcactgctcataataccttattctttcctcgcttagaacccctggcctcactgtcccttccacccagtctgcaaaccagaaacctgcgtggcccatgggtttctcctgcccactcgtctcttgtagccaagcagtcaccagatcttgtgatcctgcgtctcgttatctgcccctctctcctgcatctgctccttcctgagcacaagcctcattatttcatagagccctcctgtgaccagctggtctttctgcctcccttagtatctgtccccttgatatggtttggctgtgtccccacctaaatctcaacttgaattatagctcccatagttcccacgtgttgtgcaagggaccccatgggagataattgaatcacaggagtggtctctcccatactgttctcatggtagtgagtaagtctcacacgttctgatggttttataagggggttctgcttttgcttctctctcttctcttgtctgccgccatgtgagacatacctttcaccttctgccataattttgaggcctccccagccatgtggaactgtgagtcctttaaacctctttcttttgtaaattgttctgtcttgggtttccctttatcagcagcgt

SEQ ID NO: 74105 - DNA, 1077 bp, Homo sapiens
ttcccaggtgcgacaccagctaactgcatcagagctttggggatgagacccgagcatcgatacattattttaaagagcttccacatggagcatgtcctggtttgagagcagctactctagcagatctgtgtcttcagtttcctcatctataaactcccattatcaatcaactgggaagaccttcgtggattaggctcgtcaccttctccagcctcaccgccatcattccttcctgtcccgtggccccccgattgcaggtacaccttgccgccagcacatgcgcacactctcctttctgccttgaatgctatttccccagtttcttcccattccagttctctggatgaaatgactttccctgtaaaaatccgaatcagtgcttctccccttgtagaaacccccgttctcgccagagtggacatgggcatccttctcctatgtttccatgatctgtgaagacagggaccccccgctcttcatgcacatcctccactcctagcacaggagatgttcaggaagcctttgctaatgggagccttttttgcgtagaatgtctgttttcccttctgaagttctgagccacattagagtacttgtaaactgtaaaggattttacaaatataaagtgacttaatggccttttttttttttttttttcctgagacagaatctccctctgtctgccaggctagagtgcagtgacatagctcactgcagcctctgcttcccaactcaggtgatcctctcacctctgcctcttgagtagctgggaccacaggtgctagccaccatgcctggctaatttttgtattttttgtggggacaaagtgtcactacattgcccaggctggtttcaaactcctgagctcaagtgatcctcctaccttggcctcccaaagctgggattacacggccctaaatgactttttaaatgacactgatttaaatgatttcaaatgatggttttttaataacagcaaatgaatattcatatatcacctttctgtaatctctgcttttcttcaagtgagaatatggggcatagggctttctttattgtgcacagcacagtctggt

SEQ ID NO: 74106 - DNA, 1050 bp, Homo sapiens
ttgtcatagaactttacagcacacggagtgagccttgtgtgagctatggagtgtgagtgatgatgctgtgtcaatattggctccacaactgtagcaaatctctaccaccaaggttaataacgggacactgtgtagcgcgaagaagtttttgctcaactttttgtaaacctaaaactactctaaaaaaatagtcgattaattgaataaggtgggaggagtgatgcctggcgttggagtgggaagaaaatgctaagagatttgcatccaattttgggaacagcaggtgctgggatacggaggtgtagatggggctggcgttcagggtgtcacggaggtgggcggtggcaagctctgaaggacctgcagacttaggaatccagaggtttcctgcagcgaggagctgtggtttgttttcatccgtgcctgcctcagggataacccctgttgtttctgctcacagcaaagagctcctgggaaggtgctgctggatgcagtttgcaaccacctcaacctcgtggaaggtgactattttggcctcgagtttcctgatcacaaaaagatcacggtaggtgatgtcaacttaatgttactattttactgtctgttcatcttggtggggggctgggcaggggccagtctaaatgattgtgagtgagatattttcatgctgtctgttttgtctgtgaagtcttcaaatctggtgtgtatttgacacctcagtacctcttggtttagactagccatgtttcaagtgctcagtcatcacatgtggccaagggctatgtatcggccctcacagttctatacccaaactaatatgtttgagaagctgttaatgcatttaaaagagagtgtgatatgatctgatttctggtttagaaagagaactgtaggcagattggaataggaccagactggagtcaagaaagccatcaggatctagcgatgagtctggttggagatggtgctggctagaactaagggagagtagaggggctggcaggagctggatggattccagaggtggggttgggggcagtaggagaggat

SEQ ID NO: 74107 - DNA, 1033 bp, Homo sapiens
tatattgtagcttacacatcaaaacaaaaaaactccaatgcaaatcacagatgatgatgatgatgatgatgatgatgatgatgatgattgagatggagtcttgctctctcacaccaggctggagtgcagtggcacgatctctgctcactgccatctccacttcctgggttcaaatgagtctcatgcctcagcctcctgagtagctgggattataggcgcccgccaccacgcctgactaatttttagtacagacagggttttgccatcttggccaggctggtttcaaactcctggccacagatgatccgcccacctcagcctcccaaattgctggcatgacaggtgtgagccaccgcgcctggccacagattattattttataatctgtctgtcctgttttctttctttttttttttttaaattctgaaaagttgttcatcttattcaatctctccctcccctcactccctatctacttcctgattttgtctaaactcattggtaagagggtttataagatactgataaaggccttggctggctgagacaaagccagggccacatctggtgtatgttttccccagagctcagaagagcacctagaggctgaaaacatatttgatgaacatattagcaactgtaccttataaatagttaaatataatgaattgcataactgatgtatgttttcattatttgggtaaaaccagccaattagatacatttttgaagacaaatgactttattttaaaaaacctagataaaatttaagtctgcagagaaaaaatttaatagctctatgtagtacttttgtcacagtattttttaaaaatggatctctctttccccacaatatggaagtgtgaattagtagctgaacttggccagttgttaagtgacttggaaaatggcagatgtgcacttggcagcttggaatgagatgcattatttgtatttgtaaagtctttttctttaatggcatttgaaacacaaatcagtaaatgctttacttctttttttcttcttctttagg

SEQ ID NO: 74108 - DNA, 1084 bp, Homo sapiens
cagccgccacgccctgaaggaaccttctggatcatgcccagatgtgcctccgtgattgctgctaggccagagagctccggggcagttctcccgccgcagaggcctcgggtgttcttgcctggctctccttttctgttttcagccttggaataacagtctccctcttctctatctctccgcacctttttccccaccccacccagtctcagcagagcaccagccttacatttggagaaggtgccgaatctccagggggccagagctgccggcgaggaaaggaaccgaaggtttccgccggggagccggggtcgcacccgagccctgcgccgaggagaagccccgcgggtaacaagcaggcggacggagccgcctcggcgcccacggaggaagaggaggaggtcgttaaggataggacccagcagagtaaacctcagcccccgcagccaagcacaggtccagcatcccgggctgccagaggcagcagtacttccattcctttcattgactgcagtgacgtagatagcgaatacgaccttcttagagaacaagcgtcccgatcccggtcccgatcccggtcccggtcccaaacaaatgacaattatgagggtgatctgaccagcggtgtctatctgctgtccagggaggaggggcgaagagaggctgggcgtagggcttccccgcactctgcgaagtcctcccggcctccttccggagaattccttgatgacgattcagcagacatcacctttgatatgagcgggagccctcgactcccaaggcatagctctctcatagatgaaatgttcaagggctcggctggtcacagccccctggccaccccattgtctcccagcagcagcagttcaagtccaaatatgagttgggacagaactgggtctcaaggctatgtttcggaaaatggacatgaccatagagaggggagtatgggagaagacactctcccggaccagggtcctccttatgaacgctggtcccccacctcgccaaggccatacatgcggaatcttcctggtagatgtaataagtcagagacagatccactcatccttagccaggtagcatt

SEQ ID NO: 74109 - DNA, 1067 bp, Homo sapiens
aagataaacagcaagtcctaatgacaagttctcaggagcttgtttattttgctggttgaaggctaggaagaaacactttattatgaatccgatcatgtgtatagtgtgttatatttatatggcaattttctgtgtatgttcaattatgcagctcaccctcctgttggttgagagtttgaactgaagcatccttgagattacagaaaagggtttcccattctccccttctttaaaaggagggctgctttgtccatgcctcatgaagtgaggaattggcactattcaaggccaaatgtaaattgatagctagttgagattatgttggtgaaatctttcgtcaagaataatgaatattttaatgggaagaatttggggttatttctgcttcccaggcttcctgtgaaatactagaaaagttgtcaaatcttcatgaattgtgatctactagggattgctggtttggtttaggtttgcattggtggatcatattgttatgttttaagaagtacaattctgcctctcagaatctcttggtgaaactgaaatcctattgagtgtggatgcagggaagagcaacaccttgaaataggcactgttgtcaccagtaggtcaacaaactaaatgcctgcctttgaattgtgtacagcgcagagaaggactgttttccagcatggttgctcttggttggtgtacagacacagtcttaccattcacactctggtgaacagtgtcctctgttgggaatagtgatacttggatgtttctctgagccagaaaaaagaaaatgtaaggagagagagattgacttctttttaaatcttgcccaccagtgtcactgcctttcacccagcattcctgcattttagattaaagagcctggttttcacttgaagtttctctgccttagctgcacgttgcaattttctgagatattttaaaaattagtgatgccgggaccctgaccctagggattttgatctcattggtcttgagtgctccttgggcttcccagctgtttgtactgggcagccagggtcacttcttacccaggctgtctcgaatctagt

SEQ ID NO: 74110 - DNA, 1049 bp, Homo sapiens
tcttggccagtattcacaaaagcagcaatcctggtgtaattaatggtgcttacagtttgtttaaaggctgtttatcatacatcctgatgtgctgcgaatagtcactacttgcctcaagaggagcttgtcctatgctaataaagattctataacattggccaaagggtccgtttatacattctttgagcctggtggagcacgtttgctgaggtgatgtggtctcctcagtgtcactgtgaagagctcagtcaggaaaagccagcagcatctaccctgccaccctccaaaccttctgactttggggagactccagtcccccaggtctttacccagcctgcagatctcattctagcttaacaagggcatgcgtgtgcatgaagttgaactaagagtggaggaaggccagaggtagggttgggtgtgatactaggtagcagatattacagacttctgaatgcattcagatttccaaagggtttcctgagacctctcaaccaatctttctaggacaatagctagtgtaggggtctcctgactcaataggggacccaggccttcagataccagccactcactggctgctctgtgacgtgctatcttaagaccgtgaatggaagacaagccctatgtaaacacaaatcttaaagccactgttggctactcgagggcctccttgtgctaatatcttttgttggatattatttcaaaatatgtgaattttagacccttttgtggttgcctttgctgccgcttgttaagggcaaaataaaaacgcaagaaattcttttagcatgaagaaatacatttaatgagctccagaactcaaaataaatggcttcagctccttgaacagtcatctgtatgccattgacaatattttattagataggcgtttaattagaggaagtctgtgggccagattcttccctgcatgtgtgattcatatttggaaatttctgatttatctccccccaattgtgccatgtggcctgcacttaaaatgtaagtaattctgattttattctcaagaacttatttgaagattcaag

SEQ ID NO: 74111 - DNA, 1960 bp, Homo sapiens
gactccacttttgagtgagatgtggaggcggtagtggtgtgggggttgtgagggagtgagtctgctttattatgaatcaggattgatagctggccttaaagtgggaaatgatagaagggtcacttaggagcctgcagtggcatggtgaccagtctgttattactcatagatgaccttttctggctcttgaaaccaagctaacgactcctttttcttctgggcctcaaagtttctttgtaggaagtaaagcatttgtcactttccctgcagtgatttattgaaagactgaagataggtcttccttagttaaggacgcacactggctgctcgctccagaagcaccaagaatggctgatggataaatcccttacccatactcctgtttctgcctcctaaggttgctgtgaaaacctaactaaccaaacctcaccagcttggcctatattattaatcaaattcccttctgttctctctgtgtgtatatttaatactgtagataatatgttttatttaaaatttctaatacaccaaattaatttgaaatagaaaaggctggggacttcattctcatttttgtcatttgtttaatcagtttgggaaaacattttccgttgttccattgtatgcagtgtcttgtcagcatgtacctatctaggagaaaacgctttgttttcagcgttctgtctttaccctcaaagcatggtgtagcttctgttcttacactgttggagcactgtctgatgtctttttttttttttttaacactgctgaataccaatttgtacttggaatacctctttcctctagaatacagtgatcctattccccaaagtgcaagctttcatgtggaagcatcctaagtgatcgtcctgggtgatgccatatttcactaaagtgggaaaagaagaggtgaactttgctcttccaacaaggcttgcactttatactttgggcagtgcatgggagaaggggggcccttagaggtgagcaggatcactgtagctagaggagaggtctcactgaaacagaacgcatctgtgactgtagcttgcatggagagcctagacagccaaccatggatttgcctttatgttttgaatggaaacatctatttcaattgggatagaaacctttacctatgtcatatctgtaagagaatttagcttatagatatgtagatacgtgtgtgtgttgctgggtggggaagtgggtgggaatgtagaaaaggcctcacctgacttggtcccagttggcttctgatggccaaggagctgtttttcattttggtgggcacccaacatgtaggttctcacagatgctgtctggtttcttcttctctccatggcggaacaatgaagtacgtcaataaagcatggactcataccactgggaagaatgctggcttctccagtaacaatgagcttggtggttctttgagcatggaaggccaagctcatgtcacagtgtatgcacggtattaatatatctcttgttgatctaaactgaaggggcttttacttgtcctaacaggtatcatgctgtaaaaactgtccattgtaactgttctttcccactgatggctgaagctttgtcctgagtacaagatggtatttttcattggtacgaagcaccatgttcccaacccaaacactgcctccaccaccaccaccaccaccatcaccaccaccactgctactaccaacatcaccaccaccatcaccaccaccgtgttcaaacaaagcagcattctcctgtgtcttttcctcataagtaagaacaaggtagcacattcatttttccattagtgcatttcaattcttttcctgcaagttgcattgctattgcttttctgaattgcttgatgatgaactgtgaagctgatgcttagctgcttgtgaaacttttcttaaaggaactgggtctaagaagcacacatacattaccctcaacaacctcaggt

SEQ ID NO: 74112 - DNA, 1095 bp, Homo sapiens
caaattctactaattgcccccttgtcagcatatttcattaattgctgaaaggtaaatgagttacatattttgtttggaccacgtcacctgtacattttcaaagcctcggattgtttatcttgcaaagagagaaggggcctcttctccacagatgcagctcaaattagcaaaactgaactgtagagtttcaggcctttcccttccttaaaatgctgatagatttctagaccagactttgatatttattggcttcttggtcttgctgtttaaacacacccattgccctttctttcttaggccctataagcaaagctggagtagcgtcttgggaaaaggccaactgaccaccctaattttgtcgttccaagtctgcagagcgcacatattaagtagttgttactgacatctttaggctccgtgagtgaaatgcagcaagcctgcccccagcagcctgtgggctaatcctgagctgttccttcgtttaggtacacaggtgaccctgaagttcccactcggccctctgttttctgagtcctgtctcctctgtagcacagtggggattgttctgaaccgtggcacgccttcttggcgaggcaggctctcttatggaaccatagtctgttacctcatttcttccaactgctctgtcccctaaatgtgtgttcccaggtgcagtgcagcaagggtgctcgctgttggcctttgagagtggaggtggctgtatcggagtgtgctccccctactttttcccttgccccgagtggcagttcttttcctctctgttgccggatgctgtctagggcctgttagttgctatttccttgcctccgctccccttcccactagccttctaactaccttttattctcggctccaactctttcaatgatgaggtgaatgctttttctgttccacgtcactgcaaagtcaaggtgtccagcatgctctcacttataactgcctcacccgatctcacgcacagtgcgagagctgaaggtaagccccggatgttgccagattacggtggacaaataaaaaacaactctccaacagcaactcacaaatgcatgaaatgttttaacctctagacagact

SEQ ID NO: 74113 - DNA, 1050 bp, Homo sapiens
cccaggtgggaggaagccagtaggtttgcacgctcgcagtccgttcttggggtctgcacgctcgcagtcagccctcaggggctacaaatttagccctcggggtctgcacactggccgtcagcccttggggtccgcacgctcgcagccagccctccggtctgtctcccctgcaggagttcatccgtctgggcagcctcagcaagctctcggggaaggggctccagcagcgcatgttcttcctggtgagtggagagagcggcttgtcctcacaaggattgtgtcacctgggcaagcaaggctcccaaggccggacctcggccacccaagtgagggacctggggtagaggaagagcagccagaggtgcccaggcccaagttgttgaggacagtgaaggcacagttgaggacagggaatgctggagggaagcctgctgtccaaacgtggtctcacctccacacacttctgattcctccagttcaacgacgtcctgctatacacgagccgggggctgacggcctccaatcagtttaaagtccacgggcagctcccgctctatggcatgacggtgagtacagcacaggctcgtggccagggcctgtcctcgggggcagcaggtgcgggcgctgctgacccggcgatgaggagggaaggagactggatagggagggagagggtggctagtggcatcttggttacaagacatgggctcaaagaccatcgaagaccatacaaccctttcacctaaaagctcgagccttctagggcttctctagtggggctctggggacacggctccttctcctgcacatgggatgtgcaggtccattccttatagaatcgagtgaaagggtaagctgacaaggccgcgtggcatgaactcgcctcccacagcctgtgcctggccccaggggccccgacagtcctcgccacacacaaggatgacagcgcccgctccctggagctgggccagccacctcgtcctcccccgagttggtttggggctgcctcctgtcccccttggcaggcaggtgtagagggcgcctgggcct

SEQ ID NO: 74114 - DNA, 1029 bp, Homo sapiens
atgcttgtgacacagacagacagcaaaacaccacggcttattatcttcccattgtgtacaccactcacaggacggtgacagtccaggtattgcactggatctcggctttgcttaacagaaaacaaccctgctacggttggaaagagttaccacttaaaacgatttggtcaacttgcaccaagaagtaggttgggaacaggtgttttcaggtgagcgtgaaaccccgcagtggaacgctgtgtgctgcaaattgcttattaatcagagaagtgagtcctactaacttcctattattacaaaagtagaaagactgaaaaaaaaaatgaaatctgaaaatgatctcatttgcttaaggctgcactgagtgtattgcaaacaaacaaacaaacaccgggaagtccacttcgtaaaatgcagcagccaataggtgaaaataataaaagaaagaactttttttaggaagaaaaacacttgccctgtcttgtgttgaacggatgtgtgtgtactgtttttcaggggcagggtggagggaagatgtcatttggcactctcgtaatgacaatgttttaatactggcactagctaaagaacagcgcccccagcggatgccaggactggaggtgggagcgctgttcattcagacgctgagaggtcggggttaaaaaacgcggctgtggagacaggagagctgctgggaagccatgtttttgattttcagacaggtgttaattttaccaggcttcattaatacagaagaaaggaaacgtcttccaggaaagcagccactgcggaaacgagtgtgtccggccatcaatacacaagagactctttgtgactcaacacgtggggtcgcgaggcagagctggtggcactgcggatcacttccatccacctgcaacacgggaacgccagttagtcaaccttttgtttggacggactcctgacactttggtgggcatcgcttacagaaacacaaggtgaagtcaggccgcctggttggtaatctgccacttcagcagaagagcaagg

SEQ ID NO: 74115 - DNA, 1025 bp, Homo sapiens
tgcgcattctctagtagtatatatcgtgcctgtcttcaaaaacatttccctttttatactcattccccccaggcatggggtagtgtcagtcggactgcacagggaacacggtttccagtggctttggcccctactcgggaaacgtctgcctgttctcgatggtgatggggtggctgccattcccttggttttcctaagccctttctaacgagagtctcaaacaagcggaggcgagggccaattcaaccccattctttccagcgccccgcaccatagcacctgcccacctgagaaccaggaacgcaccctctctgtggagctctgactggtgtagctggaaacaaacagcaacttgcaaacggacgaagagcctgccgtgtgttaatcatttgccttacaagatgtaccagacggtttccagtactaacaaagggaataaaaatacctcacgccacaatccagcatattgatgttttaaggcaaaacaaccaactttgtctgtagtcttcattttctgtgtggggggggaggggggaaggggacactccagcaagggtttctaaagccccagtgttcagagtgacacagggagggcctgccccccactgttccctatgctccccccacctccaggcaggggcagagcaaacaaacagctccgggccacacagcagcatcaggctccctccagaagtcaccactcactcattcctggagacttggggacaaggcagtctcctcagctatttatttctgaatgattgattgattccaaactacttgctggacactggtggttctgacctgtgaccagcacctctgcttcctgtgtgccctcaagaaaatactagtgtgggtaacagtccatctgagtggagtttgagacacactacacatgagacacacaatgatgcagatactcgttttcttgagctttattggcccctgcatgatacagtccctgtgcttaagaacatgccctattaggtcactctgcctttgctgacacattttatagcagaaat

SEQ ID NO: 74116 - DNA, 3414 bp, Homo sapiens
tatgaaaactaagattttggttactatatgaatttttgcacagggatgagaaatgacatgtgttgacttctctctctctctttttccctagatactctctaagtggtggaggaacttcatcccactgaaattcctttggcatttggggttttgtttttccttttttccttcttcatcctcctccttttttaaaagtcaacgagagccttcgctgactccaccgaagaggtgcgccactgggagccaccccagcgccaggcgcccgtccagggacacacacagtcttcactgtgctgcagccagatgaagtctctcagatgggtggggagggtcagctccttccagcgatcattttattttattttattacttttgtttttaattttaaccatagtgcacatattccaggaaagtgtctttaaaaacaaaaacaaaccctgaaatgtatatttgggattatgataaggcaactaaagacatgaaacctcaggtatcctgctttaagttgataactccctctgggagctggagaatcgctctggtggatgggtgtacagatttgtatataatgtcatttttacggaaaccctttcggcgtgcataaggaatcactgtgtacaaactggccaagtgcttctgtagataacgtcagtggagtaaatattcgacaggccataacttgagtctattgccttgcctttattacatgtacattttgaattctgtgaccagtgatttgggttttattttgtatttgcagggtttgtcattaataattaatgcccctctcttacagaacactcctatttgtacctcaacaaatgcaaattttccccgtttgccctacgccccttttggtacacctagaggttgatttcctttttcatcgatggtactatttcttagtgttttaaattggaacatatcttgcctcatgaagctttaaattataattttcagtttctccccatgaagcgctctcgtctgacatttgtttggaatcgtgccactgctggtctgcgccagatgtaccgtcctttccaatacgattttctgttgcaccttgtagtggattctgcatatcatctttcccacctaaaaatgtctgaatgcttacacaaataaattttataacacgcttattttgcatactccttgaaatgtgactcttcagaggacagggcacctgctgtgtatgtgtggccgtgcgtgtgtactcgtggctgtgtgtgtgtgatgagacactttggaagactccagggagaagtccccaggcctggagctgccgagtgcccaggtcagcgccctggactgcttgcgcacttgctcaccgagatgatgcagttggaggttgctgatctgtgcgattgctgtagcggttgccggggaccttaagagttattttgcttctctggaaggggcctatgcttgctaggcaggcagccagtgtgtctgtttttcttggtttgctgtgggaccttgcttggcgagggggaaaatctctgggtttctggagtgggagggttcgtgcagcagctgttgactggtacatgaagcattcttttatgtttgttgaagctgatgattgacatctcccgtgggtgtgccagttcttgtggagttaagacaggatttttggaagcaaggaagttagtgggtgagcttggggatgtagctcagctatctgctggtctagtggcctctaagctatagggaggggacagagccctgagctacagatgcttgagtgggttattgtgtcggtttgctagtgcagtctggtttttaagctctaaaattgaggtattttattagaagtggatttgggttgaactcttaatttgtataagggatatattttggttggggaaatagaactgagttgctaattcttattgtactcattactccatacaagaatgttatgttgaataataaaattggagaagatttcattttgtgtttccagggagtattctgtgtggggaactgtttccttacgtgaggccggcggcataagtcaaagatgagttttgtccttgcgaatcacacagattgagtctgtgttccccagggtgtgccgttacctgatttttaagtgagccagggcggacagcagcttttctgatttacagagttcttcagatttacaaatggacaatgacatcacagtttttagcactgaagccagtctcatgctagtaacagtgggtgagccgctcgagggactgggttctaatgaatactggtatgaacggggagtctctgcagtcgccagacaaatcatactcagccccttcccccgtagagcaacaagtggttcttttagagttgactggcagcatttcctgtcgggggaggtggggtttgatggagttagaaagctcgcctctgtgtacattctctcctgggctgttactttctgtagacgcacaaaatcagccccaatgtttttaagggcatcttagccaaggaagctggcttttgtgtcgccacttccaggcctgcattaagagagagcccaggcaccagggctaccactggaacctgcctcagcgtcaactgctgctggtctgtagccaggcccagcctttgagacgggtttactgtcaccagtagcctctcagtgccagccctgagctgctcctggctcagctgcccagagcctgcagcctggggaggtactcagcctctgggagacgagggccgtggactgggtggctggtagctcctgcgtttttgagctgtgtcctggctggctgctgccaatgaggtggacaccagtgtggtttggggtgcactggccacttcttgctgggttctgattttcttggaagtgcatctgccttccttatccaatagttttatccctgcattgctcttgtgaagtggctggtttggttctgtatgtagcattttgtacctttcctctggcaaaacactgtcagtttataaacattttttatatttccctcctttaaaaacagcttgtgtatttctgctataaaatgtgtcagcaaaggcagagtgacctaatagggcatgttcttaagcacagggactgtatcatgcaggggccaataaagctcaagaaaacgagtatctgcatcattgtgtgtctcatgtgtagtgtgtctcaaactccactcagatggactgttacccacactagtattttcttgagggcacacaggaagcagaggtgctggtcacaggtcagaaccaccagtgtccagcaagtagtttggaatcaatcaatcattcagaaataaatagctgaggagactgccttgtccccaagtctccaggaatgagtgagtggtgacttctggagggagcctgatgctgctgtgtggcccggagctgtttgtttgctctgcccctgcctggaggtggggggagcatagggaacag

SEQ ID NO: 74117 - DNA, 1060 bp, Homo sapiens
accacctcccgatggtctcttctctgtgagggaggaggcgggggggtctttgggaaatcccagagggactggacaagggtgtgatgggtggggacttggggctggtgggtgtgggtttagaggtccccaggcggcctccccctgaacgtcccagcgcccccagagcaggtgtgcgagcactgatgggatttcctgcatttctgtgttaagggaaacagatggccaagcctcggggggcagtgattctggggactggatcttcacaatccgagaaaaagatcccaagaatctcgagaatggagctcttcagccatcggacttggacagaaataaggtacgtctgctcactccagaatggccacgctgacctcagtctgcagtgttttggaggcacttgtgtgtgaagcttgctgtgggtgcggctggggtcctttgtggcagctgtcctggaattttgttgctaggggatgggcagatgaagagctttagttctgtctgatgatccaggtgttcacaccagggagtctggcctctggtctgttttgtgccactctattctgctctctgcagccctgctgttgagttaggatgtcccgatgtggcaatgtcatggggtttgggggtgacccgtgaaatgacttcatagctctgagggactgttgtgcatgttgcggttacttacatacatatcataattttgtgactgagttttaaggaccttataagtaaatgcattgcttttgatatttatgtaaaacaattttgattaattggttttatgcctgttaaatttatgaaaggccatatatttagggtcttgtaaagcatagtggtgtagtttctttcaggcagggtgggccagtggctgtcccctgttgatcctacaagtcccgctttgataagtgaacaggtgttaaatgtccaaatagaggttgcaaaagtagaaactcggtctctgtcctagacagccattggaatggccaatcttgacctgatttctatttccagggtttcattagtaaagtacttttctctctctctctctctctctctttttttt

SEQ ID NO: 74118 - DNA, 1071 bp, Homo sapiens
agaactggcatttcaacccaggtatcttgagaccaaggtgcccactctcgacctcagagctgtgccctaagttctaagcactgctggagggggtgactcgcgagcgtacacccactccggactcctcctctctgctcacctctcttactggtcctgctggcccccgggactccacggggaatgccgaatgcatccagcaggaggcgtagtaggagtgaattgataagccatctccatgtagaggcagaaaacatttggcatattacagtttctcctgttgtctcttttgaaattacagcgagggcttatgtttttaaatatcagttaaaaatacctttttcaaaacctcagaagtattgagacatgttaccattttccccctaaatactgtgtattggaatagattcctgcttggtgtttgtaaagatgcttttcttgttgcaggcagacatctggtccctgggcataacagctattgaacttgcaagaggggaaccacctcattccgagctgcaccccatgaaagttttattcctcattccaaagaacaacccaccgacgttggaaggaaactacagtaaacccctcaaggagtttgtggaggcctgtttgaataaggagccgagctttgtaagtttcccagggatcacagcgtacctcttcatgtgcggcttgacttggttgagatacatcctgttgggattgctttaatcactcttttcagctgtcttcctggtattattcatttttctttttctaagtaagtatgattgacttctttggtttgcaaatacattttaatttttaagtattaaaaatctccttattttcttttagatttctgccatctcatacttcattgaatctgaagaatattctccttaatattaaatgtggaatcataaatgtttaatatttatagaagatcaggccataaactgttacactgtttttaataatggcaaaggttagctggaaacaaatggctaaatatgtctttaaagtaaatgttttcactttccaggtggcatgtgttaggaaacaaaagattagaaaatataaccaagccac

SEQ ID NO: 74119 - DNA, 1015 bp, Homo sapiens
tttttacttaagctttatttttaatttttgtgggtacacagtaggtgtatatatttatgggatacatgagctgttttgatacagataacctatcttgaattgtattctgccaatcgattctatcatgtacctaatttttgtagtttattattcagataaggtggttttctgctcttaaactgggggggctggggaaataagaattttcacttgaaaaattcatgttctaaaactttgacataggtaggttgcagcctcctcagttcctggggctctcttctggagtctctctcgctgcccctgccctcctggcccccgccccacccctggctagccgaggaagaggaggattgggccttgcacagttgcacagtgcctgtctggagcacaccacagctctgtgaggagggagtgtgcaggttcagggcgattcccctcctggggtttctcagctccacaggccacttctgtgactccgcggtgaggctgtgcaagcgaacccgacttcagttcctgaaaactgaattgtttttagtcactttgcttaattatagactaaagagtttgaaactacacataagaggtgtaaataatgtgatataaatattgttggaaccctctgttgtggtttccctttttttcccccttatattctcatttcatttcaaagttttaaacagtaacttgaatgtgtattggccagtgtgacatggacgcgcatgttttactcatcagatgtagtaagaaaagatgtggctacttaagaacattgaggtgtgtgactttaaaagtctaggtgtgtcattaaaaagtgtgagcatcccagtgttctcctgggtctctggaatcatgaaatttgccactaacatcacttacactgtattttattaagttgggcctacccagcacttgcctgtgtgctaaatctaattattgtcatagttgggcttgtggacgggttgggggaggatgggaggggaaggaaggggcgaggtgtgggaggaggcatggcaga

SEQ ID NO: 74120 - DNA, 1105 bp, Homo sapiens
agtgcccttgtaaggctctgcctagtgtggctgtattagaaaggtcattcctggttcttacatgtgcttctcctttccacgtctcccactggcgtgctgactttccaaggggaacgtgaagctgtccgcagtccttgcccttgccctttcttttggagactgtgtgaatgagcagcagccactttaatgtgaggcagccatataaacaatgaactttcacttgctgccaggaggtcataaactcaaggtcaccaaatgaattctagcttcagctcttggtttagtaatgtaccaagtttggtattactttttgtttgttttaatcaggtttctgccctcatcttctatttgggaaattaaaactggtctgttggcatggctggtgactgagcggcaggcacattcttagtctctgactttctgcagccatctttgagtgcatataagtgttgggtaacagtctactgaatgtgctacaagtgtgcggagttgtgttcatctttaacttgttttttttaaaaaacactctcttggtaaattgggatctcctgttgaaaactgtatttgtttggcagttgagtttatgcctggagcccctagagcacatttaactggttggtggtcagttgtaccatactgaaaaaaaaaaaaaaaaacacatggaaagtatttctaatatattcattatgggatgtgtgagcccttaattacctgaaaatctgaattgtctttcctcacaggtagtagtcctctcaggtgtttcctttttaaaattgtaaatggaatttcacatatccaaagaaattaggattcccagtgctgtcttctccctctagtagcatattttgtgtcttagctttctgttgttataacagaaagactgggtagttaccatagactgggtgatttataaggaaatgtatttttcacagttctggaggctgaaaaggccaagaacatggtactggcatctggcgagggctttcttgctgtgtcatgacgtggtgggaagagcaagcaagctcgtgcgaaggagaaaggcaccagggacaggacttgctgtataacgacccactctcacgataacaaacctgttcctgaagtc

SEQ ID NO: 74121 - DNA, 2923 bp, Homo sapiens
ctgtaaacacacagccaggcttcctcctaagtatgaccgtcataagacatttgaaatgtagtgccgtgactgaaaacaattgagcaattgttcaggaaaaaaattaaatgcctctcgattaatcacccaattgatatgtttagtgcagtactttaagtggaagttggatagataggttgatttttaacacagtggatgtttgtgtagcgttttaggagccaagggggatcatggctaaaactgtagtccttgtaatccctggccgctcgttagacctcggattacgctggccatgaccttccggtgtgggctgagcactcagtgtctggcctctggcctgtcctgctctcttggtaaccccaggacgcatttcccgttgggtatatgtccaccacgcaagccttggttcattttgtactaagatggttggtgggttttgtgagcttttgcattgtttgatgtgcagcctcaaacaaacatggggcaggggctctgcgcccctgtgtgcaggaggtcactgtggctatctgctcgtgtgtcattgtggcgatatgtgcgttgttgccatggtggacacgctgtagcactgtaaggcctgcaaaccagaaatgggctgactggctttcaacagttctcttggagagcagctgctcggaactcagtgtgtctcaccttggagagctgtggctgggtggcccctgatgggccctgaggctcacgtcactcatgaggcaccgccgttgctgcagtgttgtgtgtgtgacccacctcacatgcaccactctggataccctcttctgtgtcatctttcttctcctcattctctttctttacctccttttcaggcctccctctcctccctgtgcttgttccttttcctagtagttcagcttcttcaaaggactcatagatttggagggttggcctggcgttctgttccttctatggaccatttctgagggaagatgtgtctgcagcagtggtgtctcttagagtccttccttgctctgtggggttccaggctagtgcttgtcaccggggtgccattggcattttgagctgggcagttatttgtggggagatatgcagcgtccctgtcttgccttgctaaacatcgggattgcttctcagtttcctgacaaacaggccctgtggatgacaggttactgccccctttgagaactcagctgttcacacgactctgtactgtgtagctgttaggatgagagcttgagctctgacagctagccttcttagaaatgtatactatatatgtatgtgtaactaatcaggtggttaagagcttttagaggctatttccagggtacagcatgtatgtgacaaaacaggctgcttattgttttctggaatctggttagattgttattgttttggtgaaggcagtactattcatgaagatgcatagttacggtatacgtttttttttctgttctgtgatatagctggttaacattttagtaaaaattcatttgaattcaggaacttttggggattgggtatggagaaaagtgaatttttgcttagacaaaagtgatttttcgataagtctgtgtatcctaacattccaataagtgcttagattttaatttaccctcattatacaaaagttggcattttttccatgttttctaatctagctgggtgattgttcttattgtacgcttgctgcctttcatagtctgatgcgcatgtgtaggtgagacctaggaatcttatgtcctgaacctgcagagctgtggtcaccaccagcctgatgctggacacagaaaatagatgagtccctggaagacagtgtggtctataacattacacataaaattgacaaaggagttgtggtgctatgagggactaaagtttcccttttctcttccttctctctacagaacctaaaggcagacccagaagagctttttacaaaactagagaaaattgggaagggctcctttggagaggtgttcaaaggcattgacaatcggactcagaaagtggttgccataaagatcattgatctggaagaagctgaagatgagatagaggacattcaacaagaaatcacagtgctgagtcagtgtgacagtccatatgtaaccaaatattatggatcctatctgaaggtaaggcttaaaataacgtgcttctccgttctgcagcacttggctgaggtgccagcagggaatgggaaggactctgataggacaaagcacagcaggtttcagagcaaggagagatgttttgaccttcgtgatcaaaagaacctggctttgatagttccatcatctcaaatgtctcctatagaaatatttgtggtgaaagtgtttgatgttctaattctcttttgaataaggaagagtatttctggtgggactttgtcattaaaactgtttcttattaagttattataacagttattcacctaattttaggactgcttatgattagtattaaaaactcataccaacttaagaatgttaatcttttgatattctcacttaccagctgtggtttaatttaatgctgttaaaaactgctgatgagaattgataatgttggttagttagctagcttatctacgcttgacttttaagaatgctaggcaaattggtaattacttaaataaaacggtagttataataatatgacacaaaaattgtcctgcactgccactctgttctttaagtgggaaagaatagtattaaaaatgtttttctgatcctgcatggaaccattttaccattttagacatcgtagaacaatcctgttacaacactaagaaggcttatgaccgttcttgtgtttcaagttcctcaaaatatacctgtttcactgaacttaaaaatgttgtaacctttaaaatggggttttagaaatcataagaattggtggggaaaaaaacgctctgaaa

SEQ ID NO: 74122 - DNA, 1034 bp, Homo sapiens
acttaaaatcttcttcctgaagccaagtctggcactttttttttttttttttttgagatggagttttgctctgtcacccaggctggagtgcagtggcgtaatctcggctcactgcaagctctgcctcccgggttcacgccattctcctgcctcagcctcccgagtagctggaactacaggcgcccgccaccaagcctggctaattttttgtatttttagtggagacggggtttcaccgtgatctggatctcctgacctcgtgatccacccgcctcggcctcccaaagtgccgggattacaggcatgagccactgcgcccggcctagtctggcactttttgatctgcacgtgtgtacgttaaaaattgagatgttgccctgcttttcccgaaatatgcctgtgtgaaataggctcattgctaacaactgggacagtgcagaaaaacagagagaacatactgttaacatctcagtgtacctcattccacatgttttctttgaatgtgtgcaggagtacgcctgtccctcaaccaaaagggcaccaattcctgtcattaattttacattgatgtctacctaggtagtttgcagctttaaaaacatttttggaaaactttggacatatgaatcttttcacttgtctatttccctaggataaactaactggaagtggggtttttgccttttgcttattttcattttcaggtatggaacatcttttctgatcacttttccatctttttagcgcttccattcttcagatgatatgcttttttgtcattgttttctactttttgctgcttttaatgtgatgtttattttgataatgatttttattaccttcatctctagctgtgttaatgctttttggagacttaaaaggtgctccgaattgtctgtaatttctttgagagttgagagtatttttctgaaatgtttcccctctcccttgggaattcggaaatattttccttttgcttgttttctttttcaccactgtctttccttgtagaggcgtctccgcatgcctcggtg

SEQ ID NO: 74123 - DNA, 1152 bp, Homo sapiens
gacagtttcttgtcacttgatgatttattttcctatctcagcctttagttggaatttactgggtgtgcctgtcacttgtgattcagctgcttctttatgtagcattggcagttgtggcttagaaaggacaacacagctgaggctgcaggtcacaccataatgggaacaggggagcacttactatgtccagttttaaaaaaaactttgtttttgccccaggaaaataaaaaattgtcttattttagccccaggagaataagaaaacatcttatttttagccccaggaactataatatgtatgcatttttctgtattttttacaggtgagtaaactaaggcctagagaggcaaataacttgtaagaggtggaggtggatttgaagccacatgcacctggccgtagactccacgttcttctcttcatgtggtgtcagctcctccagtagatttgctgctggagcgggaagttagagtctctctgagttcttaagggagagaggggagggcttggtggcccagctgcataaatagcctcatctaccatgagggtttagcagtagtttgctctgtgtggataagaactacagtgtgggatcagtttactggagatgagaaggtgaatgaggctgtgatattgaagtataggaaaggtgcttgcacatcatgtattttctcagtttgctcctttggtcacaaagagttggtaataaggcgaagtttactaaattgatggctgaatacaactgggagccttgcagagaaaaccatttcacagctattgattttactcttaatcttgcctccccagcccatggcgtgtcattacaggaatcctggacaagaggtgtctcagtacaaatactggaaaaccagctgactgcaaacaacctattgactttttatcatagttggtcattaattttgttttaaagaaatagggtctcattctgtcgcttaggctggagtgcagcgatgtggtaatggctaactatagcctcgaactggtgggctcaagcagtcctcacgccacagcctcccgagtagctgggactataggcgtgtgccaccgtgcccggctcattgtttaaatttttggtggagatggggtctcattatgtttcccagactggtctctaactcctggcctcaaac

SEQ ID NO: 74124 - DNA, 1171 bp, Homo sapiens
cggctgaagattaataaaggaaacaatggctgagctctgttctagaagaatttcttttaaaggcagagggcatccagacagattagaatgttcaaaagcatggtgtctttaaatggcacagagtgtttggaaaaatacaaggaatccaattctgccggacttaaggggaaaggaaagagaacaagacacatatgttgaagaaggtagtccaggaccagatcatatcaggtcctaaaataagtgctcccagactaccttgtcattatcacccatgggaccatgctgagtggtttgggctttagcctattaggtgatgtgacatttctgggaaatttgaattggcagaatgagacccattttgggcgttgacagtttggtggttagactggaaaggaaggaggctggtcccccagctaggtctcattgcggtttcccaggtaaaagctgatgccagatcgaactgtgccaccagtgggtggggaggaggagggatttgagggagggagctgtgggggtgagcggggcaggcttcagtgatgatggtgatggagggagggaggtgccctggggcgaatgaacgcacccacgcacccaagtccttggggctgatgactagcatggaagatgaagatcctatgtagataaggaattctgtttcagatgagtggattgtgggcagaggaaatgaacaggcagttagaaatatgggtctggagctggtggaagagttcaggctagagactgagtctggtgactgattaattaggtcatttgtgctagcaacatgggacggctgttatcactatacagagggtgattgaagagggagtagcctgtgtttcagatcccagacttcatcacacttggctactccacctagctttacctgctaggcaaagcaggttctgctctgaatgtgagccccagagtgtccacacggcagcagcattggctcaggtggatggatggggtgcgaggtgctgtgggtggctgatcaccagtgggaacagtgtgtcagctggtcgtaagtcaagagtagcttgtaatttcttagacgacaggagttccttttaacaaatttattagacaaatcatgtgtctgagctccacatacctaatatatacatcattttgaccctgcatctcttgtccagtttagtggtggtcactt

SEQ ID NO: 74125 - DNA, 1048 bp, Homo sapiens
tggtgtgatcttggctcactgcaacttctgcctcctgggttcatgtggttctcctgcctcagcctcccgagtagctgggactgcaggcgcccgccaccacgtccggctaatttttttgtatttttagtagagacggggtttcaccgcgctagccaggatggtctggatctcttgacctcgtgatctgcccaccttggcctcccaaagtgctgggactacaggcgtgagccactgcacccagcctggaacccttttaaagtgataaacacctcagtactttttacatggcctgttgcatagatgatttcttaatattagctatagcaatcaaatgagagtgtttttgaaattccccgaaaataattcttcttgagtttgtcattttatgtcagagtagtagtaattccgttcctttctgctggaggacttgtgatagtaagggcctttggaaaccagcagaacagccagttgcttatcggctgtggtgtgcgagtcccgtttcctaccctggccccgttatgcgtacatggtctataaaagaatcatgtgaagtggggggttgaggattgtacagaaatgggaaccttcacccagaaaaatatcttcactccatctccgttaaagtatttttaaagcaaaagcatctagaatcccagtacttgagtatgtagttcttcctattttatttgccagttgtctgcgtacacacatttccttaagtaattgcagtcataatgtaggtacacgttgatattgttcctcattcagcattgtgtcataaatatcatcccacatttccatatggttttcatgatgattgttttactgtcttaactgacttctgtgcctcctttaatacaaggcgtgtcacatctttttttttttttttttttttttttgagacggagtctcactctgttgacccaggctggagtgcaatggtgggatctcggctcactgcaacctccacctcccgggttcaagcgattcccatgcctcagcctctggagcagctgggattacaggcacgtgccaccacacctagcta

SEQ ID NO: 74126 - DNA, 1036 bp, Homo sapiens
actgcaacctctgcctcccgggttcaagcaattctcctgcctcagcctcccaagtagctgggattacaggcacccgcgaccacaccaggctaatttttgtatttttagtagagacaaggttttgtttgccctgttggccaggctggtctcaagctcctgacctcaagtgatcctctcgccttcgccttccagagtgctggggttacaggtgtgagccaccgcgcccagccctctaatagaatataaggccactcagtgtcacctggaggggttggtaaaatgcagactacaggctctgccctgctgccctggagtttctgattctgggcgtctcggagggagtttgtgttctgagcaagtgtcctggtgtattgccgcctcgaggatgacactttgagaaccactgcgctggagaatcaaaaaagaatcctgaatcctcattgctccccactctagtgaagcacacagtagccttgcccatttgaaaagcagagcaagctacaatcagtgcttgcagcctatggcttgtatttccaaagactgactttggaaccgctgacctaactttgggaattgaataggcctgtaattataagactcattagagcctttgcgattttagcatgtatttataaacctgttgggggcagaggatgtgtgttccatgtctttttgaccttggaaccttatttttatttttagaaatgggaatctcgctatgttgccaaggctggacttgaactcttggcctcaagcagtcctcctgcttctgcctcttaagtagctgagattacaggcttatgctactgcgtgccacttggaaccttatttcataaggagtgcatctctcaagatctagggtgcagtagtctttttggaaaaccccgaactagaacaaatgctctgaacctgataattctcaaatttgtcaggataacttttcttaactgtggtattgcctgctgctcctgacttcctgatcagatgtagacgccagcctaaaactcagggccttttttagtacccagcttcctcc

SEQ ID NO: 74127 - DNA, 1037 bp, Homo sapiens
atcatcctgtccccctcgttccccttctgtttttcttgctgcttggataaatagacctttgctgagaatgccccttgcatcaggatagtgagactggtgtctaatggccagtctgggaacatggggagcttttctcaagtgctctgctccaccctagggaagcctgtgcactctgggagtctgggaaatgaaggcaaacacaggacagctgcatttaattgtggcttaagtgctcttgtacttttttttcttgttagtgtcacatttccacgggttcttttccgttccttccttgggaggtgcctgcccagttaccctgttaccatctgcaccctgggggaaggttggtgtgtcactgggtgtggacagtcaggacatccgagacgtgggttcggagagcaccttggggacttgctgaactgtggagtgtgctctggtgactgacagcattggactgcacaggggagcctgcagagtatagtgcccggagtcgttggaggcagagttcagagcctcagtccatcctgtcctcaagaggtcggctgcctgctttggggcatgtgctctaagaaggttgcagtgactgaggacacagtgagcaaaggcacatggttggaaagcggtgacacagcttctggtgggctagatctagatcggtcctggagctgaagaggcagtggggtgcctgtgggcctgggggaggccttgcatctgtagacagccggaagtatggcacatttttgagcagatgatctcctgttctttggggctcctgctttctcaggtgtggggagtgctgggtgcccctttagaaggcattgcagcacttcagggaagaggaagcccagggatgcgagtggggagcccaggtgtcagtaggacagcctaagtggatttttttagcattcactcagcttcgtggcttgaactctcagtgaacattttatagtatctcattactcctcttgctttatgatcctttttgctgatcagtgctaaagagtaataagtactcagttactgttagttactgtttt

SEQ ID NO: 74128 - DNA, 1049 bp, Homo sapiens
tgtgctggttactgctctaagtactttgtaaatctaacctagttcaatacattaggaatattaagcagggactgaagtagatactgagcctcttcccttcaagaaggtagccgtgcctttgtgttccttgtttcagaaactttatttatttatttagagatggagtctcgctctgtcacccaggctggagtgcagtggtgcaatctcggctcactgcaacctctgcctcccaggttcaagcgattttcctgcctcagcctcccgcgtagttgggactacaggcatgcaccaccacacccggctcatttttgtatttttagtagaggtggggtttcgccatgttggccaggctggtcttgaactcatgacctcagacgatctgcccacctcggcctcccaaagtgctgggattgcaggtgggagccactgcgcctggccagaaactttagcgctcaagtagtgaaagaccaaaaccagatgctgcccagttcctaaaagatagaccccagttcctaaacgacacccccttctttagggggttgaggaggaaagcccacctacttcctacctctaggagcctcaggtggggaagggcacccgggactggagaggaagaagtgggccagcccagtaacaagagacggttttttcagtcttttttagagatgaggtcttgctctgttgcccaggctagagtgcagtgatacaatcacagttcaatgcagcctcgaactgtgggcctcaagtgatcctcccaccttagcttcctgagtagctgggactacaggtgtgtgccacaatgcctggctaatttttatttttatttttgtagagacaagggtctggctgtgttgcccaggctggtctcaaactcctggcctcaagagatcctccctccacagcctcccaaagcactgggattatgggtatgagtcattataccaggctgagagacagctttaaggaatccccttcagagggtggaggcctgtgtggtcctggagtgacagtggtcagcatcctgctggaatacagctttgaatggatac

SEQ ID NO: 74129 - DNA, 1040 bp, Homo sapiens
tggatggcagtgaatatggaccatctgcaacacgcacagctacttttaccttgcagacgatgccatgctttccaacgagcctcagaaatgcatttttgtatttcctagggatagcttcatctcagggtactgctttgtgcagcttcaggaggggttggagcactccgtattgtgttcactcgtacgctagaaatgcaactggtttcttttgacctagtattataatagagctgggagattaacttgatgtttaaaacaactttaaatcccataacatgtcagacctcattcctgatttggaaaagactcaccattgacttgtaaaattttaaaaacccacatccccaaataatacagcaaatgtattcatttttaagggctccaggtggacactgcaggcaacaactatgtccgggaaaatcgtaagtttgactcctttgttttagtttctttgtcccctttcttcttccctttcatgacatttttcactgagattgttttcctctctttttagggagctcttgaaattcagcccgatcagatgcaggtagaagacatgtaagttgctttcagggatcagagtcgtctttgagacaagcttaacatttctcctccacttcctctgcagaccgtgaacgccatcctgatcgtgatcatggtcccgatcttcgatgctgtgctgtaccctctcattgcaaaatgtggcttcaatttcacgtaggtgacgggtgggttgggttggttgaggctcccttggtcccagggctttgcagatgggctgcgctcagcctgcagcccttcccgcaacctcgcctagaggatagggttttgaagaatgaagaaaacaaatgttcgtgtgctgatgtttctgaaaatgttctttaaaataaaaatgctgtgattgacagcctgaaaaggcctttaatcaaggctttcttctctacgcagatgataggaatggtcattgtaatctggagtatcacctgaaccatagtttctagaaattaatgtaaatatacaggccaggcacagtggctcac

SEQ ID NO: 74130 - DNA, 1035 bp, Homo sapiens
tggaaccagtgagggtatgatcccggatttccatgtgagatgtcctctcctgaggaaatgctgtggataatcctcctcagactaacaataccactggatgctttatttcattgctgtctctatgtggaaggattagtgtagggaataaaatgattaaatgctagtttcctgctctagacagtcaccggtaagttactgaatctgcgttggctgcctttcatgccactggtgctcctttgtggctatggaccagtggggggtgtatttcaatcctgtgcttgtttcttttttgtcagagtttctttggttatcccctgagcatcttcttcatcgtggtcaatgagttttgcgaaagattttcctactatggaatgcgaggtaactgtattggccgtttctcacccttcagggaagagcgggagtggccataaccagtcctaactttgtttccccctcctcttccacctgccctctgcaaaagcaatcctgattctgtacttcacaaatttcatcagctgggatgataacctgtccaccgccatctaccatacgtttgtggctctgtgctacctgacgccaattctcggagctcttatcgccgactcgtggctgggaaagttcaagtgagtggctggaaatttcttgttcacaaacaagcgaaaaagtaaatgtaggttttgtagttgggaatggtggaatctgggaatgatgaatcaaagaacagaaactcttaggagaggccaggtgtggtatggttcatacctgtaatcccagcactttgagaggctgaggcaggagtttgaaaccagcctgggcaacatagtgagacccatctctaccaaaaataaagaaattagcaaggcatagtggcatacacctgtggccccagctagctgggaggctgaggtgggaggatccgcttgagccccagaggtcaaggctgcagtgagctgtgatcacatcactgcaccccagcctggatgacagaacaagaccctgtctcaaaaacaaattaaaaacagaaacaaaccctta

SEQ ID NO: 74131 - DNA, 1050 bp, Homo sapiens
caacacaagggaccccagagtaatactagaaacattaggctactcaaatatgcctctgaggtttactagcagggaaccaacgtaaacaggactgcaccaaagtaaacagaatcttgtgagagttgatacttgagttcggtctgaagtctcgatgtaaacaccacttctgcatttgagctttctaagatagcaatcctgttgacacaggtacattaagataagaaatgctgactgcagtgttacacccagtagatagctctggattctgtcaaagagtttagcaacctctgccctgtaataataaaagcagttcttggaatacacactttcagaaaacaaaatgccttcttggtaatggctgggtactgagtctcagatttacacttcaagggattgcctttcccataatttagttaggtgtataatgattgttaagacctaagctttctgaatgacctcttttctgtaactgtagtgggttggagtagagaaaaactttaccactattaagcaaataacaggtacaaaatattgagcaaagacaaaaggacgactctggaaagatgaagtctttccctgcaaataaaaatccggggaacacaggaaaggaaggtttgtgatgaagccctgggaacacagggaaggaaggtttgtgatgaagccccgggctctctctgctggatttgggtgatttgggttttcagagctcgctcctgcttccctgaagagggccaaggataacagggacctttctgtgacttcacctctctcgttggctttgggaggcaatggtaaggccatattacccaaagtctaagtaggcgaagcataacgtgctgttgccgtgtcctcaagaacgcacggcactacagcaatgacgctttgcaccttcaggctggtttgcaccgagcttgcaaaacacacgcttgcccgaccagcccttcctattcgccggacactggcgctttccctgcctggtgtgaaagacagcccaagtccacagcaggtgcgctgcctcaccacggacctcccaggacacagaggccatgc

SEQ ID NO: 74132 - DNA, 1116 bp, Homo sapiens
ttcactatgatgacgtcataccagggtagggtggcccctaattcaatatgagcagtgtcctcacaaaaagaggaaatctggactggacatggtggctcgtgcccgtaatctcagcactttgggaggcccaggtgggaggatcacttgagacaagaagtttgagaccagcctgggtaacatagcagaccttgtctctacaaaaattttaaaacttagccgacatggctgcacacgcctgtggtcccagctgcccaagaggctcaggcgggaggatcccttgagcccaggagttcaaggctgcagtgagctatgatcgtgccactgcactgcagcctgggcaacagagtgagaccttatctcaaaaatagcaacaataataaaaatgagtaaaaagaggagatttggacatagactcatacacagggcaagcgccacgtgagtatggtggcagaggtggaggtgatgttcttacaagacggggaacaccaaagctgggcctcaaagcaccaggagacaggcccaggacagattctcccttgcgtcctctgaaggacccaaccctgccgacctccatctcagacttccggcctccagaactgtgaaaggccacatttccatgttgtaagccacgcggtttgaggcactctgtaagacagccctggcaaactcctacactgaccaggagctgtccccaggctggagccatggacacccaagctgagggaggaactgtcttaaaggaaggtgaaggcaggctgtccagcacacgacagatggcgacagactttgcatggaagaggtacaggcaaggcagctcatgacccatgtaggcgggaaaagcagccctgtagcagcaggggctggcgacaggtaggaggtggctcattgccaaggagccggggccaggctgcggctgagtggttttgtgttccatgtctctcttgtgagggtgctgggcagaaagctcccccaccgcctcaccagaatcctcgggggtcctgagggaggtggagcccctcacggccttcccattctcttgtgttctgggaggaccaccaggcgtctgctgagactcaggtcagctgcagtcaagccttggcccagtggcccacgtgc

SEQ ID NO: 74133 - DNA, 1036 bp, Homo sapiens
ggggctaataaaccttaaggcaaacatcagcatgtctgggagaagagcctggcgctgagctggatcgtctagtcataaatgcctcatccagaaaccataaaactcaagtcaccatgtagtaagataaatagaagtctagaaagagcccatgtcagataaaggtaagtttggaaggcgaccaagccttgcttatgacaggagtggagagaggagccatctctaagttgggaacatcctgcagggaaacatccgtatcaattaaatcttcccttcgttatgtacaaagccaggtggagcattttcttgggaattcgtattgctattctgcagtaaatgtggggttttttttcccataggtcctacttattctttcttttaattgaggtaaaatatgcctaaaatgtaccagtttaaccatttttaagtgtaaggttcattggcatcaagtagattctcattgtgcaaccatcgccaccctccatctccagatactcatcttcccaaactcacactcagtactcattaaacaggaactccctacttccccctcacaacactgcttttgaggcaacactggaattaaaactctagttaagaccttgtcctggatattagccaggtgggaacaaatagagccagacccttgcacagaggacagctgctgagagcaggactgcaggatggcaaggtaacctgagtgacgagaagcagccatccagaatggtttcatcatataactcaaagcagtgactccgttccaagaaaatgtgatctccatccatgggggatcgtttgtataaaccatggtacatccacacagtggaatactgtgcagctgtaaaaatctgctcatttaatgtatacaatttggctgggcgcggtggcgcacacctgtaatcccagcactttgggaggccgaggtgggcagatcacttgaggtcagaagtttgagaccagcctggccaacatggtggaattctgtctctaccaaaaattcaaaaattagccaggcatgctggcgggcgcctgtaatccc

SEQ ID NO: 74134 - DNA, 1051 bp, Homo sapiens
tgtgttgcacgtggcaacattgccttaaactctgtaacattttgttacacttggtaacattgtgtcacacatggcaacatggcattgcatatggtaaccttgtgttgccctcagtaacgttgtgtttctgtcctcaagatctgccccctggaggagaagacgagcgtcttaccgaattcccttcacatcttcaacgccatcagtgggactccaacaagcacaatggttcacgggatgaccagctcgtcttcggtcgtgtgattacatctcatggcccgtgtgtggggacttgctttgtcatttgcaaactcaggatgctttccaaagccaatcactggggagaccgagcacagggaggaccaaggggaaggggagagaaaggaaataaagaacaacgttatttcttaacagactttctataggagttgtaagaaggtgcacatatttttttaaatctcactggcaatattcaaagttttcattgtgtcttaacaaaggtgtggtagacactcttgagctggacttagattttattcttccttgcagagtagtgttagaatagatggcctacagaaaaaaaaggttctgggatctacatggcagggagggctgcactgacattgatgcctgggggaccttttgcctcgaggctgagctggaaaatcttgaaaatattttttttttcctgtggcacattcaggttgaatacaagaactatttttgtgactagtttttgatgacctaagggaactgaccattgtaatttttgtaccagtgaaccaggagatttagtgcttttatattcatttccttgcatttaagaaaatatgaaagcttaaggaattatgtgagcttaaaactagtcaagcagtttagaaccaaaggcctatattaataaccgcaactatgctgaaaagtacaaagtagtacagtatattgttatgtacatatcattgttaatacagtcctggcattctgtacatatatgtattacatttctacatttttaatactcacatgggcttatgcattaagtttaattgtgataaat

SEQ ID NO: 74135 - DNA, 1325 bp, Homo sapiens
ctgtgtctccacgtctggtgtgagttcctgtggctcagttttcctgccattgctagacaagtcctgcctaccatgggtcagaaccacacacggggagctcccctaattccttgctaagctcaccagaccttccgggaaatatcaagcagtgaccacatagtcacgttcttccccaggctgtctcagacgcctggaacattcttcttcccatcccagtgtgtccagccttctttctcaccacgttcttacctttccttacttatccagaatcagcagacccttcttagctgcttgcaagggtggtgcagggttctggttcactcaccgtgctgtctgctcctaacatctagctctccagcacaccgcaaacgctcacttcatcccaggatagcaaatcagtttgcccatggctgtctatacaattcaatgaaatgaacagttgggtttcaaaaactggaatagttactgcatttttcaatttttcactgaattcaccagattggcctgttagttcagtgtagtgcagcacaaatcccagtgactaaacaccttggaagtaagaatccttgacctggatttggaagacctgggctgtgatctctggcgttttgcttattggctcttcaaacttcaacaggcccctaagttttccaagcattggtttcttcttacataaagtaaaccatcatcacaagtgccctgaagatggctgagatcatggaatcaagtggtgtgcaacagagtgaactttgtggtttctttttgggcttaagttcctggaaggcagggattgtgagtagctcacgcgaacgggctttttagtgcctgcaaactgaaactgagcagatggtcatggtgattttcttcctagtggaactgaaaatctttgctctttgtctaggtcaatgctggcccactagcatatgcgcgagctttcttagatgatacaaacacaaagcgatatcctgacaataaagtgaagctgcttaaggaagttttcaggtaaagcacactgaaagcatctttttctcttcgagtattgatcatttctgtactcattcgggaaggagatgctgctggttggactcatgccttatcctctgcgtgcctttgtttctcccgcctgtaccattccaggcaatttgtggaagcttgcggtcaagccttagcggtaaacgaacgtctgattaaagaagaccagctcgagtatcaggaagaaatgaaagccaactacagggaaatggcgaaggagctttctgaaatcatgcatgagcaggtgagggccgcactggctccaacaacttggagttcttggttaggggttt

SEQ ID NO: 74136 - DNA, 1052 bp, Homo sapiens
tgaaaccttgtctctactaaaaatacaaaaattagctgggcgtggtggcacacccctgtaatcccagctacttgggaggctgaggcaggagaatcacttgaatccgggaggtggaggttgcagtaagccaagattgtgccactgcactccagtctgggcgacagaatgagactcttgtctcaaaaaaaaaaaaaaaagacgtacttctttataatacagatacaaaggaaaagagtgggtgtgaaaaccttttctgatttcttcatgtcatttgctgctatggtggttactacatgtatctggctttagtgtttgtatttatgagacctgcaataaaagcaggcaaaactgatgtaccttttaataagcaccggtacagagttcagtcacacaaatgacacttttatgactcgtgtgctataaatatgatgtaggaggtaaatggtcttgcttagatagcgttttctgctaaattgagtcacaactgctttacaaatgtttatttactttgaatctgtaatctttgtaggcattagtcctgtagtgaaacattagggctggtaatgaaaaacacaggccttgcccttcatttacagtattgtgaaggatataaacattttcaaaagcaactatagacccttaataaaatattagtaaattgaaggctgggcgcagtggctcatgcctgtaatctcagcactttgggaggctgaggtgggtggatcacctgaggtcgggagtttaagaccagcctgaccaacatggagaaaccctgtctctactaaaaatacaaaaaattagccgggcatggtggcacatgcctgtaatcccagctacttgggaggctgaggcaagagaatcgcttgaacccgggaggcagaggttgtggtgagccgagatcacgccgtcgcactccagcctgggcaacaagagtggaattctgtctcaaaaaataaaaaaattaaaattaaaaaaatatatattagtaaattgaatctagcaatacataaaacagagaaatgcatcatgaccacgtagggtttattctggga

SEQ ID NO: 74137 - DNA, 1055 bp, Homo sapiens
atttgcccttttaactttgcatggacagacttcactctccttccctcctactctgtggctctctggttggctggtctattcctgtgggcacaagaggaaagcaccttggccaccatttttgttattccattggctccgagttatgtggtgaaatgtactatatagcctagagcatgggtggttggtttttttaattttacagtttgtatgttaatgtatcctcaagttcctagattaatgcttttcatgggagactcttgtttccatataacaaaataaaaactaaactgggatagtggcagatgctggataatccatgaatagtgtagaaacctgggatcatgtgcagcagaaaaatctctgacttcaggatctccgttttcaaggcttgatttcagaataccctgtgttcctctttctccctaaatgtagaagtctcaattcaagtttttacttctgttttattttattgtgaacagttatctcaaaatagagtagtggaacatctcatgcccttcttcacttgatcattttgcatagctgacgtggtccaactgacttaaagctgttttccagtgactctaagacgaggaaaggtcccaaatgggctgtcattgcttaagaaacacatccttatcccagacattgatcctgcctctaagctaacaccatttcctcttggagaatcagagtgcccaggcatccatgccctctgttgatgcagccagccacccaccccggggcctctggggtgggaaccagctaaggcagcctgtctgctcaccattatggctacgaagctacacctgggttgtgtggggaagctctcatctgagagatgtgttcttccctggccagagtgggtgaggtgacagcttgaaggaaacagttctttttgaatcatacatttctcttatattggctttgcctttgtttttcttagtatctcagcacgagtcatcctaccaagacaaattttcacttattgttattttactattactttgatttaatacctatttctcagtttatagtttaatatttagagattgcat

SEQ ID NO: 74138 - DNA, 1053 bp, Homo sapiens
atgctaaaaagtacacattaacgtgacagttttgactataaatttaatgtaaaccacacattggccataataaaaaggaataactaagagaagtaacttttctatcattctaagaatttaagattctttaatgacatatgtggcctaggtctcaaaaaaagaaaggaagaacttactaagcttcagctgttcctctgtgaattagttttacatggctgccataacaaagtacccagactgagtggcttcacacagaaatgtatcctctcacagttctggaggcagaagtccaagattgcagtggcagcagggccacatctccgaatgtccttggggagaactggttccatgcctgtccctgagctctttgtgttgccagcagtcttgatgttccttggcttgtagccacatccctccagttcctgcctccgtggtcgcatagcatccttccccatatgtctatgacaccagtaatgttgaatttagggcccaccacacaccagtatgacctcatcttaactaattacacctaacagagcctgtttccaaataatatcacattctgaggtctcagggaggccatgaattttggcgggacactacccaacccagtatacccagtgaataagggacgaaagcagctaatttataagatttcttattgcccttgccgtgtctggttttgtgtgtgtgctcagtaacccgtcatgtactttcctgcctgttcagtgcatgtgaccctgctttgtactgcaagagggacacacgtgggaggcatgaactctgcctccgaggactggacagtacataactccactctccaacagacttctctctgcacacatcagagtgcatgccacgctgctaacattcgttgacacacgtgcacgtggagcagcctctgctggtgtgtgttggctagtagctaggggtgagggtctagacgagggcaccacgtggtggcgctcaccccgctgacaggcacagaaccgcatgcattagaaccttgcagggggttcgcttctaacagctgtctttgatctttataacacc

SEQ ID NO: 74139 - DNA, 1008 bp, Homo sapiens
ttttaattaaaaaaaatacatgtcttttgctttttcagaacatatataatccaaaaagattagtgacgttttgacagtcgtcagaacactaaccattagtactgcattggagtgatgctcacttttttcagagtagcatctctaaagtactttctaaaaataaaaaggtccctgctttggcctgatttttgcttctggatcatcaggtgctttgccgtgaagtgtgcaggagctgccgcctgtctgtgtctctggctgctccactgtgttcagtcagtgcatggccatctccctcgtgccatgttctggcttcactaacactccccgtctcgctgcagtgtaacacgtctaacttttgcttctatcccatttcactcatgttgcaggaaccaggaggggttgggacccatagttcatgatcgaaagtctcagacattgcctgtttcccgtaacagaacaggaatgatgcatgccagattgcagcagctgggcagcctggataactctctcacttttaaccacagtaagtcccatgacatgccatcgtaacagccagccatctcatgtgccatctcagaggggagagccctaggccacacctaccacatcaccaactcaatttttcttctagctcaaagcaagtaggatgaagagctcatggcacagttcccttccttggaggagcgtcctcagcatttgggagtgacacaatgtggaacgtgctcaactacagcactaaacctaaaagtgcctgaccctttctgcatccctaaaacaaaactcggctgggtccatagccagccgttctcaagaattctaaacataaaatttggattcatcacctagaaccgacttaatgttggctttcccctgcaactctgagaacattcgggatggatttctttcaccccttctgatcctgtgcatgtaattgatcaagcgtccacattctgacattccagctctgaatggatgttaatccttgcactactgtgaaaacataaagcc

SEQ ID NO: 74140 - DNA, 1034 bp, Homo sapiens
tcgaaacgtgttgttttctgtgatgcctggctctgattgtgtgggattggtcatcagtggcggttggcagttggggttcatggaagcggccatggggactgatggcaggcccttggattgccaccgcagagcctggcagtgtctttggtctgcattcctaccggcgaagtctcatttcacctcacgtgttatctcttggaaagcattcctttagcgggctgtgtctacccttccatcctctcgtccaaactccccctccttctctgttctgtctccttcccatcctcttctccccagttcttcttcctatgttccttcctcagtggtttctcttcctctgtttgactttccaaggtcattttgactgttcctgctcccaactacaaagatactaaaatctcacctaaccactcttcttctttcttaatgaaagaatgttttcagtccatcccaaatttgtgtggacttccacaaaccttctctaaaatggagccttttctcttcctactcttgactagttggtaaacgctccatgttcttggccagaactccctggtgagtagcgtcactcccactttcctgtgcagaaccagcctcctagaaactccttgcagctgtgtggctggacacgccttctttgggggcgtttcttcgcagcacctcttgtccttaccaagttcttcctcctgccccactgccattcagattgtctgtttgtttttttctgtgttgtgagccattctgtgttattgtattagtggggtcttggtctaagtattatatttttttactgttgtttttaacagctttattataagtaaacatgttttaagaaaaacttaaaaatgtaattgtcattgaggtttgtttctctatatatcgacaattttgtcttatagtgatgaaataggccagagatttttagtagacttcctctttgtgaagattttctttttctgttaacattgttcttttctggggatatttgagaaattttcagaattacattttatgttaagaagtaaacatgtatg

SEQ ID NO: 74141 - DNA, 2104 bp, Homo sapiens
gcttctggctgaggtcacatatcactgtgttctcctcgaaaatttaaaataccccatgacacccctcagagttgggtaggctcctcagtgtttattaccagtttgaatgctacaagtttgttgtgtggtttaattttgtgatttgatagttgtaggtggatttatcttttaatttttttaagtcttcattctatcacattctgaaacaggtatgcatttagtctttagcgatcaaaggtggtttctaacaagtgaattgatgtttacatctgaatgtttcagactagtttctttttatctcattgtatatgacctggttctttaaaggtgaagtaatggaatgcaactcttgagccaacttcctaacagaaaaaataagtgcaataaaagcaatttcccttaaagttcagtactcatctttattttgttctgtcttaataaaactttattgttggcttgatttccatttagcttctccatatacaacctcaactccaaacatcaacagtgtgagaaatgctgattcgagaggatctctcataagcacagattcgggtaacagccttccagaaaggaatagtgagaagagcaattccctggataaggtaattgcttttcacccaacacaaatgtttcttataatcaatggatttagcccaaagtaaacgtacttcatgttctagtgccttttaagtgtgaccttttgtttttttctaaaccacccggctgacctggagtaggtgatgagagctttaaggttggggcccattccttgaagtgctctgattcctgtttccagtacctcagatcctgggcagggtttgcagtggagcgtcttgagtgaatggctctggtgggttgaacggggagggactcaaaatgctgcccatctcaatttcctgtagtctttttatttatttatttattttttgagacagagtctcgctctgtcgcccaggctggagtacagcggcacgatctcaattcactgcaacctccgcctcctgggttcaaacgactcctctgcctcagcctccccagcagctgggaccacaggcacaagccaccacgcccggctaatttttgtatttttagtagagatggggtttcaccatattggccaggctgggctcaaactcctgacctcgtcatccgcccgcctcggcctcccaaagtgctgggattacaggcgtgagccactacacctggccaattccctgtagtctttataccagagacaccatcatcaacacagctctccacccacaagggtgttaggtctgaagccagctccagagaataattgatcatataggtgattcaggggtaagaaatcactttattcacacagcacgcacccacaacacaacacttcctcctcatacttagccttttttcttgaaactactaagtgctcagaccatttggaactttgtaggaaaggataaagtgtgggtttaaacctggagccatggtagattggtatcactttgggcacagattttctaagttacttcaagttacaggcaagtgcccatcccaataaacagctgagccatttagggatttatccctagttctccaaaaacacccggaagacatccttcctcagcatcaggtttataatcttgtcacgcatcccatggctggcattgacatggttaccattaaatgcagttctgttgaggtgcgagcagctcagtttgggtgtgtcatgacgtattgaacttttcccttgaccccaacatgccttcatgtatagagggagaagctgctccgaaggcactctgcttgtgtcatacgcagtgctgaagaggaggaggagagctgccagtcagccaggaaaaaccgggtcactgtggatttttcccttctaatgattccacctttgccagaggagacattgaatgcaacaccttccctcccactgccggaagtactaagttctccagtggctctgatcaagtgggcaggccagagggtgcatccataccagttttgccactaatttcccctgtatttttttgtaaatgaaaatattcacatattttattaagcctgatatatatatgtatatatatacacacacacacacacgcataat

SEQ ID NO: 74142 - DNA, 1753 bp, Homo sapiens
gaactgggtttactagtttttttctggcagctttaacaattctttgttcatcagggagtttctagctaattttagtcctggtgcttctccttcaagagcaaactctccttacatctctgttagaagaatcctgtttccacacatactgagaatgtgccgtcacagttttttaaatgtctttggatcatggtgcctgagagttttaaaagtgattcactgcctggataaaaactactctgagattacattcattttaaaaggcaagcgtcctgaggctcagggtttctttttccacctactcagtggtaccaagggaagagggacgaatttatcttcttttcattttactcaagtgtcgtttaaggactttaaaagctatgcactgggccaggatattaaatacaaacacatacacaaagacataaaaataggaacaaactaagcatattgattttgatatattgcatttccatctgtttgtcttaaattaggactctagttctggaatcaagcttgagactctgagaacttagggcctaattttactttactgaggacctctttctcttgagttctgtgttctttttcatgacttctgtgttcttcaaatgctgttctacattaaatatgaaatatgattatattagaaaaattataatttggtcatagcatgtgtttcttatctgagtacagaaaaaggccatagttttttcacagggtttttacctgtcccttgcgacaatcattcacatggtttctctcctggggagacgcagccactggctgacaataaggcttaatgaaaccatgttcaagcctttgcttcttttttcaaattctcctggctcttcttttcttgatctttaatacactgaatcagtttcagggatagcagtgaataaatctgagtgttcaacagagggaaggatttatgaccttgatgtcacaggtcttccttctaaggttaaagagttaaagactgaccaggcacggtggctcatgcctgtaatcccagcactttgggaggccgaggtgggcagatcacctgaggtcaggagttcgacaccagcctggccaacatggtgaaaacccgtctctactagaaatacaaaaaaattagccagggttggtggcagtcgcctgtaatcacagctacttgggaggctgaggcagaggagtcactttcaaatatacttttggtgtaacctagaggctggctatatttattttgttgtttatttattttttaacttagaagtatcccagtccatggcagctcatttgcctactgagatctgaaaacaaccagcctgttgtgaagtgccaagtaatggcatcttcagcttgcgtctgggagaatgtgtgctcacagctgccagacacagagtccaaatctcctgatgccatctgccaaaccagccaggcctttccgctggaggcacgccttttggttcagcacggaatgtacaagtccaaagagtcgttttaaattatgtgatttatttaaatcttatctaagcaggaagtcaatctattaccttaaaaaattccatagtaccaagatagggagtgatttctgccttcaaatactgtttttttcatggacatcacaaattttatttccacattagatttcctttctgctcatagttgtttatagcagattcccagatattccccgttcacagcacccttagtgtcactttatttcgtggcatccctaggctgaaagacacacccagcagttctcttt

SEQ ID NO: 74143 - DNA, 1035 bp, Homo sapiens
ggggaaactgaggccagcatgcttgagttacttgctcaaggtcatgctaccagtgagtggagcagccaggttttgagtccagtctggccccaaaggttgtattcctgaatcacttggttattaacctaaagaaaaatatgtcttttcctttgattagcttagaaatcttcacgtttgttgaaatggaaattgtggtttcagcataaattctaagtgtcattacccatgatttattaagtgtcttgaccgtcatagacatttattcttagatgggagtatctcaccaatctcatgttctccaaaagcaatcaacagactctgagattatccatctcgttggggcagatgcgcagtctcaaatttcttctctgccccagcatccccttgtggtgaagcctggatgtgtgttcctttctgaccgtgggtcccccctgcttcccctggttcccactgcactcagccctgagatgactggtcttgtctctggactggtgcccactgaggtgtgtttggccacctcaggctctctgaggctcaaggtagataagtttctataaagttccaatgtagtaaacagaagtggcagtgtcactttctcattttgaagtttccagggctcctctgagacctgcagagtcctggagttgtccttgtgacagtgaagtagtgtagttgtttggaggcagggtctggttgaagtattatagaaggagcttgtgcagggagcgggtggtgctgggtcctgtctcacaatgaacacttgtgctgcaatccttgtaggcaggagaggggatagggagggaggggcagaatctaggcctcctgcacaagggatctgggctctccgaggaagccttggaaaagcctgctagattttgctggcagaaggttgatggttcaggcctaaagccctccttttcctcccgtaaagcagacactgggcctggccaggtggtttctccttttcttttttctgtctctctcttttgaatccagtttagagcttctgattttagtgcatagggagatgccaga

SEQ ID NO: 74144 - DNA, 1024 bp, Homo sapiens
ttccttatgaatggaaagaaaaactgagggcagatttatatggtaatattaactaacagagctagctagttctaatattagtaaataccatgaaggcgtctttaagttcacgcatcctattcacttttatgtcatagtagaggccacatggctttttaagaaccaggtgcttactctgaaatagtccattgttaagtaaatgtcacaaggttaggtgaagttgtctccttgtaaaacctgctctcagatcattaatgatgataacttaaagtgatactacccccaagggtaatgtttcagtggttcaaagtctcaagcttcacaggaatctctggtggtggaatttcaggcattagctcgttgatgggaaaaaatttttttgatgtttctatgggtatgccttcacaaactttcccaagtgttttccaaaaatcacgtctttctgttttttattttctatttttaaaatcccccttcaatagtgcatcaaaacctataactctgactggcatcttgtgaactataaatatgaagattactcaggagagtttcgacagcttccgaagtgagtaagctatattatacacatagggaaaagtctttgtacttgaaatgcttggggggaggtatgtaacttcatatgcaatcagagtaattgaggaaaatatttttagatggtttatgtgtatgtggtgtaactattgtttacagggcctttgattgtaagactcaaacatgctactttggtattgataggtagtaataaacatgtggatggtttaattatgtccagtggttcttttcagggtaccactgataaataaataggtgaaattttttcactacaaaatataaaacaaacaaaacgtaagtgtactgaaatatgctgcagtgcattttttccttgaaaagaatattttgaagaagataattataaagagcattttacattgaataaattttatgtttttaaaaaaagtaaatcaagaaacaagcattttcccagttaaattttttttttatc

SEQ ID NO: 74145 - DNA, 1175 bp, Homo sapiens
ttttgcctaaggtattaaaatcttggccaggcgcagtggctcacgcctgtaatcccagtactttgggaggccgaggcgggtggatcacgaggtcaggagttcgagaccagcctgaccaacattgtgaaaccctgtctctactaaaaatacaaaaagtagccaggcgtcgtggtgttcgcctgtaatcccagctactcgggaggctgaggtaggagaatcgcttgaacccgggaggcagaggttgcagtgagccaagattgcaccactgcactccagcctgggtaacagagcaagattccgtcttaaaaaaaaataaataaataaataaaaatctgggctccattcataaatgcatttataatatacaaatttatgctggtttatttagtttttaattgggcaggtacattttatacttcagaatagttttaatgtcctgcaggagacttggtggtacaatttcagttctagagcttgttgaaaaaccgctgtagctctttgaagagaataggatcacacccacaagaccacgtcgtacatagtcaggcctgactacttagctgtgccagtggacctaggggcagtagtgggaaaatccaaaactatggattattctgaaatctgactggttttggaatgaaattttgagtgtgaatgtatgatactcaaaatgtgaaaatgctttgagaaatctaaaaaaatcattttcaaggataaaatagcattttaaaatattcttaactacagagtaaaaaaatcaaaaagtttgccagctccaaaatctgactttgcgcttagcccttctctgccatttattccacctctcagaataattttaaaaacttacattaccttcacatcacacatcacacccttgccagtaaagtgcttattgtagagcctggcacaaaataagcacttgctgctgttgtaattcttactttcatgagtttggaggtggaggggagtttgcttcagaagaccttcaggcatggcctgtgacacagatagaaaggttgacagtagaaacgatgaagtgaaagaagcagaatagagacgttgttcatgttagttacagccagagccaaataaactagataaggcataaatacatttatcgacctatgttttcattgattcactcatgctttttttccacccacactgaagtctgc

SEQ ID NO: 74146 - DNA, 1090 bp, Homo sapiens
tgagtagcttggactcgaggcgcatgacaccatgcctgggtaatttttttatttttagtagagacaaggtcacgctatgttgcccaggttggtctcgaactcctggtctcaagcagtcctcccacctcggcctcccaaagtgtatttactcattcttgaaacatttaccgagtatttagcacatagctagaaataggaagatgtatctcctgttctcaaaggaatttgcaatctggtggggtaaagaagggcatgtgggtacaggagagttttggataatggagtcagggttgactagctgttcagacaggtctcggggtggtttataaggtcaccatggtacaggatcagacctcaggtttgcaagtccaaagatgggatttggtcacccagagtgtttcaggctcaggggaactgacttgttgcaggcaaccccacaagagcacaaaccagaatgtcattttattaatatgcattgagaactagaattcacaagcagatcagaatactacaccggctgtgcattttctcccagtaggaaagtctaaatgggaagcatattataaacaagtggctcagtgaggctgtactcagagcaagggcaatgaattagaagaccttagcagctggtggtatcaaacattgacggccccattggtgccaagcctggtagtcctcccctcccccatgggtccagcctaatgggttccaacctttcttttattattattttttatttattttttgagacaggctctcattctgtcacccagtctggagtgcagtggcgtggtcttggctcactgtgacctccgcctcctgagttcaagcgattctcgtgcctcagcctcccaagtagctgagactacaggcgtgcgccatcacgctgcctgatttttgtatttttggtagagatggggtttcaccatgttggctaggctggtcttgaactcctgatctcaagtgatctgcctgcctcggccccctcaaagtgctgggattacaggtgtgagccaccatgcccagctccaacctttctctgaaatagtgatagagacactgacagaattcctccagccatggaagcctg

SEQ ID NO: 74147 - DNA, 1079 bp, Homo sapiens
ctggcttttagagccttttagcttcattacttgccctcttcatttcagagttccaaaattgtttttactgacctaggaagaattaacaattttaggtcataatgctaaaaaaggaagaaaaatgcctggaagagtctacagtctagatttgagatagaattatttatacaactgtaatagcacatctttttcttttttgattttatttctttccacatgtgaaaaaataggcagaattagaagccgagactactgtatgtgtgtgagagacacatgctgggcccactgcaggcgctctacctggttctcgctgtgttccccttttacccttcctggcctggtgttggcccatggccggtatcagggtagggagaagacacatgaagcactgcacttgcaagggagctgctcccgttccacctagctctctcctcatgtgactccccgggcacaggacatggaggaagtctcctaaattcccgtcttgtcttcctctcctcattgacattctcagcagcatccccagcgagcacagctgacgacggcaggcgaggagttgtgtaggttttccttaattggtattattattcctgtctttattattatttccatttccattatcatgttcctcttacctatttcaggtgctattgatttgacaaaatcagattttgtcagatttgtcaaatctgtataactgctgtataaaaaggaaattcaacatcgtgttagtgtttataatataaaaaactgcattcacaaatgtctaattgttggtgttagtctgttcttaggataacaccacactggagcatgaaaaatatatttagatgtctgggagtttggtgtttcttatgcattcttccaaatattctccaaagcattaactgctgtagtttaacactcaggtttgagcttatttctaaatctaagtttaggtaagttttcctttttcctctagtatttagattacatgtgtatgcacattgtcaatgaaagtgcaaaattaaaatgtaggcatcgttttagtacgggctgagacaagatcctgggccagggctcaggaggttcctcctggg

SEQ ID NO: 74148 - DNA, 1013 bp, Homo sapiens
ggtaatgccaatagtcatgtaataataaaaatagccactacttatatggttccctgctctgtgccaggaactgttttatgcctgctaaatgttatttcaattaatcctcacaactctaggaggcaggctctattctttttcagacgaggaaactgagcacagtttcctcttgctcaaagttacacattcaataagtggcagagccaggattgtagactttgggtcaggttttctaaaatccatacctggacacatatgcacgattcatgaacaaaaatgaacgtattcacttgagcttagcattgagactgtaacaataaacaagaaaggaaaaacacactgctcttaaaaacttgaaaattgttagagaaaggccagtttataagtgataaccaacagtggttgaatagcatgaagacaatggtggtcatgtgaagaactaagaaatatgaatgaaatagagctgccgtcaggagtcactcttatcttgggtgttacattttatcatcttcccagaaagttacataggagcatagactggtgagagtctaagaatctgcaggcatcccgttttcctccctattttcctttctttttgagatggagtctcgctctgtcacccaggctggagtgcagtggtgcgatctcggttcactgcaaggtccgccttccgggttcatgccattctcctgcctcagcctcccaagtagctgggactacaagcacccaccacaacacccggctagttttttgtattttttagtagagatggggtttcaccgtgttagccaggatggtctcgatgtcctgatttcgtgatccgcccaccttggcctcccaaagtgctgggactacaggcgtgagccaccgcgcccggcccctattttcctttttaaaaaatttatagatgatccaggttaatcctgaaatgtttattccctaattagtaaaatgggcactgtggtccccatagtgtttacagaggctgccatttgtgcaggtgtgctctactc

SEQ ID NO: 74149 - DNA, 1019 bp, Homo sapiens
agagtaatatttgatcccccctttaatgttcatttctacataacttttagacaaatcccttaatacctctgttttaatttttcccaagaggtaaaaaagactccactgttaaatgtgaggaaataataaaaatacagacttttaggaacacatattttgggtgctactaaaccaccattgaaccgtaggttggtgatccagctattttcccgtgcttttgtgcatctctctcttaattttattaatttgtcatttatgatgtctgctcttcttgccttcccagctagatgtgaagttctttgaagggagagatactctaccttatacttttagtatgatcctctcagcacctagtactgggggtaccttctgatacccacacatctggacttaaagtaatattctgtttaataaatgcatttactatgatatgtggtatcccatgaaaatgttttgatgacctcatctttctggcatcaaatagtacataaattaagtgtttcatgctgtggtctgtcatgcggggtgaaactcatttcctccacctgtatccacgaggtgcaggctatgggaacatacttgctggtagctcttccctgctttaatcatcagccaggcatttggtttttaaccataacacaaatgaaagcattccaaaactggaagaattttagaacaagcagacaaccttgctgtctcttaagctccacgagcttcagatttaaggtaattatgaaggagtctaactgtgactggttttcttttaaacactgcagtattttgattccgattgatttggcccacgctgtgtggaacagacacaataaagccggtctttatcagagaggcagtacactgtgtattgttcagcttggagtttgttttcctttggccagcaagtaggagcctccccttttgcatggagtagtaacacccctggaggctggcctttgctgtcatgccttcccaccccacaggctctgcagacccagccagcggggctgaccacttgtgcctgg

SEQ ID NO: 74150 - DNA, 1317 bp, Homo sapiens
aatggtcttaattttaaaaacaacctctctgtgcatcagtaatttaaacccttttccatttttataatttttgaatcgccctctttctgttaaaaaagaaacatgaaaagaaagaaacactgaggataagttttagtactgtttatgttgtctgtcctgcaaccccagacacgcaggacttggctcaaatcaggcaactggagaattcaggagaaggccagatgatctggaaacaagcaagggaaatcatcattcaagaaatccttctattaggaaatgagattttaaaagccaatttaaaactatttttgcttttcttgttaaaagaagggttgttttggtatcctctcattagtcaccttccagagagagagagagagagagtgtgtgtgtgtgtgtgtgtgtgtgtgcgcgtgcatgcgtgcacacatctgttcataagctgctcctatgacctgtgttccaggtcacacactcaccctctgaacatgtgaacaagaagattaattagttggaaagactattcaaggaactcagggaatcgccacactgggcttttattccccacatctgcagtgtcttagcctccattgccagtgactctctgaagtttgggttaggtctttttatctcaagagtcaaagggggagatgatacaaatcattgacttcctgtcaccctgttatctgtggttaggtgattcacgtagcaaaagtgtgatccgagcttgcttccctttctccagccccaaggacactatggttggcttcctccaccacccacttattgtgagtttggggttgcaaactaattttgacagtagcccaaagtgaaacaccattaggaagatgagcctggttgctcagacccacagggaaatctggaaggccttggattgtctgtgccttcgcctctctccatgactatatggtaatcattggagggtgagatgaggggtcccaacgagtctgtgcctagactttagcagttggacgattaggggccatgcagcctaatctcagccccatttgagaatgttgctcctctgtgcctgggtgggtgatggattggaagaggccaggtgggtagggtaggggctgacctggaccatgcttcctgtaccacaagacttcctcattcatggatttcaccaagtctcttggttcggaaattcttaaaagggttttggaagcttggtgtgagactctgcccggatcattcagatggaaaccaaggccatgagtgctgtaagtgcatccgaggttaaaaaggattttcgagtgctccacacataattggtgccaggtgtttcccatt

SEQ ID NO: 74151 - DNA, 2213 bp, Homo sapiens
aagtgctgagagatggctcagaactggcacattcagtggtttttcaaattgtaggccatgagccacgagtggtcctgaaaacagctccgtgagctataccactttcctccctccctctcttccttccagtgaactctaatagaccagagacgctggaatagcaattaatattgtgtgacacaggttgtaattgcaattgtatttttggaaatatttttacacacatttaccgtatcatgacttacaatgagtttctcaatatgattcatggtgacaatactttgaaagctagaggtctaaagagacatttgaccttgcggttcccttatccccagcctctggtggtttaatgcgttgatttctcggtagcactccacgtggtgttcgcattggctgcagcccttcagtgggcctgagcatgaggatgggcttctgtcaaaatcttgtttccttggaacaaggtccaaagatggccattatgaatgggatcacatgtaaaactcaacttttagggttgtttagaagattaaatgaggccggatgtggtggctcatgcctgtaatcccaacactttaggaggctgaggctggtggatcacgaggttaggagttcgataccagcctggccaatatggtgacctctgtctgtactaaaaaatacaaaaattagctgggcatggtggcgggcacctgtagttccagctacttgggaggctgaggcaggagaatcacttgaacccagaaggcagaggttgcagtgagccgagattgtggcactacactccagcctgggcgacagagtgatactccgtctcaacaacgacaacaacaacaacaacaagattaaatgagaccatgtgactcagttctgtgctcagtatttggaatatagcaggaattcattcccgtgtagcacactgttaaaggtactctgctagagtactctgttagaggtactctgcactgtgctctttatgtaatgtttatctttaggttttacatttaaaatttaaatctcctacattgttgagatgactagactggcctcaatagagccgatttttaaatatgaataaaatttcatatctcctgttaacctttttccatccctcctctgatttttttctccaattggtatttttttcttggatcttgagaactttgtggttaaagcagagatgaaaattttgtgggaaaacatctgcaaaataaatttctttgaatgaattgggatagatggcttggccctcaggtccagacctccctaacataataaatgaaccagttattgaccagacaaaagatttcccttaagtgctctttaattttaaagcagaatagctttaactggctcttgatgaagaaatcatcttaccattcttagctgtcctctcttctgcatatgcagtgccaggagtgcttttgggcatttgctgtgttagggtagtgatatgttttggaaagataacggtattgaaattagggtactttcaagagaaattcaactttggattgatgtaccctctgatatgtgctgtcttgtttttaaagaaacacctttatcaggatatgattcatacatgaaatgattcatccatttaaaatgttcagtggttttcagtatattcagagttgtgcatccatcaccatagtcaattttagaacatctttattactttccaaaagaacactggaccccttagccatcaccccggaactctgctccacccaaccccctagccctagggaactgtttttttttttttttttttttttgagacggagtctcgctctgttgcccaggccggactgcggactgcagtggcgccctagggaactgttaatctgctttctgtctctagatatttgcctgttctggacatttcatagcagtggattcatgcactatgtgatccttatgcggggcttctttcacttagcatggttttaagagtcacccatgctgtggcatggatcatacttcattttttaaaagttggtacataatatttcattgtattctgtagttgtttatccatttatcaattgatggacatttgtgttgtttccaatttttgtttattatgaacagtgctgctaagagcattcatgtataagtttttgtgggaacatatattttcaacgttgggcatctaggagtggaattgctggatcatacggtaacctgggtttaaccatctgaagaacagccag

SEQ ID NO: 74152 - DNA, 1068 bp, Homo sapiens
cccgggttcacgccattctcctgcctcagtctcctgagtagctgggactacaggcacgtgccatcaaacccggctaatttttttttttttttgtatttttagtagagatggggattcaccgtgttagccagaatagtctcaatctcctgacctcatgatccgcccgcctcagcctctcaaagtgctgggattacaggtgtgagccaccgcacccggctgctgttttttttgttttgttttgttttgtttttaaaaagatgattaagctggtgaggcatctctttttatatatgcattttttgacaaaaattccgtatatttagggtatacaacatgatgttttaaaattggaatggttcaatcaagctaagtaacatgcaatacttcacatacttaacattttctgtggtgagaactcagttctactctcagctatttatttactgtagtcaccatgtttatactgtattccccctagctaactgaaattttgtatctttttaccaacatctctccaaaccccacccccagcccctggtaaccaccattctactctctacttctgtaagtttgacttttttagagtctacatctaagtgaggtcatgtagtattagcctttctttgcctggcttacttcatttaacatgatgtcctctatgttcatgttgttgcagacgatttctttctcttttgcgcctgaatgatatttcattgtgtatatacggtatacaccatattttatttatccatttatccactgatggccacttaggttgattccatatcttagctgttgtgaatagtgcggccatgaacatgggagtgcagatatcgctttgacacagcgatttcattttctttgggcaagtacccggtagtaggattgctggatcatatgctagtcctatttttaatcttttaaggaacccccatactgttttccacagtggcttcactaatttacagtcccacaaacagcatgcagggattccctttccaccacatcctcttagtgagacatctcttgaagaaggtctgtcgacttgggtaccactgaatggtttgt

SEQ ID NO: 74153 - DNA, 1058 bp, Homo sapiens
cttaggtgcgatgcccccttccccgcactggaggctgcccagccaacgcagacgttcccacttcctgttcacacagaatcgcctcttcctttctcatttctcacagggagtcctcttttcctgctaccgcatggggacacagattttgtttttgaaagtttgtagaaagttcctttagtgctaatctccaatgggaccctaccctacacagagggcaagttattttcttcccattctgttttttggaacttttatttaatttcagacttatatgaaaagtcaaggatagtataaggaagtcctggtgtaccctttaactagataccccggttgtttcaaattattattttttgctaatccatagtagtagagtaatgggccattcattcatatgttcattcaagaaaatttcatagcagaacctttgtgcaaaaaaagtggatgaggcaattctttccctgcttcatttctactattagcaattcatgactgatttagctctttggtttgtgaaatggatgactgaaaacctctcctaagttaggaaagtaagtgaagaaggcactttaaaactgaggtgccatcttttttgtcttctctgtgggatattcatttaaaatttttctcgtagtaaaggcaagcacagatggaaggtggtataaggttcagcctcatcccttaacttcagcctgatggtgcttgtgatagtgcttgatttgctggtgatactggcgtagttaagaatctcccagcttaggagagagaacttaacatggcaaaggtaaaaagaggagcaggtttcatcagactattgtgctttatgcttgaggcagggcagtagcaatggaagaacttagatgtgattctgggcttatgccttccctcttgcttgccctcaaaccctgtccaaccaacaactaacagcaaaccaagtttttagatttatcacagttagggacttaactgctttatgtggacttgtgtggctttctcagctattctgtaaaacctgctttattaccattgctattatttctgctgttgtgagctcagtgtca

SEQ ID NO: 74154 - DNA, 1233 bp, Homo sapiens
gccgtgcgtgactgtgctgggagtgtggtgatgcagaaacctgagaacatccagcccgttacacaggccttgagaagagtgtagaatttatctggtccttcgctttcagataatttcagataaaccattgcagacagatgagaatctcatctccccttataaaccaccagcagaggaatggattagcagtgagctattagggggccttcattttttagagagtgtttagggtagaacagacagctttaaaaaccatttatcttgtcctctttaaaatactcagtcataatcagtgtgcttaatcatgaggcccccgaccagctgtcttctccaccactgtcttcaaagctgacattttgacttcatatcagttttcaggaatgtcctttccatgcttccctttgaagggaaaaatgaaagaagcctttaaaaatagtaagctcataaatagttatttagagaggggatataaagttaggtaatttattttgttatgcctttttgcacgtttactttttccaggtgagagaaaataaatgtgcaatgggggccccggttcatttttagatgtgaacttctttcatatttccaaataaaagctcagtcactgcatggattgataaattatagatggaaaactgttctcagttttcctcctcttagatttctttgcttcatgtgaccatagatctctctcttctctttgaaactccaccttcctttgatatccaaatactgtcaccgccacctgttatttatcaatatagtgacaacagttataatgataagtctttctttgcacccttctctctgtttcattattttctctttcagcttcctattgtggccatcccatagaaaatggggacttgctgttctcctttcactttcagagagttgagctactgcctctgttccagtgactcattcctaagtcttgatttacatctttgaccaggacatctgtgagggtcaggagaaagctagctggtgaagagagaagatgagagaaaaaggtggaggataaaggagagtttacctcaaatggaagaagatctacaggtcttagtagaaggcttcagaatagagaagcatagtaggaggtgaggctatgaaagtgttgagcctccatttcatgttggaagggagggagtgctcctcagcgtgaaacctgcggacaggttggtgtgtcaactgtttataactgacctgtgacaagatgagttgtgcttg

SEQ ID NO: 74155 - DNA, 1032 bp, Homo sapiens
aaaacaaaaaaaccagtataatatatatcacatacaaattgtgtgttgtttatcagtaaggcttccagtcaactgtaggctattagccagtttctggggagtcaaaagttataggtggatttttgactgtgcagggggttggtagctctagctcctgcgttgttcaagagttaactgtaatatacagaactatttacttttttatgaaaaaaataagcaatattttgttcacggaaaaaagtttatgatcttacagattctaaagtaagccattctcttttgtttcaagaataagttaaatatcaaatgtttattccctcagttctaaacatagaaatgcagttgtataaccaagtttctgttactagggggatagttcttgccatggatggcagtaggatatagtgcatgagaacttgggttcaggaggcttcagccccagctcttcatctactagttctgccttctcagtttcttcacccagagagtggacattttaatagcacttaccccatagatctttgtacttaagcgagcaattgcatataaagcacttagaatggggcctggcacacagtaaatactcactaagtgcaagctgtggttatttatgggggcaagctaaagaaataccatataaccctttaaagtgctgcttgcggagaatttataacacaggaaaattacaatgttgagcaaaaaaaacgcagtaagcagaaatgcgtgtggtcacaattgtgtgaaaacatgtttaagaaaaatattggaaggaaacacatgaaaagataggaatatgatttgttttttatatattctaggatttcccagctgtttaagtgaataggtaataatctattaagaaaaagcaaatacattgaatattggaaggaaagtttgtactacatgtaagatgttcaaatcggtatgcttgaaaattacacttgtatatcttagtgcttgtacacatgggcattgtgatgtaaaatatgttcctgaagtgagggcacacacatgcatgttggaagcaaaaat

SEQ ID NO: 74156 - DNA, 1036 bp, Homo sapiens
tgatgccactcctcacccctttgaattccaacaatacaaatgaaaccaagtcaggtcgttgctaaatttcgcttggtattactgaaggagggcagacagaaggtatgggatggtagtgtccctgagtctgcctgaggcttccctcactgccccgtttattcagctcaagattccagtgctgtcggaggtaacgtgagaccccggtaatggtgttctttgaaattctcaagtaaggtaaaatctcgtttttggctataatttaaaatcagatgtcagtaagctgataactgaactggccagggcttctctgcactgtttttctccaccctccagtggagaaaacagaaatgtcccaaaatatcggaagcagggtggaggcccatcttggactatatcattaacagcaggttccattcctttggcttctagtccttttgattattagtacactgtcaggaggacattagtgaggccttgagtttgaacagggagggaaggaactgtgaaatcactgtccacatttactgagggccgaccctggggcagggctccctgctgggtgctaagaacatgataccatgtcagagtaggcccttgcccgtgtagggtttatgatctaaacaggtggacgggtcagtcacctactctaaggtgactaacagtactaaggcacaccatggaaagagtcaaacgtggttcagtgaccagaggaagatgaaagcacagaaccagtgtattcgggaaagaatttattaagaattaaactggacctggaagatgcagagataaggaagacttttatcctttttttctaggaaagaataagaaattgagcaaatgcttagtatgctcaggtaggaccaagaaggagcagagcggcttgggcaaagaagagcaagtttttggaggaagggagagaggttttgagaaattacagttgccaactttgggaacaatttcattgattggctgagaacacatcctgaaatagattttttttcctttgtctttttgaaactatttcaggaaagaagtt

SEQ ID NO: 74157 - DNA, 1342 bp, Homo sapiens
tagtatatgttacttaaaaatagggtctattcttacataactgtgtcataataaaattaacaacttgttagtatgctcttcacatttcccagattatattaaaaaatatttgattgttagtttgttctaataaggacctaaaaaagctttgtaggccttgtcaaacatggttagctctttcatgagccttagaattctttttttttttttctgagatggagtcttgttctgtcacccaggctggagtgcagtggcgtgatctcggctcactgcaacctccgcctcccagattcaggtgattctctggcctcagcctccggagtagctgggattacaggtgtgttctaccatgcccagctgatttttgtgtttttagtagagatgaggtttcatcatgttggctaggctggtctcaaactcctgagctcaggtgatctgcctgcctcggcctcccaaagtgctgggattacaggcgtgaaccaccacacccagacagaattctttataatggagagaaccctccatggggtcaggacttctgggttttaatcttagaggtttagtagtttagagcatgggttgtaaacctggttttatgcctcaccagctgtacaatcttaggtatataacttaaccttgttggggctcagtttcttcatctgtagattggagataataattatgctttccttgtattgttgttggaaggattaattgagctatgtgggtgaagctcttaggcagtggctggcgtatattctaccagctacttaagtccccttggactgttgcttaatgtctctgaacttcaaggttcctgctctgttaaataagaggcatactcggtttttctagagtcccttattccaccaatgggcttctatttgaagctgtttttttttatttatttatttatttatttatttatttattattattatttttttgagatggagtcttgctcttttcacccaggctggagtgcagtggcatgatcttggctcactgcaacctccgcttcccgggttcaagtggttctcctgcctcagcctcctgagtagctgagattataggcgcccaccaccacacccggctaattttttgtatttttagtagagacggggttttgccaatttggccaggctggttttgaactcctcacctcaggtgatccgcccacctcggcctcccaaagtgctaggattacaggggtgagccactgcgcccggccttatttattattcttttagagaccatcttaatctgtcacccaggctggagtgtagtggcatgatcatggcttgctgcagcctttgaactcccgggtacaagcaatcctctt

SEQ ID NO: 74158 - DNA, 1031 bp, Homo sapiens
tgggtgggtgtgacttgtgtttgttggaacagtgcaagaagatgggccttggaagtggttgtctgggccctgtgggggattgtcggggcagagtgccgggccccttaacacaggggcggatgcatcattttggtggcagatcgatgcccttcctgggcagacacagaattgcgtgaatgacgtttgtggagattggagatgaagcttcgctgatttctatatccagtttgctcagtttgaattttctctcgattgctagctctgccaactccaaatttctccaactccagtttgatccatagtaaacaaggatttaatttttctattttagggaagtcgattaggtaaggagtagagcaggagttgggaatagaccagaacctggccatctcttccataaccagctaacttctgtgtggcttcctgcatcttcctgagttttgccagtgcatgttaaggataaagcctgcaacttctttggcatcttttctgttctcacacagaagttggttcctttatctggggcctgccgtggtcatcagggatttgaggcagaagaagagtaaataaagtgtaccagtgtgccatgatttccaaagtgctgcaggtactggtttaataagccgtgtagatggagcccaggagtgctggtgcagacacaacactgctgatgtgcagtagtccccgaatatctgcccttcccatcggaggatggcctactaatggtgacctaggagtgtccattcccacgtgtgacaggctgccaactgtgttatctcatgatactttagtagtacatccgttttccctggacacccttaagcatgaagagccagatgcccggctgttgtcttaactcttagtctcgtctgtctgtggtcacttgtctgatgaaacctgtgatggaacagatacaaaatgcagggaagcaggtgggcctgctctggcatgtgagggcccctggctgaatgggaaataggaaatgcattgtgatggttctgaattgcagaaggaagaatctgggagggctt

SEQ ID NO: 74159 - DNA, 1026 bp, Homo sapiens
gcggggtagccagcttcgagggaccgcccggaaagacacaacgcgcgtggaaggcgccgggcgtccagtctcgggagagattagaagtggcgctcctgcccagcgccggcaatccaggggaatccgcggccatcgcggatccaccaggggtgaggcggcactgagcacaagtgtgaggctctcgggagctacgcctccgcttccccagtgccacccgtttttacctcaggcggttctgaccgccatcgtttcaacctggagaggtgagccctcccctaccgacgcacttcccttccccggcaggaaggagggcgctgacccagcgggcgcacgcccctgactgcgcatgcgccgggtgcgccgttcgtcagcggcgagtggcctcgcggcgccggattcgtcgctccgccaagagtgcgcctgcgcggtcgctggggctcgcacttcagcttcccctcccccggcgccctctggggctccgagcccggcgggaccatgttcaccagcaccggctccagtgggctctgtgagtaccggcctccgccatcctggctgccccctacacgccaccctaggcacctctttgaggaggctggggcagcggggaccctcgggtttgccggaggtggtggggccgaccctccagacccgcgtccgaaccctgctagttcccggtcttgggggtcagcggaaaccgcccccatttcggcctggaggggcgaatggggacaaagccccgccgcccgccccgaccccacctggtatccccaggtgctctgcccaggagtctcttggggccgctgcaagtgggcaggtgccctggtgttctcgtgggccggccccaggccctttgcggagcgtgtgccgcgctgaaggaaggggccgtcccccttaccatgccccattcttttaggcttgggggaccgaactaactccccccgcccccacttgcaaagttcagcctccgctttagaagctgacctctcagtttcacttggatgtgtttcttcttcagtctccaagaag

SEQ ID NO: 74160 - DNA, 1076 bp, Homo sapiens
cactttgggaggccgaggtgggcggatcacgaggtcaggagatcgagaccatcctggctaacacggtgaaaccccgtctctctactaaaaacacaaaaaattagctgggcgtggtggcgggtgcctgtattcccagctactcgggaggctgaggcaggagaatggcgtgaacccgggaggcggagcttgcagcgagccgagattgcgccactgcactttggcctgggcgacaaagcgagactccatctcaaaaaaaaaaaaaaaaaaaaaagatctgttgggaatgtcatgaatcttctgagaatgtgtgtctcgtcttatagtctgacagtgagttagtatcagcgccacaggcataattttaaatcttcctcacttctcaacttctcaggttttgaagtggtttcaatatttatgatttcctttgtttcataattaatttgatttatggcatctttcatggattggtcccggagtatgttacaactactaagtaatcttccccaaactaccctttagataaagagcattaggactgtagctgaagctgacagttcaagaaggcaatgtggttttcctgggatcacacagtgagccaggaactactggttatgaaattaatggtggaattcttcaatttcaattgttctttagcattttgatctatccttgctggccaaagtacatataaaaaaataaagggcaagagaaatcttattggttgctgtactgtattagccatgagattatattggccaagtgtattcaaatttgatacagggcaactgtggggaagataatattttgttatctatggcacatggtggtgagtgttgaattctaggaaccaaactgttgcccagggagaggcgtaggtctggagcccctctgcagctgtcttggcctgtttctaaaattaagtgcttctgcagtgtaagagttgttgggatggccgttcctcagaaggctgtgtcttacatgctcattttacaaacattttgggcatctcctctgggcgatgaactgggctaggtgctgggaatgcagcaacgaacaggtcctggtctcagtgctta

SEQ ID NO: 74161 - DNA, 1060 bp, Homo sapiens
tgtacttaggtcaaaccaaagagaaatcagacccaaaaggaattcttaaactttatatttttatattatctttgccagagaggtattttgcatttttacttttagattaatgcgttgtctgttattctcaaaatttgtagcatccctgttttcaaaggtaaaaggatctcctgcagagaagtgactttttcttaaccttctgtttgatctctgcttgggttctgtgcgtatgaaccacttcctggctctgctcacagagaggccgaagattactagtgacttgccccatctcagtgcataaggattcaccatatggatctttttcttgaattagtaactagttacaaattattttttctaattgtcaaaatcgatttttttttggtaaaaaattaagatctcccatgaacagaccagagattatctctgttaatattttggtagatgcttttttaaaaaaagtatttatatattatttttgtataataataccactagaatattttgcgcttactatttaggaacatctttccaaggtacaaaatatttttctacaacctattgcttaatgttgaatattatcccatttttatggatagaacataatttacccatttcccaattagatattcatattgtttctggtcttttcactattataaacagtgctgcgatgaacattgttgtagcagaatctttgtgcacatttatgataattactttgggctaaattcctagaaatggatttcttggatctgtgttgcaacctccacaaactgcagtctttttatatttcgttcacaattacatttacttttgttacacagggcactactttgatttctattagtgctgtttgtgattgtgtatgtctttcacttgaaatccaccatgaaggtgaaaatttgtttgaaccgtggcactatatggcagtgcagtgtagtcagttgtgtttgtagtccggattatcagagcttgaattctggttctgctgctcactagcttcttcttgcacactgtttcagtgtactcagcctcaccttttattttatttctacag

SEQ ID NO: 74162 - DNA, 1093 bp, Homo sapiens
ttgcgccactgcactccagtttgggcgacaaagtgagactctctctggatatgattatatgaatgtatcagattatcatatgtactcccaaaatgtgttccctaatatgtatcaattaaaaaatgaaattaaaaatgtatttttatatatgtatgagttttgtgcatgctcaggagctaactggctgatttgatagaaacacacttctctatttctttacacttgggtagccattttctgaaaggtgttctatggaagttctggctgtaaacttggtctcatttaagagccaactggcaatgaagccctgctagggcattctgcttgtttccagtgtcttttgatcacttacatccccaggtcgatgttttgaaagtggatattagaaccaaatttcagagtttctggactttgtcttcattctgatttaaaagaagtgaattctcttgcttttcacgcatgtggttttttaaatcttaggaacaatcattctgaaagtgctttcctttttccctccagacaaggcgcctctgtcgaagagccttctgctggtccccagtgccctctccctcctgctcgccctcctcctgcctcactgccagaagctctttgtgtatgaccttcacgcagtcaagaacgacttccaggtaagctctgcctcattggcccctgagaggagagcggacagttttttttttttctttctagatttgctttttcttcctgctgttagtccctcaaagcccccaatttgtaagaaatatttattattaatatttcattaagtaacttttctagttattgatttttcagcaaaacagataataatgaagcaatggcagtatttccttttattaggcacatttgttttcagtttcactttttactcagagaagtgtaatttataacttcaagggaattaaaaacaatgtttaatctttttttaatgcccagtaggcatacttagctttgccaaaaccttgtctcaatttgaatatttgattagaggagctaggctctgtcagctgtatcagattatgaatttttgataacttttacagtggtggttaaacgaagtaagaaatttctcttg

SEQ ID NO: 74163 - DNA, 1842 bp, Homo sapiens
ctacatttttattatgttcttgaaatagaatcaattttatattctttctttaaaatttattttactttttttttttttgagacggagtctcgctctgtcacccaggctggagtgcattggcacgatctcggctcactacaacctccgcctcccgggttcaagcgattctcctgcctcagcctcccaagtagctgggactacaggcacgtgccaccatgcctggctaatttttgtattttttagtagagacagggtttcaccatgttggccaggctggtcttgaactcctgacctcaggtgatccacccgcctcggcctcccaaagtgcttgagccactgtgtgagccaccttgcccaggcaccttctttttttagctttgaaagtttgtgttttagagaattttaagtgaatttcctattctgatcctgatagaattagttttgtgtgtttttatagtgaaatttgtctttgtaattttatgaactaaacacaaaaatatagtttaattagattaggaaacaaaattaatttgtacgaagttaagcttctgaagaataattttttaaaagctgataatgtttaaacacttccatcaaacataaaacaaagccggtgtataggttataactttgtagacaacctgccgtggccaaccccactcagaatttgtatgctttcatattgcgttgatcttctttaaaaaaaacaaaaaccatgtattagtgtgtgaaataactagaatctaggagtagagttgacagaacgagactccatctcaaacaaacaaacaaaaaaacaggccgggcgcggtggctcatgccacctttgggaggccgaggtgggcggatcacgaggtcaggagttcaagaccagcctggtcaatatggtgaaaccccatctctactagaaatacaaaaattagttgggcgtggtggcacgtagtcccagctgctcaggaggctgaggcagaagaatcacttgaacccgggaggcagaggttgcagtgagcggagatcgctccactgcacttcagcctgggtgacagagtgagactccgcctcaaaaaacaaacaaaatacccccaaaaaaccatgtattagtgtgtgaaataattagaatctaggagcagagttgttagcacatgtaaatgacctccaagcatctgaatgaagtatctgagacactatttgggaaatgagatagtatgaaatatagataccagatatttaaaattctgtgtgtactatcttcagtctccttttaattttaaatatatgttttgagaactattaagctactgtatgtatcttgattcaaattcactttggatccctattttaaaattatagttagtgttctaatagctttcgtacctgcattgttaatgtttacagtgtagctgccttttgtgaattatagttggtgtgaatatccatgaatgttgacctttagctcttttaataatgtatgattctgaataatgtttgaatggaggcataaagttctgtgtcataattagcatgcagtttgaattccacaggtggtcattgtaattagactgagaagttaaagttgagtattctgttattggggaaaatagtgtagtcatcaggaatgattccacattgactcaggaaagcagcagcattgccaaatcatcagttttccccaaaacatctcctatcaggccagttctttttggttcctgtatagcctactgagtgatgggaggtatgtgtgtctgtgttagaatgaactttggagatggatagtaacttagcattattcttatttacactgtctccttgtcttctttttcctgctgcacatggaatcgaatg

SEQ ID NO: 74164 - DNA, 2839 bp, Homo sapiens
aattcagagtagggaagggctgatggggatggctgtaacaggccccttgggttcttgttgctattaattttgccttgtagtaagtaacagtaatgagttcaacataatttcttatataggaattctggaagtcagtgtttgggacataaagtattggatttataattccattcctagtgcaaattagacctaagggagctgcatctagatagaaaataatttaatcaaattattttgtatggtagctcgatttcccccctactgacttgattaacacacatgtgtcgcttgcacatagaaatgcaaaaagttaattatctgtgtgaacaaggcttgactaggaaagaaaaatcagatgcttttctctgaataattcacaaaaatgttttatataagtttttaaaatgaagataatgaatttattttttcaagagaaaagggacttgatagtattatacagaatatccattgacgccagagtagttagtgaagtgaattttgatgggattgaaatgaaagaaccttattattcataacatttcactgtttatattgcttagtgaccgtagactaccagatcggaaactttttctgcgcatgcttcgaaggtaattacggtatagcatgacactaatgactcgagcctgaaattgttttgaaacgatgtagtagagaatcacatccagacacgtgctgaggttcatgaggaaggtggtaaaggctccccagggattgtaactgttctcccccgttcccagcatcaggaaagcgaaacagatgtggaagggcataaagcagacgagcacctgcaccagcagcgtgatgatgatccttatggacttctccttgactttgggtttcagcttagacgtcctgccgtgaaggagattatgaataatgaccaagtagcacccaatcatgatgaacaaaggaatcaagaaaaaaaatgtcagtcgagtgaggttcagcacgttcacagcttttagatagatgatgtcagaaatcttgaggcaggtggcgggagtggagtctttatctgggtctttatagagcagtagcagaggggtggtcgtggtcagggtcattatccagactcccacacacgccagcacggctttgcacgtgtttttaagttctttggcgtacttcggctgtacaatggccatgtatctgtcagcactaataaaggcaagaagccataaagcaatgcttgggtaaaacactgtgagagctccaagaatctggcagaagtactctccaaatggccattcatcttttgcataataaaacattcgaaagggtaaagtcattataaatatcaagtccactaatgccacattcatcatatagatggttaccgtggttctcttcttggtggtacaactgaaaacccataatgcagtgatgttaacaaataatccaattatgaagatacagctatagaagacaagggctgcaattttgtattcatctggatgtgagctgttaaaagggacaggttgatcttgattgttcagggtgatcattttacagcttgttggtaggcatgatacttagaaactgtaaaaatagttaagaaaaataagaataaaatcgttggttaaaaaataaatgcttaacattctcccactcagcttgactgccagtgaattttaagttcgagagcatttaatcaaggaacgattcaactggttaactactgaacattcacagtaattctcatttgagagagaatgggaacttttcctttgttacagctatagccccactgtctattgagcatgtaataggtactcaataaataaatatttactgaattgatgaataaatgaaggaacttttgatgagatgattcacagcaactctactttgctaaaaaactctagtttgtaattctctagtttgaaaatgaagacttgtgtagctggctattaaactttttgttttttttaaagtggaaacacttcataatatttattaccttatgttctctttaaattatcataggttgagaaacagcaatgttttgtgtcatggtcagcagatcaagaactagactgttagagcaatagatgagctgttttctagtgcacaattgggagtacgtaaagccaagtcttccaggttttgtgatttcagctgctctacttcagtggttcacagaaagcagcaccttgaaaaaagctagtgccgttagtaactttcatatcctcattccatctagattcagaagcttcaatattatttaaattttaacaattttcaaagtaaatccaaaaaaggagtatctaagacaagtagatattaataagaagtcattcagtaacttgatgtgtatgtagaaacttataaatttccatcaccaaaaaaaaaaaaaccgtccattttaaatggaaaggaggttatttggggttgcaaatatcattgactcctcagtgtgaaacttcattcccccatgatgcaacaccaacaacagacttcaaaaatagactttgctgcaatgagatggaatctgtggcatccccttgtaatatggaggtggatgaaaagtttccttcaaaaatgtcactttgcagagtgggctgtcttgaaatcagcccagaatttctctttaaggaaaactatgggggagatttgctgtctgtggtcagtggcatcacgggctattgataattaagaattaacttgagcaattgctgtggttaaacacaagaaacgtgcctgtctgccttccttcctttcccttcccttcccttccctttcttcccttcttctccttctttccttctcaaatatttaggttaaatatgatttaggagcataattctatatatttaaa

SEQ ID NO: 74165 - DNA, 1050 bp, Homo sapiens
ccccattgctgctaaaatcaacagatacattgatggcatgtgtctagaagagtcctttcatcaagacttgaattcttcacggtgcacaggggcattcttgtttctgaattgccagactcttagaggaggcatccaggagcacctgagggctctccataggcctggcttcaggttggggtgagctctcactttttcctcatcttgctctccattccagccctctggactggctacatttgctcttcctgcctctcacatgctgttccacccactgtggcattcctcaccactgtctcccacctgatggcatggcctgctgctctttgttcttgtagctacctttttcaggaagctttctctgccatccgaagctgggctggtttctctgccctccgaagctgggctggttgttcatccctgcaggtttccttagcacttggtacctatccctgtagtggcacatgtttgcattgttactgcatatttacttgctttttctcctccactaaattgcattccttgagagttggcatgtgttgcatatgtgtgtagagaagaggcatttaatattggttgaatttctgactgaacaagtaggtgaagaaatggagaggttgggggaggaatggataaatgtctgggccttgagtcagcaggcagggacactttgaccagcttatgagatggggagacttaggcaagggcctgaggtctgtcgtcctcccctgcaacccatgagccctatagcattgacccccgttcgctgtgctcctggatcttcgcgatggttttgtgttggcagggaattatagtgaaaagaaactgcccagtcatttgacagcaagtaaacaatgggtcaaggattcaacttgtataatgtagacacaagtttctttaatacttgaacctaatgaatttttttttttccccaaacagaggaacttattcagggaccattcatgcagctttaatttcttcacttactttggaatatgagtgaaggagaaatgtttcacttgcaaaagagggattttacttattcccagagac

SEQ ID NO: 74166 - DNA, 1096 bp, Homo sapiens
tcagacaaggtatttaccagaactctcccttgtatgcttataaaataaaactagtactccattcagttgaatatttgcagcaatgttatcttcttattgctaataccatttgtatgggtagactttatgagaagtttatgactttcagctcatacagcttcttgcgctcagcaagccacagtctaaagagagtcttaactgagaagggaaggaaggaggcaggcaggaccaccctgagacccacaggccagctgccgctgtgcttctttggaaaaaaggttctcagactgtgttggcttacatctttctgcctctggtgtaggatttgctcttctaacatgaatggaacatttgatttaggatcagtaattacaggttttagaactggagtttgaagtatctgtgacacatctctctttgacagtcatgtgggtactgatccctgattgcactttcaccccttttcttcttcttgttctcgttttgtgtgtgccttgtgaacaaggacctggcacgtgcgtcttcaaacgtttcagcgcatctagagtagtgcttcacccagcaggccctcagttaacaggcatatggattcgactggtgtttgtgtttttctgtaagaaaggttatgccatgtctcaaaaaatgaatggctaatgtttctaggtagatacaattacaaagacgtaccaaataaaataatgagacaaaaagaaataggtagattgggattggctgtgtagaggttttaaggtaaaagtgggcaagttaaaaaggtttcgtatcagagaagttagttgcaatttattgaatgtaggagtactcacacagtttatttgaatatgaaatagatccagatttcttatgtatggtctccggttttccataccgattgatagttcagggctgctttgacataaatactgtgcttctactgccacctacagatgattagtgggtcttggagctcttcacctttaccccttctaaagtctctttgaaattgaaataattttttttaaaagctattaattggtagaatattataaaatattttaatgttactttatgaatatttctatattatattacataatac

SEQ ID NO: 74167 - DNA, 1052 bp, Homo sapiens
ctcattggtaggtaccacaaatggagtgcctatgaaatccctttaaaccgtgagcattctgtggtttaaatgagctatattctgattctgtgctcttctttattgtgagattcataagtaggcttagagaactagagaaattaattggagtccagccaagggaccgcatttcccaggatgttctgtgcagcctagtactggtacagcagaacttgttccaggacataattcactgcaatgtagagttattattatatttctcaaattctgtaatacaaagaggtttgatattttttctatataatctaagtgattgattttttgctttcttataagcaaggggtatttttaaattttgaagtacgtacttccagaaagtctttataaatacttaaagaggaatagaatgagaaaatcctgacaccattaaggtaagagctaaataatgagttggtagggtgacatatttgaaacatttataaaataaaatattcaaaataaattacatttttcatattattactacgaattcttacagaacttcaatctagactgtaagcttccatgttaaagctgttttcccctttctgaaatgagcatgctcagcagttcagtaggcattgcctgcagtaacactgcactagatggcagtgttacatagaacttgataaaagctttaactcctctaaaataagttattaaatggggatcatatggtgaaacatttttgtaataaataacagaatggtattatactttatacaaacacctttaacagtttgataccctgtgactatttcataaaggcgtgtgctgtagttagaattaaaaactggtattgtgtatgtgtgttaatttttcctaaacaacacaataaagtattttaaacaccactggtatagcaattgtgaaactcctatgatgtaaacctaagaatgatttttagttctgattattcatgggctcagctcagcacagttccaaattttaactacgtaaggtgaggcaacacactacttggccctaatagtaacattaaagaaaaaaataat

SEQ ID NO: 74168 - DNA, 1049 bp, Homo sapiens
gaaggatgtgagagaataaactgccaccattcaagtgtttcaagagaagcttaaaggtaattttttgcagaagctgtctttgactacccccaccctcagactaggtcacagtctcttgtgatatgctttcttagaacatttttctttcttatagcactcatcactatagatagtaaataagatgtaacaaatgatttgatacctgccacctccactagaatacagactttgtgccaggaggagactgtgttagtttgtctcactaatgatgcctcactgccttagcctgttcaggctcctctaacaaaatgccctagactgtgtgacttataaacaaccgaaatttatttctcacagttctggaggctgagaagtccaggatcaaggcactggcagatttggtgtttggggctgtcttttcgtggtgtcctcacatggcagaaagcagagagttcaatgggttcccttttataagggcactaatcctatttgtgaagactctaccctcatgacctaatcaccactcaaaagccccacctcctaagagcatcacactgggggttaggattttaacatgtgaatttggagaggacagaaacattcagttgatagcacttggttagcatagtggctcccacatagtggacacaactgtgagatggatggattgatagagcaaatagattaatgaaaagtatttgatcttttgatttcatctcctttggtttggactattgctgtagcctcctaactgttctccctgtcaccatctcaatgccatcatctgcactgccccactcccctaattttatctacaaaggagatctggtcttattcctttacaccttgagaaatctcctatggcttcctcctgctgttttataaagtttaacttgcttgtgacacacctcagagctccagccaatcttcccagcctcattttctgtcattccttccttgtactctgcatgtcagctaaattgcattactcactactgcctgtcacgcatacatcattacagatttctctggattcatttattacgaca

SEQ ID NO: 74169 - DNA, 1048 bp, Homo sapiens
tgggtggtagatagaaccctggaaagagttagcccacacccttgaggagctcatgacctaggaagcttgttgagaacttttgactaggtagaatatttctagtagttgactgaaatagctttggttgaggctattagtaaaaatttgttttaaagaggtttaacatctgttttcatttctgcttttctgagttgctttgctgctcaattccttttattttagctgtcttcctcttgggacttcaaacatttgagtgtgtcaaaatttccagtctaataggaaatatgttttgttcaaaaagaaataaagatatttataactgttgggctagaatgatggaagtttaacgctggttaagtgagactcaggtaacagacagcaaaggagatactttaatagtgaagggaacttgaagtctggttgtattcaagattcacttcctgttcttgtttatcactggaaagttgcaccttgtgaaagattttagatttagatcattgtattgttctaagaaaaaaaattcaaaatgctaaccatgtcttggtaactatagcaaaatatacagcacacaaaaataatctcatacctgtcttagggttggattttttggtatatgttatgtgttgagttctgaaatatctaatgtgcttgaaatctaatgtgcttttgttatctgaactaaaggaaaaaggctttgtcagttacaagagaataggcatccctgttttggctggattgttagttgaagtaatagaatgaattctggctgattcagcagaaagggaatttattaaagtagctcagagaatatttaggaaggcaaataatcagtcatgggtacaccagagctagaatcaacactttacagttctctctcctaaaattattttgtttacttacttaatgtttaatattggcttctaggatgtaggattcagagagcaacttggtctgtgtggttttcagctgttattccagtgtgtagaatagcagctggttcatagagacacttgataattatttgctgtataaataaatgacaatacca

SEQ ID NO: 74170 - DNA, 1043 bp, Homo sapiens
tgattagcattttagtaccaagcaagtattagttatctgttgctgcctaacaaattatgacatgtaataatatcaacctcttaccatacttaaaaactacaaatcatataatctcctcagctaatatttgatgacctatagtcaacatgtattttttggagcactgtctatgttcagggtgtcatgcccagtgctatccagaatagaaagaaggaaaagctagtgtctcttccccaatggagtttatgtttcatttgagggatacaagaatattgcacatgaaataatagaccatagaccgtacgatggctggcaaagagcttgcctattatctaacacttacttcactgacaagacaattgaagtctagaaaggctcaaagactggacaaagtgggatggagctgggttggagtctgacagaaccaggccacccatctccaggccagtgtcttttttcttcctttgttgtaagatctaaattaaaactatgtggcatatactgtaaaagccagataagttgaggaaaggaagatggatggctttgagtagtcaaagaaggattaagggaggcggtgtgatttggatgtaagtgtaaacaagaaggggaggaagcaggagaatcccactagagagaaccaaacattttatccacaggacagacaaaaccaactagacaaacttgaaaggcccatattgggcaatggagataaatcaggttggagggagtcgaaagtgtgggagaggaacttggacttgatgtggtagatcatggggaactattctcaatccctgagcatgaaatgacacaatgaaagtgggattaaggaagattgtttgccaagagaactggatagtgtctgcatttttcttttcttacactctgtgtattggtcttttttttttcattccaagtaggttaaacactgttttaatcagaacaggttagcttatgttgcagccacgaaataaccctgaaatcacagtggcttaatccacagtgtgtttcttgtttgcacacttgtctaatgcagttgggtgggg

SEQ ID NO: 74171 - DNA, 1032 bp, Homo sapiens
tgcagtgagccaagattgcgccactgcactccagcctgggtgacagcgagacaccgtttcaccaccaaaaaaaaaaaaaaaagaaagaaagaaagaaaaagaaaagatagggaagagtgcatttaagaggagagcacccaggtagggatttgttcaccacctgaatcccatgaatgagagaaaagtatcagatgtgggtgacagagaatgcaggtagagtttgtagagaaattcaggggcttgaggggaaaggtgaattgaattcagatgtggtgatggggagatgtccaaggccctggaggacataggacagggaggaatggagctcaggctacagggtggaacctcttactaaccaagtttcagtaagtggtggcatgaatgctccaagtcaggccacaggttctgggaccggagagtgtgggattaaaccggctctgccacaccatgtgaccttgttgctatagtttcctcatcagcaagatggggatgatagtcataccatgtcttaaggtagtgagggttaaataagatgatgcctgtagaggacttggaaagtggcatgtagtcagtgatcagcaaggtcttaatcgaatagaaatttgggggctgtcttttaagcaacctgcttttctgagtttaatgaaaaccttccattggcagcagttcttatgagtactcatgtagtcctccctgggttcaaaataatggccttgtcaccgggtcacttgtaatccacatgcttttcattttctcattcttcacccaaatagtcagtgagcaaatattttttagctatgaagagaataagaaattacaatggtccaaaaagtaaccaaaatagaccattttaagggctaatttaagatcagtgcttccccttctaaaatcgcatgccaccttgtactcaatggtaggagccactgtctgcccttgcctcttgaaatataaaattatttctgtatttagttttaaattgccttgttggctaattagcgctctcctttaatgtgtctaatttaaattacagga

SEQ ID NO: 74172 - DNA, 1032 bp, Homo sapiens
cacagcttagccaagtttataatctatacctattgttgggttatttgtcctatttaaggattatgaagtcggctagcatgtaataaagcagtcgaggcttctaacaccttttcaggggccacatgattgagttgtcttctttatggccaggatacagaattggggttacattccttttttttttcttttcttttttttttgagacagtctctcgcactgtcacccagactggagtgcagtggtgcaatctctgctcactgcaagctccgtctcccaggttcacgccattctcccgcctcagcctcctgagtagctgggactacaggcgcccaccaccacgcccagctaatttttttttttttgtatttttagtagagaccgggtttcaccatgttagccaggatggtctcaatctcctgacctcgtgattcacccgcctcggcctcccaaagtgcagggattacaggcatgagccactgcgcccagctggggttatattcctaatgctgcctttaatttatcagggtgcctgttctgaagttaggtttctttataaagtatgggtgacactgtttgctcaacctgtttcacaggattgtagaaaggaagatgttacataatatatggactgttttataaattattgagctcttcacatatacatgatgccatttctaacatctgacactattctatttttactatcctctcgctgaatagtcagtgaatttatttacactgatccaaactaaatagctttgagggtttttttttttaatgtggtcaactgccataataacgatccattttcccagattagtttttctagctcccaattattatttaaaattgttaataatgtatcacccgattcatggagaaaatacttatagggttgtgattttcaaacagtatgttatataataaagtcatgttctgtaacagaatataacaattatacagccctgtcctgttctccaagttgacctcctggttaggagaatgccccggaaataaatgtaaagctaacta

SEQ ID NO: 74173 - DNA, 1064 bp, Homo sapiens
gttttaaaaaagtttaaataatgtatcaaagcaatccaaactgtcttttatatatctaagttttaaaatttcatgacatgcaatttttaacagtttataattataatatggttacatatatgataacaggaagaacagaataaaatttgtgtttttactctcacaatttgctgactttggcaaagctctggcaaaggaaacagaaccatttaaatagggcaaacgcacttttgtgacagaagggaatgcactaaatttttaggcagaaattccccttcccttttttgaatcattgtctggttaagtaaagcaccccacatttcagacaggcattaagctttgcttttaaatttaatttcagttggatttttttttaaccaaatgcatatcactgccaggaaatgaaatcagtcaccacatttatgtagtgaaatatgaacttaccacagtgatctgatttgtgttaacctaaaagtctgagaaataggcttagtccatgttaggaactgaaagttagattttctttttaaaaagaagaagacgacgaccgcaacaaccatgactaaaatgacaaaaaaagaagaaagataaagaaaatgagagagaaaaagacttaagctacttcaaggggaaattattaaattttaaaactctatcaatctgcaagtactccatggatccatgcaatctatacttctacctttgcacatagtagcaagcatcacactttatattttgtttcttgctttattcaccaaacatcttcatgtcagtgcaatgtatatatttgtcgtgtatattttatataaacatttgatagatattctacagtcttccaatgtgtcaatgcataatttgcttagctactcccttgatgaacttttggattctttccaattcttttcttgttataaataatgttaaagcagaaattttaagtactaaattgaaaaatggaaaactcctacaataaagttctgtagatgagggtaaactttgattaaagcaggaagaacagagcaataaatcctgtgtgattatttttaaaagaaaaataattcctc

SEQ ID NO: 74174 - DNA, 1030 bp, Homo sapiens
attaaaaaaaaaaaaattccagctgtttgctgcttagaagagatacagctcaaagtgataaagaaaggttgagaataaaggcaagagaaaatacataccaggcaaatcccaaccaataaaaaggtagtatggcagtattaacatcagaaaaaatagaattcaaggcaaattcaatattaataggaatacagagggtcactgcaaaggttaaaaagaacagtctacaaagaatataaaaataatcatgaaatttgcatgtaacagcaaaatttgacggaatttgaaggagaaattggcaaattcacaaccatggtgggagatcttaacacatttctattatgatgtgctagatagaaaagagattaaagacttatttactcaacatgatttaaaagctaacagaacttgtactgaagacacatgagcatatatgcaaatttgaccatgtgctaggtcaccagaagactcaaagctttcagaaaatagttattttctgatcacattgcttgactacagtgcagctaaattataaaccaatgataaaaagataaaggataagtttggaaatgaaaaaatacacttctaaggaactcatgggttaaagaagaaatcacagtggaaatttcgaaatgcttagaactaaatgatgaaagtactacctgtgaaaactgtgggatgcagataaggcaatctgagatagatataaagccttgaatgcatttatttaaaaaaggaaagatttaaaatatatgttaaatatacagttcaagaagctagaaaagaactgtttgtccaaagcaagtggaagaaaacaatagagataactgcagaaattaatgaaatataaaagacaataaatatcagttttacattttgtgcaggaaaaaaaatggagtggttcttaaatagaaaatcatagggatttcattgtggaataaaagtagaaaaagatttttccatttagttgggaaaggcttcatgtgaaaagcagcttttcaggaactaggactagacacaagagagaggtgaa

SEQ ID NO: 74175 - DNA, 1048 bp, Homo sapiens
tagatatttgcagagatttaacaaaatatttttattcttctctttgggcttccaaaacaccacagccatctgtgttactgtcacagctttcagaggattctcacatgtgttatctcattttatacaatgcccagacttcttgagaaggtgataaaccccccagactggagaacaccacgcgtcctctacacaggccacgtccagggctgcctaacaactccagcaggtcttaaccatagcagagagaaaagtatccctgtaaacggctttattaggtgcgaagctcttttaaatgtaagcttcttgaggatgatgacttgatctcatccaacattttatcctatagaatgctacagaaccaacctacaatagatatctagtaaatatctatagaataaataaatgaattaaagtcatatagaaacctgagttaatatttattccattaactgactggtcatggtactaattagctctaggaagccagatgaaagtaatttatgcaagggatcattaccattgtcactaacgcgatacataaacatgtgagtgaacattttgtggagtagcatattctttgtggttttatgtccaaaaagtgcagtgaacccgcagagagaaaacatgctaaaatataagaagtgtgcagtcctaccagtaagcacagttagatgtgtgatcatccatagactcagggccatttatttatttatttatttatctatcgagacagagtctcgcatggtcgcccaggctagagtgcagtggcgcaatctcggctcactgcaacctccgcctcccaggttcaagggattctcctgcctcaccctcttgagtagctgggattataggtgagtgccaccgtgcctggctaacttttatatttttagtagagatggggtttcaccatgttggccaggctggtctcgaactcctgatctcaggtgatccgcctgcctcggcctcccaaagtgctgggattacaggagtgagccaccacacccagcctgattcagggtctttatgtaaaatatccataacatatctg

SEQ ID NO: 74176 - DNA, 1028 bp, Homo sapiens
ttggaatttatgaattgttgatatctgtggaactttataaatttttctgtaaaggtttaagtatcaaaaaattctttgaaagagactgaagcaataaaccttaaccaaaaaaaagaccaagttactgatgattttatattgattttgcatgtaaaagtatgggtttttaaatgttttaaggaaaatagtgtcaactttgacagtgctttttacctggaaacttggtatcagggagtagtttacacattccaccttatccacagcttatgagaaagaaacaggtttctgtggcgtgggggtgagtgacagtccaggatgtggagtggactggattagtcgccgttttcagtcgagaggctgcctgagtcagaggctgtgtgagtacttgaataacagggaaacagttgaagggaggcccattatagataaaatccagcctcttcagcacagggtgaaagagactcatgccattcacctcatagttgtagttgactcagtttaaaccaactaacgtgtctgtcagaatgcagtttatttgtaggctaaattaccagatatgtagcactcagatcaggagaggtgatgtttacacttagtcaggactgatctggccattcccagccacttctgggtgctgctttttacgaagacatagataacacctgtggcagtgaggggcctggatagcaggtcttaggagaactgattaaataagctggggatgtgtatgctttgtaggcatagggtcattatccttatgcttgtggaaactctcatagaaaagtgtttacattgcttgtgtcagtcttcctaactccagagactagcgggagggtcagtaagaagttactggacatagcttttggatcaaaagatgagagtcattcccaaaagttgtgattattttgaaaaatggaatatgctgtttcttatttagatgcttgagtaaacttgatgattttgagggatgatgtaaacagaattgaatcatttggtaggaatttgtaactctgtgatctcagaagcct

SEQ ID NO: 74177 - DNA, 1344 bp, Homo sapiens
gtgctgggattacaggtatgagccaccacatccagtgaccttttctatagaagaagtgaaatggacatttgcaaccttaacaaggtgtctctgttattttatgttttctatcgagtgcgatcatgaatatatagcagtagatgctcagtaaatattagtgattttaaaggatgaattagcaatggctcacgcctgtaatctcagcaattcagaaggctgaggcaggaggattgcctgatgccaggagtctgagatcactgtggggaacacagcgagaccctgtttctaaaaaaagtttaaaaattagccaggtgtggtggcacacaccagtagtccctgttactctggaggctgaggcgagaagattgcttgagcctaggaattagaggctacagtgagccgtgattatgccactgcactctactccagcctgggtgactgacagataccggtgtctcaagaaaaaaagaaaggatggatgaaatgtttataacctgctttctcttttctgtgctaccagcctcatctgcttaagccagaaagggcttccagaaggtagttcttcacagtatgaaaaaggtcaaactgaattactgttgacagtatagagaacagatgttgtcataaaataaggaaaagaaaaagactggtcagtgactaataacattatggtattttgtgaagtctgtgtgtgtagaaatagcaacggaaaatttctgcagaacagcccatataattttggtctgaaatgtgtatgtgtggcctagtatttagtcatcatttaaaattatacagtgattaatatttttaaaggagtttttaaacttctattggtatgtgaaatgtaaactgtggtcattaaaatttctaccagtattttttttagtttacgttgaaatgtaacctcaaaaaagaactctgctttaggttatttagttataacatcactatttgtactttattactaaatgtaaacagaagaacttctatgaattaagcgcctccaagggcatgttctgtggtaagagacctctggtgcgattggctccccaaatagggttctataatcaccaagagagcaggccatattttgagctacatatgaaaccatgtgttttaatcccattaaaaatgataaaaaggaagggggctttttaaaacaaaaggcaagttctgctgtatggttttactgttttaaaggaaaattcatttcttctgcaaatatttattgaaaccttactctatgccaggcacaattctagacagtgggaataaaacaaaacagaccaaaatccccatctatgtgaagcttccattctacttttaagatagataggcagtgat

SEQ ID NO: 74178 - DNA, 1142 bp, Homo sapiens
aggcttgtgattgttaatgagttattaaatatttttaaattaataaaagggcaatgaggagccagcaaagggtttctaagtagaggaggggcttgacgagatttgtatcttaggaactaactctggagccaccccggccatggactgtggtctcacacggggcagtgagagtgagggtggagacagtggcgggggagttccagtggacagagcctagagatctggtttatgcagtggatggatgtggatgtcacaccccaagacaggggacacagcaagagatatggggtgggagatgagtttgtttgggacgtgttctatcttaggtgtctccttaacatttagatgaaagtgtgttcaggagacagtgggttacatggctctgagacacagtgtttgggttggaggttcgagtttgggagtctctaccccatgaagccctaggaatggatgggcacccagaacacggaagaaggagagaaacactccccacatggaaccttcaagaacacccgtgtctgaaggacaggagtgggaggaggagaatctgaggacactgagaaggcgtagctagagggctagaaagaaagcgggatgccacaaagcctggggaagagaatgtcgaggaagagtggtcagtaagacctggtgctgccagaaggcaggtcacagagcgctcaggaggatccactggatctaacaaagggtgctttgataacctggaagaaaaaggaaaaagtgtttcattattaaaataccagactatgagcttctaaaaggcagggaggttgtcttaattctctttctacttttgttgctgaaagtattaccaggtacattagtagatgtgataattttgtgattttacattaactcattcaagtaaaacgatctagtctttttctgcccttgatctccgtggtaggtcatcccctttgtcagagactcctgttaaatcaacctgtttcctaaatgtgtaagtatttccttatggcctggggtaaagcttcccagccactgtgccatggtcatagatgggctgagatactggtcccctccccgcttgggggcaactggaaagggcctgaagccactgggccagctgtaaacagttttggcttttcctgtggaccatgcaaatc

SEQ ID NO: 74179 - DNA, 1055 bp, Homo sapiens
ctgaggttttatcacagtctgcagtcttcctccactgtgtgcgctcaggatttacttcagtcataagaagaagaaaggtagagcaggggagcattttaagggccgtgatggaaacaccagatttctggctgccctcagtgatttagcctcgtctccatgccttccttcctatcacaccctgcaaagccctgagctcctaagagttaactggagttgggacagtcagtggcgtcacagtcgggctgaaattaggagtgtctgtacagtgtctttcactgccttccagagccacagtgcacaaagagcttttacactgcctattactttcttttctcctgagcacctactgcaggctgccaattttgtgctattgactgaaggatgttgtgatacttttgaatttgaattgcttgcatagagcggatcaatatgatacttccttcccagtctatagatgtaactgcattgagagaaagctcttccaagcattatgatgattctgctccttctgtgtctgataactgtgtgttgatctctttttagggaggaatgatcaattggaatcgtctttttcctcctttacgtcagcgacaaaacgtaaactatcagggcggtcggcagtctgagccagcagcgccccctctagaagtttctgaggaacaggtaattaatcagtaatacctggtactcattctaaatccatgtttcagagttgaagcagtttcgatcaacaggactcaaaagtaatcaagcgtgtaaatacaaagatggtgacagcagtccatctgccaccatgatagagactttgggcttttttttggctattgtggttcttacgagtttaaggaaggcattattggttggggggcggcgggtgggaatgtattatggtagcttgttttagatgctcttacacttcatatatacaagaaactaatgagattggttctctgtgaaggatcggggacaaggaggtgggaggatggggagggagtgtgcctttggcatggtttcacttttgtatggttttgagtcatgttaatgttttacatatt

SEQ ID NO: 74180 - DNA, 1016 bp, Homo sapiens
ccactagagaatttctagacaaaggttatccccatggataagaaaagcccaataacctgccatgtgtaaaatcttcctataacatgtttaaaaaataagatactgctgtcaagttcagctgaaaagaaatatcaaaattccgttatgttactgtttacttgatacagcagtgagtcacatccctcatggggcagccgttaagacgaggtatttaaaggtgatatatttctcagtttgggcacttcaggaaaaaaaaagtgtcaaaaagggagtgaaaggagtatgtgtgtgattgaagtcttcagggttgtttttttttttgtttaatgagtcatttttccttgatcatcccagaatgacaacagcgaggttacttcttgtcaacatcagtttaaaacagtacttaatttcttcctcgctccgtgttacgagaagttgtaaaaacatgaggggttgtttttaacatacactttcttatacattgattttctaaatcttgtttttggtgtttcttgattatcctgcaaatagctgttataaaccattgttgccttaaagatgcaaggttcttactggcattattcattctgcaggctcttggtgttctttgcagtgggtactatagagattataaaagataaaaaagatactgttgttgccctcaagatgcttacaaaaaagtttataaatttatattgtataatctcttggccagtttgtttaaccactgtctaaaatatttgttaataacatgttaagataacttgaattaacaaaagctttttttgcttactttttcaattaaatgtttgtattttcttcatttaaatatcagagccacgtaattttaatgcattaagaaacttagtaattttttaagccaagaaaaatagaaattattatttgagttttttctgctgtaaacagatactttaggaatttagtgagagttcaagaaaacctggtagacatgaaatgtatgccatgtactttgaaagcagaatattctaagaaga

SEQ ID NO: 74181 - DNA, 1068 bp, Homo sapiens
gcaagcgtcagaatatgggaagtaaaaacccaaaaaaaacatttgtttttgacgcacttagctaaaagggaagttaaagaaaaccacactctagtttgaataaaccaaaaggagtctttcactgaggggagttgctagaaatctcattggaatgaatgtcccattttacttatgtcaaagaggagttgaattgcaagtaaaataccaaagtgggatttcatttattttcttttctcttttcctttttcccttttttttttttttttttttgagacatggtcttgctctgtatcccaagctggagtgcagtggtgctatcatggctcaccgcaacctcgacctcctgggttcaagccatcctcccaactctgcctcctgagtaactgggactacaggcacatgccaccaagcccagctaattttttttttttttttttttggtagagacaagggttgcccaggctggcattttcttaaatgagaattatcttgaggtagtaggcacacacatcccaatcatagatgtttaaaaataaaaaataaggaaagagaaactggtacagatttatttccatctctagggtgttttcctcattcagtgggttctctgaaaagcacattattagggaatgtattccatcttgctctcctttggaacattgtcaggtgacagtgacagtgctcttgtggcaacgcctatttctgtcatgctcccctgccttggtcagccagccatgtggaagtgtcacaccagggctggtgaagggctgctgacgcctgtggttcagaagctcgtgacgaaaggcaactgatggagtcacaccttgctccactggggcaccctggacacctccaagagggtcttcatccctgtgggggctctggtggggcaccctggacacctccagagtgggtcttcatccccgtgagggcggagctggagtttgccattgccacagcaccagctgcaccttggtgtcctctgagtagccttatctctgctcctcacctctggaagtcaggtttcctgttacggaaagcaggctctggatgttacatttggggaat

SEQ ID NO: 74182 - DNA, 1461 bp, Homo sapiens
atcggaacacctatcccctgacccttctcgtccttgctggctggttgtcatcgcatacccaagcccaagcatgcagtttcagtttgccatggatgtttagttttggacactatgggaaaccttcaggtgccctttcttagtgtaattgtttattctttttaaagaactgtgctaacattattgctacttagcaatagtttttaatctggtgaaaataacaggtcagtgggcagtgaaagttctcctgtcacacttgtcttctcacccataaaaatcacttaaagctctgaagccagctttggctaaaggggcatgatctgccccgcagaggatgaagagcgagcccgctgcaagctgtgacagcagacgctctcttctgccaagacctgtgaaaagccagtcttagttgtcaaaaccagcaccgcggcacatgtcgttcatgtctgagagaatgaactcagaaggaagtctcgtgtacatagaaagctttcgttcttactctaggatgtcacctacgtgacttacaacccagcccagccatcccagacctaaggggttcttccctctccagggcagggcctgcatgcagtccatgctgctgccctgtgttggtgacctgtgtgtagccagcccattatcagcatcctgtggattccaaaccaaatgtatcatcagtggagggagagctcaagtgccaggtggagctgtggcctaaagtcacacttcatcactccagattatgaatcgtcatttgccagatctccaaattgctgagtgtggacagcaaatggattcgtttgtgctggctgggtgcaaagaagcagccagtcctcagctgcacttgaagtactacaggtagtagtaaaggtagcttttccaagccgtttaaataaacgtcattaagagtggccaagttgtttgggggccatggcatcatggtggtggatagtaggtggaaggaaggcaggccagctcccgtttggcctgagttatctccaccaatgacaatggtccttaactggagggaacatcatacaggttatttccacccaagattggaaagaccaccttgatcagagagagttttccttccacatgacacatatccagcctgagtcctccagcccctctccctgcacaacctgatggaggcttgagaaagcacagggaggaacacttagcttgaaaatgttcctaaggaaaaggaaagtgtgaattctgagaaccaagtggcagaattgaagtttcacatctggcaaaagcttaaacagattattatcaaatagatggtttgtgaacgttgaaaagacagctgtggtctaggacaccaaaccaatcctgttggcaagagatcaccaagacctttgacaacatctcatcagcttatgagagatgttggtgacatgcagaatggataatgatagtgcaatgaagtgggtttgaaactgattaaaaatgttg

SEQ ID NO: 74183 - DNA, 1048 bp, Homo sapiens
acccctgccctcaaccgcaagactgttgccgttttagtgtggagataagtttgccattacattagcatgtattttctatctatattttttattgggcattttccctaggttggagagtcagcactcgttttgaatgtgtttaaaatgcattaaaatggaagatttctgcaggcagttgaatggcactccagatggggaattgctgtaaccctcttactgtaacatgtcatctcctgcgtcgtgatggggagagggtaatgttacttcacaaaggacatgtcagatccttcttcatggacttttttagttactgttttttctctcaaacttgttttcgaatctcctgggagtgagggagaaacagggagctgaatcctcccccaagctgttccaggccagaggactctgcagtaccttctcctacatctagtaacaaagaatggtgataaccatgcactggttcaaggttctggagttctccatgaaacttgggttaattttgctcagagtatccagagttagccactaggctgcgggtgaaatgggatggagaagaacaacagcaggcttcctggagccacatgggctgactagggcactctgtggctggcctggcatgggctcagcccaggaagaggagaaacgatcccttgcctgcccctccctgtggcagggctaactgcctggccctcctggctcgcagccagccagccccctggcagcaggttctcctcagggcttgggtcttcaacctgtggcgacaggaggcagggcagactgtggaggacaggatgcaggtcagggagagggaaggcaggggtggaccgccatgagcatgaaaagacccgaagcaagttgactcttgcaatgtgcaactgttatgttctgcaaaatgagcaacgatgtatcaaattgatgcaaatttagatgttgatacttacaataaagtttttaatgtgttttactcttcagtatttttctatcagacttgtacaaataaagccttgttccaggctatacatatttaccagtcaaccaaatcctccgc

SEQ ID NO: 74184 - DNA, 1053 bp, Homo sapiens
aatatgacagcaccatagtattggcggtaaatcagagttggcaaatgcaatctgaagcagaggagaggagagagtcatatccctcaagttttacagtcccattaaaagtattagtactttgagaaaaggaccgtcacgatcatggggagaatgaaggaaaaactccatttctttccagtttgcaactggaattgtcactttcgtctttcggcacgacagcgcccaggccacaaaagcccacagggcagggcctccattttgtggcctgcgtggagggcggggcggtctctctccgccacgccccagcaccgggtagacaccgcagccacgtaaccaaggaaccccgaatgaggcgttggccaggtgaggccggatccggaagtagggggaccacttcgccccgcgtacgagccccgcccccggcccctcccaccagacccaggccgacctagatgacgtgtccgagtaggagttggcgaggtgcggccgggcggccggccctgcgcatgcgtgatacttgcaccggtcgagatggtagcatgagtctggaggtcattttctttgagaaaggctccgcttctccgggtttttgctgatgccgatcccgggggattgaggaaacattgagctctggagtggaaaaggttgcagacttttagactcccaagtcgttgtagtctcaatctctagtggctgcgttactgcaggaagtcacggaagcctctcccctttcttaggcgcatccttggctgtaaaaggaggttaaaagcccctggaaaacctcaggtttatttcagctctgaaagtccggttccaaatttagatccagcactcttgtggcctggccagtgatggtcgtggagtgctttccccgcgcctgcggtctctaggctctgtggatgtagaggtgtgggatgtaggagcaggcccttacccgtggaattcacatataaatgggggaatgagacagcaaacaaacaaacgtgatccttcctgatagtggtaaatgtgggatgccgaggtttaagcagacgagtggtattaagggatttc

SEQ ID NO: 74185 - DNA, 1017 bp, Homo sapiens
tttgtttccttagcctgctcccaaccaggtgtctccagaactttttctctccgccaccaactccgcctccagacagaccgcaggtgctttctgtcatagggactggcgtgccgcggacagtgtgacaaagaaactgtatgatggatatgagaacttcgtaagacccagcagcaaacggggagcggctggcgagcgctccacagcccccaagcgtgggagctctagatcggaatttgtaatttggaattggaacgtgagcgccggaacagctctcccagcaaccacctctcccagcaaccacctcagctggcgcgcggaaaacccggaaagtggatttcgcccccgctccctcccggaaactcctcctggtgcctgcgaccgttctcactgagcatgtgcagacggcggtgcgcatgctctgttgcggtccgcttcggtttctgttgcgggacccggggtgtctcctagcgcaaccggaactagccttctgggggccggcttcctttatctctggcggccttgtagtcgtctccgagactccccacccctccttccctcttgaccccctaggtttgattgccctttccccgaaacaactatcatgagcgcgaggctgccggtgttgtctccacctcggtggccgcggctgttgctgctgtcgctgctcctgctgggggcggttcctggcccgcgccggagcggcgctttctacctgcccggcctggcgcccgtcaacttctgcgacgaagaaaaaaagagcgacgagtgcaaggtgggtgaggcctgacgagccctctgatgcactgttggaaggggaagtcgtccctatccgggggagctgatcctcgggtgggagcgagggaagggggcgtagcagcgggtggggttgagtttccccagaagcttttggggtctgctgggctgtgggtggggggctctgaaacagcccttgcaagggtagtttctggaggacgcagtgggcctcagactcgcctcccgtcttgcgggccaagtggc

SEQ ID NO: 74186 - DNA, 1075 bp, Homo sapiens
acttaaaaggggcaaatggtgggagaaactggtgttttcctagggcaagtcttgaaaactttgatctcttacaacattcacactcaaggttttcagtttaattgctagtaaaagaggcgtaaataaagtaacctgcttttaggttatatggtgtagggctttacagtatacatacacaattatttcgttaagtttatttaaaacttaacatttgggggatgaggatctctttgaaacctttaatgatttcaacaattcaaataatcgttcaacaaacgtttacaatctataaataggcttatttattaagtttgatttttttaagctggtgtttattacagttagctttactatagctgtgaattttgaggttattttagggcattagataagctttaaatttttcataacattttgcagtttctttttaggttgtcagctatcttgaatgacatgtttatacatctgtgcaaaaccttgtatctgaaaaaatatctaaggatatttaaggtttactcaagtctgcagttagtgtttcagtacttaagttcatactctgcagtgcaagaagctttcactcctttttgaggattctgactgaaagactgttgttgtgcttccaagtggaagatctagacttgcaagtacactggtttttccattaaatattttagtaaccaacctttaaggcctagtgtttggtcttactttaacagcagttgtatattctattcctagtgcctcaaagatgaaaaatatatttcctgccctctgggaacctcaaagtaagggacataagcttatgaacagattattgaaatctgatctgttacacaggatgatgtccaaagtgtgctaaaacaaaatgaggaaacatcagtggactagagtctttagggaaagctctatagaagaagtgacagggccaggtgtggtggctcacgcctgtaatcccaacacattgggaggccgaggcgggtggatcacctgaagtcaggagtttaagaccagcctggccaatatggtgaaaccgcgtctctactaaaaatacaaaaattagctgggcgtggtggcg

SEQ ID NO: 74187 - DNA, 1077 bp, Homo sapiens
attgatactgttaccaacagtttttccatctgtaaaatagggataatcatatttgattatgacatattccccttgaaaggtattttgcatttcttagaggaaaagtgcaatatttgtcattgttgtgatagtgtagagatgaaacaaatatatcttcaacttatatataatttaggtagtagagtgtttttatgtactgtaaagtttgtctcatgcatttagctcaggatgtaaattgagagagaatcagaagaatgctgaggatttagtaattttctctctttaaaaattatcttatgttgaatttactggcagagaaacaggagtccagtgaatataaaattctatttatattgctgtaacttctgattaattttcttagccttcatagatactgtgagtatgttttcatggcctcctttttttaacttattttacatgtgcgtgcatttggatattgaggaggtgcacattcttattgctttttatagccgatactatttcattctgttcctgtacaatctgtggtttgcctgaccattcttacttgtagggcctttagattgggcccaatttttctctattatgaatagctttgctacagtgtatttagcagtaattatttgcatatccccaaatataaaattctaggtaaagacaagaagaagtttttagttctgtttagtattgccagatttctttcaacaatgataggtttgatttcctttaactaaataataccttgtgttgccacatcattttaatttttatttatcaatttaatagtgatgtgatggtccctaagactttttttttttttttttgagacggagttttgctcttatcacccaggccggagtgcagtggcacgatcttggctcactgtaacctccacctcctgagtttaagcaattatcctgcctcagccccctgagtagctgggattacaggcgcctgccaccatgcccggctaatttttgtatttttagtagagatggggtttcaccacgttggccaggcttgtctcgaactcctgagctctcaggtgattcacccacttcagcctcccaaagtgtt

SEQ ID NO: 74188 - DNA, 1029 bp, Homo sapiens
tgatacattctttctaaggagaattggaagctgcttcatcagatcaggaagggttgacaaataaggtacatttaatgggtattagatattagatgaaatgccaaacgtagatggataaaaactaataacatgtagataagaaaatgagggaggaaagggtgtgaaaaccccccgtgggctatgtactgaaatggaataagagtgatagtaattggtttaaatgacaccaagttttataaacagaagattaacatggtttctggaaaagaagttttcctggtctctagagttactggaagatttgctgtagttttagaaggagccaatgagtttgatttctaaagttttgacaacattgttttttaaaggttaaaatggaatttaaaggaagtgtggcttgggttggcttaagggctgagtgaggtggagtgagagaaatccatggggagtgctgacagtggagatttccaggactggtgcttgaggctaatttgggttttaaatttagaaaagagaatgcacatgaaatactttaatttgctagtggtacaaatctctgtatgtagcataatgtaaagctaatgaaaatatattttcagaagctctcttcaagttatatgagacagcaaaaagtaaattaatttgctcaaggacaaattgagaaagtatatctgaagagaaacagttaccatgtttttgagatgatgagctccaagctgtcagtttagaacataggaaggaaataaagaactgtccatgaagaatttaagcttctgggtagaaaggctaatgaaagtaacagtgttattctatacttacatgaaactttaacatgtaaatcttaaactttgctgtaattctctatgacatgccttttaagaaggatatgagaatagggcaaggtcctgagaagagcagctggcatgatcaaggagataggtgattcagaagattgagactcaaaggagataggagagagtgcagaaaatgagaataatgttttccctcaatcttagactcttagagcca

SEQ ID NO: 74189 - DNA, 1013 bp, Homo sapiens
tgattgtacctattctatgtttagatgtgtttagctacacaaataccattgtgttaacagttgcccacagtatttagtacaatcccatgttgtttaagtatgtgatggaccacaccatatatatacccccaggtgtgtagtaggctacaccatctagatttgtgtgggtatgctctgtgatagtcccacaacaaaatcccctaataacacgtttctccaaacacatccctgtcgttaagtgacacatggccgtaaagggtgctgagcatcatgctgttctttcccgtgctgttctttctgtttctggtctaacacagaggccgttagcctcctgggactatttacatttaattaaatacaacttaaaattcagttcttcagctacattgactgcattccaagtgcccaatagccacatgtggctggtggccaccatatttgaagaacatttccatcattgcttaaaactctgctggacatggctatgtaatagtaaatacggtactttatgccaggtgctgctcttgaatcttctcaaaaacttcttgaagtagggattattatcacttctgttctacagatcagaacgttgaggaacagggaagtgaagaaacttgcctagaatcacacaactagtgtcagaggcaggatttaaacccacacagcctagcttcagagtcttgcttcttaatcatttcgtgctgagaaaggttgagagtgaggaatacgcttaattgtagcaagagggacatggcttatgtgttgacagtgctgtacagattttgaaaaacaaaacatagaaaagttgtgtagagtataatagctgcattccttcctagaaggaaatcgagagataggaactggactagtattttggagacccttcagtcttctttatgttaaatggatcatttgaattctgacatatcttcatagcagtgttgaccctttctaattagtggaaattattttggcaaaggaagccattaaatgggaattttgtcttcacaacg

SEQ ID NO: 74190 - DNA, 1051 bp, Homo sapiens
tatttaaaaaaattttaagacacagccttgctctgtcacccaggctggagtgcagtggcgccatcatagctcactgtaacttcaaactcctgggctcaagtgatcttcctgcctcagcctcacaagtagctaggaatacaggctcatgccattgtgcccagctaattttaaaaaattaaaaaaaaatttttgtaggaacggggtctcgctgtattgcccgggctagtcacaaactcctggcctcaagtgatctcccacctcagcctcctaaggggctggcattacaggtgtgagccaccattcctggccttactttggtatattttaaatgtatataaatccagtcagtgaatggatttgtaagagaattgtttaaagttgactggaattataacattttacatttcagacatgtcaaattcttttttaattctaagcatgacttaaggctttgtgtcctgttgtttatattctaattttgtgtttccttattttcaggccgaaatagaactatttgtgaacagacttgattcagtggaatcagttcttccttatgaatacacagcgtaagtttttcagcttggcttttatataaaattttatgtgactcatcagaattttgtacattgagaactttgttttctcacagttatggacaagcctgaaaatattttttaaggtgtactcttccaaggtgtggttaaaaatgtgatcttttttttaatgtttctttgtaatacaacagaagcactgactaaacaatggatttctttttttatctgactaaacaaaaagctattttgttttcttaacattttaaaattataaatagctccacatatttttaaacaaaatttttatgtcccacataatcagttcccagaaataactactttgatgtctacctccacattttttctctgaataaatagtctaatctatataatcacatttatacatttttgttttaaacagaagtagattcatagtatttatttttatttttatttttttgagacagagtctcactgtattgcccaggctcaagtac

SEQ ID NO: 74191 - DNA, 1115 bp, Homo sapiens
ctcctgaactcaagtgatttgcccgcctcggcctcccaaagtgttgagattacagatttgagccagtatgcctagcctaacctttctattttgatgtatttggaacatctttggtacatttttcgaacaccagttaaaccaaactaagcacaatataaggtattcttttcaacatatgtacttcatcatctctcagaattcttttgcctttaaatctgttatcttttaagcctattatccttccacattgcataatccctgtttgttttgtatctgttctcctactgtacaaagaacaatggtcttttgcttttagaaacattaaagtagtttattataataatgtatcaccatataaaaaaattaaatgatgcaaaagaataaataataataaatgtgcagttccacttcacagtttgttattaaaatttcctgaaaattttcatacacctataagcttacattaaatagattagatttacttatttgttttaacatactatatgccacactttgcatttttcctttaactctctaccatgggcatctgtccacatgagaatgtgtgttctgatggctctaacttgactccaggtgttattccccagcccgacagcttcctctcctggcttcgcgtctctgctatgtcttagacctcatccatagccaccttccctgctttctcacgaggcacccccatctccctcgacattttattacatggagcacaacatttattatctgtccagcaaatcccgaagcctagattcatctcaccaaccgtcttactccctccagcacctgcacctacactgtgaagccctgggggaaaagaaacatcactgtgcaaatttaatccactacaagttgattggttttgactgtaaatatatcctcttcaaatattctttttttttcttttctttttttaagagatggagccttgctctgtcacccaggctggagtgacgtggcacaatcataggttactgcagcctcagactcctagtctcaagtgatcctcctgtctcactcccctgagtggctaggactacagatgcataccaccacatccagccaatttttaaattttttatagagacagggtctcactc

SEQ ID NO: 74192 - DNA, 1029 bp, Homo sapiens
attactgaggaaagaactattgaaaataaatctgtgaaggtgtgtggggaatttctaattttaaataggcttactgcaaaggtggatttaaaatcttaaaaaagccttaccgagaaggtgacatttgagcagaagacctgaagcaagtaagggagtgagccatgtgaatatgtgggggaggtgttctagctgaagagaggccccaaggtgtgtaacttgagcaggtgagcaagatagagcatagtaggcagtgggcacagagaagtaacaggaccacattatagaatgactcagaggccactgtgaggattggcctttacatctgagcaagatggttagttaacactggagggttttgagtaggcttcgattttaccagggtcaccctggctgctgtactgagaatggaccgtgggggtgcgaggggagaagccaggagaccagtaggaggccttctccctcatctaaatatgatctgacttgggaagggtgagggggtggtgaagaggtcagaatctgtgaatctggctgtgttttgaaggtggccgacagaatttgccaagggatgggatgtggagtgtggagtttctattttctaagatggggcagtctgtgggaagagccaggttgggggatggggaagagttagttttggatgtggtaagtgagaggtgtttattaggtgtccaagcagagatgctgaataaacagccaaatatatgcttttggagtttggagaagggcttcatcctggatatacacagtatatatttgagaatcatcagtgtatagatggtatttacagccacagaattgaagagatccccaagggagtgggtatagatgaagaagacaagattcgaagaggcacaggactctccccatcctcctgacctataaaatcaggtgccccaagggctcctggtattgtatttttagtagaaacagggttttaccatgttggtcaggctggtctcgaactcctgaccttaagagatccgccccctctcagcctcccaaagtgctgga

SEQ ID NO: 74193 - DNA, 1022 bp, Homo sapiens
gagctgtgagtattctgctaaaggtaaattacagtgaagtgtctaaatagtattgttaaattagcaattacaataaattagtttataaaactctttcctacctaccatttatcctttcaaaaaaggtacgaagttttttttgtttttttttttttctttttttaaggctagtcaaatgaagcagtgctgtacctggttgtgatcaattagttgtaaacaccactgcactcggaccagcctgtagttttttccatcactgcagtgtatcagatactggcatattgttattgcttatgaaatagcacatttcattaacattctttgtggtttttgtaatcttaaggcatttacacatttaaattttacaaagtgatgacactgatttgggcagtaattctttgtcatgtttggtgggttcttttctaacttaactcctctttccatgtgtaggattgtggataatatgcctgtaacgtggtgttacgatgttgaagatggtcagaggttctgtaatcctggatttcctattggctgttacattacagataaaggccatgcaaaagatgcctgtgttattagtgtaagttcatgataaactctttgctgctttttaaaacatggcttttgatagaattcagtctttacctggacaaaaattgttatattcattgaatgagtgtacagttcagatgttctgaagtacaactacttcaatcttaaacttacagcagattaataatgtataagttgaggtttagaattggaataattcagattcagttcaacatttactgagattgtctgttgtatgttaaatgctatggtaaggtctagaagtttgtcctaactctcataaatcttatatattacaaaatgtacatagtagagtgtcaaaaaaggcttcattataagttaactaaatttgtattgcagaagtcagatattataacctttttaagacctatgtgtctttgaggccattattatatttaaaaatagattaatcaaatagagacattact

SEQ ID NO: 74194 - DNA, 1074 bp, Homo sapiens
agcatgagttaatcatgaaactgattatatcagttagtgcttttgtgagtgctgaccagagatacttgaataatttaggttatgagtttagtccaaacttataagcttccaggcaggaaaagtgtttaaatgtataagcattagtgtgctcataatattttaaattttattttgtttcattttaaatgaaaggctagaaaatactagattagtgttcttttgaattggtacttattagattttatgtaaaaaaactgtaagaagcatataccttccccaattaatttttggcttaaaaagagtttaagtataaaattgaaacatgttaatgtgaaaggcttaaaattccattcaaacttaaattttcttacttgttgtagcccattttaaagttttaagttttgactcttatgtagtcagttttctacctttaacttttaagttctgttctgcagtcagatttccatgaaagagatacattttacatcttcaaccatgttgacatcaaaatatactatcatgttgttgaaactgggtccatgggagcaagattagtggctgctaaacttgaaccgaaaaggtaattatattaatgataaaaagtaaacaagtataagtgaaatttagacccaaagaataagtatttggggctcaattactccttaatattctgacatttcaggattgatttcactaaaactccctttggcatgatttgttattgttatgggttgtccagaaaaccataccaatagttattttcctgtcatgataagcggtcaagccaaggtgccttagtgttttgtttttcagtcaggaggttttgacagcttttccacgtgtcagtggggagggagaagttgagtggttgggacagtggtccccttcgtggtggaaagaacactgcctcagataatgtgtggctttcctctggtcagaggcccaaatgagtggacaagtactgtgatttctcaagcccctatgcagtgttagatgccactatgaaatacgagccattgaaagagatctcttcaacttattattttttatcacgaacgtacatatcagttattt

SEQ ID NO: 74195 - DNA, 1036 bp, Homo sapiens
tacttaaagagattttttaatctcctctaggaagatgataagatcagatgggcgtctagatgggactatattctggagtctatgcctcatacccacattcagtggtttaggtaagagtacagagttagcctgcttttgctttctacttttctaccctctgtccctttgaacatctcatttactctcaaatcctctctactttattcaaaagtctggccttgggttcaaatcctggctttcagccactgattgtgagtcacagcaggtcccttaatttctcagcgtctgtttctttatctagaaatacccaccttatgggattgttgtgaggattaaaggacatcatgggacagaatatttgaggacattgtctggcacataagagtgttcagaaacagaagccgctgttgttgctatgactttattattatccccttcaaacatgattcaaaacttttatctagagttgttcatgttgccataactctccttttcctattgctgtctgatctttttgacactcactaatttactgagtaaagttgttcttcagtaaatttcttgagggcacaagccagtcctttgttgtggcagtgatttgggcacagtagttatttcataatattgaccatgtaccaaaaaattctagttctaaacagactatgaaactgtattatgataagtatataatgttatttatctactggagggaaacatgaaagaacacagttcattgaatttgttggatttcagatagctttcattttgattttgatcaagactgttttaatgttactcaataaacagtttttaaaagagttttactgttcctaggattaagctacagattactcatgatgtgcttatttctacagcattatgaattccctggtcattgttctcttcttatctggaatggtagctatgattatgttacggacactgcacaaagatattgctagatataatcagatggactctacggtaagtggaaacattttagtctttagtctgccaaggacactgtttattgtta

SEQ ID NO: 74196 - DNA, 1041 bp, Homo sapiens
gcttactgtattagcaaagtagctagaatatgagagctaatgccatttgcttattgtggagatcattaagagtaggatgaagaggatagaatgtgactaaaaatcgtcatcaagtcagatcacaaagcttgacttagagtagaattaggtagcaatcacattgtctttgtaaagtttctcaataagtatatttgtagaccttaatgtcataaatttaagaaactgacatataagacagttcagcaaagccatattaagctccatgagtcaagctgtattcttcaaaattgaaataggtactaacatttttaagtttaaaaaaaacctgttttctgtaacagcatattcaacagtgaacaaactgtctatagttgtcttgttgataccatgagacaatcgaactgatttcattccccttttaggaagatgcccaggaagaatttggctggaaacttgttcatggtgatatattccgtcctccaagaaaagggatgctgctatcagtctttctaggatccgggacacagattttaattatgacctttgtgactctatgtaagtgttaactgaaaattttcaagtagaaaatactttctaaatacagtaattgcttaaaaaccagtttttctggccgggcatggtggctcatgcctgtaatcctagcactttgggaggccaaggcgggtggatgacaaggtcaggagtttgagaccagactggccaatatagtgaaaccccgtctttctactaaaaatacaaaaactgggcatggtggcaggtgcctgtaatcccagctacttgtggggctgaggcagtagcttgaacctgggaggcggaggttgtagtgaactgagattgcgccactgcactccagcctgggtgacagtgcaagactccatctcaaaaaaaaaaacaaaaaacaccacagtttttctaagtgggtaggtaagccagattatttctgagcatcctttaggttctcaaaatctaagtgacttggggcaggtttagttgcacccaaagactgactcttggtttctc

SEQ ID NO: 74197 - DNA, 1922 bp, Homo sapiens
attagattatatatgtctcttctgtttgaatgttgtaaggttttgggtttttttttttttacccccagaggacccccatattttttaatgaaagaacagtgggaatattttgtagtggaaacattttcacttatgtcaattttaaaggctgtacttgaatctcagaagagtcaaatgcactcttgagcatccagtcagcctcccctgatcacaggaaggatgtgatctctcattctggactctgagaagaaacttccaaagtgaagtttgcctcatgtatgatcagattggtgcagtacagtaaatattactaagattgtgtagagctgcatggtaggagagcacatggttttgcgtgaagttgtatttttttcttgtttgaaaaatgagagggtttctctatcatttcacagcaaaggaaacagagtaataacatgtacagcctttcacgatttgtgttttagttttcgcttgcctgggatttttgtcacctgccaaccgaggagcgctgatgacgtgtgctgtggtcctgtgggtgctgctgggcacccctgcaggctatgttgctgccagattctataagtgtaagtcaaagccactgtgactggcgtctgatcaggaagggactctgctgcggctgtggatctgacctgggtatcagatggtgatgctttgtaaatagtgtgcctcataggggtctgttcttagttaaaaggagcctgcttggtgattccttttgtgtcatgagttactatcccaaaatttatttgttcgaaaatgtttagtgaaacaagcaaattgtgccacttatccactatcccctccctctttttttctttaagctttggctaacaggttgggctgaacagcttagatttgctgtgttcatagaagcacatatagactaataaaggagaaaagtatacaaatgagtatcactgatttttttcactaaaacaactagtacatctaggtgtaccttttcttacatatgagaagtcatacttacattgtatcaatttaatatttataaaaatacactgtttcaagtaaacaaagatctcattattttggagacctggaaagttacttttgtaatatcattagtcacaatctcttgtgttcttgcattctagaagtaaaataaagttcagtgaaacaaaaggctcacggccacagagtaaggctgagatgggactggatggcttagaaagcagctggcagggtcagcagggaccagagctggcctcctcgggaatgccacagtctcgtctgggatatacagtgattccccacggtctagcaatgtgaaaaagttttgaggtgaagcacagtagagttacgtggacaaccttaatgtggggttgggtagtctcagcccccagtaaaagattaacttagaccttgtcagacacagttctctcttgagtatgtgaagccctgtatgtatgtgtgttttaagtgtgttttaatttctgtgaattttgtcaagttctttcttcccctttactaaaggaggtaggattagggccatcatacggattttaatgcatacaaaatacagtcagccctttgcctgccacaccagccttacttcatgccacactccccctttctcaccatttcagccacacaggctttctgtcggttcctcggacaggctgcctgctttcccacaccctgctcccatctgcactccactcactaatgcctccccatccttcaggtctcccagctgcagatcctgtattacttgaattttgactgaaattatagtaaacccagaattaatcatttcataacagtctgtttatcagaaacattgtgagttcaaatcatgatacatatatatgatcttatgtgtatatgtaattttattattttcttttagggcaagtggcacttaaacttgcctatcaact

SEQ ID NO: 74198 - DNA, 1308 bp, Homo sapiens
ctttcttctcttaagcagagtgcacaaaggataaaagggaaagtggttgcgcttaaaaactgtgtgggggaagtacagtgattattgtatgattacaaccatatttttaaaaatgtattcagaagaaagactgaatggaaattaactacacacatttagatgtttgggttcaaaaaaagccacagactgtgacaagatatttaacaaggaattagtaagtagaatatgtaaataactcacatacatgacttggcaagacatgcaggtcaaatgaaaaccaagcagtggatgtcagtagcccgtcacagaaggtaaaaccaaaaaagccagcaaacaccagacgcctgctgcagttttcaatagaaaatacaaattaaaacaacagaattgacaatcccaagtgtaatgaaaacatgtaaggaactgactttcataggctgctgggaggagtttaactcaggcaaacccaatctgaagagcaattgggtagtttctagtcaagttttacattcagacatcctgtgatgcagcaattccactttctttgtatatatatattagaaacatagaagttgtcatattaattacatactactgttgcattttgttatctctggttttacccaaaagcctgttgtgtctttcaggattgtatttgctgacttctttataatgaatctgatcctctggggagaaggatcttcagcagctattccttttgggacactggttgccatattggccctttggttctgcatatctgtgcctctgacgtttattggtgcatactttggttttaagaagaatgtaagtttataggtgttaacttattcaggtgaattttagctgcagaaattagcatatgccatctcaaaagataccataaaagtgtgtaaagatgtaaacttgtcctttaggatctggatttcatagaatatttttaaaatagtagtattatttaggagcgtggtagagaggttacagatctaaacttaggtttcaaagttttttaagtgaatagaagctaatatagattaattgggaaagaaatgctgatataaactaatgaaaacattcattcattcattcattcattcatttagagatggagtctcattctgtcacccaggctggagtgcagtggcgccatctcggctcactgcaacctccaccttcagggttaaagcgattttcctgcctcagcctcccgagtagctgggattacaggcatgtgccaccacacccagctaatttttgtatttttagtggagacaaggtttcatcacgttggtcaggctggtcttgaac

SEQ ID NO: 74199 - DNA, 1233 bp, Homo sapiens
ccttatggtcgtaaagcttcatacagccattcattgttgttttcatgttcttaagtcttagtaaaattgagcaattttagtaaagatgacattgcgcacctccaaataaaaatacatggaccaaaattccagaaccagctgatttcttacagtacatgtgtaatgaaaatgaaaagcctaactctacctttttattaactattattttccaagtattctcttatctcctgtgtactttttcctgtgtctaaagccattagtcagtagatcactgctggagacagtattaacttgttccagtagacagactgagtattgtacctgatggtacctggatgatggcttccaaagacaaatttcagtttgatgtcttaagtagactttattgccattagtgacaacatagaagctgaaaaaaagcaggcaaataatctcgtgtagagaagaatatttgagacagatacgtaattatgaattcttccttcctttttttactgaaggccattgaacacccagttcgaaccaatcagattccacgtcagattcctgaacagtcgttctacacgaagcccttgcctggtattatcatgggagggattttgccctttggctgcatctttatacaacttttcttcattctgaatagtatttggtaagctaaggataaagtcctctcattctcattaccattatatgtaatatttcctttttgtttgtttatatgggttactatttgtatcctgtaaatgtaagcagttcttcagtaaccagaaatcttaaaagccaaaagcttatttttatcttttccatgttggaagaagaacaatagtgataacagctagtataatatgaattcaaggcttgttaattcttactcttccttaattcttactacttcattctctgtgaggtgagtgttatccccattttacagagctgtaaatgaggctttgtaagttgagtaatttgcttgtgttacacagcaaccctgtgacagaaaattcaccgaagtttctccaaacctatgttcctaactaatctgcactgttcagagaagatcctctgagcacttgtcggaggggattggtgaagggattggtctaggtgacctgcagagtcctttgcaattctcagatgccttcattctccgattgcttgttcacatgtaaaaactcataatagtcattttgagccattctgtgtgtgtgtatatctatatatagtgttatatca

SEQ ID NO: 74200 - DNA, 1050 bp, Homo sapiens
ggattaagatatcccagttcagtatatttagttggaaattactattagagactttaacttgttaattttctgagaatagtatgttgtgctaactttttactgttgttttttaactgacttaaaaattaatacttttgtgatacaaatatttatatcatgcctgagataaaagaatataaaataatctattaaaaaatacaaaaaaaattttagactgaaaatttaataaaagtaaactagtaagaaaattcattaaaaagtttctataatcacattgtaatgagttctattcatggcagcaccaaaatgatagtatccttatgtaataggtagaattgaattttaaagatttaggttgtgttaaatctactatttaatattgtctatattggagaaaaagctaactttattaaacttagtgtgttattcaaaaaatggaggttaaatttacataacagaaaatgaaccattttgaagtggacagtttaatggcacttactgcatttacagtgttgcgccaccaccacctctgtttagttccaaaatatttttatcacccctaattaaagccctatacttgctgagcagttgctcctcattcctcacttcccccaggccttagcagccaacggtctgctttctgtctgtttcgcctgttcagacatttcttacaaattgaatcatataatatgtgaccttttgtgtgtggcttctttgacttagcatgttttcagggttcatcatatcatggcatgtatagtagtacttcattcctttttttttttttttcctttttttcttgagacggagtctcgctctgctgcccaggctggagtgcagtggtgcaatctcagctcactgcaagcaccacctcccgggttcatgccattctcctgcctcagcctcctgagtagctgggactacaggcgcctgccaccatgcctggctaattgcttcttgtatttttggtagagacggggtttcaccatgttagccaggatggtctcgatctcctgacctcgtgatccgcctgcctcggcctcccaacgt

SEQ ID NO: 74201 - DNA, 1634 bp, Homo sapiens
tatctaatcatgtcacttttaacattttgtaaaaacttactgagttattttattataattctttgaagactgataacttccaataactgtacttagaaaatatccccatttaatcattatttgaacctgttttaatgtattcatctcataccttaaaaaattctagtagcgttttccattttgttgtaaaatattcttaaataggaaaggacagttgacatccttcagtcttttctatgtagtaaggaaaataatgtgtattgtagaaagcttaggtaatcttatagtagaaaaaagttctaccaatttttgtaagaaacttgatttgaggtggtcgtatatttttcagacgtgctcatagatctgtagtatattcccggtgggtaatagtttatagttttgcgacttttttaaggaaccagtcattgtaagtctgtatttttgtgtaaagtatgaaacttcctttgaaaaggggtttatttttattttttctcttataggaacaattggcttctttgcatgcttttggtttgttaccaaaatatacagtgtggtgaaggttgactgaagaagtccagtgtgtccagttaaaacagaaataaattaaactcttcatcaacaaagacctgtttttgtgactgccttgagttttatcagaattattggcctagtaatccttcagaaacaccgtaattctaaataaacctcttcccatacacctttcccccataagatgtgtcttcaacactataaagcatttgtattgtgatttgattaagtatatatttggttgttctcaatgaagagcaaatttaaatattatgtgcatttgtaaatacagtagctataaaattttccatacttctaatggcagaatagaggaggccatattaaataatactgatgaaaggcaggacactgcattgtaaataggattttctaggctcggtaggcagaaagaattatttttctttgaaggaaataactttttatcatggtaattttgaaggatgattcctatgatgtgttcaccaggggaatgtggcttttaaagaaaatcttctattggttgtaactgttcatatcttcttacttttctgtgttgacttcattattcccatggtattggccttttaaactatgtgcctctgagtctttcaatttataaatttgttatcttaataaatattataaaaatgtcttcattgcatcattacctattatatattcaaggaggttctgtaaatacagatctatttaccaaggtgttttgaaatgatttatactattttatcagattttactggattttgttaatgtaacactttctgagttttgatctgaatggaatttcactgtgtaaggcattgtctaaaatgttcactgtgaggcagtagaggaggttgaagtcatgcatatctagacagatgaattatctgcaagtacttaaggtggagccttactacattgtcattaaggagtttctatttttgacttgtttttcaaaatacagtgttttaagtcaggttttattacctggacattagcaatcactagcaagtcttcatctttatgatttcattgttttaatttagatttcacaaacagttttacttctaagagttaagaaatgc

SEQ ID NO: 74202 - DNA, 1009 bp, Homo sapiens
agtgtgttctcaggaggcacacctgaagcctcaaaggtgaggacatagacatggctgtgggtgagcctgtgccaagacatgacccatatccatggggagtgctctcagggcagctgacactgctcagcctcagcagtctccagtgatagcttcggaacagccacggtctgactgatatactttctgaaaacagcctttggtcacacagtttcctaactaaatgtggtggtggccactagaagttgccattttatgcgggactccctgtgaggaagcccatagtgctggtagctgaaatttaggaatgcaggtttctaagaaggctcggaaaagcaagctgggctccttggggaggagctattagtacgtttaattaaattttttaacatataaaaagttgttaattataaaaacaacatttttttctaccctgagtgcagctggagctgtgttctgccgttacacaattcctcattaattccacacattgcttacgatcctgtgaagtttagaattttattaggcaataaataagaaatcaaggaaataatatttgtggtttcatatcggtcacttgggtatgaatttaaatccactgtaattcaaacaggtttagtttatttcatgttgctacttgaatgtgttatagcgtatcaattaaataactcacttgaatgatgcagacttgagattcattccctccttctttccttccttcctttctcaccccatcctccctaccataaaccaggtttagaatagctgttaatttagctgctttgattttttgttgttgtttattttgaaacggagtctcactctgtcgctcaggctggagtgcagtggcacaatctcagctcactgcaacctctgcctcctgggttcaagcgatcctcctgcctcagcctcctgagtagctggaattacaggtgcacaccaccacgcacagctaatttttttatttttattttttatttttagtagagatggggtttcaccatgttggtca

SEQ ID NO: 74203 - DNA, 1116 bp, Homo sapiens
gcggaagactgtgtttactgtttaactcacagttcacgctaaaaattggcacttttttttttcctaataagggcctctctatggacctttttaaagtttatatggtcattaaaaacatcattgcacacatatactttgtaccactttggaagtagtgcaggcttgtttgaaagcatacacttgacttgtcttcttacttagtctcacagtattctttgtgagaaggttgatatgcccacattattctgtggccaaaaacaaaagtttaggaaatgaaaacagcaaacagaaaaccccatgccaagtgctgttttcgtagtgaggcactggagggcgctccgctctagcaatgggagatgcacgcagtctctgcagtctgcaggctgccctcacgaacgcctttcagaagatgtaagagttttttctgttcattttaaggcaaatgaaagacacatggatggtagaggaaatatttctatactgacctataaacggtccctttaaaagtttatgagaaactgaagaagtagctctgtgctccagccctccttatgacctcctctctccctagcctgttgcagcctcaccggcctcctcttctgggctgtgtcgtcagcctgaagccctctgtccctttgtgcctcagctcaaatgtcacaaatcagagaggtcttccttgaccaccctgtacaacatagcctccaccccgctaagcagcctctgcactaccctgtccccttactgctgttttcattttttcctattgccccatttccaccagacatatcacatgcttatttgtttattgtccgcctgtatcctaccccagcccccagatattcatgagagcagggacttggtttattccattgctactatatatccagaacctaaaacaatccttggcagtgcctgatataaatttgcagaaggaaaaaagaacagatttaggaatgaaatattttgagtgtttctaaagatttagtggattttttttctttattttggtaaattatacataacaaaattatcattttaacttttttttttttgaggtggagtctagctctgcccccaggctggagtgcagtggtgcgatctcactcactgcaacct

SEQ ID NO: 74204 - DNA, 1760 bp, Homo sapiens
ccgagatcgtgccactgcactccagcctgggcaacagagtgagactccatctcaaaaaaaaaaaaaaaaaaagatgagatgatgcattgaatgctaggtatggcgtgtatgtagttcataagaacaccaataaacagtggatgtaaaaagcaacatcagatagatacctaaaggccatgtctttggaacaggggtaaccacctgaagcatgtcctcccttccctgcctttttcctccctcagagcaccccgttcttcattgcacttatgatttgtcaccagccacgaatgtgtgcatctccctgttatgtttggtctcctgcactgggctggaaactccacgttcaccctttatgcctgtgcccagcacagtgcctgacacagtaggcactgattaaatgattcttgaatgactgcatcatcatatggtcacagtaaacagaatccatcactaattatctatttgacatgagcgggtggaaaggcaaagtttttatgcatgagtgtgggtgtatgtatgttttcctagattatagatttgtctaaacattcctgctaattttaagatatcaaatctgaagtttccttggcttgaatttttgaacataggccaaggttgtttttagattcctcagtattctctcttttgtgaaagttttcaaaagtataaacggcgcatcttccgtacaactggtttacattgttggtttatgcagttgagttgtgggcagaggggaaacctcaatgtctgaatgtggctttaccccagcgctgagatatccccgggagagcttggccagtctgagtccatgtggcctaaagatcctccctagccagttccctgtcccacctacattctgtttatttcagaacttctcacctgttgaacacacagcccttcctcaacacaggaccagctcagcatcgggaagctgtattttaagaaaatcatggtcttccagctcagtggaggcatcttagcgggatccaaaataacattcgcttttatcttgaaattctttctgtttttggtttttccccaactctcatccttcccccaccttcacctcagacactccaggttattactgaaattaagcatgatagaaagtgtggactcataggctcagttctgttccctccttatggccagcgtgtggaagagctcctctgctctcatgccttctccatcggagctggttcatcaccttggcctgtcttgggcggagtccccgacttgggagttgtgctgttcgtttgctgtccatcgggctgtaagctccttgaggaccaggcaccatgtttactcacccctgtcccttctgggaacctgggggaaactgctaactggcgtggctctcagaccttgcatggccccacacattttttttctgtgggaaccactaagcattagcaactcgccagtgatcagcagggattagcagcgtttaggctccgcagacatttaatgtgctaattgaggagcccagggttcggccaaggaagtgatttacaaaggtggaaacgggactgttgacacaggtgcatcttattaattactggtttggggaattagtaaaaatgttaataatttgagggattattgttaatgaaggataagaaacttcacaaccatatggtttactacttgatgcgattttcccttttttaaaaaaatacttttaaatctgggttttaggaaggacaagccatttcttgcagaacttattgattgtattacataggtaaatggaaaaatat

SEQ ID NO: 74205 - DNA, 1397 bp, Homo sapiens
gctcagaactttctgtccacggagttcacactggttttgtgtttgggctggtgcttttgaatctgaaaaaaagtgcataaaaatatgccagaaatgtagtaaatattgtgatcatttcattttttaatccgacacttttgagaggaaaagagtattcatcagtactttatcatagatttaattaatgggataatctttaatttctgactcagacatctggatttgtttcttgccaccccctcctttttttctgtgttcctttctcgtctttatttttgatgaagataaaatacttaaagaaagcgttgaatgtgatgatgagtattgttttaacagaaagtaaaatcaaaagcatgcagaataaattaaccttgcattttctcggcaggtcagttagtgggtgttatatccttagttgttggtgctacaaagtaaataatttttggcagctggtttagttttcaccacttctaagcctatgacaaatggtcttggaagatctttggtcttaaaaaggaaaattttctgtgtgcgagttttaagttcagttttgttgggttttgaagtcttttttatgtaagccacttatgtggcattttgttttatttgaatttgaaattttttttaagttttaaagctagagtctgccacattgaactgtttttcacacttggcatttaaaagttaatttgctttttctgtttttaaaagagactaaaaaactaaggtttcccctactaagcatttattagtcaaccacttttgaaaattgaaaaattagtttgtatggttttagattgtttttctcccaggagaaataatgttgctacataatctcagacctgcattcacgtatttagcctgccataagtcactgtcaaaatgaagaaaatgctgaaagttagatatacctgcacatgtgaatttcatgtattttctggtaatcaactctgttttaaaggcttttgggagttgttttctttcagaagcagcccactggtgctgtatttggcatgttgtgtgttattaaaacttcatataaatgcagaggtactaaaacgtgaagtttacaaaacccatcggaacatttttacttgtgtagttagcacgatcacttctccaagtacaataatctttgtgttgtgagcctgtagacaaaactcgtgtctggcatatctgattggaatgtgaaatttaatattttccactagttatttcccaacatgcaaagtgaactgatacccattaaatatatatatttaagtaaaaatagagaggatcagtggcctaatcagctttacagctgtgaatttaggaagtgaattcacaacatccctctctccagagagacgacttgatgacttactctcggtttctttaagtgatatagtagacct

SEQ ID NO: 74206 - DNA, 1164 bp, Homo sapiens
tggagcatttcttgtttaactgtcatgtaagccccttaagcaatgcttttttcagagaggtatcatcctgataaattgtcaaatgcctctttcaaatccattccttttaaaaaaaatcctcttttctgtttattctggagtcactcatcatgcaaataatatctttgtgagaagtggtgttcctggagttggagaaggctctttagtagggctgctggtcagtacagtccctgaaaaacatgactatttataacacaggcaccagagggttcagagacgtgctaaaagtggagaagttgggggcaggggagtgctggcaaggatgaactttgcctatttcacaagttttgactaaagtagttctgaataagaaaagcgtttgatgaaatcttacctagtataaagacatattatttttggcctctcttttttctttcttctttttgttctttcacctttcccctgtgacctcccattccagctgagccctcttgttcccatttgccctgtattgttgatcttaaccccagctctgccctctcttaaatcctgttcttattcttggagaagactacagtctcccgagctctttctatatgccaagcactgtacttttatacattcatattatcatgaggaaatattcttttgcctattttacagatgaagcaagtgagattcagggaagttaagtaatttatccaaatttacatgcctactaagggatggagcaggagccagacccctgtttctgaagcatgtttgctgaaccactacactttagccacctactgtggatacctttggaaaggaggattcttttaccgttaccaaaaagatattaataaaaataagtccaggtgtggtggctcatgcctgtaatcccagcactttgggaggcagaggcaggtgggttacttgagctcaggagttcgagaccagcctgggcaacatggtgaaatcccgtctccacaaaaaatagaaaaattagccacgcatggtggcgcatgcctgtagtgccagctactccagaggttgaggtgggaggattgcttgagcctgggaggcagaagttgcagtgacctgagatagtgccactgcactccagcctgggtggcagagccagaccctgtctccaaatatttatgtgtgtgtgtgtgtgtg

SEQ ID NO: 74207 - DNA, 1099 bp, Homo sapiens
cagaacttggtatttgtgttcagccaagttagctgtctgctagaacaaaaattagtcttcagagaaatgtgcagaatctggaatctctataacatatcgatcatcatgtccagtgtcctatcagaaaccactagaggccgggcattgtggctcatgcctgtaatcccagcactttgggagaccaaggcagacggattgcctgaggtcagaagtttgagaccagcctggccaacatagtgaaaccccatctctactaaatatacaaaaaaaattagccaggtgtgctggtgggcacctgtagtcccagctattcaagaggctgaggcaagagaatcccttgaacctgggaggcggaggttgcagtgagccgagattgtgccactgcactccagcctggtgacagagtgagactccgtctcaaaaaaaacaaaacaaaaacaaaaaaaccccactagatagaggtagaaatgggaaaaaagtagataatagaagccaaactcaagatgatagagatgttacaattaatagacaaggactttaaagcatctaccataaatacattcaaagacttaataaaaatgtatacacaatgaatgaacagatagggagtatcagcttagaaatagtagctatgggccaggtgcagtgtctcacacctgtaatcccaacactttgggggcccaggtgggtggatcacttgaggccaggaattcatgaccagactggccaacatggcaaaaccctgtctctaactaaaaatacaaaaattagccaggtgtgggagactgagacaggagaatctcttgaacgtgggaggcagaggttgcagtgagccgagatcataccagtgcactccagcctgggcaacagagcaagatcctgtctcaaaaaaaaaaaaaaaaaaaaaaaaagagaagagaagaaaagaaataaggccaggtgtggtagctaatgcctgtaatcccagcactttgagaggcagaagtgggcggatcacttgaggtcaggagtttgataccagcctgggcaacatggcaaaaccccgtctctactaaaaatacaaaactgggcatggtggcacgcatctgtaatcccagct

SEQ ID NO: 74208 - DNA, 1995 bp, Homo sapiens
aaatctacatctgtcacacgcccccccggccccgccccccatcacaactccatagtgggaagaacttatttcagtgcctatttttcttgaggtttataaaaacaaaatgtgtgaagggaatgtatgctgattctcttgggactaattaaacaaacagattcagagaaagaaagcagagaagatttaggacagttaaaatgtaaaaaatgtaattttggggataacagccgtcaatttttccactcgagtgtttttccaaagggcagagggcaagaagcatcttaagtcctctcgaagctgagacacatttcaactggagatattagaagcaaatttggtgcccaagacaggtgccagattttaattacagttggcatttctgagcatgcttttggcagaggtggccatcttgttggaaaagccatagattttgacactagcagtatgggtgcccagttgagaacgattgcaaataatttccctcctattttcatcttgttggttgtgagagaaaacttcagtggctaatatttaaacaagatattctctgttcagaggaaacagttcattggaattgtcttggtggcttggtgtgttggctctgggggtaataatttctatcttaaagtctttaaaaccagttaaaacaataaaataggatatttcattatgagaaatgaagttggcatgcaccaggttttccattaagttccaggtcacagacaaataaagaaagtatgttcgggggggaaaaatcctttttaaaaataattagggagctgtctgttttgttcaccagatggaaaatccgtagttgtgggtggtctgtgttggagagggcatctcacaattggcaggactatgcctttaacttttcaagtcctcggacaaaaatctcaacgccatggactattcagaaggctccgaatgttcatcagtccttccaggtctgcttttctgaattttaccagttttctaacaagagtgtgtaagcaaaatgattatggaatgccgaaataaatagtccattgttcgttgaattctgaaacagcattcctgctagccctggttttttgtgacttttcttgctgtcaataccttatgatgataatctgattagtggagctgcctgcgttactatttaaaggcccctttttcttacatttctgtgttccagagtagatagggcagccagatgtgctaacagcataagaaatcatcataagcttgttatttattgaagatggatattgcactgttatcagtgtttagggtcttttctacacttgctttgattctggtcaaattaattcaataagaaaatgtacttttcttactcctttcttgaactgataatagaatgttagctacctagtgtcactagtattttttttatctacacatcaaggtatcatttttttctagctcagtcttatgttttacatggctttacatctgcaagttggactttgaaatgaatattttatgtttgaacataaggatatatatatttttatatttcattcatacatttaacccatccccaaaattttcttaaaaaacttaataattacaggagatgtaaattaataaaatcatctaggatgctaaatgcataaactttcaattgagtgaaaaaaagccctggaacgtaaatcatttttctcggacagccaatgtgtttggctttggatgtacatcagattctgcctgtgcatagtaaaaatggcaatgatttattagttccatctccccccagcacagatgctgcacagtctgtcccttttctgggcactaaacagtgggttttaaaaaacataatttcactcaagttttccgcttgcattctgtgttgtactattaatagcaaccctttgttattcatgccagctcgcttctagcataagacaatgatgtggggaaacggttttaactaaaatactactaattggcacccatttttcatatactggtgcaggtgcagttctgtgagga

SEQ ID NO: 74209 - DNA, 1012 bp, Homo sapiens
cacatggctcccagccattgtggctctttttttctgggactctcctctctcctgtccatcttccagaagtagctttctgaacacagacgtcattgcgctcctctccacaagcagcagtcactctcaacactgaggaatgaagaccttacagtgttctttacaccctaacccaagattaccttcccagaatcatcttcctaccccatgtctctgaccttccaatcacattaaaattctcagggtggtgagatactccagctcctttctgtctctgccatggctcatgctgctgcttctccctacagagccctcctctcatcttccttgagatcttgctgaccaaatatcttctcttctgatgacttagcagtcacccacactgccgtgggccagcagacacccttcctctgccttccagtagctttgcccaatgtgatctctgctctttgtaccctgtgctgtctcccatgttagatccaaccacctaggtcatagcgctactgctggtacctgattgcaggcccagcatctgtcttggtgccaagcacatgacaagaactgaataaataggccaggtgaggtggctcacgcctgtaatcccagcacttggggaagccaaggcgagtggcctgacgtcaggagttctagactagactggccaacatggctaaaccccatctctgctaaaaatacaaaaattagctgggcgtagtggcgcatgcctgtaatcccagctacttgggaggctgaggtgggagaatcgcttgaacccaggagacggaggttgtagtgagccaagatcacaccactgcactccagcctgggtgacacagcgagaccccgtctcaaaaaagaattgaataaatattttttgagtgaaatggaattctgggttgtggctttccatcagttaagattcttggttgtggccaggtgcagtggctcacgcctgtaatcccaacactttgggagggagaggtgggtggatcatgaggtcaggagtttgagacca

SEQ ID NO: 74210 - DNA, 1907 bp, Homo sapiens
aatgttattcttttaaattcagatttggggctttttaggattaaggcacaaatgtctcttttcttttaaaaaggcagtaaaataaacagattgtagttagatcataataacatctaaattttgacctaattagagggggagatggggaaaaaaactctttaaaagaagattaaggtaaagttctaactttatccttgattctgaattttttttcttttttggaaatattgcatacattttatactgcaagttacaatgtgaagggcctttgaagcactctaaagagacttagctgctttgttttgagcaattaaggtttgttattgagtgaattaagcagctctgctgtggctcatctgtaaatagtggtcttcagcgagtttcttgatccgcttttcccaggaacagaagccaagtcggcttccttaggagctgctcgccctgagtctccatgtttcctcgcagtccggggcagaacccaagcccgtgccttcctcgccctgccttcggagtttcctgctattgacctggcggggcgcgccagccctccctgcccgctggtgccgcggtccctctcggctgcagcagtggggcacagggacgtcatggacaaaagacgaggatgccagttcgatgtgcgagcagaaggccgcctgcgtgcgctctgcagagcaaccggcccggtttcataaggggccgccggcaggggactgccatggcgccccctcctaccctttttggcaccagcagcttcatccgcaggcccactcggggtgaatagtgtgggagctctcaagagaaagaattttaggtttgtcgatagtaatcaccaccttcagcgctcctcccactgctggagagaccgcggactgggtgacaagtcttccaggctcccagaaagtttctgctgcaaagcgcagggtccgcctcccacttccaggagggaccaggagggaaccatcgcgaaaccccgaggctgccggggactctgactgaggcctttcctcctgtgtccctctcccccacgccggcctcccctcctttcaactctctgcgctttgaaaccgcggagttggggtagctaggccctccagcccggcgacaggcctcggccacaggcagcggggcggggtgtggacaggaacaaggaggtggggtggggaggaagcctcgggcagagcaggttctctgcggagtttcggcagccgggtttatccattttgattaaagaaaagtaaaaaaaatcccccaaaaccaaacaacaaaaaccctctcccaacccccaacccgcctccacagctgcattttgttcctgggactgttggtgtcaccagagcctctttttttatgcaatcctagactccattgcaaaggacttgtaaagcctattaatttttcaggcaaaacagatcaagcctgcctttgatgctgctgtttcctaatttagtattcaaaggtaaagaatcctactaccgtctcttcactttttacataattaaaagagatttttcccccaggggcaaagaactagttgcttagtattttttgaagtgaaaggtctaactttatatcacatctgtttttatgctctttcctaaacataaccaatatttactctttgctggtacttagttgcatgctattcacccttgcattttaatttctgacagagaggggattagtattcctcttctaaatcatcctctaagctatgtgtgtgtgtgtgtatatatatatatgtatatatatgcgtgtgtgtgtgtatttctcctctaacaaactgagagtgcaatttaaaaaactgtagaatcagtgattgccctaacttgtgcatgactcttgatttcacacaggagcattcaaaagttccgttaagtgggctttcacaggtttccatctgctgtgtt

SEQ ID NO: 74211 - DNA, 1012 bp, Homo sapiens
taacgtcaaaatggtcaaactgttggactgattcatgttagataaaacagatgggattctcagatcgtgcaccgttcagccgtttgatggaattcgcgccaccctgaccagcgagcccagatggcgcttaaatctgtcactctttaacgaccctactgttttttaaaaatatttttatatttgagctcattcagttaatctgagagattaatcttttccaagatatgtctggggagggctttactgagggtttcacttggaggagctcagggagagtaagaagaatgatgaggcctcttggacacaggactacttgctagaaggaacctggggaagaagggctggtggtccttgggctttggaatatttttgaggcaacaaggcccagaagtgcacgtgaagagtggtagtgacgggggttaagggaagaggggatggatggggagggcgtggtgcagggaggtggaggtgaacactgacatcgctgagacagtacagcccctgccaagaagcttagatctcagtaaggggccaagtgctgactgtgaccacacctgagtggctttaggcagcctgaccttcactgcatggggatgactcggtgggtgtgccccaggagcagagcccaagatgggctccaatgtgataagcctctgggatggctctggaaagaacctgttctgcaccacaactctcacaaatctcatggggtttttttccctgtaggttttttcccccctttcttaaattgttatttcgagccagtcagcctactgaaatgcttcagtcatttggggtgtaagatgttggccagctcccgaatctctaaccttggatacatttgcagagtggcttggaattgctttctattcctgctggggtaagaaagggaaaaatgaatgatttttcattatgcacacatggtattttttcccgcatttgaatcagatgtagcaggtgtcaaaatatggtacagaatttacagtattaatgtgaaaatttctactgtccc

SEQ ID NO: 74212 - DNA, 1054 bp, Homo sapiens
gcctgtaatcccagcactgggaggccaaggcaggtggatcacctgaggccaggagttcgagaccagcctgaccaacatggtgaaaccccatctctattaaaaatacgaaaattagctgggtgagatggcagttgcctgtgaatcccagctactcgggaggctgaggcaggagaatcacttgaacctgggaggcggaggttgcagtgagctgagattatgccactgcactccagcctgggagacagagcgaaactccatctcaaaaaaaaaaaaaagaaaaaaagaatattggctatttgagcaagatgaatgtattttggtagatagaagaaaaatgagaactatcgctcatcactgctgatgtctaaatcccctccctgggcatgaggatggtacaatgacacagcaaccccagcctgccgggcttctgggatgccaagctgggggtgtcctggccaggtccaaggtgctggaagccaatccagaaaataggatgaagggataaaatcacactccaaggccgtgatatgattgaatcaaggtgttaatctaggtgaagagtgcagaagccagattcactaggggctccagggcaggacaagctggttcagcggggagaaggcaggaggcagatgcccaagaagtgtgggcagatctaggggtgactttataggccctcagcttttttttttttttgagatggagttttgctctgtcaccaggctggagtgcagtggcgcgatctcggctcactgcaacctctgcctcccaggttcaagcgattctcctgcctcagcttcccaagtagctggaactacaggcatgtgccaccatgcccagctaatttttttgtatttttagtatagaagggattttaccacgttgaccaggatgctctcgagctctcaacctcatgatctgcccgcctcagcctcctaaagtgctgggattacaggtgtgagctgccgcgcccggccaggtccttagctttgaatggggagtgaggcattaggggcatggagacacgtgaagaacatgtagcttgtcctttctt

SEQ ID NO: 74213 - DNA, 1043 bp, Homo sapiens
cttttagctgcataaaaatatccaagtagattttcttataacctctccaagataaagatgccagaaacggcagccaaatacattgactttgagagaggaaaaaaaaaaagcttgtaattgccgatcactccttagatttacttctggggagcatcaattaaaaatctcaaaacacgtggctttttcagtaaaattatattaatatggaggaagagtttttattaaatatgagtgcacgtgtgtctgtgtctgtgtgtgttttaaacgtttccataatgagttcccaagtgcttttttggcagtagttattaaagcttgtgtgtttgcgatttatctggcaaaatgcctttagtgaagaaaggatatagtgttctcttggttctttgcccaaagtaattttggagaaatctgtgactgtatttagttcatgtcattcattggagacaagtcattgtaattacatttgatcacaatcagtttacagttgttttatcatgttttcatgctgaatatctactcagacatcatagcaaaatttaatggctactgttttatttgtacataaaaagatttatagcccttttttgcagtacacatcgggtttcaatcatcactgctacagagtgagaggaaagctatggataaagaactatcagaaatccttgactacataaaattttatttcaggtcaccttgccataaaagatattgaatgtattttgtggcttttcctcctgacatgctaaccgttgtagaagagttgcaatatttggaggaaaccgtatgaaatgtggaacttaattcacttaagatggtttacatttgcgcgtgttttccactggaaatagccatgccagccttatgaatggcccctgggtaatgcagagtaaaaggcaatggcattaccgatattgttgagttttaaaaggaagttgtcttcttaaccatacggctgaacattttgtcattgttgtttcagaaggtctgctctaacatctgcactgcggcagagttgtgttacagggtgttatttacagctgcca

SEQ ID NO: 74214 - DNA, 3121 bp, Homo sapiens
aatacattccttatatctcttccagctcctgcatggaatggaggatctgacagtggccgttcctgggtattaaagccagtgcaaaagatagagcgtccaaaaggcaacttcttccttatttgtgaagtcagaaagtaaaatttacattgaagtgctaagctacattattctgaatattttggcagtcatatttgggcagatgagttgctttcctgaaattactcagcaccgtcattcatcctgacaaaagctagtggtacagatgcacctttgggactgaggccaaggtgaaacctgcgttttccaggtctgcccactcagttttggaaggactctcaataaaaccggcctcacaccccaagcatcacccctcctgtccttagtaagtacactctggctggaatctagggtcccagcatctagcccttgggacttcacataaattcatcaagtatcttcctccactcaaaaatctcttacagaatctttgacattttaagcttcattactgcaaagtggatatagttcattctcagcttcaggattccagaagcatacataccaggtcagaatggagaggcatcacgctttccttcagcaagcttcaggggagacaggatttagggtgggctacacatataccagttgtaggatgttttgaactatattcttgcaatcacagacaggttgtcccagagaaaataatctggctctaacttctcttgttatcagtgaaaagcaaaaattacttagtgcaggtatgcttaaaggaagaaaaaggcaagagaaaagtgagaggtaaaaattattaccattttaattccatgattctcagcaatgaaggagcatgattgaaatcccatgtgcccagtcatatctgtaaatgagagtatgatttttgaagactgtattcaattgtttcaacttgagcaattgcaagtaagacttaggactgtgtttaccagttactgttatttactattactttctaaatgtgacctgacttgaaacctttatagatgcaatttttatccatcacagaacaagctctaaagaggagagcagcttcaactttttcaagtattttttttaaaaggatttaactttgaccaacaccaaacttgcatcttgttaaggtaactaataactgactgctataacaatatttagaattttgtttaacagcaactgtcaaaaaaacaagttaaaatagcccaggagatggatggcgattaactctgcgttctttttagactgtgttattaattagctctctagactcaaataggttacatcctctgagcagtaaattgcatgccatttgcaagctctgtggatgaaatttacatgtggcctaaatgctatccacattgttttgttaagtagcattttatctctctggactggtcccttgcctcctcccccagccccagtggaaagttttattcacttttcttgcgggaagggaaagtcgcatgtagtttggtcatttggcgccatcttcttttttattgttaaatccactaaaggcagtcatgcctggcagtaccaggcgggctccttccggggttctggtcggctaagcattcagagttctttgctttttatttactagaaatgttttcagcttctgtctttgctttaagatctgattaaaaggaaccttaaaaaaggaacatagattttggtgtatgtttttcctctctacttctcttccctgtgccccccaaacccaatcaccaacttcccccatccccagcaaacacgggcttttttgtgtatttatttaaaagcattttaggaagcaccgtaataccgcacagcttggaggttaagatagaattggatgtttccctcaccatcagttgatggaatcatcagtgttccggttctatttatcttcatgatttgagaatgtttctgaacagctgcccttccgaggatgctggtatttagacagaccttcctgtcatttatctgactcacaggcacaactcttttgaaagaattaatatcaaacttacatatgaaaatctaccatttagaaatggattctttttcagtacctacttttcaattcaaccggggagatcccatctattttaaaaaatcattaatcacatacttctgacattttccctttcagtttcctcagggggaaaaaagttatttgaataacaaacaaacaaacaaaaacccctcatcgcaaatagctgtcagcctcctatgtgaacaaaagcgctctctcacactgagacctaccgtgttttgtttagttagaggcagcagggtggtagggacactatgcagaaaggcttgggttaatgagcactttctggattgagtgtctctcctgattaacccttggattacttgctttgagttgctaaccctctctcactgcccactcaagaatttcccacatggtagcctcatccatagatgcccttccctagatgcactgatggtagacagcataaaaatgtgtaagcactgtagctttccaatgaactgaaacaaaaagcttaagcattactttttatttccttgatctaaagaacatgttttgggggatattttcttaatcaatatctaagttatctagagttataaatactataaataaattagttacaaactaatttttagacacaagtcttttgttcaaaccaactcttacatagaaactctaaaaatttgggggggaaggggacagttggggatcagaatcactccccattatctctctgttggtgctccccaaaggatcttcagggaacgacgtttaaaaaccattttgtatcatgaaatgggacccgaaagacattctttctagtgactttgtgttagattgagtcatatgaaattgccactgtgtgacccattttgacctaaaaaaaaaaccaaaaaacaaaaaacaaaaaaccagcactagggtaccagagtatttttagtgtaatcactgtacgtgataagaaaatggagaaatgagaaagcttgaaacttagactataagctcctcataagctaatagcgacttcctcccttcttccgcagtcacctggcaagtcccttctatgtgctgctggttctagggatacagagataaaaggcgtagtca

SEQ ID NO: 74215 - DNA, 1050 bp, Homo sapiens
ttttaaatttaagtgaccatagcttcttagtatgatatcaggtttttgttttcttcccaccttgtctttgttttttagtgtgtggatgcctttgaaattagtttttttgtttgcttggtttttttttgagatggagtctcactctgtcgccaggctggagtgcagtggcgcgatctcggctcactgcaacctctgcctgccaggttcaagcgattctcctgcctcagcctcccaagtagctgggactataggcacatgccaccatgcccagctaattttttgtatttttagtagagacggtatttcaccgtgttagccagagtagtccgatctcctgacctcgtgatccgcccaccttggcctcccatagcactgggattacacatatgagccactgtgcctggccaaaattagttcattttttatacatgtcctttacacaggagatgtattcagaaagattatctatattttttcctttaaacaatgcatttgtttgtttgttttatttgtaagctcatctcctgggtttagagcagaatgaaaaatttgaccttaatcttctcttatccactggttggaagctcctacttttatgtcaacagacataaaaaagcttatacatataagataatgtatagcatgcataaagatttatagaatgctatgtctcataaatttcacagttataaaacaaaacctaagcttatgcatgtggagatattcctgtgtttgcagttgtcagtgacttctagagaatgtggtaaaggaaaaaagcacctgtggaagttatttatgtaaaagttgcttatgtaaagactcaagccattaacaagagaaggagacttctttatattgttaatgacattcagatctttcttctgaatgagggttgtcactctgaatgagtgttgtcattcatttcctccaagccttcagatatctttttcctttatctgacacatttcaggaaagagtaagggaaagatttatttatattactttgatggtttcattttctttgtggaagtccagtgacccagatataga

SEQ ID NO: 74216 - DNA, 1017 bp, Homo sapiens
ttcagtgccccttagtctctctataagaatttgttacagcatattcagatgtggtaaattgtcacagaaatgaaaacttttcattttagtaaggataagtaagaaacagaggtgacaaggtttaactggagagttccagtttgggtaggtaagttaccattcatcatgatggttacaggtttcagtgatcttttttgtgacagatgtaccaacatttaattgtttttcatcaagggcggagagaaaagacacttgtgtagatttttcaattctcctccgtgtcacttggctgtcctcaccattgtctgagctcctttctcttatcctttttgctgcaatgagttgtgtcattccctcatggtcagcacttttgttgtctttgttttttgctgtacctcagaagtccatcttttctttcatctctttcccattcatgcatgagggaacagttgtgccctgttgtggggatgttccgctgggtttcaaacagtagggtttctttttattctcttctaagtagtacaatggggctgaatgtctgttgcagaatgcacacactaatatgccaggttatttggtttctaagaagtcaataaaaatactacatttaggctcagtctttggcttgattttcccctatttgcctttcaagccttccgttatgaatctgtttgtttctgattgtaaaatataatcttgcatattaaaccgaagcgtggaatcaacaaacactttgaggaaaatgttcctggcggtggagtattttcacaccaggcagggttggcagccggcaccctcccttgataagagcctggaaacagcccccagagcaattaatggcagctccgacttggagaagatgaaaaaaaaaaaaagaatggatcccaagttggtcttggcaaaactttctggtgtaagaaaccagctcctctctgcatttagagggtacagctgtgattgttttcgtgcagacttctcactcagttcttgttttggtggggagttgagcacgagcag

SEQ ID NO: 74217 - DNA, 1428 bp, Homo sapiens
gctgaaagttcttgatgcgtcctgctgagtattagcatttctcgggcctacttggctatggggaagaggcacgcactgcagacagctctctaagccttgacaagcagggctggcctctacacatgaccgtgatctgggatatcggtttaggaaagagcccgctctcaggttgctggcagaaaacaaatcttgatgtaaaagaagagaagaccgaacagtaagatggtgacttgctgtggtaataccgtgcggtttttttaaggttctggacctgcttcttactcagaagctcacagcttgggtaagtttcaggaactgctctcaaggggaacaaaagaaaaggaaaagtgagggctaacaatgtgagctttcactggggctgttgtgggaaagttgaagattggccccaggatggtcaggatcaggtagaaaactggattctattgtcatttgttttcttttattgaccagctttcttgtttgtggagagggcagcagagagatgaagggacattctagtactatgctgtagaaactcagtgggaaatgttaactgttttgatgttaggatatatctaaaatgcttagttaaactgagtcccatacctgttgtattttataagctcattttggaaaatgtacgtaatgtttatttattgtaaatgcaaggtctgttcggtatccgtacatttccacgccgctgaaagggtggatttggttctgatggactggaacggctcccggggaggcattgtggtgtttgcgtaaatcccctttcctttttggtttactcatttgatgcaggagggtcggttcttgggctgttgctttctctcctgttaatccagctactgcacatgcgcacgaaggcaacaggttaaaagtcctaatttaagatagctttgggtatggagagataaaatccctttttctccagttgaagcatctgtttttcagttgagtgtagatgggttgattttcatgaatgtatacatctaatatgtttatgtaaacacattaaggcaagatttcagaattaatttcagagtatgttttatgataattactgctattctgccaaaagtttaatagccaatcataagaattttcttaaattattattttcaaattaataaggtgttagacttctcatttgttctttctggtactgttttgagattaagaactcaaagatgaactcattcattcatcaaatattatttattaaactcttcctccatgccaggctcattgtcataattatcattgtaattagtctgtaacttatatttacaatgattatgtaaatagcggaaacacctaactatcctgcttcttggtaatcaggtttaactctccatggggtcggtgtgttctttctgaagcatgtctttgaatagattactcgggccttcccctagttcttgg

SEQ ID NO: 74218 - DNA, 1077 bp, Homo sapiens
agggccttgctatgggaaccagagaaagcagaatggccagggccatccaattgtctccttcccagagatcaggatgaagggctgtgttaaaagatctctctcatcttcagctggaaacaaatagtactgaaaagaatgatctggactgtttctcttgtcttttaaaagtgtgaggcctaaagaggggagagagtatctttgtgctgtgttatgcctgacacattgtcggtgaccaacagatgtacttggccatttatatggggataacatacatgtgatcttagccaaaaggccctccaaaccttccttcagcagccctttagattgggctcctttgtcagtcatctgcttgagtatcagctatgctgaaggaaaagacatagggaatggtggttggaggtggtggcagccagagataaatgtatctctgaggcatggtttcatctggtcagtaagatgtgtgcctttggatctgcttcgggctaaatatcttaggggtttggtgggctttagaagtgtgtgtaaatgggaggcgggaaagtgaggccggagactcatcatcactgctctccaccctccagaggggactgcggaaagcgcagccagccatcggcctgttgacaaggcactggcagtcactgaaaaattcttttcctttctctgtcaattagcaaatgatggtcttctactgataaagtttaggaataaaggagaaagaggaagatggaatcctggaccactttcagcctgcacttgagtattccttatgtgttctcctgactccctggtgccactaccccctgccaccgtcggccctgtggcagtggggcccttccccccgccagcctcggcaccgcttcagtgtggctggtgcctccaccaccattggtactgtgtcagcattgctggtgcacctgccaccgtcggtccctcatcagcattgcccatgcccccaccaccgtcagtccctcatcagcattgccggtgcccccctaccaccgttggtcccacatcagcgtggccggtgcctccaccaccgttggccccacgtcagcgtggccagtgctgcgacccagt

SEQ ID NO: 74219 - DNA, 1020 bp, Homo sapiens
aatgtaagatatagtagagatgagtagagaacagaacttaaaaaaaaaaacaaactgtaattactaggaaattgactctaccagggaaattaacagacttgtccaaaattgtccctgtagacagagagggctggtaaggctggaatgaacccgtcgtaatttgaatgcttaaaactttttccattttattgtcaaaattattgcctgaacttcctttttctcctcatttgcctatttcccttgctttttatcttgtgcaccaccagtatacaacatagtggtgtttaactacttcctgaaggcattattagtcatcaggaacaccaggtcattatcgaagtagataaatgggcattccgcccatcgactaccccttggactaatttggaaaatatggttccttccctcagaagaaacagcccatgctcctctggacacttataaaatagccatgcgcacgtctctgttccttctgaacaactggaattaatgtgtcctgcttgatgctaaactggagtttaattcacaatggcaaggacgcttcacctagaatatctgtccatgtgaaaggtggggagcagtgcagcttccatctccctgtctgttttttggtgggctttcagcttttctgtcccatgactgttagtgactgcagcgtaaccccaaatctttcaccagatgttgtctcaccatcttaaggaaagaagaaagttctaatggatgttttgaatgtgctcgacttttattttgttcagacccaaactgaatgaggcagaggttaaaatcttttcttgttccatctgagtaagcacgaaaacctatgatccttaatcttttagaagaaaaataacccttctctgttagtgggatttctgattcatttcttctgccctgctcccctgctctgcatttttttagtcaaatactgtctggacttttgtgagccaataacctccctcctcacctcattcccctctcttcccctcccctgtgatcacacaaagagcagagagccctcaa

SEQ ID NO: 74220 - DNA, 1054 bp, Homo sapiens
agaggcagagtctcgctgtgtcacctaaactgaagtgcagtggtgtgatcatagctcactgcagactcaaactcctgggctcaagccatcctcccgcctcagcctcctgagcagttaggaccacaggcgggcaccattgcacccagctaatttttaaatttttttgtagagatgagatctttgctatattacccaggctggtcttgaactcctggactcaagtaatcctcccacctcagcctcccaaagtgctgggattataggtgtgagccaccacacccagcatttttttttttttaagagtgaagtttctctggttaatgtgaatgtgagttaataggctctggcttgtgcagtgcagtgccctgagaaaactgatattaattgtacagttgtgaaatgtggtataatattgtcaatagcagcttgtttaaaaaatttagattgcaaaataaaataaacctgtgtttccatatataaaacaggcagcaataatagtacctacttcaaaggactgtccaaaggattaagtgagataatgtaaataagggatttaataaatgttaaagagaaaaaaatctaccattgagaatatgtttgtttgcacaagacttggtacctttatcttagcatactgtatcttagacagatacagtatccctaatacactgtagatacctaaatcatgcttctcatcgatttcagttaatacaaaatatagtcctatatctcttttcaacacaattctgattttaaaggaagggtcttcttaaaggaagaccattgtttgtttgaaacagaattactatatcctatacgtttcttttcttttttttttttttttttttttttgagctggaatctcgctctgtcatccaggctggagtgcagtagcgcaatcttggctcactgcaacctctgcctcccgagttcaagcgattctcctgcctcagcctcctaagcagttgggattacaggcacccgccaccacgcccagctaatttttgtatttttagtagagatggggtttcaccatgttggccagggtggtctc

SEQ ID NO: 74221 - DNA, 1027 bp, Homo sapiens
tctaccataattttaaaagattatccagctaggcatggtggctcatgcctataatcccagcattttgggagcccaaggcagatggatcccttgagcctaggagttcaagaccagcctgggcaacatgacgaaatcccatctctacaaaaaatacaaaaaattagccaggcatggtggcacacacctgtagtcccaactactggggaggctgaggtgggaggatcacctgagcctggaggtggaggttgcagtgagccgagatcacaccactgcacttcaaactgggcgacagagcaagaccctgtctcaaaaaaataaaaataaaaaaagattatccatgtgttctattttaattttgcattaaaatatagtttttcacaagtttataaatacagaaatctcattctggactaaccccaatcacgtgtcttgcaggaaagcgtctctagcagctgatatccccagacttggatatagttcctcatcccatcacaagtacatcccccggagggcagtgctttatgtacctggaaatgatgaaaagaaaataaagaagattccatccctgaatgtagattgtgcagtgctcgactgtgaggatggagtggctgcaaacaaaaaggtaatggcatgattttagtatgagaaaaagaaaggtattgaaatttgcttctcttccgaatagtgacattgcccgctatttggaaagattctaccacactcatcttttgctgattattaacaattctttgatctgcttttatataggttctaaatgtgtatctcttttctctgagagaaaggaagaatcccaccaaaatatattttaaaatcacgaccttcagtagatgagactatgtgtatgtatagataaaaagatggacaatcaattttggccatgatgtttgccggtctaggtaaatgagtgacatcaggggtccccaatccccaggccatggaccagtacaggccacaatacaggcctgttaggaactgggccagaacccaggagatgagcagtgggtga

SEQ ID NO: 74222 - DNA, 1012 bp, Homo sapiens
ggattttcacttgtccaatatcatcctagcagaagtgagccaaggttccccatctcaagttgccaggcaggttgctgtggggtggcatcttggagagtcagacacagtagtgtagactggttgggtacaagcaaaagtgggcagcccacctactccatctagtcagtcaccacaccctaatgttatgacttacttcatacctgcttccctggtaggctcttggctttgtgaagagggtgccatcgtatcccccattgcttaccagggtgcccaagacatagtcatagtaggtattcagcaaatattttatgaataaatgggttacatgtgatcaatatatggtagctgttattaatttgctattatttcaacattgatagaagcaccatgttgtagaaattatagtccctttttattttatatttgtcatgccccactttgggagttatatagagttcagagtgcatcttagtctcatatagatgcatgtgtggagacagaaatgaaagaactcaagtcatgagttgaacgattttaatgcctaaatacatgtatgactgaatttttgttatatgttagatttgggatcttacagtatatttaagatttaagatcttatagtatctcaggaagatagttccactgacatgaaaataactctgaactgtctcttttagaggatgtataagcattccatgttaacagaacttgcagtggcagttagaaaatattccagtcaaatttctggttttggagctgagtttattgcctgtttgttgtttgatcttattcaaatcatgtttttgttgtgttgtattaatatataaaagatttctgtgtctgccatgttagctgtttgtgtgtgtgtgtgtgtgtgtgtgtgtgtgtttaaacaacactccacagctgagctcttggaggaccaggcctattttgacagctccccttagtccatgtatcaccaagctcattctctgccaatacgttccacgtgattttgtggacatgtgta

SEQ ID NO: 74223 - DNA, 1133 bp, Homo sapiens
ctttcccagcatgtgccacttcattactcttagtggaggtgggaatggcatgattgtggtggactctcaagatctatcccacttctctgtaaccaagcaaatcggtaactcatccaaactcaagggctaagtctgactagaccaacaaggggtaattcagccctccttgccagccctgacttttcatcaccagtgacagatgtggagtggccggctgaaggtttctaggaaggttttctttcctcttaagagaaggccatggcaaatcagtctttcctttctgctaacaatgacaaaaggatgtgttgctacagtcactaaggatagcttgccctagaacaaaggcaacattgtgggttggagagtaagtagagaatgaatgggcatccttgatgacactgctcagctgctggcttcaccagcccatcgctggatgttgtcacataaatgtcgttagtgtttaattaagccagtctgaatttgggtttccaatcttccagcccaatgtatcctaactgaaaaggaactgcagtggaaagcctatgggctttggtgtccaatacattggatttgattcttcttagcagtgtgaactgacctgactttcctaatatgtgtaatggagaaagtaatacttctcacctggggttgatgtgtggaacaaagaaaatatgtatgtaaaacacttaccagagtgcctaaaacacaaccaatgttgtttcttttccatttaggagatggttcacttgttgatctggggggtccagtgggttgaattgatcaacagtgaaatcagtaaactctctggtcctttgcacatgaactgtcaggtagttcaccgtctagtatgggagtcagatagacattcgcggtcacactaacagtggggttcgactgcagtcctaactggagaacagtgtccagctaacagaggttgagagtactgatcaaaccacacctgaaggctggagtgcaggtctcgtagccatgaactagagaacaagaaacagcggaagatgctgaggatgttaatactgaagaaaggacgaccagaaaacagaaacgacttcaaagagaaaagggagtggaatcgttctgtgctgcttcagagggtggagtgaggacagacccca

SEQ ID NO: 74224 - DNA, 1010 bp, Homo sapiens
tggcaactcccattctgctttctgtctatatgaatttgtctactctagatacctcatagaagtggaatcatgcagtatttgtccttttgtgactggcttatttcactccgcctattgtcttcaagattcatttgtgttatagtgtgtatcaaaatgtctttcctttttgaggctggatagtattccatggcatgtatataccacattttgcttatccgcttatctgtcaatagacacttgggttctttccactttcggctgttgtaaatattgttgccatgaacatgggtgtacacgtgtctgttcgagtccctgctttaattcttttgggtatatccccagaagtgggattgctggatcatccggtagttctttgtttaattttttgagaaattgccgtactgttaatagcatatactttaaaaacctatatgttaaccaaggagaagaaaacaagttaatttgaagagagtcagaaagcgtgagtgtccagagcctactgagccctggaagtcacggataaaaacaagaagtgaagtcaacactctcggtgagaaagggagcggtactgacaaacttctaccatcccagtgtgcccggttgctcccacgccctcaggatactaaagctgggaggaaggagggggtgggggaggggactcagagggagagctactgagtgcctgcagggattatttcgaggtgcttttgcatccattaacttatttaatcatcaaaacaactcagcaggtgcccttatttttatggacaagtcttgtcaggtacttaacatttttaatttttattgcttttaaaagcaatgaagaatatctttaagagggaagaaataattctgaatccaccaagctcacacaaaattcacctcagtactgccctattttcctttgctccctttgcagccataatttttacatggttgcgttgttgtcatttcattttctactttttaaattgctacagagatctttgtatttattattttaacagatg

SEQ ID NO: 74225 - DNA, 1007 bp, Homo sapiens
aattggcttgcctcctagctgttttgtccccacactccatcaaaaaatattttctgcatctctaatttcatcaagatatgcctgactgagaatgtcaaaaccactgagcagaagtgtttaatccaaagttggctccgccggtgatgatcagctgaggaaacaacctcgaatttttccctcattatttgttaggatgtcagtttttcactttatggaataggttcacatcctgcttctcaccccctgccccccactcttcattgggcagaggcctcccactgatttccaatagagctctctgcacccaagaaagacacatggagaagaaatggtacctggccgtctgtgggtatgccaccttcaacaaagatgtccataagcagacagtcacttcatggtttcttggacaggcagatcctggccatgttcatgtaattccataaggtaaggctggagaggctgagctgcccacttaacaagcaacaagccctgggggagtctgggcagcccaaggtagaactaggggtggaagatccttgcttggccctcggatggctgtacgacgtcaggacaggctgttaacccctctgagcctcagtgccgtcctctgtaaaatgggaataatatcagctacctcctagggttgctacaaggataaaaaccaagtaagtgcgtgtgaatgccctttatcatgaatgagaaggtgccctgtaaatgttgcttattagctgaccttagagataagaatcaaaatgacacacttttgttccaggtagtttttcccctttggcttagtccccttttttatgagggatgatctgctgtttaaagcatttattaatataaagattatgaagggaaggatttagaatgtaattagtggggaagggggcctgcttctctgggatgagaacgccatgacttgttggctcagtacagcacactggtaatcttgtttcctgaggctctgcacacgctgagagcacatcgtgctcacaggcacactt

SEQ ID NO: 74226 - DNA, 1035 bp, Homo sapiens
gttcccatatatttcaacacacacaccttaaacacaggttttctgagtgaagtcagtgatgaaagcctgtgggttaggggaattttcccatggtagcgacagctgttcccacagaaacagctcaatttatctcagagatgaaggtttcactagcttgggcctctcatcaaattgcatgcatgggaattatttttaagcactctaaaatggtatcatttcctagtggcaaattatttgggtgtattttgaaactaattaaaagggaaatgtcctattttgtaaagagcagcatttctacattttaaaaatcagatgttctcagtggggagcagggttttctcttcgtcagtgttggctattgctaagtgcgtcccagattgaaaacctaaatgaaataactacaaggaaaggcatggggtaagcttatgttggaaaaggtggagggagacacacatatataatacatacaccatttatctgggaatttagaaagccttttcatgtcatctttttttctttcttgctcattgcttgttatttcactgtgagccttgcaaatatggagggcggcagaggtgccaggctccatcacggtgtccaaaaattggctttgtacatatgctgaattagagattggctggcagaagcagtgtgcagaccctagattggcagggattcctcgtgacggaagacagggctatgaacccacgggatgtactctgaagccagcagccatgcaacgtgctgcatccccacatgccaaaacctgttttcaaatacattcagaatctgcatcaggcatcagatcccacccaggtaacgccctccaaaactcgaatcccctttcctttctcatgaggaagggaatgtgttgaacctgtcacaggacagagatttgaaatttttcacccaaggctccaggtcattttagtcaccacctcttgtgaataggcaccgtagcatccaaggaggaaggtaggaatcttgcagatgcaaaccttcctgttttttttcttccttggaaataagcaaact

SEQ ID NO: 74227 - DNA, 1042 bp, Homo sapiens
ggtctcacggggtggcaccaagggggccagcatgtcaagcgtaattcacaccggagcaagctttgggtcacattctgaatcatatgtgatgtagtgaacaagctctcggatgggcttcaggggatgtgcgttcaagtcctggctctccccccggcatcagagtgaccttcagtcatttgttgatctctctctcggacttttgtctccttgtttctaaaatgactagataattgtagagctttcttcagccctaaaattctgtgattctgaaactcagccagtcatctaaaaatgcattttctgcatgatgaaagatatttattaggcctaagtggaagagccagcattcttgatgaaaagaattactctatgcacacatcctaaggacagtggtttagatcagtgccctcctggtagagatgaacaacacaacgggaaggacaggcactgacgcacataaagatgaggaggctgagcgtggttccaggcaccactgcggtatagaaagtggcacctagagccagccaaggacataaagatggacttggagacactggagcagtgtgggtgcccctcagcccaggaatgttgcagagaggagtcatatgtgagattagggttgccccaagttacctctaagttctgtccaactcaactactctgtgagtctgtgacagtccctagctctgtgtcctaggacacagtgacacccctagagatcttaccaaagacctcaaatagtccaggcactgttcctcttaagggatgtagagaggagagggagagatggaaaagggagaactcacctttgttaacatactgctttctaataactcttttaaagaagtgttcattccattgttcatggaatatgcttccagtcgtggattgcattgaaaagataagtccatgtcctaatccctgggacctgtgaatgtgaccttatttggaaaaatggtctttgccgatgaagttaaggatctcgagaaaagaccatcatggattatctgggtgggcccaaaatccaatgacaagtgtcttt

SEQ ID NO: 74228 - DNA, 1042 bp, Homo sapiens
gcctcttctcagagctctgtctcaatagatcttttgataactgttttccaacacagtcttcatttcaatgttagaatatgatgttaatgaatttactagcttccagtcgaggatgaatagcttacagtgtttgcggcaatattggatgtatttatttccaagggaatgatttttaacagcacattgtgttcttatttgcttttcacaatccagttccagcatctgagaaactttgctttgatggttgactcccattagggaaacactgaaaacaattatcctgtagtggtctcggttcttcctggcagctttgcatttccatggtgcgagaccactgggtcgtaccacttgtttctccctccacgtcctcaaatgatctcttaaaagaacccactttagacctcattgttaccttccctctacttctttttcttcttattgaattcaattcaacaacatgtattaaatacttacaacctggtacccaggtagaagaagccaacgtatagacagggcatgtcattggatagtgataagatctgatggggtgagtatctaggcaacttagactgggtgtggggttgaaccagcatatttaaatttatgtaaaaactgagaaacaccctgaaaaggacttttattgttggacataattctctagtcctgaagttatcattcaagggagttcaagaactcatcccttaagtggactgggcaagctggccatttaccacttgtcacagttagaattaggaacttggctttcatattatccattggtgtcacagagtgggaggaaaacatcagtaatggatccataggaccaccagtggaggcaaattgaatttgggatatgttatatcaaatctgttaaagggaaaaaaaagaaagaaaaggaggggagagaaggaagaaaagaaaaaataaaagaaaaaaacccaaaagaattcattatataaccattatatgttaatggtacagtttaagagattttgaagtattgtcatatatcatttcattaagtagtatatacatacataca

SEQ ID NO: 74229 - DNA, 1049 bp, Homo sapiens
gggaagaaaacccaagtggttgtgcagtgcgcctgcctggcaccagtgaaggaatgaagctgcggaaaaagtcaatgtgaagagctggcaggaggagaaggtggaaagcgcgatggaaatcaaatgcggtgccagccacggcattgttttattagcatttgctcgaggaaaacatttaattatagaagatcggaagctcccagtgtttgtgagctaggtgacatgacgcaggctctgccacttgctccacgatacacatcttcagaggaactgtggcacaccgcgacaggctgcgaagagaagccacctcccgggggcctggtccttgctggggggcccttagctgtaacagcctctgttctccagcgatcctcagtctgccttttttaaaaaattaagtgtcctgctggccgtccttcttctccttcgttttctggtttttccacattatatttttcttttccttgttgatttttgaagaaaataaaattgacaaagaataggatggaaaagtactacccttaaaaatgcttatatatttgccacctaaaaaaaaaacaaagccatttttcagttatagttttctttgggaaataattaggaagcaaaacaaccaagaataaaaaaaaataaatgggggagcatgaggctgtagtgaactctgtttgtgcctgtgaatagccactgcactccagcctgggccagcagagcaagaccctgtctctacaaaatacataagtaaaataaatgatctaaaggactcagtatatatttaagcaacagaaatgaaaacatgcaaaggtggaaccaacattacgaatgttgatggatattaccaatattaccaaatattgtgtggagatttttttttttttttttttttttgagacggggtcttactctgtcacccaggctggagtgcagtgtcatgatctcagctcactgcaagctccgcctgtgtggagatattttttattcctttttgttttaaagccctgtctactttaaaaatagtttgtgaaaataatgatgcagtatcacgtacctgc

SEQ ID NO: 74230 - DNA, 2868 bp, Homo sapiens
attttccccttcccattgggaagtaatgctaatgagaaagacgacacttccatacagaagcacacccatgtgcactgcggtgcgtctcggctatgttatagctatcgcgaatgaaacctaaaaatcaactgctcacctttcagactggatgactcctttcaaatattatttatttggtggacaggaaatgtgtagatagaataatggtgctcagactctgaatccacataacagtttcatcaaccatttgatggtgctcccctcaatgataaaaataaacaataaactttttattgacacttacagaatgaagctcgactgagaattgtaaaaactcttgaagacattgatctgggccctactgaaaaatgtgtgagagtcaactcagtttccagtggtctggcggaagaagacctagagacccttttgcaatcccgggtccttccttccagcctgatgctaccaaaggtggaaagtcctgaagaaatccagtgggtgagtagctaatgctttgccttaagactcaggagcagctaaggaggagtagcaggaagaagggatctgggtgccacaggtttggaaaatgcatgcagagagcagagaggaagggaattgagaaaaagcagtaagctcaagtatccgtttcttttacacaaggaaaactcgcctttgcccaaagtgttctatgaaacaactgcacttttgaaatgatgcttcgcttcctaattggatgtgtggtttggccagaacagcctcctcagtagccctcccagagtaatccctggaaactaggttgcccgagaatctcatcccttcctccaccctgcccggccctaagccaaggcctccacctggaagagcagtgacgtaaatggcccttactgagattcatctgaaatcatcccaggcagggagggcacatttgccgcatatgaaaaaatgaacccaaagaaggggaggaaaaggtcactctttagggcaactggaggaatgaacaggaagcttttaactagtggtttcaattagcactgatattatttcctgaacagttctctagtgcatcctttttaaattgctgacaggtgtgtttgtgtttcatgacagacttttcagccaataaaaacctgaaatgtaaagtggttggcatgtcaaattacttaagaaaacttttgaaataggcctaattacactatgattgttttaattgacaaagggtggaggggctagattttatttgagggtcgctattattctgcagatctctactgaataaaataacatttcactgtgttgttctgggacagaaaatgtgtcattctgggccctgtgaggtgtgaaaactggaagcgtttgtggtcggggcgagtgggcagtggtggtttcatggaagccacatctagtattatctctgaggctgtggctgccaccacagcaataccctgagttgttgtaacacctacgaaactgctcacctgctgaatgcacccgatgtgtgaggtctgcgttgcccagtgccacggccactatgacatgtggcttctgagcattgaaacgtggccagcacaaatggagatgtgctggaagtgcaaaatacacactcgattttgaagactcgggactcactgaggggacaaaaagagaatgtaaactatctcgataatttttatattgattacacattgaaataatatttgggatctattgggctaaatacaagatactattaaaattaaattcacctgtttcagtttaccctcaatgtagctacgagataatttaaaattattatatgtagctgctgctatacagtttcttttggacagctctgtgttggatccttcttgaagacccgtattcaaggaccagttatttattgactaagctggagttcttctctccagggttaccctcagaagctgggagatactagttaagagtatgttaatatcctggagggtcctgagcccattcagatatgtcttaagttgattgaaatggactctgaagtcactgttcccttttggtttcatagttaatgcctatttatcaccgttattacctttaacttaagatgggggagggggagacccagccagccttccgctatggcttctgttcactgttttaaatccttggaagtgagacacatacagaaatttaaatagaacttctagttaacagaagtccttttggctgtttattttttcctctccgtttgtatttatgcgaagcataaaacccagagcctgatgcacaactgaaagatgggcttacttgttttcttttgtgtgagaatctcttgctcgccttttgtcgctagtgtgggttcttgtttgactggcacggcttattggactataacaagcgtaaccctgcctcctttgtcatgggacaattctcccacaaatcccgaacagtgtgcattcttccaacacactattgggtgtgcactggaattgaaagaatcgctgagccctgctacttcatctcctccccaatctctttgtgatttctcccccttcttctcctccccctaccccagtcccctccacctcgctgaaatgaacactttaccaggccggaaacatttaatcgtctccttttgaaaaaattaattgaaacttctccactagttaccttttgtgttagtacttagtgcaattttttaagaaagagggggaggaggaggaggaggaggatgggctagaatatttaatttttaaatgcccctattggcttaaaaacaaaaggcattggggtgttctcactaagaacagggaatatattgtaaagtgttgacttggttttaaagtccatgatttttgtagttataactgtcatcacaaagaatggggcaagtcacttcac

SEQ ID NO: 74231 - DNA, 1044 bp, Homo sapiens
tgagaatataatcaaaagcatatccctaagatgcaaccagattcatccagtgatttaattttaagcactgcttcgccattttattccataatgtacttagaagcacttacaatgtctgaaattaatcaacagtgtccccaccggttcctcgtttctttcccacccacgtatattattagcaggttatatctccacctttcaagattcacggttatgtctacgacgaatggtatttgccttgactttcatatataaatgtcgaagttgctttatgaacacatcttggatgacttgttgcatttttattttcccctccggagttgcaggtttttgtgctgtctttaatcctgagaccatgtgcttgatcctaatgcaaataattcaattagtttgattttaaaattccttccttctcccctgtggttttacgagagtctcttaaagcaaaaacgaattctggaaagatataaataacttatagtgcaagcaaaatgagttaactcaaagtttctccaaaaatgagatgaactacaatttgaacattataactatattcatataatccattaaacaaagcaaatatatacaatatacttatcttggatgatattaaataccttttgaaaggggtaaatttgggctgcgtttttaggactgctttcagccaaactgtgttaagagtcaggtcgtcctgttactgaaatgcaccgtgcctcttccctctgacgcacgcgtttccgtgagacttagttctgttctgctcttttacaggcagtgtgtgaagaaaccctgaaggtcgggcctcaagtaggtctctttctagatgcagtcgtttttggaggagaagactttcgagccagcataggtgtcaaagacatctctctctctctttttctgtgtgtgtgtgtgtatatgtgtgtatatattttttctttgcccctcaaggatggacatttacataacaatgtatatttgccaaccatgacaatggtttttcatgacaatggaatggacactacttcctgataatttagggctcctcat

SEQ ID NO: 74232 - DNA, 1059 bp, Homo sapiens
atgaccccccccaattttttaaataagtgtgatctcgtatagggaaatactcttcaattatctgaactattaataaacgaattctccctgcgtttcatagcgactgaggaagaaaggagtcctctgccacatccatgcaattgtgcttgttcctgcctctttccaacggctggttaggatgtgacccaaatggaaaagttggagaaaaactccatgaaatttatctaatagaccctgatgttgttggcctgcaatgtatggcactggctgccaggtggccagatgttgctctgaaatgggaactaattcgataaaaaagagaaagcactgcatcgacactggcccctccaccatcacccagcagaatctgagtttcctctgcctcctctggggtaaatgtttgccccagaacttctctgggagctggagagtgtctccaagatacaggactgaattaacttggcccctaattcaatcgcagaagacaggctatttcaaatcaggtttaaatttctagactgtgcccagctcagcacgagaagcttatggacctggcactattgtttctccacgacggggagtattaaatcgctaaaaaaaaaggggggaagcgaggataatgggaaggcacagagggcacagtgcccattatatattcaagggaacgaggccataactagggagccacacttcgtaggcagtttgcaatttttagaaagtctttgttgccccaattatatttctgcataccaataagaggtaatcaatctgataataagatagattatttgtagtcattttttaaataaatgttttttaatgagtactttagaccactcaggatgtttgtcctagttgtttggcatttgattgccataccttgggccttgcacaaggagaagaaaaagaaggaaagaaaaaaaaggaaaggaaaagtggggaggagagagggagggatggaggaaggaagacatgtcttatctgaagcaggtggttgaaaggtttaaaatccaatgaaagtattgtgttatccataacgctggtaaggaagactaagtc

SEQ ID NO: 74233 - DNA, 1027 bp, Homo sapiens
aatttgagagaattctcatttaatttttttctacttcaactcaaaataatccctctaatttgcagacattatcctttaaagtcccagccaaagcagttattcaacaagctgcctagtcagcccacctgtaactaaaaataagagattatctgccctaaggtggcatttctataggatcggaaacacaattacttccattgttgtagttgtgcttctgtggtattctggaaaagcctgtctgattgcaggttttgtttgttttgttttgtttactcaataaaaagttttaaattagttatttaacatacagtctatgaggccttcaggaacctcacgcgatagaaacattttgtttgaacatctgttcgttgtttcgtggttccgatgttattaatattcttgtaggtaagcaggtgattcaccctaaccaaattgccgtggtccaggagcagttttctccttcccctgaaaaaattaagtgggctgaagaactgattgctgcctttaaagaacatcaacaattaggaaaggtaaatgttttgttaatgccttgggtgagagcagtattgaaaatattgtcgggaagaatgaaacaaatatgttgtgtgaatggtttaagaaaactcatcgtatctggagaggggggaaagggagggaacacaacattcaccagtgagaaaattgcttgagatagatttgccctgcccatgttcctaaatacttcactaactggctctcaagtccctcattttattcttttcataaaatatattggcagccttagagaaaatagaagtctgtttagtttttctctacagacttctatgcagcattcatatgaaaataatcctagatcaaagtgagaacaagttgtaatgaaataaacacagtttgactaaatggttcttgtggaggaaagaaataaattgcaagttattttaatttggggggaaaaaagtacagaaatctcctccggtttagtcatttaagagtgggaggttgtatatgtgtttgtaccaatttctgg

SEQ ID NO: 74234 - DNA, 1146 bp, Homo sapiens
aatcatctaatattgatatcaatagaaataattttatataaacacatatagcatacatgtttatacaacatataaacattcaagtatgtatgataacgtgtatttcctcaaatctatattatgagcttagtgctaaagtttttatctttccatattcatcactcttaggcaaaaatgacagctaaaggaaacagtcagttgcttttttaaaacagtcactaatcacaggaaatgttaatataggaatttactatttctttccaaatggagactctaacagaagaatgcgaaggaatagcacaatatattacgtgtgtcaaaattttaaagatactctgctagaatattcatattttgcagtatctggctacaaatatggctttgcttcattttcagttttccagacattctctttgattcatatcatggctgtacgtgctttgtttggttttggaaggattttgtttggctttttcaatatttctccttcgttatagcttcacaagttggctaaagactgaggaaggggaagtattcatctttaaattctaggttcaattaacaattacaaatgtcagaaacaagatcactacctggcctaacaactgtaagcatcacgcaaccaacattctcatttcactcaggagagaaaaacagtgcaagctgataagttcacattagtaagcacatcttctgctggaatataaactggaaacatctcttaataaagaaagaaaaaggaaagtaagagtttttttccttatgtaagtctcttcatctagaaactttacaaacagtaatacatccctcctcccaaaatattgaaagcccatcattttcataggtgtctgattgctgctcgcacacctttcatttctgtttccaaatgcaaggctttacaaaagaaatattgcttggtccagatggccttctagaagcctccctgagagaactcaggagaagtttctctagccaaaaatattgtttccgcttattcaagtgccagaaatcccactgccactctttcacgcagatcaaataaaccatctaaagacgtggttgttgtctttgtcaactgaaagggttgattccactattagacaacagtgtatcctcccacacccatccagcccacgacccacagcc

SEQ ID NO: 74235 - DNA, 1026 bp, Homo sapiens
gcttaaatttgatgtcaaacatttttaaataaagacatttaaacatttggcatgttacacatttgtcttggttttaaaaataatttttaaaaatctttaaagaagatttctggtttcaaaaagaaatctgagatggaggtgatagtagcggaactctacataattactaaaaaatcaatgacttatgcacgtacaatgggtggattttatggtatgcaaatcgtacctcaataaagccactttaaaaattgagaaaattaagcacaaaacctaatttgatggcaaatgtgttaactcccttagattttgatacacttgtaaatccaattgtcttcacctcaatacatagctttctacatagcatacttggctttatttttccagatttccttgtgaaaagatatcgaaaacaaagacttgcctactcttgcctgattattctgcctgaatatttttaaagagaaatcttgccatctacatgtttagaccccgaggaaagttttaaaaatagaaggctaccttggtctctcggatcagcgtttaaagtaagcatggctctggtccgtggagacccagacctgggcaagtagatgattcgggatggtcacatatgcagataactggcacacacatgcacctcagctctcctccctgttgttcagccgcctcgacctttcctgccctgctcctgccaaatccatcttccaagccttctactgcttctccttccccattgcacccccgacttcctggaactcttggtaaagtcctgaattagtcttgccaagaacaacacacaaatctttctattttctagccccatctttccatttatttagctaaagctaaataatttcatcctgcctttgtaaaaagcagaatgttaacgctgtctattcattttacatccactcaatttccacattccaagaaatgtcctcccttttgaacaaatgtgtctagctatcatctttgctacacctcttccttttctggtccatcatctgctgaaagaacggtgtcctg

SEQ ID NO: 74236 - DNA, 1010 bp, Homo sapiens
attacaagcgttgagccactgtgcccagccttcattacaatttttaaagatgtttatccataaaacaaagggttactgatattcagatgttatacaaggaccaaatatcactgccttcaatcctcctaacaactgctttaggtgtttttaagacttaaaatgtcactcatatattgtattattgaattctagtatttctggtattgtaataaattatagtaagaactttcaaatggaagcccaggatgaaaaatgttatagtttacttttgcccaaattctcttgttaaaattgcagtttcacgtatttgcttatctgcacattatctgtatgtatttttagcctcatcttatgtaataatatttctgaaatagtttagatatgctatttttataaattacattaaatataatttaaaatacatagtatatacaaaataaatatgtagctgtattagaactttataattatcccaaataccagttatcagccatactttgggttacaatgattaataagaagaatttgagatttggggtaaaaagccttagattctagtctcgtcctcttaagttcctttataagattaactagtactgaaccccattgtttgcacctgtaaaactaaataatcatgccttctgtactataggtgagaaaatgtctttgaaaatgttttgggccaggcgcggtggctcacagctataatctcagcactttgggaggccgcagcaggtgaatcacttgagatcaggagatcaagaccaatctggacaacagggcaaaaccccatctctactaaaaatacaaaaagttagccaggcttggtggggcatgcctgtagtcccagctagtcagctagtggggaggctgaggtgggaggaccacctgagcccgggaagtcaaggctacgatgagctgtgatcgtgccattgcactccagcctgggagacgggagtgagaccctgtctcaaaaaaaaaaagaatattttgtaatagtataaagtact

SEQ ID NO: 74237 - DNA, 1821 bp, Homo sapiens
tcggtattgctgctcttggctttgcattcagccttttccatcatcaccaggtcagcggtcacagagcatctcccgtgtacctggcaggtactgggtgctgggtgccaggtcctgggagtcaaaggtacgtgaggcctggcgcctccccacaggggcctcacagtgttgtgaaagacagcaatgtaaacaaatactctcactagatgggaacacaggctatacagagagctgtacagggaaagggtggagagggatttgctctaccaaggaggcctcaaaacacttcacagaggtgacaccttgacatctggaagcatcaggaggagtttgccagacagggaaagggccttcagagagagaacagggcatgcggcagagctgcagcgtggtgtgtgttggggtacaggcctcaggggactggcaggagatgaggctgaggggggagggtcccatcatgggcaggcttgggtctccactgaagatattgcacttaattctgcaagtccaaagaaaaccatggcagggttaaagcaagtggatgattccatcagatctgttttagaaagataacagcacgctcccaactagaaaagtgccactccctataaacatcctggcaccatgtccctgagagctccaggagccagctttggagccgggaagcctcactgagctgagggtgcctggcacccaaacggacatccttaaaatgaatgtcacaacaaaactgagagggaaccaagggcacacgagggcctttctaaggactctccaagtgggagaagttgcaaaataggaaagaagaatgaaacagtgcccatgagagtgtctccgggagcatcatcttccgcctttcctgaggagtttcagggcgctgttgacctcgtaggtaaggaggagccgtatcccaggaggccacagctgggctgagagatttagcaagtggaaggcacagccaggatctcgaggagaaatttgatcacggccaacactggctggaagtttaggaattccctgggaactgctgtgaggccagtcattcattcattgagcagaaagacttagcaccatatgggaaaagggtgataccccaaaaaaggactctagccgctgtattcaaatattagcgttaattctcacagagaactccctctcaggaagccacagcaacaccgtcatcagaatgtgccagaaggaaccccttcagtatccacagaagttaatttggaaacatagtgaatagggaaagacttagatcaatttgtggtttctagaaaattactcttttaggactatggagaaaaaagtcaagtactaagtaccagaaatgcaaaatatatgacaatttcccatagatgtgattactattgtcatcacgccatcatcatcaccttcaccatcaaattgtaagtcagattatgtcagtgcttatctgatccacgggcaatggccgaggtgtcagaaaaactacagttcgatggtgactgtttccttcctacgcggaagacacgtgtgctatggtgatactggccttcacctccaggagtctgaaatcatagacatatgtatagtaagatgtgcaaagcaattgaccagtgatttattacaacaaataacgccataggtaactgtcaaataaaagcccattgcgtccggagttccacggcaacgcgtggagatgcctggcattgctctaggtacccaatgtcgtatctgtgtgagcagtgcagtctcgcaaagatggccctgattgggaagaagtgcagccatggcaggccctcagatcgtccctgtgctcaccaccctggccttttctccgat

SEQ ID NO: 74238 - DNA, 1041 bp, Homo sapiens
gagccacaaatctggaccaaagtcccattccctgaacagagacccaaacgacgagggtcccagaagagagttcagtcctgatcagaaacccatggtgccttagtccttgaagaacaaaactctaggaagaagatgctggaaggcaaagggtattccccctctttccccacccgcgtctctgtggtgccatgggtgggcccaggtaccctgggaaaggtgggagagcagtcaagggtgggtgtgtgatctccactgggctcactgggcacccccgacacggggaagtgagagctgcccgactcctgagccaggcgtgggtgacaggaagaggaccttgcagctaatctgattcattagaaaccatacctgtttatgttttgtgtagctcatcacaagccgcttagccatatcacccccgttattaattcttggggtctaaattatgggtaacactattaaaacattatcagaactaatgagaaacaattacttagaaaatgagccgggacaagactgagttgggaacatcagtggtgatcactgtagattagtttaataaatcatcaggtgcaaggcaagactgactgtatgtatgcaaagccccgtcacgggaaaatgaaattgagattttttttttttgcataattttttcattaatctcaataggacccgtgtggtgtagattgctttattcccctaataccttgcctgaggcgggggggggggggggtgcccaataatgtcttcattgttttactgaggtcttaatgacaatctgtgacaacctcattttaatgtatagaggattatatcaatacagtcatgttttattgaaatggtgaagggaactccagtcagagtcaggcagtgtctgtgagcacaagttaggaagtttctcggcatccgggagcgttcccgtctgatgtcccagtgttagtcctcccggccgccctcccctcctctcctccagggacggctgggaaaacagtcctgcgggatgaagacttcaccgcctccgatttgaatttgaaagtaactcct

SEQ ID NO: 74239 - DNA, 1007 bp, Homo sapiens
aaggcttctgcggtggcttcccagcaatgcaagccatctcttaccaggaagtgctttggggtattgtctgctgagaaaggtgttacataaattgaaactccttttgctcagagctgagtcctgaaagttcatgcagtgagaaacatttctcaccgtgcacaaactgtgaattgtatatcaaattaaactttctgattaaaatctgcattgtcggacctcctgctggttgccaccattttgctgaaataagatactatttggggtaatggcagccagggaaagctgttatcattgattgtaaactggcttcactccctccacttgaaaatctggtgggcttcattgtgcaaacattgcatcttccatacaaatattacagagcaaagctccgctactgatccatcagctggagtaagcaggtttatagtctgaccccaacagctcttacgtctcctacaccccaacactgggctgcaggaggatcctgcaaggtgggagacccagcaggagaattcaagaagcatatatcaaagtctgctggtttttaatttaaaaaaaaaaaaaaatacagggtctcactctgtcgcccagactggagtacgccactatgcctggctaattttttgtatttttacagagacagggtcttgctatgttgctcaggctgctctgcaactcctggactcaagcgttcctcctgccttggcctcccaaattgctgggattgcgggcgtgagccaccatgcgcagcccagtttttaattttaaaaatatttgtagctgagcgaggtggcatgcacctgtagttccagctactttggaggctgaggcaggaagattgcttgagcccaggagtttgagtccagcctgggtaacatagtaagaaccctgtctttataaaaaattaaataaaataagataaatattttttcttcacaaggacattattatttgagagaggaaaggagataaaggaaaaaatgaggcctagcaggagttcaaattcc

SEQ ID NO: 74240 - DNA, 1304 bp, Homo sapiens
acattcacagtcaagtcttgaggaggtgtgatgatggcatcatgcctatttttttggaaagctgttgtttttaaaacaggccaacacctcttttatactgttgtatcagccttttaaaaagtctatttttcaatgcctgaaactgcattttaatgcattttcttccacctgagcactgagcacaccaaactggaatccatttgaaaatgacagtgtgtgaagtgtatgatttacattaaaagaggggagggagttgccatacatattaaaaatttttaaaaggtttatagttaccaccaaacactgatgaatgtgtgacctttgccagagctgtcaagctaggataaaaaaggtcaaggacctaggacaataactcttagtcgatttattttcggttggtacaacacatctcctgtgcaaaatgtagtccatcagaaacatcctacagatacactaaagagcactaatttatccttagagaccccgaagacaccccctccccagggtttgtagaaatttgttttgtgtgctgtgagtggttgatgtagtcttgtcattgttaataacttgtatgtgaacactattatttgtacagttgaattaatttattttcagacatcatcctttttttttttctttcctggaagagttcaaagcacaccaaagaattatattatacattttggtgaaagattgtcatttatgatccatggtttatttaaaaaaaaaaggaaagaaaatggaaaaatatatttttaagcttacttgaatgaacaacgtaatgtgaaaaccaagactcttcctgcatgtcttttttgcattgtgttgataagattatatatagtttatagatatattatattactagtacagtgcatggtgctgtcacttggaaagcctttcaatgttgtcttcagattgttgtgatgaatatgaaacatgcagaccctcctttataaagaaaaagaccttaaaacttgaatatgagataattttacattttaaaagtttatttgattttcatattattcactttcaaagccctttcaaatagaaaaggtatgaacttttggggggataatttatgtatcgtaaacttattagaacaaaatattcctgatgtataatgagttgttttatttatacaactttttcaatggtagtttgcactattctttattatgctacaggtttatttattatgaaacaaaggaatatgtattttatgtattttaccatgcataggttaactctttgccacagatttattggttcttgatacacctaaaataaaaaaaaatgtg

SEQ ID NO: 74241 - DNA, 2039 bp, Homo sapiens
atctgctgtgctcttaactgccctgcaagtagtgaggaaagctgtagaatgcagaggtcaacagcctgttctctgcccagctagccctgtaaaaatcgagtggtgggagtatgtttcacaggtgcctctatttctaaagaaaaacattgttttgttttacctctttccctttcccatctccacgttctctcctgatgcccctctccttcaatgaaatcctggagaacactgaaaggaaatgccattattataatttgactgtaccccccagtttacttttaatttagtgtatgtgtttgcttttttctctttttcttatacgcttacttccgcctgtggctttggaagtatcattttgtgtttattttgacaggaggatctcctgcttgtgtttttgagtgtacagaccctgaggggagtgtgtctgtcgggggagggggtctgcgggtcccaggtgggtttcagtgttacattctggcccttagctcagcactagggatctcaccctgatccctctgggactgcagggcctgacagcctctcaggagcccaggtccaggcaaagccaccaggtcagcagaatccaggcccatccctgaagcatcccttcccttttgtgaattaggaagaagaattaggctgggagttggtctctgggagaataggaaaaacacaaccttggttctgcttcaagatttctgtcaagagaggggtcttggaaagccattgttgacctttcctgtgtttccttgcaggggaaaagcctttcaaatgtgaatttgatggctgtgacaggaagtttgccaatagcagtgatcggaagaaacattcccatgtccacaccagtgacaagccctactactgcaagattcgaggctgtgacaaatcctacactcacccaagctccctgaggaagcacatgaagattcactgcaagtccccgccaccttctccaggaccccttggttactcatcagtggggactccagtgggcgcccccttgtcccctgtgctggacccagccaggagtcactccagcactctgtcccctcaggtgaccaacctcaatgagtggtacgtttgccaggccagtggggcccccagccacctccacaccccttccagcaacggaaccacctctgagactgaagatgaggaaatttacgggaaccctgaagttgtgcggacgatacattagaatttattattaataataataagtgaaataataagtgggagtccttggaccacatcctaacctgagacaatgccgagcctgagacaaacccgtgactcagacttgccaccgggtctaattagccctatttattcagtatgaaaccctatggtgtttgtacatttaattaatttaattaagatatttgggcttttttttttttttttcttaaaaaacaaacaaaaaacaaccaagctggacttgtacattgcaggaggatggggctgggggcaaattgtaccaaggaaaatgaatggagagattagttaatggcgatacacactgccgatgcaatatatatatatatatatatatacatatatatatatattattttttttaaaagggggagaaaaagagcattaagtcagaacttaacacagcaccaaggccctctgcatttcccagagtgcctctcaaatgcctttgacaccataccatgggctgcttttgagcctccttgttggaccctaattctgccaaggcctcttgattgtaaaccacacacctgctgcattgccaacagatcctgttccgtacctgtgtccaaaaacatttgtaaaaaccctttgagtttaatatttgtaatttttaatttccactcttttattactgatcttagcttaatacaatatttttatacaggattatttcttcagtatcctactgtgtgattttaaaaaaagatgcagcaaccttaatatatctccatatcttgtgctactgtgattgttcaagcaaaagtggagagaagaaaagctgctgcaaaagacaactgtgaaactgtgatattttataaaat

SEQ ID NO: 74242 - DNA, 1030 bp, Homo sapiens
cgagtaggttggggaggtgagaggcccagtaaatggccagctaaccagaacccaggttggctgagttaaccgcgctcagctgcctggaggccacgggacccgatctctggggatgctcgagctggcgcttgcggcttcccgctgcgcgtagtgggggactgaggctccaccgctcccccggtgccctctgtatgtcaccgaacacagccaagtttcctgcgaggggtgtgggcaattaataaactctaagggaagtgaattggacatttcctggcttttgagcctttgtttgattgtttctgcaggcggagggagggggatctcggggacggtggggtggacaagaaaggagctgggggacccaccgaaccgccctttattgcccctgcaattgctttacgactcgctggtcccgcgtggtttctgtgagagcggcctccctgcagaaggactgggtgtcggcgggtttggagcatctagtgtcatttaggccgcgccaggggcgggttcaagggcgaatggggcacccaaattactaggggaatcgaaggacctttgaaccccagcccaagggcgccaatgggtgcttaacaggcgcggaagtagggggttgctagcagacactggaaagggcctgatggtccactgagacctttcgtaaaagctagggcggggtgggcaaaggcaccggcacagctgtattttagtagagcttcgccagggccgtaagtgatggtgactttgggttcaagggttttcccaaatcaggttggccaggcactaggcagggagtttcagggcagcctctcctggccgcccgccccgtctgcacgaggcagggaccggatcccccatccccaccttccggccttggcaactcgcaatctgacttgcgttgggggctgcgactggcccaaggccttggggtgctcagaatcgctccgcaattggcagccctcccaggggctctcggagggttactgccctcctgaggtggcgctgagtcctgaggctccacggatatgtgtgg

SEQ ID NO: 74243 - DNA, 1011 bp, Homo sapiens
agggagggaggccggggcgggagactagggggtgcggggggaggggagaggaaaaggaggagacaaaaaataaaaaataaaaggctgccgctgcagcgttggcggcgcccatcgaaatcaacggaggcggtggcgaacgcagcccaccgcagccgagacctgggagcccgcctgggcctcacactccctcgggtcgcggactgcgctgggtccacgcggcgcggtcactagttccgggcccagcgcccaggcccgaccggcgggagggaggaggcgagcgagagatcacttttttattgttgttattgtttttcagcccagcctccccctcctcccctccccctgctcgctttctcccctcccacatccccctcccccctactcccccgcctcctcctccggcacaacttaaagaaagggggagcggcgcggctgctgccttcatctggggaaattcgtggccactgcaagtttactacgcgaggcgcagccaatgccaagcgccgaggccgaggagggctaaacactgcggccgcggctccgaacaataaccgccgcgcgcggggcggcgcgagtagggccgcgggggagggagctgtcgccgcagagcgccgcggagaggacgcctggactccgcctgccgccccggcgcccccgccgcggtcaggtggagccgctggtgcgctggccccgggtgccgagcgcggagctcgcctcggtcctctcctcgcccgtctgcctggcgtgcgcacggccgccgcggttgtgactgcattctaccggcgctgctcggtgcggccgggctccgggtccgctgggcgtgcgagtgagtgtgtgcgtgcgcgcgcgggtgcgcgcaggggtgggggctgcggcgcggcgctcgccccccggtagcccccctctcctctcggctccccacacctccctccggctccctcctcccgcccgccctcccctgccctgcccgcccgcccccgccgcagctcctttaatacactttggttctcc

SEQ ID NO: 74244 - DNA, 1031 bp, Homo sapiens
tgtctgaatgtgcttttctgctcggagtgtatgtctgtctgagtggtttgtgtgttttcccacttcttttactcggggtccaaacgcccttcccgggactgtttcccatgaaatgagtctggtgtgagccgaagctgtaatgcgtttctcatttttaaagtgtttttaaagcccgtctcggggtgggtcgcgggggctttactgtggtttcgcagcagtttgtgaaattctctaatgggcaccacagagtttgcgattcccaacttggacccaggtcagctagagccccaggtcagctagagccccaggcagcgcggccccgcggggggatcgcgtgagaagagagagccgcaaaagaacgcgcctcccgcctcatagattattcatctatgaccaggtctcagccaaaatcgtgccagacgatttcctaaaagaaagccaaatgttttagcaacttcccccgtcaatatttactccgaagtggggatgcgccagcggcctattgttctcttccgggaagggagggagccgaggtgcgagacaagcttttaacaaggtttaaaatttgagaaatttatttgcatgaaatgctcgctttcgagtcctgtgtctgagcggatgtctttaagaaacaatttaggtgctaatggaatttaacgttaaacggtcccctttccaagtggaacgacgtttgagttctcgcacctctaaatgactccaagcatttggaattctggcaacaggatgcagagacagccagaaaattaaacggggaggttttgaaaggctttgctgactcccccaaccctcgcccaccagcttgtgcctctccgcagtcactagatgctgccttatctctaatatttaccttttcttcaacttatttttttaaagacgggaggtgagactagaattgtggttaattcaatttgcagaattttggatgaaaaatactggctcagtcactctccacagcccggcccccaaacaacacgtagcaactccaaatgtaattgcttactggccctggc

SEQ ID NO: 74245 - DNA, 1376 bp, Homo sapiens
gcggcagctctggcgggggcagcgggacagccgggggtcacagcggcctctcctccaacttcaatgaatggtacgtgtgacgggtcggggcctctctccctctccctgtccccaccccagcgcagcagccctccccgcagctagcagcgagggcaccttgtgatcatgttgttaaaattatgaatctgatttttatgatgatgaaaattttaccagcagaaggattttttaaagttttttttttttttttaataataatctaggcatgaagagcaaaaatatcccttccggagtctttgaagctgaaaatataaaacaaataaaaaataaaaaaataaaaacccacaaaaatgttgaaccaaacctccctgctaatctccatgcccacgttctttcccaccctgttcccagtcttctgacaaactgtgtacatagcggactcctcctttctcctccgaggtggttttaaaggctttttggtgtatagaagtttgtccatttgtaaaactccggattgcgttcctccccgccttccgccccttcccttccctaaagtgatgggctttctcttttctctttttagtttacccggtttctttttaagtaatgtggaagaaaatggtttattttgtattgtggtattgaatattgtgttcctttttatgaggcaacctgattgtaaacttcatgtaactatagactggaaaaaatgagccgtgccaaagtctcccttctgtttcttcagcacattgacccatagcacacacatacacaccaccaccaacaacgcttgtgaatgtatttttctgttagctgggtttacatgtgatgttttagtgcttttgcaagttcaatttgttagttcctgtatgaaagattgtgggggaaaaataaacgtcgtgccgttagctttttccgtaataacacccttccttctgtaaatacccgttaccatatttatccatttgtaattaaattatggtattaacttgctacagaggaaacaatatttataaagaatgtttcttaactataaatatgtacaattgtgggcataaactgtttcagattttttatttgaaggttttaagtggtttgatcatttcttgtgatgttttgagagtaatgcatacagaaatataataaaatgtgttgaaactgcatgaacatactattttttctagcaaagttattaaagaaaatgggggaagaggcagctgaggattgacctgggtacgcctcagcgagcctgagtgggcgggaggcacacgcgttctggggaggaaggtgtgtgtctgcatagaaaccaagccaaagtgcccgtttggcagaaggtctcaaaattattttcttcggcctttgtttaatagctgaga

SEQ ID NO: 74246 - DNA, 1097 bp, Homo sapiens
attgaaggagaacacacagacacatagagacatagtgttcattttagtgttgaaacacaccagaaaacttcccacttccattcatatttggattcctgtttggatgtctagtttttactataaaaaatatcacaaaccaaacaacaacaacaatgtatcattaaaaagatgctgacagttatgtattttattcaccaacctacacactcctcattcctacttcatttttcccctcctagtgtttttcttgtaattatatctttcagattgtaactttcaggggagaagtatattttgaaatattttctaaatagaaaacaaaaggtctcagtaactcagaaataagttaacaattcctaagcatctctgtgggtctttggcatgtgtgtgtgttttctttttcctttcaaattaagatgaaaaaattataagggagaatcactccatctcagcacctaaatcctgtaaagtggactttaactgcagattttggtggacaagctgcccttctgcagcacactctctaactgcatatttcagcttctcgatgctcccacttgaaagagacatagacctcagccacctcctctctgaggcaatttactcagcttctccaatcacacagttctttaacggggcagaaattgttgggttgtttttaatcaagtttggaagctgaatctctttcccctgatgactgtgcccaggggtggatccggctgaatgtctggcgctgcgggcagcgggcttggccacccgtttttcagacacaacaccagagaatggcactgaaataatcgcgtgtagcagaaatgtttaaaaacattaacctctcttattttctatacttgtgaattaaaaggcaaaagaagctgaaaggaaatctgaaatgatactcatttacctactgaaggcagaccaagaaactgtaaagatgcttgatgctttgaaaatgtactctgtaaaatctttcaaattagatgctgcttaagatcaatggcagtaaaaatatttttatggtttgattggttaaaacatttttagatattagtgatgataaattaacagatcagaagtttctttctaggaacaatttg

SEQ ID NO: 74247 - DNA, 1111 bp, Homo sapiens
ccacaaaaatggtaaaatatattgtcacatttatatcaaactgctaaaataagttttgatattttttaaaaaatgagatctcatcaggttaaatgaaaagagttgagaatcttcattcccaaagaggaaaatgattctgtatatcaacagaatcattcaacctttgactgtattctctatctacgttcctaaattgaacctatctatacatattttgttgctttgtctgtgtacagtcatgttggatttaaatgagaaatatctgattttaccacgttgaaacaagaacctaaaattagggaagtattcactgtgactcacatcttacccaggcagcctgctgttgaaaggatgatccctggtgcgcactgtagtctcagcctcaggattctataatgagattgagtggggtttcctgtgagcactctggggtgattgacagtaaggtgagggcagtcatcactttttatgcctacccttgatgatatgtccctgctgtctggggagggaccgaggacgaataggacttggtgatgtctaagtaattagtgtatgttggttccagctgaacaaactggagggtaatgatcaggtaaatggaaatggaacacattaatgcagactaaggtataaaagaccttagggttaaacttttcaacattttatgggattattagaatatctttatttcattttttatatttacatgtctctgtatatacatacacttatttatatttttgtcagtgtatcttcagttttaccttagatgtatatagagatgaaagcaacttaaatgtgaaaacctcaaacgcattttttctcctttacatgatttcagaatattttcaaactttttctgtttggaaaggagttaaggttcttaattaaacattttctttttaatttcacaaaaattgttaatggacttgtttggagctgatgcctatcactgatcctcaaataggagcaaatgactaaagtcaggcttggaaaacttttttggggtgttaactgaaaagtatcaggtgaccttttatttgtgtgtgtgtgtgtgtgtgtgtgtgtacttgagaatgttatatttcagtaacattttcttaaactgcct

SEQ ID NO: 74248 - DNA, 1048 bp, Homo sapiens
ttttaatctcctagttttctctctacttctgtggccctcctctgtgtcccctctacaggaatcactcaaggtttgattggtgggctcttcttaaaattgttttattttttgtactttctctacccttaccctgaaagatggcattctcttccacttctgtttctgtggttttaatcaaccctagactccaactctgttttctctctctctgtgacgtctctagttgaatgttttaccactacctcaaacccagcattacccaaactgaactttgatccttcgggcttcttgtatctgaatcctcctgcagaagcacaagatgtaggaatttatgttcaccatcattctttctttcatttctcatttccaatttatgagcaagtccttttcataaataattttggaatctagtcacctatcttcacttcgttattgcttctttagcaaggtcttttaaaatcttctagtgaatcttttaatcttttagactgataaaattaatttcatctggggcagtttatctaatgtgaactgtttcagtttctgaagttttgtttgatagcgaatgctttcttactctgttttggaattttagttcataggctcttttttctggtgaaagttaaaaatgtttattgctcttcatgcttcatcttctcccttccctttgcttccttgaccttcctcttcctctctctttcctagtttctctctcaccccggccattgctgcctcccaccttctccctgaccagtagttttgtgggtgcccccccgccggcattttggattcctaatctacatccaggtcttatggtgatagtttggacacatggcagattagtcccagcagcttgttcagattttgaccctgaagctgtggttctgcctccctaggtccacagtctccaggagttgtagtgagctgtagttgcagacaatacttggtggcctcctcttcaggccaagggcagttcctctttggcctggtcttcaccagtggctctggctctcttctcagtcttgtgagaacattctcgccatctgta

SEQ ID NO: 74249 - DNA, 1061 bp, Homo sapiens
tgaacggaataggaagctaaaattgtttgctgtgattttacataaagagataggggatattatggaaattatttggttagacaatgaattaggctgtaataaatgaaatcatggttaatagagttcctgagtttatttgttgcattgttgctttttagtgcatactcaaaaagaaatacgactctataaatgataggcagaacaatcagatttgcaattttgtgtgtatttgcagatgatggtaattctttttgctgggcgcatctgttaatgcagaaatttgtctcctcaggttcatgtgaaaatggcggatgaggctgtctgtgttggcccagctcccaccagtaaaagctacctcaacatggatgccatcatggaagccattaagaaaaccagggcccaagctgtgagtctgaatgaatctatctactgcagctgtttcatatgtagtgagcagaaagctagagtttgtatttaaaaaaaaaaataggaaagaatgattgaaaatgctgttgcagttagttcatgtcacatgagttaaatgtggtcgaattcgctactggaaatcaaaggctttgtagcatctggcagtgttggttgctgatcctgcaggtggctgctggattcagctttcacaccagggagcagtttcagttcatttccaaatttgctaggaaaaaagaaatcccaattagttttgagtattaaccctttccgtgtaataagagcattttaaaaaattctgtgttataaacaggatccaaagactgtgttcaaattccattttaataatttaaaaattacttatacctagtacacttccagaaataaaaacagcacatttggtaattattttagtttgttaatgtcagtagaatgctcataatttacaaggataaatcattctctccacccccagttctgtttgaatagagtggaatccaaggaaaaaaatgatttctgatatcagaaacagtgttttttcttctattttcttttttctttttttaattatcagaactaattatatatagtgttaaaaactatgcaaagttatctct

SEQ ID NO: 74250 - DNA, 1081 bp, Homo sapiens
gtagctgggattacaggtgcctgccaccatgcccagctaattttgtatttttagtagagaaggggtttcaccatgttggtcaggctggtcttgaactcctgacctcaggtgatctgcctgcctcagccttctaaactgctgggattacaggcaggagccactgtgcccagcccgagttcagcatttaaaagtcgctgatacgtagctatttctggattatgatactggttcctttagaaatttgactctctttttagcagaattattttactagaagtatgttcaacactggctgatactgaagtggcgaaatttatgtttggccagtctgggagagccaaaaattacttgattggatcaggctggtagattgtagcaatgtggcttgtgggtgaggatagtataaagtagttgtggatggcaaagtttggggtgaggaaggaaagaagagtagacattagaagaaaaaaaattcagagcacaaaataaaagtaaaaccacacctccattttagttcagtttgatagaaacggcttgttggtagttgccgagtattattaatgccatcaggaataaaatgtgttagctgtcctagtagtctgggttttggaaattaccagttcgtgagtactgtaaagaaaggagaatttagagtttttcatccatctttgccaaggttccttttacataattctttgatgcaccagccattgtgaaattctccagaattgtgggcaaagttagcctcaggaaaaggagagagagttttgttgaatagtgtagacaaatgccagtgggcaggaagctatgtgggcatatactccccattgtggttaggacaaaggtagtgtgtggaaaatgaatcagttaggacaaagggagtgtggagaaagtaaatataagaggcagtttcttggaatttgattctgatcctagaaatgtgagttagaactgatcagtgtataagagaagtgtacttattcaagggctcttgaacagtaaatattaatacataaatgcactgtacattttgcttataaagcttttgcaatatgataaaattgaaagtgctttttgcttt

SEQ ID NO: 74251 - DNA, 1012 bp, Homo sapiens
taatttttgtatttttagtagagacggggtttcaccattttagtcaggctggtcttgaactcctgatgtcgtgatccgcccacctcagcttcccaaagtgctgggattacaggcgtgagccactgtgtctggccaaaaaatgcttctttaaagtctgtttaaggcctttgagaaggatatattaataaaaatgaatccaatctggttcccgcgcagaatgctgcagtccatgggtgctatgagtcctgggtgctcatagtcatgttacggaaaataagttgatacacaaataacttcacttcagggaagaaaatactgtgagataagatcaatatctttgtaaatgaaagtaagaaggatgatttccatctggggttctacattagagaaaaacctgtagaatatacaacctcctcctttctttcacacgagttttctttccaaacctatttccccatttcccttttatcagtgctgtgcctccacccagcctgactgtgcgctgctcccatgcgtggctggctctgccctcagtgctttcctcactctctctgggtgggtgtgcctggcctcccacccaccgtgtctaactgctgcctgcccttgaaggcacagttcatatgcagcctctgcggggaaagggttctagatccttctgttgagaagtaatttctttccttggactttttgtttcagtttgattggaatgtttttgtttttggaaaaatgatttgtgctttatctgatacattgtttttacttaatatccaggactaaaatgattttttgattttttttgcataactgctgtgtatttgctttagaaagtgtacaataggccaaattcccccaatgtaaaaacacaccaaactttacaagactgataattttttatgctgagtttacgcgaagtgggattggattttatacagtccctgctgtccatgacttgaaaaagatcatgtgggccgggcgcggtggctcatgcctgtaatccctgcactttgggagg

SEQ ID NO: 74252 - DNA, 1032 bp, Homo sapiens
ttttaagatgtaaaacataaggacgaaaaaaatcatcaccttcaagtagtccatgtaaaaataactcaagtcttcaaacattctcagaactaaaaaagaccaaagaaaatattcccatcatactgattatgtttcaattttctagttactaaaaattagaacatggcactaagtagactatataaagtatgtctttaaaaattcaactgtgaaggagatcttttttttttgataatcattaatatgaaagtgaagtttctcttttccctgttataacagttctatgtagtagtagaggtagaattctgaattgaaggtggttaggacttatagcaacatttctgggatgagtttttcagtattcccagacttcaatttaattcagggtttcttttttgctctccacttatgaatatgtgataaatattttatgtagtcgtgtacttttgctatagaaaatcagtggattatttaatttgattcaggaaatctaccctgtatggttatttcgatgttgggtagattttatttcaacttaaaacgtagaaaagatgcttaggcaaatgatctaatagttttagatacatttggtaacttgtatcttaaaccccagggccaagtttagcagtcttacacatgtttagaaaatagttgaaaaatagaaaatttaggtctttttaggtaaactatacaaaacacttttatagtcattttgatgcctgataacttcagggttcattgcccctgtacatttttcaaattatttgcttctcaatccataaggctttaatttaccccctactgacaaatcccaaatgggtttttaagaattttgagagtggtctgctgtagttgtgcttcagcactggcttcaattgctgacacagaatctcttaagatgcaccaaatttagaaggataggaggttcaggcagcatttcctctggcaaatactaagattttatttgcggagggtggggacggagatacagaattactgttttctgtaatatttttctttctttgatcctgt

SEQ ID NO: 74253 - DNA, 1033 bp, Homo sapiens
caatttgggtagaacctgtgaattgcttctctaactaatagaatatggcaaaggtgatgtgatattactcccttaattaggttgcattatatggcaaaagtgatgggatgtcactgcattcaattacattatgtggcaaagtggttgggtgtcactcttgtgattatgtttcattatatagtacttgatcttaacagactagagaacaagattctttttgctggcttgataaagtaagcagccatattaaggaagcctacttggcagtgaatggtgggcagattctaaggatctatgtaaggacagtctctacccaagagctagcaaaaggctggggtccttcatcatgcagctacaaggacataattctgccaactacctgaaagagcttggcagcaaatttctccccatttgagtctccagtgacaatgcagcctggttcactccctgattgcagccttgcaaacccctgagcagtgtatgatgaaattattattattatttccttatgaggtcttgtcctctttacctttttgttttagacatttgtgtgaatttgggtaggggtttggatgtgtcattatgaaccttgatctactcagcctgaatatttctaccagtataattatatatttttttgatgaggaatgttgcctttttgatatcttcaatttggacttgatttattcccaagaatactgatgtgtcactgtccaaattatttctggcttgatgatgaatggtggagtcctcaagggttcaaggaagagaccatcaggagagtgtttgatctggaaattctgtttacacgggagatttttccttatgaaattagtgaatgtagtgtctcctaggaagggaatgtttcttggctaaaggtccaaaggtgaccgttgtgtgctgggacatgggaaatgtgacgggtattatccatatctgtcaactgagtagtttgttgattccgagggagagcttgtggaacaatggcaggaattaaggtaaatatactgccacccatatcaataaaattttt

SEQ ID NO: 74254 - DNA, 1067 bp, Homo sapiens
aaaagttttcttctaggtttattataatccagtcttcatcagccatcactcttcctgtattttgttcaagaggcactaattgttcgcatttggcaggtttaacacttcctgacagagaggctattaaggggaagtattctccaataactgtcactggctggaacaaagaaccttccaactcaatgtgtggaaaccactaacattcttaaatgacccttttcatggattttcatccctttaagctaaagtttggagaatgtagggtcagcgaaaacagcaacgtgtaataaagcagtaaaccttgattttggaaggcatagggtgggagatatagatttatctctgacttgaaaacaattgttatttggaaaatctcattagcagatgtgactgcttggagtaaaaaaaaaaaaaaacaacttaaaactgatgtcgctttcaggacccctttgaacttaacaagcacctatttgtggagcagactggctaatgaaaggaaattaaatttttctgacaacttcccctgccaacctccttattcaggggatgttattaggtactgaagaactttaaagaagatttttttttattagacataagtgaaccagttataaacatccccccccgcccccttctcggaggattctgacatggttgctctacattttaaacgtattagcttaaaagcttaaaaaacactgggcttcacttcagcattttagtcattttctaaaaattcagtcacacttaccagctgtggtttcaaaacaatattgtcagtctttgtggtagtttagtttgtgtcactgaattacacaaacacacacacacacacacacaccccacacatacccacacacacgaaggaggcttagatttcaacattatctttattgttatttggggaaatgattcagcagtgtcctgtgttggatgtgttaggtgagggttaatgatcagtgaaattacttagattcaagggaagtttttgtcttttcatcttcttagaggtagaagtggcattggttaatatttagcaataactaatccttaaatggataaacttt

SEQ ID NO: 74255 - DNA, 1036 bp, Homo sapiens
tcatagaaacagacatgtatgtttttaaaagtgaaatgatacctaatttgggatttactttaaaaacaataaagggtgggcctggtagagaagtgggcaagtagcatagataaagccagagtggctatgtattaataattgctatatattggaggcagcttcatgcaagttttttatactattccataataaagcttttatagcatgtcatctcaatcctgctcatttgagaataattttaatccacaagtagaaaagtagttaatgttttgtttctcagagcctttctttcatagaagcaaaatctgtgaaaatgcaaagtggtttgatgatatttttttcagggtttgttgaagtcattttagcttaacttgcctgcttgaaggtgggtttggtatcttgaagccaaacgtgcaggatttagtggatgtattgctgattcttgttatttgtggcagttatgttctctaaagtcaccttgattactgaattagtgaacactgaataatttcccctaggggaaatacagggttaggttcctgcgagcctttgcttataacattttcctcagtggattaatacataattttgttttttgtgtatttctcatttaatatctgtggttgattcattaacagtgaactcacaatcctggccaacaagactataacacgtgcctgagtaaagcttatcccacacacattttctccagacagtacttcatggccttcttgcacatgggaaccccagacagcacctaaggacaatgcttgatgggccatttcacaccatgaaatgacacacacacacacacaaatgcaaaaaaagtgacactaaacagaccttgaaaaggatgcttgttatagtatgagcattgaaacgagaagggagagcatcaccttgttcagccttagcatactggagtctcaaatttttcacctctctgcacttgttcacaaaggaccatgaaagcgccttaagtattgattttggggttacaaataaatttcagcaagtaggcagatttgtaaatatg

SEQ ID NO: 74256 - DNA, 1050 bp, Homo sapiens
tttacccttccttctccacccttttttgttttataaatgttaaaaaattaactccataaagtgttaaataaagatttagtttttatgcttgtgctaagacatctgttaggaatgacggatagtatccctctaaagttcaatgtctagacctctgctttgtcactgttaatactttatgttggaaataccactttgtttttttcttgaacctttctagatgaactgtatttgtcagtgtgtatgtgctgttaagaaaaattactctagatattacaaataggaagtgatacagtgattgcaaaatctttggaaggatggaggaaggaagggtacccagagtgaacttcggtggtgactcccactgctgtaccactcagccaggctcccagaggaaccggcacctctgccacagtgaggacgttgagaatcaagtggctgcccttggaactgttggctttgggggacataacttccttagttctaaccaaatctcaggaagcgactggcgttgtaaccggtggctttatttccttccttcttcccttttttctttcatttaaattgtgaactatacagaaacatacatagaacacaggtgaataattgaatgtattattataaagcaaaaatcaatgtaaacatcaactgggcctagaagtatttacaaaacagccagctctttttacactagcctcattttcttctccttctcaatgattctgattccccctccatcttccctagagctgtctcctatctgactgacttctcagaaccttcagttttcatatcattcttcctttgaattacgcatacctaagcagcattattacttttgtttgttttttaaaactatattaatgggatcgtatagtattcgttcttttgtgcctggcttcttttttcagcatggcatttgtgagatttgtgctatttcatggaactcctgtatgatacattttctaagaaaatgccactatttctttatctgttagatttctgtagatagtttatttccagttttatggaatttgtgttagtttgctagga

SEQ ID NO: 74257 - DNA, 1051 bp, Homo sapiens
atattttaaactacctaataagatctttatttagtgtcacatttacgaagggttgatgcttattttagtgatgatttgtcattaaaattatgtcaaaatgtcttaaaatgttgttgaaactgtaagcaaactcaacacgcacaaagctaattatgggtgccatctgtttatttttacaaagctttttttttaagactatggcattgtctgcttatgataagcttcaagattattataatgactaagtcctgtccttcaattagtgtagttgaagatgggaagataattcgtttgttcactgaccttttcctgtgtcagagtgtatgaaatatgacatgtcatgataaagaaactattgtgaagtgcatttagaagatacttaatttttatgagaaaaaaatgacatcaaagcagcagatgtggccaaagttttgtttaaattcttagaacttattcaaggttttagatgaacggtagacttttccagtgacttaagtggcttcattttaactcaaggttaagaatttctaagtgatcgaccaagtttatgttgacatgtatccctgtttgtgtacctatatgtcagcacatgtttttgtacatacatatctcatgtgttagtgcagaaggccaggtacatgcatgacagcatcagcccaagtagttatcagcaatctgctgagagagcagagcgatcgcactggctctgttttgcaattgtgcatgctaagcattacccaagtcagtgtggagggaaagcaacctgaaggatccatctgctcccttctgctacactgcctcgatgcaagattacactaatctggctgcttgtcaggacaggttagtgaaagcatgcaagtgggtgagacttagggtggactagtgctttggaaaatcataagctgcccctgtagatgccacgttaagtgcagcagaataggttgattatcggccacattgaagattgccgtgaaataaatatatagctttttggttaagaattagtttcaaaattaaaattcttaaatattgttggaccacagataaatca

SEQ ID NO: 74258 - DNA, 1085 bp, Homo sapiens
actatcgcttgtcttctgatgtcaccgtataataaagccatcattataccctcatgtggatatcctagacaagaggttctacatgtggtcccttgataattgcctaaattaaaatattaaaggcctaacagccgctgtgttgacctttttctgccttgctgcagacagatgagctgctgtttattaggaaggcttcttcccacaggtggaaggctacgtgagcttccgctcttctcttcccacccctttacaatgttgggcatcaaagtcctgctgttccagcagctttgattcagttcctccatcctcaagacccctaggatgtgcctgacagtctgaagtattttgattagcttttaaatacttcagattccaaaacttctttctaataatttaataaatgttctgtcctcagtaactgctcatttttaaagttttgcatggctaacctccgtgccttgctgctggtatcaaactgggaaatgaaaacaagaatcagtgatgtactaactcactcgttggctggttaacagcaatcagcctcttcaaaagaatattttgaacttgtgctatccccctaccccccaccccaagaaaatcacaaaatcagaactctaattggggctttacaaagcaaagccataggaaaagctgtgtaaacatgaaagcctcaggggagcaacagtaacagaaaaatagtgttttacagttgagagggtgaggcagaaaaggaaagtgttacagacatgaaaggcccaggcccacattcctatggagctgaggaccaggcttgacgaggggcctcactggtgggctcagaagggtctggcagggagtgcagttagcaagggcatcgtccatgccatgcttcagctggaagacaccatcagagagccacagcatcctggcatagtgatgtaggaagtcttcattttttattttttatttttgctgttttttagtttcgtcattcagtggcagaacaaaaaatgtgttgcattacatattaacggatcaagattttagattgttttcctattttccagaagttgaaatgttatttgagattgaaattctctatccat

SEQ ID NO: 74259 - DNA, 1025 bp, Homo sapiens
ttatttcaaaataattttgaatttttttattttgaaataatttcaaaatttaaaaaatttaaaatttaatttcaaaataaaaagttaaaaaaatagggaagagcaagaacccccactctccactaatatttaaagaataaaagcagagatgcatttgggattttgaacttacatattactcatctggctaattctgaaggataggcaggtttaaaaacttgctttatgaaaggcagaaaagggaagacaatctactgtcttgtttggtaactgcttaattattcaaatatgaatatttttttcctgtgctgattgtgaacttttgttaagatagagaaactttgaagcaaaaatgtaattcggttaaaatgaatttcaaaatcctcatgaaataagagtgcttttggcctctgtttgatcctggcagcatgtctagctgatgtctgggcagtgttttggaaccagcaggcagtcaggggaaggccactcctaggggcctcttctctgtggcctggtggtgatttcccatacagatgggacctggtgaactctgccagaggtcatccttgactcccagtccacacctcccagtcataatttttatgagtatgtgattaataatatccttgaagttgtaaactaactctcaaagaatacctctactgtccccataccatttaaacaaggatctgttcaaatagtgttgtctttcctgggatgtgaaaagaaagaaactaaatgcaaaatggtaactttcaaatctgtatgatactgtttagtgcttcagtgattcttcccatctagctgatcttttgagctcttaggtataaaatacttttctgattattaccctcttttggctttaggattaattaatggacagtagtttcgggaacagttagtcgaggcatagatgtttgttgtctgccatgagccattatctcaccatattggccttaggaaagaaaaagagataacgatttagttttgcatagtcatatataatattttatttagaaaacatt

SEQ ID NO: 74260 - DNA, 1030 bp, Homo sapiens
ccctagcacaaaacatagtaggtactaagtatttgttgaattaatgaaaaaaaaaaaatcttagccataatattgatgagaaaggattactttggatttttttttttttttttttttttgagacagagttttgctcttttgcccaggctggagtgtagtggcacagtcttggcttactgcaactctgccttccggtttcaagcgattctcctgccgcagcgtcccaagtagttgggattacaggcatgtgccactacccccagctaatttttatatttttagtagaaacggggtttcaccatgttggccaggcttgaactcgaactcttgacctcgtgatctgcccgcctcggcctcccaaagcgctgggattacaggcgtgagctaccgtacctggccgctactttggatatttttaatcatttatacatgtatccagataaccagttcattctattttgatcctaacatttagtttcttgtccttcctaaaattttaattaaaagttgtagtacgttttgaagtggacttaggacttccatgtttttatgtctgcctggcaattcagtgatggtgataagataggaaacagtgggcagaaggagaaaacagggaaaaactacagagaacctttagaacaaacattatatgcatgtatgggtatttatatatatatacacacacacaaatacacatttatatataagtttgtctatatgtatgtatggtgaagtatcccagagaagaagaaaatggggcatttaaattttctaatcagagttgattagtatgtgctggacgtttagcaacaatagagaatatcccaaattctgtagagaagggatccccttcaaactcagaaatgtacttaaacctagatattgcagttttctgtgatgcatataatatattacatttctttttttgtaaggaattaacagcttggacaccacaattttgttttttatgcttagaccaatttttaaaattggcatacattgcttttagcaattatttagttgcagcctt

SEQ ID NO: 74261 - DNA, 1048 bp, Homo sapiens
atttttattttgatcctactataagagctgagggaaaggcagaatagcctgattattgctggagaatttctctgttccctaccatgattccagaagctcttgcacacttcatcagtattattgtaattctttggctgcaggatatttggcagctgttgcaccccactggcaaatcctattcatacttctttcccattcaccattgccattggagaattgatttctctctcctctactctaacctttcccaattcattttggattgttcaatgtgaaacattttaatttcatatcatacagctattcagcttacaatcccttttttaacctgtcaccagggtaacagcatagcatgctttctttaggcaatcaagtttttatttcacatgcttaatgttgcattaaatgtttgcattttgtttaacccccttaaatagtttgaactctggatatgttttatagggtaatgaaatccttgatttttgaattgaaactaaatcaacaccatcagtgcatttataataaaatgtcaaaagattaatttccataatacaaagattattattaaaaacgcaagttagctgatctgtgtaaggcaattttctgtaggtaatggaggaatatttgtatatattatatttgtgttcagccttgttccaaaaaaagatttaaaagtggtttagagattgtcagtgagataagtaaaaaacttaaaaaaggaatagatttggtgcaaatgggaaaatatatcttttgaacccattatttgatttttcagtataatgcttttttctctgttcgtatatatgaagatttgattacttgatttttcagtataatgcttttttctctgtttgtatatatgaagatgtgattacttgatttttcagtataatgcttttttctatatttgtatatatgaagaccataatgatttatgcatgtggagatgggtgaagtaacgagatgtactagaatgagattagacatcttttctaggagaccagtgtgggcattgtgtgctttaatatctcttcatcagtttact

SEQ ID NO: 74262 - DNA, 1006 bp, Homo sapiens
gggagcaacagagtgaagagttccatatgtgaattcaggttctctcaaattgttggttgaccctggaaatgtgcgtaacaaagaccccagggatcccagaagatcccagaactgctggaatgctgaatgaactgagctaaaatttcagttgcctaccatggttatgataatgttggaatctgaatctcatcaatttgaggtacttgtaaacaccttgagctttccattaaaaccctggaaggaccatgccttgggagaaaagactgtttctggaataaatggtttggactttttatttattgagagcaaaaccaaatagttcctagtacaacataaaagtgagcctccacaacttcaggactggtaactagcaatgtaactgcctgctgtaataaaaatcagtacttttcagagggagataacatgatgagtgaagtctgacaacatctccacaatacagtttacttggcatgcaatctaagaataaagacaactataatccagaggaaaagcagtcaacagaaatcaaccgtgagattactaaaatgtttgtttcatgggcaagagctttaaagtagctattaaaatcattttcaagtattaaagatgaaaatgagggaaaaatgggaactatcagcatagaaatggaaattaaaacacactactaagtggaaattccatatctaaaatgtcctatatctgcaatggataatttgctggataggctgaaaagcatactggtgatggcagaagaaggaataggtaaccttgaagatagaagaatagagattatgcaatctgaaaaaagagaaagaaaaatgtgtttaaaaaattgaagagacacaaaaggacaaaggaaacttttggaggtaaaacatgtttattaccttgattgtggtgataatgtaatgaccgtatgcatatgtccaaactaatcaacttgtgtgcattaaacatgctgttttttaaaatgtcaaatacacctcactaaaggtgtttagccgag

SEQ ID NO: 74263 - DNA, 1028 bp, Homo sapiens
agaataatgcagatcaagaagtggtaggtcaaatacaaatatgtatttaaattaataatattaatcagatattgaatctagaggtgattggattagaagcatagtttttgtgactctgatttttttaatgctgaatacacagagacttcttttgaaaatttggtgggtttaaatgaaaacataacttggaacattttttcagaactgtggtttaagctggagcccagatactacaaaatgctgatgtttagtacttggtaaatattacttcacaagtataaatatgcaatacctaaattaggttaattctgaaatcattaaattttgttactttaaaaagtcgtgggaaacatttatattctaaaaacacttttgtctttggctgcttgatacggattttctgaaccatgtaatactgataatatgcaagaaaagacccgtatgataagactaacattgttcatagatatggagtcctttctggggggttttaggtgatggggaaaaccagggctagaaaagaaataatgtgtaagtttccaagatgaggactgtgttttatttctctgtggtgccccacaatttagagccaagtgcttagtgtttgttgaactcataagtcatttagggttttgtgtgtgtgtgtgtgtgtgaatgtgctttattttagcaaaatttagatgttgtcctattatataataacataataagtgggtatctgagtaatgtttaaattcgttttttaaatttcgtgaatttttagtaataacattataaaataagtatagttttttttttgtttttttttttttgcaaaaaataattatatcggccaggcgcggtggctcatgcctgtaatcccagcactttgggaagccgaggcgggtggatcatgaggtcaggagttcaagaccagcctgaccaaaatagtgaaaccccatctctactaaaaatactaaaaattagccgcgtgtggtggtgggcgcctgtaatcccagcctctcgggaggctgaggcagaagaatcac

SEQ ID NO: 74264 - DNA, 1012 bp, Homo sapiens
atttttataggaacatgataagaatcatgtggttcttttaaagagttaattttggaacatcttttgttcaaaaaatagaacattattatatgtattcttttgcctctattgtcagtttttaggataggcttttaatcttgaacatgaaaaggacatcagtaaacaaggtgagttaactattacatttatgcctattataggcttttagtttaaaaattacctatggcttaaatacagagaaggcagacagaaaaagaacctttttttccctgagcattttaaagagaatactacagtaccattaggggtttataataaaggactataattctatttagaaaactgacttacagtacatgacaaatgatagaaaattgaggtaagttttttgaagtcatattttatatttattttttatttttcattaatttgtcttttgccagaattaaatgttatgatcattaaactacttctcttcttaggtaattttttcacttagtctttctacccctctacctttaaaaagtatactgaacaaagcagcaaaagatattctctttgaggaaaataccttattttctgtgaatagttttttaaaattaaaacataatgcataaacatagaaattcttttacattggcaagaactttttccttgataaaattatttttccatttgaaaaattattaggataataagtcaagataatgcttaaaaatgtaaaaattttctgcaaagaatgtaaaactgtcgtaagtgaagccaacaggtaagccaaaaaaccagagagaaaatttgcagttcattttagtcacaaaataagggatgcccttcatatatgcagaactcttacaaatcaatatgaaaatgaacaaaagccctggtaaaaaaatattcagagacagtttacagcaaaggacatgtggctcctgcacatatgataaaaagtgctaaaagccacacacacattcaagtgaaaatcatgatgagatacgattttccatgcacattt

SEQ ID NO: 74265 - DNA, 1071 bp, Homo sapiens
ccatctcctgacgtcgtgatccacccgcctcggcttcccaaggtgctgggattacaggcgtgagccaccgcgcccagccctgtgtgctgctttatcaagtgacagaggcaaacgacattcattggcataaaaaagaatgtgtgtgtttgtgcttgtgatatccacagaatatctttggaaggagccacaagaaactgggacccatggttgcctgtgagttggggagctggagggctgactccataacaagtgagaaggatacatctcttagatcatatctttttagtattttttgaattttgaaccctacatgtgtattacctattttttttaaaaaacatttcaaaattgtgcagtggaagggtctgtaagatggagcagtgttgaaataatggagccttaattacctttcaagaaacttctgcagtgacttggccatccggggaagcaatcagaaaagcagctggctcattaaatggagagtgctggtcccacaggtgtaagtacacaaaacgcaatcactgaaattctttggctagcacttccaactcggagacagttgctggagatcacttaataggctctggttacaggttgatctaatctgaattaagaaattggaaaaagcaaagaaagagcagtaacataggtcagagtaaggaagctgagtccgaacagttcctccacagcctcctgtttccccttctgtaggtgtatgaactacccagagagattactgtgaatgtagaatagttggagagatgtgtttcccaatagcaaaaggcagtgtaaaggtagttcactccaaaagttttgcttagggttccagagctcatagtaatttcactcgtcctaagacatcacaaggctattttagagaacagtatgtttttccttactcttggttcaagcaagaacatccaaaagtaacctgatgtaccaatgtgactccttatcccaagctaaagaatatcctttcaaggcaaattcatccaaatcagcttgacatctgatgggagggggttggataaacaaggttgtagagaaatcaagtctgaagagtaaccttgc

SEQ ID NO: 74266 - DNA, 1065 bp, Homo sapiens
tcaccatgttggccaggatagtcttgatttcttgaccttatgaaccaccacacccagcctctgttccatttttatatgaaaggacaaaggagcgggtggagatgaagggagagttggtgacttattcacctgtgatggctgctgtgggggaagaggtgaggtgagactgggaggagttgattatggcattagaaattggaagtacgtggaatgttgttgaggctgggagcaagaattgacttaaacacaacagaagggctaggctaaccaagcttccatttgaagtcgtggagcaggagttgatggggtatcaatccatgtggtcagatagtgcaaggcagctctgcatgtccaggaggccaggacacagggaggctaggcggagaggtgccagtgagggaggtggagataggcagatcctgaagggcctttaaactatgggtttcgattttattgtgacattattcattatctagccagcttttataggagcagtttataaagtatgttctagggaatactattgatcaacacgtttttcaaaagtctaaattgtgttcaaattggtgtcttgtgagaattaatagaatacatatttagatcactttcataaataaatacattaacatcatattttcagtaagctcatatttgatatctaatcaaattcttttagtcatgaatttgaatgagaggttttttgggttattgttactgtttgttttgtcttctgtgtttttatatttggaagcagaattagcttttggtctcttaagtgaccccttagtcacttaagatggtgttcatttccatcattgtgcttatcatgcacttgagttctcgtgtttatttctttgtccacttgtttaatttcagcctcttcacactaaaataggagctttgtaaaggcaaggacctagtcttgttcactgtcacacttcttgtacttctcaggaaatattcattgggggcagggtagaggagttggggaaggaaggaaggaaggaagagagagaacagtgaagcgggaaggaaggagttccaaaaactgcttccctagtggtc

SEQ ID NO: 74267 - DNA, 1094 bp, Homo sapiens
gtcagaggtctgtggaatggatctctgtcagactatcacagcagctgtgtgtttgcagattttgcttatgagaggcatgaactgaaaataggcgtaaacttgagtaattccctaaacccaaaatataagatagaaaccagtaactgaatctggtaacagggtagttgtttgtttcagaagcttatattaaccacaaaaacaaagtgaatcaactaacaagggttaccatgacccaaatagtaattgcattttgattcactttgcctacagtgcacaggtcaggtctgcttctcaataaatatgttgaaagaatgaaatatatccttcatagtaaaattatgttttttaaaaaatatgtcctactactaatattttttaaattatccctaaaccttcacatttcattagaatagctacttcaatttactctgaaaaaactgctttcttgtctttccagtttgtgtgtccagggtctgacgtgctccatcatcaaggcagcttttatcttctgtgtccgtgattctaattacatttcagggggttgtgatctctcccagaatcccgttcatgcattgtgtttaggatgaaatgcttgagggggtttggggctgtacactcatgggcacaggtttgcatatctaaaactttctttgctctaacatcctgatttgtataaaaatcctaaaagcaaatttcagacttctaattattctttgcctttaaggaaagacaaaattaatttagactgttcaagcttaaaattatcccaaagccacagatcacactgaaaacacatagtaatatagcccacaaattattttggtgtcttgtttccatattccatccaagagtctgtagaatctgtaggcttatatttctgtcttgtttcttagccataactgatcttttccatcttattcaccagactcagcactgcgtaactgtggcaatttctgaaactcagtggcaagggatataccaccattgaagagattaaaaataatcaacaaaggctttaaaaagtttaaaaaatgtatttggagcaataatagcaataggtcagaaaaagttttcacggaaagggccaatataca

SEQ ID NO: 74268 - DNA, 1057 bp, Homo sapiens
tttaaaagaagctaaagtagcttttactttgcaagcagttcttttccattgtatgaaaaattcttggaaagttttaaaaataagacaaaagggagccacagtggcccaggcctgtggtcctggcacataagcagccgaggctaggcgttcgaggttagcctgggcaatatagaaacctcttatctatataataaaaataagacaaaaaataaaatgtgccaacatatattagcaaggtttgtcagtactgattaatatttttacattctaatattctttgttagaattgtatttattttatgaagccccttttgaatctacagcagactacctgggaagtagttatagaggtcatcatcgtgtcttggtgattcactttgggaaattttgttgagtgaggctggtgaacctagaaagctgcttcttctgcctccccatttctgtccccaaggccctgctgtggttcaaaagcccatataaacctgcagtttccctttcttccacgatagggcgcgcacctacactgttagggtatggggccgactggctcctgccctgtgggaggtttgatccttgtccatttagaggcccttccttattcatggacactctactgagtgtctgttgcaaactccctggtataaaccccagacgtcatggatttaccacactaattattagagtggccattatttgcaataaaatagtgacccttgccactgtgttttcctaccaaataaacttactgacaagtatctgcattggctgggtcgaggtgtcatcaaatcagcctaggtttggatgtgctgttttgctagctgtagacccttgagcaattatgtaacttctctgagtgtcagatttgtcatctataaaatgtggttagtaacgtctccattgtaggatcgttcctaggattctgtgagtgtgatgtatattaaaatacctgattgatattagggcctcagtcatgttcctttctttgctttagactcatttctctgaaaaagtaatacgatgtttatagttggggaaaaaaacccaaagagcgttcata

SEQ ID NO: 74269 - DNA, 1127 bp, Homo sapiens
tccagcctagtttggaggtgttgagattaatacagtaatgattgtaatataaggcttactctgataagtacattgagatataaagtgttacagagattcagagcaaggaaagacccagccctatttagcagtgggcaaggggtggtatgggtgggtggtattggtaggggcaggggggatgaggcagaaaatcaagagcaaactgaacaaaatgaatagaataggtgtcaggtcatggaagatggatggtagaattctgttaggctgaattggctagtccaaatttaaaaaatagtaggactaaagtttaggatatagtgcctgtgcacatttgctgaatgtaagagaaagtgggaagaaaaattgaaatgatagttagattgtgaccattagtacagaagacccagaggaccatgtggagaacttaattttttttttttttttaattaagcaaccagaagccaagaaggattttgaactgagaaaacttgtaagacacagtaaagccacatttgtaactggtctatcgaagtgaatacaactgtagcaggttggagatggggctttgggaaggttttcttgtttgatgggattgtcagtagtaaaagaaatgggaaggaaaagagttcacattcagcttagaagttgagaacaaaatttggggagatagatgagagagatgtcaggtaatagttgggggttgggaagggccaaacaaacaacactcagttattggcatgtgtgttaggccgtttctcacactgctgtaaagacatacctgagactgagtaatttataagaaaagaggttttagttggcacatggttctgcaggctgtgtaggaagcatagcagcatctgcttctggggaggtctcagggagcttccaatcacggtggaaggccaaagaggagcaggtgcatcacatggtgagaaccacagtgagcgggggtggggatgtgccacacacttttaaatgaccagatttcactaaggagatggcccaagtcattcatgaggaatccacccccattgttgcaggactttttcttggtttagctaaggatggggttctttgtcccatggccatgaaaattcaggcccacagacaatttgaatggtgagtaa

SEQ ID NO: 74270 - DNA, 1044 bp, Homo sapiens
attatgtgtaattcctcttgatgtttttgtcattattacatatatatttgggagagaaataaaaggctgtttccaaggtgatggtgataaagagcaaacttataaaaatggttgcctccttttgtttgtataaaacaaccatctcatttccctctgggaggtcactagaggtatgatagctctgttttgaaataatattttagtaaataggaaagcagggtaaagaaagcctcccctttttgtgttatgttaaggtttaaaactgtgttacagtttatactaaaacattaagaatcaattattataagagcattaaattgtttgagttttgtcatgctttgcctagaaatcagcactgaagcgagtgacttagcaacgttattagatctattaaataattggaaatttatgtgcttattgtcagcatcttggctttttagaattttaaagtatgtttgtgcttcacatctctagttgcagtttatgtagaatttagtgaactataataacgttggatggtggtaatgtcacagtgtaattaactgcatagcatacaaagttctttgttaatggggaatgggatatacatcatctatttgatatataagttaataatcatactttttgttagcagtagttaaatgataagaactaaaaagaagcaataaacatctccatctctaaaacagtcttgcaaatatgcagtgagcatctactgtatacaagcactatatcttcatatttagattacatttgctattttgcttttcacatgtgaacttaagtgaaatactctaaggagtattgcaaggtaattgcccctataaattacataatttatatggctctttaacttttttagatgtaaaatgggaggaggagagcgttgagttggagtgtattatttctaggattctttctagcccacaagtcgaatcagaaaacagtggctcatgcctgtaatctcagcactttggaaggctcaggtgagaggattgcttgaggccaggagatcgagaccagcctgggcacatagtgagacca

SEQ ID NO: 74271 - DNA, 1034 bp, Homo sapiens
cagtctgcctgagagatgcagtggccggggtttggtctaagatgttattggtggagacggagagaatttgcggtatttgagagccactccagcctccattatttctaattctatgtcctctacccttctctgtcatctctccactgcctcccagccccttccactgtgccccctgtattgcccactttcagaccaacagccttttgtatcagccttttctggaatgttccactaattacttaccctaactaaaaccttagggtagttttgttctcataccacacgcacctccaagacaggaggtgggattactttcctccttgtgtcattcaggacgactgctccgctctttcttgtaagccctttcttttttgaaatcacatcatcagtcttcactacctcatcttcctcttggcaaccttcagctccccttccctgtatccctctccctgcacgtgaagaccagcagccagttcctggtctgtctgtctgtctccatacaatcattattccctgtattttctctccatccacagacaccactcctgtttttacatcctttatccaatccctggcctggcattatagtcactcactcatgaatacccttaactgctcactccttcattcttccatcagtctcaaacttagaggaactctgcctccaccttccctatgcctgcgcatgagcaccttaccatggctggtgaacgtcccataccaagggcacagttaacatgcgtctgctggtcagggccagctgagcatcctacactgggcagaagggttgctgtttctctgataacttctcctcccttatcctcagtgattccttcctgtcttcaccactgtattcacatgtcccacgctcctgctgcagctgacactacttctgaatgtccctcttctctataccaccagggctctagatctgatcaccatgacttttagttttatttcctctaattcattgtccaagctatagcctgcatgatctttcaaaaatggacagtgtggctcacacctgtaatcgc

SEQ ID NO: 74272 - DNA, 1093 bp, Homo sapiens
gaaattacgtagtgttaggctagtaaaacttgtgttattcaggttgactttccacagctcactgatgtcctttaaaaatttagtaatcttaacttattaatctttcttttcgcctcaatataaaatgtcctgccttgaggagatgccttggaacccagagtcgatagaacattttttgtaacctgtgacttccattttaaagtagaaagttatgaaaagagattctgccaaaattcttcaccttacctcatatttgaggtttagcgttttaggaaaaaaaaaaaaatcatggaacatgtggctatcacaggctaataaaaatctagccccacccatagcattaaatgctcattctttgttcttttttatgaaaatcatcttaacttgattttacacaggaaactggttttaaaaaccttgagaaatcaggataatcacagattaagactacttactccatacctgattcttatctacctctatgagagaccgggatagtggacatcagaatccacaaaaactatgtgatgactgaactgatttctaagtcagtttcaattgatatattatctctatggttccaagtaaccttgaactcttggtaataagccctatattttgactttggttttgtgacttgtcccagtatattttttctcatttttttaattttctaactcctgtcttttctcatattttataacttaactcatattatataactttatataatattatatcagtataaattatgagttgaaatagtttaagactcttgaaaaaaatatcactacataatttcacattacttagatccatgtattattatgtctttaaaaactgtggtgtctgggcacggtggctcacgcctgtaatcccagcactttgggaggccaaggcaggcggatcacctgaggtgaagcgttccagaccagcctggccaaagacagtgaaaccctgtctccactacaaatacaaaaattagccgggtgtggtggcgggcgcctgtattcctagctacttgggaggccagggcaggagaatcacttgaatctgggaagcagaggttgcagtgagccaggatcacgccatt

SEQ ID NO: 74273 - DNA, 1853 bp, Homo sapiens
gttactttcatcatccttttcagtgagtgcgcagatagttgtcttgatggcacttttacatgtagaatttatagctagattaatagggatacatatgtagaataatcaaaaatattttccctagtgtagggatcatgttcggtaaatccctttttaatcctgtaagtactttgctactaaaagaattaatgtgtctgaaataagtgaccccttaaagagagatcccttgactcttaggaagaggtcgttgcatcaagttaagtactctctaattggaaggaaataaactcagagaggtaaatggtgtactaggaaaaacagtcgtttacctaaaaaaaaaaaaaaggtaaggagagtttttccttgtgaaaggggatggattttatttactttctgtaggcattagcattatatcgactctttccaaaaatgtaatgtggcccctatgaagataataacaattgtagtaataataaataacacacagtgcttactgtgttatcaggtgtagttttaagcatagtacagatatgaacttctttgatcttcacaattgtatgaagtaggtgctatttatagttttataaatgagacaactgaggctcagagaaaagtaagtgacttactcaaggtcaccagctagtaagaggtaaagccatgattttttttttttctttttaaatgagacaggatctcgctctgtcacctaggctagagtgcaatggcacaatctgggttcaccgcagctttgacctcccaggctccagcgatcctcccacctgagccccccaggtagctgggactacaggtgtgcctgccaccacacccagctaattttgtttattttgtagagatgaggcctcactatgttgcccaggctggtttggaactcctgggctcaagcaaccctgcctcctccccgaccccccctaccccccacccccacccccaccccccccacaccctcagcctagatccatgatttaaatccgagcagtcttgctgtaggtaggatccttgccatcaagcattgcaggatgctgaggcaagctatgtaacttcctgggcatcacaaagctaggaagaagcagagcaaaaacttggtccgtggcagtcatgtgtgctttcccccactatgctatagtactttgcgatttttcctatcacattcttcttcaaattataattacctgtcattcatgctttaaaccagagatgcttaaactttaatatgcttcagaatcaactagaagccttgtggaaactcaagttgttggacccacccatagcttactctgatttagcaggtctgggctaggtctgcatttctggcaagcccccaggtaatgctgctggtctgggccacatttggacaccctctgctttaaacctttgtagtcagagaatgagctgaggagtggtgtgccccagcaaggtgggtaggaaccgagtcacatgagccttattaaggacataggagaggctctactttatccctaggtcagtagggacccgtggaagagctttcagtaaggaagtgatgattgaacagaattgtagcttacgaggtttttttggtttttggctgctttgtggagagtggcttgaagaagcatgaggtgaagattggaggcaaagagagaagtcagcagatgttagggattcggaggtaagaagtctcagcagctgtggggatgagggcactgtgtgcagaagggatctgcaagcgtgacaggagaaagaactggtggctttacagtcatctgctgatttctcttctgaccactgttagcatgggcaaacctccaaattctattcctgactcccccttttctctctctgcttgcttcctg

SEQ ID NO: 74274 - DNA, 1043 bp, Homo sapiens
aaataaaaaaaaaaaaaaaagaaaaaaggaaaaagaaaagattgatgtaaagaaaaacagaaataaaatttcactcagaactggaatttatttcaatcttccctagcagtaagatatacttttcctagagcctaggattaagataattcagttttagaatccacaaaaaacaaagtattcaatgcctatcatgagtctaatgcatgccaaaacaaatatgaactgaccacttgatatgctaatagcaaaattcttcataaaaattaagacttgtatttgatgaaacatatccacgcttattaaaatattttctgcaaatatttcatcccttttcctattttaaatggcactccaaagccagataaaaatgttctccttttcttattttgatagtctgctccaatgtttacataatatattcctttttatttctttaaaaaatactttagaagattttgttaacaaaatgacttcaacatttgttagaatcaaattcatacaaaattagcaaagttattcacacaaaggcaaaaacatttgcaaaacaataaatcaaatgttccaaaaataccttcctaggataataaaaccagaggtaatttcacctttaaaaataatgtcactgaacagtaagaggaagaaatagtaatagttttctttttcccctcactgatttccaacttggtaatatgttttaaaggccattactgtgggatttgtcttatcggtctgcagtgcagctgtttgtattattttccacatttactacaatcagtgtttatactactcaaaattctcttcctcaggcagcaacgaaaatataattttctagttaacagaagaggagaaaagcttgtatgtgtgggggtgtgggaaggggaagttcagaaagacattttcccattcggttaaattttaaaagcaactccaaattataaaacccagaaaactgctaagcttctaggactacattacaaaagcaggtagccttgcatcaaaattaatactttataccatagctgtaaatacatcccagctgttaa

SEQ ID NO: 74275 - DNA, 1020 bp, Homo sapiens
gcgaagaaaataaactttacccgtcctgatactggatttgctttaggaacatgtttagcgaatagctgtttggaagtgtgtaaggggtactttttctttatcttcctcatattggatcatgaaccaggtctaccatggacagccattcatggaatttagggcaaagtctagtttgtgtgattgcattgtgttcatttgggttctttttaccatttgagtagatgtactgttactgcttaccaaagacacattttgggtatacagtgcgtgtgcagctcaataccttattctagaagctgctgctcttcattttgtcttcagttttgtaaaagccccgtaatcctgctggtgagacatattagagtgtgataagcatcacttcacagtgacatctgtgaagttcttctgttctttttgcagctactatttaattgtttggctatttaatattttgtggcgcttccccccttgtgcaaggaagtatatggcaggatgcctgacaagacacgtaggaagccacacagtagtcagcatctcaagtgtgtgttcctgagaaatagccttcccaagccggcatatgttttgtatggtgtaaattctcaagattgtgaggggaacagctaaggtaattcctaaggtatccgtgttaattacctaaggtaattaccaagcatcagggaacatagcaacactgcaaagtcaaagtaccctcgtttgaaatagaatctctacctgatttaggggttagggaaagaattagtggataggttctaacaattacccttctgaggtcacgagtttgagaccagcctggccaacatggtgaaaccccatctctactaaaaatacaaaaattagctgggtgtggtggtttgtgcctgtagttccagctacttgggaggctgaggcaggagaattgcatgaacccaggaggcgggggttgcagtgagctgagattgcgccactgcactccagcctgggcgatagagggacagtccgtctcaaaaaacaaaacaaaac

SEQ ID NO: 74276 - DNA, 1139 bp, Homo sapiens
cttagtttgcatacccatggaagtttgtgatccatttactcattcatttatccaagtatttgataggtacatattttgtggtggacaacattccaggtattgtggaaatggaccaatttcaataggacagaaatctgaatcacaaataagcatccagtggcaaccagctggtgtacacactgcacctaaatacaaattcataggtatcaaaatcaccttcatgtgtcacacagtcacctttcttagttcctcatagcaaaactgggggactctgaggtcagtccccagagtacctggttgaggggtggggcagggcagttgaataagggagtagaatgaatgaaaactttagactctgaagctcgtcactttattctgccatattttagttttgtggtattaaatctctacagaaattaattatcttgcttcctttcttgaattccttttcaaatgttatagttactacttcagtaattctatcccatctgtttatatacaaaaggtaatttaccgggtaatgaccgagggcacctgctttaaagtcaagtgcatactaatttactggctatttgcttggcctcatttacgctctctcggcacagtttctgggtctgtaaaatgagagtgattgtaccatctacctcattggcgacagtgagaattaaatgagttggtgcatgcataacacttagtacagttcctggcacaatgttaccactcaataactagcagtgtggaaatatttcacacctaagagtaaagttttatttacctttaggagacaggatcctgggaactttctggttgccatagctgcttcctcaaggcaactaagttagatgtggagtttctaattcctgttggaaattcagtgaataagaaaatactactgaaagttatactattttctgcatgttaatgatttgatattatacagctttaagttctcagtgctcattcgggtagtgcaggtgagagacggcggctttaggggcaaggcagtgaccctgtggatgatgggaagagagttgttaagaaataattgtttaaatcatccagagagtactgtagcaaggattgttcctaaaaagaactgtggtaatccttgttgaatagcaagtttggacagtatacgg

SEQ ID NO: 74277 - DNA, 1063 bp, Homo sapiens
cttgatcttgctgtctcaagagcagcggagtcataagaaaatgcacatttaagtggccccatgcagttcaaatccatgttgctcaaggctcaactgtacaccgaactgaaaaatgattccatttttagtaggaaatggcctactctaagtcctactgcttccctttgcacttgatggcaagggtctttaactgtgtcagtggagctggtttggctccactgatagagactccctgaccatctgataggccacttttgttagaggagaaggtacccccttgcctacctgttcttttcttacttcatgggtcttgattcctgactcaggagcacccattacagaaaagccctgggactagatctaattttatttaatgaaaaacctatggagcatttactcttgcttctaataaattaacaagtcagggctttcttctgaataggagggtctcttgactctttgatatttgacttttgaaccagactagatgaggcagagcttcagcacatattttaccagtgtcttcagcaaatgcctttctctttgcaaagctccatattactaccaaaaattaacccaactaaattgtaatttctactcacccacatttattgagtactgtgtttccttgaaagatctcaaacaaggcaccttcttgcaagatcttcaccaccagaccttcatgatagtcacctcctcattaggctgagacgcatacacagtgattacgttcagacacagggactcctgtgtcttaagaccttgtgtgacccttgtaattaaagcattacactttgcaaaggctgacagtggtataggggctgtctgaaactattcagccatagcctggtctctgctttctttttacaaatgggaggttggctaaggcagacacagggatggctaagagggataaaggacgtgacttccatagaaccttttgttcctagaggaacctctccatgaaacacacagtgaaactagattaaaccaaaaaacgccctcagctccagcagatcctgagctacaaagcacctcttccctaccgagccttctcacccat

SEQ ID NO: 74278 - DNA, 1035 bp, Homo sapiens
ttggcgtactccatatccctgaaggttaacaagagataaatttggcctagactggtcttttcctgaattcatcacttaaaaaaggaaaaaaagaatggggaggaaaagccacgttttacttttataatttttattccatcattaaaagtacaacttgctttatgatctgaagaaataccatctaagtctttctattaggaacaaaagtgagcctttcagggaaaaaaaaaaaaggagctgggcttaatctgcattagccctttgatgtattcccagattttaaaaagcttcccactgttctcagccacgttgaaacagacccagccatgtgtccggcgctgtccttttctcctctcagcacacacttagccggagacaccttttggccaatgggccaggattcttccattgcatcttcagcatgtgaccgtttgtgctggctcattgggagttctgctgctcagtactccttccccaggcaaagactcttaagttaataattggttcagaagaataaactataccgccctcttggtcttcttttggacatttctttaagatgaggctcttactggtatatctggggtactttattgagaaatagaaagtgctagctgaaataaggcgtatcagtctagagttaggaagtgagaaatgcaatcggtaaattttgcttttaaataaaaatggaagccccattttaattgttgccatttctagtcattttatcatttttaacagcctggttttctattttagagaagttgctgaccaatatttagagagcacctccctaatctgcacatcctcttgtgtgtgatggtgaagtgatgggttggaatcgtttttaatgctgtttccattgatgggacattattaccagaaggagtgctttgtgccagctggtttcatggatggaggaaaacaatctgggtttcagtttcacaaatagaaaaacaaaacctgagaggaaaaggaagtaattcgttagcagtggccactgtgcagagtaggataacctgccttcaaagattt

SEQ ID NO: 74279 - DNA, 1089 bp, Homo sapiens
ttctctgcctggaattgaaataagtgtttgtcctaattcatatgctatctgatgtgaagtgggcctgctttgtaccgcactacaccattaatctaattatagatagctgcaaatgaagtgctgtctgagctgggagattgaagaaaatagccttttgtcatttagcatgactctgtgaagcaagatcacactttacagggcaatactacaaaatggaaatctcaataatattgctgcctgttgcatcttttctaattacaacaatattgtaaacacaactgggcgctgatataaatagagctgtagatatgctgtcatgtgggttgtaggagaaagtcctccgagtgctgttggattaaatgatgcatcctgattgacagctaccttgagactgcactgatggagttgtcacagcattatgctaacaggctgctccagcgactgcagctgtaggaggctgtggttcgccctgcgccttagctgctgcctgtccatgtccgctcctttgcctgggctgcacctccaaaggaaggacggccgtaggcttcaattctgtgtattgtcactgttgtgtcttggagatttgtggtggtggtggtgtagctcagatatcaggcgattgggccctgtgcagaagtagagggaaattattttgtatggctcctaaccttgctctgcttttcctcaagtgataattgtgtaccctacaaagaatttaggagagtagaacgtggttgaatttcaagtctcattccactgaactgttttaactcatatctagtttttctctgcttttcagccacgccagtgtttttaaagatgcatcatttttgcatttcgcgctttccatcactttaaaaacactgacactgtttctccagctctgagttaggacagtagacctttaggggaatatttgagtgttgctctcactgccacgctgcggaaatgaagacagagcttaatgttggagacctttggggccagaaggtgtaaaaccttgactaggaagagagcctaatctttgaagaagtgtctgcctccttacttagtgaggggtgcatggacagtatttggccagtgcttcaa

SEQ ID NO: 74280 - DNA, 1040 bp, Homo sapiens
acgctgcaccctgcttgggccccatcccggcacgcgccccgtgcagcacagcacaggccagctgagaggctgttttaagaaggcgtgtttgtgtggtacactcacgggctcaggacaacatcaaaggtaatcttaaaaagagaatctctctctgtcttctctttttatattcagaaaggtcatttctaaaccaactatttgcaccaaggcctctctggaggagtttaccccgttgttattttttacttgctattacaataagtcacttatcccccaaacagatttaagaacaataaacaaatacaaaaggaaaaggaacatctcatcagtaacaaagactgcatctaaaggcattgagtttgtgattcttttacatctctttccaagcaaagcaggagtcctacagagaaaggaatctgaaagatgaaaattataaaaatagtaaaaggatccagtgttcgtcagaatcttgtaatttctggggagaaatgaagctaaatacagtcttagcgcttcgttcatatgcaggctgatctgtgatataactaaacttagtttttggagtatatccactgtggggaaatgtggtaaatcatattctcagcgaatgaagatacttttcctgaatttaggcttcatattttgaagtcgaattctgcaaaacaagaaaaaaatagatctgtgtgctacactgaaaactgaacaaggcacgtcgtaagtcagtcacacagaaggcgcagctcagggcgataccaactagaaaagtaacttttttgttgactctgatgcctctagtgatgttggattttttcccccattgcagacagcacagataggaaaactgtgcaatttggtccaattatagtcctctctgtccctccacaccttcccccattgatttaatgaaggacttggaggtacaattcactgataaatagtccctctgcccagaatgtttattagactgacagcagcgtgcactctcctcgctttttccctcaccacttatgactcagatgaattttaataggagcaaaaag

SEQ ID NO: 74281 - DNA, 1056 bp, Homo sapiens
gtgtgcagcaattgagaaccatttgaatttaaggctcttactgtaatttgaatttaaaagctaaaaattgatttagaatgaatgctacttttgaggaaaatttcatttaaactcatttatggtttggttttgtttttcccttaagtacaaggtgaatatcttaaccagacttgccgcagaattgaacaaatttatgctggaaaaagtgactgaggacacaagcagtgttctgcgttccccgatgcccggagtggtggtggccgtctctgtcaagcctggagacgcggtaagggctgtgtgtgtctctctgcaggacatgctggtctccaacttccccttccaaagcgacggctaacggcacagcacgattcggctctttgcagttcttacttaaccgacgccccctaaacagcaaaatcgattgcgtgtgttgtcgacctgtttcacgtttgcattacgttggtgccaggaccctcagcgcttcccctcccaaatgatctgggagtggagcagaaagaaggccagatgcattccatcattttgcaaatgcagtgttttgggaagtactttccttaaaagtgctgcttactctctagtatgctgtgctcaaagcatccattgaagtcatgccagggaataatactccgatgaggaactttttgcatgattcctggaacaaatgtctaattgggaagaagagttgaggaaaggttaattctgcaatctgtacagtaccagagcacttccattacttggtaaataaaatgtagcatcacagtttgaagtttttcatcttgatcttgtgacattaaagcacaaatcaaagctatattatttcctcgagataacttacatggatgaattgataggatgcacacattttcttagaacatggatagaaatctctactgatgagcagcaaaagtgaaaagaaaacaatttaggaggcaaccagatttccaggtacacttaaatacttgcatttttattcatgtgcaggaaaatagcatccggacatgactgtctctcatggatgaggtggtgattccgttttgt

SEQ ID NO: 74282 - DNA, 1037 bp, Homo sapiens
ccttgcttttctacattcaattattaaccaggaaatggaacgtacaaaggccaaaccctttcggtatgtgggaaagtcagatcaggagccagcagctgttaaagaaaccagaaggctgcgctgatctggccttgggagcgccccgtttactgcctctgagcaacctccttgagggccgtgtgaggggccagggctgcagtctcaccctcttgccctccaggcttgaggcaggagtggtctccctcatccctgcccgccctccctccactccggtttggattcaggtgttagaaaaggatttaaggaaaacacttacttgaaacacacacacacacacacacacacacacacacacacacacacacgattttataattaaagccacacaattaggagtggaaagctcaggctggcagtatacagactagatagatgccttccagaaaaaaaacttaagaaaaatgaaaaaaacaaaacaaaacccttatattgtttacgaacctacatatctagtcactagaagattccactgacagctctgataatgtcacgtgcaagtgaacgattcttaatgtcaaggccacgagactatcctcttacgaccctaactctggagaaggaagatgtcctcccctgaattttacacacattacacacacacacacacacacacacgtaatttttcttatggcctctcccaaatccttaacacgtgggcattagacagtcttaaagagggctttcttccaggagtatcaatgctttcacagcaaacaacaattcacagccacgtagcctcttttatgcctttctgaaaaagtggacagttctatttctgtatcaccaggtaaagcagctgttaagtcggttttctaacttcgcatattagtttcagggctggtcattcaaacaactaaaactgatcatgttttcttaatattcacatttattgcaaatacttttctagaagccaatgccaactacctgattttttcctcaatgttaagcagatattttatctgtactattgagaaatc

SEQ ID NO: 74283 - DNA, 1138 bp, Homo sapiens
ccctggcgccacgaggaccactgtcccatcctctgcaagacacagcgagtacccacaacaaggcacaaggcagcttccggaaaaccctccagacacaggaatgacttccagagctacatgcattccatgctaggagactgggagcgcccacgggcctttgctcagactgcgttcagaacttgcctttcatcctgaggggcagccaggctgagctgggttaagcccactggcgttaagcgtgaggcttccctgcaggagtgagctgcagctgaaaaccatgctgcgcactcacttcgctctgccccgatgggtcagcgtcctgagccggccaggtttttctttggcctcccagtctttgaaacgggcaagtccaggttcctagggcaatggctatgtggtgtgggtgggtgtcctggcatggggctcctggcccctcacaccactgtggccatattcgtccaatgcctcagaagcgcctagagaatgttctttcctgaaatccccagatgatctccaagtccccctctggcccccccgtgtggcgcaagctgtcttgctggcactctggagcgcctgagccgatgtactcttttcctctgctgttcaggtggtgggctgcttcttcctggcatagaaatataggaagagagacgatgccaaggctttggcgctggcacggaggagagacaccgcgctgaggagctgggcctggaagcgctgcccgcgctgccctttttgattcattttcacgtggcatctgcattccagggagagcgaagaatcagcctcgagggctgtttgcagggggatgggaggggcagcgcagagacaatgcagaggcccccatcaggggtgtcagaacagtcactccctccagttggcattttacagccttttttctctcttcaaaggcaggcaaagaccagggaatccaggagcaggtccagttcactgcagcacacctgccagccagctccacacaggggaccctggaagcctggccgtgtcctcttagaagctggactcactgcgactgactctgacctaggactgagcactcaggcaacaggaccggggactctctgggaagtggatctgagactcaacagaacatagtagaaatgccatccaaaaatga

SEQ ID NO: 74284 - DNA, 1065 bp, Homo sapiens
accgggccccgggcgcagaggagccgccagcgcccaccgcggtgcagtgcttcgtgtacagcagggccaccttcccgccggagtgggcccagctcccgcaccatgacagctacgactccgaggggccgcacgggctgcgctacaacccccgggagaacagataagggggacgggcagggtgggcctaggtttgagagccctggggctccaagatgcgcccagcccatgctgggtgaaggcggaagccgaacagggccctttccaatgaatctgccggaaaggaaccaatctttcagtggcagctgattttacaaataatgttgagatacgaatagcaaggtgcttccctcccatctttctacctggtaagaaaaatttaggattttaactcccctaaatgacatttagagaactcgtgttatgcctaattcttcttcctcctcgtgttgtttctgctgttggctctgctttgagctcaagataataataaatatttaggatcagtgtaaagacttggtgttgccgctagattttagcagccctactatactgattctggcctgtaacccctgagaaagccgattttacacggctgggtagaatttgtagaaaagatccacagggcaagcatgctgtatatcagagtgcgtatagcaccattcttcctaattttcagatcaagcttcacagcaaatattaaagattatttaaatttgaagtcgatgttttgggaaatcagatataaaagtgttggtactgtgtttgacccccacgttttttggtatacttatttggtagaaggttctttacattctgatctagcaaaataatgaacacccacttgctggtagacacagctgagcgcccggacttcaagtggaagtttatctgagcccagatctcagtagccagaccccgtccctgccccctgaagggagagcatttgggggtgagtcctttcaaagaagagccaatgcattagtaatttgttcttcaggcctgacagaagcttagcttccaaatacaaacagcacttaaaataattttagcaaggcacgaagtacc

SEQ ID NO: 74285 - DNA, 1056 bp, Homo sapiens
gtgtgttgttcaaaacacaatcagaaaggtaatgaagtttttcttatgacagaagccagaaatgcaggctattttcttttctattgcataagtagtgttctcaaactaactttatgttatgaaggatgctattgaactcaatacataaaatgtagaaaattttagttggtcattctagcaggctggattatttcctagaaatgaaggttaacttttattgcctggttttattttacagaaataagctatcatcttctgcagaagacaattactgaactgattttccagagttggaattaaccttctgtggcctaatcaccttcatttctacgtaatatcaccctcccaagcatttttcttggttttggaaaatcattaaggccacaaccactactcgatatgcctgatgccctctcccacttataatgtgttcatttttatttttgagaagactatagctagtagatatttctagaagatgttgataaaggatggagttaagtggagacctgaggagggagcagggataaggaagggccaaggggaagagggaattcacattcatcaggtgctcatgcctgcacagtcggcagtcagtggagggtaactctttggggtaaataggaggaaatggaagctcaagaacttgaaatcacttgcccaaagtcccacaggtgctcagggatggaggcaggaactcaagtcaggcctgttatggcacagtggattgtttgatacttgccctgcactctgtccctaaatgcccatctacagaattctgaggttgcctttcctgatgctggccctgcaagggctgggctcacactgtgtctgatgcagcagggctgacttgggggcaattacttcacattaaggtagagaccaagagaaatacttgttttaatctggaaaaactcagatggcttgcctacagccgtttcttaccattactcattaaaccaagcccttacattttatctgagaccctgactctaaccctgtgccatggaaaaacaaacaaacaaacaaaaaactagcatggtgagagggggcagg

SEQ ID NO: 74286 - DNA, 1003 bp, Homo sapiens
taaattagtttaagaagagttaaacactagccctttccttgttcggttcacctggtctgcgtatgcatgcttttaaacgtgtaccaggcatatgaagtggttgtgatttgtaaactatcatcataaactcttaaatcctgccttttacactcttgccaccaggtggctaagaaaaaagaaatcaagaaaaaaatctaacagttatgcaaaggactcgtaatcactttcaagttctgcttcagtggtgaaatatgaaactatagacggactgcgtttcaagaaggagaactgctgaataagtgacaggcatttcaggcagcgcccgaccagatggacagctcatgagtcttcttattttctcaaatattggcaatgggaaaccagattttgctgatctaaagcttttggagactctctgagcctgttccacctccatgctgtcccctggatgccgctattgtccggaccagttagctttgggacagaggttcagctttggcctcttggatttccagagtggaggatgcctgaatcctgaccacagcagcaggccgcccttatccttaacacatcagcatcagggaacgacatctgcagagatgttcagtgccctcagaattggctctaggaacccaaagtaaaattctccaaactgatgttaaggtctcatgcatgtcattctttgattctgtgtattaacagtaagatgctatgaggaaatccgtgcacgagggatgacagcgtggcaggctggaacacgctttttagatttactttcgtggactggatctgttaagagtaaggccagcgtcctagggcacaaaccgtgctctccccaacgtttccacagcgtcatgaaggacgatcttgtcccatgaaacaaaccctacccgtcttcttgctgggggggtcagcggctgctctgcttctcctgtgcacccggggttgctcttcagttctctaacttagtaagttggactggcagcctcttggttgtacacca

SEQ ID NO: 74287 - DNA, 1049 bp, Homo sapiens
actgtgaactttgtaaggaaatatttatttgtatttttatgttttgaatagggcaaataatcgaatgaggaatggaagttttaacatagtatatctatatgcttttccccataggaagaaattgactcttgcagtttttggatgctctgacttgtgcaatttcaatacacaggagattatgtaatgtaatattttacataagcggttactatcaattgaaagttcaagccatgctttaggcaagagcaggcagcctcacatctttatttttgttacatccaaggtgaagagggcaacacatctgtgtaagctgctttttagtgtgtttatctgaaggccgttttccattttgcttaatgtaactacagacattatccagaaaatgcaaaattttctatcaaatggagccacattcggggaattcgtggtatttttaagaattgagttgttcctgctgttttttatttgatccaaacaatgttttgttttgttcttctctgtatgctgttgacctaatgatttatgcaatctctgtaatttcttatgcagtaaaattactacacaaactagcatgaaaatgtcatattgccttcttaatcaattattttcaagtagtgaactttgtatcctcctttaccttaaaatgaaatcaaactgaccaaatcatcatttatgtggcttctgtgtgacttggggaccatttcatagaatggcactacagtgttttccaagttcagagaacagagcgagtagatccacactgagaggaatgtgattctctggactcacgtgttgggggcaggtctgtgtagtgtttcagtcagtgattgtaacttctggtgtttgaaatgtatcaagaaataaagtgctgtgtttaaaatatttctttttttttttttgagatggagtcttgctctgtctcccaggctggagtgcagtggcaccatctcagctcactgcaacctccgcctcccaggttcaagcgatcctcctgcctcagcctcccgagtagctgggattacaggcgtgcaccaacatgcccggctaat

SEQ ID NO: 74288 - DNA, 1128 bp, Homo sapiens
tttactgtaactatcattttagggtcagctcttgatatcagaggccttttttctaaatggacccaaacaagctattacttccccaaatggtgtaaggaaatatttaaaataaacagctgaacttctgcatagtcagggctctgggcagtgcctagcatccatcacccccacctcccatacccagccttgcttcctggaaatttcatggcagcactaagacattgcatgtactcttctttttgcttctttatgtaataatgttactataggcagatgtatcttatctagtgctatgaagagccctaggagtaactggcagtaaatggataatcatcagggagtgtgattacaataaatagagttttcagtacaaacaatattgtttcatacaattgacttttgaaaactgtttgcataggatctgtaatatttctttgtccaagagggtaggaatacggcacgttactcagaagcattcccagtgaaatttatctcctgctatttcagctgtgctttatcatcgttggggacatctagacttggccaagaaacactatgaaatctccttgcagcttgaccccacggcatcaggaactaaggagaattacggtctgctgagaagaaagctagaactaatgcaaaagaaagctgtctgatcctgtttccttcatgttttgagtttgagtgtgtgtgtgcatgaggcatatcattaatagtatgtggttacatttaaccatttaaaagtcttagacatgttattttactgatttttttctatgaaaacaaagacatgcaaaaagattatagcaccagcaatatactcttgaatgcgtgatatgatttttcattgaaattgtattttttcagacaactcaaatgtaattctaaaattccaaaaatgtcttttttaattaaacagaaaaagagaaaaaattatcttgagcaacttttagtagaattgagcttacatttgggatctgagccttgtcgtgtatggactagcactattaaacttcaattatgaccaagaaaggatacactggcccctacaatttgtataaatattgaacatgtctatatattagcatttttatttaatgacaaagcaaattaagtttttttatctct

SEQ ID NO: 74289 - DNA, 1104 bp, Homo sapiens
tggaagaaatgcaaggctgtgcaagaatcaattcacacccatcaggggcatttggtgatggtcatgtgcagtactgtgacaatgtagttgacaggtggccattccttcctcttttctgcacattctttccagatggatggggctgcttctgggcggcccagagtgttgtaggttcttgggggagaggaaatgggcctcaactgctaccccaagagctctggaaatggcattggcatgggtatgctccacggctcagccttctcctgttccctgggcctcctgtcgtcatcacgcaccctgacctgggcgacttgcataacattacagaagtccaaccactgcagggaggcaggtggtggcactcacgaacatgttcatcccctctctgcggccaccactccctcccactgctccttgtcagcctctctttggcagagcgtggccccgctgggccttccgagtgtttctggaggaatgcattgatacaaaaggaggaggttaaaagtttgaaaaccgtaggtgataaaactgggaactgcttttgcttcatgtacaataaatatcttcctttttatgtttctcattttttaggaatctgaagctttattcctcaaggcaattaaagcaaatccaaatgctgcaagttaccatggtaatttgggtaagaaaaatgttcaacttgaatcgtgttgaaattttgttactttaatgaagtgggtgcatgtctataaaattaatgttgggagagtagttttttcaaagctagcctggctttaaaatgtggttctgttattgcattaaaaagatagcaaagtgatagccacacttacaaatctcaattgcatgaccagaacagccccaaagtttgcccactctattaccttctcatgatgaaactcagattgtccttctttgtgttaagctgagaagggtgagattggatcaagagaatgaggctatggttgcgaagagttctcctagtaaattaatcgtaggtactttggaagcttgccattgaacttacctccttttccttccttcttacagagtagaccttccccttccagcctggtcttctgctttatatcctcttatgccttggct

SEQ ID NO: 74290 - DNA, 1048 bp, Homo sapiens
tcactatgcattttttaaatttctagattttactccagaaatagctttttgaagagggcttagttttagtttttatgaatctacttgtgtagcaggggaaggaggtgaggtttacaggtttcccttctaatgacctttccagccatctgtcagcctgggacaggtcccaagtctcagttctcctccagtgacccagctacagcgagtcttcttgaagacttggcttatataatcgttgtattgatttttctgtcatcccacagtctgtaaactgctggaatttctattaaggggataaaacccagagttcgtttggcttccagttcatgttgttcttcctcccccacccccaagtaaagtagaaaatactctgtaaagcagaatggagaaatcagcttcctctttctctacacattttgcattttaattatcaaggccaaagcactgggcctaacttaaggaaacagaaggtgaaatctgaaacacagaactcacgatgagatcttcaggagctaccaagttgggggacatgatgtgacttcctgagccatggcatcagccaccaagcaagcattccatgtatttttttagttaagggtttgaattttaagcaactgtttaggttttcctcttctaatgcaaaaatgataccggttgctaatggtcagctgcatccctggcactgcttgtttcaggatgtagtgaggggacgtgtttcctcgcagagcactgggcaggatgtcccagagaagaggggatgtggtgagtcgcagggctgggtgaacagaccctccagcccagctatcttgatggcagggcaggtgtctgctccctgacaactcactttttacccaagcacttgctgttttatttatcatgcacttggtaaatctcctcagagagcctggaggcttcttgaggttggagccgagtctttggtcccagttttgtatctccattgctgtcgggcagttacgaagcacccagttaagtagttgtaaaatgatcaaatgcatctctcatttggccctgaaacgttcaggcttcc

SEQ ID NO: 74291 - DNA, 1032 bp, Homo sapiens
ctctcctagtagctgcccgtcactgcagttccttgggatttggaaaatagaggatttataataaatgctccttctgtaagaatgatgtccaaagggaggaacggagaatataaagtaccagcttttatcatgtgctgtagtccttgggattcattacactttcacttggaagatcatctgtagcattgaacacattgagaccttgtactgcttttggtttatattgtttactaattacactgccgtgaaatggtcttcctgtattccattccgccaactgttcctgcttatttaaggcttttgctttcccttgtggtttaattatccagctttttcctctttgacagcttaaaagcattaagagcttaatctttaacaactcaaccaacccatttatatactggcaaataagaacttaatagcttaagagggttttttgtttgtttgtttgtttgtttgttttaagaaatcactctctagtaacaggagacagcgatttgttttgatttctagaccccaatatggagagaatataaggcagttctcttgtggaataggaagtcaggaagagcgcaattactgggacatattactaatcttagaaagttatattctaagcaataatggctagagggattgcggaagacaatgcatgatggaaggactggatgtgtccaggaaaacagaaaccattctaagtgttttagatagagaagacttaatataaggaattggttagactcattggaaggctggatgagcaaaaatgggatggtaacatgaactcagagattaaagggaatcctatatgttttgggggaacagacaggaggcactaccaagatttaaaaactcacaagaggttacaatctctggagctaccacagcctcaagagctgtgatcatggagacagaccactgcttccaccctgggacggtggaggaggggacatagtcacttcagagacactgccaggggaaggaaggagagagtgagagtaagaggaaaggactgctcccctctccccacca

SEQ ID NO: 74292 - DNA, 1132 bp, Homo sapiens
aaggcgggcggatcacttgaggtcaggagttcaagaccagcctggccaacatggcgaaaccacatctctactaaaaatacaaaaaatagccagacatggtggtacgtgcctgtaatcccagctgctggggaggctgaggcaggaaaatcacttgaacctgggaagcagaggttgcagtgagccaagattgcggcactgcactccagcctgggcaacagagtgagattctgcctcaaaaaaattaagtaagtaaaataacaataatgaatcacccaggtgattccagtaacctgcccttggccctgcagcagggaagcagctctgtctgaacttggataacagggtaatcatgtcagagcagaagccatggtttgtggggaacaatcctagaaaacactgactgctttacatttattggaaaaccaggctttggtttttaccataatgtgaatgtctttggtcttactgtctttgtttctggagtgggtagccatgattttgtgagttgtggagatagaatcttatgaatggagaaaacaagatagcaggaacgtctggctaactaatggtaaaatgtgaccttccccctctgcagaagtccctttacgtggacgagtaatgcttgtgttagaaatatatacatatgtaactaacctgcacattgtgcacatgtacgctaaaacttaaagtataataataataaatttaaaaaaaaagaaatactaaagtgaagtggttgcatgtatgagtccattttcataatgctgataaagatatacctgacactgggtaatttatagagaaaaagaggtttaatggactcacagttccatgtggctggggaggcctcacaatcaaggtggaaggtgaaaggcacatcttacatggcagcagacaaaagaaaataagagccaagcaaaagaggtttccccttataaaaccatcagatctcatgagacttagtcactaccacgagaacagtatgggggaaaccacccccatgattcagttatttttcaccaggtccctcccacaacacatgggaatgatgggagctacaattcaagatgagatttgggtggggacacagccaaaccatatcaccgcatttttattactcaaaaaatgcaaa

SEQ ID NO: 74293 - DNA, 1032 bp, Homo sapiens
agcccagctttgtagttttctggttgtctctggtgaggtctttagttatttcccttctgttgtgctttagagatgtatcatgcctataccccctttcttctgatcctcttacagggttggagattaaagcacaagcaactcctaacccctgtagggttttagctaaagttctggtgggtgattttttttcctcgtcgctttaccttttgtcttcagttagaagatgtgatggggtccaggctctgaacaagaagtctgtctgctgatggcccaattattctctgtctgcaggttcactacaacattggcaaaaacctggctgataaaggcaaccagacagctgccatcagatactaccgggaagctgtaaggtatggcgagtatgtcttacagaagaattatgtacacagatcgttttcactttctaatatgaaacacctgttcctttaaagaccccaactttacaatatctttaccgattcctgagagtttagtaaaaacttactattgagcatttaatggtcagcttggttttttctcaactttcagattaaatcccaagtatgttcatgccatgaataatcttggaaatatcttaaaagaaaggaatgagctacaggaagctgaggagctgctgtctttggctgttcaaatacagtaagcattgtttttataattatgctagtgacaaagaaaggagctcctgcattccggcatctaagcctttcatcttcttgtttatctttgttaaaactgctcctctaggccagactttgccgctgcgtggatgaatctaggcatagtgcagaatagcctgaaacggtttgaagcagcagagcaaagttaccggacagcaattaaacacagaaggaaatacccagactgttactacaacctcgggcgtctggtaagcgcggggtgccctgtgcctgtggaaggaaagatgggttatttttcttatttataataaaatgacatagtgacacccacctagcccatacattttataaagttctttcacatgtttctatc

SEQ ID NO: 74294 - DNA, 2018 bp, Homo sapiens
cagcctcccgagtagctaggacaggcatgcgccactatgcccggctaatttttgtatttttagtagagacggggtttcactatgttagccaggctggtctcgaactcctgacctcgtgattcgcccatcctcagcctcccaaagtgctgggattacaggcatgagcctccgcgcccagccaagtgttagcttttgtaggttcatttcagtttgggttttgcattatgttgggaagagaacgctatttgctcaaaatgggggccaaggggttaggttagaagaattttcttttagtatagattattatcatgaaataatgatcattctctcttaggtcctcagcataagagctgcctagattgcttaaatgtaatcctcctgggtggagacggggagctctctggatctgtttcatgtctatgttccatatttaagggaaagcagtgatttcagacaaaattatataaacaaaactaatgaatagttgacatcttattatgaaacttaagtaaagaataatatataagagatgctggctacttatctttttcttggattaaaacctgtcattcatattttagttaagagacttagataaaatagtgaattactttcagcttttatctttagtttgatttgttgacttatcaatttattttatgctaccaaaaataaattgcctgtgatttaatttcttaaacgttaatagatctgctttatttttcctttactgtttgaatcgcagtaattgccccttctatgtgtggagttcctcaccacaaggagttcagatttctttacagaggctctataattcatctctattatcctctcactcagctttttagagagacagcgtattattttctctgttttcccagatgggagaaactgaagcatagcaagattaaactgacattatctaggttagtaatgtaggtggctacagagagacctggtatggtgatgtgcccaggtgcctctagtaaataagggggatggaacataggtgatgtctgaacccaaaaatctgcccgggaagtgatttcatatgttacaggctagaaaacacagggcgtgtgcttgtgggaatgcacgtaagtattaggagaaagacagagagagagagagagagagagagagagagagagagagagtgtgtgtgtgtgtgtgtgtgtgtgtgtgtgtgtgtgtggtttcctcttaatttaaggaatacatataagacctcatcttcaaaatggacccagtggtaatagtcctttctcaagaacatttttcaatgattctattcaatataagcaagattgagatttttgggagtttctttttaaattgaagtgtcataaaattatctttacttccttttttttgaaaaaatgtaagttaattttaggaaagtaatctcacttaggaagacactggtttccttcagtcccattatttcaggggacacattttctatactggtttcatttgatatctattgaatataaagtaagaaattggcaactggctctaatttagggccagatgtgtgagctaagactcatcttttttgagagattgcaatgtcagtgtaggtagtgctggtccctggtctgcatgtcaaggcacagtgccttgcatatggtagacaatcaatattagttattgaattcagccaaagggaagttgaattcactgagactactgtggatgagataccaagtatacttataatcatttttagtttttaaggcttaaaagtatgtcacaccatcaactctgtgatacaattctataataaattcttttaacaatgaaacagatcatatgccacaatgaggtattttcttaaggagtaagtgacccaggatgctataggatttttatgttttcaaaacattttaagtttaacattagatgttgccagaatatttataacaaattagtttagccctggtattaaaggtgcctttcataactgatactctcactttcttgcatttacatgttactgggttgtaatgtttgtt

SEQ ID NO: 74295 - DNA, 1057 bp, Homo sapiens
aaggtctttagcattaatttaatgtggagtaggatgtttttcttgagaagtctggaaatagccatttatttaaatacttttcatcatccaggatccttactctgggcctgggatttctcgttatcccatttctccccgcgagtaacctgttcttccgagtgggcttcgtggtcgcagagcgtgtcctctacctccccagcgttgggtactgtgtgctgctgacttttggattcggagccctgagcaaacataccaagaaaaaggtatcaactgagagtggtgccagctgatgaacagaatgaccggatgcatctcactggtgacaattaccatgtctttctgttcttaagaaactcattgccgctgtcgtgctgggaatcttattcatcaacacgctgagatgtgtgctgcgcagcggcgagtggcggagtgaggaacagcttttcagaagtgctctgtctgtgtgtcccctcaatgctaaggtacctagctgccagatttcttttaaagggaccttactagggtatctgttaagttcttgggctgaataagaacatttcctgtcgcgcagtatttagtgtaagaccatgaccgaatacttgggtttttctttgttatgtatggttttttttaatgattttgataagattcattaaaattccactcagccaaaattgaaaagaagtcatttaaaagcagacagtatcaatgaaacagatgactctaatgaggtcttaatcatcttccagatgatctactcaccctttgaagtagcttcaggggaggtgacattgcgtattcagactgagggtgggcacggcacagattctgatgtctagagcacacttttcaaaacccactctctagtgatagcattaactagcctcctccaagctggaatttaaaggggtagtaatgcctacaaattggcaataatgtagttcaggaagtttatgctatgtgctgcacaatagtacacatttatgtcacctttgggtgccctgctagtgattttttgggggtcagattaggtaaacataaatgtacatacagtcat

SEQ ID NO: 74296 - DNA, 1049 bp, Homo sapiens
aagagatctccagagctccattagagattatcatgtgtgttcatcccatttctaaagatgccaaagtgcactggcacttaaggttcacttacatggctgggtttttgaggttgatggctgcctttatcttccagtatgattactgcccaggaaaacactctgttgcatgaactaaaggactgttttatagtgaccaaaaaaagtggggagggggtatctctcgagggcttttcctaggaatcccaaatttctagctatcctgaatcttgtagaactcctacacgcagactgtgaaatcattactatcaggggcttactaaataataaatatgatctattaccttgagctaatttcatagaaacgtacggctgttatgtgtttttttaaagagctgcagaggtcttccgtgattctctagtctatgtgttccttgtctagattgagtaatgaaattgtgaagtgtaattgctgcctaacacagccaagctctcccgtggctgattgtcttgctttgctttcttagggtttaaatgcggtatttgacatcttggtgataggcaaattcaatgttctggaaattgtccagaaggtactacataaggacaagtcattagaggtgagtctgtacttttatctccagcccagacatggaaaatgtcaagtaccagctgatttaaaatgccattctcaaatattccttgtgattttgaattctacaataaccagccttttaaagcacagtgttgaagcagttcaggcagaattgctgcacatctgtacctggctcagccacacttttatgtgaaaatcagccacctctggggctttgcgatgtccttgcagaatctcggcatgctcaggaacgggggcctcctcttcagaatgaccctgctcacctctggaggggctgggatgctctacgtgcgctggaggatcatgggcacgggcccgccggccttcaccgaggtggacaacccggcctcctttgctgacagcatgctggtgagggtgagttctgagcctgccgccccctggactcttttcttcc

SEQ ID NO: 74297 - DNA, 2173 bp, Homo sapiens
gtaatgctatttaatgtttaaatttcaggtttaacgtaaccctggtctttgtacttttgggatctgaacataaattcaaagaaaggcctaatatcagaggaacaagtttaatattataagggaacaaaaaattaagtactctgaaattaatgattcaactagttaataaattctttcagagaatactttttttggtaacatcattaactttttttatggatgggacgtctttattataaagctctggacgatttttaactgcttgagtttattctgtcctaacctctggaatcctagtattttcagaaaatgaaaaatgtactcacataacatttctggggctctgcctttttttttttttttttttttttttggtgcataaatagaacatctagcaagatctttgcaacagaattttttaaaagtagatgtcctcataaaggaagcatacattttctttaaaaaaacaaacaaacaaaaaacactagtgagatgaaatcaatggcacactgggtattacttctgaatgcccaaaacaaaaagtgttattcttacaatgaggcatcttgtatttacatctctcttaaagcctggtatttcagattggaaacagatcatctctgcacattaaacttgctagaatagccaaaacaatttcgtttctaaactgataccttaaaatacttgtctcatgggagttaagaccaaaagaagaaatttattctcatttatagtggggagaagagagtcttttccagagggggatggattttctatatacctagaacaaccattttaagttctaaattcttactcataatatcaaaggcaggatctcaaatctccattgttcttaagctatatagctccccttaagctgtgtagttctatagctgtatagttcaccttaagctgtatagttcaggcactaaaatgggataaatcttgctcttgggatatcattgcctcatattttcattctgattaaagacacctgtttttctttgacttagaatcacactgcttataaaatagggcagttggctaactcatgtccgataggacgcttggttttcaatttggggccattgctgactgcattctgacggtgggagtcatgcagattctcttttccctgtttctttggttgcttcattgcttgattttcccccaaatggacccgtgttttagaccagcaagcctgacttctttcattctgtgcatagaagcacggcttggtcgttccagcttttggaacgcgaatctgatgctcattgtgttgctctggcagagagagagtcgcggccacctgtcggggtggcgtggttcccacacacaacatgacgtgccagttttgagcggtggagatgccaggcatagagtggtgaagaggggtaacttgtacaacgtgatgctttttctgaaaggagatcttcccactggaaaggagtgccaaatccgaggcacgtgcttcattaaatggatcacatctgctggcacttgtgggtgttagcactgacaagtgtctttctgtcattgcatttttttccctgtgcccccttcactccattagcctttgcctccatttacctaagtgagtgaattctcttagatgctagagacaatatactgaaacgagaagaacattgcctaggcatgtctctggtcaattctggatcgtaaactattgatgtttgctaatgctgcataattatcctagagcaagttgtcttcttaaaagatgagagaggcagcatggtgtccaaatggtttttgtttttttttttcccatcctctcctgggtcattggtatttaaaatgtaacagtcttgatggagaggagatggagaatgctggggaagagtgatgtcctcagatgcttacatagagccatgcacaagttagaattttaaatctggggaagatttttctgaataaaaatatttataagtgcagctgtgttggaggtgacatctgccactcagaatttatttgtactgtttttaacagttacttctaaatttaaaatgaaaatattgatcttctccatagtttttaaatattaagtaatttttatttatttatttatttatttatttatttattttgaagaagaatatcttaatgatggcgattcttccagtgtgaaggggttcaaagattaaattaaaag

SEQ ID NO: 74298 - DNA, 1042 bp, Homo sapiens
ccaccacatccggttaatttttgtatttttagtagagatggggtttcaccatgatggacaggctggtgtcgaactcttggccccaagtgatccacctgcctcagcctcccaaagtgctgggattacaggtgtgagccactgcacctggcctaacatgaatttctttatattaacatttatattaatatgttttaggtctttaccactctccagcatttcacactgaaaatgatttttcccactgcaaataagcacctgaattttccagtcttctagggtgatcagccatctagtgtgcctgagattgagagggttctgggactggggattttccattttaaagcaacgacagccgggcaaatggggatgacttgggcacctcacagtcttgccccctcctggcctctgcttggtaatgctgtaattgcagtcggtgttttgtgctcctcaactcatggaatgtctctgtttttctaatgaaccaccgcacattgcttcaagtggtttgtagacacccaaaccctctgacaggccagtccctactgcaaggaggagagcctgggagggccacacagcccctggtctgctggtggctcttcagctctgtgtggccattagcaggaggaccccagcgcttccctgaggacagaagtggcttgtgtgggctttcctttttgttttcctcaaagtgttggggaagatttcactttgtctgaattccaacatcaaggagagaagctcaggcccccttaagagttctgcctgtagccaggtgtggtggcgcatgcctggagtcccagctacttgggaagctgaggcaggaggactgcccaagcccaggagtttgaggctgcagtgagctatgatcacgccagtgcactccagcctggaaaacagagtgagaccctgtctctagaagtaaaaaattaaacaaaatgtttaaaaagagttctgtctgtctaatgaacccagacgttaacccagaaggaatcgggaggggaaaccttccccatccccctaattccttttcatggcccccatg

SEQ ID NO: 74299 - DNA, 2388 bp, Homo sapiens
gttgtatgtggaggccccggtgtctgggtgtaattctcgttccttctgtgaggtgaggcagatgaagccatttcgtggttctgctgagcatggtcttggcagtgtttttgggagcatcacactgtgccccttttgttaacttgctagccctccctttttcttttcctggttaatgaaaggcactcctccgttcattggcactgtgcctacagtaatgtgaaacaggctgttactggattttagtgatgttagagactgttttccagatgcttccttgcagtgtggagttgccttttttgttccttgagatgatgatcttctttgagacagtggagttagggggaattttagacacaatacatcttttccataaatcattatgaggaagaattgacctttctttctgtagcacaccctgctgtggaggctccacttaatcaaatatttagaacctcgttggtgttcatttcctgttcaaagggaggaaaagatcctctgccgaagcccttcacagctgaccgggtacttctgtaagagtgtagaagaaggtaggcttccaggcttgtcactgagtcaacgaagggagcaggtgcctcacatgaccttcacagaatctctaacctgctcttggggagtggtcagtgtgctcctggcttctgaagccgatgcccatggaagcaaatgtcacccttaacagtggacatcagtgaccagctttgcatctgtcacctcttttcaagcctttccctttgagtcagcaagcacttaagtcgcaggtgctaagtcgcatggtggctgtggacctttgttgctctttggggccacccatcatttgacccatttctgtttggggcattcttaggtgctcagaagatgatttgattagggagctggtacagacgggctgtcccatcaggtgcgcccacctgttggaatcaggaactggtcacgcgaggtgggggcccagaggcagccaggcagtctctgccaggtgcccggcgcatgatttgtggttttgctcctgccacgtggccctgccctggctttccaggccacaggagggtctgtgagctgcaaactcccctttgaagaattccctttttgtttaaattaatcagagtttggttactgcgatgaagaatcttgatggacaacccggggaagtgatcagcatgttgtaatttctagtccctaaaacactcctgtttaattatgctctaaagagaaagttaatctgtcatttttcttacttactccaccacagtgccttgtttgcctctcttctcattagacacaatttaagccatctactttcatcttttgaatgtaaaacaatgcatttttaaacatctgtagtatagtaccaaattatctcagcagtaagagcggtacagtgttttttttaatatttagtgacttttgtctggaaaaattaaggttttttttctgatttcatagtctgcttagctcatgatcaaaaatggaaacttaaaaaaatatgtttatccatacttaactgggacattttggtaagttaccttatttaatagatgtgagaggttaatagtgatcttatttagctgtgtggtccacttatttgacacgtattaagcaccttctgtatacagccagcaaacccagatgtggcccagtcctcatggagcccagtctagtggcacagaaaaatagtcatgtgactgtaagttgccagggtgccacacattgcttgacagggtgagatgtccagaggcctatggaagagggatgggatcagctcaggaagggcagagccaggcagctgggagatgaatggcggaaggagttgagccatgaagagttgagggtgactgtccaggggtgacccgcacgtgcagagcccctgggttgggagctggcagaagcacagcaccagagctatgggcctgcagagttcgggggaagccagggtctgcaacagccccttcagcatatcagctatgtcccaggagggtgaaagctgatcggtgtttgaagcctggtggggtgagcccatgtgtatttcgagatatcaacatagagaacatgttgggcacagcatccccgctaggaggcctgactgcatcccaggtgagagatggaggagcttggcttagggctgatgggagacccttgtccagaacatcccctttgtgaccctgcaggacctccaagcagaaacgcccctgggggacctgtggcatcatgacttctggggcagtagactgagcagcaacaccagccacaagtcctaccggcctctcaccgtcctgactttcaggtaagctgtgacattgaagggcctgggaaggtccctcccagcttgtgtgtgacattggatacaggtgtgtgtcaccaggttctcagcattca

SEQ ID NO: 74300 - DNA, 1033 bp, Homo sapiens
tgtaaatctgagcctccttctggcccctggaaggggacagcatcaccatggaatggtgtgtcccgttgcctgttggatctgtctccatcttcactcagacagaaggctatagaaagatgcctgtgacttcaggtggcctatttggctggcttcttattgattccataatctggggtatccacttagagatccagaaacaaatacatccaaactgccttcccaatcagggggctggaattctctttcatctcagcaggaaaagaacagggtccaggtcccttagtaaagacaggagcctcggtaccaatcaaccagctactaaaagggatttcccacagaaaatcattctgtgcctctgctttcagccttctggaagaaagtattagtaatagtagccggcctcccctgagccttcattacagccaggcagtgctgggaatcctatttaaccctcatgacaactctagaaggtaggcactcttaccatccccattttagtgttgaggaaacaggcccagagaggtcaagtaagttgccagaggtaccccaggtcagaaccgagcagtcttacccaaacctgatcctggtaaatccaaagaaagcacctgtccaggatgtggtgggaatggggacagataaaaaagtgcgagtttgggggtaggttgagatttgttttggcgaattccaaggcgggaagctgttaggcaccgctgaccactgggcgttaagatgctttgcagagggccgcagggggtgggctcagagaggaaaggggttgtgcacaggaccgcacaactaacacatggcaaggatgaggcacaggcatccccggcgagaaacattatgcccatttgaaagaaaagttcaaaataggatatatttttatcttgactctttcaccaggattgaaggtcatatcctcacacagaatagcctcccttcctttcctttgtatggctcagccttttctgggacaagatattgtccccaccagtcatttcctctatctgtcctctgtgttgagccagtagcc

SEQ ID NO: 74301 - DNA, 1087 bp, Homo sapiens
gagtttccgcacccgggagggagatgcggccggggctcaggctccttgcaggtaacgcgcggggcggcccctgcagggccgagcgcgccgcggggcgagcggagttggacgcggagcgggcgcgggttccccgctgccgccgtgtcccgagccccgcacggcggcccgggccagagcggcgctgctggaggagttggttccgggacctgagctgcggcccgggccggggtcacgggggacgcgggcccctgtgtgagccgcacatgggacaaagggcgcggcgtggaggctgcgcgccccgcccgccgcgctcgggcccctgagcttctccgcccgggcagaggtcgccgcccccagcccctgcctgcacagccgcgccggcgctccctcggcccgggcgcacccggcgcctgcggcgcgtccccggagcggccatctggccgcggggccccgcgcctggccgccagctggccgcggcgcaggcgatggctggacacagccgggccgcttggccgcctgccctgggttccgcggcggctcccccgccgcgccgcgagcgcctgctactccacgctcggctgcggagcggagcggcgcgagcgcggggccaccggcccgggcgcccggggccaccgagccgccgcttcccggcgtgggctcggagtttggggaagccgagcaggtggcgcagccactgcccacctcctgcgaactctgcggggcttctggtcttgttgatgttgtggctatgggctgcgtgtgtgtttttcttttttttaaaccacacacaaaagaagggaggagttagaggaacgatctagccactatgagtcatcccacacttcgctctttccccgggagagcaaataaatgcatggggagaatgtcttgagaaacagttatagtagggactgactaggtcccctccctgtcccttttctctgcagtcctgtctgcgccgggcgcgccccagatggagtggggtaaaatcacggccagtgcacctagataggggaaatggctacaagctagcaaactggaaactttctgggacagtggaactgtgaatatcaaaccacacacattc

SEQ ID NO: 74302 - DNA, 1086 bp, Homo sapiens
caaataatttaaaattttcttcatttgaaaaaaatacatacacataatgcatctcaagttaatacatttaaatatgtactaaacactctctctgtttattttcttctttgctttttctccaggttaccatgaagatcatagcaatgtcgcctgctggcttctggcaaagcagaagaaaccgatacgatctcctggtgacgtcgcttggcgttgtatgggtggtgcttcactttgccctcctggtaagcatagaagtcaagttgatttcagctgattatttcagtttggttcagttctgctcagtcctgtttccagtctcattttactccacatcaacctgctctgaggtgttagatggacctccctaaagcccagctttgactgtgatgggctctcagacatgcttgtgtctacatgtacacacccccacactcttcacacaggcaaaacctggcccctcaaagacctagacgatgcaagctagaaagagaaggaccttcaagatcttctggtttagcccctcattttaccaaaggggaaaacaagaaagagagaggaagactgcaacagagactgagaactgtccaaattcacacaagctagtatcagaagactatagtcctgttttcctgttttctcagctgaaatatagcatttgttccactttgttataatcagtatttcacaatgtgattctcaagtgcttccactgtttcattttctataagacatttagcctccacttctctaaagcatatgattctccatctctatatctgtgttctcactattttacctaaagtgccttcaccctccattcagtctgagatcccactcaaaatctgcagctatgggtgtactgaactgtaatctagggccatattgtccaatgaaaataaaatgtggccacagatatcacttaacattttctagaagccacaataaaaaagtagtggtttagaaaatataactattaaattgttaataattattaaataaataataattaattatttaattatgtaatatattttattatttaaaatatgtattaattaaaagatgcattatgtgtatgtgtatgta

SEQ ID NO: 74303 - DNA, 1045 bp, Homo sapiens
gtccacaggaggaaacaatgaaaacttctctctcctttgggaggccaaggcgggcagatcacaaggtcaggagatcgagaccatcctggctaacatggtgaaaccctgtctctactaaaaatacaaaaaattagtcaggcatggtggtgtgtacctgtagtcccagctactcaggaggctgaggcagtagaatcgcttgaacccaggaggcagaggttgcagtgagccgagatcgcaccgctgcacttcagcctgggcgacagaatgagactccgtctcaaaataaaataaaataaaaataacaaaaaataacaaaaaacaaaaaaaaccttctctctcactaacaaagagatgtgattttggagaaatgtcttccctctctttcagttttaccaaatctaacttgggtatctttagatccggtgtgccctcttttctttgatgacacgagtcctaactcctatatattgtcttatatgattgttttatgtcatccaagctggcacttatatcatctccctggtctcataggcatttaaatctgggcccctgcactagaccctgacaagatctcttctagatctaaaattctcatccgggaaagagtcgagagctgtcattactgggacacctgtagctgtatacttcattatgacagatctgttgtttatgtccagtgtctcttctgattttggggtgttcatgctgcatggttttctaatatacgtagttctaatatgttctctgttcattactgcgaatttctgctccgacccctggccacctacacaaaccgcaatccccagcataggcaacatgttagtaaccacccggagggggcgactgcaagccatgatgaagagctgggtctaccatgtacctgacctgtgctgcaagctctggcactagagctggggtcacagggccctagataagtaatctcctctgagaatagtcagattttgtcaatacatacaattttctcttagcagaaatcttggttgtattaataaatgctgtcattgacagcattgctttgtatttg

SEQ ID NO: 74304 - DNA, 1046 bp, Homo sapiens
ggttgctggctgattcttaattttgttagatatgttaacaccatttgctacagtgctacccaaccttttgccattgtggtatgcatagagaatgatatttgtacaacacgctgaagtcaataggtaggaagcaaaagcagctggaaatatcagatatcaaggattcctgatgctccagggaacagctgcccaggagcgagaggaccgtaccctgaagaacctataaatcattagtggctgagagttgaaaaactctgcatttcactcaaatctgttgatgctacctaactccacttgaagccattctttcaatcttttggtcagagatgactcttttgaggtcagtttattattgcccataactttccatgatgtaaatctcaaaagatcagcttatagagcatttgatctgctatttctgaaatagctacttacttttataataaattcttacttttataataaatgttagactttttataataaattctctgtcacactaagacataaacagcaataaaattggtttgaagaaatgaaatggctaagacagaacagtttagatcaaggtttaagccaagaagtcacaacagaggctcagaatttgggaatatcaattatcaacataaaaacaacagcctaggaatctagaagtcattcaaaaagtagaaatatgggaggccaaggtgggaggatcgcttgagcccagtagttggagaccaacctgggcaatatagtgagaccctcatctctacaaaaaataaaaattatcgcagtgtggtggtccatacctgtggtcccagctgcttgtgaggctgaggtaggagaatcacttgagcctgggaggtcaaggctgcagtgagctgtgattgtgccactgcattctagcctgggcaacagagaaagaccctgtccccccaaccccccaagaaagataaagatagaaacagccaactggatttttacagtcaaataagtataggtgggagattcaaaaagtcagttcaaaacagaagtacctgttagaattgatgttctcctgatat

SEQ ID NO: 74305 - DNA, 1028 bp, Homo sapiens
aaattactttctttagaaataactcaaaaatccaaataatattatctatgaccacgtcccaaaaaatcatttcaatatgagtaataatattggaatcaattctttctaaatcttgataatagttctcaaaagaaaagtaacaaacagtatattttttaacctctgaatagagttatgctatttgctgtagcatgtttaaaattattaggggcacatgactcctttgtggtaaagtttgcttgaagcacagttgttcaaaagaatggccctggggtttagatcatgactccactttatattagtgtgacagccttaggaaagtaattaactctcttgcctcaatttccccatctaggaaatggggtaagtgatagacctaccttatacagttaatgtaaagagcaactgagaaactacacttagagtacgtgtagcgtagaacaaacgcagaatgaactagaaattgggatgcacgggcaaaatatgaatgtatctctgtgttatttgagggaaaatggtgtaataataagggagggcaggacatagatattttcacactcacacactgcatctgatatgattccctttgtttacagacattaactatgcaggttttccagtatcttattcaagggagaggcattggggcaggggcacggtgttttttgtttgtttgtttgtttgagatggagtctcggtctgtcgcccaagctggagtgcagtggcacaattttggctcactgcaaactttgcctcctgggttcaagcaattctcctgcctctgcctcccagttagctgggactacaggcgcccatcaccatgcctggctaatttttttgtatttttagtagagacggagtttcaccgtgttagccaggagggtctcgatctcctgacctcgtgatccacccgcctcggcctccaaaagtgctgggattacaggcgtgagccactgtacccgccggggcacggtgttcttaaccttgcatcttgcctatgttaactcatatctcccatttcattttat

SEQ ID NO: 74306 - DNA, 1030 bp, Homo sapiens
tcctcatttctcattcttatatgtaagccaaatgatccatcttcgcttcagtcttaactgactctatatttcaaagtgtgtggtacaaatattattaacctcatcaacaatgcttgtcatcagtgatttggtatctacaacataagagcaagaaggtctctcaaggtctctctttctctctctctccctctctaaatatatatatatatatatatatatatatatatattctctttgctgtactcttagatagatagatagatagatagatagatagatagatagatagaaagagcaaaggtctctcaaggtcttgctctgttgcccaggctagaatgcagtggcatgatcatagttcactgcaacctcgaacccctgggctcaagggattctcctgcctatgcctcccaaagtgcaacgattacaggcatgagcaacctcacttggccagatacatagatattaatgaagggtaattacattattcattgtaatcaacatttatgattgttgaaattgtctaacactttcatgtgttgttcacaggaatgtaacctggaatagtttagctattccagacacacactgctcaccagagctagaagaaggctaccagtgcccacctggatttaaatgcatggaccttgaagatctgggacttagcaggcaagagctgggctacagtggctttaatgagataggtctgtcttactggtaaaatacgttttaagtttctattttgtgatgtttatgaagtggacagaataattaaataattgatactaatattttgactggctgtagtatagaagaaatacaaatataaattttaattctatgcctattttataatatattctacccgacagtgcgtagcatacaagctgtgtatgtatatgggcagcagtgtttgtatggagttacagatctctcatttttgactatttcgattctcaataacagcatttaagcatttaaaaatatttgtttgttgaacagggttctgggttgttgactcaaagataaacaa

SEQ ID NO: 74307 - DNA, 1014 bp, Homo sapiens
ttttctacttttctttctacttctttatggaattttaggagttcagatgtttggaacatttacttatcactgtgttgtaaatgacacaaagccagggtaagtttatctattaactgcattttaatctagttgattaacaaagatatctctgtaattttcataagaataacctctatgtcagattttttaaacagtgcttatgtcctctttgttctgtgtctctgcttcctcggtattgtttttgtccagtttttattttattttattttattttatttttgagatggagtctcgctctgtcatgaggctggggtgcagtggcgcgatctcggttcactgcaacctccgcatcccgggttcaagcgtttctccttcctcagcctgccaagtagctgggactacaggcgtgcaccaccatgcccgactaatttttgttttgtccaatttttaaagacaagtattcaagacaggacagattggaaaatgtaacctggtggaaaagtagattaagcaaatgcaaagtgtacatttagaaaccttagtgtggcaaaatggggagtgtgctaacataataacataaacctagagcttcactgtggaagcttttcatattagaatgagttacatgttcgggaaaaaaagctcatttttattattatttacttttgtcatcattccctaaaatagtttcctaaatgattataacatcatttctagactaaacactattatctgttgcatttgactgttgtagggttggtgggtaagatagaatgtatgtactttaattacctattatgtattatgcaatagagcacctgcctcttctacttggctgatcattgttaatatacaactccagggatgtgatggcaggagagagcagagtgggatgttggcccctggatggtccagaagtgtcccattaggtgttagctagatatagagtttggggttccaagcacaacccagaagtgcaacagatatgactatgccagatttcagggcagcagg

SEQ ID NO: 74308 - DNA, 1382 bp, Homo sapiens
gagtatgagtgattgtatgtcctgtatatatattcatgttaacacacacttatctttaattctttcttcttattttggggttaaagaaaatcttcagacagcagacatgcctgtagtgttgcacagaaagttattttgtggaattttgaaagatgtctgggctaaatttgtataaaatgtgttctccaaaataaagagaaaaaatctatgcatttttttcaaatgtaggatgagaccagatttttaaaaagtttctttgtatttttatacaaaggcattatatatcagatacaaatagaaaggaaattctaaatatgggatgtgttatatatcaattcatttaaaaagcatttcttaactactatgataggcccttgtgctagatgctagggaagttatggtaaatatagtatgcccctaattctaggtacttatagtacaaaaatgaaaaaaaagtaatggcacatcaagttcctatgtgactaaattacaaacacatattttaattgaaccagaatcttcctatattgtagtctgatgcccaggaggttatcagatgtttgggagagcctgatcaggttccgtctatgctttgggtctttgtaacgcatggccacagaaatgcctccacctttctgtcttagtgtgtttatgtggaaaataggtgccttgagaattaaatgatataaaaacgtgaaaatatttgtagcacattatatgcacttagtgttagatttcttcttcttcacctccacattagtaaactattttaacctcagtattatgttttccacttagtgtggttcataatacaagtttgagatatcagttatggtgccgtgtagtaactctggaccatcattgcagtgggttcactctttgctgcgcatctgtgccatcatcagcgtcatttctgtttgtatgaatacgccaatgaccttcgagcactatcctccacttcagtatgtgaccttcactttggatacattattgatgtttctctacacggcagagatgatagcaaaaatgcacatccggggcattgtcaaggtgagcacttccatgtcatttaaactaagaacctaaatgtgttgaaagtcttaatccctttaatcatattttcttgttcatttcagtaaaacaaaacatcattttatcttatacatatggaagtcctttttaaaaaggcataactccagagactgggagaaattgttgcatgagactattttaaaagttaaataaattttgtaagtcacaaactcttggaatatctgagaaggaacaagatggtttgactaatgactgtgtgaagtctcgagtagggttattcatgccacttagggctgagcccacaacccagcacaggggctggcccagag

SEQ ID NO: 74309 - DNA, 1034 bp, Homo sapiens
gtgtgtttatatgtgtgtgtgtgtatatctatctatatatatatataggtgtgtgtgtaccaattacaaagatgattcttcccacctcatagtctcatactttaacagtatatatatatatatatacatgtatatatatatatatatataccattacaaatactaaaattggtctaccagatattaaataacaaattaaaatttttgagtactgtgaacacatggaaacaaatttccatttattctttacttaatgatgtctaaaattcatgcattcatttattcagtaaatatttagtgagatcctagtatttagccatcactgttcttgatcttgagaagttagaataagcaaaagttgacatagtttaccattttttgaagtgtacagtctaatgagagacaaatgtttacactaatgatcgtattattacaaattaagaaaggttcttataagaaaaggaatgatttctatgagatcacatagataaatctggcctagcttgggtggtaaggaaaagcattgaattctgaactgagatctgaaacaccagtatgagttaactagactaagagcagcgtgaagaatattcctggaaagggtgatataatatacaaagaccctggggcaggaggagagacaaggcatttgaatgaaaaagagaaaacaacgaaatcagaatgcagaatgtgaacacacagcagtaggatttgggatttgggtattaggcatgagtgaaaccagtggtcacattaagggtgagggaagagagagacgctctcatattgttttatactcagtacctgttttaagaaaaaaagaaaaaacaacaaggaagtaaaaccaaagacaggcagcccagcgccaggcctgaaaccaggcctgggcctgcctggcctaaacccagtagttaaaaatcaacttagaaccctatgcctggcctaaactcagtagttaaaaatcaacttagaacccgatgttacccatagatttcaggcattgtataaaagaacattgtgaaactccctgctct

SEQ ID NO: 74310 - DNA, 1085 bp, Homo sapiens
agaaaataccttaaacttcctagtagatttggatcttaacactgtcttttcatagagctgaaattaaaggaggagtttttgtttggttttcacaaacatgtcctgaagcattaacctgaaattttaaaactggtttgaaatattaggttttctatcccctgcaaagctgtactataaaattaaaggaaaccaaaaacaggcatgggaatatgatagttaggtggtgttcctgagtgtggtattttaaagttttgactttcagtttcctcatggcattcacttgaaacctggttcattgagggctagctgcaaaccttccagatcttgtccttctttgcagctccaggtttctctggcctatggttctccaggaccctgcagttttttttttttttttcagaggcctgtgccacatcagttacacacacaaaaaaaggcttttgggtaaagggaaacttcatgtactgagcaagaagcatgaatgtaaaaatatagaacccctagggataaggaattcagtggctacctatgccattcgaaaggagtgtgccaaaatgtgcgctgagtagtgcctttcccagcattttctttttttagaaattaaaagtatggctctgatgccaaagctacaaaccataaatccaattaaagtgaaggacttaaatgtacatttgggagagtcgggggaaagtggaaagaggatctgtttctgaatcacctcgcctctttctcttcctccctcccaccctccaccctgaaaacatgtccacacagtgggattgcttgttaaattaggacactatgactatgtaactatatttgtgaaatagagtcaaattaaaattgaaagaaaacaactgaaatgcaaaaaatatgaaaagaaagttgaatccatgctctagtgcaaatgttcttccagctcaaactacctctaaaatagccctggactgcgtgcaactccacatctcacagtttgctttatgaagtatcaaaacattctcaaacttttgactgcaataggtttccatgtttttaaacttttgctctaataagcaaggtctgtctgttttcttttaacaatttta

SEQ ID NO: 74311 - DNA, 1555 bp, Homo sapiens
tcaccgttattcaagatccatctcccagcatccctgactaatcctactgtatgctgatctctcgttgatcagcccctggctatcttatcctcctttctacactaaacactcatcctcctccccacaatgtcccttcccttctggatcctttatcgtgctttctgattattgaggtagcattttggaagtaacgagggggagtctggccgaatctgcttagaaacccctgggaatcttgattcctggtgtgtgttcttcagcaccactctggagtacagcacatcttttgtgaatcagaagaggatcaggtactgaattccctcccggtaactggagttatatagttgtcgttgtattaataacttaaagacttagaacaatgacagctatcaactcatttggggctttattacaaagtaataatgcttttcattcagctgtggagtgtgtttactttttataggatgagtgggaggaaaacagctgggataagtggttcaccggttcttttgtcaggataataagagggtcagaaaagtttggagaagtgctgcttggtagaatttgttggtagaatttccagatctgtttctcacattattctgttactctctctaaagtaacaataattttcaccccacagccttgttgtgaaaattgattataagaggactggctaattacatgtgacttttttaaatgctcaagaaaaatattaaactattttggcaatgatatttattcttttttgtatatataatttcaacttttattttagattcagaaggtagaagtacaggtttgttacatgggggtattgcctgatgttaaggtttggggtgtgattgatcctgtcacccaggtagtgagcgtggtacccagtaggtagtgtttcagtcttatttccaccccttccctttgggatccccagtatctgttgttcccgtctttgtgtccatgtgtactcaatatttagctcccaccataagtgaatagaagtttatgctggatctttcatcaccaactatttggagggtaaatatatgttagatatttgcatgtaataaatattcagatgataaaatattgaaataaaatgaaagcataagtcttctcttttaacaaccttgactcagatattggcctaaacatagccagttaaaagaaattgggtacggtggcttgcaaacgtgaggatttttttttcctgtacctttaacagatttattttgtagatatatgtgtacatcattaagattagaggatggatagaaagaaaaaggaaggaaagaatgaaataggaggaagatgaggctgaactggcagtttggaaagccgggtggggtctgaataaaggactagaggcacaagtgaaaacgtggaagaacacagtgggttgtctcagtctttggtgacttccttgggcccaattcttttgtgacaggtctgtgggcatgatcaagtggaggatgggtggcatgagaagagtagtagttacgtaagtgatttcatatttcctcagcagatattcaggcacctaccaggtgcctaagtt

SEQ ID NO: 74312 - DNA, 1123 bp, Homo sapiens
tgatggggccaagagtggaaactgagggaccacttaggtaattcacctcatggaggcaagagatggtggtggtttggaaagttaggatagtggtagtgaaaatgcaatggatttgagctctcttctagacaaagaattaacaggatttcctgttagcttcgctgtgaggagtcaactgaagtaaagaatcagaggaggattgttaagtttccagtgtgaacagctgggcgtggggattcctgggatggcaaagcctggagaaaatcaggtggtggggggcatgttaagcttgaactttgttgcgtttgaggtgctagtgtggcatccaataatggtgccattaaatggtaccattactactaaacattttttccccctaaagctctaaacttgtccagcccacagctcaccatctttagatcttttctcaaatgttaccatctcagcaaggccttccttgaccagccaaacttatgttgaaaaccccacactgaccatctcccttccctgcttaatttttctccatagttaattttcaccatctgacatgttcttttttttccctaatacccagtgtgatagcacatctgacatgttctttattttactttgttattaactgaactgctttctcgctataagatcgtcagggatttttgcgtatggatcactgccatatccccagcacctaaaatagggtgtggtctatagtaaatgctcagtaaatatttgtttattgaatatatgaaacgacttgaaggattctgtagtgtttccacgattaaattttcttactagtatttgttcaggcttttggcttaaaacagttcagttctcttttttaagtgaatgtagattttgtatatacacacacatatatatgtggatttgcattgtttaggaataaaaacctaaaatctaccattcatattttaattttcttaattttcaggttacaactgatggaaaaccaaaaatcgttgatatcattgatacaacaggaagtggcgatgtgaatactgctacagaagtagagccaaaggatggtgagattgttggcctttcaggaagagtgcttaaggtgagaccttttgtcttctttttgaatttttttttttttact

SEQ ID NO: 74313 - DNA, 1033 bp, Homo sapiens
ttgagacggagttttggtcttgttgcccagactggagtgcaatggcgcgatctcaactcactgcaacatctgccacccgggttcaagcgattctcctgcctcagcctcctgagtagctgggattacaggtgtctgccaccacacccggctaattttgtatttttagtagagacagggtttcaccatgttggccaagctggtctcagactcctgacctcaggtgatctacctgcctcagcctcccaaagtgctgggattacaagcgcgagccaccgtgcccagcccccatgcatttttaaaccattagatcttgtaataattcatcatcacaagaacaacaagggggaaatccacccccatgatccagtcacctcccaccacatccctcccctgacacgaaggggttatatttcgacatgcgatttgggtagagacagagccaaaccatatcacctgttctttgctttgttgacatgtcagcttttctctggttcagcttggttggtgaagtttgggcaggatgtgggatggggcaatgggagtgctcttatacaaattttccgccagtcttcttagtcagaactctcttctccatccatccataacatgtactcacacacatgttcagtttaatttttttcagggatgtgcaggtgtttagatattttgcagtagtcaataaaaggaagaattattaatcactgggattctgactagttgcatctctgcaactctttagtacatagttttcagaaagcagcacaatgaagtcttcaagtttctttgatgtagtcgtgcatttatttatttatttatttattcatttatttatttatgacagagtcttgctctgtcgtccaggctggagtgcagtggtgtgatcttggctcactgcaacctccgtctcctgggttccagcaattttcctgcctcagcctcccaagtcgctgggattataggcacccgccaccatgcccggctaattttttgtatttttagtagagactgggtttcaccatgctggctaggcagg

SEQ ID NO: 74314 - DNA, 1031 bp, Homo sapiens
tttttctgtcagtttaagatcaactgttaagttaggtgctttgaacactttagtagcctcattctctaaggatgatattcctaggcttccttgagaaaccagtggtaagctacttatgacctatggtactcccatgagcagataaaagtacaaaagtgaatagaactttaaaaccttttattgcaaaatatacatacataaaatacataaaacacatatatacagttttatgaatagtatagctaacaccattgtacccacccagatcaagataaagagtattgccgtacatcagaaacttcctgcatcctcctatatcacagcctatttcaacttttgtgataatcattcctttgcttttttgtgtgtagttttaccatatctgtgtggctacataaaatatattgtttagttttgaactttacataaacagtctcatttcattcataaaatttcatcatacgtcatttttcccttggtgttgtgagatttcagattcctgagacttgcccatgttgtcacgggcagcaatgatttattaagtttcattgctgtgcaatatgccatggtttgtacctactacattctatccattctgctgtgatgtgtgtgtatcctgtgcacatgtgtgtggatgtctccagaatgtgtgcataggagtagaattgctgaatcatggagatatgtcactaggtcatgccaaacagtttttccaagtgcgtgtttgtttgttttttaactggacaggacatcttcttgaccaagtgtctgtattaaaggacatttccaggccgggcacggtggctcacacctgtaatcccagcactttgggaggccaagcactttggatcatctgaggtcgggagttcaagaccagcctgaccaacatgtcgaaaccccctctctgctaaaaatacaaaaattagctgggcatggtggtgcacacctgaatcccagctactagggaggctgagacaggagaacacagaggttgcagtgagccaatatggcgccactgcacagcagcctga

SEQ ID NO: 74315 - DNA, 1028 bp, Homo sapiens
tattctcctatatttctaagaagtgtcacagcttttctcttctgtttgttctagaattcacctggaagtgattttatatgcttagtttgaagagttctgtttccttttttctgtaaaaagacccagttgtcccaacaccatgtgttccacaattttcactctaatttttaatgccttcttttcacttggcacccttcaaaatgtggtgagcttctgaagtctctttcgtattctctttgtcccttcgtttttggatgcttccccgacttcctttattctaattttagtagcattttggaaggaagcacagtacctttttcattttaccacatttaactggaagtcattttaaaaatcaacacttagtcttaaatatttttggtttttaaaaaaaataaaataaagataaatccaggcataatgaatgacttggccagattcagcatggtacttagatgcagtgacagccaaaggaaactgtgcgtgtgccctggcctgtgtgatgaggctggcaagactgaaatcatttggaagcaaaagcctctaagagggcttcactgcatggtaccctaacactcagatgacacttagcccgttaagaaaaatgtttgatttgttaggcatcctctctttaagagagtcagagaaatgaggtgtaattggtaattaaaaagattacgtgtatcatatgacaatcagtcttaatacattgtagttactgtgttattagaaccatttttaagataccaacctaaaatggtcaaatgtaaagattttattcttagaaaaaataactttgtttatgtagaatactcaaatatgcaaaataaaatttcataattgcctcataaagttagctttactctaacttggctaaagttagatcagatagcccagattataacttttatctgatttttttggtgtaatttttgtaactagtctgccttcgtggtaaggaagatacatagttgtgatttgagaagtatctggttccatggaccgtgcagactttgatctcatttata

SEQ ID NO: 74316 - DNA, 1017 bp, Homo sapiens
ataatattgaacttttaatgatgttcatttcatttatgactttttgaatattaagtgtattttgttttaatcaggctatcttctaaagtgttcggaatataatttaaaaactattttagttagtaaaatggaaaaaacatgaaggaagacaaccataaagtaatgtagaaaatgccttctgtgagaaataaatttaagtctgttataactataggactgaagctcagtaaaattcacctagtttcaaagagcttgtgtaagccgttagattcttgaagccattactaaaagaagcagctggaagttagacctaggccatgtgtctgaactatcctaaactgctctaaaactctaagccaagttttagctgtaattcttaagagtccaggtggtttttaacctagagttttgtgaaggagggtatttttaaagcactttgtgcatgatttaagaactggttgctgtaagctatcttacctaatccttactgcccactctaagaaacaggctaaaccaggcagtcattatatttatatttgttgtggtagaggtagtagtatagtaaaatagtggagagactatgttacatgatttttagaaaggtaagaaaataaattttactgtctccatttctttttaattaatagagcctgcattgattctaatgaagatggggacttgagtaaatctaccgtgttgagaaactacaaagaagcccaagaatatggctcttttggcacagctgagatgttgaattactccgttaatatatacgatgatggaaacctgctctccattgtgaccagtggaggtatcccatttcagattgaccaatgagatatagatttatgaggtgataaagtggtacgttgcgatagctcacagcaaccttctagagaattttaagctagagatcgtagctaaaggactaggtccagaatcataaaggtgatttgatttacctgcaagatgttgttttttaaggtcataaccatgtgggatccagtccaagaatat

SEQ ID NO: 74317 - DNA, 2478 bp, Homo sapiens
tctttgtaactacaactcaggtcaagaaatgaaacataatgaaactcccatcatgccccttcctaatcagtaatgtaccctcccacctcctacagttaactactatcctgatctccattgccacattagtttggaccatatgatgttgctgtttttgtgatcggaaatgataaaatagtggcagtttcagatggttcagcctttttttcatttatatgaaaattcaatatccatttttgtatgtgacttctttagttcagccttatttttgtgagctttatctcatagtacatagtagtagtttattgctgtataattgtcagttctatgaattgatgtacatgtaaccatttactgttaatgaatcttgtggtggtttttaagtttttgaattttataaacagtgttgccatgaacatttttgtgggtgtcttagttacatgtgcacacattttggtattgtgtgtacctagaggtaggatggctggctcataggctgtggcagtgttcagctttcactccagccagcagtgtatgatatgtacttccatccacacttgctttgtcagcctttaatattttggcaattctaaaaggtacgtagaagcatctttttgtggcttaatttgcgtttcctagatgacgaatgaaattaaacatcttttcgtgtgtttatttgccctttgggtatcttcttttataaaatgctttttcaaatgtttgaaggggggattctccctttttttattgtgaatttgaaagatttttatatattctggatataaagctctttgtcagctatacatgttgcaaatactttcctttgtgacttgagtttttgctctccatgaacagggtagcagagtaatgtgtattctttttatcatgattaataatatgcaaattgaattgaataaactttcagtccatgagaatgttttgtcatttccccacctttgtgtctctaggagctcatgggacacatgtagctagtatagctgctggacactttccagaagaacctgaacggaatggggtagctcctggtgctcaaattctttccatcaagattggtgatacaagactaagcacaatggaaacaggcacaggcctcataagagctgtgagtgtttgtgagttgttgattcagaagattaatgattaatgatcttggatatttttaggtttataagtgctcctagtttaccaagaatacattgaactatatatagtgtacaggacttttaacaaagcaaaaatatttactaatttatttttaaattatttttattaaatattattaggatttggcctaacctttgtgaaaaaattacttacttcatactcgtcatttctagcaaatctcctaacaagcaattttgagatacttaaaaagaaagacctcttagccagctttctccatcagcctaagaggaatttaaaacctcagctaacattctgtacgtcattttaacgtaggaaagtatatttaattttagtgattttttaacctaggaaggaccattccattccctctacctctgtccccctctaaccccactcttttctagaaatgctagttttttgtttttttttttaatgactacttttttatgtgtctcctcctacctttttgtgtttatgtgcttatatgtccaggtatatggtgatatgcctggaggtaacttataaattagaatatgattggctaagaaactataggattatatatatgcccttattttactggctaatctgtttctgtaaattgctgcctaaactagagtcttaatctctttaatagatgatagaagttataaatcataagtgtgatcttgtcaactacagttacggagaagcaactcactggccaaattctgggtgagtgttccttgacagttgtttagccatagaaccttagccagtgaagagtatgagatgtttttcataagtggattgagtgtcacggtggaagaaagaacagttgcagtggttagatgataactgtgttcaagaggactttcatcctcttgaagtcctgtttggctcgtaggccgcacacccccgttcctgtgttcacatctgtgacgatgttaatgctgttcactgcaccatgcctgaagtctcaactctgagcatgcctgtgctgtcctttgtggctcttccttggttaggtctccctcacagttcttctgagatatgcaacccacagactctggtgttttttcactgtcagatgcactgcatcctcacttctcttcccaggcaatttagatctgacaatctgtctatcattataattactagttccacaagcactctgaagccatcctcagttgtatatacatacccgacagacgcccagacttgctgaaattttgctattctctttagtgacttgcatctcatctgcaaaacttactgttggttgcgtatgttcactaactcggtcagttttcacatctcctcaatccattc

SEQ ID NO: 74318 - DNA, 1030 bp, Homo sapiens
tgcatgcttttaggtgcattagcatatttagtctaaaatatcctgggataaataatcctgggagataggtattttgtatccaaaagcaaagttcttagtaaaatgtatggtacatagtagactttccttgtttccttattaaattttattcttccatcgtattagagagaggactggtgttgagagattaggcagtttactcaagtgaacagtggatttggaatcaggatccccgtttgttttcttttcttaatgattaaatccatcccacaggtgttggtgcttatgtttctcctgatatgatggttgctgagtattcactgagagagaaattacctgcaaatcaatatacttggtcttctagaggacctaggtaggtgcaggtagaacgcggaaccattacgtatattcggttaaactttacactgttgagaagggcagagttttagataagtttgctagtttttttctgttggtttttacttttttttcagtattttcattttgattaacagtctcatctcagggacagataaataaaataaatgaaatagtttcattgttacatggagaacatcactattctgagtataaattcttattcctatatccataattcttcatttataagaatctaaagaaaaagtagggacttggatatctttatatagtagtgatggccttgttttaaatagtttttgatatttgaactttggtgaaatgaaagccctaagcttttataaagcatcacagtcatagggcccacgtacctgtggctcatgtctttgaagttataacttactttgagcaattttgggtgagatccaaaagtaaacaagttctgactgagaaatgaagtctatctcttttggttccctgaagccctctgaactacatttatctgattctgtgaactgattttctgaagaggtatattaagtcctaatttatgtaattcttcgttatatcatcagcgggtacatgcaccttctgaaaaataaagcctattttaattcatctgtttggagtt

SEQ ID NO: 74319 - DNA, 1903 bp, Homo sapiens
gagtaaaaatagttcactcagttgggagatggtataaggagagtctggcagcctctgtggggaatgtatggccacttagccagggaggcggaagtgtgctattctgtgccattccttctttacttggggcagaggacagagctttgttggatgataatgtggttatgaattctgagggttttaattcatcagactttgcttgtttgaagccctcagctggacagtcctgttagacttcagctgtccagtatggcagcagtcagggacgtgaggttagtctgcgttaagatgtgctgtaagtatagaatgtacaccaaatttcaaagacttggtacaaaaaaaacaatgtaaactaattcatttttctttgtatctattaattacatgttgaaatgctaatatttttgctatgtctagttaaacatactaaaattaattgcattaatgtcttgttagctttttttaagtgtggcttatagaaaatgttaatttatatggcccacattatatttctattgtacagtgctatattagaccttaaacagaaggaaagtttcttattacagataagagagatgtacactcatcaaagagtcagaacagtgacatttattttctctctctaaatatacctgacactgtggcctgtcacacatgcccagatatgtatatacacacagacatttctgtacacttacaaggaaaaaataaatgctgcctatgggaaaatggctctgctgggtgttttcccccattgattcttcatagtagtatctgtgtcactatttgtaatgagtgcagttagtacatagtgttatactattggatttaaccagtggtcgtcttaaaaatgcccatgtatgtttagctttcaccatcctaagcaaacttcaatggctttccatttagtgctgacggggcccttggtgtgagtatcagtgcgccaggaggagccattgcttctgttcctaactggacactgagagggacgcagctgatgaatggaacatctatgtcttcccccaatgcatgtggaggcattgccctgatcctttcaggtaagcgtgttctttattgtccttacattattgcagaccaatatttttgttttctgaagctctcatggtaagaacatgtggtagaattgataattccctgggcacaaagtagagtttaaggtaacgaataacttatgtgataatgataatttgaatgtgtgtttattcagcagtatatttgttggctgtccgctgttaacgactgtcaagcagtattttagctctggggctaaattagtgaacaaagcatcaaaaatagctgcctatgtggaggttacatcattatatatattatagttgggataaacagactctgaacaaaataaaaaactgtagatgttgcatgttagaggttaatggatgccgtgagcaaaatgaggtagaaagagaaggagggatttctagagtggtgcacaggattaaatagagtggcactgggcttagccaggactcagatttagggtagccaggctgctgtgaagctccctcctcagaaacgtccctctttaagttgtctctcctctgcctcctttcttccccgcttttctcacccacaccacagtttcttctgctcaccacatctcctcagcatggcctgtccacactggtgctatcagcataagcctgtgatgatgtaccacttcaagtgctacatccttctctaggttgagcccacactcttaggatggatcctaacatgaccctctttctagttctcttcagcctcaccaggtatttcaaggcctcttggcctccatctttgggtgtactgcactctgcctcgaagtcctgtctgccatgttgtggccttgcagactcctgtacattctctaagaggcggctta

SEQ ID NO: 74320 - DNA, 1064 bp, Homo sapiens
acatcatttgctaataaattaggttttactgttactgttggaaataaccgtggcatctacctccgagatcctgttcaggtggctgcaccttcagatcatggcgttggcattgaacctgtatttccggagaacacaggtcagtaataggctggcagtaagctgacgtattcacatttgctgtttgaatgagtggtatcataataaagaattgctgtttgggccagtgttgtgaagagaatacatgaattgacagtatgattattttaaatcttagtcataagagaaaatattagagcaatttggggtccttgtacaatggcaatttagttagcatcttaaactaccagggaaaacagtagaatgagcctcagtgacccacagctttattaaattgtggataataaaatatcaaatttcttttccactttacctacttaggtataagacagagctttctgttgaagaatgaaaagtagaagcagtctaggagaactgcagctcgattaggtgtgaacaaaaataatcatcgctattatctggctgtcttcatttcagttgaatactatgacctgtgtgcagtaatgaaaacattcacttaaactctttattttaaggtcataccagtgcttggtgaaagtataaatgaatcatgagtaatctaaattgtaaggaagattatttgactgttttatttaagctgtgttttggatgcattttacagccaaccaaaccaagtcgctaaatttttttggaaagatgtaacatttttaaatggaaaaaaggaaaaaaatactcatctttaatttttggtctttttcgtgccagaaaactctgaaaaaatatcccttcagcttcatttagctctgacttcaaattcatcttgggttcagtgtcccagccatttggaactcatgaatcaatgtagacacataaacatacgtgtggatcccaggggcttaagagaaggattgcattatacagaggtattgatgtatcttcatttttactttcttcactctttaaaatgtttaaaaggttaaaaaaaaatccaaagtatatttgca

SEQ ID NO: 74321 - DNA, 1989 bp, Homo sapiens
cttcccccgctcttttaaacatttgtttatggatattgacacttaccgattcttttttcaaggtatgtggctatgatatagcatcccctaacgcaggtccgctcttcagagttccgatcactgcagttatagcagcaaagtaagtaacaggttactcacagcttactggtacatctaagattttaatgactattcatggagtcttgtggacttttaatgatcactaatacagaaccaggtaatggggattttgtcttagttctgctcccagctagcatttttaggtgtcatgtagtcagccatactgactcttgtgtgctctgagagtaactgatggcacctggcatctgccctacctctgcatcaaaactatttccaccacagtcactctgagctctgcattgcccagttcagaggataactcaggcttcgtctgacccgatcccactgtagtatttgacaatattacttcactcccctccattcctgccctttttgtctctgtcgtttttgggatttactctcttctcttaatgcttccacttttctagttatctactgtagaagcagaagttaagaaactcttaacttcccatcttattcctctggaaccaaggaaaaatcagcagattatattacttcctgcttaaagtatatcagtggcacctccaaaggtcaagttcaagctccttaaaatagcaaacaatgctccctcacaattatagccctagccagtgtttcctgtcattccgtacaccaaattacacattttggccaactcactgattttggcacttgaggattctcaggatttgtgcatgtgcacagctgataacttggtttcaatttcctgtctcttcagttaatgaccaggtgcattcctggtcatccctgggtgaagggagtcccttctttctgcttcgtggcacattttacgtgcccctggacagactttagccaatatattgtaattttttatttaacttacactctttcactgtgagcccaccgaaggcacagagactactgttatacaggatgtataaaataaattatctagtggatgaaggtgagattgggattgtgagagtactggaaaccaagtggaaattctaaactaacagttctgttactctggtaaatattaagtatgcaatagatctcagcccatgagaaacacaggatgaaattgaggagaataaatttaaaaagtggtatacatgtggaaaaattgtgcaacagttaaattctcagccgtatattccctcgaagtccagtagtaatttagaccaggtaatgtgtaagaccttcaggagtcagctgccacgccatctccttcaggaagcttcccaggctccgtaactcttcttgtctatctggagcatcttatgttaaatgtctctgatgatgattctctccatgctagattgtctaggttaaagaatcatattttcttctttgttacgtttctagctcctaataacagggcctcatgtagtaggcactcatttaaccgtttgtcctactgacaagaatttgtctctagcataaaatttgtttccgtggtgggtagttatgcatttgaactttatttcattgatttcttacaaaagtgctttgaaagtagtttgcctttctttactgttttacatcatgggagtgttttgaagctacaggaggagcttaatttaacacaagtctcatagctataataccagtgacataaaactttatcattgattttaatatctaggactcactgtagtttggaatctggtaattggaaaattctgtgaatgttgtagaatgcctttaacaaaaaagagaatgcttttttaatagtgtgtgtgaatgtatcttacaaatcataaaataggcaaaaagtagaatcatctatactctgctattcagaggttatctctgctaacctactgcaaaaattgaacaatatcgtacctactgttttgtaaccagcttctaagtccctgt

SEQ ID NO: 74322 - DNA, 1981 bp, Homo sapiens
gttctacatgcagtccagcttgtgaagcaaagagcatatcgaagccatgaattctataagttttgttctcttccagagaaaggaacactgactgaagcttttcctgtcctagtaagtttaattatagtttataatcctaacacaatttatttgcctttttggtatgggctaagactaagtatttgcatttgattttatagtttgtatttagcatgttgggattatatatttttttaatgccaaaaaaatgaagtagaaaaatagaaaatctaatcagggtacttgaaatcaagttggaggtaattatggctgtaattcttgaatagcatagtcaaagaaacatactagtctggtagattctcgtgccttgtagttaggaccctgatttagattattctttgttgtactatagattaatttctttaagacctgtttgcttgtcacttaacttattttactaatgctgtgttgttaagctatgaggctaatttgcattataggaaaactgctactgcttcatgtctaagttatctcagatgatggcagactgcattcttatctgtggtgttggaaatgatgactagtctttcttccatagaaggtgaaagtactgatgttcttccttcaatgcgctcctttgtgttttcagttggttctgggattttcccagtatctcttggtttctggttactttcatttgtgttcttccatggatcagtgttgcttcatctttttaaacttttaaatcactgattactagaaaacttactttaaaactcagtgctaagagcaggtgtttttttttccttttccttatctttattttttaatagggagaaagatgtaaatgaccataatgtcattttgttttggttgccaggtagctgtgagcccaaactcaattgtgcctattgagtatgccttacaaagttgaagtatctttattgtgtcgttatacttgattatttttcttttggtcctaattttttatttcacttcgaaataataaaatcacatttgctttattatatgtgctttcagaagctgcctaggatcttttatgacaagaagcatagggttatgagtaaataactatgtatatttaaatacaccatatctctgcaaatgatttgtctaactcttacttagcatagctgttaaaatttttgagttttcttgctacaaacaggaaaagtttgaaaacagaattgctctgaaacagctagtatttatattctgtaatttgagaaaaataagaaaagagatatattttatttacttttatttgcagggtggaaaagcaattgaattttgcattgctcgttggtgggcaagtctcagtgatgtcaacattgattataccatttctttccatgggatagtgtgtactgctcctcagttaaacattgtaagttccacaacattttcatgatttttaatgtcagttacttgtgttactggagagtaacttcattggttagatttaaactttaatgaggggaaattacctgtggttctgaagatagcagtaggctttgtgtgtgggtacttataaactttatattggacacatttattttaggtacaaaatattgcttatttttagtaaagtttgagaaagtaatttgagaaatcctttgtagcatgcatcggaaggaatcaaccgctttgatgttcagtcctccttgaaatacgaagatctggctccctgcataactttgaagaactgggtccaaacactgcggtatcattcaatgttttaggaactacagatattgaatatagattggggggatctcttacactcttaaaaaagggccttttttttttttaatccacctgcatgctagaggtgagaattttatccttgccagcagatctctgcaaggcagccccagtatcagcttctagcttcactgtcccacctgaccagcaaagtcaaggatggtggatagccgatcccagtcatgactagttagga

SEQ ID NO: 74323 - DNA, 2933 bp, Homo sapiens
agaaaggagattatacaattcgactacagattcgccatgagcaaatcagtgatttggaacgccttaaagaccttccatttattgtttctcatagattgtctaataccttgagcttagatattcatgaaaatcatagttttgcacttctagggaagaagaaatcaagcaatttgacattaccacccaaatataaccagccattctttgttacttccttacctgatgataagtaagtgataacattgcttatacttactgcccatcgtatacactgtagtccttttaatgtcagtttatgacatctaggctaaatttagaggatgtagtcattttttttttggctgaagtatttcttcctttgatttttgaagtcttagctatgggaatgaattcagtgtggaattgttttcatgtttttccccttacttgtctttgtgaaactttctcttttgttgctttttttctctttgaattctcttgtttagaatacctaaaggggcaggacctggatgctatcttgcaggatccttaacattgtcaaagactgaactaggaaagaaagctgtaagtattagttttttaaacactgaaattacctattaaaaaatttcatttctttaaagataagaattaattccacatttcagaatggataaaagagaagatatactcttggggaaaaaaatttaatccttttttcccaggttactagtgaaagtcagttaatatttagttgtcttttaaaatgtatgctacttttgaaatatttaggcttctttttcacaagcctacagtactcaggccctgaacctgtcttacctcctacggctaatacacttgaacttcctgtgaaacatgtaaatacaaatcaaacttggcttaaatacatgtgatatttaagattagaacatgttatagaaatttaaccaataagattggttgtccatataagattatggacataggaataaatcagattatcttggggtgcttttaaaaagtagtcagaacaattaccctaaaacatgtttcttcacacttctacagacctatctcattggaatttcacatggttaagtaggaaaatatgagatgtttcttttggtattgccttttaatttcaaaatgatgctttttttagaaatatgtttctggttgttgtactttagacatatatgttacagttttataagtacctacctgtttttgttttttccttctatgttttcattacaaatttattatgagaatgatgtttatatagatctatcaccttttgtcataataatcattttagctcaatgccagtaaaagttgtcattcttaacagttttgcatttctctgtactattacttcttacagagctaagtaagcctgctacataaatgctgttatcaaaatgagtagttctcatacatcttaagaattatatttattttttgccactattgaaccaaaagccatttatttactgtcattgaagcataattggggaaacttgtgcttagaaagttgcctaccctgacatttcttgggtctcatttcagtttatactgtttatacatacgtactttagtataatttgaagtaaatcaatagttaatggtttgtaattaatacatgcactgatttaagaaaccctggtagttttttttgtagatttcatttcacaggaagcatagctgctccagctattgggcgtcagctgtgaattttcgttcagatgacagatgacactttgaagagtctgcttacttgtgaagagtataacagaaaagcattattagtaaaagtgggcttttagcaattcagaaatagttactacttcccagttacattgttttaggagacaattgtgaaattaaattataaatatgtggtgttaactatggtagctatttatcaagggagaccttcctgggagaaagcagtaacttaaagctgttgagttcattataacttccatcacattgtttatgtaatcttttctcagtggtttagcgttttcttgttttttggtagttgggaaggtaactttcacttcactttgactttcacagtaactttgttgctttttataagaatgcataggcaatggggttgttgtggtaccctttaatcagactagaccatcaactaaatttactattttaagaaatgcttttataagcaatagattttgatctactaaatttttcaataagaagttgacatgtactcttagtaataacatatttgagtactttttcttatgtaaggaatgaaagtggcaatgttgctttctttaaaagcatgccatcttaatcacagacctgagccttctaagtggtgtaacacaggtggaacataaactgaaagacaattagacagaggttctgtctccatcctgtgtagattatgcatgttttcttacagaatgtcgttctaactcccaggggcagtctgcagcaaaacgacaaggaaaatttaaaaaggtactgattgtcagttcttaaaaaagatgtcttaaagccttatttgcatattaaacttttttctgtcactattataaaccttttttttaataagtctcccttagtttcctttctttgcattctaaagtatagtgctcttagctgtacttagaagcattgttgacatactgcttttctaaaggtttttttttttttccccaccataaattcctggatgactcattttctctgtgtatacaaaaattttaatgctattcatttcttgctacagatatgataacaagtagcaatatttgaaatttttcatatttacaattttatagagagatggatgtgataattttttttttttagccatataagctaaagcacttatttttaaagtctaaaagcacttttaaattgggtgatttgattaataaaatgttgcagctttttaaagcgaactttattccctg

SEQ ID NO: 74324 - DNA, 1052 bp, Homo sapiens
atcagtaatgtcctaatgtatacttgttaattagtagtgatatggaactggggaatcaccattctataacagcttatcctttattaaaatgtcttctgaaatgtccatattattacataatagtaaataatttgtccaaacaaaatacagatactaggaatcatctttctggagaaagatctaaagatcagtatttctcaactgggtgtcttgaccgtttgggggccacgtaatgggataaaaacagcatttttttaaaataggaaatgtcagttcatcagactcataaaattgtaatttcattttatgtattaatgtgtatatctttgggacattgtaaaaatagtttgcaagttactgctttagagaacaaggaataggtattctaggaatctattaaaaatagaaggcacttatcacgaaggccatagccaattatttttcttcttatttttgttgaccttttgcaagtttgggtagattttgtttgaattaggttgtatagttaggaaaacactgaatgaataggaaggcatttacttggtgattagtaaagcttcatttgaagaacttggcagctagagttatctctgctcgttcctttctgtcttcaatgcaagtacacaataaagctcttattttagaaataattagtattacagttttatagtcacattacaaagaaaaaaatacatgtataatttccggttgattaagataaatagcattttgtatataattcttaatagattttttcctctgggtttcagtgacttgatttgaaacggtatgtcaccctttttaaaattccttgtaaaatgcaataatatattttctgtttgtttgtatgtttttttaagagacagtctcactctacactccaggctagagtacagtggcatgatcgtagctcactgttgcctccagctcctgggctcaagtgatcctcccacctcagcctccctagagtggctgggactacaggcgtgtgccactatgcctggctaatttttactttttatagagagaggtcttactacgtatgttgccca

SEQ ID NO: 74325 - DNA, 1861 bp, Homo sapiens
cagcatacctctctccctgatacggtgaggaggtgtgggaagctcagggagaaagactggagaccactcttctagcacactgggtggcagagaagctcaattccatggagaatggagctatattaacagaaagtaaatattggaggccacttagcccctttaattcctagatgtgttgtctttgctgtacagatgacactgatgcagtctgtttccataagaacttggtggtagaagatcagctcagattttgcgcttaccttggctttgctcagggcagtgcctacccagagagtgaacctcaagaaggagaggagcaggacaggcagctgggtcctgaaagagctagcccaagcaatagacctgtttccttttcccagtctcatgtttcacgtgaggcctttgtttacaggttctggccccctgacctcagagggagaatgacagccagtggctacaaatggatttatatggttatctgacatcaaagtggttttctgtgctttaaatgagtcagtgtggagataggattattattttgtgttggaatactattagaactacaaccatagttcctgttgtttactgttacatcattttataccccgaaattgtgttggtgaaaatatttaaaatgggaatatttgtgtcgtatatgctcctaaaaatcctatttgcgggaggtgaggacttgcagtattatttttttactcaaccagagtaaagctttttcagtgaatgtctttttgggaacatttgtttcagttttacaaactttgttaattaaaatgaatatagtattttaatttagcaccattttaaatgcaaacctgaagatagaatttgaggaactgacttaataaataacgacttaattaaggacacccagttactgtgccaaaaacaaatctagcaggtatagcatgtgatttcatttcccaaataatgctttacctttcacaagtcaagacttatctgtgaataaaataaatacagttactctccatttctctgctgctgtcttcaaagcaaaacttctcaaaagaatcacagacatgttgacttccattctcttttcatctctgtctcctccagcctggactgctccactgtcccctgacactgttcttgtccgggggggtcagtaggctctgtgctgccgggttttcagttccttccttcttcgtcgtacactgcctctcagctaaatgggcagttgatcattttctctttcttcttggtggtttttcctcaaggcttccgtgatcccaggtgctttttgctttccttttctcactcacagagctgctttttccattcactatccctaactgaccttattcatccacatatttttcaacattgtcagcaacacattggttctacctttaaagaagatctcaaatctattcattttctcccatttctgcgacccatttttagtctaaggcagtgtagggtttcctaggtttgtttcctaacttgttgtcttcttgcctccacctttaccctctataatctattttccaaatagaatacaaaccaaaattttaatccatacaggaaccagagtcattaaacaaaaagcagaaatctttaatcatgtcactgtcttttgtaaaactcttctggtatgcttcttagtgcacttggaatacaatatatagtattttttcttttcttttttaaaccatattctgtcaagccctacttaagttggctgctgcctgctttctcagaagatacagctgtgcttgctttatacccagctcaggtctttacacttgctcatctgctccttgttcattgagggtcgtttgcgtaagatattacctcttcagagtggctttctataaccact

SEQ ID NO: 74326 - DNA, 1008 bp, Homo sapiens
ttctagaaaatgccttcaggcccacccttctctagttatatgctaatttgttggtggtaggagattgggggcaggttgaggagacatactggttagttgttacttattttcctcaaaactcttgaatttctcagtaattatcatcttgatttgtagctaatcagttttaaaacccaattcataaaagcatcgttgatgaacttttttggattttggttacaaaaacattttaaatctcttttagctctctactataattcttgcaatagcgtttatacaagttattaatcttcttttcctgtggaaataaaataaagtaaatggagtcagtaggattcccctcgcgtatcacagaccatcattttgttttagtagacaggtgcttgttctcagaattaactggtaatttgcagtaaagaaccctggaagtgggaagaaaattcttatatggttcagatttttccaacacagtacagtggtgcatttaaagaaggtactcagttactcagttatatttgggaaactgaaggagccagtattgcagcagaggtcaggaatttgaatctgaaattagagcccttgagtttggctcctgcctctaccacttttatgtatgaccttaggcaacttacaaaattttgataccttagtttcttatctacacgacctgccttaggctgtgatgaatgagtattaagtacatgcaaagtccccaacaatatttgctgttattgcaaacaattattgaaggcctatgtgccaaacactacttactactggaaacataaagatgaataagaacctgctttctgtctttgaggaatgtaacagagattgacaaacacttgatgaacatataataaaattgttatagatcattctatttttgcaatactactactatattaggggctatgcattctattacctgtttactgtgtttactgtgtctatggcaacaattgttaaatactttagttgcctttacaatacaaatcagtgtcagga

SEQ ID NO: 74327 - DNA, 1307 bp, Homo sapiens
ggaatgtctttcccagattttcgcacagatttcttgtcattcaaactcaactggagtatcacctccatagagatcctttcttaaccatctaactccccagttagtttatattgtgtcaaatattatttctactgtacacctgataaatatcttattacttgtttattcatttattaatttgcttattatttgcttttcctgaaagtgggaggtgaatttgttcagtgctgttttcccagtgtttgacatgatagttactcagaaaaaatgaatgaaaggaacttaggttggtaggaaggaaaggaacaagtaagttggaaggaagaagggaggaacacaggttaataggaaagagggaaaaggacagttggtagggataatgatgagaacaataggttggttggtaggaaagttggttgatagtaagaaaagttggttggtgggaaggaggatcaatgggtgggtgacggttggtggaaggaaggttctatatgctactaccttactgttactatttaatacagaatttattctaaatactgagcttaaaaatctgtcacttcctttataataatatattattgtattttgttgtagctgatgaagttacttggatggacccattgtgcatcttttactgaaaactggctccccatcatgtatcctcccgattattgcgtattctaaaataggaaacaagactttaaattttaaaaaaggaagttttatagtgaatgggtataaaaacaaatttgtggcatttttagtctaatgcatgttttcatccactatccagtactgattattaaaatgacatgtatttatcagagaattcactgacgtgtggcttaatacatgtaaatctagacctctgacatcatggtgttttcttaatgcctcacattgctggcacggggatgtgccctgcctgccagcacctaggacttcgagttgggttgcagcttatgacatgcatgataggttttggaaggtaacttttaactgcaaacctataaagtactattttttattttataaatgaacagggttttaacgtgctcaactttaatttttttcaattgtatgaaggccttaaaaaagctacattaagcgtagctaaaattatttattggactaaaaactaacagaacttcatttccagaattttttttttttttttttttttttggcaaatgtttacattcaattaaggggaaaaagtagaaccagcacaaatgagtggcagttgctggagcataactgcttcaataaatcttcatcttggggtaattacaggcaagtcattt

SEQ ID NO: 74328 - DNA, 1023 bp, Homo sapiens
tttgttggatttagtcccattttagtatccccttaaaaagtttgactgatgactctggatattcagccaacagtgttgtgtcaaaaacttgcttgaatttatctaaaaattcatagtcggtgctgaacctgaatttgtttgcccaaagcagcaccgtccctggctgggaaaggtacaccatggtggtgagcagcttgtccaggaagtagtgatggtagaccacatctgaggctaggacgtaatcatagtaaaaagctgacttgggaaagtttttgtccaggtcttccccccataccagttctttcacttcaggcagatgtgctgtacattgtagtgtgttttttaaaagattgtattgaaggtttcccaggacatcaggcaaatctgttgctgtgacttgagctcctaagagaaaaagaaaacaatgacctggaaacatctgggcagtcacagtgtacatatacccagggagaaacacaagaaacaactggattccttagccttggctctattggtgggtgggctggacatgtttgacctaatgtgggctggctaattcttgtgggtggtccgtcccgtgcactgtaagatggtgagcagcctccctggcctccaaccacctgatgtcagtagctcccccacctcacctcacctgtgggattgacaacagagattcagagtcatgcctctggactcaacttcgtcccatggaaactggttgattggagtttattaacctctctgagactcaatgatctctgtagataacagcagtaattcctgccgcatgacattttggggagagtcactgagtgaagttagggccaggcacctaaaccacagcctgtcatagagtaagcacttgctattgttgttacagtaaagatctggatactaggtcaggaataaacaaacaaacctaaaatactggccacaatggaaacaaggcctggtccggcaccaatttcaagtatttttgcatcttggaaattcaattcctcggcatgttcctccaagtattga

SEQ ID NO: 74329 - DNA, 1927 bp, Homo sapiens
attgccttttatttttttagcatttaagatcaatttttagctttttttttgagacagagtcttgctctgtcacccaggctggagtgcagtggcgccatctcggctcactgcagcctccacctctgggattcaagtgattctcctgcctcagcctcccaagtagctgggactataggtgtgcaccaccatgcctggctaatttttgtgtttttagtagagatagggttttgccatgttggtcaggctggtctcaaactcttgacctcaggcagtctgcccacctaggcctcccaaagtgctgggattacaggtgtgagccaccgtgcctggcctggtattgcaacttgttaattgctgccttttggagttaatttgttggtaaacagatatgatgaacagtaaaagatccaatttgccacaccatcactgctactttatgtgaaagtttatatttcaaactgaacttaattttaattgattttaggtcgttcaatgggctcaagagcagctgcttctgtaatgtgtcacattgagccagatgatggtgatgattttgttcggggtctcatttgtatttcttacccactgcaccatccaaagcagcagcataaactcagagatgaagacctctttcgtttaaaagagcctgtactgtttgtgtcaggctcagcagatgaaatgtgtgaaaaggtgaattataactcaatgtttgtgtcaatgaaagagaatgaaaggcagacatatcttgggagcaagatacttctggcaacagtgtcttttaaaaattgctaatttgactaatgctagttttgtgtcctggttactctgttgcttttgagaacctaaaaatataagtatagtgacaaaatttgtatccctggaaatagagttggtaaatatgacccttacttggaaaatgaaggattaatatctgaatcatctgattttgggattactacactatagatttttttaatcatttcaacattcaggcagagtatttgttataaaattgattcttgagaaagggttggcaatgtctacacattactaaatattagcccaatattatgaaacaactttatattccccagggcatataatttgcttgggaaaaagatttttgggggaagaaatttttttattccaatttattttacattttattagtaataaatgcttgatctgatactgctacagctgagagaagtggactgccacttttacggacatttcctcacacattctattacctagaaagttgtctgagaaagcatttaatgaatacttgggaatgaatgccagtataggcaggggagagaggaccttttattaaatatcaacagaacattagtctagtatcctcttctttttctctttagaacttgttggagaaagtggcacagaaaatgcaagctccccataaaatccactggattgagaaggcaaatcattccatggcagtgaaaggacggtcgacaaatgatgttttcaaagaaataaatacacagattttgttttggatccaagaaattactgaaatggacaagaaatgtcattagttaaaagccatgttatcttgagtacacatacagttaatttgataaagaagagtatgcctctcagcattgtgagatatatttcagactaatttgatgttctttaatgttcccttatttttgaaacacgttttaaatgtgaaattaatgtccttcacaaaatgtcttttgaaagcactgttacagttgtataaagatgatgtaaaaatattgaaggtggtctacatataatttattttcattagtatagttaagttttgaaaaaaattaaacatctgaattttgttacaaaaaggtgcttttgtcttattgataggcaactgagaaattttgcagagcagcgttatcttcagaaaaggaaaacatta

SEQ ID NO: 74330 - DNA, 1056 bp, Homo sapiens
ggtacataataagttgcttatggtggtttctaggaagtgaaaggaacttggtggttgggggaagagtgtgtggaaacttctgtttacattgtcttttaaaatgtaccatgtacacacgatacctattcaaaaatgaaatgtattcttcacctcaggaagatctatgaaaaacatattctgtaaattatgaacaaatactttgacttctgtttacatttttttaatgtaccgtgtgcacatgatacctattcaaaaatgaaatgtattcaccttgggaagttctatgaaaaaattctgtaaaaaattatgaacaaaccctttgacacagcgattccttccccaggaatttatcttataaatacacttacatcgtgtgaaaataagtacagtgctatgtggaaggataagtaagaagcagataatattggttacctttggagaggggaatctgatgtcaagtcaagagtggaatgagtgagactttttcactacatattcttggtaccttttgaactttaaaccatgttattgttacctattgaatgaatgaataaataaatgttaatgggaaaaatgggtgagtaatggagatcctgatgttggtaatgtcttaaacaatacaagagctcttaacataggaaggaatgctgcataacaaccccaaaatttcagtggcttacattttatgctcatggatcttcagatcagctgttggtcagatgttggttagactagtctggactccagacttcagttttgggttcagttctgttccgtgtgtcttcattttgagacccaggctgaaaatgcaaaaccacctagagcatgtttttctcatggctgagggtgaaagttcaaaagggcttctggaagtttgccatgcctcagctcagaagtcacacattgaaatgtctacctacattccattagttaaaacaagttacgtagccaagtccaaagtaaacagggtgaagacatatatactctgccttctagcagcactgtgaagttccatgacaagatgtggatgggtaggcttgggaactataatgatga

SEQ ID NO: 74331 - DNA, 1486 bp, Homo sapiens
gatggttttataagaggcttttttccctttgcttggtgctttctccttgctgccatgtgagaaaagacttgttttcttccgcttctgccatgattgcaagtttcctgaggtctcctgagccctgtggaactgtgagtcaattaaacctcttttctttataaattacccagtctcaggtatgtctttattagcagcgagagaatggactaatacaggtggtcaagcaaagaatctttgtcagtgattacatggatgttttcttataattaaattgcagatatatgtttaaattgcagatatatgttttatattcttctgtatgtctatttcaaaattcaaaataatttagaaaaaattatttgactggaagatgaatggaagagagaatattaggtaaaggaatttgtagaatatgatatatggttcagtgttcagatttttagttctttttaaattcttttaactgcatttcaaagtgattttcattcattcatttactcattgtgttaatgccatttttgtgttgctataaagaaatacctgaggctgggtaatttctaaagaaaagagatttattttggttcatcgttctgcaggctgtataggaagtgtggtgccagcatctgcttctggagagggcttcaggaagcttccaatcatggtggaaggcaaagtggagccagggtatcaggtggcaagagagggagcaacacagagagagggggaggtgccacaccttttaaaaccaccagatcatgtgaactcacagtgagaactcacttgtcactgcaaggatggtgccaggccattcatgagggatccacccctaagatacaaacatctcccaccgggccccacctccaccactcagaattacatttcaacataagatttggaagggacaaacatcaaaaccatatcacccattagatatttattcagtctttctagttgctggcactctattagacgttaggactacccagaagaaaggcctggtctctgaggtcatggcacttaaaatctagtaaggataaaatatgtgctgaaggatgtgtaagccggttgaagaaaagagggccaagacattccaggacaagggaaaggcaagagccaggaaggtaaggacacaggcattgacagaactgggagaggactcgttcttccagaggacagtattgatactagaaagtgctgagagatttgactaaagatgcaggtagaggccatctaatgactggccttgtacgaagtattagctagaattaagtttggctgaatacccacaataatatgggcttaaaaggagacaggggttcattgctttgtcatttaaaaccagtctgggcaggtggtctgggctgctgtgcattaaggacccagattctctctgtttttactgctctctgttccaaacacggctaataattagcacaacgtagtcctttaaaataaaggtggttttattataaaattctaaaaatgt

SEQ ID NO: 74332 - DNA, 1028 bp, Homo sapiens
tccgtgatttggtatcagaacacttctcactttggctctaagtgagactggcagcttccttgctccactcctgctcagttatttatcttcatctacgtgattgagaggaggtacccagccagtttcttccactgagtagtagaagttaggggccagaatgatagcttcgtttattttttgctcattgtctatcctagtctttcaccactactgttcataacatgaggcctttacagtagtacagcccatggatgtttgggttccttatcagtaggctatgaaacacaatgtgattttacccttagctgactctgggcctctggaaatagtcccaagccctaaaagcctctagcagcagcttggctccctctcatctttacaggaaaataattaacgaatgtaagtcttcttcacttgtgtaagacttcttgatagctctaaatattttgcttcttaattgcagaccaaagatgaactctgatatgcaaaataacttctattagaataatggtgctctgaagactcttcttaactaaaaagaagaatttttttaagtattaattccatggacaatataaaatctgtgtgattgtttgcagtatgaagacacatttctacttatgcagtattctcatgactgtactttaaagtacatttttagaattttataataaaaccacctttattttaaaggactacgttgtgctaattattagccgtgtttggaacagagagcagtaaaaacagagagaatctgggtccttaatgcacagcagcccagaccacctgcccagactggttttaaatgacaaagcaatgaacccctgtctccttttaagcccatattattgtgggtattcagccaaacttaattctagctaatacttcgtacaaggccagtcattagatggcctctacctgcatctttagtcaaatctctcagcactttctagtatcaatactgtcctctggaagaacgagtcctctcccagttctgtcaatgcctgtgtccttaccttcctggctct

SEQ ID NO: 74333 - DNA, 1036 bp, Homo sapiens
caacaaacaacaacaacaacaacaaaaagctaaactgtggccttgattacactttctctttcaagtagcgttgctctgagccacaagcattgcctccgctagcaatgtgaaaattgtaagatggccagtctggcagaagtcactaacaggctccaggttaaaatgagggattgattcagaagtagatgcagccataaatacagaaataaagagggatggaatgcaataaactttaagctaattgtctcctgaaatttgtgaaggcagctggctaagcttcatcttgcgtttacaaagtcatcagtttgcttggtgtacaaccttgtctctccaggagaggcttagttctagaaggtccaatatgacttttcaaacttttaagtcttagaaacctccctctgatttaaacaaacatactctgttaaatgttctgttttaccatgagactacccccaaagatattatttcccacagttgccccaatgtatacatactctgaagagcagtttgcagatgcctgcatgggaaaaatggattctattacaggattttgtcgttgttcttcctgtaggccaaaaagatagcaaaagcaggacaagaatttgcaagaaataatctcatgggcgatgacatattctgttattatttcaaacttttccaggtcagtattttccaagaaaatcatcacgtaacttataagtagacatgttaagaacaaataatattttacttaacaatttctaaacatatgttactatagggagatatatatacttctgtggatgaaaatcagagacaaatattaagtaatcataaaaaaatagttgaaaaccaaagattagctaatggaaaatgttacaatattaagcgaaaactattaatattagaactatgtgatgtctgactaagaaattggcctctgatcctacaaagttacagtgcatggatttgtatgttctctttgtgttacattgctgctgccttaccatttctttgtctaaacagtgccaggtgtgtttgggcctcttgtcttgac

SEQ ID NO: 74334 - DNA, 2051 bp, Homo sapiens
aaaaatgtattactttttttttctttgaaacgggctctcactgtcttgcccaggatggagtggcgcaaacatggctcactgcagcttcaacctcctgggctcaagtgatcctcccacgtcagcctcccaagtagctgaaaccacaggtgcatgccaacgcacccagctaattttttattttttgtagagacatggtctccctgtgttgcccaggctgctcccgaactcctgggctcaggctgtcttcctgcctcagcctcccaaagtgctgggattaccgacatgagccaaccttgctggcctgtaattctcttaaaatgtgttttcaatgaaaatgctcttcctatgtaactaagcaaaattcatgaagccacattatagatgtttattacaagtttcgaatgctgagtgaaatgatcactgttgtactttgttattcttatgtaaatagggccggtttaccatgagaactgtgactgtcctctgcaagatagtgcagcctggctacgggagatgaactgccctgaaaccattgctcagattcagagagatctggcacatttccctgctgtggatccagaaaagattgcagtagaaatcccaaaaagatttggacagaggcagagcctatgtcactacaccttaaaggataacaaggtacaacacatgattttttgcttgtttgttttagtgattttttttcttgttttgaacatttggctacaattagctaaatcattttataaacatcattcgaatgagcactgtgacaagcttttcctcagtgaagtctgccagcgtctttagactaacataataaatggtaaattctcttttaggtttatatcaagactcatggtgaacatgtaggttttagaattttcatggatgccatactactttctttgactagaaaggtaagtatatattttctcttagctgtaatagataatttaagcccagattttacaggataatttttcaaaatacaaattatacactatcagggtattctcttctggagccttatgataatactattctgaagctttctgttatttcaggtacctgcgtttgtttcctagggctgccgtaacaaagtgctacaaactggaagccttaaaataacagaaatgtattctctggcagttatggaggccagatgtccaaaatcaaagtgtcagctaggtgccatggctcacgcctgtaatcctagcactttaggaggtcaaagcgggtggatcacttgagcccaggagcttgagaccaggctgggcaacatggtgaagacctgtctctacaaaaaatacaaaaattagcctgtagtagtttcagctaatggggagctgaggcaggaagatcgcttgaacctaggaggtcgaggctgcatgagccgagatcacgccactgcactcccaaggcctgggtgacaagagtgagatcctgtccccccccaaaaaaaattaaagtgtcaggaggccagctccctctgagatgatcctttcctttcctttcctgcctcttcctggctgctgtcagtggccctccatctttggtgttccttggtttgcagctgcatcctcccatctctgcctctgtcatcacgtgggcttctcccctcatgtctctgggtctcttcttataaggacacagcatagtggattaatggcccagcctactccagtatgacctcatgctaactaatatctgcaacaaccctatttccaaataaggtcattctgagacactgggatttaagacttcagcatatcttttgcagggacacaatattttatagaggaaagaaaaatgccttatcataaaattattttggtactaaactaactctgagtccaaagatgacttgccttgtactgaatcccattccttgggataatgggcttttgttgggttctagtggaatggtttgaaagtaatgttaaaatggtggatgtgaaagactctaccaacatttttaccaaatgtatatttatttgtaatctattatatttatttgttgaataatttgcatgtatatcttgattaaacta

SEQ ID NO: 74335 - DNA, 1046 bp, Homo sapiens
attatcctgccttagcctcccatgtagctgggattacaggcacgcaccaccatgccaggctaatttttgtatttttagtagagacaggatttcaccatgttgaccaggatggtttcgatctcttgacctcatgatctgcctgcctcagtctcccaaagtgctgggattacaggtgtgagccaccatgctcggccattctgatgtttcttatataggatgagagtacagttttattacctagagccatctccttccctcttacaggcgacagtaccacaagacagtagggaagcagtgtatatacaaaggcagaaatcttgtcccccccttaacaaccccaagaaaagtaaacttttttttttttatttttgtgaactctgcagagaagtaagaaaaggtaaacacttttcaagagtgtctaggttcctttcctacattctgccagtacagcctggtacagtatcacccactaaaccttaaaaagatattccattgtcagccactgcctgggttaggtgggatctgagaattataaaaaggaataacagtaaaaacctcagtgcagactgtaattaatttgttataaaattagtgaagtggactgttttgagaattacttttgcttctttttgttgccgttgttgttgagacagggtctcgctctgttgcccaggctggagtgcagtggtgcaatcactgcttactgcagcctcgacctcctgggttcaagcaatcctcccacctcagctgcatgagtagctgggactacaggcactcaccaccatgccccactaatttttgtattttttgtagaaacagggttttgccatgttgctcagactggtcccgaaccctggagctcaagtgatctgcccacctcagtctcccaaagtgctaggattacaggcgtgagccactgtacccagctacttttgcttttttttttttttttttttttgagacgatgtctcgctctgtcactagcctagagtgcagtggtgcaatctcggctcactgcaagctctgcctcccgggttcaagcgatt

SEQ ID NO: 74336 - DNA, 1050 bp, Homo sapiens
atccagcgcgcggccggcgaggcgcctcctgttaccctggggccggcgtccctcgtcccatcggagcgagcgaggatgctgcggtgcccggcgacaggtcgtcggatagcattgacagcaccttcctttcaaggtgctttatgcctgccctctccacgtgcggagggcagggtgaccaacgcaaaaacctgagctgcgcctccagacccgtgcgcccctttgatgggcatctgtggtgtttatctgtcccccgaaagcggtgaccgagaagtaaataaatgggcgagaggtggtaaaatcctggcagtatttccgctcgtcctgtcgcgaactacatatcccagggagcccggggcgccgggacgcgtgtccaccccgccatccacttggagaaggcgttactgagcctggcccgacgcacgggccaatcccctcgccctacaccttggctggaacctgagacggattcgctcccaaatgatgctccagtggcaggagcaactcaagttcatcattgtcctgagagagaggagcagcgcggttctcggccgggacagcagaacgccaggggaccctcacctgggcgcgccggggcacgggctttgattgtcctggggtcgcggagacccgcgcgcctgccctgcacgccgggcggcaacctttgcagtcgcgttggctgctgcgatcggccggcgggtccctgccgaaggctcggctgcttctgtccacctcttacacttcttcatttatcggtggatcatttcgagagtccgtcttgtaaatgtttggcactttgctactttattgcttctttctggcgacagttccagcactcgccgagaccggcggagaaaggcagctgagcccggagaagagcgaaatatggggacccgggctaaaagcagacgtcgtccttcccgcccgctatttctatattcaggcagtggatacatcagggaataagtaagtcgagaaacggctccttacctattttggatggcggttaaatctgtttctccctttaagatttttctttccaagaactcgttt

SEQ ID NO: 74337 - DNA, 1030 bp, Homo sapiens
gaaagctattacaatacagttctcagtcttgtgtcccaagactgcattatgagtaaggccctgggagacaccagaacaagtctcataattccttttacttgttttctttttgcctgctgattagaagaggacttcatttgagtagttaatggctttttctattaatatcagcagtatctagatggagtgagaggatagatgaagagatgggtcagtcaaagtaaaggaaattaagggaagcaggaagacccagagaaattagaataagagagaaaatctatcaaagaaactctgggtatcgaggaaacatcagctatatacatttaatcaaattcccaaagtaagaacatatacttttataattaatggaatggaataaaacactaaaagggccatggagagagttgacttaggaatcactattctggaattttaaaagatttttgatcaactgtcttgtccaactttaagattttatactataattttgctagaaattctcatttgtagatcttttgaatatctgtactttatttattttattttccaatagtctggtacctcccaagttctttgtgacttatttaaatgtaatgatttggtgcatgtgttaaccagttcccttaataatctaggatgtgtagcattgggtcccaatgactttttttttttttttaacctatttgtttaaatttcctccagcatacatccaaacttttcattgaggaatgggataaactacctattttccttaaatttgttttcttttgttagggggttgaggtgcttactgtaatttgagtaagttttaatatatttttcaagttttattcctactttcaattttttttttccagaatattcgactttttactgcttttctgtgtgcatttcctgaaggataattaatctgcgtacgcctcctggaatatttttgtctttacctttgctaattgggggacccagttaagccctgcttcatctctgatatgttccttggccaccttagccctggattcctctaaattcc

SEQ ID NO: 74338 - DNA, 1030 bp, Homo sapiens; identical to SEQ ID NO: 74337

SEQ ID NO: 74339 - DNA, 1030 bp, Homo sapiens; identical to SEQ ID NO: 74337

SEQ ID NO: 74340 - DNA, 1030 bp, Homo sapiens; identical to SEQ ID NO: 74337

SEQ ID NO: 74341 - DNA, 1037 bp, Homo sapiens
tactccaccaagaaggcgcttttgcacattgttttaatgcttaacgccttcaggatgccagcgtgacggaagcaagtaaccaccaaggcatcaccactggcgctaaacttctcacttccggagtgctgcaagcgcagaaaatatacgtcatgtgcggaggcggagcttccgccctgcgcgtcgtattagacggaaaccgagcgggcccatttttcatgggtttgcggacccaccagcgaaggcgggaggtgtcgcagggacatcttctggctgtttccgtcgcctgcgtggcccttgcaccccggtcttccattagcggcgcagacgtttgggcctaagcgctgggcgaggcgaggccctgcccctccccgccaacggccattctctggacctgtctttcttccgggaggcggtgacagctgctgagacgtgttgcagccagagtctctccgctttaatgcgctcccattagtgccgtcccccactggaaaaccgtggcttctgtattatttgccatctttgttgtgtaggagcagggagggcttcctcccggggtcctaggcggcggtgcagtccgtcgtagaagaattagagtagaagttgtcggggtccgctcttaggacgcagccgcctcatgggggtccaggggctctggaagctgctggagtgctccgggcggcaggtcagccccgaagcgctggaagggaagatcctggctgttggtatccttaacgccgcgttgggacttggggtgcagggattcggggctggattcctcgcggggctctgccttgggcacagtggcatctgcaggatgatggtcttgggtcggggtcggggtcgctatagaatctctgtcactaggttttctaagtacagtcgtccctcggtatccccggggctttggttccagcccctcctccgtataccacgatgttcaagttccttcaactcccttatataatggcgtggtatttgcatataaactacccacttccgtaatcttttaaatcgtttctagcttacttgtaatgccg

SEQ ID NO: 74342 - DNA, 1063 bp, Homo sapiens
gtttttattggtatgttttatttatttatttttttccatcgcaaatatttttgatccgtggtaggttgattgcggaatcgggtgatgaggcgggccgccctgtctgctttccccagctttgcagtcttagcggcctgtgcatcctggtttgtcactttgtggcagtgctttatgttcctctctgccttagttctctcatctgcaaagtagaggtggtgatagtatctacacacaggattggaatgaggaataaagaaattgcctacatgagagaagtttagtgcgattaatacagtaaatcttaaagttattatcctgtccgggaggtcagtaaggagagcagagtagacttcgacgattagttttgcttgagtcttgccccatttatgtttcttagaggaaggatagtgtggacaggtgttttacccattttttaaattgactttttaaggactattgtttctgtacatgtttggctggttttgtttgtcattggaattaaattcttttttcattagcaaaacgtgatactgcttttgaaatttttatctttttctttgttatgtagtcattttttttttttttttgagtatctattctggctcagaatctggtgataccttacaccaatttcctaaatggggatctatgagtctaggggctcgtgggcttgtggaaagagtcctgtaaatgattgcggggggattggggacgggaaatggagtgcaagagtgtgtgggcgttcagcaaaggaatccctgactgtggagccctaattcttcagtaggtacaaaacttataaataaaacgacattgataagttttaaaacataatgagattatcattttttgcaagtgaataatctttaaataaatctgtaattgatttttggcttaaaagtttttatacagggtactttgaattggggaaagccaaaggatttttgttttgttttgttttgttttttgttttttagagcacatgcgctgttgctgccctcaagctgttgcttagtatcattgcagtctaaagattttctcagaaataaagggtaaaggttag

SEQ ID NO: 74343 - DNA, 1023 bp, Homo sapiens
agtgaaatgagacaagtaggctgccattttgacctggtaatttggagttgtggcaattctccgttctgtgagaatcaactttgctaatgagaaaaaaaagctgtcgtgttgcgtcatgtacactttttactttgattatggtcttcttgactctaggtgagcagccccgccaaggttccttcctttctctcggctgcatttattttccacagcagtggcctgagagcagccaggtcaggtccctgttcaccatcctgagcagggtctgcataatctgtttaaagatttgtgtactttccagagatgaagcactacccagtcttacccaagttcgaagagaaaacgacctctatgttttgcctcctttacaagaggaagaaaaacacaggtaaatgtttaactatttaagaatattattttagtcattgctacattcagacacatttaaaccttgatgtgttatctacatgataaggcatgtgaacatttcttaatgcatctgaaataggcatgctctatacctttcagaatatttttcaaagactaaattttttatttactattctttgtgttttggtgattcatgattcttattcctcttcattctaaagaacttctgccagggctgtggattctaaattctccaaggcatgaattttagttttgcttacactttgcttacacatgctgtctctagctgcttttcaatccagtatggtctctctcaccatgatgctaaaataccacaacccatgacattcttgttgctaaatctagcagacgctttgcacgtcttagtgtgctcgacttctctgcactaaacaccatgccacactgccccgctcccccggcatctctctggcgctttctgctcagcctctctgtggactcctcttcctctgtctctctcttaatggttggtggtttctgtgtttgaagtgaaggtggagaaccggaagcttggcagtttgcctttgtcccctgtccttccctccacctcttcctttcccaggagttcccaag

SEQ ID NO: 74344 - DNA, 1053 bp, Homo sapiens
gcgattctcctgcctcagcctccggagtagctgggattacaggcacgtgccaccacacctggctaattttttgtatttttagtagagacgaggtttcaccatgttgtccaggctggtctcgaactcctgacctcaagtgatccacctgcctcggcctcccaaagtgctgggattgcaggcgtgagccaccacacgcagcttagcttctcatttctttaggataaaactttaactccttaattacactttccagtcttatccctgcctttcttcacatcatccacaggcaggctttcttttccttgtttctatatggtcatacaacttagttcttttgcctggaacactcttctccatgaaccttcccgctccctacaactacactcattaattcgtggctaactccaaccagtgtaattgcaggagatcctggaaagcttttgtgactcctaaattgggtgaggtgactccctattgcatctctagtgacctgcccttcccttgtggtggaagttattagatcccactctaattgcttacttacacgtgtcccccaccagaccatgagaccagtagtggcacagatcttgctgttttattcaccactgtagcccgtataacgagcagagccttgcatacaagtatttttgtaaggggtccttaaaaatcatagatatcgtaaaagtatgtttgactttcagttcagaagaggaagatgaaaaagaatggcaagaaagaatgaatcaaaaacaagcattacaggtatttagatcatttttgaattcagaatgtattctgttatttgaaatgaatgacatgaaaatgaatattaatgaggtatatcaaactgtgaaagttcctgataaaaagtaaagacagatggctttttggttgtgcatatatatgtgtacatgtatgtatttaaaacacactcacctacacacgtgtatatatatatatatggaatttgccattatgcacatctatatattcaaaacaagctatttttcttttacaaccaaccaaccaatagtaatatgtgcttacatagaa

SEQ ID NO: 74345 - DNA, 1048 bp, Homo sapiens
gatctgcataaaaatgacttttctatctgtgatattgtgaagaagcgaaaagaaattggtgctagttttgctgccgtaccataaactgcaaaagtcatgacctcagcgtgtgataagtgctcagttaggatggaaaagccattacattttggggtggaagacatgaagagaaacatgttctgattgatgacaatcaggtttggtacttctgcagtttcaggcatcctctgggggtcttggaacataccccaaggatgagggggctgtctactatgttaatagaatcaattgtagtaaattgacatgcttttgatcccagatctaccacttattagccctgtgactctagggaggttacctaacctatttaagtcccaatttcttcatttataaaatggaggtgatatctgtttcataggatgattgtgagaataaaatgaggtattatatgtaaaagcacttagaaaaatgccctccatgggaaatgccttataatgttaagtattactgttaataactgtgattactgtgatttattgtgtcttttatgggataaggttgtgcaggacacttcacttgcatatttacctacattctagaagattgttaagccataatcagatgtcatagtgactgctatgcattacatgctcaatacatgtttattgaataatgattaaatcataaacagtattcatgatttttttttttttttttttgaggggaagtctcgctcttgtccctcaggctggagtgcaatggcacaatctcggctcactgcaacctctgcctccccggttcaagtgattctcctgcctcagtctcctgggtagctgggattacaggtgcctgccatcacacccggctaatttttgtatttttagtagagacagggtttcaccacgttggccaggctggtctcgaactcctgacctccggtggtccacccatctcggcctcccaaagtgctaggattacaggcatgagccaccgcacctggccatagtattcatgatttttttttgcccaactctttcgaagattattt

SEQ ID NO: 74346 - DNA, 1048 bp, Homo sapiens; identical to SEQ ID NO: 74345

SEQ ID NO: 74347 - DNA, 1048 bp, Homo sapiens; identical to SEQ ID NO: 74345

SEQ ID NO: 74348 - DNA, 1048 bp, Homo sapiens; identical to SEQ ID NO: 74345

SEQ ID NO: 74349 - DNA, 1049 bp, Homo sapiens
aggcccgtgggaggaacgcacctgctgctgtagacgaaggctccatatcaccccggactctttcagccattaagagagctcttgacgatgacgaagatgtaaaagtgtgtgctggggatgatgtgcagacgggagggccaggagcagaagaaatgcgtataaacagctccaccgagaacagtgatgaaggacttaaagtgagagatggaaaaggaataccgtttactgcaacacttgcgtcatctagtgtgaactctgcagaggagcacgtagccagcactaatgaggggagagagcccacagactcagttccaaaagaacaaatgtcacttgttcacgtggggactgaagcctttccgataagtgatgagtctatgattaaggacagaaaagatcggctgcctctggagagtgcagtggttagacatagtgacgcacctgggctcccgaatggaagggaactgacaccggcatctccaacttgtacaaattctgtgtcaaagaatgaaacacatgctgaagtgcttgagcagcagaacgaactttgcccatatgagagtaaattcgattcttctcttctttcaagtgatgatgaaacaaaatgtaaaccgaattctgcttctgaagtcattggccctgtcagtttgcaagaaacaagtagcatagtaagtgtcccttcagaggcagtagataatgtggaaaatgtggtgtcatttaatgctaaagagcatgagaattttctggaaaccatccaagaacagcagaccactgaatctgcaggccaggatttaatttccattccaaaggccgtggaaccaatggaaattgactcggaagaaagtgaatctgatggtacgtgtctgtgcttttgtagaaatctggaacggtaggatttcccctctgtaggaattcagagatcggttagtgtagtcccgttttaactttttacagataaggaacgagagacgtagaaagaaagatgaaatgactttcccagggagtcacagctggtcatggaatcttgaccttccctgtgttgctctgctttt

SEQ ID NO: 74350 - DNA, 2928 bp, Homo sapiens
tgagtccgagagcctcctgagggacaactctgagagggacgacgtggatggtgagccacaggaagctgagaaagatgcggaagattcgctccatgaatggcaagatattaatttggtaataccgtaacattgtgtttcgacttcttgctgaggaagccaggttaagtaggttttgagttttaaggagttggtggatgagtatttagtagctatttgcagtacatcttgtggttgctgatggcttcatttttgtgtaggttactggctgggatagactccgttttccatgtggtttagtgatgaatctctaaagatattacagagtcttggttagacatccagtggagtacttcctaaggagaaagagcttattggtaatttcagtcagactaaatgcaggctttttgtaaacaaaactcatttggattattaatataaatctataaatgaaaaaacattttataggaggagttggaaactctggagagcaacctcttagcacagcagaattcactgaaagctcaaaaacagcagcaagaacggatcgctgctactgtcaccggacagatgttcctggaaagccaggtgggtgcaggcagcttgggtttcctttaccaccttcttcagacccctgggggaatgcactgcatgaagggggtatgcactgtgccccctggtgctcagggcctggtgatgccgttccctgggggtcactgtgtgtccctaactctgcaggaatgaatgcattacatgaagtggtaggcactgctccccctgtgctcagggcctggcggtgcccttccctgggcgtcactgtgtacccctcactctgcaggaactcctgcgcctgttcggcattccctacatccaggctcccatggaagcagaggcgcagtgcgccatcctggacctgactgatcagacttccggaaccatcactgatgacagtgatatctggctgtttggagcgcggcatgtctatagaaacttttttaataaaaacaagtttgtagaatattatcaatatgtggactttcacaatcaattgggtaagacttcagagtctttttgattactttctgacatttaccttcagagtttgtcctaggaagttttctttccaaggaactagtttgatgcattgatggaaattgcaggtctatgcaaatttttatatgagtgatctttggcttatatagaggaataggattttaaacatttgaattaaggaattaaagtcctagtatgtttaggtagttaatcaactgacttagttaaactttgactagttacccgagatctccacagtgaacaaaaggtggtggagaggggaagcaggccgcgcctgggcctgtattcgggtttctggcactgatcttcttctgttcatccagcaaatatatgtttggtgactcctatatgccagttgttcttaacaagagggaaggaacagagagtaaaatagtaggagaaacagatgataagcagatacataaatcataatttgacagttggtggtaagtgccaaatagaaaaatataacagtaaaggagaggagagagtgaacttcaggcatcgagagtgcaggtgctgtttcagagagttgttgggaaaggctttactcgtgtaacttcaaggcagggacctgcaggaaataggaagcaagcactgtagatagatacctcgggactagtgagtgaaaggggctgaggcagaagcttgtgggctgtgttctagggaagcaaggaggccagtgtgagaggaggagggaggaaatggcaagggttaatcttagagaataggaagaagctgaaacccaccagggtctggtgtgctagggtatgcaggcagattgaatgtggggtgggagaagaatgaagtcgaggaggattccagatactgagcagctggtcgagtggacctgccttcagtaagacaaggagggagcacagtggaggaggagaaacgaagtgttcaggtttggatatgataaattggggatgctcattggatacccagtggaggtgttgagttgatagttgaatatatgtgactgtggttcagagagactcaggctagatagctaactttgggggtcagcgtatagagggtatttaaagctatgagaatggatgaaactttaaaaatattaacagaatgccattgaataaaataatttattttcaaataataagatatttttggtggttggatatagatatagatatacacacgtacatgatttatataataaaatgtttataaatgtcatataagaaatcttgataaaaattaaaaaatattgttactctttaggattggaccggaataagttaataaatttggcttatttgcttggaagtgattataccgaaggaataccaactgtgggttgtgtaaccgccatggaaattctcaatgaattccctgggcatggcctggaacctctcctaaaattctcgtaaggtcttttatttctttaatttggataattgtgtaaatacccaaataagcaaatagaactattatttacagcatgaactgtcatgctgtaacatgtgaacaatggttcactgagaaagcagcagaaagtattggttgttttccattttctagagatgatgaaatcagagtcagttcttagtggtgctgggcttatcctagttcaagggtacaaagccagtcctgtggatttcacaggaatgtagaagttgccttttcatccattgacatacttatagagcagctatgatgtgtcagacactgtgctggccctggggaaaggagagatgagtaaggcataggccataccctcaaggactccccccatatacttggaggtgatggagaagcaaagcaaattgtacttgtctgtgtgtttggtgtcctgagagaggtcagccaggaagcgacttggaaatataatgc

SEQ ID NO: 74351 - DNA, 1125 bp, Homo sapiens
atagtaatccaatgtgagtgatcaaggttgagcttgttgatttggtttagaaacttgacttacttgtctgatttattattattattcttttgttatttttttagacacagctccgaattgattccttctttagattagcacaacaggagaaagaagatgctaaacgtattaagagccagagactaaacagagctgtgacatgtatgctaaggaaagagaaagaagcagcagccagcgaaatagaagcagtttctgttgccatggagaaagaatttgagctacttgataaggcaaaaggaaaaacccagaagagaggcataacaaataccttagaagagtcatcaagcctgaaaagaaagaggctttcagattctaaaggaaagaatacatgcggtggatttttgggggagacctgcctctcagaatcatctgatggatcttcaagtgaagatgctgaaagttcatctttaatgaatgtacaaaggagaacagctgcgaaagagccaaaaaccagtgcttcagattcgcagaactcagtgaaggaagctcccgtgaagaatggaggtgcgaccaccagcagctctagtgatagtgatgacgatggagggaaagagaagatggtcctcgtgaccgccagatctgtgtttgggaagaaaagaaggaaactaagacgtgcgaggggaagaaaaaggaaaacctaattaaaaaatatgtatcctctataattagttatgacagccatttgtaatgaatttgtcgcaaagacgtaataaaattaactggtggcacggtctttgtatttagtgtgtggttcctaaaaacaaatgctaaatctgacatttgttttttaatgttttacttttctagtattttttagctgaatatttcaagtatcattggatattatcttgtattcacaggctttgtcttttcatgttttcattatcttaacaatgtctgatccttcctggtcacatgttaaaaaagcgaaaaagatttctattgatcagcactcactctcaataggctttccctctgacattcagacgtagctgagaagaaatacgtgcatgtttctaattccacaatagtggcagttttacacaactgtttagccctgctgcc

SEQ ID NO: 74352 - DNA, 1046 bp, Homo sapiens
gtgaaggttaacctaacagttaaacaatgtttggttctatttccaaaagattttaatatgactccgtctctgaaaaataaagcagaagaagtactgcaatcagtacattgactggaccaacaaaattagcagcattccatttgagataataactcaaaattacttcctaagtaagactccatgtacttttacaatttattactaacacaaaaagattgtacaaatataattaatcttctgactcacagaattttggtaatgcagatttcattctgacagcatcacagccaatgcattgccatttttaattcacaagtaaaaaatgtattattccagggttctctagttattaaggtaataagagtaattaacagcaccctgctggctacacatggcttggactgtgtgtttccgggtttgggtaaatgggtggcactgatcaaagccttcttcctgaatccctgttgcctcacattgtggtagctgtggctatagagaatccccaaagacaactctggaaaagacataagtatctgggaagattttgcccactatttcacagcagaattcaaaacctaagtgatggccctatggcgatgctcagagagagacataaacagtgcaaagtgaaactgaatatcattttttctgagattaaggtaatgccttcatctaatagtcatttaaatttttcaatatttctactataaaaagtaaatctatttcattcatttcgttttttgaaaaacattaggtgtgatttgtttgttattttacaaaaaaaaagaatattccttcaatccacttagctagtgtaaaaagctacaggatgaaatgcccacgttttgagatactcatgactcaaaacaaacaaacaaaaaaaacccctactacactcttttccttaagctacttatgcaaatgttaaatttttttaaataaatctatttgctattagcgtccatgaagatgctaagcttaggtccacctcaggaaaattgttattgtaaaacatatgatgtgtgaaaacctaatatttcagtttt

SEQ ID NO: 74353 - DNA, 1075 bp, Homo sapiens
aaaactgactcctcaaaaaataacaaaagaagttctaattcagtctttgccagtttccattgtgtaactcctcccaccatccaccatgatgcatttcaggtaagtggtgaatgtgggcatagaagaggcatgcaatgggcattcaggagcccaagaggtcggctccagcacagccctggaccggctcctgtatggacaatacaagagtgagccatattgagggaggagataggaaaacaataaaaactgtcaggaggccacaaaaagcttagcattctggagtcatctgatatacgagcaaatagagtcattctcagcacaaacccagcatgatcatttatcagcgtgctgaggccctgaataaaaggcaaagtcagcatagcactgagattgagagctgcaatgccaaggctgacatccggccctgccaattgctatttagttgtgtgacttggtgctggttttggagcctctctgggcctctcagctcctttttctctaagatctgaggctcactgcatctgacttaaatggtcactgggagggtaaactagttactattggtgaagcatctgggaggtgcctgacacataaggttatgagctgaactgtgtttccccaaatccatacattgaagtcctaaccccagcatcccagggtgtgaccctgtttggagataaggtcttcacaaatgtgattacattaaaatgaagacattagggtggacccccccatgacttgtgtccttataaggagaggaagagacaccaggtctatcagaccattcttgcattgctataaagaaatgtctaagactgagtcatttataatgaaaagaggtttaattggctcagagttctgcaggctgtagaggaaacatggaactgttcatctgcttgtcttctggggagggctcaggaagcttgcaatcatggcagatgggggagcaagagagcaagtgagcaagtggggaggtgcttttaaataaccagatctcaagagaactcactcactattgctaggacagtaccaagggggatggtgctaaaccattaataagaaatggaccccatga

SEQ ID NO: 74354 - DNA, 1050 bp, Homo sapiens
accactgcactccagcctgggtgacagagcgagactccgtctcaaaaaaaaaaaaaaggaaaataaattcttctgtatttttctttcttcaagtgaggccatttaggggaaagtataccataaaacttgctctaagataaggcaaatttggtattataggatgaagtgctatgtgatttgaagtaatgctgaattttttaaatatattaaactaaacaagaataatgaggccctcggaaagtcatgattatatttctcatttttctcattttaaagccacagtgaaaaacacataaaaggaagaagttagaaaaaaaaatgaatgaaattctttttttccttttggcaaattaaatagatgtttctgtttcagaagattttattaattaactttaaagaaacagtcatttatttttggcattcagtgaacactatcatttccatgtttagaacttttcttctaagttagcatcttaaaagataactgtgaaactcaaggcattcaactacattaatttgagtttcagaaattgaattcttgtttctagagtacatagtttgaattgatgtcagggtgttaaatagataaatcttagcttcctaggttgtatattcacactaattatttttttatcagccttcttatttttcaacttaccttattctttttgtttttttgacactcagatttgatagccctgtggtagaagaaaacagtaatacagtttggtttgttgttgtgtttgtgtttattttaaagtcacggctttgctttccatgttgttactggattatgctttttttaattcttcagtttgccaagataacagtcttccgatcttcagaagtctgtatcaagcttaaggaaactgatgtgtaggaagactcgcctaagaagtccaaattagcaaggctagcatgtgaggacatgctggaaaagaatagttcccatagatattgacagagaatgttcataaaatgctacttgttttgtggttacatgagagtaacttgtgtccagtgcagctgtatgtaagggcaacgttttta

SEQ ID NO: 74355 - DNA, 1013 bp, Homo sapiens
atgttattgtgtgctggtttctttccatggagaggaaaaagagacctgatgctttggaggagtgcttgacttttccccagtgaggagtagtccagagggactgacttgcattggggagtaccctacatgaacagcatttcagaagaattaaaccaggaacctagagtcctacttgctagtcctgcttcctaagcttaatgagaaagtcaattttatttctttgaactttaatttatttccctaaaaaacgcttttagtattgtcattgttctggctaatgatggcggtctcctccagtttcaagccaccttagggctgggcatacaaatgcaatataggatcacttgttagtgtggtttcaaatggacatgatcctctgtaaattctttaaaaacatttaatttgatttgtggtgttacctgctttaaaatatagtcatcacacttgtgagtttcagacgtgaatatgaatttttaatttgaactgtatttttaaacacactaagtattaactaagtccccttaggagatatgtggcaaactgatatgcatcctcattcattcttctcatagatggttatttgttttttaacttgtggcaaaattatatatgaatggtcaccgacttaaaatagttccacttaaatttttcaactttctgatgggtttattggagtattaaatgtattttcaatttaatgatattttcagcttaccttgtgcttatcaagtatcaagacatagccccacctaagtcatggagcatctgtatatgggtttttattcttgtttagaattgactttttcaagtgacctatttcagtaattagccctgggcctgatttgcataatgagatctcctaatcttcaagtaatgcaaagatggagatattatggccatgtggtctgaagagaccttttctttattatgttcagatctttaattgccttaaaaatagagtagctaatttacctaacctctagttattttattattgtctttaaagttttttt

SEQ ID NO: 74356 - DNA, 1039 bp, Homo sapiens
taaaaattcatattcacgtctgaaactcacaagtgtgatgactatattttaaagcaggtaacaccacaaatcaaattaaatgtttttaaagaatttacagaggatcatgtccatttgaaaccacactaacaagtgatcctatattgcatttgtatgcccagccctaaggtggcttgaaactggaggagaccgccatcattagccagaacaatgacaatactaaaagcgttttttagggaaataaattaaagttcaaagaaataaaattgactttctcattaagcttaggaagcaggactagcaagtaggactctaggttcctggtttaattcttctgaaatgctgttcatgtagggtactccccaatgcaagtcagtccctctggactactcctcactggggaaaagtcaagcactcctccaaagcatcaggtctctttttcctctccatggaaagaaaccagcacacaataacatatttattataacactgctcgttctgaaggcgcttaccaactagacactcagatttggggttaaacccatgtagaatttattaaagctgaactcaaatgctaatattatttactgtctcaaagtgaaccaacgatttgaagtgttaaaaatatacatgtaaattttaatactttccgtcatgctacctagcactatttataaatgtactgatataaaaattactaacttcaaacactttccttctcaaaaaagccagtacagagcttgactgtgtgtgtgtgtgtgtgtgtgtgtgtgtgtgtgtgtgtgtgtgcatttgtctgatatgcaaagtagtgactttttaaaatccattcattgttttggtgtcttggaacttatgcagaagcaatacaaagtcaatattaatttctaaaactattttaacatttgttctctgcatttcccatttcctttctagggaaacttgtagatcaatgagctttgctgtagggtgggtgagaaattggcttctatattttcccaagtatctgaaacgccttcctctgcctacgccatcgtgg

SEQ ID NO: 74357 - DNA, 1069 bp, Homo sapiens
tcctggcctcctggggaagggttgcacatctgagccgtggtctcagatgactgcctcggaagaagcctcttcccttcaggcaccactgatgtgtgcttggtgtggagctagactttccctggctctccatgtgacgctcacatgtgcgtgtcttgatttcccttaacttcatggcttatctatgaacagcttgatttgggggaaaaaaatgtgtttcccaatgctggagttataattgaatgtgctgcagtcaaaactgaaatgtgtgcagagaaagggggcttttcctgtcatgctcattgggcaccagtgtgtcttcacctgttttgtgtgttaggtccatgcgtcatgctgaaatgaagaacatgggatgtatggggctttggacagtgctgagccaaaagcaagtgctcaaaagcagctgtgtttgtattattagtggttctggaggtggctgattgccttgcattttaagtagagagggattgtagaagactgccaatacttagaactttttccagagaggaagggtcagaaactgcatctgcagggctccttgctctccagaaatgccagtgtgcctgggagggcatcttcagaaatccagtctctcctcctcagtgtgtcctgtaccgactcagtggttctgtcttcagaattcctatcatgtctgtgatctgcaaatagtggtatttaatttgacttcaatttgtataaatgttagcttctatttgttcattcctattttttgttcaattaatacattatttattgagcatctactctgtgtcagccccttgggtgtttaatactgaattagtcacatgtgggacttgcctgccctcagggagctagactataaattcctaatgatcagtggtctccacttttctgtcactcataatgtctggcacaacataggttacttgagttgttacactcacagtactgttgtttgctgccatggtgctttaggaagtgtgagagttcccgggaggcagagtcaataatgcagactacacgtagtgaaaacatggccaggagagctgtagttcaggctctcagctca

SEQ ID NO: 74358 - DNA, 1035 bp, Homo sapiens
ctgttattgcagattcaagtttgacaaataaaactttcctttagactgtagtttaattactttttttcaaaggtatgcgtgatgaagaggcacaaatacacctcaccttgaagagttgctaaactggtttgtgtgccgatcagttcaccgtgtgtttgaatttctgtgcttctcatctttccttttcttgaaaagattttgcttgtcattggtgtgaattgtaccccccacccccacccatctagtctttgctctcagatttataacactttaatggttccaaattgtatagcctgctcttagaccccttttcttttccttgaataaatcaggttcatgttgcagacgatatttgttttaggaaagtgtgaaagaaggggcacctgtgaaaacacgcaattgttccaacacacatatacatccaaattaaagcagaaaatgtcaaagcctccaatcactaccttatttcttggaggtttaaagccgctgagaagatagtggtgccctcgctggaagttttaaggtaattactttttactctaagcagtagtatctggtaacctaattccgtataaacctgacaccctatcgctacaccccagtatttctctgatttcagaataagtctgcgtagaaacttgttctgatgttaaagtgcaaaagggggcagtaaagtgctatccacaaaaaaggaaaaacattttccaagtatttcttattactgcctgtgtctttcgtaggccctgcctttatttattcattttataacaaaactcttatgtttggggcattcagagaataccttattaagctgttgcagcaatctagcattaaatggaagacatgcaagactgaagatcctgcctgtttatgaagtgtgccatcaaattcacatgctcatgatgcagagtccttctttgggagtattcgtattcccaagtgcacagagcacttcggaaaggagccttggtctttggtgttaatgctctcctagctccgtatagatgtggcaggcccaaagtacatggtggggtg

SEQ ID NO: 74359 - DNA, 1183 bp, Homo sapiens
ctgggattctggcttcttgccggtggattcattcagtacagcccatctggcttttgatgttctgcaagtttggagccatttgttgaaggaagccaggcggtgaatattggtggtcctggggttctcttgactccaagtggtgccccttggtttgcattttcaccatgcttagcatctgcttacctggagaccatgcagccgccggccagaggtctccaacaaccaaatcttcatgccttttagaactcagagtccccagcacatcctccttcctcctccttgtccaattactttcatgcagttctcagtagctgcttgtttgaatcacttatagtatttaacttctagggtgtttttgggttttggtcaaggtaattccaggctgaatgtggtgactaagcaggaaataaatgggtcgtcctcaaagttacagtggagcgctgtttctattttcctaaggtacacagttgtgggggcgatccgtatggaagtcaggaacccagtctgattttgcttccttttgatggtagcagtacagacctggctgttttgtagcctgctttgtttttcttccttttcttccctaacttcacgggctgtggcaaagccctgagacgtgcaggaaaatgtctcctgtcatacgcccacagcagacctagccctgaccctcctctgaagcccaggaaggaggtatctgtgaagcagcctgcttgtaaagcaattgcacacagccttgtaaactgtgttactgggctgattatacttgattggcaaggtgaatctcttatagcaaaagagaacttggagagttttatctcatcttatgccttattaatttgttcattctttaattacacagccacctattgagcaccctatttatgcaaggtacctggtcgggggtcagagggagggtcccatggtaaacgagacagactcaatcctggaggagcaggaatggcagcccctcgctgggctgttggccccaccaaaagggaaaggtttcattttaataatacatgggtgaatcatttttgtcaataggcaaaattctttgtagttaaaaaaaaatatgatggtaggaaggaaagggatgggcagagggttaaaacaaaagatatgctctccctaactctagattgtagtattgttatgcttgtcactgtagctgaattccatttct

SEQ ID NO: 74360 - DNA, 1082 bp, Homo sapiens
gccttccatactttccatttcagccattaaacaaaataagccattgaaaccacgattgggttccatgcagagtgacatccgcaatcgggtcaagccagaaggaaatacttgctcgattgccccctatttggcattacaggaaagtctccacactttggaagagtctgaactctcaagacattgaaaatgccaaaggctgcaaacaccctgtgtctttcttgatggagtgcatcttggtgtgttttacaaaggggaattcagtgctgtttttttgttgttgttgttgttttttttttttaaagagcagcatagggcccttctagactcttggattctgtgtctgacaaaaatggtcattaaatgagcaatattataatttagacccatttcactgattttgttccaaattctcaactgacttgagcatctgtttggggctgtagatacattgcccttgttgactgtttttctcgtttctatgggaattactgtagccattactatgtagctttcatagactcaaaacatttttaaagtattgcatataggctggccatatccagtgcctgttactttaccttctttttctaacttaatgcagcagtctgtattaacagatccatttcatttgtctagcttcatcagagagaggctaccccctgatttacaggctgctcacatccaagcaccttgcattctacacttgacagtgattgctaatggcccattcaactaaagtatttgcttgttaacagggaacagaacatgataaatgtccagcaagcttgctgcctccttcagcttttcaaacgcagactggtgcatatttatggcaggcaaatgacaaaagaaaaagctgaattgccctggcctccagctttctatcagaaacagggttaaagtgattaaagcaatcattcaagaaagccctgccgtttgtttactaaccttcatccaacatttagctttgtagtctacctgtgagaagatatttcagaagtattagagataaggaaggaggatctagcaaaccagtgaaaagagtaggtgaccagttataaaatgctttccatgcacattga

SEQ ID NO: 74361 - DNA, 1486 bp, Homo sapiens
aattggtggatttatattaaaacctcttgtctgtaaacttactgaggtgcatccttcggttggtggatcagtgagataattgccttcagatggacattgcaactggagcaactaaatccttgctgtctttccttcctctgaaatcttccaggtagctcccgagagcttcagtatgacaccaaacttcgggcgacgttttagagtgcgttcacctaatgggaaactattcgagatcccagcgtgactgcagtaatgcgtcataggaatgggagtggcaggggaaaaggaaatacagattgtagaccctaataaaaaaatttttaggaaagatatttctttaacgttttatgagaacttcattcttaaaatacttaattgcaaattagacaaatagaagtgctcttctaaggaaggtgattaaactggtcctcctatcagcctaatctctgcctgcctttgctgctgacataaagaacctgtttttcaggtcacttaatatacatctacatagatttgcttatgagctcaccctttgtgtagcggagtagagccttaaagaggagtgctcaactgtttaaaatattttgattaaaatatgcagaacccatagaactataagcttctagtcaggaattagctctttcagggaacagctccccccttctttttaaggggggaattagaaggaggctgggggaggaatataagaacagcaaagaaggaaggatagcaaatgggacatgttccgaacagcttggaaaaactcctgtggcttcattgtctctataaagccaaagaatacaaagacataagcaattcagcccttctcccatgatggaagatgtaaaccgttgacatgcctcccctgtttaacttgtttaattctcattttaaattcagcacgatactagccgtgtgaactctgaagatttctttagtaatccattttgtagttccgaatcaaaaacaaagtgaaagggtctgacacaatttgcttttatttttaggcaaatcaaccctggtcatagttaataaggggattacaactcagactaggtctttacagatgtgatgtaaatcaagggcagagtataaagaaactgatcccttttgattgaagtatagtaaaaaggcatagagaaactagcagcagtaatctgattgtatggcaataaaaccaccattttctgtctttcagataaaaataatgtggtaaatccatgcagttcataagatgtaaaggcagataaagggtgaagccatggcaacatatagattagcttgatgttagaaatgacacgtctctgaaaagggcgcgggacgaaggcccttgcctccaggctgttgggcattatgtgagaaccacacagacttggaaactgggattaggaagtatgaaagctctacttgtggtctgggatggctgaggcagtaaagaaaagctgctcagttcttgctcattggtggtggataatatggcaaaggt

SEQ ID NO: 74362 - DNA, 3346 bp, Homo sapiens
aggaaaaaggttttagagagctgtatcttaaagatacattttagctctctgttggattttccaccatgctcacctgccagattctctcactgcttgtaattctgatctttgttatctccaaccttacttgactgcggttgatttgttccaacacctatcttttagtctacgtcacattgctgtctaaacttctttgcgttcttccctttttgctacttaagataaaatctcaacattttttattgcataccggagtcctgttaccttttccatcttcctctgccataaatgcctgtaaaccagtcactttacactttatttaaaaaatacatatatatcaatggagacaaaagaagtaattagtgtgtggcattagagaatgtatcagaagagagaacgtttttaaaagacttaagtgaacagaagaatttatttgaataaagagaaaaatcactgaatttgatagattttgaccatacagaagaaaattttagtagaataatggagatggaatcaatgacctaaaatttgactttgaatgggaataggtaggcagctcaaaggatgcagcgaatgttttaagatcactgtcagatagaggggaaaaaggataaatcatgataactgatattaaaaagggttagagcaggctttctcaattttggcactgattggatcattctttgttgtgggagctgtcttccatattataggatgtgtagcattgtcccagtcttccacccactagatgccaggagccattcccagttgtggcagccagaatcatctccatgcattgcctaatgtccccttggggaagggattaaaattgtgcttggttgagaattgagaattgaagatgtgtgtatggtatctctaggaagcatgagaagggcctgactttggtaaagagggggaaatctgtggaagaatgcgggaaagaagttgcttgacatggaaggagttgaaggcactgcaggagtggaatcagttataccagtgtccttttgaaattagatagcactttatagttagtcaggtcagaaggttttgtaatatttttcttcaggtaattgggtctgtcgtgtttcttggttgtctactgatactataatatagtcccttttttttcagcatgatttgaccacacaaaaagccccagtggagattttttcctatgtttctgtttttttgtgtgtgtgtatgcccttcaactataaatatggcaattggtagataacctgctctttgagtaaatctgtacctcggtttataattaacaatctattaatctggtacaatgaagttagagataaaaataggtatagaacaaaatctgtcatctcaacatgtgatttgtggaaattaatttccacttccaaaatgtgtaaatgcttttccataatttgttcatttattttcattgaaaatgaaagacagaaaatgtagatgtaattaataaagggttctcttttaattttcttaattcttttttctctaccaaactatgtgaccttcgtcagattttatgacacatgccattgtgtgtaagttgtcacctcataactaaaatattttgaaggcatgtaattcataggaagtccttgtttttacccccttttttgcatttgcattaaaaatttttttgtagatacataatagataacacctgttgcaggggtacatatgataatttttaatacatttctataattaatttttacttttaactttcaggccgaagaacagttgagaattgttgaagaacaaagaaagattcatgaggaaaggatgaaactagaacaagaacgacaacgtcaacaaaaagaagaacaaaaaattatcctgggcaaggggaagtccaggccaaaactgtccttctcattaaaaacccaggattaaattgcaaactctgaactttttacaaagaaaaatggaaaaactttgtatggtagcttcatgttgaagtggttttttgtttttgtttttgtttttttaatttgtaaaatctggaaagttagcttgttctaataggggctatgctctgcaattccctttttttttttttttttccttccactaagtcaaatccttatcagatcattgttgtattctaaggagtgacgtatttttcacctgtttggattctatattagtggtctgaggaagagcagatcacattgtaaaactatggatggtctgataaggcttttactgaccccactgacttcagagttatactctgtttgctacatcataatgctggttttgctgactttttgtttttttatatatttataaaaaaagaaaaagttggtgattgcattgggaaattcccagggtattactggacctatgtggtgtattgttaaaccagtgtccttgtgatactgttgctcttgatgttcctgatacaggtaaggaaacagttggtcaactctgatacaaagtatatatacagttcagtattgtctctgttcattttgtttttatttcattgacaaaatcaaaccagcattccccattgtgtaaataaatgattttgctgaataaagtaaagtcttaaattcatatgttgaagcaattttttttaatgttatgttaagtcttaaagagggtggttcactttttgatggtcaaccatttagaagtcttagaactatatttcctcttgtttatacttttaacatagggtttatatgtacattaaatatacttgtgaattagtatttaatggctatttttacaaatatcaactttatgctgatagagcaaatggcatcagtgttacctttaagaaagactaacaacatccagaagatttaaattctcaaacctgtgcctctgttttaggatataagtattatcacaaagtatacttaataaaggctagaaaaatgcttttaaattatggaatctgagatcgttttcagagtgggccatcagaaagaacttagctttatactgtcaaaaaaaggctaagatggtcgagtcattttcattgtgtagtgtacttgcacgtttatttttaggacaaacacatttgaactttatgaattttttttttttttttgcatgtgaaatcttatgaatggctttcattttatacactagaatctgcctcatttactcttaacatatgtttaagtatactggtattaaaacattcaagaaaaggatattgatctaaaatgctacctgagatgcataaacatgtcatcaagtagagaaaatatttttatttttgcccaatattttttagacagtttgattattcttaaaaattgaaaacataagctaaagagatgactaaatggtagattattttgtgtgtgcatgctaggaa

SEQ ID NO: 74363 - DNA, 1432 bp, Homo sapiens
ccaagatcgtgtcattgcactccagcctgggcaacaagagcaagactctgtctaaaaataaataaataaataaaatagggcagagattactgggaggggtaagtaggccttttaactataatggaacatttttttgtgtgtgtacttcttaccaccagtcactctttagcttggggtacaaagttgaaagccacctttgtgagattgaacagggttatgggcataatggctaggagggtctgccccagtgtattggttctggtattgtggatgttagctttctccttggcctccaagctgtccactacgtaatccttgtgagtgagttgcttagtattactcatctgtataaatacatatatgcatccccaaccccccatgcaaatactgctttcttgtgcataaatgtgaaacaagcagggaaaggagcaatggttgtattctccggcaagtcaagtcatcaggaaagaaaaagttactacagagagagggtaggatttaggaaaatacctagcaaataaggtatagggtcataccacacttacaagtggtggatgaacaggaaaccagcttttatcacttgagagactatattaaaatgagagatgacggttgttagtgtttgaatagtctttttttttgtcaaagtgtaattaagatttatgcctaaagccatagtagaacaaaataccaatatttgtatatagacagtatattcaactaatttttaaatcattgcattaaatacttctagtaggcactgtatgcctagcattggtgattaacattgttgagccgtagtcccggagaaaatcaactctgctgtacatacatacacaacacacttttgccttctgtatttgtagacctaagtgaagaaacttgattctttacccaatctaaagtgcagaattagtattttatctgaaggaagttgctttactttaaaaatcttgtttttttaattaggcaaaatgatcacatggttcaaattttgtttttttaggaagagaaacagtgaagtccctttaccttacccccaacccaatccccaattcccaaccccgtctccaaaagtgtactcagttacgggtttttaaaatcttttcagaatgtctgtaaaagcatattcaggcagatacaaatgcataatattttaattctccctttattgcacaaaagtagcatgtacacaaggaactttctttttttcatttaacagtgtaacttggagatttttccattgcggaacataggggcctccttttttcctcttacttgtttttaatggctatacaatattctcctttatatatcttcagtaatttatttagtgtaccccatattggtggatatttgggtttttttcacattcttttctttctataaactgtgttgtaatatgtaaccctgtaaatatatcagtttcgca

SEQ ID NO: 74364 - DNA, 1056 bp, Homo sapiens
ccagagtttgctttgcgagatggctttcttttaaatgagtttgtatgataggctgaaaaatcccttctgtcctctctccatgaaaaacaatctgtattctagtgcctggaatttgaatgtgcccatatatgacaaggagggcggggcttttgcagatgtgattaagtatcttgcaatggggagtttattctggattatctggtgggccttaaatgccatcacatgttttcttagagaggcagagggaaattttagcatatagcacagacaggagaaggaagctaagtaaagacagaggagagagatttggaaatgttggcgttgaagattgaagtgatgtaggctgaagccaaggaatcctcgcagccaccagaagctgtaagagacaaggagcagactctccgctaaagactccagaaggagaatggacacccttctgacaccttgctttcagcccagtgatactgatttcagactcctggcctccagaataaatttattttgagctgtttagtttgtggtaatatgttacctaaaaatgtggaagtggttttggaattggacagtgggtagaggctccagttttgagtcacatgatagaaaatgcatatgttgcctttaaagactgttggcaaaaatatggattttaaaggtgcttctggttagggctcagaagcaaattaggaacatataaactggagggaaagagatcctttctataagtgatagaaagcttggctgaattgtgtcctacagttgtatataaggcagaacttaaaactttttcatatttagctgagaattctaagtaagtgttgaagttgcagcctggtttcttcctgtttatagtaaagtggcaagaaaagctaaattgaagaatgaactgataagtatagaaagaaccaccagcactggatgttgggaatatctcaggctactcagatggcaaaaggtgttcactgttagaaaaactgtctctggaaagaaggccaggggtattgctagacagccttttgtttgtgtggaagaaactatgcatgtaactcataggttccc

SEQ ID NO: 74365 - DNA, 2013 bp, Homo sapiens
aagatggcacggtacacgttgaggcccacttccacttttattgcctttttccttccccttcctctcaattttgagcactattctttaatctttatgtatgtttattgggaaatatgtaaaatacattcaaactcctattaaaagtacttgataccatataaagcaagaagaatgagaagcattctggcctctagaaagtgatgaatgatgaagggtgatcaaaggtaactgtttgctaaaatctatattgagaaaaacaactggatggaaaagtagacaagccattaagtgctttaaaataatttaacatattttggaaacaaagacaactccaaaaaaagttactaataccatggaaatatttggtaagtggtataggtaatgtaagataatgacatagttgccctgggtggcctcggaaaccttcctagaagaggtagtcccttgagctgggccctgatgggtaggtggaaattctattaggaggtagacaagagtgtgaggaaatgaaacagggcaaaggcctttggggtagtagaataaaacaaaggctagggtgtggaaacttgggatattggaagaaggagctatagtaaagtagcagccatccaactttatgtatgctaagaagtttgtgtggaaagtggattatagaaaagacaagttgataatgaaagtaccttggaagtggggagggagatttcttaaacattttaactgaaaaaataatacaatgatgttacagatcagtaaagaagactaacttcctaattaaaaaggatatttgtacacaagtaggacaagaagcaactacaatacatttctgaaaatatatctcaacctcagagaaacaaagaaatgtccccctcttttctttttccttaatagaaatcccctaaagccattgtttttcatagtgtcctgtgttggcgggttattatacagatacctctttacctgatgatcatgagaatttaaatgggtataacagtttccaaagacaattaacagtaaatcagtaaatataaaaaactttaattctgtgtctaagaatttatctcatgagatagaatcatttacaaatgaatttatgtacaaagatactctcaaattatttaaaatagaaatgtccaagttgttggattcattattattacacagtgggtttttctgtagccaaaaagtatttgataattcaggggaaatacaaaataggaggtagctaaatacaaaatttatatatccaatatgatccttttattttgagaaacatatacttgcacattttaagagacagaaaaataagccaaaatgctaaaaatagttatccttaattggtagtcttacgtgtaactttatacttttcttcagtttctacatgctacaagtaatgtatatcacttttttttatcacatagaaatactagtaaagaagttaaagtcatacttttgacttttaagtagccttttgtgacacaagttcacagattgaatcccgtaatgactaataaggaatgtgttagcctagccacacgagctcatccatatgtgaaaatcattaagtgctctaatccatgggtagttactgtttttttcagttccacattgtgtaccaagatatttggtttgtcaacagagacaaaagtattaaccaacaaacatactttatttacaaagtaaaagcatccaaatatgacttgacttggctttttggcagattgttctttgttcttgagttagtgttggcgacacataactatctttaggtatttgaagggttaatacaatggaaaattttaattttcttttgttaaaaataatgcttaaaattttttgaagtcttcatggtgtttttatgatgtgcctgggaaaatctcagatactgttctgaaatgtatatgaattttacttttttggagagggaaacagacttaaaaattggggatagattttgctatagaataaaatactcttccagaaggttgtgtcagcagaaggaagaaactctcaatc

SEQ ID NO: 74366 - DNA, 3577 bp, Homo sapiens
attagtccagcaatctgaatctcttcaatctgtatttattctctctttgcttagcgggaaatcaattcagccaatctgagttgcctgctacataatttctccttctctgtagctcagccccagacgaagtgattggcaaatgagcaaatccatatgttttaacaacttgtcctctgattataaagtcaataacagaataggttttctgtccggatttattgttcctaaattagaactaatgaattaggctctttgtatatacctgttctcctgtatttagaatatgataaaggaaaaaaagattttatactcatttgaatttctgtatcagttaacatcttggtatctgtcatttcctcaaatgtgacatggaaatgaattctgaaaaaatcactgaataatatcaggctcaatggcttgatagacttaaaactagttttgtttaaatttatagttttaaaagtaaatacctaacttgtttttttcactttgtttgctagtcgacagcaagaaatagaagaaaaactcatcgaggaagaaacagcacgaagagtagaagaattggtagcaaaaagggtggaggaagaactggagaaaaggaaggatgaaattgaacgagaagttctccgaagggtggaggaagccaaacgcatcatggaaaagcagttgctcgaagaactcgagcgacagagacaagctgagcttgccgcacaaaaagctagagaggtaacgctcggtcgtttggaaagtagagacagtccatggcaaaactttcagtgttgggttctgcctcctgctcagttcagaaagagatggaatacagactatctaattcctttctcgtctaaacttaacattgctgcgaaagttaattttttagcctattcagaagtgctgactgataacttaaaagttggaagcttttataaaacatattcaaggatactttttgatttaatggaactggctatttgagaagtgtttgaaacttttgccatggctgcaggacttacattcttttttgggaggacggtggggagacagggagtggtaaagggaaaaggttaaaaatccacctgtggttgtatattcttctattctgtcactctgttacctagactgtgagaggcttttgccttcagtcagattaaaaagagcagggcctaacattgagtgatagcacctgctttgataaataggttttctcactcttctttttttccttcttttatccctcactccctcccctaaaccctgcttcagcacaatggactaattctagcattctgatcataaggccctccattttcctaatgtgtttcaaggaatctttttaggaaaaatatccagattattcatccactttttttagtatctactaacaactcctttttttctctagagagttatgaaggaacaggttgtccttgtctggagtcaagctaaacacatgatttgttttatcagcagctggagcagaagttgaaaatgtctttctgtgagacagtaatttgctactgaagctttatggcttgtttgcactgattactccaggatccaaaaacttggtgaaagtcactgaaacactcaaggcaaattactttacagccctgagtgtctgtcaccatagtttgcataatgaatatgaatcccattggtgtgtgatgtaggaaatcctgtagttgtattttcttgaactgaaatatttgactcaaaataattaagactcattgtcatttttcatcttggcattattgtggacaagttgacatattaaatctctttgctttctggtaagcttagcttttaaaatgcattttcccttgtcctgtctttaactagatatacatgcttatatttatagtgggtttcacagactataaaattgaatgtatgaaatttttatttatatcagtgcttttaataatgaagatatttttggagtaatggtgctgtcttgtagcgagttattaatcatagtaagatttttttctcttcatttgctttttttgtttcatattaacaattttttttttacacggacacaaccctctgacagtctttccaaatattaaaatcatttgaatatgtatgctgtgatctgaacactgctcaagccatcaagcagtcttcatacagtttgcattataaaatctcattaaattctccaagaaaaaataagttgaagaattttatttcctgaccatgcatcccctggatttctgagtttcagttcagattgtagatgacaatataagctgccttccgaaattgtcaacatctgaatgttaagtccattttccccatggaagaagcccgtagttccatgaagtatggattaccatttgtatttttcactaacagtaaatgtatttttcttattaattgtttgccttaggaatgatgaattacattttttgttccttcttaccataaacatctgcattcctcagctcagccttccttgtatgttgtttctttataaatggttgagctgctgatgcaggtattgccaagctaacagtacaaatcattttaaagaggaagctggcgcgtatggcagccgaggagcacactctgcaggacactggacaagacagtaaatattcaacttttaatgctgattaaaggagtataggtaaagaatacgtaggtatacataattggtgagacaaatattcactttatttatattttatatattatttttttaatttggtaaatactatccagttttgtagttgtccttgttgatttgtgtgatattaaagtattagtaataattgccaggaaactatcattagggagggtttagttggttgctgtttggactgggagggatgatttaaatttagtgctagaaaccaattttagtgactgcacagtttatcatttgtcagacagaaggtagctataaagctaccctgtaagtcatatcaaaaaagttcagaggaagattagtaaatatttatcaataaaaataaacattttgtttttctaatatcttaacatatcctcccctttaggaggaagaacgtgcaaaacgtgaggagctagagcgaatactggaagagaataaccgaaaaattgcagaagcacaagccaaactggtaagtgtaaagcatacatgaaaagtgttttgtattttgctttatttccttttttcggattttgtggattgatttttgtgccctataatttgacttattttggggggattctcaggactaactttaaaggctttttgaggcaaggataggaacaattgagatttttccttccaatctggacagaactccaaaatttgcagtgattttaaaaaacaagttttctggggaaattattttgttctctatccccagttttttctttcctaacctcattcacattctcctatgcctaaaaaactaatagcaacaacaaaagcttgggggtatatttaaaccaactataatatgcagcattttactttgtattagttggcttgttaccaggagtagatagtatttatttgatagtaagtgcaccggagtaatttcctattcctagtttataatcttaagaaatacagagtctt

SEQ ID NO: 74367 - DNA, 1050 bp, Homo sapiens
attattattattattcttgggtactcattatccagattcaacagttgtcagccttgtttcattgattagttttctttccttttgggtgaagtagagaaacaacattttatatggaaatgtgatttaatttctattgaagttgctgtctggtttccttttatatgctcccagtgattgattttttttagtattggggaagatacctgctctctcactgagctgctgtagataaagacttcaaacaacaaagtcctgagaatgagtgttgggcaaacatctaggcccttaaaggaaaatattctttctctagtacctactgtctccttgacagaagaatgtagaggataaatgtagaaactgaaatgaatcagattaagacacattggtgttagtgtgttatcactgaataagtaacaggagttgaaaatgagagcccttgggtgagaattgaatcatcccgaagaatagagttgagttgaagtggattggggtatttaaaggtcacttagaaactataaagtctttactaaacagataaattgaatgattctcatatatatggatgtcaaatgagtgatcaaaagataaaggttgcaggttttatttaattttgagaaagttggaacatgaatcgtcctcttaggattgagatttactgcaagagcctcagaatttattcattcagcacaaattattgtctcagtgctattaactagaaatagtatgaacaatatatgcaatgtaaaatttttttagtaaccttaagaaatggatgaaattaattttattgtatatttttatccaaaatatcattttaacacgcaatcaaataaaaataggagatcatttatattctttttcttcatactaaatttcagtttggaccagacacatatgactggtggctgtcactgaatatcattggtatgaaatgtgcaggatttccagtggtgccttgatgaatgtcagtaatttcagcacagaattttattttgagtaaattggtttataatatcaaaatgggattggagtaattaaaactgtagtatc

SEQ ID NO: 74368 - DNA, 1150 bp, Homo sapiens
taagtaaatgctgtttgctaataattattaagcgattcctagaagtaaacccctaggattgagttcccacattttaaagatgttttaaaataatggtgccagttactctgtaacagtgccgaagtgctgtagccttactgttttgtttttaatagttagcattttaaagttcagtgtgactagtggtttttttttttgttttttttttttttttttgagacagggtcttgctctgtcgcccaggctggagtgcagtggtgcagtggcgcaatctcagctcattctcctgcctcagcctcccgagtagctgggactgcaggcacccgccaccacacccagctaatttttattttttatttatttatttatttttatttttagtagagatggggtttcaccgtgttagccaggatggtctcgatctcctgacctcatgatccacctgcctgggcctcccaaagtgctgggattacaggcgtgagccaccgcgcccagcctgactagtgtttttaaaatacctgagagcacagagaaaataggacctagtattataccatttcattgaaaaccttgaagatcttgatttaatgctttcgtcagtataacatattattggcagggaaatggatattcagcagaggagcatgaggaaaacattagagaaaagaacatcatgagggtgacaactgctatggcaagggttttgaggagtgaataggctgttagatgatacctattttgcaagacactgacccactcaagaaagttcagtgcctcttatgggagtaggcataatagtggttttatcattgattatgatgataaatttgccatcagtaaagatgaactcatgcttaattcagttgtatatgtgctcactggtttgctgaattcagtgtatggtgaggggataaaattgagctttccttcagcattgtttctaaaatttgatttaaaatttttttctgattactgaagtagcatttttaattttaccaagaaaaacagcagaaattatattcttgctaacacttgcaggcaaacagttttgctgtggtaccctgaaccctgcctgttgcaaagcttcattttcatattgggatgccttgcagttcctccaggaacaaagggagataagcagctttgtgag

SEQ ID NO: 74369 - DNA, 2454 bp, Homo sapiens
aggaatgaaatacggcaaatagaggagctatatggttctctggtttgagagaagacacaaactgccaatagtatttaggagggagaagggaccaggactagcagccacctgtactctaaattcctgggtgccgtacaataggcattttatttaatatattctaatgtcttggaaacaatgcaaaagaaacaatggaaagacttaagtgttggagctttggcagtgtaaggaaacagtttgcagtctacatatcctgttggttattttattcatttaactgatgtttattgagcatttaataagtgccaggcactgtgctaggtactgttaatataaagatgattggcccttctccaagagcttgatctagctcaaagacagatcattaaataggcaataatacagtgtagtaaatttagtgacagtaatataaactgtataaaggaagtatcctgtgtgggtggaggatataagaatatgacaatgtcaggcaaggtataggacatatgtggagcacagaaaagagcctcctcccccgactcctgccaaaatagaggaaatggtcttaaaagtggaatgatcaggtgactgttgacttagaacacgaagttctataaatatttaagtcatggagtgactggagaggtaaatagaggctgggaatcatgttagggttattgtatgtcatattaaagagcttggattgcatcctagaaacgggaaggattttaagcaggtgaatgacatggtgccttttttgttttgattgttgtgtaggatggaaactaagaggtgggtacagaagtttacacaggagtagtgaggatggttgttggaatggaaaagagggacagatttaagaaacattcagggtatattaaatggaatgtgggacttcagaaaaagaatgttggttctcatgtttatagtgtggctgttgcaactcatctaccaaatgtttcagtaacaaccatgtggcaggtactggtaaaaatgtcagaaactttttaaatagtggataagggagagggaaaggggataagagaatggtgccttcactgtgagcactagttttggatatactgtactgagtttatccagacttgatcatgtgagactgaagcctagctgagaggggcttcgctgaatgtcgtgaaaccttgagagtatatggaatgacccagggagagtgtggagagaggagagcggttcattcaagggactgaaagaaccttaggacatgcctgtatttgcagttaggaagagggagaagagcctatggtggaagcagaaagaaatatggtaaaaatgcatagtgtcaagtgcccttacaagaaatctagttagatggaaagagaccgtaaaataagaatcaaccattgggtttaactaattaggaattctttggtaagattggaaaccttattggtttaccacttataattctgagttgctgaataaatcacctccctctaaccttgtttttaaatctgtgaaatggagataatctgtcttgcttgttgtgaaaattggagatgatgtatttaaagtaggtgatacttggcatgtaatagctctcaataagtaatgttatttaatgtaactaacttacatggagccagaccgagcctgatgaatttcagaagtgatcttatgagttgtcatcttaatgctgagaaggtaggcctttacatttttaaagacttttgccctcaattttgaataggcagttcacatggttcaaaattcagttcaaaagatcttcctctcatccttgcgtcccagccattcagtgtggttcttctcacccctcccccacaccagtagcaccattttcttaaatgctcttttgagatgctgcatgcatgttatattaactgttgaaaaaatagacaactgaaaataacttgcagcaaatcaggaaaatgttaatggcatagtaacttactctagcctgtgatatctaggttcgaatatcctccgtgttcaactggatgacggattaagggccttctaaattagagtatctacactgaactgggatctatataagtgattcttagaatacttgggcagttcattgtgagagcaaagaagagcttttaggagaaaattgattatatggaaccgcatatttttggaggttaaggctctgacagaacattaaggcataagacctagctgatgttaagaatatgtattcatttatttatttattatttttgtagagacagagtcactatgtttcccaggctgatcttgaactcctggcctcaagtaatccttctacctcagcctcccaaagtgctgggattacaaatgtgagccaccgtgcctggcctatacttttttcttcctttttttggtcgttaaatctgtgtgcttgtctttgccttgcttatttgtcctgcagaaaccggtgtagggtggtagtatagtgcttgcttgagatcg

SEQ ID NO: 74370 - DNA, 1020 bp, Homo sapiens
gaggcggccttcgtggcagctgtagacgccgggaaaaggcataaagtccgttggccgacacctttctttcctccggcctcggtagaaccgccagcccgcgtccgaaggcggaggcgaggggaactggccgcgtgaggggcctgaggcgagcggttagagcgtctcccggaaggatgggccggtctcggagccggagctcgtcccgctccaagcacaccaagagcagcaagcacaacaagaagcgcagccggtcccggtcgcgatcccgggacaaggagcgcgtgcggaagcgttccaaatctcgggaaagtaaacggaaccggcggcgggagtcgcggtcccgttcgcgctccaccaacacggccgtgtcccggcgcgagcgggaccgggagcgcgcctcgtccccgcccgaccgcatcgacatcttcgggcgcacggtgagcaagcgcagcagcctggacgagaagcagaagcgagaggaggaggagaagaaagcggagttcgagcggcagcgaaaaatgtgagtgcccgcgcggggagggaccggggcgtgcggagagcagggcgcggggcgagggcgtggggccggggcgggacggtgcgggccgggagaatggcggggacggtccggggctggggaccgggcgcgggaacgggtcggagaggcggcggcggggcgggcaggcttggcgtttggaaagcttggggtgggacagacccagaagttgttcgggatggaaaattcgagggcttgagcagaaagggtttaagagaaggcgattttggcgcgagagaggagtggtgtcccggaagtaggggtggagttcggagtgaggtcggagagctgcgttggcttgtgaggccgggagcgagccggcctgcagatgtggagggtggtgagcgtttgctggtcggcttgaggaggagagagaagggaattaacctttgagatgcgaatcacagctggccagaagcattctattgaagctcaaatttgggacaggacttaactaatctcgg

SEQ ID NO: 74371 - DNA, 1069 bp, Homo sapiens
cttcaggtgtacgtccctataaaaaattcactgatacgtgtgctggaaaaccaggcatgccactaccattctgcttcccatggcagacatcactattcaattcttgcactatttaatgctgagtgtaacaccaaaatctttctcaacacaagactccaggtattgctaccaatatgtccaaattagaatttaaattgaaacctatttgtcacccgtgcttttaaattgttaccagttattttaaagcaatggtagccagtgatgaaatacattgttggaaatataacctgcaaacaaagcatcgaagtctagaatggaaaaataacaaacagcaaagaaagcgcatttggcaaaattataaatttttataaattacaaagacaaagttcattgtttttttgaaactgatggcatgaagatttaatttctcaaggtcaaatggtcacttaggttaagtgagaaattctgtaacagagattttgtgggtagcaagaaggtcttcacaggcctgaactttgctctggtgtgtcaaggctgcccaccaagagccacgtttgtgtacagtccccaaaactgaagagaaatgaaagacaactgtgaaagagatggaccatcttttggaacaatgggtgagaaggaagaccctgggcatctgcctgggttgctgaaatcagaaaattcaccctgagtcaggagtttgctgaaagtaaaacgtgtctccaattgggattgacggtcaccagatttgtggaagtcaaaaactctgttcccttttatgtccaaaggatctagaaaactgtggaaacttcttcagtagagagactcatgtaaaatcaaaggtcttggattagtttgggagccttgctactgaaccaggaagtctgggagcgagcccggcaatctgtggtgttatctaattcttaaacacactcctcaggtgattctgatgcatgttaaggtttgaaaacgctgatctaaggctggtttatttaactttgatttgcacagcactttccccaccctgactcagattgttacaatgcagtggttggggtggggcttgactgtc

SEQ ID NO: 74372 - DNA, 1033 bp, Homo sapiens
tcttatctcttcaatgttagaagaacttgttcagaaaaatatttgccttttattaaaataaaccaattattttgtgtaatttaaacatagctttagacatgactacattgtacaaacgttcacattagaactcaaaaaggacagataaaaataattattcagtgcttcctatgtggtagaagtttgctttacagtatctgaaattcctacaatgatcctgtaatagagttgccattattcctaatgtcctataggtaggaaatggggatgataggtttttttttttttaactcaattatgtggactttaagaatacttgtagaaactggcattgcatatcaggtgttaataggattctttttttttctttttttggtgggtgaaaatgtttttttgtttttcaataatataatattttgacatattgttaagcattataattcctgcaataaaaaaaaaaaacactgcatgctagttagagaacaatagatttaccctgtcatcattaacattctcataccttgtctccctctttccagttcaagggctgagcaattctaatagtaccgggaaaaaaggactcaacgattattcaagagggacaagtcaaaagcctacaggaaaataaccctggtttagattggaaaggaaaagtcaagttagagacgtaaccaggggctttcatgttgaatgtaaaagtggcaggcagctgttcttgttcttcatttccaagggcatagaacaggaaatgaggtgtaagttgcagtcccgtggatccaggttaagtatgaattggctgtaggttacatataaattggctgtgggaatcatttacataaataagacatttaactctttgactgaacatattttaaaacagtgaaattctctctcctgtttggaatggtttacgttttaccttgctgtgaagtaagaatgaataggtctacagacatattgtcctgagggtgcttgatctcatctgaaataagagtgaataagatgagttagtgaaattcatagtcacactcat

SEQ ID NO: 74373 - DNA, 1035 bp, Homo sapiens
ataatgtcactacagatctggaaaaagtctgtaggcaactgcatgatccttctgtaggactcagtgatatttctatcactttattttctgcatttaaaccaatgctagctgctattgcagatattgagcacattgagaaggatatgaaacatcagagtttctacatagaaaccaagctagatggtgaacgtatgcaaatgcacaaagatggagatgtatataaatacttctctcgaaatggatataactacactgatcagtttggtgcttctcctactgaaggttctcttaccccattcattcataatgcattcaaagcagatatacaaatctgtattcttgatggtgagatgatggcctataatcctaatacacaaactttcatgcaaaagggaactaagtttgatattaaaagaatggtagaggattctgatctgcaaacttgttattgtgtttttgatgtattgatggttaataataaaaagctagggcatgagactctgagaaagaggtatgagattcttagtagtatttttacaccaattccaggtagaatagaaatagtgcagaaaacacaagctcatactaagaatgaagtaattgatgcattgaatgaagcaatagataaaagagaagagggaattatggtaaaacaacctctatccatctacaagccagacaaaagaggtgaagggtggttaaaaattaaaccagagtatgtcagtggactaatggatgaattggacattttaattgttggaggatattggggtaaaggatcacggggtggaatgatgtctcattttctgtgtgcagtagcagagaagccccctcctggtgagaagccatctgtgtttcatactctctctcgtgttgggtctggctgcaccatgaaagaactgtatgatctgggtttgaaattggccaagtattggaagccttttcatagaaaagctccaccaagcagcattttatgtggaacagagaagccagaagtatacattgaaccttgtaattctgtcattgttcagatta

SEQ ID NO: 74374 - DNA, 1035 bp, Homo sapiens
accagcaattttacccatcattgcttatgcatcattagtgcaagtgtcaaacagtgaaaaaagtaaatgatattttagtattattatgagcataatactgatcttgtggaccccattagagggtcttggggaccctcaggtttctgaccaccttttgagaaccactggcatagaaagatctcagatttaatagagccctcaaagttcatccagtttaacagctctaaattcctctatgctatccttgccaagtatttatttagattatgctgaatacttgcagtttctgtgaataatcgtgctaaatgaataaaaataagtgtcacagacagctgtttgatggaaagtaatagagattcttaatcctggagttatgttttgtcctgcttttaaaacattgcataagtttccacttggtttctctaagtaatcaaccttgatgaaatccagagactactaaaattatgttgtgaaggaaagatacagctaaggttttgattttcctttgctatatgtaatgacaattgtcatctttctttgatttttctttgtctgctctataattaaatgaacttacgttaggtatgtagttatttatatccatatctgtctcccgagtacctcaagagttgcttgaacgttactgagtagatcacaagctacttgagagcaaggactgtatagtatactaggatgcattggaatctgatgaccatctcttacggaagaggctgggaaatcaactgtaggcctgcttcagtggtccacgctgggtttcacagctcccctgggagcctgcagtgatattctgaggactcataccattcgtagtgggcatgacttcaatattgatctctttttctaaagcatcagtttataaaatagttatttaaatgaaatatttttccttaaaaatggaaccattcgtgatcctatatgaacacaggagatgattagtagacatcagagaagcatggccatcactcatgcccttagctgacttaccatccagctaacactgttagccagcaaggt

SEQ ID NO: 74375 - DNA, 1057 bp, Homo sapiens
tctagaatcatgcttgtttgcctcccagctcttctacattgagaagcagatgatagccagtctacttatgcccctgagcttctgttttctcattaaaaaaaaaaaatgacactatcgcatcaactttttttgggtcaaatccgtgagaacacgtatatgaagaataagcacttgttaaaaatgagttaatttgaagaatattagtgtttcctaaatatgacagtggagggatatggtagaaaggaaactgttgagaacagaaaggacaagggaaattatagcagctacttttgtggatggactgtacctattaccatatttaacaattacatgtggcctagtaccatagtttattatattgtggatttttaaaagaatagatagacgttgaattattgatattctccctctctctctctaggatacttacagagagctacaatggaaaagtcctggatgctgtggaactttgttgaaagatggctaatagccttggcttcatggtcttgggctctctgccgtatttctcttttacctttaatagtgacttttcatctgtatggaggcattatcttacttttgttaatattcatatcaatagcaggtattctgtataaattccaggatgtattgctttattttccagaacagccatcctcttcacgtctttatgttcccatgcccactggcattccacatgaaaacattttcatcagaaccaaagatggaatacgtctgaatcttattttgatacgatacactggagacaattcaccctattccccaactataatttattttcatgggaatgcaggcaacataggtcacaggttgccaaatgcattacttatgttggttaacctcaaagttaaccttttgctggttgattatcgaggatatggaaaaagtgaaggagaagcaagtgaagaaggactctacttagattctgaagctgtgttagactacgtgatgactagacctgaccttgataaaacaaaaatttttctttttggccgttccttgggtggagcagtggctattcatttggcttctgaaa

SEQ ID NO: 74376 - DNA, 1034 bp, Homo sapiens
gtgcagaatgataaagaatgttccttttagaagtgtgttatgtctgtacctgtctgaagagtgacattaaactttgaaaggacttcactgctcctttacgatattccaaatagttttttacattggaaaaactaattcttgggattctttcatacattttcatcaaaactttcagtgtgattatgtattcatatcttcagtttaatatgtcagtataatagatattgttcaaaagtttcttgttgctaaagtggtgtaatctgttacacagatgaatagctagatgtggaaagagatatgtaaacaagaaacctttgggtattgtttcttaagtaaatattgggacaatcatggtaagcaaacttagttctgtaactgcatttttcaccttaaaagttaaatgaaatgcatgatggtattttattccttgaattatgcaatgcaacattttacatgtaaatagcactggtcatatactgatgtatatggttatctgggttatatctatttttatgtaaactctattttgtttttggcaagaagtgaaattgagacttatgtgcaggttgccattgaattttgctctggtgaatgctgagatccagctttttcttacaaataaatgggaccctgttttccaatacaaatgtaccgtgtttttgttaggtacagtctggatcatggcatgtagaaatagaaatttagaattttactgcagctttgatgtgcatatttgaactttttaacatttgtaactttggtggcaaagagaattttagcttctatcgattttgtaagtcttcagctgaaccactaatagcagtcatagtgaagattagcactacttagaattaaattaggaagtcttttatcattgcaggattgtacatactactttataaaaattctcacctttgattttaaatcccagtacctagttatatctaacctatcaaaggcaagatatcatttattggacttcttgaaaataaaagttacaaaatccaacaacaacaacaacaaaacaatgttct

SEQ ID NO: 74377 - DNA, 2346 bp, Homo sapiens
gaaaatacaacaaaatgtatatttagacacgagcttacatggcataccttatatttgtatcattctttaaagtttacaaaaaaaaaccttatgtttttatgtaatcagtcattacactagggagaaatttatcagctttagttctaaatatgctcatgaggtataaaagctatttcttcatcagtattttgcttttatgctgctttttctttttgatactccaggtttataaactatcttttaaaattttaagccaggacttcaaaaattgtagagtacttgtttggcgttccctaccttcattctcttagggttaaggagcctttctttctgcagctaagggcagaggctgtgcctagggctataccaccactagcatctgtatttgagactgtttccttagatgggtaagaggtggaaaacaaacttagtatcaggggtccatgaagcccatggcatcatttttgaaaatatttctagttttgtagccaaagcaattggttttagtaaaatgagacttcttcaggagtcactcctttactgtggacccattgcttagtgggaatggaagtatatgtatctatcttgtgtattaacttctgacttatttatacaagagcagctataggagtttacaaaagaactttaagttattaagttactataaatttggggatcctagagtgatcttaaatatggcaagatacagctcatttagaataaaatctcacatccattattttaaagggaatgattggggggaaaaactggtgaaaaagaaatataaaaaggaccctaaaaagaattctgcaaaataagagaagaaataatttgtgacaggtaatagaatactagtaggatagaaacaactagaaaggaaagtgtgacacagtttttaaatttagatgtagaaaataatgaattaatgagattggtgaaaggaaatcatgcaaaacatttgaatgcaaagcatttctaacaaaaagtgactggagcacttgccattgcaacaaccctgtttttgcaattaggtttttgactgttaaaatggatattttcataaaaatggtgttctgaattttgctacagggctgcttaaatttatgattacctgtagacacttgatatttacatagattacagctttggtaatatgtcactggagtaattacgctgtaatacctgttgagaattcataccatctgatgcttatatattaatttcttatgtttgtaagtttggctttgtgggaataggtgtggagaaattaaagagtgaaggccatatttcattttttataaattatctttcaagctcagatagcttaagagcagtttatattaaggagacccttttctccttgaggatagggataggtaaggtaaacttgtaaaaaggatgtcacagaagtcactttttaattaagtcatgattgagatactgaactcttccactcattcttctttcccattttcctattatgtttgataattatatgtatttttaaaaactgtgagaggaaaaattagtcataacccttttgggttatccacttaaatttaggtattttcatattactcaggtaaagatggaaatgacagagcacagacatttattttttaaattgatagggtagaaaatgaaatgtacttctgtttattcttaatactatatatatatatacacacatagttttagcaaattggaaataatatattcatttgtatggcaagataaatgcagtcatcttaatactagtctatacatttttgccaaatggcgcaaatatacctccatttatattttgtatcttaaaatgtagtttaaaaataggaccatgtatgagacacttttttacaaaaagtgccgtatatacatatgtaacaggtgagtgtgtgtttaacataatttataattatttctgtcagtacagcgtatatggaaaattcaagttgtttttaacatattcaagtatgttcagtataaaataagttaatcccatttcataatgtaaatcatatttttgttatttgccatattttatttgaagtgataaaattttataactcaaatttgaatgtcatagtacattgtgtgctaaccatggcaagcaaacatttacatttgttttttacaataaatttcttttaaaatatactttctatttttctgtactgacatatgcaataaattggtacattaaaaatttgattaatgtcttcagatagtttgtattcagtctttttttaaaaattgttaatctagaattttatggtaggacattaaaatttcttcaatggttacgtaaaattcctgaatttgcactgaaattaatgaattttattc

SEQ ID NO: 74378 - DNA, 1089 bp, Homo sapiens
tacttatttttaaaaataggcaaggagcatgaaacagaaacaacttatttctgcaaaatgcttgtgttccagttgtgtattgagatgagctagatagaaggcaggtaatattctttttttttttttctttttttttttttttttttttgagacggagtctcgctctgtcgcccaggctggaaggcaggtaatattctgataaagtagactctttactttcttcacatatatatgcatgcatgtgcatatttgtagagacttgaatcgcttgttggctttactttatggataagatatgaacattttatttgcccatttagttgactcttctgcagctcctctggacatacactgtaacatatgtgcctttacagtcctgtgtcttgcatgttgcctgcttaatgagttagtgaatgcttaaggaaaggaatccttaacaaggaaaaaggaaaaagagagacaagatgctaatactagaaaaaaagtaataatatcattgaatcaaagttttaccaaagctaatcattttaagaaaatataagattctacaggagacaggatgcttaggtggtagacactaataagacaaatccagctactgtctgcacagtcttgacagaaatgccttcaggtttaaaaatactaaatcactaactgtttattgatttaacatttaacatgtgccaagtactctgactgggttaaaatgtcaaacaagacatggtccttgcccaaatggagttcacaggaaacactcgaggaaataaataaatggactataaagtgacaggtgctgagatagtccctgcactacacaaagggaggctcagaggaaggggcaccatctatcagggtggggttgggaggggtaggctctgacttttgacaacccattcccattacctcctttcagaccgtgagaaaggtaactcttcaagagtgatacctagtttacattcttgctaccctgttaatagagcctgccttccctgctaaatgagaaaataaaccaagaaaattatttcaagaactaggtcttgaaattaaaccagtatgcaactcggggagatgtagccaggttaagaagaa

SEQ ID NO: 74379 - DNA, 1063 bp, Homo sapiens
ctcgattcaaaaggaaagccagatgtttgtatggtcatgaaagtcaagagaaaaataaattgagagtttttttgtggaaatgggagtgatatcattccaggagaagctagccattccagcacagagacacaaactctgaaataaagttgcgaactgcagcctcagcacaaacatgaagacagattcaactttgtgagctttctccctcctatgtacatacattttactgtgtgaaacattataataggaaaagaatgttttagactaaagaaagcaaaagaaatataggtgttggtgccataatgtggtagagatgaagtacacattcgggacatcaatgcgacacattgagagacagaaaatagcaactgctcatatttttaatttgttggtaaacagacctggaaagggctgtatatcctcagagcagatatagagtgttcatattagaaaaatatgctttgtaaaaagcagagtaaacagactgctattgaagaataattaaatgaattattaatgaggtaagtgggcaccggctggtttcattcaaggctttagtcaataaataaataaataccaaatacttacctgtggtacgtatcaggggagatgactggcttagtaggaaatgcaatataaatgactcaaaattatgttgaatttagcctaaccatatggggctctttactagccctggaacccatgatttcttttcttagctttttctcagaagcacttactcagtagacttccttgtgaaattgtatcttttaattggatggttgacctttaattatattctggccattaattgattcaaatgtcactcaagctggctccccagaaaatcgttcgcttgcctaaagttttactcctcacctctgaatttagtagatttgaaacttgaaactatggacacaacagaacagtcatacactttcatcttgtttcacagttttgttcattttgagaaatattttctcaataaatataacatgtttattgcagaaaattgaaaaatacctaaacatgtaaataatacaattcagaatcacacataatt

SEQ ID NO: 74380 - DNA, 1007 bp, Homo sapiens
agccctgggaggaaggcaagtggattctgtgtatcccacacaacacaggaagcatcaaggcctaaggagttacaggggtcattccatcacacagacacgcagtgcaacctaggaactggcccttctttttctatcttgttcgacagaatgattcacaaaaacacatgcgaatatttttcttaaattgaaaatacgaacctaactgtctagacaactcaccatgaacctaacagctctgcttccaggaaaactcagagttttcccactgaactcacctctggaaaacagaatgaatacatgtttctttctcaaaggtcatcagtttatgaaaatgacccaggtcctagctgtgggttagaggggccctttctggaactccagagattgctctgttctcctgagggtctctgctaacttccctcctttctttttcagagtgaagatctgtctggctttatcaccaggatgtcacatgtcagagagtatcattaaaagaagacgctcagcactgtttcagcccgaagctgcttgcagttttcttttggatctgagcaatgactgtgtttggaaacatctgtggactctgttagatgaggcaccaacaaggcaaggtcacctgcctctttcccttgttcccggatggggcattcatcattgtgctgtttgcgttttgttttgttttgttttaacaaaattagctgaagaagttattctcaagaaaattggatgttttcattggccttcttaaattgtggccagtgtcttttaatttcttcttcttttccttttggcaaagcagatataaccctcagcatgctaggagagtgcacccgtacctatggaagtggtaaaatctggtatttactggcttacactcaaaacgaccacagtcctacctcagttcaaggtaaagccggatttccgtggcgggggtcccacaggacctcctgtagtagcccctgcgctgtgtgtctggagcgcggtcctcggccttattgaaatggtcc

SEQ ID NO: 74381 - DNA, 1375 bp, Homo sapiens
acaaccccaagcgccacaactcggcctccgtggaaaatgtctctctcaggaaaagcagcgagggcggcgtgggtgtcggccctggagggggcgacgagccgcccacctccccacgacagttgcagccggcgccccctttggcaccgcagggccggccgtggaccccgggtcagcccgggggcttggtcggttgtcctgggagcggtggatcgcccatgcgcagagagacctctgccggcttccagaatggtctcaactacatcgccatcgacgtgagggaggagcccgggctgccaccccagccgcagccgccgccgccgccgcttcctcagccgggagacaagagctcctggggccggacccgaagcctcgggggtctcatcagcgctgtgggcgtcggcagcaccggcggcgggtgcggggggccgggtcccggtgccctgccccctgccaacacctacgccagcattgacttcttgtcccaccacttgaaggaggccaccatcgtgaaaggtgaggaggccctttgccttggcgtctggcgggaaggaggggcggggcgctgagggagcctcttgggtttcactgctcccactttttggggaccttgacccagaagccgacagcctggcactggctccttgttttgtttttctgcgggctgccctgttctcttccttcagagaacttgccaggaacattcgtcttggagttgaatgtgacgttttccgcgtgggagggagactgattttttgaggccccacccattcacccattctgtgcgtcccacagccccctgtcccttaacacagtggaagttctcccagaccggccacactagaggccgcggggcacccgactgtcttcatccggctgcgtgggtccgtccttctggaaggacctcgggtccggaccgctgccctcagccgcagctttcacctttccctgtgttcctggagctgggctccgcctgattcttggtgagcttgaaggttcagacctgaaagtcatttaagaaatgagcatccattttgatggctgctaatagcgacagttaaccatttccgttttacacacaaactgtgggagcttttccatcagaggcattgtttttctcggaaggggtgaaacggtaaggctgcacacagcctaatgcagtggtgttcaacttgagcatatgtgggagttacctggaggctttgctgaaacatggatctctggcctgtgttaaccccgcagtttccgatgctgtagctttggggcgcggcccaggctgtgcatttctagtgagtctccgcataatgccgatgctgctggccgggggaccaccctgtgaggaccctgccccaggtgagactcacctggggaggattga

SEQ ID NO: 74382 - DNA, 1039 bp, Homo sapiens
ctgatgcgggccaccttctcgggcagcgcgggccgcctctgcccgtcctgccccgcgtcctctcccaaggtggcctaccacccctacccagaggactacggagacatcgagatcggctcccacaggagctccagcagcaacctgggggcagacgacggctacatgcccatgacgcccggcgcggccctcgcgggcagtgggagcggcagctgcaggagcgacgactacatgcccatgagccccgccagcgtgtccgcccccaagcagatcttgcagcccagggccgccgccgccgccgccgccgccgtgccttctgcggggcctgcggggccagcacccacctctgcggcgggcaggacattcccggcgagcgggggcggctacaaggccagctcgcccgccgagagctcccccgaggacagtgggtacatgcgcatgtggtgcggttccaagctgtccatggagcatgcagatggcaagctgctgcccaacggggactacctcaacgtgtcccccagcgacgcggtcaccacgggcaccccgcccgacttcttctccgcagccctgcaccccggcggggagccgctcaggggcgttcccggctgctgctacagctccttgccccgctcctacaaggccccctacacctgtggcggggacagcgaccagtacgtgctcatgagctcccccgtggggcgcatcctggaggaggagcgtctggagcctcaggccacgccagggcccagccaggcggccagcgccttcggggccggccccacgcagccccctcaccctgtagtgccttcgcccgtgcggcctagcggcggccgcccggagggcttcttgggccagcgcggccgggcggtgaggcccacgcgcctgtccctggaggggctgcccagcctgcccagcatgcacgagtacccactgccaccggagcccaagagccccggcgagtacatcaacatcgactttggcgagcccggggcccgcctgtcgccgcccgcgcctcccctgctggcgtcggcggcctcgtcct

SEQ ID NO: 74383 - DNA, 1081 bp, Homo sapiens
gcaagcagaagcatggccacaagcgcttcttcgtgctgcgcggacccggcgcgggcggcgacgaggcgacggcgggcggggggtcggcgccgcaaccgccgcggctcgagtactacgagagcgagaaaaagtggcggagcaaggcaggcgcgccgaaacgggtgatcgctctcgactgctgcctgaacatcaacaagcgcgccgacgccaagcacaagtacctgatcgccctctacaccaaggacgagtacttcgccgtggccgccgagaacgagcaggagcaggagggctggtaccgcgcgctcaccgacctggtcagcgagggccgcgcggccgccggagacgcgccccccgccgccgcgcccgccgcgtcctgcagcgcctccctgcccggcgccctgggcggctctgccggcgccgccggggccgaggacagctacgggctggtggctcccgccacggccgcctaccgtgaggtgtggcaggtgaacctgaagcccaagggtctgggccagagcaagaacctgacgggggtgtaccgtctgtgcctgtctgcgcgcaccatcggcttcgtgaagctcaactgcgagcagccgtcggtgacgctgcagctcatgaacatccgccgctgcggccactcggacagcttcttcttcatcgaggtgggccgctcggccgtcacaggccccggcgagctgtggatgcaggcggacgactcggtggtggcgcagaacatccacgagaccatcctggaggccatgaaggcgctcaaggagctcttcgagttccggccgcgcagtaagagccaatcgtcggggtcgtcggccacgcaccccatcagcgtccccggcgcgcgccgccaccaccacctggtcaacctgccccccagccagacgggcctggtgcgccgctcgcgcaccgacagcctggccgccaccccgccggcggccaagtgcagctcgtgccgggtgcgcaccgccagcgagggcgacggcggcgcggcggcgggagcggcggccgcgggcgccaggccggtgtcggtggctgggagccccctgagccccgggccggtgcgcgcgcc

SEQ ID NO: 74384 - DNA, 1735 bp, Homo sapiens
agacgggcaggtgggcgggcgtccactacctgtgtgcgcggtgcgggcggtgactgccaagttggagatgcccttggagaactgcttcgaattcatgtatctactgggcttttgtgactttcaaagcctatagcaaataagcacccctgcaattacgtctcctcaatgaccaagtcagggtgaggtgagggcttcctgagttcagatcccagcaagctcccgatcctgcgcaacgaagaaaactcaacaaaacaggctttggctgtttattttattttttttttaattgtgccttcatgaaataatttacagcaataatttatcttataatattggttattgtttttaagtcccggatgtttacttttggatgtcctctataattcatagaagtatcttaaaagtaataaaatcttaatctaagagaaaataagtgtaatttttgaaagagtgatatatattttaatatgtttttgtaacatgtgacttgaagattgtgttggctaattttatgtgccaagagagccctgactagtacaaagattatagcgtttttatttttagcatgtatacagttaggattattgatcagtagcctgaatttgggaagaataatcattgtggcaaatatcacccagtgtgcctcaaaaaggtgtgtttaaagttgatcttccatttttaaatcataccttaaaaaaaaatacctcaagaaatgccattttaagtctgtgcacctatgtgtgcatgtgtgcgtgtttgtttatataatagattgtgtgattgtgtgtgtataggtatgtgtgtatgattgtgtgtgttgggggcgccacctttatgaacattatgcttcggcgttctttttagatcttgttaccttttcttacgttcacaaatgttgcctagcaatatgtctagtcaggaaagatgaagggattcttatcttggtgcttgaagaaaatgtggtgtagttttattggctttgtgatcacttacatcccacttttatgaggatgtaaatgggccacctctatgttcctgtatgttgccagccatcagtagacaatgctaaaggaaccaccacttttaaacatcatgtgatggtttcttctgagaaagtatattttgcaatctttttctttttcatgttgacttttattatgcagttgcattttcatatccgtattgaacatttacttgctgtgcctgtcacacgctagcaggtgtcatcttttcctgtttgcttgtttcttggggccatcctagtgttaaaggccagtgtttttaaggtgtcagcagctctggattggcagttagcactttccccatgtactgcctcagttaccagactggggacaaaagagagaaggttaaagaattatcacctatgtccgtggtattctgtcatagagagtataaatttcctacagcaaactggaaattaattgcaattctgcagttagaacctccaaatacaaatgtggatgatacaatttcaattctcattgagagtcagcccatgaaacaaaccaacagtaagaaactctgtaattagaagtatcccagtcctcttcctcaaccgaggaacttgttttctttccccctttctattgccagataagctatttatttatttaaagcttgttctacaccttgtgattttccaactgttcttccatactttttcaacaaaagtcagctaataacatctgccaacatgctctgcacgcaggactgg

SEQ ID NO: 74385 - DNA, 1070 bp, Homo sapiens
caggagctcaaacaaatgcatgtgcacagcaacactattcacagtagccaaacatcaagatagtccacatgttcatgaatgggtgagtcgatacagaaaatgtagcatatttacatgacggaagttatacagccataaaagtgatcgaagtactggcatgccacaatgtggataaccttgagaaggtcatgctaagtgaaagaaagcacacacgaaagtcatgcactgtatgaaatatccaaagtaggcaaatgtatagaggcagaaagcagacaggtgtttatcagggacggaggggtagggagggaatggggtgtgacttctgaatgggcatggggctttggtgtgatagaactagttttggaactagacacaagtggtttagtactagatacaagtggtttagtactagatacaagtggtttagtactagatacaagtggtttagtactagatgcaggtggtttagtactagatggaggtggtttagtatgagatgcaactgatttagaactgaatgcggatggtttagaactagatgcaggtggtttaatactagatgcagctggtttagaactagatgaaggtagtttagaagtaggtgcaggtggtttagaagtaggtgcagctgatttagaactagatgcaggtggtttagaagtaggtgcagctgatttagaactacatgcagacggtttagtactagatgcatctgatttagaactagatgcaggtggtttagagctagatgcagctggtttacaactagatgtaggtggtttagtgctagattcaggtggtttagtgctagatgaagctggtttagtactagaagcaggtggcttagaactagacgcaggcggtggcacagcattgtgaatgtactacatgccactgaattgttcaccttaacatggtgaattttacgttatgtgaatttcatcaattaaaaaatgattacaaatcgaaatgtagtaagtaaaaccataaaactttgagaagaaaatgcaagagaaaatattcgtgagcgagggtatatcaacaggttcttaaccataatagcaaaagca

SEQ ID NO: 74386 - DNA, 1196 bp, Homo sapiens
tcgaggtctagggaattactccagatttattactcatcacatcattccacaaatatttaatgaatacttactgtgtgtgtaaagtgttgcagagaagaataatatcttcttcttaccctggaggagtttatgatctagtggaggagaatggaaaaaaagtgaaattgtagtacgaggaggcagggtggcacagaggggaatggccaaggcttcggagccagactgatgtggcgggacttcagctgtgccctatggggctgtgggcactggggcaggtgccagggcctgggtgtgcagctggtaacctgcagtgttctgtgtgcgtgggaccgtgtgtgcactgcacccagcacctgcctgctcactgggtggtaccaggttgaggcctgatgccaggggctgggctgatcccttagagatttccgagcagggcaggagtgccatgtttctgacgtgctgtgagatgatggccaatggtctgtctctgtgtcgtgttttaggaagcctacgccgtccaccttgaaggcaggggagctgcgcacgcacgtcagccgctgccaagtctgtatgagaagaacataatgaagcctgactcagctaatgtcacaacatggtgctacttcttcttctttttgttaacagcaacgaaccctagaaatatatcctgtgtacctcactgtccaatatgaaaaccgtaaagtgccttataggaatttgcgtaactaacacaccctgcttcattgacctctacttgctgaaggagaaaaagacagcgataagctttcaatagtggcataccaaatggcacttttgatgaaataaaatatcaatattttctgcaatccaatgcactgatgtgtgaagtgagaactccatcagaaaaccaaagggtgctaggaggtgtgggtgccttccatactgtttgcccattttcattcttgtattataattaattttctacccccagagataaatgtttgtttatatcactgtctagctgtttcaaaatttaggtcccttggtctgtacaaataatagcaatgtaaaaatggttttttgaacctccaaatggaattacagactcagtagccatatcttccaaccccccagtataaatttctgtctttctgctatgtgtggtactttgcagctgcttttgcagaaatcacaattttcctgtggaataaagatggtcc

SEQ ID NO: 74387 - DNA, 1021 bp, Homo sapiens
ttttggctattgtctcatgacccatgttagaatgggttggagtgtttcaaatctaatacacagtgagctcttctttaaactctaatgaagctgggctggtcacctatttgggaagcagccattagacgatccctggggccatgctgagcaccatggggccccagccatgcaggcactggcttgcgggccagcccgataatttgggcacagagtgtgtcctgtggtgaccacatgaggctgcagtgtgtggctttccagagggaacaccctggcgccttcctgggaaggatcgatctctttcctggtgtttggggagggaacctctgactcacggctcgcatctgttctgcagcacaccagcgctggtgcagaaggctctggccaagccctggcgtcccccggctcctgcctggaggagtttagaagtgcgccattcatcgagtgtcacggccgtgggacctgcaattactacgcaaacgcttacagcttttggctcgccaccatagagaggagcgagatgttcaagtaagtgggagcactgcttttttgcaggctgctggcccctttgtgactttattttttaatcatccgcgatccgtaacaccttccaatgcaaagtctcaaagatggttagcaatgaatatttgatgctgttcgacatgggcagatgaccgagacgattttcaaaggcagaccttcagtcacaggtttaattttttcatttaccgaagaaccatgaaagaaaaaggtcattttccattttttctaggtgagtgtactaaaatgtaattaaagcaactgaaatctccaaacagagcatgtttgaaatacagtatatttaacaatcccggggagaagaagtgagcagcgttcattttcatgccattcataacactgatcgtaatgtacactttgtgtaagttctgagtgacttcacaaggtatttttttagacctgtgcaaataaaaattaatttcagcacaaattcagctgaaactgagagggaagacccttccttcct

SEQ ID NO: 74388 - DNA, 1024 bp, Homo sapiens
gatcggctactcttttgtgatggtaagtgtctggggagacgccatatttcccgggaagagccccactcacgccccatagtcgcctctgtctggtgcctccacaccttggagttctctgcatctcgctgcttaagcccctccttcttcctccaaccatccccttccaaagcatgcctcaaagcctggcctgccctgcctggtgacagcaggggtctccagcaccagccagaaccctcccctgctcacagccaaggtagctgggatgagcatcttcctggaaatgcaggcccaggcctctgcttccctgtggctgctccactcaggtgctctacgggtctgttccagcaccagcaatatgaacagcttctctatacaaccagcttctccatacaaccagcttccctatatgagcagcttcttcatatgaccagcttctccatatgactagcttctctgtatgaccagcttgttcatatgaccagtttctctatatgaccagcttccatctttgagcagcttctctatatgaccagcttctccatatgactagcttctctgtatgaccagcttctccatatgactagcttctctgtatgaccagcttctccatatgactagcttctctgtatgaccagcttctctctatgagcagcttctgtatatgaccggtttctctatatgagcagcttctccatgtgaccaacttctctatatgaccagcctctttacatggagtggaggcctctttcagggaaaggaggaagagagcctccacgtggggagtacacattctactacaacatgcacgagcttgaaagcagaagcttgagttagggagagaacacccgagggctggccgtggcctccacgaaggccctcctggggcagtgccgcctgggacccttcccagagggcaaggactgctctcctagccccagggcttccctttcccacaaaagccaactgaaacagaaaacaaggcccctgtttgatacactcattgtagcttattttattctattac

SEQ ID NO: 74389 - DNA, 1008 bp, Homo sapiens
aaataatgattagttttgctgtaaattgggttagagggggaaaaaaggaagaaaatttttctagtctcagctttgactagatgcatgaccctggacaaatcacttacctttcttgagcctcagtttcttcatttgtaaaataagggtgatggtaggcacttcgcaagatgaaatgaaatagtatacaggacagggctgatgcacctacagatacttcagaatttgtgaaatagaaatgttggcagtgatggcttgggatggtgagtgggtggtgggtggtgtgtggtgattatgttttgcaagtggtggatagcctaagatgattttgaaacaaactaaagctgaatttctaacacttgtcaaatagcctaaaatattttggttttataatagaggttgagttaggagagggtaaaaacacctagctatgatcctataactctgacaactcaatttcagatggaattgtggaatgtcagcccggacctccaggtgaccagggtcctcctggaattccagggcagccaggatttataggcgaaattggagagaaaggtaagaaattttgatttttttaaaatggtggttgtgtctttgcgtatgattttttcccacatacttaccggctttggagccaagtgggggtgggcagagttagggcgtaggttccttttatttggaaccctcttcacaatctcttcctagaataagcatcttccggaacttagttgatgatctgggtgggaaaggtggagacagccctgaaagtcagagttttgccccttctccctttccgaggaccgtgaagtcagtcttgctacagtgggcgtggtcagcagataaaactcagactgatttgttaccgcaatctttccattcagtgtttgagaagagacttctgttaccaaagaatgctcttccctccttcaagccaagtcaaaaatctgcacatggaatgctcaccaattcttccagtggtgtttgcatcatcagtgtgagcaaatctac

SEQ ID NO: 74390 - DNA, 1039 bp, Homo sapiens
cctttaaggggatgccaggggtcggagagaaaggtgaacccggaaaaccaggacccagagtaagtgctttccaaagtccttttatcataaaacaattctccttccatgcggaaaatcgcagattcacagaaacacaagaacagaaaaggctcgtagggacttctagtttatccctttcatgccccgaagggcttttccgagactctcctgagctatatcagttgcaaggcttcccaggcaggcgaggtccttccctgtttaaggatccagcactgaaggtgccaccgccggctgttcagagaggcttctgaagagccctgggccatccctgaaaccttcggtcctgctctgagagcagcaggttggttggactttgccacccagaacaccagacagtgtttgcacagccacaagcctgagaggctgagttgcttttcactttagggatggtggtggcgtgagacccaccccactgccagtcagctgggatggttctggtttctacctggaaggagcatgcagaaacctgcattaaatgaagcatttgcataagcttgcaaatactcagctgccaataggcaaacttctctaatgttagctttgctaccaagatacaatcatattttagaagacttgtagctcatcggactctgctctttaaaaatggagttctcttatattgtaactgtttcataattattcatcatatacaatattacttattattgtggtattgtcaacttacatagaaccctcatttaccttgcttgtgtttcataggagagacaacatattaagctatctgaatcagagctttggtgttatatccgttattatatatatatacatatatatatatttgagacagagtctcactctgttgcccaggctggagtgcaatggtgtgatctcggctcactgcaacctccgcctcctgggttcaagtgattctcctgcctcagcctcccaagtaggtgggactacaggtacctgccaccacacccagctaatttttgtatttttagtggagacgggattt

SEQ ID NO: 74391 - DNA, 1073 bp, Homo sapiens
agctattccaatgccattatttgggaaccattgaatctgaaaatcctgaaatattgcaaattttatcatagctattatctactccatgttaattttcagttgtttccagctatagatcagttttctttgtctaagtgcttcttacactcgtgtcactgaaaacctgaagagtacagagcccagcccctgttttgggtgcttggataaggggagcttactggtggataaggaaaactccagagactgagagctctttggagttttctgggtgctccagcacagggatgctttgcaaagattcctcaagcccttctgcttgtacaaccaccagaaggtgctttagagaaggggaggcactgagatgacagctgtgcaactcaggatgcacccaagacagaaaaaacacgttcatctttgtgagcttgagttgggcatcctttccgccgttctccctctgtccttcttggaggtgctgaaagtgtgcgtagctccgtctccctgcccctcctccctccactgggtcatgcaggggctccctggacaccagatagtgcgaggtccttcccctcgcctgtgtggatggtggggaggctcagggcccactgggtgaccggaaatcctttctccagtgggctcattgtgctctttgtgctctgctcagcagccgctgccctcgctgtgggtttcctttgtgattaatccttatctgctcaaaaaggcttgcttcacatttgcccttggctgctggtccctggcagagtgcaactctgctgccttatgccttttttaagtttttggattcctttcaaattttctcaaatctcattaccctgattaaacattttttcgattaaaaattaaatttctagaaaagtgtcaggaagtatgcaaataaacgctggcatgctttccacttgagagtcatcaattgcttacattttgccacattcgtggttttactgcctctccatattactcttgttttttgctgtgccatttgagattaagttgtaaaggtcatctcccttagcccctgaacatgtcagcgttagacccaaggacaaggattttct

SEQ ID NO: 74392 - DNA, 1237 bp, Homo sapiens
cgggaacttcacaaagataagatattaataggactggatcctttgtgggcacgaagtaggggagtatttagatttgcagctgtgtgcagccatttagactagatatctgagtggctggcctcgggctttagggtggggacggcaggctgtctggcttgcccctgagatgtcatgcggcctaaaggaattctgttactattgttgaatggctgaataagagcaaatgagggcgttccttccctctgacacatagtggggaaaagtgcgtctctgcatgtccagtgccctgtggcttggccttgcagccctcatgtctacacctggggtgcccggggcctctcctgcctcttcctaggtgggtggcctctgtgtgaagaaagacaagacaaacagcatctctgtgggccattctccaccctcagcctcaggttttccaaatgccactcctgaattttctggagttttgtgtcgtttccaaacttgtttcgaagaagagctttgaactaatgtagcagaatgcaaagtggaattcttcccagaaacgaattctgtttaactctttgggtttagtggaggtgtcaagtagcttgggacacagtcagaagcacacactgtttatcgtgtggacttgggaaaagtgagcatttgggatcttctgctggtcttgcctgagtccaggcatccatgtaatgcaagctgcctctctgcgaggccagcagggctgcagagccggggctcatggtttgttcacctttgggatctgggaatacagcttcagccaatctcagtgccccacgaagtaacccaccgcctttctggcactccggggtgcctaggatttctctgtccctataggcggctcctctgtatcccagctggtggtcttactgcctcagccccattttcctgggaactgttcctcctcttccaggaatggatttcttggcatgatacttctgcctctctcccccacacaatctgaatgccacacaaggctctggaccctgaggctcctgtctgggcctgaccggacagcgggcccctccaggcatggccatctctccctttagcctgctcagccctcctactctgcctgcagccaccctcaggagcttcgagtgttcagcaccctcatgtgaataaaccagatggttattggcctgggtgtgatcccaagcccccatttcccctccagtgtcaagtggctgagtcccactggcttcagtgtaccctgaat

SEQ ID NO: 74393 - DNA, 1491 bp, Homo sapiens
ggctggtaaatgtcacaatcaggggaatcgaagggctataggaacactgaatccagctttggggaactcagaggaaacttctgggaggggcttccgcctctgaaatatgagggagaaataggaactatacaccagcatgtcatttccatgtgcactgtgatggtgtactatacacagaagacatggtcattctgcctgtctgctctcaagtctaagggtctttgcactgaaagatgaccttcaagtttgctcctttgagataccaaaatgtcattgtttctgtgattaacaatcttggtggctgaactttgctctcagaggggtggaaagaattggaagggcagggtttaggagaccagtgttaaaaaagagctcccagctccaactgaggccccagtatgtggtcctgtcccttttctcggaggtggcaggtaggcaggcaggggatgtttggaaagttgcggcatggatgactgattctagtcaggagtgcctttaggaactgacccagaaaacctacccttacttgggccaggccatgagggaattcacaaaaccctacattattcattaacaaggctgttggcaaatttctgagaactggcaaggatggtcataacaagttcagttatttagttaagagctggtaaagattttgcagacaaatggaacccaccagtgatgatctaagacaaacctttgtagacagtggaagaacatcaagaagtggctaaatgacaacagtggttttgatgaattctatgatatttgttataataattgttccccaaattgaagaaggattaacctcattaaaatgtctcacaaggaggtttggtattttgagttcttgggctagagtcagctcaagcaacaatagaatgcctaaaataatgttagagcattgttcttcctgctattattaagcaaccatgaaaaaatgtcaactatagaacaatacaaaagacatattcctaccattcttatgcatacaatgaaaagggatgtcaaccagagcatgttttaatggtgaatttcttctgagtcttttgacactgtaggaatgactttggggtgaagactttgatagtctggtacacagtgagctggttccagcctcgtttccctccattgttctcctggtcctaactctgggacatgggtccctcctagcgctctttccgtgtctctgcttctgtcttcttcctcttcccatgcccctcagtgtgggtgagctgcaggggcagctctgcgtggttctctttgttctttgcactctctaacttccactgggggtctgctccatgatgcaccattactccctgaaggggactccagaactccttcttgaactccagttcaacgtcttcacatttccacgcgacgcctccccttggctgtcttgctttgatctcaaactgagcaaatatgttcaggactgaactcattttttacctggactgacaacccttcccgactctgccattttgg

SEQ ID NO: 74394 - DNA, 1125 bp, Homo sapiens
aaatggtggtggtgatgataaccccactccctaggtctcagtacccatactgagattttatgctctccctttttctgctggatttcattttttctctagaagcttgatgctatgccttgattattacttatttcaatgggacaaatttgcactagaactacagtatttgttatcactgaatttttcacggttgccatatatatatccagcatcatttgtgtcctactgctgttgaacaactactttaagatcagaaaatagaagtagtttagccagtctaaaaggatttccattcatcgaatcataaatagagaaaaaaacaatcccttctatccattactaaacctctccattccaaatgtcttcaaacaaagcaattatggtggacaagtatttgaggacagttttttctcataaacagctgcatagtgctatagcatccttgttgattagccaattagaataaattctttccacagcacattttaaaagacttaggggaaaaaacaagacttgcaagacttgaagttttcatagaacaatgtgcacccgtcttccgcccacttccccagagagaaatatatgaatcacatagcagtaaatgagtaaagtatcaaaacaggtgctggagactagggagcatgaatcatcttcttccttagatactttgtaaataaaacaggatgtatttatggtaactctgtgcgtaaacttctatttacaatgaattatataaaataaatacaatgtcacacaaagtaaataaaattgaagaatctattaaatatcactttaacaattatattaaattgtttccttaaattgatccaattttgaaagaggaatttgaataggagagatcaacaacaacaaaaattcctcctgtattcaaactttaaggaacgctagctatctattttaatgagtgaataacttatttcccaaaccacattttaagaaagtcaaaaatagttgcatcacatttttcctattgaaaatatacactttgaataacagaaaaataatccgcagataattttttaaagatttttactcagcttagtggtaatagatttctgtttatattaaccttaagaaagagtgttcagaatggagtttggccat

SEQ ID NO: 74395 - DNA, 1041 bp, Homo sapiens
ctgatggcttccttcatcgatgcagactggggagaagtgggcgaggtgtaggccccaagcagtcccaggctgagagcccggcacaggactggaaatactcatcagggttcacaggctgtctggtcttaaggaagtgacagcataagcaggagcatgtcagtaaattcacagcaagaccctgcatgcaattctatttgcaaatggaccctctcactcttgcatgactggctccaatagaagcaaaactcaggtccatcctagagcacatcccaggagaagtttctctatgggggatgagcttcaaaagtaattgtaatttaattagaaatttagatgtgagtacctggtttttttagtgggactcttttttttttcttggtaatttatacattagccgagacgcttttcctactacactgccagaagttaacttctaatagagttcatacattttgttctctctcatgttttttctccgtcacctattcttcacaccttttaaatttaagaagcatgtatgtatacatctgtgcgtgtgtgtatatgtatccttggcagcagtcctcattcctttggtgattactaaacatttgaggactggtaaactgtgaggaattgaaccttgctggctgaaaggtagaggaccagagtctgccttgttccccttatgccttcaggggcccggcagggtctcctgctcctggggctcatcctgcaagaggcggctggtatccaagcagcccaccccgatcgcctcctcagggaagagggcagggcagttaggaggcaatgcttctccatggtgctgggaatctctgtgatataaacccggtgggatggaggagattatttcaaataattgatatttacttgcattgaccatgaaaccaacccttcacgagcaccctctctggcccagggcagcactgcgcccctcgggtgggaaagccggtgtgggagagtccaaccctgcaggaaacggcttggagaagctcccgcctgggacactgaagaagtgagcgaggaggaatgatgcgtcag

SEQ ID NO: 74396 - DNA, 1002 bp, Homo sapiens
tagtggcattgcaggcccttgaagaagagtgtcaggccagaaaccagctcaccatggttcaaggtgtgaatgggggacaggaagtggctttggaatgtgtccaggttctttttgaatagagaaaaatttcctccatgaccatgcttcctgaaaagagaatgaacccacactctgggatgtgaggccaggagagttggcttcaccgtcggctggccgtccccaagtcctgccccttctcccgctcctgtctgatgtgagaggtgttgccactgcagtgtatccaaagttccagacatgcagagccgccctctggccatcgtcggggtcatggatcctttaggagtgaggaagcgggatgcgctggtgtggaaggcctttcatatggtcgggcgtggacacagagagaaagcgccaaacatccttgcggcattgctcctgcctggtggaacagcacattcacagtgagacaaacacaggtcataatgagagcagaagaccacaacagccacatgacacgcgtacacacacacgcacacatatatatacacacacacatgcacacacacatacacgcacacatatacacacatacacgcacatatacacatggacacgcgcacacgtttacacacatgcagatatacacatgcacacacacgtacacacgcacacatatatacacggacacatacacataacgcacatatacacacacatgcacacacgcacacatacacacacacatacacatggacacgcgcacacgtttacacacatgcagatatacacatgcacacacacgtacacacatgcacatatatacacacggacacatacacataacacacatatacacatgcacatgcacacacgcacacatgtacacacatgcacatatacacatgtacacacatacacgcacatatacacatgcacacatatacacacattcttgcacaaaaatctcacaagaacatcacgggtgaagctttctaggaataa

SEQ ID NO: 74397 - DNA, 1021 bp, Homo sapiens
gtactgaaggcatgcctagaatggcggcataatctaaaagtcatcttacttccgatcaggatgttttcaatcttatttttaattgtgtgtttatctctttcccatattcacaatactccaagccaaattagtacttgtagttaatattagtaaatattaatattactaaaatatattctgactaaataacaatattagtaaaaattaatattagtaaattaacattactaggtcctgatagggctgatctgtttgatatgcttatttccaactctgcaataaaaggtaagtaaatctaaagatggttaaaagctatcactcttaaaattatttcttctccattagggtgaacctggagagcctggattggtcggtttccaggtaagtttatttttattggacgatattccaaacaaaagtttaagagcttcagaactccaagtaccagtttacctctcttaaaaacattctcccgctgcctatccatagggacctcccggccgccctgggcatgtgggacagatgggtccagttggagctccagggagaccagtaagtacctggacacaggtgcccactctgggaccatcgtccggtcatcccttccagatgccacttcttcaatggttgactccagatgagagctttaagaacaactatgatgcttataggcgtagcagagaacatcaagacaaaacggaccattccttgcacactttgctgctgttaaggttgaagaataagggcttaaaattatggtcaccagctctctgccagttatgtcaaattttgacttggttccggcagggtgcccttccatccccaccccatacctacccagtgacagacagcccatcatccctgggcaaggcaaaccaaagtcccacaggttcataaggaggaaatggaggtctgcctgtgccacacccatgctagcaggcatatcacacctgggctcattacagcaggtgagatactggccactgtttaacacaatggccctagagggctcattgcaagt

SEQ ID NO: 74398 - DNA, 1078 bp, Homo sapiens
aaatgcatcagaaacctccatgcatcctacactgtgtcctaaatatacagtcaatggctttcccagagctttccaccagatgttatctgggtcctggggtaaagaaaaccatttacacatttctttgtatttgtacagggaccacctggaccccctggaccaaaaggacagcaagtaagttggttttggggggtgaggatgagggaagggggtacttaggtgtttgtgggtttgtttgttttttaccataaaacttcttggttggcaactatttattgtttatattatgatgaaaacagttttggaggtttttaagacttaatgttaaactccaaggatagatccatggtgcctctggacattaaaaaagtaaacaggtggaatgatttgttgtttgcaaattaattaccacatgcctgttggtatatgaaaaccacactgaggaacatttgattgaaacgaagattagaacaatttagggacagttcacatttattcacatgcattgatttacgagaatggacaaaatgtaactctatctgttgtagggaggccaatgtcattcttcttatctggctagaattaggttctacaggagtctaatgtcagcctctagggatatattcagtgataatcaagttaggctagagcccaaagctgtatactgttttcatcccagaaaggttattaagttgattggaacacagcaaagtaggtggtttgttagaaactcggaggacagaactagggttccttattatctgagaaagctggataaatgtccaagacaaacgaatgcagttgacaagggaagtatttgatcaaaatgcaacataattcagaaatgctgggctgccagcgggaagcatctaggaacgtttcctttgccctgtgtcccgatggaggacgtgccaagcccacacgttgccatgcctgcccattgctgtgacccctggtgactacagctgccaccgcccatgcccccaggctcctgtcccctctgacacagcttccggttggctggagggcttgcgctggacgccccaccgcctggcagcctggagcaggatgagatggg

SEQ ID NO: 74399 - DNA, 1138 bp, Homo sapiens
cagatttagaaccgtctgaactctaggtcatacacaatgttatagttcagtggttgatgccttttcactgttcactgtgcctgcgggtcccaccccacagcacacagcacacgcctcctacggcaggcccggcaggctccccagacaccaccactgacagccccttgggtctcacatcacactcatgccaacatacacacaaagacgtgtagcttcacatgcatgtaacggagcaacaaaagaaatgtgtctgtgctgctctgcccagtgccccttagagaatgttccaagtcggcaggtacacatctgcctcgttctttaaagctgcagagaatggcagtcaataggtgcgccatatttccttacgccctcgaggtggttttcatatttccagcaaacatgcagtcacctcggtggtacacagggcttggctgcctgcccatgggctagtatgtccatcactcagtcctagtaggtgcacagagatagagttttatcaaaatcactagcctcagaatcacaactccgttgaatcctgctcagggctgcacagagagtagtgtggcgtctggaggcccatgggcttcagttagctggtacagaagctcggcaggcctggtgggggttccgccatgcttgttccaggaccacagatggacctgcctcccagactcgctttctgacctccactggctctagacacgggccgtcttgacccagcattctgcttttgaccattcaaacttaacaccaatcttgatgacttcctgcaacctccaatgatcatactgttcccatttctgttattttatgctaaactcagcccagggagccaatgccaggctttgccgtaatcacacccagcctttcataacatcagttactgatcggagtactcccaaaggcggcacacctagaacaagagctatccaaatgcaccccacccagaggccacattctagttcatggcttaggaaaagcaaatattgtaaagggacagaggctaaagcagacattatcgttcaaaagtaacccgtttccacctaccccatgtgattaaagtgctgctgttaatttcctaccatgtgctggtaaaattataattatctttagttttccatcttcaacacaagggact

SEQ ID NO: 74400 - DNA, 1157 bp, Homo sapiens
tcagcctcccccgagtcagttgacctgttgacctgccgctgggaactcccctggaaagttttagctcattgctttggctcttggggttccagctgcctcagaggaatcctgagtgcttcttaagttgtcccccttccccaatgggttttctataatgcccagtgcatttcagatggttcaaagtgcccatgctgtcttggacccttcagcagagatggcaacacgtggtgtctggggtgcttgttttgtttgctgaggatgccacagcataggtgtgtgatgctcgtggcccagagtgaagctcagatttgacaaattccagggcaccctctgagctggccagtctgtggctgtgctcacagctcccactgagtgtccagctgccagctcctgtcatgccaggtacttgaggattcctagcttagcttatgacgtggcctctaaacaggacctcatttttaaaatcacagaagtttgtctttacttttgagtcttcagctccacctagcgtgagagaaagtccgggtccaaaccacaggaccacaacaacacacacaaagtgaagcccgtctcaattcagtctaaacaacatgactttcagcacacctgctcctgggtgtcaagataacctcgaaagtaatcagagaatggacctttcttatacctgtggcatctggcattctgaattttgagagctgaaccatgcatgttctttaaaagagggaatacattgctagatttttagagagctttactcttctgtccagatacctcatgatatgactcaatgataaactttttctttcaaaaaatgttcaagggaatgagaaaacaaaacttagtgttatagttgttttctatttttgaaacagggtcttgctgtgttgcccaggctggagtatggtggtaccatcacagctcactgcaacctcaaactcctgggttcaagcgatcctcccacctcagcctcccaagtagctgggactgcaggtgcctgccaccatgcccggttacattatgtattttttgtagaggcagggtttcactatgtttcccaagctggtctcagacttctgggctcaagtgatcctcccaccttggcttcccgaagtgctgggattacaggcatgagccaccatacccagcagagatttttt

SEQ ID NO: 74401 - DNA, 1050 bp, Homo sapiens
ttatttagagatttatttgtagctctttaccttaaattcacacaccgtgattagtagcaagatttttcattgcgcttggttgaggatttattatcagactgcctaaacttttacgaaaagccaggtagagttgtatattactgaggctttaggaaatatttcagttaacttagggattgtggttaaatgctctaaattagttataactcacattaacttaaagtatttttgtttttttaagtagaattttccagtactaaaagcacttttagcacaaagcagcagtgatagtcttccccagacacgcttccttaaaacaaaagccaaacaaatttaacctgttcttccagactcagaattgtctgaagagttaccgaatgggatacatcttaagtcgcctattgtcaaggcctttttatccttcagaactttgatctttatatgtaaatgtttctgtgttaacatttgaaatgttaagttcaaatggtgacgtcagtaagccagctggaacttgcttcactgccaagtgctgggaagtttagttgacctgctttggcccttttgctaacagaagctgtttatcttaggtgaatgctggtgagcagcctggattttactttgtgttaatacaattctattcaagtgaaaatgctatacttcttattttgccttaaaatggcagcattttacacctactgtgtgcccacaaaaataaaaacaaaaacatggcagcactttggtaaaatagtgtcttgtggcctggcttgtccattactaaccacagcatctgcacaggtttctctctgggccccagtttccttatctgtaaaagaaagataaagtgctagtgaggagagtgaatcacgatgtcttgacttcatcgaacatgtatcaagtgtcttgttctgtgccaggctgtgttcgaggtgattgagtcccacatggaagcagtcagtgctgcagcttgcggatggtgccacattcctcgtgggcaggcagtagtagggtgctgattctctgccagtccagacataagaacttccttcttat

SEQ ID NO: 74402 - DNA, 1034 bp, Homo sapiens
atcaagaggaaatgggaaatttggaaaatgctgtggtttaatgaatagtattaaccaatgtgaacttggtcatgctgatccggaatgtgggtgtgtgaggcgttaacctcggggaggctaggcgaagggtacatgggagccttctgtactgattaaataataaatctaaattacagaaattatttaaaagtcattactatttataagttattttttcaaaataaaatgtaaacaaatacatgacagtaagtaaatgaggaattgtgggtaaccatcctggccttcctttccttctttagtgacagccccaatgctgttcatgaggtggagaagtggctgccccggctgcatgctcttgtcgtaggacctggcttgggtagagatgatgcgcttctcagaaatgtccaggtaatgtgtatactcactcacttccctcatgacaggcttagccttaggcgtgaagttggaacagaggcatttctcttgcattttgtgtagtgttccgtgtgcctctttgtggcatgattgagataagatttgagggacggaggagaaactgagtgcaaaggtggggaggaactgtgctgagatgtgcttctctccgggcccgactgttttctcatggagcagctgcaggaggtgtgtgtgtggagttgctcagttgttttatgtctgatgtgaggagagggtgagcaggactgaggaggtgacagaggtttggggtcaggcctgggtgtatctcccaggccacccccttcttgctgggggatcctggggttccctcagcctcctgggccgttgttcccacacagccctggcgccatgctctgctgacatcaggctgtgaggtgacacgggcctgcttgtccgtgcccacatgcatatgcgcatggactctcatttatgctggtatttctttcttaaagttcatcttatgcccacctaaatccaaaagatgaaagttattctgatcactttgtgcctgctgtaaataaataccacctgggatcaggggcgataaaaagatggggatg

SEQ ID NO: 74403 - DNA, 1049 bp, Homo sapiens
agttttgagaagacacatacccacaccatagcagcaggcatggtgctcagtctggttttctcttctggcagggcattttggaagtgtcaaaggccagggacatccctgttgtcatcgacgcggtgagttgacttctctcctcctggctcggactcccggaaggcctgtgcagtgagcacggctccttgttctgtgcaggatggcctgtggctggtcgctcagcagccggccctcatccatggctaccggaaggctgtgctcactcccaaccacgtggagttcagcagactgtatgacgctgtggtgagtcagtggaccccctggagggtagatgcaagccctgttcgtcctgaagagggtgaaggacgagctccatgcttctgcccagcctgtccctgtggacacacctgcaagtaatcgctgtgcctctcccagcggatggcgcgtcttcccattaatgcgcttggattggatgaacgatggtgtagtgggcttgggacaggcagggactcgggtcagtcagcccctcctgcagtgcactctggacaggtcactttgtctgtgtcctgagtgcctcatctgtaatgtgatgatggcatcagcttcacggggttgtgaggatgagatgaggaaacctatgtaaagccgtgagtccccacatggtaagtgtcccatcaatgttagtgcccagtacgactggaatttgtattactcctgcaaagctctcagaacccagtcttgggtggtcctccttcagcctgctctgatgaggtagaggatgggcactggagcaggcaccgtgtcagcacctgctcggaggactcactgcaggtgatatcctgggcatcctcccacctacatggcctttaacaggtgcctgggtgatccctttagacacgagagcatgagtctcatggcggatgggacagggctatctgtcgtcgtgtgtctgaggaagactttgctttttctctgtcttcctgtgttgtcatagctcagaggccctatggacagcgatgacagccatggatctgtgctaagactcagcc

SEQ ID NO: 74404 - DNA, 1049 bp, Homo sapiens
atcagggtagaacactgaggcgtctgtgggcgggtgtgtgcacatccacacttgtacactcacattcacatgcacatatgtgcacacgcatgcaattcatacacatgcacagttgtgctcacagcctcgcacgcccttgcacactcgcacttatacacatgcatggtcatgctcacagcctcgcacacgccctcgcacactcatccacacacagctgtgcacaaggaacacagagcagatgttctcagagggactctgacacctttgagatgagggttttttaatcactggaaggctctcttgggtctaacaggttcagagaatgtaacacctggttttcaaaacatttttcaaagaaatagagaattcccatacacaggcatacgtgacgttatgaggccggtggaggcctcgctcggtgttgccctgtatggttgagctgtggtttaaggtgaactctggagtgtgggctgcaggtgagggctccgtccctgggagctggtgggaggagctggaggctggcgccgccctgctcagagctgcctgcttgggctcgtctgaggcggttccgagctgcaggtgtctccaccaacctgctgtgctacacagcggggtctggggcagcctcaccactgcgtgtcttggtttcctcttctgtaaaacagaggctgcctccaacccttggaacaaacagggaagagccgtagcaggcaggatgtgagtggagcctcaggctgctcctggagggtgtggctctgcctgccgtgcggccttccacacccgtggctactgtcacattcacacacatggccatgctgacacctgctctcacttctgccctgtgcagtgcttgtgtgcagccaggaaggcagcagccgcaggtgtggagggcaaggggacctcctgtcgggctccctgggcgtcctggtacactgggcgctccttgctggaccacagaaaacaaatgggtaaggccacgtcttcatttattctactttgaaaccgtctgatttttctaagctgtttcagtagctcatgcgttgaataag

SEQ ID NO: 74405 - DNA, 1040 bp, Homo sapiens
cccctgcccagctccctgccggaggaaagactagggaagggaagcagaggaggaacgaagggcgccggcagagagagtaacaagtagaaacttcgccgatctgggagcaggccgagaaactctgttgagctgctaaagaattcttcattctcatgtgattttcttcatttctgtcttcccagttactaccaaggagctaaggaaagttcaggaatactttgtttagtgtcgccataacatctccaaccatgcattaagtttaaccaaaagctgcaatattccagattcttaaattctcaatggcaaccaatttatgctcaagttgaaaatctggcaagcaccgtacgccttcagcacacgcgtgggtccggattttcccatcacacacacgctctcccccgtccaaggtgcctgtttacttctggtctgcgcgggctcaggtttcaaagagcttgctgaaggcggcccccacctcggcgatcatgtcggaggtggtggtggagcgaccgtgcttctggaaggcttggtggttgcactgcctggtgagagagcaggcgccaaacgcggccaccaggagagggctggacctgcggagagggggacagcaggaggtgtggggaagtgggcgtcgtggtccgggggccgcagctaccctgggctctggttttgactcctgtttcaatctcaggaccccaaattgtcaatttcaagtctgatatgcccctgaggagaaagcaggtttatcacagcgaaaaccaccattaaccctccactactccctggcaggaggcacacaggaaacgtctatgtactcggagacaggtccagggctagggcacacagtgggccaggtgttcccggggaaagccaggcggcacaagctgcttagccctgtttgactgtgctctcagtgcccaggtgcagagggcatctgaggtctgagaatggggattcctgctaccagggctccatctcctgggggaggggtggaggcaactcgagtgaacacagcagaatgaacagtaagactcctgcccaca

SEQ ID NO: 74406 - DNA, 2143 bp, Homo sapiens
gcgacgagaagatccagatcgtgagccagatggtggagctggtggagaaccgcacgcggcaggtggacagccacgtggagctgttcgaggcgcagcaggagctgggcgacacagcgggcaacagcggcaaggctggcgcggacaggcccaaaggcgaggcggcagcgcaggctgacaagcccaacagcaagcgctcacggcggcagcgcaacaacgagaaccgtgagaacgcgtccagcaaccacgaccacgacgacggcgcctcgggcacacccaaggagaagaaggccaagacctccaagaagaagaagcgctccaaggccaaggcggagcgagaggcgtcccctgccgacctccccatcgaccccaacgaacccacgtactgtctgtgcaaccaggtctcctatggggagatgatcggctgcgacaacgacgagtgccccatcgagtggttccacttctcgtgcgtggggctcaatcataaacccaagggcaagtggtactgtcccaagtgccggggggagaacgagaagaccatggacaaagccctggagaaatccaaaaaagagagggcttacaacaggtagtttgtggacaggcgcctggtgtgaggaggacaaaataaaccgtgtatttattacattgctgcctttgttgaggtgcaaggagtgtaaaatgtatatttttaaagaatgttagtaaaggaaccattcctttcatagggatggcagtgattctgtttgccttttgttttcattggtacacgtgtaacaagaaagtggtctgtggatcagcattttagaaactacaaatataggtttgattcaacacttaagtctcagactgatttcttgcgggaggagggggactaaactcaacctaacacattaaatgtggaaggaaaatatttcatttagcttttttattttaatacaagtaatattattactttatgaacaattttttttaattggccatgtcgccaaaaatacagcctatagtaaatgtgtttcttgctgccatgatgtatatccatataacaattcagtaacaaaggtttaaagtttgaagattattttttaaaaaggtaaatggttaaattttacatgacagatattttatctattggcctgttccccaaatggccattttaaaatgcttgggtacacttctcttaagtggtctagtcaaggaacctcaagtcatgcttttgctatcaccaatcatagtgtacccatctttaatttatatcaggtgtataaatgtacatttccaaatgaacttgcacttgttatattataattggaagtgcagtcagcagatgctgttgtgaagctaatgtcacaattatgtgcaaaggtgtgcttcctgctgtatgtgagctgtaaaaatgttacgtgaagaaataaatgaaacttggccagtttgttcctctagtagtatatttaattttgacataagtaacttttaaaatttgtcttaaaaatttatacaccagcaatttagacaaagccttaagcaaattttgtattattgttctcacttattattaataatgaagtagaagttacttaattgccagcaaataaatacgtgtcaaaaaagaatctgtattcagaccctgggtcaggaaattactgcccacttgtcaagttcagcccaccatctgtttgaagattatatgaagtttaaattctagtgtccataaataaagtttcagcggaacacagccgtgcttatgtgcgtatgtattgtctgactgcttttgcaaaacggcagagttcaatagttgcacctgaaaccatttgacttgacaagccaaaactattttctggccctctgcagaaagggtttgctgacctctgatttagactagcatctaacattgatttgcccacatattgaaagggtcagtggagttttcatttattattttttatttttttgagattgagttccaggctggagtgcaatagcgcaatcttggctcaccgcaacctccgcctcccaggttcaagcgattgtcctgcctcagcctccccagtagctaggattacaggcatgcaccaccacgcctggctaattttgtattttcagtagagacgcggtttctccatgttggtcatggctggtctcgcactcc

SEQ ID NO: 74407 - DNA, 1078 bp, Homo sapiens
gtaatggagtcttgggaagtttttgtgattggatgcacctgagctcatatcttggttctcctactttcttgggcaagtcactaaactactctagatcttggtttctttatttgtaaaatagagtaaaatgcccttttcatttggccatccagaaagttaaatgagatcacatgtgtgtttaaagcacataggcctattcccatttgattctttcatttcttcttctcccttctttctgatgaaggaggactttagtttgcttctgtaacttaacccatacttaaacaggaagagtatatttagcattgagaatatatttttttctgcagctgtcctagattaaaataaacaaaaataaataaatgaatgcctaccattctgagcagctcagggtgtatgtttgagactgctttgaaactctaatacaagcacaggcatacctgtcctggtgcttttgcacacaagcctcacactgtccaagaggacagagtgtgtgtggctcccaaatgcatgtggagccccctccagatctggggaggctgccccatatggtgctggacagtggctgcaccaggacctggaggggaacctgagacctaggcccaggcaggtgggggctgtgaacatgtggctgggagaggccattgtccatacacagacagcccaagttgttcaactccatttgccaacccatgccctgcccctggcttgactggtccccctcctcttctgctactaaagtatctcctgaagctgagaacaagccaatgaggatgatggtgccagggagagaggatcctgtgttggtcaaggatgtgcgagtagctgttacctccattggcagttttgtcactaaaagacctcattcacttgagcatttgaggatgaccaaatagaatcactaactttggttatttccagtttggtctgcattagaccatgaccaaggaaagctgtgccaatgacaaaccatatgcttaagttttcaccacataaaaagttacttttaggcagaagtcatgatacactttccaagaaatggttgtggaatattgtccaagctgcgggggattcgtta

SEQ ID NO: 74408 - DNA, 7306 bp, Homo sapiens
tgctgggattacaggcatgagccaccatgcccagcccttttttttttctctctctttttttcaaaagatgccctgcttacacactgatctcttaaaagtgcatgcctgagtcatagtgaaagtggagcctggcctgtggaagattttttaaagctttgaatggataagactaaaatccaccattgaatgcctctggtcttaaagcacttgtatttgaagaatgcttttggcctcctacctaatcagacttctgactaccccccatccccccaactacacaaatcacactgttctgtttctctcccccatactaatttcagaaatcgggtttctcattctgtacattagcatctttgtagaataatccagatatcatatatacagtataatcaaaaatgactcgtgggcctctaaaactagagctaattcaagctgcaaagttccattctccctatttttaaatgtttatatgaaggaggtatttagcactgaaagttgctatttgtggtgtatattctttggcccagaaataattctaagtatctgagttaaccagaaatacacataaaaatgcatttatgagtatgttaattgtggtattcatgataggaaggaaaagggaagcagcccagacagctgcagggaatttggttaggcgaatcgtaatacagccatagggcagaggaaagattgttttgaaattaactgataggacatttatgccatggtaaatgaataaagcaaggtgtaacagtgatttgttagaatcctttttggtaaaaacattcttaaacacgagaagccgttcagacacatggagctgcttgttgtaagaagtgagtcttgctaggattcagaggcggaggtgcttgtgcagcgtgggtatgacatggggcattcgcatctccacagtacagagaatggtcatcttggaagtgaagtgcccgtgtagctttagcttcacatttctaacgctttctgtattttggtgtaattattttactgtattttggtgctcagatcaaatgccactctgggacagtgctgacagactagtcttgagtctcttagcctttacattattttttttgttaatggaaatagtggatttttttaaaaaatcaggattgttttaattgtatgtaaatttaagaattgtcttagtattaaaaaaaaatctgctgaatttgaaaatggagtttggaattgtttccaggttatataaccacttcatgtcttctaaatgtccagaaaattagaatttttgccatcaagtaaatctataataggcatctgaaattccatgaccttaaaatctgcacatgtcaagaaatctttttgattgtggaaaagtttttcagttgtgtgctaagctcattagtgacctgtcgatttttttttatgtgattgtttaaagtgttcagtgctcacacaaaataatgtaaactgtgtgtctgaacacttatcttgttacagacaaaggaatctgaaatagtctttgttttctgtgcagctcaaagcttggattctgccgtgccactcacgaatggcgacacagaagacgatgctgacaaaatgcacgttgatagggagtttgctgttgtaacaggtgggagtggacagtttcctgttagctgcaacaacaatccaatggttgaagacaccaaacagcaggagagtggttctgttggaccaaaagaaatagaaatatatactgtgtcagcaatgcagaccccctgtcgttgcaggaatcagtatgcatattatttctaacataagtttttctcagatgttttgcactttgttgtccagtgtctttttaaaaatgttatactataatttgcatatcttgggcaagtttgtagatacaagaagtgttttgggtatattctgtggacatgaaaaatgtaagtgcaatctttattctgatttgaagctattgcttaatgtgccttgcttatttttaatgaggtttgcatttttaattttctgacatatggcctttgggtgaatataccgaacatgctacagttaatattttcaaaccaatataccacaaagaggacgactagcagtaaacactgagaaactagtaaatgtggttctgactcagcccagtcactccagcatggaatcttttacccaggacttggttgctctggtttctgtggtcttcattctgagtctgttaaaatggtaaacactgtgtttcacaacacacattttatacattaatgtttttagtatattaaaacagtattcctgtttccaatttttaagaagcagaagcagctcagttcttatagcatttagaatatctaaaatgatttgtccatttagctattgcttttttattcaggtgactacaaaaacatttttagccattctcttaacatgtatgaatatttagaagtagattttttttaagtttattatgtctttatgcaaattcttcactggggatgaaaaaaagaagagtatgtatattgtttcccaaacccacatgaaaaaaatcatttgtgttcactaaacttaaaagaaaatgtgttcatctttctggaagctacagaattgctgtggtcaccttcttcccagtagagaaattcagatcagttagtatatttaaaataataggttttctgtagtcaggggctatttgaccttagctaaagatccataacaaaactcaaatcctgctttttttaaaagtgaccttgctaccttcttttgaataggcagaagtggccaccttttattcctcagacattagttatttgttaaactttatccaagctggaacatacttttgaaaaacccagcccatcccgtctaccagatgccgagtccatacaccctgtgtttcccatcatttgatttatgacactctgactgagtaagcaatgtgttaaatcactagagattactcgaggctttccttgtgggacatggcactccacgtccactggaagcttgagggagctgccttcacagtcctttgagaatcagaccaaaagtcaggctgctctcctttaaacacttgagtaacttcaaatttttgttctgccaaaattatttccaagaattctacatttttgaacaactgtgtacagctatctttgcattttaaatgcccctagtttgagactcgggagggtcaagtgtccccacccctggaaagggctcggataggagggtgcttgcttctaaatcctgatcttctctatggggttggctggaagagaagtaggatcttgtctgaaacctcatccccagcattgtgtttggatgttcgtgggatccgagggctggccgggcagacagaagggaagtgcgggtcttggctggcagctgggagcagaggaagggagagcgttggaggtcgtgatgtgcgtgctctgcctcagtaggtctgaggtgcccactgttgttatgcttagttttattagattctctgtaacaacatgagcttaccaaccagccttgattttgagattaaataattgaacagattaactgggcactgaagtaaaattctacctactttattctcttagtaaaaactatacacacaataaacaactgtcaaggttgccatcatatttgagttttgtcacctaggaaaacattgtttatactttgtttttgaaaaaattcatatgaatttcccctgggaataacttgttttatttcagtttttattttctattgaaacacttgttttctagtctaggattttagccaaatagaaaagctatcatttaatttgggggaaaaaaaatctattgtcctgtgaagaatttatagcaattattaaactatgttgcttaaatataaaaaaaaaggatgattaatggaatatttagataatgtttccattcactgaagaagccgtgatcctttattggcaggaagacttgcaggacatatcagaagcctctgtcagaggtttacaggaggtgagatggaggggaagccctctatgggaagagtcccatggtgtgtgacatgttagggtaatcggatgtatttaagctgcgtcctcattctaaaagttattagaactgagctcttctagatttaataacatgctttgctttggtagtgaagaacattgagataaaatctagtattaccgagttagagataattttagatcatcccttatactgttacgtgaattcctgtgaacatgaatattactgattctcaagttccagtatacagaagaataacttgtcattgcctgtcctggtgtacccagatgttccatgatggacgttttatcccataagacgtctccctcctgatagatgtctgtatatgcagattaaactaccaacattttttccagcaaaggtggtttttgaaagtaacctaatgaaaccctggctgccatggtcattttaattgctggactgagaagaagcgactctgcgttgtgctgttggcccaggcctgcatgcctgaggactgttggccgttacagttccttgctgtggtcgccggtctctctgtattctgccactgctctcatgtggcatttggcagaagtactacgtagatttctgtgctactgaaaaaaataaaaacagtggttccttttaatagccctgatttgagacttaggagagggtcaagagtccctacctgatttatgaggagagaagattttttaaaaacctcatgtgatgctgtcatacatagttcaaagagcttccttaattcacttcatttacctttttttccattttcgcttgagaactagagaagtttgtgttctgttggaaccctctgtagaacactttacactcagttctgatggaccttttcaggggcgattttttaaaaaccgctctcgaaagtagtcttaaaatgagagcactttattgatggcttttcaggactgtgttggtatttttcatgcagtgtatttgtcagcttacatttttcagttgagctacctgatgctactgacacacacatgattttcctatcttaccaggcaaatactactgttaacgttttaatagtaagtctacttatgcacattgattttactttgaaaaaagaactggtttaaaaggaaaaaaaagaaactaaaattctttaaaattgtaatggcagtgaagcattttatagtttctcctccctcattggttctgaattttggtgacaggtgtatttcttaatgcagatatgaaaaacagtagctccgtatcgaatacattgacaaatggatgtgtcatcaatggacatttggacttcccctccacgaccccgctcagtgggatggaaagcaggaatggccagtgcttgacaggaactaacggaattagcagtggattagccccaggacagccgtttccgagtagccagggttctctctgcattagtgggactgaggagccagagaagaccctgagagctaaccctgagttgtgcggttctctgcacctgaacgggagtccaagtagctgcatagccagtaggccttcctgggtggaagacattggggataacctgtactatggacactaccacgggtttggggacactgctgaaagcatcccagaactgaacagtgtggtcgagcattccaagtccgtgaaggtgcaggagcggtacgacagtgccgtgctgggcaccatgcacctgcaccacggctcctagagacgctgacctggctctcggaaacgcaggagtccttcctggtagccagctcagaatacccatgtagcagcaacttgaacgaatgtcacaacttgtacgttttttatatacttcaactttctgaaaaagtaaacttcgacaagttcccagcaactgcttgtttgtgcatgagtagggcttactaagtgcatagatgtttctacagtgaggtgtcctttttataaggtgcacttttggagtttttctgatgccaatctcaacattgtctttttaatactgtcaccagatattgccatttttctttttgttaaaagattatatgatcaagataaattggggtggtaaatcaggtgcctggtaatttatctctttgcacatgggcatcattttaaaaagcttgcttccactcttttctgtagaatttgacggaacacagctatttccctatgcaaggtacagccttacaaagatttctgcagtgatttgtgtgaagaagagaacgtttgtctttttcaatgaagctttgcagatcaccatgtggttgaaggttttagttgtggacacagtggtccctccttaatgatgaagatcactgccttgggcttcatggaaaacaggcccagcctggggctgcgtttggatttattgtttttattccacacttcctacttggtctctggaagttttaccacatgtaacagattcctttatatgtagtggaaatcactatttgtagaaactgtcaggtcaaaatatttaactgactgttgacatgtattttcttttttccttgtttttgttttttggggttttctgctttaagatatataccactatgtatatccagttaactgagagaattttgactctcttaataaaactgcattaagtttttgattttgtagaaattagcttttgtctaggcaactagtggttatactctgcaaatattgtaatgaatttttacttttttgatttttgtaataaaaattggtgcagataaaatgtcaaatgaacaaaccagtgttctaagagtgttactaacattttgttctaaaactgtccttcacaaattgaataaaaaactctcacactcagtgtgtccctggggtttctctctgggcttgggggccggcggggtgtggatatctgtggaaggaatgggaagggaagagaagtttactattgtttcattttgcttataagattttacttgactcttctgacactcttcatacggtgttttttctatttttgagtttctactctagttttatgggcaccgttggtactgaacctctgtggaggaaggatgaattgcatgtcagttcagtattgtgcctgggtgcttattttcataaaagacagcaaccataatgttctaaacttctttggttttagcaactgttaattaatgtaagccttttaggaatatgaattacagttataaatagcaccaatatagccattctggcatgcctacatatgcaatttaaaacattcactgcatcatgcatattcttgtaaaaacttaatagaccacaatgagggagcattatgctttggaagttttgcaaaaattacagtgagaacaggaagagaatgcatggcgctgtccaggccaccgcctcccatc

SEQ ID NO: 74409 - DNA, 2583 bp, Homo sapiens
atttttatttgtcctaatactaagtggtagcttctcatttctctgtttcttgattttggagagcaagtctatgcttatctatagaaataatcagtttgtaaacttatgttctccttgaagagtttttgaattttcatgtggcaacttatttttctgttcacattcttgacagaatagaccctcccaggtcatctgcacttctgatatcttttgaaagtgaaatataccattaaaaaaaagtccagctatatgatgaagctgtcacgtaatattagtatattttctatttcaataacaaggtgatctgattttgtacaaagtataattaatgtaatacaatctgcccaaactttggtgcttccttttcatttaattcatatatcaaaataaaaatattatgcaatactagaaaatactcatggccattcatagccatgcagtcttaataaggctaataaaaatagtgactttagtctgtaatagtcctgcacatagccgccttatatttttaagaattttgttggtttctgagattctcaattctcttttatctctgatcagataggatttgggtcttttttcaaaaggtgtaatgcatttatcttatgctttaaaaagtagagacgcttagctagtgtccatgcacacttctcatttccaaggtcagagctctatgatgtctgcaaataacgaatacaaggctattgtcagtccttataaataagaaaatattatttgtccctaattctgtagttttcactctcaaatgcggggttttttttttttttttttttttttgcattaacagtaaccccaagaaaggcatcagggttctggagtggttgtttgagtgacacagcacaaggccttgatttcatcatgcttttgctgtggatgtagtgtagcttgctgaacaggtatggaagctgtctttgctgttaagtacttctcccgtttgtttatcaacctgcagctaacaggatgtctgcttttttacaggtttatttcacagagcagtgtacattcttgtcttccaggggaacttcaacatggagttacttttgatccctcagttttaattcagtgtctaaaggtttacaagttcaacttactctattttattcagctctttcacttactctgccatcacttcctacttgaatctgagttttagctactgtagaggtctcagacctttcctttttagtactattagccaggtaaaactttggttcttgtgagtggtagggatgagtttttaggacagtattcaaagcctttttaaaggaaccaactactcaaatgctctacaatgccaaaaatacaatactcctgcaggttttcccaagcaaggccaaaacaatcaaaatctgacagaaaaacacagctgttcagctctggaatctgatgataggctactttttaatgtcaggacatccttctaaacttccacttacagtgtcacatgtaagcatgaaggctggctcgttggtgagccattgctttgtttttaggaagacagttatgaatgccatggacaatctcagtacatgttgtttgttatgattttattcacgctaaaggaatgggtattaaaattaagtgcatataatatagaattcagtttcaagtctgaagttagcgtaaatttagattcttcagactaacataaaacatgattttgagaagttaaataggaagatgccttttttagaagtttagcatatttagtttatctcccaaatcttgcttagaaatcaaatgtatataagagaagttagttacagagctagattgattaactacttctttaatgaagatttgctatgaatttgtttactctttcataccaccttcagatagctagtcagttcagcaggagcagagaccaggttagcacgcggatggggtgtaattcagtgtttttgtgttgtacagcctgagaaatgccagtggcctgacagcagcagacattgcacaaacccagggtttccaagagtgtgcccagtttctcttgaacctccagaattgtcatctgaaccatttctataacaatggcatcttaaatgggggtcatcagaatgtatttcctaatcatattagtgtgggaacaaatcgaaagagatgcttggaagactcagaagactttggagtaaagaaagctagaactgaaggtgagaccgctttgcgggtgggaagagcacacttatttttcctttctgtaatatgttttctttttatggctgagcgcaccttcgagatgagaccttcacttcaggtggtaatgcgcctggtggattgtgcggtgacggtggagatttctcctgtactgccactgcgaagatgggacttaacaaaagggaatgtgagggaaatactgatggcccaagtgtaaatgtctatgtggaactttttgagcacccatgtttacctgccatgaattagattttttaatttgttgtatctgtttgaaatatatctattaaagaaaatctgccactgtgcctgaatttttttttttttttaatttgcttcttgtaaatgttcctgggcttataaaaattgctgatggtctggcagtaa

SEQ ID NO: 74410 - DNA, 7368 bp, Homo sapiens
ttgctgtgtctgattgcctttcccctctcttgcttagctgatagcctatgaagatggtctttcaggttgtttcattcatgcagtgtagacctgggttgactgctgatgttcacagtggctttcctgggtctgctcacttttctctgcctctgtgtgtgcttcacctccccaccgccgccaccccaccccctctgcactttctgaaccaggaatttcattcttatgaagcttggtttgctttacctttgtgttcttctccctttcctctaataaatactgaaaatagattgggaatatttagtaaatattccctctagtaaatactgaaaaatagatcaactgttgaacctcaagccatcttgtctaagttgtggtcccacttcaagttcaaagcagaagattcaagatcggcattgatgatgttgactcgggttagcattggggtaggcacagaggaaagtgggtagctgagaccatatgtcagctattatgtgctatttcttggccttgatgaccgttttaatgtgtgtgtgtggttggttggttggcttgtttgtttggttacttattctgggtttatataaaacacacgtgctaagatccagtgtaaagtgatttataaatcactgttgagagcaatcacgctgtcactactggagaggccccaagatatttggtcaacgaccaaatatcttggcccctcctggttcgttctcatcctccattcacgtatagatttctttgtgttctgcttcagatcttgctcaacatgttttacttcaaaaaaggatgagaaggtctctgatctgtgttaatgacattacttccaaaatgtcagaagttttgttctaagtatgtgtatattttgctttttgttgtttcaggattgtgagggtgaaactcccattcacaaggcagctcgctctgggagcctagaatgcatcagtgcccttgtggcgaatggggctcacgtcgagtaagtgtctttcgtttattctttccagctaaagatgtagttgaggatgttttgtttaaaggcagtacataagcaggcaaaagtcctaaaactttgttttcaaaattagtaatgtaattttgccttttagaacagttggtgttagtgaggaaaattgtgtggattaaattgatctctagaggagggggtttaatttcacagcagcctcaatattcttgtcgagagagtgtatttgaactgaaagaacagttaactaattagatttggaacttggcatcattactttgccaccattactttgccactaactagttgtgtcactgtggtctttaaacttttctttgcctaattttgatttcaaaacaagaagcttggattggattaaaatatcttttcagacctctctggctcagaaggtttctgaagaaaattcacttttctaggttttgatttccacgtcttagcagatgtgagaaagttatgttttaaagcccattgtaacttaatggttgatagttccttgtaaaatatgactatttacattaaagacctcaagcttgctgtaagcttctggtactggtggcattatttttaaatatctttcgttttagcccagcttacatcagttagcttatttatgctttgataggacaatcttaatgtttacgtgtagtcttttagaaatgagatcttatatgcaaatcattagccatggcattatacatttattttagttgttacatttatttgtattaactttttcttaaaaatttatattataaaaatttttcttctgcagttcacagcattaacaaaatggatgcggttttcacccttaaatgttgagtgtaagctatagagctataataaccaaaataaccaatatcagcttttttgttttaccttaagtgttatgaataattcatgaaaattaattataaaccacattattctaatcagaaatgtgaacatttagacttcggaggaaataaaacccacaaaactagtttaaccctttggtttccatttcattgctttgactctgtattatattgaaaatagatcctagacagcaaaaccatacaggctaatgcacgacgtgtgtaggtaccggaggctgtcaatcatctgtgaatagcttagcttctgttttgttaagtttattggcaagattcgccattagtttgggctgtgatccttatatagtgatctggtattataaacatggcctctgtttactgttacattgcagggactctcgcgacttcatgtatagttgtgactaaaggtaatgtagaaacaattgatagtatgttttatatactagtagaacattgagatgattctcagtggattgctttaaagcaaagttatttgtgcatttttcttagctgtagttagatttaaaactctaatttttataacaaactttcattataaaatacggagtcataacatgattaaattgcttgtcatttattcaaacagtggataattagaagttgatatttttaatgactttctaaataatactctaattggtcctgaacattttattacaaagatgttttattcattttatggatagcttaatcttttcagccaataaatatcacgatgtcctttttttttagtaggtgtcttttaaaaaatgagaatcttttatttacaattctgtccttggttacagggccctcaagtgtctcttttccaccaggtgtggctgagatgggctcaggtgccagtctgtttttccttctcagtataagagccaccactcaagaccctgcattatggtgacttccctggactgagctttcatattttttttagaagaagtatttagcctgagctacctagccaaaaacaattataagcctttggcctggagatagagcacaagtaatcattattcattgctattgtatatgtggttatttagttttaacatcgagataaaatgtcagttttgtcagtaagttaatttgtaagttgcttcttgatttctgcacattttaataatttaccccatttagtccaccaacgtgtaacagtttgaatctccaaaataatggtactaggtctattttattccctgtaacgctgctcatatggtaaagtgtagtcctagcaaatcataaccgtttcttttttttaagacgttcaaggagcatagaattaacttatttaaagttagtttttttcattcagaatggacgagattattaactcttcatattacatgctataatatttaggagataatataaatttttccttttcctgtgaatagattaaaagctgccttatatcagtattattaaattcatttgctcttaattcctgctttgctttttatatatctgctacataaagtgcccaaagtcttaaattgttgtgcttttttggacatcaggtacataataataagggcaagtacactaagtgtctgtggctagaatggtttgttatataacttacttgttaatgtaggttgcatctgtaagataacgcatttcagctgctgtgcatcgtattaaattttctagcaccacacgtgagtatgttaatggactttctttttcttttcttattttaaatcttgagttttggtgccaagttttctgtgtgtgaggctctgtttctggcttatatgttggtcattattatttgccattgtttacatctaaaaattaaaacgcacaggattaaatctaacttgtgaccaaactaaatgtttgtgtactttaaaggacctaaatctctgtgtatggagttttcagcaagcacgtgaagttgtcaccatccttaatcttgcttatatggtagttccatttttccactgcccccaatatttgagtgctgcttgcttggtactcaggtattgactggaagaagaggatatactattacaaaaagattgtcatctcatttttcttttgaacgatggaacaaataacagcataacattaagtcttaatgtgattttggaaaaagacttgaaaacttgctgtctgctgataattaagaagaccttttcactactagcattgtaaatagaattcgggccttggaatagctgtactttcagtaatttggtaccaattacttttggctgatttgtgtttattttcttgagagataagtggaggatgtttccatatcaaccagctagtaaaatagctttttgccactgagtagaaataaaaagatttagaatgaaaccagcatgacttgcatctcaggcagatttgtaggtccgttttaatactgcattatacggatgccagtgtttaatggcagagtctcagaacttttctacaggagaggatttcttgagaagccatttattctgtggtaaccagattttcagctgggctacatgtattttaacttaattatttttatcttaactgggatcatcagatagcttgagaagcatcgatagccttatataagcaaattcagtgactcactctagaaaagtctctcttgcctagtttaggaagtaggcacagttggctataacaaagcctagaatgtgatgttagtagactattctaatgccacaaagaatactgcttcactttaattaaaagaaattttaattaaaatggaattgtcttagtttggatcataattgaccatttatgacccacctttgtttaccatagagccctgtctagaaaccagattttcattaggtcaaatacaggtgatgagcatatttaatattagtgttaaattcatttgtgacttttgcccttagcaaaatgtaacctagatttacttttagctattcattttgaaattcgtggtttctttatatttgttcatttttttgcccatcagaataatatttcagttacaaaatctaccagaattatgactctgaattcatattttctgattttaggtcctctgaattctagtcatcctcacatcctacttttgcctcctcttttttttttttttttttttttctaaaaagagacagagtctccctttgtcgtccaggctaaagtacagtggcatgattatagttcactgcaacttcaaactcctgggctccagtgatcctcctgcctcagattcttgagtagccaggactataggcacataccaccatgcccaactaatttttaaaaatgtttagtagagatggggtcttgctgtgttacccaggctggtctcaaactcctgggctcaagcagtccttccaccttggcctcccagagcactgggtttacaggtgtgagccactgtgcagcctccttttatctaattgtccccacagcagacttgtctggtcttggctattttccggttgttaaggtgtttcaggatggaggaatcagttcctgagatagttattaagttctgcctgctagaaagggacagtaagtgggttgatatcattctagacttgttaagaaattgttcagaattttgattgtttttcatagcagcttgattaaaatacagattttaataatttccttactacttttataggtagtgctttcaaataaaaccagtgtttgctaaatccaaatgtctttctcccttgctaaattatagcaggagcatgctaaatatttcatcagactactggaatgatggttttacattttaatgtttgaaaacataattttggttcaattgcagtgtaaaactattctcagtaactttaaacttgaaaacttggcaccaaatttatttaggtagaaactctttaaaaatagtttcttcctattattaactgaagaatatatttaagaaagtcttcataattaaataagagtttggataccaaagggttaaaaatacacatgtatttcttttgctgaagatatcttagatgtttgctaatgttttatctttacaaatggacaatttagtaatgttttttatctttttttaatgattccatgtatttgcttatttccatctaggaatagttactaatgtatttgagatacagcataccaaattttaaagtaaccagaatcgtgagttgatggtttttagtccatactgttaaacttatgttgaaatattgacatatttaaattggcttcatgctaaaaaattaccaaaggtaatttaaaaggcagtgttttagagcagtagctcatggtcaaggtggtcacatgacaatggcttaagctcagtgtgcttctgcaccttatgttgtctatgtatttttaatccaaatgttgcctgcaaatatgtgatcccttattatttaagtttcctgtattatgaaccattgcccgttttaaatcacacagaagattctgaatctgtaaaaactacacatgtcaatgttttacagctacgtaattcgaattgacttgattttttcaagtaatcctagaaagggggagcattccatatagaaactgctgaaactgccacaggtgcttctccgaaaaccttacagttgtggcattgaatgttcagtatcgcttcctttctgcacacgaggcatactgttgaggtatttgttgcggtgattggttttaacgctaatctaggaattcagatagagatgctttagatttgcatgctttgcttacctaatttatgatatctacctttctatttgtaaactaacaatagctaagttgagatcagaattttaacagaaatattatttatataaaaattgttatcttttattgtcacatggcattaacaataagaaaacatcctgaaggtgatgtgacaactcggattctaaaaattatacttcaggtatttcctgatccgtggtttttcaaaattgaaacaaagtcgttctcatcagaatggcttctcctttgttctggaattgtggcactataagtggaaactggtgggaccctggctggcttcagagtggagcctaatttttaaagttctttaggggagaattcttagatataaattttagtgaaagttctttgggggagaattcttagatataaatttgagtgtttgaagagacagggtcttcctgtgttgcctaggctggtctcaaacttctggcctcaagtgatcctcctgcttctgcctcccaaagcgccaggattatagggttgagccactgtgcttggcttagaggtaataaattttaatattctattcagaataagaaaatatagcatataagcatttgtatctttagtaaagttactgccagtttgattttttttttttgcaagttacttagcagaacatgtaattcacagtaaagatgattctgtgttgtaccacattttaatattcctgttttgaaagaatagtagagagaaaatgggtggcctgctcagtgattgcttttcgtagtcttggtgaatgttacaggagattgaatttatagataaaagcacagtcatcgtagtttc

SEQ ID NO: 74411 - DNA, 1169 bp, Homo sapiens
gcccaggttggagtgcagtggcgtgatctcagccctctgcaacctccgccttctgggttcaagcaattctcctgcctcagcctcccaagtagctgggattacaggtgcccgccaccacgcccggctaatttttttgtatttttagtagagatggggtttcaccatgttggccaggctggtttcgaattcctgacctcaagtgatccacccgccttggcctcccaaagtgctaggattacaggcatgagccactgcgcccggcctacacaaagttttttaacccaccaatccctttaacgtttttgtttagaatagtctgtgcaacaaacagttttgatagaagtcttggaacagcgcagtccaatattttctgattttggcttattcaattgtagggaaacaaatatttaaatctgtatagtgttagtcgtctttttgcatttttctatttctatctaccgtctttttcataaggacaagggaatatgttatcttaaatgtcctttaaaatttgcatggcattgggaaagagtgacttaatctgttaaaaaactggtaacaatgccatttgtcaccattatagaatttcgattattcatgtaatattgaatagtgtactgacatgtctgcgtgttttcattacccctcttgttttcgaagttggagtgcttagtgcagttggtgagagcgggagccacactcaacgtctccaccacacggtacgcgcagacgccagcccacattgcagcctttgggggacatcctcagtgcctggtctggctgattcaagcaggagccaacattaacaaaccggtaagagtgctggtgatggacttggtttgcttttgctttttctttttgcagttataattatacacggtattgctttaaatcgaggccttaattagagtttgatatctttacctgagggcagactggaatttatgtttcttcagttgtttgtggaggatagtaggccctttccataggaatgctttctgttcatagagtgctttcacctgttgtgtgataaactgatccagggtgatgtgcccaaggttatagctggtaattaaaggagcctggccttgagcccaggtttcctggctttctactcatagctgccttagcctcatttccacagataattatgaaaacattttcatcct

SEQ ID NO: 74412 - DNA, 1014 bp, Homo sapiens
aagaagcagttacttcattgtttccagctgtctgaatcatagggctctttggtcttagatacggaaggggccttagaaagcccctgtccagtgtccaaacattcccttctgagaagaagccgttaggacagaaatcaggccaggactcagggctaccgcttgcgaagtccaggctttctccccagccctgctaacggctgccctcttacacaggtttcaggctcgtgttcttagaaatgtgctagtggtgcacaagatcccctaaccgttggtaagactcgtttgttgccagaggactaaacgagttgtttaaaatctctgttgtagcttttataccatattgaacagtatctttccagaattccaaatccaagtttctaaattgaacccaagggtaacaggtttaaagccagcgagccctgaatagctgatttttggtacgccaagtgattttcatccgttttatttttattggatttgcaacctgttcatcttatcgctaattaatactttcattttcacccagtgaattaataaaggcaataaatagacatcagcctttactcccaggtccaagttggttgaagagggtgttttgaatctgtgtactcttcatctcacaggagtgtttactgaaagcctgaaagtgctaagagaaatggaaaaagaaaccttgagttgagatggtagtgtcaggtgttttgtcttcaggtgaggtctctcctcttgaagagaattgcttgcagtcaggcatagcttgttccctaactgcattgtgattggagtgagggaaaatgagcagtccaggatcagagaacgtgggttgaacagttgcttggcacatggtaggcacttggtaaatttgttgaatgcgctaaattattttagccagaggctatcatggtattggtgcttggccacaaagtcttaacttgccatgttagtcacccactaggtgcattgctcagttatgctgtaggcttttttcccccatagggttttgaaaagagtaaa

SEQ ID NO: 74413 - DNA, 1088 bp, Homo sapiens
ctcctaatcggctgctgctggcgtcctctggtccaggctccgctccctacccggctgctccaggcatcctctaggctagaccccgccacctaccggccgctccaggcgtccgcagctccaagccccgccctccgcccggctgctccaggcggcctccggctcaagccccgccccctgcccggcggctccagaggtccgcggctccaggccccgacccctgcccggctgcacaaggcgtcctctgggccaggccccgcccccagcccggccgctccaggccccgccccgccccctctgtgcgcgctccgctcggcagcctgtgggacgcgaccgcggcgctagtctcgttcctttgtgctgcggcggcggcttctcgagtcctccccgacgcgtcctctaggccagcgagccccgcgctctccggtgacggaccatgtcggcggcgggagcgggcgcgggcgtagaggcgggcttctccagcgaggagctgctctcgctccgtttcccgctgcaccgcgcctgccgcgacggggacctggccacgctctgctcgctgctgcagcagacaccccacgcccacctggcctctgaggactccttctatggctggacgcccgtgcactgggccgcgcatttcggcaaggtgggtgcgaacgctttaaggcgccattttccccggctgtccagtgggagtcggggaaagcgggtctgaggtgcgggggacgtggggcgtgccgggatcgcggggcggaagcgggatcgacggcgcctgtgccccgaggggcctagggcgcctgtgcggcagcgctcgcggcccggagtcgcggcggggcagccggggggcgcggggcggaagcgaggtcggtggcgcctgcgtccggaggggcctagggcgcatgtgcggcggcgcgcgtagcaagtttctaacaaggcgggctccaagggtcccggcgcctgttggccggatcctgtgcgagcgcgcgcgcgcgcggatggtgcggggccctccaggccgggccggaggcgcgagcgatttcgcagagccgggtattaggccgcgaagtcgcccaggcggcttccggggagcc

SEQ ID NO: 74414 - DNA, 1066 bp, Homo sapiens
tcacctcggaattcttgtttgattcaatttcaattagctgggctttatgttttattattacattttcatttcccttaaaatgaatgcatggatattataatctgtgacttcactgtgtatcattctaacaatgaaatgattgggaatgatacacttggctcaggctgtcttttcctcagaatttcttaaaaataatattttattttttggagtagttttaagttaacagaaaaattgaacaaaaagtttccatatacctccttataaattttagagaaatactgaatgttgctgtggagaagtctgaggccaatgtgattaccgttctctgctgtgtgagatttactttgctgtttgaacacgtgaagtattatttccttatcttgaagttcaatagcataattaggatttatcttgatgtttttattccccattaagtttcacagaaaaaaaggtatgtttgatatgcaaatttaaacttttagtttcaagaacttctcttatcttaatctttgcatgtaccatcaggtatctgtttggttcttgactcagggacactggtttttcttatattggactttcattgtctgtcttcaatgtctaatagcttttcactgactaatgttactcctttgtctttttcacttctattcattttgtttttgtccatgcaagtcatttaatttctagaaatacctatattatttcttgtttctattctctattgtaatattgttagatcctcaatttaattatgcccctctatatcaattctattgtgttttgttcatctttgggcttttttgtaatgtgtcagtttttccatcccatgaagaattgagaggactttcctctgtcttttgtattgtgtttcctctgtgttgttgttttggttggccttttgcctggtattctttttctttgattgctattgttttaataagtttgtgctattccgtgtatttcttttcactttgcttgtatttgggcatgtctctcagatgttattatgatacacagtgaatgaccatttggtcctcttccaatcttctttaagtcatatttg

SEQ ID NO: 74415 - DNA, 1067 bp, Homo sapiens
gccaatatatagcgttaagatcaacagttatttaaaaggtgttaaatatagaaattgaagtgtaccataattaggaagaaggatttcagtttttaagtggggtgtattggcccccatacaggatgacaacaacttgtaaataaaatgccacgtaagtgacttgaaaaagtaaaatgtttaatttttttcattcacatgtacatattctcttgctacattttaaatgaggtcagaaaacattttatttaatatgaatttggcttgcattccacttttagctatttttcttacttggaacatctttatgaaaacagaatctgcatattagagtgaatggctgcctgcctgtccatgaaataaaaatgttccttaaaaatgaacctgatgtcacagtgaaattatgatttaagacaggaggactgaggagcaggagctgactttcaaggcattcaaaatactttgctgtttggatactggtacctctggtaatgaaagacagatgttgaaaagtgttgaaatgcatgcaaagttcaccaaaataggcttaaataaaattctgttccatccctaagagcaaagctttaagaagtgtcatatgctgtattgataaaaacatgtcgccatcaaagaatatgttgtttggcatattaactgtattaatattgattggccgacttcaataatcattttcttttaaattatagaaagattttcctagaaaaccgtagcgttcatttcatctctaaaacaacaaagagaagaacgaataaaatgttgagcttgcagaagccaagttgaaacaactcaacatattctaaaactacagtcatctggaaatttcttaggtcagagctgtttttgattccccctgagctccagttggtttgtgttaaactgactctgtcacaatgaaagtttaatgtgaaggcagcgtattgtagacacagttactggttctctggagttcaaaggtaggtttttggagtaaaatattagccgttttctgcctctgagatccctgtgtttcagaagttttgtgagctttttccatttgctaggcagagtta

SEQ ID NO: 74416 - DNA, 1050 bp, Homo sapiens
actgcatttgctggctcactaaaaagaaagcaaacaaactgaaattcaatttaaatcaggagtgcctgaagagatttcctgagaaccagactagaaactagtgtttatgttggcatcacacagacacaggagagcacacacacaagcatacacacacgcatacatgcacacttgcacatgcatgtgcacacacgaacttatgcacacacgcatgcatgcctgcacaaacatgcacatacgtaaacacatgcatgtaaatacacacacacacagacacatgcgtgtacatagacacgcacacacgcacacacagacacgtctgacgggggttgagggagtgggggaaggagtgctggcacatgtggcattccattttctcaggggcagctgctctgtgaactctccaagcccagtccaaaggatgccatctcaggacccggccctcattctattaatagaagtcactccagaatctgcctgctcgcctcctttctttaggcactgcctgcctttctatacatcttaaaagagaataagatgtctgcccagcatggcaggcagcatgctcctctcgtttgcaggcgctgtccctcgcaatacccatactgcagatgaggaccctgaggtctggcagttagctttgccccaggtcatctggctgcactcggaggcggaagattccagctcaagactgtgagctttctcatggaaaacaagactgattctgccacctatactgaacttaggggaagattcgcaaccactgccttcagaaatttacaaaccagatcaggaaaggagacggaggcagcagtgtaactgagcacccaggggggacaaaagtgaggactggaggggctggctcaggtcaccggccacaggggcagagtgggagccctcaggagtgcctggagccactgcaggtgtctcacttctcgggacatctggaagcagctctgcccttcagtagacagaccccaaaggcacccagggtagggccccttgccctgggggaacctgcagaagctcctgcagaagtctgtgtctggg

SEQ ID NO: 74417 - DNA, 1022 bp, Homo sapiens
gaccgtgagccctgtggaaacccacccatggaggggtgcatgcacctgtagcaattggcagggaactgagcgggagattagggcactcattaactgtcttgaatgtttggttaagaggaagtgatcttcagtgagggtcagcgtgtttttcttgataaaggaggctctagcaaactgtatccctttcaaccgctttaggggagaatgtctgatattttttctttcctttcccacattttaaagtgtgttcttttccttcctgatggatgcatctggtggtttaaggccaataagtgttgcgttgagcctgaacagttgtttgttactctcaaaatgtctaagactttcatctccagcttatacatgtattgatgtcaggtgtttaatatttcccctttgattcatttgatagtgaatggcttctgaggtcaggatggggacactgccaaaactagctgctctctgctgagtctctgttttgcaggtgacatttgatagtctagatttgatatcattaaggtattttagggaagtcaatgtataagttttagaaagttcaggtgcatgttgaggactattgttgtgagaatgttatgaatacacttgtgtctctcctgggattgactttttctttccctttagaaaacgctcacagtgtattacatatcatgctaaatggatggagatgaagcaaatccaggggtgctcattgggaatatagttcctaaataactgcagtaaatgtaagtcatgtcctggggaattatttttctaactcaaagcatgaaaacatgaacaattcagttctgtctccatgtgtgggagaagtaaactcaccacttacttttttctttttaatccttttttttttagaggaaggtgggtagagagtgttattgggagtaggggtagggatattgagggaagggagaatgatatacacacacacatacatgtacacacataagtacacacacatctatgcatatacacacatgcatctgtacacacatgtatatata

SEQ ID NO: 74418 - DNA, 1057 bp, Homo sapiens
aaccttggattggaaatactggaggagggggaaaccaattaaaaaaaaacaataaaaaacaacacagtataatgattatttacatatcatttataatgtactaggtagtgtatgaaacctagagatgatttaatgtttacgggactatgccattttatataaaagacttgagcatctgagggttttggtatccaccgggatcctggaaccaattccctgctgataaaaagggacaactgtatatgaaagcatctttgtagaacctgttatgtaggataacccaacagaggtttcccttcccgaagaatattttgctataggtttctcggaaaacctagaacatcaaatctgtgagggcaggttacatggaaagtttatttaattgaattagacatgtaggaattcatagattaaagtattactggcgttgtttatgattgtaaacacaaagaaatttattgttggtagtatttcatgttggcaaggaaattattacacgtaagtgaaagtgctaggggagattccaagaaacttagggccttttcaaaggggaaaaagacagtgtttcagtagtctttccctgataccctttgtcgtatcagctttgtcatttgtaatccagctgccttattggctgtgataatatgccttgctagtggcaggttttactttttcttcacctttgtgagggattttattatattatcctcttgaaactactgagttttgtttacgttaacatacttttgaaactcaattggcacattaagattatctgactttagtgtaaaactttttaaaaaagttttgttttaaagtaaattgaggctgggtgtggtggctcacgcctgtaatcccagcactttgggaggccgaggcgggtggatcacatgaggtcgggagttcgagaccagcctggccaacatggtgaaaccctgtctatacttaaacaaacccaaaaacaaaaattagcccggcgtggtggcgtgcacctgtagttccagttactcaggtggctgagacaggagaatcccttgaaccccggaggcagaggttg

SEQ ID NO: 74419 - DNA, 1093 bp, Homo sapiens
aaggttgctgacatttcatacagtaactattgtttttataattaagagtttatttgaaggttttctggaagagagttttcactaacatattccaagcatctacaatagtgcttggcacataataggctttcaataaatatttgttactaatagaatgaacttgaggttgtaagtgatagcaagtgagtttcattttaaagtaaaaaattagttttgacttattttgtgctatttttaaagagtaaatatctcttccagtaaatttaagcaagaggcaaatgttagcattcttcaagcttagtgtgagtcacacttgtaattacctaggagataataaaaatgaaaatatgaaaacagcacatgaaaaacctgataaattgttcagtcattgtgttttttgggaagttaccctgagaagtcattttgtatgctatgcatccagctctggcttccagccttgtaaggtgatgtgaagggacagggctgggccctgaaggacttggtcatctcccatgcgggccacagtgcagcaatttcccagtgtttaagaattgcttagggagtcaggagggaagggccttgcacttgtgaaatatgttgtgggatttacacatttcattttcacaaaattctgaaaggtgggaaattgataagaaatgttttgaaactacagacacaaaacttaaaactaatagcttaaattctagattagcttttgttctatagttgtaaatgtcaaggtgcttttcttccaggggttagtttagactgaattgtgtttgtaacagattgtttttggtgtatatattcttatttactgtcagtttaagctctgctaagatttgttaaagggaaaaaggaagtaaacttggttaatatgtcagctgttttggtgcatgccctccttaattacctgtagaaaatcagatattatcccccaattgttttgattatgaaaatatttttataaattggttttaaaggaatattgtgtgagtcgcatttattggtaaactttgagaagcactgggttttaagctggaaaactttgaaatttggaaaattaaaaaaatttaattactgttggaaagca

SEQ ID NO: 74420 - DNA, 1045 bp, Homo sapiens
gcactctgagttcctgaggagttcccttatgtcctgggaaccagcgagagaacaggttcccagtgagtaattacaaaaacacaaaaccctgagttcttttcagaccatatttagatgtgcagtctacatttaatgtgtttttaaaaatagcattcttatccaaaatatgtgtttttggccagatttttgtcagtttaccttgtatgttttctgtgatagtttagagaaagggagtggtcttcagttcagaggtgatacagtattcagatggaatgttcactcttgccctttagggaaggtttcaaggttagattgggtggtatccacttgggattctgagtatgcgagtgtttttaaaaaatgctgaccccagcatctctctggagagtttctgactgagttagcttggtacttagcgctgtccagctgggcatggtgaggagtgccagccatctgtcagggaggcagctgccggtacccacccagcttggaaaaggcagggaggaagccacacttttctctaactgtctcgttgtagaatgggccagcccagctatgctgagagtttgaggggaagattagtgtggcagtgactgagatctttaagaaatgtcgggccggtcagaaggattgttcatgtgggtgtttatttgcacgaaagccccacagatgatgagtgaaatgctttattttcctcctaggctacggatggtgagcggatgctagagagagccacttaatgtgccgtcccccccctttttttttgttttgaaaactttaaaagtaacaaaggttgggagactagagttcggtgaacatccgtgtgcccttctcacaggtcaccagcattctgagttcaaatgcctgttctttttttttttttttgagacagaatcttgctttgtcacctaggttggagtgcagtagtgcaacctcaactcactgcagcctctgcctcccgggttcaagcgattctcgtgcctcagccagcctagtagctgggattacaggcacgtgccatcactcccagctacttttttttgtg

SEQ ID NO: 74421 - DNA, 1196 bp, Homo sapiens
gcctgtgtaggctgtatgggctgctgtgtgtgtgtacgtggtgagttgtgtctgagaccacccctcctcccctgggtgctgcctgatctgcctgcatgaccgctgtgggacaccactgtctctggtgtcctttcctggctggcagtgtggtggtgtgggcaaagccaggctggtgggctccgatcttggttctgcctttgtaagctttgtcacactgtcttttgggagctcgtgtgtgtgtgtgtgtgtgtgtgtgtgtgtgtgtgtgtgtgtgttttcgttttctgcctgtaagataaactggcatgcagtctacactgaggtacgggctgtgtgggccagcacagcatgccgtggtcctaagcagggaggtgtccttcctttcccctgcctgttggggctgcgcttccctgcctcgtgtggaggttgcgcccggtctgcagaaggcagagagcatcttgttgggaagagccctgcctgccttcccgttgctgtgctcctgcctccctgctctgctcctctcaccccttcctggaaactacctaaaatacttggttacttcttttttgaagatgtattctctgtcctagtgtttgggtgttgatacagtggaatccacaaaattgaataagatttgattttcattttaaagtgaaataaatcatttgggtgcatgttgggtgaaagtgccgtaattgatagcatccgtcatcagactttaattttacccctggggtgtaggagtgggtgggattaagtacaaaatctgcagaagccaggaagtgaaaacgtactgctggatttctgtttttcacatgtccccaacaatatggaccatttgcattaaacttaaatagcaccacttatttaagattcattttttactcttgttctgaaatcacaagttccatttgacagtgataggacaaaattatatttttaaactttgcaaaccacactccagagctgtgctaaaaataacaatttcttgtgtcaagaataactttctcaagttcctggaggaggcgagctgactggtggcaacgcagaccactaaagcttcagtgagcccagaaagtgtgcgctcagtcccacattgcagaggcctctccgtcagtattgagatggtggaaagtgaggagaagcaaaaagacgactacttctttccccatttcccggtctggtctttttggggt

SEQ ID NO: 74422 - DNA, 1036 bp, Homo sapiens
gggttttgtgacttgctgccttgccactatgaaggttagtagaaatttatgtatgtatttctttttgtagtatacaaaattgacaaaataaaaaatgacttgaattttcagagcactaagattagatctgtagagctgaaagacattcagatctcctatttaaaaatgttatgatgaagagaaattttatgttttgcatataaggaagctgaggcctatttaattccttttaaaaaatgcagcttaacccgtatttgttataggtggttatgtcagcctagatgctgctctcatttgagttgggatttcttcttaaataataaatattacaacaaatgtattctgtatgaaagatgattctaaagactatctgttctaaggactgttttttaaaggaaggatttagcttcatgaaatcagttatattttgtgccttttgttagaaatggcatcggtaagcacatagaatgcttagatgtgttcacagctttccttttacgttttgtggttccatctgatatttccttgtgaactttaagaaagtgacctctggttttcagctcctttcttgactcttttagtgatttggtgggtttttctcttgaggtagtttttcaaagtctggttcttctttatttatgtttaaacatctcatgactatttttacttatttggaaaattatagacagaaggcctttagctgcagatgaattttgaataatacagcaggactttttcacatttggtgtcacttttcttagcttctcttggcgtgagcttcattacagcagcatgcggtgcctgcagggtgggtggctggttggatgctggtgcacgtctccattcggatgccttttcactgtgcaccggcccctgtgctgggtgttgggagatgtacaatctgccactgcagatttttagtctagggaggcctgtagacatccaccatcaaactatcatgacacgtgttctgggggagcctggctggggacctgaccgggtgtggtgggggcagccaggctgtcaaggcagggct

SEQ ID NO: 74423 - DNA, 1758 bp, Homo sapiens
gtggaagtttgaaatgagcacttttagatactgttgctggggatgttgcttggtgtagtttgtagaaactttttggaggacaatttagaaagatgtattaaaaagttaactgtaataaatatgtcttctgaccagaatttaatgtatagctggtttacaggtatattcaaagatagacatacaaatatttttaatgcagccttgtctacacaaggaaagtactgtatatggtatctggaaatatactggaaataatctaaaaatccactaatggagagtgggttccataatgagtggtatagtcatatagcataacattaagtgttatgtaagcaccagtaagtactgccagataaatgacatgttgtcttaacttttgtgacttgtggagaagtgcgtgtagtgtgactctgtctctgtcacatggatgtgtctgattaggcatcacagtggcagaccaggacctttgaatgctgtgaagagggtgtcctctggggctggagtggtgctggtggtggtcatggggcactggaagggaggaaactgaaatttctctaaatgtatttctactgttgggcaattatgctacctttgtactagtaaagtataatccattttataatgaagtagactgttcttggtataatttttctcccactcttcttccccttttaggacatgaccgataatagcaacaatcaactggtagtaagagcaaagtttaacttccagcagaccaatgaggacgagctttccttctcaaaaggagacgtcatccatgtcacccgtgtggaagagggaggctggtgggagggcacactcaacggccggaccggctggttccccagcaactacgtgcgcgaggtcaaggccagcggtaagtggccgagcctgggctgtgtgtggctttttgcgatgagcagaaagaagtaaatgtacttgacatagtgtttactctccagctggacctgtgcaaatgacctggtcttaggatacagttttttgttagatgtaatggattttcacctcagccccacattggggccctggcatcaagggctctctagttactagccagcatttcctttcatcctggcattttccagacgtgaagagaaacatctcgaatctttatcattgcagttttactgtgaaagaattgatctttttttttttttttaagagctagtgtcaggacttggagttggcagtccgcaggctgtgtttaatttttgtgactatgggtggtacttttggcagtggtgtgcaatgaagtaatttctgtcattctctttgtactagtgatagtattttacaaatgcattgcttccttatgttttgtagttgttcacattgtttcactgactttccgattttgaggcttgtgttcttatgaaagaatagtgatcctcggcacatggctatggctgccgggctgtcgtgcttcttgtggaagcgtgtgggtgggtggacagaggtggggggtgggatttgtgaagggaacaatcatgtgtgtcactttacttgcatcctgccctgtagttgaaaaacaccgttgtatactacagttcctcagattctgctggggaaagagtgacttacagagaatagctgatacacagggagctgtggaaaggacatgatacaaaattgtagctctgctctagggcttgggtgactgagcctcagagccacaggtgtttcatatggaaaatgaggatgatagttctcccttgtgcggtcttgtggggttgaatt

SEQ ID NO: 74424 - DNA, 1026 bp, Homo sapiens
tgtatgaataagtgagaatgtattgttagctctgggagacaaatagcacatcttgatgcatgtactagatgcgcagaaaatacgtgtaatgtgatttcctgatttaaaaagcactagctctgtaacagactcgggtgaaaaagaatggaggcagggattccactttcttcacttacgtcaggtccttcaggatcctcagcgtgctcctcagtctcatgccaaagaagacagtgtggtgcggtgcagtggcaggaggacctggggccgctgtctggctctgcttttctcagctgtttgagttgggagaagtcagcttctctaagaggaaaagttttgtgtgcagagccccttgctcggtgccaggagtgcgaggagcacctgcagttcacatccaggtgccttctcgtcccaccctgggctgggcctttgctgcagtgatagctggtggaaagcattcctacttggtttcatcagttttgcactttatatttatctgtcagtttttaagacttaaattattttggctaaatttgctacactagtacagggtattgggaaacattttaattttaaggttaatttataattattctgctatctttaaatgaagtagtaaagattgttaacattgataaacctttagtttttaataaatgtggtaataaggtgtctgagactgtcatattcactagggaaagtctgtagttcccagaaattgatttcaatttttagatgcaatctaaagagtaaactgtttttttagttgagagtaatattacatatgttaaaatacatagatttcaaaggcacagtccagtgagcttttacaatgtatatatctgttgtaaccgctacccaaatcaaaatacagaacctatgtatcaccttagacatttacgtcattctcctttccttgttgtccacgcccccatcctacccttcacctcttctctgatttctgtcaccatagattagttttgtcatctcttagacttaatacaaatgggatgatgcaggatgtccttt

SEQ ID NO: 74425 - DNA, 1041 bp, Homo sapiens
gtcactaggactgttagtttcctaaaatgcgaagccattcaagagcagtgcttgcgggcgtgtgctgtgttgatcctcttctctgttattaccttaatgagtgtgtttgtcaggtcttaatgtacgtgtagcattttcctgaagtaactagaagaaagaatacaggtgggtttttgagtcaggagggtctttgtgcctccttcccagggctgcccagagagtggaggggcaggctgaggcccgctcgggacagcagccccggggcaagtcaccattgctttagtgctgggagtcagagctgcggcgagaggaaggtcccccgagccagcaggtgccgccactgtggaacatgaagcttgtgtgccctcccgaggtccctgcaccacgagagttcccgctgtgttggccacagattcctccccaccccaaagacacagcagtgaattggggtcaggcttccctgtgccaaggctccttcctacctcctgcctttgtacttggattctttcttggtcctcttgccagcttttccatgtgtgtgacggtctttaagctgccacacctggggtagactaatctgctcatgctgtggagtaatttttaaggattggttcaagtgcagtgggttgaagtttaaagtcttatttgcatcctcactgtccttgtgttacttgggtttaagttctaagtgtgagccctgcgagcgcagaatgccaactctgaccgttttagcagctcagaccttctgcagcgtccagtgatggcagcaacacttgtccatggccagctattttgaatgaactatgggtgtcataatttagcctttgaaaatgatttttttcccagcagtttgttcctctgcacttggctccatgcttgcatgtgttttgtggctgccgtcagcccacagcactgtgtcggtaaggactgaggagacccactgtgtacgggctgctggcatcagcagaactgaagctgaaagagcagtctttggtcagagtagctgtaactagctgttttgttttattatggcactacttt

SEQ ID NO: 74426 - DNA, 1023 bp, Homo sapiens
tgggcttgtcactctgtcccttgtcgccagttgagtttcttgcttacagtacagtattataatttattatttgagataaaaatttttgtattatacacacatctgctacaaatgagctttttttggttcacaaacacagttcctccaccaattctaaaatcatttaatattgactttaataatggtacctttttctagaaaagcactaattgtttttttttttgtgggggggggtcttttttagggaaagcttccaacgacaggaatgacaatcacaaagcttgaggacagtgaaaatcatagaaatgcatttgaaatatcaggtgataggcacaagctgtgtgagtgctgtgtctcggggaggagaggcagcttgtccccgcgtgcagattcttgcttgcgtatttcagaaggtggtgtttaagcgctgagtggaattctggggggtgtgcacgcacgtgctttttacctgtgtttccactcggcctattttttccttctctcctatagggagcatgattgagcggatattagtgtcgtgcaacaaccagcaggatctgcaggaatgggtggagcacctacagaagcaaacgaaggtcacgtctgtgggaaaccccaccataaagcctcattcagtgccatctcataccgtaaggacttggtgcttctcctccttccagactccaggcgtggcatcccgtggctgagctgtcagcaagtgatcagttgctttaaaacctaatcaatatttggataaaaagtgcaaaacacttgcttcacatttctctgcagatctttggccctcttcgtgcagtagtgaattgttttccaatgagtgttctcgagaaacaaccctgaattgtgcctcctcacgcacagttcagaggtgcttgggtgggaagctgcttctgctccgtgtggccctagaagactgatttaggggagttttacactcaactatagatgatttttctgagaattttaactgtttattatgcttcatttaagaaaacaaaaaataaa

SEQ ID NO: 74427 - DNA, 1060 bp, Homo sapiens
aaaattttaaccaagtagtcttagatgaacagaccaggttcagttggccacccaaccgtgtctgtgagttctgcatttgtgaattcaaccaactgcagataactactcagaaaaaagaaacaataaaaagtaacaatataacagtaaaaaataatacaaataaaaaataattatacttataacagctatttatatggcatttacattgtattaggtactataatttagaaatgactcaaagtatatgggaggttgtgtgtaggtacaatgcaaacaccatgccatcttatatcagggactggagcgtctgaggattttggtgtccaaggggagtcctggaaccaatcccctgtgggtgagggccgactgagggctgagctttgtatgtgtcatagtgcccaccacatttcttcatgaccagggtcctgtgatacgctgcggcttcacggcccctggctgcctaaggggaatggcccacaattccttttcttttcttgtcacattgcctgtattctgtacttccatttctcctgtgcaagaaaagcattgaacgatacattgatttttgtttttaattcatattatgggcaaaccactctggggcttcagggagcttgcagtcatatatgccctttaaacctaacactcaaaactagggagtaataggagaaattgctcgcttgtgctggaaaggtggtatacttactcaaggtgtctggaaatgggatcatagtgaaagcagctctttttacattaaatgcttagtaaaacgggttttagaaggataatatattttacctaaaatgcagctctgttcaatacacacatttggatgccaagaagattttgtaaaccaaacttccttggtattgatttctaactccaggaagtaacggccctcacagtctgttatgatgtagttctcgcagtctgagaacagaggtcaatttgatagaagcaggagtagggaggggccagggctactgtgatttgccttcacctagcgaggggcatccccgcctctgcatggagggagaccctggcggcccagcctgcctct

SEQ ID NO: 74428 - DNA, 1087 bp, Homo sapiens
gttgtggctcttcctgtcgttctcctcctcaccccctgcctgtcgcgcctgtccctccgcccgcccgtcttagcatggcaaggcactgacctgatgcataatcacgtcttggctgatgatgaccaaccaagcctagactccctggggcgtcgcagtagcctttctcgtttggagccttcagacctctcggaagactctgactatgacagtatatggacagcccatagttacagaatgggttctacatctcgtaagagctgttgctcatatatctctcaccagaactaatgcacttctgagcttttcttaacaaatgcttgttgtatcgcagcctgcttttcttagatgttttcttgctgttccttgtctcttttatgtgatattttaacaacttttgagagtgttcctgatatttcccattgtactttgtggaggcttaactgccgatgcgagtatacattcgaatgactgactattggagggaggtggtgtgttcacgtgagcctacatccgagggtgctcttcgtaaggggtagttgttgttttatagctccaaatggtttttttattctcagtgtagcaactgtttgatttctttctggatacagctgtatgaacacttttctattttatactgaaatcacacaggtttgtgatctaagtgccagaaccatggaggagactctggccttatctgtagggacctaaattttttaagtgctatgaacactgatcaagtagttgtggagagatgagaagaatatatgcagcaaaggtgctgtgagcccagttccaacggctgtgttctggtaatcgtgcagaacagcatgtgggctctgggccttggcaggtgcacagacgggcgggcgtcacgtgtgttcagagcttgtctccacctcacggctctgtgctcttctgtgtgctgcgttgtggccgtgaagtgggagctctcctttccaaaggcagagcttactgtcatggctcagatgttcactcgcatcttcaccccaaacttccctgaattgcagtgatttctgttataaggcacatagcaagcctgtaccactctacagtaaaatctctacac

SEQ ID NO: 74429 - DNA, 1012 bp, Homo sapiens
ctttttcttgatgctaagatcactgcagaagaataacctgaccttttctttgcatttgttttgaatgtctaacaccattagcttttgtgatctggttaagaagtattagtgccacaagcctgaaaagacagttctcctgtggcagtggcgatgtggcatccagagggccattgtttctacttttgtgggacttcagtcatgctgataatagaatcttctgttcatacaattctgtaatatttatttgtacagttagtattctaatgaaaggatgaagagtctgaactagaaggtaggtttaagccatcaccaggcctttgcaaatggcctaaatggtgttccctttgaaataacgcttgccacaagtatataataagctatattaattgtgttttgcataaaattgccaaaacacagtaatgtgtatatagtggtataagatcttgaaaaaaatctctataattgtgctctttatctgtgaatgggaaaagccatttttagtaggtgactaccatttgaaaaactcaattggatgtatatctgaatgttgcattgtattgtacagtatgcatattattgtttgtggttgcatatggcaatgaagtgtttgttttatattaaaaaaaacctgttatgtacagttgaaataaattttgcatttgctagcccgtggcttttaatatttgttacatgggggaggggaatagcatagtttgcagtgtaatataatttggctcttctacctgaacggaacatcttccaaaggcaggcaggtgatagatagaacccttctgtctgccctgatagaaaagcttgcactctcttagattagccgtgttctggacaagacgaagtcactccttgtacatttcttatttcatctctttcccgtttcttaagaagctttcagtcactggcgggtttgtcttcagaaagaagcattattttttgtgtgtgcgcataaatgggaaaaagcacaactttaaaatgtttttatttagactaaggccag

SEQ ID NO: 74430 - DNA, 1042 bp, Homo sapiens
ttattaaatgttgctgtagagtaaaatgtttttattgccagatctttgatgtataaacactcactgtatatgttctgattggtctcatatgtctttgctgaaactcttggaataatggctcaaaatgggatgaatatccagagcagtacagtcacaacctttaacttcctccctgttgaaaatgctggggtttcaacaatccgtaattccgatttgaaaagggctacagtttccttccctctctggctttggtcatgaggaggcctgggctcggtagacagaggtgaagagaactggtaaaagatgccctcctctagcttgcctggatgaacgtttttaaatgcataattgctagaacttaatatttaagtgacatggtatagtcaagttgtttttcttcattctgccatggtattcgcctgaggtttatttattattttttcatgatcctaggttcacgcaaagaatctgctccacaagttttgcttccagaagaagagaaaattatagtggaagaaactaaaagtaatggtcagacagtgatagaagaaaagtaagatgtcttccggtattctaaagcagatgtttgacctctgcggtggggtagtagagtccagacaactccctgagggcgggggtatggcttcagaagcttcactttttttttttttgagacggagtgtcactcttgtcacccaggctggagtgcaatggtgcgatctcagctcactgcaacctccaccttccgggttcaagcggttctcctgcctcagcctcccgagtagctgggattacaggcctgtgccaccacgcctggctaatttttgtatttttagtagaaacgagttttcaccctgttggccaggctggtctcaaactcctgacctcaggtgatctgcccgcctcggcctcccaaaatgctgggattacaggtgtgagccactgtgcctggccagagcttcacttttaaaatgtcttcataggctgaagttgcccttgactaggcttgaacctgccatgcacagaggttggcagtttttag

SEQ ID NO: 74431 - DNA, 1082 bp, Homo sapiens
ctggagcttattctgcgaatggagacgatcaaaccatgactgatgaatccagacaggagggattgactctgaggacctgagctacatcaatccactctgtgaacatctcagttacctcattctgcaataagttcagtgactgactaaaagtcttgtttttccagactttgaattgaatatataaatattatatatacatgtttcttgtaaatatcccattttgaatgcatacctgtggtggttctgtccgggctaatccccatgctagaatgtcctttccagctacgtgaataagaagtcccatgcccgcatccaccggaagcagaagcctggtggatgcctggttcgttccgcagcaccagggcctccaccgtgctgtggcagcaccccccatgtcggtatttctaaataaccttatttatacctgcagagatacacttcagtcccattcagaagtcttctcttaaagcagcattacagtcccagacctgcgggtttctgagggcaacttgctggctgacagactcagtcttgacctcaaggaaggcccatacggcactgccgcatccacctagaggtgtttgctcttgtccgctgtctgagtactgtgattctcagatgagtttgctgcgttttgggaggacacagacggttctgtataggctagttcagtaacaacaaaatacactgttttgtcttccctcaaagagagatcttactagaacctgtaaatagaatgtattatttattataagtcactgcagctgatgaaaacagatggaggccatgctgcaggctgatactgatgggtggagttttgtcatcaggccagcctcatcccgaggtctcctccaccattggccgtagccagcaggcttcagtgctcaccgaaagtaaaatcccctccttcagcaagaataaagcaatatacaccttaggttccactaagtaacataggcataagcagggaacgtttcccccactgtgttccagtgcagaggagacgaagcctgtcctcaccgcggctcgctgggcccaggctggctctggaaagcctgtgcggtcctgggcaggaagcccgg

SEQ ID NO: 74432 - DNA, 1065 bp, Homo sapiens
gcttgagttttacaagttattttttggtgatgcgtaagacattgcagtgggaaaccattcaacttgagtttattggagtttgctgttgtagcaggttttaactcaggaacaactcttgtctgatctctccgcccctctgccgggaggcgacattaactgtcctctcggagccggtagcgttgctgtccgagtccccaggacggatctcctgcagacctgccttaatgctcagatcgaagtatttcacaagaatacttgtgtttttaacagcccttcccctggacggtgcggccatgagggcctcatgttacggcattgccttttctttctgtggatccagtatcttcctcggctttttagggagcaggaaaaatgcgtctgagagcaactctttttaaaaacctgccctgttgtatataactgtgtctgtttcaccgtgtgacctcccaagggggtgggaacttgatataaacgtttaaaggggccacgatttgcccgagggttactcctttgctctcaccttgtatggatgaggagatgaagccatttcttatcctgtagatgtgaagcactttcagttttcagcgatgttggaatgtagcatcagaagctcgttccttcacactcagtggcgtctgtgcttgtccacatgcgctgggcgtctgggaccttgaatgcctgccctggttgtgtggactccttaatgccaatcatttcttcacttctctgggacacccagggcgcctgttgacaagtgtggagaaactcctaatttaaatgtcacagacaatgtcctagtgttgactactacaatgttgatgctacactgttgtaattattaaactgattatttttcttatgtcacagaatgtgtcgcttcgtcttctttgatgtgttttctgtgtgcttgttagctttacagtttctttgggctgttttagatttgaaaattctgtctgtctttgatactgaagataacatgtttcctttaaagtctagagtttgagaaaatttgaagatttttttttaaaagacaaggaaagaacactggaagtcttaggaaca

SEQ ID NO: 74433 - DNA, 1122 bp, Homo sapiens
tcacatcccaatgaagcagagatccaaccgtgtaaagtggtgtaaatgcatcactccaggaagatcacagcgaggaagggaactcacgtccaagctgctactgccgctgcttttgccacctctcccatcccctgagcacctttttatctgtaccgtgcaggtgctggcctgtttgtaagtgttggcatgtatgtcgaacatggcttaagttagaacaatcgccgcatgcctgtcatccattttaaaagtgagccttaatccctatagcagcttcatgactggtgttataaggaacccagaagagaacacaagctctcaagaaagtttttgacttggagagggctcactgttttgcaagggggtatatcatttttgcatggaagcaaccattaagttctttccatcattctaactttaacagctgggttgtgtgactgtgcttttcttgactcctggtttctttcgggcctgtaggaagagcctgggcagtgggccctgccttggggctctcactgtgccctcacattacttttcatttctttgacatctttctcattcaaaacgacgaatgaacctttgtgctgtgcaagttgtagtattcagtgacagggtattatgagctctttgtgcacataattccatgttatgaaaacctttcaccaacttcttaaattggctggtttgaagtgcacattgtgttatggcataatctgtattattaagaatatgaattgggaattagcattagatctttcagaaagaattgggaattcaaagagaaagacttgccttcattcttcagtcttgatttagggtatgttatttaacatgtcatttcttccaagtatctgacttcagtttcttcatgggacttgctgagatgatttcaaaacttttgtttaactatattttgggaacatttaccaagacgtttcttaaagaaaataatcctttcttcaattgctgctgttctgaaagataaaccagactttgtggtttatgataagccaaagatatggtctgtaataaatagtgttgctagacagacactgtacggagcgcatcattgaggttgagtctccatctttaggagcttggcatcaacgacaaagaacgtgagca

SEQ ID NO: 74434 - DNA, 1050 bp, Homo sapiens
aggagattagactcagagcggccttttcgtggctgggtcccaccttgggatgattctaaaaggaggcggctctgaggacggccacttaggtcttggaggccctgccactcagggagcctgcaagcttctcgggctgcagaggggctggcgtgttttccagcccccggatccccgctgggtctgccaagccccaatcaaggggctgtcgccgaggctgccccttcaagagattgctggaggtgggtggggaggggatggaccatctcgggacccctaatgggctcagtagcctggggctttcaccacaaaccccaggcacggggagcatggcaggcgacccctgagtgtgctgtggcctccgtcacaggcaggttgggaggttgtcaccaacagtgccagccacagcagcccagccctgtgacggctcagacatgtggccaccagtcggatcagggaacctgcagaaggcaagaggcgtgtctcggttccacttacagtcctctgagaactctcagagagaaatcacagattctgaatttgaatatgaagaataataaatgagaaatgaaatcacaactcatatatcgaatgcaccactgcgcagcagacaggactttaaatagattcacgtagacacatttcaaaacgggcaatttggatattaaaactcaaatggcatcagtgactttagggagcatgtgccagtgacacgcacacagctgagacacacagtgacacgcacacagctgggacacagtgacacatgcacggctgggacacacagtgacacacacacagctgggacacacagcaacacacacatggctgggacacacagtgacatacacatggctgggacacagtgacacacgcatggctgggacacacagtgacacacacatgcctgggacacacagtgacacatgcatggctggaacacatagcaacacatgcatggctgggacacacagcaacacacacatggctgggacacacagtgacacatgcgtggctgggacatgcagtgacatgcacacgtctgagacacac

SEQ ID NO: 74435 - DNA, 1082 bp, Homo sapiens
tgggtgtgtgtgtgtgcgcttgccgtgggggggtgtgtgtgtgcttgccgtgggggggtgtgtgtgtgcttgccgtggggggggtgtgtgtgtgcttgccgtgggggtgtgtgtgtgtgcttgccggggggtgtgtgtgcttgccgtgggggtgtgtgtgtgcgcttgctgtgggggggtgtgtgtgcttgccgtgggggtgtgtgcgcgtgtgtgtgcttgctgtgcgcgtgtgtgtgcttgctgtgcgtgtgtgtgcgcgcgtgtgcatgcgtgtgtgcgtgtgtgtgtgcacgtgtgtgtgtgtgtatgtgtgtgcttgccgtgcgtgtgtgtggtgtgtgggtgttggggtggggtggggcaggaaggactccatccccatcttcttaaggaatgtgaatgtgaccattgcctgaagtagaaaacgtttgcaagtggttccaaggaattttagacccaggagcactccgagccggatgtgggagctgaaggacttcacattttgttctctaagtgccatcgagcggcctctcagcggcgggatggacacggcagtgccggtggggggagcctgacactgttctatttctagttcttccattaccttgatgtgtgaccttgtaaaatcttcccttaaaaaaagtatctctgtggctgatttcttcttcatcttgaaagtacaggtggtagtcatgaatatttgtttcctgcaggttggttttgtaaacctcttctcgaaggaaaagtacacacagctgtggagtattgttcttattaataacttcatcttggcatgcactcgccggcttctaagtctttatattaatattctactgcagaaaatatgccacaatagcaacctgtctgatttctctgtcttctgttttagaagctgacctatacactaaatagttgtcctaaacagaacacattttttttctctttccacgtcaatgtctaaccatggcatctggtggatccttgcagtccagctgtctgttgccagttgtgttggtcatcttggggctgccatgacaaaggaccatagactgtgtgggtcaacccacaggaactgattt

SEQ ID NO: 74436 - DNA, 1048 bp, Homo sapiens
acaaagctgatttccaaatggctttaatgacagacaatctgcataccaatcgactcgtctgcgcacatgcaggctcagaacaatgcgggaaaatatgcaaaaaggtctgagatgtgatggcaattgcttcccagtatgctgaccttcggtaaacgaaacaaacaaagtacagttctctttggatgagacattaatgatcattaagaatgggtacagctgcatcgtgcaagtgctttgttaaaaatattcttttcattttgtgtctgtcccgtaattataatggaagtattgtgcaagtcagccagtaagcatgtggagtaaaatatttgggttttataacatccgtgcggtttttaaagtgcattgtcaagtggagtggctttgccatatccttcatgtgtcacctctgacttcagcctcacggttttaaggtgccgcacgccatgtaattgtaagaatccactgctctttctcgatatttacatcgtgcacacgctggcctccgtgaaagggttccctgtggagttctgagacttcattctggttaatttggggaaaacagcactgcacccttctcaatcactaggaccacgttaactgctctcctctctccctaaaggtccaacatctcaagaaagccacaaaacatggtcaactcaatttctgaggcaaatgcctgaagtgcccactgagtcattaaggaccaaggagagtaaggaaacccaatgttcctcgtgagaaagtgatttagaaatgatcccttaattggtcttcaagctggggaagaccttggtcacctgtttcaactgtttggatgaggaaatcagatcttgggaggtaaggactaaactctgaccttttttctctcttacccattccttacacaactgtgacctgaatgctttcctaaggagtaagaagaagccagctctggaaaacaagaaacgaaagacctattcctttgtctccttgagccaatcatccaagtctgtgaccagactctcctcccttttgtggtttaaacagtgcagcacccccagcattcctt

SEQ ID NO: 74437 - DNA, 1016 bp, Homo sapiens
ctttaaaaaatccatttcttttagaaaaaattagggtgataggatattcattagttaagatggtaacgtcattgctatttttttaacatcctctttagaggtaatttttgttaacataaccaaaaattaaattgaaacaaaatgtcccaactaagaaaatatatagagcattttatttttttttagtgttgtaaaatattaacctctgtgagatcctttgtatcttaatgcattacctttacacatatttattcttattttctctcctttcagagtttacatttttatatttaatttactatttcagatttttaaaatagtatagaaaaaagtaggagtgatagagaacaaaaatactcttatacagtgcaacccaaataccgcgaatgcatcagctaaagcagcgtgtaaataggagtgacgagaaagttaatggagtattttattttcaaagttcctgataagcattggaaagaaatcgacatggataatgaagatttcctttttccttgcctattttttcattgtaaatatttatatactactgaccaagatgttggggtgggggggattgttttttgtaaaaatgtcattatcaggtcacataaatctgcctttatgttgcataagtgaaaatttagaaaattaaaagcaattatctttcagatgcattcgttatttcttgagtagtttatgaagggacagtttacttgctggatttgggggttgagggttggtagaatttgatttaatatagtacagcatatgaattatttaatcagtgaaaccaggaaagtagactttgtgtgacttttggtatagaagcaaaggcaatgtcaccgctcaggtctcaggagcggtgctttagttatctgaatccacctctgactcctttaggtgtggattacctttaaaactaaaggggctgtcaggaatcctggccatgcagaaatgaattcatggcaaaggccagaaattcaatgtaattttagttttgaagttcataaaatcagaaa

SEQ ID NO: 74438 - DNA, 1073 bp, Homo sapiens
aatctcaccgaaaccataacacggctgaacatcacttaaaacaacactttattatgcccctttacattgaaaaggaattgtagtttgaggggttttgagtattatttgatttgaaatcttagaccgtatttatagttttagtagggaaaagtacactcataattctaggatttcagatgaacctcaaagctgaacccattcttcggatgcacattgaccatatctgtgtgttgtagattcctaatggcaagaaagatacttggggtatgtggagtgcacgctgtgctacaggagccccatgagacagatgctcggcagatgtcacaggtctgagggcagctgggtctcttctgagggtcttagagctgagagtgcatctcatgactgtggacgctatagttcactgtgtttaactgtctgcggagccatgtaaggagcgctgaggattctttgcagagttgtaaactttgtaagtaaatcttagatatgcctctgatacatcagtcatagccattggcaggggaggcgcttgagcccttgagtgggtgtgctcccttgcgagtcgctgggcggtgcatggatgtggacgagggccctttggagctctggttggttaggttgccacctcctgcctgtttattgcctgagggacagtgtgtcatccctctctttaacaaatgaattttctccatctgaaaggtgcattgtctaagtctgccatcaatgatccctaactaaaaattcttctgcctccttgaaagcaagttctttttttgtcttttgaaatttatttttttaaacatcgtttgttactggctgccatatatttcatttaggtgagtgctggtatataatgtatatcactgtctgctttacaactctctggctctccctcacctgagcctctgtgttcgagaattctagccccttcccgagacccaggcaccgggcaggtgagggtgtccttctctgtagtacgtcctcctcctttcccaagtgcacggcgcgtccctggagaccgggtgccagggtcggatggcgatgctgcctgttagtggaatctgtgccttcag

SEQ ID NO: 74439 - DNA, 1007 bp, Homo sapiens
tttaatttatttttgacacagagtctcactctgtcaccaaggctgggagtgcagtggtacaatcttgggtcactgcaaccttcacctctgagattcaagcgattctcctgcctcaccctcccaagtagctaggattacaggcacaagccaccatgtctggctaatttttgtatttttagtagagatggggtttcaccatattggccaggctggtctcaaactcctgacctcaggtgatccacctgcctccctcccaaagtgctgggattataggcatgagccaccgtgcccggccttaacaaattatttaaattagcaactttcatatctcctgccttgttaatttgcatacattacgtattattttcatagcataaaagataccatagtacagataattgcatcgattatttcacagagtctgagtgccttgacaaataggtaaactgaacattgcctagataagagataattaattatttcgtagtattacagatctcattaagagtgtcaaagttgtcatgccatgtacataaacaattgctaatgcaataatgttgaatgtttaggtctgtaaagctctactttagtagaaggactcgaggaaaaaagtttatatcatagatttatttaaaaaaggcaaatctatcactcgaggccaggagttcgagaccagcctggctaacatggcaaaaacacacctctcctaaaaaatataaaaattagctgggcatggtggcacacacctgtaattatggctactcaggaggctgaggcatgagaatcccttcagcccaggaggcggaggttgcagtgagctgagttctcaccactacactccagcctgggtgacggagtgagactcttatctcaaaacaaacaaacaaacaaaaaaacaaaataaaagtaaatgggtgaaaataacctgaaggattcttttcagacgggagattcttctaggcctaccttccatgagattcaccacccttaggagctactgttacaga

SEQ ID NO: 74440 - DNA, 1054 bp, Homo sapiens
gaacggttggttttcttaaaatattgcaagagtcatcttggaataaaaagatttggaacatatttagaggcagtgggttttcgtcgtaagcaaatggtgatgaattttaaacgcatagtcacaatattcattcagaaatacaccatgcattgccagatgtttgcagagcacctactgtgtgctcattattgcctaattggtgaggttgtagaagttaacaagaagatgcactcagaactgttgagcagtttttaacaattgggcattattttactgctttttctttgcgttaacaagttcttcagcaagaagcttaaggtcttgcaattatgtgtttgtttctgttgttaggtctctccaggtgacactggatgggatgtcttcagcctcgattatcatgttgacggaccaattgcaactgtaagattatcctgcatcattttatagtatttacaactattaagattgttaaacattttgtttgaaattggctttcttctctggggacttctaattcaagtgatcactcgacatctaagatctactcattgaatgaatacttaagccaaaattgtgtgtgtgttttaaatgattattaatgagtactgaaatgctctattattttaaaaattcttaaaaatatcatttgttctatcataggtttcagcaactccttaataaatggactgttcattttcttccattattcttatactgtggcaactagttaaggataatgtgaaaggaactataaagtgtattttaggggaatcatatttttactacttagataaaatttggtatttagtattcatttaaaccgatgaggaagcagctgtactttgttcatagtgcttttacctacataacagttaccacattataaaaggctgaccaggaaagctgtctttttacatgtctgcaattaaaatgcctctttttagtgcgcatttttaaagtattcagacttgaataaatttccttgaccaagataccctctaaacttacttcagtcatttttatatctgaaatactgaagaaggacattgcattt

SEQ ID NO: 74441 - DNA, 2843 bp, Homo sapiens
tgctttcttccgctatgttactgcttagagtcaggcgtctttattggtgacaatctggttttgtcccctagacatctccaccaatctccgtagagttcactctatggtgcatgatactactactcaacttttgcgagttgtacaattcacaaagcttatttgcatgtgctgttttggtcttaagactaatttatggaaacatcttatgggtatggacgggtgactcagcactgacttgccctattaccagtgtgttttggtgagatttacggttagttacagtgtattaagggatttggaaatcatgaagacacacatgtaggtgtctgctgtgaacccagctggcagaattgttttcatgtgtgtggtcttagggctctggtctcctttgtggaatgtccagctgtctgtgcctgcggtcagtctgttactgatgccacaggcagtggttggccctgagtctggatgtatgtgccttcatttctcctctgtggaaatacaaattacatatgcatgtgtgctcttccctgttgttctttacagctgcagacctattcacagacttggaaaatgcatttcaggggaagattgatgctgcttattttgagaccagcaaatacctgttggatgttctcaataaaaagtacagcttgctggaccacatgcaggcaatgaggcggtacctgcttcttggtcaaggagactttataaggcacttaatggacttgctaaagtaaggcactattttgatttctataaataagtaatatatttgacatgataaggaatcttgtatttaaaagaataaattatattaaaagaaaatgagttgaattcttcgagcatactttttaaaataaaatctgaaaagaatgtaaaattttcaaaaggtaaagccccttcatttttctctggttatcagcagagcatcattgtcatgttctgtgctttattcataagagaaactggcatttctttccaaaactgtggggcttacagtcttcatgtatgaggagttggtcaaatcacacttaactttagcttgagtttgaaataaagctgaaaaataaaatatatattttaaagttgaattttacttttatatttgtagttaatgttcacctaaaaatgaaactatgaccttttcattttgctccctgacatttctcatggcatcttcccttccagagttaaatgtatgtccttctccacaagttctggaccagagcctgctgtgcttctaggtctagagacagtgcagaccccggcccaggcagcgtgagcctgggcatgagcatcccaggggtccacagcctgggcctggagattttcacccaagtgtttagaagaatgaaacttcttttctggtgttccttttaggacacttaaagtaagataaatgttccctttaagacacaaaatagtaacttacctttaaaccctgccagtgctccccaagcaattgttttaggcctcaggtcctcaagtttcagtgtatcacagactagaaagcttgctgcagtagcttgtgggcccacttcagagaatgagattctcaggtgtggggtagaggatttgcatttccagccagttccagctgctggtgatgctgcgtttgtggggactacacattgagaagcactgtttgagacatgcaggctcttacatcctaccttctagccagaagccagtctcccgtgtgaaaactcatgtggctttttgaggcgtacacagccatagctggcttgtgacatgctcatgccttagtcatagctgatgcctgctaacacatttgtaagaaaagaaagttcactagtacagtaaatgctggttgtgatgaggtcaacacctgtttgaagtatgagtggtgatgagcttttaaaggggaaatgttctctaatgccatgggggcatggggtgtgtatgtgggtcagttggtgcagatggagatgaggagccaaagtgaggtttggaggacactgatggtgtcataggtcacatcatagagccggctgaacgcattcgccttgtgcccaatcttaatgttgaaagtatcacatgcgtgctataaaatgaaaaattcatttctcctcaatgtcgtattttaagttcctagtttttaggtttatttgacgttgtgtgtctttttcaccttgtctctgccctgtgttttgtagagcttacacgtctacctgagttgattagtggtgttcctaacttggtcacccccgattagagacgtgttagcttcatatttataaaagcagatatcagtaaccctcaagaaatgcttgctgaaagtgtagtgtttcttggccctttagaatcatgacatccatgtacctaattgctttgatttgatggaggcctctcctcttcccattgggtctaaaaggaaattatatcagctcatgctactcataggccagtctgaagtttgaaaactttgttaacatgtatagcacatttaagtactttcaatttaagctgaatcaaaatcagttctttttttttcttttttttgagatggagtctcgctctgtctgtcacccaggcagtgtagtggcacgatcttggctcactgcaacctctgcttcctgggttcaagcgattctcctgcctcagcctccaaagtagctgggattacaggtgcccgccaccatgctgggctaatttttgtatttttagtagagataggatttcactatgttggccaggctggtctcaaactcctgacctcaggtgatcctcccaccttggcctcccaaagtgctgggattacaagcttgagcaaatgttcctggccaaaatcagtatttttcagattttaaagaaatgtaact

SEQ ID NO: 74442 - DNA, 1030 bp, Homo sapiens
agaaatactgaaagaacatgatggacaatattttcataatctaggaatgggaagatcttaggaagacaggaaactcagaaaccataaaggaagactgacatttatctacatataacaaaaaaatagatcagaactaaaatatggaccatactataaacaatggcaaatgattaacttggaaaaattaaatctctaatatttaatgattcacaaatggtcactattcctaatgtacaaagaatttttgtatattgatgagagaacaaaatgaatagcaagatgggtcaagggcatgaaaagaccattcacaggagaagaaaagcaaatggcaattagaactatgaaaatatgctcggcttcatttttggttaatgacagcaatataggataaccatgattccacctgactggcaaaatctaaaatgagccaggatgcaaaaacaggacatcttgcccgtgggagcgtcagtctacacagctgtgtggaaaggaaacctggcattgtctataaaaactaaaagctactttaattcagcagttgtgcttttataaaacaagtttatagaaataaaagtgcaattctattagggtgtatgattgaaaaatgagaatggctgcattgttgtagtggcaaataaactggaagcaacagcaattgaattttctccttactgctcagtttcctttctaacggcagtgatgtaggtgcccgtcagggtcagggcaggggagctgcatgccagtgaggaagaaagctcctgagcacagatggttcctgggggagccacacaggggtcacttctacagtgccacctggctggtgctggccccttgtacacatgggtacatgtacagcaaggtctgcccatagagcttgggacttgtctgtgaacagaggacgccggcctgggcacctctgtgttccaggctttggggctttgcaaaagagagactgcaagggcaggcagactgatgggaggagacacacagctgctgcctgtgagggaggggaaccccaaaagcctgcacc

SEQ ID NO: 74443 - DNA, 1841 bp, Homo sapiens
taccctgtaaattatcctttgttgtacagagaatctgaccaatttacccattcccctggtccggttgccattttattgtatctaagtgtggccttaggagaaatctcttggtagctgcctgcgtgattggcaagttgaagttggaattttttatggtctgtattaatggatctgattctcagaagttgcttgctaagaaaattaccctcttcatttctgtttttagtagggaggccttggcatttgtccagcaattaatgagaaatcatggtacaattatgttttattttttttcttaattctttctgcgtttgacataatggtgaaaattaaagaaccttgagtggaaaatgccttagtaaaataaaagcgtatcgcaattatattctgaccttggtttttttccctctataactctatatttttcacagaattaattatattctaaagcgtacccaagctgtgtgcttgctacgagatgtttgctgctggagtgattgcatgctcctttgcccttagatgaagcagtgctttcataacttctaaacatgcctgaattgcctgaggttttttatggcttacattttctttattgttcatactgataaaaatccggctgtactccaactattaggataaattagtgtgttgtctgtagaaacgagctcttctgtctaactgaataacagacatacaatttatatgcagttaatctaatctgtagcatggcaagctacagagcagtcccagcatgagcgcggtgacttcgtcactgccgagattactcaacgggggcttatttctgtcatggacaattgaagtctaggttaagtcgatgacgcctccgtgatagtactgctgtttacccctgaagggcaatatagatctcaaaaggctaaaatagatcagtgaatgcttcagtcatttacattgatacttaaagataagacattttagttgaaaataaacgtagcagcctcttccctatggtcataaaaatgttggcacttattcatgtgcctacttaccaggagattggctgtacataattgatagtgtctggcccttaaaaggatcaaatagaagattttgacatcattaaaattttgtttcctgaaatacttactcttggaagtagatttctgtgaaagaaaaaaattcatttttggttggttgccctgggaaaatgacgttatttaaaaaacaacaatttactggtagcatgtgttcagtatttggctagaattacttgattcttttattaaacagtgttttttttctaatagaaaaatatttgcagtttaaacaatgttgatcacataagcacatacagaggataaagttaaaattctccagtaaccctgtcaggaccagacacattctgttaatatttgtatatactgattttttctgtgtatttgtgtgtatcgtatgcgtagtatattgtcaacttgttcaagtaaataatgaacattattttatgccattaaatttttttttgacaccaaggcttattaaaatgatctctgaaactctattttgtgaatataatcgtcccatggattacgaggggaattggttctaggacccctgtggatcccaaaatccacacatactcatgtcctgcagtcggccggtggaagctgtgggttgagaaagcgggcctcccgcacaagtgcgtttcacaccccgaggatgctaagtttctgtgtgcgccgttggttggaaaacatccacctataagtggacctgcacagttcaaattggtgtgattcaagggtcagttgtatatgcgattttttcctgggaagaactatacttttcatcagattgttggaaag

SEQ ID NO: 74444 - DNA, 1109 bp, Homo sapiens
tcacaaagaaatagaaaacctgaatagacctgtaacaggtaaagagattgaatcattaatcaggaaactttagcaaagaaaagtgcaggagccgatggcttctctggtgagtgctaccaaatatttaaagaattaacagcaatcctatttaaagaattaacagcaacccttctcagattccttaaaaaaatagaataggatggaatactacttaactcattttatgaagtcaacatgatacaacacacaaaaactacataccagtagttcttaggaatatagatgcaaaaatcctcagtaaaatactggaaaacagaattcatcagcatagtagaaggattgtacacaatggccaagtggaattaatcccaagaatgcaagggtagttcaatataatcaaagtcaatcaatgtaagacatcttactaaggcagtgaaagaaaaaatgatcaactcaactggtgctgaaaaagcatttgatgagattcagtacccttttatgataaaacagtcaaacttggaatagaaaggaacataactaataaagggcatctgtgaaacaccaacagctaacatcatacttaaagattccatgctttcttcataaggtcaggaacaagacaagggtgttcactcttaccacttccttttagcattgttgagaaagttatggccaggataattagtcaaggttttttttttttttaaaaaaaaaaaaaaaaaaaaaggaaaaaggtaaaagcatccagatagccagattggaaaagaaaaagtaaaaccagctgggtgcagtggctcacagctgtaatcccagcattttgggaggccaaggcaggagcacggcttgcggtcagagtttgagaccagtctgggcaacatagcaagaccttcctctctacaaaagattaagaaaaaatgagccaggtgtagtggtgcacacctgtagtcctagcttcttgggaggctgaggtcagaggatcacttgagcccaagaggttgaggctgcagtgaactatgattgtaccactgcactctgggtgacagagtgagaccatgtctccaaaaaaaagtaaagccatttctgttcacagatacttgatctgatttata

SEQ ID NO: 74445 - DNA, 1012 bp, Homo sapiens
cactgtaacttctgcctcctgggttcaagcaattctccttcctcagcctgctgagtagctgggattacaggcacgtgccacctcgcccagctaattttcatatttttagtagaggcgggatttcaccatgttggccaggctggtcttgaactcctgacctcaggtgatccacccgcctcggcctcccaaagtgttgggattacaggcgagagccaccacgcctggccatttgtctgtgtttttaaaggagtccttaaaggtaccgcgagttctttattgattctctgccttatgtgttattcaggcttgtgtattcatttcctttcgtgatagtaatgatgggactggagagttgatagggaatgcagagggaattgggcaaaaactgataaatcgattttcttctgtacttttttctttaatatgtttaaactttgattcattgaggtgagacaaaagcagacccttaggactagtgtggtttaaatttgggaaacttttttgaagcactcttgttgcttagaatatgtataaggctaatgttcatgttttatttatttaaaaataaaataatgcatgtctattgagtataatattcaaatcagcatctcaaattattaatgaacttacctcaggtcttgcctcattggcaaagattttcacttttaaatgttttccttttgatttaattttagacttagaaaagttgcaagaattaatgcaaaacattcccaggtgtcctttcccaagaccacctgaatgctcacaggctactacattgatgtcatcattcccaggtgtcctttcccaagaccatctgaatgctcatagggctactacattgacgtcctcattcccaggtgtcctttcccaagaccacctgaatgctcataggctactacattgacgtcctcattcccaggtgtcctttcccaagaccacctgaatgctcataggctactacattgatgtcatcattcccaggtgtcctttcccaagatcacctgaatgc

SEQ ID NO: 74446 - DNA, 1051 bp, Homo sapiens
ttgctactttttgtttctgaaaaattcctcagcagtcctaaagagaagagtgactcacacacttgtgtaaagccagggttggagtctggacctcctggtttctgaatcatgacatgttactgctgcttctaggtccaaagtggtattaactgtaagaaaacaaatgctctttatctcaattacttgggcgtctttggttggtgagaagtgactggtgtgtactatgagtgtaaatgtggatgtttttgtgtattttcctccatttctcccaggaaggaaaggaggtgagctggcctcagctgtccacgcctacacaaaaacaggagacccgtacatgcggtctctggtgcagcacatcctcagcctcgtgtctcatcctgttttgagcttcctgtaccgctggatatatgatggggagcttgaggacacttaccacgaagtaaggatcggtgttcggttctgagacttggatttaaaaagcatgggcacgcagttatgctgtttcatttttcccctcatgattaccatgttctcctaacaggaatgcaactgcacttccattgaataccatatacattttacacagtgcctcgacagctggttatctcactgaacagcagataagttcacgagttctttggttagtggagaattgtcccagtttattcctcagcaaggtggaatcactcgtccgagtttactagcacgtggatggcaaaacaggacgaggcctcctgagtcttggggcagtcatcatcgcagattctgctgctttgccatgattactttgcaaactcactttggtgctaacagcttaatgaaacaagttagttgtgtatgtagctattgaaatagggtcagttctgtaacgcagcatgtgctgcttaaaaatcactgttgtgtaaatcacatgatagaaatgatagggcttttggtggaaggtagggtgaggggcaccacactcaaaacctttgtcagtaagacaggaatctaacaaaagttgtagtgcagtttaacacgttaaagtttaagaaatacataagcactgcca

SEQ ID NO: 74447 - DNA, 2032 bp, Homo sapiens
cctaattttcacataaactctttgatcccagcctaatattttccgtactttacaaatgtcagggaggttagatgaattgatcagattcatagagcttaaaagttgctcatcatctaatttgacagtgacttttgactctgaattcatcacttgcgagttatggtgttgtaggtgaaatagtatcataagaatgaattttggtgtttgtagttaccacacttattttttttctgtcttttcagttattcgacaacgaagagaagcagatgctgcattattttcagaactccacagaaaacttcattcacaggtacagtgcagaattctggaggtcattgcactcattgttgaggatatgatgagtggtataggaacctttgaatgttttttgtggtatcatattaaacttttctataattggtaattgcttttaattatagatagcatttgctttttttgtgtgagcttcagtattagaagttttagctggatttaatgctaaattgcttataaagatgaatgaagctgcacagggaaagtcaacagaatttgtgagtttttattgtagtcgcttaattacactgctgggaggaagcacattggtagaagtcttatcttcatataatagctaaactttatctgactgataaactttattcattgggtcataatttgtactgccatagtgaataacgaaaaaattgattttgaacgtggttggatattgatacttgaaaatgaatgatttttctaaccttttttttttcttttgagacgcagcttcgctgtgttccccaggctggtctcaaactcctgggctcaagcaatcctcctgcctgggcctcccaagtagctgggactacaggtgcatgccaccaagcccagccttgtattttgataaaagattttggcagcctgtataccaatacattaattgaatcatagggtgagatttttctgatttctgactataaaggaacttagttcatcccgctttctttccttttatggagaagaaagtgaatctagagaggtttagtgctttgcgcaacaaatactgttagtgttacacagtgaaaatgattgagtcaggcctaatgctgctagtaattaaactcttttattttgagtcttcctctgttgttatattgtgctctggaaacaagcttagttcatttgctgcccattttgattccttaattgtttgacttggattcactgttttaagcatgcttttttccataatatttgcgatattatctttgtaatgtttacagagtaagaaataggaaccttttttgtccattcatttccaggcaaattatttcaaactgctgtatcatttgctttcttaaatctttctccatttttaaaaccattttctacacactgtatgttaaaaagatttgcttattggataccatatttctccagattcttagccttaccaagatgcccaaagggagatttcatctagtaaaagctgttgtatttgttaatattagccattggatgaaaacatatttagacacttttttttttttttgaggcgaagtcttgctctgtgccccaggctggagtgcagtggcgcaatctgggctcactgcaagctctgccttctgggttcacgccattctcctgcctcagcctcccaggtagctgggactacaggcgcccgccaacacgcccggctaatttttttttttttttttggtatttttagtagagatggggtttcacggtgttagccaggatggtctcgatctcctgacttcgtgatctgtccgtctcggcctcccaaagtggtgggattacaggcgtgagccaccgcgcctggccctatttagacactttgtgacttaaaatggttgttttccaaaattttgtttggagctctgaatgtttattcctaaatatcaatgtcttaaatagtggcccgctccctagggctcgtccccaaaactgacttgcttggctttttcattgcatgactgaaacatgatgaaaaatactaggaaataatagtataaga

SEQ ID NO: 74448 - DNA, 1300 bp, Homo sapiens
aatggtacaggatgccatttcttgctccttgttttggccaggttggtggggcagagagtgaggatgcaccatgagggaattttctgagtaatggaagcaactgagttacatcttaagcaccaaaatgtggaaaagaagttactcaatttttgaaggaagacttcaaagttacatttaaagtactgagaatgcattttgacctttcatgcttcatgacaattactgtacataattcattggatgttctatgataatcttggggcaatcatgaataattttgtgtcgctattaaatgagtgacttcacacagttcttgctgcatcttgtaaagtttgattctatcactttatttatctaagaaatctttgaggacaaccccgtcctcaaagttccccccgggaactgtgctaagtgctggtgatgcagatgcacaagtcattcctcccacagatctgacagacactctactggaagagacagatgataaaccagccatgttaattagcaataagtactgtggcgaaaaagtagggtaaaggaatagagagggaagaggcaggtgagggaaagcctctgagatatttaaagagacctgaatggagtaagggagggccatttgaacatctggggaaggttctgagtagagagaaccagtggaaaggtcttgaggtatgagcatggcctgccatcgtttgtttttgtcattagcagactgagtttcctttcacatgtttcatgttcctcgtcatagggggaatcagataaaactaagattgttaggacttacccaccttaatgtcagtgttttccttataccagtggttccagagtttttttttctagggataaaccacacattcatacattcccattgttataattggattttgaaattcattcatcatgagctagaatgatatttctcaacctaagaacttttttttttttttgagacagagtctcactctggtcgcccaggctggagtgcagtggtgtgatctcggctcactgccaagctctaccttccgggttcatgccattctcctgcctcagcctcccgagtagctgggactacaggcgcccgccaccacgcctggctcattttttgtatttttagtagagacggggtttcactgtgttagccaggatggtttcgatctcctgacctcgtgatgcacccgcctcggcctcccgaagtgctgggattagaggtgtgagccaccgcgcccagccaaaaacttttttttttttacattgaagattctttgatataaaagttttgtcccttctaagagactga

SEQ ID NO: 74449 - DNA, 1020 bp, Homo sapiens
tgtgggcgcggggccggcgggggctgcggccgcggggcgcatgctcacttgcgccggtgacgtgcgcgcccggagcaggggcaggagccagcggggcccggaggctccagagggcggcgggcaggggaggaggagactcgggaggagcagagcgcaggctccgccgcggccggggtgctccagccgagcccaaccgagcgggcggaccgacggggagagagaaggcgccagagcgcgcgcgcgcggccccgagcagcagccttgccgccagtggagcagctgccgacgcgcggggccgcggacccagcattcgccggccgggccgggcatgagcgcggaggggccgcggccgccccctgcaccgcccggcgcgccgaggccgtgaccggagcggggggcgcggccgcactagtaccccggagcccatgggcgcgccgagccgggcgcgggggcgctgaacggcggagcgggagcggccggaggagccatggactgcagcctcgtgcggacgctcgtgcacagatacgtgagtgctcccggcgcgggctgggggacccggggaccagacagacgcgggccggccccgcagcccggaccctgtggccggtccagccccggggtcccgggaggtctccgatgtctgggactcggaccgcccccggggacgagcgggatgctggggaggggcctcggagttgacaccctggggcttccgacggggtctaggtgggcacagcgcggggccccagccccgggcggccacctgctccctggccgcggccgcctggcgcccccttcccgcccgcagcgccctgggggtccctcggagaggctggctggggttcgagctgtcccggcggaccgggcgcccggagggagccaacttcgaccccgccggggcccgggtctggggaggaaccttcagatgcggcttccgcgcagccgtgtctgtaagattaagggattgggaggaagcgttacacttctgcagaaaaaggtagcaattgtgtttgttcttta

SEQ ID NO: 74450 - DNA, 1004 bp, Homo sapiens
ggtttggctatagtcagctaaatttctagggataagaacactgtcttcagtttacaattagttaaaactgtgttgaatccatgaataaaaatacatagttgcttaactacacatgaaatcctctatttacagatgtattaaaccctaaaacccaaaatacaaattgttctctggtgcttggagcatatgttcaatagaaacagggttaataaaagattctcaagtcccagacttatcaatgtttttttaaccaagttaaatgctggtaaaaatgctatttatttgcaataaaaatcaatagcaagcaagttttacagagtagaaattcaagaagatcagataagggatgattttctctttcacttggatattattatctgagaagaacaaaatggtacatcccagaggtgccgaggttaggcgtcggagtctgacagacccacattcaagttccgtctcggctgacggctgcgtggccttggcaagttggttgccccctgtacgcttggtgccccatctgcaaggtggggactatgatggtgcccacctggtgggtctgtgcagtgacgggacaggtcacggcgctcgtgcacgctgggtgcccagtgcacggggcgtctttgttgcgcgcatggacctgcggctgcatcaccgtccatgcttctgggcttcttaaggagaccgcctctcaccttgggctttccggaaccttctccccgcactcctcttcacgtggagagtgggtgaccttgccctgctctcccggggagagcggtggtcactggtgggaacgcccctgccacgcccagcagcctttctgcctctgcgcttgcctcctccggttggagcgagtgacccgttctgccgaagtccagtcccgtgtgtgctgcggccccgtctctctccctctctgagtgacactgtctgccctgctgcttgccgtcccgctgttggcaccgctttagaccccatatttcccagcggtcaccgtgctcatttttggc

SEQ ID NO: 74451 - DNA, 1091 bp, Homo sapiens
caatgggatacgctggtcctgctgtcccaggcgggggagtcacgggagggctcgagtgccacaccacccacacgtcagccaccatgtgggttcccaaggcaagcagtgagttcccaagccagctgtcgtccacctttctgggttagtgtctttttaaataatcaaaggtctttaccatccattaagtactggcccagttgttgtacgcacaactcagaggtgattgtaggttgtgactgctctcagtcggtagttagggtggcctctggcgattgttggaggaattatgggtactttgcgctctctttcactgaaaatgcaaggccaagtggctccagcactcagcagaaaccataactggttttgatgctcttgggagcccaaggccacagtggctgctctgcccccgcgttgtcttatctggaaaggtctgtgggaggcgaggctctgactgcggcgtgcgtctcaggtttgtatctggagcacgtgagagtatgagatgggctgggggtgtccccctccctctgtacttgctcaagtacaggagcagcttgcctgagtctgagatgggctgggggtgtcccccactctctgtacctgctcagggacaggagcagctcacccatttccttcattctttctggctttgttgctcaccattgcctgggaaggaagtggctgcctaaataattaaataatctcctgcttcagagaaaagaggatttcctccaacctattttcagcaaaggattagggacaatgaggtcctgccagtagaatgccatctagattttggtgtggttttccaaggtctcagattgcccacgaagacatggaaatggctttcagacctcagcgggacccctggtgtgggggatgggaggtttgcaggcaaatgggaccacagattctccttcactttccgataaaatgcctcacaaacgtggaataacgggcatctccttttctctctagaaagtgcagtgaggtgacgtgatttcactcagataaatggagacaaaccattaaaatattaggtaaccatcaagtatacacgtgcttttttgttttcagtaataaatgactttggt

SEQ ID NO: 74452 - DNA, 1088 bp, Homo sapiens
ctgcaagctccacctcccgggttcacgccattctcctgcctcagcctcctgagtagctgggactacaggcgcccaccaccacacccggctaattttttgtattttttagtagagacggggtttcaccgtgttagccaggatggtctccatctcctgacctcgtgatccgcccatctcggcctcccaaagtgctgggattacaggcgtgagccgccgcgcccggccgcgttctgttcttatgtacacgccctgagctgtttccactggcagtcagctttgaagttcactgtgtggctctcacaggagcgcagaccctcctggtgctcaccagaagaccttggcccatgagggctgcgtaagacagggtggctcgggcctggggtgctgggccccaggtctccctgcagccctgaacgatgctctcagcagcaggtacaggtctccgttccgacgaacgtgcctcaaggcaacactctgggcaagagcttttgatgcaggttctgaggcagctgcctaacaccgctctcctttccgcagtgtgcaggagaagagaattgggtggacagcaggaccatctacgtgggacacagggagccacctccgggcgcagaggcctacatcccacagagatacccagacaacaggatcgtctcgtccaaggtaacttggcttgggtctgagtgtccataatgtgtctaaaaagcagctgccggggggtgttagtgcttctcggtttcaaagagcggctctgctcctggccctgctgtcacagccaccagccacccccagcaagggcttcggatcaggacctcaccgagggcgctactctctccctctcggtgactgcccacaggaggctttccacctgcccagggctcacagcgcagtgtctccattctcgggtgaccgtgccacagaggcagtgcaggtctgaagtccaggatccaaaccctacccaggtcccacttctgaggcgcctggccacgtgcttgtcgtgggccaccctggccagagtctcagtgccagtaaggtagaaacgataccagccaccccggagaaagagccaacaaacgcaggctggacagcaa

SEQ ID NO: 74453 - DNA, 1079 bp, Homo sapiens
gaaatgatttctacctaaaaaaaagaaatgctagtagttaagactttttaagtgccacagaagcttgttctcagcaagtttgcttttatgaaatcaaaggatgaaagcctttgtcatggaagaagtcgtaatagaggatgaaaatgctgtcgggttatttttaacttctcatctgtttgacggaagtgcagttactggtgataggtgatgatagagtttgtttccttcttgggggagagactttgggcagtgtcaaaacctgaaatgacagcccagcacgccccgttccctgcttcctgtgctgtgcagagctcccccaggcctgcttgcaccccccacgtggggaatcctgaactccacaaagggatggatcactgcatgcctccttttccagatttgtactttggggcacagaattcacatggttcccagctttgcccacaggaggctacagaattaaatgttggcttagactatactgtccctccatgccttcaagaaagttgaatccttctggtaattggggagaaaaaattccctctgcaattcgtaggtatagccagtgttttcatgacttctatttgtataaatgatttccatgtttattatatcatgtaatctctaaaacaaccctgtgagcccaccaatactgattattaccaatgtatccatgaggaagctgaggcttagagctcagtcatgtgcctgaggccacagaagaggatagagcccctgtagtctggcactgggcttggacttccttccgcagagccaggggccctttcttttcatttttgagacagagtctctctctgtgcccaggctggagtgcaatggtgcgatcctggctcactgcaacctccaccgcccgggtttaagtgattctcctgcctcagcctcccaagtagctggaactacaggtgcccaccaccacacctagttaatttttatgtttttagcaaagatggggttttgccattgttggccaggctggtcttgtactcctgacctcaggtgattcacccgcctcggcctcccaaagtgctgggtttacagacgtgagtcgccgcgcccatcca

SEQ ID NO: 74454 - DNA, 1100 bp, Homo sapiens
acaaaactaacatggccccacagatcaggataaaagtatactgaaaagtcatttcaccaggcttagtttttacatctgtaggttgttaccaagtatgttttgttataagagacacaaagagatcccatgaatatgcagaagtaaaattgccgctggtgtctggttggcgtgtctcctgtcatcggcacatgcttgtcttaactcgtgatttaatctccacttgctggcaggacagccccacagctcagcccctggacccggcaggtcctggctcagagaccaggtgacccagtggctgccttccgcccatagtccttgtctttggactctgaaatcttgtatttagtagtagcgctcgtataacttatgcctaagcctgaggtgttagagcagcatgttggaggcctgctgtccctcctggtggaggtgctgacccgcaccttctgctcttgcagttcctcaaggcattcacggacttcctggccttcatggtcctctttaactacatcatccctgtgtccatgtacgtcacggtcgagatgcagaagttcctcggctcttacttcatcacctgggacgaagacatgtttgacgaggagactggcgaggggcctctggtgaacacgtcggacctcaatgaagagctgggacaggttggtgtctcctgagtcatctgctgtgatttattaacatctgggtgagtctgcttcacgttcctcaggtcctgtgcctgtcatccgagcgtggctgtacctgtagctggcgtaagacagcagcagggttgttttgaaccctatttatgaaacagtcagccgtgctgttacatttacaacagatgcagaattacctgcacttgctgactcctggaaactcattggagcttcctgggcagaactctttctgtgtgcaggtgtgaatcaaggctggtgggtaaaagtggctttgccagccttgcactctgcttctgcacctgatattcaagtctcatggcgagctgggtattttcactttaaagatgaacaaaccagattttcagtgacttggtggattgcaaagagttcagacgcctccattcagatcctgctgctgcatgatggctg

SEQ ID NO: 74455 - DNA, 1050 bp, Homo sapiens
ccagacgccacacaggttttctgagtcttccggtaacaggacagcaccagccaaaacgctttttcctttggttttgatctcttagggtaacgccagttcattgacaaggatccaatctctgacacaactttgagtctctgttcagcggtgtttagggagggagtcggtgcgtagggaacgcagcctgcttggcagaatctgagcctatgccctgggtaggatggggacgtagtgaggagccggtgccacagggcccagactctgccccactgggtacacctgctgcgtccttcaaatccaggcctctcagggcatccatgggaggacacccctcacccagcagccctctgtgtgtcccctgaggaagggccagggctgccccagccattctgctgtggagagctccacagttaccagatggaatcacgtgagcacccgtgtggacggtgtgaccttctgcatttctctttcaggtttgaattgctggaaattttgagttttgactcagtcagaaggagaatgagtgtaattgtaaaatctgctacaggtaaaatttctttttcttttgatttattaagttatacgtggtggttgtgttttattctgatgactaaattctacaggagctttaaggatttagggtttaagaatgatttattctttttttaaaaactatagacaaatcctctcaaaatactaattttttatttttaaaaagtgcaacatttctggaatgctgaggaaggagtcctgggctaaacatccggcacccttgctctgtccatcttttagtgtcgagttggggccactttactgttgaaaattgcttaattccatttgtgaaagttcctctgcccatccctatcccccacccgcttttctccatgcagagctaaatgacataaaatgtttttaaataaccattttcaaggaaaaggtaatgtgggtttgcaaatgtatctataataatgttcaaagttgcaaagtgagctttgttgattggcagttgccgtaacagtgtgtctgtgagaacagcacactcggttcgtg

SEQ ID NO: 74456 - DNA, 1585 bp, Homo sapiens
cgcggccatgttcttgtgggaaacgcacacctgaagttttttctttaaatagttttgaaagcactatggaatgtattgtaaacatggatgtctttctggtatcaggaagcctagaaaagttctgactttgttataccacattttagatatgataggccaatttctcttgaactgttcatgaataaatccatcattggtcagagcaaaccagtggttaaggtaaaatgcgtctcacacaaactctggaaaccaaggaggtgaaaagttgagcctttgtgcatgtgggtgcactaatctgtcaatttcactaaaaacacagaaccagggtcctcagaatgacgagcctagagcattcacagaccttccatgtgaggaagacggtttgatgtcctcctctccctcacatgcgtaactgcacataaaccttacagaattacttcccaaatggaacagcaactaaggatttgccattcgctcttcatgtattccatagtacttttttaagttctcaactggcttttgaaacatttcatacaaattaacttgtgtttcagtttcctatcttgaaacaagaaggcacccacgtttccccccatctcttcattcttacagcttgaactgttacatttaggcacatagatgggggggaaaagattataaagaaattgactaaaaacttggaaattatttttacataaaattgtcatatttgattttgcacgttacaaatttgaaaattaaaatagcattaggaatagtttatgtttagaaatagatgctttataccaaatagcttgaagtaccttggaatagtgatcttacagaatgcagggttcacatttgcccctgtatatttaaatatattttcccaggatttacacacttttccatatatttaagtagaggaatataacaataactacaagctacttcatatatctcacatctctactgccaaagtttgtctaccagccttttccagctcacgtcattttaatcatacctcatttcttttactttattttgttttgctttcaatatgaaaaaggttttatcctatatggagaaaacagacagaatgtcgtaaattacctctaagtagttaatttttttatttgcctaggctaacttttcatctttgttatttctgcctagtgaatgaataacctgttcagaagtgaaacagagaagataaattccgcatttctttcttttgcagattgttaaattaatcaaattttcaaaagagcacccaatcacgttagcaattggcgatggtgcaaatgatgtcagcatgattctggaagcgcacgtgggcataggtgagcttcgtccttgctgctggcacatcctggtggccaggtcaccccttcgctagacaaaggcccatggcagcacgcaggtgcattcaggacacccccgtcaccaccctcgtgtgtgaccgggaaggctcatgatgatggtttcatccgttcttctccccgtccctgccctgtgtgtggtgtgcagaaagcatttcttcagctccttcacctccgtcttctaggtgtcatcggcaaggaaggccgccaggctgccaggaaca

SEQ ID NO: 74457 - DNA, 1052 bp, Homo sapiens
agaggcagtgaccacgacccacctctgctgctttactgggaagcctgcctgtcctcagagggccgctgcacctgtcacggtccctcaggactctattaacaatgcaagttttcaagtttcatccccgaaatttccaatcactccttgaggtggagccctggactgggcagtgctgaagcccaatggggaaatgaggggtgggggcccctggcagtggctgctcctgcagggtgtgaggctccccaggtgggaggaagacggggagtgagtgggggccggggccccagccctgactcactcacgtagctcagacacccgggggctggctcccagcggtgctgctgtgctgggagggaagacaggttgccctcccttggggggcacagcctcacccaccacccacctccaacaatcagaatgggaccctggcttgagagctttcttgggacattggtgccgatttgaaatgttgaaaccgatgccaccagttcccggcactccctccttcatgcctcctgccacagtttgtaaaatcagagcgagcaaaactcgtggtgaagagactgcctctcaatgtagtgaaaatgtccacacacagctccactgactcgggggccacaggcaggagaaacgcagcagaacgtgccagttggctgcttataagaaggtcccactgaggggcctctgtgcaggaggggagacagtgggagcaggagccggggccctggctgagactccgcggcccccagtgcttcaggggaaactcaccggccccaagcagccactcactgcccagccctgcctgtggcccgagaagcagctgtccagtggtggttttctctaagcacggtccttggttactgagctctttagctgtgcagttccacagcgggcacacgtgttcatgacagggctctgtgcatgggacacgtgttcataaccacatcccatacatggggacgtggcagacacacatgtaacaaggacatcaggcacagaagagacagcagggctgggggtctgaccccgagagagagcaggtgcagcttggg

SEQ ID NO: 74458 - DNA, 1354 bp, Homo sapiens
aggtcttctgtgtgccagccggagcacatagcttgtcgcctctccaacagacatggaggccatgaagacatctgctcctgccagcatccgccgctgccccctggtctaaaagtgggctgacctggggacggcccctcatcagacagatgcgtgctgccggcctcctgccgctccccttgctggtcagacccacagggcccgtgcacatccggggccccagtgggctgtcagaagccatgcaggccccatccgtatggtgacatcctaggcaacatgtcaaggggatgcaagctgggcacgtccagtactaaatcaacccggtccctgtggggtggggcctgccttccctggggcagtgagttcgccttttgttcaagggtctctgggtaccggtatggcgttcgagctcactgcacaggaagccagctacagggaggaagctcgtaggtttcccgtccatggcctgtatccctggggcccctgggttcttccctgggatggtgggacagggggacggtcactctgttggtactgaaaaggagaggccctcattcctagacagagacccctcgcctccatatggcttctctggtggggtggatcccgcccggcctgccctcaggacgagggtgtgtcctgagttgagtctagcagttcctgcaggaggcgatggtagtgagtgcatcccagagtggctcaggtcaccccaggcagccccgtgggtatccctgagactgaccatgtgtctcgttctctcagcagaatgggtgcgcacagcctcgggaccgcgactcagaattcacccctcttgcctctctgcagagcccaggctaccagagcacctgtccctcggccgcctggtacagctcccactctcagcaggtgacactcgcggcctggaaggagaaggtgtccacggagcccccacccatcctcggcggttcccatcaccactgcagttccatcccaagtcacagctgccctaggtcccgtgtgggaatgctcgtgtgatggatggtcctaagcctgtggagactgtgcacgtgcctcttcctggcccccagcaggcaaggaggggggtcacaggccttgccctcgagcatggcaccctggccgcctggacccagcactgtggttgttgagccacaccagtggcctctgggcattcggctcaacgcaggagggacattctgctggcccaccctgcgcgctgtcatgcagaggccattcccccaggcctgtgtcttcacccacctgccatcattggcctttgctgtcactgggagagaagagccgtccagggacccatggtggcccacatgtggatgccacatgctgctgtttcctgcttgcc

SEQ ID NO: 74459 - DNA, 2092 bp, Homo sapiens
gtgaggtggagccatggtggtgcgtcctttactcaacaaccctccaatccggatgctgtgggaagggccgggtcactcggataccatcatccctgcggatgcaccgccgtaccctgctcatctgggagtggtttccctgcggttacgtccaagcccgcctgccctgtgtgttggggctggctgagtttcggtctccccatcaccggccgcctcgtggagaaggcagtgccacgtgggaggacaaggccacgccggcagcttccagccctgccgcagaagtgccaggatgtccatcagccactcgccagggcacggagccgtcagtccactgttacgggagaatgttgatttcgcgggtgcgagggccgggagacagatacttggctgtgatgagcagacatcctctgtccccgtggaggggtcaacaccaaggtggtgttcgtgcaccagaacctgtctcgggctgacgggggtggcacacaggacacgggtggatcccaacaggcagcaccgcacctctgcccgcctcccgcactgcagctccgcccgccgggctctgcgtccccacgtcccctcgtcccatccccacgtcccctcatcccgtcacctcgtccccacatccccttgccccgtcacctcgtcctcatgtccccttgtcctgtcacctcgtccccacgtcccctcgtctcctcatccccacgtcctctcgtccccttgtcccgtccccacataccctcgtccccatgtccccacgcagggctctccttcgtcttaggatctgtccagcgctgctctgggtgggttagcaaccccagggctgctgtgataggaagtccctgttgttctccgtactggcatttctatttctagaaataatatttgacatagccttaatggtccttaaagaagacatttcagtgtgagattcagacttcagacgctgaaactgctgcctttcaggaaagcaccaccaacgctggaggaggagccggccctcacgcccgccccgcgccacgctgtggaacggggctccggcaagtgaaacccagagggtgtttccgaggtgctcgacagtaggtatttttggaagctcagatttcaccatttgattgtataatcttttacctataaaatatttatttgaagtagagggtaaatcagcggtaagaacagtgaacacagtggttgggataaaataaggtgacaaacatcacaccaaagatgagggtagcgagcaactggcttgagcagacagaacggggaagactccactctgtcccgaggggccagccgcaggcgtccccagggccaccctgccctgaggtccttgtgtggccgccctggcttggcagccctgcccacgctgcccccgcaaacaatggtgtgtgcgtttttacagccctttttaggaacccaatatgggcataaatgtaacacctgtagcgggggcagattctctgtatgttcagttaacaaattatttgtaatgtatttttttagaaatcttaaaattgcctttgcactgaagtattttcatagctgtttatatctcttttattcatttatttaacatactgtctaattttaaaaataggtttttaaagctttcatttttaagtttatgaaattttggccactttacatttagattctggtgagagttttgactgaatgttccaatctctgatgaatgcgaattttcagatttgattttattctctacacacacctcttcttttcttggtatttctggtggcagtgattagttgaacagcacatttaaggcacgataatttgctacactttttctttacaatttgttgcaatttcatctgctttctatgtttcattgttaattgccatccttcagccttaaaaatagaagattctcacgtgaaggtttagtaagttgggtcccagctctgcctgtgtggagatagtcaccatgtacctctgacaacaagttttagtgtgaaagtcactaaacttttacacactcccaaacgtctttttaaaaattgcttgggaaattattaaatgaatgtgcctgatgatttgaaatagacaaggggcacgagataaaaaagaaaag

SEQ ID NO: 74460 - DNA, 1088 bp, Homo sapiens
tgagaggcctctggatgggcatgggaagatgggctccctggcccccagcccatgcctccctgggatgaagagtccccctcctggcagaatgtctgggctttgcagagcaggccccgggggtgaagtcgcagcttcacttacaccagctgctctgtgagcaaggcttggtgccctggacaaggcccttcccctttagggaggtccagcctcgcaagctgaaacctcccctcggctcagccctataccaggcggccacagcaggactggccacacccacgccgcacctcatccgtgcacgcgtcggagcacggccagccttccgccacgagccagctgggaagggccgcggccgcctaaagccccagtcaacccagcctgtgtctgagcagacagggcgaacaagcaggccacaccgtctcgagggaggaggccagatgcggccagcgtctccaacagggtgaccatccgctcggcttgctgagcgtttaaacaaatgtttagacaggctgtggggactcccctgagttgagccttggccaggggtccggtgctgtcgcgggaaacctccagccttgttcttcaaaccactcagctcatgtgttttgcactgactagtactgaataatacaaccactcttatttaatgttagtattatttatttgacaactcagtgtctaacagcttgatatgcaggtccttgcatcctacatttctttaggaagttacccatttgtaactttaaaaacaggaaaaatatcagttggcaaatgcaatcttttttttttttaagctaaaggtgggtgaactggaatgaaaatctttctgatgttgtgtctataagcagccttgatgggatatgttagaagtgtcatgaaagtgtgattctacttttgcagaaaaatctaaagatcaatttatatagctttattttttactttatcaaagtatacagaattttaatatgcatatattgtgtctgacttaaaattataatgtctgcgtcaccatttaaaatgtctgttcattatgtaatgtaataaaagaaggtcttcaaaaatgtatttaacatgaatggtatccatagttg

SEQ ID NO: 74461 - DNA, 1077 bp, Homo sapiens
ggatggggagtggtgaaggttccctgaactgacagggaatgagaggagcagacccatttgagggcactttttgcagaccatgtgtagacaggaggtagcaattgtgccgccgtaggcaccctgggcagcccagggaacgcttgtccacagagggagaggctcccatccactctgaggcctttccagagttctcctttcactggtctccaaagagattctgtagaaccaagtgaaactgctgatactcaatacgtttctcatgttaaacaaaaacaaaaacaaagcagccatttcttacagatttattcaatactttctatctggttattatgcctcttattctgtaattattttttattatgaattatttatttccagatctgtctggcctataaggcctgtaggcactataagggggagtactgcgtcaccttcatctttttatccctttggccttgctccgtgcctgaaagctcaccacactggaacgtccaggtgcacatgtgccactggacaccgggatgttgccggatgctcttttggacgctggaatgctggtgcattgttgccggatgctggaatggtgcacgcacgctctgttggacgctggaatgctggtgcattgttgccggatgctggaatggtgcacgcatgccctgttggactctggaatgctggtgcattgttgccaaatgccggaatggtacacggatgctctgttggacgctggaatgctggtgcattgttgccggatgctggaatggtgcacgcatgctctgttggacgctggaatgctggcgcatgtgcacatgttattggcatgagctgtagttcaaacctcagccatatgatgcttgaattcccaaaccattcgtggaaatgtgtacttcttcctgctggaattctctctctctctctctctcttttaactgattggggagtgaggtgggggggggggtcttgctacattgcccaggctcaaacttctgggctcaaatgatcctcctgcttctgcctcagcttctgcctcggcctccggagtagctgggactacaggcctgaaatactgtttcttta

SEQ ID NO: 74462 - DNA, 1030 bp, Homo sapiens
ctcaagcaggtttccaaacaggcacaggctccagctgcccgaccccaccagggtgcccagctcatggtgctgcgggcgccacaaagcaagcccgtggcagagacttgcctccaagcgctcggccaccgaggaggacgcagcgcttacataatgtgccgggatccggggctatttttagccaccatatgtgctgtcttaagagctgagctctccctaatttggggtgttcttttttcttttctggatgccttcagcatggcttggaatagaaaaattagacattggaagagccaaaatccagtgttcctaaaaccaggctcccaatcgagagcaagacccatgtgatgctgagggcgtgtgggagaaggataggttcacagctacccacccagggggcagaaagatgagatcctctgagaactcacgtctcttctcccttaggcagttgtgcggtcctcagatagaagcatcttttataaaatgctgttgcaacatctaaccctcttccactgtactgcatgtgtgagtgtgtgagtgtgagtgtgtgactgtgtgtgtgtgcgagcgagtgggagtgtaagtgaatgtgagactgtgtgagtgtgtgagtgtgtgcgcgagtgggagtgtaagtgaatgtgtgtgagactgtgagtgtgagagtgtgtgtgtgtgagagtgagtgtgtgtgtgcgtgttcacattttgggaatttgtaatagagtatatatattcatgtttagagctagcctaaatcaaactaaatctagatcctcaagtaggtggctggagaaagtgaatctgatttttagactgcatggggccacaactctctttcctgtaacgccggtgcagtctgtgtgtgcaggaaaggtagaaaacaaggtgtctgagggaccccggacttctaggtcgtccagcaaatctttcacatttgcaaagtacgattgtatgcggcccccctgtgccagctactggggctctggggaggagctcaccgtgggggcggtgggggcggtgggagccgtgg

SEQ ID NO: 74463 - DNA, 1325 bp, Homo sapiens
ctgagtgttttggtgctgagtgtttgggtgctgtgtgtttgggtgctgagtgcttgggtgctgtgtgtttgggtgctgagtgggtgctgaatgtttgggtgctgagtaggtgctgtgtgttttggtgctgagtgtttaggtgctgtgtgtttgggtactgagtgggtgctgtgtttaggtgctgtgtgtttgggtgctgagtgggtgctgtgtttgggtgctgtgggtgctgaatgggtgctgttttggcactgagtgggtgctgagtgggtgctgtgtgggcgctgagtgtttgggggctgtttgggcactgagtgtttgggtgctgagtgtttaggtgctgtgtgtttgggtgctgagtgttgggcactgagtgggtgctgagtgttttggcactgggtgctgagtgttgggtgctgagtgggcgctgagtgtttgggtgctgagtgtttgggtgctgagtgtttagtagctgcgtgtttgctgtgtgtttgggtgctgtgtgtttgagtggtgtgtgtttgggtgctgtgtgtttgagtgctgtgtgtttgggtgctgagtgtttgggtgctgagtgtttaggtgctgtgtgtttgggtgctgagtgttgggtgctgagtgtttgggtgctgagtgttttggcactgtttgggtgctgagtgttgggtgctgagtgggcactgagtgtttgggtgctgagtgtttagtagctgcgtgtttgctgtgtgtttgggtgctgagtgtttgggcactgtgtgggcgctgagtgtttgggcgctgtgtgtttgggcactgagtgtttggatgctgagtgtttgggtgctgagtgggtgctgtgtgtttgggtgctgagtgttgggtgctgagtgtttgggtgctgagtgttttggcactgtttgggtgctgagtgttgggtgctgagtgtttgggctctgagtgtttggacactgaatgggtgctgagtgtttaggtgctgagtgtttgggtgctgagtgtttcggtgctgtttgggtgctgagtgtttgggcgctgagtgtttgggtgctgagtgtttaggtgctgagtgggcgctgtgtgtttgggcgctgagtgtttaggcactgagtgggcactatgtgggcattgagtttttgggcgctgtgtgtttgggcgctgagtgtttgggtgctgagtgtgtgggcgctgagtgggcattgagtgggtgctgagtgtttgggcactgagtgggcgttgagtgttcgggcactttgtgtttgggtgctgagtgggtgctgtgtgtttggtcactgagtgggcgctaagtgggtgctgagtgttttggt

SEQ ID NO: 74464 - DNA, 1062 bp, Homo sapiens
tctcgccctctctcacaggcatctttcccggcaaacctgcagctcgtcctcgtgcttcgcccgacgggttttttccaaaggactctctccgacatcgctttcaaattcaatagagatgactttaagatgaaggtgccggtaagtgcgccccgcctccatcctgcggtagcagaacggaactcattgccgtcctggcccatctgtgatcatcgaaatcctcgaggagctgacttcagggccacacggtcaacaaaaccccgcaggacctggcgggaagttgcacctcctcaatgctgccagaagcagtacaatcctttcttcccccacccccgcccccagcccccaccccgccagaggtgcacagagcatcaacctcagagaggccaccgtgtgggcatcccatcaggacgcgggtcacgcgacattcatacccccaggagaactacagaacttgagaccctaagggctgagagtccgcctggcccacccgcgaggaactcagcccaggccctgcctgcaccccagggatgagagaagggctggggagggggctgtaagcatctctggacctgggagggagcacccactgctgacagggatgggccggacctgtcctggagcagccaacagggtgacccctgccccatcgccaccacactatcccggcacagggcagcatctcccaacactgcccactgagaaagcaccttcagtcctgatctgctgtcctttaaagaacaaaggcttcacaaagtcccttagagcctgtggagcccggtcaccagcccgagctgtgtagctcccccggagagccctggtcagctgccttggcgagctcacatcttctctgccacaaagagaacagagacatatgggccagcaccaggcaccgcagagcaccccatggcaccagccagatgctactggaaaccaggcaatctggggtgcaggtcgctcactgtgaagctactccctgtgcgctgggaatcaggtggcaccagccctccctccccaccctcgttgcgctacagcctcaatgccaaaggtgcaagagcccttctc

SEQ ID NO: 74465 - DNA, 1079 bp, Homo sapiens
cttatataagctacctttaatcattcatggaacaggatatggcctaaataaataatccgtagaacagtagttttaaaaaagaaacactcccccgcccccccccccgccccccgaaaaaaaaagcctcatacttcagagcaagtagggtgggcgtctgttctcatccagcccgtccgggtttaacttagaagtgtgtggcccctcagaagcaggagggtgggcatctgctctcatccagcccgtctgggtttaacttagaagtgtgtggcccctcagaagcaggagggtgggcgtctgctctcatccagcccgtccgggtttaacttagaagtgtgtggcccctcagaagcaggagggtgggcgtctgctctcatccagtccgtccgggtttaacttagaaacacgtgcaggagatgctgctttaggatcaggccgggagctcagagatatctgaatgcctcaggtcctcagggcgttctgaaagactaaccaggcaacacactatttcctttttgatttgtctgatgtcatcagtccctcaagaggaaactcaaggaacatcaagaagctggaagaaaggaaaacagaccccctaagcctggagggatacgtcagctcagcgccactgacaaagccccccgaaaagggcaaaggtgggtatgtgcagggaccgggcctcacacggaggcctcacacggagctgctcacggagtgctcactgcatccgagaaacctgcgcttcctgcagtgtgaagaagctttgcagagcattcagggccccttgctcccctcttaacagagccctaggaccccacagaagagcccctccctctccattgctctgcacccctgcatcagcaaggccagccccagaaggagcctcggccgagcgtgcaacccggagccgccttgggccctccctgcgacagccggacccgcctccgcatcgggttgcgatgccctctgcatagtttctttctcttccttcatagatgacacggtcactagctctgcctcagaaagctctgcgctttccagaaagcgctttaccctgcagggttttgctaacctcaaaggtc

SEQ ID NO: 74466 - DNA, 1054 bp, Homo sapiens
acggcctgaggagagcggggcacggggtctctttagcttttacaagttttaggattttttcaagcagggatcaatcccgtggccattttttgtggtactttggcctcaattcttcaccaggaatcactgtgtttacatgaaatgacaatttgatactgtatttgatagaaaactatttttttgttaccggggtttacatagaagcacgttgtttataccactaagtgactttgggggggctctcccatggaaacggatggcactccctgaagctccctggtcacaggtggatgaaaacgtgtccgtgggtgacatcaggtggtgtctccaccaccaaaagcagttagaagccaaggagattcctttatctacctagggttcattttcaaaagaaaatttaaactataatttaaacaattaacgttcttttctacaaaaaaaatgcagggacttgatttttttaaagagcttcactgaattaggatatttttattgcttttaaagaaaatacaaagatgcagtttctgcagggtgtggcgtggaccagtgctgccgaccatagctcagagagccctgcccctgcctcactgcactgcagcctcctcggaggccgcacctccactccactccccacgcgccccctgcctcccacccaggtccacctgccacctggtgaccaccttgagtacagaagtgaaagtggggagagtattttattcaagtcacagcagaactggaaaaaaactcttctgttttaccaacttcttgtgtttcagaaacatattctgttcaaaacttttgaagccctttcggtgtctagtctgcagatgtttttgtatgtgtgcacctctgaccatgtgtgtacatatgtgtcttgctggaaaggacatattcgctgtccccgtgctgctgggagggccgcctcacagcctcacggttcccagccccagcacagtggaggcaggcgtggctgcattcccctcacgctaccctcccagcggcttgtagccgtcactggccagacctccagggtgcggaatcaaataggaagcat

SEQ ID NO: 74467 - DNA, 1059 bp, Homo sapiens
ggtgtcccggaggcgagggtgtcccgggagtgtgggtgtcccgggggcgtgggtgtcccgggagtgtgggtgtcccgggggagtgggtgtcccgggagtgtgggtgtcccggaggcgagggtgtcccgggagtgtgggtgtcccgggggagtgggtgtcccgggagtgtgggtgtcccggaggcgagggtgtcccgggagtgtgggtgtcccgggggcgtgggtgtcccgggagcgtgggtgtcccgggggcgtgggtgtcccgggagtgtgggtgtcccgggggcgtgggtgtcccgggagtgtgggtgtcccgggggcgtgggtgtcccgggagtgtgggtgtcccgggagtgtgggtgttccggaggcgagggtgtcccgggagtgtgcgtgtcccgggggcgtgggtgtcccgggggcgtgggtgtcccgggggcgtgggtgttccggaggcgagggtatcccagaagtgtgagtgtcccaggggcgtgggtgtcccgggggtgtgggtgtcccgggggcgtgggtgtcccgggagtgtgggtgttccggaggtgagggtgtcccgggagtgtgggtgttccggaggcgagggtgtcccgggagtgtgggtgtcccgggggcgtgggtgtcccgggagtgtgggtgttccggaggtgagggtgtcccgggagtgtgggtgttccggaggcgagggtgtcccgggagtgtgggtgtcccaggggcgtgggtgtcccgggagtgtgggtgttccggaggcgagggtgtcccgggagtgtgggtgttccggaggcgagggtgtcccgggagtgtgggtgtcccgggggcgtgggtgtcccgggggttgtgggtgtcccgggagtgtgggtgttccggaggcgagggtgtcccgggagtgtgggtgttccggaggcgagggtgtcccgggagtgtgggtgtcccgggggtgtgggtgtcccgggggtgtgggtgtcccgggagtgtgggtgtcccgggggagtgggtgtcccgggagtgtgggtgttccggaggcgagggtgtcccaggagcgtgggtg

SEQ ID NO: 74468 - DNA, 1012 bp, Homo sapiens
ctcctgagtagctgggattaccagcgtgtaccaccacatccagctaatttttgtaattttttttgtagagacgggctttcaccatgttggccaggctggtcttgaacttctagcctcaagtgatctgcccacctcgccctcccaaagtgctgggattacaggcatgagccactgtgctcacggcctgaaccttttatttagagtggtaaatataaagtgttactgtgaactgtaaagcataaattctcttgaaacagaggtttaaatctctttctatatgttgcattctttctgtgcctattaattttacttttgctatttttcttttttaaaatcagatggcctctccagaggagaagtgtcaacaagtcttggaacccccttatgatgaaatgtttgcagctcatttaaggtaatctgttggggaggaagaaaaacacacacatctggaaattgctgaattaactggggattttatcttgcattatcttgtgcttgaagcagtgaataactgactttgaaaaagtgggaaaatgcatttgtaacttcagtttggtaaagcctgtggaaattgtaaacatcagttatataatactatttttaacatcacacagtatttagcagagtgcctgcttagtggtctttttagtagagtttggagccgaactgttcacttacccttttcgtggaaatatgtctgtttttgaagctctttacgttactgggaaagaaattagagttgagcaaagcaaacaatgctactttttatgtacacttcatatctactgttttatctctaaaggatcagttcaggcagaagattgtgtccttatagccatgtgagatttgattactgtctttcagagcagcctgggctacaggaccagtgtggggtctgtgagcaggaatgttctgtgaaccccacagggtctttggaagagttggggcaccaccgtgttccttgtagtacaaagcacctgtgatttcctagctctgtgcagtgtgcgatagg

SEQ ID NO: 74469 - DNA, 1057 bp, Homo sapiens
acccggaaacaggcctgtgaggatcaaacctgttgagaagtcccaagtgactgggcaccatagatgctcaggagtggtgcaggccagctgcctgggacccgaggtccagcaggtgcaatgtgcccacattaactgttgttacctctacccccatgccaactatgactggactgcagtgttccaacgagaagtgccctaaacttagccataataagtaatttatttgtagattcctgaagtactggggtagggtgtggggtgcctttttcttatgattacagctatgttaacaatagggtttttttatgaaccaatctgttgttcatactgaagaattgatgtagcccttttgtttgcaggctgtggaaaatctctgttctcacaaagtctccccaatgctctacaagcaactgcgtcaggcctgtgaagaccacgtccaggcacagatccttccgtttagagaatatcctttttttggttcataaagtttctattcattatctaagtcttttaaaactgaacattattatgataaagagctaatgagtatccttaatattaaaacaacagcttttaaagttctcttttatttgataggtttgtaagcgaaatttaccatttaaattattttgctgatttgaattaaagggaaaccgtgttcatttattgggtatggttgaagtatttaggaaatgttctgaaaaatgtcttcaagtttgagtatcctttattctaataaacaccatctgcattggctttctgtgataggcaacaaagtcccatcgacttggcgacttatggagacacccacttatcagcgcacagttgtgtctgtcaggaggccaggcaggattcagtggattctatgctcagtctcacgggcagagtcaaggtgtcagccaggttggggcctcacctgaggtctttgctagcacgggcaggcagttggcggaagccagttcctgtggtagtgggactgagggccctgccttctgtcccgtgttgcttggtgtcactctcagctccacatgcacaggtccttgcctctcctctcaca

SEQ ID NO: 74470 - DNA, 1943 bp, Homo sapiens
acaccagaccacttgctctaggagcccatattctgggttctttgtcctaaactactttttgggccttttcctaaaaatacacattctaagagtcaaggtaagagtgttcctaatttggtgcatggatgagagttcatgttagttttcattgaggctggaagttaaacctgagccattttcctgtccagctgcactttgccacaggctgggcacactggctcatacctgtaatcctagcactttgggagactgaggaggattacttaagaccacgtgttcaagaccagcctaggagtatagtgaggtgccatctcttttaatttttaaaaaatagtcctagtgactcttaccaggccagtcaccatctccaggagcccccctgtgggagtatgttcagtgtctgccctttgtgaagtggggccttttgtcccgccacctacccccagggcacttaaggcctgggtgtgtttctgccggcagggacttgaaggtgtctggcagtgaaggaaggagaggatgaagggaggctggagagggagtggcgagcggccagaggcaggcggggccgtgggaagggaaagcagcacaggcaagctgagtgcacattggtgatgagatacagagatccatgattgaacttctagtgtatcttagcccactggggctgccatgacaaaacaccatagagtgtggctcatcaacagcaggagtctgttgctcacagctctggaggctggaggtccagggtcaaggcactggcagattgcatgtctggtggggccccgcttcctggtccatagccagcaccttctcactgcatccttatgtggtggaagaggcaggggagctctctggggtctcttttgtaaccccattcttgaggcttgtccactctcatgacctaatcacctcccagaggccctgcctcctaacaccattaccgtagagtgagagcttcagcctatgaattttggggggacatgaacattcaagactaatattctttcagtattccagttactgaatggtgtgtagtattcagtggagaaggtagctgaaattaaggggttaaaattgtaataatggccggttgcggtggctcacgcctgtaatcccggcactttgggaggctgaggccagtggatcacaaggtcaggagttcgagatcagcctgaccaacatggtgaaaccccgtctctactaaaaatacaaaaaattagctgggcgtggtggcacacgcctgtaatcccagctactcaagaggctgaggcaggagaatcgcttgaacctgggaggcagaggctgcactgctgagctaagatcgtgccactgcactccagcctgggcgacagagcgagactccatctcaaaaaaaaaaaaaaaggtaataattaaattggccagcatttttaaagttttccttagcagatctgtacagactcactagatagtgttttatttttaaagaagattaacacgtgctggcaggaccactgcagacaaatggtaagcttgttcactttttcatcaaaacacgacctcatccatcttccctcacccacatgattgagagctgagacatagaagttctgttgaggattctgtctgtgttcagtgctgtggttgaacagcacgatgagaaaagcagggaaggtgaactcctcagctcctgtgagagggcaccactgaccctcttggccttcaggtccacagtcacagtccgcagtggtgacagggttcttagatgcctgcatgggtctctaaatgtctctttaagcacagtttactcctcagaatctagcctgaatcccaggtctttcctgcagctgcacaaccagcgtcttaggctttgtagatgtcttggctttgacttgacgtcatgtatacatttttagtgtgacctggccgttaattacttaagtgagagaacagaccgtattaat

SEQ ID NO: 74471 - DNA, 1005 bp, Homo sapiens
aggtggcttctagcagcctgcacctttaaaattgatgctgatgtcttacctcgatctttgtttattgctgttttttctaggcttcaaagtgtgctgaattctatgaaaattacaatgagcagtctaacctttgtaacactttagtacttactggcacatttcactgttaccatttgaaacaatgttaccttctgaaagtcattttaaatgtatttggaaaatacgagacttttttcaagccattggaaaccttaaagtttaattttgagaaggccctaaatggtattcaaatatattctgctttgggttctacattgtcagataatagtattatggctaatgagatacttaagtgaaaccagaataaaaccaaaagggaggagaattaacatgattgagcatctcctgttacaaacaactccacttgatgtgaatatcttttcaagcaattctgtgaaatcattatccccattctacaaataagaaaaccagggcttaaaacagccagatgttggtgcctggaatcacattgcttgtgagctgagagtcacgggtccaatctggttatgatgtttctgcttattccacactgaaacctacacatcacctatccacctaaaaacaaatgcattcagaatttgtgtcaggtgtttttatgaaaggagtcactttataagaaaaaaggccaggcatagtggcccatacctgtgacatcagcactttgggaggccaaagtatcactttggatcacttgagcccaagaattcacgaccagcctgggcaacaaagagagaccctgtctctaccaaaaaaataaaaataaaatttttttttaaagccacaggtggtgcatgcctagggtaccagctactcaggagggtgaggtgggaggatcactttggcccagggggttaaggctacaaaactacaaaaacctgggtgacaaagcaagagacctgtctcaaaaaaaaaagagaaaaaagatttcaagtaaatagtagaaat

SEQ ID NO: 74472 - DNA, 1028 bp, Homo sapiens
cctgtaaacccagcactttgggaaatcacagtgggaggattgcttgaggccaggagttcgagaccagcctgggcaacatgaccccgtctctacaaaactttaaaaagatgggccagatgtggtggcctgagcctgtagcaccagctactcaggaggctgaggtgggaggattgcttgagcttgggaggttgaggctgcagtgaaccgtgattgcaccaccgcactccagcctcggccgcagagtgagggcctgcctcaaaaaaaagtgtattcacttaatttttgaaatgtgaattcaatttgtgaaacttttaaagttattgagtatttactactaagagtaatttatgttaaactatcctgattatatgatagcaggagaagatactgtttgctattgtaaacatgttgctgagttggtattgatttgcttttgtagacttttggaacagcgatcgtaatcaatcctgagaaagacaaagacatggtccaagacctgttggacttcaaggacaaggtggaccacgtgatcgaggtctgcttccagaagaatgagcggttcgtcaacctgatgaaggagtcctttgagacgttcatcaacaagagacccaacaagcctgcagaactgatcggtagaaaaatatttgttttttttgtttgtttgtttttgagacagtctcacccatttctagacaattttttaatatgggaaaataaggcaaaatcaaccaaaatgttcaagctgctcaaggggtgtgtggaaagcgtttttatcaagtcttattaggacacaaatttaaaaaccgacacacctgcatgcatgggtggaggagggcatttccataagggaagatgaggtaagaatttagaaaagaaatgatgcttgacttcgccaaagaagggaggggtgatcaccatctttgtatcctctaatccatattaaaataggataaaaccagatgagatctcaaatgataatactatttttaagctgtacaattttttcacaataatatcaaaatatattt

SEQ ID NO: 74473 - DNA, 1020 bp, Homo sapiens
actggggtagggctgaagtgagaagatcacttgagcccaggagtttgaggctgcagtgagccgtgactgcaccactgcgctccagcctgggcaacagagtgagaccttgtcgtggatgggtggatagatagataatacatagacagagatagcagtaccttgtcatagatagataaatagataaggtaggtagattcaatagattagatagaatgaatctcactctatgtaagaagaaaattacactattaacgtttcacaagtaaattttaaaagaagaaaaagaagatctaaacgtgtggcaagaattttatttcagtgagtctggtggtgacacctgaagaagggaaaaaggcagtcctagtgaggcattgggtttcatggaatacattctggggactgagataaattctaacacagatgaaactttatattgaaaattacacggtttattttgttttaggttaattatgttttattactttctcaaaatgattgtcttggatttctctgttttagcatatgcagaatcagagtgactcaggccctatagacctcacagtgaacatactcacaatgggctactggccaacatacacgcccatggaagtgcacttaaccccagaagtaagtgtgcagaaagcatgctgtccgctcccgctgtcatgcccttaccaggcacagatatgttgccttcaagaattgttgaatggggagtttttaaaaatagcccactcagtccaaaatcaaagtgctcttatggtctttggaaatgtgcttgagaaagtgaccacttttgtcaccttctgtggctcctcccagtgcagcctgtgtccacctgctgacctgcagggggcccatgagcacaggcacttgttttggaagttatggcttattaagctgcggttcttgtctggttgttctttctttccattgtagacagtgctgaagtcttgggaatggcattatttagggccttctttgtcagccactactttagctacactaaacccttcagtg

SEQ ID NO: 74474 - DNA, 1048 bp, Homo sapiens
cctgaatagaaaaggagatcatcctgggatatataaggccaaattgcattcacccctacgttacagtcagtcccgtataaaagaaagctggactgtaatcccagtacctggggaggccgaggtgggtggatcacaaggtcaggagatcgagaccatcctggctaacacagtggaactccatctctactaaaaatacaaaaaattagccgggcttggtaggcaccagtagtcccagctactcgggaggctgaggcaggagaatggcatgattccgggaggtggggcttgcagtgagctgagattgtgccactgcactccagcctgggtgacagagcgagactccttctcaaaaaaaaaaaagtttgagagcaaaaagaagcttcttttaatttttcaaagattgtacatgcacagcttcagaggtgtgatgaggccttctcttccaggggaagaaggaattccaggtgtccctcttccagacactggtgctcctcatgttcaacgagggagatggcttcagctttgaggagataaaaatggccacggggataggtacgaaaactgcagagtgcatagctccatgagttgttcttaaagcatgtatttgttttaagataagacatagacttggtagcatgattggtttactgttgttgagtctcattcgtttaacgccagcctttgcctgcatttgcttcccattcagaggatagtgaattgcgcagaacgctgcagtccctggcctgtggcaaagcacgtgtgctgattaaaagtcccaaaggaaaggaagtggaagatggagacaagttcatttttaatggagagttcaagcacaagttgtttagaataaagatcaatcaaattcagatgaaggaaactgtatgtataaactttctctttttacttatagggggtttagcagggaatcatttgtttttgtagtaatgtttttggctgttagaggcctgaagcacatttctacaataatccaatttcactatgtaatgtttataagagtactcattttcctgtcgctttcattaacttc

SEQ ID NO: 74475 - DNA, 1646 bp, Homo sapiens
gtatagttacatacttcatgcatataccccttgtatgtaaatgtttgtaaatttaatgccattgtaattaggggggttttattcttcttttttagcctggagatttgaaaaagagaattgaatctctgatagacagagactatatggagagagacaaagacaatccgaatcagtaccactacgtggcctgacgcatctgcagacggttccccttcatgaaacactagaatgtaccctcagagcaggaagcacacctgtgccatttctgggactctgattgatccagctgtggacattggaaggcgaaggaagggaggtggctcctgggtcatctttcacaaggctcaagacttcaacctgcagatgtatctttttccctccagtttttcctctagttcttttaggcatttaaattgtttctgttactctgtgcaaaataactttgagattggacaagaagatgttactaaagagaagttcctttaaaaggtcttgttcttgtgtcaaaaagctgcaagtttggtttgttctcgtgtgtgatcatgagtgcacaatgaagaagaccctagatgctgcattttttagctctgaagattccttaggtatccctgaagacagctcgctcagatgatcagcatttagagtgaaaacaagggcccttcatgggtgaacattagaaagagccagggttcaaagctggcgaatggatgacgcaccctagccactggcccctctctgtttcatgtatttccaaaagttgtaaactttgatggctgatttttcgtaagtcaggtttctaagtgagctccctgaggtgccaaggccatggtgtccgccctgctgcgtctgttcgtcagctgagttccttgtgaatctctgttttagggtttggggctagtgtgtttgtgtttccattctaagattgagtctggcagtccctgtttttttgcattggggtaactgctctttgattttttttaattgcagtatttgtgtgattgcaataataaagtttggtttggtttttacagtcatgcgcagggacgatccttgttctctgctgtaaactgtaaaaagtttatggagacttaaagtcttgatgttgtgaagcagaggttattttgtggaaagattaaaaggattttgttggtacctggttttgtgttgtgtatatatacatgaggttgaacagtgaaaggaaagttcagtagtgatgttagaagggtaactatgacaaagatacttttgagataacatttaaaagtactttatattttacataatagcatgtttcattttgattaaaagctaccaaaggaattttgatcatggcataagtgtttaaagcaatattttctggaatataccaagtttatataatttgattttgtgctaaattattaagagtctctttttgaaacatgcgggtttgaaatatgacaccttgtgggtttccatattaaaatcctcactctttaattgtcatttctatctttgaaaattttcatttatgagttccatgatatgtggtctaagaaagaccaaacagatttctattttttttttcttataagttcgttgtgtctagagattgttaatattgtaatttaatgtagacttactttgaataaaattagtttaattgg

SEQ ID NO: 74476 - DNA, 1057 bp, Homo sapiens
gatgagggaaagctggcctcagactcacggtggcaatgttcatgtctagtaagtagtttaaagagcgccgttcctgtaggccgaaatgcgggaccagggaacacgtggggaagcacccttctcttctgtcagtttatagagctcagatgggcagtaggtgctcaatattgtattgactagtgaatttcgttctcatttattgtcttaataagaggatgtgtgctgtctctttaagacagtccggattgccccccgccaacactattctttcacctcctccccccgccgccctcccccgtaatatgagaagattatcttaaatgccaggatctgaaaggtgatgtagaatcaagctgggggagtgtgtgtgagttaagtagatatagaaatacactcctgtacacatctgccttgacttctttaaatccctcagtcccatccagctgtaaaactctgttactgtgagtgaatggatcttggcttcccttttttgttttgcctgttgtgtaaaatgaattctttgaactgcctgaatagccacagagatgaacttattccaatagtaagcctgaagccttgctcagctcctgcgacagggtcaggtgtagttaatgaaaggagttgcagaaacaagttttgtcatgtcacagcaactgcattgttctttgttacagatgctcacaagcctcataactttgatgttttgtttcatgttttaaaaactcacttcaggccgggagcagtggctcacgcctttaatcccaacactttgggtggccgaggcagatggatcatggcgtcaggagttcgagaccagcctggccaatatggcgaaacccggtctctacaaaaatacaaaaattagctgggcatggtggcgcacgcctgtaatcccagctacttggtaggctgaggcagaagaattgcttgaacccgggaagcagaggttgcagtgagctgagatcaagccactgcactccagcctgggcaactgagggagactccgtctcaaaacaaaaaaaaaattaactttaaaaatgaagagaaaaaatccata

SEQ ID NO: 74477 - DNA, 1790 bp, Homo sapiens
ttcactgcagcctccgcctcttgtgttcaagcagttctcctgcctcagcctccctagtagctgggactacaggtgcgcgccaccatgcctggctaatttttgtagttttagtagagatggggtttcaccatgctggccaggctggtctcgaactgacctcgtgatccacctgcctcagactcccaaagtgctgggattacagccatgagccaccgtgcctagccaaaatccaacttttaaaaaaggccttttaacaacttgcatttaaagatatttaaaatgtttattttaatgtgcgatttcaccaaaaatccttttttcttaaaaaaagaaactgctcaattacaaatttccactatattaataattaggcattgtttaaagctactgtgtttgaatacttagaaagctcaaacatgaactgaaacttgtcctgatagataggattagctgtgattgcgtaatgtgaccctttaaaccattgatgtcagcaggatgaccgccttaccctttccacttgaacaactgtcacttaggaggtttgaacaattttatactcggctgggtgcagtggttcacgcctgtaatctcagcactttgggaggcccaggtgggcggatcagctgaagtcaggggtttgagaccagcctggccaatgtggtgaaaccccgtctctactaagaatacaaaaattagccaggcgtggtgtggtggcaggcgcctgtaattccagctacgtgggaggctgaggcaggagaattgcttgaacctgggaggcaggggttgcagggagctgagatcgtgccattgcactccagcctgggcaacaaaatcgaaactcaatgtcaaaaaaaaaaaaaaaaaaagaaaaagaaaagaaagaaaagctgggtgtggtggctcatgcctgtaatcccagcactttgggaggctgaggcaggccgatcactaggtcaagagatcgagaccatcctggccacaacatggtgaaactccatctctattctttttaaaaatatttttaaaaagttagccaggcgtagtggcacaggcctgtagtcccagttactcaggaggctgaggcaggagaactgcttgaacccggaaggtggaggttgcagtgagccgagatcgtgccactgctcttcagggcaacagagcgagactccatctcaaaaaaacaaagaaaaaaattttttttctactaaccgatgttacctttgattgtgcagattgtcagttatgcggtggaaagaatgaatttgtcagcagatttgaggtcagaatgtctttgtagccctgtaattttgaatttgtattgcattagccccatcccagacaacgttaccctttcttctctgtacccaagacttttattgcatgtgcttctacatggtaacatctgttcggctgcactgggattatttttgcctgtgtatctcccttccttaactgacaggtagtaagtgctgagtacatatatgaagaaaggatcaattttatagcagtggctctcaaccaaacatatgcacggatccacacgatcagctttttagaaatatacataccacagcgaggcacagtggctcatgcctgtcatctcagtgctttgaggctaaggcaggaggattgcttgagatcagcctgggcaacatggcgagaccagtgtctctacaaaaaaaattaaaaagaaatatacggccgggcacggtggctgtcacgtgtaatcctaacactttgggaggccgaggtgggtggattgcctgagctcaggagttcgagaccagcct

SEQ ID NO: 74478 - DNA, 1088 bp, Homo sapiens
actggctgcgtaatccatgtgtctggttgttcattgaatttaagaaacacagtggaggctgggtgcagtggctgacacctataatcccagcaccttgggaggccaaggtgggtggatcacctgaggtcaggagttcaagaccagcctggccaaagtggcaaaaccccgtcgctactaaaaacagaaattagctgggtttggtggcacgtgcctgcagttccagctacttgggaggctgaggcaggagaattgcttgaacctgggaggtggaggttgcagtgagctgagatcacgccactgcaccccagcctggcgacagtgagactccgtctcaaaaaaaaaaaaagagaaacagtggaatcttgtaataaaagccatcactgctacagctgtggaaaatggaaatactcggtcgtattttctggacagtttttgatggtctccgtcttccctggaattgacaggcctcatgcattgtgcgtcagcagcaatgtttatggtgaaaaatggcaacgggaccgcgtgcataatggccaacttctctgctgccttctcagtgaactacgacaccaagagtggccctaaggtaggaaacaccagggcacttcatgcttcccttgtgtgtgtggaaagatgatttttaacatttcaaccaagtctttgaaaaatggccccatctgaacatggtgcttttcctatctgcatatctccttctggtgttgtcagtaacctgcgctgtcatgtgccatagccacaggcacagtaacaaacctgtatatgtgctgcacctcactgttcatcatgaacattttcctttttttttttttttttttttttgagacggagtctcgctctgtcacccaggctggagtgcagtggcgcgatctctgctcactgcaagctccgcctcctgggttcatgccattctcctgcctcagcctccccagtagctggggctacaggcgctcgccaccacgcacagctaatattttgtatttttagtagagatggggtttcactgtgttagccttgatggtctcagtctcctgacctcgtgatccacccgccttggcctcccaaagtgctgg

SEQ ID NO: 74479 - DNA, 2095 bp, Homo sapiens
accatgtctgattagtttattttgtttttgtagagatggggtcttgctatgttgcccaggctggtcttgaactcctgggctcaagcaatccccccacctcagcctcccagagtgttagcattacaggtgtgagccaccatgcccagctgcaaatttttgattatatgaattattaagccaactttctcttacacctgaaatacttttcagtcttttactgacatgtaatactaacctttttttggtttatattaaaaatgagtacctcagtagtgatatcttagttggaaatgaagtataagtttatatcagacttacagaaaatctctttctttgaacttttaataacctgcatcccaattgggttacatttaattgtgtttattctagaacatgacctttgacctgccatcagatgccacagtggtgctcaaccgcagctcctgtggaaaagagaacacttctgaccccagtctcgtgattgcttttggaagaggacatacactcactctcaatttcacgagaaatgcaacacgttacagcgtccagctcatgagttttgtttataacttgtcagacacacaccttttccccaatgcgagctccaaaggtaagaaccaaaatgggccgattatgaagtgatagaaaattgggttggaggattgtctaaagttacttttacctaagaagtacaggctgggtgtggtggctcacacctgtaatcctagcactttgggaggctaaggcagacagatcacttgaggtcaggagtttgagaccagcctggccaacattgcgaaacactgtctctactaaaaatactaaaattagccaggtgtggtggcgggcacctgtaatcccagctactcgggaggctgaggcaggagaatcgcttgaacccaggaggcagaggttgcagtgagccgagatggtgccactgcactccagcctaggcgaccaagtgagactgtctctaaaaaataaaaaacacacagccaggcgcggtggctcacgcctgtaatcccagcactttgggaggccgaggcgggcagatcatgaggtcaggagttcgagaccagcctgatcaacatggtgaaaccccctctctactaaaaatacaaaaattagctgggcgtggtggcgcgcgcctgtagtcccagctactcaggaggttgaggcaagagaatcgcctgaacccagaaggcggaggttgcagtgagccgagatcacgccactgtgctccagcttgggcgacagggcgagactctgtctcaaaaaaaataaaaaacacataaagtaaactaagtactataagtagtttgcaattgtgattttttttttttaatctagaaatcaagactggaatctataactgacatcagggctaaaataaaaaacacataaactaagtactgcaagtagtttgcaattgtgattttttttttttttaatctagaaatcaagactgtggaatctataactgacatcagggcagatatagataaaaaatacagatgtgttagtggcacccaggtccacatgaacaacgtgaccgtaacgctccatgatgccaccatccaggcgtacctttccaacagcagcttcagccggggaggtaggacgctgacccttggccctctggtgctagtggttgggtagctgggctgcagtggctgcgggtgacctcactgctctgtgtcctggtgctgggctctgcctggaacgcgtgtgcacacagccggcgacgtctctgcagaacgttctcatccttcttcctagggcaggtgacttgtagatgagggtagacacatgttgattaaaaagggtggaatattgaagtgaaatatcccgggacagagacagatgttgtgtggtctcccgtgggagctaaagcagtgggagtcggcggggggcgggtagagagagaggtgatcaccaggggctggggttaagttggtcagaagatagagcgtttccggaagacaggaggaattagtacagcatgtgactgcagttaataatgtattctggcttgaatattgctaagtagattttaactcttctcaccataaaaaagtaagtgtttgattttagc

SEQ ID NO: 74480 - DNA, 4723 bp, Homo sapiens
ggggtgaggtggccggccacgcagcacagcttcctgcgtccactccttcgtgacagcgttcaaggctttctcaccctcactttaggaagagggtggcacagtggcccctgtccagccacggggcttggggtgtggtgggcggtgcctgctgcccaggcagaaccgtcctgggtagtgggaggtggaggctgagggtgccccacgggcctgtgcctaccgccctgagccgtctgcaggacccagctctttcctgcgcgtctagaaaggcattagcgagagccaccttgggagactgagaaaatagtcaccaaggacgccagagtccacagatgtagttttgtttctgagtttggatcttactgtaactgctgatggttatgagaaacccagacctgaatctccctccactgcacctgcagagacacgctgtgaacaagacaggccttccccaaccacagcgccccctgcgccacccagcccctcgccctcacccgtgcccaagagcccctctgtggacaagtacaacgtgagcggcaccaacgggacctgcctgctggccagcatggggctgcagctgaacctcacctatgagaggaaggacaacacggtagggctggggcctcacctgggagagggggacggcacggtagggctggagcctctgctccctgtgcactgagaacacgcgtctctgcacgtcatgctgttaagtcaggatgggagcttagcttgcaggacgtgaccctagaggacaagagctggcgtctgtgtcagtgagtccattttgtaggatcacagccgtcctgctggttccatcatccaaggctggtgtcccagcatggcctattgggcagtgtggcccacagagcctacaacttggcccctgatagaacctaagttttctttacatatttatcatggaaacatttaagtgttacatttttatagttttcttttgaaatagtttttctcccctagtagtgacaggctgtggggttgtgggggtcgacttgcgtgccgtggggtgagtttgcagggctgactgctgcagggggaggtggtgctgctggttgccctccacgcggggacgctgcactccaagagcagctgtcacggggtcagggagagtcatcttgggatcccgaaatctgtactagtgtggtctttcagtgttttccttctggttttggttaaaacaaatgtggccttgaattcacggtttcaggactgtttgtcttttcgagagtgtggaggacctgagctagggtggtgacttgcttgcttgtcttatgcagacggtgacaaggcttctcaacatcaaccccaacaagacctcggccagcgggagctgcggcgcccacctggtgactctggagctgcacagcgagggcaccaccgtcctgctcttccagttcgggatggtgaggctggggcggcacctctctgggggcgcccactgtgtctccaccacatctttttgtgccctgggtctgctcatgggaggcagcgttaggaaggaggcggcctcacttttttctgccttccctttatcctgggctttttagttccttggttcccctcccccctttccattccattcatagatgcagcagatgatgtgggcggggctgctgtgcccacagttggagtggctgcaggggagggcatgcaggccgtgcggccttctggcttcagatgctgctgccctgtggttccgtggtggcatttctgcctgggaggactcctgtgcagttagcaacataagacatgaagcatataattgtcacttgtcagtctttttaaatcgctgtgcaaatgaattaacagttcagtttcttataattttagctttccaaatcatgctttcctgtgctgtgatagctcctgcagtccccgttttccagagactgactctcaagaggtctggaaggaccagcctgggcagcacagggaggctccatttctgcaaataataaaacgagttagctgggcgtagtggcgcacacctgtggtcccagctacttgggaggctgaggtgggaggatcacttgagcccaggagttaaggttgcgatgagccgtgatcactccactgcactccagcctgggtgacagagcaagactctcagagaagggtctggaaggaactaaccaaaattttcattccccagagatacacaacgccttttatagacaagatcttttgcagttttgttctaatactagaaatgtaggaagtcaggtttattacccaatgaccattcacgtttgatgataaatgtgtgaatctactggggttaaagatcatctttctatgaatctgctccgtgattaaagatcatttttctttttaagaatgcaagttctagccggtttttcctacaaggaatccagttgaatacaattcttcctgacgccagaggtgagaacccacaatctctgcgagccccgcccccgcccgcgcgcccagggtattctggagccactagacctctgtgtgtgttgcagaccctgcctttaaagctgccaacggctccctgcgagcgctgcaggccacagtcggcaattcctacaagtgcaacgcggaggagcacgtccgtgtcacgaaggcgttttcagtcaatatattcaaagtgtgggtccaggctttcaaggtggaaggtggccagtttggctctggtgagtgtcaccgagggcagctgtcgcggggtgtggaggacgtgcttcagactccgcctgtggacgtttagtcgcttccgtgtgggctggggcgacgcccctgttcctctgcaaggagctgtttcttcttgccggtctgagattctagaggtaactccccctgctttagagaggcccagcgtgtctctcagctgggagcccctggtaccatttgagagtaagggaatcattttaagaaacagtggtggcgcttctcccatgaacgttgaatacaacactgtcatctgatgtgcacagaggccctggacgcagcacagctgtccggccacagcccctgattccagacgggggagagacgtgtgtggtttcctcgccgtgcagagagcaccagtctctgcagcggcttccccaagtgacaattccagctagagctggaaccttccgccagggttcctctttgccttttggctgatgtgggggagtggtggggagagaggcctgtttgcaggcccctgtgtgagcagagccctgacaccatccgtctgtcttggcagtggaggagtgtctgctggacgagaacagcatgctgatccccatcgctgtgggtggtgccctggcggggctggtcctcatcgtcctcatcgcctacctcgtcggcaggaagaggagtcacgcaggctaccagactatctagcctggtgcacgcaggcacagcagctgcaggggcctctgttcctttctctgggcttagggtcctgtcgaaggggaggcacactttctggcaaacgtttctcaaatctgcttcatccaatgtgaagttcatcttgcagcatttactatgcacaacagagtaactatcgaaatgacggtgttaattttgctaactgggttaaatattttgctaactggttaaacattaatatttaccaaagtaggattttgagggtgggggtgctctctctgagggggtgggggtgccgctgtctctgaggggtgggggtgccgctgtctctgaggggtgggggtgccgctctctctgagggggtgggggtgccgctttctctgagggggtgggggtgccgctctctctgagggggtgggggtgctgctctctccgaggggtggaatgccgctgtctctgaggggtgggggtgccgctctaaattggctccatatcatttgagtttagggttctggtgtttggtttcttcattctttactgcactcagatttaagccttacaaagggaaagcctctggccgtcacacgtaggacgcatgaaggtcactcgtggtgaggctgacatgctcacacattacaacagtagagagggaacatcctaagacagaggaactccagagatgagtgtctggagcgcttcagttcagctttaaaggccaggacgggccacacgtggctggcggcctcgttccagtggcggcacgtccttgggcgtctctaatgtctgcagctcaagggctggcacttttttaaatataaaaatgggtgttatttttatttttatttgtaaagtgatttttggtcttctgttgacattcggggtgatcctgttctgcgctgtgtacaatgtgagatcggtgcgttctcctgatgttttgccgtggcttggggattgtacacgggaccagctcacgtaatgcattgcctgtaacaatgtaataaaaagcctctttctttttggggtgggccttgtccttctgtcagctaaaatgggagctcatgagagaaggacgtcagggaaacggggttgagggtggtctcggtgcagagagaagggtgtcagggaaacggggggtgagggtggtcttggtgccagacgtagggaatggtgttgggagtggcccgagtgcctggcacagttgtctggttcattcatgtaacatgataatttttaaatcattaaaaaaattacctttcatacagataccatggaatactatgcagccataaagaggtatgagatcttgtcccctgcagggacacggatagagctggaagccattattctcagcaaactaacacag

SEQ ID NO: 74481 - DNA, 1030 bp, Homo sapiens
agagagagcggcacccccaccccctcagagaaagcggcacccccaccccctcagagagagcggcacccccacccctcagagacagcggcacccccacccctcagagacagcggcacccccaccccctcagagagagcacccccaccctcaaaatcctactttggtaaatattaatgtttaaccagttagcaaaatatttaacccagttagcaaaattaacaccgtcatttcgatagttactctgttgtgcatagtaaatgctgcaagatgaacttcacattggatgaagcagatttgagaaacgtttgccagaaagtgtgcctccccttcgacaggaccctaagcccagagaaaggaacagaggcccctgcagctgctgtgcctgcgtgcaccaggctagatagtctggtagcctgcgtgactcctcttcctgccgacgaggtaggcgatgaggacgatgaggaccagccccgccagggcaccacccacagcgatggggatcagcatgctgttctcgtccagcagacactcctccactgccaagacagacggatggtgtcagggctctgctcacacaggggcctgcaaacaggcctctctccccaccactcccccacatcagccaaaaggcaaagaggaaccctggcggaaggttccagctctagctggaattgtcacttggggaagccgctgcagagactggtgctctctgcacggcgaggaaaccacacacgtctctcccccgtctggaatcaggggctgtggccggacagctgtgctgcgtccagggcctctgtgcacatcagatgacagtgttgtattcaacgttcatgggagaagcgccaccactgtttcttaaaatgattcccttactctcaaatggtaccaggggctcccagctgagagacacgctgggcctctctaaagcagggggagttacctctagaatctcagaccggcaagaagaaacagctccttgcagaggaacaggggcgtcgccccagcccacacggaagcgactaaacgtcca

SEQ ID NO: 74482 - DNA, 1035 bp, Homo sapiens
ccatcctgtcacctaggtatgaagccagcatcccttagctattcttcctgatgctctccctgcccccgacccaacgggccccagtgtgtgatgttcccctccttgtgtccatgtgttctcatcagaagctcccacttacaagtgagaacaagtggtgtctggttttctgctcctgtgttagtttgctgagaataatggcttccagctctatccgtgtccctgcaggggacaagatctcatacctctttatggctgcatagtattccatggtatctgtatgaaaggtaatttttttaatgatttaaaaattatcatgttacatgaatgaaccagacaactgtgccaggcactcgggccactcccaacaccattccctacgtctggcaccaagaccaccctcaccccccgtttccctgacacccttctctctgcaccgagaccaccctcaaccccgtttccctgacgtccttctctcatgagctcccattttagctgacagaaggacaaggcccaccccaaaaagaaagaggctttttattacattgttacaggcaatgcattacgtgagctggtcccgtgtacaatccccaagccacggcaaaacatcaggagaacgcaccgatctcacattgtacacagcgcagaacaggatcaccccgaatgtcaacagaagaccaaaaatcactttacaaataaaaataaaaataacacccatttttatatttaaaaaagtgccagcccttgagctgcagacattagagacgcccaaggacgtgccgccactggaacgaggccgccagccacgtgtggcccgtcctggcctttaaagctgaactgaagcgctccagacactcatctctggagttcctctgtcttaggatgttccctctctactgttgtaatgtgtgagcatgtcagcctcaccacgagtgaccttcatgcgtcctacgtgtgacggccagaggctttccctttgtaaggcttaaatctgagtgcagtaaagaatgaagaaaccaaacaccagaaccctaaact

SEQ ID NO: 74483 - DNA, 1010 bp, Homo sapiens
gggacgtcctgaaaggcctggctgtgggggtcgctccccatgagccctgtgtctgcaggcctcaccccgactcttcctctccaactttgtccctccctcttgggaggggtcctcccagggtggccctgttgtctttgtctggctctgaggggaatggggcttgtggaggtgacgggagtgtctcggggtcttttctccacattgcctggcagattactacagcccggccatgctgggcctgaagaccgaccaggaggtcctcggggagctggtgcgggcgaagctgccggctgtgggggccctgatggagcgtctcggtgtgctgtggacgctgctggtgtcccgctggttcatctgcctgtttgtggacatcttgcccgtggaggtgagcgcctcactcgggccctggggcgggcgggccgccagggagtgacaccgggttcccatgtctctgcagacagtgcttcggatctgggactgtttgtttaacgaaggctcgaagattatcttccgggtggccctgaccttaattaagcagcaccaggagttgattttggaagccaccagcgttccagacatttgcgataagtttaagcagataaccaaagggagtttcgtgatggagtgtcacacgtttatgcaggtgtgtggggctgcacgtggctcagtcccctcccagggggccccgcctcacctgcagcccgggggctgctctgaccacccggagggtgcacaggacgggcaccagtgggcatagggcacaggatgagcctccagctctgtcctgcatctgccccctgcgcctggcctccgagggctttcctgtctatggcggccctgtcttcttggccctggcactgcggacgctgctcctggtcctaatggctgtactcatctgctgtgtgtggtgccagaagtgtggcttcccgaggcccggcctccccactgggtcctggacctggcgcaggccgtatagactcaggtcctgatgagggcgttgtgggagctgt

SEQ ID NO: 74484 - DNA, 1013 bp, Homo sapiens
ggcggttccgatctttatctagacttctccctcttcttcagtattaacacaatggaagtgactcataaaagataatcagaaaatggttacgtgaatgagataatggcgtcaatgccaaggagggagctgggcgcccaggtgggcaggggatgtagctgatgcaagtgtgcatggaaaaccaggtgtgtgcatgggagcccgggtgcgtgcatgggagcccaggtgcgtacatggaaacccaggtgcctgcatggaaacccgggtgcgtgcatggaaacccgggtgcgtgcatggaaacccgggtgtgtgcatggaaacccgggtgtgtgcatggaaacccaggagtgtgcatggaaactcaggtgcgtgcatgggagcccaggtgcgtggatggaaacccagatgtgtgcatgggagcccaggtgcgtggatggaaacccgggtgtgtgcatggaaacccaggtgtgtgcatgggagcccaggtgtgtgcgtggaaactcaggtgcgtgcatggagcccaggtgcgtggatggaaacccaggtgtgtgcatgggagcccaggtgtgtggaaggaaacccaggtgtgtgcatggaagcccaggtgtgtgcatggaaacccgggtgtgtgcatgggagcccgggtgtgtgcatgggagcccgggtgtgtgcataaaaacccaggtgtgtgcatgggagcccaggtgtgtgcatgggagcccaggtgtgtgcatggaaacccaggtgtgtgcatgggagcccaggtgtgtgcatgggagcccaggtgtgtgcatggaaacccaggtgtgtgcatgggagcccaggtgtgtgcatgggagcccaggtgtgtgcatgggagcccaggtgtgtgcatggaaacccaggtgtgtgcatgggagcccaggtgtgtgcatggaaacccgggtgtgtgcatggaaacccaggtgtgtgcatgggagcccaggtgtgtgcgtggaaactcaggtgcgtgcatggagcccaggtgcgtggatgga

SEQ ID NO: 74485 - DNA, 1097 bp, Homo sapiens
cccctcacccgctcctgcccctcctctctccccaggtcctcccgcccccagccccgcccctcccccgccctgggtgctcccctgcccctcccccgctcctgcccctcctctctccccaagtcctccccgcccccagccgcccctccccccgccctgcccccccccgcccccgcctccagccccgcccctctccgctccccgccccgcccccacgcgcccgcggtcccgccggaaggacttaagcgccccggagccgggaggcgaacttgggacccgctggcctcgctcggtgcgcgcctccctccccgcatgcagcccgccgagcgctcgcgggtccccaggtgtgtggcgcggggtgcgggcgtccccggcggctgcggtccccgcgcgggcccgcgaccccccagaggaaacttcggggacgccggcctccttctctcggttttgcaggatcgacccgtacggattcgagcggcctgaggacttcgacgacgccgcctacgagaagtttttctccagctacctggtcacgctcacccgcagggcgatcaaatggtcccggctgctgcagggcgggggcgtccccaggagccggacaggtgggtcccgggggcgcaggtgggtcccgagggcgcaggtgggttgggctgggacgggccgggcaaagtccgggctcccggagcggagggagggggaggaacctttccgggcaggtcgggacgaagctgcgggctccgagctagggcagccgcagggaccggttttcccgctttgagatgggccggcgggtcggacgcgaaggagacccgtccctcccagcagggagccatatcgggatggatcaaaactcgatccatgccgggcgcggtggctcacgcctgtaatcccagcgctttgggaggccgaggcgggcggatcacgaggtcaggagtttgagaccagcctgaccaacatggtgaaaccccgtctctactaaaaatacaaaattagccgggcgtggtggctcctgcctgtagtcccagctactctggaggctgaggcaggagaatcgcttgaacccagtaggcggaggttgcagtgagccgagattgcgccat

SEQ ID NO: 74486 - DNA, 1041 bp, Homo sapiens
atcactgaatctcattgacagaagcgcggcttccaggattgaggcagcagtgcaggagctcagagggcactcagggctgccggggtggggaagggagcaatggggtggtcccacttgggaagagccgcaggagggagcaccccctgctggcaagaataccaatgacctgaggaacatgcctcctgctccgcgggggtccatttagctcccttcctgagcagctggtgtgactgcctggggcactcaccgagcatccggggccactgtgagcccacagccccctagacatgccagcacacacacaccagggctcccgacctggccgtgctagggcgaaagaactgggtaacttgggctggttcattctgtgaaacacaaatggtgtggacctcaagtcatttgggttcttgaagtgtaaatgttggattgatgtgtgactcagtgctttggagataaaaacggtgctctaacgggttttctgtttgcttgctttcctttaggagcttggcccgttcttatagatgattttgtagaatatgcacggccagtagtcacaggtggaaaacgcagccttttctaggcagcaagttaagcaggagtaagattatgaaatgatttgtatcctgcaaggagattgcagtcagttcctgggtgcattgtcgctgattccagaagtcattcttgaccagccatgaaaccagaggcgccatcccattctgccggaggacagccagcggctgctttgtggacaccgcaggaagttcctcgggacacggctgctttgggatgtttggagatttgtcatcatagcttttgcgttaggaaatttctgcatgattttttaatatttacaaaatactaaggtagagccatagcgccgcctgtgggaccgcagagcatgctgcgtagctcgcgcgtcaggcgaaccagcgtccggcagcgtcccgccgaatgacgttgcggtggcactggcaacacggcatgtgtcctctgcagggcgctgcgtttttatacacgtcaaagctgttaagaatgtgccct

SEQ ID NO: 74487 - DNA, 1009 bp, Homo sapiens
tatgctgagtgggaaaaaaacaagttgcagaaaactatgtgtaatttgatagcagttaatgttttaaaatgtaagacaagcttatgagctgttcgtgaatatatatatacatgcagctaatgggcaggtaacgagattaaaatgctgcccttctatgtgacaaaacaggagtttataattgtaatatttaaaatgttttgttcttaaataaatctgctttctatatttggacattagcgttgttgtagcacttaacatttatacagaacgctattacttttaacaattttattgtacttgttcctaatcaaattaatgaacattaattgaagatcgctaggccactagaatatatgagagttaagctctgtattttaaacctggtgggttttttttttctctcatatattaggaacatcacaaaagatcaattccaagggacacctggaacctcctgctggactttggaaacatgattgcggatgatatgtctaactacgatgaagaaggtaccggaagttgtgcttcagatgattgaccgaaatgcttacacctgagaacgttaacttctcctgcctctagagtggtgaccccgtcactgagatgggcgtggtcataatactacccccttccttattattttctgtaaatcatacaaaagaaaaatagggttttatatttagtgtaaatcaagaagacagtcctctaagccaaagcatttcagaattggatgtgaagagttagagacccccatggtggagccatggagttaggtattgggaaaccaccactcccagattctcagtcccgcatgatgccttaggtcagttccacactgcactcttcaggctgactcggagattccagctcctgtcttcttgcataaatatatctccacatacttgtctccccccgtgtttaggactctgcgttggagggcctttggagcctgctgtgtgctgggcacgctgccaccttagagagggatggtctctgggtggaaggcctc

SEQ ID NO: 74488 - DNA, 1111 bp, Homo sapiens
taatctgtctgaaattactagctttagtgaagtcttgctgggatgccttaaatatattttactgtttgattttctgataaacaaatgctaagttctttaattttatttctaaactagaaatagggggtggggaacctgaatttctaagctattaaatgtggatacataagctaaatgattctgagaagtagttattgtccagtaccattagaattagcaaatgaaatcacttaagaaaaacatcaatcattcatttactttggcagagttgtgataaaaactcaagatattgtaaatactttatcaatacagtatattttatagcagtttgcctttgggtgagctaaatttctgtaaacttaaatttttatttcactttagggaaattaagtttttcttagtgaacagatcttctcaaaaaaaattcagtgatttttttttttccctaaaacccagaaacctagattttaaaaataggaccgttttctggataaattattagttgctcactatttctttcatgtgtagtagaaaactgcagcctattgattgatgtattggaaacacgcttgctagaactatgtagtataatcgaatgctaggattcaaacctcctattttagaattacttttcaaaatagtataacttccttttcccctgatattaactacagatccacaagatgaaaacaaaattggagtcgatgggattcaacagttttgtgatgatctgagcctggatcctgccagtatcagtgtattggtcatagcgtggaagttcagggcagcaactcagtgtgaatttagcagaaaggaatttctagatggcatgacagaacttgggtaagtcaactattcttagcttaaatgttttcagaaatgaaaatacttctaacattatttttcagcaacctgtacatactaatttcatatctgcttattttctttgtgtatctttaaaatttcttatgcgtctgtactctccgcactatcaagcctttggtttccttttaattttcaatttaacactttatttcatttcacatttttatttttttcatattaatcccttttgtaactcattttcttctttttgagttttttcctttcc

SEQ ID NO: 74489 - DNA, 1068 bp, Homo sapiens
cctttgtaaatttgatctgggtttagtcctgtctagagggactcggcttccttctctcccctgtagttttttagttgacgagcctttttgtttcctaagaagctttatgccagttccctttttcacaagaggtaacttgggtctctcagtcacttttggacatgaagcacctagtctttagacttagctatcgatcattgctttaatcactgttattttatggagaaacctgtaaggggtgacatcaaatgattgcagctttgttgactgaccagaggcctgttaatggactaagcctagaccccaaagcttctcttgctccttcagaaccagtgccttggcaccaccgtgtggttcagggtttactggagtatcttgtgacatcagacaatttgagtagattgcagggggctcttcgtgtttctggataccgacttctgtccactctagctaacagtagtgattcaaagccattttgagtggcctggatccatgtgctcctgcatctgttcttctagagttccaagaaattaggctgctggtgttatggtgttgtcacacattaggggaggcttcaaggggttatcggcaggagctcaagatcagacaccatcatatcttccagatttgcacattcctggtgtggagtcatcagttgtataatgctggttaaataattcagtcgccgaagagtatattagtctgctgattggtcttggagggtctgagggtacaatgttgaatttttttaggtgaaattcatataacataaaattaactattttaaagtgtacaattcagtggtgtttagtacgttcacaaatttgtggaaccactacctctatctagtcctaaaacatttttgtcaccccgaacgataactgtacccattagcagtcactcccaactcctcccttgccccagcccctggctaccactcacctttctctctatatagatgtgcccattctggatatttcatataagtgaaatcgtacactgtgtggctggaatcgcacactgtgcggctggactcatgcactgtgcggctggagtcgtgcaccgtgt

SEQ ID NO: 74490 - DNA, 1024 bp, Homo sapiens
ttacaggcgtgcgccaccaggcccatatttttagtagaaacagggtttcaccatgttaaccaggctggtcttgaactcctgacctcaggtgatctgcctgccttggtctcccaaagtgcttgggattacaggcataagccaccatgcccaaccaacatggactctcttaaatagacttggttaatgtcttttgcacatggtggagttggtagagatacgaggctgcgtcgccccccaaaaaaatgacctttaatcctttctataaagatgtagctgacctttaatcatctcagcccttcacaaagcaccatacaaggtacatcaacattcagtatttgattttaatctcagtgaaataaatagtttagatgttgatatttatctaggaaaaatgagaatttcttcagaaaggtgtcagtttttcagatctgattatttaatactctgatcaatagtaatgaatcattgtttaactatgtgtgacaataactctttttcagctgaaaatgtgtgtctgacatgcaagctcagtggggcagagacccgtggattgctgtgccctgccctccggacctggatcatgaaggtgttgggaagaagcttcttctgggtgctgtttcccgtccttccctgggcggtgcaggctgtggagcacgaggaggtggcgcagcgtgtgatcaaactgcaccgcgggcgaggggtggctgccatgcagagccggcagtgggtccgggacagctgcaggaagctctcagggcttctccgccagaagaatgcagttctgaacaaactgaaaactgcaattggagcagtggagaaagacgtgggcctgtcggatgaagagaaactgtttcaggtgcacacgtttgaaattttccagaaagagctgaatgaaagtgaaaattccgttttccaagctgtctacggactgcagagagccctgcagggggattacaaagatgtcgtgaacatgaaggagagcagccggcagcgcctggaggccctgagagaggctgcaataaag

SEQ ID NO: 74491 - DNA, 1109 bp, Homo sapiens
tcatctgaaagtggggaaaatggtcatcttgagctcagggtgttctgaggattaggttctattcacacacatggggagagagtgcgtgtgcgtgtattgtgtgtgtgcagccctgtgacagtgcctggcacagaggaagccctgtgtgaggattcaccatgttcagatggtgaccccagcgttgcttcacaaaagctcagctctgcctcctttcctggatgcagaaatgcgtgaagtctgtgtggtgtggtcattgcctgttgtcactaaaaagtgtgtgactcactgtgttctctttaaggtgtggaagatttccttacaagggccgtgttacatgacactgttaatgattgcatttggcttgctgtgggggcatctcttgcggatcaaacccacgcagagcgtcttcatttccacgtgtctgtccttgtcaagcacacccctcgtgtccaggttcctcatgggcagtgctcggggtgacaaagaaggtaggtgacggcatgttctgagtgcgtgtctaattcatgctcgtgtgtaggtgacttttggattcacagttgagggcatgtgaggaaaaattgcaaagtcttatttcccctcttaggactttcctaaccatggtggataccagggcttacattctgcaaggaaatggtgtccctgtgaactcagctcctccaaacctccacttctccacttgattaagaaaaatgcccgtgaggattgattgagggccagagagaaattggaccaagattttgaaaaaccagtcagcactggaaaatgacctgtggaactggtggattttaggaagttgcgtatgttttgctgctttaattctagcaggcactgggaattgatacacttttgatactttcttcctgtgaaatcaaggtgctttggtaactgaaggtgttcccgactctttggctttggccttagtttcatcgtatgtatgaaacattgccgcttctaagtcgtgactgtttagtggaagccgacttgctcggagcctaggcaggaccgtgtccctctgcggggaggacagtggaagccgactcactcggaagcctaggcaggaccgtgtccctgtgcggggaggacagtgg

SEQ ID NO: 74492 - DNA, 1002 bp, Homo sapiens
gtttgcatgtgtctgcatgcatgtgcgtctgcatgtatatctgcatgcatgtgtggtgtgtgtgtgtgtatgagagctatcattgtatggttgtatatctgcatgcatgtgtggtgtgcgtgtttgttctgtggtatgtctgtaggggggtatccacgtgtgcatatgtggggtatatctgtgtgttgcatgtgtctgcgtgcatgtgtgtctgcatgtacatctgcatgcgtgtgtggtgtgtatgcgtgtaggagagctatcattgtgtggttgtcattgtcactgtcatcatcattaccacttccccgatccttcttttcattctcccaatatcgtattgccaaacgtaaactgcacctgcttgggttcgtatggagagagaagccaaatgggaagaattaatttatccagaaagttgtaggttgtgccgcatatacaaatacattccaagaatatcagccagaaaataaggacagttgcaaagtctagggtgccctatgaaacttaaagtgggataggactgtaagcttgagtgtgttttaagccaatatactatactttatgtatgtaaatattgtgctttagatctaatctccagaggctacctttattgcatttcttacagcaatgagtacaactgatcaaaaattaggagacctttttgaaacttcttttggaaccagattgaggttctaggacctgtctcgtgtgctttatttcttcctttccaacccgtatgcttttgggtttcttcttgccttattgcactggctggaatgtccagtactttgttgaaaaagattgtgtaagaggacatctttgccttgctcttgggaagcattcagtctctcaccactaggtatgatgttagctgtaggtttattgtagactctctttgtcaagctgaggaaattcccatctattcctagtttgctgagagtttttatgatgaatgggtggtggattctgtcgattgctttttctaaaccaattgatatg

SEQ ID NO: 74493 - DNA, 1093 bp, Homo sapiens
caatcacgaggtgtgtgcccagaccggagagacggtccagcctctgatggctcggagatgatggaccgtggaagggaagcgtctgtggggagtgagcgcttagatggccagcagctgctccttctgggaagctcgcaccttggcaacagaacagccctctagcagagcgtcagtgcagtcgtgttatcccggcttttacagaatattcttgtcctattttagaattttccggagtagtttatttgcagtctgttgattatgtgcagtagacccgggacactgcgttttaccgatcaccttgaatgtggtgcctggatgtgccttttttttttttccctgaaattattattaattttctattgtgagttcatcagttcatagtttttttagtaaagaagcaaaattaaaaggcttttaaaaatgtacaacttcagaattataatctgttagtcaaatatttgttattaaacatttctgtaatatgaagttgtaatcctggccgtgagcttggaagcttacttttgattcttaaagcctatgttttctaaaatgagacaaatacggatgtctatttgccttttattgtaacttttaaatgaaataatttcatgtcaatttctattagatatatcacttaaaatatttggttttaaatcacaagaatatgtattctttaataaagataatttatgatcatggtataattaattgaaatttattaaaatctgtttttattaatttttttgtattgagcttatctttatacaaaattccagccaatttttttttttactaagatgatttctatattaacatgctattctccaagacaccaaattaatgcagtgttaattgataagttctaacttttgatatttaaatatctattttggtgattatgtgccccagtttagaaaaccacacaggtgaggatctgagcctcacaaggacttccctaagaggcattgtgctcatctgttttgtgctgctgtaatagaatgcctgaaactgggtcatttacaaagaacacaaacttatctctcgaaattctggaggctggggacaacaagatggaggtgctggcaggtcaggc

SEQ ID NO: 74494 - DNA, 1665 bp, Homo sapiens
acttatttcttgtttttccttacttttttttttttttttaccagaaaaatcatttttcttctctgggaaggtgaacatttgtagcattgatttcccggatctggtaacatggcaaaagatgtaagtatgtttgcttcatgctgcacacgaatgtttgcctcgcactaaattctttgtagttctctgcctttatttcagaatgacaacacataagctacagtagtgtttattttcagacttttaaagcgtctgaagcgggatgaaggtgaaagatggaaggatctgatctctgaagctgcggtcaccacccacaagttgtggccttggataccacactgcagttgggtggtgatggggtggtgccttctgactttttccttatctttaccgactgtgttaattgataattttaaataaacgccttaattaaattgaggtggagggtgttgcagcaccgcagcgaatcctgcatttcttggggggcttccacatgagacgctggacgggggccaggctcagggctcaggctgtagccacctgctggcacctgtcttcctacagaggaagttaattccacttgggtggaccaagagctaaggacttgttttggccactttttttctcagaaggatgagatttcctgatttatgaaatctggtaaaaaatgctacttagcctgctttgcagttgtcatgaaactatagaatattttgaaaattttttaaagccagaaatttagtctattttattggtgtgcggttctttaccgtgcttggttatgtcagtcactgaaacaccagctggattctttagtgtttcccaccgtgcatcgttttgtaactgagtgaaaggtgctgttgatgtgtttacctacttaccgcacagagttggaaagagtccgcacatgctgcctctgcctgagatacatctgtagcgaaaatgcgtccagagtgtggagccctctccgttggcgcagaggtttcagtggtccctgcgaggccttttggggtgtctgccctccctgacctgcgaccaggcatgtcacacggcatccctgccttcaagcactggggtcccctttagagagggtgtgtgagcacccaggtggacccagtgtgagtttttgaagtcatatctggctgtgctgcgagactacttttatcctctccactgtgcttgtccgtaccatgccctgacctcgtgcgggcatgcactcagaatgccagatgtgggcatgtgctcagcgcgcaagccatgttcattacatctcctcatggtgaggagctggacccagggcctcggttagagcacgcttctggtgttgtgtggtttcctgtgtggtttcctcagatggttctcaaacacgctttgatacataatggatggtgttttcggggccctctttcattcccccgtgatttcactggcactgtctgtgagcagcatgtagtgtgaggctgggggtggggggcgtgtggaaaggtggtccggctctgcaggaccctgaatgctccatccagtgtgggcacctgagacgcagcatttgtcaggaactgcataggcacaggggctgggggctcaccttgcactcaggggttgtgatctgagttgggggttggcgctgggaggagagtaggattctgcagctggtgaggccttccctgc

SEQ ID NO: 74495 - DNA, 1050 bp, Homo sapiens
tgggctgctgtcacaagaatgccatgaccatgaactgggcagcttgtaaacaacaggaatccaccgctcacagctcgggagcctgggagtccaccatcaaggccctggtaggtttggtgtccagtgagaaccacttcttggctggtaaatagcgtcttcttgccgtgccctctcctggtggaagggccagggagcccctttatcagggcacatactccatccaggaggctgtgccttcatggcccagtcacttccaaataccgtcccaagcaggattaggaggaccacatgtgaagacgccgcacagccttcctggaggctgtgtgccccagccctgccatcagctgcctgctcccgctcacgtctccccagttcacctgcctccagtgctggtttatagaacatttgtgtgacttcttcagatgatctgtaaacagaggcagtctaggtggtgttttgttttctaatttcctttatggaaaggagagtttgcatttcccttgtgattttgacacacattgtattatgaaatattttcagtgtttgtcaaactcggtgtggggtaagcgcatcccaccaagataggcgcttacaggcagccaaggaacccaccgtgtggtttccttttaggttggatttcctgtcttacagcctcatgttcctagttggaaattaaggttgagactgtagccaggtgtgcatttattcatccgccagctctggagaggtctgctttagaggccctgcggccccagaagtcatgcctctgagtccgtggttcttagctgagggtggctttgcagtgtccggagatgattctggttgtcccacccagggtgaatgaaggctgaagatgccgccaaacaccctgcagggaggctggcccctgacagagccgtgcaggcggcagcggcagcactgttgctgcggctgagacagcgcagggcgtcattcatccccctgcctcctgagcccagagcttctccaggagaaagctgaggaaaggggccagccgtgagctgcgggtgcttgccagggatctggtgacac

SEQ ID NO: 74496 - DNA, 1049 bp, Homo sapiens
cacatgtgcccccgctgtgtggctgtgccgtcacgtgtgtacccctgctttgtggctgtgccgtcacacgtgtgtccttgctgtgtggctgtactcttacctgtgccacacttaaatagaatgtgtttaacattctattgtgaacattttcctcatcattacaatcttgatttttcaagactgtgtggattctgtaagtcatggctaattcctggtggacggtgctgttttggccctgtaggtgccatggtgatagtgacattccttctccggacctggcgttctcctggttgttcctggagttgcttgcttaactgtggtccttctgcctttttatgacgttatttgatagaacccttgagggtggttttaaacacccctagtttcgtagcccttttagctgtcatatttattattgttttgttgctttccgcaggccggtctaattgaagccaacggagaactcaaggtcttcatagaccagaaccttagtcccgggaaaggtaagggcacctgttctggacacactcttgtgttgatgaatgcatgaagcttcacatgtttatgaagctgttgacgctgaagcctcttgctaatgatggcatctcctgcatgggcacctttgtgctccgggaacccaggagggtgggcgtaggagccttctagcatttagaacacagcctgcacacacaccagtagctttgtggattttgaattctaaggtatgtatactatttgcaaaagtttagaaaaggtagaatattgtaaagaagaaataaagatagtttgttttctctccacccaaagataatgacgtttcagctgtggtgtgggctcttccagaggccggcctcacctgtgctgtttgaggaaagatgggcctaccatggtgcatgccttctgcgaagcaggcacttgccacctttaacgcttcgcgtgtgtattttactagctcttgaggaagagccgtttttcttgtcttggggaatccaggggaggaagtcagctggagaggttgaagccacctcttccagggtcccacggttggt

SEQ ID NO: 74497 - DNA, 1048 bp, Homo sapiens
atcactaaaaggaagtaaaagggtgaagggaaaaatggaagcgtgctcaagtgccctgtgtggaattctgtgccgcccccttcattaaacttgaccgttagcgccttgtgtgcggtttgggggtcacgctctgccctgtcctgttcttgcttgcttgggtcgtccgaagtttcttgttgcttttgtctaattggagaagatgcctgtgactgacaagaggaagatgagccacattcagaaccggtggggtgatgccgtcaccgtgacaaaagcgtccaccgctggacgtttttcctgctccgtcatggctgctcactgtggttaaggaaattcagcagtggctgcggatagcgaacagatggtgggcatggcaccctcgccgtgtgggaggggactgactgtctgaattgtctttttcgactgtaggtaattggtacgcctcagagaccggcagcgtcaaacaccctggtggtaggaagcccacacacccccagcactcactttgcctctcagaaccagccttccgactcctcaccttggtctgccgggtgagcacttccctctggacccttagagttgtaggactgcttgcggttcgcacctccacgttctcctgggccacgtgtgtcacacagtcgtgcgatggggctcccacgcgcgttgacgccagcctccgaatcacactcacccatcatcgtggcctgcacaggtgtgcagccgaggcgcactgcctcggtcatggagaagtcgggctgggcaccgcccaccccgctttgtgtctggtgtagtgggtgctctctgaagggctggcagctcttggccaagacggggagaagctggcctcgtactcgccacaggacctcggagactttccctcgtctgtgctgggagcatgtgggatggatttcacccactgcccctgaattcagcctctactgcccctggggttacggcccccgcgggtggtcccgccagagctgctccttccactaaagcaagatctgatgagctgtgtctttccttaaaaacacacacacgcaaagctgca

SEQ ID NO: 74498 - DNA, 1971 bp, Homo sapiens
ttgaccacaagccctgaggcggggggaggctgggtgggccgcctgcactgacggcgccatccgcctcctgccttgcagtgacctgaccaacggtgcagatgggatgctggccacaagctccaatgggtctcagtacagcggctccagggtggagactccggtgtcctacgtcggggaggacgacgaggaggacgatgacttcaacgagaatgacgaggacgactgacgtcctccccacttcagattcggcttcaggaaaacgtttagcgaaaagaaactttttttttaatgtgggttttctgtttccttttggcctactcccaagaagatattggtaagctattgaatttagatatgcacctctgataagcaaggattgtttcccgtaggattaggacgtgctgtggatgtgtgttttgataccagtgtgctgatgcagagcgtttatttacttgttaggattttgtgttttcatttgctatttttctttaagtgcagagttcatttttgcccctgaaaagtttttgctgagtttgctgaagaaattgtatttcaaccacatccatgaaaataaaacacctcctgttgtggatggtgagcccctgatgccgcttatttgccgtgagtttggacggcacccctgctggcggatagcaagactctgtggagtttgttcagtggtacggtgtccaagcaaacagcagaatgcaactttctaaacagccccaagcaaacagcagaattcaactttttaaacaataaacaccatcaaccttattgactttattgtcccttaaattatattgactgttgtgattccatcaagtttgtacactcttttctctccctgttttgcagcaacaaattgcgaagtgcttttgtttgtttgttttcgtttggttaaagcttattgccatgctggtgcggctatggagactgtctggaaggcttggaatggtttattgcttatggtaaaatttgcctgatttcttacaggcagcgtttggaaaccttttattatatagttgtttacatacttataagtctatcatttaaagacatgtactgaaacaaatgtatttgtttcataagcatcttcctgtaatctattataaaattgaaattaaatatagagaatgttttaacaattttttaactcaaaatttgtcaatcatttttaatagttctttttttataaaaagaaaaaggaatttaaggacaggcagtagtctcttttaaaatttattcacaaaacccattaactgcacagttgctattagctgcctgttctaaaacgatagtctttttattgaaacacaaataaacttttctgtaatattttatggtatataaagagactttaattgtttgacttgtttaacttggcactgttagtttttattaataaaacgcgcatgggcattttaaacaagctgtgtttctctaattcaggattattatctagaaatttgtctgtcttgttggttttactttatacttgagtgagaaagtaggttgttaggcccagacgcggtgggcccgggtggtccctgtgggtgcaaaccccaccaccacatgttgtctgaggcacatcctccgggagcccaccctgaaaaggtggaaggtggccaagggtggaggtcttggtggacacagggcaaagaggcaccttccttttcggtgcctgtggtgcagagaaagataagccaagttccttggccttttttcacaatgaaaattgagacaaaatttaaaagtttgactttgagaacaagaataagattgagaggattctgggaagatggtggaatagggagcaccaggaatctggctgcccaggtagatgtctacctcgcgggcaggatctgcctgatgcagctgttctgtaactacggaatctactgaaggcttaaagctttcaagggaggcttggtcagcacattgcagttaattttggtccatttcagcttt

SEQ ID NO: 74499 - DNA, 1033 bp, Homo sapiens
gccgaggatgcgccaccaccccagctccagcaggaaccgagggccctctgaggggggagttatggttcccccatcacaggaagggaaactgaggcagagaggtggggtcctgcccatggtgacccatagtgcagcctggaagtgcatggccggtcctgcttccacaaagacatcaggaagagaaagggaggaagggaagccctggagatggctcttctcagaagcaagggtgtccataggcaccggcaactcagggtgcagcttcatctcatctgcttctgagaccctcctgtgagcttcccctgcagcgtcagaacctaacggaagccaccgtccccgtggccatgggcggctcctggacacaggcgactgcctgtgtgctgtcttcgtctctgtaaattagcttgtgtggatcgcaggaggcatttgcagggagacaccggcaggaagaggacggttttgtgtttgctacggcttttgtctttctggaaagtctgtaatgaactgggcctcctgctcctcctctccgctgatgtggcatggattctgcttagtgagccgttctccagtgacccaaaacacaaccaaagggcaggaccaagtcagagaagcaagggagtgcagggccaagaggccagagccctgagctgtgatgagaggctgtggcctgtggactgcctgccctcttctgtgagctgggacagcacagatctctgagccaggtcccttcagcaccagctgggctcagggctgggtcttgctcacctggcatccactttgagtccctcctttccccgccgggcgtccctggtgacggcgttcttgtgtggccacagcagcttggcttcagcctccggttttgagtttccagcttcagcagtgtggggcccgcagtggtggagggtttctgtcctgtcactggatcacgcctggtgcctccctggtgctggccctgcaggtcctgcctcagtgtccccaggtcactcctgatgtggcttctatttgacttggccgcctgtcccccggggaccta

SEQ ID NO: 74500 - DNA, 1306 bp, Homo sapiens
aaggacaatttaaagagatcaccttccttgcacccagcagctttgccaggcatgaagtgcaggggaggacgtggcatcacagcagaagatgagttcctgccccgttactaagaaacatgccctcccttcccctgtgagattactcgtgggcagggcttgtccctaggggggccctgtcattcagtggttaaccccgtggtcccagggtttactctgtggttcctgggggtttattccatggttcctggcggtttactccatgttcctgggggtttactttgtggtcctggggggtttactccatggttcctggggtgtttactccgtggttcctgggagtttactccatggttccaggggtatttattccgtggttcctgggtggttactctgtgattcctgagggtttaactctgtggttactgggggtttacttcgtggctcctaggggtttgttctgtggttcctgggggtttactccgtggttctttggggtttaactctgtggtttctggcggtgtaactctgtggttcctggggggggggttactccatgtttcctgggggtttactccgtggttcctgggggtttactccttggttcttggggatttatgctgtggttcctgggggtttgctccatggttcctgggggtttactctgtggttcttggggatttatgctgtggtttctgggggtttacctctgtggttcctggggagattactctggttcctggggctttactccatggttcctcggggtttactctgtggtttttggggggaggttatgctgtgtttcctgggggtttactctgtggttcctgggggtttactccatggttcccgggggcttaactctgtggttcctggggggaggggttactctgtggttcctgggagtttactctgtggttcctggatgtttactccatggtcctgggggtttactccatggttcttggggatttatgctgtggttcctgggggtttactctgtggttcctgggggtttaactctggttcctgggggtttactctgtggttcctgggggtttactccatggttcccgggggtttaactctgtggttcctggggggaggggttactctgtggttcctgggagtttactctgtggttcctggatgtttactccatggttcttggggatttatgctgtggttcctgggggtttactctgtggttcctgggggtttaactctggttcctgggggtttactctgtggttcctgggggtttactccatggttcccgggggtttaactctgtggttcctggggg

SEQ ID NO: 74501 - DNA, 1020 bp, Homo sapiens
gtggagaaaccacagcccagaacagggaactttccaggacagccatcttcaaggcatccatatctatttcataatagtgtatactttttaatgattctctgtaatttttgtatgcttgaaatatttcataatttaaaaataaagggtcaagggaaatgagcagggaaggagatgacggggacccccgagaagccctgtgggaagcggctgctgcaagcccgcccttcacctgggagtcccagtggggcaggtgtgacagcctctggggtctcagcagctagaggcggggtggccactcccgaggcacaggagggacagtggacccgctgcgcggccggggcgtggggctcaggggagcaggagtgaaggccacatccccgaccggcgtggcccccgtccgtggcaggacatcttgccgtgcgtgcccttcagcgtggccaagagtgtgaagtccttgtacctgggccggatgttcagtgggacccccgtgatccgactgcgcttcaagaggctgcagcccaccaggtgaggaggtgtccacaggaggcaacacaacttagaatggccaagacactggcttcacagggcccgggccagggttcggccagcagggaggggccgggcatctgcctgtgcccagtgctgactcatttctcctgtgggtgcccaggctggtagctgagtttgacttccggacctttgaccccgagggcatcctcctctttgccggaggccaccaggacagcacctggatcgtgctggccctgagagccggccggctggagctgcagctgcgctacaacggtgtcggccgtgtcaccagcagcggcccggtcatcaaccatggcatgtggcagacagtgagtgtgcggcagccaccccttccaggcctcacggggttctccctgagccagactcagctgtcactcgcttatgcaaccgttaggagatgagctctggggcctgcatctgctgcgtgccggcaggacggggacccctgccccgtttagttcatgctcc

SEQ ID NO: 74502 - DNA, 1051 bp, Homo sapiens
aaaattccacatgtcaccgtgggccttccttttccaccctccatcgtccagcaggtgtcgggccccaggctggaggccacgtgccaggctggcaggatttgtccactgtgaagctcgacgcccccgcaggccctgtgctgcccgcccggatccccctgcctcaggatgccctccacaccctccgaattcccagccgctgctctggggcctgcacagagggcttgggcccagcacctggaaactccaaagaggcaaacgggttcatgtccaggtaaacctcaagatgtggctctgaggagtttccttttatgggttttactgctttttaaaaacactccttattttcgaaatagaatgtgacgccccaccctcaccctgtccaggaggcccagccagtgcctcttctgtgcccctagacacctctgagaactccaggcaccagcattaatatcctggagccctggagccccggagcccctgagtgtgccagatcctgagtgtgccgggcctgagtgtgtgccaggccccaagtgtgccgtgcactgtgtgtgttgtgcccccagtgtgccaggcactgagtgtgccagaccccgagtgtgctgtgccctgtgtgtgtcatgccctaagtgtgctgtgccctgagtgtgccagaccctgagtgtgctggaccctgtgtgtgctggaccctgtgtgtgccaggccctgagtgtgccatgccctgagtgtgctgggcctgtgtgtgccagaccgtgtgtgtgccaggccctgagtgtgctgggccccatgtgtgctgggcctgtgtgtgccagaccgtgtgtgtgccaggccctgagtgtgctgggccccatgtgtgctgggcctgtgtgtgccagaccgtgtgtgtgccaggccccatgtgtgctgggccctgagtatgtcaggccctacaggcagcgcctgcagatggagctcacagagaggctagagggggaaatctgcttaaagtcttgtctgctctcttcatccttcagtggatgtggaatttaatctggcagatacttacatggctgct

SEQ ID NO: 74503 - DNA, 1045 bp, Homo sapiens
tctcctcctccacccttcttctccctccttcccttccttccttcttaacccctccttccttccaccatgcgggtctggtctgggaagggcagtggtgaggctccaggagagtgacaggtccctgtggcccggacttggaccgagttgctcaggggactgagcctgcaacacctcctgagtgctgtgacttcacctctgacatcatcatatcagatccctctcgacacccttctggggagacagccccatttgccttccaaatatgttgcctcgttgatatcagcaggtccatcaacctcatggccaaaagccagcaggttgaaaatgcgcgaagcatgatgctgtttgttgtagtagaaggcgcacacgaggcacacatggtacaagatgcacacacatggcaggaggtgcacacacatgggtggaggtgcacacacatggcaggaggtgcacacacggaggaggtgaacacgtgggaggaggtggtgcacacgtgggaggaggcacacacacggaggaggcgcacacacatggcaggaggtgcacacatgtgggagaaggcacagacggaggaggtgcacatacatggcagaaggtgcacacgtgggaggaggtgcgcacatgtgggagaaggcacacatggaggaggcgcacacagcaggaggtgcacacacatgggaggaggtggtgcacacacgtgggaggaggtgcacacacgtgggaggaggtgtgcacacacgtggcaggaggtacacacagaggaggtgcacacatgcgagaggggtgcacacacgtgggaggtggtgcacacacatgggaggaggtgcacacaggaggcacacagaggtgcacacacaggtgcacacgtgggaggtgtacacacggaggggtgcacacacatgggaggaggtacacgtggaaggaggtgcacacacgtgggaggagatgcacacatggaggtggtaggcacgtaggaggaggtgcacacacatggaggtagtggacacacatggcaggaggtgcacacacatggtatgagggaggt

SEQ ID NO: 74504 - DNA, 1050 bp, Homo sapiens
gccaggctggtctcgaactcctgacctcaagtgatctacctgcctcggcctcccgaagtgctgggattacaggcgtgagccaccaagcccggcccccagcacttctgagttgaaccttcaaaccctgtgaaggctgagatgagccccaggcagggccaggagactcagcaccccgagactcagcgccccagagccatgaccccacctgatgctttcgactttgagatgcaccctgcacgctgggccgagagagtgggtcaccgcggtgccgtcggatgttgcctgcgggatggtctcagcagctcctgagactgtgggacgcccaccccctccagtcccatctgcgtcgctacccctgtttctccgtagctcatgcacaagccacagcagctctgaggtgactcctgcatttcgtcccctcgatctgggacagtcacagcatttctgtgatgctgacatagacctttcttgctcccgcctccccaggacccccagacgtccaggacgctgacattgatctccaagaccgttcagaccctcggcagcctgtccaagtccaaatctgtgagtccctcttcttcattttctctttttagggacaactgattcttttctctcttcagaaaatacacgtgaaaaacctcccacatttgagagagtcgtaagataaagatcaagaatcaaagccggcaccacatcctctcttgaaacccaggacctgagcgtccccgtcccgctcacctctcccctcctaaagtgaaccccttgcctttttcgggagcctgtggctcgtcgccggccccgtggcaggagcagcatctgacctgtcaggtgtgggaagcggctgaacaggccaggcagatggcctaacctggcgcctcctgggcgttgcggtgctggaggctcctcgtcacgcagccccctactcccctcgcggccccctcctccccacgcggccccctcctccccacctccccacgcggccccctcctcctcacatggccccctcctccccatgctgcactacctccccatgcagccccctcctcc

SEQ ID NO: 74505 - DNA, 1044 bp, Homo sapiens
gccaggcctgagaccccttccaccctccctgcctgtgcccccagaacccactcacagagccctgtcttaaacctctccccagatatgccagagccacaaaccctgtgaaatcgaccctgtgaagttgaaagacggagaaaaccttgaaaacaacatggtaggttttgttcatgaaccaaccaaagccagtcacctgcttggggtttttcagccgatggctgcctggaagctctgactcaccccgtgaccccggttggggtgggagcaggaccaggcgtggggatacccgcctcacccggctgcagtacgctggctgcactactgggaggcctcagccaccacctttggcctggcctgtgtgccgggctctgcgtcccctggggggtcccggccagctcttcctcccctggagtgatccggtctgcatgccccagctctgcccccccggagggtctgccctgcacaccctgctctgcctcccctggacaatcctgaccagctctgcctccgccccggctcctccttcccttgggcaatggctcctgcccctcccttttcctaggacaggatggcctccctgcctccccaggctgtccccagagctgtgtactgcgttttaaaacagcaaaactccctgatgttgaacttgctccaacattttagtcacttcacatgatacttcttgcagagcgtgctgtttcgtcatttctgtatgtaaatgacagagctctttgccttgggcaggcacattctagtgaacgtccattccccactcagtaaacgaggtcggggccgagccggggagccgacgtggtgcctgtgtagtgattttcacgcgtgaattgccacagctcccagcacagatttccagggagtggctgttcacacgtgtctcactgccgcagctgccctgcgcccgccctcagcccctccccacgcgcccctccctgggcgtgccctggtgctacacgcacctgtgggcagcctcgggagtgggtcccagtgccgtgtcccgttgcaggagaacctacggcagtatgtgga

SEQ ID NO: 74506 - DNA, 1029 bp, Homo sapiens
agatccacagagacagaaagtggggtgagggccactgggagacagcaggagggggatgggagtgagtgttgaatggggaccgagtctccgtttgggaagacgagagtgttccagagaggacggtggtgatggttgcacaactcggtgaacgtggttaatgccacagaactgtgcacgcgagcaggtcagagatggaaaattgtatgttaaaaattaaaataaagggactaatgcaggtaaacaagacacagcaatcctgagtcccaggctggcaggtccctgcttgcgggacttgcattagagggtggcgtgcatgtccctcgcctttcggcagtacacatggggtgcacatccacattttgacttgtggtggcaaaaaaaccaaggctttatagagagctagtgaatgcacacaagcaaaggctggaaacgtgtctgcgatgtagcagggaacaaacatttctacgctgctgatgatgtatgtcgcttttactttttaggtgaagccaaaaaccttccctcttacccggggccgagcaagatgagggattgctactgcacggtgaacctggaccaggaggaggttttcaggaccaaaattgtggaaaagtcactctggtaatgtcttctgttgctttacttggcactgatgtgttttctttggtgtagagaatgtcccaagggtgtacgtcaccttcccattttcccatgtgtggagaacgtcccgagcgtgtacgtcaccatcccgttttcccgcatgtagggaatttttctgtgcgtagacaatgtcccgagcgtgtacgtcaccgtcccgttttcctgcgtgtagggaatttttctgtgtgtagacagtgtcccaagcatgtacatcaccgtcccattttcccatgtgtagggaatttttctgtgcgtagacaatgtcccgagcgtgtacgtcaccgtcccattttcccgcgtgtagggaatttttctgtgtgtagacagtgtcccaagcatgtacatcaccgtcccattttcccatgtgtaggg

SEQ ID NO: 74507 - DNA, 1017 bp, Homo sapiens
ggcaaagttcgtccgcgagtcaatcgctcagcctcgctcagcgggcccgggccgcgccggcgaccttccttcgtctcttccgccaggcagcccgctggggtcccttccgctcagcggccaatccgcggggcgggggcgggggccgaggcctcgggggaagccgatccctgcgccccccgggtctccgccacccgccagcgccgtccctgccaaccccgcccctgcagggcccgggccagttgggagcaggggccgggccgcgggcggagcctcccggtccccgccctcgccctcggccaactggcggtcttgcaggcgggcggaccctcggccgcgctcggggctccggcgccgccgctcctcctgctcggcctgagctgcccgggctcggcgcgcgcttggggcgaggctcggcgggcgcggacgcgcagcatggcggtggaggacgaggggctccgggtcttccagagcgtgaagatcaagatcggtgagtgtccgccggcagccacgcgtccgaccccccggcccgaccctgtcctctcccgcgcccgcctcccctccgcagatccttgctggggaccccggcggagacgccctccaggcgcggcgcgctccccggagaacggctggtccggctccgcggcccctccccacctccccgcctccccgggcctcgggctgggtcgagtcggctccggggtaacgcggctccctgcgcctcctctgcgcccggagcggccccggtccctggtagcggcggaggaggtggggtccctgcgccgagggacgtctgtccgcgtgtgcgcccgagcgtgtgccccgcgtgtttgcaggagtgcgcgcgcctgaggctgtctgggcgcctgcacttcaggtgtcaaatccactgacgtcggggtctcggcatctccctttctccgctgcgcccagaaacttcctttccggggaatgtggaggctccttcacgcttctccccaggggcgtgaggccccggcgcgctgctgctgctgtgcgcgc

SEQ ID NO: 74508 - DNA, 1079 bp, Homo sapiens
tgtacggtgccttgtgctgtccgaatctagggattgtgataggaagaggccatctttttgagaagtgattgagatagtataaaccaggatttcagtatctcatgcagtgattctcaaccgtgttgctctttacatccttgggaagacagagaaacatccatgtccagttcccaactccagagcagatgctttaaagctcccaggtgatcctaatgtaccacaggcactgagaatcagtccaagtatgttggcagtggtgtgaggtgcgtcaacaagggaaacagaaaatagagtggttggattaatgggattctaacatattttagcctagtgcagtggttctcaaccaaccagagtgattttgccgccccctgccccgggaacagttggcaatgtctggagatgttgtttgtcacagcttaggggcagggagggaggttgagaggttgctgctggtatctagtggttagtggccagaggtcctgcttagcacctgcagtacacaggctcccctgttcccagcagagcaagatccacgcagtcaggagtgcggaggctggtggttcttaggtgacaagagccacctggggacctgcctcagccctgaaagagtagcctccacccaccagatgattcccgtcttcaggcctggagccactgtgtcagcttctgttgcacattttgatcttatgttctcttttgagtttgatttacttagaccaagaactgtagaatcatatttttagttgttggctttttcccctctataaatattatgaggatattcttttttttctcaccatttttaagaaaaagaacttcttgaatcactaccccttagcaagctgtgtaatgaagaacaggaattgctgcgttttctatttgagaacaaattgaaaaaagtaagtaaaaccaaagagttagcacttgctttatgtaaatatcttattccataaaatttggcatctagtcttatattaagttttcaaaattaaaactttttaaatttagcacatttttaagaatagagcgtttaagatacataagattccaaaaaaaaaaagctttcaaaaatacct

SEQ ID NO: 74509 - DNA, 1074 bp, Homo sapiens
attttttatctagaaggaaagacaagtatgaaatcattgctgtaagagcagaattatatgattgtgaagagttgtaatgaaatcatgtcttaaattacatgtgatacgaacaattgttctttttctgctttttcctgaacagaacttttctatctttctcataaactggtggatttatatcctagtaatcctgtaagtaatataacttttagtcttagtttttttttttttacctgtactttaagaaaatgcttaactcgtatttagacaatagcttaagttcaagcaaatgatgttttattaaagtgttgcaacagaatctcctagtgtttattgtacttacaaaagcagcattaacttttcaacccatgaaggtattttttaattataccaaagcaaaaaggtttttaaacccttttttctgattatagaagttatacatgcttattttaaaatacttagcgtatagcaatataaaatactgaccatgacagtcacgcctccctttcctaagaaatgtggataattgtttggcagctttctcacattgcacatgtaagacaacctgttgaattgtgtactgattccaaactgtcatggatcggaatggagaactaggaatggaaaatggaatcagggactgcgtctttaaggacaaaatcaggaatcagggtgtaagactcagacgacaagaatttgcaccctatcccagtgtgaaaccagagcaagagaaaaccagctaaatagtcagaactcggacagagagcaaggaagagccagggtcaggctgggggagatgagcagtgcaggggagtcaggactcacaggctggtttttgaaacagggactcctcaggggccttgtcttgtgtagacgtctccttgagaaagagccatggagtgtctgccctcttctcttggaccttagtagactgtattagagaaatgtctaacttaactagaatatgtgataaggaacatgtagtataccctctgtctaccctaatttgttgcagattccaattagatattccaattccaatctttgtttatggtaaattttgaactttttagg

SEQ ID NO: 74510 - DNA, 1095 bp, Homo sapiens
aaattaagagaaaaaagtaaatgctgtgttttggctacctttaaattattttgcagataggatttgaagttgacagattaatttctgctaaatcacagtttttggtgttgaatatgtgaaattttccaattttttaggtgtcatttgcctatgctgtatattggattagaatatggtttgaccaataactcaaaactagctgaaaggttcttcagccaagctctgagcattgcaccggaagacccttttgttatgcatgaggtcggcgtggttgcatttcagaatggagagtaagtactggaagaccagaaacccttctgttaactagtgattgtaaatacagtaggtgatcactagagttcactgacaaaagcgactcttcagtagatttgtacttttaaatgttctattttaggagaaggagatagaaaaaaaagagagaaactgttatcttggatttccttaaaaattctaaacccaggttttggtctttttttgatctgagctaccacttcttttcttacatgattggacagttcagattacacataccccacagtgtggctgggggcactgtggaatccttagttatctctgtgttgataaggagttgaatttacgtatttgagaagaatttgacatggtttttgaaacaaaagtgttttctatttagttactagtaagtcagaaaatttaattcctggtcagtgtaggctttactgtactctagaatatttgtagaataagtgatttggtgttatactcaaagagaaaaatgtatgtaatcctttgcatttcatgatatacaaattttaaaatggtaaattagtttcagttttttttggtttttgtttttgtttttttgagatggagtctcgctgtgttgcccaggctagagtgcagtggcgcattttcagctcactgcattctctgcctcccaggttcaagcgattctcctgcctcagcctcctgagtagctgggattacagatgcccaccaccacgcccggctaatttttgtatttttagtagagacagggtttcaccatgttggtcaggctggtctcgaactcctgacctggtgatccgcctgcct

SEQ ID NO: 74511 - DNA, 1007 bp, Homo sapiens
caagcggctgttaatgtttgcattgtcagttaactgttttaccacatggtaagaaatgagttttttccctaagagggcaagtgttggcgtttgcttcttaaatgggctctagctttgaaacgtgagaggcatcagaatagattgggtgattatttgaagctaggaatagtcattgggtcacggaaacaattgggcactgtagcgtcagatgtaatattcctctagaacttcagagagcttctttgactgaagggtaaataaagtatagcagcaggtcccacttctgaaaggatagggatgggataggtattactgaaattcacaccttttgttgctgttactgcatactgagtgtgtatttgggcctttccattttaaaatatttgactgcttctgttgtatgaacgatcccgtgaattggtgcttatgagttaacctaacaattatcaaggatgtgtatatactgatattacttaaaagtagtaacagttttagataccataaacttgcatagtaagagatttgcatgatgctcttctgtttcattcgtgcctgttttgtttcattctattctgattttcacttctcagcttcctgctgttactgtttgtgcacacctgcccacagttttcttctcccttggctgttagctctctctgctgttacagacacagctttgcctccctgccaagcgatctgcctgtccccatagacacagctttgtttactttggtctctcatgtcatctgaacttataaacactatttctgtgtttgcacatgcgtgtatataaagcaggtgcctctgtcgcatagtcttgggtagttctggataatccaagtgttttgttaataggggattgccacttgccaccttgtcagttttctaagaagtgactgccttatgccccagacgggctcagcagcatcagcatcacctagaagcctgctagaagtgcagaatctcagaccaactgaatcaaaatctgcagttttagcgtgatgccc

SEQ ID NO: 74512 - DNA, 1042 bp, Homo sapiens
gtgagccaccgcgcctggccacacagtgcagttcttacctgtaacagctgaggagaaagttgtccacaggcctcatacgtatttaggaggccttggaaatgggcaactgttgaaacactggagctgcaactgcatgtgcttctgaaagtcttctgacacttcctttgcaaatggtggaaaacaaatgaaaaagaagattggaatgttgttttccttctgctctcaacttgtgctcttaaaagtataatttgacttaaatgatagagatggtgtataatgatggaaatgataaatgatggagttttgtattttattctaaatagtataatctgacttaaatgataagagatggtgttatataacaatagaaatgataagtgatggaatttcttattttattctaattatagtatttctttttaggagcagacattaaagacaaattaaaatgttatgactttgatgtgcatacaatgaagacactaaaaaacattatttcacctccgtgggatttcagggaatttgaagtagaaaaacagactgcagaagaaacggggcttacgccattggaaacctcaaggaaaactccagattccagaccttccttggaagaaacctttgaaattgaaatgaatgaaagtgacatgatgttagagacatctatgtcagaccacagcacgtgactccagtcagtggtcctggtcccactgtcccagtgtaggttagtattccttcacatcctctccatggcttaagaatgtcccacttcctaacgtgactccaaactgcatctctacatttaggaacagagacccgccttaagagactggatcgcacacctttgcaacagatgtgttctgattctctgaacctacaaaatagttatacatagtggaataaagaaggtaaaccatctgttatgtctttttttttcttttccaataaacttttattttggactaatttttgatttacagaaaaatggcagagatagtacagagagcttatgtgtgcccctcacctagtttcccccattggtaac

SEQ ID NO: 74513 - DNA, 1028 bp, Homo sapiens
agcctcccaaagtgctgggattacaggcgtgagccacagcatccggtctatttgtgcattttaattaaaaagttctcagactaaaataagtttataaattttgattatgttactgtaattatgtgcagatattaaaaattgaaattatttaattttattatttaatccaaaaaaattccagaaattctgtgtaatagtgacagcctatttatgtattatcatcagagaatgaaggttttcatgagtgagtttgttgcatgagagaacttgatctttttaggttctaaagctaaactattttacctgataggaattttccaaaatgtacactgacttctatcttcctaaacagcatccttcatgactgtaccatttatgataatgtcaccaggaagtcactgctgttaaacagctttgcctgcggagacagcagtcttcaactctactctcaatagttcccttatcagtacttctagggttctgctttcatctttttccttctcttctcctgtcaggctgtctgctgttgtgttcctggctgtcaagtttgtatacctttcacagcaagttgttttctgccctcccctccccagccaccctcttccgactccacgtgttttgacactgatgagtgttttctttttctccaatgaggggtaaggactagaaagattgttaaaaaaataagcattagccaagctagttcctgtgactagaagcaaatgtgatgcttgaactgacctttgtgttcattgctcatttattcagtaacttactgagtttccctttttcacttaaaaaatattggtgggccgggcacagtggctcacacctgtaatcccagcactttaggaggccaaggcgggtggatcacgaggtcaggagttcgagaccggcctgagcaacaacgtgaaaccctgtctctactaaaaatacaaaaattagccaggcatggtggcaggcgcctgtagtcccagctactcggaagactgagacaggagaattgcttgaacctgggaggcggaggt

SEQ ID NO: 74514 - DNA, 1563 bp, Homo sapiens
gttgaccaagtattacaaaggtttatttctgtgctctctattttattcccttggtggatgtgtctgtctacatggcagtaccacactgattactttcagctttggaatcagggagtatgtcatctgccattgaatgagtatccactgtgtgctaggccttgtgggtggagcggtgacttggacatcgtccctgctggtccagtgccctgccgtccccctgagtcttgactttattctggatagtggaggttggcacaaaaatatctcccagttaaaggaattataattcagtcacctgactattactgacaagtcaaaaaaaaatgactcagtgggtttagtaccaaggtagcagtgttccatttgatgattcagcatatagcaggttctcttagtgaacatttctctttgtgtatttgtttttcccccacatagcaacgaagttagtttctaatgacttccattctctacttttatcagaagcagatttcacctggaatattctataaaccctttgaaaccctctattttagccatggtgtcttctaagcaaagtaattttcttgaacttaaataacaaattgatagttgaattaaccttttaaaataaaatgtaaagtgtagctaagaaatcattatttaaaggtattccaacgataaattatttgggatggggctggggaggtcaggtatattgaggtgtaagttacatatggtaaaagtcacccttttaaagtgaacaatttgatgaattttgaacaacttcagttatgcaaccaccacaacatgatggattgttttagtaaatgttcttcttaccaggagttcatccttgtttaagtctggagtttgccgtgttaaggttgcaggtgcttgaaagtgtaataaaattgtaggttttttaatcttttttttaatctcttactggaaggatgaattatagtttaaatagtaataatgcattgtcgttgttacacttactctttaagtaagttaggtcattattttccgaaatgaatgtagtagaatttcagaatggcttctggaacatgtttcctgttaaaaggcctagaatatcctgcagtggtagagtttgctccattccagaagatagccaaaaagaagctgagaaaaaaagatgccaagactggaagcatcgaagatggtgagccctttccaagtgctacgttatgaagctgccaaattaagaacactgagcaaatgtaattctcccgtagttgggaaagattatatttattttcttcctactttttaatgtctagatccagaatataagaagtttttagaaacctactgtgtggaggaagagaagaccagtgccaaccctgagactctgctgggggagatggaggcgaagacaagagagctcattggtctgttttgctcatttcttctcttttctttattgagagatttactcgtagaggatatacgttttttctctttttcttgactgtgataacaagttgaaacttgttacaggcttgacagaaatgtagagtgatttccagttttgacaaaagaatggcaagatggcagcat

SEQ ID NO: 74515 - DNA, 1050 bp, Homo sapiens
agatactattactatgatttattcctctttgtagtggtttttatcaacgcctgctgtgtgcccatcgcagtgcagcctcagcagtgcagcgctgagcacttcgcatgggtccctgttgtctgggaacctgtggtctagaaaggagggtgggcagccaaccggcggtttactgcagttgctgatcatttgtgttgaatcataggtcacacagcggcagtgataaagagcacagggatgtggagagatctcaagaacaagaatctgaagcacaaagataccatgtggatgacggcaggaggcacagagctcaccacgagcctgaacggctttccagaaggagtgaggatgagcagagatgggggaaaggacctggccaagacagagggaagaaggggagccaggacagcggggctccgggggaggccatggagagactgggaagagcgcagaggtgtgacgacagtccagcacccagaaaagagcgactggcaaacaaggtttttattaaacccaaaaagaaaaatgtgtctggctgtcttaaggtccaggctgcatgctgaccatgtcacccccacttggccttgtgtcttggggaacgcagtgctttgagcattttcaagagcagtttttcctgaaagtcagatcccagagtgagactagtcatcatcttttctcagataatcaaattatttttcaccaggaaaaagaaagattttatttagtataaaactagcacgtttatatgattcacttgagaataagattattaaatttacccttgagacaggaaggaaagttttaatgatatttcatggaggtttcttccacattattaacaacattctgattattggtgaatattcccatggctcacaaacacctgtaagttagatctgcacggacggtgagcacaggactgtggttacccccttagccaagcaaacaacttttttttttcaggagctaatttttgttcaggttgcattttcccagcgcagcactacagatggcatcacctttctgacagcaccaggccccaccctggcctcc

SEQ ID NO: 74516 - DNA, 1033 bp, Homo sapiens
taggttttggcgattctggagacaaaactgaaccaagtttctgtgtttccattgaaagggcaggtatggattttggttctgctgaattgcagggtattttctggtgttcaggaagaggagggcttttcacaggatctgtttctttgttcaactgattttttggtttatcattccatttgtctggggatgcatgtttggatgtgatgtgatagtatacattagagtacatcttgctggtgaagaagcatttatggcagtgaaataactttgcacttttctggtaaaatatcattttgcctagcccaccagcatccatttcatcacaaaattctggatggatggtacccatatggatttgtacattttcatagtctgtgcctctgaaactgcaatggtcacactccaaacgtgctgatggtttacgaagttcctggaatgcttccattcttctgtctgttaccaacacacacggttatattctttaaaaactttcaatactgctgcaataaagtaggaataaattattttcatgaactgtaattctgaataaaatgctgtcagtccattctataactgcataattttaagtctagaacagtgcgtgctttatttgatagtatctctagggagaatttgaagaaaaaggagatatagaacagtcccaggcactctgctaggagtttcacatacatcatctcatttaatcctaatgatatgactcaactattattttcacttacagatgaagaaacaggttcagagaagttacctgactttctctggtccaggctataggactatcagtgatgtgagcctgactctagaattagctattgcatgtgctttatactttgactctcaaactccgagtacaaaagtcctcagcacacaaagatgagtgaatatcaaaattaaatcttggctatttaaggatgaacaagagactaaaacttttgcagaaagcacttaataaattaaatctagctataaaaagatgactttaaaacatgatgctggcttgatttcatgtcaa

SEQ ID NO: 74517 - DNA, 1138 bp, Homo sapiens
ccttaaatagccaagatttaattttgatattcactcatctttgtgtgctgaggacttttgtactcggagtttgagagtcaaagtataaagcacatgcaatagctaattctagagtcaggctcacatcactgatagtcctatagcctggaccagagaaagtcaggtaacttctctgaacctgtttcttcatctgtaagtgaaaataatagttgagtcatatcattaggattaaatgagatgatgtatgtgaaactcctagcagagtgcctgggactgttctatatctcctttttcttcaaattctccctagagatactatcaaataaagcacgcactgttctagacttaaaattatgcagttatagaatggactgacagcattttattcagaattacagttcatgaaaataatttattcctactttattgcagcagtattgaaagtttttaaagaatataaccgtgtgtgttggtaacagacagaagaatggaagcattccaggaacttcgtaaaccatcagcacgtttggagtgtgaccattgcagtttcagaggcacagactatgaaaatgtacaaatccatatgggtaccatccatccagaattttgtgatgaaatggatgctggtgggctaggcaaaatgatattttaccagaaaagtgcaaagttatttcactgccataaatgcttcttcaccagcaagatgtactctaatgtatactatcacatcacatccaaacatgcatccccagacaaatggaatgataaaccaaaaaatcagttgaacaaagaaacagatcctgtgaaaagccctcctcttcctgaacaccagaaaataccctgcaattcagcagaaccaaaatccatacctgccctttcaatggaaacacagaaacttggttcagttttgtctccagaatcgccaaaacctactcctcttactcccctggagcctcagaaacctggctctgttgtttctcctgagctacagacacctcttccttctcctgagccttcaaaacctgcctctgtttcttctcctgaacctccaaaatcagtccctgtttgtgagtctcagaaacttgcccctgttccttctccagaaccacagaaacctgcccctgtatctcctgagtca

SEQ ID NO: 74518 - DNA, 2362 bp, Homo sapiens
tgtctcctggaccttggaaaccaattccttctgtatctcctggaccttggaaaccaactccatctgtgtcttctgcatcctggaaatcttcatcagtctcacccagctcctggaagtctccccctgcatctcctgagtcatggaagtctggcccaccagaactccgaaagacagctcccacgttgtctcctgaacattggaaggcagttcccccagtgtctccagagcttcgcaaacccggcccaccactatccccagagatccgtagtccagcaggatctccagagctcagaaaaccctcagggtcaccagatctttggaagctttctcctgatcagcggaaaacttctcctgcttcacttgatttccctgagtcccagaaaagttcccgtggtggttctcctgatctctggaagtcttccttttttattgagcctcagaaacctgtcttccctgagacccgaaaaccaggtccttctgggccatctgagtcccccaaagcagcctcagatatctggaagcctgttctctctatcgatactgagcctagaaaacctgccctgtttcccgagcctgccaaaacagcccctcctgcttctccagaagcacgcaaacgtgccctttttccagagccccggaagcatgcccttttccctgaactccccaaatctgctctattctcagaatcacagaaggctgttgagcttggtgatgaactacaaatagatgccatagatgatcaaaaatgtgatattttggttcaggaagaacttctagcttcacctaagaaactcttagaagatactttatttccttcctcaaagaagctcaagaaagacaaccaagagagctcagacgctgagcttagtagtagtgagtacataaaaacagatttggatgcgatggatattaagggccaggaatcaagcagtgatcaagagcaggttgatgtggaatccattgattttagcaaagagaacaaaatggacatgactagtccagagcagtctagaaatgtgctacagtttactgaagaaaaagaagcttttatctctgaagaggagattgcaaaatacatgaagcgtggaaaaggaaagtattattgcaaaatttgttgctgtcgtgctatgaaaaaaggtgctgttttgcatcatttggttaataagcataatgttcatagcccttacaaatgcacaatctgtggaaaggcttttcttttggaatctctccttaaaaatcatgtagcagcccatgggcaaagtttacttaaatgtccacgttgtaattttgaatcaaatttcccaagaggttttaagaaacatttaactcattgtcaaagccggcataatgaagaggcaaataaaaagctaatggaagctcttgaaccgccactggaggagcagcaaatttgataacacagtgtgaatatttgttctacaaaggtgtttgttggaaccattctttgtaagtatagcttatcagatagcatagttggatcagtagatgacatgtatggtgtaccgtgtttcactgtctcagttgtgttactaagaatgagcatttgatcatttttttctggtctctgtctatgtgactatcttgtaagtcaataaatttctgtatagtccagatggattaaacttctcatttcttttaaatatgtatgaataataatacaaggaagtaggcattccatttaataatcaagagcaagttgtactcaaagcattcagttaaagtgtatctgtgtgtggaactaatttcagacaatagaaaatattagttgaaatgtttaagaattaggcatgaaaaataaatttgagaaattttgtttccttacatgtatttttaaatcataagagttattttctatctgatgtaaaattagtttataaatcttaatcagcttctagatgtttattagcttttatgtcatgaaatgttggagtctcagggttgctgattttctgctaatgggaaaaattgactaagtctttaaaatagtttgcagccttctcccacaggagacaagtgaaagataagtgtgattttagatctttcttgtccatagttgttttcagtggagtcttccattctgtatcttaccctaagatctggttcttccctccccatccccaccccccacccaccgcctgccagctcacactaatagatgattcttaattgccaaatgtgttagagtttgtatatcctactcctgggccttacatgtcgcctgttggggcttaagaccaggttgataagtaggaactgaaagtcttccagattcacagtagaaaattttatagacatttctgttaaagaaatatatcgattttatgtttttcaattatgttactgt

SEQ ID NO: 74519 - DNA, 1036 bp, Homo sapiens
tcacatcatagtcaacatcagtaagttcatacttaataaaattattataaatgtaattacttttgaaagaccttggaaaatttaaactcttaaagtaaaaaagagtattctggagacaaatattacaaatataaagagggttgtaatacctttacttgccctatataatgtacagattttatggtagaagaaaactctaatggaattactcaaacttgttcagcatcagagaatttatattgaaggaaaccatacaaatgtaataaatgtggaaaaacattttttcagaaaatacagcttacaaaacaccacacagtttataataaaagatatttttgcagagggaacacatgtgtaaaaatatttagtcaaaattaagtctttgtaaactttagaaaattcacagtaggaagaactaaggcactggcacttaagacgttacactaaatcagaatgttctgtatagaaagtaatccaaagctaaaactgttggataatttatttgtatataagtttaagaggagtggaagattattttttggagttataattacattcaaggtatacgtttttccttgaaaaaaatgtagattttttgaaaagcaaatagtaaggtaattcaactgtaaaattgcttcatgctgttccttttttcctgttgtttgtttaaaagcatgtcatcaatttctgttgcatcagaaatctgagaaattcccttcttattaggtaggcatcattcattaacttttccatggaagagtaaggatattaaaatgtaagatgcatattgaaaatctaattggagaggctctttatgtctgacttttaacattgttcatgtgatacatgagttatgtgtttagagtgatattctgcattatagtgagaggaaaactttgttttagtagtaaattgttttaccaattgtacttttatgcaataaaatgtagggaattttaaaattcttttataagactgtgataacttagcttttaaattaaatgaaatagttttaaactttttaagacctgcattt

SEQ ID NO: 74520 - DNA, 1050 bp, Homo sapiens
ctcctgtaatcctagcactttaggaggctgaagtgggaggatggcttgcattcaggagttcaagaccagcctggaaaatatagcaataccctggctctacaaaaaaatctaaaaattagccgggtgtggtggcacacctgtagtcccagctactcaggaggctgaggtagaaggatgacgagctcaggaagtcgaggctacagcaaactgtgattacaccactgcatgccagcctgggtgacagagtgagacccatctcaaaaaaggaaaaagtagttttttgttactttttttttttttttggttcgcaagttttgttcaagaactcatacaaaatattccagataaatgaaatttaatcctcatctccctcctctttctcgtcctggttaatttggaagtaacataactctgtttgctgttagcagctacgcaaaccaatcacgtagattattcttcttcaaaaatttttggtgtgatatttcaaataccttttggaaaaaggcacctcagatgtcatggtgatcttgctcttgctccttttgatggtcaccacccctccaccaagcttcccagcttttcagttcactttgatcctctcttgcaaaaactgctcaaaattggcagcatccgtgattccatcttccacagggtgggtgcaatcaagagtgaacttcagaacctgcttccttttttgcccccattcaccacaagctttttcccgggtgccatggcagcagtggaggcagaaagagagctgtttctttttaaattgttattaattttataaagtttccgtagctttgggggtacaagttatatttagttacatgaatgaattctgtaacggtgaattctgagattttagtgcacgcaccacccaagtagcattcatcataaccgatatgtagttttttatcccacactctccgcccatcctcccccttctgagtttccagagtccattatatcactctgtatgtctctgtgtcctcatagcttagctctcacttgtaagtaagaacatagggtatttggttttccattcct

SEQ ID NO: 74521 - DNA, 1712 bp, Homo sapiens
ataagtgtttctctgtagtttttttctcaactctggttggaaacctttgaaaagttattttctaattttacatggaaaatatagcatgaatattaatttatatttcttgtataaattgccattttttgtgtcacttgttgatatttctgtgaagacttaaaaaaaattggtttatgagaacttttaaatttactttacttggacttaaaagagcctgcctctcattgccatattttttggatgaagactatttaatatgttttacaacttaaaatacacttaaactgatacagtgagctgataccttttttgttattaggaaaacggctacattctgtttcatgttctatttcctcctcttgatataaaagagaagtaactttaatttgtatttggtggattaaattaggaccttataaacatttggactgagattttctcaggattcccactggctctggccggctgctatgtgtatctagttaattatcaggaaacaccgtgggaaaaggcagattctatgagagttggttgcattcttttgttaggcaatgccaggaacctgccttttttggatcaaagagctgtctcattcttgtagtggcactacatgaccttacatgctccatgttttccttctgaagattgaaaactttgggaaattttcgtcccctgtgttagctcagttttgtctgatgtgagatggaagtagagggggtatacaacaggggaggtggtgcagaaagttgcaagtggtgtatccccatgctggagctttttccatcttggaatctgtagtgaacctttgtctgtctgtcttttctaggactattccttttccagtgttcgagtggagacgcccctcctgctagtggtgaatgggaagcctcagggatccagcagccaggctgttgccacagtggcatcgcgaccacagtgtgaatgacctttgacttgcatgctcaacagggagtggaggagaggagacaaggctctggacagccggtccagccacatccagtgattcagcagggatgggaggaatgttttaaatgaagactttctctttccctgcctgtattacacttcgtatctcttctctctcctctgtcctcatcatgttccagctctctacagggccacatactcttctggcatatctctcctgtctcttccactgctctctatgttttaagcaaagagcatggaattggtagaagtcttgggatcttgccatgggacagagtccccaaggttcctgttgttgcctccttcctaagcctcatatgtatatatcagttcagtatttattgctaaaggagggggcttaattttgtaatggcttttatttttagcaatttttatttttatttttgaactttaggtccttcctcttctttggggctggaacagaattaaatttgtttggaaaaaaaaaaaaacaccacgtagtttggcctgctttattctccctaggcctgtattctttgttttaggatcacttcaatttattggagtaatacccccatttttttctttatacaaagcagtttatttctctcccagttaaaagaattccgacaatagacagccccaggcaggaatggcaactccacaaagttgctagagaccagctttcttccattttcccattctgtcattccctaggggtggtcttcactatggtccaagatgacagagcaatactgttc

SEQ ID NO: 74522 - DNA, 1777 bp, Homo sapiens
acttcactatttaaatttttaaaaatcaaaatgatttcacctatttcattcatttatttattttttttgagatgaagtctcactctgtcacccaggctcgagtgcagtggtgcaatctcggctcactgcaacctccacctcccatgttaaaacaattctacctcagcctcctgagtagctggaattacaggtgcatgccaccatgcctagctaagttttgtatttttagtagagacagtgtttcaccaggttggccagtctggtcttgagctcctgacctcaggtgatctgccagccttggctttccaaagtgctgggattacaggtgtgagccactgtgcccggcccacatatttcatttatataaagatttattctatcttaatactactacatggataaattataataatattttgaagtctcacacatacaaaaacacttatatccctaaggttttgggactaagatatccacactgttatacggtaactgcttctgtggtataaataccattttggcaaggaagaaacttccatttctctagaaagaggaggcgtaggacatgttgggcatgtcagtccttaacattgagacaggatccactgataatcttttcatcccattataggagaaagttgacagaaaagcttctagcaatcctgaccttcatctgaacagggcgacggtaagacctttggggtgtagtcatctgagggtcaaataaataagacacctatgtcttagcttgtgaggataactgagtttgcatagggacaagattgggtacagactgcgagaggaaagccatgctatttctataaatagctagctcggtttggcttcagtatctggtgtagtcactggagggaaaggagaaggggctgtggaggtggaagaataggtagagaatggggggatcttttagaagacttctgaaatgttaagtaaatataaaggtcaagtgagccaatatatacaacttaactattttagagtttggaaattagcttctttgaaatgattccatctttggggttgtgatcatcttggctaggaagaaggatgtaaggtgttaccagctcttcaggctgtttgttgcagcacaggaaaataaccaggaaggaaaacagtttatttctctagattcctagcccatggtgccattccctcgggatagtttgtctggatatacttataattgggatacacttcttgtacagttgcataaatatgaagagagttatggggaggccctggagggcttctctcgggctgcagccctggaccctgcctggccagagccccggcaacgagagcaacaacttctggaattcctggatagattaaccagcctccttgagagtaaggtaaaaatgtctgaagggctgaattccactttttttttttttattttgtcgtgggtcaataaaataagaataaataggtttacgaggtagagaccctatagaagtgggtgggagggaaggattagaatctcaaggaaggcgactagtttccagcttcttacctatttccccttctttgcagggaaaggtgaagaccaaaaagctgcagagcatgctgggaagcttgcgcccagcccatctaggcccttgcagtgatgggcactatcagtcagcctctgggcagaaagtgaccctggagctcaagccactgagtacgcttcagcctggggtgaacagcggtgccgtcatcctgggaaaggtggtatttagcctcaccacagaggagaaagtccccttgtgagtttctc

SEQ ID NO: 74523 - DNA, 1419 bp, Homo sapiens
acaaagtctccttgcaaaacctgtcaatggtgcttcgtcagctgcggactgacactgaagatgaacattctcaccatgtcatggacagtgtccgacaggctaagttggctgttcagatggatgtccatgatggccgctcctggtgtgagtgctctcaaaagatctccaacaggtttctagagcagatgttttcaatcagagcaacatttgcagtccctcttttgagtgtgattctgaggtttaagccagagagggcatctttgttttgaagacacacgaaagacattttggggaactacttttctaggaactcttcgatcttttgatcctagttttcacgtaagcaaggaagggcttttgtacagtctgttcaaacttcagtttggtgtccttggtgctctatcctagtggagttttgggtatactaagtatcgtgtcattcctggtttggatttcttgtgggacctttcaaatatactttcaagaatgatcaaaataagtcatatcttgaacttggactctgagatgatttgtcactgtgtttctctttcagatattcttgggaattcatatctttccctttacttctctactggccagaaccctaagatctcccagcaagccctcagtgcctatgcccaagcagtaagtacttatggtcaccaggccagatgaataggcaacaacagaagcaagagcattgttcagtcttctttgtggccctttagcaagcatcatgggcagtggcagtgtttgctggcatctcatttttgtgattttgcaaagatgtgtctgcagagatgactgacttcttataacttgagtgttaggaaccacttgcatcgtgtcgcattggtgctggatagctccttgacctgtctgggtttcttacacacatatataaccaaatcacagagctgcctcaacatgttcatcttttttaatgggaaaaaagtctattaaaataatacttattaatatttttgtacattcattttaaagaataatgaaaacttatacttcagtgtaaattaagtgctatccccaaattaaccgttaggtaatattatggctctggatttcccatgggctaaaagagaaaacaatgtgtagcttgttctgtgtcatttcctaggaattaagtgaattaggttatttaggttttcaagaaatttatttaggttttcaagcatttttatgttgataggcatttgcatagggctttccctcagactttgagtgccttttttctcattattagaattggcttctgacttcacattggtcctctgagcactttttatttagctctcatatttacctttcttcttttgcttctcttgatatagagaattgctttttaacttatcattacttattctgctccctgtggtagaataaagaacacagttactgtat

SEQ ID NO: 74524 - DNA, 1025 bp, Homo sapiens
aaaaatgggattatatttcttaaaaacctttggaaaacatgtcacttgttaagacaaatactcagttcttttggtggtataaagttagtggtttgagagtattcttccagactttttttctatgcatttagtaacataacttattgttttctgtgcctcattgtgtatcctgattgcttcttaaactgggttctaaatgataaaataacatccctatataagcatctttcttttccttttgtgtttgtataacattttacaatatataactttgtacccaataccttaaaaatcttttttcttttggaaccaggtacatcaggaacgtctctatcaagaatacaatttcagcaaggctgagggccatctgaaacagatggagaagatatatactcagcaaatacaaagcaaggatgtagaattgacctctatgaaaggggaggttacctccatgaagaaagtactagaagaatacaagaaaaagttcagtgacatctctgagaaacttatggagcgcaatcgtcagtatcaaaagctccaaggcctctatgatagccttaggctacgaaacatcactattgctaaccatgaaggcacccttgaaccatccatgattgcacagtctggtgttcttggcttcccattaggtaagaaaggacatgtatcaagtgtctgttctttaaatcaatgattttttatactgctctgcccacttccaagcattcagtcgagacgataaggataagacaagcattgagttgtggtaggctctgaattcttcacccatgtttcaacctgtacatcattgcttttatctattgtatttgcttacatttaaattaaagctttaatttgagcagttaatctctgcaaaatgaaagtttgcacattgctacattaagttaaaagctatgtagttgtagtaataataatattagctgtcatttattgattcctaagtgctaggcactgttgtgttttatataaattcatataatttacaaaaccttatgaagtaagtatta

SEQ ID NO: 74525 - DNA, 1940 bp, Homo sapiens
tatcaatctatacatgtagattaaaggaaacacagagttggttaaatcaattttgtgaagactatacggtacaacactatagaatcacttaaaagttatgatacagttttatgtttattgaaatagaacggtattcatgacacatgaaaaacagattatatagagcaatatgtttctgcttaaatatttttatatgcatatgtttgcttaagaaaactgaaaggacatatatactaaaatactagggggttattttctctagaattgggttctacaagtaatcttttattattataaacctattttctaattttattgtattcatgtattgtaatattttaaaagttattttaggtaacttaggacaagcttatattctttacccgtgcctgcattttcagcagagaattaggtagaaagaagggtgaaatacaggaaatacaaacaactcaaagtaacatcaggacttgaaataattttttagcttttgttgtcttttgcaggagtaaaatttcaagagactgaaaccagatctgagtttcgctgttccagtctggacctctttggtgctgtaaatcctggatatactgtagatgagtactgcgtttttcttttatggtaaggcttacgttgagattgagaagctttgccatatatatgagtctttgaaaattcaggtttgtgacttcatggccagctgctaaggtgctataaatttcactttttttttttttttgagacggagtcttgctctgtcgcccaggctggagtgcagtggcgggatctcggctcactgcaagctccgcctcccgggttcacgccattctcctgcctcagcctcccaagtagctgggactacagttgcccgccactacgcccggctaattttttgtatttttagtagagacggggtttcaccgttttagccgggatggtctcgatctcctgacctcgtgatccgcccgcctcggcctcccaaagtgctgggattacaggcgtgagccaccgcgcccggctaaatttcactttttaaaagtcagttgaggccaggcgtggtggctcacacctgtaatcctagcactttgggaggccgaggtgggtggattgtctgagctcaggagtttgagaccagactggccaacatggcaaaaccccatctctactaaaaaaatacaaaaaattatctgggcctggtggtgtgcgcctgtagtcccagctactcaggaggctgaggcttgaacccaggaggtggaagttttagtaagcagagagagcgcaactatactccagcctgggtgatagggagattccgtctccaaaaaaaagagtcaattaaagatgttgagaagtagcattgtatagtatatatatgggttctggagtcagactgagttcaaacgcatgctctatcacttcaccagttatgcagcattggcaagtttcctaatatctatgtcttagttttatattttagaggatggcaatagtatttgactcagggtggttattttgaagattaaattagtaagggtgtgggtaaagcatacggtaaatgctcagtttgatgttaactatttgtcatcagaatccatgcgtatatttctcttagattctgtactacctggcaatttttgacatctgcataatagattgacgaaaattctttgttttggcctgacgtggtggctcatgcctgtaaacccagcactttgggaggcgaggtgggcagatcacctaaggtcaggagttcaagaccagcctggctaacatggtgaaacctcgtttctaccaaaaatacaaaaattagctgggtgtggtggcgtgcacctgtaatcccagctacttgggaggctgaggcaggagaatcgcttgaatctgggaggcagaggttgtggtgagctgagatcgcaccactgcactccagcttgggtgacagagct

SEQ ID NO: 74526 - DNA, 1065 bp, Homo sapiens
cttccttgaccaatcctacttcttttcttaaccttacttgctttctactacttatttggtggtatgttaatttctgtgagtcttgtctttctggctagattgtatctgaggttatggatttttaaatctccacactgctgcatgaaaaagaacataatgatgaaagtataactgcagtatttttagctaacaagttttagatgatcattacaagtaaatacaaaaaattttctagctagtaattaggtgaagagtagggaatagtgtgaaggttgcctgcaaagatgaactgcgtatctagtatgtatttgacctgaaagttcagatgacacgcaaatgctggaagaggaaattaaagcaagactctttcttacactgccatcttgtggcagacttgggttacaaatgttactaattcaattttcctatataaagggaagattttcttcagattattttgacaaaggattacgaagagtaaaggttaaatacaatccggcattggctcaaatgaaattgaaacatgctttgaaaaaactgactattttggattattttctcagttatctgaatcttaaaagttcttgactccttcctcttgcataactgttttcttactgtgaggttgttgacctttatagcctttcagaagttggttagactattgtgcagttttatccaagcttgtaaatttatacaaaattaagcttgtgtaggggtcctgctcggtttttttttgttgttgttgttaaattttttttgttttgttcgagacggggtcttactctgttgcctaggctggagtacagtggcacgatcacagctcactgtaaccttgaactcctgatcctgccctatttgatattgagcttgggcatttggtgacattctccaaatagatgagtcaataatttatattaatgaatggagagttaaataaaggatgaacggttactctaaattttcttgtgacttggtatagaacatgctggtgtgagttgtcatgtaatcataacctttgtgaatttatttatgttttttaaattttccagaaatgatcctaga

SEQ ID NO: 74527 - DNA, 1009 bp, Homo sapiens
gggttttaggaagcttctaggctcccactttaattcctaagaatccaaagtttaatgtataagccctatttcttctttatatctttaatcttacaggaatctaattttcttgcctgatgctatccttttccttatggaaataactggcacctgtgacgaaggatgagtcattggtttatgtgatttccatttgcaaaactccttttttttgtttttgttttcactcaacatagaccaatctccagttcaacaacaacaagtactatctgattcagctattagaagatgatgcccagaggaacttcagtgtttggatgagatggggccgaggtaatgatttttattgagattttatgagttggcattcagaaagtcagaagcagcttagtgggtggccaaaggattctctgggtttaaattgggtcagtagaggctctgaagtctgggagagccttaggaatcaagttgagcatcttgaaattggggaatggcaggcatcctccttagagttcccactggaaaaactaagagcagcccattgagtctgaaaactcttctatagttgaactgctagtagtgctcatagactatggcagttagcaagtaacttgtatcaacatgattagttccctaaatcctttcacctttcccttctccctttcctgcctgtttgtcagatgttaagcagagagatcttggagagctggcctgttactcttagggaactatcttatgtgtggcatttcctttgcagttgggaaaatgggacagcacagcctggtggcttgttcaggcaatctcaacaaggccaaggaaatctttcagaagaagtgagtgctgaaaagtgactacaaaaaaatataccctcctcttcttagatgtatattctctaaaaaatttttttttagacagtttcactcttgttgcccaggctggagtgcaatggcatgatctgagctcactgcaacctccacctcctgggtttaagtgattctcctgcctcagcctc

SEQ ID NO: 74528 - DNA, 1058 bp, Homo sapiens
ttgggaggttgaggcaggaggattgcttgaagctaggagtttgagaccagcctgggcaacaaagcgagacccctgactctcccccaaaaaaaaggaaagaaaaaaagagaatattcagttagaatttttaaaactttatgatatagatgaagaactttctggagaattggagaacatgtttctttcagggaaagagattagatggatatcttttgtttgaaatctcaatggcttttgtggtgtttgggaaggacaagcattgtttttcccattttttaaattccatttgtctccagagcttttttgtccatttagtgtcctcatttagaattagactaattttgatttatggaaagttgatgtgtaaaggagctcagtgctggaaaataaattctttggagattttctgtcttgtaagtccatcttcatagtagacctttatttgtaaagttttcttacaccttggactctacagattccttgacaaaacgaaaaacaattgggaagatcgagaaaagtttgagaaggtgcctggaaaatatgatatgctacagatggactatgccaccaatactcaggtaactctcactatacttttcgaaagaaacacatcttctttttttattttattttttagaggcaaaactgtgctctgttgcccaggctgggtggcacaatcatggctcactgcagcctcaagatcctcaggctcaagtgatcctcccacctcagcctcctcagtatcaggaactacaggcacgtgccactctgcccagctgattttttttcttttttttttgtaaagatgaggtttcactatgttgcccaggctggtctcgaattcctgggctcaagcagtcctcttgtcttggcctcccaaagtcctgagattacaagcatgaggcaccacacctactcctgtttcttcttactcagggtaaagcagaatagcttagatcattcctggactgggacaggccaggatatcttgaatcctttctacttctcacctcaggggtgctctcactgatctttgtaatcccaaagggacagtaaga

SEQ ID NO: 74529 - DNA, 1114 bp, Homo sapiens
ctactccggaggctgaggcaggagaatggcgtgaacccagaggcggagcgtgcagtgagccgagatcgcgccactgcactccagcctgggcgacagagcgagactccgtatcaaaaaaaaacaaaaacaaaaaaacgaaaaaaacaataaacgtctggaaatagggcctaagattttataagaaacttagtaggccgggcgtgatggctcacgcctgtaatcccagcactttgggaagctgaggcgggtagatcacccaaggtcacgagttcaagaccagactggccaacatgatgaaaccctgtctctactaaaaatacaaaaaaaattagctgggcatagtggcgggcacctgtaatcccagctacctgagaggctgaggcagaagaatcgcttgaacccgggagctggaggttgcagcgagctgagactgagccattgcactccaacctgggcaacaagaatcaaactccagctcaaaaaaaaaaaaaagaaccttagtaaataacagagccaagactagaaaggcacattctatcctcattcttactgtccctttgggattacaaagatcagtgagagcacccctgaggtgagaagtagaaaggattcaagatatcctggcctgtcccagtccaggaatgatctaagctattctgctttaccctgagtaagaagaaacaggagtaggtgtggtgcctcatgcttgtaatctcaggactttgggaggccaagacaagaggactgcttgagcccaggaattcgagaccagcctgggcaacatagtgaaacctcatctttacaaaaaaaaaagaaaaaaaatcagctgggcagagtggcacgtgcctgtagttcctgatactgaggaggctgaggtgggaggatcacttgagcctgaggatcttgaggctgcagtgagccatgattgtgccacccagcctgggcaacagagcacagttttgcctctaaaaaataaaataaaaaaagaagatgtgtttctttcgaaaagtatagtgagagttacctgagtattggtggcatagtccatctgtagcatatcatattttccaggcaccttctcaaacttttctcgatcttcccaattgtttttcgt

SEQ ID NO: 74530 - DNA, 1169 bp, Homo sapiens
caaactgattaaacaattaacatttaaatttgttttcacttctggatatataccaccataaaaaatttaatttagataaactgaggtataccaggatgctgaaactgtccggaaacagtcacatatccaaaaaaatggagaagttttagtcttttttaagatgggaagatctgagacataatagctgtctttacacactgacgtcatgaggaaagccttttttttctagacttattctgagttgtaaaatgtgggaggcagaacttggatggtcaaccctctatatccatggattcaatgaactgagaatcaaaaatgtttgaaaaattgcttctgtactgaacctgtacagcctttttttccttgcttctcattattccctagacagtgcaatataaaaactttacaaagcatttacattgtataatattgggtgttataaggaatctagagatgatttcttagattgtcttgtgttttgtttgttttttgctataggatgaagaggaaacaaagaaagaggaatctcttaaatctcccttgaagccagagtcacagctagatcttcgggtacaggagttaataaagttgatctgtaatgttcaggccatggaagaaatgatgatggaaatgaagtataataccaagaaagccccacttggtaggacttcacattttcttctgcattctctccttataattcctagctcctttaatggatactttattatcattatgatttaaagcttgctcatagtactgaatgaagaaaatgggatttggggtgacaggttgtatggagggaagaggaactattttgaaagttgaggctgggtgtgatgggtcatgcctataatcccaacactttgggaggccaaggcaggtggattgcttgagcccaggagtttgaaaccagcctgggcaacatggtgagaccccatctctactaaaaatagaaaaattagccaggcatggtggtgtgtgcctgtgatctagctacttgcgaagctgaagtgggaggatcaccggagcccaggaggttgaactgcatttagctgtgtttgtgccacggcactcagcctgggcaacaggagtgagaccccatcttaaaaacaggaaaaaaaaaagttgaaagatgaaagtcttttttagggaaggatgttaagtac

SEQ ID NO: 74531 - DNA, 1316 bp, Homo sapiens
tagctatccaaccacccaagtaaaacaccttcaggcatatcacccccttttcctatttgagtaactaaaaccacacaaacaccatttctgtgaactcaagtgatattagatagacaaaataacattttacatttgttgattctgttttctggtttacatccgatttctatttcttttatagctttatagagccccgtgacctagaaataaccctgagtggtcaacaggtctacctgtgcttctagatagaactgtatccaactgttccctgttgatatcaatataacttatttttaaatgattttataaaaaataattttaactctagtctcaaaagtcaaaatccacatagttcatcttataccgagtatatatttaatattattttatatatttggaagttaagatctctttacagatctctttctctctcaaatggaaaacctgtttctcatacctgttttctaaaggacctatctgtcattttctatttttagtcatgcgccttttagccacatgtcagaaagctcattatgggttatatctctgttcttagactccgtactcctccactaatccggacacagaaggaactgtcagaaaaaatacaattactagaggtgagatatgtatgatttgagaagtattatatcccttataccagtgtcctcccacattgattctatatctcatcttctcaggctttgggagacattgaaattgctattaagctggtgaaaacagagctacaaagcccagaacacccattggaccaacactatagaaacctacattgtgccttgcgcccccttgaccatgaaagttatgagttcaaagtaagaaaaatgatcatttattttcatattcttgcacccttaaccacctcccccatcccactgttctctaactacttcttgtcaagagcaaattgtcaattagggcagactttttatgtactagggatttgggaaggccaagcttttcctagctgccttgtaagactgtttgggagcagaaaggtctgccaagttatatcagaatccccaaattcttcagttcagctcagtctcttgtagagtctacatcagcctttttgtcttatttttcacaggtgatttcccagtacctacaatctacccatgctcccacacacagcgactataccatgaccttgctggatttgtttgaagtggagaaggatggtgagaaagaagccttcagagaggaccttcataacaggtctgagtctagctttgcgtttggaaagacactccttgcccgaaagtacagctgtagaacttataagagggagtcag

SEQ ID NO: 74532 - DNA, 1665 bp, Homo sapiens
cacacacatacacacacacacacacatattcctggggcttcaaaatttgagaaattgtgggaaggagttggtatttaaggttggacacttacagaatgagtaggagttttctggaccagtaagagaagggaacagtgtttcaggaagaggaaggaacatgtacagaagatatggagatgttgagagtatgtagtatattctgggtatagccagctccttggattcctggtgggagtaagggaaatggaattgaatagataaactggggtcaggctgtagagggcacagtgctaagaattttgggtggaataattatctggattttataaagagaactggtggcagtatggaagatggatggtagtagagagatactaaaggtaaggagaccacatttacacctgtagctatagcctaggaaagacgtaatgtgggcctgacctgggctgtggagatgagaaggggagatacggatttaggcatgtgttgcatccacaggccttactggtgagttggaggtagagagggaaggaaaagccaagaatgttagagattcctagtttgagcaagtaatgggatggcaccgatgaatactaatgttaaaaaacaaaaaccagaaagtggaacaggattttcagggaaggtgatacattttgctttgtacttcattcctgaggaattcatgtgggattgaggagcctgagaaaggttaactaaaataggatctttctctgtccatgtacttttttgagctagtcttcacctgaaccgaattctacaggaggacttaggggtgctgacaagtctggattgggctcctgatggtcactttctcatcttggccaaagcagatttgaagttactttgcatgaagccaggggatgctccatctgaaatctggtaagatccaaaatgccatttcctcctgagctggggaaaaaggaaacctgagttagtggttatcctgaggttgagtctaacttagaagaaaactctggagtcttaaagagaggtgttcttctctttacctctctttaaatcctgagctcaacctattcctttctcacaaaccaggagcagctatacagaaaatcctatgatattgtccacccacaaggagtatggcatatttgtcctgcagcccaaggatcctggagttctttctttcttggtaagtcctatttgagtgtgtgctaaagcaaacattcgtctaggaccagtgtttttacaccttggggcccgtcatggaggatagggaagggaaaggcagttggctgcaaatcctcttatcctccttcaactggagcagttctaatttaggacattgtgtattgggttcccatgtaagatttcactggtacaagaaaggactctaccgttttagaaagccataggaaaccataaacctagaagttttctcaattgcattttttcccgtgtctctcttgtcttgcccctatgaataatagcatcttgagggcaaggactccatcttgtttttgtcatcatacttagcagttacttaatagatgttcaacactttttggattgagtgtgccaaagctagctgttcacttcaaatgcagtttcctgggagccgcttgttattgggaaggttattaaatcctgacctgctacccactaaagttatctactaaagcctat

SEQ ID NO: 74533 - DNA, 1034 bp, Homo sapiens
acggtgcatggagtatctaatcccagaggcaaaatgagcataaaaatgagatacctagagattaggcaacataggaagaccccccatctctataaaaaataaaaataaaaattagctgggtaccatggtacatgcctgtagttctagctactcaggaggctgaggcgagagatcacttgagcccaggatttcaaggctacagtgagctatgatcaaaccactgcactccagcctccagtgtaacagagtgagaccctatctttaaaaaaaaaaaaaagagaaaaagaaaatgagatacttgggattggattatggtgttgaggctaagggttggtgtaaagggagagaggagagcatgaaaacacagcctcttggtatcatgaacttgagccacccgaccccactgtcctgagccacccaaccccactgttcctgagttctcctccctcattgacatcttccatgctcctaatgctccacccacctctgtggaggaagttctgtttcccatgtcctgctcaatatgactctgctctgatcttgtgctctgtgggcaggaggagcacgtggtgtctgtgagccgggatgggaccttgaaagtgtgggaccatcaaggcgtggagctgaccagcatccctgctcactcaggacccattagccactgtgcagctgccatggagccccgtgcaggtaacaaaacgtcagccacctccccttccctgctgtctcttcttttctcccctgctccgtcccttcttctgactcagtctctgtgtcttatcagctggacagcctgggtcagagcttctggtggtaaccgtcgggctagatggggccacacggttatggcatccactcttggtgagttcctgcaaggaccagagtcaagggaggtggggaaggtatgcggaataaccttctgttgtgcccactctcatgagcccatctccatcccttcctcctaggtgtgccaaacccacaccctcctgggacacagcggcccagtccgtgctgctgctgtttcagaaacctca

SEQ ID NO: 74534 - DNA, 1147 bp, Homo sapiens
ctccctcagctgtgggacacagtccgtgggcagctggccttccagcacacctaccccaagtccctgaactgtgttgccttccacccagaggggcaggtaatagccacaggcagctgggctggcagcatcagcttcttccaggtggatgggctcaaagtcaccaaggtaagaaggtccagtgttgctcttgggggaagcacaggaggacaggagtggagggtggcagacgacagacagcagcattctgggtcacttaagattttgctgagagcaggtcttcacgtttccatttctacctccctgtgtaggacctgggggcacccggagcctctatccgtaccttggccttcaatgtgcctgggggggttgtggctgtgggccggctggacagtatggtggagctgtgggcctggcgagaaggggcacggctggctgccttccctgcccaccatggctttgttgctgctgcgcttttcctgcatgcgggttgccagttactgacggctggagaggatggcaaggtcagcttgcagagggctggtggtgggttgtgaggaggagtagcaaaggcaaagaatatcttggtgggggtgggggtcctttgtcgaggagactgtggaggagcttggattgcaggaaccacggggagaggggtgccgctgtgtgcaggggcagctctcatgagaagagtctctggaaggaggactttaatgggggtggctgtaactcaaaacaggaaggaggaccgcgtggtggaggtggtatccttaagcccttttcttggttcccaggttcaggtgtggtcagggtctctgggtcggccccgtgggcacctgggttccctttctctctctcctgccctctctgtggcactcagcccagatggtgatcgggtggctgttggatatcgagcggatggcattaggatctacaaaatctcttcaggtactgaaatgggaatgggtgggtttttgagcctttagaaagagcgcagcccctgccccctaccccttcccaagtgtcttactcccttgttctctctcattctctaggttcccagggggctcagggtcaggcactggatgtggcagtgtccgccctggcctggctaagccccaaggtattggtgagtggtgcagaagatggg

SEQ ID NO: 74535 - DNA, 1019 bp, Homo sapiens
tgctgaggagcatggcaccatggatagtcactgacccatttaccctcagcctggggccctgctggagcagccagtgtccatcccagacgatgacttggtccaggccaccttccagcagctgcagaagccaccgagtcctgcccggccacgccttcttcaggacacagtgcaacggctgatgctgccccacggaaggctgagcctggtgacggggcagtcaggacagggcaagacagccttcctggtacagagtctcaggggcctgggcaggagggagggaaggctgtgtgggctaaggaggtaaggcacagggagctcaggcatgtaaaatgtgaccatgttttctgttcctgtcccatgcaggcatctcttgtgtcagccctgcaggctcctgatggggccaaggtggcatcattagtcttcttccacttttctggggctcgtcctgaccagggtcttgccctcactctgctcagacgcctctgtacctatctgcgtggccaactaaaagagccaggtgccctccccagcacctaccggtgggtatcccccaatgagcccagccttgttgatgcccacgtaccacccctgctttttttttctctcccactgaccctgacttcctctccatgtacagaagcctggtgtgggagctgcagcagaggctgctgcccaagtctgctgagtccctgcatcctggccagacccaggtcctgatcatcgatggggctgataggttagtggaccagaatgggcagctgatttcagactggatcccaaagaagcttccccgggtgagtgtgagaaggaggtgggtgtcgggaggcaggctggggagaaggagggatacggcacggaggagagaggcctctccaatgtggttctccttttctttctaccttcctgcccctttgcccaaatatcacagtgtgtacacctggtgctgagtgtgtctagtgatgcaggcctaggggagacccttgagcagagccagggtgcccacgtgctggccttggggc

SEQ ID NO: 74536 - DNA, 1138 bp, Homo sapiens
gcatcctccaaggggttgggttggtagaatgctggggatcctgagcagtatcctgttcccagagctggttttcccaggcaaacactcagactgaaataaatgatatgaatttgcttccaagtatcagtccttggttcctaggggcaattcctaggatgttgtttcaaccaggtttatggattataatactaacatttcacctttggctggtacttggtactctctaaatttgcatcaccaaaatatgtctcactttcacctcactacatcccggtgttgaacttgggcagggatcctggctcctcttttcctccctccacagtcagctcctcctgagggctgctgaagctgacccctcctaacttgggattttacactttttcttattccctctaaccaatggaagggtttggcctccagggctggctgggcaagggtgaattccaaagcaggggagctttatttcccctgacacttgtccaatcagcccccgctgaactatgcactgctgttgattgggatgatgatcacgagggcggagcaggtggacgtcgtgctgtgtggaggtgacactctgaagactgcagtgcttaaggcagaagaaggcatcctgaagactgccatcaagctccaggctcaagtccaggtcagacactcaacacccaccatccaaaaatacatgaaggacacaggcctgggaatagcccagatatttggtaaaggcacagacaatacacagttctgaagatttcccaagcagactgcaagactgcagtgtttgtcgcttactgtgcaaccacataacatgaagtctctttccttcaggagtttgatgaaaatgatggatggtccctgaatacttttgggaaatacctgctgtctctggctggccaaagggttcctgtgagtattaatccctgagaaaccctctccctcccccacattttcctctgcaactgatatatttcatttcttgacctttagagctgacttctccaaccacatacaatagtcagatcagctctactggctacaaccccctacccagtggtgtgctgctgaatatctaacaaccagctgcctagaaaaataagccttggttagtagcatctgctaaatttccatggtgtaaacagtc

SEQ ID NO: 74537 - DNA, 1043 bp, Homo sapiens
ttaagcagcccaaggctgctgggggattaatatggggctttgccctttttcttctgacccccaaaacatcttactaatatcctaaaaggtgtgtgaagagccccatgctcccaggttgtgacgccaatgaagagatgaaagcaggggcagatcatgaagcatgtgggcgaaggctctgaaggttgagtagagcaaggtggtgtgtgagagcagtaagtcagacaggacacatcagtgctggtgtgtgaagggagagaacattagaggtgctattaatggagatgtagacttttcccgtggcctggtgctgccttcagatccatctggctttgaggggctgtggatacctgctgtgattcataactgccactactaccccagggtcgttggtttgattcagaagagaagaaaggggcagagacccaaatgccttcttatagtctgagcttgggagaggaggaggaggtggaggatctggccgtgaagctcacctctggagactctgaatctcatccagagcctactgaccatgtccttcaggaaaagaaggtaaaaattcaagagttaggggaaggttaataatggtgtggaggggaggttggtggtggagtacttgaaccaggtcccctccccagttggaaggggaaggtagggatacaacctagctcttatttctcacttcctaatccccttttcttttttcttttattttccttttctttttttctttcctttctttctctcttttccttttctttttttttttttttgagatggagtctcactctgtcacctaggttggagtgcaatggcataatctcagctcattgcaacctctgcctcctgaattcattattctcctgcctcagcctcctgagtagctggaattacaggcgtgcactgccatgcctggctaatttttgtatcttcagtagggatgggatttcgccatgttggccaggctgctctcgaactcctgacctcaggtggtctgcccacctcagtctcccagagtgctgggattacagatgtgagccaccatg

SEQ ID NO: 74538 - DNA, 1028 bp, Homo sapiens
cccggctaatgtttgtatttttggtagagatggagtttcaccatgttggccaggctggccttgaactcctgacctcaagtgatcctacccacctcagcctcccaaagtgctgggattacaggtgtgtgccacgacacccaaccagtttccttattttaaagggaataattgaattagattattttgaagttctcaagtttcagatctcatgattctacaaattacaccaagaacaggagagggttatgcagagaaaagctgggacgcacggaaaacattaaacactaaatcttaggcaagaggagacagcaatccgatgaggttggattacagccattcccgagtggtgccactttcccagcaaaatctaacagaatggctgacagtcttggctcttgattgtaaagaattttattttgtcacgatatagacagacctatataagttgcttgttggtcatttcccatttattttgtgctcctcttagcaaatgctttcctctcaacctgatccatgaagactctttttctgactcatctgaccaaaaagactaaagcaatgtttatctaagtgtcttcaggccactaacatgagaatcacatagggttacttgaagtgttacaatacaaatttctagggtctccgtccagaactgctgaatcagaatctctgggagtggactgctgaaacctgcattttaacaactaccccatggtattctgatgcacaccacagtttggtctgtagcagtgggtggcttggagggccaaacttagagtttggccaaacttagagtaccaagttggggtaatgcctatcggtcttgcaatactttgagtcctcctctattccttctcccctcctgcagtgcaccgagccgccctggcctgtggcagtgagttctttggggccatgctcctgagcgggatgagggaatcccagggcacagaggtatctctgcggacgatctccacccaggacctgcgactcctcgtctcttttgcttactccggagttgtgcgggcaag

SEQ ID NO: 74539 - DNA, 1497 bp, Homo sapiens
aatttttgctctcgtgtaatcccaaaaccatgatttgttgattcttttgtttttccctttaattgtaggatgtagcccatcggatgctggccacaggcgagtgtactcctgaggatctgtgtttctccctgcaggtaatgcagtaaaaaactgggacagaaagttggggctgaaggttttatattgtagagcagaactaatctgggatgcccctctaatattttctccttatctgtccctgacaggaaactgtgtttgcaatgctggtagagatcacagagcgagccatggcacattgtggctcccaggaggccctcattgtgggaggagtggggtgtatgtattattgaaaagtgttcctctttcctattcttaacactatgcgtcttcctcctggtactctaaatcattaagcgtttggagtaggcttcccaatccttgcccctaatcccctatgtcattgttctaagtgagtgcacatgacgtgttctgctggaccatgaagagatggctaaaactaagctaatcctgttccctgcctctttgtaggtaatgtgaggctacaggagatgatggcaacaatgtgccaggaacgtggagcccggctttttgctacagatgagaggtaaagacactttccctttggtttcttttttacttctcctgttatagtgattttccacccttagatcccaattttcatctctcttgcatcccagattctgtattgacaatggagcgatgatagcccaggctggctgggagatgtttcgggctggacacaggaccccactcagtgattctggggttacacagaggtgagtgattcacctcttggtgagggtagattattgggacatagacaaaaacagcagggaagagtccaggaacatgagggcagagaagaatgaaggatgttaagggctcgctctccaccatgtttcttctgtttttccacaggtatcggacagatgaagtagaggtgacctggagggactaataagatcaacagaatcagagtagatagttccttaatcggaacccaaaggaccccgtgcctcaatctctatcctgatgtcatgggagtcctagcaaagctatagactccaagcaaggcttggggtcctttatggaaccccaggatgactcagcaataaaatatttttggttttttggttttgtatgttggtgattggattgtgttgttcaggaccaatgtagatttggtgctggataaattcttgttggagcttgctgctgtggaaccaagaatgaggtatctttttttttttttttaagaaacggaatcttgctgtgtttcccaggctggtctcgaactgggctcaagcagtcttaccacctcagcctcctgagtaaggatgccattgtgcctggcaacaatagtagtatcataactattattatagcatcgggtcccgtgctaactgctttacattcattctctcatttaaattctttgaagtaggtgtgcaagac

SEQ ID NO: 74540 - DNA, 1019 bp, Homo sapiens
tgggagacagagcgagaccctgtctcaaaaaaaaattaccactgccactgtgtcataatttagaaggattcatgttctctgcctccaagcagaaaagccggttacctactatcaagactgcatttaagggatatattaggaacttctaagccggaaaaccaatgtatttgaaatgacaatttatttctgcctgaacctacactgtctaggaatctgttcctggaatcctcagggtatacagatttcttctcaaatcagagctgtaaaaactacccattcaccatttgggaaacacctttcttccacttcttattggaagccctggtggtcatgttgatcctctgctatgtttttctcccaaagccaaataatcctctttacagacttggggtttcatggacttcctcatcacccttaggtgattgcatactcggaacatcgttaccgtatctttggggaaaccatcgatattgcagtgggtaattgtctggatcgttttgctcgagtgctgaaggtaagccagtggggctgcagagaacataaaatgtgggtgaatttttgggaagccatggaggtggagggaggaaatagtaaatgagcttcttatgcttcctgcatatctgatttcatcctcttccattccctccttccttatttttttcttctgctagatttctaacgacccaagtccaggatacaacattgaacagatggcaaagcggtaaggggacataaggtggaagcaggctggctgctggggcttcagggatttccccatatacggtatatattaacaaaatttgggacgggctttggagggtgagaagccagctgactgtaggcttagtgcctcgtacgcttattcccacatagaggcaagaagctagttgagctgccatacactgtaaaggggatggacgtctcattctcagggatcctgtctttcattgaggtgagtgtgagaggtgatgagacgggcactttcatgctttttaaatgaagcatatctgttttactta

SEQ ID NO: 74541 - DNA, 1107 bp, Homo sapiens
tagatgaaagtaccaaacacggctgggcgtggtggctcacgcctgtaatcccagcactttgggaggccaaggcaggcagatcacctgaggtcggggttcgagaccagcctgaccaacatggagaaaccatgtttccactaaaaaatacaaaaaattaactgggcgtggtggcgcatgcctgtaaacccagctacttgggaggctgaggcaggagaattgcgtgaacccgggagacagaggttgcagtgagccgagatggtgccattgcactccagcctgggcatcaagagtgaaactctgtctcaaaaaaaaaaaaagtacaaaacacattacaacttttaattgatattttaaataagctattatatcttgctactctcccctcaaacacttgcatacataggagagggcagctgacttgcatgtatctgaaaagcctccctgaacaggtgatgttgtgacagatactcactagaaatatatatgtatgtttagcattcactcctctgggcacttgggcactgggaatacaaagataaataaaatactcaatgctttgagatattcatgattaagctgagcaaaccacagaaaattataatgctgtaattgttatgttaaataaatgacatcatcatgcatagagttctgtagggtcacagagaaagaagatcaccaaaggccaggcacggtggctcaggcctgtaatcccagcactttgggaggccgaggcagacggatcacgaggtcaggagttcgagaccagcctggccaatatggtgaaaccccgtctctactaaaaatacaaaagttagctgagcgtggtggtgtcgcctgtagtcccagctactcaggaggctgaggcagaagaatctcttgaactcaggaggtggaggttgcagtgagccgagatcgtgccactgcactccagcctgggtgacagagctgagactgtctcaaaagaaaaaaaaaaaaaaaagatcacgaaagggtatgaggtagatactacttgcattgagacctgaaggctgagtagggtaagaagaagagcatttctgaaagttgaatagcctatatagaagccggaaagagtagatgtgaaaatgt

SEQ ID NO: 74542 - DNA, 1049 bp, Homo sapiens
gggcctatgatgcacggaggcggggaaaggatttagagataacgtggtttgaaaggcgggacctggtgcggggacgctcttgggaggagtcttctccccagccttagctggtttcatgatttctttgcgtctgtaggcaacgcggtaaaaatattgcttcggtgggtgacgcggtacagctgcccaagggcgttcgtaacgggaatgccgaagcgtgggaaaaagggagcggtggcggaagacggggatgagctcaggacaggtaagggaatgaaatcagcccttcttcctagaagctgcggcgggggtgtttgtcattcccttgatgtacggtaagtacgggccgactcatttttgcaggggtttgtgaagaagtcgcaggaaccgtaggctttcgttgggtctatagttaacgccggatcgcagttggaaaccaccagctttttgtcagtatatattactcattttatagagccagaggccaagaagagtaagacggccgcaaagaaaaatgacaaagaggcagcaggagagggcccagccctgtatgaggaccccccagatcagaaaacctcacccagtggcaaacctgccacactcaagatctgctcttggaatgtggatgggcttcgagcctggattaagaagaaaggattagatgtgagtggaatttgagggaaagagacattttttagtattgaatggtcttagggtttagtcaccccttttctccgtttagccttcaggctgttttatttttctcctgcccgtagttttctgtggggcttccccagtcttgccagttgtatttcctaaatgtctgttccttcacttccattgccattttcttttttagtgttctctcctcttcccagaatgttgcaaaaacctcttcactatacttcctccattttatcttcctgcattgcattccatatgaagcatgtcctccattccattaaccatagcttaaaaatcttagcttgctatccactgcctatagaaaaaacacatctccttggcatagcatgtaagactttcttacctct

SEQ ID NO: 74543 - DNA, 3118 bp, Homo sapiens
tggaggcatctatgcagcctgggcatttgtcatcctgttggctgtgctgtgtttgggccgggctctttattgggcctgtatgaaggtcagccaccctgtccagaacttctcctgagcctgatgacccacagactgtgcctggcccctccctggtggggacagtgacactacgaagggagctggggtagttaaaggctcccggggcttctagaaggaagccaagcagctgccttccttttccctggggagaggtaggaaggaaccaggccctcacttaggtttggaggggcagataagagcactgctgaccatctgctttcctccaagggttgctgtgtctagggtgaagtaggcaaaacgttgcccttaaaactgggccctgaagacggttccagccttgtccttcctgtgtgctccctgagagccattcctgtcccttacacattccagggcagggtgggggtgggtagccctgggggttcccctccctcttgtgcaccattaggactttgctgctgctattgcacttcaccagaggttggctctggcctcagtaccctcagtctcctctccccacattgtgtcctgtgggggtggggtcagccgctgctctgtacagaaccacaggaactgatgtgtatataactatttaatgtgggatatgttcccctattcctgtatttcccttaattcctcctcccgaccttttttacccccccagttgcagtatttaactgggctgggtagggttgctcagtctttgggggaggttagggacttatcctgtgcttgtaaataaataaggtcatgactctacgctttttcagttgttaacttgtgtgcatgaaaatatgaggaagagaatgtgtagccccacgaaggggtaagacacgaagacagcaaggctgaaactatggctctttattttcatgtggataattcaaacaaagtcattagtagtctttgttcaatttttttttaaaaaacaaaaaaccctcaaataaaaaatcttgggcttaaaagaactctatcacaggagcctggttggaggattcctagttttatacatgagaaatagaatgcagatttctctgaagagtgtttaaagaaggaatggtagttgagggggcttatttcccaggctcaaagtgatttaggggtggtgtcacagtgctaggtatagggtgataggacagtgatcactgccgagggccttggaacggatcttgctgtcacacaatgcaggtaacagagagtgggacaacaaaaagtaatcaaggcgccaaccaacattcttggatcgagcattcatcatataagtccaaaaggtgtaggcatagggtgtgttggggtagaggtgcctaaagctgtcagccagtggcacagcctgcagtaattccccgaagccttggcgctcttgtggcgtgaagccagcattctttttgttccccttggggttgcgaaggtcaatttcttcatgtgccacattgaggtctccacacagcacaaggggctttcgggaagccaggcccttcaggaacttgcgaaaggcttcatcccagcgctgccggtactccagtcgtaccagacctcggcctgcattaggtacatatgctgttaccagcacaaacgagtcaaattcagccacaatcacccggccttcctgatcatgctcctcatcgcctatagaaatgaaacagaattagcataaaaaactataagaaaagggaaagcaatcaagaggtggggcagagatagagaattagcaattggttttgaagagttcaggcattaggcatcaatagggtctcacctatgccgtaagaaactttgagtgggcactggcgggaaagcaggcccacgccactgtacccttccttgtccgaaggagctgaccagtattgatgagagagtccaggcagctcctgaagttcagctggtagtttgttctctgaacatttggtctcttgaaggcacagtatatctggggcttcttcctttacccactgtaagtgaaaagaaaggtggaaaacgtattatcaattcagcagaacatttattgaataatctatatgctaagtcatagatacgcacgggttaaacagtctcttggcctaaggagttcgagtcaagcagcacaatattcaaacaattctaagctagataaatgaaaacaaatatagagaggtaagaaagtcttacatgctatgccaaggagatgtgttttttctataggcagtggatagcaagctaagatttttaagctatggttaatggaatggaggacatgcttcatatggaatgcaatgcaggaagataaaatggaggaagtatagtgaagaggtttttgcaacattctgggaagaggagagaacactaaaaaagaaaatggcaatggaagtgaaggaacagacatttaggaaatacaactggcaagactggggaagccccacagaaaactacgggcaggagaaaaataaaacagcctgaaggctaaacggagaaaaggggtgactaaaccctaagaccattcaatactaaaaaatgtctctttccctcaaattccactcacatctaatcctttcttcttaatccaggctcgaagcccatccacattccaagagcagatcttgagtgtggcaggtttgccactgggtgaggttttctgatctggggggtcctcatacagggctgggccctctcctgctgcctctttgtcatttttctttgcggccgtcttactcttcttggcctctggctctataaaatgagtaatatatactgacaaaaagctggtggtttccaactgcgatccggcgttaactatagacccaacgaaagcctacggttcctgcgacttcttcacaaacccctgcaaaaatgagtcggcccgtacttaccgtacatcaagggaatgacaaacacccccgccgcagcttctaggaagaagggctgatttcattcccttacctgtcctgagctcatccccgtcttccgccaccgctccctttttcccacgcttcggcattcccgttacgaacgcccttgggcagctgtaccgcgtcacccaccgaagcaatatttttaccgcgttgcctacagacgcaaagaaatcatg

SEQ ID NO: 74544 - DNA, 1082 bp, Homo sapiens
agcgctgggatgaagcctttcgcaagttcctgaagggcctggcttcccgaaagccccttgtgctgtgtggagacctcaatgtggcacatgaagaaattgaccttcgcaaccccaaggggaacaaaaagaatgctggcttcacgccacaagagcgccaaggcttcggggaattactgcaggctgtgccactggctgacagctttaggcacctctaccccaacacaccctatgcctacaccttttggacttatatgatgaatgctcgatccaagaatgttggttggcgccttgattactttttgttgtcccactctctgttacctgcattgtgtgacagcaagatccgttccaaggccctcggcagtgatcactgtcctatcaccctatacctagcactgtgacaccacccctaaatcactttgagcctgggaaataagccccctcaactaccattccttctttaaacactcttcagagaaatctgcattctatttctcatgtataaaactaggaatcctccaaccaggctcctgtgatagagttcttttaagcccaagattttttatttgagggttttttgttttttaaaaaaaaattgaacaaagactactaatgactttgtttgaattatccacatgaaaataaagagccatagtttcagccttgctgtcttcgtgtcttaccccttcgtggggctacacattctcttcctcatattttcatgcacacaagttaacaactgaaaaagcgtagagtcatgaccttatttatttacaagcacaggataagtccctaacctcccccaaagactgagcaaccctacccagcccagttaaatactgcaactgggggggtaaaaaaggtcgggaggaggaattaagggaaatacaggaataggggaacatatcccacattaaatagttatatacacatcagttcctgtggttctgtacagagcagcggctgaccccacccccacaggacacaatgtggggagaggagactgagggtactgaggccagagccaacctctggtgaagtgcaatagcagcagcaaagtcctaatggtgcacaagagggag

SEQ ID NO: 74545 - DNA, 1493 bp, Homo sapiens
gcaaagtgacatcccaacggattgcatgccctcggccctactggtaagaggcataaggtggggaagggcctaagtggggaactggaaagtcaaaaaaggatgagcgtatacagagaatgtaaaggtgagagagcctagtgtttatttaggagaaaaggctttgaagcatgtgcctcaggaatgttatagctgtctttctcgtttctcaataaaaatattgagatgaaatgatgtcgtttcggagaatagagagccttggggactgggtgtgttatcctgaggtcggaggggaattggggacctgaagtttaaacagtgctctttctttctcaaggattcttgagggtatacagttgggggacagagtatcttaagtacagagaagtcgagtgacttaatagacagggagtgggggatgtggaacagggactgtgaagatttttaggattaaaaatttttcaaacacaagtttgaaaatacaagtctttttcttttgtatagcaaaagaatcatcaacctggggcctgtgcatcccggacctctgagtccagaaccccaacccatgggtgtcagggttatctgtggacattgcaagaatacttttctggtgaggaaggggtattgggaaggggaggggaaaggagactaagagtcatttcgagtatatttcttagagtaatggtaatgacccctgaaaggtctgtcctatgggaacatgttctgcatccccaccccaaggttctcattgagggagaccctgcttgtgctattatttttgttttctttctccatagtggacagagttcacagaccgcactttggcacgttgtcctcactgcaggaaagtgtaagtgattagggattgagctggtaattgatgtatggagtaaaaactacaaggccatagaaagcatccatttctatttgcctccccacaggtcatctattgggcgcagatacccacgtaagagatgtatctgctgcttcttgcttggcttgcttttggcagtcactgccactggccttgccgtgagtacccttgccccaacctctttcattctgcagcctcatctccataggctaagatttgggaaactgctaccctaaaaaaaagtggaagaaacttgggggactagtttgttttgttttaagatatggatgagctaaagtgcaaagtggctgatcaaacagactttattactactacaagagtgaaaaacagccttcctttctctgtaggatgaggataggacagtgaaattcttaatttaagagttgctatttttcaaacctggctcagttgtcagatattaagaaaaactgagatacagtgtgggatgggatgagtatgttacgcctaagggaaggaagctgatcagctctgcctttaagaaggtccctgagggtggctacatgtggataaggaacaaggactgaagcgtgagttattactgttcttagaactaataggaggtagtggagaccaacattaa

SEQ ID NO: 74546 - DNA, 1020 bp, Homo sapiens
caccagagaccaaacaaggactaatccaatacctcttggattttatttaatgtcataatgttgtcagaataaagagaaagatgaaataatttcatttttttgtgtaacttggtatggggctggggcacagaccaagattgacatgaaaggatgtgagatcgcatgtcttgtgtgactatctgcttctcagacaagcagttaggaactgagatgagatagtatgtgagggcagcaaaggatgaagaagggcaaaatgatgaaaggtgaggtggaaagaggttatgagatggtaaagaaaagttaacttctggcacttgattgccacttctgtcaggctggtcctgcctctctcccttgccttctgattgtttcatttcctgtttatttgatcatatctgaattagttcactggttagcctcttccttagttcccacttccttaccaaagccctaattatatttcctcttgtttgccttttctctcctactcttctctaacatctgcagccacactctccattcactccatgctgacaaggcagtggcaaacacttttctctgctgccagccactccactgttgactggattgctgccagccccaggcaaacctgtgaagttgtttcatactctgcttctctttgagtgcctccttctctccttcctcttcctttctgggctccagtctttctcttcacttgtgcttgtcagaacctccctgtgatactgcctccaggcatttcccccatgttggctcaccgcactattatctttgcttatcaacttgcattcagctggctggcatgtttcaaaaccacactgccctcccaggcctgtgtgccttttgagaaagaccagtgctggatgagcctctagtaatgacaacattttagttgttagtggtataatacggaagagatattttgcacaggctgctttggagaactttcaaattatcctttgtttggtaactgacctacttaactgcccaatacaaagaaaaagcatcttggagtggctc

SEQ ID NO: 74547 - DNA, 1047 bp, Homo sapiens
tgccagcttctattgattagtaggcttggagggggaccacagaatcgccgaacctaagggaagccctaggaggcctgcacttgcccacaactaagaaagctttgctagttattcaggctaatcaccagctttttgaagcaggccttagttttttgcaagcgtaactaacatttggggatcggtgttttctgtttactctcctctgcctcctcacccttaacccaccctcagccagtgttgtgcaattcttagagacacttgccaacagcctcttctctaagccttcctactggaaggttgggatcctccgttttctcgctctgagacagcacgtcaaatgctaatagcagcacatgagtaaagcgcaacatctttattaaaacaatttcagcaccactcagggggctagggaaatctcagatgagccaagaccctccctcgtgacagtaaaaatcttataatcaagtcataatgtaatcagtagaaacccaagggacatcattatctgtggcacaggaccaccttcccagaagcagcctcaggtattcaagacttacttaaccacagagccactaacaagttttgcaagaggataggtttattacatacgcttcaattcaagcaattcttttactgatgacaagcagagtaaaataatttttgaatttatggtaatagtcaatgtaggtttccttcgaacagcaactttcagtggcccctttaaagttagctctgattgtctagaaagtactagtatggaatataaaagttgtgtgggcccggcacggtggctcatgcctgtaatcccagcactttgggaggccgaggtgggtgcatcacaagatcaggagttcgagaccagcctggccaagatggtgaaacctcgtctctactaaaaatacaaaaattagccgggcacggtggtgagcacctgtaaccccagctactcgggaggctgagacaggagactctcttgaacctgggaggcggaggttacagtgaacagagattgcgtcactgcactctagcctgggtgacagagcaaga

SEQ ID NO: 74548 - DNA, 1047 bp, Homo sapiens; identical to SEQ ID NO: 74547

SEQ ID NO: 74549 - DNA, 1497 bp, Homo sapiens
tgtagtgaaggtcacagattgcagggacacaggaagttccagggcacccaactgcagatatcgggccatagcgagcactagacgtgttgtcattgcctgtgagggtaacccacaggtgcctgtgcactttgacggttagatgccaccatgtagggattatcgcgagtggttgaccttacacttactccttaaatagcagtgagtaatgcatttgagctgtcccaggctctgtctcctcagctcatttcctactctttttctctatataactcattctattaaatacattgcaccaaagagatatggagacataaacctgtaatgaatgaggctgggcttttctgtaataagcttccttttataatactggtcagcttagctctctcagatcctatcctgtggaatttagttattatgtgtatttatgtagtatttcaaacatttcaaaatgctttcatctatgtttatcacattttaataccacagcacttataatgatgtcactacatatagaagctcaaagttaagggatttgctgaagactgtaaagttaatggaagaattgagacaaaaatccagtgtagctggccacttatccagggctttttctacttcatcacaaggaatgttttgaaagtgtctgctttttttatccttaaaattcacctgtcagggaggcattaaaaatttggaaatgtatgccagcaaaatgtgagctctgtattttttggcattcttatgtttgggtttaataagattaagaaaatgatactgggaattttctttttcctgaaactttgaatcaccctagtaagtcaaagtactaaaaaatgtactagatcattaagacttatgtgctcttactgattgaaagattttttatgttttccttgtaataaaggacctaaaccgaaggtacctgagaagactgtgctatggtattattttttttctctgacttttaaattcttgtttagtttataaacatgcatgcaccttaataacctcataaactctggtcaaagactaatgcctatcagatccatgaccacaacacagaagatttgtctcatttactccagagagaatgattcctctcaaagacaattctcacagctcttccttctcccttagaatatttagaagcaaattagggagctgtcaggtctctgagcccaagcctgcacgtatacatccagatggcctgaagcaactgaagaaccacaaaagaagtgaaaataaccaattcctgccttaactgatgacattccaccactgtgatttgttcctgccccaccttaactgatcaattagccttgtgacattccttctcctggacaattagactcaggagctccccaccagagcaccttgtgacccccgcccctgcccgctagagaataacccactttgaccgtaatttcccactaccaacccaaatcctataaaactgccccaccccatctccctttgctgactccttttttggactcagtc

SEQ ID NO: 74550 - DNA, 1075 bp, Homo sapiens
gagaaaggtaggttgatttcctggcagaaaggaaagttgctggcaatcgctagggcgggggctgccaggagcgctcctcctctgcgcggagatgtctctgcagatccagagtctctccgacagcagggaatgtaggcactcacccgggcctggggagccactccaaggccggggcaccatcttcctaatgtcagtagacacttcagtgccgccgccatggctccggaggcgaaccggaaacggaaatacaggtgcctgtgaccctcagtcccaacgccgcaaggagcagccttcgcagaacttctcccgacagtttcagccaacgagaagagcgagtgtttgccagcagccaataagcaatggttatataaataatccttgaggcagaaaccgtgtttgggccgacttgaaggctgcgttgggcctggtcaccggccccagaaatcaagagggtggggtggggcggggcgggacgggacgggggcgggatggggttgggtgtgagcgcgccagcaaagactgtttctgggagtactgacttcctgtgttctttgcattcctccgcggagaactctgagtcttgggttgtttccctgtgtgaaaaagggagactgcagtaacggaaagaagagaaaaatcagatttaagcgactgaagaaaacagaaattaatagttaaatgattattgaatagttaatagtttgataaatattaaacctagttaataggtttatttatttttttacatttgttaatttctcttcaaatgagaccagtcttcttagtaagctaacataacacttactgagaacacctatgtgctaggtacttcagggaaaaggactgatccccacttcacagaaaacatggttctgacggggaccctcctgtgtctgctgctacgtcagagtgtttcccccaggcccaggacttagacagtagccgtctgattacctgaggtgcagaatctcaggtgggtccagccactattgtgacgtgataatatagcataggggaatggtctccagagtctgcaagctcatcaacaccttcattcactagagcatcagaagga

SEQ ID NO: 74551 - DNA, 1020 bp, Homo sapiens
gagtggctccccaggcccgggtgagtgcctacattccctgctgtcggagagactctggatctgcagagacatctccgcgcagaggaggagcgctcctggcagcccccgccctagcgattgccagcaactttcctttctgccaggaaatcaacctacctttctctgcctgcaggcgctcgccgccttagtacccggagtgacccaggtagataacaagtccggtttcctgcagaagaggcctcatcgccagcaccctggcatcctaaagctgccgcacgtgcggctgccacaggcactggctaacggtgcccagttattgctacttggtgagtaacggcgggaaagcgagaagaaacgggactggacctacatgcaagtgattccgcttttcgtctttggcccatagggagcgctgggcccactatggagaatcaggtgcaaacactgaccagttatctctggagcagacatttgcctgtagagccagaggagttgcaaagacgggctaggcatcttgagaaaaaattcctggaaaacccaggtaggacttaagaataattaaaaagtgggcgagattgaaatatcggttagaaatgaagagtaagaaataattctacaatctctcagatactgaagtctcttatttgactttctaaccagagcagcagttgttacaatgatgccttactaaaagaaggtagattattttagagattgcttaggtaaaggtcagaatgtcccagtatactgttttttgtttgtttgtttgttttgttgttttgtttttgctttgagacagagtcttgctctgtcacccaggctgaagtgtaatgctcgatctcggctcactgcaacctccgcctcccgggtttaagtgattttcctgcctcagcctcttcagtagctgggattacaggcgtgcaccaccacacccggctacttgtatttttagtagagacggggtttcatcatggtggccaggctagtctcgaacttctgacctcaggtgatccgcccacc

SEQ ID NO: 74552 - DNA, 1171 bp, Homo sapiens
tgtcgcccaggctggagtgcagtggcacaatctcggctcactgcagcctccactcctgggttcaagtgattctcctgcctcaccctcccgagtagctgggactacaggtgcacgccaccacacccagctaatttttgtatttttagtagagacggggtttcaccatattggccaggctggtctctaactcctgaccttgtgatccgcccaccttggcctcccaaagtgctgggattacaagcatgagccactgtgcccagctgagtctacctttttttttttaggagttgtaaataaaacaagaaaataacactattagttattttattactaactatacaactactttaacataacactctcttttcccaggggtggggttgggtgtaaatgggcctcttgtagagatgactcttggtcatgggaattggtgatttataataattttgccatcttagggctgctcacagtatttggggccagagcctacgtgaatatatgtgtgtggacagatcagctgccatgttggttttggcagaaaaactactgaaaggtgagtgcaagagcacttccaaagttgagggagttaagaaagcaaaggggtactagtaaaagtgttttactgggaagtagagaagagggtaaaaattaagatgaatctggtttacttttaaagttatagtcaagcaaagggtggtattagaggtttctgctggactgaggatgggttgggtaagaatcaaaggacaggaggcctaatattctccctgcccttttttttttttttttaattagaggtagggtctccatatgttacccaggctggtctcaaactcctggcctcaagccatcctcccacttcagcctctagggtagctgggattacaggcacgcaccgccatacctggctcatccctgccctttttgatatacactttacctattcttggggccatgtttcttatctggatatctcttcagtttatacctaacttcctacacactcacagttgcctcttcttttctccacaggtggttcagaatctggggagccttatattccaggtgtctttttcagacagtttctacctgtatcacccaaggcaagtggcagtgtttagaatattctaaatgtggaatgtggcagatggaaaactatggcttgagcttt

SEQ ID NO: 74553 - DNA, 1051 bp, Homo sapiens
gtgaactctcacagtcccgtcttttggtaccctgtcctttagaatactcagtcactgagctacaagtttcactccctacctgagagtgtggggtggcccctaaatatagcccgagaaatctgagctacacttctgccccaccctggtattttggtccagggcagaggagggaggggtctggaggtgtggtgttgagggtggcagtggggatggtgagtatcaagagaagggctgtcctgattcctcttccaaagcttccaccgatcagcctggaaacggagctgggggcaggaaaggccctctgtgtgttctagagtagtcttcaacccctgggtccctctgttccctgcatcttcctgtgctgagagaggaagcctggtgtttgaggcgatgtggggatgtagagacaacttcccagtctcatttcctcatcctgccaggccaccatggcggagctgcaggaggtgcagatcacagaggagaagccactgttgccaggacagacgcctgaggcggccaaggttattagagaccgtttgactcccatgcccaaattccagacctctaagcatcccccttgccttctaacttcccaagcgtactgatcttattctaactcacaccactgcttcaccactaccctagtctctctccccatacactataattgggagtcaggcccttgtctcgtcactacactaaccttcatcctttccgtgtctctctttgtcaatctctttctgtctttggtcatttgttggtctgtctttacttgcctctctttgtctgtttgtctctccatctgggacgccacatggtcatgtgtttctgtgtgaatccgtgtgtgtctctccaggaggctgagttagctgcccgaatcctcctggaccagggacaggtaacagtgtgggggcagtcccaaggtgggaggaggggctgtcctcttccccagtagaaggatggcctctgcttggccctctcttctctctttgctttctttccttctattctagtcctttcccttccctatctctcccctctccttccttcc

SEQ ID NO: 74554 - DNA, 1601 bp, Homo sapiens
gactcagtctctctggtctcctctctggtccccgccggcaggaggctgggtctccgtgctcccgcccgccgcctccctccccagacccctcctcccctcctgccgcggccgtttcctgtggctgagactctcgctcagccatgagctcaccgcccctaatgggttgcagctgcctcgctgctcaagccctagctccgcactccctgccttggagcagacggccccactctgcctcacccccgcccatctccaccttccccccacccacgcgcactgcgtccgcctggtcccgggaacactgggggtctgtctgctcgcccacacaccttggggccgggtctgcgcgctgacgcactgaatgtcccgtctctggagtggttgccctaacttcccagacggtcaagacaaacgggcaactctggatggagctcagagaaaaataagctattttgttttatggcaaaggcaaggtatgggggtagggaaggtagagaccaaggtaaaggctgcattgagtatccccttccccatttacagcaaaaaagaaaaaaaaattccagtaaaagggacttcaaagactgtcttgaaaaagaagtttgcaaaggaatagcccaaggggtggttgtttaggttaggagttggagaaagacgtctcattgactcacttagggaggggagtctggatgaagcagggctgagtctttttgagactcctagtggaggttggcagagagaggtcccactggaatcagaaaagatcagctcgaatgcgcaccatcaaggcctcctcctcccttcccacaagttcctcttgtgacttttttctctttcaactgcccccacccgattctttgtaatccaatcccacatgctctaagattgggtgattgcttcagagccactgtgggagaaggaagagggatgctagaaagacccaagacagtcacagacagtctttccatcctcctctttccaccaaatgaccatctctagcatataaatgagcatctctctttcaccaaatgatcatctctgggacataattgtgggtgatggcacctccacctaagatggggagccctggatggtgggtcttatgggaagggatttgcaggatggctgtgtggaaatctccctcatcccctcgagttctcagccataagctcagtcccctgatagcccagaagcctgtcttttctctcctgggaaagatctatgcaatcaccccaactcacgagcacccggaacagccctgatcaggggcattcacaacaaattctccctggatctccaaagccaaggtctcagagcgggagtgttgagcgccctgccaggtttgtgcactctggcccagccccactcctgttctgggctcatcagccagcatttcctgagtgctcactttttgcccacattgtacaatcggggctttggagaacacagccaaccccagaccagtgcagctcccaaggagccatgattgggtgatctctagggatctgtagcctggtcctatctctacaggagcctgagccagtggaggactgtgtgcagagcactctcgccgccctgtatccaccctttgaggcaacagcccccac

SEQ ID NO: 74555 - DNA, 1029 bp, Homo sapiens
ggtgcagctagcagccctaccctggcaactgctgcgcccaggagacttctatctgcaggtggtgccctcagctgcccaagcaccccgactagcactcaagtgtctggcccctgggggtgggcgggtgcaggaggttcctgtgcccaatgaggcttgtgcctacctattcacacctgagtggctacaaggcatcaacaaggaccggccaacaggtcgcctcagtacctgcctactgtctgcgccctctgggattcagcggctgccctgggctgagctcatctgtccacgatttgtgcacaaagagggcctcatggttggacatcagccaagtacactgcccccagaactgccctctggacctccagggcttcccagccctccacttcctgaggaggcgctgggtacccggagtcctggggatgggcacaatgcccctgtggaaggacctgagggcgagtatgtggagctgttagaggtgacgctgcccgtgagggggagcccaacagatgctgaaggctccccaggcctctccagagtccggacggtacccacccgcaagggcgctggagggaagggccgccaccggagacaccgggcgtggatgcaccagaagggcctggggcctcggggccaggatggagcacgcccacccggcgaggggagcagcaccggagcctcccctgagtctcccccaggagctgaggctgtcccagaggcagcagtcttggaggtgtctgagcccccagcagaggctgtgggagaagcctccggatcttgccccctgaggccaggggagcttagaggaggaggaggaggaggccagggggctgaaggaccacctggtacccctcggagaacaggcaaaggaaacagaagaaagaagcgagctgcaggtcgaggggctcttagccgaggaggggacagtgccccactgagccctggggacaaggaagatgccagccaccaagaagcccttggcaatctgccctcaccaagtgagcacaagcttccagaatgccacctggttaa

SEQ ID NO: 74556 - DNA, 1109 bp, Homo sapiens
ctctcctgttttctcactgttccaccatcactgcctaaccatgtcactcggagttggtatggagatggaagagcctatataaaagaataaccggtactcatacgacatttatgagtggcaggctctgtgctaagggcttttatgtattgcctcgtgtaatccccacagcagccctgtgaggtagatctatggaggcacagtcaggtttagtatcttgccccatgccattcagcaaggaggtggcagagctaagagcaaaaacctaggagatgggcccctcagcctccacttttaacaacttgattagcctctccaggcagaaaggaagtgaataaatggaaatgggggggcacagaaggaaaaggctctgcatgcacctgctggaagaagcgctgtagccgcagggcccgatggaggccactctcaacctgctccagccgctgttcaaagatatccagcaccttctgggaggtggcattctcctccagagccagggcctcccgtgcctgggccaggcgctcctggagaagggaggctgcgctcagacctggtcctcactcctaggtagtctccccctgcctcctctcacctgccctccagccccttctcacctggacctcagcgctgaaagcacggaatcgcagctctgtctcctgcagggcagacaaggtgtccccaggcatagcaaagcttgccagctgctcctcccctgggcccgagagccactgcaacacctgaggcagatggggtgggagggcagggggtcatggagtggaaaggcaaggaagggctgagatccagcatcagccccaccaccccaatctatagaactttgagtgaactattgcatctcatctgcaatgtgggaatgacaacagtgaatggtaatagtttccacaagggtcagatgagaaaccgagtaagaaatctttggtaaggcagatgagagggaagctgggctgatgggaagcactgagggagtgggtcaaagttccagggctatgtccgagggtgaagtacatcaaactggggtgaaccaaaagcaggatgagggtcatagggatgactgacggccttcaccaagccttggcaactggtgagaaacggtc

SEQ ID NO: 74557 - DNA, 1118 bp, Homo sapiens
gcagaggctgagtagaggcagaagtgcccacagaacagggctgggccccaaggtcatggaccacacatgggaggagagggccgtgggtactgagaaagagggacagatggatgaggctggaacagagaagggagagcacttggaagaagttgaggggatcactcacgtggcgaaggaagcaggccccaatgcgtagggggtgggtggcgcagccctgaagctcccgcagaaagtgtgtccggtggaagctgcgaagcctttcccgggcactcagggcagcagcccaggtgccccgaagttcaggcgtcagctcaggcccagggggtggcactggctcactcaaggtggccacgtaatcttgttcacaggcaatcagctcagacaccagccgctgctgggcactgcaggcacaataggagtggcagaggaggtgtgggagggagccagtacccccaacaatgtcatcttcttttcctactgggcagttggctccgcctcttagcaccagttgggctgggatctcacctgatgcttcgcttgcgctccatccggggggtgcctactccccagggtccgtctggccccctagcccggcccagcagcacgtgttcccgtggtgagcacgtcctgtctaccacctcagtgctggtgacctccaggcctcggatcagcacagctcttgggggcctgccctctgcttctggagccagctcagggccctcttcctcatagtcctctccacatggggccagggagcaatgggatggggctggccgtggcccagggctgctggggagcagcaaggagctgaggctgggcgaggggctgcggggcccccactgggcccctccactgctggcaccgtctgcccgccgtcgtcggtagccccgtgggctcgcctcctctcccacgtgttgctggatcctcctctctagctcttggcagcgggcctggcagcggccccattctcgcagggctgctgggctgcccaggtccagggccagggcccgcatctcctggaaggtgccggcactgggctctggggcccgccgcagggccagtgcagccagcacagcctcccgacccggcccagctcctgccagccgagcaaagccctc

SEQ ID NO: 74558 - DNA, 1455 bp, Homo sapiens
agtgtgctttctcctcatgccctaggaaccacccctaattccaaaggcatgtgtgtccttagtgggaaagtccctcttctagtctggtttggaatgcctcctaagtgttctgcatgaatgataaggaaaacctcatgaggtagaccaaagacagggacttctaacatcccctgacaccctaactcgatagtcgattacaagccaaagcctattctagatgatgcagattctgaacctctgttggggctgaatttccagaacatcctgagttctcaagaagagaatgacttcctgtcacctccaccactcactccaggaatcgtaccttaaaggcctgcttgtaaacaaacatctctgaccccccttcagggcccttgagcttgctgaacaggaggagatgctcgaagagaaagacatggcgaaggcacttctttcggccacagatgacagtgaaggggtctcgatgcaagagctgtccctgctccttcagatctatctggagaaaggaaaaggaaaagtggttggcccaggggccctttgtttgtattttacagggagcaaaaatagatttatagggcaagtggcctaatgcactggttctcaggtagagtcaggaagtcagggaagccctcagcctagggtccatcaactggtcaccatgcacagtgcacccagctgagcagcacagccctgcctctgaagacggcaaggtgctctgcatagtagggtttatagccacctgtggggaagcctttgcatgctggggatccaggaagagaatcagcaaagaactgaaagggaaataggtctattccagaggaggatacaggattccaacatgttctggaacctcagggctggaaaaagactaggtagacgagacaaggtatgtgttgggtgttgaggtgcaggaggaagtatggggtagatggggaaagataacaattaggaaaggaacaggagagtacaaggcagatgtacgaacatgggatgttgggaggacatagcttctttatttacaaatgaggaaagtgaagtccagtgaagttcagtgactcaatcaaggccacccagctggttagaaattagagcctggagccctctgacctggagcctggttctcctgtcaccaacctacacggcttctgaggccagggctgggcagtttgagcagcagtgactggagctagggcctcacctcacagccacgcaccgcctccacggccagcaggtctctgccacgggcctcttgttcccggagcagctgtacagcagccccaagggcccggcactcagaactgagctcaggcccagcttccctcaggagctcctccaggagccgcccataccgagtcagctgttccagaggctgctgcagggctcggggcaggtaagggccagcctccatggagccctaggttgaggacacagacagggatgaggggaggggtggag

SEQ ID NO: 74559 - DNA, 1056 bp, Homo sapiens
ggagggcgcctcaagtccccggcctccttctagcggtgctgggccggggtcccgtcggaagcccgccagccctgggaggaccctgcgcaacgggcgaggcggtgaggccgaacccctggacctgtccttgcgggcagggccgggaggcgaggccgggcctgggggtgccctccaccgctgcctcttctgcccgttcgccactggagccccagagctcatggccttgcaccttcaagtgcaccacagccgccgggctaggggccgccggccaccccaggctgacgcgtccccgccctatgcccgagtaccatcaggagagacccctcccagtccttcgcaggaaggggaggagggctccgggctgtccagacccggagaggcagggctgggggggcaagaacggtagtgggccctcaggggcgattagcttagtgagcttaccccgccggagcgggggagcgctagaggtagttgggtagagaagccagcagggggcagcgtgggacccatatcccagccccaggcggaccagaggtggaaggcgcggcgggcgtaggagggtgggctggcggtacccacccagcccaagggagtcacagtgccttagaagtggcagaggtgagggtcaaagaacggggtccctgggctggcagagaaggtttgtgtccctgttgaggagccactctgccagtctttgctggtccataggcgtgagagtttatttttgtacaaggggtgagggtggggggcactgtacccttctagccccatcaggggccctgtagacgtcgctatttttggtacgattcctgtcatccctattgcagagtcgtgtccccaataaacaggtgtcttgaggcacagggccctgtgtctgtctgcctacctatgtcctgcttccctctttgggtccttctgtcaggaaatagtcacctcttcagacacttagttatcacccaaagagtttgataagaaatgcagaatattgggttttacccccaggtttcgatgcagtagctctgatggggcccaagaattagcatttaacaaacagcc

SEQ ID NO: 74560 - DNA, 1465 bp, Homo sapiens
ctgcaagtcccaggcctagggaattttagcctggagaattttaaccctttcctgctcagagcatgtgctgagtccctatctgtgcagatggcccagccccgccccccgtccctcactccagcctcttgagctcagagccagtgtaatcctcctcttgtgtgagggagcctctcccctgcagagaggaggaaagcctgcctcggaacagccctggacaaaggggctcagatgccccatcatactgcaggctccaaggtttgaaacaaggggatgaatcctatacggtatttgcagtttttagccccttccccaggctagctgtgccccttaacttccactcctcccccaactctctcttcattccctctccctctggctccctcccccttcatgcccctccccctctgtctgtcttcagactctgctgctgggaggtgtttctctcccatgcatgaatgagtctctgtaatgaatggaaatgaatggatcaggaatccaggcggagggagggagaatgaggggggaaagacagaaagacagggtaagggcagaaggaagcactgtggaacctggaaggatgtttggctggctgctcagttagggatctcagagcaactggtcccacttggataaatggggagcatggcaagcccacctcatttgctcaccacactgcatagcccaacctacatgggagaggggcatattgtgatggtcttccccaccgccagggggtggggtggtagctgtggttgttctggaccatgcatttaaaatatagaatttggggaagaaatctggattatctgggaggcttgtaggcttggcaagtcaagaggtacagtttttgagtatagcagccccttcgtgcctcaagaagcaagtagggagaatggattggttttgggaatacagaatgctgagagtctgggggtagggagtgactttactgctgaaaactagggctcatcttttcctccaaatctgtctcttgctttagctccacagcacctgttgccttcattagcagcttttcctcctcttccctgcacttcccagaaccaaagaatgtgaagggggtccatggaggtgagtgaagctctggcttcaacctacaagtacctacaactgtatactccctctcctgcctacctctctctctctttgacctcccattattagaagttaactccttggccctgacatctcgattcccatacacctccccccaccccatcttcccgaggtgagtagcaccctgtgttcctagttcaggccccagcccaccttccctcgtgttgtccttctggccctcgaggcgacgcccttgcttcctttacagctctaccttcaccctttgctctacgcagatctttctccacagggctcacgtccccgcgccccgagcggccacttagcgccgtcgccgccggctttcgacggcgagctggatctgcagcgatac

SEQ ID NO: 74561 - DNA, 1652 bp, Homo sapiens
gagaaaaaaatcatgggatcaggtgtctggaacctggtttgatatggagatgattcagatcttcattgggcctaagaaggtatctcagtgagttttgttgattttaggccaccttctggggaaactttccgtgctggggaattcagcttcagtttgggccttcttgtatatcactctatttctgttctggaaactgctatgtgcaaagtggtttattgttgttttgttttgggataggaagctttgcccttttctgactcttcttgcctcagatatgaggccagcttcctaagagattttgcttgctatcctacagacagttttaggggccctagaatcttctcagaatgagagtatgtgcccataggttagtcagctatgaccatgcagtattcccagcccccccgccccacgcctccaccatctgcttcctctgaatataccagattggctgtacaccaggatgttccgggaatccccaggagagcaacagaatgtgatggacccaaatatgatgcctcagtaactcattccaggatgtacaaactgtaactgtcaggatgctccttatagctaattaaaattcttctagttacatctattttctattagctctttctattttcagtgacatctaaaaggccaaaataatccctctggtaccactgggtttttttctatggttttcagataggaacgaaaaaaaaatgctctagcttttctgtgttgtatctgcgatgctaaaatggcaaacagcccctctagcacctcatagctctatctatggtactgaggtggcccaagtggcttctgtggtagcccactgcactctccatggtactgaagggatgaccatttgttttaacatctctctggggtccaaaagagtcctgtgacttagaatcacaaacttttttcgagcaggaagggactaacactataaattagtccaatccccttattttactgatgagtaaactgggaggttaagtgatttagtaaaggttgtagggttatcaatgttcagactaggcctacaatagccttgtacccttcagtcctattctaattcaccttttgtgacactattcagtaagcctggctaggctcttagtcccaggaaaggatccagaggatgagagtgggtgccctaatttgaagctacagaaatacacatattaagtggtagtggaggtcgtctagtgacccttggacaaggacactttgttaattaatcatctgctaataataatcctatagcccagattccacatgtaacaggtacctgccccttcatggagttttaccacatccactaaatgtcaaaaattaaagaagccttggacctccagagccttttctctctgctgacaggcaggttgactcctggcacagttcttttctattaaagatccttaggcaaagtaatgcttgcatctttttctttctcagtaacccatttcagttttgtgatgcctattgtaaggaagttctttatatctcaaatatcctttcttagacaaaaaaaaaaaaaaaaaaaggttagacccacattcatttagccttgaccagatactattctatatgaggcagaaaggtagactagatgacttctggtcatcctcccaggtctgtttccatgaatcttgatt

SEQ ID NO: 74562 - DNA, 1850 bp, Homo sapiens
aagctggtctcaaactcctgggctcaagccatcctccctgcttggcctcccaaactgctgggattacaggtgtgggccactgtgtctgtcctgatagatatgtttttctacctattcgcacctcagtttattcactgataaaagggggctaacaatatgactgtgaagagttgttgattcagggtgggtgtttaataactattagtggtgctgatgaggtcacaccgataagtctgatgcccatacactaaaagtgttattcagaaggaagctggggacacatttctacagtcggaagcagaaccagctgggcccaaatatactctatagatcaaaacaaatcccagatctacctaggtgcccttggcaagttgcttaatctctctgttcccttatctataaaaggaagttaataataccagtctcaaggggttgctttcagcatggaagagagcttagcccagtacctggtacacaagtgctcaatgttagtggctatgatcatcatcactattattatttcttgttgttgacgataagaggagactgcgccagaagactctagaagttagtacgaggagggaggcagggtcctgggaggcaagtgatcttttgtaagccactcctgccccatcagtgctgtgccaacatcggcgggtcattgtatctactcttttctttcccggggagtgggagtcacgttttaaagagatccagaaaactgctgtgtgtctactcctcctcaattcccacgtgcattgattttatttggtggcgatgtgagatgttgggcttgcactgaggatccccgagcctgcaggccactggggaaacagacttcctgaagcctcatttttcttacttgtaaatgggggctaatttaattatagagggttattggaaagattatatactattagataggtgaacaggcattcagtaaatattgactaaatctgagtatactacttaccagtttgtagtctagactacaatcgcctggaaggaaggtaccacttctttctcatccctcacagcgctgagcccagtgcctggcacttagtaagcactcagtaaatatttgttgtattgaagagccattaaagtgacttgaggaatggaaaatagaattcgagaggaaggcgcaggaattgtttatcaagaacggaaaggaccgaagagtaactttaataatgtttcttatacggccgacattaactatctctataatcgcccctcctcctcccccaaaagagagacagaaattgtaagggagaggctttgagataaaaccccaggaagaacttcccgagtctgtgcatgttggggcagaaagagcggcagagccaactccttccctggtatgtccgggtttagggagggaggggcagtgctgcttggaggctgggggaaggacgagatgacctttcaaaatctcttccagtctcctgttggaatcctctgtgcgccccacccccgctccctcccttcctccctccctccgacagcgccccccgtctccaaaccgcccgcaccccgcccctggcggccgcctctcgcggctcccggggtccccagctccctgtccccggagccagagcccggctcccgcgcggctcccagccccgccgcgccgccccccgcatgctaatggccgggccgcctcccgccgcacacaatgcgggccagggccgggggcgggggaccggggagggggcgggggccgggccgggggcgggggggccggggcccggcgcatctcccccggccccacgtaacgctgacgcccgcgccgccggcccgccgcccgccgccgccgccgccgccgccgcccgctccgccgccgcccg

SEQ ID NO: 74563 - DNA, 1060 bp, Homo sapiens
cgcgcttctgactcatcatctccaacccctttctcgcgcgcgctccaagtctcaggacttcggacctgggccctcctgcgagggggtgcggcgacagcatctgggaagccccagctctgccaagcgtcagctccgagccctcgccagtctctgaagctgccagcgcagggctggggacccagatccagctctctattgcagtggctgggggagcggcacgccagtgcaggaccgcccgcccggctcctccccgaacgcggggccagtggtcgcgtccgagaaagcgccaggctaggccccgacttccccgcctcgcgtcactcagcacatccaacagcgcccctaccgcggagagaaggctctttatttcctagccggtcacgggctagcggggcatcctgggacttgtagtctccgctacagtagaaaggagatggatcgaaaggggaactggggcactcctgaattggattcagggagttggcgtgtgcagggtccgggatttggagtggatgggattatgaaaggtggacagaaaagaaaagtgcgatgaggcaaatgtgaagctgtatggggaggtgacaggaagagaggatatggatgcaagggagaaagcagcttttcagggtggtgaggtgaggatatattctcgtccaggtgtatcttcccctaacagggaaggaacgaaaaaagggcctgctttgagtgaaaactgaaggcactcccggacttcctattggactcgaaggatcccagcaagcttctgagtttggtggggtgggatgcaggaatgtctggagagcattctctcagggtggaaggagagcagcacgtgtctgttcccgctgtcccaccctctcatttgctcctgtgctggccaccgtgggaccattctccaaaccaggaacctcttccaactcagagaagccctgaaaaccagagacaggtgtgagcaaattgtagaggtgagaaaggagaaaccccagacagaaacaactgcttcctcctgcccaattttctatcctgtttcccatagtcctgccaatatttaggcagcttc

SEQ ID NO: 74564 - DNA, 1048 bp, Homo sapiens
tactttaaaactataaaccacttcaggggttaaaaataaattgcctgtagaggtaagaagtagtttaaatgataatttcttaaaactcaagagccagttcagctatagttcttcaatcatcagtctgcattagataaacatagtaggaattcaggttttggatatatgttacagttcatgtagaccttgcaaagtccaagagtcttcgattaaatattaaattcttaaaacctttctgataaaacctttttcatcatatccctctagggcattggttctcagagaaaggtcatttcgttccccagaggatattttgcaaggtctggagacatatttgttagtcacaactgaggagtgggggaggagggaatatgtaacaatggaaggcgcagtagatgagaagtcagatttgggatttagttccagtgctgctaatgccgctttcctgtgcattatcctctgccagctgcaagcaaagactattggagacttgtcctgtgttcctcattattccccctccacactgcctattgccacagtcccgggctgctccatgacagcgttctgctttgctgcagtgattcccagcaaccactgtatctgcctctttcttcatcagtttggcagcctctgtggaggtcactcattttacttgaatgggaacttcactgaaagaagaaactgacaaggtttctgctgacgtcagtttttaaaggccgtgacccctatctattcttttaaacattaaagaaatccagttcatgatatgtggcttcatatgcagctgtggcacattggtggtcgggaaattctccatgtgaatacattttaccctcatttctttgaaattctgtcatttattctggcttttaatacgtgatcatagacaactgacagtatttcacaaatgaactcttttccgtttctgaatctgccttttggcaagatggctcaggttttgtgtccagggctgtgtcctctgctgccatctcgtggcctcttggctgcccaggttgaggtctcacaaagtgcctttcctaaggtaatg

SEQ ID NO: 74565 - DNA, 1015 bp, Homo sapiens
cagcccaatacaagccctgtttttagctttattccgagaggaactgctttgggaattatccccagtattctccttctttgttgcaagtaatgaaatccccttgttaaattttccttggttgtggtcattggactgtcactggccaagcgaccagctcacccattgtgtggtaacagtagcagttatatttgagactctattactcttcactgttacgctgctggtgtttataagctgaggctctgttgctttaggaatagtaattgaaaatttctttgttgctgcagaactctcatctttgacttgtagaggttttctaaatgaattaaacttagactgaacaatttggcctcaataagattctatcacagacttcttgggtgtgtcagcctcttgcttttgtttttctgcaacaatttgtttctgtttactattattgttagggtgaaatgtcttacattaatgtcatatgttgacattgggggtcatcttcagttggtaacaacttcagggtttgattattatcctcaaatttatgtgtgacaattactatagttgaattggtcagttcattagaaggttttaaaggaatacaatttttaccaccattgtattatttttgcttctcatgagtctgttgacattttctttaccagccatttctcactgaagtttcaaaatatttctctcttcttggaactggtcctcaaatgtcaccactctctggcctctattgaggttacatagctatggtagccaacttacagattccagcccaggtccttatcattctcagatgcaaaaagcctggacactatctgattttcctgtttgtatcaaaaaatgtttttcttcttaacagatgtttcttgagtctttgtcttattcgctctttgaacatgaattgggccttggaggccactgcaggtcttgggacatggcttgggtatttgtcacagcctaaggtgaggggatgcatctccagctttgactgcagatgtaggactccttcagg

SEQ ID NO: 74566 - DNA, 1073 bp, Homo sapiens
ttttgtgcagtaccagagaccatttcactaattgctgagtagcactaaggaaacagtgtgagtcaaagcaaaatgggtggaacccaatattgaattgtgattttcactacacaagaaaaaaaattaggcggtgttcactggttgtggcctgaaggagtcctacatctgcagtcaaagctggagatgcatcccctcaccttaggctgtgacaaatacccaagccatgtcccaagacctgcagtggcctccaaggcccaattcatgttcaaagagcgaataagacaaagactcaagaaacatctgttaagaagaaaaacattttttgatacaaacaggaaaatcagatagtgtccaggctttttgcatctgagaatgataaggacctgggctggaatctgtaagttggctaccatagctatgtaacctcaatagaggccagagagtggtgacatttgaggaccagttccaagaagagagaaatattttgaaacttcagtgagaaatggctggtaaagaaaatgtcaacagactcatgagaagcaaaaataatacaatggtggtaaaaattgtattcctttaaaaccttctaatgaactgaccaattcaactatagtaattgtcacacataaatttgaggataataatcaaaccctgaagttgttaccaactgaagatgacccccaatgtcaacatatgacattaatgtaagacatttcaccctaacaataatagtaaacagaaacaaattgttgcagaaaaacaaaagcaagaggctgacacacccaagaagtctgtgatagaatcttattgaggccaaattgttcagtctaagtttaattcatttagaaaacctctacaagtcaaagatgagagttctgcagcaacaaagaaattttcaattactattcctaaagcaacagagcctcagcttataaacaccagcagcgtaacagtgaagagtaatagagtctcaaatataactgctactgttaccacacaatgggtgagctggtcgcttggccagtgacagtccaatgaccacaaccaaggaaaatttaacaaggggatttcat

SEQ ID NO: 74567 - DNA, 1036 bp, Homo sapiens
ccttgctcctggcttactgcagtatcctcctgtctacccttcatccacttttatctctttccaatcacttgttcatacaacagccatattgggtttttttcaaaacacacatataatcagggcacttctcaacttaaaaccatttctggcattacttgcccttaggataatgacaaaactttttaacacagtccacaaggccagagatagcctgacccttgctgatctgtccagcctctgctatatgtccccttattttctctgttccaaccacattggactttgttcctcttactagtcatgctccccacctatttggttccctagttaacttctcttcatccttcgatttcaacttgtgtcacttcctccagaaagcctaccctttctttcttaaccaggccgataggctgtcaaaaccaggaatctcttcttcgtagcactacagtcatactcattgatacgtgtgattattaatgtgggttttttaaaaaattagaatgaaactcaagagcagggaccacatctattacttgtgattaatatattcctagtggttagcacagtgtctagacaaatatatgttgaatgaataaatagaaaagggagaggaaaaagggaaggattgaccctctgtgaggcagtcttgcaaacagcagaaatgcaaagcaaagctgaagaactaactattcaacacacacctagaggagcgttgtaatgtcttgtgcctgtctcaaatgggtgcattcttatgggtaagttttactagtccagctttcactgtaatagttcacattcctctcctagtgtcagtctccaacaaatccctcagtaattcgtaatcagtaatctcatgccaaggatgagagaggggcattatccaaaaagttgggtgtgtccatttttttttgagtcttgctctgttgcccaggctggagtccagtggcatggtcttggcttactgcaacctccgcctcccaggttcaagtaattctgcctcagcctcctgagtagctgggattacaggcgcctgcta

SEQ ID NO: 74568 - DNA, 2175 bp, Homo sapiens
aaactaaaattcagacagtgttcagtatgttgattttttttaacttttctatattgaactcctcctgtaactggaaatatggaaggcagtaaaacattacagaaggtctgatgcagtggtgcgtgcctgtagccccagatgcttagggggaggctaagaccctggggatctaggctgtagtgggaggatttcatgaggccaggagtttaagttcactgtgatcatacgtgtgaatagtcactgtcctcaggcctggtcaacatagcgacagccctgatctaaaagacattaaaaacaataaaaaccattacagaacgtgctttataatagaaccaagggcctttattaccgagaaatctgtactggctctgtttctccctgggtatctcctgtgagctcctgatgtagtctggtggcagtgtatttgctaactcatatcttcggtacatttgattttaatctagtattttgtttatattaaagtgaaaggagatgaccttcaggccattaagaaggagctgacccagataaaacaaaaagtggattctctcctggaaaacctggaaaaaattgaaaaggaacagagcaaacaagcaggtaaatgggttttctgcttgcccttggtatacagttgggttagttacataaggcacttgaaagtacatgttggaatagtggaatataaagcaatgtaatatgaaacttggggagtgtgaattgggaagggtatttgtgtgggaggatttagatttgtgctgcagttctgtgatccttagtggggattgtctacgtcctgtggacattactgcccctagacagacttgtccttctcatccgcagtagagatgaagaatgataagtcagaagaggagcagagcagcagctccgtgaagaaagatgagactaatgtgaagatggagtctgaggggggtgcagatgactctgctgaggagggggacctactggatgatgatgataatgaagatcggggggatgaccaggtgaaaaccacgggaaaggaaagaaaaaggtggtggaggggggctcagggacacatggagtgcctctaactccatcctgtttgtgtctgtttctcacagctggagttgatcaaggatgatgaaaaagaggctgaggaaggagaggatgacagagacagcgccaatggcgaggatgactcttaagcacatagtggggtttagaaatcttatcccattatttctttacctaggcgcttgtctaagatcaaatttttcaccagatcctctcccctagtatcttcagcacatgctcactgttctccccatccttgtccttcccatgttcattaattcatattgccccgcgcctagtcccattttcacttcctttgacgctcctagtagttttgttaagtcttaccctgtaatttttgcttttaattttgatacctctttatgacttaacaataaaaaggatgtatggtttttatcaactgtctccaaaataatctcttgttatgcagggagtacagttcttttcattcatacataagttcagtagttgcttccctaactgcaaaggcaatctcatttagttgagtagctcttgaaagcagctttgagttagaagtatgtgtgttacaccctcacattagtgtgctgtgtggggcagttcaacacaaatgtaacaatgtatttttgtgaatgagagttggcatgtcaaatgcatcctctagaaaaataattagtgttatagtcttaagatttgttttctaaagttgatactgtgggttatttttgtgaacagcctgatgtttgggaccttttttcctcaaaataaacaagtccttattaaaccaggaatttggagaaaaaaaaaaccctggttttttatttttgtattttattattgtttacttcaaactttgttttacagcgtcctccacaaaacctctagaatgcactagatatatttttcttggagtcataatcatgatgcataccaacacaacactactcaaattatatttcattgagatgcatgttgcattgaggagtcaacttgacatagagtggagactttttcaaaatggcttttacatcctaatgaaagtttgggaagtatatcctctctgccttttcatcagtgctttgtggtccagctggcaccctttctgaggtttgtgttttgtgc

SEQ ID NO: 74569 - DNA, 1077 bp, Homo sapiens
cttctgtgggtgaaaagaatcagagatttcgctaatgccatataccactgtttatatacccttttaattggaacattttaaagagtatttgaccgtatgtgaattgtttattgtaatgtatatttgaaaataataagatccaaaggctattcattataataaatgccctgttaatactgacactagtacagaggaatcatttatatccagtgccaaaggccagccaaccatataatttgatatatgttttattttcctgaggaaaagttgctacagtattacaactattttatgtgcctaggtaaagaaataatgggataagatttctaaaccccactgtggaggtttttgctggccttcttaatgaaatttaataaaaggaaacgactagagacaatattcacttactatttatcataaggtctgttgaattgtgctgagttaatgttaggtttgaatgaattccattttcctcttatccaataggatgtacagttacccagcacgtgtacctcctcctcctcctattgctcgggctgtagtgccctcgaaacgtcagcgtgtatcaggaaacacttcacgaaggggcaaaagtggcttcaattctaagagtggacagcggggatcttccaagtctggaaagtgtatgtattatttcattttgtgattttggtatctcttgtgttttgagatagggaagctaatgcagttacaatatttttgtgccacatgactttgtgtattcaaaataatggaagaggctgggtgtgtggtggctcatgcctgtaatcccagcactttgggaggcccagcgggtggatcagctgaggtcaggagttcaagaccagcctgtccaacatggaggaaccccatctctaccgaaaatacaaaaaatttgccggggatggtggtgcgtgcatgtaatcccagctaattgggaggctgaggcaggagaatcgcttttacccaggaggcggaggttgcagtgagccgagatcatgccattgcactccagcctgggtgacgagcaaaactccatctcaagaaaaaaaaaaaaatccaaaataacagaggaga

SEQ ID NO: 74570 - DNA, 5144 bp, Homo sapiens
tcaccatccgatattattaaatgtcctatattttaggttatataaaaagtagccttcgagtcattgcagtctgtaaaaagatggtattgatacttatgtatctaaagcatactgcagattaattgaagtatctggaaataggtgtttccagtgtaaatgaattgattctatttattgccttttgaagaaaattatacttaatgggtaagtgtaagctatccatattaatctagctaatgaatggcttgggacagaatttgacgtttgctatgctgtgtgtatatatacagaaccggtgaaactcaataaaagcaacgtgaatcaagattattgatggcagggaatagttagcatgacctgtaatgtgaaaaacagcagaaactggtgtcagagaatttaggcaaatctaatttgcttgagtacttagaggagggccacttggaattatgtccaaggaaattatattgccaatgatctgccagggagaatttttttttcctgagaatttagagtttagtgctgctgaaatagaatggaagaggaagaagttgactttctagagtatattcagaggctggagtctctgaaattattagcaaatacatacttaatgctgtgagtccctttaagttgcctaatactctgggcagttaacagtgattcagagtgagagtggagaatgttttatcaaggaatattgtttttagcatctgttcacctgtatacttttttttgctttacagttttcggctttgtgagaaaccttaccatcaaacacgatggccagcaacgttaccaacaagacagatcctcgctccatgaactcccgtgtattcattgggaatctcaacactcttgtggtcaagaaatctgatgtggaggcaatcttttcgaagtatggcaaaattgtgggctgctctgttcataagggctttgccttcgttcagtatgttaatgagagaaatgcccgggctgctgtagcaggagaggatggcagaatgattgctggccaggttttaggtaagtgaattttttcattgatgatgtaattcaggcctgagtttttctattcacgttttttttttgtctttatgtctgtaaaactgacagcatgagatattctggatattgcgactgtttagcctaataaaaatacattaggcttatagttataattggctaagtaaaggatattcttcattgtaccattttgtgtagtagagctaggacaactctactacaatcgtgagtagggggagctgggaatgacacttcacaatgtaaaaacgttgcctaaatggttgtgtcctgcccacagcagactggaggagccctctagtgttgattgcttgtctccccattgggatttcactccatccgttgggccgactgcagtttggctcagtgttagattttcttgtattttaaaatgtaatgacacctcagagtacttactacctatgatttggtttattcaagccagaatccagtgtccacatgtttattttattagttgtactagatgtctgttttaacttctcattttatgtgtaccttgtgcctcagtttcaaaattatcatacctttgtttttacaaagttaagatgattatttttaaatttatatttgtgatttagtttattctttgtatacattctactatgtatattgactcaaagcatggtaggttagagttatgtgaaacaattctttgataatgttatgtaaccaaccagatacataatttgggtctatttcattgtttttacatcttactggattgctttttcagaaatttaattctctttagttttgaaacactttatatggtttcaaagtcagaattgtaaatgaggttaatgtaccaaaacctgaaggttattcatgtaatggtgttcagcaaatagacaatatattcagtcctttttttttttttgagacagagtctagctctgttgtccaggattgtgtgcagtagtgcagtcttggctaattgtaacctcagcctcccgggttcaagcgattgtcctgtttcagcctcccgagtagctggtactacaggcatgtgccaccacacctggctaatttttgtattttttagtagaggtgaggtttcaccatggtggccaggctggtcttcaactcttgacctcaggtgatcctcccgctttggcctcccaaagtgctgggattacaggcgtcagccattggacctggcctgagtcagttttcagttggtcatttgatgagctgcttttgtataaaaagggaagataaataagattaagtttaagatatccacatttggccaggttcggtggctcatgcctgtaattccagcactttgggaggcttgagttgggcaggccatgaggtcaggagatggagaccatcctggctaacaccgtgaaaagccatctctattaaaaaataaaattagcaggctgtggttctgggtaccggtaatcccagccgctcaggaggctgaggcaggagaattgcttgaacccgggaggtggaggttacagtgagccgtgattgcactccagcctgggcaatggggcaagactctgtctaaaaaaatacccacactcatctagttaatggtttgaggtggaatttggaatttatattttggggcatttgtatattaaaatgaagctcattttaataaaagcagtatatatgaaaatggagttactgttgactcgagtgctgtagcatgactgggaaggtaaactgaattttagagagtttttggctttttgacatgggctttttagaacaaggagaagataaattcttgtttggtaggcagtgggtggcagggtaggtagctgggcatacgtgttacaaattgtatttgaaaaccagggttgtttccctttgctcttttattttttttggtgtgtgtaaaggttgtttaagcaattgatcaattattcagaaagcagtcgttaacccaggatattttacgtgtagaacagctaatccttacttataaagaaaatctgaagttgcctttgaggatgatttgaggttgtcacacttcactatgttaatttgtgaattggcatatattttaatatatttcattctaatatatttgtaataattcggaatgagctgaaccattcttggaaaggcaaccagtgatagttttctcttgtaatagtaactgagtgaacagtcagtaccttgaatggggagagttgagttgaagtggtatctgagggtggagagtaccaaagacagacttaatgttagtctcaggaacacttgaatggtaaagaacagactacaaagaaacggaagatgaagccttagccttgtaaaaatttgtgagcctttttaatattaaaaggagagatgaagctgagcttgatagctcacacctgtgattccagcactttgggaggtcaaggcagatcacgtgaccccaagagttcgtccctacgaaaaatagaaaaattaaccaggcgtggtggtccctgctacttgggtgggaggatcacctgagcttcggaggtctaggctgtattgagccattattgcatcactgcactccagcttgtatgacagtgagacagtgtcttaaggaaagatgagttgttttgttccacattttctaatttatgtgtctgtgtgattttctaaacttcgtagtttgtattagctgggcatggtggtgcccgcctgtagtgacagttactctcgaggctgaggcaggagaatcgcttgaaccgggaggtagaggtttcagtgagccaaggtgacaccactgcactccagcctgagcgagaaagcgaaactatgtctcaaaaataaaaaaaataaactttgtagtttgttttacccggatacaaagttgtcattaacatttttacttttgtttttcagatattaacctggctgcagagccaaaagtgaaccgaggaaaagcaggtgtgaaacgatctgcagcggagatgtacgggtcagtaacagaacacccttctccgtcccctctactcaggtccggaactttattatttataactgcattgtgtccatcagtgggcatcttctctttctgttttctgggtgtggggaggtttaagtgtactgtgttttatctgtgtataaataaggttttattatttttgtgttaatatgtctcttttttgccctagagaaaatttctagagaattaaaaatccctgaggtttttgctattgatattaaagagtagtttgatatttatagcataacctgaaatacttatacaggatcgttgagcttctaagacactagagagtaagagagggtagaagtgtggtataagaatgcttagtttaccattctgtttttcagtgtttagtttagctatgtcgtatgtggaaatcttagcgaattttaacctgaatttccaatttgaccgctacatttccagtggtctaaggtgattggaattgagtgatttattgtatgaatgattggggatcattcagtgctaatcttgttgatctatttgttgtggtttatttggcatggttctcccctcacctgacattgtgaattagtagaaacatttccaaattaacccttttcggtatttatttttcagctcctcttttgacttggactatgactttcaacgggactattatgataggtatgttaaaatgttttgtatttctgctaaacagctatttagtgagaaccatttcgttcttctggtttgtggtgatgaacatcaaagatgttttcaaacatactcccctaactccaaaacaaaaaaacacctttttctaaatcattaagtagattattaggtagggtgatactgattttaatgcattatttcataatccctggctaacgtggtgaaacccgtttctactaaaaatacaaaaaaattcgctgagtgtggtgactagggactgggttatgggtggctttgggtaacagatttagaactgttgatagcaaatgcttaacaggaaataggatgatgtgcttaagagtgttaccacattgacattctgataacatcagtctcagttaacatgaaggaaatgttaagacttatttggcttgtcgcgttcaaactcatgcagtatatgtaagtatatggagcaaactattgtatgcaatagacttta

SEQ ID NO: 74571 - DNA, 4017 bp, Homo sapiens
cctgggctcaagtgatcctcgctcctcagactgctaagtagctgggatttcaggctaccacaccctgctaatgttttttgtttttaataaagtctcgtcatgtttcccaggctggtctcaaactactgagctcaagccgtgctctaccctggcctcccaaagtgttgggattacaggtgtgagccaccacacttggccttaaaatattttaatttcctcaaatttacaaaggagaataagacctcatggctaaattgaacagtgagtgcagctagttcattgtttgcacaaggaactacagtctaattgcagttcctattttagctgatgaaacaaccagtttgtcatggaaattattttagtgtggtattatgtaccagatttttagaatccataacttgaaattagctttacacgctacatagtaaatagtggactacagaaacaaaagtattaacataaggaccttaatttttttcacctattttatgaccttaaatattcagtatttttttaattccatctgtattttcgttttgtcagtgagtggaataatgtgctccttatttaaaacatcttttcccctaacagtagaacctattaggtcttgtggtttgatcactcactggttttgagaatagatgagtcatctctagtatagatcttcatggtaggccattcaccttcagtctattactcatagcaaaaactccacggacttttttaagtttaaaacccatgaatctgcttaggttttataatctcagtatttgacatttgctcactatttcatctctatttgttggcccggtttttctgtattttctttgcccaaactgctcattatcaagatgaacatttgggatatactctttttgagaccctcaagggcatattgacatgaatttagttaattttagtcatctattgatgttgaagaattgtgaagacagtcactggtagaggtgattctatggaggctatcccatcccagtggaatgttaatgctttaccaaaatgtgttagctgcagtagacagatgtttctgtcttgggggtttagggcacaacatttctgaggaactctgactcaatctgtcccttctcctttcacagggcagcaaggcgaaccccatccctactcactggagctcagctttgatttttaacctcccttccccacccttccagaacacacacattccattccaaaactgattttataaagacattttaaacataatgatgcaacttggtgtgcactacagcaaatgtacaggtgttttttttttaattgtttccaaaaccgggacctggatttaagatgtaatttttaaaatttctatttctattttttctgcagcagttgggttagaggaggaggagccttttagcctctcataaactgacctctctacttcctcgtgtatttttaagattgattgatgatgtggaaagggctttgcttgtctgctactgaaaactttatccttgcggtttttgtggaaactgcttttggaaagagaaaagaaatgaactttactgacttgacatttttgcacctcccgtttttctaatctgggctatttttatttttgtttttttacagtgagatttttttgatcttcagctacagtaagttattccaatttttttttaacatttttcctgactttccgctgatttcctttttattgttgttactagttactattacttattattattatattaatacttatgatggtgatgatgatgatgataatgacactgatgatttttaaccggattaaaatcgagtttttctgaatgtttctaagaatttctccggcctcctgattgactttggagttttgcatcttgggagagaaagcgaaggcattagtatttttaagtggtttgatcacgtaaaccttttctctcccaaccccacccttgccctcatccccttccccacactgaaaagaattttactggctgttaagtctatgaccttatttttcctgatctttaacttaactgttttagagcatctctggacgtctgtatttttaattttttttatttttgtttttttatttttaatctttcatttgttaaatttttaaactgtgctgcaataaaatgtgtgtggtactacttaacacttatgatcgtgatggcattttccctgaaagccatcttcctcctgtttcccttgaaatcccatcctgcttttcctgtacactacccctcacaaaccacaagctgcagcaacatggatgcccagcctggagcagcagcagccaggatgacctggagccaggggggccttcggaacagatgcacacccttcctgggtgatggtaagaggtgtgaggtccacttggattcattacaaagactaggaaataaacccgtttaacagtttagctgatgtgtataggtcatagcatctggaagtgtttgaaacttttgtgtgtgcatcttgaggtgtttcccaagggggaccacctcagttatttgtaaactaatggaataatatgagttgctaattaacttgggctgattagaacattttggatacttggaaagagcagctgaagtttaaaatgaaagtggcttgttttaatgattagcaacaagaaaacatattggggagtccctttttttagattgttacaaatcagtaaacattttctgtcatttaacatattccttgggtttgtgacatttttggattatattctatttagactttttatctcattaatatttcacaagagtcaaaccataggagatacaacataatattaaaatgctgtctcactggagggcttttaaaaatttgaaaaaaggtaggctttttgacctcacaaagcagggaaatctgtttaacctctacatccaaattaggaactgtctaaggctgaccccttttacagtggtgactcaagacccagctagattttgggaattctaatgtgaattcatagagttctaatgctagattaggaactctaatgtgttctgatgttaagaaggagtgtattctgtgttattcacaggaatggtgtagagattagtaaagatgtggatagccaaagagaagttgagcaacccgtagtattttactcactgcagcaaaatgttttgataaccattttagagttgctctgataggtttcaagctgggagataattagattttattttaaaatatttctattttttgtagagacagggtctcgctatgttgtctaggctggtcttgaactcctgggctcaagcgatcctcctgccttgacacccccaaagtgttgacattacaggcatgagccactgcacctaacctggaataattttttgaaggcatattcggtactgttgtactagggtaaatcacaaacttgcccccttataccatactcggatgaaaagtgaaatctagttaaagtgaacaccagaggtacactcaaaacagaatgggagaaaaagcaaaagattcctggaagttatctagaaaaagaatgggaatctttattttttaaataagtgcaagttttattgatgctctctattgtatgagagctattttttcttctttgctgctgtcagtgtacggaagctgttcactataggttcagtttgatttattccttgttaattctacaaatttattatttttatgggacatgttgtgtttggggatataaaaaatagtttattatgtttaagggcttcgcagcttagtgagggagacacatgaatgaaataatgtccatatatgatgagaggtaaacacatatcctatagaagcatgccaaaataagctgggggcgttggtacctgcctgtaagcctgtagtcacaactaattggaaggctgaggcaggagggtcccttggcccaggatttgagagactgtagtgtgtgatgtgattatccactgcactccaggctgggcaacataatgagaccccatctttttttttttttttttttttgagacagtctcgctctgtttcccaggctggagt

SEQ ID NO: 74572 - DNA, 1060 bp, Homo sapiens
atcgcgacccctttcttaaggcttaaacatgtatattattacaggaacttaaaactaaagtttatcattgtgctgaactgttagaaatgaggttagggtaaaaatgggaaatcatgaagtaaaaatgttggcaaggagaaatgtcagaaattagtatttaagaactgttaatagtagttgaaattgattgacgggcacttttctttgaggttttcgaaaatgggttccttccggtcagtatgtatatcagcgcaccaaaaattctttgagttaatatccgaaactgtttgccacggtatttatatcacaattctaggtgtgttctcaactagataggcgtttagtaacattttcatattggctagggggaaaagttgaagaaggatggccaggttgcaggttttctgaccttttttttccccctcatgctagtgccactctcgggaatacttggtggttgatgttccttctgtagagaatttaaacagcttacgtttgtaattaaatctctagaggatttgacatggcattcgaccttgttttggatggaatggctgtgcgaaacaagcaaagaataaactccaaaatagctagttgctctaattttaaagactaaggggcaaattattaaatcttaataaagtgttgaatgtgagaggtgttggctggggagtaagtttgcctaggagttaggagaaatagattttaatcctccttaggcaaataaggggacttagacttttttttaaaacctatttgaatttttagtttctaattcaaattttttgttgccagaagcctaaaaactgtacagattgagttttattaaaagcagttttgttttttttttttttttttttttttttttttttgagacggagtctcgctctgtcgccctaggctggagtgcatgtcgtggcacaatctcggttcactgcaacctccgcctcccgggttcaagcgattctcctgcctcggcttcccgagtagctgggattacaggcgtgtgccaccgcaccgggctaatttttatatttttagtagagacggggtttcaccg

SEQ ID NO: 74573 - DNA, 1651 bp, Homo sapiens
ccggatgtgagacggtgcgcgatacaaaggcgagtttccacccagagggtcgtcccgtgcaatagccaataagcattctccaggcaataaatgacaggaaaactaaccagttataaactagtttctctcacgcatgtggaaattcgcctgcttagtctaacccactgctaattgtgattggatatcattgtgaggagcggttgaactgtctaattaggagcgggagcgaaaaaacgcacagccaataggaagattctcaggaatggggcggggactaggccttcgcctcggcggcagaggagactcgggggccattttgtgaagagacgaagactgagcggttgtggccgcgttgccgacctccagcagcagtcggcttctctacgcagaacccgggagtaggagactcagaatcgaatctcttctccctccccttcttggtaagtggagagggcggacgcagggaaggcgctgggtttttcgggaagcgagagggggtgtgggagagaagatgtgggaatccttccccctaactaaccgggccctcatttattctgcttgttttgggggattaggttgaagccgggggcagttttataggcctcagcctctgtataggtttaacctggtgtcctctaggccacgatcgccagggaaaatgtccttttttcgctcttcctgtgttaacggctgctttcctttcattttctacgaccgcgaggactacgggatcatgaaaatgaagatcgtgatgctcattaatatagtcgaagttaacgtagcgccgatgccttctattacctccgttcttcttacatgtaaaaagtgggggaggggaagggggaaggttaccaagtagatgtatcgcgagcctttaaatcctggatcgtgccgcgtggcctacgagaaaggtttaacaaaagattcagcattttactgataactttttattttatttctctctatgagcaaatgatggagctcgaagtagttattttcacttacatttgtaaaaggaaatattgtgatataactatattaatatttacagctgacttttcatctgcaggttacaaaacacttgaaatatataagttagtggaactttgcttgaggtaggtattaactctctttctcagacggaaactgaggcagaaaagtgttggttgctagggtcatattaagtcagtagcagcactagtaaggaatttgaccacgaggtcagtcgagtggtttttacctagttaatggaatacctagttaatatagttctaaaactactgtattgcaatctttgccaagaacctgatgacggaaaccacgaggtaactggaaattcccaaattgcgcttaagaaaaatactacgagacttgagaattttttaacgtaacttcctaagtgtaagatgacaaaatttgactttcgggatattctggcgttaattttcccgtccgcctaaatgtgggcaaaaattcacagctacgttatattaagcaaatattaacagtgcctattatttgctgggtgctgaaatttgataaaaaacttaaaagttaaaaaaaattgtttagatctttagtgtcacattgacttatctgggacatcgctttttttaatcctcacatgagatttggctaagtttatttttca

SEQ ID NO: 74574 - DNA, 2035 bp, Homo sapiens
atcgcttgagcgcaggagttcaagaccagacatgagcaacacggcaaaaccctatctctactacaaacacaaaaaattagccaggcatggtggcacatgcctataaccctagctacttgggaggcagaggcacaagaatcccttgagcctggggaggtggaggttgcagtgagccaagatcgcaccactgcactctagcctggacgacagagtgagaccctgtctcgaaaataaataaataaataaataaataaataacctataagattaggtaatggattaggtagtcacaaatataaattatactcaagtacataggaaattcattaagagtaaattaactcaaaaaagttattaaaatattcagcatcagcacaaaaccaaactcaaacttttgaatttctgtctcaatatctcctttgtttcaaagtggaaagcagatgcttactgtccttgatcaggatcttgtccattcagcatgtcgaacagaaaccgccttcggccttgctgctcctgtgggtccaggtctattactgtattaagggtaagagaaaaaagcaaagaatcatatactgttgcagtgtgagccccaagactttcattagtggtattcatggtagttttcataaaaagattagactccttgcctggatctagaataacatggaccaactgctttgaaaatcatttgtgtgtgtgtgtgtgtgacagattcttactgtgtcaggctagagtgcagtggcgtgatcttggttcaccgcagtctccatctcccaagttcaagcgattctcctgcctcagcctcccgagtagttgggattacaggtgcaccccaccatgcccggctaatttttgtatttttagtagagacagggttttgccacgttggccaggctggtctccaacttctgacctcaagtaatctgcccgccttggcttcccaaagtgctgggattacaggcatgagccactgcacccaggctccttcgaaattctgaatgaaaaagatttccacacttgaatcaaatatgagggtaggaaaaaaagatttcatgcacgactttctcaaattttcacttgtgatatgccctttctttaaaaactactgaaaatatgatccattaaaataagaaaataaattagaggataaccaggagataagaaatctggtataggagagaatttgatcgtattctccatgagcagcagtaataatgaaacagtgggctagagcagaacaagaggatggagagaggtcttcaggaaaaaaatagatgagtagataatttgacaggtttgattatttcaaaatttgggaagactgttgaaggacacgaaaataattacaatatgtataatgaaaataaggcgaatgaaaaattgctgcaaaaaatacgtgtaaagaaatataatcattgcatactacttggttctgcaagaattaatatttacatatccataataacagaaccaatttaaatggatttaaataaaaattatgatacaattacgatgggaaggaaagggacatgagtgtagtgcaaaagagctaacttttaaggtccgagataggaagtctaaagccggtgaatcaggagattgcaatagaaatgttactcagaagccaggtatggtggctcacgcctgtaattccagctactcaggaggctgaggcaggagaatcatttgagtccaggagtttgaaaccagcctgagcaacatgttcagactccatctcaaaaaaaaaaaaaaaaaaaaaaaaaaaaaaaaaaaaaaaaacaggaaaagaggaagaacaaaaatcaatactcagaaatatgatggaagtaaataacagaagaaatggctgagataggatgggcttggtggctcacgcctataatcccagcactttgggaggccaaggcaggcagatcacttgaggtcaggagtttgagaccagcctggccaaaatggtgaaaccccgcctctactaaaaacacaaaaaactagccaggcacggtggcgcacacctgcaatcccagctacttgggag

SEQ ID NO: 74575 - DNA, 3161 bp, Homo sapiens
ccatctgggagaagctctaaacaccacttgatattattgtttcttcaaattgataaattgattgggcagtggtaactaactcctgacaagatttcttggaaattacaaaaacttttcctcaatgagtttcttagcatttagggaaaaatccttcagggcattttgcaaaaattattttttaaaaaatgatccacttaacgtttgtgtgatacgtaaatacagaaagtctttctgttgttaatttccctgggtgaggaaggctaacgtgaatttttcagaaatgtaataatacataataatagtaaaataataattgcacctgaccactaattttaaacaagtcattttatctcttgatccctcagattattttgctcttgttttcttcatgtaaatactggtatactatgtgggctgaattaattcattaagttaataaggtaaatgtcaaaaaaaaatcagtattatgctctaactcaccaggggagtgatgctgaagaaggggattcagagtctgaaattgaagatgagacttttaatccttcagaagatgactatgaagaggaagaggaggacagtgatgaagattattcatcagaagcagaagagtcaggttagtcttacagagcaaagttcgtcctggcttcctaatctaatgtcatttctgaaaactactttttttagactaagaactctgtcgttccattctgttcccgcatgatgactaacgcttaattaattttcttccagactattctaaggagtcattgggtagtgaagaagagagtggaaaggattgggatgaactggaggaagaagcccgaaaaggtttttaaaaatgtgttgttttttattcatttgtctacgcacaaatttctaacacatttcaatattttgaggtgttagtattgatggcgtaatgaaagtaacaaaagaacactataaaagtgctttggagccacagatacaacttcattgactgaaggagaaaatgaggtgtggaatgtgtccatactctccagtgggcagtgctctgccaaactggatgctgttttcatctgcgcaagcccccatctttcctatagccatgatagccacatattcatgtaatactcaagaattagcctactcagtttccaaacctaaatcctataatactttaattttctaggcttcttccaggttaggcatgtctttataatgctaatctagttactctgaagccaaaccccaaacaaacgttttaaagcttaaaaggaaataaatattaactgctgtgttccaagcattgggaataggtagttttcataggttaccttatttaacccttaaataattctcccttttgtaaataaaccaaggttcagaaagtacttgcccaatattaaaacttgggtctgattccaaagtgtattctctgtactatctcatgctatccagtaatattaggtacctaaagcttacctattgctaactaataatgcctcttctatttagcggaccgagaaagtcgttacgaggaagaagaagaacaaagtcgaagtatgagccggaagaggaaggcatctgtgcacagttcgggccgtggctctaaccgtggttccagacacagctctgcaccccccaagaaaaagaggaagtaacttctgaactttggccctgagctccattcttcctccagccaacccctgaaaattttacatgacatagaaactgtatttttcctttcgttttcatttgaagttttgccatttgtgtttatgggtttagggggccatttgtgtggaccaatctactcggggaattccaggcccaccaggacacgtgccaatggccccattcagatggcaagggaggaggtgttcttgaagacaggaggaggctcccgctgttaataaatattgtttcattcttctctcttcctgtcaccttctgccaagacattgatggcttctgacatcttatttggtgtctcaaagctgtatttccaagacagtggtacaaggtgacccttaattacccgtatcatggttcttgaccagcacattcaatcctccaacctaccctactgccatgaccttccgcacatctctaagttttatctttgcaatactcaaggttctcggaaatttgctaatggttgtgataaaccatacagcttgagccagtgaggcagattgggctggtgccttcgtctgagttttcctgctttcctgcctcgtgcagattctgaggtatatctgctgccttggaagacataagaagcagtgatactccctggctcggttattttctccatacaatgcacacatggtacaatgatagaaggcaaaattgccactgtcttcttttttttctcatatatctaaggaagatatatcaggttgtgcctcatgtaccgcttctagtgaaatgtagaggaaggctcaaaggagtcaacatttatatctggaagggacaagtcatgccttgggcctagaataccctgatgagaaaagagaagaggaagggaggccatatctacaacacagcctctcggcactgctgctccttattttaactttgtcttgcattgtcctgtatttatcacagtttctgttgaacagcttttcaagtatttggggagtttatcttgccatcctccccttctggttctctgcacccacctgtcccactgcagttccttccgtgctctgtgactttaagagaagaaggggggaggggtcccggattttatgtttgtttgttttttctccttagcagtaggacttgatattttcaattttggaagaactaaaagatgaataaactgggttttttttgttgtttgtttttgtaaattcacctgtgaccgttcattttcagttcttgaaagcaagcctgcttcctgcctggtaaagtgctaaggtactggagaaaaatgcctttagctagctagttttacaaatgaaactttcatcattctaaactttcatcattagattgagagacactagacatcacagtaaaccaaattcatgttatagcaagctaactttataagagactttttactatggttccctcagagacttttagattggaatagcacttgttccttcatgaaaacaaatcttcagtcatctccttgtaaatagcatggaggacagcagctgcttgaa

SEQ ID NO: 74576 - DNA, 1026 bp, Homo sapiens
gaggctgaggcgggagaatggcatgaacctgggaggcagaggttgtgggccaagatcgcgccaccgcactccagcctgggcgactagcaagactccatctccaaaaataaataaataaataaataaacaaccctgaatctgtttgtgcagagcaactcaagtatctgctgagatagggtattacaagagtttaggcttaggttgcagactcagcttgacaggtaatggcatggtgaccttaaatattaaaggtgtatgtacatgttagttttatagttacgagagaatgaagggcaacgaaagcacttcagggatgatctgtgcagcaaaccaccatggcacacgtttacctgtgtaacaaacctgcaaatcctgcccatgcactcctgaacttaaaagttggaatttttattttaaagcacaaaagcacttcagactttttgaggggaggtactgttaacaaatgtgatggctgtatttgatatttttttcttctacagatggaacgagaaatgaggcacaaactgaaaacagcctttaaaaatttcattgagaaagtagaggctctaactaaggaggaactggaatttgaagtgccttttagggacttggggtaacctatcttatttttggcttgaagtttgactggtctgtcttttggtacaataaattattcttcctttaataataatttaacatatcatatccttttttcctatgactaataatctttgagacatccattttttcttgaaaatgtttaagggtttaggtgagtggctaactcttaagaggcttcctctggatgagtctccagtgagtatgctggagctgtttggaatggggagagggaagaagtttgtctgttgtggtaggagcagtctctctcgtgatgagctcagtcttaaaagtttgtctcttccagatttaacggagctccctataggagtacctgcctccttcagcccactagtagtgcgctggtaaatgctacggaatgggtgagtgtttcttactttcttttag

SEQ ID NO: 74577 - DNA, 2676 bp, Homo sapiens
tggggatgttataccagatttgaaaaatgaaaaaagaaggaatgggcatgcatggtggctcacgcctgtaatcccagcacttcgggaggcagaggcaggcagattacatgaggccaggagttcaagaccagcctggtcaacatggcaaaaccctgtatctgctaaaaatacaaaaactagccgggcatggtggtgtgtacctgtaatcccaggtacttggaaggctgaggtgggaggatggcttgaacccaggaggcgaaggttgcagtgagctaagattgggccactgcactccagcctgggtgacagaggcacaccctgtctcaaaaaaaaaaaaaaaaaaaaaaagcaaagtagagattaagctgcttagaagataaagtaaatcagtacaatttccctggcctgaaaaagaaatgtctataaatgctgttgcttttctgcagtacataccgagcatcaaatattaaggcacccggagaacagacagtaccagccttgaaccttcagaatgctttccgaattattaaagaagtacagaaacgttataaaactcgagaagctgaagagaaagagaaggaggtgagcctgaacacaggcaaaacattcttacacaaagaaggacatgtattttttggagacttgtaaggatatgtgacaattcacattaattttcttcttgcttaggggattgtaaaacaagactcactggtgatcaatctaaaccggagtaatccgaaactgaaagatctatacattcgcccaaatattgcccaaaagaggatgcaaggctcactggaggcccatgtcaatggtatggatgatctctcctgtacctaggctttctcttcagggcacatttgttaggaatgacagatcagataataaaatatgacaaagagccatccgccggttagctcagttggttaaagcatggtgctaataaagtatgacaaggaaatgctgggaggaatctacttacactgctgtgtggccagaaggaaaggaaagctctatacagctgttggtgtttcctctgaccctgtgcaaatcagccagaagagttgcagtgccttttggcctaacttaattatactgcttgacatttcttcattcttttccccaggcttccgcttcacatctgttcgaggagacaaagtggatattttgtacaataatattaagcatgctttgttccagccctgtgatggagaaatgattattgtcttgcactttcacctcaaggtatacctttctacttaactagctgtcagctcttgggcaagacacttcatttcactcagcttctttcctataaaatagtgatgaaagggctgggcgcggtggctcatgcccacaatcccagcactttgggaggccgaggtgggtggatcacctgaggtcgggagttcgacaccagcctgaccaacatgatgaaaccccgtctctactaaaaatacaaaaattagccaggcgtagtggccagcgcctgtaatcccagctacttgagaggccgaggcaggaaaattgcttgaacctgggaggcggaagttgcagtgagccgagatcgcgccattgtactccagcctgggcgacagcgtgtgaaaaacaaaaaacaaaaaagtgatgaaaaaatcacctctcacttaagaacatttaagaggattaaataaaataatgcctctaaaggccacaaggcctggcatctagaaggggctcataagcatgtttgttcctttggtgtgttatatggtggccagcaaatgttttatacgagatctccagatttctctttctaaaatgaagttttgctttagataagatttgttaccaacatgatttccaaagttcctgtaataagtaggagcacagcactttttcaaatgtacactgtttccattcccaagcatcattatttatgatgacaccaggggtggtttaattatttttgcatgcatgctgtggaggcccaagtttggatcactgccatttccatcacagatacctttgtgtttctgacttctgtgttctttctgttttatgccgacagaatgccatcatgtttgggaagaagcggcacacggatgtgcagttctacacagaagtgggagagataaccacggacttggggaaacatcagcatatgcatgaccgagatgacctctatgctgagcaggtttgtgaaatttagtattgtatttgcaggatagtgagggaggatgaggccaaatccaagctcagggattgtattttataaacaaactgggctggcgtggtgactcgcgcctgtaatcccagcactttgggaggccaacatgggcagatcacctgagggtcaggagttcgagaccagcctggccaatgtggtgaaaccctgtctgtactaaaaatacataaattagctgggcgtggtgggtggtggtagtcccagctagtcgggaggctaaggcaggataatcacttgaacccaagaggcagaggttgcagtgagctgagatagcgccactgcactccagcctgggcgacagagtgagactccatctcaataaataaatagccaggtgcagtggctcacgcctataatcccagcactttgggaggccaacacaggcagatcacgaggtcaggagatcaagaccatcctggctaacacagtgaaacgctgtctctactaaa

SEQ ID NO: 74578 - DNA, 1808 bp, Homo sapiens
tgttgcctcccaaattgtagctcttggctgggcgcagtggctcacgcgtgtaatcctagcactttcggaggccaaggcaggtggatcacctgaggtcaggagtttgagaccagcctgaccaacatggtgaatccccggccctactaaaaatacaaaaattagccaggtgtggtggtgcgcgtctgtaattccagctactcgggaggctgaggcaggagaatcacttgaatccgggaggcggaggttgcagtgagctgaggtcacgccattgcactccagcctcgttgacaagagtgaaactctgtctcaaaaaaaagaaaaagaaaaaaaattgtagctcctgacgagaggttagaggttagaaggataaaaactatatttattcattgtcaaacattttagtgtccaaaagattcaaagcattgcccagccgtttactaggttagaaaatgaaattgcctcttttaaataatgtgtcttcattctccttttaattctaggatggcccagctactgttctcacttctgtgaagaagaaagtgaagaatgtggggattttcctaaaggtaggaagaagatagataagtagtataggaagtttaggatataaagaagttaaataatattggctaaaataattaaaatttcattttttgattatgactttttccatagaatgaagatgaggaagaagaggaggaggagaaagatgaggcagaggaccttttgggaagaggttctcgggcagcattacttacagaaagaacaagagtaagtttactattttaaattacattgatctcggctgtcatatggctcacgtgttgtgataaattggattttccattcaccagaatgaaatgactgcagaagagaagcgaagagcacatcagaaagaactagcggctcaactcaatgaagaagcaaagaggcgattgactgaacaaaagggagaacagcagattcagaagtaagagttttcactgagcagtgagatcatctgagggttctgtgggactgcagaaatttctcagttgtttttttatcccactccagagctcgcaagtctaatgtgtcctataaaaacccatctctgatgcctaaggaaccacatattcgggaaatgaagatctacatcgataagaaatatgagactgtaataatgcccgtgtttggcattgcaacaccgtttcacattgccacaatcaaggtactgacattcagtgcatcaggtttcatccaaactgttgcttaaaatagtaattgtatttgccataaataatctgcattcatcatgtctcccacttttgactccttcagactctgttcagttactgacatccctcttgtcttgtcattctccttcctctttcagtttttttcacttagtagaaagctaaactagtctagaaacataatttgcctatctttctttcaacttcgtttaatcattgtttaacttttagttgtattcatggtacaaggtactttgagaattcagagatttttttgggaaaaggatacttcgttattaaaaagataaattatgtaaatttattagatttagattaaggttaagagcggtcaatttgtaactcctaacttaattttaacatctctgtaactactaatctctaggaaagaaatctgtttactttttatgcttttcctttgaacagaatataagtatgtccgtggaaggagattatacttacttgcgaatcaacttttattgcccaggcagtgctctgggcaggaatgaaggcaacatctttcctaaccctgaagcgacttttgtcaaggaaatg

SEQ ID NO: 74579 - DNA, 1084 bp, Homo sapiens
cgccatgggattatacagcatgtttagaggccaaagactgtctttgaatcctcttttctaactgagcggtcagcaggggtaaatcatttcaaacatgtttgcctgtcttattgtgaaagttgaaatgaatatgttatgcttgatccatgttagagatctttagccttttgctgatgtttatctgtttcttttcaggtttgggatgggaattgaattccgtgaaggctccctagtaatcaatagcaaaaatcaatacaaactgaagaaaggtaagtttcacatacaataggaaaatgcttttgtgagttacttcctttagctttattttcttttaggcatatgtctcacacctctccacattgtcacagccacagactgatccttgttttgctgttttaggaatggttttcagcatcaatttaggattctcagacctgactaacaaggaggggaaaaagccagaagagaaaacctatgccctgttcattggtgacacagtgcttgtggatgaggtgtgtattgtgtctaaactttggagtcttcatgaactaacttctgaggcacgtttgtggaccctgtggtttttttcttgctttgttaaatgctagctaaggggaagaatccgtgtgacagcctaacctaatgcagctaggaatagagactgtagcccaggtatagggaatgatataaacctttaaatcatattgtcatattgtggcttgaaccttgataatgataatatcaggaactaatactaataatgaaaccggttattcttttttctttttaataacagctttattgagctacaattcacatactatacaattcacccacctgatatgtacaatttagtgatttttagtattttcacatttgtgtaaccatcactacaatctaatttgaaaatattttcatcacctcaggaaagaaccctgaacctattagcagtcactccccatcccccttcccttcccccactggttcttcaggcctaggcaatgactaaactgcgttctctctaaggatttgctaaatatctgagcagttgatgtaaattcagtcataccctatgtggtctttt

SEQ ID NO: 74580 - DNA, 1206 bp, Homo sapiens
cgggcgtggtggcaggcacctgtagtctcagctactcgggaagctgacgcaggagaaaggcgtgaatccgggaggtggagcttgcagtgaagtaggatcacgccactgcactccagcctgggcaacagagtgagactccatccaaaaaaaaaagaatggggccaggtggagtgatttacacctataattcctgcactttgggaagccaaggtgggaggattgcttgagtccagtttgagaccagcctgggcaacatggcagaccatgtctctacaaaaaataaaaaattagctgggcatagtggtgtgtgcctatagtcccagttacttgggaggctgaggtgggaggatcattgagtctgggaggtcagggctgcagtgatccgtaatcatgctactgcactccagcctgagtgacagagtgagaccttgtctcaaaaaaaaaaagtgagtggactgtttagttcacactttgagaaacactgctttaggggacataaattttgattttaaaatgttactgagtttttttcctaaaagatactttaatatctcctttgtgtcttgttattaggtgtgaagatatgtgacgtgtataacgctgtcatggacgtggttaaaaagcagaagccagaactgctgaacaaaattaccaaaaacctagggtatgccatgatgtctattgtcattcttgagtcagttttcagttagactgtcagtggtcagtcttatttctttaggctaattgattgattcagccaacatttatggactagcaaactatactatgtgccaggcacatgatgttatcagagaaggtgagacagatttaagttctcccaagtgtataagagagatttttctagaccagtgtggtgttccagcccataggttttccaggatataattacagatgttaggaaatattatcaatacatactatatctcctctctccgtgcacatttgcaacttaagtactctgagatgtcctaatattttatttagagacagggtctcactctgtccaggctggagtgcagtggtgcagtcgtgcctcactgcagtctagaccttctgggctccagcaatcctcccatctcagctcccccaataactgggaccaaggcacgtgccaccacacccagctcatttttttattttttgtagaaacagggtctcgctatgttgcccaggctggtcttgacc

SEQ ID NO: 74581 - DNA, 2109 bp, Homo sapiens
taaaaatataaaaaattagccgggcatgttgtcacacacctgtaatcccagctgctcgggaggctgaggcatgagaatcacttgaacccgggaggctgaggttgcagtgagtgtagattgcgccgctgcactccagcctggcaacagagcaagtctgtctcaaaaaaaaaaaaaaatttatccaggcatggtggtatgaacctgtagtcccagctacttgggaggccgaggcaggaggattgcttgaacttgggagttcgaggttgcagtaagctgtgatcacaccactgtgctctaccctgggggtagtagaacaagaccctgtctctttaaaagtaaaaagtaggtggggatgggaggagaattaattttttccgtagtttagaatattattctacctgttactggtaaaacgtgtctaatgaactggtaaaacatatgtgtcttttcttccctatgacactgacagaatgaaagtaataagagtagctttgacaaaatgattgaagccattaaagaaagcaagaatggcaagaagattggagtgttcagcaaagacaaattccctggagagttcatgaagagctggaatgactgcctcaacaaagaaggctttgacaaagtaagaatactactggaaatagcaaatcaagagttgagaagacagaaatgtgatgggcttccataacagatagtgcaggacgtttgttttgggaaaactgtatgtttgtttacattttatcccctttggctgagcagtgtgccagttttattttttttccctgcctttcttctatctgcctttacaaaaaacgtctagagggcagtttacattttaagtggtacattagcttaacacctcttgtagtacacacaatgacctggcaaagagctatttcaaatgtttattcagttcaagaagagaatgtttgaatattctgcaaaccagtgatagtttgctaaataacagaaatatcactggtaatattcaaattggagagatgcatttattttgtaattctgtacttgcatgttagaaactcttgtcactttgactgcagatagatatcagtgcagttgtggcatataccatcgctgtaaaggaggatggggagctcaacctaatgaagaaagcagccagcatcacttctgaagtcttcaacaaattcttcaaggaaagagtcatggaaatagttgatgcagatgaggtaaatggagatgagagggtctttttactgttttaatgaagcagtaataagtctaccatgcaaatctgttggtgtgttcttcagcttcctttgaaattaagactgacacttaagttggtggtaattacatcatctccctttcaaaataatggtaagcctgcgttatgttttcttgaggtaacccattattttacttgagaatcataggaatagctgtaagtcctacatattgttctccaaatgtgttttgcctgcataccaatatattacctggcgcataaatcatttcctaagacttatacaaggatacattttgtcttcaaatcatagtgtccacacaccccgctttgctaccctctagtaagtgttactttatttctggatgctcttacagaaagttcgacacagcaaactggctgagtctgtggaaaaggccattgaagagaaaaaataccttgctggggcagacccttctactgtggaaatgtgttaccctcctatcattcagagtggtggcaactataatctcaagttcagtgtggtgaggtaagtatatgaagacttcataatatagcattttgactttagcctattttttctttttgttaaatctgtacaaatttgtggggtacactgaaatttggctacaagtatataatgtatagtgttaccaagtcattatcttgggtgtccatcacccaggtgcaatacatttttgttaagtatagtcaccctactctgctgtcaaacattgaatttattccttctatcttactttatgtttgtaccttttaacccacttcttttcatcctcgcctgcccccctacacacttacccttaccagtctctgttatctattttttccctatctccatgtaatccaattttttagttcccaca

SEQ ID NO: 74582 - DNA, 1113 bp, Homo sapiens
tgaagctccacacactaccattttttacctattggccaaaatttgatcctaatgaccatacttacctgaaaggaaggtaaaatatcagttctttgagaaggagaaatgaataattggtagggaactggtaattgaggaggtaataacgcagggttctgtatcactctgtcccttgttttatgcatttctgtatcactaaacattgatatacttcctataaacacaaatcgtttaactgatttgatggttttaattatagaaagttcaagcatataaacgtagagaaaataatacattgaaccccattgtcctgttctaataaattgtcgactcttggccgatcttgcttaatttgtatccactccagactccccagcctgattaccttggagttaatttcagacatgttatttttgtctataagtatttctgtatatctatatgagtccattaatttttgtatctgtaaataccgttgtcactgttgtctttttccatagacatggctctttggttatgaactaactgatactatcatggtcttttgtgatgacaaaatcatctttatggccagcaagaaaaaagtggagttcttgaaacagattgccaacactaagggcaatgagaatgctaatggagcccctgccatcacactgctaatacgagaaaaggtcaggattaataaagaatgtgtcataaatgtggaagaatcttcaaaagggatgaacagaaatgccttataggagtttgaaagaatgcgcaggggaaattataggtggctgtggttgtaattacaaagttctgtcacgtcttcattgttaggaggaaaagaattcaataatcctatcagttctgctgtaaaacaaatgagctatgaaattctggtgaacactgattttatgtctccattcttgaggacactgttagtttgttttcatctgtatgccttgattagagcaaataaccttaaatatccttaaggaaacttagatatacatcatttccagtttttatcaaatgtgaattttttttgtcatactgcccacctaacatgggatgttttctcagaatattgttcacttatgtgtttgagtttcttaactgtttctgaag

SEQ ID NO: 74583 - DNA, 1090 bp, Homo sapiens
ctccaaacccacttttaattttaaatactcttgattataagcccttaaaagctgtagtggttgaacctggtagttccagcagtccaaatacaagtacacagggttgtagagaactgataggctactaagctttttcttcccttttttaaaaataagaataggaattaaccttacctatctgcaagttaattttcagttaggtacatattttgaggctattgcaaataaaatattttttaattataattttcataacttatgtcctaaaaacaattgtagttaccatgtacttttaactgaatagaaatttcaaaaatattaagccctgtatctaagtaaatcgtgtcattttagagatgggaaaatggagtcagtcaaaaatcaacaggagaccttagaacgtactattgttttatgactcctggaggtttgagtctagatccagtcttgcctcttatgttttaagtgagagctgctaagagcagaaaggatttgcagcaccttctctgtattattagaatatcgcaggtggtagtggtggttcctggaaatgggctgcatgtttctttgtcctcttatgcctactagatccttcttcagggattgccagccttttcatgattacgattatttttaaccaagtaatatgattagtgctggtcattgggagaaacaaaagaggttatctaccatcccagggttccagctgccttgagggctgagtggtacaatatccaggcatatctgtatatcatttgagacctacctgttgggacattctgatatgagtggaccttgacttcatctgccttttttcttgaagaattccataaaatgtcaaaaatatttgttttcagaaggaatactcacattcttgtgagcatacaccaactgtcaggattggggtagtggaagactgaccccaaagaaattttatgcctttgaagaaactaatgaattaaagtgtcagtgcttctcttgagtggagctttctggctctttgcagatttttatggtggcttagtttcttgttctgggttgttctattaagattcaacagctatgttctgtggctcaggaaggattttaa

SEQ ID NO: 74584 - DNA, 2071 bp, Homo sapiens
cccagttacactgtagtagtcccacttttatcccacgctagatcccgctctttccgctcccccttcctttgcagatggggtggagctataacacccgcgcgcggcagctcttgtgggcggggcaggcgccgcctccttcgcttcgtctagggactgccgcctcggcaaaaagtctgaggtcctggaaaccgccgctgggctgagagttaataagggcggaggcagaccgtcacgtgacgacgtcgattcgcgtgcggcagtggcgaagttgacaaaccccgcgaaaatcgactctttgcatcgcacattttgttgattttccctcgtttttctttctctctttcccccgtccatccgaaagagggttggaaaaaaacaaaacaaacaaacaaacaaaaaaaaaacctaacgctgttgggacccggaagcggaaagggcatctttgaggtcgatacttccgggtcattgggagagtgcgggattcctgggccgagagcgggtggctgagccgggacctcgcgtgattctcggaacccgaggagaagcggcgtccggggctatggctgtgactctggacaaagacgcttattatcggcgagtgaagagactgtacagcaattggcgggtgaggaagatcctgtaatttttcctagggagcccccttagccatcccataataaccctgtttctcggcgcccttttttctctttcggtcaggaattcccgggttctgtgcctcacccttttcgttgctcccgaatcattcaccggaggcggccacgaacgctgccccttaacagggaatcccccgcattcaccctgtcctgcggccatcaccatcttccccgcgtgccagccttggtcatgcatagcagcacctctcgcagtctcttcccgccctagaagaggcaacatccttccctcctactccgtggtcacgtcttgctgccctcccctgccgtgttctcacgcactcgctctgtccctccagaaccacaatattccacccctggtcccgccaggattataaccgtcttcgtaaaggagagatggaagggcaaggaggatgtcaatcgggcttttagcgtttatcgtttgcggggcttttgctggagttaaaaaaagaaatactgctcacgcgcaaccgcctcatgttctaggccctgctgtgggttacagagagggacctaacgctgaaagcctgcaggcattagtaataacaaaacaaaacaaaacgatgcctaaaaccttattagttccttggtagcgtatccggggcacgtgttcattaaaagagctgtggcagttcccagttttttaaagattcggcagttttgctgctctaaaaacgtccacagttaaaacttatttttatgatgttaacttactaattgagcaaacatttggttgcattctgtgatgcagtctgagttggctagcttaagtcttgcccctgaaccctgtcatcaagggaagatacagctaataaagatttttttttaacctgaaaaacgttttgagaaaaatgatcagctctcatttcagcattgtaaattatctttcaaactggtcatctactaaaaccaagccattaaaattggtcgtttccttgccattcatattaaagctgtctgtgcatgtttcatcttttggggctaaatacattagataattgaaaataaaattgattctcttgcattttatgaaaaggaaaaataagaactaaatgctagatgaatactgaacattttattttttttaattttttgattaatttctaccaaatgattttttgcagcttctctcagtgtcatattattcaaacataatcgatgttagaaaaacattttaaaaccttgatactttctaatgatcagtaagtactaaaaatccgaagccctctcttgtacccataaaccctgaaactgtgaacctttggtatgaaaattgtttctagtcccagtgattcagattcatcaaataatttcattctctctataccattcatgaaaactaatctatagctctcacttcctctacatgacaaattaactgtggcctgaagacaggt

SEQ ID NO: 74585 - DNA, 1039 bp, Homo sapiens
agctgtctgtactggttccattcccaaacagttcaattctgccttattattttttttacatctttgccacttctgttttctgcgatcctccatatactgcaatagaaaaaatcagttatcctagaggaatagaaatcttctctggagtaattattaaagtactagtgtcttttgtttgataataaacacttattacatagataaaggattcatcctagtggaaaactgccattaagtgggatctctccaaaaaatattaggtggtttatataatagttcaatagtaaatatttgcctagcacttaaagtacttcaacattattttattttgggcatcacaacaattgtgaggttggaagactgggtattattaattattacccttatcttgcagatacagaaacgatgatacagtatgtcatgctttctctttctcatgcagcttaaataccaaaggaatgactttaaatcttgctggatgggactgccactcaccgctagaaatcggggatcaacagcaaactctggatgaccctgtaaccacatctccagttcagcccggcgaggggcatcctcacccaccagcaaagtaccatccaccttattgatgacagggatccgggtctccaggtccacatcaaggtgattaggctcttccatgcactccacctccagctgcaaacccagaatccacccccatgagcacatactcttctttgggggagggagggagggggagcagggccaatggtagtcatgaaatgactctagtattttccattcccccagtcccactgccttcatcaattattgggaataaaaagacaatctaatcgtcaggttaaagactttctctaccactcacctctactagcttctttctgttccccttcttcttatgaaacagtggatgtccatctcccattactccattcgccatcaacttgtgcttctggaatgttaacttcaatccttcctcctaggaagacaacccacccacccaagacatcatatggtacatgtttttcaaagtaaagat

SEQ ID NO: 74586 - DNA, 1017 bp, Homo sapiens
cacatccctcaaagcttaatctttactttgaaaaacatgtaccatatgatgtcttgggtgggtgggttgtcttcctaggaggaaggattgaagttaacattccagaagcacaagttgatggcgaatggagtaatgggagatggacatccactgtttcataagaagaaggggaacagaaagaagctagtagaggtgagtggtagagaaagtctttaacctgacgattagattgtctttttattcccaataattgatgaaggcagtgggactgggggaatggaaaatactagagtcatttcatgactaccattggccctgctccccctccctccctcccccaaagaagagtatgtgctcatgggggtggattctgggtttgcagctggaggtggagtgcatggaagagcctaatcaccttgatgtggacctggagacccggatccctgtcatcaataaggtggatggtactttgctggtgggtgaggatgcccctcgccgggctgaactggagatgtggttacagggtcatccagagtttgctgttgatccccgatttctagcggtgagtggcagtcccatccagcaagatttaaagtcattcctttggtatttaagctgcatgagaaagagaaagcatgacatactgtatcatcgtttctgtatctgcaagataagggtaataattaataatacccagtcttccaacctcacaattgttgtgatgcccaaaataaaataatgttgaagtactttaagtgctaggcaaatatttactattgaactattatataaaccacctaatattttttggagagatcccacttaatggcagttttccactaggatgaatcctttatctatgtaataagtgtttattatcaaacaaaagacactagtactttaataattactccagagaagatttctattcctctaggataactgattttttctattgcagtatatggaggatcgcagaaaacagaagtggcaaagatgtaaaaaaaataataaggc

SEQ ID NO: 74587 - DNA, 2683 bp, Homo sapiens
ggagaaacaacaacggtaaaatatagctgggaacttgtgctgatctgtgttttcagttatggtccctatactgaaagccatctcaggaaggatttatttggaattctctacagagggaccatcttttctgccttgggtagttaaacctgtagaaattaaaacctcacttgcatgcagtaatcattaactctcaggtaggtctcctgtgtagacattttcattgatatttgtctgtgtcttttcccccttggctctgtaattcttactcattacagagtacctctcactacctcttctgggcctttttttttttttttttttgcgtctactttcaatttttgtgttttcagatattctaaaacacattaaaaaataaccagttttcttgtgttcttctgatgtgttcttctgattattgttgccctacttttccttttgtagatggacaaggcgtgaacaaactgatttttatcgagtggtgtctacgtttggtgtggaatatgaccctgacaccatgcagttccattgggatcgcttccgcacttttgctcgactagacaaaaagacagatgaaagccttaccaagtacttccatggctttgtggccatgtgccgccaagtatgccgccttcccccagcagctggagatggtaagcaagattgcagagtgggtgaggatggatgccaacagaagcaactctgttaatttcttctactcctgtctcttgcagaaccccccgaccctaacctgttcattgagcccatcactgaggagagagcctcacggactctctaccgtatagaattgcttcggcgcttacgggaacaagttttatgccacccccttttggaagatcggctggcattgtgtcagcctcctggtcctgaattgcccaaatggtgggagcctgttcggcatgatggggagcttctaagaggggcagcccgccatggggtgagccaaacagactgcaacatcatgcaggacccagacttctcttttctggctgcccgtatgaattatatgcagaaccatcaagcaggagcaccagctccatccttgtcacgctgctctactccactgctgcaccagcagtatacctcacgcactgcctcaccactgcccctgcgcccagatgctcctgttgaaaagtcacccgaggagacagctacccaggtccccagtctggagagtctgactttaaagctagagcacgaggtggtggccaggagccgaccaaccccacaagactatgagatgcgagtatccccctctgatactacccctctggtttcccggagtgttccaccagtcaaactggaggatgaggatgattcggactctgagctggacttgagcaagctgtcaccatcttcttcttcttcctcatcctcatccagctccagctccagcactgatgagagtgaggatgagaaggaagagaagctaagtgagtgcatgtgacaggctgttggcccccttccctatttccccctctcttctctttcccttttctaaatgcatcctcttgagagagatttggattttgatttgataaaatgtcaaaagagtgccattctttgggcctttattcaaagcccatataataccattaccatatgacattattcttccatcttttctcacacattctatgggctctcttaccagctgaccagtcccgctcaaagctctatgatgaagagagtctcctgtccctcactatgtcccaagatggattcccaaatgaagatggagaacaaatgacccctgagcttctgctactgcaggaaagacaaagagcctctgagtggcccaaggtaacaaacagcctcatccctggacatgtagagtccagaaatacagtgtaacagtatatccggggaaaaaggaacatatggttctggatttttaaaattgtgtttattgctgcaagtttttttttttttttccaggaaacttcccagttgacttaggaatcttaatagtattaacttcctcttttctgccttatgatttttacccatcctggtagtgatggcactattgagtatcacaggatcacacagctagtactcagactcttaaaatggtatttctttctttccccattcaggatcgtgtcctgataaaccgtattgacctcgtctgccaggctgtactctcagggaagtggccttctagccgtaggagccaggaaatggtaacaggaggaattttggggccaggcaaccacttgctagacagtccctcattgactcctggagaatatggtgactctccagtccccacaccacgaagtagtagtgcagcttccatggcagaggaggaagcatctgcagtcagcacagcggcagcccagttcaccaaacttcgccgaggcatggatgaaaaggagtttacagttcaaatcaaagatgtaagctcagcatttgggcattgggaagtggggaaggaggctggaatccttgctgtaactaattttactaataggttactaaactcatttggttagctaattttaaaaatgagaaaacagagcttacaaagatccatttaggaagaatcatttttcctggttgttttccttattgaaccctattgattattaatcctattaatattcaacaaaagtttcttaaattagtatgcttaggaatagcaggattttgcccctgtgat

SEQ ID NO: 74588 - DNA, 1210 bp, Homo sapiens
aaaaggctggccgaccagatgacaaagcaattgcagcagaacatcgagtgttggataacttctctgacatagtagaagggtaagcattagtatttgttcttttaaaactctaacttgtgccgtgaaataactctagccttgactgaacccaatgggattcttaattgtaattatactcaaaagtgatagatccttagcaaaaataggaccagcagaaaggactccataaactgcataaaccacatgttgccataagatacatctgagggtgaaaatgaatgtcacttgtaaatggcttatttgatgttctatttggtttggtttacaacactcttctgtacagctacagtagctgagaggataactggtctcttgaaagataacagccagcagctctcatacgttgcttctgtggaagagccttaggcgctttcagccctggtttatcatctcccaatggtacctgacacataaaggtacttattttgcctgaaaacatgtcccaatgatgagttgccatgctaatactgagccaccaggtagggcagtgttgccctggtttgggtgccagtgagtttaacaaaacttctcacatgaagatctgaggggcatgtgaaacagttggcttaatgaatacctccccattccatcatgactgagaaatttctctttgacgatcacaccctcagtttgcctagtgtaggaccctcaaaggaaattgggttatttattcattgcaaatcgtttatgccacctgtctgctcagaagaacacagtaataaaaacaaaaaagcgtgaaccatacaaatgaaataataaaaagtaaatagttgggtaggaggaagaattacataataaaagtcaagaaaaaggaactgtgttgatcaaagtgtttcaaattcaagcaattacgaatggtacattgtcaatttcttataattatttgtattccattggatgctataccagactgacccaaagttttgcacctggcctgccattcctgtaaacacgaaattaaatactaggccaggcactgtggctcatgcctgtaatcccagccctttgggaggccacagtgggtggatcacaaggtcatcagttcgagaccagcatggcaaataaggtgaaaccccgtctgtactaaaaatacaaaaaaaattagccaggagtggtggcgcatgcctgtaatcccagctacttgggaggc

SEQ ID NO: 74589 - DNA, 1048 bp, Homo sapiens
aaaatggcaagacaaaagaattgcagaatcattcaggtaattatcaactctttactttatgtttttctataggttaatctaatccttttcaggtccaagggtttttctcaatccaagtctttgatgtctcccctttcccaggtctatctatccctgtgcctcgtggacgcaaaggaaaaaaagtaaagtcacaaagcacttttgatatccataaggcagattggatccggaaatataaccctgacactttgttccaagatgaaagttataagaagcacttgaaacatcagtgtaacaagtaagcatagaattagcagacattttccacctcaaacttctacagtgttactgagccagctcttcctctgtcctttctagggtactgttgcgggtacgaatgctatactacctgaggcaggaggttattggagaccaagcagaaaaggtgttagggggtgcgattgccaggtaaaattctgctatatttttttgatttatgccctaccttatttgagggaagattggtttgcttatttcattttatgctatctttgggatacctgataatttaaatctatatatcaggtctttaatcttatacttgacactagtgggaggaaatagggtagatgcatgagtatttaaattaatggatacaggaagatacctataataacctttgcaaggattctcactttaatttcctgcatttctgtgctgactctgccctcttatacctttagtgagattgacatatggttcccagtagtggatcaactggaggttccaacaacttggtgggacagtgaggctgacaagtcgctgctcattggagtctttaaacatggtacgtatcttctcctattctactcctttccgactgaagatttatgttcacggatggaacatttagcaaaatgctcctgagaaataactcagttatctgattgatcttcaataaatttgagtaggaaagtagttcttaaatatccagagcagagcagttagttcctataaatagatgttcaagaagggccagatggatagg

SEQ ID NO: 74590 - DNA, 1858 bp, Homo sapiens
attccgtgaagcttgccatattatacctcatgactttcacctgcaggccatggttcgttcagccggcaaactggttcttattgacaagttgcttccaaagcttaaagctggtggccataaagttctgatcttctctcagatggtgcgctgcctagacatcctagaggattatttaatccagaggaggtaagaaaagagtcatcctagcctgtggttactctgtcctcataaagcagcaaaaagtaggagggcctggatttaattagagttcaccaattgcaataagagaagtttttaagattctcactctcaacttgggtttttgaccagctttgatatgggagtactggtattgatcctagcctgctgttttggtctccacttctgcttagccacttacattttttttctgcgattcccatacaggtacttatatgaacgtattgatgggcgagttagaggcaaccttcgacaggctgccattgaccgcttcagcaagcctgactcagaccgctttgtcttcttactgtgtacccgggctggtggacttggtattaatcttacagctgctgatacctgcatcatctttgattcagactggaatccacaaaatgacctgcaggtaaaggaattcattgtcttagggactaactacctaacttgggagatttttcaacaagaataggatcttttagaaagacctttcacagagtttggaattgtttccttagttaagggtggcagttaggtcagggaatcagcaaacgttttctgtaaacgacaagacagtaaatgttttaggctttgtgagccatcgagtctttgttgcaactgcttatctccaagtcctgtagcgcaaaaacagccatagataatatgtaaatgagtgggtggtcccacctgtgtccccattgaactttatttttaaaaacagatgtccacacagactttagtttgctgacccctggtctacatgatggggtgataatttcatcttgaaattgactcttggttttgagttgatctcatggctgctctatagaggtgaaagaatcataaattggtattttgtatcctttcccttgctaattttatgatatctttctcctttcctttcgtttttattttaaaccaggcccaggcacgatgtcatcgaattgggcagagcaaagctgtgaaggtgtaccgcctcatcactcgtaattcctacgagagagagatgtttgataaggccagcctcaagttggggttggataaggctgtgcttcaatccatgagtggtcgggatggcaacattactggagtgagtcctcttagtttatagataagtttgtagtagatcattgtgatagagggaaacaaaagctatttgtacacagggatttgactaccttgtttggattctcaattattatttcttaaaatataatagctaaaatattatggcatggttagatattattctcttgatagtcttttcatctttctattggtttttacagatccaacagttctctaagaaggagattgaagatcttttaagaaaaggagcatatgcagccatcatggaggaagatgatgaaggctccaagttttgtgaagaggacattgaccagatcttgttaagacgaactacaaccatcaccattgaatctgaaggaaaaggttccacctttgctaaggcatgttctgtctatgccagaggctagaaaaacacagagaccggaatctctaggatttaattatgtttttatgctggggatggtggctcatgcctatattcccagcactttgggaggctgaggcgggcagatcacttgaggtcaggagttcgagacccagcctgcccaacatggtg

SEQ ID NO: 74591 - DNA, 1010 bp, Homo sapiens
cctccatttctaggaacacaaggtgctactcacaggaacaccattgcaaaatactgtagaagaactgtttagcttgcttcatttcttggaaccgtcacaatttccctcagaatcagagtttctcaaggactttggggatctcaagacagaggaacaggtaggaaatctatctgatgaggtactaactcaggacaaagaaggtgaagtttgtacaaggcagacatctgttgtcatgggtatctcaagggcctttctgaactccttataaccttgtgcctacatcatttgtggcatcatccaaagtatacatttcttagatagtggaaaactctaatttttccatgtttctacataatgtgagaatgttcgccctcatcttattgatttatttttctctctgtaatggaccacaggttcaaaagctacaggccattcttaagccaatgatgctgagaagactcaaagaggatgttgaaaaaaacttggcacccaaacaggaaacaattattgaagtagagctgactaatatccagaagaaatactatcgggctattttggagaagaatttctccttcctttccaaaggggcaggtcataccaacatgcctaatctacttaacacaatgatggagttgcgcaagtgctgcaaccacccatatctcatcaatggtgagggaatgcttggtatatacctgaacttctgtagtacctgtgtttactttccggatgattctccttggggacaatggatgcattgactcaaccaacctaatttggggtgcggactgaggaatgggagggaaatggttctccttttaaaaaagagactctaagcctgggcaacatgatgaaatcccacctctacaaaaaatacaaaaattagccaggtgtgatggcaggcatctgtggttctagctactttggagactgagcttggaggattgcttgaacccagaaggcagaggttgcagtgagccgagatcacaccactgcactccagcctgggtgac

SEQ ID NO: 74592 - DNA, 1184 bp, Homo sapiens
tgcagcttttaattttgttaaaatgatttcattcttttgtcaatttttagacatcagccaatattatgttctgtattagctattttcatttttattatcttgtatggttcagcattgtccagcagttgtggatttcattgttaatcaacaaaagatctggggcagagatacatgagctaggcatacagcagagtaaaaaatgtctagcctctcattcagtgagtctgtcattttcccaagaagctgaatatgttgaggaagcaatgtatcttacattcagtgatatggcactatttttcaggaagataaacagcggtggaggtgggtggtggtgcagtttgtattgcctattaaacatgccttaatataggcaagtaattcagaaaagctcctcatttaggtacatttttggttttttctgactttactgccttcatgcttagggacgcctcatcccaggcgcatacaagtttgacgctctgatcaccacttttgagatgattttgtcagattgtcctgagcttcgtgaaattgaatggcgttgtgttatcattgatgaagcccatcgactgaaaaaccgtaattgcaagctgcttgatagtctcaagcacatggacctggtgagttccacactgacttgtgagcagaaacacctggaataaaccgtaattccttgcggtattaaaataaccctagtttagcagagaagaaaagtctgaatcgtggtattgaacagtggggatgacctatgggaatggtaacctgaaagtcgtgtaaaagtcatacattttagaattgggaagtttagtgataaccagaagaggaggtgggaaactatattggttacctattattactgcataacaaaatactccaaaacttaatgtcctacaacaactatatttttcatgatcttctagctcaaccacttaggctgagttcagctagttggttcttatgatgatcttgcctggagtcagtattgctgcagctggcagttgatgctggtttttatctggagcacctgggttccacatggcctctcatcctccataggccagattgggctgctttgtgtggtagtctcagggcagtattccaagagggcaaaagtagaaacagtaacctttgagataggctctgaaactcacacagtgtcacttttgctacattcttgttcttgc

SEQ ID NO: 74593 - DNA, 1038 bp, Homo sapiens
tattgaaacaatttcttcctacatactctattttttttaaagatagtatcttttaacattttttttttcccatggtgaatctgcaggcagaactgcatcctggctgatgagatgggattgggcaaaactattcagtccattgccttcttgcaggaagtatataatgtgggcatccatggtcccttcttggtcattgccccactgtccacaattactaactgggagcgagaatttaatacatggacagaaatgaacactattgtgtaccatggcagtctggccagcaggcagatgattcaacagtatgaaatgtactgcaaagattcacgggtgagttgcatgtcttgggaatactatgagttagagaaagtcggccaaggtacctggtattttaagggctatatatgaatagaagacttttattgaaagtcttcaatatgcctatgcaaaaatgcctatggtttaaggcatttttgtatagcagtgtgcagggcatttttttgactttgctattttttttacctagtagacatttgatctggtagaagttctgattttatttatgaacatacacattttaagtagaattttgtcagcatcaatgaattttaatcacagtattttacaaaaattaaattcctttagccacttaatccatgcggtggtgagcttatttcttttcctctttttagtctacggaaattttcatcaagatcagtttctttttctaaatggtcgggcgtggtggctcatgcctgtaatcctagcactttgggaggccgaggtgggcttattacctgaggccgggagttctagaccagcctggccaacatggtgaaaccccatctctactaaagatataaaaattagccaggtgtggtggtgggcacctgtaatcccagctattcaggaggctgaggcaggagaatcgcttgaaaccaggaggcgaaggctgcagtgagccgagatcgtcacactgcactccatcctgggtgacagagtgagactgtgtctcaaaaaaagaaaaaaaaaggatca

SEQ ID NO: 74594 - DNA, 1793 bp, Homo sapiens
agcagatctacatttgaatctgtattttaattagtttatttttctcttttttctttttctttttttttggtttttttttgagaccatcttcactctgtcacccaggttggggtgcaatggtgtgatcttggctcattgcaacctccgcctcccagattcaagtaattctcatgcctcagcctcctgaatagctgggactgcaagcgtgtgccatcatgcccggctagtttttaaatttctagtacagacagggtttcaccatgttagccaggcttagtctcgaactcctgacctcaagtgatctccctgcctcggcctcccaaagtgctgggattacgggcgtgagccgcctacgcctggcacctttttcattttcaaatggtcatctaggtcttagccaccagtgaattcagctttcttttaaatttacttctaatttttttttaggctataaaccatcattttcttagaatttgtcactttatatttttccttccagtagcactttttggtttagcttagcaggatcataaagaaaatttctatcacatctgacactttatacagtgaccagtagagaacagcagagcctttttaagatgttaatgttcagtgggtgagctgggctttttcatgactttttcaagtgacttgatcctcccatacatcattctaacaggacctctgagttaaattctttcctctataaaattccgaagtttattctactttataagtcttcaggttcactcagagcctcagaatcttagatatccaggacacggtagaattcattgtctttaaatcctaacaagcatgcttcacataacgtattctgcttttgaagttggggtggtagtattgtgtgtttgtttgtgtgagttgaatggagaatgggccgggttttagggcaggttgttagctactcttaaattcttatcatttttcaggatctcagcctttccagccttgacagtcttatgcttttaatcatacctacccttctaaaagcaattggcctttagttaggcccctttggaatgtcttgcaaatgacgtgacagatgataatgttttcatactctaatactataatttatgctcccagtattggctaatactattctatatacccattttccccacctctgcaaaataagtttgtcatccattttatattacctaatggtggaaataaatagatattatgctggaaatatgtgacctggacaaatggctttatatagagagtgacctgagttactatgataaagaaaaaggtaaaagagcaagcagctggatcaattccagagattcgagatctgtgactaccttgaggcactttcacatattttgttggctattttaagttttctatgaattgataattagagattcttgttgattacactaggcccaatctaatccttgctttatacttcataagccaaaaatggagatgcagtaagtgcagtgatcatcttgaatagtgaaaataggagccatttaccattggtcactgccccttcactttcagtggaatacctacataaactagtacttactgtagttgaactttttagcattttctcttccttctttactcttagtacctctttttggtgataacctcttgttagctcctagcttcctggggctcacaaggacatttctttatcaccatgtaagtgctcttgaggtgcatctgcaatgagctctaggggcccagaagccagtataagctgatagtcctcatcctaaaggtagcctagctgccactgtgtcaaatttggc

SEQ ID NO: 74595 - DNA, 1902 bp, Homo sapiens
aataggtattgcctgtcatttctttcacagaagcacaaattactggggttgtcagccttggctgattcttcaaaatacttgtaattggtttctatatatgggtgtaaactttcaattttggtcattgacttcccttacttaactgcccttgcattgttttgttaggtttaaatatggttcatttattagttataggatattttgaaactgatttcctcaatgcacatgaagtattttcaaaactgatgatacactgactgctggtccacttgaggcattctttgtctttctttagctattgatggtttctgtagacctattattaagagagaacatttgttttctcaaatttctaatccagtgtgattagaaatagggataaaggagctttaatttccaatatccaggtttacccctaaacactggagcaagatgagtgaagaaatatgcctgttatatttgcggcgttcatccttgataagagtagttttggttgtatgttgcaagtagaagaaaaagtggaatggatggacaagtgaaagagatgaaggaatggaaatagcatgtgtttaaacccttgaaaaagtttaggtatggggccgggcgcagtggctcatgcttgtaatcccagcgcttcaggaggccaaggcaggcagatcacttgaagttaggagtttgagactagcatggccaacacggtgaaaccccgtctctactaaaaatacaaaaattagccggtcatagtggcgggcacctgtaatcccagctactcgggaggctgaagcaggagaatcacttgaacgtaggaggtggaggttgcagtgagccaagatcgctctactgcactccagcctggatgacagagcaaggctctacctcaaaaaaaaaaaaaaaaaggtttaggtataaagcagagtagaaaaatagttgcgggagttgtagaataaaaagaggtcttattttaaaatgtgaaatgtggaacatatacgtgtatttatggcaatgactcggtagagggattcctaagaatacaagaagcaatgaacagcagagcatatatggagagaaggacctctgttagaaagagacactcactggtagcaggtgagaagtcaggtatagaccctggtaaattcataggatttgctgttatgaaaaaggagaacacccatcggatagcttctaatttctttaaaaattttgaagtaggattctctgctaaaggtgaggtagaggagtgggtttactggacagtgatcttttggtcttattgtttggtttcctaactcatctaggatgaagagccctttaatccagactacgtagaggtggataggatattggatgagtctcacagtattgacaaggacaatggggaggtgagttgttgaggcatggagtaacgtgaacatcctcttagatttctgctggtgggtttgccaatcctttatttttcgggtatggatgcagaatcccttggactgaaaaggtatttctaaatttttctgtggaatcctttgaaagataatgggaggtaagagtgtagggagagatgctaaaaggaaagatttctgtaaagtcagacatgtagaggctaagtactgaaaagtcattcatcttggtctcatttttcctcatattttaaatgggagactcttgacatacagttggaggtggggtgttgggaaggggaaagggatacttcacaaattcctaaatttgtgaatataaaaatacttctacaggctcgctcctagctttctacaaatcatgttcttgagaatgggctacttcctgaactcaccattagttaaatgtctcttcatttgtcattaaaacagatctgctggccaggcgcggtggcccacacctgtaatcccagcactttgggaggctgaggtg

SEQ ID NO: 74596 - DNA, 1053 bp, Homo sapiens
aagaaggaggtgagggctttttattattattattatttttatttatttatttatttatttatttatttatttatttttgaaatagagtctaactgtgttacccaggctaaagtgcagtggctattcatagatatgatcgtagcacactatgaacttctgggcttgagctattcttctgcctcagcctcctgagtatctgggactaccattgtgcaccactgcgcctggcttttctctatcttaatattaacccgtaatgctatgttcacaggctttatttaatgagcacctttggatgtcagatatattgctaaggtgtagttgtgagagatgatggaggaaagttagctagaaaacaggaactgctttactggtgcttcttttacttacctgtttagagtggataaaggcttactttttccagctatcaggcctctattattgaagtaccagactagttccttaatctctgagttattaatatattcagagattattggtatgaagttctgcaatgtgtggttaaaattaaaaagttcattcttttacaaataagggactagtgactaatttatttcttttttcttagctcccttctggacaatatactgaagcagaagaattctttgtcaagtacaagaactagtacgtgatctgtgcaaaaagcttgtcaccccaaattccacagggtggtaaaaagttctcctgggtatcctgggtgggaatgtgtcccttttttatagtcttgtagcccaggttgctgtttttaatggggaaaaatggctattcagagagaaattcaggaattgacatgactcttattatttccttgtaggtaagtggggtgagggtggttcctgataaaatgtcatgtgattctctttaccttagtttagcactaagatcttgctactcaaaatatggcccatggatcagcagaattagcattacttgggtgctttttaaaaatgtgggctttcaagcacatcccataccaggtggtttgtatacaaattagagtttcagaagcactgacctaagagactgtctccc

SEQ ID NO: 74597 - DNA, 1104 bp, Homo sapiens
ccgttaggccagagaccaatattgggtatattagttgtaatttttctgaggtaatggagatgtatattaatggaagcatagcaaaaagatactaaagtttattttggcagaattcttggtttttctcacccctttcccaccaaaagaatacattttaaaaagtaggtgtaggttcaataagatttagtctgagcttgattcttgagggattaaagaactagtttctagcccccctgcttcagagctggattttatttaggccatttaactacaagcaagttgaaattgtagtatctttgtttctataggctggctcttcccaaggggcctcttctgggctctctgtagttaaagttctgagtgccagtgaagtggcagctttgtcatcaccagcaagctctgctcctcattcggggggaaagacaggaatggaggaaaaccgcagattggaacaccagaagaagcaagagaaagcaaatcggattgtagcagaggccattgcgagagcccgtgcccgcggtgagcagaacatacctcgagtcttaaatgaggacgagttgcccagcgttcggccagaggaggaaggcgagaagaaacgcaggaagaagagtgctggggagaggctgaaagaggagaagccaaagaagagtaaaacatctggtgcctccaaaacaaagggcaagagcaagctcaagtgagtactccttgctactgtgatgggacgtgcaagagtaagctcaagtgagtactccttgctattgggatggtacatttgagggcagagcaaacatctggtacctccaaaacaaagggcaagagcaagctcaagtgagtgctccttactactgtgatgggacgtgcaagagtaagctcaagtgagtactccttgctattgggatgggacatttgagggcagagcaaacatctggtacctccaaaacaaagggcaagagcaagctcaagtgagtgctccttgctactgtgatgggacgtgcaagagtaagctcaagtgagtgctccttgctattgtgatgggacgtgcaagagtaagctcgagtgctccttgctattgtgatgggacgtgcaagagtaagctcaagtgag

SEQ ID NO: 74598 - DNA, 1042 bp, Homo sapiens
taaagtttgtaggtgtaagtgcccaagaggaggttgttattgtttttctcttttagttttagttttgaagcagaaatatgagtgtctttctgctgtatgtccgtcctcagatttcctcacatttccctcttatattcatgctatttgatattaagaacagtacgtaagaagggaaaattttctctgagatcgccaactttgcctatttttcatttgtatttgtattcctacaacaggagttccaccatcttcctctgaagacgtagccatcttgctccatgaaggtcaggacaatctgacatgcacttgtttcttgcctctatacttgaagagtagtcctcttacattgtgtacatttttttcttaataggggaggggaggggagagccagtaccccccctccccttccctccctagaccttggagaagtaccctccattactttcccaagatggcagaccccatcatggatctgttcgatgacccaaatttatttggcctggactctctgactgatgacagctttaaccaggtcacacaagaccccattgaggaagcccttggactgccaagctctctggactccttggatcagatgaaccaggatggtggaggtggtgatgtggggaattcatcagcaagtgaactggtccctccaccagaggaaacagctcccacagaactttccaaagaatccacagctccagctccagaatccataaccttgcatgattataccactcagcctgccagccaggagcagccagcccaacctgtcttacagacatcgacgccaacatcaggacttttgcaagtctccaagagccaggagatcctgagccaagggaatcctttcatgggtgtctctgccacagctgtctcctccagtagtgctggagggcagccacctcagtcagcccctaagattgttatccttaaggccccaccaagctcctcagtcactggtgcccatgtggcacaaattcaggcccaaggtatcaccagcacagctcagcccctggtggcaggcacagccaatggt

SEQ ID NO: 74599 - DNA, 1056 bp, Homo sapiens
agtttcatgaacttaaaaccctagacatggattttgtgaacctactttcagccattcataagacatgttttcaagataggaagctttttaccatctcatgttagaatcaaaggataccatttagtttctgtgaggatcgaatggtttactccagataatgcgagcaagtataattcattaactgttttttgattagctactatatgtgctatgtcctgctggttcttaggggatccacagataaataaaacatagtccccaccatccaagaactttctcccagagaaagaggagctgggccatggtacagagttgtggagggtgtacattgcatacattcataacaaatttttatatatttagtatggcagttttccaggcatcttgagaagtgggcaactttttacaatttgcgcaaaggaaccatttgggccttcagaggatatattacagacttaggtcattataataaaatattaaatataagtgttttaaggtataaacaatggtgtgggtatttaaaggaggtggagggatcaagtcatcacaagttgctcagttgttaaagcgtcagaggttcagggctcacttaatggagtagaagacctttgagggttggtaggattttagctgcgagagattattggcattgggatggagaggacgtgttccaggcagaaagcacagcatcataagcaaagtcacacaggtaggaatcacattaagggaattgtgtagtctagttggactggaatgtaaaatatatgtaagagatggtaagaggaagttgggaatataaattggaaacaatgttgaatcccttgcaattgaccttttttatcttaaatatgagaaagttttcttgagaggggacttcagaacaaaaatcccattatagattaatatgttaactagaataaaggttgcaaaacttcctgggtaaaattgtatgatcactttggtgagattgtactataagccttggttaaaggtggttatttttgccaatagtaagtaaaaatatataaaacacaagaaaaatttatacaatagaat

SEQ ID NO: 74600 - DNA, 1013 bp, Homo sapiens
tgcttctacccatcttatgtttcagtaacatgtatttatgtctatctgcaactgatcttcttgaaaggatacagtttccaacaacaagatttgttctttgaagtaaataaaatagtttattcttttctgaacctttgagcagctagaggttaagtggtcatgagtggtactttctaaaagtgcacattacagaaagaggtcagcatggctcaatactgcattcgttcattgtcttctaagaggttgtcactacggagaaatctataagtgggcaatagatatctgtagctcattttacataattttatctattagacgacagaactaatctcttgcagtgtttctcatccatcataaacagtaaatgatgataaactccttttgagaggctataggaaatcttatcccatcccaaagatactggtaactctgccaagccaggaatgtttctttctctgccctctactcctcacgtgtcttttacagatcttcactggccaagaaggctttgtccagtgttaataaatataaatagcctaaacaatgagatgtagttttttcacttgataaatataaaattataatattgaatacacctttaagaactgcacatttatctccaccctcggttcccagaagcccttcttaagggccttagtctccatcccctggttgagaatcactgctttgttgaaaggtatggagagattgagatggaaaaatatagggtagaattaaaacaaaatactttatcataggacagacagtttattatagaaatgggcaagggtgaggaataatgtcaaataagaatgagagagttgggactctagatttccaaaaaaatcaagaactgtattaaaggtggtaaagctgcagaagaacatcagtttgtacttgtctcaaggggaagcagtagtttcacctttaagaaggagatgaagtgaagggctatactggcatatataataaagtatttttctacaggtaactgtattgttacttggcgatta

SEQ ID NO: 74601 - DNA, 1151 bp, Homo sapiens
ttgtctagtctcactgggaattagagtgatttcaagtgacatcgcaaagtggacactgattaaaaggtcaaatgggctgagtttcaagagatgggagaacaggaaaccgagtttagagggtgaggagtgtttgttttgagcgggctaagggtcgggaattgttagagggccccaggaattactgtctaaaaagccgtattggtattgaagggtcacagtgtcaaaaatgcacggcaaccttatgtgttgtggcagaaagagtgctttaaaaggccccatattccagctgggctgactcccacgatggagggaagaagatttggccccttttattaggtagtgggatacggtgtagtcactacaggagaggggttgacagggctgctagaaggccggggattcagagggaggcggagctggcctagcgcggaaccctccctcccaagtttatactcttcagggtgaagaattcagagtagatggtagggaatttaatctccaggactggtttcgcgtactatgagactgttcctctggccagcccccttttttcaagcaagctgcaggcttcgcctcggccctagaaaccggataggcctctccgtgcgctctcaacctaacctgcgggggagggggaagggagctccttatagtcccaccctttgcgctgttttgcgtcttttcgcctttggtgagtggcagtgcgcttcagccaatgatggcgcggggcgggcaggagcatcaggttaggttgcgcaggaggagggggaactggtgctggagagacagggagaggggcgaaccggccccccacagccactgcaggtaaagccacctctctcctccactggggtgaggcacagctcgttttctccttcagggcttgtcgggcctctcggcctgcagcttccgccctaacattgctcctatcccgggcatccacaccccccaccccccgcatcttcccgtcttggccatccccaccctggagggcacccccgctagctccttacctcaagtgcatgtacctcatttccattttggggtctccagttaccagaaatcttccgcctctgctgtatggaccttactggcaccaaccccggcagtatgagcaggtaatgtacccgggtcccccccacccccacccc

SEQ ID NO: 74602 - DNA, 1064 bp, Homo sapiens
gaagaaaatttattgcaaggatactgaatggctcaaaaaagtaatgggaatattagagaacctggtttagagaatggtgtgaaatcaaaggagggaagaccaaagagaaggtcaaggtcacactgctgaccagtctatataggatgctacagttggactctaatatctgccattgccaaatattgtctaactggttggtcctgggtctttgcattactcctgcaaagtcaagacttccccagcaggagtatccacttaaactagcctaggtcatgtgcatgcatacttcctctttgctaggaaggggaggaggcaattgaaccctatctccccaggctccatatggggagataagatccagctttccatggaaaatataggaaggggccttttggttgctgagcagaaaaaaactagcaaatgttcactatacaactcctttctggtctcagcagcctcctaactgcttctgtgtcctctgtcctctcaccccctagagccagagttagctaaccaaaatgtaattctgattacgttattccatgtttcagtggctcctcatccacctgtaagaaaatgttattcaaggctctccacgctctggcccttacctgtcccttcggcttcatctctatccagttccttcttcgcgatttacactttagcaaggctgaactacagaactagagtttcctctacatgtctcatgctgtttctcattgctatgctttgttttgccttccctcttcctgtccctgctgcctgaatatccctttcttacagcccacctttccctcccacctggtaacttttcctcattgtttaagaaactattttcttggctggatgcggtggctcacacctgtaatctcagcactttgggaggctgaggtgggtggaacacctgaggtcaggagttcgagaccagcctggccaacatggtgaaacctcatctctactaaaaatacaaaaattagccgggcatggtggtggacgcctgtaatcccagctacccgggaggctgaggcaggagaatcacttgaacccgggaggcagaggttgca

SEQ ID NO: 74603 - DNA, 1048 bp, Homo sapiens
ctcggctcactgcaacctccgcctcccaggttcaagtaattctcctgcctgagccttccgagtagctgggattacaggcgcccgccaccatgcttggctaatttttttttttatttttagtagagacggggtttcaccatattggctaggctggtcttgaacttctgacctcgtgatcctcccgcctcggcctcccgaagtgctgggattacaggcatgagccacttttctaagcaaaattaccacttaagattaagttgtgggtgtcaaaactgtgtttgcttactgaagaaataagatttgatattctcatatgtgaaaggactgtaacattcagatgaatgctaaatgctttagtgaactgtttgtctacagctctggaagagttaagctatcttctgagcttacattgagcctaatacttgggaggaaaacagaagacaaacatttctctcgagtctccactttcacctctagaatctctctacttctggagttggatttgagccagtccttgatctgcaggtcttcgcatgacctgtccttacattactgtgaccattgtggtataatatttactattttacctttagcatttgattcattgacagactatcatgtttcttatctcactttaactttttatatcccctcttacatgatctatgatcttttattcttttgtctcaccaagttggtgatcttttcatcttcctgtgattttgctcactttccttttcacttaattcactgacgttgtacacttttgcttctgtttagctgaaaccttttagggaatgtaatttctgtatttttagtagagacggggtttcaccatattggccaggctggtctttaactcctgacctcgtgaaaattgaaaccttttagggtatctaattttcaagatgtggtctttctttggtacctagcacccaaatgagagttgtctttctttctttcttaagagacggggtcttgccatcttgccccagctggtcttgaactcctcggctcaagtgatccacccaccttggcctcccgaagt

SEQ ID NO: 74604 - DNA, 1241 bp, Homo sapiens
cagcgaaaccccatctctactaaaaatacaaaaaattagccgggcgtggtggcgggtgcctatagtcccagctactcaggaggctgaagcaggagaatggcatgaacctgggaggcagagcttgcaatgagccaagatcacgccactgcactcgagcctgggcgagagagcacgactctgtctcaaaaaaaatttaaaaaaaataaaataaatgtagcaaaataaaataaatgtagctattcttgccagactcctgtcgattggttgtctttcagaggtatgctcagtggagtgagtctgccatggaggttgtcttgactgttagctttcagaattgaattcactgatagaggttgtcagtgattagactaagatgaattgtcattcattgataaataatacagaactatcagtctttcctaagagtatggggagttttgtttttttttttaaagtctcttttttgcaggtatataagaggaaaactgaggctgccaagaaagagtatctgaaggcactggctgcttacaaagacaaccaggagtgtcaggtaagagggataggatagaatgaatatttaaaccagtaagaagttttttggaagtgtttgttagcagttttaagaagtaaataccaccaagtgattgattaattgatagattgatttatgtcttcttttaggccactgtggaaacagtggaattggatccagcaccaccatcacaaactccttctccacctcctatggctactgttgacccagcatctccagcaccagcttcaatagagccccctgccctgtccccatccattgttgttaactccaccctttcatcctatgtggcaaaccaggcatcttctggagctgggggtcagcccaatatcaccaagttgattattaccaaacaaatgttgccctcttctattactatgtctcaaggagggatggttactgttatcccagccacagtggtgacctcccgggggctccaactaggccaaaccagtacagctactatccagcccagtcaacaagcccagattgtcactcggtcagtgttgcaggcagcagcagctgctgctgctgctgcttctatgcaactgcctccaccccgactacagccccctccattacaacagatgccacagcccccgactcagcagcaagttaccattctgcagcagcctcctccactccaggccatgcaacagcctccacctcagaaagttcgaatcaattt

SEQ ID NO: 74605 - DNA, 1753 bp, Homo sapiens
cacaggtatgaacgggtagatgaaattatttgggtgaagacaaatcaactgcaacgcatcattcggacaggccgtacaggtcactggttgaaccatgggaaggaacactgcttggtgagcagcagtggggcccaattcaataggtggagcacaaagaagaatcatttgatttcttactgagaaaaagttcaaaggtgtggtttcataaggtaatctgttatctgtggtgagcaggttggtgtcaaaggaaatccccaaggcttcaaccagggtctggattgtgatgtgatcgtagctgaggtatgtgcttcccaggcctccaaagcttccacatttttgttggtatcagttattcatgttgggtgtattctcatcccagatttttctcatttagatcataaacataatagaaagggctagaattgcaatcttgtgtaacttaaaaagcagctagtttttatttcctaggttcgttccaccagtcataaaccagatgaaatctatggcatgattgaaagactatctcctggcactcgcaagattgagttatttggacgaccacacaatgtgcaacccaactggtaaggtgaccagagaacaggctagtcctcaaggggctattatttatgattaaggacagaacttagtagagcttcacattgttttacactagtccataaatgagcttcacaggattcataagccacttaagcttgtatttaaactgttttatgagattctacaaatattcattagaaactcaacaggttctaggacccaaaagcactgctccctagggtttctactctcttcacaacccaaggatcttcctcagccattctgtgatgtattgaatctgccccctggtggttacgaagttatctatttaatctgtcaataattacatctttcaccccttaacagagcttaaaacacatgctgctagcattttgcttatccaaagaatactccctggtagcaactctgtgaagcaggcctggctaagcattagttactaaccctcagataatacagatccagtctattttaacaccagaatctatgccaattctgaactagtaattctaccatatactattctaatgttaagctctttttagaattggcatatttgatatgatgataggcagtcttcatttggtatgcattttttaacaatattaaaccctctaattccaggatttctggtttgcccctccttttacactgtttcaggatcacccttggaaaccaactggatgggatccacctactagacccagatgtggttgcacggttcaagcaaaggtacccagatggtatcatctctaaacctaagaatttatagaagcacttccttacagagctaagaatccatagccatggctctgtaagctaaacctgaagagtgatatttgtacaatagctttcttctttatttaaataaacatttgtattgtagttgggattctgaagtccattctggctctgctacttaacagtgtataatcttgtgcaactcatctctcagtattatatgtgaaatgggagtattacctcattgggttgctgtgaaggttcaaactaaatgagtgcatgggaaacattaaaatgatcattataggctaggcacagtggctcacacctgtaatccgagcactttgggaagccgaggtaggagggtaactgtagcccaggagttcaagactagactgggcaacatagtgagaccccatctctactgctaccctcc

SEQ ID NO: 74606 - DNA, 1055 bp, Homo sapiens
ggtttgtgtaagtcctccagaccctgaaggtgtactttcagaagtgcattgtgtgggaagaatacaggctgtactcccaaataactgagtttttttttttaaaagctccctccctcttagaatagcaaagtatgtctgtctctgagccacagtgaaagttaaagtactctgaaaggaggataatcttaggagaaaaggaacctaaactcttaggtcagtgttttattctgttctacccaagtctcctgcactgcttgccttccagtggtaaaacaggaaaccaagtctttactcagagaggaattacaattgttctgtagtatgaattatggatttccatgctacctgcctcccttaaaactcttgaaggaagctctaatgatagaattaggggagggtaataaaatagacattttgaaatcatttggaatttgaactgttggatctacatctggagcaccatcttgattctccctttttattttcccagacgaattatcaataaacacactgatgagtctttaggtgactgctctttccttaatacatgtttccacatggatacctgcaagtatgttcactatgaaattgatgcttgcatggattctgaggcccctggcagcaaagaccacacgccaagccaggagcttgctcttacacagagtgtcggaggtgattccagtgcagaccgactcttcccacctcaggtacctgtctgctcagaaaactcgtctcaacttacggacttatgtttgatagggcagccatacacgttaagaaagcagagcataattcagcaatcttgtcttgcttattgggaatggagggggatagataagcttttaagggaataggaaaaatcaaatggaaaagagggactcgggccatgaatctcagagttaaagtagggaagatgaccaaataccactttatgcagtggatctgttgtgatatccgctacctggacgtcagtatcttgggcaagtttgcagttgtgatggctgacccaccctgggatattcacatggaactgccctatgggaccctgacagatg

SEQ ID NO: 74607 - DNA, 1002 bp, Homo sapiens
atgatggcaacccagcttgtgaagtaatagatgataataatatagtcaggaaatatcatttggtaaccaaggcttcagcaaagtattaagatttttgtgtttgtgagtgttataggtaacactgttggcccccaacattgtcattttgtacactttgttgatcagtggcctgaattcattaaaattcacactacatgcctcaaaaagaatattggatcccagcctaggttgttgagtatattcctgtcctttattaaaatgtaggttgatagaaaggtggtagggatatttaaatctatcatgctaatttactttctttgtatcacagcaaggatagggaattaggaaaagattactcactcaatagagaaaaggtagatagaaaatccagtattatcttgacaaagcagtgaatgttttagtatgattgaggataggtaatctagtgctaaagttggtcacagaatttcctgcacaaaatgaaagatctgtgtatgggaatgctagagaatttgacttctcagaaatatatagaccaacagtggttgccttttttcattttcacttctcttcattcttagatctacggaatccagaggcagcattgtctccaaccttccgtagtgacagcccagtgcctactgcacccacctctggtggccctaagcccagcacagcttcagcagttcctgaattagctacagatcctgagttagagaagaagttgctacaccacctctctgatctggccttaacattgcccactgatgctgtgtccatctgtcttgccatctccacggtaatgacctgacagagttaggatttaccacttattttcagttcacggtcagtgtcttattgcccatacctcccctcgttctctagccagatgctcctgccactcaagatggggtagaaagcctcctgcagaagtttgcagctcaggagttgattgaggtaaagcgaggtctcctacaagatgatgcacatcctactcttgta

SEQ ID NO: 74608 - DNA, 1084 bp, Homo sapiens
actaccactccaagcctggccccaccagtgctgtttggcctaggaactgtggctgggaaggtgcctccaacaatgggatccagggaagccaaggagaagacagcccccctcctatttcagcctcctgcacccaaggcagtgcctgagaagcccatcatagacaagaagtagcaaactgtacattccttcttcctccccctgctccagaaggtgccggtactgaagatgctccagtaattggtgacccaaccctaggaagtagggagaaatgaaggaagggcataggaaaattttcccagtaaatcccctgatggtcacattaaggtaaaggttttggctggtcagtgtgccaagacctctccagcttctcattcatgatgacctctcaaagttgggaaacaagctgatttcttgccaagaggtctcccaggagatatttgggaaatgtgaagttcgtatctttaaggagcatttttggtcagcatggttgatgaactaatgatgagagagttaaggaatgttgctagaacatagggcttgctggtacctatgtgactaagaaagggacatgatgtaagggaaaaggcctcaaattcttgtgaatgtggacattctcgttaatattcttttgggctaatagtgacatagtgtgcagaggtgtaccagggatcatgggggatttcctagcactagtatgcttctagttttagataactccctcctttattccctggccccttgtattttccttatcttcctctttcaagacccctacccattttgcctatccgtaggctggggcttgtgtctttgtcattgtctggttcttaagagtcccagctccaggtggcgtcctccctgcctctccgtcttgtaatgagttgtagtatttactcttaacataggatcatttggaacaggagttctgaggaggagagagtgagggttttgctattgactgacttgaacgatggcttctcctcaagctgtaggctccagagcttcctaacctagtaaaatgtcaagaacagacgggagatattagtgtctttccctctatcattaaaggtgttttaaccaaata

SEQ ID NO: 74609 - DNA, 1032 bp, Homo sapiens
atgggcttctcaggcactgccttgggtgcaggaggctgaaataggaggggggctgtcttctccttggcttccctggatcccattgttggaggcaccttcccagccacagttcctaggccaaacagcactggtggggccaggcttggagtggtagtggaggtggagctggaattccagggcttcatgggcaggccatttgacaggaatgccacatactggttctagaaagataggggacccatacccaccagctgagcagaaaggtcaccccagaggagtggcactgggccctccagagacagctgccagccctttttggctaggctgcaatgccaaatgtaggtgctcaggtgcacctaccaaagggaaagggagaggagagaggagggggaagaagggtcacaccagggaagctggagagggttccccttgagaaagctgcagagaatctatgttcctcaggtacaaagaatgaggagggaagaaaaattccttagggggccatccccttgtaagcacagtaatttccaagctcagggactacagaaaagccactagggacataacatgttaagaacttagagaaaaagacaaaatcagggctcataactctgggaggtccttttgtgaagctgtttctgctctgtgggacaaagagcagcaggtacagaaaaacaggctcatgggatcgtggggtcatcttttcggggaaagggggagagccctgtggaggtgatggaaggcgaacagccagggactagagaaagagcagcaatattctgagggccatggggggcaaagggctgtacctggtggtgtgccaggagcatatgcttcttgagggtagcccgctcaagaaagccctgcctgcagaaaacacaagtgaagagcggcccctccttggggtgggtcttctgatgctcctccagagctgcctgggagggaaaggcctggccacacacttcgcaggcctttctgctgctgctctctcctggctcctttctcattgcctcctgcaggctcagctcctct

SEQ ID NO: 74610 - DNA, 1041 bp, Homo sapiens
ttcaatccaatcaagttgacactcaatattgacactcaatattaaatatcaaatataatattgggaaatatcatattgaactctacgttttggtgtgggagaatttattactgagacattggaaaatacactattgcattctttcttctggattgtttaatgtggtttagtttgtgagaatttggtctcattctctactcttgcagtggctgagagttatcttgagaggatactaaggaactgttagaaagttagtattttaccttaaactgtgtttgatcatacagtatggctatataaaagagaaaaaacaagaagaaaagaaaaaagttaccgaagcctaaacattataataaattctaattgtggcagcttccctagtgggagaaagacactttcaaacctcactcggagttcttgggcttctgagcattcttttcagggccagcttcacctcttggttccgcagagtgtagataagggggttgaggaaaggagtgatggccgtggggactagggcagctgccccatccagggggctgttggtttcaggcctcaggtagatgaaggcacagggcacatagtacacggtgaccacggttacatgggctccacaagttgaaaaagcccggcgccgcccatcagctgtgtggattctcaggatggcctgaatgatctgtatgtaggagaggaggatcagggagaagcaactggcaaccaccaccccaatgtctacaaacgtcaccagctcgttgactgttgtgtcagcacaggccagtctcaacactgcagggatgtcacagaagaagtaatccacctgattgggcccacagtagggcaggcggaaggttaggatggcctggagagccccatggatggatcctgccatccaggctccagccacaagcaaggcgctcagcttagcagtcatgagcacagggtagcgcaggggctgacatattgccaggtacctgtcataggccattagggtgtagaggaagcactgggtgctgcccaggaagtgatagaaatagagttgag

SEQ ID NO: 74611 - DNA, 1041 bp, Homo sapiens
atggctctgttcttccacctttctcactttcatcaaatgagagaccttgctacaaataggtcaggctgtgcccttgagttcctgaaaacctcagtgtctcaggaagtttgtgttcagctcctcctgcagtcccaggcacagtcctcctgtcacccacagcacagaagtactcagcagcatcactcacatgggttgatggtttcctcaggtagaaggaggtttcgctcttcttaaattcagcctcaaaacctctgatgcctttaacctgggtggcctctgttaggtctttgaggagaagctggaggctttggctagagtattggacataccagaagagagaaggaactccactataggaatagttgcacttcagttccagaggggcttcttcagagacagtgatgtggccatcaagctgggtcaccgactgggttctggttcctcctgcaacatcaacactctgttagtgagaccagaacagatctacctgtaatgagacagagtctctatttagattccgattggaacaatgttccttgtatggagacgggagcagggaaacaatattattatacttactcagtgtgaagaacattccaagcagcagaatgaccactaagagcatggctaggcagtgaggaagctgagagctctattctagaagatctcctgagtgggaaggaatgtgccagaggatggtgagtccctataatgaggaaaatctgggattcaagagttccctgcttaggtaaggcctagagaccactagtaagagctgctctcttgacaacaaccactctggtgttgatcctactcagaatatggacctcagtgagctgtgagataaagccgctcaggaaggacagaactcttcttagcagagacatttccggtctgtgagacattgccccctggaggtcaaatgtggaaacacactgagtcttttgggtttgggctccatttccttggtttgaatttcttagcagaataatctgatgacagtgttttcaggggtctgcttatgaggaagctattttaatc

SEQ ID NO: 74612 - DNA, 2214 bp, Homo sapiens
ccgtaactactgtcaccaggaggacaggaccttccccaggctcctgtctgtaccattgtaagctggaaaaaacacttgaggagttgcagtacacagtgagattttctccctcttggatgcttagaaactgagggctctgctccagcagctgggtgctcacccctgtttagaaacagagcagaaggaaccagggaagggaattagggattgtttcccaacctgaaatgatttttcctccctccttactcctttctcctccctcccttgctttccccctttcttccttcttttataattcctcctttcatactttgccataaaacaacttgccatcagggattttctgttaatttaattgggaaccttttcaactcacatgccaactgaatccaaagaatggacacggagaatttcaggaccatcttgtctttctatcacatggtggacatggcccctgactttagctgctcctgaaagagcccgtcctggaacagacttctctgggctagaagagtgcttgctgccacccactttgagttccatagaaagccaggagcctcagtgtggcagccaatggaatcattcactctccacccgccccttcctccaacccaaaatgtatgttgccttttgaaatactaccctcctgtggagagatagaaaagtgatttatttccaataatgctctgtttctcccaattgcatttggtaggcataaatatcaagattaaagtagaaatgtaactggggacctcacccactttctttttcttccttcccttccctcccctctcatcccttcatttcttcccctctggacactccttgccagtaatgcatgcttgtctaattattctcttgcttaagaaatcccagagtcaaacctagaaacaaaccacgcagtccccattgaggcatcatcaagcttagggggacttgtgaacaatttgtccaccaccaccaggccgaagtcaagataacaacttccagacccccagaggcgcaattacccaatacagcctcgagaacaagacacacaaaccctgcaccctgcagaattcctgcatgtctcccatcctatgtttcatttttaaaatctcatggtgaatttaaaaatgtaaaatggtactttagaatgctagtttgccatcttctcagtttgctggctctcatattaaacctgcttttcccatctaccctcggctctctgtttggctttcaagtggagagcagctggactggggtccggttacagaaagagtattgtgaccttattaaaaaaaatggaaaatatatccttttaaacattgatcatttaaaagccagaataaaagaataatagaaaataatgaaagtaccatcttatcatttctgatatcctcaacaagcgtgctgagccatgtagtatctgagtaactgtaactgtagtagggggcatatgtggtgtgaaatgatgctacatttacagggccatagagcatgagtgtcataaacctatttttactaaattaaagatgaacaattctgttgtagattatttaatttagaatacttttttgatattctactgcattactctgttattagatccctggttcatgcttatcaaagccctcatcacactatctggtaattgcacttgttgggctcatctacaagttccttgtggaaaaggttgtgctttttttttcactcttgtaaccccagcagttactagacagaaagatgtgaacacataatcatgaattgatatgtaaactgtttgtgcattggtatagtgatttaaggatatagatgttgtggtgtgagtatagtatgtattcaaatatcacaaaatcttgtgtaccgagaggattgtttcagccattgcatacagtcattagtaaagatagtcagattggccatatgactatttgttaatatcttaaatgggaaaatacaatgcatatgcattttctttttaaaaattttacctgtaagtgggtatgtgggaatccagattccttgaggggcttaaaatagagggggtcagcctgtggggctcatgggaacaagaaaagagctgctcaaggattacaagctattgactgcttctttgaggaatcccataacccgagccctttagatataatatgcttttatctgaaaagtagaataacgatttagcttcaagatggaaatgagaagaaaatttccttgacactgggattaact

SEQ ID NO: 74613 - DNA, 1030 bp, Homo sapiens
accaacatggagtaaacagaaaataattgggacacaggggcaataaaactcatatattattttcccatgacactcagaggactcttcccaatgctgagacatacatagcgggtcacggctgggtgtttttggacaaaggcttaatgcactccaacctgtgtggtaggaaggcacaatgaaacacatcagtataaaaaccctcttcttcctttttccctttccttggcactttgccatcaccacccgctgccatccacaatacccctgaaactcctttcaccaatgctgtttttgtggttaaatgctgtaaaactcagacacaaaattattataattacacaaatcaataagtaaaacaccatcaacctaaaaaacaaatgggtgaaggacaaatgaagaaagttaatcattgattatcagacttgaaaaaggattttaaccctctagtaataaaactgtaaagtattaacaaaccattttttggatggatatttaattaaagcttttgctcaaaatgttgacactcccaatgtgggcaagatgttggtaaaaatataaattgtttgatttttattggaagccatttggttaatgtcaaaagagtaaaagtattcgtttgagtgactatttccactttggggaatttactgtgaaaaaatactatatctatttgaacatggagtaaggttcatgatcctcagagaagaagaaatcccttatatttgattccttacaataattatgaaaaacagtattaccatactttcacttaattatttggctttgaacagttaagtacagtttagtgaggacacattggaatgatctcaatcaatgctagctcatggatgcttatggcagtcagctgatagaattagttaaaaagatgactaagtagtttaacagaaacgtagtaactattttttgggtcttccagtgccttcaagactgcaagtgtttgatattgtttaaacaaatctatcaaagtaaatgttttgttgtggagatcatgaatattcacttacaggat

SEQ ID NO: 74614 - DNA, 1096 bp, Homo sapiens
aagctctttaggttaaactacaaccctctcacctcaaagaatttgtgggccagggaagtcagtgacttatgtgaagtcttgcggctaattaatggtagagctggagttaggacacatgtctcacagttcctagttcgttttgctttgatgtgcttgaaattcagttttgacattaatttttctggatactactcccataaaatgttctttgaaaaatacttgcttctttctagtttttctcgcctggtttaaatattgtcctgagtgtgggaaccccataactgtcttgtgggttagaatttagatggaaggatttggggccctgtctctagtatcataagacatttaaccttgctgcttttttcttctaggttcactctttgaatttcctggataagagttctggagatggcagcttattggacacatggattttcttcagatttgcacttactgctagctctgctttttatgcaggagaaaagcccagagttcactgtgtgtcagaacaactttctaacaaacatttattaatccagcctctgcctttcattaaatgtaaccttttgccttccaaattaaagaactccatgccactcctccatatgcctctggctctgtttttattctttgctggtatcagaatcctttttttctcttcagtcctctgtgctgaactctttatgagttggtaacttacagctgtgaacctgcctccttgttttcattaagtatatttgaagttaatggcaaaaggcagtgctgacaaccctgggaaatggcagtcctttgtcttcttcctggagcaggtaatcctttactaatccttcgattgttacaggtgcttccactcttatgacagtgcattcctggaactgcatcattatgcactctgctagaaattgaactaagtatgtgctaccacatttacatctgtttcaacatgttttagtggtaaaagtgaaatatatttctcttaggcagtgtagacagagtgaaaaatgggggttatgtatgtgttgacttataagatacaatattttccaaagcaccttcacaaatattctctcattttattcttgcaattatcttaggg

SEQ ID NO: 74615 - DNA, 1009 bp, Homo sapiens
atatttttgaatgaatccatgacagaaagaagctcagtggatttcagtatttaaaaatgtatatactttagttttttccatgtttgttcttctgtgtttctttgtgaaattctttttttttttttttttgagacagagtcttactgtcttgcccaggctagagtgcagtggtgcagtcttggctcactgcaaccctgcctcccgggttcaagcaattctcctgccgcagcctccccgagtagctgggactacaggcacttgcccggctagtttttgtatttttagtagagatggggtttcactctgttggctaggctggtgttgaactcctgtcctcgtgatccactcgccttggcctcccaaagtgctgggattacaggcgtgagccactgcacctggcctgtgaaactcttttttaaaaaaaaaaaaaaaaaatctcagtccatctcaggtgttctgaagggtaatgaggaaaagaaggacagaactgtattggatcacagtttgagaattaaagttcctgatgaattgggccctgggtcagaaggaagggtgaactgggcccaaagggacaaaaccttgcttgaaaatgtgctcagctcccagggagatagttgccaaatgcctgtgccttgttagcattgttttgtttttataatggagaccattctctcacaagtcttaaaaaattcagtgtttgatcctagctggaacaagggggctacagggttgggcagaacattttaaactctgactggcagcactgtttacaaacatgaaattatgttggcttttcgaattcagttaaagtatagtaatctagaaaattacctcgggaaggggaacttgatgttattctgtgggctttgctgccacctagtggatggtatgtttcatgtgttgagcggctactacaaaacatgaggagttgagtttgggggaagaagctactgatacctgtgttaaaaaacctagtttctttccagtcattggggggcagcagaggtcc

SEQ ID NO: 74616 - DNA, 1298 bp, Homo sapiens
ggttccagctggtttggccagccagtgtgtattttttaagttttgtccgggcacggtggctcatgcctgtaatcccagcactttgggaagccgaggcaggtggatcacaaggtcaggagttcgagaccagcctggtcagcatggtgaaaccccgtctctactaaaaatacaaaaaattagccgggcatggtggcgcatgcctgtagtcccggctacttgggaggctgaggcaggagaattgcttgaacccagcaggtggagattgcagtgagccgagatcatgccactgcattccagcctgggtgacggagcgagactctgtccccgactccccaaaaaataaagtttttgattgtgttgcccaacttacttgtgcaattcatccatttttgtgtatagcagaagttctttttcattgcagtataatattctattgtttgtatatgctataatttatccattttactgttgatagacattagattgtttccagtttggggctatctgggtatcatttctgtgtatgccctttgatgtatatatgcattcatttctgttagagtagaattgttgggtcctcgggtatgtctgtgttcattagcatatttattttatacttctatataatcatttttttgtgttttgcttcttgtgcagtttgcctgagaatacagatcaacccacagaacaaagcggatttccaaggcatctccccagagcgagcctttgctgattttctctttgccagcaccatcctgcaccttgttgtcatgaactttgttggctgactcattctcatttacttaattgaggagtaggagactaaaagaatgtaagtgatgatcatagtccttgtcctataatgttgattttaggaagagaaattggatgggactggttttgatcatggttggccaggctcccatactgctattgacatttgcagaattttccattggtctgcaaagtatgcattaatatcatcataattcatcagtgctactgctcttggtcattgccttgtctttctgttcttcaaatcattaaggtaatagaaaattaatgtttgtagctagtacaataatttctgtaccaataactccacgaaaataactcggagattttggaagagacataaatggtaggttttgcctttagatttgttagttaatttttttctgattttgatctcagatgacttttaatgctggaccattgttttcatagcacttaaatttgatagcatccagtgtatgttgaatgaatgactgtgggcatttgctaatatgtgccttaaa

SEQ ID NO: 74617 - DNA, 1154 bp, Homo sapiens
acagagaatttaccttattcttttgaataattgcatgggatttcattgcatgtcagttgtatagtttaatccccttgatgtttagactgttttaatttttttttcaactttacaaacatactttcagaatgtctttgttctgtaagataaattcctttgtcaaaaggtaaaatcattttaaatattaatggatattgctagttgctctcccaagtggatgaatgaatctgtactttctacagcaggggtttacactggttacccttgcttcagtcattgtctttaatatttttaagggtctggatacctgaaaggatcaatggtgcttccatggtgtttacatgtttaagcataatgaaaactgttgccatggtgacaggctctggagaactagtctgatagttttctggcctttggattagatttgtttgttgctttttcttagttaatgatgggatgatgctagcctgaagcgagtttaggttttcttaagcaatgtaataatttatcacaggcataaagatacttcggaagagtgtattcctggaactgcctgtttttttttttttgtcaatggtgactgttagaatcttcaaggggatggagtgtggcagtggagagttctcatgaattatctctcttaggtcttctgccttttttgagacaaataagcagctgctagaacttcgagatcaaagatagtttatcgagaactgtgaggttctcaagaatgagcgtgctatctttataaactctgctacccattaaatgaatattctattagaaaataattcacatttttataactttttatcattcagcccggaccctttgttgttgcctcaagtgcatccccatctaggtataattagaaacctttaaatcagcagataagagagctttgtgggttttttggttatatatttttttctctgagaaagcctctaggtttcagtgtaactctgagaagtaatattttttttcctttaacagagtgcgaaatttaattgtacaacttgataaatttttaaatgtacctgtctaaccactatccagatcaagatgcaggacattaccagcaccatagatgcctccttgcatcttcccagttatcctctccctgtgaaagataaaaaccactatcttgccataga

SEQ ID NO: 74618 - DNA, 1042 bp, Homo sapiens
caggttatccacccgcctcgacctcccaaagtgctgggattacgggtgtgagccaccatgcctggcgtctgtccttgtgtttataacatgtcaagattgttcttactgtctagaatgctctgcccccagatttttacatggttggttccttatctttcaaatattggtcttaaatagcaagctcttaaagagaccttctgttatgattgaatttaagaaaagcttcccagtcactctttattatcctgttttattttcttcatagtacatatctctacctagtagttcctggtttatttgttaacttattgattatatgtttctctccataggagtgtaagttccttgagagccagactgttttgttctgtgccatattcctagcacctgaaatgatgcttgtcatgtagtagatgtttagtaaatattttatggaataaatggacatttaaggggatagagtaaatcagaattgctaaaatggaacagactgcttgaagaggtagtaaatttccatctttggaagtgcccagggagagactgaaggatcattggtagtggagcattttgaacaggcttttttttttgccttttttgtttccaatgcatctgagagatgtgatatccttatcagtaacacaggctctggaaagttgataattctccatctggaggtggcttaccagattctgtaagtggtgagtatactttggaaagcttcccacgtgattagtacgcctccccaagcatggccaccccctaccacctcttgggcattgtatacatcaaatggggtgttggtgtttatgacctctgaggtcctttccaactttgtgggactctgattcatatgttttcattgaaataatctggttaccatgatcacaataataataacatcaatttattaccttatccaccttcatggataatttttctttttttccctcatatttcctcaaaactcaacaccgtgttctttactccaatgaccactattaatagttttctatttcttcagatttttttctagattctaact

SEQ ID NO: 74619 - DNA, 1022 bp, Homo sapiens
aattccaaattagtaaatccagttgccaacttgatgtcttcacttgatgtctgatatgtaccttgaacttaacatgtccaagatcaaacctgctcatccagccatctgcctcttcaccagttagtacgtggtgtcaatgttggttgtggttttttttttttttttttttgagacatagtctcactctgtcacccaggctggagtgcagtggcacaatctcggctcactgcaacctccatctcccgggtttaagcaattctcctgcctcagcctcctgagtagctgggattacaggcacgctcccccatgcccggctaatttttgtatttttagtagagacgaggtttcgccatgttggccaggctggtcacgaactcctgacctcaggtgattcacccacctcggcctcccaaagtgctgggattacaggcgtgagccgccatgcccggccggttgtgtttttaaatgaagaaatttaagtttccggggtcccttgatttctcttatctcctgcatctgtttcatcagcaagctctgtcttctccaaaatatagcctgtatgtctttatttctgtccatttttactaccattcccctgagctctttgggtcctaagtaattcttctgcttctttttattttttatatttttgagacggagtctcgctctgttgcccaggctggagtgcagtggcgcgatttcggctcactgcaagctccgcctcccgggttcacgccattctcctgcctcagcctcccgagtagctgggactacaggcacccgccacaatgaccggctaattttttttttttttttgtattttttagtggagatgggtctcaccatgttagccaggatggtctcgatctcctgaccttgtgatccgcccgccttggcttcccaaagtgctgggattacaggtgtgagccactgcgcctggcctatttttatttttatttttatttttttgagacgcagtctcactgtgtcgccaggctggagtgcagtggcgcgatctcagc

SEQ ID NO: 74620 - DNA, 1032 bp, Homo sapiens
agaaggaaccttgatgagaacttttgatttaattttgtttgatgtttttgtttccaggtctggaagagtaggagcaaggcagggtctgaaagctgattttaaaaaagatgccttctccatgtagaagtcaccctgccttcataagcctctagggtctagaatgatttttcatggatgctttgaagaatgtggtttgctgaagagtgggcatggactagagttatagattatcagtgtaataaagccagaaggtttttttgagcaaatgactttcacttatgccaagacctgtttttgagcccgttgtggctgaaattgaattggcagactggactgcctttctcctctccagtgggaactaggtggcttgtcattgaagaaaaacctagtaaaagggcatattagtaatggggccaataagggggattaggatttccagatctgttagataacagataatagagctatagaaatgaaagcaacttcaagaaaagaagggattcatgataattcttagttgccacagaagggtatgatttacccttcttttgacagcattgactttcctaaatcctgcctcttctgccatttgttagcctagatcatcaactggagactggttttaatgggaaatttggacgcttatcctttgttttgattgttggcaaaggtagccttgttcctttttatggtgctggggtttctaactttcctgtggaatttcctgttgcaagagaatggaggagtccagtgagctgggagagggaaatgtaggcgatactgttgaaggattaggtagtgctgggtgctagatgtttgaatgccaggccaaggaatttggactttttttgagatggagttttgctcttttttctcaggctggagtgcaatggcgatctcggttcactgcaacctctgtctcccaggtttaagcaattctcctgcctcagcctccgaagtagctgggattacaggcatgtgccaccacgcccggcgaattttgtatttttagtggagacggagtttctccat

SEQ ID NO: 74621 - DNA, 1609 bp, Homo sapiens
ttccaggactcagaaggaccagagagagccggatacctctggttagctacgcggtccccagtaaagcttattcccctcttcctcccagtgtgtcttgttgccagagcaactgtgggcgtcaccgagctgacgggcggaaacagaacagaaagagtacacgtccccagctcattgatagggccattgcgcagacgcattaacttttctgagttgtagttgagtctgttgatgcagtccgcgtctgcgcattagttgttacgcgccctggccggcctcagcgcctgcgcaaattggcacaccggggagggcggagttaggtcacgagggtgcgcatgcgcaaacagcacatccggtgtggtcgacgggtcctccaagagtttggggcgcggactggagtaccttgcgtgcagttatgtcggcgtcggtagtgtctgtcatttcgcggttcttagaagagtacttgagctccactccgcagcgtctgaagttgctggacgcgtacctgctgtatatactgctgaccggggcgctgcagttcggttactgtctcctcgtggggaccttccccttcaactcttttctctcgggcttcatctcttgtgtggggagtttcatcctagcgggtaatggttctataagtgatcataataataatgtgttactttggtgtgctgcttttgttttcatagtactctatatcagaccaccgccccttgaagttatgagaagagcctgcattgcccttttgttgtgaatggggaaattgaggctcagaaagcttagattatatgcctaataccaaacggctccgtaggagttggacttaaaagtctaaagaaaccaccttcgtgccgctactccacttggtgatccacttcacttaatattggtccggggaaaaccctattccaactttaacttaggtttaacacaactctaaaattagtagacttttcaaatgaaaaacccaaccttgaatcatctctgtcatcttggcctaatcattaccaatctccggtgaaacgtttcaatgaaagtgcaaagaatataaatactggtgcttttcttgttgaatcatcctttacttgattttgccttttagctgctactactttttttcttgttgaggaagctgttatttcactgtcctgaacccaatttttgttcacataactctattttagccttatttttccttttgattccaggatttggtaaccttgtagactgctatatttagcgagaacagtctccatcaatttttgttaaaatctgacttttcttgcccaacggggattcagtgaatactgaaaacaggcgtggcctctatcactggtatcacctgctactttgactttgaaaacatgccagcattcatggtttcttttcagtgtgatcatcagtcaggtcatcagttgtattttcagtccaatatgaggcattatggtaaaagctttggcacatgttctttatccgtaaagagtttatggtctagttggggtacagacaaaatacagcattggaattgtctggaggcctggcacagtggctcatgcctgtaatcccagtactttgggaggccgaggtaggcagatcacttgaggtcagg

SEQ ID NO: 74622 - DNA, 1057 bp, Homo sapiens
ggaggaagaggggaataagctttactggggaccgcgtagctaaccagaggtatccggctctctctggtccttctgagtcctggaagatttaacggtttgcatctactttgaggcaatgcctggcgttcctggggtttgataccagcctgaccctaattctgttaagggcgctgtctgcagatgtctgtcacagatcattggaacaagtcaagttcatccgcagtgagacccggcgcggccaatcactgcacaggccccagtttagacttaattacttgggggagtgagtgggtgtggtgaggggcgggaggcagggaggaagcctgacctcagcagggttctgaactggaactcgggatctggccctgcaatgccaacatttattgggcgcctccttggggcctgacgttgtactaacttgtagggactctcacgtgaatcagatatatttgcagccttaaaagagctggtgaagggagggacagctgtcgaatgtcgtgcaaaaagcatatggtcaagtttagcagctctctttccgcaagctggtatcttgaacctggtgtaatatcccgggatgtcagcgtcgaaaggcccgaaagagcatgcctggttcaaccctactctctccaactcattttgcagaagaaactgaaatggtttcaggttttgtattttaacaagtgggattattttgagggttttaactgtttttttttttttttttttgagacggagccttgctctgtcggccaggctggagtgcagtgtcgcgatctcggcccactgcaacctccgcctccctagtagctgggactacaggcacgcgccaccacgcccggctaatttttgtattttcagtagagacggagtttcaccattgttagccaggctggtcccgaactcctgaccttgtgatccgccagcctcggcctcccaaagtgctgggattacaggcatgagccactgcacccggcctgttttaactttttttaagaaattaagttctggctttcgttgcccttttaatttcacgtgaatccgaccttctagacccagt

SEQ ID NO: 74623 - DNA, 1039 bp, Homo sapiens
gaccaggattactgtcccattctgagaccgtcagagacatctctgccgggacacatgccagtgattgaaaacacagcaagggccccactagctgaaaccaagttgcagagttttgagggtcccaccgccgaccgccggcccgccgcgagccctgccccctgcgcggccacgcccccttgctccccgcggcctcccgggtcagctggtgctggcgtcaggcgctgggcgggctcgccaggacctggcaaggcttgtttactatggccgatgatctggagcagcagtgagttaatcctgtccctttctctctttctctctctctctctgggccatgatcctgggactgtctgtggctgaggaacagttgtagacaccttcccgctcttccttttccaggtcggcctccggggagggcggggggtgggtgcgttgcttgctttgcatttgcccagaagaggcagcggctgagcctggggagccatgggagacgcgctcgcccgcagcccggggatcctggctttctaccttagtcctcgcgagtgcccctcattctcctctggcctctggagagattccatgttgatgtgtgagatccccgaaagcaagcttgtgggacgcgggtgcggaggtagcagccaggcgtgctcgtctcgacttgccccccagaacggcagtcgtggggatggagagagcctcctccctccgcccggcaaagagaagatgtggagagactggagaggtctccatcgcgctgaaattggtgtggaacaacgggcttgcaagtttctttagctgtcgcccaccgagacacgtagccgcatgtgatcctagttgataatgcttttaataatcgtaacaacatctttaatgcaatggtttcagatttagagctattgggatttgctaccactctttcaagggcatcaggtttgggataccacctgtaggtggtgtgactagcagttcgcaatctgacaggagtaagaaaaagttgctacgagaagaatgactcagctcccagccgagccttggtttcacc

SEQ ID NO: 74624 - DNA, 1067 bp, Homo sapiens
aaaacgaccgcacccccttggtgatggtgcatggttttgggggcggcgtgggtctctggatcctcaacatggactcactgagtgcccgccgcacactgcacaccttcgatctgcttggcttcgggcgaagctcaaggccagcattcccaagggacccggagggggctgaggatgagtttgtgacatcgatagagacatggcgggagaccatggggatccccagcatgatcctcctggggcacagtttgggaggattcctggccacttcttactcaatcaagtaccctgataggtaataaggagatggctccatccctcgtgacctaattcctggccttactgggaactttccagtattcatttccaaacttctctcattcccaggcgatttaaggggctatggcaactaccagagaatataatgtgtcttctcctctttccgcctttaacatagagttaaacacctcatcctggtggacccatggggctttcccctccgaccaactaaccccagtgagatccgtgcacccccagcctgggtcaaagccgtggcatctgtcctaggacgttccaatccattggctgttcttcgagtagctgggccctggggtgagtagcctgtagtatctccttaaaggaaggctataacgttctagaaggcccacagtgtctttcccacttattcctaaaaagtggaaattggcctagccttgttatttaaagctgttaatctgaaccagatcactttgttcaaggtttgagaaggttttttgtttttttgttttgttttgtttttttgagacaaagtctcgctctgtcgcccaggctggagtgcagtggtgcgatctcggctcactgcaagctccgcctcccaggttcatgccattctcctgcctcagcctcccaagtaactgggactacaggcacctgccaccatgcccggctaattttttgtgtttttagtagagacggggtttcatcgtgttaacgaggctggtctcgatctgacctcgtgatccgcctgcctcggcctcccgaagtgctgggattacaggcgtgagccaccg

SEQ ID NO: 74625 - DNA, 1077 bp, Homo sapiens
gtggagcagaatagctaccagagtctcactctgtctcccaggctgatgtgcagtggtgtgatctcagctcactgcaacctccgcctcctgggttcaagccattcccctgcctgagcctcctgagtagctgggactgcaggtgtaccccaccacacctggctaatttttgtgttttcagtagagacggggtttcaccatgttggctaggctggtcttgaactcctagcctctagtgatccatccgcatcagcctcccaaagtgctgggattacaggcatgagccaccacacccaatctgtgtgaaattttatgaaaacctgctggtgattcatgcccagtaaccactggatcccatccctgtggttcacccaacacctgcagcagggagaggtcagaaccaaagcctccaacataacccacagtggcaggcaagcccctctgaaccatgcacttgtccaggcaagcaccacatcttcacctgctctgtgtcacctagcacttggtagctgtcagcaaattctgtgggtaaaagggagaaaaggaggtggaggaccatggggagctagccataatgaatagtatcaatatctccagccttctgacctcacactgccagcacccttctccgctggggagctttttactctgatgaagtgcaaagcagaaaagtgcaatcttttccaatggaaaagattggtgatgcctgtcttgtactgatgattgtgcttacagagtaatattcaatagccaattattatgagttaattgctgatggctaagtaagagttatctctctaggtccttcaagaaaaacagaatgattccagataaagaaaaaaagcatttgattagaagataggagtttaggagttctgagagagaggaaggataccaagacacgggtgccaaaggacagtaagtgggcagaggctcccagcaccgtggtctccaacagagtctatagtcctttgccaaaaagaaggtctgctcgagctactctcccctattctcacctctggccaggctcatgcaggagcatcagagctatcatagttggggaagttggccagcagccat

SEQ ID NO: 74626 - DNA, 1021 bp, Homo sapiens
aggcaggacatggctggaccatggtgatacagctctgtgtgattcaagttctggcagagcttgtaaggctagagcccaggtctgccgacaccctgtgcttgttgcacacttgatttgctaaggctggagacaggcaccattgccatggggctggtcctagtcactggccgaggataagcccgtccctgtcccacattctagccccactatgcgggggtgctgttgtcctgcctgtgtctcatccccagctgcctaagctagggacactcaagtgcttccttccttgccccatcttcctcccaactggaggcctctgagcctcccctgtgccttgggccctgaagccccatatgtagtatagagcaaaggtggctcctggtgaagagagggtggaaaggcccttcagccccagggccatgtctgggttctccatgcccatcagtctctgcagtttctctacctgcccccagagctgaggccatctgcaagcccctgcccatggcccaatggggagcctccagccacaagttccctgtccttatcagccactgggtggttcccactgcatgaccctctatccctgccatctgtccccatggtttccagctcaatccacccctgacccatctgtcagctttttcccagggagccgtttcaggggttctgggcagtaggctgggcctggcctcagaacctggtggctcctgcctgctccttcacttttgtaaaaccatccccttcaccagaatggtattaactcctggtgctttgtactactggtccagctgccttgggctccttttctatattaataaagaaacgagtaaaaattaccggtggggatgatgtttaaaattgctctgatcactggtggtgctgaattcgcaacagcctgtgtgatgcctgagagaagggagtcctgagggttgcctgcctacccacgactccttctccttttagtgtggcgtttgcccgctagacccagcccagagtccaggtcagcacaggccctctcagccaa

SEQ ID NO: 74627 - DNA, 2005 bp, Homo sapiens
ggtatcagcagacgctgacctgctcaccgggacctgaatgtcatgacctcgggtcatgtgaggacgcgctagggttagtccccgacactatgggcccagcagcccggtgtcagcttctggaattggcttggctcctggcgagagcacctcggcctcgttctcagggccctccgatgtgggtctgcgataactgagatgcggggaacccaggttcgagcttcgctctgcaggcaccacccgctgcatgccttcgggctagcggtctgcgcgcggtgatagcaatgtcctcccctgtagtggccgagctgcctgcttcttggggagttagcataatgaatcccgtttgcacccacgcgaggacttctgctcccggtaaaggggctccatcatccttttacacgctcaggtccacagcgtcgcagggccctcgcaatggcttgggaaaccgctgaccacacggctcctattcccagcagccccgtgctgctgtcgcccacactacctcttccttgcggcttccggcccccgcagcctcagtacctctgctatctcttttgcagaagtccaggtaagaggcctttcgttcctgcaatattaggagtggtgtttcctggttggtttcatattttgttttgtttgggagcagggggaatatggagcagagttcttgtccacgctccacacagctctccaaaatgatagcatctctgcttaggatggattttcaattcagtggggaaatgattgaaagtacaacaggagagatgttatatttggttttctgagctgttttaaagaaaagcaattgtttcatgttaatatatggcaaaaatcatgatagtgatattcaaatggctgaagtttggaaaacagtgataaaagaaataacttcccagcatgaagggaagtcatggattcttactcaaagtaacttctcttcctaactattgataaaaatgagatgtcctttttaagcttgaaatctgcagacactaggctaacctggaagaacaagaagtagagagaacagaacccagtactggttattataaaaagatctcacttgctttgtgttcgctactgaataaatataatacaaggctttctttcacacaggttcaggcccctcctgttgttgctgcaactccctcacccacagcagtacctgaggtggcttctggagagactgcagatgtagtccaaactgctgcagagcagagcttcgctgaactggggctggggtcatacaccccagtgggactgatccagaatttactggaatttatgcatgttgatctgggcctaccttggtggggggccattgctgcatgtaaggggaatataccctggacatgggttagggatttaacctcatagatggcaattctttgaatggattcaggaagtagttgcagaagctctggggtcagaagagcagatgatttcaaatgagcaatagaggttcatgatacctagatgcactctgcctatatttcttaaagagcattataaaaccaccagatcatctgggattcaagaagtgtagatatttgaatacaaacatggggttagagtcaggggaccttattaacagtcatgaagctatcctggtttagaacagaggttcaggtcaggcacttaaacccctaaattgggaagccactagcattgcttttgtaaaggctagaactctgctttgaattatgtgtctttctgccacgttgctccatcaattatcttttctcccctgtgtcttcagcatttccctcctcactgccctaccccgaacatgtaaacatgctcaggcacacccatgtgttacctgggggaaggtttcttcccttcatccttagttccccttcacttactatcctatcttcttcctttgatggctgttatttattttgttgttgttaatttttgtggatacctagtaggtgtatatatttatgggctacatgagatgttttgatagaggcatgcaaggtgtaataatcacattatg

SEQ ID NO: 74628 - DNA, 2783 bp, Homo sapiens
cccaggtcccccaaaaaacaggtggtggtggattatacatggctttcagtagtggggtgatgaaaatgttctctctggtaaagcatgctgacactgtttatcttgtgtaataggccccaatcttcatctccttcttcattgctttgagagagatggccaaccttcctgtgcccagcctgcagacaggtggcctctggtggttccaggatctcacggtatccgatcccatctacatattaccactggcagtcactgctacaatgtgggctgttcttgaggtaagcccagattggccaagtgccaggcctgcaaagtgaactggggttggagggtaaagtagttgtacagaatggtcatccttcacttgctggagaaagagttgatgggtaagagattagagacagattcactgaaactgacagctttcccgacttttccaccccacttcttttggcagctaggtgctgagacaggtgtgcaaagttctgaccttcagtggatgagaaatgtcatcagaatgatgcccctgataaccttgcccataaccatgcatttccccacggtatgtaatgccttatgggctggctccaaggccttctgcctagcctagccacctagcaagctgaccagggatacagcttctgagtcccttctctgtgttctcacccaggcagtgtttatgtactggctctcctccaatttgttttccctggtccaagtatcctgtctccggattccagcagtacgcactgtacttaaaatcccccagcgtgttgtacatgacctggacaaattacctccacgggaaggcttcctagagagcttcaaaaaaggtaagggctcatcctctgtgaaaaaggactagggaaaggggtctaaaaataggaatgcaactgactctcttgcttctctttacacaggctggaaaaatgctgaaatgacgcgtcagctgcgagagcgtgaacaacgcatgcggaatcagttggagctagcagccaggggtaaatagtcctttcaggccaaattctgtcttttgtttcttcctttctgttcttcgttgaaatttgttttctcttctcccctcaggtcctttacgacagacctttacccacaaccctctcctacaacctggaaaggataaccctcccaatatccctagcagcagcagcaaaccaaagtcaaagtatccctggcacgacacacttggctgacttatgttctgtgcgcattctggcaggaattctgtctcttcagagactcatcctcaaaacaagacttgacactgtgtccttgccccagtcctaggaactgtggcacacagagatgttcattttaaaaacggatttcatgaaacactcttgtacttatgtttataagagagcactgggtagccaagtgatcttcccattcacagagttagtaaacctctgtactacatgctgcttcctgatacttattgaacagggaaatcagtgtgcacttcagaaaactgaagaatacccagcattttgggaggccgaggtgggtggatcacctgagatcaggagtttgagaccagcctggccaacatggggaaacgccatctctgctgttttacaaaaatagccacacgtggtggtgcacacctgtagtcccagctactcgggaggctgaggcaggagaattgcttgaatccgagaggcggaggttgcagtgagccaagatcgcaccaccgcactccagcctgggcaatagagggagactgtctcaaaaaaaaaagaaaactgaagaatagagtgagtcatgattgcttttgctggcccatggccttggaaaatataatgttttaacctggcattaagggtttaaacttccacccaggcgcagtggctcacgccagtaatcccagcacttttgggaggccaaggcgggcggatcacgaagtcagcagatcgagaccatcctggccaacatggtgaaaccccgtctctactaaaaaaaaaaaaaaaaaaattagccgggcatggcggcgggtgcctgtattcccagctacttgggaggctgaggcaggagaatggcgtgaacccaggaggcagagcttgcagtgagccgagattgcgccactgcactccagcctgggcaagagagtgagactccttctcaaaaaaaaaaaaaaaaaaaaaaaaaaaaaaacagtttaaacttccaacccatgcatgtgttgttctatgcacatttggattgcagtctagaggtgtggctgataagttgaatgttgagattgtatctaaatatagtaaccgcacttcttgatcccaagattactttaaaaatttcaagaagtagatgtgtgcaaattcttagtgataattaagaatgaaagttccaggctgggcaaagtggctcacacctataatctcagcactttgggaggctgaggtgggtagatcacttgagtccaggaatttgagaccagcctgggcaacatggcgagaccttgtctctgctaaaaagttagctgagcatggtggtgcttgtccatagtcccagctacctgggaggctgaggtgggaggatagcttaagcccaggaggttgaggctgcagtgatccaagatcatgctgctatactccagccttggctacagagcaagatcctgtctcaaaaaggaagttcatgtcatttttatgtaacaatccaacatttgactagagcagtttaagtgttctgttgtctgcctttgtgtagagcctggtttatcagccttcagcagctagcttgagagagaaaagatggatatactt

SEQ ID NO: 74629 - DNA, 3909 bp, Homo sapiens
caggctggtcttgaactcctgacctcaggtgatccacccggctcggcctcccaaagtgctgggattacaggcgtgagccaccacgcccagctgcttggctagttttttgtagagacagggttttgccatgttgcccaggctggtctccaactcctagactcgagccatctccctgcctcagcctcccaaagtgttagtactacaggcatgagccactgctcccagctgcacagtcctgtctcctaatatgatattcctttcccctaatgttctttagttcttaagtgttcagagcttcagccactatccagggcaccgtcaaagacaaatgcattgaggaaatgtagcaacagtctccatccctggaaagaccggtgtggcagggagagtctaaggattaaaggagagatagggatatgactgtgggactaatgtgcattttattctatttggctgtaggaacctgcccctctccattggcatctccatgcccattgtcaccatcatctatatcttgaccaatgtggcctattatactgtgctagacatgagagacatcttggccagtgatgctgttgctgtggtaaaggattttcactagcagaaggttgagggtgtcttgtggggtactgggtatattctggctcttgaaagtcctggaaagggggtagacagccttgaaaggagttcatttagaataccgggcttgcaagaaggtcctgttaaccccactgtggaagaaaggttggaatacctaataaggggaatctgggggcatgcccatccatgtctttcatcccttttagatcctgctaatgactcttccattcttttcccttagacttttgcagatcagatatttggaatatttaactggataattccactgtcagttgcattatcctgttttggtggcctcaatgcctccattgtggctgcttctaggtaagagtggcaacttttgtgaggggtgtatcatcaaagggctatgcagtggacagaacttacaggacccagcctttgattacttgtgttctccaaccgataccacaacctctttcttcttgtttctagcagaagcctgcagttgtcattaatcttaatactgagctccagtccatattatccaaatacttttgaaggaagggatggcagagagggagggccatgtggcaggtgaaccaggctgcaccgtgtccaccaattttctcagcttctcctatcttacctaacataggcttttctttgtgggctcaagagaaggccatctccctgatgccatctgcatgatccatgttgagcggttcacaccagtgccttctctgctcttcaatgtaagtgaactcaaggatgagactgaaagccagattgcgggggaaactttagtaacagcagaagcgactgttctagcttcctgaaagctctgaaagattccaatagaaaaactattggtggatcagaatgttcaccacgggcaaggcactatgctaaccgctacaggggaaatccaaatgctctaaggaatggtacacctctgctctaagataaggcaaaaagtacatggaatacactgtaatgattgattgccatgacagatagtgagtgatacggtgtttaagagaagaaacgatcacttccatgggagtagagggtgaagaattacatctagaagtgtgtgtgtgtgtcttaaaatccaccaaagtgttctcagaaaaaaaaagtgcatcttgatggctagggttgcaaatggtagagatgggctttaggtaggagaaatagcatcagaaaatcctgtgataaagcagtatgggttttaatacaggttgagtatccctaatctgaatatccaaaatctgaaatgctctaaaaatctgaaactttttgagtgctgacttgacactcaaaggaaatgctcattggagcattttggattttcagaacagggatactcaacatgtaggaggagataagagcgggttattgtaggttggagccattatggaaagggtcctatgcaagacttttgagggattgtttcgagcttgctttatacagggttaacttgaagaatgggttgaaaagccagttgagactactgacttataagagaggggataaggtactgaaactagggtgttaaagggattaaaaccagaagaggaccaggagactttgaggattgacaggggatggatttctggggtataaagggagtgaaaagcctttggattaacaaaggccctgagaagagctgacttaggctcacgcttacagggtatcatggcattgatctacttgtgcgtggaagacatcttccagctcattaactactacagcttcagctactggttctttgtggggctttctattgtgggtcagctttatctgcgctggaaggagcctgatcgacctcgtcccctcaaggtaaggcaactccatcctacctctgctccacctgaaacagctggagttgttgctacaagggactatgacaaagcactttatttagaaacctttgcctgggacttggtcgttagtaatgtgttgaaattaaaggtatggaaagaaggctcagtgcgctaatccttatgggaggtggggttattttagctgttaagaatcctgagttgtccactccagttatgtttcctgtgcccttagctcagcgttttcttcccgattgtcttctgcctctgcaccatcttcctggtggctgttccactttacagtgatactatcaactccctcatcggcattgccattgccctctcaggcctgcccttttacttcctcatcatcagagtgccagaacataagcgaccgctttacctccgaaggatcgtgggtaagccgtgcatccttaagtccgctcagctattgcagagcttggtttttgcctttttctgtaaatccagcctccaaagacatctttgccttagccccttcttatgaacccttcggcttagtggaatcactcccctcacactgagttccattcagtgacacttgaactcagcccagctgacctcttctcaattccaactcaaagttctctttgtagggtctgccacaaggtacctccaggtcctgtgtatgtcagttgctgcagaaatggatttggaagatggaggagagatgcccaagcaacgggatcccaaatctaactaaacaccatctggaatcctgatgtggaaagcaggggtttctggtctactggctagagctaaggaagttgaaaaggaaagctcacttctttggaggcacctgtccagaagcctggcctaggcagcttcaacctttgaacttactttttgaaatgaaaagtaatttatttgttttgctacatactgttccagacttttaaaggggacaatgaaggtgactgtggggaggagcatgtcaggtttgggcttggttgttttagaagcacctgggtgtgcctacctactcctcttttcttttaaaagggcccacaatgctccaatttcctgtctcctttagagagacatgaaactatcacaggtgctggatgacaataaaagtttatgttcctaaagtctgagtggcttcattttatatagtatctatctctaggacagctcccattagcctagaaacacaaagactaaaatcaatcttatgcttgaaagtatatccatcttttctctctcaagctagctgctgaaggctgataaaccaggctctacacaaaggcagacaacagaacacttaaactgctctagtcaaatgttggattgttacataaaaatgacatgaacttcctttttgagacaggatcttgctctgtagccaaggctggagtatagcagcatgatcttggatcactgcagcctcaacctcctgggcttaagctatcctcccacctcagcctcccaggtagctgggact

SEQ ID NO: 74630 - DNA, 1026 bp, Homo sapiens
tctctatagacgtctctcttctgtttcctgttcccttactggtactcttgctgccaaaggtgttgtaggccacttacctgctattatattaccatattctgtcagtcctttacttgaccatcttgaagtgggagaatgagccactaatcccctgccttccaatgttcttgggttccaggagcctctactcattttgagaattcctttgagggttcatcatttgcagtgggtgacattgccctggcactgtactcagctctgttctcctactcaggctgggacaccctcaactatgtcactgaagagatcaagaatcctgagaggtaggtactgcaccaccaactttccatagcagtgatagccatcatttaatgagctcctactacgtgccagacagcataccacaaccactatgaggttaattttaccagcctcattttaatagatgggaggcctgaggctcagagaagtaacttgtctatgatcacagtaacagggctaaaatatgaacttactcatgtatgctttgtaaatttttaaaggcatttttacatttgttcattaatttctgcattaattaaagcaggttgtattatatgcttatgtatgtttttaaaacagattttccttgatagatattttatccacccttatccccacatacatagctttgggatatagacttccagaaaccttcctgtgtttccctctgataccttccttgtttcctaaattcatactgacattgtggtatagtttcagtcattcaattaagtcaccctaccattattgctctgtagtctatatatagagtgaaaagagaactggacaggaagtcaaggacctagagttgatctttccactgacttgttggctaaccttgagggagttgcccggccatctctttgcctgtttccttatctgtaattgagggggttaaattctgtgatctccatggcctttcctggctctaaaattctatgattctgggaactaagatttgccagggagtggagtttcggtaaa

SEQ ID NO: 74631 - DNA, 1312 bp, Homo sapiens
ttccagttgctgagctgggaaggagggagcaatgaagcgattcgctatgctaccagtgggaagatctgtatttttttttccaactttcttctcggccacattctggggctactggtcaacctcacagcatgcgtgagcctcccttgttgaacttcttcaagtaattcaaattcaagtcgtagattgtaacttttttgttgggggagggataatggacttgagattctgataaaagctatgatccctttctaagaaaagatatgaaactttttcttaggtatgtctgtattcatatggacataacactttgaaagagaatttcgagcctcatggaggccctagttaagaaccctgataaaaggtacttttaaaacctgtacttctgagtagaaggactgggggaatgtgtgtggctcttacttctctattgtcccatcaggaaaaatgccctgtccccattctacaggaaccactcttagctgcaagaatctttccaagcacaaaagcaggcagctgagctgccaggcagtgggcaggaagtctggccttcatcctaatccttggccacacagcctgacctgctggctcagcattggataagtcacagcagaactcctcaaggttaacagtaataccacagagtcagagtgctgtgtcctggagcccatggggaatgggaggtaggagggagagaccatgacttttcagagccaagagccggaacaatcactaatcctgtacagttcccagttgcctcccactgctgtgattggacatttggatgtattttttatgtaagcagatctgcagtcactttgttttgtgtctcccatataaggtgctgggggtggggagtatagaggcctttgtatgataatggtgaggacattctggggccccgagggttccagtgcagagcaggtcagagggtctgtctttggctgaagggtatatatatcttggtgactggtactggaaaaattgcttgggagtctaaggccctagggtggtaagggtaagtcaccaatcagtattatttttctttcaggtctcttaaccttcattaactgtgcctatgtcaaatggggaaccctggtacaagatattttcacctatgctaaagtattggcactgatcgcggtcatcgttgcaggcattgttagacttggccagggtaagaaataatattagtagcaactaatcttttttaagcattttctgtgagccgcactcctctaagtgctctttgtgcattatctcatttcttactataaccttattcggtgggcactattattattctcattttatg

SEQ ID NO: 74632 - DNA, 1086 bp, Homo sapiens
ggggttgcagtgagccaagatcatgccattgcacttcagcctgggtgacagagcaagactgtgtctcaaaaaataaataaaataaataaataaataaataaataagtcaataaataagtaaataaaaaaaaataataaaatataggccgggcgcggtggctcatgcttgtaatcccagcactttgggaggctgaggtgggtggatcacctcaggtcaggagtttgcgacaagcctggccaacatggtgaaacctcatctctactaaaaatataaaaattagctgggcatagtggcgcacacctgtaatcccagctacttgggaggttgaggcaggagaatggcttgaacccgggaggcagatgttgccatgagccgagaccacgccattgcactccagcctgggcaacaagggtgaaactctgtctcaaaaagaaaaagaaaaataaataaaataaaatataaacaagccatgtatttccatttcagaatctgctgtggtagcaggtggtgaattggttgcttatccctccttttccctgcctacatccctggacagaactgagaagaaccttgtggcacacagctcagactctgagtctgaactagagctagtcctgtaagcttattccagtttggtgttatgactcatggttaccctgcagggaatcataaatttgtatttggggatcccattttcctgacaatgtggcagcatcctttgtgtctggtgtttctacttggaaacctggctatgttgtggttatgagccagccgcagagcctaggataagggcagaggttacaagctggggagaaggggcactaagctgttgagtggctggaggctggagtccagtggggagtaaaggatgggtgactggctgaggaggagtgacagatttgaaagatttgtggagggcaagatacagccactttggtcattttgtggggtgctgcacacttgtgtcttaaattattaacttagcactggggtggcctggagctgtgggtacatttttgcccagccctgtgataaggtttgttgtttattaggcagaaaggcaagcatttatataggacaggaat

SEQ ID NO: 74633 - DNA, 1091 bp, Homo sapiens
gctctgtcaccaggctggagtgcagtggtgtgatcttggctcactgcatcctccgcctcctgggttcaagtgattctcctgcctcagcctcccaagtagatgggactacaggcacacaccaccatgcccagctaatttttgtatttttagtagagacagggtttcaccatgttggccaggatggtctcgatctcttgacctcgtgatctgtccacctcggcctcccaaagtgctgggattacaggcgtgagccactgcacccggccacgagtgacttctttgcagattctttttttctccccctggggtcaaagcaggagtgctgctgcaccgagtcaagggtcaaaggtgatttcaggttatcctcttatagacttggcccagtgttgggtggggattgaattgcccctagaggtagaaggggagggcatctctgcccttgaggttaacttgcagttgcctccatattatcctaaccccatggtcccctcctgtccttggccctgaagcaggaggttgggctccacttcaagagcagtgcacttagctgggctctggggccagtggtcagctgtatccgctgaggtggggacaaaaagccctgtcagcactgctgcctgccatacccatttcctgctcccacagtcaagaggccctggaggaagctaggctttgaggaagaggagggctagctctcttcaggcagttccctctgctccctggtttctttctgtaggattcccttcctcattcaaactgagccttctgtgctcagtacagagagcagatcagggctagaaggtgggtcagagaaatcaggctcaggagtgggggaggtgggatactggtggacaaagagagggatacaaatggatggatagagaagtagagaagagactgggcacgccacgccggtgactcacacctgtaatcccagcactttgggaggctgaggcaggcggatcacctgaggtcaggagtttgagactagtctggctaacatggcgaaaccctgtctctactaaaaatacaaaaattagctgggcatggtgttgaatgtctgtaattctagctactcgggaggctgaggc

SEQ ID NO: 74634 - DNA, 1340 bp, Homo sapiens
agtgacctggcacacagttgtcagttaaaaatagtatctattactgcaagttatattcatatcatatgcatcttattgatttctaaaagctttaccttccgcatgctgtctttggatgacttaaaagcagtttacattttacttcacaatagctcagggatcagaaaggagggctgagccttttctttctgttttgcaagagaggtggaactttcctctcagcaagaggataggtgtccagaagtccagctccacccgactgtcctttcctcagagccaaggtgttttggcccactgttcacaggtggacatgactgttcttgccttacctacacttgcccacactgagacctagttgttttgccattcaggacactaccaggacatttttaccatctatgccttcagtatgtcccctgtaccagtgagtcagcagtacctggcagttcagggctctttgtttacagagtactgttcttcagggatcaggcaaagattcttcgtgtcatacacatgtggccacagtgaattgcatgtagtgggttcttcaataaatgttggctggatgaatgaacagaagatatgattccaggttcaacttggctgagaagggtatttcgtgcttttgcctttcagggtgctggtgggggctgagggttgctgtgggaagggggcagacagcttaccctgagtctgccagagccgctgtgggctgtgaaggactttggatctctgtgtgtctgagagctttggccaggtgtcctcgtgcagcttctcctggtaccagaatgactgatctcatgtacttgtggctaatgaggtggaacagtcagatgctgggccccccaacggacttttgccctttgaaccttctacttggaagctagttgcctttttcagagggcttttcccaagagccatctgagggtggaggtgaagaaacttaccttttctggcccatattcacctcaagaaataggctttcatcagagccttgggttctagtgtgggtttgttgtgaactttggaacaaactcttgaccagcagtgaaggggtagacctttatgctgctttgatcatcaagtccctttgggggctcatccttgctctcttcctttctatgttctatgtttctatgttcctttctttttctctctgcctcagaagaagctgggcaggtagcctagaggaggttgcggaagatgctgggcagcagtgggtcctaactctggctgtggattggaatcatctggagaattaagaaaacaaggccgggcacggtggctcacgcctgtaatcccagcactttgggaggccgaggcgggcagatcacaaggtc

SEQ ID NO: 74635 - DNA, 1062 bp, Homo sapiens
tggaaacctggaagatggtgagtggaagggagtgaattgagaaggaatgaatgactacctgtgtccaatctgctaagaggtcaagctaggtaaagattgagtatagttgattggatttattgatatgaaggtcactggtggcttttcatgtgggctttctcctaaggcaatgaaatttcagggcagtgagggtgaaatcaggtttcagaaatatcatttattcacccagcaaaatgtattaagtgttactgtgtgtctagttcaggactatgcccatgggtacaaggataactgttatccactctctgccctcacacagctctcgtgggtgggagagacatatgtacactgttctaatgcagtgtagttaattggggaggtgagagcacagagcaagggcagcataccagaggtggcaggtttacactcaaaaatagcctttctggaggagctattaagtttaaaataaggaataaaatgtcatttggaattggcaactcagagggtcaaaggaaaacttttgcagggtgaaagaggaaggagttgcaacatctcagactgcattgtagagacccaggaacgggaaggaatgtagacatgctcttcagatgaatgattctgaaagcatggagggtgattgttagaggaaaggaccaaggttgagggacgattttatgaaaaagagttaagcctgccttaggttggttgaggtatgtttctggaaaagttggatgaaatatctctaccctacaatgatgccttctccatggctgtaatgattgggtgccctgagtcagacttctttttcttgaacagtgtaggggatacccttatccctttggaaggcactggtgcatggtggtgaacagcgtggaatcaggcaggattcaatcaatgctaggtcaaatttattagcctcagtttcctcttgttctccttctccttctccttttcctccttctccttcttcttcttctttttttttgacagagtttcactcttgttgcccagtctggagtgcagtggcgtaatctcagtttactgcaacctccgcctcctggg

SEQ ID NO: 74636 - DNA, 1109 bp, Homo sapiens
cagctactagggaggctgacacaggaggaacgcttgaacccgggaagcagaggttgcagtagccgagatcatgctactgcactccagcctgggccacagagcgagactctgtctcaaaagacaaaacaaaacaaaacaaaaagaatacatgcaaagtagccgcagttatggttcgtatgcagagctcttcagtgagtaaaatgcatagagttttgtacacacatgtgtgacacacatttgagatttctctgatagagtgaaaggtgcacagcacttgtgcacacacttgtgtttgaggttgggctcaatagctatgtgaccttgagccaggtgcactgactgtttaattccaggctgttgtgagaatggaatgagattcagtgaaaaccatgaattatgaattatgtttcaaattactgtctttcttggtcacttatagtcctgttcctcttcctgcttcttggcttcatctgagtagttatggttagataaatgaaatattactgcatagataatatctggactttgttctatctttgataacttcagaggagcatagagatctaaagaaggttcagaagggcaaccaagactaagaatttagtgacatatgattcatgggtttattccttcagccactgttttggttttgttttttaattttctttaatagagatggggtctcgctatgttgcccaggctggtctcaaactcctgggctcaagctatctgcctgccttggcctcccaaagtgctaggattacgggcgtgagccattgtgcctggtcttcaggcactgttgaataagcacctgacacaagtcagatgctgggacctatgaagacattctgattagcctaagtgagaacttaggcagaatcttcagatttagcaagagaagggctttaatttagagctttcatacattccctcccttagaaaaaatttaattagggcatgctatgtgtgtgctagatattttacttagtgctgaaaaacaaagaagaatgatgtctggcccttgccattcaataatttatagtccagaaaggagactgacatgttaacaaataattgtcatgcaatataatttgtacactgatagaggc

SEQ ID NO: 74637 - DNA, 1978 bp, Homo sapiens
aaatgcttcatattatttcatgtgaattttaaggatgcatagtagtttatttatctagctggtcctctgttaatggccatgtacgttggtttcagtttctcagtcttacagataatgctccagtgaatatctttttgcagctgcatgagtatttctgtaggctggattcttcctttttttttttttttttttttgagatagagtcactctgtcgcccaggcttgagtggtgcaatctcagctcactgcaacctccatcttctgggttcaagtgattctcctgcctcagcctccctagtagctgggattacaggcatgtgccaccatgcctagctaatttttttgtatttttggtggagacggggtttcactgtgttggccaggctggactcgaactcctgagctcaagtgatctacctgccttggcttcccaaagtgttgggatcacaggcgtgagccactgcacccggcctctgtgggctagatttttaatactgtcatttcagtccaccttggctttttctccatctcataaataaaacattatttaaatctgtacattcagtaaagccattggaggtgctgagatgatgattctccatagccccatccctcagatgccactattcttgaaaaatgcccttccaacctgggagagcctaggaccttagagatgccttccaccctgcaactgtgaagaagctcagacattctgtcaatttgaggggcagctgctctagcagttggggcacaggaattttgcaccaggtgcaattgctcattggctcaccgctctccaatcagtttgtgtccttttttctttcaatttctgtattgccccattcactcctcaacttcctttccagcttctctgattttactgttgtgtagagaactggctgtcttctgtggggtccttctgtgttttgtgtgtccttgtgtctggcctggactcatctctgcatatgggatgtttgtcatacatggcaacagtcagggaggggtggaaggcactgctttgtgttgcaagaagggggttttcactgaggttttttttttccgagacggagtttcactcttgttgcccaggctggagtgcaatggcacaatctcggctcaccacaacctctgcctcccgggttcaagtgattctcctgcctcagcctctcaagtagctgggattacaggcatgtgccaccacgcctggctaatttttgtatttttattagagacagggtttctccatgttggtcaggctggtcttgaactcccgacctcaggtgatccgcccgccttggcctcccaaagtgctgggattacaggcatgagccactgtgcccagccttcactgaggtcttaaatatgatctgtgatttctcttgcattacttgcagatgatctggtaggttgcttactggcaaaactaattttaggatctattggtcttggagcaccctcaaatgtgggcatatggttaattatatcatgtgcagagaaggatcatttcatctaagtaatatttctaagatggctgcattcctttaaaataccagaaatctatttttttttttttttttgagatggagtttcgctcttgttgcccaggctggaatgcaatggcgtgatcttggctcaccgcaacctctgcctcccaggttcaagtgattctcctgcctcagcctcccgagtagctgggattacagatgtgctaccatgcccggctaattttgtatttttagtagagatggggtttctccatgttggtcaggctagtctcgaactccggacctcaggtaatccgcctacctcggcctcccaaagtgctgggattacaggcatgggccaccttcccggccttagaattctattattttaactatctttgtctgtgtcatttctgacagctcttgttcctcgattctgaccttgtgcctacctctgccagtcaaccctttttaattttctgctgttgctgcttt

SEQ ID NO: 74638 - DNA, 1359 bp, Homo sapiens
cactgcactccagcctgggctacagagcgagactctgtcaataaataaataaatacatagatagatagacaaatattcaagttggggttgttttgatgagtgagctggagaaaaggttatttggaggtctccgcattggttggtgagctgcccgtattaccctgtgttggaggcgggtagaggttctatgtaattgccaaccacctaatctatagcatcatctttcttccttaaagggcaatgccaggaagctggtgaagggtttcctctcctccaccatggttgacagcactgagtatgaagtggcctcccagcctgaggtggaaacctcccctttgggtgatggggccagcccagggccggagcaggtgaagctgaagaaggagatctcactgcttaacggcgtgtgcctgattgtggggaacatgatcggctcgggcatctttgtttcccccaagggtgtgctcatatacagtgcctcctttggtctctctctggtcatctgggctgtcgggggcctcttctccgtctttggggccctttgttatgcggaactgggcaccaccattaagaaatctggggccagctatgcctatatcctggaggcctttggaggattccttgctttcatcagactctggacctccctgctcatcattgagcccaccagccaggccatcattgccatcacctttgccaactacatggtacagcctctcttcccgagctgcttcgccccttatgctgccagccgcctgctggctgctgcctgcatttgtaagtggggctggggtaggaggtggtgggtggagggctggacagaggctgggatgtgagtgcagtctgggagtaagaaggagatagagaggaatgtctctgacaacatatatatatatatatatagttaaagtatgctttgtgtgaaaattcaaacagtaccacagtgtatcgcaaaaacactcaccttttccccagcttctcacagtaagcactattagcagtttgcatattcttcctgattttttttttttttttttaaagagacaggtattttgctctgtcacccagactggagtgcagtggtgtgattataccttacttcagcctcgaacttctaggctcaagctatcctcctgcctcagcctcctgagtagcagggaccacaggcacactgatttttttttcttgttccttcaagagatgtagttttggcagggtgtggtggcttatgcctgtaatcccagcactttgggaggctgaagtgggcagatcacctgaggtcaggagttcgagactagcctggccaacatggtgaaaccccatctctactaaaaatacaaaaattagctgggtgtggtg

SEQ ID NO: 74639 - DNA, 1120 bp, Homo sapiens
ctgggacagcttccccagggctacagatactgcactcagctgactgtcctttcttctgggcccctggtcccagagcagagctgacaaaggagattcctgagagagcaccttcttatcacagaaagtgctgagccaagagctcctagctgccccttttgcagatgtgaagggccagtgaaccttggacccagatggttgcttaatactcctttccccctccctcactccttcctttgcgggctgcctcacctcctccacccttcttgcttaaatccataggcatttgtctggccttcccttttactgctggctgggaaggaggagcatcagaccacagatcctggaaggcacttctctccctgactgctgctcacactgccgtgagaacctgcttatatccaggaccaaggagtgagtgtgcgttccaccctcttctcatctccacttaccttgctaaccctcctctttgctgctgtgcagtgtctaatcgcttcttctcccgagtgcctctcaccctaacatctctccattgcttgactagcctctcccattttcctctcagctgtctcctgttcggtgttttccagcatgtgctgcctggctgcagctgtctccctgccttggctcggggtgatatctctccagcagcaactctggggtagggagtggccatcagctgcctccaatcatccctaggttttatggtacattggatcgcccttctctcattcatacttttttgggtgattcaacgatgctgatgtgagggatcgatagcaggaggcttagaataccagagaatgggaaaggaaaagcaaggaaaagataatagcctgtcttctttcagggtgaagtgggtctacttgggctttgccagggctgaagactccagctaagggttaagggatgctctttgggcaggaggatggttgtgggtttccagcaggtttctgaagcctttagttttggcagacgtagagtccttggggaaaagagcagtgtcatgagacgctcccacagattagctgctggtagggtcagttcctaatgttgtacctcagcacaggtgatccctgaagctgaaattggagggaagacgggttttggataaggctgaaaa

SEQ ID NO: 74640 - DNA, 1049 bp, Homo sapiens
aaaaaaaataaaaggaaggcctagagactaaggcaggccagggggatggggagatggagagatagtatacttgtgtgattaagagtatatgagctctggaggttccatgagataatgtgcttaagtccttagcagtgtgtctggcccagtaagtgctcaataagtgatagcaattattattacaggagcattttggagaaaaggagagtctcctccagaaggatttcagatcattgtgagcctgtcttgggagaagcatgatctctgggaacgctcacaccagaatcctcctcctagattaaattaaaagtttaaagagctagaatgggaggatgtatggtagagatgtctcccagagatatttagatctctattctctggttgtagaataaccaaagagggttagaacagataggagaagaaacagacagttggatttcagaatggatagggtctatttctgttggtaaaagagactcagaataccagatttaaagtaaataataaagatagcataaactatgtgatttccaaaaagtgctcagcttcctctgcctgttctgggcctgtctgtccaacagaattcagtgaaatctgatttcctcatattcttttttaattttttttttttgagatggagtcttgctgtgttgcccaggctggagtgcagtggcctaatgtgggttcactgcaagctccgcctcccgggttcatgccattctcctcattctcctgcctcagcctcccgaatagctgggactacaggtgcccgccaccacgcccggctaatttttatttttttgtgtttttagtagagacggggtttcaccgtgttagccaggatggtcttgatctcctgaccttgtgatccgcctgcctcagcctcccaaagtgctgggattacaggcgtgagccaccgcgtctggcctgatttcctcatattttttaggaaagtggagtcaacttatatttgaggaaggcgtttataggaatttatgcttatcccagagatcttggtatgttttgtcaagaatgaaaaggcacgtggg

SEQ ID NO: 74641 - DNA, 1030 bp, Homo sapiens
taggggtgttgctggtcccaggctgcctgaatggtggggctgcctgaatggtggaagcattaccctaagacccagggtctcagggagaaatgtgagctgccaaagatggtgccttcttgtccagggtgctaggtagtggttgagaaaagagggggtcttcatgttctcaatgcatggcagcctcccttgcctagtgcgcacgggcagactgaagtaggttagagtccactagcacttcctggtgctaccactagggcgtgctgtttgctggagtgtgggttttacccccagcagatttctgtctcaaaattccacggataggacttcacttttcagatgctaccagtcaggaatgaaaccctgtacacttctctctccattccccctcacagttttcccttcctttgtccctccttccttcctttcttttacgtcatattaggacacatgcccaccccttggtgccagtgaatttggtcttaaaagggcaggcgtgatgatgtgtttgtgtttttttttttgtttgctttagaagtgggcaccctagcaatagcagcactgccaagaggacttgtaatcacctcttatccctgcaaagaatgagaaaggggaggggcagccaggaaggagattaacaaactttgttggagcctttcgtctaggctatagactgaaggatgacagaggctttctttctttttaatctagtctgcttacatcttcccccaggtaattcatgtagataattcctgtccaaaagcaaggtctaaggtggcatcggtggctcacgcctgtaatcccatcactttgggaggcagaagcaggtggatcagttgaggccaggagttcaagaccggcctggccaacatggcaaaacctcgtctctactagaaatacaaaaattaggctgggcacaatggctcatgcctgtaatcctagcactttgggaggccgaggtgggcggattgcctgagtttaggagtttaagaccatcctggtcaatgtggtgaaaccccgactctactaaaaa

SEQ ID NO: 74642 - DNA, 1053 bp, Homo sapiens
cctcccaagtagctgggattacaggcgcccgccaccacgcctgctaatttttgtaaatttagtagagacggggtttcactatgttggccagactggtctcgaactcctgaccttgtgatctgcccgactcggcctcccaaagtgctgggattacaggcgtgagccaccgtgcccggctgatgtgtaataatttctaattttaaatataaagaggcttacacaatttgtattccaggaaaattgatatttcccccacctctgctaagtaaacgttcgacggatgtttaaataaaactggttcgaagggatgccaactcattagtctgcccagggtgccatggcccagttggctcttacctggcgacatatatcgatatcacctgaaccaattagagatctcagctgtgagtgagcttgcttggtgtttaaatgtgtgcttggctgtccccctataagtggtcttccttggcttgcattacctccccttggcttgctttaggggctgaaatggcactgacactcttgagatgggactgcagagtttccttcccctaaccatgggatcgtatcccctctgcagaactaaggatagtacatgagtgggagatgagtaggaaatgggatgagtggagttgcaagaggcatcagaggtcactgtcaatggaggggaaagcttaagtgctcagtaaatgtagggcaacaaggaaggggggggtgaggctgaggtagggaggagaaggagctgagactcaggtatttggtgccagtgtagtagagaaggtgcctggaggcgggcaggcactgaggtcctctgggtctgaccaggcagtcccagctccagcccgtcccctggcccctccccgctgccggccagagtcacacatgtgttttcctgttttccatttcagtccccgttaccctctgctttttctgctcctcagagtcaacagctgttgcagcatgagcgatacgcttggttctcctaactagcaccttcccctctcccctgactcagctggtagcccctcctccccgcacctgcccaaaggtcac

SEQ ID NO: 74643 - DNA, 1029 bp, Homo sapiens
gtctctaagggtatccgcggtcattttcatttccccgcagtaatccagctgtgcgggagcgaggagcggacagggagcggtttgcgaggtctcggtgcttggacctttgcgcgcccttcgcctacacccaccacaactccctcttctagcgcttcctagagtcgggggaagggcgggggctgcttggccaggtggagggaacgcaagggacgcctgttggggtgaggtcctggtcccccacagccagacctgggcctcggggccaccctgttcttcagaggggtaatgaaggcggacggtggctgggtccgagcttgggaaggcgttgtcctagggccgcagactgggggcccaaaggaaggagggaaataaaagggagacaaacgacagggaggggcccggagaaagcgagggtggtgggggggtggggatgggagaaagggacaaaggtgagtgaggccagcaggttgggcgggggcggagagggggatgggaacgaccaaggggtaggccagcaaggatcgcgggccaggggagagcttttcaggggtagagcagcgggccggcgcatggtggggagttgagtgtatgcttcgaagtccgctgtagagcccacttgcatatgtgtgaacctgagcgttcgcctcccctcggccttttcctcccctgcccttcaccctttcgcggccatagcacttagctctcgccatctccacgccgcacccagaccggtcacctgagcttgggtgtgaggtagagcagacaagaatttcctggatccagggaaagagtgttagatgataggctttttgttttgctttgcttttcccattaatgaaacaaaagtccgtttcaaatcattctaggcctcccagtaaaactgtgaaagccatactttcttctttgcctttaacgcattactgtcaaaaagagtacctccgggtactccttgcttaggagccagagcggcagccaaacaggagggcctggagagcaaattcaaggacatgcgcaggagcctagccacct

SEQ ID NO: 74644 - DNA, 1838 bp, Homo sapiens
gcactttgggaggccgaggcaggtggatcacgaggtcaagagatcgagactatcctggccaacttggtgaaatcccgtctctactaaaaatacaaaaattagccagggatggtggcacgtgtttgtagtcccagctactcgggagtctgaggcaggataatctcttgaacccgggaggcagaggttgcagtgagctgagattgcaccactgcactcctacctggcaacagagcgagactgtctcaaaaaataataaataaatgaaataaaatgaaatagagtagtaatatgtctaggagcttattctgggttatcgtacctcacccttgaagatgatggacatattttaggataattaagctacaatgtatatgaaatggaagagaggagctagagattggttcttcccttattcctatcacagtatttgcacaaggtgatgcagtccatctctaacacttgacttttctctcacttctacttgtagatggccgccctgctcccccaatgaaaggccagcttcgaagaaaagctgaaagggagacgtttgcagtgagtggttagagcaacagccagggctacctggaaggagaacatttaaatcataatttgtcttgagctgtgttgcacctaagcaaacatgtacccctcatacagaggttttattaataacagccaaaggttttttttgtttttgtttttgttttttgtgagacggagtttcgctcttgatgcccaggctggagtgcaatggcgctatctcagctcacttcaacctactcccgggttcaagcgattctccagcctcagcctcctgagtagctgggattacacacgtgtgccaccacacccagctaactttgtatttttagtagagacagggtttttctatgttggtcagactggtcttgaactccccacctcaggtgatccgcctgcctcagcctcccaaagtgctgggattacaggtgtgggccaccatgcctggccccagccaaaggttttaatagcactgtgagaagggaggaagagagtggggcactcccaggacaggaaccagtagtagacatcctgctgcacattttgctgtctccctctgcttcccaagccagaactcgctcccactggggagtcagcagcgtcattttccagatgaaacctctgaatttgtaagtggaaggatatatagtatagcgctgaagtcccagatgttatccacactgttttcctgtctgtttcagagacgagttgtactgctgtcacaggaaatggacgctggattacaagcatggcagctcaggcagcagaagttgcaggaagaacaaaggaagcaggaaaatgctcttaaacccaaaggggcttcactgaagagcccacttccaagtcaataaaaagcaactcctgcctcccttcctcaccctgtctctggatttcttttctatcacctagatgcttcatccagccagaagatagccttcacgttccccatctgtcttcagagaaaaagagctgggacaccaagaacaagctgttagatcactgcctgggaggcttggcttagtactctcatctctggttccattccagttcagctaagtcttgctttaaaatttttacctcctagctgggtgcggtggctcacgcctgtaatcccagcactttgggaggctgaggcgggcagatcacaagatcaggagttcgagaccagcctggccaacccagcctggtcaacatggtgaaaccctgtccctactaaagatacaaacaattagccgggcgtggtggggtgcgcttgtaatcccagctactcaggaggctgaggcaggagaatcgcttaa

SEQ ID NO: 74645 - DNA, 1063 bp, Homo sapiens
gggagggacatagacagttgtctacagggcccagaagataaccccctattagtaaactggccccttctccctctgcaggtctcatgggcatggaagaagaccccaccaccatcccacactctgagctcctcgttgcccctagccacatagcccccaataattcccaccctgaggtgagacaaatgctgaataccagaggaatcaagccactcagaatatgcttatagggacaaagtctcccacatcccgtcccctggatccccctacagccccctgctgtccatcgcggcctcaacccctgcagatggcagcctgcaccacaaaaaggcaacttagaggtgttttttttttttttccttccagttcttggttgtaattggattcaggctaaaacaaccacgtccccaaccaggaaaggagggcactggggcggggacggaggagaggctgtgggagaagggagggaccagaggagagagcgagagagggaaccagaccccagttcgccgactaagcagaagaaagatcaaaaaccggaaaagaggagaagagcaaacaggcactttgaggaacaatcccctttaactccaagccgacagcggtctaggaattcaagttcagtgcctaccgaagacaaaggcgccccgagggagtggcggtgcgaccccagggcgtgggcccggccgcggagcccacactgcccggctgacccggtggtctcggaccatgtctcccgccccaagacccccccgttgtctcctgctccccctgctcacgctcggcaccgcgctcgcctccctcggctcggcccaaagcagcagcttcagccccgaagtaagtgagcttcccggcccttcccggagtcgcgcccgccgggaggcgagcccgggggtctcctaggggacagcctctattcggagaggagggcttttgggatctccgctgctcaggcctgcaggattccccctccctttctttttcctcttcgtctccaaacttccagatcgatccaacttttgcccgcttccaaccagctgcccccaccccctgcgccgccgactct

SEQ ID NO: 74646 - DNA, 1088 bp, Homo sapiens
ctgaaggtagaaccgggctaccccaagtcagccctgagggactggatgggctgcccatcgggaggccggccggatgaggggactgaggaggagacggaggtgatcatcattgaggtggacgaggagggcggcggggcggtgagcgcggctgccgtggtgctgcccgtgctgctgctgctcctggtgctggcggtgggccttgcagtcttcttcttcagacgccatgggacccccaggcgactgctctactgccagcgttccctgctggacaaggtctgacgcccaccgccggcccgcccactcctaccacaaggactttgcctctgaaggccagtggcagcaggtggtggtgggtgggctgttcccatcgtcccgagccccctccccgcagcctccttgcttctctctgtcccctggctggcctccttcaccctgaccgcctccctccctcctgccccggcattgcatcttccctagataggtcccctgagggctgagtgggagggcggccctttccagcctctgcccctcaggggaaccctgtagctttgtgtctgtccagccccatctgaatgtgttgggggctctgcacttgaaggcaggaccctcagacctcgctggtaaaggtcaaatggggtcatctgctccttttccatcccctgacataccttaacctctgaactctgacctcaggaggctctgggcactccagccctgaaagccccaggtgtacccaattggcagcctctcactactctttctggctaaaaggaatctaatcttgttgagggtagagaccctgagacagtgtgagggggtggggactgccaagccaccctaagaccttgggaggaaaactcagagagggtcttcgttgctcagtcagtcaagttcctcggagatctgcctctgcctcacctaccccagggaacttccaaggaaggagcctgagccactggggactaagtgggcagaagaaacccttggcagccctgtgcctctcgaatgttagccttggatggggctttcacagttagaagagctgaaaccaggggtgcagctgtcaggtagggtggggccggtgggag

SEQ ID NO: 74647 - DNA, 1062 bp, Homo sapiens
tgccccttcccctccattggaagtcttcagggatcacttctttttttttttttttgagacggagtttcactcttgtcacccgggctggagtgcaatggcgcgatctcagctcactgcaaccaccacctcccgggttcaagtgattctcctgtcttggcctcccgagtagctgggattgcaggtgcccgccaccatgcccagctaacttttttgtatttttagtagagacagggtttcaccacgttggccaggctggtcttgaactcctcacctcaagtgatccacccgcctgggcctcccaaagtgctgggattaaaggcatgagccactgggcctggcccattcagggatcacttctctatggaatttccatccttgtcaacaggtaaagagtagaatttgatttggcctagtgtgccctaaaagtctgactttttctgggtcagactcagtgaattgaggtggagctgggctggagtggacatctagcttgagtcctgcgcatctccaaaggacagaggcccctctgcaaacggtcctcagctcagatagaactgttctgaagagtccttccattcattgcatgtcctgcctgagattcagaactactccttaatcagcttagaacatccctcagcctctctggatcttttaaacattccaagtcaccccaggctcccctgaccttggtcattgtttggggatcatattaagtacctggctgtttgcctcacatagttcattttccatgaatttacccagaaaggggtaggcaaagagagagggcaatctgtggagaggctggtggggcaaagggatcagaatgccatggagaaccaatccaggtctcacatctggcacagtggggtgggataagatggtgagttctggttaattgaactgtatggtaatcaccagttactgctggtaccatacttgggtgacagtgctacaacaactggaatgcagtgcacctcttcttaactcagtcccagaacacaagtcaatttttccaaagggctctaggatatattttatggtctcatggcgataccatgaggt

SEQ ID NO: 74648 - DNA, 1046 bp, Homo sapiens
tatgacggccctgggccccctgagagctcccgactactgcgtagtctcacccacttcagcaatggcaaggctgtcactgtggagacactgtctggccaggctgttgtgtcctaccacacagttgcttggagcaatggtcgtggcttcaatgccacctaccatgtgcggggctattgcttgccttgggacagaccctgtggcttaggctctggcctgggagctggcgaaggcctaggtgagcgctgctacagtgaggcacagcgctgtgacggctcatgggactgtgctgacggcacagatgaggaggactgcccaggctgcccacctggacacttcccctgtggggctgctggcacctctggtgccacagcctgctacctgcctgctgaccgctgcaactaccagactttctgtgctgatggagcagatgagagacgctgtcggcattgccagcctggcaatttccgatgccgggacgagaagtgcgtgtatgagacgtgggtgtgcgatgggcagccagactgtgcggacggcagtgatgagtgggactgctcctatgttctgccccgcaaggtcattacagctgcagtcattggcagcctagtgtgcggcctgctcctggtcatcgccctgggctgcacctgcaagctctatgccattcgcacccaggagtacaggtcagtgggagtggggctggcagtagaagagtagaccctgagggtgaggctgggctgtgcagctacaggagaccacgaaagtgcccaccttggggagaggctcccatgatcagcttgtcagttgtgtcctgtaagggacaggtccagatcctgaaagcagtttcaagggaggagggacctcagatgacctttgggaaagccatggcacagctccagctggcctggcccgggtgtggaagtgggaggactgtccaggctgaggtggtctactctggccgagaactaccagtgactgagcagtcctcattccttctagcatctttgcccccctctcccggatggaggctgagattgtgcagcagcaggcac

SEQ ID NO: 74649 - DNA, 1001 bp, Homo sapiens
ggtgcaggccctgcgaggccgcctgttgcccagcctggggcccccaggaccaacccggagcccccctggaccccacacagcagtcctggccctggaagatgaggacgatgtgctactggtgccactggctgagccgggggtgtgggtagctgaggcagaggatgagccactgcttacctgaggggacctgggggctctactgaggcctctcccctgggggctctactcatagtggcacaaccttttagaggtgggtcagcctcccctccaccacttccttccctgtccctggatttcagggacttggtgggcctcccgttgaccctatgtagctgctataaagttaagtgtccctcaggcagggagagggctcacagagtctcctctgtacgtggccatggccagacaccccagtcccttcaccaccacctgctccccacgccaccaccatttgggtggctgtttttaaaaagtaaagttcttagaggatcataggtctggacactccatccttgccaaacctctacccaaaagtggccttaagcaccggaatgccaattaactagagaccctccagcccccaaggggaggatttgggcagaacctgaggttttgccatccacaatccctcctacagggcctggctcacaaaaagagtgcaacaaatgcttctattccatagctacggcattgctcagtaagttgaggtcaaaaataaaggaatcatacatctcaaaattttgcaaattagctgcgagcctgagccccgcctctgcccatctcagtctatgctcacctcatcccactcctccctgtggagccctttgcttggccctctacctcctgccctcttcctgttcatctcccaaccactgcactcttgatttttataccacacagaaggtaagaaaattctaggaaccctaaggatcaatcctctccattttcactcaaatgcctggggcccagctctgcaatgactgactccagggcctctttcc

SEQ ID NO: 74650 - DNA, 1054 bp, Homo sapiens
tcattctagcctttgattattctctttcctttggcttcccatttacctcttctttccacaggtaaatcagtggcacagtatactgcctccttgtgcctctggatcctgccacttcacatctactcttccatggccccatttctccattttgtggaccaagccatcctgagggcatggacattgtctctgaggaaattggggccacccttaagataccaagaaaagctcctgcccatggtcccactggaaatggactctgctgagcaaagccaccagttgaagagaacagaatccacacctgcattgaatacctgtttctccatgtgtatcgtctctgagattaccttcttgccctttccaacaccttagtgattcctcaatttctcccccattgggaaggccatagggcatactgaaggaactgacctctctccttttcctgtacctttaacctttagtctgtcaaggaaaacccttaggacctctgaatcaagaggactgagtttgtgggtgaaccttgaaggtgctctttctgctacaagggccctgggagatagcatggacgtgcattgagaagccagcctcagaccttagcttgaagcagcttgaggccagacctactgtagcctcagcatcttgctaggaggcatggaagtgatctatcctgccaggaggcctcagagtgatctgtcctgccaggaggtgtgagagtgatctgtcctgtgaggcatttaggggctttcaggaatttagtaaaaggtggagtatgcctttccagtatcttccatcttcctttgtatacttgtccttcctcccatttcctccctttggcccgaggtaggaggatggagggaggctgctactctaccacttcctgtgtgcctctactgtggcctcaaccctggcaattatagctactcccatcccttacctgggcatgtgtgagcccttctcactggattttatacccttgtgtctgtgtacataaatatatatacatatatatatacataaaaactttgtacaaaaggcaagcctcctccttgtggcagct

SEQ ID NO: 74651 - DNA, 1029 bp, Homo sapiens
tatgaagagagtttcaaaacatgtaaatgtaattattttggaaacttacgtaagacaaggcagatatttacataaggatctatatataaggtacatgttcacttacaaaattacaaattgggaaaagcatataaagggattaacgaggtctggatgaagttttttttattgagggaaactttctggacccaatgagttcaaaagagagttctaaaagggtgactgttcatgtgcagttctggatgcgggtacccttggtggcaccagaggacctgagagatgatataattgagaatgcaccaactacacacacagaggagtacagtggggaggagaaaacgtggatgtggtatgtctccctttgctgctgtaccagggtgcaagggatagggtgaggggaagtacagggtgcaacctgtagggaggtctccttgagctgtggtgattggtcggccatatctagtttactgtacttttctgtatttgactgaacaggtggcacaacttccggactttgtgtgactatagtaagaggattgcagtgggtgagtccatgagaatcctgggatgggtgtggcttctcttacctcctgtgaataagaatcaggaatttcatatatagtatacaattttgctacttcccctctgtctcagactggctttctcttaaagaagtaaacagattttgcgcaaaggagcaaggaagggtttcttgcctggcagtggttgacagtttttcttttgcctcatgtagctcttgaaattggggctgacctcccatctaatcatgtcattgatcgctggcttggggagcccatcaaagcagccattctccccactagcattttcctgaccaataagaagggatttcctgttctttctaagatgcaccagaggctcatcttccggctcctcaaggtgagtggtaggagggttctaaaggtagtccagctatacatcttgccttatttacctgtgtatgatcgttttttcctgtgaggctgactctttttctttggtttctgggga

SEQ ID NO: 74652 - DNA, 1663 bp, Homo sapiens
tgacacactaggggctgtggccaagcaggggtgagggccggacctccacgagcggaatgcggggtccgaactcggggacggagaagggcagactagtcatcccggagaagcaggggtgagggggtcggctaggatgaggaggggagagactattactctttggaggggaggagcctcggacccagtaacgtgaggaaaataacttgtgggaggcctgtggtcactgagtcccaaagttgggagagttgttgggtaaactctaaagggccctggaggtcgcgattattgtctgggagtgggaggaggtgttagggggcaagggagagaagaggctaattttgacgggggaggcatgggcagaactggggcaaatctggatgtgatggtcttggaaacatactgacacctgaggagaaaaaaattctacttgtggatatccatcattttctccttactcatatgtcccatggctgtgttttagggagaaattgaggcacagtacagcagagttgatatcccccaaggtggtctgaactcagcagcctagtaggctgaactgatggcagctgaaagggctgtgcaaaatcaagatagcctaaatccagttgcttggctctctggcactgctgctgtctttacatgattctgggtctgtcgcggttgtaggtttgatttcctctgcatgcctgtcttccatccgcgtttcaagagggagttcattcaggaacctgctaagaatcggcccggtccccagacacgatcagacctactgctgtcaggaaggggtagggaccatcccatatgccccttaattattagaggcaataacaacttctgctttatcggggccctcattctcctccttttctgacttggatatatttgttagtccctgggatatagataacttgttttctccttgcttctctattctgcatcaggctatcccatgtctatgtagaaaaaacctttgtctctcatttctactcttgattcccaaaactaaaaattgaacaagtaaagtgctgaaccttattcagtatttgtctttcttgggtgggggagtgcagactggaatacgctaattgtgggaaagctttctccatggattcgtccagactcaaaagtggagaagattcgcaggaactccgaggcggtaagactgtttgacttctctgctggatttttctaaccaagctgggtggggagagtggtcccctcccatccccaataacttggtaaattaactgatagaatgaaattaaagctattaggctgggtgctgtggtgcacacctataatcctagcactttgggaggctgaggctgtaggatcactggagctcgggatttcgagaccagcctgggcagcgtagtgaaaccccatctctataaaatatacaaaaattagccaggcatggtggtgcatgcctgtggtcccagctactcaggaggctgaggagggaggatcagttgagcttgggaaggtcaaggctgcagtgagtggagactgtgccactgcactccagcctgggtgacagagtgagactttgtctcaaaaaaaaaaaaaaaaaagctgtttgcttgttagctcaaacttttcctcttcatctccgttccaggccatgttacaggagctgaattttggtgcatatttgggtctt

SEQ ID NO: 74653 - DNA, 2002 bp, Homo sapiens
ccaacagatcttagacaaaaaaagaagcacaaaaaaactattatggaatttgatagctgagttatttggggggaaaaagtagactttgatttttttcccttttcccccagttcactcataactgggaagctgcagctcagttttaactttggcataatggtggtggtggtggagaatcctcttgtttagactcagtgaattggaaagttctctttttaggatgctccttttggacagcttggagcaagtggaaacacatgtgtgcttagaatgtgacatgttttggcacttgtaaatctgtttgtccataaagcttgtgtaagagcttgggacccaggatgtgtggtataggccctctgtaaaagtcatccttgaggttcctttccagcttgtggacagcagaaatttgaacataaggtagtgtccttggagcagccagctgtttattcatctttttgttttctttcacttcttggttccacagattagaatcccaagaaaatcaaatggcatccggggatttctgctcacctggagaagggatggaaatacttcaacaaggtaagagtagccacttgcaaaaggtttgatgatttatccagagaggtcttatccaggttcttgccttttctagtaaaaagcatttattggctcacacctgtaatcccagcactttgggaggctgaggtgggtggatcacgaggtcaggagatcgagaccatcctggctaacacggtgaaaccctgtctctactaaaaatacgaaaaattagctgggcgtggtggtgggtacctgtagtcccagctactccagaggctgaggcaggagaatggtgtgaacctgggaggcggagcttgcagtgagctgagatcgtgccactgtactccagcctgggcaacagagcaagactccaaaaaaaaaaaaaaaaaaggatttataagtttccccagtatggttttcctcacagaagcatgtgtttctgaggaaactggaatacatgaagatccttgaacactctcttattggaaaacagactacactaattcctgttaatgttggttcaatatctgcttgtgtagtaggctaaaaactcaagatgctcccatgctgatgttagcaagcatattataaaaataagggtagccagcaaattccttgaaggtgtccttcctacctgtgtcttaaatattctcatatcttagtctccaaaatttcagatccttctatatcctgagttctttccatatctcagatcctttctatatcttgaatccttcaagagcttgcattttctatatcttgactatttccatattggatgcttcagtaccttagggaaaaagagagatttcttatttcccaaaaagactttgggtataatgttccaaagaatgaaaatttgggtgttttggcaagtagaggtaaaagaccccaacagagagcatatggaaaaagaaatggaaagaaagctccttgagcatatggaaaaaccagaggatctcaatttcttacacttttttctcatgcctgtgctgttttgtatctacatgggttactcaactctactgacaattataagtatttgggccagctggccaggtgtggtggctcatgcctgtaatcccagcactttgggaggccaaggcgggcggatcacctgaggttgggagtttgagaccagcctgaccaacatggagaaaccccgtccctactaaaaatacaaaaattagaggctgggcacggtggctcacacctgtaatcctagcactttgggaagccgaggcgggcagatcacgaggtcaggagattgagaccatcctggctaacaaggtgaaaccccgcctctactaaaaatacaaaaaaaaaaaaaaaaatagctgggcgtggtggcgggtgcctgtagtcccagctacttgggaggctaaggcaggagaatggcgtgaatctgggaggtggagcttgcagtgagccgagatcgtgccattgcactccagcctgggtg

SEQ ID NO: 74654 - DNA, 1048 bp, Homo sapiens
aataaatgttagcaattaccaccattttctcagcatctgcccttcactggggaggcactaatgagaaggggcaaaaaagcctttccgagaccatcctgtttcccagtccgggttccaccacccgagcatgcgaacccagggcgttgggaacccagcgcgcacccgtcgaggggcggggcctgccgttcccgcctcgagtgtggccccgcctccacctccttcgtcgcggcctctagtgcactttcggctccttccccttcccgggcctttcagcttggtctttccgggcctcgcttcccccagcccctgcgcccggcccgaacgagaggttccggagccccggcgcgggcgggttctggggtgtagacgctgctggccagcccgccccagccgaggttctcggcaccgccttgagagcttcagctgccccagggtgtgcaggtttgctttagagggtcggcgggcggagcttcggggaagaggagctctgggagagtcattccggccagtggccggagaccgtcgtcgctcttgggaatccttggccgcccagacagaagggaagtaggcgccggagagcccgttctgcattttgattcatctcgggccctgtaagggtcatatcttgtgaaaataacctgtaaaatcaatttaacgttcagtgcagcgtgtaaagacagctctaagaatttaaaagacgcctgagtcagaacatttaaatgcttgggtccctgtagcagcgttttaacacgtctgagtgcagagggtggagaatcgagcctgattgccgttcacgccctgtaacctttaagaagggtaaagaaaggcaccctaaaaaacgcaaggggacacttaccctagggggggacgaacagctagctttttggaatttgggttggtcttcatttccaagtgcgaaatttgcctgcaaaactttttatttgcagtcatagatcaacgataaacagaattgttaaaacactgaacttaactaagtagtggcttttgttgacaagtcgattgtgttattaattcttaatgtctcatc

SEQ ID NO: 74655 - DNA, 1057 bp, Homo sapiens
ggttccaggactttctgaacatctgattctgtatcttcagtatatatattttgtttgttttagagatgggatctcaccatgttgcccaggctagtcttgaactcctgggctcgaatgatcctcccaccttggcctcccaaagtgctgggattataggcgtaagccactgtgtctggcctagtgtatgattatgcatgagtcacgcaatgttctggtcctggattccaggagtagaggacctagctttaaatcaattagtttcagctaaactgactagaaccaaatcaaagtgtaattctccctccagctcccccaaaccccagagttttggggttgtggttgatgcagtgtgggatgtccctgagaggtagcaagtctagggtggtgagttcctgctaggcaaccaaatttaagctcctcactttttgtgacacatggtgtcagatatggggtcccgcacctatatctggatgaagaggtagaaactctggacctcattaatgagttatttcttggccttcttctaaggactaggagagctccttatctgtctgagaatggggaccagctctgagtggggttgctgcctgtattccctgtttctcaggaacttacatgggtctggggaggctaggtaggtgattgtacgtggttgctcttctccttggctgggggaggtaatgagcagatctctgtgggtgtggagcttgttggggggatgtctaggaagcttcagcttagccacattcccaagtttaggtgcactgagccatatagcccagtgtatgcatgtgtgggtgtgttcatgcacacacacactctctctcttgtctctctgtctctctctcactctttcttactctcttctcaggtcacttgtacacttggtttcctagtagaagctcacttgccacctctcagaggggtcccggattgcatccatcacaatcccaaaactagagttggggggaactggagggagcaaaacactgatttgatactagtcagtttgcttgaaactagttcacctaaagctagatctcttaaaaccaattta

SEQ ID NO: 74656 - DNA, 2343 bp, Homo sapiens
ctactggttagaatcacttgggactcagttttcttttctgtaaaaacaaaagataggattaaatcagtgattctcaatcatggtagcctagcagatcagctgggaagaactaaaaaacaaaacaaaacaaaaaacagtgtttggatcccatcaccacagattgtgataataggcctggaggagggccaaagcattgatgttttttaaaagctgcctaggtgatcctgatatgcagccagagtgaaacactgctggcctgaatgctctctcaggcacttttcagggtctccgcctccattttacgacttcttcaccgacattacatagcattgttctgggagtatagcagcgggttggatgaggttaatgggagtaataaggagcataatgggcagctggagagctgggactggagggagactgattctcttgctaccccatgagccagatcctacaagcaatggggaagtcctatcatccaggctgtttccgatgcattgtttgcaacaagtgcctggatggcatccccttcacagtggacttctccaaccaagtatactgtgtcaccgactaccacaagtgagtctgccccttgggatgcagtgtggaactgggtccagggattccccagcctcagctcatctcttccctctctctttcagaaattatgctcctaagtgtgcagcctgtggccaacccatcctcccctctgaggtcagtatgtctgggttctccttcagggcagccagtgccactgcctttggggaggggatagggacatgctgcctggcctcctgccagaagtggtagtgccaaggaatgtactctgtgaagattcccgtgtgactctgcctcttggggtcaccaccctgaccctaatatccgggcctggacatgtctgaaagcctaactgggcccaggctccatctcttctatcccagtccagaggaggagactttctttgaggtcgaggtcaccagactgcagatgtaggggctggaaaaaggtgggaagaatcctcagcactggtaggaaggggtcagaaatgatttaagctgagtgtaggggatgtgcctatggagagaaaccaaaagccagtgaggaccagatcttattggatccccttgttcccagcctagcctactttatttaggcctcctgtccccttcccttccctttgcttcctgcacaactgagagacgcaggtaaggccagggctgttgtacagagggagtgtgctccatgggtgcagcccagtgaaggagatgagagttctggtaggatttgcagaagcatcttaaaactacaggtgattgcagagagactctgggggcatttgtatgatcttcccatggggtgggaagggttgtatatgagggaaaggtggaggtgaggcaacatgctgctctcatctccatgggggtctgcatgtttcagggctgtgaggacatcgtgagggtgatatccatggaccgggattatcactttgagtgctaccactgtgaggtgagtgttggggttcagcggtgctggagaagaagtggaaatggggagaggggaggagtcaagtcctgcaacaaccagacatctatgggagaggtgtagggcatgggaaaccagaaagatattgtgacctatcttcagtctcttttttgtcctccagccactctctctggtccaagtagcttagtcctttctgaatctgactctcccagagtcaggactttctaagactagggactctggtcaaacttcttgaaagacaggcttgtgtcattatttctgctgcagcagtgacacctggtgtccagctgaggtattagtattttctcagattgctcttccatcccttccatccttcccttcccaccccatccctttcttccagttattaggagtcaggtgttgagcagggcagactcctaagataccctcagtgtccaaggtgcctaggctgaggtgaactaggtgccttcttccctaggactgccggatgcagctgagtgatgaggaaggctgctgctgtttccctctggatgggcacttgctctgccatggttgccacatgcagcggctcaatgcccgacaaccccctgccaactatatctgagctgcaatcactgctgctgctgtcaccctgcagacaaactgctgtggccagtgggcccctctgaggccagccaaggcaaagaatgcactctgcaggcctggcagaagagtcctctggggaggaccccaagggccggagacccaaagatcatgatattccaaatggattgtggaagagaaaccttatatttaccagggtgggggcgactggcctttttcccatgtgtgcagtct

SEQ ID NO: 74657 - DNA, 1006 bp, Homo sapiens
gcagtgaccccagaagtcttgcacctgggctgtgggataggttccagccccttctctattgtttctagggcgaactttgcgttgcaaggctttctacagtgtcaatggctctgtgtactgtgaggaagattatctggtgagtaagggtcacctggacctggaattggtttccatactgacccccttcttggtggcccattggagtaccacccatcattctcagtttgataacagcctccgttcgtcttgtcttttactttagttttcagggtttcaggaggcagctgagaaatgctgtgtctgtggtcacttgattttggagaaggtaagtaaagtgctttcagctgagaagtctcactgtgaggctgaggagcgggatcagggactaaatggatattgagagaaggttggggaaagaagcctgtcaccagatgaatcactttcatcccattcctccccagagcaactgtttacagtggcttccctctgcctatgggatcaagtctgggctcaaaagcctgtcaacccaggcttctatgacctagcccctccctaactctgcaggcacagccaggccttccagcctgagctaggagtgtggggtcctgagtcttttttttttttttttttttgagacagagtctcgctctgacaaagtggaatgatctcggctcactgcaacctccgcctcccaggttcaagtgattctagtgcctcagcctcccaagtagctaggactacaggcatgcgccaccatgcctggctaatttttgtatgtttagtagataaaaggttttgccatgttggccaggctggtctcgaattcctggcctcaagtgatcctcctgcctcagcctcccaaagtgctagattataggcgtgagccaccatgcccagcctggggtcctgagtcgtcttcttttttttttttttgagatggagtctcactctgttgcccaggctggagtccagtggtgcgatctcggcttactgcaagctccgcctc

SEQ ID NO: 74658 - DNA, 1040 bp, Homo sapiens
ccagaaaggggacccaccaggcggagggagagccaagtagaggacagacagggaagcaagagaggcagagcagctgcggacctccagacacttggtggggatccaacagctgctctgtgagcaaatgaagaggcacaagctctcctcctgttccccatagcacttgtaagtgtgtatgtgggcaggggaggggagtgcttgagtattggggctacactcaccacaagagcagcaaacaaagcactgggtgtggtagaggctgtccagggcctggcaggcattgctctgcccatagatgcctttgttgcacttgatacaggtgcctgagaagagaaaagtgtcacactctactcccccaggtcaaaaccagggattcccaagctttcctgactgccctttcctgatgtgccaggggtcacagtctccctttgatgggctcccttctgagtagagaagataacgagtaatgagatgcagcaagatcttggctgagcagatccattcttgtttatttaattactcaacagatattttctgagcatctgttttgtgcttaacacagcaccactacctaaggaaacctggagaaagtcgaagatatggtccctggcattcagatgcttagtttctgttggggagaaaagactacacaggcaaggtatgatctctgttgcagtgtgtaggatgaacggtcaaagatgccagtccacaggtgctcagcagcagacttgaaaatactttctagagaaagcaggctaggcccagaaatcgtctctgggacttcagtttcccatcagtcaaacgagctgttcagttatagaatgatttctctccactgcagacttccaaggatggagaaaaggatctggcttggcagagggctccgtgcagaggggaccatgtgagcatgattcctgtggggaggtggctgctgagaatgcagggtgtgttccaggaaccagggttgaacaggaaagcagggagagtagcagagcccctgatgcctcctagtcaccttctatcatgggaagaatacagaa

SEQ ID NO: 74659 - DNA, 1178 bp, Homo sapiens
aacctctcagaattcaggccagaagtagcgccttacttcctgacactgttaaggaaacctggtcgctgtctccctcccctactctgttcaggaagtattgattgattatatgtctcagctatgaggaacattagggtcttgaaagatcttttagtcaaaattcacaggcactgctacacacataaaaaacttcgaatctgattgtgattggaaagaagtggcaggcttaccgcctaagggctgtgggcctctttcacttttctaagcatctcttcttaccactcatgccccactcctggaccccatgctgtagaactctatggctagaaaagtgaataggaagaggaacgcggccagggagggatggttgggtaggaggttcagaggtagcagggcggcaggctataagggcataactcaacccccagcctccacccccattcttttccccacctccaaatccaccgagaggaaagcccagaggagatgatgccaaaccgctttgatcaaggaagactgaatgacagggcccatttagcagtttcattttgaggcccaggagaggtggctagtaaagaagtctttttggctgaaccatcagagccaaaaggaagaaaggaactcagagaaactgcaataaaatggcaggaagaacataggtatagatatgctgggttagaggaggtgaggccaacgtgcctgagcagtttcgtttgcttttcccataacgtccaaggtttcctaaagaatggctccgacaggaccccctggcatggcaatcttggggcagatcttcacttccatgaggaagccacattttgaattcagagatgggggccccttctccttgggagtcaggttgcctcctttgacagaacccctacataccccttgtgccgctagccccagcttgactgtaccctcctcctgcccctagtaggggccctcttccttggcttcagccttgcccagctgccagagggtgggagcaggacaggcctgggcccatcagttgctgcagctgctgcacaggctcccaagcccctgggcaaagactgggatgggccccaacaggcagggagtgtggcagcgtgccgagggggagaggtggggcaggcccgttgggatctgctccccaaagacaggccctagccctcactcatgggcctggaattggg

SEQ ID NO: 74660 - DNA, 2033 bp, Homo sapiens
tgtggctagcgtgagagctaggggggcgggggccggggagagtggggcagtcgggcgagtcgacgcgtgaacagatagacctgcggactggacagccgcggccagagaccctgctagccccgctcagccccagatgcgcggggggacgcagcccctcccgctgggggatgctgtgggattcctggcgcagggcatccaggccgcccgctaagcccctgtgcctcccctgtgcccctggggaaccagagtccggctgcagggaaagagaaccggccgccgagacgccgcagggtgccaggcggggagggggcgagaggccccaggcccgagggcatggagcggttaggagagaaagccagtcgcctgctggagaagttcggccgcagaaagggtgaatctagccggtctgggtctgacgggacccccgggccgggcaaggggcgcctaagtgggttggggggacctaggaagtcagggccccgaggagctactgggggacctggggatgagccgttggagccggcccgggagcaaggttccctggacgctgagcgaaatcagcgcggctcctttgaggcgccgcgctacgaaggctcttttcccgcggggccgccgcccacccgggccttgcctctacctcagtcgttgccccccgattttcggctggagcccacggccccggccctcagcccccgctctagcttcgccagtagctcggccagcgacgcgagcaagccgtccagcccccggggcagcctgctgctggacggggcgggggctggcggagctggaggtagccggccctgcagcaatcgcaccagcggcatcagcatgggctacgaccagcgccacgggagccccttgccagcggggccgtgcctgtttggcccacccctggccggagcaccggcaggctattctcccggaggggtcccgtccgcctacccggagctccacgccgccctggaccgattgtacgctcagcggcccgcggggttcggctgccaggaaagccgccactcgtatcccccggccctgggcagccctggagctctagccggggccggagtgggagcggcggggcccttggagagacggggggcgcaacccggacgacactctgtgaccggctacggggactgcgccgtgggcgcccggtaccaggacgagctaacagctttgcttcgcctgacggtgggcaccggtgggcgagaagccggagcccgcggagaaccctcggggattgagccgtcgggtctggaggagccaccaggtcctttcgttccggaggccgcccgggcccggatgcgggagccagaggccagggaggactacttcggtgagtgagagaagtggttagggacgggaagggacccgtcacggtattcggttctccactgccccgacggcccaaagtgccggtgccccggggtccgaggtgaagacgcgggactaggaaagaagcaagagggatggatgggggcggccccagagcactgtccccttcctgctagttttcagatgaaccagggctccttatttctgctaaattcaacccccctggtatctcgtgagtccgtttctcaagcatttgaacctcggttttttgcggcaggaggcctcgtagggaagggaccaagtggggcagtgaaggcgcatcccccccaacttgctcccccctttcacggcggtgcccctggaggtttgtgcgcgccgcgcccccacccgggcccaggctccgcccgcaggaattcggagaatgcgcgggtgggggggcggggcaggctggccgcgtgcgtgccgactcctgcccgggcgctccaggtgcccgcgggcggggcggctgccgccgcgcggcggaggggtggggttcggggatcgggggacgctccctagcatacgcggagtagtggcggctgtcggggaaatggagcctgggagacaggatggagcgccctgggacccaactgctgtccctccccagtcctgttggctaggtgcgtgcgtgggcatttaatcagagacccagtagt

SEQ ID NO: 74661 - DNA, 1017 bp, Homo sapiens
gctagcaccgtgactttgttcccagcgtggggactgtgggagagatggagagagactggtacagaaatggtgagacaaggagagagccataaagaggaagacagagagaaagaagacaaatgcataaagaggttcagagacgtgtacgtaaagatagccctgaaaggcgacgaagcccacagagagaggtggaagagggaagaggtagcgaaagaaagggagagctgaggagcaaagaggagtgtggacgatgcagagaccgaagggtgcgcagacaaaggaaaggacaagcttgtccagagagaatgagagacaaacagataaactgcaataaaaaggcaccaccttctggacccaaaagttttgtgatttgtaaaagcagtgaaaaggagtcaggaaaatgggactaatctctactttgagagggagggaaagagatatagtgtgtatgtagaagcagtgaaaaggagtgaggaaaaggtttgggactaatctctaccttaagggtaggacagttagagggatagacaccccctggtgttgggaaatgagatttttctcatttcaggtgactgtggagatcgaaggcctggttttagggctagcgaacaccttctccctttggttttggtccacagaagactggtgatacagagtaagtattaagaggaagaaaagaaatgccgtgtagaggaaattgcaaatgaaaatgatcaggatggaaaagaggctgatattgactattttaaaaggatcaagaataaggaaaagaaaccctggctgaagcagccgggcgcggtggctcacgcctgtaatcccaccactttgggaggctgaggcgggcggatcacttgaagtcaagagttcagaccagcctggccaacatggtgaagccctatctctactaaaaatacaaaaattagccaggcgtggtggcgcacgcctatagtcccagccactcgagaggctgaggcgggagaatcgcttgaacccgggagacagaggttgcagtgagcc

SEQ ID NO: 74662 - DNA, 1040 bp, Homo sapiens
aataacaaaagagagcaaggaaagagaaagcctgggaaataatatttagggaccaaggggcaggcctggcttctgaacataacacctcctcataacaccttagattcctcctcctcgtaacaccttaggtgcaagacctgcataaacagaatgcatgatgctgttctagccctttccttctctcattttcgtttcagactgagagggaaataaacaggcaatttgagataattctatgaatatattgaaggtgagaatagccaaaaaatgtttcaaatccactattttcaaaaccacctaatcatctctattattcctcttctcctctgaccaagaaagaggagtgggaggagagggggagaaaggatggcataggagttaaaccagtttttctcaccttttagctccttatcagtgtaattgtggggactggtcaccagctcttgcttgagcttttccagaagaaacttcactactgaaatattccaagaggacttgatgctgccacaaagagaagagaatgaataaagttgtcggctttgtaagagccagacaaacagagatacccagcactaatcaactttgtggcaaatccctccacagcctaagaaggtatggtgagatcaaagccttagtctcattgctgtattggagcatccccctctacttccctgtccttagcaaagtaccttctaattctttttcctcaaggagaccatacctttcagacccattgaatctcttgtcattggtgatgtggttatgcacattgtggaccagtttctaggaggaaaaaaagaaaacacaatcaagccaagagtggatgttatgaaaactctcctctggtccctagggtaaaaaggtattgtccctaaggggctctctgcctgaatcctttctaagccaagagcctatccaagttactatttctagtgtggtcttccctgacttttcatttcatgtgtgtcaggattccaggatcatccctggccttacttctgctcctgagtagtgtgatcactggagcagagggtctcaaa

SEQ ID NO: 74663 - DNA, 1050 bp, Homo sapiens
aaagcctaaaagcttgatgtttagcaggggacttcctatccctagtgttacagaataacctctctccttatccctcccactctggtaggattcagtacagcattcattcaatatgggaggcctaaaatcaacccacccatcactcttcacttatctctccagactgaagaaaaatttatagaaactgagctcactcacagagagtacaagatcccgcttgcgcctggagttcttctgcccacttcctctggtcctgcatggggaaacggtcagccctagagagtgtctcagctccccagtgctcccagggcctgactcttccaaggcactgtccagcgcagcagcggcattgagcatgtcctcagggcggggtggtggcagcttggttccattttctggtcctgtctctggggttgcccgctggattgccagttgtgtggctggtgagagttgcttggcataagcagggaccagaactcgctgtactgcaccctcagaggccacgtaatcatccaccagctaagaacataaaaaataatagcctattagccagccaggcttaggggaacctggttaaccatcattctttggctaagaatagtgaacagaaagtggaaagaaggggaactctagcacagtctttaatggtcaatggcttgtttctctgggactcctatgagtgttgggcaaatatttcttgtgtgtacagggcctctcatgttgggttgttaccatagggctgctcacaaggagaaagcatgtttctgacactgttggtgaatagtcatttatggatagctcttggatataagaaatggagctagataagtgttttgtctgaaaggactgggtgaagaagtgatgacaagaaagaaaccaagcaagagaaggagtaagaaaataaaacagtaacagcaataaagaggagacataaaagacaaatgagcaaaggaggaagacataaagtcagaaatccctagagagactggcagcaacagctcccctcacctatcctccattcccagagtcagtccatgccctcaccttgat

SEQ ID NO: 74664 - DNA, 1039 bp, Homo sapiens
agttataacttggggttatttgtgtatatgtacaatatgtgtgtatatgtgccatatcagattttattttcaaaagtgataaatatatctggttttatgtgtgcaaagtatcccctaggatgtgaatttttttccgttgtcttcccaaatgtgatcaaaatattttgtgtgcaaagcagagcttagaagaaatcctatgcttagcatacttaggcactttctatgtgcatttactatatttttctgctcctaaaggatcagaataatgaataattaaataattgccaaggagtatatagtccatgtggcaaatgagagtaggcaatttattgaatctgtggttcaaagccttcagtgactgttttgcctaagtggttttgctttttattgtctcacgttcttaagtgtacagctgtgtatattttggcctttatgtgtggtttggttggtgtgttcagaagggaagttctttcttggctttttgacaaaatggtcgtttattggttggaatattcgaaaagctccacagctggcaaagtatcaggaaaaaaatccagtcaagtgtaattctcaaaaactgttcatggtgatggtgatggggagccaagaggatgcaaaggcaaataatagaagggataagaaatgccttttggttatcatgttgcatttttagaatggaaagcttctcatttctaagagtcacagaaaaaagtatatgaattagagaaaaacaggctcgcagagcagaacctcctgttataggagccctattttcacttcattctgttacagaatcactatctcctcattagaagttgtatggaaaatatctgtatccaaatttgtattcgcagattggagtgaaagcataggaggtatatgaggtgctgagggagaaactggaatgtcacaaatgcagtgacaaccaggagacaaaaaaaaaaatctactgtagaatttaaatttcattacaacaaaacttctgtataataatgcatttctattacacagctagcatcctactctatttcaagcagta

SEQ ID NO: 74665 - DNA, 1039 bp, Homo sapiens
aggctggagtgggaggactcaccgctaagggttcagaaccgattttcaaccagtcacgcccttctcaaagatggccgacctcacttcccttacgcaacatggacgttttcagtcacttcctgtgattttgaggttattctgatccaggactacttgcatgaccaaagccaagatggcaggtacgtccttttagaatttaaggttagtgaagccatctatttccccgacccccttcagtgaaaatggtctttcgcatctggcccttctttttggaggcgtgcttgccagcagtcaaaatggctccattccggaatagatttaataggaagtgaagctgtgacggcgaggcgttgcccggcctatctttgctaggcgttctcagaattagttctttctgcccacactagacatggcgcttgccagcgtgttggagagaccgctaccggtgaaccagcgcgggtttttcggacttgggggtcgtgcagatctgctggatctaggtccagggagtctcagtgatggtctgagcctggccgcgccaggctggggtgtcccagaagagccaggaatcgaaatgcttcatggaacaaccaccctggccttcaaggtgtggagccagcccccttgccaggctgagtactgaacgcccgcgacttgcctggcctcccagcctgaccggagtttgcggtggccttggccaccaacccaggcggaggctgggtcctctcgttcggaccgcagcagttttgctgtctcattggcccaggaggcccctgtctttgctctggttggaaagggtggcggtggggccgggggtaagtcgggggaggaaggtgaggcctcttgggttgattcctaggcgaccccaggttgctgctgttcaggatcttctagctgggaaaggccgcaacaacaatgaatcttggccgagggaaggctattgtaaacgtttaccaaagttttggaaactgggcggcccctcaaggcaggggtaactgaaactggcatgaaggggaagcgtggtgagggtaagcattgt

SEQ ID NO: 74666 - DNA, 1021 bp, Homo sapiens
gtcagctgcccagtgtggccagtgctgccaagctcttgtcagccatgatgtctcaataccggggactggatctctgtgtggccactgccctctgcggctgggaccgctctggccctgagctcttctacgtctatagcgacggcacccgcctgcagggggacatcttctctgtgggctctggatctccctatgcctacggcgtgctagaccgtggctatcgctacgacatgagcacccaggaagcctacgccctggctcgctgcgccgtggcccacgccacccaccgtgatgcctattcagggggctctgtagaccttttccacgtgcgggagagtggatgggagcatgtgtcacgcagtgatgcctgtgtgctgtacgtggagttacagaagctcctggagccggagccagaggaggatgccagccatgcccatcctgagcctgccactgcccacagagctgcagaagatagagagctctctgtggggccaggggaggtgacaccaggagactccaggatgccagcagggactgagacggtgtgagaagcaggacttggttggggatggtgtaggcctggggagtgggtgggaggatgggcagcagggggagggtcccgctggcagcagcctcacagcgtctggctctagcctgtatgggttgctggcttcatttattgcaagtctccatcctttcatgactcccagagctattatggctctgcccaacaagttcctattgactcccagtggattggtccagcctccttcttggcaccaagtccgtctttcattcaacacttgcagtgtgcctactgcatgccagacgcatgctaggtgctagaccctcttttcttgccatcttctctgcttttttccatcatctcatccccagtttctcttagtttcggtcctttatgtgtctcagcttcagcgtctttgtctttttctcctgatcactttgtcagcatggtaagatggggcacccgggaagggagcagcccctctcagaacgaggcgta

SEQ ID NO: 74667 - DNA, 1061 bp, Homo sapiens
actcggtgcaggtgtacggctacgagggccgcggctcctcttgcggctccctcagctccctgggctccggcagcgaagccggcggcgcccccggccccgcggagccgctggacgactggggtccgctcttccgcaccctggccgagctgtatggggccaaggagcccccggccccctgagcgcccgggctggcccggcccaccgcggggggggggcagcgggcacaggccctctgagtgagccccacggggtccaggcgggcggcagcagcccaggggccccaggcctcctccctgtccttgtgtccctccttgcttccccggggcaccctcgctctcacctccctcctcctgagtcggtgtgtgtgtctctctccaggaatctttgtctctatctgtgacacgctcctctgtccgggcctgggtttcctgccctggccctggccctgcgatctctcactgtgattcctctccttcctccgtggcgttttgtctctgcagttctgaagctcacacatagtctccctgcgtcttccttgcccatacacatgctctgtgtctgtctcctgcccacatctcccttccttctctctgggtccctgtgactggctttttgtttttttctgttgtccatcccaaaatcaagagaaacttccagccactgctgcccaccctcctgcaggggatgttgtgccccaggtcagtgcccctagactgtggggcagggcggtggatgaaggctcccactccccactgcctctaacgtggctcccctgtccttacagacctgcctgcatggttccatccattactcatggcctcagcctcatcctggctccactggcctccagctgagagagggaaccagcctgcctcccagggcaagagctccagcctcccgtgtggccgcctccctggagctctgcccagctgtcagcttcccctgggcatcccagccctgggcattgtcttgtgtgcttcctgagggagtagggaaaggaaagggggaggcggctggggaaggggaaagagggaggaaggggaggggcctccatctctaat

SEQ ID NO: 74668 - DNA, 3066 bp, Homo sapiens
gaacgggaaatggagcggcgggagcggactcgatcagagcgtgaatgggatcgggacaaagttcgagaagggccccgttcccgatcaaggtcccgtgaccgccgccgcaaggaacgtgcgaagtctaaagaaaagaagagtgagaagaaaggtaggtacttagctatggggtacgcatacccactagtaggtgggaaagggacccagatgggatgggacagagggtcagatgcatcatatctggttcacttttttccacctcagagaaagcccaggaggaaccacctgccaagctgctggatgaccttttccgaaagaccaaggcagctccctgcatctattggctcccactgactgacagccaggtgagtgctcttcttcgtgccctgctccctagtggcactgaggcttgaggtcagggtgaggggagattcatgtgactgcgagagtgagtcggcccaagtacttcctaggtttaggataaactaagcatcacaaaaaggcagttttcagttaattggtataacatagagaaaccagactcaggagggtaaagatagacacgcagatagcagctgaagtttgtggatgtctgggaagctggctgtgccgaccaggcttcttagaacttgattttaggccgtgcgtggtggctcacgcctctaatgccagcactttgggaggccgagtcgggtggatcacctcaggtcaggagttgcagaccagtctggccaacatggaaaccctgtctctactaaaaataacaaaaattagccgggtgcagtggcaagcgcccgtaatcccagctacttgggaggctgaggaggagaattgcttgaacccgggaggcggaggttgcagtgagcagagaccgtgccattgcactccagcctgggcaacaagaacaaaactctgtctcagacaattaaaaaaaaaaaaagaacttgattgtatttagctgagaaatcgtgttttataaattcatttccctgctttttaagagtttttgcatctttaacttagtttcttagtaatgggccttttgggaattttaggcttatgctactcaaaaaagagatttgttcacatctacgctgacggtagggagctagggaaataccaagggccaggcatggatggtgccagtacctgtcaatgtgtgtaaaagttgaaacttggtggctaggcatggtggctcatgcctgtaatcccagcactttgggaggctgaggtgggcggatcatctaagcctccatctaagccaggagtttgataccatcctggccaacatggtgaaaccccatctctactaaaaatacaaaacttagtggggcatggtggcagacacctgtaatcccagctactagggaggctgaggcaggagaatcacttgaacctgcgagtcggagaccacagtgagccaagatagcaccactgcactccagcctgggcgacagagtgagactgtctcaaaaaaaaaaaaaaaaaaaaactggcggggcgcggtggctcacgcctgtaatcccagcactttgggagcctgaggcgggcggatcacgaggtcaggagatcaagaccatcctggctaacaacggtgaagccccgtctctactgaaaatacaaaaaaattagccgggcgtggtcgcgggcgcctgtggtcccagctgctcagcaggctgaggcaggagaatggtgtgaacccgggaggtggagcttgcagtgagccgagatcgtgccactgcactcccagcctgggcgacggagcgagactccgtctcagaaaaaaaaaaaaaaaggctgaaactaggagggagagaggtgctctaagaaagacaggatgcagttgttgagcccccaaccccttcctgtttaactgaaaagctgaccctgagctaggaggcagggtccaggcacaaatggaggctgtgaccaggactgagctgcctattctctgcctttcctacctggctacagatcgttcagaaagaggcagagcgggccgaacgggccaaggagcgggagaagcggcgaaaggagcaagaagaagaagagcaaaaggagcgggagaaggaagccgagcgggaacggaaccgacagctggagcgagagaaacgtcgggagcacagtcgggagagggacagggagagagagagagaaagggagcgggacaggggggaccgagatcgggatagggaaagggaccgagaacgaggcagggaaagggatcgcagggacaccaagcgccacagcagaagccggagtcggagcacacctgtgcgggaccggggtgggcgccgctagctgggaaaacactagagctgcaggtaccagccactcggccccagggggttatggccacagagggataggcacagtctccaccaccctggagccaagggtctttcacatcacctatccctacatacataccaaatggaaaagtggccatccttttccccccaaacacacccccttaacctatctcttgggacttagcccgaccctccctctcatttcccattaagtctgagaggcaagagctaggttaggcaaggaggtggttggccagagatggggaacagccaggtgccccagtcctctgatttttcctccatcctgcttaccacctccctgggtacttacagccttctcttgggaacagccggggccaggactgggtcacctatgagctgaatcagcatctcctcctgagtcccagggcccctgcagttcccagtctcttctgtcctgcagcccttgcctctttcccacaggttccactttatatccaccttttccttttgttcaatttttatttttattttttttattattaaatgatgtggtctatggaaaaaaaaataaaaatctgacttagttttaaactgtgtgagtggctttctttgggcaggttaagaagccactgtggatatctgagcgtggacatctgaggatatctggagtaggagttgctctcattccatgtgttcctttaggctgactgcttcctgcttattgaacttcccacgtcttttatcccctgccttggccctgaccaacccaaag

SEQ ID NO: 74669 - DNA, 1100 bp, Homo sapiens
caggtgccctccccaccccggggcaagattagcaacattgtccatatctccaatttggtaagtcattgtttctcaccatcccagcttgcttagtggttaagtttgagctttaggcttatgcctcctaggttccactcatagttgaactggtctaccaatagattaagttactcactgatcttgagtgagttacttaacatatttacccatctaaaaatgagggggaaaagctgttgccctgcagggttgttttgaggacttgcagaaggcctcacatacaacgtctcaattagtgctgggaagcaccaccactcttctcacattcttactgcaaggttcctaaactctctgccctcccccaaaccttgaaactatactcctgtgacagcagctcgggaaatctaaagattgggtggtggtcttgccttctgctagaccctgaaagtctattttcattggcaggtccgtcctttcactttaggccagctaaaggagttgttggggcgcacaggaaccttggtggaagaggccttctggattgacaagatcaaatctcattgctttgtaacggtgaggggaagaagctgattctataggtcatggcatatatttccttttgtgaccagtgtgggcaggtttaagggtgttgcagcacgtgggaagggttgcagacacactgtgaccctccatcttctcccttcctccaccagtactcaacagtagaggaagctgttgccacccgcacagctctgcacggggtcaaatggccccagtccaatcccaaattcctttgtgctgactatgccgagcaagatgaggtaagaaacctagggagaggaaagagaggaggggcaggggaagccattatctgctagatttcagctgagatccttgccagacctgcagtctctgagcttctgttcttttctcttcttccctggctttggttcctttaattgtaccatggggcttcaaagtggtacctgggctccttttttttttttttttttttttgagacagagtctcgctgtctcccaggctggagtgcagtggcgcgatctcagctcactgcaagctccgccttccgggttcacgccat

SEQ ID NO: 74670 - DNA, 1634 bp, Homo sapiens
ttggtcaggctagtctcaaactcctgacctcgtgatccacccgccttggcctcccaaagtgctgggattacaggtgtgagccaccacactcagcctccaaatatgatttctttaagttaaccttttaccaaaactccagccagaggtaacctgtaggtattacggtttgaactagcagaggtcctgagaccatctaactgttgggtctatttcttggggacagcagctaccaagggggtgccagctggaaacagtgacacagaggggggccagcctggtcggaaacgacgctggggagccagcacagccaccacacagaagaaaccttccatcagtatcaccactgaatcactaaaggtgaggtgggaggagccagggaagggaggatgagacctgttaaggtgggagtagacatgggcccagtgtaacggggtggggggtatctgtgtcccagagcctcatccccgacatcaaacccctggcggggcaggaggctgttgtggatcttcatgctgatgactctcgcatctctgaggatgagacagagcgtaatggcgatgatgggacccatgacaaggggctgaaaatatgccggacagtcactcaggtaaggcttctgcaccccagtgtcaggggaaaggtgggagcagtagatgcagagcagctagctgaggagctgagataaagtctttggagggaacttccctgtctgtgcagagggttgggttgactgacactttcaggggtcagactaccaaatccagctggctacctgttacaaataaagtttgattggaacacaaccacacgagttcattcacttttgtctgtggctgtttgttcactacaacatcaccagagttgagtagttgcaacaaactatgtggcctgcaaaacctgaagtactgctttgctctacagaaaaaatttactaactcctgtcttagttttcctcaaggcaaagttgaggcactaacaatcccaggatctggtagaagtgagccgataacgaaatacccctagcggaaggaacatgctagattgactgctactcttaccggggaaccagaggctgaaaagaatatgccagtttggtgtttaacagacctgctgtgttctctgacaccttgataggtagtacctgcagagggccaggagaatgggcagagggaagaagaggaagaagagaaggaacctgaagcagaacctcctgtacctccccaggtgtcagtagaggtggccttgcccccacctgcagagcatgaagtaaagaaaggtgagtgacatattgtgagagaaatgtaatgcggctccctgaattctcagagcacctcatttggatcgctgaaagctttgaatgtttcctgcctttcattatattttttcgtatatcatatctttctcctacatattaagtaagctacttgagggccagatttgactctgtttaatctttgaatctccatgatgaggaggttagcctagcacagtactttgcagattataggtgctctgcacgtttagattaaggagtggctgcttggtataaaagaaagggaaccgtgagagttacattgagggtgaaaagagccagtattgcttcctaccaaaagctgttcttgtggtcttcttga

SEQ ID NO: 74671 - DNA, 1259 bp, Homo sapiens
aaccttcctttatcaaagacacctttgagttctttttgctagcacttggctcaagagcctcatctccagtgggtctggtgctgcccttttccacagtgtggtgggggtctgggcagtcttgacatgacagtctgctgtccaagcatctcaaagccattgtcagtgggcatcagtctggccattgaagaaaggagggttaccttgttgaagttgccatccaaagttggttttccttgtttcctcgagttagcaaggaaggacctgggaggactagatgacccagtttggggcacagtttgtttggcttggtgtcctctcgactcagacggtgaaagagggggtatgaccaacatctttagggggctgagaggctactgaactcctcttccagcttatttctggttaagctaatacacaggtgtgatacggagtagatgacttttccctgctctgatgtttagttttatttttttctctaacttgcattgattctgcttcgtttttgccgtttgccgcttctgttttggtctctgtctgtctctgtgtctctctctgtctctctctctcactctatctgtgtctttggaggctaagctaagactgccccatctaacctccttcccccctctctgtggggtgtctctctttctcttttttttcccctttttcttcttcatacagagctcgctgcccaaatcattcaagaggaagatctccgttgtctgtaagtccagccccaaatccctgataaaagtcaggaataccataaaaaccagcattcattgagaaccagaatttcattctcaatggcattcttgggtcactccctcctgccccaccccttgtgcctagcaaatctgaatcctttcctatgtagggtttcattttggaattcaaaacttgagacaatccccatcatattgctccagtcacattttaatgagatacagtgtgaggtgtctgagaccatgtcccatttagccttagaggcatttattctttcagatacctgaatactcaacaaggaatgagtttcagggactcctatgtgatgcttagcagtttatgaattattctgggtattttgttgttgtttttttgagacggagtctccctctgtagtaccctaggctggagtgcagtggtgcgattttggctcactgcaacctccgcctccgggtcccagttcaagcaatcctcctccgcctcctgagtagctgggattagaggcatgcgccaccatgcccagctaatttttg

SEQ ID NO: 74672 - DNA, 1218 bp, Homo sapiens
tcatccacctgactggaaccactgtctcagctggagtccctgaggagatgccagccacaactctccgaagagaagtattctgaccttgctgctgaatgtctgccaggtcctggggtattcacctacccccaggctaccttcatcagaggctccatgatcccactcggtgagaggaccccctccccagttacaggcagaggagaaagggactctggagtcatcacctggattccaagtattgggtggtgttattgctgcagcttgccactggtggacatagggtcctgcctgcctctcacgataaaaggcaaggatcattcctgctactcacaggccatctcatcagggactgcaagatgatgtcccttcagggccaggactgatgtctctgcccctttcccccctctatccctcgctgagcctggccaccgccagtgaactgtcttgacatcatggaaactgggcagcgtccccccacacgtttccctcccgccccccctgcgcccctgggaggactctggcagtgccgtgctgactaccacgccgtgcgcccaccttttttgccaacccaaccccccaccaattgcacagcgcctagcagggagggctcattctgattggaccggcggttgactagatacagtacacagtgaggtgcgattggctgaactgaagatcccaggtgtgagatggtacctggaacatttgtcatattcctagtttattttcttctttattttcttcttctttttttaatattttattttatttttttctatatctttattttttctgatttcttttatttatttatttggttcatgtttttcctgttttaattaagacctttttttttgttttgtttttctcactaacttacccatcgagagcggcccagctaggggtcaggctggcccttaacagagaccaaggagacttggttagacgacacaaacggggctgcgggtgggggtggatgggaaagggatttcatcacgaggtttctgccctaccctttagaagagtggtagagtggtcttagtttttccagaaataagcacctacacttgaaaatactctattccctttttctctctcacttttctcccccgccccccatagtctttcgtcattcacccactgagtgtttggggtagagacttgtcccaaagatgtcttctggtctttggcagagcccctaaggcttgagccctggtt

SEQ ID NO: 74673 - DNA, 3003 bp, Homo sapiens
cctagctcccttcgtcttccttctcttcctcatggctttcattccgtctttcgttttggtttgttttcagtcattctgccttccccctttgtcctgcctgcccagtttctaattggccccacatgccctttctgtatgggaaatagatattttttttgtataagccttttctctagatgtaagcagctaaatctcgtgtttctctgggggcctgtttagctgggggcacagttccgattttcccctccccctaacccccctagtgcatcccttcttgactgctctagggaggttcttctgacctctgagtgtcagtcagtcagcctgttgggaatgctgacttttctggtggtggttatcggcctgggaggcttggtttcccctctcctgagccttaggcctctgatcatcttgatttgattttttttgcttggtgtttgggtggtagagggggtgagatttgagatagaagttggggacgaagacagaaatcaaaggtggaaagatagtttatctgaagtgaatctctgggattctttgcctgaaatgggagctaacttgtgagattaagagtgggagagtgggtttggtgttcttgggggaagctgcctgtgtgggggagggtgtgtcctgactaggaggcctgctctctttatctcttggaagttggaatgagggagtgggagaaactgggtgaaagccgaatgtaggaacagtttctacacctctgagcaggtaaaagtggccctaatctctgagctctcatactcaattcagcagttttaatttttccttttgaatgagagagggtccttgaagcttgaaccttcaccaggcctgcttcttccctgcagctcccaccccccgccccgcaccccccaccccccaccattttctccatgctggtgtctccagatcctgaggatcagcaggcctttacttattaagcagttgattaaacacaggtcaggcttttttgccaaagccttggccattctttcttgtctttttaagggaatcgggcttcccttcgtttctcgtgcaattttgccatataaaggtgcctttggccagggagactgaggccacagggttgtgggcaaatcacagtcacttttgtgggactattttcagaggagggtttttctcctttcatataggagtactctggtgagttattacctgagaatagttggagtcctaaccccacaaatgacaacttttaactcatctgggcaataggtggatgtggttgctgtgatccacgctctttccccaaggaaaatctatttcccacttttcccattgggacaaggtctctaaccttgatcagaaaagcagccctcctaatcccacccaagtgatgaggcaggagggtttcctgacccagtaactaacatcttgctctctcttccccttggttcttttctgcccgcccccccaccaccactcccccctcctgtcagtgaggagaaggaggaagtgaccatggacacaagtgaaaacagacctgaaaatgatgttccagaacctcccatgcctattgcagaccaagtcagcaatgatgaccgcccggagggcagtgttgaagatgaggagaagaaagaggtaaacatccaagccacctattggggcgggtgggcaggaatggacctaggggaaagagtagagcactctagtgatccctcttacacggtgggttaacttaaaggagggatgaggcagggacttggatcagaatagggccaagggagaattcgctggtttagcaagggagaccccttgtgacggggacagggctcattcattttcctttccttgttggggaagtagtgcccagactctagacgtttgtaactaacgggaaagtctgataatggccctttatctaagatttatgttcagcttttcctgctgtcttcccaagcttctcctggtggtaactcctttagctttccctcctttttaaaagcctgatggagcccaacgccatctagtggacattggtggttctcaccagaccagccatgctgagaaatttttgttcctcctctgccctccagtggtctgactgcagagatgtagctacttagaagccagcacttgtgatccggaaggcccattctcagttacctgtgacccctctacctccttttttggcatatgttatcttgtgtcctgcacccacttcagggggcttcccccatcagagccagcgaagtcttcttggctcttaaagtaattgagaaagaatgagctgggtttaggagaggggtaacaaggtgggagggactgttgtgtgtgtagcctttttctggtgtgtgttgcgggggtgggggccggtgaaagtgatttgatgtgcagaatattatttattacaaggtccttcttccccgtaaaactttgtccaagtacctcatgtacggtaatccgcccgtaaaatataaccctgcccaactggccaatcgctgatgccgcctcttcctctggacccacccgctgctactgagctgcccaatcagagccaagtctgctatccaggtgtcttggccagaggggggcatgtatatgggctcctgtgatgggcccccttttgcctccctgtcttgcttacatcagggggccaagaagaacactgttctggagagacttgtattgagcaagcaaaaaacatttggaaaggggtggacttgcatcatctccctacttgggacaccccaagaagagcttgtgccagtgctggggcgcctgcccacatgcccttgcccttttgaggactgtgggttgccttgtttgctacagactgttgggatccccatctagggcaccaagacctcctaaagtttgtgatcgcagtgccatgctgtaaaacactgagtgggaccctctacttaagctgtgacgactaggaaccgtgcagaggagtctagggtctgagcccctggggatttaatgctgatgacagcccagcccatgtgtcaccacttgctcatcagatggact

SEQ ID NO: 74674 - DNA, 1016 bp, Homo sapiens
gcttaactcatttccagctccctggttcgtagaagttctacatgaggctgagcagcagggttatctccagggcccccagggtcaattcttcctcataactcctccttttatctgccaaaaggaagtcagccttttctcagttctctcaaaaaagaattctgtcagaacaaggatcactgaggaaaaggaaaaaaattaaaaattctgataaaatgattactggcataaatattcttgaagtacctatttttaagccatgttcctttccttattctaaaatgaaataacagatacagagggccgtgtgtggagctggtactgtgtatgtcctgccctgcctttttcaggctccaggtagaagaaaaggaaccaagcagatctaaatgttttgctctgttcgtttttgctatctcctgacaggggagcccaaagaagtgtgaagctgaagaggcagagccaccagctgccacacagccccaaacctcagagactcagacctctcatctgccagaatcagaaagaattcatcacactgtgtaagtgatatatctcgaccggggtataacagggaactatgagtgtgcgatagttcttcgctccctagggttctttgactaagcagtcctagtttccttttaaaacataaaggcagagctttatctggacaaaggctagacttcagttactatgttgggagctgccacctttaaggtaacctgaaaagtggtcgtcagggcacaaggaaaactcacctgggatcatccagccaaaatagtcaactcctttaagatttaggcaatagaagcttctgcttccacactcaaaaccatgtaagggaattgactccgggcatcttaatctttaactcatgtttacctaggaacccagtttaataaaggatattgagggtcttaataaaggcacagctgggtgctattttttagtttgtgcattttccctagttccctagttactacctgtcattaagctatcctagttctgctaggatatcctag

SEQ ID NO: 74675 - DNA, 1026 bp, Homo sapiens
tcaagtccttcagacaccaaagcagaatctccagcagagaaagtgccagaggagagtgtcctgcctctggttcagaaaagcacactggctgactactcagcccagaaggatcttgaacctgagtcagacagatctgctcagcccctccctctaaaaattgaggaattagcactggccaaaggaatcactgaagaatgtctgaaacagccatctttggaacagaaggaaggcagaagagcttctcatacccttctcccaagccacagattgaaacagtcagctgattcatcctctagccggtcctcctcatcttcctcctccagttctagatcaagatctcgctctcctgacagttcaggttctcggtctcattcaccgctcagatccaagcagagagatgtagcccaggcacgtactcatgccaaccctcgtggtagacccaagatgggctccagatcaacatcagagtccagatcaaggtcacgttcacgttctcgttcagcatcaagcaacagcagaaaagtgagtatgagagaatcccgggtgtattaatgttctgtcatattccagtggttttcatttcagcccctggagagcctgtcatgatttctgaaaggaataggaaaagcctcctttactctccttcactgattactttctcctcatttcagaatcgtattttcaattaactgattcccgaaatggggttctttttcattttgagtcccttgatagaatgttgaatttatgtactcatctcctccactagatggaaacttcttgaggatgtgggcatgcccttttacgtgtgtgtcccaggatctagcatctagttaaaacttaataatttgttaaataagtggtcaaggagaccactaaatgggaataaacacagacaaaatgggagtaaacacagacaaaaaggtccagagtataaaatttggtccatggaaactggaaaactcagcaatctactgaatatataccatatacaataattttccttgttatgtgtttcattttgtt

SEQ ID NO: 74676 - DNA, 1048 bp, Homo sapiens
ataacactaagtgggcagaatacaaaaatgttatgtgtagtgtaattatgactgtacaaaggaaatgattagaggaaagaacaaaaagaaatataccaaaatgataaaaagataatcgtattaattgatagtaggttagttcctttcagccccctatccacccttttactttccagatgttctgctaatattttactgaaaaaaaaaaaaagggggtgcttgaagctaaaatttaaactacatacaagtagcttcattgtgatatttcttttggtcactttgttttgattcccctaagggctacgttagtcatgattgtctcctgtcactcctgtttctgttgctgaaagtatatatcattgaatttctccttcctaggggtgtcttcattagatactttctctcctctgttgactgtgagcaaatacatttggagccattgtgtatctgttctttcaggcaagagcagctaaactgtctgagggcagccaacctgctgaggaggaagaggatcaagaaacaccttccagaaacctaagggtcagagcagatcgaaatttgaaaacagaggaggaagaagaggaggaggaggaggaggaagaagatgatgaagaagaggaaggtgatgatgagggacaaaaatctagggaggcaccaatcctgaaagagtttaaggaagaaggggaagagatacctagagtaaaaccagaggagatgatggatgagagacccaaaacaagatcccaggaacaggaggtgttagagagaggagggagatttacaagatcccaggaagaggctagaaaaagtcatctggccagacagcagcaggagaaggaaatgaaaacaacatctccccttgaggaggaagaaagagaaataaaatcttcacaaggcttaaaggaaaaatcgaagtctccttcccctcctcgactgactgaagatcgaaagaaggcctcacttgtagcgctgccagagcaaactgccagcgaggaggagactcctccacctttactaacaaaggaagcatcttctccaccacctcatc

SEQ ID NO: 74677 - DNA, 1441 bp, Homo sapiens
ttagctgggtatggtggcaggcacctgtaatcccagtgactcgggaggctaaggcaggagaatcgcttgaacccgggaggcagaggttgcagtgagccaagattgcaccattgcacttcagcctggacaatagagcgagactgtgtctcaaaaaatacataaaatcataataggcacccaattttgcataatatctcaagcaaaagtctataaatatagcctttgtcttttgggaactacctgtctaagtcagtatactttgaggaaaatatgtgcaggttgagcatgcctaatccaaagacccaaaactttttgagtattcacatgacactcaaaggaaatgctcatcagagcatttcagattttgggttttcagattagggatgctgaatcagaaagtataatgcaaatattcaaaaatccaaaatctaaaacacttgtgatcccaagcattttggaaaagggatacttaatatgtatataagacatgtggattgttagtacatatgttaaaccaatgtgtaacttaacaagtattttgaataattagtgttgagggggatgcggaatccaccataatcagtgtttttaggatgtatggaggtttccagctcttctgattaatacagaattccttcatggactacacttgattttagttaaaaggctgagcagcgatagactcttcatggaaatagattttttaggagacatttaatggtgggaaagaaattttccaaaaggctagagaaaatagagagcctttgagtctagttttaaggtcctgttttactcagtccctgtttttcttgatcctagtcttagacccagaaagacatttctagaaatcttttagtaagaaaatactggccaatactttggaattattaagttccttagggacctcttttctcctgaaatacgagagtagtagaccctcagctgatccactttgctccctgcgccctttcccccttgattttaaagccgagaggaaagagaaagctcttctaaaattgtcggtatttcttctcacataaaacaaaaaaaaatttattgaattcctactgcatacatatctctgtgagagtatattgggagttagcacagcataaagtctgttaggaagagagaacaattacacataaatcgaacaacagaagatagtatgtgacaatgatacagacatagggaaccaaaagagtggaagagctctgaggactacagtgattagagaaagcctcataaggagatacaggatttgagctgagccttagaaatggtttggcagagaggatacaagaagatatttttaggaaggaacaaagtcagagagataggaatgaaaatggtatttttaaaggagaggtagtagactaatctagccagagtagagtatttcacattcaagaatagtcagcaaaacaatttaaaaggtaga

SEQ ID NO: 74678 - DNA, 1050 bp, Homo sapiens
tcttcaatatagaactaacttagaaaaaagccttccaacattttagttatctttcttgggcgcaactataaggagtggacctttgctccatggaatgttcttctttgcattctcctggtttgttttcctagaccctctgttttcatttcctctacacagattggtgaggaaatgagccagaacagtttcataaaacagtatctggaaaagcagcaggagctacttaggcagcgtctggaacgtgaagctcgagaagctgcagaacttgaaggtaagcccagattgtcacttttaacaaggagttcgtcattcttatccctgtcaccaagtagataggcctgtctaactagacaatttcagaaataagtgaggctgagactgctacttacttgctttcatagcccatgaagccaagtggtttactatttacttttgtcagggaagaggacacttaatttgactgtcttgttagaagaggattcctgccaacaggaagagttataagtaaattaagctaccatttagatgaagtagagctgaatcccagggagttttttctttttatacggtgctctttttggtatgtatctctgtatctgtgactttgcctgacctccttcactcctctacatattcctacatgctgagtccttcactccctccctgccccgacccgatctgtactttgcagaagcttcagctgagtcggaggacgagatgatccatcctgagggagtggcttccctgctgcctcctgactttcagagcagcctggagagaccagagctggagctcagcagacattcgcccagtacgtatctccctccccactgcgctgttttgtcaatcctgcgtagttggtggggggaggtagttacacctcctttcatgctaagcctccatgaaagtcccagggaaattctgtgacattgatatttgacatctgtttctcatggaaagtataccctttttgaagtctgctttcacctatatattgtgttaccttctcagtgttttacgaagcagtgtgatttttcttctcatctgtac

SEQ ID NO: 74679 - DNA, 1026 bp, Homo sapiens
cttcctaggggaaatacctttttcccaagtaagcaaggctcatactcctctcttaaactagattagatctactttttaactattgagtttctgcataaaatttttaaattattccacagttaaaatccaaaaattattaggctgcacagtctcttaaagtttctttcagcttttaaaaatcccctcattataatgtgtcatatacttaaaggaaaaatccaagtctttgttaaagcaatagtgtgcagcctcagtactagatgaagtctcaggatactgtggaaaacaagagagccctcctcctcctttgttatcacctcattaagctgtaagtatcataatctagccagcattcagaggttcaattaagtactttaacaagcataagaaactgcataagttaatcagcttaattgtattccttttgcccattgcatgttagtctttgaagctttgcttttattaacaccgggtttgtgcagcaaacatgcctattctgtaatacacatgcaacccacccttcaacaatgtccattgagtgccaagagactcatttctactttaggtgaaaataaacctttactatgtttaggaaacatgactaataacatagaaagtattcaggtttttttgctttttcagttctaaataggacttgctaagcaagaaggttctagggaggagaacttgtgaagagaaagctggaggtcagaagggcaacttgggaatctgtattacaaaaaaaaaaaaataggaaaaggcataagctcctgttaccaaggatttcctttcacccagacaaaatggagttataactttgtctaaatgctgaatggatatcccttttcttagtctcttgatttcatacttttaaatactatacttgaattttggagttgtttgataaaatgtttcctggatatgaggccgggcattgtggctcacgcctgtaatgctagcactttgggaggccaaggcgggtagatcacctgaggtcaggagtttgagaccagcctggccaacatg

SEQ ID NO: 74680 - DNA, 1043 bp, Homo sapiens
atgggagggtgtgcactactctccaggagtgtcttaagctccttcctccttcccccaccccctccttgtttgtatctgtggtttcggcgcatgcgctgcagaaggagttaaatcccactacaacctacggcgttgctggcctgaggggggcgagttgggctgggtcggagttaggggtatagttgcgcgaaggggtggatggggttggtatcggtatctgcacgaataggactggggtagggtaaaatgtctgctcgattagatgaggaggtgagatgaagagagacctttatttgaagggacttgatgagagagaggtctctaatttagtggcatctagtggcaatttgggtggttaagagtttggtgaatattggtgagagaggcgaggcaggttgatatatattggggattttgaatcggtttgagtagattaaggtgggattgtcatgaggtaggtgtagctcgattcaagtgtataggtttggtttaaagaagggaagatgaggatgtcttggttttaattagagttcaacaggatacgtggcaggtagtgcagattaggtctgggttggctccagggttgagttggcagaccgttgcttatacagaagctgatagttttgtgtgtgtgtgtttgtgtgtgtgtgtttgtgtggatagactaggttagaccacagtttacagggtctgtggtcattttcttctgtagcttcctctttgaaaattttataaatttgataaatctaggtgccacagtactggaaattatacaaattgaccctggtactgggtaaccctttgaccaagtaattccgtcaggcaaaaaccaggagccccatggctggtttgagtattttaagtaattttacatgcatgatcagatttagaaggggcacttggcgaaagtgcagaagataatagggattttagtactggttctattactgatattatgacatagccaggtcactgattctgtgtgcctgcattttatatctgtacatttagtaacagtaaccatggctacctttatgggtctt

SEQ ID NO: 74681 - DNA, 1431 bp, Homo sapiens
ggaaatgtaaggaggtaacggatgttatggagttgttggcatatttcagaggcttatatgcacattgaaggctctttcatcataaataatgttttttctttcttcccccactgttgatagctgcaaaacaattagcatcagccttgaccagctgcacgtactagattttaaaatgtgtgcattttcattttggagaagatgtaatggaccaacattaatcattgtttttttctttacccaacctggcacatagaagtaagaggaagagaatgaacaagaaatatattggttatttttaggttctttataagaaagatggaggaagacagtgggtggggaagaatgggtttgaaaaaggcaggcaaataggaaatgaagttatttttggtgatttttctaaggtagttggataataatctaaataaaggactcttattattttgggtctttgaattcataaaaagtaattttctctgtagatgctaattgagtgtggtaagatgtcttgttgcttgaaagttgtattttcgttgctctacctggagagcatataacagtgcttttatgtttcaggatgccactggagtcatcctcttcaatgccactatccttcccatctctcttaccctcagtaccacacaatactaacccttcccctcctctgatgtcttacatcacctcccaggagatgaagtgtattcttcactggtttgccaattggtcaggtccccagcgtgaacgtttcctagaggacctggtagctaaggcagtgccagaaaaattacaaccactgctggatagtctggagcagcttagtgtgtctggggcagaccgaccaccttctatctttgagtgccagctacatctttgggatcagtggtttcgaggctgggctgagcaggagcgcaatgaatttgtcagacagctggagttcagtgagccagacttcgtggcaaagttttaccaagcagtggctgctacagctggtaaggactgataggcattcagaccaaagaagataaccatagctgatggagccatgactctctacaatgataactcaattcaaatgtgtcgcctaaagctctggaactggtattccaaccagctgaccgaactcactgaccagtacaggcatggttatttcaacattaatagcatgtcaactggactcctatttgtaaatgttatcaatctaagcaatccagctcatcagtctactagtttgcttctttccgagagatgtcaagtcctcaagaatttgatggcttcttctgcagctataaccacaaggaacctacacattgtaactcaagtccactgctggctcatgaaatgtgtaaagtagaaccctccttcccgagaaataagacaggacaataaaaggtggcgtttttgtactttacctggattccattggctggttttacc

SEQ ID NO: 74682 - DNA, 1040 bp, Homo sapiens
agatgggagtctcactatgttgcccaggctggtctcaaacttctggcctcaagcattccttctgccttgacctcccagattgtttggattacaggcctgagccactgtgcccaaccctggatgcttcttcatgaaaatgtagaaacttagagaaagtggtcaggagattaccaatgactccaatcctgtatttccaaagcccaatttaccatgtcctttccttttaaataactttgccttttacaaaaggagcattcagaacggcacttaaaccctcatttggactcgtagtttccggggtctcggaagccctggacctgaaattccctgctccctttatcccaatttatccaatatgttgggttcactggagacaagacagagttggtgtcattgccacagggaggggtgagaggtgggccagggcaggccaggggctgctgggcccctgacttgtctcactgagcggcctcctgttgcttgtgtccacaggagagtacttctggctggagccaaagaatgcatttgagaatttccaggaacctgacatcggcctcgtcgcactggctttccttcagggctcctttgcctatggaggctggaactttctgaattacgtgactgaggagcttgttgatccctacaagtgagttgaaagagcctggctattccctctcccttgaagggccacagcacctgctgctggaaagagggagcaggtgtccattgcccacctcgccttccaaagccccattctaactgtgatttgatctatcctgaagtcgtagttcatttcccaggcacttaaaccatttgccgttcaccccaccaggaggaggaaaggatccagtgactttcccagagcagattagaagctgaaaactgtcctgcagtaacactactgccttagagaatgaattgtgccctgagaggcttctgggaatcttgcttgtttcaggacaggccggtcttggtgtcttgaggcagggggaaaaggtgcattgtggagattcaggtcaagatcaacaggtgtggagcgt

SEQ ID NO: 74683 - DNA, 1038 bp, Homo sapiens
aaaccctgtctctactaaaaatacaaaattagccgggcgtggtgacatatgcctgtaatcccagctactcgggaggctgaggcaggagaatcgcttgaacccgggaggcagaggttgcggtgagccgagatcgtgccattgcactccagcctgggcaacaagagcgaaactccatctcaaaaaaaaaaaagaaaagaaaagaaaaaagagttcagcaagtttaagtacaagctacccttggaattgggttataactgaaccgttttgggggaattttgcagcctgggtccaggtttatagaatttagtgaacaccaacagagcctacaagccttctggtccaagaaccaactaaacctcacaggatccacaccctgtcttccaagactgaaatatgatggagggtcaggctagccctcctgggctcagtgcagactcaacagaacccattctcatccaccttgctccatgtctcgggggacatcagccctgagaattggtgtgtgagatagcaatttttcaggcccaggctgaaaaagtaatgagtaggattaaaatagggttccccagggtggcatggcaggccaccctggatttcttggtgtccagtttttcgcttctccccgatccaggccagctgaggagccatgtttagctcatgctgaagagagaactactcagctcttggaaaatgctgagctgggtattcctgcctcttggctgagctaaatactgggtggtgattcagcagaaaccccagctccagcagctggcgcaggagctaacaggataagaaggaaggggaagagagagccaggaagggaggaggggaggggatggggcagtatgggcaggagcttagctggaagtgtttggtaaaagctgtgtgcctccaggagcactcacagccctcacagcttctctgcaccctcctcctctgctggtgtgtccttggaagagagaggcccttccggaaggctcagagcacctcctctcctttggagggggttccgagatttctaaaacgttgtaagtgctt

SEQ ID NO: 74684 - DNA, 1059 bp, Homo sapiens
ggaggctgaggcagaagaatcacttgaacccaaaaggcgagggttgcaatgagcctagatcacaccactgcactccagcctgggtgacaacagcaaaactctgtctcaaagaaaaaaaaaaagtataaacaacagatggaagcattatttgtgaccactgttacagaagcacaaggtaaggagaattggacatataatgtacatctagaagagtggagatctcccttttacacacagtggagataatgtcaggtacattagaaaaggtggtacatcttttgtcatgttagtcagtattttattttattcaattgtggatattctcacagtgtgtattgctctcttcgtagctgaagcctcaggagaagatgtttttcaaaagtcctgtggagacagctttgcagtattttagtcacatctctcaggtatgagaaacaaaagtgaagaaaatctgactctccaggcaaattctaattgcatcttattcctttatcaaaggttttctttaaactgcatttgtacacaatggagggaaattgactgctttctttgctttcttccttgatgatacaaatttcaatcagttaactttttattgacccagaatctgtgataggctgtaaaagtcactaagtagctaacatcttgccttgtatttcctagttgtattaattaatttctacgactaaaggttgttttagggagctttatcatttttctcagcagatagatgcaccttctaaaaattgctttgagtatataggcctggccctgcaaacaataggtttgatggtttaacttgcaaccagtagtttatagcactaagtttacgagagtatttcttgtttcccattctcacttttcaataacctttttagtaatacttacctcttcatttagtgttcataactggttgcttgaattttaggaaatatcttttcttgatgtgtcatatgttggcatacaattgacttgatcaggagcaacaggaatgtagaagaaggtagagagaaggcaggacaaccatttgagagagttcccaagttgtaaaaactttgg

SEQ ID NO: 74685 - DNA, 1059 bp, Homo sapiens; identical to SEQ ID NO: 74684

SEQ ID NO: 74686 - DNA, 1028 bp, Homo sapiens
caccaacagctacgggaaactgatatccctcaattgagtcaggcatcaaggcttagcacccagcaggtgctggattggtttgactctcgattacctcagccagctgaggtggtagtttgtctagatgaagaagaggaagaggaggaggaagaactgccagaagatgatgaggaagaggaggaggaggaggaggaagatgatgatgatgatgatgatgatgtgatcatacaagactgagtggggagctgggggaggggaggtctgttactgaaagatgaaccaacttagtaactgtttaaacaaagaaaccacatttttaaaattaccttgtggcagagaactaaaaagctttgtgttcttcagggtgggtggcagggggatatagtgagggtggaccagggagaatgaccatagggcactaagtaaggctgggattggatcagcagaaatccaaccctctaaccttagggtagggagtgctaaggatctggggaaaccatgggctgggaagctgctcttgctctcctcgtgtctgctgtttttttcccttggtgtactatacagaggccagatgttggcaccacctctccaggaggattggaaaggaggagtaaaggattctgatttgattgatgattccagtgcatccccaatcccaccatcttacctggaatataaggctgccttgtaccccttttctgagcacaagtctgtgcgtaatgcaactgactctcttacttttttcttagtaactgatcatttcctagacaaccaagattctcaataagtcccagtctcatcacaaatattaatatttccttttcctcataccaacttgactatgtttcacccgcttcatgactaaatcacaggtggcagaatttttcagttcttttttttttttttgaggtggagtcttgctctgtcgcccaggctgtagtgcaatggcgcaatctcagctcactgcaagctccgcctcccaggttcatgccattctcctgcctcagcctcccgagtagctgggacta

SEQ ID NO: 74687 - DNA, 1055 bp, Homo sapiens
ccggagccgcagggctggatccactttatctgagacgaggcgcctgcggccgacggcggaaaacaccaaaggcacccgggggcggggcgacccgatgtggcggggaggagtaggagagaccaggattggcgggagcggtccaagggagtcaagccggggagggcgaaaagggtggggaaatcaggggcgtgggggcgtgggggcgtgggggcggggggagtgagcggaaccaaagaagctccgggagatccgggtgttaaaagctggttggatgtgagtggaaggaactcagaatataggaggaaggagacccgaaacggcaccggagggattataaaaaaaggaaaagaatggggatgatggtggccttcccttcagtgagtgggctctgggagaaagggaggaggtccatcaggcctaggcggttgaagaaggttaagaaccttttggagatggaggaggtatgatgtgaagtagcccacccagtcgaaggcatttacattgctggcgcattccctcttcttaccggccttttccacctcagatccccctgtcctacccatcctagctttaactcagccataattgccttgcttaatcccaggaacctggccactgctccttggtccttggcattatgacgggattcccttgtcacctctgacagttcctggctgcggtgtccgcggactggctggggagtgatgacaggtagctatcagagctccagcctccaggcagctttagggattaaaacggaggccaaagcaactccagacctgtttttatagccaaatactgagcctcaggggttgtacactcaggggcttccaggaaaatgccagccttacttttctggggtgccttttaataacctccaagcactttgtggactgtttgtcgagggacggtgaatcagaagaatcactattctgatttcctttgtctccgaagaggaagtccctgactagctatataactttgggcgagttacctctcacttctttgtgccccagtgttctccttgggaaactggatttaggttagatgacctt

SEQ ID NO: 74688 - DNA, 1083 bp, Homo sapiens
gtttcgccatgttggccaggctggtctgaaactcctgggctcaggtgatcctcccgccacagcctcccaaagagctgggataacaggtgtgagccaccacgcccagccagccctgcacacttctaattagtccaatgacttaggcaagtttcttcatttcattaagcctttttctttttccctaaaaaaggttatggttttggaaatactttccccgtggggttgttgtgagagtccagtgaaataataaggagtggtgcttattacaaaatcaaacgctcaacaaaaataggattcaaagccatttttaaaaatcacatttccttttgttggcttgattaaattgggtaccaataagattaacaaatcttgattaggttaagattagtataaaagacctttcttccagggtattcaatcatttagagcttgtcttcggtgctcaactttagttatcccagatcactgaagctgagatggctgatgaagtaatttgcagtgaaattttaagcgactgtgactctgctgcaagttccccagatcttgaggtaaggaattgtgagaaaaagtgggggtgaggggaatagtggggtataatgagtcacttgattttttggtttgctaatgaggatcttctcttgtccaaatccctcggccaaccatgtttgtttaactttttggttgggctatatgtatctttcgaactgtaggttagtgtgcccacaaaaatttctcttgcaaacgtacactgccattcctttctttttaataaatgtgtaggactgctaccaaaatatggcagtcctgccttccagggctaggtctcattggtacttggggtgcaggggtgtagtgggaacctgccaggagaaattcctctgggatcttgggggcttgagggcttaaatgaagggtggcacccaaatccccaatcaatgcctgttcaatcaacaaacatctaacaggacattatgtggtaggcatattgccaggccgtggagatgcgaatataaataggaaccggcccctcatctgcaggcgctcacaacctagttaggaaacagtaaaacaattaagcgcgcc

SEQ ID NO: 74689 - DNA, 1041 bp, Homo sapiens
ccctgggcctggttcgggagcccccggcagccaagaggaggaggaggagccgggactggtcgagggtgacccgggggacggcgccattgaggacccggtgagggaaggagggcgagcgagcaggccggcggctggccggccgggtcactggaggcccagagctcgggcgagcgggtggcaggcggggggtggggttgggcggggaataacgtggctggggccgggtcgggccggggatgggtcagcgatcactacaaggggcccgactggcttgattcgggcgtcacggttgcctagtgttgttctagagagggtagcttttcttttatcacgaccctcgcatggggcgagggaaatggccgagcatggctgaggccgcgctctggccgagagcagggcacagcccctgcgttggttcctcttaagctgtcctccataccctccccacttatattaggagctggaagctatcaaagctcgagtcagggagatggaggaagaagctgagaagctaaaggagctacagaacgaggtagagaagcagatgaatatgagtccacctccaggcaatggtgagtaactggcggttgcacgcggagcccgggttctcgggttggaagggttgtggggaggatggggaatgtggggttagatactcggcaccctggagctgcttgtctgagctattatgactgtgccgcggtcatagtccgttgtgtgttcctctgacctttgtgaggcagaacgtatattttggtggtggtagccttgtgcctccctttgtgcctgttataattgtgttgctctttgttcttagtctacgtctatctttctttgtagaggttgcgtgctcgcatttgaccttcaaatctaatagtttttcctccaattggagacgctttaggattctaagagaaagcaagctgcaaggggtttcccctttaatctagaaatgtggagtctcagcccacttaattttgctcactcttaaaagcatttcaaccaaagccattcattagggatttgatttggaggcaggag

SEQ ID NO: 74690 - DNA, 3435 bp, Homo sapiens
aacatctccgggatagatgtggttttgggtgtggagggagtgtgggaaggaggttaaaggtaatggaatgatcagtaatcagcaaaggctctgggtttggaaggaaaagagattaattcctcaaattaccagatttcatgtgctttggtgtatgatggcccagaccaaaggctcgggagggttccttttgagacaggaatttgcctggtgcctgtgaaatttttctcctctcatcaggtggactatggtgcaacagcagaagagctggaagctcactttcatggctgtggttcagtcaaccgtgttaccatactgtgtgacaaatttagtggccatcccaaagggtaagtaaaggggagtaagttgagataatttaaattacagtgtacaaatagataaattatgttttatattgagcagtaagttatttggtgttaacacaggtgatctgtgtcatttaagatcatggcattaatgttgatatatcaggagttgcacctaaatgtcttcagaggccagataacaaaaatgaaggctagatgtgggtgggattacgaactagaaggggaggggcagcttctacttggcctattatggccatatggaaattcaggccctgtgtgtcttatttttacaaatttcaaagagtagctggaaattttaaaatttaaatgatttcgaatgattgaaattttccatttagaagaattttgacaaataaaaaatataactgcattgtagcccaaaacgaagcatgcctgcaggttgaatttgacctgtgaggtatttgtaacctcagagagatacaatgacaattcttttcaggtttgcgtatatagagttctcagacaaagagtcagtgaggacttccttggccttagatgagtccctatttagaggaaggcaaatcaaggtaagcctatgtccattgctgttctagttgtgtataaactctccaggttgcctttaaggctatcatttgttcatctctgactcaggtgatcccaaaacgaaccaacagaccaggcatcagcacaacagaccggggttttccacgagcccgctaccgcgcccggaccaccaactacaacagctcccgctctcgattctacagtggttttaacagcaggccccggggtcgcgtctacaggtcaggatagatgggctgctcctctttcccccgcctcccgtgagccccgtatgcttcctcctctctggtctgaggaacctccctccccccacccctccccgtggtcttcaggaactttgtctcctgcctgtgcaggttgaggaaggtagttgcaggccaggccagaaggccagcctcatcatcttttctgcagtagaaattggtgataagggctgcatccctcccttggttcaaagaggcttccacccccagccttttttttcttgggagttggtggcatttgaaggtgtttgcggacaaaactgggaggaacagggcctccaggcagtgaaagcactgcttggacatttgttacttttttcggagttagggagggattgaagactgaacctcccttggaagaataccagaggctagctagttgatcctccccaacagccttgtgggaggattttgagatacttattctttatttgagccagtcttgcaaggttaacttctcactgggcctagtgtggtgcccaggtttttgccttgcttcacttctgtctctacatttaaatagacgggttaggcatataaaccttggcttttcataagctctacctgcctatccccaggagttagggaggatctatttgtgatggcctagggtttaagagctgtggaggactgaaaactggataaaaagggggtccttttccttgcccctgtctctcactcagatgcgcttctttttcgccactgtttggcagttttctgttaagcccccctccccctgccccagttctccaggtgcgttactatttctgggatcatggggtcagttttaggacacttgaacacttcttttccccccttcccttcacagtaactggggcaggggcctacggggaggggcttgtactgaactatctagtgatcacgttaacacctaactctccttctttcttccaggggccgggctagagcgacatcatggtattccccttactaaaaaaagtgtgtattaggaggagagagaggaaaaaaagaggaaagaaggaaaaaaaaaagaattaaaaaaaaaaaaaagaaaaacagaagatgaccttgatggaaaaaaaatattttttaaaaaaaagatatactgtggaaggggggagaatcccataactaactgctgaggagggacctgctttggggagtaggggaaggcccagggagtggggcagggggctgcttattcactctggggattcgccatggacacgtctcaactgcgcaagctgctgcccatgtttccctgccccacttcacccccttgggggctgctcaagggtaggtgggcgtgggtggtaggaggtttttttttttacccagggctctggaaggacaccaaactgttctgcttgttaccttccctccgtcttctcctcgcctttcacagtcccctcctgcctgctcctgtccagccaggtctaccacccaccccacccctcttctccggctccctgcccctccagattgcctggtgatctattttgtttccttttgtgtttctttttctgttttgagtgtctttctttgcaggtttctgtagccggaagatctccgttccgctcccagcggctccagtgtaaattccccttccccctggggaaatgcactaccttgttttggggggtttaggggtgtttttgtttttcagttgttttgtttttttgttttttttttttttcctttgccttttttcccttttatttggagggaatgggaggaagtgggaacagggaggtgggaggtggattttgtttatttttttagctcatttccaggggtgggaatttttttttaatatgtgtcatgaataaagttgtttttgaaaataaaaattgtttggccttttgggtgtaaggattatttatcttcctattctctcttagatcgcagatggctattaattctgccttgtggtagaagtactggtgttgtggaagggaggttgccacttgtgaattaaggagtaggaattacattacaactagcaggaacattatgtgtttagttgagaatgataggttttctggataacatgtaaccctgattggcatttgagagagaaataagcctgggaaagtaaaagaatagctgaattgggccgggcatggtggctcactgctacaatcccaggactttgggaggctgaggtgggcagatcacgaggtcaggagatcaagaccatcttggctaacatggcgaaaccccacctctactaaaaatacagaaaattagcctgacgaggt

SEQ ID NO: 74691 - DNA, 1050 bp, Homo sapiens
tttttttcttttttctttctttttgagatggagtctcgctctgttgcccaggctggagtgcagtggcataatctcagctcactgcaacctctgcctcccaggttcaagcgattctcctgcctcagcctcccgagtagctgagactacaggcacctgccaccacacctggctaatttttgtatttttagtaaggatggggtttcaccatatttgtcaggctggtcttgaactcctgacctcgtgatctgccagcctcggcctcccaaagtgctgggattacaggtgtgagccactgcgcccagcctgaccattcttaatgtattaatagaccaatgtcccacctccatggaacaatggcctcatctccaaaaatcaattactcagtcccctaatatcattggctttaccttcactgaccagtagtatcctcatgcacaagtggccaatggcctcccctccacaggttaatagttccaactccgtatatcaatgaacccccctcccacatctcctctgaacagtctgagcaagataagctccaggcccactgaccattagctctgttcctaaggatgaatggtcccaaatcccctaagcaatatcccatcccctctgttgagtgatgtcacatccattgacaagtgccctaatctctgaccaatagcccaagagtcaatgttcccacctcttaaagaaccacaaccacaccccagtgcccagtagccaggcatcacccacccatggtccccatccctccccatcttctcaagcctctgtccaactcttgctcccagaacttcattctcatacctctagctctgaagtgtgcagctgggtcttacccagcaactttcccaccaccagagagtctgggtgaccagaagcccttcccactttctagatttggccgtcgcgggattgtgctgctgaccttggggctggtgggcccctgtggagtaggaggggctgctgcaggctcctccacaggcgtcatggccctccgattcctcttgggctttctgcttgccggtgttgacctgggtgtctacc

SEQ ID NO: 74692 - DNA, 1032 bp, Homo sapiens
tctcctgccaccccctgccccccaacagcaggtcgggaccctcggagatgcggtgcccacggagcagctgcagggtgagcgggagcgcgagcgggagggggagggagacgcgggcggcgacggactgggcagcagcctgtcgctggccgtgcccccaggccccctcagctttgaggcgctgctcgcccaggtgggggcgctgggcggcggccagcagctgcagctcggcctctgctgcctgccggtgctcttcgtggctctgggcatggcctcggaccccatcttcacgctggcgcccccgctgcattgccactacggggccttcccccctaatgcctctggctgggagcagcctcccaatgccagcggcgtcagcgtcgccagcgctgccctagcagccagcgccgccagccgtgtcgccaccagtaccgacccctcgtgcagcggcttcgccccgccggacttcaaccattgcctcaaggattgggactataatggccttcctgtgctcaccaccaacgccatcggccaggtgaggcggccaggcgggccgcgggtctgggggcgggcagagagcggcgagggcggggcctcacgcccgctgcacccttctcacatccccagtgggatctggtgtgtgacctgggctggcaggtgatcctggagcagatcctcttcatcttgggctttgcctccggctacctgttcctgggttaccccgcagacaggtgagggctgtcgtgggggcagggctggtagaaaggagggggtgctagggaagctaacccaagcagcgggcgtttacaggaggtcgaagacgattcgctggactctgcagtcttctctggacttctattcaatggtctatccatgtctcaacttcactctccatcaagaaataccccttccctacctcttccgcgcaagggaatgactcgacctctatggactattagtcccattcccactaattagtggccccctatccgtgaatcaatggcctcatctccaaagagaatagtctcatcccca

SEQ ID NO: 74693 - DNA, 1058 bp, Homo sapiens
gcaaaaccgagcctggcctgaggcaggctgcgcgggaggccaaagccatggccattgccacgtcggtgagtccaccagggagtggaggctgccggggagagacctccacggcctgccctgcgctcctgtcactttatttctgccctctctttgtctctctccttggtccctttcttctccaggaggctgtgtccccctcctctcacttttgtttcccttctccctctcactcctcatcccctgctcctcctggctccgggctcgcccctcttccccgccccctccccattctcctttttcttcctagaggctgcgcctgaatggaggggaaggggcaagcgtagcccgagtcctatctgctccttttgggcgggaacagatggccactggtggttggcagaggcttgtggttgggaggcaagtaaaaggtttggagggggctgaaaggacctagtggctcacggaaaacggaaaacgagaggctgaacgaccccaggaggcccatctcgagacgagggataaggaaaaaagggagatagagcaaaggagggagatcaagaaagagaagacagagggaggaggggaggtgatgtcagccagagcctcaggccactttccagggatcgggacaaagggaggagacagctggcatgatgggacagtgggaggaggcctcccagagagcacagaggctctctgccacctacattaggctggccattccctcaccagtcagctgggctgctgggggatagagcaggagtggtcacacccatcatcaatcagtccatcaacaactctgtcctgcaatggcagggcccagaggcttggctccattggacagaactcagtcctaacaccgggaggagcgctctacagccccacctctgctttctgttctacagtctatgcagtctgaatccaggcagctttgttccctttccaccctcttctaggtcctgcctaagattcccagggaagcgaggccgtcacctgctttctgttcccttctcagtggggactctcggagagagactggaaagagaagcacagagcca

SEQ ID NO: 74694 - DNA, 1033 bp, Homo sapiens
actctgggtgctgcggcagacgggagccaatacgcgctaagttcgctctgctaattccttttttctattggtccttccaactgtcaatcaattatttgactgtctcttattggcttgccgtcaatcattttactcagtctaccaatcacacgctctttgccaagtgctttttttcgtcctgacgactctttctgagtctgacgaatttagccagttcctttattccattggccagatcagactcctcctctcgtttatcctgttgggggcggaagtgagaaagcccttattcgtattggcttagatttgcaagcggcagttgtctatcaaatctatcaagtcgcccttagcgctcaggaagtacgacaccggaaggggtgggctttgcgaagatggcggcgctggtgagtttggtgtggtttcttcctcgcgtagctattgtggagttgtcctttgccttcagcggctggaggcaaactgttggtaccagggaagggtggtgatgaaagttgcttcagggaggcggcctccctagagttaccgttcctgtccggtaacccaaggggctggctttaaggcgagtctgtgaacccgagtgtgaaggccccgagtctgggtgtctgacggagagagggcagtttcccaccctagacgttccactttcctataatcctgaggaaagaatgacttttctttacgcctcctctcccttctgtagggggtgctggagtccgacctgccaagtgccgtgacacttctgaaaaatctccaggagcaagtgagtagtgtcgcctctggaataaattagtcacggattggctttgagtttgtgtacttcacctcaaaactttggtgattgagatacgtgaatgcttccaaaaaccttagagtaaaatgatgtaatcaaaaccttttcacgccagaattctaagtaattgattctgcacccaagggaatacaagaaactccaaaaagaaattatatgaatagttttcctttattcatatagctaaggaaaccagtgcttggaatg

SEQ ID NO: 74695 - DNA, 1043 bp, Homo sapiens
tgaggtgaatggatcggttgagcccaggaggtcgaggctgccatgagccacggtcgcaccatcgcactgcagcctgggcaacagagtgagactgtcttaaaaaaaaaaaaaaaaaaaaaaggccaggctaagaagaaaaggtggctcacacctataattccagcactttgggagattgtggcggatggatcacctgaggtcaggagttcgagaccagcctggtcaacatggcaaaaccccatctttactaaaaatacaaaaattagccgggcatggtggcgtgtgcctgtctgtaatcccggttactcgggaggctgaggcaggagaattgtttgaactcaggaggcagaggttgcagtgagccgtgatcatgccactgtgctgcagcctgggcagcagagcaagactccatctgaaaaaaacaaaacaacaacaattaaaatattgtagttttcaaatgaaggtctggtagaaccttctcagggattactggttgggggcaatgtggaagaacaactctggatctctcatccctacttaactggaaaactctggtattatctgtttttatatattgagcttttgtcctaagatatttaggccaaatattctatgggtaaatacaagtatgaaaatcattgtaataagagtcactgaaggagttttaagcacaggagttacagcagatttgtgcttacagaaagataactaaaaacagcattcaaaatatattcccttcttgtctttatcattcacttatgttcttattgtccatttttatttaaaaaaaatttaaatctttgtttttctctcatatgcttgtagctcagtttgaatttgacaatgcccaagcacgtcggaagagcctgcttctcaaattcttacctgtttttgtcctgggtaccatgcttttttgttttgttttgtttcgttgagatggagtctccctctgtcgccccggctggagtgcagtggcacgatcctggctcactgcggcctctgcctcctgggttcaagtgattctcctgcctcagccttccgag

SEQ ID NO: 74696 - DNA, 1944 bp, Homo sapiens
ccactctctcttctccttcctaaccctttgtctagagcaccacaccgctcacaaactctttccaaatgctcagttggctcccaaagttggagcctggcatgggcagggagcccacaaaactctaaccaaactggaggctggcatgggagaagtgcttctggttcactcttcctaccctctccctcctaaccctctccttgcctgacaggggagcccctgtggcctggactctaggggatgccgccaccagaaacccctctgccaatccctaccttgcaccctgggaactgcagtaacttattctcaaaggctttaaacacagagatcctctcagcggccgtgggcctgccccttgtcctagccctgccacgtgagggtccagcctccagggacaggcactgcccaccaacggcaaatccaaagttctttcaaaaaaaaaaactgaaacacaaccaaaaaagcaagagcgagagagagtacgtgcacacgcgcacaaaagagagaaacggacaccagaggaatgaactaaagaaaaacgtaaacttggaaaatacagaaaaaaaaaaaaaggaagaaaactcccatcagacaagtgttttttttcctatttgtgtcactccctgctccctgtcccacccccacccccccggtttaagggtttctttaaaccacctcatctttggaagaccaaacagctttagctccttgctatgggtctggtggtcctcgaagggccgatgccggtgcagccctcccctgctatgcgcagcctccaaggtgggagctggcgatacagggagaagagcctgaactctggggagggacatgtccccgctccctgagttgggtatttatcaggacaggtaatagcccctcatttccagctatgagttagaaaagtcagtgtcaccaaaagtatcttggcagtcccaggaagaagggggtgagtggggtatttaacttctgaatctgagatctgcttctctttcatctcctgccttctccttgcatttacctttctcacaaactcctaaccctgctgcccccctggaggcccacctttgctgggtcccttgttcccttccccccagtctccttttcttcccccttgtcctctgcccttgctcctgctccctccagtccagcccagcccagcttctccgttaagcagcagctgctggaggcatccccaagggagtcgggacccgtccatgagactcatggggttctagagctgacacgaattgaggggatggggtgggcaaggagatgactgaagcacaggtcaatctttgatagggtgttatcaccaagggaaccaacagaacctagaagaatgttctgtacccctaggcaaatggtttctgtagccatcaggtgaaaattctggcaaccctaaagcccagctaaagtagtgtggggtagagaagtccatgttttcttttagcaaagaaaagtctgcaaaattcctcgtcctccaggtagtttttcctactactcttgtccctaagaccacttctctttcaaggtgttctccttccatcctctctcccctccaggctgttgctctatcattatccatttcatattctcatacaaattcagccagccctgggatttaggttttctgctctatcagtcacatcactctgtgaacatgttaatactgaagcagtgtcttacatgcagacagaatgggaggggacagaaaattcagctcagtcagtagcccccatatattccatgagtctcacttcctgtcccattcacttctgaataactccaactctaacaaattaggggtggggtggagttagttttctaactaacagcaaattaggcggagttagttttgtaattccaccccaatttctgataccaaaaatgccagtcacagatctaggcaacaggagagaaactggccaccgggtcttgtgctcactg

SEQ ID NO: 74697 - DNA, 1063 bp, Homo sapiens
ggggaagaggaggaagaggtggaagaagaagaagtagaggaggaacagggccttgaacctccagcagggcctgagggcccattaccagagcctccagatggggaggagctgagccaagcagaggcaacaaaggcaggaggcaaagagcctgaagagaaggctactccatcaccttccccagcccatacctgtgaccagtgtgccatttctttctccagccaggacctcctgaccagtcaccgccgactacatttcctgccatctctgcagcccagtgctcccccccaactcctagatctgcccttgctggtgtttggggagagaaaccccctggtggcagccacctcaccaatgccaggtccacctctcaaacggaagcatgaggacggcagcttgtctcccacaggcagtgaagcagggggaggaggggagggcgagccccccagggacaagcgcctgcgcaccaccatcttgcctgagcagctagagatcctgtaccgttggtacatgcaggattccaacccaacacgcaagatgctcgactgcatctccgaggaggtggggctcaaaaagcgagtggtacaggtctggttccagaataccagggcccgggagaggaaaggccagtttcgaagcacccctgggggggtgcctagtccagcagtgaaaccgcctgccacagccacccctgcatccttgcccaagttcaacctcttattaggcaaggtagatgatggcactgggagggaagccccaaagagggaagcacctgcttttccctaccccactgccacgcttgcttctgggccccagcctttcctaccacctgggaaagaggccaccaccccaacaccagagccacctctacctctcctacctccccctccacccagtgaggaagagggcccagaggaaccacctaaagcttctccagagagtgaggcttgcagtctctctgcaggagatctgagtgattcatctgcttccagcctagctgaaccagaatcccctggggctggagggaccagtgggggacctggaggtgggactggggttccagatg

SEQ ID NO: 74698 - DNA, 1037 bp, Homo sapiens
aggggcagtggggggtggtggtgaagccactaggctttttctcattgcaggctacaactgtagaaatgacatttacaaccaaagtgctgtctgcacccacattaagccctctggacaatggccaagaaccccccactcatgggccagagcctacaccgagcagagaccaggcagcaggtaaggaatggaacagcaaacctcccaaggtaccaggaaaggggactccatgggccaacaaggtctgaagatgactgaggccaaggtcaactgccttggtattgagtgggtggggtctggcttaaacgaagttccctcctcattgtactttcttctctctcccctagaaggccctaacctgaccccagaagccagtccagatcctcttcctgagcctcccctggcctcagttgaggtcccagacaaaccctcaggaagccctggccaacccccttctccagccccatctccagtccctgaacctgatgcccaagctgaagacgtagctcctccgcccaccatggctgaggaggaagaggggaccactggggagctccgctctgcagagccagctccagctgactctcgccaccctctgacctatcggaaaaccaccaactttgccctggacaagtttctcgaccctgcccggccctataagtgcactgtgtgtaaggagtccttcacccagaagaatattctgttggttcattataattctgtctcccaccttcacaagatgaagaaggctgccattgacccctctgcccctgcacggggagaggccggtgccccacccaccaccactgctgccacagacaagccctttaagtgcacagtctgcagagtctcctacaaccagagctccaccctggagatccacatgcggtcagttctgcatcagactcgctctcggggaaccaagactgattccaagattgaagggccagaacgcagccaagaagagcccaaggaaggcgagacagagggggaggtgggcactgagaagaagggccctgacaccagtggcttcatatctg

SEQ ID NO: 74699 - DNA, 1369 bp, Homo sapiens
attttcctgggccactgggggagctgtggtgtttattcacattaggaaaaagaagaaggaaaaagaaagatggaaaataaggtgggagctgctgagcctgagggaggatgagctggcttctgagcagacaggtagggcccctttccaggtgatggttcacagaggcagagtgggcagggacaagggagcctctgggtccagaaaatgcccagaggaaatggaaccatttcacagagaagacacgacaggataggataggtaagagaagaaaactaaatccaaggtgggggcagtaggtacagagccatctgttagctggagagttgaggcaggcagcaaagactgggaaagacacaccaagaaaaggcagagaggccaggatggtggaagagggccagacaaagaaggagtgcaaggtagcggcctaagctaggcctttgtcccaatccaagggaaagtggggaggagccagctctcaggactgtggctggaggctgggtctgctataatgccttcctatctggctagttcctcttcaattaggagtgagaggccaagcgtggtggctcacgcctgtaatcccagcactttgggaagccaagatgagtagatcacctggcatcaggagttcaagaccaacctggccaatgtggcaaaaccctgtctccactaaaaaatacaaaaattagctgggcgtggttgcacacgcctgtaatcccagctgcttgggaggctgagggcaggagaattgcttgaacctggaaggcggaggttgcagtgagccgagatcacgtcactgcactccggcctgggtgacagagccagactccatctaaaaaaaaaaaaaaaaaaaaaaaaggagtgggggcgggccagtgctgcatccaaaggactatgtgatggtgggtcccatccttccctgacacttcgtccactgcccatatgttccctccaggtatactgctgtccatactgcagcttcctgagcccagagtccagccaggtgagggctcatacactctcccagcatgcagtgcagcccaagtacagatgcccactgtgccaggaacagctggtgggccggcctgccctgcacttccaccttagccaccttcacaacgtggtgcccgagtgcgttgagaagctgctgcttgtagtgagtacaggctgggtgaggacggtacaacaagaccttattagggctgtgcaggaggggaggaagaggcaggggtattcaggcaggtgcatgtgttgggggcagggggcattcaggcaagtgcgtgtgttggctgggtgaggacggtccgacaaggccttgttagggccatccaggaggggaggaagaggcaggagtattcaggcaagtgca

SEQ ID NO: 74700 - DNA, 2408 bp, Homo sapiens
cctgaactcttccagtactttgggccccaggccctagggcagcctcagactcccttggctggcccggggctgaggccagacaagcccctggaagcccagctacttctcaatggtttccaccacgtaggagcacctgcccgcaagttccccacatccggtaagcttctgtgcttcttccctcttctctcctccccagggccaaactctattccgtgctttctcccaaggaccaactccccacttaggtaaccataagtccctctgagcactatcctactcattaacccacctccccacatagagaaccaaccgtgccccatttctttcttgggccactaatctgtctctgtcctctagcccctggaagcctatcccctgatgcccacctgcctccaagtcagctcctgggttcctcatctgacagcctgcccacctcaccacccccagacgacagcctgtccctgaaggtgttccgctgcctagtgtgccaggccttcagcacagacagcctggagctgctgctctaccactgcagcataggccggagcctcccggaagctgaatggaaggaggtggctggtgacacccaccgctgcaagctttgctgctatggcacccagctcaaggccaacttccaactccacctcaagactgacaaacatgctcagaagtaccagctggcagcccacctgcgggaggggggtggagccatgggcaccccttccccagcatccctgggagatggggctccttatgggtctgtctccccactacacctgcgctgcaacatctgtgactttgagtccaacagcaaggagaagatgcagctgcatgccaggggtgcagcccacgaagaaaacagccaaatctataaggtgaggctgggtcaggaagggccatcggaagaggagaagggaatggggacagagggaggagatgcagaataagaaagtgataggaaaaccctgggtgacaaatggagaaaaaggaaagtatgcaccaggtaatgacatatgtaccagggtaacaaagtgacagacatggagaaagagaccaaaggatagtaaactctgacaagtgaaacagactttattcagctcttctggtgtttggccctggagggaggggtggtatcagctcagtttgtcatgtcaccagaggttcaagaggatggaaccagactccatttgcatgctgggagggagtccaggagtggtaggagaaagagaaagggttggggagagcaagcaataatacttaggtggccataggagggaaagggggggtttcaggagcaggaagcgaggggtggggagggggctgctgctagtcagtctcccttagggaaggcaaagaagtcccctgaggctaggtgcggtggctcacgcctgtagtcccggcactttgggaggccgaggcgggaggatcacttgaagtcaggagttcgagaccagcctggccaacatggtgaaaccccatctgtactaaaaatacaaaaattagccaggtgtggtgcgcatgcctgtaatcccagctactcgggaggctgaggcatgagaatcactgaacccaggaggtagaggcttcagtgagtagagatcatgccactgcactccagcctgggcaacagggcaagactctctctagaaaaaaaaaaaaagtcccctgaggtctggcatgtcccttctgggcctgagccagcctcttcccatggttctagtttctgctggacatggagggagcggaggcaggggcagagctggggctataccactgcctgttgtgtgcgtgggagacaccctcccgcttggctgtgctgcaacacctgcgcacacctgcccaccgcgatgcccaggcccagaggcgtctgcagctgctacagaatggcccaaccactgaggaaggactcgcagctcttcagagcatcctgagcttcagccacgggcagctccggactcccggtgaggaagaagggactggagaataagagctgggcagggagggcagcaggatgtggggagcaggggggctgcggagttagagatacaaggaaggcgaagagggcctgtaggccacctatactaaatgggaagaagctgcgaagggataagacagaatgagcgtgtcaggcactgtggaggctaccttgagtggaggggcaaagaagggcaggggctttgctgggtggatgacatagaacaggaagagggtgaagaggaaccacccagtgattctgagtagtgactagtgtcctggtaatgctggagggtggcaggctggagctgggtaggaaggagagagaacctgttttgtgctgggccagggcttcttggaaggagataggagctgtgggcatgatccaaaggcagcagggatgggaagaggcccctgacaagcttcccagcctc

SEQ ID NO: 74701 - DNA, 1027 bp, Homo sapiens
gtctccagttcaaggtaggaagggcaaagaaagggacctagcgattctgagagggaaggaaggaaagatggaggagtgaaaatgcaatgaggggaaaaaaagcaaaaaaataatcgctgcagctaaaggtttgtaataaatagtgggtgatgggagaagctccgagaagaaagggggatggggagttggggttgggggaggatgtactgaggcagagatatatttgcaattgaaattctttcctaaagaggaggagggttaggttgggaggtggggaagagatttgcaattttaaatagctgccaacctaccctcggccgatcagagtctcacctacaagctagccgaaagctaagctcctttggtttctagctaggaatcagctatgtctttttccagttctaggaaatagatgtttttgagagaggatctgggagttactgtaggatttggggcttaggtctgcctagccctactctgagctgtgatcgagcgtggtgagtcaggagccaggaagcagctggtaggcttagggagggtgagctgtagcacttgggccggctgggagagagcacgcacctgtgtacagcccttggcggcagggcccaggacagggcctcttgcccagtcagttattcccaccaggtggggtagtggaagggcggtgtggcccaccctgtgggtgacgatggaataacagaccctcacaaaccagcacccttacccctctcccccaccatggattctgtaggaggaatacctttctccctcaacttgagggcttctgctttctggttatcgagaaatcggctcccctcagtccagttccttcacttcccttttggttctccaactcccccgacctccccatcccttccacccctttcccaggtgctgatttgcattttcattaccatgctaatcccactccactcagcattccttaatggctctgacttcatgcctggctagaaccccaggaggagggaagctacaatggggccttcaggttgggtggggccagact

SEQ ID NO: 74702 - DNA, 1049 bp, Homo sapiens
cgaggggcagattctctcctttctcagacttcaattttttggtccttcctttgcccatgccctttgtctcttgtaattctccggtccttaagtctcactatttcccccatcttgctcggtcagggcctggcttttcagctttccacctgtgtttctgcaactttacatctgagcctcttatctctgtctcatcacatttctctctcggcagctttctgggtcctaatgtgtatcttcccacctccatggaagaacatttgcagctcagtaattacgactgtatatatttttttgtttgtagggcattaactccctggctgagccttgaaagtagcacttccatccttcctttctcatcctgagaagtaaacagagacctgggtctggacagaggaagagggcaataccaaaaggaaaaaatgtcttctatttctccacacctttctctccatcttcatcttcctcccctcctcagccttgtgacgaaacagtgcattaggggaggaggataggctgaaggggcagcagggaactctggagactaagggccattttggagctgcaagattcatctcaggggatgactacaccctcagaactctccgccctcccttggctccaggcctccctcctcccatccccctcagtggcagcagccttgtaatttaaagctctctctgtcgcctctaatgtgatcctctcgttttattgactctttctgccgtctgtggcgccccttcacatcaatctcctctctaatcacagcaccgccactgcctgctctgtctcccctaacccctctccttcacagaggcccccagcccttgcctctacccaggtcttccctgaccgtccccaacctccaccctacaccagatccaccctcttcctccttcctcctcttgcctccttcagaggaagcaatgtcagggcctttcaggggtcgccttgtctctttacccacatctgagatgtgtccgcagggataggggatgcccttaaggaaagccaggaactaaagggaagaatggcgatgggtctgaggatga

SEQ ID NO: 74703 - DNA, 1943 bp, Homo sapiens
tgggctctcagtggcttcctcatgtaggaactagtccagagaccagggtcctcatgtgcagttgttaaggggtgacagggctgaggtccacccacagtcctgtcaccaagctgtaccactggcatgggggctgcatacacctggaggaagatatatttttctaatttctactgagatgctcagcacccctcagcattttttaccccaaagtctaatgagagaacaggagccctctttctgtatttggcaggaacacaggattacatcaaagctaaagttcaggccttggaattcccagcaggaccatcaactggaatgtcgcatgcacaggggcctgtgcaatcagaaagacatgaatgttccagggtgtgcaagacctctctgcagagcagtttatgcatggagagtctggtcctgtggagcacgttgatgtgcaaagtcagtggggcagaatgggtgtaggcaggaatttaacttcatgtatgcacatttccctagtgcctcctccagtcatagctaactgccctggacctctccctttggggctgggcttgggctagaggtcaagagtcaattaccagtcatttggcttctcagtgaaggagggcagagggtgggccaagagtgttagattgtgtttccccgaggacctgatggggtaaacgccatttccatcctcagatttttcattccttgttttgtgatgcccttttctttccctaatctcaagcctctgtcttctttattcctgggccatgggcatgggtctagattttgctgcttctcttgcctccatcacagttgtctgcatttccccccagccatctctgtgttctgtatcagtggtctgcttgggccacagatgcctttcttctcatctccagcttcttcaggctatgtggtttccacaaacctacagataaatcctgctgctttagggaaagaagtgcacttgaaattagagagaaggccagggaaggatgagaaagaggttctggaaagattaggcagggagaagttgggagagagtatgacagagataggagtcaaaggtgaaaaacccatgacttggagatgggagagagcacagagagatggccacaatttaaatgagaaaggaaggagtgcagtaggctgtgaggactaagaaattggagagcaaacaggaagcctgacccctccgcagggaaatgaagacagctgaggagggcggacgagtggttgtgtaagaagtagggctgaaaagccaggccatggtctcggcctgcgtgtcagtcctgagttcaagcagtgctggctttgacccttatgggaggaactgaagtggcaaattaacgacgataatgaagtcactgctccttgtttgtctttgctggtttccccttgagatttgtcctttggccagacagggcaatgtgggggaggggaggaactggagccgtgaagggcgggggagagggaaggaaaagaggatggagaaatggcaatgtggaggacaaattgactagaggagaaaaaagggagggtgatgagtgaagagaagaggagcccagaatcgaagagagaagcgggaagggagacatgaaaggagaatgaaagaggagaggggtgcagaaaaacggccagggaaaagaacaatgggggacaggaaagggaaacctggtaggaggagcagaaaaaaaaggtgggagaaggagaagtggaatggagaaatggcgagccggagggaaagaacgtggccagggctgcaaaagctgcagctggcagggccagtgggcggggcctcatctccatctctaatggctgtgaaatgaggttagcgccattagaggcagcgagagtgtaacgagatcacactcattagggctgggccatcccagtaattaccaccaccctaaacacgcccgcgccagccgggccaaccacatacgggctcacagcaa

SEQ ID NO: 74704 - DNA, 1032 bp, Homo sapiens
tttgtatttcattcccaagccagaacacaagcaaagagatgaaaaagtagaattcccataaacttcagctgagaggaacttgaatcttcccagcccctgagaaccaaagacctcaagcctctgatgtcataaattgctggtattgccttggcaacctgacagggttcctccctccatgatgtcagaggcagctggtgttaccttgagacccatacaggaatcacttgctgctttgccggggtgctgtatcacctacgggccagggcctgggtcgaattggtaggatttctgactctggtagcttgaccttgcctccctggagctcttcccagctcagaacaacagttgtcacaaataactcctgtttgtgagcacctgaggtttgctagagcctgacagtagcaagaggaaggaacctaagacagggcattgaggtcaggatggttggatcaaaaggcaggcagagacggaagaggaggactagaaatggcagttacagaatgtgaaaggagaagggctttgtgagtggggaggagagttgttgaaagtgtaatggctttgggtttaggaatggagactaaagctagaatgcagagggaagggatcggggctgtgtgagtgtaaactcattcagggattgagaaaagggaagggttgtgaaatgccagagggcacagtggaatttggctgtacagaaaggggggaaatgggacagagtcccctagtctgagagacttagctgtctggtgagagactcagggttagtcacatggtcatctgaggagtggctacatctgtctagtttccaattgttttccagcacctagcacagtgtctgtcacacagaaaaggcttaataaatatctactgatcaaacgttgaattagtagggagaggctgggggaaagagttgcccacctaattttcacccactccccccacctaagtctacattaatgggcaaactgggaaatcagaaaccggagggaatggctggagggtagttaaccagtgacagtgagatctgaggca

SEQ ID NO: 74705 - DNA, 1282 bp, Homo sapiens
tttttccatctgtttcccatgagctctgagtttccacctttgttcccataatctgccctcttcctaccttttcttcttgatcaccctaagtttctagtttcttttatcccttttcctcttatccagcattttaaccccagcagcagaaagtaccagcaagcaaagggctgggagaggtgtggggtatggtttgtgaaggcacataaacaggccaagaaataaatttaatgagcttccaggggcatataacccctccatcagtcagtgccattatgtcagttaactgtcaactttgattttgtaaggggacattccctaggactctaagctccaccctgcctggttgccccccatccttcagttcattctagatatcagttgctttttcttcactttttagttcatcttcttcctaggcccctgctactatcatatttagatccagcaccatttttttttaatgaggcagtgtttattagtgtaataaaagctatcgtatgtaaggagccaagttcatttagcctgaagaacagtaagggtggataaaggatctggagagtttaccttagtttttagcccatcattgtttttccaaacctcaggagcttggaaaggtaaaaggagcaggcagacatgggcagaagatggacgatttcagaggtgaacagaattaaagaaagaaaggggtggtcggtgcaataaacacatggggtagagaaatgtatgacgtgagggatgtgcaaaggaagggaggaaaatctatgcggactcgggggcaggggaggaaccaaggggtgattaataagaaattggaagaatgaaacaaaacgtgttgatagcaatacagaaggtaaaaggaagagaaatgatagaatattcctaaagtggaggtcaacagaaaaagcactatgaaattaatacagtagtaaagagggggaagggaggaattgctgaacaagatgagatgggaagagagtatggtacaaagaaggtaaatggatggcaaacgaaggagtgctgaggcagatcagagctgcacagagcttggtaggaggaaaagaggagaggatgaggtatcaaaggaaacaaatgcctctggtgtgaggaggacacagcgtgactgatgcgaagagagcgagagcactgcgggggcgccggggggttggaaaaaaagcatagcacaaatagcaggaataccactgggcgaagccccagaagagagaaatgcccaagagagggagagaaagcagaaatatccagggaagagacagagagagagaga

SEQ ID NO: 74706 - DNA, 1088 bp, Homo sapiens
cgtctccgtccctgacgccccggagcgagcgctggagggagggaggaggaggggaaaaaagaggaatcaacacatcggagaagtcccttccaagagccgccccctcccctccccgcctcgcgctgctcggtggccgcggttcgactcccgtccctgcttccagctgaggtgtaagtgcatcgatttccgatgctgctgggttggtttttttctcctctccctctctctcttcttcccttccttgctctttggaagctcgagacgggagaggaggcgcttggagactgccgctggaggggacggagagggacgggaaggggctgggggaggggacaaggacggacggacagacagaccgagagccctgggagatagcagacaggggtgtgggaggaagagggcgtgcgcgaggatgggggaagagagatgcgggggtggagggagaaacgggaacgggaaaggcagaggcccgccggacagacgaagggtatggaaagcctagacggaccgcgccgagttgggcagggagcggggatcccggggggaaggggaggcccggtgagtgtgagggctcagagctgtcagcctggagggtcctgggtctcggcggccccccgccggctgtgggatgggagaaccgcggccggcgggctgatggatgggctagcgcgctggggcgtggagtgggaggggacgtggatactctcagtcttcgttcgtttttggctgaagttgggctttccattcctttttttgaaagtgttgagtaggtgaggggaggccataagcccattcaaggtgaagcgtgtctgtcctgcacgcccatcctaccacccccatccgctcgtctgcccctctgagcagccctatcattttcaagcacaggaccacgcttcctcgctgtgcctgtagccccgctgatctctgtccatgtgtccctgacttttggttttgctgttcttcatcttgtctcttccatcccatccatctctggatctgtatgtcactgtctccacttgtgacccttcccatctgagtgatcctctccttgtgtgtctctatcactatgtgtcacgccttggctgcct

SEQ ID NO: 74707 - DNA, 1040 bp, Homo sapiens
gcggggcaggggcgaagctgcttggaggggaggatcaaggtacaggaccctgtgctagaccccacagagaggcctgtgactccaggggggtgagaggggttagtaacaacaggaggtgctaactgcaaagaaggtggtagtatagctcataagcaccaagcaggactgcaggggatgtgctaaaagagtgaggtctcgactgtcactgggaagggggcaggataggaatggaattacacagttccaggagggcctggcccttgcaactggaagaagtgttactacaggacgtagcagtagaagggtgtgagaggagcaggagggtgtgatggtggcaaacacagcccaggtcagggggaggaaaccaaacgggagctgccctggcctgccaggaagggaagcagctggcagagtgtggcgaagggtgacgactccagaggagaggaggatgtgatgtagaggggacaggggctagggggctggagcatctgagcagggactaacttgaagtgggggaagttctgctaaatccctgtctctggacccgacagggcagcagacgccctcctaaaggcagtggcagccagcagtgtcgctgagaaggccgtggaggcagctcgaatggccaaactgatagcccaggacctgcagcccatgctagaggccccaggtgaggcatggacagctggggggagggcagtgaggcccctagggagctagagaggctcaggtgtggggaaacagatgagaagccctgcaagggaagtggggatgggaaaaaacaaggaatgagggtgcaaggaacacagggtgggggccagacctggtagtctggggagtgggacttgggaatgtatgcagtaggataatggggggtttggggtctggcggtgagaggctatgagcctgggaattccaaagtcctgggaagtgcccagtcaggaataaagctgcagccactccagcccaaggccagttaggcccctctgattctcagctatccctacccaggccgcagacccaggcaggactcagaaggt

SEQ ID NO: 74708 - DNA, 1782 bp, Homo sapiens
tctatacccacgcctgcccttccctctgcagagctttctccctcccttcaggagccttatttcgctctctcagtctccatatctatttctttcccccttcttccctcctcccctgcttttctcctccttgccatccctcccgagccccagtatgggtctcccctccttcccctctctcaggctgcatctcccccctccttagtgctcacccctgcacctctttctttgtattcttctcaccctctcccagcctcgccagcatctctcctcccccgcccggcttcggcctccccctgcctccccatcttcagctcagtctcctccccctcgctcctcttccctcccctccgcctcgccccactcccagcccgcatgccaggatttctctcctccctgggggtctcagtgcatctccttctcctctctgcctgcctcctccctcaccgaagggttagcggacacccatccttttctgcttggggaccccaccaccacccgcaacactgccgctgtctcttcttcaccgtatccttctctacccaccctcttctctcttctcttctccctgcccctttaaatctgcctggcccagcctcccccgtgatgctgggatggagcaaacattgatttgtgctgggatggaatcggaattttgatttatttttcctctcccaaccataagaagaaaaaaataataaaaacaccccctcttgagagccccctccccctttgcatccagctcccagctcttcttccctatctccatccaaggcagattttttcccctacactattctcatcttcccccacccttgccactacctcgcccccccacccagcctgctcctccagctggggagagaggggactctccggactcccccacctttcctctctgggttggagcagtctctccggaaggggagggggcttggcttgtccgggcgaggtgggagtggaggtatcctgccatggatgctgtgccggggaggcagcctgagccccagcccacatggtgagtagcctgccccctcccttctgcctgtctgcccgtccccaccctggcctttcccctgcagagcctcccctgggccccatcccccgaaaaaccccccgaaaaaccccccgaaaaaccgtctgcctaccttggtccgatctccccgctacatattctaccccccacccccatccctttgccagagacgccgaagaaccggggcagaggggtcctgacagcagccagggaaacgggtgccctacgattctgcccagccccctctcaggacccccaaactgccatccacactcgacacttcggggttctaggttggagaattgggactcccgcttggggttggggccccaagtcctgggaggggcccgctccacaaagacagaaatgggggaagcccccattcccccaaagcttgggggctgctggaagatgctgccaaaggaggggggtggattggggggcggcgctgatgccccagagccaccgggccagggagcggcgggcaaagaggaggggcctctctcgccacttgcccccctccctctttctccgcagccactcaggatgagggtccggccctgcctgccctcgctggggcccccccgcccggccccggtctaactgcccccgccccgaggcctcgcccggctccaaggcccccagcaggctctccagtcccaggatgcgctgagccgccggggggctgaggccgcgccaactacatgcatgtcccccgggggcaagttcgactttgacgacgggggctg

SEQ ID NO: 74709 - DNA, 1037 bp, Homo sapiens
ccccgcagcccctgcccaggtgccatggccgcattgtaccgccctggcctgcggtgagtgacccccggcccggggcccacccgcaccttccgctgcgctcgccccctcggggctgccagtggcgctctcctgctctcagcctccgccaggtttcccatcctaggcggaggcgggcaggggcgactgctgtgggtccagcctcccgcgccgcgcgtctcttgggagggcagccggccggtgctcctcgtttccgcctgcacctccccttctctgcctcgctcgcctctgaccgcgcgatctctatctgccactctcagaacttcctctctctcctcgctcctctctgctgagccaggtctccgcatatcctcctttccttcccagatacctccctcggacctctaacgggctctcagccagcgccccagggtacttcgagaggcagcagggccctggggacaagggtacgtgagccccgggagactaagctcagagccccctaaagaaggtggaaggttaaatatccattcccggcctctcccggactggaaggactggaacctggcgggaagtccagagcagcccgagggacctgggcccaggggagggaggcaagcaaggtgggaggagggcgccaagttgccttcgtttcttacatagctggcttcttcctccgtccaggcctggagcccccaggctcgtcctgtttgtctgcctgtcctcttagtctcctatttattctctgaggcctctcttctcagcttttgtcccagagtcggaagtgacccacatctgtcgcacagcccgttccacttgggcagcccttgtgggtggtctctgaaggaaacgtcccacttagagggctgcaagagggtgtgggggcttcacaagagataacgtgagccaggctccagggagagagaggctgtcctcaagactgtgtgcttgaaaactgatgctcacggagaacttccctctgaggcaggaacagacccaggtcccagtagccctcctcccctgcccctggggccacactg

SEQ ID NO: 74710 - DNA, 1049 bp, Homo sapiens
tgattaaacagttaaacatgggcatgggctacacaggcagtaacatcagcatgcctacatgtatacttccacacagccaggcatgtgccttttttgctcatttggccatatctgtccctcgctgagcaggagacaccctcctcaagcctcataaaggctacaagatacatgtgtcctgaacacatcccacacaccaactgcaacctgctcttcatggtccctgcatgcagacatgttttagcaggctgcagcccaagctttctgtctctccaccacctgccttgtccactctcgatgacagcaactagctcattgcctctgtttctcctataggcttaactggcatgggctgagccccttgggctggccatcatgccgtagcatccagaccctgcgagtgcttagtggagatctgggccagcttcccactggcattcgagattttgtagagcacagtgcccgcctgtgccaaccagagggcatccacatctgtgatggaactgaggctgagaatactgccacactgaccctgctggagcagcagggcctcatccgaaagctccccaagtacaataactggtaagccttgggctccacaacctgcaggataggtgcactgaggccactttgggttcaccaaggcaaaatcaacttaactagaacatcccaatggaatgaacaagaatgagagctttggggtaaacagacccagaaactgggatttgcttacgcctataatcccagcactttgagaggccaaggcgggtggatcaccaggtgtcgggagtttgggaccagcctgaccaacatggagaaaccccgtctctactgaaaaaaaaaaaaaaaaatacaaaaattagcccagcatggcagcgcatgcctgtaatcccagctacttgggagggtgaggcaggagaatcacttaaacccaagaggcggaggttgcagtgagccaagatcgcgtcattgcactccagcctgggcaataagagcgaaactctgtctcaaaaaaaaaaaagaaagaaactgggatttttttttttttttga

SEQ ID NO: 74711 - DNA, 2509 bp, Homo sapiens
cctccggagtagctgggattacaagcatgcgccaccacacccagctgatttttgtatttttagtagagacagggtttcaccatgttggccaggttggtctcaaactcctaacctcaagtgatccacccacctcagcctcccaaagtgctgggattacaggcatgagccactgcgcccagcctagtttgtagtttgtattttattttaatgttaaatgaagaagctgatataaataagatcctttgctttttttttttttcctcaccagttcagggagcttttgccaggggcagagacccccagagggctgggaccttggggaacaccccttagatgggacaaagcctggaggaagggactgagatgtgattgggtggggaaacataaggccaacagaagacctggagtcaaagttggacttgaaaaagtgggtctagggacaagggaaacctgctggccaccatcttcctgacaatcccctctcccccagctggctggcccgcacagaccccaaggatgtggcacgagtagagagcaagacggtgattgtaactccttctcagcgggacacggtacaactcccgcctggtggggcccgtgggcagctgggcaactggatgtccccagctgatttccagcgagctgtggatgagaggtttccaggctgcatgcagggtaaccagggcaggggcacagtggcaagggcacggaagatgtgaacaggtttggaacccttcatccaggggatgccttcctccacaggccgcaccatgtatgtgcttccattcagcatgggtcctgtgggctccccgctgtcccgcatcggggtgcagctcactgactcagcctatgtggtggcaagcatgcgtattatgacccgactggggacacctgtgcttcaggccctgggagatggtgactttgtcaagtgtctgcactccgtgggccagcccctgacaggacaaggtaagcacctgctctgccccaaggggaacacagaggccttcttgtactcagaggaaatcccaaatcctacctctccacagaccctaagaacctgtcctctctggcaacctaattcccaagatccagagcagcagtcccagcagagggataaggctgtgtttgcagagcactttgcactaggttgagaaaaatccgtgtccaagaataggggcatggaagctgatggttattatgaggtggggggcttcagccacctcttggtgctgctactgctcccaagtgtctctcctgccaatccctgatccctctggccccgacaccccagttcctgatgctgctgccagcagccccatgaccccattgtccccaggggagccagtgagccagtggccgtgcaacccagagaaaaccctgattggccacgtgcccgaccagcgggagatcatctccttcggcagcggctatggtggcaactccctgctgggcaagaagtgctttgccctacgcatcgcctctcggctggcccgggatgagggctggctggcagagcacatgctggtgagggcctggtgagaagcagggcagctgccggggacagggcaggggtggggcctggccagtctgcctcagcctcacctccctcctgccaggtgccaggctggtgggcggggactctacttgaaggcccaaagctttggcctcaggctgctgaatgttgaggtttcccctgccactaacccaggcctgatggcagggcaatcacttatatagttaataaacattggtcctccctattagaccctagctgcccttccccatgcagaccatgccctgacttttggtgacctctttcttattccctctctccccaatgcacagatcctgggcatcaccagccctgcagggaagaagcgctatgtggcagccgccttccctagtgcctgtggcaagaccaacctggctatgatgcggcctgcactgccaggctggaaagtggagtgtgtgggggatgatattgcttggatgaggtttgacagtgaaggtgagggactctcagatcatactcttggttctggctcttgtcagagcctcggggtctcctctctagtgttcacaatgactttgtcagtgagaaagtttcctgaacacccaaccctgctccattcctctggcagcccagccacccgagagacagcctttcctcatcagatcttgggtccatctcaggacaggggtgggtggagcaggaccttctttggtcttacatctcaagttttccttgtttggtccttcctttctttcacttctcctaacaggtcgactccgggccatcaaccctgagaacggcttctttggggttgcccctggtacctctgccaccaccaatcccaacgccatggctacaatccagagtaacactatttttaccaatgtggctgagaccagtgatggtggcgtgtactgggagggcattgaccagcctcttccacctggtgttactgtgacctcctggctgggcaaaccctggaaacctggtatgtgc

SEQ ID NO: 74712 - DNA, 1264 bp, Homo sapiens
atgcgctctgagtccactgctgcagcagaacacaaaggtgagcaccctcaccattcctccctctcctgtgtgtgcacacagcacgtcctctctcccttcctgagccagaccttccttttgtccacccctggagtctgatatggccccacctcttcccacttctatcttttccccatccctgaagatattcagaaccataagcctttcacagcttcctccaactggatgcagggtgcccttccctaccccagtgagaaggaagattccttacccatcttgcttcccccccagggaagatcatcatgcacgacccatttgccatgcggcccttttttggctacaacttcgggcactacctggaacactggctgagcatggaagggcgcaagggggcccagctgccccgtatcttccatgtcaactggttccggcgtgacgaggcagggcacttcctgtggccaggctttggggagaatgctcgggtgctagactggatctgccggcggttagagggggaggacagtgcccgagagacacccattgggctggtgccaaaggaaggagccttggatctcagcggcctcagagctatagacaccactcagctgttctccctccccaaggacttctgggaacaggaggttcgtgacattcggagctacctgacagagcaggtcaaccaggatctgcccaaagaggtgttggctgagcttgaggccctggagagacgtgtgcacaaaatgtgacctgaggccctagtctagcaagaggacatagcaccctcatctgggaatagggaaggcaccttgcagaaaatatgagcaatttgatattaactaacatcttcaatgtgccatagaccttcccacaaagactgtccaataataagagatgcttatctattttacacaagatttgtgctgttttcatttcccacctatcttcacaggcttccctctaacacctgtctcacaatcatcttcttccagcccctagaagaagcacagcctggcacaatcaaagatctgttttacaggtagctctagcactgggtcacagacataggaattgctgggagaaggcactatccactctatgtcctgagttcttaaaaaaaaaaaaatggtgaggctgggtgtggtggttcacgcctgtaatcccagcactttgggaggctgaggcgcacagatcacgaggtcaggggattgagaccatccgggctaacacggtgaaaccctatcgctactaaaaatacaaaaaaaaa

SEQ ID NO: 74713 - DNA, 1033 bp, Homo sapiens
ttatcccttccctttcagggccaatgatggctgcctgtatgtctttgaccgagaacagaaccggcgcacccttcaggtatggctcctgagatagagcctctgcctcctggtttttggctttttataagacctagaaagaggtcttatatcctggcctccttttcgcctagattgagtcccatgaggatgatgtgaatgcagtggcctttgctgatataagctcccaaatcctgttctctgggggagatgatgccatctgcaaagtgtgggatcgacgcaccatgcgggaggatgaccccaagcctgtgggtgcactggctggacaccaggatggcatcaccttcattgacagcaaggtgggccagaagtcaggactgtacagccaggccgctaaggttctagttgcccaggagggcatgaaagcggactggtgtgggaatttgacaagctccttattaaccaaggtttgtaagagttggagtttagggaaggggctcaagccagggaacatgaattccatctgtactcaccagtcctcaaggagcagggcagggctttccgtacaagaaaaatggaagaccggtcaggtacagcggctcacacctgtaatcctagcactttgggaggctgaggtgggaggatcacttgagctcaggcgttccagaccagcctgtgaaacctagcgagacctcatctctatttatttaaaaaaaaaaacaaaaaaaaaaaactaaggccagatgccgtggctcatgcctgtaatcccagcactttgggaggccgaggcgggcagatcacgaggtcaggagatcgagaccatcctggctaacatggtgaaaccccgtctctactaaacatacaaaaaaattagctgggtgtggtggcagtcgcctgtagtcccatctactcaagaggctgaggcaggagaatggcgtgaacccgggaggcggagcttgcagtgagccgagatcaccccactacactccagcctgggtgacagagcaagactccatctcaaaaaaaaattagttaa

SEQ ID NO: 74714 - DNA, 1078 bp, Homo sapiens
agcttcacgccaggctgccacacagcaaaactgggactatcggtggcagcaagtgcccaaaaaaggtgagactggaagtacaggcacagtggatttgtctgtagcctgggagccctggaggacctccccctcagccctctttgccaggcattaactctttatttgctaaatcatggatggaatggccagaggttcctaggattggggcctgggtgggggtcactcagaatcaaccaatataaaagtatgtgagtgtaatgattaaccggcagggccatattggagactgtccactgactattaggtggagaaagagccaccacttgaagattggaaaggcatttgtctctgggcatcgaaccttgctcaggactggtggtacgaaacaatcccaaagcagatttcctaacctagggtttactctgcatccctacccagcctggcggaagctgaagctcccaggggacagctccttgatgacctaccggggccacggagtgctgcacaccctcatccgctgccggttctcccccattcatagcactggccagcagttcatctacagtggctgctccactggcaaagtggttggtaaggattgtgtcagaacagggggcctcaggaagggcaggaatgactccttgccattccacctataacgactagtgaccaccttaaaaagcccagtgacagctacaggtaaaatcaaacttagcttggaggcttaaacagagaaatagaaaccattctatttttcagtgttttaaattaagaaaaggaacatagaattctagacagtaaatataatagattgccaaaaatatagttggttctgtttttcagccagtcaagaaagaggttgcagatgaaaggtaggagggaacagagacaaaatgacacaggaagatggtagcaagtagttaagggacatgcagtcgctaaagcagaaaagcatagaaagaaataagctggctgcagtggctcatgcctgtaaccccagggctttgggaggccaatgagggcagatcacttgagcccaggagtttgagaccagccagggcaacatggagaaaccttg

SEQ ID NO: 74715 - DNA, 1031 bp, Homo sapiens
aaccaagggcaagaaaacctgcagtcgcgaaggcaacacggcccattagtaagtgacagagccgatctagagtacagagccactcaacccataataggcgcaaggcggtctgctttgcccgcagcgctccggaacacccggctacgggatagcgatccatccttggggctcggcggagcgagtggtagtgggcaacacaggtaacaggcaaagccaaccaccaaccgagagcggaagtcggggaacctagccaataagagtgcgggcaattttctgtgcttcacaatggtgggttctttccagtccgctggagacaaaggcggggcaacgttggggcgcggccgctgattggacaaattgaaagcctttagccctatcaaggagcaccacgtgggcgggactccaggagccagttctgcagggagctgcagtttggtctgtctcccaggcaggcgcagagtcgcggccgccagctaggggcgcgggaaggcggggctcggatgcaatcgggacctcctcctggactgggccgggggcggactccgggacccagggcgccgggagccggcgggctacctgcgagtcgagttagcgttgtcgccgaaccgaagtgagagggcacggggaagggtcaaagagcgtgccgaagcgctggagggagcttcacggacgcgagctaggcaccggctcgcctaatccggtactaatccggcttgctgcttcccgtccaggcctcgctcgccatgggggaggtggagatctcggccctggcctacgtgaagatgtgcctgcatgctgcccggtacccacacgccgcagtcaacgggctgtttttggcgccagcgccgcggtctggagaatgcctgtgcctcaccgactgtgtgcccctcttccacagccacctggccctgtccgtcatgttggaggtcgccctcaaccaggtgcctccgttggatgcccatcccccaccgcgaacccacccaacaccccagcccaagttcatccccggtcccttggcagcagtgcgcatc

SEQ ID NO: 74716 - DNA, 1025 bp, Homo sapiens
aactcctagcctcaagtgatgcgcccgccttggcttcccaaagtactgggattacaggtgtgagccagcgtgcccggcccccagtggtgacttcttatatagttatagtacaatatcaagaccaagaaataagacattgctccaatgttagctatactacaggtcttgttcatttttctcatggatatgccgctgtgtgtatgtgtggttctatgcagttctgtcccacgtatggatgcatataaccaccaccataatcaagatacagattgtttcatcaccacaaaggaactctctcatgtacctctttagttatacccttctgcccccacttctagtcacctggcaaccatgaagctgttctccacctctatagttttgtcatttcaagcatgttatttgtatatttaatggaatatgaatgtttttataggcacttttgcctttaccttaggtgtcaccattgtctattttcctccacccgactgtcttcagatgtttacgttgcctgcctggcccctgctggcacttgaggttgttaaccctgcccagttgttaattagaccctgatttcttagtggacacctggccactgcctcttccctagcctggcagctgtggcttctgaccccctcccctccaacccctcaccctccagatgcaggccctgacttcctgtgagtgcaccatctgtcctgactgcttccgccagcacttcaccatcgccttgaaggagaagcacatcacagacatggtgtgccctgcctgtggccgccccgacctcaccgatgacacacagttgctcagctacttctctacccttgacatccaggtactgcagcccctctaggactcaggtaccctgagctttgaacagggaccctcccacccaccacctctgcatcctgtccccagcttcgcgagagcctagagccagatgcctatgcgttgttccataagaagctgaccgagggtgtgctgatgcgggaccccaagttcttgtggtgtgcccaggtaagtggcct

SEQ ID NO: 74717 - DNA, 1053 bp, Homo sapiens
tgggtcaccattgggcgcctcttcagcttcctgtaccagagcagccctgaccaggtaaccttgctgctggcagccctcagaggggaacgtgccgctccactcagtgataggcactgtctgctgatgaggctcgggagctccaggctgtcagttgcacctgatgcaaggtgacagtttcagctgttcttttggtactccctgcaccatttcttatttgtctgcaaggattggcagccagtcctgtgatgggacaggagggacttcctttctccacgtagcatttttcctgaggaagctccatttctaccctttggtctgagccagaagttgcagttttcctaggctggtttcctaaaccggggccctttcaaactgtgctctgtggagcccagggtacctctgggccaccacaccatacatttcaatcagatcagctctgctctctgaagagattttgcctgtaccaagtagctaggtttggagtcatgtcagagtgtttgtgtcacccttgtcttatacctttagagactgttgtgtaggtgaagctcctgagtgtctgggtttctttaggtcttgaggctatgactttaatcatcttgtcccacatcccccattccctccaaaaaaaatcattagcaccaagtttcattggttcttctcatgttcatagttgtcttggatgcctgtgaatcagtaccaggtgcaaccacccccctgataagagattctgccactccttggtcctgaccaccctcctagacctggggtctggggctgctgccctgagtcagccactctttcctcacaggttatagatgtggctcccgagcttctgcgtatctgcagcctcattctggctgacaacaagatcccaccaggtgagggtaggagtcataggcaggggcttgcgggaggctgggagtggcagggctcagagagcctggggcagcgaggctttaggagccccgacctttctccctccctctccacccagacaccaaggccgcactgttgctgctcctgacgttcctggccaaacagcacaccgacagc

SEQ ID NO: 74718 - DNA, 1047 bp, Homo sapiens
ggatacaaccctgatcccactaagccagtgggagttcagggaaggagagcagtgtggactggggtgtgcttggagtgataggtaggagcagaagagccaggggaagaagctgggtcatggaaacacccagcttgagaggggccagccctatcaaccaagggcagccccagggacccctgcagctggtggcagagcgtgggagggaggtgtacagtcactgagctggccctggtgctccagcccctgacctggctccacaggctgaatacgacgccatgttgctggagcacgctggagaggccatccctgccctggcagccgcggctgggggagactcctttgccccattctttgccggtttcctgccattattggtgtgcaagacagtgagtgtccatcttctggcttcaagccctagtcccctcgtgcacccggtgcccaccacagcctttatccttggcccaggctgatctgtactccttcctgttctcccccatcagaaacagggctgcacagtggcagagaagtcctttgcagtggggaccttggcagagactattcagggcctgggtgctgcctcagcccagtttgtgtctcggctgctccctgtgctgttgagcaccgcccaagaggcagaccccgaggtgcgaagcaatgccatcttcgggatgggcgtgctggcagagcatgggggccaccctgcccaggagtatccttggctcgcaggacgggagggactggaggttgggggagtgtccccagggcttgcaggtgggcaaggtctacctgagcgtgtggccattccttgactgtggaccagacacttccccaagctgctggggctcctttttcccctcctggcgcgggagcgacatgatcgtgtccgtgacaacatctgtggggcacttgcccgcctgttgatggccagtcccaccaggaaaccagagccccaggtgagggagggagacatcaggcagggcttggaagctgaggagggagggtggtggagggcagggcaggttggcctgagacatttgtgtgcccagg

SEQ ID NO: 74719 - DNA, 1059 bp, Homo sapiens
cattatcaaaagtgtcctggcttggaagataaatgacatggcttaccagctatagggaccaggggctgctgcccaccctctggtgacaggaaaagccttggtttttccagggaaaatgaagagaacaggtcagcctagggctctcaggtgtagcttctcagcctatgtcctcttgtttgccccatccagactgctgcccccactgctgcagattgtgtgcaagggcctggaggacccctcgcaagttgtacgcaatgctgcgctgtttgccctgggccagttctcagaaaacctacaggtgaaccaggctgaatgtgggagccaccacttgaatgtccccttcccctcatctttcatctcttcaagcatccctgctgccatcagcactcttgtgtgtgcccggcaggtgaacctgactcaggccctgcttgctccctcccccagccccatatcagcagctattcaagggaggtaatgccactgctcctcgcctacttgaagtcggtgcctcttggacacacacaccacctagccaaggcctgctatgccctggagaattttgtggagaacctaggtagtgatggcagtggggagcttggggaagggggatgaggcggcggctttggctgaatgtacaggatgtgcatctccctgcattgctgcctgtggtaggggaaagggtgtgatggtgccaaaaaaaggtttccgcctggagggaggtgggcgtgcaggtagcagacctgggttggttggtagaggagcatcctttcccacagggcccaaggtgcagccctaccttccggagcttatggaatgcatgctgcagcttctgaggaaccccagcagtccccgggccaaggagctggctgtgagcgccctgggagccattggtgaggagagaggcaggaggcagggatgtggggttcacccaaaggccctgtggctggtggtccctgccctctccagctctgattctgtccttccatcctgcagctacggctgcccaggcctcgctgctgccctacttccctgccatcatggagcacctgcgggaattcc

SEQ ID NO: 74720 - DNA, 1802 bp, Homo sapiens
cacaatgacccagcaacatgggagagggtgggggctggatttcagcccagccactgtgctgatggtgcacagccctttaatgctgtgtatcatctcttttcttcacagtgccatctctgtggagctgtactacatctttgccacagtatggggtcgggagcagtacactttgtacggcatcctcttctttgtcttcgccatcctgctgagtgtgggggcttgcatctccattgcactcacctacttccagttgtctggggaggattaccgctggtggtggcgatctgtgctgagtgttggctccaccggcctcttcatcttcctctactcagttttctattatgcccggcgctccaacatgtctggggcagtacagacagtagagttcttcggctactccttactcactggttatgtcttcttcctcatgctgggcaccatctcctttttttcttccctaaagttcatccggtatatctatgttaacctcaagatggactgagttctgtatggcagaactattgctgttctctccctttcttcatgccctgttgaactctcctaccagcttctcttctgattgactgaattgtgtgatggcattgttgccttcccttttgccctttgggcattccttccccagagagggcctggaaattataaatctctatcacataaggattatatatttgaactttttaagttgcctttagttttggtcctgatttttctttttacaattaccaaaataaaatttattaagaaaaaggctcatgcagttggaggttttggtctggatataggaactcgagccctgctgttaagggcacggtcctttataaagccgagctggccactgaatgcccgaagctcgagttctccaacccagcttgggaactcccggcgtggggaacctacattgccagagtcgggtttccgcgattcagccggtgctcagcctaacggaagtggaggagccggacctctttgtgggaagcgaattgaatcaccttggcaacccgcggggcgtgcagcaacgccctttcctccggaagtgggtgtcagaacctccacgtgctgtccctccccctccccttttcggcccagtagcggcggctcagttgctgccatggagtcagccgggctagagcagctcctacgggagctgctgctaccggacaccgagcgcatccgtcgggtacggagcaggcgtaaccgggccagggcgagcgggaggttgcgggaaaggcccaactctcacccctagcttccccccaggccacggaacagctccagatcgttcttcgggcccccgccgctttgccggctctctgcgacctgctagcctcggcggccgacccccaggtgagacccctgactctcccctccgagcttcccactgtacgccaccggtcaagccccagtattcgcccactgcggtccgctcagcaccttcctgcccggacccccacgtgcttgcttcctcgtcctagatccgccagtttgcggccgtgctgacccgcagacgactgaacacccgctggcgacggctggcggcggagcaacgggagaggtgggctgggcctggggtggggcggggccaggcggagacttttcttgggcaggctgggtaccaaacacctgccacctgtgttccagcctcaagtccctgatcctgacggccctgcagagagaaacagagtaagtacctacccacttctctcgggatcttgacgactttgtctaggtttctgccttccttttcggctccaggctgggacttgtggggcagggacttcagt

SEQ ID NO: 74721 - DNA, 1050 bp, Homo sapiens
tcggcctcccaaagtgttgggattacaggcatgagcctccgcacccgaccaatcccagcactttgggaggccgaggcaggcagatcatgaggtcaggaatttgagactagcctggccaacatggtgaaaccctgtctctactaaaaatacaaaaattagctgggtgtggtggtgggcgcctgtaatcccagctactcgggaggctgaggcaggagaattgcttgaacccaggaggcagaagttgcagtaagccgagatcgcaccactgcactccagcctgggtgacagagcaagactccatctcgaaaaaaaagaattatccaccccaaaatatcagtagtgctgaaggtgagaaactttgctgtaactctgcgcctggggagatcttgtgtgaccaactcctgacttgctctttataggtggagcagctgcgccaggccattgaagaactgtactactttgaatttgtggtagatgacttgccaatccggggctttgtgggctacatggaggagagtggtttcctgccacacagccacaagataggactctggacccatttggacttccacctagaattccatggagaccgaattatatttgccaatgtttcagtgcgggacgtcaagccccacagcttggatgggttacgacctgacgagttcctaggccttacccacacttatagcgtgcgctggtctgagacttcagtggagcgtcggagtgacaggcgccgtggtgacgatggtggtttctttcctcgaacactggaaatccattggttgtccatcatcaactccatggtgcttgtgtttttactggtgggttttgtggctgtcattctaatgcgtgtgcttcggaatgacctggctcggtacaacttagatgaggagaccacctctgcaggttctggtgatgactttgaccagggtgacaatggctggaaaattatccatacagatgtcttccgcttccccccataccgtggtctgctctgtgctgtgcttggcgtgggtgcccagttcctggcccttggcactggtgaggtga

SEQ ID NO: 74722 - DNA, 1112 bp, Homo sapiens
ctcctgcctcagcctcccaagtagctgggactacaagtgcccaccaccatacccggctaacttttgtattttagtagagacggggtttcgccatgtttgccaggctggtcttgaacgcctgacctgaggtgatccacccacctcagcctcccaaagtgctgggattacaggcatgagccaccgcgcctggcctcattttgtttttgttttgagacattcttactctgtcacccaggctggagtgcagtggtatgatctcggctcactgcaacctccacctcccaggctcaagggatcctcccaactcagcctcccaagtagctgggactacaggtacatgccaccacacctggctgattttctgtatttttagtagaggtggggtttcaccatgttgcccaggctggtcttgaactcctgagctcaagtgatccacctgccttggcctcccgaagtgctgggattacaggcgtgagccaccatgcccagccgaatgattcattttcaactgctgtctctgtgtagctgacttcttccatatttttctataagattttacaattaaattcttcctgatttaaatcttgttaccttgtctctatggttctaaaattaaatgcatcatcttctgtcataagccatatcccaatacccatctcgtgtattaatcccatcaatcattcaggtgtctggaatacaattctttagagtcatttaaaattacgtggtccttttataagatctaatttttcacttaaaagctctttctgtttgatttttgtttccatctccattaccctcattctggtctcgggtcttactcatttatatgtttatgtctctgtaatacatccaaccaggttttcctaccgtcatatcccctctaaagtgtagtctaaaccaagacatgacgtacaaaaccataatgtgcaggtcttcctttagcttctttttcattatattactccctaaccccagatccttcattgatttcctcattgcagattactttggcaactgtctttactgtgtgaatcagttttctcattcatgttttttaacatacagtaaaatgcacagttcttaagggtttagttcagtgagtttttgac

SEQ ID NO: 74723 - DNA, 1112 bp, Homo sapiens; identical to SEQ ID NO: 74722

SEQ ID NO: 74724 - DNA, 1112 bp, Homo sapiens; identical to SEQ ID NO: 74722

SEQ ID NO: 74725 - DNA, 1112 bp, Homo sapiens; identical to SEQ ID NO: 74722

SEQ ID NO: 74726 - DNA, 1436 bp, Homo sapiens
agcactcttgcctgcaagggccacttctacttccgggtcactgtctggctccacccccccccccccccccactgggttccggaaaggctcagggttgctcccgcgtttcggttcagtgacgtcgtaaattggaatgaggcatccagtttagcaacagcagagatgacgactctgcgattctgagagtccctggcgagcccgggctagcgaaaagtgggggcagaacgaactacatctcccatcgtgccaggaggcggtcccgcccgtttccccctgggagttgtagtctaaccccctcggatccaacagcaacctcagtgcgtgaactctgttatccagaaggcctcgccctgccgccgccgaagctggaattcgtcggctagtagttctcgccggcaactagaggaacctgttggcgtggcccagaaggcttagcgggattgcacgaggttagttgctaagcaaggtggtctttggtcaactgccgcctggaccaaggcaacaggaagtgagtacctctattccggaaactagttatgaaccctccccgccccccgtcgccaacattccttcgttcccctaaatcagcctcttgccccattgctctttgcaggggtagaagaaggaagtgtagcggggtaaggaatgcaccgtcagggtctctcacaaccctttcccagctctcctccccaacaaacagtacctgggatggagccctagggtaatcgcagccacgggatgggtcgaggtgacaggcttcagggaccacacttcggcctttgcccgaccttccacaacttaagcgaagagaggccaccagccgtaacagggcgttaaagcccaggggaagattggtccttatgacttcctgccttccagccctcagattcatcgctaccccgaggctaagcgccatgcctcatattgacaacgatgtgaaactggacttcaaggatgtccttttgaggcccaaacgcagtacccttaagtctcgaagtgaggtgagcaagcttctctacttgctgtttcttgaccccacgctcccggtgggccacaaccaagaaagatgcctgtccttgtcctaatatggtacgttttttggattaatgaaatggtcaatttcctgttcatatctgcaggtggatctcacaagatccttttcatttcggaactcaaagcagacatactctggggttcccatcattgctgccaatatggatactgtgggcacctttgagatggccaaggttctctgtaaggtagggctttcctcatgccccatccctattggtgtccagttagcccagctgactgcagaggtgtttgcatccccacccccatgcccagtcagttctctggcagttagcagtcaggatgctctgatttacggttttttccactactgaagccctttatctgataagttcaaaaggcca

SEQ ID NO: 74727 - DNA, 1478 bp, Homo sapiens
tggggtggctgtttcaaggattgtggtcttcatacctctgtccctgcccacagcttcaggatgtgctgagttggatgcagcctggagtctctatcacctcttctcttgcctggagacaatatggtgtggacatggggtggctgcttccaggtactaggaatttggaggtgtagtgtttagcctgagaccttttgaggcagtccactggaatagttccatgggctccgggcataagaaaccagttattctgttactatctgttctctttataaggggcctcattttctttttcagagtgctctgttactgactcagtgaacctggctgagcccatggaacagaatcctcctcagcaacaaagactagcactccacaatcccctgccaaaagccaagcctggcacacatcttcctcagggaccatcttcaaggacgcacccagaacctctagctggccgacacttcaatctggcccctctaggccgacgaagagttcagtcccaatgggcctccactaggggaggccataaggagcgccccacagtcatgctgtttccctttaggaatctcggctcaccaacccaggtcatatctaagcctgagagcaaggaagaacatgcgatatacacagcagacctagccatgggcacaagagcagcctccactgggaagtctaagagtccatgccagaccctggggggaagggctctgaaggagaacccagttgacttgcctgccacagagcaaaaggagtgagtggaacagagttgcttcttactaggagcacattctttgcctgccttcccttcatcctatcctctttgcttgctctcacctcaggaattgcttggattgctacatggaccccctgagactatcattattacctcctagggccaggaagccaggtaggtagtctgagtcaggattggatcaacagcctcctctcttggggactctcaagagcctgtgttcatctagaagtagtagtttgattctggtttccctcctacagtgtgtcctccgtctctgtgcagctccgtcattaccataggggacttggttttagactctgatgaggaagaaaatggccagggggaaggaaaggtgagtgggaaggagcagaaagctgggaaaggggatgggtagaacaagactgagaaatccacatgcttcagaattcagagggttcagggaatggtttcggatagtaggctctccctgctcccttctctacaggaatctctggaaaactatcagaagacaaagtttgacaccttgatacccactctctgtgaatacctacccccttctggccacggtgccatacctgtttcttcctgtgactgtagagacagttctagacctttgtgatagaactaaaatgctctctgtactctagtctcctgcctcctcagctctgcaagtagtttagtaggaatgaagtggaagtccaggcttggattgcctaactacact

SEQ ID NO: 74728 - DNA, 1087 bp, Homo sapiens
tttttaagggcgggcgccctcttctgttttataaaaggaacagtcgaattcctactggaagcgacgcgcgcagaggggaaggctttgtagacgccggctcgggtctggaatttaaagaactaaatttcgatgggtgaagacagtgggaaagggcggtggcatgatcctcgttttacagactaggaagtcgagcctcacgggagtgacggggcttctccgcaggctccgcgaagaaagcaaggctgggaggacccagacgaacggccacaacagcctcagcggccacgacagcctcagccgccaactcatgtcagccggcagagagtgcaggaagcgggcagctacagctccgctggggcgtggccttctgacgcaccgtcacggttccctctgtggccgcccattggctccctcttaccgcccttttccggggcaagggaagctagtagcggagccggaagtgaggcaccctcgggctcgagacagcggcgacgtttaaagctgagcgacccagtgccactggagacggtcagcttctccactcaggctcctccagcccgagccagaagaccccctcccccagaattctgggggccgatggaagggagccgagtcagatcgcgaggtacccagagccgacagaccggagcgacagggagttgccagaagccccgcccctaggagtgatcggaaagcctcacccatccgggtgaggaacccggagggaccgcctccgggcggagcccgccgaccatggctacgcccctggtggcgggtcccgcagctctacgcttcgccgccgcggctagctggcaggttgtgcgcggacgctgcgtggaacattttccgcgagtactggagtttctgcgatctctgcgcgctgttgcccctggcttggttcgctaccggcaccacgaacgcctttgtatgggcctaaaggccaaggtattggagcaagtaggacctggaaggggaaagaaagaaaggggcgggatgcgagcacctgacaagggcccacagcttggggatgagactagttggaaaaggtcagcttgccccgaagtggggattctgaattcagtaccgt

SEQ ID NO: 74729 - DNA, 1014 bp, Homo sapiens
aagtgggtaactgcccttttccatcagaaccgaggcatgctgtggaaggaaggacaggctgaccgtggcatcactgagcacacgcctgtgtgtatggtttaaatggctctgaagaagagtccaggaggagttttaaacatgtttcaagcccaggcaatacgattgaacaagtacacaattggacaatgctcgtttcgacgtctaagttctggtgtccttgttggggagttggtttcatgacccacactcagttccaggaacatcccagctttagcagatggcttgtactcagcttcagctcacaaaagaggtgtggtaaagtcccccacctcacaatgagaccaggggagggagagatcttgacatttccacctagaaaacagtttctcttgaaaataatccgttactgcaatgtaaaggttactttctgaaatattatagttcaattatggtatagagtaaatagacttctgagggctggtctgagcttgaacaaccttgaatcttgtatctatgaaaagttagcaaaaattaagagtgcaaatttgtaagcagtcaggacatagcctagccattaagttatagacttaatttatagacttcctatcatactacgttctattatatatccctgcctccctccttcagagagctcagaaacaccttcaagataatcagatcccactcctccttttactttcacttccattttatgacccagaaagtgaggaacagagaagttaaatagcttctcataagcctcacagctaacaagtggtagaaaagggagtagagtggtccagggaaacccctcagaaccaggttccaagccaaatgctttgccctgaaaaaaactcatccttggagttagggatgttggctcattctcttagaggacaatagttaatgcacaggttctatgtctggaaagggtccccagcggcaggcttgggttgaatagggcaccagaggtaaggtttaggcaaaggcaggaaggacaaattcccacaggca

SEQ ID NO: 74730 - DNA, 1013 bp, Homo sapiens
ctcaatgtctcaggccacgtcaaggagagcgggcaggtgctggccaagcagcacaccttccgtctgcgcaccccagacctctccctcacggtgaatgcagtttgctggggcatgaggggtggtcagagagtgaaggccaggggataaggacatcagaggtgggcgctaagccagcagcaggctggcctgatgagcctttgtaggagaaggtcaaggaccggctctggggcctcagtttcctcatctgtagcatgggatcttatgtctctggttctgtgacagcctttattgaggaataggttggagtttcttctctgacttctggggaatcttctctcaggaggataaatgtgggactcggggaggttttgcttctaagcagcttcccctctctggtgcagtgtacggtccccgtgtgtttggccagggtctctgacgtgggggatgggcctctttttctctcagttactgggagcagcagtggttggccaggagtgtgaagtacagattgtcttcaagaacccccttcccgtcaccctcaccaatgtcgtcttccggctcgaaggctctgggttacagaggcccaagatcctcaacgttgggtgagtctggcctctccccctacccctgcttccactctggccttccccacaggctgccctggctcccagctttgctccctctctgtctggacaagtatgttctgtcaggacccaaccaagcaggttggggccagctagcaatacctcccggcccagctcagtcccaccagcctttagggagacctcttgggcacctggtgctatgccatgtccttgccctgcctcactatctaattagggagcagaaggcccacataggaatcattagtaactcattgctaatatttgcccagcactgaagaattgaccaggccctttcaggaatattatctcctttggacacaaaaactctaatttaagtacattagaaggccaggtgtggtggctcacacctgtaatcccagcactttg

SEQ ID NO: 74731 - DNA, 1169 bp, Homo sapiens
aaccttgcccacctcatcctttaatttcccaggaacccctaccacctccaccagggatgccctgggctctggaagctgcagccccaggaagcaggcagggttggccttcaggatcaggactgccctttcatacggggcaggtggatctgcccctccagcccaggcactgtgatagtcaggcaggcagaaggtgacaggagccctcgtctctcctccccacctcagagttcagtgtcaggggaacaggtttgggatgttggactgcggcactgccctaacatgtgggcaagcattgggtggagacagagctgctctaagggagactgtcagagaataaggtgatggcccaacgtagggacatacacagtggctcatacacattgtgggtggggccgggagaagtcccaggctccatcccctctcctcagggaggccttgccagctaattgctgatttcctactctaggaaacaaccccgaggtgggcaagggcacgcacgtgatcatcccagtgggcaaggggggcagtggaggctggaaagcccaggtggtcaaggccagtgggcagaatctgaacctgcgggtccacacttcccccaacgccatcatcggcaagtttcagttcacagtccgcacacaatcagacgctggggagttccagttgccctttgacccccgcaatgagatctacatcctcttcaacccctggtgcccaggtgagcagctggggtctggagcagagggtagatgggagggaaagacagggaagggcttcctgccctcggatgtggcggggtgcctaggtgcctgaccccaggagaagccagcctcccattgggcagatgagaggaccgaggcctggtgcagaaaggtggccagcccagggtcacacagccagccacacctctcctggcaaaggcccctggctacagccaatctcctccaccatctgtcatgctccccgtgtcctcccacagcagtcctgtcaggctaggggcatccccgcattttcttctgtggacatgagtcctgcagaactggccagaagtaggtgaggcccagggagagaactggagggaaccagttttgtgtgttctggggacacagaggacattgtgtacgtggaccatgaggattggcggcaggagtatgttcttaatgagtctggga

SEQ ID NO: 74732 - DNA, 1807 bp, Homo sapiens
gccgtgcctggatccagcaaggtggggtgtgggccagctgtgtacctgtcagccccagctaggctgttcccaacaccaagactctgctttccctgtgcacaggctccgggcacctgccatgccctacccctcctggcagccccaagtggggtcttccctgacttgggaatgccaaggaccacaggccccggggtcacttgtctgtcttgtgaggaaccttgagttgggggatttctgctaagaaatgagttctagaagctgtcagtgttgtgcacctctagactgcagagctagcaggtggacggaccaggcccagggatgctggagcactctgatgtgtgtgcagctgggtcttgaggctgggacaagtgtccatgcagggaactatgtggatttcctgggatggatcgttgagtgggtttcttcattgggcagtttttcggatgttgtttggtgggggtgaggggaaggcttttctctgcagcatgagaagcttctctgggtgagtctgaatggtcttcgcggaaggtctctggatgtgtctggagaatctctgggccaaggtgggattgtttcggtcatcgggtgggactgaatcagctgtctggatggagggtttctgggtcaactggctgggactacctgggttaaggagccaccctgcctcttcctaacaggcatgatggatgggccacgttccgatgtgggccgttggggtggcaaccccttgcagccccctaccacgccatctccagagccagagccagagccagacggacgctctcgcagaggaggaggccgttccttctgggctcgctgctgtggctgctgttcatgccgaaatgcggcagatgacgactggggacctgaaccctctgactccaggggtcgagggtccagctctggcactcgaagacctggctcccggggctcagactcccgccggcctgtatcccggggcagcggtgtcaatgcagctggagatggcaccatccgaggtgaggccggtctgtcctcctcagctgagagctaaaaggctttaatgggaccagagactcagcctggcatttctgggggggataggaagctaatgataagggcctgggctcctcatggggcttcactgacacggagctgtgtccttgcagagggcatgctagtagtgaacggtgtggacttgctgagctcgcgctcggaccagaaccgccgagagcaccacacagacgagtatgagtacgacgagctgatagtgcgccgcgggcagcctttccatatgctcctcctcctgtcccggacctatgaatcctctgatcgcatcacccttgagttactcatcggtcagtggggcttggattgggacgggtgaaggccctatgtttggtggggagaggctggcattagggtcagagaggtctttaggctcctccctgccccactcctcacctctgccagataaggcaggtgcaagtgtgtgggtgtgcccctggggttgtgtctcagagagggtcttggtgttgcagtttttcccaagcccatcctcctcaagcctcctggggcatcggtctcagagtactcctcttcagggcctgcctcggtgcctccttcggcattgctgctctgtcctttgtgcatctgttctcattccccaggatgtggctggttctctcttctatctctctctctccctcttgccttccatgtcccccatctctgccaattctgtctctctctgtctctgtccctctgtccccatgacccaaggcaggtgcctcccttaccgcgttgcttggtgtagcttgacttctca

SEQ ID NO: 74733 - DNA, 1019 bp, Homo sapiens
ggcatgtgcctaataaatgctggccgaggaccctctcccaggtctcctgggaagcccatcacctccttcctcccttcaccccccaggatctgacagtgctctgccatctggaacagctgctcttggtcacccatcttgacttgtcacacaatcgcctccgaaccctgccacctgcactggctgccctgcgctgccttgaggtaaagtacccatgtctccgtccctgtcacgggtggttcttttcctcttcctctccctcagaagtctgcccatcctacaaggagatgtgcaggaccctccaccccgaacaggtaactgcgtgccttccacctccatcacgcagcctgaccctgtgagcccctctgtgctctgtggacccgtcaccctgagctcctcagttgctgaaccatccctggctgacagcgcctgtcctgcctccctgccctccctgcccccaggtgctgcaggccagtgataatgccatagagtccctggacggcgtcaccaacctaccccggctgcaggagctgctactgtgcaacaaccgtatccttccttctgggtgcctttcagacagtgggtaaagtgaggtgccaccctgggaagggacagacagcaggcagggtatgtgccaccctcttgcagggcaggagagagggggctctgtagtgtgagttgaagggggagagcctggggctgtcgggctatcactgacctgcactggtggagttgtgcggagtggacttcctcaagtcagagttcacaaatgggcagcccgcagctgttcttcaggtctatgtagttttttgaaaatcaggaactttcatactttaaaaaacatctagagttctaattcctctcttaaaaattggaagttagagcaaccttacactggtattttcactcagcagcccttggtcattgctgaatagtaaatgtctctttggaccaggctagatttccaccttatcataccctgcaccactcccctgatactacaccagcttgcgtggggtgtt

SEQ ID NO: 74734 - DNA, 1025 bp, Homo sapiens
gagagccctgaccccccccttcccttctgggtacaggtctcctgaagagttggctgctctggtgaaggcagaactgggcttcctggagagctgcctgcgggtgaaccccaagtcttatggtacctggcaccaccgatgctggctgctaggccgcctgcctgagcccaactggacccgagagctggagctctgtgcccgtttcctggaggtggatgagcggaactgtacgtggctgcagattctgtccccacagccctcacctgcccacattctggtactggggcctcagtaaggcccagaatggggagggatatccaggatgggtccactgagctggtgctgaaagggatgttggagccaaatgcatcctccgtggagtgcactgaggtgtttctaggggttcctgaggggactctaggggtcccagccaggtagctcctcttgccctgcctctaagatatgctgtcacctctcccctccagttcactgctgggactatcggcggtttgtggccacacaggcagccgtgccccctgcagaagagctagccttcactgacagcctcatcacccgaaacttctccaactactcttcctggcattaccgctcctgtctcttgccccagctgcacccccagccggattctggaccacaggggcgcctccctgaggatgtgctgctcaaaggtaaccagggtcagggatgctcaggaggactctgcagtgccacccttccagcccccatgcctgaccctgttcctgaacctgtcactcaggtttattgagcacctacttcatgcgtggctccaggggtgcttaagaatcagtccctggctgaaggaagcttaagtgtctgatggggaagataaaactgacatacgtagcccctgtgcaaggacagcatataagtgagactgggggctggaagtactccaaggagagggtagggtgttggagtggccaggagctcaccagtgtcctgaccacagccccatgcctcctggaaccccacagagctggagctgg

SEQ ID NO: 74735 - DNA, 1006 bp, Homo sapiens
agggtccgcgctctccacacaaggtggggcgccggttcccagctggtggcaaacgggggcgcggggccaaggggtcggggcgccccttaccaggccgtaagcggcaaccctggccgcctccggatgggcgctcggagccggctccagattcgcacccgcacctgagcccggaagctctgggatatttccgccgggcgctgtcagcattgaaagaggctcccgagactggggaagaacgaggtaggcagcaacttcggggtttagaccaagagcatcaaatccagggcaggcaaggaaactttctagggtcggcagggcgtggggacttagtttcatttcccatgtcctcttcctcggcctccgacccacgacccttggttaagcgagggtacataactgtattctctactaagtctcttcaaagtgtgtctttcttcccttttcagatctgatggtgcacaatataatgaaggaagtagagactcaggccctagctttgtccacgaacaggactggcagtgagatgctgcaggaactgttgggattcagtcccttgaaaccgctttgtcgcgtgtgggctgctctgcgctctaacttgcgcactgtggcctgtcaccgatgcggggtccatgtattacaaagtgctttgctacagctccctcgattgctggggagtgctgcagaggaggaggaggaggaggaggaggatggaaaggatggtcccacggagaccctggaggagctggtcctgggactagccgctgaggtgtgtgatgattttcttgtctactgtggagacacacatggcagcttcgtggtcagaactctgcttcaggtgttaggagggactattctggagtctgagagagccaggccccgtggttcccaatcatctggtaagtattacaagaggaaagtggacctagggggaagaagaatttagaaagttcagaatgagacagtaaacagaagagtaagtcttcatgggggagcttgaccgggaaga

SEQ ID NO: 74736 - DNA, 1011 bp, Homo sapiens
cctgaccatcaccccaggctctactttagcgactgctcacacctccctgcttcccagacagaagtcaaaacagcaaaagaaacccagtccccagggtcatgctagggctaccaaaactgggatgaactagcacctgtgaactagaacagcagggagtatgcttagagtgcctggtcctgggtgtggggaagaaaggccatcaaggtagatgcgggtggggaacagcttgagagaggaggcaaggacaacccagtttctgtctgaaggggcctctggttgaccctggagtttctgtccccaaacacaggcctcacgggattctttctgtcctcatgcactgggcagaggttccttaacttcctttgttgcacattgccattctctcacatcccgtgcggtcaggaagcccttcctgaactctgacttcagttcttgctgcggtttctgcccatttttttcatatcctctgacagctgcgaggtcatctctgctctggcttttctccaagcagaacaagtgggggctctggaaaggttaagggacctcagtggccaccattatactttgcatctttcctgagaagtgagagttgaaagggaagcaggaaggcccatggtcagattgaaggaaggactttttagtttcttttttttttttttttttttttgagatggagtctcgctctgtcattcaggctggagtgcagtggtgcgatctcagctcactgcagcctccacttcctgggttcacatgattctcctgcctcagcctcccaagtagctgagactacaggcacatgccactacacccagctatcttttgtatttttagtagagacggggtttcaccatgttggccaggctggtctcaaactgctaacatcaagtgatctgctcccctcagcctcccaaagtgctgggattaccggtatgaaccaccacaacctgccaggaatttttagtttttagcttttgcaggagacttcaaggaaaggagacattcctctgtcca

SEQ ID NO: 74737 - DNA, 1148 bp, Homo sapiens
gaggccccctggcaccttccagcctgatgtcgtgcgtcaagttatggtgagtagggagtggcatgtcgatcgcagcctccgacattcacacccagagagccccacagactcgctcagagaacgtctttgagtccggggacggtgggggccggcgagggaggctggggattgcagtgagaacgccgagtcacaggggcgcggggagcagcgctgaggcacggcacggccggctagtgggcgacacccctctctcaggcccagcggtgcccccgcccccttggtgtccatcgaggaactggagaaccaggagctcgtcggcaaaggcgggttcggcacagtgttccgggcgcaacataggaagtggggctacgatgtggcggtcaagatcgtaaactcgtgagtgaccccggttgaccccagccgcaatctggccaaaaaggtggagccactgtgctctggggcctgaatggcgaagggagggattttcccacgaccccggtgcgactccagctctctcctggagtgtaggaaggcgatatccagggaggtcaaggccatggcaagtctggataacgaattcgtgctgcgcctagaaggggttatcgagaaggtgaactgggaccaagatcccaagccggctctggtgactaaattcatggagaacggctccttgtcggggctgctgcagtcccagtgccctcggccctggccgctcctttgccgcctgctgaaagaagtggtgcttgggatgttttacctgcacgaccagaacccggtgctcctgcaccgggacctcaagccatccaacgtcctgctggacccagagctgcacgtcaaggtcagctggtctacacccctctcagcctcaagacaaggccccagagctgctccagccaggcccgccggacactagacctccagagccctgtctattgaataggcgtagcctctctctctggacacagggctgccaggggacaaagcccagccaggagttttagctcctgcctaccaggtgatagaggccctgagccacacgagtcatttccaccagctgccccaccagcccctccaaagagtcatggctgacccagccctggagactcagaccttgacctagccctaccacaaggcacctagatctacca

SEQ ID NO: 74738 - DNA, 1034 bp, Homo sapiens
cctcctggtcctcccagcctcaccgacctggcgggctggctctcccaggtgccaggtgagggggctggtcgcggcggtggcgaatgcatgccaggccgagggggtggaggtcggggaataccgataggtgcagcgccatagggagggggctctcccaaggccagacggcagcatggcggggcatcctctgagtccagttctgtcaaaatgggaagaggagcagagggagagggggaaagagagaagcaggtgagatggctatgttccttgagtggccaggccgcaagtccttctatgctccctgcccctcagcaaagagaccttctgagccacaagacaaaagcagagttggacctgggaagatggaggagattgaagcaggcatgccaggcctttgcccactggcccctggatcctaggaccgagggtacccgatccagtgggtcttaaggtgagagaggtgggtccagaggggctggagctggggctgggcctggaggcgtgtttcttgaggcactgggctggactgggggcgactcacacatgaacccaattagcagcggttcccaaacccccaaacggcgctggcaggagccccagttgccatcgcaaccgtggccagaggggaggggggcgtcagggctgtggtgacgaggggaggtggctcctccctctctcctcgccatctaggggcggaggtgcagccgagggggtgatgcgtgctgggcccagccgggggaaggggggcagcgggcagcgcggattcgtgcgagcggcggccgccgcccccggctcggtccccgccatctgcctctcattgcggccagacgggggagggggaggggcgccccagcgaggcctgacagcgcccccagccccgggcgtccagtcggccgggccagagctcggtccgccaggggccagctccagcgccaaacctccccttcccctggcggcgcctggtgctgttggggccgtagttcccgcccgccccccagttcagtgacaggcggcccagccgggaggcggcgcac

SEQ ID NO: 74739 - DNA, 1099 bp, Homo sapiens
ggagttttaggcttgttgtcatctttcacacctcaaggggctctgtcccctacttccccttgcttctggacttttggatttcttcatttctttgtcctttttttagtttaaaaaaaattcttttttcccttcttttcacaagtgttaatgtacttctttatttcttctgtgctttcctttctctcagacccataccccctcctccctcacagatccagtacgggcctgactggggtctgaggctgcacatgatcaatgctcttctctcccacccaggacctctgccctacccccactggactggcctctgcccagccaatatgagcagctggagctgaggatcgaggtacagcctagagcccaccaccgggcccactatgagacagaaggcagccgtggagctgtcaaagctgcccctggcggtcaccccgtagtcaaggtaaaggacagacagcaggcctgatatcctctctcctctcccagataggttccagctatgcagacacatggcactgccctttcccacactccctctcagctctgaccctgcaggcagcctgggggaggggctggagttgggggaggaggggtgcaaggacccggatatactttctactcctgtccttccacccccactcagctcatcccatgggacaccagcctcatgtctactctggaaaatggtggcccgccagatatgggggagggtttaggctgaggacaaaagtcactgggagttaagttttctctgtattgagttgggccagtctctttggaggctcttctgcctttgcccagcccactttgggctttattccaagaaaaacactgtgaactccaggccatgttttctccacaacgggtgcccagttccccaagggattcccttgcaggatatcctttatctttcaccattcccatcccatggtagactgaaaatctagggatgaataaaggatgagacggtggggatttcaatgaggtggccgctctctccctctgccagctcctaggctacagtgagaagccactgaccctacagatgttcatcggcactgcagatgaaaggaacctgcggcctcatgccttctatcaggtg

SEQ ID NO: 74740 - DNA, 1049 bp, Homo sapiens
ccagtgcctgctctgtgagaggaggcgaggaactggtactgactggctccaacttcctgccagactccaaggtggtgttcattgagaggggtcctggtgagtacctgctggggaggggagggcaggcagggagagcttgggagtggcaggtgaaacatctctggcattgtcactaaactggccagtggagcctcagtttttttatttgtaaaatgggacagacagactaccctttctattatactgtctgctttccatgtgggatgggtatgacagcaatctaaaatgttgaggatgctgaacaaatggaagcaatgcacattctgtctaataaagaggagtctgctttgagataatttacccccatgtagatagggtatatgaggagaagggaagaggtgatttacaccctcacagctgcccgctgggcccctcttgagttatgggcagtgattaacagagcctgttaggtgccccaagatggagctacaggagtggaggaagggaagactgagggtttgagttgccagcaccaacctgaggcctttgccctctccaaacgctgctcaccaagagcctcagtccctatattcttttttttttggtagcaggatctcactttgtcacccaggggagtgcagtgatgctgcaatcacggctcactgcagcctcaacctcctgggctcaagcaatcctccaaaaatattctgtgtagagacaggttctccccatgttgcccaggctggtctcaaactcctggactcaagtgatccttccaccttggcctcccaaggtgggagtggtgggttctgggattacaggcatgagccactgcctctggcccctatatccaaatttagcatcctgggaccatgtcagagcttctccagaggttctaggtcatgatacttgggggtctcattgcgttctgtcgagctaggaccctttcctacctttggtcttccttctcagcattatcatgggaaaggatgtttggagctgggtgggagggctcaagggttgcttccgttactgactccctctggttt

SEQ ID NO: 74741 - DNA, 1015 bp, Homo sapiens
cccagagtttcaggtttctgcctggtgcgctctgggacagcccatggtgggggtatagggatatggggagctggagcaggagcagagggaagcagtactcatcatgaggggccaaggggtgaatggaacctgggaggagcaggcagctggaaggtgtgcagtggggagactaccagacctctcaccagcatgtcctcccacttcctgtcttcccagtgatctgcaaagaggagcccctaccggactcatctctgcggggtttcccttcagcatcggcaaccccctttggcactgacatggacttctcaccacccaggcccccctacccctcctatccccatgaagaccctgcttgcgaaactccttacctatcagaaggcttcggctatggcatgccccctctgtacccccagacggggcccccaccatcctacagaccgggcctgcggatgttccctgagactaggggtaccacaggttgtgcccaaccacctgcagtttccttccttccccgccccttccctagtgacccgtatggagggcggggctcctctttctccctggggctgccattctctccgccagccccctttcggccgcctcctcttcctgcatccccaccgcttgaaggccccttcccttcccagagtgatgtgcatcccctacctgctgagggatacaataaggtagggccaggctatggccctggggagggggctccggagcaggagaaatccaggggtggctacagcagcggcttccgagacagtgtccctatccagggtatcacgctggaggaaggtgggtgtgggactgggggctgtgagtgtgagtgtgtgcaagagattgctctgcatgtttgctgagggctggagctgggcttttcagagatcgggcatccctggtctctcagggccagttggaggttcccaggaggcatgttcttgatgcctgtggctgcctgaatccaattaactgaattctgaagagtgcatggggtaactgtctcagcctt

SEQ ID NO: 74742 - DNA, 1049 bp, Homo sapiens
tctctttccaacttctgggcctccttgggccagggctggagtaagctgccccaacccatctctccaaagagctctggagcctgaagcactggtcattgagcagtttattaccatcaacctgtccccagctttccagcacaacagccagcccacactctagacacgccttcactccagtccattctggcacctagcctcagtcttcaccctcctccctcctccacacactccttcccccagccctccaaggcagcaccaggcctgagggccacacctcagctgggggaggggagggaagacagtgagacagacagaagctggggaaagaggagccagggttggccccaagcttctgtagccaccactccaggaaggagggaaagggggcagggctgaggctggggctggggttgccaggtgatgacagttcacgtggttcaggcaggaggctcttctccaggaggtgcagggaagccactcaggtctcggccaatgatctcactcactgtaaaggaggggcagttgagagactgggctagaggtgggtcccctccttttccaaagacccacccccaatccattccaggcaggtcttaatctaggaggcctctagattcctcctctactggcttctattccactgggcctcagtttccccaacacgtcttgacacctgctccgaatcaaatcttgcccaactccctccatgtgggctcccaggcacccgtcctagccctttcctgctggcttagcctgaaatgtcaggggaatcggtatcagcagggccagagatgggtgtagccaatgggaagaaggagaggcaaaacaggaaagctcctcctcaccaaccctgaccacagacaccgtgtttaggggaaagctgaggcaatggcaagtgtgcttgactgggacctcagcaagctaccatccctctctggaactcaacgcctaaacttgcaaattgaatgcgctggatggaatgatcttgaaagtgcttctagctctgagattttatgatttggagcagaggacagaggcagagacaggag

SEQ ID NO: 74743 - DNA, 1050 bp, Homo sapiens
tccaggacaaattggctggcactttgctgctgtttaataaatatctgacaatgcatgaatggcagtgtcctggcagaaaacagaatagtccaccttgagaggcaacaagtcctaacagctttttgtttacacagaggctgatccaccctctctcagagatcttagaggtggtgctgaagattgataaataggacacgaatgccctagggtcccttctgacatggtgattatggggcagtgactctggcagggggctgaaggggatctttgaaaagcaaccaaggcccggtgagctaatcacttgatatcagtttggttcacagcagcttgtgttccagaaaggtaaaggaaattcattgcaaagcagcaacaggcgaggagttactctggttctgttgtcccccaatccagagccagcctctgtcacacccacccctgctctcctgagtacttgctaggactgcctggactcattgggcatagagaggccccacaagcctgaaggtgaggcaagtttcccaagtgcaaatgcccggaatgtcttttaggcacgtccccctgcagccaagcctagccaaatcaagctatttgtactcagtacctacggtgtgtcaggctccaggtgaacaagacagacaaagtgacttttcccagcccagtggaacttggcctctcgtaggccatcaagacaggggacaaaccaggtttccaggccaggcccgtcagtggtgatggatgtaccagctatttagaaggccagcatgggcatatttgcaggataggccaggaactcatatagtgctgtaagccccagggcaggtgacattcagagctgctgggtagactgtttgctttctgcagtctacctctgaagcacaaatctttccagaatatcttcataatccccaggagtggaggatccagagggagggcttgtgccagctctccctcacctccaccctcactccagggagagaagccttagaggcctggacctcctgagtcagcgtgtctgaatgggggctggggacaggagcccaggagtgcagc

SEQ ID NO: 74744 - DNA, 1091 bp, Homo sapiens
gcccccgcctggatttggcagtgtggcaggcaggtagtgggccatcctcctgcctcgccagatcagcctgcgctccttccatgcccgcttcttccctctggttccttcctttcctgccccaccccttccctacgtgtcacctctgtccctcaagtgcactgagagcacctcctcggtgtgtgtcccccatgagacttccctggccagggccccagcatcagcagtcccacttttccatctggggagcaactcaaggcgctgtatttctgtggcctctgcaacacacctctttgttctccaccaagactgaaaggcccaggtccttctgtctccttttaagtctccttaaatcctgggctgccccttggagcctctgagtactaggactggaggggcctttagagatgcttctagagtgatactggcattttacagatgaggtactggtggccagagagggtaaggggcctggctgagtgctcagagtcaggtaggtgaggtggtgggggttggaccagaacccagggctctgggctccctgccccacactcttgatgccactcagcttcttgcaggggttcagagtggggtgcagccctcttcccagattcccagcccttggagatgggtgggagtctgggaggagggctatgggttttcagatgaaagggcttgctatgtggggctggaccttggacaggccagatcacagtgcgcctctcttgcaatctccctggcttctctcacaagcttttcctccccttgggcctgtcagattccactgtcccccaaggtttacctcttcccttagattcctttatcttacttcttctttgtaggaatgccacagcctccctctgccccagaccaccttccccttcaccacgcacacctactgcagatgggtttatacctatatcttaattggtcaaggccatgggtggggaggcccagaactcggccagccagcctggtaggcaggcaggctgggaagttcctccctcaacccctctgtggagctgctaggtcagcagtttttccaattttgacagaggtgctaggagggggaaggggtgtcttcccaaagaaca

SEQ ID NO: 74745 - DNA, 1011 bp, Homo sapiens
gagtgacagcaccctggccgacatcattgccaggctgcaggctgggcagaaactgtctggctcctcaccgtttagttctgcctttaactcactcagcctcgacaaggagagtggcctgcttatgttcaagggagataagaagcccagggtctgggtagtcccgacgcaactccggagggatctgattttctctgtgcatgacattcccttgggggcccaccagaggcccgaagagacctacaagaagttgcgtttgctggggtggtggcctgggatgcaggagcatgtgaaagattactgcaggagctgcttgttctgcatcccccgaaatctcataggcagcgagttgaaggttattgagtccccatggcccctcaggtcgaccgccccctggtcgaacctgcagatcgaggtggtgggcccggtcaccataagtgaggagggccataagcatgtacttattgtggctgacccaaacaccaggtgggtggaggcattccccctgaagccctacacacacacggctgtggcccaggtgctgcttcagcatgtgtttgcaaggtggggtgttcctgtgaggctggaggcagcccaggggccccagtttgcccggcacgtccttgtgagctgtgggctggccctgggagcccaggtggcctccctgagtcgggacctccagttcccctgcctgacgagctcaggggcctactgggaattcaagagggccctcaaggagttcatcttcctgcatgggaagaagtgggcggcctccctgcctttgctgcacctggccttcagggcctcctccactgatgccacaccgttcaaggtcctgaccgggggtgagtcaaggctcacggagcccctgtggtgggagatgagcagcgcaaacattgaagggctcaagatggacgtcttcctgctacagctggtgggggagctgctggagctccactggagggtggctgacaaggcgagtgaaaaggccgagaacaggcgtttcaagcggga

SEQ ID NO: 74746 - DNA, 1819 bp, Homo sapiens
acacacactcacgaaagaatctatcttggccatgaaactgtggctgttgaccttggaattggaaccacagtcctttcccatacagaaaccccaaatgtgggctcctccctccaacctgttcttttggggaccctttgcccttagagctgtcacagatgacataagcctgggcaggctgtggggaggccgctgcctcctagcctcacggtcagctttctcaagccaggtgtggcctgcacagctctcagggcagggctggccatcctcccaggcctcaagggcagtgtcttggagtgggaggatggccagccacaagccaccagcttgtcagcatgggaagggcaagggggaaatgggttggcctacctcatttgactccagccaatggagacaattcctgacccctgctttgatggtgttgaccccacaggaatcaaggatcttgatgccaagtgtggcatctctatctgaagagctgcttctgttagacccaggggccccggcctctgttttaagggggcagggcgtctgcaacaggagtggcacacggtgaagtgctggcatggctctacctcccaacccctcccaaccccatcccaaagcctacagtcctctgctccttctacctccactgtatcctgcatcccagaccctacagattgtgtgattgcttcatctgtatcaccccccgagtcctgtggacctgccttctgtgtagagcaaaacccaggctccctcacagccattctttgcagagatcacccttgcagtgagtgtgagttccttccaggtgtgtgcgcgtacactcaccctctgaattgctgccgctgccaaggaagtgggctccaggtgaaggccagtgccacgtcactctggctggccttcttagtagtttcatttctccggaagctgagccagtctcctggtctagcccaggttgccagaacgcttggcattgcagagtgctagagccagtggagaacttgccaacttgattgttttacagcagaggaaagaggatcacagagggaaaatgattcacccaaagtcacacagcaagttcatggctgagctgagaccaggattaagcttcctgactcccagttcaccatgaaaagggttctggcaacaggttcaagctggagaatccttcaaaatgctacacccacattctctccaactcttcatctccctgatcttccagacaaactacctggatgttgcccttaaaccatttctagctgttaaccctgtccagaaaaatgattgagtgatagctgagaagtggaaagtgtgggatttttggcaggtgctctctttcctccgccccccgcgccattctttctcttcctcctctctgtaatggtatgtccagcctcactctccctccctggtgctgtatgcgttccccctgttagctacatttgtgatcacatacccttcttttaagtgaatttttttcatttgatttgtcaataaacgaatcaaactggagctgatgtccagttctttgtttagcttcagtctcaattgtgggaatgaggagtgtggggcagtcatggggtatggctgctatatgtttcccagataaacttgcagatttgaagaaaagtaccttttccagaccatctgccccaagctcttactgtacagatgaagagaccagggcccagagggtgatatgcttaaggctccatagctgcttcatggcagggctggaaggagagtcccacctctgggcttccaagctggtacccttggcagttaatgtcttggaagtgggcagggttggaatgaaaacgagtgatgaggcagggca

SEQ ID NO: 74747 - DNA, 2065 bp, Homo sapiens
tgggttggatctctgtttctaaatctgttaaaaagaccaccacccatcacttcatgagtcctaccctgtcttgtggaatcagaattactgaatggagcccaggcattttttaaaaaagttcccttggtaattctgttccttagcaagtcttgggaagtgccttccagatagaggaaatagttggagaaatatggaagtcagcataagacatatgtggagagcagagtgtaatctgattattgattttagctggagttgagagtgggttagggaatattgggagagataaggctgtaagggtgatttgagctggcctgtagaaggccttagctgccaggcctgggtgtgtggactttatttggtaaataaagggcaagtgtggaagagttttgtgtaggtgataagcatgctttcttggggcagggcaggggagactggagggtgggtgagtggtcagaggcggggacccccttgttaggaggttatgcataatctcagttgcaatatctgaattactggggtggtaatggtgggcctgggaaggaagggagcagagcacaaggcttttcaaaggaaaggcatgttggatttgcaagggattggttgggcagggtggaagacagagctagatcttactgtttactaacgaggcacaaagtgttgggtgaaggactatggttggcagataggatgctactgggagaccaccttggattcatctttgtttcctctctaggccatggcacttgcatctagtcagttgcctgtagctgggtcaaggtgaggtagggggccagatctccatcaccagaagtggcctatgggagacagtaaaacttctggggttggggccttggagagtcccaaatggttgctgtggtttttacttttatttttgtagatttgggggataccaatacagttttgctacatagatatattgcatagtggtgaagtctaggcttttaatgtaaccatgatccaaacagtgaacattgtacccagtaggtaatttttcaaccctctctcggttgctgtggttttggagacaggttcatggtgaagctggctgaagagacagatgggataattgtctccaatgaccagttccgggacctggcggaggagtctgagaagtggatggcaatcatcagagaacggtgagggagccctcccgctgagaactgggcacagatgcagatgtttttctaaagccagctctgctctggccatggggtgaaaactctgggaaggaggtgaagttttcttgaaggatggagccagcagcttctggtgatactggtctcggttgtctgggaggtgggcaagggccccctctgtgaccacacattatctttcgccatccagcctgctgccctttacctttgtgggaaacctcttcatggtacctgatgacccactggggcgaaacggccccaccctggatgaatttctgaagaagccagccaggtaatcaatcccctagactacttacaggcagcccccacccctggccctctctcagcaggcccagagacttgggtggaagtgtgacctcagtttgggccagcttaattttgcagtggtttgagttgcattggccttggcctttataagcttcccaggggatcctgacatagaacctccttgctgggagggaaacacctgcttcctgtttctcttaatcagcatgtttgatggagttatttggaaaatggttgcttatactgacagccagttgtattcagcatgccttctgctgaccattacataagtgattcatttaggactagaactagatcataatagtggcagagttcaccctgtttctaaaagaacggcccatcttcccttcagaagtgggttgatactgccactcagtggtcagcttcaggaacttcaggatttctcccccaaagccaggaataggcaggacaattacgagaggggtgcccactaagatctaatttcccccccaggatgctcatcagctctttttggtctgtttcttcccaggacacaggggtcttctaaggctcagcatccttccaggggctttgcagaa

SEQ ID NO: 74748 - DNA, 3657 bp, Homo sapiens
gagatgtgggtcctttgtctccaggatccacaccctagattttaacactgcattctcactataacgtgccctataatggctgcatcccttttgagcaacctccaaaatctacatttacacagtaggtaaattagggatgactgcattatcaaaatactctcagggttcctataaatggcagctctcctgttgtattcaggtgttgtttacagactaacaaatgtgttggcaaatccctggttagatgcacttcctggtgttgagatgaacacgtcgatttttcaccaatcgatgaagccatgctctgcaatgacaatattaatgtgatccgaccctaacattttctctatggaagacgtatgttgcataaagcaaggcacacttctgctttatgtgtgtgtgtatggggatgggaggacttaacggaagttgaaccagttggttctagatgaaccaattatctggaaaatgaaagaaccagagttggaaggcacttgactggccaccagaccaactctgctgttactgacatgctttcttcaccctgattcctagaggtcattgccctggatctgcttgaagtcctcctgtgccagggaatttactatctccagggtagcacattccctgtgtagacggtattaatcagtactccttactttagtgcagcctaaagtatgcttttctgttacatccacctttgaggctggtcatacctccaggaacaatacagagccagtcaacttcctggaatccaagaccagataaagaagtaggacaggtgcccctgggttctgttctgtgtgggcctgtggggagtctctagacaagatcttttccaggccctgacttctgcctccctctgagtggcacagggagttgaatactgcatggcgagtgtaatgatgatggggagggtccttgtgtcctcaccccttcctttttggtgatttacaccactgtaccatactgacccaggctgggggcaggtgtgttggagacaggctggtcaaagaggtgacaatgattaagagataacccagcggtccctgagaagagattggttagtatggcctgaactggtggctgggggaactgtgtctggtcaagttatggcagatgtcacagctttaggtaggtaaaaagggtcctagatgaaaaccttggagtttttttttttcctgatagggttgtttatacttcttgattggtttcttgccattttcactttcagtgatggtgggtgtgcagtagaccaaaagtgtcttctgcccttttgtgctaagggccctggttgactgagtggccccagtcagatgagaggcaagtcctaagcttcttatagacagggatgttgactttgttctgctgcagcctgataaactgggaccactgtgtggttagtaatgcacttgccatttggtgacacagactgaaggctatcctacacctgggccttacctcttcctctactggcatcctaatggcactctgacagcatccagggtgactacagggcccattggaaatggatcatcattctctcttctagtgtctatctttatcataacctgatgtcccaaacttgtgacaagttcttttggcaactgaaggaccaagaagggaaacggtgatgagagagactgctcattgtaactttcaaaaccccgtctttggggaagaatcatctagggtgacattccttgaagtaaatcccaggagaatctaggccaaagagatgagccaaggttagtgagacaatttatttttattgcctaaactgcagagcattctctacacagcgtaaaggagaagtggggcagctgcaggacatgtagagaaaccaaactgggaaatcttacaaggagttgaaaagattaatgtcccaacctgatgagattacggccttgagacaataaggtggagcaacagaacaatgggaaagaggactgggagaggaatctaagaaccagatggcttcagctctctagaggagctgagcctattcacagtgcctaacctggaagcctgtgaggaacaggcctcaggcccttgccacgacctacttaggctacaatttcctttaaggcagcccctagctctgggaaggaatactggtagccagtggccagtgttcgctgtgggatcaccttctggccctccagcagcatgatggcacgctgtcgcccaaagacagcttgcaccacagcgctggggagagggatgaaggctcggcggcccagggcagcacccaaggtctgggcaaactcagcattagtggcggaggatggagccactccattcaggaccccgtgcacgtggtttgcttcaagggcatgggtcaggattcctgccaggtccccgatgtgtatccaggggaagaattggtggcctgagccgatggggccccccaggcccaggcgaaagggcagcagcatgtggcccatggcaccacccccacggcccagcacaacccctagagcaggaaagagggaaggtacaggggtcctctcagccttgaaggagcccactgctcctcctggtttctgtttccccttcctcactctccccatgctgacttggctctgtaacagaagtgagcagtatggctgtctttaagacctcacaccttctcatctgcaggttggctagaagtggtggcatcctctcactctgtaattgtaatctcagctctcctaatcccatcacttccccagcccagagaagacattccaaccctgtctgatacccaggcccgtttctcacctgagcgcaccaccacctggcgtgtagaatctccaggaagcctggctgcagcttcccatttggttacgaggttggagaaaaagtcaaagtcccctcctgggctgtcttcatcatactccgcagtcagactgggctggtagtaagctgccggtggaacacaatcatttgccctgggtgtccttggtcctgcctggctctctgtagtggaggctccccttggcctcaccttctctggcccttaggatctccccatttggagacagagccatttggatattttccccttgaacttctccatgacctgaagcgttccttccctggaggaactctggttgcagggctaaacttagaggctgctagagtgtagtggttaagaacaggaacttgggtaccaggcgcctgaattttaatcagctccctcatttattaactctctgacttgatgcaagttacttaacctctctgtatagaattttcacatctttaaaatgggaataatagtacctacctcatagggttgttgtaaggaataaatgataataagcataaaacacttcaaatagtggctggtgtgtataattgtttgcaattacttggtcccaaaggtgaccaggaactctgttcctaaagaactatggtgtgagaagtaagggactttgggataggtggacttttccctggcattgagtgatgccactccccactgttttttcagggtctcaatttcttagtgaaagtacacaaaggttaggagaaacatgcatggatcaagggcctaggaagtcattttgcctggaaaagaccagtgctctggtgtgtgcatagctacagaggtctgagttaccccgttcccctggcgaatataaggggctggtgatttggggggcgtac

SEQ ID NO: 74749 - DNA, 1019 bp, Homo sapiens
tcagaaatactatgttgtcagcataccatgttctcccatatttgccatgatgctattaatgaccaacattattattaggtcatttgtaaaggacagtccaagcaagggggatcatgctacttataacagtggagctgccccaaccaaaatctcaaactctactcctctatatattgcactgtgcattacgctcctgcctggcctcaagtgatcctcctgcttcccatcccaaagtgctgggattataggcatgagccattgcagccagtttgcaaatttctttttgtaaaagtaaattagctaggatcctttctagcagagagcctcctggctttgtcactagctttgtgttcttaagcaaatgatacagtttaatctgtatttggatctttgtgttgcacaggaaaatcgtccccaccctgcctgcctcagaggcctggtgagtgaagtgggttgtggaatgtgaaagagctctgggaagtccaaagtgctgaggaggtgtgtattactcactaaaacctgcatctttcactggtcccactcaacatttagaggattcccttatctaccaccaccccttcccctacaagctcatccctgaagtactagatggtatcataacttccttctccccctcaaaggaaaaaacctcatgacacttggactctatttgccagcatgggaagtagaacaaaggcaatagtagaagacagttccaacctgctcggggaaagagacagctggactggagaccaccccggggagggggagattcagagcattccaggggttgagggagagtgtggtgccagactgtcagcctgtacacagtccaccccagggccactgacaactcttcagagtctgacatactgttggagaaactgatctctacccacttgggaacagttatcaaaaacaacaaaattttagaaagcagccagggagagtggacatcctctcccccagcatggggactgaagtgaggcacactcaggtccttacatctggtcacctaa

SEQ ID NO: 74750 - DNA, 1046 bp, Homo sapiens
agaatgacaagtcacacaatatacaagattaccatactttttgggtttttagggacagtcacctcagagatgtgattattcaaacacagaatcaaatttgactaaattttttttcaagacgtagggtataatgtcctgttgctcaattgtatattctaaattttgattaggagactatgggataatgtatctatagatcatgaaccaaattctcttttgcttatggttagtccttttttaaggtaaatgaacagcatgtgttgtatgaattggtgatgtgctggtaccaaccagttgtgataacttactagttacaaccccagagcaaagatccacaaaagagaaaggaattccattcctttctctccgtgtgggaaatgtcagattaggacttgaacagcttgctgctgatctttttgttaagggatgctgtcaacacagatatgtctaaaattagagatcagaacagaaggagggcaggcggggacagacaatgcaactttcactcacaatcacagaactcaactcccgtgtagttgcttggccaggctcccagttgagaagggagattttgtaatgtttccagccttcattttatggcctgttggactttttatgatctgggctctcttttaccttttttaatggtttaggttttttttattattgtttcatattctttagcctggttgactttttaatctcagcctatagaaagcatcacaatttaaatctcttagaaattttcaaatcgataagaagtagcaggaattaaataaggaagggcagttgagttgtctatgaatgtagctgtttatgctcaatcttgctcactctccctcagaacatttctaaaaggaattattagcctctaggtgcttaataagacatgaaagggcccttaagttactggccattttttcttttttctcttttttttttgagacgggatctcgatctgtcacccaggctggagtgcagtggtgcgatctcggctcactgcaacctccatctcccgagttcaagcgatccttctgcctcagcct

SEQ ID NO: 74751 - DNA, 1059 bp, Homo sapiens
ctgtccttccaagggaaacgagctacctccttcattctaaggttagggatagctttgctgactcttcctcttcctcccttaacagactgcactaggcagtccccctgctctgtttcccctaaaggtctcatttcttctctaggaacaggctttttctttccttcattcaattacagttcattatccaatcatacaataaatgagaactaagaacctactacatgctagtcactgtgctacgtattggacatagagaataattctatatttggttccttaatagaccctaattgccactactcaaatcccagactgatagatctctaatttgttcttcctttgccttcctgaatatcctcagaccttcccacacagccccaccacactgcttctgtccatcattgagccagcccttcagctttctttcattgccttgtgaaccccaaattatgcagagttgagatgggaacacatatgtccagtgttaaattgttggtatgtgtatttaggcaagccgaatattggtttcctgtagtaagaaaaaattagaataagttaataaaaccaaatgccagaattgcctttgccctgtgtaactgtaggtgtgtctctcagctgctctagacttcagttttcccaggtgtcacatgtagaggttagactagatgctatataaaatctctttcagttccatcactttgaaagtctgtaattcctaaattatagttttattgtgtaggttaattgcttcttatctaaagaatcaaagatttagcgcaattaaatattgacaagtcctggattactaaggaaggcacaaaaaggtttaaattaagcatgtagtaatttgttggcagcacatataaccttagtgaatgcagcatgtcttaaacagttgcttatgcttaataatagttgtgccaacacaccctgataaattagtatgccgattagtcttcttttctgccagctatcacacttctgagacttcaaaattaggtgcttctggggccactacattctgacctctttaacttttgggtatcttccacatcttta

SEQ ID NO: 74752 - DNA, 1053 bp, Homo sapiens
atattcacatattgtttcataatttccttttctaaatgaacatctttccatgtcactaaatattttatagcattatagttgttgcatatttaattatgtgaaaatacaacagaatgcatgtaactaatcccttttattggaaattgaagtcattatccatatttcattactataaacaatgtcatgacctaactatgtaattaaagctttattcacattcactattattttctcaggagcagttcctagaaatattactgactgaaagaatatacaaagtttcaaaagtgttgccagcttttagatacgtaaatttgaattacatatcaagtggagctgattatgtatgaaggattatatgaacaaataaacttatagtggagaggtggtaggctagagctaggctgatttaagggttctatctatcaatgaatttagtaatttatttatgaatgtattcccttgctgagaatgactaggggtggggtagtgaactagaagagaatgatcaaataaataaagccccagggaggcatgtgaaagagaactgagtgaatacaggtcagttcaggcttggcaagaagcagagtactagaaacacgtaaggcagctctgtgattgggtgtattcatctcctgttgggtccagtgaggagacacacagttctgcttgagcttcaagcatctcaaggttaaggaagttgggaccaagtcccttaggtatgggaaagcccctcttttttttttttttttttttttttttttttttttttgagacggagtctcgctctgtcgcccaggctggagtgcagtggcgggatctcggctcactgcaagctccgcctcccgggttcacgccattctcctgcctcagcctcccaagtagctgggactacaggcgcccgccactacgcccggctaattttttgtatttttagtagagacggggtttcaccgttttagccgggatggtcgcgatctcctgacctcgtgatccgcccgcctcggcctcccaaagtgctgggattacaggcgtgagccaccgcgcccggcc

SEQ ID NO: 74753 - DNA, 1092 bp, Homo sapiens
attagggagttgtggcaaatcagaaatgatttgcctgagttcagtgaaacctttcacatcagcacattctcactgtttttcatccctggtgcctacagcaaagatttaataagccctgtttgcaaaacaaaaagagaaaaagagtaatggctcaatggaagcctccattaatgtttgagaccactgactgttgaatccaaatatagattttaggaagaagggctgaggagagtgaatttcctctaaaagataaaccttttcatctttgctatgagattaaaattgaatcatgaaagtggaaaaattaatagttgggaatgtgttctaagtatgatgcttactttttgttgagaattccttagttgctagtgatgataaattaacaggttcagaattttgctgattttcaggaaaaaaaataaggatgaatacatgatttacctttaccgctttttataaaagtcataatgaaataaagcaccaaagtgtagagaaatgttatatgtattataatagtttaggaagctttttgttaaggccttaactatcaagagcttatacatttctggaagtaaaataatacctttcctgccaaaataccttctcattcatgctttgagtcctgatgtcactttgggtaggacagaagctagatgaaattctgtagttgcatgtttattgtttagaaactcaatgcaagggatttcatgactcttttgggagggttcagaaagtagaaggcatagctcaatacctgtggattggattcaagaaagaaacagcaagatattctacaatgcttgactaggagttgggaaacttggattttaatctggatttatctacttattagttacaagtccttctcaattgctttattggtgttttttaaaattctaaggtagctaaaatgcatgtggcacaagaataatgtgatacagtatgagagtgttactttgaataccaggtttaagttcagactgcacaaagtgttggcaaatgtgtaaatagttaaagttaatgtgaaatgacaagtcataaagggtgaacagaattgttggcaatccacagagtaattaatactaccaaatt

SEQ ID NO: 74754 - DNA, 1092 bp, Homo sapiens
tcatgctctagaacactagcaatatttatattctgagggtgcatggtctcaagtacctttggaatgaataaatcaaaataaacaatgatcagatagaacagctgcaagcctgacttggaggctttgagctggtgattgcatgtttttgctttaatcactaagatactaaatgatttcggctctgtgtttcttgcttctatatttaggtttatcagtatctgaagcagttgctaaagagctggaaagtggtgtcaaaagctgggtaggttatccaattctaatttgttttcacagtatgaggttgttaatagactaataagctagtaggaaaagaaataatggatttatgaactagagacactattaaaattctaaatgagcagcttagcatatggctgtgatcagaataaaaagaaaacttggaggaaaaaaacaaaaaaaaagcaaaacaaaccaaggatgcttggtttgtttagaaacattgacagggggtaaggttaataagaggtgaactggaatctttctatatcccagtatattctctcccacttttcagttttttccatggtagtgctgggggagccaaactcccttcctcagtataagtgtacatagttttcaatttccagttgttaatgatgtgcatttgtatagattaggcctggtttcctaaggaaagtgagaagaggaagttcgtagggtgctgacagatcaatctaacgagggatttattattctaaattccgaaggaccgttttgcagtaggtagggctttcagagcacctctgtgtttcagctttctattttctcctcatcccttcctccactcagttgtctctgtgtgcagaggtataacaacattggatagtaattcaaaggctgtctgtgtggtaaactaagattaatgagaattaaatccctgactgattatatgctctccagaactagaggaaaaaaaaagagtttttattaaagttgcaagtataaaggtttgagaaattttcactttaaaggttaacataacccactgaagggagggggaaaactgtcctaaagaaaaataagccctgaacatctgaacatatatcgttg

SEQ ID NO: 74755 - DNA, 1029 bp, Homo sapiens
gaacctgaaatctggctgagacaattatttgtttcagttctaatattaggcttgatttggactagatgtaaacatctgtgactttgcttttagtacactgttatgaggtcaggcctggtttgtttagttctaaagcttcttggccttttgtactgtttaaaaaagggaaacctacatttcctttctggacctgacatttatggattcatccaagggagtctcattcttggctgatacagcaaagttcttggttctcttatgagcaattccatttgggctagtgccttcacctttttgcacataattattgccctttgtcagttgttatactttatatgtaaggactgtatagatccttgtagcactgctatgccaaccctttttgggaaggaatttttttgaactagaattcaaatactgtgtctccaaaaacatttacatgtgccacatcttacctgaagataaacgttaagtcacaatactccttttccatgaaattgggaactgttaaaaatatcacttttgtttttttaaaataacatagctctgagattggacctgattttctgacaggtttctgaaatggtctgaaggagagattgctctgtgttctccccatcgctgttgctcctcactcaggtgacctgtccaactaccattcgcctcttgtgccctttgcttcccagggcttgtctttgcaaaccaccatgcttggccactgttccttcactctaagatgaccctttctcttcccttaccaagactattaaaaacacagttcctcagagcgactgatctgatatgttagtaaagaaataatacagtttacaaaaacctttgaagactgatatgttgcttaaaccccttcccttgaagagatttgtttttgcagaaagtggcaactctgctagaactagtggtagtggtggtggtaatagtaacactgagaacatttattgatcaacgactatcacccattttacaccttcctggataattataactggggttgatagacgcattatgaca

SEQ ID NO: 74756 - DNA, 1064 bp, Homo sapiens
aacaaaataaaacaaaacgttctctgaggtcagtcaagttcactgttgagcaaacatcagaagtgggagaggctgatacaaatgcctgtggacccagcttctcagcccagatcaggttcttgtttctccagctctttcctgttacccttcctttacatacacacacacacacacacacacacacacacacacagaatgagaactgtactagctctgtcatgtctttgaaactcagttttctcatctataaaatggcaataactcacagggtattttgaggagtaactgaactataggtgcatatgtaatgcctgatacatagaaggtactcagcttccatgaagaagagacagggagggagagagaatacgaatgactgacatttccagctcagttccagtcatgctaaaccatatgcagaattttccagaagaaactattagccacaagcacagtgaggttgccaagctgtccaataccatagagaatagactactaggtagttaccgtgctctgagcatgagcatgtgccccctctggcctcccatgtcatctctgtaatagcacttagcattgctgggctttgtcagttggctttctgtttacttccatagactgtcagcctctagagagtagagactgttgtaggtacctcctttctgttcccagtgctttgatcacagcatccttgtggaacaaatgaagtgtctgggtggggggaattgggcataatcccactcctgctgcgcctctataagagctgagactgcctgaactctgggctcactttctgggtttgagctcacacgttcactctggattatagtggctggtacttgttttggcttttttttttttttttttttttttagaaacttgctgttattcacacacactaagatgctactgggtggtcttttaattcccttggaatccatcaggttacggagcaggagattttattctacctattggaccaattaccaataagaaaatgcacatttctctaatgtattcagacttttagaatctttcaaaatgagcaatttataaatgcttccatt

SEQ ID NO: 74757 - DNA, 1038 bp, Homo sapiens
tgagggatttagtaaaactggaaaatagatccccactacaaaggatttgggtggggaaggccaggaaatactcactctctgaggattgcctaggacctcagtaactgtgattctttctaggttcaaggaattagggctctggtaccatttctgattagcacaaagtaaagaggaagctaactccattttaatttttttttaaagaaaaaattaatttctaccctggggaaaatagagtcaatctttaaaatagataacagtatttactgatgaggctaaacaaatagaagtttgtaaaaatctttttttccttgggtgaaaaagaagaataaaaggggaaagtaggaaaaaagtataataggttataataagaatagtaggtagcatttattgagcgtgcatggtgttaggcactcacctaagcatttttcatttctcatctcaactattacaacagccctctgacacttccactcataactttattttttagttgaggaacccataatgcaagagaagctgcacagtgtctccaaggtcacacagctagtcaatggcagatcagcaattttaaccttggcagttggttcaaagttcacactcttagctacaaggtgacactgccatatgttgagttgtttgacttttttcctcactttgagttcagcctcccagaatatgtgtaaagcacaggagaagtagcagtttgagcttttttttttttttccttgttgttgtttgttaatttaataacagggttacaaaaaaaggcactatgcagtctaaatcaactttaattagacccgtgtggaaaacataacaattatccacaccaaatttctaacatttttcttttttcatgttcaattattaatagtcattggtgcacatattctttcagttattttctaagtgaaataattgaaacttgctccgggattctgactgttgcctagttctttaagaatctttatcaaaaggattttttttttctaaaaaataataaatccatttctttttgtgggatgaactttccct

SEQ ID NO: 74758 - DNA, 1031 bp, Homo sapiens
ttgtagtagaataaagggtgctgggaaggaagtggccaggctctcctggtgagttgatgagcaccttggcttccttttcccattcagtggcccaggccctgccttttcccctcatattgggcatggggtactgtcctggatgctgtgagcagacaggcatggaagaccagactttgggggctaggcctagtcacctttgttactccagcctgttgaattgctctatccaattgctatctaattgcaatcccaatgctatctaattggcaagggatgccattgtagtcatttgattttccttcttgaaagctctgggatctttcctgaaagatccagcttcttatatgtaaaatgggatggtaaccttatgagatatgttctattattaatagggggattaattgagactttcaaagtgttcagctccctgccttgcataccgtgaggactcagtaggataaatggtagctattgctattattattggcctctggtgtgtgatagaatcaagtagtgtctgttataaaggttctgaggcagaattatccagctctttgaaataagaacttttagcttaactaccaaatgagtgtccaggtgttaggattcattgcaaatgggattatacattctttttcctcttcctaattatgtggtaagtcttttcaggagggaaagcacctaccattttctcagggagagctttatactcccgccagcacttggttctaaaagaaatttttcacatgaagcattatataggagtctttgtggttgtttaaaataatacatttatatgcaggcattcctcagagatattgcaggttcagttccagacaacaacaataaaggaaatattgcaataaagtaagtcacacaaattttttgtttcttggtgcttataaaaattatgtttacactatactgaagtctattaagtgtccagtagcattatgtctgaaaaaatacatacctgaattaaaaatactttattgctaaaaaatgccaatgatcatctgaatcttcagcaa

SEQ ID NO: 74759 - DNA, 1149 bp, Homo sapiens
tttatttttatttatttatttatgtatttatttatttgagatggagttttgctcttgttgcccaggctggagtggaatggcacgatcacatgctcactctgcctcctggggtcaagagattctcctgcctcagcctcctgagtagctgggattataggcgcccaccaccactgcccactaattttttgtatttttagtagagactgggtttcaccatgttggccaggctggtctcgaactcctgacctaggtgatccacccacctcggcctcccaaagtgctgggattacaggcgtgagccaccgcgcctggccccgttttttctttttaaactgtctaccttgaatataggaagttggcacttatataaggagcttaaagctaataaagtagacatttctcccaatttcactactgagaaatgagacttcagatccttttttgtcattggcaaccacatacttactggtctatctaatagttgattttaaaagatggaacaggaatcttgaatgaagacatcggctttagggacagcctttgctttcattccccactggattgtgaactccttcaaagacaaggatcttcatttttgtatcccagaggatacaaactatgcgtgtctgtcatacagtagagaatcaataaacatatgttgagctgcttttcttctgtgattccccttcactatctagtctattattttttgtttctttatcagagagaaaccaactccatgacataaaaataataaatttttatttaatactacctatacattatcatatgctaacataatacatggttctaagcactttacaaatgtcgcttcctttaatcctacaacacactctcagaggtaggtactgttacttatctctattttacacttgaaaagactgagatagagaaaggtgaagtgacttctgtctaaggtcctgcagtactatgtagcagcctcagtagacttttagctctcaaatattaccctcttttcctgagttgcagagaaatgagagcagacatgcctttctaccttcaattctaaccacctcccttgtcctctgcctcctttctgaccacccccaagttccagaataatgtgacttgagtttggaaaataaagttacaggtgtaaaacatggc

SEQ ID NO: 74760 - DNA, 1147 bp, Homo sapiens
ctactaaaaatacaaaaacaaattagctggatgtggtggtgggcacctgtaataccagctactcgggaggctgaggcaagagaattgcttgaatctgggagacgaaggttgcagtgagccgagatcgtgccattgcactccagcctgggcaacaagagtgaatctccatctcaaaaaaaaaaaaaaagaaaagaaaaaaaaagtatgaacgcatttaatgtgcagtttttttttcttctgtaacctagtatgttagtgtagtgactatcaattgatgacatcctcaaacaaagcaaggttagttccttattctggtagaaaatatggtttctactcaatgctgtccagctgattgaattgctgagcagttagctcagcagttccgagaatatgttgggtaaagtgctgttggggtgggtattaatcagtttgctcttataaagggcaaatccatttgggaagcactgcctattatttttttttcctcttgtagagattctcaacatgggcatcattatatcaaagactatgagaagtactatagttaactatatcaacgacaaaaacttggttacatttattcaagtcagcgtttcccagaatacagaattttctgaggttatatatgtatcttttaggactccattactgagttagcacaaaccacaattttaatatgtgatttaatattgtgggtgggatggtttcacctagtatatcccgaaaatatagggacattcattaagtatggctattaattaattaactctataagtggttacttattttttatttcagagtagagaagaacattttaagctgtagtggctaagaaagtctccacgaaggagctggactgtgataatataaatggtgggtagcactctttgatagataagggacattttaggttggagggataatgaagcaggagtaaagacttgcatttgtgcctgcatataaataattttcagagcatacaacaaaatggattgtgcccagcacagtgcgagatttactgaatctgtggtggtggtcaaagaacctattaagcccaggcttggttgctcatgcctgtaatgccagcaggtcaaggctgcagtgagccctgatcgtgccactgcactccagcctgggcaacagagta

SEQ ID NO: 74761 - DNA, 1034 bp, Homo sapiens
ccagaggtaggaggatggactctatgacctttgaaagtcaattttcatcccaagatttcatgttccaattatggctgatagactatttaaataaatgatggtttttctattaggaaagaaaattgactggaattcattctatttgagccacaaaaatttgaaaataggtcaactcttaattacccagggtgatataatagggaacatcttggatggattatcccaaaccacaggtaattaacaaaatgtgcaaattaggcactgattcatagcattcattaaaatttacatttaaactactacttaagcagcatagatttatagatgagcaactcaacatggtaaaaataattttaagatgaatatacgcattttaaataaaatgtagagttgaagatattgccaaaagactggacaatctgaaatattttcatactctaaaattcagaacatttacctagtgctgcataagacatttggcagatttaaaaaaatctcatttttataaaaggcaagggagagatcaacagaggtttttcaccccctggaaactcctgtgcccgcccaatgctggacccttccctttgtgctggtgttcaggcccacaaagccacctctttctctccccgacacacttctgtgaaaaatgttgacagaagaacaaagactagggtgagtcaggaagtgagaaaaagaaactagagacaggaataattatagcacaatccttaaccgattatggaaaccaaaattttagtgccatttctatcttacccaaggaaaacaatgaaatgaactttactaaaatttaatatgggttagcacataacacatacatttatatataaatttacatacattggctgcggatattaaaccctggctcacataatcttggtcttcctttgtactctattgtatggcatccagtcgtgcacaggtgtgatctgtcagcctcaagcttcagctcctccatatctctatcatctattattctttctctacctctgtccagccatgctcaagcatgcaca

SEQ ID NO: 74762 - DNA, 1043 bp, Homo sapiens
aaggcagaaatttatctaaaatgcaatgaatggaaaaactaaagaggttaactcaccactcttgttttttttttaatatttccaaattgcttaaaactatttaaaaggctttaaaactttgaatttataaaatgcttaaaaaccttctaattgtgtataatccagctaccatttagtaataatcacattttctataaaacctattttagacctgggaagtcagcaagtacattatttaaaccatctaatggtatactgtttgtgaagggtcaatgtctattaaaccattatttttcattcaccacaaagtttgaaagctgtgaatttgaaataatcttctcagcaaagaagaatgaaaaaaatgcctgtgtttaaaaaagagctttgctgttgggtagaatttaaaacatgttttgaatttgattggtgacctcaagaaatagagaaaaatctagtgttggcttctaatcagtaagtaattcacacttcagacaccttcctagctgatccctggtggactggacatctttgaacaaagattcctaaggtctcattagagctttatctttctgaaagtgaaatcatttcccagatatgagagaaggcacagaagagcactgggggaatatgtggttggtaagtgagttgcccagttaaagactttaaatggagttgatgagtatatggaaaaatgcattgcacacatagattaattttaaaaagtagattaaatggaggacaacatacgtgacatcgagtgtgctagcataatacaggtttttttttcctatatatactcaggtgacaatatcagagaatcttatatgaaaaatagatttctgattgtcattgaatatataccaacacatagactaggtagcaaagttaacttgaaattttgaacaagaaagtaaattttatatcctctgggacttgatgacatgagattaatgttcataatgagataatggaaatgtatcacttcttctaaagatatagttttggtagaagaagttcattaagagtagcagaatctgaagcat

SEQ ID NO: 74763 - DNA, 1305 bp, Homo sapiens
atcttgagaggtagtgttatctacctttgtcaggctttttgacaggtcatttcagagtaagcctttgttcccaagacccaacaactgtcaccctcttctgtacctctcctgagtgccaactgtccaggccatttgacacaccatctgttaacctctgagtttgcccactcaaggccactcataggggcatccatccccaagcacctcctcatgctgtgcatgcagtcttaaattcaatggacaaaaataaaatgctggctacctctggatcatctggctgagcaactgaattacaaaagagaattacttccatctcaacttcaacccattgattacgtccatcctagcaagctaaatggcatcccagctgctcctttctgtgcaaccaattaaagaacaatgagtgtgatgctccatgtctgaatttcgtccagcctctctctgaactgtgatctttgtcctcatgaactttcccttttgttcattgaactatatggactcttcatttcatattgatttactgtgcaatttacttttggacattgagaacttgaaattatttcctgatcccttccccttccactattaataattcatttctgtcaaactgtaagagtagactcatttttttttttttagtttttaacattggactgttatttcatttagagttctctatctctaaatatttatttagagaatgattttaaaagggaatgatatgcttgtttaaatgaaagagaaaagctgtagtaaactgtgttaattggtaatgactatttatcgtcgatactctgtagctgtgtaagttttgacaaatagtgtatctcgtggaatcagtggttagcattgccgctattatatttactcattttatcattataaatgtgcttagttcatcatgtagcatcacttgtctcccgtctcattttttccttgcatgtcacaagtctcagatcatttataatacattaacagtaaataatatctatgtaaatttctttcaccatgctgtctcagagtcagcagtgaacaaaggcaaagattggggccccacttagtttgaaaaagggaaaggaagtgatctaggatgtgtactagaagcatttcaaatgttgggtctttaaaatgttttgttcagtcttagcaaatcttcgatcttttatttcaaaattccagtagtccactgtggagcccatgcatttcatctggaatttaatgttactttgaagccaaaccatttaaacaattatgtgtgttttattagctagtgttgctgaaaatgcacttagttcaattttaatt

SEQ ID NO: 74764 - DNA, 1044 bp, Homo sapiens
tttaccccattttcaagaaggatgtactgtactttgcagaagtgaagtttttctgttattaatatataattatgcaaatgaatgcgactatgttgacaatgtgtatatgtaaataatatgtgttttaccagatgtttcatagaaagaattttttcttgatctgttttgttctctatactttgcttgtgtatatttgtcagaggtgtttctagtgtaagatttaagcctgccattttaccagcattattgtagtttaatgattgaatgtagacagggatatgcgtatagttttcagtattagttctagataacactaaattaactactgttaggttgagtatggtggggtcagtgacctaaaatggagtgaggccaaagcactgtcctgtaagtcttacttcctgcttagggcacagtgaagtaggaaacaatattttgaaaataagttttaaatttaaaatgatcaaaaagcaatatagttgcataaaagcactgtaaaatatttaaaaggttaaaactgtggaaaattatattggtaagtttacagatcaataaaagcacctgttctccatctgaactagacaatggaaataatgctgcatgctggccatggcccattcttcatcatttgtaagttcaacaaaagttctcacatggagtcccacctcttcagaggtttgtacatttgtttttaagcactgaattcactactgatcccatcgcctggccagtagaacagtcattactccattaacatcctcactgtttagacacataactgtggtacagtgtattggaaattttataaacaaaagtgaaagtgccaacaaattattgatagctgataatgtttcattatctgcaactgcttgataagtatgttgcattttaagagcttataattgtgtataatttgttaacactagaaacctattagtattgtgaatgtagattttactgtgaagctatctgtgatttagctgtttgctcccatgatggagtctttgcagcatggcgctagcagccaatgcagtttctaatact

SEQ ID NO: 74765 - DNA, 1035 bp, Homo sapiens
ataattttgacctgaaaattgagtttttcctttgaaaattctaattttacaagatagttatattaaagtgtgataaaagtcactttaaagttgtgatatttctgtttcataaattatgtttaattttcagtttattattttacttttctaggatagcaaagtaatataatgtatatgcacaaaacagaagtattatttatacgtattttttttaattacaggtaaagattatagttcccaacagcacagcaggtctgataatagggaagggaggtgctactgtgaaggctgtaatggagcagtcaggggcttgggtgcagctttcccagaaacctgatgggatcaacttgcaagagagggttgtcactgtgagtggagaacctgaacaaaaccgaaaagctgttgaacttatcatccagaagatacaagaggatccacaaagtggcagctgtctcaatatcagttatgccaatgtgacaggtccagtggcaaattccaatccaaccggatctccttatgcaaacactgctgaagtgttaccaactgctgcagcagctgcagggctattaggacatgctaaccttgctggcgttgcagcctttccagcagttttatctggcttcacaggcaatgacctggtggccatcacctctgcacttaatacattagccagctatggatataatctcaacactttaggtttaggtctcagtcaagcagcagcaacaggggctttggctgcagcagctgccagtgccaacccagcagcagcagcagccaatttattggccacctatgccagtgaagcctcagccagtggcagcacagctggtggtacggcggggacatttgcattaggtagcctggctgctgctactgctgcaaccaatggatattttggagctgcttctcccctagctgccagtgccattctaggaacagaaaagtccacagatggatccaaggatgtagttgaaatagcagtgccagaaaacttagttggtgcaatacttggcaaaggagggaaaacattag

SEQ ID NO: 74766 - DNA, 1043 bp, Homo sapiens
gcagtgttgtaaaacccaacacttctctttgaaggaaatggtactacataaagtgacaaccaagcttgtattacaaatgcatgaagtttaaaagtatacttacatttttactctacataccttgtcttttactgagttttaattatatggtataaaaaccttttaggaaaacaactgattttgtgtttttaatatttcttttgtactttattgttcagtcttttccaaatgtaaacgtgacaaacacaaccacaatacaaataaaacgaatgatttttctcaaggtaaaaaaccttggatctagaaaagaaaacctccttaataattttgcctttgaagctaaatttgtattttctttcatttattcttatatgaacttgtgaatctttataaaatggtttctttaaaaggcaaattatatattttagtttactaatgttgtattttcaccctctagataaagtgctacatttacccttgccaaatctaaattttgctattttgaaataataagtcatttgtaattttatattctgtccactatactctgttatattgttacttatactctgttttcttctgttcttgtacaaagaagcataatatctcctggatatcatgaagcaagatataagagaagaacaaaacaaaatccgtaattcattgaaagaattgtaatcatcaatctttcatattattaatactttgtaattattttctccccaacagtattttccagtagattctaatcatgtggtagggcagaaggaaatgtgttttttgttgttcatttgtttcttgtcaatagtcctgattaatttagctttgctatactgacttatatctggaagtatataaccaagataagaaaataggttttaatatgatcatcttaagctaattgtaatgaaaagaactaatggactgtcaatattcagaaaaccaaaaataaaaaatacagaaaactattcaaagagtaagtttgatctgcatttccaatatttaaaaatactttttattattttaaaaatgatgacatgttt

SEQ ID NO: 74767 - DNA, 1084 bp, Homo sapiens
ctgtagtaacagttgtaaccaatggtagaaaaataaaacctttactgttcaattcatagaacaatcatagcatggagtcattagcatatgtctcagcaaagtattgcatggaaaataaaatattagggaaatttttaatgattggaaatgaagtctctcttgagaaatagcaagaattaattataaaaaacaaaaatagaaaacaaaagatttaaaacttttttagaattttgaggatttactgattactatagctgtcctaccccttttttgtatgatttggtaaaaatcttggtttgactcactattgtaggtttcctagaagtacttaggttttaactttagaagaatcaggaattatttgaggagtggactatgtaaaacatggtatgatgttagaaacagtagtattttgttactggagggcagtgaattaaccagaagcctggaaatttcttattctttttttttatttttaactcttaatggctttattgtacgcaaattacaacttttgaaatgtcaaatgcaaaaatatgacttcaagtaatttcatctgcttttcctgacactgctgaacctttaaagttatgcttttgctcatatctgagtaattttgacaaatagatattaatataatataaaacataatgtccatatacaagtgtatcttcaatataaaaacctatcccatttcacctgtttagaaatattatctattgaggacgtaacataagcaatgctattttgcttagtgagcatatgacacttaaaaaaattctaaacatcttacacttttaaggtatttctgttagacataagaacttttttaaaaatcttaatgaattgttcaacatgtgtagatggccttatacaacatattatatatatatagtaagtgtatatgtttagaagtgaacaataaatatgattcctaatatttttgtgtttatttttaacacagctgatgatgctatattatactcttcatctatattaaatttactctttaagataaataataaaaatattatgatgatttgttagaatgctattagttacctgtttattaatatgaggttaa

SEQ ID NO: 74768 - DNA, 1085 bp, Homo sapiens
ccttttgttccaccagagagaggcaaacaatgaagtaagcaaattacaacaaacaagaatttcagaaaattgtaagggtcataaagaagcataaagtgatagtgatttgaaagaggctgtttatggctgttaagaaagtcttctctgataaggtattattgagctaagtcttttatgatgagaaaggggctgctatgggaaaagccagtggaacagtgttcccaggatggagatcagtgggaaaaaaaaggcctaagagagaataagtgtggcatgtcccaggaactaaaaaagacctaactccctggagtgaagaaaaagagagaaagagtaatatgagatggggactgacgagagctcagcagaggtcagatcttgatgggttttgaaagccatagtaaagggtttagacttaactcttaatatgagatgagaagccgttaagtttttaaacaggtaaattacataatatttacaggttcaaactattattctgagagaggagtggattgtagtggagcaaatagtgaaccaagatggacagtaattagcagaccattgtaatgaacatgtttagagcaaatagtgtctccgactagggaggtgttggtagagagagaaagagagagagagaatgaagtcagattatattttatggtatttacaaccatggggactaaatgaacatcatcctgggaagagagtagcaacacagaagccagaagaggaaactatttccataaggaggaagtggttaatggaagtcactacatgaaaaggaaaggtaaaatgccataatactatagcacttgatatttttcctcatggctacagtttaccagtatctctgtcattttgccttattgactgaaaactgatttaatgtctgcctctacacctatacatctgttcagcctttgcttccaaacactttgaagaaaagaggaaaggctatgacaactttaacaaagaagtggcaaagtggaccaaggaaaatagccaaaatttcatgcccctcccccaaaacctgggatttgagagagaagagaaagacaacagcttccctacctgctccataggacata

SEQ ID NO: 74769 - DNA, 1023 bp, Homo sapiens
atcctcacttcaacattccttccttaaccccctcctgccataggcaatcagtgatctgttttctgtcactatagatttgacttttccagagtttcatttatatagaagcatacattatgtagccttgtgtctagtttcttttgctctgaatcatgtttctgagattcatccctgattttgcatgtgtaatttattcctttttattgttgaggagtagtcattgtctaggtgtgtgtatacacagtttatttatctattaatggaccttaagtcgtttctagttcttgactattaggaataaaattgctatgaatatttgagtacaagtctttgtgcagagttatgctttcgtttatcttgggtaaatacttaggaatggtatatctgagtcatatggaatattcaactctgtgaaaaaccaccaggaggggttgtgtcattttacattcctgccactatttcatgagctctccaattagtccagatccttaccatgactgtactttgtggtgtcagtctttttaaaattttagccattgtaatttgcgtaattgtatctcattgtgattttaatttttgttttcttagtgggttttcatgtgctttgtgaccattgctttattttcttttgtcaactcttcaaacctttggttgtctctattggattgtttttctactaatcagttagaagagttctttaaatattcaggatacaagtcctttgtcagatatatgtgttgtgaatattttctcctgtgttgttctgtgtcgtggtttaccttttcatttatttgtttgtgtccttccaggagcagaaatttttaattttcatgaagtccagtttgtaaacgctttttaaaaacctgtcttactttttgcatattaagaaatgcttgcaaatgtcagattttctcctacaagttttgttttgttttgttttgttttgagacggagtttcgctgttgttgcttaggctggagtgcaatggcgcgatctcggctcacggcaacctccaccacctgg

SEQ ID NO: 74770 - DNA, 1078 bp, Homo sapiens
ttgcttatatttagttatgatttttaacgtcttcattcatacatttgtgtatggctgagtttgtgtgtgactttcttttccattttgattatcagagttatgctagttattagtaaagtgaatttaaagacattctatttttcctctatagactagtttatattcagtattgaatactttttgtagcatgaaaattctctttgcatttatagtttgaaatatcacatacagcagtctgagcacagagcttatttgaatatatttatttgataggcctttttcatttcttggctatttttgagtgaattttgataatttaccttgttctcagagagttgtccactctatcaagattttacaggactatttgttgcatacctgctatgtattaagcattgtgctaggtgctgtgcatgcaaagataagaatttcctaggattcttaatctcaggaagcatgtagtgagagaagttaattttcttagggtagagacataagaaatagaaaagaagaaattaacatctaaacagaacttctgataacgatttcctcatgaatacaggcagcatgtacaaagtcataaaaatggttgaatacatgaacaattgagacatttacaagtagatcattacagcttgagtttaggtattggtcaggaaagagtaatgtatacaaattagaagctgtattatggattattcctgaatttgtaccttttcctataaacattgatagactgttaataatgttcattctgggtttatcatcagtatattcacattttaaaagattattctgatggcaatagggagggctttactgaaggaagtgggagtggttaatgctggaaccacttacccattgcattaccgcaaaatgcataagtggctcctaagcgagggctacaaatagagatagaaatgaaggaaagactatatataaacaaatgctaaagaaatagaccaaagattagtttactgattggatacggtagatgagggagaagtcaagacgacttctaacttcctgtcagttgtattagaacaaaatgttttccttgtctttatttcagacgtga

SEQ ID NO: 74771 - DNA, 1079 bp, Homo sapiens
aaaagcattttaagtagagaaaattgaaaaattacctctatttaaaaattctttttcctggaaagttccagatgagtacagatggtatactaagaaaagagaaagcatattttcccttcaaatcacattgttaaaggctgaaagatgataaatcaacttgccatataatagcccagtgatcttttttcttccttattttcatgttgttggaaatatgaagtttttaatagatatgtttaccttacctaatgacttgcaccaatatgactggtgacattttaatatttaattttgataattttatctgttagcacttattggcttaggaatcttagtgaatggatattctgacctttacattaggttaaatgatatagatggcagatctcagaatcagctcaataaggtgccagatattataatatataatatatatgattacttgtgtgcagtcatacttcttatagcaataacattttgtgtattttcataagaagaaacaaactacaaaatatggccaagtgagtctcagttttaggtatcaagaaacactgtttatccctgtgattttccctgctcctcaacccttgcaataattcaaacattctatttacaacatcagtaaaatacatttttcttgtattttccactgagtttaaggtgaacatcgacttaggatggaactttgagattaggaagaacaaaattctgtttttctgtttttgaaagcatactcggggaaactaaaatgcaatagactttttggcatgcatctagtatgtatcaattataaaataggaaaagtgatgcctaaaaatataatttcctaaaatatgccacctgaagtatatttcttttaaatacttgtttttccctttgtttccttataaatggctcattctgtttttgaattgtaagattgtataggactttagaaaccctcttttagtgggtccagttaaaaagtaagtgattaactgtaaattttttcatataccttgttctttatttcataactaatcctggattgtgttcctatacaaaataccttactcatgttacagggaaagtgcaaataa

SEQ ID NO: 74772 - DNA, 1019 bp, Homo sapiens
agaaatatcattagaaacagctgtgtctgttgttacacaacatgataaggaatgttatattttgttattttagggtttttttttagtcaatagtatgacattttatctcttttctgctacatttatagactgttctatgtgaagaaattagaatctcaaacttcacagagtcttaatcatattaaatatggtgtcatttggtttaggtaactttaaattatgtgtcataagttaaattataatgtgcacatatctatgtttatatattcttagtcaaagcagataaaaaataacttcattctacagtttgtttacttgtaaaatgaggtaggtagaagaaatgattttctagggacattttaagtgttttccttttaattcagggttagtagtgtatgtatttagaattgtaccttaccaagatatttgggcttaagtgactttattctaattagaatattatttgtgttaattaaatgctgagtgataatgttttagaatcaatagagggggtcggatttcctacaaagatttttaattatctatctaattttgtagtgtagataactccattgttatgaaatataatctttggacaatacagcacagttcttagtatcttattcatcatggaagcataaagtgagtaagaataaaaggctttacttacactgagtggaaatttacttaaaggttaccaaaaactcatattgtaatgaggcttaccctctttacttgcatagatttagtatttcatttaatagtcaaagcactaaagaagtaaatgtcaatacttaaaaatttacagtttacacgtaatatacctatgtatctctagccaagagagtatttttatcaatatatgaaatattcgaattgctataattgattctttggcactttctacagtgtaattgtaagtattacttaatcccattcattttatttactgaagtcatcagtatttgacagaatagattatatgttttatatactaaattttggttgaaaaggcacaa

SEQ ID NO: 74773 - DNA, 1038 bp, Homo sapiens
ttaattgcttaatattactgtttacaaatagacaaatatttctgtagcttttatacgcaaggaaaacgctaagaaatctccacaaaatagccatagttaggtaattgctggttgttcctaagaataataaataagaatgtggtaatttaggtattcagcctagtattcatagaatgttttagagaaatgaatagtcaaaatcactacctcattggtactaaccattttataatacagtatgaattgggatggtgaattaagtgggaatgggaacatggagtggttttatttttctccagtgtgaccttttttgtttatgattagtcaaatcactcttttttgtttcttttactcatctcaagatgatgtcatagatttctgagcacttcaatttaatctgactttaatgtagtaaagtcagtttaacttgaatttaacctcatagccaacctataactcaatttctcttctttcagtcaatatgacttggacttttctaggagattatagagtgttggaagaggttgaagtctagtcattctctttgctcaatccagtgagtggagaatgatctgttttgttttgtttttttttctcatatacctatttctcctcctgtgtgctgatgaagtaaggggaaaggtggaaagggaaaaggctttcttatgtaagtagtaccttttgttccctttttttctgtttgtgctccactgcctcacactgactagtcctccctccctccctccctcccttccttccttctttctttttcttccttttctttctttttcttccttttctttctttttttttttttcacccgtgctggaatgcagtggtgcagtcttggctcagtgcagcctctgcctcccaggttgaagtaattcacctgcctcagcctcctgagcagctgggattacaggtgcatgccaccatgcccagccagttttttttgtatttgtagtagaaacggggtttcaccatgtaggccaggctgatattgaaccggggcctcaagtgatccgcccacctcagccc

SEQ ID NO: 74774 - DNA, 1016 bp, Homo sapiens
tttttaaatctagaagtgctgtttgaccctttctcggattttttttactgtaaatgttcaaacctcttatgaaatgtgttaagaatacttattttaaaatactctatctgacagttctgctctgtgttgtttctgctggttctcactcttgccaccatgcttccttgtgtgtttggtgaatgtttgttaagttttcttagcaatttacctgagggaattttttgaatcctaggataaaggtggtttccttcagagtggcttggctttgcgtttagttgtcatttatagttgggaacaacttgaatctaaattcttggcttgagattattttaaccaccaggtatgaattcatgctgaaaatctgcttgaaggcaaacttggggttatgaattcccagataattttttcctgccttctaagtgcatgttaggaattgtcagaggatcagggcgtattttactcttacaatgacagcatagctggttaaagttagtatttactggggattctcatcaggctgcccacctggaacaggaagttcaatagacaaaagatcatattaccttggtttatcaaaagacttcaaggtaaatgtccccttacatgctctagttgctcttccaggttcctgcatttatttaggttttattagtttctggtcagctaacagatgccattgaagaatgtgtttttaatatttttctgtgacatagttgtttcaggcaggagaattggctgggtttccttgcttatactgtcagacataaaaaagcatgttaggttttttgtttgtttacaaaattttcttattttccccagctaccctggaaatatatacgtctattataaccatttcagaaataaggtaagctgaccaaaatcatgcagttggtgaaaaggttgatgtgtactcaagtctgtctgactccagagtccatgctgtacattgtatagcactgcctctatggggtttaaattcttctctcataaatacttgagttcccgggtagtgttca

SEQ ID NO: 74775 - DNA, 1033 bp, Homo sapiens
aaatgcactctgctatgtgtaggcaggtaaagaattaacataaagatatggttggctgtgaattcagtattaaaactctggtgaatgacaaaaaaaagtagcctgtcttagttacttggttgaccagactaagctcacaaactatttacaatttcaaagataattcactgggaaatctagattcatgtttaattttgtgttatagggaaccctgtaggaaatttatatttaagaaatatcagtatcgatatatccattatagtagcataattatttttatacctaggggaattgagttttaaagaataagcatgaatatgtatcatggaatgttatttaaccttaaaaaaggagatacagtgctgacgtttgcaatagtatgaatgcatctggagtatattatgccaaatgaaataagccagacacagatagataggtactgtgtgaccttatttgtatgtggaatctagaaaaatgtagaatacctagaaatggagaatagaatagtggttaccagggtggggaggggaaatgggaagagtaggtcaaaaggtacaaacatgcagctatgtagtatgaataagtctagagatctaatgtacaatatgaggatatagttaatattgtgttgtatactaaaatgtactaagagagtagattttacatgctcttatcacaccaaaaaagtagctgtggaaagtgatagataatttatctgactgtagtaatcatttcactatgtatatgcgtatcaaaacatcatgttttacaccttaagtatatacaataataaaaaaaggaggcaagaggagtaagaaagttctgaataatacctgttcattagattatataaaaataaaatctatcattgttagaagacacagttagcttaaaatgtataccttatcaggtggtatgtgtatatatatatacacacacacagacacacacattgtgaatgataaatatatattgaaccatttagaatattgtgctaaatcaataattcatctatttgaggattataccttaa

SEQ ID NO: 74776 - DNA, 1038 bp, Homo sapiens
ctgacattaacccagatttccttctcatttgtaatattttttacttttctttggaattaaagctacacaatatatgatgatattaagtcccaattctgaaagctctttcatgatcttccttgatgatcttattttctatttcactgagagaattctaaaaatttcataagctcctaccaccagatctacctacctaagtatatgagtatctgaatacttttactattttgttaaactatgtgcctagcaaaggcctacctctactttttttctatattccattccattccatcttacctacttagatatcatttagcaattctttctccactttcctgcagtatcaagttcttgccctactggaaattatttttacctacaaatacactgttctttctcccacttaaaaaaaaaaagtgtgtttctttttatcccacttcctgttctggtaattatggcattaacggtaaaattcttcaaatttgttgcccatacttgtgctatctccatttcctctcttttcatttctcttttgaagctattccaattaggactttgacccaacctttcactgaaactactcatgttaaagtcactggtagcttctatactttttattcagtggtcagttctcagtcctcctttttatataaccatcagcagcatttgacacagtgatcactgtctcctttttgaaacatttcattttgcttctggtacacctttatctcattggttgcagccgtatatttcttttgctgtttttttttttctcatttccttggacttctttttttctgtccgtggttactcccttggtgatccaatccagtatcatggatttaaataaccatctgttctttgatgactaccaaatgtttgtgtccattgtggacctttcatctgaactctacactgatgatgcagctgcctgctttatatcacttctatgtctaatatgtatgttagaattaaatatgattttaaatattctgatctttctcttgaccccctcagatcaacttctctcagtcttct

SEQ ID NO: 74777 - DNA, 1052 bp, Homo sapiens
attctttttgagaaaaattttgaagaaattttgaattatttccaaataatatttatttgaatttaacatattttactgtttctgcctttaaaatgatattctattttgtattttagcttatcttctcaactgaaaatttgaaaccatgctttctttacagtagtattttaaactaattgttctgaagcgtatacctattctgtttaaggaaaggtatgttcctctcaaagctttatcacactttcagctatgctggtgtatttgacatcttgtttaaaaactagaatgtctctgcatacgaacacccaaactgtgataatgagctagatatgccatatgtggcactttaggttggcatatatctgaaatggcatgtttaatgtactgtattactaggattagtaattttacagtggaaggctgctacttttatgatatagtctcctgctgctgggcttataagtctgatggactctttactcaaaacctgttttttaatttctgtaaaaatctttttactattgaaattatctgcataagatctatctggctgattgacttattatctgaagtttgtcaagattagtgagaagtaaaaaacatatatagtttgataggtttataaatgtaaatagtaattatgtatattttgttaaggaataataatgctaacatatttagtattgccagcaatggtttagtaaagtacataattgagaattgttcacaatatttttatttttagaaaaaagtgcataggaaaagctttgaggttctatggagtcttggcagtgaagccattaaaaagcaaactgcaataaataatgttcttttatgacagaatgctcaactttaaattcatattccagttctcatggacataatattcattttttatttttaaaattatgcttttatccaagggttttactgaagcaccttcaaatcagtcaggagattgcgttaaaaataagtagatactgcattgcaatgaggataatttagataatttaaatttaaggtataagtaaagaatgtaaacattttttgac

SEQ ID NO: 74778 - DNA, 1065 bp, Homo sapiens
aacatgtttttgttttctttttatgttgctaaatattttagaagaactgtagctttttaattttggtcatattaattcttgaaatacctggttttgaagtggttagtgttggaggtaagtaagctcttactggtagagctcattcacatacttagtccttaattattctttggataacccatgtttttatttttctatgatgatgatttctttaaaaagtggtgaaggtaattttttttgaaacttggtttcattcttaagtgtgaagtctgcctggaagctgtctcttgttaattattatgcatatttatcagatgcttcctgtaaacgctggtgtaggcagctatttggtaatcattacttagaattattacaatgtatcttttctccattcgaggaatataggcatactttgctttaccctgagaaattttgctttgctcttttctccttagatttttgtttttttttttttttatatattttagatccctgttaaagatttaggacaacacttaggaatagctaagagactttttatttaaaagatttggagaaatcatagagttgtggaaatagatcaaagtgatgaagttcagatgatctcttctaaaactttcatttaacagttgagaaaaccaaggtaccaagagattaagtgatttacgtaaggtttctctaatgccagtaattgtcctgtagctttgaaatgtgttttctgaatttgtggtgcaattgtggtaggtacttcattctcttgttttgttctactttttttttccctcccttctggatgtgactctgaggaagtaagtccttacctcctctctctcctagtcttaaaatgaatatatgttctttaaaaaaaaaaaaaaaactgagatgatggcccagtggttattttgccattattattattattttagttcatgtgctacactgaaggaacataggcaggatgctctttggtcattaacaaatttcttttagaaaaggatatcataggttatattgcctggagcatgtagcctggtcattttctctctttccttaattatactgttt

SEQ ID NO: 74779 - DNA, 2324 bp, Homo sapiens
tgtcttcaggggggtgcatacgagggtgggggtgtctggaacggtgacttgttagttaacatcctgcgcttccttggaagatgagttttaacgggaccgatatcgcttcttcatttgcactggaatcatcttaacaatgcacccaatgcatcgaagcagaggtgaatttatctccagcatatgcattgtagacggatgggggtcttttgagtggcacaccacaacatttggaacattcattcacattaagaaagctggatttaccggggtgtctcctgtataagatgtgatcaagttgacggaaattaaagtttgtggagttggcttaattttctaaaacgtttcattttatttttcctggttcttccaccccctttccgttttaaaagttgtgattattttgggaaaggaacattacctgttttgtcacttttaagcctatttaatataaatgactcctaagctttttagtattggcagaattcttcttaaggtcctttaattaatgagcttaaacgagatcacggtagactaagaagtgctaaagaaatgcactaggattagttagatttgccagtccaccacactgagttatttcctggcagttattgaagacttggaatacaccccacagtttgggtggattatttggtaggagaatggttgttttgcggactttaagtaggatataggcaatggctaattgtagtccttatgtgtctgctaatgacaaataaatatagctcatcactatttacagtcctgggcttttcttcttttttaatatgttaagtgaaggtttgtcatcttataaacctctgaagttttgttaaagggtcagttcatttcattttgccacagatagaattggaagatttccatgtttggaataacaactggaatttagtcatcagtttttacagtgctgcaaaataatagaatatgtttatattttaattccaagcttgaaagtataaatcctataaaatgggaaacattttgtacctgtttgtttttcaatgtaattggcttattttcattctcaaaaaatgtttaacttcatatttcctgcagttatatacccagtgctttagttgctgtttttctctcttgagggtggagaggggatacaaagtttgaaatactgtgttaaccgagtatatttctttgcatttttcagaagacggccagtattttctaaaggttctcatacctagttatgctgctggatctataattgggaagggaggacagacaattgttcagttgcaaaaagaaactggagccaccatcaagctgtctaagtccaaagatttttacccaggtaggtgcaatggtgaagagattgtttgatgagctccccacaggaaagaaagatctacttgtgttgtgtgctgtcttgaaagaatttttaaacaatactggagactttatttagatattgctttataggaatatattgtggaaaaattttcagattatttctattgttgattatgcctttttcctataattgttgtaccgtgtatgtgaattagaccagttgcaagatgattcgggtatttctgaataattcttattagcaaaaaaactcaaaaatttaaagatagaaacctggacagctggcatcaggaaatagggttcttctgaagttttcagacatcattgtaatgacaattagcttagagtgaattcagaagaggggggtagggaggcttcttaaagaatggaccatttacttctgaatccattatgtacctctttctgcttcattgctttgtttgttggccttggagtgaagtaaagaggacaagtgttgcctcttcagattttttaaatattgcagttttaatgcaattgatataaggaaatttatactgttatgcaagaagtaaaataatgcttcagaattcatgttaacttaagagctaaatttgattaaatatgttgacagtgtagtacagtaacctactggaatatgggaagtttccttggtggtataaattttttgtttttcactttcaagtatgcctttttaagtgttaaatagttctgcatgtccatctttttctatttttttcttacattttgctaatcactatatgtattttaggtttaagggaaaagtctctgtaattgagtagtacatttcctagataaaacattatcagctgatttgcttttatttaaatctagctttctgtgatttttttaaaggttattttatctttatggctgtcaaaaacgttaattcagtgctgagggaaccaatactgctttaatttttttcttcctggtggaaaagaaaagctgatttgctttca

SEQ ID NO: 74780 - DNA, 1070 bp, Homo sapiens
cccccctccctccccgccagccccccccaacaagcgggagaaataatgagcgagaccgggcggcagcagcagcagcgccgagcagcccaggcaacggcagaaccgctccggcagcggcggcggcggcagcaccagcagcgggagcgagcgcaacgctagcgcggcgcggggaccgccgcgctccttcccggctcctgccctcctctgccgctcgctcctctctcggcatccacctccttcccctcctcctgctcattcactctttccctcactctcccctcctcctcggcttctccccgcgccccgccagccctcgcgctctcccactccctctgcctgtcctccccggtcccctcctcccgctcattcactcgcccctctcccttctccactctctccccctgtctcctttcttcttcttctttcaccctccgtctctcacaccccctccattcccctgtctcctttctgacactgcactgcagctgctcctcagccctgccccctccccagtgagaacaaaccagcaacattgctttttttcctaaagagatttatattgatccgattaaaaaaaaaaaaccttaagaaaccccaaacgcaaaaaaaaaaaaaaaaaaaaaagaaaaaagaaaagaaaaagccaaaacaaaagggagaaccttctcccggtagcagcggcaggaactgcaaacatgatggcggcagctcccatccagcagaacgggacccacactggggttcccatagacctggacccgccggactcgcggaaaaggccgctggaagccccccctgaagccggcagcaccaagaggaccaatacgggcggtgggtatcgcttccacctccccgctggccccatcccccgccgcccgcccctgcctccctccctcgccgtcctccctccctccttccctccctccctcccgcggcccggacacctccagcccgaacccggcggcccctgcgcccctgccccgcgccccctcccctgcacctgccccgcgcctaggtgtccccgacacatttccatttctgtgtttatcattcatcaaaatggcgaccag

SEQ ID NO: 74781 - DNA, 1060 bp, Homo sapiens
ctattatacatacacaaacgttttcaggcaatggtaactttcatccttgtttttctaaccctcttctcttttgctctgcagagattagttataaataaagaacatatagccagctacattacattcctagatgcctgagtttctatcaatagtgcaattttttgatgaaacacatagaaaatatcaacatggcaaactctgagatgttacctggcgcccttccaccaaaaaggatttctacctccttttcaagactgattcatctctagttcacaaacaatctagcactgaaatatttcaggtacccactcctctgaggtcattgtaaaagcgaagaatgagacaacaccatataaaagaaaattgtgtcaccttttcagcaaataaaaagttcagtctcaatttcgtgctgaagtatgaagcacagtccctgaagagacagccagtttggtttgttatagcaggatttgtaactgtggaggtggaaaactttttcaatctatgaaagatattgtgaaacatttactgtgaaaaagctggaataataccaaccaaaagctataaaagtaagaggggggaggcttaatttgagaagttttacactcttttataagaacggctccattattcttaatacagacaaaggttgagtcaagtttgtgatgcagtaaatgaaaagttcagctcatctcttcaagcgaatccatacagattcacagcattcgtttctctccctgttcttccttgccctgcacttcttcattttgattagctcgttcccttaactggtgaagcaaacatttgtccttcaagtccaataagttctaactgtcattaatcacaagtttctttagtgagtgtttaaaaattctaatcaggaggggaagagtgctaaagagaaaatacgtggcactctccagaagagaatcagggtcaaaaactagacagctaagtttggaagtctcagataattgaaaaacaaacaaacaaagaaacaacaatcaaactatagctctcatagttttgttttcaaatagatgtatacattaaaaagtcactt

SEQ ID NO: 74782 - DNA, 1738 bp, Homo sapiens
cagcccaggagtgtcaagccataatctacaaccaacactcaaaggggagaggagcccacactttcagagcactgaaagaaagcctggctgcaaccttgaggaaatataggggagtcacaggactgagcaagagcctagcaactgatcatgcctaagcgtcacctactggatcacatcccaaagctttaacaccaaaaatacctcaataacagactcccctgtgaaaccaaagaaaataagtcagctacaaataaggactctgcacaaagccttggccctgtgaaaacatccaagaagaagtctacttcctgtactcaatttacgttgtaaataaaggaacacggctccggccgggctgcggggctccgctcagtccgggagcgcccccgggccgcggcgctcctacctctgctttcccaccgcccgcagctgaagcacatcccgcagcccggcgcggactccgatcgccgcagttgccctcgggcgccatgtcgcagaacggagcgcccgggatgcaggaggagagcctgcagggctcctgggtagaattgcactttagcaataatgggaaagggggcagtgttccagcctcggtttctatttataatggtgacatggaaaaaatactgctggacgcacagcatgagtctggacggagtagctccaagagttctcactgtgacagcccacctcgctcacagacaccacaagataccaacagagcttctgaaacagatacccatagcattggagagaaaaacagctcacagtctgaggaagatgatattgagagaaggaaggaagttgaaagcatcttgaagaaaaactcagattggatatgggttggtcaagtcggccggaaaatattccccccaaggagttcctctttaaacacccgaagcgcacggccaccctcagcatgaggaacacgagcgtcatgaagaaagggggcatattctctgcagaatttctgaaagttttctttccatctctgctgctctctcatttgctggccatcggattggggatctatattggaaggcgtctgacaacctccaccagcaccttttgatgaagaactggagtctgacttggttcgttagtggattacttctgagcttgcaacatagctcactgaagagctgttagatcctggggtggccacgtcacttgtgtttatttgttctgtaaatgctgcgttcctaattaagtaaaataaaagaatagacactaaaatcatgttgatctataattctacctatgggatcaataagcatgtcagactgattaatgtctactgtaaaaaatttggtagtaaattttcatttgatattagatataaatatctgaatataaataattttaatatactagtcatggtgtattgtattttaaaaattatctgcaaccttaattcagttgaagtactttatatttcaaaagaatgaataacattgataataaaatcgctactttaaggggtttgtccaaaataaatattgtggccttatatatcacactattgtagaaagcattatttaatttaaatggatgcaggttgtctactaaagaaagattatacataactatgctaattgttcataatcaacagaaaccaagatagagctacaaactcagccgtacagttcgtacactaaactcttgttgcttttgcattataaggaattaagtctccgattattaggtgatcaccctggatgatcagttttgtgctgaa

SEQ ID NO: 74783 - DNA, 1065 bp, Homo sapiens
aaaattatttatattcagatatttatatctaatatcaaatgaaaatttactaccaaattttttacagtagacattaatcagtctgacatgcttattgatcccataggtagaattatagatcaacatgattttagtgtctattcttttattttacttaattaggaacgcagcatttacagaacaaataaacacaagtgacgtggccaccccaggatctaacagctcttcagtgagctatgttgcaagctcagaagtaatccactaacgaaccaagtcagactccagttcttcatcaaaaggtgctggtggaggttgtcagacgccttccaatatagatccccaatccgatggccagcaaatgagagagcagcagagatggaaagaaaactttcagaaattctgcagagaatatgccccctttcttcatgacgctcgtgttcctcatgctgagggtggccgtgcgcttcgggtgtttaaagaggaactccttggggggaatattttccggccgacttgaccaacccatatccaatctgagtttttcttcaagatgctttcaacttccttccttctctcaatatcatcttcctcagactgtgagctgtttttctctccaatgctatgggtatctgtttcagaagctctgttggtatcttgtggtgtctgtgagcgaggtgggctgtcacagtgagaactcttggagctactccgtccagactcatgctgtgcgtccagcagtattttttccatgtcaccattataaatagaaaccgaggctggaacactgccccctttcccattattgctaaagtgcaattctacccaggagccctgcaggctctcctcctgcatcccgggcgctccgttctgcgacatggcgcccgagggcaactgcggcgatcggagtccgcgccgggctgcgggatgtgcttcagctgcgggcggtgggaaagcagaggtaggagcgccgcggcccgggggcgctcccggactgagcggagccccgcagcccggccggagccgtgttcctttatttacaacgtaaattgagtacaggaagtagac

SEQ ID NO: 74784 - DNA, 1047 bp, Homo sapiens
ctcttggaagtagttgccattgccttgttgtgcttactcaggtcacttgggttgggtactgtggcgtagtcagactaatgattgtatgcttcattcagcagaacaattttttcatttttacttattccattcccttcagacacttctagtttcccctctgatagtacttccctccccattatgcagtgtggttcactgttggggcccatttgggcacaaacgagaccttttgttgagttactgtactcctgcctttctaattacagaattccaaacagaatgagtgaattaatgacatgaatttatttcctgcagtgtctagggcagtgtaatgctgcagcaagcttgcaatagcacataagctctcccttcactccttgtcctccatttttgccgggtgacttcacagcagcaagaatggaaggtgcactttactcaccagtgagtaaatcatgtgaatggatattttaaagcacatgccctatacgcagttcacagaactatacttttaaaagctctctgagaacacatgcttggaatatgaaaatgtactgagtactgtatttcttcaggtatcctaggtaaggcaagagtgtataggcataggcaacatttaaatgtgtgttgttgcatttcatttctccaaataattgtttgatatttgactctacagcccttcagggcaggcaaatacttgtaacattagctccatagagatatggttctcaattaccaaaagactgtagaagtcacttttctttgcctgacactgggaaggattctgattgaaggaagcagtctttgttcctctggtctcatgtgacagtctgtatcttcaggtccatacaggttgatgcacaccaaaaagtggattcaaagctgcctattcaagacttggtgatagggaaagatgaggagttaattttcattttcgtttatcagctgcctgtttgattaagatttttggtaggaagagccatctttcagacataatgcctagggtaggttaagggcaaaaattaactctttgaaatataaatgcttcct

SEQ ID NO: 74785 - DNA, 1879 bp, Homo sapiens
gtgcttttagagccgtggtaatttttaataaatcatagataaaatgagagagataccaaggtatttaagacaagtagaacttctaaaagggggaaagaatggattctgaaattattcaacaagaagctcgataaaatgagagagataccaaggtatttaagacaagtagaatttctaaaagggggaaagaatggattctcaaattattcaacaagaagctcagtatttatccttgacaaaattctagaatgaatgaatgattaaatagatgatttgcaaatatttagaaaacaaatcttggccctgagaagaaaatgactgaaagtcagtatttgtcaatgttaatttacttaaaatgtattattccagaataactgcacttttttttaagtaggattaccagattggtagaatgagtcttaccaagaactgatgtgtctcaatgataaagcatttgaaaaaaaaaatagcctaaaatagcctttggagaagatggtaaatatgagctacataggaatacttctaggaggaagcactgcctgcttttaagacttgctcaaagaataattaataggcctggcagttggtaatgtgttttgtgatagagtcagaaagccctatgtttaggccttatcctgaaaaaagttctaataattgtattaatacatagcagatgggcttattcggtgtgagcatgacagaaagctaggagaattaacgatatgaggcagagctatggtcacagagatgtacatacacatacacacacatccttgcgttcaagcacataaaagtgtggtggaaacataactaagaatgtaattatcatgactgtaaaaataaaatgttaatttttgagataattatccacttacaatgataagttaatggcataatatggctgcagtctgccatagtgtttaagagcacaggctttgaattccagtccccctgggtttcaaattcagctgtattgcctaggagctgtctgactttgaccaacttacatggccttttgaagcgtcacgttttccttttattaaaatggagattaaaataataactactttcagggggttgttataaggactaaataagaatatgaatgtaattttttaaaaaagaatgaaaacccctcaatcctagactatatgaataatatatttgcgtataattcaaattggcagttagtgaggaaaatgttggtcagtgatgatcactgaattttaacagggacattgagtagagctagtgactattaaaatcgaggtgtacaggaggactaagcaggctgaaagatctgaaggaactatagaggtgagattaaggggaatgaatcactgtctccaaagatgtaaagaactgtcatatagaataaagttttccattgcatctaaaacataaataggactaatgacagtaagttataaaaagaaaacacttttttttttttgctttgagtaggatatgaattaaaggtcaaagattcagaatggtgtattgtgtcatgatgtcatctgtggtctggggaggggcatgcatgtgcctttgcaactagattgtgagcttttcggggtcagggcttgatcattaactttttatttcataagtaattgccaacaggaattaaggaagatttggtgaatgaacagataaatgaatgatttatacatacataatacatctgagactattttattacatgaatattgtatcaatgtagacatggccagtaaagagaatattggaaggaaaaaagcctctaaactgtgttcaaaaatgtttagtaaaacgcattttggatggtatagttaatgctggattgtatacaacttgattaataaaaaggatattttaagagttccagaaaagtaacaag

SEQ ID NO: 74786 - DNA, 1049 bp, Homo sapiens
ggaaaccctgtctctacaaaaaatacaaaaattagccaggcatagtgtcatgcgcctgtggtcccagctactctggaggctgaggcaggagaattgcttgagctcaggaagcataggttgcagtgagccaagatcaagccactgcattcctgcctgggcaagaaagaggaggaggagggggagaaggaggaggagaaatctagccagcttcagcttgacatggaatgcaagagaagaagaagaaaggagaaggacatgaagaggaagaggaagagaaagagcaagaagaaaaagaagagggagaagaagaagaagcagaagaagaaggagaaggagaagaagaagaagaggaggaggaagaggaaaaggaagaaggagaaggagaaggaagaaggaagaagaagaaatctagccagcttcagcttgacatggaatgcaagtcttgttatttgcaaatctgaattaataagtttccctaaaaacacctcacctagtattctgtgcagggtattgacgtgcagagtacatggtaattggtaattcttgatcactttatcccaggaagaattctctgttcattagtagaatgagatacatttgctaaaatgcaacctagattcagtattgaggataaattttaaagaagaaattttagaggaatatttctataaaaaagtcatttatttttaaatttcataatagttactcataatgaaacctatgaattaacctctggtttttttacattatagtgttatccatttatctgtcataattttttaatttatctctacaacgaaaatacatattaatagaatatatatgcctattttagtgctaagcactttatatgagacctctattttaatgcctaatcgaattccaacaggtagactttaacgatttgcctgttttacaacttaagaaatcagtgtctctcgagcgaggttaagttgtctaagcttgtaccaaagctgtgaagtagcaaagccagtatttgaatccaagtccttctgactccaaaccctaaattgatgaaatattatttt

SEQ ID NO: 74787 - DNA, 1037 bp, Homo sapiens
actctacctcaggtttacctgaaaactgaacaccatacagttcaacccaaaatatgaggtgcttattacccagccttgggaatttttttttttttcagatggagtcttgctctgtcacccaggctggagtgcagtggtacaatcttggctcattgcaacctctgcctcccgagttcaagcaattctctgcctcagcttcccaagtagctgggattacaggtgcccgccaacatgcccagctgattttttttgtacttttagtagagacggggtttcaccatcttggccaggctggtcttgaactcctgacctcgtgatccacccgcctcggcctcccaaagtgctgggattacagatgtgagtcactgcacccggccaggattttttaaggtgtacaaacaacgtgcctatcactcttcagagtaacccactttcagaaccatggtgcctgacaatacgttttactaaacatgagatgtgaattttgtaaagtttcacttggattagctgacataaggttttatgcatgaaaatacataaaatgtacctgaaaacattttttccctacaatattttgacttctcaagtccatcaacaagcaacaatatcccactcatgagggtagtgcagtctgtcaaacacacgaagaggaaaagcagcacagtcatgaaagaaggatggatggtccactacaccagcaaggacacgctggtaagatccacagggaacaatgttctcttgccttgctagctttaattagaggagttgctaatgtcccgtgaggactgtgagatttctgcattactcagagtaaacctcagcacaggcatgacacgggattaggtaaggtgcattacagtctctgggtgtcagatatagttgagcaagcaacgaagttaggaaaaagtgtggaaagcaatttcaggcaaacaaattcattgaccttgattacctgagatgtctacctgccattttatagcacttgtggaagccacagtatgtgctttcagaatgcttcactgcaatttagaatttta

SEQ ID NO: 74788 - DNA, 1048 bp, Homo sapiens
cttcgaaggactgctaagaaaaatgccatatcttaagcaaagagcttacattttcttcttgggtagcattctaatggatcactaccaaaatatttgacttagaatcccaggttagctttttctgcagatagtggtctttatacctttagcctgataccagttttccaattcctctggaaaggaaaatggctgtaaaagatcacagatactttcagttgaatatttttgttgctaagaagctgaagaatgactatctttgctctagaactttcttctctagaagaaatatatactgtacctaaaagaagaagaaggaagagctctccaggaaaacattgtcacacttgtttctggcttggagattcatgaattagctgccaaaattgaaagcttggcgatcgtcccactttctgtggcatgtggtgttgactttgttcaggctcagggaatgtcagtgtgtactggataactataactaaggggatacagaacagtttttgatgttgttgattactttgaaattctattttcttatacattcagaaaaatctggtaaaatgtgaattttccaagcttggcaggctagagtctctcattaatctgtattttcattttaaaatgagtactttgcattagtaagtaattttaatttttgccattaccatcaactgtataatgacaggttcaatattacttcaaatatcaaatgtcttatttaaaagctgcagctatgtgaccaatttaatatattggaattcgtgattttcaaagttactccaatagtaagaatcagtggcttgaatcttttttcatgtgaaaatttctgtcatcctcttacatacttttttttcccaccagggctgtgcttctaaaatatgagcagcttcccagtcacttgggcctggtatcactttgccttctagcattttacttctatcccagctttggcttccttccaaggtttttcatgacttttcatgttttcaggcttgggaaaacggaaaacgagcatctacctataaaattacatgttcaacctctcataaac

SEQ ID NO: 74789 - DNA, 1370 bp, Homo sapiens
cattttggctgcactatttactagcatttgacccaggggtatgtatttaaactttatgagcttagatgcctcaactgtaggtaataaggcctgtcttttaaggcacctaatacagttattgctctagagtaggaacttaataactaagatatataaatgagatacataattataacaacggttcaaaagtaattcagtttatcttattctgatgattctaaaatacatttattctgacgattctcaaatatatcccaggatatcaaaggtactgtgaaattatccaaaaacatagaaaacatggttaattttagttaatttaatttttaaaaatctatatactgggctgattaaataattctaaaatgatgggcaagagtacacagagataaaattacatccaaaacatccacttttatattcctcttatagtatattcgttctgtttccagtaatacaaatcttttattgtatggctgaggaaaaatgtaaaatcatatttatttttttctttaggtaatccaaaggaactgtaaggcatttttttctttctttctttctttttctttttcttttattatttatttatttattttttttgagatggagtttcactcttgttacccaggctgtagtgcagtggcacgatattggctcaccacaacctctgtctcccaggttcaagcaattctcctgcttcagcataccgagtagctgggattacaggcgagcaccaccacacccagctaatttttgtatttttagtagagacgggtttcaccatgttagccaggctggtcttgaactcctgacaccaaatgatccacccgccttggcctcccaaagtgctgggattacagcattttttcgatgaagtaccatgtagggcaaacaggaggcatttacttttcattttctgtctttcataaatgcttgcattttctaaccatgtgaatgtaatcctgtaaaaaatgtcaatgatataatatttgcactgtttatttgactccaactttatatttctgtattaaaaccacttttttaaagcaaaaacttatttgaaagacctagaaatcatgtttaaacattctgatctccaattctcttttttttttaagattatacaagcaaggtaactcaaatagaaatggggaaggcaagtaaattatattaattaacagaaatacagtatgatttcatattattaaacatcaaagtactaaatacaagagtaaaccggtatcttaaaatatataaatatataaatcaaatagcctcttacatcttgcttcctttattgttttccaaaatgtagcaaaaatcaccatcagagtcgtttattggtcgagagaagaggtcaaattctcaat

SEQ ID NO: 74790 - DNA, 1050 bp, Homo sapiens
tcttttagcttttaaaaagcttcagcttttccttcttttggccttcctagggtggttctctggccggagccacttacttgcattcaacctgactctgtgctggtccttctgctgttgattctttacttttctgaacatgagctcatcagacagttccctgggcagtcacaacatttatctagttaccagtcccttttcttcctaattagggcaacttgctattgtgttctcagtctggcttgtgagacctttttctcttgtagccatattttttttaatctctaaccacaaacttaggaaataacttcccagaaacttctgagctgcctagtcaacctatctaaatacatttttttttctctcttggctactatgatctctgagatgatatattcacagcctcccaaattcccatcattgcacctcactaacaattttctggtcagatgttaagtcaaaaatggagattcccttcattttcagcacccatctgaaagatgttattgcaagtccctctgcaagaatttattgaatgttcttgttgttggagagctgtgggtcctcacaactctagatgtttccaggtataacaaaaatgtgaaatgtgagattaacttgaacaacggttgcatgaagggagaatctgatctaaaactggcttggagagactgggatcaacagagaagcaggaaaaaatgaccaaccttgggggttaggtatatgtgtattgggtgatggggagggagaatggacatgtgcaagcttagttttacaaacactcacacacctgggccacaatagtgtgaaattgatctgttgtcatctctcagttccctgcctcatggacaatttgtagtcattcttgctgatttccctgacagtgcaccaaagatgataaagtgtcaagaacccacaataattgtaaagaaatatatagacaatcctatgttatatataattaaaataagactatataaaaatgttcactcttttatcctgttctctgcttttcaaaatactcttcaaccttcaggattctgtacaattcct

SEQ ID NO: 74791 - DNA, 1030 bp, Homo sapiens
actctttaaattccaaaagccttagatttcttatttgttgattgacgatgacacaaaaatcaacctggctgtggtctggggtcaggattaaataagatctaacatataaagtgtttaacatagggcctgcattttcactgtgtagccatgccatgcgatatgcataataatgttacattgtactatttttcagcccatattttacccagtagtcatcttttccatatttgatagtatttttaaacccttctatttggatattgcttctcttttatcatcccttgaattcttgcctcctcttttatggctctttacgtggctcagaagaacttcacttggcttctttcttctttgtattggtgattttttcacacacatgtctttaagaacaattttactctttcccctaacctctgtcctgaattacatttttagccatctgctggactttttccacttggatatcccactggcacttgagctgaacatatctagaacagaacccatcattccttctgctcagctcacatctcctgctggtgatttctcatcattagtggtaccagttggttcctggtcagttgtaagggctcattgtcactgttgaccgcttttttcaattctcgccatattaatcgtcaagtctatagcttgcatttagttttctcttctctgtttctattgctacagccccatatggtaaccctataactctttctgaccagtgtcctcactgctctgtagtccatcttctctgcaatccttcctctctacagtccatcctgcacatcagtcttccagtaacctggccatgatctcacaccatctctactcagaagcctccagtgctttcccgttcactatctgctgaattatttatttaagcaggcacccaggcctctctacacaaggcctggctccccttccggctttgctctggcacacttgcacacatatcctttggtcattctgttaaccagccaaactgaatgactgacactccttcaactgccctttgcattttgactct

SEQ ID NO: 74792 - DNA, 1044 bp, Homo sapiens
ttaggaagcatgaaatctttgcttacataatatcacaggtttttgaagcagtttatgtaagtaatttgtttccttcacaatgactctggaaagtagagaagtcagatatttgaaaagctatagaatataaattgtaacttgcctatgtcctgcagagagtaggagtaacaccagagcttgaatctaagtgttcagtcactattaataccatttcaataccatttagccctttgaacttgaacaagtaaacagaaatagttgaggacttgttcaaagaattcctattgcagtaagagtttatatttcagggaccattgatgatatttgtaacagcaaaagtagcagtgagcttcaggaaccattgagatgatgtttgtcatagaccattatcatcctcttcctcataaaaatgtaaatatttaattcatatactcaaactttaatgaggttaagaaaaccctgaaggttcttctctatagttataatacaaaatataaagcaatataacagtgtcactgcatcactaggatcccatcataagttcacaattctgatcaaaatggaaatagtgtcttagggtcactatatttaagaaatccttataagcatgttttactcctactacgattcaatgcctaaatcataaaccaggaaaaaaaatatggtaacaacattttattaagcttcttttttcttttatagaaagtgcaaattactgactttatatattaatttctcttagatataatattatattaatttgtcttagatataatacattggttagcaatgtagcaatattttatcttctgtgaaatttaggcagaagataaaaaccccaagagtgatatagtaaatcactgtattatttcctcaaaagtatattgcatagatatagtttttgtttgtttgcttttaagaaggcagaattaattgtgggcaacaccttctcagccctactactacttgggcaactaaggttttataagacctggccttcaatgctcaatttatatttccttgtgtttgtacttggacatctaa

SEQ ID NO: 74793 - DNA, 1083 bp, Homo sapiens
gattggtttatacactggttcatatttattttgtgtatgtatttgttgaagtttcccctactgtcttttagtcacctggttttccacacatgtgagtgaatacaatagcagaccatggattctataagtgactggtaaggctagggctcactgaggtcacctagactgaagaggagctatgttagaacttcattttacatggtctcacagcatcctgtacacctctgtaacacttatgactatcataatcatgtaatgaattacataattagtagattaagatctactctttaaaatgcaagactaacttttttgttgttgttcaccgggctttgtgtatagttaaagcttactactgtttgttctgtgagtgaatgaataaaatatcgtcataatctaatagttttatggtatgggcaagaaaggccctgtgaaacagtgattccaagttctttagaaggatgtatagtttagagatcattataagcttaaaaattgaagaaaactttacagaaatatgagcaatgagattaaaaactagcatagacattgggaaatcatgatgttgtagataggttaagccaaattaaaaaatcccgtggggctggctaattccagggattgttaaactcagtcaattgattaatgcttatatcaataagagggatcaactctttctttattcaaaaagcaaaactaaataactggcagtatttatggcacatgatcactatgttattgaataaattatgaatcttttttttagctggaatgatgaaatctaagtaataattagactgtgggcgtggtggctcacacttgtaatcccataaacacttataaacactttgggaggctgaggcgggcaggtcacaaggtcaagagatcgagaccatcctggccaaggtggtgaaacctcatctctactaaaaatacaaaaattagctgggcgtggtggcacgcacctgtagtccaagctactcaggaggctcaggcaggagaatcgcttgagcccaggaggtggaggttgcagtgagctgagattgtgccactgcactccagcctggcgacagagtgagactc

SEQ ID NO: 74794 - DNA, 1054 bp, Homo sapiens
cacctttcacatgcaatgagatgctcagtgaatcccaataattatccttttcttagagtctcaagttcttatcctctgtttttattaaaacagctgtgtttccagcttggattatttttacctcctacttaaactgttgcaattcatgggtcatttactccttcagagttaccaactatgtttttaacaagttgagtatgctaatatagagttacaattttgatattaactagacaaaaaaattaaaacttggtgacttctcattgtcagtaaacaaaaaaatcatttcccaatctggtcaattaaaattccccaaaatggtcatagtttaccttaaaatattcttgctagaccttcctaagtatgaaccttgtgtgccatcaaaatgagactgtttattctagtccatatgtacattgtatttcacaatatttggaccttagctctgtttttccctccatctggaatggtctactcataatttctgcccactgaaatacttcttatccttaatccttttccttaagcctgtgggtcctttcagccctgaacactcaggtatgaaccaaatactaccatttgggagggatatatagaggatagtcttgcatggcttttgacctggcctgtctcatgtccggctcattgaaatgcagtttctggttctcagattttaagttccagaaacttcatttttaaaataaaaccagagttgctatagttcctagaagataaatccaggctagtaagcctcacaaaatatttttatggactggagtgcctgtatactaacttagagtgagtgatgtgcttttcttggatattgcctttctgcaacaagatgtctgcaaagcagattcagaaactggaaagttgctcaattggctcagaattgaaacataaggaattggttggtcttgaaggatattccatccaggttatgggaaaatcttattgagtcacctgataagattcttttccttggataatttgatgtaaacactggtggattcctcaggttccaatcttttatctgttgctccaactgactgaa

SEQ ID NO: 74795 - DNA, 1017 bp, Homo sapiens
gcattatttagcttagttggctaccactaagtttgatccttgtagactttggcagaaggtagcaagtgtgacagaggctgtttctctgaaatgataaaggaacattagaacatttgggtcctattatttccttttaagaacctttcaaatacagaattgctggaccctcatcgtagctgataactcacttaaaattcacacaacctgatttaaaaatgcaagggcctcaagcactgcattccaactgtgcgtattctaattatactgaatgcatgcagtgtgtgtccgaagaatgtgtcagcttctggagaacagggggtgtttctaaggcttagccccagagttctcaaattgaacatttggagagccaaaatacgcaatgggaaatacacacaatcttgctgttttcaattaggagtgagctcctgtttcttcgacttcagcaggtggctattcatcattcaaatgaaaaatgtttattaacgtgaatgtaatattttggaatttttacaattgagaatcaaatattaaaaactttatctttcctcttctatcaacaacttataatggtctcatcctaacgtttctgtcctctgacctgttacttaagagcttttcaaaagtgggcttaaccttcttgccttttatgtcagtggtcggttgtataatgaggacagtgctccattaaagagtgttttgtatttgtatttgtagcacaaaagaagtggcaatatagtattcattcaatgattctgtcatttagagctatcaattcaatggggtcaggacccaggatattttaaaattgtgagcttgtttatatttattaattaaatatatactttaacatttgcatttgaatgggtttttcttttgcattattctcggaaaacataggctctgcgaataacaaatattaaaaataacagcttgtgaattcacttgtgatggtaatttaacatatatcaaaatggaatattttgtgatattctttgtttacagactggcaagtaatca

SEQ ID NO: 74796 - DNA, 1067 bp, Homo sapiens
gcaatatggcgaaaccccgtttctacaaaaaattagttgggcgtggtggcacttgcatgtagtcccagctactgggaagactatggtgagaggatctcttgagcccaggaggtcaaggctgcagtgagccgtgatcatgccactacattccagcctgggcaacagaggaagaccctcctgtctcaaaaaccaacacatgagaccaaaaaaaaaaaaagtttctatgggatattatgttaagcttagtatatttatgactcccagttgtgctaaatttgatttttttaatgtattgattaaaagatagactttgtctacttgaaccataccctttcttaagtctgctgattgttatggttaaatacacacacacacagagagataaatatatgcatttgaggaaatacagagtacatcctgggtagacctgacttaattcttagattaattcagtaaaatatggattccttaaataaatgagaagatttgacaatgtgcataatttaattgtacaaagacaaactccactctgaatgtcttcttggcaaacgaaggcccattaagccatatttcaatacacactctgggatagagggtggggaaggagggagggacaatttgtagtacactgtatctactttatggctactgattttaaacaaatttcagattacccttattgtctaatcatatgtttgggaggatgggctatttatgagatgttagctttccagatgctcgaacaatgtgctttaaatgctatattcacaaatcagcccccaaaatgcagcagattagctgtttctaatctttgaattcagaacaaatgttagaaaaaggaacatttgcagagctgtgtagtctctattacctcattaaaatgtatttataaatgaagtagacagaggagcaaatgtctgcacaaaacattgctacttcattaatatttttttattacaaaagcactttctatgaaatctgtcagcgtagaggaaataagtgaatcagttggctttcatttttgtgttttgtttattttccctgatatgcaaatgaaattttgaaag

SEQ ID NO: 74797 - DNA, 1078 bp, Homo sapiens
cttgtggtgtcaaattctttataactaacagctttacaaaaagtactatgtattcttttctgtatgaccttatttatgagattcctgttcatttttggttactgagatttactgaacaaggtgatgttcagcataggcaaatatttctttctttcttctttttttttttttctttttgagatggagtttcgctcttgtccagactggggtacaatggtgcgatctctgcttgctgcaacctccccatcccaggttcaagcaattctcctgcctcctcttgagtagttgggattacaggcacgtggcaccatgcccaactaatttttgtatttttagtacagatagggtttcaccatgttggccaggctggtctcaaactcctaatctcaggtgatccatcctcctcggcctcccaaagtgctgggattacaggcatgagccaccacacccagcctcttcttcttttttaaagtaagagctggatctagtttgttttcagccttcatctttgtatgcttgatgtttgtttgcacacaccaaatccaagtgtaggattctagaatttaggattatgttttgctttgattttcataatggtactagtggctaataacttcagagaacattcctcagtgacttttgagttctttttttgctattatttctgatagctatgagcacattttactagagatataaattatatgatttctccctaagtgtatttgccttgcacttgtgtccgtatcgattggcctcagtaagtagaatgcatgtttccataggaactagaataataacttgatattactgtgcctagtgtttcattgttccatgaaaacatttgcaaagcaaaagaatgtgaatttatatgctaataatctatcaatttttgctttttaaaaatgtgtctttttgaaaagctgcactttactccaagtaaacctatttctcttcttcattatttttgaggaaaaattgttagtagtaattattggatttttcacctctcattcctctattatataagtttatgaaaactaaatgaaaaaaatgcagtgaaggtaagattcagtgc

SEQ ID NO: 74798 - DNA, 1053 bp, Homo sapiens
agatctttgcacatattatctcatttattaatctcaggataatcctacattagttacacttataaccccctttttataaatgagcaagctgaaacacagagagggcaagtcacttgttcgaggtcacatattaaatggcagattcaaaataagaactcagactttctgaatacagagctgcatctactacactctcctgcctctcattttggcaataaagtttttggcagatggtgatcacagaagttgcttaaagtcacaacttttaagtactcttttttctaaagtcaaattgtatagtttttatcctaaaaaattatattatcacttttgtagtttagaagaggaaggtgtgaaaatttgaaatgttatctattctcatttaatttcctactttccgtggagagtattccatacccagattaaatgtcatttccaattgttgctcacacttaccaaagggaaggtctctgctcagttttgagcagaggctccctgtgtaggagtatgacagtcctcagtaaagttttgtcacctatgtttggcaaaacatcctgggcagatgagcgattcatgtggcaagagcactgccaattgaaaaggtgcattagtatgaatattagcacctctaagtgtttgtgaaatagcaaaggtagaaggactagaatattgacaaagcattttcaaaaaattatactacttctaatagcttaacatgttgatagaaaagacgattcagtgtagaagtctgtgatgattcaattctaagttgtatgtaatagagctaaagtctgtaattatattttagaggagtattaaacaatataaacatgatctctgagtcataaatgtcattattacactgagttttaaatataattcatttataaccatataatagacacataatattactgtgtgacaagaaatactcttagatgtagcaagaaaaaatggaaattacaaacatatgtgatttcaaaataattcttaacatttcttcaggggttattacaaagcaaatgaaaggaatttttacaaggtgtagttcag

SEQ ID NO: 74799 - DNA, 1022 bp, Homo sapiens
caactaataaaagataaataaactggagaaaaacacaatttttagagtaatttggactggagcttatttatttttagccataattgtttctaaagaataatacctaggactagtctttgggcctttaacataatcatcgtataatacatgataacgaattcactggaaatatattagacaacattggttaagtttcagtggtgagtcactatttgtcctaaattgccctattttatttatttttggtggaaaacatggacatgataaattattatttgtagattaattgaaagctaactaatatactgaaatcacaatattcaaatatgtatttagcagaaatgctttgtttttatggttatcaatttgtaatcaagaaagttattcatatatttattgactgcttactgttgtgtcagggattgagctgagttctgatatatattgatgtataagttaaatcttgtccttaaggagtctgaaatcaattgcatttggaaatgggagaataacacagaaatagaaaattatgctaaaaaactataaaactatggaagggataagtaagacgtgctccatgagaagagatagaaagttttgggagtttaggatttctggtatgaggaacactttatggaagaagtaataacttctttgggtggggagggaaaggtaaaggatgatattatgacttgggtgagtaattgagcagttcaattagataaggacaaaaaaaggagaagttttgggaaacacatccatatttattgaagttttgggagagaggaagaataagccaagtgaaagtccatgggatgggatcaagagaggtccccaaactggaacctgatgaaaaaattaaagaattactactgaatggcccacaaccaaacttaaccaaaccaaaccaccaacaaaacaaaccagaagcaaaacaaaacaaaaaaaataaaaagcaaaatggagaaggagtgggtcagagatggaggaggaaaactgtgagtgtcatttcaggaaactaa

SEQ ID NO: 74800 - DNA, 1021 bp, Homo sapiens
gctatataatatgttattctttctttttagaaagtattgatccagggttttatttacattatgtttgtttatttagtttgcaagtgtgtgacgttgaagcctggttgtatataaagatatgtattctgttagtgtacatggttattgttttcaggagggtaaaaaataataacaatcattgacttcactttgaaacactgttactttctactgtcaaagaaaccttgaatatgtagactgaggaggaattgttttaaagcaaggaaaaaaattccagaggaagagctagtttggtttcatagtacatcatctacttatctaccacacacacaaacacacacacatactttttttttttttttttttttcctcaaatgagctgtgttactctttagggatgcttgatgccattaatatgattgttcattttggttattaccttattagaaaggcaactgatattttactcttaaatgtacttaaatggagtaatagcatttataagactcctggcatatagtttcacttttcagaatcatcttttggctaaagaaatttaacagtgagattttaagtagatagctcactaaagaagtaaggttagtgccttggtttgaaagtagcattactttgcttgtaattgtttcactttaattgtattatacattgttttcttaatagttgtgatgtcatttttctctttattactaattttagatactccacacattccacatagattgagaaagccgaaagtaattaggtgcttgatcaatccaactcacctggaccaacaaactccttttaaactaatgatggtctttggggcttaggtgtatatatttttattccaattttataattggctatattatatgtctactgatttctgatttaatgatgaagtatagaatttgtcattttactgtgtgtttttttttttttttttttgacagaatctcactctcttgcccaggctggagtgcagtagcacaattacagctcactgcagtcttggcct

SEQ ID NO: 74801 - DNA, 1020 bp, Homo sapiens
agagtgcccccggaatgacctggagacaaggaatttctcacctgtcagataagcttttaagagagtgtgattgactcggccagttgtcaaaacaactgaccaggagtgcaggtacccaaggccttgtcatcttttagttccacttctgtatgagcatggaaacacattttccaacgacaaaacctgaaagttgcgaccttcctatttttcattcccgggatgctgatagtaggacgttgaagtggtgggggtgatgtccaggaacaccccgaggctggctgtgtccttaagtttgaggctgtggggctctggacagcggccactgaaggcaggttagaagggtcattatccggggccaggccacccccagaggagactcagcccacccaccactgtttacagtagcaatttggattttcaggttgcctctggagccatccagatggatgttgcatggaagggggtgatacagacgtgaggcagagggggccatggcgccagtcttcttagtgtaaacagccagcgtttcaggagtggagacagaggtctctaaaggtgctgaatttttcagccctggaggactggctagcactccttttgctttctaattatcacttgaataatcatgaattgctttctttaaattatttgtaacagagtttgctaaatcttaagggttgtgaattgcagcactgagcacaggaatgttaaaagctccaggtggaaaaaaatcactgatctagaaagttgtgaaagttctagactaaggtaacaatgagtgccaggaatttatttatggaaatttacttttatattacgggtaatgtcaactgtttgcaacttccaagaaaatgacacgttttgtctaatgctgatgtaagtcatatcatgctccttttccacatcagtattgtggaatgtctattgtgggtcagcaggagcactcctaggcactgtgaaagccttgtatacaatcctctccatttggatgcagaccagttaatgaaacagcaatgcttc

SEQ ID NO: 74802 - DNA, 1749 bp, Homo sapiens
gtgaaggcgttgccacgtttaaacaaatctcttttaatgaaagatggaaggttggggcgggtttagaatgaaaagatgctctacgtggctccgcgttcctcctgagagagatacccgggcaaccttgattaactctggactgcagggaagtgacagtctttgaaatgcctgagtgggatttaaactgaaattcgagtgtcctttgtatttaaaacccggatatttttctttcacggttgacatttttcatgtaccgcaaaaatccgagactcctatttaaaccggctgtggtaacagcggtggtgattaactagggtcttagtttgcaaacaatagggataaggtttagttccaccgccctgccttttcgcctccctcattcattggccaactgggttattatggagtctttttggaagtaatccactaatgctttgagcatctgtttctttgggttttattgttttgggcttttttttttttaatttttaatgatgaactatctgaaatatggaactctgtctaacccagtagtaaagtcatgccttctggaatggtttaaaagtgtgccataaatgtaaactataaatgggaactttaaatgtgtacaagttttacatctttattaaaaatcgtcagttttgtgtagcttaatacgaaaagatattttaagttccttttaaggttttaacaccaggatattgtaccatttaaatgtataaatatatttttaaaagtaggacttcataataatcagaataaaaacattccttcatccagtgctggctattccagcacccccattcttcctgctattgaacttttaagtgttagccaggaagaatagacttaaatactcggtgtttaggatagttaaaatatgagcatttttcatatagtgtctttgtaacagagacattggctatacttctctaagcctttctgctcatttcatatgtgctgtcaacaaatggtaatttttaaaaattgatcgctatatcctaatctctttatttttttctacctgaattattttcattggatttttgctctttcttaaatcagtgagtttcagaatttattgtgtatacactaccttgaaggatttgttcaacaatgctgattcctgcacttcagatctcagattctgaatcagtaggtctggaggatggcattgaacagtctgcatatttaactgaaaggttagaaaatactgtgagttttcaaaacactgatttgatctttcctagaaaggcattataatgtgttgattaaagacatggaactggggccagattgccttggtttgaagcccatctccaccacttgatagctaggtgaccctgggcaagctgtttaacctctctgcttcatttccctctaccgtatgatgaggttacctactttgtaggattattgtgaggattgaatgagttaatatatacaaagaccttaaaatagtgtgtgccacatagcaaatgatacataagtctccaattacattgagttactaaactgtaaaaaccgcatcacatacattctctcattaatctttacaatatcgctgaggtagttactatcttcaaataagaaaacaggctaagaggggctcggtaatttgttctcacacaactagtaacacgttggaactgaagtcggaaattagatttaactcaaaagtttatgcttttttaaaaaagtaatatttcttgcctctcttcagtctccctccagatgttgctccataag

SEQ ID NO: 74803 - DNA, 1035 bp, Homo sapiens
cctctacgtgctcacaacaatcttcccaaatagatgcggtccgttttgacctttgcttttaattgttgttttcttcatttattataaacagtatctgttgtcttgctacaatgaaatatgaggaatttaaatgattacactcttctgccacttctacctcatccactgtattttagatccttttaaattcactctaaaattaaaatattattcttacaactctatatcttgatcattacttttaaagtatcttttgacaccacattatgttggataaggaaatttatgctcctaaacctcttctactttctttccctgcttctacctccagccttctgtcagctatgctaatagttctgaaacttttagtacttcatggactacctctatgcatttgccaaatgcaaatacacatctactattgatactttttcctaagatggactgtttctttatttacatgaatgtatttaaggtagaaactttacttcattattgtaatagaaaccagtatcatttactacactagacaccaatcttaataataaatataatgaaatcaggacaattttaccaaattttaaacattaaaagcaggaaggtacaaatgaatataaaaataatctacttataaaaatgcatgcctgaaacctagtctgttctgcattcaaggccctccatactgggtagagggagacaaggggagagaggaacaaatggaaaaccacaggtccacagcatacagcagatgtacctccatccagggttcatggcaagagtttcccctcttctatagtttcagccagttcacaaggactcctcttttgtagactcagctaattctacataattctctttctcttgagctttatgcacacttgcgggtaaaagtgtaggtattggggatggagttaaggtggagcttactggtgtagaatgtccaatatgaacaaatggcaatttgctggagttaatgtgaacagttcccttgtatggaagggaaggaagaggagctgaaatcttttaaagggttag

SEQ ID NO: 74804 - DNA, 1047 bp, Homo sapiens
ggttcaataggttttcttgtaaataatgccttaatgattcagaattcagctagatttagagttagcctgaaatgtcactgaattaatctgaattgtctccatctgtattcaccactcctttttgttaagcttaattgtaggtgttctttctttctttttttcttcctctaacccacctaaccactcactgccttctttcctatcttttctttttctttctttttctgttacttcctggaatacttttagaaactaattaggatatacaaactgataatatacagtgccatctaaatcaaacaatgtaagtagcctcttactttgaccatgaaaaataactactatagataactacttgaaatttgagccattttatgtctgttttttattagactgaatagtatggatatatatttttttaatgcccaactagtttcttagagtttattttctaattgagaatatattcatagttgatgtcaagtggaatttggcagagaggcaaagaagaagaaggagtttatggttttctaatagaagatatcaggaaggaagtgaatagagcttctaaactggtaagtaaattattttactattaagtaatgtcataaatattgtcaatacttgggaagtcttttctatcagtttctgtactagaaatttatgactttgattataggtttcaatgcatattttgtcatttaaatatggtaagttttaggaggacagtttatatttttgcccattaaagaaagcttaattgaccctggataatacatgtgacaatactgacttcacttccttatcttattccaacatgtccatcagaattgaccatcagaattatgatctgatggtcaatcttctctgaccatcagaattatgatcataactccactctgctgttctctaaacctttgatcctgagtcaacccaaccatatacttttttattcttatacctcagtttctgagattggaatgttgggttgagttagaaattacacagctttccagactggcaattcatgatctccatatctcctga

SEQ ID NO: 74805 - DNA, 2224 bp, Homo sapiens
agcataactttttggagaccactctaaatccactgtaggtgtctcaacactttttcatttggtcagaatagagtgatcttagccttttttacaaattggtttatagtattttcctattcttcttggtgagtgttgcctaatttatgtgctttctcttgagatttcaatgaggtgtttatgtatatagcttttatgtttataaacccttcagtttaaaatattttagtaggaaggaaaaggggcttctctgtcttatccacatgttaggctagagatgttttctttatcgaaattgttataggagtgaatctttggtgtctttagattgtttctgggtagaacagtttttcaggaaatttatttaatatacccttaccacagctgttacatgatgaaataattttcagattccccaccaggagtatttatttatgtcttgatcatattataatactcagattttttatgttgtgacccctattttcacatactcttctagaaatgctgtgtttgcaagaaaaatggtgcttcaattggatgtgttgcaccccgatgtaaacgaagttatcatttcccatgtggacttcagagagaatgtattttccagtttactggcaattttgcgtgagttatttaactgttaaatatgaaagttcagtgttaaagaatagtggaaaatacatatcccaatgatataatactacaataaattttctgtttagagcatcagagtttagatataacattatatgtattaccctcccgcccacccttatggggtcatttctatgtgccaagtcttgagaattaccatgtctaggatggacctaatgattagctttcattttcaattttcagcttttggatataacatgaaattgttaatttatccataattcagtgaaaatctccacctttacataattctagatttctgtgtcactctttagaattattgtagacttattcttcacagggctgtatgcatttcgagtaaatcaaaggcatgtaaatttgattgagtacacaaagtaaatattatgccctaggatacccctgaaaatatttgcttcctgagtacaactttaaacatcaaggttttatgaattttgacttttggtatcataagtattccatttcttttagtagttgtgtttttgacctatttaatggattgttatcatgtaagaaaactacagtttagaaaatacaaatggaaataaagtgaattgggaataggttattaattgcattttatgtgttatatgactaaactattttttaggcgtaagttcctgcctcccttaattttatacgattttgagcacaacgtatgcacccatttgttgaatacaataatgtatatactgtattgctgacaatattacacaggattctcaacataattattagtttctgaaattctgtataagtaagtctcactaccagaaaagttcagatttcgaaggtccagctctctccttggtcatagattgtgagacttaatttttagtgccaaggctccagtctgttgtaggtgaattatgagacagacacaaatgaatttcattttatatatgtgaattacagtgttttccaagttttgctttgcagttcatgagatttttttaaaataatttacatttttaggtcattttgttgggaccatcgacctgttcaaataattacatctaataattatagagagtccttaccatgcaccatttgcttggaatttattgagcctattccaagttataacatattacgaagtccttgttgtaagaacgcttggtttcatagagactgtttacaggtaagatacatattttgtaagctttctctgattgatataaaattatggcttgctgatttaaattttaaattagaaagaattgacgtgtatattacctcttactacttgttacttttaaaacagctttaaagcacttaatttgaagcagattttacatacaaaattcaccctatttaagtatacaattaacattcaataaatacttcagatgaaactttttaatgtatatttatacttaaagaattttgttgtttttacctaaggattttgtttgatttcacaatgaataaactagattttaattcctaagtttcatttacatatttatgctggaaaaccaggatatttgaaatgataagaagcttgatagcaagttaagatatttaaacattagtaggcttttcttcc

SEQ ID NO: 74806 - DNA, 2539 bp, Homo sapiens
attccagcctgggccacagagcgagactccatctcaaaaaaaaaaagatgtaaattctcttatttcaataaagtcttaaaaatactaacagtactaaaagtagtaaagtttgactgatacctttttttttttttgtatggaccttgaacttttatacttaggattattcagttaaaagtgcaggatgaaggcagggcacagtggctcatgcctgtaatcccagcattctgggaggccgaggagggcggatcacctgaggtcaggagttcgagaccagcatggccaacatggtgaaaccctttctctactaaaaatacaaaaaaaaaaaaaattagctgggcgtggtggtgcacacctgtgatcccagctacttaggaggcggaggcaggagaatcgcttgaacccgggaggtagaggttgcggtatgctgagatagcaccactgcactcctgtctgggcgacagagcaagattctgtctttaaaaaaaatgcaggatgaagcctgttttgttggggaaatattagaaattcggttaatacttgcaaagaggtgtttataaaaggatcctagagagtgcagttaataaacaacattgtgaagtgttatccttacctgttcatattatatgagaatctttaaaaagtaatttgttttaattaagggtttgtatttggatgaatataattgctgccaaatgtgtcatcttgttaattttgtagcagtatgttatttttcataagatttttctcatttatttgttaataattaagcaaagaaaggttctcatacttgacctagtatcattaaggccttttgtgaacactctgaaaatactgagttttaattttgtcgttaaaaaagtagaaataatattactaacaaaaaagactaggtctactttatgcaaatataactgaagatcacagccacatggacacctgtctatgatgtaagaaatatcactaagcaattattattatactcgattagagcatactaaggatggggctaattcttgagtcactctctctaaaggagttccaataacttttgtactctggtatcggtcttaactgaaataacatatggagtcttatccaatctagatagctgtatgtggttaaacaaatgtcattatttgtaaccactacaaataatatacattgggattttgggagaagagactagagattgctatcaaagaaactggtaaaaactttccactctgtgtctacagaattgtcactatttttgttcagcttggatttttccatcattgctctagtcttgttggtatcttccatgtgtcttatcctgttttttctcctctataccagatacttccttttatcgtataccatatttagttaaagatcttggcatctgtctgcaattgctcaaatatcctttaggttcagagatttcaataacctgttgtttccctcccttatatgggtgggtgggtgggtgggtgtgcgtgtgtgtgtgtgtgtgtgtgtgtgtgtgtcacttgctaattgtctgaacctggaatcctctttattagcttctctcttcaccatccgtaaatcattccccaagtgtaatcaagtctacttagtatattctgtgtatcctttttattgtaatcctactctcactgctttaatttcagacactctttttggtaggagaccactagttggtctttctctagggccttagtccctatcaatttattcttcatactactgtctttaacttacctacctagcctctacttagttcagtttggcaagaatgtaatccttaactatattattaattgtattttcctaattacacattctctctcttgccggggaaacttcatatatattattccccatccttggaatgtcttttgtcctattttcctggcaaacctctatttcttcttctaaacttagcttttgctttactaaccctctgacataattatcagtatagacttaggtactccttcttgtttctttcatgtgtatacttaaaatactcacatacttttacacagtattgtagttttatacctgtatacctactcactagaattccttgaagtcgaagctgtcatgttttttggtacataataccaaatgttgtttgtatttttggtacatagcatggtgtttggcatctataaagcaggagttaactatctgttaaataaatgcatgctactagtttttactggggactggctcttctttccagtaggcttacagtttcctgtttccttctgagtaccctctgtctggtgcttctgtatctgtatttgctatagcaatgaggataggttttatacttctcccgttttgggaagaaagctgtcttagagattgagttaaaaacagaaccagtgatgatttttatgtaacatttaaaccccatttctagatgaggtaactcaggagtttcatttttttctcacattttaaagggcaacacaacatttagtaacattacacagtaagtaaaatgacattgcacaataagattgaaaaaaatatatgggtgatg

SEQ ID NO: 74807 - DNA, 1150 bp, Homo sapiens
tctcctaagtatataaaagtttttattttaggccaggcatggtggctcacgcctgtaatccctcccctcactttgggaggccgaggcgggcagatcacccaaggtcaggagttcaagaccagccttgccaacatggcgaaaccctgtctctactaaaaaatacaaaaaccagccgggcatggtggcaggcccctgtaatcccagctacttgggaggctgaggcagggagaatcgcttgaacccggcaggcggaggttgcagtgacctgagattgcaccactgtactccagcctgggcgaaagagcaagactgcgtctcaagaacaaaaaaaggtttttatttttagattcattcctgatcctcttatgtaacattatttataggtcaaagcatattttatatcttcttttatagagatgcttcctgggaattagaggaaaacgcttatcaagagcttctgcagcactatgagcgttgtgatgttcgaagatgtcgttgcaaagaagggcgagactataatgcacctgataggtatttctgaaagttcagttgtgcttagtggttccttgtttaaaccttctgctgagaaagtagattttatagttagtgaaacgtagtttttctcttaggatgttagaagtttaaattgagatgagggatattttctaatgcacatttacgtctgtttacagagaaatttttgcagttagtatagttgtaacctatttctctgttgtcttatcacgagactattttctagagccacactgtcctatctggtggccactagccacatgtggctgttgagcacttgagatttcccttttccaaattgcaagggtgctgtaaatacataccaaagacttagttcactagggctgccattaacaaaatgccacagactgggtggcttaaaataaatttattttctcataattttagaggctggaagtttaagatcaagttattgacaggtttggttttttctgaggcctccctccttggcttgcagatggctgtgttctagctatgtcctcacacgagttgtccctctgtcggtgtgttgtctacgtcctaatctcttttatttttataagaacaccagtcatttggtttagggcccacctatctgaccttattttactgtaat

SEQ ID NO: 74808 - DNA, 1047 bp, Homo sapiens
gagcagaatactgggagccttgtttcatgaaacaaggttgagtcagctactacttaattgtgaagattcagctgaggtctagcctgctctggaaagtttcctgttagcagctctcctcattcctgattccctactctgggctaggggttcccttcattgtgcttgttacaatatagttggcgttatttaaatttaatgctattaaaccaaaaattcttagaaggcagagatctcattgaaggtatcaagtaacatgtattcttgcctgtgttacttgatctagtgaccctgattattcattcgttaacaccaataatatctccctcaagagttttgctgaggcacagatgaaataatgtatatagaattttaagaagcaatacattcataatattgatatttttcaaatttattttaggctgttcttaacctatatgtatttcttgtataccattggtctctcaatcagtagctacaactcttctttccaggacaaagatattgtctatctgaatgactgctttgtaatctcacgccctctcatcctagtgagaagaaggcagttttagtgaaaggcagcatggttagtgcttaagagcatgtctgaagctagataaactgaaatggaatcctcactctgagacttggctagtgtgaacttgagtggacaagttattgacccctctgtgccttgatttcctctttataatggaagtgacagtggttctctctaccttctacaattgtgaggattaaacttttcatatgaacacagagagaactggacctggagcataataagcacttaggttagctgtttcttcctccgcactgttgtcactgggcagagacacacacatacacaggacagaaattaacatacgcacacccacacagagggatgatatgcccccacctctggggtagggatgatatctagttacctctcttgccactcacacacacggggagctaaatctgtttctaaacagagaaggcatagtcatacccaacaaaaaggctggagccctacactacagcccacac

SEQ ID NO: 74809 - DNA, 3258 bp, Homo sapiens
gatatttagagaagcagataatctttttcttcctttagtaaatcgattgggcgggtgtgtgcgtgtttgtgtgtaagaaggcaggccctgtggacattgctagtggttgaaactagaataataacaaaatgtaagttctgcttttctttgtgtcctcagcaaatgggaaataaagcgctgtcagtgttgtggttccagtggcacacatttagcctgctcctcattacggtcatgggagcaaaattgggagtgtttggaatgtaggggtattatctacaattcaggtaatttttttgtaattttgaataaagtttttattcaaatgtatatgatttaaaagtttttacctatatctctattatgctaacatggaaatttaaatctgtaggagagttccaaaaagccaaaaaacatgtattacccaattctaataatgtggggattacagattgtttgttggaagagtcatcacctaaattacccagacagtcacctggatcccagagtaaagatctactgaggtatgtattttgaattggagaaatacataaaaatctatttggagaaaattatgataggaaatgccatatacatttagaatattaggtgatcatacagtagtctagaagaatgtttttcagccttcaggacccaacatttgatcatgaaatcaatgcaaccagcattttaaagaaaatgaaatgggatagaatagaatacaaaataccaaactgcatcatacgtgggaaaagtgtatctatcctactgcatcatacgtgggaaaagtgtatctatcctaattatttttttgtgtactgagtaatgatgtaaaatatattttttattatagatcactttcaagatagtttgaaaaacactggtctggaaaatgtacttaaaatgttatttgattatagagtaagacaggaaagtaaaatatcaagcataccgtgtcaccttattaaaaggaaagaatcctatttaatatagaaatttttttttcttttttcttttttttagaaataaagtctcgctctgttacccaggctggagtacagtggcatgatcatggctcactgcagccccgacctcctgggcacaagtgatcctcccacctgagcctaccaagtggctggaactacagatgcatgccaccatgcttggctaatttttaaatttttgtagagatggacatcttgctatgttgcccagactggtcttgaactcctggtctcaagtagtcctcccacctttgcctcccaaaatgttgggattacaggtgtgcgccactatgccctgccattttttgatgttataatcattgtttgcctgtttactgtcaatggcaggagtctaaatgtcagctcttccctttagaaagtttaaggcatacatactattatcaaattaatttctgttcccatgagacaaaataggccgggcatcgtggctcacgcctgtaatcccagcactttgggaaacctaggcgggcggatcccgaggtcaagagatcgagaacatcctggccaatatggtgaaaccccgtctctattaaaaatacaaaaattagctgggcatagtgttgtgcatctgtagtcccagctacttgggaggctgaggcaggagaattgcttgaacccaggaggcggaggttgcagtcagccaaggtcgcgccactgtactccagcctggtgacagagccgagactctgtctcaaaaaaaaaaaaaaaaggtagcaaaataataagttactttcaaaatcttaaacatttaaataagactggaattacatctttataatgttgggtatttgttcagctgtagttaagatttttaagtttatatagatttgcaaaagagtttttagagccttgctttacccaatagggaagaagtagaaaattagtcgctaagcatgatgaaatactttcttgttaaaaataatttcaggctgggcatggtgactcatacctgtaatcccaacagtttgggaggctaaggtgggaggatcatttgaaccctggagttcgaaaccagtctgggcaatattacgaaactctgtctcaacaaaaatattttgagaaaatagccaggtatggtggtgtgcacctgtagtcctagctaggcaagaggctgaggtgggaggatcatttgagcccaggagttcaagctgcaatgagctatgatcatgccactatactctcacctgagtgacacagcaagaccttgtctctaaaaagtttcaagtttaaaaccttagaagatagtaaagagaatttttgtgaaaacatttgataactggatttgcagacaggtagaatattaagtactctttcaaaatgtgaagaatatctgttttactatgccacttgtgttagctctactgaaaaatctgttacaaatattgttataacacttttagtatcaaaatagatgttcacattattttaaaataattttaatattgagatttccaaagacgctacaccagggaagcttgactccttgctcctgctttaacatgcagtcatatttagaagaatagcatcagcattcccctgatccaggcaggagcaaggaatcaacctgctataaaaaaggtatgtttctgaagaattatcttacttccaaaggactttcgcttttattcaacatgagttaatgaagagaggatcataagaaaaaagaaaaagcaaaacctggcctacactagggcactgtaacgtcttggggtgggacagattcatacttggtatggaaaatgatccatgggcattgcccaaaacaagattatttttgagaacattaattccagttacagatggagaaactgagggaaggagtgattgagctggtttatatcgtcacttggattgttaaaacagattgctgggcttcatgccgacaggttctgattctatagatgcgctgtagggctcagtaatttgcatttctaacaagttctggggtaatgctgctgctgctgctgctgctggtctgggagcacactttgtgacttactgatctagactaaaaggtactattttaggaattgtgaattctgtttataatattagctctactgttaattatgactttatgatttaaaatatattgtgtaatctctcaaagacattttcttatatagtaaggagagattacatttgctttttttaaaaaaggacatagtaaatgtgaagtaaactacaattaagaaagttaattatagccattagccaggaaggtgagagtttgagc

SEQ ID NO: 74810 - DNA, 1394 bp, Homo sapiens
cctgtgggtcacactggtctcgaactcatgacctcaggtgatccgcctgcctctgcctcccaaagtgctgggattacaggtgtgagccaccgcgcctggcctgagattctgattcttaaaccggaattcactggttggtcaaatttgagataattatctatcaactttcttgtacatgattctaatttggtaaaagattggggtgaggaatcaagaatttaaaactaagattatcaaataactgtttttggttctagtagcagccattgttacaattttgggtgggaattggggaagaatatcctattaatctttttttcccctcgtcttgttttattggctatataactgctgtttcacataaagtactttaaagtacttatctctatatttaaattcatgttttataggcaaggcagcaaatttagaagaaatgtatcaacactattaatagagttaggattccaaattaaaaaaaaaactaaaagattgtatatcaacaaagccaatatctggaatagtgccttagatgcattcagaaatcgaaactttaatccttcatatgcaattgaagtagcatatgttattgaaaatgataattttggaagtgagcatcctggatcaaagcaagaatttctgagtctcttaatgcaacatcttgagaactcatcattgtttgaagggtccttgtcaaagaacttgtctctaaattctcaaggtaattattttatttattgttgtatataccaaatatcacatgtatagaaaaagagatagatagctggttagaattgatatttaatacctgtgctctaaatatactgttcactttgttaataaactactgatagaatcacaggaaagtgggaagggggagtgatagtttaaaaagtaaattttgtggtgaaacattttttatttaagaatatacattctttatagcaatattctccttaaaataatccataattaagtgtaactttatcttaactctaatttcattttaatagagtggccaaatggggatgattatttgaattcttcctgtttgtatatttggaatttgcggttaacatagagtttttataacatagtttcctggtccacatgtaaccaatttttcagtatacttttgtttgcaatatttttttttttgcacaattatgtatatgatggttttctgtcttcactattggtgagaacttaaggtaattataacaggcatctcaaaacagtgggtaattctggcattctcttttaggggcttttatactacttttgctgtaataggaaatttgaaagaaaatgagaaggcatttcatttcatttgaatttcctactatattttctgtaaacatcctaaccattgcctaaagcatcatttttactctgta

SEQ ID NO: 74811 - DNA, 1039 bp, Homo sapiens
gtgctatgacagtataacatcactaggtcataggagtttttcagcttcattataatcttagggaccaccttagtgtatttggtcattcttgaccacaacatccttatatggtgcatgactgtacaccaaagtgttcacagtggttattatggtggtaggtttattgtgttttatgttttctacaatagatttttactttatattcagaaaaatgtgtctttttttatattttaggtaagatctatattttctacataatgatagcttctaagaattatatttatctaatgcttagatttttggactaatttttaatataaaaaatgatggttatcttataataatagaagtgtatttgatatattttcatctgtatttacagctctgaaagagaatctttactatgaagctggcaaaatgcttgccatttctttagttcacggtggtccttcacctggtttcttttctaaaaccttgtttaactgccttgtttatggaccagaaaatacccagccaattttagatgatgtttcagactttgatgtggcacagattataatcagggtaagcaatgtatctgtttattaaaatgcacactacattctaggtatcttttaatgtaaatgactgatctgcaataaaataatagtattatctatgaaggagttagggattgtaaacatatatttctgtttaccagtggagttctgaaccagttaaaagatagttttaaaagtcagatggctggagattaaagtgccacgtttaatgttggtaaaaccagttggataatgtgattttggtctgtgttcaccatggcttgtgaatactcctcagaaatacatggatttgcctgccttgctagagacaacgtgaggcagattccctattgcaagctagaaagcagatgaaagtgcactttgatggaggccgatgggtctgaagagaggaaggatttggcttaccagttagaatacttttccttccttctatagggaggtatgaatgatagatggagagaaagactaggctgaatttc

SEQ ID NO: 74812 - DNA, 1009 bp, Homo sapiens
acccacaccaggccttttttttttttctttagaggggggctagctgtgttgcccaggatgttcttgaacttctggcctcaagcaggcctcccacctcagcctccctagtagctagtcttacctagtgctatataatttttcaatgtcagttatttccttttttataaatagtttcacgtagtaaagtggcattatactctggatttcttgaaggcagaaatagacaaatttgttgaactggatgatcagacatttattctagaagaatatttcttggtttacttttactgcacccatatgtactaagaaatttgagtataaattaacaagtatcatttgaaatgtgcatgtcactcaaaagtaaatgagtaaagtggctgtattttctccttcattacagataaatactgcaacaactgtagctgacttaaagtcaataataaatgaatgctataactaccttgagttaattggatgtctcagacttataacgacattaagtgataaatatatgttagtaaaagacatacttggctaccatgtaattcagagagtccacacaccctttgaaaggtaagttgtttctattaatatatggctctttcaaattacatgtttaaagtggttaattatcttgtaatgtgagatatatttggtaataagtgagatgtttttctcagaaaaaaatttaaatgctatttttaaataataacttaagcctttttaggatggttactgttctgatcatttaataagcattgtgtaggtcgggcatggtggctcactcacacctgtaatcccagcacttcgggaggctggggcaggcagatcatttgaggtcaggagtttgagaccagcctgaccaacatggtgaaaccccgtctgtactaaaatacaaaaattagccgggcgtggtggtgggttcctgtaatctcagctacttgggaggctgaggcaggagaattgcttgaacccaagaggcggaggttgcagtgagctaagatcatgc

SEQ ID NO: 74813 - DNA, 5815 bp, Homo sapiens
acatgggttttaaatttttatgtaatgaagatttatcactcttggtaatatctgggaaactttatttttataataattagctttgaagtgtaaaacacttcagattttgatgtctttcttactaataaaaacttgttagttttgaaactataaagccaaataatgtaggtacataaaatattcatttgatattaatgtatttgcttgttatggatttgaaagtatcatgtgtagtatatccatatcttctctttttcctcacatctgaaaatatgattgtctcttgtgggggttttttggttgttttttaaaaatcattagctgttttgaaaacatgccagataaaatgctggaaatattccctaatataataccaaacacacatgtatgaatgttggctcattatttttcttctcttaagttttaagcagggtctgaaaacccttggtgttttggagaaaattcaggcttatccagaagcattttgtagcatcctgtgtcataaacctgagagtctttctgcaaaaatccttagtgagctttttacagtacacacattacctgatgtgaaagctttggggttttggaacagttacttacaggctgttgaaggtatgtggatattttattttacttttaacgatctcagaatatttgtttcagcatatttgttgggggttttatttgtgtatgttttgccttttggtattaatattaagatgctaactccgtatttacaaaagaaagttatttcaaagcaagtttatatgactgaattaaaaataatgagaaaagattacagagtaaatttatattttgtaatttttttctctagataagtttaggtgaaaggcattctttctagaaaacattattgtcaccgcatagaacagttttaatcctaataatctatttcatcattttcaatttgaagttaaactaaattattcttcacccactggtcagggctataacaatgatatttatcattgagcattagcagtgtaaaatcattctgcctgatagagtggagaagaatttaacttatagttgaaattttgtttagctagatttttggttttttaccgtttagtctttctgtctgtatttgttatatacaataagtagttgtactaaatgattgtattagtccttctactttgagattcatttatgtactgtttgcctgttactacatctgactttgtgatttagtttgcccaaaacaaatgtgggagtctgtgcctttcagtattccaagtctatttggagaagaatctatgatgatagcaatatataacatggatttacttttgtttcttttactcttttattggtaaattttttcagatggtaaatctacaacaacaatggaagacattcttatttttgcaactggttgcagttccattcctccagctggatttaaacccactccttcaattgagtgtctgcatgtggattttcctgttggaaacaagtgtaataactgtttagcaattcccatcaccaatacatataaagagtttcaagaaaatatggacttcaccataagaaacactctaagactagaaaaggaagaaagttctcattacattggacattaaaatgtttccttgaacaaagagaagcttctttaaaagctgctattgataactctcttttatttcactaaccttttcatcatcactttgaacaaactagttagcttcttgacctaataaaatttatgatatgaatataaaggaatattatagccacttaggctaaaaaaaggttttttttgttaaagcatactagtcaaaattggtgataatttctcattttcttgatatagatacttcataaacctcaatataaatactctcaaaatggttgtatggattttatttaggtatggtagcatggttaataaaagtaaaaactgttttactcacattttttgtaaattaggattacatatagaatgccacaatttctctaggtttattcaattttcaaattattcctcattttattttaaagcattaaatagaaaagctaattggttaaattttgttatataaatcagagtcatatattctgggatttgtgttactatgcatacttttctaggatgtcaccaaattagttgtttaaaatgtttttagattactgatttatattaagatgacccacactgcaattagattatgcctagtgggaagtattatataaaaagcagaattaagctgggcacatgtgcttgtaatctcagttataagggaggctgaggtgggagaatcgagatactcagccagcctggcaatgtagcaaagactccatctcaaaaaaaaaaacagaattgcacaaattttctggaatctatggacattccatgagcttaaacacttttgaggtggataacatttagttgaaaatacctaagaaagtgtgtcttctttaaagccttggctttaatcatgggaaattgttgttgttgttgttgttgtttgtatcctatgtttggtattctgtatgtctgatccataatcattttagatatttgaatgatctctgtggattggtaggtttggccatttgaccattatttattatcaagttggttgtatgctaaggtaagttgacgccatagcattatacagttatcttcattgctcttgaatgatatctgttatataagcaatgtataaataaagtaaaaaggatagaatgaaaaacccattctaatgtcaccactcagagataagtaccgtatttctgtgtatccttctataaactctttacttctgtttcctttattttttaactttaataatgctactaaaagacaatacctaaaagtaactgtactaacaaagtgctaacaatgtgaaaatatatagtcccatagtcatgtccccatatttatactcccacagaagaaaaaattggaaaacaaagtctgatgtccttaatctattaacatatttaaatgatataatggttcagttttccatgaaagtaaatcattatgggaagtaaaatgttttaaccatatttttcttaatacacaaagcaggtgtcagctgttgtattctcacccttcttaagaaaaatcattacattattgatattttttaagtaacagaatagatttgaaagagataatatatctcttaataccaaaggaaaactaaaacataattctagtgtacttttctttgttccctcatgtctttttcaatctgtacactaacatacctagcaaatttgttttactttaacttgaaatatttaagaacattaaacaagacatttctttggctttggttgaatttttttgtctcaccaatagtaattgaaagatcaattatcaaagagtttgaatagctaatataaaccccaaagtcaccatacagtttttattccaaatatgttgataaaaagatatttgtttctttatccaccttatttttattacagctaaaaaccaatacaaaccaataaaacctagttaaagctattttctggtttttagttgcaattaatttcccctagggtagaaattaaagctgattaagtcacacacacatactttgttggggtgggggtggcaggtggagaggcagtgtacttgggttagctacaattaaaaacagtatttcaattcctcatttgacttattttatatatagacagggccttagtgataagatggtgtaaataatttaggatattcatgttttaaagtgaagcataaatatttattttgcaaaatgttttctagtttgaaggatgttccattattaccatttttagattaatctgtatggtcaaggaatatcagagaaacctgtaggttatttattttctgcagtgtcattttgtcaaatggttggtattataattgttcttttcttattaattttataaccagtgcataattcttacattagattttaaaaaagaattatgctataaatctttataaatgtgtacatatatttcttaaatattgcaattgcctaaatgttgtatattttaaggctgttttctcttgctcttaatgttgaggaaaactataaattgatctataatgcatctactgttaatggttttggttagtttgatattcattgtttttaaacactttccaatatggaaactttaacaccttttatacaattctctactattcaagatattctttaaaatatctcaccagaaacttacaattttatactttgtaatttttagtttctgtaatttgaggaagtgactttttttgtttgggttaagtaaaaagcctttgattgattaccagcatgagaattcaccttggtttctattttatgcatttgtaaatttttcccctaattatatggaagctattggaacttttgtattcagtgctaaatactaagtcaaggggagtatattaggtaagttttttcagtgactgtgcctttagcattcagtcattataagaaaatgatcagaacaaaatcattacattataaacatgtaattcttttatatagtgattatcatgtactgcattgttactttaaaataagctattaaactagtttttatggttcaagtaatgcaatacaaagtttcatgcttcaagtaatgcaatacaaaacataacccatttaatgatgaattacttgaatgtatattatctgtggtttaggaaaatttggattgtcttgaagagactcagttttcaagttctgattttgaccattatctcttctaattcataaacatatcccagtacctacactatgccaggtattatgctaggtgatcgtttatatgtcagcctatttcccccccttttaaagactgccagattaaccaaaaagcgtgacatttataacaatgttttataaataaataaatgtgtttatgccactaaaggtaaactgcctatttaaactaagtaattttttgggatttaataagattaagattctgacgaaactgaaagatacaagattcctttactctccacatttgagagatcctataagcaagcagttagtgtctgacacccaggaacctatagaaatgagggaatctgtgttaaaactatgtatcctctaatgtaaaatagcttaccagaataaattatttaagccaaaaatctggactcagataaatggctatagtaaattaggttaatgaacaatctgtagccatagattattttcagtctttctgattctaataaaacaaataccttattcagtctcagccttacaagggctatttgtctatggttgctgttcttctgtgaggtgtatttttctataaatttattgcccacattctgtgcacttggtcaggagtttttatcatttcatatatatgcagtgtacatcaattttaaaattgtcttcgtggttttaacatgactcatagtcttgggagagaatctgtgatggaactgaagtggctcaatgatggatttgcatttgaaagtggaagtacccaaatgagcaaaattgggctctcagacattttatatttcatagagactgtagaatgcagtagaactttcccatagggcagaaataatttgtttagttggaacacacctagatcattgaagattccttcaaaatattagtaatagtactgaagacacacatgtattccagttaatttcttaatgaatgtgccaattagctataaaaatgagattacataatttttttttcttttttgagacagaatctcactcagtcacccaggctggagtgcagtggcgcgatctctgctcactgcatcctccgcctcccaggttcaagcagttcttcct

SEQ ID NO: 74814 - DNA, 1148 bp, Homo sapiens
atctccattttacaggtgaggaaagtaagatagaggtaaactaacgtgcctgtttcttgctttgcctgcctgaaaaatctttattggtctcctgaaaaatctttattgatcttttgaaggtcatcccacaagccatctcctttcttcctggttcactgtcccctctatccataccttcagttcaataggtagaatcagttgcctcctgctccgtgttactgttgttcttcattgaatgcgtcttcgttacaggttcttgcacatcttcccagcttctcaacattgcagggtcccattagtgttctcatctagcgccttagctttcagtattatctgtatgttgatgattcccaggtttatatccctagtctggccgtcccatctgaactcagtctactccatatcagttaatggcagttccgtccttttagttgttcaggtcaaaaaccttgaagttttcttgacttgtctctttcatgtctcatgtaagatctttcagtaaatcttgtcagttctactctgaaaatacatccaggatctgactgttgtcattgctattccgaggtcctgtccaccatgaatttctgcagtaacctatttggtctctttgcttttacaatcctgttctccttcattatttttcacacagtacccaaactgatcatgccatatgtttgctcaaaatcttccagcatcttcccatttcaaccatgataaaagccaaagtgatcttacagtgttctacaaggctttatacgatctggtttccatgtagcttttggacctcactccctatttctcttccctctccttgaacccaccaggaatgctcccaccttcgagcctttgtatttgtttcttctttgtggagtactgtttcagagataatctccatggctcactccctcacttcctttaggtctttactcaaatgttaccttctcaggaggctttccccaattattctgtttaaaattacacctcaactccatcttcccctttcccaatcttacctttcttcaaagcacttaccatgatctacataccatatgttttactttttttttattttattttttttatcccccaattagaatgaaagctacttgaggacaggcgattttattcactgttttgttcagttgcta

SEQ ID NO: 74815 - DNA, 1050 bp, Homo sapiens
ctccagcctgggcaacaagagcgaaactctgtctcagaaaaaaaaaaaaaaaaaaaaaagaaagactgatctttctcactaggccactcacacttaaaaaaaaaaacagacagacagactgatccttctcactagaccactcagacttaaaaaaaaaaaaaaaaaagacttaccttaatctatgctttcagccagacagtacacaggcaacagcatcagtatattgaggccattgcaagttcttcctgaacatttcccgcgatttcatctgtggacagatgcttattgtgttttgggaaatctcccaaatacatgtcaattagctgtcgatggaatagtcttacaagatctgacccctagttctacacatatagtcatttggttaatcagttttactagagttgattagtttattttgctttggggtagtgaatgatgatggaggaaaaataaaatcctaaaaaacaatgacaatatttgataaaactttttattttcagtggctttgaagcgtatgttgaatttcaatgtgcctcatattaaaaacagcacaggagaaccagtatggaaggtaagagtttatcttaatgggaactgatttctgtttttctcagcccttattggtggtaattggagggaatttattgtaatatggaagaagtaacacatattagttatcatgaatgttttatccttatttaacatgatctcttaatatgaattgttttgacagacattctatggagtgagacaagtgataaaatagtaattttcatctagggagtccagttgatctctttggtaggatgtcactgataggtctttttcctggttgatattttgttccttagcttttcaagtccagactttggattttataagcttgctcggagttagtcacattcagagggcctggattattttaacaaactcatgagaaaatgatctgtaaactgtaataccactttaataatttatgagatataaaacttaattgaaccagaaagcaatctacaatcttttcctttgagaaatactggagagccttta

SEQ ID NO: 74816 - DNA, 1101 bp, Homo sapiens
aactggcagcatttttatttctcagtagtatataaaatatattttaaaaattatgttttaaaattgttaccaccttgggtttcatgaaatacggtatttgatgagttttcctttcatttttatgtcagactgaaataagcaggtttgctttgataatgtgttaatttttatggactgaagtaaagtttaacttcatgctatccttggaaattgtggtttattaataaacattgagtgccattgtctctgtactaagtgtttaactcctttatttactaatggaaggactgaagtttagaaggcttaagtgattgtctcacatttgtacaaccagttaataacagagccatggccacattgcttgaccactaattctgtgctgtttatctactgaactgtaatggctcagtaacagtaactaacagaagtgaggccttactcagtacttcattcaggggtaataggatagtctaccagtttgagagtctcgtaatctctgcctaacttgctacttgccaccagagcatggaaatattacacagctaccatggtgaactcttgtgtactttgcctccaaccattctcctctatttgctggagaatactgtatcagttactttataccctgcaagctggtttaggctaatttgtaggaaacagtaattacaagtttccacagtatgaaatggtggttgtagcccattagacagttggacaagcagtgtgaaaaagaccacaacctatggcagccatcacattatcattcttgatatcagtggcaacagttattaaacacagactcactggcagcatgtgcctctttcctctctctccttgattatagaaggatgactagagagaggtgaatattcctcatataagcatggtttgatgttgggatatttgtatggaaattgttcctaaattgtaaaaggagaaaactgtaaaatgacttaatctataagatgcttacattctcttatgaaacaataaatagacaaaaatagattgtctttaatttttaaggaaacatttatatacctttcatttaaaaaatatatttgatttcatgtttggttaaatttttttatagcttctaaa

SEQ ID NO: 74817 - DNA, 1023 bp, Homo sapiens
ttttttcattgcgtcccctagctttctgattttcccctcagagagccacactttcctcacattcacccttcccctctgaccaccacatttctatgaaaagtgggaataagattgattctgaatatgttttagttctcattcaaggagagtgttggtagaaaagaatgtctgaccataagcagtgctaaaagtgtgagcagaatagaacaaatgaagactaacaagaaattagggtcttactaatgctaataaataataacaacactgacatgggagaaagataggttaactcactgattaattgcaacaagagcttttagagcactggttactgtccttgagctagtgaactcccattttgaggaatattgttttaaataagtgaataaaaaaataagttttagttccttatgtcttctaggcttttacactctgatcgagatcctattccagatgttcctgcagtatactttgtaatgccaactgaagaaaatattgacagaatgtgccaggtaatatgggttcttattttctggactcctgaatttggaaatggatttttttttcaagaaaaattcctagatgtccagggtgaaaaatcagaaattcctatgcctactttctcactctgatttttgagactatctttgaattccaaatagcctgaaagacttaaaacttttggctgaagaagtattatacagtagtcctctcatgtccacagtttcactttccacagtttcagttatccacagttaaccaggtactgaatatattacagtattttgagagaccacattcatataactttcattacagaatatattttctgtaatatatttcattacagaatatattttataattgctctattttatttctagctattgttgctaatcatttaccgtgcccaatttataaattataaattaagttttatcataaatatgtatgtataggaaaaaacatatacggttcagtactacctggtttcaggcatccactggagtcttggaaaataac

SEQ ID NO: 74818 - DNA, 1974 bp, Homo sapiens
ttagctatgatcgcgccactgcactccagcctgggtgacatagcaagaccctgtctcaacaaaaagcaaagtattgtggtgcttgcttcagcagcacatatactaaaaaacaaagtattaggaattgtcaatattagcatactattattcatatcaaaatggcatatactggaaagtagtagaatattttagatgtatacactggtatcaagagttatgtaatttttttatatgtatatttacagcttccagaggcccttattagtccttgttgacagaaacatagatttggcaactcctttacatcatacttggacatatcaagcattggtgcacgatgtactggtaagagactaaatgcagcacttattactgaaatatagtaacatgcagtgttccctttaatttaaaattaacatcatggctacagaaacaaaaatgagaaggatggaactgagacctatgaacaaaacaagtgatgggatttggtattactgggtgtggatgctggaaaatgtgaagcattaaagtttagtttcaaatttatgatctttatagggtaaagtagtggttttgttggccatggaaaagaaggaaaagaaaacaattgaagaaaatggattattttgttttatttttaattttctaaccgaataagtaaataaatgtgttctcccttaggagaaaagcagtaatttctcccttttctctgggagtcagttaaacctcattttacgttaaaaaaaaaatagtattttttatgttacaccatatgttttctgaagtaattccacatatctgattttatgcttatagcaaaaatttgtatttatgcatatgtaaatttagctgctaagtgttgtgtttagcatgtgacatacacaggtgataaaacacggcttcagtcttcaaagacaatggaaagaaaataggtacacaaataatttctctatgagacactatgtaatcaggccagaatagtctctatttgatagacagacgttaaagaatttgaactcaaatcatgggctttgttaaaactaacactgtagtttactaactcctagctcaggactctagggattacactatataatcatatcatgatagtaaagactgcccaacatgtcatataaacagggaatgaaagctgagtgtagtggctcatgcctataatcccagcactttgggaggccaaggcaggcggatcacatgaggccaggagctaaagaccagcctggccaacgtggcgaaatcctgtctctattgaaaatacaaaaattagccaagcgtggtggcacacgcctgtaatcctaactatttgggtggctgaggcttgagaattgcttgaacccaggaggcggaggttgcagtgggccaagattgtgccactgcactccagcctgggtgacagagcaagacctagtctcaaaaaaaaaaaaaaaaggaaatgaaagacatgcaatagatgatttggtttatttctttaaaacctggatattggctctaaagtgtttatttaaataaatcagatttagaattactgatggaaattggccattcttctatgccatgactctaggatgagtgtcgaagaaatagcagtcaactttaattcagtagacagggcaagaagaatcaaagggactcttaaattaaaccctaagtagtagaacatggaatcaggctttaggaggtcaagtaagaggtgggagaggaggaattcagttctaccaatatttgagtgcctactctttaacacactttctaaaccctggcttcaatagtaacaaaaacaatagctttcctgtctttctagagcttacattctagtaggggaaacaggcaataaagaaaataaaacttgcagcatttcagaaggtggaagataccctgaaagacagtaaagtagataatggtgaacaggagtgaaattttaaaacagggaagttctcactgataaaatgacatttg

SEQ ID NO: 74819 - DNA, 1048 bp, Homo sapiens
ccctagttttaaatagattctcccttgtattttatttctcttgttggttaatttgatagtggaagttgaagactcaccttagtgtgtcacctcaatatgaaaattctggcattgtgtttatgactccaaagtacatctgttgaaacaatagatgtttaatgattgctgtaatagcatttagagttgagatagtaaattcttgccaaaataaaagatatttttattttactttccttttctttgcctgtgaactgcaagtctgcataaataggtattgcctatattatccagagattattttgttaacattaactctctctggctctactgattgctctaacttgggaaaagaaaacaagactgctgaaggcttctacatgtttttagcatttcctgatgggatctatttatatgtagtgatttggggcacctttgtcctatcttctaagttaggaaaatgtgactgtcaatggaaacagattagactctatcatgttaaaactaattctgttgtcttatttgtgtataaacgttcagttgctttaacatgattgagtacagcacaggatgttttaatttcctaacttggaagattgaaattacctttatttgccttactattatgcaaacaatggaaatatccttgctattaaattacttctcagaattcttaacatcttttattcctttattattttgtgttttaagtattccatcaatacttcagtaataacatgctttcctacttttagagcagtaattttgctagcaagttaactttattttgaatgagctgtgtcatcaccatggaaatagtacttcactagaaattctagttaataaaacttaactgtttaaagatgtttctcttcaatatcttttattttgttagatagttttttaaatctaaggttctttccagatgtagctgttactgtttaaaatagttttccacaattgtgctatttttactttctctctatatggatgatttttgtgcaaagtgaagtttagatacgaggatgggaaactgagaggattaagtaaa

SEQ ID NO: 74820 - DNA, 1056 bp, Homo sapiens
aaaattggactgtgttcctcagaatcctttctgagctcctgtcttttctgctagtctccattggataaaatgtgcttgttattagagaggtattttcagatgtcagagctgaggaaggggggaaaggtttttgttcactgttaatgagacatgaccttttctttcttaaaggagaaaaggcttctggcctccccctaggctgtagatgaaaaatactcattttaagaaacatttaatgatcaacatgtattcacctagagtttgtcaagattagtacagtgttttctacctgagtgctcatgattgcagatcacttctgcctaaagtctatgtaagttactgctaaaccacaatgtcctggtagaagacatcaggtattaggccaccaaaactgtggcccaagtgctatttttaccagtagtgttctgggatattatgagttctgagttacaagaattttttcacagttacttgcaggtgatatttttaaatgctgtctttgtagttgcatggaccctttgacatgacgtgttaatttggatgggaatatttaattgatatttgatataacatgacttgtcttccattgattttcagtcatgtaaatattttactttttcttctaaaaacgtataagtgaagagaatgtatgatactgttaatgaaaaatagaaatgaaatttaaattttagatgtatattatatgcattttaaagaaatagtattatatagatatcagaaagatatgtagttgtatttgtgctgaatcttttctgcctttgttatatataacatatattcaaatccaaataagtatatttaaaataataaatgttcattgtatatattttagaatttacacaaaaattggtcttttaatgtcatcctcatagttcttgtgcaatactgttttagtccattcccagaagttgcagaatcagttcagcaagaactagaatcttacagagcacaggaagatgaggtcaaacgacttaaaagcattatggtaagattctatttgctttctaagaattataggaaagaggaggattatct

SEQ ID NO: 74821 - DNA, 1756 bp, Homo sapiens
agtggtggtgcacgcctgtagtcccagctacttgggaggctaaggcaggagaatcgcttgaacctgggtggcggaggttgcagtgagccgagatagcaccattgcactccagcccaggcgacagagactctgtctcaaaaaaaagaaggagggaggaaatgtgttttagaaatacagataacgcatgtttccattaatttgattttatttaaacctccaaaatttggaatcagaaagtaaagtgatagaaataatgatatttgggagccagattattttaaaataagcatttcacctgtattaataaatactgtaggtgttcaagtctagagattaaattagttgatagtttaattcgtcatcttgttactgtttcactgttctgagtttccacaggggaaacaccaggcatgagataaagtctatgtcattttagaaaatttattggttaatatttaattttttgatacttgcagttctttgccagaactccttgagaaaaaaagacttattgatctccatacaaatgttgccactgctgttttagaacatataaaggtaaatttaactttttcccccccacaatatgacttgcatttacatagggttttatactttgtaagatgctttagtattcattatcttattgagtccccactgtaacatgaagtataattatggaagacagcagtattatagttatttttttgcaaataaagtaacctaggaatccagaaagataagtgatttccaaggtcacatgtttagtaaatagaagtgggaatctatgatatttctattatattgcactgcctcaatatcactgctgtacatactactgtattaatagtagacttgtatctcagcatcagtaatagatttggaaatctcttttaccagagttctatctaaaatatccattaataacatcacttttatttatgtgactttgttctgaactttttaaatttagagaatctgttaacattgaagcttcttactgtgtatcattgaactgtgattttgaaacaagtatgttgggagttctatatattgttatagttctttttctcattaccgtgttcatgattgccccattgtcagcttacttaatcagtccttcagtattctgctattatttgttctccacacttggagctgaatttctgtggcagattgaccatatgctaaaacttggctaatattgacccctcctttccattttatatgatgcatttgaaactgtttaaaaagctgaatataattgctggctgtcagagaagttgataacacctgggatttattgagaaggtacttaaaggtattatttaaataattttaaaagccacaaaagcattagaaaggcactaacatagataatgggcagcatgcagtttaaacctgcataattactattacgccaacaacctaatttttttctttgtttcacatcttggtacttgatatttttcaggttcatacaggaatagaaacagaactgcagtctgtaggtgattctgctgatgttttcacttctatatgtagtgtctctgtgaaatggcaaaaggctgttcagatctgtttacctgaggtcattgtctcttgtggaggtgatacagatacagatatagatgtatagatatatcaccaggtgaaatacaacagagagctatattgagaatttccttcaggtcggagactagaacttatagtttgagaaaattttggttaatttacttattcaatcatgtttatt

SEQ ID NO: 74822 - DNA, 1050 bp, Homo sapiens
tatatattttcaatatgttcatatggtttgaactcctaaagcaaattgtccaagttactagctttaaattggttttttttagcattagacaatcaggaaggcaaggaattctcttcaaattataactcgcaaaaaaaaaatatagctaagactaggaaattaagatgtttattttgagggcagctctttatttttgtattttttaataattattgactaatcagagtattttaattactattttattgttaaataaaattgcagctgtgatacccatggcagcagaaattctcaagacccttctgtttagtgaaaacaaaggtggtaggtacagcgagcatcagcatgtggtgtgtaatcaggtaaatattttatcgataacagattggagaggcactttgtacttagaatggtccttctcttttgcccctacctagtcttttatcacgagtcatgaatacaggatcacagtttgtgatggaaggagtgaagaacctggttttgaaacagcaagtaagtacacttgttagaaaacatactggtaacttttaaacataaatgttgacaggctaactgctcaggtaaagcaactcctggatttattcaagtaataaataggaatcataaaatcaaggagttcctttttttttaagttctggggtacatgtgcagggtgtgctggtttgttacataggtaaatgtgtgccttggtggtttgctgcacagatcagcccatcacctaggtattaagcccagcatccattagctcacttccctattgctctcccggcctcctacaggccccgatgtgtgttgttcctctccctgtgtccatgtgttctcattgttgagctcccatgtggtatttggttttctgttcctgagttagaaatcaaggagttctttattagtgtatttaagactctgagggtattttttacatgtgtagctcagagctctgtaattttatacttttttaaaaaaaaattgttcatttggatttggactttacttacattttgatttgtatttaccatcaggttgttgaaa

SEQ ID NO: 74823 - DNA, 1067 bp, Homo sapiens
gagaacttttataatccacagagaggaaatgaaaaaaatacagtgggattctggccaggcatggtggctcacgcctgtaatcccagcagtttgggaagctgatcacctaaggtcaggagtttgagaccagcctggccaacatggcgaaaccctgtctctactaaaaatataaaaattagccgggcgtggtggcaagagcctgtattcccagctacttgggaggctgaggcaggaggatcacttgaacccaggaggcagaggctgcagtgagctgagattgcgccactgcactccagcctgggcgacagcgagtctccatgtcaaaaaaaaaaaaaaaacgggattcttgtttgatcaaaacaaaagcttgcagttactagtattaaaagcaaacacccaacaaagtaaaaagcccaaacatgtatttgtactaaaacctgaatacacctatacatttaaagaagcattttacttagaattatattttcctgtggaaacttgagtagtgccaagagtatttacatctttgacatcacctttaccattcacagactacttaatcttagaatgtgtttaattgaaaggtaagcatacttaactgtagaatgatcaggttgttttaatagagaagaactttggtttaatattctaatatttaacaaaatacttttccacagaatctacctgttactcgtattttggacaatcttatggagatgaagtcaaaccccgtgagtaccatataacatattttgtgtaaattcccgaatgtgtcaaactgactagtatgaaagaggataaaatcagattgagttccttgtgagcttaatcacagcagaatacatgaggaaaaggaagagtccatgttctcaagaagccttttttagccattatcacggattctgggaattggttttctcagctgccatacccattctggccagctctcattcaaatgtcatgtagattatatcctatatgtataattaaatgtaaaatatatcctaaggaacaaatttctataaatgaaaaaagaaccagtgagcatctgttgatatagtataaag

SEQ ID NO: 74824 - DNA, 1050 bp, Homo sapiens
ccttgtaagtctggctggtagtggtttcttggagcaaagtgttgaaggatccttacactatgtttgggtttactgagagtgctatgattgattagcagtgtccaccccattgggtacaggactaaatagtagcaacatgtgtagcatatttgtcaagaatcaggttttgatagtcctgtcaacactccagaagagaattagtttctctggcatggtaattaagaacttgggcattgaaaatagactgcctgggttcaaatcctgtagttcccatacttactaatcatgtgactttagaaaagttacataacttttctctaccccagactgtcaatctgaaaaatgagggtaacagtaacaacctgatagaccattattaggattgagtaatttcatctaaagcacttagaataaaggttagcacatagtaagtgctcattaagtattagggatggttgttatacattctacaaaattgatagattcattaaaataggatactctaagccaaactgaccttctgaagagaaattccacagtcatggtaaagttctattttttttaataggaaactgatgactatagatattttgatcccaaaatgctgcggggcaatgacaggtaagcagcttttgtcttgtttaacttgtggattttttcccctcgagaatggaaataatttttttattatatagtactgcttattaaaaatccaaactatatggaaaactcgtaaggaaacaaggatgtataatctcattatccagagatatctctagtaatgatacttggcattcagatgtttttccttccacatatacacacacacaaatccatttagacgtttactggtgtttttatgaaatggtggaggtattagaaactaattgtgggtgagggaaatttcgataacgtgtttttaaatgaatattcttattggaccaattgaaaaaaataggagctttatattggataccagttgtttggttgttttttatttaactggtccataaaattaaagtcactgggaaccattgctatgtaacacct

SEQ ID NO: 74825 - DNA, 1760 bp, Homo sapiens
tgtgttgctcaagtgagactaaaagcacaatccatgccacctgcaccatagcccactttcagcataaagaaactcgaatgtattcttcaagtagtacacatcctacattggaagaatgttgttctaagattttataggtaactgttgctcctgtgaaatttgacagtgagattccttctatttttagtgtaataggaaatggcaccaatagtatgccatagtatatattttgggggacaaaaatactatgctcatttcaccactttattcctctttatttcatgcaattttaggtagatgtgtatactaaaatccaacagtatcccaaagaaagactgttaagaataacaaaaaaactagcatattaatctcttttcttgggaatattgaatatatttcttgttacttgtatctaagttctgactctgatttttacaggggaaacaaggcaaacacattttatatggctgcagtgagctttttaatgctacacagttcataaaacaggtaaagtatacatttgttgtttgtttctgttaacatacccctagttgctattggtatttttcaaaagagagaaagaaaaccacttactcacctgaaccagccgaaaccaaagccatccagctataccaagataaggtgttttcatggacgactaagaaaaccttgataagtaataatgtttccagtaggagtttgcccatccttccagaactgaaagccttttctttggcttttaatgatcctttagaaatacaaaaatatatgagaactgtcagtagtgtgtcactcatgacatttctctttatattgtcacaaagttagcactaatttttttaattcccagggtttttcttttccatcaattgaacgttacctaataatgtttacatttctttactatgacgacgtttattgcaattccattttcttttctttttcttggtagagacagtctcttgctatgttgccaaggctggtctcaaactcctggcctcaagtgatcctcccacctcagcctcccaaatagctaggattacaggcatgagccaccatgaccagccttcagttttaacatttgagttagtggtgaacattaagatttattattctaggaatgcagtgaataaaataggaagtgtaatttattaaggggtttacaaatatgtttgaatgtttcttttatgatcttttttaaaagttttatgtatgattttgtgttttgttttagttgtcacaacttggacaaaagtaacacagaagaaccttactatgataatctacttggaatgtggataaatgtaaaaagaagaaaagttagaagagcaatatgtttccttctctgtaacagtgtcctaacagtgaaaatcagagttatttgttaatttttaaggaaattatatacttaatatgtattgattaaaagaaacatttcagaaataaaatttcaacattgttcattttctctgataaatcagaaagtactaatataataactaataggttatgattgaagctggtgacattttaaggttatcatatttaaattttatttgattggttcgtgagtcccctacttgtatgcattttaattatacaactactttctcatagtttgttgggtatccatgttgcctatagattttagatggagattttaagccactttaagttcccttcttctggcacacctatgtatattttatcacataaagtccctccttcatgtaatggtgatcaaggcaacactaacatga

SEQ ID NO: 74826 - DNA, 1170 bp, Homo sapiens
tgaggcggagtctcgctctgttgcctaggctggagtttagtggcacgatctcggctcactgcaacctccgactcccaggtttgagtgattctcctgcctcagcctcctgagtagctgggactacaggcatgtgccaccatgcccagctaatttttgtgtttttttgttttgttttaatggagacggggttttgccatgttggccaggctggtctcgaactcctgacctcaggtgatctgcccatctcagcctcccaaagtgctgggattacaggtgtgagccactgcgcccagctgtgaaggtatgttttgaactgatgctgaaaaagcaccaatatctagaaaagatgctggaaatggcatctttctctttcaaggacagctctattcattccctcagggtttggcaagatagctctctggagaagcagatagggctgaggaccatttgtgcactaagggttacctgtcctaggtctaactgctcctaataattagattactgctgaggggttttcttacatcctacaaccttacattatgatttagaaacttcagttatgaaaatggcacctctttttatatatcagtcagaagcagctatgatatgggctccagtcttttgggaaatgaggcaagttataaacctgtcttttcttctttgtaattctagcatccctagagtatcttgcacataagaggcatttaatgaatatttgtttacttgaatgaatgaatgaatgaggccatatggccacactggatttttgaagtagtcaacaaatgagggtttgtgactagaatctgtcctcatttatcacctgttcttccatcaaacatttgctttaagtaccagtgtctgctaattaatcttgggtattaagcagacatataccttgacaagtcatcaggctgaaataatttggtgggagtatttctaagtcactcagttttctgccctcaaactcctcgtttcaaatggaagaggttctagatttggatctcaccagttcagattccaccactcactaactgaaggaccttgggcagtggctgaattctggacttgcgtttcctcatctgtaaagcagccatagtgttatacattttcctgggatttttattaggattaaatgagctaacatacagagcacctaacaaagcccctgag

SEQ ID NO: 74827 - DNA, 2712 bp, Homo sapiens
gagtcgattagtggtcaggggttggaggggcaaataggagtgactgcttaattgggtatggggtttccttttccagtgatgaaaatgttcggaactctagagaatggtgatggttgtgtaacattgtgaatgttctaaaagacacaggattgtgtactcagatgtttacagtggtaaattttatgttgtgtatattttaccacaataaaaaagttgctataatgattgttttatgttgatgctatattgtagtttctgttgtctcgagttagtatttgtgaaaacttaatcagttctctgttatgttttgtttaggtaaaatgatccattctatggtagctcacttggatgctgttacaagtctagcagtagatcctaatggaatctatttgatgtctggaagtaagtcttaaagtcctgtactgcccacaaactttataaaagattgttactcagtaacaaattttatttgttcttttacaggccatgactgttccatcagattatggaatttagacagcaagacatgtgtgcaagaaataacagctcacagaaagaaattggatgaatcaatttatgatgttgctttccactcgtcaaaagcatatatagctagtgcaggagctgatgctcttgccaaagtatttgtatgaatcaacaaaaacttgcatcgtaacaagatttgcttggacagaaagagggtctgcatcactgccatcagaaaggttactgatatgacactacatgtgatctgcctggtgaaggctatctggggcaggcacaaattggtggaaatcacatcttaatgtcaagctcattaagttaactgtaattactgtattttgtgggacaaagaaaaaaggactccagtatttgtggcctgtactggatgtgaactgagcgtatatctgtttttaggtgtctttaagccaatgtggagtctgatctttcaaaaaagtttttttttttctcttcttcttcttcttttttttttttttttttttttttttggactctgtgtgctgccttaggggttaggaatgtggtgctcttgttgggggaagtgagctccaagagtagctttttttcatctcttagtgatcttctgtttatcggttgaatgccacagattcccttttaaacttattttgctttaaaaaaaaaaaaaaagaaaaagaaaatttaacttaaaatattttagcattagttgcacaaaatgtttggataaaattctagtttttataagtctttttatatatttagcctgtcacaacagtgctcaagattgtattgaagtttttctgcattatacaaccctaaaacacagagatctcactgacccgttgccctgtaaccactttctttccttcttttgcctaatacagctcagctaagtccttccataaagatgctaaataactttcatcatcacataaatgtcttcataaaccaaggactattaagtgtattaaaatgaaacagtggggtttagtactccaaatgaactcttaaagaaaaaaactaatcttggcatcctatcactatgtgatattttgtacatcttactgtatttacaagtttatttatcaaggattatccatcttgctaatggcctattatttatttcactttttgttggtctttatatccttttattaatgtgctaaaggaacctgtatatctattttggaactctttgaatagtctaaaatagactaaaaatggagtattttatagtttaaattacaaaccaaggtggttccccctaagatatatatcttggtttaccatgattccaaacaaaactaacttgtttaaaaatatttggagtaaagttttatttgcattacaaataggatacaaaaatagttgaatcaggatacagaaatctgctgtgttttgactagttatccctgttttatttttttagatgtgcttaattttatggtgtaactaaagattttgtttgtgtaatgcatgattaagacaataaagtattttttctagtcttccgagaaacttttctgatcagtttgcgagttttgatgagttttgtaaggtttttgttttacaaactatgaatcagcaaatttttaagattgtaccacatagcaaacatacagctgttgaaaaataatgtatataaaatgcatataataaatattaaattgtgtacctgtatgttactgttggctacatcattttgtgttgaataataaagtgcaatactttattctccataattaaactaggaaatggagatttcttagtgagtccttcatttttatgctgttctttcaaactttgtcctacttattgatattctaataagagtagatcactaacactattaataatgtctaagtatttcaccccacttgaagattaagaaaaagtcttgcattaaattatgcaattcaaaataacccccagaaatgcacaggtgcagttttaagtaatttgcttagacatcctgttacattattaaatctgaatttcaattaatggcagtgttgttctatttgccatacctgttcccacaaaaaaattcagcaaggaataaactacattgaatatttaggttagttggtgcaaaagtaattgcggtttttggccgggcgcggtggctcaggcctataatcccagcactttgggaggccgaggtgggtggatcatgaggtcaggagatcaagaccatcctggctaacacga

SEQ ID NO: 74828 - DNA, 1672 bp, Homo sapiens
ttttgcttaaaagcttgggtggacatatgggaaaagaggaatgtctagagcaatatgaaggtgaaagtagagaaaataacataatgaacttaatgtactcagcattcagttttaatacctatctataaatgcccagtattacacatgcattatgtggtgttttacagtttatttagatagggatcacataagatttatgtattgcagttgtttgataggtctctcaggtctctcttcatccatagattccccttcatctcttttatgttcttttttttttttttttaattgacgaaattggctactttgtcttgtcaagtttccgacagtctggattttgctagttgcattcctgtgttatttaatgtgcttctctatttctattcacagttctcctgtgaattgattatagatctaaagacttattcaaattcaggttcactgtttttttcttttaaaaatttttaaatgttcttggcaactttacttcataagtaatttgtaagcttttatcagaggtgagtattttctggttgttcatgtttttgtgatgttttcagtctggattatttcctgggttcattcattttctattgaaagattttctaattttatcattccctctccatttattagctagattattcctataaaaaagaacatctctttatcaacaatttggttaccttggagttagtgtgtattaaggaaaaaggcaagataaatgattgggttttggttttcccctttatttaccagtttttaaaataatgagttggtttgctagcaccctctaaaggtgaccagtttgtcttgggtggtgtttttggtatcatcatactctctcatggatataaatgtatttgatgtgttttgatccattgcaggtattatctttatttattgctgttcagatcctttgattttggccagtggggcttactcagtggggctcatgttggctcctgagtccttttgccatgactttggttgttgttgatagcttcctgatatgacatatgacaagatcttctaggttcatgttgttcattttgtgccctagatctgaaatcagctatttatctaaggagttgtggtttcttttagtgggaaatggtatttagagactacagttggggtactaggctgttgagttgatcctcatggtcttcatggctcctgggttgttcattgtgttaggctttttcaatggacagagctaagaaataaacattttttaaaaagtaaaatacttcaacttcagatttatcttggttctcaacaaaattgtttctcattttatttaccccacagtgtacacagaatcgtctcagtaataataccattaccaccaaaagatcaaatattgataataaaactttgtaattagggtatattccactagtgatatacaatctaatttctatgctttaaagtcacttggaatagttccttcctttgtagttacaccaccagttggatatacttaagttcatttgtttaattttacttttgattttcattaatttcttttagaaaaacaactgttggctgggcgcattggctcatgcctgtaatctcaccactttgggaggccaatgtgggaagatagcttgaggctaggagtagagaccagtctgggcaacatagtgagaccccatctctaccaaaa

SEQ ID NO: 74829 - DNA, 1005 bp, Homo sapiens
ggattgttttggtgtggtagtggtatcagaaaccaaattggagtgatttgaagagtaaacaggaagtgaaaagcatatttctattgctgggtggaaggggtggtaggataggattaatgaagattttttgttgaagagattctggaacaagttttttttcactatggtaatgattccaaggaggagaatttgtgtagtagagaagcagtaaacattacagcaagttagtgacatctggtattagcctttgataggatggaggacagattccttgcttgtatctggaagctaggagaagatacctttagacactaatcatttatatattacgcagcaagaagatgggggataagaaacatgcagcattatttgaatgctatattttctcagtgaaatatgaggcatagtcattcatgaggaagagaggttgggagctgtgagaattgtggagatgataagaaccattcatggaaagtgggaggagtttactagaaaaacaggattgtcagacaaattatgctcaatgttatcagctgtcaaatgtctgtcagttaaggaacagataaataaaatatggtatatccatacagcagaatattatttggcactaaaaataaatggagtactgatacatgctccaacatggataaaccttgaaaacatgttcagtgaccaggagttcaaggctgcagtggactgtgaccatgccactgtactccagcctgggtgatagagcaagaccctatttcaaaaagaaaaaaagaaaacatactcagtgaaagaacccagtcacaaaagaccacatattgtatgattccatttatagaaaatgttcagaaagacacatctatagagacagagcattagttgttgcctagacttgtggaaaggtggggaggaggaattgggggaagtgactaatgagtgatgaaagtaccctaaaattgattgtcatgatggttgtataactctgtgaacaacataccaaaaatcattgaagtatac

SEQ ID NO: 74830 - DNA, 1026 bp, Homo sapiens
gagaccagcctggccaacatggtgaaactccgtctctaccacaaaatacaaaaattagctgggcatgttggcgtgcgcttgtagtctcagcaactcagtaggctgaggcaggagaatcgctcgaacctgggaggtggaggttttactgagcagagatcaccactgcattccagtctgggctggtgacagagtgagaccctgtctccaaaaaaaaaaaaaaaaaaaaagtaccagtcaggtgtacatgttctcttaaaacagtttttagatattacataaattcagaggttgggggaatggagatttgagtttcttcttagaatttatcagtaatttgtttttcctctcttcctacaatagcggccctgttctgtcattagctattagttctaatggagaacagtgttttagtggtggtattgatgcaaccatccagtggtggaatatgccgagtcccagtgtagatccatatgatacatatggtaagtaaaatgatcaaaatgtattttttttaagtgaatggagctgacaaaagtaaatacctcaaatatgattacaaggttatttaaacctatattagtcacctcatttagttcttccatttgctaataaattgctttattaaagagaaaaattaggaaatgtcatgccatgggtatttaagcctatgaattgatactttctctgttgtttaaaaaactatattaattaaaatgttaatttaggtagtagttacaaaaagaaggaggaaacaaaatgtaatctaagtaacaaaattttgaacttaagaaatagtttatatattttaaaaatattaagcaaaagacaatggaaccaacatcaggggtataaatcattaaaactttttggagccaaaaattttttttgttattcttagctcatatctacaaaaacattcttaatttcaaaatggaagaaaaaaaaaaagaaaggaaacctcctttgacttgcaaatgtagcttttagaaatctgttctacagaaacacctacctgtacctgtgttc

SEQ ID NO: 74831 - DNA, 3246 bp, Homo sapiens
gaaattgaaatggcaaatctgatcagaaattaaagctctgtggtcaagattacttgcttcattttagagtgtcatggtaactagaatgggacattaaaataaaagtcatagtcaaagctttaaagctggaagacaggctgggcgcggtggctcacgcctgtaatcccagcactttgggaggccgaggcaggtggatcacttgaggtcaggagtcaagaccagcctggccaacatggtgaaagcccatctctactaaaaacagaaaaattagccgggcgtggtggcgggcgcctgtaatcccagctacttgggagaccgagacaggagaattgcttgaacctaggaggtggaggttgcagtgaaccgagatcgcaccactgcactccagcctgggcgacagagcaagactgtgtctctaaataaataaataaataaagctggaagacattctgaagaccacgtggattaaccttttatagaaaggaaactgacattgttggtggaagaattttttcctagaccattgctgttactaaaggaatctgaacaattaaagcttcattctagtgaactgatatagtatatagctgactgtaaaccatttacatttcaatgtttgtactagtttttatcagggactaggatgcctagtacttctttagaaagcaaaaggacttggtgacaacctattaacatttaaaaaatactatatgactactttgaggtccttgaggtccatggtagaggtttcccctcatgaatgcaaaaatctgatatttaactccattatttaatcaaaatttgtcctatttcttatttaacatgtaaactatagttataattgtactgaagtgataagagatttagacagacaaagcttttgtgccctagcttccaccccagaataatatatctagtgcacattttatttgtggacagttaatacaccacagttccaacacatttgtttaacactgcttagtaacaggattttttgagtagaagtgggaaaataaaaattaattatattactgaatattgtaactgttaagtgcttaaattttccccacaatattgtcttgtactgtatgatttttcagcatttaagaagcggttttgttctttatagctgaaccaataacgtttccatctggaggaggcaagtcatttattatgggttctgatgatgttttgttaagtgtactgggccttggagaccttgcagacttgacggtaacaaatgatgcagactatagttatgatgtaagtgcagttttatttttaattttttaatgatttaatagaaggctccttattttttggaatcacttataaaacagaattaatatcaaggtgcatggaaaagataagtttgtgtcaatgtgttgatttgaagtgacatgtttttcttttataactactctctttgtggtatttaaattttttttttaggtattttggtggattaactagaagtttgagatgattaatatattggtcagtaaatacatcttgagtagtcaactctcaattatctcaaattaagccatattttggtgttaacaagaaaaaaaataacctgaatcatatatttgccttcagagtacttcttaaaaagcatgttttatttttgaacttttattttcttaaggaaatattttaaagtttctgaacattttaaagttagcttgcatcatttcctgaatacttaactccttcattagaggattggggagtggatggaagggttggggagtggggagtccagtgttagaggtgaaacttgtcttggatttaattttttctagtcattaatatttcaattgagagttaactatacttgttagatctttatgttaattgcagtttttcagcaatttttttttctttttataatgagtttcttttttccacgttttatacttaacattagcatgcttagagacagcctttggtgggctggattattctcattaatatatttttttaagtatataagtgactaaattccagtaaacttttgactgctttagaagtggtttcacagcctatctttacagatggagaaatgtgaaggtaaaaagataaacctctgtcaatatcaagaattatgaaaatgggataaaaatattcttaaagggtctttagttcagactttcagaaagtaccttaacttgctgcctttaataatttcacatgctaatacgttttctaaatgacaactttactgttaatactgtaccgttggatatttgtaataacttatgtaattatttttcatgtaaagtattgcagcaatggtagttattttgttctcatctgacatttaatgggagctttgggtttagcttaataggtaaaaacagattaaggaactcttcatttgacctaggctatttgtaaggcgaatgaaattattctgagttattattaaatgataaagtttttttagaaagttttaaaggtacattaaatttccactggacattttagccaacagttttaaatatatgtgttaaacacaccaaaaagaaacgaacaaacactccacatgccttccagtttactacttttaccactaaatattgtgctctttccttttagttgcctgctaataaagatgcctttcgaaagacatggaatcccaagtatacactacgtagccattttgatggagtacgggcattagcttttcatcctgtagaacctgtgctggttactgcttctgaggaccataccctgaaactttggaacctgcaaaaaacagttcctgccaaaaagcaagtattttagtgttagcctggtgtatttcttccaattttgctaatataagtaattattcctcattattgttgcatgtctttaatgcacacatttgatctaatgactatttaatatcaaccagtgattcatagttatttaattgccttctcttcccctaccctttttccccctcttttaggagtgcctctttagatgtagagcctatctacacatttagggcccacatgtaagttttactgaattggtatttaattaacatcatcattattgttaaatattatttatcggtcctcaaaccttgtaattttctcaatgttttgtattagaaaagatgtattacttgaataatagctatttaataattgtattggtgagactatgaatataatagtaccattcaggccagatgcagtagttcatgcctgtaatctgaggattttcggaggctgaggcgggcagatc

SEQ ID NO: 74832 - DNA, 2586 bp, Homo sapiens
gatttccctagtggcacagtttccttacagttaaataattttgcattttttccctctcataatttaccatttacttcactcaccttaaaaaaaatcactaaagtaacaaaatcattcaaaacaaaatgaatgaaaaataaaatagtgtctgttaattttttcagatctcatttccactattgagatatattcctgttttactttagaagtattttctaaaatacacatagcaactcctttttttttttttaattttatgcatttagtggtgattttgcttcgtttttggtctgttttgccaaatatgcatagtacaacttgctaaaatttttgtaattaatgtacatttaaagtgcaggttttgcaatttaaggcaaagccacgttagcaatgtggacccttttaaatgtttcaaaccaatgacttaacggaaaaagccagtcaaggcacactctacacaaaaaccaacttagaactctctatgtgtgtttgtttatgtgttatgtgtgtgttttaaagaaagaatataggtcagtgatctgtttcttgatgctggtaggagggcgaggggagagatttgataagtgtgaacttcattacagtttttgaagtatcgatcttcctggaatttgttatttaaagaggtgtgagtttgacttcaagctaagaaggcagctttggagtatacagtctccttattttcagtggcagtccccaacttccttctttacttttgaagtccatgtcctacctcattttataaagaacaaatgtctgttttctaggagtggaacttcaacattacaatcttctagactattgctgctaaagacttgagacctaccatgttgccactggtataaatggaatctgttacctggactaagttcttgggaaaaagagttcaatatgcgagctacaggtttccttcatcataagtgtccatcaaaaggaagattagttacaaaagtctgaaaaagaccttgtattttatagacccgttatactagtattgttatcttacttgatgaaatctcttaggcctcctaaatttccatcattaaattaaaaactagggcaggcatagtagctcatgcctgtaattccagcactttgggagcccaaggcaggaggatcacttgagcccaggaattcaagaccagcctgggcaacatagcaaactctgtctctattagaaaaaaaaagaagatattaaaactactttttttaggccgggcgcggtggctcacacctgtaatcccagcactttgggaggccgagactggtggatcacgaggtcaggagatcgagaccatcctggctaacacggtgaaaccctgtctctactaaaaatacaaaaaaattagctgggcgtggtggcgggcgcctgtagtcccagctattcaggaggttgaggcaggagaatggcgtgaacctgggaggcagagcttgcagtgagccgagatcgcgccactgcactccagccagggcgacagagcaagacttcaaaaaaaaaaaaaaccaaaaaaactacttgtttaaataattacatttttctttgaattactaatgacatttttatattatgggtaattatattaccattaataaaatgaataggatagaaattaattccctctgcagggaaataagggcaaacagatgagtagctgctgtgattaccatatgccacagtgatgggtaatatggaaagcagaggtagtagtgtaaaagaatttttgcacatatatgtgtaaatagtgattaagcagaatagcttgcaataggtacataaatatgtcataaaatatatgtgtgtatatagagaaaaaggacagaaatgtggtcatatgattaattagaaatgagtataatactaattttttgttaagtacaattaagccaaaactcgagtaaaactaatgtccagacacttcccttcacatgctcctaaattggtctggctgatcagagatagtcttgcaaaatcatttgttacgttaaagttattttattgggcttttgagatttgtgtcagtgaatgtttgtataattgtgagtgggaggaactgtggcattttgttctgacttctcttagaaacaaattccctgagcttaaagtaaaaatatttctttgtctagagaaaaatgctttgagtaaatattatataatgacttttatataattatccttaaacataagtttaaattattgattttatagtttttagctgcttctggtattgccaataactgcatactaataattggtaggaaaagatcaaaagatcaatgctacagattattcagattcaataagtgtcatcattgaaagattaaatactacttaatatctctatatattttctgtcaggtgctttcagattcattttagatcaagtaactgaatcagagctgcattttagagccctatttgagtcagattatatagcttattttgataggataaaataataaaataacaagatattctaagtacagttgaattttattttgccatagtatatatatgaattgtgtcttctcagaattatttccagtagtttagtgatgactgtcaagttt

SEQ ID NO: 74833 - DNA, 1024 bp, Homo sapiens
cattaatttacaggggccaacaggacaaaactctacgacatgatagctgatctgggagatgatgagctgccccacatcccttcaggaatcattaatcagtctaggtcagcctctactagaatgactgatcatgaaggtgcaagagcagaggaaggtacaaaatttagctaccatgtttatttacatttcagaagaccttaaatccaaatcacatcttaatgcaactaggctactgttataaaatgctgatgatcattttatatgatctttagagaaggtgttgggcaagctcttgatgtaactaatttagggattttgacatttctggtttctatttctttatattttgtttttgtttttaatgtgaggagttgttgtttccatcataggtgaattcagagtcttttcttaaatctaattttagctacagatccagtaatgggaaaatagtaatttataaaaacaaacttaaaataatacatatggaaaaaactactcattttgtcttattgcttaaatttaggaactaatagtaattaccacttactagaagacaactatggtgccaggcattgtgcttggaacctttttttttttctttttttttccttgagacagagtctcactctgtctcccaggctggagtgcagtggcatgatctcggctcactgcaacctccgcctcctggggtcaagcgagtctcctgcctcagcctcccaagtagctgggactataggcgcacaccaccattccccggccaattttttgtatttttagtagagacagaatattaccatgttggccaggctggtctcgaactcctgacctcaagtgatctgcctaccttggctcccaaggcgctgggattacaggtgtgagccacagtgcccaatctgttacattaaatatatattacttcaaaaaatatatgtaactgttacctaaattaatcatttgagaataaggcagcatcattattctttaacttggtagcaagtatacgctacctagtaatgaattttat

SEQ ID NO: 74834 - DNA, 4617 bp, Homo sapiens
tatgaccacagtacagtcatgaaaatcaagaagtaagtgttgatgcaatactaatatctaagctaaaactcagttttctttcactttttaataatttctatgttttctgtaatttgggaggagcttgaattaatcttttgtaaaaattttgggctggtagcatttttctaactttttaaggtctccatttgtgctgtattttatatcttagtaaaaacatataaatcaatgattaaaaatcacagtatgaacgaagcatctgaaatatggaggctttagttagaatatgagagagcagctaaaaatcttttaagactttctttgatatttgttactctttttcaacatggacaatttaaactgtggattataataatgtattttcctttgataggagctgttattcttatagcctgttgttactcttaagctatattatacctataaaatttaaacttaccaagaaaagattatttcatttcctttcttgaaaagatgtataggctttccccattttaaaaattcatatttggggaatatgtatgtttgcattcctggttcttagtgagtggacttatcttaattttcctaattattctcgtttatcttaacttttctgtcttttctatatatggaatatgacttttttgccatttcccttctctccgttactggtgttgcagaattgctatgcaccttctggcctgattatcaatacatttgaaaagggggaagtcttgtaactttttcaacatttcttttaatataaatcataagtgagctcccccaagtcattttctaatttttatttttaaagttttgtattaatatttgtcatttactattccagatccaagaaaacatgttgtcaccaggaaatacagttgtttaaagtgtgacttgaagccaaatatccaaaattaggtatttgaatacatttaagaagaacttactcttaagtaggcttttaaaaacacctttgctcacactacaaattatctgttatgattaagctacttccgtttagcacatagtactaattcgaagagcccacaaaatagttatattctctctcctccctcaaagacaaaaacaaaattgtttcatagcaaagagatgttattttcaactaggcatgtggttttatgttactggctttaatttcattctttaaaaacaaacattcatgtcctttaactcgggatttttttctttcaagaaaataacttaggtattttgcctaggatcagaatgtatcagattgatactctaatcagtgcactttttaaaaccgaagagtcactttgcagctgaagttattttttcttattattgtgatctcatatttatttaagacaacaattgtcttaaataaattaaataaagctgtgaaagctttaattatgatagaaaatagaacagatctagcaaacatgacttaactaaatttttgtgctaaaataagcgtatcttttccagattgtttgcctgctaacagttaagcttcagaatataaaagttgatcaacaaagggagggctcatttgagaaaggggaaatgttagatttgttcaaaagtactattttacttacagttatatagggcgtaggaagataaatttcatggcatgagtatgtgtgtttgagcggaatttgaaaatgtaacagtagtctatagtttggcttacacgtggcataattagtatgtttttcattgtgtcagtctagaggattatgcatttatataggactttgtatttgttaagaggtaggtgggttgtattcatagtagtagaaaagtttttctagctgggcatggtggctcatgcctgcaatcctagcactttgggatgcttaggagagaggattgcttgaccccaggagctcaataccaggctaggcagcatggtgagaccatctctacaaaaataaaaaatacaaaaattagctgagtgtggtagtgcatgcctgtggtcccagctactctggagactgaggtaggtggattgcctgagcctaagagttcaagaccagcctggacaacatggtgagaccctgtctctacaaaatttttttttaaattagccaagcttgatggtacgtgcctgtggtcccagctactgggcaggctgaggcggaaggatcacttgaatccaggaggtcaagagccaaggagatcaaggctgtagagagccatgtttgtgtcactgcattctagcctgggtgacagggcaagaccttgtctcacaaataataataaaaattaaaaaataaataaaagtttttcttgccataagaattagaaaaggtatttgtacttctataaatttcagtttttatttaattagtgcttaatgggccttcaatatgcctttacatattggtattaatattgtctagtatcctgttatactactacagttttcttattgctgataagacttcaggttttttatttgaaattgtttcattgcatttattatatttagaatattggataggtttagaaagaaaacaaagacattaaatttgcagttgaaagatgctctgcacaatagagtaaagactactactaaatgaaatctgctttcatcttttggcaccttttgagaaactaggattagagcagggaagttgcatcatttcctcaacttggcactgtgtcacactgaagctatcaggctatagtatgtaaataatattatataatttgggatcgtcagtttgaacagtaggttccataatatctcctaatttctttcccttctatatctcccagttcatgtgtacagaagattttaactttacattatctgtaacaaaactttgtcaagcctttattatgtttcacattaactatcatataattaaattatttacaaggtagtatttaataaagtcattttatgttacacacaaataagagaacattgaaagatcaacaaaagctttacagaagagatggaactggtgtggaggaatgggtagaatttggataggctgaggtgcatgttagaagataaggaagtgtgtgtgtgtgtgtgtgtgtgtgtgtgtgtgtgtatatgtatgtgtagaaagccttctcacctttctgagaatgggtgaggataaatatgacaaaatactgcagaagtaacctcagtgaacactgaaactatgtggaaattgctttgactggaaaatgaagggagtttgtattgtggatcattaaaagataagatggggtagaaaaaataggatcagatcatgaagcacatgaaaggttaagtacatgattttagttaactttgatccaaagagtgtggaagtgctgctacttgtggtttctgagtgaagggagatataataaatgtgataattttggaaaattaatttagttgtagtatataaatgtgattgaaggtaaatggagcttggagatagaaaaaccaattaggagtctgttgtagtaattcataagattgaaagccttgattaaagtcaatagagagataaacttggagaatactttaaagggagattcttttttaaaaccagcccccaccgttttataattttacaagttgaagaagaattaagatgtggttgcaaaattttaggaagcgaaattaaataaatggtggtggtagtcatttaagtggcaaggttacaaaagggagctattttgtgagaaagaataatgtttatgttcttttacgttgaatgtaactggtggttggacatccagtagacagttttttgtttattggagaatttgtttacagtcatttctctgtgggggggaaatcctcaggtaacactgagtttcttcattattattagttaggaaattcagactacgtaacatattacctaatccagaagtaaaattgtttaagcatttctaagaaattagaaattactgtaaaataggaccaataaatgtataaaagtccacctatttccactaagttttaccatcttaactgccaggcattttgttaaggatacatagatgcgtaatagttcttagagttacttacactcaaatagccacagtgaacttaatatatagcagtcggattcttccattaatgttgatgttagtaaatataacgtcataatgtttgaccttggacttacctattttatttttttaaacttatgtagattataaagcattgtcttttcaaagtttttttctgacattcttaaaacttattttctttcaaaatatatggttcaaaataaataattctgctatttctaaagttcagagttaaagaatattccacaatggtacagaagcttttgagttttatatattttggcctgaattatccaggcaacagccaaaattcttcccttatatttatggcttatgacagtgctgacttttcatatcattatgagaaactcagagatctatctcatggataaatcaggtttttcaaatttgggaaaaatgaaaaaatttttgaaagaaattggggttgatttgttaatgacaaatttgtactaacatggcaggaaaatatccatggaaacaccaggtaaagttaattgtttgttgcaccctcataaaaattactcgtacttattcctttgttaagtttttaaaacagtgaattatgtt

SEQ ID NO: 74835 - DNA, 1582 bp, Homo sapiens
atgttgtatattaatcaatttacttattaaaatgtaaatctgctatagtacctctctcaaagtagcaattcatttccatttggtgaagcaaacttaaaagttgccacataaaaatatcttcagatctatgactattaactggagagacttgaaacttatttttgggactcatttgaactagccagtgacccctgcttgtctaacattttgactatataaaggagaaaatagtgtgagaaaaaggcaaaagcaatatagacattcttttgtgtttctttggtgacaaatacattcatatattaaatggtaggtgtaatggaaacgtgtgcgagtttctttcagtaaaacctttttgagtgatttcatttactgtggaggctaataagtgaagttttgggggtttcacctgttacacaattttcttttctaactttatgatagcttttgttattgcatgtgaattaaaagactatagagtgaactgcttattgtatttaaaaacatttgatactgggctggggttgtgtttagttctaacatcatttacctataatgcaagcatgctgagtataaaagtacatttgcatgattgactatgttagaatagacaaaatgacattagaattttagggtttaatttttttttttttttttttttttttgacggagtctcgctctgtcgccctggctggagtgcagcggtgcaatctcggctcactgcaacctctgcctcccgggttcaagcaattcttcggcctcagtctcctgagtagctgggactatagtataggcacgtgccaccatgcctggctaattttttatatttttagtagagacggagatttactgcgttagccaggatggtctcaatctcctgacattgtcgtaatctgcctgccttggcctcccaaagtgctgggattacaggcgtgagccactatgcctggcctagggtttaatttttttttttttaaagaaataaagtagcttattttactagtggattgcttattttatatatagtatcataaactgacttaatctgctgaagatttcttttgaaatgttagataatgttgcttctaatttaaaatagaagtattccattttccccctctgatagactgtgactagacctatatctttttgaggtctacaaataagatgtaagtcaaggtcttttttagttcttgcttttaaacttttcttaaaattttttttttaattaaaaaaagtatgtttaagaaatattagaaacagataaactaaaaaattaaacaaaatttattttttttagaacccaggttggagtgcagtagtgtaaatcatagctcactgtagcctcaaactctcctgtcctcaagatatcctcccacctcagcctcctgagtagctgggactataggcacgtgccaccacacctggctaatattttatttttaaaaattttttgtagagatggggtttctctgtattgcccaagctggtctcgaactcttggcctcaggccattcttccacctcagcttttcagagtgttaagattataggcacgagccaccgtgcttgaccttatgtttttt

SEQ ID NO: 74836 - DNA, 3003 bp, Homo sapiens
ttttctttcatggagactaggcattttaagaatgttcatttattgtctcctatctttgatctgtagagatttatagaactacaaaatacaattagcacctgaatgtttgtacttaagtataattgataaagtatgagtatttgcataaagttagttacaaatttatgctacagttaatagatttgtataattcatctgctttggtaatcagaattgccgtaatagaatttcgtgtttttgtgggtttgagctgtcaggagtcaactttcttacgcatatttgtgttttcttttagacaaaaaagttactgtaaatgattcaacgtcatttcttggtattttttccccctagattttttaaaaaaaggattaatatgtagaagattttgctgtctcttcccttttgctcttacctatttcttataagcaatatcaaacagctgttacttaccaggcaagtttcaggatgttgtttgtgcacatatgcattcaccaacctgttctttgcactgcctaaatttacttttattttctagatttgagattatcttgcaagtaatatttttttccttaagcttatcctttttttattccctatgcattttcactccactttctttgtcaactatagttagagctattcacagttttattctctctacacaggtcttttagaaaactatttggctcttattaaatttttctgttctatctaatttcctatataaacttcatacaacttaagggtttttttggtctctgtgaggtttaaaaatatttgctcataatgtatcaatttgtcttgctttaagtagttgaaattaagaattattaacttcattaagatgagtgcaaatgattaattgttgagatcccgtttttcttggtatattcaataagtttacagaaagattcctgatgcagcataattttcaggaaacttcatgatttgaatacatgcgaattgagtaaagtgaattttctctttacaactgtattacaaacagcattataatttgtggatttgacagatagataatcttaggtgtaagttttagtcatgagtaacctagtttcaagtgattcaagttagcagattaatttcaaacttaggatttagcttttcacatactgaccgaccacctgtgatcataccatcagggaaaaagttatgacaattgtagcaggaaaaactcaaggcgcagtaaatatttgcatttccgtgtgccattcaaatatgagaatttcttaagtttggtgcatatagcaatctataaaggaagagaaaggctttttatgtctactttatagattaagtcagtgaggcctagggtgtctcttataaaacttgttagccagaatatactgagttatcaaaaacttaacaagtcagagtgttaaacttccttatgagctgttttaaaaccacacaaaggaaggaaaaatcctcaatatttaaaataattctcaaagacttaattatttttatgctgcctctttttagtgctgtttttcctctagttgactatgagtaaatttttctcagtcacaagtatttagttaaatacagatttattattcagctaaaatagctgatgtagctttagcagttgtacagcaatgtatgttttcacttctccatgctgatcactagttttatcctgaaaaaaaatcaattctaaaaaaattcttcagtggaatttgagtttttttttttttttttttttttttgctaatcttagttgtagaccaatggaagaaggtaatgagatgttgaactatttgggtgggtggggcagaggtgggactctgaatgctttgtatggattattcaagacattgtatttttgaactatatgtattatattggactagaatgcctctccattagtacagttaatcctgtgcatgcagaatcagtatgacagaaggtgcatgaatattttcatcaatgaaacagcacttacctttctagcttgcacttttccgagtagttcgcatgtatttcattcatttgcttttatgatgctggctgaataattttttattaacatttttataaagatgcagtgatctatttttataacattagatttctaatgtcagtctattgaatgaatgataaccttcaaatttgtggttcatgaaaatgaagcaccatttaactgttgatattaaatgtttagaaacttatgacatgggcatttagagtttgagttgtgaataccagaactgagactgcacctttaaagtattttgagtatatgctattagtacattttattatgattatgtaaagctataacagtttactgccaacagcttgcattgccaactgctgattttttttcttttaataatatgctgcatgtagataaagatgacctctccccaactgctgaggtttgggatgtagaccagggactaataagtaaactgaaggaacagtacaagaaggaacgaaaggggaagaaaggggtgaagagtaagtgcagattctgactattataatttttgtataccaataattgagaaaaaagttcttcaattctgtttctttgtgtaacttaattttttgtttcataaagggggcaactaactttaaactttgtctgttgtataattgaaatttgtttgtatataatttaggatgtgttattgatcaagtagaaaatcatttaaaatatatgagaagggtaaaggaaagattttgaggattgtttttaagctttaaaaactttaccaaattgtttggaatattggcattggaataaaaaataaagatttttcaaaagggagaaaagtataaatttctccatttttgatacatagagtatagctataaacaactcatatccaggttacatttcttagtttgggaatccttacctacagtgaataggaaagccctttctgtagtttctgctttctggtcttaatccaactactaacaacaacaatagcaaaaagaatctcttgggtagtattttttggctactgtggt

SEQ ID NO: 74837 - DNA, 1328 bp, Homo sapiens
atatatatttacttatttagttaacaggattttgctaaatgttgatttgtaatgcacacttttcacttaatacatggttcttctgcatcgtttttttttttttttttttttttttatgaaacagggtctcgctttattgcccaggctggggtgccgtggtgcaatcttggctgtctgtgaccttcacctcccaggctcaaggggtcttcccacctcagtctcctgaataactgagaccacaggcgtgtgaccacacctggctaatttttgcattttttttttttgtagagacggagtttggccatgttgctcaggctagtcttgaactcgtggactcaagcagtctgcctgccttggcctcccaaagtgctgggattacaggcatgagccaccatgcccagtcagcatcatttttaatagctggataacattctgtcaataatgtgccataattttatttaaccagagctctatgatgcacatttagcttattttcattaaaaagaaaatgatcgaaataacttatcaaatatctttttagctaaatcttgacacatattcattcctgtttccttagcctaaagttgctagaaatttaatcataaggataaagaaaaaactcaggaatttaatttatatggaatggcattatttctttgataatagtttctatattatgtacaaccgattggtctttctgtctgaagacttttgatggtagagcagagttttaagacaactctcaatatttagctttttactatcaatatttgacagtacctgtgtctcctgtgtaagtggaagtaatcgaaaaggtcccttacttccagacgagacggaaatattatctttaaaacattttaagttcttagtgaaggaaaataactcatttaagtacaagatcgttcaaatagtttatttttgtaagaaatgaaaactgtcaagtgatttatgcagtatttccaaagttcatcatttctactcaacaagatgttatagtcattttttccaaagcaaagaggatgaatatgcaaacactctttatatttatggaattcatttgccagaaatttgaatatatttataaataggaaagtggtagctttcagattttttttttcttttttttgagacggagtctcactctgttacccaggctggagtgcaatggaaccatctcagctcactgcaacctccacctcccggattcaagcgattctcctgcctcagactccagagtagctgggattacaggcgcatgccaccacgcccggccagtttttgtatttttaatagagacaggttttcaccatgttggccaggctggt

SEQ ID NO: 74838 - DNA, 2980 bp, Homo sapiens
aggcatgaagcactgtccctggccccgcctgataaactttggtatttactgttttagtcctcaaacatttagaccaaactgtaagaggttgtagttataagaaaggccaagtttcagttgcttgtttatgatggttttattttgagaactaataatatgtgtttgagtgtctaatactataggattttattttgttgcagtaattacctaaaatattttggacaatgaactttggagaaagtcagcagagaataattacttttatttcagttgtagaacataaatctttcaaacttcttttcttgaataaagccctcagacagtaggtagtcattcgaatctctctagttttaagaattgatttaaaatgggaaccagaaagaaatattagaaccaaccattggaatagttggatttatctttttttccttcgcacaggtcctctggtgatgttcttgagacgttcaatttcttagaaaatgccgatgacagtgatgaagatgaggaaaatgacatgatcgaaggcatcccagaaggaaaagacaaacatcggatgaataaacataaagtaggaattacattttatattcttattagctatatattcatgtagttggaatgggaatttttaagatatcttaagttacattgggagtgattgatcatctttactttacatattggttaaaagttttatgtggtcagctctttttgcattacacacatagagtaggaattgtttgctatattattcactaaatgggcaagaaaaggtctgtatttataggactagtccattgattttgaaacctttttaaagcaatgccctttccacttctgctacagttgagaatcactgctgaagtctgtctcttcatgtacagcacaccagtgataaattaactgaagttgcaatgggaatacttccaccctgggtgagggagtaatctgtgaattataaataagtctcaacattcttgtattttagtaaagaataataaaaatttacttttgctcataacctaagaaacaggtttatctatttgagtggtttgaggggcttgctgtagaagccaaagtagagttgatcgtccattcgtggattaccaaagtagtgtacagcatttcaaccatagaaaaaagtgggtaggtttagttgttggtatttgagattttacggtaacataagaaaaaaatgacagtgttccacaaaagtctctggtctacaaaatcagttttcagtcttttttgacacattctatatgtataacgtagtctatttgggtgaatagagattttgatccttttaatttttttgttctggaaggtaaagcactattataattatcacagctatgaatttaaattagttactatgccatatctctatgagtgaaggacgaatcatgcagttcccatttatgaggtcaattcaagataacatcagaatgcaaataagtgactggttctttaatggaggactaactgtgaatgtactgtaatttaagaagttaactgttcttgatgattagcatttaaaccatttttagtgccacattacttagatcaatcttggcacagcactgttgaaccatttatctgaagtataatttgggatttgtgaattacataggagatctaaaatttttgatccaagtaattttaaaatgggtgtgtaaatgtagttatgtgacaatattaaagcatcccttttccatttaggataaaagtaattcttggtttatattctatttacagataggtaatgaaggtttagctgctgacctaactgacgatcctgatactgaggaagcactgaaagaatttgattttttagtgactgctgaagatggtgaaggagctggagaagcacggagttcgggggatggcacagaatggggtaaggtgataaagaaataccgggtgggaggaaatctagcccttaatgatgggttattattaaatattatatgtggaatgtgtgtataaatatatggtggcagttaaacggagagcaaggggaagtggttttgaataatatcaaggtattttgtaccaatttacttaaatttggtgactaaactatttaatatatatggcttttggtggattttgatttttggaatttgtctggatttaaagttgaaacatttaattgatttggaaatccaatttctttccctttagtcaatttttaaaaatttatgtattcagttttaaacattcccgttgtttaatttggtattctagatttaggaagatttaactctctgtatgtccatatagtgttatctgactaattactagaattagtaattagtcagtaattagaaattagtaattagaaagtaattagaaagaataaagctactcatcctgaattatagctctatattgagcacaatttaatgaagatactaaactttattgcctataatattcagtgtgcaaaatgttagggcctaaactttggaagtggtacattgtgctaataataattcagccataactaagagaaaaccattctctatctgtacatggttaaaaaccccattaggaagtaaaataagtgtaaaaatattttaaggtaatagctgacgtcatttatgtttttcctagtaaatacattcatgcaatcctcatttaatatcagcatgttgtgtggtaggtagaacaaagtgtgtttactgagctatattggagaaggttgttattattattgttattattattattttttgagacagagtctcgctctgtcgccaggctgcaatgcagtggtgcaatcttggctcactgcaacctccgtctcccacgttcaagtgattctcctaccttggccacccaagtagctgggattacaggcgtgcaccaccacacccagctactctttgtatttttagtagaggcggggttttaccttgttggccaggatggtctcgatctcttgacatcgcgatccgcccgccttggcctccca

SEQ ID NO: 74839 - DNA, 1101 bp, Homo sapiens
attagtgtgttcatcaatctctagttaacaaccccaggtttaaacttagtatgtctgtgtgctaagatgcagttctactcattctttactgctccttggaaattaaaaaatgtgtgtgtgttgtgtttgtgtgtgtgtgtgtaaattaaaaacaatgtgtggttgtgtgtatggaaatttaaaaatgtgtgtgtgtgtgtatataatcctaaaagcattttaagacactagggcttcttgggttttgagataattggctcttaatcagtgttaaccatactatatgctttttaatttaaattttggtttgtatttggtattgttctcttagaactggaactagtctgtagagaagaaagatactgagacaaagggagagcatattttataggattatgggtttttctaaaatttgatgtgattttgagtctggcacatgttaacagtatgtggattttaatatttattttctcttacaggtatcttcaggaagtaggttatacagatacaatattagatgtacggtctcagcgggtaaggtcattacttggactatctaattcagaaccaaatggatcagtagaaacaaagaatttagaacagatcctgaatggaggtgaatctcctaagcaaaagggacaagaaataaaaaggtatgatttatacttaacatagtttatataatggatattatggatattgttattgttaatctctttagctccttgttactgccattaagaacttttttttttttttttttgacacggagtcttgctcttgtcgcccaagctggagtgcaatggtacgatctcggctcactgcaacctccgcctcccaggctcaagcaattctcctgcctcagcctcccaagtagctgggattacaggcacccaccaccactcctggctaattttttgtatttttagtagacacggggtttcaccacgttggccaggctggttgcgaactcctgacctcaggtgatccacctgccttggcctcccaaagtgctgggattacaggcgtgagccagcgtgcccaactgctattaacaatttttaaagcagatcgagttcagagttaaagacctagccacct

SEQ ID NO: 74840 - DNA, 1052 bp, Homo sapiens
taatttcaaaggcaatcgacttagcggaattctagtagttaaaaaaaattaaattgccaggcatggtggttcacacctgtaatctcagcactttaagaagctgaggtgggtggatcgcttgagcctaggagtttgagaccagattgggcaatatggcaaaacctcatctcttcaaaatacaaaaattagctgggtgtggtggtacatgcctgtggtcccagctactcgagaggctgaggtgggatctctggagcccagagaagtcgagactgcagtgaatcgagatggtgccactgtactccaggctgggtgacagaatgagaccctgtctcaaaaaaaaagagaaaaaatcagttttaataatattttatctcctgggcatttgattccttgatactaataaagtacacttgggttttccctgttttaaaatgggggacatagtacttaagtcattgggttattaggacaaacacatttaaaatgagtgacccacagttaatacttagatgaaagttaattttttcctgtcctttataaaataggtatgtttttatgggaatttatccctaagaaaactttggcaatattttcaggagtcgaaataaagtatgtaaaactttttttttcttaatttttagaagaaaccaaagacacagaggctcccacagcacctcagaatagccagttaacgtggaagcaaggcagacagcttttaagacagtgagtaattacttattttcaaccttctttaaggatctaggtatgaaagtgcttatactgaatcactttacaagtaaaaaatcatattgggacaatgtgtatgttttttgtattgctgctttttttgctgtgtagatgcttggatctttttaaaagtttgtttcctctgagtttcagggtgatgttgtcttcttacttgcagggtagaatgtccaaaagactggatgacttgagcagaacaaaaacaatataaaattcatacttgatagagccctccattcctttcagtgcagaattcacacatttcttttcagtgtgggtgtgaccgg

SEQ ID NO: 74841 - DNA, 1712 bp, Homo sapiens
tatttttctttcaaggttatgtgaaggtgaaatattaatattagggatcttaaggattataaactagctaatttatagttatctttattttaaaagggatgtgttagatctaacaaagtttggacattttatgagttttttttgtttgtttgtttgagacagagtctcctcagcctcgagtagctaggactatgggcacacaccactaaacctggccaatttaaaaaattttttgtagagatgaggtctcactatgtttcataggctggtctaaaactccttgtctcaagcagtcctactgccttggcctaccaaagtgctgagattacaggtgtgagccattgcctggcccgtttttatgaatttaaaatcttgatatcatgagtcaagtgcaacagtttgtgtttatcgttttccatttttcagtttcctatgtatggttaagggaaaatgtaaataaatgcatcttttatatttttaggcccggattgcatttctacaaggcgaaagaaaaggtcaagagaacctgaagaaggacttagtaagaagaataaagatgttagagtatgcattaaaacaagaaaggtatgtgtgcctcattttgttacatgaataaagtagaacaatagtatactcatgtataccattgtactctgtatttggcagctttttttgaaaggtacaaatccttgcccgaatacatgatgctgtcttgatttgattcatacttgggaaagaaaggcaaaagagattaaaataattcaattgaaatgtgttttgttacagaatctaaattttggaacttaaaaaaaaagacaaaggataattgatctttttttaacttttgggtatgtgttacttgggaaacttaccttttttttcttttacagcaatatagtcttcaatgttctttgcaaacaaagtttaaagaagcagacattcatattatgttttgttattggagtaatataaagcaagagtgacaaaaagaagaagttgtgattttactaatttgtgattaaattttcagggcaaaatatcacaaattaaaatatggcacggaactgaaccaaggtgacttgaaaatgccaacctttgagtcaggtaaacttgcttcttctgttactttttttttttttaattcattttttatgtaacagacatgttctctttacccgcattttggtttgataatattagagaatgactattgtaaactgtctagaatttgggaaaaaatattaaatgaataaaagtaaatagtttcatatacatcttaatcctgaggcaacttgtcttattatccttgagttgaaatctgtgtaaaagtgtggttgcatttatggtagtaatttgagctgaaaggtaacaaagttaggtattatagtaaattttaaaattttagttaattgtttttgagttcaatattaagtatgtagaacttggagaaacacacaccatacataaaatttgcagttgatttattttttagtctttaacactttcagtcttagcagcagaactttagagcttccatttgttgtcatacatataaaattaagagaccaagatgggagtggcataggttttctttgacctggcttttcagtggttatgaaggcttattctgatgccaagaaactgtattagaatctcctccttggaaaaagcaaaaatcaggaacagaaacatggaaggtctactttttccga

SEQ ID NO: 74842 - DNA, 1019 bp, Homo sapiens
tttaattatcaagactttttcatgaaaagaaatacatttaaacctttttataggcctttgtgtgtgggggggggttggggggggcggggaagatgccatggaatttcacagagctatccaagatatcttgcaatatcagtgtctgtgggccaaatcagacatcctttttgttgttgttgctgccaccatccccactctccttcccttcctagacgcaacctagtacctgcctctcagacactgtattttgcagaaacttaattgataagtaatgtctacatgagctgttaaagggaattttcaaagaatattattattttcttcatttactttttaaaggttagttagatatgtattatagagactgtgtttaggttttttctcttggaaattttacattctaggtttaataactacatttattgaatttagtactatagtaataaatatgagtataaatacctgacttctaaatttaggattctttcagcttattcatctttactttcttaactctcttaaatatttctttcattttgatcattaatatactgaattagtgtagagtagattaataaaatctgaggaatcacatttatttgatcaaagtgaattctccctttacacatgaaaaaacatctttgccttattttatttatttatttttgagacggagtctcgctctgtcgcctaggctagagtgcagtggcacgatctcggctcactgcaacctccacctccctggttcaagcgattcccccgtctcagcctccggagtagctgggattacaggcatacgccaccacacgcggctaatttttttgtatttttagtagagacggggtttctccattttggccagactggtcttgaactcctgacctcaggcgatcctcccacctcagcctcccaaagtgctgggataacaggcatgagccactgcacccggcctgccttatgttaaggtaatttcattttttgtagatgaagtaagttcttccaagcttgaggtattataa

SEQ ID NO: 74843 - DNA, 2207 bp, Homo sapiens
cccctctgtatctgtgggttccacatccttgagttcaaccagctgtgaatcataaatattcaaggaaaagaaaggactgttgcatctgtactgcacatgtacagacttttttctttgtcattattccctaaacagtataatataacaactatttacatgcacctacattgtattaggtatttaaagtaatcaagagataatttaaagtatatgggaggatatgcataggttatatgcaaatactacaccattttatataaagggcttgagcatctctgcgttttggtatcctaggagggtcctgaaaccgctccctcacagatagtgagggccaactgtattttaacagatgaaatctgtgctgtgtcagctttagggagacaagtcatggtcacattttttggcactcatatacaccctaaattctgtggtcttcattataagttaaggaacctgtctccccttttgcatatcaagtacatgccatctcttaaaagtcatagtgccctttggccgggcgcggtggctcaggcctgtaatcccagcactttgggagtctgaggcgggcggatcatgagatcaggagatcgagaccatcctggctaatacggtgaaaccccgtctctactaaaaatgcaaaaaaaaattagccgggtgtgctggtggcgggcacctatagtcccagctacttgggaggctgaggcaggagaatggcatgaacccgagaggcagagcttgcagtgagccgagattgcgccactgtactccagcctgggtaacagagtgatactccatctcaaaaaaaaaaaaaagtcatagtgccctcagaagactgctagaacactcttgccactctggtttactgttacttctctttaactccttgagtcattaggcccagggattttttcaggaaatgtgtataggagtccctctttcctgagtttatagcctcttgttctgtcccattccacatttctgaattgaaatgacacacatgctcttaaagtatctgagccttccatttttttgatttagtcttcattgtcaccattgtgagtctttcaataactgatgacagacaattcatattaatcatcccatttcatagatatggaaactgaggtaattaatttgcccagggtcacatgagttagtatgtgttagggttggaattatgcattggaatctcctaccgtctggctataaatcctgtgttttgtccgggcgcggtggctcacgcctgtaatcccagcactttgggaggctgaggcggatggatcacgaggtcaggagatagagaccatcctggctaacacagtgaaaccccatctctaaaaatacaaaaaaattagccaggcgaggtggcgggcacctgtagtcccagctactcgggaggctgaggcaggagaatggcgtgaatctgggaggtggagcttgcagtgagttgagattgcgccactgcactccagcctgggcgacagagccagactccatctcaaaataaataaataaataaaaatcctgtgtttaaatgactgttttgttgctgctgtctcgctacctcccaatctactacctttggagaaatagtcactatatcattgggctgccatgaagaggaaggcttttgaagtcaggcctaggtatataacagcaagccatctcttccaggtatgggtgccattgctgtgaagatagaggaagttcacggtgaagaaggtagtcagaatctgtttgtggcagggtccaggctgggcaggttactagaacaggggtctttaagtgattgcttagtgggccaaagaataaggtaactgacccctctctttatcttgaacttgaccagactactttctgtggatgattcaaattccttttcatatgagtctttttatttttgaaggttaagaatctacctggggtagtgaaggcattggaccctgggaagccagtagacttgagatctactgtcctgattcttctatcttactagccaagacagtgtccgtgagcaagacactttacttccagagggggtggcttagttgcctaatttgtaaaataattataattcattattggaagtggagattatagagctggaatattcacttcctgtggtataaatagtgtgaacaaaagttggatggctgtaaagtgcaaggtcttttttgaggaatgttgcatgtttcacttgtggtaga

SEQ ID NO: 74844 - DNA, 1284 bp, Homo sapiens
tatttttaaaaattgtcatacttttcttttttaatgaattagtttttctcatgagaaagctgtaaaatacagtattctcaagtagtggtatgtttttactgataataagatgggcaactcttcctaaggtgttttggaaaaactgagctgttttggttttaatttgtgtaaattatgagttaaccattttagtactagaaatatcatcatagagtcctgaaatcctaatcagaaggattgaaatttatagctagcagatattcaaaaggcagctaattcattcctctcatttgacaaatgaggaagctaagaacaagagagagggttatgaagctattagtgacaaggaaggattagaatgtaagtctctaaactcccaggctagtgtcctttataataatttataagaagggagttcttttgttttttttttcttttgtggcctttatagccatcttgctgctcccaggaactttgttaaacaatatgcagatgcttcagtaacaacaagaattgtaaagttaacttttggagttatgtcattttggacagatgaatctgatttatttttaactttcgtggaagatgattcacagctttggaaacgttttcctgatgactgtgggttatcaggtaatggaaacttcattatttatttgctggcaggatcatacaatgaacacggtattttcaagtgagatctgaaagtgctctggcacttaaacatttagtattttatcttaaacatattctagatcatttgactcataactgtcacttgaccctggggtcaaaatttgcatttgtgtttatgtttttagtgatgccaagtaaatactgttttggttgttggggactaatattaaggaaaagaatagagatgttcttaataagatggttttgagttaaatgaccaaattattttgtaatatgtggcattaatgtcgcataattgaaactaagaaaaagtgcatgtcttattatgaggcactcagtagtccagtcattccaaacttaaaagatatcttgtggtgcagttggtacattttcatgttgtgagcagagatttaaattcagcaaaaccacatcacctgtttttttaaagtgtaacttgttaaatttaaatttgtttggaagttttatatttagtttttagtttatttggttttgtgtttatattgttttatatttagtttttagtttatttggttttatgtttttagtttatttggttttgtgtttatataagatccctatgcatacagtttatttctaggtttatgt

SEQ ID NO: 74845 - DNA, 1171 bp, Homo sapiens
aacatgccagttggaagctacagcatttagcagaagttctaaagtaggaaagagcttcatttaaactgtgaactggccaggtgtggtgtctcacgcttgtaatcccagcgctttgggaggttgaaatgggaggatcacttgagcccaggagttggagaccagcctgggcaacagtgagaccctgtatctaaaaaagaaaaaaaaaaaaaagaaaatgagtgaactggactataatgattcaaaaggctaagtaatataggtaacatcagtatcctaaagtatattctaattcactgatgcttgattttttgggggattgtatagtcccctttgcatatattatgaatgctgtggagcctcttctagttttttttcaaaaaaggtaagaaaattttgcttagaatgcccatgaagcctgactgctgatctaaggaagtaactgattcaatctgtgctttttgtttctgtactaatactgccttagttcagagtactcctcctgccagaattctttgagataatctcctgacaggtttgtttcatccattgcccctcttaacagtttatcctttttatcataaagacaattgtattatatataaccctcctttaatttttttatgaaaagtttcaaacatgtaagaaaataatatagtattgtgacctcccacaaacgtgtcactcatcttaaacagcaacgactcatgatcagtcttgttttacctgtacttctatccattcattgtccattccaaattattattttctattattttatttatttttaagagacagggtctcactatgttgcacaggctggaatgcagtggtgcgatcgtagctcactgcagcctcaaaactcttgggttcaaatagtcctcccacttcagcctcccaaatagcttggactataggcacgtgctaccacgcctggctaattttttttttagtagagacagggtctttctatgttgtctaggctggtcttgagatcatggcctcaagtagtcctcctaccttggcatctcaggagtgctgggattaaaggcatgagccactatgcctggcatgcctcagcctccagagtagctgggattataggtgtgccaccatgcccgactaattttttgaattttagtagggatggggtttcaccatattggccagtctg

SEQ ID NO: 74846 - DNA, 1213 bp, Homo sapiens
tcttttgcttccgctctgtttttcctgtcatccacttatcacttttcttcatatgttttctttcttttgttcccagttgttattatgtggggttctggttctattttatgttctcactgtatattcagaatcagatttttagctaccatgtaccatcttaataatacctagcatttatttactctttcctaattgttatttcagtgcttcagtatttcagtattcatttaattcattcagtattcatttaattctcaaaacaactcagtgaggttgatacaggtataattggtgtcttttttttattttttctgacactggcatatcgaggcccaaaggttaagtaatctatgcaactaggaggcagtagaactgggatttaaacttagactgcctgtagaggccatgttcttaaccactactagatttttggcgtccagatgtcccttgtatttctaacttccgtttagtttttctacctcaaattcaatacatccattcagttaatctcaagtgcctgcctctttcccttgacaaaacacacttgctcattctttattccttgccacattaaagttaacactatcctccccatcgctagtactatagaggtcattgaaccttccccctgcgtatggcctgtgagttttattgattccagcatgattatttggtgatatttgagtgcgattttgtgctagatcctgggtgtataatgatgtatgagacacagactttgtcctcagggagcttatactctagaaataatttttttttttttcaagagagcgtcctactctgttgccgaggctggagtgcagtggtgccaacatggcttactgtagcctcaggctcccgagctcaactgatcctcctgctgcagcctcccgagtaggtgggactacagacatggactatcacaccaagctgtttttatttttagttcaggtgggttctcagtttgttgcccaggctggtcttgaactcctgggctcaaatgattctcccacctcatcctcccaaagtccaagtattgggattacaggcatgagccatcatgcctggccaataaaatgttacaacaaattagcagaatgctgagagaataaatggtgataggaaacctgtatatgtaatggagtttcagataatacctaatatttattgagcactttctttttttttttttagagacagttttcgctctgtcact

SEQ ID NO: 74847 - DNA, 1031 bp, Homo sapiens
ttagtgactcatcaacgctttcagcactgaatttttctttttacagtactctccactagatctcctttcccccatccgtttctttatctataaaaaaaccaaaccagacgatcgatgctgtatttatgaaacgactgaagagatttaatattcccttgaagtgaaacgtagttatatcatgttacttactcttgcaggagaagcaaagtgagatgttctcggaacccttcatagttgagcttgactcgatcctcataatgtgaacctttgataggctgcacatttggaagctgttggtagttaacagctcatgtcctggatctcaaaattgctgcatctttttgaaagggttatttaactttcttgggtatttgtgtttatttttaaatacctttccagggcaaatttaggcttagaaggaaaaagcgtgtgtctaaatagtattgcacctgttcttcagactgttgtgtatttagggggtaagcagtatttgctgtcatatatgtcatatgcctatggtgaatcgttaggcaaatgtagtgctgaaaggaggaggattggattaactagaaagggtgtcctcaaatatgcatctctttagtttggttctgaactagtaaacttttatatgactccacaaagtgggtgaagttaaacttttcaaaagtaaaaaatacttgggtattttgacactgtatgaagtcttaaaaaaaagtaacacttgttagtcatttcagtgctttacaattgtgttttgatataatattgggctttaaaattacataactttaaaaaagctgaagtcaaaactggtttaagttgtgtacagtctgctttaacatacttaaaatttatagaattctgttggtatacagctttctactacatactgcaaacttaattttctgtgtgagtaaagtaagtaaggcatttgtttttaaaatttggattgacaaatgcagtaaggcctaagctcactaaataatacttcaccagtccctgctatggtttcttagacctttgtactgttg

SEQ ID NO: 74848 - DNA, 1021 bp, Homo sapiens
aagcaagaccccatctccacaagaaaataaaaaagttagctgggtgtggtggtgcatgcctgtggtctcagctacacaggaggctgcgacaggaagatcccttgagcccagggagtcaaggctgcagtgagccatgtttgcaccactgcactccagcctaggtgacagagcaaaaccgtgtctcaaaaaaaaaaaaaaaatacggtgtagatatgctggacaaaggggatattcacatcccaggcacagcagagcaggatggcacaaaacttcatcatgctactcagaacagcgtgcagtttaaaacttaagaattgttgcaggcactgtggctcacgcctgtaatcccagcactttgggagaccgaggcgggcagatcacctgaggtcgagagttcgagaccagcctgaccaacatggagaaacactgtctctactaaaaatacaaaaaaatacaaaaatctttatctatttagatgttcactttgcatagttgtaatccatgtgaatgtagaatttggcattttgattttgcgacttaacattatttatatacatttccccattcttttacagagtttgcgtattcaatttatttatttatttatgagacagagtcttgctgtgtcacacaggctggagtgcagtggtgtgatctcagcacactgtaacttccccctcccgggttcaggcaattcccctgcctcagcctccagagtagctgggatcacaggcatgcactaccacacctggctaatttttgtatttttagtagagccggggtttagccatgttggccaagctggtttcaaactcctgagctcaagtgatccacctacctcagcttcccaaagtgctgggattacaggcatgagccacgatgcccggtccatattcattttaataattaaaagacatggccgggtgagatgactcactcctataatgccagcactttgggaggccaacgcaggaggattacttgagcccaggagttcaagaccagcctgggcaagatggca

SEQ ID NO: 74849 - DNA, 1040 bp, Homo sapiens
cctagcacttagtgaagctgaggcgtgtgaatcacttaagtccaggagttcaagactagactgggcaactggaaaccccgcctttacaaaatatacaaaagttagctgggcatggtggtgtgcacctgtagtcccagctacttggggggctgaggtgggaggattgcttgagcctgggaggtcaaagttgcagtgagctgtgattgtgccactacactccagcctcggtgacagagtaagaccctgtctcaaaaaacagaacaaaaaaaagcttaagtgaacatttaatgacactgatatgtagagtgaggcaatgtgatagattaaagacagcattgtagtatgagtcaggggagcagaattcaggacttcactctacatctctgatcagttttcccatctacaaaatgaagggaatacacctcagggatgacaaatataaggtgcatatgttgccactccctgcttcctaacctacaactgacatgccatccttttgttttgaacctggaagcagctccagaatccttcccaaagcagctattaacagttagtcacagttgacacccaagttgaaacccatttgccatctttggatatgacaatctgtaaagactctcctaggtctaactcccagaaatacgccatcagaaatataatacctgctcaattcaatgtgtacttcgttcagcctcttcaatctctcttttctctgggcattaagtttacatcatgtggttgctgggacatggatctgagcatattctacttttatgttgttttggtttattttatttttattttatttatttattttttggagacgaagtcttgctctgtcacccaggctagagtacagtggtgcagtctcggcttactgcaacctccgcctcctgggttcaagtgattctcctgccttagcctctcaagtagctatgattacaggcacccgacaacacgcctggctaatttttttgtatttttagtagagaaggggattcacaatgttagccaggctggtctcgaattcctgacctcaa

SEQ ID NO: 74850 - DNA, 1603 bp, Homo sapiens
agcttggctttgtgatgataattttccagatgatgaatctcgtcacgtaagaatatttctcattttgtgacttgagttgtgactctgctttcaaaagtgttaaaaataggttatgtgttcagagcataagccaggtttctgactctacttttattattgaataatcttgatgcaattaaaatagttctaaagcgataaaatttagtcaccaaaagctatttaataaaattatatacttttagatagccaaattcatgaagatgtttaatgtttatggatttttttcttagatgatgataggcttagtttctattaacttttgtttaattttatttgcatttcaccctctaaaaaattaggttgatcttggaggtggattgaaacctcctggatattatgtgcagaggtcatgtggactgttcacagcaccatttccacaggatagtgatgagcttgaaaggatcacgaaactgtttcatttccttggaattttcttggccaaatgcattcaagacaatagacttgtggacttacctatttctaaacctttttttaaacttatgtgtatgggtgacattaaaagcaatatgagtaaactgatttatgagtcacgaggtgatagagacttacactgtactgaaagtcagtctgaagcttctacagaagaaggtcatgattcactctcggtaggaagctttgaagaggattcaaaatcagaatttattcttgatccccctaaaccaaaacccccagcttggtttaatggaattttgacttgggaagactttgaattagtaaacccacacagagccagatttttaaaagaaattaaagaccttgctatcaagaggcgccaaattttaagcaacaaaggtctttctgaagatgagaagaacacaaaattacaggaactagtgctgaagaatccatcaggttctgggcctccacttagcatagaggatttagggtaagcattatatgtacattcttcaatccaatgcatgaataagttttaaagcttttgtttctttgtcgtcactgatttgcaatatatgagtaaatagtctgtcaaaaacagtaatatgctgtaggaaatattgatgatcgacttgaacctttgatttaatattataaagacaacactcagaatactagaatattagtttattaatcatcaaacctttagaagattacctgacttagccaatgtgaatttatatgcctgtgtaaaatgtccagagccaacaatattttgacaaattcatctgctaatatatgattcactttgcaaagctcaaaaattggttggtatgtcagctttatcaccaaaggctgtagcagttgagatgctgcagaacttttgataaaactctgttactttatgtacaggtaattatcatatcttcagctgtgattttaggttaactgcaaggccttttttttttaatgtttgctgataatgttggtaaactgtgtttgataaatggttatatattcaaggttttttttaatatatatttttgtacacagcgtgattgacttcagtaaagcaacagtttcttcctaaaagtcttacaaacatgttgctgtcataattcattgc

SEQ ID NO: 74851 - DNA, 1048 bp, Homo sapiens
tatttgtactactttgaagatagtccctctaatcatggaagaagtaatttaccaaaaaaaaaaaagcatttaaaaagtttctgttttcaggctgggcacggtggcccatgcctataattccagcactttgggaggccaaggcagacacatcactcgaggccaggagttcgagaccagcctggccaatgtggcaaaaccccatctctacaaaaaaacacaaaaattagctgggcgtaattccagctttttaggaggctgaggcataagaatttgcttgaacccgggaggcagaggttgcagtgagctgagattgcaccactgcactccagcctgggcaacagagcaagactcattgtaggtgctcaataaatattttgttgaatgattgtttaccttaagtactcttccaaaatagttgtaaaaaaaaagttataatttaaactgtttgttttcttccctgatagttacatttttgtaccatttaatgccatttacaaagcatttatatacatagaactataggcatgttgtgataactggcattgattataatttgttttataaatgaggaaattgattctgcacgtacttagctgatttgcctaagatcatgagaaaatagtagcacacatgagagtagaaccttcagcttcttattcctaattgtcggttcttcctcccaccataaatggattgttattaaaaaaaagaaaatgtggccgggtgtggcggctcatgcctgtaatcatagcactttgggaggctgaggcgggtggatcagttaaggccagaaattcaagaccagcctgggcaacatggcagaacccccatctctactaaaaatacaaaaattagctgggcgtggtggcacacacctgtaatcccagctactggggaggctgaggcaggagaatcacttgaacccgggatagggaggttgcagtgggccgagataatgccactgtactccagcctgggtgacagaacaagactccatctcaaaaaaaaaaaagaaaaattgttttaaaattataattaccgttttgat

SEQ ID NO: 74852 - DNA, 1101 bp, Homo sapiens
ctggaaccaaaactactattacatgtatgacttttagcaattacttcatctgaaaattagggctaacaataaccctaaaaaggttgttttgttggaaagaattagttaatatacataaagtattaagaactatgctggcaaggcacagtggctcatgccaaggcaggcagattgcttgagcccaagagttcaagaacagcctgggcaatgaagcgaaatcctgtctcaaaaacaaaaacaactctagcacttagttagtgatcattaagcgttagctattaataaactactactgctgcatctactaccacttctactactactaaaactacaaatcttagataccatatattaaccattttaatgtatgtttactattacccaaagcaacgtaaaggggtttcaagcattaaactcctgcatgcattatgtcacagcaatcatggattctatatagaatatgaaacccaaccagtaggggaagtttctttgtgtaactgtttggtagctccctcctctcaccccttccacactgcacatttttgtaggcatttaggttggtgctttactataaaagggaaaaatatacatatggtagggaagataaacatgaagatattacctgctccccaataggtcggctccctgctccagcaggtacctgtggtagctgcgaggtaacagcatgatgcgttacatcagagcgggagccagctcgacgttgcagggatgggcgtctcagaatctaaaataaaacaatcccaagagatacatgtctaattatttgacccatatatgccccctttcagccatgacctgaatatattaacccctattaacaaaagtgtcactgaaaactttttcattagccaacttcagaaaagttatgagttcaatgttttaaattcatcatgcattttatactaacctccttcataagaagtattgtgttttcttagcaaccatatactaaaagcattttttaaatttctttactccattaaaactcaacttatcaatttttttgaaatctagtaacattttataaagagaaattttaaatttacagttagttacaataaagggtattttttaggcaca

SEQ ID NO: 74853 - DNA, 1002 bp, Homo sapiens
tcaatatttaaccactaggattgtcttctaactgaaaattgtgcctaaaaaataccctttattgtaactaactgtaaatttaaaatttctctttataaaatgttactagatttcaaaaaaattgataagttgagttttaatggagtaaagaaatttaaaaaatgcttttagtatatggttgctaagaaaacacaatacttcttatgaaggaggttagtataaaatgcatgatgaatttaaaacattgaactcataacttttctgaagttggctaatgaaaaagttttcagtgacacttttgttaataggggttaatatattcaggtcatggctgaaagggggcatatatgggtcaaataattagacatgtatctcttgggattgttttattttagattctgagacgcccatccctgcaacgtcgagctggctcccgctctgatgtaacgcatcatgctgttacctcgcagctaccacaggtacctgctggagcagggagccgacctattggggagcaggtaatatcttcatgtttatcttccctaccatatgtatatttttcccttttatagtaaagcaccaacctaaatgcctacaaaaatgtgcagtgtggaaggggtgagaggagggagctaccaaacagttacacaaagaaacttcccctactggttgggtttcatattctatatagaatccatgattgctgtgacataatgcatgcaggagtttaatgcttgaaacccctttacgttgctttgggtaatagtaaacatacattaaaatggttaatatatggtatctaagatttgtagttttagtagtagtagaagtggtagtagatgcagcagtagtagtttattaatagctaacgcttaatgatcactaactaagtgctagagttgtttttgtttttgagacaggatttcgcttcattgcccaggctgttcttgaactcttgggctcaagcaatctgcctgccttggcatgagccactgtgccttg

SEQ ID NO: 74854 - DNA, 2551 bp, Homo sapiens
tgtctctactaaaaaatacaaaaactaaccgggtgtggtggcggatccctgtagtcccagcttctcaggaggctgaggcaggagaatctctttaacccgggaggtgtaggttacagtgagccaagattgtgccattgcactccagcctgggtgacagagcgagactccatctcaaaaaaaaaaaaaaaatttattgttagatgatgaaaaaaattaatataatttttattttagattcaggggatatatgtgcaggtttgtcacaggggtatattgtgtgatgctgagatttggacttctattgatcttatcactcaaatggtgaacatagtacccaataggaagttttcagcccttgcccactcttgcactccttttggagtcgctagtgtctactgttcccatcttgatgtccatgtgtacccaaggtttagctcctacttataagtgagaacatatgatagaagattttcttttttatattcttaaagctggtagatactttaagactgctggggtgaaggatcagagtaacatcagtttataccatttgtgtatgctgtgcaagcttttactgtgttttgtggtttttctcttaccgcaggcacgaatactataccatgttgtgttttgaagagacattttattctatgatgtggtcaaatctgtgaaatacagagctttttaatgctggtaaaaaagggaagatgagaaaaaaaaagggacatcagtcagttgtaacataccggagatagaatttcaatatatgaagttagattatgttctttaaaagacaaatcaaagtggaactggtttattttgtgtaccaccacatcatgttaatcacaaccagttcctaaattgcaggtggctccttacaagtgttaaagggtaacatattttatcaaatttaagatgctgttgagtgttaagacacaccattttttttctgttactaaggttaaaaatgttgcaatttaattctgacttgccattgtttgtaagatacattccgatttcaaagcattacaatgttttaaaaatgtagacctttcaacctgagaaagttgataacagcaaaaaaatgtggacccttagaaactaatgaaatataatggcaggcctcttctactggccatccagtaaaaggcactgaatatttagtcctgtgtaattattggactaaaaaccatttggttcagtggtctgcaggtgtaagtttctgagcaattataaattgtcttctggatgttcttcaggaatataaagtattttgttttctatcctttgtgcaattctgatattatattttactattttttccagatccagtaaaaacttctgttataatccctttagtcctctttttttcagtttttatgaagaacagtttgtcagcatcttcatttatgcaggacaatgtaatttgacccagtctccatcgaaggcaagagattataagaaggaaggagataaaaatgatgcaagttgttttgaacttccttatgtgctagataatatggataacatgaaagatgccacatacattattccgtagtaaataggcattatcttaagtagtcattgtttttaagtaacctaccaggtcacatatctaagccccgtttttcactgattgacttaattctgtttttcctcgtaagatcttttacatgttgtaaaggtttgtttttttggttattgttttttaaatagccccacatggttatccatttatattatgattttgtaattcaggtttagtttatggttgtcctttatcacttgtttttgtcatgcttgtgtctgtgctcatcttgtatgtggtggcagaacgcaacagttgtcccttttgaattttacttttgttttgtaaaaacctaaaatgcaaagttcctttgttatgctttcttaattgtgttgacataaggttgtgggttttgttttcaagatttccttgatagctgccgtgccagtactctattggctgagctcgatgatgatgaggacttacctgagccagatgaagaagatgatgagaatgaagatgacaatcaggaggaccaagaatacgaggaggttatggtagagagagtaccccattctctttacaaagataggatgttaataattgaaatgaagaaaggaaaagctaagtcataatcaaactttgaagcaaggaaatgtggcaccagtataaaaaatgtagttaattaagaaaagcagttttaatctgagcatttatgattctccacttaaagaaaataagttgcttatatttgaaaaattttagaatgtcacatgatgttttaacaggcttaaaagggtgtgaaattaggctgggtatagggctcatgccctgtagtcccacactttgacatttgtagtcctggctacttgggaggctgaggtaaaaaatcacttgggtccaggagttgcaggctgcagtgagctataattgcatcactgcactccagcctgagccacagaatgacacaaacacacacacacgtacacacgtgtatgaacttagtgcagtggctcgtgctgc

SEQ ID NO: 74855 - DNA, 2090 bp, Homo sapiens
cttgcaccagggtacgaccctgatacagtggcatcacccaaacctgtttcatccactgtttcaggcacaacgcaatcatggagcagcttggtgaaaaacaactgtccagacaagacatctgctgctgcaggctcctcaagtagaaaaggaagcagcagttctgtgtgtagcgtggccagtagcagcgacatcagcttgggttcgaccaaaacggaacggagatcagaaattgtaatggaacacagtatagtttcaggagctgatgtccatgaaccaattgttgttctttcatctgctgaaaacgtccctcaaacagaagtagggtcatcttccagtgcaagcaccagcaccttaacagcggaaacgggaagtgaaaatgctgaaaggaagttaggccctgatagttctgttcgtactcctggggagtctagtgcaatatccatgggaattgtcagtgttagttctcctgatgttagttcagtatctgaattaactaataaagaagcagcttcacaacgacctcttagctcttcagcaagtaacagactgtcagtgagttctttgttggctgctggggcccctatgagctctagtgcaagtgtacctaacctgtcctcaagagaaacatctagcttggagagttttgtaaggagagtggcaaacatagcacggactaatgccacgaacaacatgaatctaagccgaagcagcagtgataacaacactaatactttggggaggaatgtgatgagcacagcaagtaagtgagcttttccttctggaatccgatgctttttccacttggagggatgcaaaatagggtctcttgttctggctgcagtttttaactagatcattaaccatgttagataaagctacatcaaatttagcagttcaggaatatgaagttctctagaatcataatatttgcagaattcagactaggtgtgataaagaacctcttattttagaagcataaaacagtacttctgattttcactcctttatgatacatcattaagcaaagttgcatgaggaaatagatgactattaaatattatcatagtgcagtgaaaccaaagcatcatataagtatagcttttgtttagactctacattgatcttagcttctgaaagttaaattccaatttaagctgctaacaggtcaaagtaattatataatagtgctataaaaagaatttttagttggatttcagttgggttcccaaagttgttgcttttcaggaaccattttattattagtgtgttttatgacctcactctttaaaaaataaaaaacttggtttttctgaggtttctacaatctcacctatttgtactgatttgcttcatttttgtctttagcttctcctcttatgggtgctcagagtttccctaatttgaccacacctggtactacatcaacagtgactatgtcaacatccagtgttactagcagcagcaatgtagctacagcaacaacagttttatcagttggtcaatctttaagtaacactttaaccaccagcctcacatcaacttccagtgagagtgacacaggtcaggaagcagaatattccttatatggtaagttgtaatttaaaatgaaagtatttagatactttcataatgatgcttttattatgttttctcctgatattttaaacttttgtttaaagagaattattctctcttcttataaatatgaaatcttcgggccaggcacagtagctcacacctgtaatcccagcactttgggaggccgaggcaggtggatcagttgaggtcaggagttcgagaccagcctgaccaacatggtaaaaccccatttctactaaaaatacaaaagaaaattatccgggagtggtggcacacgcctgtaatcccagctactcaggaggctgaggcagaagaattgcttgagcccaggaggcggaggttacagtgagcagagatcgcgccattgcactccagcctgggcaacaagagcgaaactccttctcaaaaaaaaaacagaaaacaacaaacaaatacagaatctttatatataatatgaaaaaactcagtaatacgagagactattaaaaaat

SEQ ID NO: 74856 - DNA, 1917 bp, Homo sapiens
aatttctcctactctttgtaaaccatcctttttttttttttaaggagaatggggtcttgttatgttggctgctttctaacttctgggctcaagtgattcccctcacctcagccacccaaacaccactgcacccagcattttgtcttttatctttgaattatattaatcataaatcattaatgttatgagtcaaatcaatagcgtacatttaaatgtttcgtttttaacttgttctcttgactactttttttcctttgatttcttgattcttgtaatgaactgttgagttaatatgaaagttagtttattttttctacaggtctctgttatataaaaaatctttcccatcttgaatttctttttcatcttttaaaatattacataattttttctctaacatattaacaggtcaactgcaacttggcctcttgatccaccaaaggatgagaaacaagggtggagacatgtgagaattaaacagatggggaaaaatgccagtggacaaacacactacctctcattatctggattcgaactttatggcactgtaaatggagtatgtgaagatcagctaggtaaagagatgatacgaggcttttctaacttactaaaacaattacttttgtaaaaagtgatttggtttttatttctccaatttctacctgacagggaaagcagctaaagaagcagaagctaatcttagacggcagagacgtctagtacgttcccaggttctgaaatacatggttccaggagctcgtgttatcagaggcctggattggaaatggcgagatcaggatggcagcccacagggagaaggcactgtcacaggagaactacacaatggtgagtaggtgctcagcacttttgtgtagaaaatgggtagttaaattttttcttttaagataatttataaattgcataaatgtatgagcactgtttagaagaactgttgataccacattacaaatggaaaaaaggtaaagaaaataagggaaaattttaagttcttgggttttgactagaaacttactggtagtattttggaagtgatcaagcctagtgtaagttgagtatcttcaagacacacttccggttttttcccctagtttattttcaagcttactgtgagttttattttaatttcttatgtttttctttatcttgttagtctcacaccataatttttatggtatcataaatcatatagaagaaaaaggattaacatttttactgttttttaataatgcatggaacaagaaacattgtctctttatctgttagtagattattattatttcaaagtgtttcttagcctacctgctttttggggaggagtttatcatgttttctaaatattgctatgtgaatcaagtttctttgatgctgcacagtttagcaaagtcatccacttaataaattgctattaactttaaagcaattatagtggctaattattttcttcaaactataaggctgacttattagcagataatttgcctaaatggcagtgggtttgttttcatcaattttgtatcagtttttggcattaaaaaaagtaaaaatgtttatattctcaacttacaccacatatatatatccacatatatgtgtgtgtatatatatgtatttttttttttttttttgagacagagtctcgctcttgttgcccaggctggagtgcaatggcgcaatatcagctcactgcaacctctgcttcccaggttcaagcgattctactgtctcagcctcctgactagctaggattataggcatgggccaccatgcctggctaattttgtatttttagtagagacggggtttctccatgttggtcaggctggtcttgaactcccgacctcaggtgatccacccacctcggcctcccaaagagctgggattacaggcgtgagccac

SEQ ID NO: 74857 - DNA, 1110 bp, Homo sapiens
aaaaaaaaaaaaaaaaaaaggccgggtgtggtggctcacgcctgtaatcccagcactttgagaggccaagaagggtggatcacgaggtcaggagatcaagaccatcctggctaacaaggtgaaaccccgtctctactaaaaaatacaaaaaattagccgggcgtggtggtgggcgcctgtagtcccagctactcaggaggctgaggcaggagaatggcatgaacccgggaggtgaagcttgcagtgaaccgagatcgcgccactgcactccagcctgggcaacagagtgagactccgtctcagaaaaaaagaaaaaaaaaaagaatctttgatagaaaacagacatttgttcatagttctattatgtttatagttaataaatccaaatctcagttgttttagggtatatcattttttacaattctgagacagaaaccaagacgttttccagagtattttgatcgtttttgtgtagatacttacaaggagattacgatttcggttggaacgtgcacctggtgaaactgcattgattgacaggactggcagaatgttgaagatggaacctttggctacagttgaatctctggaacagtaccttttgaaaatggtgagtttctggcaagggcacggtgaaataagcattctgagctgtggtttagccttttaggacaataatttgggaagtatatatccagagttatggtaatacagtttggcccagtaattccattttagaactgatttctacatgaagatgtttattataattttgtaatattgaaatagtaaacaaaaaccttaattccaatcaataaattaatgttaaatagataattcatattaaaaatttaaatttaattgacaaatgtgtgtgataattatttctattaatttgagtatcatatagccataaaaatgtataaagactaatgataacagaaaaatgtttttgtacagtatgatcaagaatttgttttatcctatccattgaaataataaactaaagaaatactctgtgattattaatagtgaggtgctttggttgtgggactttttatttttctttatatttttaaatgagcatttgttttttgtttttgttgttgt

SEQ ID NO: 74858 - DNA, 1049 bp, Homo sapiens
ggcagagcccccccagaagttccaccatccaacaccactgcactggggattaagttttaacacatgaattttgcggggacacaaacattcagaccatggcaagtcccttccttatcactatattgtaaacataagaaaaaaagtcaagatattttaagcacaatttttttcgggtctttatgtcagtggttagagtcagattgcccaagtcttcactattcctatcaatcacatggtttcatagcctcttttccttccctcctcctccccatacagatatatatatatatatatctgtatataatatgtaacttcctatttacattctcattcattcaattattcttttctttagtagctgggatctagatgcaaacaaacaatacattttactaatgtcctagcccagaactttatcactttttttgtgggttttttagtgtttcctagcaaggccttctgctttgaattttgcctttatctaaactgttctgcattctactgcatggaatagtttcttttgaataatagcctttaatgagtgattgaggatctatatatgccaaagcaatgcaaagctaacaaaacttgccatacctctgagaacccaatactgttatcagtgccactagactcccaaactagagtacttatttagggagttttacagtgcagtagttgcacctgatattctatatgtaaaagatgtggagggctactttgtgttttgtttcagacagaataacaggagtaatggggactgtttggtccattgtttttaagctttattcctggtaagtggatgagttggagataagtctcaaagacagtgcaccgatgccttttattatgcatttttcacttcaggagattgtgcaagatccaaagagaggaaggccaggaatgtgctctctggtaattttgctgtctaaaactaccgaaatgcacatataaatctttaattgtttttataggaattagttaagatttatacagaaatgaatctacctaaaattgctagtcctgtgcttgttgcttactaaaatgta

SEQ ID NO: 74859 - DNA, 1062 bp, Homo sapiens
gctcaagcaattctcttttctcagcttcccttgtagctgggactccagcatataccaccttgcccagctctgcaagacgatttttgaaagttcttgattcaaattttcacattgttttccggaagtgtcattgcagtttacactaataatgagaaagtatatgttgtgataccctagccatcaaatattttttcaaaactttgttgctttatattcttttttatttatcaaatattatccagtaaaattatttaaactttaaaaataaatcatacatctgctttaaatataattaagtttttattagaaaaatgaaatgttttattcttaagtaaaggaaattgagttgtgagagtatttctactcagacataatctaatacaaaaattaaactgtagtcatgaaaaagtaggggtatatattgaagttgattaccatattttctgcatgaacatttacatgtagttatacaaaacctcttaataataattatttcttcgcagtcgaccagcagttgcgttaattcgaaagttaatagctgtactagaatctattgaacgtctacctctccatttgtatgatacaccaggatccacatataacctccaggtaaccataaaaaatgtagtagctagtattgctgaatgcatctaggaacagtgtgacacttttctttaaaaaaaattattttctttcacatcggattaaaataaaaatgattctacttaatctttaaagattttagcttatatgccatttgattgatcttaatgacttgaagtctgttttgtttgatcaaatcactggaaaatgatgcattcatttaatatttgttaaaagcattatatttcgtagatcataagtggcaaaaggtatcagtggaaaaagctgagaaaagggttcctcttattctacaattatgagtcagttctgtcttagtccatttgggctgctgtaacaaaattcctgcgaacttaataaacagaaattcattgctcacaattctggtggctgggaagtccaagatcaaggtgctagcagatttggtgtctcgtgagggcc

SEQ ID NO: 74860 - DNA, 1032 bp, Homo sapiens
attcactggaacttcaatgagtcccatagtcccttcataaactttactatttgcatttattctcatttattatagtgatatatcacattatatcacttagtaatctatgaaatagttttgatgtaccagttttttcctaatacttattaaagtaaatagtactgttaaaatggaaaatgttcattcctatattaatatagtctgaaaccatcttgtatacttggggaaacactgattttgcagcataattggtgagtatattataacattgaagaaggaaaaaattttgtatgttagccatggcctactagtcacatactaaaaataattttaattgaaacatgaaatgatgaatgattttattcacattgtagtgatcattgtataacaatatgttaacatttgtctcttagtttttgatgaatttcagtaagatccttaaattatttttttttggactttatactttttgttttctttagagcatggatttggatatgaaacaagattgtagtcaactggtagaaagaataaatgtttttaaaactgcctttagtgaaaatgaagatgatgaaaggtaaaatctcaaatttctttgaatttgatgtttgtaatgttcacacagttggtatacttcctctaaaataagtctagtgtaacatttatgcacacaaaagaaactcttaataagaaagtaacatattatacatgtataataagaggaaaatttttgaagttttttttaatctaatggaataaaaagaaacattgaaattacatgtctggtatgaatgcagctgatcacttagtttacttattcatgataattattattttgtaaattcagacaagattttgctctgttgcccaggctggagtacagtgatgtcatcttggctcactgcagcctcaacctcctgggctcaagcatttctcctgtcttcgctgcccaacgtgttgggattataggcatgaaccaccgttcctagcctgatcacttagtttaaattacatgcctgtttaagatagttg

SEQ ID NO: 74861 - DNA, 1726 bp, Homo sapiens
taatactgttttataaagagatagtttcttcaaacttgtcttatatccatgattgccatcttttaattctgaagggcataccaaaatagaatagaaagtattattaagtagtttagagagatacgtttttttctgttgcattagagttatgctgggtttgtttgggattaaaatggcattaggtgaatcctaaatttacattacttaagcatatatttttaaataatatcatgtactaaatttcatcagacccagaacatacataggttgtttcctcaaataactgtaacttcgagagctcatttgtgcccaaatgacagtacatacgtaccttttcgtggtgaaatatgtaaatacgagtgtctataaaagtgaagatttggtaaaattattaattgtaaaaattcacatttgttgtgtttattttggtaggtacgaactatggctcgagatttatacgatgaccattttaaagctgttgaaagcatgcctcgtggagtagtggtaacactcagaaacatagcaactcagttagagtcatcttgggaacttcatacaaatagacaagtatgtcatcctctagattttaatgatatgtagtgaattttagtttgatgtcttcccctctatcctttatgtcatgggtattgagtagggggtcagcaaattatggcccaggagccaaatctggcctgctccccattttcgtatggctttatgaggtaagaatggtttttatacttttaaatgattgaaaacaaaccagaaggacaatttcaagacacatgaaaatcagatttcggtatccatataatttaatcacacatagccatgcttattcatttacatattgtctatgactactttggtgctacaggggcgtggttgaatagctgtgatgtagactatatggcctgcaaagcctaaactgtttgcactgggccctttacgaaaacgtttgctgacctctggtagacataatttgtgttaataatttgaacttttaattttgcttaatatctaaattattgtcatgataattgatgttctgataagttattttaagagctatgtttatgtttttgattgccttcattaaatttttttttcttttagtgtattgagagtgagaacacttggagagatttaatgaagacagctttagaaaacctaattgtacttttgaaggatgaaaacacaatttcaccatatgaaatgtgtagcagtggcttggtacaagcacttcttactgtgttaaacaatgtaagtttatcaagtagtaaagaacaaaaatacagttttaaaaattatttgtagttactccttcggtagagtggtttttagtttgttttgtcaagaaatatttaaaagctgaatgatgttaatatttctaatttcttcagcctttaggttttatgattagtttgagccaaatgaattaaataattgtttattttgatttctaagttcccagttataatttgctaaaggttttgttgactaaaaacacttcagcttgatttgttattattcactcctctgatttttacataagttatataaaatagaatatgtctgtagaccttaagtacccaagttatatgcataatgtgtgaacaatgaaagtttaggaagtttatgatggaaggaactctccacagggcttgttttccaaagaaaagtgttgtttggaggagcaaagttataagcctacctaagcatatca

SEQ ID NO: 74862 - DNA, 1025 bp, Homo sapiens
tgtatcagtagagaaaaattattataccatgaaaatatttcctaaatgtctttttactgcatgggacaaggaacaacactgtatctactttttaaaaaatatctttacaaatatagctcctttttttttttttttttttgttttggagacagtgtcttactctgtctcccaggctagagagcggtggtgtgatcatagctcatggcagcctcaaactcgtgagctcaagtgatcatctcgccttagcttcccaagtagctgggactacagatgcgtaccaccatgcctggctaatatttccagtttctaatttagttttattgtttaaaatttatattttaataggtctttttttcctaagagaaaatacatgtcatacttgaaagaaataagattttgaaacaagtattttgtctttatagaaagccgaagtgaattcttagagaagttacaaagagctcgaggccaagtaaagccatctacttcaagtcaacctatactgtcagcaccaggacccactaaacttactgtaggaaattggtcactgacatgtttgaaagaaggagaaattgctattcataattcagatggtcagcaagctacaatattgaaagaagatttacctggttttgtatttgaatctaatagaggaaccaaacattcatttactgcagaaacttccctgggtaagtatgtagatatgtaagtttattgggtacaaataaatgaatatgttaaattgtaacaaagtaagctctgtgaatattcttttttttccccccaaggttcagaatttgtgactggctggactggcaaaagaggcagaaaactgaaatctaagttagaaaaaacaaagcaaaaggtatatctgttggatgtgctttattcttgtcttttatactgatttgttaaattttcagtggtaaagtataagcactgaaaaaaattgagccatagaacataagcagccctaatataatatatttttagtttttctattttctgtgttttcttaaatatttatt

SEQ ID NO: 74863 - DNA, 1113 bp, Homo sapiens
atgtaatgagttcaccaaggttttaggttattatgttgttgtgtgtagtgctctaatccattagtctttaccccactacacctggacatgatataatataggtcattatttacatgaatttcttaatatttttaacacttatttgtaagatttagttataggtaattaattagtcagaattgagagccaggtgccgtggcttggacctgtaatcccagctacttgggaggttgaggtggaaggattgcctgaggccaggagttagaggctgcagtaagctatgatgacactattgcacaccagcctggatgacagagttgagaccatgtttctaaaaggggggaaaaagattaagctacaggcaattgagtattatgttcagagtatttaaatttgaaattaaattagattcatgtttttaaaatatgtatgaatatttgaaattgaaattattttccatgtttaattgaataattctacacatttaggaagatgaaccacaggaagatgctaaagaattgcaacaaggtaaaccatatcattggagagactggtcaatcattaggggaagggactgcttatatatttggagtgatgcagcagccttggaattatctaatggcagtaatggatggttcagatttatcttggatggaaaacttgccaccatgtattcaagtggtagtccggaaggtggatctgacagttcaggtaatattttgtttcaattaaaatattttcctagtttctacagtttggtttttttctcatatttttgctaccattgtcaaggtattttatttttttgagacggagtctcactctgtcacccaggctggagtgcagtggtgcgatctcggctcactgcaacctccacctctcaggttcaagcagttctcctgtctcactctcctgagtagctgggactacaggcacctgtcaccatgcccggcttatttttctatttttagtagagatggggtttcaccttgttggtcaggctagtctcgaactcctgacctcaggtgatccccctacctcggcctcccaacgtgctggagttacaggtgtgagccactgtagaaacaaaaatatttgtttctttatttttta

SEQ ID NO: 74864 - DNA, 1366 bp, Homo sapiens
ttgtatttttagtagagacggggtttctccatgttggccaagctagtcttgaactcctgacctcaagcgatccgcctccctcagcctcccaaaatgcagggattacacgcgtgagccgctgcactgggccccatttattttcttagtagttgtagtactttttacttgattttctaaaattatcatgacatgttaacattcatgctagtaaagtgtagaatatagaatagaaaagtgcatttaagaaaattataagtcatttttggtgagctcaatatatttataatagaaaataaatggaattatttcaaaaatgaacatatagtgctgagtcccaattttttgtatttttttattaagtgtatttttttagcagagtgtataaaatgtaacattggatattttactgttcattaatgcatgcattttgatttattttaacttcatttggcttcatataattctatttttacttttcaaggaaagcaagtcttgctctaattcgaaaaatgattcatttttgctctgaagcactgttaaaagaagtttgtgattctgatgttggtcacaatttgcctacaatactagtggaaatcactgcaactgtcctggatcaagaggtccgtttctttttcaaaactctttagcattaatttcctttagctagtagtctgaaataaaatttttgttttaatttcagtaaatcatgttgtgcaaattactgcatttctctactcctggcaactaaacttatttttattttttatttttcaggatgatgatgatggccacttgctggctttgcagatcataagggatttagtagataaaggtggtgatatatttttggatcagctagccagacttggtgtaattagcaaagtgtcaacgttggcaggtccttcctctgatgatgagaatgaagaggaatcaaaaccagaaaaagtgagtggtcttaattatagaggtatcaggaagagttttttttttttttttgaggaaaatctagtttcaatttttgatggtttttgacaggataatgacaatatgaaataattctgtatattttttaaattggtcaattttcttttaaaacattttgatcaacaattttaaacatatagaaatgttgcaaatatagttaaagaatatcagaatactctctatccaaattcactagttattaacattttgccccatttcctttaacattttttcagacacatgtatctgtttgtgtgtgtgtgtgtgtgtgtgtgtgtgtgtgtactttttttttgagatggagtttcgctcttgttgtccaggctggagtgcaatgttgtgatctcagctcactgcaaccttcacctccctggctaatttt

SEQ ID NO: 74865 - DNA, 1051 bp, Homo sapiens
aaacacggcaaaaaattaatatggaaaaatgtatttcctagctgggtgtgttagctcatgcatgtaatcccagcactttgggaggctgaggtgggaggattgcttgagtccaggagtttgagaccagcctgggcaactagtgaaaccctgtctctacaaaacacacaaaaattagctgagtatggtggcgcatacctgtagtcctggctactcgagaggctgaggtgggaggattgtttgagcctgggcggtcgaggctgcagtgagctgagattgtgctgctgcactccagtctagatgacaaagtgagatgctgtctcaaaaaaaaaaagtatttccttactagtaaaaagcaaaacattttagaaataagtaaaatttggtatcatttttacctattagacagttaagaaacttaaaaaatgagaattttttttaagtaaaaaggaatattgtagatattcatatttagtgataatttaaggtgttaacaaccttttttgaatcagtttgccaatatgaatgcagtactcatacacattcaatacttaatgaaagtgtttaggctgttagatccaagaatccctctgtactgaaggaatatgaagaaactgtttacacaaaaataaatagtgctatttttaatagaaaagactgtaaactaaatgttcaaaatttatataatagtgttaaacaggaaaattttatgttgtgagtattatgtatcatctaattaagagatagaatttgaatacaggctctgtaatttattagcttggtgatcttagtagactgacttaactatcgctcagtatcttcacttgtaaatttgagataataaaacccacctcataggttttgttgtgtgggttaaatgaattatgtttttaaagtacataaaaaggttactgctcatgatggctcagtatacgagagagagatagataaataacatataaacattctaatacattgttaattgaaataagtcatgatataaaactaatagttaaattctggtatttacagtggaatataaataaaaactggg

SEQ ID NO: 74866 - DNA, 1078 bp, Homo sapiens
gggttgatgaatccagaagctctgtgaaataatttttggaacgaagtggagtatccaaaattatcttcttaatttgttattgagcacattgaagttactagtgctctttagtattcttataagcatcattgaaacaatgttctaatttcagtgtatttgttaattagagataattattatttgaagttggatatatcttaaggtttttttccttgaaagcaaaagtttccaaaaaagtatttctttaaaaaatatttgtctgtaggtgattggatgtgtccagttaataaaggagatgataagaaaaagaaagatacaaacaaagatgaagaagaatgtaatgagcccaaaggagatccggaaatggcacccatatacttgaaaaggttattgccagtgtttgcacaaacatttcagcaaactatgctgccttcaataaggtagttattcatactatttgatgtgttagtcaaattacaccaattatatggttttatttatctcccttttccagaagtatttgaggtttattttaatgttaaaaaggtgtggtaagaataaaatttagatgagaagtgggaaagccctatcttttcttctgacgatctgaacgaagagaagttttagaaaagattactagattcttaacaaattttaggtagctctctgaatattaaatctctgtttgataagtattgcaaccacttattgagctttttagaagcctgttggtagggacggtatgagatggccactggaggagttatacagataaatgagatttggctcttgcttactcttccccttgcgggctagtaaggatgtatgtgggtaaaacatagagtggtaaatggtagattaggcacatattcagggttctctgggaatatagataatttaacaactaattgggctgggcagattggagacagttttatgcagaggtgagatttaaattgtggtttaaaggatacttaggagttttctaggcagacagatttggaagcatgagtgaagaacagtatgtgcaaatgcatgaaggtatgaatccatccatcaggaactccttgtggctctc

SEQ ID NO: 74867 - DNA, 1050 bp, Homo sapiens
atgataaataaccaagtacaattaattcataagtttttcaagttacgataggctgctttgtattgttttttgagatggagtttcactcttgtagaccaggctggagtgcaatggttcaagcgatcttggctcactgtaacctctgcctcctgggttcaagcgattctcctgcctcagcctcccaagtagctgggattacaggcatgcgccaccacacccggctaattttgtatttttagtagagacggggtttctccaggttggtcaggctggccttgaacttccgtcctcaggtgacccacccacctcggcctcccaaagtgctgagattacagaataggctgcttttaaggtactaagtgcaaaggcagagatatggattgccacctgcttgattaagtaattctggaaaatctttagtttacatagttggatgtcaaagaaataaagtattgttatattcaaattaaatgcttttcttctctagactctgttacggcatggtgcaaatccagatctgagagatgaagatgggaaaactccattagataaagctcgagaaaggggccatagtgaagtggtagctattcttcagtctccaggtgagagctacattctttcttttgaagccatctactgttatttttcagctttcacttccatagctttctgtagacacattaaccttatataaatgaactattcctatgaagtcaaataattatatatgtatatccttatatttaataaacctgtttaacagcttaattttctatgttctttgagattgtgactgcctgattccagaataaccaaaatctaaagttcaaggaatatgggaatgtcagataaagaatactttggtattgtttagataggtagtttgaccaaaaaaaatttttttttttttttgaggtggaatcttgctctgtcgcccaggctggagtgcaatggcgctatctcggctcactgcaagctccgcctcccgggtttacgtcattcttctgcctcagcctccctagtagctgggactacaggcacccgccaccg

SEQ ID NO: 74868 - DNA, 1052 bp, Homo sapiens
gggacagagtctcgctctgttgtgcgggctggagtgcagtggtacaatcttggctcactgcgtcctctgcctcctgggtttgagcgattctcctgtctcagcctcccaagtagttgggattacaggcatgtgccaccacacccgcctaatttttgtgtttttagtagggatggggtttcaccatgttggccatgctggtctcaaactcctgacctcctcccacctcggcctcccagagtgctgggattacaggcgtgagccacggtgcctggacttaaatactttttcttagctgatctcaagtttgctgattatgtactgctctatagttgacctaaatatttaaaacactctcttggctctttatttagatgatgactaatgacgatcttaaaatggttcagtctttagaaaagtttagtattttattggctttaaaaatacgtttctttttttttccttcaaaatttcagcctttgaagtaaattttatggatgatgtaggtcagactctattaaactgggcctctgcttttggaactcaggaaatggtaagctaataaataaaagctggtatttaaattaaggatagaaatattaataaaaagcagctttatgattcgttatcattttacaggtagaatttctttgtgagagaggtgcagatgttaatagaggtcaaaggtcatcatcattacattatgctgcatgttttggaagacctcaagtagcaaaggtaaagtctaggttttaaaattactaatttttaacatttacatggtttaaaaattagaatgatataaaaccttttatttccatgccatctccatccacttcattcccccttactcactgtaagtgtttttaattagttttttctttttagtgtttcctaatacagattcaataaaaacaaatatatatatatgtgttccctccttttcttatacactcacctgtactttgtttttttacttaataatataaattagagatctctccctgttagcatgtagagaacttttttatatctgtatgcatatcctgtactac

SEQ ID NO: 74869 - DNA, 1086 bp, Homo sapiens
gcaatgggcgataatggctcactgcagccttgacctcctgggctcaagtgatcctctcacctcaacctcctgagtagctgggactatagcacatgccactactatgcctggctaattttttgtatgttttgtagacatcaggttttgccgtgttgcccaggttagtcttgaacttctgggctcaagcgaactgccaaccttggcctcccaaagtgctgggatcacaggtgtgagctaccacacccatctaaaatgtattattaaaattaatttcatttgtttcacttttctgtttttaatgtgtcactaataaatttggagagcgcattgtttctgtgattcttgaaaatcaggcttgcattctttcgttacatttgttttactattataggtattagaactgatatgtactcgtgagtcaggagcagtctttgaggctggtggtttgaattgtgtgcttaccttcattcgtgacagtggacatctagttcataaagacaccttgcactctgctatggctgtggtatcaagactctgtggcaaaatggagcctcaagattcttctttagaaatttgtgtagaatctctgtctagtttattaaagcatgaagatcatcaggtaaataagttgctgttacatactttccattttcagaaagtgatttttttagtgttcccctgtttataattatgatagactgtaatttgtgcttttcacttgatgaaatcgaggtaattccatcctctttctctaattttatctctgcatgtggtaatctccattttgggaatgaaacttttaagattataagtgtgatatatgtttattcttaaaatttaaatatcataaaaatgtttttacagctgtacttgtactgagtgtaattttgctgacttggtgcaattttgttgacctgattttgttgacttaagatagatctcatttaaataagacggtattttttatttttattattttttttttgagatggagtcttgatctgtcacccagggtggagtgcagtggcatgatcttggctcactggaacctctgcctcccgggttcaagcgattgtcctgcctcag

SEQ ID NO: 74870 - DNA, 1944 bp, Homo sapiens
tataggcatgggccaccatgcctggccattttttttttttttaaacatgctttcaagttaatgctgctgttttaaaccatttacaccttggtattctcagcagcgatgaaattagcatgtgagtattgttatggaagcaaaaacaatgtgagaaatattacctaataaacattcagacacagtattgagcacagtgtgttacattataactttttattttctattattttgttaatattttgctgttaagaatttaataaccctagatgtaatatgatttctttcactacagatgtcctcctcgcactttcttaccagccctttgcaaaatttttcttgatgaaagtgctccagacaatgtattagaggtgacagcccgtgccataacatactacctggatgtatctgcggaatgtacccgaaggattgttggggtagatggagctataaaagcactttgtaatcgtttggttgtagttgaacttaacaacaggactagcagagacttagccgaacagtgtgtaaaggtaagtattacttattggctcattacttatttttctcagacctctcagggatgagtattggctcatttaaacatcacttagagactgaaaaatgtatttactaaaaaaaaaaaatttctaaaaaaaaaaattcttcctatcttcagtcttactttattgagagtagttgagaacagtggaaatcacaacacttgtggcaccaaaggaggttccatgggacttgcgaaaagaaatcttatcttagaaggaaaactgtaggtgattgctatgttatgtgctgcttcagtgcacttcagttcctggtagtcacttagagataggttatccctgttcttacccaaatcattttgtattataatagtaacaatcaccaccacaacaaacaccacccaccagtgctagacattattctaagcactttaaggtattaactcatttaatcttcacagcaaccctatatgggataggttggtgccaggaatagtattattattattattattattattgtttttgagacagttgctgtgtctcccaggctggggtgtagtggcacgatgttgactcactgcaacctccacctcccagttccagcggttctcctgcctcagtctcccaagtagctgggactacaggtgcccaccaccacgcccggctaatttgttttgtatttttagtagagatggagtttcactgtgttggccgggctggtcctgaactcctgaccttgtgatccccctgccttggcctcccaaagtgctgggattgtaggtgtcagccaccacccccagccgaatattatcatttctctgttacagatgaaagaaattcaagtatgctgaggttaaggaacatacttgggagtagtgagcagaagagtcaagacttgaagtttaggaatttgaagattaggaagtttggttctagggcccagggatttaactattttgctatattccctgtaaagtaagctgttgtctttatgtaactctaaaagcattagtgctagatccatacttttttggaactatttgtggtgaatacattgagattttacatgattttttttttttttttttttttgagagatagtcttgctctgtctcccaggctggagtgcagtggtgcagtctcagctcactgcaacctctgcctcctgggttcaagcggttctcctgccttagcctcctgagtaggtgggactacaggcgcgtgccaccatgcgcggctaattttttgtatttttagtagagatggggtttcaccatgttggccaggctggtctcgaactcctgacctcaggtgatctacctgcctcggcttcccaaagtgctgctgggattacaggcttgagtcactgtgactggcccctgattcttttttcttttcttgtttttttttttttttaatgatttct

SEQ ID NO: 74871 - DNA, 1748 bp, Homo sapiens
gctgcgttacgtgggacccaaagctgtcctccagtcagggcgcttacggggcgcttttgtaatgacttacctgttggggttgcttctcggttttgtttttgtttttttaaccaactgccctatcttgtgaagctggggaaagagggccctaggttggcctacattcgttcggatccgtaacctgctggtccattgcatttacttttagcctttccttttttaatttttttatttttttaacttttaagaatagttgccaagactgccaaaattcctaaccaactctttattcatagataaatcttgtatataattgtcgtttgtatttggatatctttaaaatagaagtaaattgagaagtcagcagaatatgtgaaattggaggtaattttgaaggagaaacaatttggagggggattggatcaaggtgtttagagtttcctcaaaatactgaatctaacccttatctgaagatcagttttgggtagagaaggagggggatgaagtttgctggaaaaaacagaacctttagttaggtgttctttgccttttggcatagactttagtgatagcagtagtgggacctgaagcttgactgactgtctttgacacagacagctctggtttctagttaagcagcaacctaatcagcttatatactcttgtgcaaaactggttttcatttggtatgatatctgtacgttaaacctggcggataaggaaagttgaaaaactgcattaagcactcttacgtccaaacgtacttaggagtcttttttaattgctaggaggacactatgaaaatttggttctagcagatgtaaaggaagaaaaatttaagcccaagctgttcagtcccggaatttaaaggacttttctccctttacttttcaaatttaagcaaagagacttttaaaaaaccatggcagatgtggacccagatacattgctggaatggctacagatgggacagggagatgaaagggacatgcaactaatagcccttgaacagctatgcatgctgcttttgatgtctgacaacgtggatcgttgttttgaaacgtaagtacattccttcatcatgttcctttgggttactgtagtgacatctgttttcaaccatttgctgacttcagtttgtgtagaaatttctctagtgaattttaacacgtatctttaaaaatattcctgaagagttttgtgtttacacttttccaagaaataaaaattggtaggtgaagaaactctaggactgatgattacgatgacacaaatacatatttgttgaatgaatgggaattagtaggaatattaattttaacccatagcttggttggttcattttcaaaatatgtcatgaactggggaaaatacaaatatttattttcttaaaggtatctatttctgtaccatgaaattgatttatggaataagagatgataataaacatatgttttgaactgcccatttcttcattgatgttgtcatatgacagtacttttgttaaagccgattattggtttgtaaatttcagtttgggaaggtataaattggatcttaaccgtgtagcagaagagtagaaaatttggagtagtagaaacattttgaagtttggggagtttaaacagttttattgggaggttataacttagtatatatgcaaaaatataaaagagaattcttactagatagaccttacagccatttttttccctcttatataagtcataacttgtccagtcagaata

SEQ ID NO: 74872 - DNA, 2026 bp, Homo sapiens
acgaattgttttctttagtggggaaaaatgtatacagatcaagtgcatttgcaggcttttgttagaaacatttatgtcactgaacttatattatttgtttactttctaggcgctcagctggtggcctgtcttttgcccatcctcatttccttccttttggatgaaaattctctgggatcagcaacttccataatgagaaatttacatgactttgctctacaaaatctcatgcaaattggacctcagtattcatctgtttttaaaagtttagtggcttcttctccagccctaaaagcccgccttgaggctgctataaagggcaatcaggaaagtgtcaaagtcaagataccaacatctaaatatactaagagtcctggaaaaaactcaagcatccaattaaagaccagtttcctctgattttttttttggaatagtaagcaccttaatataataaatacttgatcattgcctttggtgacaaaagggacattgtagacacaagtgcccttagaggtctagttgattgttttaccttaaatagctgtgactcttcaaagtaacagcatacttaacatttttgtgtgtgtgcgtggggtttgtgttttgttttgttttgtttttctatttaaaaagacaatggagctaacttgccaggaattttaagaaagtgctaaagaactaaacttactaaacaatccactgctttaaaaatgaaatgaatttcttctaacagtccatacatatgtggtatacttaatactgtgacagatataaatatgactctagtgtaaattatctgcactaatattgtatcccaattgctgatttaaaattctgctttggcccggcacagtggctcatccctgtaattccagcactttggaaggccaaggcgggcggatcacgaagtcgggagtttgagaccagcctgaccaacatggtgaaaccccgtctctactaaaaatacaaaaattagccgggtgtggtggcacacacctgtaatcccagctactcaggaggccgaggcaggaaaatcgcttgaacctggcaggcagaggttgcagtgagccaagattgtgccactgcactccagcctgggcgacagagtgagactccatctaaaaaaaaaaaaaaaaaattctgccttattcagtaattgtattaaactttctctgatttctccaagaagataaaatgattggagagctatttaggaaacctggtctaggattatccagtatacaatagtacaaattacttacagccttacagtgcaacataagatttggtgtctatatcatggttttccaccatcttttggtttagtttatattgggttcagaaattgagtcttactcattttaaatagaataagccatttccactatttttcaaatggatttttctgtttacctctgttcttaccaattttgttcattttcatttgtggcaaacatttgtatcaatgagttttaacctaggttcatatctacattgtatttagatcaactatgggtttatataaatgccaaatttagtacaacaaatttaggtcatcaggtgaatacaagtattttttttaacaggaaacattttattatagaaaaaagattaatgataaagtcatattggttgaaaaatattttttaactgtgttcatgattgttgattctccttctacttcagtgttatactgtgtgaatcaagcactgtgtcaaaacagagcatttccctcttaaaaattacaaaccgaagtgatagaagcatgtcagaattgagaagacattttgaagcaagaacaatgtgatgtacctattttattatgtttgtatataaatactattgtaaattgttcagagtgaaaacatttgacaaactctaacactacaatcattttttctaaattacataaataaagctaattttcattatcattcttgtatttttaaattattttaccaacaaaagatggcaggttggtttctctcacatggattccagaaaatcagccttttttctcagaaga

SEQ ID NO: 74873 - DNA, 1062 bp, Homo sapiens
cagccctatgacctatcagttgtactcccagtaaaaataagaacattgataacaaaatactgataacacagcagcatgaatgaatctctaaaaatgttgttaggttattttgttaacaatatattagtcacaaataagtacatatgtatatgtgattctatttatatgaagttcaagaataggcagaactaatctgtgctgataaaaactagaaagtagttgccttagggtatagggaactgactgaaaaagggtacaagggaactttcggagtgatggaaatggtctatatcttgtaacagaaaaaagagaaaatatattggaagttaatctcttatttttcctgaaactgtttgctttaggtggtgctttctacacagcagagactagtgaaaatgcaaaattgcattattacaactcctgggcacttatcctccatgctacagcattgtggcttacaagcacgggttttgttgttgctgacccagatgaaggagcatctaatctctccaggcctgtaacaccaacttccatgtgtcagggttcatcatctggggctaccataaagtcccctgaggatgtctacactgatagattccatcttattttaggtcagttaaaccacttttacaagtttacaaccttaggggttttttgtttttttttttttgagatggagttttgctctttcacccaggctggagtacagtggcacgatttcaactcaagctcacaattattgtcaactgaaaataaaaatataaataaattacttaagctctctgctcatttatgtcagaattagtgtcaataatagtgcctactttgtcaactattacgagaatttaataaaaagatgtatgtcaaagcacagtgatacttggtaatcacccagtaaattttagccaaagtaaagttatgaaactccatatgttttccggtgcaattttattgtaatttttgcagctttgaactgtttcatagcaactaagcaactagtgcacaagcctagtttagattttttttttttttttttttagacagagttttgctcttgttgcc

SEQ ID NO: 74874 - DNA, 1050 bp, Homo sapiens
agccgagcgtggtggcgtgtggctgtagttacagctacttcaggttgcagtgagccaaaatcatgccactgcactccagcctgggcaacagggtaagaccttgtctcaaaaacaacaacaacacaaaccccacagaaatctgaatcatttcctaagtctagaaaataaatgaaagaggttatatatattatgaaaattaacctttatttatttatttatttatttagagaaacgttgtgtttaatggtaaagcttagcacaccccagcaccaggaatggcgcggagttgcagctgcagggacaggcaggtgaccctcacggagcctcacatggcgaacaggatgaagaaggagatcatcaaacagaagagccccatggcctcagacagggcaaagcccagaatggcatagaagaggagttgctgcttgagagacagcttcctggcatagacaataatcaagctgccaaacaccgctccaatgccagcccctgaatcagccacaccaactgtggctgacccagcaccaataaacttggcggctgtgtcagtgtcccgggagacaacactggtctggaactcccgtctggccacctggagtggggagctgctgtaggaaggctgtttagatgaattctctgggctattcaaggagaaggcagacacaggcctgattagacccctggtacaacagcagatcagagctggagaaatgagtaataccccggtggtctgcattttttcagtctcccagctttagcccttggtctcagcactcagcttcccccacccggaaaatcaacctttaaagttacaaaacacttgtttttttatttttgttttctttaacagggccattttttttccccctctctggagatggaggtctccctatgatgcccagactggacttgaacttctgggctcaagtgatcttcctgcctcagccttctaaggagctgggactacaggcatactgccctgcccaaaagacatgttttatgtactttgcttttacttgaagctttataaaatattagctgaaagatttc

SEQ ID NO: 74875 - DNA, 1043 bp, Homo sapiens
actgcatgctctttaacttccgttctaaacttggccttagctacactagcaattctgaatactcttagttttaaaacttggcttctaagagttaaactataattaacttctgatgaggtaaaccattaactttgcctcttgctggacacctgttcatgtgaatgcaatccagatcactcctctcaacacttatgtctacttgattgggtttgatactgaggcttaatcagagattctgaagaaaaacctaaaattaatcacatgtacattttaaaattatatatttacgtcttagagttcttgagttgactattttcaaaaacttggctcaactcattttgttggaaaataaaatatttgtggcaaatttttaagctgaagctaagccaatttaaataataactatcaacatttatattttaatgcttagctgactgttgtcaaagtcatcctaatatttatcttttggttttgtcatgactggtgtgtcatttgtttttgtgcaggagatcttgttggataattctgtgttggtaggtccctgacccttgattcctaactttttttgagttttgcggtgctgtttctttgtgtcattttttggttgtagatgtttgtttcctctgcatctctttttttaagcgaaccattaatgctaagtccagtatgtgtagcatgtttcgtggtgtttatttgataccagtataagcaaatccttcctaaccttctccagctggtgcactcactccttgcactaaatttggtctcatttttatttaatatattcatttcagaaaataattgtagttacagtttaatttaatttctgtattttgcctgctttgtttgtttgccttaagccactgtattcctcttcccaatataaatgctggagaatgacatggagacattaagcctcccattttactttgtgtgacagccttcaatcttttttctaccaaataagtaaagggtacttccaagcatgctttttctaaaagatgtttgactagcctgaataaatgctgcacctgctttgtatt

SEQ ID NO: 74876 - DNA, 1079 bp, Homo sapiens
gcaacaagagtgaaactccgtctcaggaaaaaaaaaaaaaaaaagatttaccatgtcaccagtttctatctggacttgcctcaaaaactgagttgcatttggaattataaattggcaccatggcttttcaaatttttctactcctgcagtattcgtagcacactcccattagtaacgtgactgttgaaaatcattatatagacctttcattttcaagcttgaggcaaaatatgcagcatttcagagcttgaaagaacctcagaatcttaaaaatctgtcgtgtagattatccctacttttgtagaatggtgtttgcattattaaaaccaatcttctcagtaaaaagataaactgaagaccgaaaagttaaataaagtaacacatctagctcacctaagtggtggctaaatctacattgtgggtttctggactcctccttcagtcctcatttcattattccatactacctttgtagattttatggatagatcttatctcaactctgccacctcctagctgtgcacctttagggaagtcccgtaatctcttctagcctcagctaccttgtctgcaaaacatgaggattacacaaaatgctgcttgtaaaggcaaatgtctcaggcatttagttagtactcaataatggtagttgcctttgctgtcttgacatgtgtcttcaacatacagtatattattatattaattattgatactgatagtcatataaaactatttatttatttattttagaggcacagtctcactttgtcaggctggagtgcggtggtgcaatcatagctcacagtagcctcgaactcctgggctcaagtgatcctcccccttcagcctccgaagtagctcggactacagtaaagtaccaccacacctagctaattttttttcttttttgtagagacagggtcttgctatgttacccaggctggtcttgaacttctggtctcaagccatcctcctgcctcagccccacaaagtgctgggattagaggtgtgagccaccatgcctagcccaataaaactttaaaaagagaatttgactgactttctgatagaaacttttg

SEQ ID NO: 74877 - DNA, 1043 bp, Homo sapiens
aggcatggtggtgtgcgcctgtagtcccagctactcgggagaccggaggcaggagaatcacttgaacccggaagccgggggttgctgtgagccgaaatggcaccatcgcactccagcctgggcaacggactgagactctgtctcaaaaaaaaaaaaaaaaaaaaaaaaaaagaataactaatctaacaatctgtaacttagattatccctacttttgtagaagaaattgtacatcacagatttgtagtgactgtaaattttaaaacctgtaatatatgtttaaactggaagtaaattttaaaacctgtaatatatgtttaaagagtaatgtttttataggccaattattaaaagctttctgctttttattttaggtaacagtacttcaatttctaccttaaggacttcctgtctactgggttgtgcagtaatgcaagataacccagactgccttgttcaagctcaggccatctcttgccttcagcagcttcatatgtttgctccacgacatgtcaacttgtctagcctggttagctgcctctgtgtgagtatagaattgtaaacgagctcttagtttcttttatttgaatcttagatttattccagtacacattttaattatactctagactatgtacaaagttatgtgttatatacgtagctatttcccctcagttctagtctttttcgggagtagggggcagctttcatgcaatcagctcctaagtctctcttctattaatttttctcccattgttgtacttgatatttggaatatttattcataaatcaatgaaaacatattgtgtgcttataatgtcccatgtactatataaatgctgtaggacatgcaaaactctatgtggtcacctgtctttttttcttctttttcatctattctaagttctttgcatcccagatggagaaataacacttttccttaatattccagcaacatatgcatcaatatctggcttctaatattgtatctactgaatgtagaaagataaaggccatcaaccagaagttcctttgaagtggtt

SEQ ID NO: 74878 - DNA, 1018 bp, Homo sapiens
aataggagctcatttttgcagcatttaaagtactgtaagctttcttatacatccattgataagaggaataaaactttttcagttcattttctgaagagagagcttttaatttacttcttgttatagaacattaaaacgtacacaaaattagaaagtatactgcaatgaatctattatactcatcacctaacttcagtggttatcagtatatgaccagtcttttttcatttaaaccattgtgtgtgtgtgtgtgcgtgtgtgcatgtgtgtgcgcacctgccataaatgcacatatctatgtacaaacagtacattatgtaaccacctcccgaaatcaagaaacagtccattatcaataccccatacacacttctcatactgtcttctagttaactacctgcccccaccaaggataaccactatcctaatttgcaacagcataaattagttttgcttgcttctatactttatgtaaatggaatcatacaacatatattcttttatgtctggttttcttcactcaacattatgttcaagagatttgtccatattgttgaatgtaattgtagattttgttgaatctttttaaaaacttgaattttcattctttctatagattaaacaataaacaatttttcaacaaactagatttgattcaaactgttagctgaagtaccaactattacttgcaattcttaatgatgaactatatcattctaaattggatgattgcctctgagttggaagtcctccatttctctttccacatgagtagtagcattcacatttgctgttactttatcacttgcttcaacaaaagaacaagttaatttattttatgtttcttaatgctgctgtaatgtttttaattgtttttctttgtcattacagacctgggcattacattctctatcattgatcattgattctgctggcccactctattatgtgcatgtggaacctaccctttctcttattataatgttgttgttaaatgtgcctcctactcatgctgaag

SEQ ID NO: 74879 - DNA, 1035 bp, Homo sapiens
ggtaaaacactgtctctacaaaagatacaaaaattagccgggcatgatggtatgcatctgtggtctcagctactcaggaggctgaggtgggaggatggcttgagccggggagacagaggttgccataagtccagattgtgccactatgctccagcctaggcaacagagccagaccctatctcaaaaataataataatagtaataaataataataacagcatctactattttaaagagcttaataggtaccaggtgttacgatacattcttctaagtctcatagtaattcttttagtccttgtaataatttattagggtgtatatagcccattatggggaaataaaactgaggcttaagaagctaagcaacttgctcacaactgaaaagctaataaatcatggaatcagatcaagaacacaagtcatagactccaaactcctgttcttaaccactttaccatatcgttgtacatatcttacctatttctgtcagtaaaatcatcattctcctatcttaatcaaatatggaatgatttttatttctcccgttcttttactccccttctgtcgtcttatctgtctcccttattaatgtgtgccaaattactgtcatagcctcctaattcgtcacatttttaggtccttttctttcgaactctctctagatataaggctaaattcgttttcctaaaagattttcatcttgccactttcctgcagaaaagcttgacaaagtgcttattgcttcttgaatcaacttctttattccagtcccatcaactgaccccacagatgttttctgttactacctcaaagtgttgacttctacagatgatttatccacatgtcattctcatgtctacatttaccttttctttttctcttctctccttacatgcctatttgatattccacatcttttagtcttttaagatccagtataaccaccatctcaccaagctttaatccagttagctttccccctctgaattaccatattactactcgcctcctccacttcatctagtacttgac

SEQ ID NO: 74880 - DNA, 1034 bp, Homo sapiens
gcttattttgtggacatctctgttaatgttctttcaaaccatttataccttaatgataattgattaccgtattgctgcctggaggtttaaaattctaaagtgctttgtaaaaaaaaatgaaattatatttgtattatcagtgtggatttttgtgttcttatttgtttttaagtagtaatccaagtatgaacatatttggatttggttaaccagaatgtacattcctaactggatatgagaatttactacaattgtaagtttgggttgttctttacatatttcagtacgtggctggctccaagggatgtttaggtccagaagaaatgaaaagatttgccttaacattagttatgggagccctagaaagccccaaccccttgctgagatgtgcagctgcagagtcatgggctagattagcccaagtggtagatgatggagcttttactgctggattagctcaagttagctttgacaagtaagtgaatttcttatttaatattcagaggctatgtttcaaaactgggtatagctttctggcttgttggaactagtaagatcttcattctgagatttaactaagaaaagaaaaattgtcaaatgttgactgctaaaggaaagaaaataaaaattggccggctggtcttggcacataaaacaactactatttcagctatagtctttatataataagaaagatcagaatctatatgagtgatgtaattgatcatcaatgggatggactctaggatagtgaaatatttatacagttttataatgtaaaacatatatgataagtaataagaacaaactacaggaaaaagaaaaggctgtaggctgcagatgaggaaacaaacggtactttcatgtcttttttttttttgagacggagtctcaccctgtcgcccaggctggagtgcagtggcgcgatctcggcttactgcaagctccgcctcccaggttcacgccatcagcctcagcctcgcgagtagctgggattacaggcatgtgccaccacccggctactttttgtattt

SEQ ID NO: 74881 - DNA, 1010 bp, Homo sapiens
aaaaaacatatctgcttttgtaaatctttttttacatctatttttatattttatgtcatgttataccttaaggtatgtacacacacacacacacacacacacacacacacacacactcttacactttgagatgttcttttagtatccattcttaaccttgttactagcaacacgtagttgagccagtcatttctagggcagttttcaaggatgagaaatacagtcttttggctgtgatatgttaaagttggccagtgggtgcattaaagctcaacctgagttttaaatcccatactctcaccagataattaatagtactaattgctctttttctgtgactcaacaggaaacctctgtgctatcctcagagagctggctgctgacttgactgcccctgatattcaggtggcagcatctacatttttacttccacccctctgtcatcaggatgatcttttgatactaagtcctttcctacaagagactgaccatagatttattgaagaacaggtatggccattttttactcttgattagattcaatctgtgatcagtgattttaaaaccttatatactttttttcccttttagctcctgcttggtaatggtgttgcttgcggaagtcttgaatatgacccttattcgatttatgagaaagatgtagagggagattcagtgcctaagcccttacctccagcactatcagttattagttctgcatccaagctctttggggttgtatgcgctcatgtgggagaaactcaaaggtaaatatcttcaatggttcagtgaatggataatagagaactggtgggtaagaagaatgttgccagagatctcattagcgtaaatgatttcttataaataacaggtgaaggtgaaatataagtttttgtttaattattcacttggctaatacttaataagaaatgattaaatgcctaaaaccactagaactgttgtggatacaatactttgctcacagcttatcatctagctgaaaatacaaa

SEQ ID NO: 74882 - DNA, 1113 bp, Homo sapiens
ctccagcctgggggacagagaaagaacctgtctcaaaaagcatgcaatgttgtttgttactataataattgtactttgcatttatgtggtccattacagcttttcagagtactttaaagtgcattctatcatttggacctgacaagcccttaaagacaagcattacagggggctttagcttcatttaatatgtagacgaaactgagtctcaaagagcacatagcagtagtggaggagctgatactagagcccagcctgtaccattagttctttgtttttcctctctgtactccagcaccttcagataataattcattcagtaataatttggaacctgaagataagaaaggggacaaaatgttgcaataatgaattaaaatgtttaggagagaagttgctgcttaataatagagttttaaagagtgacaaccttggattctcttacaagtgacaagttgaataaattacaggtcctgcagttgttagccatcaccttgctcgagttctgctgttgtggaagtgtgtctttccagcatctcctaaagatctagaaacagaaaagagccgaggagattcgtttacatggcaggtgaccctggaaggacgagctggtgcactgtgtggtaggttggatttagtcttttctctccctttcctttggctttttacccaccctttgtctttaacatgtacttgtatgttttatttaacacgaggcagggggatatgccactaatgatttttttttgtaactgaacaaaaaaattataaccgattagttggtaatgataactggtgtatgttataataaaccagatttgagagttcttaagatacatgttttattaggtccaatccagttaaaactgccaacattgttttgtcttaggtgagcattcattcctcttttcagaaatactaaggtttggtttaattaccattaagaatcgtttccatttagcctatacagttgacccttgaacagcatggaggttagggatgccaatgcgcctcgaagtcaaaaatctgtgtctagcttttaactccccaaaaatgtatctaatatcctactgttgaccagaagccttactgataacataaatggtcaattac

SEQ ID NO: 74883 - DNA, 1039 bp, Homo sapiens
attaatttttcaagatattgttagctgctatcatttagtaatttataaactgatatgctttttttaaaacttgttctatatgtaaatagattattatgacattagcagaggatttgctgtgttctgctgctcaaaacagtcgcctttcagctcagcgcacacaagctggatggttgctgatttctgctctgatgacattaggtaacagtctgtagaaggtttacataccttgaaatactttgtgttttctgagtgaaatgattcttatatgtgatttgatgaaatgaacttttaatacataccagaatttaaatagccacacaaacatttttcttgtagtagtcaccttaaaaagccttttactttcgtcattgcttaaaaccttttgagatctctcttgattttctcttccgggctagatgataagcctcaagtaggataagccgagttactaatcatctttcaggcttaactctgaacaactgtggctttttcaaaaatcattgacatccatcttcagaaaaaaacatttccacaatataggcaaaagaacatacccatagcttgggaatccagttctataattgtttgaggattcataacagccaataaggttgctacattgaaggggatgaattttacttaaattatatttattaaaaaacagtaattgttttacagtcatgactatttatatcctctaaatttttgagacagggtctcactctgtcacacgagctggagtgcagtggcatgatcatggctcactgcagccttgacctcctgggcccaagtgatcctcctacctaagcctcccaagtagctgggaccataggcatgcaacatcatgcctggctaatttaaaaaaattttttttgtagagatggggtctcactatgttgcccaggctcgtctcgaacttgtgggctcaagcagtccttccgccttggcctcccaaagtgttggcattataagcatgagccactgaaaactttatttatttattttttgcccagtcttatggtgctaatgaaactta

SEQ ID NO: 74884 - DNA, 1530 bp, Homo sapiens
gagttattccagggagctgtagttgcaaagagcctagctggacatctggcagggagtgagaagcagtgcctgccaaggaaagccctcaggtgaggctccaagaggttagaaatttagctaaattttaggttaggtagctaaattttatgaggtaggttgtgaattaaaagtaggaaccagccgggcgtggtggctcacgcctataatcccagcactttgggaggccaaggcaggcggatcaccaggtcaggaattcaaaaccagcctgaccaacatggtgaaaccctgtctctactaaagatacaaaaattagctgggcatggtggtgcgcgccttaatcccagctactcaggagactgaggcaggaaaatcactggaacctgggaggcagaggttgcaatgagctgagatggtgccactgctctccagctggggcgacagagtgagactctgtcacaaacaaacaaacaaacaaataaataaataaatgtaggaaccatgaggaagagccaggacattagaccatagtgtggattaagggtgaatctgtgaattctaactgggatgtaagagacatgaacaattagaggagagggaaaaggaagattccaaagcaggtagagtctaatgcctaaacttggaagtcctagatagcagattgcacaagcaacagatgcaaggattgactcatttttaaaagggggcaagaatttctggcctctcctgtaaaccctgatgtgctggaggaataatggcatcttgtacactttgcacctgtattaagtagccctatattgctctgcttttaaaaatatctatattcaatattatttgtctctttcatcactgttagcttcctgctcttagtgggtttgctcttttacttttaatgtgtttctctatctagaatccaaataactggattattagtcatgtctaaactaagaatgaataggctttgatggatttatgtcagtaaaatccacgagttctgaaacaattgctctatagactttgtttttttacttcctgttactggaatctcagttaggtaccaagtagtgtgattgctagctagtgactttcagaagagtgtggtgggagatacaagaaaagtaaaacttcttaacttaaaatctgcctctggcattcctaaaggtccagaatgaaatcccccttccatggagagatgggagaattggtgtgtggaatgaagcataataaaaatagtcaagaatagccaaagactaaactaatacttttagtacttattgatttgccgtctagatggaaagggctctctgaaagctgatgtctctggaagacataacactaacaaaaagcctcaaagtactggagacataaaagtgaagtgatgagaaagaacaacaaagttagaaggactggatgcttcaccagctatggcaataactgtattagtaatagcagtgattactgtagagactatatgaagtagttgaaagaatgtggacgtttagacagacagacatggacattaccttcttcttc

SEQ ID NO: 74885 - DNA, 1062 bp, Homo sapiens
ccattatactgtctaagccctgtctctactaaaaatacaaaaattagccgggcttggtggcaggtgtctataatcccagctactcgggaggctgaggcaggacagtcacttgaacctgggaggcagaggttgcagtgagccgagatggcactaccgcactccagcctgggcgacagagcaatactctgtctcaaaataagaaaaaaaaacaaacaaacaaacctatatttgagtcttttcataaagcaaactttctatgatgcaaaaatatctttattttgtttacaaatatgaattttgatgaaacaagatttattaaaacccttctatatttaatcacaaaataaagcagttatgtgggatacatcacaaatagccaactttaagataaatatgaccctacttctttttactggacttttccatgtgaatgaattcttcacactgggttagtcagcatttttctcttaagaagcttaataaaatttgacctattacatcagccttttatctgaatgtgaaaagaagaatttatgtggagaatgcaccacaccctgtataacagtatctgagaaccattagctattattgccataaacatttgaggttgggaaagtaattgtgggctttttttttgttttaagggaaggtatggagtttttttagaaaatgtctgatcatactagcgaaaatgtaacccttggctccaactttgagagactgtttacttcaaccttgtactaatgtagataggctaaggcacactttctattcctggcattcttctgatttccttagcagccccaaggtatgtctatgagcaaacatgaccatcttttaagtttagtttgctcaatgcctgcattattttttcttctgattacattctgaaagtcctcggggcttttatttcttttttttttttttcttttgagacacatttcactgtcgcccaggctggagtgatcttggtgcgatcttggcgcgatcttggcttactgcaacctctgcctctgggcttcaagcgattctcctgcctaagcctcccaagtagctgggatt

SEQ ID NO: 74886 - DNA, 1047 bp, Homo sapiens
aagactccgtctcaaaaaaaaaaaaaattttgaaattgatcttgataaagacctagcatctctcaatgtggatcacttgagaaagaatagccaataaattggtttattttctaaattaggagcagacaggattgcacctaatttaggtgctttctgcctctgttttcctaagattaaagcatgtttcaaatagaatatctaaatacaggtactattttatctgccaatttagaaacctctggattcaattatagaaaatactatattttccattgtgtataagacacaatggatatggttgtaatagcttgagtactttcatataaagtaaaatcaaacatacttttaccattctttcatgagttcaagtcataaaagaaggtataccatttatttctgaatagtatctgtactagtgatgatttcttgactccataatgaaagaactaaatttatcagatatcaatatcaatactataaaatccttcatgccacttgttttagaaaagaactcacattgatgttataatagaacaatgtcatgtcagatttttactatctgtgattaacattgcagaggacctaatttgttatattatagttaaatgtatagcaaaaaaaaaagataatgaaattccaatgtccttagaagggtcttgcctattaatttattgaaataagactagtttcttaaagggaagaactactagaaaagtaacattttcgttttgaagtcatcccttggtgatgactttaaacagttattttgatagtttcataactattctccctacctcctgtttctcctatccccattccttttctgcagaccatctccaaggttatattcccagaacatgtctttctctatgatattctacttcttagaaacttctataactcctctttatcgacaggacaaagtctaatcttctgaggttggcatcagcattctctatacgccttaggagtgaatgaaatcactcaaggagatctgtagaggactaaaatcagaatcttaagaaataacatgtaaagaaacggcaa

SEQ ID NO: 74887 - DNA, 1051 bp, Homo sapiens
gccaaaaggaactttgctggtgtgactaacaccagcaaaattaaagatcttgagatgggaagattatcctggattatctggctaggtccaattgaagatccttataaatgaaagatggaggtaggtccgagtcagagtgacttgataagagaaggattcaatccaccattgctggccttgaagacagaaggggaccactagtcaaggaatgtagtcagcttccagaagcttgaaaaggcaaagaaattgatttttccctaaagcttccagaaggtacgtaattctgccaacaccttaattttagctcattgagatctctttggacttctgtgataatattttatagaagtaggaaactaatacatataggaagtaaatttgcttatttctttaatttccaaaagtgtctttaatttatattcgttatttgatagcttaactagattctagttaactataaaattccaggttcaaaataatttcctctctgaactttgaaaacaacataccgtttttttctagcatgctaatgaaatgtctgatgatagtctgattcatgttcttttgtaataaccagtgttttccctctcaaagagtttaggttttctttatgtcttttacatttaaaagtgccacaaacatgcgtctagttattggcttaacctgcgtgggatttggccctgcagtatcaagctttgagtatttttcagcataggaaaaatttcttctgctcattgattatgttttgtgatgtgtttgttctgtctccagaaacctgttaggtagatactgacctttatgcttgttaatttttctgtcatattttgatctctttgtcttttgctctgtgttttgaaagatgtctttgactatttttcacattgctgtattggactttagttgttattaggttcttctgattttgtttttcatttggaaattatttttttttccaatttttccagaactatttcttattttccacttgctgttccaaaaaaaaggttgtaccattctcttgaatctctccgaggatgctaattgaaattaa

SEQ ID NO: 74888 - DNA, 1090 bp, Homo sapiens
tttagtcctagagatgtagtggtaaaatgtgtaagtttctgttcttaaggagtttaagtgtattggaagagacataataaacatatacttttaggtggttataatggttacaaaaaataataaaaaagtgtaaggatgtagaaagtgatgggaggtctgggtgctgtggctcatgcctttaatcccagcaacttaggaggctgaactgggagaattacttcaggcctggactttgagaccagcttgagcaacatagtgagatccccgtttctacaacaacaagtagctgggcatggtggcgtacagctgtagtcccagctactcagaaggctgaggcagatcacttgagcccaggagttcgaggctgcagtgagctatgatcacaccactgtgctacagcctgggcaacagagtgagacccccatctctaaaatataaaaaataaaatgaaagtgataggaggtgcaattttagataaggatgtcagggaggagatctctgaagacatgacatttgagcagacatctgaatgaattgagtaattgggccacaggaagagcaaaagccctgaggtagaatcaacttggattatatgaagtgtttttataaatgggaggaaagcctcatgaacagaataaacaggaagaaggtccatgtgattggagtggtctaggggaaaggtagatagaggcatgtcatgcaaagcctcataagccgtggtggaaatttggatttttttctgtgtacagtgtagtgggtttttcaccagggcagtgacagtctaatttactccttaaaaggatctggctgtaatgtagagaatagagtataggagaataaaaatagaacaagacgactagctagtagctaatgccagtgtgtaagctaaagttgatagcttggactatggtggtagaggtagtgataagtacatctgttccaaagatattttgaagatagagccaggaggacttgctgatgaattggatgtggatggtgaaggaaagagatggttctttttttttttttttttttggtatggtaaaatatgcataatataaaactgaccattttaatgattttaaagtgt

SEQ ID NO: 74889 - DNA, 1063 bp, Homo sapiens
agttaacaattagccatatttctagatttaggtcccctcatttgaaaatcttgttatccatagtaaatttaattgttttaatttagctaaattcttctgtttgtggtttaaaaaatagttaaattggtcaaatttctcattgactgttcctcccttcttaaatctgatacctaaatgcattaagcttaaattttatataccaccattctatgaaaaatcaagtatccttcctatttttctcatttattttacataaagctgagattttcatagaggcagatattaatcccgttttttcctctgaggacactgagtcatacagatatatatatgtatatttaaactgcagttttagtcagtataaagttggaaacacaaatgttagatttaccttattttgtatgttcataggaaccagataacaaaatttaaaaagtttttttttgtctagaaataggtaggtaacatcgaagatgagtgattgcttcagtttttcaaaaaattttgtcgaggggttacgagttttattctgtaggatatgaagagagtagtaggaaagttgtaagacttgatgaaacaactctaagacatatcgtgttagggttctgtttacttgtagatgagcaaaaccagtaacagattgatttcatctatcaaaggagaaagaagagaggggaagaagaaaaaaaagagacatattttttaatagcggattttgttttcctttccttggctaagctgctgattaattgacagccagcgaagagcccagacagggtatcctgtccttcagcagctggatgcatcatcaaagaaaacagttttagttgtttctgaatcctctagaagacgttttgtatttaattgtgacttgcatataagaggttgtctctgtgttaggtgtgccagtatccttgttagtgcttccatctcatttatgccagatctacatcagagtttctcacttgctttattatggccctgtttccatgatctttttttattttgtcttctttggtgtgttagacaagctttccaaaagttaatgttgtgtctttctggg

SEQ ID NO: 74890 - DNA, 1053 bp, Homo sapiens
agcttgagcccaggagttcaagaccagcctgggcaacatagtgagacaaaaataaaaaaattagctgggcatggtggctcacacctgtagtccctgatattcaggggactgtggtaagaggatcacttgagtcctggaagtcaaggctgcagtgagccatgactgcaccactgtactccagcctggatgacaaagcaagatcctgtctgaaaaaaaaaaaaaaaaaagaaaaagaaaagaaaagaaaaaaaggaattggaaaaactgataatttttttaaaagaatggttttatgggaaattggtttattgatttgtaatgataatgagtataaaattgaataatttctttttgttcttattgggctttttattttccattgttctagagaaaatgactatatttactcctgtatatttattggattatctctgtaggtaatagaagattatttttgttgtcattaaaagttaattcagcattgcttaccatttaagaggcttttgtttgtggtttagttgttggagccaattataatgttaagttttggataattctttatgagacagtaaagattctccctaacattttgaagaaaacttaaagattttagtgatgttaacattgaccctagcagtagtatattgcaagtacccacttaattattttcttgtttcatgaaacataaacttgaaaagctgttattctggtttctttttcttgactttttagtggaatacatacttagtttgcaaatatatgacatgagccaaggtgtcaagctttcacaaagaaggagtaatgaatttgcatactttaaatgatagattcattatgtttgtctcttgattaaagtaatatgaaaactagtacatgcagaacatgaggaatggcaaaatggagccctcagtgtcattcttttcttaagtagtctgcttggtatatgccaacataaacactcgaagtgaactttaatttctttcttcttgttttactgaagctataatcttaaatttgatgtttgcaaattggctgccagtaaataggctttcg

SEQ ID NO: 74891 - DNA, 1047 bp, Homo sapiens
tcttatactacaccaaaatttggcaagtgttggtttcttaaacatgagttagaatgtttaatttgagaccatatctgtgaagtttattcagtcttgtatattgtagactttgaagtggatcttatagccatgcatgattttataacatcatgtattgctcatttagaaaacattagttcattgatttatgctggtcttctaagtgtttacacatttcattatataaaatatattttaaaatcacatttgttaatactgtattattactgatctcatcagacaattctttaagtattgggaagctgccaaactcatagtaggcagttaaaggttttctaaaaaagtctaatttacttgaaagttttaattttgtcatagacaacaagtatttccaactgtgttctttgaagtcgtaggtttattttattttgtatgctaaatacccatgtctgaatagcccttttttttctgttcatccttttgtcttccaagtaaaaatgatgttccatgaaaaatgcctctagttcagcttgcaactcaaacaattgcataagggcttttcttcgaggtagctattgtaattcagtatgtagcagggatgcttgctgtgtacttcccattttgtcacacagaatgttaaacctgtatacaacatttgagatgtgataaattgaataatttttactgtattacccaggacattcttcagtgaaactgacctttaattttactgtgatacatggtggtgaagaatatgatgactataagtacagtttggtgccactgccttaatttgtgctaaggtgccagcagttttacctaccattgcttttgaaccatcagtggaaatgtcagcccagtgaaaaaacaaatactatattcccaccccccaaaataatatctttgtagaattataaaaatagttttaccctcttggatcatctgaaagattcttggggatctccagagagaaagggccaataaccaaccatatttggagaattgcttgtttaatggaaagttctttaatcaaaagtcagaattctt

SEQ ID NO: 74892 - DNA, 1074 bp, Homo sapiens
aggatcgaagtcttgtttttgttttgagacagtctcgtgttttcgccaggctggagcgcagtggtgctatcttggctcactgcaacctccgcctcccgggttcaagcaattctcttgcctctgcctccccagtagctgggattacaggtgcccaccactacacctggctaattttttttatttttagtagagacggggtttcaccatgttggacaggatggtctcgatttcttgacctcaagatctgcctgcctcggcctcccaaagtgctgggatttacaggcatgagccaatgctcctggccccaagttttgtttttttacttcactgttacacaatacttaggaggattttaatatgaaagatgtaaaataatttggttaaatttctaaacagtgtcagaacctttaagataattggatttattccacttattagtttggcttattaaatttacaagagttgcttatgtattttggttgttagatttgcaaggctaccctgtcgctcatttgaaaggtttgagaaaatcagatttatttgatttgtaaatttagttttaaatgttttaggcaacttaatttcactggtttataattgaagataattgtttaggggaatttaatctgtaatgattgaacatgaagataaaatgtgaaagtaattgtttatatttttctagtaaaattataaatgatatacgcaacaagatttgtgaaatgaacttttaagttttgcacttttagagttttgaaattttaacttttaaggtttgcaaaaagtttaaaaacatacaactttaaatatgtgatacaagtaaccatttttgtataataaagtctcacctaagttgacatttcagaaattaaaaatatgaggagataaggtattatgcacatgctgttgagactgctgaagttattttttaaaaatgttaagtatacattttatgttgtcaagaaggagcaaatactctttttaatatttgcatagtatcttccattagactttaacacccttagctctttgcctttaggagattcaaattaaaaattcactttttttttgttttga

SEQ ID NO: 74893 - DNA, 1100 bp, Homo sapiens
gagagagagatagggggatgggctggtcagtcgagcagtcagaacacacacacaacatatattgaataggtttgcatcttatgtgggtgcagttcatggtgccccacaacaattacagtagtaacatcaaatatcaccatgatagacatactaataataaaaaagtgtgaaatattgtcagaattgccaaaatgtgacatatagaaatgaagtgagcacatgctattggaaaaatggcaccaatagacttgctcaatgtagggttgcacaaacctttgatttgtaaaaaatgcagtaactgcaaagtacaataaggcaaagcaaaataaaacaaaagtatgcctgtagaaggcactcaataaatatgttgaatgagtgagtgaggagaaagaattgtcttatgtagtaagcctttaaaatcaaattcctttttaaagaaatgtaatttttatgcagtcttttttagcggtacagctattatataaattgataattgcctaaatattaaatggcacagaatgaaatctttaatgtagtcactgttctagaaatacttcaaatgtagccagtaaccaaaatcaccagacccccaacatccaaagttttattacctgtgtgggcagcctccaatttaatgtggtatggcagtcattgatgactgtgctttttattacttctttactatgatttcttatctatatactctgatatatgggccattcatataagctttcaaatctctagtgtaactaaatgggtaatatagtaaggcttttattatctaaacaatgtttattgaaaagagtttgcctctaagtatttgtaagtatattatctttcaaaacaaattcggtttatataagtcttatagccacaatgttataaaggccacaccgaagccagtgtcttgtctttggctgtacctctatttattttctatttttgtccttcattgggtctttttatgcaggcagtcataatttggtctttttaaaatgtttaatacaggttaaagccttaaacaggttttttcttgcttcataatatacacatgaacaggcattttggtcactataacaagtgtaattttgtgtttagcc

SEQ ID NO: 74894 - DNA, 1052 bp, Homo sapiens
gactatgtgatgtaactgctactactggtttttgttttttggactgaatataagtggttctttctgtcatctttaaaatttttctctcccagatgcctgacaacttggagatgacatatagttttcatcttaaataccaactgactacctgggacataatgttgaaaagattctcagactctacctggttttagtagggaagaatgctatgatcaattactggtgacaaggcacatataaaataggctggaggcaggaaatggttgtgtatgggttgctggagtaacagtatgtaaactgtgtttattatctttactttaagtcctagtatgtcttatttgtttctagccttccttttactacatcctgtaaaactttctaatataagatggcaagttttagaagtgagataccaagtttatatctgtactcagtgaattagccccggagtagaaaagaatctgatgtatcacccctgctccaaaatatcccttatgcattctttcccatttatattctagtgagctaatagtttctgtttaaaaaatacttagattttctgaaaagctgaagttctcaatgtgatctacttgagccagatgattttcctaatgcagtctgtccacatgagaaaatgagagttttgattgtggaaaggatgaattggaaaagaggggcatttttttaaaactgaaaaatagattggattaaaggaaagatatgcctgaatggctttcagcttttagatggtaggatgcctgagatgggcatagtagggttccaagatggtacaaaagagaaaagtatgctgaagataaatggaattttaatattaagagtaatagaagccataacattacaaaaacatgattttcttcatagtcttattttctgctcctttctcaaattttctgcttcctccctcatttccacttttagatacagcattattttattgccttttggttgtccaggttgatggctcaagttttgagttttgacccattccactttctagtctttacttaccttctctctttaaacccctcttc

SEQ ID NO: 74895 - DNA, 1084 bp, Homo sapiens
atatatggttatatatttgcatgtgtaatatctgtccaatcaactttaatttagccttaagaaaagaagagaacatttgattggataatctaaaaatatcaattgggctatatgttatttatagttagcttggaataagttttatttttttctcagtagatttgagtttgtaattgtcttctaggtaaaagttaaaagtaatttgcatttacttcatcaacttataacagttaccttttatttgttcagattctactttgggtcaggcaccatgcaataggttgataattctaatggtagatactcctatattcattttcaggtatacaattaagtagatgaaatctgtcttgaactctgaaactcttctttttttcactataacatcttgcctttctaccacttttgctgcttgaattgtgataaatgtgctgtttgatttttggtcctagtcatttaagtctcttggtttcattttctcctcttttactgtcagatcccctagttagtgatttcatttaaaatccccaaaccaccccatccccaccaattcctttgtgaccttgacctttatttgtcttgattaacccaccctctgttttctgtacttctaaatactatcagagaatatagaatagttgtgttaattgcctgcattatatatttttgatttttgaatttagctaccttcacaacacttcagtcatcagattttacatgttgttattctcaaaaaatattcagggaatttggtagtctagcagaggtccaaatgaagatttggcaaaaacaagctctctgacacataaattgtataaaagttacagtttattggttaggtgtggtggctcacgcctgtaatcccagcactttgggaggccgagatgggcggatcacgaggtcaggagatcgagaccatcctggctaacacggtgaaaccccatctctactaaaaatacaaaaaaattagccctgcttggtggcgggtgcctgtagtcccagctactcgggaggctgaggcaggagaatggcgtgaacccgggaggcggagcttgcagtgagccgagatcgtgccactgcactc

SEQ ID NO: 74896 - DNA, 1009 bp, Homo sapiens
tagggattttaaacaattttcaaatttcagctcacacctcagaccaattaaattacaaatcctgggcatgtgacccaggcattatcacttttggaactgtccacctgattccagtctgtggacaagtttgggaatcactggtgtggagagttttaagaatgataggtcagggagaacaaggattgagatagggcaagggaataatagatgttcggtggaaatttgtaaaccttaactagaacagggaatgaaaaaagattataggggtttaagaatacatttataacaatactatgtaggtagaggtgtattctacctatatagagagtattgtattctaaaataggccattcaagaatttgggggctgggtgagggaaaggaaaggaaaataggatggtagcttaaggaggagtggtatattaaattaaagcctttttttttcttaaagaggacagccataccttttacaaggtgaaaggattcagtgaagaggcagtgaaaattatagaaaatgagaggattgttttaaaaaattatgaaaaaggcaaaagggaataggattaaaggtcagagaggtaagttatttttgaaaaagaagttcttccaaatttgtgtttggaatagaaaaaaagggcagataaagtaatcccatcctacctgacactaaaaagaagttaacaaaaggtattcttcccagtagacgggaaaagatggtgcatttattcaatagagcagtgatgcacagtttttagtgttcatgaaaattacatggagaactgatttaaaattcaaatttataggctttctattccactctcccacttgaagatttttattcagtaggtcccaggtatggccaaggaattcacattttaattagattattccaggtgactctaatgctggtgggtctaaaatcaggcttaggcatacaatggtacagaggcagttctttttaactgctttcagaggaattaaaaaaaagagagatgaggagatgaatgata

SEQ ID NO: 74897 - DNA, 1100 bp, Homo sapiens
acagatttcatttctgatttttctggcttctaactaaagaagtaaaaatataagagaaaaacggagtgtcttgtctaactccaggcctgaatctgaaaagagaacaggaaaggaagtaacaagaaagagaaaggacataaaggtactatgaaattgaagccatcattgtagtttaaatttgaccagtgtttcaaatataaagcaaagatgtttgggtcgtcttttgttctgaccagacagataaacttttctcatttccttctttgtgtatctaccagaggaaagtaatgaaatagaggtcctggaacagttcatgttaagggtaggctctaactgtagctctgacaaaagtaggaagcatgcagaaagctggcttgtttataagagataaaatggcacagtcttattcaattgaaagccaacaatcaaaattagagcaaaaggaagcactattagaaaaatgtgccaagccagtgaaatatattgatcaaaggggaatgaaagatatcagacacagtttattagcaacaaaaaatagtgaggctgaagtaatttgcttttgaaaataaataaattaaaaggaggctaattaccacctttacaatgtcctatttctaccttaaacacttccagaagcatgccttttttactctatctgttgttcaatgcagacttaaaattttgtgttaatcaatatttattctgcaatgccaaggtgacaaacaaaaatatgaaaaggctgttagggcttaacatttttgttgcagattaaatatacagcattgaaaactggaaaggcatgacttcatctctgaccagcagagttaaagagaaaaatctctccattttccatgatgcagactttgaagaataacctacagtgatttgaactgagttaggatgagggtaattataaaacataagagtcttgtcttctgcagtgataattaagaagccttaataaaggtcacatgagatgacttgctgagcctttaggagagcttcttagagtagtggcccctgttgaacaggtaaggacttaccctatctcttttggtgcagtcggggatcatgggatcagagtcagatgtcaaaagcct

SEQ ID NO: 74898 - DNA, 1021 bp, Homo sapiens
catagtttgaaaaaaatttctatactatttgccttcataggcatgtgtctgtgttcactacttatttttcgtattattattaatgtggtgttgatggaaagtccaccaaaagaagtgactcaatagtgacttacacttttttttttttttttaagacagagtctcgctttgtcacccaggctggagtgcagtggcacgatctcggctcactgcaacctccgcctcctgggttcaagcaattctcctgcctcagcctcccgagtagctgagactacaggcatgcaccaccatgcctggctaatttctgtatttttagtagagatggcatttcgccatgttggtcaggcttgtcttgaactcttgatctcaaggaatccacctgccttggcctcccaaagtgctgggattacaggcatgagccactgtgcctggcccataatgacttaaatatcttttaaaaatattttttgtttagggtaggcctatatgtctgtagcaacaaatatattagacttttatagttagtttattttggtagcatctaaatgtggtgtattaattatctgaatgcagaaagcatcaaattaaataggttgaattgatatattatccctagacaataatattttactaaaagtagctacctattattaggtatttattatctgctaagacttatactgtttatctgcattcacatttaaatcacacaattctatataatgtactattactattatttttacaaatgatgaaactgaggcacaatgaggttaaataacttgggcagggtcctacttgtaatctctctgattctcttggctcagcttttaactaaactgtacaactgaagttttaaaattttaaatttttgcttgaaagattgaaaacactctttttaatgtcatccctgaaacgctaattgacaaaatattaagagtattcttttgtttcccaagttctcattcagctacaagttttgtattttatacgttgtattttataagacatttctgagtga

SEQ ID NO: 74899 - DNA, 1017 bp, Homo sapiens
ttgtgttctgcagcatgttgaaagggccacacattctcttgtctcagggcctttatacatgctgcttcctgtgccttcttttccctacctctacctggttgctattcattccagacagtgctctgtggtagacccacattttcccctatcatagcaagaaattcttctcttcactttgtgacatttcagacagtttttattgcattcctgtgttttagaaatttagaattttgaagcttgcttttaatttgtggctccttcactcttaatctaagccttaaaaagaaacaccactaccaaaacaaccccaagcctgttccttagctttatgcttctccaggcaagctgacattgcctaactcaagaatcgattttgtgtcagaagtcagctgatggtgtttgtttaaaaaaaaaaaatggtattttcagctttcggccccgactactgaacctgacaagttctgacatctcttctcttggctgcctctcacttttttttctgtttccatggaaatggacatcagatcacagaaacatagtaagatactagtggctaattgctgttgcagaattcaaaattctttttgtttgtggagtgattattttggtgactcttacccactgtgtagtatgtggtagttagccaaaacatctaaggcaatttatgggtttgagagctagaagatgctttccaagagtcactaactggtatcctaaaatatattctctttttttatctttcacggaaaacatattttaagaactataatcttgtcagagaagaacattagatttcaagccaggagatccagccctagtcccagatctgctgctatctcactgtttgacctctgtcaattttgttatatttattgaatgaacaattgctgctacttagacttggggctgtttacaagtgtcccagggaaaagactgtctttctgccagtgtgctttaatagcaaagatagaaataaaatatataactaatcttagttaagaaaatcaaacccaagtt

SEQ ID NO: 74900 - DNA, 1603 bp, Homo sapiens
acaggcgcccaccaccacgcccagataatttttgtatttttagtagtgacggggtttcatcatgttggccaggatggtctcgaactcctgacctcaaatgatctgtctgcctcagcctcccaaagtcctgggattacaggtgtgagccaccgtgcctggtccgatttcagatttttgaattaaagatgtattttatctagaagtgtcaaacattgctttgtacataggagttggtaaatgttatggcctttctcataaaaataaatattgcaagtttgagaaggacagttcaagaaaatttatgtagcaattactaattaatggcctaaagtcatatagaacctggtatttgtactcctttccttccagtcttaaggattatgtcttataaagatctgtccaaagcaccgatagaattattttagcctttaggagacaaagttcagagatatttgatatagctgtcttaaagtataaagggctgtcatgtgaaacagggatttgttttttatgacccaagagagcagaaatctgatccaagggtgaaaactactgggaaggttattttggctcataaaaataaatatatttcaaaaatagaatgaatgctctatcagtggaactgtttgcatgttgctatatcatttttctggaatgtgtcaggcattcagggttttttgtttagtttgcagatttcttcaacctgagattcactaaaatataagctatatgaaagcagagatcttgtctgtctgggggaccacagtatcctcaatgtctagagagcaccatgcttgatacacttgttgactaaatgaataatgagttaattattctcacaggtcatctggatacttcattccttctctttgcctaaagttcagttctgatttttgattgatgacttgagtgtttatactgggttaaaaataagggaaactattgtgaattgctttctaggaagtcaaaggcatcactgcagggcttctcaacagtggcactatcaatgttttgagctgatgatgctttgtcttgaaggggctgtcctgtacattgtaggattttagcagcatctctggctgctaaatactcaacagatatcagtagcaacccccacccccacttaacagtcatagcaataaaaaatatcttcaggcgtcaccaaacgttcctttaggggcaaatcagctcttgttgagttagcgaataacccaccagaacacacccatgctaatagatgaatccaatattttcattagataaaattaaagaaaatagtgtcatttaaggaaagctcattgtaaattatttattttaagatgaactgtgcactagtatgagctgtgtgttgaggcatgcctgtagctttataatgaagaaattgtagaatgctcttacgtatttctaatttgttttgaaatatgatgaattcaagttgattatttagctttaggtcctcagtaatgaaggcttaccatatttctcttatattgttttttcagccccaaattaccttgacaaccattatatgttgaaatacagatgtggagagttcaaaaggaggggttggtggaattagtggtttgtaactgtcaaagacaaa

SEQ ID NO: 74901 - DNA, 1046 bp, Homo sapiens
attacagtggtatcttggttataaatcaagtgaccatatgtgtgatcaccactctaacctttgatagctgtctccctaagcatcctacttgtatatacttataacaatgtttaaataattcgggtttggcacagtggctcacagctgtaatcccagcactttgggaggccaaggtgggcagatcacctgaggttaggggcttgagaccaccctggccaacatggtaaaaccccatctattaaagatgcaaaaaaaattagccgggcatggtggcaggtgcctattgttccgtctactccggaggctgaggcacaagaatcgcttgcacctgggaggcagaggttgtggtgagctgaaatcatgccacttcgctctagcctgggtgacagagcaagactctgtctcataataataataaattaattatttctgttcatggtagtcgcacttacttaacagttgaagctctcctttcttcccatgtataagagtatagacaatttgaaccaataattcttctatttctgaatttttttgttttatttattctttctttggaaatggttttcattttttatttgtaagcacacttttcacttaagaaataaaagtaatggttcagtgctggccttttacaagttttgcatgataaccttcatatttatatgtaacacttgagaatttaaaagcttttatgttttcaataataaacttttaaaatagtggttgtcactgcttatattataactcaacatattctgcacaaagtatttaatatgtttagttttgcttacattacttcaacttgttttaccttcaggtcatatcaaaaatatagtgggagctctggaaattactcaggaaagagaataatttgaaagtcaagctatttggagggcagagataagaggttgccagttatatgggttttattaggattctcttcaccagaggctacaaccttacagaactgtgatcagtgattatgtcatgtgaatttttcctttttgcaaactaagctctgtgaacctagatctcagatacat

SEQ ID NO: 74902 - DNA, 1181 bp, Homo sapiens
aaaaagggaggtgataaagggaaagaaaaggagtaagtttcttcttttatctcttaaaattgtctgctgttactttttgaactcatagtgactttagaggggtttatttagataaacagcctcctctcccacacccttttttcttttagaaagaaagacattgtaaaaaggattagagaactttttatcatttgggaagaaaatgaaaagattagggaagaacatttatataattattataacttgaataatatgttttcattttataactgggtcagctcttacctgaacaatctcaaggatgtttattgtatattgtatcatttatttccacaagtctgtaggccatcaactaaagtaaaaatctttttattattcagatttttattgtggcatttatatttaaataatttctcctgtgtaacaattttcttcttgcaatcaaaataaaatgttgcatgattttacatataggccactgggtaaaacaaaacacatgcctcagatgtaaagaaaaacactttctgctcaattttagatttatgttgtacataaaaggtgcctcacatggcaaaaattttaattttagttgtataataaaattttaaggggcaacttgactcatagaatcatttggcagatattgaatgaacactggttagatattgtggaggtatggatctggagggagagtccagagatggatgtaaatattttcttcgtttagggagcataaactgaagttgagaagatagttacatataaaaaaattatcccagaatccttagaactggaagacccattcaaaccctggaagttagttgaataacgatcctaggagcttggtaatttgcctgcaaaatttgtccaccaggttagctgcatctctataccaatagtggcatgctttcatgctctgggattctgagttaagcatgagtaatgttctgtttgctagtagggtaggactatacctaactgacgtagaagaatcaggaaattaggagcaaacagcaaacttgattatagaatagaagtagcaacaggtatatggccagaatcagatacaaggacactatcttgagatccactaagtataagtcaagtaggcatgagactcaaaactgagtagtcagacaagaaggatagcagcaaggtctggtgcagcctaacttgcttta

SEQ ID NO: 74903 - DNA, 1051 bp, Homo sapiens
atgataaccttctcttcactcactgctctctagccatattgatctttcaatttctcaaagttagcaagctcttttctgtgcacattttactgtcttcacagggcttcttgtattataaagctggtgattatgtatttatgaggatagttatctgcctgatatctctgtctctgtattgtaacttctgtgagggcaggaatcatgataccatttaatcgtcaatacctagctcaatgcccaatacatagtaggtattcagtaaacatttcttgggcaaatgaatgaacaggtgattaggggaagtatgtagtagaaacactttaatgagagttagtggagctttccccaaagaaatgaattttaagctgggatctgaagaatgaggagaaattaggaagtgaagaagaacaggcagagtgttctggagcttaagcttagatattatcctaaaggcaagagaagagttttaaacaaaatgtagcactatcaaacttccatttttcagtgttgttaggaacagactagataggcagtgctggagccagagaggctggttgggaggctttaataataacagatggtggtggcctcacttgggttcttggcagtggagaaagagagaagtgggtgtgtttgagagatttttagaaggcagaataactgattggggatagtgaaggaaaaggaagagttattgtcattccacgtttctgctttacaattgagaagatccttgggccattaatagagactagggactcagaaggaagaagtatctgaggagtaaagaacctgaggtacccttgagacctatctaaatgaaggctgagcagtaaggacttggttatataggtgaatattctgggtataaataaatgccttgaaagaaagaatcaaaatgttaataatattgggactcaagttatattaaattttttattattaagttttgggtttcattattagtgtatttttgtgaaggaaatataataaacttaaaaaaattatattagcatgggaaatgcaaaatttaaaaaaaggtgacaaaaag

SEQ ID NO: 74904 - DNA, 1100 bp, Homo sapiens
ttcttaaatctcagaagggtttagtggctttcataagataacacaattacagtagatcatagctaagtttcatattcattttgacagagtttaaagcttatgctgttgacctctatatcaaactggcctaatgtaaaacccaacaatatttgactcattaatttttctgagtttagccctaatccattaaaattcacttaggttgaaattattctaatctaggtaatccctgataaaaaaataaatttatctgtgaatatgcctaaatttgtgcaccccgatgggatgaatatccaactcgttatctggattggtgcttactacattcagtaatttttttgagtcctgaaagactactttgggcctctttaactcacacattccaggagaattctggaagtagtctagaagcagttttcttcatcttttaggagtatagccccaagtgattcttgaagagaccagtattatctttgtgctgattcatatgccttgaacatatggcccattttcagacaccctggctgtctgtatagagttgtagcaggcagtgttagtacattcatgttgtggttattaagtcagtattaaaatggataacaatgaaagactagatttcctacactgaagttgtattaatttgaattaattttataattataaaaaatagcagcaaggaaatgcagataaacaaaaaaagaaaaaaaaagtagcaaacaataaaaatgtcctaccaaaaaggatgttgaagggaatttggggagcatgtgattgtgtctatgtgtgtgttaaagccttagttcctgaggtttgggtttattcaggccagtgtcatttcacagatagcatatctaaaaaggtaccaaaaatgattcagctcccaagatttagagggaatggcaccaaccaaagaattgctggcctggctgaatcatgactttcataaatttacagaacctgtaacagcctgtcaaaatcatgtctgctctttcagacttagctaaattgtatgttctctaattataaacccagtttttctttccttatcattgactttagaactcttttaagatactctgtgttcttctcccttttcttat

SEQ ID NO: 74905 - DNA, 1034 bp, Homo sapiens
gaattagcatttaaacaatatttttaatcgtttagacttagacatttactttagaaaatggacagagaattcttggccaggcgtggtggctcacacctgttatcccagcactttaggaggctgaggtgggcggatcacgaggtcaggagatcgagaccatcctggctaacacggtgaaaccccatctctactaaaaatacaaaaaattacctgggcatggtggcgggtgcctgtagtcccagctactcaggaggctgaggcaggagaatggcatgaacccaggaggcggagcttgcagtgatccgagatcatgccactgcactccagcctgggcaacagagcgagactccatctcaaaaaaaaaaaaaagaaaaagaaaaaaatattgatagagaattcttgatgggcttcttgagataggcatttttccctcagaaaataattcaatttattgcaaactaaacttcattttttgctgctgttgacacttccttacagtcagtagagagagcacaagttttctatcagtcccttcatcacaaactgaagtgacatcattaatgatggtataaagggtgaaaactctagactaattcatattggctcatgtttctgggaaaaatttaaatttaacaggtagaaagccaagaattataaagatgaaatgtaatatcaggtttcagagaccatctgttaagtcgaatgatacagtaacaagaataaattgacataattcctttaaaatttaaaaatctggggccgtgtgcggtggtgcacgcctgtaatcccagcacattgggaggcagagacaggtggatcacctgaggtcaggagttagaggccagcccgacaaataaggtgaaaccccatctctgccaaaaatacaaaaattagctgggcatggtggtgggcgcctgtaatcccagctactcaggaggctgaggcaagagaattgcttgaatccgggaggtggaggttgcagtgagacgagatcgtgccattggcactccagcctgggcaacagagcaagactc

SEQ ID NO: 74906 - DNA, 1059 bp, Homo sapiens
gggcaaaacccagaggctgattgtattgtgattaaggacttaatcattaattaagaacatatatttcagcaaaataccccatatatttctacaaatagtagacaaaaaaaattttacaccaaaaaaaacttctataaatatagttccatgaaatgtttacatgcttcgtgagcatttgacaggacatggaagatgatcattgtccttgtcaaatgttgttattaatttgttcgaatggtgctattcagactattctgcaaagaaacccaaatggcatagatgcttatttgtgctactgtgttagggttaattaagcacagagaaaaccaagccagtttaatatccctctctagtatcttatagctattaaaataatgtccctgaacattttaataaaacttttatttttttaatgtaacagctgtttaagttaaatagggcctatggaaatagattcattttataaaggagttaattgagatatatcgagacttagttattcaaggttatatattatattaagactgtcatcaaaaccagaatctggagctcttgactcctagttcaaggagttgccaacttaaagtttatgctgaagtaatctaggggagatgattctgaaaatataagaacattgtttaaattgctgatcttttgctaagtgcctgttttgtgcaaaatattatgtcattacttttgtttgataaaaagatgaaaaaaatcataatgtccttgaagctatattgtgtaatggtgatacaaatagtagacaaaaagtgtttaaaacagtaacatgtttatatcatatgaaagctaagaatactttttagagccaatgcagtagagaacaccctacatactaatatatagtgaaggagaagatttggaggaaatagccaaggagattcctctgcttatgtaggaagagaatagctctgagattgagggctaataccccttaaataagattactagggcagtcaagttgagcagaggtcgttctaaaagctatttatagttaagatgtaatgctaaatagtgtaatcatagagatagctg

SEQ ID NO: 74907 - DNA, 1061 bp, Homo sapiens
ttagaagtgaagtcagtaaacaaattgcctgctattaagaaacttaaatacatgctaggggtgtaccgtgacttttctagcagccaaaggaaaagaaaaatagtaccattataaaactgtgcatttctacaaagttaaaaaaaaaaaaaaactggatgctcaaaagagacagagctgagaccagagagaaatatcttccctaggttcttagaaagaagaacctgtgtatgtaatgaacacactctcatcaccttctttatagtaaatacagggttcttccttctagtgtgcctcaatgaaagcaggtggaattgtgctggagtacaatttaaagcaaacatttcagtacagtgtcaacatgatgcttctctgtggctggctagctagtggccttgcttaattcaaagacagattttagagcatatatatcagagctttttaaactttagtctgtagattagcttcaggagtctcatgttttttctctccctcacctcccccagccctaaattgtatgcctacaagtatttgttttggtatggaatgaattataacttttatcagattcttcagtgagaccatgacacaggataagatccagtaatgtatttgaatgaatggacttgaagggaagctttcataaatgtttatctctcagagggcttctgaaaagtgtaaaatagtgtagtagaatggttgaggtgaatttcctcaagtacctcttctcccttgccagttagcacagtgctgtgggtattggcaagctgaggaactctgggttggattgacatgttctcgtgaaaatcgaggaggcttataaggaaggtgcctgtatgcttaccttccaggtggtccaagggtttttcactagcaggtttataattgtaatcagcaagtagtttagggccagtgttctatgtcgtgaactttaggttggaaaatttttaaaacagtgataaccaaatgcctgcctcacaccgaaaactctctctaaagcacctaatttgagcagtgttactttgtattatgccctctaagacaaactagacacaagtaatgcc

SEQ ID NO: 74908 - DNA, 1848 bp, Homo sapiens
gataacagtgccaattgtctattaagatcactccaaagtcaggataatagccattctatttgcacataagtgaatgcttaacttctcattctgtaagatgagagttgagggtgttcagctcacccaaaaacatgaattccttgaggaaaaagttttaaacagagcaggagtaagacctttttaaaattttaccccctataaattatcattttatatatcaaaataccatttcaactgacactgtcatttgaggtgactggctgtggagaaagtcctacatggactttgctagttaggagtctaatgaccgtagttgccaaattcagcatatattatttttcagtccctatgtaaacctgtatacctgtgaacgtggatacttaatctcatactgttctgacagattttttcctaaattctaagacagagggttggacagataatccttatggaacataacagagaggaaaagggatggtcactaagtccaggttaggctattgttaggtgaatgccactgaaggatagacgttaaggatattagcaaggaagtattgtgaggaagtattccaaatgaaggctgatggactgcataaggctcataggactacttcagggatcagttagaaggtgaaagagctgtttgggatcagaaagttgatattagagtataagtttgccaagttagagcagttctgggtcatgacaaggtccaggatgctgtcatgggtttgtgggacttagtgggagtagaaatgaaagtcattggaactgtgtaattcttccaagttgaaatttatagttctttcctctggccttttggacatcttcctgtatctttattacagctctctttttttttttccaccctacatttaaattatttgccttctaaactacaaacattttttaaaagagatagaaggtcttaatcatttcttaaacctgcagaacaagataggtattcagtaatgtttgcaagtgaatgagtgagaactttccagcaataagctctgtgaacagttgggcaatcatgattagctacattgtaaagaaggtctgggctatgagtgggaagtggatttgttgacctctgagatccctctgggccttaagagccagccccacagccaaagtaatagtaaaggatttgaaattattaagtgttttataaatacaaaaaaagatgttatgctttgtttataccactttattccatttcttccccttggtttttagtccagctctctgtttttcccccatttgacgtgcattagttaccatggaaacgatgatgtcattggaattcatcggtatggacagagtttagtaatgtctgcaagaacatattgaagttaatttaaatgatttcttaaaactcaaggcttagataggggaagtaggagaagagatgagctattaaattctctgttctctgcctgaaatgatagcaactatgccaaatcctcaattatctcaatatttgtaggtagactatttttttaaacaaaataaaaattttcagtcttatacatttttaataatgagtaatttatgtgttgtgtcattctcactcatttttcttgccttcttatatgtgggagtcccaggcaccccgatctggagcccttctcctaccatttgaacttctgatgtcaaagggatttcactatataccccttccttctttgataatctcattccctgctactgaaaagtaaattaaagtatatttattctcttactccttcggcacataagggatcacttagttacttttaattcaacaaatgtgattaatttatttttccacaaatctatatttactgatatttagtgtcttctata

SEQ ID NO: 74909 - DNA, 1006 bp, Homo sapiens
atgtcaaatgactatttctgaaagagaaaacaagaacacctgtctcatttttaaaacttataacatccatgcacatgcttcaaggagtataccaaaaactggtttgagtctaacaaagaactgaaaagcagttatgaatctaatctatttcagttattatcattcattatttaacaatgaatttttcctcctcactttttcttaaatcatggcttttaatgcttgtaacaggttccaaccagcaagcatttaacctgattgtaacctggataaattggattatatagtagcttaaaaatcttgcttgttacttacctgtatctgggtttaaaatgtgaaaaataaattaaaattggagccttttgggcctccttaattcaatagatttagacagaaaaatccaatattcagagcgatgttcatatttcaagagaatcaatttttaaaaagttaagaaaagaagtgcccttctgagccagtgatggattggaatactgcaaaaatcacacgcaaaaaggttgtggtggctgatggtagccaggcatgtagtatttgctttctttcagtaaaagtagctgaggtaaaaagaaaaaaggaccttatgctttgatgagacattaaaaaatgattgagcatgcttacagctgtatctcagtggtattatgtaaattaagctatagcaaagaatctgttttctaatgtttctgctattaaaggatatacacaatagctctacaataaatacaaacagcttaacagtatatgaagtattcacaagatgtaaggcttatttggcggggaagacatcataatggacttgaattctttcctatttaagagagaagaatttttaatgaacaaaactgtaatatggatattctaatgttcttactgcattagttgcccccattcaaaacctccttgattatggaggattgctgttaagtgaacttgagcagtggtttctaagctttttaatacccaaggctttcttttaaattgtccc

SEQ ID NO: 74910 - DNA, 1072 bp, Homo sapiens
agaagcattatttacagcagccaaaatctggaaacaacccaaatgacccaaaaggagaatggatatttgtggtatagtcattataaaatcttaggactcaatgaaaataaattacaggtacatagtttagctggatgaatcacttggacacaaaaatatatattgcatgattccattagtatcaaattcaaaacaacacaaaattaatttatggtgttagaaagcaggttagtgaatacctttgggaatgtgtttggaggatatatagggaaacttctggggtgttggcaacattttattaacagggtcttggtaacatgggcatacattttggtgactccattttgcctaaacttaagtacttttttgtgtgttcctgatatactttgatggaaaaggttaaaaataaataacttgtaaactttaaaaattattcagatattttacattttttttacttgtactaagtcttcagtacttagggtgtattttatccttataagacatgttaattcagactagccacatttcaagtatccagtagccagccacacgtgactaatggctaccctattgggcattgtgggtctatagccctaccattttagagcttctatggagttagactttatttcagggctttcgttgaagtattaattaggaagaataggagattattcctcccaaggaactcattttaattttactgcttttggttttatagaatattttctattgaaaaacagatggttgtttttatatacaagttcacaagacacctaatatgtcattgttttggttttttgttcttattgctttattaccattcttctcatgaccaccttttttaaaagcaaacttttcattgaagctgtgacatacatacataaaagggcacaaattatagctcaatgaatttttacaaagcaaacatacccactgtttgtatcccagaaatagaacaatagagagcctagacatcatatatttacagtcaattgatttttgacagaggtgccaagaacacacaatggagaaaggacagttgcttcaataaatggtgttaggacaa

SEQ ID NO: 74911 - DNA, 1308 bp, Homo sapiens
atgttattttctttataaaacacacaaaattgaaattgaaaggaaatcataacatagaaatagaaatcctaatgttttctttttacacctctatatcagccaagatgggctaggttatgtgtgttatcaactctcaaatttcagtggcttaaaacagcacaggtttatttgtctcatgctctgtgtccattgtggtttggcttcaacactcctctgtattgcatcgttctctgtattgttcaacaccctggcacccagactgatacagcagccaccagctggaggcttgcttgtcatcaggacagagggaaaaataatgaggaattaacacttaaagctttggcctagatttgacacatggcacttctgcatacgtttcattggccaaaacaagttatgtgttcctacctaatttgagggaagaaaagtcctaaccttgtgcccaggcagagaaatggacatattttagacagcattaaaagttgacacctctctcatgatcagttttggagaacacagcccaggatttgtgtttgtctaagaaaataaacacacaaagacaagtctatttagcttcttccattattttgtattgtttttaacacactgaagtcctgagtaatgagtcaactacaactacaggcatagtggcctctcttgcttacaactctgtaatggctttttagcactcattatataactcagacaccttaatatagcctacaagccccacctttccagcttcatctaactccactcacaccacaccttagaggcctcagactggcctttcagttccttgaagggagacatgtgctccctacttctgttttgaatgtttttcttcccttttccttgtttttgcccagtcactctgtagctttaagatcaaatgtttcttcaaggaagccctctctgactcccagagtacatcaagtcctctctgttctacactctcataataccctatactttgcttccagagaagccattccattttatgagtgtatttttgcactattctttgttcagtcaatttcctccaattacagtacaagctccaaagggtaaggatcaagtctgttttgctcagcactgtatgctattccttgtgtttagcccagttactggcatatattaagagctcgttaaatattgagtttggttatagttttatattttaggtctgtgacatttgtgtagtctatagagaacatgtctgagatatttatacagtccatagagaatgatgtgataagaagatgtaaatcacacaaactgcaaatacacacttgttctatgcctcta

SEQ ID NO: 74912 - DNA, 1074 bp, Homo sapiens
acctgtaatcccagcactttgggaggtcgaggtggacagatcacgaggtcaggagatcgagaccatcctggctaacatggtgagaccctgtctctactaaaaatacaaaaaattatccaggcgtggtggcgggcgcctgcagtcccagctactcaggaggctgaggcaggagaatggcatgaaccctggaggcggagcttgcagtgagctgagatagcaccactgcactccagcctgggtgacagagtgagactccatcaaaaaaaaaacaaaaaacaaaaaacagtgtctctgaaaatgatgagttgcttttggctttgtgttttaaattaatatagcacagttctatgtgttaacctttctttggcttttttgaataggtttgttctgtcaactatgataatttctattttaaataaaaactgtctataacttaaatttgagaatagagttttgtagtccaagtactgtaatttgaagccatattttaaatgatactcatcagtgtgtttgctaagttgggtgtacatctctcagtagaaacaggtacattaaaatgtctgttccgtatgttgtaaaaacctctaaaagtgttcgttcttagtgcatatgtaaaaatgccttcctgattaattctttgttagtctttctgctttagaatggcagtatttactgttttctgtaatatttaatgtgtttgatatgtctttaaaatatggcacctgaaatttacattgtacgcactgttcatggcactgaactgaagagttcattagtgctgtgaggaaaactaaaatcatgtgttaaataagcaaaacacaggttttggataaaacatgatgttccaaaaatccacaggcaacttaacagactttttagaaaacatgttttgatattctaattgtgaatgggtttctgttcttgccaaaggcaggtgttagatgctgaatagggaaggcataaagtgaattattagacttaggtagttaaaaattaagatccctagagattaaggaatttcaaaacattctctgttataattaagtttctaaaagttgatgttaaatatattat

SEQ ID NO: 74913 - DNA, 1016 bp, Homo sapiens
attttgaagatgtgtgactatcttgttacagtgaatttggggtggggaaaagattcctagtcagaatttaggccatgccacttgcaggtgatagactcatagaattctgctggtgaccaccgtgcacagtgagatacaggctcctatgctgagggattgagatgtgtttttctaataaattcttcccagtccaatgtgaattgtttccaggtacttaaatgactcaacgacttaatatttcattttaaaccatgctctgcacaggaaacaaggttgacattattaggattttcagatttaacatgtgcctcatccaggttattttcaaaccctgaggtggcattacagaaatatttcttataaatgctaaataactcacattgttctttagaaaggcagaatcagtcttttcaatggcttgaaaaagccttgaaatgaggagagtatggagaattttagcactcttcagacataaatataatccctctgaatggggagcctcccgcccattttgtcagctttcatttgccagaccggaagttcccttaattcctgggaccctttagcttgtaattttttcaatagccaaatatattcccttttatgaggatcccaataatctcaacaagctaacaagctttcagtccctctctaatcttgatgtggttgtgatctccaagcagactctattatctatcattcagttccaccaatccggctgtggattcctatgctcagagctctgagcaggcgtaggtatgccaagaccagctgttgtggcttaaccatgagcaaattcaggactaagcatgtgaaaggtccatctgattcaatattcttgcctgacagacagtaatctcatctctacttgaaatcctcactctttgataagcgagtctgcaacagctggacatcactaattaccatacaggtctcccacccctcacccagtggctctccttctgtcatctcatattcctcacatatccctggtgcagctctctccatgatcatca

SEQ ID NO: 74914 - DNA, 1040 bp, Homo sapiens
ccccttatggtctctgagcattaaagaaagcaagggaggaaaacatgcgcccaagctcgttcgcaggaacatgttcgcgtgtctgcgcctgtgtgcgcagccagttttctggctgaggatcgctcgccaactacagacatcacccgcccaggacccggtgccacactcacccagaagacgaaactccacaggagcgagaagaggagtccatttctccgtcggctcggcacggcacggggatgcaggcccctgattcagtacgttctgtgaaagtggagcgagaagccaagacgtggatcgagaagccccgtggggcgggtctcagggtggcccaaaagacccctgttcacgccactaccagcctaactttaggaactgtcgtccacctggcttttattatactgccttaaacatattcacttttttgagactctagaaatttcacaagttttggggtagagcacactgggctttgggtgtgtttctcatgagggcactgacgctgaatggtgcagtgagaaaggacggtagaaaccactgcctttgcttttaccattgaagaaactgaggtcctgtgactttcccgaggtcatcggaatctgccttgcacaggagacttaaaatagttgccagcagataaaagaatgagcaaaaccacatctactccaatttgttaagtctgaaagaaagtaattgaggggggattcctctttggggaaatatttatttcctgcattgaaaatagtttaatgttagtaaacatataaaaagtattttaaattcaagttattctttatttcttatgttacataaggtactgaagttagccaaggttgcttttgtgttataatgatgcagctgctgccaaccagaagtacatttacggtctgtcagtaaagaaaacaaaaactgcctgttggtaaaaatctattagaaaatatttgtcagtaaatttgtcacaatattccagcagaagttctgttcgtttttccgtcttcctgcccttcatatttctcaaaggtagacttaataaaggtaga

SEQ ID NO: 74915 - DNA, 1666 bp, Homo sapiens
agaggggaggtggcggtgtccgttggccgggttgctgctgttaacgagttccacctggaaagggtacacggggcgggtgcagattcgcggaaacacagtctcggttgcaaacttaaacgccttgtaggggggatcggccctttcactttccctcatctcctcgactcctccctgggttctcttcaccaattttccatctgctttgaagcttggagtaagatatgagaagttgcactgcgcatccagagcccagagtcctatgggctgactgcgactgggttgaggctttgatactgagttttcgctagaataacctccagattcttcctctctttccactaaagaaaagtatcggggtgggggtggggagccgcgcgggagcgcgcgcgcacttatccacacagaaatactccctctcaccctccctcttcagcgttattagaaatgcaagagagctggaggctcggggtgtagctgaggttgaaaggtgcacggaagtaagggcaaactgttattaggccgtttagtaaaatcccgaaaaagttgtaggggagacgcttatacttctaccatgtgatagaaattcggatttggccatcgcttaataaatgggaattcaaatattttgagatagagcaagataggcatatagatgggtttgtgcttacgttttaagtttaaattcttatcgatcatttattttttcctttgtgataggcaggaaactgaatttttttttaaatgttcaggtgtaaaacagcaaaatgcttcgctgtatttactagtacttgcttatgttgctttctacaggtaggggcggggggcgagtttgtcaattccacttaaatccagaaccagtattcagttagaatgttaggtggtgtttatccgcatgaaggatctcgttcacttcatgggagcttgctctacatttccacttaaaatggttctcctaacaaaaatttcatctagatgcagcgattagacatttggaataatgtttggtttaaaaatacgttaatgaaaccttttgctgtcaattctagtttatttgtactgtaatacgataaaacggtattcttattcagtgtttgtagataagtattactaaccgtctaggtaacctactagatagtttcttgagtaagattttgctttcattttaaattcctttctcattttttgctttcatctatcctttgtatactaattgacctccattacctttatctgtagtacaaagagcggtaagtatgtgtcaccaaaaacttgcaaagacactggagcaatttatgactaaacgcactggagtgaaaggctgcgcatacctatgcttgtaactttcaagaaatagcactattgatctaattgacttaaagcagaatcagacggtacagatgattaaataactattgatttggttgtcttgtgtaggctgtgtttttaaacctagatcaacatgtcttattttgccattctttgtacattaattattaagagtactggggagtgaggtgggttacactttgatgtaagaattgcggcagaattctgttatctttatgagttttgtagtgtccctccccatttaaacgaccttagcaatttttaaaatgtgttgcaaaattattaccttaattctgtcacaagatacttatcctaaatg

SEQ ID NO: 74916 - DNA, 1002 bp, Homo sapiens
ttttaattgaagaaaaagttaggtctcataaagactttactaaactttaccaacattggcaggatgtaagatgagtgttggcctttagtggtcacttcttaaatatgaaatggcataatagagattttcttggtagctacagaataagttttgtcgcaactgtagtttccatagatactattttaagaactatttatttgggttgtatggtccacagttttttctttgcataccaagaaggtgtgtagtaatataattggctgaagaagcattgtacagtgttgttttagtgatgtctatgttcctaaaagatacttgtattatatatttaaagtacaccaagggaatttaatttctaaaagacctgtgaagaaacatcagtagattcatcattcagtaatttgagtaatcaggctcttgttttaagtgcaggcttttgtcgattattttattgaaataggaaaaaccatattagaaattaagaaaaatgcttcaatgctaagaattttaagtatgaactttaattggttttcaaactctgttccttggattcctgtgggtttttttcctagatgccttgagacttcctatgacaacccaccctcccaaaccaggacagcttctattttcatgtattaagtgtattgtatttaaatataagaatatttaacttaattaaatataagaaaaatatttattatttaaatataagaaaaataactaatgggtactaggcttaatacctgggtaacaacaaacccccttgacatgagtttacctttaaaacaaacctgcacatctactcctgaacttcaaagttaaaaaaaaaattccccttaaaaaaaaacaaaactgatctgcattaattttttttaagtctctgattcgttattcattagttcagattacttttatttagcacttactatgtgcctagccctggaaataccaagataaattagatataggtataatagctcaagctgtataaaggagtaaata

SEQ ID NO: 74917 - DNA, 1890 bp, Homo sapiens
atatctgtgttttacttcatagaattattacttgggaaaaagagcataaccttgtaattttgtggttaaaatgactagtatgttacttgcttagagtctcaagcttttcatcatgaagagttaatggtaaaaatggatattcatttttctagtgttagattagatttagcctattttattatccctgaccaatattttattgagcagctaggcactgagtgatacaaaaagtataaaatattgctcccttaaaagatcttttaacttctgtggagagacagcaagcatgacactttaagaatttgaggtatatttagggaagtacatactgatttaaaagttagtagaaaggaatttagctaaaggaagtgttacttggattacatactgatttaaaagttagtagaaagttatttagctaaaggaaagtattacttggaagtagcatacaattgggataatgaagggggaaaaagacatttagggaagttaatgacagtgtggactgaaagcacaggtaagtagaggacagattagcagatgggaagaaaatataaaaatgtgtagtcctagctacttgggaggctgaggcaggagaatggcgtgaacccaggaggcggagcttgcagtgagccgagatcgcgccactgcactccagcctgggcgacagagcaagactccttctcaaaaaaaaaaaaaaaaaaaaaaagatgtaagagcatcagttttgtaccttatgagccagagtgaaagatttggagaaggtattaatgcaagagtgatagaaggggtgatgtagaaataaacacgtaacgttggcataactatttgtctagttactgtatttggtttgtcaaacagccttggaaaaactctcaccttggcttctgatatggcataatttgttcattttctttctgttgatcatgttcttttactgattcaaaattgtttctttttatacttaccttttcagagccaaggtaatatctcttttagagaactagtaaaaaattaacattactataatctagagcagcgatcctttttggtaccagggactggttttgtagaagacagttttttcacggaaccgggggcatggttttgggatgaaactgttccccctcagatcatcaggcattaattagttagattcacaaagggagcaagcaacctacagttcttgatcctctgagaatctatcgctgctgtggaggcggagctcaggtggtaatgcccgctttccaggccacccctcacctcctgctgtgcagcccagttcctaataagccacagatggttaccagaccggggttggggacccctgatctagagaatttaagatctagatttctactcttctgtattaaccaagtatctaattcttcatatgttttctttagaaaataagagtattacaccaaatggtctcataggtaattttctgaagtttatgatgctgaaatttatgttaataatcctgaacttgccttgtttcattaccgaggtttcatttgtctttggaaataacacctgaaagtgaaatgaaccaccatctattgctgaaactgattagtttttcattaagaaacactggcttaatgtgttgccttgtatttcttatgtctagtagccagttaccaagctctctttgtcttgcattgctcttttattgattaattaattaattttttttttgagatggggtcttgctctgtcacccaggctggagtgcagtggcactcagctcactgcagtccgcctcctgggttcaagctattctcctgcctcatcctcctgagtagctgggattacaggcacacgccatcacgcctggctaatttttgtatttttagtagagatggggtttcaccatgttggtcgggc

SEQ ID NO: 74918 - DNA, 1060 bp, Homo sapiens
aatctctgacaaagttaaactgatagtagctaagcacagtaaataaatacttatagttgtttacctaggttgatgaacatgggatgacctttgatccttctgtttcccatacagaaatgaaagaatttagaatgacttgcacaccaaggcctcagggaaataacatgttatcagagtagggtgtacattaaataatagggtagaagttaatgtgtttgggaatagttttggtcattggtttttcacatattttcagcagtgaagtttttttcaaacaaattgaaatatcagaagataaaaatggttaaaagcagaattacctttgctgcgtgggtttgcggagctcccagagtactgcctacttggaccctccttgaagtactacacacctttagacttactgtttatatacccctattgtgtgttaatgatcacattatagtcctggggaaaaaaactggactttttatgttagtatattttgctgtactagatgtaatgggcccaaagcagtacataatttttgttaattgtgtttacaagtgtgacttcaggattacccagcggtttggaagctgattattcttagtctggagattgagtcatttattcatgaaatatttactgagccctcactgtgtatcaggcactgttgctggagatttgattccaaaacaaaatcccaatgcttctacgttatttagtcaccacgtaaattgttcaaatttttaataggttggttctctcttcatttgcctgattatattcttgtttcaagactaattcataggaataatgactttttagggctcatttcacatacaaattgtgtgctttctggtataaactgtggttcaaagatgaagtattatttcgagtccaggactttgagaccacaacatagtgagactctctacaaaaaaatttaaaaatcacctatgtgtggtggtgcacatctgtagtcgcagctgcttagaaggctgaggaaggaggatcatttgagcccaggtgtttgaggctgcagtaagctatgatcctgccactgtactctagaatgggt

SEQ ID NO: 74919 - DNA, 1378 bp, Homo sapiens
tctgtgtgattaggtcttggaaatataatttcttatcataaattttgtgattttactaaagtctttaaacagccaaaaattttgaattaactatatttggggttgtactcaacttcacttttgaaaaaaaatttttttaagatgtcataaaattagattgttatgctggctaagtacattattatagattgtagttagctttcattctcatggtttcatttttgactaaatatttgagtttaaattaggatttatgcatttaattagtagctgttatgtgggaggcactgttgtaggcttttgatatactggtgaaataaagatttgtgccttgtgactcttttattaagagtgggatgcggagagggatagagttaatgacataaataaggtgtatagtaagttaggaaggtaaagagttagcagtggggatctttggggatattgtgaaaagttaagtgcaaagaacatgccttagcatgttgtcttcctccagtgtgattgaagcagaatgagaaaggtagaatagtattaggggaggccagagaggtgagagagggttggagaagatcttgtaagccattgacaggacttgctttttatttttagcagtactcgagagttttaaacaaaagaatgggaagctctgatttatgttttaaaaggagcactctggctgctctgatatgaatagactgggaaaagggagcagaagtgaagcagaggagttagtttagaagactttggagtaatcttgggccagagatattgatgggtgagagcagtaaaagtagaaaaaactgaaaagttaaggatatattttaaagataggaccattaggaatttcctgacatggtataatttaaaagcataaaatatttttaaatatataccttttattaatgaatgcatcaattttgtgaaaaggtacatgttttagttctgatttattgagattttatttttttagattccttgtagaactttttttttcttgatttgcaaaggaggatgcagtgtttgaatggtctagtaaaataccttagaaaacttagttgtgaacatagttttgttttgacacaattttaatttctataaggatatagataatttctataagattatcctaaagacaatcttaaaggcagaatgagagactgcattgcaagctattaaaagcagcactattgcttaaaaaagtaaaagattgggaatgaagagattttccttctaaccttataatttctagtaggttattgctacttttgtcttggtttcttcatcagtaaaaataaacatggtgctagatatcataagaacaagttgcatgaaagtaagcctacatcaaaaatagatgtgcatgattgacatagatatt

SEQ ID NO: 74920 - DNA, 4664 bp, Homo sapiens
tttgtatattctaaaatcttatcaaattcttatgaaattctgttttaaggaataagttttaaggaaccctataatgtaaaaagcaggttgttttgtatttttaagttgtgagggagttgcaagtcaactagtacattttagttatcaccagcatcgcctccagtgacagaaggcaggaaaattaagggagtggaaaggactagctgtttcttcaaactcataggaaggggtaattagaggtaaaatgcacatttggtttaatagaggtttattttaaagtttgtgagacattatgttagattttgtattttgttaggtttgccttaaattttgaggtcatcttgtatttataacagtaaatcataaactgtttatgtagttacctcttaaaatacatgtatcattattattaatttgtatggtgctttgttgtaaacatctttattgtaattcagtgtatgtaatttgtgattaagatttgttctttttctcccctctctataggaagatgatccctatgatcttgaagatgtttctgcacagaaatgagggaaatacaaagaaccaaatacagttctgaaatttgggatctgtattttgagatgattttattttcagaatgagaagcatatctggttacctttatgaatgtagagacatgagaagagagttatgatggcaaaaaacaaagagcctcgtcccccatcctataccatcagtatagttggactctctgggactgaaaaagacaaaggtaactgtggagttggaaagtcttgtttgtgcaatagatttgtacgctcaaaagcagatgaatattatccagagcatacttctgtgcttagcaccattgactttggaggacgagtagtaaacaatgatcactttttgtactggggtgacataatacaaaatagtgaagatggagtagaatgcaaaattcatgtcattgaacaaacagagttcattgatgaccagactttcttgcctcatcggagtacgaatttgcaaccatatataaaacgtgcagctgcatctaaattgcagtcagcagaaaaactaatgtacatttgcactgatcagctaggcttagaacaagactttgaacagaagcaaatgcctgaagggaagctcaacgtagatggatttttattatgcattgatgtaagtcaaggatgcaataggaagtttgatgatcaacttaaatttgtgaataacctttttgtccagttatcaaaatcaaaaaaacctgtaataatagcagcaactaaatgtgatgaatgcgtggatcattatcttagagaagttcaggcatttgcttcaaataaaaagaaccttcttgtagtggaaacatcagcacgatttaatgtcaacattgaaacatgttttactgcactggtacaaatgttggataaaactcgtagcaagcctaaaattattccctatttggatgcttataaaacacagagacaacttgttgtcacagcaacagataagtttgaaaaacttgtgcagactgtgagagattatcatgcaacttggaaaactgttagtaataaattaaaaaatcatcctgattatgaagaatacatcaacttagagggaacaagaaaggccagaaatacattctcaaaacatatagaacaacttaaacaggaacatataagaaaaaggagagaagagtatataaatactttaccaagagcttttaacactcttttgccaaatctagaagagattgaacatttgaattggtcagaagctttgaagttaatggaaaagagagcagatttccagttatgttttgtggtgctagaaaaaactccttgggatgaaactgaccatatagacaaaattaatgataggcggattccatttgacctcctgagcactttagaagctgaaaaagtctatcagaaccatgtacagcatctgatatccgagaagaggagggtggaaatgaaggaaaaattcaaaaagactttggaaaaaattcaattcatttcaccagggcagccatgggaggaagttatgtgctttgttatggaggatgaagcctacaaatatatcactgaggctgatagcaaagaggtatatggtaggcatcagcgagaaatagttgaaaaagccaaagaagagtttcaagaaatgctttttgagcattctgaacttttttatgatttagatcttaatgcaacacctagttcagataaaatgagtgaaattcatacagttctgagtgaagaacctagatataaagctttacagaaacttgcacctgatagggaatcccttctacttaagcatataggatttgtttatcatcccactaaagaaacatgtcttagtggccaaaattgtacagacattaaagtggagcagttacttgctagtagtcttttacagttggatcatggccgcttaagattatatcacgatagtaccaatatagataaagttaacctttttattttagggaaggatggccttgcccaagaactagcaaatgagataaggacacaatccactgatgatgagtatgccttagatggaaaaatttatgaacttgatcttcggccggttgatgccaaatcgccttactttttgagtcagttatggactgccgcctttaaaccacatgggtgcttctgtgtatttaattccattgagtcattgagttttattggggaatttattgggaaaataagaactgaagcttctcagatcagaaaagataaatacatggctaatcttccatttacattaattctggctaatcagagagattccattagtaagaatctaccaattctcaggcaccaagggcagcagttggcaaacaagttgcaatgtccttttgtagatgtacctgctggtacatatcctcgtaaatttaatgaaacccaaataaagcaagctctcagaggagtattggaatcagttaaacacaatttggatgtggtgagcccaattcctgccaataaggacttatcagaagctgacttgagaattgtcatgtgcgccatgtgtggagatccatttagtgtggatcttattctttcacccttccttgattctcattcttgcagtgctgctcaagctggacagaataattccctaatgcttgataaaatcattggtgaaaaaaggaggcgaatacagatcacaatattatcataccactcttcaattggagtaagaaaagatgaactagttcatgggtatatattagtttactctgcaaaacggaaagcttcgatgggaatgcttcgagcatttctatcagaagttcaagacaccattcctgtacagctggtggcagttactgacagccaagcagatttttttgaaaatgaggctatcaaagagttaatgactgaaggagaacacattgcaactgagatcactgctaaatttacagcactgtattctttatctcagtatcatcggcaaactgaggtctttactctgttttttagtgatgttctagagaaaaaaaatatgatagaaaattcttatttgtctgataatacaagggaatcaacccatcaaagtgaagatgtttttctaccatctcccagagactgttttccctataataactaccctgattcagatgatgacacagaagcaccacctccttatagtccaattggggatgatgtacagttgcttccaacacctagtgaccgttccagatatagattagatttggaaggaaatgagtatcctattcatagtaccccaaactgtcatgaccatgaacgcaaccataaagtgcctccacctattaaacctaaaccagttgtacctaagacaaatgtgaaaaaactcgatccaaaccttttaaaaacaattgaagctggtattggtaaaaatccaagaaagcagacttcccgggtgcctttggcacatcctgaagatatggatccttcagataactatgcggaacccattgatacaattttcaaacagaagggctattctgatgagatttatgttgtcccagatgatagtcaaaatcgtattaaaattcgaaactcatttgtaaataacacccaaggagatgaagaaaatgggttttctgatagaacctcaaaaagtcatggggaacggaggccttcaaaatacaaatataaatctaaaaccttgtttagtaaagccaagtcatactatagaagaacacattcagatgccagtgatgatgaggctttcaccacttctaaaacaaaaagaaaaggaagacatcgtggaagtgaagaagatccacttctttctcctgttgaaacttggaaaggtggtattgataatcctgcaatcacttctgaccaggagttagatgataagaagatgaagaagaaaacccacaaagtgaaagaagataaaaaggtaaggttaacttaaggtcagtgatgtttataaaaatgcttgttgttacttttttaaaatactgacatcagtgttagaatttagtctcattcattccatacataataattagtagccctttttaattttctgagtattctgtggggataagtgattttttgttatttttgtgctttattggggtagagtttgatttcatattcttcagcataaaaattcttggtgaatgtgttttttctttttacagaaacccagatatgaagtgattttgttct

SEQ ID NO: 74921 - DNA, 1032 bp, Homo sapiens
cttggcctcacaaagtgctgggattacaggcgtgagccaccgcgcccagctgtaaacttttaaaataatactgatctagacttacagcacatactcaactcataacatgctactctcttgcatctcttcacacttaacctgttatcactagtaccattttatcactgacaaaaactttaatatttttctctttattggtttatattactaaaactacttaatgtttattaagaaaaaacacagcctttccatttttaaattgcttttatttttgtgtttttttttccatttttgttcacaagcctaattgctttggtaaccttttattttgatgtaatttcaatgaaagttggaatagtaaaaggggaatccatatatcctttacccatatttgccaattatctacattttgccccacttgatggagctgtgtgtgtgcgtgcgcacgtgtgtgtgtgttttcgtgtctattggtttgtttttttttttaagccctttgagattaagttggagatagtggactctttttgctattaaatatttcattgtgtatttcctaagaacagaaacattctctttaatagcagtagtacagtcatatttttccatactgctgcatagtctttctaattacagtattagtataattttgtatacttttagtcaggaggcagatttaggcattcagttgtaaagtggtagagttacagagaccgtatgaaaagtaaaggctaaaagctgattatttgaaaagactaaaaaatagaatagacaaacctctggtaatagtgatgtgagaaaaaaggcataaataagcactgaataaaaaggagaacataattacagatagatcagattaaaagataatagagaatactatcaacaattccgtgccacaagtttgaaagtttaaacaaaatgaacaaagtcctggaaaaatgtaatttacctaaacaaatatgcttcaaataatcctgtaaatattaaataaattgtgaagtagtagttaaatttcctaccaaggaaatacta

SEQ ID NO: 74922 - DNA, 2945 bp, Homo sapiens
ggcaggatgtagtggctcacacctgtaatcccagcactttgggagggcaaggcaggcagatcacttgaggtcaggagttcaagaccagcctggccaacatggtgaaacccgtctctactgaaaatataaaaattagccaggcgtggtggtgtgtacctgtaatcccagctacttgggaggctgaggcaggagaatcgcctgaacccagaaggtgaaggttgcagtgagccaagatcgtgccactgcactccagcctgggcgacagagcgagactccaaaaagaaaaaaaaaagcttactataggaaggcaatacttacagatctgatgggataggcttacactttgttgaatgagcaaagattctttattcaacaaagtcttgaagtgcttgaaagtttcacattttcttttttgtacctattttctgtaccttgcttaatttcttcagagttgatgtggaatattcattttatccattgttaccttgaaaacatccccttaggggagaaagtgagagtcacctttgtacaggaagtgtgttcaaaagaatgagaaaggtttttttctagacccttcaaccagcatcttttctagtctgccttgagttaggtcctgcacctgttcctaaccaatacagtctgtccagggtagtagaattatccaactgaatttaggtctgaccagcctgggcaacatagtgagacaccatccctacaaaaatgtaaaatctcagctgggcatagtgatgagccccgaaggatcacttgaacccaagagtttgagattgcagtgaactgtgactgcaccactgcattctggtctgtgcaacagagcgagaccctgtctcgaaaacaaagaaaaatgagtttaggttttagtctttatcctgagagctctgagtgaaattggctttctgtgaaattaagataatttctaagataggaaaaccacaatgtctactgcaggcaagatttgtatcttgtttatagttgatctccatggcctagcacagtactctgtgtcatagtgtgatcagttgaagtcagcataaatgtatggcctttgtttttgtaaaagaactgttcatgtgtttaactacaatttattttgactcaggaaaactcattttattcaacaagcattttggtaaatgcctactgtgcctgaacactgttagaaactaatatggggatgacttggtcattcattggctctgctttcaagaaattcagtctaataaaattgattttgctgaaaattaaatatgttttatattttcaacaagtttagccagacttctggttctttctcatatttcatctcatctggaaagaatttacttaggctttcttcagtaccatttctattgctttcttcctgggtaactggctaaattgatctacctggttaactagatctgtgatgtttctataatttctcataaagttaaaatttgtttcttcagcatttttggtgctggctacaccaatttatgataacataagtgtggatatgtagtgcaagtatttctggcagtattttactatttgccatttctttgaattctgtgttgtccatttgatcatgatttattgcttttcaaattcagattgaaatgtaattagatggttaatttttaaagtatatttctgatttatatattttgttaagacttaattggaaagattatgtcagtggcatacattttcgctaatttaaatttggctttctatacaaactttttcttagtgtttatagcagcgtactgaatattttgtaaaagcatagtacagattattgaagttactcatttctgcagcagattaatagtaaatgttaagtatgtgtcaaggaggcacttctgtaacatagataattgtgttcttatgttaatggacagttgttactattgcaagactataggtaaatttataggtttgccaatttatgtacaccaaaattttgtatactacaaattgtgtcaatcctaggagaggttttttacagtagatgcagtgttatgatttcttgctctgtaatgttttcctgtcatctcagctaaagtgtggatggagtactcaagtaaatagggcttaatctgtgacttttaaagaagagaaaccccagagcataggagggttgctttttaaaaatagtagtaatttttgatgtttagaatccttacaacaaaatataaggatatgacaaaagagatcttatgattgtatcgtagtcaaaataaagggtacaacttgcatacattgtataacaattgttttgaactttttggaaattgttcttagcctttgaaaatctgagtcaaggtttgggtattttccctagaaaaatgcacatgcacaaaattttactggagttttaacggtttcaaatactttctaaaggcctgtggatcccagtttaagaaactccttgtataagatgagagggaggaggaagacactgaaatttggggaagctgggtagaaatccacccattcacttgaatagttagttgctttgctagaactttctccaagtgactccaggtttattttttgttaagttgttaatggcattaataaaatatctgccacatatataatatatgttgaaatgctttttaggaagatgttatcttagagaataaaggttcctgagtcaaggttaaaattagtttgcctgataagtatgtacaaaaacctagaccacatttatttactctgttgttttttatttcctcttttcacctagtgttagcataaagggtgtgagagagtcttcacaatgtaagttttctgaagtgtgtttggactttcagccagcacttacggcttttataggcttaaaaaagggattaaataaacctttagagtgctgggtcccctgaaggcttctttcttacaccagtgtgttaaactataatgtaatgctgcttctcactgcc

SEQ ID NO: 74923 - DNA, 2844 bp, Homo sapiens
atgtgttgcttccgttccattttcatactagttgaggttgtcattatttcttacctgcattatcacaaataccttttttaaagaaataaagattctattttgagctaattgttgattcatatgctattgtttttttttttaaaaaaaagagagaccccatgtgctctttgcccattttcccacaatggtaatatcctgcaaaactatagtacaatatcacagccagggtgttgacattaatatgatctacagatcttattcagatttccccagttttacttgtactaatttgtacatgtgtatattttgttctttgcagtttttcatgtgtataggtttgtgtgtccctcccatagtcaagatgtaaaacagttccatccactagcaaattaacttgttttgtctttttataactacatgcttttccttctcctcacccatccctaaccactgatagccactactctgtttttcatttctataattttgtcatttcaaggatgttatataaatggaatcacagggcatataactttctgggattgactttcatttaccataatgcccttgagattcagccaagttgttgcgtgcatcaacagtttgttctttttattgctgaataatattccataatatggatacatcagtgttttaacctgttgaaggacatcaggtcgttccagtttttgtccatcttgaataaagttgtcatgaacattcgaatacaggataagaaactgccaaactgttttccagaatgggtatactattttatttatttatttattgagatggagtctcactttgttgcccaggctacagtgcagtggcgcgatctcagctcactgcaacctctgcctcccaggttcaagtaattctctgcctcagcctcctgagtatctgggattacagatgcccaccaccacacctggctaatttttgtatttttagtagagacgggctttcaccatcttggccaggctggtcttgaactcctgacctcgtgatccacccgcctcagcctcccaaagtgctgggattacaggcatgagccgctgcactcggcctgggtatactattttaaatccctactggcaatgtatgatggatccagtttctccacatcctcaccaatatttgtggtgcagcaactttttaaattaggtttccgtgttccattcaccatttttttcaaactgttatttatgttgctttctggggggcagtgctaaaatagaagtgcctgatccctgtccgtacaaagtgtatttgtaacctctgtataaagttccaaatacgtgagttaggcatctaaagccatttgcagtatggcctttgctgaccttttaaccttattcattcccacacgtactcttaagctccaggtacatcaaaatagatggaaaatagtagctggctcagagctgttgtgaagattaagattatgcacatagtattaacaagtgcctaatagatagtaagcagtaaataaatggcagtttctggtgatttcatagtcttcatcccgacatatagtaggcacccaaatgtttagatgagtaaatgacttacgcactagatcctttctaacttctgaaaatgtccctgacctcatccattcctatataagttctaccctttgaatccagatttaagtcttaaatttagttattttgacatttaatcgcatattattttgtatgtgctattaatgactggtagcgaggtgttttttcattataacagactatatgtttctcaagggccttaaattccactgatttttaatatcctttacagcaaactaacatgctatgcacatagtatagtaatttcttcagttcttacagactgttgaaagtacaccaccttttttccaagtgaattcacatacagttggctattcttcctgtaacttgatgatgtgagtaatcattatttcatatgaatcctgattaggttaggatgcttaagcttagacatacctgtctagtaactcctataggaatgaagaattaggtaaatgaaactgttaccataaatggtatataagccaatagtacttcgtatattaacagaaatcttatgtgtgaaggctttcctctggtgcctgtttttagttgtttgcttctgtcaatgtttactgagtatctaccatgtgctgtatatattgtgccagttacaggaaccaaaaggaaatgtgaccagattttaaatagtattttggaagttgtaccaatagggcttgtgatatatttgctgtggagagtaaaggaaaagagaaaaccaaggttgactcctaggtttatggtttgagcagttgggtagatttactaagatagcaaagactaagggtgaaaggattcagactagaaagaataaagacaactgctttttatgtttaaaatatctgtgttgacaaatgagtagaagtatcaaagtctaaaaattagatgtatgagtctggtactcagaggaagagttatcaggatgtataaaggatttaaagttttgggattagataaattcacataagggcagagtacagctagagaagaagggagaactcacaactgagtttgggtagaagagttgttggtagatgaaactgaaaggaaatccttagtgggaaaagagaaaagctagtgaagagtatgatatgggagctaacagatcaagtgtttagggaggaagttcaagaaagaatgttgctgagagatcaaggatgaagaaaaaagtttcttattcatttgatagtatctggtcgtgacaagcggtttaagggaatggtagggaaagccagatggaagtgggttgaagagttactggaatgggaaaagt

SEQ ID NO: 74924 - DNA, 1478 bp, Homo sapiens
catgcagattgtacatgtctattcaaggagccaacattctagctctctgtagagaatggcctgtagggaatgatggtagaagcaggggatattaagcaggtgatgcagtaatccatatatgtgaaatgatgatagctttatgggccagggagttaacaatgaagatggtaaaaagtaagtagattctgtatctctccatttgcttaacagttggaagtagggtatgagagaaaaaggagatagaggatgactccaagatttgtattccaagcaactgaaaggatagaattcccaaaaacagatggagaaggctgcagatagattacattttaaggaaagcatgagaggtttttcttagactttaaactgatgttgttagggtgttttacattagtttaggcttcaggagaaagagctgcgctggaagtaataatttagcttatcagcatatagatgatgttaccaagagggtgagtatagatggaaaaaagaagacaatcagagcctggggctgtggctcaacctgtaattccagcactttgggggaccaaggcaggagaattaaggccaaggtgttcaaggctacagtgaactataatcgtgccactgcactacagcttgagtacagagcaagatgctgtctcaaataacagcagcaaaagacagtcagagactgatgaggatattcacaacattacagtgttgatcaggagggaccagaaaaggagactaaaaaggggagagcaagtaagataacaggggtggtctctttagaagtccagtgaagagactgactgctgaaaagtcaagatgagaactgagaactaattatagaaaacagtctttggtgaccttaataagagcagattgatttagtggagttttgagggtgataactaatttgagtgcatttggaatgaatggaaggagaggaattggcgacatcttctatagattatttgtatatagtttgtctgcaaaagggagtataagattgagacttcttttttaaatgagggcaaaacccagtgttttgtggtgtgtataataagaatgatatagcaggaaaaggaactctctgatggtcttttccattttattttgatcttttcaattatattgaatcttttatttgctacttctaagcaggtttttgtttctgtgatgagttttttctttcagtttatttacatttcatctgttgtcacgcttcttctttgatttttttttttttttttttttttgacagagtctcgctctgttactaggctggagtgcagtggcacgatctcagctcactgtaacctcccgggttcaagtgattctcctgcctcagactacaggctcacgccaccatgcccagctgatttttgtatttttagtagaggtggtgtttcaccatgttggccaggatggtctcgatctcctgacattgcgatccgcccgtttcggcctcccaaagttctgggattacaggc

SEQ ID NO: 74925 - DNA, 1035 bp, Homo sapiens
ccttgttatatgtatggattataatttgactgtcagagcagttctttatttctaaagtatcccttttgaattggccagaagttccttatataagctacttagcctttcattacattagattgctagctctgaatcttggtgtaactgcagatttaaataatttgcccttataactttatggaccttgggacgtatttactggcataagccagagaatctataattttgctttcctgtcacaacccccaattttattttaattaagtattcagggctgtctggataaggttgagacttcactttttcctctttcctgtgaccccacagacagggataggattatttcagaatcattggaaagtttaaattgactcctaaatgctagtgctaagaaaaggagttaagaggtgattggaacatttagagttggctagctagtttgtttttcttaaaactttatattcctcagatggtattacagactgttaagatcccttccttcctgttgttcccaccatagtctaggcattgccattttcattaatctacctaagtgtaggccaggcgcagtgactcacgcctgtaatcccagcactttgggaggccgaggcgggcagatcacgaggtcaggagatcgagaccatcctggctaacacggtgaaaccccatctctactaaaaatacaaaaaatcagctgggcgtgatggcacacgcctgtagtcccagctactcgggaggctgaggcaggagaatggcgtgaacccaggaggcagagcttgcagtgagctgagatcacgccactgcactccagcctgggccacagagctagactccgtctcaaaaaaaaaaaaaatctacccaagtgtaatctcttttaccactgcatttatctccaaacagaaaacatctgcttcagttttcatttttctaatcaaatgataatatagctaatagttggtaggctgcaatgcacctttgtgttcctgagaaagaaaagaactcagccagtgtacccctgcctcaactttgaggtta

SEQ ID NO: 74926 - DNA, 1889 bp, Homo sapiens
aggagaatggcgtgaacccgggaggcggagcttgcagtgagccgagatcgcgtcactccactccagtctgggcgacagagtgagactccatctcaaaataagtaaataaataaaataaaaataaaaagcatcagtaggcaggaagaaaatggaaaaataagggacaaatgatggaactaacggttcatggagttatatagcatcattatgcaatcaataattagagctcttacgttcttacaaatatagatagacacagaaaactcactcggacctgcttcaagagaccaaatgaaattaatatatcacacctaaactgaatcaggtattgcttgcccctagtttgtcccttgtgttggcattgaaaagtgatattttctattctctcctgacctatcaagtctgttattttccaaagagaatattttctttcaataagccatttttttttctgttcacttatgtctccaatcaagttgctacttctggcaaaatttatttagcgagtcatattggtggacatttaggttggatgtggctataaaatttttcttttgatccgaaccgtgtatttacattgctcattactattattctgaaattaattttaatagtgttaacttaaatatgttttcttatagcagaaaaagaaaactaagaacttcaatccaccaacacgtagaaattgggaaagtaattactttgggatgcccctccaggatctggttacagctgagaagcccataccactatttgttgagaaatgtgtggaatttattgaagatacaggtaggatagaagaatcattgcaagagatttgattttaaatttcacttttgatacaccaacagtttgtcaaatgtttgtgatttgttaatatagttctcattattaggattatttagtattaactccatctgatcaggtaaccatctgatatttgaaagaagtttttgttgttgaccagtaatgcttttattggacttctcttgaagtaataaatggctaagttgaatactaaaatgttaaacttaccttattctggaatttagaataactttattaagttatgctatttagtgaagagatatagttatggtttgaatagtgtggaagttttccatatttttaagtgcaatgctgtttactttcattacccattttacacatggatttttcttttaaaacttacagcaatagttgtaaatgcgtaaaaggcagcttgttctatttgtgatgctactatttattcagttctagcttgacatggtttatatgatttgagttgtatttttaaagaatgcatagatatcctcattattttaaaaacaagcctgctcttatgtttactttgcctaatgtaatctcaaaactaaacaaaataggcaagttaaaggtggaaaatagggacagaatattgttgtttttgagtgcatttaaaatgaacacgagttaaccatgaaaccttagtgactgaatgtactacacattttaatggcttgaaaacatgagctaagtcagttttggctttgttactaatgaacccttgatagataagcattgtttaaaaaacaaagtaggatactcttgttctcgctaaaaaatcatgctcatttttcacatgtacaccttgcccttcggtttatcagctaagttgtatatatattgagttatctatttggtaaggaatgttgacactttcagtcttaatgagagggtagaatgtgcagtggctcatgcctgtaatcccagcactttgggaggctgaggcagtcggatcacaaggtcaggagatcaagaccatcctggccaacatggtgaaaccctatctctactaaaaatacaaaaattatctgggcattgtggtttgtgcctgtagtcccagctac

SEQ ID NO: 74927 - DNA, 1770 bp, Homo sapiens
tctgaatttttattggatgatgttattagtgtttctttaaagaatgttagatttgctcggtgcttctccttggctggtggagaaaaagaaaaaaatagttaagaatgtttgatttgttttttcatgtgttaagtaccttgtgaatcagtttggtcctttctaagatggattgtaagtttgtatggcagatctagagcagcctttattctgatacttgtttatacctacaataaaattagatttgaccctgtgccccatttatattaaaagatcttctgagaataaaacttgaactattctcagctcttggcctcaagaagttttctctcatatatgtgcagtattcaaccaaagaacccagagactcttctgcatatccgatactctttctctgtgtatttctccatctttttggtattctaccccacaaattctagccttctcagtctttctgaactctcttctctcttcagctctcatagaccattgtgattccacctcccatcactaactaccacctcaaaactctccagacactacgttggggcattcagacagcttgcctcatttgctgctttttccctcatggatcatggttttgaactgtgattaatgttcatgttcagtgatcagtgttcagtgtctgaaaactggtgtttcatataatttttcgagtccttagttttttactatgggagggcaatttccacagcagttaaccagggcatcatggtggaagcagatgtccctatttttataatagtactatcttaataagttgtgctaggttccagttgggaaatgacccttgaaatattaatatgtttacagtagacaaaaagggatagtgcagaagagagtaactgaagagaaagggaataataggtctttttgaggagttaataaggatgataaacctgatagatattgggttgaaagagagggctcagaagtgcctctcagattgctctgttagggtgaccgtagatggcattccattaatgaaaatagaagttataatgagaaatggcagtttcatagtacattcatgtttggacatgttaaatcttccgaggtgcctgtgggacatataaaagcctaagacacagttgtatatatggctatggatctctggaaagtggtttggtctttagatatgattttggtaattgtcagtgtctagatattaatgtaaactatatgtgatataattcagggtagacatctagggtggtaggaagaaaagttcacagtgcaaacaggctatacaagagtggagccctaaaacactagggagaagaaaaattttactaagaagcatgattatcaacatttgaatgagaatgatttttttacattgctttttctgaggtgcaattcataaataacataaaactaaccattttgaaatgtacagttcagtggcaggtagtatattcacagtgttggataaccaccacctcatctagttccagaacattttcatttaccccgaagaaaaccctgtacacattaagcagttatttcttatttccccactactccagtccctggcagtaaccaatctgctttatggctctctgaatttactaattctggatatttcatatcagtagaatcacacaatgtatgaccttttcttctgcttcttagcattattgttttgaggctcatctgtgttgtaacatgtatcattatgtgtatatacatacatacatgcacacacattttgctttttcaatcgtttggtggacatttgggttatttcca

SEQ ID NO: 74928 - DNA, 1144 bp, Homo sapiens
tttgtcaggagctgaatgtcctaaatggtttaaaatagaaaacagtccactaagaacttacttttttaaaatgctcaaaaaatattttattcttacaaatattttaccactataaatttgtaacgaaattgtacataagattaagtacatttattgttatagatgtatattggttttttgtttggttggttggggtttttttttggagacagggtcttgctctgttgccttgacctcccaggctcaggtggggagcctgagcctcagcctcctgagtagctggggctacaggtgcatgccaccatgcccagctaagtttttctttattatttgtagagacagagtctccctgtgttgcccaggctgggctcaaactcctgggccaagcagttctcccaccttggcctcccagagtgctgggattacaaacatgagccactgtgcccagccgtgtggatatatatgtgtttattaaagtatgcatatttctttattctcttagggttatgtaccgaaggactctaccgtgtcagcgggaataaaactgaccaagacaatattcaaaagcagtttgatcaaggtaagaagatgattatgtgaaataaaaattgttgttttatgttttccttgttagaattcatggtgagaagattgattttcatttgaaaacttcctaaggatatggatgttgaggagagagggtttcaaagtgagattagaagcactaagtaaaatagataccacagtaaaggtacaaaacagctagggaaagcctgttttctttacattagcaaggaagtcactgattacttttagagcctttgaattaaggggacttggtactagggatttataagaggaaatagatgataagaaacttctaaaatacaattgcaatagaagaaaagattgaaaacgaggcagttgagtcaagaaaatacaatattgtataaatttttaatgtaagtatgaagacagaagaggatttggtaaataagaaaggaggtactggaaaagcaggcattcagtattgaagcaaagtccatcaggcctggaaggaatggaaagcagtagaataaattttgtttttgaaataacaagaaactatctcttacactaagactgaagggaatactgtacaata

SEQ ID NO: 74929 - DNA, 1524 bp, Homo sapiens
aaattttgaactgtaagcttaaaaggtccaaattagaatttatacaaattgagtaccccttattcaaaattcttggggcccagaagtattttggatttcagatttttttcaaattttggagtatgtggattttacttagcagttatcccagatacgaaatgttccagtgaacaagtttcagatcaacctgtatgcatatttattttttctttctagttacttatggcctcttttttttttttcctcctccaaagaaacagggtctcactatgttgcccaggctggacttaaactcctgggctcaagtgatcctctcaccttagtttcctgagtagctgggactacaggtacgcaccacctcacctgcctcttgtggcctcttttaaatagctgtataaacaaaaaaaaaagatagatattagtaaagttcctcaatatactaataagcctaacagcatttttttattataacagaaaaggcttattgcttggttgtcttttccctgatctgtgtagtttgtaagcctgaaaagaaaagtggggccaggcgccgtggctcatgcctgtaatttcagcactttgggaggctgaggcaggtggatcacctgagggtcaggagttcgagaccagcctggccaacatggtgaaaccccatgtctactaaaaatacaaaaaattagccgggcgtggtgacggtcgcctgtaatcccagctactcgggaggctgaggcaggagaattgctttgaacccgggaggtggaggttgcaatgaggtgagattgtgccactgtattccagctggggcaacaaaagtaaaactcagtctcaaaaaaaaaaagaaaaagaaaagtggcccaagacttaaagttatcttttgatctaaaagtaaccatttagcttgcttctataataaagttttattatataatttaaaatgttaatttttgtcttgtagatcataatatcaatctagtgtcaatggaagtaacagtaaatgctgtagctggagcccttaaagctttctttgcagatctgccagatcctttaattccatattctcttcatccagaactattggaagcagcaagtaagtataaacctcctttttatgagagggatgataatggcagtttttggatattgattgctaagtgttaaaatcatcatgtactagaatatgtagctaataaaaattaacttaactagaactctatttcttaaaggcattttcctctaaattaaaatcagaatccctggagatggcctccaggaatattctgttttagctagccccctaggtgacttaaatgctcctagaaattagaagatcattgtactagaagtttgaggtttgtgtttttaattcaaacttaagggcattgtaagaaaattaaataaattcttcaaattgtaagtcaaagaaatttactttggctttgtcttacctgttttatgttgctgtaacagaatactacagactgcataatttataaagtaatttatttcttacagttctagaggctg

SEQ ID NO: 74930 - DNA, 1051 bp, Homo sapiens
tccaacccctaggccacacagcctggcttgttaggaaccaggctgcacagcagaaggtgaggagttggataagggaaaccgggctccaccttctgtcagattaggtgcggcattagattctcctaggagtgggaaccctattgtgaaccacgcatgcaggggatctaggttgtgcacgtcttatgagaatctaatgataaatgtaatgcacttgaatcatcctgaaaccatccccccacccatctgtggaaaaactgtcttccacaaaactggtccctggtgccaaaaaggctggggactgttgctttagaacattttctttgattttgtttacctatcctaatatgctttaaacacattcttgactgttatagtaaatatagcaggaagctttatcaaatatttttaaatgtgtaagttttacacagattcttcactgttttaattttacagaaatcccggataaaacagaacgtcttcatgccttgaaagaaattgttaagaaatttcatcctgtaaactatgatgtattcagatacgtgataacacatctaaacaggtatttttatttttttagggttttttggcaaataaaatgcactacacatttcaaacatgtaaattttataaattggataattatcagatagaaaaggggactcagactaaacatatagttgaattttgtttttctaatttatatctaaaaagatatatgattagttttgtaatgtaattattatataaatagtaagtgtggtaagtatattttcctttttaccacattctctgtaaaatcttagaattttagatatgaaatgacactcagataactaaccagattgacctatttggagttggaacagggtttggtttgaaaaattactagttctgtgaccttgggtaaatgacttattcttcctaagtcttgattgtctcaactataaacatgaaaataacaacacttcacaaagttgttctgaggactgaatggaactattttagtatatgtactaattttttgaaaagtctcctcataatattttctact

SEQ ID NO: 74931 - DNA, 3500 bp, Homo sapiens
aggaaaggttttttgttgttattgttgttgtttttgagacggaatttcacttcactcttgttgcccaggctggagtgcaatggcgcgatctcggctcaccacaacccccacctcccaggttcaagcgattctcctgcctcagcctcccaagtagctggaattacaggctttgtcactacgcctggctaattttgtatttttagtagagatggggtttctccatgttggtcctgctggtgtcgaactcccaacctcaggtgatccgcctgcctcagcctcccaaagtgctgcgattacaggcgtgagccactgcacctggcccaggaaaagttttttacatacgaattaaagatgcttctttatgcaaatttttaaaccccaggtttgaagtaggataaaaggtaacattaaatctgagatcatttctagctctggaattctgtgattgtaatgagttttgatttctaaatgttttttcctttcataatttcagggttagtcagcaacataaaatcaacctaatgacagcagacaacttatccatctgtttttggccaaccttgatgagacctgattttgaaaatcgagagtttctgtctactactaagattcatcaatctgttgttgaaacattcattcagcagtgtcagtttttcttttacaatggagaaattgtagaaacgacaaacattgtggctcctccaccaccttcaaacccaggacagttggtggaaccaatggtgccacttcagttgccgccaccattgcaacctcagctgatacaaccacaattacaaacggatcctcttggtattatatgagtaggaagtgattgcaaacaggctggatttggacaaaaagcaaatctagacatgcatgtttcagggttcagtagtatacttcatgtttcatacagataattcacattcaaaattacattttctctttgaactagatggtattccttattcacttacattacaaatctaagaccatgtgataagcatgactggagaggtttaatttttataaacaaaaatagctataaagtacaaagctgctgctgcatgcaaccttattgcaatcagtatatcattcctgtggcaatttctgtcaccttatattgtgaataaaatttttctatagaaattaaatgatttaaaaactcacctatatgaaacatttaatgcttttcagcctgctttctggctgattttgttatttgatgtgctaatttgggcaacttaatttacattctggcagtcggtgtagataactaaaagcccagttaagtattttataatttcaggctactgaggccatgcttgggatgttgtttgaaagaaagaaaaaatacacttgacatatttcacatttctgtaccttcatctttacttccaagtaaacccgtggatgatttgatgagggataaatgaacctatttcttttacacacataccaaggacatgcttgtggctaaagtgagttgataatgttgtgcaaaggatagttgtcaccaactcatttctttatggtccataatgaaataaaaattttgtatactgttaattctgtaaacagatgcatgttcaaaagatctatgatggtcttgtaatcttaatctaatatattttagatattttaattttttccctcttggggaacacatttagtatagtgtagaaaatacttccatgacattttcatataaggttatataacttttcatacataaacatgaaatttgttgtagaaaattctttaaaccaaacatttaaatctaggacttcaatttaatttgttccttgaatctatttttatgtggcccttaaaaaatatccaaaaaacccattgctaatatagcaataaaaatactttgggtactgacagactctttggagtgtttatattacaaatttgtattcatattcttttctgtgatgtgttgtactaaaatccaaaatggcttttgcaccatttttaagccaattttttcctttgatgttggtaccagaattactataagtgactgctgcttttgggggtaaacattttgttagtgaagataaaaccagaacactaaattatggataaaattttcagaataggtggcacaggtaaatttcactaggttatattttgtgtagtaaagaaaaaaattatttggtcaatgttatcttaattcatactacaatttaagattatcttatgtgtattatagtaaatagatgattttcagattcaaggctcctaagagtttgatttgctctgttttttcctaaaataaatattgtctctcccaactgttaagttctaggtattgtacttccaattttaacttcagaaccaagatgttggcatgaaccaggctgctgttgaagtacatgtatattataaattatcttatttgtgttatactcttacatgttatcttttctaagaaaacaaagtccctattattcctattgcaaagcacacaggaattaagaaagtacagtaatttttaaaaaaaaatccggtaaatgtagtattcttaacctgttctatattacttatacctattgtctatatagctttaatttatagttgtcagtttaactattggcatgtctggcaaagaaaattaaactttaagagttttataaactgtttctaggttgctaaagaatttatttttctactatatatggtatagacaaagcatcaaactatgtacaggaaaaaagcctgactatttctatttggaagtaggctgaaaagagaattttcaaaactgttcgtgtcttcagttcattctgtcataactttgctattgtaatatgtgaataccagtttatttaagctgttctcttttatactgtattaatttaatgttcatctgcgtttagtaccatttttgttattaaaactggcatttaccgtttttcacattaacccaccttgcaccttcccccaaacttatctccacttttctatgcattctatcattgatttgacacacttcatagtgagtcatttaaatactctacgtttggttcaattaaccagtaggttacagttattgaaaattaaagtacagtttaaagctcagtctgttacactgaattgattgtgtttgtttttgccaagggtttagatatgcttttaaatattagaaacatctaagaacagaataacataattaaacttttttctggtaagttactggaaggtttcactgtttagggacctatcatatgagacttcttaaaggattaaaagaataggatagtctcataattgtgagtaaacatcaaggcattatattttacaatactgaataaaatttcatctacacacatgttgccattgtttcatttaaggttcagtgcttatagttaactacaatattggacctaacaggatctagattagcaatataaagaagcatagtggtactctgtttcacactttcagtagatttattagaagtcaaattctattcaacagacacttattag

SEQ ID NO: 74932 - DNA, 2443 bp, Homo sapiens
ccgcaatctaagttagccaaaaagcagctttttttcccatactgtatgtaaataatgtagacctgggtttttttgtttatttgggtttgtttttttttttgaggtactggaatctaattaatatctcttaggtatcaacaaaagggaacaattggaatgagaatttaggccttagcttccatggtgatttttagttttttatacagtaataattgtgatgctatttgtcaactggatataaatacacatataattttaaaaagtcaaaagtgcttttgtttctttgtttaatgtaatttttgtgcttcacctacaggatgctgcagtaaattaaatatcagtgaagcttctgatgtataaagaatgctatgaataaaacattaagaagctgtgtaattttaagttatagttgcctctatttttaccatttcattggtaaaaattagctaatttttttcaagtgaaatgaaaaataaaaatataaatttatcaatatgatggaaatcttattaaggagatgtattattgaattttcactgtacctgaaaaggagattcaaaattttttctggggatgtatataggtgaaaatttgattttttaaattatcaggaaaacaagataatgcacagatttctaagactaagatcttacctggatgtgatttttgagctgtggctagacattctttagagccactggaaatattttgaaaactattctagttatagcagagctgctaatattaacgaatatatttgtgtcttcatggtttgtgactattaggccaaattttgtggtatatgttgtcagtctggatctggtgaggtctgttcaacatgaatctttgtgttatcttgaatttagtagtttcaaggtacttaaattcttaacagtttctaatttgtttcaatacatatgggacatggttgatttttttactgtattagaactcttggaagttcttagccttttcaggttatgaaatacctgaaagtaaaattttctaagatttaataagggaagatactattcaaatcattttcttaggatagcatctttacatacaatgagaggattgtacaagcattaatctcatattccaacatccagttacttgatgtgatccaagtaccctggtctttttgaagcagttaaaatctaattaattaactttgggagtcttcactattcaattgatcctcatcattgtcctatttgcatgactccattttttcctccactatatgagttttctttgtcagggggagaggagtgggaagagtcacagaatctcatattcacatcttaattaaattgtgtgaaattagtcttttgtggaaattctgtaggcagtatgattttgaaaagctaaccaatgataattagcattttagttaatactaaatgcataaaattataacccttgaaattaatttggtgctggcagttctggtttagtcatttttaccagtagttagtagtattaagacctgcagtatatgcactttttgagtagctgtcaaataattgtagttgagaaacaacttgtttattctcacaattcagattttctattcagttttgtctcaaatagtaagttattgtgaacaatttaataacggccctcctgttctagtttgcctaatattttagttaagatttagtgttttaacctatttttttaagtttattttttgtattagattttatttgaataagttatgtgggtttagtaattgacctatttattcattgcttcactaattcatccagattagttttaagtgtgtatatgtatttgctcaccagatcattttcttgggaccttgaactgtgaatgttttgtcctaaccatttaatattttctaggtacttgctgcaagttcttgaactattttaccagctttaactttggggctcttagtttcttttctccagattcttgttattttattttatccaaataaatatttaggtgttctaagaagtagacttctgtttaattccgtaaaataagtaaaatcagaagctgtacacactatcatactgttattatttgggattgtttataaatgtaggtgaaaggataaaaaatacctatctgagagaatacagtctttagatatccttcttggaaatttgacttagagatttttcatttgttggcagtcacaggcatagctgctgaatgtcttttggtctgtaatatttgaagtgagaaacattaccagcaatgtacttttaaaatataaactaaagccaggcatgatggctcatgcctgtaatcccagcactttgggaggctgaggcagggacatcacttgaggtcaggagttcgagaccagtctgccaatatggcaaaaccacatctactaaaaatacgaaagttagcctggcatggtagtaggcgcctgtagccccagctactcaggaggctgagg

SEQ ID NO: 74933 - DNA, 1053 bp, Homo sapiens
tccattcacttgcctgagacctccttctcctaattttgcaaagctgacttggtcatttcagtaactcacaattatttactctgacattttgggattacatcagacattctatggtacagttattttccaatgaccaaagtcatatcttattctatctgcctacttgatagcaagttagtgtgagtgaaaagccttggcaaatacatataagtatataaaagaaagttaatttgtttaggatggaaattcttttaccaccctagaactgcattagcatcataattatttcaaatttgctttcatttttaagaagggtgcccaaagtaaagtctacttagaaaaaacaattttttagattaagataatgatcatttttctaattatgtacatctttaatatatgctccaataactatgagctgagagttgtaatgttgtctccctataaacttgaagaagcttttaacttctggtatgttgtttttttcttcagtaaagtaaggataaatactgacttcaaaaaattcatgagtggtaatgatgttacctaatttttgcagatgacagaagctgtataattatatatgttgctgatgctatacttagttttatatattcttaggaagttttcctatattatttgtaattgtaaatgtcgctgaaagtattattagtagtcacaataggaatgaagaaaatgaacaacataaagagttgattaccatacaaagttattattttttacaaaagaggttaaggagcagaataacatctttgcagacaataaaagcatgccagaaataaatgcccacaaaataaatgaaaatgatacctaatatttccaactgagccaaaaacaattgagaaaatgatagaagctatgaaataaaaacatgaatcagaattttaaaaactcagaaatatgataattgaagagaaggaagattttaacagagaggtaaagtcaggaaagaattagaaataaaaggaaaaaagaatttcaggaatgaagactatgctagaaggaaggaatgcaaggacaaaataatgcaac

SEQ ID NO: 74934 - DNA, 1034 bp, Homo sapiens
tttctgcatcctgcatttgccatgatataatgacccattaacagaaaagaaatgaaaaataaggagtcagcatggttgatggttgttacctaagcccataataacattttaaattgcttaaagttgcagtctcctaaagagaaaatatagttgttgagtggcccttttggctacctggcaagatgtataattcaaaagattcaagatttaattcttctggaatcttatttcagatttcctatgtaaaagagtcagagcattttatatattacagaggagtatgagacaattaaggccagaaaaatataggcagagaaatataagaaaacatacttctttccctgtttcacaatactttggtagagtgctaagtaagacaaacaaccctataattaggaagaaaattatgagaagttatttttattctcaaaaatcacattaatggctttgtctgcagctcagttattaccaattgctattaacttgttggcacaaacaagcttaaaatttattttatattctgtagtcctaataatttttttgaaaaagtgtgacattcaaatcgtgtaattaaaacaagtagaataataaacatatatttatgaagggtttgtgtgtgtatttgttttaagttgaacagataattcctagtgattttgtgagtcatacagtgaataattaaaataaatttaaattcaaatattaacatttcaatttccagtttggtgaacataagcaaattattataagtttgttttcaattcctgcaaagcatattaaaattaacttttcctcaatttaagtaatgtgtataagtaaacttccttcccactgtgaaaaggtttcatttattgctatttgtaaactgcctaggatagattcagagtggattgggctggaaactccttgaacagtttcttttgaaataacactacatacgttaagctcaattacacatccaaacagccacagctcacttttggtaatttattcattgatttaacatagtacccagaagagccatgcctgctgtc

SEQ ID NO: 74935 - DNA, 1045 bp, Homo sapiens
gccaaaataaaacctttgccaaaatatcaatgcaattgaggcacatttcttgctctctaccccattctatttaattatgtccattattgtcttaattcttcaacaggccacttcacacaaccattgtgaacctggcctcagcattaatattatccttgatcacactttagcatttcaattttaaagttccaatttgaaagcctgctatttctgttaaaagtttttccatgaaaagagtaaatcttggctacaattcaacggtaattcagcttaaccaagttaagaaaagccttttattcacagtgtttatttagagacagttaagtacagaaatgtgggttctagagacagaaaaatacaaacttttatagagagccatttttttcctttaaagaagacagtgctaataaatcttgttgaatcaagaccttgaaagaaactgaaaatatgtacagatctcaaatatacccaggaaaagtactttatattatcttgctgctgctgcttcataatgtagttttagttgaatgtaatctcctccactcaaatttatttttgagaaattgccacactgaaagttaaaaccatttttgtcattcaaaagaagtagaagatcaatactgaagctctcctatttgttggtacagtctactttaatgttaaaagatttatgataagaacacatttctaaatacatattacataccagtggtacagtcaaacctcaaaataaaacattgttttttaggagaaggaggtggtctatttattattgaaatgctatactaaacgataattcagtgatactttattccaattaaattctccttagtagtaatccttttttatgataagcaaaactgaataatacaaggtatgttccctccaatgaattgttgtgtaacaagacttgatggtaattctaccttttccaaaatctgatatcaggcaatttatcttctaaataatactcctgagtaccaaagctgaaatgttttggcttcaacccaaatgaaacttgaggaagcagattctccagagcatt

SEQ ID NO: 74936 - DNA, 1050 bp, Homo sapiens
cacaagatgtaaatgaaaattacatcataacattttctgtcacgaacaaaagagtggtagtccttcttttccccccttcctctctacccaaaaccttttctgggtaagtttattttcaaaattattgagagccaggtaacattgactattctttaactgcttcaaattgttcatagtcaaatacttctcagtactttaatttttaatttagagcaaaatataagaaatcaattttaaagcataaaatgacactgaacagagatatagagtatttcagtgtgatcttaggtcaaaccaattcttttaaaaaatctgtaacatatcatctgctgtcactggggctatcacatgctcaaaacaacttctcaggatttgtttttgcaaacttaatggccaaaattaatttgtcaggtgggcctattattgaatcttttaaacctgggcttcatttcaagcttttttatatctcttgctttcttgtaacagttttacaataaaatgccacatgggttaatgtaaacttttgaaattccactgatagttaatgagtatgtttaggttagaagttgaatacaataatcaacatggggcttaaaaatcacttaaacaaggggtaaatggttaattataaatagaactgttggcctacagaatttaatgagagatttgagtatacatatactttatatataaactatgtatactttatatagtttgaatataacacagagaatgtgtttaaataaaatcttattaatgcagctaaataaagttcaaaagtagaacttaaattatttgaaagtattgtcacttaatatgttgggctttatgaaatattaagtaaacttaaaaaattagaaacatagaaattagaaaaaacttatctgagttttttttttttttttgagacggtgtcttgctctgtcacccaggctggagtgcagtggcaggatctcagctcattgcaaactctgcctcccagattcacaccattctcctgcctcagcctcccaagtagctgggactacaggcgccgaccaccacgcccgg

SEQ ID NO: 74937 - DNA, 1072 bp, Homo sapiens
aagattttcctttctgggctgcttcataaatagttaccagattgaaatactgtttctaacatattttcctgctcaaaatcactgactgctccatctcacgtcaagctgtctgtaatcttagcttagtgtttaaaacttaccagtgtagctccattctgcctttcagcctccctataacaccagacatttcttagcgcgagttctgtgctctgtccatgaaacatttccattcattcttgttaggcacaacacatgcactaagtccctgcctttgcttgctcctttgtaaagtctttctaaccttgttttatccacagtggtttctctcttctcttaacacattaattgagtaccttctataaccaggaactattgattggtatatatcagtggacaaaggccataatctttgttctcaaagttggatgattctcaaagttggatggcattagaaacagccactaaacagcagatgttaaaaatgaaggaaatcatatagtctgttacatggcagtcagtgcagtggaacaaaaatacagaaggttaagaaggatttaggagtcctggggtagaagtgagtcattgtggttataatagatggtgaccattaaaagaaagatgacatttgagcaatgactgtaaggaagtgagggagttaggcattcacatagccaggcgaaaacattccaggtagaatggacaaccactacaaaggcgctgaagggttcctaatgtgttcaaagcacaccagggaggccagtgtggtgggggctgaatgagcaaggaggacagtggcaggagacaggtcagggaggcaacagcacacgggatgctggcgggccagggagggacttcggcttttgttccactcgaaacagagtcttgggaggattatgaattgaggagaaatgagacctaactgattttagtatcagtctagttactggctgagcatatgcttcagggggctgagggtggaagcaggggacttagctcagaggctatcagcataatcaaggtgtgatttgtaccaagacgaagtggataaagaagagagagagaagtcgatatt

SEQ ID NO: 74938 - DNA, 1048 bp, Homo sapiens
tttcacttgcttttgctgtctaaatactatttcctgaagtgtttcccagaggccgtttgttaataagtgttatttgggaagtaggttaggtgatttggtaaacacttggttaaataaaactagccaagttctttaccagcaatgtacatcactaataagctgatgtacaatgtgaaatgatgagggaagccttgctgtatagtatttccccataataacgtttgtccatagagctctattatcagatgatattgggcgtgttcagggtggtatggccgtagactagagctctattaccttaaatcattgcaccaaggactagtgttccttggagcatactctgcaaatggtagatgagaaatcacttctctcatttcagaaccttgacaataaaaatctagagcagtctgtgtagacataagaattgaaatatctatctggtttaagagagaggaaaagagaccaacttttttttttttccccagcttattctcaagtactaaagtgtgtgtgagcaatcagctgccaaacaggaagagctgttccacttctaattttagcttgccaccttgcattgctgtaggagtggttcccacatgctgcaaagaggttattttgtgtaaatagagacttcttctatgtcgtcaagtgggaaagaatcatcattaggcctccccaccatttgcacagtttctgcatgttgaagatgatctgtccaaacatttagacctggtttaattcttttgcattcataatttaaactggatcaaggattcctgctgtccaggatcagtgaactgatgcaacttatctctcctctttattccccagaactggacagcatttgctgtctagtctcagccaaaaggaaccacttcttcacagctctgggtgtccatgaatcaatttgtattgaaccactttgtatgacaatccttggggcacacttgtatattttgggttattttggtgatagcaaagtggaatgccctggacggcaaactaacattgttatcttaggctgatttataggacttttctcctggac

SEQ ID NO: 74939 - DNA, 1055 bp, Homo sapiens
gttggttcccatcgtgacagtaggcaaaaattagctagggatagaacagagtacacaagtaaggattgattttgaatagaaaaactagggagaaagggggaagccttggagaaaactgccttgccacacagaaccatatccatagtgattaagacttctgactcatagaacacctgggttcaaatcatggctcttttgttagttgtgtggctgtgagatctttgcttactatttagaaccttggcttcttcatctgttagaggtagatgaaaatagtaactcattcatatagagctgcttaccggactaagtaaataatcatgtgaagtacctggcatatagtaagtgcccaataaatgttaactgtttgtattatttttattggagtgccgcctaggaataagagagttaagacaacatcatgagacccctgagtagcgaaataggaaggatgcaggcatataatgaagctgctattgccagcatagctaggaatgggaatggaagtgggaagaggggaaggaagacactgactatgtgaacaagtggctgctgaagacagcagttgtcatgcacttacagatttttctaagataggctccaatttaaaccaaaacagagaaaattaccttaattatttagaagtttctggttctgcctcaaaaatcttatttaccaaggtaactgcttaagttctccacttttttatttgtgttaacacaagggtttttttgcatggagaactattaccttacagtatagcagtctgcaggcatttagtaagtgtctggttcctttatttgcagatgggcatggttttctactaaagttggtggtgactagtggtaagtttataaggaatttaagttaaaagaaaagtatacataccaataccttatgaggaatgtgttttgtgaatgaaaattcaggtaaagtattgggaatatggtgtgacttctgcatgccctgattcagtggtcctgcaaaccaggctctcatgacaaatagatgttcccacctggggaccggccatagtcagtagaagccctgaccct

SEQ ID NO: 74940 - DNA, 1029 bp, Homo sapiens
tgtctcctgttctgcaactcccctgagatcactctagtgcagtgtttcccagctagggatggttttgtccctagggaatatttagtcatctctggagccatttttggctgctacaactggggaattgctactggcatctagtgggtagaagcctggcatgctgctaaacatcctccaatacacagaaatgctcccacaacagagttaaacagcctaatatgtcaattgagacaaggttgagaactcctgctctagtctaaaccagcatcctggatttccttattcctgaattaccacaacaccctttgaactggtcttcctccacctagtacttaaacaatgcaaatccaccttctgtgccctttggggcttcttactaccattagaataaagagcatcctttctcagaatggtctgtaaggccttatagggtcttgcctgtggccacttttccaatgtcaatcaatcttgttgctttctgactttctccattccacagctgtattggcttagttctcatctttgtctgtaccttgttcttcatgcccatggggtttcatgcacactaccctcacctgaaatgctcttctccacacctttatgtaggtaatttctcttgatcattctttagttgtaactggaagattattgtgcatgaggagtgctttttgaaccctgctccagagtaatcttctaatgcaaattctgatagctctggacttaaaaaaaattatgtaggtttgttgtatacttgtttccctttttaaaaattcagataattctgccaggtctggtgatgcctgcctgtagtcccagctactcaggaagctgagacaggttgattgttgaagcccggagtttgagactatagtgtgcagtgatggcacctgtgaatagccactgcactgcaacctgggcaacatagtgagaacctgtctaagggaaggaatgaatattttaaaataattttaattagtatttattaaattaagagattattaaattaatatctattaaatatttatgctg

SEQ ID NO: 74941 - DNA, 1115 bp, Homo sapiens
agaagcattgctgtaaaaggtatcttaacaggtgactcttctctaaactctgtcacatacacttgcttttcattagtgagaatgaacttttaaaataagtgtattgttcatggagagagtctgacattacaggcagcatgatcaaagtgatcatttttttttcttaaggaacatggagtgcttgcctcttccggtagaacaaggtaaggcagatgtccctgaaagtatgcaggctgtttcctaaagagcaacaaggagaatgaggaaaaagcctccattaaactttcaaagagacatatgtttcaaacagacttgttcagcacttactccctctgtaaaagtgtgggaactctatagatgcctctttcctgtggatagaagaccactgcatgccacaaggaagtaaacattacagagatcaacaattcatttactaagtcctttctacaatattgtcctgaacccttgattagttgtagatgaagctgggttttttttttttctttatgccacagaaataagccatttcctttcctttctacgtggttatttttacgtattgtgatttttaatctcactactcttaggtcaaggagctttctttatatttaatgtaactctaatattcaaagacaatatgagtagtgtttaagagtgtggattctggactctgatttcatttaaaattcaataccagactcaactgttaattagctgtgtgatcttgagcaagttgctttaactctgtacttcggtttcctcaactgaaaaacagaaacaaaactcatatttaccagacacataatcaatgcactgtacacattatctcactagctgctattataataatttttttacccaaaacaatagctttggctacttaagaagtttttgaggcttatcagccaaaaatgtatttacagcttctgataattaaatgttacttattattttccttcatcttttaacattgtataagaattttccttacatttttaaagatgcttttcaagttcattttatactaagtgcctttttaaattcatcatacacacttgtgattaaagggattagagaaatacccacatctatgcacttataaaccccagaaataa

SEQ ID NO: 74942 - DNA, 1059 bp, Homo sapiens
attgcttgtgggagtaaatggctaagcgtattaattgataagtcagaagtaatggcagtatttgcatattatcatatatggctgaaagtgcttgtgagtgtgtgtatgtgtgttttaattatctctgctgaaatgtacacatagccaaatgtatggtatgtgcagacaaacatccaaattgttgaccgaattctttttcacccagatttattgaaattgggtaagccattcactcttttgtaccaaaactactgaaattgggtcaatgaggctacagtttgagtttttcttgaggttatgtcaagatagtcctataatcaaagtgctatgcaaacattcagagatgttcacaggcagggtgataatctcactcacttagggatctatgctgccttcaatacagatgtgtaaccccattaacattaataagacttacgctcacatatcgatggagagtaaatccctaattagcagtgagaactgttaacacccccactgtggtaatacctctgaaagattttcatgttgctgtgataataggcacatctgtaaaaaaaagaatattttaaacaatgtggaagttgacacacaatcaagcctgagacttatatacctgtaactgtcacaggtaacatgcttttactaagggagtctgggcctgaatctgataacagcaggcagaggaagagattattctttgcatttacttaggaggacatgaatgtttctctcatgcaaagaggagaatcgcttgctctttctcctacccaggatggtaattattctgcaaagatgtgtagaagatttcatcaaaggactagtattcaaagcagtggcctttcatcccatttagaatgtaatatgtaaataggatacacattggacatggtttggctcctcttggtaacggaaaggacatggattgaagcaaggagcttcccatccacagcgatgtgttattgatgagctggcatttgccctgtggccctcccagaggattgcttacatctattactcacacacatcgattggttaatttgataattctatcaccaatca

SEQ ID NO: 74943 - DNA, 1049 bp, Homo sapiens
tttccaagtttcatcaatgccctttttcagttttaggggttgtggggtgatatacaaagtaaatatactctaagtaaattaagcatttgttcttttatgagcacacacacacacacacacccttaatcaaatgcaaaccaaatgctctgcttgtatgctacaactttggctaagtggttattctatcaaattctagacagtgataaggaatctgtaaagttatggaccctcctttcctttccaaatagttttgttaaataaagacaatgtgtaactctgtcatcaaagacttgtccagtgaaattgttcaggaggactgtgagcatgtcagtttgttacagagcatagctatgtctgtattgctaactctcaagatatcccttcctcagttttattttctttcaatgtgtacataaatgtggtggctttaaaacagcttatgctcaggatagaattaggattcttttttggctcacaagaaaacaagatagggaaacttctactgagctctgttgtgtagcatggggatagagacagccagagcggattttctctttgactctcccttgggtgggacagctcctggtgtccagggcatgtgcatgccaggtattctctttaaagtattctcatcttgttgtaattatgggaatgagtgaatgatgatgatttctgaagctcctcaacagtcctcttgactttgccagatacacatacatacacacacacacacacacacagagagagagagagagagagagagagaggagagatgtatatatttaacctaacaacatccaagaactggtttcaggttatagaagtatgcactgttgacttgctttcctgtgtaaaaatgatgcccagttactcaccaagaggccttatcttaaaggaagattcccacatactgatgctgagtttggcttgcatagagactgaataacttgttatacctgatgatggcattcagagctgttcatgacagctctgctttctagctataatggaacaggcagaagtgaaaatgaattaagaaaacagaatgg

SEQ ID NO: 74944 - DNA, 1040 bp, Homo sapiens
tttttagcaattcgcatttttggacacagtgtgctctgagtgtctgttaattaattcccttgtttctaatgtcttaagtcaacattttaaaaattatagtctgaagaccacctgcatcaaaactattagttttaaaatgcttatttccaggccccaacccagacatcctgaatcacaagctccccaggtgattcttatgaataccgagcttcgagaacaactgttaaatgaaaagaacccactcaggtatggctaaagttgacacgcttaaactcacatggacttggtcaacacctagaaggtcaccaactagttctttaagaagggattacctttgccttcttctgctagttatcagttacacagataatatcgtcaattacagcttgcaagactaaccggtctttcacaatctattttcaacgtgaaatcgtcataagagataatgtctatgccaaggtctcagatcatattcgacagattcactactactagctgggcagcaaggaagaggattcagtgccccaaagagacctttttcatgcaacacatgcaaatgaaggatgcaattaattaaatatttctttgacactgcccaaacgcaaatgtatcctgctgctgagccttcccttagcttgttgccacgaccatcaaatacaaacacagtgtagggaagggtcactgtaatatgcaatacaataaatatatcagtggaagaccaacattaaaagagttatttgctaatgggcaccatgccagggttattcaggcaatgctgcctgcagaattcctaagctgagttcacaagatacagatcgatgcaccgccaaagagagtctatatcaatctccatttcattcattagctcccacttcgagctggttggctgctagttaactctttaatgtgggagaaactgtcagtgtaaaggccactgggacacgtgctcttcccagctgtacttgacctgtcaatatttcttgcagcagactgtttaaactggtacggctaatggcaaaatggagacctatggggttttg

SEQ ID NO: 74945 - DNA, 1044 bp, Homo sapiens
aataaaaaattagccagttgtggtggcgtgctcctgtagtcccagctcctctaaaggctgaggtaggaggatcatttgatcccaggacatcgaggctgcattgagctgtgtttgcaccactgcactcagcctgagcaacagagtgagaccatgtctcaaaaaaaaagagaaaagaaacattgttttgtggcacatgactgctgtatataatctgctttctcccttcagagccaatttagtttccagagaactttaaggggatgtaacaatgcctgagatttcagaaatagcttatttcttccctggaaactcgaattgggtcaaaaccacaaaatatgttggttcttacagggtgccttgcactttgccaggcactagtgctagtaaaattaaatacatggtgtttctaaaacgtcagcattacccctaatacgtgcactgtctattggcattaggggagccactaactctaacaggttgttcagggccaaaggaacagatttgctgtgggtaaatcagtagcctgcattttaggggttctgtgaggatgcgacagaaaataaggttacacacagtgaactgctccaagtgacatttaaggaagattatttctgagagcgatgtggaggatagatttttgaaagatgatgctggaaccagtgagatcatttaggggctgaggccatagtccacgtataaaaaagaaggcgggcagggggtgcccagatgtggacagtaacagagagcaccaggagtagtatataaatcagagaattatgaaggcagcaattcctaggagtttgcgatgtgaggtgggaggtacttttctccaaggtagtgaatttagttgggggaataggtttggggatacggggaggaaagaccaaaggagattcagttaggctgaattgggttaagttttcaatgcctgtggaacattgtggtagagacttgggaatgtccacggctgtgaatcatcagtcttgctattagccaaagccacaggcatagacaagattgtttaaggtggtggttctcaaagtg

SEQ ID NO: 74946 - DNA, 1022 bp, Homo sapiens
gataaacaagtcaaaacggaagaaaaagtgagtgaaaacattttgcaagaaaagctatcaaactcacaattatgagatggtcatttaaaaattttccttttcattagagaaatacatgtttgttttaggaaatgtacaaactacaataaagtatacagaagatactaaaaaatcacccgttatcctatcacacagagagaactgccagtaacacttgggtacctttccttgcaggaattttctctgcacatacatatttattaacaaaatttggatcatgcagtacctataatctgatatgtgtgtcaaaatatatttaaggaaaaatgtaaacaaatactattttacatctacatctatatacttctatcatgctttgtaaatgtgtttcatgtttgagtatttgtacaacgagattttcaactcccagacagcaggagcactggtttccagattatttccctgtcaatatacttgttctcccccatttccccaaagtttctgggagtatttgttggtacttggtagaccgctgcaattgctcattggacaaatgaatgaatgttagtctgcccttgattagaagtttaaattttcatgatcaatttatatatagatatcatggttgaaatcaaatggagtttaaatatttttataagttttttttcttctggaaactaagaattgtgaattttaattattgaaaaagatgtgcattttaaacttttttttgagatactcttcaaactatagccatagatgaataaaagagtctcagaaatgtcagaacatattgtgaagatgatcactgcatagacttcaggtagatcttccaggaaaatattacaggccacttgcctgatgggtacaatgtgttttactaaatctgatttgcctgagagatgggttcaactgacactcttttctctagggagcaagaagagggcatcaaacaagagtcacgtttgtaaatattatacagataatttttttttttttcaacagggggtctcgctgtcgcg

SEQ ID NO: 74947 - DNA, 1033 bp, Homo sapiens
gtataaattagtagaacaagaagaaaggttctatatcagaatgatgagatagaatgaaaaatccttcctgtgtcatcaaataagaacacgaatccgctctctttttacagatatgttaacagaggcttcccttagaagaattttagctagaagataccacatcatgtgtttattttatcttcaaaaataaacattttggctcccatgggaatccattaagtacgttttttgttgtacgtacatttttctatcactccgggagtgcctgacttgaaaattgcaaccgcagcacccaaagagacactgcatatgggaggctgaggcaggagaatcgctggagcctgggaggccgaggttgcagtgagctgagatcacgacattgcactccagcctgggtgacaagagtgagactctgtctcaaaaacaaacaaaagcaaacaaaaaacccccaaaaaaacaaacaacaacaaaaacaagagatactgcataaccagttctgaacgttaagatgtgccagaagataattccaggggatcagtgggtctcctagttctcagagaagaaaaagaacaaagcagactgtcggggaaatagagtcaaagaggaaataaagaagaaaatgcagctactaattgagactcattgggcccagttatttggaagtgagcatgtttaaatacttctagaaatagcgtgtgtataaaacaggtccacaaactctttgaagatctcccccatttttgttgtttaagggtaaattatacgctgcatttcattttttcttgtaatcttagatcaggtatacctccatcacaccatactatgcaagcagtggttttagaacagtattcatgtgtcaatatccttttcttttccttaagagacatcagttaaaagaagaacctagagaatgccttaatactgaggggatattacatcacaggaatgagcccagggatttgtgaaagtgactaaaccaagaaattttaaaaccttgttttacaaggttcccatagttttgaatttttcaagt

SEQ ID NO: 74948 - DNA, 1047 bp, Homo sapiens
tcactaatgggtttcccggtcctccggagtgcaatggtttcaggccagctatgacgtaccatggaagctgccagagcttcagactgtcacaagtttcttggtggatatttacctagaacccctgcctacctcacttccctttccaggataatttccagcatccctccagattccacctgcgtgcctgcaccctttcatgtcaagagggaagactggcggtggaaaaactgtcacagagactgtaatactcagagcaattcttgtccccagaactccaagtcccggtaatatgatcacatctactcccagactccatttgattaacatcttaacaggctgcagatcttccacatctatcagttaacataggtatagtcagaaaaacaggaggctaaattcagtttggttaatagctattcctgaaaaaggctcgcgtaacttttacggaaaattaggcatttttctcttgctattaaattgcactctcctcctgtatcacccaaccactgactatatcattttacaatccccatttcctccatttgttattgctacagagcgtaaatcgggattcacagtgatcagctcttaccctctgggagggggggattacatggaaataatccctttaatgtgcgccttgcctctaagcacttcacacagtaataaatgggtaaactgactttgagcaattaagaaattaaatggaactaataaaatgtgtgttttaatatttcttgatgatggttattttgtttggagattagtgaatatgaggaagtcactctcgttttgcatggagtccaattgtagcactttcgtaaatatttctgtcacttttctcaaactaattttttcctttaatacttcaatgtgcattttggcacggaccatagattgtgataggatgacaacacaaatggcagataaaatagatttttttaggggagctggttattgaatgttcatgtaagccagtcttatagagagcagaaataggccactctctccacatcctgatttgctcggatgtgcagatacttcctt

SEQ ID NO: 74949 - DNA, 1015 bp, Homo sapiens
attacaccttctgtttgacatttgcagtacagcagaaagtgctgtagatacagtcacattgtctggggactggggttggatgtggggttagtaagatggtttcccttgcctaacttctaaattcagttcattgatagaaatcttgacccaatacaaaaaatatcccttcacaacaatataccagatggtaaataattcacccatagaagtacaagtatatgtcatatccaagccgtttttttatacaaaatattgatccgatcctcagataaatttttacgttctttatggttattcctagacatttgttagtctaattataccgcttactgtgaaaatcatctaatgatgtcagaggaattgagctcctgtttctgtagaattaggagtagtcagcaatttaccatagcacagaggcataagttgaaactgaagtttatttgcattcaggcaagtactctactgtttccattttgctggccttaaaaacattcgggacatagcgtaagtataatagcataaaaatcatactactataatgatgatcctaatgccacaaaacaggctagattttgcctgaaaatttagacaaaacatgataacccatactttacacaaccaatgggttagccatgcagctgtagttattcatcatccaaagtactgcctcatgcattttgctaaattgtctaaatcctggtacagtattgattttcccctctatgaactcacacccacccaaaaagccacaagagccccttgccctggctgagttctctctgaagtaggatccaggcatgttcttcctgacaggggtcctacagaagaaactgatcactcgctggtgggaagcaaaccactggagacagaaagggaattttatcttagagaaacatgaaaatgaaaaagctagttaccagaagtatatgcattacaatcttattttagaaagaaatacaaaaaaccccaccaaacacatacatacctacatacacaggaacaggaacagaaacta

SEQ ID NO: 74950 - DNA, 1058 bp, Homo sapiens
attgaattaaaaatgtaaagattatatatggatataagaaatgagagatgtaaaggaaatgctacacagttgatggcagctgagggtgcataggaggacagagaaaatgagccatcgtcgggtgggggcggcgctcagaaacaacagcaacaaaaaggacatgcagactaaaagaaggggcacaacgaccaggaaaatactccaaaacacaaaaaaggatgagaattcgcttatatgacatatctagaacaggcaaactcataggggaagaaagtagaataaagattaccaaggatttccagcgggaaaaatgggaagttactgtttaatgggtacagggtttcggtttaggatgatgaaaaagttctagagacaggggtggtggttgcacaacaatgtgaatgtacttaatgccactgaaatgtatgtttaaaaatggcaaaatgataacttttatgtcatgtatattttaccacaaaaaagggattagaacacatactaatgaaacatgacatactaatgagacaaaaaacagatgaaaagaaaataaaagcaaaagtagacatagagaaggaaaaacaagaaaaacaagatagggaagaatcatgatacaaagggtggagagaatgaaaagctgtggtttccatgacggctaagacgaaacagtagctggagtaccatattccaattattgatcattcagcagatatgtatgaagcacttacactctgctgggcagttgagatacagaagtgaattgtatggatactgtctctaaccagtagtatctgtgtggagacaggttacaaagaccaatgggatagtggtcttgcccccaaggagttcatggtcagtgtttgtattagtctgttctcacactgctgtgtaaggacacacccaagactgggtaatttataaagaaaaagaggtttaatggactaacagttccacatggatgaggaggcctcacaatcatggtggaaggcgagggaggagcaaaggcatgacttacatgacagaaggcaaaagaacatgcacagtggaactgctctttataa

SEQ ID NO: 74951 - DNA, 1026 bp, Homo sapiens
gaaaattccaaaaggaatgatttaatgacttgtttaaatctatatacttactcccttacctaataggctgagagcaaccttcaagttcttcttgttagaaaataatgctctttctcttacaatgattccaaaaaattttgttgacatgaaacactcttaatcttcatccttgtgaccccaaacactgattagcccatggggctagcattacaccacatgaacgttcctactcttgtctacatatgccagctcagcttagatatctttattcctgatacccagatttctttctgctcactacacttgatgccttcatctctttattgataccattccctctgtttagagttcccttccttcatatctctgtaggtgagcctatcccttaagagctggttaacatgatgctgtctttgagatcctctccttttataccagacagaatcatttgctttatcccgttgcccttggaacatacctctattatagcacatatcacattatctcattatcatttctttgtgtgcctgcctaactctagactctgctctctggatcaaggactctgttttatccatctttgtcttcccagtacccagtacagtgtataatacacaacaggtacacaatcagtattgaccacatgattgagtgaaatcaattcctaaatactttgaacaaagggtggtgttgaagaatgaaagttatagatcattcttggttacactagacttctcttttgttttctcaggttattacaaactgagaaagcatgttttcaaaaaactttccactatgtagatgtaaacaaagctttggggaaaaaaactacattctaaaactctagttagaatacgtaaaattagttatttcatatcagtctggaaggaactgaagtagataagctctagggtcagcatatgcctcgttcagctttctttaaaagcatggggagtaataaatctctccattttatcttcagtgaaataatactgctgaaatatcacctcatttttgatgtcagtg

SEQ ID NO: 74952 - DNA, 1050 bp, Homo sapiens
ggcctcccaaagtgctgggattactgtgcctggcagttctttttttctgaataaagttaacaaaaggtattttcctggttctttagtttctaagacacataatctatgagggaccttgctaggtgccaggaagctgaccaaggtaaatcaaatgtaaatctgtcctcaaagagtttacagactgtaagttgggggaagacatctataattatttctaatattgccataagagggagatgattcagtatctgatcaagaaagggggttttgatcctggttatgtgacagagtcacttgcgaagctttgttaacatgtgaattcccagactctatcccccagagttctaatttgataggattgggttacagtccagcatttgtttgcattttaaagcttcagaggtgatactaactacctgagaatatctggcaaatgggtttgcagttacaccagtggttctcaaccatggctacacattggaataaaccagcaagtcttgaaaagtccccctgtcccggctgtacctgagacctgttaaatctggatctcaggtggtggggcactggcatcaatattcatagacatttttaaagttttccaggctgggcattgtggctcacacctgtaaccccagtgctttgggagcctcagggaggaggattgcttgagcccaggagttcaagaccagcttgggcaacatagggagactcccatctctacaaaaaatgaaaaaattagctgggcatattggttcatgtctttggccccagctacttggaggctgaggtttgaggattgcttgaacctaggagatggatgctgcagtgagccgtgattccgccactgcacgccagcctggatgacagagcaagatcttgtctcaaaaaaaaaaaaaaaaaaaaaaaaaagaaaaaaaaaatccaagtctttcagggctggttggagggaatgaaaatgtgtgcaaagtgcctaggtataatgcctgatgtgtattatatgctcaacaaatactgtttgattaattaacaagcatgttccataagaaaggt

SEQ ID NO: 74953 - DNA, 1141 bp, Homo sapiens
ctgtagatgggaaataatgctgtattgtattggctaataaaggggactgtgaaaagcttttttttttttttttttttttttttttttttttttttttaagaggaagaaaaacgccaaaagcaggtcacagaaaatgatctcaattactagagtggcaccatgaggcactcgggtccatggagcttgtcaaaagaattaatgagttgatcacaggaatgaaaattaagtgatgttttgggataggacaatcattggaagtttggtaaataagacgaggccctgttctttggagggagaggtggctggtagctaaatcaagggagctgatgtgtgttttcaaaaaagcaaagccacagtccatcctctgatttgatgtctgtcttccctggttggatctccttctccagcattctacatttttaattagagaagaaatagctttgtgggctgtaacttggttctttcatgggtacatatgtatgaaaagtccccctcagaggttattctttctggtcatttgccattcagtctgacttctgaagaaaaagaagagactccaggagactccacaggatgtagctaactacatgggcttttgaatctcttggctgaggatgagacagtcaacgtttctctcttagctgaaattgcccaaaggcaatggagacagcagcagcacctgcctcacaggactgtcctaaagcttaagtgaaattgtgcaggtgatgagctttgcacacgccccatgtgtagtaagtgatcagtaaacgccagccatctttattaggaactgccaactccagcgaatcattctggctaacgcatgtttcctggtgttctgtggcccttccagaatatctcagacatacccacgatgtcacgatcataaacattttaataaatgccaacaaaatttgaaatgcagattcagagtttcttatcaaataacagcaacaggttcatgagatcttccaccctattgaacactcatagctcaggtgggttatcttttcccagggtgaattatttcctttgaatcaggtcctgttcagaaatgataggcagtttccaactcgatctcaacatcttcagcgcttcccagtggactgaatgcaggggctatcttcttggttagtctctg

SEQ ID NO: 74954 - DNA, 1039 bp, Homo sapiens
agcaagatgctgtgctggctttttgccttttcttccagtgtttacacaaccaagacttattacatggtctgtcattttgttactgggctggctttggtttgagaattaggtaaacatcagacattccatcacacaattttagactcaatcttactttataatgatgttaatgtttattgtacaaagcgagatgcatttgtatattttagcattttatttcagtcacagaatgcaaaacctgacactggaatcagtttgatttttttgtgtgtgtgattgaagatattaagcactacaagaacgctgaaatttcaatctgattaggatcaaacttcttcaggatcaaaacactctttttcctccccctacagttttactaattgtgtgctacttgacattgtggagttattccacagcatgatagctaaatatgtgaagtgtattttactatgcagaattatcagctcattctatttgtttttcatgtgtttaaggttattaaaagaactcaaaattagaagtcatgtgtatgagttaaaagaatgaacccaatcattgttagtaggctgaatcataaagcaatagccggtatgtcaatatcaagtaatgaaaaaaatcagaatttgaaagcataccttctctgtttattagttggcaagataccagaaaaattaggagaatagcacaatagtgaatggtggagtggtttattttcagcactctcaaattattctgggtacggaaaatgagataaaagtaaatcggaaagaaaggcatcaaacatatttgttggagacctttgcttaatggggagaaatgaactgccctcgctcactgttcctgaggaattgtgtttcttcaagctgtaaatcaaatcccagagagatagcatgatgcatgatgttttccaaataataactgaggaagacaaagttcttttttttttgtcagcctcaggtttctgaatttagaccttaattaagattccaaaatgagaaggcatctccctctgcacacatggtctatgacagtgtcctca

SEQ ID NO: 74955 - DNA, 1083 bp, Homo sapiens
tcataagaagaaggaagcagtctaattcagtttgaagaggagatgaagaacacatatcaaaagcggtcttttagcaaagtgtctcacaaaaggacattttagtggtttgcatatgcattaaaaagctgcaagacatggtgcattcaggtaagtatagaataaataggaaatggtgagatcatcggagattccacccttcacattcacacagccgaacaaagagcttcattatcgtcatggcgataggaggacgcatctgtggcgccattcaccccctcctggaggtaccttcgtcagtggccgcggagaacggagagcaggtgccttctgctacagactcaaaaattatttttgaattcactagagtgtgtatctgtgtgtgtaagtgaggggggtgtgctagaatcacactttctacttaataccacagttgggtgcttagctgtagccaccggttccctttctacattcacaaaactggcagatgaaacatgaaaaagaatactgactctttaatctctgcttctccacctaaggcccaaggcaggctgacagggaacttcattctggaaacaggactttctttcttcctttttctttctttccttttttttctttttaattctggattactttttctttggcttttgaaaactgggctataggggaatgaacctgacatagacttaaaacaagaacaagtttccttatctaaaaagttacagtccttgaggcttacaggaaggtcattttcaaaacccacaggagaaacacaattatagccagaaactgcattaagtgctttatttactcgcaaaagagacagtttttcatttagaactgctcataggatcaaccgaggctttgatgctgtgcagacttttctatagattttgcaattagtgagctagatgtcttaaatagcaggcatccagaaattggtttttaggtttttttttttttttttgtaaatctatatgctgagcaatatttggtagaattgaaggatatttgatacttactgtgagttatgagcttaaggacagaagacctgtagatgttttgtgaatgagtatgcatcat

SEQ ID NO: 74956 - DNA, 1114 bp, Homo sapiens
gcttggaggtagacctctttgagattctggatatttgaatggttccaaagatgctttacccctcgtctttgatcgtttctcctccgtgtgagcaatctcaacccgcgtccttatatgtctgttccttttgatcttgtctaacagaatttatagtcctccgatgaactaaatttacactggtcagtcgggggagattctggtgagacttcgctgaatgttggaacaaaataaattccccagtggagtcagagagaaacactggcctaagggaggcacagaattgacttggctggagccaaacagagtgacagctccacacagactctgaaatatggccccaaatgaaggagcaagtaaaaacaatcagtaatgtgaaacggtgccattaaatacccactgaaagagagctttaaaatgcagatgttaaaaatgatacttgaaccaaaatctcgccaagttgaaattgatttgatttgtatctgggtactcctgagctagtaaaaggggaaagcacagtaaatcatcccctgaaataaagtgctgtggatgggaatggtttaaaagggtgccggaaatgtggaaaacctgctgttattacttggctgcggatcgcagcaactcggcgccccgcgaaagctcaccggctggctggccactagagggcagtgtgcactcatctacgtcgcccacttttggcatgtccttgcctccgtctgctgaaatgaaaaacctctaactgctgtaataaatttggctaaattagctgctaaatggttatctcaagtaatatgtatttgcattaatcatcttgctctaaaccagaacaagccagagtcctaaagacgtagtaaattcatattgtccatttaattacggctaataagtgcttcatatacaacagtttcatgaagtacatttagattttttttttttttttttttggaggggggtggatgggtgtgaagggaagtcactttggaaaagggctgtgtttaaggctgtggaagctcttctcatcttgtcctgagccactcttcctggctctgaaagtgccacatccatctattacatccataaacatataaacttggaaggttttcttccattctccttt

SEQ ID NO: 74957 - DNA, 1034 bp, Homo sapiens
ataaaactctatgtacaaggattccttgatatcagaactcatcttgaacacatcacaaacacgggggagactttgcacggaaatcaggccttggagaaagccacactcaatacacatacttttacctttagagagaattaatgtagagcagaagaggtcaaaaaaaaggaaatagaaagtagataaatgaagactcttttaagtggtgcacattaaggccctctctagagcaataatcattagtgtctgattgatatgctgttggtagcaagcacattcatgccttcaagtcatcaccaaagtatgtgaacacactctgaagggccagtgtgctgatgagccatggttgttagcttcccagctccacttggctgtctcaaagaaaaatgggattcaggtactccctgtctaaattatcagccaaagggcaccaacttccattcccaagacctattggaaattttcctactcagaccacgtgtgggctctgcttggtggctttaggccaggagaagccaaagaccagaatgatgggggtgggagggagccaggccaagtgcaggattggtggagaacttcccagaaagcctgcccccaaactcaagatggcccaatctgtgggtcttggttacttttctgctagtttgaatccaaaggcagaatgtagactgggaaggggagagaaatggtgtctcacaccagaatttaggaagcagttgagcttgggctcacttgcagatagactgttaaggacacattttaagagcagtaaagcttgccaaagatcacaaagcagtgggccaaaaaaaaaaaaaaattgccttcattttttacaccgctattgtttgattccggcaaagcaactcactttgtttaccgaaactttaatgcccaggaagtcaaaccctatgtaatatgctaagggcatcaaagggaagaaatataagaggaatataatgttccctgccacttttctcccgctctgttttacttcatttccacaagaactggagtgtgtgagtgtgtgtgtgctg

SEQ ID NO: 74958 - DNA, 1040 bp, Homo sapiens
tatatatatatatatgtatatatatacacacacacagatgtatttatccagcactacatatctatatgtattgtgtgtatatatacctatatagtacatacaggtatgtagtggtgtacaattatatatatgtgtgtctggagagaggcagacactcagtaataacttgatgtgacatatgtctctctgaaatgtgaccagttgctttgcctctgatgatggccctctggctgttgcccaccccctgcgcgtggtgggcaagcttcactgaagaacatggaaaagaaggaataatacctgtaatacctgaggtgtctttagagtctgactcagagtcggatgtctccgaggattcggaagttttctccggcagatgggggagctgtgcgatgtccatgggtgtgtccttgtactcaggattgctgtggaagggaggcactggtcaggagtgcagacacccattctgcatggtttgtttggaccatcttctcccccacttctttgtcccagacttctggagtttagaaagtttcaaagactaaacatgaaatcatttctcagctcttcatgggattttatggaagcttggcttgcatgtgccaaggcacaggtgcaccctgctgcaatgatcgaatacccaaatccctgaaagccatggagagaagcttttaaataatcaggtaccactgggggtcaggaaactgtgctgcttgacagtacacctgggggaagggaggatgagaagtactctcaacaattcattcccatgtctcctggtgtgtcgtgtcttctcttgggctcctaatgagtccatggcctcagtacctttgttttgggcccttgatgtagcttctcagccgctcagatggctcccacgctattggtggggcagcagagcctttggtgcctatctgacagatgcacaggtgcaccttgggatgcatggattatggctaccaaactgtcaacacacccattacaatcacattttcatctgctcgtgtggtgtacacctgtggcttgttagctggaaatctgat

SEQ ID NO: 74959 - DNA, 1050 bp, Homo sapiens
tcgaaattgatgggttctgagatctccgtcttgatcttgagcaccgaggcactgttgggggaggacagcagccgcgggggctccaccaggcccgcgtccaggccgcctgggctcgacgcgctggacaggcgccggcggctggcgctgccgcccttttgccgtttccgccttttcttgcgcttctggtgcttgctggaggcctgcgcgcccgcctcgcctgcgctgtccgagtccttggcgctgtcggacgtgagtgactcgcagttctgcagccgcaggtccgactcgctctccacgtagcgctccaccttgatctgcatcgcgcccagagcaccgaagccgtcctcgcccgccttggggttctcaaagtccgagtgctcgaagctgtcgtcgctgtcgcggctgtccgggttactggagctgtggccgtcgtcgttgcagttcatgtcgttgtcacacgcgttgcccgacttcttccggtcgggctccgggtcttcgctgttctcggactggttccccttctcgtcggacttggagttctcgttgtcctctgtgtggggcggggggccggcggtggcgggggcggagagagaagagagagaagacaccaggttagcggggcgacccagcctgtcacctgcaggggctggggcggggagcagggcaagtgtccgtcctcatcacgggcttctccatcaccttcagaggacttaagacctgggctttctctctgctgagggcctgggttagctggatggttactcaaagtgcgggccagcagcattggcaatcatctggacacccgctgcaaatgcagactctctgctcccacccaggtagactgaatcagattctgcgttggaatatgacccccaggtgattctcaggcacattcaagtttaagaagtcccacaaagatactcaggaagtcaggttaaataacctggattaaggtgtgacacagaaaaatgatggcatgcaaggtgactttctaaagagtctgcattttcccttggtgaatatttgttcattactgagagccactctcct

SEQ ID NO: 74960 - DNA, 1069 bp, Homo sapiens
ggtaagatttcagctcaacaccttctaaaaattaggacaattcgacagtgtgctagaaagaccctcagcgctagaattattaaggacatgcgatttctacaccagagagttcctcttagttgctaagattctctggatcactattgtgattatatagctcaatgctcatacgtgaggatacactattaagtggtgctttcttgtgaatctatttgcttagctatccataggacacaatgtcatagttaactgagtcagttaccaactgtttgggttgtttcctcctcctcctctgtttgctttacctaatctgttgctgtatacagagtagatcgtattatggacacacccacccacctccaacatttatggatggccaactctgtgtcagccatatggactactcaagaaaggaagaatgaatgaacttgctgctttatccattttgacaatcttttcttgatacaagctcaagctatcctgtcaaaccacatggacatttccagtggaatctctgcctcttgacaagtcatgtttcatttgttcacatcttcatccatcagtattcagcagatctttaccaagccaacactactgtaaatcattgagctaggcactatggaaggatatgaagatgaataagcaatgatttatgcctgtggggaacttaccaaatcagccctctttcttcataatggtttcctaggagacacagaaagcagaaggcagccaacggtactcatttaccttagtgtcccagagagtttaagcctgctagttgacatacatctttgggaattatgctcaagaattaggtttgcctttttttcccactacatgatatggaatgttggcaaagatattcttccttctctcccaaatctttgaccctttctactttttgaacctggataataatcttggcttgaacagactgtcttctgggcttgagatatattatcgcctctcttaaatataatacatagggcaagttgattttcaaattactttaaacgttctcaatgttaaatagactttgtctaggagtaggagaaggacgggtaagaat

SEQ ID NO: 74961 - DNA, 1034 bp, Homo sapiens
ttacatcctgtttctgacacttccgctataaatctgagaactccttcagtgcaaggaagtgccacctccttactctctgctcctttttcttttttaaagtagttttaatagtatgcataaattatttttaaaggctgaaattaattttattttcccagaaaaattctttttaacatagacacattatctgggtcattccttgtggtatatcccgtgatttccaaacaggcagaggtggacagaagaatgaagacaactgtgcatgggacagtagctgggaatttagggattatgagttttaattccagatggaacatatactcagtgaatacatttggcctaggctctttgattttggtccataaaagggaataagggaggcccacttattttcagaaaattgaagaattttatcttgaaattctttcttgacttttgagtgggttttacacgtctgtatcaggagtcttggcacctctcacaccagttctgctcccataaaatggctgatatggtagttgctatctctaattctttccatttccttcatatggttggttttctctgccttagtttacttataagagggtagtccaccagtaatgtttgttatggatttattatatttattatgtgcctgtaccccagggttccacaaatattggagccaggtctctcctttccagcagagttgtgtgaagtagtctcagagggtatgtaaaatgcaatgaaaatgagaaatgtgttttcaggggttcaggttcttgctcccctttcatgcccatgagctgctttctctaagttgcttttcacccaagcccatgccagcattatgtgagggctatgtacacagaggaagatgggagacctactttcacaaaaattggtgaaaagactgaggctggttgactggaggcttaagatgagatagtaatttgacctggctgctaagatgtgactgcaattgcaggcagttttacctaggagctcagagtcttgaggaagagataggatggaacttctgtgccacgcaa

SEQ ID NO: 74962 - DNA, 1124 bp, Homo sapiens
gatgattaatactaaattctcaagctgcttcttgccatggttttttcccttgttaccaaccttcttgaagtaatggaatattacagtcagtcttcatgttctcatgagccgctttttccatcgtcttttggcttcaaccattacccacttatacaaactactttctcaaagatctataatgacctctggttgtcaaatttaagtgcctatgttttctgggtgtctgcagtggttgacattgaacacacacttctttcttgataccatttctctcctgatcagcctgacatagctgatgtgcctactttcattcattcttctctaaactcttggtcttcccatgccatctgggaacagcccaggcctcctcatcttacatggtgcatgcacagatcacatctctgcagccttccccgtgcattgcatttccactcacctcctcctctgaactcccccgtgtgtacatttttaatgctatttatcacattttactttatactaatcgtcatagctgggtccttcttcccccgtgactgtaagttccttgatacgggcagatatggtgactgatacagttttgaaatccccatgccgcctggcacaccacagagcctcaattagtttacccactttcaaacatgggtttttgagaaggaaaggcaagagtggtgtgagacgaggctggagaggtagcacagggccagataaagatgacaagtttaggagtctttgaggattctggattttacccaaagaactatattagcgcaggattttaaatgtgggatatgacatgggtaaaaccaacatttagaaatatttctctgctggaatggagaggggcaggcaaaagatggtggtagcttagattgatggtgggggacagtgggaagaaaaaaaggaaaagatctgaagaaaaatctagtagacagagtggacaggaatcacaattgatttgatgtgaggaataaaataaatgaaaatattaagagcgtttgccaaatttgacttaaatacctggctgcatggggatgcaaatttcacagtgagagactgctgaagagctgggttcactgtgtgtgcagcaggaggaggtgcaggaagtgaggaggtaatttagtttg

SEQ ID NO: 74963 - DNA, 1624 bp, Homo sapiens
tctgatatgtgagtgaggctacacttcatacaacttatgctcagcattagcccaagaggtgccaatgctggatgtaaacccaaagttcctccacagtctgtgaggcatatgggaaagatcccattgcaaagtcaagagagaatcctttggcagagctctattaggaggcttatataagatgggaagtgtttactggaggctttttggtgacatttgtgacataaaactcatcagagctgactccataccctctttattctcctttctgtccccaacccagggaaaactgaatctgccctcactgaagactgaccgtgctctgaaatctgctggccttgttcattttagtaacggttcctgaattctcttaaattctttgagatccaaagatggcctcttcagtgacaacaatctccctgctacttcttgcatccttcacatccctgtcttgtgtgtggtacttcatgttttcttgccaagactgtgttgatcttcagatactctctttgccagatgaagttacttgctaactccagaaattcctgcagacatcctactcggccagcggtttacctgatagattcggtaatactatcaagagaagagcctaggagcacagcgagggaatgaaccttacttgcactttatgtatacttcctgatttgaaaggaggaggtttgaaaagaaaaaaatggaggtggtagatgccacagagaggcatcacggaagccttaacagcaggaaacagagaaatttgtgtcatctgaacaatttccagatgttcttaatccagggctgttggggtttctggagaattatcacaacctaatgacattaatacctctagaaagggctgctgtcatagtgaacaatttataagtgtcccatggggcagacactccttttttcccagtcctgcaacctggattttctgcctcagccccattttgctgaaaataatgactttctgaataaagatggcaacacaattttttctccattttcagttcttacctgggaacctaattccccagaagctaaaaaactagacattagttgttttggttgctttgttggaatggaatttaaatttaaatgaaaggaaaaatatatccctggtagttttgtgttaaccactgataactgtggaaagagctaggtctactgatatacaataaacatgtgtgcatcttgaacaatttgagaggggaggtggagttggaaatgtgggtgttcctgttttttttttttttttttttttagttttcctttttaatgagctcaccctttaacacaaaaaaagcaaggtgatgtattttaaaaaaggaagtggaaataaaaaaatctcaaagctatttgagttctcgtctgtccctagcagtctttcttcagctcacttggctctctagatccactgtggttggcagtatgaccagaatcatggaatttgctagaactgtggaagcttctactcctgcagtaagcacagatcgcactgcctcaataacttggtattgagcacgtattttgcaaaagctacttttcctagttttcagtattactttcatgttttaaaaatccctttaatttcttgcttgaaaatcccatgaacattaaagagcca

SEQ ID NO: 74964 - DNA, 2035 bp, Homo sapiens
atttcccacacagtcctctccctcggggtggtatgtctcattgatggctgcttgccatggcttactatggtttgtgaatgccaaaggctttgtggcttatttttgtattatagaacttatagatagatggagatatgaagcctggttccatgcttacagacattcatctggactctgtatgctttccgaaagttaagaatgatttaggagtctgggaagtcagataacttttcaagcttatttggcttttgaaccttctgcatctcaatttcctgttcattaggcaaatactggctgtcataaagcaataatatttatccagagtcagaaaaacgaaacttgggaaaccattgaatcagtgaaaaggcctatctcttctccctgtttggtaacatgactggaatacatccattaagtctcctttaaaatcttgagaggtgctgatagagacaagagaataaagttatcagactggtaataataaattgcaaggtctggaatcatttaacaaatatttgagttcctgctagtgtcaggcgttgtattatgaagaaacattgatgtgtgaggcctgaactttactctgaatatggttattctagtaggatgaaataggttgacatgtaaaaaaaataattcaaggaagagagtggtgtatgtcataaaaggtgcagattaggtggtctgagagttcagtaaaaagagcatgtaacttccaactaatgaggtcagataggagctaagggagttcagaagagctgtaaattctaattgaaggggaagttacatgtgatgattttcttagaaagttgttaatggttagatggaaccatgtgagatcactgggcatttttttttaagtcaaaaacactcaaatattggcaaatcggtatgattcaatctaatagtactctattttacgtccatgggctttatgactgtggggggtgggagtgctttttttggtttaaggtgaataaggagatatctctagctaagtttgatataaaatttggtacgaagtggctgggcgtggtggctcatgcctataatcccagcacttcaggaggccctagtgggcggatcacctgaggtcgggagttcgagaccagcctgaccaacatggggaaaccccgtctctactaaaaatacaaaattaactgggcatggtggtgcatgcctctaatcccagctactcgggaggctgaggcaagagaatcacttgaaccagggaggtggaagtggcagtgaaacgagatcgtgccattgcactccagcctgggcaacaagagtgaaactccatctcaaattggtacaaactatgaggttgaagtaaaaatctggggtaccatgcatttggagtggtggttagcagatggcatgtttctaaatggagctgaaatatggttgttgataaactacatgagaggtaagaaataatcccccttctttgtgtctttcagctacatggtgggatcctgcggatatttccagaggggaaatcattcatagcagatgtggagcccatttttgacagactcctgttcttctggtcagatcgtaggaacccacacgaagtgcagccctcttacgcaaccaggtaatagccggagccatgattcctcttccggagcttggtgtacaaaccctagttccagagaactctttaaacgtgtgtcctgtgcatgtgggggattgaccacaccccatagctgatagcaaacttgtttggagtctacaaaaattaaaggggaaactttgcgttctttagcatatcaaacctaacctcagtttgaaagtactattaacaagttgttttctattagatgagcatattggattccaatttctcaaaagtatttttctcttctctcctttcctcccttctcttatctctctttccctttttttaaaaaacctaatgttgaactatgcctagagaatgttggctgtcacatatcaggaattctgtctggttactttggatgagtttacaagctgctaattgcaagcagagaaagagccttgagaagag

SEQ ID NO: 74965 - DNA, 1073 bp, Homo sapiens
ccataaatcacttgccgttggttcttgttcttcctgtaatccattttatgtacttttgctagagtgtagtagtcccaattccaattctaatcatgtagtctctgtgcttaaaacaaaataatccaaaaatccaaccatgctccttcttcattatctactatacaacactgtaaagactgtaaacttagccagctttgacagccctctacatctgaccacatctgacctttctacacttaatttcccaccactgccttcctttcctcccagtccctgaaatgctagaaactaatttgccaggcataatgagcttccccattgtcttccactcatcaaaaatccatctctaccgccttctagtgcctgttccctgaagtcttcccttctgctccccagaactctgtcgtggctcaatccaggctgcccagtacatggatttattgggctgtttatgctgtccaccgtgtgcttagaaattccttgaatgcagagactgttaagctttgtatatacttttagtgcctagaacagtcccttatacttcataggtgcttgttggcttaatttcatcttcaaaaggaactttgattttgatggatatttgaatgttaaaaaaaaagctagaattttttttgggggggatagaggggaatgacgggggaagatgggtggctgcagcttagtctctaattcgatgcctaagtatttaaatattttattagagtgacatgttatgtgagaccatctcaatggaggaccttagctttgtaagttttttttttttctcagtttcgaaatcctaggtttcaccctagaaatacccgagtcacacctggatcctggcagctcatacctacaggtctggctcagagacgccagggccacgaggcttagggccccaggttctggtcctagctcagcccctggcaagtttcatggtcctccatttccacttctttatggatgagttagatacttgttttcatttttgaacttaaatttggtcagcacctaccacttgacactaggatggacacttcagattttatttcatcttcctatgatcttgggca

SEQ ID NO: 74966 - DNA, 1047 bp, Homo sapiens
tgtttcttgtaaatttaggtgttaggagtttttcttcatcattctaggagcagaatttgctctgagggaggtcaggattaattggtatggaaagaggccactaacattgaaagttaaatatttttatttagctttgacttaatggatagggatagggtttcagactagaatttaactcaaatggaaggaaaaacactgtgtaagttagggtaagggaaagaaagatcctgtagatatgattcatcaattttaggttatcttttgggtggaatgaaaaactttccaggtgaccctgtcagaaggtgatcgtgaattgaaaataaaatttatcctgtcccacccccagatttccaggtttactttggctggtttgtcacaaagctccctgccctttagataaatcacctttcgattggaatattccctggccaattagaaccaaatgcaaaccaggcttgagcaaacaactagtgtagttaaattttttttaagtgtgctttgcttgtatacagaagtctccttagtgatgtcttgtggtcttgggtttcttgtttgaagttcattattaaagtcatggtagaaacactttccatttctacatgatttttattggtttcacattaatttatccttctttttcttcactcactttttatccctcagctgagctcctcattttgtgctgctttccagagcagtgatagagacccagtttaccggttcatccttcacccgtgttttcaagaaaaactaaagttttaaatttatttattattattatttttttgagatggagtcttgctctgtcgccaggctgtagcggctcactgcaatctctgcctcctgggttcaagtgattctcctgcctcagcctgctgcatagctgggaccacaggcacgccaccctgcccagctaatttttgtatttttagtagagacggggtttcaccatgttggccgggctggtctcgatctcttgacctcatgatccacccgcctcggcctcccaaagttctgggattacaggcttgagccactgtgcccggc

SEQ ID NO: 74967 - DNA, 1053 bp, Homo sapiens
gcgggcgagatgcccctgggacacatcatgaggctggacctggagaaaattgccctggagtacatcgtgccctgtctgcacgaggtgggcttctgctacctggacaacttcctgggcgaggtggtgggcgactgcgtcctggagcgcgtcaagcagctgcactgcaccggggccctgcgggacggccagctggcggggccgcgcgccggcgtctccaagcgacacctgcggggcgaccagatcacgtggatcgggggcaacgaggagggctgcgaggccatcagcttcctcctgtccctcatcgacaggctggtcctctactgcgggagccggctgggcaaatactacgtcaaggagaggtctaaggtaggacgcgctcggcgccctgccgcagctgctcccgcggggacgggaggcactcggagtccgttgtatgtcgacttcccagggccgtaagcgaactttgttttttaaccaagaagtcagcctggtttgtctctactcgctgcttccccccacccctcgccccagctcctctgagcgaaagtcaacgttaaggggctcaggtgaaccatgatgatgaccttctgttgactttgaaatattggctcttgtgggtgacaaaagccagacaagctgtggctgtggtccgattttaagacgaggttctcaaagatccaaaggagggaaagggtattggaaacactgtgtatcatctgagacacacgtgtcctcatgatcttaaatgcctactttaaagccacctaatactgcccttcattgtggtcagaagagatttctacaaaagcactcagaattctggaggcagttgtgattttgccatgtggcagttggtttgtggagttgggcaggtgtgaaagggtaaaactccacttctgaatgctgcttctgccccctgggacccagcacattgttagaccatcttcttgactgaaaattctctcctgatgctgagccctgcaccaccaccttccttttcctaactatgaattgatggcaaagtccactcaaaacaaccagttaagtgctcac

SEQ ID NO: 74968 - DNA, 1050 bp, Homo sapiens
tcgtaacttttctatctagaacctagctctcagtttatcagttctagtgctaacgtggcctgttttagcggtgtctcccattctgtgttctctggaaagacaagttaaaggggagagtttgtattaacaggtgtcacgtcttctcactctcgccatatccctgtaccttctggtagatgtaaacggacacaactgtgcttataaaaccaataactcgccagtcttcctcaggtccattcaagaccatttgagtgggtccttgggtgccatggacagaaatcttgtggggacatggatgaggggggcctccagcccctgaggactgtcaagaccagggccttggggaagggcagccgagcttcacattgtccccacttagccacttgtcagggttgctgtgaggctccagatgaaaatacatggagtttccttaactaccgtggcccacagaaatgacacatgagattcttttccttggtcgtaggatactgggggcggggtcagtgagaggcactgtccatctcagaaaaatctgtatcactcttgtttgctcatcttgaggaagccatggagagcacagtttctatggagtcagcagaaacaaaaatgagattaattcacacgtaaattctgcctttagatacagagacctaggttataggatcttgactgtatacacagttaagccatttgtagagttttccctatttgggggtagtttttgttctgattttttttttcagaggggatgtttgccaaattctttctagattataaaattaatacaaactctcataaaagtgaatacactaaaatataaagaagaaaaaaaaaatcccgtaatacaacattcatacaccaataaaatgttagcatttgaggtatatttctttcgaagtatttcattttgttttattttattttatttttgagacagggtcttgctttgttgcccaggctggaatgcagtggtgtgattacagctcactgtagccttgacctcctgggctcaagtcatcctctcacctcagcctccagagtagctgggac

SEQ ID NO: 74969 - DNA, 1157 bp, Homo sapiens
tttccattttttcctattatgaactatgctaaaatagacatcactcatactcaggaccaccacactgcacagttccagaaagctccattcacttctacgaacgtgtcttctggagttgtacagcatacagcctgctctgctgtgcttggcagcccctgcctgtatctcctccatttattctattaacaagatttattcggtgcctactgaattccagtgctctgcttgtattaatgtatttagacctctgaaatgtcctaaaaagtaagtcgttttcaccatttttattttccaaaacaagaaggtgaggacagatgggggtactcacttggctaagatcacacggtctgtaaattgcagagccagcatcagaacctgcacagcctggttcccaagtctgggtgctgaaccgtcatactaagtcttcctcatgtttcactgtctacttagttaatatctcccactcatctgtaaccctgagagcagggaccacggggagccacttattttgcgtcactggtgcccaaatagtgcctgatctccatgacaggctcaataacgttctgtcagtcactttactcatgactgcaagctcctttcctaatcaacgtttcctctcccccttccccatgtatctctttcccttcataagcacccacctcgtctccctctccacgacattccaacccctgagcaaggctttgaaaaagtgacataggcacatcacagatgtgccgttggctctaatttgtgaaagaacattttaccgaggggcaaaggaggacttggaattttttcctgcccccaggaggcccagacttgcaaccctgtaggtctagaacttaagcggaggtcctgctatgttcacacatttagtagagaatgacttctaattccgtcattcagctgtcaggcacgtaggccgcttccttttataaagctggttgtcgtaactaaacaggtgcagatttgaggaaatgcagaccgactggaatgataagtcccactgcatgtgagattaggtggatagaggactcgagtcccacccgccctttactgtctttagtctccccagtccgccctgggcaccacccgccgaggctgggctctcgcagctacctctccatctatcttcatgacagctgcgggggccgggg

SEQ ID NO: 74970 - DNA, 1019 bp, Homo sapiens
ttgatttcacattggcaattgcgatagtactttgaggactggcccagaaagcattttcatcccctggcaaaactcttccccatcagcttcccaaccatgtgtacaaaggaaatgcaaatacatgtgaatagtagcctgagtcaaagtcttcttggaaggtaaggctgcttgcgactgctgctgctttgaaaaagaaaaatcctacaatgcaagtgaaaggacagattttctgagccactgcttctgcaccagggtgagggttcagaaggacgaaatacaggtaccatggttctctgaagagatggtcttgtgtggagcacacctggcatgaaaggatggggacagcttctaccctctccccagcagggcccgacaagcaggctgtgtggcattcctgtatttccagggctggcacagtggctgacacacagtagctgcctgtaaatgtttgttgaatgagtgaataaatgactaggaagggagctggagtgggtgtgacactgtctgggctggctggagctttcaccaggttgagggatgacagggaaaggggtaggtgggtgtgggagggtaatttcccagtgaggagagattctgtgtttcatctgggttgcctgtctgaggccttttctgtgggcaacgaaggccctaagacagagtgtgtggactctgccctaatgatagtcaaaccgcccaatggtcccattcattcacgtatttgtctactaattgacagctattgagtacctaatgggaaccgtggccttcatccctcatccctacgcaggcgaccccagactgtcttagccaccttcgtgagctggggatgggaatgccggaggaagtgagcacatggctaatactgggcaggggctttggctgtctggaaatgcagccagcagggagctggactgaggcaccggttgctggcaattgggccatttgtctctctggacaagtgcaagcaataagtgtgtatgtgctctgtgtgtgtgagactatgcaggtgtgagtgtggg

SEQ ID NO: 74971 - DNA, 1035 bp, Homo sapiens
accatgattttgattgtcattccccttcacctcagcaagaatctatcagataaagcaaaggattgccccattttctatatctcccatgcaagacattggttaacaccgctggatgtcttcctcacctcccttcccatagctattgcttagtcagtcattccgtggggtgaatgagcaacacctgtctgatggcatagataattagggcagtttggactgacagccctcaggcaatttctgcaaaaacagggactagcctcaattattcaaactgaaccaggaaccctaaggcttaccagcttgccaggaggccaagttggaggaactgtcaaactatgccctctgaatgatgtatgtcccacttagggagaccaacaacactttctttccaggggcactctgtgtgccctcaggtctttatttcctgtgtggaatccaggagttattttgtctcccctaaaaacaccttaggggtaatcataagatccctttaagtgtttaaggaagcatcactgacagatcatgtggccctcagatgaccacagagatctctccaaaatgagacttttcttaggtaatggagagatctctgcagtaagacaacagattcttaggctgggcgtggtggctcatgcctgtaatctcagcactttgggaggccgaggtgggcagatcacttgaggtcaggagtttgagaccagactggccaacatggtgaaaccccatctctactaaaaatacaaaaaccagctggccatggtggcgtgcgcctgtaatcccaactactcgggaggctgaggcaggagaattacttgaacctgggaggtgtaggttgcattgtgcggagatggttccactgaacttcagcctgggtgacagagtgagactcggtctcaaaaaaaaagaaaaaaaaagaatcaaacagattcgttatttatgtatactttgctggcagttatccctataacagtagtcatccaattagaaaagtgaagtggtaaaaatttcgctgaagttttcagtgacatgcctgga

SEQ ID NO: 74972 - DNA, 1273 bp, Homo sapiens
taggactttttttttttaagttgctgataatggtctttttatgggccaaaaaaaaaaaaaatctttatttctttcctagcttgctggaaacttagcttatgtttaggagattcctcttaaagaaagagaaaacaacatacagattctatatatggcttcacatctacttgcttttatgtccatggaacccataaaatatttatgttatgcccaggttatgaataacctctgattgttcattcagcccttgaacaaacatttatcttcagcacctgcacagtatcctgtcacattatttgctcaattctgggatggttcatgaagcaactgctttaccaagcaatgtactatggctggaagcaaaggctcagtaggggtgctctgtcaaacacttaaaagtcagtgtttagagacaagttataaacacaaaacagaacagcccattttttagtttttgaggttgtattctattcttgttctctattgcttgagtcatggaaccccctctagaatatagacctgattaatttgtatacagctactggcacttatgcaaacaacaagaagagttcggtaaatagaaagattactccattactttgtatattaccttccaatatatgtgtattgcataaaacggattaatttttacattttttctttgtgtacatgtgaaacagaagattgctttatggacgattgacaggtggtactgaaacgtcctcttcaaacaagtgggatcctaaaatgttaatgaaagaaaggacctcattttatgaagaaactcaggtccagagaggttgtgtcatcccaggattacactgtaaattaataacaaattagtagcaggatgaacttgggcaaacatagacagtcatgatgttaaatgctcaaaccctcaaagaacagttttaatgaggattacattgccttctcttgcagaataggttcgattctgaattctcacaaccctgaaagataggtgatgtgtgtccacattttattgataaggagactagtgttagagagcttttgacacaaacagggatggcagagttatgactcaaacctgggtctcctacagtgctgtactgtttctcctacccatttcttaaaactcacagtgtgtcaagggtactttaaattttgagaggcttgttacagaatgagatggattgagaaatctataccagatagcaaattatagccggtatactctgttatgtatatgtttagctttgtgagagcactttgaagtgtgacaataaaacca

SEQ ID NO: 74973 - DNA, 1319 bp, Homo sapiens
ggctgaggcaggagaatggcgtgaacccaggagacggagcttgcagtgagccgagatcgcgccactgcactccagcctgggcgacagagcgagactccatctcaaaaaaaaaaaaaaagttactttcaaaaagcagaaggaaagaggatacatttcttccttacactgttacatactaaaatgtttcttctgcctggtgcagtggcttgtgcctgtaatcccagctaccagggaggctgaggcaggaggatcacttgaggctaagagttcaaggctgcagtgagctgtgttcacaagttttaattattcttaaaacaactgtttaaaatttctttaaacttgctgttttgttcctgtgtcttgtctttggttggtatttcagtaagtttttggtattctcaaattttatctaaatggataaactattaacatagaacataaaccccaattctccatttcatttttctcttaggcatgaatcatacaaaactcaatatagagcaatgtttgtaatgaattgttctattaacaaagaggaggttctaagatataaagcctcagagaacaggaagaaaaggcgggtccataagaagatgaggtctaaccgggaagatgctgccgagaaggcagagacagatgtggaagaaatctatcacccagtcatgtgcactgaatgttccactgaagtggcagtctacgacaaggatgaagtctttcattttttcaatgttttagcaagccattcctaaacagcccaactggcatttaattacccaatactgtatataaggcaaatatggacagttactttcctcttgcctgttcatatccttcagtgacattgaggaagcagtgtttctctttttaaaggagaatagttgtcaaccttcattcatctcttacatctctcaccctctccttttttttttctttgattttcccccttattgatgggactgatattcattctgtttttgatgaacatttggaaactgtcgggctttttattaaagctctgtagaattaaaatgttctggaattataagcaatctttgtttctgagtgttatttttattttggatatagctttgatgtaattaaactggaaactctttcctgaattgtctgtattgtttttgctaagatgtatctttattcacccccaccccacatgatgaatgacagtatttagtaactgttacaattgcgtggaataggctggtagctttggctcctgcctgtaatcccagcactttgggaggtcaaggcgggtggatcaggagttcaggagtttaggagtttgagaccagcctgaccaa

SEQ ID NO: 74974 - DNA, 1005 bp, Homo sapiens
actccaccactgtgagggaagagcatctttatagattatttagaattctgtgtggggatttgtctgttctcctccatttatttatttattcagtacatttatattagcgtggattcgtgggtatttatactttgggttgtaatccagtcctactttattttgttgctcagtttcagctttggcagttggtgacttgttcagttggctcctgtttccctttgtcataaccacctcactgttttgtttttgttttcttgattacttccttcttttctggcactaaaagatgctccaggttcatcttgtgttccttattcctagaattagccatttctctgaatagtactggttctttttattggaaaatgacactagaaaccaagatctggttttaatatgtttttctccccactttcttcttctgttctagttaccatggtttgggaccacagagatcacgtcaacaacagcctgttccaaatagtgatgctgtcttgaattgtcctgcctgcatgaccacactttgccttgattgccaaaggtaatggatgaaggacacacacacacacacacacacacatacatattttgtttaaattagaaacagacttttttttttttgaagtcagagtcttactctgttgcccaggctggagtgcagtggcacaatctcgcctcactgcaacctccgccccgtgggttcaagcgagtctcctgcctcagcctcccaggtagctgggattacaagcggccaccaccatgcctggctagtttttgtgtgtatctagatctagatctagatctagatagatagatagatagatagatatagttttgttttgttttgttgagatgaagtctcactctgtcgtacaagctggagtatagtggtgcaatcttggctcgctgcaacctctgctgcccaggttcaagtgattcttctgcctcagcctccaagtggctgggattacaggtgcctgccaccacacccggctaatttttgta

SEQ ID NO: 74975 - DNA, 1152 bp, Homo sapiens
agggtaatctacagttgctgcagaactgcctggcagtgttaaatggagacacataagccacactccgccttcctgttaaaaagggctgccttccttcaaattttatttttgttttcttaatgatgttaagcatttatgctcactggaaacaaacaaaaagcagctgaaaaagtgcatcaactcctctttttctgagaaacatggagcagcgcacgcccaggcgatgccagtctgtgtgccgtgatgccgcactgtgttccccatgacagtggtccatcatcgtgcactcgtcatactcagaagtccaaagttcattcttctttaaagtagcctctataactctgtttattttataaatagtattccttatggctgccactcttatttacctttaaataatttctgaaatttaaccttttcagaatgcattgttgaaacaagataaagattgccttttttgaattttttaaattttgtttttaaaagcatataccaccttagttcattcatgtatcctggtaaagcatcttaatcagacttatttttaattactgaatatttcttagacgttttgggacagattttatgtaatctttataagtatgatttctgaagaaaagcaaatgcattagtatgtttgccttaaacttgtagactaaaccaagtattgtaaaataaacagcgataacagtgatagtttttaactctatggtcattgtatcactctggaaaatgtggagtagctgtaataaatctactcctgtattatgctttacagtgcaggtcttagtttttcttttttctcatttcttttgaaatggcatctcgaacaaagtccaccaatccctttacaaaagaatgaactgctcctctgtgtgtacttcatagaaggtggaatcggacagaggcaggttagtgacagttattcctgaaatacaggagcagagtacagtctgttgtggtttcccggattccgcgcctagctcagccaattaagcatgagacataggccattgagccacttagtagttatgcgagtggatagattggtatgtagagggaaagaggtctgctgtaaagaacaacacttgtttgtctgtggggaaagaaaagcagaatacttgagatgaaagttggcatacaaataggata

SEQ ID NO: 74976 - DNA, 1250 bp, Homo sapiens
gaatgcaatggcgtgatcttggctcaccgcaacctctgaattttttttttttttttaagacggattctcgctctgtcaccaggctggagtgcagtggcgcgatctcagctcactgcaacctccacctcgcagattcaagcaattctcctgcctcagtctcccgagtagctgagactacaggtgcacgccaccacgcctggctaatttttgtagttttagtagagatggggtttcaccacgttagccaggatggtctcgatctcttgacctcgtgatccacccgcctcggcctcccaaagttattctaatatttaaagatttttgtagagacggggcctcactatgttgcccaggcaggtctcaaactcctggcctcaaagtgatccccctatttcagcctgctaaagtggattacaagcgtgagccactgcactcagcctgttttttttttttttttaacgaatgaggcaatttattaacccagcatggtttgttctaatgcttcttgttggcaactgccacctgtccagcgattctgtccagatctctctgtccctgacgtgtcagtttgcggcccccatcttggtccttttccaccatttttagcccctccagggcttggaggacccggtgggccacattcttggagcctcggctaaagtggccaggcatgccgccacttctctgacatcccccatagatcttggtcatggagccaaccccagcgccaccccagaggtacaggtgccacgctgtggaagcagctcgcgtgtacaaccagttctcatcgtagggagcaagctctttgtgcttggccagcagcttgacggtgtccacccattcggggactttcagcttcccagactttctgaggaaggctgccagagctctgatgaactcctgctggttcacatcttttacagtaactccaggcatcatgcggcccggcctgtgcactgccagccaggggaaagggctcagtccgtttttttaagtaacagcttgatagtccatgtaccacataactcacaatttaaaatatgtaattcaatggtttttagcaagctcacagaactgaggatcaccataatcgattttagaacactttcatcacccaaaaagaaaccccatgcccattaacagccacttgccatttccccatgtgtgcccatatccctagacgactgctaatttgctgcctactacagatttgcctattctggacatgttttttttttttgttttttgtt

SEQ ID NO: 74977 - DNA, 1088 bp, Homo sapiens
tccccatctctactaaaagtacaaaaattagccaggcttggtggcacacgcctgtagtcccagctactcaggaggctgaggcaggagaatcacttgaaccgggaggtggaggttgtagtgagccgagttcacaccaccgcactccagcctaagcaacagagtgagactccatctcaaaacaaaaaacaaaaaaaaaaaacatgtccagaataggcaaatctgtagtaggcagcaaattagcagtcgtctagggatatgggcacacatggggaaatggcaagtggctgttaatgggcatggggtttctttttgggtgatgaaagtgttctaaaatcgattatggtgatcctcagttctgtgagcttgctaaaaaccattgaattacatattttaaattgtgagttatgtggtacatggactatcaagctgttacttaaaaaaacggactgagccctttcccctggctggcagtgcacaggccgggccgcatgatgcctggagttactgtaaaagatgtgaaccagcaggagttcatcagagctctggcagccttcctcagaaagtctgggaagctgaaagtccccgaatgggtggacaccgtcaagctgctggccaagcacaaagagcttgctccctacgatgagaactggttgtacacgcgagctgcttccacagcgtggcacctgtacctctggggtggcgctggggttggctccatgaccaagatctatgggggatgtcagagaagtggcggcatgcctggccactttagccgaggctccaagaatgtggcccaccgggtcctccaagccctggaggggctaaaaatggtggaaaaggaccaagatgggggccgcaaactgacacgtcagggacagagagatctggacagaatcgctggacaggtggcagttgccaacaagaagcattagaacaaaccatgctgggttaataaattgcctcattcgttaaaaaaaaaaaaaaaacaggctgagtgcagtggctcacgcttgtaatccactttagcaggctgaaatagggggatcactttgaggccaggagtttgagacctgcctgggcaacatagt

SEQ ID NO: 74978 - DNA, 1074 bp, Homo sapiens
aaaaaaaaagaaaagaaattagctgggtgtggtggtgtgcacctgtagtcccagctattgggacgctgaggcaggagaatcgcttgaacccgggaggcagaggttgcagtgaaccaagatcacgccactgcactccagcctaggtgacagagtgagactccatctcaaaaaaaaaaaaagagtacagcacgtgaacttggacctatatggggagcactaagccttcagttgcaaagtcatagaagatttcttacttgatagatagaaatgcatgtctattaaagtcttgttggtgaaattagtataataacatctgactgaggataggtatgctattttactgatgatcttttatatttataatgatagttatttacatataaaactaaagcaaataagtgaaaaaagtttatattttcttttgatcttataggatgtagatgatttctttgagcacgaacgaacatttcttttggagtatcataaccgagttaaggatgcatctgctaaatctgatagaatgacaagatcccacaaaagtaagatttttctgtggctaaagcttatatcttttaatggaataattataaagttcatattatagtttgaaaaagtcttaatatagagcagtagttctcaaactggtctgttggagcctaggctccatggcccttttatagtgagcctgtgaggtcaaaactattttcagctgggcacagtggctcacgcctgtgatcacgacacttttggaggctgaagcgggaatatcacttgagcccaggaattcaagaccagcctgagcaacagagtaagatcctgtttgtattgcaccagcctgatataaaaaataaaattagccagacgtggtgccgcatggctgtggtcccagctactaggaaagctaaggtgggaggatgccttgggcctgggaggttgaggctgcagtgagctgtgatggatcgtaccaccatacttcagtctgggtgacagagtgagactgtctagacagcaacaaaacaacaactatttttataatgatactgtgatagtttttgcctttttcaccatgttgac

SEQ ID NO: 74979 - DNA, 1144 bp, Homo sapiens
gcattttggattttaattttttttttttggagtatttgcattatacttactggttgagcatccctaatctgaaatctgaaatgttctgatgaatatttcctttgagcatcatgtctttatttaaaaaatttcagattttggagtactttggatttcagattttcgggtagggatactcaacccatatttcgtttttagtgtatttgctgaaaacacagaatctttccccttttgttaaacatttggagtaattttggatttgctggatatgtttctctattttgagagttgtacaaggaaataattttccttagttatcacctctgtcactttttctggtcatttctccccttcatgcatttcctcttctcttcttccactagttttagtttttagttatatattcacactgctactatacttctcttcaggatgctaaactcttgaaaagataaatcagcaaagcaggtcttagttgcaagcagcggtctgatagcagacagatatatattcaaagtttataagactgaaaattggaaatgagcagagcacattaatatcgaagaatctgtgattttccagtggccctgatcatgattcttttgtggtctggttaggggttggataacagagaaccttgggtttattctactgctacctccatcctctgcatccttcttttttgtcttcactgaatgactaccctcacagagatcaaacttctcccatcattggtcctgctggtttgctggtatgtaaaacttatccttcttgcacgtagttgaagcaagaatatcaagccttttccttgaatgtttttttttttttttcccccaaactgacatgtattactttgtggtctctgggattcactgctggtattaaaatattttaaacacatttctttggtgtaatggcaaaaaaaattagtttcttcatagtgtgtttcttgtgtgtttgggtaattagatgaaaataattattaacgttgaaaatatgctcaccgaggtttgggttttaattttttttgtactaagttgtttaaaagcagtcattggatattgaatcattaagattctatcaaataatttgtagcacacttcctgtagagctgagaacaagcagccctatagttaactttaac

SEQ ID NO: 74980 - DNA, 2805 bp, Homo sapiens
cccaaagtgctgggattacaggcgtgagccaccgcgcctggccaacaatttttttttaaacttaggcaagcttggtggtatatacctgtagtcctagctatttgagaggctgagagcttgagaacaatgagctatggcttgagagagccagggtgacagagtgaggtcctgtctctaaaaaaatttttaaaattgtatttcgggttttaaaatagcggaaactagcagagttacttaatgaagtatgaggagttgattatagcacaattaaactaattattctaaatataaagcatatgacctttagataactttatgtcctatttttggtgtctactagcacaagcaaacaggatttgctttcttggaggatcttaataatgttcagtaaaaatactaatttttgagtatgttgatgttgtgaaaagtattttttggtgaatatttgtgttcatggctttatgccttcagaaagatttgctcatgaaactggaagcccttaagtaatttgtccagaaactttctctttttttttttttgaaatggagtctcgctctgttgcccaggctggagtgcagtggcgtgatctcagctcgctgcaagctctgcctcctgggttcatgctatgccattctcctgccttagcctcctgagtagctgggactacaggagtgcgcgaccgtgcccggctaattttttgcatttttttttttttttagtagaggcggggtttcaccttgttagccaggatggtctagatctcctgacgttgtgatctgcctgcctcggcctcccaaagtgctggaattacaggcgtgagccaccgtgcctggccccagagactttttcatgtattacaaaattaaagggagaggaagacaaaagagcactcctgactgtgatgttcttatagaatcctgtagatgaaaattttaatatggaaatggaaaaaaacctgaattagaatgcttttagaacatcaggatggatatatacacttacccagttcttccttatttttgtcccgtggaactgggtgaatcataataattataaaattataggtgggcacagcataatcattgtttcattatatttatatttcattatatttcatcatccctctaaagcctttagtatccccctttttctaatgagaaatccgaacttcagagaaactaagttagtagtctgaggtcacacagcaacaaatgggagagctggactttaaaacacatttctgatatcagagccactgcacaggtttctcaaagtggccttgaaatacttgcattagaattacctggtgcatttgaaaatcaaaatgaaagtttctgggtgtcacctcctcactaaatcagaatctcttagggtagggaatacacagtattgaaaactgttggtcacactttgatctcttcagccccacctctacatatgggcagataactgcattttttttttaaattttttttgagacagggtctcgctctgttgcccacgctggggtgcagtggcaatcttggctcactgcaacctccacctcccgggttaaggtgattctcctgtctcagcctcctgagtagctgggattataggtgcccgccaccaggcctggctaatttttttgtatttttagtagagacagggttacaccatgttggccaggctggtctcaaactcctgaccacaggggatctgcccgcctcggcctcccaaagtgctgggattacaggtgtgagccaccgcgcccggccgataactgcttttttgaccagcacccaaggagtttctgtttgtgcactgaaatttgattactgctgcagaaagttatcctgctatttcctcattttaggaatagaaatatctggcctgtttaaatttccttacattgtgtttgtcctgatagaaatagattaccataattagaacttttaggcattgcatttttagtttagatcatcttgttgagccttttaagaaagggagtcttggctggtcacagtggctcactcctataatcccaacactttgggaggcagaggtgggtggatcacgaggtcgggagttcgagaccagcctgaccaacatagtgaaaccctgtccctgctaaaaatacagaaaattagctgggcatggtggcgggcacctgtaatcccacctactcgggaggctgaggcgggagaatcactggaacccaggaggcggaggttgcagtgagctgagagcgtgccattgcactccagcctgggcaacagtgcgagactctgtctcgaaaagaaaggggaattttgacagaaaaagcatgaagtacatattgatacaagttgcaaaggggacagcacattcaaaaataataactagcatttcatgtaaagcagcaagtaagcaaaaaaaatttttttttttttcctagacggagtcttgctctgtcgctaggctggagtgcagtggtgcgaccttgactcactgcaacctctggctcccaagttcaagctattctcctgcctcagcctcctgagtagctgggactacaggtgcacgccaccacgcccagctaatttttgtatttttagtagagacgaggtttcaccatgttggccaggatggtcttgatctcttgacttcatgatccaccctcctcagcctcccaaagtgctgggattacaggtgtgagccacagcgtccagctacaagtaagcaaaattaaagtcagtgttttaaaataaatctttaagcagctgtacattttcatcatgatatttcgattagaacagaatcttagtgccctaagaaaacattgtt

SEQ ID NO: 74981 - DNA, 1552 bp, Homo sapiens
tattaattgtgattaattatcgtgtggcataatacaaagaccagatgatgtattatggcttccggagggcgcctgcatcgtttttcgctggagccctcggggcaggggaactggagagctccctgggtggcctttggcccttccctggtcagagcccgccagctgcgaggtgcccccagccatgaggtctgggtcttcaggctctcccgacttcggtgccttgaccttgggcagaaggccctgttaaccttcctcgctcacggactcgagcgaccagcgccggggacggggcgggccgtccttaggccccgccccttcgcctccgccccgccccgccccgctcctggccgccggctccctccggcagcagggagatgcgcgcctgcgccggccctcgcctcggagcagccatgatggtgggtgttctccgcggcgccgagtcccgggagcgcggtgggggcagcgggcgcggggcgggcgcggggaccgcgccagcctgtcactaatgtctccctttgtgtctcccccatctcatccttttccccggcgcgccgtgcccgccgaccccacaggaaggcctggacgacggcccggacttcctctcagaagaggaccgcggagtaagttctgccttcctttcgctcgcgggaccctggaccctccttccccatcctgggtccccgggtgtggtacggggatgggtccccagccgcgcggcactccctccccgtagtcctcctttcggtttcctcgctgcaccgcgccccaccctcccgcagcccttcctccctaggggccgctcggctccgattcccggggacccgcggccgctttcttgtcccccgccgctgttcgggccttctggtggacctccactcccacgcggggcggggtgcaggtggcgaagtggaaatggaggcgggagatggaacgcccccaccctccctcgacactttggggccatgaaaacccattctcggaccttcccagcggcaccctcaattttcacccggtgtggacatctcgaacttgctcccgcccacccttctgtctctctcaaatagtacaggtgtagtctacattaccattttgcaaggatttttatagtagccgaatcaactcctgtccagtgccctactagattatgcaaagtgcaggtagcccatggtatctttactttttctaatatccaacaaatcctgtctttggcaggatttccttggtgttttattcccccttagcttctttgaggtatattgacaaatactgttgataattgtatatacttaaggtatacattatattttaatacacgaatacattgtgaaatgagtaccaaaatcaacctgacatatccatcacctcacctagttaccatttttttttgtgtgagaacatttgagatctaagcaaatttcaagtatgtaccctttgaccaacatcgacgctccacccactcaccccccacatacacactccgccaggcctttgataacctccattctgcccttggtgttctgaggttagttgcattctacttcagaaagagcct

SEQ ID NO: 74982 - DNA, 3568 bp, Homo sapiens
gtatttttgctgccactcctgaagctctgacatcacccagtgaaataggaaacatttcagggatgggacaacttgtatttgtccctttcgcttccacgtccaaacccctttaagaaggatgaatgggcaggatgagttagactccttcgctgtatcgtctactgattcttaaaatgtgacaaatctgattggacgacttacatggtacggtgcaatttttgatgtccagactaaagtgagtcttctctaggcaaacagtaattttggttaaaaccaaaatacgtgttctgaattactgttctgtgtttattttcaggcttctggagttacagtgaatgatgaagtcatcaaagtttttaatgatatgaaagtaaggaaatcttctacacaagaggagatcaaaaagagaaagaaagcagttctcttctgtttaagcgatgacaaaagacaaataattgtagaggaagcaaagcagatcttggtgggtgacattggtgatactgtagaggacccctacacatcttttgtgaagttgctacctctgaatgattgccgatatgctttgtacgatgccacatacgaaacaaaagagtctaagaaagaagacctagtatttatattctggtgtgtaaaaacaaaagaaaaaagtacttttaaaatgcaaggattattattatcatagtcagtcttacctttgtttttcttataaatgggattcaataattttttttttttctgtagggctcctgaaagtgcacctttaaaaagcaagatgatttatgctagctctaaagatgccattaaaaagaaatttacaggtacaaacttgaatatttggggcagagaaattattctttattaattataataaagtaataggataatgttttttctttttaggtattaaacatgagtggcaagtaaatggcttggatgatattaaggaccgttcgacacttggagagaaattgggaggcaatgtagtagtttcacttgaaggaaaaccattataaaatgacagtcaagtgccatctggatcttaaggagcttccatttctccagctcagtccattggaatagtattaggttttggttttttgttgtatttccccctttccactgggcccttccaacacaatgaatgaaggaaatatcatttatttaagcagcctatcagtgattgccattagactgttgaatactgttacttttatatagaacccaaggaatgccttcctgtcatattttagccaaaacaactggttatatgcctcccttgcagcaagcactacaatgtatgtgatcgtcaatgtgaatagcttagaatactgcaaaggataagctaattgaatgccttgaaagtattatccactggtcagatggtcaacttttttcagtattatttatagttggcacttgattgcagttctgtgaggcttgagcattcatacacctcacctgccttggcaagcctattttagtgatatggcagcacggatataacactatgcattaaaagcactttttgtaataagtttaatatcctaaaaggaatgccaattaagttttgttaactgtgtcatcaacttatcctagtacctcagtgttcattcctgttacctgcatatcttcttaaaagaaatagctgttattaatgcctttttgttttccattgagtgtacactactgaataagtgtaggagttttatgtttaccatgtgagtcctgcaacactaaagatattttgaatatcagtcatgatggcaatttctgtataaaagagccttaaatggaacattgttttgagatcaaactccccaccctcacaaaaatggccacgttgcaataaaaattgtggcatattacagaacgttgccttgttttccttggaaattttgcaaaatgttatgtgaaacaacttctagggtaaaaacagctattactaatctctgcactggtcatttgagaattttttttgtacagcattcatgtgtgatattttccagatttgttggatctatttggtttaaaaagtattctatcttaaggccaactaatataaaataccattgttaaagaatggtacttttataaacattagtgtatttatttcctatgtgttaatatgaagatcagaaattattttttgcactttggcataaatacttttcaatatctgatttgttctctggataaattagcatagttatttttttattcacatttacatttctaagtagttgtatagtagaagcaggaagctcttattgcttatttggtcgtaatgaaaataatttgtaaaatgtcctttaaaagtttaatgatacttctgatgtttcggaacagtcatttcacctactatttctgaatatattttgcaaattgaattggaataggaattgataatagcagtcttaaacattagtagtgggatttggctatggtccagactgtgctccttatagagaatttgatctgctcagtgtgagcggtttgctgttagccagggctatttatggcaaacacatgcttttgtatcttgtcatagttatccacaaatggcaaaactggacttgattctactggtatgcaaaacaggcatgctagtaagcagtcagtcgtggctcagaacttaaccccatagctcagaggaatgcttttagcagaaaacaggaaagaaaatatcccttaaaaattttttttgaatgtgtggaagtaattttagtataattagattttttccatatttttgaaagatttttcagatgtgaacattaaaaatagggattaaatgtctaggcttccatttaaaattatatgaatggtttgggatctttttgcactgagcaattttatttcaggcttccagctgtccctgtgagttatcctggacatttcgatggtttttggtaaggccaaactctgataagcaaaacagagaatactgacgtatacttaaccatatgtgtaactgatacttggcaccatggaatttttcattgagttatttcctcattcttttaaaaaataagggactataaatcagttatgtagtatcttttgtttttgtagctgattccttaactttcttgtatgcctctagtaatttcagagattaaatattgctttaaactgtgatactttgatttgctagattgacaaaactgatactaatataattaagttcatctttgaaatacatctttgtgcgtagagccaaaaaaagagataaaattaataatagttcacttgttatttgagattaatttggcatttgaaatgatcattttattttacaatcatttataatgaatcaatgttccagttagctttaaaaggtatacggtgctaattagtaaaatattgaaggcaatattttactgctagcttgcaaagttatgagagtttaaaaaataaaatatatgaaaatatgtaaagctgttgagatgtgtttacttatacttcagaacattaaaagtttaaaaactggtatttcagatcaaagaggcatcattatctttattctgtttttcaggattttagttggtaatactttctcatttatcaa

SEQ ID NO: 74983 - DNA, 1102 bp, Homo sapiens
aagagcttcctgcttctactatacaactacttagaaatgtaaatgtgaataaaaaaataactatgctaatttatccagagaacaaatcagatattgaaaagtatttatgccaaagtgcaaaaaataatttctgatcttcatattaacacataggaaataaatacactaatgtttataaaagtaccattctttaacaatggtattttatattagttggccttaagatagaatactttttaaaccaaatagatccaacaaatctggaaaatatcacacatgaatgctgtacaaaaaaaattctcaaatgaccagtgcagagattagtaatagctgtttttaccctagaagttgtttcacataacattttgcaaaatttccaaggaaaacaaggcaacgttctgtaatatgccacaatttttattgcaacgtggccatttttgtgagggtggggagtttgatctcaaaacaatgttccatttaaggctcttttatacagaaattgccatcatgactgatattcaaaatatctttagtgttgcaggactcacatggtaaacataaaactcctacacttattcagtagtgtacactcaatggaaaacaaaaaggcattaataacagctatttcttttaagaagatatgcaggtaacaggaatgaacactgaggtactaggataagttgatgacacagttaacaaaacttaattggcattccttttaggatattaaacttattacaaaaagtgcttttaatgcatagtgttatatccgtgctgccatatcactaaaataggcttgccaaggcaggtgaggtgtatgaatgctcaagcctcacagaactgcaatcaagtgccaactataaataatactgaaaaaagttgaccatctgaccagtggataatactttcaaggcattcaattagcttatcctttgcagtattctaagctattcacattgacgatcacatacattgtagtgcttgctgcaagggaggcatataaccagttgttttggctaaaatatgacaggaaggcattccttgggttctatataaaagtaacagtattcaacagtctaatggcaatcactgataggctgct

SEQ ID NO: 74984 - DNA, 1059 bp, Homo sapiens
tctagtttatttgcgtagaggtgtttatagtattctctgatggtagtttgtatttctgtgggatcagtggtgatatcccctttatcattttttattgcatctatttgattcttctctcttttcttctttattagtctggctagcagtctatctatgttgttgatcttttcaaaaaaccagctcctggattcattgatcttttgaacggtttttcatgtctctatctctttcagttctgctctgatcttagttatttcttgtcttctgttagcttttgaatttgtttgctcttgcttctcttctctagttctttttttttcaccagttgtcaaatgattctttactgaaatattttcctttgtgcttaactggctgggcattccacagcaccaatgttgatgtgatctatgatgtcatgagggtggcggccatcaacgttacagcccacagactgggcagtccccaggatctctttaatggttccagagagttctctggctaaggatcagtgccgcatctgtcaagcaatgttgacgatctcatcaaaagtgatattcccacggtgtttaatgtttttctatttctttctgtgtcttggtggttccttaagagctttgatgattagggcagaggcagaaggcaccacttcaatctgggcctgtctgttctgaatggtcagtttcactgtaatcctcaggcccttccagtcacccgttgccttggcaatgtcatcaccaaccttttttggagacagacccagggggccgatcttgggggccagggcagaagtggcaccgacttcacctccggtgcacctcaggtatacgactttgatttcgttggggtcgaactttggcggcatggtggaggcggctggtgcggaatgaccaaagaaagttgcaccttggcctcctccaagccgaaagccgagagctctctagttcttttaattgtgatgttagggtgtcgatttcagatctttcctgctttctcttgtgggcatttaatgctataaatttccctctaaacactgctttagatgtgtcccagagattctgg

SEQ ID NO: 74985 - DNA, 1056 bp, Homo sapiens
gagactcaggtacaacaaaaagttggttcctatggtctgtttttatcacgagcaaaagtccaaagctgattgtaaaaattagagaattccagattatttgaaaaaatgttattttatttgtacagttaaaaagttatacatagaaacttataatacagttctgtaaagctgaaagaactgtcaggaaaaagggagggtgttactttttttgattgatcattaaggaagttagaggaataaaaacacagtaaaaggtttaaaacattaaggaacatttttcaggtataaattttataaatacaaaacaaattcacaaattactctcaatactaaataaatatctagttaataaacttggacttaatacctgcagccagcactggtacagcacttcaaggttataagattggattcattcatgtgtagtgttgaaagaatgtactcaaacaattaattaagacataaacaccttttctaaactgtgctatagcggaagactcatccatgtagataactctcccttaataccaccactttaaaaaaaaatcatcaataacaaaataaatcgtgggtgaaaaaatattttccaagatctctggacacatgaatgatctcaaaaatgtacaaaaacctctgtaaaccagtactgtatccaatacatctatcaaacttattagatactgaacaaaactgtagcaaaggatatctttcctacattctcctgagtgcttaatattaaaattgagaatatagtgcaggccacactttcatgtggtcaatcaattgttattgctttatacagcatgatttaatgttccattttcatgaacaatttgtttttcttcaaatatatcctttagaaggacaaagtcagattcgtgactttttcgcagccggtggtgtgctaacttggtccacattactgggtgtgacgtggagtccaagcttttgagcctgaatatgaaaaaatgcttgaagcctagttccagcttttgcttcacttgtgttacgagggttgtattcaaagcagttcgaaaacattaactcaatgtcatc

SEQ ID NO: 74986 - DNA, 1028 bp, Homo sapiens
aataaacaccagagaatgataaattttttatgaaaacttaagtttattcccctgcataaaaatattttttccgatattttcatcagatgttgaaatgcgtaaggatattttcttcttccttgactagcccctgccttctctgctgagtctggttggtttgttggtttctttgttacctttttaaaatctgtaattcatggctgataatgtattctgttcatgcctttgccatcatctgtcacttttttgctgctatcaagtgaccaatcttagaactgtttatgatttatttatacagaaagtaaggcattatggttttcatctatgaagaatatgaattccagtttggccacttagtaaccttatttttagatacctttttgattcataatcatttctaaaatatccatgaattgattttatatgcatattgaacttcatacctctcagaaacaatatattccatttttcatggttagtaagtttgaattttgttacaggttacagatcgacatatctggagatcagcattagaaagtggacggtatgagctgttaagtgaggaaaacaaggaaaatgggataattaaaactgtgaatgaagacgtagaagagatggaaattgatgaacaaacaaaggtcatagtaaaagacaggtacaaaaagatttttctaaagtaaccattacttttccttgccattttaaggttttttttttttttttggtttttaagtaaatatgttgctttttcttattttaaaaacttgtcgtgaggaccttgatatttgtaaccattggactgatcattttctaaacctcaggatctctgttactccactttgtactaatgcaaccaaaaaacaattcattcgaataatgataatttcttaaagtttttttttttaatctttgaacttaaggttttattaattttggaaagtaattatactattattcttcttttctataggaaaacttagtaaattagtaaattctggtagacttgaatgttatttgagccaggcaag

SEQ ID NO: 74987 - DNA, 1071 bp, Homo sapiens
tgaccttaattacctccttaaaggttctgtctccaaatacagtcacattggaggttagggcttcaacatatgaacttggggttgtggagaggggatacagtttagttcataacacctaataacttggggtaactttgtatctcatatttttctaatggaaacttgaaatatgatgatgatgaaacattttattttaattacagggaaaagaggacaaaatggatttaaagaatttacaaggcaagaacagatcaactgtgtaacaagagagcctcttactgctgatgaggaagaagcattaaaacaggaacaccaacgaaaagagaaagagctcttagaaaaaatccaaagtgccatagcctgtaccaatatctttcccttgggtcgcgaccgcatgtatagacgatactggattttcccttctattcctggactctttattgaagaggattattctggtcttactgaagacatgctgttgcctagaccttcatcatttcagaataatgtacagtctcaagatcctcaggtatccactaaaactggagagcctttgatgtctgaatctacctccaacattgaccaaggtccacgtgaccattctgtgcagctgccaaaaccagtgcataagccaaatcggtggtgcttttacagttcttgtgaacagctagaccagcttattgaagctcttaattctagaggacatagagaaagtgccttaaaagaaactttgttacaagagaaaagcagaatatgtgcacagctagcccgtttttctgaagagaaatttcatttttcaggtaaattttcaatgaaaattgtttttactttttttccctccccctaatctctggtcattcaggattaagcgtttttgcaacctattagaaatacatttacaacaccttatctttgatttaggctgtccttttagtttgcaagttagagtttgggaatgtatttctgtatagaaataagattctctaaattccactggattgtatttgaattatgaggaacacatctatggtataacaaaatacatattctccctgatctccttattccttg

SEQ ID NO: 74988 - DNA, 1139 bp, Homo sapiens
ttggattcaaagttgccttttttttttttttttttttttttttttgagacagagtctcactcagttgcccaggttggagtgcagtggtgcgatcttggcgcaacgcaacctccgcctcccgggttcaagcaattctccaacctcagcctcccaagcagctgggactacaggcacataccaccacatccagctatttttgtatttttagtagagttggggtttcaccatgttggccaggctggtctcgaactcctgacctcaggtgatctgcccgcctcggcctcccaaagtgctgggattacaggtgtgagccactgcgcctggcccataattgctttttcctgaagacatgtcattgacatgtttgagagactactccatattctttattaggcattttcacattgagccacaaatttaaaaagttcaaacacagttcatttgctgcgatttataatacagaagtatttaccaatttttgacaggagaaaaaatgaagatactccatgctctctgtggaaagctactgaccctagtttcaactagggattttattgaagattatgttgatatattacgacaggcaaagcaggagttccgggaattaaaagcagaacaacatcgaaaagagagggaagaagcagctgccaggtaagagataattgtaatagttgtgttaatgaaagctgtttatttctttgcatttaaaaccatatttcacatggtgctataatgtggcattcattatactgatgtttgatggctttactaagagcttgtgaatgaggccaggtgtggtggctcacgcctgcaatcccagcactttgggagggtggattacttgaggtcaggagttcgagactagcctggccaacatggccaaatcccatctctactaaaaatacaaaaagtaaccgggcgtggtggtgcatgcctgtaatcccagctactcaggaggttgaggcacgagaatcacttgatcctgggaagcaggatcagcctgggcagaagagtgaaactctgtctcaaaaaaaaaaaaaaaaagcttatgaatgattactacattatagttttataataatgtttgaagtactttccatgatttgattaaagacaagatgctaaaagtgaaatgtata

SEQ ID NO: 74989 - DNA, 1072 bp, Homo sapiens
attgttgattacatgtttattccagtggagttgttttttcagtacatgaacagaactttaaattcattttaaacattttattcacagaagtattagaggaagctcttgtaggaaatgacagtgaaggcccactgtgtgaattgctttttttcttcctgactgcaatcttccaggcaatagctgaagaagaagaggaagtagccaaagagcaactaactgatgctgacaccaaaggtcagagttcaacattattgctgattgaaccatagtagttttgtagcgaaactaatttttgagggccaattttaagttaaattggcttttatgcttataaaatatagttgttcaggttacctgatgttgaatcatatgctaacaacaaatggattatgttacaaaaattttgttttgatataacctgtgtctgacaaccttaaagatattttccctcagtctatcttgcttttattcctttagacttttcctatgatttaggagcattacagatttcattgaccagtatctgtaattccaagagattctgctaactagcactctagcactgtttctttgtttttttggggtattttttggccctcaactaaggaaatacttttttttttttgagatggagtttcgctctgttgccaggctggagtgcgttggcgtgatcttggctcaccacaacctccacctcccaggttcgagcaattctcctgcctcagcctcctgagtagctgggatacagacgcccgccaccatgcccagctaatttttgtatttttaaaatagagacggggtttcactgtgttggccaggctggtctcgaacttctgacctcaggtgatccacccgccttggcctcccaaagtgctgggattacaggcgtgaaccactgcgcctgaccaggaaatactttaattgtaattaatactttaaaatgaaaatactactgctgatttcattttagatctgacagtttttacatcagagttaaataaaattttacttctgagtttgaactagataatttgccctttaagttctgcacgcttaaatatctggagtcagt

SEQ ID NO: 74990 - DNA, 1034 bp, Homo sapiens
ccagggcttacaaactggggctattttgtttgattcacacagccttttaaaacattgcttcccaaacttgaatgtacatatgaatcacttggggatcttgtcaaaatgatgaagattctaaattagtaggtctggtgggggaatgagattctgcattttttaacaaggtgatgataaccttgctgctggtcttcagatcacactttgggtattagggctttcaaaggcacagatatgtttgtcccagtactgtagtttgtcataaacttagccaatttgcttttcctgttttaataatctgctggctccctgtaggaattttaagagtctctactaatctcatttaactttaaattatttcaaggattctgttgttacatcaaaaaaattgccaagtgttattttgtctatatatatagttctaagtttgatttttcttcacagcttttgaaaaggctaaattaaaaagagaaaaagcagatgccctagaagcgaagaaaaaagaaaaagaagataaagagaaaaagagggaagaattgaaaaaaattgttgaagaagagagactaaagaaaaaagaagaaaaagagaggcttaaagtagaaagagaaaaggtattcatttgagtatattagctatactctctacatatagtaatactactttacatatctacatccatggttgatttttaaatgcttttactactttcattcacatttatgaatgtgcatagaaagttgattggtttatctcccttttgctttggaaaatttaacatgcctttacgcatcacttaaaacctcttttagaatgcagttctaaatgatttcattgtttagatttccaaatttagggaagatgatatatgtaaaagtttatatgtaaacctttaagaggtaaaatacgcagtttgaaaaataaaataggccgggtgcagtggctcacacctgtaatcccagcactttgggaggccaaggcaggcagatcatgaggtcaggagttcgagaccagcctggccaggacggtgaaacccc

SEQ ID NO: 74991 - DNA, 1061 bp, Homo sapiens
gctgggtcttaattcatgattctctgtttttttacatacacccctgtaaacttctttgaactccctagaatcaagaaatggtagcaagtagctgtgaaagacatagactaagtctctagaaatctattagaaggtgttgacttggcatcttgagtaacataagtttagctaagtacctatgggaagggctagccttgattagattgacaaggaatgctaccggtggtttggttgtgctacaaagtcaatagtagcattgacaataattactacaatttatataatttacttctgggcaatgtccctgtgttgcactggtttccttctccctaattcctctgtcagggaattgtatttctttctgttggttttaaatatattagtcctcaaattattgtagccctgtgggacctactgtggtcagttgttcccactgatgactgtcagaccactttaggcctcacatcaactgtaattgggttcagagtagactcatttaccctgtatttgcctcatgaccaccaccactgttaccacttaaggggcattcacctgggctctgccagcaaagatcatctctgtttctaacttgagcaaccttgtcatagggtccctgaaaagcttccttcattacttcccagaagccttagtaatattatgagccctgatagatctgatatctaagcctttcaaaggcagatccatttgatttctttcatattttttacagctcatgttactaaagtacagagcctttttatcaataggctacataattacctaacaggttttgatatgatttcctgtagttgttcctcttgagaaacactggtttatttctaccagtcagtggtgaaagtcagcctgcagttctttagacatcatttccgtttgctaccaatgtaggattggtaattgagcctcttctcaagcttttctcttagaataaaaaaagttgttttttttattttagtaaaataaacataaaatttttactatttttgtcattttaagtgtgcagttcagtggcattaagtacattcacagtgtacttaatgttg

SEQ ID NO: 74992 - DNA, 1039 bp, Homo sapiens
acaggcacgagccaccacacctggccttagttatttttaatcttataagctgatatcaatttaggcatcaagtggtaataaaccaattagggctcttaactattcagccattaaagtatattcctgtggacttcctatgttgcattggtagaatgctttaagcaatttagatgaagtaaaagaaaattagctgggtgcaatgactcatgcctgtaatcctagcactttgggaggccaaggtgggtggatgtcttgggctcaggagttcaagaccagcctgagcaacatgacaaaaccccgcctctataaaaacaatacaaaaattagctgggcttggtagtgcgtgcctgtagtgccaggtacttgggagactgaggtgggaagattgctagagcccaggaagcagaggttgcagtgagccaagattgtgccactgcactgcagcctgggtgacagagcgagacactatctcaaaaaagagagagaaaatttgcacacaaacctatgatacagagtgttaagtactcagggtatattagaattaaaaatgagaaaattgattttttatctttgggtacttttatattgctagcctaaattaagtgctgttaatgaatcataaaatgcattaatgttcaggacaaaagagagctgctaaatatattgatgcggtaagatgaacataaaagattcaagcgagaaacaaatacagttattttgatttaaatatgcatgcttggatgccagtgattgggtacatgtgggattaatcaagtagaagtttttgagaaagggttgagtagaaatatgaagaaaaaaatatagattagcagaaaggattacaggagggggacttcttatttcggctcaaagatagtatagatttttagcaacacattaaatttattgtagttctttttcagaaagaaagctttcatttggtcagcttacactaccttttttttttctcaatcctgctccttctgtatatactactgaattcgtaagataaaaattgctagttccaggacaaaaaagt

SEQ ID NO: 74993 - DNA, 1174 bp, Homo sapiens
cttactacattctccttaactaattgctaactcttgattgacctgctttttcataggtaaagaagactcaatagcacatcaactatagacaaatgcgtaagctaaggtgcataatgtagtctcttaaatacgatttattctggctgcatgcggtggctcatgcctataatccaaacattttgggaggttgaggtgggaggatcacttgaggccaagagtttgagatcagccaggtcaaaatagtaagaccttgtttctacaaaaataaaaatattctttaattttggctagccgacaacaattttgtttatttttgctgtggattgttaaaaaatggaacaggtctgaatacagaatttcttgacttgtgggataggaaaatgatttgttgtattacctagtgacttaatctcataaataaaataactttttttttagccatgtagacacttggaatatatttcccatctttgagtgagttcagccttcaatataaaatgtataactctcttccacaacatcactaacaggtggtccaaattatgtttcacactggcttttcattggaagaggtttaactagcttacaaggcatcctgttttcattgttcatctgctctcccttgttaataagtcagtcctttcaacagcctccttttacaggtgaggaaacaagttggggtggggagtaaatccaagattacggtgtccaaaattatttttctagtaactgataatgctagactctaacatcaattattctagcatttatgctctttttactgtttatcacatagtgcttattatggaaaattcttcctgatatctgttgaagtatgcattaagaaaataggggcattgcctggaatttaaactggctgcctagatctttgtgtagataccactctgtactgtctgcttagacatttggctttttactataccccaagtgattaagctctaggtattcaatggacatatcagaacatcatcaatttatagtagggaagaatgtctttcatactgaccaattcctatactaatggtcagttatgtgtgaaatctagttataatcaaaggctatttggtgagcatggggttttcaaaggaagttggataattttcttagctagtgtctttaaatgagatgtttagctcctttttaaggaataagc

SEQ ID NO: 74994 - DNA, 1469 bp, Homo sapiens
cagtacgttaccctttctttcagcgaggcctggaatcccctggttgtctggttcaaccatttccagagaataaacctctattcatttgctggagtaggagaaagggaaatagggatctgactgcgtcttaatctgactttcagccacattcccttatttttagcatttccccctacttcacctggtaccaccaattattagccttttggagattctgtagcataagtcagatttgagtcttagctctcaatacttctatctttgaaatcaattttctctggtctcctaaattccttatcacttctccttttgttctaacaacaaatttttatatctgttatttcctttcccattctacccatccttgaaggtttacaccttcttttaaaaacccctattctgtcattataatggggtttcagtaatgtacatacatgtctcttatccactgtctttacaggcaaggcctatggattgaaattctttttcccttttcttcaggctagaggtaaactttccctcattcatatccctggtgttggcttattcctttgatggcagctgttgtatgaacttactaacatagcttttctaatccccttactagataacatatttgagagtaaatattgtgtctcattcatcatagtgtatatctctgcatggtatcttgtgcataggaggtgcctattaaatatcggttaaattgatttgagctaccttgtggcctctgcattgttagcattccagagttcgcccagagctattcctttatggttttcctgggaccttaagagcacctctgtgggctgccataattaattgatccacctgattctcttttaccctatctgtatagttgtgggatgtgggggaaaagagtgaacagaaatggaaaagaaaaggggggaattgtttgagagctgtgatagatcaggaggttaatttacatatttcatgtatttcatacatgtttcaaaagtttgaaatgattgactttttctttatattgagtaatatgtttacaggctccaggccaactttaaatttattattttagtattcttttttttttttttttttgagacggagtctcgctctgttgcccaggctggagtgcagtggtgtgatctcagctcactacaacctccacctcccgggttcaagcaattctcctgcctcagcctcctgagtagcttggactacaggtgcgtgccattacgcccggctaattttttttatttttagtagaggcagggtttcaccaagttagccacactggtctcgatctcctgacctcaggcaatccgcccgccttggcctcccaaagtgctggaattacaggcgtgagccactgcaccaggcccatattttagtattcctaacactgagaaaaaagaaggaaaatatttaaaaatcggaccacaggccaggcatggtagctcatgcctgtaatcccagcactttgg

SEQ ID NO: 74995 - DNA, 1065 bp, Homo sapiens
gttttttttggtagaaacagggtttcaccacattgcccaggatggtcttgaaatcctgagctcaagcgatctgcccaccttagcctcccaaagtgctaggattacaggcctcagtcactgcacctggttttttggtttttttgttttgtttttttttttttgagacggagtctcactctgtcgcccaggctggagtgcagtggtgtgatctcagctcactgcaagctctgcctcctgggttcacaccattcttctgcctcagcctcccgagcaggtgggactacaagtacccaccaccatgcctggctaattttttgtatttttagtagagacgggtttcaccatattagccaggatggtctcaatctcctgacctcgtaatccgcccgcctcggcctcccaaagtgctgggattacaggtgtgagccaccgcgcccagccacacctggtatttttataccaccttatgacttttagaaaccttaacagtttccttccttaaagctataaacaaatggatttgaggtatcttaaaattaacagaaagggattctaggattgttttttattgtatctgttgaaatccaactagcctccaaggttcaatttttcctttttcatttgtttttgttgttgtttctttctttcttttttttttttttttttttttttgagacagagtcttgctctgtcacccaggctggagtgcggtggcatgatctcagcttactccaacctcctcttcccaggttcaagcaattctcctgcctcagcctcccaagtagctggtattacaggcacatgccaccaagcctggctaagttttgtatttttcgtagtgactgggtttcaccatgttggccaggctggcctcaaactcctgacctcaaatgatccacccaccttggcctcccaaagtgttgggattacgggcgtgagccactgcgcccggcctgtttcatcttttgtacagggcttttctctgaatccttggttttctgctcatgcttaagaatgagtaacaaaaaagctgattgaagttctgagtggggattgttaactgtg

SEQ ID NO: 74996 - DNA, 1935 bp, Homo sapiens
gagactgcaggtgcccaccaccacgcctggctaattttttgaatttttaatagagtcggggtttcgccacctttgccaggctggtctggaattcctgacctcaggtgatccacctgccttggcctcccaaagtgctgggattacaggtgtgagccaccatgcctggccaaactatattttttaaagcttgatttttaaaatttcaagtagaaataaatccatgggtaagagttcattcatttgcatcatagcgtatcttcctattttagggttatctttccagttcagcagtgcaactctatggagtagaattgaaaggagacttttcgccaattgcaggaaatggtcataaaaaaatacctgctcactgacagaataaaggtaccttttaacttagtcaaatctcttttgcattgttttccaatctgttcttggttgccattgtatagaaacagattgaattctcttaaatattttaaaacattaatagagatgaattgttgtaattatatcctattcacatatttctctcttccctgattttattggaaagtaaaattttttgaattgtcttcctaccagatacagttttggtagcagcatttttgaatctctagaggttggttagaagtgtatttaattaatctgtgaatgtcaaaaatacataaaggcctaagtaatgctcacaatacctctttttcagcaggtatcgtgtatgccacagaatagcagttcatgggggaatgatgccataggttaggctacaacagaggttttctatttttcccgtacttaagaagaaaaataacaaaaaaggagaaaggaatttttttggttaatgcagtaatctttatcatttcactaatagttctgtacttctgatggcaatgcagagaaataccgagtatctctgatgttaagtgcaatctaatgtggaaagatgtacctcagtaagattaaggatgtagtcttccaccaccccgccccctttttttttttttttttgagatagagtttcgctctgtcgcccaggctggagtgcagtggcccaatcttggctcactgcaacctccacctcctcggttcaagtgattctcctgcctcagcctcccgagtagctggaactacaggagcccaccaccatgcccggctagttttttgtatttttagtagagacggagtttcactgtgttagctaggatggcctcgatctcctgacctcgtgatccgcccgcctcggcctcccaaagtgctgggattacaggcgtgagccaccgcacccggcctccccttttttacagaagaaaattatttcattccctcctctttcccacctctctctctccctgacttgctcatattagagatagaggcaaatgatcagagtaaattcgttgtccaatagtaagttcatggtattttctcactatcccatatgtagtgaacaataataccttgctcttgcacaagaatcacataactaatagaatcaatataattgaaaattgatatttaaaaattatgaactcttaaaaatcatggtttataaatggataaccaagtaatttttgttggtttctttttaaagaagataataaaggtgtacaaaatacatatttacttactttttttttttttttttgagatggagtgtcactctgtcaccctgactagagtgcagtggcacgatctcggctcactgaaacctccaccttccaggttcaagcgattcttctgcctcagcctgctgagcagctgggactacaggcaagcaccgccacgcccagatcttttttgtgtttttagtatagacagggtttcaccatattggccaggctgatctcgaactcctgacctcgtgatccgcccaccttggcctcccaaagttctgggattacaggcgtgagccactgcccccagccttacttacatttt

SEQ ID NO: 74997 - DNA, 1008 bp, Homo sapiens
tctggtgtaaggtgagaaagccggatggtatggaagttatgacgctgtcccaggcacaacaggccataggaagtagagaaaggaaaaaaacccaggactctaaagcagcagcaagaaggaaatgaggggcacaggaatagagacggtcttctaagtagttgttccctaaaggcctcttaaatgtcagacttaatatttgttctaagtcagagtggatgagtaaaaaattatcacacgaattttttccaaataacttctggatgattttcattgattaaggaacaaaaacatgaaatatactttacagatgaaatatagatgaaagaattagaagtccagaatgcaattacttatacccaagcaaaatttgatgttcactcttctaattctctgggatttatttctcattacttctctctcatggaaatgaaattcatttatcatcatgtactctctgacatatcaggaaaggtgttggttgacatcagctccaggcctagcatagtcctttatggggtactgtccagcttgcagacatcaacatttggaaagcattttcttctgctagcaacagctttgcctgtcaccatccaaggtgacagtgtggctttatttattaaagtaaaagaataataagttatgacataggtagacacttatattctagtttatgatgacaatggaatttgggatttcaaagaccacgtgtctgatttcctttactactttgtctctgcaatgcaaattaaggaatatcaacaaaacagaagtgtatgactctttcttgtaacactttgctattttatcagtcactactgccttctaacccctttttttggtactgtaccgaaatagtatgttgaactttgataagagcttttataaagctgacaaatttacttgacctaggatattactgtatggccataagcaaaccacttaacacctctaggcctctagttcctcattttaaatgagcaaactaaatgctatccaaggacacatctt

SEQ ID NO: 74998 - DNA, 1731 bp, Homo sapiens
agattacttgttaaatgttttaatggtaagtcactgacatgtaggactcagaagacctggtattagtttaaattttttcccctattattaactaatataatttctttgaagaaatgtttctggtaagtatttgtaaaatatgctacttaggataaacaaaatgatctatgagattcctttcaactagagttttatgtatttctcatggcttgttttgcatcattccaggtcaaaaagttgctagggtctcagaaataaaacgaaagtagagcagttacttgcatgagcaaaacatgtcttactgtgcctttttgttgctctcagaatgttagcatatagaccactgacattttgctttatttagcaataaaaagatacttctttgtactttgtttcttttgatgtttttctctccaccagatgcagcagcagccggaacccacagttcaccttggtgcattcctttatgatgaagacttattgattcattatatgagaaaggaaaaatgagcagaaactactgtatgatgtgcagctcacaccagacagcaactttaggtaggcacttaggtatgcaaatctgatgactttatgtgtattttttcttacatgtcatgagtatgcaaagtttggactaagctattcaatgttttctgaaagcaaaaggccaacctgtggcatggttattaccaaatactgcagttagggagagtaaacgaatattatctcaggagaataggtcacttaatgtcccccaggatatatttagaaactttgttttgttttgttttgttttttgaaacggagtcttgctttatcgcccaggctggagtgcagtggcacgatctcagctcactgcagcctctgtctcctgggttcaagcaattgtgcctcagcctcccaagtagctgggattacaggcacccgccaccacacctagctaatttttttgtatttttggttgagacggggtttcaccatgttggccaggctggtctcgaactcctgacctcaagtgatccgcctgcctcagcatcccaaagtgctgggattacaggcatgagctaccatgcccagcttagaaactgtttttcacagttttttttccctagtcaagtaaggcagtgagatgtttttcacatctagaaactatgtaatcagaggcaactctgcaggttcagaaactaaacagaggtgacaatacaaaggaactgactcatactctacatattgaacagagattggtaaactatacactgattgatttacaatgagaactataatttccaaggaggctgaaatgttctccccataaaaacatctacttgagctgggcatggtggtgtgtacctgtagtcccagctacttgggaggctgaggtggaaggattgcttaaaaccaggagttcagggctgcagtgcagtatgattgggcctgtgtatagccactgcactccagcctggacaacaggagacccagtcacttaaaagaaaaacatctggctgggcacagtggctcaggcctgtaatcccagcacttgggaggccgagatgggtggatctcttcagcccaggagctcgagaccagcctgaccaacatggcaaaaccccgtctgtactaaaaatacagaaaatagcagggtgtggtggcgcacacctgtaatcccagctactcatgaggctgaggcatgagaatcgcttgaacccaggaggtggagggtgcagtgagctg

SEQ ID NO: 74999 - DNA, 1036 bp, Homo sapiens
tgggcaatgagagcgaaactctgcctcaaaaaaaaaaaaaaaaaaaagagggtgggttttaaatgttctcgacgcagagaaataataaatttggccaggtgcagtggctcatgcctgtaatctcagcactttgggaggctgaggcagacagatcacctgaggtcgggagttcgagaccagcatggagaaaccccatctctactaaaaaaaaaatacaaaattagccagacgtggtggcgcatgcctgtaatcccagctactcaggaggctgaaacagaagaatcgcttgaacccggaaggtggaggttgcggcaagccgagatcacgccaatgcactccagcctgggcaacaagagcaaaactccctcccaagaaaaacaaagaaataataaatatgtggtgatgaatatgttagcccgatttgatcattctacaatgtatacattctaccccataaatatatacaattattatttgtcaattaaaaataaaattttaagaaaatggctgagtagacttgtgatatggagggccttaaaaatctcaagatttgatacactgaaaaatagaagatcattaaaagtttgtaaggagagggagtgatataaaagtgaggtttaagcgagattcgtttaggtgaacaaggtattttatagtggggagaagctgatattgaggaactggttatgagtttgtaatggtattcagagtgtgagatgatgactatggctatgagatagttgaattgagaatgaagggaaaataggtttcaaaagaaaaagtggtgggactgaatacctgactagatacaaaaagtgaggtttgattcataggctgtcagctttggggacttttctttcctcatataattaattagatgtaagtaggaaattttaaagaattgattttgccctttagagaagctcttctttctccattcccttcccctctacatatgtaatttgaggaaagctctactctcctttaggcagctgattagcaccttcctttaatctttttccaagcaacgtagtat

SEQ ID NO: 75000 - DNA, 1033 bp, Homo sapiens
ttgtttgtttgtttgtttttttgagacggagtcttgctctgtcgcccaggctggagtgcagtggtgccatctcggctcactgcaagctccacctcccgagttcacgccattttcctgcctcagcctcccgagtagctgggactacaggcgcccgccaccatgcccggctaattttttgtatttttggtagagacggggtttcaccgtgttagccagaatggtctcgatctcctgacttcgtgatccacccgcctcggcctcccaaagttctgggattacaggtgtgagccaccgcacctggccaatttttggagtcttttaaagtaaaaatatgtcttgtaagctggtaactatggtacatttccttttattaatgtggtgctgacggtcatataggttcttttgagtttggcatgcatatgctactttttgcagtcctttcattacatttttctctcttcatttgaagagcatgttatatcttttagcttcacttggcttaaaaggttctctcattagcctaacacagtgcattgttggtaccacttggatcataagtggaaaaacagtcaagaaattgcacagtaatacttgtttgtaagagggatgattcaggtgaatctgacactaagaaactcccctacctgaggtctgagattcctctgacattgctgtatataggcttttcctttgcagcctgtgactgcggactatttttcttaagcaagatatgctaaagttttgtgagcctttttccagagagaggtctcatatctgcatcaagtgagaacatataatgtctgcatgtttccatatttcaggaatgtttgcttgtgttttatgcttttatatagacagggaaacttgttcctcagtgacccaaaagaggtgggaattgttattggatatcatcattggcccacgctttctgaccttgggaaatcaattaaggggttcataatctcaattctgtcagaattggtacaagaaatagctgcatgtttcttgacattccacttggtaggaaataaga

SEQ ID NO: 75001 - DNA, 1081 bp, Homo sapiens
gcgtggtggcaggtgcttgtagtcccagctactcaggaggctgaggcaggagaattgcttgagcctgggagatggaggttgcagtgagccactgcactccagcctgggtgacagagcaatactctttctcaaaaaaaacaaacaacaagaaaaaactactttccttaaaatgttttacagtggttatttcaattagagagcaggagaagggaaagtatgtcttaattagaccaaactgatttgaacatgacacttttttttttttttttttttaaacataagctgacagtggggaaaacagcactatataccttttggactttcgtatttcaactattcttgatattgctccttttttttaggaagaagaagaagaagaagaaaacaggatgtctgaagaagcagaaaaacaatatcaacagaataaattgcagactgattccattgttcagacagatcaaccagagacagtgatatccagctcatttgtgaatgtcaattttgaaatggagggagacagtgaagtaattatggaaagcaagcaaaatccagtctctgtcccaccataaaatgaaatgactatcaagcttcaaactcttaagttttttttttttaatacaaaaactttcacattctttattcagtgggacttaatacaattatttatattttaaattattaaagtatctggaaagggaaaatgttttcttcatttttaggatctatctagcaaaagccagatctgaaattcagatatttgtactgtttttactgtgtatagaaattagtgctttggttttaaaatgatcttttaaaaaagttaaggacatcctagagccttaatagttaagaagagttaaattatcaagcctatttgtgcatttgctttttttgaaaaaggtaagttgctgattaagtctaattggaattgataattccatagtcttagattaaaatgaggatattttctcctagattttctcatgttatgccatgcatttatatatctaaccattaatttcacactaaggatgcttcaccatataataaaaggagcaagatggaagcactttgaattttc

SEQ ID NO: 75002 - DNA, 1036 bp, Homo sapiens
gcctgggcaacagacggagactgtctcaagagaaaaaaaaaaaaaaccgcaaaacaaaaaggctgggcgtggtgcctcacacctgtaatcccagtactttgggaggccgaggcgggcagatgacttgaggtcaggagtttgagaccagcctggccaacatggtgaaaccctgtctctgctaaaatacaaaaattagccaggtgtgttggcaggcgcctataatcccagctactcaggaggccgaggcaggagaatcacttgaccccccctaaaaaaaaatcctaatcctaacccagaaataaaatggctctactcatgaatgggaaagtttgtcatctttgagattttatatatatagacacacacacacacacatgttgtgtgtatatatatatgcactgtcagtcaaatattcacattctaaatgactgtcagaaatattccatggaaacttcatctctgaagattatacagatttaaactgaacatcatctacctacagcaaatcacacttcccatctttgaactaaaaggaaccagaacttaccccacctcctaacaagcaatatttggtcctattgcttctaaactattgcaaccaaaattccagtaaccaaaacatttgctgtgttctctaggcatatcaagtgttttatttagaccatttctgaggattttgctttaaaggctttacatgcagcattcaagtatctcataatataagacagtctagtctttcagagatcatgtatcatcaaggtctgcagagttttcactgtcatttgcaacaagagcctctctgttctcgtaagtccagaagccattcaaatcgattagaatggtggttactgtgtctccttgattactgttgattaaatcctgaagagagattttcaaaggatcctttggttttaccatgtcaaagatttcatcctgcaagagaaaaaaaaatacaatgaaatttgatccacttaatttctatcacacatagtgatccaaaattcagggctgtttgcatccactgaagtacagagga

SEQ ID NO: 75003 - DNA, 1081 bp, Homo sapiens
ttgtattaacaaaagaatatgttaagcattttaaatgcctcaaatattggctgggccaatataaatacaatataatacaatataaatacccaatacaaatactttttgtatttttactagagacggggtttcaccatgttggccaaaatggtctcgatctcttgactcatgatgtgcctgcctcagcctcccaaagtgctgggattacaggcaagagccactgcgcctggccaaatctccatttcttttaaaaaaaaaaaaaagtttgacttaatattttaagtttttgaattataaggagtctctattgttctttcatttttaattgtatgaatttatgccattgtttgctaatttatgtagaagtcattttcttttatgttggcagatcatttaaatctttattttcttttcttaggcaatttttcacagcaaaagtctttgctaaactccttcatacagattcatatggaagaatttccatcatgcagttctttaattatgtcatgagaaaaggtgattcatttttactgtgcttgaactccttatctgggaatcaagtaggtttttggtctgtgcttttataagtatttcttctatgtgaaatcactctaagtttgaatagtagaatttcttatcttttgaccaagatgtgttacataaacttgggttagcataaaaaaacaaaaattttttaaaccctcatgtgtcttaaagataatagtagactagaaatattaagagctgaaccaagagttttaatgtatggtaatttgaaataattttaatttactgataattttattttaccagtatattacaagttgagttgactgatagtttcaaacccaaagctgtaatatcagtttcaaggagcatcaattaaacagcttggacttatgattcctacaagtgccataataatctgtgaaagcctattgtatacaatctttaataattggttgctgtaattaacctcagaaataaaagcagcttcactgaaggcataatattatactagctgtccctgtttggtggaacaccaagtttaattggtaaagaacagtatcttcaaggtgtc

SEQ ID NO: 75004 - DNA, 1082 bp, Homo sapiens
ttcccaccagaagcagccgctgagtttgcatgggtcatgtaccccaaacatagtgttgtttgttatttttgtttaaggccctaggtgattctaatgtgcagccaaggttgagaaccactgctgtagggtcagactacagaggttcaaatcccagccctgctatatgactttaggcaatggacttaacatctctgtgcttcgattatcatctctaaagtagggatagctaactatatcatagagatgtggattaaagaggcagtgtatatcaaaagcttagtaggcactcaataaatgttatttttattgttagtaatcaaaaggataatagggcatgagattcatcttaatattgactctgccaacaaactctcattttagtggaaagcacacatttaactacatattaaaatcttgttgtttttaacttacaacatcttcacttccacaattctcttaagaacttatggtttttgctggacaaacaccagacaccacctatgattggagaggaagcgatgatcaattacgaaaactttttgaaggttggtgaaaaggctggagcaaagtgcaagtaagaataatataattaacaaaagaatgtgttatgttaagcattttaaatgcctcaaatattggctgggcacagtggctcacacctgtaatcccagcagttttggaggctgaggtgagaggattgcttgagctggggtgtttgaggccagcctgggcaacttagggagatcttgtctctactaaaaaaattatctgggtgtgggggcgtacacctgtagctactccggaggctgaggtgggagaattgcttgagcccgggaggatgagctgtgattaagccactgcactccagcctgggcgatagagcaagaccttacctttaaaaaaaataaacaaatcctcaaatattaaatgaagtaaatggaatgacatttgagtccatttaagttactaattaaatttaataaaattatttacagtcaaaaaatcacattggtatgaagttattaaaataaataatatagccaggtgtggtggctcatgcctgtaatcccagcactttggga

SEQ ID NO: 75005 - DNA, 1421 bp, Homo sapiens
cactgagccatagtaaagaaattaacttataggtttggtctaaggttaaaaattaacataataggccaggcatggtggctcatgcctgtaatcccagcactttgggaggccgaggtgggcagatcacctgaggtcaggagttcaagaccagcctgaccaacatggagaagccccatctctactaaaaatacaaaattagccaggcgtggtggcacatgcccgtaatcccagccactcaggaggctgaggcaggagaatcccttgaacctgggaggcggaggttgccgtgacccgagatcgtaccattgcgccccagcctgggcaacaagagtgaagctccatctccaaaaaaaaaaaaattaacagatgcagcagaaatgcagtcataaaaggaattcaaggaaacaattacaggcttgttgggaaggaaatgagaccagaaagagtaaaataacttttgagaaaatagatcacagaattcaagagctcagtgaggctgaagtggaaatggtatggcagtgaggttttgaattaccagaaaggatgatctgagagtatatttgagcttaagatttcagaaagggatcaagtaaaatctgtgatcttgtcatagaaccaaatggcagaatgaactagaggtgaaagtctttggagttgcaggacccatggtcacccacataaatgtttattcatcctaaatgattgcaggaccttgtgaagaacactgtgtaccagtcaccatagtccacaaataagtggggaggaattggctgaatgagacagccacgtgccaatagcaggcgagttgcagggtaatagagccctgagttttgagcttcagacagaggatgagtttttttgtttgttttctctacattaggtagagaaacagtgattatgaggctgaaactccatgaggtcaggggctggggctgtcttgctcacccctcattccgtgtctactacagcgttctctgtacatagtaggtgctcagtaaattcttttcattgaatgaattaggagcactctacagagttctgtaggagaggtaatttgaggaagagactagctttagcgataaacagaagtagagggagcatgagaaatggttgaagatgtagaggaggctgcttcagtagagggtagtgattcttggtatttcagaaaagttaatatgctcagtgtctaagcacaattgtgaaggcctttttggcactgcaactattttaattaaactattaatataatatataggatgacctgagtaaaagtactgcttgattttaaaagtgctccccttaatctgttttgttaccagaaaaaaaaagtgaacaagaattaaaagatgaagaaatggatttatttacaaaatattactccgaatggaaaggaggtagaaaaaacacaaatgaattctata

SEQ ID NO: 75006 - DNA, 1339 bp, Homo sapiens
cgttccgcctggcccggcggcgaggaaaaaaggcagttttgaagcatttagtggcaaaaggggtaggagacggctgctgaagtgtctactacattcaggggacctggaaggcttccagatatccgcaatgaacaatgaaaagaaattgtgaaagaaggcgcttccctcaagccggaactaatgaactcctgggtcacgtggtgcgcacgcgccaaaggcacacgataaaggaaaacgcgggcttatcgtggcctttaaaatccggcttggtgagcttgggtcgcctctgaaggagaaccattttccatctctttcatagttttttcccccagtcagcgtggtagcggtattctccgcggcagtgacagtaattgtttttgcctctttagccaagacttccgccctcgatcaagatggtggttggacggccttcctaacctttacggggcctggcggtgctgacgcctgagctggtaggggtggagcaggtaggaaacagcaaatgcagaagctgctgcgcggaagtcggccatggactggaaagaagttcttcgtcggcgcctagcgacgcccaacacctgtccaaacagtgagttttgggaggggcagcccgttgggatggcccggccctaaactcctagaggtaggggggaggtggggaggaggagcaagggggagccgccttttccgcttctgtgaaacctcccgacaaaggaggcggagtggaatgtggtttaaggatcccgataggtttgacccaaactttcctggggcagaatctagaggaacgaaaaacttagctttagtcactgacttccatggtcttaatctaaacttgtgaagaataacttggaaccccggctccaacaacgcctgaaccccaccaggacctataattgtcctcctgcctttttactgtcacgctttttgcttccctcgtaatccattttatatttcataatccatttttccttttatttttctccttcacattgcttattaactaacctcgttaaatctacctttcctattccacacccgcactaagggctgttgaaagtggctggagaaaaacagaaccttggtgagttgtctcacttttttttttgagacggagtctcttgctctgtcgcccaggctggctggagtgcagtggcagcatctccgctcactgcaacctctgcctcccgggttcaagcggttcttctgcctcagcctctggagtagctggaactataagcgcgcgcaaccacggccggttaatttttgtatttctagtagagacggggtttcgccatattggccaggctggtctcaaactcctgaccttgtgattcgc

SEQ ID NO: 75007 - DNA, 1727 bp, Homo sapiens
gccgcggagaataccgctaccacgctgactgggggaaaaaactatgaaagagatggaaaatggttctccttcagaggcgacccaagctcaccaagccggattttaaaggccacgataagcccgcgttttcctttatcgtgtgcctttggcgcgtgcgcaccacgtgacccaggagttcattagttccggcttgagggaagcgccttctttcacaatttcttttcattgttcattgcggatatctggaagccttccaggtcccctgaatgtagtagacacttcagcagccgtctcctaccccttttgccactaaatgcttcaaaactgccttttttcctcgccgccgggccaggcggaacgcctaagtccgggtcagtctcgtccgtcggtcggggctggcgcggtgcatcgtgggcactgtagtttccgccgcgtttatggccgcgttaagtctgagtgccgctttgagttgttgaatgaagtgaacttcatttgtcagcgttcggtacgcagtctaggcagcgcccttcctgtacctctcttcctttcctgagtcgttggcgcagctgactcgccacctcctccctcctcgtccccccaccggaggagttttgcggtctgtagagagctatgcagggtgagggcccctagacttcggctttcgccgctgttggtggtaggctggagttgggggtccctggatacggttttggctttacaccccctttccagcaagcttcccgtgggaatctgttccttttcaggacagctgtgatccacgtgagtaaaactgggcgttccgtcttgtgctttttcctcaggttcatgaactggaatgtaagaggcaccagaggattcctgctctgtcccctggtttgcggcttgcgacgttggacatccccggattgttgtttaatagagaaaactcacctgccttcttgcttttaagtagccccaaaagcagaaccttgatttgtctgtaaggaagaaacacaaaccttttaaaaagttccacttcgactctgcaccgccgacccccaatctctttaattttgccatagaagaggggttttttcaacatctctctcactatctggtgctgatctcactgcataatgactttctatttgtttggtattcgaagctttccgaagctttggaagagcccataccttgggctaggcccagggcactcttatgtctcgctgtttctggcagaccgctgtggcatcaggaaccagcagaggttgttttctcttaaaacaatgtctccacagaataccaaagcaacgaatctgattgccaaggccagatatctcaggaaagatgagggcagtaataagcaagtttattctgttcctcatttttttttagctggagcagctaaggagagatcacagatgaattctcaaactgaagatcatgccttggcacctgtgaggaacactattcaactcccaacacaacctttgaattcagaggagtgggataaacttaaggaagatttaaaagaaaacaccggaaagaccagtttcgaaagttggatcatttcacagatggctggctgtcatagctctatagatgtggctaaatctctgctggcatgggtagcagccaaaaataatggtattgtaagttacgatttactggtcaagtatttgtatctctgtgtctttcatatgcagacatctgaagttattgatgtctttgaaattatgaaagccaga

SEQ ID NO: 75008 - DNA, 1015 bp, Homo sapiens
agctgtggtggctcacaactgtaatcccagcacttcgggaagctgaggtgggaggattgcttgagcccaggagtttaagacaagcctgggcaacatagcgagacctggtgtctatttaaaaaaaaaaaaaaaaaaaaaagctgacaaatacacatatgctttcaggatagaagttatgaaaagggagattataaaacagtgctttcttagtgattttcatgcagaagcaacatcttcctaatcttcctatagtaaagatttcctcaagtaaacatattatatattcattataatataaatagtatatattcattagaaaggatataaacagttcagaaataccactatagagaatgaaagtccccttcttaaagcaaattatactttttaaatgctgaaaattgtcatgtcatttgcacgtttctttttccatttttgaaacgcacaagataaaatttcttaatagagtagaacaactaatttagattcagagtcaattctataaaggtttcctactgtactgcattgtttttgctttgcaaagaggttattaacattttttttctgggttaggggaggagtttgaaaaaatcctgtacaagttaatccattgtgtggtaaaagctatagctgaagaggcaatgtggaatactccagtgtgcacaacccctgcttttatcataggtggcaactgcagattaattctggtgtggttaggcatttcacaaagggaaatatgaacctgagagcctatgtccccaacagtgctaactgggagatgtggagtgtggggatttccactctttgttaataagatctccggcacatttcctctttgcttttgcattttccttggttatgaagcagctgcagagaagtaaaatgtgatttcctgtgtttaaaagagtgctggcttttctttcagagacttaaaattggaagggtggaatgcatatggattgagctacctacagggctaatttaaacataggtgttttatttttgtttttgtttt

SEQ ID NO: 75009 - DNA, 1028 bp, Homo sapiens
aaggaggggccgggcatggtggctcacacctgtactgtaatcccagcactttgggagaccaaggagggtggatcacctgaggtcaggcgttcaagaccagcctgaccaacacggcgaaaccctgtctctactaaaaatacaaaaattagccaggcatggtggcgcgtgcctgtaatcccagctactagggagactgaggcaggagaatcgcttgaacccgggagccagaggttgagtgagcctagattgtgccactacagtccagcctgggtgacagagtagaaaaaaaaaaaaaagaaaaaggatatgaagtggaaagcttctaatgctgcattttctctctcattctctcttcccccacatacctacccataattcagtcctaatgcttttgttctttgttccttttgcagcttgcattttggattttcagtgttcataagctcctctaatagaagatgtatggggggaaaagcacatcattttagttaatcatgctagttcttcaaaattctgctccctatttctgtggataactgagaattggttaaaatggcttcagcagaatgaaaatttataatgtaatttaaaagaattatggctgacaccagcactgaatgctttcattcttatagcatgcttggggcattgaatagaaagtggtttggtgaaaacactgtagaatttgttttgattgccatctgttagttggttttactacagtgagagaaaaatagaggcacaagtattggtcattaaaggtcatttggtaaagtgtttacttgacagtaagttcttattttttctgccactcaagttattttatttctttctgttgatttacataacctcttgtaaaagtttcaataccataaagcacctaagatacaataaactatgctcagtatttttgtgtgtatataatcccgggtgtattttttttttttttttgccccaactgtagaaatgtgagtttctcgatccccatgcttgaaattatgtttcaataacgttaaagtgggaaggaa

SEQ ID NO: 75010 - DNA, 1027 bp, Homo sapiens
gggtttttttcttactattcatttttcatgacatggcaactcagggaagtcatattgccctaggtcaaacagtgccaggctgactacttccttttgtcatgtatcacttcacccactcctgccttgacatgtgttaagagttatgttttgtcatgtgactgctgggatcgtctgcatcactcagaattattcttaccaactgctaatgaagttaatgatcaactgtcaggtgggtttttagtgaagtgatcaagggcataactagcaagatgaatggagccaggcaaaatttctatagtgatttggcttcatagtcctttcttttcaaatgtcccagaaaggaacattctgcatagtgtttgaaacaagatttccccaattgttgtagaagtcaagtgatccagtgtctttgaacagcattaaaaacactgtgttgccaagctcccatatcttttctctctctggcaaaatcctaatagcaagttgatttcccatcactgatgtgtcattgataatgtctgtgtgataaccatttagggtgtggtgagattgtctcgtgagtcattattgtgtatatcttgcttccatcacagtgttttaaaacactctcattgagagtgtggtaggaagaggccacttatgaaaatataatatccattttaacaagaaaagtttaaatatttgttgtcagtaaggtaaacagcaattgcagagtgagtagtaaatttacttaaactgtttataaagctatataaattattcttacctaattattacagtggtaacactttaatcataattttctggtaatgtttattttaaaacagcatttttttccttttaaaattgtttctgtttcacaattttcactaatataaaggctgatttttatcccagtcaaatacgattaagatcagttgattaagatcagttcagatcttagatttcttttgcagtgatttagacatggctttttttctagatagtattaggaagggtatattgttccttagagtattcactctgc

SEQ ID NO: 75011 - DNA, 1357 bp, Homo sapiens
gctttccagcttccaaaatcttgttgctattgtctctaaagtcattgtggatttgtgattttagaaggtctatattatagttttaatggaatttcaagtggggttaagattagatgcatgtgttcagtttgccttaacctgaaagtttatgttctactcctaccaagtgttgacagagattatcacaaaaaccacccaaatgtgtgataatgccaaaagaaactcttttttctctgtcttttgttttattctttcctctctcttcttttcttttttgctctttctttgttttggatgcggggagaatatagtaaggattgggagctctaaattccctaatcccgtcccgattgcgtagtaatagctaacatttattgagtattttcccatgtgctttgtgtctacatacattatctaaagtaaccctcataataacccaattattatttctactttaccaatgatgaaacaggctcagagaggaaatgtaacttccccaaggtcacacagttggtacatagtagaattagaatctgaacccaggcagcctgatgccaaagcttgtgctcttaattatgattattgaactattaagtaatagaagttggaaaggtctctattatgtgtctatccagttttatttatgtataagtccttccaccgcagagctgcatagattgcttaaaacatgaactggagatgtctaaggtgtctctccctccctcccttcctcccttcctttctcttactattttttctgcttccagtcatccattataaggtgtctttttatatagccaggtattttatatatttcgaacagacagtactttaccagaaaacagaatccataaccatagtgtacaactgtgtggggctttgtagcaagacaaaagctgtgtaaattagtgcagccatggccaggctacacaagttttcaagcttctgaactccccactcatcttactctttctcttctagtcatgaaatggagccctttgatcctgacagtattcatatactttcccagagtgagcaaattattccttatatatggactggacctagaaccctagggtgaatttttaataaaccttttgagagtggaaatttaatcaaattttgatatttccatatcaaaataagttagtttaatcttcctgaaattagttttcagtcttcagaatacctatcctttcttgccttacaggatagggaggaaacacagatatcttacagagaaaataaaaagaccaaatgcatataaatgtttggagaaaagtcacactgtgagtcaggaggcaaatctgtcttctagacagctttgactctcagctagctgaggaaatccatctag

SEQ ID NO: 75012 - DNA, 1053 bp, Homo sapiens
tccctaaaataccaaagactgacgaaagcaggatataggacatggtgggtctaatgtaaaccagtgggatcatttatgacattataatgaagtaataatattttgtatatatccatatatccattttttcccaaagagattcaaaatgctttatatagtgagtcagtcattaaatacttttagatctgtgtacaaagaggcagaagtaggactcctgctcagtcagcctcagcctctctcctctggatacaccaccagacttagaaagcttgcagcttacataccacctggtgaaagtttccttttctcatcttccatttctctcattttcatcaagtgctaatctgtctgttgtatggtatatagctctgaagtagttccagcaagacaatatgatcaagcttcctttaaataaatcatgatctctttctctctctgcaagcagcaacagctgtcaaaggtagaactgaagccaaggcagcaccaatggagcaggctgctaatgaaaatatgacaagaatatttgaaactagaagcctcaagccacaactttgttaggtttcctgcactctccaccttggtggcattttcagaggtacacagaaaaatgttgaatatagcagtcacttgagaaatacagtgtcactctatgtctgggacagggattctcgtcccaaaacttagctcaagagaaaaacaagaggaacgaagacaaagaagggacttaaactgggtattagctaacctacagagagtaatagcatcataaaaacaagtagaaaaccgcactggactagtgtaagttatgagttccctgtttttttccactgtacattttgtggcgagcacaatgcatcaattacaggcattatgtttgtgatatcctgagttctggaacactgcctcaagagagttcatcaatcattgtctttttccctaaagtggtcttgcgttctctcagtctgtgggaaataattgtcaaaattaataaatgcacatgaaagaatatttacttttcttgctttctcctgtctgcttttgacttaaccccat

SEQ ID NO: 75013 - DNA, 1171 bp, Homo sapiens
gctgatccaggtgactgtctagaagctgctctgaaataccagttcagctttaggggcagccagttatttggtggcttgcaagaaagtctcatcctgccctagtagtattttgggtgtttcttgaatttgggtgaagagagagggaaaaggtgtgctctgtgatagataaggcaaataggaaaaatgcccaaagagaagcaacttttaagtgtgaagagagcattgttagaattcatcgttctagtggaagagtccagtgagctgtgagaatcccaggcattagcattctgttcccctcagctttccatctgtgttctagatagtattgcttaccagctaaggactttgaggtggttcttaagtattactagcatcatgttggtcaagaaatcagaggcacctccaaggaaagtaagtaaaaagtacggtgaaaaacactgtcctctgcctcttcagctgtgcttgattgtgtcctttcttatgcctggttcagctcggaggatgatccattccttctgtatgccacactgcactccgggaatcactgcaggtttatcacaagagacctgatgcgggaccacaaggcctgtctgcctgatgccaagacccaacgcctgttttttaagtggcagcagggacatcagctggcaattgtaaataggtttccaggatcaaaactaacctttcaggtaatggtacctgttctttatgtaatattaacagagtcaagtatacagtaagaatgtggcatagaaaaagagtgtcacaactaattgaaggttgcaaatgctttatttttctcagttttaggttagtatttggaactagccaggtcctagaaagagtctgctagagttttcataggccaacctcaaattaattaaaacacttaggggccaggcgcagtggctcacacctgtaatcccagcactttgggaggccgaggtgggcaaatcatgaggtcaggagatcgagaccatcctggctaacacggtgaaaccccgtctctactaaaagtacaaaaaaaaaattagccaggcgtggtggcgggtgcctgtaatcccagctacttgggaggctgaggcaggagaatgtcatgaaccctggagacagagcttgcagtgagccgagatcacgccactgcactccagcctgggcgacagagcaagac

SEQ ID NO: 75014 - DNA, 1066 bp, Homo sapiens
ttgttgttgttttgttttgtttcgttttgttttcatatattttcaatctgtggttgtttgccagggatacagaacctgcagttgtggaaggctgactggatttgaaatttttcactctcacacacaaaactgatagagccaacaaaagaacgtctgtattacataaatgtaatgcttctacagagagtctttagacttaaaaatgagacccctcaaaaaaaggaactcctaatattagggctcatcttcacagagtttgctgctgtttgaaaatccattattaagtgagataatccattatcaatactcttctggagcaaacttgagaagtgtcagaaagagaaatggccaagtagccctttagtgttgttctcaatgttttgttctctttttaattcaacagcgtattctcagctatgacacagtggtgcaaacaactggagactcgtggcacataccatatgatgaagacttggtagaaagatgttcctgtgaagtaccaaccaaatggctttgcctccaccaaaagacatagagattcttacctctatgctaagtttgtgtttgggtaccctctaggttggcatcagaggctcttgagctggtgtttgtttagggcattgcctctgtcctgaagataaaaggattctattaacagcattgacattgattttttaatgaaatgagatatatcttttcataaccagctgcgtttttttcccctaacatttgtttttggaggcttatcaagagttggagaacttagtgtagagcaaaacctgcatttctcctactgggccagctattccacttagcttgggtgactaatagtgcttttggtatccattttttgctacttctgaccttgccttccaggcctaccaatagcagaatcaatccatctgtccctgagatactcatgttgtttcaaatgcctcctcccatttctggcatagtctcattctctgtatgttatgccctatccacatggaatcatttatcgtcctctgtaataaactggccaagatactaaaggcttactattcatagcagtttttaattactt

SEQ ID NO: 75015 - DNA, 1149 bp, Homo sapiens
tcagaaaataatgttctttccagcggctgcttgaacccgcttccttcagtgcctaaatttaacggctgcagctgcagctgcaacctgtttcccccgtaataggaatgaaagtggaggataaaagaggttaggaagaaggcaagccagcagtctgaccagacacaggatgcatgtaagagacttgttaattacacgttctatttaggtcacactgataggcaaatcgctattctgggcccccaggaagccttttcgtccttgctatagtcaattcattctccagatgaaagcctgaaagcgccacgacccaagtttcacgtctatccactcaagaggcctgcttggcgcaggcgcataccttcaaaggcctcccgccctcactccaccacccccttagggggcggggcctcagagctcagtgctcgaactggctccagagccgtgagttcggcatgcaagagcggaagaaacgcggctggtaccccggaagcagtcgctgcaacttccgggaggtgcttgtgtgcctggtgcgggagctacggggcccagggattgtgtttaaagtagtgcttctaccaacatgtcccgtggttccagcgccggttttgaccgccacattaccattttttcacccgagggtcggctctaccaagtaggtgagtgaaccaggttcgcctgtgggccacctgaattgccctgtcatggtacgtgcctggagcgagcagacgcggcccgggtttagtctggggccgaagctgggctggagctgggaagggagaacggctgaagctggattgagctctgtggtgtttgcacccccgtctggacgcagggatcgggggcctgaaggcctgtctctgcagggcgagcggccacactgcgtagacccaatggagagttaaggaagatagggctgtaatgcctgactccggcttcgtgaggccccttcagttattgtattctgtcctggccaggcacaaggtctgtttctaaagggtaattgattccttaacgtctcaactaaaatgcctcctctccgttttcctttgtttgcagcatggacttctgtggttaattccacacaggcactcgaagcctgctatataccagacactgctagtcctaggagatacaaatgtgaatgttaca

SEQ ID NO: 75016 - DNA, 1113 bp, Homo sapiens
gcaatggcgcgatctcggctccccgcaatctccgcctcccgggttcaagcaattctgcctcagcctcccaagtactgggattacaggcatgcgccaccacgcctggctaattttgtatttttagtagagacgaggtttctccatgttgatctcgaactcccaacctcaggtgatccacccacctcggcctcccaaagtgctgggattacaggcgtgagcaccgggcctagcaccagcctagacagaatgattttaatctctgtgaataacacactccctctgctattcagggcattaattagacattgttaggaaaatgaaagtgaaagagtagtatgagcaagcagtatagtgaagagttcaggccctggagtcatacatggattcaaatctctgccctgctccatactacctgatctgggcacttgccaggtatgtaaccttagccttagtttctctttccaaagttgggctcataataattcttccttaaatggtggttttgagaattaaataaggcaatgtatgtagagtgcttaacgtgtgcctgccacatagtaaatgctcagtgaatgttattagatgcttgtttgattctttggcccccccttttttttttggtctattagattagtagctctgtatggaatatttccctttttatgggtccttccatgcttagttctccagtaaaatatatacataatcataatattctaaatactgtctgtttgtaaactttagaatcctccaaagacaaagcatggaaggattataggatgcaagttgttaacattgacagtaggaaaataatattttaaaaatgggatgatgatgaggggagattaatggaaggtaactatgctctttatcttccatacttgggactcaaaagataaatgtcgtctaaagttgatatatcaaaaaatagaggtagacatttaaagttataatgcttggccaggtgcagtgcctcacacctgtaatcccagcactttgggagggcgaggtgggcagattacctgaggtcaggagttgaagaccagcctgaccaacatggtgaaactctgtctctactaaaaatacaaaaaactagctgcttgtgctggcgtg

SEQ ID NO: 75017 - DNA, 1050 bp, Homo sapiens
atcacctgaggtcaggagttcaagactagcctggccaacacagcgaaaccccgtctctagtaaaaatacaaatattagccagatgtggtggcacgcgcctataatcccagctacttaggaggctgaggcaggagactagcgttaacctggcaggcagaggttgcagtgagctcaggtcgcaccactgcactccagcctgggtgacagagcgagactctgtttaaaaaaagaaaaaaactttattggaaattgggtgcatcagcttaatgaaaataatttcagtaaaatgaaaatggaagaaatggagttggtttaactgtgacttgtggtcattattattattttgactttgcacatcctggaatgctatatgagcattctgtgttcatgtagctctttctcattctttttaatgactattatttcattgcaagaatctacagtaatttattccaacttaaaaaaaactgttctgttttccagaatatgcttttaaggctattaaccagggtggccttacatcagtagctgtcagagggaaagactgtgcagtaattgtcacacagaagaaagtacctgtaagtaatactgcccaaatagttaataattgcagaatataagaatttttcagccaagtgcagtggctcacacctgtaatcccagcactttgggaggctgaggtgggcagatcaccttagatcgggagttctagaccagcgtgaccaacatggagaaaccctgtctctattaaaaatacaaaattagtcaggcgtggtggcacatgcctgtaattccagctactcgggaggctgaggcaggagaatcacttgaacctgggaggtggaggttacggtgagccaggatcacaccattgcactccagcctgggcaacaacagtgcaactccgtctcaaaaaaaaaaagaaaaaagaaaagaaaaaagaatttttcatgggtttgtagaaaagtgtatttttatatacaaatattaacataatcttgctttgaccctgctttcctgtcatccaagaagtgtctattgaacgtctat

SEQ ID NO: 75018 - DNA, 1010 bp, Homo sapiens
gggactacaggcatgcaccaccacgtgcagctaattttatgtttttagtagagacaggatttagccatgttggccaggctggtctcaaactcctggcctcaagtgatccgcctctcttggcctcccaaagtgttgagccaccatgccctgcctccttaatgctttttcttttgggagttactggatacttgcagaaactattttgactgctgatgaaaggctcagtataaaaggggagtactgtgtagagagcttcatgtttttaaatttttttcatatacttgttgatgagttatttagtattcattgggggagaaaaagccgtagcggaccctttctctttaactcatgtatgtctatatggtgggaaaattgcctggctaaattgcctggctttcaggtttgttctttccttctaaccaggtaaatctttgttttttatgctataagctgacagcagatcccaggtacagagggcacgctatgaggcagctaactggaaatacaagtatggctatgagattcctgtggacatgctgtgtaaaagaattgccgatatttctcaggtctacacacagaatgctgaaatgaggcctcttggttgttgtaagtatgctaagaggtctcccaaataattgatgaattgaaactttttacagaacatgtatacagaattatttaaataacacttgagttctgaacatgtggtttggaaaatacatagagtgggaaaatctttataataaatcagaactaaaggataggtttcacaacagtatgtcgggcattatctttaagctttagatgctgttagactttttatcaaagtatttccatttggtgtatgtgatttgaaagatgcaagtcctcattattaggatgttgtaatgaggttctactgcaattcgagattactaattccatagaaatacctgcatcaggcatcttaataatgtagctgtttgttttgaccaccctaaagaattagggtcacacacaggtgtgtaatt

SEQ ID NO: 75019 - DNA, 1066 bp, Homo sapiens
gagcgagagtctgtctcaaaaaaaaaaaaaaaaaaaaaaaaaagtgtttttgaagtttatttgaccaggcaacatcttgaaggattagggttcaaataaacatgcttggataacagcaaggattggaaacactatttttaaattgtatttgtaattattcaaactattttttttaatctgtgataaatccttttgtgaaatgggaatttacctgttacctaatttacctgtggtgataacctgtattttatcagttttcttaaaggaaaatacatatcctaaaattgatggccaaagtcatgattagcagcagctatgtgacaccaccaagaaagaggagatgtcattgtataaagctaaaacatttaattagggtcttttctctttttaggtatgattttaattggtatagatgaagagcaaggccctcaggtatataagtgtgatcctgcaggttactactgtgggtttaaagccactgcagcgggagttaaacaaactgagtcaaccagcttccttgaaaaaaaagtgaagaagaaatttgattggacatttgaacagacagtggaagtaagtcaaccaaaaggagctgactttttttatgctatatagaacagtgaggatctttgtataatttctatacaaagctattcctgaattacatcccaggattcaagttgtcaacttaataatgaaattgatatcatacagctgacataggaaaatttgagttgcttttattcacttaattccttatttcgtaatgtatttgaggtggctttcaacaaaacgcatataataggaaaatataaataaaaataggaaccagctgggcatggtggcacacacctgtagtcccagctacttgagaggctgaagctggaggactgcttgagtctaggtgttcgaggccagtcctatttactgccaagaaattaaaaacaaaaattttagtagattttgggtgtaagtctggaattaaagccattctgaagatgctaacaacatgcttctgataagtgaccaaaaaaaaattaccatctaatgcttttacgtttggtttgga

SEQ ID NO: 75020 - DNA, 1194 bp, Homo sapiens
ttgcagtgagccaggctggcgccactgcactccagactgagcgacagagtgagactctgcctcaaaaaacagaaacaaaacaaacaaacaacacttaaaacattcttaaatcgtttttactgtaaattccttgaagatgcagagagtatcattcatctttatccttttcccatttcaccccaagtgctaagtgaagtgtagtgcctgggtcatgaagccaataaacctttttgtataaatcatcctattttaattaatggacccctttattatttgacttggtagaaaaaaatttctcatcattgggaggcaatacattagagttaagcagtctgttagtaacattgaactacctcattgaaacatggagctcctgattgactcatgatttgaataagctaggaatgagaaaaccttggaatctctaaaaaatactatattttaacattaaatactttttttcagactgcaattacatgcctgtctactgttctatcaattgatttcaaaccttcagaaatagaagttggagtagtgacagttgaaaatcctaaattcaggtgagtgatattgtgggccacatgcagactagaaaggtggaggcgtgtgagtccatgtgtcctataacttgtgggggaaatcttttttctttaactgtcattatagtttttgtttgtgtgtttgtttttttccccagcacctgagatctgtttttaaaactttggactctatttaagagtcagatatgaaagcttttctccttatttcagagtgattttatatctaacaccagagatgacataaagttaccttccttatgtaaggaaaaaaattagcataagtgttttcttttttttagtttaaggccaatacaaattcaattcccaaagtagtagtttgcaagtttttcagatagaactttggttatttagtggttatttaagtagaactttgaggagcaatatgagttactgatatatgtcagacccttatctagagatctttggaaagcccaaattttgaatacagctaattgacttgcagttgctggatgtgtgtgtgtgtgtgtgtgtgtgtgtgtgtgtgtgttcttactcactaagtgactaactcccacacatcagccttatagcttccatgattcaaatccatactgagtgcttcgtataatcagctcatttaatcctcccagca

SEQ ID NO: 75021 - DNA, 1058 bp, Homo sapiens
aaaaataaatgcattttgacatagaagctaaatagaatactttatagtttagctttatttatgttattcaattgaaatattttctatcttagctgcaactaaagaattttattttcaagatacaattctaaatctgatgtcaaagtaaacatttttgtgtataggtgaaggtggtataatatctgggaattccttcaaaataatctgagggaagataagtgtgtgtatagattttttaaagattggtttataaattgataattgttaaagtaggttgataggtatatgggagtttattatactatcccacttttacgtgtgtttgaaaaaattttttttaaatcgttgtttttttcccccttttgccttctaggattcttacagaagcagagattgatgctcaccttgttgctctagcagagagagactaaacattgtcgttagtttaccagatccgtgatgccacttacctgtgtgtttggtaacaacaaaccaacatcatggaggtccctggattgaaaaaggagcctctcccactcctcctaccaccgaagtggttaggactctatataaataaaaacaaggcttttggaaaataattgcatcctgttgttttcacctcctattttaaaatttatttttgacacctaatgtacatatttatggggtgcaatgtgatgtttcgatacatgtatacattataatgatcaaattagggtgattagcatatccatcacctgaaacacggtgtttttgtggtgagaacatttaaaatcctctcctctagctattttgaggtacacaataccttattagttttttgttttttaaaacaagatcttgctctattgcccaagctagagtgcagtgccatgattatggctcactgcagccttgaactcccttgttaagtaatcctctcacctcagcctccttagtagctggtactacaggtgtacaccattgtacccagctaattttattatttttttgtagagttggggtcttactatgttgcgtgggctggtctcagactcctggctagcattaagcgatcc

SEQ ID NO: 75022 - DNA, 1905 bp, Homo sapiens
caggttcctgcacttggccatcatccatgaagaaaaggcactgaccatggaagtgatccgccaggtgaagggagacctggccttcctcaacttccagaacaacctgcagcaggtgcgccgcttgcctggcccgggttctctctgaccctgggacgtagctgatgtagcagagtcaccccagatcctttctgaattcagggccactgagcactatttaccctcaccttttacttcacatcagcccacatcctagagagtgaaggaaattccactgatttggtgaggtctttatgacccacctggagcctctgctatttgccagccctccccacccccctgtctaggaggagcagcacccaaccaggagacacgggttgaggggaactcggggtgtgggtttggtccatggcttactttctctggtctctcttgcattcgtagactccactccacttggctgtgatcaccaaccagccagaaattgctgaggcacttctgggagctggctgtgatcctgagctccgagactttcgaggaaatacccccctacaccttgcctgtgagcagggctgcctggccagcgtgggagtcctgactcagtcctgcaccaccccgcacctccactccatcctgaaggctaccaactacaatggtatgtctgcctccctgccctgccccaccccctcggagggcaggtgacgtggagaaggggcaggtgggccaacttaaggagtccaggcaagagcttaaactcctaacatttggaaggttgagaaaatatgtgtgcaaagtgcctattggatgcctttataaagttctttcagaacccagactgtgggttcttaaaattcagaagataagactacttgttccataaaagaataggtgaaaggagtgagggttgaaacaggtggttatacttttttccttttgttcttccaggccacacgtgtctacacttagcctctatccatggctacctgggcatcgtggagcttttggtgtccttgggtgctgatgtcaatgctcaggttggtgcttcctgcccccgacgcactgagtcaggctcctcgtgcttatgttgtgagcagaaattccaaatgcagccataagcatctcaaattccttttggtttcaggagccctgtaatggccggactgcccttcacctcgcagtggacctgcaaaatcctgacctggtgtcactcctgttgaagtgtggggctgatgtcaacagagttacctaccagggctattctccctaccagctcacctggggccgcccaagcacccggatacagcagcagctgggccagctgacactagaaaaccttcagatgctgccagagagtgaggatgaggagagctatgacacagagtcagagttcacggagttcacagaggacgaggtgagtctgtgaactccttcggcgctctaactaatgaggtgccattcccttcaccctcccaggcccctagagctgctccttatcagaggggtatctacataatgagtctctcaaatttctgtgcataaccagtatcccaagaatgtacctgccccccctctttttttaaagagaagcattaaaggcaaactctctcagcctgtaaagttcattatatttgggctatggagaatggagtccaagagttatttccagtagtggcctccccatcccggtagcttggcagagctccgctccggaagcttaacgtgtcttttttccccttgttttcagctgccctatgatgactgtgtgtttggaggccagcgtctgacgttatgagcgcaaaggggctgaaagaacatggacttgtatatttgtacaaaaaaaaagttttatttttctaaaaaaagaaaaaagaagaaaaaatttaaagggtgtacttatatccacactgc

SEQ ID NO: 75023 - DNA, 1008 bp, Homo sapiens
aaatacatctgaagtgataaaaagcttacttcaatgccagccttatggctagtgacaggcagaacaatgccgccccccgccaccctctgcccccggatgtcttagtcctaattctcagaatttgtgattttgttaggttatatggcaaaagggaatttaggctgcagatagaattaaggatattaatcagacgaccttgagataaggagattagcctgtcttagccaggtgggcccagtgtaaccataacagtacttataaacagaggagggaggcagaagagaaacagggaaatggcagtgtgaaaaagacatggcctgatgttgctggctttgaaggtggagggatgaggccacaagccaagggatgcaggcagcctctaaagtgggaaaaagatcaggaaactgagtcttctctagagcccccagaaggagcacagttctgctgcccccttgatttcagcccagtgagactcattttggacttctgaccttcagaactgttacataatacatttgtattgtttaagccactaaatttgtggtaatttgttatggcagcaatgggaaaacttatacatggattgacagaagggaagctgaaagtgaagaggcaagtaaagatcaaggcactgttacacacgggcaaagcagtagacatggaatcagaaattcccagttactgttagtatctctgtaactcaattacttaacctctctgtgtgtcaatactttcatctgtatgaagggctggtacttcctcagatggctgttgtgaggaggaaatgaatcgatgcgaacccttagcacagtgcgtttggagagccctaacacatgtgcaccgctgttgctgctgccacatgccatcactacgactgccacagggttaatggtggttttttgttgttgtttaatgagtaggtgtttatttacaaaattatgtgtaccatatatacataattcagacaaaattcacaaatgaaggattacagattaaaattacattagc

SEQ ID NO: 75024 - DNA, 1031 bp, Homo sapiens
gccactggtaccttcagaaacattagcgcccacctctatggcttcctgaatgttgctaaggtctttaactggcatgatcaatttctcgggggtcttacattttgttatataactaacttttcctcaattatatacattacacatattgctggtagaaaaatctggaaaagtataaaagaatgaaaagcaactgcattcttcttatcaaagaaaaccactattattatcttgatatatatatccttccatgttgtatatacatatatagttgattctcattatcttggtagtcaagctttataaaggcattgggaacaatgaattagcaaatagccgttgttcctaggggaagtatagagttaggttcctgtgaacctctggtcataacattttcatcaactgatcaatacataaccttgattatttgtgtatttatgtttaaatacactaatctatattgttgattcattaacattgaactcaaggctaacagcactatcactcattcctgaatgaaacttatcttaacacaggtattttctctgtaaagcacatcacagactctttaactgagaaacacttgacagtacttcagcattatgcttgggggtattttatttatttatgttttgaggcagggtctcactgtcgcccacgctggagtgcagtggcatggtcacagctcactgcagcctcaacctcctggctcaagagattctcccacttcagcctcccatgtagctactacagggatgcactaccatacctggctaatttttttttttttttttttttttagtagagatgaggtctcactatgttgcccaggctggtcttaaactcctgagctcaagcaatcctctggccttggcctcccaaaatattgtgattataggtgtgaaccactgtgcctggctggcttttatttttttgggacagagtctcactctgttgcccaggctggagtgcagtggtgtgatcttggctcactgaaaacttgacctcctaggttcaagtgattctcatgcctc

SEQ ID NO: 75025 - DNA, 1070 bp, Homo sapiens
cctgggagataacctctaaacccttggaatatcctgcctgacaagaatgtctgtttgtgtttttcttttttgagacagggtcttgctctgttgcccaggctggagtgcagtggtgccatcacggctcactgcagcctcgacctcccaagctcaatcaatcctcctgcctcagcctcccaagtagctggaactacaggtgtgtaccaccatgcctaatttttgtattttttgtagagctggggtttcactaggttgcacaggctggacttgactcctgggctcgagagacctgcccacctgaacctcccaaagtgctgggattacgggcatgaaccactgcgcctggccaagaatgtctttgtatagtgatcataggccatgtcagataagttacacttgtgtgatttatggtgaacacctgttcttgtttacctagggcccaggaccatactgtatcagttaggcatctgaggacctggagactgagtagctaaggtcagtcacataggtgctctgtgtaatatactgccctttcctcccaaaaaaaccttggacatctaggctcagatgagtctccctggttaacaatactttgtacatattgtcacattgtagctgggagaattcagagatctgctgggagagtacaactcaaagcttgcacttggtttctcctggactctgcttcatgcacctttctcctttggtgattttaatctctatttttttctgtaataagccctaatcattagtataacagcttttctgagttctgcgggtcattataatgaaggattgaagctaaatgtggttttggggaccaccccccaaagcagtctattatatatttatatacacatgtaggattatgtgcaccaaaacatatataatgtattttatgggagatttaagaggttttcaagggtaattggctgtattatacttgatttttgccttacattctatttttagaaaccaatccttatcagctgcaattccactattaaacatctttttgaatgcttattggccatttgaatttcttcctctgtgaattgtctattcacgtt

SEQ ID NO: 75026 - DNA, 1258 bp, Homo sapiens
tgctaatgggtcttgggaaccttctgggattatgaattcaagtttacagttagggtttctgctttgcaatctcaaatgtggtttacctggaacagttagcatttcatcttaaatggtatttaatagaacttgggagctcttcagagcaggaacttcaatttttgttgttgttgttacctattgcaaagcactaaattcactgctagagaaaactagcagttacttttatgtgtacatcaaatcgttctttacaatcagatagagatcatctctaacatttaacaaacaattcaaaaaggcacaaagtttaccacattaatgtgtgtagaggattcacaactttaataattaagcaaaatctttgatacttgtatgaagagaaggtagacaggataaacaacaggaaaactaacttatggatttctttaaatagtggatagggacaattcattccctcagatatttgtaataaaattttagaaccagaaaatatctacctaggaatactaacgctcaaactttagcatgagattgatctgcaggtctgagctcagctaacaacttgtatactgtcaaagcagagactgccctttcaaacctctccttgggaaactaattagcagaataataaaaaggcaagatcaactcttgtcttccttgttggggatataaaaaaacggtagttctaattagcaataattaaaatttaattaagaagctctttgcaatcctcctccctgcttcctgaactagtgcttgccagctcttggttgtggagctgtttttattcccgtggtgctgaatcatggcttaatcacaaagccttagatcacagcttatccagccctgagcactcatcaccacagccttccaagagtaacaaatatatattctagattttttaacccaagcgattacttttttcagttttataatcatgaattatgactttttacttttaagcagctgattatagatgccattatagatgattatagatgaataaaaattgctttttatttttaaacttatctttatatttgttcccctagttctaccccttgttgcaacaaaaggataggagacctccaagaatattaaatatttgaacccaaatttctacttctgtgctttaaagtaaagcaggtaattagcttaagtataaaaaactaaaacattggtaaaaccccagattttaaaaataaaagtatttgattatataaaaataaaacagtacattgtagatgaaggttaagga

SEQ ID NO: 75027 - DNA, 1134 bp, Homo sapiens
tgaacctaacaggattctacatcaaggatgattatttttagatcaggcaatgagctgaacttctttggtcccacatgctgagctgcaaatatactccctagtgactttttatcacttaaggtattctgcaaagtattctctaatcttcctaaaaatactaatcctgagtacaacatgaagggaccagaaagcaaaaatgtatctgtttgtcaacaatgtaataattattgtctctgctccttgataataatctggctggtaataaacctttgatggcctctgatcctggcccttcaggatgttgatttctggttggaaaagttaattctcctggaggataacaagatagaaaaagacagtcttctatttacattcctctggcagccaggtttaaacattaaggtataaaacctcccaaatctcctcaaactgtgtttgtttttgtttgctacagcctaaaaaggaatccttccttttttcttttatttcagaagccttttccattttggttggtatggattataatgttaagaaagtactgcggattatttgggtttagttggaagaagagactattttccatctatttctttctttaatctcttgtttttttggctcttatcctcaccactctacagaaaatattctaaaattaactgctcctggctaaacctaatagtcttttttttccccttggcacagtttttttttcctttttattttgaaataattatagattcataggaagtcatgaaaattagtagagacagatcctgtacacccctcccccagtttctcccaatagtaacatcttacataataaaatcttatatcatcttatataaagaaattgagattttaccagttttacatgcattcatttgtgcatgtgagtgtatgtggtagttctatgcaattttatcatatgtgtaggtttgtgttaacactaccacagtcaagaaacagaactgttctattgccacaaagatcccttatgctacccctttttacagttatacccactccctttcctctctacaaccccaggaaaccactaatatgttctccatctccataattttatcattttgagaatgttgaataaatcgaataatataaataagtaaccttttg

SEQ ID NO: 75028 - DNA, 1045 bp, Homo sapiens
tagtttgaagtatcaatgaggtgctacattggctaacaaatatgctgaaagtctccctgtaaagtaaggacatgtatgtgtacagttaaacctgcaacctgtgtggtgtttttgtttgtaaaacacataaagaaaattttcatgtacttaagacccagaaaatctggattaaaatgccttaaaatatccagaatctcttgctgttattgttttcagatttttttttctgaaggacttttatttttaatgtgattttaattaattactcattttgtttaggaaatatttgaaagcctacagtgtgcaaggttctgtagtattgctgcatattagagaatgataatttatagaaataaagcacagagatgaaaaactactttataaatgacacaaagaactttcctatttgattttgttttacttctaaaattgtatatctactaattctactggttacctgcttgcttatgattgaataagatacctgcaaaagtttaagttaatgaaaacaaaagcattgtttatgtcttttaaattaagacattttgggggagtcagtttgcctttttttaactgacattcagaggagaattcttgtcctcccctcatccacaaatttatcttgctccttcttaaagccgtctttaaatacctagcatgtatatgatctcatagtgctgagttcctttttttgttttgttttgtttataagggcatctagtgaaactgacttcctttttgaaacccgtggttccaaaactgtttggaactgtttggtgctgtttttcaagtttgagtagtgaaggctcttttcttggttgtaccctgaatcctagagataggaattggtccttctcacctgcttcttgaccccttccctgcatgctgatggtgctttggatccctgttctttctggctcaaagattttgcttcccactgctttttccagggttctagccctgggaatgatgattggcgctttcttgctaatataatgacatgagccaccagattgctgggttttaaatacattagtaggctatt

SEQ ID NO: 75029 - DNA, 1071 bp, Homo sapiens
ctatggtgatggaaatgttctatatctgcactgtctaatgtggaagccgctaactacatgtggctgttgaacaattgaaatgtggctagtgtactgaggaactgaatttttatttaattcattttaattcaataaatttaaacttaatgtggctgtggctaccacattggacaatgcagctctagagattttatgtctgagtgattaggataacatgccaacagtacagtgaacactttaaaaggtagatatttacagaatctctcatagaccttttttcttcttttcttttttcctatttgaacttgttttgttagttggtaagtataacatttgaatttacaaagcattgtcattgtgaaccatcaccctaatgcattgcatgcccaattatatttcataataaaaaccttgattcctctctctctgctcctcagttaacacctagaaaattctgcactgtgtctctcatatctgttatctatcttctcttttgctttctcacttctgcttgctactccatttcttcattcacaacaaagaaagaaatgcagtgatagttctcttcctcccaaaacctccgctagaaaacattggccatctcaaggtaaacagcaatgggagggcctctcgtgatggccgggaatgatatgcattaccagaaaagcatgagctactactgctcttcactttccttctgccatccatctgcagtgcttccctaaagggggtcatggattcatattctcccataaattttccagtatgggtctgctatgaaccaattcagatcttcaggaagagtaaaggtgaacagaaatatgtttccttctccttgtattttgaaggccagtcttatttcaattagaaaataatgctggaaaagttactttgagaagaagggcaattgacctggattatgagtgacagaatatttttccttggaaacatatattttttcttaagtataactctaacatttggtcttaaaaactttttgaaggccgggtgcggtggctcacgcctgcaatcccagcactttgggaggcccaggagggtggatcatgagat

SEQ ID NO: 75030 - DNA, 1051 bp, Homo sapiens
gcaaaacccttctctactaaaaacacaaaaattagctgggcatgatggcatgcgcctataatcccagctactcaggaggctgaggcaggagaatcacttgaacccgggaggcagaggctgcagtgagctgaaatcgcgccactgcactccagcctgggtaacagagtgagactccctctcaaaataaagaaataaaaataaaaaataaattgtgttatttcctttatgatattcagtgccatccatgctaatcttaataacttatcaactcctttaaaaatattaaaagcaaggttatttgggtagcctttaacctttaatataaggttatattttataggactatcaacataagagaggataaatttccttcaaactaaatttaatggtatgttgtgcttttcacatttgaacaataatattttgtataggtggtcattttcttcaaaaatgttcctcatttctatcccttcgtttctaatcctcatctgttctgattcaaaatgtatcagcttttatttttctctgtttaatagcattattatgtagctatacttactgtgctcctactatgtgccaatatctttgcatatgtaatcttaatccctgggatgacttgacaaaattgcaagtattagctccattttacgaatacaaaaatgtctcaagtcagtttgcccaagatcaaacagctggtaaagtgacagagtcggcatttaatctaggactgtctaacctatgcccatgttctttctaacaaatcacatcgtcgctggagttcagtattaattgaaattgcttttaaagatataatattttatagggctatatctgcccaataattagcagctttaaaccagtcatacctgtcaccaaacagtacaaacgaaaccacaataaaaaatgatcttttgagctccctcttataatccctatatatcccaaaagtcatatccattatgttaattgtaataatagtttattgtaatcaatgtgcaatatatgaatcaatttatcccatcagattacacagtctgtgtgagcactgtaa

SEQ ID NO: 75031 - DNA, 2070 bp, Homo sapiens
cacttctgagacattaaaggatgctacagcagccaagtcagggttctgttggcttcatttttaatgtgtcttacaaaattattgtgtaagttgtttaaaataacacttatgattgtctaaatagtagtaaaaatgtgaatttgaacataaacctaatattgtgctacagattttttcagttaatttttaagagttgtcactgcatttaagaaccatcctctaattttaatatgcactctgattttcaaaagggtgtttttgcttgtaaataacttgtgccagtattactgaatacgtttctatataagtttttgcagactttaatagttatgacataaatttttatcagagtggttctcagttcaacacaaaataaaaatgaaatatttactcttaagagtagcaaaaacatagaatctgaaaaataatttttttccagttatctcaaatcttaacttttctgtcataagtcccatacatatagagctccctttaaagttataagtcaaagtggacagagaagacataaaataagctgtataatagcagtttggacctgactgctggtttgcaaaaatgacataatagtgtaaagtttttaatctttttcctagcagaagtataaaatgtgttcaccacattgaaaaaatggattcataattgcaattgaaaaatcaactttagatatcctgtgcacaccctatgtatataaaatagtactaatcaatactaatatggtcatttgaaattaaattttaaagaaatgccaaaatggtgattatattctgtctaaccaaccctataacataattatattcagtggaatagtatagaaaaataatatttattattattattattattacactttaaattttagggtacatgtgcacaatgtgcaggttagttacatatgtatacatgtgccatgctggtgtgctgcacccattaactcgtcatttagcattatttttttaagatttcttaatttggttcaagattatctaaagcccactttctggttagcggtaacgtgcaaatcaactgtggtgacatttaaatccgagaaaacatttttccgtattactttcagtattattaaaatagatatgaaagattttggtgcatcatagttgatccataaatttcataactgtattttctcaaaatgtactgtctgtggcagtagactgatacttaagggaaattatttttatccctaaggtcattgagggaaatatcgtgatgtcacactttgttgatctttcataactacgttaaaatattattagatttttcttgtcttttatttttaaaaaattacaggaaaaaatccctttatctttgtcaggcatgtgtgtggaaaatatcaaaagtttttagtgacttcttaaagttttttcatatttacaaatacctctcctttaattataaactttaaaatgaaattactgctcttcttggccagattacactgtttgttcatatgtacatgtttctcccaatgttatattgtcttttcaatattatctttttttattttgtaataagagaaattctagaatgacaacaagaaacaggatcctgttttgctgaaagtgtatagtaaatattaattggtttaactttctcaatttcaacattaaaaatatactcataattttttggagtattatgtctttaagttacagattttagttatttacagttaaagtgttgataggtgtttctgtctttctgtattcatatacatatatatacatacacaaacatatatctatacatacataacactttttataattacttttggagaatataggggttcctatttaaagcaatattataaaattaataaaattcaaatataatttttatgataccaaattcagagataatcaagagtgactatgaaaacctagagtagtatctagtctgccttctaacctcagttgtgctgttaatttgcaaaatctatattcccatatgtagataggatggaatttatgatggtcagatctatttctttgaatctttgagtgggatggatcatcaaaatttagccattgc

SEQ ID NO: 75032 - DNA, 1034 bp, Homo sapiens
gtgtcaaccaaaacaccctctgttcttctcccatttccttttttcaaaattagcaggctctaagcttgtaacttaaacaataagtaaacttaacactgtccggttcatactaaacatttcagaaattgtcactaaattttttccagtattatactgactaacccaggtctgcatgaaacactaacatggtttggggataaaaataactaataatagaatcccttggttgaaattagttacaccttgttatattgaccttttttttctgtttctcagcatgaaaaagtagtactattgaactgaagtagtgtgtctttgtattttgtgatgtgttgcattgttattggatatcctaactcatcaaatgataactctctgtgtgccttgcacttcactaggcacctgaaatacaaagatgactgttgtaatggtattcaagggaagcaggaaaagaggacataatatgcttgaagtttatcataataaaccttcaaatctctttatattaaataagttttctttatattaaataaattcaaaaggcacaacacttcttttctagcctaatttatttggaaaaagttactgtaattctcaattgagatttagttagtgaaattaaagtttccattcctgtcatcattaaattgctattagaaaaataattttacaaaaaatttagatcgctttcagatagtataaaagacctagcaaagacaaaaccgtattaaaccaggttgaatcttttgaaagagataaaaagtctaagattcactttaatggattgacactatccaaaattacccagtttggcattaaaaaagatggtaaaagagaaatattaaattaatgaacagcaaaataactaattaagtatatctggcaattttcttgtttaataatggagaatgtccgataaaatgtcagattatattaaaagagatatgaataacacttgtgtatcctatagtcaagccataaatttcacaagtgaaaaatattgataatagaaccacacttggactaactttccc

SEQ ID NO: 75033 - DNA, 1024 bp, Homo sapiens
aaagaagaaaggatgtaaagcagaaattagtctttaaacatatttgacataggaattgaagtggttttcattcattcttttcattgactaaacataggccttttgatattaaatttttaataataatggaattaaaattaaagtatgggtcacaaatctatccattttcttctaactgctattcctctcaaacactagaatagagcctatttaaatcttaacttttgcttgccaaaccactgttaccgcccatctgttcatgccaattgtaaagaaggttcagtttttagtgaagctttgcatttcacataaggtatgtgaagtgaaatttcacaagggacatgatggatcctgattcttagtgataaacctttggggccatcagggttggcatatggtccagtatgatatgaaggcttgggttccctggcttcacttctttggcgtgaagctgataaaacctggctcttgagtattatttcactggacaccaatcatgggcagcaggaactgcccatttaactctctgtgggaaggaagcccagagagcattcacaatggtaccattgtcgagttgcaaactgctctgaacagcttgacagcactagggaggaggggaaggggttgctttactaattgctgttcagaaaagagaagaagcaaaaatagctgttgcagaactgatgtttctacatttacttactctcttgctaagaatgttgacttatttagcatgtaactactatcaaaaaagaaggcaaatgaatataagcaaccacctgtagtaattccttattaacatgccattatctatttttagcccatcagattattgcagagcaaaagtcagttttgccttatttttttattagatgaaaataaggaattttttatcttcataatttaattgaggtgaagtggataaaatcgtcacaattcacatgtcagataaggttataaatttggtttaatttacactttgctttttaggattcccaaataccatctgaatacatataaacga

SEQ ID NO: 75034 - DNA, 1090 bp, Homo sapiens
gggattacaggtgtgagccaccacgccctgcgatgttaccgtattttaaaagtactgcatacctttaaagatggtagttttggtctagcaaatccttgtcctttcaaaaagcaataaatgtgaatctctgatatgtaataactttgtgataatagtaaagaaagtttattctgtctgaaaatagcattgtctcttaatggtctctagagacagtctttaaggttttactaatattgaccaataattacttacagttaaactgtgggagctcacaaaaatgacttcagtatatggccaacttccatttctgttaacattgttttaattctagagatattttcaatttttatcttctaccaagaacttaatgcactaatgataaacttaagcaatttggggtcattcagcaatagtgatatagaccaagtaggatggtaaaggtgattaattttaagtgggagaggatagggtgagaggatgggatggaaattagaggaatggctttactatggaagaattctgctaatatttcagagacacatggaacttttctagacagatatggtcagggaagaattttttaagggtaagaagtggacatggaggcataaaaatgtgatatggtcaagagataaaaggtgttcagtactgctggatgatataaagggaagagcagtggcagataaagatcaagaagtaggtcaaaaccagataatacagtcaagcagaaagaaaataaacataaatgtggttttctaatgctactgattgttttatggcagccagtgtctaaggtaacagttccttctgctattgtgtgttttttacccgttgactagcgaaacaattacagcttgaatttcttatttttcattttctagcgaagcctttccaaaatgtttattgatcgttattttcataaagtcttttttatgataattagttgagcaataattgccaggctaatagccagtattgcattttctcaatgagactaagatctctaaatgtttgatagtatttatacatatgtatcatttttaaaagagcatctgagattttcatatttcttatgatagactcatgatac

SEQ ID NO: 75035 - DNA, 1054 bp, Homo sapiens
gagatcataccattgcactccagcctgggcgacaagagagaaactccatctcaagaaaatataggctttgcattagatgattttacccaactgcaggctagtgtaagtgttccaagaacatttaaagtggacgataagttatattccttataattcgggtaagttataatgttcagtaagttaggtgtattaaatgcattttcaatttatgatgagtattttggaatgtaagcccattgtaagtcaagaaacatctgtatactaaaagacttaagatggctcttaactgcttattgaaacaagtgtaaattttttgatgacctggaagcaattatttttaccttaccctccctacccttatgtttctcactgcagttttgtccaatatacctgtactcctccccagctccatcccccatctttaccctcatctcctaccacactgacgcccagggcaccttatgtgtccagctaagtcatattcattattcctgaatgctcttctttttcaggcccatgttgttaccccagtaatgcccatctctactttttctacctaacatatttattattcatgacccaaatatcctttgttttaaaagaaaaaaaacctcctttactatgtaaaactattatttacactgcctcaaaacattttgttatagtacttactgtgtgtgtatatattagcaagtcttacttaccctccttgtttcactaacttccagcacagtgcctagcctatggtagatggctagtaatttattctaattagaacaaggtggatgtatttattatctatctttttgaagtttagatttagcatggattcttttttttttttttttttttttttttttgagacggactctcgctctgttgcccaggctggagtacagtggtgctatctcagctcactgcaagctccacctcctgggttcaagcagttctcctgcctcagcctcccgagtcgctgggactacaggtgcatgccaccacgcccagctaattttttgtatttttagtagagatggggtttcaccgtgttagccag

SEQ ID NO: 75036 - DNA, 2266 bp, Homo sapiens
acagaaattgagatacaggtaggctttggaaaccaccagttaatcctttactcttcataaaagaaatgaagggataaaaaataataagcttgattatatttggataattgtactgctgtgtcagttattttatgcccaataaaagtactcactaagattccaaagcataaattgtgctatttatgatcattaaatacagtttaaattttatcctaggaacatgttctgaaaccatgaatctaatgttgttcactaaatggggacagtattgattgtcatatgctacccaaatcgatcataccagcagccagaattacagtaatctgtccgtattgatgactgtctttcaagctgaaacctctccttcgctgcacttgtttcttacattacttgtactggaaaagcattttcttacaacttctgattttgtcagctaggtactttttttttcaggcaggggaggggtctggagctcaatttgttagtttaatcatgcaattagaattgaaatgcaacactgtggaggaaaaccaagcagattctgtgtaaccattggaccagagaggtatttcagctttaatcctagccatcgtttattagttacctattgaaagagtgttcatggtttttttgtttctgttttttcagtgggaatcataatcccaaattattaatttcatgacctcagccatcatgattctattccttaaataaaaattttaaagcaattatttcttttgatcctaaagacattttgactatgacttctgaatatacaaatgttaaatatgatacttttaggtaaatactgtttcttcttttagtgagatttattatacatagaaatttgcagaatttacaatatataatcatgttgtagtagtgagggttctcagagaaacagaaccaataggatgtatatataaagagagagaaaagagatttgttttaaggaatttgttcatgtagttgtgggcgctggcaagttcgaaatctgtaggagactcggggaagagttgatgttgcagtctgagtctgaaggcagaattctctccttcctcaggggacctcagtgttttctcttaaagtatttaactgattggatgaggcccacccacattatagagggtaatctgctttacccaaagtctactgatttaaatggtaatcaaatctaaaatataactgtaacagtataaatataacagtattgtacagtaattaagagtataatatatgttatatattatattaatattataaaatataacagtagcatctagactgatgtttgaccaaaaactgggtcccatgacccagccaagtttacataaaattaaccaacatatcctgtttttcttttctttttatccttattacaaattataatttgagaaaatacataaatcataaatgtactaggtaatgaattattacagtttaactatcaacaagtcaagaaatagaattgtagtttttcttccttcaaaaatatttattgatcacttacacagtaaagattttgagagggatacaaagacaaatcagatagtaatcctgtcctcataagcttataatttaacaaggagagaataatatgtaattactaattataatagaagactaaatgaaaatgtcctggtagggttatagataaaatgctataagagttccaagggtgaagaaattactttggagtaagaagatcaggaaagagtgtttagaaaatctgggcctcagaaggtggggtttgagtagatggaatgcaacatgtctgttttaattcttgtaatttatagtcctaaggttttgtatgcatatatgtatattatagaagtataatattctgaaatatacagtatgggggatattatataattaaatggcattttaaaagaatactttattcctcgatttagaatattctttcctaccacaactagtatcgtttgatttcttctaatctgtttagatttgactttttcttaaataccagaattgggtttctatttaacttgatcagggagattaccagaagtcagtgattattcttcaattagttacagtttattctccctcaagctctgctactcaaatgtccagtacctgttgcaaagtaggaaagccaaaactaagtggaatggaattgatgaattgattggttctgctaatgcagttgcctttcgttataataaaacattataaaaccttttgggggggtctgtcagtattgttgccatttcacgttagaagaaaatgagtttat

SEQ ID NO: 75037 - DNA, 1013 bp, Homo sapiens
tgtagtaaagctagtgtcacaaaaataatgaaaaactaacttcttgcctataagtatatatttttcttttgttcactcaatggagaaaaggaaatttacttctagtgttggctttttgtatacaattgaaactagtaaaatttggaaattggctaagtgtgtaaattatttactcagttacatgaagcacatagttcttttgaatagacaccctataaacctttgacatttttattgtcctagtatgagtgacccatcacagaaaagaattgaattcaaatagtatttttactgaaggaagaactaaagaagcagcagaaatacttttggatgcaaagtgtcttgattgctcttatttacaatctgtctgtaatttgaatgtaaaattatgttctgatttctcaatcaggttcccttctttggtcccctttttgatggtgctattgtgaatggaaaggttctacccattatggttagagcaacagctataaatgcaagccgtgctctgaaatctctgattccattgtatcaaaacttgtatcctttttttaatgtaatggtttctactctaacgtatgtctactcacaaaggtaaatatttcttatatattgttaaagccttttattttctagggtttttttaattattattttttgtagaaatggagtatcattatgtttcccgggattgtctcaaactcctgggctcaaatgattgtcccaccttggtcagcctcctaaagtgctgagattacaggtgtgagccactgcacccagcctgattccctgtttattgatgtatagatggttcagttcctccccagtgttggagcagttatatttgaatgatatattttctttcacatgctttttttttttttttgagatggagtctcacttttgtcacccaggctggagtgcagtggcacgatctcagctcactgcaacctccgactctggggttcaagcaattcttctgcctcagcttcccaattagctgggattacaggcat

SEQ ID NO: 75038 - DNA, 1013 bp, Homo sapiens
tatcataatgtcatatctcattatgacagcctaaaataattacttatttagcatttgaatgtaaatgataagggatttcatgaagcttttcgcttaaaatgtttgaacatgtttagaatgactttgttatgtacatggttctgtgccagaaatcttcattacaacagcttggcaaaaatatgttgttcttttccattaaacttatttaacagacttttaatactatacagaagatatttgaacaagcttcagttataaaataaaagtatacttgcccttttttctcgtttctttagataagtgggcactagaaattatagatagttttggcaagagttcaagggttaatgtagcagataaataaaaggaattttctgtaaattgagacctgcattatttcagttgtcttgtctttccttacctaactcatttaattttaaaaagtaaatacctaaattcttcctgacagtgtgctcagcttttactatcgtttattacttcaattatacttgatatcacttagaacaatctgccatttggaaatctcagtatagcctggagcttagtattagatctggctgctattgtaacatgtacagcatatgacattaatgtatcaaaattagattggatcatccctcctggttaaatttatttcacatttcttttgtattcagttaacataaacctattagggaagctgacacatggggatggctgtataggaaggatatttttaaagtattttgattaaaaaatgaaattatgaagccatggcttttctgagttgtgtaatcttttttgctttttaaaaatgtcacaaagcccaagtcccacacatttatattattcaacttgtgtatgcatataaggagttactccaggattaaggagtgacagaagagaggctttcactaattggacttaactcctttctttgtttaaatcagatattaagttctttttcctaccctatgttcatccttaagccaaaataaatgacatatttctga

SEQ ID NO: 75039 - DNA, 1061 bp, Homo sapiens
tcacagatgaccatcttctcattgtaaccttatatataatagcagaagagtcaagtaagctctctggggtctcttttataaggacattaatcccttataaaggagcccgcataacataatcacctcccagagttccctaccttccgataccaacacactggggggttaggatttcacaatatgaatttggggggtggatgggatgcaaacattcagtctgtagcaatgggtgaacatctgattttcacagaagaacatggagcaggccatagactatagaaattaaccaacattcgtgagcttcatgtcagtgcctggcaaaataggattattaaacagatggtttgtgagcacttagataatgaagtgtagtgatcactaggagccaccatgagttcaccataacaaatcacatcaaaataacttaatttgttttaataggattactagattagggaaaaccatagactgcaataaagcatttaactaagttgcttgttgtggacaagttgaagaaatgtggtcttaataagagtttgataagtatattcatgagtgattgtataatcatattcatagcacataaattaattatttaacaagaaacaatatagggaggtggttacagtataggttctagaaccagcctgccttggtttgaatcctggctctgccacttactatttgtatgaccttaggcgagttacttcatccttttaagcttcaattcctctcctgtaaaaatagggataataataattattactacttcatagtgttgttgtggaaatttaatgaattgtcacaaacagtaagcagtaagcacttaataaatacctttaataaatatagggttttgtggatttttttaaccaggaggaaagtctgtaatgacttgctgtaaggctcttaaccaagcctgtcccatttgacatttttgtccaaaatgtaaatgaagacactggaatttgaacttaaggatagcccaaatctggcagagagccagcacatgaatagcatagtcaggctaacaatagaccttcataagcttaaagataatc

SEQ ID NO: 75040 - DNA, 1084 bp, Homo sapiens
aggagtttaatacctctaattaaattagatagtcgacagtcagtataaagaaatagccatgcctctggcaagctagaattatttatgactctggtcctttgctttaaacttggtagggtaaaatcatttatatccattttatagaaactaattttagttctgattttttatttaaaatatgtgatttgtaaattattttcaaacattttattttctcagaatgagaagtaaatatccttggacctatttaaatgtagcatttatatttcttgtgaagagaagctttttcaaggctcaagacagtagcagcagaatatttacaacatagactatacttcttgagcaaattagccaaacattcagtttagctaagtttctcttagaaatgttgcaccaccatataaaaatcctgatataaccccagtccaagcaatctgttctataaattatctcttcctgaggaagattgatggaaaatggttaaaaataatttccacttaactgagtgtattcacccctaaaaatcaaaagtgctgcaagcattggtataaagtgttcataggagcctctctcatttcctctgtctccttgttctagccacttgctgatactctgcttcataggtagctgaatcatccttttagaagtttgatgaagatcaagttgagataattgtaacatacttagttgaactctctagtctatgtttcatttcctggaccccccaaaatagggggaaagaagcactttatttaagtccatttcctctgaaatactattagtgtaatggaaagtgtttcattttctgtcttgaaatttactcacaatagttgtgcaaataaatgaaccttgtagtgctgcttggtctgattttttattttaaatctgtttttctttattttatacagaaatataagatactttccaaagaactatatgctaaatatagtctgaaaaatgaatttgttaaaaaataaatttaaggaataatttttaaattttttcattattttagtaaaagtgaagttaggattatagttaataagtgctgtgaaattatactcattgtttgagtcctaaatat

SEQ ID NO: 75041 - DNA, 1056 bp, Homo sapiens
tatgagtaaatacaacacaccaaattaatcattttgtcaaactgatattaccattttaacttttccccaaactatttccatacttgatctttttctccctggccttggtgtgctctgacagcctttataatttaccattaacacctagtaggctaacaaaagatgcatagtacacagcagttgatacctttcctggttaactcctactaattagaaatcctcaaatacttaaaaagtaccagtacaaacaaatcaattctaacaattctagattaaatattggttgataacatgcaaaagactttgttcccaatttttttcttaagcaagaagtttgagtctttctctgtagtgtatttgggttttgtttaattaatttatgtgactcttcattacttctaggtaaatcttacaaaccattgtggttttatgggaggactacaaaaaaacaaaagcactggattgaccactccatattttgctacctctacagtagaggtaatatttcacgtgtcaacaagaatgccttctgattctgatgattctttgaccaaaaaagtaagtgctgagaagtgctttcaaattaaaatgctcataattgagacagttaatacagaaaatacgtaagtaagaaatcgaattgatcaagcactgtttctggttgtagtacaccactccacccagtgctgtcttgaaaatagggtggttgtacagcaaactatgttttctttaagaaacaatgatatggttaaaggttgcagtctttttttaaaataaagtttattgtgtatatttagggtttacaacatgaaatgttgtgggatacatatagataataaaacggttactatattgaagcaaattaacatatctatcatctcatctagtttttttatgtgtgtatgacaagaacagctaaaatctacaaaattccaaataccatacaatttttattgtgcgttaaatctctagacttgttcatcctacatatctgctactttgtatcctttgagctccttgtcccaatttcataccccactccacccctggtaacca

SEQ ID NO: 75042 - DNA, 1108 bp, Homo sapiens
agccgtttattagaagagaatatcctctgccttataggaaatgttatatctcaggaacagtttgccatatggtatgaccaaatataggtaattgccactcagttatgtcagttatggtataaatgcattctactctcttttgctgtagaatggtccgtatgttgtcccttgggaaaaattaaagatgagaagctgtattttacttcagcaagcattgattttatgaaaataatttgtacatatttagcacccatggaagggatttggtaaaattattcactgctttgtagtctaaaaattataaaacaaggaagaaagaaaattccatctggattacacttgcttacttgataatgatatagattctgtgaatattttatttctcatgagatacaactttctcacatatttttatgagactcttgaaaagaaatacaaagtacttttatccattttcctggatatgagtttaggaggctcacaacatctgcaaggaaagattcaagtggccaattgatatgatccactagcagaaatgtatgaacacctggtggaaataatgacgtatattctttacattttttttagggtctgttctcctttgtgttagaagtatgaaaaggcaagaaaagtagaaaagttgcatgagtagagtggaaagtatttccgggactgtcttgtcattcactgcaaaggtgatgaaaatgtttataaatctctctatttaggaggagctttcatctcctgaagaaaaatgaaaagctacttagagaacttaggaacttggattcaaggcagtggtaagttgttggaaaatcttcacataactagcaactctcaggtatttctcttttagaataatactgtgaataatattttaaatagtatataatactgtgttattgatttataactttctgagcaaaagttttttaaggaaaatttaggactgcatagaatgttgggtgtctttgaattgtttatgcctttttttttttttttttttttttgagacagagtctcccactgtcacccaggcttgagtgcagtggcatgatctccgctcagcctccggagtagctgggactacaggcacccaccaccacac

SEQ ID NO: 75043 - DNA, 1106 bp, Homo sapiens
tttcctccttttttgccatcattactgtattatggaatctaaactggaaatattaacaatgtgataaaatccctatttgttgtctaatatttcattgtcatatgattccctaggaagcagcaatattcccattcatttatattttttatttccagtgaaaactcaaatgcagcatggattaatctctatagcagcccgcactgttattacacatctggtaaatcacctgggccattatccaatgagcggtggtcctgctatgctaacaagtcaggtgtgtgaaaatcacgacaatcattacagtgaaagtactgaactttctcctgaactctttgagagtccaaatatccagttctttgtgttaaataatacaaccttagtgtcctgtatccagatcagatcagaagagaatatgcctggaggaggtttatctgctggccttgcatcagccaattcaaatgtcagaatcatagtacgtgatctctctggaaaatattcatgggattctgctatactgtatggcccacctcctgtaagtggcttgtcagaacctacatctttcatgctttcattgtctcaccaagagaagccagaagagcctccgacatctaatgaatgcttagaagatataaccgtaaaagatggactttctctccagtttaaaagatttagagaaactgtaccaacttgggatacaataagagatgaagaagatgttcttgatgagctcttgcagtatttgggtgttactagtcctgaatgcttacagagaactggaatctcacttaatattcctgctccacaacctgtgtgcatttctgaaaaacaagaaaatgatgttattaatgctatccttaagcaacatacagaagaaaaagaatttgttgagaagcactttaatgacttaaacatgaaagctgtggaacaagatgaaccaatacctcaaaaacctcagtcagcattttattattgcagattgcttcttagtatattgggaatgaattcctgggacaaacggtaagcataagggagaaattttttctttttttttttttttcggtcttattcatcttctgataaagcattttattttctgttcttttcct

SEQ ID NO: 75044 - DNA, 1018 bp, Homo sapiens
ggtataacaagcagtataaagcaaaaaacaattagacaaaatttatataagcaatttaaaattatatttttagatttgacgtaataagataccatgtttattttacttaaaaatatggttatgtgaaaataatagttgacctttgcacatttaaggtataaaatggcagtttttattcaagacaatatagtatgtttcttgaacaaagcaatagagtttgcttatttcaaaggaagttttaattttagattttgtacaaaatttactgtgccaatatcagtcactgtaaaagaagcaaaggaaaagatgtaaatagattagcttaatattgatatcaaatactctgtgcagtacccttctctaaacgtatcaagttgttccctttggacttcctcaaaggttttaaggaccagataaatgcagaaccttttaggaacagctgtgagctaacagcacatgattctctggtctgtagtgactacatgctctgggtgttttttaatgtggtgaaaatgagtgatcattgtgcccttgtctaaggcatgtttcatcatcttcaagtacttttttggccaaagaattctaaacattgagtgtccctaataagctcagtactggattgaacaagtctgatttgagaactattgtcaggagtggctgtaattattaaatttactaaagaataaagcaaggtagtgaagttggctttttgtcaaatggcagtagtcttattagcaaaaagtcatcatttgccgggtcagagtgaaaggaggctccaaaggattcattctgtcctaattatagtttcacctatacttattatgcaaagctaatatttaaagcatttgccaaaattaacttcctctgcatgttctattacagtgcagtgaattgcagcagctttttatgtcttgctgcttttgtacgccataataatctgtaattatgggtttgctgcaaatgctgtaggatttgtttaatctgacaatctgaagagacaaccctgaatagagttatt

SEQ ID NO: 75045 - DNA, 1758 bp, Homo sapiens
ctacctcatccggcctccatttttagccaagaatccttcgctttagtgtcgcaggctatggtgtagaattccaaatccagtttatgaataatttctggataactacttgttcatctttttctatatcatctttgtcttccagaagtctagctattaatatgaaaaagctatacttctaagtttttgttttcttgcccactaaatttattaaacatttatttatcataaaatatgagtgtggcgttctgctaggcactaaacagaggtaaacatgatactccctgttctcatggaatttaaaaattagagacacaaatgaggcaacacaatataataaatagtataaaaagtagaaaaatgtatgagatacaaggtagaatagagaaagaagtaattaactattggggaaaggcatatttaggaaaaattcttttaaagttaaatagagacataaatagagacaaacagtagaatcagaaaattattccaagtggtatgaatagcatgtgtaaatctggggactataaaatagtatggtttgttttggagaaacaactaggcagttccatattttagaatgtgaagtggacagttaagagttgggaaaataaagtttctaagataggaaggggccagattataaagggccttggatgccacactatgaacgtggtacttctgtgaaagtgacttttttgaaaggtttttatgtaggataaaatatgaccagatttgtgaaaaatcacttgagaaaatgtgaaagttgacttaaaagtcaaaatatggtgattattattaaaatcatctttataagaattgatgacgttctgagctaaggctaaaggaatagagaatagatactcacaaagtagaacccacagccaaggtgaggaatacaggaaagagcagctttgttggagcagtgagtttcagttctcagtttgttgcatataaaaagtaatctccaggtggagaccaccagcaaggcaattatatacctgattagaaaatttgatgctggaaataaaattattggcattgtcagtacatgagtagtattaacattgtgagaatatatgaaatcacttaaggcgatatagtagagtaagatgagttagcaaagtatagcacattaaagaataacagttaaggagaaggcagagaagatgattcagtaaaagtgactgaaaggactagtaggaaaggtaggaagaacaccaggtctaggagagagtaatcacatagaagacaatcaaatcatcccgaaaatgcttttttgatctcagactttattcactgttttttttgagacagggtctcactctgtcacccaggctggagtacagtggcgcaatctagactcactgcaacctccacctcccacactcaagtgatcctcccacctcagcccccaaaatgggaccacaggcgtacgccaccatgcccagctaattattgtatttttagtagagatggggttttgctatgttgcctaggctggtcaggagctggtcacttcagctcaggagcttgagctgaagtgaaccgcccgccttggcctccctaagtgctgggattacagatgtgagtcactgtgcccagcctatcattcactcttcttcttcttttttttttttttgagatggagttttgctctgttgcccaagctggaatactgtggtgcagtctcggctcactgcaatctccgcctcctaggttcaagtgattctcctgcctcagcctcctgagtagctggga

SEQ ID NO: 75046 - DNA, 1035 bp, Homo sapiens
tttctgttggattttaaaataagttacataaattttatgttctcaatttgttttaaaacaatttgtagctaggtgtgttaaatttaaaagatagaaaaatatttaacatattccatcagcttcatgtttttacttaagttcattttgctgttatcagtcaataaaattacactttccattttgaaagcaggttacattttgtttaggaagcttgatagcaatgtcagtctaacagactaacatggatttttaaaaaacatgttgtgtggtatcccagcctgtagtcttcttagtaaattataatagaaaattaggctcagaagttttgggattctgctttcttcatactttctcttctttggttaccagttaatgtatagagtaacaaattcattaattcatttaaaatagtgcatgttcattctgtgtcagttgattgtgggtcatgtttgtggtggtggtttcattttatgtaaccgttgttgtttgccttttttgcagatgtgtagcactttgtagtttaggtatttggatttgtgaagaactagtccatgagtctcatcatcctcaaattaaggaagctctgaatgtgatttgtgtttccttaaaggtaaagaaaactgtttagtgaaatatattaagataggagagaatgcatatttttttctccaaatattaatggtatcttgtgtaacatttagtaaatgttttcattactttattattctattattttcttgatcctgactcattccttaaaaattgttctgtttcttgaatttagggtatctttatggtgacccatttttatctcaactttttatgtattttagctttgtccctaaactatatatggtagacatctaaaaaaggaaacccaccatttaaaacatatatagggtttttctggtttttttttaactagtatttttgtaacttactgttctttgatctttattaccactccctgaattcttgagctgttcagtttttttgctttatcttttcaagttatgtgccttctttgtagacaga

SEQ ID NO: 75047 - DNA, 1044 bp, Homo sapiens
aattttttttttctggtaatgcctttgtctgactttgatgtcagggtagtgctggcctcttaaaatgagttttgaagtattcactcatcttcaatattttggaaatgtttgagaaagattcttcttaaattctttatttgaaatattttgtagaattcactggtgaagccatctggttctgacttttaatgatatttctcaaaatcttaaaaatcttcatacctatgagctattaattctactttaattacctgcctttatcactcttctaatcaggaagaaatgttattttttgaacgtatgcttttggctataaatttcagaaacttttatttatttagctacttttataaataatattggtctctttattgaaagtacatacatgagaacaaagactgctttaataaccacttaataaatatttgtagaatgaatgagtgaaatctcagtcattgccgttaactatttcccccttattttaggaacttataatcaaaactgtattaagctcggcaagagatgagccctctggtcctgcacggtaggtcggatattcttagactgagtataactattttgtgtttggaagtttagaagttgactgaatttttatagcagcccagattgttttagatacataaaagccattctgaattacaattttaagttacttgaataattaagtattcttactttttttcatgatttaaatactaacctttcttcataaacagaatcctagtcacctttttcagtaacttcactctttatctctaaaatgatttgttttaattttattttatttaagtacattttgtttattgttcagttatatttgtcaatgtcttttatgcagtaccttgaaatgcagtagcaggtacccaatgaatttttgttaaattgaattaaaataaaatattttattatagaaagtaatatatctaagaaaatagtatattttaatatttataaatatttgatcaagatttttaaaaatagaatatgtcatagttttagatttttttctaaatgtcttaagaa

SEQ ID NO: 75048 - DNA, 1001 bp, Homo sapiens
tccctttcctttttaaattttgttttatgtatcacttccctgtctaatgtagttggataacaaagcaacttttctgataatttcataacaccaatatatttttaaactttttaaaaatgtgatacataggcaccaagagtagaagcacaagttcttctgggatctttggtttgctttcccaacttatattgtgaactgccttctcttcatcccaacattcctgatgttgctgtgtctcagtttacagatgttaaggtaagaaatgagatgctaatttttagcacttaaatgattttataatcataaagtatatgcaataaaatttgtattctttcttttctttttgaaatccacacaattgttaaagaacattagccatatcctccagacacaaaggcttgaatgttcatttggagcatatccttttttgtgtttaaaactgctttagaacctttttcttgttattgaacctactcacatgtctacctgttaggattcattcacttactgaacatttattgaaataccccatgagccagatactatgctactaatgtaaagcttctgagattaagatggtaaagtaaacctgcatattagactctctccttctcccagtttctcagtgtgatgagtcaaacatagtaatggaaaactctgtactgctctaggaaactatggagttgggatggagatcccatgtaccagaggcatttaggggcttgaacagtagatggtgcaaaataaatgtgactatacagttgccagtggaacttaccacagatattaatccttaaaaaaaagacaattgtgtccagttaggagaagacataccagatcacccttgttgtttataagtcttcaaaatgttttctggtagaaaagcagtcagtgctctgagcccagcaaggtgcctgttgataaataattccatcaataagttaagacctgtgtcttactgagacctgtccttacttaactgaatgcctatgtatgataaa

SEQ ID NO: 75049 - DNA, 1003 bp, Homo sapiens
agaaattgggccaacatggaaataaatgagattatatacatcgtttgctatattcagttgcttaagttatttagcaaatagtatttctttttgaacattaaaactgatcttttaattttaggcaaccatgttgactgataaatataaacaaggtaaattacatgcatataaacttatttgtaatacaatgaaaagaagacaagatgtttctccaaatagagattttctaacacatttctacaatataatgcattgtggattacttcatattgaccaggtaactatatatatatgtatcatctaagaagtagtttatatcatattatctttgattcttgattctgtttaactcttgctttttaaggtctagaagttaaactctcccccttatttagtgatttatatacaatttacttcaattttatgaccttatttgttcttgaaacatggttgaaaatcaagctattattgtaggtagaggattgacttgagtagttctccatctttaatgttgtaccaaccagttcactttttgaagcaattaaaccatcctttgcttaggctgatacctttctttaataatattctaatgtacctactcttaggcattttgtgactgatacttgaggcatatggattcgtttatctagttatgcaacagtcaggtttttttcaatctaagaatcagcacatcacattttcttattactgtcaattatattggcatagtgacagttacattgatttgataattatatgaggtataatcattaaatagtcataaatataaccttagaattactttgggagtcttgatattggccataaactaacaagtgtaggaggttgcaagtcagaataatgtaaatatgtttatcctaatatgatgaactcgtaggtcatttacagagtatattaatattaaaagataatatctttctgaaaaatgtaaaatttttgcattaatttaaaattagtgtgctaccttgtaaacatgtctcaa

SEQ ID NO: 75050 - DNA, 1365 bp, Homo sapiens
tttgatgatataacctgaagttgctattagataaaagtgagagtatgtgcttataaatttgatgtttttatcaaacagatttctctatctgcatagatagaaatttctctatctgcagagtgagtagtagttacatagaatcactattgaatagctagttaacataatgcttacaataattccttattattatctcataataataagtgaggttttgaccttatcgggaaaaaataatgtatgttgacatttcttttattcatttctgtagatatttaagattgttaatttagcttggtttcttggggggttttatgttcagttcactgaaaaatggctgacactatatatttttttctatagaaattagtgaatttccatcagaatgttgtagtgtgatggcaggaggtactctgactggatggcatgctgatgttgctactgtaatgtggcgaagaatgctaggcattttgggagatgtaaattcaatcatggatcctgaaatacatgctcaagtttttgattacctctgtgaactttggcagaatctagctaaggtaaaaaagaaatagcggatataagtggagaagaaaataaaaatatttaaaaatagaagaagccttagaaaacatttgtgacaccctttttgactataaactggtaccctgcatggcaaagtcacttaattgtaattaaatagtaagtgtagaaactggatttgaaattcagtttaaggtaaactggaagagataacagttttcttaggtttgttgctttttatttgaaaattacagattagagataaccttggcatttcaactgataacctgacctccccttctccaccagttttaattcctccactgagaattcttacaccttggctttttaaggtaagcttaatatataaaatattagtttaaaacttctcatttactaaatcttaaactttttatagagattttggctattatatagacttctagagcacttagtttttaaccagtatccttaggaagtcattaggcattatatagagaagagaatgtgcatactaaaattactcgggatttattgcttttgattatttcataaaacaaaagtgaatatagagaggtatgtctgtattgtatttaactgaagtataaactttgagttgtatcacagaatatgctgtgtattaaaagttgtgaccgggtgaggtgactcacacctgtaatcgcagcactttgggaggctgagccgggtggatcacatgaggtcaggagtttgagaccagcctggccaacatggtgaaaccctgtctctactaaaaatacaaaaaattagctgggcatggtggtgggcacctgtaatcccagctac

SEQ ID NO: 75051 - DNA, 1050 bp, Homo sapiens
attgaatgacatctttgctgtcattctttccactcttccactgtcttttttatttgctgctttttttccactaaatactctttctgctgttttaatttatattcactgcatggatcctgctgaggcttaagagtcacaggcccagcatcatgtgatatttgggtctttaggcagaccaacaataggtcaggctctagctccattcagttacatagattgtttggtgagtgtgttctccactcctacttcagcctctaaatctcagcatttattgtgatggtttggaaattaaaggtttcagatggttaaagagaataaaagctttttcttaatggtaaaatatttcttgaacgtttagactatgacaagaagaggaagtagtccaggcagcctggaaattcccaaagacctccctgatattctaaacaagcagaaccagatgcgccctattgatgacccaggtgtgccctcagaatggacttctcctgccagtgcagggagcagtgatcttatcagctcagatagtcattcggattctttcagcgctttccaatatgatggccgaaaatttgacagcaagtatcttttctatttgaatactatgttttatgttgattgtcttctgttcaagactgacttacggattatgtagccatcaccttcctctccagtgttacttaggcagtggctcccacgttagaaaaaaaaaaattagatatttggtcttgctatgttgtctgggctagtcttgaactcctggcctgaagcagtcctcctgcgtcagccttccgagtagctgggattacaggtgcaaggcatcattcttggccccacttatttttatttcaattttcagtgaaatttcaaaggaagttttagggaatcaccttaagttgaagctactttatgttgccaaattaagagcatttaaaaaacaaaaaatgtgatcccttcttaaaagaaatgacatttttaagaccaaaactgtagaaaggaaaataatttaggatagacctgttactaaaaagccagtcatgattatgagttgcc

SEQ ID NO: 75052 - DNA, 1107 bp, Homo sapiens
gttttgattttatttgttttaacatggttttgttagcatgattaacaacgctgtataatgcatcttgcattgagccattaatgccacctgagggcagtatttgacagcttagcaaagcctggccagtaatataaagataatggtatttcacagtgagcttctgaccagtgtgtttttttaatctgaaatactttgtagtttattaggaatataaacagtgctcattttcctttcattgcagagaaatcaacttttcaatagcatagtagtgacatagataccatattattttctataagttagtttcccaagtctaaaactttcttgttaatgtaaatggtaaaaataataataatgtagtgataaaaaaatcaaaataactattttgggtttttttggtaagaaaaacatttgtggaagtcaactttttattcttaaagcattaaaattagattttatagtggatagaaacagcagtatatcaaaaccatagaatttgtatttataaatactcaaatgcatttgtatcccactgagttttgcatagattcaaaggatgtattccctgcaaacgttctttgggggaaatacggaattataaattgttaaggctctaaaaagaaacattgagtcaggaaaaaagataaatataccagtttctttataggcaatattaacctaacttcagctagtgcttatctataagctttcttgctgtttaaagttacactgaagattgactaacatctgcttagttaaataaagtaaatatcaatttactaattcttaaaattaaatctgaaagaagggaaattattcataaatgcatgtttggcaaataattggcaaaggtactttgttttgggttgttgtttgtttcaaagttagaaaatgcagttaagtttttcctcactatatatagttatttatttatttttagtcaataaagaggacatgagccaaaaactgcctcctcttaatagtgatattggcggcagcagtgctaatgttcctgatctgatggatgagtttatagcagaacgacttcgaagtggtaatgcctcggtaagttttattttatatatttggttttatagaggagggtag

SEQ ID NO: 75053 - DNA, 1070 bp, Homo sapiens
tccaccctgaaagaatattttaaggaaaaccaggaaaatcatagtaaaaatgagacagggaaagacccagcttctcaggaagtgactattgcagtaaataggggtgaaagattatccttagataaattagaatgcacagatcaggaaactgaatcagaaaatatcacctcttttgttgggactcctgaaaacctacagtttcagaaagaaccaaactcagctgtcttcatgagtaatatcgcacctaaccagtcagacagtttttttagaacacaaacttctgaaaaatctaagcaactaaacactgataaacagccatcagagcctagtttagatagcccttgtgataaagaaaaaaggaaacatctgtacagacaagcagccacagaattagatgcttgtgttgatgtaacactagttgaaaagcttaagagtgtgcaaattaatgaaaaaatcactgtcccacatgttatgcgtgccaagaaagcaacactaaaagcacctgttaaccgcagaatgcctcatgttacaagtactagcaaactttctccaactaaaaggagcttgtctgaaacagtaactcatagagccaaaatcatgaaaattgctactaaaaaacgaaatagtgttcatgttacttttaggccatccactgagtccgttcagttttataatcctctggaaaacaaagaggctccatggaagatgagactgcggaagctcggtggctttagtagtggtagcagcaatagcagcactagcaacacccataccagcacaaatagtgctacagagctagtaaaacctggtgtgtacagacctctagatacacttggtactgcatcagtaagcagcaaaacagtgaaggaatccacagagattcccaccaccatattacaaaaagaaggaattgcaagtagtcaattaggtagtcgtagtactcttaggtcatcaagtcatgaggcaggactacagcagggctccctgggtggcgtttataaaactgttgtacatgctctttcgaagccgaaggcaaatgtttccccacagaggcagaacagaatgccacc

SEQ ID NO: 75054 - DNA, 2074 bp, Homo sapiens
taaaatgagctttgaacacttccattattattttattctatttatttatttatttatatcgagtacagaatttgaattctcttggccactaattcttaaaagtttgattggattagccattcctctactgttttaaaaaaactgtcagaaagatttatttttttctccacatcttaagggatttacagaatttctcatctgcaacttaatatattggcaaatattcatgttaagtgctaaaacatttttgaatagctaaaacaaagataaggttgttcctttcaaaatattttagagtggtgccatacccaggatgagaagttcctatttcagaattcttgctttgctgtaaatacataattcagaaagtttacctttttaatgattttatgatttaaacatttatgagcactgttggaaaggaattttctaaatggcaattttatttgttgtattccttttccctatctggggtaatatgccttctatgataaatttaaagatttagatggtgttgagacatcagtcactaaaacaaaacaaactttatatctgattatcaaaataatgttcattttagaaaacatggattatatggaaaagcatatgcaaaaatacacataatcctccaaaaccagtgataatttattgacaacttcagatgcttttactgccagttttttatgcttgtgtacatttaaaatataaaagcataattacagttattttgaattaaaaatcatttttttctcttagaatttgaaagaggcaaggaacctgtcactttaaaatagcaaaatccctcctttcctgattgcaaatgaagtcaggatttttcaagctgatacgtaaatttagaacactttccaggagatgcaaataggtgtgtagaggaaaagattaaagattcatagtgcaaatcaacataccaaaggcccttagaaaacctgttaaaaaaaaaaacaaaactgttggccaggcacagtggctcacacctgtacccccagcaactttgggaggctgaggcaggcagatcatgaggtcaggagtttgagaccatcctggctaacgcgatgaaaccccatctctactaaaaatacaaaaaaactagccaggcttggtggcaggcgcctgtagtcccagctgctcagtaggctgaggcaggagaatggcatgaacccaggaggtggagcttgcagtgagccgagatcgcccactgcactccagcctgggcgacagagcaagactccgtctcaaaaaaaaacaaaacaaaacaaaacaaaaaaaaacactgtttataattgaatatgtctcagacttatttaagcacagaacacctttccaagtacacatattgatatcctgtgccattaaggttccagagagaaccaatatgaaaattaagcaggattaatcttctaccagtttacattgtagaaatctaaattattggattggtctttgcctctgcgattcttggaagcaaattaaagacttggaatttgattcctcaggtgttaggtgtagagcgaaggagagtggaagagataagagaaaatgtatgagttataagaatagagagttgtaaaaatagtgctaaattaaaaaacaatcaccaaaatcttagatcatcaaccaatcatactttttaattgctgatgtttcttccaaggtttgactaaattttactttagaatagtttaatgtgcagagaattaataagaaagtgaactgtatgaaggggaaaaagtaaatggtttttcatgcttttgtagctctccctcatgtgaattagcttaaacgaactcataaaatatttcctgagtctatctctgaaatcaggaaatgaggtttcttcaactacttcaccaaaaaaaaacctcaatgaaacgactcatagacaatctacctctagtttatggttagaagtagaatttgttagaaaaatatttatctgatacttttggataattggggaggtaaagggaagtcctttaaatccttttttttttttaacgtaccaaaatctatgagaaaggaccatcagttttctaagtaccttatttgttcccag

SEQ ID NO: 75055 - DNA, 1047 bp, Homo sapiens
gaagagtaaacttgattatttatttctaagtgaactataatttatctttaatttttgtgaactagggactctcctaagaaattatcaaatgcaactacaaatgcaatttttaaaaagtaatccagtttaaagctttctttgaaaacaattttaagtttttatgtttatgatttgaataagcacaaaattatctatttttgtcaagaacccaatttttcatgctctgcaaattgttttctgtttctatgtaaaaattttaattatactcctatactttattataaaagatactgatttgattagcatcctcttaccagaaacacatactagacatgagattaaatccttttgactatgaattacctaaaaatttctaagaaagacctgtgagtgatttagaaaactttatttggtaaagagtatgaaagtaggaatgatttattcttataattcagcctcgttagtaagaatggctcaggattgcctagagaaatgcccaaatattgttccaaaagttactttgaactattaatattgagttattttcaatgttttcattcagtgaatttctcaacccttggttttgagaacataatgctaattaaagtgtctgctgttgtttaatgctattccattgtaactgctaataataatagcatttttctgctttatataaaaaaattatattcaaaatgttgtgtgtgttctctgatttcttttcttacagcttgccagtatttgccgtgctgaaatgttttaatttataatttccttcctttgtaccttttagttttctctgttgctgctttttctgtgacacgagcctttcattatagtcactcttcttttttccttccccacttctttcttttccttttttaaagccatgagaagccgatccattggtgaatgtgctctgccatcggcctatatacgcagtgctaaaagtgctcctgttctgatccatacttccaaacccttcttgcctgatattgttctcactcccctttctgatgagctttcaggtagtgccacctctgctaattt

SEQ ID NO: 75056 - DNA, 1050 bp, Homo sapiens
ctactttttcctggactatatttcccaagtggctattattggcagattagagatttagtaatcatcaccacaggatgggttttgtttagcacctttcctgtcttttttttcttgtctaaatgtttcatttttattccaaagcaagtgggtggcagagaatttctaatagcttattgctaatggtgtaattttaaaattgcgcatcagttttggaatatgatttatacataaagtgaagctcataaaagccttacagtacacagcgttttgtcttattactttataatttatgtgagcaaacctaagactctgaggcaaggtagcacgcataacttgaagatattattgatcaagtaacagtatattgagattgaaaatctacatttccaggagttggacatgaatttcagaaagtttcagttgacaagtcattttctagaggatggagtcgtgatcagcctggccaagccccaatgagacagaggagtgcaacaaccactggttctccaggaaccgaaaaggcgaggagtatagtacggcaaaaaactgtcggtatgtactcttgaaaatcatgagaatggtacagggcactacatttatagtccttggtaacaatttatatcaatataaatttttcttaccagttgattattgttgtgaaatgaaaaactgctatagcaaagccttttttccagaagtactcagagtctagtgataggctgttatccctttatgctattaagatttattggacattatttttatgtggtttattttactgtagagagccctaatattaaaatgttattttacggaattgaagaagtagaactgtgattcactttacagaactcaagcattaactgatgtggtttcattgaaggaatttactcacaaatatggaaaattagggtagctaatttcctgtgctacaattatatagtagattagtttcacagacttccaacaagaatctcattttctctgctggcagacagctaaggccaacatggagtctgttactgagtttcttgctgcttttaacaaaaa

SEQ ID NO: 75057 - DNA, 1517 bp, Homo sapiens
cagtcctttaaaaccagctacatgtatcatctaaactcctcttaacttcattagccattttttgttttttcattcaggtttctccattgttagagctaacccgatgatgggagctacaggaagataaaattttatcttgctatgtgaaacaacttttttatagtctgagtattaaagtagtcttttttttgtattaaattaaagatagattgggaggtcagtagttactatagttctgtacctaaactctgttcattttcatctttacatttcaggtataaatttatgtgaattcctttctaaatgttgtagaattaagcttttgagaatcgttattttatgacttgtttcttcaatcagaggacatatctttagtagaaatccacaaaatctcagggggtacttactggctaatccatttctgtccttttatgaatttttttatcctgtgatcagatttattacagaatgcttttaatttgttgtgtttaaaaatatttaatttcaacctttagtttatgtatacattttcaaaactacatttcattaagttaaatatgtctctagtatgttgtttctttatattattaaaaaacattttcgagttgtagttagtgatttccatccttaatttgggaatgtaggttttggctttttagttcagtaactcaacattttcaacacttaaaagtatggagactattttttaaatagcatttatttaacattaatataatgcagcataagagacagttataaatttagggagatttctttttagattgctgggtgttgggagttggcagttgttgaaatgaaatttatagtagattctaatgattgcatgaattgcttttacaagtagtattatctattaaaaaaagcatgcgattttaaatgttgcttgtttttaagtaatttttttaagaattgaatgtctgattttgaagtcacacactaaacacattttattgttatttctgatatttgtctttatagacccttatagttgcctggatcaaagcaaacctaaatgtgtacatctcccgagaactttgggatgacttactgtcagtattgtcatcgctgacctattgggaagagttggccactgagtggtcactgactatggagacattaactaaagttttagctaggaatttatatagtttggatctcagtgatttaccattggataagctgagtgaacagaaacaaaaaaagcacaaagggaaaggtaagaattgttcatagagatgctctatataaatttgtttaaataattgagtcagggaaaaccattccagggagaggggtgagggtgaaataagtagaatcttaaatattttatttttaagaattaaacaaaatgaaaatgtataaaataccattcctttttatcgtaagcaattttttcttagaactgagaaggtggtttaatgttactctatttaaaatgtgtacaataattattttaaaaattgtttttgaaagcacttacttagttttaactaaaa

SEQ ID NO: 75058 - DNA, 1053 bp, Homo sapiens
aatagctaatgatttcttttgtcttaggtgtttattataaactcatcaaatatatttcttcttgaacctgcaaatgaaataaaaaatcttctggatgaacacacagatatgtgtaaacgcattcttaacatttatcggtacatggttgtacaagtatcaatggacaaaaagacttggtaaaaaaatttttatcctttatgtctatgtgtttttattgtgtacacaggtatagtaatttttagagaaatagtgtctgtgaagagggtttgtttacagtattatagaggctcctattattgaataaatataaaattaatcatagtggcaatagttcctttcagcttatctgaaactttgttcggacttccgcaagaccccttggactgtcttcctgaagtgagcatataatggcctcatcctcctcaacccctaaggaaagaatacatgcatacaaatgtatatgagtaaatgaagtttacttgtgtgtgaatgagttaatgaataagttgatgattgactgaatatgtgaatgcctgaatccttaatctggcattcagagctgtataccgtcaggccctgcctacttttcctgtctgaagtctaacctccagctttcaggataagatcctgcttcccagctttatcaagttgttcttccctgggcaccttctgaactttcctttagaatgtctaattctgctgtttttcctgttgtcaccgtaactgtcccttagattcaccttcctgtttctacatatccttacttaaattttttcttcacttgtttccattctatatttgtacttctgtatagttcttgtgaaaactgtcttgatccctaaaatacttgtgtaaatatctgtttaccaccatagaactgagaacccctagaaggtatttactggttttcttatttttatatttcctacatttcttagtatagtacattatatatcattggtgctctataaatagttgtctaattgattggaaaaatagaccttttggggagatgggaaagtggttctgcagtttttgtaaaaatgaaatgtt

SEQ ID NO: 75059 - DNA, 1846 bp, Homo sapiens
tagacaggactagattctgttcagtaacttgtatgccatgttagtaggctttaattacattctagaaactggaaagcctttgaataagagagtagcatgaacagttacatacttgagaaggtcataccaggcccagaatggaggatagattgtaggtcagtctgtaggcaaggagaccagttaggaaggattagcaaagtttggaagtgagatgataagtacctgatctaggacagcggtagttgcagtggaaatataagggagaggacagatatactagtgtttttgaggaatggggaggtgtcgcaagtttctttcttttgcaaccagagtagttgccattcacacatggatgggaattttaaacagctcaagtttggtgatggctaaggcagctggagggattgggttggcaggaattggggggaatctgattaataaacttattttaaaatatctgaagtttgagatgcttgtgggtcattcaggaagggctcttcagaagacacttgattacagggacatggagcttaagagaaaggctagactagaccatggcatgttttattggctactcagggcagggttccagtactgtttctggtaatggcagaactgtttgtattggactaaaccttttgcatattacaaaccctatacaaaatatttttgtaaaacttaactatttaaagatattggtgaatgacaagaaggaagaaaatggagggacactttaaaaagagaactgcagagtggcatttctgtttgtactttttaactgagggaactcccttgtctgtaagacttgttacagctaaaatgcaggcagaaagctgtagtctcagtgatttgaagtttcagtattctttgaataatgagaattttagtactcctaagtaggataaacataagcctttttttttttgtcatttatttgaattctggcatttaatttagaacagaattcatctttttacaaagctataggtagtataatcccattcttgagtgtgtgagagtatgaaagggaggtttatacattagacctatagaagaatactctctggaatgatataatctctggctgctcattatgggttttgttgttgttttttactttatatttttgtcattgagaatccttttttacagtgaatatacattgtttttggatttggataagacatcatctattttgagagaaagaaacctgtttagcagtgggacctaacaatttcatttaccttttcaacttaactgactagttgcagcattcttagtaatgaaatattaaaaacttgatattttgcttcaggaaaatgggaccaatactgctgatcatgttcgaaattccagttgggcaaaaaacggctcctaccaaggtgctcttcataacgcctctgaagaagccacagaacaaaacatacgagctggtacccaggcagttttgcaggtggatcactttatggctatttttaaaaataaaataatcattaaatatttctgttcagtatttcagtatacagtatacttttcacaatataataaattcaccacctatatttatcattatgccatattttattttttcctttcatcacttaatatatatattaataaacattacatattattctagataattttaaatgttatataaattatgttatggtgtactgtcatctgcaactgattttttttattagccattctgtttatgagatttgttgttactatacagccataattcattttaactattttgtggtattgtactttatttcacatttgacttattcatttttctgttgatggtcttttgtttccagtttttcactattccaaa

SEQ ID NO: 75060 - DNA, 1752 bp, Homo sapiens
aggtgaattggtgtgtctaaatggtctcagtccgggtgagtgttggggtgtatgtgattgcaccccacaatggaatggcatcctgtccaggactgggttcctgtcttgcccctgagctgctgggatacactggccaccagtgaccctgaattagaatatttgggtaattaattgtcttacttatttttattaatctttcttaagtgtacatatagctcacatttatttcagtgtttaatattgtaagtgttgtggtctctatttagaagtttggtgatttttttttttttttttactagaaatataccttaggaacttaactcttatttatatcaattagcttatggcaaaatgagttttgttttatgtcattgttttgcttaaagttgcagtttccaagaatctatgatgtgatgtgaaaaacattactgcgttagtggtttgtggcaaaggaaaaagtatcattatcttgattctcctttttttccctaggcatttttattaccaatttgtgaagcagcagctatgagaaaagtggtaaaagtatatcaagaatggatccaacaagaggaaaaacctttgttcatgcaagagcctgaagaaattgtgatcacttcttcagacctcccttgcattgaaaatgtcacagaccatgatatttcaatggaagaaggagaaaaaagagaagaggtgaagttataagatttatatattttagtgttagtctaatagattaagagttttgcagaaacataataatgggttaacacaaatatacttattaaatgggaagataaagatatctttcagtatattttgcaacaatttaggtaatataagtagtcatctcagtaccgtatagcaaagccctgtgataccacaacttttaaaaattagtattgaggttgtatactgattctttaagccattgtctagataaaaattaggtactgttataaaggtataatatttcaaactgtggtactacatcaaaatggattttaaaatacatactttcagggggttgttattaccaaaccacagttcctcctttcctggaaggagtaactatttaggagtggctacccagcataagctacagtgtttgtgccccctccttggaatcttttgcactagagctgatttcagaatgtgaaacttcttgacttggtaaaataagttattctgtgataagaaagactagagtttactcacagcagggaaaagatgagaaaagagagagtagtagaggtggcatttgggttcctggggttccatttattcctttgattgttcaacctttgtcacaggtcagactctccaacagcagatgctaagatggagttaggagtgcagaaagtttattgaaagtgatttatctgttttgtctgatttgcctttcaccataaagttgtctgcgattgatacatatcttgctaaatctagataggaatgattgagtaatgcttattcactttagtggttaatctaacctcatcagtggaatttagtcaggatactaatgtgtggatgaataggccagttctgtagggatttgatgagcctgagcgtgtgtgtgtgtgtgtgtatacgtgtatatgtatatatacacacaaacatagagcaccctccccccttctaagaaagggaaaaatgtaactgagaaatataattgaagtaaataaaattaaccatatgaattatgaaataatatctacagtcctaattcttacacaccaatgaaaaatatca

SEQ ID NO: 75061 - DNA, 1062 bp, Homo sapiens
atttgacttttattcctcttagtttatttatctttagcaaactgtattgtgtgtcttcctccaaaactttgctctaacttctgtattaagaactattaagtgcgaaaattctcaagcagaactatctgctttctgatcctagaatgtaatggatgaaaatcataaatgtttttggttggaaaggtatatttgaggtcatttatttaagctctgttattttatggatgacaaaactgaggccaaaaattgaataacttaacagaaagtaatttataccacagaatagtgctacttttaccatatagtaatttgcttatcaccaccttaagacttaatttttccctatctggttaggcttgatcttcagacttggtgaaaattccattattagaattatagaattttctctcaagttttctaatattttctgttagttttgttcctacttctgtcataaattttgttcctttgttttttgttttgtttaggaaacttttacttgtctaaatttttgtccacagtaaaatagagataattttaaacattaagtttttattaggtaaacattctgatgttaagttatttacttattcttgaaggtctgagctgtctctaattccattattcatccacccagctttgattaataacttgtttgaactgcaaacttactgagaagaatatataactataggtgggtagatgattaattaccacacattttggagtatctgtcacttagatgttgagttacttgcattgccacttaattatttagaatggcttttaaatgaaactctatgcccggagtttaagcagtggtataaattacttgggaaatgttttggattttgtcagtattacctattaaaagacaaaatacatagttaaatgattatgatattgtttctctcttttttttttttttttgtattttagagagcagctgctagtttagtatccagagaagaaagcaaaaatgataatgctgataaaacagacagaactacagaacccgaacagtctcattccaatacaagcactctcacggagcgagaacct

SEQ ID NO: 75062 - DNA, 1030 bp, Homo sapiens
gatcacctgagatcaggaatttgagaccagcctggccaacatggtgaaaccccgtctactaaaaatacaaaaattagctgggcatggtggcaggagcctgtaatcccagctacttgggaagctgaggcaggagaattgcttgaacctgggaggcggaggttgcagtgagccgagatcgtgccattcattgcactccagccagggtaacagagtgagactccgtctcaaaaaaaaaaaaaaaataataataataataataaataaataaataaaatttatttttgtgatcaactatcagggatgatcttaagatttatttcaaggatcagtcattagaaagttttcaagcaattttcattgcatactcattttgcagttaaagtttatttggttatattattgttttattaaatttgttttgtaactatatactattcttttgtctttggatagctcaagtcactatagaagaaatcactcctcttgtccccccacaatcaggagataaagggcaagaagatctcacaagctattttcttgaagcacttctaaaatacatagtcattcaggtacttgttatcttctttgatatcacactccttactatcctatgtgggtgattcccttttctgtctcttaccattattctgtcatagtagatatttgcttattttctttttgtcagggaggttggaggggaagggtcaatggcttgcttttaattagctttagcttttaagcttttacaagtgtaatcaaccaagtgatggtggtaggggatatttcctacacttctcatgtaaactcaagttttagattcttctttggagtaaaaatagactcttcactctttagaagggtatcccttagttaaaaaaattccctcttcgtgttttttccctgtatccctctattcatccttggctgccacaataaaaaagacagaaagtacaaggacatgtttttcttgcatctgtagtggaaaccttagcagcagacaggaactgctccaggtctgtcacatagtaga

SEQ ID NO: 75063 - DNA, 1238 bp, Homo sapiens
aactcctgacctcaggtatctgcccaccttggcctcccaaagttgggattacaggcgtgagccaccatacctggccttcagacatcataaattattattctgattttcaactgtcttggggagaagttaggaaagctgtagctgtgaattgaaaatagaacttaacttctttttttggtatgattaatgattttgaataagtttttctgagctattgttttcttgatcagtttttaaaattaaaactaaaatcggcaaagactaaagttttaagaacgaggatatagacatagaaatatatattgtaaatattttaatagaatagaattttaggagcagttctttgactttgaaggaaacttgtcgctgaatatttgctaaacttgatttaacatacatgtaaataatcagtaatttttttttatttttcagagaatgcagaatctattgatcttaaacagtttttcgaccaacatttttcacatatatactatgtgttctttgaaaattttgtgactattgaagctagtcttaaacagaaaggtaagatgctaacatatatcttggcgtatgttaatatttctaataattgtcataaacataacttaaaggctgttggacatattgtttcacttatttttgtcggacagctttttgctttccctctcacactactatcataggtctagtgacctgtattttaaagacaactgatgggttagtattactatccttattactttacaatggcttgaagatttgctttttcactggtcaggttgatttgttccctcattgtgccttctttggttctgccctaggagcatatgtcacatttgagcagtcattttcatattttcattttcagagcttatttgaagttctttgtaatatatcatgatttgtttctagacataaatatgtggaacctaaatttaattacagtactcaaaagagtaaagagagtgactgtgatattgtctacacaatgaatggaatatgctttaaacattttactaaataattgctgggaaaaaaaaaaccttcattcttgaaatattttaagttcattatgaggacaaaatgatatgttttaaatgttttcttataaaaatgttttaggtcacaagtctcaaagagaggaattggatgctatactttttatttttgaggtaagtgcttctgaacctaacttttccctttttcaaaaataatttttggaacatacaaaggaatat

SEQ ID NO: 75064 - DNA, 1222 bp, Homo sapiens
aaaaaaaatttgcctttctcagtctgatctccatgagctcttcagcttctttttaggttaattcttttcagcctggccaagaaggtatagctctcagattcagttagccaggtagggtctggcagatctcacaaattaggatgtcaaggggttgaatattagatgagctaaaaggaatagatcagcaaaaaaggaaaagaaacggaaactcataccttttagcaatcactccccatttctccttacttcctgcccctgccagccattagatactttccatctctgtggttgactcttctgcatgtttcatataaatagaataataaatatatggccttttgtgtctggcttctttcacttagcataatcttttcaaagtccatcacattgtagcttataatactatttcgtgctttttacggctagataatattcattgtatggattataccatattttgtctatccattcatcaattgatggacatttgggttatttccactgtttgaccattatgaataataacattataaacatttgtgtgggcatacattttctttctttttctttttttttttgatagagatgagacacttttgccatgttgcccagcctgatcttatgttttcaattcttgggtatgtaatgttctaggaatggaattgctgggccatatgataactctatattaaactttttagggacctgccacactgttttccagagtggcttcatcatttatattcccaccagcagtgtacaaagattcaaattttcccatattgccaacacttggtattgtctgtctttctgattatagctatcatagtgggttagaagtagtatctcattgtggttttgctttgcatttccctgatggctaatgatgttaaacgttttttcatgagcttactggctatttgtatatcttcttaggagaaatatatattcaaatcctttgaccattaaaaatttttgttttacaattgaattataagaattctttctatattctggagactaatgttttaaaatcaggtatataatttgcaaatattttcttgcattctgtaggttattttctcattttcttgatagtgtcctctgaagcaaaaaggttttgaattttgatgaagtcaaatttattttttcttttattgcttgtgcatttagtgtcatatctaagaaagaattgactgattcaaggtcatgttttcttctg

SEQ ID NO: 75065 - DNA, 1045 bp, Homo sapiens
gcgctggtacaatacaaacttctcccgtcagatgcaactagtctagcgtccaaacatcatgcacaacacctcggcggcagcagcgcactgcacccactcccgccacggccctgctcatttgtgcatgatatttggagcatctggaggagtgggaatagcactggggagaggagggagcaagaaacagcatgagtgcctgctgagaggtcagccaaagttgtgcagggcgagcctgaacatgtcattggtgcaaacccaagtattgttgatgttctttaataggaacatctggtggaaccccatgatggcggtcttcatccgccttaagctggcccacaaccatgctgatgatgcagctatgcggcgtgagctgatggtcctgcgcggtgatgctgtgctggattttctggaaccgaaggctagacaacttctccacaatggcagctttcccctggaactgttgtccttcccacgtaaggcatgatgcgtcaatgtaaattgcgcctagttggggtctatcgttatcaaataactggtagtaatgtggaatgaagctggatcctatctgctcccaaattggcttgtctcccactctggaccgtcagccggcctcgcggagacccgaggggctggcacgatggctgcagcggcggcggcaacccagcacggtctcaaaatgctcatatttttaagtggtctcatgcattacgtatgctacaacttgactttctccttagtgacgtttttgagatttacccattgtgattcaggtagctctcatccagttatttttacctgccataacatgttccatttagtaaatatattctattgaatgaatattacagtttacccatttacctattaatggacagggaggctgctcccaattttttcactattaaaaacatttgtctcagacccagcacagtggcttacgcctgtagtgccagcactttggcaggctgaggcaggcggatcgcttgagattgggagttggagaccagcctgggcaacatggcgaaaccccgtctcaacaaaaaat

SEQ ID NO: 75066 - DNA, 1216 bp, Homo sapiens
tattgtcctgttagggtctaagttaaactatcttgggtatccatcctctagataaagtcctgtcaggagcactccagacataattgattttgttatatcagtttatatacatttactcctcgtggattctttggattgaaaatgatagttaaaaaaaaagtggttttggtggggtatagtatctagctgttactctgagtatatgtgattgatgacaccagagtttattatctccatttctattttgagaaacttgagagattgtttttcacaggaaaagagttttattttcattttgattattctgtatcaaacatttaggagtaatctttagaagaatagattaagaacaaaaactagcagtacagtttctttctagctcttataatttctaatctttttggatatatattttaagtgagccttttatttttagtctttaaagacaaagttagactcacttttcaattttttcttgatccatcttattaaatacagtgaggacagaattcctgtagggaagtgataatggaacttctcattgctaacataatcagagtaattgtgtttggttgcaggaatctatagagagctctgcttagaatctgtaaagaacaaatatgaatgtgaaattcaagcttctcgccagcattgtgaggtactgtcattttgcataacttttaagctaatttcatctcttcaagccttttctgagtgtagtagttaaaaaagtaaactaagtaaaacaatattaaatagtactttagctcatcatttgtgtgtgattaaaaaaaaaaaagaatagagttgcattggaagctgtattggagataggacacaaagaaaggaccatagaaaaaaactgagataattttagaagttttgcagctgttactttaaaaagactttgcaacgattatgtcacctggcattactgaaaatattagtataattagtataatgtggattagatttgcgaaatatacactcaatggtgcagttaggatgttgggctatagaattagtttctgtctgtctagacctatttccacatctttgggcagaattctctatttatgggaaaaaaaataggtatatttttctgtatattctgtttattttgcatttaacccatttatgctgaaggttgcaatttttttgtgtgtgtgaaaaatcagatcttggtgatgaccttgagcagtaggatataaataac

SEQ ID NO: 75067 - DNA, 1038 bp, Homo sapiens
ttggggcatctctttaccagcaacctggatgtccccttcacctctcctctgctagcatcttattttctccttaagtttggtagagtgtatctttcagtagcatcctgacaaaggatttctagaagttagttttttgagatttcttgtattgcttgtctattgctttataattaattactccaaaacttagtggcttaacacaacaataaacatttattattttgcagtctcagtggccaggaatttgggagcaacttagctggatggttctggctcagggaatcccaagaagttgcagtgaagatatcagccagggatgcagtcatctcaaggcttgattggaggctggaggatccgcttctaaggtgactcactcgcaggctggcaagttgttgctggttcttggtgagaagccttagagaacccatgtgagaacatgggcctctccacaggctgattgagtgtcctcataacctggtacccaggttcttccagacttagtgatccaagatagcaagacagaggtgactgtttttatggcctagatttctgccagattttgttcactagaagtcagttgctatatcttacccattttttttttttttttgagatggagccttgcttagtcacccaggctggagtgcagtggtgcaatctcggatcactgcaacctccacctcttgggttcaagtgattctcctgcctcagcctgccgagtagctgggattacaggttcctgcaccacgcccggcttattttttccttttttgtagtagagactgggtttcaccatgttggccaggctggtcttgaacttgtgacctcaagtgatccgccagcctcagcctcccaaagtgctgggagtataggcgtgagccaccgtgcctggcccatcctacccgtattcaagaaagagtattagtctctaccatttgaaattaggagtatcaaaggattattggacatgttttaaaaccaccacatctttcctgtctgaaaacatcttgacgctcacacttaagagtatggaattct

SEQ ID NO: 75068 - DNA, 2023 bp, Homo sapiens
tctgactaatgccagatgatttctggaatttaaaaatagaagttgtacttaggacatttcctttttagaattaaaagcctggggaatgcttggaacatgtattaaactctgcttctttcggtatatcagatgcccgcaggggaaaaaataaaaagtataattttcaattgaaatatggcaattgatattttaaatactacttaaaattcacactagtaattgataacatacctgcttccccttctggtacttaattagtcaattgatgatttattgttcattgtttagctttgtttagtagttatattaaaaacttagtgattatgtaaaagaatgtaaggaataaatctttttattacattttaggtttgttatttaagaaatatttttaggccttttttacatatgcatggattgatgttaattgttaatgttctgaccctttgttcttctgacagtgttttattaatataacagtttttgaactgatccctttagcacctgtgaaactggaaaaacatctgcacagtgctagatctgaagagggaagactatattatgatggtgaatggtatatacgtggacaaacaatatgtattgataaaaaagatgaatgtcctacaaggtaaaaaagcctttgttatttcagtgttgctcagtattgtcatttacaacatcgttgtcagtgaaatatttcctgcctccatagtgtgcctatatcattagttgcttgtggatccttttttcacttgacatatggcttgattacatgtgtgtacagcagtgttaatatgtatgaaccagacttcatattaagtttatgaacacaaactttaatgcaagtagaaatgttgaaattatttagccaggtagctgatcctgtttcttaattcttttagtaggtgaatcgttaggatcgtgctataatgacccttaaacctgactattatgaatttttggtggacctaataatctttaacttttttggatgtgttacaatattttagataaaaagaatttgtatcaattagagtaggaaataaatggaaaattaataaaacccttaagattaatagtaattaaagtataatctagggctgggtgcagtggctgacatctgtaattccagcactttgggaagctgaggcaggattgggtgaggccaggagttcaagactagcttggacaacttggcaagaccctgtctctacaaaaaataaaaaaattagccaggtgtggaggtgtgtgcttatagtcctagctgcttgggcaggaggatcgcttgagcccaagagtttgaggctgcagcaaggtatcatttcaccacaccattgtactccaggctgggcaacagagtgagaccttgtctctctaacaacaacaacaacaaacaacaacaacaacacagtgtaacttgaaaactgccttttaaaagtcctagtaatatgtctaggcttaaataaagtttatataactatttgtatagccttctaagttttatctggttgtgaccttttgaaaatattgttaatcatctttcattctccagtagtgtaggatttaattctcagagtagtaaacttctgtggtaacaaaatatggttttgtaggtgtcagtggtaaataaaacaacttgagtttagtctacagtatgcattttccaaatacagtggttttaattgtaagataattttgtctttaaatttttaggattccaggaacattgtgtataataacttttcttatagaagctcattgaactactagtttatatatgatactcctggattcttctgtttatgttattgtttttgagatattttactactacttagcataaaagttgtttaaaaagagatgaggccaggtacaatagatctttcctgtagtaattccagtacttgggaaggccaaggcaggagaatcacttgagccaaggagtttgagaccagccctagctggtctctttgtagagaaccccatctctacaaagtaaaaaaattatccttagtcccaactactc

SEQ ID NO: 75069 - DNA, 1876 bp, Homo sapiens
tgttatctaaatttaccttattagtgttaccaaatgtaagtgccatgagagtaaaaaaatgtattcaataacttaatattctcactgaatcatgagagaatgtgtatttgtaggtagtactctaaatagatctcattgatatgttattaaaagaaacagtaataaaaattttatcacgatccttacgttgatttgcctcttaggtccgatgaccaataggtattctgtatatggtaggggtttctttctaaacatttttctttggttttaaaaaaagttatgcaaatttgtcttatctttagtaaactatgactacatttatctgcaatttttaaaattttccatatctttgtcattcattgtgtgtttgtaaataaggccgatagaatgtttcctataaatggtttgtactagtacattagtgttaaaccagaactgaaatttaaacatatatatatatgaggatgtatatatggcatcatcagcttatttagaactgatggccataccttacaatcttgttttacccaaaattaagctattggggttgaaagctaaaaggagcacttttgtagaatagcaacttttcttttcctctttcttgattgtatggtggggtggtgacctatttttacaaattatacctaatgagtaaaattagtgtaaagtgataacatgcttctacctgtatttctagtgaccctttagcggcaggtatttatacctggtatttatgatgcagtatataagtggtgaacaataactgacagtattgtgcttgctgtacatgtctggtcttttgaaacagattttagtaagcattttccagaggtaaaactgtgtccttattctaattttattcctagggcaaagtagacagggattatttccttgaatctatttccaaattaatatttttttctttggtatttctacactttaaggccatttggtgcaatttagaaagtgttggcctcccttccgctagccacattcaaaattaacttccaaaacctcaggaacagtacaaagaattgaaaccctcaatatggcagcacagccggctgtagtgtatatttagggtacaccaaatcaggtattcctggtggtcttgtgcactttaatttctgttacaatgagttaagaggatgaggaagaaatctacttattaacacttactgcagaaatgtctgcattattccgtttgttttcttattattttacctctccaaacatcttcctgtgcagatcactacttcatagttgccaaattttaaaacacttaactgctgaaattcagtgtcagcaaagtgatattacgttgttctgtttctaattaaccttagcaaatgtacataatgtcaaaacccaatagtatttgacagtacttatgtatacaatgtttgataagcatttttaataagatttgtatttttaaatttagtatataataaaaagatgtgtttcagtgtgatttgtagtgtcttggattacttatgtgtatttagttctttttataacctatccacttgtaagaaagatttgaattggtttacgttaatagatatggagtaggctgggtgcagtggctcatacctgtaacctcagcactttctggggtatatttagatgttcaagacagctaagttatacttaattttaaaatatatgcatatgtgttgtactttgattaaaaggtactgtataagttaatgaaattctaaatagaaaatctttatttttttatttttattttttgagatggagtcttgctctgtcacccaggctggagtgcagtggcacgatcttggctcactgcaacatctgcctcccaggctcaagtgattctcctgcctcagcctcctgagtagctggg

SEQ ID NO: 75070 - DNA, 1054 bp, Homo sapiens
tcccagagatctactttgttcttgttaatgaccacatggtatttatttttatggaataaccacatagaattctatggtgtggaatgccagcacaatactaatgaacattgaggttgctgttttccttccgtctttcctccctccttccctttcttccttcttattaaacaaggctgcagtgaacactcttatacatatatctttgatgctaggaaagagtatatttgtagcataaatttccagtagaattgctgggtcaaaaaatggtagggaaaatttgtattttattagatattgccaaacttccctgcaaacaaattgtaccaatttgtgctcctactaacagcatatgatgatgcctatttctcctaatcatcagaaacactgggttagttaatttctaggtcattattgaagatcattcttctaccttctctttgtttttctctgggctgcatgttaggccatcattctactccttttagaagatttcattcactcattggcttcagctaccatttaggtcctaacaaattctaaatttaagcctctacccttacccgagttatatattcaagttgcccattgggcatttccatctgttactcttaacacatttacaacttaatataaagaaaaccaaatattatctcctgtgcacattcctctcccagtctggaatgtactctatttgtgcttccacccttgatacacacaatgactcacataaattcagaccttggagaggttgtggcaggtagctaaactcatgaattttggagccagattagctggatgtgaactctaccatttatcggctgtatgaccttgggtaacttcttttttttttctttttctttttttgagacagagtttcgctcttgttgcccaggctggagttcaatggtgtgatctcggctcactgcaacctccacctcctgggttcaagtgattctcctgcctcagccccccaagtagctaggattacaggtgcgcaccaccacgcctggctaatttttgtatttttagtagaaacagggtttcaccatgttgt

SEQ ID NO: 75071 - DNA, 1022 bp, Homo sapiens
ttatactagattcatcagtgttcacacaaaggtcatatccttacatatctctttgaatttgtgggacacatatggtgtaccacttctatagaagaaatattttcattttagaattcaacttttataacctttggcaacatgtagtatcaatggctctttgttgttcaaaaaaaaagtaaaactgtaagctatccccaaggatattcagggcgttgctatagcaacagaatctgcctcccagcaccacaagagaagctatgaataaaagatggtgttctaaggacaacagaatagaagaggttgtttcgatccttctaatacctgatatttgctgttattttgttaaatgcaaaataaaaatcttggggaaaggcccagtttcaatatagaaaaggatgaatttctatattgtacttcagatgttgtgaggaaaaagacatgctttctgaatagtatcagcctgtggtaggaagaccagggaagggccaaaatatttgatttatatatttttctgtttagttttgtacttcaggtgaagaacctcaaagacaaatgtgttaatcagaaatacaaaagaatgggattattttaaattctgacccaaaatagtttcctgattccatatttaaacacaagcatactttacataaaggtaccataaaacaaaatgttctaatttcagcttgcattgtttattctgaatccaattctttcatgtatacctacttggtcatcgatttttaatggtttcaacatagctacctatctacctaccaacctagctatgtttcatgatactgggtattttaggacccaaatctgaaggtgaaacacaaggtttcagttgattcagaagtgaacgaactttgaacctctctattccctccctcctcacccacatgtacatatgtatatcttgccacttgtgtcttcatatcatgtttagtttttatgaagcttattttgttgtatgaagctattggtaaaatgttattcagagaggaggtgaagaacttacccct

SEQ ID NO: 75072 - DNA, 1089 bp, Homo sapiens
aggtgagaagtcctctgtaagagacagggctgggtagcctgccctcatcctctccaaagcccgagttcttgcctctgtaacaaatggcagatacatatacagaacagctaagttaggcagcagatgagtaggagaaaggctgagataaccttgagtaaaaacagaataaaggggaaaatgtataggccaaaggggaaaattaatcggcaaaataaaagcatgaggaattaccctcttgaaaagagcaaaaaggcaactggcttcttgaatgaagagatatagagatgatcaactttgaatttttcagcacattacaagtacaaccgtaacagaattgccattgaactgcagaattcaagagatggtcttcttgcagaggtactaatattaaagatgaactgctacagaaaagaagcctacttactaacttactttacacaacccctctcacatgccctggtatttgacatttgcgcgtgaggcttgatcagcatcatatcctctgaaagccagctgcctttagtagatatggctgcctggcaggataacactccttgctatagggaacagaaggtatcccgtccccaaaagaaaccttcactcaggtttatgcccccaaactctttggagggagataccatcaccctgactgcatgccctttctaagacacaggctaatccagggttagttgggcagacaatggtcacccgtatattgagatgtgaagagcatgggaactgtctcctttaaagcagcctccctcctgcccagtagggatcttgaattaatatgtgtggttgagtctttaccccactcacttcattcattttgggtactcccctaccaaaaactccagggaatggagcactgaactgctgagctgagatggggagagtgtggtggggaaggcgctggcccagggttatcagcctcaacaaggccagctaggcaggaagcaagtaaatctatttaagtaaagaggacagaggctgcatatccaacataccacagagtgttgtgtacatagagtgtacaatcgatgtttcttatataattgttgaggtgttatgagaagtagggattaggtg

SEQ ID NO: 75073 - DNA, 2294 bp, Homo sapiens
atttaagccttgttattttatgcctttaaatttatgatatagtcaacatatatagttgctcagttttaagattattctcatgagggaaaaaaaccatttgatcatgcttttgaatattttaaatatttatagttcatttggcactttatctgcattaagatacttcagaatcttattcagcaatttgtgtcgttattgtttacagcagaactattcactggctgaacttgatgagaaaattagtgccctcaaacaagccctcctcagaaaatcaagagaagcagaatccatggcaacccaccaccttccatgaaaaactcctctcatccttgtcattttacttttttgtatacatatgtgtaacttacactgttattaattcaacggatatatatttatcaatgtagacttctctgtgaagtcaaggtttattttcacatgagtccagcttgcagcaagtaatcttcaaatattccagtaagttttgaaataatgaatgcattgaaaatagcattgttggaatttattcccttctgttttaaaggaggtattttggaaattgaaaaacttaatttacaagtgctggtacatcttttttcttttgtggaccacaggaaggaagatttattttgatattgatactttaaaaggactttatatttgtaacattgatgttaaccagtttattagtttaaatcagtactttgcatataataagcattcaacaaaaatttattgactgaaatgaattttaaatgcatgtgtatgaacttgtttttcttaatctttaagatgtcagtattcatgtaaataaacaatagatccagctttatccctttgacggtgtgactttgatcaatttacttaatctgtctttgttcttatttcccagtctgtgaaatgggaatgacaatagtagagactaccttattgattgttacgaagaagaggtgagatcttgcatgtttgaaactgtctgtcccaagggaattgctcagtagatgttagctaatattataaaaccaggtctgtttttggacagcaattaggatattacaaagaaattatagtacctctcttttgagagcctcccctttacaataccccagttacattaggcagtacatacattaccacagttataaattaaacatttgaaagatgcagctacagttatgtggaaattctttcatggagcagttgttcaggtcaataattgtttggtggttcactcctgtaatctcagcactttgggaggctgaggtaggaggatcacttgaccccagaaggtcaaggctgcagtgatgcactgtattccagcctgggtgacagagtgagacactgtcttaaaaaacaaacaaaaaaggtttggttgcaagaatcagaaatctaccaaatagcttggaaaagagttgttgctaaaaaggagcagaaatctggaactttattgcaggaagtacagtgaaacactgtaggatctagaaagtcgccagcaattaatctctttctgtgtctctgactgcctctcattctttgtctctgtcctctactcaccttgttttctgctctccctctccttttgtctctgttactctgcctttgttttttaaatcttacacatagtcatctatgtacctactatattatctttctgtggactggtttctctgaagacctttttatctctgcttccccacatggagtgacatgttagtcctgtcttcattagtcctgtcttcagagcctcggcttgttgtgtttgagctgctatggtgcaaactctgaactcagctctagaacttcacaactccagtgactgctgcttacctcatgttttgtgtttcttagctcatattctccagagattaaaccagactcagtgtgaccaggcgtctcagtcagctggggccagatggggccgaacctcttcgtaagaagtttgcagtgtacacacaaccttgcgaaaccatttgtggcagccctgaaattgtggtcacctcatagaaaatgtaggcattggaatcattcccaagaagataggggctagttggattccaccaatgacttaccactgtatttcatttctgcaaagcaaacttttatccctcaagatgttcttttctagcatgatcctgtattataagtacagctacaaatacctattccccactctgcatctggtccatgtgatcatcatcctgtcagaaagacatcctccacatttagtgacacattttactatcagcacaccagccattcagtagggaaaattaaaataaaaaattatcaattag

SEQ ID NO: 75074 - DNA, 1056 bp, Homo sapiens
ttgccattcaaaagctagtgcttgtgtgaaactaagaaaaagtctagaaagaattcattaggccaaagtttaaaaggctcattagtggatcagtgagaatgttgttagcttcaactaagaaatttgaactcaaaactggcttaaacattatgtaaattataaaataggaagtccatggtagcacaagcttcagatttaattgattcagtggctaaatcataattgtgagaaaacaggtttctttcccctcttaactctgcttggtgttaacttctttcccaggcagatggcaagatggctacagcactttcaggtgtcttacccaatacggcagtatcctgaggaactgccttctttaagggctttctctcaaaagatgtgaggaagctttttccagaagctctcctcttaatctccagcagacctctcctttactcattggccagaactggacccatgcccatttcagtcactgacaagaccgggaagccattggcttgggccacacagagaagtagtggataggtagctgcttgcataaacaaccacagtgtctactatagtcagtccagggtgtgtgtatgtgtgttttcaccccttggcctcatataccagattccgtttttcctttgtctgttgtcacttcacttgttcaataccctaggatggaaaggttatgaaaaaaaactaagcagaaaatccccagagcacctctttccgaaatcactcaggctcattagcagcgggtagttgatgggaaaatatgtattgccaaggatgagcatgttgctgcaatattactattatatattgttaacgtcatcctctttagagggtaacttgcagaatataaggtagatgttggttacagacagtaattggtattggtaaattggttggttttttttctgtcagggttcccaaggctgtacataatttgtacagtattttataaagaaaaaaaaatgatgcttagatttttctaaacattacctttttttttttaatctagagcttttctggaaaaagaagaaaagttcaaccacctcaagtaag

SEQ ID NO: 75075 - DNA, 1036 bp, Homo sapiens
aagtctaaaatgcattcaacacctctaacctaccaaacatcatagcttagcctagcctaaaacatgttcagaatgtgtacactggcctatcatgtacagttgaggaaagtcccttggcagcacagtacactgtagagtatcgggtgtttaccctcataccccatggctgactgggagctttgctcactgccactgcccagcatcacaagagagcatcgtatcacatgtcactagcccaggaaaagatcaaaattcagcatttgaagtacagtttctactgaatgtctgtcactttcacagcattgtaaatttgaaaaaccttatctagccatcataagtcaggaactgtactgagatttccttatacctaaaacaaacagtaaagttaatctagtgtatccacggtagatatggtatttctaagtgttctttttatcaaaatattctgctcagagctaaaacaagtccaaaaggccacattttactgtttttaagtcactgagcgactgatgaccttattttcctcattctaatatttcttgctttggttctatgatacagtagtaatctgattgtttaatagcatggaaactatcaatatattacaggttaaacgattaggagaacaaggggaattttttttttttttttttttttttttttaagatggtgtcttgctctgtcgcccaggctggagtgcagtggtgcagtctcggctcactgcaacctccgcctcccgggttcatgccattctcctgcctcagcctcccaagtagctgggactgcaggcacctgccaccacacccggctagttgtttgtgtttttagtagagactgggtttcaccatgttagccaggatggccttgatctcctgacctcttgatccacccgcctcggcctcccaaagtgctgggattacaggcatgagccaccacgcctggccaagggcaattatatttgcatcaagtgtataaaaagccacctcttaggaagttaggagactgatcaatcgccaaattaaacattgattcctta

SEQ ID NO: 75076 - DNA, 1002 bp, Homo sapiens
tgatataagagttctaaagatctttattcttcacattagccatggaaagctttaaatgtaatgttttcaaaagtttaagggcatggccttaacagtccatttaaaagaacgatcttagagtatttccaaagacttactgattttaaattatgatacttgaaaacagtaagtaccaacatgcttttacaagtatattgtttagtttatagcatttatcactcatatgtttatacatgtttttcactttatattttgaaactctcaagggcaggaactatgtcttgttcatctttgagacacagaatgtagtcaatatcgagtagatgtgcaaatgaatggataggacttggctgatagctcattattggactttgaaggtgtgttaactttgttcaaagcactgactgagagtaatttttagtctgtaacagtaactcctggttcttaagggaagtatcgggggaggggaatgctgaaaatcaggtcaacatcatgtacacaggccatgtgcgtgtgaacgtgtggtgggtctgaagcatgagtgaacaactggattcagctagaaaattagattgtaaacatatttcagagggccttgaaggtcacactaaccagtttgcacttctagtatcattggagcacaattaagttttagagaaagagagaaacttgtaatttaggtccctgtctggtggcattatgaagtctgagttggagagaaattggagtcaaggaaactagtttaggaaacatgtcattatccaagccagagagaaatgaaggtctgaatcagggctctgggactagaagggaagaaaaacattttagatactgcacgcatagaatcagttgccttttacaactgaaagaaagcaagccagtcatggaagaggcctccttacccttgagtttccttagagcactggttccctggattcatatgtgtgtgtgcatgtgcgtgaacgtgtgtatgacagtcatgctctgcataaggatgtttca

SEQ ID NO: 75077 - DNA, 1007 bp, Homo sapiens
tctttcagttgtaaaaggcaactgattctatgcgtgcagtatctaaaatgtttttcttcccttctagtcccagagccctgattcagaccttcatttctctctggcttggataatgacatgtttcctaaactagtttccttgactccaatttctctccaactcagacttcataatgccaccagacagggacctaaattacaagtttctctctttctctaaaacttaattgtgctccaatgatactagaagtgcaaactggttagtgtgaccttcaaggccctctgaaatatgtttacaatctaattttctagctgaatccagttgttcactcatgcttcagacccaccacacgttcacacgcacatggcctgtgtacatgatgttgacctgattttcagcattcccctcccccgatacttcccttaagaaccaggagttactgttacagactaaaaattactctcagtcagtgctttgaacaaagttaacacaccttcaaagtccaataatgagctatcagccaagtcctatccattcatttgcacatctactcgatattgactacattctgtgtctcaaagatgaacaagacatagttcctgcccttgagagtttcaaaatataaagtgaaaaacatgtataaacatatgagtgataaatgctataaactaaacaatatacttgtaaaagcatgttggtacttactgttttcaagtatcataatttaaaatcagtaagtctttggaaatactctaagatcgttcttttaaatggactgttaaggccatgcccttaaacttttgaaaacattacatttaaagctttccatggctaatgtgaagaataaagatctttagaactcttatatcaaaatgtccaacaagtattattaacttttgtcataaatcctgttttatacacatataacttattttggagttttatgtctggtcgtaaaatgagaactttacataatctgattacattttataaaacaaatacaaatg

SEQ ID NO: 75078 - DNA, 1689 bp, Homo sapiens
ggagaaatattaattgaagaaaataatatgacatattgcaaccactgcattgaattatcgtcatttgtcactatgcatttttgtcctcccatgtaactatcaaagcatatcagaaatataaattgttctacatggaagctattcaatatcttgtaaaatgaatttaacatgaaactcctagaatataggaagcataaatggggtttggagagaggaagtgtagtacaatatgtccgatagtgtataatacaaaaatacgacctaaggacttcattctgttttacttttgttttttattttcttaagtattttccattcctttgcataagtgtctttgcatggtattttaagaataaaaattgtgaaaagaaagaattattcaatagtatctcagatttttttttaatgtatttaggtggtccagtgccaagagacatttatcagagaattaaaaaacttgaggataaaatccttgaattggaaggcatctctcctgaatattttcagtctgtagtgagtataagtgtcttttaaaaataaatgaaaatgttattgtattctggattctttgtggtttaacagtcactcattgatctataagcaaaacactattttaataattcaaagatgaatgaacacagtcctgtataggggatatatctaattccttaaaatctctggttctgaatatttttaaaatttagaatttttaaaaagggatacttctattatatattacccacattctcaaacttaggccattttcatggcatagtaagtcagcctgggtggtggttgggcctgttactctgaacttgctaccttgtaaaacagaggcttcctctgtaaccttgctctttcagtgatccctctgcctctttaatctctcttccccaacaggctccttctctcagctcatatgcagttaatactaaacaaacacacacctcaagctgccactcttattctttaccttaaccaccagactttctatgtttttgtaattccttaactctagcattcattcattcttaccccgttttccaagaaccttaagaaacagtgttgtgctggtaagttagtatctttggcacatcaacatttttcagaaaaatgatcctgagctcattgtgttttcctcagtcttctgaggtgattatgtataatacctgccttctctaagttttgttttttttttaaagcagtaccatattagaactaaaataatatcaaagtgagattataccaaaactcctatttctgaaaaattatgtgagatagcccattttagcatggatcatataagttagtggtgaaaatatatttaaaatttattttaggtatgacagcaatcttccaaagttatagattgagtataagagtgagttacagaaaagaagtatttccagaagaagaaggcaggtcacgtaacaaaagggagcagcaagtcctaaatgacaaaatttcagagaagagttttagtgatttactactctcaaatgtaaaatgaggtttatgaaaatactaagggctgaagcaaagatcaaatgagataatgctgatcaaacacttagcatactgcttagcacatggtaaaaacctcattggcatttatttagttttataactacaaagtagctgtataaacgtggaaaagtcactctattcctctgatcttcaagatgtcta

SEQ ID NO: 75079 - DNA, 2752 bp, Homo sapiens
ttggaatgaacatgtttcttgttgcctctaatatctcatggctaattattatgaacatagaattgtcagatgaacctagaaatgactcatatcacattggtacactgattctcttaatgaaataatataggctggtattgggtcctgaatttagctgtgtgctactattaacattacacatgtgcatctctaaatttggtatattttcctgttagcttttcagaacaggtgcaacaatggcaaaatctcaggtactacaaccaactacaagcgactatgagaaagggtttgttgagagagcaagcacatgtgtcactaatgttattcctctgttctccctgctaactctattattataaaccaccaggggatagaaattgacgagaattgaaatgctcagcaggattccttggcccattcaattctttgctggctcaaaacagtgctagcaagaattgctgtggagagtgactagcagtcatacactcacaccatgctgaatttctcactgatggtcagttaatctatatgtttggaatatagttctggaatggatgatagcttctttttttaacccttagccccatgaaatggtaggaagagaatggagaaaggatggccctttaagcatattttgaggtgcctccaaaaaaaaaaaaaaggaggaaagatgtctatttagtctctagatataaaagctaagtggatttggaattttatgcatactatttgatttatcaacagaactactaaggaaagttcaactgaaaaaaatacaaatgtattttaatatgttagtgtgttccttttaatacctacaaatttaacctaactataagcagtggaatttttaaaaatcaaatttcataggggggaaaaaataattttttttaaagaatctcatttaccagccattttttacaaaatattcaggggaattttacaggagatttactgccaatgtgtggcctttaaacattatttcaaacataagtatatattattactatgtagtatcgtatgttaatatataacaattatgttaattagttgtattatatgttaacatctttccaattttccccttttgtaatttatgcattgatacttaatttgaaagaaactacttttcagcttggaaaaaaatagggacaaattttcacaatagacctttactaaaatgaaacttttttgaaaagtggtgggataagaagaagtagatgacttttgtgatgaagggtttttaaaatgagcactggaaatctaggtagagtggaaatgtatgtgtacttgaggttttgaggtcatctttgtgtggagttctgaaataaaaatgttaaataattctttttgttggatgttcactaatttggtcattaaaataaaaaatgctgaattaaaagaattctagtaaaaatgatgagttttatttctacgatgaagtagaatttaaatactctatggtagattattttctccagtggcccaaatagtgacattggttttcaaaattgtatcaatttgtgccacttaatgttgatggcttttctgtatataaatctgaacattaggtaagaatattagatattatgataaattttgacaggtaaagaaggtcactaaattctatcctatgtgtgatagtaatttattgttactattatttattaaaattattatgagtaaaatgttaatatgaattattgaaagtttattaaaatctcatacatttgaagggaagaatatatttaaacttatatttatctaaattctccttagaaaatagttgtgcaagaactgatgcgatttttaccccttaccccggatttaaaagtcacgtaaaaggtaagtaaccaccacatgacatctgagtcactgacagaagtctagattattagcaaaatggaatagaaataactttcccatctaaattttattttaaaacaaaaacatcttgccgtccttcatacttgtggttagatggtctttatgaaaaaaatataaagtgctgttaaggaataagaatttctgatttttgaaatacaaatgtatataggctcaaaagtttcttaatttagtttctagagttgtgaatacatacggaccacagactagacctgaaggaattccagggtcaggtcataaacctaacagcatgcttcgagactgtggtaatcaggctgtagaagaacgactacaaaatattgaggcccacttgcggttacagacaggtaagcaaagtgctaagtggcacctcataatgaacctttgcaaatggttaaaaaattgcagttcatttagtcaccaaattttcatttagctcctaacatttcttgaacagtaagtgccagtcactcaggaagtgttatgtgtatgtcaattcacttaaaaggtcatagtacccttttgagatggtggtggtgttatcactgtacagataaataaattgaagtttaaagagcccaagcaaacatgcctaagatactaagtgacaactctaaaaaaaaaagaaaaaagagatagtccagtcttgcccaggttgtacttgaactcctaggctcaagtaatgctcctgcttcaacctcctgtgtcagtgggactacaatcatgtgtcactactgcaccctgctcaaacccaagtcctcactgggtgcagagactgagtctccctctccatttagtcaccatgtctgttgattctgttttctaaataaatatctctcaaatctgcccacttctgtcttatctctac

SEQ ID NO: 75080 - DNA, 1783 bp, Homo sapiens
atgtaagtttgcagtttatctctaatcaaagtgtaaaatgtgaagtgtcaaaaagataagtggaaaaactggattggtcagtttactgtgattaaggtgttataagatttcaaaagagtagtatagcgaacaatggaagcaaaattgtaggtatgaaaaaaataattggaacgttattagtgttagtgtgttttgactaatggaataggcattaattttcagccctccattcattgactttgtgggaaattttaactgtttcatgttaaaagtaatagttaaccctgtttttaaagggcagagcagtgagctctagaactcaaatgagacctcattgtggggagtgggggaggggaacagtaaatgagtaatatagtttaaattctacaacaggggttttccccctgtagtatagtgataggcctctgcctgttttcagctatagatcttttttttttcttgttcgttttcttttttaaaatttaattttatgaccaaaagatatcttgccatgtcaggaaaagtctgagtgttcactcagcctaacacctatatatttcatgtctatgcttcctcattcacattggccaactgcagtttcaagtggagaatctccagtgatacagtgataatgcagggctttgctgagtgagagcactagctctcgtgttaaggaggaaaaatactaagccttagtgttctgaggaggcatttgaatgacatgttaattaagtggcattggtgccagaggctgaaggctttgatttggcacaaaataaaagatgagtgacagaatgattctctcaaagaaaattttaaatttccttaggttttcttttcttttttcttttcttttttcctctctccttttttaaaaaacaaatttatagcaaatgataatggttacaatagcagagaatagtgagtacttatatgtggtcagatctatgtgtcctggtataccaactttttatatttattaactgatattaagtatttcatttacttagcagaaatttatgtaaatatattaagtgtgtaattaattttggtcagattgaacctcagcagatggaattgtgttgttctcagccttttttagcaaaacttcagtctccgattaaagaggagaatacaactgctgttgaagagataggaagaacagaaatggggaacaaaaatgaagtaaatgacaaattttccattggcgacctacaagaggaagaaaagcacaaagaaagtgatttaagagatgtgaaaaagacacagatccattttgatccagaagtagttcagataaaggctggaaaagcagaagtaagaaggttttttggcgggggcgagagggtattattttaaaaaatcttatgtttacactgttaaaacttgttgtttgtagattgacagacgaatatctgcatttattgaaagaaagcaagctgaaatcaatgaaaacaacgtcagggaattttgcaatgttattgattgtaatcaaggtaactacctggaaattaattttcatagggttttaagcacaatttttatagttgctctaatcttttatttattttttaaatgaatagcttttagaacacaattcaatttatttcatggatttagttagtaattaagacagtagagtttccttctgcttaataatagactatattgcaaactggttttcattttggttacacaaagtaaatgctaacattaaaaagtgtttatcacaggtgaagattattttaaagttcctttaggaaatgaaggtgaggtacgagtg

SEQ ID NO: 75081 - DNA, 1517 bp, Homo sapiens
catgtccctagaaaagtttttgatggttcacttttattcattcaaaagactgcagatgggcgctctcattgtaaaattttcactcattttgataataatcttatattcaggttcttggtagttttctggatatgattttattctattagatcaccaactgatagaaatttccatataatgagctgtcacatcttagcatttacaaaagatctggacatttcatccagtctgacaacttatttcactgtggtggagaagtctttgtttttcagcttcagacttccattgctaaataatagttttttatttgaaataaacatgttgccatttatccctacactttatatgtatgaataatcttgacttttaaattagtttaaaaatcggttaaaagttaaaaaactaaaaatgtgatttggaggacatcagaataatgatatatttctgatatgtatttgtgtacatacttaaagagaaagatgcatgttaaaactttcacaaaacacttgtacttcctctgtttaaggctctgagctagaagtagtaggattctgaatagggcaagcctatattggactccatccaaaggtttgtatatattgaagtatcaaaagagccttcatcttttcatctttcatgaatggttttacctctaaaatggtcccattacacagacctaagaatagaatttgaacgacatgtcattttgtttttgtttttttatgaaaatctgtagctttcttggccttttgaaatggtaactgggtagagcatttcagtgtattattaaaaacttgataacttagagcaaaatagacccgttactctagaaatcttatttttgtgacaattccatatgtagagcttaatcgtgtaatttttgtgatgttgctggtttgcccctttgaagcttgacctcagagatgatgtggtgaaaattacaatcgattggaacaagctccagagcctctcggcattccagcctgcattgctctttagtgcacttgaacaacacattttatatttacaggtaaatttcttgttagaaatgataacccgatattgaaaatagaaattgattgtggttaagttagttggagtatttgacagttctaaacactatattaatagtgttgctaataaaacgttatttacatccggatttaatctaaatctgttaatttcagtagtgatcaggacagttaagggaatatagcccaaaagaccaatgtgggtatgagtgaatgaatgcaattctattcaattctagacctgcactgaaaattcaatacagttccatctatggtgggttataattaagcaataagacacggcaggtgtgtgtcatgctatgataatgattccatgccttgggtgagtttggaggctcatggagtgctttcagtggttcaagaaggggcattatcccagcatgacacatcctggagtgtctattgcaattaaacagtttcagcatagtttttaaaaagaaagtaatttctatgacattaatgtct

SEQ ID NO: 75082 - DNA, 1016 bp, Homo sapiens
gtccttcctcggcgacccgcgcgctcccctccctctccgttaatattctccgataatttccgaggcaaagatttctatcttttgggcgaatttgtttcatctctcttgaattcagaaatggagccttcaaaagtcttaatgtgtgtttattttttctagcattcaaatgaatgcgaagccacggattgaatcccgtcactctttgggggttagcttctcccgatatttcacacggaaaacaaaactgggtccctcttatttgtacttgtccttaacctttgcagcaactgctgtagatgcggctctgtccattctctaatagattttaccaggggctggtgacagagaactgatttcttttctattagggtttagcacatctttgttgaaggcctgtagaatgaccagggattagatttgcatctcttagacgccctgtgtggtctttgtgcgaagcttgtaactgttaaaaatgacttgttaggaagcgtgtgggctctcatcgctctccttttgacagaatgattgtgaaattcagattggccctgtaggatttagcccacagattccacctgaaccctaagcaattagaccctaatctccctgcaatcatatttgagttaggatttgttgcactttgtttacttcaattaaaagcagtggaataatttttttccagcttttaaagtgaaatctccaggcataaaaccttaggacttcttagaaatgcttttggtagtgatgaggatttcttttccgtgtggtttcctccaagtcctcatgaccatccccttccttctcccatttaagtgactcgttttttcccctgttgctcgccaatgcccaaagcgtcttcacaggggctgaattcgcggcgcaagggaagaactgtgtggagatgacgcccagctggaggggcgcccaagctcaggccgtcgcccaggtccccgatggggatcctatgtcccgccgccgcgcggagctttcccaacacggcccgctggctgactggcccc

SEQ ID NO: 75083 - DNA, 1094 bp, Homo sapiens
ggagcattatcttaaataaggctagtcaatttaccaatgtggtgctgcatgggagcagagaggactaacaaaataaaatagatctgccagaattttgatgttcaggagacactacaagaatcctccctctcctcactgagcttggcactgattaagagaaaagtgaatatatattcaaatagcacaggtatgcgcaacaatgggaggacctaattccacaattgcattttaattatataaatatactatgcatgaatgtactacacatataagtgggtatgaaacagattttggaaatgttgggttcttttaataagaaagaaaaactctgatttataatcccacttatcaaacccatataggacaaatattttctttgtaagataatatggaaagcacagaaatgtgtaaataagctatgctcttaaatctatctgttttcataatgacatttgctctctcattagtagaatagtagtgtaatgaataggagacccaggtaaactattaaaacgtaagggaggaaatctcatttgcatcattgtaaactataaccacaaagagaagttactgagaccatattgacgtggtggaaagaacaattccccctttatccttgctttcccttctctgcagcctctgattgttcccctcttccaagaatcatgtattggaaaccacaaccatttctgccattaacaaggtgaaaactagactatggagaaggtcataagggtatagacagaaggaattggctgcttgtttctcacttggcaggatatgtgggtttgggcagggctataaggttttcagggaaactctacctcacaagcaccactacctaaagcttgtgccaagtaagccttagaacatatgtgaatgattcattctaaactgatttcagaatgtttagttgccttcaatccttctgaaaaggcatcattgcaatttgtgcagcattaactttctcccaccattgtcaccatatgatatcttagtcaactgatctgcagctacaaaggaggacctagaattctaacttcttagcaattaatgatgctgtgaagccacaggcagataagtaattttctgat

SEQ ID NO: 75084 - DNA, 1049 bp, Homo sapiens
gctccagagaaagtaggtcttggagtgtgcagtggagaaggccttacataggaggcccacaggacaaagggatttagactgtagagagggcctctttccaggaggctctttgtgggagcacagccttagtcaaattcatcctggtcctaaatggtcagcagaggtctaaccaagaagccacattcagctgcttgccagtggagtggtcagagccccagcaagttgcccactcaggagccagcttgtgtactgggcaagaggagggcagcagtttcctgtgacagaagcactggcagccataaggtataaactgtggcccacttcctttctctccttttcctttaggctgataaggtccttcctttaaagaggaaaaaaccttaggggaaagtttaactagcactctcatcaccaccaatccatttcagagacctaggctgtcagatttttgggggattttttttgttgttcacaagataagctggaaaagataaatgtcaatctcctttgtggtctaaagatgaattcttacaatttctgacaaaagctgaacccaaggcctctctaccagccactgtgagaacagttaagatctcccatcctggatgaaagtacttcaaacccatcacccatcaccaacatcacaaggcagattcacactcagcaaacttattgaaacgtactgtgttgcaggcatttttaaaggtactttcacagttgatctcacagaaaccttacactgtatacataatactcccattttatagataagaaactgcggcttggggacctgcggcttaaggtgcagacatggccaagtccaagaaccacaccacacacaaccagtcccgaaaatggcacagaaatagtgtcaagaaaccccaatcacaaagatacaaatctcttaagggaatggaccctaagttcctgaggaacatgtgctttgccaagagcacaacaagaagagcctaaagaagatgcaggccagcaatgccaaggctgtgagtgtatgtgccgaggctatcaaggccctcgtaaaggccaaggag

SEQ ID NO: 75085 - DNA, 1033 bp, Homo sapiens
tctcatcccaaaccacacacaaagaaggaaagcacaatttcgacaggtcttgggaaaactcgacgaggccaagtatgaggccacaagacaccgtttttagttccgcgttctccctcttctaatcctattaggttttgtccagacaacgttttgctctttcagaagagaaagagcgttctgcgctcgtcgtcttggattcgacaaccataagcatcccgttagggcaaccaccgcagcagactaagttcgactactttctctccaaactcctcccgggccttcttcccaagctctctctttctcctggaggccccgcctcgcggcccggcagcgcggcacgcgcatgcccggtgctcgccgcttgcgctctcccctgcggcgcgccgccgccccgtaggccccacgcgccgccccgctcctccgccggatcgtctgtgggtgagtctcgagccaggaggctctgagccagtggcgattggctgacgcggtggctgcgcactcggcctgagaaactcggcaagcgcgcagtgtcgactccccggtctatgccaggcgcatctcaggtaaacggttgggcagggaggtttgggcgacggagaatgatagtggtgggcacagatcagccctggagttttcggccgcagacttttccttggagaaggagaaggggccccgcggaatctgtacttagtgaatgctgaccccgcgtggccgggagtgatggggctctctcgaaggtcagtgtcgtggggtcctcaggtggcagacagctctttctgggtatggttttggtattgtctccagtttcctaatactggacctgagcagctgagcatttattcaagggtgtattttttttgtttttttccccttaagtcgcggttagtcagaaggttccagtcctcgctcaacctctgatcgactctgtgcccatgagagagtcgttttatatttcatttctcacacgtggaagtgtgggcgaagaatgaggggcttctttaagcgcgctaagccatgctgtaaaaagatactg

SEQ ID NO: 75086 - DNA, 2237 bp, Homo sapiens
atggcccagaatagggtctattttggtaaatgcatcatgtgcacttgaaaatattgtgtattctgccattgttggatggggtttttaaataaatgttaagtgaaatggattaatgtttaagaaaaacagaggctgtgtgtgatggctcacacccagaatcttagcacttttgagaggctgagttaggcagatcacttgagcccaggaattcaagaccagcataggcaacatgaagagactccgtctctataaaaaaatagaaaaattagcctggtgtggtagtcccagctagtcaggaggctgaggtgggagtattggttgagcccaggaatttgaggctgcagtgagccataattgcaccactgcactccagcctgggcaacagagtgagaccctatttcaaaaaaaaaaaaaaaaaagaaaaaagaaaaccagagctaggtaatattaatagtaaaggtggtaaaagcagatgttacttaggaactaatgcaataggggaaaagaaacctcaatatagaagtgggttgggttcccatgagcataggcaaatgggactttacagctaaggagcagggagggggtcagtggatggaaagttactaacaggaatcatcagggttagagaagattgtggttaaaccaacttgacaggattcttgctgaagtcaggctacagtgatcaaagatggaggattctcagtaaactgacttagcagaattcttgctaaaactggatgatgcagagacagacacagaaacccaaaaggttgagggctagtatagtaaagggttcaaaggagcctcattaaagtttggtcaaggcaagatcctttttatttattttttatgtttttgagacaggattttgctttgtcacacaggctagagtacagtatactggtgtgatcactgttcactgcagcctcaacctgggatcaagtgatcctcccacctcagcctacagagtagctgggaccacaggcgtgtgccaccatgcctgcctaaaatttttttaatgttttgtaggaacgaggtctcactatattgcccagactggtctcgaactcctgggctcaaacagtccccctgcgttggcctcccaaagtgatggaattacaggtgtgaatcactgcatctgactatggcaaggatctctgtcactgaggtattaagtcttctgtatccctactgattttctgagcatgtattctgatgactgagagaggtgtgatgaaatttccgactataattatggatttgtctttctcttttcaccagtttttacctcaggtactttgatgctgttttgttaaatgcttacatatttagggttgcttatgtttagctagtaagttgaaacttttaatgtacttatttagtttgagtaatatctttgttttatattgtctgatatgaatatagccacccctgctttcttttgattagtatttgcatgcttttttcattgtgctctattatcctaaataagacatcgttaggaaagggtagtttttggaatgtttttactttgtgtgccttttgttattttaaataacattttgattttagaatgtatcattttatcaaatgtgacctaagatcctttaattttattttaaggtatgaggatataagtgttcgtcacataattagaaaaacttttgtattattacgttacattcttggagggaatctgaaaggtaatttcctgtggatatttttttgaatttgaatgctgaaatgctgttttgcatcgtctcaaacatgtacatataatctaaaaaaaaatttaaacatcgaaattccttctttttaatgaattattttttgaagtatgacaaacttcttctttaagcagcatgtcttgaaagtaattagtactttaatacttttattatcttttaagtttaatgtaaattgaagccacttccttaatttatgtcaaacagcttattgccagcatgggagtgcagatattgtgtgttatagcttatgatatcccaaagtagaacattttattcagtggcatgagctggcaccatgggctagattattctaattcatttgggtaagtgaactgcagcttagaaagttcatgtacaaaaatgcactgtcacaatttccttttgattctttataagtaagaaactggttttaggatttcagcatcttaatttctattgtctttatttcatgcaggtaattaattttcatcttattttaaattaaaatct

SEQ ID NO: 75087 - DNA, 1024 bp, Homo sapiens
cccattattcatttttgccactaagactaaactaaccaaaaaacaaaacaaaacccaaaaagcccattggttatatgaattaacattacagagtagcagaccaattaacattattaaattaagtcaacaacatgaagagatatatacttaaattccatattgagtttatgcagcgatgtagaaataaaactattaggaggaaaaatctgttacggtcactactgattatatacctctttatgctggtgattgattttaggggcttttattaaattaaatttacatactttttgtcatgattcaaaaatggggtttgactcaaagtttagttacattaaggattaaaatatttttacattaaaactatatatgttacaaaaagactgcatggtctcatttatatgtagaatctaaaaaagttggatttagaaataggaagatgatggttatcaggggctaaaggttggggatgggagtgattggggagatgttggtcaaaggagacaaaatttcggtttgacaggaggaataagttcaagagagctattgtaaaacatggtgactacagttaataacaatgtattatattcttaaaaattgctaagagagtagattttgtgttttcaccacaaaaaagacatgtgagataatgcatatgttaattagcttgatgcacccattccacaatgtatatttcaaaacaacatgttgtgcataaatatgtacaattgtgacttgtcaagatacataaatatgcatttaaaaatcattattaagaggtgaattttgataatcttaaacctgctctaacaggactaaaaattttcaccgaatttttaagaaataaaaaaagttttgctatgttatttattaataggaaaaggtcaacaaagtgttgagaaacgctgcttctgcttttgtatatgtctctagctgtttgttattgtgaccagtggaactttgaagagagttttacagtgatgcttgcagggtgttgctccatatctctatcttgtggagtagc

SEQ ID NO: 75088 - DNA, 1091 bp, Homo sapiens
gatggtctcgatctcctgaccttgtgatccacccacctcagcctcccaaagtgctgggattacaggcgtgagccaccgcgcctggcctgcttaatttacttaatacttggacagaaacactgtgcaactgtattagtattaattttatagataatatttttagctcagttgatttgtcattttgagatagcttttaaaaaaatgtgtcttcagaaacaaatttgtagttgaacatatatttctggatcctaagaaactataatgtggtaaaaaaaagagtacaacacttacataaaatttatagttgaaattataattttaagttgcaggaagaataaaactaattgtttcttcaaggaaatttgtatgtatagttcagcttgttttattttttcttttcataatgcatttttatcccatgttatggaacatctgttttgggatcatatttttactacatgcttttcattaatgaaaacatttattaagaatgactcaagaaattaaatcagcttttgtagtttctcagaaaaattaatggaggaggctgtgacattcttgataatgaacaagaaattggaactataagtctaatttattttactatctttaaaatcttcacttctagtaattgtattctataacctgtaagctgactttaatattacagtttttaaaaatgaagtacgtaggttgcatgcagcactgtcctttgggattgattactacagtaattttagcaaattacatagataaatattgtattttttggtgtttctttgagacatgtcttactctgtcgcccaggctggagtgtagtgtgcaattatggctcaattataaaattgtcattacatgtttaaaactcaaagtatggcttgttattaggatatatttattcttccgtatatgcctctgtttgttaaggtcttctttgttagtatttattgttaaactacagaaaatatggaaaatcgctaaatggtttttgttcaatttgagaaaaatctgttagtaagcattataatatatgatgaattaaagacctaaatgattatttttaactttatttttgaaagacattttctgat

SEQ ID NO: 75089 - DNA, 1088 bp, Homo sapiens
aaagtaacctgaattacaatgagagataaacagaatatttacccatcccttatgaggtgctgctgatatgtaaatttattcttctactttgcacaaatatacttttgagctactgcttaaacactttgaggtccttagtcaaacagttttaatgatgcctccaatattatgaaagtgtgacatttgatgaatgtctcatatagttttgatatctgggcacatgtcaacaaaaaaaattgagcattggtttgttatgcaacacctagataatttataattttactgtttatatccatcttgacattttttatctgccaaaggcaggtttcatttggaatcttaatctgagatttatttggtggatctggaaatcatagctagggttcccacaggaaatggtccatctaccaacagattaaatggcagtcctgcagttgttaggggagctctgcatttaacacacatgcatactcattcagtcagcgctgtggagaaaaattaaagtagtaacccaggtttaggaacaatgtagctaaaaagtcccatatttgctgaatgacaaagggttatatagcagcatttcattttattattcgtgcttgaatttcttgtttgctttgttgagtctgctgacgaatactaataaatgcctgcaacaatccagacgagagatgcctggcaacaaagctatgcggtggacctccctgatcttctccagttcacaacctgaccttttgaaaaattggcttggctaagctgcagaatttgggtgtaatggttattgttaactccagctttaggatttattaatttgtgtgatcaagacttacctatacttcaaagtttcaaaagaccaaacacaatcatccatccattagaactaacattgtgtttcagtgattcccgcttagtatctgactggtgattcttctattttgttttccaaatctaaatatattcttaaacaaaatgagtggcacatataaagaaagtttgttttttcctctttattattggaaaatttatcttttatagattatttatgaaattgttgaattcacaattggtatgtcttcattcttaacaaa

SEQ ID NO: 75090 - DNA, 1011 bp, Homo sapiens
taagaattacatatgcactggggacagtggctcacacctataatcccagcactttgggaggctgagatgggatcgacctgagatcacttgagcccaggagttcgagaccagcctgggcaacataggggagaccttgtctctacaaataataaaaacaaattagccaggtgtggtggtacatgcctgtggtgttagctactctggaagctgaagctagaggatcgccagagcctagaaggttgaggctgtagtgagccatgatggtgccacctcactctagtctgagtgacagagtgagaccctgtcttaaaaaaaaacaaaaaaaacataagaaatcactgtctgtgctttccaatgtggtagctatgggcaccatgtggctactgagcacttaaaatctgggtagtccaaactgagatttgctgtaattatagtacaaaaaagaatgtaaatttctcaaagcaattttttaatactacatgttgaaatggtcatatttgagaaatataatattactcattatttcttgtttgatgagcttatgagaaaattaaaaattgtataagcaatttgagcaatgtatcttttggatagtgctgatctatatgattaaacatatcaccgggactacctcattctgccaccaaccttttctttacttgtttgcaaaggttattcatattgtctgcctccctcattctttgtcatttcccctgagagcagatagagtttttaatttacctttacatcctacacagcacctggcactgtgttggtacttaataagtgttgaataaagtactcattttcaatacttgtttgctctccatatattctttagctgattttctaattcagtatttctggccagatgcgttagcttacacctgtaaccccagcactttggaaggccaaggtgggaggattgcttgagctcaggagtttgagagaccagtctgggcaacatagtgagatctcatctaaaaaaaaaaaaaaaaaaggaaacctaat

SEQ ID NO: 75091 - DNA, 1144 bp, Homo sapiens
cgggcactaaggaaagcctctatatcattaacagaccatgctttctaacactaacataacattgtaagtaactcaaatgaaaagcaatcagaaatagttactgaaagcattatcaaaataacaaacattgcccctagggacatatttttaaaaaactcttaggccccacattcttcagtttatgaagtgccatatttcttcaaaaggaaaaaggatggtccatggaccactgccaactataaaagcccccaggtccccatgacagccccacaactgcttcagactcttaagtcccaactctttttggcctatttgagaccaaatttaccattatctacaacttatcccaatgcttatctgattacagtaggagtaagactagaaactatatgtttaaagctaaagagtgtttccaaaaatatttatttgactgaatgatttaatatgcagttatggtgtttaatatatcatgtgttatttgtttgtttaaatacagacataacccacagttatcttgaacaagaaactacggggataaataaaagtacgcagccagatgagcaactgactatgaattctgagaaaagtatgcatcggaaatccactgaattagttaatgaaataacatgtgagaacacagaatggccagggcagagatcaacgaattttcagatcatcagttcttatccagatgatgagtctgtttactgcactactgaaaaatacaagtaagtgctcacagccttagatttagaaggaattggggccaggcgtggtggctcatgcctgtaatctcagcactttgggaggacgaggtgggtggatcacttgaggtcaggagttcgagaccagcctggccaacatggtgaaaccctgtctctactgaaaatacaaaaatcagccaggtgtggtggcacatgcctgtaatcccagctactcaggaggctgagtcatgagaatcgcttgaacctgggaggcggaggttgcagtgagctgagattgtgccactgtactccagcctaggcaacagagcaagattgtctgaagaaaaaaaaaaaaagagaaagttagaattggaagaactttttctccctcccttcttccctttcttcctctttccttctttctttttggtgttggctaa

SEQ ID NO: 75092 - DNA, 1117 bp, Homo sapiens
gccaccacacctagctaattttttgtatttttagtagagacggggtttcatcatgttggccaggctggtctcaaactcctgacctcaggtgatctgcccacctcggcctcccaaagggctgggattacaggcgtgagcaaccacatctgaactgcagtagttatttttaagaataatgttggtcctctgaatttaatttgcctgttcatgcacatatacacataaattaagtgtatattgggatgtttttacaatttctgtataactacaggtaattattactttataaataacttaaattttaaatttttttctggagttatctatctaggaagttaaatataatataagaattaagaaaaaaccaaaaactttgaaattaattatatttttgcaagacatttgtcaaataagaatccatgatttttttcaatgtgctttagcttcagcagaaattggctaaagaagataaagaacagagaaaactaaagtttaagctggaactccaagagaaagaaacagaagctaaaattgctgaaaagacagcaggtatagtagaggagtattaacacatggcttgaagaatcacacacaaggttattatatgatgtatcttggtgaatactagcatactggcttatttgccaaaggaggggaagctctcctttttttttttttttttttggctgcttagaaaataggtggctttaacatcctggtactggtattagtgagagctttacctgtattcatactgatttgggcattaaatgcattgttaacaccatgtcaatccaatcacaaaaaggttgtttgttttgttggaaggggctgaacaaacaaggggaaataatgattaccagtgcctctacctttcaaccagcagttcaaataccacttattgttttagctcgttgagaggaaatacttctcctttgtatgaagatagtcacatattcattgccaatggaaacctacatttgattaaaaaatctgttttgtgcaattaataagttttcatctgatgacgtagacgctaatagaggtaatattttccctgagattaaagtgaaaggttgccaaactttcagattatgaatgattaccttaaatatat

SEQ ID NO: 75093 - DNA, 1045 bp, Homo sapiens
ttaaaagatgtttaataaaatatttatagcattctaaattgatgaaaataacagtgttatttagtttctctggaacaaaacaatctagttaaaagagatatgtccaaccatttgcttataaaaatgacacaaaatgaaaattcccaaagttgttttaagggataaattttcaaagtatatctttcctctttaatattttacttctatctcattttaagaagagacttaaagtatttttcctataacattagaaagaattattgttattatgtcaaaataatatgaattgctgaagaaattcattggtttaaaacaacaaaaaatttggtaactgaccctttctttggtggacttttgaaccttttcatattttcccattttatgtatggtcttaataaacttgtcttaaataaacttattttctatctgatgaataggaggtacagtcaaaaagcaaaacagaacaacaaaaactaccttgtcagtatcttaatagaaaaaagagcagtataggactatgatgacatctaatgaattctttatttcttgtaatgtgaaagaacaaataatccacatatgcatggatgtttgtttctatgactgctcatttttatatttgaaataaaaagtgtatttggcaaaatatgttataagcacgcacacatacataagtattataacgtagttaagcagaatatatatgtttaaaaagatcaaaccatttcacaataaaagaaatacttataaaaacatctgaactaaacattggaaacagcaaataggagacaatctgtctatagattttaaaaataaaatgttaattaaaatatgaggtaccctaaggaaatagtaggcattttcttagagtatgtaaaatatagagatttatatttaaagatattcatataatattagttgcaatagcaagaaaattaaaaacagtctaaccataagggaattattaaataagttatgatacatttataatttgagacattttgtaataattaagaatatttgaggatatgagaaaaacttcataact

SEQ ID NO: 75094 - DNA, 1060 bp, Homo sapiens
aagacattttattgtttggcttttaattaaaaattaatgggttactgttaatagattttgaaagggcactaaactgaaaaatggacaagcaaaagaagaaacaaagtattggattattaataaaatcacagttgagatatagatatttaatatcactaatacattttactcaaatgtgaattcaaaataaaagaaatgagatgcaaaagatttcagcttttctgcaatatgtacctatgataaactttcatgtagactgttccttagcttcaagtctttttcctttgtttccccactggttttttcataacacaaatctgttattctaatgtgattttatgatagtttgaaactcagctctgtcccctatcatgttaaaatctctgatggttgactacctttcttttcctttctcacatcaccatcattactgtcattgtcaccatcattgatactgtttattaagcacttaaatgtttcagaggaactatgcttacttctttacaaatcaaacaaatatttattgtggactcattatgttctaggcactgtgttagacactgaatatagatcagcatataagacagatttgggatctcaggcatttttttgcctggtattacttctcaatcataatacaccatacatgttgtaagtagtggttaaatgcgcagacttgggattcagacctttgttctaatctttttgacacttatcatgtgtaatgacagcctcactaagcattagttaaaaatctactataggttgttgtgatgcttaagtgagataatgtttacgaagtgcttaacccatagaaggcactcaataaataataattatgatgataagatgatgatgtaaccatcttgttttctcaagacttcttcatctaatagaggacatactcaaagtgttcctaattgtgtggttatgtaaattactatcccatactaattatatagataagtatgggatagctatttatatatggttttgtttcacaaggaattgattgtttatttcttttgttaaaatagtttacaaagaatttttatttatt

SEQ ID NO: 75095 - DNA, 1054 bp, Homo sapiens
gttgaatcacatatagcatgtccaaatgataaaatttcacctgctattttatattttttaagaatactgaagaatataggaacatatgctgcttattttaattacagggttacaaagctatactaaatatttttctcctttaaatttttatgagtttgtactactgtttaatcagaaaaagttatttacaaagtaattgtataaaatgttgcaaagtccagttttaaaaaaacaaatagtctggtctatgaaagaagttctggagtaataagttgaattcagcattgttatgccaaaaacagaaacatcgaactaatttgagtcggttttggttaattttctactggtgtggggcatctaccatctattttaaaatttccaatagccagtttatgcaaagaaggaaaaattacaattattaaggaaattaaaatatataatgtttgtagttctagaatatatatgtggtggttttataaatgttaattgttctcatatttgcaagaaatgaatttaacatcattataagtcttctccagatggttatttctcatgtaaaactaatggtagatattcatagaatttgagattctttcatatgtagtaaagtctggtcttttacaaaattattgtgtatattatattgcttagaattttccaacatgaattattatccagttatttaatatgtttaaaatcctaatgatttctttttccttctttttaatttagccttttatatttacataactaccataagatgttaacagatggattctttttcctgtgaaatgtctatcctcccaattatgttatttagagaatcatgagccagtgtttaaactagaatgttatccaaggtactgtctcactcgtactgtattttaaaagtagtttgaaaagtgtggaatatggatttgccaatagacttgggtctactaagaaaatatgtactctgccttgactcaataaactcatacttagtgtggttcagcttcttcatatttactcttgcccatattagaaaacaattagcttactaaacaaatttgag

SEQ ID NO: 75096 - DNA, 1305 bp, Homo sapiens
taggtaacagcaagagatttttacttcaaatttagtgtaattatttgtcattgcttttaagggaacatagttaaactttgtaataaaaatactagccttgttttacttatgatggtgtccaaaaaaagagaggaaatacagtttctgataaaaatggaaagtccaggaataaatataatgatgagaatgagtgcttttatcactggggaactttcttcatctaagcacatatgaacaattgatccttgtagtcatatatagcagtaaacattaataacttaacagtctgaagtcagtgcagaagatatggagcattattgaaagatggagtcgagcaggtggcactttaatatgttcagtgtcatggttgactctaaagactagtcgaatgaaattacttgaggttctaaagatttaaaaagcgaactcattttgctgcactaaggaaatgctactgatcaggctttctgtgtcccttttttctaggctagaaaatattaaccctgaagaaaatgacatggtaagccattctctgaggagatttcttgatgtcagtcttatatcttagaggcttaagttcaattgagtgggtttcaagaactaagatgtgggaaaaagaagaattgacacactaataatgtacatctttgctgcaatatgaaaattcaataacttcactcagtcaatttacaattcacatgtgcctattaattaaaaccctatattaaataaaatatattaaaacttcatgtctgactaacatataatggtgttggtagacattacaggaattactgaacagaataaacaatgcagacacagggatagctattcagaagaatggagctataattgtggatagaatctacaagaccaaggaatgtaaaatgagaataactgcagaagaaatgagtgcactaatagaagaacgggatgctgccttgtctaaggtaactctgcatatatctgtaaaagcatatacttaccattttcctctctatttttttaaccattaaaaactgactttggcccagatattcttaattcacattaatttttagcacataattaataccacagtgattagctatattaaaataattatgtattttattatactactgttcaaaatatgaaacctcattttaaataaaatttaatgcagtctcatttcttaataaaattaaacttgttttattacagactaacttgttatagaaattgttatattttttcaactaatcacttttatatgggacttcttacttaaattacagttttctgaaggctgagactatgtctata

SEQ ID NO: 75097 - DNA, 1010 bp, Homo sapiens
cttgcctgttaaggccaaatcagtgatcttacatttctgttttctgaacactatatggagaatctgaactcatcactattttctagaaatgagtcattctatatatctaaatttattatcactcttttaatttctgtactcgtttcttggttttattgttgaaaatatttctaagatatttatattgctcctttagatgaaatataatgagcacaccttttgtgataatttagtggcttattttttttatcaaatattgtaatgaaaagtacagatccagagatctttcatgttcaacattgatagaaaacccatggaagaatcaaggggtaattaaagaaattcagctaaacatttcactgttcagattcctttaccaatataggctgcaagcctataccaagcaccaagctgaaggagtaaactaagtgagaggaagacatgaatccaatctagtgatgtaatgaagaaaattctaggaagactgctgaagaatgcatggaaagtgcattggtctgttctttttgactctttctgcctttaagcctgtttttccctcttactagaacatacttcctctctgcttgttgctcacttgtctgcattatacttcaaagccattttaaatatcatctcttctgtaaagatcactcacatgaagcaatattgataactatgtcatttgtgcccatattttaccttgtatcctgttacaggccttatcacactgtattacagttaattgattttatgcctggctttcctactatcatgaacttgcatgaagatagaagctgtttatttatttgtgtcaatcacagtcccttggatgtgaagttacttattatgtttgtggaattattgaacttggctattttagatatttcaagatacatgaaactaaaagcatttagtgaaatattattcattcatccacattttattgagtacctgttatgtgctgtgtgttgggaactcagcaataatccagatataaaaggttcttactc

SEQ ID NO: 75098 - DNA, 1048 bp, Homo sapiens
ttgtttttttttattatactttaagttttagggtacaaaattatagttttaaaatactagttgactttagggagttgaatgatagactgttttcactaagattgctcttaagttaatcaccactcaatagtttgaatgatgttcctggacttacatatacacatccataaaacaactttaagaacattaaaaaaaaaagaatgcgggtaaatgattgacttcattaaaaactagaaagtgtcctgagaactgtctgaggtctctaaagcttttgctacagtagttggttaatcagtacacaaatatttacttgcttcctgtagataacactagttatcatacttacatgttcagaaataatttgagtctgaagtctcaatgagaatgactttttatataatattcaacttgttgatactttgatttgtcatacgaacttttagttttagccttgttgtaatcttagaagttagagttgcttctgttaggatttaacaatgtttgggcagcacatattatacaagaaaattaagaatgagcacttaagtaattgacagctctgttgagattacaacatttataatggcaaataaagtttgcaaaccaagaggaagcacctgtgattccaggagtataataactgaaaaagagcttaataaactattaaactgtggctatcatccagtaaacactaatactctttcctgaactctgctttgtgttttaaaatagtataagaaacatctctgtccttttatgcaataactgccaacttaacatttaggttatactgttgtttgtttatggattttgagaaaatccattgaagtttacttaagaaccaactcattacaatggtattatttactgaattttattttcctgatcattagctaactacagagttcaacattacaaggttataactgtacaaaaaggatcaaaacaccacatcctagtagttgtattagccagagaagtagtcatcatcttagaaataaatgcttttgcagcactgaagagattataaaaaaggaataagccaaat

SEQ ID NO: 75099 - DNA, 1067 bp, Homo sapiens
attacagggatgcaccaccacgcctggctaagttttgtatttttagtagagacagggtttcaccatgttggtcaggctggtctcgaactcctgacctggtgatccaccctcctcagcctcccaaagtgcagggattacaggcgtgagccaccgtgcctggccgcaattcacaattttttaaatgaatagctttttatgaatacagttaacataataatcttagatagtattacgaagaatgataatagcacagcttactaaataaatagctatacatcttggtatctttaataattttaagttcactcatttttctttgtgacttaaaatgttccttcaaattagtcttttatggataatttaatagtttaaaatatgaatataaattactatattattaaatctctagttatttattttaatatagtattttaggattgtttatatgtagttaaaatatatatttatatatatgtataaatatatagaaacatgtcattgcatggcatatattgcctggtgggtgctgatatgttgcctaatggatgctcaataattatttattgaataaattagttatgttatatataaagtataaatatacacacatacatatcagctgtagtgtatgtggtttcagagattcatccacttaatttttggtatttgtaaacctcttattcttgtataagtattcatctaaattaaattgttgatattttgccagagtttgaagaaacaagttacgttttcaagtttaaaaaaactctttattccaagttattgtaatgtggaaaaagcattgtaattattatttctacatctaaaatggagtgatttttaaaaactcttctaaatgaaaaggaataaaaacttctatagtcgtaagtactttcaaacatctgcagttcagtgtacataattcacattgacaccaaagtttggtttctgttttgactggaaaagtctaatattatttttgtctgcaaaggaaagagttgtatcacatccaagtgggaagatgtttgattataatataatcaagatgatttgtgactcaaagcaga

SEQ ID NO: 75100 - DNA, 1044 bp, Homo sapiens
atcgtgagtacacacgatagtacagttagtgctatgccgtgttcattttctcgggtcataatttgtgtccttagtaacacacactgtgatttgattgcattctgaccaaatattttgttactggctataaaagacagagacacagtttaatatgtagatcatgtgtctcctgaaaataaataccacataatatgtgtcacaaaattttcaagtaaatttttaaaaatgtgataggtgaattaagttatcatacagctgatgatggaatagacatggcaatgtaaaaaaatctgcactgagtcagtattttatcatatttggagaatttagtttcaacaaaactatctgctaaattaaattaatgttgattaaaaatgccttgatattatggttattttatttatttttaagtgtgttttgattttataattgtattatatatgtatgaagtgtgtatactcaatttcatatttgtacacaaacatcattttgcaatctaagtcaatatcaggagtctggtaagactttttcttctaaaacattttgtatactcaaagttgtgaaatattgatacgtactgcctaatatgatttgggtcagaggcagaagaaatcagagtagtaagaaatgtcattttggatgatagctgcgtcatgattgtaacataataagtaatgattttttattcatctattatgacaactatccatttgtcaaataatctagaaagaactttttccagatcttaaatcagtatgtgtccttattagttgttttgtaaatattctaattttaaaatagataaattaaggaatggtttttaatgttttcctcaatggtgtgtttagtactttatttctttaatcccccatgtgtcttcctattgtcctgatttgcagcaccccattttatagcctgtgtaattattatgtgaagtgttttacatatttatattgaaatcttatattcaaatggcaagatatttcaaaaattttttgaacatagatgcttctattggctcattgaaactttaacttattattt

SEQ ID NO: 75101 - DNA, 1628 bp, Homo sapiens
ataaaattgtttccttagatatttctaaaatctagaaatatttctgaacatataccttataatttttatttttaaatattaataaaatgtgatcatacaatatcatattgtagtttgtttagaatccaatatgatttttagaagcacagttttattcaaccaacagatagataatcagaaccatttggtcaaagaagtaaataattttaaatatggtttgaccttaattttataaaactatttttgtgatttatataacattcagattaataaactaactgaaaattataattgaatttttagaatactgtaagcaatgtttttatttattgtatttaacattacttttacttaccattcttgttgcaaaaaaaaaaccttgtcttttagagaatacaatgatattatttacattaattcatgtggcttggtgaaaaaaaatgctataactcctttacttaatgggattcttcccctgtggcagtgcaaacggttagagcaggagcttcatcatgtgaaagagcagaaccagacttcagcaaacaacatgagacatctgactgctgaaaacaatcaagaacgtgctctgaaggtaaatctccgttccttcttgcaggcaaattaaggttgtaagcccttggtgccagctttctgtgctgcatatatcagttgtgtacatttcagcagaagtgagctgtggtgtttgccaacaaccccttctttaaacacagatacagcacccttttgttatggtattattttatttcacgtatgtgtacgtgaaaacaacacattttctgaattttgagtggtggtatattaataacttttggtaaatgtttattctgtttcttttttatatcattaccttttgtagttaataaaaagtgaccatactaaaagaaaaaaaattaaatcatgggcctttgctttgcatcaatatttattataataatttttaaaaggacttgtaatattcacagaactgacagtccttgaagaatatgtgtttgggaaatgaatatgtgtttgaagagcgtgtttgggaaatgaagaggtacttagaatgttacaataaaagagagagaaagatggtaaataataaattcaactagaactttaaacaagtgaaatacacatttcatgacaaaaagttctgtctcattgtattatagatcgagtaattatgaaaaaggacatggttttaattctactaattgtatttttttcttaaggtgcttgtgacttttcattctactttttatcttttgcctagttcccagtatagtgcctgtacacagtagttgtctctaccctcaaggtgcttgcattctcatgctaacctgttaaggtttaaaaaaagaaatccatgagaaacagaaaagattcatcagtttttattgtacaataagaaaagatttgctaccaagaatattatattctactttgctgtcttaaatttgtttttttgctgcatattacagagcaatatcatggcattagctgtgtaattcactaagctggaatcatgtaccaaaattgaggaaaatggtgacattttaatgtagaaaatatttttaatctgtctaagaagtacgagatttggtggaagtcaggtttttccacaa

SEQ ID NO: 75102 - DNA, 1598 bp, Homo sapiens
tggtcaggttttaagtctgaggtgcctcttttaaaaattttcatactgtaatagttgctggaatcttacttgtgttagtcatttactggtttttatctagatctacaagttttcagataagtactttacttttagaaagaccaagaaagaattaccaagaaaacttgagtattctaagatatattaatatcatttgttttaataaattctgctgtgttaattaccttcaccttttgagaggttgtaaaatgtaagtagtaatcttctttctaattaagcaaatgttttatatcttatatttttgtaaatttgatttttaaatgacattcctttactggcttttgttgctgttgctgttaaactggatttttatatgctgaaagatatttaacatacaaatgaactcagctcatcatggcagaggaagaaattcattgcctagaaacagattgtttgtgtactattagatggtaatataaaccaacaaaagcaaggaaattaacttcaatactgacacactgccctttccttgctcttttgtgcccatagataacatgcatattttataataccagagtatagtggactcagttaagaattgtcaaacttaattctaaatgtctttacttcgttggtttgtcacaacattattattttgtctcaatactatataatgtcgttcacatttgagatgaagcaatgcatggatggatctgaaaaagatggcaaaactttacttttctcttatttattattgattgcttctgcttagccaaatattatatagctctgatattagttcttcacaatttttaaaaaggtaatagaaaatgataaaatatctgaggaaattttgggaaaaatatagctactgatataaaattgtcattcagttttatttttattcctattcattaatttttattttattatttaaaaaggcagacatctctttatttaaagcttacagcacaaagaaactaccagttttttaaaaaaaattatcaaatatacaaacaagtgtgatttcagagaacatttcttacatggattgcacaaaggaattatttgtgaaattctgagggtaggactaaacctctcaaaataacctccaagattaatttgggaactgattgatacttacttggccattcccttaacagtacctgtttcttgatgtatatggtgaaatataaagaattaatttttctttagttcttatatttactagttaggttgtaacttatcaattcctaatgaattttatccctgttttttaagggcaattttatacaattataagtaatagattgatatttcagtgtttgaaaattgattccatatatgaattgattccaaaacctgagttccatgttttgtagcagtttgggaattattttactttctgtcttctatttttctctgtaaatgatttctactcctacttaggtacctattaggatacagttttctaaaagagaattacatatttcagttaaagctctgcatttttctgagttgtacgttaaactttccaagaaaaaatcagatattttctgtaaaaactatacgatagaagaaataatctaaatgtggtc

SEQ ID NO: 75103 - DNA, 1065 bp, Homo sapiens
gctttgttaattttttatcctttatccttttatcatttctcaagttttctttttatatcttttgctttataggagtggtttttaaaaatatgtttataaacctacaaatgtaattttccctttaagttgatttatgtcttctttagtggtttggaaataggttgagtttcagcctacctgtcatctcttagctggtcattgtttccaatttatagacttgtgctttttaaataattatatggtacatttttattattttatgacattcatatgactctgaaatattatataaactttattctcaatttgagatgttcctagctatgatattttagtttaataaaattgaggttcctttctgatttgtttcagtatttattttcaaacctctttaattctttagtacagtagacatagcaagatgtcatatattctgtgatgcattccttctacatgcaaattcttgattacagtagcagacatttccatgagattacagttatgtcaagcctggttgatgcaaaagaggaataattctgtcttttgacaataaattgatcttgtttctccatataactggatttttaaacactttttgtgtagttgaaacccttttgagaagccaatgcaaatgtcgagtcttctccctaaaaaaaaaatacaagtttacagaaatttgcatagaattcaaggagtttatgtccttcccaagctcactgatgagctctaggttaagaacctgtattctaggtcttattttatttggataattgttaattgtttagatagttgcttagacagttgttaatgtagtagagaacagataaatcactgagtcaaatacagaattaagtgcttagttaattaatatgtcaccatgttaggtgttaaaaggcataaagcaataattgatcttactagctttaaatataaatagtattttaacaatatcgttcatactccataatggctacacatatatctgtgttctaatcccagcttttcaatggatttgaaatacaaattatagttatctcatttttcccaacagagccaattgataat

SEQ ID NO: 75104 - DNA, 1078 bp, Homo sapiens
ccacaaagtagaccttcactaggggcacggtggtggttggtatttgcgagcggattatctccttttcccacttccgcagttggggcactcacagtatttggggtgtctccagagtcctgcaggagcactctacttccttcacagggtctgtgggtcctcttaggattcctggtttgttcttgcagttattctggagctaaaattcgcaatgtgagcctctgcatgctgctgtgtccatccgagtaggagctgcaatgtagtcctgcctcccatctgccatgatgatctctcttcccaggccaaccttttcgtatcttctctggccatcaacaataatagccattttaggcacatttctagggagactacttcagtttctatagaataaagaaaaaacattaaacagttttgcgtattttgggaaactgaaaagtgaccaaaaacttataatatgaaaaccacaatatcacaggtaagcaaatcacaccccttctagcagtgctatgtacaaggtgtgcaggacattgaacgagtaagatcttttcgtttttctttgatatgaagtttatagactaaatggaaactcccaaaatttacttacatgttatgtaccccagaaaaggcagataaatgaggaaagtctagtctttatttggacaagatgtcaatagtcttttttatgatttcttgggttttatttaaaccatagaaatcaagatgataatgtgaaacctcatttttgaaataagaatacctaataagtagggaaatatttgttgccatattttgacacatcacttgatatactatagaaagcaagattgcaattaagtgctgacagaatcagctctacactataaggggccaacgcatctcttatcaaaattttcatttttgtttgtccataagacaatttagttgcaacctctgaatgaatatgtgtattaataacttcactcagtttcatagaccaatcatggaaaccatacaataatgtgtgtttcatgtgacccaaggtaacagagcagctgctagtattggtgccattttgggaggaaaaataaaacaatcctctgac

SEQ ID NO: 75105 - DNA, 1049 bp, Homo sapiens
aacatcctcataattagaaacttgaatattatatttcagaaagtggtgtctacaaactaaaatgtttttattttttgtttgcttgcttgttttgctgatttctttgtatacatgaaatgtttactgcaatgaaataaattcttttttgggtttagtaaaattgcttctaccagtcacctaggaaatataagctagggaacaagacactggtatttagtcataccaagaggaaatatattgcttcagtgaactgaatataaaacatgatcagtgaaaacacctggaaatcagaaagaacagattttagttatgcttctctttttcaaagaacttaagtgcttagctattattgttagtgctggagaagtaagttggcagtgacatttgaaatatgataaataaaagcctgcagaatgtctgcttctacttgtagcacttgtctgattccttctccagaaattgcataatggaaactaccatagatttaatgccactctaatatatcaccgttacttgttttaataaatgcattctctattgctttgtaatgataaagctatagttactgaaactgtcaaagttacagaaagagaaggataggagctttttgtctttatcacctgtattaataattggagataattactgcagagcagctggctgttggttttagggagcatcaattgttcttcttacccagctgttgactaataaggatagtcaacacatctgtttcaacagctggtaattaacaaaagcctaattgctgcaactcttttaacatccaatctgtgaaaaagaagggatgtagaagaatattatttactttgtgctttgcactttctgaaaccagtttctcttttttctctctcctcactttttttttcttactttgaacaccactgcctttgtatgaagcattgaatggcaggagaacacaatatggtaatccagagcttaacttttttagatctttgttggtgtttcttattgcaacatttctttgctaacttgcaagataaaatggatcaaaagcattttgagtagtt

SEQ ID NO: 75106 - DNA, 1066 bp, Homo sapiens
atttatatataatgtatacagtggtataaaaagaaaatatgtattttggaacaaatgggtctgaatttctatttgagttcactagctctgttataattagaaattacttaagctttatgaacctatgttttatatcttgcaaaatagggataataggaactacctcataggttggttatgagaatagaatatagtaatatattttaaacactcgaaagaatgcctaactgatagtaggtggtcaaaaagtggcattgatttgtagttaagcttggatgttttaaagcgatatcattataggcagaaagtttgggcattttaaaataaagtatataactttattatccatataaaactttatatagctatatatatctatatatagtgtaaatgcacacttaccacaggactcagcaatttcactcttaggtatttacccaagagaaacaaagttatatttccacaaaaatgacctctatgtcgatatttatagcagctttattagtaattgccaaagaactagaaatcagccaaatgtctaacaggtaagtggatgtacagattgtgatacattcatacaattgaatactactcagtggtataaaagaataaactaccagtacatgaaataatatggatgaatctcaaaaaattatgtttaggtaaaagaagctagactcaaaagactgcatactgtgtgattctatttatatgacattcttaaaaaggaaaaactgtagggacaaaaatcacatcactgattgccagaggctgagtgtgaaaagaaggcattgactccaatgttgcacaaggaccatttgggggtaacaagaatattctgtgtcaagactggataactttgtcaaaatttacagaactatatagtgaaaatgggtaaatctttaccttatataaattatgactcaataagtctgacattgaaaaatccatatgtgtacttacttgcatatatgtttactttgataaaattttacctaaaatatgagtataagaagaaaaagtgttatacttgtgtaaaatgtttatactatagtaaaagtataaa

SEQ ID NO: 75107 - DNA, 1058 bp, Homo sapiens
taataatcttcatcacttgtcccctaacctatgaaaaacatgttttccaaagagtacaaattcaaagtataacattttcttcaatgttttgtgttaaaactgttaccctagaaaatacagatataatttttaaagctacgtttgtaattccttctgtcttatatcttggagttcaatacatatgttatcttatttaatcccttcaacatccttgtaaggcatcatccctttttggagaggagaaaactgaaacagagagaaaactaacatcccctaggttacattaaggccatcgacagtggcataaatattatctaatcctcctgatagctgggccttttactttgctactggaccccttcctctactcatgcctccctcagaaatacagctgaagcaaaactggtacttcagcattatttccctaatttggatatgcttgacatgtttattgcacaaaacacatcactgagaccatgttaaaggcaggttaacacagtaaaagaatctgacctgctttggagtttaacagtctttgtctgtgttcaaccaaactgcacaaattacaaccacagttgatgtctggatttataaatacacgccctttgattttttttgaacctttaagctctagcattatatcatatgttaggctacaaaaactaaatactgtgcctaacagcaattttatccatacaatcataacagtttatgtttattagtatgttgtggtattaatattgttgttttatctgtgctgtagcacaatcactaacgtaacaacaatcatatttagtagtaaccattaaccaaatagctattttgagttgtatatgaatttattaagagcctactgtgtactaaagacttttgtgaaacatagagttaacagaggataagatgcaattgctaccttcaaatagattataattaactggagagaaaaaatatatactaaaaatgaacatacgttactatgtgctgttaaatgaaataattggacacttccatggcaagtcacagaagggagagattcttctaagcttgaataaatttca

SEQ ID NO: 75108 - DNA, 1343 bp, Homo sapiens
tcacgccattctcctgcctcagcctcccgagtagctgggactacaggcgcccgccatcacgcccggctaatttttttgtatttttagtagagacggggtttcaccgtgttagccaggatggtctcgatctcctgacctcgtgatccgcccgcctcggcctcccaaagtgctgggattacaagcgtgagccaccgcgcccggcctgtttattctctttgcctagcacttgaccattaaagatttgagatgaaaagaaagagatatggctactaaaaagtctctcttttcaatgcagtcctaataacaaagtgtgaaatctgggactcagccaagtgttattaatatcttaaaatgatttttaaatgttgcatttattaaaatttaatatagcagaaaagcatcaattatagaaatagttctgtgagtatgaacaacaaatgaaaacttgattaaagttagccatatcaagcattcttcacttgaagtatcttgccagcttctgagtaatgctttgatttggtttgaaccttttgtatgcaacaatttttaatgcaagttactacagttctttctgaataatataggtcatgagaagttcatttgtaggtggggcagctgtactactttgggggactgtcttaatagatccatttcattaattgtcatgaattttttattaacaaaaccagtacatcaggtttagccagctgaaaactgttctcatagttgttatctttattgtcagaaagaatattgtgaaaataaggaattactgcacatgctttaactcttgattaaacagaagaatggcactatccatgaaaaataacttaggggcatattatcaagttgacgtatagtgttttcagttttgcagctcccattaactttaaagccttgtgctttaacttcagtgtcttccagttaggaataatgccagagccgtctgttaggtactcaagagttaatgggattaatgtcaagtagcaggatgttcattctctcttccttaagctttattccttaggtatttttagataaatgtccttctaaggaatttcttttagaaaccttaggcaatggtattaagaagcagcagtaatggattggaaaatgaatgatgttaggatgtgcattttatttaccaatgaaagaaatttccttcaattcccatctgataatctttattattaagtcatacatagagctttaaaagtatgatttttttaacttcaagaagtctcaagagatttcttaggcatatgataggccgttatattgttagccatattctttgtgtcttcaaggccataatcactttttacttcctacatcttgtgaga

SEQ ID NO: 75109 - DNA, 1020 bp, Homo sapiens
cactgtaatagaatacatagaacacatgtaatagaatatattttaaccttctttatgtattgttaacagcactacagcattcacatatctagtcaccttcaatttcaaagatatacctttttccttaacaatttttatgtcagttttacactgtgaagcagtgctcacatcaaggtttcttacttcccactacttcttatttgaaaatgtcatcttgaccatttcctcaatatccctgaagttatattttgattaatagccaaagttatgtaagtcagtagttttaaattagaccattttaaaacagtttagaaattgtgcattttaatctttactagccatgtaccttgaaacttttgatttatgtaggtattatatatatttgtaagtttaaagatggggtttatattcagtcagaaactatatgcagttattcacaatgtacgttaatattctaagaacactatgatgtataggtagatctcatttcattataaatcacaatcagtaacttttgacaggatctgatttggctctgtttgcttaaagtctacaaatacatacaaatttcaaatttttctttatatataatccattaatttctatacatgaccaaaattccctaaaacagtggttcccacagaccaattctattttcaaaaaatcttcggatgtgttatcaaccttttattttttagatctcatcaactatcatcatcatttcatttaaaaaaacaatttttatacaccaagaagtagaaataatatcatctcagataatgttttaaattaaataactttactgaatggccaagataaccaaataggaacagctctagtctgcagctcccagtgttgatcgacacagaagatgggtgatttctgtatttccacctgagatacctggttcatctcgttgggactggttggacagtgcatgcagcccaccgagggtgagccaaagcagggcagggtgtcacctcacctgggaagcacaaggtgtcgggggatttctttttc

SEQ ID NO: 75110 - DNA, 1003 bp, Homo sapiens
tggttttggacagagtggttatgtcgaggtaaagggaactaaagagcagctaagagcacaggaacttggtaggaaaaacttctcttaatagttttgtcaaagactatccctaatccccatttattaaagagaaaactgacacatcaatccattaagagatgtttttattattcatgagagatttaaaactttgtgattctttatgctatagtttcgtttccatctacaagtatgcttgcttcttgtggcctggaacaagttccaaaggacttttaaaaatacattttgctatacttagcatacctaagctccacatagtttcttaaagtaaaagtaattacaaccaggcttataaggttagaactcttaaagatctgggttttacactgaaataacttttgtcatatgtcatttttactgtgggccagatttacagtgatatgattcaaattccctcataaactatatgaagagttatatactgtaactatataatgaatagatgagacaaagagatatagaaaaattgtaaacttttaaacagatttgtaagaaaagatgtatcaactcaagaactttcatgctttccataattttctaaaaagaaaaaatccattatttaaaatttacaggagttctgctcatcttaaatttttataacttaattataacatcaaagatcaggttaaaacatttcaattgataggttttgtgaagttgtagattgtcttttgaaatatagggcaccctatatcttttgagcactattgaccaaacacacacacacacacacagctgtttaaagtcttttctgctatttgaccaaatactgatttctgtaaagaaattggtgttacaaagaaattgtgaattctcagcctggttttcctgctgacgagtaagagtctgtagttctcttcgaagtgtcaagggagtcaccatagtgtcacacaagggttcttagcatagagcaaacatacttcccacaaactcagctgcttaa

SEQ ID NO: 75111 - DNA, 1054 bp, Homo sapiens
atccctactgggtcagggatttgccgatgtccatatttgcccattggtaaatttacagaatgaagaatcctttgcttgtttcagtgtaactttgtctgatggagaaatcataaacattgtccatagattaactttattcttgatcatttacatttaaggagaaaaaactttccataacaatattgaatataattacagctgaagcatatcttctttcttccttcagtgttatacattcttgaacaactcaacagaggcacttttcacttcttaacctaaatataatgaaaaaaaaaaaaagctatactattgtagactactttagcaggtctttctataggaagactgaccaaaagtgacaaaaaaaaagattctacaaattccatgtaaatgatattttggaacctactaaactaattttaatttttttagttgctttggcatttatacaatacaaactaatagttcttggaacgtcatcatctttttagtttttcgtttgcctcatacaacagtatactgtgtatatgtaaaagcatatgttatatctctttctgttaccatgtgccatataacaagctatataatggtaaaaataacataaaacatttttagtatcttgaaaaatctttcttaagttaaactaatctgccttcttagctaagttatgtgtatttcacataacgtccaagaagttctctagtaccgactctcagagggcctaaatctttcccagaatgatgggagtagcacagttcaagaacaagaatgaatctctgtataatcacaccacaatgtgaggtgaccctaagacagagaactgatcagatacacatatgggttttaggaagactttctgatgctcttttttaacacagctgtgagaagaatgtggctaagacccagtagtcattcttgaggagagctggtaaaggaaaccatgaggagaagagaatttaacacatgggtgtaagagagtccggcttcattgatgcgatctgaggggaatgcctaatgactggaagaatcaaacttggcaatgaaaacacaaagc

SEQ ID NO: 75112 - DNA, 1035 bp, Homo sapiens
gttattgacaaaatatatactacaaatcttcacattaattaattgactttcttttattcttgaaacctacttttaggaggtcagcagcaaaatttcaacccattactttagaatagaaaatgtgaatgtacttcttattcccaacatatgtgtgtgatatttattcataagcaatattctattgatttttgagagcctgttgggctagttaccaaatatacagtggtaaacacattgtccctacccttatggagcctcatgggcttgttattggaattgagttttcttgggaatgttacatatgatttaaatatcccctgagagacaaagtgaaggagcccaataaaattgtaacttaatcttaatttattctattatctcaatcactttctaatgttgttaggggattaagcaaaataactccattatcttctgttacgtactttcctaatagtatcatctaatacacttagtgctgccatgttccaactggaatccaggggacaatctagatatctaacttacaaagccttaattaagccttgggtaaaattataccaaaggtagtattttaatctagatatctaacttacaaagtcttaattaagccttgagtaaaattataccaaaggtagtattttaaaatccaaaacttgaaataaaattactttagtgatactataaagaaggaaatattgctttaattattctctatgttctcatttttaaaagaggtgaaataaaagtaaataaaacaaagtttcacatattttaatttttatatccaacgtttatgtttattattcaccttagtaggtattaattgatatgattgattggtgagcttcatttttcaaggttacctaaaagatagtagttagtcaatgtttaaaatataggtaattttttggcgccttgtctacttttgatattaatgacattgaaaaaggaatgtcgtatatctaatctaaggacagttgaatatacacatatcaagttttttctgtgttctatttaatctcaacaataaatcca

SEQ ID NO: 75113 - DNA, 1363 bp, Homo sapiens
cattgcatagtaaatgattcattcacaaccttaatgcaagtagctaaatgtattgaaataagtgtcctataaattttgtgtggcatctaatgctgacataattcaaggatctgggttaaagtttgtgtcgttgctgggttttttaacctcaaatacttggcactctgtagcagtgtctctcacagtaatgctttgtttcttaacatgaccgtgaggactgcttggtcacaggcaaatactgtcctttatcagccaggacattcttaacaataattgccctttttttccccttctcacccccatcccaaccccaacttaggttggaaaggctggtggatgtactgaggaagaaggttggaaccgggaccatgaggacagtgatctgattgaaaaaaaacgacagtctggggaagcgatcacatctggtgaccaggctgcttcattcaacactgtgtaaacaccaaagccttaacttagcaaacagttgttagaagtgggacactccaaccacattccaagctgagataaaatcaaatcacaaatgtttaaccactttgctgctgacttgagttatttatccaaatatattaactatagacttttaccaatgggtagctataaggttacagcttattttgtaactattttatatctcaatatctttaatataaatctttttactgagagatcattatagaaacatgttaaagttggttaggatcatatcttcacatatggccctttctgaatcaaagtgcggcaaagtaaatattgtctaagctttaatccactgtgttaggtcaaaacttcaaatacatgcatttttcaatatagggtatatttcttaactgatgagagaggcttagacatgagtgtgtagtcttccttcaatgcgtgtatgtaatctttgttagtataaaagatattaaatataggtgccaagaattaaatgtataatttgtttaataagagatggatatattaaaattacattcatcaaggcatgatttttgtttcactacaaataatgcaaactgttttcaataaaaagaggagactgttaatgtgtacttataaattcacattgtcagtattttttaatattgggtctgaataattatctgaattctacttaagctataagtctctgtcatttttgcttgaaaattagcatgcctctgtcttaaaagagaccatcaaacctattaagtattcttattgtttatctttttttaattgccatttgatttttattgtggaggaggaggatctaatatataatattcaatacaattgtaatgtagaaatataagaatttagaaaaaagtaaacttgccatttggttaaggttacctgcttttta

SEQ ID NO: 75114 - DNA, 1902 bp, Homo sapiens
ctttcttttaaaagcaccaagcctctaattccattgttagtcttcgtggtgactagccgccatcctgattcatctcatctcatagcataaactcctatgtgatcccatcagcctatgaataaagacactcctattatcagggaattctaaggatgtagagtctccctcccagcaaccagggacggaggccagttagattctttttatttaataggaccataggcatttcaaatgatttccttgtctattttaaacatttgtgtataaattccatgatatcaccctatgctttaatcataacaaatatcttttttcctctaggagtctggagcacctattcttacagatgatgttagtttacaagtgtttatggatcacttgaagaaacttgctgtgtccagtgctgcttgaagtgctaataatgttaaagacacttaagaagatgaaataatattcaaatttcattttttcctttttccatttatctgtggaaaccaacagatattgctctatattttttgtattagtatggtttgagacaacatatggaaaatgttcacatttgtagattaagctggaattataatgagagcaataagaacaaatttattttgcttaccacagtgttatagctggttctagaaatttgaagtctttataacttaattatgtttaataaaaaatagagtctgcctcgtactacagatgtaactcatttgtatattgcagacagacccaaagtggcactgaattttcttgctcaccttttaaaaacttgttccttaattttagccagaaagcaaaaaaacaatagtaatgataaatgtgaacatttttgcttattcattgaatatttttctgtaattttcagcacttatgtatacactttttctgtacttactaggttaaggcagatttatttttatgatttgtttaggaattatttgattttataatggtaattttcatgatgataatgtttttggttatttggaaagatagtttagagatgaaaggtttttttgggtaacaatcccgcagctgacaaaaaatgtgaaatttccacaaaatatccaacttatgtgactaaacgcagtagtttttttaaaaggggagatagaaaataaatggttttgttggagtgcattttagtaagcctttgcagtaaaatgacggttgtaactactaaaccaaatttagttttcacagcatggttttgttgttttccccttgtttttcagaggtaaattttgcattatatccttcagtattttaacactattttggcagtttacacattactttttgtttttccttcctttttgtgaaatgtattaagttgtggttcttattgaaacagtattatataatgtttgcttaattatatcatgtgatgctcagttctattttgatttattcattagtattcacttttacctttaaagtttacttgtagcaaatatgtttacattgataaagccagatatgttttgacaatgaaatttacatatcaagtactgcaaataaaaggtggtgctatgatatatgcttaggaggacagttttaatgattgtacttgcatgaacacaatcatatgatggtaaagcagaaacttaagaaaaaattgtttatgtgttatattcaattagcttaaataagttgctttgttatattttatttgaattgaactacgctaggcctaaatgccaataaaatatacttttcactgtttttctggctattttgaaatctagtaaaacctgagaagcctaatgtaaaattagagtatttaaaatcattagatttaaaagctactcatttaaaaaataacaactttaagatataattcacacatcatacacttcacccacttaaagtgcacaatttaatagttttgagtat

SEQ ID NO: 75115 - DNA, 1050 bp, Homo sapiens
ttgttttatacagaggtataaagctataaaagaatgtgttgactgattcagctaacttagaaaataaaccaggcataagtttttagatgatttaattacatggtgtttagagctacttacctatggattgattcaattgctttcacgtatcataagcttaggtagatagcttttagctaacattcatttgataagcatagtgttttaaaaattttctgacttatgtaagtattctttcattttacttttaaaggagaagaaatattctaattttatatttattaagaatattttctctactgaaattgtaacttttaaaaaattgaggtaaatggaataatggtctataatttttttagtttctaaagattattttctttggaaaaatctcaagatttttggatgggcaagaaatttaaagtaatttctttaattgttttaaaattagaccatagcacagtggcggaagtcaggataccaggatatgcctgagtatgaaaatttccgccaccttctgcaagccccagtggatgatgcacaggaaattcttcactccagatttccaatgccaagatacattgacactgaacatggaggcagccaggtaagtagtgttaatttgtttgtgtgtttgtttgttgttaggtttgcagtgaggtgtacctgcttgccttctgattttaatagattgcttcataaagcagacagaaaggtaaggagataggtggggaaggtatcagtgcttactttttgcattagcttttgagagcaaaacagtaagattattgactagttgcctaaacctggcactttccatcatcttctgtctctagcctagcttcctgaacagggccaggatggcattgtggtggtatactagctttggttgaacaagaaaatgtgaacagcttggaaagtaatatacttttcttaaagccgtttatttactgttaaagtctatgaatatgacatttgtggtaacttacattttttcattgtcttcattctatcattccaattttctagaaaataaaattttatgtaatagga

SEQ ID NO: 75116 - DNA, 1050 bp, Homo sapiens
agttttactacctggcgtcagcctctgaataacttagatttgagcaaggggtttttgtctttttgtttttttccttttaaatacaaagtcttgttatgttgcctagactggtctccaactcctgggccccaagccatcccagagtgttgggattacaggtgtgagccaccatgcccagccatccttttcttactttaacttaaaaattttttttttctttcttaaattttttttcttgtggaattttatttttaggcagctgataaattttgtgaataggattcctttcctgagggatataaattagaacattcttataataacatgttttgttatgttgttaatagtttgtaatcaaatatttttgctaatagtaaacacctgttttaatattaaaatcagtaacaactatcttacgtgtttatcttacagtttatgtttcatttaagaagatcttctttcctgcaagtttttaacaatagtcctgatgagagttcatattatcgtcaccattttatgcgtcaagatctgacccagtctctaattatgattcagcctatcctgtatgcgtattcttttagtggaccaccagaggtaagagggacagaaaaaaataaattggtcttgttactgcaatgtgtggcattaaaaaagtgaaaataactaaaaaaatgcatatagttactaaatataagaatttaactaaaagaatggacatctcaacctattaatgtattcgcttaaaatatttatgaatgtttactatatgctagataccatgtaggctgtattagaagattgttaaatttttttttttaaaggagatggaagagactttcagatcattttgtccagccatttggttaatcaaatcctccaaagcatatgattattctttacgtctttaacaatgtccagaagtgattataattctgtagactgtagcttattccagagtttagtgtctgtgacagttatgacattctgtctaaacaaaggctcttgttttaatctcattttcctttgtttttttgagaacataaaaaatag

SEQ ID NO: 75117 - DNA, 1047 bp, Homo sapiens
gcttattatacacagatgtctccagcatcatgtgacatgtcatcagtgctttgacttattgtactgtttttaaatgggaccttttcaatttctcagactacatcttttttttgttttgagacagagtttggctcttgttgcccaggctggagtgcagtggtgcaaccttggctcactgccacctctgcctcctgggttcacgtgattctcctgcctccgcctctggagctgctgggattacaggtgcacaccaccatgctggctaattttttgtatttttagtagagacgggtttcaccatgttggccaggctggtcttgaactcctgacctcaggtggtccacctgccttggcctcctaaagtgctgggattacaggcgtgagctaccgcacctggcctcagacagcatcttgtcctagcattttcacttactgtgattttacatattggcaatattcttttctcaacaactgtgtgacttttccttttctaggtaataagttgtactctgaaatagcttgcttccttagtttttttcactaattgtgactttgtctcaacaaatgcttcattgtttagagattctaaaagctgcttgatgtaatcagcaccttttgcttgtcaaatggctgtgatttgtagtaaagggctttttccattttgccagaggtattgctgaattggtaggttgtcacatatgacacaaaattgaacagtacaacttggattactgtcccatgtaaaacctactgattttccttgtaaaggtggattttttttgtatgtcccttgttgcatgaatacactgaaatgactcagatgattgtaattcttcagaattatcaggattctctgaagacttatgtctagaattgttctcttttatatcttttatctcacatctcaattttgagattgttttttaatttttttttttcaacttttaagttcaggcatacacgtgcaggatgtgcaggttttttgtataggtaaacgtgtgccatggtggtttactgcacagatatcccatcacccaggtattatag

SEQ ID NO: 75118 - DNA, 1044 bp, Homo sapiens
ttatgacacagagcacttgattaagcttagtccctttttttttttttgagacagggtctcactctgtcacccaggctggagttcaatgagatgatcatggctcatcatagccttgacttcccctgctcaagtgattctcccacttcagcctcctgagtagctgggactacaggcacacaccaccacacctggcaaatttaaaatttttttgtagagatggagtctgcttatgttgcccaaggtggtctggaactcctgggtttaagtgactctcccacctcattctcccaaagtgttgggattacaggcatgagccaccatcaccatacctggctaatttaaaaaaaattttgttgagactgggtctcactattttgctcaaggtagtctcaaactgctatgctcaagcacccctcccaccttagtctcccagagtgttgggattttacaagcatgagccaccacacctggctaagctcagttcttaatgcttcatttttacttagcaacctctggcttattctttgaaggtacttctttatgcactctagcttaaacacccttttgagaactctatttgctaagctgtcgaatttctgtgtccagtggcttttgtgtggttggtgtaggctttcatgtaattttaaaaattcttgagtgaactagacttgttttaaaaagttagccatttttatatcatcattcagaacttttttgatttcacctccaagagttttttttatactagtacctctttgaaaaaagcagcattatgacaatattaccttttttttaaaaaaaaaaaacaagaaagattaatcctctcatagggtccactattgatgggacactattagaacaaatgccaacacagttccttcaaggtggatcttttgtttccagatagatataacattaaatatattttgacccttgcttatttaggatagcagaaaagtttctctttgtagcagaaattttccttgaatttcactgttatttagaaatctgacatgacatcattgaaacctgttaactcgtcaa

SEQ ID NO: 75119 - DNA, 1105 bp, Homo sapiens
gcagcctaggtgacagagcgagactctgtctcaaaaaaaaaaaaaaatcctagtagtttctgtatcttttatcttttaaatttaaatttgtgtggtagccaactatgatattgtgggtataataattcagaagcatttctatgctttcttattgtcttcagctgggcagatgctcaaactcaaatccaaaacattgctgcatcttttgaccaggaggcagctgccattcttatggcccggctagcaatatatagagcagaaacagaagaaggtccagatgtgcttaggtggctggacagacagctcattcgactggtaagaaataaacactgtgcttttctaaatctgtatgctttcatttgtagtaaatgtttgttgcagataatctctttcaaagtacttaacagtgtatctgaaatactgtatgagaaactcctattcaaattactgagacagtagcacagtaatgaatagtagaactcattaatctcttccagtaaactagattgccttttttccttaaaatgtaagagtgacaattatgtaacctattatttttctattcttattggctggaatgaggttagttcccaatttaattctatattattgtaacaatttttagtgcttttttacatatttcttcattgctgtggctttagttttttactttcattttaatggaactattatatgtgcatctcttaaaagaaattaggccaggaatggtggctaatggcagtaatcccagcactttgaaccaggagttcaagatcagcctgggcaacatggcgaaacccctgtctctccaaaaaaaaattggccaggcatggtactgtgtgcctgtagtcccacctactccagaggctgaggcgggaggatcactgcaacccaggaggtttgaggctgcagtgagctgtgattgtgctgctgcattccagcctgggcaacagagtgagaccttgtgtcaaaaaagaaatgaactggggtagaaaaattatgcatattaacatgcaaaatatagacaagtctgtattatctggttctagattaccaagtcgtgtgctaataaagttattagtagtgttgatttacttagattttt

SEQ ID NO: 75120 - DNA, 1049 bp, Homo sapiens
ccttccaaatagctgggactacaggcgtccgccagcatgcctggctgattttttgtgtttttagtagagatggggtttcaccgtgttagccaggatggtctccatctcctgaccttgtgatctgcccgcctcagcctcccaaagtactgggattacaggtgggagccaccgcccctggccaaatagcatatgcttttaaagagaacagtatgaagaacttatattaatacttttgtaatttacttagcaagaatttaaattttacttttattatgtaaaaattattttattttttattatgtaaaaatgctttattttataatatacttatggtcttaaaatattttaagctcttaacattgttgaattagtttgaaacatgacttttttttttcctgtggtctttttccattttcactttaatataaaattaataaattgtgtctctagctttcaaacatgctatattttatttttacaggagataggaacaggtggcacatgtcagtggaagatatgtggacttagtcccactacaaccttagccatatattttgaggttgtcaatcaggtatgactttctacatctgaatatcaaaacgtacaacgtacatttgaataagtacttactttaggccatgaatagttcatattttttttcctatagtagatataacccaacatttattttctgtattggaatttatatttgtcgttttttatttttcaaggctaaactccttggtgagagtacatattgtaatagaaatgcagggaaacctacaaacgccaaaccttgggtagcccaacttttagtctgttttctttctttcttttttttgaatataaaattgaaggataaatgcagttatttaaaattcccttctagctacacatttttgcaattagatgtctagcttttcctagttgtcagaaagtatatatgacatatgagtctttgtacaagaaggtctaatatgtcaaaatccatagaaaaagtttggaaagtaatcgtatttgggaagatttttttttctgccacaggagat

SEQ ID NO: 75121 - DNA, 2379 bp, Homo sapiens
gttaccttcggaattgagattatttgtggggtgaggatattctcatatatatttgaatattaaaaattagtaatacagcacattttgggaaatatctttaaaatttattggtagttttgagaggtaattttcttctacgattttaacacacggactcagtaactgtgtcaagtatgttgtttttttgttctttccatgcagaggatacatggtaatgggtgattctttcaatacttccttattcaaacaaacttttcaaagagtctttaccaaagacatgcatggacagtttaaaatgggctttggtggtacgctagaaataaaggtaagaaccaaaacttgacatgtgcgatatgttatcaaaagacaacttataggcttgagtgtaattctaaaatgccattaatcaaatttaatatttactttcaaaattgtggttattttatattgaaacctgagttagagattttcttcaccagaagagtgtcatcattcaatgtgtgagactttacttgagcatttctgaacaattgttagaaaagtagaacaatattggtaaaatattctttaactttttaatttttttctttatatagggcttagctctttaaagtatgttttatcttcttttttttgagacagagtcttcctctgtcgcccaggctagagtgcagtggcatgatgttgtctcactgcagcctccgcctcctgggttcaagtgattctccagcctcagcctcctgagtagctgggactacaggtgtgtgccactgtgtctgtctaatttgtgtttttagtagagacgcagtgtcaccatgttggccaggctggtctcgaactcctgacctcaggtgatctgcctgtctcagctttccaaagtgctgagattacagacatgagccaccacgtctggcctgttctatcatttgtagagccaaatctatttatgttagtgctaggttaatgataggaattgttatctaacttaagaggaaactgttttttttaaaaaaaaaaaagaggaaactgttttttacctttcggataatcagtaattgttttatgattagttgttattgcataattctatcatttatttcaaatttggatttaaaatacccaaaggctaagtgcttctaatcctaattgattcttattaaattaactctaagcacattaattttgaattttcattaaatatttattaatcttgttttattgaatgcttgctatatgcccaacattgcttgggaaattacagagatgcctagggatatctaaggtacacgtcttgctatagagaaacttagcattctcttgatagagaggcagggaaagaaaacactgcatgtaatagaatgacataatggtaaattataaaaacactataaaggtttagagaagaaaaatgaacatatataggacacaatttattctagacttctagaggagtgtgacttatagttttttttttttttttttttttttttttttttttttgagatggagtttcgctcttattgcccggctggagtgcaatgtcatgatctcagctcactataacctctgcctcctgggttcaagcaattctcctgcctcaccctcccgagtagctgggattacaggcatgtgccaccatgcccagctaattttgtgtttttagtagagatggggtttctccatgttggtcaggctggtcttgaactcccgaccttgggtgatccacctgcctcagcctctcaaagtgttgggattacaggcgtgagctaccgcgcctggccacagttgttttcttaaagatgttagaggatattgcattttattcaggaacccagtgtgaggagaggcatagaggtgagaatcagcattgtatgtttgagaaaactgcccagtgagagtagatgctttgtatttgaatgaaaggaaatagcttaaatctgtgggagctggctgtagtgtggagacacatgtgtaggcagaagtcattaggtattttgggtaagattcatctgacagtggtattctgcatatgtcaggaaaaagaatctcaagtaagaaaacaaaagtaagctttccaatttttttttttttagacagaaggtattgtgatagcttacattttggtggcaggagagactggggggagaccaatcttggtgacagattttctatgggaggaaaaatagaatagggtgtctaaggttttagattaggatatgtgaattttgggtgggtaggtagaagtgtgaagtcaggatgaggttcccaaatggagacctcgtatgtgctaatggaaatagaaggttaacattaggttggtgccagattttaaatttgacagtgagcatagaagtgcttattgattgattatttttcatg

SEQ ID NO: 75122 - DNA, 1674 bp, Homo sapiens
tctaatcagaggtagtattactaaaatttagttgatgtattttctcataattatttcagtaacctaaaacttactagactagtgagagatgaaatcctgaagtacttggtttgagtgtttcgtttattgtggttgtattcaaaatgtggtttctggggctgttatcatcacgtgtcacctaggaatgcgtttgaaatgcaaattcttcggctccactccagacctaccgaaacaaactctagaactgggacctagcaatatgtgttaaaacaagccctccagctggttctcatatacacgaaagtttgagaaccattggtctgctgtgtgttcagagtgttgttttctatttttaggaaagtgaaatttgtttatcgaactctcacccataaacatttacaaatggctttttatttaattctgtttcttagattcttacaaccagtacagaaaatagacatgaatctcacagatcttctgggagaactccagcgagacccttggcctgtaccacagggaaagagacctttgcgttcctctggggtggcactttccatagctgtaggactgctggaggtagggaagatggttttgttttggaatgtaaagtgtgtgtgtgtgtgtgtgtgtgtgtgtgtgtgtgtgtgtatatataattataaggataagaagaaccaaagtgctttttttcctccctattctctcactcagcatcaacaaagaatacttctatggttttcccccacataccaaccaagcagttctgccttcgataccacctgggtgtcctgtaattcagttcaattctgatactatctaactggagataacatcacatctcacagattgagggctcagtcccacaagactgcccccacttaagtgccagtcacatagtaggttgtcacctatacttctctgatagactggctgtaaattggacactcttgggtttgattaatttgctagaatggctcacagaactctaggaaacactttatgtttctcggtttatgataaagatattacgaagactatagatgaacagtcagatggactagatgcatagagtgaggtgtgggagaaggggttccaaatttctgtggcttctctggggcaccaccctccaggaacctccacatattcatttgtctggaagctctccaaactgtgttcttttggcttttcatgaaggctcactgcataggcatgattgattacatcactggccattatcccctctctccttctggaggttggggtgtggaactgaaagtctcaaccttctaatcaggctttagtcttttcagtgaccagcccccatcttgaagctatctaggagtcattttattaacatacaaaaggcactcttggctgggcacctcatgcctgtaatcccagcactttgggaggctgaggtgggcagatcacctgaggtctggagttcgagactagcacggccaatatggcaaaaccccatctctgccaaaaatacaaaaattagccaggcgtggtggcgggcgcctgtactcccagctacttgggaggctgaagcagggagaattgcttgaacccaagaggcggaggttgcagggagctgagatcgcatcactgcactccagcctgggtgacagagtgagactccgtctcaaaaaacaaaaacaaaaaacaaaa

SEQ ID NO: 75123 - DNA, 1217 bp, Homo sapiens
agttttataactccagtacttcatgactaagcatttctagattcaagaaaaatttagtataacattattttcatttgtctagagagaaattgtgcacatatctgaaattcaaaacaaaggtggcagttcgtagtttggttatgaattacattagaaaatcaagatgtatataggtacaaagtacgtgagccttataactccccaagtcctaacatttactactgttgcaattttacatttatttatctgttgatttgattaatttatgtttctggattttaatttccatgagggaagggactagttagtttttaccattgtattcctgccacatagcaggtgcttatgatatagtttgctgaaacggatgaatgaatataaattaagaagtatggacatttaagttacacaacaatttattttgactgttaattagaaataaagtgtttttgagctaatatgcctcctctttggttatataacaccttgtgcttttctctctcatgatgattattttgtgttattgttttcttgataatctctcccactggattctttgttttctgaggaaggagaccttgtattttttatttttgtgtttctaatgtctagcacagcattttatacatgataaatagttgataaatctttgtaaaagtaattaaatgaatattgcacaagtaatctctttacaggaaatgctggggctctctaaagtaccacttactcaagcaacacgtggtcctcaggtacagcagccacctccttccaacaggtaataaatatgatgaagagaatttgaccgtttctgtagctattttaaacattccatacccttgaacataggcattcagtgatactatattgttaaatatttttaggaatataagtaaattgtattaacatactttttaaagaattgagtcaaaatcatgtcattaaaatggtttgttttttgtcttaacaatgtaaggagttactttagttttgttattttccttattttttattttgaactttggaaaaaacttgtttttgtgtggttttagggcagccaaggtttttattttttcttcttagctttagaggtagcttttcccgctaaggtttctggagtgcagtggcatgatcttggctcactacaacttccgcctcccaggttcaaacaattctcctgcctcagcctcccaagtagctgggattacaggcatgcacca

SEQ ID NO: 75124 - DNA, 1109 bp, Homo sapiens
gagaaaacaattatggttcacttggaccattcagtaatttgtccagcctggctagtttctagttatctgaaaatccaagtcaggtttactaattattttaaaagagtcaaatgaaaccttatgcatgtagttaaataaaatggaaagtgaaagtcccctctgtgtaactatacctcatgttcttaaacttaatttttcacctgatgatatgtcttagatctctctccatgacagtagaaataacctgtttcatttctgaaatggctttactaggattcttttgtattcgttatttaattagttccctgttgactgtcttgtatgctgtgctttaaactacatattttttctttttggtgaattttttaaaagcgtggtcctcagatgcctttgatattcctctatgtggttgatacttgcatggaagatgaagatttacaagccctgaaagaatccatgcagatgtcattaagtcttttaccacctacagctttggttggacttattacttttgggagaatggttcaggttcatgaacttggatgtgaaggcatttcaaaaagctatgtcttcagaggaacaaaagatttgtctgccaaacaactgcaggtaaacaacaagaatggtagtttttacctatctgaaaattactctatatatgtttataaatgccttctgtatgtttctaggacaaatttttattatgaataactaatataattgtattataacaaaggctttaaattcagtgctggcttcagttttcttttcatgtgccttaaattgttatacagattaaacacccttcacttttaactatatctttaaaatttaaagtcaaaccaacagtattttactagagatttgaagggcttatgaagagtcatgctgaaggctaagagagagcaactgcagaatattagcttgtttcttttttttttcttaagagttcagcttttttattgaacatgttataaaagaggtttagtcaaaaagaccaaagtccatgtcatcatcatactcctcaggttcttctttctttgtttccactttcttttcctcagctggggcagcagtggtggtgggggcaggaccttctgcaggtgcag

SEQ ID NO: 75125 - DNA, 1019 bp, Homo sapiens
tgaaattaggatttttgtaaaattgaactgaaatatgaactgatatgtcttttctttttttttaaaacagtcaagtggattatcgagcaaaactttgggcttgcaacttttgttaccaaaggaatcaggtaagaaaacatccattgcatgccgggcgcagtggctcatgcctgtaatcccagcactttgggaggccgaggcgggtggatcacgaggtcaggagattgagaccatcctggctaacacagtgaaaccccgtctctactaaaaatacaaaaaaaaaattagctgggcgtggtggcaggcgcctgtagtcccagctactcgtgaggctgaggcaggagaatggcatgaacccgggaggtggagcttgcagtgagccgagattgcaccactctactccagcctgggcaacagagcaagactccgtctcaaaaacaaacaaacaaaacaaacaaacaaacaaatgaaaaaaaacccataaaacatccattgcagatgttaatgccaaaatactagtcatgtagaaaaatgcatatttaaaaaaagatacaaataattatttctcatttaatgaaaatgcctttttaaaaataattaaatgatcaggaaatactttgtttaaaattttattaatctttctagcctataatttgttaaaaatttttgtttgttttctatttgtagtttccacctagttatgctggtatatctgaactgaatcagcctgctgaacttttacctcagttttctagcattgaatatgtagttctggtaagaacctaagaacaaatatttaagaaagttttaaaatttatactgaaagaattgttaaattatgatgatttagaaggaatcatgcttaattctcacattgatttgatggaacatttcaaaggtaagaactgttgaggtcagtttgagcagggtaattcctatgttgtacttatttgatgggtggccaagatactgggtagggtggtgtgatttgctatactgagtagatcagtaaacaataa

SEQ ID NO: 75126 - DNA, 1043 bp, Homo sapiens
gaataatatttctttggtttaatacttttatgcaaacatgttagtattaggggagagagtgcttatcaaataatatcatgttatgaaaagctagtttgtggctgggcatggtggctcacacctgtaatcccagcactttgggaggctgaggtgggtggatcacctgaggttgggagttcgagaccagcctgaccaacatggagaaaccccatctctactaaaaatacaaaaattagccaggtgtggtggcttatgcccgtaatcccagctactcaggaggctgaggcgggagaattgcttgaatccgggaggaggagtttgcggtgagccgagatcacgccattgcactccagcctgggcaacgagcgaaactccgtctcaaaaaaaaaaaaaaagttaagttggcttgtaaaaggactttatttcagatatgccattgtcggacatgggactaagcctggcaaattttgtaattgaattcgtgattttaagattgcatgactcctactatggaaaggtgagggaagtcagggaagtgttgtgcatagccatgtaattggaccaattgagaaacaggtgggattttcttcaaactactgctggaatgtgggaatgtaagaagtataatagatgtgatttagcaagcaaattgatcttagagcagggagattgagaggaaaaaatgtgaagaagagaagagagttgtgcccagatatcactcaggtgatatttagtatgtcttaataagaagtaagaatgtagagatacaatccagccttttaaccagttgtagaaagttaaacctggctattgtctgtgtgtgaatgtcttcctgctaagactcctggaacctttcttagtgaggtttcctaatggtcctaaggcagtggttttcagaacccctaacttaaacattattgagtatccaaagagaaaaaaaaaaggctaaatagaagacaggtgggttttcatatctgtttctgcagtttattgtgatatattgttttggttgaattgtatgaaggattaattaataaattaaa

SEQ ID NO: 75127 - DNA, 1049 bp, Homo sapiens
gtagaaaattaatttttcattcatttggcatcgcataaatctaggttggaattggttcttcctctttggaaggtcagtccctgccctaagagagcggtatattaccacccacttcacaagactgttctaagaatcaaatgagaaaatgtgtttatgaagagtttaagaatttagagctccatgaatgataattacagtaatattgttcattaattcaaaaaacatttttaaggatccctcactactagggatgcataaaagttgctaaccctcggcctttacccagcgttagaagacaaaacagagggtaaaagtcccagaaacgcgttcgaaccaattcagctaggaattaaattctcagatcctttattacaccaccggagccttaaccttgaggcaagcagcaatttgttcatgcgcagttaacgctccctaaactgccacttgctcagctccgcgcctaaggtgtctattagtacgcctgcgctgtgacctagaatgggcgcatgcgccgagcggaactggctggtttgaaaaccatggcgtgggtaccagcggagtccgcagtggaagagttgatgcctcggctattgccggtagagccttgcgacttgacggaaggtttcgatccctcggtacccccgaggacgcctcaggaatacctgaggcgggtccagtgagtgattcggccctgggcgggtgggctggtcttctgccctgcccctgggtacagccctcggtgctctattcccgttccagtctgttgcgagttcaggtctattcaggattctggattacatcctaacgtgggcgagtttctgttgaacgtgattgcacgtatcaagatgtgtgctcttagatttgttttcaatccagataatttcagaaatacattgtttagtacctcaattggaagtctgaatttttttctgatttcacaatgaactgtggaagtggatcgcttgttttactacacctgagcaaagcacaacagaaatttaatttatcgcgtttattacttatttgtaggatcgaagcagctcaatgtc

SEQ ID NO: 75128 - DNA, 1010 bp, Homo sapiens
tatagtttctttgtatgtccccagaggacaaaattatacaattataaaatgatttctatatctgtccatacagaacaaagaaaaaaatgtatcttaattttttccagtatttatattcatcttaatgtagtgttctgcttacaaatgagaacttcctatcataagaatatctgaaacaaactctttggagatcagggaatattttgaggtatccaatgtcctgtgtctgtaattataggatacaagagataacacctggctctccaaatgaggctttcttgtctatacccaaacataatatagttaaatgttctatgaatttattcatagcagataatcaggcataacattggacatttaaaaaataaacttctggttcagtatttgtctaaatattaattttttgaatttttttttagggaagatggctttatgctttattggcttgtcttgaaaagcctttgttacctgaggctcattcactgattcggcagcttgcaagaaggtgctctgaagtgaggctcttagtggtaagttgcaacttactgtttaaaattaaaagcacccaccaatttatatggtggtaaagaaggagttcagtgaaataggaaaacacatggaatattttattggtggcaattagatttgtaaagcccaaaataatagtagcttaaataatatggaaatgttttctgagataaagaagtctgagccgggcgtggtggctcacacctataatcccagcactttgggaggctgaggcgggtggctcacctgaggtcaggagtttgagaccaacctggcccacatggtgaaaccccgtctctactaaaaatacaaaatttagctgggtgtggtggtgggtgcttgtcatcccagctactcaggaggctgaggcaggagaatcgttcgaacccaggaggcggaggttgcagtgagctgagattgcaccactgcactcctgcctgggcaacagagcaagactctgtctcaaaaaagaagtaggtaaa

SEQ ID NO: 75129 - DNA, 1034 bp, Homo sapiens
tactcacataaggtagcatacagaacaatctgttctgtacttcgttttttttcacttaataaatcctggaaatcatactttagcagtataaatacgttcctcatactttagcagtataaatatttccctcatttctctttttatggcttcataattttccactatgtagacatactatagcttatttaaccagtttcttattgatggacgtttgggttgcttatggtctttggctattaaaaatagtgctacagttaatatctttatacataaattttttgttttttttttactaggtattttgaccaacgtgatttagctgatgagccatcttgatgtagctgatctctcagggatagaagatatttctcatgaaggcagcctaactctgaggaaaacaatgccaattcaagtacagatttcaacacatcttcaacactatgtgaagggttcacatcttaacctgtgcaattcagattgatactcagaatatgggttgatttgaatatctgaaatatcaatggaaaatcccactcagtttttgatgaacagtttgaacagttttctgtaatcaagcagcttgcatagaaattgtatgatgaaattttacataggttcttggtgctgttttgttctttttttgttttttgttgttttgttatttacttatatacatataaaattttattgaaaatatgttttggttactaaaattttgtttgactcctaacaaaagacaatggatggccttagcatcagaattaaaataatctggattaaatggcaatgtgttcatagtcagcaataaaattaaacatttttccctttaagctcagcactttttttttttttttttttttttctttgagatggagtctcgctctgtcatccaggctggagtgcagtggcaggatctcagctcactgcaacctctgcctcccaggttcaagtgattctcctgccccaggctcccgagtagctggatctacaggtgtccgccaccaagcctggctaatttttgtatttttagtaga

SEQ ID NO: 75130 - DNA, 1141 bp, Homo sapiens
cgcctgtagtcccagctactcaggaggctgaggcaggagaatcacttgaacccaggaggtggaggttgcagtgagcagagatcgtgccactgcactccagcctgggcaacagagcaagactccatctcaaaaaaaaagaaaaaatagaattgactttattgaatattatgaagaatgcgaaaaagtttttgacatagcagatttcttgactgaaactatttcctatatggaacagaaaattgatgtttagacttgttttctttgtatctaaaatcaaagaattatttgtatttttttttttaggcaaatttcaggtgatgatacagaagctgtagaacatactgaaatgcaaggcttcaacagtgtaaagagataaattattcatgtaaaagtatttcaagtagtgatgatttaattacattgttcgatgtttgtacaggagtaagcatgtatttttatcaatttaacacagatcaaaggagatgaagggacattctgccatgacatacacttaaccaaaactattcaaaatgaaaaccggatttcaaataaccagacaccaagatgcagggcccttattttaaacctttttatttggttagagtgatatgtatttagccatagatggagaaacaaagctcagggtttgttgaattagcatgagagaaaattatgtaccaacagaattatttgtgagaagaatgaacaaattttgataaagtatgaatttgttttattttaaaaagcaaacatactaaattttttttattttattgcttataatttattaagaatgtttacacctgtataaggatttcatatatacattgtatgtgtgtatatataaatacatatatgactgcctaaattgtttataaatttaatttttctttaataggtttcattccttcagagctccattaatgtaatcaaaatgaaatatagattagtttaaatgtgaattcagtgactctagggccaaagaatattaggtatgtttggaaagaatttttgtatttattcctgttacagttttgactttcaacttctctccccgtgcatggaagtcctggtaaaggatctaacatctttattcccttctttcctcttccagctgagcagagttggataattgaattag

SEQ ID NO: 75131 - DNA, 1028 bp, Homo sapiens
caagtcaagattcttggttgtaaataggggaaagaaattctgcttgtaagctaacaaaattgataagctcaaagaataggcaataaccaggggaggttaaggcagccagtaagatagccaagtcactctgcagactgtatctacttagaatcctgcaggcagcagggactgtagacacaaactacctttactgcctccagaactaattctgatcagtttctggcttgtttttgtcactgagtctagattcacagtcctggactggagtacttaattggctgagcttaagtcttaagtcctacgtccatgctttagtttccagggagctgggaaatatatcaatatttttcagtaatttgaacagttcttcaaaatcctttttttaaacaggaatgacttactgatgataaatcatgtaatgttgtatttatcaatagctttactattttagtaaatccttactatttttaatgattttttttccttttagtatttagcatttacgtgtggcttaatcagaggtggcttatcaaacttgggaataaaaagtattgtaacagctgaagtgtcttcaatgcctgcttgtaagttgaattcgcctttcttacaaatgttttagtaatttgttttcaggtctgtttttttttttaatttaactgagaggaaatttaaaatgctgaaactttcattttagttttatcaatgtaacactttagtgtagtaatatgtagcatactacattcattttcagtaatttttgaataatggactaaaatccaaatttataagacaatttaagggatgatttttaacttttctaaagttattcaaactgtaacttttttaaagatattcttctgaatatctcctgcagtgttttaagatagcaaatttccctagaacattgaaaatgctattttttttttttttttttttttttgagacggagtctcgctctgttgcccaggctggagtgcagtggcacaatctcggctcactgcaagctccacctcccgggttcacgccat

SEQ ID NO: 75132 - DNA, 1443 bp, Homo sapiens
ctcatgtgatccacccgcctccgccacccaaagtgctgggattacaggcgtgagccaccgcgcccgggccaggcgggagctttaggtcttattttatcttgctctgcccccgacatcgtggtgagaggggaaccttcctcatatctgggcgctggcctctccgggcttgggagagaggaactcagtgatcatagagctggccgaatgccggggtagaggggaccggaagttgtttttttcgcccccgcccagcggccggatcgcatctcagctggttggctttggttagagctcccgtcagactttagttcggccctaggatttggtagccccgaagtgtgggctctctccagtaccagactcatttcagtaccagcctttgggaagtcgtgtgaatacctcggtctcttagccacagggatagaatggcggcctgacggagccgcggcgccggcgaagtcgctgaggcgcgagctggaacccccagaccagctcaaacgggagccaaaactcgaagcttggaagaattagcaggaaatggcggatgaggcgttgtttttgcttctccataacgagatggtgtctggagtgtacaagtccgcggagcagggggaggtggtgagtgctgccacacaaccttgaggtccttttgcggtgacacaccttgtttcccctcagtgctttccttcaacccctgtcccatcgccacccgacgcctcccgaggtgtacacaaaatggtccacctccaggtgtcctaaaccctagaacctgtcagttgtctcctttgaaccgtcatctttcatcgttttctctttcgtatcttcttctatttgattctcttttgtctattcccgtacgtttgtcttgcacgccacagattttggtacttttagtgttgtccctgccattatttacgagagggttaactgcagagcctacttagttttgctggcacttccagcacttgagccatgcactggacagacctgtgccaacctgagaagcctgtccctccttcctcattcctaatgctcagtacaactccacacaacttgagacctgaagcctaatgaaggttgagtttgcaaaggaaagtttgcaggcgttaggataattagggaacataatttaaattaattatttcagaaagtatttatttagtgcccttatgtcagagcgatttctaggtgccagggatatagtagtgaatgaaacaatggccccatccttgtagagatttttttttaatctaatttaatccgaaatgtgatagtatgtagcggttacttctaatatgtgggagtccttattcaatcattgtgggcctgtcactgctgacactgctagataaattaaataaaataatactcctgcctcacagtatttagggaatagtgatttaatgaatagttaacactgagtattggctggtagaatcatgg

SEQ ID NO: 75133 - DNA, 1050 bp, Homo sapiens
aatcattaaccaaggtgagggtaaggaagaaaaggaggcttggctaagtcccactctgatgtgatcacgttaaaacggtgtaaggcacattacatcataggttaaaaggcctagaaaactccgcgctccccttgccagaactgcagactcgcgagcctaagtctccgagaactcagggattgtgaaacccgccccgactctgcgctagcagcgggatccaggcacccgcagctaactggggagggagatgactgcctggctgacttttcattggctcagagtcacaaaggctgcaggttcttcccccttccggtcgctgagtggttgaggccggaagacaacgctcatcgtcattggctgagcccggctgtcagtcctttcgcgcctcggcggcgcggcatagcccggctcggcctgtaaagcagtctcaagcctgccgcagggagaagatggcggtcgccgtgagaactttgcaggaacagctggaaaaggccaaagagagtcttaagaacgtggatgagaacattcgcaagctcaccgggcgggatccgaatgacgtgaggtaagggcctaacgggaactcggaactcggagctcggagaggcagccctcaggtcggggtgaattgggggcggggagggcggccagccttaagaagactggaacctcgaggcctgttcgcggggcggcgggtaaaaccctgttgtcgccgaggtggagaggccccaggtcccctccgtagagcgctggtctcaggtccctgaggaaggagagcgaggcctgggtgcgccggcatgctttcttggcctgtgagaagacccggactgctgattcccgctctcggccctgcaggcccggaactgcagcacaaagccccttcccgctccggcggacacccggcccgttgctggccccgagaccctgccgggacgcaacaagccgccttaccccagcttcctgtccacgtgcagcctcctcggggatggcgggatggggacctgatccaggcttgttaatgtgtgggggcatcgaggtgaatataatttctgt

SEQ ID NO: 75134 - DNA, 1470 bp, Homo sapiens
aggagagcaaaattggtttgggcgttagttcacacattgtagtatcctttctctgctggaggaaagaataaaatgggatggagacttgatagaacaaagcttctggaaacgagtcctagaagagagggcatttgcccttggtgtgcagttacataaatacctcagtggtcatttaaattaatttttggccaggcacagtggctcatccctgtaatcccagcactttgggaagccaagaccagcagatcacttgagcccaggagttggagaacagcctagatacatggtgaaatcccatccctacaaaaagtacaaaaaagttacccaggcatgctggctcacgcctgtagtcccagctgcttgggaggatgaggcaggaggatcacttgagcctgggaggtcgaggctgcagtgaaccgtggtggcaccactgcacttcagcctgggtggtatagtgaaaccctgtctcaaaaaaattaatattttctatgacaggctgggcggggagcgtcggaccagaagagaatcacgccaggaaagcgacccggaggatgatgatgttaaaaaggtattgagattgaaagaacttaaatgaatgtagtaccttcactttactacatttaaaagcacaccactcatatgctagttaaattactgagattttctttttctgcagccagcattgcagtcttcagttgtagctacctccaaagagcgcacacgtagagaccttatccaggatcaaaatatggatgaaaagggaaagcaaaggtatttccctgggggaaaaaaactctagtgaaataatgcagttataaggaaaatcaagggattgttcaagcatcctgtagtatttcttagaaaatgatgggtttaaatgaaatggatcctgttgacagtaaattttcttattctgttctttaggaaccggcgaatatttggcttgttgatgggtacccttcaaaaatttaaacaagaatccactgttgctactgaaagggtatttatccaagttttgttttgcatcatatatttaagttatcaaagtagtagattaatgttttttttaaaaaatccttaaagctcttttaagacctaactgtaaacctgaaacaaagccaagtaaaaacttggtttaacttcttatagaacagctttacttaaacattgtgttggaatataacagttgttgatatcatagctaatagccttgaaatttagatatgtgaaaaaaaaaagcctcaagtctccatttccttaaagacaaattacagtcagtaccaagtgctaagttctagttagttggtatcctgaattgaaaatgtgaagcggccaggtgcagtggctcatgcctgtaatcccagcactttgggaggctgaggcaggtggatcacctgaggtcagaagtttttcgagaccagcctggccaacatggtgaaaccctgtctttactaaaaatacaaaattagc

SEQ ID NO: 75135 - DNA, 4844 bp, Homo sapiens
gttttatcatgttgcccaggctggtctgagctcaaagcaatccacccacctcagcctcccagagtgctgggatgacaggtgtgagccactgtgcccggcctgcagatacctttacatagtgaaaaaaaaaaaaaaaaaaaaaattttttttgagatggagtttggctcttcttgctcaggctggagtgtagtggcgtgatctcagctcactgcaacctccgcctctggggttcaagtgatttctcctgcttcggcctcccaagtagctgggattataggtgcgtgcaaccacgccctgttaatttttttgtgtttttagtagagatggtggtgttggcttctgacttcagatgatctacctgcctctaatgtttcacgtaattagtatgtgtaataactttttatcataattgaactgaaatcatatataccttttgttgtaactatttcaacacgtaagtattaaagcaggctacttaacttttagcaaaagcggcgccaggaaattgaacaaaaacttgaagttcaggcagaagaagagagaaagcaggttgaaaatgaaaggagagaactgtttgaagagaggcgtgctaaacagacagaactgcggcttttggaacagaaagttgagcttgcgcagctggtgagtggtaatttggaattctaagattggtaatcctttgtgtttacaaaagcactgaccctttaccttttctttagcaagaagaatggaatgaacataatgccaaaataattaaatatataagaactaagacaaagccccatttgttttatattcctggaagaatgtgtccagctacccaaaaactaatagaagagtcacagagaaaaatgaacggtaagtatgcgaagaggtccattgaattgttcatagtgggtaaggtaatatgttcatatgcacacgtttgttttctaaaataattatgattcagtgattggtttgctgtgtttgctttttttttttaaataagataataagatattctaggccgggcgtggtggctcacgcctgtaatcccagcactttgggaggctgaggcaggcagatcatgaggtcaggagatcgagaccatcccggctaacatggtgaaaccccgtctctagtctctactaaaaatacaaaaaaaattagctgggcatggtggtgggcacctgtaattccagctacttggcaggctgaggcaggagaatcacttgaacctgggaggcagaagttgcagtgagccgagattacgccactgaactccagcctgggcaacagagctagactccatctcaaaaaaaaaaaaaaagatacattctgagatgctggtgagtttgtagtataggaatatttgtatcatgatggagtttaatgtgaaagttatagacagtgcttatgcatctgtattccttaagcatttgtgtaaaattacttttttttgcatgctattattgttctgataaaatgctaataagacaaatgtgaaaaccaactcagtttctagatggaaaacacatggaaggatagacactgctaagatgatgatttatctctttgggatcagaaaaattaatatatatgattttatgccaaaactggttctgttttacagaagttttatttttcatcagacataaagattgatctgttttcttcatcagttagaaaatgtgtagttctgtctgccacaatttctagtatgtagatttcccatggatctttgcttttataattttatgtcagtttgtggttacttaattgccataatcttttgtcataactttacaaaaacaaattcagatgaagcttaatgacaatttgtgaccagttataaaattatggctttgaattttcttaatcggtaaattttacacatgtaaatttttattctttagctttatttgaaggtagacgcatcgaatttgcagaacaaataaataaaatggaggctaggcctagaagacaatcaatgaaggaaaaagagcatcaggtggtgcgtaatgaagaacagaaggcggaacaagaagagggtaaggtggctcagcgagaggaagagttggaggagacaggtaatcagcacaatgatgtagaaatagaggaagcaggagaggaagaggaaaaggaaatagcgattgttcatagtgatgcagagaaagaacaggaggaggaagaacaaaaacaggaaatggaggttaagatggaggaggaaactgaggtaagggaaagtgagaagcagcaggatagtcagcctgaagaagttatggatgtgctagagatggttgagaatgtcaaacatgtaattgctgaccaggaggtaatggaaactaatcgagttgaaagtgtagaaccttcagaaaatgaagctagcaaagaattggaaccagaaatggaatttgaaattgagccagataaagaatgtaaaaccctttctcctgggaaagagaatgtcagtgctttagacatggaaaaggagtctgaggaaaaagaagaaaaagaatctgagccccaacctgagcctgtggctcaacctcagcctcagtctcagccccagcttcagcttcaatcccagtcccaaccagtactccagtcccagcctccctctcagcctgaggatttgtcattagctgttttacagccaacaccccaagttactcaggagcaagggcatttactacctgagaggaaggattttcctgtagagtctgtaaaactcactgaggtaccagtagagccagtcttgacagtacatccagagagcaagagcaaaaccaaaactaggagcagaagtagaggtcgagctagaaataaaacaagcaagagtagaagtcgaagcagtagcagtagcagttctagtagcagttcaaccagtagcagcagtggaagtagttccagcagtggaagtagtagcagtcgcagtagttccagtagcagctccagtacaagtggcagcagcagcagagatagtagcagtagcactagtagtagtagtgagagtagaagtcggagtaggggccggggacataatagagatagaaagcacagaaggagcgtggatcggaagagaagggatacttcaggactagaaagaagtcacaaatcttcaaaaggtggtagtagtagagatacaaaaggatcaaaggataagaattcccggtccgacagaaagaggtctatatcagagagtagtcgatcaggcaaaagatcttcaagaagtgaaagagaccgaaaatcagacaggaaagacaaaaggcgttaatggaagaagccaggctttcttagccattctttgcagcagaagatttcttgataaaaaaggattacctttccttgtaaagaggatgctgccttaagaattgcatgttgtaaaaaatctttttggaaaatacagactgtttgtttaccagacattcttgtactttttgcataattttgtaagagttatttatcaaaattatgtgaggttccaaaatatgtaaaaatgataataataaaaaaagattaacatcccttgtcatcttttttaaatatcctatactcttcagtaagaatctgtatattttaataggcaaatctttaagtctgttcccttctaattctgtatcatacattgcttttgtagaaataaatgtgtgtttatttcattatttttgggatgtcctcgttgacacttgtataataaatatcctctttatcattttcagcttttaacactagatactgcacgtgattagaatgtttttgaaggtttcctcgtttttatttgccttggacagtttttagttgtcagagtcagagctttgcagctttgagggggaacagttctctttaaaatcatttgctattttctattctcccttgttattttaatctaagcattttcccccgtttctcatattttaaccatatgttcggtagataactaaacagtatgatctggttggcattttcttcctgatgatgggagcgtcattcttttgtcttcatggttacttgtgtgatataacatacatctgttaaagaaaatcacttctttctaggggagggaggtagaaaagtatctttcaaacttggtttttgagtttgtgtcttgtcttaactttgtgttggctctaacttaaacatgctgatatgtgttttcaagaattttgtttaaggaagtattgtatggaagtccacaaaatgaaggaagttcatctaggttttaatatgtaagcaagataacacacaagtgtaccaagtgattattaactttgttgttttacaaatttgtatgaacttggagtatctgttggccattactatacatgtgcaaataaatgtggcttagacttgtgtgactgcttaagactagtacttgtattaactttctgatgctttatacaagagagcacttaaattgcatccttctttgagtttaacactgtagctttagccttgactttgaatattcattttgccttcccttgacaagtaaatggttacagtgaaaatgtgaagaagtatttccagttagtttttgtgtgtatataactcacttgtgtaagtggatgtgttaaaagatctctttttaaaaatccttttattggagtaattattaaaacagtaaatgcatagagctttgcacagcaatctgtatccatgagccagttccaccactagtaccttcatctgtggcttatccagcaaaatgtttcatttcctgtgtgccctggcaggaaagaggttggtaaatagtgaattaaagggatgatcataaaatttaacctggttaaaaagcaccttatttgatgacagtttgtatgcactaaaatcctttatacaaattaagttttgtctactg

SEQ ID NO: 75136 - DNA, 1045 bp, Homo sapiens
ccaggggccccgggaactgccctccatcatccccctagagagggtcagagcatccctctctactcccccacccccctacagtgagtgattctgaagcctactcggggccagagtcccacagagccaccccctccctacagcttcaggcctgaaaaatatactggggatcagagggccattgacagcccagccttctgagtcacctcctgcctggaatcttgccatcagcaacctcctccccagtgcctcctggatcaagctagagactgctggcaccccagaaatgtccttgcccatcctgccatgtctctgttcattcttggatttaacttattgttttttctgcctctgttcccaacccagctgcctctcttgtcctgagggttaggctggagtgacagtatctgcccaccccccaacccaagaaagaggctgctggaaggaaaatgccaaccattggaggtgcccaagagcagaacgggctactgtgaggggtcgtaagagccccatttctggaggcatgcaaatcttgactggacagtcagctctgaaattttatcagggcacttctatacctgtgggagactggactggatgagctctgagccagcttccaatcctacctgaatagagaactcaccgtacccacccccaacacatgataaacacacatcctcactgaaaaaaaaatctctgatctatgtgaaatgttttataaactataaagccattaaaaacactagctcttccactttcaatgaattgacagttaaacctatatagaaagtcacttcattcagttgcttaagtgtacattttgcaactcttcttatcctgaagagtatgctagaaagatatattgctcaagttagatgctctgtggttgctttaatgctcatatgaaaaaaaattaatgactgatatgagcatttggttaacacttaagacttgaaatgttgctgccatgttctgtacctgtgctattcaatatggtagccactagccacatgtgactattgagcctctgacttgtggctagtttgac

SEQ ID NO: 75137 - DNA, 1078 bp, Homo sapiens
ttgttcttcgcttctgtcttgttaatgtacagtctagagatagtaaactcccagtgttcaaattttgttttttatttttcaggtctagtttataatcaagttgtagagatttttctccttaagtgtttctaggtatctttgttgacatgtgtaggggcatttatgtcgccgtgtttttaaaaactggattaaatctttaaaaagaccacttaattattgaggcagttacgattatgttttcttgttaggtgaattaaaggtagtgttgccatggtgtttatgagttcatagtttgtctaatgcatacgcatatatatgtatttaatatgaaaagagcacctttatggagattctaaatggactaagacttagttttggccactagcatcatgttgtctgttaagagagagaagacaaaaaaaaaaatagtacaaagtagaaactgatgaagtgcttacctaagcatacacacacagtgcagggaactaggagctgtattacttagagtgtaaagtgggcttagggagtgatgggcaatgatgcttgccggagatgtaagtaggttccaagtgctgtaggtgttggagagctcttgaaggcttttccgtggttagacttgtggtttaaaatttaagctcttcttgatagtagcatgtagattagatgttagggaaacaaaacttgaaatagggattaagggagaggtgacagtagtaaggataggaaagagggtactgtgtggagaaatagcctctaagagctaaaatatgtttgactttattgattgcatgtgaagggtgagagagaaggaatctagaaggactcccaggtttctggctgtggtaacttattcatggaggtagggtttttagaaagagaagcatatttccctttcttcactaaaaacaataataatcaagatttagtttttataggactgccagtgtacatggagaaatgcagaaatacatggagaaatgcagccagattttgcagttttctctagtctggtgcgttgtatcttcacctgcacagtttttttttttttttttttttttttgctaaatgcgagtaccct

SEQ ID NO: 75138 - DNA, 1164 bp, Homo sapiens
ttgtagtgcagttgctattcacagatgcaattatagtgcgcctacagcctacagcctcaaactcctgggcttaagcaatcctttctcagccttttgagtagttgggactacacaggtccatgtcactctgcccagcttcatcttttttttaattctgggaaattttatttgagacaggatttcactcctgtcacccgggctggagcgcagtggcatgatctcggctcactgcaatctctgcttcctgtgctgaagcaattctcctgcctcagcctcctgagtagctgggactacaggcgtgcactaccatgcctggctaatttttgtatttttttgtagagacgggtttcactgtgttgctcagaactcctggcctcaagtgatctgcctgccttggtctcccaaagttctgggattataggcattaatcaccacgcctggcctaattttgggaaatttttaatgcatttttgggactgctatttttcagatgttgccccttttacttctgacttccctatctcttaacttctatttttcaatttctttatggttttctataccttttgagagttccttaatctgaggaactgaaatctattcttcatctacactcattgtagagtatcttgtcttttaaaggttttcccttttatctctatccatattctgtagatgattgaagtcctcatttcttttctacttgtttgtgttacctcagccctaaggctgatccttttacaaatgaattcccgcctgcttcattatttgagagagaggttaaggaagaaaaaggtttggtttactgtttctttagtcagttcagatctatggccctatggtaacatttctcaggctgttttattttggatattggcatcaagggatatgataataggggcttcttgaaattatttttttagggtcaaatttgtttggggagcaatgggttaaatgaaattaaacaagtatctttagagtaaagttatttcagagtctttaatatgctaattcacaatgtgaatcttcaatagggagtctttaataagtagtatttaggctgggcatggtggttcatgcctgtaatcccagcactttgggggacccaggcaggtggatcacctgaggtcaggagttccagaccagcctggccaacatggtgaa

SEQ ID NO: 75139 - DNA, 3087 bp, Homo sapiens
aaatatcagaggtatgtttattatagtatttaaaatccatttggaataatccaataactaatcattttaaattaaaaaggtcatagaaaataggtcttaattcaatatggaatattatcatgaagcagccttgatttttttttagttgattttttatgtcatgcctttaattgtattaaattggctttatttctcatttttttctttatagtgcttttaagcagaggttggcaaactgtgcctaatgggctctccacttttttttgtaaaaaattgttttggaacacagccatgctcatttatgtaggtattgcttttgtttctcactgcagtggcatagttgagtaattgcaacaaagactgcatggcctacgagcctaaaatatttattctctggctctttacagaactttgctgaccactgctacaattgctgttattttgatattataaaaatgagcaaatgtataaatgaaagttatttaacttatagtacatattttttattatgctcgtctgatttccctaatgaaaaattcttatatctgtttaataaagttggctttctctcttaggcaacctgtgaaaagctgaacaggtccaattctgaacttgaggatgaaatactctgtctagaaaaagagttaaaagaagagaaatccaaacattctgaacaagatgaattggtaaggcttttttatttgaggagaatataagaaaaagaaagttactgagctttaaaaaattaatatgatactggttaaagtattacattattgtaaaaaatgtaaagaatacaggtggttgtagagagcaaaattttctagatccattcttttcacttcccccagatgttactgtgttaaatttcttgcatatttttatagaaattttctatatgcactatggaagtagctcatgtaaataaaaactgaataatcatgtccatagtgtatatttgtaattacttaacatgtatattaacattaaaactttttcttttgaaaaaacctgtcttaatgaaaatcttgatgtatgtgagattatttagtaaaacatgttagtggacttatcttgagcctatataacttaaatgttatgaaatattaaagttatgagatactattgttacgtaatgttcatataaaatcccttttagcatatggctaaataaactgagaaggtttcttaatttgagcttcacttatggagctaaagtgttaggttaacagtatatctaataaacatggcattttggaaactagagtttagtaaatattaattgcctgatactgtgtttctagatggcggatatttcaaaaaggatacagtctctagaagatgagtcaaaatccctcaaatcacaagtagctgaagtaagttgaattagtctagtaggtctgttgcttttggaaataattttagtttaattttttaaaattaagaaataagacacaatagtaggatttgagatataggggatcccagatatgtatttttttttttttaacaatacctaaatgaattagcatggctgtgttgcccaggctggagtatagcagcacgatcttggctcactgcaacctccacctcctgggttcaagcagttctcctgccttagcctcctgaatagctgggattacaggcatgtgccaccacacccggctaagttttgtatttttagtagaggcagggtttcaccatgatggccaggctggtcttgaactcctgagctcaagtgatcggcccacctcggcctcccaaagtgctgggattacaggcatgagccaccacacccagcttgtattttttttttttttacgtgaagtgcttcagaaaagttcatcttttcagtggacaagtgtttattgagctattactatatattgaggactggttgcttgacacttaacattaatagacaaaaaagtccccaggaagtttaaattttagtaggggaggcagaataaatagttatcaaaatttgctgcacagtacatagaaagttacaagaggtttgtccaaggtcacatcgtagcaagttagtgggaaaggcaggactagacctggattctagacaagccttttttctgctacaccatgctgcctctgctgttaatattggcatggttttgcctttgtttaattctgtgttctagggagtatgtgtaaagatgagctatgtattaaattaattgttacaaacttgacattttttgtttcacttaggccaaaatgaccttcaagatatttcaaatgaatgaagaacgactgaagatagcaataaaagatgctttgaatgaaaattctcaacttcaggaaagccagaaacaggtttgtgctccgtagggactcttcaacttgtgaatatgtaattatagatgttcttgtcatcctcatgactgacccatgctagggacaagtataggcttttccttgagagcatgagagcaggacagtctcccatacatatttcagtgtctgtctcttttgtatagtatacaaaagtgtatacttttggcaccctctaccccagggcagggaaagtaagccagggcatttagcattttggtaatcataaccaacttcttaaagccatgccgaaggggtacagagaatatgagtgaggattattgaagttatagatctggggtctaaagatagaaacaattctggtggcagatcacataaggatgtgacatttgccctctttctcccccacatacatagatactcccacgtatatttcttcttctcctttgccaatgtaattgtaacttttcagtgggaaaatttttcagtgattaaattattataattatccaaatattactcacaccagagccacatggtttgttcttttttttttattttttaattttttagacggagtctcactctgttgccaggctggagtgcagtggcgtgatctcggctcactgcgacctctgcctcccaggttcaagcaatttttctgcctcagcctcccgagtagctgggactacaggcgcgcgcctccacgcccagctaatttttgtatttttagtagagatagggtttcaccatattggccaggatggtctcaat

SEQ ID NO: 75140 - DNA, 1462 bp, Homo sapiens
gtgcagtggtgcaatcttggctcactgcaacctctgcctcctgggttcaagcgattctcctgcctcaacttcctgagtagctgggactacaggcgcgtgccaccatgccaagctaatttttgtgttttagtagagacgaggtttcaccatgttggccaggatggtggtatttctaaaggttagttattttaagtacaaaattgcacaatgatttaaaaaataaattttaatgcaagtaaggtatgatattttatatgggatataaggaatggtaagaaatgatcaaatctaagatatgtatatctcaggaaacctttatttgatataaatatatgatataaactagttgaagaatgtgtgtgttattttacactaccccattttgaaagttctttgaaaataggagccatgtttttcttttttaagtagctacataatgccttcttggtatcttttaatgattcacttgtgtgatgagttgcatttttaaaattttcattttcagcttttgcaagaagctgaagtatggaaagaacaagtgagtgaacttaataaacagaaagtaacatttgaagactccaaagtacatgcagaacaagttctaaatgataaagaaagtcacatcaaggtaaatggctctactggttttagtgatcaagttggctagaattttacactaactctgaaatttgaaagctagtttttagcaacttttattttcacaacatattttcataacatatttggccagattttcaaatgtttcttgaagacttacagatttgtcatatgtacatacacatacacacacacatacttatatgaatattctgtgtgtccttttttcttctctgtattttagcctaggtatttaataaagaaataaaaataatggtttctaccatttctcttcaggatgctatctgctcctgttaggaggttggaagagtttgagaaattggatgtatagttatatatattaattgaatatctttaatgtaactggtgtatgtactttgatggagaggaatacttttaaaaaataaatttaattgaaacttgactccagtcataagaataaaaggattttttgattttttagatttttaagatttttaaaaatcttaatgctgataaatacagatactcaagtgtatcaaataatgatatgtaaaactaacgttctataatttacacagtgatgtggatgttgtcatattgaaagtgatgctctcactcataggtgggagttgaacaatgaggacacttggacacaggaagaggaacatcacacaccgggacctgttgtggggtggggggaggggggagggatagcattaggagatatacctaatgtaaatgacgagttaatgggtacagcacaccaacatggcacaggtatacatatgtaacaaacctgcacattgtgcacgtgtatcccagaacttaaaatataataaaa

SEQ ID NO: 75141 - DNA, 1055 bp, Homo sapiens
aattctcttttataaatgtctttatctcagctaattgtttccttgaataaatcaactaaaaatctacgatctttttatacattatgtatctcactgcagatgtgtttggtgtcacacagaatttactctcatgttaattagggcactgttatttgtggcatgtgagaaatgtcatataaaaaatattttactactttttagttgcataatattaatatgtactatatttgatttgggaataactagttttggcttttacttgcagagtttaatagtcaataaatgttaccatttctcaagactacaatatcttaataagaggtggaaaataagagctcttgtgttgttatttatgtggactgatttttaaactataactgtacattcacaagttgtaaagctgttagcataaggcattaccctctctatttttcccctttgttcaatgtcaagactctgactgaacgcttgttaaagatgaaagattgggctgctatgcttggagaagacataacggatgatgataacttggaattagaaatgaacagtgaatcggaaaatggtgcttacttaggtattaagtcatgactcatctccttttgctaaaatggtgactagctcttctatttccttttcgttccctgtgtgcaccatgttctttatatgcttttactttggcacattctgtctgtctgtgacacactgtcctttctcaccatcccttatagtttttagcttcagctggagcactgccttttcagtaagtctttctccagctgctcagacacacttacagcctcctcccttttttttgtgtattatacatatctttattatagccattttcaaaattacatcataatcatttcaatgcctgtttttccctgtactgtaagctaatcaaatggatgaatgactagtttgaagaacaagtgttctataaatacttcaggatacttcttttgcttttgtcagaggttcagatggttacagtacttttaatgttagccattcaaattattattgccattgatggttgtgctctgaagttggca

SEQ ID NO: 75142 - DNA, 1511 bp, Homo sapiens
ctgaatggacactcttgattaaactgcccattaattccatctctgatatatgtaaaactgatttttctgttctgtgcaaattgcttctgcccaggtgttccttggcttagtaaatggcagtgtcctttacttagttacttagggtggcacctcaagctgtttttgacttctctcttgcttttatatctcctatttattctgtcattaaatcctgtcagcttttttatagcctgaatctgaccactttttaccatcttccatattagtctagtccaagtcatcaacagttaatacccggcttattatagtagccttatgggtagtctccttctttccgccctttctcctgcactgtgttttctctgcaacatgcaggatgacccttaaaatgtgaattgtgagtatggtcactctcgtgctcaaaatccctgagtgcctttatatcacactcaacccacagcttttatatcttggcctacaagacagtacaggattggacccttggccacctctttaattttagcttattcatgttctttttcctctcagtaccctccatccagcactggcctttttgatgctcttcagcacattgaccttagggtcttttgtgcttgttccttctgcctggaatgatgtttccttatatatttgaatggctcagttcttcattttattaggcctgggttcaaatgttacctcaaagaatccttccctggctactctaactaaaataatacctgctactctttattcccttattttgcctcatggctcttattgtcctctgattgattgcttttctttcttttatcttccttatgttaaatacaagctctgagagaaaattattttcttcacttctgtattcccagtgcctaaagctacatgagacgtgtggtaactgttcagtacatgtttgttgaatatatgtacaaatatgttcagtgcctttatatattggagtgaaggagtgtgtgtgtgtacatgctgttgcctaaatgcctaagtacactgaagacccttgagatatctgaagactctagattttcaaatagtgccatggcatgtatttttttttttttttatcataaagggtaataaaatgtaacagactttcaggttcctttaggctcttaatgatagttattacagttgttccttattatttatagaatctgtatttgtgaattgacttactagctaaaatttatttgtaaatcagatcagtacatgcaaagcttttgtagccattcatggacatattcagaatgatgaaaaatttgagttgcccaatgtgcatgttcccagctgaggtcaaacaaggtgacactctgctttcttgtttcagctctcattctgtaaacaggtgtcctttttacagtatatttagtgcctcattttttacatttttatgctttttgctggtgatttagctgtttaaaatgccccctaagcatagtgctgaactgctatgtagtgtttttaagcacaagaatgctgtgatatgt

SEQ ID NO: 75143 - DNA, 1415 bp, Homo sapiens
attgtaattataattgtgtgtgtgtgtgtgtgtgcgtgtgtgtttacttgcctggaagcctaatcactaaccaatataaaaattaacgaaacacattttattaattggtgacttcttactagcaaatgtaatgcttgtttatacagaaagacttgataagtgatagtcataatagtttttattaaatatatctttgatcctatttttaagataaatttatatagaaaactcttgaaactattagtagttctgtattagacacaatgctttacaatttcggtttataatattaaattcaacaccaggaatatttacacagatactttttttttccttgtaggtgatgttttcagtggtattttagaaatcatttgacaggaatcaccagttttttcacaattaaaaatatagaattgattatcttttgacatgtattaagagaattataacattttttgtttttaaggaaattaacagtagaggaaaattatcggttagagaaagaagagaaactttctaaagtagatgaaaagatcagccatgccactgaagagctggagacctataggtattaaatacatttttctggtttcttttttggaatgggaagagtatctaaaaaacttaatgccagaaaaataataaatcaaatgaaaatagaaaacattttaaaatctgacaggtggtacagacaaaaaaataatatatttttgtctcatcacttttcattcagatttcttggtcttgagcaattatacagaaaatataaagaggaaaaatgtttttctttcaggttgtgtgatttttaaaatctctcaaagttgaatatggacaattctattttatgttagtgtcaatatgaatagatattaattttaaggtccttcctcattggttcaaattgagaagaatgtatgtaatattagtgaatcaataggtgtgccacaaaaagaagagtgagccatagagcatttggaagtatttaaaagactataaatctagattttaccttggtttgatccttactagatcccaggaaatagaaaatatagagaaaaaaagattcagcagtatcccaaatagttgtgatacttcattttacctcagaaagagcaagcttgctttttatccaaaataagttatcttgttaatctcacaaaagtaccaagtaacattttacttcacagtggttgctaatttcctagaattctattaagactacccacatctggccgggcatggtggctcacgcctataatccctgtactttgggaggccaaggtgggtggatcatctgaggtcaggaattcgagcccagcctggtcaacatgatgaaaccccatctctactaaaaatacaaaaaattagttggtcgtggtggtaggtgcctgtaatcccagctactcaggagactg

SEQ ID NO: 75144 - DNA, 2032 bp, Homo sapiens
tcactatctctagggcagcaagaaactgattaccctagttaataagcagtgggagataaaggtgttttggtcagaataattttagaggatctgtttgttctgtgtagatattaaaatagtgaagagcagcttgtagttggtagaggcattttttcttgtggtgcttctcttggatgagtaacttagagatgtttgttctttatttgcagattaactgaaacagagcttaaatttgaacttttagaaaaagatccttatgcactcgatgttccaaatacagcatttggcagaggtagtctttttttttttacccctcatttaaaatacatattttacatatatatatatattgcacatatagtttctattagtgtaagttaacactgttatttatataaatattttagattttagaaccaaggttctagactaagctttctcatagactcacaagcttctaggttttgtttcctgtgcagtaatgaaaattactgttgcttttatttctcagtgggattttgtaagatgatacatatttagtactttgagctccttgaaaagctaggtgcttggcacatagtaaggtactcattaacaattttctgtgagattgaatgaataaggagtgcttacatggactagcattgtgactgtttatatattaactatactttggaatttgcttgtttaataattaaaaaatagtttctaattatttaaaagtatcaatttaaaatgtgggaaaaactcagtctgaggtttgattgctttaattaccctcaagggaggaccaattttttttgtaagatatatttaatatttctgtccattgttgagttagggtctgcagtgatctcaaactattgcaaacagtttaaattttttcataataattttggttgaattggaattaagcttctaaggtactgaaaaatctatatataggtagaattccattttaataaccttggaaagttataaaaatcacttttgagagtaaaatttcattaaaatgaaagtctgtttctacatttaaaaaatattagattattacgaatttcaggtagtaacaaagtttggattggggtgaagtatatagaaggatttttttttgtctgaatccaacacaaaatttcaagaagggtaactaatgctttgatcttttcttgtagctggtttgaatattataccagctacactcatgttttaaatttaacatgttttaaaaatgttattttggtggtttttgtttgtattttgtttttgatttttgactttggaaacaaaaccattatttgagagtggtgaagtttgtaaagtggtaggtgtcttggctgtatagattatagataaagtgatttagttgataaattagtatttgtaagctgactttttactggtaatgaatcaaaagtaaattgtgatcttgcttcagagtattttatgcatttttctcctcttcataatctgagcattatttaaacaattcatggcccaatacagcctatctggccctgatttaaactgagtacttctatgttgcaactctcaccagctgaaatgtctgggtgcatactgccagtaaaaacaaaccaaaaaaaaatctaactttatgctcctataactctaagatatatctccaatatcctttgcttaatataaatgattatttatcatgatctttttattcccagttcgttgatgtttttattgcttaaagtgtctatttgatagacaaatatcgaaaacaccagggtctgtatttaattctgttctatattagcaaaatcaaaggatacattcaggacatagattaaacttaaattggcaataggatgacctgatggtaattgtcgaaatgggattctaactctgtagtgtagctaagtgaaactatgaatttaaatatgctgttttaattattccagagcattccccatatggtccctcaccattgggttggccttcatctgaaacaagagcttttctctctcctccaactttgttggagggtccactcagactctcacct

SEQ ID NO: 75145 - DNA, 1011 bp, Homo sapiens
aaatcaaaagtcttacattttcagttccaagtatgtgttttataagagctgatggcattcttcaccagtgaaacattcccaccctttgtatcagtgattttaacagattgaatttgagataggaacataaagtaatgaatctaaataaaaacaccaaattaaatccaacaaatcaaagttcatatactcagatgggtattactcatctaaatagtatctcaggaagtctgtgtacttgttagttgaagctgccattactccacatatttttggaactcttcctttggaattgctttcaaataatatgagaaaatcaacttactactgtatggtcatgagatattctccctttgcccatatcctgtttgtatcctctttctccaccctcattttgcttcacttagaactgttcctgtccacctcccagtccccccagtagattgggccacagcctggggtccctacagagcctctgcttgtgttgattttgaactggaagctcctagggaaagggactgccctatagactgatacttagagccttagggaggctttgcattgagcacttcaggaaagagactgattttgacattgacatgtctgctgcaagcttatgacttagttctctaagtccacccccacccctccattttttaccttggcttacactaagaaatgtattttgtatcatgtcatattgtacactaacataaacatgattgaaatataattgaaaccgctacatgaaatagtacttgccattacagttttgatgctttctattcaattttatcccgtttcattaatttaatcttaattagcattattttttaaacttcacacatcacaaatgagtaggagctagcagtctgaaaaaacagtgccctagaaataagggtataattggctaaactgcaaatatgagtcactggaaattgaattacataagtcaaggattgcttgtagtcaattgaatatttggaatgattaaaatttacatttgatttctcc

SEQ ID NO: 75146 - DNA, 1127 bp, Homo sapiens
tcatgttttaactttgagatgcagttttttacatggctcttaagttaaactgagtacatttccaaaagagtttttctgaaaaatactttagtagcaaaattagtagaatagatatagaactgctaagatgactgttttaaaggaatcatgctcatttggactattgatatattagtttaagcaacaaaatcatttatgctttttatttaatcatttattatattttatatttattttaaatattttatatttattttatattatattttttatttaatcagttcttataattactttataattatcctgttacatcaggcataggaatcatagcaatttactttctacactgttatttttcagactttgtatttataatttatgatttaaccactgattttatgtgtaaaacaagtatataagactttttaagatgaaacagatttgtatgtttttttttctttaattaggctcacgaggcccagggaatcctctggaccatcagattaccaatgaaagaggagaatcaagctgtgataggttaaccgatcctcatagggctccctctgacactgggtctctgtcacctccatgggaccaggaccgtaggatgatgtttcctccgccaggtatgtaaagacaatagttattatttctctttgaaaggcagctgggatgtggaatacacaggaatggaagaagggaggagtatatgtttgttctctcttaagaaaaatcatcgtacatttttgaaaacaacaatgataaataatctaaacagaatgatttgagataattgttcatattatagaaagctgttttctccctaaatggaatgtttttattgtttttgttgcttgtagaggtaataatgcatgtttactttagaaaatccaaacaacacagaaatgtgtaaagaagtgaaaaatcccttttgtcatcttagcgtgtccttcccagaatttagttgtaggtatatatcttttagagatttttttgggtatacatttatacacatagctgttcaaattcttttaatcactctgtgcagttgtaccattcatcctcttttgtaattgtcttttttcactgaccattttatctcaccaaaataaatatatttacca

SEQ ID NO: 75147 - DNA, 1183 bp, Homo sapiens
ttactgaaagtttgacaatgatgacatctgaatgatactctttctgctttgatgacaaattatcacctgttctggtaaatttcttgctgtgcttacgttttttctctttactttttccttatgttagtagatgtttcctgggtcttttttgatacattgatgtatttacttccatccattattaaaatggaaagttaatttacatatatataaaactaaattctgttttcacatattctaatttacacatagtaattgaaattttcaaaatccaaagtagcagattatgcttgtgtttactataaaggttattgcctatagtaaaatatgcaattcttctgaaattgtctactgttgtcaaccaagaagatgatgagtttaagtgttagaatacaggtcaaaagtgtaagttcaatacgttaaacttaagtaaacttgatttatatttacattaatgaagacattttaaaaacttattttctaggacaatcatatcctgattcagcccttcctccacaaaggcaagacagattttgttctaattctggtagactgtctggaccagcagaactcagaagttttaatatgccttctttggataaaatgggtaagaagtactttgtgcttttcttctttaaaaattttggtggcacactaaagaactggaagttagaataaagaccaatataattgctatctctagtagttcctaaggccaaaatctctttcctgaaaatgtcctggttttatgtttcttgttatattgtacacagacatggcatccaaatatatgttggtgggttggtttgagcaccatggaaataggtttactccatatacctatgatgataaattttactctgttctatgactaattttctaatttttctagtccacttacatgtgttctgtttagtaatcagggaaataagccaggcaaatgtgaatggatacataaaaacccaccagaaaacaatttagatgcatgctctgttgatattgtaatcagttatattaaacatttcatgcttagatataactaacatgtactgagcaatctactatttgtcaggctgtcttttacttaaactacctcatagcaacccattaaagttgggaaatagatgtatgcagtgtatcaaccagaagtacacaacgttaagaaaataaaaattttttttaa

SEQ ID NO: 75148 - DNA, 1030 bp, Homo sapiens
gctacaagaggagaggtagttgtggtcagagaggattgcatttcttgatgataacaaagttcgggaacatttatttcggaacagtagctaaatttcagtagctagtctctcttacttaatggaggaataaggacggaaggaagaagaggaggaaggagaagaggataggaggcaaacataaaaggagggaggaggaaaagaaggaaggagggagatgcttcctcccagatgtcttcttagcattctgctccagcaggattgcttaggaactagccagagaaataattgccacatgccatcatagaactctgagtctgccagaatttctagggacctcaagctgttcttgtggccgcaatataggatattggtgtccagctggcttatgtgccaacaaggggagtgggaaaataccaattttgtgatctggagatactctaggaataaagtgataaatcatgtacttttcatggtttaacttttatgtctagatgggtcaatgccttcagaaatggaatccagtagaaatgataccaaagatgatcttggtgtaagtattgaaagagtggaattgtatgcatgtattcagaagccttctttttttttttttttttttttttatggagtttcactattgttgcccaagctggagtgcagtggcgctatctcggctcactgcaacctgggttcaagcaattctcctgcctcagcctcctgagtagctgggactacaggcgtgtgccaccacacccagctaatttttgtatatttagtagagacggagtttcaccctgttggcgaggctggtcttgaagtcctgacctcagatgatccactcgccttggcctcccaaagtgctggtattacaggtgtgagctgctgcgcctggccctgagccactgtgcctggcctgtgccttctaatctcatgctttactagaatagaaatatagctaataatctaggttttgatataaagctgattttctctttttgattaatatactttctacttagcgtgaaagctgttt

SEQ ID NO: 75149 - DNA, 1078 bp, Homo sapiens
cagtacaggttcttaaagttaaaaaatgtcttttaccaatctctttgaacagtgagaaatgtctatccaccgaggggttttcctccttaccttcccccaagacctggatttttccccccacccccacattctgaaggtagaagtgagttcccctcaggtttgattccaccttcaaatgagcctgctactgaacatccagaaccacagcaagaaacctgacaatatttttgctctcttcaaaagtaattttgactgatctcattttcagtttaagtaactgctgttacttaagtgattacacttttgctcaaattgaagcttaatggaattataattctcaggatagtattttgtaaataaagatgatttaaatatgaatcttatgagtaaattatttcaattttattttagacggtataactatttcaatttgattaatccactattatataaacaatagtgggagttttatatatgtaatctttcaggtggggaggctttaaattctgaagtctgtgtctttatgccaagaactgtatttactgtggttgtggacaaatgtgaaagtaactttatgcttaaataaattatagttgatttaaagatttgtttggcattgataataataaaatcagtagtttttctataactatggctctattaacttttttccttttaccaataactttgaggtgcaaaactcaaacttatgtgggtcttttgtgttcaattatgttatgacaaatgtgctctctttcttgtaaatagacatgagtggcccaaagcaacaaattaatacacttttaaaagtcaaaattgattatattttaaagataaccaggatattatctaatggtgaattgtagaattttgatcttcttattcactgagtttcttgcacggtttctttattgcttttttttccccgcctgttcttttgtaaggtatttactattttctgtggaggatattgagatgtactacaggataactgtagtgaatgatgtgtcatcattttgagctttggactcaatatctttagtgtttccctaaatcagatttgtaggtcatgttaagc

SEQ ID NO: 75150 - DNA, 1453 bp, Homo sapiens
gatctgaaagtgcttgaagtcaccgaagaaagcattgattttgaccaaggtgaactggccgaccaggatgtagatccagtgcataaccttattgagcaggtatccctgggcctgggtcaaccttggcatgcagtcatggacatcgaatcactcagtgtcttcactgaaccaaatcgtcatttttacagagagatgcaaagcttcagtgaagacatttagcttttttttaatgtagaattcctgtggttacatatgcaagtagggtcctattatgtttttttttcagtagtgtgaattaatccttttgtgctgtgtttaatcagtattagctttatagaattatatatgtatattctacttcttgatcaaagaacgtagtcgggtattggtttagaagttcaaagtgacaatgtatagggctttcacggttaatggacttgttaccaaaccttaaggatatacagccgaagattgtctgaggttgctggctaactttatttttcactgagttactctgcctttttgacgtttttattctttgtgtgtcagagttcagagctcaggagccaaaatatttttatacatatatagatatatatccatagcctggtagatttatatgcaatgcactgcatccatgcattctgatagcatttcattaattttgatttcaaatggaagataaataatatcccaaatgaattatctgtaacagaaaagccaagactttaactttcattacatatctaatagttgatatcaccagttaccattttgaattttgtatagtactaggttagaacattgcttaatccttttaaaaaaaatgcatttacgtaaacacgaatactgaaattgttggattttttaactatatctgacataattttattcatcaattacattacacattcatttagcccagatttcaaatagtgggggaagaaagaaactgtatttcagagtaaaatctcctaaaggaaataaaaacacagagttgtaaatacacatgcttgcaaaaacattagtcgtgaaatccctagcaacaagtcactggatttttctctgtcagcacgcgtgtcagctgccaaagaatagacttaatgaagaagtgcccacatgctggcaggggccggcccactctggccagccagatactgctagattgtaatatttaaggtcgaatttcgacctgtggtacacagctgtgctgtggctcagtcagcaacctcagaactctgaaaaaacaaaacaaaaaaaaaaaaaaaagaaaaaaaaaacatgcacctgtttcactgtgaatagtgaatgtaaaggaaagaaaggaaaaactgaaagcttgttctatcacaggtatgagctgctatgatacatgaagaacattccatgaagtatgttttaaaaccttgttatatctgagaggctttaaaagcctattaactgtttcagggca

SEQ ID NO: 75151 - DNA, 1030 bp, Homo sapiens
tcctctacttgcctttgctataacataaattgtatgttatcctacttttctactaaacgggtataagtggtgcttttcttggatgaggaacatatttctacgtgtttaatagatctttatgtttaatataccttattcattatattttaatgtgaattttaatggtatttactgtgggttgaatcgaaattacctaatgaggaaaaatagatctcaaaattgcatgcttttcattgcctattttcaaaagtcagtgttaaaagattagaactaaatgttaatgggatcactgtggcatgtgttttccttatagaattcagcaactgtttgaagaaatcctgagtaatagtaggcaactgaaatggctgtcctgtgggtttatgctggaaatagtaaccccaacatcactgtcatctctctctaatgctgttgccaacaccatggagcacctcagtttactggacaataatattcctggtaacagcactcttattactgcagttgaactggagcgatttgtgaatctgcactcacttgccttggatttttgtgactttacagctgagatggcaagagtcttaactgatagcaaccatgtgcctttgcaacgactgtctcttctggttcacaatgtttctgtaatgcacaagtctctggacaacatgccaaatgatgagcattggaaagccctgtcacgaaagagcaccagctttcgggtctatataatggcttttgatatcaagagtgaagatatgttaaagattctgaaacccagtataccactagagaggattcattttgatagctatatcacttgtgtttcaggggctattgttgatcttatatccaggcaatatgacaagttcctcactcattttattttaatgaatgatgtgattgacacatctggttttccagatcttagtgacaaccgaaatgaagatccgttggttttattagcatggaggtgcacaaagctctctcttctggcaattcatggtaggtgatcttgttcattgtaatctgatac

SEQ ID NO: 75152 - DNA, 1191 bp, Homo sapiens
cctgtgcgtttccacagcttttcgcaagacattctatttccttactttggttttatctggcaggagaggccattgaagctaaaaacagattaggttagagactttctcagagttgaatgtatggctagaggaccaactgacccaaaagttgcaaagtttcagtcagtgagcacttactaatgagaccaaggttgagggtgaattcaatgagtgagtaccaattagatttttctgtactgagatcaaattgcacttttatgcaaccatgcaaacactgtatgtgcctttgacccaagtaagaacaagacttgataagtgtctagttccttttaagtattttaataactggttggttggatgggtggataacatacaggcaaaatggagatatttcacatctttgctttgtagcttaattctcctgtccttctcttccttacccctacaatttttattagcatcccaatctgcttctctataaggccaccgatgcctgcccttctgggtcagctatcacttctatgcaaaaacatcacacccgtcatccctaattttaaggtttgcttgtcatctactattagcatggtgttgtatgtcatgctgctttggtagcatattcattctgtttgtctcaaaatgtagtgtaattgcatgttgtttgtactaatgatacatcaaagggtttttggaaataagttaatctcatctttactgttgaaagtgttttgagatactctgtgatattggaaaagttaatatgaatattaaatccataaataagactagtttcctttaaattttaacaaatctgaaaatgttttaaaccacattgtttatcagtgactagtaaagcctattatttctttctataatcacttaaactatagacttgggacatttgacattgctctttacatttccaagttaaatttacaatggttttgctttatgatttctgccattctataagtagaaaagagggggtgtgaatcataccagatcataagcattctgcttccaggctttgtgctgaattcctttatacagttcatacaattcagactgttattttgttttgttccagttattttcatgtccctcaggaaaataattaaaagtataaacttgaattgtgtgaacttttcaagggtgctgatcttcagagaggacaattggcattttgttttgctt

SEQ ID NO: 75153 - DNA, 1016 bp, Homo sapiens
ccaccacgcccagctaattttgtatttttaatagagagagggtttctccatgttggtcaggctggtctcgaacgcccgacctcaggtgatcgcccgcctcagcctcccaaagtactgggattacaggtgtgagccaccgtgcccagcctcaggattttttttattacagggtttccctctgtcacagataaaatctgcaatgtaattaatataaagcctatcaaatggccatctgtacctcaaaaaaagactgcagcttcttaaatggtctttccagagagcatgcatagtgcgcgaaaagtggctcatttaaatttttttgctatgttgggaggcctaataaccacatttgatttgagtctttagatggatttattttcgtttaaacatattatgcatttaatatacaaagttacaattttatgtgttctgttttaaacttttaaaatgtaggatgaagacactgtttgaagagatcaaagcatcaattaaaaataactataaccaagatcgatcattttgtaggcctgttcttccttgggggggtgtttttactatcaaagctggccgcaaagcagtatcctgtacaccactctatgttgaaataagactgaaaaatacctgcaccatagatggattcttgatgttattatatgtcattcttaatgaaaatgaaaacttccctagggaactctctcttcattttggtagagagtttgtagactgttttctttacttaatggacacctacagttttacaactgtgaagctactttggatttgggacaagatggaaaaacagcaatacaaatctgaagtccataaagcttcattaataattgatttgtttgggaatgagcatgataattttacaaaaaatcttgaaaatctcatgtctaccattcaagagagttactgttccaactggcgatgcccaactcgagtgcaggaggatcagcagcgcacaattaatataaagtaagttggtctaacgtctgttttgtcacttttacttt

SEQ ID NO: 75154 - DNA, 1048 bp, Homo sapiens
gttttttttaacggatcaggtacttgaggccaagaatgattattacttacatttaatcaggtaactaatcagctgctcctctgattctgggtcctagttccttcccacgagaccagattgcctcttttgaatcttctcacaaatgttttaaattatcatagcagcaactggatatatcaggattgtttatacaaaaatatgtttctttgaaaatttcataattagtgtttgagttcaactggtttctatactatctgcaagaaattctgaatgtgtcataaaggttatacttggtataactggttttgctaataaaggactgagctgtaaaatttgttataatatattaagatataaaatgttgaagcagttcttacatgcatttaataattattatagtcctccccaagaaattccacatggaaacttgataagactggctgtgaatgagttattctgttccaagattgaactgtgtgaagagcatgggtgagtatacaatagacatttaaaatgacagtatgtatgtgtttataaggaaacctaggcagatgtgctccttgaagtactttatgaatcttattaacctagtttactatgacattttacagtgtttttgttacggagtatatcactacatagaatatggtactacagctgattgatgaatacaaagcaaataccttttcttttttccccccccactgctgagtaggtacaataaaaccttggttaactggaacccagctaattgggaccctcaattatctggatttttttctgcactctccatttaggagaaagaggtaaatgacaactaaaaaacttaacctagtaaaagttgagagaagcagaacatattcatcccaatctcttaaaattttctgtgactacattattgtataatgagaattaatatttagaaggatgatcttattgctgattaattacaaaaggaaaggtaaaaatatgttctgttaattgtacctattaagtccagaaagtgaacgaatatattgtagcaacaaatactgaaacagatggtttt

SEQ ID NO: 75155 - DNA, 1128 bp, Homo sapiens
tttccctgtaaaagttttcttacgtgtttactcttttttaaaagaaacatacaggttataagttcatctgttaaaatatgtttttaagaaattcttaatttccacatttccaattttattacatgatctatagagatggatatctttttcagggaacagaatacaaacaatgtcaatgtttttattccttagttatgaatttaaggaatgtttatcttaacaaagtattaaattttctctcatactatattatttaatttgcaggtatttgttggaaggtgccacattatttaacaaagaggaacatcattattctgcagctttccagattggtggacattggatgcactatgatgggctcagaaatgtgaatttaattttgttaaataaacccccagagtttctcctcttgtcatcattggtttatattcgagcaacagagaaataaatatagattgatgctaaaagttgttttccctcctgcccatgctctcccagatgaagggcttttattttgtgtatacttggtatccaagaaaatagttcaactatactagtttcagaagtgtattttcagtgtttaaccccaggtaaatgttttatatagaggatctgtgcaaaaatgtttgtaatttttttatatttcctgagttatttttatatgagcatattttatgttggaataaaatatatcttgtggcctttgtattttttatttatatgtacctcaaagatttttacaattctgtctttgaattcaagaaatactttgtcatctgaattctaaatttttctttttggatattcgagtaaaacctaggtaaaagtattttaagtttatataatttaacagttcaaaatatatctgactgtatttctttgccctacctcactataatccaaagtgcactatttgatctagtatggatttgaatgtacaatttatcgatggcttagtttattagttcgatttgcctagtatccctgcagcaattttttaaaatgtctgagaaatttttcagagcttaaactatttctttataatggcaaattacttttaactacttcctaaagtattataaacctgccagtggattttaagtgatagctaagcttccaagcttaatt

SEQ ID NO: 75156 - DNA, 1053 bp, Homo sapiens
tttgtaaacagcactttaattagacatgatttaattagataacaattattccatggctggatatgtactggattttcacttacagtacattgatttggtgttgatacacatttgaaaagagtgaggaatacaatacatttttaatacaataggtttacaaattttcctactggtgtgaatatggagtcaaataaaaatccagtttacatctctgcagagagaaaaattgttatccatatgtcttttatattatacatctttactagagataacttattgttaattttgtcaagttatgtgtaagtcccatttatttttaaatactaagcaaaaagttccaagtttgccttaaaatacaagtgaagttaaagaactggatgataatgcctatatttttgccttatgaattgtgctgtgtattataaaccagcaacggttttgattttaacaggattctgaaattttgtagctgtagagtactaatatttgtactctcttgcaaagaatgtgatctagttgtggattatgttagtttaaatgtttttgtatatgtattttacctctgaacatgtacctttttagcatcagggttttattttatttatgtttacacactaaagtgtcatttaactagttaagaattgtattcttttttattttaaaggttatttgtgtgtatcattgtggtaatgttctgtaattattatggttaaatttcatttaatgtaaaatgtttaaaataaaaatgaaaaatctactttgtatatgtcatatgataattgtgaactgaaccaagctaactttgtcatgctcagctcttagggttttatgcatagataggtagtagccatagagtagccactcctttacatcttcattagcaggttacagtgaaaacatgtcttaggcccggcctggctcagtggctcacacctgtaaccccagcacttttggaggctgaggcgggcagatcacctgaggtcagtagtttgagaccagcctggccaacatgctgaaaccccgtctctactaaaaatacaaaaattagctggg

SEQ ID NO: 75157 - DNA, 2398 bp, Homo sapiens
gtcatagctcaccgctgcctcaaacttttggcctccagccatcctctcacctcagtaactcttacttttattataaggattttgtttttccatcaagctcatattgctccagtaggccccccatacccacaggagatatatattccaagacccccagtggactgaaactgcagatagtaccaaaccctatatatgtaatattttttcctatacatatatatctatgataaggtttagtttgtaaattaggcgcagtaagagattagcaacaacaataatagaatagaacaattgtaacaatatattgtaataaaagttatgtggatgtggtctccctcaaaatatcttactgtacagtactccctattttctagtcatggttgacttcaggtaactgaaagcatggaaagcaaaaactcagataaagggaggactactgtatattgcctgtataattaataatagattgttaaaatgtattttaataaaacattaaaatacaaatttatttttagtgagaaaaagtatacttcatggttaacatgtttctatcttctttttgccaacctttcctaggagttggtgctgctgtaatcgataactacctttatgtcgtcggtggtcactcagggtcttcctatctgaatacagtgcagaaatatgatcctatctcagatacgtggctggattcagctggcatgatatactgtcgctgcaactttgggttaactgcactttgacaaatgtgaactctcggaaatagtatggtggtgaaacttgtactgcatgaacatccggatggcccagttttctgaaacccacaagctgcattgctttctttttaacttgaagtagcatgaaggctcaaaagttttgttgggtacttttaattgagaagtagttttggttgctcttgattacacagtaaatcaataatcaaaaagaaaaaagagaaaaaaaaaaagtaaagactttgccaattgaattctgcactttttcccccaagactgagatgtactagttttatgttcataagtgtacatgtagacaaaacgtggctgctttttttttttttttttttttattttagctctccttccctgataaccatgattttctaggatgagcgatgctttaggtgctggagtgtattgaatgaatggacagagtgctgatactgcttcttggatgtaaatgcttcacatttttcatttgttttaaaacaaacaaagggctgctttttattttggtacttttaaaggttgtaaataacatgccaataggtagtcatctgaatactttcctgctaaatggttttagggctacggatgtaataaatttttaagacaattgcttttattatcatgatatttggggccctattttaggaaatcagatatttactgtttatgccttttgtatatgggcaggttaacgttggatgaatttaattacctatctatgctatggttagcatggataggagtttaagcatatcaggtgtttcagtttttcttcagtagtacagcaggcctcccagtgctgatgtaaatatttgagcagtgtttagtaccattcttagtgcatattaatttttttatatatccttataattttagttttttaagatctttgctttttcaaagtgttcagatataaaatggtgctaactgtaggatttataacaaggctataactgatgtccttttggatgttcagtatgagatatgcatgacatgttttgatagtcttttgcatttttaatggcttgattcatttgtgcttattaaaaatgttagtgattacgccaatgttaacatccaaaaatcatcagaatggcctgtgttatgcttttcatggttcctgaatagtgatttaaagaaagttacacttttgatcttctttcttcttgtgctagatattacatgtctttcttaaaaacagaaatatatgcattaaatataaagcactaggcagttatgcattactttgtacatttcttaggtaactgaatattttaaggttattgaggaaaactggaactcgatgtttacttgagtaatagttctaagttgagttctactttgattaaagaaatgatcttttaaagcaaaattgtttgctgtagccagtgacagcttatttaaagaaagtgtttaacttatttgattttagcatgttttagtaaatgtctgttagtcttaaacacattcacttgcattttattattatgtcggtacttgtattttggaactgtagtcatttgattttcttttccttgattttttttaaacctgtttgcgatctccttataaagtctctgcaagataatttttcttaagaaaaaaattcatattatattcttaagtgccataatgttctagactattgttaagaa

SEQ ID NO: 75158 - DNA, 1985 bp, Homo sapiens
ctgttggttggcaaatagtgttgtttgttctacatataattttactttaaccaagtttttcccctcatattttcattttatttcagtgatagctcagacttgaatttaatgcaggggaaacaaaatgaaaaagttggtaaagttttgatccaaaagtccattgtcagagatttttttggtttggggcatctcatgtaaccttttgggcttccatttcctaatatctataataaataagttgaatgatgtgattgttaaatctcttctaactctgaaagcctctagttctagtatttactatgaagtatttaaaaaccaatgaacagacaaataaattacaaatctgattattctgtactatttgaaaagcagtgtttttgacaagtttactttgaaataactgtctatgcttttttatttttctgtagatggaccacacatccccgacctacatgcttgctaacttaacccacttgcattctgaacaacttctgcagggcttgaatcttcttcgccaacatcacgaactctgtgacatcattcttcgagtaggtgatgttaaaattcatgctcacaaagtggtacttgccagcgtcagcccgtatttcaaagctatgttcactggaaacctttctgaaaaagagaacagtgaggttgagtttcaatgcattgatgaaactgctctccaggccattgtggagtatgcctatacagggactgtttttatttctcaggacacagttgaatctctcctgccagcagcaaacctactccagataaaacttgtcctgaaagaatgttgtgcatttcttgaaagccaacttgatcctggtaattgtattggaatttctcgttttgcagaaacatatggttgccgtgacctttatttggcagccactaaatacatatgccagaattttgaagctgtttgccagactgaagagttttttgagcttacacatgctgacttggatgaaattgtttccaatgactgtttgaatgtagctaccgaagagactgttttttatgcattagagtcttggatcaagtatgatgtacaagaacgccagaaatacttagcacagttactaaacagtgtacgattaccattgttgagtgttaagtttctcactagactatatgaagcaaatcatcttattcgtgatgatcgcacttgtaaacatcttttgaatgaagccctaaagtaccactttatgcctgaacatagactctctcatcagacagtcttgatgacacgacctcgctgtgctcccaaagtactttgtgcagtaggagggaaatctggactctttgcctgtttggataggtaaatagaaggctttcctaaatgaatgatgctaattgattttatgctttttaaatgtgcagattttctatattttaaaaatagtttgattttcctttttacttttctttgcttctttttagttttttttcttcttcctaaaatacttacgtgattgtttttattatattgtcattcattctttacaatactctcaattattaaccatctccccaagtgcacactttatccacctggttactcacaaacttttattccattttctctctttctttctttttttctttctggaaccatttacatgtttatttgagtcagaccacatcagaagagatttattattgtcaattatatcagaagatagcaaagaagagaactaggaacctgtggtgagggaactggggacaggaatgggtttgaatgaaaacagttcactagaagtgctaccaaagaaatgagaaaaaataggatactgatataaattatgtactttgagtgtaatttgttttcttcagtgtatttttaaaagacagcattaagaaatatgtttttccccccaataacttagattaggaattgtcagactttttctataaaagaccaaacagtaaatattttagactttgtgagccatgtaatctttgtggcatctacttaa

SEQ ID NO: 75159 - DNA, 1448 bp, Homo sapiens
ctttaataagttaagaaattatgagcttattttatacaggattgaatcagttttcttgatgtatatgagtgatatattttcatctacttaggtttatcttccaaagccattatgtatttctgtcttcagtcaaaactataattttaaacaaaaatccaacttgtattacatattaattactatgtataagttaacagaatttcacatctgttgcagtttttcagtggacagggattaattatgtaacttagacgcctgtcataacatggattcagaaataacacagaagaaagcaagttcaaagtcattaccacatccagtaagagctcttgacaggcttctaattttacttttcttttgtttgtcaataaaagtcaaatctcagataaaaggaaaatatcctaacttattccataggctcactgatagaattatataccattattagttgaattatcctatgaggaaagttgaactgtaggaaagaaatttaagaaaagagcagatgtgatagaatattctcctaatttgataaatcatttcttattttctctttttaaagaaaactgtcggtttgaattttttttttaagagtaatcttgatttctgttcaccatttatttactctgggtgtgatctatatttatatagtggcagataagtgcctcccaactgatttcagcaccactgttttgtggcttaggtgtcaattaagtagataggtacaaaactcgcaacttgacctttattaacttggtttcagagcctaaagttaagttactgtagactatggaaagttttattttaattttaatttcaaatggatactttttattcgatattgactaatgcagttaccaagattcagaatactattgtttgttttatcattaaaaaaaaaaaaaaagaacaaaaactatggcagagatatggaggaacctgatataccaaatctgcttttaggcaaatactggaaggcaatgattgttccatggatccttctttatttcattttaaagccctgtgtatttttgtatctaatgtgtatttattttataaagattttatatgaatgatctatcctctggatttccattctgcacatttttaatttcttgtttgagttaagattttaataagattaagaaattctgagcttatttaataaatgaggcagtgtaatagaatatttaagaattacatagacagagtgccaaggtttaaatcttgccttggacttaatttctctgtgcctcacatttctttatctgtaaaatggtggtaataataacagtgcctattatattgttgctctgaggatgaaaggaattaatacatgttaaaagcttagactgttaactggtacattatgacagtcaaaggtattctagatgctctttcatagaattatttcattttatgagaagtgataacaattataaattgat

SEQ ID NO: 75160 - DNA, 1650 bp, Homo sapiens
gcggaaagatgcgctgcagatccttcatatatgtctgaaacgtagtcctggagaggtgctgagaacgcttatacaacaaggactggaaagtaccgatgcccgacttagagcttccacagcactactgcttcccatcttgcttactactgaggacttgttgcttggtctggatctcaccgaggtgataatatccctagcccgaaagcttggtgatcaggagacagaagaagaatctgagacagctttctccgcacttcaacaaattggggagcgacttggccaagacaggtttcaatcttacatttctcgtctgccctctgccctgaggagacactacaatcgccgcctggagtcccagtttggaagtcaggttccttattatttggaacttgaagcctctggatttcctgaagatccccttccctgtgcagtgactctttccaacagcaatcttaaatttgggattattcctcaggagctgcattcacgattattggatcaggaagactataagaaccggacccaggccgtcgaagaactaaagcaggtgctgggaaaatttaaccctagttctactcctcattctagtcttgttggcttcattagtttgctatataatttgttagacgattctaacttcaaagtggtgcatggcacacttgaagtcctgcatttactggttattcgccttggagagcaggtacagcagttcttgggaccagttatagcagcttctgtcaaagtgctggcggacaacaagttggtgatcaaacaagaatacatgaaaatcttcctcaagctaatgaaggaagtaggacctcagcaggtgctttgtttactcctggaacatctcaaacataagcattccagagtgagagaggaggtggtgaacatttgcatctgctccctgctgacctatcctagtgaggattttgacttgcccaaactgtcctttgatcttgccccagctcttgtagatagcaaacgcagggtacgccaagcagctttagaagcttttgccgtattggcatcatcaatgggctcaggtaaaaccagcatcctttttaaagctgtggatacagttgaactgcaagataatggagatggagtgatgaatgctgtgcaggccagattggctaggaaaaccttaccaaggctcacagagcagggatttgtggaatatgcagtactgatgccatcttctgccgggggtaggtcaaaccatttggcacatggagcagatacggactggcttttggctggtaacagaactcagagtgcacactgtcactgtggtgaccacgtgagggatagcatgcacatttatggatcttacagcccaactatctgtacccgaagggtattaagtgcaggaaaaggaaaaaataaattaccatgggaaaatgagcaacctggaatcatgggagaaaaccagacctccacttccaaggatatagagcaggtatgcttctctaattttcttgagtcgaaagtgtgaagaatttaaatgaaaatatgcccgtgatgacttaagggtcagcctgcttgagggaaacatgttatgctttgttttaaattgattttaaatccatctgaatgttggtactcattataatggtacagatcacaaaggaccatttaataggcttc

SEQ ID NO: 75161 - DNA, 1033 bp, Homo sapiens
attgcttgaggccaggagttcgagaccagcctgggcaacatagtgagatccccatctctacaaaaataaaaaaacttagccaggcatggtggtgcaggcctgtagtcccagctacttcggaggctgaagtgggaggattgcttgagcccaggagttccagactgcagcagtgagccatgattgtgccactgcactccagcctgctcaagagtgagacccagactcaaaaacaaaataaaacaaaacaagagtaacatgatgcctagccttactttggttttttttttcttgcttcagacctggaatcagccatttttttcagaagtcctagtactgcctttttattgggcagtggtatttgaaaacaaaagtctgagtatagatttgctcattgctatttcttgccattgtggtttgaccctttcagtggacagaaccaaggagtacttgttttttgtttgtttgttttttaatgcatttatattaatacctccaattcaaaactagtactgcagggttctttctcatcttcctttattccatatttgaatctcccttcgttcacaataaaatccctgctacccaacatcagtaatatttattcatatgctgtatcctacagtaacccccctccccccacaaaattgctagaccagcaacagcaaccaactacctactaagtaaagtttaagatttcgttacagttctttttgtatttagaattattccacagtcagaattttgtggtcaaacttttcttaaattaagtcttttatctatgtaattattattcaaacagcatgatgaaagatgaataggagcttgctaagtgtggataggtcccagtgaatttcagactaaaggaatagcgtgtttagagacactgattatgtgaaagaacttagcaaattaataagagaatggggaatttttgcacagcaaacacaaggggcctagtgggaagtagcagatgatactggagatgtagatggggtaaagtatggagataatatcttgcaaataatgagtttga

SEQ ID NO: 75162 - DNA, 1039 bp, Homo sapiens
aattgaggtcatcattgttgaagaattttgaacatttgattcatgctctcatttagttctttaactgattatgtgcaacttcaaaattgtatcctggcacctttgttccttaactatcatatggggtttatgagaaaggacttggaaactatgaagtactatacatatataaagtattatttactggttttaactaagagacctagtgtaagaaaataccctaagggaactatgacataggttgccatgttatttacattgacatttaggctgcagaatatggataatagatttgcctcagtaagaacagtgtagtagaatgcttgcttgttcagtgaccttcaactggcacttattgtctagtactcaaacaaagatagcatagtttgaggggttacgctgctccgtcagatcattgtttttgtcatttgtattctctccttccttgttgccagagtctgctgtaggatggtaaggaacagtaaagggttggggtgaagtagtaagaaaaaacaattagcatttctcttctggaatgaaaagtactgttggtgtacccgactaaatatggatgtttatctgtatcattatatatttgataaattaaaatttattctaacctgaatttcataattggatctaagttattttgtcatatttattaccaggaagaattaacacaaatttgctaatttatgattctgttcttatagttttcaacatatgatttcatcccatctgcaaaattaaagctttctcaaggaatgccagtcaatgatgatttatgttttagcagaaaaagagtatcaagaaacttatttcagaatagtcgggattttaacccagattgtcttcctttatgtgctgctggtaagtacaagttgctgatgatggtcatgttgaactaacagacttctcttaacttcatagtgcattcaatgactcatagaactttaatctagtaggcagttcagattcaataagttatttattgaagatctgataagaatggacacttagacattattatctcataaaa

SEQ ID NO: 75163 - DNA, 1449 bp, Homo sapiens
aatcgtttaagtattaatatagggcaatatttgcttaatacatcacccatatttattaaggtgcttttctaagtcctggaggtctgcctaatagagcttgcattctacttaggaacgagaacagacattaaataaatacaagacatagtaagttatctggtgataaatgctatgaaggaaaacaaagcgaaagaaggccatattcaggaaagaatatttgaagcaaaccactgtatatcaggagaagagaataaatagtttcaggaagagggaacagtcagcacaagtaactaagagagaagtgtgtggggaacatgtttgagaaataccaaagagaccagtatgtctggaatgaaataagagaggggaaaataagtagaaaattaaagacataataggggtgcttatttaaggcctagtggacttataagtgaactttactttttactctgaatgaggagcattttgaagaaagaattgacatcacttgtttccaggctcattttggattttatttttaaaatagatgaaagtgtattagtctgttttcacactgccataaagacatacctgagactgggtaatttatgaagaaaagaggtttaattggctcatggttctatgggctgcacaggcttctgcttctggggaaacctcaagaaatttacaatcatggcgtaaggcgaaggtgaaacaagcacgtcttacatggtgggagcaaggggaagagagtgaagaggaagtacaacacgcttttaacgatcagatcttgtgagaactctatcatgagaacagctccaaaaggagaaatctgccacatgatccagtcacctcccaccaggcctcacctacctccaacattggggattaccaattcgacatgagatttgggtggggacacaaagccaaactgtatcagagagcaaggtcaaaaacaggaagactgattaagaatctgttgtagtaatcgtggctagagttgatggaggctttaaccaggatagcaagaatgtggtaagaagtgattggattctggcttggcgcggtggctcacgcctgtaatcccagcactttgggggccaatgcaggcagatcacgcagtcaagagactgagaccatccttgccaacatggtgaaaccccgtctctactaaaaatacaaaaattagctggacgtgttggtgcatgcctgtaatcccaactactcgagaggctgaggcaggagaatctcttcaacccgggaggcagaggttgcagtgagtcaagatcgcaccactgcactccagcctggcaacaaagcaagactccatctcaaaaaaaaaaaaaaaaaaaaaaaaaaaaggtgattggattctgattatatgtcagcggtaaagttgatatagtttgctggtagattgggtatagaatgtgagaaagaagtgtcaataatgctgtaaggatttttggc

SEQ ID NO: 75164 - DNA, 1076 bp, Homo sapiens
aagccaggtctggagaaacgttccatgctgagagaaagagtgtaggaagaaactgcttttgcagatattcttcaacatacctgtcttttccctgttctttactagtctgtcttctgtcctttaattcctgccactaatctgattttctagtatcaaaagctgtatccctttcttgcctgcctacctcactgtacttaaacacttatatttatttccacctaaattacaccaacatttatgaaataaaatgtattcatgaaataaagttaacttttgcttttatgttttctcccttcctttcttcaaaaggtactactgggactcatcaaacaaatctttctgggaaatgtgcacaacttggattttcacaaatatgtggtaaaactggcagtgtgggttctgacttacaattcctagggacaactagcagtcatcaagaaaaaggtataagttccaaatttacttggaaacaaatgacttataaatattatgtggggattccaacactaacttatatgatattttgtgtactcatactcatcacaaaaaataaaaggattttgttatatttttaataacttttttcataattgttaccctaaagtattagttttcataatctttatataaatacaactgattaaaattagagtttagatactcatggtggagatgagtattgcatttgctttgatatatacataatagtggtacatatttgtgggggacatgtgacattttgatatacaatgtgtaatgatcaaattaggctatttaggatatgcatcacctgaaacatttgtcatttctttgtgttgggaacattacaaatctactcctgtggttattttgaagtacataataaagtattgttaactatagtcaccttattgtgctatactgagcactagatcttactccttcttattttattttatttatttatttatttattttgagatggagtcttgctctgtcgcccaggctggagtgtaatggcaggatctcggctcactgcgacctccgcccctgcccccgggttttgagcaattctcctgtctcagcctcctgactag

SEQ ID NO: 75165 - DNA, 1025 bp, Homo sapiens
ggagaatggtgtgaacccgggaggcagagcttgcagtgagctgagatcgtgccactgcactccagcctgggcgacagagcgagactccatctcaaaaaaaaatagaaaggaaatatttttaaatctctaggaatatatgagacattgtcatgaaagcatcagaacctgttaatagagcactgtaattgaaatgaggaaactgaaagttttaattctatatgtaaatctgtgactaaatctcctatatctctctacctagataagattttggtataagtagagattttaaccatgtcagatatgaattaaaaaaataaaggatatataatatatacagttgtttaagtcctcagaagaatgtttgctttattaatatacgtacgctaggtattttgtcacggaaaacattttttaaaatattaaaggaaaacttaagggaacccctaaaagattacaaatagactttttatattcgttgaagaataaaaagatcaataaaaggcaaggaagaagtaataaagaaaaaaataataaatagtacaaaataagatggtagaattaaaatcaaatgtatgaatagtttccgtaagtataaattggcagaacttacaacttaaatgacagaggtgatcagatcttgtttttttagtttttcattgaagtgatctttttaagagcattacctaaaatacatcaagataggttgagagaaagtaaagcatggaaaagatacactaggcaaatgttcagagaaaagcaaatagaaacatgttgatgatagggaaaatatgcacaccaaaactaaaaacatttttagttctagagaggatcattgtaatgagaaaaagaataattcactaaagaaacaagacttctctgacatgtgtgtatatgtatacatatacatgcatgtatgtatgtaattgataaaattacaaggagaaagttaatttataaatgttagtacaatattttaatgggataaagaagttttgaattagaagatacagaatatttgaataaca

SEQ ID NO: 75166 - DNA, 1065 bp, Homo sapiens
cagcctgggctacaagagtgagactctgtctcaaaaaataaataaataaataaaaataaaaagatgttgaaggaatcctctgcgtccctcatgattttctttccccagccattgatgtaagatgtttcacctttaaactaccctacaagtccagtgttcaatttatggcatattcagtcaattttatcactttctcttagcactatactttgattctcttctattaattcctttctgtatttgtttattgtacaagatcaaatattgtatcgaaagccgaggctttattcagcttgttctccccagtgaccagctataatgtgctttttttattttaaaacattgtattttaagcacttgtgactataactccctcttctctaaaattagaaaaagaaaaagtaaaatatctatttttcatgcaggagaaaattctcaagaaaaacctccagttcagcttacacctgccttggtgagatcgccatcttcccgacgaggtctaaatgggacaaagcctgttcctcccataccaaggggaataagccttttgcctgataaagctgatttaagcacagtgggacacaaaaagaaagagcctgatgatatttggaagtgtgaaaaagatagtcttccaattgatctttcagaattaaatttcaaggataaagatttggatcaagaagaggttagaaccaaatatttttaatgacttaaaaatatttgcaattttctataatatagttgctatttaaggaaaaatcaagttctttttatcctataatatcttatttctaaaaatatgttcattatagaaaatgtggaaaataccatgaattagtaggaagggaatttatcacgccagttcccactaccagaataatttactgttaacactctactgtattttcttcaagtattttttctatgcatacattattcctttttaaattaaaagtatgaataataatatagcaatacactcatgtactgacccttccagtgaacagtttgtcatatttgtttcctatatttaaataaatgaaacatagcatagttctctcccca

SEQ ID NO: 75167 - DNA, 1017 bp, Homo sapiens
aaaacctagtaatagaattgatagggcatagaatagatgtatatttaactttttaagtaactgctaaaacagttttccaaaatgattgtgtaacttttacactcctaccagctatgtgtgagagttatccttgtttcacattcttgctaacatttggtggtgtcattcttaaattttttttcctttgatttaatcctgaaccagaagtaaatatttaaaattaaaattaatttcactttagtgaattggaacttctaagaaatatacgtaaatagagattgcataatcaaaggagaggtagtgttctaaatagatcataatgttttattccagcagttcatagaattaaactgaatttttgtgttccattcttagaagtttgtttcagccccttattttttcctatacatttttagcagcttgttttgtacttggaagttttatcttccaacagttcctttgttgtaattacctaggtagaataataggtatattagcaaaatgaatttggaatgacagcatggtctggtgtttacataatgttataagacacaaaatatatttttagcttttagagctaaagtccttttatgatcttccatgaagatgaaaatttatgttctataatcctacagttgcaaggttgtgtaaataatttgaaacctacttaagaagaaaatttcattttatatgatttggatacatgatgtcctgtattttctcactgagttattctcttcagatactgaattctgttagaaggtagttcagcacaccctcatttatggactgaaatgcctttaatgaatttaagatttccacatttaagattagtggctttagaacaattattcttatccagcttgcatactgccttaagattcatggccaaagaaagccactactactacctgatttaaagattttgtccttaggtgggttggggaggaaaaattgttgaaaaccaccctcctagagactgaaatttcttctttcatccaagtcaactacacttaa

SEQ ID NO: 75168 - DNA, 1034 bp, Homo sapiens
gtgatcctcccacctcggcctctgtagtagctgggactacaggtgtgcaccgccatgcctggttaattttttagtttttttgtagagatggagttttgcgatggtgcccaggctggccttgaacttcctgggctcaagtgatcctcctgtcttggcctcccaaaatgctaggattacaggcatgagtcaccacacttggccttgatttggttttagaatggattcttggatcatttttttttttccttagggattatacagtataagtcagagtcattttctgtggcaatcctgtcttgagtaattaagaattggccatatgttaaaaaggttggtagtccaaaaggtgaactaagaatagcaaaatatatatgtgtgtgtgtgtgtgtgtgtgtgtgtatacacacacactgttagccatagtttttcaagtgtcatacttattgctcccttattatctaaaaggtctgtgagttaataaggagaatagacaatatgtgatgtgagtattgaacagcactaaatcttaatgtttattgaaattactttgtttcattgcaggtcagacatatttccaacatttgggtcaaaaccttgtccaacaagactttcttctgcaaagaaaaaaatttctcatattgctgaacaaagccccagtgcaggtattctatgtctgtttataaaaataatttataaaatatgattttcaaatgatgtaaaaaatgatagcaagtgcatttcagatttcatgttgttgtgcatactggttaagactaatcatttttttactccttaaaaggtccttttgacaggaatatgatattgttttggaagaaaaaaatatttatttacctgaatcatcaatctcttttaaagctcaattggcatacctatggctggctcctacacctagattttttatgtagttggtgtggagtgttatttagctggtgttggctgtcagaattttgaaaactcctcagatgattctaatgtgcagcatagtttgggaaccactggacatcccgaaagac

SEQ ID NO: 75169 - DNA, 1050 bp, Homo sapiens
actaaaatggaatggaagatcatgtggattaataactcccagatgcccagttaggttgtagccctggagtaaagttggggcaacaggaatataattttcctgtggtagaacctgagaaagctttgctgttatcattaaccattcttggccaggcgtggtggctcacgcctgtaatcccagcactttgggaggctgaggtgggtggatcacctgaggtcaggagttcgagaccagcctgcccaacatggcgaaaccccatctctactaaaaatacaaaaacttagctgagcgtggtggcaggcacctgtaatcccagctgctcaggaggctgaggcaggagaactgcttgaacccgggaggcggaggttgcagtgagccgagatggcgccactgcactcctgggtgacaagtgaaactctgtctcaaacaaaaaaggaaaaaaagaaccattgttaagaatggtttttttaaacttagtagcaagtagtacctctgtgactactctgtccattgcttaagagatcctattacagctgcattttaaaaatttcccttacaataaaaaaaagtggttttgaagggtataaatatttaaataaatgttaggttggtgcaaaagtaattgtggcttttgccatttttaactgcatactccttttgcaccaacctaataattagaagatgcacctataatctaaaatatgtaagtaaataaaaagctgttattttcatgtgaatagcagctgtggtcattataaggtcaacttctgtactatgttatttctgatttttttttttcttttttgaaacagtctcgtctgttgctcaggctagagagcagtggtgcagtcttggctcactgcaacctccacctcatgggttcaagtgattctcgtgcctcagccaccctagtaactgggattacaggtgcatgccaccacgcctgggtaatttattttgtatttttcagtagagacagggtttcaccatgttggctagactagtctcgaactcctggcctcaagtgatctacctgccttggcatcccaa

SEQ ID NO: 75170 - DNA, 2001 bp, Homo sapiens
ctaccaaaaaaaaaaaaaatacaaaaaattgggcaggcctggtgctgtgcgtctgtagtcctagctacgcaggaggctgaggtgggaaaattgcttcagcttgggaggtggaggttgcaatgagccgagattgtgccattgcactccagcctgggtgacagagagagactatctcaaaacaaacaaacaaacaaacaaacaaaaaacagctcacagcaaccttttctttatgtgtgcttaccacttataatatgcagctctcacttattatcatgaactgcattctgccacctcttatattaatgccctattagggtatttgtttttatattttataattatttagcatgtttttcttactaactgtgttgtttgattcttgaaggcaagagccttgccttaaactttgttgtctagagtaccatcacataattagttaatgactatttggtggttggttgatttcaggcgtatttggaagtttaagttcagcaccagcaacctgcagccaatcagtgatatcttctgtggaaaatggggatacattttcaattaaacaaagtattgaaccaccatcagggatttatggaagatcagtccagcaaaatatttcatcatatcttgatgttgagaatgaaaaagatgtaaggttatttgctaattattagaataaatttaagcttacagtatgtcattgttttgtgtatatcagatgtggggtggtgaaagtatttcaattaaaatttaaaaaatcttagtacagttgaaattttgagccttggcaatgtggcaaagccctgtctctaggaaaaatacaaaaattagccaggaaaaatacaaaaattagcccgagaaagtagagagcctattttctctaggaaaaatacaaaaatgtagctacagccatgcgtgcctatgggcccagctacttgggaggctgaggtaggaggatcacttgagctcggacggtcggacttgagctgcagtaaaccgtgattacgccactgtactccagcctgggcaatacagtgaaactgtctcaagaaaaaaaaaaaaaagaaattttgattcttaatcatttaaatatagattattcgtccttcccacttaataaaggcattcttatcctggggataaagtatgtaatatactttgtattctccatgtactttatattttacatgtactatatatacatatatatgtatgggtatattctgttttctaggacacacttaagtagtgacagactaatatcctcagacacaaattagttatctgagatgaagatattttaaatatcaaagtccctgaatattttcagactttcaactttttcatgcaggctaaagtttctatttctaaatctacttataacaagatgagacaaaagagaaaagaagagaaagaactgtttcacaataaagattgtgaaaagaaggaaaaaaattcctgggaacgaatgagacatacaggaactgagaaaatggcatctgaaagtaagtggaatttaagttttggtattttttttttctagtaattgtctaaagctggtgaaatgaggtttcactgagggtaatatatgactaagaatgaaatatcttatataacaccgaaatttgcaagttctgcctttaattagctttgtgacctggaagcagccctcagttttctgcccctgtgaatatcttgattatctcaaaggtccagattatctcaaggatctcttctatactcctggaaatattcctgttttactgaggagtggtatcccattttatagtagataactgagatggtgattctggtttatattacatcatgatccaaaaaggccattgcatttgtcatttattcagtctatccttgagtacctactatgttttgtgcttggtcaagagtaggctctatgtttcctggtgttgttttttaaaatattgaatacatgttaggtatagtagcaactaggaaaaatcagaggttgaaatgaaaaatcatgtg

SEQ ID NO: 75171 - DNA, 1102 bp, Homo sapiens
aataaatgataatagtgcttttttttatttgctattctttcaggattgggatattccaaagctggaggattttatttatacatgttagtcttagatatgaagcctaatgagggtccatctgaaccatcaaaaaaaagtgaaaggggtctattatattctttaattggtatatcatcttcctcacataacaaaaactggtactgatttatcactatagtaatttaaggcatcatattttacctttttacattttttgttagatatatgatgaattttttgaaagcagagattctgtcttatacctctttatataagatcacaggtaatggtggccgtagatctaagtcctgcctctcccactcattagcaatggaaccttaagtaaatttcttagtctctgtaaaatgcaattattttctcagctgcaaaataaagatagttagaatacctacctcagctttgttgagataattaaatgcagtaaagtttgcaaagcatttatcccaaggtctggtgtatagtatttaataaatgctagctaatatcattaacaccttgttgcctttggattttaaatgaccaactctgaatatgtaattagtatgcaacatcaagtgaaatctcttatatttgtgatttcaggtaacattttctcacagataacatggttaataaacaatttttgatgatagtttctagtgactaatatttcctttctaaaaatatctcttaatatggaaaaatagccagtaaatctttacctacttataaaagcccattctatttgacccttttctttttaatatctccactgcacgtgtctcgcattatatagtgctctcaaggatattatcctgagcactcaaagaggatgatttgttttctcagcttatagtacagtgccttacatctggaaaatgcttggtcaatgtcttattatagaggaaacatcattcttattactacacatggtcttagaatttgtaataggccactaattctatatcgatagagaaaatcaactagaattctacatacagatgccatgaaccttcatcttcacttctcagttataaaacaggtatatatccacatttttaca

SEQ ID NO: 75172 - DNA, 1073 bp, Homo sapiens
aaactaatagtactaagtttccataataaatattcatcacaactgtagtcagaataatgtttgtaccctttgtatgaaggactcttggccaggcatggtggctcatgcctgtaatcccatcactttgggaggctgaggcggatggattgcttgaggtcagaagttcaagaccagcttgaccaacatgatgaaaccctgtctctactaaaaatacaaaaattagctgggcattgtggtgcgcacctgtagtcccagctacttgcgaggttgaggcaggagaattgcttgaagcagggaagtggaggttgcagtgagctaagatcgtactactgcaccctagcctgggcaacacagcgagactccatctcaaaaagataaaaattttttttaaaaaggttctctcatagtttatttaatgtattttgttttaggtgaaacacctactggagctatttcacagtataaagaaaggatgccttctgtcactcatagtccagaaataatggatctgtcagaactacgaccattctctaaaccagaaatagcactgacagaagccctgaggcttttggctgatgaggattggtaagttcaccatccttaacttaaaactaagcagagttcaaaagctttctgtaaatatttaattaaaaatcttgaaacacattttctattaaaataatcttagaaatgattatttagttcttaggcatcagagtcttttcagctcattaatgtagctgaactctggccctaatagtactttattaccagttgtattatagcttacatgccataaacatataatttagctttataatggattatgtaaaccctttgataatgagatacaaatttcaccatttctcaaagtatttctctgtgaaatataattattaatagtcctggaaatacttacctgctcctattgtagtgatagcagccaaccaaccagcccagccagtaactcaagggagacaaaagacagtggcaatgtgcatcccacgtgtttcagcgggagcatccacttactgcctttgtcccatttcctcccttgttccttcactatctct

SEQ ID NO: 75173 - DNA, 1166 bp, Homo sapiens
ctgctatccctaaaaaaggctgcttgcaaggttagctcttcgctgacatgggaaactaggatttcaagaggattcccactatgccctaactgataagatagtttactgcgcctaaattgtttgggcaaacaatatggtttatgctggaggcctggtttccttctgggagtctggaattttggtatgtcctaggcagacagtccctacattaccagctcccagtgaaaactctagacatgaggcctctaataagcttacttagtagacaacatttcacatatgttgtcataactcattgctgaaggaattgtgttctgtgcgactctactgggaaaggactcttaaaagcttagatctggtttcctctggtctttgacttgtgcacctgttccctcagctgattttgtttggtatccttctgctgtaataaattttagccatgagtaaaagtataggctaactcttacgagtcttcctagcaaatatccaaatccaggggagatcctggggacccccaggagagatactgtggctatgggttagccacagttttttgcattttatgcattttggaaaatgaatgcataatgagatttttaaattatgtttgtataatagtttttataggaaagtacaaatgaaattaccttcacctttctttcactttagagctgtaactgaagttcgtgaagtcaccagaaaatcagtccctcgtaattccttagaaagtgctgagtaccttaaactcataactggcttattaaatgcaaaagactttcgtgatcgtattaatgggattaagcagcttttatcagatacagaaaataatcaagaccttgttgttggaaacattgtgaaggtaaggacttgtcagaattaattttaatgtgggtatggtggctcacgcctgtaatccaagcactttgggaagccaaggtagaaggatctcttgaggctaggagttcaaagttcaagcccaacctgggcaacatagcaagaccctgtctctacaaaaaagaaaataaaaatttattttcatttgaaatctatgtcaaatgaagtttatcagtttaaaacattgccctaaatcttagtgttttatataccttctctctatatctatatacaaattacacaaatttaaaatggaatgtaactaataaatt

SEQ ID NO: 75174 - DNA, 1034 bp, Homo sapiens
ttatatcttgagtttatgaaagttaaggattctgaagagcaaggaattattgttaaaagttttcaggttaagagataataatacaaatttaactctgaaattgcatctaaaattttcataataaacctaaactgaaactaggttaaatctccacagtaaaacttacaagtctacttctagtgtgaaaagagataaaaacagaaacttttctaagttcttagagttagctaagctaacctccatcttccagaaaacaagatgtttatcatatttacagtcagtcagtcagtcatctgcctactgagccacatttttcagcctttattaggatgtcttttggggtgatttttgaggccttctctttttgttacaagaagatttgacacttagatttagtacccaaatttttataaagttcctgttatccaagttcaggcaaaataggatgttgtgtatatatttaaactgagtaaagtaggagaaatattatgacatgccaagatacttataaatacaatagctataaaaatcattttactttaaataatttaccaatttattttcagatttttgatgcttttaaatctcgacttcatgattctaatagtaaagtaaatctggtggctctggaaacaatgcacaaaatgattcctctacttagagaccacttatctcctataatcaacatgctaattccagcaatagtggataacaatctgaattccaagaatccaggcatctatgcggctgctacaaatgttgttcaggcactgagtcagcatgtaggtaagaaatcttacttcggcactcaaattattttcactttcttttcatgttttctgattccatccatactttttttgtaatgctgaaatcctagttattcagttttttaaacttaatattatcataaaactttctattctcaatggttttaaaattatttttagtgattaaattctgtcccattaaattgactttcttttcccttatctgtgacttttatttctttttctgcctcaacctcacatctg

SEQ ID NO: 75175 - DNA, 2779 bp, Homo sapiens
gcaatatcggctaattgcaacctccgcctcctgggttcaagtgattcctgcctcagcctcctgagtagctgggactacaggtgcctgctaccacgcctggctagtttttttatttttagtagagatggggcttcaccatgttggccaggctggtcttgaacttctgacctcaagtgatccacccacctcggcctctcaaagtgctagaatttcaggcgtgagccactgcacccagcccagtctctggaacttctaagcaaacataattagataggttagcaatgcaaaggagtatctagtagaaagaaggaaagcaaaatttattatttcattagtaaaacgtgaatacaaagggccataaaaggagaagaaaaaaagcccttaaaaatagggtacttggttacattagtagaaataatacgggaaaagtaaaaagacattaaaatcaaattttggttcttacagaaaactgctatttcaaagtcatgtttgataaaaggtccatgggttaaaactgtgtacatttttgtttcactacatttggaaaacatcgagatgaatttgggttcattttctctccttaccacttttgcatgaactaattgttctatatgggattctaataccatatttgaagatcccaatctttgagagaaaggtttcttacattgcttcttttaagaagcctaactttttaggacaaattacataaggaagaagcttagtatattttagttgctttttatttagcagagcttgggcttatttattaagaaaaaaccctgttttttatatttttatgtttcagatattgttacggaactttatcaaaggaagccgcatgccacagagcagaaagtgttggttgttttatggcatctcttaggaaatatgacaaatagtggctctctgcctggagctggaggaaatatacgaacagccacagctaaattatcaaaagcactctttgcacagatgggtcagaatctgttaaatcaggctgcatctcaaccaccacatatcaaaaagagtttggaggaattactcgatatgacaattttaaatgaattatgaatcttcgataaaatactgtatgatgaacaaaagtgtttacatgatgacaaatggaactttctaaaagttatgttatcagtgcctgcacttcacatccagcaaattaagtcaatggctatttttatttgcagcctatgagtacacatctgtcctatatcaaccttaccacttatattcatcacataaaaacctaaaatattcatgaataattcatgaaatctgagtcacatgggatgaattcaattttaatatttttgagaaaagtcctgctcatttgcactattctatagaaactacaatttgttgccctatatgtaaaattagaattgtaattaaaaatacacattttattatgtaatcatgttctggtatgtctcatttctcagccttattttataacgtggaagtcattgaactatgttatcagaaactaagtttgtatattatttgtgaaaaacatgtatttctgaatcagtccgctaatatgattgtgcagtattagcttgcttttgctgctgtgttaatgtcatatatttgcttaccttttgggttcaattatctacataattgtgaaatttaacaagttataataaagcatgacaaccaaagttttagaaaacattaaacattttaaatgcacgtttaaaaaacgtgttgaatgtaacccccctatttttgtgtgcaaacactaaattttattgctttatgttttgacctttataaaggtgttattctgctgcccagttttgtaattctcaaaaatagtgccaggtcttctatagcttttttcagaattcatgggcttacaagtactgtatgcatctttaaaaagaaaaggaatgttataaaataaaaggatttatttctttagatgtgtgagaggtgtcctgtttttccaacttccatacatgttaaaatggaaaaaaaaatatatatatatatacagtagtatcgacctatcactttcacttgatctacttattatgatactgacctatcactattgacctacaaatagacgtgggttatcattctaactttgtaggaaattagctgtctgacctcggacaagtcacttaccaggtctgggcctcagtttcctcatgtctaaaatgtaagagctagactagaagattttaaaggtcctatcctgttctaaaattctataattctatgttcattcttttgtacttctgagtcactgaccagttttctaatgtatttggctgtttttaaaattgtgatttaaaaaaatttatcctggccgggcgtggtggctcaagcctgtaatcccagcactttgggaggctgaggtgggcagatcacgaggtcaggagtttgagaccagcctggccaatatggtgaaaccctgtctctactaaaaacacaaaaatagccaggtgtggtggcgggcacctgtaatcccagctactcgggaggctgaggcaggagaattgcttgaacctgggaggcgaggtcgtattgagccagagatcgtaccattgcactccaacctgggcgacagagtgagactctgtctcaaaaaaaaaaaaagccaggcgtggtggctcgcgcctgtaatcccagcactttgggaggccaaggtgggtggatcatctgagttcgggagttcaagaccagcctgaccaacatggtgaaaccccatctctactaaaaatagaaaaattagccgggcatggtggcg

SEQ ID NO: 75176 - DNA, 2353 bp, Homo sapiens
aatcacatctttaagttaattaatacttgaagttaataaataatactgctcagtgtattagtaatgatgccataataccatgtgaatttatgctgattcaaatgttgtttttttcgtttgatactcatatggccttctgtttgaggacttcagattatttagcaactgatttaatctgttcagaaataaactttgctacagctggaaagcgtgaggcttgagaaagcaagttttggacagggacgtatgaagctcatgttgaaacttaagtgttttaggctgtatgggagcttgaatggagtgaaaagaacaagcgtctactgtcaggttttcctcctccctctagatttataacctcattctagagttgcaaaagttggaactttccactgttcactctctagtagggataaagtgatggaaaggagttctgttaaagaggactagtacttagattgtgaactttgaagtaggggttgagcatagatggctcataggtggtatgagacactatttgtgtaaagtctcagaatatttttccttgcttataattgaataagaaagaagatgtttaaaagtcaaatgataaaaattgtatgtgctgttttctgtggtatgttttaacaaatctacatggaagataggacttcaaaaaaaattaaaaatagccgaaggaggaagaaggtagtgtagttccagccaaatggtacgttttccaaaaagccgaagattgatgtagacgtttatgtaaatacatatacaaaatctagtttctggaacacagtgtttaatatgtagagactttaaaaagtcggcgtgtgactacttagcccttaaaaacagctgccaaaaccagtggttatgatagtctcttttcttcttacatcccaaatctccagattgccttgtggatgagatttgcttattgcaaagctacttgttttgctctacccaaaactcctttcagtctttagtgatgacttcagatttttatatattgctgtgtttatgaaaaagaatagtcaatggtataatttttaagtacctctacaggaataagaggcatacagaaaaaaaaaaaaaggtattaggtcaaaagatggcatttcactctcgttgcccaggctggagtgcaatggcgctattggctcaccgcaacctccgcctcccgggttcaagtcattcttctgcctcagcctccccagtagctgggattacagatgcgcgccaccacgcctaattttttgtatttttagtagaaacggggtttcaccatgttagccaggctggtctagaactcctgacttcaggtgatctgcctgcctcggcctcccaaagtgctgagatgacaggcatgagccaccgtgcccggcccaaatgtcccatttttaattaagtgttagtaattgaagtcatcctccaaaagaccttttaaattttaagatggcataattgtcactgaaatacttaatgtacgtcataattatactaaaagtgaaaggtatgataaatgtattttttatatattgcctattcactttatgttatgtttcattttatacttgtgtcctttgtgcctatcatatgattttataataaagtgtaatgtagtgaaaaggaatcgactggtttggtgagttgaaaaagggaggacttttattagtctgggggaacagcttttgtcaaggctcagaaaggaaaaatctaagggactctggaaatggcaatgaggaggagtattgtaagattaatacttttggaaagttaagttgagactggatatatcattcagagatatttgttgtgctgttacacggcaagtattatttcaggttcaagggggacagcggtgaacaaaactgataaggcctcattctcacccaatttaatttttttttccttttactcttgttgagctgtgatcaggaaatttaatattcgagtaatattagtttgcagtagtgcagcagtgtttctcagtttttttttttttttttttttttactgcagcccacaataagatgtacatggacatcactaactcaataaacagttcaattgtgtgtgcttcaacagtgtgcccttaatgtgtgcattcactgtggtatatctgtttttctacatttaaaaaatgagaaactggtttgaagcaatctgcatttgaaaacattgatccagaggggagaaaataaatacttaaattataacactagtagtgtgaatggaaagaaggggatagttaattttttaaggtgtattatttcgctctgtcgcccaggttgaagtgcactgacatggtcagcccactgcaacctccacctcctggggcttgggtgatcctcctgcctcagct

SEQ ID NO: 75177 - DNA, 2594 bp, Homo sapiens
gaacagttgttaaagatatgccgttttccagtgattgatagcaaggtaacattcaggcaccgaatcagattcttacctaaataagaaacattgaattttaaatagtatttcttcattgggtagcaggcagtgtacttatttgttgtttgaatgaggtaacaaatccacagttatttggttttcattcaaataccaacaacaaaatggcagttttgtgaagaatttataattttatttacaatataaaaactaatgaaccttctgattctgacttgtaggggattaagactcacattaatatttctttaatagctaaattagggctttttaaaaggtgttgttgaggccaaataattttattggcatttggaagatatttctctttttttcgtgtttccacagatcgttaactgaagacaatatgcaaaattctcacatggatgaatacagaaattctagtaatggcagcacaggcaacagttcagaggtagtggtagaacatcctactgatttcagtactgagattatgaacgttacagaaatggaacagtcacctgatgactctcccaatgtgaatgcatctacagaagaaactgaaatggcaagtgctgtggaccttccagtgacgctgacagaaacagaagcaaatttccctccagaatatgaaaaattttggaaaactgtagaaaataatcctcaggattttacaggctgggtatatttgcttcaatatgtagaacaggaggttagtaactattaaaatggtatcagaagggacaaattaatcaagtcattaatttataatgaaacagtagaccttattgtttatgattaaaattgactcataattttcaaatgaagttgaataacattaggtagctacatttttagctttgaaaatagcttacagcttttgtatgttgtagagagtcagtagtgtcaaagcttaatgttttgtaataattgaggtgtaaatgtgtgtgtaaaattgctgaaataaaaagttggcaaaattagttccttctgtttcaattgcgtttagaagaaaaagggggctgctgcctgtgtaggttttttttttttttttttttaagtgaaagcaagtttattaagaaagtaaaggaataaaagaagggctgctccatcggcagagcagcctgcatgtggagtttttaagcctgccatttattattatttttttagataataacgtttgaaaggaataataaatatttttttgacagaaatttccacaatatttaaatactgttttatttttatcagaatcacttgatggctgccaggaaggcatttgacagatttttcatacactatccgtattgctatggttactggaaaaagtatgcagaccttgaaaagcggcacgacaacattaaaccatcagatgaggtgcgtacatcactgaataaacttatctccaataggtactgtaagccaattaataacaaaacaaagatttttttttttttttttttttggctggcagtacctaccatttatggtcaaacaatttttatagggtatttatttgcatttgtcactcttgtggcatttgtagctaatattttctctctttgttggcaggtgcgttaaacctctacagtttgtcaagctttgcagtgcaagcctctgtattacactgcagcttaacaagtagggcagggcttttctctcacttacatttatttctcattttccaaacaatatagttggtttgctagtcacatttgctacgtcttattgcatttttggtcagacgctgtcattgatgctctaatgggtctgtgccctatggtctgtaacccaaagcctgcccacacaacccggtcagaatgcagggactgctgcgctttgaagatcaagactctgcacgtggggatcagaacattgccatgttctatccaacctccacccaaatggtaatggtagattatttaaacaaaattccagtaattagtatttctaaggttcaccggataacacagtgttgcctctctgttaagaaataattaaatatttgaagtacagtttgctgttttcttcttaggtttatcggcgggggcttcaggcaatacctcttagtgttgacctttggatacattatataaacttcttaaaagaaacattggaccctggtgatcctgagacaaacaatacaataagagggtatgtggaacattgatactgaaatgttttttatgatataaataattattctgatgttgataatagagctcatgaaagctaagctggaagtttaacttctattccattgttaaaaaaatgatacatgtaataaacttaagctttatgatttgaaaatgcagataataaagccctcctacagtccatgcctcttatgtccccaattccactcctcaaggttaatagcttggtgtgtgttctttcagatatatgtataagtacatgtttatgcgtatgctttcatactgctctttgactttttttttttaataatgtttgggaatctcttcctgccatattttttaacaattacaaaaagtattttataatactttataaaaagtatcttataagccaaagtactctat

SEQ ID NO: 75178 - DNA, 1117 bp, Homo sapiens
tacctgtaatcccagcactttgggaggctgaagtgggaggagcgcttgagcctgggaggttgaggctgcagtgagctgtgattgcaccactgcactctagcctgagtgacagagtgagaccttgtctcaaaaacaaaaaacattagctgggcatggtggcgcatgcctgtagttctagctactcgggaggctgaggcaagagaatcgcttgaacctgggaggtggaggttgcagtgagccaagatcgatcgtgccactgcactccagcctggatgacagagcaagaccctgtctcaaaaaaaaaaaaaaaagagagagagatcaaaaacctataaatatttttcatcatactgtcttttcattttataacctttttggtttttaattgctcctcccctgcccctcatttttcccgtttgtctaattttctttgaacatttaaggttttttcatactctccagcagctttgtagaaggctttaaatatagctttctatacaatcagatctgttaaaaaatgtgtaagtcccattttttcctctcctttgagctgtctcctggaaaccttcctactataatctggactggtcttctagttctgctgtacaagagttgtcttgggattttcttatcatcatggttctaggagatgtctttacctcacttctgggtgagtttattattagatctcactcttttcttgatttcatgtccaacttttagaagagtgtgtcctataacttcttgttaaaggatgcttggatgaaaaaataattttaaggtttggtaagctgtagaatttggagttgaaaattattttctccatagagctttgaaggcattatttattcctttatagcttctgctattgcttttgagaagtccaataccattcttgcagaatagattctctttctataatgtgtttttcctctgtggaagctgttaggatgttctctttgggtctgatgtaaatgaagttttataaaaatgagctttgatgtggattttctttttcttattgtgattattgggtgattgggtgagtcttttcattctgagattctaatgtccttctattcttagaaatgttattattatggatattcttattttg

SEQ ID NO: 75179 - DNA, 1039 bp, Homo sapiens
tctgttcccaggacggtttcctctcaaatttttctgtttacccattttcatctctgagatatgtgatctctggatttttgttcctattacagattagatattaacaagctatatgagccaggcacagtggatcacttgaggtcaggagttcgagaccagtctggccaacatggtgaaaccctgtctctacttaaaatacaaaaaaattagctgggcatgctggcaggagtctgtaatcccagcttctcaggaggctgaggtaggagaattgcttgaacctggaaggcagaagttgcagttagctgagatcgtgacattgcactccagcctgggtgacagagcgagaccctgtctcaaaaacaaacaaacaaacaaacaaacaaacaaaacaaaacacaagcatatggaagcactgtgtgttttgtatggggcattgtcagttggcctatggtgtttcacagtagtgtaatcatgtggccactctttttgctggtggattcccagtgatagtaaccttatatcttattcctgagccaagcagtttgtttagaaaaggataattttatttacttggggaatggacacctagcttctgaaatccccatagctgggcgggaaagttgaagatttctcacgattcattaagtataccttcttctaaacgttctgtcttcatttcattaccttcttgtcttcttccccttttctccatacttttttcagtgtctggttaattttctgaatcatttggggttctgtagggacagtaacatctattttattcttttgaaaaccttacaccaaatatgcacatgcatgcatgcacagacacacatgctcttcaatcttttatttctatattaaacatatttcctccaatgttggtatgtttttaactttgtttatggtgtcttttatcatatggagttttatttttccttaatgtgcttctgttttaattcttactggttcctgagttttgtgcctattttaccaaaaatatataaatcctgtattttgttctaacttttctatagtt

SEQ ID NO: 75180 - DNA, 1986 bp, Homo sapiens
atcttggctcattgcaacctccgcctgccgggttcaagcaattctcctgcctcagcctcccaagtagctgggactacaggcatgtgccaccatgcctggctaattttttgtatttttgtagagatggggtttcaccatgttggccatgttgatcttgaactcctgacctaaggtgatcctcccgcctcagcctccctaagtgctgcgattacaggcatgagcctgtaatcacgcctgtaaccatttcaccatgcctcatgaaaatattcttaaattgagataaaatttgcctctctttaacttcctacttgttttaattttgtcttctgtcataaatcaatctatacaatagacatttcagatttaacaaatacttacatgtctactcttacctatttgcaatgtgtacattttgtatttaattttctatttgataaagttacataaaaagtacatttatctattctctttgttttctcactctttttaagcagctgttgtatgctttctgttattctgtctaccctttaatccctacttgcataggaagcagttgaatataatttttgaagttagcattatcttctaaatttagaaataatattttaaaagtgattttatcttggaaagataacttaagagtaatttaatttttcagaacttttgagcatgctgttctagctgcaggaacagatttccgttctgacagactgtgggaaatgtatataaactgggaaaatgagcagggaaacctgagagaagttacagctatatatgatcgtattcttggtattccaacacagctgtatagtcatcattttcagaggtaggtgggaaattctgatcattgaaacatctttgattactcagatagttggtaatattaagtattataattatcttggaatgttatgtaagcttttattatgtggaaagaggaataaattttgttgctaatcacaacctacatgcttgcttttgacattttttcatatgccttatgaaatgtttagaaattttactgtttttagatagaagtttctccttattcattttaatggataaagagaaacaggaattctgtcttgtctaaggtagttcagagtaatgaaggaatgagaaaatagtacctaagttgagttatttatttatggcattaaattgacacagtgcctggcacatgatagatgcttattttttttgaaacttaatgatttgctaaatatacattattgtgattgctataacaccttatatccaaaacagtgaaggatgcattttatatagtaagtagtatctattttcaaacactcaggtatcattccattttaattttctaaaatgatttttctgttacaattggtatccttttattttaatgattactgttaaaacaactaattctgtgtcattatttttgtgttctgttttctgctttattcagagtatcccataaataaggatccagaaagtctttctgaacgagtatgaggactgtgtctttgcttttaaattggcatgttttctattttttgttataatttttatgagtagtattgtataaacttagtattttctattttttgttataatttttatgagtagtattgtataaacttaggtactttttaagtgagtgattttctaaattttttttttagtaccaaaagtagaagacttttatgaagcatttgtaaagtactaaggatcaatgtgctaaaggtagaagttatacagactcaggttagaaataggaagcatatagataggaatattctctctgctcttgatgaaatagaggaagcaggcaggtttctaaggtataacgacctaggaagacacttgctgaaagatgttaacacaagtaagaattggcatatggaaatgcttggtaaatagttaccaaacacataagtacaaaagtacttaaattacctgatgggccaaagagggtgtcttttcatagactagttcttctgtgattta

SEQ ID NO: 75181 - DNA, 2577 bp, Homo sapiens
ttaaatctgttttttcatactacatatttgagagttacttccttatttttaattttttaacataaggcaatctttgttaatttttttccacctggtgctgaaatgggccgttagcctctgtatccattgactttgcaaaatttaaattagattccaatgttatttatatactttttttttttttttttttgaggtgaaatctcgctctgttgcccaggctggattgcagtggtgcagtcttggctcactgcagcctccacctcccaggttcaagtgattctcctgcctcagcctcccgagtagctgggattacaggtgcccgccccgacacggagctaatttttgtatttttggtacagatgggtttcagcgtgtttgccaggctggtctcaaactcctgacctcaggtgatccgcccacctcagcctcccaaagtgctgggattacaggcgtcagcaggcgcctgacctgtttgcttactttttagtaacatttctgatagtagtatagaggtgggaatgggagttgtgagactagaggctgcaaggtcattttatgtttatccagcttaaaagtcccgaggtgatgaacatgtatttaaaaggtacagtcagtaggacctggtatctaatgtaaatgaaaagctaggtggaagagattgagagatgtagtggttgacagtaccattaatcaatattagaaatgctgagggtggcggggcacggtggctcacacctgtaatcccagcactttgggaggctgaggcgggtggatcacctgaggtcaggagttcgagaccaggctgccaacaaggtgaaaccccgtctctactaaaattagaaaaattagctgggcgtggtggtgcgcacctgtaatcccagctacttgggaggctgaggcaggagaattgcttgaacccgggaggtggagcttgcagtgagccaagatagaacgattgcactctagcctgggcaacagagcaggactccatctcacacaagaaaataaagaaagaaatactgagggtattcattttcagatgaagatgccatacttattttaaaatatttcatatttgaggttccaaaggtatattcaaattgtgatagtgtagatattttagctcctcaacctggtatttttgattacaatttgtatgtatacaaattattgcatgtttttataaaatagtgaaatgatatttttttcaaaaatctttttatagattagcttaaaactaatccacatttctttgtgcagagtattggcagttgtatatgctaatgtgattaggagaaaggtttggacttgtgttgtagttttgagagtcatcatggtatacttatttcaagctgtatgaatgagattggccagaagtatgtattaataaaaatagatgagaaccaaatggagagtggaatacttgggtatagtagcatttagggcaggtaagaaggggaataagacatagagcagcagtcagaggcttggaggaccatactacaaaacaagtgtccatttaattttatatatgaggtaattgataatcttaattgggcagtttcattggatttttgcgtactcacatgtggatgaggagtatttgggaggtgggaaggaaatgctatatttgttggttatttacaagtgatcatttagaatttaaatatggattacagtatttaattttactgtaacttttatgtctttgtagtaaaatagattctatgacacacgaataggtattatcatcttattttacaattgaggaaactaagatttagagaaaagaaaaccttccctagtcagataaccagtaacagacagaactgaggtttgaatttatgcccgtccatgccttctccattccactgtaaaggtaggaagaaattgaagatgtctatagactgttttatcatatggtagtgttttatcatatatggtaggattttactatagaaaagaaggagaaaaggtatgatattttggtttcttttttaaatcaaatcctttgaaagagtagtatatagtaggaatctcaatatgagatctaaaattatgattcaaatacatatatttttattgtcttcctttagatttaaagaacatgtacagaataatttgcctagagatcttttaactggtgaacagtttattcagttgcgaagggaattagcttctgtaaatggtcatagtggtgatgatggtcctcctggtgatgatctaccatcgggaattgaagacataaccgatcctgcaaaggtaaccagtcttattctaaagttcgtcagtggccaggtatggtggcttatgcctgtaatcgcagcactttgggaggccaaggtaggcgggtcacctgaggtccggagtttgagacccatgtaggcaacatggtgaaaccctgtctatactaaacatacaaaaattagccaggtgtggtggcacatgactgtagtcccatctacttgggaggctgaggtgggaagattgcttgaacctggaaggcggaggttgcagtgagctaagatggcaccactgcactccagcctgggccaaagagcaagactccatctcggg

SEQ ID NO: 75182 - DNA, 2391 bp, Homo sapiens
tatatacattgtagtcatcacagcaatcaagatacagaactcttttagcactccaaaggtccccttggcccctttccagccagagttcccctctccactcctagcactaggcagccattgatctgctttctgtcactatggttgttcaattttaaaatattcaacaaagtataaaatgttctgtacattaaaaagcatgtaattggcaaaatggcagaatagagagaaaatgtattatttcatttgtttgtaaagcttaaggaatttaagggttaattttaaaagttttttaaattatgaaatatgattaaaaattttaatcatcaattatatttaaaattatttgtattaacactgtacatgtgcatattttggtgatattggtttactttcattggcatgttacaatttcatttcagattaaaagaccttactttcatgtgaaacctttggaaaaggcacaactaaaaaactggaaagaatacttagaatttgaaattgaaaatgggactcatgaacgagttgtggttctctttgaaagatgtgtcatatcatgtgccctctatgaggagttttggattaaggtaagaaaatcatgtgctcttaaacttgaatatattataaacattgatctagtgactaaccttttttgtacttctgttgaatgttgttcatataactatatctgttgcattaggagatggtctgcttgcaaccagatttgactgctgcatatgccaacctcgttgcctctcttcgtccttccttacagaaactagtctagtggttcaataaaggtgctgaatgggtttaaaaatagaattttatcgttctgtcacaaatttaatggcttgttcaactgtaaattattcagtatttcctcttttctgtatgtagtatgccaagtacatggaaaaccatagcattgaaggagtgaggcatgtcttcagcagagcttgtactatacatctcccaaagaaacccatggtgcatatgctttgggcagcttttgaggaacagcagggtaagagtggagaaattcagttgacatttttgagattttaagttatttcaggaaacagtgacaaattgagtggtaagggatggtgtaaagcagagtttggcaaactttttctctaaagggccagatagtaaaagccacgtgttctgactttcaggctttgtaagccattgtagccccgaaacagccataggcagtgtgtaaatatgcatggctgtttcccattattagttgctggatttagcccatgggtgattgttgccagtatctggttataaacgttattttggttgtttaaaccaaagcataaacatttaattactgtttctaggtaatattaatgaagccaggaatatcttgaaaacatttgaagaatgtgttctaggattggcaatggttcgtttacgaagagtaagtttagaacgacggcatggaaatctggaagaagctgaacatttgcttcaggatgccattaagaatgccaaatcaaataatgaatcttcattttatgctgtcaaactagcccggcatcttttcaaaatacagaaaaaccttccaaaatcaagaaaggtgcttttggaagcaatcgaaagagacaaagtatgcatttgtatttttaagagtatcttctattaaaaaaaccagtggtcagtgtattttcactgtggcaactgtgatgaaagatttggtctgtatgtaatagattttattactaaatgaggacaacagtccctctaaactgatgttgccatttaaaaatttttttcaaattgttttgaattaaaagttttagacattaagattattgggttaaaattgttgtagacattgtgatactttatattttccctttagaaattatcaacaaatttactgattactaagtagaacagaggacttgggagaatacttcataaacaaaagcataggcgttgcctatgttgtaagcacatttagaagtgagatgattttgcttctccatagagtactttttatattttttatatatcaattgaaaaaggcagtgtataggtaataggtaatttctcaagttttaggattttagttattgccaggtctgtttaagatacagatttatagcagtttgcttctagctgcagtttaagatgtttatctttttttttttgagtctgtcgcctaagctggagtgcagtggtgccatcttggctcacttcaacctctgcctcctgggttcaagtgattctccagcctcagcctcccgagtagctgggattacaggcatgcatcaccgcgtccggctgatttttgtatttttagtagacacagtttactatgttggtcaggctgatcttgaattcctgacctcagatgatttgcctgcctcggcc

SEQ ID NO: 75183 - DNA, 1050 bp, Homo sapiens
ttgtatttttagtagagatggggttttaccatgttggccaggctggtctcaaactccagacctcaagtgatcctcctgccttggcctcccaaagtggtgggattataggcatgagccaccacgcccggttaagatgtttatctatagttgtagtaaagatttaaattatttgaagcatagagatttttttttatgttttgttttctaattgtcatggtaggtcatgtcatactaaatacaagataggctatagagttttaatttactgtcattgaacaatttgcattgtttaggaggtactaggatgatcaactgattgaaaaattcatcagtgtgttaatgaattttttcacccctttagatatatgctgaaaacatttagcatgagttgtattttaatacaattttcaatattttttcaaattgagacataaaaactaaggcattttaaatatctgtgctctaataaaaatattttagaaatattcattgatgctgctttttacacaggagaacacaaagttatacctcaatttacttgaaatggaatatagtggtgacctcaaacaaaatgaagaaaatatcctaaattgttttgacaaagctgtacatggttcattacctattaaaatgagaattacattttctcagagaaaagtggaatttcttgaagattttggttccgatgttaataagtaagatattagttatattacctatttgaatgataaatgagcattgatatttttgtatggggatttgatgattagtatagattaatacattgttaaattttaaaatgttcgcttagtttactttttcctcagatatatatgggggtaaattcaattttgtaaatgtatatgtacttaacaggaaggcataaggtttgtctttccttcaaaactgttttcccaattttagaatgacaatttaaaccatgactgaatgagagaaggcaggaaggagcaatcctgtgaaaagggaaatgggataaggattgaaccctgaaacccaaatatttaatatataggtcaataaagatggatg

SEQ ID NO: 75184 - DNA, 2554 bp, Homo sapiens
attactggattctgataaactgagcagaggacacagtggcggaagcaagttgaatctcatctaaaagtaacatctgcttgattggaggtttttgtgaagtagtggaagcgtgatcttgactgtgttgtgcattgaaagctagactgaattgatagcacatgcagtaggtagctgacagtagtaagctattggaattttgaccagtgatgttaaatgacattattttaatttggtaaaaacaggcagacaaatcggagattcaacacaagtgtcatttagtccattataagtatagggaatggagtgtctgagtatcaggactatgattttagtagtagaaattttaaaaataaaggagccgcttagaaattttcttaggcagtttcctaagtaaaaacaactttaaatatttaataaagtttgttttttgtatattccagaggatatttttttctttcctttcaggcttctgaatgcttatgatgaacatcaaacactcctgaaagaacaggattctttaaaaaggaaagcagaaaatgggtatgtcactttttgctaagtcaagaaggcgtgcttcattatggaaatgccttcaaagacaaatgtttttaagtgttacttttatgttgtaatttacatactttattttcatgatttgaaaaagtcttgagtgattcagaacttcagtaaaacaaatatacagataacattcatctattcgttaaagttcttacctgtgggagttttgaaagtttccattctgacgttttatatagatcagaagaaccagaggaaaagaaagcacatacagaagatacaacttcatcatctacacagatgattgatggtgatttacaggcaaaccaagctgtatataattatagtgcgtggtatcaagtgagtctgcataattataattctttgttcatagatgttattagcataaattaggatagtttctttttttttaaaaaaagtttttgttccaattgtgtaatacattctttggtggttaagtactagaattttagcagtgaacacttgcttgttttcttaaacatagctgctttaattatacttttacatatggaactctgccacagttctaatatgctaacatacttactttttcctttcagtacaattatcagaatccttggaattatggacaatattatcctccccctccaacctgatgggaaaaatgtaaatttcaaatgcagtgtgtgaaaagtatgaaattattattttttttaatgagggatgtaaacagtataagcttgttgtatttgataacctgtcttccttgtttctgtgtaacatgatttgtttagtaatagggggaaaatgtcaattagtagcttaccacagatactgtttcctaccatttataaaatttactttttattgaaaaactattttttgatttttgcattaagtggtctagaattcttttgcaatgcatttgcaacagaattttgtagccttaaggggtaggaagaaaaacctgactgcaaatcatgtcagtgtagtacaaaattctgaaaacacataagggctggttatttacctccttttttttttttttttttaaagaaaaaaggacttttaacctttgctgacaaggttttgtctgtttcagttatacttgtgaattgtgatctaactgcagaaaggatacattattaaaatactttgccttggaatagattataaatgagaaaatggaatgtttgcatccctttaaaaatgaaaatcatatcaaaagtatgttgtttcaggagactttgtatttagaatattcatgtaaaacttgtgaacaagctttcattttgatcaaactgatcttcatttttgtaataaaacggaagactcatccagtaattgtttatgaatttattttggggggatcaattagtaatattaaccttatgttcacctttattagtggctcattggttttgaagtacaccttttctaaattcaggtcttgatcttcctgccaagatttttctgcttttagcattttgtttcccctcaagccttatgcttttgccttctcattatacaggcaatctgtccagataattttactgggagttactccctggtttgatgaggtccttagttccaattccctaatcagaacaataatatattaacaccaaacaaatcacagtcagatcaagacagtggatcaatttttattgagccacttaagtttacaacatgaggtaaaaggaaaaagttctccttgaccagtattttacacagctgtaggaaagtattttagaccagggattcataagggatttatctctcaaaagctgggaccaagtaaacaaattttattaactccttgaattttccagttgactcttcctttacaatagtaacaagttctaactagttgtgtaaatttcttcaaggccaagttttatcattgttgctaatatccttagagctgaagcactgctatttcaatcaatatccactaattccacttcaaaagtgagttttgcatttggtggaattctgttgaagaagtcaaggt

SEQ ID NO: 75185 - DNA, 1012 bp, Homo sapiens
cacaattcacaagtataactgaaacagacaaaaccttgtcagcaaaggttaaaagtccttttttctttaaaaaaaaaaaaaaaaaaggaggtaaataaccagcccttatgtgttttcagaattttgtactacactgacatgatttgcagtcaggtttttcttcctaccccttaaggctacaaaattctgttgcaaatgcattgcaaaagaattctagaccacttaatgcaaaaatcaaaaaatagtttttcaataaaaagtaaattttataaatggtaggaaacagtatctgtggtaagctactaattgacattttccccctattactaaacaaatcatgttacacagaaacaaggaagacaggttatcaaatacaacaagcttatactgtttacatccctcattaaaaaaaataataatttcatacttttcacacactgcatttgaaatttacatttttcccatcaggttggagggggaggataatattgtccataattccaaggattctgataattgtactgaaaggaaaaagtaagtatgttagcatattagaactgtggcagagttccatatgtaaaagtataattaaagcagctatgtttaagaaaacaagcaagtgttcactgctaaaattctagtacttaaccaccaaagaatgtattacacaattggaacaaaaactttttttaaaaaaaaagaaactatcctaatttatgctaataacatctatgaacaaagaattataattatgcagactcacttgataccacgcactataattatatacagcttggtttgcctgtaaatcaccatcaatcatctgtgtagatgatgaagttgtatcttctgtatgtgctttcttttcctctggttcttctgatctatataaaacgtcagaatggaaactttcaaaactcccacaggtaagaactttaacgaatagatgaatgttatctgtatatttgttttactgaagttctgaatcactcaagactttttcaaatcatga

SEQ ID NO: 75186 - DNA, 1324 bp, Homo sapiens
ccctggtagctggaactacaggtgcgcaccactacgcctggctaatttttgtatttttagtagagacagggtttcactgtgttggccaggctggtcacaaactcctgacctcaggtgatccacctgcctcagcctcctaaagtggtgggattacaggtgtgagctaccgtacctggccttgaacttagcatcttaaaatgcacagtaaatattatgtactacctcataaaaactttaatactctctctctatatgtatatatattttttttgttccacccccccccagctagaatgacattacttttgttttggagtacttaatagtcttcattaagtggtggctaatttaggagtacttgtaaagcatccaggtaaggaggatcctagtccaagctcaatttatctagtgagcctatctagtcagcctatcctacactaaggttatgggggtaggggagaggcactttttatcaaatgtaccttgacttcttcaacagaattccaccaaatgcaaaactcacttttgaagtggaattagtggatattgattgaaatagcagtgcttcagctctaaggatattagcaacaatgataaaacttggccttgaagaaatttacacaactagttagaacttgttactattgtaaaggaagagtcaactggaaaattcaaggagttaataaaatttgtttacttggtcccagcttttgagagataaatcccttatgaatccctggtctaaaatactttcctacagctgtgtaaaatactggtcaaggagaactttttccttttacctcatgttgtaaacttaagtggctcaataaaaattgatccactgtcttgatctgactgtgatttgtttggtgttaatatattattgttctgattagggaattggaactaaggacctcatcaaaccagggagtaactcccagtaaaattatctggacagattgcctgtataatgagaaggcaaaagcataaggcttgaggggaaacaaaatgctaaaagcagaaaaatcttggcaggaagatcaagacctgaatttagaaaaggtgtacttcaaaaccaatgagccactaataaaggtgaacataaggttaatattactaattgatccccccaaaataaattcataaacaattactggatgagtcttccgttttattacaaaaatgaagatcagtttgatcaaaatgaaagcttgttcacaagttttacatgaatattctaaatacaaagtctcctgaaacaacatacttttgatatgattttcatttttaaagggatgcaaacattccattttctcatttataa

SEQ ID NO: 75187 - DNA, 1095 bp, Homo sapiens
ggagtctcactctgttgcccagactggagtgcagtggctcaatcctggctcactgcaacctccaccttctgggttcaagtgattcccctgcctcagcctcccgagtagctgggattacaggcacccaccaccgcacccagctaatttttttatttttagtagaagatggggtttcactatgttagctaggctggtctcaaactcctgaccttaagtgatctgcccacctcggcctcccaaagtgctgggattataggtatgagccccaaaaggttcttttcacattaaaaaagccctgcttaaaatacccttttttttctattgaagaaatggaagacaaagatttagggactcactgaagtacattatcttagaatatagtgaaatctatagtaatagattctgtgtttgttttaacatacaatcttgtcttgactgtcctggtattgcatgtgctttttgcaaaataccattagtttttattttgttcttgcctttagtgggatgaagctctcttgactatgagtaaaggagaaaaggctcgactggagattgaaccagaatgggcttacggaaagaaaggacagcctgatgccaagtatccttttttccccttcataattaaagttgaaaaaaaaaaaacgtctagatcacctttgaggatgtgaaagatgctgtctaggcaaacttctggatcaagaatcctgtccagactagtcttcctgatctttagatgcttatgtgtcagcacctccaataggcaatagtattttctattgatataaagttcaaacctcagctagaatttttgtttctcttattcaaattcttaactttcaagaccttaactgtgaagtttaagcttaaacagcaattcttaatgtttttaagagtttaagaaaagttaccatgcccagtacaaactgtagcaaactacgatgcaaatatggctcatggtaattttatggtacagtataatttcaggcaattaaattcaaagcttagaaatggaatagatgtgggagattaccagttgtgaactgaaggagaccacagaatcaacagtgttagtgtaagcatttattattactacta

SEQ ID NO: 75188 - DNA, 2040 bp, Homo sapiens
ccaagcacacctttgttatttattttatgaaatttagaaaccaaatatagatttggataatgcagatccctctgaatttggtctgaattcagaaaccaaatagatttaggtaaggatacttttaaattcggtacacttcttcttttttttaattaactccctaagattcttgacagttcctctgtctgctttcctctcatatatgaattgctattgattagattaatatgtaaccttttttgtagaagaccctgataatcctactttgttctaggaaatatgcctgttatagcaatttctttaggtaatttcatccattgtgtgaatttattttccaaatcggggacagaggcaatatcactgtattcattctaattggttattataaaaacacctagtaatatcaattattgctgctaaaacagttcaaatctttgtgggggggaagtcaccatcccttattttaatgccttatgatttcataggaattaaatagtaatgattttttttaactttaggaaataactgaaatcatgttatggtttggtgaattattaacagaatcttattagaagaatttaggcttccaaagaagctggaagttatttgaaattaaattatagatgtgtaagttactaatagtcacatcacagccttgaaattagatactgagggttttgtttgtttatttattaccaaatccatcaaactctttaaactgactttggtcattgttggctattgtttgtcattcttttaaaggacacaaattaataactctgtgtgtgtgtgttgttttttgtttttagggtccaccaaaatatactaaatctgttctgaaaaagggagataaaaccaactttcccaaaaagggagatgttgttcactgctggtatacaggaacactacaagatgggactgtttttgatactaatattcaaacaagtaagtctaaatggaatcttatgtttttggcttaaagagattctaaatacttgggtggcagacagatgagtagttagcagtacctttttcctgactgtcacctactttcatccagacatactttcccccaagatctacttggaagaggtcttcagttcactgattattggctggctaaagacctcttgttctttggaaagcaaaagataaggaatctcagtctaaacctggttaatgtcccaaagtaaggcattagtatttgaatagaaaaggcaggatagtatgctgttttgtgatataagtataggtcctacccctctaccctttgttaagaatgtaattatttttacagccagaattttattgatggatgatctttgtaaattttttccttcttttaaaatacatagtattgtaattctgaaatcaaaccactatatttttccactggaatttaataatttccaatggaaatttcttaataataaattagagtatatcattaatgataaggaaaatctgttttacaggtgcaaagaagaagaaaaatgccaagcctttaagttttaaggtcggagtaggcaaagttatcagaggagtaagtaaagaatgccaatgaatcagtagatattctggcatatgctgcttctggtatggtgctgtaaagaattaggtttggggatataatacaaaggaaacagactttggagtctgacagattgggtataatcattgttagctgatcttgcacaagttatctcggtctcagtttcgctacatataaaatgaggacagtactgcctacctcaaggtttttagaagattaaatgagcataacttgaagtacctaatacagtaggggcttaaatattagtcccttccatgtgtacccattttattatttttcttcataaagtaagtctttgtcagaatgtttggccctctaaatttaaggttcctgtaaaatgtcttataactgttgtaccatttacatataatttgcaaaggtaaaatatctgtcccactgaagtattcacagaagcagagtttgtttctgcagccttttcacctcatacaacataggctgcaatacca

SEQ ID NO: 75189 - DNA, 2336 bp, Homo sapiens
cttagtcccctgtctagtgtcagacagctaggatttttttttttttttttttttttttgagacagagtcttgctctgtcacctaggctggaatgcagtggtgcgatctcggctcactgcaacctccacctcccaggttcacgccattctcctgcttcagcctcccgagctgggactacaggcatgcgccaccatggccagctaaattttgtatttttagtagagatggggttttgtcacgttggccaggctggtctcaaactcctgacctcaggtgatccgcctgcctcagcctcccaaaatgctgagattacaggcatgagccaccgcgcccggcccacacagctaggattttaacctagataatatgactccacagcccatatacttagcaattatatatataatgttaagcatagcaatctcaacatatgtatgttacatgcttgtgtaacagtgactcttcctagtcggctaagaatgggttacaaatgcctcaggatagctatgtccaacctggctggaggctctcaagggctgcacccaagtatcctcctgcagtgagcagctgactcaagtcaccacagtgtgcttgctgtataaatgttattttttgtgagtgttgacaggaaaaagtttaggatgaaacactgtgttcagtacataacactacagttgcagtcttgtcactaattcttgtaaataccgaatttttaaaaaatctcttactttttttgtaacaaagagtataaactataggctttatttcttcttcagtactagtactactgaaaacacaactgctaacataaaaggatcgttttctaattttagacacttcttactcgggagaagttatcttgattacccagcttttttccttatagtttcttgcagaacataaattattaggaaacattaaaaatgtggccaagacagctaacaaggaccacttggttacagcctataaccatctttttgaaactaaggtgagtattgttagattctgttagcagaacatcacttttgaaattttatttccaaaaaagatgtttaaaatgcattgatttgttgaatgtgttggagcttttccacctgtaatttttctgaactgttatcataagtggactagctgtcaaatctagcaaggctaatctgcagtatggcagaatgtttcagtattttcaaagggtctggattttgtagcttaaattgagacaacaaattcttaagtccactgaagttataaattcattaggtcagtggtattaccgtattactttagcatatggtgtatattaaatgtattttgttgttgttttattatatatgttaaatgttatattgaaaataagtttccatttcactaatgaatttaaagtctggtttagatttaggctgagctttacaaaaatacattttaagacattctcccacatttgtttactatgaaatgaatatcttccacaggaaagaaatctttatttaggagttatttgaatagtgcttatatctctgggtatgagttggcctttctaaggtcatggttctcatttcagaatttatattgtaagctggtttgagggtaatcatttattgtttaaaaataaattatgagcaaaattctttctttgctcttcgtttccttagaccatttattcacaattgtgttatacaacctatatttattatgcagatgttcatttaattgagaggctgaaaatcttgatgttgcttcttggttttagcctgtcctgggtatgatgttacaacattttccttacagcgttttaagggtactgaaagtataagtaaagtgtctgagcaagtaaaaaatgtgaagcttaatgaagataaacccaaagaaaccaagtctgaagagaccctggatgaggtctgtatataattatttttttattttatcatgtggagtctagaaattgtatttatttctttattatttgcactaacttctcatagtgaagggtggttgaatacgaccactttcaatgagccaaacacttaatgtagtgggccatttcccttaggtgtactgggacagaaataatcctaagaactagtgctttacagttattagcctattctgtgaaacacttctgatattgtatttaatatcgcctccacatctgtccagaccttctgagctttcaaagctattttaaggccttgattctatagccaagttggactaagtgaaatacattttcttttgattatttttagctttttctaatgtacatggtgtccctggcaatagaaataatccaggcttggctgcaggatgtgggttcatctgtctcagttttcccaactcag

SEQ ID NO: 75190 - DNA, 3180 bp, Homo sapiens
tttaagtttcggttgtgtgatctttaaaagggaaatggtgggatatgggttttcggatcgacaaggactgaagcacttcaggtgtgactttttaggctagaactagataaaacgagataaggagcctgaatgctgttttcttttaacaggttatagactggactttaaaggcatagctgccttaaatgtgggtaatggttgataaatgtcgctaccatcagaggtcgcttcacaaggtgtctaattcagaatcgaagatctctagcggtcttctactcagtcgactgcagagacgaccgcggtaggtttttcaacccggactcaacaaagaagccctcatagcacagccttgacgtcactcaaagacaggccccaatcccgactgctagagcagaggcccgcccctcgacctccgtgagtggccccgccccgccctagggggcggggcgatgccgaactgcggcgggctggctcagtaaagcggaggcagcgggggaagatggcggcggccgttccacagcgggcgtggaccgtggagcagctgcgcagtgagcagctgcccaagaaggacattatcaagtttctgcaggaacacggttcagattcggtaccagaggcgtaggggcggccgggctggtgcggctgagggacgcctcacccccctggagatgcccatacattccgtattcctctgtgcccccgccctcgtcttcccgcggccggtggcctggaaggccggagaggcccagcttgtgctttggtgcctcgctcccgcctctcgggcgttctctactggggcaggggagcagctttatttcttggggcacacaggctgcaattgtagagttagaacctcattgggatccttgagtgggggtggaggccagaaaaataggaacccgaggatattgggggctagggcggagaggccgaggaatagtggtgtggatgagactcctgggagcggggcgccggctactagggaaatgggaagggatgtgaagatttctgtgggaacggtgtatccaacttgcttttctcaacagtttactaaatactgaacattaatgcgtgtgatttttaaaaaatccgtaggttgtggtttaagttttgatttaacatatcgaccctttaaatgaccttttcacctttatactttaagggagctacatgcacatttctcttgtgcagtggtctgtcattgttataaacagactaagaaatttatttgaaatgctttatactgtaggctctccatttgtcagcatagtctccatcttaaccatccgtctatagtcaagttatttttgttacacttgtttttcctttggaaaataagttcattcatgcacctgttaaattgctgaaatagttgtgcacgcagcattctcttacaagcggcagcctgcttgtgttttctatacaatttttaaaattctaaacttttcatttagaaaaactgtttctgggtttttttgtttgtttgtttgagacggagtctctctctgttgcccaggctggagtgcagtggcgcgatctcggctcactgcaacctccgcctcccgggttcaaacgattctcctgcctctgcctctcgagtagctaggactacaggcgcgtgccaccacgccaggttaattttttgtatttttaatagagacgggatttcaccgtgttagtcaggatggtctcgatctcctgacctcgtgatccgcccgcctcggcctcccaaagtgctgggattacaggcgtgagccactatttctgggttattttgagaagcttatattttattttcattttgggcgggcgtcatgacagggagatagaagaactctccaacttccagtgccttcttccttaattattatcctggcatccgcatcttagattaatttagcagatattaatacaacatctgtaacaagaactattctcagtgtttggaggtacaagggtgaaaaagaacatgtgtcggggatcttaccccattttaatggaactattttctcttaagccaattcgtatttcatctgaaacaatagaatagacatcattaacatttaataatacctcagtcatgtacttcatccatcatattcttatgaaacaaatcatgccatgtggaatcgtatgtaaaactgggccacgtggaagaatttcaacagacttggattatcaaaatgtttttataacattaatcttttaaatgcatagtctcggtcggtcgtggtggctcattcctgtaatcctagcactttcggaggccaaagcgggcggatcacgaggtcaggagatcgagaccatcctgactaacagttgaggccaggcattgaggaccagcctggccaacgtagcgaaacctcatttctactaaaaatacaaaaaaaattagctgggcctggtggtgggcgcctctaatcccagctgttcgggaggctgaggcaggagaatcgtttcaacccaagagggggaggttgcagtgggccgagattgggccactgcactccagcctgggcgacagagctagactctgtctcaaaaattaataataataatctccggtgatcattaacacttagacctatacttgacaataattattttattaatcataagatatcaaagagatgtttatgcttttatgctttgggtattttctggaatctttaacaagaaaccaccagcatgctaaaggtaactgattacttccgtttagtcaactttgtctcctttccccatcagctgttatttagaacatatctttgaaagaaaaagcaaaagaaaaaaatacaatagtgatagtgttagctgttaactgctaataatgttaactgctttatcaaaagcttagaagatgccaaaggacaactttgagaatgtaacaaaattaggaattaagcaaggaccacaaggcagaaaaagaagcagaataaaataaggaaacaaagaagttatggaaatcctcacaattacgtgattttcagataaagttatactacgacttgctatttcagcagtagtattttagtgtccatctgccatcttagcagtcttatatttgaaagaaaagcaattccgctgttaccttgagttattaaatacagtattaatcataatcccaatatttattaagttcttactgtgtgacaggctctatgctaaatgcattaaatggat

SEQ ID NO: 75191 - DNA, 1453 bp, Homo sapiens
atggcgggttctgcacctccgcgggcgccctgtggatttaccctaccaattgcccagtgcgggactaccagctgcacatttcccgggctgctctgttttgcaatacgctggtgtgtctgcctaccggactgggaaagacctttattgccgccgtggtcatgtacaatttctaccgctggttcccttcaggaaaggtggtcttcatggccccaacgaaacccttggtgacacagcagatcgaggcttgctaccaggtgatgggtatcccgcaatcccacatggccgaaatgacaggtatcttagactggactaattttgaagtaagagctgggaattcctgacccatgtggaatagttcccaagctacaacatgtgcatcttacgccctccctcttaaaacattctctacttgcagcaagcccaaaactgatgaatagggttgctttattcaatcttcagagaatatctgcagcttgtcatagtattttgaagctattatgtgcgtataccccatgggtaactgaacatgatatttcctggcattcttcctgaaaaagatttctcagttgaagaatttgcctctcttcaaatatgccattttgtaggaattttctaaagacaatttggttgtagtcctagataagtgccagctttgatatttggaccacaccagaactttaaaatgtagcattccgatgaattgtcaaattgtttttctcttaatgttaccaaagcatgtttgcattctgaaaaagccagactatttatattttatagataacagtctgaagtttagaatgtagaatgtcacttttattttcagggtctacacaagcttccaccaggaaggaaatatggtgcagtaagagagtgctttttcttacacctcaggtcatggtaaatgacctttctagaggagcttgtcccgctgctgaaataaagtgtttagttattgatgaagctcataaagctctcggaaactatgcttattgccaggtaataattttgttaaacggtattttgtattgtaactgtactgttaaagagaattttggcgaatagttactagtgatggaagttattgacaatattattataaaaagcctttacgtctattatctcagaacagatggtgataaagaatatctgtactttctgtcatccattcaaatcagtgtcttcactgccttttgctgttattgttgttttctttttcttttcttctattttaagactaaccagataattagtgtcagatgtagatcatgagagcctagtcatggttgggacagtgatctaaaatagggtatgaaaggagttttgaaattaataaagattggtagtggatatgcggtgtctcttcttggcggctaggtaaaataatgacataatgtatgccacatacctaacacagtgccttccagttgagtactccaggaatataaaataagat

SEQ ID NO: 75192 - DNA, 1155 bp, Homo sapiens
aatacaacagattatatgttttttctccagtttcctaattttacaatgaagtctctttataagctttgggtacatgaaatttagtcctggaaatatattcacatcatatatgttgatttaaatggaaaatattctactaatttatcaataattgattgagtattgctaatctgaaatttttgtctgagtctttataaagactctatttgtaaagtaccaaactacatttgaggaactttttggacatttacaaatattcttatttctcggatgcttggcttgaaggtctgtgtggggaaaagatgtttcggaagcacttttcacctgttgtgctacttctgatgtactttttttataggcttatcttctttcttttttgttacttaatgatataaatttctggtgcttctttcaaaattttactgctattttatttctgttagtgacttaaactaaaaaattttaacatgtagtttataatcatacttaattgatttcatataggctgtgcaacaagttattactaacctgctaattgggcagatagagcttcgttctgaagattctccagatattttgacatattctcatgaaagaaaagttgaaaagcttattgttccgcttggtgaagaacttgcagccatccaaaagacctatatccaggtaaaccatttttatgacatttagggatttcataaataaactggtaattgaattatttcagctaacaggatttggatgtgataatatagttatcttatttttatataattgatatgttgaaaaaattctttgaagttaaaatttttggaatgagcactgtgttttgtatgtactagcaaactgttattgaaagggaaaatacaaaagatgggccatttgtaaagcaaataatagccttacatggttttgtatttttttaagtaaaccttataactggaatatagaacatgcacacacacacacacacacacacaaacagcaaaagtagacaaagcataagtgtattgctcagtgaattttcacaaattgcacacacccgtaacatgaacacgtactgagattcagccagaagtttctttgttttctttttgttgttttttgttcagctcactgcagcttccacctccctggttcaagcagttctccttagcc

SEQ ID NO: 75193 - DNA, 1683 bp, Homo sapiens
ctctgttgcctaggctagagtgcagtgtcacagtcatagctcacttgcagccttgaactcctgggctcaagagatcctcctgcctcggtctcccaagtagttagtgctacatgcatacaccatcatgctgggctagtttttttatttttcgtagagacagggtttttctatgtgcccaggctgagcttgagctcctggactcaagcaatctttctgccttgtcctcccaaagtgttgacattacaggcatgagctgtggccagccttgaggctgatttttaatctgattttactatttttcaggtgagtggggaaaaatatgctttgatctacagttctcttacatttgcatgtagttatttttcaattgtttttattttaggtagtgaaacagtttcgtgacggtggttacaacacgctggtttctacctgtgtgggtgaagaaggtttggatataggagaagttgatcttataatatgttttgattcccagaagagcccaattcgtcttgtacaacgaatgggtagaactggccgtaaacgtcaaggcaggatagttattatcctttctgaaggacgagaggaacgtgtaagtagagctgcagaaacacaatttgacacttgaaatttgagaaatacagcccaaaggtgaatatcaacatgttagcattccaagtccaaacactctgtagatagttttggtttattttcccccactttgtattggattctctcttgtaactaggagaatttttgactggagtcagtttgctaatttttatccatctaaagaaacacatttttaatacttaagtagtaattcagagatacctagatctaaaaaccaatatctattactttgttttactattttcctgtgcttctaaagaaggcctgtgctttgtgtttagtttacttttctttctgaactatagtaaactgagaatcattttttccttttcaagggctgtcaaaataactgactaaataagaaacaaagaacatgtatcagagacagtatgaagcctgaaaaacccaaaatatttactttctggccctttttggaagtttgctgatgcctattttaagtgataaggaacttgagttatattcatactgtgctacaatcttgagtgacaggcctttctaaataagatgttacataaaatattattttgtgtttgttacactaaagtattaactaacttttgtaacttatcgagactagttcagcagccaaatatatagattcacattaaaggtcttaacagccatgataatttttaaaaactgattttaggctggacatggtggctcacgcctgtaatcccagtacctttaggaggctcacttgaggtcaggagtccgagaccagcctggccaacatggtgaaaccccgtctctactaaaagaatacaaaaacgagacaggtgtggtggcgcacgtctgtaatcccagctacttgggagtctgaggcaggagaatcgcttgaacctgggaggtagaggttgcagtgaaccaagatcccaccactgcactccagcctgggtaacagagcgagactccatctccagaaagaaaaaaacaaactgattttaaatattttatatactctttaaaatcatcctgaaaaatgaattatttctctaatacttttcatgtgattatagcatattcatatgt

SEQ ID NO: 75194 - DNA, 1359 bp, Homo sapiens
aaactgaaataagggaatagttttaaaaaaacacaagacaaccttacacttctatgtaaatatcagtcttttttaaaaacagcaagctaacaaagatagatttactttatgcagtataactgctaaggtgggcttttgtaataatggactttgaaatgattttctttttaaaaaaaaaaaaacaaaaaaaacggagtcttgctgtgtcacccaggctggagggcagtggcatgatctcagctcactgcaacctccatctcctgagttcaagcgattctcctgtctcagcctcctgagtagctgggactacaggcgcatgccaccatgcccggctaattttttttttttgtattttcagtagagacgagggttcaccatattggcgaggctgatcttgaactccggacctcgtgatctgcccgcctgggcctcccaaagtgctgggattacaggcgtgagccaccgcacccagcctgaaatgatttccattaaaggttaatctaacagtttactgataggttttaaaattcaagacagctgggctcagtgactcacgcctgtaatttcagcaccttgggaggccaaagctggaggatcacttgagccttggagttcaagactagcctgggcaacacagggagaccccatctctacaaaataaagattaactgggtgtggtagctcacacctgtagtcccagctactcaggaggctaaagtgggaggatcgcttgagcccaggaggttgaggctgcagtgagccctgatcacagcactgtactccagagcctggatgacagagtaagaccctgtctcaaaaaaaaaaaaaaaaaaattcaagacaacagaagctccattttctaagtatttaagtggatcggggtttaattttatgtttacaataaatccaaactaataattgcttgttatggataaattgttatttataaaagtaatataatctgacattttctatttgtttttacagatttataatcagagtcagtccaacaaaagaagtatatataaagctatttcaagtaacaggcaggtccttcatttttaccaaagaagtccacgaatggttcctgatggaatcaacccaaaattacacaaaatgttcatcacacatggtgtctatgaaccagagaagccttctcggaacttgcagcgaaagtcatctatcttttcctatagggatggtaaataaattttgcatttgacacatgcatttttcccctgttcttacttagcaggtcgtatcttgatataatatttcttgtttgaaaaactgaatatatgttctaattaatatattataggcattctctttggaaaggctgtacgagattattcatgt

SEQ ID NO: 75195 - DNA, 1157 bp, Homo sapiens
tttggttgaatatggtgtcctttccccactttatgtttttgtttgctttgttgaagatcagttggctgtaaacataaattatgctttcataagcatccttgtaaaccaaaacaaaaaataaaatttttgttttgaaattatatttaaaactttaaatttgatgttattgtttattttgtttattattaacaaattctttgttaactttgtgaaagtcaagagaactgatcaaaggttgtagatgtgcctggagagctgggaaaacaacctcagaaaagatttcttttaaaatatttaactgtttgctcttaacatggaactatataaacaggaatattgtcaacttgtaagtcatataacagttacttaacaaatatattttaaagggcatctttctgctttatgaaattattttctttttttcttctgagattttagttgggagtatctaaatggatccaaattatgttaagctgattatatgtatattgagtgttttttaaaattagtttgtgaaatctcagtatgttttcatcatttttattactttttaaataattaaggctcaagaatcaaccactggaattcatcaactctctctctctgaatggagactgtggcaagatcatcctttgcctacacatcaagttgatcactcagatcgatgccgccattttataggccttatgcaaatgatagagggaatgagacacgaagaggtggggttttattgtaactttctcttgctggtatgatagtaaaactagagtacttagcttttatttttcttaatttgaagtaataagaaatactttgtttttctgtatagttccttgtgatctcagtaaagaatgagttttctgccttaagagaagaaatagatttaattaattagaagaagaatatcatctgtaaatattgatagaccagagtagaattttaatatacttaaatgatttatgtaaactgtttgtaaaccttatttaggattcttttggattcggatttattgaaatactctctgtcatctaggttatttgatatctttcttgtatcctggtcctagtttagagaattatagattccttgagcagttccttgattattcttcctagagtcagcatagtgaaccaattatgagtgtgaaatccatagtg

SEQ ID NO: 75196 - DNA, 2773 bp, Homo sapiens
gaataattcagttaaatgttagaaatgtaaaactcactatattcttatgtattcattcaatttgttcttcctacaaatagttaccaagggtcttttgggtattaagtactggggatacaaaaaagttaactgattaatgataacttgatagtttcacagtagtgtactttataattttgatttatcggaataacttttaaggtataaaagaatatcactggaacaatgtaataatataaatattttaatatagagtgaaactcctctcttagatttggctttctgttttgttttgttttcctgtggctttttaaattttccttatttatagggagaatgcagctatgaattggaagttgaatcttatttacaaatggaagatgttacctcaacatttattgctcccaggaatgaatctaataatcttgccagtgacacctttatcactcacaagaaatcgtcatttataaagaacataaatcaaggcagttcatcctcagtgatagaatctgatgaagaatgtgctgaaattgttaaacaaactcatatcaaacctactaaaattgtttctttaaagaaaaaagtgtctaaagaaataaaaaaagatcagcttaaaaaagaaaataatcacggtattatagattctgtagataatgacagaaattccactgttgaaaatatttttcaagaagacctaccaaatgataaaaggacatcagatacagatgaaattgctgccacatgtactattaatgaaaatgttattaaagaaccgtgtgtgttattaacagagtgtcagtttacaaataaatccactagttcacttgctggaaatgttttagattctggttataacagtttcaatgatgaaaaatctgtttcatctaacttatttcttccattcgaagaagagctttatattgttagaacagatgaccaattttataattgtcactcattgacaaaagaggtactagctaatgtagagagatttttatcttattctcctccgcctctcagtggactctcagacttggaatatgaaattgctaagggtactgcacttgagaatttgcttttcttaccctgtgcagagcatttacgaagtgataaatgcacctgtttgctgtcacattcagctgtgaattctcaacagaatttagaattgaattcacttaaatgtataaattatccatctgaaaaaagttgcctttatgatatacctaatgataatatttctgatgagccaagtctctgtgactgtgatgtacataaacataatcaaaatgaaaatttagtacctaacaatcgtgttcaaatacacagaagccctgcacagaatttagttggagagaacaatcatgatgttgataacagtgacctcccagtattgtccactgatcaagatgaaagtttgctgttatttgaagatgttaatacagagttcgacgatgtgagtctttcacccttgaacagtaaaagcgaatctttacctgtgtcagacaaaactgctattagtgaaacgcctctggtctctcagttcttaatttctgatgaacttttgttggacaataattctgaactccaagatcaaatcacccgtgatgctaatagttttaaatctcgtgatcagagaggtgtacaggaagaaaaagtgaagaatcatgaggatatttttgattgctctagggatttattttctgttacctttgatttaggattctgtagtccagattctgatgatgaaatattggaacatacatcagatagcaatagacctctagatgatctatatggaaggtatttggaaattaaggagataagtgatgcaaattatgtttcgaatcaagcactaataccaagagatcatagtaaaaattttactagtggaactgttattatcccatcaaatgaagatatgcagaatccaaattatgtacatttgccactgagtgcagcaaaaaatgaagaattgttatctcctggttattctcagttttctttaccagtgcaaaaaaaagttatgagtacaccactctctaaatcaaacacattgaactcattttctaagataagaaaggaaatacttaagacaccagattctagtaaggaaaaagtaaacctacaaagattcaaagaagcattgaattcaacttttgattattcagaattttctctagaaaagtctaaaagcagtggtccaatgtatctgcataaatcctgtcattctgttgaaggtaagattccatctttataaagtctataactctttctagaataattactctagaaatactttggtaatttttccaaatgtaattttttagtacatggtacaatataaatattgaattagataattgatgtgttatatttttcttaagatgatcttactaatattagatttatttacatatacttatggcacgcatggtatggaaaaagttattcttgctagacattatgaaatacacgaagatgagtaagatctggccctaggtcttggttgtaaaacataattatgtgacatacgtatttgaaaagatgccagtaaaatgtggaaataactaccaaatgaataataagagagtggctgtttaggaggttcagaggatgatgaaattttgaggttgattagattggactttttttgtttctttgttttttttgagacggagttttgctcttgttgcccaggctggagtgcaatggcatggtctcggcttactgcaacctccgcctcccaggttcaagtgattttcctgcctcagcc

SEQ ID NO: 75197 - DNA, 1352 bp, Homo sapiens
accttaaacgtgttcaaaacacttatatttggtcaaaatcatctaacacaaagcttattttataataaaatgttgaatatctcatgtaatttattaataatactgtactgaaagtgaagaacagaatgtttgtatgggcacttgaaatttggtttctactgcatgcatatcacttttgcactatggagaggtcgaaaaatcattaagttgaaccatcgtaagttggggaccatatgtaattaaaaatacagccagtccgtattaacattgtgtactcatataagacttcattagaaaaacaacttgctaccttaactagaacatctgattgacttatcagaaatgatttaaaatattgataatgctgatgatcaatttgttttaaactaaatttattcctgttaattgaaatgattttgataaacttttgattcttttgactggttttgtgttatcctataagagatatggtgataggcctcatagtcaaaacttgttattgttttatttgtttcttagtttcaaatgattcctatatttggactgattttgatggccaaatttataggcttgttctttgtgaagcccttgaagatcttctgaaggaaatactgttaaactaaaagtatcagttttctaagtcaccatagtgtttgcagaaaaaataaaaataaaaactaaaagtatgttttcatcaaacatattcgatgtaatactatattggatgaatacctatactagtattacttataacctaatttagtattttagcatttaatattacctaagttatttacttttacattcttaagtatttataacattaatattatgtatttataacatggctctgagttgtaagagcaattttacttgtctaggaagaaaatatttttttcttatgcaagaattttgtcgaattattatagtcagaattatcatctagtgatgagagtgagaattttcccaaaccatgttcacaattagaagacttcaaggtttgtaacgggaatgccagaagaggcatcaaagtcccaaagagacagagtcacttaaaggtaatcttttttttagtttctttaaatatgtatgcattttatcagtaaagataattggttttacatcaatgtagatttctctatacattctctttatagaaaaaaattaagtattttgacacccatttagattttttttactggaattaaattcaaagtagtttttttttgtttatctttgtgttttgatgctttatcttgcagtgttgtgttactttgaatgaataccaaaaaactcaagtgtattgagaatttatgtttcaaattgaagaaaatatagaattagaaatttga

SEQ ID NO: 75198 - DNA, 1323 bp, Homo sapiens
aaatagataggtaactttatcatttcttcttgggattttcttttttttttttttagacagagtttcgctgttactgccacagactggagtgcagtggcaccatctcagctcactgcaaccttcacctcccaggttcaagtgattctcctgcctcagcttcccgagtagctgggattacaggcatgcgccaccacaccctgccaatttttttttttttttgtattttgtaaagatggggtttcaccatgttagtcaggctggccttgaactcctgacctcaggtgatccacctgcttcggcctcccatagtgctgggattacagacatgcatcactgcactgggcctagaaattttgtttttattattttattaatcttaaaagcattgataagaaatcagttttccagaattatttccaatcatgaaagaaaattattttctcactgatatcttcatgttttctaatttgtcttacttagcatgtagctaggaagtttttagatgatgaagcagaactttctgaagaagatgcagaatatgtttcatcagatgaaaatgatgagtcagaaaatgaacaagattcctcattacttgactttttaaatgatgaaactcaactttcacaggctataaatggtaaatgttataatgatccttaaaatttttttcaatgtttttatgtgcttatatttaaatattttaatcagtttttaatgaaactagaccttaaaggtaattaaatgtggtacgtgcaaaatatttatttggtcattttcattcaaattctttaatacttgctttattttagactgattgttcataggcttctgctaatttgaatatttctcttcagattgacctgggttgctcaagtgtgaaatgttcatttcacaagtgtttattgcccgctacatgcctagtactatgtaaggcatttaagaaccatatatgaatgaacaaaatagacaaaaaatttcttcttatgaagcctacattcaaatggaaagagacagacaatatatatactaactaaattatttagtttattgtaagataaagagttacagaaaaataaaaaagttggccaagatgagaaaaatttggagtaactggggttgagggtataaataacagacaagttgccattttattgtattattttttagttttatttttttagagacagagtcttactctgttgcccagagtagggtgcagtggcgcagtcatagttcactgcagccttgaactcctaggctcgggagattctcctgctttagcctcctataggactacaggcatgtgccaccatgaccagttaa

SEQ ID NO: 75199 - DNA, 1050 bp, Homo sapiens
ttcagcatttaacatttttatgaaaaaaaatgaattttgatcaaccaaggacaaaaaaggaatcttttttactttttgagatggagttttgctcttgtcgcccaggctggagtgcaatggtgcaatcttggctcattgcaacctctgcctcccgggttcaagcaattctcctgcctcagcctcccaagtagctgggattacaggcatgtgccaccatgcctggctaatttttgtattattagcagagatggggtttcaccatgttggccaggctggtcttgaactcctgacctccggtgatctaccagcatcggcctcccaaagtgctgggattacaggcgtgagccaccgcacatggccaaaaagggatcttgagaatccatttagtcgagcttcctgactttgggcagaaatgatctcaaatagctctgacagcccagttttagaaacaaaatggaggcttcactaacaggaacatatttcaacatcatcatccagaaattctccattatatttctatagttcatacctgcgagaaaatgtttatgtttttatgtgtcttatgaatcattttgtacttattgttcatcattggactacgcaaagatttcatgtaaatagctctcatttcagaatctgtgtaaagataagaatttagataaattagcaaaattatttaaatgaaaaccagtaaagtatttaacttcaatctatttcaaatttacttgattcaaaccttgtgcaaatattttacacaaagacaataaatattaaaagatatctataaacaattattcaaaaatataaagttaggagtttagcctttgaaatcagattttctagttgagtgatcatggacaacttaagttccctgctttatctatctctctgaaaatgaggattaaaatggtgacttttctttcaaaacaaaggtatacaaagaccttaaaactgtaccagatttatagaagtttcaaaaaaaataagaaatctagccagaaaagcaaatatgcactaaaaacattaaaacccacagccaataaaaagtat

SEQ ID NO: 75200 - DNA, 1329 bp, Homo sapiens
ttactttctacctacctgttattagcccttaaatttctagacggtaaatcattcttttcctttatcctcaaactcattttcctccataaagaatgtacttagtttatgttagttgagtaagtggctgaattaataaagtaaattaaacaaatattaatgcagatttcatgtgcctagaagtatattttaaatacctgttaattgtctgaaataaatataaaacattcttgtgtttttattgtagattcctgaacaagatgaaacctatttagaggatagtttttgtgttgatgaagaggagtcttgcaaaggccaatcaagtgaagaagaagtttgtgttgattttaacttaataactgatgattgctttgcaaatagtaaaaagtataaaactcgacgtgcagtaatgctaaaagaaatgatggaacaaaattgtgcacattcaaaaaagaaattatccagaattattttaccagatgattcaagtgaggaggagaacaatgtaaatgataaaagagaatctaatattgcggttaacccaagcactgttaagaagaacaaacaacaggaccattgtttaaattcagtgccttctggatcttctgcgcagtccaaggtgcgttctactccaagagttaatccattagcaaagcagagcaaacagacatcgctgaatttaaaggatacaatttccgaagtctcagacttcaaacctcagaatcataatgaagtccagtctaccacaccacccttcactactgttgattcacagaaagactgtagaaaatttccagttccacagaaggtatggatcaaagaaaggaaaaatatctttagatggttaccagaagtttttctttttctttcttgtgtgtgtgttttgtattaaataactaggtcaaagaaaaattaacaaaaaaattttgcagaaaatgtcttcaaacaagaaaacaatacacaaaattatatgggcaattcacagggtgcttaggttttaattttttaaatatgttaatgttttgttaacactatgtaaggaaacttgataattttattaaaaggttgtgggaaaatagggctttctgcaaggcaaaattaactgaaattatgtgttcagagttagttccctggccagatgcggtggctcatgcctgtaatcccagcactctgggaggccgaggcaggtggatcacttgaggtcaggagttcaagactagcctggccaacatgatgaaatcccgtctctactaaaaacacaaaatcagccaggtgtggttgcgtatccctgtagtcccacctacttgggaggttgaggtaggagaatcgctt

SEQ ID NO: 75201 - DNA, 1142 bp, Homo sapiens
acacatacttctcttagacttccgcaggaaggaaaaggaacctgtattcttgtaggtggtcatgaaatcacttctggattagaagtaatttcttccctaagagcaattcatgggttgcaagtagaagtttgtcctcttaatggctgtgattacatcgtgagtaatcgcatggtggtggaaaggaggtctcaatctgagatgttaaatagtgtcaataagaacaagttcattgagcagatccagcacctgcagagtatgtttgaaagaatatgtgtgattgtggaaaaggacagagaaaaaacaggtttgtatttttaaatatctttgtttataagactgtaaaggaactttacggttaacttagtttattcttctattattaggatgtgggaaactcttaaaatataaacacctgactggtgaatgtcatttcatattttcatacagccataatggctttcattagtcattgtatttaaatgcagcttatgagaaatgaagggttggaaactgaaggcaagtctgccaaacataagactttttcaggaacccaggaaggatgagggccttaactaaggcagcaatggggaggagaagtagtattcgggagatgtttaaggagtcaggattagcaagagttggtgggaggagttgagaattactgagttgaccaacttcttggttattgggcagttaagtagtggtactgtttattgcaattatgaatataagggaagcaacagatataagggacaagggaagttcaattttgaacacgttaagatcgagttctcaatgggtcactgaagtgggtacctaggatgcatttggaagtgcaggattggagcttcaggtagaagatttctgcagtaattatttaattgtatggcgagccctcaagaacagtaaaaagatcatgagatatggaatcagaagacacaccaattactggcttctctgtgtgatattgcattgacaaatcactccctctgaggaactgataatacacttgttctactcatcttgtgatattatgagaactaagtaaaagcatgtaggtgaaagccactgcggaagaattgaagaattatacttttggtaatagtgtagtttatgtaaaacattggtgtgggagttgggca

SEQ ID NO: 75202 - DNA, 1119 bp, Homo sapiens
tgaacaagaaagggtagggaagtaattggcaagatgatgttaaaatgggtgtacagggtatttgttgagttattctttggaataaatacctaagataattttatattaaaccagtacttaatgcacccttcatcagagctagcatgaaaaactagagatgagtaatacagtcttggccttcaggagtgaattatctaggaatataagctcttccttattcacctttctacgttgattccagctcaaggcgctcatagttacccctattttctttctcagatatttgagaaacattagttgtagggtttctcattagcagaatgtggcaccagtttgctcaatggtgtagatcttgggattttaataaaataaagtatattaataattctacttaatattagttactgaagtttgcctttccctaaatatgaatatttaggagacacatcaaggatgtttaggagaacaaagagctatgacagcctgctgactaccttaattggcgctggaatccgaattcttttcagttcctgccaagaagaaaccgcagatttgctaaaggaactgtctttagtggaacaaagaaagaatgttggtattcatgttccaacagtggtgaatagtaataaaagtgaggcactccagttttatttaagtattcccaatataagttatataactgcattaaatatgtgtcaccagttttcatctgtgaaaaggatggctaacaggtatgtctgttgtaatatttttaaatgattacttttaaaagattcgtaaaagcattccatagaagtttaatgttaaaaaaatttaagcggcatcatgcctgttagattattttattcagtaaacattttttgcctgccaacatatattagttactgtatgaagctaagggacattattcgaaaaaaagaaaaaagaaaaaataggtgtagggatttcctttgagaagcttagagctctgtggagagacaataaatagcagtttcctttgaccttgcaatctaacatttctgggctgttcagttctgtaacaagaaaaatgagtattttactagttgtgatcattatattgcttgaagagggagattttagaatgtagttcattttaat

SEQ ID NO: 75203 - DNA, 1353 bp, Homo sapiens
acaacacaaatttatttctgccagttctggatactggaagtctgagatcatggctgggttctggagagagctttctactgagtcacagactactgccttctcattgtatcctcacatggcagaaatagagctagctagctctttgacctcttcttaaaagtgcacaaggatatccacctttatcaactaattctcaaagttgccacttccaaataccatcacattgggattacggcttcaacatatgaattttgggcaacacaaaaacattcagttcattgaagatgttgaaattgttattctagataattttaaggaaaggaaacaagtagctcttttatccaaactaatgttcaagacatatcagctgggcggataatgcttgagatgatttccttaaaggctactgtgtttggtgttctttaggtaatattaaattttataaaagccaaaagtcctagtgtaatgattttgtctcatttatttttcagctcacttcaagaaatctccatgtatgcacaagtaactcatcagaaggctgaggagatctatagatatattcactatgtatttgacatacaaatgttaccaaatgatcttaaccaagatagactgaaatctgatatataatcaagctgctcaagatggggttttcaaagacctctcacaatattaaatgcacttcaataatcattgctgttttatgtttatttgtaaataagagaatattttatttaaatattttatattgtatacatttttatttatagattatagaaattattaaaaaagaaaaatctgatgttcagtgatcattttgactagattataaaactaatttttcttattaaataaaacaaggtttattaaaagtgttactaaggatagtttaagaaagtaaaagctaagctagagatatactttggaatgtttcccaaaattaaagttgtactgttgtgataaatagtaaagttgacatgtctatgactacagccaacttgtcgattttccctatgtgtagatagtatacttttaagtgtactgattctaaatacatgtacttggtaaggtgtgggtgatgggtgggttgtgagataaatgacccagtaactaggaaagtagaaaacttaactgaatgtttatctgaccaaaggtgtgtcccagttaagtactgtcaaatctattaatatgaactctgatatggtttggctgtgtccccaaccaaaatctcatcttgacttgtaatctgaattataatcccaatatattggggagggacctcctggaacgtgattagctcatgggggcggttcccccatgctgttctagtgatagttctcagaggatctgatg

SEQ ID NO: 75204 - DNA, 1028 bp, Homo sapiens
ttaaaagtatactatctacacatagggaaaatcgacaagttggctgtagtcatagacatgtcaactttactatttatcacaacagtacaactttaattttgggaaacattccaaagtatatctctagcttagcttttactttcttaaactatccttagtaacacttttaataaaccttgttttatttaataagaaaaattagttttataatctagtcaaaatgatcactgaacatcagatttttcttttttaataatttctataatctataaataaaaatgtatacaatataaaatatttaaataaaatattctcttatttacaaataaacataaaacagcaatgattattgaagtgcatttaatattgtgagaggtctttgaaaaccccatcttgagcagcttgattatatatcagatttcagtctatcttggttaagatcatttggtaacatttgtatgtcaaatacatagtgaatatatctatagatctcctcagccttctgatgagttacttgtgcatacatggagatttcttgaagtgagctgaaaaataaatgagacaaaatcattacactaggacttttggcttttataaaatttaatattacctaaagaacaccaaacacagtagcctttaaggaaatcatctcaagcattatccgcccagctgatatgtcttgaacattagtttggataaaagagctacttgtttcctttccttaaaattatctagaataacaatttcaacatcttcaatgaactgaatgtttttgtgttgcccaaaattcatatgttgaagccgtaatcccaatgtgatggtatttggaagtggcaactttgagaattagttgataaaggtggatatccttgtgcacttttaagaagaggtcaaagagctagctagctctatttctgccatgtgaggatacaatgagaaggcagtagtctgtgactcagtagaaagctctctccagaacccagccatgatctcagacttccagtatccagaactggcagaaataaatt

SEQ ID NO: 75205 - DNA, 2166 bp, Homo sapiens
ctctaagggctactatattttctgttctgttactttttatttttaaaagatttttaaggattgccagccatggccaatagtttgataagcattgtaatgtgtgtgagcatgtacttcaaacttgccatttactttaccattttagccaagaatttcaagtacagagaattaaaattctgctggtataaaacattgtactgttataataacagactgtaggtaaaagtaatacagtaattagtattctgtatagtaattactatactgtaatagtacagtatagtattgtaattataattactatatataatcatgataaattgtgtttatattttaagtttaccaaaccagtatattcattacttaattacttagcacattttggcaacttttggaggcccatagactatcctttaactgctatagcattagtttataataatttcttagaggagtgtttgccagcactgggaaacaacattgagtaagtcatggttcttgccctggataaacccaaaagagaattatgcatttcacagataattataatgtgattaaatgttgttataggcatatgttcaaagtaatctggggataagcatgcttaattttgtctagatttgaggtagacttcaccaggaggtaccatttagctattaatagtaactcttttataggttgaaactgatttctcaactccaacaccaagaaggaaaaccccatttaacacaggtaatacacttacagctttcttttgtggctcagttctattataaggtaggttctttatttaaatggtattaaaattaattgctctcaagtggacagacttagcattttattccttatagttgttttcagttttattgaaagtacttttagaaatttattatctttttattaaacttctctttacagacttaggagaaaactctggtattggaaaacttttcactaatgctgtggaatctttagatgaagaagagaaagattattatttttcgaactctgattctgcatagtaaaatgagaaaatatgattcctgggatttttaccataaagcagacagtgtttgtattttcaactggagtacatgtattttctttgtaaagtagcttcctatgaaaatgtggacttttttgaaggtttcatatgtttgtgttcaaagtaaaatatcctcattgctgcagcttactaaaaatgtaaagaaaattgtttttgctcgtgtagatatctgtaaatttgtttttgcatattaaaatatatatagataattttttaataagcatccaagtctgtttactttaagaaaaccatttcccaaacagatttttttttatttcaagaaaattttgctaccatttaagtaagagaaggtgagaaggatgacagaggttgtattggtagctattgaattcatgaaaacttttaagttagcatttgttagcagttattatccaagccagagtaggatttgttaccagttgttatccaaacctaatgtttaaattacacattgttgaaattaaattacacattgttgacatgcttctctcctgattgtttttattttaaacttgtgataggcatatctatgaaacctttgtaaatttagtttattgctttaccattattttactaggtaaaattagagaacagattttgttctctaatttttaagccttatttacatatgcagaaacagcttaaatattttgactagattagacaaacagttaatagatccaccattaggaatcaatatattatgtcataataaacatcctttttctttcactgaaatttcttttagaaataaacttatttttgcttgttatgttttgaaacttgacataggatattttccctctggctacacattcacctacccttgttctctatttagattattcaaataaagttagtttgcttttatagtatttgtttcttgttttttgtttgttactaattactggatgatagaaataaaaacaaatcatgactggtcctgtttaagtttcctcaaaaaaaaaaaaaatgattaataacattttcttgtttcttaagtgttttagtcagagcaggcatggtgtcatgtatctgtagtctcaactacctgggaggctgaggaaggaggatagcttgagcccaggagttcaaggctg

SEQ ID NO: 75206 - DNA, 1049 bp, Homo sapiens
ttcctcagcctcccaggtagttgagactacagatacatgacaccatgcctgctctgactaaaacacttaagaaacaagaaaatgttattaatcattttttttttttttgaggaaacttaaacaggaccagtcatgatttgtttttatttctatcatccagtaattagtaacaaacaaaaaacaagaaacaaatactataaaagcaaactaactttatttgaataatctaaatagagaacaagggtaggtgaatgtgtagccagagggaaaatatcctatgtcaagtttcaaaacataacaagcaaaaataagtttatttctaaaagaaatttcagtgaaagaaaaaggatgtttattatgacataatatattgattcctaatggtggatctattaactgtttgtctaatctagtcaaaatatttaagctgtttctgcatatgtaaataaggcttaaaaattagagaacaaaatctgttctctaattttacctagtaaaataatggtaaagcaataaactaaatttacaaaggtttcatagatatgcctatcacaagtttaaaataaaaacaatcaggagagaagcatgtcaacaatgtgtaatttaatttcaacaatgtgtaatttaaacattaggtttggataacaactggtaacaaatcctactctggcttggataataactgctaacaaatgctaacttaaaagttttcatgaattcaatagctaccaatacaacctctgtcatccttctcaccttctcttacttaaatggtagcaaaattttcttgaaataaaaaaaaatctgtttgggaaatggttttcttaaagtaaacagacttggatgcttattaaaaaattatctatatatattttaatatgcaaaaacaaatttacagatatctacacgagcaaaaacaattttctttacatttttagtaagctgcagcaatgaggatattttactttgaacacaaacatatgaaaccttcaaaaaagtccacattttcataggaagctactttacaaagaaaatacatgtactccagt

SEQ ID NO: 75207 - DNA, 1259 bp, Homo sapiens
ttgaaaccagcctgggcaatgtggtgaaaccctgtctcttaagaaaaatacaaagattagccaggcatgatggcacgtgcctgtagtccaagctacttgggaggctgagttgggaggatcacttgagcccaggaggttgaggctgcagtgagccattatcatgttactgcactccagcctgggcgacagagtgagaccctgtttcaaaaaaagaaatacatttgaaattaatttaggcaattgttgttcaacctgtggttaaaagtatgacagttaacttaaaattattaggttgacttaaaaatattgttgacttaaaattatttcgtattcaaacaggaatgactgtgataaatatgtttttcgtatgcaaaaatatcataaaagtaatggtggtattgtctggggcaacatcaagaaaaaattagtaagtatttttctttatccaatacatatctatgaaacaactttaatatgtgataaactgtggtagttgtaagtcatgtaacagtccctgtccctgaggtgattataatgtaacaagttacaataatgaagccatgaatgaggtaagcacataagtactgtaggattacagatggcatcacattgactgaaacattggagcaaggggaaaatggctaaaaactttgatttttgggaaatgaagggtgggaaaaatatacacagaggtctgggaaggatatttcaggcaaaacacaaaaacacaaaacacaaaaacaatcctgttcaaggattgaagaataattcagactgagtcacaattctcataaagtaagaaatttcatcaaattctatgtagctttaaaatggcttcaggtgtttttcagatttagctacttaattttatttttttactttttatttttttacattctaacatttaaaatccaactacagaaaaatttttaactgaaagatgccttaatagaatgatctatatcccttagagaaaagattaggacagtcctttatccccttgaattactttttaaatttttaattttctgattttaattgcaataactgattatcatatataagtactaggattctggaaaaagtatttcatctcaaatttcctctaagtagctaatcttcgagaatggtaacttatgggaacccccttgattcccttgctttatgacactgagcaagttacttgagctttctaataccattttattcatgtgtggtatgacaatggggatcatgattatattgatttatgttaccaa

SEQ ID NO: 75208 - DNA, 1038 bp, Homo sapiens
tgtagtggttggtaccaggtaaaatttgttaaacatttttacacagttgactttattcatcttttcattaatggcttgtaggttttatagtatagttagaaagaccatcactaatctggtattataaaataattctccaaggtttctttagttttttttttttaaagttttttacaagtaaaaccttgatccatttcgaattgatccagaagtaaatgtgggttatatcacaatgctgtttattgaatagcaccccgatttgatgaacttgtccatccttaacttctagaaactacacattcttgattttttaaataatgcctcttcccattactggcatctatggtcctcatgaaatgtttaaatgttcctcactactctgatgcagagaattaacatatcatatgcatgaatatttacctatttatagaacctagcatgccaggactgacatgctgacattgaggagtttttaccaatggaaagataactgatgatggagttgttggatttttgtccatatttggcagaatatcatcatcatcttcactgtcctggaaacttggcaactagaaaacaagtatttattatcagcaggcaccccataaaaggtattttctcattatcacaaaatagttttggaggactgataagttggttcttcttgtaactttccaagttagataattaaaaacagtagtacgtagaggagtagaggctagaggaactccattttagatgctaattcaccatgctgacttctgattaaacctggatctggaaatgcctctaagatttctacctccatatacttactggaaatcttgtccttaggtcaaaacaaccttggtgttatcgtaaacacatacttaccataaatacagcccttaggcaaattccctatggtatataaaccctgggtctggggggataacagtgcccaaatccaccatcttgaggccacccaagagatggcttctgctcaaaagtctctattaaatgtttctgagaaactggatttgtcaccctctttattca

SEQ ID NO: 75209 - DNA, 2546 bp, Homo sapiens
aatcttgtagacactttctaaattattttgattattacctttttccacggattgtaatttagaggcttcttttctccccagcattcaatattatctatcagtctcattctgtcagtcatcttgtaaacaatggcacataatatgtggaggtggttgtaatatgtttctatgacagtgggatgatttgcagtttatatgtatttctaattacagttggatagtttcagttagtttgacttctcattacttaggttttgaattggtgaattgttctcattttaatttgctttctttagtgacaagatataagattctcaggttgttctcttttgcttgttttgtacttcatggtgtttggggggattcattttgagtgtgtttctatgaccaccattggcaatgaaagtggaaccatgcagatggagttccatgtcctcctaactagcacagctcatataatacttagtaaggtttcagtgactactggttttcttatatcttctgaatattttacctccagggctttgatttaacaagtatttacttattgcctactgtatatgtgaaaggctctgtactaactccagcaaaaaaaaaaatcaaaccatacagataaagttctaaccattaattattttttccagtctgattgaaagacaagtgtgcaattataatacatgtctcactgtcaaacatggcattatttaaagtattctggaaacttgaaggagagctttcattcagtgtagggaatgtgtacaagtttgtacactaggtgggttagagaataaaatcgaagcaggtagtgattttgtttatagatgaatgaagaacatcttcaaagcagagtggacaacattattaaaagtggagaaccaagaaaatctgagaaatagcaagtggtgtggttctgaacatagaatatagttgagattttgacaacagtgagagattggaactatgtggaaggccaggcagaggagcttatttatatgtctactaaaagactgtgagaagtcactgtcaggtttgtataaacaatagtatatgtttacagttgaaggggcagtggtctgaatagacctgggcttcagaaagattaatatgacaggtgggtatacagtgtagctcgtggataaaaatagtatcttttatttgtgaaaatatattttctgtgcttatatttgtttatagctaatttgagattttggtctttggttttgtcttatgaaattaaagagacaactgaagaattggatgtatccattgatattctaacctcaagggaacagtttttctcagatgaagaaagaaaatacatggccatcaatcagaagaaagcttatattttagtaacaccacttaaatctagaaaagtgatagagcaaagatgcatgaggtataatctgtccgctggcaccatcaaagcagtaacagattttgtaataccagagtgtcaaaaaaaaagtcccatcagcaagtccatggggactttagaaaatacatttgaaggtcataaaagtaaaaacaaggaagattgcgatgaacgtgacttacttactgtcaaccggaaaataaaaatatctaaccttgaaaaggaacaaatgctcacctctgactttaagaaaaataccagactattaccaaaattgaagaaaatagaaaatcaggtagctatgtcattttataagcatcagtcctcaccagatttgtcaagtgaagaaagtgaaacagaaaaggaaattaaaaggaaagctgaagttaagaaaaccaaagcaggaaacaccaaagaagcagtggttcacctgagaaagagcacaagaaacacaagtaatattccagtgattttggaacctgaaactgaagaaagtgaaaatgaattttatatcaaacaaaagaaagctagaccttccgtcaaagaaactcttcagaagtctggtgttaggaaagagtttccaattactgaggcagtaggatctgataagacaaataggcatcccttagaatgcttacctggtttaattcaggataaggaatggaatgagaaggagttacagaaacttcattggtaagtagttagatttcattccgaaatatctacagagcagccacaagacagttaaagacataaaaatagcaataaggggttaacatggaagatgtcattaaaaaaaagggagaaattataatttgcacagggaatggagatagactacacataactcctagtggtatttttgtggtcatctctaatacgaggaaagtacgaggaaagcctaagtatgaggaaagtaaaagtgaccttttcattcccatgtaatatttcaagatagccaaatagtactctctcacgtagcttcatattttaagaaatgcatttttttgttttttgttttgttttgttttgattgagacggagtctcgccctgctgccccgtctggagtgcaatgccacaatcccggttactgcaacctctgcctcccgggttcaagcgattctcctgcctcagcctcctgagtagctgggactacaggcgcacgctgcc

SEQ ID NO: 75210 - DNA, 1064 bp, Homo sapiens
tttcacttagagccagcacttattagggatttgatcttaattgcaaatattatcagtaaagtgtttaagaaagctattgacaagagaaatgaatacaaatttaaaagactaaagtttggtaaactattttacataccagctgtgtccataggaaaatcactcagcaattttttttttttttttgagacagggtcttgctctgtctcccaggctggaatatagtggtgcaatcatggctcactgcagcctcaacctccttggttcaagcaatcctcccacctcagcctccaaagtagctgggactacaggcatacagtactgcacttggcttgttttttatttcttgtagagatgggatcctactatgttgccaggctggtctcctactcctggcctcaagcagtcctcccaccttggcctcccaaagtgctgggattatagacatgaaacatggcacctggtgtcaacatttttaaagtgctttccatgaaccctggtctattaagttttaggaacttagagatgaataaggcatgattccccccacccccacccccagggatcttggtttaggggcaaatattaatatattctgttatgattgcatcatttttctagtgtaattcattagatcttttcttaatgaaactgttagacactatcttcatatcacgtaagttattttgagtggtggttggggctgttattaattttattattatcattgcactttgcatgaaaaaaacaaaaccacatctaacattatatagctaaggttatgtaaaggtaccaacccatgttaatttaagataatgtaattttatgtatgtgttttaatgatttgcctaaaaagtacttgtgtatcatagtattgctcttaaagcactttatctctgttattacacttaccagagtatatgataaatgacctatcataatagaagcttccttcattatatggtaatattttcaagagcaaggactagtcagtacatctttaaagaatagcttctagaaaaataacaaaatgtttttatactttttatgaatctgttttaacttac

SEQ ID NO: 75211 - DNA, 1702 bp, Homo sapiens
tctcctgacctcctgatccacccaccttggcctcccaaagtgctgggattataggcgtgagacaccgcgcccgcctgaaatgccagttttggagtttgctttggtctgtgaagcatttcagaagcaataacattttactagaacttctgttgtatttagtaaatctcaaaggaaaataaaacttttgacatatgtcaaagagtaattctaatcatttacccttcagaaggcatgcagttattaaatactaatgtgcagttcttcctcctttttttttcattcattttctcagtagttatggagtgtctgctactttacagacactatagttgatgctggtgaaagacagaagaatttgatttattcttgcccttgtggagctcataggggatacggactttaaacttaatcacagcacaaatataataactggtaacgggggctggcagtttttttctgtaaagggcatattctgtaaagataatattcttgcaggcatattgcccctattgcagctattcaactctgcctttgtagcagaagagcagccgtagataatatatacatgaattagcatggcagtgttttaataaacttcatttacaaaaacaggcaactggcagttgtcctgtagttttcctataatatcagtttaagtaggaattataagagcatatagtaggaagcagtttggagatcatatttgagtcctctgacttaagatgttacacctcagttctttgtgaaggaagggagtgaaagccatgaaggattaataatgtaagattaaagataccctgcctgggtggaaagagctttatgtgaggggtttttatttatttatgaagattttttttgttttgtttttttgagaatcagtattaaggaaaaataaaataattgtttttaaagggctggtgaaaagaacagggaaaagaccaaacaaaaacagaaaactggaagatctgtccgtgacataaggaaatcaatgaaaaatgatgcacgagaaaaccaaacagatactgctcaaagagccaccaccacttacgattttgattgtgataatttgggtatgttttgtctttacttctctgttggtacagtggttaagttcttacatggtctacattgtttatggtttataatgtgtatagtagtaatgtgtatagtatagtattctttgacttatactgcccccacattcctgcttcttcactactatatgagaagtaactataatacagattaatcatggtcaggattcagcttgcttcatcaaataccacctttgcctgggcccagtgacttatgcctgtaatcccagcactttgggaggctgaagcgcaaggatcgcttgagctcaagagtttgagaccagcctggataacatgacgagaccctgtctctactaaaagtcaaaaaaattagccacacatggtagtgcatgcttgtgttcccatcttcttgagaggctaaggtgggaggatcgcttgagctcagatggttgaggctgtaatgaaccatgtttgtgctacaacactccagtttgggcatcagagtgaggcactgtctcaaaaaataataataataataattacctttttattaatcagaataccaaagaacactggtaaacaaattaatgaaagatgattgttcttttaatttccttgacccaaagtatttaagctgccaacctacc

SEQ ID NO: 75212 - DNA, 1136 bp, Homo sapiens
tgatacagtaatttcttttttccccacttaaacctcatttggtaccttccaaaatgaaaggtaaaaacatttggctgtatagccagggtgaaaaaacaccagattagctggatccaatctactttctgcataaaagctaacacagtatagaccctgaaggagaggaacagggagatcattctttggaagcttagcatcagttaagctgaagctgcaagtatttattgccagcatcagatactgagacaaggcctctgctcccttactaataatattttgtaggagggacatggtttggccacagtatagtttttttggtacataatctgaggattacaatagccaagcagttgagttctgctgtaatgtttggccttcaaatattttgtaattagactaataacattcttagtgttgctgtagctaaagtgtaaaattattttctgttagaaatttctatatgaatattttgaccttaccaaaactatttttttttcctagagacgtcactaacatatattggcacagtaatgtaattatagagcggattgagcacaacaaacttaggactatatcaggcaacgtttatatattaaaaggcatgatagaccaaatttccatgaaagaagcaggtaaatgactgtcattattgataagttattttaagaagtaaagcagttaaccatgtttctcacagtaatacacatttttttaacttttaattaggtatttttaaattatgaataaatcaaaacaactgatattatataaaactggtaattttttttctgatttttatcactcttattgacaatttctaataagttatgtgtttttgtttttttttttttttttggaaatggagtcttgctctgtcacccaggctggagtgcagtggcacgatctcggctcactgcaacctccatctccggggttcaagtgattgtcctgcctcagcctcctgagtagccgggactaaggtgcctgccaccacacccaactaatttttgtatttttagtagagacggggtttcaccaggctggtcctgtgcatgaccacttccaacatggcacaaaaaaatgatgcaatagcaactgcaggtagctgtggataaataagcctggaacaacatcgt

SEQ ID NO: 75213 - DNA, 1328 bp, Homo sapiens
tgtcatatattgcaaaagtactatactggtctgatcattactaaatctaagtgtctttatttcaagaattttaaaagctgtttttttcttagtgactaatacaattcaacttcttctttctttaaaaaataaaaccttagcctcagtccaaggagttcctctagaatcatcaaataatgatattttcctcccggtcaaacaaaagattcagtgccagcaggaaaagaaagcaccactgcacaatttaacttacggtaaactatttttggtttgttttcagtttgttacttaagtatattgttaaatgttctaggtaattactttccttgtgtgggcattaaactttagctgtggacaaaagcttgaatcgtaaaagagacactcagagaaagactgggcaggagggtggaacgttcctaacctaaatttatctcttttaatttcctgtgatccttctataattgttttgttttgttttgttttgtattttttgcagaacttccaactctgaaccaagaacaggaaaattttttggctgtagaagcccgaaacaagacattaactagagctcagttggctaaacaaatttttcactcaaaggagagtatagttgcaaccactaaatccaaaaaggacacgtttgttttagaaagcgttgattctgctgatgaacaatttcaaaatactaatgctgagactctcagtactaattgtattcctattaaaaatggcagcctgttaatggtttctgatagtgagaggacaacagaagggacttcgcaacagaaagttaaggaaggaaatggaaaaacagtgcctggagagacaggtcttccaggttccatgaaagatacatgtaaaattgtacttgcaacaccaagacttcatataacaatacctcggaggtcaaaaagaaatatttcaaagctttctcctccaagaatatttcaaactgttacaaatggacttaaaaaaaatcaggtgggaaaacttttaagacagatatttatttctatttttaccccgttcttcaagagcttgagcttttaatgttctctcattattttttttctagctaggatttgaacctgtatgcttcattattaacagtgtcttcattatcatgttttattatttactgcagtgacagtgtgacatagtgaaaagaacagtgagttgaatgtaagaagacccacatgttaagtcttattttgctctattactagttgtgtagtcttcaataatttacttgttccttttggtgatgaacattgaattcattcctactcttttttttctgatacttacagtactattaaaatagttag

SEQ ID NO: 75214 - DNA, 1484 bp, Homo sapiens
gtatttttttagcttttattagaatagatcttgtagttgctgccttaaaatttaactgcctaaagggaaaaattatatttgtggaactttatcttttgtaacctaatgtagtgccatatgcatatatcttttattttgttttattttattttattttattttgagacaaggtcttgctctgtcacccaggctggaatgcagtggcacaatcatgactcactgtggccttgacctcccaggctcaagtgatcctccctgctcagcctcccaagtagctaggactacaggcgtgtacaccatcacacccagctcttttgttaaggagactttaacaaaaataaaatcttagtctgatttgtgattatctagtattgttatgaaccagttaaacattttaattagtataatgttgtggaaagcaaataaactttaaacattttctgcaccaaagcatgataaaggctgattttacgttgaactacaggtttctgtggatcccttctgaagttctatctgaaaattgcgcttaagtgaattttctgttagaagaacttggttgctactttcttgtcaagatgattgcaacacctttgaaacattcaagaatttacttacctccagaggcatcttctcaaaggagaaatctacccatggatgcaatcttttttgacagcattccttcaggcacacttactcctgtaaaagatttggtgaaatatcagaactcctccttaaaattgaatgaccataaaaagaatcagttcctaaaaatgacaacttttaacaataaaaatatatttcaatcaactatgctaacagaggctactacctctaacagttctcttgatatcagtgctataaagcccaacaaggatggattaaaaaataaagcaaactatgaatcaccaggaaaaatatttctaagaatgaaagaaaaagtactgcgtgacaagcaagaacagccatcaagaaacagtagtttgttggaaccacagaaaagtggaaataatgaaaccttcactcctaacagagttgaaaaaaaaaaattgcagcatacctacctatgtgaagaaaaggaaaacaacaaatcattccagtcagatgacagttcactaagaggttagttttatgtgttagctaaaaagctgtaatgtcttaagtgtttaatgtttcagacactgttttaggtgctcagaatatagcagtgaacaaaatggacaaaaatccttgcccttgtgtagctcatattcacatggtgggaagacataattaacatattaaataagtaatttttatggcttagtagaagaggaaaagtggaaagaggaaaaagcagaattaggatgatgggaagagttggagggggatgtaattttcagtgcgatggtcagagtaatcttcagtaatttgaatttgggaatttgagcccacaaaattgaatgagatgacagatacatgtatcttgaggaatggggaaggatgat

SEQ ID NO: 75215 - DNA, 1068 bp, Homo sapiens
ttcagcagaagttgatttgtttgttgttgtttagttaattaaaacaaaatccctactttaagataccttccaattacttttaatacgttttatctcaaggaaaagccccaaaacatctgaaaggaggcagcaattttagaacaagtacaatcgcaagcctcagtattctctaaaaagttattatgtatgtgtttattttggttttactaaggcattattttgggtttttttcatgagtcattatataatgaacaagatattactttcaacacttttccaaattaaaaatattgtcactgaaatacttgaacaactatgacgagttaccaaatttactaaattatacttttacaaataaaattagacaacagtttgaaattaaatacccaacttccttataaccactaagttagtcttaaattggttattttaaaatgaacatcagaaaataacatttgtactagtattatatatttgcacattttagaagctctgaaattctaaactttcctgtgtttacaaaaaccactatttcattttgccctttacaacttaaaatgcactggaaaaatctgaagtcctatgtgtattaatgtctgaagtctaaagtcttgtatgtattttttcaaacacttatataacagataatattaaatatatataaccaagagtaaccccctatccatttttattgcttttagtaaaataaattttctccattagcatatgaggtttctgaattttcaattacactttttgtcattactgccctttgttttagtcttgctttttggaatgcatttttgagacacaaaaacgttatattttcacgtctttcaaaagtgttcccatgtaactaggatggtgctgatagaaggctcatgtacaaagaaaaatcaatctacttttaattatgatgtctgaagggttaaaatctgtcaatagtttttatgataagtagtttataattaaaatatagtttatggaagaagaaaaggatttagagattttgaagcatatcaaaatttttgaattatttccgggaagtaactcttaatcacaaaaaca

SEQ ID NO: 75216 - DNA, 1052 bp, Homo sapiens
gtttcatatgatgatcataaaatcccaaaatattaattattagctgttattatattatcatctcttgtttacctaccctttacccttgctatagagcacttctgtatctttgagtataaaattagagcactaatactactggtgaaatagtaataatgatgacaattataggtaattattgggaatttactatatataatccatattaattattaaacctattttataaatgaggtatactagtgacagagagcgttttcatcatgattgtcagcttcagcttttttgttctttcttttatttattcatctaatatttatttagtatttgttcctcatcctacccaatgtgcagacgtagcatcctcaacaagatagatgaagtctcagctctcagctaaacgctgatagaaaaagatgcatcataaacaatcaaacaaattaataatcagggaaggaaataagacaggtattgtagtacagtgaattatttgttgagggacacttttagtttgggtgctagaaaaaaaaaatatctaaagaagtggcctttgaactgagacctaagtgacaaaaaagagctaaccatgtgaagatttgggaaagactgaagaagtacataggtatagaagtagtaataagcttgccaagatcaaggtgatgtcataatacccttctttctggaaagtgatggaagtgacccaggaaaagataaacagaagatcacacacagccttgaagggctcagtaaggagtttggttatttattctgtgtaaagtggaaagttcttggtaggtttttactagggaagtggcatgatccagcgaagttttatggttttatgttgtatatggtgatgtcagcggattcaatagattgtaagggattacaaatagaaacaaagaacaggtcacagcctgttgcagtagtccaggtagatagtttaaactcaataaaagggcagaataacatccctccaccatgaaagacattcacgacttagttccagaagcatgggaatatttcatgttaaaatgcaaaggggagttaag

SEQ ID NO: 75217 - DNA, 1025 bp, Homo sapiens
ggtcttctgaggttcccgaagagattgaaataaatcttcttctaagataatgaagcagcagtagctagttattttgagaatacagaagcagatgttggacaattattcctcattctctcttccaactatgcaaatagatatttcctatttccagtttctgtacctgcttttcccattttgcaatttctgtgggtcctttatcttctcatcgtcaagtaactgggggacaatgaatttcaatgtcagaccccttcctcgtcctgttcctcctcctttttcttttgttgtggtgttgtggtatacttctttaagatggatgcttccttctttcttatgtcttatctttgacatttctcttctgtacattcccttatttgttgcctatgatatttgcaagtatctttcaataccaaaatttttaccaaaaacctggttttctttcttggctggagaggaaataacttctagagaggcagagggctcatcaaatgaatacaaatagaacctaagtatttgttgaaagagtaagatttgttctataatgaaatcaagtaaagttacttattgagtacacagggtacaggtagatacagttgtgtatatatcaattattctgtcctcaggcaatttgaaatgtttttgaagaagcaacaaatacaatgctagaaatagttaaatactaaattgtatcttacaaactttgtactacatagagactcaaaatcaagaaaagatgatatgaatataaagaactaagggaaataactgaaaagatgaagtttgtgctacatattagggaatttttaaagcaggatggtgccctgaaatacattaaattgcatgaaatacagcaccacagaacctgagttcaagtcacacctctactacttaaacgttgtgtgtccatagaaaaatcctttacattctctcatccttgattttctcatatgtagctggaaataatcatgatagtttaacaataactatcatttataaagccctcatcaaataccagaaaatgtata

SEQ ID NO: 75218 - DNA, 1050 bp, Homo sapiens
aaccagtgctaggctgcaaggtcagaacacagagtttgcctatcaagttatatccatatttctttgaaggtggtgggatggttagatatatgtgccactcctttctggagaggacagtaactttcggtatgctgttgagtagcctcccattgcaaaattgcaaaatcttaccttactcttgtattgaagatgagctaaaatctttacctttagattattctatttttagacctcaagtttgcaaatgtaataggaagctaaatcaatgcacagatggttaataagaatacagttcagtaatggataggttgtacccaatccatccactgatgtttctgaatcataccctaatgtagaatggattataacaattaagtctaaaggtacttcagaatgaggtcttgagaaatacatggctccatgtatatttgacaagctacctataatgggagaaattcttgactagaaagactggtactgtgcttcatgaggaaagataccacacataagacttgaccttatgtagtgctcagaaaaatgttgcctttattagagtgtagcatgactactcagaataaactagtgctagagctcattaatgaggcttattcagcaaattactcctacagtggatatgcttgcatattgctggactgaaataccaaaatttgcatgtgtttttccagctgtgcttgtttgtttaatttaaatgatcagctgcagatgaaattctgatcatattcttaaattaggagatggccccagttccctgatcacatttgaaggctgatttgtttcacacagtaacttcctatcatttgttgcctccactctactctgtacttcatttgaaatttggcaaccctttccatttacaaactgtgggtggatttgagtacaagacatgaggaaatactatagccactaaagaaatggagggacatacattgtcttctagtaatttgcaatctttccagagttgcaacatataagcagcatggaacaactggaaatatatcaaagatatgaaatggaatacaaataatagct

SEQ ID NO: 75219 - DNA, 1035 bp, Homo sapiens
acattctgtaaatggactgataagcataaaaacccatttcatagtgagatcagcggtcctgcagaatcactctggttattttcctagttccttaatgcctggttggcatagatgtactcaaaatctggcaaaatttctatatttatttccttaaccatgatataagagatattttggaagatgaatcacttagggacacctttccaaatatatgcatgacctaaaagcaatgtcatatttgtgaaggaattatcaaagtcttaacaaagtgatgcaaatcctctcacatttctaatatgcatactcggctcttcagtagctggattggttttatggaatattataatcagatgttacaacataatcagatgatagctttaattacatctgttgttccaggtatgactttattgccacaaacgattgtagtcaagtattcaaattgtcaattttggtaatgtgtttttctttcaaaccagaactttctttcacttgaagggaatgggagtacatctcatgatcttattttggggccatgccaactgtctgacttaggcaaaaatcacgtacagaaattagcaggtcacaagatgtttggaaacatatgttcacagcagagagtaaaaaataaatgaaaatgtaggatactgctacttcagtgaaatttttgagagaatatctttaaaaataccctccagtatgaaaaacaattactctgttatgttctgtccctgagaaagaagcacaatgtttggtaaactgccttgattttggagaccacacatataaaaattagttttgttgctattattgcagtatgcaagcgtaagttggaataggataatacaggatagactttaccagtatttattactgattgccctgctctacctctgttctacagaacgactaggtgaaaaaacttaaaagctacataacactatttttctgaattctttgaagcaagtgctctgaatacaaattatcatttccctttatgtgcagggtaaaaatgagatagttatcattttcttg

SEQ ID NO: 75220 - DNA, 1006 bp, Homo sapiens
ctgcccctttcacctcctcaggatactgttcaatgccttttaaccagtcaaacaaatcagaattttgcccattaaaatgctctaatagcacatggacaggagttgtctctccagtaaattagctaagtatattttaggtacaattgtaaagtgtccattatttatagcatcattggcagtgccaagcaccctgtgattgtgcattggatatgagatgatagtgattgcctattaaatgttttaaacttgagttccacaagtttgcctcctggctcaacaggaagaaaatgacttttctacaggaaaatatataagatatgtactctatagccatgccagctgaaacatgacacatttccaaaggcttatatgacctttaattctataaagtccaaatatcagagtgaggagggatgggatactagtctaattgccacctgggttactactccaaactaggaggcggacagcagatggaattcaaccactctggaggaaagagaaaggagagagccagtcctcttaatagaaatgtgtaagacaacactcaaaaatcactttcgactagaaaatttgagattaaaacatgccagaaatggtgaaataccacagggggccaacattataaatataaataaataaataaatacaaagtgccaggaatgggaactagaggccaggtgtggtgcctcacacctgtaatcccagcattttgggaggccaaggtgggagggttgcttgagctcaggagttcaagaccaacctaggcaacataggaagacctctcctctactaaaaataaaaattaaaaagatcagccaggcatgggggcacatgcctgtagtcctagctgcttgggaggctagggtgggaggactggttgagctccggagatccaggctacagtgaactatgatcacgccactgcactccagcatgggtgacagagtaagaccttgcctcaaaaaaaaaaaaagaaaaagaaatgggaactggaagaaaaacc

SEQ ID NO: 75221 - DNA, 1063 bp, Homo sapiens
agtcatttgatgccttcagatgcatttcttttctgtttaatgtagctagattgtttctagtttttttcagccaagaaccctgacatgtagaggagtgatcactcattctaaaaaaggtcttgttaaggaatttttttcttccttccatgtttccctccctcttttctttctctacttccttcctttccttccttccctccctccctcctttcctgcctccctcctttcctccctccctttcttctttccttccttcctttcttctttccttccttcctccctccctgcctccctccctccctccttctggccttcctgccttcctttcctctctccttttcttccttctttctttttttcctgatggagttttctcttaaaatgtttatttattaaaggaagatataaaggagaaaacaaaagggctcataattatgcttcacaatagccttttgtggacagtttccatttctacttcgttaatgaaataactgccacatacatgtggttagaaaatctaaacagtgccagtagacatacactgaaaaggtgcctcctttcctagtccctccctcttaaggaaactacatttatataatcacacacagatacatcacatacttttaaaataacaccatttgtgtcattcattcattcattcatttattttttgggtctaggttctgttttagggatatactgatgagcaaggcagatataattcccatctccaaagagtttacatttgtggggcatacagtaaccttcatgaggaccttcaaatgcatcccttttccttgcccaagttctgatcaaattgaaatataaaagattgacagattacatcatttacctcttttattgctaaaggctatgttggaagatataggatagtgtgcaaaccgcatggacttcctaactcggatgcccggagttgggcacctatacccacctagtcaccggcagggctgaccatagccgacttccctattgcggggactgcctggtgaatatcctggacagaagagagctcctgttccctgtggacttctctctctaaaga

SEQ ID NO: 75222 - DNA, 1073 bp, Homo sapiens
atggcgaaaacctgtttctacaaaaattagccttgtatgatgatccgcgcctgtggtctcagctactcaggaggttgaggtgggagaatcgcttgaacccaggaggctgaggttgcagtgagtggagatggctccattgcactccagtccgggagacagcgagactctctctcaaaaaaaaaatgatgaactgtgtaattatagttgcctactgaacaactatcctgtgcatttggtaaagatcatttactagtgttttgggaaacattactttgatggaagaagtgcgatagcgttactaaaaatcgttctaaaacatggttgattctggagtaggcattcagtaaatatttaaactacatagaatctggtgtggtttggataggtcaaaggtccagttctgtaattctataacattctataatgagccttttttttgtgagaatcaagtagagatttaaagcattttgaaataaatcatctgctttttttttttcagttggactaaatgctcttccttcagaggattatccggggcatctactcaatgaaaaaccatgataattctttgtatataaaataaacatttgaaaaaacccttcagtttatgagtgttctaatgtgactggaatagctaattgtttatagaaatctttttctttttttttttgagactgagtccccctctgtcgccaggctggagtgcagtggcgcgatctcggctcactgcaacctaggttcaagcctcctgcctcagcctccaaacctagctaattcttctctttttagtagagatgggggtttcaccatgttgaccaggatggtctcgatctcttgacttcgtgatctgctcgccttgggcccccaaagctctgggattacaggcatgagccaccgcacccggcaagaaatcctttaaaaacttacattttattaccttctcaataaacttgtatcaatggcttattttctctgagttaacataaaatcataccagccagtaaactggtaaatgccaattttatttttatactttacaaaacctggcaggttcaggcctgtaatcccagcac

SEQ ID NO: 75223 - DNA, 1166 bp, Homo sapiens
tagctgggactacaggcacgcgccaccgcgcccggcggtcggataccggcgcagaatagcactagaagctgtggtatggtgacgtcatcaactgggccagcccacaacgcctctaagatttcattttactcacccagcgaaacaacctgaccacactgcgcacgcgtttcctttgagcactgcattctgggtaaactgtctcaaaaatttgaagagcgcatgcgtgggccagcttcttccttttacctcgttgcactgctgagagcaagatgggtcaccagcagctgtactggagccacccgcgaaaattcggccagggttctcgctcttggtgagaaatagtttgtgattttggggaagcgttgccgtggagcgctaggctgcttaaaatctcaagtagaggaggccacgggcggcacgagggagcacgccgactgggagtcgctggtgccgccattacaggcctgtactgtggcttgggagtcccgggatgcgggtagtagccgtctgagtgcggagtcttgtaatttctatgacctgcaaaaccgctgtctcttttcttacagtcgtgtctgttcaaaccggcacggtctgatccggaaatatggcctcaatatgtgccgccagtgtttccgtcagtacgcgaaggatatcggtttcattaaggtaggcgtctgcaggcgtactccatgttgtttgggcagagaaggttgtgggggttattttttccgcgaaagacaaacggacagatcttccctggagtggtaattctgagcattcgaccaagagcttttcctctttttttagttggtagctggtgacagtgttgatggtttgggcaatcaaattaatagaatggagaaggtgaaggacttagtctttcctactcccttttttacctagatagcttagccagttttaggtgccgtgtattgtgtttggtgaaattcactttagagaagccactaaaattgttttacatttgtttcatttatcaatcttgtaagtacctattctcttttttttttttttagagatagggtctccctctgtcgcccaggttgaagtgcagtggcgttgttacggctcactgcagcctcgaactcctcctggtctcaggcgatcctcttgccttggcgtcccgagtagctgggactaaaggctct

SEQ ID NO: 75224 - DNA, 1138 bp, Homo sapiens
cgctgttgttgcccaggctggagtgcaatggtgcgatctcggctcacggcaacctccgcccctccccaccccgcccaagcgattctccttacaggtatgcaccaccaccacgccaggctaattttgtatttttagtagagacggggtttctccatgttggtcaggctggtctcgaactccggacctcaggtgatccgcccttctcggcctcccaaagtgctgggattacaagcatgagccaccgtgctcggccttgcctcagttctttaggtcgacaaattagtcctccagtaatttaaacgaagtgtttcaaaaaggtatgtacttgtatgtgcgtttattcatatggaaaaagagtacgtggtggatttatatattactcatttatgtgtacggttttcctgtatatacttgtatagcactttcacttttcggaatgtttaacgtctgctatcttattttaaatattttactacagttttcatcatatagacaaaacagccctgctgcaaagatggtcaacgtacctaaaacccgaagaaccttctgtaagaagtgtggcaagcatcagcctcacaaagtgacacagtataagaagggcaaggattctttgtatgcccagggaaggaggcgctatgatcggaagcagagtggctatggtgggcagacaaagccaattttccggaagaaggctaagaccacaaagaagattgtgctaaggctggaatgtgttgagcctaactgcagatccaagaggatgctggccattaagagatgcaagcattttgaactgggaggagataagaagagaaagggccaagtgatccagttctaaactttgggatatttttcttcaattttgaagagaaaatggtgaagccatagaaaagttacccgagggaaaataaatacagtgatattcttacgcaaactttttgtggtttttacttataaatagaattccatgtttagtgtagtcccacctcaaactttactaacaagtttatatatgtatgaagggaaaatactactttactactttttgttttctggtcaatttcaaatgttgaatgaattcataaacattgagcagcttagaaggatctttaagattttgcaagagaaggaacaagataac

SEQ ID NO: 75225 - DNA, 1038 bp, Homo sapiens
ccgggccccgggggtcctggggcccgagacctctcatttaccccgcgccgcctgcgctccacacatcctcgcctggcagctacagctcgagcatcggcgccgccgctaggagccgcggctcggcttcgtctccgtcctctccattcagcaccacgggtcccggaaaaagctcagccgcggtcccaaccgcaccctagcttcgttacctgcgcctccagcggccctgcgtcctctgcgctctcatccttacaggggccctagacggccagaactgagcgacgcggcctcgcctcactccggcggggaccgttatgacaacccgcaactgccccgcggcacaccgcggccctccggcccacacccctccggcccgccccttagaccgttggttggtgctttccagacgcgaccgaaggcgcctgaccgccgtggccggctgcctattggtttgcagtactgtcgctcaggtgcagttcccacttccgcctgtttcttccctttcctgttaggcgagagctgcgaaaggcgagagctgcgaagggccaggtgtcgggcgctgtttctcggtaagctaagaacgaggctgtagcggctccaataggagcctcccttgctcagaatcctgggtaggactaggccttcttaggaaagggaaggcgagacctatggccctcgccggccttagttcgagagcaggcttctcccttcaggaaaaaggtctcaggcatggcggctatagaatcgcggggcgcgccggcttgataaggacacgtcagccctcgaggctgctgacgggtgactgtgcttcggaggggaaaagtgatactacgctgatgtggttctcgtagaaggaacggggcgggtcgtaaccgtagctacaacgtcgcgcgctgccccagccattctctagagctggaaaatggaggaggtgggtggggggaagggggtcaaagaaactctggtccttaacttccttttcggaagaaaattagatgaaccgcacttttcttttggagcagtcacaataaattaaactca

SEQ ID NO: 75226 - DNA, 1794 bp, Homo sapiens
atgagttagcgagggcagccgcgggggccagttccgaccgtgacaggccaaggcgacggccgccgcccgcccgccccttccgtgcagaagcagctgctcctttccgcgcccgcccgcctgcgctcccggccctggagaccatgaggttccgcatctacaaacggaaggtgctaatcctgacgctcgtggtggccgcctgcggcttcgtcctctggagcagcaatgggcgacaaaggaagaacgaggccctcgccccaccgttgctggacgccgaacccgcgcggggtgccggcggccgcggtggggaccacccctctgtggctgtgggcatccgcagggtctccaacgtgtcggcggcttccctggtcccggcggtcccccagcccgaggcggacaacctgacgctgcggtaccggtccctggtgtaccagctgaactttgatcagaccctgaggaatgtagataaggctggcacctgggccccccgggagctggtgctggtggtccaggtgcataaccggcccgaatacctcagactgctgctggactcacttcgaaaagcccagggaattgacaacgtcctcgtcatctttagccatgacttctggtcgaccgagatcaatcagctgatcgccggggtgaatttctgtccggttctgcaggtgttctttcctttcagcattcagttgtaccctaacgagtttccaggtagtgaccctagagattgtcccagagacctgccgaagaatgccgctttgaaattggggtgcatcaatgctgagtatcccgactccttcggccattatagagaggccaaattctcccagaccaaacatcactggtggtggaagctgcattttgtgtgggaaagagtgaaaattcttcgagattatgctggccttatacttttcctagaagaggatcactacttagccccagacttttaccatgtcttcaaaaagatgtggaaactgaagcagcaagagtgccctgaatgtgatgttctctccctggggacctatagtgccagtcgcagtttctatggcatggctgacaaggtagatgtgaaaacttggaaatccacagagcacaatatgggtctagccttgacccggaatgcctatcagaagctgatcgagtgcacagacactttctgtacttatgatgattataactgggactggactcttcaatacttgactgtatcttgtcttccaaaattctggaaagtgctggttcctcaaattcctaggatctttcatgctggagactgtggtatgcatcacaagaaaacctgtagaccatccactcagagtgcccaaattgagtcactcttaaataataacaaacaatacatgtttccagaaactctaactatcagtgaaaagtttactgtggtagccatttccccacctagaaaaaatggagggtggggagatattagggaccatgaactctgtaaaagttatagaagactgcagtgaaaatcacagttacaaaagcgacagtcttctatttttgatatttgtccaaacaggacatacaattgaataaaagagtttaggaactggtttctgctttaatacaaaaacaaaatcttgtaaaaggtgtccaaatacatagtaatcttttccagttatgtctgattaagatttaaaactgaaggtttcattttgggagtagggttttaaagctcaatctgttatctgctaaaattgattattgttgatatgagagaagaggggaaattttatttaaattgcatttattaatctttttatctgaaactttgta

SEQ ID NO: 75227 - DNA, 1053 bp, Homo sapiens
ccctcttctctcatatcaacaataatcaattttagcagataacagattgagctttaaaaccctactcccaaaatgaaaccttcagttttaaatcttaatcagacataactggaaaagattactatgtatttggacaccttttacaagattttgtttttgtattaaagcagaaaccagttcctaaactcttttattcaattgtatgtcctgtttggacaaatatcaaaaatagaagactgtcgcttttgtaactgtgattttcactgcagtcttctataacttttacagagttcatggtccctaatatctccccaccctccattttttctaggtggggaaatggctaccacagtaaacttttcactgatagttagagtttctggaaacatgtattgtttgttattatttaagagtgactcaatttgggcactctgagtggatggtctacaggttttcttgtgatgcataccacagtctccagcatgaaagatcctaggaatttgaggaaccagcactttccagaattttggaagacaagatacagtcaagtattgaagagtccagtcccagttataatcatcataagtacagaaagtgtctgtgcactcgatcagcttctgataggcattccgggtcaaggctagacccatattgtgctctgtggatttccaagttttcacatctaccttgtcagccatgccatagaaactgcgactggcactataggtccccagggagagaacatcacattcagggcactcttgctgcttcagtttccacatctttttgaagacatggtaaaagtctggggctaagtagtgatcctcttctaggaaaagtataaggccagcataatctcgaagaattttcactctttcccacacaaaatgcagcttccaccaccagtgatgtttggtctgggagaatttggcctctctataatggccgaaggagtcgggatactcagcattgatgcaccccaatttcaaagcggcattcttcggcaggtctctgggacaatctctagggtcactacctggaaactcgttaggg

SEQ ID NO: 75228 - DNA, 1030 bp, Homo sapiens
aagagtccgcggaccggtccggaactgacggccaggcctgcgcttccgctcgcgagggggaggcgggacccgcgaggagtcgcgcggaggacggaggccacgatacctgcgtggctggggctgcgggctccggggtcaccaccctgggcgacccggaggtggcgcctccgccggccgcagctggagaggagcgtgtccccaagccgggggagcaggacttgagcaggcacgcggggtcaccgccgggcagcgtggaggagccatctcctggaggagaaaactcacctggtggcggaggctccccttgtttgtcctcccggagcctggcgtggggttcttctgcgggaagagagagtgcgcgcggagatagcagtgtggaaacacgcgaggagtcggagggcacgggcggccagcgctcagcctgcgccatgggtggtcccgggaccaagagcggggagcctttgtgtcctccgttactgtgtaatcaggacaaagaaaccttgactctgctcattcaggtgcctcggatccagccgcaaagtcttcaaggagatttgaatcccctctggtacaaattacgcttctccgcacaagacttagtttattccttctttttgcaatttgctccagagaataaattgagtaccacagaacctgtgattagcatttcttcaaacaatgcagtgatagaactggcaaaatctccagagagccatggacattggagagagtggtattatggtgtaaacaacgattctttggaggtaacagttctttccagagtcctcatatttgaaatatcccatctcactttaaaaatttgctattaccggccgggcgcggtggctcacgcctgtaatcccagcattttgggaggccgaggcgggcggatcacgaggtcaggagttctagaccagcctggccaatacggtgaaatcccgtctctactaaaaatgcaaaaattagccgggcatggtagcgggcgcctgtagtcctagctgctcgggaggctgaggcaggagaatcgctt

SEQ ID NO: 75229 - DNA, 3019 bp, Homo sapiens
ttggtagtcaattcagactcttgaataatggatagcagtttaaaaatagatattattactacatatcctttaagaaaggttacaaaggaagaatacaaagattacttatttactgttcgtattgctcattgtaatcataagttcttcctgtgggaataccatcagaggcagccttggttcgcctcttttctgcctacattcactcctttgctggccttctccagtgtcctctggctttaagtatcatctgtgtattgacaccttccacatttatatttccacttcaacctaccttccaaactccagactcaggtatccagttgcctacttatcaccatcccaacctaagtgaactcctgatcttcctccccacgagtgtccctaacctcttctgtagacttctccatgttagttcatgacaccttcatggtctgaacaatgattattccagttgttcaggccaaacactttggggtttctctcacatgttttttcaggaagtcccattaacttcaaattatatccagaatctgctctctctctatacctctacctccacaaccctctaccacagtggtccccaacctttttggcaccagggactgatcttatgggagacagacgccagggggggtgggggtgattttgggatgattcaagcgtattacacttattgtgcactttatttctattattattacattataatatataataaaacaattatacaacttaccataatatagaatcagtaggagccctaagcttgttttcctgaaaccagacggtcccatctggggatgatgggagacagtgacagatcatcagacattagattcttataacgagtgtgcagcctagatcactcacgtgtacagttcacaacaggattcgtgctcctgtgagaatctaatgcccctgctgatctgacaggaggcagaggtcaggatgtaatacaaccgatggggagtggctgtaaatacagatgaagctttgcttgcttgcagcctgctgctcacctcctgctgtgtggtccagttcctaacagaccatggactggtaccagtccatggcctggaggttgaggagccctgctctgccatcttctcggcctggattattacaatagcctcctaattggtctccagcttttactccttcccctccgtattctattcttttttttttttttttttttttttttttttttttttttttttttttttgagacggagtctcgctctgttgcccaggctggagtgcagtggcgcgatctcggctcactgcaagctccgcctcccgggttcatgccattctcctctccgtattctattcttaacgcagtgtgaaagtgatcctgtaaagcataaggcatatcccatccaccttcccgatcctggaaaaagggaccctcattggaaaaagggacccctcgtgatttagtgacagccgtatccttgcagtggtaatcaaggccctgtgttatctggctccgttacctctctgatttcctctcctccccatttactccagccacactagcctcccttctgttcctcaaggatgccaggcgagctccagtctgagggcctgggctccatctgttccctttgcctgcagtgcgcttcctctgggtatctgcttgactaagtccctcttccgcttcaagcctgtgctcaagtcacactaaattatgagcccggcctgttctgatcatcctattaatatgcccgccttctaggctctctcttaccacatatgctgtccctcttagcctgtctttttctttttctcttatgcttaattatcttaaaacatactatatgattatgttcgctttttattttctcagccccaccccctactagaatgtaaactgtatgagggctgggatcttttggttctgttcgctaatccctagaatggggtaggcatatattaagagctcaatacatagctgttaaatgaatagatgaatagacagactctggttgaagttttgtgtggtgaacagtgaatgtgggaatggggttgtattgtaagagattttacctttaaaattaatatcatttttttctgagaagtcaaattcaactactgttttcatttcagaattcagtactgtacacaggaaattactgtcttccgtgaagacttagtaaataaaatgtgcagaaactgcgtccgttttcctagcagcaatttggctattcctaatcacgtaagtgaaacaacttttttattaaactgccttacatgttgcattatataaaattttattaagccacttaataatttgtccttgggttaggacatttatttatggttcaaaatagtttgaacgtacttttgtcagtaagttaatttttgttagtgaagtcagtgtttctcagctttctacctaagtgtatgtcctttagaggacagagaaaagctgagaataagcatgaaatttctttcaagcttcgtgttttgccttttaaactcttaaattatacttgaaaatatatgtatatttgttttaataaactgttcttatttatcccattggttacatattttatatagtatgtccatatcacaagaatgtgcagtatttatcttgtagcttcgaggttccctgacaatagttgtcaatcacaggttacatacacccccatttgagaagtacggaaatagatgttacagagcatttttattattcattttataatatttaaagtttatggaccaggtgcagtggcttatgcctgtaatcccagcactttgggtggcttgcttgaggccaggagtttgagaccagcctgggcagcataatgatgtatatgttattaaatgaaaactcatagattttttttcctaaaatacagaatagtttatttcacttttaaattagtgtctcccaaagctctgtgagtcaaagctttcctagtttctcaaattttctggttccttttggtaattaatatttaatttgaaattatttgtttagctattttcacttttgcaaatgaactga

SEQ ID NO: 75230 - DNA, 1030 bp, Homo sapiens
acgccattctcctgtctcatcctccagagtagctgggactacaggcgcccgccacgtcgcccggctaattttttgtattgttagtagagatggggtttcactgtgttagccaggatggtctcgatctcctgacctcgtgatccgcccgcctcggcctcccaaagtactgggattacaggcgtgagccaccgtgcccggccgtttagtcagttttaagacacagatatagcctattattttatttactgcttccatattgcttatcttgttttagaatatttagataacctttgtacttttaaagtgttacaaagagtacctttttacactggaaaataacttcattagatacaaagaagctaaatgtatacaactattagaaaaatatctctagtggtatatagaagataattatgttataattatctagggcatactatggaaatattaatttttttggaggtccttctaatacatctgtgaagacttctgcaaaactaaaacagctagaagaggagaataaagatgctatgtttgtgtttttatctgatgtttggttggaccaggtggaagtattggaaaaacttcgcataatgtttgctggtaggtcttattttttttcttctttcttgaactcttttaagggttcatgttttaaaactttttgagtattctatttatctttttgagtattctatttaaaaaaaaacagagttagcaatgagataatttaaattagatttcattttaaagacttaaatttttacattaagaaaaaaacctgtgtgtgtgtgtgtgtgtgtgtgtgtgtgtgtttatagtcatgataagtaagaattagtcctgaagttcaagaccagctggacaacatagtgagaccccatctctaaacaaaaacaaaaacaaactgggtttaagtgcaagcctattaccctgggcaggttacttaacctaagtctcagattttatggatgttctgaggagtaattaagccaatgcaggcctggcctatagtaagtgctcaatgaat

SEQ ID NO: 75231 - DNA, 1092 bp, Homo sapiens
tgcatgcctgtgatcccagctacttgggaggctgaggcaggagaatcgcttgaacccaggaggcggagcttgcagtgagctgatatcccaccattgcactctagcctggagaacaatagcgaaactctgtcttaaaaaagaaaaagaaaaagaaaaagaaattgtgtgcctggcctgagaaaatgtgaaaagtgtgttattacaaatacttataatgcaagttatcatgttcacctagagtacttatgttttagtaaatcaggtctgtattttgtgggatgtttttcagagagcacgttttcaatatcataggagcatttgatattccacgctttgtgtacaattcagaaagaaaaaaatttcttccgtaagtatgtcatccactgattttaaattaatttcaaatgtactttttttttcagaaggtatagtctcttgcttcacttttggctcacctttgtgtattatgatagtcaaaaataggcattctctttttctagtctgttaatgaccaaccaccctgcaccaaatttatttggaacaccaagagataaagcagagatgtttcgtgagcgatataccattttgcaccaggtaagtttggtagggggcggaggggaggatactgggtaaaatgagagaaaaggagactgtttcagtttagggaaatctcagggatatttaaagaatggaattttgtggtccaaagttggtcattcaataaactgttattaagatttctgtgattgagactgtgtagaagatacagagatgaaaaagctattttccccttaacaacaatgatgatggtaaaaatagtagttactatttaatacatgatatgccaggtagcacttaacatacattatttacctcatttaatcctcataatactaataatgtgtaaatgctattattcccattttacggatcaggaaactgaggcttaaagaagtttagtaatttgcccatagatcgtatatagtaagacaggattttaatccagcctgactctaaagcccaaccattgcctactatactttaccactttcaagtagcttacagtctatgaagttatagacatttgtgcaa

SEQ ID NO: 75232 - DNA, 1034 bp, Homo sapiens
ctgaagcatttaaatatttattttcttttctttttcttttttttttttttttgagatggagtttcgctcttgttgcccagggctggagtgcaatggaacgatctcagctcaccgcaacctccgccccccgccccgggttcaagcgattctcctgcctcagcctccctagtagctgggcttaccggcatgtgccatcatgcctggctaattttgtatttttaatagagacagggtttcccatgttggtcaggctggtcttgaactcgcgacctcaggtgatccgcccgccttggcttcccaaaatgctgggattacaggcattagccactgtgcctggcttgcattttaaatatttctaagctatttttagtggcgtttctttactaatgactattttttctagtctcaaaatagacgcatgttagcaataatatgctaagaaatattatgctttaaaattcttactacaatggaggtttgagcgtatgtgtgtgttgtgtgtccataatcacagaattatagaagcaagaatggtaaagctggaaaacaggaatactatatgccaaccctcttagtttacagattttttttcttaagccatctggaagttctactgatagtagaacctacatcttctgtctccctaccattatgtgacagacctgtaacgtgactgaatcatattgaaatgaccaacatacaggcatacctcgaagtattgcagaatacttcgtatgactgcaataaagcgaggtcatacgaatttttttggtatctcagtgcatataaaagtcatgtttacattgtagtgtgttaagcatgcaatagtattatgtgtaaaaaaaaaatgtacatacctggctgggcgcggtggctcacacccgtaatcccagcactttgggaggctgaggcgggtggattacctgaagtcaggagtccgagaccagcctggccaacatggtgaaaccccgtctctactaaaaacacaaaaattagccggacatggtggcggatgcttgtaatcccagctactc

SEQ ID NO: 75233 - DNA, 1105 bp, Homo sapiens
cggaggcgcgggcagaggcggcggcggcggcggcggcggctggaggacccggcgctgggggcgctgagcggcagcctcgcttccggagctcggcgggcggcgtcagcggaacgggcggcttccggccgcggcgtaaacaaggccgtggactgcaggaggcggggcagacgggctgcaatagggagccggcccgacgcggaccgcttccctgcagtgccccgagtcccgggcccgcgccgccgccgcccggctccgctcgcggcccctctgtctgcaggcgtgccccggcggcggcggagagccgtcctcggccgaggaggctgggaaacgcgagcgcaggcggcagagaggcctcaacgccgtccctttcgccaccgccttttccttgcctcgcgccgctgtgcatttctctccttttcctttgtttttttggcccctcgcgggtgtgggcattgttggttagcaaaagtgcagcctcaagatggctgatggcaacgaggatctgcgggctgacgacttgcctgggccagccttcgagagctatgagtccatggagcttgcctgccccgctgagcgcagcggccacgtagccgtcagcgacgggcgccacatgttcgtctggggcggctacaaggtcagtgagtggccgggccgcgacggacgtcgctcggctgtgactcgggtctgcgttcgcggccaggcggggaggccagagcgggccgccgagggcgctccccgcctgcgtcgcgcgccccacctcagactctgcccgttggttgttttttttttgcgcgcgggaatcttccttctctcgagtaccccaacccgtctcgaacctccagggctgctgtcatgtcaccctggtgctcacaaagccaactcactcccacccccgttgttgccattggagcgttattccggggaaggccctgttaatgttgcttgggcggtgcattcggaagggttggggtgtgaaaggtgacggtgtgtgatatcactcagacgcgttatgaggacggcctacgaggacttcaccctctggagctgggaaccgctgcccacttacagggaggccgaggtgtaggaaaactggaattccaaaagg

SEQ ID NO: 75234 - DNA, 1049 bp, Homo sapiens
tacatttaatttattccccctcaggaaaaaaatcaacactgaaggtgatgttcctccttctatgtcaggaagctgtgctgtgtgtgtagacagggtgctgtacttgtttggaggacaccattcaagaggcaataccaataaggttagtgtttctaaggattatggcttgaggcatttttattcttattatctttcaaacaactgcaaatttctaaggttagccccagacttatttgtgtcacagttaaaaatgatgtgtacttgattatgatatgaatgtgcattttagtattttgtgtgccaatctgtatttacctaggcattatgtaaaatcaacttttgttggtaacctgtgtgcagtaacttcctgggtggtttttctttgtgctttttgcagctacttgttctcttagaaccttaaatgttagatgaacattagtaataaaattgcagacaaaatgaagacaagatgtaatggagggaagggtaaaaatgagcaggcaaccagtcagaaagctgtaaggataaattaaaactgacaaaactttacatgttaacattcctataaagtggtgcccaaagacaatgctgttcagactttgccgtattttgttccaagtaggaaaaaatatatcacttcttctctttcagaccaataagagacagattaagtcaatcagaaatgatacatatgacatatattagcgcttactgagttgccaaataaatgaatccataggagtctattaagttggcaacttagtaagcactttatgtgctgagcacttggctggacactggagacagaaagaatgatatagttctcacctcctggaactcacattctagaagggacacatatagtaagtaaaccactgcagtagcacctgctagagagatacacagcacctggcatatagaaaataactcagtaagtattgttgaaactgaaaactttgacattgtatttggtgggatgagggaacagaacaaggaaaatcttgaccgaagaggtgatgcttgaactgaataataaaattggaaggagt

SEQ ID NO: 75235 - DNA, 1049 bp, Homo sapiens
acaagtaagttggcagcactacaggtttgggtttttatgtgtaaagtggtttaccattcaggtatccttagccagtaaacatttgcacagaacatacctcatagggcccatatgaagattaactgaattaatacatgaaagcatttaacacagcacctaagataaactgcttgtatcctatcctatgggtatttgaatttttagtgtcttggtttttcatccaacaggttaatattttttggagggtatggatatttgcctgaagataaagtattgggaacttttgaattcgatgaaacatctttttgggtaagtgaagtttcatatttgcatatggcctccttagtatgttgaaataatacattttataagttttgtgcatttttctttggtaatcaggcaggctgtctaattttataaatatcatttctaaaataacgcggattcttattttctgtagaattcaagtcatccaagaggatggaatgatcatgtacatattttagatactgaaacatttacctggagccagcctataactactgtgagttactaaagaataatgaattgttaaggatacttagaggcagtggggaggggtggggtaggggagaggggtgcaccagagttggaagatactgtgaaagtgacagttcattcttgttttctggggagaagatccataactttaatgatttccaaggactctagaactcagaagtttaatgaatgtatgaaatgactaacccagcatctattacctaataatctaatactttttttttttttttgagacagagtctcgcactgttgcctgggctggagtgcagtggcgggatctctgcttactgcaatctccacctcccaggttcaagcgattctcctgcctcagcctcctgagtatctgggattacagatgcccgcaaccacgcccagctaatttttttgtatttttagtagagacgggtttcatcacattggccaggctggtcttgaactcctgatcttgtgatttgcccacctcggcctcccaaagtgttgggattaca

SEQ ID NO: 75236 - DNA, 1047 bp, Homo sapiens
atccgaaatgctccaatgagcatttcctttcagcatcatgttggcactcaaattttcagatttggagcatctcatattttggattttccgattacagatactcaaactgtaattaaataactctgcactatactgcaatttgtattacttaaatattagatttcttttccctctgacacagataattatatttcttttccctttgacgcagatattatataatatgccagcctttattttaaaagagaaaaaataaagcagcctattgtgttagccagcccattcagtaacacatttcaaaaatagaaaattaaaatgcccagttttggtagtcagcttgtagtacaactgttgtctagaagtctacactcccaacttttaaaagctcaagtgccttacatattcttatcccatatccagagtagacataggtattttccctgtttataaaaagttcactaacttgcttatgtgcctctaatagggtaaagcaccttcacctcgtgctgcccatgcctgtgcaactgtcggaaatagaggcttcgtgtttggaggcagatatcgagtaagtattcaaacgacttcaatgacttgcttttgaattcttcaaaatgataacttaattatccttttttaggatgctagaatgaatgatcttcactatcttaatctggatacatgggagtggaatgaattgtaggtatcactttagatacatttttccaaaattcagattgtttttaccctatattccctactattggtatataatgtccttgcttaacttttctttaactatgaaattaaataaacataattactaggtccttaaggaatgaattttatttttgtgtttccagttcctgtaactatgtgcctagtacatagcatgtgctcagtgtttgttgaaaggaaaaggtctgaagttgattctaacgtcaaagaaaatatttcagtataaagcatgtagtttataccaagaagcctttttaaacttaaggtctcttttttcataacatgtacatataaattttaaaagaaaactta

SEQ ID NO: 75237 - DNA, 1055 bp, Homo sapiens
ttccgcattataaaaatgaactaaacattgccttgctatattcaccaaaaggacttacttcttgttttttcccagttttatatagaggaaacactgtctatgataggatttccaaaagtatttgtggacagttaaatgctaattaatatacatctgtagttattctacattttcttgaaatttgggaggttaataccaagtattcatttcatgatgtaaagaaactgaacagtgaagtggcttgattgcttaaactattgacttggtaagtctactgtatataacatctaatatatatattacaggccaaatgaactaaacattgccttgctatattcaccaaaaggacttaattcttgtttttttcccagttttatatagaggaaacactatgataggatttcctaaagtatttgtggacagttaaatgctaattatatacatctgtagttattctacattttcttgaaatttgggaggttaataccaagtattcatttcatgatgtaaagaaactgaacagtgaagtggcttgattgcttaaactattgacttggtaagtctactgtatataacatctaatatatatatattataggccagctacaaggggtttaaatatttaggattgtgtcttgaaaactaagtattggagtggattttcttctgctttcattgatacttgtcagaaaaaaatattagaccaaaatgtaaaatataagtaataattctcatgactcagcttaatcatttctattcatttgtagaccttcaggtttgatcttaattttttccttgtaatctgattcagttctgtaccattttaatttccacctttagtaattaattaccaatatagcacgttagagtatcttaacctataataccagaagcgcattttaggcttaccactaaagactctaacccacttttcctctgtctcttaacagaatggaaaatgatgtcatcattatttccattccttcatgagctataaaacctattaattaaaaaaaaactttttaattgactggacagcacctgcctgtattcag

SEQ ID NO: 75238 - DNA, 1232 bp, Homo sapiens
ttattattgcatcattttaatccacagcaggtttctgcaactcaggtaatatccaatagtttttttccttttttttttttttttgagacagggtctctgtcacccaggctggtgtcacccagtgcagtgacaggatcatggctctccacaacgtctacctcctgggctcaggtgatcctccccccctcagtcttccgagtagctgggactacaggcacccactatacccagctaacttttatattttttgtagagatggtgtttctccatgttgcttaggctggtcttgaactcctgggctcaagcgatccacccgcctcagcctgagccttccagagtcctaggattataggcgtgaaccactgctcctgggccttctttctcttaaatgtaactgtaggtaggattttgaaaattattgttctcattacttattatgctaggcaaaaattaagtagtaaagaatatatttaaacattggtcttcaactctttggaactatgaagcagagtttaagtaccactgttccagcttagatggtatgtatatcaggaaaagataaaaaatatgttgagatactaattcaagtgttttagcattttttgtaaagggcggtataaattgcctttgtaactgttattttccctttttaggaaaacctatttgattctttgacaggccagccacatcctgaagatgtactactgtttgccattccaatatgtgccccttacaccaccatgacaaactacaagtaagttaccattagttgacagaatggcttttgtgaattgttttgtaacgtctatttagtaacacatgtaattcctttttaaagatataaagtgaaacttactcctggagtgcagaaaaagggaaaaggtatttaaatttgtttttttgaattatgattttaaacagttcagtgacttaacagtagattattcttactcttttttgtatttacagctgcaaaaacagccttgaatagtttcatgcattccaaagaagcaacagcaagagaaaaagacttattccgcagcgtaaaggtaaagttctccttcagaaaaggaatgtggagactgacagtacaatttaaaatgttagcagttttttgttattttagtagaaaatgctgtcttattagaagcagtaaaaccatctcagctaaaagtttggaaatgtttttcgtttttgtcataaaagaaacatgattgaccatacaggatgtg

SEQ ID NO: 75239 - DNA, 1153 bp, Homo sapiens
acggcttaaaatagaggccagataaaaaatttttacctttgtcaccagcattttttttatgtaaagcttgagttataattgtgtgctcagtttagtgcaggtaatgcttacagggattctgtattactattttcttttttttcctgctgaacagttgttgtttagtaatactaaaactcgttttggcttttaaaatttgtacaatatccttatgttctgtaaatcctagactcacaaatactcactagaggtgttaattattaatgttctttcatgagtaggtgctatggtctaaatgttaatatccccccacaattcatatatgggaacctaaatacccagtgtgatggtattaagaggttgggcctttaggaagtgaagtcacgagggctcttctgtcatgaatgagatgagtgcccttttgccacgtgaggacactgcaataaggtgccatctttttttaagatgaggtctccctgtgttgcccaggctggtgtcgaactcctgggctcaagggatcccccgaccttggcctcccaaagtgctgggattacaggtatgagccaccacacccagcctaaggtaccatctttgaggcaagcccttatcagacattgaatctgctggtgccttgatgctggacttcccagccttcagaactgtaagaagtaaaatttctgttgtttctaaattatacaggctaaggtattttgttacagcagcctgaacagactgagacagtcagttatctccagatagatttttcttaagcaaacaaaattaagcatattttatgggatatgggaaaaatttatccaaaactgttgaacagatatttaaaaataaaagttctgttgaccaaaattctccatttgcttttctcctggcaaacttatcaaccttagttgtcattttaaattgtacttgtaacttttgctgctttaacatatactttatatgaaagtttcagttcccacctcctctacttcagagaactacccttcttctcttgaatgacattactttcttaagtaataaaacagacacacacaaacacatatacgaatccacttcagagtcttaggaagaatataaccttgaggccccctatcctgtgggtcagaaatgacagtctggttgtatcactgtttct

SEQ ID NO: 75240 - DNA, 1050 bp, Homo sapiens
agtttaaaacccctagagtgatttggggatgtaatcagggtaaagaatcattggtttatttaataaaatacagagtcttgaaagcctctagaataagtgcctagcctagctttgctgctttatttcctgttcttcctccatgtgtaccctgacccaaaccaaatgtgatgacttgctattactgttctcttcctttttagacttgcttttccaatactgttttactttatttcttcctcacagttctttatgttttgttaatgtattcttacttctctgtgtatcttctctccaccctatggtaaattccttgaagatgaggacttcagttatccaactttgtagccttcatattgtttattataatggtgccttattcagtaagcatttttgacagagaatataaagtaacaccatttctttgcaagtatttgttgacatttttttgctgctgaatatttccaaccaaaatcttctgattttgtagagtaaaatgaaaaaaatgaaagaaaaatacaaagaccaggatgaagaagaccgtgaacttatcatgaagttgctgggggtaaataacatctaaaaacattttttcttttgcttttcaaatgggcatctagcccactgcctagcgtatgacaggcattcaatacattcttgttaaaatattcacagtattgaaaatacaacactgactgatgtttcctctatgaattaaagtctgcaggttcaaacaaagaagaaaaagggaagaaggggaagaaaggaaaaacaaaggacgaacctgtgaagaaacagccccagaaacctagaggtggacagagggtctctgacaacattaagaaagaaactccgttccttgaggttataactcatgagttacaagactttgctgtagatgatccacatgatgacaaggtatggctactttgtgggcttctgcttcttaattagggtgattacccatcctggagttcccaggacatgggactttcagtgctaaaaccaagacaagtgagtaaccctattcttaatggaatgtcatccagaaat

SEQ ID NO: 75241 - DNA, 1128 bp, Homo sapiens
atgtaatgaggacctgaactaagacgttggcattgggaacagaaagaagaataccacagtaataaaatttacccttccttcttaacctgtgtatttttaatccatttagtcaaccaaccggtcaacagatgttttattgaatgcctaagacctgccaatgctatgttggtacaaagactacaaatcccagtgcctggccatcaaggtgatcaggggcaaaatgtgcctagtgagtaaggatgagtcaggggtgacaatatgttgagcttggatgatggaaagaaagataaatccatgagagatgaaaaacttgcatctttttcccacatgatgattttaagcatctttgtattttctaacttggtgattatcaagtgaagcagaagccatgaccatttatatactgtatatgtgccttccccatggaacttttttagggcactaagaatttcaaattctaagaatgaaatgttttcatgtcttttttattcagggaaatgaaaaagaaaaaacttccaagtgactcaggagatttagaagcgttagagggaaaggataaagaaaaagaaagtactgtacacattgaaactcatcagaacacaagcaaaaatgttgcggctgtgcagccaatgaaacgaggacaaaaggtaaacttcaggatgatctatatggttcacagttaatttgtgaggttcctttttaattttttaaagttgaagtgaaatagaaaatgtaggccaaaaaataatcctgtgtgatttcctttgactaaaaattagttgagtagatacagcatttagggaacacagagatcactattagaagttctttagactttcaagatcatctgcacagaagctctcattttatctggaagagtaataggagattatggcttgccaaagtcacccagctagttaagtagcagagctgatatttattgagaatttagctcagtaatttttagattttggttagagttcttagatattttgctaaaggtggatggtgaagaaagaagtacttatgatagaacatactctttccacactgcccctgcccccacctccccaccccccaaccccgctgtcagctcccccaagatagtcttgctctgtcacccacgct

SEQ ID NO: 75242 - DNA, 1001 bp, Homo sapiens
aggcaggattgtctcgatcttctgacctcgcgatccacccgccttggcctcccaaagtgctggattacaggtgtgagccaccgcgcctggccgattttttttttttttttaatagcaggtctcaggaagcaagtagaagcaagggaagggcggaagggaagggaacaactactgtagggtgggaaagactaagcaaactaaagcactccaggaagaggccctagaacagaatggacaataaagccttttcatttgagaaacataatcattgaacaattacagagaattctgagcacatagccctgtgctagatacttactgagtatacaaagaggtgaagtataaagctcatgccttcaagaagcttttgagtcctggattcaggaagtagtcataaatatgtaaatagtgtctgaaagtgataaagtagttcaagagtaagagattgctgtgagttcagatgtttggggaaataacatcagaagtataccttgaaagatatgttagcagttaagtaaatgaaggagggagactccaaggagaattagcattaacaaaggggagtgcttctttggggtaatatgcatagtgctttggggaaatgataaatagactgagttggaaggaagagaaagtttgtgtattaaatggtagataatatgattggagaagtaaatttggactaaaagtggagtacttaaaagctaaggattttggactataccctttaaagtgatacgaagagaatgtgacataggcaaatgattaaggaagattaatatagaagttaatggccggatgtggtggctcacgcctataatcccagcactttgggaggccaaggcgaatagatcacctgaggtcagaagtttgagaccagcctgaccaacatggtgaaaccccatatctactaaaaatacaaagttaactgggtgtggtggcacaaactccgttttaaaaaaaaaaaattcagagtatgtagactctggaggaagtctggg

SEQ ID NO: 75243 - DNA, 1120 bp, Homo sapiens
ttattttctattctcacaaccatccttgtcagatgagtggtggcatctcattttacaggtgaggcagtagaccctgttactactattagacagtgttccttttgcagaagaatgagcacctgctatgtgggcgttatataatacgtatttaagtttttatgtgcaaattataataaaagcagcaaaagttatgcaactaattttgctgtcttggtttttggaaatacccaactaaggcagagttgtggttttcattgttgaaagggtagcaatgtccaagaaatttattgtggtaaaggatcttggagatcatttagttcaacctattcatgatacaggttattcttttgtctaagagtaccctttgggaatgatcagacacttttctgttgattttttggagaaatatgggagaaacagtggaatatttttatgacatttttaggaaatcacctggcttggttggtagtcccacactgactttccttatgataattctacagatggaggtgacacgagcagtgatgaggataaagaagaacatgaaactcctgtggaagtagaactcatgactcaggttgaccaagaggatatcactcttcagagtggcagagatgaactaaatgaggagctcattcaggaagaaagctctgaagacgaaggagaatatgaagaggttagaaaagatcaggattctgttggtgaaatgaaggatgaaggggaagagacattaaattatcctgatactaccattgacttgtctcaccttcaaccccaaaggtaattaaaaaataaaattttacatattattgtgtaagctgagaatgatgatgaggtaatccttacaaagataataccaagattgacatcagtacttttacactccattgtcttaatactttttcaacatttgattgggtctctctgcaaagaaattcccaggaccagggtagaaaaatacagtgcatatagagtggccaaactagatccaaatagaaacaagtaaatggttataaatgctaaaaacataacaaaggcaattccatcaaagaaatgtgttttagtctatataatgttttgcagatcatcaggtgaatagtccatagttataaatgcataa

SEQ ID NO: 75244 - DNA, 1949 bp, Homo sapiens
cttagttttctcattacatctcatgctggaagagatgagtggaccagttctggctgtcgtccatggcatttgaaaattattgccgggcatagtggctcacgcctgtaatcccagcactttgggaggccgaggcaggcggatcatgaggttaggagttcaagaccagcctggccaacatagtgaaaccccgtctctactaaaaatacaaaaatcagctgggcatggtggtgcgtgcctgtagtcccagctactcaggaggctgaggcaggagaatcacttcaaccaaggaggtggaggttacagtgagccgagattgtgccactgcacttcagcttgggcaacagagtgagacttcatctcaaaaaaaaaaaaaaagaaagaaaattattgatgtagtggattctttgtttttttctttgttacttccaaaggcttatctgtcattaaaggggtatctttccctttagtattgagaatttgtacgaaattataaacttttcagaagacagtgtggcttacttgactctgactttactttctcctcaagtggaaaaagaaaactagagtatttttttaaataagaatataatgtattattgtgttcttcaggtatctaaaacagcaccaactggagaatatttgacaacaggaagcttcatgataagaggtaatgtcttgacaggaaaaatatcactagacttgtcaatggattatggagacaggtttgagacagtttacaaatactcttagaacaaaaacaaattactcggatttcctatgtgaagtctgctatgaagtaaagaaatttttgccttggtgtgacaagtttagtgtttgtcatatcttcttcatgtatatttttattgagggcagtgcactttcacatagtttagttataagggtaagaaaggatagcctgaacttatttctgaaaatagaatattcagggtctgactgacccagaatatcagagcaagtgtgtatattttttacttcttaataactgttcctatacatactgcccagttctataaatgggaaatgttattcttgacatagtaaaagacaaaatggatatgaccattagtgtcatctgacactaatttttttttgttttacaagcaaaaaatggagaagactgattttcaaagcattaatgtacgttatcttttgtaggaaaaaagaattttcttcctccctcatatctaatgatggggtttagcttcctttttaaggtactcttcaacttcttggttatttatttgtttttttcctgattttcattagtcttgtctgaagctccgtcactgaaaaataactgtttctttaggtagatgagtcttgtgtttggagacatcagggtgaacgaaaagtcagagtacaggatgaagacatggagacactggcaagttgtacaagtgaactcatatcagaagaaatggaacaattaggtagtttatagattttaagaaattagcttgtgatgttttttgttacctagttttgcttctaaatccttagaagatcatgtctctttgggataatctaaatttcaaaaaaaccccgaaaacccaaagtacgtgctgttttactgaatttttttttttttggaaatgctaaatatacttattctagtgaatttaaaagtatttatcagtccgggcattgtggctcatgtctgtaatcccagcacttttgggagtccgaggcaggtggattgctagagctcaggagtttgagaccagcctgggcaacatggcaaaaccatctctaccaaaaaaatcacccaggcgttgtgagcgcctatagtcccagctactgaagaggctgaggtaggaggattgcttgaacctgggaggcagaggttacagtgagcctagatcacgccactgccactgcactccagcctgggccacagaatgagaccctgtctcaaaaaaaaaaaaaaa

SEQ ID NO: 75245 - DNA, 1038 bp, Homo sapiens
aaatagtaactttttataatggtgaagtaaaaatgtattagtatttaagatatgtgattgaccggccgggttcggtggctcatgcctgtagttccagcactctgggaggccgaggtgggtggatcatgaggtcaggagttcaagaccagcctgaccaagatggtgaaaccccatctctactaaagatacaaaaatttagccgggcatggtggcgggcgctggtaattgcagctactcgggaggctgaggcagagaattgcttgaacccgggaggcggaggttgcagtgagctgagattgcgccattgcactccagccagaacaacagagcgaaactccatctcaaaaaaaaaaaaaaaaaaaaaaatatatatatatatatatatatatacacatatcattgaccctgtcatgcggcatgtgattttcatatcttgctctggagaaagtccatactttggtattgaaacattatgcattgttattctaggagaacccatccccccacggaccttgactgaagctggcacaatggcactttgctacagtgctgcttgggatgcacgagttatcactagtgcttggtgggtgtaccatcatcaggtaataagggctcttgtcctttttcttaatttactaagagctactgtgtgccaaattttgagagtatagaagtaaataaagcagacaaggctcaatagagctaactctttttggtagaggaaaatatgtacataatgtcaggtaataagtgccataaaatagtgtttttaaaagcatggaaggggatagagagtgataggggataccgttttggatgaagtattgggggaacctttctaggaaggtaggatttgagcagagaggtaaatgaagagagagtgatccacacaattatacaggataaagagtgttccagttattattgattattattggcatactgacctaaaaggcctttcttctgttcatctttgttggaatattctgaattctcttgggcacttccagaaaagtaggcatatcctgtttgtttttt

SEQ ID NO: 75246 - DNA, 1094 bp, Homo sapiens
ttttgagaaaagttgtaattttatcctcctaaggacaatttttggtcttttgtatttaaaaaaatgtaaagaatatcatattaaagattaattacgttcatttattgagagcagagtgggaaaacaacatttctttcttattagtggtctaaagcctattcagtgcctcactaaaagaaagctaaacctaaggaccatatgacattttatacttttgctttatgaaatttattgttagaagttgagtttaagaaggctatatggagtaaggagataacttttttaaacatagaatttaatttcttttttctaagactgtctaaagaatatcctagggcaatttgtattataggtttttagtaaaattaagcttgatgccttaaaaaaattaaaccatcaacttgtcttaaatagcttcctgttttgttttgtttgcaaaaagggtatgaattcaggcagctataaagaaaagttaactttttttctttcattttgataggtttgagaaatttctgtggttcattagctcagagaactatctaattataggtggacgagatcagcaacagaatgaaataattgtgaaaagatacttgacaccaggtaggtaagattaaaattcggaaaaattttctcttgaatgtttggatcagttatctcaatattaggcattgattttcttgttatactcttctgtttgatagatttaactagtagaaagatttgatgcatgatgcttcatggtttgttgcatatgtgttttgatgcttttagttcttaagtgaatattcctaaaatggtattgctgagctaatctgcagtgttggactttcagtacattacattaacagaataactttcagtcttcaaagttattgtaggtcaaatttttaaaagcttactgtagtggtgttaaagtttgcaatcatttttcacacctagaagtaggacttggccgggcgtggtggctcacgcctgtaatctcagccactttgggaggctgaggcaggtggatcacctgaggtcaggagttcaagaacagcctggccaacatggtgaaaccctgtctccactaaaaataccaaaaaaattag

SEQ ID NO: 75247 - DNA, 1402 bp, Homo sapiens
tgggggctttgtccatcttgttcactcttatatctctaatggcatctagcctagaaccaagcatatgataggtactcagtatctagaaaatgacaaggtatttattactttgtaggtcttgggcaaatattttcatgtagtaattctttagtttagattattttaatacttcaggcaaaaatattttcatttcttcattactttcaagtatgcgtatttgtgtgtgtgtgtgtttgtgtgtgtgtgtgtagattgtgccattttgtgacatttaaaaaaattcttgccccattatttactttggtgttatttaaatacattcttaacaaattgtttttaaaactcttttctataaataggcattcaagtcagcagaaaagaaaacaaagcaaacattaaaagaagttcagactgttacctctattcaaaaagcaagaaaagtatattggtaagtgttctgtctctttcaaatacagtttttgtttttattaaaattatccatgcacattgtttagaaaagtcaaacagttctacaaagcttgttacaaaaccagtagctctgcaattttttgttggtttgtttgagacaggttctctgtcacccagggtggaatacagtggcatgaacatggctcactgtagcattgacctcctgggctctgacagttctcccacctcagcctcccaagtagctgagactacaggcacatgccactgtgcccagctaattttttaattttttgtagaggcagggtctcactttgttgcccaggctggtctcaaacttctaggctcaagagatcctcctgcctcagcctcagtgctggattacaggcatacgcttctgcactcagctagttctccagttcctcacctttactcctattgcctgctctccgaaggaaaccacttttagctcttttagttgattcttttgatatttgcctttatttatcttagtaatatgtttatattgctacttcttaatttttctgttttatattcttactaacttcccactgggaaagatgaggatttccctctttccacttgtgttccattacatacacacacagttacagcataattttgtcaagattaatagcattggcatcattataaatatttaaattgtagtcatataatttatatgtcatagctgacccacatagaattctgttttctttttccttccttgctcagttttaaaaatcttccctggagttattaattgtcatttcatttgctttttatttttgttcttatcactaatttatctaaataatatcttccaagtgtgttcagacacattggaattcaatcagtatcatcttgcagaggtcagaagtctctcctggagctttttgacttacttaattttatattggttctctctaagcat

SEQ ID NO: 75248 - DNA, 2135 bp, Homo sapiens
ctctttgggaattcattccctgccaggtgcagtggctcaggcctgtaatcccagcactctgggaggccaaggtgggaggattgagctcagacattggagagcagcctgggcaacatagcgggacccggtctctattatttaaaaaaaaataaagaattcgttctcccaaactttacttttgtgccataggaaaaaatgtcttgatttctgcctgtttgaataatgccaagggtattaggggtatatcttatatacacagtaacctgtaatcaaaatacctttctatataaggagtgggagttaggaagacaggagaagtaattttggggcatggaacgcattgtagtgggataggcctagggtggtagactatgggaacttcagctagctagataacagcatagatggggtcaggatagtgagtgttgggaagtaagagagggatgtcatgaggtaggagaaatctaatttttaaaaaatctgttttgccaataaaaggaaaagcaagcattgaagaaattagataatgttcgaaaggatcacgaaaacagattggaagctcttcagcaggctcaggtattatgtttggctttctcagtgctttttcaaaaatgttaactttaactggcaatgtagtaaatgtgtgtggtttgttttttaaggaaatagacaaactgaaaggagagctcatagaaatgaacctacaaatagttgacagagccattcaggtagttcgaagtgctttagctaaccagatagattggacagaaattgggttaattgtgaaagaagcccaggctcaaggagaccctgttgcaagtgcaatcaaagaattaaaactacaaacaaaccatgttacaatgctgctaaggtaagtttgactcttagtcaagcagttaatgcttgtctttattttgttattttaattgttcactgtattaaacattttttcttcatattttgaaattctcaaagaaagggaaaaaactaatttagattaaaataaataatgaaacttccagtactgtaaaccatttataattttattgaagaagaaaattgaaaataaaagtgatgtcattgacgttagtgaaatgctattgaatatttttaatagaaatccatacttgttatcagaggaggaagatgatgatgttgatggtgacgtcaatgttgagaaaaatgaaactgaaccaccaaaaggaaaaaagaaaaaacaaaagaataaacagctgcagaagcctcagaaaaataagcccttacttgtagatgttgatctcagcttgtcagcatatgccaatgccaaaaagtaagtcatttaactttacattttaggccaagtgttatctgcaataaattaaggaattaaggacattttaaaaaattttaaatttcacttgtacatgcatactttttttgggtgaaaatacttttttaaatttagttttgttaattatacagtttgttctgatttgttctgtataatttgagaatttgtcaagttagaactaagtagaaaactgaagaataaatattatacttaaaatttaagagaaatatgtttttctaggtattatgatcacaagagatatgctgctaagaaaacacaaaagactgttgaagctgctgagaaggtactgagtatttcttagagtgaatgttagttgtttgtgcctgcgtaatttaatggacataattatttcttctgtttaaatgaggttttctaattcagaagtatctttcaaacttaactttgctttaaatatatgtatttccagtattttttccccccaggactgctcctcccctattcttcctcatctcagtaaataacaccttcatttttctgttcactcaggttaaaaatgtttgtgatatcctggactcttttcccataaatcatgcaatccatcagtaaatcctttggttctttctttaaagtacagccagaatctggctactactcattatttccactgatcagtcccctatcacctctgtgttcacatggactatgacaagtagcctcttattggatctctctcctcctcctcttttcccactacagtctgttctccacatagcagccattgtgacccttttttttttttgcgatggagtttcactcttattgc

SEQ ID NO: 75249 - DNA, 1019 bp, Homo sapiens
tatgtattattaaaaacacatattaaaccagctagtctttagcggcttgatgggtagatgatataggaaagggtagcctttcagaaagagtgtaagaagtagtatgggaactctctgacctgcctctttatttatgataaaggtttatgaagaaggtccatgggggattttattgttgaaaagtatgtcctcatttgtttcatgagtatttcagatattctgtaaaaaaaggaaaatacggtgggaacgtgaggcctgttatttacaccttaatgtggtttgctcagaacaacccaaagcttctcaaacattgctgttaaggagatactgttttagggagattttaaataggccagaggaggggatattgtttatcattaaactgtttcttttttaaatggactttaaagccaagtcttaatatgttttctgtgtatcatgactccaaaagaagtgatatacagtattttcccagcacatttgaccatgtttttagagcatttgctgcagaacagtttcataaattgttaatagtcactcttgatttgaaggggatttgattttttcaaaaacagtcttaaaatatgtgtgcaaaaatttcaaattatttgaggctgggcgcggtggcgcacgcctgtaaatcccagcactttgggaggccgaggcgggcagatcacttgaggtcaggagttcaagaacagcctggccagcatggtgaaaacctgtctctgctggaaatacaaaaattaatggggtgtggtatgggtgtccagctactcaggagcctgaggcacaaaaattgtttgaccctgggaggcggaggttgcaatgagctgagactgtgccactgcactccagcctgggtgacagagtgagactctgccttaaagaaaaaaaaatcaaattgtttgaatccctgtaccacttcctcttcagtttttaaaaattagttaatcatagcacaatttcaaagcaggtaggccagtcagatgaattatatacatcatgtaattaccaca

SEQ ID NO: 75250 - DNA, 1023 bp, Homo sapiens
tgttttgtttttgtttgtttttataaaatgactctgatgtttatatggagcaaaagcatgtgaaaatgttcaggataactctggaaaatactagtaatgatttattactgtctgtgtaacccttcacagattaaaatatgaagctatagtaattaaaactgtaagtttttggagaaggaatagcataaagattccaaaaataatttgaaataatatgggaatttagtttatgaacaaagttcctttcaggtcatggagggaaaggtggatgattcaataaaagctacttggacaacaggctgttcaaaatgaaaccatatatccacatatactggttataaacatgaaatcactatctctaattttcttgaacgcaacattattttgtaagcactttcctgtttttctacatagttgtttagccacggttaattgacacttgattggcactccttttttcctttttttcccccaccattagatattgaaaaagtacttgtttctctgcagaaagcagaagactatatgaaaacaacatccaacttcagtgggaaggtagcaccatgtatacttactatatattgttgtgatttatttgggttttcagaaattaaacgttcattaaaggatcattatatatacattttattttaatttggaaaattgttatctgtaatatgcttattccaggatagtttttttgttttgttttttgagacagtcttgctctgttacccaggctggagtgcagtggcatgatcttggctcattgcaacctctgcttccctggttgaagtgattctcctgtctcagcctcccgagtagctgggactacaggcacgtgccaccatgcctggacagtttttatattttcagtagagatgaggtttcaccgtgttggccaggctggtctcgaactcctgacctcaagtgatccgcctgccttggcctcccaaagtgctgggattatagacatgggccactgcacccggcccaggatagtgttttaaaagtttttgttgg

SEQ ID NO: 75251 - DNA, 1023 bp, Homo sapiens
aggaggcggagcttgtagcgagccgagatcgtgccactgtactgcagcctgggcgacagagcaagatgccgtctcaaaaaaaaaaaaaaaaaccaaacaaaaaaaaagttgttcgatgcttaattaggtaaaccattttggatattaagatatggcatgaaaatttacaaacatttaacttttacagaaaaatgtcatttttatgtcatttatatgtgggcacattgctgacaatatgccttggtcgaaaaaatactggtttatcttagaaaactgccattcaagaacctgttaatcttgggtaaatatcttttatgatccattttctcacaacagaagaatgaattcctgttacgtttcagattattgtaaagatcaggtgaactgatacagatgaaagtagtattaatatgaagattgctgtaaggtttatttaagatatgatagaggcatgtccgttttgtttcacaggttgactgaaatagtagccagcgcacctaagggtgaactactgaagagggtgcttaacccattacttcgtgagtattcctgcaaatagcagtgaaatgtttgcaaggcagtgtggttttcaggaatatattgaaatcttttatggttttattagaaaatttgaacaagtgatccttggagtaagtaggagtttattgtcaaagaaagagaagttaaaccacatgaagtttgagctttatctattagattttatttaaaagcaatgcagattgtgttatctagtacttcagtgctaatggtagtattctaagaaatcagattttttcattgtgagtctttgatttaataaccacttagcttagtttttttttggttttttttttttttttttaattggtgggtctcagggcatcccagcatctgacaggtccttttgatcccaataagcatttttgatcccaatacacttttatacttgagaagatcatcacttagccctatattaaggaatctagagaagacggggaggcaggtaccattgattactgagca

SEQ ID NO: 75252 - DNA, 1078 bp, Homo sapiens
tttgggaggccaaggcaggaggattgcttgtgcccaggagtttgagattagcctgggcaacatagtgagaccctgtctctacaaataatgaaaaaattagctggggatagtggcatgtgcctgtggtcccaatcctcaggaggctgatgcaggaggatcacctgagccagggaagtcgaggctgcagcgagccatgatcacaccactgggctccagtttgggtgacagagtgagaccctgtcttaaaaaaatgcaaataaaacactgtttcagagttagtgtttataataaaatgttttccctctgattatcatctgcaatctattactttatgactatactgttattcacaacgttttaaatattcctgatgataatgaaaagaagcttatttataaaccaataccaaatggttaggaattcacttttactaaatgaatgcctttttctttctcttgctagtgccgaaaacatttgaagagtcggagattagtcagtgcaaaacagcttggtgtggatagaattgtagattttcaatttggaagtgatgaagctgcttaccatttaatcattgagctctatgatagggtaagttaaatttgtgggatatggtgaaggaaaatttcttattaatcattttgtaatagtgctatataacatgagtgggggaacattttttttctgtgtcaaaggttgttactaccctaggaaatgggtgccacacaaataaaataaaattttccagtaataaccttcattttatctgtaggtctgagtttaggcagactttagccatttagaatagccttatgaatgtaggagatgaagatctgagaagtaaattatttggtacttgacatttcaggactaatatgcaaccagaaaatagtcaaatacggtcatgcactgatgcgctgtatgtatagtgatgtttcagtcaacaacagactgcatataaacgttggtcctgtaacattgtaatggatctaataaattcttactgcttagtgacatcttgatcctgactctgtgtaggcctaggctggtgtgtgagtttgtgtgttagtttttaacaaaa

SEQ ID NO: 75253 - DNA, 1212 bp, Homo sapiens
atatgaaataactgttttggagggcttactgttaaattcaggcattttagggccagtggaaactggttaagcattcacatcagtcttaacattaatctgataatctactgggagtttaaagactctaagcactaaacacagattttcctcactgtctataaaatgaaagaggaaagaagcattgtactaaattttttataaagctaattgtattcccttttttttttttgaggtagttcattgcattttgaacaaggataactgtcagaaaagatcctctttgaataaaacaggtatctcccccatggctgcttctgggtctgccctctgcaaccacatggaataggtctgattccggttcttcaggacaacttttcaagaattaaaaaatcacctccaaatgaatgcatttttacaaaatgaaaataggtagagatgctattttaaaaaaaaaaaaactttaccttctcaccaaccttaaaataagaagcaaaataattttggtatatctttttttttttttttttgagacagagtcttgctctgtctcccaggctggagttccggggagcgatctctgctcactgcaacctctgcctcccgggttcaagcgcttcacctgcctcaagcctcccgagtagctgggattacaggcacacaccagcatgcccggctaatttttgtatctcttgtttttcactaaatggatccctgaattggacccagaatgacttagctatggatgtaagaactgcttttgagtagctgcctccattagccctggggttcctacttcctgagtaccatgacctctgggataactcagctttgtggaactgaggtgcaataggcagcataatgaccccctccccaaagatatctatgtgctaactaaccaaggaatgtggacagccccctgaagctggaaaaggcaaggaaagggattctcttcaagagtttccagaaggaatgcagccctcttcaccaatttggtacttctgatctccagaactcttaaataataaatttggccgcatgtagtggctcacacctgtaattcccagcactttgagaggccaaggaaggtggattgcttgagctcaggatttggagaccagcctgcacaaaatggtgaaaccctgtctctacaaaaaatatgaaaattaaccatgtgtggtagtatgtgcctgtagtctcagctaccagggaggc

SEQ ID NO: 75254 - DNA, 3213 bp, Homo sapiens
tgcaggcagcgcaccgagttcccgcgaggatccatgacctgacggggccccggagccgcgctgcctctcgggtgtcctgggtcggtggggagcccagtgctcgcaggccggcgggcgggccggagggctgcagtctccctcgcggtgagaggaaggcggaggagcgggaaccgcggcggcgctcgcgcggcgcctgcggggggaagggcagttccgggccgggccgcgcctcagcagggcggcggctcccagcgcagtctcagggcccgggtggcggcggcgactggagaaatcaagttgtgcggtcggtgatgcccgagtgagcggggggcctgggcctctgcccttaggaggcaactcccacgcaggccgcaaaggcgctctcgcggccgagaggcttcgtttcggtttcgcggcggcggcggcgttgttggctgaggggacccgggacacctgaatgcccccggccccggctcctccgacgcgatggggaaggtgctatccaaaatcttcgggaacaaggaaatgcggatcctcatgttgggcctggacgcggccggcaagacaacaatcctgtacaagttgaagctgggccagtcggtgaccaccattcccactgtgggtttcaacgtggagacggtgacttacaaaaatgtcaagttcaacgtatgggatgtgggcggccaggacaagatccggccgctctggcggcattactacactgggacccaaggtctcatcttcgtagtggactgcgccgaccgcgaccgcatcgatgaggctcgccaggagctgcaccgcattatcaatgaccgggagatgagggacgccataatcctcatcttcgccaacaagcaggacctgcccgatgccatgaaaccccacgagatccaggagaaactgggcctgacccggattcgggacaggaactggtatgtgcagccctcctgtgccacctcaggggacggactctatgaggggctcacatggttaacctctaactacaaatcttaatgagcattctccacccatcccctggaaggagagaaatcaaaaacccattcataggattatcgccaccatcacctctttcaattgccactttctcttcttttgaatttgaactctggagttactgttctacagtttggcggggacggggcttgggggttttctcttttgtttgtttccctttctttttccttttttttttttttttttttttgttggctttgcgttaggatgctctgatctgacatttgacatgaacacaaagttgctagatgctcttgttgacttccagcagatgggatgggggaaacacagcagttcttggtaaagtcctttgtaataatagtttgatttttttatttcgagagaatctttcattttcctatgtatgcttttttccttttttgcccagtttccttatcacttgctgtagatggcttattttgcattcatgcagactatgttgcaagtctgtttcatctagtaaactgaaaattattgcttaatcaaactgccgtttgtcttttatatttaaggccttccccccccttccttatgagttctaacttagtaatttcaaatgtgaccttttatatctaagaccagtatagtaaacttagcccacagtggcaaataatgagtaatattgtaatatgttccagttgcacctcagtatgttaaacaggtaatgtaagaagttctctgaaatgtcagcaagtaagttctgaaacacatcatgcatgagtaggaataaaacccaagttccccataacgtagataacttaatgctgcataaaaatatgaaagtgtaacccatgaaggacactttttctttccactgcaaagttagccactttgctgtttttcctcttttttaaactttgaaaatagactctttccagaaattggagcaataatggtgttaccacacacagattaaataatttgtagatattttaagtgacttttgggcaaaactggaatgtatacttttaccttgtttcaaacacctaagaccagtaatttaaaaattactaaaaggtttactttgttcattaataaaacatttaacaattcaaattatatgcaccttttacctagttgaaaaaaatacacattcctgttttcacattatagcaactgattaagctgaagctgtaagtcattttttatagatgagtgatccgcatctccatcaattagaacactggaaaagatgttttataaaagaggtatttaattttgtttgtaggattaactcatgcaaataataaaaaagatatcctgttggttcaatagtacactgtctcctttaaggaaggaagcgtgatgaatgaatgatgtgtagacttgagggatgactattaaaggggacgtaggatgaagagaaagaacctacagatgacaatgaatgtaaacttatttttcttcatgtgtaagcagtgtgctcgctggtgatatccagatcctaacaagattacttggttagctggttaggaccagtaactggattgcgaccactatgataatattttgaaccaaatgttaatgcttgatgcagaattgtaaagcagcatctggttcctatatagccttaaggattaattttagtgatcctcaaggaattaaatagggaatttcagaaatgtagactgcaaaggcagtatacaggaaaaggtggagtgggttttgtttatgagggtgtctgaaaactaaaattgagcgggatatcatggtatagttggacagtattggtccttcacactttggccatattgtataatggagcttttaccaaagatgtatgagaagtgtaagactataaaaaaatgaactattcaaagtaaaactcttaacaaacattttacttaaagcagatgcaaaagggtattctcatgtaggctcctgttggtgcagagggatttttttgatttcaggatacaactaaagtacgaagttctcagtttcactttagtagaaagagctctagaaatgaggctgataaacacatctaagaacactggttgctttctaaaatttccaaagctccaccataaatgtaatttttagtgtttcaaatgattgcattttaaagtatataaatatgggttatccaatatcaatgctatagtaacatcctgaaacaaaacaagcacaaaggtataaatgcctaaactggaggaaacttgaaaccctcatgtt

SEQ ID NO: 75255 - DNA, 1052 bp, Homo sapiens
caggcagcactgggactttgggcttccagggtgccaagttctcaccaagcctggcccctgggacagggctccctccaagcccgaacctcaggggaaggctcagcagtcacagcccaccagtgtcctctcagctgccaacgctgctcagagagggaagtgctgctgctgccgggaggggcacagccctgaagattacggaagacagtgggcagagaatgtggaaaatcacccagaggttgctgctcacacttcatgtcttcagagcatcacccctcattttatagctggagagatggggtgcacagccaaggaaagccaggaacaggttccggcttccatcactcagatactcaggaatccctgggtaccccacactgattcacactgcgctgagctgtccatggcacagaaccatttgtccactgatgcttcctccctccagggacactgtccatcttcaacaagggaggatcccagatactcaccatgggcattcattttataaaagtcccaactgtggctcaggggtcggtccttgcaccttattaggatttacctatgactttatctgcactcacataagcactagggggacaggaagctgttactgcagtcccgggggcctctctcccgatgcctccatttaaagactttgttctgtttgttcacagtgtagatctaccgacttttttgtgtgtctattttaactcacaaattccacggcctcctccttgaagacaagaacagcatcttctttgcatcttgccccatccttgcacttattgctcaggaatagttgattatccagttccataattaatctgtctttccttgagcacctacaatatgagttctaggttctacagggaatacaaaaatgagtagacatgaatggagagcagggcaaaagagtggagaaagtcagagtagtagcttatttcataaagtttggtaggaaacaggagagagactgggttgagaggattgtagaagtgcatggggagggaggttgtggttgaagataaacggaggtgactagcgggtggataatt

SEQ ID NO: 75256 - DNA, 1976 bp, Homo sapiens
tttgtatttttagtagagattgggtttcactaggttggccaggcttgtgtcgaactcctggcctcaagtgctctgccacctcagcctcccaaagtgctgggattacaggtgtgagccaccacacccggcctatgttgtgtcttttgaagcacatatattttaattttgataatgtccaatgcatctgttctttcttcagttgcttgttaggtgtcagcaaagaaccatctataaacatgcatggttgttcacttgaattgcatgtagccactgttatactaggcatactaggcattatgaggcatattaggcattattaaatacccagtaaatagtttgtggtaaatcaatcttttaagtttcctttttttttgttatagaaatttccatcgtgaagcctttaatcatcttacccaaggctctaacaacctgggtaaactaaagatgtgaatagagcatgtgaatacagcatgggaagattgtgttcacagatttttttttccggcacgtccttagagatccgatgtatagatgatgaccaccaggggctgtctgcaatacgaaaaattcctgcttgcctgcctgcctgccaatggccctgaatccagcttaggttacttagttcagcatcaagttcttcttaaatgttgggaatcagttattcaaataaaaattggtattgaggcgaggctgaaatctgccaaaaacagccaacatgatttgactggaccttttacaggaagctagagataaatttctgaagagaactatctgctattatataataatgttttaaattcaaactagtaaattttagtttgtcttcagagtttaaaaggttttcattttgtacataattatacaatatttatcatttgtattttccacttcatttcttttaaaatatctttaatactgaaatgttcttttaattttaaaaagaactgagatattgtcttgtatacttatattagccaaagttttcttttcctccaccatacatatctatgtgatttaatcagtaaattgtactgtaatgagttgctaagaagacaaatcagaagattggaggaacaaaagatatctttacagatttttcatttgagcatggagtgagaatagaaagaccagtttcaggcttatgcacttacgtggctcatgcactttatgtatatgttccaggaaaatctggcttaaaaatactggtattgtttacatgaagcagtgaaaggtttttgaataactacaaatgtagttctatatgtatataccaaatgaatttctgttctgtgtctctctgttttatgttatgaagccattcgctcatatacaataatctgtcaaggactttaatcatacttgttccaaagagtagtaaccggatggaattctggtatttataggcattggtgctagatggtacattttatgtgttaaaataaacattgtttttgagaccttgtgactgtgaatttcagaaatacctttgaagaaagtgaacatctaaacagttaacaggagcaaaagcagccctatttagagacattaaggatacaagtcaagaaatcagttcattcctttcaggtttatttcagtcttaaaagtttcctttgctggtttcccccccgccaagatactttgttcatactgtccttagcatttcattaagcagtttgcaaggcagtgtaacctaaatctgtggtgctttgtgaggtacagatagtgctagctgttattaatgatgtcttaggacaaatgaccactttttagcttgttttataacatgaaatttgtaaaaataagtttgaccttgactataatagtccacccaggttccttaaatgtcttttcaccctccagtttttatgccctcctgctttctctttttttttttttttttttgagacagggttttgttctgttgcccaggctggagtgcagtagtggcacaatcttggctcactgcaacctactct

SEQ ID NO: 75257 - DNA, 1856 bp, Homo sapiens
gaaatacaacaaggcagatgagtccataaaagataaatgcactcaattaagtagaatttatgtattttcccgcttcttggtgcatgttttaccctgtataacaatcacattttatgcaggttgcctcagtgacacctagggtttgagcctgtagaaagagggaagaattgtacttcatccttttttttttttgaaatagggtctcactctgtcatccaggctggagtacagtggtgcaatctcggcttgctgcagcctctgccttgcaggctcaagaagtgatcctcccacctcagcctcctgagtacctgggaccataggcatgcaccaccatgcccagctaatttttgtattttttttgttgttgttgagacagggttttgccatgttgtccaggctgattttgcactcctggactccagtgacctgcccacctcggcctcccaaattgttgggattacaggtgtgagctgctgcgcctggcctttcatctatttttgtatttccagcacctttggtatatgtgactagtgtaaggcagggagatgattagttttatgaattaaggatgctagattcaataagcccacactttttctatcatctttgctttgattatgtttgtggtaaagttttctgattatatgaattctagtcaaaagcaaataaaacttagggaacagaagtaggtgttaggactaaatctaagtaaaaaggcagcagcgggattattcagattaacatttatgtggcatggtgccacagatacaaaaaaaactgttttgtgctttaagggatctagtgttaactgaagctgttgtgcagttttaaaagtagaattttttggaggcagaaagattttgtgtttcctaaatatagaggcttttttttttttttcggccaaaaaaaaaaactcttattttttagttgatgtaactcacataccataaaattcacgcttttaaggtgtacaatttggtggtttttagtatattcacatagttgtgtaaattaccactttctaatttttaatgatttcaccccccagagaagcctcttacccattagcagtcactccctgttacccccgtccccagctgctggcagccactaatctctatggatttgcctattctgcacatgtcatatgtaacaagtcacatactgtgtggcctcttgtgactgtcttctttcactcagcacagtattctcgagccttatctacattgtagcacacattagcacttaactcctttttgtggctgaataatattcctttatgtggctgtaccacaccttatccatccattgatgagatgaataatgctgctatggacgttcatctacaaatttttgtgtgaacatgttttcagacctcttgagtatatacctagaggagaactgcaaggttatatgggaactctgtttaactttttgaagacttgccaaactgtgttcctaatctaccataccattatacgttctcactagcagtgtataagggttccagttttctccacatttttaccaacatttgttaattatacccatctcactgggtatgagatagtctctaaactgtggttttcatttctctaatgactaatgatgttgggtatcttttctgtatttagaagaaatgcttggcccattttcagattgacttatttgtctttttactttgagttgtgagagttccttatacattctgaatactaaacacttacagatgcattatttgtgaatattttctcccattctgtgggttgtcttttcattttctcaatagtgtgtcttgtattttcttaatttattattttcttatttttcttttgagacagagtctcgcactgtca

SEQ ID NO: 75258 - DNA, 1063 bp, Homo sapiens
gtgctgagcttaatttttcatatgtatacacccaagtaactacttaccaacataaagatagaggacattttcaggatcttggaaggtttgcacactgccctttcccaggcaatactcaaaaggtaaccactgaccaggcgcggtggctcacgcctgtaatcccagcactttgggaggccgagatgggcagatcatgaggtcaggagttcgagaccagcctggtcaacatggtgaaaccctttctttactaaaaatacaaaaattagctgggtgtggtgtcgtttgcctgtaatcccagctactcaggaggctgaggcaggagaatcacttgaacccagggaggtggaggttgcagtgagccaagatcgcaccactgcactccagcctgggtgacagagtgagactctcaaaaaaaaagtaaccagcattctgacttctgtcacccacaggtcagttcatattattgaatttgaagtatgtctcttttaaatttatagctccttcagctagattttgactttgaaaaaattcctttggaaaaacatgatgaagagtatcgaagtgaagatattcatattatatacatcagaaagaaaaaatcggtaaataacattctcagttcttcattctccaaggaggtttcatcagctggacactatttcagggcatatgtgtggtatgggcgttgattttgatgtggagaaacagctctaatgattcactggactcaggcagtaacttcattgtcaagataatttaatctatcttgccttgggtttttgctctaaagccaggctttttttttttttttttttttttttctcgtattttttaagtagagacacgtttcaccgtgttgcctagactggtgtcgaactcctgggctcaagtgatccgcccacttcggcctcccaaagttctgagattacaggcatcagccaccatacctggccaggcttcgcttttaaaggccttttccagcttctccataggcgtaaattgtatagctctataattgggtattacctcagacaagttattagctatttataagtttctttta

SEQ ID NO: 75259 - DNA, 1294 bp, Homo sapiens
tcatctgaatcctttttctggaaaccaaaatcagtacatggtttagttaacaggagcttacccaatcattagttacagaggggtttttgtttgtttgtttttgttttaagataggggtcttgctctgtcacacatgttgtagtgcagtggagtgatcatagctcactgtaacctcgagctcctgaggctcaagtaatcctcccattcagcctcctcaatagctgggactataggtgtgcaccagcatgctggctaatttttaaattttttgtaaggtgttgcggggggtggtttgtctctcgctgtattctccaggctggtcttcaactcctgctttcaagcgatctttccacctctgccttccaaagtgttgatattacaggtgtgagccactgcacctagcctagagctttaattacatgtgctttgttggattgattcaaagatggataaattgtaggggagctataaatacccctgtacctcctcaacctacttttagagtagaaaaatttttaaatcaaaaacaaaaaatatattcttttttaaatagtctttggagccattgctgaaaactctaaaagatatcagcggatttgaaacttgtattatatgttgttatgaacaacgaacaatggggaaaaatccagaaattgagaaaaaatattttgaggtaagtattaagtactctattatctttgtagtgatttcccttcaggggggctgtatgtgactcttcaagtatattatggtaattttgggtggggaaaacatgctgtttgtgtgaagctgaggaaaggatcttcacagcccatgattctacgaagctcccctttttcatcttttctgatactttatttcatttctaattagttgatctatggctacagaagaatgttaatacgggtgccactcctttttaagaacagttttcagtgtttattaaacatgatgctgcctttggggaacatctcaatgatgtatgtattacctttggagaatacgtgatagaaatgtgcaggtgataagttgtttttgttttgagacagggtttcaccctgtagcccatgccggagtgcagtggcacagtcagggctcactgcatcctcaacctcctgggctcaagtgatcctcctgcctcagtgtcacccccccccccccccgcccccaagtaagtgggactataggcatgtaccaccacacccggctaactttttgtatttttttgtagagatggggttttcccatgttgccaagtgataagtttttacttctgtgtttttctctacatatt

SEQ ID NO: 75260 - DNA, 1028 bp, Homo sapiens
gcccacgcgctgagccggcggtcggtgctggagctgggttcgggcaccggggccgtggggctcatggctgctaccctcgggtaagagctggcgggcgggcgggatgtgggggcgccttcttgctggggaaatccggattacaggctttcccccctgtgcctacacctcagtcgacgttattttatagggctgatgttgtagtcaccgatcttgaggaattgcaagacttgctgaagatgaatattaatatgaacaagcatcttgtcactggttctgttcaagccaaggtactgaaatggtttgtatggcctttcagcttgttttaagatattgatttgtagtttgttttgaattgcgtttcattaaaaggatggaaggggactttccggttctttataaaacaagagtattttgaattattaaaacaattgaaatatttgtttggcatttttaaggggggaagaaatagaaggctttccttctccacccgacttcatactgatggccgactgcatatactatgaagaggtaagtatccagtgagcgaagtctcttcacttagaagatgaaccttattccatgaattctaaagcacacgtttcttcacattttaacatctttgaatccgggatttgccttatagttgatgcagtaaagagaagataaaagtcaccagggaccatatgtatatacgctcatcattatcataccgacctggtgaagcatgttgagaaaagtgttatatgcattttactagaggcttctgtaaaaattttaaaggattttgccaattggatgttatgaaaagccaaaatcctctctttttcccttggttgttcccacggaacatgttaaccatgacattgagaattaagttataaataattcattgttcttttctttaaataccagtttgggccgggcgcggtggctcacgcctgtaatcccaacacttgggaggtcaaggcaggtggctcacctgaggtcgggagttcgagaccagcctgacctacatggcaaaaccctgt

SEQ ID NO: 75261 - DNA, 1022 bp, Homo sapiens
aataagaagatctagtaatgaagtataaaagaaatgctagtttacttcattcactaaatttttgttcaagtcttcttgtcttctgatagttgtcttctccttaacaaaaccccaacctttagccccaaaagatctttcagtggaaaaatatttgaatgttcaggggttataattttcatcttctacagctatgacttgaaaccctggctagtcaaaataacgcacaaggcatgacgtagaattttttgtattgcttgatcttctaatttatatgagtaaattatgggttttatatttatagataaagagaggagaaatcacttcaggtaagtgtacaaaggaataccactcatcttttaatgtaaaaaaattgttttccagataatttgcaaaattttataaaatttaaaggtttgcatttataaaatatgattgaattgtaaaaaatttatactcaatttatgtatactttaaggcactgcaggaaaggaaaaggaaaattttggacgaagctgtggaattaagtcaagatcactttaaaaaatacctagtaaaacttaagtcaatcaatccaccttgtgtgcctttttttggtaagttactaaatatggatatattttgagggtgagcgtgtgatagccaaaagagagcagtcttcagaggcatgttatctttattttatatctgagctcatctacttttattagctctctgtattaataaataataaaactctctattttctataaaatgaagactataatatctcatagggttgttataaataaggattaaaaatattttgtctgtactacctaataagtctagcacataggacgcactcatgaaatggtaactgttatttttatcataactatctatgtcacatctacagtgtttgctttctctttaatttattaaaagcttctatgtgatttttaaatttagaattaaaatattgttgtgtatgattgaaattgaatgatttaaatcaagttttgtcaacttcaacaattttggta

SEQ ID NO: 75262 - DNA, 1092 bp, Homo sapiens
taagttgagattgcgccactgcactccaacctgggccacagagcaagaccctgtctcaaaaaaaaaaaaaaaggaaaataatcagagagagaaatgtgaacagtgacaaaatacttcaagataacaatgtattaagaagttgtcagttttatgtgtgataatggtgttgtggttattactttaaagagtgttttaaaggtgcttaaatatgaatgaaatacgatgtctcggatttgtttcagaataacctaggaagtgacgggatggcatgagtagggttagagaaaataaaaattggccatgagttggtaactgttgaggctgggtgaaagttaaggattaaatgaagatttgcagtcatgtctgtcaagtaaaagacatttttctttatgtgttctttttccagggaaagctatgaaaaaatgggtagagtcaattgctaagatcatcaggaggaagaagcaagctcaggcaaacggagtaagccataatattacctttgaaagtccacctccaccaattgaatggcatatcagcaaaccaggacagtttgaaacatttgatctcatgacacttcatccaatagaaattgcacgtcagctgacacttttggagtctgatctttacaggtagacaattaatgttaatgtcttgctttatttttaagaatcttgaacattacctattttcaaaacattttgcacattattcatgagtgcttaaaaatacctcatctactctcatgggcttagaggaaaggtcatagcacagtttttaactagtctgccctgcaagtaaaagtcttatgtctagactggggactagcaatccattacaagaggaatggcaggaagattttcaagtccaccacccctcttcaactcctaataccttctcaccttggtttagtttgaggtcagtcagtcaagtcagttagtatggatgctaggcccttagcagctaagtgaatagaatattgtgtgagatgggttttcttttctcatttacagctcaggctgttgcgaagggtacaggccttgcatgtaacagctctctgtcgaaaaatgtcactatcattatcattccatcaaa

SEQ ID NO: 75263 - DNA, 1016 bp, Homo sapiens
tgccatctcagctcactgcaacctccgcctcccaggttcaagtgattcttctgcctcagcctcccaagtagctgggactacaggcacatgacatcacgcctggctaatttttgtatttttagtagagatggtatttcaccacattcaccacaagaccagcctggtgtcttgaactcctgacctcagatgatccacctgcctcagcttcccaaagtgctgggattacaggcatgagccaccatgcctggccagcatttttcatttttaaaaagctgaaataacatttggaatgttttttatagacagcaagaaactcacatatgtttagaccaatcatctgaggtctcagaactttgccttttcaagtttttgaggagaatatttcttttaaagaagtcgaaagttctttttaataaatttaagctatttaattttatctcattgcaaggttgccatttcttcaactgaataaaaatatgtgtaattttatgttttctttctttaatcttattcttttaatgattaacagctttcttataatatttacatcttctggaaatgtttttggtatatttctgaaatctgaaagagaggagttttctattttaagtttcagaatcatagcccaagaaatgaaaccctaggccatgaacatttaaacaaatgtgtcatcaaatgtatattattgaatcaagaacatttatgttttatctgacattatagggcattacaaatactataacaagtgtaacttatttcgtgttctacttgttctttaaggggaatattatttaaagttaagaatgttattcctttgtttctactttgagatgtttatgatacatttttatgtgtgccttgaaattgtcataatactacattttcaagttgtattctaggccagtgcaatggctcacacctagaatatcccagcactttgggaggcagaggcgggctgattgcttgagcccagaagtttgagaccagtctgggcaaaatggcaaaacccagtctct

SEQ ID NO: 75264 - DNA, 1609 bp, Homo sapiens
aaaattagccaggcgtggtggcaggcacctgtaatcccagctactcgggaggctgaggcaggagaatcacttaaacctgggagggggaggttgcagtgagccaagatcgtgccattgcattccagcctgggggacaagagctccaaaaaaaaaaaaaaaaaaaaaaaaaaaaaaaaaagattagcattgttatattattaggatagacttaataaatgtttaaaaatataatctatgaaagaaatttaggattttttgtaattttagttcttatagagccagtagtacttctctttcataataatgaaattgagggctgtattatttagtggcaaagttagaactaaatgctgtgcgtaaaagctactgtttggttatttaatattttactcacttgatttgagatggtttatgcttgaaaccatttgggttgctagctgttgaataagctatattgtttgttttttctagagatcctgtttgccctttttatagtcaccaattaagaagcaaacacctggctatcaaaaaaatgaatgaaattcagaaaaatatcgatggatgggaaggcaaagatattggacagtgttgtaatgaattcattatggagggaccattgacaagaatcggtgccaaacatgaacggcatatttttctgtttgatggcttaatgatcagttgtaaacctaatcatggccagactcggcttccaggttacagtagtgcagaatacaggttaaaagaaaaatttgtcatgaggaaaatacaaatttgtgataaagaagatacttgtgagcacaagcatgcatttgaattagtatccaaagatgagaacagcataatatttgctgctaagtctgctgaagaaaaaaacaactggatggcagcccttatttctcttcattatcgtagtactctagatcgaatgttagattcagtattattgaaagaagaaaatgagcaaccactgagattaccaagtcctgaagtatatcgttttgtagtaaaagactctgaggaaaacattgtttttgaagacaacttgcaaagtagaagtggcatccccattattaaaggaggaactgtagtgaaattaattgaaaggttaacatatcatatgtatgcaggtatgtgaaactcattacaactgctgacctagggcctgggacccaaaagctttttaaggatgctcaaaaatatttgaggcttggggaaaaaatggattgcctccaaaatataaaaatactgcaaaaacaaaaggaataaataagagaaggaattaaaggtctaaaaatgtaatattgttaacttcattaattattgaataaatattcataaaatatgcatattcatgaattttttttttttgagacagagtcttgctctgttgcccaggctggagtgcagtggcgctatctctgctcactgcaagctccacctcctgggttcacgccattctcctgcctcagcctcccgagtagctgggactataggcgcccgcaacaatgcccggctaattttttttttctttatttttagtagagatggggtttcaccgtgttagccaggatggtttcgatctcctgacctcgtgatccgcccacctcgg

SEQ ID NO: 75265 - DNA, 1609 bp, Homo sapiens
tactcggtgttaaatttcctgaagttgatcactatactgtgattctgtaaaagaaaatccttgttgtaagatgagctatgagaaatattaaaggagtaaaggagaatgatactatttgagagtaatttgtgatacatttgacttttccttatattccaaaaactactgcaaaaccattcagccgtagtcccccttcctctggaaggaactgagtggatagtatcacaactactaaaaaaacgatctgcacacactggcacacagaatgatgaagcatgtgacaaaatgttaaaaattggtgattcagagtattacaggagttatttgtgttacttttacaacttttctataaatttgatatttcaaaagaaaaaatttaagagggaaaaggcataatcagaaggcatcttcaagaggaagcatttcaactgtatcctagtggctaaattcaccgggtggataaggaggtcagagactgttgtgtagaaagcgaatgggggcatgaaagtacattacttgtttgcacatagttcagtacagtaatttttcttttctttttctttcttttttttttttggagacagaatctcgccttatcacccaggctggagtgcagtggtgctatcttggcttactgcaatctccacctcctaggttcaagtgattctcatgcctcagcctcctgagtagctgggattacaggcatgcaccaccacgtccagctaatttttttttgtattttttatttttattttcatttttttgcgggggacagagtctcactctgtcacccagactggagtgtaatggcacaatctcagctcactgtattctctacctcccatgcttaggtcatcctctcacctcagcctcccaaatagctgggactacatgtgcacatcaccacgcccggctaatttttgtattttttgtagagacaaggtttctccgtgtggtcaggctggtcttgaactcctgggctcaagtgatctgcccgccttggcctcccagtatgttgggattacaagtgtgagccaccttgcctggcccagtaatttctgtgtaagatgtttggaacacattcttttaagtatctgtagaatattagttggatattcattaatatgatgtttatcaaatctcactgctgaaaattcaagaaatatttagcaaattatcagattattatgccaaacagagccgttgtttaatatacttccattaccaggaaatcccactctaaatatcctcaattttgttctcctttacagcttataattattacatggttatttaaaaatgacacgtggaagagtttgagcagccttaagaccaagtagacaatgaaaatcatacctttttggtaggatatcactactggtgataatttagatatttggataaacaaaaacaagaataaaacagttctaattaagtgtttgatgtcatcaacattcatatttattaaagaaatattttagagtggagctgagaagactttctgtaagaaatctttaaagcagcaaaataagtgattttgccagtaactttcacctgtagaagtcagaataaccaagcacagatcttttttcaaactttctatgatatt

SEQ ID NO: 75266 - DNA, 1075 bp, Homo sapiens
actatcataagtagtcagaactttatgtttttcaaagtactgttctattttatttgacccttataacaatcctgagggatagaatgggcaaatattgtcatctctactttacttgtaaggagattgactttttttttttttttttaaatatagatgggggtcttgctatgttgttcaggttggtcttgaactcctgggcttaagcagtcttccttctcagccccccaaagtgctaagattacaggcttgagccactgtgcctagctggaaattaacatcttaatcaagttagttatagagcttaatcttgaatgtggcttcttttctaccacgttataattggattttgtctctagtggtatgaagaataaaaacctaataaatgctggcagctaatattatctttgtctttttgtgtcccatcagttttcattcctcaggaattaatttttatgggtctcttttcactggattagtgctgatatgacagaaaatgtctattttaatactaaagggtcagatggaagagtgaatcccttttttatctatctctgtatctactataattttttttagcattaagtaaaatataaacttttgagggaaagactatctaaaatcagagcatagtactctgcaaatattaaagaagtgaatgacttaaaaatgatcttaagttactccttttgcccctcatcctatgttttcaaaaagctcgcatttctggaaggcctaatatgtgccaggagcattttacagaaatcatctaatttaaccctaagaccctgatgagctgggtattagcagaccaaatgtgtgataacgggcaaattacttaactgctctatgcctctgtttcctcatttgtaaaatgaggatgatgatagtacctatctaataaggatattaggttattacatttcaagtgcttagaagagtgcctagaatataatgtgcccaatacatgttagttgttattattgtccttttcattcctaagccagggtcattcatctggcatgttgtaaaagggaaaaacagtttttcctctctaatctttttttttttttttttg

SEQ ID NO: 75267 - DNA, 1408 bp, Homo sapiens
ggaggctgaggcaggagaatcacttgaacttgggaggcggaggttgcagtgagctgagatcatgccactgtactccagcctgggtgagagagcaagactgtgtctcacaaaaaaaaaaaaaataaaaaataaagtatagtcaactttctttttcactttgatttatagctagttcttgcctgttggttgacctaagtccatggtagcatttctgaaagaagaagtggttgctacaacaatttaagcatctgtgagatgtttgggtttagcaaatgaacgtaatagcagtggtcattgtagtaaatgtgcatcagaaatgcatcgcactgatctatcgtgtgcctctaccatagtagcatttcacttttctccttttaaccctactcaaatatgtactgtcatccttataatatggcaaggaactaccatgttgaatacctactatttgctagatgtagtagtatgcattttatatacattaccacattgaattcttcttatcagctacattttactcataaggaatgtgactttcaaaagaataaatgtgttcataatcatagtcgagtagtggctgaactgggatttttggctcgggttattgttccccaaagacaggcttgctttttttttttttttttgctattatgtgtgtgtgtgtgtgtgtattacagtatacatatatacatatacatatgtattagtacatatttcaccattagttcatatctccagaaatatttattttgccatactcgattttatttgaatatttcccaccttcaacaactttttttccttttattctaggttttatcatataaatttacttataatacacacaactcattgtgtaatatttgtgtgtgcgtgtgtgtgtgtgtgtgtgtgtgtgtgtgtgtgtgtgtgtgatggagtctcgctctgtcgcccaggctggagtgcagtggtgtgatcatgactcaactgcagccttgacctcccaggctcaagcaattctcctgcctcagcctcccaaatagctgggattacaagcgcctaccatgacgcctggctaattttttgtatttttggtcgagacagggtttcaccatgttggccaggctggccttgaactcctgacctcaagtgatcctcctgccttggcctcccaaagtgctgggattacaacacccagccctgtttaataacgtatagatttcaagtactttgaggcagtttttataaaagtaaagaaaataaatttatacattattgatttctgtttctcaggttttgatggacatgtttgatcaggatgacataggtttggtttctctctgtgaagatgaacctagttcttctggtgaattaaactactatgatcttgtcagaactgaaatcgcagaagaaagacagtatctacggg

SEQ ID NO: 75268 - DNA, 1010 bp, Homo sapiens
tgccagctacttgggagactgaggtgggagggttgcttgaccccaggtctgcagtgagcctgggtgacagagtgagaccctgtctcaaaaaaagaaaagaaaggaaagcaatacttttttaaatttctttcaacaaatatttataggacacctactgtatgctaggtactattatttaccatatttcttatatccagtcagactggattattatttaggacagaaaatttagaaacaaaaacggctcatccctagaaggatgcagctgcttaaaaaaaaaaagaaagaaaaaaaaagaaaaaaaggtggggtgcttagcatagctggtggtgacagtgctattgtgaaagctgagtagcacctatttcacagagcacctctataatttgtaaaggagtatggtttttcagatgttacctttattactgggattcatgacctgcgtagacttcaagtaggtttattgacttcagggtatccacagttcctctgaaattgtatagaatagtttatgtgtatatgctttttggtgatagggaagagagggttcaatggctttccatagatttttcaaagggtccaaaaatgcttaagaaccactgctctgtgggttaagaaaagtttacagagaccaacaaatagtttttttcttcattttgtgttttatgtctgttttgagtaaccattatagtaaaatattatatataagattctctttgacttttgttcaatttatattattttgccattactttaactgataacttttttttaaaggttcaggaacaagtgcatcccactctctcagctaatgaagagtctctctattatattgaagagctgatttttcagctgcttaataaattatgcatggcccagccaaggactgttcaagatgtagaggtaaaaattattttgtcatttcaaaaagtcactcaaccactgtatgaattaatttttgtatctatatcattctaatttattgtgaaaactaaaaccactgaaattat

SEQ ID NO: 75269 - DNA, 1067 bp, Homo sapiens
tctagattcttaaggtgaaagaagaaaccataatggaaattagaaactatagtccaccattcttatccttgggttcttaatccatagattcagccaacctcagatcaacagtatttgggaaaataatggatggttgcatttgtactgaacacatacagacttttctcttgtcattatttcctaaacaatacaatataaccactattacatagcatttacattgtattaggtgttacaagtaacctatagatgatttaaagtatatgggaggatgtgtgtaggttgtatacagtgttacaccattatatataaaggacttgggcatccatggatttgggtatccacaggtgtcctggaactaatttcccacagacactgaaggatgactgtattttgaactggatgattacaaaaatattccatatgaaaatatgtgtgtttttacaaaagtagttttagagaaaacatacatattagaaaagaaaggttgacaaaaatgagcaaagtatccatctcaagaagttggcaaaagaacataaaaagcagaagaaataatgaagataaagcaaaaataaatgaaatataaaacaaacataaaataggatcataaaagccaaaagttggttctttaaaagattaataacattgataaacctctgagatgctgatcaagaaaagaacgaatacacaaataactaatattagaaatgaaagaagggatttttactataaatcctatagacttacaaaatatgaggctataatgcacaattttatgctatttttttttttttttgagatggagttgcccaggctggagtgcagtggtgcgatctctgctcactgcaacctctgcctcccaggttcaagcaatcctcctgcctcagcctccttagtagctgggattacagacacgtgccaccacacccagctaattttgtatttttagtttcaccatgttggccaggctggtctcaaacttctgacctcaggtgatccacccacctcggcctcccaaagtgctgggattacaggtgttagccaccgtgcctatgctaattttttaa

SEQ ID NO: 75270 - DNA, 1073 bp, Homo sapiens
tccattggtataccaagtgctaaagtattaaattgaccttacttccatgtgcagcccaattctgtaaggagagggaaagaaatgaaaagtgtgctgagtggtgaaaatgaactctggcctgaattaaaagcaaagggggaaatgcctagatagtaattagccctttgaccacagacaagtgtgagtgcagtaatcaggtaggcctatattgttggcaatgtgacgcaggtatatacccatttataactttctggtagcaaatagtatttgggtgtgtgttgcataacttgttcaataggtagctttgattctaataatcctttatgtccagaaacagatttatgttttctttttcttcaaatagagacagggttatgctatgttgcccaggctggtcttgaacttctggcctcaagcagtccgcccacctctgccttccaaactgttgggattacaggcataaaccacctcgcaccagacccagatttttttttttttttttcaagttaggctggagaagccaagattagcatccaatcctagtccattgctttggtgctattactttgcatttatattgtgcttgttttcctggaactcaggtgccttgtagatactatgttatattccacagttctagtatgttctttatgaaataaatacatctaagaaaatttggtcttttgaggtgaattcagaaaacattttctattaacttactgttgtgatagaattgaaatacatacgtatggaaaatttttttatatttttggaaaaattttggtaaaagtaattaagattatgtccacttttatggtatttaggacattgcaacttgtaggtctgtagtgcctgctaagagctgtagctcttagggagctaaaggttcactctttctttgcaggaagttttaaattctggtatgcatcagccaccttgtctttgtaaaatgagaatttctaccattttgggggagtctctgtcttcacattcagagcatctagaacttggcatccttcctctagctgaccagatcgttacaaagacaactaggatttgattggaatatctct

SEQ ID NO: 75271 - DNA, 1378 bp, Homo sapiens
acaaaacaaactcaaagcctttattatttccagtctctttgtaactgatgtggtatggtatcatcatgaaatctaaacagtggtacactgagtggttgtcctgttcttcaatctctgtggctgagaactgaaataacttagaagagacagatttttatgagagcagttttagaatcctgacactgatgtatagaactccaatttaaaaaagttatttatctattatatctctgatctttagtcacactaaggctctcaaaatgttggccaagattggtaatgattcatacgtacttgatttttcagggctcctataaacttgtatagggatatttttccatttttgataaatatctaactttgaggcattcacttttgtaaaccgcgaaagtgccttacattcacctcatgagtattttaagttgatgcccagtgctgtggtatatcctgtatatatgtgttttgtggtatctatcgaaattattcttataatttagaaagttagaaaatagaaattgtaaatgaaaatgtggcgacctgactgcagaactttgagtactgaaccacatttaggtgaggcattttcatccattctctctgatttgctctctcaggattcatcttctactgtgtatgtcttctttcctcttagctctccaaagctgtatgatggatgggtgagaaggatgtgcattttggttgataggaaaaatgtttctgttttcttccttttcccctcacttcaagcattgatgattacattgattgagctacctcatccattaatttgaaaggctacacttcatcagctcatgtttaagaagtagcacatcccaggtaaacagagtaggccattattcaactcttaggatgagtatattaaaagcattcagatatcaatgacagaagaaacaagccctaatgtttctttataacagctgattcctgcaagaaatgcaaacacaggatatttttctgttccattacaagattactaagagatggaaaatattatcattctgtattttgtcagtagtacgattgcatacatactaagttgtaaacattgaattacaaaaaatgattgtcctaattgaagcagtcctcaatccatttgagtctgtacaataccctgaaaaggaaacaacaggtgctggagaggatgtggagaaataggaacacttttacactgttggtgggactgtaaactagttcaaccattgtggaagtcagtgtggcgattcctcagggatctggaactagaaataccatttgacccagccatcccattactgggtatatacccaagggactataaatcatgctgctataaagacacatgcacacgtatgtttattgtggcactattcacaatagt

SEQ ID NO: 75272 - DNA, 1009 bp, Homo sapiens
aggcaggtagattgtagcccaggagtttgagaacagcctgggcaacatggcaaaaccctgtttctacacaaagttagctgggtctggtgcctctgtagttccagctcctcagtaggctgaggtgagaggatcacttgagcccaggaggtctaggctgcagtgagcttatgttcatgacactgcattccaggctggatgatagagcaagatcttgtctcaaaaaaaaaaaaaaaaaaaaaaaaaatccagcctgggcaacatagtgaatgaaaccccatctctacaaaaaatacaaaaattagctgggcatgatggtgtgtgcctgtagtcccagctacttgggggctgaggcaggaggatcgcttgagcccgggagatcaaggctacagtgagctgtgttcatgccactataccccagcctgggcaacaaagtgagtccctgactcaaaaaataaaaacaacaacaaaaaataaattccatgcttatttactttgcgaataaagaggcaaggtacagttttatctgtccgaatccctgacttttatttattttttttttcagacggagtttcactcttgttgcccaggcttgagtgcaatggtacgatcttggctcactgcaacctctgcctcccgggttccagcgattctcttgcctcaacctcctgagtagctgggattacaggcgcccaccaccatgcctggctaattttttgtatttttagtagagacggggttttgccatgttggccaggctggtctcgaattcctgacctcaggtgatccacctgcctcagcctcccaaaatgctgggattacaggtgcgagccatcatgctcagccctgaatccctgactttgttaatgacctgtccttaccaaccatgacctagagaagatttggctttttaagagttttggagaaagatggcataaaaatagattatttccttaaatcaattttttagcattacgctacctaagctcgtttggtctctcatagacaagaa

SEQ ID NO: 75273 - DNA, 1430 bp, Homo sapiens
tagaattttaagtaataaagattatcagtgtctttacagttgttcacacctataatcccatcattttgggaggctaaggtgggaggatcacttgaggccaggagtttgagaccagcctgggcaacgtagggaaaccttgtctctacaaaaaaaaattttctttaattagccaggcgaggttgtgtacacaacctgagcaacagatcaagactatctcaattaaaaaaaaaaagactctcattttattaacatgctgctaaatttatttttatgcttttcctatcatcttttgaaattgaagatgatcctgatattgaagggtaaactcttaaaaacaaactgcaaaacaagaacttgttgccatttgcaaatatttctctccataaattttaattgtgtgaattttaaaaacacaaaaataagtagaataggatacaggaatgcaactgacacataacctctgctttcattgatttgtattactcagatgaggcttattgttgccattgattgatttttataataaattcattctataaatttaaataaaaatatacctgttctaattaagtgtggatttacctactacctttggaaagagcagacattgataaataacttacttgtttttatgtatttctttgataagcgtttgttacactattgttacgtaataggttttaggctctaagctaacaatataggtttgacaggctacaactgacagcctttggttaaacataaactcattgggtttccatataattgtgcatttagaagaatactttattgctttaagactttttggaaacgctgacttgtaaagtatcctatgtctttgagtcagctgactcccatcttttacttttgcaggggcccagctggagtaagagcccaggccctggatagagatggaaatctggtagaagattttgtatttgatgcaggagttggggatattggaaatcgcattcttcatgtgagaaatgcaccttctcctgctgctacttcttccattgcaatttctggaatgattgcagatgaagtacaacaaagatttgaattataaataatgaaaggagctaggtatgcactgtaatcttcatgtcagcaacaagaatgtactaattgcattctttaatttaaaaaatggtttttaaactttagtttttaggtcaaagataaccactgcattgttaaaatgatgtaacatagaaataataattttctacaaaaattagccaggcatggtggcgcatgcctgtaatctcagctactcaggaggctgaggcaggagaatcaattgaaccgagcagacggaggtgagctgagagctgagattgcaccactgcactccagcctgggtgacagagcaagaaaataataataataataattttcaaaatgttaggctgggggccgtggccagc

SEQ ID NO: 75274 - DNA, 1112 bp, Homo sapiens
ataataatacttatttcagtttgaagtgttctgaggggaaagcatatgtaatcctacaaagaaaaaccctgaagttgccttaagtgcttgaaaagggaatgaaaaatttggtactttaaacatttcatgttaaaaacttgtttgaactaaaatgaaatcgtaggaaaaacatcattattatttatttatttatttgagacagggtctcactctgtcacccaggctggagtgcagtggtgtgatcacagctcaactgcagcctctaccgccattagctcaagggatcctcccacctctgccttccaagtagctgggactacagacactcagacactcaacaccacgcctgattgattttttttttctcgtatatatgggatttcaccatgttgcccaggctggtctcaaactcctgtgttcaagtgatccacctgctttggcctcccaaagttctaggattacaagcatgagcctctgtgcctggccagaaaaacattattattattttaaaatttggattgtagggttttcaatatgtggacaagagtataggggacattgagaacataatttttgtttgtaagaaaaataagtgtagacatttttaactgtggttaatcaattttaacctttatgtgcctagaaggagcaaagggaatgtactgactgattctctatacagcagagttttacattggacactcaacatcagtggctggtcctgatgttgaggggagaaatgctacttcgatgagttcagataaactataaatagtatacaaaataggccacataccagctgataaacatatgcgtctctaccccaagaagtttcagctttcagttccgtcccttctttttgtgttctatgtggtatatctgattctttaagattttttttttaatttttatgggtgcctagtaggtgtatatatttttggggtacataagatattttgctgcaggcatgtaatgcataataatcacattatggaaaattggttattcgtaccctcaagcatttatcctttgtcttataaacagttcaattacactcttagttatttttaaatatacaatcaaattattatttactatggtctccctgtcgt

SEQ ID NO: 75275 - DNA, 2077 bp, Homo sapiens
agaaagtttaggatggagcttcctggcacatgtagttgtaaaaatatatacatatgtgcatctaggctttgcagagtctcacttgaaaatcacaactaaagtttttttggttttttgttttgtaattttgagacaaggtctcactttgtcctcactgcagcctcaacctcctgggatcaatcagttctcccacttcagcctccaagtagctggaactacaggcagatgctaccatgcccagataatttttgtgttttctgtagagacagggtttcgccatgttacacagcctggtctcgaactcctgggctcaagcaatccacctgccttggcctcccaaagtgctgggattacaggcatgagccactacaccctgcctaaacaactaaagtattttacctctggctgactaaagaaatctagggtagatgtcccatttctttcataccctgccttttaggtgtgttgaaggcatctaatatttccattagaaagccttgatgttggcaggctttatagagttccagtttgaaaccagcactccttgggaatttgagtttagagggtgtttacctctgtatttttttttttttttgagtcaaagtttcactgttgcccaggctgaaatgcagtggcacaatcattggttactgcagcctcaaactcctgggcttaagcgagcctcccacttcagcctccctagtagctggaactacaggcacacaccaccatgcccagctctgtttacctcctgagctgatgaggttttcttctgatattggccaaaagttgattttcattgattcattgattgattggttgattgagagagggtctctctctgtcgcccaggctggagtgcagtggcacgatctcagctcactgcaacctctgcctcctgggttcaagcaattctcctgcctcagcctcttgattagctgggattacaggtgtgcaccaccacacctgtctaatttttgtatttttggtagagacagtgttttgccatgttggccaggctggtttcaaactcgtgacctcaagtattccgcccgccttgacctcccaaagtgttgggattacaggcgtgagccaccactcctggccttgattttcttttaatctgtagtttttctgactttgcctagatttttgtgatgacataaaaaaagaatctaataattataaaggtattttacgtaataaagaattcctttctctcataaagattttttttctctgttttcagtggcttgattaaactggcatcccagaatttttcctatggagttactgaaatgtataaagcatgttttcttggtgcaacagtgaagtatcttcaaaaattcatccctgaaattactatcagtgatatacttaggtaaggaaaagggataaggagtgtaaatacagtcctgacctatgtgaacttgagaggtgggtctgacttggtgattagtaagtaccatttcagagtcagtctgcatatgcactgaatttttgtttgctttctttcccaacatgttgttgaattccctttgcagtgcatttattgggcattgctacatcatggcccttagtgctggtccatttataattatctagactgccttacagctctaatctgaaatctctatgacagctttattgtgatgctaccttagcctttttgtctaactatcactcctgataaaaacaacttgcctgaatttttaaaaatctctctggccagttagtcttgtgattccaaagccttttggccttaattttgtataagattattgatcactatgttaactaattaggtaataagcacattaaaacattatattttgattgattcttaaaacttaaaaaaaaccttttaggtttggggtacatgtgaaggtttctacataggtaaacacatgtcatggggtttattgtacatattattttatcacccacatattaagcccagtacccaatagttatcttttctgcttctctccttcctccctccctccccacttaagtagactgcagtgtctgttgtttccttctttgtgttcatgtgttctcatcatttagctcccac

SEQ ID NO: 75276 - DNA, 1050 bp, Homo sapiens
atattctgctgattgggtaaatcctcatatttgtgattggtatattgaatttttaattaatccaaattaaaagctgtggggtgggtgggggagcaaaaaaaattggtggaggctgtctaaatgacatttgcttcctcatgcagcaaatagttaagaagctccctgctaggtcctaataaacagatttgtatgtatttgtatgtatgtatttgtgtgcatgcatgtataccttactaagtatccttgctaggttgaccattattatctttacagtacaaaatttaaggtgacatcctcttacatgccactatcctaagtttctagctgccacctaaatgctaaagaacatattttgctgatacctgtattgaatatcctcttttagaaaaaattctatttctgtacctttttttcttttctatcacctgtttttcccctcttgacctattctactccactttatacaaataactgttcttttattttgcactagggagaggaaattcgatgtcagtatgttgtgacatgtgcaggactttactcagaccgtatttcagagttgagtggctgcactcctgatcctcgaattgtaccattccggggagattacctgcttttgaagccagaaaaatgttatcttgtaaaaggaaatatttatccggtaggtaatgatgcttcctacttctcatttttttcaagcaggtggtggtcataaaggagatgaaaacaactttcacttgggtcagaaataagagaaattttgaaggaccgtttttgtaagcatttcatcggtttctcttgtggttaaatccctaaatctttatccctgtatcatggttattaaattgtaattaattgcctgcaggtacatgtctccagaaagcatgagtgcactctgggaagtgctatcaagaaggaactgaattctaccttctctctggtggagggaaagggaaaactttcccttatggaagtccctgatacccaacccttttcctcagttcactatctgtaggtacagaaaagggatgtggccactctgtagtttca

SEQ ID NO: 75277 - DNA, 1006 bp, Homo sapiens
tctgttgcccaggctggagcgcagtggcatcatctcggctcactgcaacctccgcctctggggttcaagcaattctcctgcctcagccttctgagtagctgggtctacaggtgcccgccaccacgttcggctaatttttgtatttttagtagagatgaggtttcaccataattggccaggctggtctcgaactcctgaccttgtgatccgcctgcctcagcctcccaaagtgctgggattataggcgtgagccactgcgcccggccgcaaaatgaaaatcttctaagggccaagcaggggaatatgttggggtgatggtcaggtggtgaatacaagagtgagatctttacaatagtattatatcagatattattttaaaaccaccacaacaataatgctgtgctggccaaatgagaggatggcagaatttattaatagcactcaccgtctggatgttatcctggataccaggctaccctcttggggaaattgattgggagaactgatatatacaaaaaaaggcaacagaaaatggtgctattaacaatgatcaccaaaatgtagtcagtacttagtgtgtgaaattctcctcttatccttttctttagaattagaaacggccaatgacacgttcaacatttattctaaaaaaataaaataagcatgtgttatataggtcattcatctacagattgatgaacattgatttggacatgtctttagggacaaaaacagaaacaaacaaaaaaatccaggctattaatttcttgtattacctgaagaaaaagtttgagttaaccacataaaatctccattccatatttgtagtctcaaagatagggtctgggcagcaagtcaaagcaatgctctggaaacattgtgagtagctagaacaactcttgagttcttactaagtatggacaacatagtatatactactgggaaaaatctcactagagcttatttaaaacataattgtttgatgatacgtaattcaactcagaat

SEQ ID NO: 75278 - DNA, 1276 bp, Homo sapiens
ttgtgaattctaatataccttcgaatatgcacctgtgttttcctttgcccctttctttaagtaaagaagaaactgtacctcagatatttttcccataaataaatagaaaagaaataaataagttgatgaattgactgttttccccctgcaacagaatgttttgtaaatactttataatatattccaaaaataaaagggattgttttgtcagttatgttccatcacattcagtaccagttgtctttctgatgtgctgatattttacattttcctgaagaaataagaaggccattctgttttgggggggaaaaaaagtaaagtccaagcaacttatgcttctctcctttctgggtttgagaatgtggtagtgatgagttgcttatggccaagatgcacatagagactatgataacagaagtggaaattgaagctacatttcatttttagggaaaatttgttttaataacattttcttaagacaacttttcttggtggaggaagaaaatagtcatgaagaaaggaagaattagatatgtgaagaaaaaataattttaaaaaattaacctcctttgggtcatacaatagttgatgattttccattgactttatctttcatcgctgatgatacattcacctctatccatgctccttacctttttttttttgaagcttatagtagctgttgaacaagaagaaattcccagacttcaggccctatatgagaaaggcctccagaatggtgtcccgggcctgaggctgatccagcaggaggatataaaaaagaaggagccatattgtagggtaagtgattaacaaagggatgtttttatttagggcttagtcctgagacatggaggctgagggtgagtgtataggaggcaggaataatataaaatcagttagataatcctgtcacagaagtagtgaagtgacagacacaagagggcattgtcacaaactctggacacctgatttctttctctgtgagaaaataccaggtctgaccaacatgaagacaagaggaggcctgagaccacatggcatgtttggaaaacactgagcagtgaggtgtggttgggagcattgggtatgtagggaaatataagagatgagactgaaaaggcagggttaggcccacataaagggtttggcattcatgttaataacattgaagtttatccagtaggcacggggagccattgaacatttttggaggagggcagctgtagtgtctgatctatacgataggcggataaggctggcatgagtttgatcc

SEQ ID NO: 75279 - DNA, 1869 bp, Homo sapiens
agggaaggaggaaaagacatgagaacacatcaagattgtggctgtgagcttgattccaccggagcctctgaggagcaatgtagtatttcccaggattgtgctcactttatccatcggctcttctctctattggttgaggattgccgctagtgatgttgagcaccccgtgcccttctctaaaaaagttaccagaggccccaaggcagagtgcaaagagccctagggggcccctgaagtggtttgctggtaatgagaggtgagtttgtgcaccaaagttgtagttgaaatcagagatgggctggagggatgtgacatggataccagggatgttagaagaagttaccagtgatctgaacaaattcaggcagaattttacatgatgtggtctctaatagcttcaactataagtttgttctcttacctcttatgttttgtatgaatcatgtacttactcttaccctgtttctcttgttctgtagctgttcaccagactggacataacagtggtgtcatacatagtggaatttattataaacctgagtctctgaaagccaaattatgtgtacaaggtgcagccctcctctatgagtactgtcagcaaaagggaatttcctacaagcagtgtggcaaggtatggcattttattagagccttgactaatttccaactagcatttgcttagtgatgtttaatattacattttttaaaaatgtatttttttctttgtatctatgtaatttttcaaatctaatcttagggaataactaaaaaaagatggtgtgacgttatgtaattttctaaataaaagttttattgacatataatttatgcaccatacaattcgcccttttaaagtgcacagatcaatttttagtatatttatagagctgagcaatcatcaccactatctaatttcaggctttttcatcaccccaaaaagacaccccatacccattagcagtcacttcccatttctacctcccccgatgccctagcaaccactagtatactttctgtctttgtggatttgcctgttctgcacttttcatataaatagattcatatactatgtagtcttttgtgactggcttctctcacttagcataatgttgtcaaagttcatccctgttgtagcatgaatcagtacttcatgtcttttatggctgaacaatattccattgtatggatataccacattttatttgttcatcagttgatagacatatggattgtttccaccttttggctattatggataatgctgctatgaacattcatgtataagtttatttgtgaacatatgttttcatttatattggttatatacctgggaggggaattgctggattgtcagggtaactccatgtttaacattttgaggaactgccaaattgttttccaaagctctgtgctattttacattcccaccagtaattaataaggattccaattttccatgtccttgccaacatctattttggtttgtcttttctattttagccatcctagtggaagttttgatttgcagttccctagtgataatgatgttgagtgtcttttattttttcctttttagaaaatagttcttgagcccaagggtttgagaccagctcgggcaacatagtgagaccctatctctacaaaaaatttaaaaagttagccgggtgcggtggtgcacaactatagtcccagctacttgggaggctgaggtgggaggactgcttgagcctgggagatcaaggctgcagtgatccatgattatgccactgcacttcagcctgggcaacagagtgagaccttgcctcaaaaaagttaaaattattattttttaactttatttcttatttaaaagttgagacaggatcttgc

SEQ ID NO: 75280 - DNA, 1533 bp, Homo sapiens
taactgaaaactcttaatcattaagacccatttcaaaagacacctctagtgtgaaggccttcttctcactcccttctctagattctcatggtatttgttcacacctctattatccaaccacgttgggtgttatttatctctttatatgttatctctctttattaaattatatgttctatgaggtcaggaaccttgtctttctgtgtgtctctttctcctttgttcttgtttttgtttgttttgtcttaccattgttgcctttgcactaagtatagcagacattcaataaacattttttgagcgaatgaatgaatggacatggcatttgagtaaggtcttgaggttgggtgggatttccacagattgatggtgatgggggagggaggctaagagaaaacagcctgagtagaagctgggaaagcccatatttgtaaataagattgacaactaatagagttattcaaggtgggcacaggcagagagcgctttaacaaaaagttggaaagggttgagaacatgataagaggtagtggagcagaggcttgcagtaatgaagacggctgtagtgaaaaagggatgaaagggtagttggttctgtcttcagttcacatctctcactgttccacggcctcagcatcctcaatcacttcctcagctttaaggtgtttccctctcaggcatctttctagtcctcttctttctcttgaattccagaaccatgtaatgattgaggaaaggaccctgggctggtagagaactgggttcaggtttcaacactgccaccaattagtcatgaaacattgagcaagtccctttaaacacatgcatttattaataccccaccttgtttcagaaaggatttaggatgtcaggaagttacttaatatcagggcttcagtttcctcacctctaaatgagagatttcatccaggtgatctaaattccttacagctctaatgttttgtgacctctgattccaatgatttgttggtcatctgcacttagaaatcctgctaacacttagtatgtagattatgaaaaactaaaagaaaaaaatctgaacctataaccctgttctcctaatgtgatttcttttaatggcatcaccatcctactaccagtgacccagggccaaaacttggtgtcattttcaactcctctagcccttgcccctacatctcacttaactgagtcatatggaactaactatgtaatgtcattcccatccttccccaactaggccctttcgtatggcctcatgtgattgaagcccttgctgactggctgtcccattctgttgacccttaatcttgatgctgctgagtcaatttcttgaagcacaaccgtaacaatgccaatgctttgttctattttatttatttatttatttttgagatggagtctcactctgttgtccacgctggagtgcagtctggtacaatctcagcttactgcaatctctgcctcccgggttcaagcgattctcctgcctcagcctcccgagtagctgggactacaggcgcatgccaccat

SEQ ID NO: 75281 - DNA, 1094 bp, Homo sapiens
actgctctggtaacaccacttgcagccttgtcataggtagatctattttcatgtctcctcttctttcctggatgcaagcatcttaaccttgacacgttgctctttcggtgattttagtctgtcattttgatgctggaaatatagatggggaatagaggagccagcttcagcaaattcatagctacagcgcctgaatggacactagatggcagtacgacaggcagactccaattgaggtttcaacagtggaacttaacgttctagccggaaggagccttagacaccatccagtccaacccctcatttttttgcagcaaacaaataaaaaaccccaagaacaagaaacaggagtgacttgctcagtaattgttgagtggcaagtgagtcatcagctttatcagtacaagagcattgactctgaagtaagttgctatatgtatgggactcggatgatgatctaatgtaagtactgttttgtgtgtctagatcaaatgatgccgtttggaaaaatttcccagcagttgtgtggcgtaaagaaactcccatggtcatgtgactccagatacttctggggctggttgaatgcagtgtttaataagtaagttactctaaataaagtgaagaaatgtggagatggttacagctaaataagttcccaatagcttgtttggctatttctcatatttacagtttgtgcagtgtgatcctaattttgtttacaaacaaacaaaacccacacaaacatggaaaaaacaccagaaaaacagattacaaaatattaattgtggctgtttgggttgcaggatttcgatgatttttcttacttgtccttttgatatatttcaagttttctaaaacattttataatcagaaaaacttattaaatataattttaaagtattttatttttatggctttttaaaggaatgtagttaaccttttgaattctatcaaagtaacttgggttttcaaaaaattagtgggtggcacacttagaaatgtcattttgaaacttgaaactaaccttctaattacttaatacagcattatgatcactagctagagaaaaaagcatatgtagaaattaataaata

SEQ ID NO: 75282 - DNA, 1103 bp, Homo sapiens
agattcagaattattttctctttaatcttttgttattaatacaaattctaaccaagtatagtcattcgtagaatagttactaagtatctctggtgtcaagcactgtactatatgtgaatcaatgaaacgttgtgtctgataaattcatataaaaataatacgccttgacagcgttcacgtggaaacaaaaacaaaactaaaaaagtcagcagatagactgcaggtttttttgtttttgtttttgttttttttgcatggatctcactaatttatcttcctcgtcagtcacttgaaatgaaaatttgttgcgttctgtattatttatgtcagttaatatagttaacaagctagtgattattgtaaaagcaaactgctttttttctcttgccaacagggtggattatgatcgcatcagggatgttggccctgacagggcggcatccgagtggttgctgcgctgtggggccatggtgcgctaccatggccaggagaggtggcagaaggactacaaccaccttccaacaggccctctggacaaatacaagattcaggcgatcgacgccaccgactcttgtatcatgagcattggatttgatcacatgggtaactaccctatcgttttgctaatagaaaatgcagatgatttgcagtgaccattttgttgcagttgactcacgattatagtcataggtatgtcctttttgcccatttcattatagtcaagtttgtttcttcctgtgtttgatatttattttcaaattaaattgaggttacagacaccttcctctccttcctcctctcactaagcttgtttctgtatgtctctagtctttggtttattgacttaaaatccagggccttgtttgtcaaactatctttgtcaaacttctgtcattgagaagccctcaataatgcaggaataattatatccacacagcttctgcttacgtgggcatttttttttctttctttcttttttttttttttgagacagagtcttgctctgtcgcctaggctggagtgcagtggcgcgatctcagctcactgcaagctctgcctcccaggttcacgccattctcctgcctcagcctcctgagtagctg

SEQ ID NO: 75283 - DNA, 1567 bp, Homo sapiens
gtatctaagaattttcccagcttttgcccttttggggttgagattcacatttcatgtttcacatgcaaagaatatctacatcattataaatatatattttatttagaatgattcagctagaaatattgatgtaacccaaagtctgtgttacttcctggcatgaatttcatctctaaggctactgctctaaaagtaattttgaaggcatagggtgatatagattcattttctacataattttctttctttaagtcagtaaattgaatttatttttaatgctcttggccaaattgaagtgacttttttctttatttgcagaaacctcaaatatttgttgttaagtgatcttcctggagtaagagaaaaagaaaatcttgtccaagcctttaagacagcactgccttctctggaactaaaattacaattgaagtaaaataatgtgtcttatttcagtataaaggatcatttgaaactgttgattccaaacatcaactaatattatatagtcatcagtagaattataaggatgccatatcatgacattttagaagtggagagtgcatcatatgtagaaaataaatattcagacgtggctcattaatgttactaagttggaagtgagaatttatgaacattaattcattttaagaaaagtgcagccaggcgcagtggctcatgcctgtaatcctagcactttgggaggccaaagcgggcagatcacctgaggtcaggagttcaagaccaaccatggccaacatggtgaaaccccatctctactaaaaaaacaaaattagctgaatgtggtggtgcacgcctttaatcccagctactctggaggctgaggcaggagaatcacttgacttgggaggtggaggttgcagggacccgagattgtgccactgcactccagcctgggtgacagagcgagactgtctcaaaaaaaaaaaaaaaagaaaaatgtaaactaggtaacattttaattctaatatattcatttaatatgtaaatctatagatatctcttgatgtagatatttagaatcctttaaagttatttgtacaacagatgtttttattataacagtaatttacatttaactttaaagttagtgaagcatactaccataaatgcacaattatgaaaaattagaagctaaattacagattcattgatggagtcaattatgcaaagtggtcagtggttgttgaagcatgcattgcttcaacaggatttgcgtgcatttcccatgatcctgcattcttgtgttcttgatagcatacagacttactcagaatcaacagttgctgcttaatttgtctattttgtaagcttaggctactattttattaaaactggacatagatacttggctgaatacaaatagttttgcagattgcaatataataaaggaaacagtaaaaactagtgggctatgcttaggtttttcttgaaacctaacattgctttaggctgggtgccgtggctcgtgcctgtaatcccagtgctttgggaggctgaggtgggaggatcacttgagaccaggagtttgagaccaatttgggcaaca

SEQ ID NO: 75284 - DNA, 1050 bp, Homo sapiens
tactaaaaagcttaattacctcttttgtgatatattctaaataatgaaaaaaatgcatggcacagttttgaacctaattctgtgttttgcatttttagttgcagtacctaccccagctaactggcagcagcatccttccagctttggataataagaagtactactgtgataccaagaaacttaactaccgttttccaaacatttaaaggagctaggagacatgattttaaaaaaggaatcaatagatgctttgaagaaaataaaacttatacagttgattgaaaacaattacaatgttgaaaacacaccaggagaaaacataagcaagaaactgggaggccaactggcaagatatgaagggaaattccagatccagtcttccatgcttgatgatggtgtccagaaaagaaaaaacctgtttggagttgcacttgtatttcagtttatgtaagtagccgaacttatggacagaatatgaactgtcccatacctctggcaaaactagatgatatcaaaaagatttatgcttcagttgtaccacatgccacacaagaaaaatgaaccacaaaatgcccatatatatttcctcggatctctgttgcctgagtcctatctcctgcctctcagattgtttcagcatcatatttaagatagttctatttcttgaaatcaaaatgtttaaaatcccatttcctgcttgctctatttcttgatttttatattttaaaacattttgagggtaacacttaggttcaaaatatttaaaagcatatgaattatcacaaaagcttggtaatttataatttaattatatgtttccacatttcatccttactttatcagtaaaggatacaccttagtcacttttgcaggcaacgtggatttactgtaatctgtctacatttattcacccaattccccttgtaaacaatggcatgaagctcggcagctgattaaggcagtcaaagggtagagcaagacctacaggctttgcaggaactgaacctatcagcctgaaaataattagtatttcattctctctggcacagc

SEQ ID NO: 75285 - DNA, 1053 bp, Homo sapiens
gaaaggaaaaataaggaaattcaatacaaactgcactatgatttgctttaactattatgggttatattgcaaatgatctgtactttagggtagaattcaatattttctgcagctggaaacagctagtctatctcttgccactgtgtggtggttatatcaagtttgcttaataaaagctatgagacaaatagtcctctagttccaggaaacacagtctttttttaaaaaaaacaatgtttgtaacaagggtgccatggtatttttagataactcgtgattatcttaagagaggtaaatttagtgatcattttatatcatgtcttattccttcttaatgaacataatttgttaaattctcaagcaaggttttcacttttatattggccattctgtatgtttttgtaaaacagaatatttaatccttatttattaatctcttgctggagtggtgtaatgtatctaacttttagcaaaggagggttgcagagcagcttaaattttttttataatgtataagaattttgtttatcttttaagagtagtaaagtactttgagtgtttgggggttcaacacacacatgcaattttgcttaacaaaagtattttataatacagtttcatacagaattaccttaaaagggagtcttatgttttcaactacagatagttgtaagggatcatacagaagatattgatgatagttgaaatattcttagaaggggtgtgtatgtctagctgtgtctaccatgtgtatgtattcttgacaagcagtataaaatacctgtgatttttctttacattagggataatgcataaggaattaatcttcatatatattatcatccctaatgtagcagggggaagtatttaattgcccatgatatgtattttacttatactatgccagagaggaaactataaagtaattacacatgtaatcttgggtttttcacatatgtaggtattcattttgagtaggttgaagaagaaaaaaaatatttaaatgaattgaattcctgatgggatagtatcaataagtatttaaaagccagt

SEQ ID NO: 75286 - DNA, 1060 bp, Homo sapiens
tgttttactctctaatactcattggttttatgatgaaaattattacagtttattattgtttgcatgctcattgatcatatgtcagtatcttccccaggagtgacagaacttgtgaaaaaaatgatgaatggaaacatttttaaacatttcatgatatgattctaccataaatcaaaggcactaaaatgaagttggtaatttttatttgggccataaaaaataacatgtactttataattacatatttttaaaaacacgattttcattacttagttttttatttttaagaaacattttaatatgtatttctcaattggagttttatccacaaaatgtttgtgcctctgtgtgacattttacatgaaaatagtttgcttatgattgggaaatttaatttattaaagcagaaaacctaaactttctgtaaatgtcaggacaaaagaaattttggaaactagtttcttcttttactccttatattacatgccaatttggatttaacatttttgagagagattctgacataggaatccttaattcctcttcactttcattgaaacacactgatacctcaactttttcagatgtgccaaattatcttcgtaattttaattgttacacaaaagtttgttcctcctaggctaccatcttttcttgccagtaaaccttggaataattacaggaatcctcctggggaaaaaaaaatgcctttacaacacctcttaaaaataaaatcagtaactaggttttttatttgtcacagttagtgaaacacatgtgatttgtcattgtcaaatacttttatttttattgagcttaattatgttcccagaacattcttacattaactttttacaaaaagttaatagtctaataaaacagttaattttcagttactttcctccatcacttttaattatgcttttctaactctaatacttacttgtaatggttaaatactaagaattttatgtaagaattgactcacagatcctaaatattcaatgtgtggttaaatgttggattgtggggcaggtttattttattttattttttattt

SEQ ID NO: 75287 - DNA, 1285 bp, Homo sapiens
aataacactgtttatggagagcatattatttgattgtgtgttaaatggcttctaaaaagctggagtcctcaaaagaatatttaatatattttaattatgcttccccaaaatcttttttacttttgtttggtaaaatattaatatgttaatattttatattactgttatgaaaataaagccaattctgtttgagttgacaattatgaattgtatcatataaacttttctctaactctcttactgcttatccctactcatacttgtctttggaaataagcttaaaaattacacagggtacatcttagatagcaacgcccaataggaggcatgtacatgtgtgtttagctgcctggctagctgggtagcaaactatgtagattggggaaatggagaaaggaagggtgtttaatgtttaggcagaatatttctgttctgagaacatacagataattttgttgaggataaaactgtgtatatgtgtgtgtatatatgtatgttttctaataataaaaagataaatattgttttgtattgttatattatcataccatatatagtgagaaatcagatgatgtttaccatatccatccctcttacttaatacagccatattttttattatatggaattgtagccctgttatccttgtatcatggcttataatattggttggttttacttttttaagtatttccatctgttatatttaagacttcattcacaatgatttttaatccaaggtaatttgttaagttattgataaataggtctgtcccagagaaataataatatagctttatagaattttccatcttgtattaaaataatcacatgtacatcattgtaactcagtccataacataagattttgtacaacaatttctttttgtgtgctggcatcattaaggtttagtctgcccagatcacctattagtacctaatttatatattctgaattaaaattatctgttaatttaaaaacattttatctattgtctttcaaaatagtattaactgagggtttttttgtgtgtgtttttctattttgcttggctttttgaacattactggactctcgttttagaaggtaattacgttttctttttctcgaaaattgtatttctctgctgtaaatgattctcaaaaaggtaacatgtttttcttttataggaaaaacctttcagctctactctcacaatcttatagctttgtttgaacatgccaaaaaaccaggattagctgcccatattcaaactcacaggtttccagaccgaatactaccaag

SEQ ID NO: 75288 - DNA, 1394 bp, Homo sapiens
gatttctaggctcagcatctacttttattgccccagaattggaagcagtctttctctaagaagccctggttctttttagtggaaagtaatatttagaaaccaagatctggatactaggtgtgctcattatttctagtgtgtcgtgatttataatttatattaactttttgtttccttggtcaaaagagtgtttgaggtgtcttgcaaaaatgtgtaactataaaaatcttaaaatacaaaaattatgttgaaaggcagggttatatagtaagataaagtcagagtgagttagtctaacatagaatatatctgcttttaaaaaataagaaaggaattggggaaagaggtaaagaaggtgatacaaatttaagaaaataattttattttagatggataggtggctaattcttgatgccattacaatgtaaagtcattattttagtgaatgatttcagaagatgatggtaaattctggtgatttatctcaactattttagatcagtacattatttttggaactgaagatggtatttacacactgaatctcaatgagctacatgaggcaacgatggaacaggtaattaggcattttaattcaagaaattaatttaaacaaattgaataaagaagtgtcttaattttaaatcaatctgtgtaggccccaattttaatttttatgatttaaatatttaaagggataaaattgtactctttgcatgttcatgttgaaagattttttttcttaagggtttgataattacctgaaagttagaaaatagttatttttatatgatttcagaatgttggaatttaaaagattaaaataatgacaatgagagaatcttaattatcttctttttcttagttatttccacggaagtgtacttggctgtatgttatcaataatactttaatgtcattatcaggtatgtatgtgatgatgaaaaataaaccatagataagcagagaaatgtaattttaatatacaccatttttaaatgttatttgtaattctggatgactataatctaatatagtaactctgggacttgtggatatttgctacccacctagaatgggaagaaactttgggaagggatcctgtcttcagttagggctgcactttccaaacccacccagcatctaaacacctgaagggtatcacagtgcttatcactagaggccgttcccttccactcagcctcctccactatcactgtcaccactcctggcctcctttgggaattaacaggaaagaagcagaggatcacactattttctttctctgcgatcctgaacaagtcactgtctctcagcctcatttatcttaattataaaatgaggatgatggggtaacagtacagccttatgaggttgtgagagttaaatgagat

SEQ ID NO: 75289 - DNA, 1555 bp, Homo sapiens
gtgaaagacaaatagtgggagaaaggggaaataatttttcaaggaaagtgcttatttgtgtggtcattcaacttttaacatgattctctttaggaaatggtgatggtatttcaaaactgatgagtgaaaatacagaaggatcagcacaagcaccacagttaccacgaaaaaaggacaaacgagacttccctgtaggtataacaggcatttagcaattagttgtaaataatactatatttatcatgcaaggggcatagtctgtttaattcagtaattcaagtaacagaagttctaaatgtctcaagtttctttttaagacttaggaggtcttacactagtaaattttatttttcccatagaaaccagccatcaatggccttccacccaccccaaaagttctggtaaggaatatttttatgtgaactatttgccgttttttctctctttagaagcagcaatatattggctatcaatatacttgagcctttgaaagttaagatatcataaaatacaaagatattgaatgcatttggatatctcatcatgtattctaatttgagtgtgtgaattggaattgacagtgtttcactttttgtaaatactggcagttgagtcatcagattagcctacaaaggcctatttaattttaatgcgatgatattaatagtactgtgtcctcttcttgatgtggattaaatatctttctacctctaaagtgattttcacattggactatatacaattaaaaggaaccagggaagcttatattaatgcattttcctggccagtcagtggaacttatctgtgaatgggaaccccatgatcccatgaatgggatgggaaccaatcgtatgaatgggatgctttatacattgtccttttttattcagtgaaagtctaatgtataatataaatatcaacctttttgtctcttatgactattaaagagttatactgcaattgtaatcactataatgttactgaataaaattatccattgtttcacattaataattgtcagtcctaaaaaatagtagtaacttaaaattcctagactatgttattgatgtatgtagatcttttggtaaatttgatatttgtgccataaaatagtggattacaaaaggaaagaatatgagactgtcttggtagtaggggtttaatgatgtgaaaatatgaattttgttttggaatgaaacaacaagcatacgcaaataagagttaatttggtatttcaatgatgttagttattttccaagaatatataaaattttctaatcaaataagttaacatttctttctttataaataagatgggagcatgcttttcaaaagtttttgatggctgtcctttgaaaattaattgtgcaacatcctggatacatcctgatacaaaaggtaaaatgtttgaattttatatacatctccaataaaatatttattatgggaaagatctttatgatcagtgacttgaagttgtttattttaaaaatacgactttagagacctaatggtataggaacctgcaacaacctaaataggtcaatagggtttt

SEQ ID NO: 75290 - DNA, 1921 bp, Homo sapiens
agaatcctgaaagccgcctaattgattgcaatgactgtggataagtgtgtgggaccagtggactagataagtgcttctcaaacttattgacctggagagcttattaaaaggaagattctgtgcatttagaaaagttcccagatgatgccaattctgctggtttgaggatctactttgagtaacaaaaggtttgatgatatacccacttgaatctatgggtcccaactctaaaattctgaatcagttttttaaccaagaagttaacttagtttttattacataagaaatatagcaaagcataaccataaaagtaaaataagactttgtgtccactttttaaaatctttattttatagacatacaatttgacaatatgagtgaggtcttaggtcttcctaaagattttatactctgcatcgtgatctgtcttttacatcctctgtatagaaactgattttaatacatatttaatagtatctgtgttttcggttacggtcatttatcatcatctaaattgcatttcttctttgtattagatcaacctcaaaacgtgcaataccacctcccctacctcctaaggtgagctacttaatgattttgaacactaaatccttatttaaataatatagttaaatttttaaaataattttgagttttttcaaaattttcttaaatgtattttagatgaatagagttttcttcaaaagaagtgtatgatggtgtaaaatatatagtaaagaagatttcatgaggaatacaatatttttaatagctattagaaaaaggcggccaggcgtggttggtggctcacgcatataatcccagcacttcgggagacaaaggcaagtggatcacttcagatcaggagtttgagaccagcctggccaagtggtgaaaccctctctactaaaaatacaaaaattagctgggcatggtggcgtatgcttgtaatcccagctacttgggaagctgaggcatgagaatcgcttgaacccaggaggtggaggttgcagtgagctgagatcgtgccactgcactccagcctgggtgacagagcgagactccatctcagtaaaaaaagaaagaaagaaaaaggcaaaaacaggttattgcttattgaagaaaatatttgactacatggaggggaaacagttcatcatttatcattcttatgactacaatttgacatattagtggagtcatttttcttgattgtttctagttgttttgtggatttttatataattatattagttataaaaattttatcagttttaaggctgattaaaaatcacatggcaagttgatagttgtgttgggcagtaactcacctcttactttgctcacttagcccagtgaattgaactgtatagaagaatgaaaaaaggtgcatttccctttccctaaagactctgatgcctaatgataactgttaaagtacttttttgtctttgtaccactagccaaggataagcagttaccctgaagacaactttccggatgaagaaaaagcatcaaccataaaacattgtcctgattcagaaagcagagctccccaaattctcagaagacagagtagcccaagttgtgggcctgtggcagagacttcttctattggtatggctagcattattagcagccatggggtacatatggctagatattgttatctgggtgaataaatcaaagtgaaaactgaaatgagagtcatttgttcctatttcaaaaaatatcttttttatttagtcaatcctattatagcttaaagctttgtaaaggctctttaattctgcatggatgggctataaatagatttcagttcacttcaatcctaatttgaatccttactaaatatttattataggatctagaagggtgaatgcatgtttctgcccccagaacttcagggtctacagcagaa

SEQ ID NO: 75291 - DNA, 1022 bp, Homo sapiens
taatttcctgattccaaacaagaattaagtagagatgttaggaagatcccactttgttatttacttttggtaagcataacaaaggggtactcttgtagtcaaaaaataacatattttttgtcttctttcccctcttctttctccctcccccaccccatatacaaacttgtcattacatttctgagatcaaccctttgagatgctgagtttgtacatacctgttatatattttgcagttgacaaattacaatttgaacctcctctgagaaaagaaacagaagcacgagatgaaatggtaagaattcatttttaaagcattattttcacattaagatttgagaaaactttttttttgttagttgtactttgattagaaaacaaagtaatatactcttttaagcattaattttgacaatttttcccgtattaaagtttttaaaagtttatagttagttttatttttactagagtacgatgtaatacactatttcaatcattcattttaacctccttagtcttttgaaggttttacatgatgttattaaatacgcagaatttgattctcagctttaagctcttaggacctttttttttttaactgattctgtttgttttatagtaaattctacattctgtattgccttactattttttaaatatattttatttgttaatatagtttcttttttaaccattgctgctattttgaatttactatctagttacctctttccttatctaaaatgaaaaaagtggccgggcccagtggccaactcctgtaatctcagtactatgggaggctgaggcagacagatcacctgaggtcaggagttccagaccagcctggccaacatggcagaaccctgtctttactaaaaatacaaaaatcagccaggcgtggtggcatgtgcctataaacccagctcctcaggaggctgaggcagggagaattgcttgaacccaggaggtggaggttgcagtgagccaagatcaagctactgcactccatccagcctgggcga

SEQ ID NO: 75292 - DNA, 1089 bp, Homo sapiens
ctctccgcccaggcgaattactattctgatctctgtcacataaactggcttttacctgatcttgaccttcaggtaaatggaattatacaaaaagcaacttttgttcctggcttcttttactcaactttatgtctgttagagtcatgtgtagtaatagttcagttttcactacactgtagtattccattgtatgaccataccacaatttatccattcttctgttgatgagcatttgatttatttctggttttgggctattatgactactgtaagcatttttacagtgtatttttagtggacataaatgattattatgaatcacacccaatcagtctaagaccaccaggggcaaatgtgtagtccaacaaagtcaggtttactgactccctgcagtgagagagaacacacaccagaggaaccaaaccattcaagatttcatcaaacaagggaaaagaaatacaggattttggaaagagtagagttcaggtgaattttaaatgatgacttaatgcaaagtagggatgtatctgaaagggtgaacatcaggtctccgctgttaaagtaaacccgggagtatgtttccttggaaactttttgaagtgttgtgttcagaaatgcctttatttgaagctctgcatctggactggaaattgagtctgtttctctgtgtcagtgatttagtccaggcaagaataggatgattcattctaaatgtgatttcatgtagcaatgtttctggcagtcagtgattttagagagagagacatttctcagttagaaagcagaataactcagagggggtcattatatgaaactttacatgtacaaagtatccttgggagaaacattgtttcttgttgactttgcatttggatttgtgtctgtcctttcagctttatgaatggcaagacagatttcctactttctcagtctgattcagatatgactgtattagctaaattacctaattttttttctttttttttttttggtttgtcatctgaagagtgtattggtggttgagtcgttacctaggaaaccagctgattacaaggaattggcaccaagggaaggtaggaggtattcacg

SEQ ID NO: 75293 - DNA, 1008 bp, Homo sapiens
ctttcccttctcagttgtttcaatcaggccttttcataattaagccagtaattcaagatttagtgtctttgttagtgcctagattgatgatatcttcttatgctgttctctccttttataatctgaggtgaagtctgtgggcctccaatactaaagagaaaagtaacaaagttgatattccattgtaacatcatattctttattttatgcagttctgtagtattccattaatgtagtctattttatctatcttttctcgtatagttttgggttttgtgtcatatttagaaggctttctcgattccagagttatcaaataattttcctattgtttcttcttgtgtttttagtttctttttttaatatttaaaaacctgatatacattatttggtagaaggtaagaagtatggattcaacttgagtttctttctagatgactactcatttgtttcattatttattgaaaatgcaatctttctactcatggatttgatatgccatctttattatataccgaattggcatagatattttagggttgtttctggaaattctattctattctggaaattctattctgttgcatgtctgtttttgtgccagtagcatacttttgattattatatcttgataatatctgttagaactaatcctactcctactctctgcccctccccacaacacacacatatgtaccttgtcacacttctttttcattatgacatttggctattgtgccttcttccccacataaacttaagaatcagcttatgtggttaaaaaaaaacagaaaaattcattgtttttacacagatcttattactttgggagagttgacatatttatgatattcagtcttcttaatcaaaataggcttcttcagagataagatttagttcttttatattccataatattagcccaaaatactaatatcctcatagagtaagttctggttgcttaaagcaccagacaaagcggtagagtagaaggtcactttattaatg

SEQ ID NO: 75294 - DNA, 1043 bp, Homo sapiens
taagggtttgattgtaaaatacagaccaaaaaggaagaaagcaaaattacttttgcaatactttttctatatacttaaataatatataatctttttcacataatataaacctattttcatgtcacagcacactgtactgtaatttatttaaccatccttgcattattaaaccatactgtggtaaacatctgtctttgtacatatctccttaagaaaaaaaaaatttgtaagtaaaattgtgggttcaaagattctgtatattttaaagacttctgactttatagaaagattctaccagtttacattttcattgaagtattaagaatgcctcattcctcatctctaatatttattgtaaagttttccttccttcttttcatatgtagagattttgagtaacatgataaacaacttattttgttttccaggagatgatttttctttgattcaacaagaaatatttatggttaaagaatgtaaacattgtaacatcgttgcctactttgggagttatcttaggtaagagaaaaaaaagcatcatctctctctgtattttatatattctttgctactacactctctcccttgtatgtaagtgctactatatttgtatgtttttaaacactgcaaagttctaaattttttaaggttttcctatttctacggttttcccctattacatattaataatggtactcccatttttatagttgtacctcatctggcaattttaatgaaacataagtgattacaagtaagtgttttaacttacaaaactgatcatattctaaaccactgaagatgggaacaaagctgaaattaatgtgcttttctgtatattgtagcaagattacatagcagtttcctgttgcacttcacagtccattctgaaccctggtgtgctaaagagtgagagccttagagtatttcagtgattgaaaattactagctaatataattttcttttttttttgtattagtcgggaaaaactatggatttgtatggaatactgtggtggcggatcacttcaagatatttacca

SEQ ID NO: 75295 - DNA, 1074 bp, Homo sapiens
cagtatacaagggttctagcttctccacatcacctctaaccagttttattttctgctttttttaattgtagccatcctaatggatgtgaagtgatatctcattgtggttttatttgagtttctctgattaatgatgttgagcatgtttttatgtgcttattggctgtttgcaggtcatctttggataaatgtctattcaagtcctttcccatttttaaaatcaggtcatttgattttttcttgtgagtcgtaggagttctttatatattctgggtattaaacccttcttagatacaggatttgaaaatattttctcctgttctataggttgccttttcaactctgttgattttgtcctttggtgaacaaaattttttaaatttcatttgtagtctcgtctgttttttgttgcctgtgcttttggtatcatataccagaaataactgccaaatctgatgtcatgaagcttttcttctgtgatttcttctaggagtttgataatttggggtcttacatttatatctttaaatcattttaagttttgtgtatggtttaaggcaggggtccaactttattcttttgcatgtgaatatccagtttccccaaaccatttgttgaagagactgccctctccccatcaagtagttctgatacccttgttgaagatcatttgaccatatatactacatgagggtttgtttctgggctgtcggttctattccattggtctttaatatatctgtctttatgtcagtaccctactgttttgattatggtagcttttagtaagttttgagatcaggaagcatgagtcttccaactttgttcttctttttcaaaattgttttggctatggagagtctcttaaaattttatacaaattttagaatgattcttttttatttctgcaaaaaaaaatgttaccagaatttttcatagggattgtgtagctatttatatcactttgggtagtattgacatcttagtaatattaagttgggttgggcacggtggctcacgcttgtaatcccagcactttgggaggctgaagtgggcggatcacgaggtcaggag

SEQ ID NO: 75296 - DNA, 1060 bp, Homo sapiens
tttttaccttgaatataactttatctgacattgatattgccaaccctcctttctttttgtttatatttatgtggcatacaacaaatggatagaactggtatacttgggcctatcattatcctttctaggttgttgatgtttctcttgtaaaaaattatatttgacttttgttttataacccaatctgaatttttctttttttaatatgtgaatctgtccactattatattgtttggagagatgtttaattttaattctgttgttgtttttgtttttaatattttcttaaattttaaaaaaaattatagctgggggtttcttttatttttactgctgataatttgtaagatacaattctgtagttttgtcagagaatggcttgtaagaccttgaataatatacttaaatttgtgggtgttttagtttatcagtttaagaaataaaacagtcatctgttgaattcttggtttacagattttgaaatttgcatatttatactcttcctgcctcatcatccccccaattttcaactgttcattggtttatttggggattttagcccagaaactttctgattgcactggggtatgagtatgtattactatgtgtaccttcttttaagaaatataatatttataatttataaatgccatgaccaattatttagacttagttttatatttagtagatttactacccaccattggtctttttatgccatttcctttccattctcacctacttagtatcaactatcaataggctaagtcatattatcaaaaagattttcccgtattaggaatattataatttaaatccataaattgattattcttctcaaacctgcttttcttctgcattttgctaagcagttaacccatccacaaatgtaggcattaacctcgatttctctcttttatttgtgctcaagaatcagtctgtcagcaagttccctcagctctacctccagaacacatcctgaatccatctacttgtctttgttacccatctccacccttctagtgcctgttgccttgcccacacctcccattccccacca

SEQ ID NO: 75297 - DNA, 1051 bp, Homo sapiens
aatatcttcaattaaattaccctgaaggtggttagttaaaggtaagtttgatgtgacagttttgttgccaaataaaatttgacatgtacacattcagaattggaagacacattgacactgttaaagtaattttcttttaagatgatagtgaagtatttgaacttcaggtttagcttttatgagaatttgattaggaaagtattcaatgattttttggggtgaatatttgggataatgacatttgtttgtcagctattccctttgattgatttaggtttgttaattctggtcttagcttaatgcttattttattaacacttctgtgtgtcagaagactgcttgtttcaaaacacattgaatagtttgctttgcaaataaaactatagtcctggaacggttttatgattttgatatcctaaaagtttctaatgagtgcagtagtagtttttgaccaggtaagcgaatatttggtggtatgttcatttgctggttcataagcttaggcacgtaggataagtttgtgaccataattatgccagtttcctagtttgagcggttaaaatgactttgcatttcaaacacagtatttgaatcattatacatgtgattcattagagagataatagtactgaggtagcatatgctggaacactttaaaaataagctttcagatatgtcccagtatcttttttgtcctggcaaatagaaattgttataataatactctttcaggatcctcttattaagtgccacctaataagtttaaaatgatctccaaaatgtcactaacacaaatagggaatataacagaactatacaagcctttgcctgtcctggaaaagtcactagagcaaatattcaaattatgttcaaggatggttattcaagttatgtccaggtactggcgtgtgctctcagagaaaacaaagatatttatcccttttctgtcttaagcgagtgcagtgggcttgttacaacacggtttcacttacttgacttgagggtatggcttatttttcattaggttgatgcataaataattgcagttttt

SEQ ID NO: 75298 - DNA, 1056 bp, Homo sapiens
aaaaggtcataaattagtaaattccatttccacatatgatgtaccacggggtacgatgaaaatgagcactcacattaacaaagagagtatagtggtaaaatgtttttagactatttgatggtatgtgttcatattcacaacctttgacctagtaataccgtatcttagaatccatttaaaacaaatatgtcttaaataatgaaaagactatatgtaacatcctttatgtccaacaataaagaggattattatatggactatgttataatcatttaattttcaccaacaataagttttggcagacatggttttaacatccaaggttttaacatccaaggtcgatgacagtaaaaattcgcacagtgttttagagcaatatggcaacatacccattataagtccacataccttttggtctcacaattgtatgtctaggttgccttccttataagctgatctatggtaaaatattggtaatgatattcattgcagtgctaattatagtaagtttgttgatattgtgttaaatagtaaatagtttctcttctagacatttaactgaaggaaataaggctgtggatagatacaaagctaagatatatgtatccctatttttataacttgaaaataatattaaaattgtaaatgcccaacaatagagggttgggtaaattatatatcctgtcagtggaaaatcaggcagcatttgtaatcatgtcttagaagactatgatggggtcatcttcttccataatgcacatgcatatacatatgtgtaccaggaaagagatgcatgtacactgaaatgttcactgtttttctctaggtagttagatacagatgatgaaaatttttaatgacctatgattatgttttctgatataaataaaacccatgagatttttaaaattaaaaatattaactaacccgaggctgaagaaaagccttggaggaagtagaccaaattttaaacaggagctgtttttgagtggtgggactattggtaattttttaaacacttttgtgtcttatctatatttttctttaatgggaaaa

SEQ ID NO: 75299 - DNA, 1063 bp, Homo sapiens
gtttatgtattcacctattggaggacatcttgattacttccagttttgggtgactgtgaataaagactgctttaaacacttatgtataggtttttatgtggacataactttttagctcagttgggtacatgccaaggagtggggttgctggctggctcataaggtaagactatgtttagctttgtgagaaactgccaaagtatcaaggtttgtgttctgtccatatgtgttcttaggactcaacctaattaaaagtttggaaggatatactctaaaccattaacaatagttattttggaagatgagattgggatggagagggactgtcatctttcactgatttatattattttaatttttctaccacaaaatcttacttttgtagtaatttttttcaaataattttcttcaaaatactttaattcatcataatatgactcaacataagtgaaaaaagtaagactatttaaaataatgtattgtcagtttcatagcattttctagttgtggaagattttaatttttttaagagagcaataaccttcctacaaccatgattgtctattcaacaaatttgtagagcatctaccatgtggcacagcctttcaaaggatcatgcgtagagctaagatgacaacacacttaatccagccttaggataccagggagacttcctggaggaggtgataactaaactgaattctgaaggacgagtctgagttaaccaggccaaacggggagggaggcggggaaaggagaacgtaccagaatgaggacagttttcagatcagagaccgagctattcacttctgattaatctgactaaaatcagaattaattgttccaaactctcagagaagcatattagatcttttcatgttgttgactcttgtttaataattggtaaccgagaagaatggagtcattttcttttggttcctcaaagtaagtggcagtgaatggcagaatgcattgcccaaatgcctgtttttgcttggcataatgaattgcctgaagatattttgttgttgaaaatgtgttagcatcagtcattgtcatatga

SEQ ID NO: 75300 - DNA, 1027 bp, Homo sapiens
tgtttgttgaataaatgaaccagttaaaaacagtgtttcagccgggactagtggctcacgcctgtaatcccagcactttgggaggatgaggtgggtagattacttgaggtaaggaatttgagaccatcctggccaatgtggtgataccctctctctactaaaaatacaaaaaaaaaaattagccaggcctggtggtgcctgccttagtcccggctactcaggaggctgaggcacgagaattgcttgagcctgggaggtggaggctgcagtgagctgagatcacaccactgtgctccagcctgggtgacagagcaagactcggcctcaaaaaaacaaaaacaaaacaaaacaataacagagaaagcaatgttccataaagtattgagtatagaggttttacagcctatgacatagttgacttttcacttttattgtggattaatcagctactttgtatttttcaaaccttatgggtgctgcgttgcttcttttgtattgtagatcatgttcttaaatctggaatacataattatgactctgagaagcagtcactggccactggagatagcttgttaaaaatattgagatgtctggattttctgatgttatgttatagaataaaggggcatatttaaaactgaagtccacagttggcttaatggaaaagttttgtgaccctaagaatgtgctgggagaaagttgtctggggtaggatgagagacccaatgtgaagaacagagaaatacaggagctttttcatttttcttcatggtgatggtcttggttgccatagcttttagatggctgtccttacttgctggtttttttttttttagccccagtttataaaaaattatctttcaacttcatgaatactaggatgtattactatgtattgattcgtgtcttccaattctgtgttgaaaccttgtaggtaaaatgtttagacttttcttcattaacttttagttttcattaaaaattttacagtatgtagaagagttcatagtttacaaaactggcaatt

SEQ ID NO: 75301 - DNA, 1049 bp, Homo sapiens
caggtgatctgcccttcttgacctcccgaagtgctgggattacaggcatgagccactgtacctggtgatacatgttcatttttaaaactatataggaatgaaaaattacttgtgtctcctttaccaagagataaacattcccaacttttaaaaattcatattaaggacatacgtataaatcatagaatagatatgtataataatatacagtatatattatatagatgtatatttgataacgtgcttttaaatttaacaatatataacaactttttgtcagtaaatatacatatttaatacttgtgtattattttcttgtatagttatataatttttagttcattatatacaaacatacaagcaattgtctccaatatttctttattgtaaataatgctgggatcagtatccttgaacagatttttttcacacaatcttaattatttctttaaataaatttctagagctaaatttcctaaattgtcttaaaggttttggtgaattttaaccaattattctccaaaaaaatttgcacccatcaacaatgactgagagttcacatcttccctaccctgaaactcaagccctttcctccctttcctttgccattaagacctccagataattagttcaatttaagtaatcctctgtaagtaattcttcttttaataaaatcagtctgtgttagaaaagagttgggagaaaccttttcagagacagatgagtatcctaatagattgggcggaagacctgagattgaagtcatgtgaacagattttgggtcattctaagggaaggctttaggctctgaatctgtctgcctgggagtggggaaattgtgcagtatagcctccttccatgggataggaagcacctgtccagacctgtataattgtgtggaagccagcctggaagtaacttgctccacaaaaattaaggagttttgcaccgcatgttctcgcttataagtgggagttgaacagtgagaacacagggacacagggaggggaataatacacactagggcttgttggtggtggggggtgagg

SEQ ID NO: 75302 - DNA, 1019 bp, Homo sapiens
caggatgtcgctctgtcccccaggctagagggcagtggtgtgatcttggttcattgaagcctcaacctcccgggctgaagtgatcctcccacctcagccccccaagtagctggcactacaggtgtgtgccaccatgtctggctaatttttgtatttttttttagtagagaggaggtcttgccatgtttcccagtctggtctcgaactcctgagcttaaatgatctgcctgcctcggcctcccaaagtattgaaattacaggcatgagccaccacatccggccctgtgatgctgtctaatgataccctgcgtgtgtatttttattacaaatttcatctatttgagttctctggggaaatatttctgaaaaactattttatagtatatccactatcagtgatctaagtcctatagaattttgtcagtttaaatttactccttagtatgcctaaaaacacataacctgaaactgtagtgctgaattttttaagctctgggcaattagagtaattttgctatttatcactgtgtttctgatgagctgaacatcctaggacgttttagaagtattttcaatgtaggatataaactagtgaaatacctgcagtaaagaataatgaaggtaaattagccactgttctactcagataatatccccctgtgtttttgagagatggtcttgtgctttaggctggagtccagtggcacgatcagctcactgcagccttgaactcctgggcttaagggattctctctcctcagcctcctcagtagctgggactacaagtgtgtgtggcaacatgcctggctaattttttttttttttaatgtaaagacagggtcttcctgtgttgcccaagctagtctcaaattcttgaccccatgtgatgcttctgcctcagtctcccaaagggctgggattaataggtgtgagccaccaagcctggatttttccctgcctttttttttttttttttttttacaccttaggtatcttttgaagcagaagctttaaaggac

SEQ ID NO: 75303 - DNA, 1056 bp, Homo sapiens
aactcctgacctcaggtgatccacccacctcagccccccaaagtgctgggattacaggcgtgagccactgcacccggccaggacaacctgttcttaccctctccaaaggtaaacactttcattaatttgaagtttctaattctcttgataatttttacagtttagctataaataaatatatatatatccctaaataatatactatttagttttacatttgaagagcctaatataaagggaatctagagtgtgcatttttccacaagatattttgttcactccacatccttacccatagttggtaatatgataggtctgaaatggtatctcattgtagtttcaatctgcattttactgattaccagtgagatgtgagcatatatttattgtccattcacatttcctcctcagtgcctgtttgccctttgcccattttaaaattaggttatctttttcttcttgctttgtaggagttttatacatattttttatataagtcctttgctgattgtcttatagatctcttttaccactttttgcatgactttgatctctatggtgtattttaataaacagacattatgtatttaaacgtagtccatttaaacaatattttcctttatggcttgtactttttatatttaaaaaaatcttctcttacctcaaagttataaaatcgtcttctatattatctggttttaaaattttacacttcattttttttcagtttttaaaatttgtggtaaaatacacataacataaattttaccatcataaccatttttaaatgtacagttccgtgatactagtacacaagtaaaatattgttgtgtagctatcaccactgtctatctcccgaactcttcatcttgcaaaactgaaactctgtgcccattaaacagtaactcctcatccctcctcatggctactagcagccaccattctactttctttcactatgactttgactactctgtgtacctcacgttagtggaatgatacatttttttttttactggctttttcacatagcaaaatgtcctcaagtttcatcca

SEQ ID NO: 75304 - DNA, 1035 bp, Homo sapiens
tatttagagcatcattacatggtgatatggtgacagatatattttttcttttctttctttctttttttttttttttttttttgatacagagtttcactcttgttacccaggctggaatgcagtggcgcaatcttggttcactgcaacctctgcctcccgggttcaaggattctcctgcctcagcctcccaagtagctgggattacaagcatgcgccaccacatctggataattttttgtatttttagtagagacagggtttcactatgttgaccaggctggtctcaaactcctaaccttgtgatccacctgcctcggcctcccaaagtgctgagattacagacatgagccaccatgcccagcctgatcgacgtatttctaagtgtagttcagggaagggcatattgtaggcaaaagtaactggagaaagcttcatagagatattggaagttagaatagattttgaagatgtgtggatctggaccagaaaaggaagaatggacattctggactatgaggaataagtataatatatgtattaaacagagtgtacaccttcttccctagagtggaaattaagtattggagatgaagaagaaataagattgaataggttattgagccagataatagaacaaattcacagaagaaccaaagctcttgataacggtctaaaatgccttttagaacaagataggatataattaaatacatttttctttaaattagtttatgtagattttttatcagtccaagtagtcctctcccaaattcctctgcattcgttactgtaaggttttagattggacaattatctaatgagatcttccaaaaactaataacttattctctgtaacagatatcaaaatgggggtaactactatcaaccaaggtcaccaattactgacttactaaatctatgggatattttccatgccttatccaacttgatcttcagcctttaaacaattgataatttttcctattctgtcttcctttggcttctcaaactccacttgcatcagtacttgtctat

SEQ ID NO: 75305 - DNA, 1063 bp, Homo sapiens
acaggtatgaaataagcccattttgatgatgtttctttaactaaaaattatgagtatatgtgtttctacatacatgttataattagataaacaacagaaattgggaatcatatatattgtttgactcaattagcatacgagttctcgtgatttctgtgagagtggaattgtttttgttactgtagtttaattactgacaaactttcaaattgactgctttggttagaaaaggtcatattatcttattgggatttttgttgttgttgtttaaagcctacaataaactcagtaacataaatcttatatgcgtatacattgagaccatctattgtaagttatgtttaatgaaacagtgtttataaatataaattttgttctacatagccagtagaaacatttctaaatgtaaaaacatttacatgtgttcatagcttttaaaaacaccttaatgtacatttaggaaagtaaatagcttatatataaaatttatctttctttcctttccttttttctttcacttttttaaaagtcttatttttgaggttattgtgggctttctaaattgtcctgaaaatccttgtagagttttattagaaccatagaatccatagcataaaagattttaagactatttttagatattttcaatccactggcaaaagcaaaaagagagtggccaaggaacagggcagatcaataaaaaaaggtaagatagcttaaaaaggcagaaaaggcaaagcagttaggatgagtgagtcaagactaaaattacaagcaagcatagagaatggagctagtgaaccagcaacaagggcgtcatatatgattaggacaaccaagacagggtaaacagaaggaggaaggaagactgaatttattaaataaaggactttaaagtaaaagtcataaaaaaaaaagtcatggttataacctacttaatcaacttttaaaaattaacttttctttcagttgacaaataaaaattatatatattggccaggcacggtggctcacgcctgtaatcccagcactttgggaggccgaggcgggcggatcacgaggt

SEQ ID NO: 75306 - DNA, 1021 bp, Homo sapiens
acaaaaccttcaagaggacactctctgtcttttcaatgcgtgagtcactttgtatagcacataatacaaaatcagtaattgtcagattattgatcatacaactctgtcctagcctctgcttgcttaaagaacccaaaacacttttcatgagcacatactattgattaacttttatgttacaggtttatatcaaaactgcaagctcctcctggaagaatttctgcttcctatttctattaaacaacactaatttttgtatcaataatagtaaatatacttttaaaaaatgagaataactgtggccattatggtgaactttggacatgtaagaataaacaatacagttaagaggagctctttaaatattgagacaaataccaaacactcattagttagctgcttcaaataataaactgaggcctcaaaataaaatgctgactccaaaatgcagtctctacatttgacactgtaaccttctgaaacctgccctccttgcatttcttttcattcagttttatttttaccactcaatacatcccttcaattccttctgctccttcccctgaccttctaaacaagctactttttcctcggaaattttcacaggaaaggagtgggcacactgcccaaatctacttaaaactgctagatcagaaggctattctacagaagttgaatttaaaccctggtcttgagctgagtgttaaggaattcttttaacccagaaagataaaaaatctgttgcagacttgttagatatttactgtcctgaactatcagttctgttccaactagttcacttaattgttagaccttcaggtgggaaaaaatggttaaaaacagtgggataagaaagaccaggagaatacttaaataatccagctgtttattaaaacataatgataatacattttaacaatttagtggcctttagggggcaagaaaaataaaaaaaattacagaaggctattttggaagactttctcttaaatatcaattggacaaaggttctaaattataa

SEQ ID NO: 75307 - DNA, 1046 bp, Homo sapiens
ttcagatagctcctaacaaagctaatgctaatcaaatcataggttgtaaatatgagataatgttaacacaagtcataattagctaaataaaagctgttgtctcttacaacttttaatagatataacatttttagaataataaaaagtaggctgggtggctcacgcctataatcccaacgctttggaaggctgaggcgcgcagattgcttgaggtcaggagtttgagaccagcctggccaacatggtgaaaccccgtttctacaaaaaatacaaaaacttagctggggatggtggtatgcacctgtagtcccatctactcgagaggctgaggcacaagaattgcttgagcctgggaggcggaggttgcagtgagctgagatcacgccactgcactccagcctagatgacagagcaagactgcccccctacccaaaaaaagaaaaaaaagtatatatactactaaactgatgtatatttttttaaatgctgaaatgttaactggaaaatagttgtgtaggacttcacattttacacagtattatatagttagttgcttgtatctgggcaggtcataacattcttgatgactggggcccaattcctgttgatctgtatttccaacatctaatgcagtggctggcacatggatgacattcaaatgtgtgctgaatttagttgtgaattaaaggtgttcttacctggtcccacagagctgcagccacctggtctattacagctcccagctctcggtattctccagagtaccggatatatgcccaagtgcacagggtgataagggtcagtcccattatcatattgcataggctagctatgatgtccaaaccaatgaatccagtcacaccagcaatcacatatgtgataaagatgactacaaacagtgtggctggggtacgagctgcatggaagatatttttgctatcattgtgcttgatatattggatgtaaagttcatctatttcactctccaactgctgcaggtaacgccggctaaattcttccccacccatcttcttcacccctcggaa

SEQ ID NO: 75308 - DNA, 2236 bp, Homo sapiens
actgtgcccagttatttttaattaaaacttatggtttgtttagttataaataaagttgacattttaaaaaacagactagtttcttgctagaaatacatgtttatgtatgtgttgtgaacatatatatgattgtgttttaaaacagatatgaccacattctgaagtgggaactcttccagctggctgacctggatacataccagggaatgctaaagttgctcttcatgaaagaattggagcagattgttaaaatgtatgaagcatacagacaagcccttcttacagagttggaaaaccgaaagcagagacagcagtggtatgcccaacaacatggaaaaaatttttgagctgattttttaaaaatttaagttttgtaagagctttaaaatattttcacagataaaaaattgcaaacaagtactctggttaataaatgctgcttcctttgtggaaattataaaattctaactttacatgtattttgttattagaaattttcttttattgaatgagaaaaattagtctatcattttaagagccaatatggcaaacactttcaaatactgtatattaggaaactgttttggtattcttgatggaaaaaaacgcagcggaaatgtcattatgaacagatgttaaataggaaattattacttgttaacttcttacagcagtagtaccttctttaaaaaaaaaaaagaatctgcggtatttttttaaaaaaaaagtttaccgctgtagtgtgaaatattgtctggaaagggatggtttaaatattaccatgatgtagttgaaatataaaataggatttggaaccttattgtgataaatatttatatatgatgtatgtttgtctcccctctccaaagtaaggaacccagctgggcgtggtggctcactcctgtaatcccagcattttgggaggccgaggtgggtggaccgcttgagtccacgagtttaagaccagcctgggcaacatggtgaagccccatctctacaaaaaatacaaaaaaattagccgggtatgatggtgtgtgcctctagtcccagctacttgggaggctgaggtcagaggatggcttgagcccaagaggcagaggttgcagggtcaagatcgcaccacttgcactgcagcctgagagagagagagccagaccttgtctcaaaaaataaaaaataaaaaaataaaaacaaaataaggaatccttttaaagcatgttgagaaagtattttttggtatgaatgggtgacgggccttttaatctttcaggaatacatataagcaggaatacttagcctgtattgggaaggtgcgtgaaactcaaagttgctaacatcatcttccttattttcagccagtgctgttactgcatttagcatggctctgacgaggcagtggagagttcctgacagcatagcatactgccttctgacagactgggttaagctaccaaaaatgacaaccagggattcaaaaaaaatttttggtcattaaatcgaatgtatattattactttttaattttctaagtatttatcacaggactttaacaccatatatttccctcccagtttttctccccttttggtttaatagttaaaacatttttcataattagtgctgtacatttgattgcaaacaaattggtgatacttctaaactataactataaatctctagaattctgtgaatttcaacattatttgaagtagttcttcagttatatttacatgtgttgtaaatatgtaaatatacttttagcttaggaagtcttccagaatacaaactactcccagttagatatcagtgagtttgaataactgaagaaatgttgacaatgttaagtgtttgattttatataacaagcttattaaatatatttttgtggaaactaagcgcgtggtttttgagtccatgttttagacatagtgctgtatttcatttttctgttcaaaaggccatagacaaaggaatcaatataattgaaaggggtaatgaaaaggggtattgaaaaatgaaagtgtggctagtggaattttatcactgggaaaagataatttgctgaacttgtgatcagacttttctaagatgtcagtatatatatcttatgaactcccacactcctctatcttaattgttctttcctgtcacttcttactttatatcgctacttaattatggtgtagccatttctgtgacagtctttagaagtttctctgttttggacctcctagat

SEQ ID NO: 75309 - DNA, 1096 bp, Homo sapiens
actgaggttgttgtcctttgaaagaatcaaacctgtggtgtggtcatcaggtggcaatgattgttgcagtccagataaccagatttgagagtttacttttctgttcgttgacatggtttggctctgtgtcctcacccaaatctcatctcaaatcgtaatccccatgtatcaagggagggacctggtgggaagtgattgaatcatgggggccatttcccccatgttgttctggtagtgagttctcatgagatctgatagtttaaaagtgtgtggcagttcccccttctttctctctcctgccaccacgtaagatgtgccttgcttccccttcatcttctgccatgatttaagtttcctgaggcctcccaattatggaactgtgggtcaattaaacctcttttctttataaattacccagtttcaggtaattctttataacattgtgaaaatagactaatacaatcatcattaaccttatgttattacagaattttaatagttttttaaaagcaatttcataattagttaatttacttctctcagcaacttggtagaagttgaacaagagagaataaacgctgcccttaagctcacatatgtagtattactagttgtctggttgtctatcttaggccaatccttatacaaaattcttgacttacattaggtcatttaatcctgagaacaaccacctgtggtatgaatttattattccacttttacaagtatggaggctgaggcttagggataggaggagttttgcttacatttacatagtttgtaagtgttaaagctgtggttcaaatccaggcgtacctgacttcaaagtcccaattcttcttcacccccagttgtactatcaaagaacattttcctttgaacctatttaggaaagaagagttgaagatagaattcagttccatttgcatattgatcttttaaaattgttaaccacagcataatctaaccttattttaatcccagtttagtaaacagtgaccttttctaatatacacatgcatttttttctccccattgttatatatacaccacattttcttttttttctccctaacttttattttaggttcagggg

SEQ ID NO: 75310 - DNA, 1143 bp, Homo sapiens
ctgaaggtaattttacataatattttaaataattttgtgcataaaacaaagttttgactgaattttgactatgactcatcacataaggtcaggtgtggaattttctgcttgtggcaacatgtcagctctcgaagttttggattttggagcatttcaaatttcagatttttggattagggatgctcaacctgttgttaagtgtttgtatggcctgttgatggaagcatcagccaaaaaaccctctactaatttcaaagtctagttcctccccctttttataattccttaatagtaataccgactagttttatgaaaaccatcataatgggcataatcatgaatttaaatagaagagtacaatcaggatagttaatgttgtgactttgctagctggcacattttttgcattgaataattgttctgtttcttctctatcattttctctttccccgtaggtattgggagagttgctgctacatctttaggaaatttgactaaccatggttctgaagatttaccccttcctcctggctggtctgtggactggacaatgagagggagaaaatattatatagatcataacacaaatacaactcactggagccatcctcttgagcgagaaggacttcctcctggatgggaacgagttgagtcatccgaatttggaacctattatgtagatcacacaaataagaaggcccaatacaggcatccctgtgctcctaggtacagtatcaactttattttcaactttttgtttcgggattgtctaatgttaggttttgaactgatattttcatctaagagaatagcatcctaaagcttgagatttgaaagccttatatttcaaaatttacatttttctctggacatacatttagtaataaatgactttaataagttaaaaaaatacttttctctttaaaaaaacctcaaaaacaagatcattgttcttatgatcagattctgctgtagtaatgccagaatgtttttgttataggtgtccagaaaattaaataattaaagcttctgccttcttacacttaaatttttacaaataataacagacctaccccctaagtcagaatgtacaattgaattataacattttgctgtttattctatttcagacatgattgtatg

SEQ ID NO: 75311 - DNA, 2035 bp, Homo sapiens
gcagaatacattttattctagctgagcttttacgcatagtccattaatgcaagttatataaattcatttgattgggaaaatattaatcttcctcaatttaaaatgcccaagtaccatcctaaaccaaaatttaaaattgtgttttcttaagttgactgacattttgattttggggtggtagacataaatgaacaaatttcgaaaacttttgttacttaatgatgaaagggtaattttatcctttgttttattgtagatcttatgccttcattcatccggcatggtccaacaattccaagacgaactgatatctgtcttccagattcaagccctaatgccttttcaacttctggagatgtagtttcaagaaaccagagtttccttagaactccaattcaaagaacacctcatgaaataatgagaagagaaagcaacagattatctgcaccttcttatcttgccagaagtctagcagatgtccctagagagtatggttcttctcagtcatttgtaacggaagttagttttgctgttgaaaatggagactctggttcccgatattattattcagacaatttttttgatggtcagagaaagcggccacttggagatcgtgcacatgaagactacagatattatgaatacaaccatgatctcttccaaagaatgccacagaatcaggggaggcatgcttcaggtagcttaacattataaataatatagtagtttatatttattgacatgtcaattaaaaagatgttcttttctagattttcttgggacacgaacaaatactactagcgaaatgtttttccactttgctcatcctgcttaagcctgtgtgcaaatagttgttaatctacactgaatggaagagtccttgtgaccatttattttattaactcatgttatgtaaacttggtatttatctcaaggctgtctagactcttaatgctgtgacccttgaaaacctagagaatttaatgtctccagttgggctgaatttaggtttaggtttggtagaataatgggaagggtaagtcttcagagacacttgacggagtcctcagagacacttgacaaacttgggaaaggaaagaagagtaggaacaactgggcatgctcagtgataccctgagcaaccacattacttcgctagatcctgccctttttctcaacaaaaagtagttcaagaattatttcctgagttgatcaaaaagacttattgtcatatggttaattatgtgttgagcatgtctttttattatttttgtaacagacaaaaaaaattaccatataatttaagaaaagaaggtactttccatatctcctgagttggagatacttctgaaaggagcagaagagatgggagaaatgtacaattctactttattcctgaagtcctggttttaccagataaaatgaagtgagatgaaaattaaactttcttgtctgattttttttttctaccaagttatagactttaaattttggcaggataaaaataaaatgtgagacagatttactttttggctcacataacttcaaataaggcgacttaaaaatggtttggagcattagtattttgactgtagaaaaaatttattcatttaatattaactgtttatgtgtctagcgttttccttgggtctgttggtctctgctttctggtaccttatttgtctagtaccttatttgtggaaacaaaaccaatctatacacaatggtcacagaaaaattgttatactttgtgatactaactgtaagtgcaacagggaatcagaagagagatgagtataggctggaatacttaaagagatgattcatggaagaggtaggacttggagtgggccttgagcttggcctttagattaacaagggccagaagaaggacattttacgtggaaaattgggaatagcacaatgaaaacagagtaggcatggtttaaatataaggaacagtgtagttctgcctggtttgaagaaataagatgtaaggttgagtggagatttgtggttcaacaataggcttaga

SEQ ID NO: 75312 - DNA, 1052 bp, Homo sapiens
acgtgaagaaggagacgtcgcctctgcttcggagtgagtgtcaggcggggcgtgcccacacctggcccaggcggccaggtgctccggggaccctggcgggggcgccggcgggtctccagggcttctccttcgtccttggtcgcgtgaaatactggttttgagattttcttgtgtctgaagtggtattcgttgattgaaagcccataagagtaagaaacttgggttagtcccccccgcgcctaacccccccaagagcaccccctaaaaataacagacttcctcgccccaccaggcagagttgttggttttgattactggaagagagagtaggaaacatttaaattgcttatcacctaatgctataggagtaaaagtaattagacagggacactttttactcttttagatgcgtcgagatgtgcgtcatgtttgcaaacattgcgggtgtctctcgactgtgctgcaagttgtgcgaactctggggcagaattccttagtcctgctgccggatgcagacttgagaaggtgaaaagcataccgtcgttcttgtagccgccacccaaagcctcatcactcttacacagcagagcagagagccaaaagcctttgtatttggctatattcgtgagattccaagaaggcaactcaaaataatttctatcgtattagagaacccccccctcgaaaagtttttttttttaatagggtagatcccactcccaatccccacctccggtcccccgctgcttttcttcttaatgtaagtatttgatttttgagttgaatctcttgaatttttaattcttgtgtgttcaggacatttgtgaggcatggagctggtattttggtgctcttactgcgccctgggccctttgcttaagtttccttcttggaagctggtagtaaccttgtgacttaagtattacctcatattgtaattgggaaagttaggtttctagtatttgcccaagatcacacagatgggagagcatgtttttccatcataaccacattgtcagccttccagatttatggtggtacttgcaatactt

SEQ ID NO: 75313 - DNA, 1080 bp, Homo sapiens
tatgtggtggttgctgaacacactgacttggaaagagtcttttttccttttgagacggagtttcgctcttgttgcccaggctggagtgcaatggcgcaatctcagctcactgcaacttctgccccctgggttcaagcgattctcctgtctcagcctcccaaatagctgggattacaggcacatgccaccacacccggctaatttttgtatttttagtagagatggggtttcatcatattgttcaggctggtctcgaactcctgacctcaggtgatccgcctgtctcggcgtcccaaagtgctgggattacaggcgtgagccaccgtgcccacctggaaagagtctttaagtaagtaagtagaaaaagcaagctgtccaaacataaaatttccaaattttgctaaagagaagaaaagaatctgtatgtgtgtatgggttctgtatatgcgtagaaaatgatctggagggacacatatccagctgtggacaatgggctcccctgtagagtggggtcagactgagtgtctcacttcttcatacacttgtgaatggaatgaatttgtaataatgagtgtgtattatttctgttttgaaatatatatatattttaaactttatataaagagggaaaagacaattatgtctctaaatctgtttttttttttttttagcacaagtagggtaacaagtttgaaaaacttattttaattttaattagatttcagaattaaaaatcaaaaaccaacaattggatttggaaaatacagaacttagccaaaagaactctcaaaaccaggaaaaactgcaagaacttaatcaacgtctaacagaaatgctatgccagaaggaaaaagagccaggaaacagtgcattggaggaacgggaacaagagaagtttaatctgaaagaagaactggaacgttgtaaagtgcaggtatggcctgtagccacctgacagctttttttgaggaaatcccaagaaatagaagaaatgtttgtattaaacttccttaaacataaagccttagtaattaaaacagtatggtcctggcacatgaatagataagtaggtaagtggaa

SEQ ID NO: 75314 - DNA, 1048 bp, Homo sapiens
aaaaatgaactccgaaaagagagagagcagatcctgcagcaggcaggcaagcagcgtttagaacttgaacaggaaattgaaaaggcaaaaacagaagagaactatatccgggaccgccttgccctctctttaaaggtaatcatcttattagttctgtggtctgcgtccctgccgggaacaccacgtggaaaactacagctttggaagtgggcatgtttgcacagggttcagtccaaaaatcctccaagtttgcccagctgggtcttcacccagacttggcagggccctgctaaaatctggatttcagcagggctacccaggctcctgctttgctcacagtattgattagcatctcttgttcttctctcccactgcgggttcactaggtcttcagggctgtttggcacctggctgaccccttgattcctcccgctgctactccaaacctggccctcaccctcagatccccatcttctcgcctgcccgcccccctcattctcagcagatggtcttgcctcctgctacatggatgcctgtttctcccggcctccaaatgtgccttttctttttttttttttttgagatggggtctcactctgtcacccagactggagcgcagcggtgcagttataacttaccacagcctcaaactcctggccccaagtgatcctccagcctcggcctgccaagtagctgggactataggctcatgttattatgctcagctaattaaaaaatgtgttttgtaatcccagcactttcagaggccgaggcaggcatatcacttgaggtcaggaattcgagaccagcctggccaacatcgtgaaaccctgtctctactaaaaatacaaaaaattagcagggtgtggtggtgtgtgcctataatcccagctacgcaggaggctgaggcaggagaattgcttgaacctgggaggcagaggaagttgcagtgagcagagattgtgccactggactccagcctaggcgacagagcaagactctggatctaaaagaaaaaaaaaatggtagaaacggggtctcattatga

SEQ ID NO: 75315 - DNA, 1107 bp, Homo sapiens
ctaaaacattaaagcaaaaagccaacacactcagtattgttacaagtaaggttctaaaccccaagttatggatttcagattccaaatcttaattgtaatcagatcattgtaatctgtcccagaccaaattctgctgtgctagcctaccaatttcaaaaattcaacataaagaaaatatcactgagggtcaccacagtataaaagtgtaacagatgtccaaccactttctactgttatgacactgggaagcttgtatctttatattatttaggtattttttaaaatttgtaagaataatgtgtaacaacattaaagactgcctattgtaggagtgtgagtaaaagagaatatagttaattgctaaattgcataagattatgaagatgttggaaattgacttttatttagtttgtgggaaggaggagggcatatcattactggaaagggaaaccagtaaagtgagaataaaggggcataattatatttctggagtcctgggaccaaccatggtactgattactactggccggaagtatactttgggccttgtatacttgaatggagtatttaaaatatgtgatgactcttttctagatgctcgaggaagtattccataatcttgatcctgacggtacaatgagtgtagaagattttttctatggtttgtttaaaaatggaaaatctcttacaccatcagcatctactccatatagacaactaaaaaggcacctttccatgcaggtaaaaaataagcagaagtgctttctttgtgaataaaagttagaacccatttaagtaatgtctaataaattaatctgttgtctgaagcaaaatactaaggaaagagagggaagcaaaagaagaattagaaagacttaaccattaggaaggaaaggttgggtttgagaaatgaccgtaaattacagtggaaagaccactaattatgccttgtcatgtcagctctgggtcagaagaaacctggtgttaattagggacatatctcgtctatgtcatagaactctctaccaaaacagttggttttgataagctccgtaggcttgactcagttgggaacagagatcagagaggctgcatgacttttttcct

SEQ ID NO: 75316 - DNA, 1010 bp, Homo sapiens
aaggactgttgactttaccacttgctccccatccccaccatgcctcagacatccactagattggagagacgtctttatgtagaaatgtaggctgagtgagctgatgaaattgttatcacaagcaaaaatcacacgtcctaattcacttttcattgatgccatgtttattagtgactttccattgtaatctgcatgaattgtagtgaacttaaacattttgagttatggccttttggtgtcttccatttgtcagcaacaacccatctcagcattgtcagcttggtatggccaaattaaatgaactctctgaattgatactatcttaaatatctaacatggacctgtgaaactgtggtaggtggttggccctcatttaagaggtgagaactaccactagtgagtgtggagaataaagtagatgagcgtaggttgcctgaaagaagaacttcaactcgtattaacttgaatgaactactgaaaaacaacatttcatctaaaaattttacgtgccataccatctgtcatgaggaatccaagttctagagacaggtattaattaggctgactttcctgtcgagtttattttcggattctaagcaatcaactagtcttgtacaggtcagctacccagaaaacgtgctggttatttgttatcaaaggcagcttcattcataaagctggatcactgctatgacagcagccccgtttggaaagggcgattcaccttttctaacagggttttctttgatggttgtagtaaccccccataacagtgattagttttaggcagtttgctggagaggctaaagccatttgctggaagccacagccactgtggacctacttgttgcaactggtcaaaagacgacctgtactatccccgggcagtggagcaagggctggatttcggtcctgacctgtgctcttagcggggcacttttatgcagtacacaaattacaactgtatgctgtgactttggagaagaggcaggagtaatgaagcctgataa

SEQ ID NO: 75317 - DNA, 1051 bp, Homo sapiens
agaatgtctgtttgagatggtctcagtccacaaggcagatctcagtcgagtgtctctgatcttgccactttaggaggcattggcatccaacattcaccagcctgagcagcacctgggcttcccaccaaaccgcctcatctgtcataatatgggggagatgctgcagagcaatatttaccaaaaggagggagcttccctttatcccacccccaagtcacaggaaataaatttagtgagaatttagtgggcaaataaatagtgagagttgtacctatttctgttgcataaacaacatttataacagtaaaataataaaagaaaattgtttcccatagtccttcaaccaatatgcatctgtttttattatctctatttccttccagcctttgtctaattgtataaatatttttgctggtggtaatcataggatagatagcatttttgtaatggtctttcatttaacatttcataagatgtttttccacgttcctacatggttttttaattatacttttaatgactgcattataatgtatcattatactttatgctcgattgttgaatatttaaattgttttcaatactttcttgttgcaaaaagtgctatcatgtacatatttacacatatggcttttcttcctccttgattttattgtctttgaataccaagtgaaattattggatcaaaaagtatgaacatttttattgcttttgatacataaagccatttacattactaaaagtaataatcatttacagtgctacccataacatataaacgggcctattttaaatcataaccttgatggtagtagaagttatatcttaaatactttgctaatttaataggaacaaaatgacttcttggttttaatccttctttgattgctgttgagatgaaccttcccccatgtttttttgtttttggttttttttttttaattatgttgcttcttatgtgaattgtctgtgtttcttccttctctgctgggaagacttggcatttttcttacaaatgtatatccataacagatacctccccaggtctacc

SEQ ID NO: 75318 - DNA, 1007 bp, Homo sapiens
tttatatttaatgtaagtccactgtgaagcttcaggcttcattacttacaagcgacttggagctcatctggtgcctattcatagtgcccactgtgatatggtggcacgggtgggagagcctatgttggcactagggggtagcaaatgatctgccaccttggcctcctctcctgggtagaatgtatgaaaagaaatcttgttatgaattgcttttgatcatattttacttttgctttagttcgtacatgttaaagccccaacataaattgtaaacattttacatgtttacatgtttacatctatgatgtcttcaggatagacttttttttttaacagaattccagtcttttcctttattgtcttaagtcttatcagatggaaatcccttcccccaccccatgcttctatcagacactttgattctttcctgctgaaacagaaaatatataacctagctactaagcatgtctcttctaccaaatttagattacaaggcaataaagctactctgtagggaaaggctactgtaacctagctaaattttcagcaccaaaatacacatttcagaatttcacttggaaatcccgaagcagaatgtgctaattcataagtgacaggtaggtcccaccatgaggctaccatgagtgtttgacttccaatttcatgtgtttatttggcagttggatcccttgggagtctgacctctcatcttgggtgatattgaaaagaaagtggtgatttttctttttttatgggatcattttcgctcaagtcaattcagttggccatttctattctgaattaatccagactaacaaagggcaccttcttgattccaacctaaggtgtgattaatgagaagattttggttgtcactgtttttgctttactttgttaagaaacaagtgagagtaagaagagtacattttttcccttgaatattaatagctactgaactgaccttgaattttatgctcatgtttcttctgagggcaggtggcagggaa

SEQ ID NO: 75319 - DNA, 1070 bp, Homo sapiens
gagctttaaaaagtgtactctgtattgcttgaaacctggagtaggggaggctgtgtttctcccctccacactgctgctgggaaaggaactgggagaggaatgaggcgggtgtttgttatttcccctggctgcagctggcttatctactctgagtggtcattctccctgacaccatattttaactttctttttattatgagtgcaagacctctggtcaagcatcatacatgtgcatggtggtttatcctgatttggaaggggaacattatcgaagctctggagtttctcttcttgggacagatgagatgtgaaataacaaatgtggcgtgtgagcaacccagctgtcatttctaaggcccgaaggcatagtattttcttcatctttttaactctcgaatcagatgttttccccacgtgctctgtagagactgtcactcacttccacattactccagtggagggttgaagcaaggtttctctactgtcccctgctcataaccaagcatttggcttatggaataaaacctagatcattaaactaggtcaggttggactgcctcaaagccaccttcctctgattggtgtgtctcataataagctttccagggatggggtctgagacacctccaggcaagctgggcttgtctgctttcctttgaagcccactttaatttttgtagtgatgccaaataggagaaatggaaaatgggaaagaaggaaaaatgactcagaagcttaacaatccagggagaatcataaatacactttcaaggaactcaaacactgaaacactgaaagcatggcagtcatttatactttgttttgatagcatttctttttgttttgtttcgtttctgtttttgagatggagtcttgccctgttgcccaggctggagtgcagtggcgcagtctcggctcactgcagcctctgcctcctaggttcaaccgattctcctgcctcagcctcccaagtttctgggactacagtcacgagccgccacgcctggctaatttttgtatttaatagagtccaggtttcgccatattggccaggcatttcatgtcccttc

SEQ ID NO: 75320 - DNA, 1922 bp, Homo sapiens
aaccaatattccgactcctataaaatccattagctttactacatgtttcaaagaaaacaaatgagaactctgaaggacatttaattggaaaactgctttagcacattataaacttaccaatttgcttgtaaacgctaaccatttggcgccaaaatcctgggagggtcttttaaaccgttcttcctcaaagcaccgccccactttttacaccacgcctccttttgctctgttccttcccccacaatattgggacaccctaggcggtagaagcagccgcttttctgtcatgcgcattgcggagagtcgttcttccctctttcccgacttcaccactcactgggatcagacccctgtcatgcgcattgagagtcctctagacaggcgctcctcgcagcaccgtagtgcgcttgcgctgagcagcccgcgagggcggaagtgggagctgcgaccgcgctccctgtgaggtgggcaagcggcgaaatggcgccctccgggagtcttgcagttcccctggcagtcctggtgctgttgctttggggtgctccctggacgcacgggcggcggagcaacgttcgcgtcatcacggacgagaactggagagaactgctggaaggagactggatgatagaattgtgagtgcggggcggccagggtcctacgtccgtgcctggacacacgacttcaccccgcacgttcctcgtgcgggtcgcaggctccccaggactgcgcctccgagttgcggagcgagcgtccccgacttctgcagctccccaaactcttgggatctgccgccagcttggtcccaccccctcgtctcttacccgtgaatgttaagtttcttctggggtgcaccctcgtttcgtttcttgggttgtggtgcgcccaaagggttagtgccaatgcgaattctgacatttttcatgactttgaggatgcgactggggcgcggggagggaggtgtccgactcgtgtctaagtagttaaagtgattcttcacagacttctacacttattttcaccacattttacataagagaatattgagcaaaatttctcctctcgttttgtctgtccttaaaagatagtctctttatggtgttggaatttggcgcttttaagctttttttaatggattgggtacgtttcttttttattgtaaatactgagtcaattcaagttgggttatttttaagttttcgttttctctttttgcctcctcttttgctttctctttttttcactcctcatctcatttttcctttgggtgtctttgtagtgtagagaataccttgggttgtgactcctaggtctttgtaaatggtattacattaaaagataatgtattaatgtatacactctcaagagcgccaggtcatcatttattgctcgaacgaaatcatgtattttgtgtggtgatttcaatttaataatatctgttctgccgcggtgggaaataaagtatctgtctttgctttagatgctaagtcgttgttgatggtggtattatacatattagcagtatttactgataatagtaaaagcataattattaacagtgtactggacaccactaagcacctttacacgaataccatatttaattccctacaaattctctatgacaggtgtttttcacgttttacaaatgagtaacaagatacctaaatactttagttaacctatgcagatattgctgtgctggctttctttgggtcttcagagtaggcatacaataattgttgttagaacaccttcttctttaaaaaggttcagctggaagtggcgtacgctacccaggagattgaggtatgaggatgacttgagcccaggggttcaagagatcctgggcaactagcaaaataaataagtaaataaataaaaatgaaaagacaacagggttcaggtgagtgttttcttgtgtc

SEQ ID NO: 75321 - DNA, 1013 bp, Homo sapiens
atggaatatgtgctttcttattcaccacagcccaggacacttctgtttttccaacaccttgcatttgtgactctgcattataaattattaaaattggtaagctctaactttggtcttgagctttctggtggccacaccgttaatagagaaatgcaaaagttttctaaagagctgttttgcatgtgaaaaaatcctgtgtcttattctcagaattttatttgattagcatcatcagttcatcattcttgatttccggattgttagatctacccttaaaagtttttcatctgcataaaattaaccaccttatcatcttcagtgttttcatatgaaatattcttcataaattatacatttaaattttttatcccaagataaatggtcatactaaagtgcttaactttttttaaaaaaaaatctgtatttcttagttatgccccgtggtgccctgcttgtcaaaatcttcaaccggaatgggaaagttttgctgaatggggagaagatcttgaggttaatattgcgaaagtagatgtcacagagcagccaggtactgtaagtctttggttagttttgtttctttgctgtttgggttgatatatttatccttttttctacattgcatagtcttaattctacctttctttaggttttgaaaacctaacagtctgcagctagttaacctgacttgtccacctccctgctgggggctcagtgtgcaatggttgcaaaatggagattccctggttgtgtatacacctcatttcttgaatgtgttgctttaagggttcttgaagacattaccctctttttattcttgcccacataactgcctctgatttgttgttctttgcatcccaggccccagactagtatgtaagatgcctttgagaagtcctaggacactgtggttcaggtgaacattggccaagccacatttgcatccataccaggcttcagaataaggagcatgtggttgagtgtttttctggagtcaaggtcacgttccctgacaa

SEQ ID NO: 75322 - DNA, 1019 bp, Homo sapiens
agcagggtgtctgaggtgatgctattatagccaaaagtactagaaaaatgccttaaaattttaagttatagcttaacagctaataattactatgtgccaagcactattctaataatttttatataattcttttaatatgtgtattacacataaggcttaaaagtactttcctgagatttatctacttactgtatttcatagtttcattacttggaagaataacagtaattacattttaaggcttatgatttaaaaaaatgtaacctcattgttaaattgggggctaaaatgtcatgagtaggtaaatagtataatttgctattaatacttgtacattgctaatgcttttgaatgttagaattgactgtaaagtgaagtgaaaaaatagcaaaataaatattaaattatttctcagtgctggataatatttaattctgattctctttagttgtaaagatggtgaatttaggcgctatcagggtccaaggactaagaaggacttcataaactttataagtgataaagagtggaagagtattgagcccgtttcatcatggtttggtccaggttctgttctgtaagtatgagggctttttctcttacccatttcataattaattggaacagataattatattttatgtaaagcattcatactcagtttgtttcttgagctgttaaggtatatccacatttattacatgtttgattttttttttttttttttttttgagatggagtcttgctctgtcgcccaggctggagtgcagtggcgcaatctcggctcactgcaagctctgcctcctgggttcacgccattctcctgcctcagcctcccgagtagctgggactacaggtgcccaccgccacacgtggctaatttttttgtatttttagtagagacggggtttcactgtgttagccaggatggtcttgatctcctgacctcgtgatttgcccacctcggcctcccagagtgctgggattacaggtgtgagccactatgcacggcctacatg

SEQ ID NO: 75323 - DNA, 3243 bp, Homo sapiens
tgttccttgaggagggcgagaacttacccttggtagggaaccactgctgtaaactagtattcaccaggaccgcctggggtgtggcatagaaaaggggctgttagcccaaaataaagatggatgccaggcagactaaacaacagatggttcattactggtaatttttccccatggtttattctgccttattaacccaatccttccttgcgggtgtcccctccctggccccaccattcttgattgcctaggattgggggcagtctgagatcattgaacagagtaaagctctttgacccagttctgtctcctgtatctcaccatggtgtgctctaagcttaagttaactagcagctggccatataaaacatcgaaagggtgtgtatttattcattgagatgtacacttaagatttgtacattttattcttgtaactatgttgtaataaaatcatacatatgggggatgagtaaggggaagcacatttataagaccagaagaagatatggacagaaatacaaccttcaactgtaaatgtgtgatttctgttcccctgggaactgaaacaaggatactgtttaagttttagtatacttgttgaccagaagtttaatagcaaattaatatgagatagtttttttaaaaggcagtcaaatttagcagtgggggttgtgtatcaccattagtgacagtaatagtaagttctgataacctactaccattggaccaaccagttttttttaatgctgtatattttctcacaacttccatattcacaacattaatgctgattcattaatttcagttcagtttataaataggtgggtaattagaatgactttgataactaaaatggctcaaacaatttttatttttataatattcatggttttttttatcttatcttgaataactttccttttggacatccaaacatgataaatttatgccaaagcagttttggggcatatgagacattgtatcttgattttactctaaagcaaatctaatacatcaacaaaaatacatttttggtctttgtctttaagaaaaattattatcagaatctgcacaacctttgaaaaaagtggaggaggaacaagaggcggatgaagaagatgtttcagaagaagaagctgaaagtaaagaaggaacaaacaaagactttccacagaatgccataagacaacgctctctgggtccatcattggccacagataaatcctagttaaattttatagttatcttaatattatgattttgataaaaacagaagattgatcattttgtttggtttgaagtgaactgtgacttttttgaatattgcagggttcagtctagattgtcattaaattgaagagtctacattcagaacataaaagcactaggtatacaagtttgaaatatgatttaagcacagtatgatggtttaaatagttctctaatttttgaaaaatcgtgccaagcaataagatttatgtatatttgtttaataataacctatttcaagtctgagttttgaaaatttacatttcccaagtattgcattattgaggtatttaagaagattattttagagaaaaatatttctcatttgatataatttttctctgtttcactgtgtgaaaaaaagaagatatttcccataaatgggaagtttgcccattgtctcaagaaatgtgtatttcagtgacaatttcgtggtctttttagaggtatattccaaaatttccttgtatttttaggttatgcaactaataaaaactaccttacattaattaattacagttttctacacatggtaatacaggatatgctactgatttaggaagtttttaagttcatggtattctcttgattccaacaaagtttgattttctcttgtatttttcttacttactatgggttacattttttatttttcaaattggatgataatttcttggaaacattttttatgttttagtaaacagtatttttttgttgtttcaaactgaagtttactgagagatccatcaaattgaacaatctgttgtaatttaaaattttggccacttttttcagattttacatcattcttgctgaacttcaacttgaaattgtttttttttttttttctttttggatgtgaaggtgaacattcctgatttttgtctgatgtgaaaaagccttggtattttacattttgaaaattcaaagaagcttaatataaaagtttgcattctactcaggaaaaagcatcttcttgtatatgtcttaaatgtatttttgtcctcatatacagaaagttcttaattgattttacagtctgtaatgcttgatgttttaaaataataacatttttatattttttaaaagacaaacttcatattatcctgtgttctttcctgactggtaatattgtgtgggatttcacaggtaaaagtcagtaggatggaacattttagtgtatttttactccttaaagagctagaatacatagttttcaccttaaaagaagggggaaaatcataaatacaatgaatcaactgaccattacgtagtagacaatttctgtaatgtccccttctttctaggctctgttgctgtgtgaatccattagatttacagtatcgtaatatacaagttttctttaaagccctctcctttagaatttaaaatattgtaccattgaagagtttggatgtgtaacttgtgatgccttagaaaaatatcctaagcacaaaataaacctttctaaccacttcattaaagctgaagaccagtatgatttctggttgctttttgaaggtatgctttattactttgtatttaacgatgttcagatgagtagttgtgtgttcctatatatgtacttgatatgtgtaatcaaaagactgccttctttttctattgagatgtttaaggacagtaatgctcattaatcaagcattttttttttttagtgttctagtatatgtgacatggccaatttttttattagaaaatatgtgaccagaaagattctatagagtaaaaaatcaaagcaaaacaaaaaccacaaaaagacccctgtactatagaaaatgtaaagttggctgaacagatagggtcttgaaatttcaggaaacatataatctcacggttcttaaagattgtcactgtagacatctgagtaattaattttcagttagtaacaggcttatagaaactttgggattatttacaaatggtttaggaaagaataaggtatagtaaaagtaatat

SEQ ID NO: 75324 - DNA, 1039 bp, Homo sapiens
gttgaagctgtgctgatggtacatgaaagaattttttatatgtttgaaactttccccaataagagttcaagaaacctacgtcacagcaatatctaaaacattttagaacaattctaagggctgaacaagagtatggtgcgaattcatttccaaagtacccattcttactgacttcactgcctgattttggtctattctagttcggtccacgcttacattgctgccagaattacatttcaaaaaaattaaatgagttcatggaactcccttgcccaaaataattcttttgagttcccatcaccaaaagaatacagttcgcaattctttcttttgtgatctcacagcactttagtctcattctcctatagaaatctcctgtgtagtataatcttttcagcatctatgttcttgtgtcctgcaagatggtgaaaaccatgagtacagagatcaggtctttttatcttcctatctttggtgcttggcatattatcaagcatgtggtagatgctcaataaatttttgatgagcaaagtaaatgtgaaatgcaaacagattatataaaagtaaatgcttagaccaatgaaactataacaggtaagtcatgatagctaaacaatttctacttagcagttttgttttttatttttctttaacccttctaaataaggcatgaaatttatttataatcaaaattaaagggaaatacttatgctaataaaaagtatcttttaattgaaaaagacacaggtaaatgaatgggcataatttttgatactcttacatatatacacctaaagcaaatctagctatcagaaatatactatcctcaacagataggatcttggtaatactgtcagtgcaagattagttgttttactgctataatcatggtcataaaaatcataatcaacttgggtgcctttctgcaagcaataaaaaacagataaattagactttgtcaaaagtaaaaacttttgttcatcaaaggatactatcaacagagtgaaaagacaattcatagaatgggagaaaatatttg

SEQ ID NO: 75325 - DNA, 1047 bp, Homo sapiens
agctggcagattttcaggccgtgtagttgtgtagctagtgtccaaagaaatattagctcgttttcccccttaacaccttttcatttttatttttttacgcaaaatctgttttgccagtatttccctcaggagctgtgcattgctcacagcagggaaggaaaacttcagcaagcgttctcaggttgcttctgacttccagcctgtgctctccagcatttctgaatgtggagaaaaagtatctcttgctggattttccgagtatgattcccttctgttcttctctgggaccgggcaatgtttgtttatgggttttataagcatctatttaaatttagtttttgcacgaaatactccctcttgccacagggtgtagtttggggtttagaaaatgctgttggagaaagctgctagtggcttcattttccaagaatgtaagtcatttcctttctgtgatttcagggagttgatatttcacagcatcaaaactttgtggggaaaattttccgtaatacatctgtcattaaaaaggcttgtgacttttgggtttccttcttagagcagtgcatgaatttaggttcagcagtgttaaaggatgagaaatttttttttagaatttagagcattatgagactattgtagaaattttaactaccaggacctacaggatggagagtgggggaggggagaagaccagaagagaggcaggaaaacagatgcctttgctgatgtcctttgtagtataaaacttaacagcaccacagcacctaatcattttctcaggtgtggctttgagaaataaacgttttatgttaaaaatgaaaatacttcacaatatgagacagctggcatttgaatacttttcccagtatgtttgtaaacattttggattcatatttcatattaaaatggacatttagtaggattattagatgaaaagggtcccccaggggatatctaatatcaaattatctgcaggacatcttctccagaaagcagactgactgtaatatgaactaattttcccccctttgagttgcttgcaagaat

SEQ ID NO: 75326 - DNA, 1054 bp, Homo sapiens
ttgcacacattaaaattatgtatttttagaaagtctttgtatgattatatcattacacattttgggagtgtgtttatgtcgtgattgtgtataaaacaatggagagttaggagaggggaatgggaaagatttagtgaaggagttttatgagtagtgaaatttcagttataatgtatgttccccaaaacccaaacaggaaaaatgttatcgttggtctctgtggttaaacttttatacagagggtagttgagagggctttctgaattgcacattatcctgaggaagaggctttgggggcctttaaaagtaagtagaaacaagttaaagggataatttgagaggaacgaggaagtggaatactggacattgaattgcaaggaaaaagttagaaggataagtatttaaaacaaggctgaagtagagagaacttactgtttagaagtgtagattaaagaataaggtatttttagctgagaaaaaaggatcagaatgattagaatcaaggtgccctataagatctgtatacaaacttgaaataggactgctaattgatagttatcctggaaattttgcctgtctttgtgttgaatcactagtttggtgttaaataatgtgcagggactggatgcttataactgtatcccgtacactccaaaagccacttcccatttcaaagactggaaacattttttgtttaagtgctaatgattctacaaatatttaattagtcccccaacatttgaggaaactactaatgtctacttcccatgctgtgggaccagagggggctctacagcagtaatggctgaagttattatgaagttttaggtagaaacaagcaatctgtgcttctcattactttatgcgatttagtgatgtaattacttctgatgcaagtttgtgtatgatcactttttgtatatatcaaatggaacagagcagtcatgcagtatatataccatattgatcaaagatgaattacagaacactgagaaggggaaagaaatcattgatctctcagctgattgtattgcttcaagtcaagaagagaaaa

SEQ ID NO: 75327 - DNA, 1021 bp, Homo sapiens
cattttcttttcttttttttttttctgaggcggagtctcgccctgtcgcccaggctggagtgcaatggcctgatctcagctcactgcagcctccacctcccgggtccaaatgattctcctgcctcagcctcccgagtagctgggattataggtgcctgccaccacgcccatctaatttttgtatttttagtacagatgaggtttcaccatgttggccaggctgatctcaaactcctgaccttgtgatctgcccgcctcggcctcccaaagtgctgagatcacaggcttgagccaccgcgcccggctagcatggcattttcttgaatgtctttccccagctgtatggtcttgtcttagcagagttaaattgatatatcaagaaactaggtagagatttggtcattatccaggtcattgcattaatgtgctgataattgggataattctgaccaaaaatatctatttagactctcagtattccaaatggatcctcttgggggtgttttcagatgttttccaacaacattatctttgtacatgttttatacaactttgagcaataatgttttactgatacatgaagacagagggaaaaacaatattttgaattaatttatagccacagtttcatgtgagggaggaaatcatttaaaaaaattaagcaatttcttgatgcatattttaggaaatataatgaagtttctcacttagcttttcagatgatttttctctctgattgggttaaataaaatgtaattaattttctccccacaggtagtagcacttgtgtgtacagtttcagtagatgacttttttttttggtccctgtagctttatttctttgaacttgttactgaattatacacaaccagacaaatgcacagatcaggagtgtacagcacaaaatgatcacatttgggcaactagcatccaaatcaagaagcagaacattaccagcctctctttacagtcatcatctttgcccccaggataaccattatgctgacttttattgtcatgg

SEQ ID NO: 75328 - DNA, 1038 bp, Homo sapiens
tcagtttttggacttctcctgcctttatgcttctccctcttttctccctttttgtgtcttccttccacccccatccagttatcgtttcttaaagatccctggaaacatccaatctttgtctactgagagcagcagtgaaattctgacgctaaaatctgtggcagtctccaggaagtacttattgtaaaacataagattatgatttcactgagagatctaacagataaaacaaagtgcttgcaaaggaaaactattcatgtatacattttattttatgtttccctaaagaataaaggacagttttattacttaagaaaagactcagagcttcagcttaagctcattaaaaaggtgaagagaagttaaaattagagaattttataaatatgtggtatttatatatcctacccgaataagatactgcttatcacagcaaaaatttagcatatgtaatgttaacaagtaaaaaatatgctgaccatagggccacagctctgacaagttgctcatgaaattactacagaatagcgtaatccgtattgaagacagcatagaagagggatagtaaaatataatgataggaatgaggtcttcgagatcagttccctggggcccaaatccagactccagtattctcccatgtgtaaccttggggaagttacttaactctctacacctctttttcctcatcagtaaagtgggagatagttataatagctatcccacaggattgttcttatttttaagtgaaatggtacgtgtaaaacaaatggcatggtctttgatatataataaacgtcttacgtgatgttagctattgctgcttaagacaaaaagaagtgatgtataaaaggacttatagttttattggaggttcccaagccttcatttataagcatttcatgagatttaactttgttttttgatggcattaagcaggcaacaaaacctagtatttctcagttacagatactggcaagtctgtgttgctgcagtaggagcagctggcctgttgcactgattactaattgatcgagt

SEQ ID NO: 75329 - DNA, 1078 bp, Homo sapiens
gagatacaaatttggaagttgccaacagaatttgggtgagatcacttggggaatatgtgtagtcagagaaacaggcttatggaccaagccttggggcatatcagtatttacagtttgtagagagaagaagaaatcacacacataatccaagaagtgttttaagccaaagtaattatgcacgtttttccaacatagtgaacccaattaagtgtctccattccttgagtaacaatgttatcactagaagatattgtgaactctattgatctacacaatggaagaatgaactatgagttgtttttctaattgcgttgatggtcttgggctaaacctggatgcttcatcttttagaggttgtgttgataaggaggaatcagtaaaagaaaattaaaaaggagcaagcagaggataggaagaaaattagaaaaatgtccttgtagtcaaagaaaatatctccagcagaagagtggatcagttagctcacatgttgctgagaagtcaagcagggtgaagactgagagttgctcattggatttagcaacctggggagtcattggtgatgatgacaagagctgtgtcactggagaagtggagatgaaaaccttattggagtgggttcaaagagaataaaaaatttatgaaagataactattacttgtaattcagttttgtatattacaaatattcaatattgatgtgggtacattttaatatgcctggtaggatgtgcagtgggactttggaaatgggaatgttggaggccgtgcatatcttcagcaggctttgtcagggttagggagcctttgagcttttccctagttattattggtaggggtagggctctagtatatagattgtagtttgtatattttgaaatagagaaacggttctatgcagttttttagttctttgttaaatgtctttggatgagaactatatcttgaaaatactcatactttgtttaaagactttttcatttctagtaaagatgtgttctttaattcaatctattgatccttgtcttagattgttttttgatactataatggagtaccacacataaggtattctgtccata

SEQ ID NO: 75330 - DNA, 2264 bp, Homo sapiens
aacctgtactcatacccttgaatttaaaataaaagttaaattttaaaaaaaggaagttcatttagcttatggtttgggggccctgaagtccaagagcacggcaccagcatctggcccaggtcatcccatggtggaatgcggaagcaagggcaagacagaaagcacaaggggctggactagtttttataacaacctgctcttgtgataactacgttaatccactcataaggacttgacccttatgactcagtcacctcttgttaggccccatctcccaatgctattgcatcggggattaagtttccaacacatgaacttttgggggacacattcaaaccatagcagtcctttttcatgaaaggtgagacatgtgctttgaggtggcttctttttcagcaatggtgataggtttgatctgactaggccacacagcatagtgccccactggcctggaagccatcattcacagagtagatggctcaggttagtgaatcccaagagccagagcaaattgagtaatagaaaaattgcctcgttaaaattttaaataccttgttgatgactttcatcatgaagtgttatttcaaagcatgtgattaagcaattttcatagttctgtattttataattatacaccaagaattttctcttctgggaactacctttgaattttgctaactgtctgtaatactgtcatcaaaatgaatcaacaggtgtctgatactaattatcttctctttctctaagcttattaaaatgctaacacataggcctttaatgcatacgtattgtttttggatagttagaagctcagagtggttggtagaatgaaaactttgttacatatattttagtgtttggtaataccaaagtatagtattagtctttagaaagttgctaatttagaaaatgccggaaagggcgaagactttcctttgcagtggattagggcacaaggtttttgagaagtggagctctggtgattatatgtgtgtttccagtgggttgtggtatatgcatataatgtcagcattctcttaggtactgctttgccagcactgttttattcgcatcattttgaatgtttttttcagctgaaacttgtaagttactctacagttagttaagttacagtacagttagttagaatgtaattggcttggaacaaatacacgaggccaatgtggaataatttcgcagtgctggggattttacattgtagatactggagtatgcagaggtataaaactgagcaagttttgaaataaatcttatgtcacttgtcagtgactacagaataaagtccagatctcttagggtggaattcatcatgccagcccagagttgcaagcctgtggcccaccaacaagtttggctgcagacatgttttggcttttaacatagttatttgccaacatttaaaaatagagaaattttacattaaaaaaattgcattttataccttctcttgaaaaatttgaaggcctggcaaggtctgttgtagcaacataacagcttccccctttatacggggtgtgtgctctgtagtctcccacagtccctggcagagactctcttgtcctcaacattgggaccaagctgttgtaggcatttttcatcctgcaggcttcacttctttgctcctgcccttgtaggcatgtgagtttgctaaccttgtgtttagatacttatttttttttctcagagttccttaaatctagccaaattgttcttcccattgtcctgtctaatgcgtacacacttcgtctacctcatgtttctgcttctggcttctccttccgctgcgtccgagctgcatgttgctcatgtcacatcattggaacttagcacatttctagctccccagctgtactagtttcttgaagacaaagactatttaatttactaacacctatcaaatttattttagatcttctgggttaactatttgctaatggtttggctgcgtccccacccaaatctcatcttgaatttaactccaagaattcccatgtgttgtggaaggaacttagtgggaggtaattgaatcatggcggtgtgtctttcccgtgctgttctcgtgataatgattaagtctcacaagatctagtggttttaaaaatgggagtttccctgcacaagccctcttctcgtctgccgccatatgagttgtgcctttcaccttctgccatgattgtgaggcctccccagccacgtggaactgtaagtccaataaacctcttccttttgtaaattgctgagtc

SEQ ID NO: 75331 - DNA, 1267 bp, Homo sapiens
gaaaaattaatactttattggtcggaagaatgaagtaatatggtatcctgaaaaaaactcggcagtgaatttactgacatgtgtgacccaaaatatagagtggaattttgtgtggttgcgtatgttttatcgcaacaatcagaaatgttttatgtattttcttccaaagaaaatagaattctatacttaacccatctaaatatagtggtaaagttaattttttgcatagtttagtgacatactgaaacaaaggtcagctgcagtggtgccatttctgaaatctcttttgaggaactcacgttacttacaattatagaaggagattcagaaacattgacatgtttaagggttttacttcaaagaaacccaagattttcaagtgtaatattaaggatatttaaggaaattaaaatcaggaacagtttttaataaatgttatctcatctagaatttaaaataaattctaattaaatcttaaaagtaaaatcttttaaaactcaaatactgattttctgaaccctcattcattttaaatctgtgaaaggatgttgagagctaatggtttgtaattgactaaattatttgcttctacaggtgcctagagaaatgtaaagagaaattttcatgaaatataagttgtagagtaaaacctagcagggaaagctaattgaagttatctaatttataaaacaacatttgctttaattactgccttacatattcttgaactaggctcatgttgctgatgagtaaattttcaggaaatttttaatcagtatattatagatacagggtctaaattaattcacattatcagtcatttgttcagagcagctgttaccctgaaaaatactctattaatttatagaactggttaggaaagggatatgaaagtaaaggtgttttgaaatgattacatattatacatttaagggtaagatactaaggacggttgcttgatttactctttagaacttatttatttattgagacagaatctactcctttacccaggctggagtgcagttgcataatttcggctcactgcaacctccgcctcctgggttcaagtgattctcctgcctcagcttctgagtagctgggattacaggcatgcactaccatgctcggctaatttttgtatttttagtagagacagagttttgtcatgatggccgggctggtcttgaacccctggcctcaagtgatctgcccaccttagcctcccaaagtgctgggattacaggcatgagccaccgtgcccagc

SEQ ID NO: 75332 - DNA, 1743 bp, Homo sapiens
ccagctctatgtgagctgtaggaattgtttgacctattgcttgtcgaagattctttcctctgccttgtggagtttttttttttccacgttagcacagatcagtagttagccaatgtaccaggagaacctctctgaagatctttgtacctctatctgggttcccctacttcctctttgggattctgtgctgccccccaaattctagctgcctctgcctcccaaacttttctctttatcttctcaattcagggaatcttctcagttctttttggattcctttcctcactgtggaccaaaactgcctccagtcattaagtttggggaatcattaggctcacctagtttgttttccttcagtgtctaaaaaccatttgatgtgttttatccacttttctagttgtttatggcagaggacaattcctgcagcaattaatatttgatggccaagaactgaaagttcctggatgtaacaggttatttttcagaactccccaaaactggaagaaacgcattgaaaaatgtggaggggaaaaaaagtacagaggcatcttttgcataattatgtgtggaatatgatgctttttatactcattctgagaaatggtccttgaaagtaatcacttgccagtggaagtttgtagattgtccagagtttgtggtgcatgtgacaagttaagagtctgaaaggaagtatttcttttttattatcagaatctttgcttttaattgctttattcactaaagtggataacttagacctcagctacagttttcagttattatacatggaagcttaggaaacatcacgacttttactcttggagaaaataatttccaaatcctagacagatgactttcaattggaagatgcttttgaaagaaagactcattagagggagtttcaggattttgtctcctggttattgaaacttgtactgaaggtaaaaatccaatggatttacaactttgcaaatcttatatctgaaaaaaagaatccaacttttcctagaaagcccactatgaggagcaacaccatgttttcttcattcattcttccaaacgtgaaagtcatgaaggaatataggcactcctctcgatgagtgctttttaaatatttgaatgattttgcctgtgaatcagagataaggtgattccaaggcaattaattgtaggcaatatatagtctttttctagggtaggattgagcgagtaagtgagccatttgtgttgagcagtggtcctgccatgcctgctgacttggaatagtctgctccttgggtttctccaggataaatgtttatgtgtcagtctcagtacttctgcctttccagtatgattagagccatatgaaaaagcagtgctgagcagaggtagggtggtttctggtttttgtttgtttgattgatttggggttttcttttttaacttcaaccttcaaggttgaggtatggttccatttttcatggaagattaaccctatttgtgtagggtaaggtgtaattctggtttccttcccccacaccctttaaaaagcatactttaagcctctctcaacgcatcagaggatgattactgtgagaaggaatgttctcttttggtaatatggagggggacgcacgaaccgaacaaccagatgatccagtaaataggtaggtcaaatggaggtgactggactgggctcttcagttactcattcctggattttgttgacttcacacaccagagagaccagagaggttcact

SEQ ID NO: 75333 - DNA, 1044 bp, Homo sapiens
ggttctgtgtatgacaatgtgagccaccacatcaaaccacctgtggggccacccatttcactttaggctccaagtcactctatttataaatttcgcttatttaactagtcctgttgtttactaatagttaacacttatctagtgcttaccatatgccttataataccctataaagtatgtactgttataatttccattttatagatacggaagctgagatagagaggtgaagagactttgtcaaaggtcatacagttagtattaataaatagctggctaagagtcagacccaggcagtttggcttcagagtccagatttgagttggatatttttggtacttgcaacttagtgcgtcccaaacagtgtgtctccttatgtgtttgctttcacataagttggcttaacctgacacacatggagacttttgcagaaattattttgtggacagtgttggaggatcgtattctcacattatgtccactaaatttggagacaagaagaaatgtacacatttcctctataactaatatgcagaaaatattcaagaagctctgaccaacgctgactcccattgtgggggaaaagtgtgtcgtaaaggaacataatttttaacttaattgctagggattcattcacatttctggtaagtctaaatagtgtatttaacaagtcctactggatacctatacagagccagtactaccctgggcattagtgacataaggatgctgacagcctacccttgaggagactccagtcctccatggggagcaggagaaaaactgctgagttgcctaggaacgtggaggcatgcttcacagaccagcatcttgagtttccagggagaatgaagatattttgtgatttcattatgttcttttggagtgggtgggtgggtgggataatatgcaagggataatattgtaggcagagggaacagcatggtcaaaagcatagaagtatgaaagcaagacttgttcagggatccgtgaggaaaagaactgcagtaattcagaacatgaattggaaaatactcacactga

SEQ ID NO: 75334 - DNA, 1046 bp, Homo sapiens
ttttgccatttcatgttcaaaaccctttatctcccatgtgggactgaaaactcctccaagacaggatctctgtttctgtgaggcctgtagtacttagtacatccttgaatgtgtgaggctctcattggttataagtttaattcctgactgtggatgaaagctttaaaactttgtgggcaaaatacagaatgaatttcagtgagttcccatgtattaaataaggtggtgctggctggagatatgctgtccctgtgcccacaatagtagtggtgctgtgcttatcttcctgacgcgctcttcgcagtcttcaccgcctttcttcaggagtctcccctttggctttttcacagctatgaaacccacgtagtcgaacaccgtgatgcttctcctgcagggcgtgtgatgaggaggcgagcttggctttggagtgctgggaacctgaggaattgccaaggacccagagcccagccctgaccaccagagtgcccaaaacacaatgaacaaattgaattttcataacaacagagtcatgcaagaccgccgcagtgtgtgcattttccttcccaacgatgaatctctgaacatcatcataaatgtgagtagatccagttttagaaatgtctaaatattgtgttttcaccagtggccacattcaacttatgacttgattaagggtgaaatctttacagaattagggcagtaatcatgtggcagaattgggttgtcaaatagtccatacatacattaacttagctttgtggcttgtgtgcagctgccttcaacattctctcacctgggttagaattagaggactatggttactatattgaaaaacaaacatttgctatttttaaacttttgatcgaaatataacttttattgaagtatatgaatttatgtcttaaatgcttagagttgtcacccacacacatgaaatggtaatcatcgctattaggttggtgcaaaagtaattgtggctttcgccattgaaagtagtatcaaagactacaattacttttgcaccaacctagatagttttttttgtt

SEQ ID NO: 75335 - DNA, 1024 bp, Homo sapiens
acttaaaacacacagacctgaattcaaatctcatatctgaatgactttgggaaagttaattatacctcttccagcctcaacatcttcacctttaaaatgagaataatacttacgctgcagggtgattgtgagaatttaggattaacactcagcataatttctgatgcatatataatagctgctattatcattttaatccctaggcagagataaattatactttttcaactcttctcttttacagtgttagtatgataatctctctaacatggttaggactatgatcatggactgtgaggtcatatatcacgattaaggtgggttttggagtcacaggtacctgggttgaaatccctactccacaactttgcaatctagggcaaattttctagttgttttgttttgttgctttggtttcctcatttgtgaagtagggataatcttaccctctgcacagggacattgcaaggatttaaagatgtcacatgcatgaagtattcagtgaagtgcctgcatatgtgaattgctcagtaagtgaacccttgagtgtcagtttactttttagttccttgaactgtttgttcatttcattagtgtactctgttaataaaccaagatgaagagtctgaatcccatgtaggcctgcaagatttcttatttcagggcaggtctaaggtaggacacaagcatgtagactcactatgcccaaactcctctccagtaagcggttggaccaaagaagggactaggttacgtaggatggaggcttccccactaccagaaaaacaattcatggctgccaagaggccctccctttttacaaagtgttatctttgtgttcagaaaatagcagtcaatgtgtatagagtttgagtgtaataaattaactgtagcaaaaacgattttattaactaattttttcataatttctctctctataacaatgaaagtttgttccctgacaggtgtggttgatagaatgttgcctttttgcatatggaataaatttagtgttttggtcatt

SEQ ID NO: 75336 - DNA, 1037 bp, Homo sapiens
aaataaacccatatgtgtttattgttatctgctaatgacatcagctatgaatctcaggtaaacattcaacctgaaataatgtagaggcaaatgagctcattaaaatatgtacacacacatttttactttgatcacaaaagcatcctatttgccagtaaatattttttggagcttttaccatgttttccccagtcagcatttcttaacgtatttaatgatgactgtatttatttctgatctcaagagattgtaatgagtgctctgttagtatttccttttgtggggagtataataattgtcgtgacatgtgcctgtaaaaacataacagtaatgtaacattcacttcaaaaaaatccccaaaaaaagatttaaggaaagcattcattgcatttcttcttggagaagtttaaaaaacggaaaagaaacctttgttaagcaaatttttttccagaagagtatatatgcaaatacttataaagggccttagagtatttgtagtgtgttcagttaaaaaataataaaaagaacagcaaaacactgaagcaggattgctcctcagatttttccttatttatgtcacgtgtgtagcatcattgtagcaacattagtacagacaacacatgtctagtttctattctaatacttgttcagtgaaatatttaccattttagagtggaatgattcagacctttttcttctctgaatgaatcaaatgctgtaagccttaggaaacgttatttttattgtctggatagtctgatttggggttctgaccccctgcaacctcagtgaggcagctatcagatattagctacaaccgcttccttttcagtgaggtgggagggaggagcagaaacagaagggttcctgtcaccagatggagagaaggatttgggttctgtttacatgtcattggattattccatcaaaatgtgagttctgttttcttttatttttctagtgacagagcagcaagatactattattactggcacctgagaaaacaagttcttcattctcagtgtgtgctccgagag

SEQ ID NO: 75337 - DNA, 1047 bp, Homo sapiens
tcagtccactcatggtgctgcctgttaggttgctttatatcaatacagtaaagaagtaaaaaattaaatatgcactacttttgctttatattgacaccagttgctttatattaacatatccagcagactcttttcactaaattttgctgctgtacctgacacttaactactcacatcttgggagatctcatccaaattaatgcttttaacgatcacctatgtgaaggcaagtcccaaatctggttttttcccctatatccataaggtagctgtttacccataggccgttcaaactcaagatgtcctaaatcaaattcattttcttgccacctcatttctacgtattcctacctctgagtacgtgggagtcatacggaactctgccttatcaccattccttctccctgtcctgtcccatcaactgtaacaccttgtaatgtctgtgcttgaataccaatcacccagcttaagaaataaaattatcttctatttttattgccattagccttcctaaatgtccattgcctcctctccctgtcttagctcctgctgtttctaggttcgtgttctcagcagcactgttgcagaaacttgtccctgcttcggtctttactccacagcttgcagatgagatgattttgcttctgacttaaactttcagggcctcctctgtcacctgtggagtgaagctcaggctcccatgcataacctagaaactctccagattatagtccctgccagccattccagcttcctttctggttgtcctgcaccttgaactttaggctctggcaacatccagccattggtgtgtctccatacttactgtggtgtttcatgcttcaggtctttcttcttgcagttcctttagccagtgaagcccctctctgtttcacctggctaactcctactcatcctccgagactcagcccaggtgtcgctccttctgggcagaccatctaggtgcccagtgctcaagaagaacctgggaatagtgttttacatcttattttaaaatgatttatttcttgctcccagtaaactgtt

SEQ ID NO: 75338 - DNA, 1043 bp, Homo sapiens
ggaaagaaggcagtgctaagggtctgtaacatccgacttcaactttacattaatctgatagccctttatcttgagttgtggcaccctggatttcctccatttaacacaccccaaccctaatcctcaaaactgctacattacgtatttgggtttgtttttttttttaatgctttggggttttgtttatgctttcaaagatttgttttgcaaaaattagttttataaattcatgttgtagtaatatctaacagtaatttgattagattggatttggtgtatttgtgtgaatatcagggtgaagattcatattttaggttcatgtctgagacaagttttgacacctcagacctcatctttcctttagaaaccaggcaaatacccatcctttcttaaacaaacaaaagaccttgtagaggtttgtgcttctgatagatttctctcaaaaattctctgtcaatccaaatgagacccggtttggcaattcttttgtaatttcgtagcgattagaacatgaatcattcctcactgtctgccacaaactgcctgtgtcttcagagagaattggtataactgtcaggtgtattggcttcagctgctgctagactgccacttcttccccacgatgactcatcagtgtaacaaatatatctctcctatgctgacatgaatatgaaaaggaattcagatggggacaggaggaggatgaagaagcaggagaacctgtgagaataggtgacataattacgtgcagagcccataatttgccaagtcagcttcattcctaaacgtctaacatggcaccttgagaagttgatttgttctatcagctttctgcctgcagcattttagtacattttttttgttcagatgaccttaagagatcccttcagagccttaaagaattaatgaccttcctctataggttctaaggtaaaaattgcaaagaattttgagttttcagagagacagggcgttgttcattgccaaccatagtaccaagtgtattcggaggcttaagtgagtaggtgtctttgtttgttttg

SEQ ID NO: 75339 - DNA, 1028 bp, Homo sapiens
gaacccactactgcaataatggcactaacccattcatgaaagcagagctctcatgatctaatcatctctttaaactcccatgtcttactactatgatatttgatatcatatgatttatgatagcaattagatttcaacctgagtttaggagggaacagacattcaaaccatagcagtagaggaatgaagaaatgacacatgcttagtttcttctacttaggggttttccaggtctgaaaaaggcctgaaattaagtttctctgggtcaactttggcctgaatccaagatctcacccccatttaagggctttatcattttaacatgaaaagcccttttttgggcattagtttagcaaaaaacagcataaaaagagtctgtgtttttcttaattttatgtagagtcaccttgtctaaaacactattttagcattttagtagaaaatgatcacaaggatttttccatagggtttagaagagaaacaaaaacatgccttgcgtcatttaaaaaaatgttaaagcctaactttattcaacagctggagcttattcctaggataagtattcacatttactgcattattttccaaagtagcgtatgaaaaacctcattgtctctgggcttttacaacagagggagtaaaaagagcacaggcatgttgatgatctgcactgttgacaccagtgattattagggggatgagaggttgcattttacatttcttagaaaacatttcagaattatttaatgtttctctcagtttgtaactgaacggtgtgaagcttcctaaatgtctggaaagggtctggtacagcactagggagggaagagaagccagccatgtggaacacccaggccatgctaacatgttgacaggaataggtagaaaacaggctggcaagtacttgtcttctcgtgagcatactagtgaatatagaggaactatagtgatctctgaacctatcaggaagttgagagtaaaaaggctatatgtaaagatacagaaaagcttttaaattattaggtcca

SEQ ID NO: 75340 - DNA, 1070 bp, Homo sapiens
catccctctagttgtgatcctttgcggccacaagactggatggttgtagactcagtcttagctgtttctatgaagtagattggaaattagtcctgctgcccttgtgtctgtatttctgcttcccagattaaataaaacagtggttaggacagcacagtggagtgcagtaatagtgacagaaacatcttgaacttctggacccctccccacaaagtaaagattggagtccatgccattgagttacttagtaatgtttttctgaagcgcctcccatgtaaccagaactatagggaggataaaagaaatatagcacctggttgataggaacttactgcatgttaaggagataagatgaatcctatggcttatcttagccaaacttaacatttgtgtccctcttttatattatttttctgtctcaaataagtgctgtagcattcaggcttgacggaaaagatagactttgttaaagaaaagtgcagaccatctttttggtttctgtagaatttgtgtggctctcaagtcactcagtgcccttcagaataggcagctatggacatggggggctttgtgaactgtcatctgcctgtgtcagtgagccttgctttggtatcaggcaaagggcccatcagtttcggtttgtcctttgtcattgcagcaaggtggtatagtttttcttcttaaaaaatacagaataatgggcaaattatagtattaaaacacatataggtaatgcagcaatccgataagaaagaacaagtaggccaggcatggtggctcacacttgtaatcctggcactttgggaggccaaggcaggcggatcacgaggtcaagagatcaaggccattctggccaacatgatgaaacctcatctctgctaaaaatacaaaaattggatgggcgtagtggcgcgcgtcttcagtcccagctactcgggaggctgaggcaggagaatcgcttgaacccaggaggcggaggttgcagtgagcggagatcacaccactccagcctggtgacagagtgagacttcgtctcaaaaagaaagaaattgagaaagaaagagagggag

SEQ ID NO: 75341 - DNA, 1726 bp, Homo sapiens
acagaccttggcctaaaaggtctgaattgccatatcctactgaaaaaaaaaaaggaagccatgtctttacctatatgaccttatttcaagataattacttgatttctgaaatgctagggatagttggattcctgttgtatttgcacctctgtgctttggattatttgtaaaatgaggagaatgatagtgcctgcttcctaggactgttaggaagattaaatgagttaatgcatgccgagtatttaggtcagggcctggcacatagtaattgctcggtaaatgttagctgctattattactgatggaggtggtgttgatgatatatttccccatacagcccagaaaccacagattggaaaccactttctaacatgtaaggattacttaaccttttgtggttctgtagcatctctctttacaaggcaaatattctaacctttcactttaaagttgtttcatccttcccttatcttgcagactatatgtcggaaaccaaagacctccactgatcgacacagcttgagcctcgatgacatcagactttaccagaaagacttcctgcgcattgcaggtctgtgtcaggacactgctcagagttacacctttggatgtggccatgaactggatgaggaaggcctctattgcaacagttgcttggcccagcagtgcatcaacatccaagatgcttttccagtcaaaagaaccagcaaatacttttctctggatctcactcatgatgaagttccagagtttgttgtgtaaagtccgtctgtgtgcagctgtacaggcagcttactgtttgctagaggatgcgaaagtcataagttctttacatattacttgtgccatatcttcttcaccctaaacatagctctttctttataatatttgtgatgatggaaacaaaagccttggaacaattgcactttaagtattacacagaagtaaaagaactacagaaaatgtacagcaagacaagtgcccggaagttcactgatccttcagaaggaaatgcgctttactgattgcaaagccttcagaatattggagtgtggtgtgtttgctcatctgatgctttttagttcagttacatgtaacatcacatttttttatcacgtgaaagatgttagatttgtttgcttataaattttttaccactcccacataaaatgctcatagtttgggagaggaaagagggaagattctctcttcttttaacagagagatgattgctctgtatacccattgcttcctccctgaggctgtcccaaagtgaacactgatggagtggtcaaaatcataaggttgtagcaagccaaagatacgtatgtgacagaagcacataagcaataagcagaaaaccagaagtgcatgctgtgatgcctgtgactccttcatcccgctcagtgccatgtcctcttttgtgatcttccagaaagctccaggattcatttgagttccacatccaagtaacagatgaattatattcatgttgtaatgcattttgtggagtttacaaaaccagtgtctgttaaaactttggaaaatgtcttagaaaacgttggtgcttggtgatgctttatttgtttaattatcaagaacaaattatggcaatgctagtttctgcttaaccaaaatactctgtgtatatattatacatatataaatacatgggattgtgtatgtctatatgtgtttaaagcttactatgtcttcattttggctt

SEQ ID NO: 75342 - DNA, 1136 bp, Homo sapiens
gaaatagatgtagggtacagtggaacataagcagtgttacccctggctgggagtcagtattatacaacaaatggtgagctggaacatgccctgtctgtgctgtccctcctgtgctgggtcgcggatgtgtaggcaacattgccttatcacgctaggttcacctgacactttaaaaggaaaaaaagttccatagagttctgtggtcacaaaattgttttgcttttatcaaatactttaatagaaccaaagttgcagatattggaatgtatggaagtatctcagtctctgcataagaggattaaagtatgaaaggatcatttaatgactgttttacttataagtcattaagtaatccaccatttcttatggatgatgcttaagcctggtgaggtttgtactctaaggagcccagatcataatgcagtgcatttccttagcccttagagtttcttgcaaacatttaaaaaaagacatatttaagaaagaaagataaagaaaaaacatatttaattactgtaaacaggtactgctttatgtttattttctctctacttcaaccaaaatcagatctttgaggttttgctgacattgttggtggttttgcacatgttctttctaattggatttatgaatagttctatgggttttcaaagatgaatcatgctaagaacacttctgctttttgatccactgtttgcagcagaattatatatatgtataggaaaaatccactttgaataatccatgttttgtatttggaaattgtttttaaaaataaaaaggaaaggaaatatataaagctgttatttattctgcatttcttacatatctatcgcttgtcagtatacccgttttggtatatattgcctctgcacatctacatttgtatatgcaacagtgagctttatatctacataaactgtaaataatcctttctgtgaaaggatcatcatatcaagatgataccaaaagtatgtaaaaagaaacctgcattattttgtaattatttcttatagatatttcatggtaagattagcagtcaataaagttacttttttgcctttaaattgcctttttgattattagagctctcaagcgagaagcattaaggagtgacagtgttttcttcatgttct

SEQ ID NO: 75343 - DNA, 1027 bp, Homo sapiens
gtgtgccaggaagggggccgactgagcagtgtgtggaagctgtcgtggaggtgaccgtggggggatgagaaaaggggaaggaaggaacagacagcaccagagggacttgaacaaagggagaagggggattaaagtcaaatcactgtcagcagcccaggagcagacaaaaccaccagagtaagccctgaaatggaaatgagagggaaaagaagcaagccgctaacagctaccaagaagaggaggaagtgggagatgcgctgcttcctgtagaaagaacgttgattgaagacaaagctgggtggggactagtccctgggctgcagccgctgctacacatactcacaacgctgccgccgcgctccgtgggcaactcctactactgctgggctgggctgggctgggctgggctgcgccggagctcgcctgcacagatcagctccggagaggggaaaaccacgctcctcggaccaagcctcgggagctaaggtaaatgaaacgttttccatgttgctcgtttttaattgagaaaaacgaccgtcgcttgtggttttaaggtccgatttctaagggatgatagagacatcgcttcaggactaggggaaatgattagattcttttggaagggtctttgagaataaccacatttatgacacatttgatttaaaaaaacctcatcatcagtgcttagatttgatgactaaacaggccaacatgctaaatacaagaagctgtttgtatagttctctcggaggaaaaccagggctgagtcgaaatccatctggggctgtgaagctgtggtctggtcatcggagcccggcagtccccttgttttaggggagtgagtggtgtaaaatattaattgcattctctttcttacacattgcactgggatatcttctgttttgcaaaaataatggctgtgatttggcttttgggggagttaaattcttttgtacttagattttgccaacaaaggcttgaattgcgtatgtgaggggcagtatttaccattaaaaaacagtgtctt

SEQ ID NO: 75344 - DNA, 1610 bp, Homo sapiens
acagattcttgaaacataggttcttagataccaaatatgctagttgagagtgtatgtatgtatatgcctcctcctttatcatcgttctcacttgttaagagctatagggctatttttaatgctatctttatgaaatcgatatggcttctcaaaatctgtggagtagcagcacattttgagagatgggaagcttttatagctactaaagaaaaaaaaagtctatttctcagaggttttttgctcattaaagtaaacctgcaccatgcctaagagacaaagtactgctagtattgaaaccatggaactccttgaaggattcactgaatttaatcaaacttgtgggcaaaacaagtcgtgacatggattttgcagttccacttcctatttgcatcttaaagggaagtatgtaaagatcatcttcttagagaagagacctaggatagatcttcgatccagaatgacccagtggagttctagaatcaagctgtgcatcatgaaatgaagtaaaaagttggcaacctgagctgcatggataaggacaggcttaccctttggtacttactcctctgcaggctgtattcactagataatgccaacaccctactttgtttggggaggcacagacaatctgcattagtcttctgtgtgtgtttcacacatgagtaagaaaatgaaaccttgcccgacgggcatagtagagtcaagagggccttgctatctttctgaaaacaactaagaggtgcctattttctgcacagcacaaaacatttcttaatcgttaaattccagcttgaagcagaacattagtgagtaacagcagatcagtaactatgatggtagaatgtttaggaaaaagatgaatatgcttctacattgtaaaatgaaactatttccacttattctggccatatggaatattgaaagacttaatgatttttcctggggtattcactggcttttgaggagtagaccaacacagaaattttaattgtgctttttttttttttttctgccatatggccaatggctgaatggaaacatgactccattatttcattgccagccttgggcctcatatggtggacatgtagtgaatgtgtttgtttgactgactttgtttagcctgcttcagaaagcaggcccaacttttaagtctaaaagctgtatagtcaaagtagaaagcctgttcataaaagacttctgtgggtaggagaaaacactgtggagtgaaaagaacgcaggctttggagccaggcagatctgcctttgaaacctattactggttcttactacttaccttggtacattaacttaggaacctcagtttcctcattgtaaagaagggctagtaatacataatcaaagttgttgttttgctttgtttttgcttttgtgtgcggataagtgagtgatttctacatagaaggtactgaaatgttatttttttcttccttggtggcataaggaaaagttagcatattcttggtctttaccactgcctcacaggtttagggagactttttttatagtgataaaatatacataacataacatttcccattttaactatttttttaagtatgcagttctgtggtagcgagtacattgat

SEQ ID NO: 75345 - DNA, 1039 bp, Homo sapiens
cgcgctgagccatgcccatggcctttgcctcccatgagaaaatagtcttccctaagccctattgtgatgttccagttataaacaatggtgcttagtacatagaaggtctaaaatgatatttattgaatagatgagtggaagcagtgcactgttctccaaatgtctggactctttcatgtttgcattttaaaaatagatgctgttgttttgtagatttgtttaaaaacatcttggtattaagactgacatctattcttttataacactttacatgtggtcatgtacccacagatttaggctgttttattttatagttttcactacagtttatttcacctgattatttcatttgggtctctaaaatcacattatgaaataccttaattatttaaattaggaacagattaattatctccagtgtacaaactcaaattaatttcattataaacctgaagtttaaattgattaatcttggagtgtttaaggaataaaatgggtttttcttcatccttaaggagaaaggcatatttgatttgatgagtctctcttcatcacaccagttatgatactaggcacaagatatttgcaagaaaacttcagatggattttataaaccagccagaaacctgtgtgtctggggcttctgggggaacaatctgtgagtcattttaaaaaacaaacacactcataatcacggtgcatgttgttaccatggtaattaggcctgttgagttggcttgcttatgttcctgcaaaagcaagagggggagagaaactgagaattcagagctttgactattagcttcaatttgcctactgcaggagagagtgaaggggtttctcaagaatgcactggcacagtcattctgagagggaagtgaagaaaccctggcatcctgcctttgttattgaatataggttagccatattagtgttggatattgtggttcacaagggagaaaaggatcatttggcattctcttgggaaaaaggggaaaaatagtttctttctctgatatatgacttcatgtaagtctct

SEQ ID NO: 75346 - DNA, 2640 bp, Homo sapiens
ctgtccttggttcacaaaaggctgtggcatcttccagtcattgtgacatccagagcactctagggagacgttgtgaacattgtgaactaccgtgtctttgcacacaaatttaaagaggttatttggcatattccactcatctaaaagcatttttccttcatacaaaatcagtggtttcagttatgctcagtagttccttatgtaagtagtctctgtgctaacaaacgcaagaagctaaacaaagtagacaagtaaaaggaagtattgttctgtactgtcagggggattttgagtatatttggtctagggctaaatttagttttcaaagtatatacatggaaaaaaattaaacatgaggtaatggtcaaatattgaggttagaagcaaaataccagcaaggcattattgaacagcaactgtgattaaaggtgtattagttttctatggctgctgtaacaaattattacaaacctagtggcttagaacaacacaaatgtattatcttaccattctataggttaggttctatagggatttcactgggctaaaagcaaaatatcaacaagactgtgttcctttctgaaggctctctgggttggatttatttccttgccttttacagcttctagagcttcctccatcttcaaagccagtagcattgcctctccatgcgtctttctaccatagtcccatcttcttaatttttagccaggaaaggttctctgattttttaagtatctgtgtgataagattgaacatacctggataagccaggctaatctcctcatcaccagggcctccatttaatcacatctttgaagtctctttatctgtaaggttatgtatttacaggttcctgggattaggactgaacatatttggggcctattattctgcctactacaaagtcaaagagactaatccttcagaaaggtagaaatgcttcaggtagcagaccatctaatgtctaattatataggattaaaacattaaggtttccaactttgatgaagccaattctcatcttgactctacagttctcattttgtaggtccaggtactgaagacttttggttttcttgaagtgtctggcattggatcaaggggactggttgaagtccaatggctcctttcttgcccagacttttgggtactataggtatggcccctagagagtatgctgcttttgtcatttctccaactctggagggtttgcctacagtgtacagattacaaggtcttgaacagaaccaaagaaatgtgaggtttttattttatgctgttatgtctggctgttattttatgtattatttattaggctttaaaatgtggaaattggaggaaaaaataacataataatacagaacctcactagagtggtatttattatagccaatttctaggtatggtataatttcctccatacattaagttatccccacaaagtaagaaaccatttcttgccgggtgtatgaaatagatcactgggttattttttaaaaatcatcttttgagtagaatatggctggaaatttatggtgaagatttaaaaattttcagcttttttttgttgtagcaagtcctcttaaaatccacttttagacacttcagcaatacagacctgaagtccaaacctagagctagcagcagggcaacaaactgcccttatttgccaagacagggctttcctgggacataagactatcggtgctaaaactgggagaatccggggcaaatcaggacagttggtcactccagatgtctaacaaaatgactcttaatagaaagtagctgtcacattgatgcattgttaaaatataaattttgagtgaaccaaataatgaccatatcccataatatttgggttgaaaatgggggttaatccaactcttggaaaatctgtagccatatatgcatgtttgttcagaccagcttaaaaagacaaaaaaaaagaaaaaaaaaaaaaaaaaaaaaccctgagattcagaactgagaagcagcagccacgtttatagtcacaagccctagctgccctttcagttctcctgtgttaccagcaggctcctgcactttgcctctgatgatggaagctttaataactttgttactgaggtgaccacaggacctcgctgaatctttttcagcagtcagcctgcatggaagttataaaatccaagtttgccaatgcagcacagagctctcttagctttaatcttgcctttcatagagcaaaatcgaacttttcccccctaagagacagcacagactgttcaagaagaggtaaatattaggaagactatctggaatgcccagtgggaggggattggagtggatcatgtcttggagtctcatttggttctaagaacatggcgcttcctgactcccagcggtggagcatgagccacttacccccatgtaaagttgctacatctgggtaaagacgcttgctgggcctttccccactacttctgcagtactctgccagcatcatccgtagcaaaaccacactgagaaatcagggaagctgaaggtcctggggcctcatcccttacatttctgtggcttttattttgagaattttattctctaaatcattaggactaagcaaagagagctgtaattgtacttgaaagaacaata

SEQ ID NO: 75347 - DNA, 1163 bp, Homo sapiens
gaagtcttgcatgaaggaatggcagtatttccaaaaagcgtagataacttacaaaaacttgtttaaaccagctttcacatttttattaattttacttagtcaaggttatagcccatgttcaaatggacccagatacaatggtagtatttggacagagttcagttgtttgtgtggtgaaagatgatctggaggagctacacagagagagaaaaccaccctatgctttccttattcagagacaggatgtcaacctcaacttacggttcaagtttgctacaaaaactagctggacccctcagagcagctttagatagccaccttcttgggcctcccgacatcaaaggaaatgactattatcccaaagaaatgtaatacctggctagtgggttgagtggccaatttttggtgtttttgcagcttactttgaatctcaagtgaattattttcatttctttgacccagggaccaggattacttgccttgatctaatctagattaaccactctgatccactgaaaatgaataaatccactgaatcagataaattggttggggaggtatttgtggcagcacaaaatgatggacaaaacaaatgtggaatgctatcctaaagcatcaacctcttctgtggatgggaaaattccctgacttgggaagttctgggacgggttgggtctataataggagcagtgagaggcagtgtggtgtagagaaaagagctggggctgtggggttaaaatgaactgaagttagcgtaatactgactgtgaccaccttggcaaattactgaactttctcaaccttaagtctcctagtatgaaaaatgagaataactttacttgctataaaattaattgaaattatatatgcaaaatgaaggcagtgttttccacacagtagtcatgcaaatacctttttaggatgtatacacgtgttgaaaacaaccatatggaagtataattgagattttaaaaagctgcacatatttgatgtatgtaatttgatgagtatgcctatgctcctttaaaaaattatttcttagcagctttatttaggtatagttgatatacaataaataacacatattcaaagtgtatgatttgatgaattttgactgcatacacccatgaaaccatcatcaccaacaagataatgaacgtatt

SEQ ID NO: 75348 - DNA, 1072 bp, Homo sapiens
atggctgggtgtgtgataaatataaaaataaatagcttctcttttcttaatgctaaaacttgttctcagactaacatactgaggagttcctaattcagatctccagggacagatgtcataagcttgacttaagaaatgttaaagcagagctttgcgccacttgacttaattccaactttgctacaatggatcatattattgtggattattattatggaggaaaacagtactttgagctctgtgtggttaggcaggatgtttcttcttttagttctagatcagtcatgatgttaagagtaaaatcctaacagaggaaactaattatttacatttcagtttttttttaagtataattttatctgttggacagaggctcatttgaagataaaacctcaagatataagcttattggtacataaaagtacatagaggagtctcacttattggaagaattttatcgttagtttaacaaaacctacagtacttctgtacttatttctaaaaactagaatttaaagtaaaaatactgttgcttctgggaaattaatggcctaagtagcagtatagatagccttcttcatagtaaacccattcaaatgccaatgacattttctcaaacaaaaatcttcaataacatagcctcagtatccaaaaaacaaagaagaacttttaaaataattcagctaatttttaaaagttgtaattccaaataacaaaactataaaagaataggaaaaaaaaaacaatgaactttaaaattgcctgacataactaaagccaggaaataaaaagccatttagtgaaaattacagtattacatacaattaagaatatttccagaactagtaaagagaagagtttacatggagaactactaaatagttaattagggaagcatatttattaactacagaatcaaataaaaaattggatagcttaaataaacatgtataaataatgccaggccaaaatgatccacttctagaatggaacacagtgttttaacttaaaaataataggtgaaagtacttgagctaatagaataaataaatgttaacgaatcaacaattta

SEQ ID NO: 75349 - DNA, 1049 bp, Homo sapiens
caaacaaacagccacaaaggaccagggaaggctctttgtctgaattaaaaataactaaaaatggtacaatgtgcactgaacgcaaatgtgcaactcattgcagagccctcgaactctgtaacgttccaacctctgagatgaggaatgtctctgccatccatagggaagagcttcccggccaactgctcctggaaccaaggcactgtcccctttctttgacagctagctacagcacttgggtattgtcaattctcccttcagtgctcctactgcaataccatgaggatttggtggaaatcaaatgctgaggtaatccagaccactcattaataaagaccataagattctggtgtatttcccttcagcagcagtgaggaaagatggaaaaagtggaaagaaagagcagctgtgagaagatctctgtatctgatagtgccttgttgagctttctgggacccccatctctactctggaattgacctgatcttcaaggacctatgtcctggtgtatgattctctcccttttaacaccaccctgtctctacagcatatttcttgtcctgacccctttctgacaaacagtttgctctaaggcttgtttggagaacttgatcctttcccctctccctgcctgtttcagcccccgcccctacctccatcagctcttgactggctttgcctccaccaggttccagccactctctaactgatgccacagtctctgagccagccctactcccttgagggttaggccatccctagctgggatggaactgaagtaataatagttccgacattaaacagaattaggacttgtgttcaaaattgaggatagagaaaggaaaataaactttttaaagtatggtaaaatacctgtagcataaaacttaccatcataaccatttttaagactacagttcagtggcattaaatgcattcacattgttgttcaaccatgatcatcatccatctacagagctcttcgtctggcaacactgaaaatccaacacagtgaaacccccatctctatcaaaaaatttttaaaaatt

SEQ ID NO: 75350 - DNA, 1728 bp, Homo sapiens
ctatctaagtaagtgttaaatctgccagaattatgtttctgaattatcattttatataaagcatttgttttgggatatccagagttggcatgcaccattagagctatattgggtgttaacatactgaaatgttttcataccagttggtaaagagaaagtatttctttttttttttcttttcttgtttttggagacaaaaaaagttgcccaggctggagtgcagtgtgatcatggtttaccagagcctcaacctcccaggctcaagcaatcctcccagctcggcctcccaaagtagctgggaccacaggtgtgcaccaccatgcccagctaatttttttttttctattttttgtagtgaagcagtctcactttgttgcccagactgatctcaaaactcctgggctcaagcagtcggcctgcctaggcctcccaaagtgctgagattacagatgtgagccaccacgcccagctgagaaagtatctctttattgagattataaggcatcttatcatgccacccatcagtgaccatggcggggtagtggacatgggaggacggccagcatagatattgacagccccagtagccactgagtggtccgggaggtgagagtggaggtgtgcatagtgccctccctctgctctacgttgtcagggatgacaaagcaggcagtggagcaggtggcattggtggcagtgttttggaagtgggggttggggagaatgggggtgcaggggcagagtcagttggagcataggccctctgggaggcattagcatccaggtatataataacccagtagtgcagagcctgcagtatgcccaggagcagactgtcagtataacagtgaagttattgatgtggttattacatggtttgaacaggagcatcacttagctaggtgatagctacatcaactaagatcacaataacaatctgtaaaaaaaaaaaaaaaaaaaaaaaaaaaaagaccaatgatttggaaatttccagaatattttggaaattattttctccataatgtagcatgtatattttaggatatagttaattcagcaaacaaaagaaattttaaatagattttgattaaatatttttgattttatcacatattgatattttatctttctaattattaaatatttttattttgagtatgactgttatttctggctatataaaaattatagttatttaaccaaaccatcaaaactaagaaaagagtaaattgggaagatattgaaaatataataggtacatatttgttttctatattacataaagtgcttattcaagctaaaaagatggcacaagcctcctataagcagatagttgaattttaacaggcagtttgtataaaagtaaagacaggtggaggagaggttcccccaaaggcagggacagtgtctgacacaggcctggtttcctggtctgcctagtaggagcttgataaatgttaattaattgaatgaataactgagtcaatgtatgaacaactcttcaacctcaccagtaattaagtaaatgcaaacgaaaacaaaaatgagatatagtcatatctattaatttattaaaattaaagaaataggctaggcatggtggctcatgcctataatcctagcactttgggaggcgaaggtgggagattgcttgaatccaagagttcaagaccagcctggacaacatagagagacactgtctgtacaaaaaatttaaaaaattagccg

SEQ ID NO: 75351 - DNA, 1018 bp, Homo sapiens
gcctgggcttcacagactgatgtaactgctctgtatatatacccctttcactctagtgttgagaaagagggaaactagatgcaatgattaaaaatattttaataccaaacttcaagctttttgactcactcatgctccaaaaacaagcgcaacatcaagactaaaggtgtttgtgtccacacccattgtgagattcaagttgagttttcggtgtcatatttgtgtcttagcaagttgtcgatcagcttcatttctttaaaaaattattcttcggaaagcactttgtgcccattgatatatgagacatcttcaaacagtcgctacgtctgcctgattgcccagtcagctggggacacacaggacattacggtttggatatgtaggttctgacagatcttgacagataaatgtaaatggaaatatatctacacttaaaaatattttttcttttgccattgtattgaatattttttagtgtcagtttcttgttatgtgagtgtgaggaattgtgggagatggaggagtttatattctctgcaacttctgacttggttggctcgctgcatccatgctcctgaatcaccccatcactcagggattggaaatagtttgtcccaaataactatttacctttcactgtggctccaatcttgagaaaagtctattcttgcttcctagacacttaagattcaataatatttgaaagaattatttgtggaagtatatttgttttacgtttttattgtgagatagctgtggttttcaatctttaagggggtttatattttctgtttaccatataaacgaaaactacagtagataagtatcttgaaaataaaaatgatcatctgtgttaaaattgcaataaaattttcatcctaaatacctcactacatggtttggctgagcttttctgaccatacctttagattaacagtgaaaaaataaaaataaatttaggcaccttagatccaccttagttacctttactctttcagtctgaatgacaagacaagtt

SEQ ID NO: 75352 - DNA, 1123 bp, Homo sapiens
ctccttggaccgagctagcaatgaattgatggtgctatgggagaaattggttccttccagacatgctggccatgctcctctgacctgtcattgatttgtgaagtgctgattcattcagacattttttagttatataaaaatacatgtacaaaccattttaaacagaaaataaatcatcctacaactatttgaacagatatttatggctggattcaaaagcattgaaattaagggtcttaagtagaagtataacaacggtaatagcagaagaatttctgcagtgagaattcatttccctctctgcatttggtgttcagcaaaactaaacctgtattgaaaaggagtccattcctctttcatcagagattgcctttagcaaggaaacaatggacagcttttcccagtgttctctccttttctcattgtcagggtgttcttctgtgacatttaatttgaaccactgcctgtctcaataatgtaacaatttgattgggtcagatagaaaaggtagaagtcttttttaaaccaaaggattttcatttgaaggtttgataaccaaatttgatttctggatcctatgatcccggtgatgtcccttggattcagtccccctctcctcatcattagtggtatcctcctgaggagagaacagaataccctacactaactttagttgctggtctttaccgatttaggttggtataaagacagaaccaatgtgagactaggcttagagtataaagttaatatgtgcaggttgggaaataggcactaaaaattatagagttgactggatcctgtattagttatctatagctacttaacacattaacccaaacttaatgtcttaaaacaacaaacatctatcttctaatagttttgtggatctggaatccaggatggttctggctcaggcgccctcacaaagatgcagttaaggtattagccagggcagctgtcatctgaggcttaagtgggcctggaggatctggttctaagctcattcatatggctgtaggcaggaggcctcagtttctcttggtcggggcctctccatagactgctcatgacctggcttttcccagagcaagcgatccaagaaagagggcccaagacggaagcc

SEQ ID NO: 75353 - DNA, 1052 bp, Homo sapiens
ataaaggaataagcacagagctcttagtactgctgtaaaactagaagttactgtgggagtggaggtgacatcctttaagttacatttacaagttctattattaggattaaagtactctatattctcccttaaaactgaccaccaacaatgaaaatgttgcatgtatataatttatgcatatgttgcatatataatgtatgcataaaagttacatatatccaaatacctttttcatacatatgtttcatttcatatatatgaaaaacaatgggaagaatatcactaaaattttatctgtaggtaagaatttccatgtgtgcttaaaactgggagtcactgtatccaatataaagttcaaggtgttttgtttgcttgcttgcctttttatctacttttgcagaagatattgaaattgcaatcatcttgtttttgggggaatggagtcattccatattggctcttgagtatgtctgccaccactctgattctagctggaggctgccagaaatgactgtgccattgaatggagttattaggcaacataaaacggacaagccagaccaaggtagaatggaaaaggactgccgtctcaggccatttcattatgtctgaaagaaaaactgatgaagaaacacaggccacagtaaccatagctcctgctctaatcctttctccctgaatcttcttgaaggatccttgtgctaaggttcccaaggtgcgggagggattagaatgaatgctgttttggcacgaggtttggtaaatcatcttgggtgttaagtcccgtgtagaattacctaatagtaatgaggtgtcggcagttttgtatctatttaaagctttaactagaccacatgagtaatgtgctttcaggtgcttatctctaattaattaattcatttgtaagtgaaatacctaattaaagcagtctaagggagctcctttgcggcctggatctggtagatccggtaacaaagagaggtctttgctgatgcaacttgttgaactgatcctcatgggctattagcttcatcagatttcatttgaagagt

SEQ ID NO: 75354 - DNA, 1808 bp, Homo sapiens
gtgggatgaaggtagcattatctgggtgatcaggtgtttcctaggtccctggctatgagacttaaggaagcaaaatctatttcagacctcacccattgatggagatctgattttatctacactgccaggcatgttcagggctggcttgggcactggtgggcagagcctggtgaaagcatgactgtggctagaggggaggatgtaggagttaggaaaaacgcgatttaatggactttccctaaacttttggtagcccttaggcatgtaagtacatcctaagctactctttcaaaatgatatctcatttctgaaatttcttccatcatagtgaaaagtccccaaatgttctggagtcaaaatatccaccagtcagcacacttcccagtgaatcccagccgctgccacgaagagggatagggaagaaacaatttttccatagctgtacttactgagccccaagtgtaaagcacaagaaaatcgcatcccatttgtcagacagcaacgacatggctggttgccttcatactgcaatcgcctctgtaatcttcctgtgagacgtagcatcctccagggagtgagttggaaccttagcctagtgcagagtttattaaaaccatgtctttttttaaatcacttaacttccagcaaatagcataaatcttgcacacactgaattacctctgattaaaggtatttaggattaatcaagggagatgtgttgttccctgaaagtaaaaatcagacttttttttaatcattcctttgagatattaggtcatgattattttaatcacaaaggaaaatctgaactttggatcattttcttattaagcatcagaaacactgtattaaaaactgataaatggctgagtgtggtggctcacgcctgtaatcccagaaccttggaaggccaaggtgggcggatcacctgaggggtttgagaccagcctggccaacacgttgaaatcctgtctctactaaaaacacaaaaattagccgggcatggtggcgggcgcctgtagtcccagctactcgggaggctgaggcaggagaattgcttgaacttggaaagtggaggttgcactgcgccgagatcgtgtcactgcactctagtctgggcaagagagagagactccatctcaaaaaacaaaccaaaaaaaaaaaaaaaaactgataaagaagcctcactacatccctcaaaagtgaagacaaaagctacaggataataaaccagaagcaacaggggcaaaacagtgggctgaaagccatcccaaaagcatttttattagacagtgtcaaagacacctgcggaggtggtgacctgacctaacaagctttgaccatgttaccacgctgtcttcatgcccgtggtaaagagctgcactgtctccactctgcaaagagctgcttctggccaattttgcttcctggttgtcctcatgtagacatgagtcccagctgagagcatttttccaaaaaataaagtcaacttttacctccttcatttgaaaaaaaaaaagcagattttgcagttgtgtcttgataaaatacggcaaagggttgaatccacattttcaaattatcccaacttacacaaagatattttctaaaaataaaagaacagttgtacatctatggtgtgacctccatgagagaatacttgccttgtgtttgcaggccttctttccaataattaatgctgtgaaaataagtaaaaaaataaactaacttatataacacaaaaataagacaatttatacttggagatcagctacagaatagaaactaaagcagatttattacttagg

SEQ ID NO: 75355 - DNA, 1034 bp, Homo sapiens
gggagctgggctgcttaggagaacctgagttctttgggtggggtgaagggtgtggtgtttacacatttcattaggattagagtgattttggttctgctgcaaacattgccaagaactcatcatattcctctggataagtcacttaatttcattgaatctcattctttctcctataaaattagagaattaagatgaggtcatctctgaggtcctttcatattcagtgtcctaaaaggctgtattgtatagtgaaaaaaggtacagacttgggaaccagattgtgagggttgaaatcccagctctgtcacctaccagctatgtgactaagtacatttcttaacttctctgtgcctcccgttccaaaactgtaagatgggagataagatagtatgcaccgcatagtgttgtgagaattcagtgaattaatctagtaaagtacttagggcctgcattatggtatgtaagaagtgttaactgctattactattccctgaaagaaggtcacctcttctaaagcctggactccagaagaggcagaatactcgagaccctggagtgaacatataaacaaaatagtgtttgggaaccaataattgacatttccacaattcttaccaaacctgctttgtgttaggcatgttttaaagcacaactttttattgttggaagaaggcccaaaccatagaatgctttatttcatgcccacagggactctcttcttccttgggacacaggcaggtaattaagcccctgaggatggggtgcacacaggatattgaactagtgcttacttcataatgctttcacacctgcggccaggacaacaaagcaggagaaatcaatgccattacttcagaggctgagaggtggatgctcttatgccaatgggtttttgctctacttaagcaacatgagacctcataaattaaacttgaaaaggatttttcaaattatgaaaaaattcattaaaaatgtataagcattaacttcagctgacttagtgtatcacagagattctgttttaattaaaccca

SEQ ID NO: 75356 - DNA, 1071 bp, Homo sapiens
gagcctgtctaaggcttttttctgttgtggactggcgaattgctgccatgataagctgatgtgttgccctttctgttggaaccttcaggatggtgcccagagtgagagggagcatttcaaagaggattcccttttggtcttaggtcttaagttagaattacatagggataagcaaattcaaatcagaaagtttgagatttggatttgaactgtagaggttaagagagggttggtgtagagattcacattttttgaaactgtgaaattggatggttagtgttcacttttccccatacatacacaaatatatatatatatacatgtttacattttatattctgtattggcaaatatatgtatgtgtgtgtgtatgtgtatatatatgtgtatatatatacacatatacacatatatatacaaacacacaatacacacacacacacacacagacatatgttcttcatttgatttaatgaataaatatttgtttggctgaccttaaatggatttcatgctatcttagcactttcttaaatggagaaattgcaaccatgtgccaagattaatatggtaaaagtttcactttattttatttaaaactatgtatatagacatggaatagaatgtaaaatgtatatgaatttaagatacaaatggaatacaacccttgcttgtgacaggaaaggatcccagattccctggggtaggggtggactcagctttagcttcaacagactctgggacacctctgcctagggctgatcatgcgggtcagcaggaacgggcaacaaaactcagaaagattctctgctcagagatgttggaatttgtacttcctaccccagtcttcattctgtagttataaaattatgatccttttcaggtctctctttaaatgtgcatatttattgataggcttaagctattggtcattcataccttataaattaagccactaacatcatattgagattggcttcacagaccacagaagcagctttgggttcctaactgaggtcccttaacagttttgtagactagagcaagccagctaattcacttgagcccggt

SEQ ID NO: 75357 - DNA, 1050 bp, Homo sapiens
agtgaacaaagcccacctagcgtctaagaatgccagctcccatttatagatacaagctgtttccttatccaagtctcagataaaaactaaaagcttacatgtcattttaaagttgcaacatggcctattcgtttcattttacaaaatttgtgaaatccatgactttgaagtcatttttcgaggactctgttttttgtcagggttgttagaaacagctaaccaatgaccctctttcccagaggaaggctgcatcttgtaaagttaatgttttcaaaaccagcagtttactggaaagcagagagctgtcatttcaaatgatggcttctggcacctgcgtgagacagggaagccatgttgcgtcttactctccacccacacagcatagacggctcccatgctgatttgagggaagaaatacgttgttttgtctctctcccacttggtaagtggcaacttcccagtgaaaccgcatggaaatagtccagagtggattttaggttgctctgtcaatatgttgctcccttgggttattttcttccttcttgacccccacagcaagtttggttgttggggtttccacactggtcctcatttgcatttgctctccctgtgccatacaggtcataaaattgctgttatgtatgtgaaaacggccaaatataccatagaccccagattaggatcagtctggtgcctctgaaaatgtgaattgagaagaactgaaagaaaatctttccctggggagactgcagccgaaacacccttctgacgaatgtgctgacctaatctaagcctcaatttccttcaacaagggatgcatcgctcacttcccttgagttgtgagaatgaaacaagataatgcgttaaagcccttggcccagttcctggcatgtggcgagctcttggtccataagcaaatcttcgtattagtgtgagttcctggtcctccatgaaagaacaaagcttttggcctgtaaaatctaatttctggaaatgagaagcactaaaaagaagaggagtggggacggagtggggaggcacttggaaggc

SEQ ID NO: 75358 - DNA, 1055 bp, Homo sapiens
tctagacagaaaaattgttttattgccaatgtaatcctaacttgtaaatacacaaaacaaaatctctcagcacctactgcaaataccaaaacacagtcctgagaaacatacagttgtaattgaaattacaggccttagggaagtctgtctggatgccacccttgaaaaacaccattgaagtatgaaaaggatggaatcctccacaattaacctacacactctccacccattaacaaaccatttatttatctttgtgccacagaaataaggggttgtgtgtttattactaagcctaaatgacaagaaaatgtatggtttcttaacagaaaagttccttctgaaagaaattaaagtgctgaatgtgtttttagaaaatgaaatctcctctaatggttattgttccataacaggcctatttttcatgtttcttgttggttgggtgggacggggactataatcctctcatcagttgaaaagaataaaatttcttctgtattattcttcagtctggaattcaggtgggataattagggcattctttcagaattctatcaatctcttatacacaattcctataattgttccagggatttttgctatttgtatcttttttgcttactggcaaatataacccggaataatctcattctgtcagtagactgcataaaagagactctgctctgttttagataagccgggaccagatatcgataaagcatattgctgagaattatgaatgcttaacacttattcatcatcagtgagaaaataatagggattataagacataagaatataaaaacccagttagttgaaagtttgcacatggagtgctttctttgagcagatttttcatgatggctttgtggctatttttttaggtatcctttcatttttctcactgggggtactatgggcctttgagcagcacaattcattgttgactggcctactacaaggcgttagagtctccacttctgcacactaactgccagtagcacccccagttattgtcatagccctaaccaaccccacacatttccaaaagcctcata

SEQ ID NO: 75359 - DNA, 1586 bp, Homo sapiens
ttactttaaaactcatgtgaaggtagaagacaaaagcattcttctccagtaagaatcagtgaatgtagtatgtttattcactaacaatgaataatctgaaaaggaaattaagaaaaaattccattaacagtagcatcaaaaagaataaaatagttaagaactaaccaggaaggtaaaagacttattcaacaaaaatttttaaaaaattactgaaagaacacataaataaatggaaaaagacatctcatgttcatggattagaagacaatagtgttaaaatgtcaatgctagccaaagcaatggacaaattcactgcaatccatttcaaaatcccaataatatttttgtaagaatagaaaaatctgtcttaaaattcatatagattctcaaagaaccccaaatagccaaagcattcttgaaacagaacaagttggaagactcaacactttctgatttcacaatttactacaaagccatggtagtcaaaactgtagcactggcataaagacagacaatccatatatagagaccaatggaatagcataaagagcacagaaataaacccttacatatatggtcaaatgatttttgagaagggtgccaagacaatttgtctgactcaatttgggctgctatcaaaaaaaaaatgcaattgacaaggtggcttaaagaataagcatttctctctcacagttctaaaggctaaatgtgcaagatcaagatgtcagcatgataaggtcctggtgagggttctcttcctaatttggaaacggctgtttttttgctgtttactcacatggctgagaggaagaaatcatttctctttttataagagtactaatataatttatgcagactccaccttcatgacctaattacttcccaagggctccacctccaaataccattatattgagggttaagctttcacatgtgaatgtgggaaaggacacaaacatccaggccataattcagtggataaaggccaaccttttcaacaaatcatgatggaaaaactggatatccacaggcaaaagaatgaagttggccgtaacactgtgaacaaaaatgaacttaaaatggatcaaacgcctaaacataagagctaaaaactataaaactcttaaaagaaaacatagggcaaaagcttcatgacattgaatttgtatataacaccagagacatgggtaacaaaagcaaaaatagacaaattggactccataaaatgtaaaacttttgtgcttcaaaggacagttcaacggagtgaaaagacagtccacagaataagagtaaatatttgtaaaccacttatatgatacagaattaatatcctaaatatgagacacttaaaactcaacaacaataacaacaaaaaccaatgcaaaaatgggcaacagagttgaataggtatctccgcaaagaaatatgaatggccaataaacacatgaaaagatgctcaattcattaatcattagggaaatgcaaataaaaaccaaagtgagatactatctcacacccattaggatggctactatgaaaacaaaacaaaacaaacaaacaaaaaaaacggaaaataacaagtgtta

SEQ ID NO: 75360 - DNA, 1096 bp, Homo sapiens
agaaactaattatattgacatgagggtcattagaatatttttgtaaaacattttaaataatattatttaaaatatcaatttttaaaaatatatgtgatgtagttatacataggtactcctttgttaactgattatgtaagatctaataggtctacaatcataaggtggatgaacagaaatgcagtgttgaggtgtctgcaatgaatataatgtgattgaaagtatctggtatctatcagtggccaagtcacatgtactgctagggctactgcagtgtgttgtctatatttataatgagaggaaatgttaaatttccatttgaggttagtgaaaaataaagatgtaaattttttgtattatttgaagttcacataccaccccccgaattcgatctgtggaaccctggggtaatccaaattaattgcctttatttacaaagttattttagtaatcacaaagagagaagactgcagtatgaactggggtagctgcaatagatataacaggaagggagccaaatttgagatatctttggaggaagaatcaacaggacagaaaagggagagattttctggagttattggggaaatcttcatggaagaagtaggcatacgaatgtagaagaagctgtgtgcaaaatgttagcagggattgtcagaaagcagaaagatctgctaggcacacgattgctgtgactcattataaggcacaggacaaggaagacagccacaggttagaaaggaggaatgttcatgaagattaagtcagggacattgagactcacaactcagtagctcaggagctgtgggacctggggcaaacacttaatgaagcctccacttcacatatttaagatgagaatgataatagcttgtgacccataatgttgttgtaaggattaaataagataccgtatgtaaagtggttagcacagttctgacacatagcaagggctgataaatattagcaattattctaattactgctgggattctgacactgttggagcattgcccacaggagattgcagtcttgttgaggaaacaagataaaacacataatatattttaagaaggaaaccattcagaatcaaatg

SEQ ID NO: 75361 - DNA, 1050 bp, Homo sapiens
ttagccaggcaccatggcacacacctgtagtcccagctactagggtggctgaggcaagataattgcttgaacccaggaggcagaggttgcagtgagccaagatcaagccactgcactccagcctgggcaacagagcgagactgcatctcaaaaaaaaaaaaaaaaaaaaaaaaaaaacaaatgaaggagacagccacctgcggggctatggaagtgcagggttgacacctgcatgcccctgccagcgagtgcctccttcggttctgcaccctaagtgcctcactcaccttaacctagtcccagacttgctggcaacaatcctgtaaggtcagtgtcgtcaactttcttctttgcagatgaggaagcagaagcttttagaggctgagtatcttgcttcatggagcaaggatttgatgccaggacattgggctctaaagccttgggccttgactgactgtaccagactccagtgttggttgtttttgtctccctttccaggtgtccaaggcagctgcagatttgatggcctactgtgaagcacatgccaaggaagaccccctcctgacccctgttccggcttcagaaaacccgtttagggagaagaagtttttctgtgccatcctttaagtctttgagaggggcctgaagagcctccgggctcctgggacattgatgtagagtttttagtgaagtgggcacctttctagtccacggcatttgaagagagcgaggagaaccattctggaaactctaggctatgcatgtttaaagatctggtcccctttatgagaatgcaagccgatccacatcctgacttaagagatctgattctgacgaactgcctggaggaggggaatatataaaaataaaattggtgtcacttcttttctgctatcccccagccccccccccaaaatcctcatgtttctgcttcatattttgaaaaataacaattaaaacagacagctgtactgaggtaagatatgtgtgaccttcttggaatgaatattgtctttagaataccctttgataagctgagctgtcccgtgt

SEQ ID NO: 75362 - DNA, 1077 bp, Homo sapiens
catctcccaattaattttattgtctctttcctctctattcgctttctcctgttttttttttaaaaaaaaagcatgaaaaaggaagagaaaaagtttgatatgccaaggacagattttgaaacagacttggtaaatgttttccttagctccttcatgggcatgctggtgaaagaataaatacatccaattaaagctcatgctggggtcggggagaagaggatactgaaacatttgtgaaatgtatgaatgcacttctgtaaccagatacttctgttcttctgttcaaattgtggggtttttgttacagttaggacgcccatgaagatttaggggtgaaaaaaacagcagagtatttattaaactacagcattgtacaattagcttagtaacactatggaataagctaaaacatatcacagtttttacatgggccaaaacatgaattgagtatgtggtcacatgaaaacacggatgaatgaataaaacactctttggtggtgactgaggcatcattagaaggcccagacgatttccactattcacagcatttccttttctcagaaggactctttatatttccatgtaaatctagatctttggagcaattaagatggaattacaatttctagggagcattttaaggaaaatgttttggctttttcataattttatgtcttacagtatggaattataatacgaaaatctttatatgagttttggcttcttggtatttgtacttattcaggggaaaaagtctttcgattacttatgcctctatagagcttaatttcttgagaaattcaacagtcattttcaccagcataattttatcttaaggaataactaataggaaaagtcagcttaattatttaaggccctagtttctacatataatatattcgatagaaatgaaaatctgccgtggaattaactaataagtagtaacaataaacttcatatttagaatgcaaagtctataaagaataattttacatgatcctcaatatcaactccagtttaaaaagtgttatttttaaaacatttgaaaccaagtactgtttaatttcaatcagaaga

SEQ ID NO: 75363 - DNA, 1096 bp, Homo sapiens
aaaccagggtgatgttacaattggtcaaagcaaaaatttaaaaagagacatttaaagatcaggaatactgaaatgaatttccaaatggatgcaaaactggcttctttactgaagggcagacaagtcagttgagcttccactagacaggattcagttgcatgtctaaaacaagaattctgttccattgctatcagttatctacaatttacagttacaaaatagctcaaagacaaggaaaggcactgagttcccacagaatcagaatgagataactcagagccaagtgaaatggcacgtctgcagttccagctactcagccaaatagttcttctatttgcaagattgtcatagatactgtatggcctacaaaagtgaaaatatctattatctggccttctacagaaaaagtttgccaattctggcttagagtgaccttctgtttcagaataatttctcagaaacaccagagtaagtagctcagaacgacttcaagatggcatgtcctaaaggccacagggctcagaattactgggggaaattctgttatttcaggagacttggtaaaaaggccaaaccccactagaggcttgaaatcctagcctgaataccactttgggaaggttctccgctaggtttcccgcaattggcaccgctatcactccatggctgttctggttcatgttctgtggaaatccacttgcctttaccattctttacaataattacagctaagtggtgcctcctgtgtggaatttgccatccctgaccggaacaatcttgcacatcgttcttctttctcaagagcgccctctgctggtcagttctcagaaggcgccacatcatcgcgtctttcgtctgcagatgctctttgcagccagaagccgaaggtcattttgatctagagaagaaagcattttggctattgtctccatggctgttcgaattttcattcgagtacataggcattactgcgtcaagatgtagaacttcttcactgtagaagacgctgagagaacaaaactccctttgaacgcaaacctttgaatgcaaagtaataatcccttaggtaagcaggaaaggcctaggtaagcaatgc

SEQ ID NO: 75364 - DNA, 1834 bp, Homo sapiens
gtatattttactttattactttgctataaatttaaccttgccctccttcccctttctgtccgcaaaggaactggaatattaatatgtaacacttaaatagcaaaactatgtgccaggcactgtttttatccgtatttattttatttaagaaacttcttaaataaaacaacttcttttaatcttcataactctatgaggtaagttctattagcaccctcattttgtagctgaagagtctgaggcacagaaaatgtgggtgattatcccaagttcacacaaccagtaagtatctggacccaggatttgaacagatcattgttaatctgtactttcaactccagaatctgtactttcaactccctcttttggttcaattaatttagtattttgaagttaagaaaattccacaagaacatatatctgaacatatacctgagaaggaggtattttatgtagtgcttctagttatttatgtgatattttttattgcagatgaaacagaatttagaaacttcatcgtttggcttgaagaccagaaaatcaggcactacaagattgaagacagagggaatttaagaaacatccacagcagcgactggcccaagttctttgaaaaggtaatgaattaggaagtaaagtaaaaatacagagagtttgtctgaaaaatcatgaagatgagcttaaaattactttcttcttttaagaaaaaaatgataatgatcagtgttaggaaagctggatttcagggattttgcttttttcttagatgtgtcttttgcttttagagcaaattattttatgtcttcctaccaagctttcagtattaggtagaaatagttttctctagaaacatgaagtttcttaaataaataatgatgtaaatatttcgctttccctttatggcccaaatcagaatttttgttaaacacagtactatttcttatattaaaagaagacattggctaggtgtgatggctaacacctataatgccagcactttgggaggctgaggtggcagatcatttgagctcaggagttctgacagcagcctgggcaacatgatgaaaccctgtctctacaagaaaatagaaagttatctgggtgtgctggcctgtgtctgtagtgtcagctaattgggaggctgaggttctccagcctgggcgacagagtgacaccttgtctcaaaaaaagacattattgagatgcttgaaaaccaagactgtcgtgtttatgcttatatttaatgtaaacagatatcccttgttgtatgctagggaaatagtccttaaatgatctctggtatatcatatttttgtgccttgaatcattttcccattgatttagttttagtaacacttttgcataaaaaagaattctcagattagaataaaaatgcttttagtgtcatttcttacattaaacattttcatcagttatatttgatgagtgagatatttttcttgaaaaaggctaagtttttcatttgcgagagcagtgtgattaggcactttctccctagaatcagtgattttataaattagggattgtataaattacatcattgttattaacctttccgtgtctcaattttttcatcaataagtgagggtaacaatgatacctatctcataagtgtggctttgtttttaatgagtaattgttcacagaagtccctggcgcatagcaagtgtgataagcttattactgccaatgcctctatactactactattaatactactgtattcttttcctttgctcttagaaaatatttttaaaattttcagtggacttcttaaaactttgaaatatatttttaggattttatgtttgtt

SEQ ID NO: 75365 - DNA, 1046 bp, Homo sapiens
tctatagcaaaaattaagcttgattgaatgaattgttttatgcttatacaggttaagcatccctaatccgagaatctgaaatcctaaatgctccaaaatccaaaactttttgagcactgacatgaggacacaagtagaaatttccacacataagcacttaacacaaactttatttcatgcacaaaattattaaaaatattatatgaaattaccttcaggctatgtgtataagttgtacattgaacataaaaatgaattttgtgtttagacttcagtcccatccccaaaatatcccattttatatatgcagataatccgaagtctgaaaaaatttaaaattggaaattattggcatttccagtaagggaaactcaacctgtaatcattttggctcagttaaatttggtaaatagcagtagtcattttaccttgagttgcagttgtacaaattatatttttgcctgtttttatagctgaaaaatacaaggatttagtacctgataattcaaaaactgctgacaatgcaactaaaaatgcagaaccattgatcaatttggatggtgagtatataaatgcataacattgaacatcaacatttttggttttttaaatgtttttttctttgaagaatgaagtccaggtttacttggttttagtaaatttagaaggatccatgcagacagcatttatgttaacattttattctctataatgtttttatgatgtgctttctccttccccttgcatttgaatatctgaatgttgatttgatttgcttctagtaatttggagttttgatttgtatttaatcatgggggtcattgtttgcctttttgaatgtgtaaatttcttttaatccaatgactctatcagacaagtggtaaaattttccattattttaagtcctggatatcttttagtaatttccctttttaaaaatatgaagaatctaattacctaaattatgatgtgtaaaatatttgttcactggctaattcattgtgacctataatttaggagttaacccttttgaatgagtgagcctc

SEQ ID NO: 75366 - DNA, 1083 bp, Homo sapiens
actgagctcaggcagtctgacttgagagcctgtgctcttacggtaggtggggagaagggtccatgcgtggatgtctgcatgagcttgtcagtctgcccaggtgaagggacagggggttctgttggagtgtaaggttcaaggtacaggtgactgaaatggtatctttcagtcctaccttgtaggctgagaaaagctatatcccatgactaccttccccttaaagagaaaatatggaacatttttagattatatcagaaatccaaagatgcctaaagtttcactggctgtgcagcggtggagagactgtcctcaggtcagcagcagcagtgtctgataacacctgcctcctgcagcaatgatgttgtagtgaatgccttgggcacaactatgttgtttgtcctccctgcgcccttcccccatctcccaatgccttttgtcctccagcccctttaggcaggccaagcagtgttaaaaggttactaatgccagggcagtatctctgaaagacactgttttcttttaaaggttcttactggctcgttgtatatgaatcgagccactggaagttgggttaaagatcagcttatttcaccctccctatagaacagacagtaaattgttctggtgtaataaagtcaatcattcattcattcattccttcagcaaaactatgctttggaaggcagtgtaagtaaaggcttagccaaatctctttgctcttgtttgtaaagtaaaatttagttttatttttaatgctcccaattttaattttggtgtcatctcaaaagataccagcctataacaatttagtggagttcttacagtctagtgtacttataagcatttataactactatttgaggcatatggtagttttcaggggtagcttggtggcctgttggcaaaggaaaaaaaagtggagcctctggtactagatgaacatataaagccactcagtacaattctgctctttaattttgctcacttgtgctttcgtacccattggtttcttcagacttacatgtgttagctgttttaaagcagacagagcctacgtagatttacattactagataaggcaag

SEQ ID NO: 75367 - DNA, 2640 bp, Homo sapiens
atggtttagctattgtaaaaatttttaagactgattcctttacattgaaatatgagttatgttaccattttagtcacttttttcctcctacctagaaaatattttaaaaatactaaggattttggttaaaaggttgcctcagtaattatagacatagcttacaaagggcaagtatttacccagatgttataatttataagctaaggcttgaaatcacacaaattataaaaataattatgtttaatgccctactttggcagaaacttaccagatttcagtaaatgcaatcctgtcttccaaaaaaggattgaaagtttgaatctctactaaaaactggagactagtaataggacaggtaattttacagttgctaatctatgactgtaatggaagtaaaatatcctatttccccattctatcactgtgtcactatcactatgtcactatcatttttggcaaagcagctgaaggacctcattttccccctttgttttaaaaggaaccaaaaaactggagtgtacactacctgatggaactggacggcgtgtcattcaaaacaacctcaagtaccccttcagcatcgtaagctatgcagatcacttctaccacacagactggaggaggtgagccccacaaattctggacaagcctgaaaaggccaactgttccagaggacacaccacttgttttaccaaaagtcagtacctgacttgactcattaagccctctgaggcttttgtttcatcacctcctcattggcagataagatccttcaaggatgtttttcatcctttcatgtttttgaaatcatccttttacttcacccagaaatcgaatggtattgctcacatatagcttaaaaagtagcaaagctattggataatgtctcaaaagggagcatattaatctaaatatgttctttagagaataagactacccttgataccatgagctatattacagggcttaagttggcttttgacactgtggacatattgtctgagggaccgaaaaatactatttagactagttctcaaatgaggaactgtggaacattaaagtctaagccctttacaccatgccctacaactctgatttgatagctcatcatgtgattctaacatgcagctagagatgagcaatggatttagagcaatggtcttcaaacttcagtatggctttagcaccagccctgggacagagaaggctgccagaaattttcctctattgcaactgattttctgtggctgactgacttctttatctagtaaatgactgtccctgaattcactcttcctttctgttaccagggatggtgttgtatcagtaaataaacatagtggccagtttactgatgagtatctcccagaacaacgatctcacctctacgggataactgcagtctacccctactgcccaacaggtaaaaagtatgctttaggatgctcctttaaattagcagggtagagaagggatatatatggtatttgattacccctgctgcctgtgacactgccaccattgccttcttcctgccctgagggccagtctttactaccttaaatctacctagtttatacacaaaatgcaaagacttgctgttgcaacttggttacaatatactcacccaccaccctgtcccacccctgctcttctctcacaggaagaaagtaagtacagtaatgtaaaggaagacttggagtttacaatcagaacctggaccctaaagaacagtgactgcaaaggcaaagaaagtaaaaaaggaattggccattagacgttcctgagcatccaagatgaacattttgtagtgcaaaaagacttttgtgaaaagctgatacctcaatctttactactgtatttttaaaaatgaaggttgttattgcaagtttaaaaaggtaacagaattttaactgttgcttattaaagcaacttcttgtaaacatttatcattaatatttaaaagatcaaattcattcaactaagaattagagtttaagactctaaacctgatttttgccatggattccttctggccaagaaattaaagcacatgtgatcaatataacaatataatcctaaaccttgacagttggagaagccaatgcagaactgatgggaaaggaccaattatttatagtttcccaacaaaagttctaagattttttacctctgcatcagtgcatttctatttatatcaaaaggtgctaaaatgattcaatttgcattttctgatcctgtagtgcctctatagaagtacccacagaaagtaaagtatcacatttataaataccaaagatgtaacaattttaaaattttctagattactccaataaagtgttttaagttttcctatgacttaaggatctatattgtctctaggacaaagctgggggttggcatatatgccttaaccacaaaggagaaaggtgatttatgcaaacatacagtacataataaaaattctactttcctaaactttattaaagaaaaaagcaataagcaatggtggtaaatctctagaacatacccaattttctgggcttcctcccccgagaatgtgacattttgatttccaaacatgccagaagtgtatggttcccaactgtactaagtaggtgagaagctgaagtcctcaag

SEQ ID NO: 75368 - DNA, 1128 bp, Homo sapiens
cagtttctgtgagtcaggaatccaagtgtgtcttcaccgagctccctcaggcatggagtctctcacaaggctgcaatcaggtaatggccaaactgcagtgatcacaaggctcagctcggggaagacacagcccaagcatgctcacatgggctacaggcaagactaatgtctctggccaacagccctcaaggacatcagttccttggcacatgttcccctttacagggtagcttgcaacatggcatccagcttccctcaaagggagcaagagagagcccctaaggcagaaaccagttttttgagaccgaatatcggcagtgatagcctatcacttctgctatactctatgcactagaagaagcaagacactactaatgcagcccaaactcaaggggattgcttaaggctataatacatgaggagatggagatcactgggggctgcttagatgctgcctaccacaggctacatggctattcttttacaatcttgatttttaacttacagcaacttgtactggacagactggaatagagaagctcctaaaattgaaacgtcatctttagatggagaaaacagaagaattctgatcaatacagacattggattgcccaatggcttaacctttgaccctttctctaaactgctctgctgggcagatgcaggtaatactactgatggaatgcaaatagataacctctcatcacagtgaatgtgagcactaacagattttactacaaaatgaaatcccatcacttagatctcctttctttggtctgtaaacttttaagtactagtaaatttaagtactagtaaatgagtcttaaaatgaactttctggggtttgggtggagggaaggatatatcaagcagtaagtttgtactgcttgcctgaccatgagtgcctggcatatttttaacagttaaaagaattagccattgttgaattgacaaacttaagtgaagttattcttatgcggggagagggtcactataacttacctataaacatctgttataatgctaaggacattctttggaaagcattgtagcagggtagcttccttcagtaataacatgggtattagcaacctacatttgtttgcttttatcagcacaactgaaaaa

SEQ ID NO: 75369 - DNA, 1074 bp, Homo sapiens
tcttatccagacagcaaatataaatgctaaaggacttgaatttttaataaaaagaaaacccaccttgaaccaggttgcaatataacacatgtaattacatctccttcaactgcgtaacagaatggttgtcaagccttcctgcatatttctcatttgctttctatagatttcacctttacaactttcttcctctggcaatccccaaataatttacaccaaatatctgtgtgagcttgtttcagacttattgttgttgatgatattaaatcattttggggaggagactgatcagaagcgatgaagcaatgatatgcatgctgtaccctctggccacctccaccttagcgcaaagtggaaactgctttctagcttttgctctcagcttctctctgcttcatctgttgggcataagggatgaaattcgcaacaggggaaacctatggtttcttcctctcctctcactgaggttctctgtagcccaactgatttattcaaagcttctatagcttttataaaatagtattttataaaaagtgctttcaacattatttctgctctaacgataaacctgtttgtttccttataacctatttccacttaataggaccatatttcctcgttagtatctgttatgaatatatttcatttttaacgtggcatttaaaaggtaaagtgcttaacttaaaatgtttccatccctgggtgccaggtaccccttcaagtaccaaattgtatttttggcagaagaaagaacagtttccttctcaaatccctggtccacatctcttcaagttccatagtttgtatcgaagccattcctaacagctgtatttgtttctattctaaaacccaagatccaattcaagacttcaacaaacggagggttttggggcagttgagtcaaggggtatcttggaggcagggattctgatagtaacttagtaatgacttctcccacatagtgacaataatcagaaaaccttgtgatacaggtaaaagtggaatatggctgtgtattagttacctactgctgtgtaagaaattgcccaaaccctcagcagtgtaagataacat

SEQ ID NO: 75370 - DNA, 1766 bp, Homo sapiens
ggaaaagattcagtttttacccagtaaaatattaaaaacttattttgcttaaggccatgtcctctaattactgaaggggctgatttttttttttttttaaatcatcagtcataatagcacctattgaagggcttactgtatgccaattactgattaggacactttacaagcacttatagtattaatttttatagcaaccatatgaggcaggtacactattggcctcattttgcaaatgagacaaacgcatagaggttaaatgcccaaagccacatggctactaagtggctgagcctagatttcacccgagtgcccacatgtccagctactctgctctgttgcctgcaggatcacagtgcagtgttgctcactgcagctgtgcatgagcaaggcagctgagtgtgaacaaaggggaaatgtaacctaattcttctaattctatgatttgatgcacaaagggctccataatcgtgggaattgattacgactgccgggagaggatggtgtactggacagatgttgctggacggacaatcagccgtgctggtctggaactgggagcagagcctgagacgatcgtgaattcaggtcagcagcttcactcagcagtctgcatttcatttgattctacaaagtcacttgtctactttacgccgaagtctcccctcgatttttctccattaggggaggttaagttctaggcaagtcattttattgagctgtataagactagccccctctgtaagcaaacaccttcatacatacggaatgaaataggtgattcctactgtgcgcacttcttaaaagaattcatggtaagaattcagggtgacgccttcgtttattcagcctggctctggcactgtggatgccggttgtcatcaaactggtaggtctgctggtctagaagctagaggtagtggaatatgtaacaaaagtacttgtttctctattaacctggttcttggggacttggagacacttgggctttgctttcccctgctgacccccctgcccacccgaccgttggagggcttcaggtttgccctccatatcctgcaaacactccagtcctgactttgctttatttccaggtctgataagccctgaaggacttgccatagaccacatccgcagaacaatgtactggacggacagtgtcctggataagatagagagcgccctgctggatggctctgagcgcaaggtcctcttctacacagatctggtgaatccccgtgccatcgctgtggatccaatccgagggtcagctgggcttccctaattcttctcttacctgtagatcctgatgtgaagcccttgggttttaaatacaatgtggggaaggtcagaacaagagagtgaaagctcaaatgcattcatgtaacaaagatttactgaggatctaagaggtgtcaggacctgttctaggaaaagacaaggtctgttctttcatggcacttatattttattaggaggaaacaagactggtataaacaatattagtctgtgatgtgatatgtagaaaattcagatagtgttgtgagaactagggctactctgaatcaaatgatcaggcgaggcctcagctgacacttaaactggaagtgaagtgggattcctccagcagcacatttagaaaccagggttgacgctcacagtagggctgacctacatcaagtgacattagccaaagctcagacacctctggcttcagtgttgctgtagcagaaatcaagataaacattttccctgtctgtataatt

SEQ ID NO: 75371 - DNA, 1086 bp, Homo sapiens
ctttttaagattcgagtttgttgggtcctgtcccctcccccaagaaaactctcacattgttttgtaaaactttctctggaagaggtagagactaagaagttgacatcactttaagctaaccctcttttattcaagtcatagagcttgattgcctttctgaacatgcccctgaccaggacagggtggtgatggtagtggtagtggaactgaaagaaatgggacgtgggttatttgcacattttaaggaaatttacttaaactgggactttttctctaacctgaggttatgacatgggtttatgaatcccatgattcccgggttaatggaagctcatttgaatgtgtactcttgcctgggacaaacgacttttcaattttcaaataaaagtgtagttgaccttaggcccgccccccatataagctgcctgtttttccactgaagccaaatcccgttttgtacaatctttcttggctgactacgctcccagggggcgtaagtgaagccaagccccaggaggctgttaggcaaggcaggaacttgtatgacctcagggacagccagctaacccctgaatgttggctttgcacatctgctgggcttctcagagcaggagcctggattggaaactgaatgaagcaagttctgcatggagttgaggaaaaatatcagactcagcattttttttatttttattatttttttaaaagacttgtcatttatttagcaatgaggaggagagacctcactagccagaggttggataaccactactccctagttccttaacccaataaattagattttttccttcttttgagacagggtgtagctctgtgttgcccaggctgcagtgcagtggcaccatctcggcttggtgcagccttgacttcctgggctcaagcgatcctcccaactcggtctcctgagtagctgggactacaggtgcgtgccaccatgcccagttcatttattttttgttttttagacggggtctcactatgttgctcagtctcgaactcctgggctcaagcaatcctcctgctttggcctcccaacggacagggattacaggcgtgagtcactgt

SEQ ID NO: 75372 - DNA, 2118 bp, Homo sapiens
tgggcctctcctggccagaaggagatcatgccccttcccaggctgagtgagctgcactgctgatcttacctcctcttgttctttcttgatgtggctgggccttgatgacagaccctcctggcaagaaagaagcatcacatgatctatttctgattcccatggtggagaagtacttagaacacatttgcttcccaagtttggtgtccacgggcttggctgagacctggacagtaggagaaggaaggccaggaggccaggcatggggtcttgagctacattttgcattctgtccttgactcacaatcaaaggtttttcttcttccctcttccccatctgctcagagcccacccagaggcccccgaccatctgtgagcgctggagggaaaacctgctggagcactacggtggcaccccccgggatgaccagtacgtgccccagtgcgatgacctgggccacttcatccccctgcagtgccacggaaagagcgacttctgctggtgtgtggacaaagatggcagagaggtgcagggcacccgctcccagccaggcaccacccctgcgtgtaagcacctggccgcccccgctcccctcagctgtatctaaggcctttgctagggatggtgcctgctgtggtgaagtggggggacatgtggggtcaccaggtctaatgaaagaagtcactatgtgctatgttgatttataatctggtccacacaagatcccaatttgcgtttggtgtctggtttttgtcattagcagcttccataattggaacatctgcaactcggttcagcaggcagttactccccctccccagcccagggtgacaggggacacgtgtcactctggagtcctaaaaggaagctgacacaatgctggctctgttttttttttctcttgaaaaaaaaatctgttctgctttgttctgagggaagtgttttgctgtcttcttccctagtaaatggcagatttacataattgatccttaaaaaaaccctagaaattagaatttcttttgaagaacatctggagcacatctgcgtagggcgaagaacttttgatatttttggaggctctggtatgtggtaaagtaacttttcttcccatctccctgcctgcccttgttccccttcctgctctcccaccctctctcccacaggtatacccaccgtcgctccacccatggtccggcccacgccccggccagatgtgacccctccatctgtgggcaccttcctgctctatactcagggccagcagattggctacttacccctcaatggcaccaggcttcagaaggatgcagctaagaccctgctgtctctgcatgtaaagtggatttctcctgtagggggcagggctgcgtggctttcccagtgggagccacctcacaggccctgttgcagtgaggtggactggtgcagggaagtcctggagggtttctgagctgcagcccatcggcatgggcccgatgccaccaccataggaccagggctctctcttgctgggagtcacctgtcactgaccaaggctgtgctctctggttcgttcatggagtttcagataatatggaaagggaactttagagttgtcagcacatggaggctgtatggtgatccaagggaaaatggaccgactcttaccctaagtccccagggttgtatgtcataacatctccatggaaatcctggaaatcaaagtgacaggacaactagtcacaaggtgtgatctctgcggtttgttggggactccaagtggaagtcagttaatgactgtctcaccgttgcagcccttccctttcactttggttctgtccctttgacccacttctttcctaaccttccctgactccatagatgaaaacttgaggagtgtgtgatgctgggagaggagtggatggagccttccccaggggatgtttgatgcttcctgagccagcagcctccctaatgcaaggcaccccattttggggagcgggttttctcaaaaatggaggaaaaaaaagggtggctgtctcgaatggcatcgacacagtggaaaatcatctgattccattgttgaacttcacactccaggcacttgctcatccctgagaaagaatagtacggcattcaag

SEQ ID NO: 75373 - DNA, 1090 bp, Homo sapiens
tcactgtcaatgaaacatgctgtaagatgtgttgtttttttctgtgagcgactacccatttgatttctacactgaacacgtttagtctagtgtgttaactcacatgttccttgattttttttcttcctttctattaagcttacctttaggtgtcagcatttttctgctcatgctcaaaggtcttctgaagctgacacctcactgggtgttgatccacatatccaaagcccatgcagtcgcacagattgtgtgagtgaagtcatagtgttctttgcttctttcttctgtttctgacctctgcagatgtagatgaatgctcagaaaacagatgtcaccctgcagctacctgctacaatactcctggttccttctcctgccgttgtcaacccggatattatggggatggatttcagtgcatacctggtaagtttcagagggccagattaggcacatgaatctcttagctccttcaaggatatttttctatgacagcccactcttgatttagcctggtctggagccttggtggattttccaagctgtggatttttttccttggttacctcctgctgcctagtttactgatagttcactgattcgtaacatttctggaggcctgcgggagacgacccacccatcgtcctacctcatagcccctctggttaactgccctagtgatctgcttgaccttgatgagtgcaatttggatgaagtgttgagatcaagcttattaagcagagccttatgcgccggtagccagggttaagcccgtggcgaccgtgttagaggagcttggctagcttggtgcagtctcgtgagtggtgagtgccgttggcttgcagcttctcagacttaacctgtgggcctcagggcatgaatgagctttggcttgttttctccagagtctcttgggatgttgggcagatgccaccgctatccctcattttccccagatgacaatagggaggggccgggctgctttacacttagagccagctagggacctataggatgaactagaagaactggagagaaatgaggtaaatagtggcaaggtattataaaataagaatctcgggctccaaaatcc

SEQ ID NO: 75374 - DNA, 1006 bp, Homo sapiens
aactcgaaggatttttaacacattttccaaacaggttctttactagcttaatagagtgtaggattgcactgagattaagctacctctcattacctgagtgataaaggggctctacgacttcttgaacgtttttgtctttatagcagtccctacaggcccctgctagtaatgactaagcataagcagtggcctccttctccttctccaataaagttcctcccttgccagggggctgaaagtctttccatgttttctctcttgacatctgatgtcctgtgcatgcccaggtcccgggactctagtctctatcatggtgtgagaggccctccaaggaggagtcaggactgcgaattcagggagtctcaatctttggggcaggaatttctcacttgtgatatcttcagtctctttggggactttctcctccttgttggtcatttctaatagtttctgtctacccagaactttagtatctttgatgatgccaacagtatctgtggggaggaaggctggtctttcagattgagtcagaattcttaggctgaaggttctaagcacaccgttgatttatttggtagctctggggaatcccctctctcttgagttcaaaagtaacaataagaaactgctccatgggctccagaaataggccctgtgtctcaggaattcctgcttcctgtcattgcttggggttcctgttaccattagaagtacttttagcatgcgtattgtgaatagctttaatttcctgcattcggctgaatgttaatttttacaggtttagttttacagccagttttacagcctattccaggtccaaggtattggatggtcaccagttttgcccagctgggcatttgaattgtcctgttgaagaggcagagccaagctcagggataattatgacaacattggttgatttcagggtaactgaggagccaatctggtttgtttctacccttgcagatgaattgatatctgctttcttgcctttataggcgaaatg

SEQ ID NO: 75375 - DNA, 1011 bp, Homo sapiens
gaggctgaggcaggagaatcacttgaaccagggagttggaggttgcagtgagccgagatcacgccactgtactccagcctggcgacagagtgagactccatctcaaaaaaaaaaaaaaaagaaagaaaatgcactctttaattcagtgggatgagggtaaaagtgacaggagaaactgcgtgtgtgtgtgtgtgtgtgtgtgtgtgtgtgtgtagcaattgctctggagtgttataaactttaattgaggactgcttaggtgatgggtttttgtgcttagtattttaacagcaaattcataccagtacttgaactttaatagcatacaaaccatctaggaatcttattaaaatccagattctgaatcactggaccttgggtagggtctgagaacctgcattccctggtctgttgctgttggtctgtggatcatgccatgaggagtgaggctcatcctttgcaggcctaaactctggatgcccttatcttcttctcttttcagtgatcaccccacctgccaacccctgtgaggatggcagtcatacctgtgctcctgctgggcaggcccggtgtgttcaccatggaggcagcacgttcagctgtgcctgcctgcctggttatgccggcgatgggcaccagtgcactggtgagtaactgcaggtcagcctcaatgactggaaagttgctttggatgcacatccccacatagatggagctctcccagaaaagacaaaggacttcctttgactctaacagccttgtggctgccaaaatagtgagaaaaaagcgtcctttgagttagaaaggggagccaagggtgatttcctctggactagatgggcgagcatatatggcttccttggcggagacgttcctgtagcactcgggagcttctaaccttggttccttggagccagcgcaggctggaggaatttagggaaagttgcataccttcctgttaggcggtctccaccttaattcaacacttatggttgtgctcttctgctttaa

SEQ ID NO: 75376 - DNA, 1983 bp, Homo sapiens
attaattggatttacctataaaaattgggaattttagtaagagatcaacagatttagaaccaggaagttggagtctgagtctttgctgtgccacttcctgactttgtgagcttgggcaatttttcccatgtctcacttgatttccttatctgtgaaaattacacataatggggaaaacaactcaccacatagaatcatcccaagaatcacaggaaataatagagcaaaagcacttttaaacagatgttttgggcgtttttattccctggatgcaaacctactgaaagcaagtaaaggtactagttgtctatagggtaggcaataggaagccatgctggagtttaaaactgaagtgcagaaaatccaccctagcttcagatatggataatttagtaaggtcttccggtgtgtcacaaaacacagacatgcagtcagttccgaggactcctctatctccgtgacatttgcttaccaatagccagattgtgcttttatttcccctctactcatgcagaggattcagaccccactccggggaatccttgctatgatgggagccacatgtgtgacacaacagcacggtgccatccagggacaggtgtagattacacctgtgagtgcgcatctgggtaccagggagatggacggaactgtgtgggtaagagccatgttctcgtgtctccttcttgtagcccttgtttttcctctgccctccccagccttatgtctgtagaagacaagtatctgtcacctttacaacctccattgtcaatgattttagcagctgttaatctgaatatagttatttaaaaattaaagcatagctgtttatgtttgaaaagatggtttggagtggagtggattttgcaccggggctgtgaaaagaaaacatctgttgcagttcctggatgttttgagttaagttttgtaattttgagcttttgtagtaagtagttcttagacttaccaaaaagcacattttctgattttctttaaattttagacagacattgtgtgtcttatatccccaaaaggcaacggtagaaatttcttgatattaaaaaaaattgttggttttcttccaagtatccattctttttaaaacagttaaagaattcttagaatattcacttaaaaatttatcttcctgtggtgtttacttgaatggcatgaaatttttactatttctgattatctgcaacatgcattcatatctgatttttaaaaattctacatctgccaaccatttgtcccattgaagcatcatactagtgagaaaacattgagtttttagaccctccacttctgggacccttgaattaagcagaatttttctcttctcatttcttcttagatgaaaatgaatgtgcaactggctttcatcgctgtggccccaactctgtatgtatcaacttgcctggaagctacaggtgtgagtgccggagtggttatgagtttgcagatgaccggcatacttgcatctgtgagttccaaaatcattttcctgtgtggccaaaatggtgctctttaatcttgctctttaatctgtcagtgttttgacttctgctattcagaggctctgctatatggttttcttaagaagacagtttacatcaaaataacccaaagctggctggatgtggtggctcacgcctgtaatcatcgctttggaaggctgaggcaggtggatcgcttgagttcagaagttcgagaccagcctgggcaacatagcaaaaccccgtctctacaaacaatacaaaacattagccaggtgtggtggcacacgcctgtagtcccagctactcaggaggctgagataggaggattgcttgagcgcaggaggcagaggttgcagtgaactgacagcatgctagtgcattccagcctaggtaatagagtgagactctgtctcaaaaaaacaaaaaaaaaaacaacaaaatctctcaaagctatggctcagtttcagccctgtttattttcact

SEQ ID NO: 75377 - DNA, 1067 bp, Homo sapiens
aagacatgcaggaaacttaaaagcatgttgctctgtgaaagcagctagtctgaaaaggctacatacagaatcattctaaccatgacattctggaaaaggttacactatagagacagtaaaaagatcagtggttgccagtggttcaggaggaagaaggagaaggatgcataggtggaacatgggatttttagggcagtgaaactattctgtatgatattgtaatgttggttataggccattatgcgtttgtcagtctatagaactgtccaacaccaagagtgagccctactgcagactatgggcattagttaataatgtgtcagtattgattggggataacaaatgcaccacactaatgcacaatgttgataataggggaaactgcacattttgggtggggggatatgggagctcgtactttctgctccatttttctctaaatgtaaaaccatcctaaaaagcaaggtcttaattattaaaaaatgtttcaagcaagccagaggatgagcttgtgaagtcagggaactctacagatgggaagtggctttgtcagatcaaggggacattttaattctgaaaaccaggtcatgttttcccctagaatgtaagagccacaccaggagaaaaaaaccatcttcctcaattcagccactgtattgaaactgttgagcccagagttagctcctcagtgaggtgaatctgtaagtgatacgcggttctgtgctttgttattggagctgagggctccttaagcctcagcaggctcaataaagaagtgttgcttcagcaatatgacaagattaaggtacaaggactagactcttttctaggatgcgaaagtgacttgtaatgagaatcccgaggtgctttggttttaagaaacttggttgggaatgtaggcattaggtgcccagatattggattgtaaggtagcaaatgaacacatgaaaatgtgagttgattttagaggaacatgtaaattagaaagggaaagattgctgtagtagatttctcaaagagagatttaaacctactggggagaatggtctttacctttaaatgtccag

SEQ ID NO: 75378 - DNA, 1359 bp, Homo sapiens
atgtagggaagacaaggggaagcagagacctgggctgtgaacaaaatggtcagtgtccggatcactgacctgagcttgactcctagactcagatggtgagagacaaccctttcccttctctggaatccttcagatttactgaagtgcgaggtgttggaagtcgtcacttctgtgaaatgtagaagatggattggtttaaaatttagggtgtagagtcaaaccaatgtgagtttcagttccagctctaccatgtggcagcattgcatcttaggctacttaacctttgtgagcctctgatcacatgatttagtgcccacctcaccaggctgttgtgaggaataaatgaggcagtatgtagagagcactgttggcatggctggcccttagtaacacttattctttgtgtataataacatggacaattgtagtgccttctccctctcagcactgtggctttgcatccactcaggtttttgggatttccttacacattttttcatataaactcaggaggttcccaagggaacacactccaagaattagatgaaaaaaactgcagaaaaatccacctcacatgaaaatctctgtatttaatatttttaaaaaattaccactgtgtttgttgcagctgtgacctctacaagttccagagactactctctgacttttggtgcaatcaaccaaacatggtcctaccgcatccaccagaacatcacttaccaggtgtgcaggcacgcccccagacacccgtccttccccaccacccagcagctgaacgtggaccgggtctttgccttgtataatgacgaagaaagagtgcttagatttgctgtgaccaatcaaattggcccggtcaaaggtaaggtttccttttttgttgttgggtaaaaatgacatccttttaagtagagttagaatgattcacagaggttactaagggttacctagtgccatgctgtgttatgtgctaggtataaggatgaatagagcagatccttgcccttgagttggaaacagaggcagaaaagagttttagggcagggaacagtgtccctgccaaagtcaggaaatagagcatagtatgtgaagctggtttatagcaatacccaactgtgcgtgccaatcaggaatatacctgtgaacaaggcagactggaattaggagggagagtgatgctgacaagtatttgttacaagtgtgatgagagcagggcactgtgagtctagtttgaagattcagaaaagatgtccccaagaaagtgacattttagctaaaacagatgagaagaatttcatccaaaactaaggtggagcaaagagctagtatctggaaaaaccaaacatcatagaacttgatgta

SEQ ID NO: 75379 - DNA, 1071 bp, Homo sapiens
acatatttcatgagacatacttatctgaaattcaaacaaaaccctgaatgtcttaggtggtagtttatttgtttttgtttttttgttgttaggtttatttgtttgtttgttttttgctaagtctagcaaccttagagaaaagtcaaggacgttcccaagagtatttctcacagaatacaagcttgttcaaagagaagctgggtgaggtaaggcaggatgaaaccatattcttcaatggaaaagtttgggaacttatggaatcaacagctgatagtgcttactctcagatatcagataatctccttaggcacgatctccaacagcagtagaaattgggagcgggcagtatatactggtaactgtttaagcaagacctcttttcatccctgtgctgaatgtttttcatctccaggtgctgcctttacccatgacatggaagttacattctacccgggagaggagacggttcgtatcactcaaactgctgagggacttgacccagagaactacctgagcattaagaccaacattcaaggccaggtgccttacgtctcagcaaatttcacagcccacatctctccctacaaggagctgtaccactactccgactccagtatgtataaccagtcttcacatctgtaaaatggggattatgcccatctcacaagatagatacaaggcttaaatgacttacatggcatgtccttagaacagtgcatggaacataaaatgagctctattatgttattactcttattgttaccatgaaatatatcgtgtaagtgagcagaatggctgctatacataagaatatctatatccctacatagtattttcaaataataaaatcaatagcaacattgtccatggggtgggtagggatggtataattatatacagtttttaaccatcctactttctgcaacatggaaaaatagtgattattggaatttatatttatctcaaccttgtttcagctgatgagttcaggctgctttaaaaaaaaaaaaaatcacagaaagaggccaggtgcaatggctcatgcctgtaatcccaccactttgggaggcc

SEQ ID NO: 75380 - DNA, 1494 bp, Homo sapiens
tgctacctagggttgttgtgcaaattaagagttgttggccgggcggggtggctcacgcctgttatcccagcactttgggaggccgaggcaggtggatcacgaggtcaggagatcaggaccatcctggctaacatggtgaaaccctgtctctactaaaaaatacaaaaaattagtcaggcgtggtggtgggtgcctgtagtcccagctactcaggaggctgaggcaagagaatggcgtgaacctgggaggtggagcttgcagtgagctgtgatcgtgccactgcactccagcctgggcgacagagcgagactccgtttcaaaaaaaaaaaaaaaaaaaaaggttgttaaatgtaaagcttgtatatgttaagcgcgattgaagtgttaactttgttatatttttatttgctgatggaggtctttatcttggtgacattgtacctataatgctatgtctcattagctcctttactttctgttctccctgggaatactgggtaaagattgatctttggatttcttcctcccctcctgtctcctcgtttccagatagacctggaacacaactaccacttggtttttcctaagagtagggtgggtgtcctccttcatgccagcatccgtgtctcacactagaattccatgccatccctgctcaacagcatgctcctggagtctccagccaactccacctcctggggatgtggaggcagaggtgtgtgcagccgcttggcctcctggtggccatgcttgggattggcatatttcctagtgccccggagaaagcaccctcctgtccatccacaacccccgccacaccctacccccttggctatttcctttatgaactatggcatttgctccagtttccccatttctttgcagcacagatggccctcttcttttaatgggcagaataagtaggaaatggaagaaacagctgccagagcactgaatttatcctagtcctccataatttcttggaagatctgcgagtggggcccaagctgtctgctactgcgtggaaatcatgcttgtaccatacccatcatagttaaaccctgccaagggcatagggcattttaatagcttgaatccctgttgttttgccctcctctgtccccttctccccatgccttttctttgaggtaggtgcgtgtgttctttaagacccttccctcaaaacaatcttggtagcgagaccagctattatcttttttaagttcagtgttccctaaaagaaggatggttagacataagacatttgttagcttctctattatgtcttcctctcaggatgtgtttaggttgaaccatataaaagtgctgatatttagccctttttgacccacaaaaatagtggtttcatgaagttcaacctaacatgtacttactggtttgctttcattttactgcactcaaacccacgggtgcagtctcatcttagttcaccaactctgcaatgggacccagccgggagcagtaagcaattct

SEQ ID NO: 75381 - DNA, 1111 bp, Homo sapiens
ctactcgggagactgaggtgggaggatcacttgagcccaagagttccaggctacagtgagccatgattgtaccactgcatagcctgagcaacagagagaaatattgtctgaaaaaaaaagttgtcctgtagggtaggtacaatcatccttcccattttacagagatggaaactgagcttggaaatacttagtgacttgtctagcaagggcaaagactgcaacaaagtcatgaagaaattagagaaagctgtagggtgacagagagtcaaaggcactgtccaggagtgtcactgctgttggggaagtctttgtgaggaaggaggggcttgagccaggcctggggtcaaagtctgagagggagaatgtgtgaaaacattatgaacagagaagtgacaagagcggagttgcagagatgggaatgaggagggaggaaaggagggagagagacagagacaaaggttgattaaggcagtggggtgagagagttgccagtgagggcttcagctgcctgggaccatgggactgcctgtgttgtgagtagaaaggaatgaggtttactgataggggtcttagttattcttaagcctgctgaggcagtgctatacgcagcttaatttaatctcaatctgcatgatgagttaggaggaaggacacctggctttcagaaacctcatgtagtcccactccacttttggccttgtgaaaggctgcaggagtgtgttgcaagctcaacttccaccctgagaagaatttaagcaggttctgctgccagtgcaaccctccaggtgccaaagaccatcccctgggtgcacctccaggttgcagagggtctgtgaccaggagccgccgccccccgatgcctgtgaagacacctatatgaggagattccatggtagggcccctctcccttcaccagaagtggagagagcctgttagtgtcatgccagcagttgtaaaaggccacccccagggtcgtgatcactgccaccagcatcattacatgccacacacatcaaaattaaacaaacatgaaaactggacgaaaaagcattccactgtttgttataaagttggatatggtttttctaactagtctgtcattctgagagat

SEQ ID NO: 75382 - DNA, 1229 bp, Homo sapiens
acctctgataggaagaaagaggtcagaggtgactgctttgttctgaatctccatgtttttccaccttttctgtttcctgtcactgttgtggcaaaaacatggctgacctagcagagagggccttctgggttctgctctggtattatctgcaggctattgcatggagaggtactaatttcaggagggaagaaaatattttctgactaatgtggcattgtgtaaggattcgagggagtacattggtgtcggcttcgagtttgaatcctggctgccaagcttgctgggtgacctgaagtaacttatgtaacccataagcctctgatttctcaggaattacttgggaggattcaatgagacagcgtatgtgaagttcttggcttcgtgtctgcactcactggttcttaataaatagtggctgctgttactaattttagaagatttaaaacagtgggaatggggtggaggatgggtagagaatgaagaatgtgcttattaaagagtttcacattaatttgtgcctaagggaccacatttccatgaagttgaagatgtaaattttattggaagtctttagaaccttcagatccttctgagaatctccagaatttacagtatgagtttcctctaaatacattttaaggccaagtatcaaagattttcacaaagggatttgaggtaaagacgcattcctgaatggccttctcatttgtgggttgtgatttccttccctgggaagagcgtgggaatattaaaaagcagatctatggagtcatgtattaaagggttaagaagggactgcacaccctgctttgggctctgagagcttgagatcactggagtaaagtgcaggaggcttcaggaaccagccatagagtagaacagaggcacagctataacccttgtggggcatgaactatgatatttatcagctgccggatgcagtctactatagacatcctggtaatggcaaaaaacgcctgtgaaaaagctggttaatacgcattttggaggaagaaatctagaagtgtttgaaacttagacaaaaaaaatccagtttttgttttaaaagaatttacggggatgtatgaagtatagaagcatgcaattgttaaatacttttgaggggatgcagtgactgtttctttcacataaaacattggaggctcagaggtctgtctggtaagtgtgggcttcctccgggaagctgtggggtgggagtggcagagaca

SEQ ID NO: 75383 - DNA, 1457 bp, Homo sapiens
ggcatgtggcaccatgcctggctaagttttttagaaaagggttttgtagaggcagggtctcactatgttgcctagactggtctcaaactcctgggcttaagtcatcctcctactttggccttgcaaagtgctgggattataagtgtgagccaccatgcccagctgtctttccgttttaaaataagttgttcaccttctaggaaggtgggtgaatggacacttttgttacatttgttacaatgactgtttcctttttatttagactaagcaacctggggatccctggagtgtgggctttccatatcggcagcacttccccgttggacaatgtcaggccagctgcagttggagacctttccgctgcccactcttctgttcccctgggacgttccttcagccatgctacagccctggaaagtgactataatgaggacaatttggattactatgatgtgaatgaggaggaagctgaataccttccgggtgaaccagaggaggcattgaatggccacagcagcattgatgtttccttccaatccaaagtggatacaaagcctttagagggtaggatctcccctccagattctgatctgtcctcccccttgcatccaacacctacttattggccattctatcctgaaacagaatcttccaccttggatcctcacaccaaagaaggaacatctctgggagaggtagggggcccagatttaaaaggccaagttgagccctgggatgagagagagaccagaagcccagctccaccagaggtagacagagattcactggctccttcctgggaaaccccaccaccgtaccccgaaaacggaagcatccagccctacccagatggagggccagtgccttcggaaatggatgttcccccagctcatcctgaagaagaaattgttcttcgaagttaccctgcttcaggtcacactacacccttaagtcgagggacgtatgaggtgggactggaagacaacataggttccaacaccgagggtgagtgcattagaaaactgggtgctaaggtttcatcttaaccatgctggttttgcatagcgttgtgatttttctcttaagtgggtaggtgaaaagtttagcaaaaagaagattggatctaatttttaatccctgtgtttcaagagatagagtaaatttcctttgccaaataaatcttggcaggcagattctgttcggaatctcttgatcattaataatgtttttttaaaatatgggcctcatgaagtgagtgggggaaaactgggtttgttatgccagctacgctctcaagtgtaatgaactatttcagtttgaaagttcagcaaaggtaaaacattttgcggcttcatacacattccagtgatggacgggtttgtgctttttaaagtggtgagttgtgctggctcagatgaacatgccagattcatactctgttgtgagacaagcctagc

SEQ ID NO: 75384 - DNA, 1196 bp, Homo sapiens
actagggcagtgactgcaggatggacaagttaattttgctgattgctcttagctctgaaagagtttacatgagagaagtttgaaaccttacaaagtatatattttttaacctatgttttaccaatgcgtatttcaactattaatctaaattgacaaatggtatttgcaataataaataatattgcttatgaaattatattgttaacttgaagaggaaattttaaagaaggttatgtttaaaaacaatttggaggaatcctgaaaaaggggaagttctttgcacgttatgatgctttgcttgcattctgtttctttcttcttttatttgttttttacaggatgtttctctctctctctctctctttttttttttttttcctcacagctgaacactttccaggcagttttggcatctgatgggtctgatagctacgccctctttctttatcctgccaacggcctgcagttccttggaacccgccccaaagagtcttacaatgtccagcttcagcttccagctcgggtgggcttctgccgaggggaggctgatgatctgaagtcagaaggaccatatttcagcttgactagcactgaacagtctgtgaaaaatctctatcagtaagtaacattgagctgaagccctttcctatttgaatataaggacttttaggaagtacctgaacacaagtgaccataagaccattacataatatattggtggcttctaagtaaggcatcaagtcaaaaccaaggaactagattcaaccctggaaggatcaagttcaccaaaacataaaaggtcctttatttttcctgctctattgggtatagatactggaaacagaacagtatgtgtgtgtatttgtagagccactgaggcttgctatgaaaaacattgctcttggaaccacataaaaatatccagtcataaactgcccagtttgaggttttccagattaatcatttcacaggaggaaacattgtgatttagtcttttggacagatactgttaaacattaaattgagcaatgtaatttgcaggaaaaataactaagatttataggtttccagaagtctgaggatgtctctctggcttcattacctaaaatgaattgaacccattccttagactcatcagtgtctgcccataatgggcatttaataaatagatgggtgaatgaatgaatgatccagag

SEQ ID NO: 75385 - DNA, 1044 bp, Homo sapiens
gttaattaaatgaattgaaaaaattagaaactcttagaggggtgtatgttgcatgcatcagcctggctctgatgagtgtcacttcaacattgattgggatgtcctgtacctgggagggagagtcaggctctggtttctgcagagggctctggcttttctctctttctgataacagggcctgcagccactcaccctgatcctctctgtgctgctcctctccctgtggaggcccctctctcctctctgggatcctgggggagctgggaaccagtgactcgtttgtcaggtttggcagcccatctgagggcttctctttggagacagagcctgtgcggctcttgcaaaagcttgtatctaggaatgtgaggacctttcctgtttggaagccagtcaaggagttttttgagagggggagcccttcaagacttcatgaagtgggctctttagcaattagatgtagaattttgtagaactgaccaagaactttacaagtgatcatttagtgtgtgggtggcttttaaacagccaaactcttttggcgtgtactttgggatcataaattctacttaaaaggaagttgtttccttcctctgatatttgcctattttggtggagacaaagaaattaaatacttgccacccataatgagtgctcatctcaagaacagtatatagaagatgttgaataaattttaattgaaatgaatttgttggctggttgaatgaatgaatgaataaaataaagtgctaaatgcccagagttcacagcaaaaagtcagactctcctcttcacagctctgtttactactctcttccccccttccccatccccttcaattcttcacagtctctacaacctccttatcttatggaatttctctaaatttagaaccaggattctctcctatctcacatttattatggcagatcaatgccaggagctttgaaagcttagctttttgaaatggggttttttctccttcctctagtacttttctttccctagttgatttttctttattctgactaatgtataactctgaag

SEQ ID NO: 75386 - DNA, 1506 bp, Homo sapiens
ccagggcagggagcaaagctcataccgcaaccccgccacccgcccgcgccctgccagcctgttggggccacagcgcgcaggccagcagccgcactcgccgctgcggggttccctttgcgctgagctcatctcctgcaacgccgctgccccaaaccttgcgggccatttggtcccgggggtggggctccttgggggccgcggggcagcccggatgagaggatgacccgggagctccctgggggcggagtggaaggggcagctccaggcagccctggccaggagcttttaccccgccagccccgctgctccagcggccgctgccttagaaaagttaacgagaaccagatgtggtggccactgccgaactttctcagagccggtgattggtccccagccgagggcctcagccaattagcttgctgggtgggcctggagtcccgccccgcccaggcgcccgcggagatccaggttcgaggctggcgcggcgcggagagtgggctggaggccggggcgggacgcgttgtgcagcgggtaagcgcacggccgagcgagcatggagggggaccgggtggccgggcggccggtgctgtcgtcgttaccagtgctactgctgctgccgttgctaatgttgcgggccgcggcgctgcacccagacgagctcttcccacacggggagtcgtggggggaccagctcctgcaggaaggcgacgacgaaagctcagccgtggtgaagctggcgaatcccctgcacttctacgaagcccgattcagcaacctctacgtaagttcagccccctcctggcacttttcccgcagcttcttccctggggtcggtctcacggaaaccctgcctccagaggggaggaaacagaccccactcctggagccccccagcacccttgcggtggtacccggccagagagcgatgccgctgcctgccccgctgctgtaggggagcaagaatgacctggaggggagagcaagaattgttcgcagccacgtacgcgtcccaggcagaaaaggtggcgttgctagggcggccagcgggctttgcagttaggaccgcgagaaggctgtgcccgtctgcggagctggggtgttccctcttcagacctggaggcttcctctccgaggacatggggctccggggttgtgaggggagtgagaagataggtgaacgagttttagggcccctggacctactgcagcgcggagctgggacagtcgcaaaagttgcgcttgtttccctgaatccagactccctggccagtggggaaggagagagaggctttttgcctaagtcagttcccttccctccctgcgcgaaagggtagcgtccttgggcttgagcgactgtcacctttttgtccctctcctctcccaggtgggcaccaacggcatcatctccactcaggacttccccagggaaacgcagtatgtggactatgatttccccaccgacttcccggccatcgccccttttctggcggacatcgacacgagcca

SEQ ID NO: 75387 - DNA, 1083 bp, Homo sapiens
ggcagtaagttttatggttaaaaagtcaatatgtggtcggccccatgtgtgcaagttgctatggtggaagtcaaaggggaaacaacaattcacaggaaagagtacaaaggcatcacaaaaaaataaaactgatttcataaacacggtgattctggttcttcaaagacatttccaagaaaagttgctaaggaaggtgaatctaaagccacatctaagaactttgagaaaagtgtcacaaaaccaggggaaagggtgcgaagcagttgaagaataagcaacaatgggacaaagcaccaaggaacaaattccagccagcaaataaattcaacaagaagaggaaactccagccagatggcaaaagtggtgaatcagcagccaagaaacccaaatgggatgacttcaaaaagaaaaagaaagaactgaagcaaagcaggcaactcagtgataaaagtaactatgacactgttgtgtgggcaaagcagatttggaagactttaagaagaaaagactgacaaagaaaaaagagtaaagttaatgaatgacttgcagaagttgattcaagggaaaattaaaactattgcatttattagctggacatgttggcacattcctgtaatcccagctactcaggaggctgaggcatgagactccttgagcctgggaggcagaggttgcagtgagctgagatggtgccactgcattccagcctaggggacagagcaagactctgtctcaaacaaacaaacaattgcatttgcaaatgattcaactcatgtgatccagtgttacattcagtgtggtaatgaagaacagtcaaaacaggcttttgaagaattgggagataatttggttgaattaagtaaagccaaatactccagaaatattttaaagaaatgtctcacgttgtgaacatgtaccctagaacttaaagtataataaaaaaaaaaaaaaaaggaaagtatcttgcacaagctcacgtagctggtaagttacatagttgggatctgaattcagttgtggcttcatgcctgagcttttaactactactactaaactgagaaggcacttgcttgagtaaattat

SEQ ID NO: 75388 - DNA, 1180 bp, Homo sapiens
ttaaagttcagacagatttcagtgcattcatcagcaatatttcctagtatgttttctagatgtatggattgtgttacatttaatgtctgtgaacaaaattcacaaataatatactgccccttgttcagattcatcagatgaaagacatatttattctttaaaatcatttgaaaaataacagaaatggggcagtgtacatttttgctgtgaagagtttaacagtgcattctactgcttgaggcaacattttcccaggcaattatcattacaggtatctaagagtaaaatagtattttataaactgtagaatgtgttacattaggaaaactaagtatctttaacttagagtttccttgtatgaacataattatttctacttctttaatttgaaattaatgccttttcctgagaaaaggcacaattctatggaaaagaagtatttataaaaataagtatcttgttatcttctagttatgtaatcatttaatttttgagctgatgtatgatcagatacttggccaaatgttggaaggaaactactggttgcgtcaagcctaaattgacaagcctttgggctatgcctgcttttcattaaaattgtcattggctgccgcttttctcccaagtgaaacaaagtgccccatgttaaaaagaaactttaaaagaatccggttactaataacatgtcgtagacttcttggtttttaggacatcttttcataaagtgaacttactggcatgatactacttaaaagtttaatgttctacgaattactattttcattattttgttgtagaaagaaatattaatatgttcaattgttcccttttgcagaaagaatactccagtggggagaggaatcttgagggcatattttgatcctctgcctccccttcctcttcttgttttggtgaatctgcattcaggtggccaagtatttgcatttccttcagaccaggctataattgaagaaaaccttgtattgtggctgaagaaattagaagcaggactagaaaatcatatcagtaagttttctgttttgtttaatacatgtagttctgcattttgttccataaatgttaaactctaaatatagctaaagaatggtaggatgagttattaaaatgctggtagcatcatccatgtggacagtctctgactgggaggccaaaggtgcaa

SEQ ID NO: 75389 - DNA, 1034 bp, Homo sapiens
ttgagagatctttctggtggatgtgagatatgtctatggggtttgagcacatgtataaaccattctgtgaccgttgtataatctagggaggtagagtagatacagcaaaggggggattttctttttaatgcttaggaggtaaaattagctggacttggtaatggttaatttggtaacagtaaaactacaaacttgttaattcttgatctcttctttcctacctcatgctacccagctctagtctgatcaccatctgaaataggcaaggaagaagagcaaatttacagaatatgagtctactttagcaagtggaaagtccatcatgcctcagtcaggcatctataggagtttgagccccagagcattgtacatccaggtgttgtcaacatataggtcagccagggagcatcctagggcaataccaccatttaagagaagaaactgagagaaaaaaaataaatatcaaggaagtagaattccaaagaggcagtgtcctcatttttgtttaaaatgtgagaaaatgacttatgtaatacagtgttttataaaatttcccagtaacgatatttacaatgttaaagaactatgccaaacagtatgctgtcccttagctgtaccttgcaaattgccatgaggaacaacctatcttcttacttttggatgctaaaaccatcagtttgaaatacccagttcctggctagcagttttttttttctgttgtactcttacagttgcatactactcataaaaatagatttgaactggctgggtgcggtggctcacgcctgtaatctcagcactttgggaggccgaggtgggcagatcacgaggtcaggagattgagaccatcctggctaacacggtgaaaccctgtctctactaaaaatacaaaaaattagccgggcgtggtggcgggcgcctgtagtcccagctactcggaaggctgaggcaggagaatggtgtgaatccgggaggtggagcttgcagtgagctgagatcgcgccactgcactccaacctgggtgacagactgag

SEQ ID NO: 75390 - DNA, 1050 bp, Homo sapiens
tctactacttggttctactatgagaacttttcaaatctgaccacttcctataccttcatttttacttcttcctgccatctcttctcattggggaaaccacaatagcctcctaataattggcctttcttccttcactttgtcccatgacagactcttctccatatgtagccagatgtatcaggatacatcactaccatgctgcgaaagtcctttcattccaattatgatcaaatagaaacttttgagtgttgtggacactggctttgtctctgatctcattttctgaccctccactttgttcagttcgttcttaatacatagtggtcatctttctgttatttgaacctgctggaggtgctgttaaccacagggcctttgcagatattttcccctctgcttagaactcatctcttatacttatttgtatacttttatgcattactgcatttcttcagttctttgtgcaaatgtcactttttcagagaagccttccttgattacctctctaaaatgccctatcacatgctattcccttacaatttttttatttataggacttaacactacatattaattagttttcaacttgtctctaccttacattgttctaaagctaaatatttttatttggaacttacctgtacccaaagtgactagaacagtgactgacatggtagatgttcaaatatattttgaattgatgaatgaatggacacatctattgtcataataccaaccatccttatgctgtaacttaaaaaatttttaaaattacatatattaaaatttactttttggttatggctatagtctgactttaattctgattctctatttctcgtttcttagtgtcagttcctgttttgtagccttttaaacaaacgttgcttccccagttcttcttcttcttcctcaaatcccattaaaattaaattgaacaacaggaaaaccccctcttaagagaaacaaaagccttaccaaatgcaaaacaaaataactattcttctagccttagttttggttagttaacattggtggctctccatttgc

SEQ ID NO: 75391 - DNA, 1081 bp, Homo sapiens
acacatttctgttggctcccttattataattgtgattagaaaatgatattttaaaatcattttgaaagtttttgtatgtgtacatgtgtgttgtgtatatggtattaaacttggaggaagaatgccaaatgttaggtttaaacgaaacatttattatattgttgttttaggaagtttttaaggtccatttacaaagttaaagtacatcatgataaaaacagaaataagaataatgaggcaatagtaaaataagggtgtgaaaatatgtaatgagatatgtttagttatttgttgttgcatgctagttggacaaatgaatctattctgtgtttgcagattttaaaattcatttttaaggggcaattcataaacattcatgaaacatttgttgttttagattccccaagaacatctgtatttcttgaagaactgaatgaggctgttagacctctgcaggactatggaatttcagttgccaaggtagaaagatatttatgttactaaaatattagtgacgaacatcttacaactttatggcttaagattgaatatcttaaaatacttccatttcatatctttttccaaactggaaatatatttttttcataagaataaacagaagcccagaaagatagtttcaggttattgcataacatactgcatatagaggggacaaaaagctgtttaaaaatttttagcttagaatttaactttatgttataaaccattctattgggcccatggtatcatttttcaaacctatagttaggtttttgttctgttttgttttgcctaatgaatatttcataataggtagccacaattcagctgtttttaaatttttattagcacaaactgaagtaacaaaatggaggtaaacaaataatttttttctgttcttctaagtctttataattgtttatgtttcactttttcgcatttatttttagaacaaagttataacgactcaacattacatacttaatttttttctcaaaaaatgttcaaatttgccatagagtattatagaaaatttccacatgcatcatggattagatagatatgtaagcctttcatttaa

SEQ ID NO: 75392 - DNA, 1051 bp, Homo sapiens
aattagtaactgcaaggagaactagaactatagtaatgaactatcacaccgaggtaacaaggccgcatttctctgaaggtactcatcacttggttctgatatctagatttttgtagtattaagtttttgtttgttcgtttgtttgtttgttttgtttttaggcagggtcttcctctttcacccaggctggagtgcagtggcatgatcatggctcactgcagcctcaatcacgatcctcccgacttagcttccctggtagctgagactacaggtgtgtgccaccatgcatggcaattttttttcttactttttatagagacagggtctctgtgttgtctaggctgctcttgaactcctaggctcaagtgatcttcctgcctctgcctcccagagggctggaattgtaagcgtgagccaccgtggctggccaagtattgtttttcattcccttttctaattactggaggtaaaaaaagaaaaaaaaaagtcaccaagtaccttttgtatctttgttttcactctgctcttgctgatattctttttccccacccacattcccttgcctttagttaagatctttttatgaggacagcatgtctctgagcaaatgcattttattttccatgcatgtgaaatgtccactcttccatggtcctacaaggtacatatccttcccctactccctttcccctctttcttcttccttagagccaattactttcaactgctcactgtttgttttggcattgaccgtcctattttcaataaacttggtttttggttttgcgaaagttgaaaatttagttctctttcatttattttcccaccctagctgcatgtttccttattttctatcttccctttctctcaacagttgttatggttttggttaaatcattattcagtatttatttcattatgaagacataaattctacttctagctgacccgtgcggtattctttgctttaagtaatttttaaaataatcaaatcttaccatagatggaacaaactacagagattattactgagttcctaactctaaacatg

SEQ ID NO: 75393 - DNA, 1035 bp, Homo sapiens
ggtgcgcggggccgccgggatcaactcccgctgaggaccagcgggggcggggggtgggcagcgagaggcggactggaaaccagcctggggaaactgaggcacacctggagtgtgagccagtgttttcgccttaaacttaagtggctgattggcttgattactgaggggttcgggctagggggtgagtgagtgagtgtgtgtgtctgacaacttaaaacagcaacggaacgaaccctttgttcggtgttctggccctccgaggtaaggcgttggtggcaccaacaaagtggcatcgcaagaagtagcagccccggtggctctgccgaagccggactgtgttgagggaggttggatgctgaggtagcagcagctctgctgaagctggactgctgccagccattacgtcaccaggcagagctgttcctctgctattgttgctgcgtttcttttattagaagcttatattccctcctgcatctcctttcctgtggctcgataagcctcacataaatttcgttcgatagttccccagcagggttgatgatcaataaccaatgctgaggatcaggataaggacctccataaagcccttaatgtttgccccagttgcttcgtgctttagcggtttatcctacctcctattagcatagtcttttttggagctaattaagagaaaaaaatactagcttaacctgtgcctattgcagaaacaaaaccaccaaactgtttttgcaataacttgcttaatatctggaacctaatcacaccccctttctcttttatggggaattgctggttggattgcattgttctgcagcgcttaggtatttgacccatttcaaacaggtttgggagtgtaaggttgtcaatcatgtgtgtcagcttgtggtatttaagccataatattttaagactttcccccaaaaaagtcctccttcccaccaaaagaaaagcttgaggaggggaggaagcaaggtgacatcatatgcttaatacagactaatatagaataatattggcctatgcagctaatcc

SEQ ID NO: 75394 - DNA, 1024 bp, Homo sapiens
aacatcatgtttttgttcatgagctccatatctactctctctaagtttattaaggatagttttcctgttttagtttttaaatctgtattttttttgcattgatctcttttattaaagacttttgagctatctggttatccttggctctctgctaataattaagagtggaggccaggcatggtggctcacacctgtaatcccagcactttgggaggctgaggtgggcggatcacctgagcacctgagatcaggagttcgagaccagcctggccagcgtggcaaaaccgtgtctctactaaaaatagaaaaattagccaggcgtggtggcacgtgcctttagtcccagctactcaggaggctgaggctggagaatctcttgaacctaggaggccgagtttgcagtgagctgagatcgtgccactgcactcctgcctggtcaacaagagcgagactccgtctcaaaaaaaaaaaaaaagaatggaaactctgagcttatgggtgagatatgtacgctctgagctttgctgtagggtgatctggctgaactatttgttacagaacccccgttgctagtatgtttagatctttcttcttgggctgctaagattcctcagagaaaaaaaaatattctaatctttcaaagagtaaaggtctattccagcattttgagaacctagtcagggaagagggttggggtgggggagaatctttatgcttggtgtataccagtcatctccattctcagtgtggtgctaaactatcaactgtgcctggcatttaactttcatgctttagaccaaaggctttttggtggcctctccagagaataaatacccagatatctgccaggatgaagaagaggcatttgcccagggtatggactagggaaagagagatttaactgctcttaaacagcttttatctacccgttttagccacccccacttctcagttctctctgattggtacctgattctcctggtaccttttgaagattctgaaatcacgttgttctcaacccttc

SEQ ID NO: 75395 - DNA, 1069 bp, Homo sapiens
ttcagtgacttcaggaactttcaggagaaagccaaactcctctgtttggtgtacaaggtcttctgatgtgtttcctccaccgaatgttctggtgaaacagacttacacttcttcagaagccacatttggccaggcctcccgccttggtaaatgctgtactctttgcatcaagtatgctagtcatccttccccacttggaaaattcctatgcatcttgcaggcctgacataagcatttcctctgtgaaacctcctttgctccactcaaggagagtcatctaacttccactttcgtgtcaccactgtaattacaacctacctctattgtatgtcacttaaatcgtactgtattgttttatttttcaaaagtctttactagaatgtgagctccttaagggcaggaaaaggaacctttttattttttgcatctccatagcatagtttttggcatatgaatgtttaataaatgtttgttgaataaattgattttaaagtgacatctttattatattagaggtcctacctatattccaaatactttcactcccttcactttacagcaagggtcagtagagtcccaaggatttgtagactttagggggtcaataaagctgaaattgtattcaagatttggtgtggtttttggtgggtcatgaaaggggtctattcggggaaaaaaaggaacttctttcatgggaaaaggcagcatcattgaggaatttcttgaataatcaaataataccttcctaggattataaggtagataaatggattcctgtttaagattctgaagggaaggggagaagtgttataaattatttcatacaacaatttttcttagcttaatgtttgaataaataaaaatgttggtaccagtaccatgctgttttggttactgtagccttgtagtatagtttgaagtcaggtagcgtgatgcctccagctttgttcttttggcttaggattgacttggcgatgcgggctcttttttggttccatatgaactttaaagtagttttttccaattctgtgaagaaagacattggtagcttgatggggatggcattgaa

SEQ ID NO: 75396 - DNA, 1759 bp, Homo sapiens
ttgcccaggctggagtgcagtggcatgatcatagctcactgtaaccttgaacttctgggctcaagcagttctcctacctcgggtttccaagtagctacgactacatggcacacacagccatgcctggcaatttttaatttttttttgtagagaccaggtctccctgtgttgtccaggctgttctccaattcctggcctcaagtagttctcccgtcttggcctcaaaaaatactgggattacaggagtgaatcactgcacctggcatatgtatttaaatacttttaaaataactaatttctagacattaatatcttagttttaccttgtcgaattaagaactaaaatatattaaaatacattaaatggtttatgcaccttaaatttattgaaataaattactttaaaaatgttttaaaatgcaaagtgaataacttttacagataaaatttatctaagatggtttctgagtgaaatattttttggttacagaatttctacaagtgtgaaagaattagaaaacttcaggaacttgttacagaatattcattaaagaaaacaagctgatatgtgcctgtttctggacaatggaggcgaaagagtggaatttcattcaaaggcataatagcaatgacagtcttaagccaaacattttatataaagttgcttttgtaaaggagaattatattgttttaagtaaacacatttttaaaaattgtgttaagtctatgtataatactactgtgagtaaaagtaatactttaataatgtggtacaaattttaaagtttaatattgaataaaaggaggattatcaaattcatatatgataaaagtgaatgttctaagtctctcaaactagcgttttatgtaataatatgtaatataaataaaactatggtaaatgtgacaagcatttaataggaaaatgctaaggaggcctcataaatgacccataattaccaacgtagaatttttcagtacatttagggttgctggatttagcaaataaaaataaagattgcccagttagatttgaatttcagataaacaattagttttttaatattttacatggaatatttggaaaatacttatactaaaaaattatttgtttgaaattcaaatttaactgggagtcttgtattttatctggcaatcctaaaatacattggtatgaaacaaatcacttttagaagtatattgctattttgattgggttgtttttgtgtgtagaaacgtacaataacaactcaaaggcacaggagatttctaaacattgtgaaaagttgaatagattatatatttattctcataatactttcactaatactaaataaaatttggggaacactttttatttttatataatttccaatttacagaaaagtttcaaaaatagtacaaagagctctcttacccagattcactaattgttcatacgtgctttatctttcatgctttctctgtacacacacacacacacacaaatttttcctcaatcatttgaaagtcagttataggcatcatgccccttaaaccctaaatacttcagtgtgtaatactgaataattactaaaaatgattttctcagaaaaaaaaactcccacaattctggaactataatactgtaagccttagaataaataatactttcaagttccaatctaaagttctttttgagttttgttgcccgttttatgcttgatgtgtatagtaatagggtaggctatttattttattaaaattttttttagagaca

SEQ ID NO: 75397 - DNA, 1087 bp, Homo sapiens
gattttttttttcctttccattcctgccttctctcattccctccctccattccttctggtaaatgatgctctctaaccctgtctcaccctcctttctccacctattgacatatagttaatcacctacaatggacaccttgacaaagttattttgtatatttttgcagatagtttagctttggagtcagacaggcctggtttctaagttttttgtttactagatgtgggaatttaggcaagttacctaaacactctgaatcttgttttttacattcattaggtgtagattataataataactacctttggatttgtggtgaagattaaatgagattgtgtatgtaaggatctggtatgtagaatcaatgaatattagtgctgttctcatttttggtaccccatagtaccttgcacagtgttaggcacatagaacctgctcagaaaatacttactaattgactgtatattacatcttaataaaatcttgttaaattgttttcaggaggactttcgactgcattttagaaatatttcaagaattatggattgtgttggttgttttaaatgtcgtctgtggggaaagcttcaggtaagcaaatttagtcattcctatttctcatttaccctttgcatgaataattttctaatttttcttttttccttatttctattacagactcagggtttgggcactgctctgaagatcttattttctgagaaattgatagcaaatatgccagaaagtggacctagttatgaattccatctaaccagacaagaaatagtatcattattcaacgcatttggaaggttagtttgaatgtactgaaatgcttctggtagccaagtaagtctaatgcaacatatatgctctcagaaaaaactgggtaaggaatatcctttttattttatttgtttatttatttttgagacggagttttggtctgtagcccaggctggagtgcagtggcgtgatctcggctcactgcgacctccaccttctgggttcaagcgattctcccaacttagcctcccaagtagctgggattacaggtgcgtgacaccacgcctggctaatttgtgtgtg

SEQ ID NO: 75398 - DNA, 2018 bp, Homo sapiens
tattatacccataaaaatgaccctataatcaatagcaacttaattgtacattttaaagtaactaaaagtgtagagttgatagaaatttcatttgccctgatgtgattaatacataaattatatgcctgtatcaaaagatgccatatatggcatcaatataagcagatactatgcacctgcaaaaattaagaatgatttttattattaataagacttgctttctcagtaaaacattgaatttgttttaaggatgggttctagaaaataaaatattaatataaaactattaaaggctaaattgtgaaaaaccattttcttggttgttattatataacttaaaatgcaaaatgaaattaacttctataggcatgaataacctaatataattaaagtaaaaattgtcaaattcagtttttaatatttaattcttcttccttcttagagacctggttagaaaagaaatggggacacaacattacagaatttcaacagcgatttgatggaattttgactgaaggagaaggtccaagaaggcttaagaacttgtattttctctacttaatagaactaagggctttatccaaagtgttaccattcttcgagcgcccagattttcaactctttactggaaataaaattcaggatgaggaaaacaaaatgttacttctggaaatacttcatgaaatcaagtaaattatatattaaactttatacattaatagaagagtgacaattaatgtacaagataaatttttttttttttgagacaggctctccctctgttgcccaggctggagtgcagtggcacggtcatggctcactgcagccttgatttcctgggctcaagcagtcctcccatctcagcccaagaagctgggactatatgtgcaaaccaccacaccgggctaatttttgtattttttgtagagatggggttttgccatgttgtccaggctggtctcgaactcctgggcttaagtgattgatccacccaccttggcctcccaaagtgctgggattacaggtgcaggccactgtgctctgcctgaaatttttaatattcatttagagaaaggaaaactatttagaacataattaaaagttaattttgcttgtaggtcttttcagattgaattttgcttttgtttttattttgatttgggtactgagaggcacacatttttagttttaagagccattcttttagtatttgataatgtattattttcatgtttatttgaacaaattggatttggggtcaaatttctgtattacgcagttagaatcaagatttgaggtttgaggataagaatttgatttggggcatcggagtgttggttttactatgttttctcctctttatttatcatgaccagtaaaatgttgtattagcaggacttttaatatttataacacatgaaaatgaatattctctgttttaaaacgcaggtcatttcctttgcattttgatgagaattcattttttgctggggataaaaaagaagcacacaaactaaaggtaattactttatacttaactgttagatacaaactgattaacacttatgcagatatgaatatatagtactcatagaagtagagagtaggccatagaagtagagagtaggccaggggcagtggctcaggcctgtaattccagcactttgggaggctgaggtgggaggattgcttgagccctggagttcaagaccagcttgggcaacatcgtgtgaaaccctgtctttaattaaaaaaaaaaaaaaaaaaagtagagagtagaatgatggttaccacaggctgggggtggggagtggatggggaaaacggagatgttgatccatgggtacaaagtttcagttagggagaataagatttagtgatctactgcacagaatggtaactatggtaataatgcattatatattgcaaaattgccaaaagtgtagattttaaggtttccactatacaaaaaatggttaagtatgtgaggtgatggatttgttaattagcctgattta

SEQ ID NO: 75399 - DNA, 1716 bp, Homo sapiens
gtctgcccccaggcctccgagaatgctgggattacaggcatgaaccatcgtgcccaccctgggaccgaccatcttttttgttttgaagttataacacattataaatgataaataagtaacagggtctggattctagcctgggtgttctggctccagagcccatgctctggctgttctgtgatgttggatgtttaggttgcttccaattttcccttttataaataatgttgacacagaatcatgctgcattgtaacttttgcttttggccagattggatctgctggtggtcatctaagaagaaagtatttggtaacacgcagtgtacaatactaacactccttcatttactgtagttattgatgaactgctgtggttaatgtggagggaaatgtatgttatattctttgtctgaatagcttatgataattgaattaccatgtttctttgattctaaaattcacgtattcctatttttacaattcctaaatcataatgtttttgtagccagtgtgtacaattaatgtggctgtgtgtgtttctctctcttttccttcctttcttttctgagacggagtctcgctctgtcacccaagctggagcacagtggcgcaatctcggctcactgcaacctccgcctcccgggttcaagtgattctcctgttgcagcctctcgagtagctgggactacaggcgtgcaccaccacgcccggctaatttttgtatttttagtagagacagggtttcactatgttggccaggctggattcgaactcctgacctcaagtgatccgcccaccttggcctcccaaagtgctgggattacaggtgtgaggcaccacacccggcctccttcctttgtttctcctgaaaagttgttttaaaattcctgacacattgttatatttgtggtgcgttagaatcaatggaatacagtcttgtgtagtagctttttaaggtaactgaggataagaaaggtttaataagacattttattttacagacattcagtcccctgaagctgaatatgtagatttgcttcttaatcctgagcgctacactggttacaagggaccagatgcttggaaaatatggaatgtcatctacgaagaaaactgttttaagtatgtgtcattttcatttagaaaaattcctataagatgtggtgatttctctttataaacaaaatcataatgatttaaaattaaaaatcaaattcactttgttaaaagatgtgtttgtacaaggaaacatgactattcattaatccagtttccttctggggaaatatatagacgtgagtttccacagatttttcctttagacctttatgggagtattgtaggcccttgacaaatgttccttgagtcgattataggatctcattttatagttaaggtaacctagagctggagaggtttgcttcatttcccaagatcacacagtggcagtgtagagaaaagaatatacaactcttaattctctttttggtgctctgtacacccttgtctgtggctttaattattttacagttaaattgatttcagagaacaattataataggtatcatttttgagcactcactgtattctaggcattgtggtaagcatgttatatacattttcttcttcagtccttgcaataaccctgtgttgcagtcatcactgtattatagacagagaaactgagacttagagaggttaaatgatttgttcagt

SEQ ID NO: 75400 - DNA, 1032 bp, Homo sapiens
gaaaatatttgggctaaagtatttccacatatttacctaaagagagaatgttttttctttttttttgagacggagtcttactctgtcgcccaggctggagcgcagtggcgtgatctcggctcactgcaagctctgcctcctgggttcactccattctcctgcctcagcctcccgagtagctgggactacaggcgcctgccaccacgccctgctaattttttgtatttttagtagagacagggtttcaccatgttggccagcctggtctcaaactcctgacttcaggtgatccacctgcctcgggctcccacagtgccgggattataggcgtgagccaccgtacctggcctgattatgggcaattttatgaaaaattaaaagcaataagaacatattggaaaaataaaaaaaataaaaagagcttcagataacttctaaattttaaacaagttttaaaaatgcaataagttattatctatttattccctttttcattttagtattctgaagaagccaataatctcattgaagaatgtgaacaagctgaacgacttggagcagtggatgaatctctgaggtttgattttatttttcagcagtatttcatgtttctttatgttacatattaacttaaaaataataatgttattttttttctttgtttgaagtgaggaaacacagaaggctgttcttcagtggaccaagcatgatgattcttcagataacttctgtgaagctgatggtataatatttttgatagtatgcattgtgtttaaaattatacctaagaaaaaaaaagtttttaattattttaatctgggcatggtggtgtgcctgtagtcccagcttatctggaggctgaggcaggagaatcactggagcccaggtatttgaatccagactgggcaacatagtaagacccatctcagaaaaaagttattaaagaaaaaaactcagtttctaacggtttggcggttcttcaaaaacctaaacgtagaattaccatatgacataacagttccttttctaggt

SEQ ID NO: 75401 - DNA, 1021 bp, Homo sapiens
gattaattcattacctcagagatggcaccaagcggttcatgagagatctgtctccatgacccaaacccctaggttccaagaatctagaatatctggccatcacagaaaacaaaaacaattctactaaggaccactggagtaatagcaaaaggacacaggtgtcaatatcaagtcagcactcagtggatctcctagtggccaaatacgggacaatttgaacatcaaaagggataatggctaaatgattatttttacatctccttgctgtaatatacataatgtatgctcagcaatccatagaataatttgttcttgaatttttatttacttttaagcaatcatatgaatactacctattctgttaaaaaatccaacttcgataatttgttatatgaatttttctcataaatcacagaaatttaagatatgttttaagaagatagaataaatgccaactaaaaacatatttttttctttttcaggatgaagttcctgatggaattaaatctgcgagctacaaggtgtgtacgtatacctattgatgtgtccagtatcttaatgaaaaacttgaaaaacccatttccgttgtacctactatcccatttatctgcttccagtggtgaaaccccttgagaggtatttatgctgaatggctctctttctgtttgtttttgtttaacattttattttttatgtattttattttatttatttttttgagatggagcagtggcgtgatcttggctcactgcaacctccgcctccccggttcaagcgattcttgtctcagcctccagagtagctgggattacaggcactcaccaccatgcctggctaatttttatatttttagtagagacgggttttctccatgttggtcaggctggtctcgaattgccgacctctggtgatccgcccgtcttggcctcccaaagtgctgggattataggcgtgagccaccgcgtccggcctgtttagcattttattatagaaaatatcaaagataaataaaaatagagga

SEQ ID NO: 75402 - DNA, 1033 bp, Homo sapiens
ggtggcatgaccttggctcactgcgcccttcgactcctgggttcaagtgattctcctgcctcagcctcccgagtagctaggattacaggcacctgccaccaggcctcgctaatttttgtatttttagtagagacggggtttcgccacgttggccaggctggtctcaaactcctgacctcaggtgatccgcccccctcggcctcccaaagtgctgggattacaggcataagccactgtgcccggcccagtctgtgtctttctaaccaagtctaccaatttacttataccagcctcacatttatgcagttgttataaactggcaacagataggtggaagaaatactgtatttgcacctgataacatgaccaagttatagcaccataatttgtaactgtcaattataattttgggattctgatttttataattttttttctattattattttacaggtaaacctgaagaggccgtgtcctttctggaatgacatcagccagtgtggaagaagggactgtgctgtcaaaccatgtcaatctgtaagaaccatgtatacatttaaaaactgttacatgttttttcattcattataactttttgttttgttttatttaagaatttttttttgaaaaaatagagatgaggtttcactatgttgcccaggttggtcttgaatttctgggctcaaacaatccatctgccttagcctcccagagtgctgggattacaggtgtgagccactgcacccagcccattacaactttttaaaggcagccaataaaactaaaataatcgtgcagtccttagtttaaatataacattcaatatttatatgttaaaaacccaaacttataaaacctattttgaattacactgccttcataataatagaattaacattttgtggttaatataatcctttgacttattagggagattgataataattcttttggcctgatatttgattttcctcttacatcttttctgaaccaagttatatatatagcataataaaatgaaattaatcgaagt

SEQ ID NO: 75403 - DNA, 1062 bp, Homo sapiens
ggacaatcaagctttgtgtatcttttaaaaacttttcctctctttgccaactggatcatgtgctcctcagttcacatgatggagtatttgttttactggtctagccacagggagacatctttccctgttattctcaattctaggatcctggagaggggaccatgacctggtttgagttggatgcctacccttggtcaggtcaactatggcctggagggcagagttacaaaataaaggttgccagggggccaactctctctgtgtgtgtgtgtgtgtgtgtgtgtgtgtgtgtcatgagctctgcacaccttccattcctcggtatatagcaagagcagcagtattactagattattgtcataccccatctcaagaaactatgtgggaggagggaggataaggactggttgagtagggggctgtttcctaacaaccatgtgaggaaaaagaaccctgttgcatttaggacatttcaatttaatatttcattttctttgtaacaggttagtggttacttggatgattgtacctgtgatgttgaaaccattgatagatttaataactacaggcttttcccaagactacaaaaacttcttgaaagtgactactttaggtattacaaggtatttttaattttaattttttatatatgaatactttaaatggataattagattttcttaagaattactgagcttcaaaattgtagttgttatttaaaattgatataggctttattaagaaaattcagttcataagagtgaagcatgtgattctgaaaccatccattggataattttaataactgaattttacactctagagttagaatctagttggttaaattgaagttaggacagaaattattatatattgttatcaaaatggtgagatcataattttctaaaacatcagattggctccaattaattaaaataattaaatattttttgtagaatcatgactttatcctgacctatattatttaaacaaatcacttgtgctgttttatcttgagatatctactagaagagtttagaaaacctgatcaatggagtattt

SEQ ID NO: 75404 - DNA, 2120 bp, Homo sapiens
tttttccagtgcattttcattgaaaagcatgagtagtttaattaaatggaggaccataattacatgattctgtggagaactgcatttgttgactttatttagggtagaatgtcagagaacaatccacgtgggtaggtgaagaggtgaggaagggtctaagtgattatcattcggatttgtagtcgcaaatcctaagtgtcagggtgtcaatatcttctaagactataacttaagatgtgcttaaacaagtattgccgatcaacaaagtaaaagtatggtgctttctctgtaacattttgttgttatacatgccacctactcattacaaacagcattatttcttttatggtttgaaacagtggatgtgaaacttaggtaaagtgaagtagacttacgtaaacagtaaagtgagacgtagcgacttaaacacactaagattactgttcaattaaaaatgttcaaattgtattatttcagtaagggaacaattaaaagaacttaccaagcagtatgaaaagtctgaaaatgatctgaaggccctacagagtgttgggcaggtaggtgatggagtttggggaatagggggtgatggtaatttgcttttttatttagctgttgccaaaaagtaatgctttttattttcttccttagatcgtgggtgaagtgcttaaacagttaactgaagaaaaatgtgagtgatgaattagcttattaattagtaaagaaacagtccacctctctctcacttttgaaatgcttattattttaatgacaataatgcagagagagagagtatttttgaatagacttaagttttccttcaactaatgtctccttggaggacagaaatacaactaaaccctctgtcaacgtgggtatgtatttttttactttctatttttcaattagttcttttatgttttttcttctagtcattgttaaagctaccaatggaccaagatatgttgtgggttgtcgtcgacaggtaatactttatatttgtatagtgcctgatgattgacaaagcagtttcatgtaagttattgtctctaattcttgaggcaagcaggtggagcatttatgcccataactcacaaggatgatttgttcagacatagctagttattaacaaagcctgaattcaaaccatgggctttgactcctggcattccgtactttctactgtattacattgtctcagtcagatctgttaatagccacttagaaataaaagtattttagaactggaaaacagacattttattttaatgtcatttttaaagaggacttaaaagtgttagatatcatcagttacctgtgtttatatttagacattcagaactgttacttatggactgtaccatggcctaagttaattttgtatgaggtcatttagattagggtagggcaagttgaaataattctaaattttattttacagttatcaaagatgccaacaaatgacctcaagtcattcagtagtgtctgaaatcaatttatgtattattctttaggaagtgtccttagataattcttttaaattcattggaagagttttctctgtttaattgtcatttcaggttcaggttttaaaacattcacagaacatggctgtaagggagaatttaatccaggaactataaatctcctattaggattttgcctagtatataagcggttgacattttctaagtcaaaatattagatacctaaactgacaagggattttcatgtccctttcagggctctgtggatgccgaaagttggcatttctaagatatttcaggttgcatgaggacaagactgtatttgaagactaaaaaacattagaaaagccgaagtatatataagttgagtatcccttatccaaaatgcttgagccagaaatgtgttttagattttggctttttttttttcaggttttagaatatttgtgttgtactggttgagcatccctaattaaaaaaaatcaaaagtttgaaatgctccgatgagcattttctttgagcatcatgtcagcattcaaaaaatttcacattgtggagcattttggattttcagattaagaatactcagcctgtatttcctatagatgtaaacattgaaatagcttcatattg

SEQ ID NO: 75405 - DNA, 1505 bp, Homo sapiens
aggcagatctagtagattctaattttagccagataagccaagaaattatttagtatgattcaacctaatgtgtaatgtgttcagcatgtgcctgtcatgtagcaaaggcatgagtgatggttgctgggttttggggctttaaatttaaagcattttaataaaaatctctaaggggaaaccgtgcatttttctctactctcatgagcatttaacacattcttcccagaagctgtacatttcaaaataaatctgatgagcacacctttaaaatgcttccctttcctttccctaaaatgttcactaagggatttttctataaatgctttggtagcaattcccaaagtcactgtaccattgctgcctcaagctttgtgtgttagtcatttcacattttacactgagattacacaaaggggcatgcttttaaggagcaggtggaaatcactttgaattacttattttataagccattttgttagcatagagtttataatctgatatttgtgttctctctggagggtaaaaatgagtgtttggcttctaaatattaaactctcgttagagtgttattccgtttttaagtgttgatgtaatatcttttgttttacaaaactagcttgacaaaagtaagctgaagccaggaacaagagttgctttggatatgactacactaactatcatgaggtgggtttcttattctatttagttcaccttttattttcacaaagggtggtttttatctgagatatatgcttcttgagatcactgaatattttggcactttttcccttttactagtttctaattaagcacatctttatgagatcagctacaggtgcttgcttgagcaagttatttatatgctatctgtaggctaagagaaaatatatctttcaaaagaaaaatacataccttttcattctagatatttgccgagagaggtggatccactggtttataacatgtctcatgaggaccctgggaatgtttcttattctgagattggagggctatcagaacagatccgggaattaagagaggttggtactgtgtgccttgttctctgaacttagctaataaatactactagttttaggattcttaacaggagaaacaggatgaaaaagtactttttgtctaaatggtagttaagaatattatgtatttactattcttgctaagaagaatagcactgaatttctagctgtgaaaattactgtttttttttatttggagataatttggtgttagaaaaatcctgctctttttgtggcaaaggaacggagaaaaagctaaaaataattgatgtaatctgatatcctgtggttttgattatcataataagttacttgggtcagagcatatttggataatgtgtgtgatgagttttttccataacctcattaatactagcttcccactcttacagaagagtagggtacctgttccttaaatattttattttgttaaagctgtttgctgccattccagaaaaccactggctt

SEQ ID NO: 75406 - DNA, 1426 bp, Homo sapiens
ctctcggtcaggcatggtggctcacgcctgtaatcccagcactctgggaggctgaggtgggtggatcatctgaggtcaggagttcaagaccagcctgccaatacagtgaaaccccatctcttctaaaagtacaaaaattagccaggtgtggtggtggcgcctgtagtcccagctactcaggaggctgagacaggagaatctcttgtacccgggaggcagaggttgcaatgagccaagatcatgccattgcactccagcctgggcaacagactctgtctcaaaaaaaaagaaatttctctcttaagttactggtactataagtaatttaaattggactttcagatcttcaatttctctagtctctacttttcttccttgaatcagtcttgagagcagaacatactgttctttaaaagctgccgtggcaaaatgccaacagataaaaattgtatataccttttctcttggtatgttgtcaaatccatcccccattttagaattattttgtgttgtattttcaaatgcaaactagtatagatcttttgagttgtgttttttgtttatatgttcatttgacttaactgatttttttgtggtataatttttcattgaggtataattacattaaaaaaatgtagattcttaagtgtacatttcaaatatgtttggacaagttatatatctgtgtaaccatcaccccaatcaagtgtgtggtttatttaaaaaacattatttgaaattttttagatttaagagatcttaaatctacctggagcaaaacctcttaatataaatggttttacctagcatggaagtctaggtctattaagaattatgatgtgtacacctaactaaggtgatatttgacttagagtatttgaaagtacattaaaaatcttgactaactttttaagaaagatttaacttcttttctaggtgatagaattacctcttacaaacccagagttatttcagcgtgtaggaataatacctccaaaaggctgtttgttatatggaccaccaggttggtattgaattatttctactccaccaataagataaatgaattaaggaattaaaaaaaaaaagacaatttttttatttttatttttttgagacacggtctcactctgttgcccaggctgtagtgcagtggcacaatctgggctaactgcaacctctgccttccgggctcaagtgattctcccacctcagtctcccacgtagctgggactgcaggcgtgcatcaccatgtctggttaatttttgtatgttttgtagagaagcaattttgccatattgctcaggctatctcaaactcctggactcaagcgatctgcccaccttagcctcccaaaatgttgggattacaagcataaaccactgcgcctggccataaggtggaaatttgatgtgggcagttcca

SEQ ID NO: 75407 - DNA, 1075 bp, Homo sapiens
acaatgacacaaaacaaaaaactaaaatgttgtttggctcttccactgtgttgacatttgtgctgatggtgcaagagcaccatgggtaaaattaaattacttgcactgtagtgtgaatcagcattagtggcatgaaacggtgctagttagtagccattgcgttcttgactgccacatacttgcagtgtaaaaaaaaaaaaagtcagtttcactataaagtccttggtgaaacagtaaaaattattaattttgttaaatcttcatctttgggtaatattttgtgttcttcatgataaaagggaaaataaatataaagtactgctgcatattgaataagatagttgtctttaggaaaagcacttgtgcagttatttaagttgccagctgaattcattgctttttatggaatactatttttgcttgaatggaccatttacagatatgctgtgattatcagactggttattggttattagttattgattactcaagactggtttttggttatttggcgcacattttttccaaagcgaacaaattaagcctgtcatgttaaacaactgacaccatctattgccattgataaaatatgaaatgtcaagtgaaaattagaatttttagaaacatatatctggcactatgtggttgaagctttttctttttttcttttcttttcttttttttttttttgataaggtgttactctgttacccaggctggagtgcagtggcgtgatcatcctggctcgctgcaacttctgcctcttgggctcaggtgattcttccacctcagcctcctgagtagctggtactacaggtgtgtgccaccatgccaggctaatttttgtgtttttagtagaggcagggttttgccatgttgcccaggctggtcttgaattcctgggctcaagcaacccgcccacctcagcctcccaaagtgctgggattacaggcatgagccacaatgtccagccacggcagctttctaatatattaatacttaaagacttttctgatgagataagtggtgagaataacaaaaattttttataatgtgtggtggaaaatgtcaacat

SEQ ID NO: 75408 - DNA, 1956 bp, Homo sapiens
agtgctgggattacaggtgtgagccaccacacctggccaagtactttggaattttaaatgaaaattctatttaggatttagctttcattttggaaaatttacttgccaaacgattatattcttaaaaggattttaaaaatttgtttcacataggccgggtgcggtggctcctgcctgtaatcccagcactttgggaggctgaagtggcaggatcacctgagcccaagagttcaagaccagcctgcgcaacacagagagaccccgtctctgaaaaacaaacagacaaacaaaaaacttagctgtgcgtgatggcacatgcctgtcatcccagctacttgggaggctgaggtgggaaaatcgcttaggtctgggaggtcaaggttgcagtgagctgtgatctcgccacactccagcctaggtgacagagtgattgcctgtctcaaaacaaatttttttctaccttaccatctaattaagacttcttttgtcattcttaggtacgggaaaaacactcttggcacgagccgttgctagccagctggactgcaatttcttaaaggtaaagggaagattattttgtacttattgaaatttaattttacttgaattatcttatatttaccttactgtttttcctttaatcaggttgtatctagttctattgtagacaagtacattggtgaaagtgctcgtttgatcagagaaatgtttaattatgctagagatcatcaaccatgcatcatttttatggatgaaatagatgctattggtaagaataacacccttgttgaaagttttaggacttttttttaaatgtaaaagaacctttttccctctcttaatctgtaattgtgacttgtatgaagtagataccacaatgaatcagatgttagtttaaccaattttaataaataacctttcatggccgggtgtggtggctcatgcctgtaatcccagcactttgagaggccaaggtgggcagatcaccaggtcaggagatcgagaccatctggccaacatggtgaaaccctgtctctactaaaaatacaaaaattagctggatgtggtggcacatgcctgtaatcccagctactgaggaggctgaggcacgagaatcgcttgaacccaggagacgtaggttgcagtgagccgagatcacaccactgcactccagcctggcgacagagcgagactccgtctcaataaataacctttcactttaacaaaatgagaaatgttacaccaaaatcaagtctaactttgtcagcataattcttgctctttaattttcatcttaatgttttaagccacagactgttatgttctgttttcttaaatgatggttgtagaggaaaagagtaatgcatataaatttccaaatctactatcttaggtggtcgtcggttttctgagggtacttcagctgacagagagattcagagaacgttaatggaggtaatatttggtaaagggggtttataaagaaaccaatgtttattaaatgaagaactgaacattgcatatttgatagtcaaaatatatagaacattttaaatgaaatatgaaatttgaaaatattgtcaggaacaaacatgtttctctatcacaaactctaagaaaatgactactggaaaataaggctatctgccaaattccatttggtatacacctgtactattctgtgtttttttgagtagatcagtcattcatatatttaaattcttatgaatgtgatcttgcggtagttttatgaagacattttttgtaatggtcatattaagactgttggcaataaatgagctataattatgtatgaagctgctctaaaaattatttttttctctcactttattgctgagactgaggcaactaaaatagttttgataattgaagaggatagatgacagaatgaaagaatgcacataaagccttcctccagttttacctttccccact

SEQ ID NO: 75409 - DNA, 1077 bp, Homo sapiens
ttcggatggctttaatggagcagatctgagaaatgtttgtactgaagcaggtaagggtttaaagtacagttttactattgattttgatttttaaaatttgctgaaactgttttgagtttatctgaaagcggagcatagactttgcaaggatttgggttcatgctgttcttttaggaatcgattccaggaaataggagaagcagggcaagtgagatggaaagagggaaagctaatatgagggtgcaccattgaggtaggtgctgtaggaaagggaggttagatctcagagaagcatacagaatgccttccaggatcacccagctgaaagttgggagactagaacattgatttaccagtactcatcccccattggatgagatttgtccttggtagtgttgactcctttgcacttctacctgccttagggcagaatgtggaaggagaggcatgtaatagaacactggccccctaaagtaagtctgaggtgctacagaattgcctaccacacctgtggctggaattagaatgggccagcaccagaggtatctgctgcaaaatgaattgtgtatgttgtctaatactagtctgtgagcagtgttttgaaagattgatttatgaattatgtgatcatgccatttgtgtaaaatgtagtatttaaatataattctctgtggattgtgtgatactatttttttcacttctacatggtatgtaaaaattgtgtgatgctatttttatttccagtaccaagtagctttaataccctacctagaatcatttagtttttgtcttccatacagaatctttaaatagaaaaaataaacttctacagtatagttactgactttataggttatagattttcttaagtattagaatatgtgatttcctcttgcttttcatatcatgtttagccttagtaaattcaacacagtgtttaaagtggctgctcagggagggcttctcagtacaggtatcttcatgggtattgggtatgctgtgagtcagtatctgcatcagatatgcaggtcagatacttctgttcacgtctagaaatgctgtcaatgcaaattaggg

SEQ ID NO: 75410 - DNA, 1050 bp, Homo sapiens
aatcacaacaccgctatggatttttttttttttttttttttgagatggggtctcgctctgttgccaggctggagtgcagtgccactatctcagctcactgcaacctccgcctcctgggttcaagccattctcctgccttagcctcccgagtagctgggactacaggcgcgcgccaccatgcccagctaatttttttttttttttgtatttttagtagagatggggtttcaccgtgttggccaggatggtcttaatctcttgacattgcaatctgcccatcttggcctcccaaagtgttgggattacaggcgtgagccaccgcacccggcctgtggattttaattgaaaaaagatagtggtttttagcaaattacaactactggctcagaagtaataaatctaagcttcacatttattccatagaattatattgtttttcttataatgaacatataattcatatgtgatatatagcagtcatgttgttttattctctacaggtatgttcgcaattcgtgctgatcatgattttgtagtacaggaagacttcatgaaagcagtcagaaaagtggctgattctaagaagctggagtctaaattggactacaaacctgtgtaatttactgtaagatttttgatggctgcatgacagatgttggcttattgtaaaaataaagttaaagaaaataatgtatgtattggtaatgatgtcattaaaagtatatgaataaaaatatgagtaacatcataaaaattagtaattcaacttttaagatacagaagaaatttgtatgtttgttaaagttgcatttattgcagcaagttacaaagggaaagtgttgaagcttttcatatttgctgcgtgagcattttgtaaaatattgaaagtggtttgagatagtggtataagaaagcatttcttatgacttattttgtatcatttgttttcctcatctaaaaagttgaataaaatctgtttgattcagttctcctacatatatattcttgtcttttctgagtatatttactgtggtcctttaggttctttag

SEQ ID NO: 75411 - DNA, 1852 bp, Homo sapiens
aaaaaaaaagattaaaaaaatagataatagttccaatcttgttgtatcttgtgctgcttttgatttggccaaataaggtttgtcttatttatatagccttatagatttaaattgctgatggtaaatacctcaaatttttttttttctaggaaattttacctggattgttcttaggcccatattcatctgctatgaaaagcaaggtatgaactttgttagattcatcaagagagacttttattaaccaacttttcttgggtaagttttttagtaataaagagttttattttagggagcatccacaaatactgtctgttaacagtaattgtcactctggagtaccttcctctttccctattttactagaccagtagttctcaagtgtttcaccacaaatcagagtttttgttttttcctcatgaaatttgtatgtttgaaagatttaccaaataactgacctttaataacttatttactctctaaaacactagacatctgtaattgctaatcatagcttcagaacaatatgagatgtagttaaagcccaaaataaggaatttcaatgtttagttaaaccttccttatcaagggtaagactgtgtgtgttaattgaaagtcattcaccttagttctgttttgccagccagactttagagagctagttggtatccccgctctgaaatttgaaactttttgagcaccagtatgtcactcgaaggaaatcctcactggagtatttcggatttcggatttttggattagggatgctcaattataagtataatgcaaataggcaaaacaaacaaatccaaactctgaaatatttctggtccctggcattttaaataagggatattcaatccgtatagatattctacatagtcaaactttaatggacttactcagttgcagttaaaataggtagatctcattttaataaatatagcaatgttcttgccacttctaaaagattcaatgctactaattctctttgagttacaacgtggaacatatcatagatgtctttccccaatactttgcctattcagaagtcagtatacttaaattgtgtttgatatatccataatttaatttgatgttcttaggaatttaaccggttttaaaaggtcattgattttgaaactggaagatttttttgacagttgagacatggctaagagtaaacctggtcatcttgatgatttttgcttagttggaaagatagggagttagtaaaaataagtactagggaaaggatagggcaggtaactatagacatagccgtaatttattttgtaaaagacagatgtaaacaaggttattgtccatataatttgctattcaccaagtactagtcttccagatggttttagataatttacatttttgaaattcccactgtactttataaatatacatacagtatttatcacattaaattaaagtatttgtttaaaggtctatctcctcaatgggaggctgaggcaggcggattacatgaggccaggagttcgagaccagcctggccaacatggcaaaaccccgtctctactaaaaatacaaaaattagctggttatggtggtacacacctgtaatcccagctactcgcgaggctgaggcgcgagaattgcttgaatctgggaggtagaagttgcagtgagccaacatggcaccactgtactccagcctggttgacggagtgagactttgtctcaaaatgaaacaaaaacacgcacaaaaaaaggtctagttcttcaaaacttcttttcttgaaatgtcaccatggtcttattagacaggaaaagcctctgtggcagtttatttcccaccctaggtaaccataatatagcc

SEQ ID NO: 75412 - DNA, 1055 bp, Homo sapiens
aacaacaaaaaataataatggagataaacctaaatggataaactcctttttaaacactcatttactgttattattttgtgggagaggagtggggtcttgctctgttacccaggctggagtacagtggcgcgctctcatagctcactgtaacctcaaactcctgggctcaagctgtcttcccaccttagtctcccaagtagccaggactacgggcacacaccaccatgcctggcttaattctcaaagtttttgtagagatggagtctggctatgctggccacatttacttaagtatatctttttattaaattcaaatacagtttaaataaaagggacaaatttagggcctttgtaattagtaaacggtttgtttttgtaaagtttttctactgtttttaaatgtgaggtaaggtcataatttgcttcatattaggttggtgcaaaagtaattgcagatctgcctctgaaaagtacaaaatctattcgctgttacgttagggctctattttgatagtttatttttatttagtagtagtctattgggccttcaaaacttgtttaagcatatttatacataattatgtgcatcgtcttgtgctttctcacattcataaagtagataggaaaactccataggcatcaagtgtaaacgaaggacttaatgttgaatttgttgtggaaattggcacaaatctcaatatagaacattggttaattattaatcttaccaaatgcttatctcactttccctaactcaagttatactcaagaaatacaaagataattgaattctaatctatgctgacataaaacttgctgcagaaattaacacttaaaacttgcaaattatattgtcttagcccaggctgctcaaacaaaataccatagacagggtggcttaaacaacagacgattatttgagttctggaggctggcaagtccacagtcatggtccggctctggtgaggaccctcttgctggctcgcagatccctcccttcttgctgtatcctcacacggccaagagaacgagttcttgcctcttcttacaagggt

SEQ ID NO: 75413 - DNA, 3215 bp, Homo sapiens
cagggtaatggatgtttcctagtttcatcaaatgttttccttgttttcagaaaagagagaaacaaaaatgcctttattcttctatctataactggaagcagaggactattgagattgccaatttaagtttttggtgttttttggggtttttttaaacagatgaagtcagagatcattatagctaatgccatactgactggcagttcagcatgcagtaccctagcacaaactattagccgggcttgatttatagttatcagtagttctgaatttatgagacaggaattttaaacttccatttctcttcaaacaatatggcactagatttttcaatacagatgaagaataccaacagtgtatacattaatcactattttgggtatccaagaatgtaaatatataattaagttaattaacttattttttttttaggaatatgaagccatctacctagcaaaattaacaatacagatgatgtcaccactccagatagaaaggtcattatctgttcattctggtaccacaggtaaggatttttttctttttggagaaatttgggaagaaagataatgaaaggtggagaacttgctacaagttacactgaacaatttaaattgtttagaaaacttgttaaactattgagctaattccagaaggattcattttataatgaataaatgtgtactataataagcttaagtctttcaagtagtagtacatccgtgttgtaaagattaaaataatacgaatctggagaaggggccctaaacacgcttaggtgatcttattaaaagtagagggcggttaatacagcgtgtagcatggctaatgtgagcttctttctcttgccatcaatatttccatcctttcctccctctgttgctatttcagaagtaccctaagccccttattttcaaagttaatccaagcatgctcttaaaatcttcctttcccaagaccttgctacctgtgtttatcacctttgtttctctcccaacaaagcacacaaggcatttttactttatttccagtttttcctaccctgcagttcacttcaatctttgaaccaacagttatataaggtagtaagaacagcttatatacttagcactgacctggaaattgaggacaggtgatctgatccacaagtatagaactctttgcactctactgcactgcccatagtgagtaatatgactgtatattcatccccaaggctcaacttcctaattgtcattgactttttcatttcctttgccacatctgtctaataattgctctccacatcctatagggtccgttttgtcagtattgttaacattccttcctttttttaatagtgaccttaatctagttcaggtccggatttgcctcctttccaaactcttgttatttggtctgttctgtacattgtggccagacttattcccatgaaagatatttctaatattgatatttttcctttgccaaagcctcctttggcttcattcctacaaaagtttatagaatgccatatgcccttctgattttttggtttctttctctcattgttcttctttatgtctgcatttcagaaaacaactgctgatggtttcctgtgtgtgtcttcttttccccacctaaaatgcatcacatttagtctccctattcttggttcatatgtcatctcctcaggaagacatgatgattaatgcactcttcctttaacccctagtcatttggagttcccatagaagcacagcacttcatctgaaacttaatcacagtatctgggtttagcctgagggctaggatattttatctcattcaattgtattgatactatatttttatctttatgaattttatagtgaaacattcttcaattagaatatgccctctgaattaacattattattaccatgatataacagtcctgtagggcataagtttaaggtcatgccattgttaggcaaaaaacacagcagaccctctgctggtttaactgttccctaaagttttcctccattgagagtctaatttcttgattataacttttggggatacagagatagctttgattctatgtgggagatttctgtactagcagatgctggtatgaagaatagataaaagaaaatctctttatatgctacatgccttcctttctcccaacctagacttcgatagcttgagtggaaaaatattttcagctgctcttcataacagcctctgtgaaagcaaaaagattatctacaaaaaattatacaaatacaagattaatttcctaaattttatgccctaagtcacatgtttatggtgcctaaaaaacaattaacttgataactaaacatttatgtattatctcttgaaaaggtctattttcacactatttcaaaaattatttattttatatgcaatacctaagacataatacttgagaaggaaaatatatcctgtcatgaagattaaaaagttataatatttaggtaatttatcacaaaggaatttactaaattttgctatatcagttgtggaattttcatagtgtatacatgatcacttaataacaaaattttacttgctgtaaccttttaacatgaatttattttagtgcccttttaatcttcatgcaataacttttaggcagtttgaagagaacacatgaagaagaggatgattttggaaccatgcaagtggcgactgcacagaatggctgacttgaagagcaacatcatagagtgtgaatttctatttgggaaggagaaaatacaagagaaaattataatgtaaaatggtaaaaacataagtagtttttttttcaattacatgttgcttccagacatacttctctgcaacttgttgagcaacattttaagatgttggacttctgcaatagatgacactgatggttttactcctttttttaaaaacacatgcgcgcgcacacacacatgctttacaagttttattataaaccaagaattttggacttgcaaagaggtattattgcaataatgcacttttcatacttgaaatttatttgtatgatataaagttattactttaaacaaaatgcaagtatggggggattgtttataaagtttgggtaatttataacaaaatttgctaaggtttgctaaaaattcatttttctgttctatatattacatttttaacataattttacagttcaattttatgatggagcctcttacagaaacattaacaaaatg

SEQ ID NO: 75414 - DNA, 1128 bp, Homo sapiens
tgcatggagggaaatccaaaatccagatgacgtggtgtgagtcaatgggatgagaaacactggtattttctttacaatttcattttacaaagagcacattaaactaaaattttatgaattatgacttaatctaatagttcaacagcagactcaagaaaagcacagatgtgattctaacagaagactactcatataaacaggtttaatgcaacatggaatgcaaaagattagaaccattaaaatatttaattcttcaactttaaaaaattaaataaaatcaaaataggataatgaccagaatagtgccattataatcacatcaaaaagcttccattaacattttatgaatttggcaatctagtacaatacattaagtattgtgtttcactcaattttgtgatactccatttttgaaaaaacttagaggcttcagatacccatgaaaagaaaaaaatcagggtagaaacacataggctgaggtttgctaattcactgtttacagaggaccttagatgtcccactataattgctcttaggtatttttaacaaatgaatagtcataattcacagaaaagacaagtggtactttttatctacatagactatactatataaactttcagtaaaacatttaaattgttttacttttaatcttgtcaagtaattttcatttcttctacttcaaaaggttgaccaggttgtttgcctgtattgggatcaacgaatgttggactatactatgtttagttataataactaatttatccaccctgacttaatatgtgggaaacaatacacccctaagtgtattgagatgtttctttgaaacaaaaatatttaattttatgcatgtgataaacagccttattcaatgtatactttttttaaatgagcaacacagatagcagacatataactccttattacccatactcttgactaccaagaaaggaagccaaacttttagaaaaatacaatgcaagaaaagattcaagttaaaaatatattcctttggttaaaaatcatcccctttataatattcatttgtaatctaaattcacagcatgtcccaccagcccaaagtaatcttctaaatgtcattatacttgtagtattacaatgtttttt

SEQ ID NO: 75415 - DNA, 1259 bp, Homo sapiens
ttggtcatttttttttttaaaggttgagtttttagtgttaacatgcatcttaaaattcgtttttctttttcaagacagagactcactctgttgcccaggctggagtgcagtggcacaatcactactcaccgcagccttgacctctctgggctcaggtgatcttcccccctcagcctctggagtagctgcgactttaggcatgtgccatcatgccctactaatttttatattttgtagagatggggttttgccgtgtttcccaggctggtgtcaaacccctgggctctagcgatcgcctgcctcggcttcccagagtgctaggattacaggtatgagtcactgcacctagccttaaatttcatttttaaagagggcttagggtgagttttgtatttgtcctgtttattagtgagctggagattactagataaaagtatatttgactctaagtaaaaatgctttggtgatttaaatgcttatcaacttacatgaatgcagtgggaaaagccataatctaaacctgtttctaaggaaacttaagttttataacattaattcatattgttactagaatcaatttttattaataaatgctatctcctcaccctaccccctttttaaatttcaggttattatcaacccttactttgctaagcaagaaactgaactgttacaagattacccttgaatgtctaccacaaaatgttggtttctataaaaagtttggatatactgtatctgaagaaaactacatgtgtcggaggtttctaaagtaaaaatcttgtaagaaaattgtcaaaggggctaatgctacaaggctacactcttcctagagttgaaatattttgttgctgcagccgagtgacctccataaatactggactgaaaaaacattgtaatactacaagtataatgacatttagaagattactttgggctggtgggacatgctgtgaatttagattacaaatgaatattataaaggggatgatttttaaccaaaggaatatatttttaacttgaatcttttcttgcattgtatttttctaaaagtttggcttcctttcttggtagtcaagagtatgggtaataaggagttatatgtctgctatctgtgttgctcatttaaaaaaagtatacattgaataaggctgtttatcacatgcataaaattaaatatttttgtttcaaagaaacatctcaatacacttaggggtgtattgtttcccacatattaagtcagggtggataaattagtt

SEQ ID NO: 75416 - DNA, 1050 bp, Homo sapiens
tgtaaaaatattttgaaagcaaaagactaaaaattctagaattgagccatgtaaacatgctcttgttaaaatgtgcaaaggttatatttgaatatctattgagtataaaagttaaagagatctatttaaagtaaatgaagaaattgaagttttcattagtcatggaagtggcaacatcagccatttacttgtattttaagtgttgttcatctaaaatagctatattagtctttattttgctagcagatattttgaatgtgtaggttatattccaattgatactaattgctgatatttcaactacttggtaatattttctttagaaatggaaggtaaattactatggtaaaacagctttaaacatttagtaattaagtcagctaatcctaatatttttctggctccccataaaattgaatgtctactatgtaacactttgttatccaatttccacagaatcttttgagcatatgaagaaatctggggattattatgttacagttgtagaagatgtgactctaggacagattgttgctacggcaactctgattatagaacataaattcatccattcctgtgctaaggtatgtgctgcttataaataaaatggacagctgttttctagcacaactgactttgagtttccattagacaaatctgttttctcattgattttcagtgcctcttagaaatcccttttcccagtgtgttctgagagctttaagaaagaaaatgtataacagtatgaattgtatgctaaaattgttctgtaaggtggatcaatttggtataggcatagagaaaccaaacaacttagcagtaatgcacaaaatccctaatgttactcttttaaaaaaaacaactctgaatataccacgttagcataaatttgtttccacatggtaaagggttcagattattccgttctaattatgatacatctaatgcatgtagtgccctttcatccctcaataactcacataaaatagtaaataaaaaaagagggagagaaaaccttaattcaatgagaataaggtaggaacacttggg

SEQ ID NO: 75417 - DNA, 1050 bp, Homo sapiens
tcaaaattccaggtgcactgttcacatcaatttccggtaacactaatgaaattcactagaaattacaattttaaagagtgtaatctcaacagtgttacttatactttaatttacgaatattgtatttagccatgttgcacctttaagtaaaaccaaatcacatatttgggaaaatctggcaccctttgcattgaacttaatgtaaaatataatacattgaagaatgtatgttctgggtctataaatactggatattaaggtcagcactatttaaaacatcttatgcaggcagaagcactggtaaaacctgttatttttgttatatgtagtgattatagaagaatagggttcactttattctaataattaaaagattatagaaagttctgaaaaaataattgcctgtaagcccacctgcttaatatattgcttattttcatactgtcttccttttgctattctcgtaatttgaaatctgtttttcaaaactaggtttttttaaggtattgggtcagctaacagagactggagttgtcagccctgaacaatttatgagtaagtactataacctctttttcctgaaataaagggaaacatgatttcatttttgtttagagctgttcagtgcccacttctgtttttgttcaaatagctggaaattattcaaagaacaaattagctgttttatacaaatgtttaatgtggctgagttgttctagaatccaaatgtaccagtaactttgtttttgcaaactatctgactactttattagataattattgtaccataggacctaggtgttagctctagaggtttttcgtttttttattgtagtatttcccttactgtggttatttacagaaatttcattaccaaatcaaaaaagcaagactatacgctttaaatttattttggggtttatttgtattgaagtttaaggttagcaggcatcttaagagttagtccacccgtcccctgcccctcttcttttagacataggagaaaataggaatttagagagatccaaagacttgcccaagatcacaggt

SEQ ID NO: 75418 - DNA, 1597 bp, Homo sapiens
cacctccgcaccgagtaggtcggcgctttccccagggtacagagggacattctttgtctctttttcctaggctcctacccctagaaataccgagtactgtactgtgatttctgttgcgggagctgatgtttatgtaagccaaactaatttaaaattttcatacaaaattgaacgggcgattataggattcgttttgttaggataatccctcatgaacgaatcctagaatggatcttaagaaattaatttaggcaggatttgctaaataggggagagagcgctagctgtatggtatgatgatgtaaagattggggtctgttgaggatggtaatcgagctcaagatgcgaaaacgaggattctagccccaagtcacttacttgctgtgttacctaaggggcaagtcttgggagttccaggtgctccagcttcctcatcggtagactgggaataacgcctagattgtaaaggtcaaactatcagaaaatacttttgaacattcatgcagttacacaatttaataaatatggccaggtgtgttaaaaatctttaacggaatagattcagaatggattcttgttatcgaaattgttataaaatgaatataaaggaatccgaagtccgcccctcccccattcacctgtacttagaaggttccccaggagctcttgagaaatacataggctggtttagatttggccttagattgtattttttaaaatttgtagatcgacttttaaaatcttcatctccggtgtctattacttgttgctctccgttggttgcttctagcagcagcctctctccccattcgtattccaacctgatacagaggctcagacgccaaatagttgaagttttgtttaaaaaatattcaattgagtgaaaaaatattcaactgatgtgatgactagtaaaaatgaatttggtgtatgctttccgcgatattgtggcagtttgggaatttttttttttttttttttttttgtccttctggattttctgaaatgtgacctacaggtaagtcttattcgttattcattcactaggcattattgggctagggttaggcttaaacgggtcttctaaacgcctgctaatttagcagttaatcagaaaaggttctgaggaatacttaaggaggattagtgtttaaagttcatctaaaaactttaaagaacctaatgatatgatgagattccgcttcacacaactgtgcaattttattcgcagaaatttcctagttttgcaatatctgggcacctgaagatgctaaaagattatttatataaaattacttatttaattatgttctaaacccccttggaaccaggtttcaagtcatatcttgcttcactttgcccagtaccttagttgggcaccagcagaattttacggtttgaggacagagtgagctaaagtgggccttcagtatggctctgttttgtagaatagctcataaaaaaatttttgatgttaatttctgattgcctggttaatagattcttatttcaatctgtaatgctttgtttaatgtattttgactagtctgattcccattttccaaatgtaggttctaagtgctgcttatgacttaat

SEQ ID NO: 75419 - DNA, 1142 bp, Homo sapiens
gcaaaagaccaaaacgagagtttagatgaagagatgttctacaaacttaccagtggttgggtgtgaataggaatactgtttaatgaaactccacggccataacaatatttaactttaaaagctgtttgttatatgctgcttaataaagtaagcttgaaatttatcattttatcatgaaaacttctttgccttaccagaccagttaatatgtgcactaaacaagcacgactattaatctatcatgttatgatataataaacttgaatttgtcacacattccttagggccatgaattgaaaactgaaatagtgggcaaatcaggaacaaaccatcactgatttactgatttaagctagccaaactgtaagaaacaagccatctattttaaagctatccagggcttaacctatatgaactctatttatcatgtctaatgcatgtgatttaatgtatgtttaatttgatatcatgttttaaaatatcctacttctggtagccatttaattcctccccctacccccaaataaatcaggcatgcaggaggcctgatatttagtaatgtcattgtgtttgaccttgaaggaaaatgctattagtccgtcgtgcttgatttgtttttgtccttgaataagcatgttatgtatattgtctcgtgtttttatttttacaccatattgtattacacttttagtattcaccagcataatcactgtctgcctaaaatatgcaactctttgcattacaatatgaagtaaagttctatgaagtatgcattttgtgtaactaatgtaaaaacacaaattttataaaattgtacagttttttaaaaactactcacaactagcagatggcttaaatgtagcaatctctgcgttaattaaatgcctttaagagatataattaacgtgcagttttaatatctactaaattaagaatgacttcattatgatcatgatttgccacaatgtccttaactctaatgcctggactggccatgttctagtctgttgcgctgttacaatctgtattggtgctagtcagaaaattcctagctcacatagcccaaaagggtgcgagggagaggtggattaccagtattgttcaataatccatggttcaaagactgtataaatgcattttat

SEQ ID NO: 75420 - DNA, 1047 bp, Homo sapiens
gtaccttaaagctgctaacaaatattcctgctagaaacatgtattccaggtattcattctgattatagacatagtgctaaatttaattaaaactcgtgtatatgtggattagaatgtgctgttctgtaatagtagtaccgttaggtgtatgcatttggaatatgtctcaagtgtggcaactatgtactcctaatagtactttttgttgatatatgaaaactgaaattaagacttattttgaaaaatccttatacattacattattacagtgtccaaatgtagcttcagatattttgatttcaactcttacaatatgattttggggtacggggtgcgtaattcaatcttttgatcttttgtctcagttctcccatgagagaataatgttcaatggtaaaggtgatgtttactcatgtttagataacagcgagaatcttggaggcccatcagaatgtagctcagatgagtctaattgaagccaagatgagatttattcaagcttggcagtcactacctgaatttggcatcactcacttcattgcaaggtcagtggttctaagcatctatgtgtaaaccttaatctgcatttttgcttaatctacctcatgtaattagatattaaacatctaaagcatacctatgtagacccattaactcatattacaatagaattcaaagactgttagaatgtattttgtaagcttttaatttctacattaaaaattcaagataattgtgtttgttttactactaagagaatagcactcttggccaggcacggtggctcacgcctgtaatcgcagcactgtgggaggccgaggtgggtggatcacgaggtcaggagatagagaccatcctggctaacacggtgaaaccctgtctctactaaaaatacaaaaaattagtggggcatggtggtgggcgcctgtagtcccagctactcgggaggctgaggcaggagaatggcgtgaacccaggaggcggagcttgcagtgagctgagatcgcgccactgcactccagcctgggcaacagagcaagactccgt

SEQ ID NO: 75421 - DNA, 1016 bp, Homo sapiens
ctccacagtgaacaaaatgttccccagaataatttgctttctgattacatgtttgtatggcaagttgcagtaataacactgaaaaataatcggtagttccgccttactttaatgtcatcaaattagatttcttatgttaaaggctataatgtctagtggttatttccctgaaaaataacatacagaatctactttttaatactgtacaatcaattattctctgtcatattttaatgtcatttttaatggaaaattagatgtgggcatatataggcatgtctgaccccataggtatccttctaataatacttgattgtaaataaaaattcttgcttgtaaattaagatcccaggaaaaaaagcattaaatttttcttgtcaattgaatattcagagtttgaaatttttcaatggtaaaggttatatattacaaaagaactatttctcttgttgcagtatgatgcaatcagaatcaatcagctttacgagcaggccaaatgggccattctcctggaagagattgaatgcacagaagaagaaatgatgatgtttgcagccctgcaggtagttgaaaggtctagtaaatgggacttattccggtaaagggtagggaggtatttttaaacagtaaagtggaatagtaattccagtaacatttcacgagacagaatttttgccatgaagaaagtgagtagacacttaggaaagcaaaacaaatacattttagtttgattttttatcttttccaagagttcagtggtatacttaagtacttttctctattttgtaggaaaaaaattatcctattttgtaggaaaaaaattatcctctcacccccaaatataaatctgctcaaagctcctcagtttttccttggaaagaaaatatttattaaaaatcagatttctgaaatctaatctgaagcttacctgtataatttcataaatagccagggatgatacaacacactataaaatgggctgtagcaaagcgatgcttttaggtgataagatttag

SEQ ID NO: 75422 - DNA, 1026 bp, Homo sapiens
ggtttctccatgttggccaggctgatctcgaattcctgacctcaagtgattcaaccgcctcagcctcccaaagtgctgagattacaggagtgagccaccacacctggcctagattttacaggttttttttagtactaacattggaagaacacatgtcagggacataaaatcaaatatcctgtgtccagcaagagattacatattttcagtaaaaactttttttttttaactttgcttcctagactaggtcatgacagctacaaaaatctctagcattagcaccactttttcacaggcagtgtttctatcattgcatggggagaagagttaaaaatagtaggaaaggagatggatttctaagcttaaccctaaatttagggaatggaaaagccattttctttacattaacagtgttatgcccattgcacattttcttttgaaaaattatgacaacaggacaaaatataatttaacagagctaggacttgggggagctgcttgtccttaatgtcattctgaacatttttagatgccttaaattcatctccttaatttttgtagtttaaataaaggagcacataccatctgttgactaatgtaacaaattgttatttacgtaacctctactatatgtctagccctaatactaagaaatcagaagataaataaggcaatatcccttccttttgagatttgactattaaatatatctctgtttagactctttctagggcagacttttatctccccttttacattaatactttatttgttgtaccccagaacttaaaaattaaaaaaaactttatttgtaaaattgttgaaacctgtttattcactgagaagactttactataaaattattcttaatctatatgaattcagttctattgtgttaccttcaaattgtatggatttcaaatggtggtaaaagttgtagacatatttgtcactatatacttgactacagcacaacttcattcttttaaattgaacaaaaaaaaccgttttacttaggttgtagct

SEQ ID NO: 75423 - DNA, 1160 bp, Homo sapiens
actatatttctctttattctgccctttgatagaattgttggatcaaaaattatttttctctcagaatttggaagtcattgttaaattatcttttggcttccaatgttgctattaatagtcctggtagtgttttttttttcttttttcttttatttattttcttttcttaagagacagggtcttgctctgttgcccaggctggactgcagtgacacaatcacagctcactctaatctctaactcctggcctcaagtaatcttcctgcttcagcttctccagtagctgagactacaggtgtgcaccaccatgcctgcctaatttttaaattttttgtagagatggggtatcactatgttgcctagactggtcttgagctcctgacctcaagcagccctcccaccttcgtctcccaaagtgctgagattacaggcatgagtcaccatgcctggcctcctaatagtgttcttgatttttatttttaatcttctttgtagactgccttttctcactggaaacttttaggatcttttcttttccctgccattttgaaattttgtaacaatgtgccctgcctggttagggttttattttcattcattgtgatggagacttctgaccaggggatatttcttgtatttatgcagagttgtttcataatattatttccttggtaatttcctcctctttgttttctctgttctcgctgttactgttagtcagacattgttcttggatcgatccacttgcttgactttatattggattttttttttttttttggtggctatcacattttaattttcagtgttttggggtttttttttttttttttttttttgagacggagtcttgctcagccacccaggctggagtacagtggtgtgaccccagctcactgcagcctccacctcctgggttcaagtgattctcctgcctcagcctcccaagtagctgggattacaggcactcacaaccatgcctggctcatttttatatttttagtagagatggggtttcaccatgttgcccaggctggtctcgaattcctgactttgggtaatccacccgcctcggcctcccaaagtgctgggattacaggcatgagacactgtgtctggccagttttcagtgttttatatttctatctggatgtttgtta

SEQ ID NO: 75424 - DNA, 1159 bp, Homo sapiens
gatattggtctctgttcactttggttccccatcttttcaccacccattattcaccttcacacatttctgcaacttcataaaccacagtctgttcagtttctcatcagaatgttattgtccattcctataggacgagttccaagcccaccaactccttgtctttattaatccttcctattctagccctcaggattctgttttctgagaataagagggtactttctctgtcatccatgtgtcccattttgtagttgactcaaacattcttagttgccctatatattctgcctcagctgccttgtgtactggcttttcaggacagagcgtgttttctcagctgttaatgtttcttttgtacctgtcacataacagtaacttagtagttaattattgctgttaaatacccaattatctagttttctgcttttaatttctcaaaatcaccttggtgatttttaagtgatttgtttattgtttgttttttatagatgtaaaaaaagattggtctgaccatgctctctggtgggaaaagaagagaacttggcttctgaagacacattggaccttagataagtatggtattcaggcagatgctaagcttcagttcacccctcagcacaaactgctccgcctgcagcttcccaacatgaagtatgtgaaggtgaaagtgaatttctctgatagagtcttcaaagctgtttctgacatctgtaagacttttagtaagtattacataaattcttcttaaaatacgagttatgtgatgtacagatgaccgatgactgacatagcttatcccaagggatggggcatgggctgaactatctgtatatatgtatgtgtgtgaaatttctacttcattaaagtttttatattaagataaatgctgggttaaggtggaacaggaagaacctagtagagattctttccttactagaattgtatctgatatttaatactttatttttatggagaggttaaaggaacaggcactattttcaggggaacatacatggctttgcaatgtttccttcacataagtcactatttgattttagtgattcaggcagattgtgtcacttcctccattgaaggcctgacacagctcctaaggaaatgactatgagtgttgtcttccttcaccagtctacaatttgaa

SEQ ID NO: 75425 - DNA, 1241 bp, Homo sapiens
ctgaaagaagtctggtgatgatgggggagcaatcctagggaaccagtggcttgacgtgaggctcaagaagaaataatgctaaagtgctttctgaaccaggtttaaaagatttagcattatccccagagctgtgagatgcccataaaagactttaaatagggggagacatcagatttttacacattggaaattcatcagtttcatataaaataacttgcagataaggtgtaagcaatgataatcctcttggatttcaagaaataatttttccagtatacattgaagttttatattagaatttgttaatattttctgagataagcttacaacataaaagccaattaaatattcttactaaattgcttttcttttgaactttagaatagctagtgtcattgatcacatttaaaacacaaacacaactaatacttctctaagtccaatactaactggtgaattttgtcctgatgttactctcttagaatttgtcagaccttttcattgcatggactccgagccctgtcttctaggaatgaagccaggttgaaccaaattagcaataagccagccttcaggattggatagaaagttacccaccctctggaaattaataattggcatactttctgtttatgcattctgtaactgcttgcatggcttatgtgatctgaaaaaaacttcttaactgctttgagttagtatgtcttatagtatcggataatagattgaaattgatagacattatctcagattcgtaacttcaaaaggctatttgtaaacttagttgatctctttattttgaagagtgaattccccagttttcaactagctatgtagaagaaattgcaatttgtcacttttcgttagaggtttagtttctgtcttagtctgcttgggctgccataacaaataacatatcctgggtggcttaaacagtaagcacttatttctcacagttctggaggctgccagatctaagatcaggatgtcagcatggttggtttccagtgaggaccctattcctggtttcctcacatggaggagggaaagaaggagagataggaaaccagctgtcttctgtctcttcttctaaggataccagttccaccagaagcactccacctccatgacttgatttacctccccaaggccccatcttcagataccatcatattggggattaggatttcaacatatgaatttggggggacacaaacatttagtccatagcagtttcccat

SEQ ID NO: 75426 - DNA, 1217 bp, Homo sapiens
ctttggacaatgaatccaacctgagtgggttttgacttctataaaatagaaattgaaaaaaattttcttggggcgggcggggtggctcacgcctgtaatcctagcactttgggaggccgaggcaggtggctcacgaggtcaggagatcaagaccatcctggctaacacgatgaaaccccgtctctactgaaaatacaaaaaattagctgggcgtggtggtgggcgcctgtagttgcagctactcgggaggctgaggctggagaatggtgtgaacccagaagggggagcttgcagtgagccgggatcgcgccactgcactccagcctgggtgacagagcaagactccatctcaaaaaaaaaaaaaagaaaaagaaaaacattttctcacaggttttggtgagaattaaatgagataatacatatatattgatactacatgtatatatactttatataaactatttgtgttatgcaaatgagagtggatacttctctgtggcattgagtctctgagtatatgaaagtaggaaggaaaaaaaggaaaagtaggttaaaatataatctagtatatttaataagttccagctttactggtggggaattgcactcctcaaaaaaagcttagtttaggattgctttctgttcccaccctctaaacaacaagaaaaaatagctgtcattttactttcccgccaacttccaaacacacacctgcctctgcagtgtaagagagctatttaagtaccattttaataagatttctgaaatgcaggggaccaataagtggatgatggtattccaggtatttgaaaaatctaaaaccatgaaagcatcagtagtaaattaattctctacttaatatattctataagagcagtgtttttagttcatttatagcaaaggcacatgaaaacattgggcctatttagaaactaatgaaagtagtttcagaaaaaagctaatgtatgcagtattcctatttaaataattattttactgacaaattaatgcttatgccatggaacatttaaaattggtatatatgcccagtgagaagtaaacaaatacatctgaaagtgtatttttaaataattcttttattttgtaattaagaagtgtgacttctgcacttgggtttgtggttacaaattcatattcgttataattcattctttaacaaattagttgcataattactatataattgtttttcctgt

SEQ ID NO: 75427 - DNA, 1063 bp, Homo sapiens
cagttgaaatccttagtttttccccttgagggctcacaactgaattcatggaaattaatgcctacatgatgcatcctcattgcattcatagtgaaatacattaacattataagaaatttttttaaatcttgggggtggagtaggaaacaatgttaaaatcttattaaagtgaattaagttttggttaaatctgatagtaagtttactcagtgtttaaaacactgttcatgatccataggaagtgaattaaattgtatcagtttcttagcaaattttaagttctttaaaagtggaggacagtactcaagttttactgtaatcctgtgacagctaataaagtatgagctattccttagagtatgtgctatttgctgccttttgtttttgttttgctgctatgttttatacccagttttttaaagtaaaaaactgtttgtttccaactagagttaacttatttatagagatgctaaaaatatgtttattcaattacttataaaaggccttgttggaaatgtctaatcgctcgctattgaagagaatggaaagaaaatatgtaaaattttacctgttatctttggctcttaatttttaaaagtttcaaacatctaagttcaagagtaattgagtgaacactgcgtaatcttcatctagacaccagttagtattttgccatttgaattttctatacacacaaacatacacatgttggggagcagttggatgaagtttcagacttactcataacctttgattcctaaatatttaaatatgtatcacctaagaacaagaaacttctcttgcataattacagtatagtgatcacattcaggaaattcaacattgattcacttctgtcatctaatatgcatccattttcaaaatttgccagttgtcccaataatggcctttgtttttttcccatccagaatctcatttcgcatttagttgaaagggcctcttaatctcctttgatatacagaacagccaccaagtgtggagctacaggagattatataataaatggcttattgacattacattaagatacatgtaaaatgat

SEQ ID NO: 75428 - DNA, 1032 bp, Homo sapiens
aataacaagccaaggaaagaactttgtgttaaaaagcagactttgttaaactaatttgaggttgacggtgtttgcttgagtacaaatatgtattggattgatatccgatttaaaataataaggtatcttacagtatgaagtgtgtgaagagtgtgcagtacacatttttgtgatgaatgaaaccattttcatctggaagagtcagctaaatagatgatttgatcataagagaaatgctcagagaactatcttcctgagctttaaagagccttttgtacataatacagttgtgataagatgattatctgtgtggcattgtctttttaggctggaattgttttttgttttggtgaaggggggttggggactttctgggggtttttttcgtctttttttttttctttttttttttaaacacagcattcgttttcaagctacactgggaaagtagagaagtgcttatttgtcaggaaatctatttcttaccaaaggattattgtatgtaaaggtactgaaatagcactctgatgcattttgcaaaataaggcaggattcatttgggtggacctgctttgtacccctgcaggaagttttattattgaaggaccaaagtgaagctccttacaaggtagcctcttccttaagactgcattgtttggctccctgagatacagctcaggaaagaaaatcctcctaggtagcccagtgaaaattagattttgctgtattgattaaccatttaactggcagttaacagtatttttatctgatttgaataaatcagtcactgtttgcaaaatatgtatgaaccttttttgtccagctctggtatgagattatttaagaaggaaaatagcaaatatttggatattttgttttcaaagaaaacaagcatttttgttagagcttttctaatttatggtaaatggaccatattaatacattggtctcaataggagatattttttatattgcaaaaaaaggagctgttgaaggtgactgagacaacttgtagttctcgaaagccaggct

SEQ ID NO: 75429 - DNA, 1174 bp, Homo sapiens
gatttttattttatttagatagcggcataagttgttagcagtacttcataaggtccttcctagctaggtaatgtcttctaaaaaccttgatgtacatagatctcctcgtcaaaagagatggcaagcattgtcagttggcagaggctggctgtgtcatttttacctgttgatatgctccaagtatacttgtcagttcctgtatataactagtcatagcatcgaattgttcacttaagtctccataatggttcactcaattcaagaatagaaggcttagagataccagtaggcatagaacaaccaagtattgtttccaaaggggtaaattcatgccttctatttcaagtattacaggttttatgtatttaggggaacgcttctggccatttcagtgcagtctcttgatagaattttcctaaaattttttgtttctacctagccaatattttaataatccacaatattagctgattcataaaaagtgcttttacaacctgttaccatctaagataatgcatcatacaattttcaagaatgtgttgattttgagcctctgttctgtagaattccctgtgctgcagccggtacatgctcctttttgatgactccacatttattctcacaggcatttgtcctggactcttctgctaatcaatgaacaaacagtaagtcattcagatgggccagtaactcaccacttgtctccatatgaaggtgaggcttctgttacttgaagacttgattaagtaagcgtgggagactgtgcatggtggctcacatgggcatgtaatcccaacagtttgggaggccgaggcagcaagagttcatgaccagcctgggcaacataacaagacccccatctgtataaaaaacaaaataattagctgggtgtggtggtacgtgcctgtagtcctaattattgggaggctgaggtaggaggatcatttgagcccaggaggtcaaagtcacaccactgcactccagcccgggtgacagagcaagaccctatctctaaaaaatttttaaataaaatctttttttaaagatgtgggggaacttatactttatctgctttttctggtggactgtggttcccccacccccaccaagcaccagctgcctcagctcctaaagccctccccacaccacacacaagctcatgctcactagggca

SEQ ID NO: 75430 - DNA, 1109 bp, Homo sapiens
tagggcgatggtaagaaggacctcccagtttataacggtttggctgacccttggtgagtgcccatttgtcaaatgaggcattaaagatagattttaatccactcgatctttttttaaagacttgaagatcctccagctgaaatgtcagtgtgcccaagtatgcaactcactattcacaaaagaactttctttcaagatctctgccttccataagcaattcacaaactcctcttcctctttgcaccctgtgtcaaggcttcctgagtaccatttcaacagagaacttatttataactgcaatatatctaaaaatcatagtccaaaatctttcaggcagacaaatgccattgatctcaatgtcatattcaggaagtcactgatccaagtgccatattccacaaattcccaggcataatcgaacttgctagaaaaccaaaaagggaaaacctgggaagtgggccaagatccttggtgtcattgtacaacattcaagccaactctggtttcaacattcttttgagattgttaatccctgattggaatgcattccacagtgcttggccacagattgtcacacaagaagtacactgcagaattgtacttgcatattgctggctttttgcaataggaaaatagaacccttagtaggaaagtctgttttgtctttttaatttgtatgaaatctctgtggaagtattacaatgtagtagacataaaactggattaggatggtctatcatatataatcttgagctaatgcctaatcttctaactaccctacctgtttcccaaggtggttataaagaattaataagataacattttatgtaaggcatcactgttgtgataagcataaggaagatgtaactcaaaatatatggacaaatggtaagcttcaacagtaagctttaccaagtgagtaatagtatctgaaataatctgttcatatgatacaatctcaaaaatgcaacaggatcttttttggaactgggcaagctgtgtcttaaaattgtatagaaaaaataagaatattcaggaaatttccaagggggaaagaagagtaatgaggacaattagcccactagatagtaaaacatagtataatgcta

SEQ ID NO: 75431 - DNA, 1012 bp, Homo sapiens
aagaagaagaaatacaaaacaacaaaaagaaaatcaagaaaaaaataagatatccaggaaatattttgttagttttctattctggtgacaaatgcaaacttaaggaaacaagttgcacagtgttaactaatgtttaacattcctttccatagtgtttatgtgggccttttatcaattcatgacaaataggtcacctccaaaactgttccaacataggttaactcagaaatttaaaatttaagtactatcctttttggagactatgagaagagtttttactattgtgttttgttttgttttttggtgtgtgtgtgtatgtatgtgcattccccaaaaatagtccattggcagattgttagggtgaacttttcctctgcctttgtgtttgtataagggcgggtgcatgcttagtattgtctgctaccttatggtttttcatttatatgtaacatggtacaacttgcttcctccccacccaacagttgtcaggatatgttggggaatattctttaggaagattacatctggtcttctgttggagtaagatgaaaaacaagtatgttaacacttgacctttactgctttctcctggaagacattgaatatctaggagcgtcactcataccttcccttgactgtacccacacccactgcggtccctgcttgatctctcaaactttttgtttccctttgagcttcatgacaaaaaattataaccattttctggttctaaggctgccataatcccaactttgccagtaagaagatggagaatttttgctcatagggacatttctcagaagcagctggcaccataactctcctgagacccttgtttcctttctttcagctcctatgacttcttatgttcactctctctaacactactaaatgttgtcaatgactgcaatcacaactctttgaaggcaggctttttcttttcctttgttacctcttattttcaatagccaaagcaggttagttttctcagaatcttcagttttactgaagc

SEQ ID NO: 75432 - DNA, 1055 bp, Homo sapiens
ggtatttctatcttctcagctaattaatgagtaaggcatgtggacaatcgagaaaactaatttgagtgtatgtattaaaattgctcttctaaaaacacgtaaaatattaaagatcaaggcagagcaaaaaagaacgtagcaatcatatactagaaaaagaaactaagttttgctaaactatgtttgggttagttgacctctgtagctattctaaagttttctatcccttatctgtattccgctgtcattcctgtgcctcaagcctctgccaggaatctgatggtactctggctgaacttaaaacataagaatctcaaaggtctcatttagtaaatgttagtgctaagttggtgacagcctgggttatatgctttctctttcagtcttcagtagatgcttgtgatagttttcaaagaactgtaaaatttccgggtctgtacagatttttagagatcatttaatccaaccctgttacagtatcatgtcagcatttaaatagcagtaaaggtcatgaaaagtgaagtgaaaggcagcaaactccatgaaaaactaaatacagtgacaactgagggaagtggtaaagtaaaaaaatattaatgatggaattttaaagctggaaggggcatagagaccattcttttctcaataatattctgcaaatattaacaggtgtcatgtcagaaactaagtttaggaattgacaaattcaaaaatctcccttacagcagggctttgagagcctttgctacactaaatgctctgtgaatctatctggtgctgcgtgggggcctccaaatttatttaaccatattttttaatttggcatttacctagagaaatgctatcacatttaattccttcgttttacagtttcacctcctcatgtgattccttcattttgtaagtgaccgattccaccctatacaatcacatggccaatgaatgacagtcagaattagaacctagtcccctgattcccaaccatgtcttataccagactgtttcccctaatcgataggaaactactcctaaagggcagaaactgcctctctttg

SEQ ID NO: 75433 - DNA, 1044 bp, Homo sapiens
gcttggattgagctagtcaccgtggttcacgcctgtaatcccaacacttcgggaggccaagatgggaggatctcttgagcccaggatttcaagaccagcttgggcaacatagtgagaccctcttctctgcaaaaactgacaaaaattagccacttgtagtggtgtacacctgtagtcccagctactcaagaggctgaggtgggaggatcacccgagcccagaagttcaaagctgcagtgagctctgatcacaccaatgcactccagcctgggtgacagagccagaccctgtctctaaaaaacaaaaaagaaaagcttgggttgaagccaggccatattcttttatatgctgttcaatgacttgattcacatgtgaccttttagtagtttgcaaacaataataacagaagttgcaattcataattcagagaaatgaccatgaagccggtgtttccctgcttgatttctatgttcttggattctcacacaaaagaggagttacctagaggggatcagtagccatccctgttgcacacaaccctcacttctgagtggtttccactaggttccacttaaggtgctgtcttttcttaacttgcaaggaattgcttagcttcccaataatcattgtcaaactgggagcaaagttggtcagctgtatctctcacctcctcctttcttcataagatagtagaatctgtggcttacttgtaggttttacttagtgcttcagtactgttggctgttttggccttttgctgaatttgcacaacaacataaagcacttctttttaatgtttaaaaaaaattccaaggctccatgaccaagtatgtgactcactaagaaacccttgctataaaaggcttttgatgaaatcttagcaaagctaaattatctctaacttagagattcctatgaactcaggtcattttcatagcctgtttattttgtaggtctaatttagttctcaggaaaattaaactcatgctatatgactgtatcgttaaaggtacttgagcgtatgttgctgtaggtggtatgaca

SEQ ID NO: 75434 - DNA, 1166 bp, Homo sapiens
aatggcctaaaactgattttttttttttccgttaaaatgtgtgtgtcaagatacggagatttcagggttaaagtatatttcagttttctttagggcaacatatatttgaatttaaaagcactttatttaaaaaaaaaagaagttttcagttctgaagaagtcatttacagtttgcatcattttaattatgagtctgacaaaaccttctccagagaatcaagcaagacctggatgtgaagaaggtttgggtaaactgcatgtaaaggctacaaatcacaatctgattcctcccaaatataaaggcatatggaacataatgtattaaccaaagtatgttataaatcaaaaatggtcaaggttcagcatattctatatgaagatcacaaggtggtatcgttttagatttctatgaaggctttcatttgtacatccctttgaaaaaatataacagatttaaaatgttttgaatttaacttgtttagaaaaactaatgcttaaaacaatatttgaactactgtatttataatttattacctctaattgctttatttcagtgtatgagacattactgttttaatgtttgctttgaacataatttaagaaccagatttattttctatagtgataaacccttttttctcagaactccatctttgtactcttcagatgaatatatagacactgtggcatacattttttttcattaaaaacttatggcttcatacaacactagttcaattttttaaataaactttttattatgttacatgtacttcagagaaagctaaagtttctctaaacttgacacggagtactccataatgggtacatttcattagctttattagaaaactagtaaatgcttttgaataggtagtatgacagctattttaaatgtataaacatttgtgtgccaaacaacatatatgaagggatgtgatgccactaactagtgcacattgtttctcaatgtgccattgagacacaaggcacagtaagtcaggattctgaggcattggaagggttttcttcagctgtaattgtttccacagtgcttttcatctgaggggctcaaagtttaagagtgcattcaataacccatgtactagcttcttgaggtaagtaaataaatcttgttctcatgttacatgttaatacaccaaggc

SEQ ID NO: 75435 - DNA, 1036 bp, Homo sapiens
agtaatttcaaaataatagagaaacccccagttttttcttccagaacagcagttagtagaggtgcatagctgtattgcatctttttattttgagagcttaacaaaatacatactatgtcattcttacacataaattctttgatagtccgaatggtaaaatagtcaacaagactcaatatgaggtaattatgagtcttacacatattcacatattacacatacttatatattatacatattacacatattcacctctagatatagatataactattaaaattggactattataataagattctgccttttaaatcctattcccaagatttgctttactaattatttggcttgcttcaataatgtaatctgtgtaatcgtcataatttctcgtcgttaagtgctgtcttggctatatcgtgcaaatcataaaacttttcttcattaaatcttctttctgaaatttggtcattgtgattaggtgattctggcttccctcctttcttccttctacttacattaattgcctcagttcttctggataacctttattctgaagctaccgactttgattcacttgctatttgagggtaaaatggggcacaggcttagaattcatgatctgtctgtttctttatgtgaagaactagtgttgtcaattgaaacctattttattttcatccagttgaagcatcttacctagctattcttcttttgaaaagtctagacttcttttctaacatataatgcaaagatctgtttcttttagcattgttttgcatctaggttaggaactaaattagctatgaatttggggactatctgggtgttaacagattatgagattatatttcaagttagttatgcttacattttccatgaaagagctccttacaaaaattaagatgtgtactactttatgtatgctagatttagtcagtttatttgggagtattgttctaacttttggccactacatcattgaaggccatttttaatcatcagccaaccctttacagcatcttgtgtttttttttca

SEQ ID NO: 75436 - DNA, 1058 bp, Homo sapiens
atagctattgttttttaattaaattccttctcggaggtttacttaacatgcagtagagtaagaacagtttactaaaatccaagcattgtgatttaacactgtgtttctttgaatttttttttttaaatcaaggcttatagattagaaccattaatactgaaacactacagcaacatttcacctgtccagatccactggtacaatacttcaaatcctttaccttatgaacatatgaagccaagctttctcaacccagctaaagaacctacctcagtttcagagaatgaaggcatttcaaccataccaagccctgtgacctcaccagttttgtcccgccgacactatggagaatctataacaaatataggcaaagcaagcatattaggtaatttctcttatgtattccttatctatgcatataagcactttcctagacataagtttgggggactagaagtattctatgtattaggaaactcccagcagttaatccctgtgtctagaattaactaccctcccaatgttcatatttgaggcccaaaaagctctaaagttctctgattagatcagatcttatagttttagaatataagatagctggatggaccagaaaaagctgttatgagaatcaagtccctcattttaatcttggtcctaccacttgctgtgagatcttgagtaaataatatagtttttaatgctctacttgctcatctgtgaaatgagaaagcacttgtgtcagagggtgctccctgtcaaccagttctctgatctattctaaaagtctctcaaactgtgtgattcctgagggcaacaaggatgtttaatttttctttgaatgatctccagtactggcacaatgtttgctgtatcactggaactcgattatgtggtatttgaatctgtccattgcctttggttacaagttgccttaatgtaaaataccacaaggtggcactataaataggctttatctcctggactcattggctgttttactttctcatgttaatacattgtttattgatggctttttcttacatgtccatttaaattca

SEQ ID NO: 75437 - DNA, 1811 bp, Homo sapiens
agatactcattttctaaaacttactgactaaaaactacaaggtacaaaaatttagaattgcatgtgggtaagttacaacaaaaaagaaatttgcgggggtctttgaaaatcttattggtatttgcatagaactttggttttttttttttttaatctatggaactgctggcttatacagttggtttaaggactacagaaggatctatgtaggtagtatctgcctatgttcttagtgatgatatggattataatagtatgtataccttacttcattcctgcaagattttgaaagacctaagttaattttaataacctaggtatatttgatcggtaatgtatgtttttctaccttaatgtatttgagtttagaataagtgtatagtagtcagtgacaagtctaatatgataatgttttcttatttcaaacagctagttaaaggccttcagcaagagctgaatcgattgtattcccttttctgttctcggaatccagactttgaagaaaaagggggtaaagtctcaatagtatcacattccttgggatgtgtaattacttatgacataatgactggctggaatccagttcggctgtatgaacagttgctgcaaaaggaagaagagttgcctgatgaacgatggatgagctatgaagaacgacatcttcttgatgaactctatataactaaacgacggtaaaatatcctcatcttttgaaaaatttttaaatgtctttatggaattactggacctcttacgagaaaactaagaatttcatgataaagaaataatgcattgttcaagatacaaagattactatatagcatgcctaatcaagctggagactgttgattttcatgctaattacatgcattttcctgtagcataaaataaattcttttgttattctccttgttttcctttcatcgtttcttcacagtttgttaggagtgaaatttaaaacttattccaagcttagtcactgcatagaatccttattgaaaatgtttaccagtttataatcctttgtagttttactgaccttttgaggtgggtttctacctttcttattattctgaaaataatttttaagtgctttttttaagcaaatatatttttttacatgttatatgtataaacataattatatgtgttatataattataagattttattatttaatcatttgtggccctcctgatactatcttttaattctttgctgcattcctatcttcatctctagttacatgccttatcttctttgttctctttatatgattaattctaatataaaaatgaaaaatcactcattttgataatttactagcatattaaaacaaatgtgctaattgactaaaatttttactagttttgtttttgtcttacagatgttaactaaggatttcatttagaatcttattaagtaccataggctagacacacaaatattatagtgtcaaaataattgacaggtttgaaataaaatgtcatgtttggcaatactcggagcagcattttagatgtataaatccagtaaaactttaaaaaaagaaaaaaaaagcatggaaaataacaaatttttttttttttttttttttttggagacggagtcttgctctgttgcccaggctggagtgcagtggcacggtctcagctcactacaacctcttgtcttccaggttcaagtgattctcctgcccctgtctccccagtagctgggattacaggcaactgctaccacgcccggctcatttttgtatttttagtagagatgagatttcaccatgttggccaggctggtcttgaactcct

SEQ ID NO: 75438 - DNA, 1062 bp, Homo sapiens
tttgtagagacgaggtttcaccgtgttagccaggatggtctcgatctcctgacctcgtgatccgcctgccttggcctcccaaagtgctgggattacaggtgtgagccactgcacctggccacttagtgaaatttttacaaatcctttgatatttttagtaaaatcagtagaagaaactgaaattaagttgctctgtcaaagctattgagggcttgaggtatatatgccttagacccagtgaagagtcagccacatcacccgggaaagcagttaattatcaaaacacatagaagctgtatattagaggttaaaattatgatagttaagtaactcaatggtttaaaaagttgccattccctgtagcaggattaatcatttataaaataaagtccctatccattacttgcttcacataactttttttatgtgaaatagtgttttattgaattaagttccatatctgagttttttagataacatattgattttaaaatctgagtgttataattcttcaaacaaataaagtttgtcttggagaccttcaaattagcttttcctttttgcaatagctgttcatagtttcaagttgagtcgaaaccatgtggactggcacagtgtggatgaagtatatctttatagtgatgcaacaacatctaaaattgcaagaacagttacccaaaaactgggattttctaaaggtaattgttaaatattactagagcttatcaaaattttgggaatctgactttctctcatattcaaaatagacaattcatattctgtttttagtatgttttaagtatattaaatttagtgacagattcctttttaaatgaaacttttattaagttgattgagttgacatgtgttcatcaaggaataattattatatatttagaatgatttgacaaaattaataaatatcttttatacttctaaaagcacaaaagctgttaaacctaaaatgtggcagttgaaatatagtgtcaaggaagatgaggactgaaagttttccattgtatttagtgatctggaggtcactggtgacttagatggattgat

SEQ ID NO: 75439 - DNA, 2502 bp, Homo sapiens
aaaaaaagaaaattaaatagtgctttctggcacttgaattttctttaacagtgatctttgtttggatcgatagtaaactctttttttcctctactgtacttatcatagtacccctaattctgtgctttgggttgaaaaagttaagctctgtatgctacaggatgtgtaataaataaagcaaatgactttcaagtgaaaataagaattacatttgaaaagaaagaaccatgtctgtttaattttgtgaaaatgttttaaatatgtttctctggaggatgaaaaaaatttttttctttgtttctctgtgtataggggtgtttgtctttttattaatccttaaattatactattcttttagaaaagaaagccttcatttgtgtatcttggctagctttccgaaagcgtttacataattttaaaacatggtcaaatggtccatacatttcccatttcgttctcgtttaatatttaataatatggaattggttcacgttagttttactaccagatctacaaaatctagtttttgtttcaagcagtaaagtctcaagtttgtgtcagtttgatttactttgatatattagcatctttttcctaatgaattttttgtttaaaactgtttcctggtctaagtggtacatctgctcctcagtaactgaccagaaggcacatgaaagaagaaacattttcagtgaagaaaattgcatcagttgtcattttttacctctctgtgacaaggaaatgttgttataatcctgacgtagcacagcttttagttccagtttatagttttgtagccatctaattacatatagatatagttattgtgtcttgtaagcatttctcaattacttttattacacaaatctttgcatatactacatctgcatattcaacagatttgttacatttctagtattataaaacaggaattaaatatttttgtatttgagcagtatttaacctttgaatgtcacattaatatagaagggagtgaggatgaaaatcaaatgtatttgaacatgaatttgagctaatcataaagatcctgtaatttattaactggtgagaaactaatttgtaaggttcaagttcaagtgaacttttaaataattgcttacttaaaatataaagaaatttatataactaccaaaatttgacagggaaaatgttgactttaaggttatctactgatttgccaaatatcaagtctgtgcctagctttactctatgttgtctgtttagtgcttacaagttgtcacagcatacatttttactaatgacttttttcattattttattacagtcttttcaaaagcaaagttaaaagcagagcttccagtttgatttttgttttttagtaaaagttttgttttttaaagtcttttaagaacttgaatggagttgagaaaagaatttttttttttccctaagggaaggttccattatacttcagcagtggaaagcatctagtagaatgtatgctgtggtatcttctcaggaaggttgcattagatatgtaaaatgttatttattgcattttcaatttgtacatcagctgttggctgtgtcagtcacaaatttggtgagagtaaataaccttagtgttgtaaagatggagtttataaatctcttggcatttgaaaatgttatgttcttttttaaaaattctttctatgcaaagacattaaacatgataatcagttgtttttaataaatttagatattatttgccttttttctttcagtaacagcagctatttgataaacattatactaatgttttgctttactgattcttagaaatcatataaatgaagcatttagaataatgtttttcaaatacaactcattttttaaagttaatactagaacaaaaaggcaaaatggcaaatctcatttaaaatttactttgaagctcagtgtttttgctttcttagttgtctaccacctccctcccttctccctcccttctctgttcaaatggagaagatataaggagagtacagatgcgacaggtcttaaacgaaagcattcccaaggtacagtaattgtagttttatttctccatgtagttatattcctggcttatagtattcagttgcatttaaagcatagaaattattagttttttttaaatgtgtccattgtattagtttgtttactgctactttattatgtgtataaatattggtaaacagtgtgtatagtccagtaacaggatattcagatgttccccaacattaaaatggtttaagatgatatatggatgatttaaagaggaaaataatttttctggcttaacactcatctctaaatatcttgatctcatagtttaacgttttaagcatctgttgctcacaactattttaacaaaaatgtggtttagaaacatataagagcttgaagtagtggcatggatcagatatgtaattagaaaagtgattgttaaacccttgcaaaagattttttttagtttatgaaaagctcttttatttaaaa

SEQ ID NO: 75440 - DNA, 1982 bp, Homo sapiens
acactccatattttttctctctgccactctttgctctctcttacctctctgaacatatgtatacatttgtcacaagcaaggaaactgtgtagtttagcttatatcaaattaaaatatcatttgcatctagttgattaaaagtctatataactgaggaaacttgtgacttctgaataaattagcaattaaagctaacaaatttatataataatagttgtcttttatgtgccagataccatactctggaaattctaaatatattttcctaatcggtagaatcaaatatgtccttatttcactgtaaaatttaaactaaaggttcttacatatcaataaataaggagcagcccagtgtaagagctctaggtatgtttctacagattgccatgtaatactttgttctccttatagtaaaaatagcaagttttatatatctgtgatcttatggtagtgactgaaatatttcataacttctcatcactattggtcagaataatttcaaaagtctacttcatagtatttgaaggatagaccttttatcataaaataatcttattgccattggagaagtctgagttccagatttttttttccttctgttaattcccctaagtattctgcctcaaaaatgtcagttcaccatcacaaacccagtttagccacctgaatttcttattattaacacatgaaaaaaatccaggagcttggaggagaaagaggatgagtatgaaaaatacaagtagatggttcccctttctcattctgtgttcagaactttttttttttccatttgctaagtcaccctgtggagattaataatcagctctgtttcttctctagattctgcctgtttctaatcttgtttttactacaataaaaattagaatttaatatgtactttttacttctgcttcctgcctaaatgctaaatgtagcaagatacttcagtttttctcaaagtgtttgaatttaaataagactgatgtaagaagatggtttatttgtgtgagtacattttttagaatgtctttgcgtatgtgtatgtgtgagtgtatatatcagttctagggtagcaatctctaggatatcgtaatattttttgttatctttatggatatacatggagtagtaaaattttaattagtaatggaaaattattaaattattagaacacttttgcattgtaatctttcaaaaatgatgattctttgaggttcattagaagaaaatttgtttttataatgtactgtggcatataagattcagcatgttctgttattagcaaagatgtgttcaactgaacatatctttgtcataatttttggtcactttatttttattcaatattaaacatatatttatatcttgttacatttggctttgaaaattatgggaaattgtgtagtacatttgaaaataataacaagtcttaaggaaagaacatttgctatccaaaaagctaccattgtcgggaaaatcattcaaatttgtaactacaaagactaaaaaatattataatctttttaatttactgttagctctaagcttctgaaattttatacttcattagtttgagggaggaaaataccctttccacctaaattttctcatgtataaagccttgactattcatattgtcagattttgaatgatgccatgtatagtaatgtggtaggcacttttgtgaaagaaatcgacaaggtttctaccctcaaggagttttaagcctgttagagtagacaaagccaacagatgaaaacagttacaaaagagtaagtacaagaagacatagtagtagacagtcaatattacatattctgaaaagatatttggaataaagtgagtagataatcacaatgcagtggaattattcacataaggctttctggaaaaacctcatttaataatttaaaacattttaaaatactatattcagggatgtttattaaatgctctagggaatatcaaagaaactaatagtt

SEQ ID NO: 75441 - DNA, 1059 bp, Homo sapiens
tacctttattttatttaataatggctccaaagcgcaagagtggtgatgctagcacattgttataattgttggattttattattagttgttgttaatctcttattgtgcctaatttataaagtaagctttatcataaatatgtatatattgcaaaaacattataaggttcaatactatttaaggcttcaggcatccagtgggggtcttggaatgtatcccccacagataaggggggactactgtatattaattacaaggtgcccgtggagaatagattcaaataaaaatctaataagagccattgataaaaggaaggaaaacaaccaagagaatgtaaaaagtagtttaaattcaatacaggcaaaagaagacctaacatacttaaaattggagtccctaaagaagaaaagcaaatcactagaacagaactaattaaaccataactcaacacttttcagaaataataggaaatttcaaattttacatattaaaaggccccatcatggacagattaatacagaacagctctgagtcatagcctagtaaaactattagattttaaagacttttttcctgggcctcttgagaggggaaaaaagattatattattaataaaatcaggctgacatcagattccttaagaacaatatatttttttttggtctcactctgtcacccaggctggagtgcaggggcatgatcttggctcactgcaacctccgcctcccaggttcaagtaattctcatgcctcagcctcctgtagctgggattataggcatgcaccaccatgcccagctaatttttatatttttagtagagctggggttttgctgtgttggctaggctggtcttgaactcctggcctcaagtgatccacctggctcggcctctcagaatgctgggattacaggcatgagtcactgcacctggcctagaacaatattcaaaggaaggctacagtagagcaccatttttaaaaactcaaagaaataaagcacaagctagccaacctgtctttagagtatcagataaacagtttgaacacacaagaatttagg

SEQ ID NO: 75442 - DNA, 1014 bp, Homo sapiens
ggtgcacccctatattcctggctactctggaggctgaggcaggagaattgcttgaacctgggaggtggaggttgcagtaagctgagatcacgccactgcactccagcctggatgacagagtgagactgtgtctcaaaaaacaaaaaaaaagtgaaagtcacgtttaaattattacatatttctttaccaagtgactgtaacatatcttttttttatattcaggcactcttcatgattttcagtatcatgaatagcatgcagccagttttgttaaagtcaagcagggcttagtgataggtgtgaagaacgtctaccattgtcttgcaataataaagaatgtgtaggctccacaaattatactggtatagatgatagatgctgtaaagactattccacatgttacttacacaaataggagtagaaaatagtcaataaggacatagatgtttttaagcagattataagtatatttttaagcagattgataagtaagttatattagtaatgtagaataagagatataggtgttgaatatcataggcatggagagcatgcaaaaaacttagtcaccatagaaaatggttttatttatggtaatttgagaaaagacctgtttgaaaaggctttgatatagcaattaattttacctagctcaattcatgtcacattaaactgtgtaactttttttttttttttgagatggagtctcgctctgttgccaggctagagtgcagtggcacgatctcagctcactgcaacctctgccttctgggttcaagcgattcttctgcctcagcctcccaagtagttgggactacaggagtgtgccaccatgcccagctaatttttgtatttttagtagagacacggggtttcaccatgttggccaggatgttctcgatctcttgacctcatgatccgcccacttcggcctctcagagtgctgggattacaggtgtgagccaccacgccaggccctgtgtaacttgttatattcatctaagactgatacag

SEQ ID NO: 75443 - DNA, 1064 bp, Homo sapiens
gccaaggcaggcagatcacgaggtcaggagttcgagaccagcctggtcaacatggtgaaaccctgtctctactaaagatacaaaaaattagccgggcatggtagtgggtacctgtaatcccagctactcgggagactgaggcaggagaatcatatgaacccaggaggcggaggttgcaatgagccaagatcacaccatggccctccagcctgggtgacagggcgagattccatctcaaaaaaaaaaaaaaaaatccatcttttaatttaattcctcaggtgattctgactataggccaggtttagaaaccacaggtttaaatcatggaaaatatgtagagtagaaagagaaaatagaaaagtttgaatgacactgtgctgatattaaaagtttcaactatgttaatacatattcttttgattttaataatctgatagaatggctataatcagtgtggaattgattgtatctactaagctaaaatcaacactgaaaattcagacaactgttttacggttgtatactccattttatttagcaaggtttttcttccatatctatgcaggttatatcaaatattttttttcttagctaagtacctagagagaaatttttccctaagcatataaaattctgcattgcctagatccaccaaaatattaaacttggaagagttgatataaaatggcctgtgatttaaagtctcttctccaaattgagatgcaaagaattgagaatatataaaagctacctccatgaattaaaatttgcaaaaaggctaagagtcttatgttggagtccttgccctgatacctcagattgtgacagtatttgaagataagacctataaaagaggtgataaagttaaattgagacatttagggtaggtcctaaacttccctaatccagtctgactggtgtcttcacaagaggagggaatttgggcacacagagacacgagagacacacccacacacccacacacgcagaggaaaggccataagaagacacagcaagaagatgaccatctgcaagccaaggagagaggccttagatcaaaccag
